United States Patent Application Publication US 2004/0214272 A1 - sequence listing, part 46

SEQ ID NO: 204555 - protein, 38 aa, Zea mays
  Clone ID: MRT4577_118145C.1.pep
VLLPFIACCRLMCFCMHLVISSIFPRHVPLLIISQYFL

SEQ ID NO: 204556 - protein, 103 aa, Zea mays
  Clone ID: MRT4577_118146C.1.pep
DACSPLQTSHVDSVSPNHAHSSMASAEAEIRLQVSCSRSEPYRECRMSSSDHNDAYQTANREKNNYARNRELHTSCSGTLCAKSNDTVDEPAWARISRHARTG

SEQ ID NO: 204557 - protein, 206 aa, Zea mays
  unsure (1)..(206): unsure at all Xaa locations
  Clone ID: MRT4577_118147C.1.pep
AGRALDSATRHRTNPNLLSRYTIYLHSHFILIDPPTVPPPASPPFILLWHLLTQAVLFLIPCSACVAHGFDVISCVVCSPAWSQFVSDGVFFAELNEMLAEDGYSGVEVRVTPMCIEIIIRATRAQNILXEKGRRIRELASVIQKRFNLSEGGVELYAEKLNNRGLCDIAQAESLRYKLLGELAVRCACYGVLLFVIESGTKGCEV

SEQ ID NO: 204558 - protein, 146 aa, Zea mays
  unsure (1)..(146): unsure at all Xaa locations
  Clone ID: MRT4577_118148C.1.pep
ESSDLLNGCSQVNSSGSILLHRSSHFLYNCALYFIRLICAAVRVCRIKPVVNQRWVVAEVKPETDRGDREDGKSVVSESGSDEDSDGSGSEDSEDSEEERRREEERTRRLAERLAAMAACAIAERXDAXARLEGEKAGLEKLPAER

SEQ ID NO: 204559 - protein, 52 aa, Zea mays
  Clone ID: MRT4577_118149C.1.pep
CSMSISLEHHVCARKISDFAAFKILNFLIGILRLLPYMKIFILIKLSMTYRI

SEQ ID NO: 204560 - protein, 174 aa, Zea mays
  unsure (1)..(174): unsure at all Xaa locations
  Clone ID: MRT4577_11814C.1.pep
QCIRTLAITFYRFRMSRPLFLCIMEGLQQQDSYFTQRVDATGLAGLRPLQKVCAAMRILAYGLPTDVVDEYIQIGESTARECLIHFCRALIXIFNRWYLRTPNEADALHAXHVXSESRGFKGMLGSIDCMHWEWRNCPTSWRGQFCGRNARPTLILEAVATYDLXIWHAXFGMP

SEQ ID NO: 204561 - protein, 88 aa, Zea mays
  Clone ID: MRT4577_118150C.1.pep
PASVKEPTASTTVILATTTTMIIVPAAALLTSARLCPSFPLSISTYIGNGRSSPWEVNLRDPCPGCSNFRCDILPSSSSLPVGVAARK

SEQ ID NO: 204562 - protein, 91 aa, Zea mays
  Clone ID: MRT4577_118151C.1.pep
VAPAAPAAAHQIACPLTWSPPPPTASRLRSLAAPATKASTGGFKAAPQGGRLPLPPLHLRPQPRLLLLQLQLNRSGDGARKSSGPRRVVLI

SEQ ID NO: 204563 - protein, 136 aa, Zea mays
  Clone ID: MRT4577_118152C.1.pep
MARTKQTARKSTGGKAPRKQLAAKAARKSAPATGGVKKPHRYKPGTVALREIRRYQKSTELLIRKLPFQRLVREIAQDFKTDLRFQSSAIGALQESAEAYLVSLFEDTNLAAIHAKRVTIQPKDIQLARRLRGERS

SEQ ID NO: 204564 - protein, 270 aa, Zea mays
  Clone ID: MRT4577_118153C.1.pep
MVADTESSDSLPGSSNAASEMPANGSIHRKSQEKPPKKTHKAEREKLKRDQLNDLFVELGSMLDLDRQNTGKATVLGDAARVLRDLITQVESLRQEQSALVSERQYVSSEKNELQEENSSLKSQISELQTELCARMRSSSLSQTSIGMSDPATHQQMWSSIPHLSSVAMAARPASAASPLHGQEGYSADAGQAGYAPQPQPRELQLFPGSSASSSPERERSSRLGSGQATPPSLTDSLPGQLCLSLLQPSQEASGGGGVVSPSREERRDG

SEQ ID NO: 204565 - protein, 53 aa, Zea mays
  Clone ID: MRT4577_118154C.1.pep
PNTRIARSVPVHCISGLGFHWTTTLIHAFCTGGRAVYNGARMPLSALWPWDLD

SEQ ID NO: 204566 - protein, 220 aa, Zea mays
  Clone ID: MRT4577_118155C.1.pep
MLLLRCLLMDLDRQNTGKATVLGDAARVLRDLITQVESLRQEQSALVSERQYVSSEKNELQEENSSLKSQISELQTELCARMRSSSLSQTSIGMSDPATHQQMQMWSSIPHLSSVAMAARPASAASPLHGQEGYSADAGQAGYAPQPQPRELQLFPGSSASSSPERERSSRLGSGQATRPSLTDSLPGQLCLSLLQPSQEASGGGGGGVMSRSREERRDG

SEQ ID NO: 204567 - protein, 177 aa, Zea mays
  unsure (1)..(177): unsure at all Xaa locations
  Clone ID: MRT4577_118156C.1.pep
TIFRCRSIHRKSQEKPPKKTHKAEREKLKRDQLNDLFVELGSMLXRCLADREPFLLITSMVVAMKRTANLSTKFFKIXLDRQNTGKATVLGDAARVLRDLITQVESLRQEQSALVSERQYXSEKNELQEENSSLKSQISELQTELCARMRSSSLSQTSIGMSDPGTHQQMQMWSSIP

SEQ ID NO: 204568 - protein, 567 aa, Zea mays
  Clone ID: MRT4577_118157C.1.pep
MDFELRQAREKLEREQRERMQRAKAKAERESLAKAEAARRQEALEASHRERRLDAARAQEEADRTMEEVMQLGKGISFSHMFEALRYDGPGDKIKLPPSSFKELSDEGALDKGPMYFRLSKVRDTVPGAAMEQDAGTTCCGVLEFTAREGSAELPLHVWNNLFGSDTPEVPLIEVKYTSLLKGTYAKLKPEGGGFSDLPNHRAVLETALRNHATLSENDTVVVNYGQLQYKLKVLELKPASSVSVLETDVEVDIVGSDSVLDNEDDQHVLVPLVIGNIESSVVEEGKFRYYKFSVEGNVSEKVASGHANIEIKIDTDASGGDTDIYVSRHPLVFPTQHRHEWSSHEMGSKVLILKPRDATLVSGVYSIGVYGFKGTSKYQLSVAIKDVSGQRIGEYASASGSVDFDSVLCRNCKRHIASQSAHLHEAYCMRHNVACSHDGCGVVLRKEEAADHVHCNKCGRAYQQREMEKHMKVFHEPLQCPCGVVLEKEDMVQHQSLTCPLRLIVCRFCGDTVQAGGEPSDVRDRMRNMSEHESICGSRTAPCDSCGRSIMLKEMEIHLIAVHQKS

SEQ ID NO: 204569 - protein, 65 aa, Zea mays
  Clone ID: MRT4577_118158C.1.pep
LPACAHPATFYPPASPRWPPRIICLGSRSVEAEAPAHQRSFLDLNLGGRRDQSSVLCGAVERGKI

SEQ ID NO: 204570 - protein, 42 aa, Zea mays
  Clone ID: MRT4577_118159C.1.pep
NHNLTLICSRPPLNPHATGRPSVLTPPAAPPLMPARLCIYNR

SEQ ID NO: 204571 - protein, 43 aa, Zea mays
  Clone ID: MRT4577_11815C.1.pep
DGQLDWRDARVSKARSTRRRSSGGVVAGRCLGVRAQGGHVVIT

SEQ ID NO: 204572 - protein, 61 aa, Zea mays
  Clone ID: MRT4577_118160C.1.pep
MVIDYGVMTTPGIDEVEHVLDPLFPASGLINEGAVEEHVVMRLAHPYNVLDVLLVIQYGRV

SEQ ID NO: 204573 - protein, 60 aa, Zea mays
  Clone ID: MRT4577_118161C.1.pep
AVVTTQSTFFFFFFFFLETPLYVSFSKKNNRPHYFFRALQGKRGRFLLFGLVGSHKSGGE

SEQ ID NO: 204574 - protein, 113 aa, Zea mays
  unsure (1)..(113): unsure at all Xaa locations
  Clone ID: MRT4577_118162C.1.pep
FWFWLRXFWXXXRLSLSWFSXPGLLPCPXVXCFLXLXVXXGPPRSFSPWSXXXFPSLCCSSXXLXSSCXLXAFXSSSPRAAXAALPXVGGGGAAPPPRCGSWXXXLCAXFFCF

SEQ ID NO: 204575 - protein, 89 aa, Zea mays
  Clone ID: MRT4577_118163C.1.pep
HPSTDRSPQTTPPGEATRQPRGGRNKLTASQGRGRTVLLRRPVRAPPGRAAHLVHDQWINWHGCSGHISARRNARRAGRTRRLHVPAPR

SEQ ID NO: 204576 - protein, 59 aa, Zea mays
  Clone ID: MRT4577_118164C.1.pep
TPPELHGFLFRLVKLAARAFYDDVLMKGDNQAKTSRGDNRGMGRRRLEALTKPPGFEED

SEQ ID NO: 204577 - protein, 41 aa, Zea mays
  Clone ID: MRT4577_118165C.1.pep
HLLTYRPFILKQIHPPCLISYNENSAIGIVVMRLTCHHKRS

SEQ ID NO: 204578 - protein, 42 aa, Zea mays
  Clone ID: MRT4577_118166C.1.pep
SMMIPTSMAGYILLSSLLSPTMSYRNYSLPILREIPHLRAIG

SEQ ID NO: 204579 - protein, 65 aa, Zea mays
  Clone ID: MRT4577_118167C.1.pep
CPTTHYGGRAAAQRTWACSAPCLLQAVAAAEPAPRLQLLLMHKLRLLNDKTKIKAAAHSTKGRGG

SEQ ID NO: 204580 - protein, 60 aa, Zea mays
  Clone ID: MRT4577_118168C.1.pep
TTKNVNKNPPHKKIKKKKKKKKKKKKKKKKKKKKKKKKKKKKKKKKKKKKKLVLAATSKG

SEQ ID NO: 204581 - protein, 83 aa, Zea mays
  Clone ID: MRT4577_118169C.1.pep
MLAMVGLSKQEARKKPKSLPVPGSQLVLGPGQGPERGGPNKVDLGDLLRGAGPFKTFLDYLQKTGVMKTFQSQANDTKRGGLT

SEQ ID NO: 204582 - protein, 109 aa, Zea mays
  Clone ID: MRT4577_11816C.1.pep
KKKKKKKEKRIKKKKKKGHPILQETGLSFPCIQLHTSSIGSLFFFFFSLFLQLLFWQIPGVPYLNPFASHPCFPIWPFILKARTNLPFYPFLMLIGKFYPPFFRPLSSL

SEQ ID NO: 204583 - protein, 91 aa, Zea mays
  Clone ID: MRT4577_118170C.1.pep
THLESCFVPPRPPPHRPIGQYYHWQVSLSHKFTADGMLWLLDGEGFEGELDGWSCWWGWYSIVHALELLVAVTVHRAPVKSLYPQPSKRGD

SEQ ID NO: 204584 - protein, 40 aa, Zea mays
  Clone ID: MRT4577_118171C.1.pep
MNEHQMTSQFALPQMLPVVWEKKCVITDHHRADSTDPSLS

SEQ ID NO: 204585 - protein, 95 aa, Zea mays
  unsure (1)..(95): unsure at all Xaa locations
  Clone ID: MRT4577_118172C.1.pep
MAKIKIGINGLGMIRKLASRVALQSDDDELVAVXNEPIISSDYMTYMLTYGTVHGQWYHHEVTVKDSKTLHIGEQEAAMFGYKNPEAIPXGSIGA

SEQ ID NO: 204586 - protein, 99 aa, Zea mays
  Clone ID: MRT4577_118173C.1.pep
DVLGRLMVFELVILMGGTKPVRAWVLVKLTDLRSLHNYIDAIDLCRSLGACCDPARITPVERSELYCYDEPSDAVVWYPVRCGDNQYVSVRSASHQFGL

SEQ ID NO: 204587 - protein, 92 aa, Zea mays
  Clone ID: MRT4577_118174C.1.pep
TMGASGNPGSQETKTLISFGDSNASLSQKQMTCSGAICFCPAISSGFAFDDLPPFVSALWAPFFSSETLPATDTALALSGAVPLASFLNAFL

SEQ ID NO: 204588 - protein, 74 aa, Zea mays
  unsure (1)..(74): unsure at all Xaa locations
  Clone ID: MRT4577_118175C.1.pep
ARNPSRDLFHTFLYTPRLXPWSDWGYLTHRWRYNLQILMLGFHRGFAQLVGKPTXFLLFLTRIMNSWFTPRIAQ

SEQ ID NO: 204589 - protein, 38 aa, Zea mays
  Clone ID: MRT4577_118176C.1.pep
FLNVNMQLYSGVEVGTVALHDKSSPPRAKQTRTIKRTH

SEQ ID NO: 204590 - protein, 66 aa, Zea mays
  Clone ID: MRT4577_118177C.1.pep
SRFSNEVYVSSIELQSYDVLSFFPNQQDINEIHELIVLLSYSFGIDDWCMGNVPLGANGKGNKDDL

SEQ ID NO: 204591 - protein, 37 aa, Zea mays
  Clone ID: MRT4577_118178C.1.pep
MARAAAFGLLPFILSETFLWTAYSMKLNDNISSEHSI

SEQ ID NO: 204592 - protein, 505 aa, Zea mays
  Clone ID: MRT4577_118179C.1.pep
MEMEGRGLSDLFRNTSEEIFLKAVMENSMGVAAAPSMEMLGFKNTSRSLREDSEELFNNWLMNGEIPGFGSVNNHPRQPSRLSSEAAGLPNQQHDIAQQSFLTDNLVPQNLTIPSVEYPNNHNQQSLKNAAEKGMQASDLLLAKAWFHSTQPMTRSRSSELRRRYAAMQTNMAPITIGSIETPNQLKQDFTNTTNITPMSNTLVHTPKFVSPSSSSTSPLDNPHVAAQDTVTSVVSMLKDTLERKKLGSHANKDTSAGNSFGFYDTQQFQQNILGGTDFFPIVTTAQVQDSLMLPKVDRPMEPNNGNFVAPANQVWFSAASREPSHSGSSTAMTTHSAGFEMCDELPPAAQAMSVCESTRKNAANGTTDCKSKGKEYRERVQKDNLKDGRKKAALTRIGSISSEQAADNGDPTKKRRVERSRKMAEAKERSSTPVIPSDMQAVLKRCETLEKEVRSLKLNLSFMNRKDSEQTKQIEELQKQNEDLAEEKERLVEEIERIVSDPNT

SEQ ID NO: 204593 - protein, 176 aa, Zea mays
  unsure (1)..(176): unsure at all Xaa locations
  Clone ID: MRT4577_11817C.1.pep
MMAEAWVDVLPPPAPYFAGQPCWAVQQERRGGGAWTLEENKVFEEALAAIDLDAPDRWEMVALMLPRKTVADVVNHYRALENDVGFIEAGLVPFPHYDSSSPSSGFTLDWXDGGAAGAGGFRRGYCLKRGRADQERKKGVPWTEEEHRLFLKGLKKYGIGDWRNISRNYLTSRTPT

SEQ ID NO: 204594 - protein, 104 aa, Zea mays
  Clone ID: MRT4577_118180C.1.pep
KKGWAPLPLKERGNRGLKKARGPCKKGGVLGKVSGPRGFFPCFKKKKKNFFCPCLKKKNVMGPPNWALVALPLVNPGARERCPKKNRNRGGPLGPLQNLLEFKN

SEQ ID NO: 204595 - protein, 135 aa, Zea mays
  Clone ID: MRT4577_118181C.1.pep
MVPFAGDHSLLSFRKVHSGYSIPGFGSVNNHPRQPSRLSSEAAGLPNQQHDIAQQSFLTDNLVPQNLTIPSVEYPNNHNQQSLKNAAEKGMQASDLLLAKAWFHSTQPMTRSRSSELRRRYAAMQTNMAPNNIGS

SEQ ID NO: 204596 - protein, 70 aa, Zea mays
  Clone ID: MRT4577_118182C.1.pep
RLESGSRLLLSGYASAPLVYLGVPDPCSRGRPRVVNDDVCRQCSCSSSSSFPAAARAWWVSLSSSRRPVR

SEQ ID NO: 204597 - protein, 159 aa, Zea mays
  Clone ID: MRT4577_118183C.1.pep
MGNLVSQCVGNGAGARPLVIGATDGSRTMVEENTAVAELMIDAPGHVVARATDVARERRLRAMAADEVLRAGVVYLLVPAGRAGARLGGREVEAIGRLVSGKKGSRKSRPGGGRRVFPDVSAEEDAAERKEVVCAVKRAHDHGFGPRQWRPALDTIYEA

SEQ ID NO: 204598 - protein, 97 aa, Zea mays
  Clone ID: MRT4577_118184C.1.pep
PTRTHTRARRPVRIIQGPSQSYEECKLKEIKNGRLAMLDIARLRFQHTDIPISVPLDNLGGQLCERCHNNMLRHASSLDRSAMDRNTGRLLLLGTTH

SEQ ID NO: 204599 - protein, 94 aa, Zea mays
  unsure (1)..(94): unsure at all Xaa locations
  Clone ID: MRT4577_118185C.1.pep
MCGILAVLGCAYEAKGSSNRSRVLDLSRWMEHRGCDCIGIRHVSNCYISHHRLPIIDATSGDILVYNEDXSVDFNICDYIYNHLCFRSSFSCAC

SEQ ID NO: 204600 - protein, 32 aa, Zea mays
  Clone ID: MRT4577_118186C.1.pep
RSRITLIEDDPLRYWSLIHFALPDAFLMEQNI

SEQ ID NO: 204601 - protein, 242 aa, Zea mays
  Clone ID: MRT4577_118187C.1.pep
MAEQLISTAVHHTLPDSYVRSEADRPRLDEVVPDADIPVVDLANPDRAAVVAQIGAACSSHGFFQVLNHGLPLEVMLAAMAVAHDFFRLSPEEKAKLYSDDPAKKMRLSTSFNVRKETVHNWRDYLRLHCHPLEQFVPEWPANPPPFRDVMSTYCKEVRQLGFRLYAMISESLGLEQDYIKKVLGEQEQHMAVNFYPKCPSPELTYGLPAHTDPNALTILMMDEQVAGLQVLKEGRWIARHP

SEQ ID NO: 204602 - protein, 89 aa, Zea mays
  unsure (1)..(89): unsure at all Xaa locations
  Clone ID: MRT4577_118188C.1.pep
VLLXVSAXCXGGPAXXXXVPFXLGPVXWVXSGSSXLGXCXLGAWXFFXLGXXFRXXXVAXLGXCCXAVXLXLVXXFRCXXGXXLPCSRA

SEQ ID NO: 204603 - protein, 1483 aa, Zea mays
  Clone ID: MRT4577_118189C.1.pep
MEDSLAIRTSYCSEVEGFPHLLRSCALRMGIRKKPEYVWTEHIEGGMEKCSMAVYLGESRNYPNHPSFQVTFTGYRFPDTCQDVARKALRQLCQNYNKVIFETPLRYFPPSNKNTPTWRKRLQALSGGDPIENDPTIVYMAGYLHTLDNQYDDLALHCTSLTSRVESLEQKVRELSEEKASLQESLSIAEGEETNTREAYRTLKMDYDKKLKKLAPARKIRKKTKSQGCQIEQKEENPPRNPSDTEEMSLASLDDLLKEFGDTLEKEFGSTLDSTRMASDKTTPTASRIGARLPLGAKGEAGGEGGETHLPAPPKLPLDLAQVLASQTRLIEVLTRSLENQHPGGGRPQDRMGEFLRLKPPTFAGSSNPLDADDWLRTIKRKLEAIACPENQRVQLAAHQLSGMALAWWDTFSEAGIVQLKEDEFRELTQGGRTVSEYVHKFTELARYAPEDVSTEARKMAHFLRGLRPELKPILASQDFHSFSHLSNKAIQVERAKEEEKGHIKRKFQVLRAQQQEHLTILPSQGIDVILGMDWLAKHKGIISCASKTVLLTDHQGKAVSCQAQPPANDPMMFNLAAENMSVIEEFEDVFPEELPGMPPERGVEFYIDLIPGTAPIAKRPYRMAPTELAELKLQISELQQKGYIRPSSSPWGAPVLFVTKKDGSMRMFIDYRSLNEVTIKNKYPLPWIDDLFDQLQGAKYFSKIDLRYGQYEFTVMPFGLTNAPAFFMNLMNKVFMEELDKFVVVFIDDILIYSKNRKDHERHLRIVLGRLRAHQLYAKLSKCEFWLEKIAFLGHILTVEGIEVDPSKVEAVSNWKQPSNVSEVRSFLGMAGYYCRFIKGFSSIAKPMTELLKKDNKFVWTPKCEESFQIIKEKLTTAPVLTLPDIHQDFVIFCDASKQGLGCVLMQNEKVIAYASRLLKPHEQNYPTHDLELAAIVHALKIWRHYLIGNKCHIFTDHKSLKYIFTQPDLNLRQIRWLELIKDYDLEIHYHPERPTCSSLEVKPNLDDLICKAQRLDAETARLMERARKEQLPDLRIDKQGVLWFKNRLCVPVGEARETLLNEAHNSAYSIHPGTTKMYLDLKARYWWKGMKKEIAQYVARCDTCQRTKAEHQKPAGLLQPLPIPEWKWEEIGMNFVTGLPRSRKGNDSIWVIIDRLTKVAHFVPVKTTFGGAALARIYLKEIVRLHGIPRKIVSDRGTQFTSKFWKGLQQAMGTKLDFSTAYHPQSDGQTERVNKVLEDLLRACVLTFKRDWESSLPYAEFSYNNSHQATIKMSPFEALYGRKCQTPLMWSNVGERTLEGPDFVKEAEEKVALIRRRLLEAQSRQISYTDNRRRELRFEEGDFVYLKVSPMRGVKRFQMKGKLAPRFVGPYPVISRIGPAAYRLELPESMSDIHNVFHVSQLRKCLKVPETRIEADAIQIQKDLQYREKPVKILDSAVRRTRNSEVKLCKVQWSRDEEEEATWESEDSLRKEYPYLFSSPV

SEQ ID NO: 204604 - protein, 34 aa, Zea mays
  Clone ID: MRT4577_11818C.1.pep
LPHTADSIRWKLLGAFADASIFTQRNWENQCGPR

SEQ ID NO: 204605 - protein, 179 aa, Zea mays
  unsure (1)..(179): unsure at all Xaa locations
  Clone ID: MRT4577_118190C.1.pep
KLFLQVDKAKHQYENLLLSSACETVLEIGDLGNLYIDEQAPWSCFKQGGESAEKAAKDLVLILETMRIIAITLSPITPSLSLRIYTQLGFTEDQFRVLRWEDTKWGGLKAGQVMSEPKPVFARIETEVEEEXKQVQKQQKVGRKHAGKDLWRHSFCWNSVSASLKGEYFIFSFFWKKNL

SEQ ID NO: 204606 - protein, 1255 aa, Zea mays
  unsure (1)..(1255): unsure at all Xaa locations
  Clone ID: MRT4577_118191C.1.pep
DPPPXPPELPLDLAQVLANQTRLIEVLTRSLENQRPGGGRPQDKMGEFLRLKPPTFAGSSNPLDANDWLRTIKRKLEAIACPENQRVQLAAHQLSGMALAWWDTFSEAVRDATWAEFEAAFREHHFTELARYAPEDVSTEARKMARFLRGLRPELKTILASQDFHSFSHLSNKAIQVERAKEEEKGHIKRKFQVLRAQQQERHQRARPLGLPPRGPSFNKQSGPTPSRYSQQSQSSLQAPSVASNQPPANACWHCGDPSHFKNNCPQLKASGPTYSNSVNGPKIPSAPTPKALPSSSQQSRTQYQGRARVNHVDAQEAQQAPGVVLGASHSFIAAKFVEKHGIPSTPLAIPLVTRTPRSDLLCKLRCSQVRILLSGVVFLADLTILPSQGIDVILGMDWLAKHKGIISCASKTVLLXRSPRKSSFLSSPTARKRSNDVXNLIAESMSVIKEFEDVFPEELPGMPPERGVEFYIDLIPGTAPIAKRPYRMAPTELAELKLQISELQEKGYIRPSSSPWGAPVLFVTKKDGSMRMCIDYRSLNEVTIKNKYPLPRIDDLFDQLQGAKYFSKIDLRSGYHQLRIKEADIQKTAFNTRYGQYEFTVMPFGLTNAPAFFMNLMNKVFMEELDKFVVVFIDDILIYSKSRKDHEHHLRIVLGRLRAHQLYAKLSKCEFWLEKIAFLGHILTAEGIEVDPSKVEAVSNWKQPSNVSEVRSFLGMAGYYRRFIKGFSSIAKPMTELLKKDNKFMWTPKCEESFQIIKEKLTTAPVLTLPDIHQDFVIFCDASKQGLGCVLMQNEKAIAYASRLLKPHEQNYPTHDLELAAIVHALKIWRHYLIGNKCHIFTDHKSLKYIFTQPDLNLRQRRWLELIKDYDLEIHYHPGKANVVADALSRKPFGVKGTNFLEDWKRESAQLNACLGDNGGLEVKPNLEDLICKAQRLDAETARLMGRARKEQLPGLRTDEQGVLWFKNRLCVPVGEARGTLLNEAHNSAYSIHPGTTKMYLDLKARYWWKGMKKEIAQYVARCDTCQRTKAEHQKPAGLLQPLPIPEWKWEEIGMDFVTGLPRSQRGNDSIWVIIDRLTKVAHFVPVKTTFGGAALARIYLKEIVRLHGIPRKIVSDRGTQFTSKFWKGLQQAMGTKLDFSTAYHPQSDGQTERVNKVLEDLLRACVLTFDRDWESSLPYAEFSYNNSHQASIKMSPFEALYGRKCQTPLMWSNVGERTLEGPDFVKEAEEKVALIRRRLLEAQSRQKSYADNR

SEQ ID NO: 204607 - protein, 92 aa, Zea mays
  Clone ID: MRT4577_118192C.1.pep
KSLLHLTNTELGARSVLHQWTLAPPPSRWSRRTVLEAPLLLLEKRAGTTSATVNCDEATTTMKPCLVNTMGITTNPLHHEMQQDELNPNPQD

SEQ ID NO: 204608 - protein, 51 aa, Zea mays
  Clone ID: MRT4577_118193C.1.pep
FIFFFFFFFFFFFFFFFFFFFFRNKSSPKISNGHWVFLSCSPPYPKQQISN

SEQ ID NO: 204609 - protein, 941 aa, Zea mays
  Clone ID: MRT4577_118194C.1.pep
MSPEKPSDSYVRTTTNNKNIPTWRKRLQALSGGDPIENDPTIVYMAGYLHTLDNQYDDLALHCTSLTSRVESLEQKVRELSEEKASLQESLSLAEGEETNTREAYRTLKMDYDKVLKKLAPARKIRKKTRSQGCQTEQQEENPPRNQSDTEDMSLASLDDLLKEFGDTLEKEFGATLFPWQMASDRTTPTASGIGARLPLGAEGEAGGEGGETHLPAPPELPLDLAQILANQTRLIEVLTRSLENQRPGGERPQDRMGEFLRLKPPTFAGSSNPLDADDWLRTIKRKLEAIACPENQRIQLAAHHLSGMALAWWDTFSEAIRDATWAEFEAAFREHHVPQGIVQLKEDEFRELTQGGRTISEYVHKFTELARYAPEDVSTEARKMARFLRGLRPELKTILASQDFHSFSHLSNKAIQVERAKEEEKGHIKRKFQVLRAQQQERHQRARPFGLPPRGPSFHKQSGPSPSRYSQQSQSSHQAPSVASNQPPANACWHCGDPSHFKNNCPQLKAPGPTYSNSVNGPKIPSAPTPKAFPSSSQQSRAQYQGRARVNHVDAQEAQQAPGVVLGEFLVEFTPASVLFDSGASHSFIAAKFVEKHGIPSTPLAIPLVTRTPGSDLLCKLRCSQVRILLSGVVFLADLTILPSQGIDVILGMDWLAKHKGVISCASKTVLLIDHQGKAVSCQAQPPANDPMIFNLAVESMSVIKEFEDVFPEELPGMPPEREGLQQAMGTKLDFSTAYHPQSDGERTLEGPDFVKEAEEKVALIRRRLLEAQSRQKSYADNRQRELRFEEGDFVYLKVSPMRGVKRFQMKGKLAPRFVGPYPVISRIGPVAYRLELPESMSDIHNVFHVSQLRKCLEVPETRIEAEAIQIQKDLQYREKPEKILDSAVRRTRNSEVKLCKVQWSRDGEEEATWESEDSLRKEYPYLFSSPVRISRARFL

SEQ ID NO: 204610 - protein, 94 aa, Zea mays
  Clone ID: MRT4577_118195C.1.pep
ICCTLQPLHYLTQESALEGEARGTRPHQPNIKDTIGTAAPAAPTPHRRLHLHGHPLRRTVDHQAPHIIPEFSSSSGMTPSPPPPSSSFSSFCLF

SEQ ID NO: 204611 - protein, 55 aa, Zea mays
  Clone ID: MRT4577_118196C.1.pep
KLFLQVDKAKHQYENLLLSSACETVLEIGDLGNLYIDEQAPWSCFKQGGESAEKL

SEQ ID NO: 204612 - protein, 1293 aa, Zea mays
  unsure (1)..(1293): unsure at all Xaa locations
  Clone ID: MRT4577_118197C.1.pep
DPPPXPPELPLDLAQILANQTRLIEVLTRSLENQRPGGGRPQDRMGEFLRLKPPTFAGSSNPLDADDWLRTIKRKLEAIACPENQRVQLAAHQLSGMALAWWDTFSEAIRDATWAEFEAAFREHHVPQGIVQLKEDEFRELTQGGRTVSEYVHKFTELARYAPEDVSTEARKMARFLRGLRPELKTILASQDFHSFSHLSNKAIQVERAKEEEKGHIKRKFQVLRAQQQERHQRARPFGLPPRGPSFHKQSGPSPSRFSQQSQSSHQAPSVASNQPPANACWHCGDPSHFKNNCPQLXRHQGQPTPXSVNGPKVPSAPTPKALPSNSQQSRTQYQGRAREFEDVFPEELPGMPPEREVEFYIDLIPGTAPIAKRPYRMAPTELAELKLQISELQQKGYIRPSSSPWGAPVLFVTKKDGSMRMCIDYRSLNEVTIKNKYPLPRIDDLFDQLQGAKYFSKIDLRSGYHQLRIKEADIQKTAFVTRYGQYEFTVMPFGLTNAPAFFMNLMNKVFMEELDKFVVVFIDDIIIYSKNRKDHEHHLRIVLGRLRAHQLYAKLSKCEFWLEKIAFLGHILTAEGIEVDPSKVEAVSNWKQPSNVSEVRSFLGMAGYYRRFIKGFSSIAKPLTELLKKDNKFVWTPKREESFQIIKEKLTTAPVLTLPDIHQDFVIFCDASKQGLGCVLMQNEKVIAYASRLLKPHEQNYPTHDLELAAIVHALKIWRHYLIGNKCHIFTDHKSLKYIFTQPDLNLRQRRWLELIKDYDLEIHYHPGKANVVADALSRKPFGIKGANFLEDWKKESAQLNACLGDNGSLEVKPNLEDLICKAQRMDAETTKLMERARKEQLPDLRADNQGTLWFRDRLCVPVGETRETLLNEAHNSAYSIHPGTTKMYLDLKARYWWKGMKREIAQYVARCDTCQRTKAEHQKPAGLLQPLPIPEWKWEEIGMDFVTGLPRSQRGNDSIWVIIDRLTKVAHFIPVKTTFGGAALARLYLKEIVRLHGIPRKIVSDRGTQFTSKFWKGLQQAMGTKLDFSTAYHPQSDGQTERVNKVLEDLLRACVLAFDRDWESSLPYAEFSYNNSHQASIKMSPFEALYGRKCQTPLMWSNVGERTLEGPDFVKEAEEKVALIRRRLLEAQSRQKSYADNRRRELRFEEGDFVYLKVSPMRGVKRFQMKGKLAPRFVGPYPIISRIGPVAYRLELPESMSDIHNVFHVSQLRKCLKVPETRIKAEAIQIQKDLQYREKPVKILDSAVRRTRNLEVKLCKVQWSRDGEEEATWESEDFLRREYPYLFPNTV

SEQ ID NO: 204613 - protein, 37 aa, Zea mays
  Clone ID: MRT4577_118198C.1.pep
VALASTATTVTTANAFAATAVMGLVVGDVSSVHPYAW

SEQ ID NO: 204614 - protein, 1408 aa, Zea mays
  unsure (1)..(1408): unsure at all Xaa locations
  Clone ID: MRT4577_118199C.1.pep
DPPPXPPELPLDLAQILANQTRLIEVLTRSLENQRPGGGRAQDRMGEFLRLKPPTFAGSSNPLDADDWLRTIKRKLDAIACPENQRIQLAAHQLSGMALAWWDTFSEAIRDATWAEFEAAFREHHVPQGIVQLKEDEFRELTQGGRTVSEYVHKFTELARYAPEDVSTEARKMARFLRGLRPELKTILASQDFHSFSHLSNKAIQVERAKEEEKGHIKRKFQVLRAQQQERHQRARPFGLPPRGPSFHKQSRXSIALQSTESELPSGTLRCKQPAASKRLLALRGPQSLQEQLPPVEGTRTNLLQLGECPQXPSAPTPKAFPSSSQQSRAQYQGRARVNHVDAQEAQQAPGVVLGEFLVEFTPASVLFDSGASHSFIAAKFVEKHGIPSTPLAIPLVTRTPGSDLLCKLRCSQVRILLSGVVFLADLTILPSQGIDVILGMDWLARHKGVISCASKTVLLXRSPRKGSFLSSPTAXNDPMIFNLAVESMSVIKEFEDVFPEELPGMPPEREVEFYIDLIPGTAPIAKRPYRMAPTELAELKLQISELQQKGYIRPSSSPWGAPVLFVTKKDGSMRMCIDYRSLNEVTIKNKYPLPRIDDLFDQLQGAKYFSKIDLRSGYHQLRIKEADIQKTAFVTRYGQYEFTVMPFGLTNAPAFFMNLMNKVFMEELDKFVVVFIDDILIYSKSRKDHEQHLRTVLGRLRAHQLYAKISKCEFWLEKIAFLGHILTAEGIEVDPSKVEAVSNWKQPSNVSEVRSFLGMAEYYRRFIKGFSSIAKPMTELLKKDNKFVWTPKCEESFQIIKEKLTTAPVLTLPDIHQDFVIFCDASKQGLGCVLMQNEKVIAYASRLLKPHEQNYPTHDLELAAIVHALKIWRHYLIGNKCHIFTDHKSLKYIFTQPDLNLRQRRWLELIKDYDLEIHYHPGKANVVADALSRKPFGVKGANFLEDWKKESAQLNACLGDNGSLEVKPNLEDLICKAQRLDAETTKLIERARKEQLPDLRTDNQGALWFKDRLCVPMGETRETLLDEAHNSAYSIHPGTTKMYLDLKTRYWWKGMKREIAQYVARCDTCQRTKAEHQKPAGLLQPLPIPEWKWEEIGMDFVTGLPRSQRGNDSIWVIIDRLTKVAHFIPVKTTFGGAALARLYLKEIVRLHGIPRKIVSDRGTQFTSKFWKGLQQAMGTKLDFSTAYHPQLDGQTERVNKVLEDLLRACVLAFDRDWESSLPYAEFSYNNSHQASIKMSPFEALYGIKCQTPLMWSNVGERTLEGPDFVKEAEEKVALIRRRFQMKGKLAPRFVGPYPVISRIGPVAYRLELPGSMSDIHSVFHVSQLRKCLKVPETRIEAETIQIQKDLQYREKPVKILDSAVRRTRNSEVKLCKVQWSRDGEEEATWESEDSLRKEYPYLFSSPV

SEQ ID NO: 204615 - protein, 39 aa, Zea mays
  Clone ID: MRT4577_11819C.1.pep
PNTNINELASKFFFKMHGNSREMGSIERTYLASTVVHGS

SEQ ID NO: 204616 - protein, 390 aa, Zea mays
  unsure (1)..(390): unsure at all Xaa locations
  Clone ID: MRT4577_1181C.1.pep
RSLVPYTLDDLQXYLNKFEPSYYTKNGKDPLVYPYILFLSIQLLPAILYLSKEVGEDGYHVDAVHISIALADHSVLPDGIGSGQKIGVMDACAEAASIIRQYGSIYLRNGNIDLALEYYAQAAAAMGGGEASWIGEGHADKQRQRSLMLKQLLMEILLRDGGIQLLLGPSGMGEEGELKKYMMDWRSRQQFLLEAAHRCQEAGLYDKAVEIHKRVGAFAMALQTINKCLSDAVCAMARSMLDGESRAAALIHSGNEILETARYSSEASIQEKDLISEQQTVLRQLEAILHIYRLARAGQTVDALRETIRLPFLHLDPKAPNVTVDIFRNLSPHVQACVPDLLKVALNCIDNVRDTDGTLRAVKSKIANLVASNMSRNWPQDLYQKVAQCI

SEQ ID NO: 204617 - protein, 97 aa, Zea mays
  Clone ID: MRT4577_118200C.1.pep
LSYLPRSYPPFPLGRLPLTWPLGPAGNKVWTLCCWLFLITLFVICRQRQPPLRNLISFSACGVKCLYTGLYRISLFYCMHKHMIFVYCRFASSVLLV

SEQ ID NO: 204618 - protein, 62 aa, Zea mays
  Clone ID: MRT4577_118201C.1.pep
DLVNFIHCYAYRSPRFGAKYSCTSIIYRIMIILLYSCTYIFCVHEFAPAIRFCWSSVTKLHC

SEQ ID NO: 204619 - protein, 411 aa, Zea mays
  Clone ID: MRT4577_118202C.1.pep
MSPEKPSDSCARTTTNNKNTPTWRKRLQALSGGDPIENDPTIVYMAGYLHTLDNQYDDLALHCTSLTSQVESLEQKVRELSEEKASLQESLSLAEGEETNTREAYRTLKMDYDKMASDRTTPTASGIGARLPLGAEGEAGGEGGMALAWWDTFSEAIRDATWAEFEAAFREHHVPQGIVQLKEDEFRELNQGGRTVSEYVHKFTELARYAPEDVSTEARKMARFLRGLRPELKTILASQDFHSFSHLSNKAIQVERAKEEEKGHIKRKFQVLRAQQQERHQRARPFGLPPRGPSFHKQSGPSPSRFSQQSQSSHQAPSVASNQPPANACWHCGDPNHFKNNCPQLKAPGPTYSNSVNGPKVPSAPTPKAFPSSSQQSRAQYQGRARVNHVDAQEAQQAPGVVLGVPKSEFF

SEQ ID NO: 204620 - protein, 194 aa, Zea mays
  unsure (1)..(194): unsure at all Xaa locations
  Clone ID: MRT4577_118203C.1.pep
PRTRSIVLSNAPAFLMNLMNKVFMAESDKFVVVFIDDILIYSKSRKDHEHHLXIVLGRLRAHQLYAKLSKCEFWLEKIAFLGHILTAEGIEVDPSKVEAVSNWKQPSNVSEVRSFLGMAGYYRRFIKGFSGIAKPMTELLKKDNKFVWTPKCEGSFQIIKERLTTAPVLTLPDIHQDFVIFCDASKQGLGCVLM

SEQ ID NO: 204621 - protein, 1046 aa, Zea mays
  Clone ID: MRT4577_118204C.1.pep
MARFLRGLRPELKTILASQDFHSFSHLSNKAIQVERAKEEEKGHIKRKFQVLRAQQQERHQRARPFGLPPRGPSFHKQSGPSPSRYSQQSQSSHQAPSVASNQPPANACWHCGDPNHFKNNCPQLKAPGPTYSNSVNGPKVPSAPTPKAFPSSSQQSRAQYQGRARVNHVDAQEAQQAPGVVLGASHSFIAAKFVEKHGIPSTPLAIPLVTRTPGSDLLCKLRCSQVRILLSGVVFLADLTILPSQGIDVILGMDWLARHKGVISCASKTVLLIDHQGKAVSCQAQPPANDPMIFNLAVESRSVIKEFEDVFPEELPGMPPEREVEFYIDLIPGTAPIAKRPYRMAPTELAELKLQISELQQKGYIRPSSSPWGAPVLFVTKKDGSMRMCIDYRSLNEVTIKNKYPLPRIDDLFDQLQGAKYFSKIDLRSGYHQLRIKEADIQKTAFVTRYGQYEFTVMPFGLTNAPAFFMNLMNKVFMEELDKFVVVFIDDILIYSKSRRDHEQHLRTVLGRLRAHQLYAKLSKCEFWLEKIAFLGHILTAEGIEVDPSKVEAVSNWKQPSNVSEVRSFLGMAGYYRRFIKGFSSIAKPMTELLKKDNKFVWTPKCEESFQIIKEKLTTAPVLTLPDIHQDFVIFCDASKQGLGCVLMQNEKVIAYASRLLKPHEQNYPTHDLELAAIVHALKIWRHYLIGNKCHIFTDHKSLKYIFTQPDLNLRQKRWLELIKDYDLEIHYHPGKANVVADALSRKPFGVKGANFLEDWKKESAQLNACLGDNGSLEVKPNLEDLICKAQRLDAETTKLIERARKGQLPDLRTDNQGALWFKDRLCVPMGETRETLLDEAHNSAYSIHPGTTKMYLDLKTRYWWKGMKREIAQYVAQCDTCQRTKAEHQKPAGLLQPLPIPEWKWEEIGMDFVTGLPRSQRGNDSIWVIIDRLTKVAHFIPVKTTFGGAALARLYLKEIVRLHGIPRKIVSDRGTQFTSKFWKGLQQAMGTKLDFSTAYHPQSDGQTERVNKVLEDLLRACVLAFDRDWESSLPVGDLFSNAMN

SEQ ID NO: 204622 - protein, 1412 aa, Zea mays
  unsure (1)..(1412): unsure at all Xaa locations
  Clone ID: MRT4577_118205C.1.pep
DPPPXPPELPLDLAQILANQTRLIEVLTRSLENQRPGGGRPQDRMGEFLRLKPPTFAGSSNPLDADDWLRTIKRKLEAIACPENQRVQLAAHQLSGMALAWWDTFSEAIRDATWAEFEAAFREHHVPQGIVQLKEDEFRELTQGGRTVSEYVHKFTELARYAPEDVSTEARKMARFLRGLRPELKTILASQDFHSFSHLSNKAIQVERAKEEEKGHIKRKFQSAESELPSGTLRCKQPAASKCLLALRGPQSLQEQLPPVEGTRTNLHQLGEWXPKVPXPHPPQGVSXPAASRAGLSTXRARVNHVDAQEAQQAPGVVLGEFLVEFTPASVLFDSGASHSFIAAKFVEEHGIPSTPLAIPLVTRTPGSDLLCKLRCSQVRILLSGVVFLADLTILPSQGIDVILGMDWLARHKGVISCASKTVLLXRSPRKGSFLSSPTAXNDPMIFNLAVESMSVIKEFEDVFPEELPGMPPEREVEFYIDLIPGTAPIAKRPYRMAPTELAELKLQISELQQKGYIRPSSSPWGAPVLFVTKKDGSMRMCIDYRSLNEVTIKNKYPLPRIDDLFDQLQGAKYFSKIDLRSGYHQLRIKEADIQKTAFVTRYGQYEFTVMPFGLTNAPAFFMNLMNKVFMEELDKFVVVFIDDILIYSKSRKDHEQHLRTVLGRLRAHQLYAKLSKCEFWLEKIAFLGHILTAEGIEVDPSKVEAVSNWKQPSNVSEVRSFLGMAGYYRRFIKGFSSIAKPMTELLKKDNKFVWTPKCEESFQIIKEKLTTAPVLTLPDIHQDFVIFCDASKQGLGCVLMQNEKVIAYASRLLKPHEQNYPTHDLELAAIVHALKIWRHYLIGNKCHIFTDHKSLKYIFTQPDLNLRQRRWLELIKDYDLEIHYHPGKANVVADALSRKPFGVKGANFLEDWKKESAQLNACLGDNDGLEVKPNLEDLIRKAQRLDAETTKLLERARKEQLPDLRTDNQGALWFKDRLCVPVGETRETLLDEAHNSAYSIHPGTTKMYLDLKTRYWWKGMKREIAQYVARCDTCQRTKTEHQKPAGLLQPLPIPEWKWEEIGMDFVTGLPRSQRGNDSIWVIIDRLTKVAHFIPVKTTFGGAALARLYLKEIVRLHGIPRKIVSDRGTQFTSKFWKGLQQAMGTKLDFSTAYHPQSDGQTERVNKVLEDLLRACVLAFDRDWESSLPYAEFSYNNSHQASIKMSPFEALYGRKCQTPLMWSNVGERTLEGPDFVKEAEEKVALIRRRLLEAQSRQKSYADNRRRELRFEEGDFVYLKVSPMRGVKRFQMKGKLAPRFVGPYPIISRIGPVAYRLELPESMSDIHNVFHVSQLRKCLKVPETRIEAEAIQIQKDLQYREKPVKILDSAVRRTRNSEVKLCKVQRSRDGEEEATWESEDSLRKEYPYLFSNPV

SEQ ID NO: 204623 - protein, 127 aa, Zea mays
  Clone ID: MRT4577_118206C.1.pep
SSMSRCSASCWRWPSGFFGSRSRLPCFMRAGVSCWRHPSRRPLVFPPCLKPAPSPSLFVAGQVFRFPSCGPCAFFSGCLLLRSSLLNLAAGCASARVRFFPYLKTASTKNTKTQIKKLETKIKTNNQ

SEQ ID NO: 204624 - protein, 73 aa, Zea mays
  unsure (1)..(73): unsure at all Xaa locations
  Clone ID: MRT4577_118207C.1.pep
VPSHNGCHYWDWVHKXLATGXKQKAWRMKRKYELVRQPVNTXLKXNKTGRRVHFLGGNVKWRALVLVTGNYLW

SEQ ID NO: 204625 - protein, 84 aa, Zea mays
  Clone ID: MRT4577_118208C.1.pep
ISFSIRSVILSPALARGAAILLGFPLHLQPPLRTLVPDGHEEPPCLSEVRPSRGDAHAQTPSKHMMPGSSRSLLICSRAGKRER

SEQ ID NO: 204626 - protein, 69 aa, Zea mays
  Clone ID: MRT4577_118209C.1.pep
ARNSARDQGHHVFFLPTDPDPRGAFVRSRAVRHDGRHLLPIPPAHAPDEPKHAHIDLTYDGGCATLGIR

SEQ ID NO: 204627 - protein, 100 aa, Zea mays
  Clone ID: MRT4577_11820C.1.pep
MERNNTTREKGCLEKKKKKKKKKKKKKKKKKKKKKKKKKTYPNKPPKTKKTKKFTKSSHQLHQKNIKHPIVQTKKPTTSACPPAPYNTRLPNSNINPLHI

SEQ ID NO: 204628 - protein, 59 aa, Zea mays
  Clone ID: MRT4577_118210C.1.pep
FILFCLFLGNIFKKDSRFFCLVLRNELTSICGERCFPNFMVKSLKGTIIRNQNEIGKKY

SEQ ID NO: 204629 - protein, 75 aa, Zea mays
  Clone ID: MRT4577_118211C.1.pep
ISFVLTPGSAASLLVVVPDAGASDDKVFFHCATAAWARCEFFLPRPPAVPAAILRAARCSLVRSDATACRSVARA

SEQ ID NO: 204630 - protein, 65 aa, Zea mays
  Clone ID: MRT4577_118212C.1.pep
EKKKQGPLILPWGAILKGWHKRVGGIKILILIQGPNQILLMGARHPKFFGLTYSLHAKGGGSQSC

SEQ ID NO: 204631 - protein, 285 aa, Zea mays
  Clone ID: MRT4577_118213C.1.pep
MGSLLIRACMVLVLGLCWLRSTGRTKRSNVLSWFGHGGGLVPFGITAKRRRSLIGFCQNEYGFPKLLRACTVRLGIRSQPEYDGHEFIEHGIEKCVMTVYIGSSPHHVEWSVIAARHRFRDTSQVVARKALRALCQIYKEVADTPLRIFLPFQRDRLVWMARMHSLEGQQLLEDDPTVVYLTAYLLTLDAQYDLLARHHRQMIAQAEDAERRNRQLHVDLTTTQARAAALESHEVIVVEALKQAKDEHIQKLIEAYLLTHNQRRALRIQEPASSNPVQPMRDEDP

SEQ ID NO: 204632 - protein, 91 aa, Zea mays
  Clone ID: MRT4577_118214C.1.pep
AGYVGCRPFSTPYAPSPAMTCRRAPRPVGSLALHRSPGSLLLCASSFAGPLCCGCPSPFCPPPFWRAAAFFSCRLLPDLWPFCLLSLPHAS

SEQ ID NO: 204633 - protein, 203 aa, Zea mays
  Clone ID: MRT4577_118215C.1.pep
GRSRRQAGKPHTTHTHTHTHTHTHNQYQIHKPAERKKMMSTKALTLGAVVVLAIAMAGAHAEQCGHAADGMECPNNLCCSAWGYCGMDANYCGDGCQSGACYEPKRCGAQAEGNAVTCPNNHCCSGNGYCGYGQEYCGDGCQNGPCRANIKCSADKPCLSNFCCSKYGYCGLGVEFCGQGCQSGACHDAVGAAALPLSSIVQG

SEQ ID NO: 204634 - protein, 84 aa, Zea mays
  unsure (1)..(84): unsure at all Xaa locations
  Clone ID: MRT4577_118216C.1.pep
ELRQATRAKDNKMTRMVPRHVLLSIRTYXELWKLMSAVTIVHGXGVLPNINPRLMPKNTSDNASSCASKEAKSAKKAAKSPNKA

SEQ ID NO: 204635 - protein, 219 aa, Zea mays
  unsure (1)..(219): unsure at all Xaa locations
  Clone ID: MRT4577_118217C.1.pep
MNPTRPAQASFRDRTNEFRAAVESARRHAAPSSSSAPTAASSSSTGSLDGMISATSARSEFNNRASKIGLGIHQTSQKLARLAKLAKRTSVFDDPTLEIQELTSVIKKDITALNTAVVDLQALCNSQNESGSLSKDTTNHSTTVVDNLKNRLMSATKEFKEVLTMRTENLKVHENRRQIFSSSAAKDESNPFIRQRPLVARDPSESSVPPAHXVSDSAS

SEQ ID NO: 204636 - protein, 64 aa, Zea mays
  Clone ID: MRT4577_118218C.1.pep
GSLRPTHLGNTQNISSERGHHHETPQMLNWRVIKGGLPPLICKPALPPLPIPPQPSKTLPHQPG

SEQ ID NO: 204637 - protein, 343 aa, Zea mays
  Clone ID: MRT4577_118219C.1.pep
MIPTRSAQASFRDRTNEFRAAVERARRHAVPSSSSAPAAPSSSSTGPLDGLIAATSARSEFNNRASKIGLGIHQTSQKLSRLAKLAKRTSVFDDPTVEIQELTAVIKKDITALNSAVVDLQALCNSQNESGSLSKDTSNHSTTVVDNLKNRLMSATKEFKEVLTMRTENLKVHENRRQMFSSSAAKDASNPFIRQRPLVARDPSESSVPPAPWASDSASTPLFQRKKTNGDHGASSSQPFAQQQQLAVQQDSYMQSRAEALQNVESTIHELSNIFTQLATMVSQQGELAIRIDENMEETVANVEGAQGQLLKYLNSISSNRWLMMKIFFVLMVFLMIFIFFVA

SEQ ID NO: 204638 - protein, 173 aa, Zea mays
  unsure (1)..(173): unsure at all Xaa locations
  Clone ID: MRT4577_11821C.1.pep
MGNKSSSKVDPTILTPKQIQMLKANTNFTEEQIREWHAGFLRDCPNGKLSKDRFVSVYEQFYPGGKAKDFCKYAFSTFDRDNNGTIDFTEFMLAIALTQSGDLDERLALAFDMYDYNNTGTIDTNEMAKVIAAMYDLIGETDRKGDRDPKHRAEEIIRICDVTGNKXLTKEEF

SEQ ID NO: 204639 - protein, 38 aa, Zea mays
  Clone ID: MRT4577_118220C.1.pep
HELVRMRVMTLPEVILSAGNCITQTNSQCPSKNLNYME

SEQ ID NO: 204640 - protein, 191 aa, Zea mays
  Clone ID: MRT4577_118221C.1.pep
HFQKLAAACSHKHDRPQGSKKKNSMGRAVWARVVSELVLDRARARFQDAAHQMPGPCRRRTDGLHLGRGPSHLFWMGFQPDLGILRPKLAAAWLKGVFLPPTRICCCCCSALFCRLVDARDTSSRRPAPAFSSAEHGPSRRSSATSSSSASAGRQTTLLLLPRRQQPVICRDENETTAAASCVSSAGAACP

SEQ ID NO: 204641 - protein, 67 aa, Zea mays
  Clone ID: MRT4577_118222C.1.pep
TEENSPRPKRSMTHTFRRNPNVSCNGRQDVEGHPNPAVQPPATTAKRPPETLCTPKRPGASSPTLHY

SEQ ID NO: 204642 - protein, 78 aa, Zea mays
  Clone ID: MRT4577_118223C.1.pep
HQSGGFTSNFLIKNRHIRSKGLEKPKKTLTSKSDSQKKKLSVNSIPAPKKEKILNGRANIAIKIYWVTQQLWGCQTKP

SEQ ID NO: 204643 - protein, 91 aa, Zea mays
  Clone ID: MRT4577_118224C.1.pep
SKEYIYIYNPFSLGVYFHRKLSSQNCSVSFEPFHIHCINALPTALIPDHQSQQVSGISLWFLSASRLQKQQHLLEGAQLQCLNDGVPSSCP

SEQ ID NO: 204644 - protein, 54 aa, Zea mays
  Clone ID: MRT4577_118225C.1.pep
PKRGMLIFFNTTILLEKNHAYCLIDFKIILAYTRIVASKLDDKIYSLSWWIAIP

SEQ ID NO: 204645 - protein, 140 aa, Zea mays
  Clone ID: MRT4577_118226C.1.pep
IHQRPLRTLFVLSIQLQQYRPLSCHHPLHCSMLSVDSGSTIFCGFWVTYPISGECREGSNTGECEESCVVQKMIASSRWRPRKSIMISRAYLQCRRWRGCGFRRRAGGFRCISKRRGLRGNIKEGLSGTLASNGEEGSDG

SEQ ID NO: 204646 - protein, 89 aa, Zea mays
  Clone ID: MRT4577_118227C.1.pep
KKKKKKKKKKKKKKKKKKKKKNFKKKKKKKKKKNLKKKKKKKKGFFLWAETPLGGIFENFLKIGGRLTFFLGGPFPLLGGLFKFNWPGF

SEQ ID NO: 204647 - protein, 50 aa, Zea mays
  Clone ID: MRT4577_118228C.1.pep
TLPPTRPVLFFKLFLPRAQGPDLEPVLGQGGGNRFKVYTGKGLINRQLYP

SEQ ID NO: 204648 - protein, 169 aa, Zea mays
  unsure (1)..(169): unsure at all Xaa locations
  Clone ID: MRT4577_118229C.1.pep
LALLAYHGVYHHRGATGGGGGYGDLQREGAGMLRGQAQKARRKAAXPLMDGSLEXADAPLIFGGSMLVLTGLILAGTVIALTVATPVLVIFIPVLVPAAIALALMAAVFVTSGGLSVAALSVFSWMYKFLPGKHPPGADHLDHAEARLACMARDIGAAAQHRIDQAHAP

SEQ ID NO: 204649 - protein, 87 aa, Zea mays
  Clone ID: MRT4577_11822C.1.pep
PAGIPHCEDSPAPPVPLLNPAWSERILRAIMADWAATAGTFDVTQPGCTPPSPRPTVRLMTPDVCISAGGKPGKHTIPHTRRRTVPC

SEQ ID NO: 204650 - protein, 111 aa, Zea mays
  Clone ID: MRT4577_118230C.1.pep
ERKVKVPKDLQFFQPLSTKKKNGEVFLKRGFAKDKKKENSGGYERAQKSGSLTGFLKPAEGKRFSPAPGPGKGPGDLGGFKGGYGGGSRRGPPGGAPPLEDQGPFPTPGGK

SEQ ID NO: 204651 - protein, 80 aa, Zea mays
  Clone ID: MRT4577_118231C.1.pep
DGAACPSSGQKGEKTGEKSARPLELPFFFLKRNKGTAIPAGKTERISFVTLKSFIGGLGSHCNTKTINGFGGLPTWEFFF

SEQ ID NO: 204652 - protein, 91 aa, Zea mays
  unsure (1)..(91): unsure at all Xaa locations
  Clone ID: MRT4577_118232C.1.pep
PKTKASHIVGRLLAASKPAECRQIGDHSDLGYXHXNEALLRSRSIAVKDEVFCLAEGVLDNLCRMRQQHCLSXGXNKVLLVIEAYKTMRER

SEQ ID NO: 204653 - protein, 54 aa, Zea mays
  Clone ID: MRT4577_118233C.1.pep
LTNEAARQFATAFFGLLGVAAAAAFSGPAARGPGAAALRSGIGARWPAAAAAFP

SEQ ID NO: 204654 - protein, 218 aa, Zea mays
  Clone ID: MRT4577_118234C.1.pep
MAKNVSRAAWNTVYEKGLVDVLLEHKDNPKFKSQNGWTAEGWNNITNKFNERYPLAHYSKQQMQDKDKELKSHYKAVRDSRKESGVGWNDSLCMIVAEPELWEKLILAHPKVAKYQKKPFPLYYSLEALHEGSVATGDLNFTYTQQMPPLLFIPVRPLNAPLVLLLPLHASGPTRPPRVRLLIRTGVPLNKATLPCTPTQTHSPWISKKYQMKLNQDM

SEQ ID NO: 204655 - protein, 452 aa, Zea mays
  Clone ID: MRT4577_118235C.1.pep
MDFFKSILAEPDPDPASPPPEQEPEPEPEPAGSASSSSGGGWGFGGLLKTLTSQSETVLEAYRRDLAEFGTGLRRETEVLREAAARAARDLPSSAHALDGLADIVAQGKEALSQAAAAAGGGPQASDGGDSDPSSASGTHVRYSRFEAQLRALQADPATFTSDPEDAEDFAAWSKGFILDEREEEIEALCYDSDALEAMADRLVPDAVPREVFWPRYFYRVHKLKQQEDARAKLVQRVIAQEEDEDLSWEVDDDEEEEEEQQKDSTEELAEQRQEPIKEEVRQDMAEKENVERIVEESGVETVEEAPGLVKEEKNAAEPQPIVLGSSLVVVDKEEEREKAVLGSSFGVVGEGENAEPSKSNVEESGAKKEGAKHETSDSSKDSDYSIVSRQRTAEEEDLEWDEIEDLGEHEEKKGGIQTSSPALKEELRKRLSIAEDDEDLSWDIEDDDDNA

SEQ ID NO: 204656 - protein, 215 aa, Zea mays
  Clone ID: MRT4577_118236C.1.pep
MAKNVSRAAWNTVYEKGLVDVLLEHKDNPKFRSQNGWTAEGWNSITNKFNERYPLAHYSKQQMQDKDKELKSHYKAVRDSRKESGVGWNDSLCMIVAEPELWEKLILAHPKVAKYQKKPFTLYYSLEALHEGSVATGDLNFTSTQQMPPPSFIPVRPLTTPPGGPLAAPPSGPLATAFASTTAHSTWQSHSPLHPHTNPFSMNFQEISNEAQSDM

SEQ ID NO: 204657 - protein, 48 aa, Zea mays
  unsure (1)..(48): unsure at all Xaa locations
  Clone ID: MRT4577_118237C.1.pep
YPLFCRAIQIEMKKGSKKFSNHDSGPLSXSLLQANCXNPTQPKKGVLM

SEQ ID NO: 204658 - protein, 124 aa, Zea mays
  Clone ID: MRT4577_118238C.1.pep
MILATSTVSTFVKYIFYVSDMLMEDYVRYRKITSNMNERFPDATSEELDVSDATCIICREEMATAKKLLDGHLFHVHFLRETGEQAEEEVSLRLLHGSFSSTGRILSTGMVPCFLPQCARVIVY

SEQ ID NO: 204659 - protein, 131 aa, Zea mays
  unsure (1)..(131): unsure at all Xaa locations
  Clone ID: MRT4577_118239C.1.pep
MPAHQMRHRRAVGMMNVVVIVLILCTLAVVGVWSPAPQPPAGPHHGDRMARQGRRLGIVEYXASSRSRPMAEAEXAKDTRVLPPDALDGXXGEGGTFDDARGXLTXAACEVAGAVREGKGRLNDDKVSAPG

SEQ ID NO: 204660 - protein, 41 aa, Zea mays
  Clone ID: MRT4577_11823C.1.pep
RLYIRRHYVMLQVVVVLAFSTLSRAFSRRFLGLLSSCCYTT

SEQ ID NO: 204661 - protein, 359 aa, Zea mays
  Clone ID: MRT4577_118240C.1.pep
MIRLPTYAAFSLLATASAAYYAFSSREQFYPAMVYLSTSKICFVLLLNTGLVAMCVAWQLARRLFLGSLREAEVERLNEQSWREVIEILFAVTIFRQDFSVSFLAMVAALLLVKALHWLAQKRVEYIETTPSVPLLSHIRIVSFMAFLLTVDCLFLSNSLRSLIQKQEASVAIFFSFEYMILATSTVPTFVKYIFYVSDMLMEGQWEKKAVYTFYLELISDLVHLSLYMLFFIAIFLNYGVPLHLIRELYETFRNFRIRIADYVRYRKITSNMNERFPDATSEELDVSDATCIICREEMTTAKKLLCGHLFHVHCLRSWLERQHTCPTCRAPIIPADNGHAVSARQHGAPAGVQPGTAT

SEQ ID NO: 204662 - protein, 199 aa, Zea mays
  Clone ID: MRT4577_118241C.1.pep
GLTTKLAAPPPHHGPPRQHGEEDGDGSHSTRSSEFIKMHIHSTTSLKMDLSGSLSTIVGTLLPVLQWPLRQLLLRVPGAADREIQRVNGALCRMMDGIVADRVAARERAPQAQRQKDFLSVVLAARDSDAAARKLLTPDYLSALTYEHLLAGSATTAFTLSSVLYLVAQHPRVEEKLLREVDAFGPPDRVPTAEDLHSC

SEQ ID NO: 204663 - protein, 51 aa, Zea mays
  Clone ID: MRT4577_118242C.1.pep
MYVVFFMIRIRCSTDRCSDKILMAILLNSFCKRACSVADSSLSKPSTQKLG

SEQ ID NO: 204664 - protein, 168 aa, Zea mays
  unsure (1)..(168): unsure at all Xaa locations
  Clone ID: MRT4577_118243C.1.pep
YASFSPYFSAIFFGQDFFVNSRGNKLFTCRWTPRKSECKALIFICHGYGAECSISMGDTAARLVHHGYVVHGIDHEGHGKSSGSKGYLSSFGDVVRDCSDHFKSVXEKQENRLKKRFLYGFSMGGTVVLQLHRKDSLYWDGAVLLAPMCKGYCILTTNSSVEGAQDDV

SEQ ID NO: 204665 - protein, 457 aa, Zea mays
  Clone ID: MRT4577_118244C.1.pep
MGLEPLDRQFPCLLQAQAKQHRTAAPPLPFLFLRILLPFRRPSLFSLVATKTTDADADALRQVPGSVGSFAGEEHPPGDPVLFWCGFIAEVLLWDFPVAKMIRLPMYAAFSLLATASAAYYAFSSREQFYPAMVYLSTSKICFVLLLNTGLVAMCVAWQLARRLFLGSLREAEVERLNEQSWREVIEILFAVTIFRQDFSVSFLAMVAALLLVKALHWLAQKRVEYIETTPSVPLLSHIRIVSFMVFLLTVDCLFLSNSLRSLIQKREASVAIFFSFEYTILATSTLSTFVKYIFYVSDMLMEGQWERKAVYTFYLELISDLVHLSLYMLFFIAIFLNYGVPLHLIRELYETFRSFRIRIADYIRYRKITSNMNERFPEATSEELDASDATCIICREEMTTAKKLLCGHLFHVHCLRSWLERQHTCPTCRAPIVPADNGRAASSRQHGAQAGVQPGT

SEQ ID NO: 204666 - protein, 173 aa, Zea mays
  Clone ID: MRT4577_118245C.1.pep
SDYRRTQQEASVAIFFSFEYMILATSTVSTFVKYIFYVSDMLMEGQWEKKAVYTFYLVRELYVTFRNFRIRIADYVRYRKITSNMNERFPDATSEELDVSDATCIICREEMATAKKLLDGHLFHVHCLRETGEQAKEEVPLRLLHGSFTSTGTILSTGTMSCCLPQCARVIVY

SEQ ID NO: 204667 - protein, 135 aa, Zea mays
  Clone ID: MRT4577_118246C.1.pep
SLVRPRVRSLLFACRACGDITKAHEIFCGLTKRDVFSWTAMIMGFTVNGLCNEALDLFAQMEGEGKVMPNEVTFLGVLTSCSHGGLVEQGFHHFQRMSMVYNLAPRIEHYGCMVDLLGRAKLLTEAEQFINGMPI

SEQ ID NO: 204668 - protein, 95 aa, Zea mays
  Clone ID: MRT4577_118247C.1.pep
ERHARARLSARARLRPRGRSVGAVREACPRFQRPRVGRRAPIYADSSRLGPHRSGCDLEPGCSPRGWGLPCPRDGVESKKRARKVVRELGCGRRS

SEQ ID NO: 204669 - protein, 135 aa, Zea mays
  Clone ID: MRT4577_118248C.1.pep
HASGAPFMVNAYPFYALARSGSLDFALFRVNDGVMDQGTGLVYGNMLDAQLDAVHSAVRRMGFGDVDIAVSETGWPSAGEDWEVGVCADLARDYNSNAIRHLGSGVGTPLMPNRTFEVSIFSLFDENLKPRPVSE

SEQ ID NO: 204670 - protein, 83 aa, Zea mays
  Clone ID: MRT4577_118249C.1.pep
PKGQDPKGTGKCIGPLGGSQHNRRGRRSPPERVPLDIQVGPIFRRHIGSGLLAKTPPGKNGNVIQRKLKGGCQGIPKTCVGTR

SEQ ID NO: 204671 - protein, 20 aa, Zea mays
  Clone ID: MRT4577_11824C.1.pep
FLQVCPMCSAEVSTSGNKEP

SEQ ID NO: 204672 - protein, 184 aa, Zea mays
  unsure (1)..(184): unsure at all Xaa locations
  Clone ID: MRT4577_118250C.1.pep
KRAAAGGVESRGERLATSPLPAAGNGXPRQCPRCFLGXVLHLPESDPRWGPRCEXXHVNRAPAGAPVPLKQRKPRGLDPSNDTXYXXGXANXXXFXPWXRSLKDGXXGRXXLXXRSPLTPRTVRSLNYXGYDVIVTIXXPRTEXXRXXXSRXXCXCPXXXPGCPGNLNDXXXDXPXPGCLAHWR

SEQ ID NO: 204673 - protein, 87 aa, Zea mays
  Clone ID: MRT4577_118251C.1.pep
VGACLAGFVSFILRMWSYFWFTLAAASGVLTGEWIWCVPGGGYSKRWCMSSECPRSYHRPARYARSEIARNQVDWRQATPPGNFRAR

SEQ ID NO: 204674 - protein, 111 aa, Zea mays
  Clone ID: MRT4577_118252C.1.pep
SARAKALVTGFFPIPPLTWQRAATGWARARQGLSTARALSAVFGRLQDSDWRKASTNMPLLKRPATLIRNLSIGTLMQPRMPCRSDGSFMSMDQENLRGANLGGLPLFRHR

SEQ ID NO: 204675 - protein, 170 aa, Zea mays
  Clone ID: MRT4577_118253C.1.pep
IHLETRLINRNTTIPTKKSQVFSTAADFQTAVEIKVYQGERELVKDNKLLGNFQLVGIPPAHRGVPQIEVTFDIDADSIVHVHAKDKSTNKDQSITIASGSGLSDSEIQRMVDESEQYAEQDKARKDAIEALNRADSILTDTEKALTDHADKLDKTESDQLREKITELRE

SEQ ID NO: 204676 - protein, 97 aa, Zea mays
  Clone ID: MRT4577_118254C.1.pep
STFIVSLYRCLRGLFLPRFLQHVIHSSLLTPSAHGRHQGSRPASRVLPQGLCSRSSPPALQVAALMIFSILQVAIDAPQDLLRRPRLPRCRARGSRC

SEQ ID NO: 204677 - protein, 117 aa, Zea mays
  Clone ID: MRT4577_118255C.1.pep
SSMAVDLIPPASEDLGRCVISMGMCNPINLFDTPALTRLPGVSPGSLQAPGFLSCGMSADVRVTDLTLTCVGMKGMSGGPVVNKRGVIGMNTSMSQDEKILFAVSSTTIIQLLKKWA

SEQ ID NO: 204678 - protein, 87 aa, Zea mays
  Clone ID: MRT4577_118256C.1.pep
FLETQTGVPEPKMACVYPTLVSLPWVHSKDIFTHTKITNKHNQQKRCGICLATGYPQKQIFIDDDLFFPYHRDPFLFAFDDLKASVG

SEQ ID NO: 204679 - protein, 214 aa, Zea mays
  Clone ID: MRT4577_118257C.1.pep
MRACALPLVLLATAASFPLSTSTDTLGTSASIAGNNQTLVSAGDVFQLGFFSPDGARTYLGIWYYNITVRTIVWVANRQSPVLSSPAVLRLSAADGRLLVLDGQNGTVWASAAPTRNVTAGATARLLDSGNLVLSSDGSGSDQSVAWQSFDYPTDTLLPGMKLGVDARAGITRNITAWRSASDPSPGDVTFKLITGGLPQFFLLRGKARLYTSG

SEQ ID NO: 204680 - protein, 230 aa, Zea mays
  Clone ID: MRT4577_118258C.1.pep
MVLSGGLVVPWLAAVAALAITAAPLGADAYKNYTVGDDKGWYDGLSLPGVDYQAWADGKNFSLGDFLIFNTDKNHSVVQTRNVTLYESCDYNDSGPDDTVEWAAAPPEFSKDAVTVAVPLLDEGRAYFFSGNYDGEQCESGQRFAVDVAHGQGLPPDLRPPVADAPAPSSAGPADGAAALDFSHPKNVTTPSATDDDDEQLGGGSASSSLRSALPVTATLLITLLFAFAV

SEQ ID NO: 204681 - protein, 80 aa, Zea mays
  Clone ID: MRT4577_118259C.1.pep
PLASCSSMGWAPPCTSPPGLWHSCSLSTESHSLTVAATSNFFLPLLSMARTSSTLLLPWMALSRSSMASAPSLLDPFPTA

SEQ ID NO: 204682 - protein, 53 aa, Zea mays
  Clone ID: MRT4577_11825C.1.pep
AGLGNEGVEVVCIIGFLLAGHWDFLVYLGSAVDGGGDAAHISHECAGGRLEDD

SEQ ID NO: 204683 - protein, 56 aa, Zea mays
  unsure (1)..(56): unsure at all Xaa locations
  Clone ID: MRT4577_118260C.1.pep
ANRGPSYGLSRDVQEKIEQTYDAALEKKLVDWIILQCAEDIEHPPPEQPQFQXWLM

SEQ ID NO: 204684 - protein, 114 aa, Zea mays
  unsure (1)..(114): unsure at all Xaa locations
  Clone ID: MRT4577_118261C.1.pep
WCRGGSRASCSPAACCSLCTLXRIARXGCIQTGQGSSDPGPGPFTRHQFFGTACWSCSEQSKRSLRYRWLSVLTYGKAASASMMICARVRLAIAPRGRGVGYSAVAQRGRGACV

SEQ ID NO: 204685 - protein, 64 aa, Zea mays
  Clone ID: MRT4577_118262C.1.pep
PLVLGLVFVLLGKTNKQNISGLRELILHQNKFNYIHTPYTKTYTTSFHSKTPIFTPVISYLFYL

SEQ ID NO: 204686 - protein, 50 aa, Zea mays
  Clone ID: MRT4577_118263C.1.pep
RLLKKRGSIHLEKAFPVQWRMTNNLYLLVYPDFEDANLRRRPHAYLRRRH

SEQ ID NO: 204687 - protein, 86 aa, Zea mays
  Clone ID: MRT4577_118264C.1.pep
LGSAAPAVPPNALSTDEVILLAAAVAGARPQALYIAADWKVVAFSVRPNARLILRGDEDDDEYEDQARLPTRDAHHRRSDAWADAW

SEQ ID NO: 204688 - protein, 57 aa, Zea mays
  unsure (1)..(57): unsure at all Xaa locations
  Clone ID: MRT4577_118265C.1.pep
ARVRAISGCPIYVSNEPGQANLXLLRKLVLPDGSLLRTQLSGRHTRDXLLCDPQRDG

SEQ ID NO: 204689 - protein, 221 aa, Zea mays
  Clone ID: MRT4577_118266C.1.pep
RPGCIHGIRTECLLRVLMGDKFAAPPGFTAWGPFVRDNYTPILVTRTDIALAAAAFGLANFFAITAAFIGVRQTKSCRRPRTSAYIWMIWLEIAASVAISIECLLYLLRIIRPSFYFFMSVLLCWVIQIQLLPQIIINRIRIILQDRVRGRRLIIGTAIYVTLINISVFIIWIPARLQISPRWVHINAIWDRTEKVLFLLLDAYLNWYFIRVVMRIWSRMA

SEQ ID NO: 204690 - protein, 262 aa, Zea mays
  Clone ID: MRT4577_118267C.1.pep
MTGPGSAPTQTPPPEPKHNARRPVLLLGPPLLAVAVALLLGVSNNPLPRRFIRLLFGTRPSILRSSPPPDAAYEATGAVRTPCVLWMAPFASGGGYCSEAWSYVSALDAHAAAAGAGKNNFSLAIAHHGDLDSPEFWLGLPERSKHLAYRLASARCELSSAVVVCHSEPGAWYPPMYEALPCPPTGYDDPVFVIGRTMFETDRVSPEHVKRCNQMDAVWVPTDFHVSTFVKSGVDRTKVVKVVQAVDANFFDPAKHVALPLP

SEQ ID NO: 204691 - protein, 154 aa, Zea mays
  Clone ID: MRT4577_118268C.1.pep
MASPTRQAPAPAPAPAPPPFLVTPIMLMLWLLLASSHTRGAMAAPPNTEALSVLCNGASYGAGDPFATSLAFVLSELVSATPVRAGHDFYDISPYPAAFAYGHAACRAALSAADCAACLRSAVSQMDASCGHSVGARAVLVDCSVRYEQYAFVD

SEQ ID NO: 204692 - protein, 55 aa, Zea mays
  Clone ID: MRT4577_118269C.1.pep
SAPYNMKKGPNLRGFSPIVYEFSGLHMFSLVQKPKGFKPANSTPLKNKGLVYFFK

SEQ ID NO: 204693 - protein, 193 aa, Zea mays
  Clone ID: MRT4577_11826C.1.pep
RSKRSASTGAEEPKRRWRRRCPPCLLIYRTATYNSLRASIERHSRKLDAMKSGSTSASSGTAASSAQPASSRAKKMDRVETSLKDAARELSLAKLKSGAVVAVMLFVVFGLLNSLFEGRTVAKLPFAPIPLVQRMSHRGLPGNDPTDCSMVFLYFLCSMSIRTNLQKLLGFAPPRAAAAAGGGLFPMPDPKVN

SEQ ID NO: 204694 - protein, 233 aa, Zea mays
  Clone ID: MRT4577_118270C.1.pep
MATRASKSYLCAGSSSFDDPDVVEVSSATAAAAGWASGHHKRKRSQVVPQEVIEIDDDDPDGVIIIGDKAPLDKNKQTVVCPMDWPKHAKSGWVQDIPGPSTYASKYIDSCVDLKVFQDEAVYNYSDDCPYAGFEDYMYDEDEFEVDGYDALLIESEFKFGLSAKFDNLHAPPVLEASLPWMQKTAIDIANKTKPTKVVDDKIEEKYKAFKRFDTVDDHSDHYYSKPASRKVQ

SEQ ID NO: 204695 - protein, 55 aa, Zea mays
  Clone ID: MRT4577_118271C.1.pep
QARSSSPLLNWIGQAPPAAERARARQWLCRRGSSQRPSSPCWWRSPSILRARAPQ

SEQ ID NO: 204696 - protein, 161 aa, Zea mays
  Clone ID: MRT4577_118272C.1.pep
MISTNTPQNMAGIQTGPAWLESDAEASTYLESKDEVHDFASLRHAVLEQELYSIQSLLAQEKARETTYRQRLQTPQLQGLIQEQNPPIDLCGLHISEAIHVLNYELNNRRKIVRSTGRRLQVMIISSARTPARLTAAVEQYLMEHGLLYTQVQPGLLRILL

SEQ ID NO: 204697 - protein, 76 aa, Zea mays
  Clone ID: MRT4577_118273C.1.pep
HVIVFVYLRNCLSCVLYPPIILYIFCICITPPPLFEYLPLSPTPPKFVQVCMFLTSQACVLFSFLTSIFFHIYSNI

SEQ ID NO: 204698 - protein, 141 aa, Zea mays
  Clone ID: MRT4577_118274C.1.pep
MSIEERKISMISKSTALNPNAEEFVPSSLRSFSDSSKKSDATMIVSGSSKESGTDKPESILRSNSDEEAHQYWQQQLPDDITPDFKVLGQDESPGPDSLSLTGLSINDGIDTSIFPPNQTLGRAAPCFTFYQGQTEYTPKN

SEQ ID NO: 204699 - protein, 94 aa, Zea mays
  unsure (1)..(94): unsure at all Xaa locations
  Clone ID: MRT4577_118275C.1.pep
MATAAAFSVSSPAASAVAARSKGVGGGNQARTKNGWRGRIPRKNFGXRAWRALAGKVFRLEGGPRVPQNPFLGVSEAFKENKXSLKLNXLGVGG

SEQ ID NO: 204700 - protein, 143 aa, Zea mays
  Clone ID: MRT4577_118276C.1.pep
MSIEERKISMISKSTALNPNAEEFVPSSLRSFSDSSKKSDATMIVSGSSKESSTDKPESILRSNSDEEAHQYWQQQLPDDITPDFKVLGQDESPGPDSLSLTGLSINDGIDTSIFSPNQTLGVQHHASPFIRDKLNTPPKLTC

SEQ ID NO: 204701 - protein, 260 aa, Zea mays
  unsure (1)..(260): unsure at all Xaa locations
  Clone ID: MRT4577_118277C.1.pep
LCPNGLGNYSNEAFGLPNSPYRSHSAILADDIVSPSAGREHISLDVPRGRYKTTSLPVPGLGSSRGSQVLGGPYNGNHDMISTNTLQNMAGIRTGAAWLESDAAASTYLESKDEVHDFASLXDMQFXEQDRQAFLMGNNPLAKDLTLKELYSIQSRLAQEKARETTYRQRFQIPELQGLIQEQNPPIDLCGLHISEAMHVLNYELNNRRKIVRSTGRRLQAMIISSARTPARLTAAVEQYLMEHGLQYTQAQPGLFRVLL

SEQ ID NO: 204702 - protein, 42 aa, Zea mays
  Clone ID: MRT4577_118278C.1.pep
KPSFLTPRPASRPALFVIRLGGLFTRPVHNPGAKKSKKARPG

SEQ ID NO: 204703 - protein, 436 aa, Zea mays
  Clone ID: MRT4577_118279C.1.pep
MSIEERKISVISKSIALNPNAEEFVPSSLRSVNDSSKRSYATTVVSGISKESSTDKPESILRSNSDEEAHQYWQQQLPDDITPDFKVMGQDESPGPDSLSLTDLSINDGIGTSIFSPNQTLSMQHRASPFIRDKLNTHPKINLSIPTYMDERSQATILSPTAGSMSPNAAPWVKTLRNGGHYNTSIRDASQYNGDSSIGASLHNLTDAYHGSRRSLSSTMDIMNQLESKVDGRRSQNLRSLSFGNSSPTSPASYAQNGLGNYAGREHVSLDVPRGRYKTTSLPVPGLGSSRGYQLLGGSYNGNHDMISTNTPQNMAGIQTGPAWLESDAEASTYLESKDEVHDFASLRHAVLEQELYSIQSLLAQEKARETTYRQRLQTPQLQGLIQEQNPPIDLCGLHISEAIHVLNYELNNRRKIVRSTGRRLQVQPGLLRILL

SEQ ID NO: 204704 - protein, 108 aa, Zea mays
  unsure (1)..(108): unsure at all Xaa locations
  Clone ID: MRT4577_11827C.1.pep
PPPFSPGERGPPPPICPAPPWPFHPFPWVGEEGGLLCPMPFSIYLSPPFSVCESISPPPFCSPRVDPRPCYIVFSHNLVYRPFTPPYNVSSRICGHVCVPVVLRFXGV

SEQ ID NO: 204705 - protein, 64 aa, Zea mays
  Clone ID: MRT4577_118280C.1.pep
QEMLNQAIKTHKAVQEKDELPLKNLVKPNGGGQNTKKHLEKHVSNLKSSNIVQPLEAMLDRVVF

SEQ ID NO: 204706 - protein, 62 aa, Zea mays
  Clone ID: MRT4577_118281C.1.pep
ARLGEAAMPARTRLRKLTEIGQHHGVSGRCHAKIARSGARGERSGGSRPACRARKTERGCGG

SEQ ID NO: 204707 - protein, 103 aa, Zea mays
  Clone ID: MRT4577_118282C.1.pep
AALRPRCPRSGGDQNLFFLDPVTPFKFDNQYYKNILAYRGLLSSDEVLLTGSGATADLVKLYAANQDIFFQHFARSIVKMGNISPLTGANGEIRKNCRRVNHA

SEQ ID NO: 204708 - protein, 119 aa, Zea mays
  Clone ID: MRT4577_118283C.1.pep
AGTFIFSPYARPWHSAWPATGWARQLVMRSPSHQLCPYGVPPGAALLHRPSAILPLVQSPPWCGRLWFLGIGVLMGYALSSTASSKSAEQRAPSATRFVTSVRAPPPNGGAAPSRSHMA

SEQ ID NO: 204709 - protein, 73 aa, Zea mays
  unsure (1)..(73): unsure at all Xaa locations
  Clone ID: MRT4577_118284C.1.pep
VNDGSCLSNMQCVLTPETEGYDQXSVTTGASVLVEGVVASSQGGKQKVELKVSKITVIGKSDPTSFPIQKKRA

SEQ ID NO: 204710 - protein, 73 aa, Zea mays
  unsure (1)..(73): unsure at all Xaa locations
  Clone ID: MRT4577_118285C.1.pep
GEKVSLTRASSILNLSFSSTLSPNKGTNTFSIIDKIIXMSKSHLVNNFYTILSSGTNEFIGNHWCPRSYVHDL

SEQ ID NO: 204711 - protein, 159 aa, Zea mays
  unsure (1)..(159): unsure at all Xaa locations
  Clone ID: MRT4577_118286C.1.pep
TRPRPXPPFFSPPRRXTPPPPPALRSPPPTSARDATSMPXSFDPPSPRWPSPPPLATPRCPXALPSSLRLALVXCPPPQPAPPPPRGRRPPSSLPRRFPAPSHRASPGCAPKRPPRCPHFLPPTPVAWSHSTAWIWNGGSLTEALNPETNLAFLLRPPL

SEQ ID NO: 204712 - protein, 67 aa, Zea mays
  Clone ID: MRT4577_118287C.1.pep
LYILFQDQENLMVLLPALYRKSQASQFRRIVGPPHQFGYCSSQSNFFGSWWYLGMQLAHSSVVRLSA

SEQ ID NO: 204713 - protein, 142 aa, Zea mays
  unsure (1)..(142): unsure at all Xaa locations
  Clone ID: MRT4577_118288C.1.pep
NSARGVFIAAAPRRTPPPPPALRSPPPTSARDATSMPLLRSPVPAMAVTPTPRDAAMPALALPSSLRLALVTXPPPQPAPPPPRGRRPPSSLPRRFPAPSHRASPGSAPKTPPRCPHFLPPTPVACLTPRHGSGMVDPSLRP

SEQ ID NO: 204714 - protein, 101 aa, Zea mays
  unsure (1)..(101): unsure at all Xaa locations
  Clone ID: MRT4577_118289C.1.pep
MVPFFQNRFDAIKLLENLRNKRMVFVGDSVNRNQWVSLVCMVEASIPDDRLKIRTFNGSLISFKALVCFPXDRIIRADRIEKHASVWRDADIIVFNSYRKL

SEQ ID NO: 204715 - protein, 199 aa, Zea mays
  Clone ID: MRT4577_11828C.1.pep
MASALSSLRYGDSLSVVGISAATAVLCEAISWLLIYRTATYDSLRASIERHSRKLDAMKSGSNSSGAASSSAQAASSRAKKMDRVETSLKDAARELSLAKLKSGAVVAAVLFVVFGLLNSLFEGRTVAKLPFAPIPLVQRMSHRGLPGNDPTDCSMVFLYFLCSMSIRTNLQKLLGFAPPRAVAAAGGGLFPMPDPKVN

SEQ ID NO: 204716 - protein, 68 aa, Zea mays
  Clone ID: MRT4577_118290C.1.pep
FGLLVQPLGLPASKDLHPRKAVAICVRPLPRPLAVCSQTSLQSAPGEVECKEVHHKVRDGVSSSRIRA

SEQ ID NO: 204717 - protein, 90 aa, Zea mays
  Clone ID: MRT4577_118291C.1.pep
YHCIRYFLTYHSSSVKNMQTRFTLESFWGFHSNFATKCPHINYLLVSVELIYAKTRTQMLSCLTGIDLKKRTRTEGAPVFYILRYRRNYP

SEQ ID NO: 204718 - protein, 134 aa, Zea mays
  Clone ID: MRT4577_118292C.1.pep
MYDSFPSAAPHPNINLQMNYWPALPCNLSECQEPLFDFIGSLSINGAKTAKVNYEASGWVSHQVTDLWAKTSPDAGDPVWALWPMGGPWLATHLWEHYCFTLDKVSRTRTKYSNIHYLFTFVYQTKMRKLFFHS

SEQ ID NO: 204719 - protein, 90 aa, Zea mays
  Clone ID: MRT4577_118293C.1.pep
RAGKKKKKKKKKKKKKKKKKKKKKKKKKKKKKKKKKLFSVNPLGGGFFLWGGNWATADPQREGPQVFGNPFQGPGFHLFPEGTPRQKDLV

SEQ ID NO: 204720 - protein, 105 aa, Zea mays
  unsure (1)..(105): unsure at all Xaa locations
  Clone ID: MRT4577_118294C.1.pep
CYILLIKRISIFNPFIHQKYGKVLKKTFMGPWVIYYPLLKPLSGHXPSLQTTPEGGGGGGGGHLRPLKNLDFPEGVSINTFPLPIFLKNKNSPPQPPFQTLLHPK

SEQ ID NO: 204721 - protein, 59 aa, Zea mays
  Clone ID: MRT4577_118295C.1.pep
HNPAQEFLQILLQKVNYPCQRSSSSETHQHHLLVVLNFEPNSKPTKDRWIKKKKRNEGV

SEQ ID NO: 204722 - protein, 78 aa, Zea mays
  Clone ID: MRT4577_118296C.1.pep
LKRVFPQPLALFRALGVPPCFNPPGGAGFKGLPALGGQPLGAFGPPPPFYVFGGKQGFGFFNRVGKLGGKTFLGQHCF

SEQ ID NO: 204723 - protein, 53 aa, Zea mays
  unsure (1)..(53): unsure at all Xaa locations
  Clone ID: MRT4577_118297C.1.pep
TKAKTGXAVARLTATHNYRESNKERFEESDKGKGITGRQEILDADGYMSAYKN

SEQ ID NO: 204724 - protein, 115 aa, Zea mays
  Clone ID: MRT4577_118298C.1.pep
CGYPDGQRRPSITSAAVRSTESGHLTPTSSVSVSQVISSVSASMRFEATLTVDGHEFHNTLGALQESPLQAFLIGSSHLRMRRLYLDQACLCQSIAYSAYQAILHDGPVRSPPLV

SEQ ID NO: 204725 - protein, 174 aa, Zea mays
  unsure (1)..(174): unsure at all Xaa locations
  Clone ID: MRT4577_118299C.1.pep
MAEPKSNNGGADATASMMLHGRVAIVTGGAGGIGSAVSKHLSSLGARVVVGYIGDPAPALTLLDYSYPPLAETSEATFDAAFSVNTRGTFLCCREAARRLVRDGRGRIVTFSSSGVGSLRPGYSAYAASKAAVEVMTKILARELRGXGITDNVVAPGFTXTPMMYTGKTEDDME

SEQ ID NO: 204726 - protein, 201 aa, Zea mays
  unsure (1)..(201): unsure at all Xaa locations
  Clone ID: MRT4577_11829C.1.pep
MASALSSLRYGDSLSVVGISAATAVLCEAMSWLLIYRTATYNSLRASIERHSRKLDAMKSGSTSASSGTAASSAQPASSRAKKMDRVETSLKDAARELSLAKLKSGAVVAVMLFVVFGLLNSLFEGRTVAKLPFAPIPLVQRMSHRGLPGNDPTDCSMVFLYFLCSMSIRTNLQKLLGFAPPRAAAAAXGGLFPMPDPKVN

SEQ ID NO: 204727 - protein, 59 aa, Zea mays
  Clone ID: MRT4577_1182C.1.pep
LRLRIHPVRVRMKSLDSDAEILTRRCRESLLLSYGGGIRKAYTLQGGLKLQMSTTTLMS

SEQ ID NO: 204728 - protein, 273 aa, Zea mays
  Clone ID: MRT4577_118300C.1.pep
MAEPKSNNGGADATASMMLHGRVAIVTGGAGGIGSAVSKHLSSLGARVVVGYIGDPAPALTLVAAINSSEHPGESQQPRAIAVEADVSDAAAVKALFDAAAAAFGGELHILVTLAAVLDYSYPPLAETSEATFDAAFSVNTRGTFLCCREAARRLVRDGRGRIVTFSSSGVGSLRPGYSAYAASKAAVEVMTKILARELRGTGITANVVAPGSTGTPMMYTGKTEDDMERYIAEAPLGRLGMPEDIAPLVSFLASDAGHWVNAQVLRCNGGTI

SEQ ID NO: 204729 - protein, 51 aa, Zea mays
  Clone ID: MRT4577_118301C.1.pep
DADIFLNDEACQPNRVLDSRYGTCLEVLMCAVNSNGTETDVNADAWVDSWV

SEQ ID NO: 204730 - protein, 44 aa, Zea mays
  Clone ID: MRT4577_118302C.1.pep
FAIMVDHLLDRALGTGMFFVNTAGHRAIFYDRIQFRNSIVITVF

SEQ ID NO: 204731 - protein, 47 aa, Zea mays
  Clone ID: MRT4577_118303C.1.pep
FECLLVEWVCMKCEIVRFRKFRKSNLSLIRKIKKGVHSVVSAWVGGL

SEQ ID NO: 204732 - protein, 85 aa, Zea mays
  unsure (1)..(85): unsure at all Xaa locations
  Clone ID: MRT4577_118304C.1.pep
ATGEXPRTREADAARPDQSRTVATPTQRQGVNVGPEGALRRGPSACRARRPSPSAPAGVWGEESLVDQCVCIAATSSAEVLALXR

SEQ ID NO: 204733 - protein, 56 aa, Zea mays
  unsure (1)..(56): unsure at all Xaa locations
  Clone ID: MRT4577_118305C.1.pep
MKTFDPWPFFFRQEWXRNWPFLTGICITCFIITKMTANFTDDDLMNSKFVQEHTKL

SEQ ID NO: 204734 - protein, 48 aa, Zea mays
  Clone ID: MRT4577_118306C.1.pep
KRESWVTLSCGTLNLYNTDQNPYSCQYCNTFKLPSSLSESVKLLVIGF

SEQ ID NO: 204735 - protein, 49 aa, Zea mays
  Clone ID: MRT4577_118307C.1.pep
SKIVFSKSTKAPPHIKRKTGVANCRNMNPKNLEWRHLKTVKYHYGFTMP

SEQ ID NO: 204736 - protein, 92 aa, Zea mays
  unsure (1)..(92): unsure at all Xaa locations
  Clone ID: MRT4577_118308C.1.pep
MASKHLDLVACLLLVLPNVSVANDLDYCSKKDYPVKVNCVHTLHEPTKPGKPFSIKINAATDEPIANGKLDIDIKHLXFYVHSETIDICGET

SEQ ID NO: 204737 - protein, 57 aa, Zea mays
  Clone ID: MRT4577_118309C.1.pep
SHNNVYIAQAFTHGTGKMSSITRAELTKEGKKTMMSSVLTKPLPTLHWVKKLWKLGY

SEQ ID NO: 204738 - protein, 226 aa, Zea mays
  Clone ID: MRT4577_11830C.1.pep
MAAGLQVFGQPASTDVSRVLTCLFEKKLEFDLVRIDTFKTHHKLPEFIRLRDPNGQVTLKHGDKTLVDSRDICRYVCTQFPNDGNKSLYGSGALERASIEQWLQAEAQNFGPPSSALVFQLAFVPHLTHLGVRQDPAVIAENEDKLKQVLDVYDEILSRNEYLAGDEFTLADLSHLPNSHYIVNTERGRKLFTNKKNVAKWYEKLSKRETWKQVAKMQKEHPGAFE

SEQ ID NO: 204739 - protein, 49 aa, Zea mays
  Clone ID: MRT4577_118310C.1.pep
LEEETVTNMCPRNACCGPERIVPVFYEHSDFWMIGSKREGLRHIVSFFH

SEQ ID NO: 204740 - protein, 149 aa, Zea mays
  Clone ID: MRT4577_118311C.1.pep
RTRGREAELPPSSLLFFFVVVLVRGISHPTHPCPPAHRCARFSRVSAAPAAHPVHLSSAAMASASAPVAGAVAGNDDELADLVRRLVDALARYADRLPFDLDRQKLRSLTTLAAISITLLVAWKMLRGPQEQPPRPGKRGAPIVKQHQH

SEQ ID NO: 204741 - protein, 469 aa, Zea mays
  Clone ID: MRT4577_118312C.1.pep
MDASSVSPCDLDREFALQIAQLLATPPLQSAQEYYGELIRSKKLDGIRVSYSGKHGKGVYANRDFGEDDLVLKDQMLVGAQDSLNKIDCVVCSYCFHFIGSIEYQIGRRLYLQSLGGSGDGTTERHCHGSDVGSSTGCSGASNGNSNAVPQEVLLSLMDGNTLLPLTDQFCLPPVVACPGGCEGELYCSQSCADSDWDSYHSLLCAGSKTEPLRKSALQKFVGHANETNDIFLVAAKAITSTLLRYRKLKRQHVSHESSSSLLLEAWKPLSMGFKKRWWECVALPEDVDSSEEELFRQQIRDLAFTSLQLLKDAIFDPECAPLFSLDIYGHIIGMFELNNLDLVVASPVEDYFIYIDGLPESDKEEAEKVTGPFLDALGEDYLVPCEGTAFFPLQSCMNHSCRPNAKAFKRDEDKDGHAVIIALRPISKDEEITIAYIDEDLPYEERQAQLADYGFTCTCLKCQEERPV

SEQ ID NO: 204742 - protein, 67 aa, Zea mays
  Clone ID: MRT4577_118313C.1.pep
CHARGYDPHEACVFCRWPFYQHQHLLVSSTTSAAALTWVRKLGSNKNGRLKTSYHSRVPGGPELIKG

SEQ ID NO: 204743 - protein, 287 aa, Zea mays
  Clone ID: MRT4577_118314C.1.pep
MASASVSAPVAGAGAGGGKDEELADLVRRLMDALARYADRLPFDLDRQKLRSLTTLAAISITLLFAWKMLRAPQEQPRRPRRRAAPSSSNTSTRSRPGALTAADACSSADSRAHEAVNQLFQPVNLTLEQLVRHKLSEGRRFTCRLLGVILEETAPEELQNHVTVKPSVVEVLLEIAKFCDVYLMERILDDESEGKVLSALSEAGLFGGGGLIKDKVLFCSTENGRTSFVRQLEPDWHIDTSPEVVHQLARFIKYQLHISPQRPERIATNVFTAPSLEQYFGGLDQR

SEQ ID NO: 204744 - protein, 280 aa, Zea mays
  unsure (1)..(280): unsure at all Xaa locations
  Clone ID: MRT4577_118315C.1.pep
IGYLEAGRGRICMAPGYQLLPTPPLPCDFSLAVAHCRWRYLFQAAVVIQTPLKPPLFLAVIRSAGRIQIQQPPAPVVLCFFSVAGVLYPIHGQSFLSDAQPKSLSWPHAQPALLPLSSVLCSAGFPWRASSFWRLALSISPAVSPVPSPNSLPSSLCARLAPTRSGHGARLHASSLLMPRCSQPSALCHGRVPSSDLAWPSPQRRGFIPSPVSSCAREPLPPRVCSSELAATCRSSPGAPSHGHRAPQLLFSVFQRLLPCSDSGPRARIPARQRALDSXM

SEQ ID NO: 204745 - protein, 73 aa, Zea mays
  Clone ID: MRT4577_118316C.1.pep
FLTKIQTSTKKKKKKKKKKKKKKKKKKKNKKKKKKKKKKKKKKKKRGGPLKRKKVYKRGMEKKKLFKGVTKIK

SEQ ID NO: 204746 - protein, 283 aa, Zea mays
  Clone ID: MRT4577_118317C.1.pep
MASASAPVAGAVAGNDDELADLVRRLVDALARYADRLPFDLDRQKLRSLTTLAAISITLLFAWKMLRGPQEQPPRPRRRVAPSSSNTSTRSRPGALTTTDACSSADSRAHEAVNQLFQPVNLTLEQLVKHKLSGGRRFTCRLLGVILEETAPEELQNHVTVKPSVVEVLLEIAKNCDVYLMECVLDDESEGKVLSALSEAGLFAGGGLIKDKVLFCSTDNGRTSFVRQLEPDWHIDTSPEIVHQLARFIKYQLHISPQRPERTASNVFSAPSLEQYFGGLDQR

SEQ ID NO: 204747 - protein, 343 aa, Zea mays
  Clone ID: MRT4577_118318C.1.pep
GPCAPPAPDTWPGFSCKENKKKSAVASSITRHRSYLLPSQIFPPPFPVEFSVVVLSNGRFFLARRCLSPQPPSPDFSQPSSSSTAPPLGVFKYQPCFASSPWPASSTPSMARASCPTPSRSRPAEVSFLDARPARSPSSQFRALLGRISMARVQLLAPCSLSISPAVSSVPSPNSLPSVLCHGRVPSSDLAWPSPQRRGFIPKSGVQLCSRASPSARLLFRARRDLPKLPWRAQPWPPSTPAPSQFSSACFPARIQGPAHGSLLAHGRCLASGSLHAGYQFCSALGVVLSHRWTARPSACWSWLPDARRRFDMPPRPRLVSVARLPVSFLAMSSSLPVLSSSP

SEQ ID NO: 204748 - protein, 193 aa, Zea mays
  Clone ID: MRT4577_118319C.1.pep
MAAADPIWMMLDRFVFRRDPAESSIEDRSYSFSASHIAGSAPFTVAFRVLSPPEISRLYLKWPPLLDPMNGSSCDLVAAHDNLLLISLTSSPGTVNTYKSPVYPQEHFICGASTSPSQPSLMLHKIPMCTEPLVVRGNKDKVITTQRSFHPHTVGILCRGDEEFAVPQLSLSRPNLVAGMQADLCVLRSSAHN

SEQ ID NO: 204749 - protein, 54 aa, Zea mays
  Clone ID: MRT4577_11831C.1.pep
RVRRWVGRPPCSRRFGCVGFGLLCCSLYTLVEIRLEIEILACQAKKKKKRGGRG

SEQ ID NO: 204750 - protein, 56 aa, Zea mays
  Clone ID: MRT4577_118320C.1.pep
TGGCGVFEGFFFFAWVLVREKIKQKKKKKKKKKKKKKKKKKKKKKKKKTKKKKKKR

SEQ ID NO: 204751 - protein, 70 aa, Zea mays
  unsure (1)..(70): unsure at all Xaa locations
  Clone ID: MRT4577_118321C.1.pep
MATEMPPLLALFFLCLSLALRPATAVSYPSFALDFFPAXGAIAQLSLSGGATDNATVGSVFMPIPRARVQ

SEQ ID NO: 204752 - protein, 65 aa, Zea mays
  unsure (1)..(65): unsure at all Xaa locations
  Clone ID: MRT4577_118322C.1.pep
IVGEWDRSYTXEAAAYPLPWMKEKKFWPTVTRLDDAYGDMNLFCSCAPPEDTIGGLTGKDAPMPT

SEQ ID NO: 204753 - protein, 103 aa, Zea mays
  Clone ID: MRT4577_118323C.1.pep
CYLRVSTEMHKDQLVSLAMAMGTIRVKAKHCQRHHEIYVLSDASFGELMKMRLLQDGAAPRPPDSAAQGQGSATPRRTWIVACIKDLSMEECLVDGCDRSLLL

SEQ ID NO: 204754 - protein, 145 aa, Zea mays
  unsure (1)..(145): unsure at all Xaa locations
  Clone ID: MRT4577_118324C.1.pep
LEPAGPYSIAIYHFYIXLXVWRQDGACRXQPRYCDPNYIPPLPIATTPPQPTGKTTLVSPLDYIFLPRSTNPVTXSLHXYNLTTKXQNEMRHTNPATGLIECRANAXSHDLQXSEETVDYLYHPTKEGMKMKDPPNDKPDDVMNA

SEQ ID NO: 204755 - protein, 160 aa, Zea mays
  unsure (1)..(160): unsure at all Xaa locations
  Clone ID: MRT4577_118325C.1.pep
QKKTFFKKWGKNPKRAKRKRNPPLEKEPPIWAYPNFFGKKKKPPPRGTPGKGKREPKFLEVKQTTLIKAKHHLTPPAGGTGKKPPPNGPKNXPQGGPKPXGFKKRKRPFPPRGKKQTPKPIPEPKAQEPPQGEPLGKKPPGGGGPDPALGPFPGPQKPGG

SEQ ID NO: 204756 - protein, 92 aa, Zea mays
  Clone ID: MRT4577_118326C.1.pep
CLILQIVLRCSHLDKFIYVPKHSIPPCLHNLQQINLIHVPAARNFPSSKRTSNTNTCSIALFSGLPAVFMVPSFSETAGTSRSASKERCINR

SEQ ID NO: 204757 - protein, 49 aa, Zea mays
  Clone ID: MRT4577_118327C.1.pep
KRYVCSPVQTGTAGVGFLQFCNLNSFRTKFILWFSLSMGLSVPQYFNEY

SEQ ID NO: 204758 - protein, 66 aa, Zea mays
  Clone ID: MRT4577_118328C.1.pep
RIHAGRGIYVLCVIEGTRRRRTRPACSTQPDRYAPPQILYTINRSPPTRMFTCQKKRKPTRPHTCP

SEQ ID NO: 204759 - protein, 122 aa, Zea mays
  Clone ID: MRT4577_118329C.1.pep
ANSRMSSEMLRARSSRTSSITPAVGRGNRSFTVLWGSCGSIGEDEFLAETLLSAPRDDRPVRIPFTCHPYTLLGVLGTSDLDRLRHGLLSDEHTDALGPLRCCSDRRVGRRTRNRSIALDGV

SEQ ID NO: 204760 - protein, 71 aa, Zea mays
  Clone ID: MRT4577_11832C.1.pep
VSSMCLDAPSSLWPVLSCSYINRQGHEAHLGSFASWRLYIISSRLNYIKQARTNSFAHIKTQVKKYLHIAS

SEQ ID NO: 204761 - protein, 267 aa, Zea mays
  Clone ID: MRT4577_118330C.1.pep
MANIEQTWSLAGKVAVVTGSGRGIGKAMAIELAKRGAKVAVNYANAVEGAEQVVKEIKALGNGSDAHAFKANVGNVEESEKLMDDVVKHFGKLDICCSNSGVVSFGHFKDVTPEEFDRVFTVNTRGQFFVAKAAYKRMEMGGRIILMGSITGQAKGVPKHAVYSGSKGAIETFTRCMAIDAGEKKVTVNCVAPGGIKTDMYHAVCREYIPNGDQLSDDQVDEYACTWSPHNRVGQPIDIARVVCFLASQDGDWVNGKVIGIDGAACM

SEQ ID NO: 204762 - protein, 117 aa, Zea mays
  Clone ID: MRT4577_118331C.1.pep
PPGTFGGPVPLSGSHNVACAPPFGCRGFVFTSAPGGGFFPWRKTPFLHQPLTMVVLPIFSPPISKQLGFCPQEFLGSIPGLAPPLVSPLGGPKSFLIPPPGFPLGPFFHNNPTRPGP

SEQ ID NO: 204763 - protein, 106 aa, Zea mays
  Clone ID: MRT4577_118332C.1.pep
ALNCPEPPVRCHRLWLSTQLFCDRRPTFDRSDYSVDIQSTGCCTMDEVELKVPRQRATAPQGTTTPELDHAALLWTVWGTSTTDRVSAPTSRPTVHGIHICLPHSL

SEQ ID NO: 204764 - protein, 67 aa, Zea mays
  Clone ID: MRT4577_118333C.1.pep
IIKDRIWFELPRGAYQSWVGFTLGPKANFPGVQKQLNPFFFAGFMYRTGALLKWILGDRGRRAILSD

SEQ ID NO: 204765 - protein, 41 aa, Zea mays
  Clone ID: MRT4577_118334C.1.pep
ARIDIRISTQLPLHWMTVSLFIQPDACRVASENNVAYAQRA

SEQ ID NO: 204766 - protein, 120 aa, Zea mays
  Clone ID: MRT4577_118335C.1.pep
TATMPSISTRTLAKTWAIFFVLGRPSSHQRQLVFRPFCSVYHTSSQNPLESMHRTYLNRTRHVTYYSHSESHRRDHLDLVPVALLKTLISGSDQLHFVGENYCCGDLHQSRILPLRTLSA

SEQ ID NO: 204767 - protein, 93 aa, Zea mays
  unsure (1)..(93): unsure at all Xaa locations
  Clone ID: MRT4577_118336C.1.pep
IHNARIERQLDSHIVDIKARGXIEIIXPWTVHVDTASAASTILYTFTVNRVISWKLSNSILVXKAXDKASSSSDGFYESIXEWPARIHFLLAF

SEQ ID NO: 204768 - protein, 46 aa, Zea mays
  Clone ID: MRT4577_118337C.1.pep
ILIQILLPHPLMLELVLDVQLDDHYHLYHHDYYHLLLRHLEHFLDA

SEQ ID NO: 204769 - protein, 112 aa, Zea mays
  Clone ID: MRT4577_118338C.1.pep
ILFLLDFELSALSAPMVVYRTWNLPPRELVIVGPPHPFRGTGRLLLPSSLALGRRLEALPHSVRRRETPLLRVVLKSTTIVTKTNVRTTTMLVTRRKTTQRSSTTHTTRTLT

SEQ ID NO: 204770 - protein, 161 aa, Zea mays
  Clone ID: MRT4577_118339C.1.pep
PGHAQQAAPACSVQGCDADLSQCRDYHRRHKVCVAHSKAPFVTVAGQQQRFCQQCSRFHLLEEFDEVKRSCRKRLDGHNRRRRKPQPDPLNPAAGLFGNHHHGGVTRFTSYPHRFTKSIAKPEWAVVKTETDAFQDQYYPAVHLNGAGAGALFHDKDRKHF

SEQ ID NO: 204771 - protein, 148 aa, Zea mays
  unsure (1)..(148): unsure at all Xaa locations
  Clone ID: MRT4577_11833C.1.pep
QWLRSTMAISLPGMAGTPIXVGSFGEGPHIRMRKTVGKPKXAASGSPWYGPHRVKYLGPFFGEPPSYLTGEFPGDYGWYTAGLTAYPKTLTKNLXLGAIHSRWAMXSALGCILPYLIYLNGVXKIGEDGLFKDVSDIFRKGGLNYLGN

SEQ ID NO: 204772 - protein, 95 aa, Zea mays
  Clone ID: MRT4577_118340C.1.pep
TGRGKTKRGAGENQAHLGGEQTPAGATTRSRRTGKKKPSEKQTKKTRDPREKQGRTGEDKPKENQKQGDQAPNPSRKTKPPTCKNKQKPATRGGG

SEQ ID NO: 204773 - protein, 71 aa, Zea mays
  Clone ID: MRT4577_118341C.1.pep
PFAVSSPMVAPSSHQSSRSLSHTAGLVSCFVRRGAPLGSVIMDHLLYPLSTSSNLLVYAYRNNRPMLLSLT

SEQ ID NO: 204774 - protein, 93 aa, Zea mays
  Clone ID: MRT4577_118342C.1.pep
CFNSKDRRKFCFQKKKKPFFFVSQILIREKKPKHSGETLCRVHILTETLEKPFARMMSIHKTNCAFHCRRPPQGGAPTPSLPGSYPTIRRAFF

SEQ ID NO: 204775 - protein, 104 aa, Zea mays
  unsure (1)..(104): unsure at all Xaa locations
  Clone ID: MRT4577_118343C.1.pep
APPRYPGRPPRVVPRYRGGVPRIEADALAPYMLLTPLGAXALLAXAQLAHAMLLKRLHIFGTXGCALCDVGPTTRVPNATPELEIDAATDXGDLGTEPRRRGTA

SEQ ID NO: 204776 - protein, 53 aa, Zea mays
  Clone ID: MRT4577_118344C.1.pep
TSPINAVMNSMPNGCMINPKQARTIQLVEAPSSAIYLYFEGTTENISPCNHPK

SEQ ID NO: 204777 - protein, 419 aa, Zea mays
  Clone ID: MRT4577_118345C.1.pep
HWVPRGRPGFPFYSPRVAACSRAAAGMLLGGEDMHRFPVRSPRMDRGDLIGSPAARQIYLTFPADSTFSEEDVSNYFSMFGPVQDVRIPYQQKRMFGFVTFVYAETVNAILSKGNPRFLCDFRVLVKPYKEKGKVPDRFRKLQHTHHGGAEFVGCASPTGLLDSRDPYDLQQPQIGSRMMYGNIANQHEAFLRRKLEEEQAAELQQAIELEGRRFMGLQLLDLKSRGHHHLGSGAPMPLRQATDGKGSGINGNGNASHLEDAICIQDKRMMSSLAMSAPAAADAEGEHEEQQEEGGGGCDGSSSSSPKQAVNPGEEEVVESGPVTATPNAACGFQESYGVVEVELVLPDSPFASPTKEEASYADAVTTAAARNGSISSSPRHVALFAPASSTTLELPPYSSSSFFQVPRFSRGHEAIGL

SEQ ID NO: 204778 - protein, 303 aa, Zea mays
  Clone ID: MRT4577_118346C.1.pep
MPILVASGDLASAPSPAIRAPPCSCSAALAHYALLISPSIPIYLSEKNPISQAKPKPNLPTMACMPAVSAPSVLAPAPASTRTHLCYSTEMRRGALSLRPARAIPTLRLGGHRDARGAVVVRATAAEGAVELQAKVTSKCFFDVEVGGEPAGRIVIGLFGEVVPKTVDNFRALCTGEKGYGYKGCSFHRIIKDFMIQGGDFQQNNGTGGRSIYGECFDDENFTLKHVGPGVLSMANAGPNTNGSQFFICTVKTPWLDNRHVVFGHVLEGMDVVKQLESQETSRSDTPKQPCRIVNCGEAPLDS

SEQ ID NO: 204779 - protein, 445 aa, Zea mays
  unsure (1)..(445): unsure at all Xaa locations
  Clone ID: MRT4577_118347C.1.pep
MACMPAVSAPSVLAPXRHRRRPAPXCYSTEMRRGALSLRPARAIPTLRLGGHRDARGAVVVRATAAEGAVELQAKVTSKCFFDVEVGGEPAGRIVIGLFGEVVPKTVDNFRALCTGEKGYGYKGCSFHRIIKDFMIQGGDFQQNNVAMCVWVVLCRPGTHASSGASSGSSPAEPNSCLSDRGTLPTLDIVCGLKIQRLLGSARFGASLCPWGVLSRASGDFCAARRSALGLRFMVLLIHVLFVGAVFILSPVSPFPLYSLCVAACSRATVGMLLGGEDMHRFPVRSPRMDRDDLIRSPAARQIVSNYFGYPEHTPPLLAPLLRLFRFVSTSRSITLPRHRWTEQHVRADVGRAHPVPAEAHVRLRHLRVRRDGEGHPEQGQPALRVRRALVKPYKEKGKVPGRFRKLQHAHHGGAEFAGCASPTGLLDSRDPYALLLLSSAQVFS

SEQ ID NO: 204780 - protein, 154 aa, Zea mays
  Clone ID: MRT4577_118348C.1.pep
HRVDVLLQKFLDQQMGVAKPEPAPVVQDINMRLKEQLYQLPTTLIPKEEEDQTADPPATVLSNVIPEVELPIEYKIQNIEETERARRMMEEARRLEMQNRANKEGTFAGNHPVNYSSMYATRRVQSDQEYKRKRDPNRATDDLAVSRFKRNMRF

SEQ ID NO: 204781 - protein, 110 aa, Zea mays
  Clone ID: MRT4577_118349C.1.pep
MPVAASSSDEEEEEEMAALSDWEMAAEEGTDFFTDWAMEGTAVFPDWAMLDRIGRTRCHKDLDAARRVVNKNKTAAQLRIDHGRSCYVSFTLAAPPKGVSYLNLHCTMLE

SEQ ID NO: 204782 - protein, 51 aa, Zea mays
  Clone ID: MRT4577_11834C.1.pep
FNRPKKTLRRLVQITVFTSGSGWNAQPQSDGGGCPEKRLGASAFSLLTADG

SEQ ID NO: 204783 - protein, 88 aa, Zea mays
  Clone ID: MRT4577_118350C.1.pep
PGRFTPSGRPPRSFSPPSLSLRRLGRLPPPPYARSRGPRHSYSSVSSPGDARYSYTSLPFLLCKTEHPNPNLLTSNFLQKNYRVYHVP

SEQ ID NO: 204784 - protein, 74 aa, Zea mays
  Clone ID: MRT4577_118351C.1.pep
ILPIQLKLNSFPQYHYSLHTNLKHLPYLCNFNTANPFLLDDLVLHKIIQLVVALPHFLLLHRKEILPLLFLFQF

SEQ ID NO: 204785 - protein, 78 aa, Zea mays
  Clone ID: MRT4577_118352C.1.pep
AAMAALEETLEFRAKGASSRGSSSLIKMPHFARALSKFKPSVSVPLIKNFKALSMRSSSAWSFPSCPLVSVYAGAPLC

SEQ ID NO: 204786 - protein, 55 aa, Zea mays
  Clone ID: MRT4577_118353C.1.pep
GPNWSQGEKGCCKKKMIYLVGNKDYYQKKMINMGGDGIACWLPRGSLKYLVLLKT

SEQ ID NO: 204787 - protein, 55 aa, Zea mays
  Clone ID: MRT4577_118354C.1.pep
YVNMGNDPNRLVNRCGSYNWKSTKHRMYGKHWFIQACYFYTIRILILAIFLRQHT

SEQ ID NO: 204788 - protein, 108 aa, Zea mays
  unsure (1)..(108): unsure at all Xaa locations
  Clone ID: MRT4577_118355C.1.pep
CISSDPKMVSVLREKFAHMNLTFSIGGQISFHVFPQGWDKAYCLKYLQEFQEIHFLGDKTYKGGNGYDDIMSAKXVGQTVVSPSDTAQQCRSLVWWKCSPASVQRHMY

SEQ ID NO: 204789 - protein, 34 aa, Zea mays
  Clone ID: MRT4577_118356C.1.pep
SRERVKEVKQTRGRLSLSDLRVRTERKTRPPSRY

SEQ ID NO: 204790 - protein, 58 aa, Zea mays
  Clone ID: MRT4577_118358C.1.pep
MHPLLSKKKKKKKKKKKKKKKKKKKKKKKKKKKKKKPKKKKRGRPLKRTKFNYPFIPT

SEQ ID NO: 204791 - protein, 165 aa, Zea mays
  Clone ID: MRT4577_118359C.1.pep
MPPKLDPSQIVEVYVRVTGGEVGAASSLAPKIGPLGLSPKKIGEDIAKETAKDWKGLRVTVKLTVQNRQAKVSVVPSAAALVIKALKEPERDRKKVKNIKHSGNISLDDVIEIAKIMKVRSMAKEMAGTVKEILGTCVSVGCTVDGKDPKDLQTEIDDGEVEIPA

SEQ ID NO: 204792 - protein, 54 aa, Zea mays
  Clone ID: MRT4577_11835C.1.pep
SVITITALSLPRAIHQKILFSIKAATYTFPTKIHTSERFAQKVKYLTFYTGGTI

SEQ ID NO: 204793 - protein, 155 aa, Zea mays
  unsure (1)..(155): unsure at all Xaa locations
  Clone ID: MRT4577_118360C.1.pep
MPPKLDPSQVVEVXSSLAPKIGPLGLSPKKIGEDIAKETAKDWKGLRVTVKLTVQNRQAKVSVVPSAAALVIKALKEPERDRKKVKNIKHSGNIGLDDVVEIARTMRNRSMAKELAGTVKEILGTCVSVGCTVDGKDPKDLQQEIDDGEVEIPSA

SEQ ID NO: 204794 - protein, 94 aa, Zea mays
  Clone ID: MRT4577_118361C.1.pep
PVAPRSPTTQLASVPNTDNNLFHLTNTGCTRSACTWPSSSPHWPAGLGLCCAACGRRGGCVTGEARLTGGRLTELSGSWPGLVTWDMLKVGCTV

SEQ ID NO: 204795 - protein, 70 aa, Zea mays
  Clone ID: MRT4577_118362C.1.pep
LVFIQSPDFFFIAPKCIVLWYPPLFTAFKPWFCLNCLKKSPSPSVFPQKKKKKKPKKKKKKKKKKKKKKK

SEQ ID NO: 204796 - protein, 206 aa, Zea mays
  unsure (1)..(206): unsure at all Xaa locations
  Clone ID: MRT4577_118363C.1.pep
FFFWKMEIQTSGKPIDVLMEKVLSMNILSSDYFKELYRLKTYHEVIDEIYNTVKHVEPWMTGNCRGPSTAFCLLYKFFTMKLTVKQMHGLLKHPDSPHIRAXGDDKVCKKFIVYQSVLWXIGFLYLRYVADPKVLWMGYEPYLRDDEEFSPGSNGRKTTMGVYVRDLILGQYYFDSLLPRIPSPVXRQITANLEKMKXPTKLSGAT

SEQ ID NO: 204797 - protein, 122 aa, Zea mays
  Clone ID: MRT4577_118364C.1.pep
MQGGVSCVGGRLGLTIDPAGDGEAPAERVGRLVRESPVVIFAWRGCCMCHVMRQLLAAVGAHATVIELEEAAEEAAASAAAAAAVPALFVGGAPVGGLDGLMGLHLSGLLVPRLREVGALCG

SEQ ID NO: 204798 - protein, 572 aa, Zea mays
  unsure (1)..(572): unsure at all Xaa locations
  Clone ID: MRT4577_118365C.1.pep
RPGRGPLTEHTYLFPFPSRPPPRTRTPPPPKPSKPPTSTESSSRHPRCRPAPPLSRSGRRRGVKINPDPERVPSFAGYINFGIGGYPILIFVIEIDFFFWKMEIQTSGKPIDVLMEKVLSMNILSSDYFKELYRLKTYHEVIDEIYNTVKHVEPWMTGNCRGPSTAFCLLYKFFTMKLTVKQMHGLLKHPDSPHIRAVXLFPALLFADAECLASWPCIYSLGMRLVYESICLLGXIKLISEVFFAMKNLTFLANHLYIILCLHFGYSHXVRQLVSLDGLVAEFLGPRTRGXKVCKKFIVYQSVLWSXGFLYLRYVADPKVLWMWYEPYLRDDEEFSPGSNGRKTTMGVYVRDLILGQYYFDSLLPRIPLPVTRQITANLEKMKLPTKLSGATGDSSRQGSEDTARRPPSVKASLSVSFGQRAPHRASTRDSSPVRRTVTRDGHRSSYSPSRRSGSREGPDHDRSDRELDHSSRDRERARDRSNRDRYHSSRDLDRDKDARDYHRHERDSRDREYYRSRHSEERRDDRRDHESSRHRRSSSRHRSRSRSRSRSRSRSRRSRSRSTSRRSLNEQ

SEQ ID NO: 204799 - protein, 130 aa, Zea mays
  unsure (1)..(130): unsure at all Xaa locations
  Clone ID: MRT4577_118366C.1.pep
STATSVHDFIVKDASAKDVDLSTYKGKVLLIDNVAXRVALTNCTYSELVHVYQHDNWACVRTPRSGMRWTSWTTSSARSRCSGPPAPPPPSRRRPTPAASRSRWLRSTPPGAPGCAYTSTAPTDVDPHLN

SEQ ID NO: 204800 - protein, 195 aa, Zea mays
  Clone ID: MRT4577_118367C.1.pep
MASVPHSPPVIRKSGNLMVFVTPPAEPESPRSEFSTPPTSPRAEESPESPPAQMAPPPTPIYSVSVSTPPLVKTVSPPLHAEKLSRPSLVQVPPPLVKTVSPPLPAEKLSRPPLVQVPPLQFAKVSAGSDGSLLAFFWDAVAHVQKAHSRLDKHISRWFGLDQSKYQWALNDYFERTGQEIDSSTLEHCKNSESM

SEQ ID NO: 204801 - protein, 424 aa, Zea mays
  unsure (1)..(424): unsure at all Xaa locations
  Clone ID: MRT4577_118368C.1.pep
FFFWKMEIQTSGKPIDVLMEKVLSMNILSSDYFKELYRLKTYHEVIDEIYNTVKHVEPWMTGNCRGPSTAFCLLYKFFTMKLTVKQMHGLLKHPDSPHIRAIGFLYLRYVADPKVLWMWYEPYLRDDEEFSPGSNGRKTTMGVYVRDLILGQYYFDSLLPRIPLPVTRQITANLEKMKLPTKLSGATGDSSRQGSEDTARRPPSVKASLSVSFGQRAPHRASTRDSSPVRRTVTRDGHRSSYSPSRRSGSREGPDHDRSDRELDHSSRDRERARDRSNRDRYHSSRDLDRDKDARDYHRHERDSRDREYYRSRHSEERRDDRRDHESSRHRRSSSRHRSRSRSRSRSRERSRSRSTSRRSLNEQRSSPFRXQIKRRQPPXSSNLAKLKDLYGDITAKKEDSDAEKLHRDSCAEEVIRLGGPRWR

SEQ ID NO: 204802 - protein, 38 aa, Zea mays
  Clone ID: MRT4577_118369C.1.pep
LEVSFNFTPWCRVPLYACPDGFTIYGACRCNNLCVPPN

SEQ ID NO: 204803 - protein, 62 aa, Zea mays
  Clone ID: MRT4577_11836C.1.pep
ITNKFPNAFQVFTVEYSLIRKIHEYAKPYICLMDGVTMGFGIGLSGHGRYRIITERTLLAMP

SEQ ID NO: 204804 - protein, 104 aa, Zea mays
  Clone ID: MRT4577_118370C.1.pep
MATSIKSIRALAPLLDRVLVQRIKAETKTASGIFLPESSVEKLNEAKVLAVGPGALDKKGNRLPMGVTVGDRVLIPQFGGSPVKAGEEEFQLFRDSEILAKINE

SEQ ID NO: 204805 - protein, 87 aa, Zea mays
  Clone ID: MRT4577_118371C.1.pep
CNNVILCSLHKTPLKTNFLKKWILTAHQQGRIHPSNQNPNTTLNQFMVMDTETQNHSTYTPTRTFQVMVKPFPNGIASPPIPTMTPL

SEQ ID NO: 204806 - protein, 52 aa, Zea mays
  Clone ID: MRT4577_118372C.1.pep
LVGLAMGLYGLTQAVFQLPLGLASDRWGRKRVIVAGLAVFALGSLGPPGRFL

SEQ ID NO: 204807 - protein, 316 aa, Zea mays
  unsure (1)..(316): unsure at all Xaa locations
  Clone ID: MRT4577_118373C.1.pep
MANQVQQVFMREMTSPRAWFLLLIPLLLFLVRYSFGAKRERQRQPLLVDDDDPLPPSPPALPVLGHLHLVGSLPHLSLWNLARKHGTDLMFLRLGAMPVIVVSSPRAAEAVLRTHDHVFASRPHSLVAEIVLYGPSDVGFAPHGEYWRQARKLVTTHMLSVKKVQALRLAREEEVRVVMAQIGEAAAAGAAVDMSDLLGSFVNDLGCRAVMGKSFRSEGRNKLLRQLLSDTSPLLAGFNVEEFFPFLARFGVLSKMVRAKSERLRRRWDHLLDKLIQDHERDNSDXEDKDGRFIHVLLSVRHEYGLSRQQMKGILL

SEQ ID NO: 204808 - protein, 67 aa, Zea mays
  Clone ID: MRT4577_118374C.1.pep
PPAQVIVVCTVMVSRYQCSLPVCIVSAPSREWPVSRLALARKEHSVRSLAPEASFQQQAKNRVLWAL

SEQ ID NO: 204809 - protein, 62 aa, Zea mays
  Clone ID: MRT4577_118375C.1.pep
WLRPSVPDQSKPRERCTAVLMSPRTWSDTRHEPPHTNYLCQDDTYLVVAGQHEERQSYPLEC

SEQ ID NO: 204810 - protein, 84 aa, Zea mays
  Clone ID: MRT4577_118376C.1.pep
GPPQGGFRRDGSLGVFFIVLPRLGPTPPLVILSFVAYLISPRTCGRVTPIKGFLSLCPRMLSRGGFSLAPRKYPIQYIQSRKNK

SEQ ID NO: 204811 - protein, 38 aa, Zea mays
  Clone ID: MRT4577_118377C.1.pep
VSVAGVCLITQLKVPFDSYVSPPAGDALLARYPRKSAQ

SEQ ID NO: 204812 - protein, 55 aa, Zea mays
  Clone ID: MRT4577_118378C.1.pep
IPDSRQTGLPANYFLLAASDKKNSQGEDPARRNFSLSRAANAHSCEMRLLWMDLG

SEQ ID NO: 204813 - protein, 48 aa, Zea mays
  unsure (1)..(48): unsure at all Xaa locations
  Clone ID: MRT4577_118379C.1.pep
SLITVNPCLILVLLHLILPISCLSNFLVLSTVLYPRLCRVYRXLFFSQ

SEQ ID NO: 204814 - protein, 70 aa, Zea mays
  Clone ID: MRT4577_11837C.1.pep
VVAFHLLKWITQTIKLLLIPYKDAGGSTKLHINIRVSPGFRRGTARTASEEKSPAAPLPLACHQPRTSPW

SEQ ID NO: 204815 - protein, 77 aa, Zea mays
  Clone ID: MRT4577_118380C.1.pep
RRRSTSEDDADDDGAPRRSGRRDRRRAVRVAWEKLVRWSRSWRRRNRSDVLETTRKVDSLAPSMCGRPRRTQSPIGV

SEQ ID NO: 204816 - protein, 99 aa, Zea mays
  Clone ID: MRT4577_118381C.1.pep
MAAGAQVIANSGHDDMIHDAVLDYYGRRLATCSSDRTIKIFEVEGETQRLSETLKGHEGAVWCVSWAHPKYGNILASAGYDGKVLIWREQGGVWQMIFE

SEQ ID NO: 204817 - protein, 81 aa, Zea mays
  unsure (1)..(81): unsure at all Xaa locations
  Clone ID: MRT4577_118382C.1.pep
TVGSVQLHVLSCSXFQVQVTVYELEEDKHQGGVSSILSPWWWREIKKISANSCSDLISWTPFGQTQAEEFIISSVALLLQQ

SEQ ID NO: 204818 - protein, 535 aa, Zea mays
  unsure (1)..(535): unsure at all Xaa locations
  Clone ID: MRT4577_118383C.1.pep
SRPAGWAFARADPRKPVFAGKVALALALISLLVFLREPRDIVSHSVWAILTVVVVFEFSIGATLSKGFNRGLGTLTAGAFALVVAELSGHLGKLEEVILITSILIVAFFTTLTKLHPKMKPYEYGFRVFLLTFCYVMVSGYNTGKFTDTATSRFILIAIGAAVSLGINVGIYPIWAGEDLHNLIAKNFTGVAKSLEGCVDGYLRCMEYERIPSKILVYQASDDPVYSGYRAAVEASAQEETLLGFAIWEPPHGPYKTMNYPWRSFTKVSGALRHCSFAVMALHGCILSEIQAPPESRRVFSAEIQRVGQEGAKVLRELGSRVKTMTKLSSSGILFEVHMAAEELQKKIDEKSYLLVNTERWDASKQAQGIKEVVNGTRAVETENKNKENKDDGTSAVEKENKSKENNNGGLEPTIVDQTLVHQSKSFLANSFLXDMIQRQQXGFKPALSWPARKSFHPNIPLEDEDSQTYESASALSLATFASLLIEFVARLQNVVNAFEELSEKANFKDPVVEPTAVSTSNVRFLDKLCKFVGF

SEQ ID NO: 204819 - protein, 50 aa, Zea mays
  Clone ID: MRT4577_118384C.1.pep
ETNLKTNKRKLPGGQNYRPSGSEVQRQEPGKSIISHCLEQSSYCSNTTRA

SEQ ID NO: 204820 - protein, 53 aa, Zea mays
  unsure (1)..(53): unsure at all Xaa locations
  Clone ID: MRT4577_118385C.1.pep
MGLLGRRPWLLLLALASAAVAVAGAXAASEGDAGPLYRAWVEGCQKTELLEGG

SEQ ID NO: 204821 - protein, 535 aa, Zea mays
  unsure (1)..(535): unsure at all Xaa locations
  Clone ID: MRT4577_118386C.1.pep
CCRTNIGGFHITDFLRQLLCLKYPYHTASISWEKAEELKKEHCYIAPDYMAELQIFKXIELSIGFDESKCLYLXNNKEEADEKMLYWQVPSVPPPGPVPPSSXELARKAALTGKAGQRLRDMAAAKRSQKIVELEKXLSYLEELMEQLDEAEEEEATAILGSSGYLSQQEIRSAILKASQSLRKAKGESNGNDEKTDASAVDKYPLVSVPDETLTPEQLKEKKKQILLKTTTEGKLRAKQKRAEEEALREKQEEKRRAENPELYLEELRARYSELSDKFEQRKRQKVNGSQTNGNHSSSAGVGRGERLNAAQKERMRLLASAAFDRGKGEDTFGMRDEDWLVYNKMSKDNDDDSNDDDESELVRISSKLQEIDPTFVSKSEAVQLTPEPPKVRPLTAEDYRIAIGIERFRCPEVLFQPGMIGIDQAGIDEMVSISLRRLMEDESVKERLCQSILVTGGSSLFPGMIPRLESGIRQYRPYLAPLKLVRAADPILDAWRGAAAFAASSKFGKQTFSLADYGEHGENLFHRYNIVYSL

SEQ ID NO: 204822 - protein, 61 aa, Zea mays
  Clone ID: MRT4577_118387C.1.pep
LRKQALPSTHLRYLYRILRQRGHAPGTISSVPFYKFVCIEEMQKPILLTDFARVVDAPPWV

SEQ ID NO: 204823 - protein, 113 aa, Zea mays
  Clone ID: MRT4577_118388C.1.pep
RPKWALRDWGAQLGGQEKQRDFGERGWTPKKPPWNFRDLAKNGSEKKRGGDPHIKGFPLKKRGGKIPPKGRLGTKFFFSLGGKKLFCFFPPQNFGGQKKVHWFGGPQRGKENV

SEQ ID NO: 204824 - protein, 51 aa, Zea mays
  Clone ID: MRT4577_118389C.1.pep
RRTILCYMLHNGHLPSILQRLSICLRQSYCLWRHLCLRHLIFRRNHAHQLL

SEQ ID NO: 204825 - protein, 42 aa, Zea mays
  Clone ID: MRT4577_11838C.1.pep
NHFPFNKPVLITSLVTSHLLSSIYRECQTGKLTFLNLFKCLQ

SEQ ID NO: 204826 - protein, 173 aa, Zea mays
  unsure (1)..(173): unsure at all Xaa locations
  Clone ID: MRT4577_118390C.1.pep
MESWCRPYGGSGKHTSXITKGALLAXRLXFREPCQADGTXTVXGNLLANSDXGQYTGXGTCDQILRXVDNVVITGXGHLDGQGANEWRKSSCXTKKYDCXKILAKSLGMDFVNKVEVSGVTLVMSKSFHMNMYRCKDMITQDVTVTAPGDSANTDGIHMGDSSGIPITTTVIG

SEQ ID NO: 204827 - protein, 165 aa, Zea mays
  unsure (1)..(165): unsure at all Xaa locations
  Clone ID: MRT4577_118391C.1.pep
CDGDHRRQIGCTGAGAVAACAVRAGGGAAQWYSSIWSLRDSIFETGNMCVGGVCPFWLXTGQLPYGETLFGLPTGRCSYGRVIVRLAGXHWGLPLLPVSKARGDLMKGANMGIIEVPSMDCDLFKYIGXLSDMIXNSWSLDTQIQWFMQLLASVCGKDCKNYLTK

SEQ ID NO: 204828 - protein, 117 aa, Zea mays
  Clone ID: MRT4577_118392C.1.pep
SRTPLSYTRRAGEIQALVCPGQTYMNIAPRSTDDETGVCGAENCALPLLELITAAATLEAGAGRCTTVERSMTTDATYTGVTCDLTLATANYHRASCNITDNWLDVIAKNKNNGLTI

SEQ ID NO: 204829 - protein, 88 aa, Zea mays
  Clone ID: MRT4577_118393C.1.pep
MLPKKYLFMRSNGYDGVLFFIKHALPRHAPSRTLATPHHRWRSSRGRPGWRPAGGGAHDAYVRGEPVAAAGRVPASAAEAGVGASASV

SEQ ID NO: 204830 - protein, 102 aa, Zea mays
  Clone ID: MRT4577_118394C.1.pep
EGPTPRKRRGNFLTGGQKTRGPPSYKIPRGGRRRGPLRLKGRENLKRGGQSALNGGGTLNEKKREILPPRGEKKKKRETAPPRGGFCSFRAQRKEPQPSGGK

SEQ ID NO: 204831 - protein, 49 aa, Zea mays
  Clone ID: MRT4577_118395C.1.pep
CVYAGILRIGLVVCMGKANQSVGVRLVRSVQMWQRNLSCMYHFLCKSKM

SEQ ID NO: 204832 - protein, 57 aa, Zea mays
  Clone ID: MRT4577_118396C.1.pep
SVGLLIPAPCGHINFLRAAYMHFCIQSAILVYEFSSTCNTEYYSTPLKRRIISGPLG

SEQ ID NO: 204833 - protein, 69 aa, Zea mays
  Clone ID: MRT4577_118398C.1.pep
NTSRTVLVLPEGAAFQNFCFFYSEQECSVLSRTSRYERVHPYVHDAANSLVIVCELISPHPPTAWPSQN

SEQ ID NO: 204834 - protein, 323 aa, Zea mays
  unsure (1)..(323): unsure at all Xaa locations
  Clone ID: MRT4577_118399C.1.pep
MGSAGGGGESKLESPLLGASSTGHGEAVVSGQLESILGDASVPWGTRMASASAVEMRLLVRLAAPAVLVYMINYLMSMSTQIFSGHLGTLELAAASLGNTGIQVFAYGLMLGMGSAVETLCGQAYGAHKYDMLGIYLQRSTVLLMATGVPLAALYAFSRPVLVLLGXESPEIASAAAVFVYGLVPQIFAYAANFPIQKFMQAQSIMGPSAYISAAALAAHLALSYLVVYRLGLGLLGASLTLSASWWAIVAAQFAYIVTSSRCRLTWRGFSWQAFSGLPSFFRLSLASAVMLCLETWYFQILVLIAGXLKDPELALASLSVCM

SEQ ID NO: 204835 - protein, 47 aa, Zea mays
  Clone ID: MRT4577_11839C.1.pep
LWCHLLFLASRNTDRCCRCSVKDRHVYIDSSRIPSVRMRRMRRYGLV

SEQ ID NO: 204836 - protein, 84 aa, Zea mays
  Clone ID: MRT4577_1183C.1.pep
MEPSEYVQRGIQTLADPGSFDSSAFALLLRAAFQSLLDAQADEAALDHPDLKHIDPVVLKHCHGAAATYILEAGKHRVDKSTLS

SEQ ID NO: 204837 - protein, 78 aa, Zea mays
  unsure (1)..(78): unsure at all Xaa locations
  Clone ID: MRT4577_118400C.1.pep
GVWWPGVACCPGGRFCSVGGRPPPGGXCSGGGFFLVVGGWPPLPPLVCVVVALAACARCXVGPAXXPLXVSLGFSSAL

SEQ ID NO: 204838 - protein, 513 aa, Zea mays
  Clone ID: MRT4577_118401C.1.pep
MMSSTGGESKLESPLLGLPAPGSSAGSGHSHGEAVSGQLESILSDASLPWRQRMLSASMVEMRLLVRLAAPAVLVYMINYLMSMSTQIFSGHLGTLELAAASLGNTGIQVFAYGLMLGMGSAVETLCGQAYGAHKYDMLGIYLQRSTILLMATGVPLTVLYAFSRPILVLLGESPEIASAAAVFVYGLIPQIFAYAANFPIQKFMQAQSIMAPSAYISAATLAVHLALSYLVGYQFGLGLLGASLMLSVSWWVIVAAQFAYIATSQRCRLTWTGFSWEAFSGLPGFLKLSLASAVMLCLETWYFQILVLIAGLLKDPELALASLSVCMSITGWVFMISVGFNAAASVRVSNELGAGNPKSAAFSVVVVTLLSFVLSVIISVVILLCRDYISYIFTEGDDVSRAVAQLSPLLAVTLILNGIQPVLSGVAVGCGWQALVAYVNVGCYYIVGIPLGCLLGFYFDLGAAGIWSGMIGGTLMQTMILVWVTFRTNWNKEVEEAQKRLNKWEDSKAPVQ

SEQ ID NO: 204839 - protein, 93 aa, Zea mays
  Clone ID: MRT4577_118402C.1.pep
YAQNDIVVLLTRKWIALKWGDSNRKLMLSNPLSAYGKGKRDRILFFNSCTMNYFIALFYFILRIIGEEPNQQRTLPFSFLNKSFIMILWSENI

SEQ ID NO: 204840 - protein, 113 aa, Zea mays
  unsure (1)..(113): unsure at all Xaa locations
  Clone ID: MRT4577_118403C.1.pep
ECLAXSVXWHTLTWFAXLISLPASLNTFXLISSFTYTVLTLPXPLAMFCQLLFFFPALLFFYSXLSFPIFSPHLLPMFTSLLPLPTPSPPPFSLSFSLSFSFLSPPLPPPPPI

SEQ ID NO: 204841 - protein, 148 aa, Zea mays
  unsure (1)..(148): unsure at all Xaa locations
  Clone ID: MRT4577_118404C.1.pep
MLPLPFLLSASFLMARRSAECLRDANNKPCTSYSPCPGAADLYIEIYYGSMKRKGGERXVLFPHCVYLDCQCQQRGSRGSLDGLHLVHDQYFTKGCLKASFHLSLLAYPWHELDANKILSCSASDWLETCLREALGHLYYTCPRLDTA

SEQ ID NO: 204842 - protein, 69 aa, Zea mays
  Clone ID: MRT4577_118405C.1.pep
TFSCLRFLNLGKESTITRKVGVFFYELKLKTTGIPGPIGTRPMIGLTGDLNWPRRESTVHPWPWAFGLT

SEQ ID NO: 204843 - protein, 102 aa, Zea mays
  Clone ID: MRT4577_118406C.1.pep
GDPPNIYYFRGGGKNPKGENVHAETHTPNIDHQKRVRRTMHTHYQEPHMVYKDGQKNPRGYGRPQSMLLWGRGGSLRTKGEGASTNPNSRKRGASIKPPPGG

SEQ ID NO: 204844 - protein, 120 aa, Zea mays
  Clone ID: MRT4577_118407C.1.pep
MSNNINGEDQLDGADEVKEVKRRGKTKLINVWNIPRGHRVVVNCNELNQPIGEEAGVLAKFLGMVAKNGSLCSLSFKDWRLLIGKKDRNHKQINKEAILNQVKKRFLYPCRTETWVLRTI

SEQ ID NO: 204845 - protein, 58 aa, Zea mays
  unsure (1)..(58): unsure at all Xaa locations
  Clone ID: MRT4577_118408C.1.pep
QQHIIGGRRLLGSPKQDGQMATIDGVLTXHAQNMKSNNQSTWMKYAANQKQTATLPDT

SEQ ID NO: 204846 - protein, 64 aa, Zea mays
  Clone ID: MRT4577_118409C.1.pep
SISRTCDFRRLRQSDRSFTGKDNRRQDPSRVWTFQQSDMRRTKMKQADCLINRIEVAHRERLGR

SEQ ID NO: 204847 - protein, 107 aa, Zea mays
  Clone ID: MRT4577_11840C.1.pep
MATPAPTLPEPAAQELTAAVAGAGQRQQPHHQHPLLAAAAAASLLAVLYLPRPVLLLVLSPASLSSLLLLLSLLHLGSTPPPPPPALRPPPSSPPPTEEKKQQEQEQ

SEQ ID NO: 204848 - protein, 100 aa, Zea mays
  Clone ID: MRT4577_118410C.1.pep
MGLRPYEDYPPGGPRPTAAAGRLPWRLKRTSKGILEIAKFGVYVSVPVALTYLVATDSKTLKKLMGLRPYVVYPPEGPRPPPPEELRERAREIARKRQQS

SEQ ID NO: 204849 - protein, 112 aa, Zea mays
  Clone ID: MRT4577_118411C.1.pep
TITFFFFFFFLFFYCSFYFFCLKKDRPTNFNEGGFSQTEKFDLFFPKKISKSGGRPSNHFFFGWNWVKIWLFPFIFPGAVFHPYPHQGLSNILGWHLLIVERNGLSPCFFLC

SEQ ID NO: 204850 - protein, 427 aa, Zea mays
  Clone ID: MRT4577_118412C.1.pep
MVILYPGCVAPTVHRDFLPRWVLLNNSSRMYCHVFPDRTKPKRQYRHQWVPCFSKGSSFQDPLPSVKPSRLLPAEELKTYPNTVPEEIFNTIILDDSDAFYVLELSTSREFSSSLDKNSAILICLFDVDGDSLLQRVPAIYLGQPTHGFKTEQQIPFQSGSVDIVTFKGSKLKTIKEVWIGLESGSWRLDGLSLKVIHGPVGQPKEINGTPEQKFSGLQYTFENVNVFLGDDGASVAEARPTAITDLSGVGLSDLQQGLLSSRSKALSIKEVREDGLREYADLKQSLLLYDASIVITGFSTFILASNDSAAYSFLIGGIGGFLYLLLLQRSVDGLPVIGSPSEAGGAQPSVKSFSGVRRPWLILSLVLVAGAVALKYGAGGDSFALTPTDLFVGTAGFLANKVAVLLAAFMPMLSDSKSEDGSGDNS

SEQ ID NO: 204851 - protein, 85 aa, Zea mays
  Clone ID: MRT4577_118413C.1.pep
TGKKEPSHLGDCVILARVQFTARVQVLWQFEVRNLSCIFQTCRTAVYHYIKKKKNKSLGYFEAPLERHDQYSRRKTETQKLRTWP

SEQ ID NO: 204852 - protein, 242 aa, Zea mays
  unsure (1)..(242): unsure at all Xaa locations
  Clone ID: MRT4577_118414C.1.pep
NAADADINVPEYGSYRTWERISDPPAYGNEESEDEGVDPPVNFSLAQTYVEDYLRSASYYQREDIYSSVSLCPTRKTVPIGPNYQAELPECASGNCRSSVDGNADVSSSSHIRDIKEAESDKWIRNSVIPMPGSVELSSVLKPVCCKTDCSCVDEGSIACVRKHVKEARERLMSALGLNTFKELGFFDWXEEVALKWTEDEEHLFQDVVSLNPASLGRNFWDELPLAFPLKTNKELVSYYFN

SEQ ID NO: 204853 - protein, 64 aa, Zea mays
  Clone ID: MRT4577_118415C.1.pep
PTTTPFNTPLKNPFHFPFNIHNILQNPSIQSFFYIHQLPKKQFSLKLLNLETPSFFPFTLFFKF

SEQ ID NO: 204854 - protein, 57 aa, Zea mays
  Clone ID: MRT4577_118416C.1.pep
VTMQHRYLPASVSRLSSLVRHLVSRQRHTRYCSDPERCTPIQEGCEMTIRRRLVHER

SEQ ID NO: 204855 - protein, 38 aa, Zea mays
  Clone ID: MRT4577_118417C.1.pep
ALLISILEKRMPTRSRDSVIADCNDDRYILDAHSRTTI

SEQ ID NO: 204856 - protein, 88 aa, Zea mays
  Clone ID: MRT4577_118418C.1.pep
KTISYKTDLSSHGIRRHNLLSPIITSHFTRAHRFITSSPKSIPLPTLSQSASLAKPPLFPLSILIPPHSPSFPTLRASLNGSCDSALP

SEQ ID NO: 204857 - protein, 51 aa, Zea mays
  Clone ID: MRT4577_118419C.1.pep
TKSAFLSAQFVLKKPEVLKNVVPACLAGLKRFLKPVQNKYFPSIKSIPALP

SEQ ID NO: 204858 - protein, 65 aa, Zea mays
  Clone ID: MRT4577_11841C.1.pep
ISGFGMTPHFDQFPVPLQQGSYVSRSGGLKHRVLLQSGVCLLILSTCDGCMFGTRYYPVLGTTGC

SEQ ID NO: 204859 - protein, 53 aa, Zea mays
  unsure (1)..(53): unsure at all Xaa locations
  Clone ID: MRT4577_118420C.1.pep
LSXNAKRTPTYLPGTRHCHRGQWTFSNPTPQPPVTKPPPPPKGRTAAGAKGFR

SEQ ID NO: 204860 - protein, 35 aa, Zea mays
  Clone ID: MRT4577_118421C.1.pep
APTEEIGLERNAIVENRAPDGNLPNQEVHVVNDNE

SEQ ID NO: 204861 - protein, 202 aa, Zea mays
  Clone ID: MRT4577_118422C.1.pep
MFSLFYGLWKYVFAKDEFRVLILGVDRAGKTTLLEKLKSIYLKGEGLPPDRVVPTVGLNIGRIEDAKAKLVFWDLGGQVSLRTIWEKYYEEAHAIMYVIDAATASSFEDSKSALEKVIRHEHLRGAPLLIVANKQDLPGAIDEEELAKFLHKELDERPYTFQAVSAYDGRGIKSGIDWLVEQMEKSKRTETLQARAGVAGQI

SEQ ID NO: 204862 - protein, 61 aa, Zea mays
  Clone ID: MRT4577_118423C.1.pep
YLLVVQQVLFRSNSLYIIALTVIFGLKISKSYLVLLCPTVKSRNILHPPSKTSVHHLACPR

SEQ ID NO: 204863 - protein, 81 aa, Zea mays
  Clone ID: MRT4577_118424C.1.pep
MVTPDGLARIETIGKKKHDNGVWYDYSSAPVRAQIIDELHSLQRKLSAPMTPKRSGPTTPIKGGAHLSFSGAISEEDRHTQ

SEQ ID NO: 204864 - protein, 56 aa, Zea mays
  Clone ID: MRT4577_118425C.1.pep
PRGCSKGASLVPLLGIDVWEHAYYLQYKNVRPDYLNNIWKVMNWKYAGEVYENVLA

SEQ ID NO: 204865 - protein, 69 aa, Zea mays
  Clone ID: MRT4577_118426C.1.pep
KLPTLGRSHKQLRMNTSDICVMNFHSLMQTLVDHLRFKTHLETVHNFTYRLHKPYCHRDRIYPSHTDMT

SEQ ID NO: 204866 - protein, 54 aa, Zea mays
  Clone ID: MRT4577_118427C.1.pep
RPCHVGVHLPQHVAALDLVGLASGTCLLNGVACSSSFRPCARPCYYAPSASFPP

SEQ ID NO: 204867 - protein, 102 aa, Zea mays
  Clone ID: MRT4577_118428C.1.pep
EEPGVGVDLLPQGTCSATVEAKSTEDQEEIGSPPPRGIPRSPLFGGMGWEVLRGFSALWAAGKWRMRAAKREEGENEEEEEEEEEEQGAGRGGCGPVGGKST

SEQ ID NO: 204868 - protein, 57 aa, Zea mays
  Clone ID: MRT4577_118429C.1.pep
TERVQPDNDDGDNVGPTIVTLLGKVDGVVDLGGTRQPTEEGEESGHDVDPGPGRGVP

SEQ ID NO: 204869 - protein, 71 aa, Zea mays
  Clone ID: MRT4577_11842C.1.pep
ETGFAPKFCFMVLAVESVVCYVNVSLEWSIISARFVEHLELDVYIYIMYCSTLLYMYVWPAVQHIYIYTVL

SEQ ID NO: 204870 - protein, 54 aa, Zea mays
  Clone ID: MRT4577_118430C.1.pep
AFLCRSRDVVSLNMIKKQLRKVPLANANDGCISDLWNLLGRAPQLHHCYIMDNH

SEQ ID NO: 204871 - protein, 52 aa, Zea mays
  Clone ID: MRT4577_118431C.1.pep
VTKGADASHRVGVSCLTVPLRRNWWTNERIKRSFIPLVVRLFLVMYQYTLLR

SEQ ID NO: 204872 - protein, 506 aa, Zea mays
  unsure (1)..(506): unsure at all Xaa locations
  Clone ID: MRT4577_118432C.1.pep
MGLAPPELGQFDGWESSGEERERWGWCRRSRRGSSRRRADPKGADDDTAVSTGCCIRLWPVGTCPPAPPPPPPRSKVDTSTSSASTHGAEKSTENGSRNQPVALVVSGSTTTSNAESSSSASKDGELIKVASKLRKFAFSDLKCATRNFRPESLLGEGGFGCVFKGWIEENGTAPVKPGTGLTVAVKTLNHDGLQGHKEWVAEVDFLGNLHHPNLVKLIGYCVEDDQRLLVYEFMPRGSLDNHLFRRSLPLPWSIRMKVALGAAQGLSFLHEEAESPVIYRDFKTSNILLDSEYNAKLSDFGLAKDGPVGDKTHVSTRVMGTYGYAAPEYVMTGHLTSKSDVYSFGVVLLEMMSGRRSMDKNRPNGEHNLGEWARPPPRERQRFYKLVDPRLEGNFXCKGAQKAAQLARACLSRDPKARPLMSQVVEVLRPLQNLRDMASASYFYQTMHAERMAHSSSMNGRSSHGHGSSKAQSPFGRNGQQQPVRSLSDGPRASPFRYSPKPNVK

SEQ ID NO: 204873 - protein, 119 aa, Zea mays
  unsure (1)..(119): unsure at all Xaa locations
  Clone ID: MRT4577_118433C.1.pep
TSAAXIRPLXSGSPQRTEHPXLPSRSALSSTTLQVVVSSGSLAASLVIPLLFGARSAAAMGLGPSGGAARVDLCRFGWSGSHFDGSGLRDRSARGNTNFPPLSDVGLSALHTVSYVGLD

SEQ ID NO: 204874 - protein, 109 aa, Zea mays
  Clone ID: MRT4577_118434C.1.pep
VKGAQKAAQLARACLSRDPKARPLMSQVVEVLRPLQNLRDMASASYFYQTMPPERMAHSSSMNGRSSPGHGSSKAQSPFGRNGQQQPLRSLSDGPRASPFRYSPKPNVK

SEQ ID NO: 204875 - protein, 78 aa, Zea mays
  unsure (1)..(78): unsure at all Xaa locations
  Clone ID: MRT4577_118435C.1.pep
HPHPGXKXQNXTADVDGGLGQTXRPGYVTKLDISAKMPIMGGAPKYLSEGLFSTDCAVSRFHHRRDAAGAAVVTTYAS

SEQ ID NO: 204876 - protein, 81 aa, Zea mays
  Clone ID: MRT4577_118436C.1.pep
LSRFHLFARSQWIFCQWMRAPKEMILFPPSIGMVAGAFYERFQCQMYENASGSSVNAAFATNSKASSRRSRSNTPNYDGWN

SEQ ID NO: 204877 - protein, 169 aa, Zea mays
  Clone ID: MRT4577_118437C.1.pep
PDPSYSPLASASFMFMSASFEVELPPVPGSGAPLAREVVEPVGSHSGLGTGYSFAIEVGPAGNGPRERFEWRRSRGDVIASLGGHYYGWKLVRMSRGAPGGGNMAFAPGGFKDSQGNEVVAAWTMGDGRSLTKVAHFRFMGTGLTGLLGERWAIMVVITGLALFHRDRR

SEQ ID NO: 204878 - protein, 64 aa, Zea mays
  Clone ID: MRT4577_118438C.1.pep
GYRISLRKLLLLTKVYWSTTTGGVWQHRLDTIHKKWLMLQPYSTASLIYHGAVMININLTRKQD

SEQ ID NO: 204879 - protein, 36 aa, Zea mays
  Clone ID: MRT4577_118439C.1.pep
VLNRCSLKMQCNMVCVYQYKIVKTKLATKRILSVMV

SEQ ID NO: 204880 - protein, 94 aa, Zea mays
  Clone ID: MRT4577_11843C.1.pep
NLRERESSLPSIRGGMKEEGYAPVDRPLHPHILITTTTDTAGPSPQATAPDGLIGNTPNDTMLCDTRLYTNETIHYTASLTNACYIHYNRRDML

SEQ ID NO: 204881 - protein, 123 aa, Zea mays
  Clone ID: MRT4577_118440C.1.pep
AGGSSRFLLLQSTPTPQWDGAAAAGFSIGLLPSLHFPSLPAAAAHGARGWAARGPSTRCTGAVDWRRERRSRRVARADWRRGTPWSRCGRPRSERSASTAPWRPSRQRASLSTLQQQEEEEEE

SEQ ID NO: 204882 - protein, 186 aa, Zea mays
  Clone ID: MRT4577_118441C.1.pep
MEVTEEEEGAAVDSDVEGFDIDLAAIDPVREFGFLSMGHEFDSYPKGRIRAPKDWNWFLEEAKRTSDDEASGKRRSRSKVLGWNKKKKDGEGEDEDWTGESEDEKESTGRVTSVKRPKYATRSKSSEKYSRENSKTGSGRSIDEDDGTEDEQDETLGGFLVNDEDDEPAEELSDEEEEFDDEEDDD

SEQ ID NO: 204883 - protein, 91 aa, Zea mays
  Clone ID: MRT4577_118442C.1.pep
YLIVLNSSHNTDYLSTFNPHAKNIRHALLLYIPIMLLLYPHITLLYHFHQLLTYLIPHITITSMISYTKTRVYMMLTLHSKIIKSYFIPLT

SEQ ID NO: 204884 - protein, 59 aa, Zea mays
  unsure (1)..(59): unsure at all Xaa locations
  Clone ID: MRT4577_118443C.1.pep
MTSVWKTKVLPGLNKIFDKDGKKAAAAGFLKSFNKEEIDKEIXXPKTDLEPKVVEAYXA

SEQ ID NO: 204885 - protein, 44 aa, Zea mays
  unsure (1)..(44): unsure at all Xaa locations
  Clone ID: MRT4577_118444C.1.pep
SFPSLRRLNSXTSRLYDGERRRNNETSQRSSETRRHAVKKPARP

SEQ ID NO: 204886 - protein, 42 aa, Zea mays
  Clone ID: MRT4577_118445C.1.pep
PFPRGLNACCCDTGYEVGSYVWTNVVPPPGSSGPVRAGVPRR

SEQ ID NO: 204887 - protein, 158 aa, Zea mays
  Clone ID: MRT4577_118446C.1.pep
APTRPPTRPPTRGTHAPAHASKPPKTQNPATPRYQSQRQKPMPMQPQAPSMTPAAGITTEQIQKYLDENKQLILAILENQNLGKLAECAQYQSQLQKNLLYLAAIADAQPETAVSRPQEINREACTTFMALVCTTRLIGNYVDSNLLQGLIVTISSVS

SEQ ID NO: 204888 - protein, 202 aa, Zea mays
  Clone ID: MRT4577_118447C.1.pep
PPTQKQPCDPRYQSQQQRPMPMQPQAPSMTPAAGITTEQIQKYLDENKQLILAILENQNLGKLAECAQYQSQLQKNLLYLAAIADAQPETAVSRPQMAPLGASPGVGQYMSQVPMFPPRTPLTPQQMLEQQLQQQQAQLLNFSGQMVARPGMVNGMLQAMQVHQAQPSPVMNRPDAGGIASEPSGTESHRTSTGGDNGGGSD

SEQ ID NO: 204889 - protein, 182 aa, Zea mays
  Clone ID: MRT4577_118448C.1.pep
MQQPMHMQPQAPAITPAAGITTEQIQKYLDENKQLILAILENQNLGKLAECAQYQSQLQKNLLYLAAIADAQPQTAVSRPQMAPPGGSPGVGQYMSQVPMFPPRTPLTPQQMQEQQLQQQQAQLLNFSGQMVARPGMVNGMAQSMQAQLPPGVNKQDAGGVASEPSGTESHRSTGGDDGGSD

SEQ ID NO: 204890 - protein, 87 aa, Zea mays
  Clone ID: MRT4577_118449C.1.pep
NTHQVCPLYNIYFYFHKYSHYFLVTLMLFSLLLLLTATTPMYFLLPNISIFYCFLYFHVSHVNYHYYYLHLRLYFYSSLHIILIFIL

SEQ ID NO: 204891 - protein, 51 aa, Zea mays
  unsure (1)..(51): unsure at all Xaa locations
  Clone ID: MRT4577_11844C.1.pep
DEALVHLGEGLAGPEAHVAPVXPPFSASVPGAHVRSSPHXTXARAPSTARW

SEQ ID NO: 204892 - protein, 63 aa, Zea mays
  Clone ID: MRT4577_118450C.1.pep
YEIYLSYVVASTAHFLRLARHEVPDLSLHCLNAHTSTQITKCSYGTMSRKRLHTFKLEITFEE

SEQ ID NO: 204893 - protein, 79 aa, Zea mays
  Clone ID: MRT4577_118451C.1.pep
QVLLDQNLIEAMPTSPIFVGNKAKRLLERAVWNDTSFLAVSLHQFILIKAYRKCSGFQSYLQLHFFCSTIFSLIFWIRI

SEQ ID NO: 204894 - protein, 96 aa, Zea mays
  unsure (1)..(96): unsure at all Xaa locations
  Clone ID: MRT4577_118452C.1.pep
HPETCAIDEEPHNCEAARGWKLTLLCLGLFMFAVGEGCMRACVPPLGGDQFSDSGPLETAXKSTFLTRLKLANSLGAMIGLAFLVWIENNWGWDIG

SEQ ID NO: 204895 - protein, 85 aa, Zea mays
  unsure (1)..(85): unsure at all Xaa locations
  Clone ID: MRT4577_118453C.1.pep
ACSEKSVLRSFLGEWMAXSWSSISQHRLRLSAACLLLARAAGSTSSCTCGVPRRAIPDNPLPSCLXYRTSQTCAIRPGLKRPSLT

SEQ ID NO: 204896 - protein, 114 aa, Zea mays
  Clone ID: MRT4577_118454C.1.pep
RDSDRSRMMVPGRRKELKLIAAALLLAVSLLLMSKAGSAAAGRSLCPCSCHQHGGAAARLLHQGRRMLAGRGRHGEVLANGLMEHANKEGGDAIIGDEEKREVITGPNPLHNRR

SEQ ID NO: 204897 - protein, 61 aa, Zea mays
  unsure (1)..(61): unsure at all Xaa locations
  Clone ID: MRT4577_118455C.1.pep
EPPFDVQLILFLGRTDRPPPPVFFLFPVPCASLRCRSHIIKKIXHMKTKMDIYNNPLIRLG

SEQ ID NO: 204898 - protein, 234 aa, Zea mays
  Clone ID: MRT4577_118456C.1.pep
IVRQLGEDSRQAGRGSVGGMIAAVNRVPAGWGEDEMSVLPRHTKVVVTGNNRTKSVLVGLHGVVKKAVGLGGWHWLVLTNGIEVKLQRNALSVIEPPTGNEDDDKFDCENMQWNSSDMASDDALSPKPQRSRSRQHRGFHRKSISRSMSCDSHSKTSVSSSSRAHTKVDLSKLELTALLRYWRHFNLDACPNPSREQLVDAVQRHFTAQQLDELQVIVGFVQAAKRLKTTMKVA

SEQ ID NO: 204899 - protein, 274 aa, Zea mays
  unsure (1)..(274): unsure at all Xaa locations
  Clone ID: MRT4577_118457C.1.pep
SVRGRVGAEFVGTALGCVEPLVTDRHTPLQPPVPFLARTPRRRXNPKPPGKAEPSPTAGAAPTYTRDVSHRATAILRDHPCSAARPLLPSIPGLARDSHTVARMLKTHPPLQKAFIFFLLAVTASRTFRHDRFTYTSMIQLGEAGRVPAMLGLLAEMLRAXVAPNAATFTTVMHWLARAGDVDGAMRVWAEMKAKSRPTVVSYTACVKILFDAGRAEEARRVFKEMVAEGLRPTCKTYTLLIENLADTGLKQESGYYRRERMNMKWHLQYHGQC

SEQ ID NO: 204900 - protein, 142 aa, Zea mays
  Clone ID: MRT4577_118458C.1.pep
IVRQLGEDSRQAGRGSVGGMIAAVNRVPAGWGEDEMSVLPRHTKVVVTGNNRTKSVLVGLHGVVKKAVGLGGWHWLVLTNGIEVKLQRNALSVIEPPTGNEDDDKFDCENMQWNSSDMGKLPGLYFFFFCKSQCFVCFTVRV

SEQ ID NO: 204901 - protein, 231 aa, Zea mays
  Clone ID: MRT4577_118459C.1.pep
MSAIHSPAAPPARPPFRRSTTGVASPLREPSQPQPTPPAPPSLTSRRAGLVALLVAAVAPERPAAAAFSLGIPGPKELLREQKKKSASFLLAPIAASRDTLVKAHALLASPSASTEDAEEVKGRILAAGRDCVPRQRNSIVALQSRTGVEVCTFSLILKNAASLLANKDSLKVEADTRLEELIKSFSELGTLVENSNFELADDREKIKDGLLSTVSALDKFEQSVKDCLGV

SEQ ID NO: 204902 - protein, 51 aa, Zea mays
  Clone ID: MRT4577_11845C.1.pep
FSPGHVFFLTCPETWDGDAFQTRAASSNLTELEANIYGHMKTNNRSTKSWA

SEQ ID NO: 204903 - protein, 94 aa, Zea mays
  Clone ID: MRT4577_118460C.1.pep
PSPATWLYASEKLASLILFFLAASDDAQSPKPQRSRSRQHRGFHRKSFSRSMSCDSQSKTSVSSSSRAHTVRLSLPLGFGLEIIWLECKKNTLQ

SEQ ID NO: 204904 - protein, 69 aa, Zea mays
  Clone ID: MRT4577_118461C.1.pep
SGDRYYKVQVPLYDCVLYALYVTLRALSAGSAGHLNKNIAYYILETLCIDETDMRETVQLTSHNQTAGH

SEQ ID NO: 204905 - protein, 214 aa, Zea mays
  Clone ID: MRT4577_118462C.1.pep
SVGEMIAAVNRVPAGWGEDEMSVLPRHTKVVVTGNNRTKSVLVGLHGVVKKAVGLGGWHWLVLTNGIEVKLQRNALSVIEPPTGNEDDDKFDCENLRWNSSDLVSDDAQSPKPQRSRSRQHRGFHRKSFSRSMSCDSQSKTSVSSSSRAHTKVDLSKLELTALLRYWRHFNLDACPNPSREQLVDAVQRHFTAQVDKTNLTSDSSNLHHYGVRS

SEQ ID NO: 204906 - protein, 119 aa, Zea mays
  Clone ID: MRT4577_118463C.1.pep
MQLKANSSAQIQHVSGLPKDWQEKKSRADQLCSRAPFYNHMTKRYELDFRERAGRMGYKVQTSVKNFQMTLEENGRQTVLQLGRVGKSKYIMDFRYPLTGYQAFCICLASIDAKLCCTL

SEQ ID NO: 204907 - protein, 123 aa, Zea mays
  Clone ID: MRT4577_118464C.1.pep
ACVAFLRGEGDADRVARILARLGHLVRGDGEAPGAVAAVPAAAVAHVDRRLHQLMAADHNNSATPYPAAAVSVQSWAERGYSVVTVQCRDRPKLLFDVVCALHCLDYLVFHGTVDTACGDRAR

SEQ ID NO: 204908 - protein, 71 aa, Zea mays
  Clone ID: MRT4577_118465C.1.pep
YGAGSSSAEALQQQLSVCEISYSADDPADIMGKRLPRHGKKSELGFTVYRFTHEQTCAVEPYNTIPIHSIT

SEQ ID NO: 204909 - protein, 55 aa, Zea mays
  Clone ID: MRT4577_118466C.1.pep
MAGTANCIDIILAIILPPLGVFLKFGCGHEFWICLLLTFLGYIPGIIYAIYAITK

SEQ ID NO: 204910 - protein, 77 aa, Zea mays
  unsure (1)..(77): unsure at all Xaa locations
  Clone ID: MRT4577_118467C.1.pep
QFVTGTSKGPLEGFSELQGIFGPQRFXIPKGLGRPNHLPSGXTCFNQINLPEYTSKKQLQERFLLAIPQTKKGFGFG

SEQ ID NO: 204911 - protein, 74 aa, Zea mays
  Clone ID: MRT4577_118468C.1.pep
LTVIVASGLVVASYVIRRLRLQSIVVRVSPRARTDNHGQGPIVPMSKLNQLVATRPHYTKIIHFLRFFNFLQLL

SEQ ID NO: 204912 - protein, 92 aa, Zea mays
  Clone ID: MRT4577_118469C.1.pep
MAKRTKKVGITGKYGTRYGASLRKTVKKMEITQHATYTCTFCGKDAVKRTAVGIWKCKGCKKTLAGGAYTVSTTAAATVRSTVRRLRELAEI

SEQ ID NO: 204913 - protein, 102 aa, Zea mays
  unsure (1)..(102): unsure at all Xaa locations
  Clone ID: MRT4577_11846C.1.pep
PTRTANPFGFAKPREVLCEGLYMDWRKIDSKLDHGRVNRPETNEEKLLKEEIDILIKALLKEGEKNQNDNSSQALADLRERINQRENELXSLTCXMDDKVRF

SEQ ID NO: 204914 - protein, 78 aa, Zea mays
  Clone ID: MRT4577_118470C.1.pep
SNFFVIIGPNRALQACRDGVTSPIRRLTVPRSGFGVVGTRLGSRGDGQVGSSIVAVRWRYRAGGDVRARRVRCRAPCP

SEQ ID NO: 204915 - protein, 70 aa, Zea mays
  Clone ID: MRT4577_118471C.1.pep
QWLVFGNLQRIFVANQGLGVKFERFAHELGKSPNNNTIEDITPDTCNGGAQFAKGVNSIVEKITDLAVDG

SEQ ID NO: 204916 - protein, 816 aa, Zea mays
  unsure (1)..(816): unsure at all Xaa locations
  Clone ID: MRT4577_118472C.1.pep
APPPTTPRLXRRRPRTFSQPPPSPXPPSPTSDDPASPLDAFASDPVLSAFLSPSFSPSVSSSAALSSGLAASRAEQLQDAIRLLRRHLRVEVLRRHPLLLSHLLSLRSASASLSSLPSHLNLLSSHLSLLSSHLSAPRSHLAHSSASLSSLLATADLLLHSHRLVRLSSRLLASSPAPDLARQAELYREIRLLYEEKNLSGINAVDEEMRKVDAAASKLRSEASAVIDGGVYESNQNDVWCGLQVYYNLGELKTAVEGLVGKHKAAGAKSVSVALDMKAISMTAGVGGGPGGVQRSGTPQIGGSKKAAEALWDRMRQCMDELHRAVTAAWQLQTVLTKKRVPFTQMLFLEEVWQEGEPLITERVWDAIVKAFASQMKTTFTASSFVKEIFTLGYPRLFSMVENLLERISRDTDVKGTLPALTPEGKDHMISAIEMFQTAFLALCHSRLSDYVNSIFPMSNRGTIPSKDQISRLVSRIQEEIEVVRTHGHLLVLVLREIGKTLLLLAQRAEYQISTGPEARQVTGTATAAQLKNFALCLHLQEVHMRISSVLSTLPNVASEVLSPSLGVVYGVACDSVTSLFQAMLDRLESCILKMHEQDFAGQGMDASMDNNASAYMEELQKCAVHFRSEFLSKLLPSSSSRSETICTIMVRRMASRVLIFFIRHASLVRPLSEAGKLRMARDMAELELAVGQNLFPVEQLGAPYRALRAFRPVLFLETSQLDKFPLLQDLPPSVILHHLYSRGPDELQSPLQRNKLTPLQYSLWLDSQGKDQIWKGVKATLDDYEMRVRSRGDKEFSPVYPLMLQIGSSLSQPNT

SEQ ID NO: 204917 - protein, 104 aa, Zea mays
  unsure (1)..(104): unsure at all Xaa locations
  Clone ID: MRT4577_118473C.1.pep
MAPNAETKPAAKKPAEEEPRYKKATREQKPKEEMREAGAMSAGTLGLXTSTEAMKDPXSAHGHKISVVEGATEADSASGFLFQGHHKKKKDHXDAQEASGEKKH

SEQ ID NO: 204918 - protein, 56 aa, Zea mays
  Clone ID: MRT4577_118474C.1.pep
GAWWMLRCVRERSRPSSPSQLWVVGSLSPYDVFIYLFCTEPLLYNKVVTFVSVPLF

SEQ ID NO: 204919 - protein, 151 aa, Zea mays
  Clone ID: MRT4577_118475C.1.pep
QSDATAQGERRQDGRHRHRKRRRAVLGSVRPRHGAAAAHVPPARGAGDSTRAATLVPGGNPPVMMLQLHCARRLMPRPKPPARTPGFQVVFHVAFSSRTSQSVCRRRVILRRISCAIMHGDTAIFQAPIKGKEKKKRAMLTVPSNCSCTWR

SEQ ID NO: 204920 - protein, 59 aa, Zea mays
  Clone ID: MRT4577_118476C.1.pep
GEGGGLFLGPIRDWAFYVSPKPTMNSLRLTGNKIPCSTVYRPSHRGAFGDSNLGLRAGI

SEQ ID NO: 204921 - protein, 78 aa, Zea mays
  Clone ID: MRT4577_118477C.1.pep
MVREGNSRSKKRKVLVPMGSSRFSWTLSDHPKLPKGKPVAVVVLDRWSQAIPHQINCIHVAQTPVMDSLKNGAPEKWR

SEQ ID NO: 204922 - protein, 75 aa, Zea mays
  unsure (1)..(75): unsure at all Xaa locations
  Clone ID: MRT4577_118478C.1.pep
AIACPRSAGPHSPCQTTNXRPAPPLLKPRPHPPGHRHAPPLPQIPPGPPPRRSPVLPAHSADPPPRLASARALPG

SEQ ID NO: 204923 - protein, 104 aa, Zea mays
  Clone ID: MRT4577_118479C.1.pep
GRRRWCGGRGCCWHIAAAIVIYISARLGRHGNTPIDRVSVTTSPCCTRWRSDYQSCTAAARGRLSSVPTREHCDHLLVKESRTIHTCSSFSLGGSHVRHDGRAG

SEQ ID NO: 204924 - protein, 148 aa, Zea mays
  Clone ID: MRT4577_11847C.1.pep
PGAWSCGCRGGSVSVLAVIHILLLLTVGVAYTLKLLDQYQEFDSLHWFQSVREKYIKEIRAVAKQQNVQSTSQDEKLLQTMNLTQKRLEVYLQEFELLYFSLSSARIFFKADRTAAEENQEQKEKEEETKTSNGDGPESTVSADPVVK

SEQ ID NO: 204925 - protein, 81 aa, Zea mays
  Clone ID: MRT4577_118480C.1.pep
VSNTHKRKSQVSHKVLPILKSSDQVISQSITYTNKHKIMCTKYFSKVDIWTSSTIGWAIHEGCLMMLIVPAQRRDCMYQTR

SEQ ID NO: 204926 - protein, 245 aa, Zea mays
  unsure (1)..(245): unsure at all Xaa locations
  Clone ID: MRT4577_118481C.1.pep
TLGSFRENEGHPDKLCDQVSDAVLDACLAQDPDSKVACETCTKTSMVMVFGEITTKATVDYEKIVRDTCREIGFTSDDVGLDADRCKVLVNIEQQSPDIGAGDETPELMPLSHVLATKLGARLTEVRKNGTCAWLRPDGKTQVTVEYVNEGGAMVPVRVHTVLISTQHDETVTNDEIAADLKEHVIKPVIPXKYLDEKTIFHLNPSGRFVIGGPHGDAGLTGRKIIIDTYGGWGANGGGAFSGRT

SEQ ID NO: 204927 - protein, 396 aa, Zea mays
  unsure (1)..(396): unsure at all Xaa locations
  Clone ID: MRT4577_118482C.1.pep
MAAESFLFTSESVNEGHPDKLCDQVSDAVLDACLAQDPDSKVACETCTKTNMVMVFGEITTKASVDYEKIVRDTCREIGFTSDDVGLDADRCKVLVNIEQQSPDIAHGVHGHFTKRPEEIGAGDQGHMFGYATDETPELMPLSHVLATKLGXARLTEVRKDGTCXAWLRPDGKTQVTVEYVNEGGAXMVPVRXVHTVLISTQHDETVTNDEIAADLKEHVIKPVIPERYLDEKTIFHLNPSGRFVIGGPHGDAGLTGRKIIIDTYGGWGAHGGGAFSGKDPTKVDRSGAYVARQAAKSIVASGLARRCLVQVSYAIGVPEPLSVFVDSYGTGTIPDKEILKIVKENFDFRPGMITINLDLKKGGNRFIKTAAYGHFGRDDADFTWEVVKPLKKASA

SEQ ID NO: 204928 - protein, 409 aa, Zea mays
  unsure (1)..(409): unsure at all Xaa locations
  Clone ID: MRT4577_118483C.1.pep
RAAAQEVGRASEKKAIAAESFLFTSESVNEGHPDKLCDQVSAAVLDACLAQDPDSKVACETCTKTNMVMVFGEITTEASVDYEKIVRDTCREIGFTSDDVGLDADRCKVLVNIEQQSPDIAQGVHGHFTKRPEEIGAGDQGHMFGYATDETPELMPLSHVLATKLGARXLTEVXRKDGTCAWLRPDGKTQVTVEYVNEGGAMVPVRVHTVLISTQHDETVTNDEIAADLKEHVIKPVIPERYLDEKTIFHLNPSGRFVIGGPHGDAGLTGRKIIIDTYGGWGAHGGGAFSGKDPTKVDRSGAYVARQAAKSIVASGLARRCLVQVSYAIGVPEPLSVFVDSYGTGTIPDKEILKIVKENFDFRPGMITINLDLKKGGNRFIKTAAYGHFGRDDADFTWEVVKPLKKASA

SEQ ID NO: 204929 - protein, 395 aa, Zea mays
  unsure (1)..(395): unsure at all Xaa locations
  Clone ID: MRT4577_118484C.1.pep
MAAESFLFTSESVNEGHPDKLCDQVSDAVLDACLAQDPDSKVACETCTKTNMVMVFGEITTKASVDYEKIVRDTCREIGFTSDDVGLDADRCKVLVNIEQQSPDIAQGVHGHFTKRPEEIGAGDQGHMFGYATDETPELMPLSHVLATKLGARLTEVRKDGTCAWLRPDGKTQVTVEYVNEGGAMVPXVRVHTVLISTQHDETVTNDEIAADLKEHVIKPVIPEKYLDEKTIFHLNPSGRFVIGGPHGDAGLTGRKIIIDTYGGWGAHGGGAFSGKDPTKVDRSGAYVARQAAKSIVASGLARRCLVQVSYAIGVPEPLSVFVDSYGTGTIPDKEILKIVKENFDFRPGMISINLDLKKGGNRFIKTAAYGHFGRDDADFTWEVVKPLKFDKASA

SEQ ID NO: 204930 - protein, 62 aa, Zea mays
  Clone ID: MRT4577_118485C.1.pep
GYHKYCVLAVIGMKKTKPVSLRRFVYALEPAPRGGHRVLYNAEGNQASGGDDAYMRGTWPEP

SEQ ID NO: 204931 - protein, 145 aa, Zea mays
  Clone ID: MRT4577_118486C.1.pep
ASCNDLSVSPTTGTTNETTAVVPATSTSAAARLGSILPDLLNTVDATERDQQGAQQLDALIANDGADEDIQADIMEVPDILRRSVSRDEAALAAAQTVAQSVYESTSDTTYVSCLVASLVATLDACSLSQRGNKRGNMLRCRDGC

SEQ ID NO: 204932 - protein, 137 aa, Zea mays
  unsure (1)..(137): unsure at all Xaa locations
  Clone ID: MRT4577_118487C.1.pep
GCGGKIPPPKKLWDPGKTGGGLTPPRGPPIPHQGLLGRAQKKGLNPPEGFTPPPGKIHPPGPAEEXLGKKGETGPLTLRFEPPSELGGKISGPPPPTXPPDRGGPYGPIGFPGPPPSKWAQTFPYPPLMFGAPPPGP

SEQ ID NO: 204933 - protein, 117 aa, Zea mays
  Clone ID: MRT4577_118488C.1.pep
ALRAHSTRSATRFLHFSGEARSARGGLGHHPKRLPHHVQRSSPSTRATRSRSPHSRYTGQKKEAYKLYTADSRAKITGGFYFKWYLQRALGILPPTHARPPLPLQVEYKLIKMHTYN

SEQ ID NO: 204934 - protein, 129 aa, Zea mays
  Clone ID: MRT4577_118489C.1.pep
SRVDPRVRGRVGLHTRRVHMLVCWATSQGQTRRALSFLCTQTLSPMLTPCLKQTWAFPRHLQEWWCLKASVVPLCRSQIPGTGSCITQQFDTGWHHALGTCFHKDRWTPRLKRRHAWPNCYSTRLRYSS

SEQ ID NO: 204935 - protein, 71 aa, Zea mays
  Clone ID: MRT4577_11848C.1.pep
VPIGSPSVDLIDELEHQLGYPWHYSCSSPHRKISCCSPLANNVSAGIWDPVPIKPFPVCTKDVHKLLPKKR

SEQ ID NO: 204936 - protein, 337 aa, Zea mays
  Clone ID: MRT4577_118490C.1.pep
MVYSAIMDRWLGPLRFDETDALCGREGEGHERRSEGKGPCCCYDSYVRRVSAGQCAATHHHRLRPLQRQLLVVRHLHQCLWSSGPSLPIVGSLLALLMPREAASSSPATAQMGWPYLPPPIGGPNGPLSGRWRLPPRRPFGGSGVERGAAWPMVRTQTRGSPSTLCTAKPVLCEARPGAGALSTARSALGAARPVQGATLQGGSAMGAMAPLARPPGLRMAARRTARRRRSSRLSTRRTGAGDGFGEGARPALSVALGAASQRARPTGGLPAALGVAGGCAQRPWRERAPGAGAGMPSARAARELLWQRRLPGQARARPHGEARRRLGALGSWRRLG

SEQ ID NO: 204937 - protein, 55 aa, Zea mays
  Clone ID: MRT4577_118491C.1.pep
YAHTIFSKLYTTNTFRNRVNGFGGNENGGASITTFYLSMVIDFIFYTYQDMCTGG

SEQ ID NO: 204938 - protein, 236 aa, Zea mays
  unsure (1)..(236): unsure at all Xaa locations
  Clone ID: MRT4577_118492C.1.pep
MKFNRGRRRSRDSKKAAYYGEERLSELPSDVVVKVLETVKTRLKKAAGNGEDRLSELPNDVLLNILERVGTLDAVKTCILSKQMQKLPAMLSQIVIDLNPHDLIQMDGVVADVTNKILTTRSPQITIRKLKLKFFLVPSRCLSIGKSVGLAMVTQKLDAAEFEIMTQKDFSHCTDAHRLLYAEKFNDSVRGCPDAFAGLTRLHLRNMRFGKSDISNILSHCKXLEXLSFFECDEGG

SEQ ID NO: 204939 - protein, 75 aa, Zea mays
  Clone ID: MRT4577_118493C.1.pep
NYIFFLFLLYLLGFLKNPRGGPRFSFLWKIPHQGKTQYDRYYPVETISFKEPTLNPSWGINKKLQANFMVAIKLL

SEQ ID NO: 204940 - protein, 103 aa, Zea mays
  unsure (1)..(103): unsure at all Xaa locations
  Clone ID: MRT4577_118494C.1.pep
APPFCHGSVRAWVWFPSRWLVRSFRVLLCFPGSPFFAGAVSWACACPGVGRHPLFWRVLVRSRCVLGVSLSPLCVDQPGLLVGVCGVFLLLPQHXXVFVGGLR

SEQ ID NO: 204941 - protein, 52 aa, Zea mays
  Clone ID: MRT4577_118495C.1.pep
NSAKADLPWRVACRHDTISCLRAIMTPLSDVTRMTAHLPVCHAADPAWQLLD

SEQ ID NO: 204942 - protein, 72 aa, Zea mays
  Clone ID: MRT4577_118496C.1.pep
TSIWLSLCQILLLLQGHIISVVTPAGLTQGDSQSGWRECPRSFSCAKVTRNIYTQKEPQIAERTTIHSNTSH

SEQ ID NO: 204943 - protein, 35 aa, Zea mays
  Clone ID: MRT4577_118497C.1.pep
QLAQLVRARSLVRRSVLIRTRGRPILTRSPLGAFT

SEQ ID NO: 204944 - protein, 141 aa, Zea mays
  unsure (1)..(141): unsure at all Xaa locations
  Clone ID: MRT4577_118498C.1.pep
MSATIDRLATPSHEGRAHSDEKRECNSDEENSEGERKPKKDSFKKRAVTTGYRFRHSLRRKSKTKNDNHIASIEDIRDVQELEIVERFRQCLLDDGLLPEHHDDYHTMLRFLKARKFNIDKAKHXMWSEMLRWRKEFGADI

SEQ ID NO: 204945 - protein, 65 aa, Zea mays
  Clone ID: MRT4577_118499C.1.pep
MGDDGVKAATTTIVRLRELLHKWALGARGDADDGEEGEGEETHAPAAGAGAGAGGAPSSIPPFVL

SEQ ID NO: 204946 - protein, 46 aa, Zea mays
  unsure (1)..(46): unsure at all Xaa locations
  Clone ID: MRT4577_11849C.1.pep
MAKTAMAYKEKMXELSMLSLICSCFYPEPRNINIYTYDDMEVKQIN

SEQ ID NO: 204947 - protein, 93 aa, Zea mays
  unsure (1)..(93): unsure at all Xaa locations
  Clone ID: MRT4577_1184C.1.pep
MGAETVGLPTLLREIQRIDTIRLYAXLEALAGNLEDAAFSIIRHAPKLNLSHIHRESNVPEWKQGKLLHAVDAVXDIERELVRISTTRPHWTN

SEQ ID NO: 204948 - protein, 44 aa, Zea mays
  Clone ID: MRT4577_118500C.1.pep
RFQIAPVAQKTFPPRVPYGFDGTFVSNRIIDIIPLHRMSTCAFP

SEQ ID NO: 204949 - protein, 149 aa, Zea mays
  Clone ID: MRT4577_118501C.1.pep
LRAVHQVVPRYLALYVTSVPSQYMHSHVLSLYVLWHHLPSFVSVLGLSLAVDVAPFFAPMGTLFLLSRYLGLAFPLHVVLPGAYCCSWYNVWSLQLPVPGCIVNVLRPRRMICIALRAFKLLLCRARSWDTPRLEWRRCRCRTVSPVHR

SEQ ID NO: 204950 - protein, 130 aa, Zea mays
  Clone ID: MRT4577_118502C.1.pep
CPISVLSVVAMLHYYTSIPPSWPKKKKKKKKNRSTSSTRMRLLMTMRRPSMRTRSQLMACEGRLLNVKPGDVPFPCCRLSPCYTITLAYHPRGPKKKKKKKKSGSQQYQDATVDDNEGAEFEDEEPADGM

SEQ ID NO: 204951 - protein, 63 aa, Zea mays
  Clone ID: MRT4577_118503C.1.pep
PIERLLGAGQKQVRDACTNKQWSRKTMITPAARTPTHQGEPEASAKVPDSRRTHASELRRKTR

SEQ ID NO: 204952 - protein, 148 aa, Zea mays
  Clone ID: MRT4577_118504C.1.pep
ASAPNRALVLCMQMYQQTCPLHMRTYCWTSKIRDSDDPQADTLSAHPLFIILFPVSFQSLAVSAPEYPLPGVTWSHNQLFASVLVISQRRSCMRGGTEAVFRLIPMLSKSTSRSLGGTEAVLRPRTLHTKSTPRSHGGPGSFTRSLGG

SEQ ID NO: 204953 - protein, 142 aa, Zea mays
  unsure (1)..(142): unsure at all Xaa locations
  Clone ID: MRT4577_118505C.1.pep
WLGTFGLLYVLVITEDVYLVPSDSDNDIVPAGAPDGYGGKAAVKPRVKHSYREASRSEVHVVGDSGVVAYRVHPRTDEXVRLKRTVGILSIXGDKTNXPSGTTEGPTRLFKVSDLNDRYDDRVPEEGLYLDPIGLNRGSIVR

SEQ ID NO: 204954 - protein, 73 aa, Zea mays
  unsure (1)..(73): unsure at all Xaa locations
  Clone ID: MRT4577_118506C.1.pep
ALLQQLPGVHXLAQNIRAHQLQQRELANLAAYSQRQQLPPFNQLGALNSGPGGQQQQLPYIQRPAAHPQHFVA

SEQ ID NO: 204955 - protein, 91 aa, Zea mays
  unsure (1)..(91): unsure at all Xaa locations
  Clone ID: MRT4577_118507C.1.pep
EKTSXXAKXYRLCRXXMTXNAFFNVRIXKLSNXXALCHAAHXPDHTYRDVRAPKGPVTIALRPRPDRPQPADGPALEAIPLPNGXDDDGIX

SEQ ID NO: 204956 - protein, 130 aa, Zea mays
  Clone ID: MRT4577_118508C.1.pep
METPSTKSKPKPHSKPSTPSPSNSATAQSAPSAAPSKKSSTSATPSAPSSPTGSPPNTPQTPTASSSPASPSRPNSSLTSSPAGTYTAHASTSPSASATLPTPVSGNSQRSILSFQTSPRASRKYSDSRV

SEQ ID NO: 204957 - protein, 260 aa, Zea mays
  Clone ID: MRT4577_118509C.1.pep
REYLTACIEAGKFVDEEPFEWFGTGFNDGRTISFDAPRKWRNIRQQMGHGAFYGMQIVAYGQFILPTLDTVKRAVKAGDGAVLATSPPYTRFLDSGVDFAVVSESISRTDAWVQEFISHGIPCVSADYLVEYVCKPGQPLDRHVLFETNCVASKSLEKLTKKQVEMATAEKSEPSEDDDPEDLSCSACGRRDRGDVMLICGDEAGEAGCGIGMHIDCCDPPLDAVPDDDWMCPRCAVPEPETETKHARGTERRGRGSRRR

SEQ ID NO: 204958 - protein, 50 aa, Zea mays
  Clone ID: MRT4577_11850C.1.pep
VVQDGIRASACVNWLLWCVHRMIFRCKHHVVSDICGSMVLSQPIPCLCHP

SEQ ID NO: 204959 - protein, 35 aa, Zea mays
  Clone ID: MRT4577_118510C.1.pep
RLSYASVFRLWGCVIFGERLIHISWRKVTRPSMSA

SEQ ID NO: 204960 - protein, 42 aa, Zea mays
  Clone ID: MRT4577_118511C.1.pep
ATSPRLAMRTKLNYNAPSWSASAGMVFNNHASLTPSTSTSRT

SEQ ID NO: 204961 - protein, 74 aa, Zea mays
  Clone ID: MRT4577_118512C.1.pep
GGESVSRPYQDRAFFFVLRLRSRLFRPVGRAGFPLAVHHQLVNQLDATAMKTRHRNKKMKRSRTMWRRSRSTTS

SEQ ID NO: 204962 - protein, 74 aa, Zea mays
  Clone ID: MRT4577_118513C.1.pep
WIGATPKLVLQTMNVRGLSIAHVKSHLQMYRSKKLDHESAGAGHDRAAIYSGSQFSSQFSLPSASPHPRLQILV

SEQ ID NO: 204963 - protein, 41 aa, Zea mays
  Clone ID: MRT4577_118514C.1.pep
GPVTSISDVYTRIKNSPTPFQPHQEQCANGWLLNEHGKRYS

SEQ ID NO: 204964 - protein, 252 aa, Zea mays
  Clone ID: MRT4577_118515C.1.pep
IRLEEGLTIVFNKTSSIIEETKKIQIRRKPAGSSPHVPNSAVDTHTLSTPDLSLRQPESAAQETGLKASRDVANAMAAKAKLVLRELKSVKADLAFAKQRCAQLEEENRLLRETKHKGSKTEEDDDLIRVQLETLLSEKSRLAQENSTYARENRFLREIVDFHQFTTHDVVSLDDGDMEGTEPEEDDDNDNGLICAENVLPAVEENPVDEEHCPVPSKLESPVASLGEPSSSPRSSDCHSASKPDASASDVA

SEQ ID NO: 204965 - protein, 66 aa, Zea mays
  Clone ID: MRT4577_118516C.1.pep
LFQVANAMAAKAKLVLRELKSVKADLAFAKQRCAQLEEENRLLRETKQKGSKTEEDDDLVIFPPPP

SEQ ID NO: 204966 - protein, 132 aa, Zea mays
  unsure (1)..(132): unsure at all Xaa locations
  Clone ID: MRT4577_118517C.1.pep
EDFDERSEAPXRPSRKGLRNGGDKPLAALLARVGGNIEVLGFNARQRKAFLNAIMRYGMPPQDAFXTTHRLLHNLFCHIYKGGLAFSWTFLRAYLFHPQKCHSGSKTALLKKQRIPGFRADTHTYLGRTFGS

SEQ ID NO: 204967 - protein, 78 aa, Zea mays
  Clone ID: MRT4577_118518C.1.pep
HPAPRYDVPFHQPQLQLRLEWRRAQLCVWRRRRQVGHAHQESCDWLRRRPWIVSRLRRLRCCPAGVVGLSVEACVDPR

SEQ ID NO: 204968 - protein, 732 aa, Zea mays
  unsure (1)..(732): unsure at all Xaa locations
  Clone ID: MRT4577_118519C.1.pep
MDGRRRGGGAMAWLLLLLASLCTGACGLNADGVLLMSFKNTVTADPLGALAGWSYSDAAPCAWNGVICNGFPQDDTAPAAANVTSASADGNGTATVARNATGATAAAGLGASLAAATVSRVISLVLPNAQLSGTLPPDLGRVEHLRHLDLSGNGLSGSLPPTLLNATELRVLSLAGNALSGELPDAAAAYARGLQQLNLSGNALAGRLPAALCRLPSLLALGLASNHLAGELPVGGLGTLELVDLSDNDFNGSLPSDFGGTALRLLNVSSNKLAGAVPTELAAVVPANATVDLSRNNFTGAIPQAGPFAAQPAAAYEGNPNLCGPPLKQACSIPSSLSKPPNATDSPPAFAAIPKNPARAPPQAQGQPPSEQDKLRPASIVAIVVGDIAGVGLLFMLFMYAYHVRKKRRQRREQDPTPPLHLQQKSARGFDGGXSRRSTSPEAKKRRRXSTGCCIGRRNDSSDSSEYSASSDGESSDEEGLKKRGSFIGRSTPQEHGSKKHNLPQQQQQAPPAPATLVTVDGDGELEMETLLKASAYILGATGSSIVYKAVLGDGTALAVRRIGESGGAEKLKDFEAQVRAVARFRHPNILRLRGFYWGADEKLLIHDYAPNGSLANIAFSRRFGSSSPLHLSLEARLRIARGVARGLAYIHEKKGVHGNLKPSNILLGGDMEPWIGDLGLDRLASGEAAPHYRAGASARLFGSKRSMHSTSSLPDLSQMPGPGASPCGSAS

SEQ ID NO: 204969 - protein, 146 aa, Zea mays
  Clone ID: MRT4577_11851C.1.pep
MAAPPQPLASLDYWRCFFSGARASIFDAIDAAIRIAAADHPDALRARRDAIAERLYTAIVPLPAQEAPGQSTPGQPALLLPEGAASVPSLCSSDRAEVVNNDGGGAPRTNSDDDVLAEAFRIKAALSNAQDKSEAELLELLGKLGQ

SEQ ID NO: 204970 - protein, 181 aa, Zea mays
  unsure (1)..(181): unsure at all Xaa locations
  Clone ID: MRT4577_118520C.1.pep
MAYRRKQGVAAADHRSSYPQDSASSHGYTSFKSIDEPKLGLWRTLATKAKGILDEDGLAHKXRRLEEXGLRSDATASSKDQAPNSRWSFENHWKAGDAASRIRPEALSASVNQLSGKIKNALEEGLTIVDNKTSSIIEETKKIQIRRKPAGSSPHVPNSAVDTHTLSTPDLSLRQPESAAQ

SEQ ID NO: 204971 - protein, 99 aa, Zea mays
  unsure (1)..(99): unsure at all Xaa locations
  Clone ID: MRT4577_118521C.1.pep
FSQSATSASYLQMPCPVSGLHXLYSDGARTTSMIGAXSVXPYGHYLXNPVHSAELXTRYYAWCCQTCAMYEPTWQYRCXKKMRMMEVQSLRQKVHKMIQ

SEQ ID NO: 204972 - protein, 56 aa, Zea mays
  Clone ID: MRT4577_118522C.1.pep
QHYVYTIHAVAAASDGVKAWDILKEKSFNIDLVLTEVELPLMSGFLLLSTIMEHDA

SEQ ID NO: 204973 - protein, 109 aa, Zea mays
  Clone ID: MRT4577_118523C.1.pep
MRSSFGVETGPSLMVPRIMKRRGDVTCLEGFNAYSALMEVDKVNMLLVTKTDDYSFDEVVPRLIPADIDSDTTGAFGDRDELHRLDVDAGRRQERTRAPRRTLRDHAAP

SEQ ID NO: 204974 - protein, 197 aa, Zea mays
  unsure (1)..(197): unsure at all Xaa locations
  Clone ID: MRT4577_118524C.1.pep
PASDFISVQTPMLNAIAGGATAKPFITHHNDLSMDMFLRIAPELYLKMLVVGGLNRVYEMGRQFRNESMDLTHNPEFTTLEFYMAYADYNDLMGMTEDLVSGLVKHIHGSYITKYHTINGEELEINWEGPWKRIEMISTLEECVGEKXPPADELHTDEANVFFKRILKKTGVECSAPLTNARVLDALGGEFXLESQC

SEQ ID NO: 204975 - protein, 93 aa, Zea mays
  Clone ID: MRT4577_118525C.1.pep
MKRARSSEVFIGVGRLRARRGLAPLLAAAAFAYLLFVSVKLTYLGSAGPAPAVGRLATTGAGEPAARARSSGGGAVSGYGRITGEILRRHEPF

SEQ ID NO: 204976 - protein, 50 aa, Zea mays
  Clone ID: MRT4577_118526C.1.pep
PSAEPRRSCRRLTKNSLAAWAPTPVWEWLHPWLCGRISWRLVTHEEGVGG

SEQ ID NO: 204977 - protein, 49 aa, Zea mays
  Clone ID: MRT4577_118527C.1.pep
KSVIILSEGGAPHERAHQQHHKPMYASRVRFPVTVCHENCVNVVTTPCS

SEQ ID NO: 204978 - protein, 139 aa, Zea mays
  Clone ID: MRT4577_118528C.1.pep
HCDPMFASRALTVRNVVSLVIQALSCGGRMGFSSGVWMLEGSMVELGLFPDVRTVYGIPIWALDGHEQRALLISLSRLWSCIPPCATVADAACTPPSKRKRYARATTSAAKHTRVVSAGAIEQRSVRSRLLASCSCFRG

SEQ ID NO: 204979 - protein, 308 aa, Zea mays
  unsure (1)..(308): unsure at all Xaa locations
  Clone ID: MRT4577_118529C.1.pep
MSSPTHVRKAIRFASLRAKIAQQGKTGLALRLLLAAALAGFLLVFAARTLVTPSPAPTSSSQAQEYHQDAAPECGKGNAGLPLAVAEALVHYTTSNVTPQQTADEIGVSLRVLQRRAPCNFLVFGLGLDSPMWAALNHGGRTNSARGDASWIASVRSKHPGLESYHVAYDTVLTDADSLLGLRDHPACXRSQTSPXAAASCRLALALKGLPPVFHELEWDLVMVDAPTGWTPQAPGRMAAIYTAGMAARARRPGDGPTDVFVHDVDRPVEDNFSKAFLCEGYLAEQVGRIRHFVIPSHREKDGTPFCP

SEQ ID NO: 204980 - protein, 52 aa, Zea mays
  Clone ID: MRT4577_11852C.1.pep
PPPPPFGFCSKPQKKKKKKKKKKKKKKKKKKKKKKKKKKKTKKKKKKKKKKK

SEQ ID NO: 204981 - protein, 137 aa, Zea mays
  unsure (1)..(137): unsure at all Xaa locations
  Clone ID: MRT4577_118530C.1.pep
TLKKVEGKNENKTKRNEITSPRTREHRSRSEPEPASTHGAPHQEPSQIPAHGTKKRSRALTAGCVHRIPPGRARICTARGDRDQITRAGAADQSEKIRTGGERGAGWGRQRTAGNRVPSFFLIFASASDXPVRRTLS

SEQ ID NO: 204982 - protein, 134 aa, Zea mays
  unsure (1)..(134): unsure at all Xaa locations
  Clone ID: MRT4577_118531C.1.pep
MASVAAAEVAAAALRSVLSRAQQAAARAGRAPGSVRVVAVSKXRCFGENYVQELIDKAPQLPEDIEWHFIGNLQSNKARALLAGVPNLDMVESVDDEKIANRLDRVVADLGRKPLKVLVQVNTSGEESKFGVDP

SEQ ID NO: 204983 - protein, 243 aa, Zea mays
  Clone ID: MRT4577_118532C.1.pep
MASVAAAEVAAAALRSVLSRAQQAAARAGRAPGSVRVVAVSKTKPVPVIRGVYDAGHRCFGENYVQELIDKAPQLPEDIEWHFIGNLQSNKARALLAGVPNLDMVESVDDEKIANRLDRVVADLGRKPLKVLVQVNTSGEESKFGVDPSGCMELAKHVKLNCPNLVFSGLMTIGMLDYSSTPENFKALANCREEVCKELGIPEEQCELSMGMSADFEQAIEMGSTNVRVGSTIFGAREYPKKN

SEQ ID NO: 204984 - protein, 93 aa, Zea mays
  Clone ID: MRT4577_118533C.1.pep
AVIGYMYVFGSGLLGAFLFRFFVEDKTFPYGWTLVMEIVPGFSLYRGLYELGQYAFSGSSIGTTGMTWRSLKDPLNGMRDVMIVMSVEWAVLL

SEQ ID NO: 204985 - protein, 71 aa, Zea mays
  unsure (1)..(71): unsure at all Xaa locations
  Clone ID: MRT4577_118534C.1.pep
GPFKSYDLSYKPISSSIXVGVLLLIPXFCILSPSNRIHPSFLYRFPPPPVGDPVGEKKKKNFMEFLETNKL

SEQ ID NO: 204986 - protein, 53 aa, Zea mays
  Clone ID: MRT4577_118535C.1.pep
FNMPRKISFRRFMTWREHTATGGTLFLRHTICKLREGSSNFRLLATEGRIHQT

SEQ ID NO: 204987 - protein, 104 aa, Zea mays
  unsure (1)..(104): unsure at all Xaa locations
  Clone ID: MRT4577_118536C.1.pep
CEDSILVFTMDMLANDGVHSFAIGXSVPLLIHFSYTISSFASFSVLTNKAVQYNQSQPLHLIQKHLNRLTAAATDSPFRNPPNLTLIIMHPYYTLSIAQLPNYN

SEQ ID NO: 204988 - protein, 77 aa, Zea mays
  Clone ID: MRT4577_118537C.1.pep
EHLAFCTIPYQQKPHPTEPNRENQTTIATTVHSLIHHRQNLNGHAARNTLNWDASCATPHLLTFAAKHSVGKLCHAN

SEQ ID NO: 204989 - protein, 39 aa, Zea mays
  Clone ID: MRT4577_118538C.1.pep
YVIMHTHTAYIYARSSKSSKSRLNTRARCTSLVPASSTE

SEQ ID NO: 204990 - protein, 71 aa, Zea mays
  Clone ID: MRT4577_118539C.1.pep
TSARDYTSGILPRDQPPQRSSNIPYSREGHVLRFLTVRTLYAYLKHQHLPDQRKFPRTLKLKDASSGLCLR

SEQ ID NO: 204991 - protein, 49 aa, Zea mays
  Clone ID: MRT4577_11853C.1.pep
SCCKVSNHVFVIKVATEALRWHIARNDHLNLTRNRKVGGTVVLRNCLGG

SEQ ID NO: 204992 - protein, 34 aa, Zea mays
  Clone ID: MRT4577_118540C.1.pep
GRFFHHNIRSKSTKMFGHCHTQKLVGNMMKFSST

SEQ ID NO: 204993 - protein, 61 aa, Zea mays
  Clone ID: MRT4577_118541C.1.pep
TIPRIFIYAFRVYFLLIILHIPLFMVPFITFTFTTSYLNNIILVYLKLYFLHHSIIKLFFY

SEQ ID NO: 204994 - protein, 74 aa, Zea mays
  Clone ID: MRT4577_118542C.1.pep
MAQNKMIVVVLLLATFLVVARSLWVPEEPSNADDIRGACIEECTKENKAPGDKKTCEVLCTKLTKKPSEEGKHD

SEQ ID NO: 204995 - protein, 103 aa, Zea mays
  unsure (1)..(103): unsure at all Xaa locations
  Clone ID: MRT4577_118543C.1.pep
MHTLHHGDSRRASRSEVVYVDMPAPYARTKKFTPLRGVRSDIDFVSPTVEEIKTKRQLAQYLKVHPXGPAVSKLDWRTADTPSCSARINENVKVFDSPDAEKI

SEQ ID NO: 204996 - protein, 59 aa, Zea mays
  Clone ID: MRT4577_118544C.1.pep
SCSGACYPTSSVLIGLGIPACVIKINVFCVLVERVLRGPYVLGQSISVNTASNWVHVTL

SEQ ID NO: 204997 - protein, 220 aa, Zea mays
  unsure (1)..(220): unsure at all Xaa locations
  Clone ID: MRT4577_118545C.1.pep
VLLGDSATDSDERRASERGCLPPAGALPDHVPRHQKASERGCLPPPAPLIWRRLPAALLLPRRQESVREVDPIEKMEEVENTSKRKAPELDSEDSSAAAVMNGQQSLPGSAAKRQNLARSCIHEVAAPNGYDLSKDEAVHGTLSNPVFNGNMAKTYPFQLDPFQTVSVACLERNESVLVSAHTSAGKTAIAEYAIAMPFRDKQRVIXYSSPLKDLSNQKY

SEQ ID NO: 204998 - protein, 37 aa, Zea mays
  Clone ID: MRT4577_118546C.1.pep
MSTMITSMGILKIMKFSVYVCVHVSLTYVVTYDFKTV

SEQ ID NO: 204999 - protein, 94 aa, Zea mays
  Clone ID: MRT4577_118547C.1.pep
NGNTPHKMGGSTTNREPPNKGGGGKTSHCQAQGGGHAPSNWGNHRPHPPKRGPPPQKGGGTPRKADAPGHKETGLPPLKVLLPPKGPSKWGAHV

SEQ ID NO: 205000 - protein, 799 aa, Zea mays
  Clone ID: MRT4577_118548C.1.pep
MRIALPPSSLSRLLVVATSSSAPPSRGRSWSPSSSSCVRRWSRRWRMPAMGRSSRACSLLGSTHLLLLLLLSVGSAVAQNGSTWKTLSGKAPAVVAKGGFSGLFPDSSDYAYQFVGIASSPDTTVWCDVRLTKDGAGICLPSINMDNCTIIASVFPQGKKTYKVNGVSTAGWFSVDYTSTVLLQNVSLKQSVLSRTPAYDGLFQINPVENIFTLYKAPAVWLNVQHDSFYSQFKLSMRSYILSLSKQFIVDYISSPEVNFLTSISGRVSKKTKLVFRFLDERSIEPSTNQTYGSMLKNLTFVKTFASGILVPKSYIWPVTPDNYLLPYTSVVDDAHKAGLEIYAADFANDLTISYNYSFDPLAEYLFFIDNGAFSVDGVLTDFPITPSEAVGCFSNLNTSKIDHAKPLVISHNGASGDYPDCTDQAYEKAVADGADVIDCPVQVTKDGILICMSSVDLMDVTTVAKSQFASQVTTINSLKAGSGVFTFNLTWDDISKNLQPMISNPMSTYKLYRNPRNKNAGNFMRLSDFLTFANGKDLSGIMITVEHAAFMAEELGFGVVDAVVKALDDSGYSKQTAQNVMIQSTNSSVLVKFKQETKYNLVYMIEESVRDAAPSSLADIKKFADAVSVGTTSVFPETHYYLTNQTNKLVPSLKSAGLQVYVYVLMNEFASQPNDFFADATSQINAYVQSAKVDGVITDFPGTAHRYKLNSCTSMGKNMPLFMQPPQPGGLLSTILPDAQPPAAAPMPLLTDADVAEPALPPVSNTTTAASPSHAALRMRTHVLSITTLLMLCASLLI

SEQ ID NO: 205001 - protein, 55 aa, Zea mays
  Clone ID: MRT4577_118549C.1.pep
VFGYLARFKQLSGSKNKKICLPPQCAVDFFNGFLSIKRSFLVHLAHTEQFYPAFK

SEQ ID NO: 205002 - protein, 79 aa, Zea mays
  Clone ID: MRT4577_11854C.1.pep
MDASGAGSKAKKGAAGRKAADPSNKSNNSINTDDNNNNSTTTLLLLNNTEAPTMLTSTKKNLNTAHHKNKVTSYSETNS

SEQ ID NO: 205003 - protein, 52 aa, Zea mays
  Clone ID: MRT4577_118550C.1.pep
LNTCRPFSAARLKPAYYIEGHTNLSFKLQHLSMQIYIYKGAFRQVNGLENQI

SEQ ID NO: 205004 - protein, 210 aa, Zea mays
  unsure (1)..(210): unsure at all Xaa locations
  Clone ID: MRT4577_118551C.1.pep
CATLFFVKLLLVRAESEILRLPGETQQALQTLDSIKSQMKTAFQGHIERINGNTSLEESHNQQHQVRGEVFTPKHPSLRKGSWADVKYKGEWMKRPISEAEVAWLARILIRLSDWLNDALGLECADAEGSPAGATYIQFDGNTTVGGPRDAARMALGAVCSFMVLVGQAVLKLMRSXKVKISLRVFASKKLLSAAVVLYAVVAVTRNVSR

SEQ ID NO: 205005 - protein, 138 aa, Zea mays
  unsure (1)..(138): unsure at all Xaa locations
  Clone ID: MRT4577_118553C.1.pep
IRLINASLDLTLHTNFIDRECQTALGLNIIKFNSDQSIQNKDFIALNVPKWKWVVKAIDKLRRAFLXKGRKEVNGGSXHMSWEKITRPLNLGGLGIPNLQLMGWALHARWLWFXKTDSSWPWPGLDFPVQALVRADAW

SEQ ID NO: 205006 - protein, 103 aa, Zea mays
  Clone ID: MRT4577_118554C.1.pep
MAYVDHALTITGRQDLVDGLVGGPPGFPVKEIAFGTALVALGILGVVAASFMSAHQVGGDRAPGIFFPNKRGVMFITGLKFPIIAYYAYKKNKIFSFSHIPHK

SEQ ID NO: 205007 - protein, 79 aa, Zea mays
  Clone ID: MRT4577_118555C.1.pep
MADGEDIQPTLCDNLSGMAKDGFAEDDTPRARMPSIVCQTHHTAGHGWMGQIDTSVVDHTQPKRGIVTLMYTIAHSIVS

SEQ ID NO: 205008 - protein, 187 aa, Zea mays
  Clone ID: MRT4577_118556C.1.pep
MAANLKWAPVLALVVVVAAMVGTTSAGNIAVYWGQNGNEGSLADACNSGVYAYVNIAVLTTFGNGQNPVLHLPGHWEPRSGSWTGQKNDIQNWQSLGIKGVLSIGGGSGSYGLSSTDDGNSVGDYLWDNFLGGSGSSRPLGAGVVDGIDFDIENGQSAHYDDLANALKGKGSVLLTAAPQCPYPDAS

SEQ ID NO: 205009 - protein, 173 aa, Zea mays
  Clone ID: MRT4577_118557C.1.pep
MTTSTPTPRRRPGHLGLNLLRLLVQNRIAEFHTELELLPVKALEHPCIKHAVELEQSFMEGAYNRVLSARQAVPHETYVYFMDLLAKTVRDEIAGCSEKGYDSLSVSDAKQMLMFSSDQDLHEYITEEHPEWEFKNGAVFFQKAKESQPYKEIPSLQLINQTLSYARELERIV

SEQ ID NO: 205010 - protein, 240 aa, Zea mays
  unsure (1)..(240): unsure at all Xaa locations
  Clone ID: MRT4577_118558C.1.pep
VPRGRPGHFFSRRVPCLHSRYRSSTTKEPAVGGITNTNCQDPKCNILLARRPENHDQRWLLSAHQPLPQLPSSHWYCRRCAKVLQPILYRCVKRKPELDYHDETLGDMTAYRRRINLALKRSHMHERNSPPRTVDNCETAENRGICLGEVXLCVEAGPXKELTAEHHKERRQREYHQKKFIAFYKGGDTLLPAVTCVKLGGTTPHPIGNNYYIARAPLKIMGKIDSTSKGHTGYNRDSLL

SEQ ID NO: 205011 - protein, 296 aa, Zea mays
  unsure (1)..(296): unsure at all Xaa locations
  Clone ID: MRT4577_118559C.1.pep
MAANLKWAPVLALVVVVAAMVGTTSAGNIAVYWGQNGNEGSLADACNSGLYAYVNIAFLTTFGNGQTPVLNLAGHCDPGSGSCTGQSSDIQTCQSLGIKVLLSIGGASGSYGLSSTDDANSVADYLWDNFLGGSGSSRPLGGAVLDGIDFDIENGQSAHYDDLANALKGKGSVLLTAAPQCPYPDASLGPALQTGQFDNVWIQFYNNPGCAYANGDDTNLVNAWNTWTSSITAGSFYLGVPASPQAAGSGXTSTPAXLTGTVIPAIRGIGNYGGIMVWDRFNDVQNNYSSQVKGSV

SEQ ID NO: 205012 - protein, 46 aa, Zea mays
  Clone ID: MRT4577_11855C.1.pep
GITPSKIRWCIISPFLKFRDDPIRYEQRLICKHPLCASVQADLLVR

SEQ ID NO: 205013 - protein, 178 aa, Zea mays
  Clone ID: MRT4577_118560C.1.pep
LRNPVVLSGFGFIVSSKLKPLLSLQKEMVIRVQTSSEKGHSKAIKAAAAISGVESVTIAGEDKSLLLVIRGVGIDSDRITKKLRRKVGHAEVVELRTVDAAAADHAPYRYYHASPSPSPCRYHCYGGMDHRYAGAGGGYPAAQYQQQHDYQLYHPAAATTHTVVHHEYATDPNGWSVM

SEQ ID NO: 205014 - protein, 239 aa, Zea mays
  Clone ID: MRT4577_118561C.1.pep
FSSRKDQEVLELLCCSFSYPSLTEQVLNSANISGDIYEHAVVLSVKLEDQDAFERDFCQLKPYYMDTCGIIPASPEEYPILGLNLLRLLVQNRIAEFHTELELLPVKALEHPCIKHAVELEQSFMEGAYNRVLSARQAVPHETYVYFIDLLAKTVRDEIAGCSEKGYDSLSVSDAKQMLMFSSDQDLHEYITEEHPEWEIKNGAVFFQKAKESQPCKEIPSLQLINQTLSYARELERIV

SEQ ID NO: 205015 - protein, 148 aa, Zea mays
  unsure (1)..(148): unsure at all Xaa locations
  Clone ID: MRT4577_118562C.1.pep
QGFKKEFSFSKIPQDLKKKFLSNGPVVQDPKLGKVIQLQGXQRKNVSIFLLQAGIFKKEPPKILGFLAPPGSIANHPCMQGQLFINKILGGAYLSGLVLQTGLVPPLGVPLFSKIGPPPGVGLFPSCQPLFYQAPSNIKGVLSFPEHV

SEQ ID NO: 205016 - protein, 69 aa, Zea mays
  unsure (1)..(69): unsure at all Xaa locations
  Clone ID: MRT4577_118563C.1.pep
MATVAMDISKPTPAASGGEAAAAANGRSGGGGDGLWGERGXHIHYXHLHIPXNTHNLNLLXAHPNYLNS

SEQ ID NO: 205017 - protein, 73 aa, Zea mays
  Clone ID: MRT4577_118565C.1.pep
LVSVINKPLNAEPPPNPHISKTLDCTRQSPAPPRVWRQSRPNAAQRAPQNPSSRHRYEIDGVEATPDRRTGER

SEQ ID NO: 205018 - protein, 296 aa, Zea mays
  unsure (1)..(296): unsure at all Xaa locations
  Clone ID: MRT4577_118566C.1.pep
MAANLKWAPVLALVVVVAAMVGTTSAGNIAVYWGQNGNEGSLADACNSGLYAYVNIAFLTTFGNGQTPVLNLAGHCDPGSGSCTGQSSDIQTCQSLGIKVLLSIGGASGSYGLSSTDDANSVADYLWDNFLGGSGSSRPLGAAVLDGIDFDIENGQSAHYDDLANALKGKGSVLLTAAPQCPYPDASLGPALQTGQFDNVWIQFYNNPGCAYANGDDTNLVNAWNTWTSSITAGSFYLGVPASPQAAGSGXTSTPAXLTGTVIPAIRGIGNYGGIMVWDRFNDVQNNYSSQVKGSV

SEQ ID NO: 205019 - protein, 296 aa, Zea mays
  unsure (1)..(296): unsure at all Xaa locations
  Clone ID: MRT4577_118568C.1.pep
MAANLKWAPVLALLVVVAAMVGTTSAGNIAVYWGQNGNEGSLADACNSGLYAYVNIAFLTTFGNGQTPVLNLAGHCDPGSGSCTGQSSDIQTCQSLGIKVLLSIGGASGSYGLSSTDDANSVADYLWDNFLGGSGSSRPLGAAVLDGIDFDIENGQSAHYDDLANALKGKGSVLLTAAPQCPYPDASLGPALQTGQFDNVWIQFYNNPGCAYANGDDTNLVNAWNTWTSSITAGSFYLGVPASPQAAGSGXTSTPAXLTGTVIPAIRGIGNYGGIMVWDRFNDVQNNYSSQVKGSV

SEQ ID NO: 205020 - protein, 81 aa, Zea mays
  Clone ID: MRT4577_118569C.1.pep
SLFAIKIDIKGVPKKTPLFKAMGEVFFKPKWETSSWGKKFFVQKRRASPNAFYGFKVILAKIKRGGAFRQGLPKFKKGSPA

SEQ ID NO: 205021 - protein, 139 aa, Zea mays
  Clone ID: MRT4577_11856C.1.pep
MVSTLCSPPPSLCFLLFAIVLYLAKMKEEFPGPGMSRWWDFTSPAPDYCSFRGVACDTSGNVTGIDVTVVAPRRPAPAGVCAALPALRELQMACNDVRGGFPWACSTAPTGGAHLSFSACLRRAPACPAGALGCSPVNT

SEQ ID NO: 205022 - protein, 72 aa, Zea mays
  Clone ID: MRT4577_118570C.1.pep
EEEEAHAGDDEVVCQEQERVGEDADDGDGEDHDARVGEGRGRRRRRGRVHVRSWNRSRRRVRRQRCSSGLEP

SEQ ID NO: 205023 - protein, 151 aa, Zea mays
  unsure (1)..(151): unsure at all Xaa locations
  Clone ID: MRT4577_118571C.1.pep
PRVRGINISEKLTYVEARVLPAPWLKYHDTGKEKECLPQVGQWNMVNKKVINGCKVSHWACINFSRSVPEATARGFCQELAQMCQISGMEFNSEPVMPIYSTRPXDQVVEGLKSGYNXALNKLKGXKNFDLLXAILADNKGPLYGAIKRIL

SEQ ID NO: 205024 - protein, 61 aa, Zea mays
  unsure (1)..(61): unsure at all Xaa locations
  Clone ID: MRT4577_118572C.1.pep
GGGGVVHRDPAVGWFLEGALGVILHPFFRGVNWALGRAFFSXXLXXPLCGGGEFFFCXXCX

SEQ ID NO: 205025 - protein, 100 aa, Zea mays
  unsure (1)..(100): unsure at all Xaa locations
  Clone ID: MRT4577_118573C.1.pep
MVRIGGGVFPVIKEPDYLXNGEYRIDKGAAPKMLNCLMYKLCYYRFGELTTEYGKPPGYDRVRGVEIGNKDIKLEYLEEAFTTSNWIVRIYKVKPPKNRS

SEQ ID NO: 205026 - protein, 161 aa, Zea mays
  unsure (1)..(161): unsure at all Xaa locations
  Clone ID: MRT4577_118574C.1.pep
GPPTRATVFTSIFWQELMFLXGTKLRMTRACHPQSDGQSQSANRVILMYLRCLTGDRPRDWLRWLPWAEYLFNTAYQTSLKDTPFRVVYGRDPPTIRSYEPGDTRVPAVAKNMEERAEFLADMLHRLEQAQTFQKRHYDRGHRPIHYKVGDWALLRLRQRA

SEQ ID NO: 205027 - protein, 60 aa, Zea mays
  Clone ID: MRT4577_118575C.1.pep
ICAPVINLPGGKSLVQCVDASDQNPRARRTENDNRRREEIRDRDPELQKEGDEDAKNRGD

SEQ ID NO: 205028 - protein, 209 aa, Zea mays
  Clone ID: MRT4577_118576C.1.pep
MAASIAASSFFPGSPAPAAPKNGLGERPESLDVRGVAAKPGASSSAVRAGKTRAHAAVPKMNGGGKSAVADGEHETVPSSVPKTFYNQLPDWSMLLAAITTIFLAAEKQWTMLDWKPRRPDMLTDTFGFGRIIHDGLMFRQNFSIRSYEIGADRTASIETLMNHLQETALNHVKTAGLLGDGFGSTPEMSKRNLFWVVSQMQAIIERSC

SEQ ID NO: 205029 - protein, 113 aa, Zea mays
  Clone ID: MRT4577_118577C.1.pep
AVLAALLLASSEPASAAVSCSDVTSSVAPCLGYAMGTTASPSPACCTGVRSLNSRASSTADRQATCACLKSMTSRLGGGGGGVSMGNAASIPSKCGVSVGVPISPNVDCSKIN

SEQ ID NO: 205030 - protein, 214 aa, Zea mays
  Clone ID: MRT4577_118578C.1.pep
MAASIAASPFFPGSPAPAAPKNGLGERPESLDVRGVAAKPGASSNAVRAGKTRAHAAVPKVNGGKSAVADVEHETVTVPSSVPRTFYNQLPDWSMLLAAITTIFLAAEKQWTMLDWKPRRPDMLTDTFGFGRIIHDGLMFKQNFSIRSYEIGADRTASIETMMNHLQETALNHVKTAGLLGDGFGSTPEMSKRNLFWVVSQMQAIVERYPCWGD

SEQ ID NO: 205031 - protein, 74 aa, Zea mays
  Clone ID: MRT4577_118579C.1.pep
ASTGRVAFLLHAAQLLLVKIGVDPFCVRLAEKRWILSSVITVGDCTAPPVMQLLAYGQWHDLRFHHTILKCSQA

SEQ ID NO: 205032 - protein, 78 aa, Zea mays
  Clone ID: MRT4577_11857C.1.pep
FYAFVGVGSISWRTLVSARCRALQKTSVRLCLSVHRRHRHFEIDLPFRLAQLVDLVSWGIYGPGCSKSMERWLPRPSV

SEQ ID NO: 205033 - protein, 128 aa, Zea mays
  Clone ID: MRT4577_118580C.1.pep
ISRMPSSEFSSICKDLSSIGDTVIISVTKEGVKFSTAGDIGTANIVCRQNKTVDKPEESTIIEMQEPVSLTFALRYMNSFTKASPLSDQVTISLSSELPVVVEYKIGEMGYIRFYLAPKIEEDEEMKA

SEQ ID NO: 205034 - protein, 32 aa, Zea mays
  Clone ID: MRT4577_118581C.1.pep
MLNKDTSLLYHTWKRYDKLPLFIYISDNYSLS

SEQ ID NO: 205035 - protein, 74 aa, Zea mays
  Clone ID: MRT4577_118582C.1.pep
TPDKLFFRLNKIYMIPPPPSLTGSHLHKDDISFYYKFVTTNEVNSFLPSSSINDLSSTSTEKVHLLYLISVLHT

SEQ ID NO: 205036 - protein, 44 aa, Zea mays
  unsure (1)..(44): unsure at all Xaa locations
  Clone ID: MRT4577_118583C.1.pep
LCHGPADLEEPYXSILVSCRHHMASRLCRLHSFSMEYREKARSF

SEQ ID NO: 205037 - protein, 72 aa, Zea mays
  Clone ID: MRT4577_118584C.1.pep
ACRQRRVPSVPCPAESNTAPSVHCHLCNKRGKPRKGHRATASHEVVTQNGRFSNFLKSSFLLGSFISALASS

SEQ ID NO: 205038 - protein, 141 aa, Zea mays
  Clone ID: MRT4577_118585C.1.pep
CILLTTYVYSISVRWQRSGILLICCCVSHSVNSSCQPPAFFFIDAAVSNKLQCLFTPVASITIHPASRCQPYCLLGTSCSCYRSQCTLSQSLAPYNIFFYRVHTKVLVLPDAAAFDHQPIIGGTHFRLLMSYSSHNVSIFG

SEQ ID NO: 205039 - protein, 193 aa, Zea mays
  unsure (1)..(193): unsure at all Xaa locations
  Clone ID: MRT4577_118586C.1.pep
MLGMRLVGLCKRRRQMDDTIECWDQPHVSLGIDLVAAGRNKKTERTAYLKLLLKLYRFNAVILKRYFISKTNRPXPLSLHRLISFMEGXGNVTDDKRVYEVSAVKVAAWARILSAGDECLAFDXLSIVRETVKDFGSAFGVPHNHTXRKGRKLEKARGRRKTSASTSEEKQRNNEEMKEKIASKRGDWAVAPR

SEQ ID NO: 205040 - protein, 105 aa, Zea mays
  Clone ID: MRT4577_118587C.1.pep
GRKTYSPDYLSSETHRGKIVTYHVVRHKERSTGRVGADDSPDVVNSDDGDGPPPEVVYLHRGCPEHHHERVCPSSDRHPLWRNLCLPTHAIRSPMSCQCIGQHAA

SEQ ID NO: 205041 - protein, 196 aa, Zea mays
  Clone ID: MRT4577_118588C.1.pep
MDLSAVQAALSDKSYTAVASLCDELLLQAASKGTNTDEWPYSVHLLAHLYINDLNSARFFWKSLPQEVKDTRPELAAVWRIGQCLWNRDYAGVNTAAQGFEWGPDLTEFITAFLESYRQRIFKLLTSAYSTISVADVAHFMGMSEEDATNYAVQIGWSLGAATKMLTVKKPKAQINQKLDASKLQRLTECVFHLEH

SEQ ID NO: 205042 - protein, 100 aa, Zea mays
  Clone ID: MRT4577_118589C.1.pep
SQGHWGPGHFLNPFFFFPFSLKGPFWGPRFNHVLGGLNWQNHPFGGTFHFNGFWPGNFCFLGGSWARQGFCLGAPFPNQPFPGPYTRGGWELKFGRGGGV

SEQ ID NO: 205043 - protein, 89 aa, Zea mays
  Clone ID: MRT4577_11858C.1.pep
GSSPTPNPNSLLPPGLAGPRGHRGWRSRASTLVSRRQPCATRLPATIPSPLYRPPFVARSPHVPPSSLPSFSTSLPRSPSTSVLPVPPS

SEQ ID NO: 205044 - protein, 104 aa, Zea mays
  Clone ID: MRT4577_118590C.1.pep
MKEASAYSLSAMATAAASSLLGSSVGCSRLPAATQTTPTALVVAIGPRGAGAEPICASMSMSSARAPYDRTSVRFSPIKESIVSREMTRRYMTDIITYGDTDVV

SEQ ID NO: 205045 - protein, 77 aa, Zea mays
  Clone ID: MRT4577_118591C.1.pep
QFLSLANGSGSARQVCGGRPVNPTKSTTKMLFGPESIITILVLSLLVSGASFFQYTLILKTAVLMFFCLKLMSLQWF

SEQ ID NO: 205046 - protein, 47 aa, Zea mays
  Clone ID: MRT4577_118592C.1.pep
SYSFGIFWCLAISLENIDINRNTDIVFCVIILLCSVCLLFGYVVRIE

SEQ ID NO: 205047 - protein, 118 aa, Zea mays
  Clone ID: MRT4577_118593C.1.pep
KNFIGGQINLGGGGCNRVNQHGGGPTVVHGPKDWPPKWGGGLQTEKPWFFFFHTPPKKPMFGSQLGPAFYWSTPPPRLIDKNQFPGPAIGGNKNCRGWNLHLPPQLETRGGGLRGLPP

SEQ ID NO: 205048 - protein, 97 aa, Zea mays
  unsure (1)..(97): unsure at all Xaa locations
  Clone ID: MRT4577_118594C.1.pep
QRCNMVYRENTVEMDKVHIIFSMINGLMKFDNNGPSKLRVIVIPYEKELQNPNSFRARNTEYCGKWPERNKAKAXSXVDLQLVLGAADENYQDSPEC

SEQ ID NO: 205049 - protein, 67 aa, Zea mays
  Clone ID: MRT4577_118595C.1.pep
MAAVDLSKLVKEKRFWVASFLVVWAAALQGHMMWMQRQDTFKHKFGIDQADGPDAQDSSSSSSSSSS

SEQ ID NO: 205050 - protein, 105 aa, Zea mays
  Clone ID: MRT4577_118596C.1.pep
ANETKPLLAQNRQSNYTVTFKLICHPVFLIDVPNSKKHKPVTHIKTIFATFRKRILLKIIFARFFLPSKASPNYKSTGFNALLKSSPTNGGTLGKKTIPPKCCAH

SEQ ID NO: 205051 - protein, 121 aa, Zea mays
  Clone ID: MRT4577_118597C.1.pep
LTQDNHPLHLHLATFQAVRARGLDGLEEFKHCMERLNDAVRCDVGRHAVGEEVAVPEHERTWKNVVKIAPGFMTTVVVKFLMVDTGRSYPFDATAEPGYVYHCHILDHEDNAMIRPLKLIK

SEQ ID NO: 205052 - protein, 63 aa, Zea mays
  Clone ID: MRT4577_118598C.1.pep
APWVTPSRRTPLGHPSTFTDQTPSPYPHQSYKQRCSTQQGYQPPPTQDHNRPHPVHAPFPKLS

SEQ ID NO: 205053 - protein, 78 aa, Zea mays
  Clone ID: MRT4577_118599C.1.pep
GRPFFLFTFHRRHGSLHPSSSLRESPGGRDGHGHPRHPLAGRIKNNNPAKLSLIGAQAAKLQQAPFLHNLPPRWPPDV

SEQ ID NO: 205054 - protein, 95 aa, Zea mays
  unsure (1)..(95): unsure at all Xaa locations
  Clone ID: MRT4577_11859C.1.pep
TXXXSPGSLGLAREVDSGNCLSLLDNRNCPMTRTSKANHNNCRQTADILDFNLRECSSFKKGHSKGPCESTFIKQRHSQXXXXXXXXTGVGEFAE

SEQ ID NO: 205055 - protein, 223 aa, Zea mays
  unsure (1)..(223): unsure at all Xaa locations
  Clone ID: MRT4577_1185C.1.pep
MAAKQPLADVEDGLLAHLNANAEIPDSRSFASSLGVPHKDVEDVIKRLTAFRIVESADITKETWVLTDEAKGYAARGSPEVQLVAAIPPEGASKGALKESLGDVFDIGMKAAAKNKWIGFEKGNKDLVLRKVEDTNDELQEQLIRLENGEVIADKVIDDLKRRKLVTKEKSIWYSLKKGPEFVAKRKTLATDVTREHLKSGDWKDLEFXDYNYGAQGQPIAIG

SEQ ID NO: 205056 - protein, 256 aa, Zea mays
  Clone ID: MRT4577_118600C.1.pep
MDLASVNEELAEIDGQIGDILRVLQNGFQKLEKIKDANRRSRQLEELTDKMRDCKRLIKDFERVSKAEAEHTDPATAKMLHDRKQSMIKELNSYVALKKQQASENKRIDLFDGPSAEDGFGEENVLLASNMTNQQLMDQGNQLMDETDQAIARSKQTVQETVNVGTETAAALKAQTEQMSRVVNELDSIHFSIKKASQLVKEIGRQVATDRCIMAMLFLIVAGVIAIIIVKIVNPHNKDIRDIPGLAPPVSRRLLR

SEQ ID NO: 205057 - protein, 174 aa, Zea mays
  unsure (1)..(174): unsure at all Xaa locations
  Clone ID: MRT4577_118601C.1.pep
HHPDCTGSCGTWRTLTHQMLDLRXFSSYLVERQGRTSEMEREXCKKLKVNNGIEKGSMDGALIYIENPISXRTEHMNYLRLAFQLDACGARPCTHAKRQDIRTSMRXITRXIDSGLSTVNXHKMHRTMXAFXRQRLNMKVQGKHMDGAMDXTANSLCPEXEDSSLMHLGWDDYG

SEQ ID NO: 205058 - protein, 128 aa, Zea mays
  Clone ID: MRT4577_118602C.1.pep
LTTSKGTSFPSREMYITLTKKPNTTQAFAWRKWKKGKAPNPKHKMGQTSPPRPSSTQPYNTRHRTPQQRRRGKIDNLPSQQQGWLRLVILQSSRSQSQHHRTQLEHQPGALGKEQKTAAARHGEMAAW

SEQ ID NO: 205059 - protein, 59 aa, Zea mays
  Clone ID: MRT4577_118603C.1.pep
PILFQRIHNSHYADKKGGYTRNPARDLLLHRFISHLICFLSISWAGHTKHCALRSAAWN

SEQ ID NO: 205060 - protein, 233 aa, Zea mays
  unsure (1)..(233): unsure at all Xaa locations
  Clone ID: MRT4577_118604C.1.pep
WTPAVPVRNSRVDPRVRTELRDLLVQTLENSGVLNRIKAELRAAVFLALEEQEKVENKTPLVNENLKKFLNTKDGRLVASLVAEFLQFFNLDFTLAVFHPETSTIQGLEGRENLAQDLGIIEAEGTVGGPLLLEVIRRCQQKEKGPASVEGALDLSDGHPPSKSPEGKSSANSTPSKKTSSETSQSEPSVSLSESKSKSSLHSLAHETRIASFLSSSAXNARDSSALCPNGDD

SEQ ID NO: 205061 - protein, 224 aa, Zea mays
  Clone ID: MRT4577_118605C.1.pep
MRLAVVLLCALVAVQVALLAAPAEAGELVVGYYDKKCRGVENVVQWHVRRALKTNRRAGAALVRLLFHDCFVRGCDASVLLDASPENPHPEKEAPVNIWLAAFDLLEEIKAAVEDRCPGVVSCSDILIYAARDAASALSNGNIHFDVPAGRLDGLVSSASEAQAELPDSTFTVQQLIDNFARKDFDVEELVILSGADSIGVGHCSSFTGRLTAPPEQINPAYRN

SEQ ID NO: 205062 - protein, 92 aa, Zea mays
  Clone ID: MRT4577_118606C.1.pep
TLTPAPITDRMAPHLTAPIDFFPLAHVFSPTPPDSKKTAQKIPSAFYPPTNFSPLLTTTALLHEPQNPIPVLAILENYPRPGHYQPRPSFDK

SEQ ID NO: 205063 - protein, 90 aa, Zea mays
  Clone ID: MRT4577_118607C.1.pep
VATTLSFEKTGCGKSFGGFKQKPPWLPRRTNVSLNHKLIEEQIPYLLLLYVYTMTCKKIKRQLFLLFALLRLVCFSPKLYKFDYGKKVGG

SEQ ID NO: 205064 - protein, 116 aa, Zea mays
  Clone ID: MRT4577_118608C.1.pep
LGDSELADGGGGPDPVPSWAIAPSGGPDPAPPPSCCRRPRCPSRSPRGQILCSIVLPRRTVSKVLFSDVQWKTSRILHTSLAPPRLAPPSGNAGEEISRLQMHGTLTSGSIRTTDG

SEQ ID NO: 205065 - protein, 56 aa, Zea mays
  Clone ID: MRT4577_118609C.1.pep
KSNRGTRPVKIRNMDCQVEPESSPPCGHVFIVKNNGLCYLVSQKNNHPHKIREPPL

SEQ ID NO: 205066 - protein, 494 aa, Zea mays
  unsure (1)..(494): unsure at all Xaa locations
  Clone ID: MRT4577_11860C.1.pep
VPRGRPGSVLQLATRWDSHISPELFRNTLLIARDSSYTVRKSFICKLYGLLKKRAIPFRYACAFALTATDCSRDFRTESASYLSEVLKEQRRFFVYQNRTSKESIVDNPAXXAVVFLIHTLAYDGALPSXLCRREXFPEFCSPLCVMLRELVEIDSSSKTEHGPTASFVSVLSGILRGIQKAEDPINSEITPTLHVLSKIGLLIVKELDKHCKMSDCPRHILLPSSYYRLSVSERKSYECCQENFISDKLVKRILKAHEPYNHNDNTKCSVVSERVSYEFVPERKACSSLNKSVVQNASGCDSNRNKCLASGKAVSKKKDQSTNNSLDKENMSSCGSGGTKVSSPGSLGLAREVDSGNCLSLLDNRNCPMTRTSKANHNNCRQTADILDFNLRECSSFKKGHSKGLSEAQKHEKSLPGSSIACDIEVPVIADIEDAGDCNDNLVKAPSSNNVTANFKKKGKRTLELVNLQNSSDLTDVVTKDNVRQIRARKVPV

SEQ ID NO: 205067 - protein, 95 aa, Zea mays
  Clone ID: MRT4577_118610C.1.pep
MASGAAAPVKMSTAVTACILLAVLLPMAPKLVMGDCSGSCVTLCDTFADGFCTGNADPAICPPEVQELCHPTVFTGCITECNTLCATSGFAPCAA

SEQ ID NO: 205068 - protein, 79 aa, Zea mays
  Clone ID: MRT4577_118611C.1.pep
SKFLYCAKLLFVAQQINRARLSSPGPRVRIDYYVDFHKFQTTFLPASRRRWDPWGHYSIPGALGTPTPVDRLSCEYRAF

SEQ ID NO: 205069 - protein, 52 aa, Zea mays
  Clone ID: MRT4577_118612C.1.pep
RLLFTRPLVLWNGGGDFLFHLTWHWAEKPKTRPLRRHRRQLRVLSRHAKFIA

SEQ ID NO: 205070 - protein, 265 aa, Zea mays
  unsure (1)..(265): unsure at all Xaa locations
  Clone ID: MRT4577_118613C.1.pep
IHHPPLVPSRLVSSPPTRRKPASRTPQDQTPESEPSSKGKTPSAAAAMESVEALVAHIQGLSGSADELAQLHGLLKQADGDALRVHSAGLLPFLSHLHPGAHSLGYLYLLDSFVSSSANLRAHAGGDLLVTVADFLTSCSADQIRLAPDKFLNVCRVLKNEVMQLNAPIRGIAPLRAAVRKIQTSSEQLTPLHAEYLMLCLLAKQYKAGLSVLEDDIFEVDQPKDLFLYCYYGAMIYIXLKKFRKALELLQHAGTAPMSSLNAIT

SEQ ID NO: 205071 - protein, 138 aa, Zea mays
  unsure (1)..(138): unsure at all Xaa locations
  Clone ID: MRT4577_118614C.1.pep
LSHLRAYSLAXSRFXCCAPASLSFKRHASAAGLPLQDLPFGIGVRLAGGVNAVSLLSLSTGQIWVLSPKLAADGRTVELHKCAVVELEPARPVYAMEVAMGRLLLGEVGGLRVFPLRGLMKGGKERDVKKEVAVVVGR

SEQ ID NO: 205072 - protein, 90 aa, Zea mays
  Clone ID: MRT4577_118615C.1.pep
KNCLWGKKMVFSFSNFWPQKWPPSKPKPLLRFSWKGAQFEAPWGGPLLKTRPLFSTKFWGKIFPRFLGGKTRKKAVFKPLVSKNLNRTRG

SEQ ID NO: 205073 - protein, 64 aa, Zea mays
  unsure (1)..(64): unsure at all Xaa locations
  Clone ID: MRT4577_118616C.1.pep
VVLKXCHSSPGLSSTRWRRSRDSSSASSTAAQEEDRLPGANPAVEQWYTSPSRRPLTLADSHPT

SEQ ID NO: 205074 - protein, 94 aa, Zea mays
  Clone ID: MRT4577_118617C.1.pep
VGLPRPDGSMDPCRVLLLKSQCEKWALFIQKMQHGPRRQHGQHGQHGQHGLMGDGIMENRRDGRLVIMPVQPCAGFVFFYFFEKVNVKDGTCDA

SEQ ID NO: 205075 - protein, 60 aa, Zea mays
  Clone ID: MRT4577_118618C.1.pep
DPRVGKRKKGPPPIRSGRKNRPSSSPAGSKKFEFFYTPPPRTETPVFNWIPRGPPGHLGV

SEQ ID NO: 205076 - protein, 916 aa, Zea mays
  Clone ID: MRT4577_118619C.1.pep
MARIRSTARIEGEGEETEASETVPISEAMQRSGLVISEKIPIDDAEQAIAEAEGEEAEETISEDDYHLATPSKPSHLDFGKSTVSKADLSKMVKSGYFTENQKKLLRFGGEETTPKPEKDEIVIFKSFLKAGLRFPLHGIIAEILNNFGIYFHQLTPNAIVRLNVYIWALRSQAVEPFADSFCRVHELHYQTKARKDGLHDNFGCYNFAYRKTSKCPVISYRSKWAAGWKSEWFYVKVDDDKEKLVQSPLELTFGETRPQCHMLPEGPTQKAMYEFKIIAENIGTRDLVQEFLAFKIFPSVKEWEMPKLEGEKKKGELVRLPYHFKFKKYFKKPCKEWLDTVETMCNEILGNYSKKEDQLMTAAFGTRPKRRLNRVFDALGFEYPDYEQLNKGAEGHKRKRVAEILTKDEEQPAAEKKIPKKRKISTPKRKMSEEERTPTPPSASDIEEILKVMTEPMPTKLSPLGLQLTKLFRKVDEPDQTRTSKPKRQRIIAVTEVIDKTPPRASIQKTAAAEGAAIVEGVASEVAATEAATAEDTNLETTIKNINKILEDMAAEEAGATTEKTMATVPEKGKEIAEDPSDDEAYTFQNLVGQKLTKDEIEELKDYAKSCGYKSGALLFGGVDDEQLGCIRDSAGAKVIGTLSKSIGFPKLESDISRYRRQHVVGSLFYSNFKSMLLSKALQMQQDLEDKKHEIIIGNLENKIKEQSDAFEKKNFELQAAEGLLAEAEAKISELNSKLLRQSEQFEREKQDLNAKLEAEAQQNSDLRKLLTNLQEKCLEFSNKCIQRLRKIFHSVGASSEKFTPSAEDLPRTFEHIEGEIDELDEVIAGHGDFCAWVASRGTAAAFMKAGCEHGKVVNRPNFALSPSILDDMPDLARSISNRFIKMIWTKGGREKAGDEARSHLEPVDEGEDDA

SEQ ID NO: 205077 - protein, 736 aa, Zea mays
  unsure (1)..(736): unsure at all Xaa locations
  Clone ID: MRT4577_11861C.1.pep
MANTGTVTLVPYKGGSQGCQMESRNLTVETSGLVPPNNSGMRSLVTSECGKSKVSEDDNDGTIQPRQPDWAAVLDAATKRRSEVLAPENLENMWAIGRNYQKKMVKLDHSSRQKGSEGSDNSTSAGAVGKELSSNFNERIASVDDKYMVNLMQSKNRNAQSTFVTGSHPLXTKYEXEVKPKEGSQVNFTSKEKPHETSNRVKAQLKRCNSTPDIEKRYLAKSNQPMVSSERLNVRINQDERGVGPASHVEVLMHVPKIRCRVVGAYFEKQGSKSFAVYSIVVTDADNKSWFVKRRYRNFERLHRQLKEIPNYSLHLPPKSFLSSSVDDYLVHQRCILLDKYLQDLLSIANIAEQHEVLDFLSASSKTYSAGKSSSVMKTLAVNVDDAMDDIVRQFKGVSDGLKRAVGTSPSSATAQFADNRMSLSWNQEEKDNHNLHQRNLERAHSLSDGDSNYEDHISSVNSGCHSDNEVNNRGHTSNDVEHIETCSSLDKQASDQIGKPAKEYSDSSNMSSLNAFEDPTGIPPEWMPTNVSVPLLNLVDKVFQLKRRGWIRRQVLWISKQILQLVMEDAIDEWIIRQINWLRREDVIVQGIHWIQDTLWPNGIFFTKLDEYKGNAGTSEFDKQSLGSPTLAVGNKKGRTSSFELHLEASRNASEVKKLILDGTPSALVSIIGYKQYRRSARDMYYFLQSNVCIKQLAYAMLEQVLVTVFPELRQLIEDIHEKGRKEQASFTYQL

SEQ ID NO: 205078 - protein, 88 aa, Zea mays
  Clone ID: MRT4577_118620C.1.pep
GWGSPTRTLALFPKKATLTTDALTRSREAPPLKRTPPSRPSPLGLPARFRCLPTKTNKPFCLFYSRISLIFMFKNHDHVGLGVVLPSM

SEQ ID NO: 205079 - protein, 56 aa, Zea mays
  Clone ID: MRT4577_118621C.1.pep
LWVLLGPPLSIFIHTLARVYIEKVPKALLIAPAFPIWESCPQGPKKLWNFLICFPP

SEQ ID NO: 205080 - protein, 71 aa, Zea mays
  unsure (1)..(71): unsure at all Xaa locations
  Clone ID: MRT4577_118622C.1.pep
SSSSILASPSTFPQLSHISSVMYIPXYPSWIIVLICENPALQPYMLQQAISGSNIPLXTLLFQQSPALSLV

SEQ ID NO: 205081 - protein, 56 aa, Zea mays
  Clone ID: MRT4577_118623C.1.pep
GNVEGAPLGDHEHKGVRERHRRQAAAALVMVVHPPCVRAAPVHTFMTYDERGDTRD

SEQ ID NO: 205082 - protein, 111 aa, Zea mays
  Clone ID: MRT4577_118624C.1.pep
SAAAGSASVSAAEAAASSVTSSAAAGSGSDSASFAVSSSFGVSSSAAYGDRLGLSGGSWLGLGRGSWLLHSGLGGGSSLRGRAGGRSRGLHPWRFPARPCGRGWDSDSDPR

SEQ ID NO: 205083 - protein, 62 aa, Zea mays
  Clone ID: MRT4577_118625C.1.pep
KGNKQSLSSSKYIGLYNPNTLEFQTNMPLVILLVTAQGCRFSFCWPPPGRLPREVVPIIEML

SEQ ID NO: 205084 - protein, 403 aa, Zea mays
  Clone ID: MRT4577_118626C.1.pep
MEPGLASRVARSAAQPLSGCLSRHSLSPWLKIQNHIYPMPSLCHKVPSTAKCHTSMTTSYMETSDVTDLDWENLGFGLIETDFMYVAKCGTDGIFSKGEVLPFGPIALSPSAGVLNYGQGLFEGLKAYRKTDGSILLFRPEENAIRMLSGAERMCMPAPTVEQFVDAVKQTVLANKRWVPPTGKGSLYIRPLLIGSGAVLGLAPAPEYSFIIFVSPVGNYFKEGLSPINLIVEDKFHRASPGGTGGVKTIGNYASVLKAQKIAKGKGYSDVLYLDAVHDKYLEEVSSCNIFVVKDNVISTPAIKGTILPGITRKSIIEVAQSKGFKVEERLVCVDELINADEVFCTGTAVVVSPVGSVTYMGKRVEYGNQGVGVVSQQLYKSLTSLQMGNVEDWMGWTMQLNQ

SEQ ID NO: 205085 - protein, 82 aa, Zea mays
  unsure (1)..(82): unsure at all Xaa locations
  Clone ID: MRT4577_118627C.1.pep
PAGVLFQRWVELLLPLRIVVRVREAYSAVFGFVGXERIDMAASDVEYRCFIVGXLACATNDHSLHNVFSNYGEVLESKIILD

SEQ ID NO: 205086 - protein, 134 aa, Zea mays
  Clone ID: MRT4577_118628C.1.pep
RTIQQMACPHRVLWSRASHKAEIKTHIMKAPLRRQADVHRVDCRLEGAMTRHQPTVHRTRQEVHSARLPESVRVLMEQSHRELTRPRRCRPSTSTRTLMTPLPYCVPARTELLDQIDNNDAAVPATASAYRTSA

SEQ ID NO: 205087 - protein, 71 aa, Zea mays
  Clone ID: MRT4577_118629C.1.pep
PPILHPSLLFPTIIYFLYLFYHSLSTLPLLLLILTAPIHLLLKSFSYITIITIPSNIPTTSICFFQLLFFF

SEQ ID NO: 205088 - protein, 121 aa, Zea mays
  unsure (1)..(121): unsure at all Xaa locations
  Clone ID: MRT4577_11862C.1.pep
WIESLETEGAEKLIDRMLLSGTFADDESYTSVVGLLIRQNLAGPSQKLGXLVLKSGYMLELTVFTDYMRACLRSVRLDTCSSIIEKCETTDLNTVLCPEWTWRIDIPDAAFQADNSPLTLF

SEQ ID NO: 205089 - protein, 105 aa, Zea mays
  unsure (1)..(105): unsure at all Xaa locations
  Clone ID: MRT4577_118630C.1.pep
LSSXPRAXXXRPVSPXXPGRXSTSARVRTRXXXNYAWAGXSXXKLWXRXVAVXTCKSVVRPGYRRRXIIXXPXSSWXPPNXPQDLSRRTAPAILSGMIVLGKSLF

SEQ ID NO: 205090 - protein, 135 aa, Zea mays
  Clone ID: MRT4577_118631C.1.pep
MRAAVALLLAAVLCLGGGGAASASPDFDYPAAFNFGDSNSDTGGRIAAGFEPMPPPYGSTFFGAPSGRFSDGRLILDFLMDAMDMPFLNAYLDSLGAPNFRAGVNFAQAGCSITPASATSVSPFSFGLQIKQFFA

SEQ ID NO: 205091 - protein, 126 aa, Zea mays
  unsure (1)..(126): unsure at all Xaa locations
  Clone ID: MRT4577_118632C.1.pep
DGSSDFSDASDCYCPPHLGDNNTVVITGIALSDLRELHRSYNEENXYLXSNDGGLXPDPKKSDRIESIEASISTMLAYGHDVCQPVPHTYVGHVNRETVKRVSFIDPNDEYVVSESDCSLIXIRIQ

SEQ ID NO: 205092 - protein, 488 aa, Zea mays
  unsure (1)..(488): unsure at all Xaa locations
  Clone ID: MRT4577_118633C.1.pep
METYTTDDALTIMGFGKFQALVLFYAGMGWVAEAMELMLLSFLGPFIREEWNVSPENESLLSSVVFAGMLLGACAWGFVSDKYGRRTGLIFSTLFTSGMGFLSALSPNYLCLVALRFLVGVGVGGSHVFISWFLEFVPAQNRGTWMVIFSLFWTLGTILEASLAWVVLPALNWRWLLVFTALPCFLLLPFFGLTPESPRYLCAQNRMSDATSVLERMANANQSALPPGVLTYNRQTKCDHDVLAPESECLLPVREKECTVDNAKSSESGSLAALRMLLSRELLRSTLLLWFVFYANSFAYYGLVLLTSQLSDANKSCASGVSFGLRQKEINLYKDTFITSLAEIPGLFLSAVLVDWFGRKASMWSMMFACCAFLGPLVLQQTELLTTILLFGARACAMGSFTVLCLYAPEVYPTFVRSTGAGIATAIGRIGGVVCPLVAVAMLRSCHQMEALIVFEVILCLAAVACMFFPVETKGRGMXTDAISGFSI

SEQ ID NO: 205093 - protein, 132 aa, Zea mays
  Clone ID: MRT4577_118634C.1.pep
METYTTDDALTIMGFGKFQALVLFYAGMGWVAEAMELMLLSFLGPFIREEWNVSPENESLLSSVVFAGMLLGACAWGFVSDKYGRRCIQHLSGQPVQELRPPLVGLVGLFALSLLSPCCGAAIRWKHSLCLR

SEQ ID NO: 205094 - protein, 525 aa, Zea mays
  unsure (1)..(525): unsure at all Xaa locations
  Clone ID: MRT4577_118635C.1.pep
METYTTDDALTIMGFGKFQALVLFYAGMGWVAEAMELMLLSFLGPFIREEWNVSPENESLLSSVVFAGMLLGACAWGFVSDKYGRSGIGSGLLMASGWTRXFVSKLTSHVSNLPHTMIHKXTGTGLIFSTLFTSGMGFLSALSPNYLCLVALRFLVGVGVGGSHVFISWFLEFVPAQNRGTWMVIFSLFWTLGTILEASLAWVVLPALNWRWLLVFTALPCFLLLPFFGLTPESPRYLCAQNRMSDATSVLERMANANQSALPPGVLTYNRQTKCDHDVLAPESECLLPVREKECTVDNAKSSESGSLAALRMLLSRELLRSTLLLWFVFYANSFAYYGLVLLTSQLSDANKSCASGVSFGLRQKEINLYKDTFITSLAEIPGLFLSAVLVDWFGRKASMWSMMFACCAFLGPLVLQQTELLTTILLFGARACAMGSFTVLCLYAPEVYPTFVRSTGAGIATAIGRIGGVVCPLVAVAMLRSCHQMEALIVFEVILCLAAVACMFFPVETKGRGMXTDAISGFSI

SEQ ID NO: 205095 - protein, 66 aa, Zea mays
  Clone ID: MRT4577_118636C.1.pep
ITSLIIKILFPEQPDPIFLNCYLSLLLNKQLLHFNSFARPGLLSEVASPPKRNTRVEGFPSLLASG

SEQ ID NO: 205096 - protein, 74 aa, Zea mays
  Clone ID: MRT4577_118637C.1.pep
MAEKPKLHYSNARGRMESTRWLLAAAGVEFEEKFIKSAEDLDKLRNDGYLMFQQVPMVEIDGMKLVQTSAILNY

SEQ ID NO: 205097 - protein, 57 aa, Zea mays
  Clone ID: MRT4577_118638C.1.pep
LARAAKFLLYKGNTLQSYMVTQARNNSCSMIAIPITWGIAESGHHILLMALGALCFL

SEQ ID NO: 205098 - protein, 46 aa, Zea mays
  Clone ID: MRT4577_118639C.1.pep
RNDMYSVSFHGLVSLPRFGYFLNQLRVRLWLQLCNSFPDAWADAWA

SEQ ID NO: 205099 - protein, 92 aa, Zea mays
  unsure (1)..(92): unsure at all Xaa locations
  Clone ID: MRT4577_11863C.1.pep
XIGSEKKSHRTXNTLDSRYGTPSALVSIIGYKQYRRSARDMYYFLQSNVCIKQLAYAMLEQVLVTVFPELRQLIEDIHEKGRKEQASFTYQL

SEQ ID NO: 205100 - protein, 151 aa, Zea mays
  unsure (1)..(151): unsure at all Xaa locations
  Clone ID: MRT4577_118640C.1.pep
AGRAPQLTATFHQTLPRLTGXFDLNLANNHLQLPIPDNLRPCENHNSFSAYXHKLNVNIPRSLRKLKSMTYLNLSANFIRASIPIELSRIXNMDTKHLSCNMMTGPITXTIANLEHLLKINLINNXLLEFIPANQVNLKRVIEIDLSYNHL

SEQ ID NO: 205101 - protein, 104 aa, Zea mays
  Clone ID: MRT4577_118641C.1.pep
MTIVLAKVICVFYPLADMLRQDDAYPLDGRIHQDDTDGGALTVENDEGVEVFEGEAEAERVSFHPIASRILEDDAMAAHSPSRETRAWTSLKAGKWWQWCSAHQ

SEQ ID NO: 205102 - protein, 140 aa, Zea mays
  Clone ID: MRT4577_118642C.1.pep
MDEATKKVEATVLEIPRGSDMESVTENKEEAKAAEEGDAGRESKDKERKEDEEEDEGKGGGKREYDDQGDLILCRLSSKRRVTLSEFKGRSLVSIREFYVKDGKEMPSAKGISMTMEQWEAFCNAVPAIEAAIKKLEDSD

SEQ ID NO: 205103 - protein, 92 aa, Zea mays
  Clone ID: MRT4577_118643C.1.pep
NAVVLAKAVWLIWKTICCKRYRMQQAGAAGMLNGSIVVVQRNQHVLHQLPVWQVLAHNIRAQQLQQLVLANLADYSQQQQFLTFNQLAALNS

SEQ ID NO: 205104 - protein, 85 aa, Zea mays
  Clone ID: MRT4577_118644C.1.pep
RGLFFFFFCNTTNLISIISDYITGVSEIITIKFNAAEITNGENRVTWRSLATLLLLVLSCGSNNPLGCLSRWQGWRPSHTINQSS

SEQ ID NO: 205105 - protein, 141 aa, Zea mays
  unsure (1)..(141): unsure at all Xaa locations
  Clone ID: MRT4577_118645C.1.pep
PRVRHSWPCPGSPVRGLGPRLSLVGLAVSSTPDICARCRLAVLGSPVDNTTSTLTGCLLFLRSPIRDVVHPRRQAAQRSSTFGAMHKSESPSILQTPIEFVYGTKEDDRASDVVPPTRCSRWTNQGRMDITXGCSPSEYPP

SEQ ID NO: 205106 - protein, 76 aa, Zea mays
  unsure (1)..(76): unsure at all Xaa locations
  Clone ID: MRT4577_118646C.1.pep
SGVREFYLYKSGVLSGSXTTNLDHGVTTIAYGPDNXEHYWIVLKSXGPQRGKTVYIPMERHVYFSTGKYFIVMMDC

SEQ ID NO: 205107 - protein, 126 aa, Zea mays
  Clone ID: MRT4577_118647C.1.pep
LSSSFLGSTICILWLAPHHSLNHHLSVRRPRRWWVSRHDPQWPDTEIPRRRRVPDQPSTHHTRQHLARDPSTRPKLLNSPPRLETWRYLHPATLSGLAVNGYFWWRRFPFSCGGRRRRGQRPGPAG

SEQ ID NO: 205108 - protein, 87 aa, Zea mays
  unsure (1)..(87): unsure at all Xaa locations
  Clone ID: MRT4577_118648C.1.pep
MKLNVKTLKGTNFEIEASPDASVADVKRIIETTYGQSTYRSDQQMLIYQGKILMDETTLESNXFAENRFLVIMFFIANALFSVASTT

SEQ ID NO: 205109 - protein, 93 aa, Zea mays
  Clone ID: MRT4577_118649C.1.pep
HLDSVCWGRHSLGEHPLVMSILQVVHQLHLVVGTTSLARSSSLGHPSLGPLVIGSGSHLLPPSHARTRTWHGGGVRPWHMALSQGPPHVEEGL

SEQ ID NO: 205110 - protein, 103 aa, Zea mays
  unsure (1)..(103): unsure at all Xaa locations
  Clone ID: MRT4577_11864C.1.pep
KKKARVFFKTYADGITACAKEMTKLSGICXIIPEMEIWDYDFEPMCFSMNAIHGSSFFTIHVTSVDLIIYSRHDVMGLTSNTEGYGNLFTLDRQSFCTHNELL

SEQ ID NO: 205111 - protein, 72 aa, Zea mays
  Clone ID: MRT4577_118650C.1.pep
VVFAGGGTRLASIHWLSPSFLVSSTTASRGWHHITGSIIISRSSAHHKQTQSVFVRTMAIPICASLRASDER

SEQ ID NO: 205112 - protein, 84 aa, Zea mays
  Clone ID: MRT4577_118651C.1.pep
CCWGRYSLGEHPVVKSILPWVVHQRHPMVGTISRARSPSPGPYQTQTTFARTTVIPICALLRTSTSVERLAFFSQNTGCLSSTK

SEQ ID NO: 205113 - protein, 129 aa, Zea mays
  Clone ID: MRT4577_118652C.1.pep
MTGDARAIAAAGCHRGLAWPGHLELPPAQPTPWLCARSTRDGSAGPAALGQRRRAPARKGRSPFPVRSKEEDDGPICKFQNSRGDREMMIELVMWCQPQDAVVDNLKTDGHNQWMLAKRVPPPPQTLSC

SEQ ID NO: 205114 - protein, 69 aa, Zea mays
  Clone ID: MRT4577_118653C.1.pep
RAGISSPSLSHATLPTPSLSLYLPLSSSPCSSSPSSLGAGDQPSQAPLSPWQALPWRLPLLYGSKMTER

SEQ ID NO: 205115 - protein, 178 aa, Zea mays
  Clone ID: MRT4577_118654C.1.pep
MPRHSAASPIYTALARLANFNSGRRVLLASRKTSSSSARSSAKTRPFLCLAVLLLLILVVTAVFLFPPAIMSSSSSSSAAAASVPFQSPRKVVKKVLSLSQSEGQGATVRRSIGGHEVRNLDPFLLLDEFSVSKPAGFPDHPHRGFETVTYMLDGVFTHQDFSGHTGTIRTGDVQWMT

SEQ ID NO: 205116 - protein, 89 aa, Zea mays
  Clone ID: MRT4577_118655C.1.pep
PMDARQASTSPSTHYPSVKLKVPFRMIGCWCDLAFIPATGIDGRVGYCFRRRGPGGVVWPGFAMLLGSSPLVIFAALKFMVIISETPIM

SEQ ID NO: 205117 - protein, 38 aa, Zea mays
  Clone ID: MRT4577_118656C.1.pep
FIVIINIFLPDQMQEQTFIYRNIRLTLYLQLYLIRFKK

SEQ ID NO: 205118 - protein, 83 aa, Zea mays
  unsure (1)..(83): unsure at all Xaa locations
  Clone ID: MRT4577_118657C.1.pep
MAGRHTIIVMQPSXNRACRTFMEYNNINHASDGICVLYEKKTKDINPKIRNITYDINDLYNYSDGLGHINTHGYENSIQTFLP

SEQ ID NO: 205119 - protein, 259 aa, Zea mays
  unsure (1)..(259): unsure at all Xaa locations
  Clone ID: MRT4577_118658C.1.pep
SSRLLPPPPSSQGPSSPRRRQSPSPAASAVLQGKKKEGNAAKYITRTKAVKYLQISLAVFRKLCILKGVFPREPKKKVEGNHKTYYHMKDIAFLAHDPLIEKFREIKVHRKKVKKAMAKKNRDLADRLLNRPPTYKLDRLIIERYPSFVDALRDLDDCLTMVHLFAALPAIEGERVQVQRIHNCRRLSHEWQAYISRTNSLRKTFISVKGIYYQAEVQGQKITWLTPHALQQVLTDDVDFNVMLTFXEFYETLLGFVNF

SEQ ID NO: 205120 - protein, 80 aa, Zea mays
  Clone ID: MRT4577_118659C.1.pep
HQIISSRTNLYMVTAEATGPTNMQVDTRTYMSTMTDAKHAKRDPKLQNSGSLSLTHTTQYLCMAASSASLIIVQPPPQAR

SEQ ID NO: 205121 - protein, 102 aa, Zea mays
  Clone ID: MRT4577_11865C.1.pep
LWSAVDEVLGATQATQGRNLPRAAATRGGRTYSETYVRSRKRQKVTVAQDLQQGDGSGSDSHNENDHQEPTQNDQDAAEKAIDDEEESGAAGDQFKLDDDLI

SEQ ID NO: 205122 - protein, 30 aa, Zea mays
  Clone ID: MRT4577_118660C.1.pep
MATLAQTILVPVFYALLLHLPTTQDAPSLW

SEQ ID NO: 205123 - protein, 136 aa, Zea mays
  Clone ID: MRT4577_118661C.1.pep
SLTAGPHRGGRHGLLRGATRGGVPSHRFMVRSPNLAQGLTAWLARSTDDGLVPSEGTFTRTDQTVGRPVYQGPQSAEGCPGRQAHRCYCTDGGHVNKYLHDIQVDGRDQSLYGTGKDGGAGESLVHRVVLDTCTLA

SEQ ID NO: 205124 - protein, 84 aa, Zea mays
  Clone ID: MRT4577_118662C.1.pep
MDVFLMIRRHKTTIFTDAKESSTVFELKRIVEGILKRPPDEQRLYKDDQLLDDGKTLGDCRFTSQTARPQAPATVGLAFRADDT

SEQ ID NO: 205125 - protein, 208 aa, Zea mays
  Clone ID: MRT4577_118663C.1.pep
MAPVSALAKYKLVFLGDQSVGKTSIITRFMYDKFDNTYQATIGIDFLSKTMYLEDRTVRLQLWDTAGQERFRSLIPSYIRDSSVAVIVFDVASRQSFLNTSKWIEEVRTERGSDVIIVLVGNKTDLVDKRQVSIEEGEGKAKDLGVMFIETSAKAGFNIKALFRKIAAALPGMETLSSAKQEDMVDVNLRSGNANSSQSQAQAGGCSC

SEQ ID NO: 205126 - protein, 208 aa, Zea mays
  Clone ID: MRT4577_118664C.1.pep
MAPVSALAKYKLVFLGDQSVGKTSIITRFMYDKFDNTYQATIGIDFLSKTMYLEDRTVRLQLWDTAGQERFRSLIPSYIRDSSVAVIVFDVASRQSFLNTSKWIDEVRTERGSDVIIVLVGNKTDLVDKRQVSIEEGEGKAKDLGVMFIETSAKAGFNIKALFRKIAAALPGMETLSSAKQEDMVDVNLRSGNANSSQSQAQAGGCSC

SEQ ID NO: 205127 - protein, 89 aa, Zea mays
  Clone ID: MRT4577_118665C.1.pep
LGTSKAGRGKFKKKKKKKKKNKKKKKKKKKKKKKKKKKKKKKKKKKNPFVSKKKKKNPGPSKRFGFRVNFPPGHGGKKRTRPWGKKPLH

SEQ ID NO: 205128 - protein, 97 aa, Zea mays
  Clone ID: MRT4577_118666C.1.pep
IHFAFALAFVLLLLTCKGRRRRPGRRTARRPGQPTRPAHQQRAEGGRGGAPDDAGGRGVGARPAEHPRGGLLASNLCFTNYGLGWVRFDHCLAAKCY

SEQ ID NO: 205129 - protein, 90 aa, Zea mays
  Clone ID: MRT4577_118667C.1.pep
PRVRSYTIYAVLHPLEDAPGFKLSALIWHYDFSPFMVLIIAILNDGTITTISNDRVKPSPLPDSWQLKEIFATGIVLGSYLALMTVIFFW

SEQ ID NO: 205130 - protein, 90 aa, Zea mays
  Clone ID: MRT4577_118668C.1.pep
LLCFDSTCTVLHCSTVSAAFAVDRCASSRCSAGAPDSLVNYSGARPKKPESGELDVVRPWCTEQCPVAHRTVRCARLGHTRFLCSFEFDP

SEQ ID NO: 205131 - protein, 146 aa, Zea mays
  Clone ID: MRT4577_118669C.1.pep
LGVKGWEGAFQGPRQIPGVHPGQGGGAPQLGVGTGGGEEVNVLPGRGLFRQMFSAMGANGGGALSFQGLFPVFGGLTGLSKKRRLPPARGCFFFYGDSRKGVSRNATLGPKTPWPPPRACFLVFKPRFGVYLGLEFPPQIKLCFPR

SEQ ID NO: 205132 - protein, 79 aa, Zea mays
  Clone ID: MRT4577_11866C.1.pep
MPCSCGSSCICGSSCNCSKMYPDLEEKSGGGSQARGGAVILGVAPETNNAVHLEAADESGEAAHGCSCGDSCKCSPCNC

SEQ ID NO: 205133 - protein, 65 aa, Zea mays
  Clone ID: MRT4577_118670C.1.pep
YYLILIITVSNNTMNATSTQHLYVNKFVKTDRDESFRVLGTNGTISSQFSYLCYLMKTNRTQQLA

SEQ ID NO: 205134 - protein, 195 aa, Zea mays
  unsure (1)..(195): unsure at all Xaa locations
  Clone ID: MRT4577_118671C.1.pep
MTAKGGATPSPGGAGPAAGNGRLFTVGLVTAWYPSNIGVLLLNKYLLSNYGFKYLIFLTMCHMSACALLSYAAIAWLRVVPMQLVRSRVQLAKIAALSLVFCGSVVSGNVSLRYLPVSFNQAVGATTPFFTAVFAYVMTVKRESWVTYLTLVPVVTGXHLFGFIMCIGATAARALKTVLQGILLSSDGEKLNSMN

SEQ ID NO: 205135 - protein, 144 aa, Zea mays
  unsure (1)..(144): unsure at all Xaa locations
  Clone ID: MRT4577_118672C.1.pep
PTRRLTIQMAHMKVTLSTMGRRYSAGQLLRVNIYRHHLAMPAAIIIRQRSARVYPEYNVGMVMDHTLFSLIDGLLKFEMYRPIMKNVCVYPYEKVPDNPYWYRARNREYFRMQSLRMNATSXGAADPELILAAADENSEVIAYC

SEQ ID NO: 205136 - protein, 323 aa, Zea mays
  Clone ID: MRT4577_118673C.1.pep
MTAKGGASPAPGGAGAAANGRFFTVGLVTAWYSSNIGVLLLNKYLLSNYGFKYPIFLTMCHMSACALFSYAAIAWLRIVPMQLVRSRVQLAKISALSLVFCGSVVSGNVSLRYLPVSFNQAVGATTPFFTAVFAYIMTVKRESWITYLTLVPVVTGVVIASGGEPSFHLFGFIMCIGATAARALKTVSDVVILSSDGEKLNSMNLLLYMAPIAVIFLLPATIFMEDNVVGVTIELAKKDFTIVWLLLFNSCLSYFVNLTNFLVTKHTSALTLQVLGNAKGAVAVVVSIMIFRNPVSITGMLGYTLTVFGVILYSESKKRSNKP

SEQ ID NO: 205137 - protein, 324 aa, Zea mays
  Clone ID: MRT4577_118674C.1.pep
MTAKGGATPSPGGAGPAAGNGRLFTVGLVTAWYSSNIGVLLLNKYLLSNYGFKYPIFLTMCHMSACALLSYAAIAWLRVVPMQLVRSRVQLAKIAALSLVFCGSVVSGNVSLRYLPVSFNQAVGATTPFFTAVFAYIMTVKRESWITYLTLVPVVTGVIIASGGEPSFHLFGFIMCIGATAARALKTVLQGILLSSDGEKLNSMNLLLYMAPIAVIFLLPATIFMEDNVVGITIQLAKKDFTIVWLLLFNSCLSYFVNLTNFLVTKHTSALTLQVLGNAKGAVAVVISIMIFRNPVSITGMLGYTLTVFGVILYSESKKRSNKP

SEQ ID NO: 205138 - protein, 137 aa, Zea mays
  Clone ID: MRT4577_118675C.1.pep
AFVHTRCERDRAYEFHRSESSAPGDSALIRLLAPSEPAHAQAEPPLTRAPPRPPTCTGRPRSSPRTPCSRAPPTESRAHPQPRHRAPPRPAWAHPCTGRAASLLFLATVLVTTRLSDDSSVSMSDPSSTPLPSISRS

SEQ ID NO: 205139 - protein, 63 aa, Zea mays
  Clone ID: MRT4577_118676C.1.pep
RPDPRVRSALRSKSILVLGVIHVRGSGVLCKRRGEPTGSLNLADAQLVIQLRCDNCTGKGIAN

SEQ ID NO: 205140 - protein, 69 aa, Zea mays
  Clone ID: MRT4577_118677C.1.pep
TSGNTQIVTVEGAHVTGPKSRAHIHTLHRRGEPTIVTEGHPKNKRLQKQASIWTSLPELGEEDTLPYVR

SEQ ID NO: 205141 - protein, 153 aa, Zea mays
  unsure (1)..(153): unsure at all Xaa locations
  Clone ID: MRT4577_118678C.1.pep
HASDRQIKNKPYPKSRYCRGVPDPKIRIYDVGMKRKGVDEFPYCVHLVSWEKENVSSEALDAARIACNKYMTKSAGKDAFHLWVRVHPFHVLRINKMLSCAGADRLQTGMRGAFGKPHGTCARVDIGQVLLSGRCKDNYASHANXILRRAKFK

SEQ ID NO: 205142 - protein, 190 aa, Zea mays
  unsure (1)..(190): unsure at all Xaa locations
  Clone ID: MRT4577_118679C.1.pep
PGAPSVRPAGSYRQXRGKRYPKSRYCRGVPDPKXRIYDVGMKXKGVDEFPYCVHLVSWEKENVSSEAGEGARIACDKYMTKSAGKDAFHLRVRVHPFHVLRINKMLSCAGADRLQTGMRGAFGKPQGTCARGDIGQVLLSVRCKDNNAAHASEALRRAKFKVPGRQKIIESRXWGFTKFRRADYLKYKSE

SEQ ID NO: 205143 - protein, 29 aa, Zea mays
  Clone ID: MRT4577_11867C.1.pep
VCLIKWMGGAIQKFPKGANADRGEGDQVQ

SEQ ID NO: 205144 - protein, 99 aa, Zea mays
  Clone ID: MRT4577_118680C.1.pep
SCTRSQCTLDVLTTVDHVRRVRSLKIAIRVHFAQTRRLPASVASSRATKKVATCSRTTSSSHTRLNTYYVENRPHCHAQALASMKAMTSTSETRSLCHD

SEQ ID NO: 205145 - protein, 71 aa, Zea mays
  Clone ID: MRT4577_118681C.1.pep
IIFNLSVLHSGFAFSANQHFLHRRPTAEFSSGVLLFFLTIPYILVFWACFFSSQTHYGSGDFLYHHDKKRS

SEQ ID NO: 205146 - protein, 647 aa, Zea mays
  Clone ID: MRT4577_118682C.1.pep
MARVRSTARVEREGGEAEGAETVPISEAMRRSGLVTSEGIPTAETEQTVADTEQVAAEAEEGDIEEEHIGTRDLVQEVLAFRVFPTMKEWTMPKLKGEKKEGELVRLPYYYKFKKYFKAPCQEWLDTIEIMSNEILGNYSKKEDQLMTAAFGTRPKRRLNRVLDAIGFEYADYGRLGGDAGGSKRKRIASATDEEVAKVAKKKKKDSEKLSPEELNAEPKVATARKRKSASPEPETLVREEDTPATPSAVEVEEIMKVMTEPLPIRLSPLALELTKFFQKDKAASADEGPALPKKRRIIQIADVIHGTPSPTPASKIAIDQTAETAEAKGATSEATRTEIFEADTGAAEAVEAEIGATEDPNLEETLEVIDNILLKMTEEESVVAAASTATEKGKKQAEDILEEEDFEFQDLLGQGLTDAEKAELKNLEADLCRYQRHHIAGSLLYANFKDLEIMVKEHEGALEKKDFVIQTMEGSLAEVQTENNKLKNELLRQSEKFEQEKKYLEASLKTEVDKNSNLQKSFKELQEKCLSFGSRCVQRLKDVFHSVGASSAKFTPSAENLPRTLEYIEGEVDALDEVIGGHADFCALVASRGTATAFLKAGCTHGNIVNRPNFSLSASDLIDIPSLARSIGNRFMTQIWDVEAEE

SEQ ID NO: 205147 - protein, 90 aa, Zea mays
  Clone ID: MRT4577_118683C.1.pep
KKKVFFFPQKTFFQVIIPGLVLGTRSYISRGFFPKKKISIFPPPQGGWKNNFFLAFRGPQGNFFSKFFFSNPLFFFKKKFFFFFLPPPYL

SEQ ID NO: 205148 - protein, 898 aa, Zea mays
  Clone ID: MRT4577_118684C.1.pep
MTSEGTPTAETEQTVADTEQVAAEAEEGDIEEADSDDDYHIAVPTKPNHLDFGKSTVSKADFSKMVKSGYFSENEKKLLRFRGEETTPKPEKDEIVIFKSFLKAGLRFPLNRMISDVLQRFGIYFHQLTPNAIVRLSVYIWALRSQAVEPFADNFCRVHELHYQTKARKDGLHENFDCYNFAYRKTTKFPVISYRSKWPAGWKSEWFYVKVDEDKEKLVQSPLELIFGETRPRCKMAVEGPTWAALGEFKIIAEHIGTRDLVQEFLAFRVFPTMKEWTMPKLKGEKKEGELVRLPYYYKFKKYFKVPSQEWLDTIEIMSNEILGNYSKKEDQLMTAAFGTRPKRRLNRVLDAIGFEYADYGRLGGDAGGPKRKRIASATDEEVAKVAKKKKKDSEKLSPEELNPEPNVATTRKRKSASPEPETLVREEDTPATPSAVEVEEIMKVMTEPLPIRLSPLALELTKFFQKDKAASADEGPALPKKRRIIQIADVIHGTPSPTPASKIAIDQTAEAEGAAAEATRAEIFEADTGAAEAAEAEIGVTEDPNLEETLEVIDNILLKMTEEESVVAAASTATEKGKEQAEDILEEEDFEFQDLLGQGLTDAEKAELKKCAIACGYKPGATLFGGVNEGKLRSFRQSILLSKVLKMQQDLEEEKNKAVIQDLAEKVENYEASLKKKNFTIQDLEIMVKEHEGALEKKDFVIQTMEGSLAEVQTENNKLKNELLRQSEKFEQEKKYLEASLKTEVDKNSNLQKSFKELQEKCLSFGSRCVQRLKDVFHSVGASSAKFTPSAENLPRTLEYIEGEVDALDEVIGGHADFCALVASRGTTTAFLKAGCTHENIVNRPNFSLSASDLIDIPSLARSIGNRFMTQIWVSGGRKMAGDEARSHLKPDDEAEE

SEQ ID NO: 205149 - protein, 70 aa, Zea mays
  Clone ID: MRT4577_118685C.1.pep
TISPSISSFLWNYKIGYELPQGTFFFLYCGKRLILPLLKGSKTRNLEGRKGPWGWNFRFFYFLFFFFFFF

SEQ ID NO: 205150 - protein, 907 aa, Zea mays
  unsure (1)..(907): unsure at all Xaa locations
  Clone ID: MRT4577_118686C.1.pep
MARVRSTARVEREGGEAEGSESVPISEAMQRSGLVTSEGIRTAETEQTVAETEQVAAEAEEGNIEEDDPDDDYHIAVPSKPSHLDFGKSTVSKADLSKMVKSGYFSENEKKLLRFGGEETTPKPEKDEIVIFKSFLKAGLRFPLNRMISDVLQRFGIYFHQLTPNAIVRLSVYIWALRSQAVEPFADSFCRVHELHYQTKARKDGLHENFGWKSEWFYVKVDEDKEKLVQSPLELTFGETRPRCRMEVEGPTWAALGEFKIIAEHIGTRDLVQEFLAFRVFPTMKEWTMPMLKGEKKTGELVRLPYHYKFKKYFKVPCQEWLDTIEIMSNEILGNYSKKEDQLMTAAFGTRPKRRLNRVLDVIGFEYADYGRLGGDAGGPKRKRIASTTDEEVVKAAKKKKKDSDNISAEELNPEPKVPTAKKRKSASPEPETPVQEEDTPAXLLLLKLSPLALELTKFFQKDKAVSXSRKSCEAKKRRIIQVTDVIHQTPPPATVSKIVFAETAEAEATEMKTAEAESGEAEATGAEAGATEESNLETTLEVIDNILLKMAKKEATVATVNTATEKGKEQIDQISEEEDFNFQDLLGQELTDAEKEELKKYATSCGYKSGDMLFGGVNEGKSRCLRNRAEAKIVRTLSKSIGLPKLEVDLCRYQRHHIAGSLLYANFKSILLSKVLKMQQDLEEEKNKTVIQDLTEKVENHEANLKKKDFAIQDLEIMVKEHEGALEKKDFIIQTMEGSLAEVQTENDKLKNELLRQSEKFEQEKKYFEASLKTEVDKYSNLQKSFTELQEKCLNFGIRSENLPRTLEHIEGEVDALDEVIDGHADFCALVASRGTAAAFLKAGCTHGNTVNRPNFSLSASDLLDIPSLARSIRNRFMTQIWVNGGRKMAGDEARSHLKPDDEAED

SEQ ID NO: 205151 - protein, 870 aa, Zea mays
  Clone ID: MRT4577_118687C.1.pep
MARVRSTARVEREGGEAEGAETVPISEAMRRSGLMSSEGIPTAETEQTVADTEQVATEAEEGDIEETASDDDYHIAVPSKPSHLDFGKSTVSKADFSKMVKSGYFSENEKKLLRFRGEETTPKPEKDEIVIFKSFLKAGLRFPLNRMISDVLQSYRSKWPAGWKSEWFYVKVDEDKEKLVQSPLELIFGETRPRCKMAVEGPTWAALAEFKIIAEHIGTRDLVQEFLAFRVFPTMKEWTMPKLKGEKKEGELVRLPYYYKFKKYFKAPCQEWLDIIETMSNEILGNYSKKEDQLMTAAFSTRPKRRLNRVLDAIGFEYADYGRVGGDAGGPKRKRIASATDEEVAKVAKKKKKGSDKPSLEELNSEPKVATTRKRKSASPGPETLVRKEDTPVTPSAAEVEEIMKVMTEPLPIRLSPLALELTKFFQKDKAASAAESPAKPKKRRIIQVTDVIHQTPPPATVSKIVFAESAEAEGAAVEATGAETTEDETGEAEATGAEAGTTEESNLETTLEVIDNILMKMAEEEATVAALTDAEKKELRKYAISCGYKSGDVLFGGVNEGKLRCLRNRTEAKIVRTLSKSIGLPKLEADLCRYQRHHIAGSLLYANFKSILLSKVLKMQQDLEEEKNKAVIQDLAEKVENHEANLKKKDFAIQDLEIMVKEHEGALEKKDFVIQTMEGSLAEVQTENDKLKNELLRQSEKFEQEKKYLEASLKTEVDKYSNLQKSFKELQEKCLSFGSRCVQRLKDVFHSVGASSSKFTPSAENLPRTLEYIEGEVDSLDEVIGGHADFCALVASWGTATAFLKAGCTHGNIMNRPNFSLSASDLIDIPSLARSIGNRFMTQIWVSGGRKMVGDEARSHLKPDDEAEE

SEQ ID NO: 205152 - protein, 934 aa, Zea mays
  Clone ID: MRT4577_118688C.1.pep
MARVRSTARVEREGGEAEGAKTIPISEAMQRSGLVTSEGIRTAETGQTAAETEEAVAEAEEGNIEEANSDDDYHIAVPSKPNHLDFGKSTVSKADFSKMSFLKAGLRFPLNRMISDVLQRFGIYFHQLTPNAIVRLSVYIWALRSQAVEPFADNFCRVHELHYQSKARKDGLHENFGCYNFAYRKTTKFPVISYRSKWPAGWKSEWFYVKVDEDKEKLVQSPLELIFGETRPRCKMAVEGPTWAALGEFKIIAEHIGTRDLVQEFLAFRVFPTMKEWTMPKLKEEKKEGELVRLPYHYKFKKYFKVPCQEWLDTIEIMSNEILGNYSKKEDQLMTAAFGTRPKRRLNRVLDAIGFEYADYGRLGGDAGGPKRKRIASATNEEVVKVAKKKKKDYENLSAEELNPEPKVATSRKRKGASPEPETPVREEDIPASPSAVEVEEIMKVMTEPLPIKLSPLALELTKFFQKDKAASAAESPAKPKKRRIIQVTDVIHQTPPPATVPKIAFAETAEAEATGMKTTEAETSETEATGAEAGATEESNLETTLEVIDNILLKMAEEEATVAAVNTATEKGKEQIGEISEGEDFNFQDLLGQELTDAEKEELKKYGISCGYKSGAMLFGGVNEGKLRCLRNRTEAKIVRTLSKSIGLPKVEADLCRYQRHHIAGSLLYANFKSILLSKVLKIQQDLEEEKNKAVIQDLAEKVENYEANLKKKDFAIQDLEIMVKEHEGALEKKDFVIQTMEGSLAEVQTKNDKLKNELLRQSEKFEQEKKYFETSLKAEVDKYSNLQKSFTELQEKCLSFGIRCVQRLKDVFHSVGASSSKFTPSAQNLPRTLEHIEGEVDALDEVIGGHADFCALVSSRGTSAAFLKAGCTHGNIVNRPNFSLSASDLLDIPSLARSIGNRFMTQIWVSGGRKMAGDEARSHLKPDDEAED

SEQ ID NO: 205153 - protein, 398 aa, Zea mays
  unsure (1)..(398): unsure at all Xaa locations
  Clone ID: MRT4577_118689C.1.pep
GYCRDRADCCRDIQVAAEAEEGNIEEADPDDDYHIAVPSKPSHLDFGKSTVSKADLSKMVKSGYFSENDKKLLHFGGEETTPKPEKDEIVIFKSFLKAGLRFPLNRMISDVLQRFGIYFHQLTPIAIVRLSVYIWALRSQAVERFADSFCRVHELHYQTKARKDGLHENFGCYNFAYRKTMKFPVISYRSKWSAGWKSEWFYVKVDEDKEKLVQSPLELTFGETRPXCNMTPEGQTQRAMDEFRIIAEHIGTRDLVQEFLAFKVFPTLKKWEMPKLKGEKKEGDLVRLPYHFKFKKYFKKPCQEWLDTVEVMCNEILGNYSKKEDQLMTAAFGTRPKRRLNRVLDALGFEYPDYAQLNKGAEGQRRKRAAEALNKDEDHPPKKKKKKKKKKYSALLPL

SEQ ID NO: 205154 - protein, 86 aa, Zea mays
  Clone ID: MRT4577_11868C.1.pep
QGRQLQRRGGTPPVLLGEVRHLPQGLCAVNLLCIGHCKLLPSGLFKLPCRDNKPDGAYVSTMCLCVISHPRRIFVFMHTPTMAPCY

SEQ ID NO: 205155 - protein, 102 aa, Zea mays
  Clone ID: MRT4577_118690C.1.pep
PTSPRDGVSLFGGRSRNSERASTHPPFPKDRSKCTWRGNILAYGDKLTTPARAKPDPPPERAKLGGLRSEELILKAGSYLRVSTAKRVESGAVQMHARARQS

SEQ ID NO: 205156 - protein, 954 aa, Zea mays
  Clone ID: MRT4577_118691C.1.pep
MARVRSTARVEREGDEAEGAETVPISEAMQRSGLVTSERIPTAETEQAATEAEQGDIEEADSDGDYHIAVPSKPSHLDFGKSTISKADFSKMVKSGYFSEDEKKLIRFGGEETTPKPEKDEIVIFKSFLKAGLRFPLNRMISDVLQKFGIYFHQLTPNAIVRLSVYIWALRSQAVEPFDNRFYRVHELHYQTKARRDGLHENFGCYNFAYRKTTKFPVISYRSKWPAGWKSEWFYFKVDDDKEKLVQSPLELIFGETRPRCNMTAEGPTWTALAEFKIIVEHIGTRDLVQEFLAFRVFPTIKEWTMPKLKGEKKEGELVRLPYYCKFKKYFKAPCQEWLDTIEVMSNEILGNYSKKEDQLMTAAFGTRPKRRLNRVLDAIGFEYADYGRLGGDAGGPKRKRIASAADEEVAKVAKKKREDSEKLSLEELNPEPKVATARKRKTASPESKMLVREEGTPATPSAVEVEEIMKVMTEPLPVKLSPLALELTKFFQKDKATSAEEGPGLPKKRRIIQIADVIHGTPSPTPASRIAIDQTAETAEAEGAAAEATRAETFEAETGAAEAAGAETGATEDPNLEDTLEVIDNILLKMTEKEYVVAAASTTTEKGKKQAKDILEEEDFEFQDLLGQELTDAEKADLKKCVIACGYKPGATLFGGVNEGKLRCLRNRSEAKIVRTLCKNIGLPKLETDLCRYQRHHIAGSLLYANFKSILLSKVLKMQQDLEEEKNKAVIQDLAEKVENYEANLKKKDFTIQDLEIMVKEHEGALEKKDFVIQTMEGSLAESEKFEQEKKYLEASLKTEVDKNSNLQKSFKELQEKCLSFGSRCVQRLKDVFHSIGASSEKFTPSADNLPSTLEYIEGEVDALDEVIGGHADFYALVASQGTATAFLKAGCTHGNIVNRPNFSLSASDLIDIPSLARSIGNRFMTQIWVSGGRKMAGDEARSHLKPDDEAEA

SEQ ID NO: 205157 - protein, 225 aa, Zea mays
  unsure (1)..(225): unsure at all Xaa locations
  Clone ID: MRT4577_118692C.1.pep
MARVRSTARVEREGGEAEGSESVPISEAMQRSGLVTSEGIRTAETEQTVAETEQVAAEAEEGNIEEDDPDDDYHIAVPSKPSHLDFGKSTVSKADLSKMVKSGYFSENEKKLLRFGGEETTPKPEKDEIVIFKSFLKAGLRFPLNRMISDVLQRFGIYFHQLTPNAIVRLSVYIWALRSQAVEPFADSFCRVHELHYQTKARKDGLHENFGXYNFAYRKTTKFPV

SEQ ID NO: 205158 - protein, 73 aa, Zea mays
  Clone ID: MRT4577_118693C.1.pep
SPRKVPFEMGFNQGRAPPLRWLLKPSPKGPGRKMPFQLSSELVDAPKGGGGPPPKKEAPHRRAGANKALAPFG

SEQ ID NO: 205159 - protein, 93 aa, Zea mays
  Clone ID: MRT4577_118694C.1.pep
NWCNGSCDWSCLLKHRRDPRWCLPDTQCWRISADVPQGSPSLASLILAGLHAPVELPRVHRPALEDPARAPDPLGPTETQSRFLHPDPEFAHA

SEQ ID NO: 205160 - protein, 913 aa, Zea mays
  Clone ID: MRT4577_118695C.1.pep
MARVRSTARVEREGDETEASETVPISEAMQRSGLVTTEEMPAAEANPTAAEGEGNIEETDSEDDYRIAMPSKPSHLDFGKSTVSKVDLAKMVKAGFFSEDQKKLLRFGGEETTPKPEKDEVVIFKSFLKAGLRFPVHEIVAEILKRFGIYLHQLTPNAIVRLSVYIWALRSQAVEPFADSFCRVHELHYQTKARKDGLHENFGCYNFAYRKTAKFPVISYRSKWPAGWKSEWFYVKVDEDKEKLVQSPLELTFGETRPHCNMTPEGQTQRAMDEFRIIAEHIGTRDLVQEFLAFKVFPTLKKWEMPKLKGEKKEGDLVRLPYHFKFKKYFKKPCQEWLDTVEVMCNEILGNYSKKEDQLMTAAFGTRPKRRLNRVLDALGFEYPDYAQLNKDAEGQRRKREAEALNKDEEQPPKKKKIVKRKISTPKRKLSEGEGTPTPPSTSDVEEILKVMTEPMPTKLSPLGPRLTKLFQKVAEPEKTKITKAKRQRIIAVTEVIDKTPPRASIQKTAAAEDTTNVEVAPSEVAATEAATAEDVNLETTIENIDKILEDMAAEEAAAAAKKVMAAVPEKGKEIAEVASDDEAYTFQNLIGQKLSEDEIEELKDYAKSCGYRPGALLFGGVDDEKLGCIRDQTGAKVIGTLSKSIGFPKLEIDISRYRRQHIVGSLFYSNFKSMLLSKALKMQQDLEDKKHEAIIGNLESKIKEQSVIIEKKDFELQSTEGLLAETEAKISELNSKLIGQSKQFEQEKLELNSKLEAEVQANSNLKKSLTSLQDKCLNFSNNCIQQLKKIFYSVGASSGKFTPSDEDLPKAFDHIEAEIEELDEVIAGHGDFCAWVASRGTAAAFLKAGCEHGKIVNRPNFTLSPSILDDIPDLARSISNRFIKMIWTKGGREKAGDEARSHLEPDDEAEGD

SEQ ID NO: 205161 - protein, 57 aa, Zea mays
  Clone ID: MRT4577_118696C.1.pep
SSGRQKFCQSIHYLTRINELYVLYYYIIDLVPLFMCTLACFFFFFFFIFFFFFFFFF

SEQ ID NO: 205162 - protein, 79 aa, Zea mays
  Clone ID: MRT4577_118697C.1.pep
IKWVKIHFPFKSHHSNELVCTTIQSRQSGGVVQPPVSSDRDTKEMTKKESHRLYDRSTRAKAQKPTSQNKIESVITEHP

SEQ ID NO: 205163 - protein, 70 aa, Zea mays
  unsure (1)..(70): unsure at all Xaa locations
  Clone ID: MRT4577_118698C.1.pep
YKQSLGVSVYRNNTPSKIVQNKYIVACSYCKFETKNXLSHKYRIETKPSCYIKRCKTHXRCSTQQWIIYN

SEQ ID NO: 205164 - protein, 43 aa, Zea mays
  Clone ID: MRT4577_118699C.1.pep
TDLAYSNCPHVSRCRALEHQQSARQGLGGPGVRLQLPSRLVLG

SEQ ID NO: 205165 - protein, 88 aa, Zea mays
  Clone ID: MRT4577_11869C.1.pep
SPALYPSTYMCSRLFGASAVSSSRSFWAACILSGSYRASSSSSSTPYIQSTPLKVWPVHQYRTLCMKIPAANLWFRHLGSFYSSERVG

SEQ ID NO: 205166 - protein, 79 aa, Zea mays
  unsure (1)..(79): unsure at all Xaa locations
  Clone ID: MRT4577_1186C.1.pep
AALNPPVCFQQPILLPFNELVAASGASFLPQQQFLPFCKQFWVNPGTLLDLXQLLPFVQLCLLIPPPSXKGTILGGAPF

SEQ ID NO: 205167 - protein, 79 aa, Zea mays
  Clone ID: MRT4577_118700C.1.pep
LTPPPGFFFGGIGGLRFKASPVFWDHNFWADHAVWMFWGADKSIPRPWVCFPGLPGPFLKVMGVFDPSYTLPNDVFFAG

SEQ ID NO: 205168 - protein, 75 aa, Zea mays
  Clone ID: MRT4577_118701C.1.pep
ATSGSFFISPPSLSPGGWTPPPPTISLCYPWKREVPPPCRLLLELSFVRRAGVFFFWCGTSGPTSNKSPHSLLYT

SEQ ID NO: 205169 - protein, 96 aa, Zea mays
  Clone ID: MRT4577_118702C.1.pep
QKNHGDDTLVKHVTHIYYLKQCGLKGIDRLRWVTFTTPLVTRLRMISRLPWITHTVLSTISMGSLSIVGTKKYHHRINAVSNNCICIEKIIYTTNS

SEQ ID NO: 205170 - protein, 75 aa, Zea mays
  Clone ID: MRT4577_118703C.1.pep
DAWGQLDRSIASLPCILDVDPCGLLQNITYVTNPRGATVFPKGHTPWDTPLHLYISVMIYGIQSLFSASLFVTTE

SEQ ID NO: 205171 - protein, 227 aa, Zea mays
  unsure (1)..(227): unsure at all Xaa locations
  Clone ID: MRT4577_118704C.1.pep
LTTVPRRGHRTDTQNDDGRVGAAPDHQLPRAGPGRPRRREGCRASFAHEPKEDPAAYRRTYIVFVSPPVNADAMSRSAHRQWHESFLPTTTEQLTDESGSTGDTRLVGSYTAVFHGFAARLTEAELSAVAKQPGFLRALPDRKLELFTTRTXSFLGLSRDEHRFWSDAGYGSGVVIGVVDSGIDGKHVSFRDDGVPEPPARWNGACTGSEENTGRCTRKLVGSKSFV

SEQ ID NO: 205172 - protein, 146 aa, Zea mays
  unsure (1)..(146): unsure at all Xaa locations
  Clone ID: MRT4577_118705C.1.pep
DTYSTAKNEFLRCELDSTLEEEXFDSLPYIHYIDRIDSCAISINNAHAVTNEIIAHHLNATTTTFQXMTNRTIFALEXVIATLMHDYLTIGFTTDTNLSHYSRNNGLLIHIHRPMHSHIDRHTNHDLHIRGLSKAXLMSERDHMHY

SEQ ID NO: 205173 - protein, 55 aa, Zea mays
  Clone ID: MRT4577_118706C.1.pep
HNNALQRTRDTRLVQSIQNPLKNICLHQMLKAPAGAIMPDNITIKRDEVYDELFL

SEQ ID NO: 205174 - protein, 67 aa, Zea mays
  Clone ID: MRT4577_118707C.1.pep
GPMKSYSRPALYNTRAAPPFPTSFFSQIVTSGFSRGTPPPLRIESPYGRKPVTISPPPLFEGPPPAP

SEQ ID NO: 205175 - protein, 77 aa, Zea mays
  Clone ID: MRT4577_118708C.1.pep
WYGSSGFAFAFQFSVASARWISLTMFSLHEMDASSCSPSGVAVAYTAPPVEPSTVRSWAPVSVIHDLYDVRHLILQT

SEQ ID NO: 205176 - protein, 232 aa, Zea mays
  unsure (1)..(232): unsure at all Xaa locations
  Clone ID: MRT4577_118709C.1.pep
AQAVDAQAGDRTRLCPGCVGGRSSRRWWRSRLVLQQLLPWPPPWRTSPAAGSVQVQASSSSSSPPLARNPFPLASPPSAXRPSSPRRSSXAPWPRAQRRPPSCVPCRRSSSSSSPXAPFPALAXPSSPLPGARPISPWPNASPAASSPPXKPPSRQQAPLSAPAHSSRKPPWALVSPTLAPSTAIDLAQQQQHPLLCRARRVGPHAVVLRSVSASSSKPWPLSTSRLAHRSS

SEQ ID NO: 205177 - protein, 143 aa, Zea mays
  Clone ID: MRT4577_11870C.1.pep
WILSKSSALLPWRWIQRTRIQRTAPLAVAVDRRRRWQWIDGGRGTHLPWMEQWLEGGWVFVAHGGRRGGGARLHGGWVSTALGPARTSPAAGAGSSSPAAGDRMGPCSTALGPAGSSRSRMGQCSTALGLGPRQLGSPRPASR

SEQ ID NO: 205178 - protein, 95 aa, Zea mays
  Clone ID: MRT4577_118710C.1.pep
TVYSLWYVDPMLLIQGLWVHTVTTPNLFWRPSLWGIKDICRFGSIGLNMNWILDNRAPIITQSLLLQYTRLFPRKCVLDPYLNIAGQDTHPCFSP

SEQ ID NO: 205179 - protein, 130 aa, Zea mays
  unsure (1)..(130): unsure at all Xaa locations
  Clone ID: MRT4577_118711C.1.pep
SLVCPCFGLVLFFGFPRSSFGFSLGGRVPCWLLFLPGRLLVGPTCRPLLIPVNTRFCLKVFVLLLPLTGCICTLCCSPLVAQFVSLGRRDLSLPTAXADCSSWRGSAADLLCLRVFPGSFWPVVHSFPLS

SEQ ID NO: 205180 - protein, 146 aa, Zea mays
  unsure (1)..(146): unsure at all Xaa locations
  Clone ID: MRT4577_118712C.1.pep
SWEENIQTPFSYYVWDHIKAPSVCNGRTIGKTLVCSTQGTRIGSEGGKGILFEVLLPDLHGDLDQAHMHIMLTSXDVHXQYVLTYLXCLNYTTDKLHILWNKXRTLIPAPADVTTTLNYMLHMLSIALTNTLPYQVNNTCYAQASP

SEQ ID NO: 205181 - protein, 96 aa, Zea mays
  unsure (1)..(96): unsure at all Xaa locations
  Clone ID: MRT4577_118713C.1.pep
FRRXPRPWGGGFRLCRGFWWWFSPSARVCSVVVSSVRGPRXSVSFWLLFSVSLSLVLWFSLLVCSVGVPPSWLCXXRASFPPRXSVSVRLLLVXXG

SEQ ID NO: 205182 - protein, 89 aa, Zea mays
  unsure (1)..(89): unsure at all Xaa locations
  Clone ID: MRT4577_118714C.1.pep
RPAPVEISYENMRFLITHNPTNATLKNFTEELKKYGVTTLVRVCDATYDKAPVDQEXIHVLDWPFDDGVHXPNQIVDDWLNLSKTQFRE

SEQ ID NO: 205183 - protein, 126 aa, Zea mays
  Clone ID: MRT4577_118715C.1.pep
ERRQLIILPWHGTMSEADTCYSYNGREAPGMCSLSALMRLLRKFVDPRSIETQTNPIDRSIALLLFHQSSDHAAVAVDDASSLKPPAGSKHHQGPAANQNQGLIPDSSVYSPGDGAPKDVQSLDKF

SEQ ID NO: 205184 - protein, 146 aa, Zea mays
  unsure (1)..(146): unsure at all Xaa locations
  Clone ID: MRT4577_118716C.1.pep
RGHPPGXHQIPPPRVREDVEGGDYVVPKGSGINFILFDLGMGDPPWGPPPVFIPGGFLPGGETEALDLPGPQGMKMIPFGGGRRIFPGPRIAFLLLGYFVAHLVGAFPWKKVEEGGVDFPPGGAQLPVLMGKPLRGPLLPKLHLFA

SEQ ID NO: 205185 - protein, 75 aa, Zea mays
  Clone ID: MRT4577_118717C.1.pep
PQCDMSFPCSVISAVSSHFFMFKSLLPLGASRICIMYSIHNCHTSSVFGFWIVEYKKCSWSLHASCSVYGKNTDC

SEQ ID NO: 205186 - protein, 162 aa, Zea mays
  Clone ID: MRT4577_118718C.1.pep
MNMQPTQPINDNVMNRHPQTLTRSASYPCENNESERRGLGKRTLGDPQVTMGTSMVVDGSFVSSMSSDISVEESSFRQLQNAVSQLDVQTKLCIRDGLYRLARSAQHRQVIPNMMSSNEDNPDIKDLQNAETLRKYDISNKDLIYTYTSMNQYLYGFEKCSR

SEQ ID NO: 205187 - protein, 101 aa, Zea mays
  Clone ID: MRT4577_118719C.1.pep
LSLLKKAAFDNCRMLLVRFVDPRSIETQTNPIERSIALLLFHQSSDHAAVAVDDASSLKPPAGSKHHQGPAANQNQGLIPDSSVYSPGDGAPKDVQSLDKF

SEQ ID NO: 205188 - protein, 41 aa, Zea mays
  unsure (1)..(41): unsure at all Xaa locations
  Clone ID: MRT4577_11871C.1.pep
AFASKRXVLIVEXPSINLEXLYGCXPPYHTFEEPVYIKSRQ

SEQ ID NO: 205189 - protein, 123 aa, Zea mays
  Clone ID: MRT4577_118720C.1.pep
STTGSSSLVTIPTLTSPQREAGEIPVSQAEPMNIESVVIEEDSEEDEAKAEENEAEEVVVRPRRKLTSPVWKEFKKVKVMNRMKAKCNWCSKKLGGEPRNGTKHLLDHLKIVHGKEGLERITL

SEQ ID NO: 205190 - protein, 577 aa, Zea mays
  Clone ID: MRT4577_118721C.1.pep
MPDWRVREFEGKFTDEFAHSNNNKHESGVEAPGVTSSKKLKHTVAGEKIQGVIPGINSSDPQKCNSENIQHENRIVSQNINSAGDCIGDCKDSSNAFSSREENTIAETRCPTDDWNSCQFALSNGSSILNNHSAPQDSLTYGDNDLNYIDWPGIDNFEDVDTLFRRSDFTYDPQQLENTDGLSWLPSSDAVYSSDVALQQGFDSSYSDYDILDDLSAFQCAEDKSLPSVGPSSDLCDNQFNDTYLFSEQKNANAYGEQIYQEDVMELLPTDQICSGHENIDMLQGGNQYSSEHTIQGIEDKKFSIASTSQLSSSQNLLKQRHHLDSNSPSNITYEAYEEKFGPSSGSFAQRNLKVQKKTMNMQPTQPINDNVMNRHPQTLTRSASYPCENNESERRGLGKRTLGDPQVTMGTSMVVDGSFVSSMSSDISVEESSFRQLQNAVSQLDVQTKLCIRDGLYRLARSAQHRQVIPNMMSSNEDNPDIKDLQNAETLRKFVDPRSIETQTNPIDRSIALLLFHQSSDHAAVAVDDASSLKPPAGSKHHQGPAANQNQGLIPDSSVYSPGDGAPKDVQSLDKF

SEQ ID NO: 205191 - protein, 158 aa, Zea mays
  unsure (1)..(158): unsure at all Xaa locations
  Clone ID: MRT4577_118722C.1.pep
QSRRCETIDRTDATDIDYENFALERAGPAGLSLASTVFGRNRSGDSLPASDRPPISSPLATSGTIFSAISCFWDLPAPFLWLAPSCQPTMSSQIRQNYSTDVEAAVNSLVNLYLQASYTYLSLGFYFDRDDVALEGVXHFFRELAEEKREGYERLLQM

SEQ ID NO: 205192 - protein, 76 aa, Zea mays
  unsure (1)..(76): unsure at all Xaa locations
  Clone ID: MRT4577_118723C.1.pep
MRPWHIAEGVLNSYGEWLVFINDDDQYMYFCTKKKKKKKKTKKKKKKKKKKKKKRXKKKKETKKKEKXRGKRRGLL

SEQ ID NO: 205193 - protein, 120 aa, Zea mays
  Clone ID: MRT4577_118724C.1.pep
CAALEAAVSDPSEFRRPSASTIIILIPQPAAGRRPSRPSSRAARAAVRWLPARALLLGFTGCWSSTLMPSRRAPQRALAPSLVGSRLRHCASAVAPPHPGDPVRVRRPQPAKGQPQLPEG

SEQ ID NO: 205194 - protein, 104 aa, Zea mays
  unsure (1)..(104): unsure at all Xaa locations
  Clone ID: MRT4577_118725C.1.pep
QTVLLQAASRHSTSMRNNWASLVFSFIYLMHGATNGAYGWLSLGLGAFNSDYSKLEILNPVHDQLRTKPAXEFIAYNRWGCICFLVLWGGWFRRFMQVGDVGKW

SEQ ID NO: 205195 - protein, 152 aa, Zea mays
  Clone ID: MRT4577_118726C.1.pep
MAFSSFPAGRTCRALFGEARVTMPEGQAKPAAAPAARVRPAVLYLGPCRRAPDYLTRVPGRLRGTPGLRRTRTSPRTGSWRSSTPVGHAGRVGCVFPELSPNGVSRQAGGKAGRNFTRVAGLPNPPTTATSPLACSRLMAHRGYRSRGRRES

SEQ ID NO: 205196 - protein, 112 aa, Zea mays
  unsure (1)..(112): unsure at all Xaa locations
  Clone ID: MRT4577_118727C.1.pep
APALRDSSMFGYMSPQKTMEIXNPGNAHHEELPKRPEAPKNXKSVKDPVMLLFXTALLPPGFNLXTXNPFGGRIPRMLKMGLSIHQDQAPEAHXHMPPLEENPGENKKEEVA

SEQ ID NO: 205197 - protein, 52 aa, Zea mays
  Clone ID: MRT4577_118728C.1.pep
QFSFTEIDTVRGGGDRGGATATGVIEMARRLRRWGPPAERQGWSGGSRQTAG

SEQ ID NO: 205198 - protein, 93 aa, Zea mays
  Clone ID: MRT4577_118729C.1.pep
IPVRMADYTRHDPLQRKVEISKGKQVLGCEHILLLKDGLVLMQGVSGQRLAVPKKGRPSPALRWPQFYPRGLHIYSVACHYSRGGFRAPFRFQ

SEQ ID NO: 205199 - protein, 315 aa, Zea mays
  unsure (1)..(315): unsure at all Xaa locations
  Clone ID: MRT4577_11872C.1.pep
MAAAWAVLAAVLVAAQVASAAPVTAPAFLWAPKNYGFRSDDAKEVVHYQTISPKNLAKSVLEEGGWSTFMCSREDTEKHVDVAIVFIGSKLQSSDISKDKQVDPALADTLKLSFTESEFSMAFPYVSTSDDEKLEESLLSGFTENCKSGFGRNRITYTDTCAVSGQDLKTYHNMDAINDLVVSGRTNPSGQTDVIVFCSGGFEKLGTTESEGELLSQLVDLLKLSGARHTILYASQPXVIYWRTXSGSPVARHLAERTNGTKTGLLSKCDGECLVKSTLLEGTFVGIVLLIILISGLMCMMGIDTPSKFEAPQES

SEQ ID NO: 205200 - protein, 109 aa, Zea mays
  Clone ID: MRT4577_118730C.1.pep
EGPNQSWKELACGDEVYTPRRYAPTSPDQAEPGYCGYRAAAVGGYAPTPTAGLMEPGYGGYPSTAAAGGYAPPTAGAQMEPGYGLYPTTPSARGYSPTHTTVPVQEPDY

SEQ ID NO: 205201 - protein, 61 aa, Zea mays
  Clone ID: MRT4577_118731C.1.pep
ICLPDMEDIYVHGLLNDLTIVFGQQQEHSHSFRSRHHVFSIFHCRITGATKKHLLFAGCTN

SEQ ID NO: 205202 - protein, 119 aa, Zea mays
  Clone ID: MRT4577_118733C.1.pep
LERLLQMRNFKLCLVRPIIKPKIPRIIIFFIPSPRGLLEGEGPHPTPFLVPPGVSSAPLILACLGCGAISLVFLYARSFGFLSDILSNIFYALAKPGHLTSFFYIWPLPYIILFALVFS

SEQ ID NO: 205203 - protein, 109 aa, Zea mays
  Clone ID: MRT4577_118734C.1.pep
AMGIPPRLESPLDFPPSPILRGIVATHEASPKRNEKKEASQKKFSQGKSFLTGELRSEYPPAPRGDYCPVPFRSPRLLAKAPVGRSPVVPLLFSFSSPPGIFDDLAAIA

SEQ ID NO: 205204 - protein, 169 aa, Zea mays
  unsure (1)..(169): unsure at all Xaa locations
  Clone ID: MRT4577_118735C.1.pep
MHSFARSTTAYDSERLKVLMTIAVLLSLSHRYAVDRLKSCHGHHTYMQCYLHMFQSVPCFVLFFPSHMIVAYSGIDTPALDAFMQYDVEFERMPQIKXMQALRFYGSFNVVVAGITIVNSSQCHLKFDNCQGVMXVHDLTXISSPENSLSTDXIHLHPRVPGRVGGRWV

SEQ ID NO: 205205 - protein, 114 aa, Zea mays
  Clone ID: MRT4577_118736C.1.pep
MALPLPPAPAPPPPLVSANNRHAGAKHKAVVVMGATGTGKSRLAVDLALRFGGEVINSDKIQLHAGLDVTTNKVTEQDRAGVPHHLLGVARPDEEFTAADFRREATRAARAITA

SEQ ID NO: 205206 - protein, 136 aa, Zea mays
  unsure (1)..(136): unsure at all Xaa locations
  Clone ID: MRT4577_118737C.1.pep
RSALVRPPAXPPAAAVASVSMVVVPAVSTRPPALDEHEDEAAAWSAAAAAGDTRSSHVGAGDEHGIVVSCRGRDGDELRMCARAGRATLLPFLPQQKTARLEVEEEARATPITLQGGRHLTLPHARTHRAEFPRAD

SEQ ID NO: 205207 - protein, 171 aa, Zea mays
  unsure (1)..(171): unsure at all Xaa locations
  Clone ID: MRT4577_118738C.1.pep
PRXPGXLFXFXXXSXXXXLVXLPXGVLSCVPXXWFCPPXXXXXXXXAXXXXXACXVXLXFSFAFGGXRXPXXVXXXXXVPRLAAFFAPXGXASLXAALESQPWGPASXXSCXXCSLSLSLSXSXXXSXLXASSGRRSVGGXXRAGXGAXAXAXLAAFVSPCXGAGGGGRWA

SEQ ID NO: 205208 - protein, 88 aa, Zea mays
  Clone ID: MRT4577_118739C.1.pep
GGQMFRPKNPGYKKVWARGSLYHFVPPGGVVGGPFPKGPKVLGGAPPGGMGFFFGRGSPGGFFKKRKFFFPAPLGGFGFFFAGATPPF

SEQ ID NO: 205209 - protein, 204 aa, Zea mays
  Clone ID: MRT4577_11873C.1.pep
MAAAWAVLAAVLVAAQVASAAPVTAPAFLWAPKNYGFRSDDAKEVVHYQTISPKNLAKSVLEEGGWSTFMCSREDTEKHVDVAIVFIGSKLQSSDISKDKQVDPALADTLKLSFTESEFSMAFPYVSTSDDEKLEESLLSGFTENCKSGFGRNRITYTDVRREWPRSEDVSQHGCYQCKSIRIFRCFCSIFAPCTEFTHFCRTW

SEQ ID NO: 205210 - protein, 88 aa, Zea mays
  Clone ID: MRT4577_118740C.1.pep
TKNRYILVVTLLSFVLLFLRILLNLILHWILCQAICLTCFIVFHPICGCNLFLSQVQRGFHGPVVFSRPLTFGFTFCQASSLVNSHVD

SEQ ID NO: 205211 - protein, 56 aa, Zea mays
  Clone ID: MRT4577_118741C.1.pep
IRLEPDPTHFFPRNQPDVCGGVFIIALGGATPQSTLGEMTAPAFGLILASMHAYTL

SEQ ID NO: 205212 - protein, 104 aa, Zea mays
  unsure (1)..(104): unsure at all Xaa locations
  Clone ID: MRT4577_118742C.1.pep
MALHSCCTKARASASEQLITLLTRSGPTKPRHPICMSELGAQLAYVFGSSAEADAADSAAAPGTNDYVHGPIPCLNGRKSLTTAQGVQNECRYCXILKDVEKEF

SEQ ID NO: 205213 - protein, 281 aa, Zea mays
  unsure (1)..(281): unsure at all Xaa locations
  Clone ID: MRT4577_118743C.1.pep
MHRTPTNPPLILSFTIIVVTSFFRGGALQQPGGGACWPSERAALLSFKKGITSDPGNLLSSWRGWDCCSWRGVSCSNRTGHVLKLHLANPDPDIDSRTNHAESYILAGEISPSLLSLQHLEYLDLSMNYLGGGRGETGSPMPRFLGSMENLRYLNLSGIQFAGSVPPELGNLSKLQYLDLSATVDTVDDLTLFRNLPMLQYLTLSQIDLSLTVDWPQKINMIPSLRALDLSYCQLQRADQSLPYLNLTKLEKLNLYENDFNHTITSXWFWKATSIKFPQSW

SEQ ID NO: 205214 - protein, 108 aa, Zea mays
  Clone ID: MRT4577_118744C.1.pep
RPRGLPTPTCLFGKTFVPRRPGDMESPGAIGPVVFKRGPFLVEARNVYYSRVPRGPKPLMGVAPTNTVGTPGAVFQKRLNNGQKLVLKAFCGSWGSKDYIAGGPQLNW

SEQ ID NO: 205215 - protein, 86 aa, Zea mays
  Clone ID: MRT4577_118745C.1.pep
MAMVVFCDCAGAENAHRQRSNSAFSLSAYNKTTTIAEHQRKHDGWRLARLYDATNGCAQRIRIKKHRVKPGVMAVTDMDLYYDPLA

SEQ ID NO: 205216 - protein, 130 aa, Zea mays
  unsure (1)..(130): unsure at all Xaa locations
  Clone ID: MRT4577_118746C.1.pep
KSTAEHAIQHPFFNVCNWVAKAVHDAYHTESLRPNAEPRLELNLWDLSTEPDDCVPDLSLSLNPRFSGTDIGKHVPRHTXKMNYSCTXYENTPVKSGFWPLVPSDHPVGDIPAIPSLQQAYMADSPRAYS

SEQ ID NO: 205217 - protein, 70 aa, Zea mays
  Clone ID: MRT4577_118747C.1.pep
MGVCNRSMVEYSCHSSIRQKYSVHDKFVMHGKASLSRIELYSIRVSWIQLCKGKLNPLYSIMVYETYERT

SEQ ID NO: 205218 - protein, 129 aa, Zea mays
  Clone ID: MRT4577_118748C.1.pep
IRLEELFDDVILIAEGQIVYQGPREYAVDFFGAMGFRCPERKNVADFLQEVLSKKDQQQYWCHYDYPYQFVSVSKFAEAFKTFIIGKRLHQELTVPYNRHHNHPGGALRVSPRLPRRRCGHGGRLLRPL

SEQ ID NO: 205219 - protein, 364 aa, Zea mays
  Clone ID: MRT4577_118749C.1.pep
VASVLSCLLRAQTEREILQSLDHPFLPTLYTHFETDKFSCLVMEFCPGGDLHTLRQRQPGKYFSEQAAKFYVAEVLLALEYLHMLGIIYRDLKPENVLVREDGHIMLSDFDLSLRCSVSLTVIKSANPGLDAMQRNNAAYCAQPACIEPSCIQPSCVAPTTCFGPRFFSKSKSKSKSKSKKEKSKPDGPNQENLFPELIAEPTDARSMSFVGTHEYLAPEIIKGEGHGSAVDWWIFGIFLYELLFGKTPFKGSGNRATLFNVVGQPLRFPESPIVSFSARDMIRGLLVKDPQHRLGSKRGATEIKQHPFFEGVNWALIRCASPPDIPKPLELECRPKQVPSANGKVAPVANQKGPDNYLEFEFF

SEQ ID NO: 205220 - protein, 126 aa, Zea mays
  unsure (1)..(126): unsure at all Xaa locations
  Clone ID: MRT4577_11874C.1.pep
PTRPPTRPPRVRPRVRTTSRSEGELLSQLVDLLKLSGARHTILYASQPXVIYWRTXSGSPVARHLAERTNGTKTGLLSKCDGECLVKSTLLEGTFVGIVLLIILISGLMCMMGIDTPSKFEAPQES

SEQ ID NO: 205221 - protein, 143 aa, Zea mays
  Clone ID: MRT4577_118750C.1.pep
MATSAALSADANPTQLCRSRAALGKPVKGLGLRMGRERACQRIITCQAASSIPADRVPDMEKRKLMNLLLLGAISLPTDGMVDPYGALFRPAGSRNGGGGTYAKDMLGNDITVEEWLNTHGPNDRTLAQGLKGDPTYLVAEQD

SEQ ID NO: 205222 - protein, 48 aa, Zea mays
  Clone ID: MRT4577_118751C.1.pep
HPLKSSGGTVHLTIKKLKNRQNIIYILLIRNLISKLEQLHGLVGPFKP

SEQ ID NO: 205223 - protein, 73 aa, Zea mays
  Clone ID: MRT4577_118752C.1.pep
MCCPCLQCQLCRSRASMGKPVKGLGLSIGRERAQRSIACQAASSISADRVPDMEKRKLMNLLLLGAISLPTVG

SEQ ID NO: 205224 - protein, 117 aa, Zea mays
  unsure (1)..(117): unsure at all Xaa locations
  Clone ID: MRT4577_118753C.1.pep
KPSARTTVRRRSRTRRMERPRTVMTQRNCLSTCTSRETTDCTRFFVXSPPPPPGVCVGRNRQSECENHHVPLHDRWQAGDPHQVTPLRKVLAKQPELDLVRHGRHQHRQPRHPVRDR

SEQ ID NO: 205225 - protein, 90 aa, Zea mays
  Clone ID: MRT4577_118754C.1.pep
GTLRGIIDGRMGLYPAECIKRLLSLATNCRQDETDDRTFMSVIVRELELILRMMPERIIWCGNLRDRLNDVSKSLSFPRRDLLSRTASGV

SEQ ID NO: 205226 - protein, 109 aa, Zea mays
  Clone ID: MRT4577_118755C.1.pep
MATSAALSTAANPTQLYRSRALLGKPVKGLGLSMGRERAQRSIVCQAASSISADRVPDMEKRKLMNLLLLGAISVPTVGMVRPYGSFFVPACYGNAGGGTHAKDKLGYD

SEQ ID NO: 205227 - protein, 62 aa, Zea mays
  Clone ID: MRT4577_118756C.1.pep
RVRLLLLAIFIPAITTPVEAHILAQVFGDDQFQRAGQPAAPHEHLPGLADAPEGDNAARTAA

SEQ ID NO: 205228 - protein, 167 aa, Zea mays
  Clone ID: MRT4577_118757C.1.pep
MATSGGFSTAANPTQFCRSRAALGKPGKGLGLGMGRKRASQRSITCQAGSRIPADRVPDVEKRKLMNLLLLGAISLPTVGMVVPYGAFFVPAGSGNGGGGTYAKDKLGNDITGEEGLNTHGPNDRTLAQGLKGDPTYLGGEQDKTLATYGINAGCTHLGCVVPGNGA

SEQ ID NO: 205229 - protein, 242 aa, Zea mays
  Clone ID: MRT4577_118758C.1.pep
MATSAALSTAANPTQLCRSRAALGKPVKGLGLGMGRERASQRSITCQAASSIPADRVPDMEKRKLMNLLLLGAISLPTVGMVVPYGAFFVPAGSGNGGGGTYAKDKLGNDITVEEWLNTHGPNDRTLAQGLKGDPTYLVVEQDKTLATYGINAVCTHLGCVVPWNGAENKFICPCHGSQYNNQGKVVRGPAPLSLALVGQGDVDSAAGSLSPVHADVDDGKVLFVPWMETDFRTGQDPWWSA

SEQ ID NO: 205230 - protein, 182 aa, Zea mays
  Clone ID: MRT4577_118759C.1.pep
MAGQTSKAKEAGKDDREEPGAEAAKEKLVPSHQQQESPASVVDKDSSGVSSVPGDESPVLEGDSVELKVEENLDGNGNKENKTSQKSSTSDGFASAKVSDGTSSLRKTSGSVAMSTRADFTESGKSSMCRASTASDISDESSCSSMSSATTKPHKGNDSRWEAIHVVKSRDKVLGLNHFRLL

SEQ ID NO: 205231 - protein, 103 aa, Zea mays
  unsure (1)..(103): unsure at all Xaa locations
  Clone ID: MRT4577_11875C.1.pep
CLXACFPPPPXLXSPASXXSSWLLPXPPPPVPXXXLLXLRSPRPXXRAXXXAAXXLXXWGXCRRXPXRWXSPPSPSRSPSPPRPWRRXGXWRCPAWXXPRRXP

SEQ ID NO: 205232 - protein, 119 aa, Zea mays
  Clone ID: MRT4577_118760C.1.pep
GFLKLHFPLCFECFFCPLFFGPGALAAPPKFFCLFPPPQFFCQCGPPRSFFFGPPFPPHFFLPLQFVRNGCPRFNPGLGPVLVWTLFRKKNFSPFGVAFFFSRVFGNSLPPPPCVLFYL

SEQ ID NO: 205233 - protein, 82 aa, Zea mays
  Clone ID: MRT4577_118761C.1.pep
VAGAALLAWWAVAFHPSYAQLWMVPLGLVLAGTPPVVCLALRFSPDARAPPAAGKDDGSSSGPAGARAPPPPPLVAVVIDKQ

SEQ ID NO: 205234 - protein, 156 aa, Zea mays
  Clone ID: MRT4577_118762C.1.pep
AFVGTHEYLAPEIIKGEGHGSAVDWWTFGIFLYELLFGKTPFKGSGNRATLFNVVGQPLRFPESPIVSFSARDMIRGLLVKDPQHRLGYKRGATEIKQHPFFEGVNWALIRCASPPDIPKPVELECRPKQVPSANGKVAPAPNQKGPDNYLEFEFF

SEQ ID NO: 205235 - protein, 57 aa, Zea mays
  unsure (1)..(57): unsure at all Xaa locations
  Clone ID: MRT4577_118763C.1.pep
CFPKGKNTLKVFSLNSGNPRRVMGAQGFKPGWFWTRNFSPFIXXKYLQGETLSLKGF

SEQ ID NO: 205236 - protein, 65 aa, Zea mays
  Clone ID: MRT4577_118764C.1.pep
PLELPSKHYGRDHVPQGQFMVKLKGPKCALKAETKPSLDTNLHFSYGFLKRTRANQWFQNIWAKT

SEQ ID NO: 205237 - protein, 293 aa, Zea mays
  Clone ID: MRT4577_118765C.1.pep
YAPLVDELWKDPAIQATYRRSELPFLPPAASYFLDKAVDISRTEYELSDMDILYADGITSSDGVASTEFSFPQLSLGGLGVDEPDAQDTLLRYQLIRINSRGLHGNCKWLQMFDDVRLVIFCVAASDYDEFYEDANGTIVNKMVESRQLFESITLHPTFEQADFLLLLTKFDLLEQKISSSPLTSCDWFSDFTPLISRNLLNGGSGGRRRTARGSTGATLPQMAAHYMATKFKRLFESMTGRKLYVSYVNALDQESVRSAIRYGREVVKWEEEKPVFGASETVYSEEPSSFTA

SEQ ID NO: 205238 - protein, 74 aa, Zea mays
  Clone ID: MRT4577_118766C.1.pep
TTCMLMLYKVMGRAASSWLRYKMAAHACVSTASPPCILLHCYTYRPALFQNKHDACSLLKQVISSSIYMTSDLF

SEQ ID NO: 205239 - protein, 54 aa, Zea mays
  unsure (1)..(54): unsure at all Xaa locations
  Clone ID: MRT4577_118767C.1.pep
GSSISXPHHDHLLWSPTPVSAQAPAMNCLTDLVNLNLSDNTEKIIAEYICDRWA

SEQ ID NO: 205240 - protein, 77 aa, Zea mays
  Clone ID: MRT4577_118768C.1.pep
LGMILPLILLIGFNARRTKCNYASFWVARTRKRSLQIVFKAGEASLSFCSPGIGFQLGRLLIVNLFIQSRSNSPSRF

SEQ ID NO: 205241 - protein, 230 aa, Zea mays
  unsure (1)..(230): unsure at all Xaa locations
  Clone ID: MRT4577_118769C.1.pep
KPFLVVAPPPRPPRSTTXXPQPQLHPPSRSPQPEPAPTQPEPXPRPPRPXPPSSTRGNQTAGGEQXPDPDAMSPPXPCYYPSAPPRPAAPPXPGDGLTRRRPGGAEGGPXXRAEGLPRPALFSGPRPPPPTHPPPTPPPPPPNTTPPAPPPXPPPPPPPPPPPPPPPXPRPAPPPTPPPPPXPTPPHTHPPQHPNPPAPPTPQTPPRPPAPSPAPPPPPPIRNPPPPPLP

SEQ ID NO: 205242 - protein, 120 aa, Zea mays
  Clone ID: MRT4577_11876C.1.pep
IRLEAAGCFFSPCGGNYGIEATANCGAPIFSGPDQACQPTNAVLVEGRVNGGPDNDEKQTKRIGRDREDKHMELLHGYRSGSLSTMKRMTDLNTHVHAARATRPCKATLHEHFVRSFQAL

SEQ ID NO: 205243 - protein, 50 aa, Zea mays
  Clone ID: MRT4577_118770C.1.pep
SIRVYISIRVSCCKILNRILDQLWLVTLALTGVCIMSILLSNGLVGFLSL

SEQ ID NO: 205244 - protein, 70 aa, Zea mays
  Clone ID: MRT4577_118771C.1.pep
RPQSLLPFTKLYHHNIKGEHIGWVQFPKKNPQAKPQVFDSKLKRRRKVPLDLTNQVKHIIQTELVLWNSE

SEQ ID NO: 205245 - protein, 67 aa, Zea mays
  Clone ID: MRT4577_118772C.1.pep
LMADPDNNRNTSIITLTNTGALSNAGTDHDISSFKSAAIAYKNSNSMGDHIKQYTSKARAAKIRLTH

SEQ ID NO: 205246 - protein, 71 aa, Zea mays
  Clone ID: MRT4577_118773C.1.pep
KRGKFDSKARFFQKGRYLFATTNRWAHCSGLFTGTPKTKQPIRARGNPILKKEGPVPPRFKLHTVFGNRKS

SEQ ID NO: 205247 - protein, 273 aa, Zea mays
  unsure (1)..(273): unsure at all Xaa locations
  Clone ID: MRT4577_118774C.1.pep
MDAKRFLHLVEEKKRRILEKKEAPLKWEQKLETAAKAKADAEAKVKKLNSRKHRRRGDFSSDSDSDYDSDVDRKHLKRKNRRRNKKHEHSDSDDARRRNRRSRKGSDSSDESNSEYESGSEEERTKKKRSHRRRHHRHSSMSDSEDNSDEEERRSAKDHSQPRRRHHQSSDDDSDKVRLRHGKGLRSRDEDARADFNSHKHLRSQSLEESSDDRDADESEKMRNGKRSHKNGGHRHHHHRHHHXNXHSNSAEPNDRRQVLKDGQRALEGDSAY

SEQ ID NO: 205248 - protein, 124 aa, Zea mays
  Clone ID: MRT4577_118775C.1.pep
VNSAPRICSRSVSKWDNQRLFVMPLRWINKCAHIFFARTSARYFVLANHVNFELVRVLTWSHALFGALQVSYLCLRQRRAHEQFVMDICKSPIDNVVRLCQQIPVFRGEKKAETHKNPLGRSRP

SEQ ID NO: 205249 - protein, 274 aa, Zea mays
  unsure (1)..(274): unsure at all Xaa locations
  Clone ID: MRT4577_118776C.1.pep
MDAKKFLQLVEEKKRRILEKKEAPLKWQQKLEAAVNVKADAEAKAKKLKSRKHRRRGDSSSDSDSDYGSDVDRKHLKRKNRRRNKKHEHSDSDDARRCNRRSRRSTDSSDDSDSEYETRSEEERPRKKRSHRRRHHRHSSRSDSENYSSDEEERRSAKDHTQSRRRHHRSSDDDSGKDKVKSRHGKGLRSRDEDARADFNSHKRLRSQSLEESSDDRDADESEKMRNGKRSHKNGGHRHHRHHHXNXHSNSAEPNDRRQVLKDGQRALEGDSAY

SEQ ID NO: 205250 - protein, 155 aa, Zea mays
  unsure (1)..(155): unsure at all Xaa locations
  Clone ID: MRT4577_118777C.1.pep
MDAKKFLQLVEEKKRRILEKKEAPLKWQQKLEAAVNVKADAEAKAKKLKSRKHRRRGDSSSDSDSDYDSDVDRKHRRRKDRRRNKKHEHSDSDDARRRKHRSRKGSDSSDESNREYESGSEEERTKKKRSHRRXHHRHSSMSDSEDNSDEDERRS

SEQ ID NO: 205251 - protein, 274 aa, Zea mays
  unsure (1)..(274): unsure at all Xaa locations
  Clone ID: MRT4577_118778C.1.pep
MDAKRFLHLVEEKKRRILEKKEAPLKWEQKLETAAKAKVDAEAKVKKLNSRKHRRRGDLSSDSDSDYGSDVDRKHLKRKNRRRNKKHEHSDSDDARRCNRRSRRSTDSSDDSDSEYETRSEEERPRKKRSHRRRHHRHSSRSDSENYSSDEEERRSAKDHTQSRRRHHRSSDDDSGKDKVKSRHGKGLRSRDEDARADFNSHKRLRSQSLEESSDDRDADESEKMRNGKRSHKNGGHRHHRHHHXNXHSNSAEPNDRRQVLKDGQRALEGDSAY

SEQ ID NO: 205252 - protein, 198 aa, Zea mays
  unsure (1)..(198): unsure at all Xaa locations
  Clone ID: MRT4577_118779C.1.pep
RLKGKXRLVRKLEEEGAXSSSMKDRMSLLQQQLCDAQSSAQLQEXARELEKELTKATEEFTIEIQSLKGKISGLISEKESIYDELKSTQEKVQLEMSQRKGLEDQILRFKQSVSDSCAEESKTSCSMVRSGSGLGNTAFVSKSEKLREALSGQRGTISKIFEEVGLPNVLALLKSEDLDVQIHAVKVVANLAAEDVNQ

SEQ ID NO: 205253 - protein, 70 aa, Zea mays
  Clone ID: MRT4577_11877C.1.pep
GGIGVANETATSHTKVEPPAGGGSVVKVKSTNKLPPGVEVKDKTAKAKESVTAIFKGAEANLGANPDANK

SEQ ID NO: 205254 - protein, 275 aa, Zea mays
  Clone ID: MRT4577_118780C.1.pep
MDAKKFLQLVEEKKRRILEKKEAPLKWQQKLEAAVNVKADAEAKAKKLKSRKHRRRGDSSSDSDSDYDSDVDRKHRRRKDRRRNKKHEHSDSDDARRRKHRSRKGSDSSDESNREYESGSEEERTKKKRSHRRKHHRHSSMSDSEDNSDEDERRSAKDHSQPRRRHHQSSDDGSDKVRLRHGKRLRSSDENARPDSNSHKHLRSQSLEESSDDRDDDGPEKIRNGKRYHKNHHRHHHHHRHHRHHHERHNNSAEPNDRRQVLKDDQRALEGSSAD

SEQ ID NO: 205255 - protein, 79 aa, Zea mays
  unsure (1)..(79): unsure at all Xaa locations
  Clone ID: MRT4577_118781C.1.pep
PPGELGIRLERNQRRGFSGAAEAPQVVGFVKKVGVAQMLRGGAIMDMVTPEQARLXEKAGACAVIALDRVPTNIPAQGG

SEQ ID NO: 205256 - protein, 107 aa, Zea mays
  unsure (1)..(107): unsure at all Xaa locations
  Clone ID: MRT4577_118782C.1.pep
LLMRNLKSPGGGGWYQRRLSXLFNIMTCANCTTEIYQWVGFNIATQTGAGYMSLARAAGIMTNXALGTHSPLKKLTDGRDGRPKYPPRGVIVPSILRRGGGRGPIVS

SEQ ID NO: 205257 - protein, 581 aa, Zea mays
  Clone ID: MRT4577_118783C.1.pep
MLPRLTTTSSSSSSSRRRRAGCSSFTRHRSSDRVGERFDFRFSNFRAVQVPAVSDRLFLSIVSVDSGRTIAKSSKVASRSGICQWPDTILEPIWFSKDEVSKEFEDCQYKIIVSLGSTKSGILGEIFLNLSNFLNIVDPTAISLPLKRCNAGTVLQLKVQCLGTKSKLSGVRSLRDMAPRLDDRSPTPTNDEMDNKSDCSDGMFNRSVRSSSENHLVGTYQDESGNRETSFSAPGSHRSSNSGDSTADRTNFSPRDNSSGGLYVGRQDSASSYASYVSAGRGDDGLRSNNSSFSSRASGPNLLQGNTPKIFSNGLSQLSMGASDSSKDLLEAAEETIEELRDEAKMWERHSRKLKADLEMLKKECSEKSKQHAELAVELSAAQAERDSYRHEIEELKSSLQDVNTRQTITGTPKRSDWIDLQKELEGEVKFLKESNTDLTIQLNRTQESNIELLSILQELEETIEEQRVEISKISKVKQTAYPENGLLVKKDREWAKKLSMKEDEITIPREKSDRALNIGNADGAASNAIYLELEKENAILRATIQELEKDCSELTDENLELIYKLKDNGMTKGQVPRISD

SEQ ID NO: 205258 - protein, 50 aa, Zea mays
  Clone ID: MRT4577_118784C.1.pep
TRSVLPISQCLDSAYYVSGFSVLRVLFSACQRVLLARLARIPIASSILPS

SEQ ID NO: 205259 - protein, 101 aa, Zea mays
  unsure (1)..(101): unsure at all Xaa locations
  Clone ID: MRT4577_118785C.1.pep
CTKSAQGXTDFCIKHGGGSRCKFQECGTSAKWGTDFCSIHRKALLGGDNAAVPEALPAASENDVVPRSPRRRRNCLRPPKRMPQQQQLLLVTALNIWAVFS

SEQ ID NO: 205260 - protein, 401 aa, Zea mays
  Clone ID: MRT4577_118786C.1.pep
CQARPRPRRRQTAPSSRPVHLAGLPVHAPENGSHGGGAAGSLSPNDPSDVALFLHTSGTTSRPKGVPLKQRNLAASVRNIRSVYRLAETDATVVVLPLFHVHGLLCALLSSLASGASVALPAAGRFSASTFWADMRASGATWYTAVPTIHQIILDRHASRPEAYPALRFIRSCSASLAPAILERLEAAFSAPVLEAYAMTEASHLMTSNPLPEDGPRKPGSVGRAVGQELAVLDEEGRLVAAGSPGEVCVRGDNVTAGYKGNPEANEAAFRFGWFHTGDIGVVDDQGYVRLVGRIKELINRGGEKISPIEVDAVLLGLPGVAQAVSFGVPDDKYGEEINCALIPRDGSALREEEVLAHCRRNLASFKVPKKVFITDDLPKTATGKIQRRIVAQHFVQPTSA

SEQ ID NO: 205261 - protein, 256 aa, Zea mays
  Clone ID: MRT4577_118787C.1.pep
MAIAPSPAGSRAAELPTWPRPRREALTALLLYLPWRAPTSLMALSRPCSPDRPHLCALMAPSRPSSLSLISLMLGSHPSAMEIGKLTLGSTSADPALLSLISATWRSSAGHVHRSQSPLLFSGARPGLHPQRRQPLPSTMALAVAAPASLLGFRPAEPLHAPFLPQLVPSPMALGPSSDRAPAFDLPCHGARPWAIVFIFGRALLRPPDHHRSTRGLEALRRLGSACSSSLRRARSSSSLRRVRVCRRVVEPLPCS

SEQ ID NO: 205262 - protein, 67 aa, Zea mays
  unsure (1)..(67): unsure at all Xaa locations
  Clone ID: MRT4577_118788C.1.pep
YVDSIRVIMFDPIKYGVGDIVSSMKKTNVXKRAQSLKMVQGPATMENERQELKIERRQIKRCWKIVI

SEQ ID NO: 205263 - protein, 106 aa, Zea mays
  unsure (1)..(106): unsure at all Xaa locations
  Clone ID: MRT4577_118789C.1.pep
GGCGCQTAPFDIPTALYMPPAFYLPAQSPPXTWQYRIQPPELSPRQQFRSCGRGSVRRPFLGQCVKLLRHQRSPEVTPYDSPQCQALXXQCCHQIKQVEPMHRYQA

SEQ ID NO: 205264 - protein, 46 aa, Zea mays
  Clone ID: MRT4577_11878C.1.pep
RAFRAARAARARAAYGAVLPMPSTSYIVTKINYNDRNDSPFTQGID

SEQ ID NO: 205265 - protein, 107 aa, Zea mays
  Clone ID: MRT4577_118790C.1.pep
TTTKGGTFKRKRRTTPPRTGKGNPGAPKKTQKKEGGTQKGGNDSTRQRETKTKEKNKPRGAGGNEKPQREPTTRPTGRNGGPGSRHQGTSQRGTPPPGGEPTRGNTK

SEQ ID NO: 205266 - protein, 43 aa, Zea mays
  Clone ID: MRT4577_118791C.1.pep
GVSGVVFEMCDQIGLVRFSSFVLAVVNDTHPRCESVQVKKKRF

SEQ ID NO: 205267 - protein, 89 aa, Zea mays
  Clone ID: MRT4577_118792C.1.pep
NFGSPRLFAITRSFNFFCRVFFSAWVTVSPTLNFVIRPRFFPHRATLVPFSPRVLFFPGPFPPNLITGFSRLGPFHFFIKKTKGICGVS

SEQ ID NO: 205268 - protein, 138 aa, Zea mays
  unsure (1)..(138): unsure at all Xaa locations
  Clone ID: MRT4577_118793C.1.pep
GLVGTQLVPTPPLDLPPGQPLNPLLSGGGKPAPXRPRPVPKAPKXRPPAPGIXLPPVAPPPPRPPFGSHVPPPPKRCKNGXPPVPRXLTLNWGPCGCSPIPPNSPTPLFPPPNXAPPPPEEFSPPPPLAPLRSPLLFP

SEQ ID NO: 205269 - protein, 95 aa, Zea mays
  Clone ID: MRT4577_118794C.1.pep
VLFFLFRGPNSFKGSPPPLGFWGFFGFPLFGQVLFGLGRIPPGGVWGVAFPFFFGARLRVPLPPFLGFKAGFPPFFFPAPPPVSLGDLFFFWAPP

SEQ ID NO: 205270 - protein, 101 aa, Zea mays
  Clone ID: MRT4577_118795C.1.pep
PPVRVPSWGLEDNVVCIQPARNFSRPDGLEDSEDSKEDENVPTAPDPPSQHLRGHGTGFCFDSSFDVHKKCPLCELMFPPNYDQSKFEEHVESHWKVCPMC

SEQ ID NO: 205271 - protein, 50 aa, Zea mays
  Clone ID: MRT4577_118796C.1.pep
EKSVHLLHLDLLTAPCNLGIVTLEQVPIHNINHLPSVSFLQRLFYYIWHP

SEQ ID NO: 205272 - protein, 139 aa, Zea mays
  Clone ID: MRT4577_118797C.1.pep
RKAKKKMGEQNIQKAVKSPMDAAKTAFSGNKPFCVTQVEVGFDTPAVREAVIKVMGQKGLPIMFFSPDEASNKTVIYAGGPPKGPNGFKVLGWLTPSNGPLKGKGGGGKNGVAQGQGNDAFQLKETKALSNSIASKKLC

SEQ ID NO: 205273 - protein, 509 aa, Zea mays
  Clone ID: MRT4577_118798C.1.pep
MALAPSPPALPPNPALPLPWWGRAGRGALVRARARAVRAALRPPSQWSVGSWRGRPAQQQPEYPDKADLEDVLRTVGTFPPIVFAGEARTLEERLAEAAVGRAFLLQGGDCAESFKEFNANNIRDTFRVLLQMSVVLMFGGQMPVVKVGRMAGQFAKPRSDGFEERDGLKLPSYRGDNINGDAFNRESRLPDPHRMIRAYSQSAATLNLLRAFATGGYAAMQRVAQWNLDFTENSEQGDRYMELAHRVDEALGFMSAAGLPLDHPIMTTAEFWTSHECLLLPYEQALTREDSTTGLYYDCSAHFLWVGERTRQLDGAHVEFLRGIANPLGIKVSDKMDPAELVRLIDILNPENRAGRITIITRMGPENMRVKLPHLIRAVRGAGQIVTWVTDPMHGNTMKAPCGLKTRSFDRILGEVRAFFDVHEQEGSHPGGVHLEMTGQNVTECIGGSRTVTFDDLGSRYHTHCDPRLNASQSLEMAFIIAERLRKRRMASSPLYTNQLGSIPSMGL

SEQ ID NO: 205274 - protein, 66 aa, Zea mays
  Clone ID: MRT4577_118799C.1.pep
SDRIKLISSAHNSTSENKPGFVLISSALHYYIQASSWSTHAHSLSIDWSLFIGCIVLPPYQNWLSL

SEQ ID NO: 205275 - protein, 67 aa, Zea mays
  Clone ID: MRT4577_11879C.1.pep
WVTRKCHSVLMMLCIRPSPTSICLTIIRGRGPSGIANTVKIIRINRPLICANIAGTTSSEGIYIFMG

SEQ ID NO: 205276 - protein, 52 aa, Zea mays
  Clone ID: MRT4577_1187C.1.pep
PVGRVYFPGGAPSGPFNGFVPGAFFSGFGSPEIFFNCAPKKMCQFPVPGKFF

SEQ ID NO: 205277 - protein, 189 aa, Zea mays
  unsure (1)..(189): unsure at all Xaa locations
  Clone ID: MRT4577_118800C.1.pep
PKWTPWCMEHPKDVDWDALINSIFREAENVPEIDWSEPREAEXMEDLIENNDGHWTNRIKSYDTSRNDPTKNTCIVVPXPYLHXQHISAQKRAIHAKKHRHIIPNSVNTFLTDLIIMRELADNFCYYQXNYNSLTGAWEWAKKTFMDHAGDKREHICAREQHXHAKTSDPLWNASKLEMVHHGKMHGFM

SEQ ID NO: 205278 - protein, 188 aa, Zea mays
  unsure (1)..(188): unsure at all Xaa locations
  Clone ID: MRT4577_118801C.1.pep
MANQTPAVVMDNGTGFSKLGFAGNDSPSFVFPTAIATKGPTGGAGGSGSGRPAVANKPSFLTGGAGAGGHLSGKRGTEDLDFFIGDEAIAASGGPGYGLHYPIRHGQIENWDHMERFWSNSIFKYLRVEPEDHYFLLTEPPLNPPENRENTAEIFFESFNCAGMYIAVQAVLALAASWTSSRXQDRSL

SEQ ID NO: 205279 - protein, 99 aa, Zea mays
  Clone ID: MRT4577_118802C.1.pep
MARVCNRQMLKNNPRHWAETKTGKAGGGQGLEKQRGEWRLCKPCKRGHKYSLKESKRRGARINQGPIQIRKGGLLIQKKTNRVDQGKKNPGGQGARPPP

SEQ ID NO: 205280 - protein, 69 aa, Zea mays
  Clone ID: MRT4577_118803C.1.pep
RYAPKGTNFYVFDPQAGYDTVGLQSWTSRERPCSLSLGEKFGHWCMARFSRAVQEKKSRRLVSSRIPSL

SEQ ID NO: 205281 - protein, 111 aa, Zea mays
  Clone ID: MRT4577_118804C.1.pep
RTLGIGPPLPWPEFKRKFFRELGGIPGDYRGLALSNLMGGGIPPGPEGQMEGPPKDPPGCPRGVQKGFSPPPVPEGEGKLAPIKGGAESPWIFGGGTMPPQELRKAKGLRN

SEQ ID NO: 205282 - protein, 105 aa, Zea mays
  Clone ID: MRT4577_118805C.1.pep
GARGACGCSPASGCRRRPPRPPKRSSSSAMVRRRRRRPHPHKHLALLCVAQAICVVVRTSHSISMHGLIEFLLPSLRTIVCVAYAYRAYRTPKHKLKRELRDFLT

SEQ ID NO: 205283 - protein, 383 aa, Zea mays
  Clone ID: MRT4577_118806C.1.pep
SSRRGQSTRSHPPDWNNQQQQGQQPRASGGADAPLLPMGPMAATAAASEPGGLPRSSSTSSAALAMHARPNSMAERARLARIPNPEPALKCPRCDSTNTKFCYYNNYSLSQPRHFCNMCRRYWTRGGSLRNVPVGGGCRRNKRSSKSSSSSAGSSSSKMSPSGRLLGGPSATPSTTPGTTGAIITPGLSSFSHHLPFLGSMHPSGPNLGLAFSAGLPLVGMQHLDTVDQFPVASGGGTTIGASLEQWRVRQQQQQFPFMTGGILDLSQPPTYQFGLEANRGGSGSAAVAFNSGQTTTTSATTGRQEGSSKKIRDCKGEEVSLQKQYMVPLRHGSGSHGVWDGSAGGTGSNGGGTGNGGSSWPMNMIPGFHSSSTSGCNDSGLS

SEQ ID NO: 205284 - protein, 165 aa, Zea mays
  unsure (1)..(165): unsure at all Xaa locations
  Clone ID: MRT4577_118807C.1.pep
PLFFFFFYFFFFFFFFFFFFFFFFFFFFFFFGFFWGGKKEKVLGKSYPGTKRPPKRGPNKGEPPHRVPPTSLEKFRGKKFFSGGGLPPGGKKKPGXGPPNLNWGVPFKGGGQRGRPGXPPPGGGPPRGGAPRNGLQRXPPKGNPPLKPKGPPRVPPRKVGKKGPP

SEQ ID NO: 205285 - protein, 106 aa, Zea mays
  Clone ID: MRT4577_118808C.1.pep
TNGTVYVTDFVIPYEEKSAEFQVASKSNFAELHVGWDPLPSKHVVATDLPQEALMVQEFARLVQNIRDAGGKPEGKWPAITRKTQLVLDAVKASIDKGSAPVEVAS

SEQ ID NO: 205286 - protein, 405 aa, Zea mays
  Clone ID: MRT4577_118809C.1.pep
MSRALLSHVLHRPPHFAYTCLRSGVGARGGVLASGIHPLRRLNCSAVEAVPGPTEEAPAPQARKKRVVSGVQPTGSVHLGNYLGAIKNWVALQDSYETFFFIVDLHAITLPYEAPLLSKATRSTAAIYLACGVDSSKASIFVQSHVRAHVELMWLLSSSTPIGWLNRMIQFKEKSRKAGDENVGVALLTYPVLMASDILLYQSDLVPVGEDQTQHLELTREIAERVNNLYGGRKWKKLGGRGGLLFKVPEALIPPAGARVMSLTDGLSKMSKSAPSDQSRINLLDPKDVIANKIKRCKTDSFPGMEFDNPERPECRNLLSIYQIITGKTKEEVVSECQHMNWGTFKTTLTEALIDHLQPIQVRYEEIMSDPAYLDNVLLEGAVKAAEIADITLNNVYQAMGFLRR

SEQ ID NO: 205287 - protein, 141 aa, Zea mays
  unsure (1)..(141): unsure at all Xaa locations
  Clone ID: MRT4577_11880C.1.pep
ASKQEEPQPHAIRDQLHLVSCCLTNPPHGCWRNVYDTISXAQRLYLNGWSVFHTIHLVRDGHQDMALGDLLRRKSQDGVQVLLLVXDDPTSWSTLAXMVPGIWFTGWLQMKGYMGTRDEXTQRFFXRSSVLIRLCPRSARK

SEQ ID NO: 205288 - protein, 38 aa, Zea mays
  Clone ID: MRT4577_118810C.1.pep
MFDPAYLGNVLLKGPVTAAEIADITLNNVYQAMGFLRR

SEQ ID NO: 205289 - protein, 48 aa, Zea mays
  Clone ID: MRT4577_118811C.1.pep
LFFSYNFFHRTLASLIVQEVRLNVNPGGMCPAASFTLVNIYFYTSNIQ

SEQ ID NO: 205290 - protein, 119 aa, Zea mays
  Clone ID: MRT4577_118812C.1.pep
LRQLPVSVLSYRCHWSVLHKAASGLYLVGAHRSRHVRPGTRRGSALRGGGASHQERALLDRSMSGDRGQCASTEEGRALCGGGLAVIVSTVPPGGHVDGPVGAQSRDSSSRESDCLWAS

SEQ ID NO: 205291 - protein, 49 aa, Zea mays
  Clone ID: MRT4577_118813C.1.pep
HIPTLNKTGQTESRPNELMGYMSEVGPIMLCMLTDTHHRVLRNITFHMR

SEQ ID NO: 205292 - protein, 87 aa, Zea mays
  Clone ID: MRT4577_118814C.1.pep
TQGAPLNSTAYLHQQQFPPFSQQANLSPVAFLTQRQWVPFYMHSGLIDGPLLQLQQLGPLAHLVLANPIEFFQQPFIGGAFFKLLMG

SEQ ID NO: 205293 - protein, 107 aa, Zea mays
  Clone ID: MRT4577_118815C.1.pep
RATRAPRRGGVASPRCASLTQGRFLVLLINAAGSLFHRLNSARDGTRSCQIASVDNDRLENIEDVDAKSVHLFVLFHHLPREHRDNRELRRGLLYQVSGLLEQDPCE

SEQ ID NO: 205294 - protein, 81 aa, Zea mays
  Clone ID: MRT4577_118816C.1.pep
QAILYIFFSFFDGHCFFFFSFLSFLYVQSWLLHVLSHLSLPPSLGGRMRDHYAALHKEWRKQPLHRKRGGRLYQPLMERRC

SEQ ID NO: 205295 - protein, 109 aa, Zea mays
  unsure (1)..(109): unsure at all Xaa locations
  Clone ID: MRT4577_118817C.1.pep
GIIRYRRSRDWGDIAKKEYNSSEGVGAGAVPVSRNAYRDTSIGLVLAQGPALPKNRPFIISIAYMTVVTKPYNGIPNNGCLYGFVKSXCSKGKYRDLKAAGSQEHSYSS

SEQ ID NO: 205296 - protein, 110 aa, Zea mays
  Clone ID: MRT4577_118818C.1.pep
ASQAPRGGSFGVTRFPGLLCVVAPHMLFIWRQFFFPVWWRTFGSILLCGAVAWFFSCCLFCLLVVVALCVVAVVGLLLQSVLCSRPALFGCVLVFSVPPPPCGVFGVVPV

SEQ ID NO: 205297 - protein, 58 aa, Zea mays
  Clone ID: MRT4577_118819C.1.pep
REGSISRLAGSGALGQSLRVAYPQGEGTAATPALLSQPKPERVLSKNTGPRSQEGVGI

SEQ ID NO: 205298 - protein, 83 aa, Zea mays
  Clone ID: MRT4577_11881C.1.pep
GDDARRKNTVGRINIALSWRPILSGVSGSAPTLMPRRDSFTCPSQWEWGARRGPQSRCYYMGSLSRPDFYRRGPGTLFIFLPR

SEQ ID NO: 205299 - protein, 83 aa, Zea mays
  Clone ID: MRT4577_118820C.1.pep
AMTRCAPGRKRGIIIEGIVRVNSAWWGRFGHDVVHTEPSTYEHAAQFIGRRQGADHADESAEQGNGHGSQWLKDAQKNYLGYI

SEQ ID NO: 205300 - protein, 83 aa, Zea mays
  unsure (1)..(83): unsure at all Xaa locations
  Clone ID: MRT4577_118821C.1.pep
MGMSYSCYLDVQXPWDXDETRHVPKIDEXVKSVQMERLLWGASKLEPIGYGINKLQIMMTIVDDLVYVDTLIEDYLSAEPENE

SEQ ID NO: 205301 - protein, 36 aa, Zea mays
  Clone ID: MRT4577_118822C.1.pep
TVSPPHRSLELGIQEEAASCVFWCHRRWLPMAFGLL

SEQ ID NO: 205302 - protein, 123 aa, Zea mays
  Clone ID: MRT4577_118823C.1.pep
QEFGTRGFVSMEGKTGQLRGCFVAIGLVLGFVLESPQGEAGGKWCCETPPGKNPFNRWVDSGLVAKIGFCAGKAGCILMENKFGGRWPGPARNGLSLEVLCLIISKDVKKKGPNDCCPTIGYL

SEQ ID NO: 205303 - protein, 168 aa, Zea mays
  Clone ID: MRT4577_118824C.1.pep
MGRSPCCEKAHTNRGAWTKEEDERLVAYVRAHGEGCWRSLPRAAGLLRCGKSCRLRWINYLRPDLKRGNFTADEDDLIVKLHSLLGNKWSLIAARLPGRTDNEIKNYWNTHIRRKLLGSGIDPVTHRRVAGGAATTISFQPSPNTAVAAAAETAAQAPIKAEETAAVK

SEQ ID NO: 205304 - protein, 183 aa, Zea mays
  unsure (1)..(183): unsure at all Xaa locations
  Clone ID: MRT4577_118825C.1.pep
CFVIRLTYPKPSTPELLTVRITPCIQAIMRRRLTEEPKDWNNNHPTHCPGKTXTLADAHINLLFXLAIIPRHMXTDRESVYYLLTLLYSEDXPRRPPTXYCYHCCFQPNAYPSGTRYLSILHEDTGXAELISMKTXICGTQYSLDYCSPCDADQTDGXNAYSSTXTEYKRRGHLQNKQDPAQP

SEQ ID NO: 205305 - protein, 62 aa, Zea mays
  Clone ID: MRT4577_118826C.1.pep
IGCSLPASVTPIYAIQLVFFYEPCFAVIYGSRPTPLNYILNVLANGALKPTCVSLDNNQFID

SEQ ID NO: 205306 - protein, 293 aa, Zea mays
  unsure (1)..(293): unsure at all Xaa locations
  Clone ID: MRT4577_118827C.1.pep
MGRSPCCEKAHTNRGAWTKEEDERLVAYVRAHGEGCWRSLPRAAGLLRCGKSCRLRWINYLRPDLKRGNFTADEDDLIVKLHSLLGNNQTKQASKLKXSSGCCLASACRWSLIAARLPGRTDNEIKNYWNTHIRRKLLGSGIDPVTHRRVAGGAVTTIWFQPXESSPNTAGAGAEAAAVVAAXDQDPLVKWLLEEEPATVKAPRCPDLNLDLCISPPCQHEDDGEEEEEELDLIKPAVVKREALQAGHGHGHGLCLGCGLGGQKGAAGCSCSNGHHFLGLRTSVLDFRGLEMK

SEQ ID NO: 205307 - protein, 122 aa, Zea mays
  unsure (1)..(122): unsure at all Xaa locations
  Clone ID: MRT4577_118828C.1.pep
METGPEQEAPAEVDPLVEWWLLFRLRSRRSGTSPRLQIRAIALSPRTLLSTNRFVCKVCGKGFXAELVLQLHRRGHNLPXREXRHQVYMCPEPGCMHHSPARALGETSPRIKIVMQLVIVTN

SEQ ID NO: 205308 - protein, 56 aa, Zea mays
  Clone ID: MRT4577_118829C.1.pep
NGVPYNGPLLHSLRRLGSVTCQRLSSFRPAGLCARRERRRRRGGISRAHVRGAPIG

SEQ ID NO: 205309 - protein, 131 aa, Zea mays
  Clone ID: MRT4577_11882C.1.pep
PNWGWGGGQKPKIFWGPPKKFGLGGKKDGPRKWGGCKNSGKQRGPNKSRFHPQRGGGLPKNLGFFGGLRPFGGFHGPMGGLKSLIFVLRQSFWVGRGFNFFLGVSFRKGGVGKRLGGKGGFWVLKLSHKSF

SEQ ID NO: 205310 - protein, 193 aa, Zea mays
  Clone ID: MRT4577_118830C.1.pep
EAYMNCMSFPCGVVGTISEYKIVLDEKPSESFVKFDALDGSTTCSCKKFEAVGIQCCHVLKVLDLKNIKELPEQYILKRWRKDARSVQIGEEPTYGSGSVMRSTSEARFSNMCRLASLIASRAAKSEDVMSYIESQSNAIQKHLDDILHTSYPDMGNHTVASSSQAISFVGTQHPDHSTPVVVAQTTNGLMGL

SEQ ID NO: 205311 - protein, 215 aa, Zea mays
  unsure (1)..(215): unsure at all Xaa locations
  Clone ID: MRT4577_118831C.1.pep
DSRSSTKYATSSDEASSSDDEDDLFTLFANLNMQQKEKLNELISAIHKKDELWDSQKDSLFKEIRSLVRVKMPIPKEXEECEKLTRELSTCHDTISNLRIENANLIAKTKELNVCDDSITNLRNDNASLNAKIDKLNESISSLRTENASLISKAKDLNVCNDSIFCLRDENAILSAKIEQLKSCKPSTFTCEHVAFLSRCRDVYVDAINDPPSFT

SEQ ID NO: 205312 - protein, 61 aa, Zea mays
  Clone ID: MRT4577_118832C.1.pep
AQSGVYKCFESCARILLFLSNRKQGICFVVTWWLTKWWGKHYILVTLCFFLWSSLNGLLLI

SEQ ID NO: 205313 - protein, 52 aa, Zea mays
  Clone ID: MRT4577_118833C.1.pep
ETIVLYPSPSLLGVTPSNDARVIRVTIVSLTHASAHAGGRAFAYAFAHASAG

SEQ ID NO: 205314 - protein, 35 aa, Zea mays
  Clone ID: MRT4577_118834C.1.pep
HLVGSCMRCSAWPISMVLLGPRWSSSQAHIWPDAL

SEQ ID NO: 205315 - protein, 47 aa, Zea mays
  unsure (1)..(47): unsure at all Xaa locations
  Clone ID: MRT4577_118835C.1.pep
FSILFCFKVQGSPXQTKKPNSPQIVHRTKYIPEQPDFTPSLTKTLDQ

SEQ ID NO: 205316 - protein, 129 aa, Zea mays
  unsure (1)..(129): unsure at all Xaa locations
  Clone ID: MRT4577_118836C.1.pep
SHTHLSFSWSPAPDGCVPYICGWDTFKPKTANDNHIHDDRKEMGLTFTKLIRRLFAKKEMRILMEXLCATGKTTILYKLKLGXIVTTMPTIRLNVQTVEIKNIILTDWDVGGHDKIMPLWRHYFQNTQG

SEQ ID NO: 205317 - protein, 120 aa, Zea mays
  Clone ID: MRT4577_118837C.1.pep
MRRAEESQLKSPTHDQIVLLSPLTGPIVALADVPDPVFSGGMFGDGIGIDPLAGKLVAPCAGIVSHLARTGHAVTITTPQGAEVLLHIGIDTVELNGQGFAAHVEAGARVEAGDLLIEFD

SEQ ID NO: 205318 - protein, 30 aa, Zea mays
  Clone ID: MRT4577_118838C.1.pep
QGKCIDVLDQPFQLAAGTSTLRLFTEHDLV

SEQ ID NO: 205319 - protein, 153 aa, Zea mays
  Clone ID: MRT4577_118839C.1.pep
RPRSTHKKPRKLDPILQNMTFLTCIQHIEGSRLGLDPGAHVLNRRTRKPDIENIQEKEEQREITRSAREPLGQDNHVAVSQEPPCGRTSAAKKKNREEEAARGRPRTRVPWRLKFCAADRTKTEDREGKREARRRPGAGASWRPDVNGGWGGE

SEQ ID NO: 205320 - protein, 252 aa, Zea mays
  unsure (1)..(252): unsure at all Xaa locations
  Clone ID: MRT4577_11883C.1.pep
MACHTVIPLLLFLPSLLAAAADDVAPAPAPAPAPAPAAPPEPTNNNLTSILENGGQYTTLLRLLNATRITEQISSQLKNSYDGLTFFAPNDNAFAKLKAAGTLNALADQDQIQLLLYHVLPRYYSLATFQTASNPLHTEASGPAGMYSVNVTASTTNPLVNLSTGVVDVPISSTLFARFPFAVYSVDSVLLPPQLFHTASSAPAPGQSAEAPVPGXGGTRAQGGRPKERRRCGSAAVRCGGWGTRHQCRRGW

SEQ ID NO: 205321 - protein, 135 aa, Zea mays
  Clone ID: MRT4577_118840C.1.pep
GPDYSSAQKKSITENVQRPGSTHKKPRKLETILQNMTFLTCIQQIEGSRLGLDPGAHVLNRRTRKPNIENIQRKRIQKSKNTQRNRDKHSRPEREREQPAELSGHRGSSTRSVRHQPCAAARTGVVHFRFSRPAS

SEQ ID NO: 205322 - protein, 76 aa, Zea mays
  unsure (1)..(76): unsure at all Xaa locations
  Clone ID: MRT4577_118841C.1.pep
KCYVFSCPKLDVYSLPSGVCIKPTDMTCLNVFCANDEIARIYHLFSSHTCLMSFKAREYHCCIXRALLIGNIPRFS

SEQ ID NO: 205323 - protein, 150 aa, Zea mays
  unsure (1)..(150): unsure at all Xaa locations
  Clone ID: MRT4577_118842C.1.pep
AVCSAGGAVWPEPCICCCSRLGISVWLLCVCARAGTGTGAAAAGRSKAAGARLPIGVGTSLGASSLVLFAVSCFLWRRKRRHTGGRPSSVLGILHERAGCDLEDGGGGGVVAAAARLGNVRQFGLRELQAATDGFSAKNILGKGGXGNGT

SEQ ID NO: 205324 - protein, 80 aa, Zea mays
  unsure (1)..(80): unsure at all Xaa locations
  Clone ID: MRT4577_118843C.1.pep
MASKLLQLQGKAAQASSFVAKHGCAYYKQLLEKNKQYIVDPPTAETCQELSKKLFXTRLXANIPLRYXSFGKEARRVWKH

SEQ ID NO: 205325 - protein, 110 aa, Zea mays
  Clone ID: MRT4577_118844C.1.pep
SDGERILPQAWCHVYSRRQSCDLSSGERGYVAQIPARLLEKKKIVILLPLMIWTRSGTIQSMKSKIDALPVPRGDSRGDASFRRCSQFCPALRDHQRVLERISTARRVLS

SEQ ID NO: 205326 - protein, 75 aa, Zea mays
  Clone ID: MRT4577_118845C.1.pep
GCHYTVYSESWYAYRCSAIIPGSTQVLLIAPFVHQHFVLQQYGILMRVLAGVVLLWLLSVFVALVMLKSKKKKTA

SEQ ID NO: 205327 - protein, 58 aa, Zea mays
  Clone ID: MRT4577_118846C.1.pep
YVKVLNFLCPAAGRTSWSSVTKSHEINNDPYYQSAPMLAGLEHPVVAHIAPPSDLVVF

SEQ ID NO: 205328 - protein, 51 aa, Zea mays
  Clone ID: MRT4577_118847C.1.pep
INGGSSYHKESRRSCTTTVKKTRDFMHSYLSVLNQDRTDTWFLAKNRHYLG

SEQ ID NO: 205329 - protein, 66 aa, Zea mays
  Clone ID: MRT4577_118848C.1.pep
MAERTNAMAAPRPLLRRMLSFREPLLVIPYLLSFLGAAASALARSHSSLLHSLATALFSAEPAAAN

SEQ ID NO: 205330 - protein, 56 aa, Zea mays
  Clone ID: MRT4577_118849C.1.pep
AWLNIHLRDPSTWTLFCASLLKTSSEVGLMDQVEVLRVLSLTIGQKKKKKKKKKKK

SEQ ID NO: 205331 - protein, 57 aa, Zea mays
  Clone ID: MRT4577_11884C.1.pep
DLGPPALAACAPCSNGGRVVYYKGQMQIELLKLNTPTSKSNDEIDLIDGYSNMLQYN

SEQ ID NO: 205332 - protein, 119 aa, Zea mays
  Clone ID: MRT4577_118850C.1.pep
YFAVGVKAIQGHKQNTRTHVSLSLSIGGPSLGSCSSSSKNSLQTTAMAMCSFSCHWAALAYKCPRQAVAVLVLHVTCGCRCGWYQNCGLTSHLVNLVEVAVVVGPCHSKNLWADVTCYY

SEQ ID NO: 205333 - protein, 37 aa, Zea mays
  Clone ID: MRT4577_118851C.1.pep
ASLFRMFLLYTSWACFFDMCVLLFIGSSPAVVFQAFS

SEQ ID NO: 205334 - protein, 123 aa, Zea mays
  Clone ID: MRT4577_118852C.1.pep
GNLNTVLTRAPKYITSASRMVNDGARLLLPNISCEGSVFVTVYDDEPTSVVSYAMTSQEYAEHVTHKMNANTSFSDFTSSNGLDGSLSSHEELSNFRGAHFRLSFDDDASPTDSTKFSVTCYF

SEQ ID NO: 205335 - protein, 63 aa, Zea mays
  Clone ID: MRT4577_118853C.1.pep
GLHRSQHPDMALRHVPPQYSNVPSHITIVHSETQQPLRRPAIYNQQLLSPLRQLSRPSFPHQM

SEQ ID NO: 205336 - protein, 79 aa, Zea mays
  unsure (1)..(79): unsure at all Xaa locations
  Clone ID: MRT4577_118854C.1.pep
NKEKGVPWGFNVGENFFKAWRKVKSSRASGGTSAVASAGGGLGEPTARKQTGRRRGAAYFPPLSLFXXHLFRTRAVGPG

SEQ ID NO: 205337 - protein, 68 aa, Zea mays
  Clone ID: MRT4577_118855C.1.pep
MGAKMVLRRFVALAALACLLRPGACVELHRKLSGWSDDSRTTWYWASTGAWSDGGACRYQNAVDHPTI

SEQ ID NO: 205338 - protein, 118 aa, Zea mays
  unsure (1)..(118): unsure at all Xaa locations
  Clone ID: MRT4577_118856C.1.pep
GRVGGRVGGPLGRGQAXLYPGGSLNPIRVAEXTWAFGSXKVKELKIGRLGMYFMXGFLVQAIXVTSEGPLENLSDHLCDPENNNAWAYTTNFVPGTMKRTRGSTSDHQGTRLADNHKV

SEQ ID NO: 205339 - protein, 113 aa, Zea mays
  Clone ID: MRT4577_118857C.1.pep
MASVGFGTVAPAVASSPAARTTSMGRPSAAHVPAATTKFVAAAAGKRVEEKGLFDTIFGALYKEEQLLETDPVLNKVGSKGKAAAAPAPKKAAEEGGNGGLSLGGFFSRPKKG

SEQ ID NO: 205340 - protein, 104 aa, Zea mays
  Clone ID: MRT4577_118858C.1.pep
TTHTKKDVQFKRLDTGTKPELGTGRAKLINAGAAATARSPPPSSPGRRWRWRTRVPTARRPLGGTASSCGAPPTAHMHSSSSSTPADLPSPLSYPPDPGPGTDQ

SEQ ID NO: 205341 - protein, 113 aa, Zea mays; identical to SEQ ID NO: 205339
  Clone ID: MRT4577_118859C.1.pep

SEQ ID NO: 205342 - protein, 163 aa, Zea mays
  unsure (1)..(163): unsure at all Xaa locations
  Clone ID: MRT4577_11885C.1.pep
ANHPSGELHKTHAPVTLFGLSAQGQHNTDAGTYCLSNTLHPYAYSRFDPDNVAHHLYSFPLPAICILHLAGGELPKDDLCHNLMIVGLNETDESHLVLGNTMQXLNTLVQDRTSVEDKIAPPECNLLMYQLAVRSLHKSINGLIEDHILHVVGTLLHKYIELD

SEQ ID NO: 205343 - protein, 101 aa, Zea mays
  unsure (1)..(101): unsure at all Xaa locations
  Clone ID: MRT4577_118860C.1.pep
RRPKNDRLYHYKKKIGSPHNDPNTKQGTDPKNFFSRGWGKXPRXKIERQKDQEPGRGGDNMLQERPAWGTAPLTPGPTTITTPTHTIIYPHVTRSPHRTLP

SEQ ID NO: 205344 - protein, 83 aa, Zea mays
  unsure (1)..(83): unsure at all Xaa locations
  Clone ID: MRT4577_118861C.1.pep
QLFLXKINNWDTLFLAKKFIYXFLNTFQFMTIVFKQKITYYYFCLPLLKKILFTYWGTKKKNPPFPPSPDYLNPHILLQLHFL

SEQ ID NO: 205345 - protein, 56 aa, Zea mays
  Clone ID: MRT4577_118862C.1.pep
QHISLECRITRVNGDMRAKSNDGYGRARCRCRVGSPATGMGTSTYSACKKVSVRSR

SEQ ID NO: 205346 - protein, 82 aa, Zea mays
  Clone ID: MRT4577_118863C.1.pep
LTYWVLTLANSTSTETRPWYQLVLDMLTFTSPPHLASLGPPTHNKSTHMHGFLVSPASYSVSTFKTYSSSTAGLCRRAVLRR

SEQ ID NO: 205347 - protein, 147 aa, Zea mays
  unsure (1)..(147): unsure at all Xaa locations
  Clone ID: MRT4577_118864C.1.pep
PFMLTAGIGQIRFGDTCAEAXXLFKRAEMARPSASAAARMVLDVNAEIAPRDVKGDRSKSVLFDACRLAKSLLELQPHKRWRVIRVVWVEMLCYAANKCQSNFHAKQLSTGGELLTVVWFLMAHFGVGEQYRIEAGHARAKLIVQKN

SEQ ID NO: 205348 - protein, 127 aa, Zea mays
  Clone ID: MRT4577_118865C.1.pep
GPEMRLPAHFHPIFFPIGKFATGFFVLFSLITGVVGIASPMVGFNHLRFWNYESQQPPAAWGTAARAHTVLTRGLACQEISFDRRNAKLGTMETFPIILTVTQFFYVLAIRGGRHGPVHVERRGNFA

SEQ ID NO: 205349 - protein, 60 aa, Zea mays
  Clone ID: MRT4577_118866C.1.pep
ALNAVDQDRGKEEDRRDRQTDREMDRMSSLVLCCVDEHKLLTMGTVWSSVVVTSLNHSLL

SEQ ID NO: 205350 - protein, 127 aa, Zea mays
  unsure (1)..(127): unsure at all Xaa locations
  Clone ID: MRT4577_118867C.1.pep
SSXSXPLPXSRXXSLRXXXLSPLPSXXLRXLGPRXXXXPLGSXXXLVLSFWVWGXXLLVXLXLPCRLPRGXXXXLVXXXALSXPXPXSWGAGARCRXXXXRXGRRRPLXMXSRXPPAPGWGGESWRS

SEQ ID NO: 205351 - protein, 86 aa, Zea mays
  Clone ID: MRT4577_118868C.1.pep
HRKKQPVRFATASFCVSGSISPLTTPWRGDLPVPAGVSGSPAPRPASSSVWPASPNVRRRSAIHSPLTPCSSSFFCPKSRYLRRPS

SEQ ID NO: 205352 - protein, 215 aa, Zea mays
  unsure (1)..(215): unsure at all Xaa locations
  Clone ID: MRT4577_118869C.1.pep
CFVTGPKTPGQXKGXMISKAKCNYCKKLYSYIQGSTTSHLSRHMRICAVYLKHVAKQQDQSLLNFAPSTAGESGSGLPTITSPKDYNHEQVKKLIAKMIIVHEYPFRMVEHTWFNIVMRYLNPSYEFIGRKTIRAECLKIYESEKESLAKVLKGVEYISLTTDLWTSNQTLSYMCLVAHYIDSDWKMQCRFLNFXELDPPHKGPVIGQAVYECVA

SEQ ID NO: 205353 - protein, 73 aa, Zea mays
  Clone ID: MRT4577_11886C.1.pep
MGHLIPFAELARRLVADHGLSTTLLFASATSPPSEQNLAVAAADPDAVDLIALTAQPPDTLSADTVARERAEL

SEQ ID NO: 205354 - protein, 78 aa, Zea mays
  Clone ID: MRT4577_118870C.1.pep
ERKTPARPPKDTPSPESEPRPPTPRNTQQASHNTQPRKKTHQPPETTSRGRDRGTQAKPSRTQSTEDHQRSHPRAEPP

SEQ ID NO: 205355 - protein, 100 aa, Zea mays
  Clone ID: MRT4577_118871C.1.pep
LSPVFRPRGSPFPPTGDPGFPKDRQSGTLAGFTDPPSPGTPRLTRFSPQIWRDLSHSSAWQTGQSRDDRGPVPKPVEPVSGPVEPVLGPVPPSFQAFTPI

SEQ ID NO: 205356 - protein, 122 aa, Zea mays
  Clone ID: MRT4577_118872C.1.pep
MAATSAAAAAASCIMGTRVAPGIHPGSGRFTAVFGFGKKKAAPKKSAKKTVTTDRPLWYPGAISPDWLDGSLVGDYGFDPFGLGKPAEYLQFDIDSLDQNLAKNLAGDLIGTRTEAADAKST

SEQ ID NO: 205357 - protein, 83 aa, Zea mays
  Clone ID: MRT4577_118873C.1.pep
TPPKGCVQRQQHIHLWGRCRWMPWPAVVGTNNTERPANPETQQQWSSDPWSIRPNRKRDHAGARPSRVGRQEKIEEEMSSPRS

SEQ ID NO: 205358 - protein, 172 aa, Zea mays
  Clone ID: MRT4577_118874C.1.pep
REPRNQPPPQRIPGKAAQRGKKGRKERKRTGGRGRARGRGRLGGKETNPAPWGPAQGQGHLPLRPRNRTKRQTGRARPARPHPQQGGRAASPGKRGKPGQKTKKPGPPGGPGKGIRGPQTKKKQSKRGKRKAGPVKQAPPTNFFYFVPLFFFFFFFFFVFFFFFIIFFFFTR

SEQ ID NO: 205359 - protein, 188 aa, Zea mays
  Clone ID: MRT4577_118875C.1.pep
LGPTNHHHHHTRLNNAIIHRTIQTKNQHKQIQKEKKRTNELARSVAPAFARLALLASCTKASAPFLFFCASMIGSRGWFPPSNHPNPSPATAQGDPPANKTRRNSLALPEKCDHGGGIPAPSSSSPQACRRGLTAYCELLLPLFSSALSSPSSSPSSLTPPSPPCCCSPSVCCCSSLPPRLYAFSAAS

SEQ ID NO: 205360 - protein, 229 aa, Zea mays
  Clone ID: MRT4577_118876C.1.pep
MAARLGLSPDPRLGQGSPSQPPGRPLGASGVRGGSGVEAGYGATFGSAYGGWGPRGLPAGTIALASEWELADVSTAKSLFIRRESDVWDSLRSQWVALTEANECLAQRSAEVADLRLLCDELKSEAAAARVEVASARMKASSAREQVASLAEEMQRRQLELGQVTSERDQSRSQAAEAGSTALNESVKNCKALAQAAEQMEAERMPMSEAISAFCRAFGLDDVPSGSSP

SEQ ID NO: 205361 - protein, 132 aa, Zea mays
  unsure (1)..(132): unsure at all Xaa locations
  Clone ID: MRT4577_118877C.1.pep
RARVEXALGALCTLXMDDAVDVPSGVAVLAEHDAARHVLRALRQHRDDGRRGGGGAAAGETVTRRCFWAVERFLAHGSERCVREVTSDRALPSLLVGAFHKGDAATKQVAESVLRCLHRMPDYSATYESVEL

SEQ ID NO: 205362 - protein, 355 aa, Zea mays
  unsure (1)..(355): unsure at all Xaa locations
  Clone ID: MRT4577_118878C.1.pep
PTEEAAGGGGDDYDRLSELKAFDDSKAGVKGLVDAGVTTIPAIFRGHLLQXRAEVAREEVVAQLKAAAETVGFFQLVNHGVPSELLCEMLPSVRRFNEEPHEVKRPYYTRDARRKVRFNSNFDLFQSPAANWRDTLFCEAAPEPPRAEELPVAVRHVMLEYGGAVREVAARVLGLLSEALGLSPGHLAGMGCAEGLSLVCNYYPPCPEPDLTLGCSRHSDPSFLTVLLQDSHAQGGLQALLASRWLDVPPVAGALLVNVGDLLQLVSNGRFKSVEHRVVANRSRDTARVSVACFCNADIARSTRLYGPIXSSSPRTTATARXALYRNVTVPEFLAHYDKKGLDGRPALHRFQLLQ

SEQ ID NO: 205363 - protein, 382 aa, Zea mays
  unsure (1)..(382): unsure at all Xaa locations
  Clone ID: MRT4577_118879C.1.pep
MSPTEEAAGGGGDDYDRLSELKAFDDSKAGVKGLVDAGVTTIPAIFRGHLLQEGPKVSSSSSSSSTSLSIIPVIDLSAADAVAREEVVAQLKAAAETVGFFQLVNHGVPSELLCEMLASVRRFNEEPHEVKRPYYTRDARRKVRFNSNFDLFQSPAANWRDTLFCEAAPEPPRAEELPVAVRHVMLEYGGAVREVAARVLGLLSEALGLSPGHLAGMGCAEGLSLVCNYYPPCPEPDLTLGCSRHSDPSFLTVLLQDSHAQGGLQALLASRWLDVPPVAGALLVNVGDLLQLVSNGRFKSVEHRVVANRSRDTARVSVACFCNADIARSTRLYGPIXSSSPRTTATARXALYRNVTVPEFLAHYDKKGLDGRPALHRFQLLQ

SEQ ID NO: 205364 - protein, 56 aa, Zea mays
  Clone ID: MRT4577_11887C.1.pep
KQTRMKLDPNGIYHCKKQTRNEVRFMHRECLCTTQWLSFDSNSQRWNINEFITEES

SEQ ID NO: 205365 - protein, 238 aa, Zea mays
  Clone ID: MRT4577_118880C.1.pep
VSAHQIHHLMSGLLVARLLYCLSAAEDQHYIRVTGTPHGWDVAFYLFQLVKGVILFAVIALVGTGWSFLKPVLQDREKKVLMAVIPLQVTANIAAAVIGETGPFMQGWVTWNQILLFVDVVCCCAVLFPVVWSIRSLRETSKTDGKAARNLSKLTLFRQFYVVVIGYLYLTRIVVYALKAVASYKYRWASILAEETATLAFYLFMFHTFRPAEKSHYFCLHDDDDDDEMVLREEELEL

SEQ ID NO: 205366 - protein, 53 aa, Zea mays
  Clone ID: MRT4577_118881C.1.pep
GNTGGARIYAGCDAILRGSSSFFCMATKNSIVYFSVGSVCPGVFFFRSVCSSL

SEQ ID NO: 205367 - protein, 102 aa, Zea mays
  Clone ID: MRT4577_118882C.1.pep
MIPMIIYRKRLRVNLALLALFTVCISFAEGLTCVTRNVQDILDAVTVGPCKPVHATFYGGRDGSYTTAVACGYKDTRTHGYCLHTVAVSTVLVGDCSACVGC

SEQ ID NO: 205368 - protein, 58 aa, Zea mays
  Clone ID: MRT4577_118883C.1.pep
MGWGDPAVQAYRLQLALAGSALQQPIAQLQQQWLAHVTLQTMATHQQRQQGCGMAEPP

SEQ ID NO: 205369 - protein, 188 aa, Zea mays
  unsure (1)..(188): unsure at all Xaa locations
  Clone ID: MRT4577_118884C.1.pep
THTRARSGADHDGATRTPGHDATEAAADDARQQEQRRRREXRKREEPEAQRPEPEPDXRHQRNPEERNDPHRHRAGPERKNKQQQQRDRSSSXEGQRRQGDNKRPEEEEDNRHHTTGSKERENARPTTTERTRASHPTPETEEKNTAXRTHKQKSRTKNAKKPTKRPQENNKQPPQQTPRNAANRERT

SEQ ID NO: 205370 - protein, 65 aa, Zea mays
  Clone ID: MRT4577_118885C.1.pep
VPVPVPDERKRRAAGAREGFYYSLIATSRDGLNALESLYLLLQKASSPRQSVGQSGGGSRQVQQR

SEQ ID NO: 205371 - protein, 72 aa, Zea mays
  unsure (1)..(72): unsure at all Xaa locations
  Clone ID: MRT4577_118886C.1.pep
NSLIKNIPXHINPIITKTSLLLMSFLHNILFXMSNHHXQXLDLXHSSTIHYIPCENSNKXNPHQKFAARTLH

SEQ ID NO: 205372 - protein, 266 aa, Zea mays
  Clone ID: MRT4577_118887C.1.pep
MEPAGTIVFASVGVTNFGFDVFSATVPAPTSAEAGVSAEDLDERRHTDGISVNFNAQFADDAGDAVAFVSERTGAASLFLSRPGSEPDPLPAAEGSLFHDRPTVRGGRVYFVSAHEKPDRPFRSWAAVYAAELGAGRERNPEPQPQRLTPRGVVDMSPAVSASGDLLAVASYGDRPWAFDFRALETEVAVFRASDPSRRAVVAARGGWPAWHGDAALFFHRAADDGWWSVFRVGVSPDTLQPTGPERRVTPPGLHCFTPAAPARGG

SEQ ID NO: 205373 - protein, 79 aa, Zea mays
  Clone ID: MRT4577_118888C.1.pep
IVWRFCALDRLPCWPSRCSCSFEFVWCFRFCIVTPFLNTGLHYMFHASRLRDRFWCCTLVFYFSYMLSVPPIRYLLKTN

SEQ ID NO: 205374 - protein, 87 aa, Zea mays
  Clone ID: MRT4577_118889C.1.pep
SWKDLPLSSFCLEPQKPPGVLPAFTRAACVILFSFWVLFPAHDIRFVVIFFFPPLAGFFFLFVRIVVGVSLHTPSPVWFKNARSLVP

SEQ ID NO: 205375 - protein, 102 aa, Zea mays
  Clone ID: MRT4577_11888C.1.pep
EPAGRGGPRRLWGIGWSFPARGAVSPGARWPPCLLCVWCAGRHRSSPGGGDSVFMRHAAAVRWFGLRCGLCRPPGFCPPDSPGGYGCPFRLRASCAFPAGAP

SEQ ID NO: 205376 - protein, 69 aa, Zea mays
  unsure (1)..(69): unsure at all Xaa locations
  Clone ID: MRT4577_118890C.1.pep
PWTEVTGRFGLDFQTTRLGDGALGGDRGRAGRGFYPSKRPFPKNLGPGRFLRRXSRLPFXRXGFFFFFS

SEQ ID NO: 205377 - protein, 200 aa, Zea mays
  unsure (1)..(200): unsure at all Xaa locations
  Clone ID: MRT4577_118891C.1.pep
MAAAATNADVEVVDFDLDDDDLMDEDAGPDPAPAPRXSRLRSTIAGDDAPRRTKGRGFREDPNSSATRDSRFGAGGRADLDSLGGPGPIQSIEGWIVLVTGVHEEAQEDDLQNAFQEFGQVKNLHLNLDRRTGFVKGYALIEYEKFEEAQAAIKELDGAELYKQRMSVDWAFSSGPAKRRNTRKRSPPRARSRTPPRRRH

SEQ ID NO: 205378 - protein, 198 aa, Zea mays
  Clone ID: MRT4577_118892C.1.pep
MAAVMNADVEVVDFDLDDDDLMDEDAGPDPAPAPTSRLRSTIAGDDAPRRTKGRGFREDPNSSAPRDSRFGAGGRADLDSLGGPGPIQSIEGWIVLVTGVHEEAQEDDLQNAFQEFGQVKNLHLNLDRRTGFVKGYALIEYEKFEEAQAAIKELDGAELYEQKMSVDWAFSSGPAKRRFTRKRSPPRARSRTPPRRRH

SEQ ID NO: 205379 - protein, 119 aa, Zea mays
  unsure (1)..(119): unsure at all Xaa locations
  Clone ID: MRT4577_118893C.1.pep
RLXALTPAAYSPTQIXXPFSHASRSKPCFSFDTATVAAFLPAVCALTPPPSYXYHNCSPLSNSLPPPERPXXNNTSLVVPLLDCLLVVISIINFLDDVCAHPEIRSLLPRKNTPPPRRA

SEQ ID NO: 205380 - protein, 108 aa, Zea mays
  unsure (1)..(108): unsure at all Xaa locations
  Clone ID: MRT4577_118894C.1.pep
RSFRCASSVRYVRGADEQVVEITKGSKVKYELDKKTGLIKVDRILYSSVVYPHNYGFVPRTLCEDNDPLDVLXLMQXPVFPGAFLXRAGAFGLMPXMIDQGXERGDKI

SEQ ID NO: 205381 - protein, 202 aa, Zea mays
  unsure (1)..(202): unsure at all Xaa locations
  Clone ID: MRT4577_118895C.1.pep
MSQDQENGGTNGQHAADVMEVEPKRRAPRLNERILSSLSRRSVAAHPWHDLEIGPEAPAVFNVVXLTNPIPQTPHPSKQASKQPKLFSIDMCEYGACLTILPVRVVRPLRTWCRRAXVEITKGSKVKYELDKKTGLIKVDRILYSSVVYPHNYGFVPRTLCEDNDPMDVLVLMQXEPVLPGAFPRARXIXLMPMIDQGEKDD

SEQ ID NO: 205382 - protein, 270 aa, Zea mays
  unsure (1)..(270): unsure at all Xaa locations
  Clone ID: MRT4577_118896C.1.pep
MSQDQENGGTNGQHAADVMEVEPKRRAPRLNERILSSLSRRTXTKHPWHDLEIGPEAPAVFNVVVEITKGSKVKYELDKKTGLIKVDRILYSSVVYPHNYGFVPRTLCEDNDPMDVLVLMQEPVLPGAFLRARAIGXLMPMIDQGXEKDDKIIAVCADDPEYRHYNDISELSPHRLQEIRRFFEDCXRLLSLSLSLSLSLSLSLSLSTSRCSLSFRAVLAGIGRSSLQLTVWLFCFLLWLNXDKKNENKEVAVNDFLPAAAAREAIQYSM

SEQ ID NO: 205383 - protein, 39 aa, Zea mays
  unsure (1)..(39): unsure at all Xaa locations
  Clone ID: MRT4577_118897C.1.pep
LVEVQHPHNQIKLPLAESERRHGVVXRSDAVRNGEAKGT

SEQ ID NO: 205384 - protein, 59 aa, Zea mays
  Clone ID: MRT4577_118898C.1.pep
MLTGDNALMCHQCQRNDKGRVVWCNSCRNKRFCVPCIERWYPNLSEDEFAAKCPYCRKN

SEQ ID NO: 205385 - protein, 33 aa, Zea mays
  Clone ID: MRT4577_118899C.1.pep
KKKKKKKKKKKKKKKKKKKKKKKKKKKKTILSY

SEQ ID NO: 205386 - protein, 58 aa, Zea mays
  Clone ID: MRT4577_11889C.1.pep
LSLHINPPIRGRILPIREFTIHSPYSRTHFIFLSISTINPSLTYVPYFPNQFYLKLFI

SEQ ID NO: 205387 - protein, 125 aa, Zea mays
  unsure (1)..(125): unsure at all Xaa locations
  Clone ID: MRT4577_1188C.1.pep
REKLRGRSSSPPPPPPPPPPPPPPPPPPSPPPPPSPTXSPSSPPPLRWLACSVSLAVTRPTPPRPTXPPSGGXPAPLPSPXPSPXPGPRGRPLRRRPPGXTTRCWSRPPAPRTGSPSSISSSPRR

SEQ ID NO: 205388 - protein, 81 aa, Zea mays
  unsure (1)..(81): unsure at all Xaa locations
  Clone ID: MRT4577_118900C.1.pep
PIISTRADFLCQHGLSCCGARAPFLSYKPYAGSINWDIAMHLEVPFSLWHNTCKVSYARSGNTLSPVQKHPLSVWLLKKXY

SEQ ID NO: 205389 - protein, 54 aa, Zea mays
  Clone ID: MRT4577_118901C.1.pep
KKKKNNHGTDHITQVKLSHAYLRIPFSYILQPNFNQLAMLTQYQLLINPSQFPT

SEQ ID NO: 205390 - protein, 104 aa, Zea mays
  Clone ID: MRT4577_118902C.1.pep
DQPNRGATHDTLLTYKRSQLSTHAEKYPARTGIQELPHLDERPCPATFGRKLHTVTNHTLTSTKVRRGTHSCGPFNYTLVPITIKQRSCCLRTNQIIMSDTPLY

SEQ ID NO: 205391 - protein, 129 aa, Zea mays
  unsure (1)..(129): unsure at all Xaa locations
  Clone ID: MRT4577_118903C.1.pep
KGFSHNPAHGIFPPRVFKPSARTNGGNKRSLSXLGGITMGGXHKGGKTNLSHEGLNPANVPYGGGNNPPLGEFCFPRMGRAALEGSKSNVVINPGLPQASYPGGNFLDPFSLNSEGLKDPRAPLFPGAV

SEQ ID NO: 205392 - protein, 128 aa, Zea mays
  unsure (1)..(128): unsure at all Xaa locations
  Clone ID: MRT4577_118904C.1.pep
QKRRPPKKTHQIMMSSRIIRPRRPLLAKKRRGAPLLTPQVIKKTTKEVVLYXAPXATNYTTPMKLFNKGLQESSSGGSFFPDDANNAALLAVALLNRQQXGKNVNKSTPRATNKTRNFFTTRTSSATT

SEQ ID NO: 205393 - protein, 101 aa, Zea mays
  Clone ID: MRT4577_118905C.1.pep
HRKGDFSKIKNSKLPLPSTKIYSLANTISLRGTLFFEQTPSGPPKAQVVPLLQTLDQMHTQLHQPPEQDPFFNQVSFYLHKPPSFPGANKTTRAPFVHARH

SEQ ID NO: 205394 - protein, 62 aa, Zea mays
  Clone ID: MRT4577_118906C.1.pep
PGKNDQLLIFSSYSLLQIQQKKYQYSYHNWQFLHSLKYSVHPVNVSNPRSSVQDLPHRPKSS

SEQ ID NO: 205395 - protein, 103 aa, Zea mays
  Clone ID: MRT4577_118907C.1.pep
LFTGILARAGSLWTSFSPPLDAGICCFFALFRDRITSGDLCVLSYSLDKRTQPEDTMHKLEIPWSLHKPFQMARMPHAVFCFPGRTNGTCCCSPTANQRVYLV

SEQ ID NO: 205396 - protein, 84 aa, Zea mays
  Clone ID: MRT4577_118908C.1.pep
IVVCCSMICNVCLKFLGDQWVFFGLPVPSPVFLWYFCLDQTFVRFETRLRLFNPFWFHACLVRNHPLNIGRGRLFKISFRLEPN

SEQ ID NO: 205397 - protein, 76 aa, Zea mays
  unsure (1)..(76): unsure at all Xaa locations
  Clone ID: MRT4577_118909C.1.pep
PPALSSPPPTENRYGGTPSNAAAPDPGPGHVDRGSAVAPAAGMVDFALGIDSIVCATTPGAYXGVLSPRPTACEGF

SEQ ID NO: 205398 - protein, 78 aa, Zea mays
  Clone ID: MRT4577_11890C.1.pep
RILLSLPSFSLEKQSKIIMAGMTLHNFIRDSALHDRDFDEVGANSLSHDVPAGESSTSTSDELDMSDFQDAIANALVS

SEQ ID NO: 205399 - protein, 93 aa, Zea mays
  unsure (1)..(93): unsure at all Xaa locations
  Clone ID: MRT4577_118910C.1.pep
RVVACTGWRPGPCPCRRPRPSCRRIRCRRPSSPRSSSRQPSSQPPXSSPSFLASCTACILLILLLLLGRLVAAAALRRRGRLGLDDGRVLARA

SEQ ID NO: 205400 - protein, 83 aa, Zea mays
  Clone ID: MRT4577_118911C.1.pep
LCPASIFCSKGQGSTLLIMLATALVVSRMIPQSSKTLQSKTALLGKIVFRFLGESVPAVFCPEESNQRLKTIILVAQSEASNN

SEQ ID NO: 205401 - protein, 222 aa, Zea mays
  unsure (1)..(222): unsure at all Xaa locations
  Clone ID: MRT4577_118912C.1.pep
VFAAVCTSRWGRTPSHPAGEHQCIDANVEPGAGAAARVRVRVVVEVDFRSEFEVARPTKGGLARLXALPPLFVGSPERLGRVVGVIPHXARQSLRKRGLHFPPWRKREYMRAKWLSPHARSSSSADRTPAPATPVSAAAAAAAAFSGEFELRFDEKEKPKVADCDGGIPGGEDDGAGKKVTVVVSPTPTPWRAEEPGAASKLCPQAKRKVVTGLASLLPLAS

SEQ ID NO: 205402 - protein, 80 aa, Zea mays
  unsure (1)..(80): unsure at all Xaa locations
  Clone ID: MRT4577_118913C.1.pep
QRTNTTGGLFKKAGGPNTXPLLLPQQPTNQRTHHRILQWHNTSPLHHKHIIPPLIHLSITTPQPILQLPPPSQSIKTSTY

SEQ ID NO: 205403 - protein, 142 aa, Zea mays
  unsure (1)..(142): unsure at all Xaa locations
  Clone ID: MRT4577_118914C.1.pep
TTHTTTTQPTATESHQPATITQSPESHAPQPPPPTPPXPNTTPCPSXTNTXSPPTNATTAKPTTTTNATPKEASXEPTTEGITTDDDTRTPTTXTTPTXTSLLPKVYPTXTRTAQHPHTRPMPSIHTLLTLXPSTKSAQGSN

SEQ ID NO: 205404 - protein, 94 aa, Zea mays
  Clone ID: MRT4577_118916C.1.pep
LGGQWNPPDLIGYSKQPTLTGTISRRHYWFYPDANIPTQRTLGNGGGEHKLAPVTPTNLKGKVLPPPKNTQVNYRANAHSIRGAKTHLLWALGG

SEQ ID NO: 205405 - protein, 128 aa, Zea mays
  Clone ID: MRT4577_118917C.1.pep
PRVRQSTDPFDVPMADSVRGNPKDIEDEVAKEWEHTMLQDSMGKELNELNRQLERKESEMKMYGCDTVPLNPPTRPPTRPLEEEKKAVQQERDRLLAEVESLSADGQTHKLRDAQLQKLKSLEAQILD

SEQ ID NO: 205406 - protein, 77 aa, Zea mays
  Clone ID: MRT4577_118918C.1.pep
NFHRYNKLNSVYANDKYMTMVACAKLVVSSISGKSLKQLKFDRHPLINQQLHDILDLMVQMKLHHGMNLEPKFCNEV

SEQ ID NO: 205407 - protein, 231 aa, Zea mays
  unsure (1)..(231): unsure at all Xaa locations
  Clone ID: MRT4577_118919C.1.pep
MSPITLGLDWCMRAAAAVETAHRSLDLNHGAGRMQPQDASKLFNRWTFDDAQENDISLNDYLAETAAKHGTFLPHSAGSYSNKRFRKAQXCHLLEXLTNSIMMHACNNXKKVMSVRIMKTPCXMIHLLTDDHPIQVFVDAIINSEPREDATRIASAAVVTRQAANISPLRRVNQAXIYLLTTGARESAFRNXIRTIAECLADELINAAWVSSNSYAVKNKDQIERVAKANR

SEQ ID NO: 205408 - protein, 104 aa, Zea mays
  Clone ID: MRT4577_11891C.1.pep
KEPGRTFIFLVMLTLMKKVFLLQNCTLIHVELHHNANAKLRAKINLLPSTLYLHLTMTTGAIVIQLILCGLMIYLLMLMLLRKLLEILVMTDMTNMVKFLVGVN

SEQ ID NO: 205409 - protein, 41 aa, Zea mays
  Clone ID: MRT4577_118920C.1.pep
LPFRQAFHHLFGSTHHFRRGRVNFLIREGPLLYWTHDHFCH

SEQ ID NO: 205410 - protein, 127 aa, Zea mays
  unsure (1)..(127): unsure at all Xaa locations
  Clone ID: MRT4577_118921C.1.pep
MMSDSYATFIQNVRAAVAGXAAKPDTVLGPKSKVSRPVLAKETSSGLPPPKWIHVVLNSKGGAAPTVAIHSDNAYIVGFTNSKRTWYQLSKTGTKDKLVDENPVMAGFDVNYSSLIGGGDKLQTIKG

SEQ ID NO: 205411 - protein, 59 aa, Zea mays
  unsure (1)..(59): unsure at all Xaa locations
  Clone ID: MRT4577_118922C.1.pep
LAVAEGEXQHGCSINASQLQARTHLRQDRAIICSPSESTVXVYNKEELADXHKAGALKV

SEQ ID NO: 205412 - protein, 129 aa, Zea mays
  unsure (1)..(129): unsure at all Xaa locations
  Clone ID: MRT4577_118923C.1.pep
DAWVNAAGCLFDKHARTELAFWTLKHDGEREYMYXYRNXSADMVPTEAELDXGLGRCARGGHIQAISVISEPRGSAHIXAMRAAEAACVIXPNNPXVRVPGGPLPDAAGEGILTTGNEADYIRXSDDEG

SEQ ID NO: 205413 - protein, 62 aa, Zea mays
  Clone ID: MRT4577_118924C.1.pep
NRPTHPLIHRESILSHYPFQLDTSITAPGEIPYIEAHHLSYDINLNLTLDIQQTRTRLSTSS

SEQ ID NO: 205414 - protein, 138 aa, Zea mays
  unsure (1)..(138): unsure at all Xaa locations
  Clone ID: MRT4577_118925C.1.pep
PDVARAVVGHGGAGPLVEICRTGDSVSQPAAAGALRNLSAVPEVRQALADEGVVRVMVGLLDRGAVVAGATKEHAAECLQNLTSGSDGLRRAVVSEGGLRSLLVYLDGPVPKEPAVGALRNXLVGACIXPDSLGALGV

SEQ ID NO: 205415 - protein, 152 aa, Zea mays
  unsure (1)..(152): unsure at all Xaa locations
  Clone ID: MRT4577_118926C.1.pep
PTRPGMVKGYSGVFRLGEATSTWDADSPIIQREPWEHIKDENIRKAAASFXWVGGEKMYDKARKGETVELSPRRISIYQFDIERSLEDRQNLIFRVTCSKGTYIRSLCADLGKALGSCAHLTALRRDSIGEYSVNDAWNFDELEEQITKGYL

SEQ ID NO: 205416 - protein, 498 aa, Zea mays
  unsure (1)..(498): unsure at all Xaa locations
  Clone ID: MRT4577_118927C.1.pep
MPPRAGAMAAAAARARAALLPSSPSPSPLFRLPRRFLSLTATRYPLYYDLIVHRPADPNPPKSSAAGADRQPQPAPEEQTLDRAKRRYLRKRRSRLLPDPDATTTTKPSSLSSEFVELRPEVVDFPRLHAREEALYFHDTFAMPWEKDKHYRMLYRLEKKYFPHQSLDNAFVSADAAPASDADRGLVFFDDEKKENEGEERAVSDKGANKGEVLERKVEDFFRSLKKGPGQVDTKAKRPGTEPQQQVKREVRREEERPQPYLVTRTTELPPRWDGPAGTVVLIDKPKGXCQRGLHGRVARRLVFIHNVWPAGALDPMATGLLIVCVGKATKIVDSYQGMVKGYSGVFRLGEATSTWDADSPIIQREPWEHIKDENIRKAAASFMGEIWQVPPMFSAIKVGGEKMYDKARKGETVELSPRRISIYQFDIERSLEDRQNLIFRVTCSKGTYIRSLCADLGKALGSCAHLTALRRDSIGEYSVNDAWNFDELEEQITKGYL

SEQ ID NO: 205417 - protein, 72 aa, Zea mays
  Clone ID: MRT4577_118928C.1.pep
LISTIVWSPNAYQVGRRGIPNGSTTLHGGNIKHRDNTRMRSILIPGPQDRVCSATTVTNPAQDQVPQDEHHG

SEQ ID NO: 205418 - protein, 76 aa, Zea mays
  Clone ID: MRT4577_118929C.1.pep
CIILAKCIRGVSSGSFVRCDRKSEKTPLFMFRLQAAPLFPEIPNFSEEDCQPSQWGKPVENLVVLPQMAFASVNRR

SEQ ID NO: 205419 - protein, 34 aa, Zea mays
  unsure (1)..(34): unsure at all Xaa locations
  Clone ID: MRT4577_11892C.1.pep
WRRCARSFSQQLHMTAARVRRIRDWDRNRCGLGX

SEQ ID NO: 205420 - protein, 36 aa, Zea mays
  Clone ID: MRT4577_118930C.1.pep
FSKGFGGSHIGLNKYFFHKEKSFILFLKQDGYTLFP

SEQ ID NO: 205421 - protein, 81 aa, Zea mays
  Clone ID: MRT4577_118931C.1.pep
IFTRTPRGFHLLYSQQKKIFSKSPRKFWVTTPNYFFTGFNWWFVFTNLVFKVIKLLVVLTHLFHLNHPHLIVRPHLILQTA

SEQ ID NO: 205422 - protein, 74 aa, Zea mays
  Clone ID: MRT4577_118932C.1.pep
KTYKRLREENEFAHKIEEEKALKQLRRTMVPHARPLPKFDRPFRPQKSTKQVTRPKSPQLQVDERGARRHALIR

SEQ ID NO: 205423 - protein, 79 aa, Zea mays
  Clone ID: MRT4577_118933C.1.pep
PQFPPLNRQGLYIDQHVPCIIAYRDLPKHGTTPCVRVHVHTTETYIADRTLPTARLLSTDPHCDSLLATDTRSRHVNAR

SEQ ID NO: 205424 - protein, 38 aa, Zea mays
  Clone ID: MRT4577_118934C.1.pep
WSALPWREAASSIYSSAEQITFSNVFNELMYCCLFQNN

SEQ ID NO: 205425 - protein, 59 aa, Zea mays
  Clone ID: MRT4577_118935C.1.pep
QKVYTLFSITFSPFRFNKQWASLIPYKIYSNRFHFKGSLTNTFFLYNQLLFLLFMKKPY

SEQ ID NO: 205426 - protein, 64 aa, Zea mays
  unsure (1)..(64): unsure at all Xaa locations
  Clone ID: MRT4577_118936C.1.pep
KPGGQASRTRGQDTWAFFVYRQHTXLGSIFYRDAGAIPTVSAAVMTTIFARAVISMPNAXWLPA

SEQ ID NO: 205427 - protein, 58 aa, Zea mays
  Clone ID: MRT4577_118937C.1.pep
TASHTLAEALISRTIGHVRFYRRFHNPIEEGVQIADMIQRMLPSTIRTNVLNTNPATS

SEQ ID NO: 205428 - protein, 151 aa, Zea mays
  Clone ID: MRT4577_118938C.1.pep
MVSKQTRRLLVLAAVAVCLHLPAASVATDVDYCSKKEYPVKVSGVQIVPDPVEPGKPATFKISASTDKTIEKGKLVIDVKYFFFYVHSETREICGEISCPATGDFVLSHEQTLPGFTPPGSYTIYMKMVGDDDEELSCISFGFSIGFVASS

SEQ ID NO: 205429 - protein, 58 aa, Zea mays
  Clone ID: MRT4577_118939C.1.pep
HFNISPFHPTIPITINNLSISILTHHPPYIHNTHTLSNTLLILLNCNYHSTTTDIIIV

SEQ ID NO: 205430 - protein, 141 aa, Zea mays
  unsure (1)..(141): unsure at all Xaa locations
  Clone ID: MRT4577_11893C.1.pep
QKNIFCSASPPPGGGFGLXTPPPPRAPPPPKIGSPFPGKRGPPSTNSPLSSPKTGGARSPRFFPRGPPDGSFHVPPAVPLVTSGHPPISKPLLFFCMFDWGPPPPPNGXCPGPXNVFFPYFSPPQKKPDFWGYPCPPVFPF

SEQ ID NO: 205431 - protein, 154 aa, Zea mays
  Clone ID: MRT4577_118940C.1.pep
MASKQTRRLFVLAAVAVCFLLLLLPASSVATDVDYCSKKEYPVRVSGVQIVPDPVEPGKPATFKISASTDKTIEKGKLVIDVKYFFFYVHSETRDICGEISCPATGDFVLSHEQTLPGFTPPGSYTIYMKMVGDDDEELSCISFGFSIGFVASS

SEQ ID NO: 205432 - protein, 165 aa, Zea mays
  unsure (1)..(165): unsure at all Xaa locations
  Clone ID: MRT4577_118941C.1.pep
MASKQTRRLFVLAAVAVCFLLLLLPASSVATDVDYCSKKEYPVRVSGVQIVPDPVEPGKPATFKISASTDXPSMIFFSCSDKTIEKGKLVIDVKYFFFYVHSETRNICGEISCPATGDFVLSHEQTLPGFTPPGSYTIYMKMVGDDDEELSCISFGFSIGFVASS

SEQ ID NO: 205433 - protein, 154 aa, Zea mays
  Clone ID: MRT4577_118942C.1.pep
MASKQTRRLFVLAAVAVCFLLLLLPASSVATDVDYCSKKEYPVKVSGVQIVPDPVEPGKPATFKISASTDKTIEKGKLVIDVKYFFFYVHSETRDICGEISCPATGDFVLSHEQTLPGFTPPGSYTIYMKMVGDDDEELSCISFGFSIGFVASS

SEQ ID NO: 205434 - protein, 55 aa, Zea mays
  Clone ID: MRT4577_118943C.1.pep
EGPSHSTVRMFYHIACVASLMQYGLVYIVSYMSGCSVLYTLDMAPELTVVCVSQV

SEQ ID NO: 205435 - protein, 81 aa, Zea mays
  Clone ID: MRT4577_118944C.1.pep
RPLLNHNHAAAAQDFRIHVWRLLASHVAAGAGPGLGKAITVARITDNKRTAWSFMSNINLSIILVIMYRLGPGVLQWRLQC

SEQ ID NO: 205436 - protein, 151 aa, Zea mays
  Clone ID: MRT4577_118945C.1.pep
MASKQTRRLLVLAAVAVCLLLPAASVATDVDYCSKKEYPVKVSGVQIVPDPVEPGKPATFKISASTDKTIEKGKLVIDVKYFFFYVHSETRDICGEITCPATGDFVLSHEQTLPGFTPPGSYTIYMKMVGDDDEELSCISFGFSIGFVASS

SEQ ID NO: 205437 - protein, 46 aa, Zea mays
  Clone ID: MRT4577_118946C.1.pep
WSFEANSSMDISLTIDWTACVGHFLIADGLKPGKYLLGLFYCPWVG

SEQ ID NO: 205438 - protein, 151 aa, Zea mays
  Clone ID: MRT4577_118947C.1.pep
MVSKQTRRLLVLAAVAVCLHLPAASVATDVDYCSKKEYPVKVSGVQIVPDPVEPGKPATFKISASTDKTIEKGKLVIDVKYFFFYVHSETRDICGEISCPATGDFVLSHEQTLPGFTPPGSYTIYMKMVGDDDEELSCISFGFSIGFVASS

SEQ ID NO: 205439 - protein, 153 aa, Zea mays
  Clone ID: MRT4577_118948C.1.pep
MASKQTRRLLVLAAVAVCLLLLLPAASVATDVDYCSKKEYPVKVSGVQIVPDPVEPGKPATFKISASTDKTIEKGKLVIDVKYFFFYVHSETRDICGEISCPATGDFVLSHEQTLPGFTPPGSYTIYMKMVGDDDEELSCISFGFSIGFVASS

SEQ ID NO: 205440 - protein, 151 aa, Zea mays
  unsure (1)..(151): unsure at all Xaa locations
  Clone ID: MRT4577_118949C.1.pep
MASKQTRRLLVLAAVAVCLLLPAASVATDVDYCSKKEYPVKVSGVQIVPDPVEPGKPATFKISASTDKTIEKGKLVIDVKYFFFYVHSETRDICGEISCPATGDFVLSHEQTLPGFTPPGSYTIYMKMVGDDDXELSCISFGFSIGFVASS

SEQ ID NO: 205441 - protein, 167 aa, Zea mays
  Clone ID: MRT4577_11894C.1.pep
MFFIAVLRRAFVEREYTDGHFHLHLYSSKTKTWSTKLMRLDSPPDFEFHSRNKGITIGGEHGSVGWVDLRRGILICDLLLLDSNQSLRYVPLPSPLSPEPLQRYPLSVRNIVVLQGYIKNFEMHNNVRPSSYTGSSPILEGWIAATKIKISSIGSGSNWEEDCTIRC

SEQ ID NO: 205442 - protein, 153 aa, Zea mays
  unsure (1)..(153): unsure at all Xaa locations
  Clone ID: MRT4577_118950C.1.pep
MASKQTRRLLVLAAVAVCLLLLLPAASVATDVDYCSKKEYPVKVSGVQIVPDPVEPGKPATFKISASTDKTIEKGKLVIDVKYFFFYVHSETRDICGEISCPATGDFVLSHEQTLPGFTPPGSYTIYMKMVXDDDEELSCISFGFSIGFVASS

SEQ ID NO: 205443 - protein, 139 aa, Zea mays
  Clone ID: MRT4577_118951C.1.pep
FSQPDLHLLTSAPSFSADETRRKTEFFHPTPPLPPTRIRKRLPNFNPTRGPKAIIIIHHQPTHNVARPGQVSGGAFNPSRVPIIHFEEAYVSSLLLFTDLNSITPALLQNHTLSLFCGGAYLEHLFIITTQQLLVLSNR

SEQ ID NO: 205444 - protein, 71 aa, Zea mays
  unsure (1)..(71): unsure at all Xaa locations
  Clone ID: MRT4577_118952C.1.pep
GRXGTTEATHASRHKQVLYSTAQRRTTRSTPGGRCSLPLLSWLSDSNANSYHTSMGLRCTATASSTVTGAC

SEQ ID NO: 205445 - protein, 57 aa, Zea mays
  Clone ID: MRT4577_118953C.1.pep
NNTCTSATACARPRKHLENATLALRSNVLRQRRIMHNHIVSGLDTLPARPGHACAKH

SEQ ID NO: 205446 - protein, 137 aa, Zea mays
  Clone ID: MRT4577_118954C.1.pep
MREKHGPDIDWMIANFDTVAAYAAGGGVRHGRHTVAKYLSKVITQTPLVNPVSSHGFWGRSPQPNDAPTDVVGCWSVVVSNSTTDAATDDFVDDASDANADATANDTIIDVMGISSYGAITNAMGICSMSDIATSIT

SEQ ID NO: 205447 - protein, 71 aa, Zea mays
  Clone ID: MRT4577_118955C.1.pep
SRSTHFFLLPSISTYLYLAFLYLFRYDFSCLHHGGYLYSSSATTTTVTHLFIKHLYLFIHLYSHHINTFNS

SEQ ID NO: 205448 - protein, 413 aa, Zea mays
  unsure (1)..(413): unsure at all Xaa locations
  Clone ID: MRT4577_118956C.1.pep
MASSWVLALVLALSAGASLARGSEPWWNETQVYATTANSGGGNGVFVGLTLIQSAAAKGAVCLDGSLPGYHLHRGFGSGANSWLVNLEGGGWCNDRSSCVFRKGSRRGSSNHMERQLQFTGILSNKPEENPDFYNWNRVKVRYCDGGSFTGDGSDAAAGLYFRGQRIWQAAMDDLMAQGMRYANQALLSGCSAGGVSTILHCDEFHGLFPSNTRVKCLADAGMFLDTVDVSGRREMRSFFNGIVRLQGSGRSLPRSCTSHMDKTXCFFPQNVLPTIRTPTFVLNTAYDVWQLQQSVAPRTADPQGLWSKCRTNHAFCNSNQLQFLQGFRNQMLDAVRGFSASRQNGLFINSCFAHCQSERQDTWYANNSPRLGNKKIADAVGDWFFERGNAKYTDCPYPCDGTCHHLVFRGDH

SEQ ID NO: 205449 - protein, 395 aa, Zea mays
  unsure (1)..(395): unsure at all Xaa locations
  Clone ID: MRT4577_118957C.1.pep
MASSWVLALVLALSAGASLARGSEPWWNETQVYATTANSGGGNGVFVGLTLIQSAAAKGAVCLDGSLPGYHLHRGFGSGANSWLVNLEGGGWCNDRSSCVFRKGSRRGSSNHMERQLQFTGILSNKPEENPDFYNWNRVKVRYCDGGSFTGDGSDAAAGLYFRGERIWQAAMDDLMAQGMRYANQALLSGCSAGGVSTILHCDEFRGLFPSNTRVKCLADAGMFLDTYAHTNKXPFRYFILIIVIICYHDEIAITPIVYWCELAXIICSVDVSGRREMRSFFNGIVRLQGSGRSLPRSCTSHMDKTSCFFPQNVLPTIRTPTFVLNTAYDVWQLQQSVAPRTADPQGLWSKCRTNHAFCNSNQLQFLQGFKNQMLDAVRGFSASRQNGLFINSCF

SEQ ID NO: 205450 - protein, 83 aa, Zea mays
  unsure (1)..(83): unsure at all Xaa locations
  Clone ID: MRT4577_118958C.1.pep
LSSSLPRFRGLSSSLVYXFPSPPPIILPAPSRQGRQSARARGYWREAGGGTADDDAEPACRSQVGEGAEDGAPPLRGRCAKLN

SEQ ID NO: 205451 - protein, 67 aa, Zea mays
  Clone ID: MRT4577_118959C.1.pep
SPPVVFPCKVSCSILPGRGTAPSHPHGSVLRAPFVFAPLVPTCFLKPFVCVWAPLWFFLSLSCPPIK

SEQ ID NO: 205452 - protein, 144 aa, Zea mays
  Clone ID: MRT4577_11895C.1.pep
MPKNKGKGGKNRKRGKNEADDDKRELVFKEDGQEYAQVTRMLGNGRCEAICVDGTRRLCHIRGKMHKKVWIAAGDIVLVGLRDYQDDKADVILKYMNDEARLLKAYGELPDTLRLNEGVDVDGPEEGEEGSDYIQFEDEDIDKI

SEQ ID NO: 205453 - protein, 228 aa, Zea mays
  Clone ID: MRT4577_118960C.1.pep
MHKTAQAWFTGGTAASSGAAAESQPSLLADWNSYAATRSDASSSSPLPFDIEAAVRSANDTVSGTLSSVTKGVRELPGSFQSATSSFPSGKALMYFGLFLATGIFFVFIAFALFLPVMVLMPQKFAISFTLGCALIIASLFALKGPANQLAHMTSKERLPFSVGFIGCMVGTIYVSMVLHSYFLSVIFSVLQVLALAYYTISYFPGGSSGLKFISSGLLSSATSCFGR

SEQ ID NO: 205454 - protein, 103 aa, Zea mays
  unsure (1)..(103): unsure at all Xaa locations
  Clone ID: MRT4577_118961C.1.pep
LPERCYRDITVSRNRTTVKVADMQQKRYSASLGILITILCLVKLTAGCGILLYTARITTSAXGITNGHLSSSASRTTQVIATGTTSRITEKTAPRPVIIISPT

SEQ ID NO: 205455 - protein, 73 aa, Zea mays
  unsure (1)..(73): unsure at all Xaa locations
  Clone ID: MRT4577_118962C.1.pep
PDGNRMSVGSFYNPGADPVFFPGPALVGPPKEDRPKPGYPSFXFEASMNLYVPPKFKAKEPRFGPIKSPFPPG

SEQ ID NO: 205456 - protein, 36 aa, Zea mays
  Clone ID: MRT4577_118963C.1.pep
FNMADVSGLGLYLSAVPSRTSAQGTLRRAYSLRGGG

SEQ ID NO: 205457 - protein, 103 aa, Zea mays
  unsure (1)..(103): unsure at all Xaa locations
  Clone ID: MRT4577_118964C.1.pep
IWRAEAEPSEGQGIRLWLTPKKSDNTKYYXILRVPKXACQDDLKKVYRKAAIKNHPDKGGDPEKFKELAQAYEVLSDPEKREIYDQYGEDALKEGMGVAGTHV

SEQ ID NO: 205458 - protein, 98 aa, Zea mays
  unsure (1)..(98): unsure at all Xaa locations
  Clone ID: MRT4577_118965C.1.pep
AHPAGGGGHSAHLSASAPPCATLAPTGHGYASCSFSFSSRSALLLGGAYCLTAPPRPGSGGVTQFVVPRADALMPCRCASSSLRGSGACALRXPGHSC

SEQ ID NO: 205459 - protein, 62 aa, Zea mays
  Clone ID: MRT4577_118966C.1.pep
VIIYKQVTLPQQYTEKNNSHFPPFCETQNAEPNMTSKYEQLSATPHIILAYHHSTTPLCLHD

SEQ ID NO: 205460 - protein, 158 aa, Zea mays
  unsure (1)..(158): unsure at all Xaa locations
  Clone ID: MRT4577_118967C.1.pep
MGVLRDSMHKRHATGGKQKSWMKKRKYELGGAAANTRVCSIITVRRVRIPXGNEKWXRLFALATGNVLMGELEAVTRTTRLLVIVLQCXHNELWRTPTFLMSAVGPADAAPXFTQWXLTHSGVDIGRKKNTPAAKNDNAPGQQVEAASDESKTIPMSR

SEQ ID NO: 205461 - protein, 86 aa, Zea mays
  Clone ID: MRT4577_118968C.1.pep
AFLSSKASQLTETWLSVQGCGSPDPDPKEEEEAASIQDLRSADTALAVAAVVGALIHALLDSRVLESQRGVQHVLCGLFCRGCRRQ

SEQ ID NO: 205462 - protein, 136 aa, Zea mays
  unsure (1)..(136): unsure at all Xaa locations
  Clone ID: MRT4577_118969C.1.pep
YLATCEGASAAVGPSTAGSTTTSXSAXSTVGTGADTGSSPATAGTSASDGPSPASEGSTGLPSAASGGAPTRPPKSSTSSARSICSLARSDRSLTASRPCAPHILSKSAPADCFTIGSSALKISRSKLSSVWSKTS

SEQ ID NO: 205463 - protein, 65 aa, Zea mays
  Clone ID: MRT4577_11896C.1.pep
WYPRKAWVHLPPFCYFKNFFYLFIELGNRSCINKKVMHGHSLVKVLQKKQKKKKKKKKKKKREKK

SEQ ID NO: 205464 - protein, 39 aa, Zea mays
  Clone ID: MRT4577_118970C.1.pep
PPQPRGGAPARPPGPSTSSACAICSNNTLIQQNHTYPHT

SEQ ID NO: 205465 - protein, 122 aa, Zea mays
  Clone ID: MRT4577_118971C.1.pep
AGPCYALLALLVPASLCSRWRPALQCCSWPGRAHCSPRRERKIWTWACRPRRRPTRARQWGPRRRSWARLALPSSSSSTTVALCAICAAVYEVASYWIRVRRSPGTNVFALVSTRRSSHGLC

SEQ ID NO: 205466 - protein, 202 aa, Zea mays
  Clone ID: MRT4577_118972C.1.pep
LTYHRRIEAIIPDLMERLTSIIQSVYSRGGRYFWIHNTGPLGCLPYALLHRPDLAIPADGTGCSVTYNKVAQLFNLRLKETVASLRKTHPDAAFTYVDVYTAKYKLISQANKLGFDDPLLTCCGYGGGRYNLDLSVGCGGKKQVNGTSVVVGKSCENPSKRVSWDGVHFTEAANKFVFDQIVAGALSDPPVALRQACHSRGQ

SEQ ID NO: 205467 - protein, 107 aa, Zea mays
  unsure (1)..(107): unsure at all Xaa locations
  Clone ID: MRT4577_118973C.1.pep
PVHLPPSVHVTSAVHVPAGPCHYPSQPLRPKTHSQTHPCPCQQPYSRPCQLHGTCGGGSTPILGQCVELLRHXADTTATPYCSAXCQSMLQQCLQQLKLVEPXHPSR

SEQ ID NO: 205468 - protein, 29 aa, Zea mays
  Clone ID: MRT4577_118974C.1.pep
ENKKYRLYFYIIGLNIFRFIIYNRLTKDS

SEQ ID NO: 205469 - protein, 500 aa, Zea mays
  unsure (1)..(500): unsure at all Xaa locations
  Clone ID: MRT4577_118975C.1.pep
CLCLSTDQSPSASEPTPHCYISPPPPRTASPRQTSAPRPHSHSPVPTVPPQATRRSHAGRGKWPRPRLPRRGVEQPCCCCSRWRWRWRCGPPTPARAATGHFPAVFNFGDSNSDTGGLSSLFGAAPPPNGRTFFGMPAGRYCDGRLVIDFIAESLGLTHLSAYLNSIGSNFTQGANFATAGSSIRRQNTSLFLSGFSPISLDVQFWEFEQFINRSQLVYNNKGGIYREILPRAEYFSQALYTFDIGQNDITSSYFVNNTTEEVEAIIPDLMERLTSIIQSVYSRGGRYFWIHNTGPLGCLPYALLHRPDLATPADGTGCXSPTTRSRSYSTSGSRRLWRASGRRTLTPRSPTSTSTPPSTSSSASPKVAQPFNLRLKETVASLRKTHPDAAFTYVDVYTAKYKLISQAKKLGFDDPLLTCCGYGGGRYNLDLSVGCGGKKQVNGTSVVVGKSCENPSKRVSWDGVHFTEAANKFVFDQIVAGALSDPPVALRQACHSRGQ

SEQ ID NO: 205470 - protein, 47 aa, Zea mays
  Clone ID: MRT4577_118976C.1.pep
LTYHWYVALTSKSSYSAKGVVSAKVLSHAECLQNAPALLVVLAPVKY

SEQ ID NO: 205471 - protein, 38 aa, Zea mays
  Clone ID: MRT4577_118977C.1.pep
QGRMAACSGRTVTVASAPRGPNGLLRPPQALRADRPPV

SEQ ID NO: 205472 - protein, 205 aa, Zea mays
  Clone ID: MRT4577_118978C.1.pep
MPSAVRPMGTAAVAQRSGVVKFTNCLLAKGADLVYEDLWVSSVTGKILNGQEILYGHLTAPDDIIDLGGRILSPGLIDVQLNGAYGFDFSVIPDDGSLAYTKGVQRVNRNLVRAGVTSYLPTLTSQRPEVYHEALPYLGPSGSTRDPSLGSESLGAHCEGPFMSPTKNGIHKLDVLQTPTRGLSSLAACYGSSNLNPDSPSPIKL

SEQ ID NO: 205473 - protein, 87 aa, Zea mays
  Clone ID: MRT4577_118979C.1.pep
SPLGLRSRVARRLVWLSHCPRIVHIAPSIRTCESPCLLVGFALAPVQCRSWVCVVTPPCSGFNGHVGSVPCGWCAQCLFIAPPRSAR

SEQ ID NO: 205474 - protein, 144 aa, Zea mays; identical to SEQ ID NO: 205452
  Clone ID: MRT4577_11897C.1.pep

SEQ ID NO: 205475 - protein, 108 aa, Zea mays
  unsure (1)..(108): unsure at all Xaa locations
  Clone ID: MRT4577_118980C.1.pep
SPRELSAEETRGLPPLGRRASSFYVVXSEKKIKTDKPYGIDGGLTVDVYATGXKRLGERXHKIVYHTGANVYGHLHIYTYEEWSPTDYAYGFGTCDVSIRAVALCVSV

SEQ ID NO: 205476 - protein, 234 aa, Zea mays
  unsure (1)..(234): unsure at all Xaa locations
  Clone ID: MRT4577_118981C.1.pep
GASAGHGGRLRGRAGEGGQQGCRPSARTRPAAAGAVQSEDRRREVLYRPVELPGTGYGSELEARIEKVIYACRFMTFFGICGLLLGSVPCFLKGCVFVMDAFVEYYRARXGKVILLLVEAIEMFLIATVTFVLGTGLYELFISNMDSFYGSNLFGLFSLPERPKWVEIKSVNDLKTKLGHVIVMVLLVGIFEKSKRVTITSCADLLCFAGSIFLSSVCLYLLSKLHTTKGGSQA

SEQ ID NO: 205477 - protein, 87 aa, Zea mays
  Clone ID: MRT4577_118982C.1.pep
NSRVDKLTFRRPPFFFFFWGTLKKLGAYNTQKPNIHTKQQNPLITKEPFHLTPKNHPTISGNSNLPTSPLHPIIKIYLTSHNSTLTP

SEQ ID NO: 205478 - protein, 223 aa, Zea mays
  unsure (1)..(223): unsure at all Xaa locations
  Clone ID: MRT4577_118983C.1.pep
KPRPLGCGCVPAAAVAAVGCVGWAWRPSPRPRGGGRAAGVSPKCSHSAAAAAAGTVQSEDRRREVLYRPVELPGTGYGSELEARIEKVIYACRFMTFFGICGLLLGSVPCFLKGCVFVMDAFVEYYRHGGGKVILLLVEAIEMFLIATVTFVLGTGLYELFISNMDSFYGSNLFGLFSLPERPKWVEIKSVNDLKTKLGHVIVMVLLVGIFEKSXRVTITSCI

SEQ ID NO: 205479 - protein, 936 aa, Zea mays
  unsure (1)..(936): unsure at all Xaa locations
  Clone ID: MRT4577_118984C.1.pep
MAEDASHGASSSTVIPADGPESTIEINIKTLDSQVHKLRVDKNAPVSVLKEKVVEATGVPLDQQRLIFRGRVXRMTTSYQNTIWRMGIHCIWLLGVQQRARLLLGLLXNTNANVNVTGNGGLLDDISRSVRDLLGSLGVAMSGGVTNTAFSVPLTSTPEGPNNVPGRTQPMNPAQPGFSVLNHQIQVTQLHPPGAIPRNMIIPDSLTTLSEYMDRIDRVLQNNGVPPSRDSESQQQPTVDDANANPRYPSADVLASVIERAQQLLGGSAASALSRIAQRIRQDGGTADASLRREIQTESVQLGISMQHLGAMFFELGRTMMMLRTGQSPSEAFVNSGPAVYINSTGPNPIMVQPSFQNTPPFGVSNIPVLGGISGAFGIVDPSRHMNIPSNGASATSGSAAGTTTGSEGAIHGNRQDAARTQGGNPPGFLAATRGLPTRTVVAAVPARSSGEAPNHIFSVILPVQVRGQVVVPNQSSQGSQTAVGNGAQGNSTSAIPQASVGGVSGVPLIAAQVANALANAPSQVSLSTQSAADQGFHLTTDNRADVLSSSTPATTPQNGPSGTSGSSLPSQDRNTLNVPSLDSIQQHPQLGDTCADTADLSGDATAISTHDAPSNPSVDSSVLKNKSSDEVGSQTTEPSASGSAEPLGLGGGLIPIPKRRSKAVKPSGSTTDPSRDLSSVSQNQDPISVAQQFLEGFASRNTNGSRSNTLSSGPPSSVPQATEVPPRRQGGGQPDIGSMISGMLNNPVFSNMLSNVATQAGGSSADLKSVMEGLQSPAIVDTISNIVQNVDEQDLGAMFGSGRGQGGMDLSRMLQQMMPVVSQALGGAGGRSAGANGGQHRSRPQRIDGEGNAPASSSQIDLHEARQSIEQHESPENIFRAVLETAAQAHGEDNSIQGMVEELATDQELADDYMKLLMEQVRQRIQSESQSGSQP

SEQ ID NO: 205480 - protein, 58 aa, Zea mays
  Clone ID: MRT4577_118985C.1.pep
RPPKAQGRFPSSGHGRGPSHRIVNAAQVMAHTPLITSCNSYLIIEVNMFMQLIRTGLS

SEQ ID NO: 205481 - protein, 85 aa, Zea mays
  Clone ID: MRT4577_118986C.1.pep
IRLELIRDGEFFHFFLLYKKSEVELNMVNAVQHFTCPTLNRRTSSCDSLHLINTTDEYFHCEPCYGELIAADDILVLEEIWDGDD

SEQ ID NO: 205482 - protein, 108 aa, Zea mays
  Clone ID: MRT4577_118987C.1.pep
VAVGSLSTVTAGTAPLASSVALQLILGSRTGRPEPAREDTPPPVLRLPAAAEGPARDRRASASPAVVGGQDERLLLPRLHRGAGARLDSCLPQQAGCVYIRSGTRRVS

SEQ ID NO: 205483 - protein, 51 aa, Zea mays
  Clone ID: MRT4577_118988C.1.pep
PAGPREEFLCYLFGCCSNPSFCLLLMTHRKSPRTRISVRDSFYYILKIIVD

SEQ ID NO: 205484 - protein, 63 aa, Zea mays
  Clone ID: MRT4577_118989C.1.pep
NDSAYGKVFLEVLFCSVTALWTCTDVAHVLLQFRLAWCGKLVRYACAVAAHYIRFTQGLCFDQ

SEQ ID NO: 205485 - protein, 120 aa, Zea mays
  Clone ID: MRT4577_11898C.1.pep
DYAMRCYLEDFSLLSSTCCKTEAARRVVFDRISYPPLILAFCSSVHRYGPLHISPCICSVAPCLRVLWMSNHGCFAPSFLPFYTRLLRPDVGSQELDATVDDDYYYSGGAYYYAQPADDD

SEQ ID NO: 205486 - protein, 56 aa, Zea mays
  Clone ID: MRT4577_118990C.1.pep
EVNTPGICFKREGTFLLNLQTENLLNLLPSLAPQNPPKLPLELLLQKDLQDHPYFF

SEQ ID NO: 205487 - protein, 112 aa, Zea mays
  Clone ID: MRT4577_118991C.1.pep
RRLNCEISFPPRAVCVPGPLPSVLVIVFAFCSVQFHYSCTLCYSSLRSVLHYSLPPPPPVSICVIVYTGPPCSSHVSYNCPPILPNNPCASIPSFLDCVTHSFHFIKKKTPR

SEQ ID NO: 205488 - protein, 117 aa, Zea mays
  Clone ID: MRT4577_118992C.1.pep
PPKEKSIPNFNPTFWAPPPPVLLFFYPRPPPSFNNNILSKRASPPNPKKKNPLLFAISVGLKKGRTKPRPYKHYLHNHVPSQGAVGEKINCSPPYKKTVCIRPPPNCLLFTLAGEAL

SEQ ID NO: 205489 - protein, 109 aa, Zea mays
  Clone ID: MRT4577_118993C.1.pep
EGKKILWGPSPPRGGGGFFSLKKTHVVYPPKEPLFRNAGPKLLKKFKPPGLGSRGGGRYLRGHLGGPWGKKRYSLLFGPRGGPPPKWRPRRPSNRIYRRPSNETKEGVR

SEQ ID NO: 205490 - protein, 56 aa, Zea mays
  Clone ID: MRT4577_118994C.1.pep
KVSSGVGGSPGPYRHLVPLGSPGYFGAPFFFNSSLPGVFLFEKKFSSQKFWNNLGL

SEQ ID NO: 205491 - protein, 54 aa, Zea mays
  Clone ID: MRT4577_118995C.1.pep
APLLELDGHSRRPRPSSYLLYLWTGHWVAGFCPVHAVRSPLPLPRLVHRYGARP

SEQ ID NO: 205492 - protein, 58 aa, Zea mays
  Clone ID: MRT4577_118996C.1.pep
KRLNINETKMRAFSSPEEYNDALSTGKVAVIVDEIPYLKVFLAKYCHNYTMVGPTYKF

SEQ ID NO: 205493 - protein, 113 aa, Zea mays
  unsure (1)..(113): unsure at all Xaa locations
  Clone ID: MRT4577_118997C.1.pep
ESPRSVXRYLLTERVLHREDDVLILAXLFLPFTVPYMCCHXVNTXQHTYKCYNMKLPYLRLLFPPIIQSLHNTVKNLHEKAHLPLLVXQTTTDAADNDDIDADMQKAGISIHA

SEQ ID NO: 205494 - protein, 84 aa, Zea mays
  Clone ID: MRT4577_118998C.1.pep
VVLPVPDRNCRGDATRSLLHATGSGQWGAWPCDLVLRVAGCIAPRLIYLKNLGWRWLSPHGAAPGASNIPSGSPCARGIAPLLV

SEQ ID NO: 205495 - protein, 170 aa, Zea mays
  unsure (1)..(170): unsure at all Xaa locations
  Clone ID: MRT4577_118999C.1.pep
PPPLPSAPLLFFYTLFPRTRVAPVRQKHRRNACPCALKTSHNTKYYKIVGMCTASTLDYLMKAXRTATITKHPDDDADPHNSERLALPMTVLSDAYKHDIYDDNDEDALEEYMHVVRPHDXSFDIFSSFFGPSFGRYSQLSKKIDNLRLEQDVNLSHKGSVQHLYHGISR

SEQ ID NO: 205496 - protein, 54 aa, Zea mays
  unsure (1)..(54): unsure at all Xaa locations
  Clone ID: MRT4577_11899C.1.pep
GVGLTGFRCPFGEFLCGGHRYLDXHXCSYDYKGAARDAIPRENPVVRAAKVVRF

SEQ ID NO: 205497 - protein, 56 aa, Zea mays
  Clone ID: MRT4577_1189C.1.pep
HEHGAATTQGADMDSNGLAMQPSHHAYRDVDYDCSEKHTSTFFDAGVQLLYDIYGE

SEQ ID NO: 205498 - protein, 291 aa, Zea mays
  Clone ID: MRT4577_118C.1.pep
MRPPAPKVPSAASSSSHSQREPRPENPLLLLPSSRFTKLSLGCPLLDRLLCGGLPAASVTEIAGESASGKTQLCLQLALLAPLSPLSASSLFLHSDLPFPLHRLRRLAPKSRPDILDHVLVAAAHSPTDLLSLLARAQRLLANPGRSPHRLPIRLILLDSIASLFRGDFDASPADLRRRSALFFQISAKLKELAYRHQCVVVVTNQVVDVVEGDAGNTVAWSSGRRLSPALGIAWANCVNTRLFLTREVEGNGTSGSARRWMKVAFAPHLPEQSCEFVIRRDGVFGVEPER

SEQ ID NO: 205499 - protein, 164 aa, Zea mays
  Clone ID: MRT4577_119000C.1.pep
VYAPLYNKSNDARDSTVDLLGWYIHFCARVVILVTKKKKKKKKKKKKKKKKKKKKKKKKKKKKKKKKKKKKKKKKKKKKKKKKKKKKKKKGGPRLKKKKFKTGGSGKKIFFFWGTQKIKSGARVLKTLKKEKTPAPPKIIPLEKNPFSPGGLKKKRPHPIPFPK

SEQ ID NO: 205500 - protein, 103 aa, Zea mays
  Clone ID: MRT4577_119001C.1.pep
PVLPSAERSRGPPTSRVMFASSPILACASGASTAPMGKTNQCGSLVRRCWRYGGISPSASSMVGVRRGRDPLSYMLRSEDTCHLKIILVPGISSLRSRTGTTG

SEQ ID NO: 205501 - protein, 168 aa, Zea mays
  unsure (1)..(168): unsure at all Xaa locations
  Clone ID: MRT4577_119002C.1.pep
SPSRFRFRSTLCXXAXXFRGALLPTSWXLPAPPMGPEALHCIXISWCCXSSXGRPPHXSSLSSNAHAVSWRSVPSSXXLSXVYLSXXSPACPPLPAFRHPGPAFELXLXLFLDCPSLXXSAXSGXXSSFLPFRASXPAFEXRXXGXXSGFPSFXXGXLPPKAGARKKT

SEQ ID NO: 205502 - protein, 132 aa, Zea mays
  unsure (1)..(132): unsure at all Xaa locations
  Clone ID: MRT4577_119003C.1.pep
RPAWIGXKKKYPKKKRKKKKKKKKKKKKKKKKKKKKKKNHHKKKKNENRRGKKRGLKXWLVKLGGKAHCRGGRDLKKKKKRNGGNNFKKRPKKXEKNKMRPYSLTKKKKKHRPRGRHHLKIHGPPRPGEPQK

SEQ ID NO: 205503 - protein, 79 aa, Zea mays
  Clone ID: MRT4577_119004C.1.pep
HEFNVQSKSRIAGHRNRRPSDQGIEHGEGNTTTTFGPTMEPGIIWNLAKLLSLDRSITPPGRTISTSSRTGGVPAAVGL

SEQ ID NO: 205504 - protein, 95 aa, Zea mays
  Clone ID: MRT4577_119005C.1.pep
SYGDQNREGERRCQYHSGEDAIRHTRLAKSRVGRIIIAKSSLEVGLEDSDPRRSLTCLGATRWTSSRDARPWLAPAMAQWSVQGNSPRLASPRVR

SEQ ID NO: 205505 - protein, 133 aa, Zea mays
  Clone ID: MRT4577_119006C.1.pep
RQLVQHRGISVVKMYVTIRKHGLGAALVRSLDIHAVSMQVTVSQVVNIACPVIRVSLDNLRWHVIHRTSLGLTSRCFVGLQDMRLQICRFVRFLLGHVVYVQCFHEAAHCCCHAPSFIARLEAKQNVGLPYPR

SEQ ID NO: 205506 - protein, 89 aa, Zea mays
  Clone ID: MRT4577_119007C.1.pep
MGNLVSQCVANGAGARPLVVEPDGSRTLVDKNTGVAELMIDAPGHVVARATDVARERRVRAMAADELLRAGVVYLLVPARRAGARLGDR

SEQ ID NO: 205507 - protein, 78 aa, Zea mays
  Clone ID: MRT4577_119008C.1.pep
MSSSTASWSRYGAVPTSPPSPSQLMPEDDAAGGEAAPSPSVSATAAEAGVAFFSRARAFAVTVRARAWREALDPSAFS

SEQ ID NO: 205508 - protein, 163 aa, Zea mays
  Clone ID: MRT4577_119009C.1.pep
KKQKEIIELWHECNVSIVHRTYFFLLFKGHKEDNIYLEVEHRRLSFIKSSFSVASEANAAATSSLRNLRHERDMLYRQMLRRLNLLERESLYNKWGIDLNSKQRRLQLSRRIWTQTDMEHVRESVALVAKLVEHLEKGQVIKEMFGLTFTLNPQAERRPFQLC

SEQ ID NO: 205509 - protein, 85 aa, Zea mays
  Clone ID: MRT4577_11900C.1.pep
YNVIMRGYMHFTQHLQSYSTCIWMRTNRLDAYNTYMSANDKSTNHDTRTSGAVINRLIRTHAAAILPVIGCAKCSRLYRPLQGLG

SEQ ID NO: 205510 - protein, 66 aa, Zea mays
  Clone ID: MRT4577_119010C.1.pep
KGTRWGFFTTGVHRYVPYTVMLIAADPLLPSRAAYSIVHTDPACGYALRKHGHRRHMDITIVWRGC

SEQ ID NO: 205511 - protein, 432 aa, Zea mays
  Clone ID: MRT4577_119011C.1.pep
MGLSTVYSPAGPRLVPAPLGRCRSAQPRRPRRAPLATVRCSVDATKQAQDGVATAVATEAPASRKECFGVFCTTYDLKAEDKTKSWKKLVNVAVSGAAGMISNHLLFKLASGEVFGQDQPIALKLLGSERSFQALEGVAMELEDSLYPLLREVSIGIDPYVVFQDVDWALLIGAKPRGPGMERAALLDINGQIFADQGKALNAVASRNAKVLVVGNPCNTNALICLKNAPNIPAKNFHALTRLDENRAKCQLALKAGVFYDKVSNVTIWGNHSTTQVPDFLNAKIDGRPVKEVIKDTKWLEEEFTLTVQKRGGVLIQKWGRSSAASTAVSIVDAIRSLVTPTPEGDWFSTGVYTTGNPYGIAEDIVFSMPCRSKGDGDYELASDVLMDDFLWERIKKSEAELLAEKKCVAHLTGEGNAFCDLPEDTMLPGEV

SEQ ID NO: 205512 - protein, 571 aa, Zea mays
  Clone ID: MRT4577_119012C.1.pep
MAVTGLVMYSRALISMLFLGRLGELALAGGSLALGFANITGYSVLSGLALGMEPICGQAFGARRGKLLALALHRTVLLLLAVALPISLLWVTSTGHVLKLLGQDEGVADAAQTFAAYASADLAVLAVLHPLRVYLRSQNLTLPITACSLFSVLLHGPINYLLVVRLRMGVAGVALAVALTDLNLLLALLCFLAISGAHRDSWVGPTLDCLCGWPELLRLAVPTATAVCLEWWWYELMIVLSGLLANPRATVASMGILIQATSLVYVFPSSLGQGASTRVSHQLGAGRPAGARRAAGAALSIGVGVGLVAATFMVSVRSHWGRMFTSDADILRLTGVALPIAGLCELGNCPQTAGCGVLRGSARPGSGARINLASFYLVGMPVGVALAFGARLGFAGLWLGLLAAQAACAVWMARAVAATDWDVEVGRAKELTKATASNNHSECNSSSSTSASSDITTVIATSNSAAGCKNNGYVPISERCSNDSELEKLEEGLMSSDDIPSASVSGSASAGDTGAVVRENRGSCCNDSGAAGTAATTEGKEQRRGGSERGPLISVSDGEHDGDGRGGGGQV

SEQ ID NO: 205513 - protein, 134 aa, Zea mays
  Clone ID: MRT4577_119013C.1.pep
KCINDSRFSSSYICTSLSLSAPNMAERIVAVAGKKKTDQSRGALSTPSSCRSVVAECASAPESPSAGQRLARTAGRMVRSATVLSMAFVSRSVAVAEESGVPFAAPHLALELSASLKKASRKHTRVRLVSFSQG

SEQ ID NO: 205514 - protein, 37 aa, Zea mays
  Clone ID: MRT4577_119014C.1.pep
PVLQLPRSEYELWAGSAITISCKIPRTRRRVRVRKRE

SEQ ID NO: 205515 - protein, 61 aa, Zea mays
  Clone ID: MRT4577_119015C.1.pep
MSATMAWYPLPQSGGTSTPSGGGELLDDQSGGWALWSFGSADDDHRAGVVRAETHGSSDER

SEQ ID NO: 205516 - protein, 328 aa, Zea mays
  Clone ID: MRT4577_119016C.1.pep
MASKQMEEIQRKLSLLEYPRANAPAQSLLFAGVERYRLLEWLFFRLLGDRSPFTQQNWQGDSLDRDEENNRIQHLAEIANFLGITPSADTEAIQGRGSYEERVELLHLIVDLVEASCYADNPEWSVDKQLEKDVQLVDSIAEKQAQIFSEECKLFPADVQIQSIYPLPDIAELELKLSEYTKKMSNLQQMVQELASKYDYNPNEDYAETELKLREYLQSFLETVKSFNTIYTKEIHPWTHMMEVPQLHGFGPAANRLLEAYNTLLKFLGNLRSLRDSYTAMAAGSLSASNEPSSVTKIISDCESALTFLNHSLSILSTSVAREQGGTL

SEQ ID NO: 205517 - protein, 251 aa, Zea mays
  unsure (1)..(251): unsure at all Xaa locations
  Clone ID: MRT4577_119017C.1.pep
MGLSTVYSPAGPRLVPAPLGRCRSAQPRRPRRAPLATVRCSVDATKQAQDGVATAVATEAPASRKECFGVFCTTYDLKAWSTNNLSSMPLNGLGXEDKTKSWKKLVNVAVSGAAGMISNHLLFKLASGEVFGQDQPIALKLLGSERSFQALEGVAMELEDSLYPLLREVSIGIDPYVVFQDVDWALLIGAKPRGPGMERAALLDINGQIFADQXKALNAVASRNAKVLVVGNPLYTNALILLKXCPNIPAK

SEQ ID NO: 205518 - protein, 242 aa, Zea mays
  unsure (1)..(242): unsure at all Xaa locations
  Clone ID: MRT4577_119018C.1.pep
MRECISIHIGQAGIQVGNACWELYCLEHGIQADGQMPGDKTIGGGDDAFNTFFSETGAGKHVPRAVFVDLEPTVIDEVRTGTYRQLFHPEQLISGKEDAANNFARGHYTIGKEIVDLCLDRIRKLADNCTGLQGFLVFNAEPSSMMAKCDPRHGKYMACCLMYRGXDVVPKDVNAAVATIKTKRTIXXFVDWCPTGFKCGINYSPPSVVPGGDLGXVQRAVCTISTPXWGVEWSXRIDHKST

SEQ ID NO: 205519 - protein, 93 aa, Zea mays
  unsure (1)..(93): unsure at all Xaa locations
  Clone ID: MRT4577_119019C.1.pep
CCFAVGPRFAAWCALSGXXLPXXVPXXPPXLPXLPPPPPRXSCWSXXXXSXXXGCWXGPXXGARXXRSSAPARPGCRPPXRXXXRXPPPPPXP

SEQ ID NO: 205520 - protein, 104 aa, Zea mays
  Clone ID: MRT4577_11901C.1.pep
GIWASGHSLFSMLDFLLLPLCGAFVPLLWCLCRPACRSPSAPFCSGSPRCALSSLFASSRPCVGVLGLLVFPGSPFLVSPRCCAPGFASSDVFGSCSSRIPCCR

SEQ ID NO: 205521 - protein, 451 aa, Zea mays
  Clone ID: MRT4577_119020C.1.pep
MRECISIHIGQAGIQVGNACWELYCLEHGIQADGQMPGDKTIGGGDDAFNTFFSETGAGKHVPHAVFVDLEPTVIDEVRTGTYRQLFHPEQLISGKEDAANNFARGHYTIGKEIVDLCLDRIRKLADNCTGLQGFLVFNAVGGGTGSGLGSLLLERLSVDYGKKSKLGFTVYPSPQVSTSVVEPYNSVLSTHSLLEHTDVAVLLDNEAIYDICRRSLDIERPTYTNLNRLVSQVISSLTASLRFDGALNVDVNEFQTNLVPYPRIHFMLSSYAPVISAEKAYHEQLSVAEITNSAFEPSSMMAKCDPRHGKYMACCLMYRGDVVPKDVNAAVATIKTKRTIQFVDWCPTGFKCGINYQPPSVVPGGDLAKVQRAVCMISNSTSVVEVFSRIDHKFDLMYAKRAFVHWYVGEGMEEGEFSEAREDLAALEKDYEEVGAEFDEGEDGDEGDEY

SEQ ID NO: 205522 - protein, 68 aa, Zea mays
  Clone ID: MRT4577_119021C.1.pep
RSAIYFRLDELILSAAVLSWPGGSITSAWARPLISTCTRPALHNLHYFQPKSINTYHKPNSTMFPVFP

SEQ ID NO: 205523 - protein, 193 aa, Zea mays
  unsure (1)..(193): unsure at all Xaa locations
  Clone ID: MRT4577_119022C.1.pep
SETGAGKHVPXRAVFVDLEPTVIDEVRTGTYRQLFHPEQLISGKEDAANNFARGHYTIGKEIVDLCLDRIRKLADNCTGLQGFLVFNAVGGGTGSGLGSLLLERLSVDYGKKSKLGFTVYPSPQVSTSVVEPYNSVLSTHSLLEHTDVAVLLDNEAIYDICRRSLDIERPTSVVVWFTTYVVRLYSPALLLGY

SEQ ID NO: 205524 - protein, 74 aa, Zea mays
  Clone ID: MRT4577_119023C.1.pep
HITLLGGEKNDTIWHEDTTAGVYQHYQKSMYKTTWPMVHTYTDESVARQMTPNEIQYFDPKDFSEGILYRIRMP

SEQ ID NO: 205525 - protein, 191 aa, Zea mays
  unsure (1)..(191): unsure at all Xaa locations
  Clone ID: MRT4577_119024C.1.pep
QQVVSQVISSLTASLRFDGALNVDXNEFQTNXXVPYPRIHFMLSSYAPVISAEKAYHEQLSVAEITNSALEPSSMMAKCDPRHGXKYMACCLMYRGDVVPKDVNAAVATIKTKRTIQFVDWCPTGFKCGINYQPPSVVPGGDLAKVQRAVCMISNXXTSVVEVFSRIDHKFDALLARRRRACVPLLSCDLP

SEQ ID NO: 205526 - protein, 200 aa, Zea mays
  Clone ID: MRT4577_119025C.1.pep
AGLKFLAVQGLFSASLGTEVTSFELQEKFKWPKNPISTSLRKECIERLQFLLEDAQKDASLHVPNEVKSNDLGYYLMRFINTVCNIPSVSLFRILSGHDDNAFKKLMAVESMLFHEERKTGPGLESTKMHAMRYLLIQVLLQGLLHPDEYWEAAVDVTICCKKSFPVIAQGDNSSAQESAEHGSQESDEDGFEESDEDGS

SEQ ID NO: 205527 - protein, 92 aa, Zea mays
  Clone ID: MRT4577_119026C.1.pep
FGRNHFYYWLNRLGKKKARWEFPKFSLVIKIFWNGLKTPELWLGQNGTLLVGTRELNFPKGFLNGLFFIKKLCWGGPNLLNFKKWFLKGYLR

SEQ ID NO: 205528 - protein, 172 aa, Zea mays
  Clone ID: MRT4577_119027C.1.pep
MRECISIHIGQAGIQVGNACWELYCLEHGIQADGQMPGDKTIGGGDDAFNTFFSETGAGKHVPRAVFVDLEPTVIDEVRTGTYRQLFHPEQLISGKEDAANSTSVVEVFSRIDHKFDLMYAKRAFVHWYVGEGMEEGEFSEAREDLAALEKDYEEVGAEFDEGEDGDEGDEY

SEQ ID NO: 205529 - protein, 109 aa, Zea mays
  unsure (1)..(109): unsure at all Xaa locations
  Clone ID: MRT4577_119028C.1.pep
IHIGXAGIQVGNACWELYCLEHGIQADGQMPGDKTIGGGDDAFNTFFSETGAGKHVPRAVFDDLEXPTVIDEVRTGTYRQFLHPEQFISGKEDADNIFARGHYTIGKEI

SEQ ID NO: 205530 - protein, 188 aa, Zea mays
  unsure (1)..(188): unsure at all Xaa locations
  Clone ID: MRT4577_119029C.1.pep
MREWVSIHIGQAGIQGGNACWELYCLEHGIQGDGQMPGDKTIGGGDDAFNTFFSETGAGNHVPRAVFGDLEPTVIDEVRTGTYRQLFHPEQLISGKEDAANNFARGDYTIGKEIVDLCLDRXIRKLADNCTGLQGFLXQTLVGGGNGXSGLGSLPSWEHLPXDYGKNAQXLGFTRVPHPPQVVPHRGG

SEQ ID NO: 205531 - protein, 130 aa, Zea mays
  Clone ID: MRT4577_11902C.1.pep
HNQQRGSDHPCMHAAASYSVVQLMKSLSGLKHGAVCSHGRRRCVMIAHHPLAAGRRRSVQHVNVILVHGRPPLEWAQLMLRYYGGGCSRLAAAVTEVVVEPACCVRRRPGLRRRLRKRGGLEQLGHGRVV

SEQ ID NO: 205532 - protein, 78 aa, Zea mays
  unsure (1)..(78): unsure at all Xaa locations
  Clone ID: MRT4577_119030C.1.pep
VCMXISNSTSVVEVFSRIDHKFDLMYAKRAFVNWYVGXGMKEAEFSEAREDLAALQKDYKEVGAEFYEGKHGDKGNEY

SEQ ID NO: 205533 - protein, 99 aa, Zea mays
  Clone ID: MRT4577_119031C.1.pep
KTRPKQNSQREQGRYREREKKEQRHEQNNKPRLTFSLLHHPFFSLYILSPLVVIRPYPHSSPPATSCPTTPTPSTPTPPPPVFSLVVATSKCYGATAYK

SEQ ID NO: 205534 - protein, 175 aa, Zea mays
  unsure (1)..(175): unsure at all Xaa locations
  Clone ID: MRT4577_119032C.1.pep
MRECISIHIGQAGIQVGNACWELDXLEPGIQAGGQKPGDQTIGGGGEAFNTLFKETGAGKDRPRAGFGGPGPTGLGEGRTGTYWQVFPSGQVIRGKGGAGHNLGWGHFPLGKGNGGLGPGRIKKPGNNWTGLQGFLGFNAGGGRTGPGLGSLLPERPAGDYGKKAKLGFTGVPFP

SEQ ID NO: 205535 - protein, 135 aa, Zea mays
  Clone ID: MRT4577_119033C.1.pep
RLSAAFLMARLSSGAPEDQKKATYEARKLSKRNVFYRACLVEADAVPWLLHLLSSTDASVQDNSVAGLLNLSKHPAGRRALVEAGGLGLVVDAVNVAAKVEARQNAADILFYLSSNLEYCEEISRMPEAVPTLVR

SEQ ID NO: 205536 - protein, 70 aa, Zea mays
  Clone ID: MRT4577_119035C.1.pep
TLSAHSTSNSIEQQGRFLDDNPQSLKGKNYQLLERERTDHSVLRHVMADDRVLCRIPHTQVTHSSVSTVI

SEQ ID NO: 205537 - protein, 144 aa, Zea mays
  Clone ID: MRT4577_119036C.1.pep
PAGVKIQKKKKKKKKKKKKKMIKKKEIRTRNCTESDNMKTKTLHMENVDDASMMRWTSSTRYEGCTGLIRRGERRALAEAARLSRTNRRVPRSSSGAWPSGPAARRPRALGRDDNRPLVSYPAPIPHMLVEVADKFSSDFKDPA

SEQ ID NO: 205538 - protein, 63 aa, Zea mays
  Clone ID: MRT4577_119037C.1.pep
GERKTKPLIQILKPYSAKSFKQCGIIPFYHTFNRLYVLFLLKHKFLGFTAIFKQDLLIFDFTP

SEQ ID NO: 205539 - protein, 81 aa, Zea mays
  Clone ID: MRT4577_119038C.1.pep
RKNFLFSFLPGDLHKGPGLSYLPEGGQGFLSSTTHPISLIKKDFNKPIKAIRLPTRPPLPPVATFPLGRFFNHSSSGFSNE

SEQ ID NO: 205540 - protein, 38 aa, Zea mays
  Clone ID: MRT4577_119039C.1.pep
MGNSLRCCLACMVPCGALDVVRIVHLSGHVEEFSCPVA

SEQ ID NO: 205541 - protein, 82 aa, Zea mays
  unsure (1)..(82): unsure at all Xaa locations
  Clone ID: MRT4577_11903C.1.pep
XALSNWRFSRKIAPASTQDTSYVTTLKLTTSLTVRIPGATKQKDRRQISYSIVIIYARSSKGDRCLKILYFHQSVRGLQQIC

SEQ ID NO: 205542 - protein, 45 aa, Zea mays
  Clone ID: MRT4577_119040C.1.pep
KFLYKTNYSMAYFHSTLITLLNLLMVENPFLFKFFTNFYFLEFFL

SEQ ID NO: 205543 - protein, 69 aa, Zea mays
  Clone ID: MRT4577_119041C.1.pep
KGIWTSYICKGSNLIFFLYKTNPCYIFYPNMDCIIKKTNRTHPSPTSREDERTPCPPLVSSHVLFTSAE

SEQ ID NO: 205544 - protein, 146 aa, Zea mays
  unsure (1)..(146): unsure at all Xaa locations
  Clone ID: MRT4577_119042C.1.pep
GFLLLALIWRFDFAPVMVLGIAVLNDGTIMTISKDRVKPSPVPDAWRLQEIFATGVVLGTYQALATVLFFWAVRDTAFFTNTFGVHHIGDSTEELMAAVYLQVSIISQALIFVTRARSWFFVERPGLLLVAVFLAXQLVATLIAVY

SEQ ID NO: 205545 - protein, 63 aa, Zea mays
  unsure (1)..(63): unsure at all Xaa locations
  Clone ID: MRT4577_119043C.1.pep
TGLTPSQVSLSKKQGPGPSLRRPLQITIRRGXPPDSQAGLLPRSFAVTRGILVSFFSSAYLYA

SEQ ID NO: 205546 - protein, 124 aa, Zea mays
  Clone ID: MRT4577_119044C.1.pep
KKKKKKKKKKKKNKKKKKKKKKKKIYTYKHNLFLGAITPILGDSWGTSLPLGGRVHLSSFRAPFLLVVWPAVSHPGGGFKPWGFRKFVALPNFPVWPAFPFWGGAEMGGGPSLYAFFKKSGRAL

SEQ ID NO: 205547 - protein, 83 aa, Zea mays
  unsure (1)..(83): unsure at all Xaa locations
  Clone ID: MRT4577_119045C.1.pep
DFCDLISPSTGEQXDEXAAEQDISDVDKHIWPQRKAEELGSFMTGLYLPTSDIHGVILECTGQTAQLGLYAVAKALSHKGVVK

SEQ ID NO: 205548 - protein, 74 aa, Zea mays
  Clone ID: MRT4577_119046C.1.pep
CNRFKSLIQQFRCYTKTTFCLKKQLKHFLFIKRAIGFTGKLFFTGHCLAPLSFEHKALFHSTLYNILFATLYKI

SEQ ID NO: 205549 - protein, 106 aa, Zea mays
  Clone ID: MRT4577_119047C.1.pep
KKKKKKKKKKKKKKKKKKKKKKKKKKKKKKKKKKKKKKKGGAVWFFPSPTFPFPCACHSLFFFFGRPLNSIARGLSFSTVWEWPCPFPFPIFFAFASPFPFAGLLV

SEQ ID NO: 205550 - protein, 77 aa, Zea mays
  Clone ID: MRT4577_119048C.1.pep
MAARGRGSAGSSSRAPSVAGTALLCVAVAVLLLAATPAAVAGTTYLVGDAAGWTLKVDYGRWVAGKTFHAGDILVFK

SEQ ID NO: 205551 - protein, 106 aa, Zea mays
  unsure (1)..(106): unsure at all Xaa locations
  Clone ID: MRT4577_119049C.1.pep
MGRPDRIWGARTGARGRAHDHVGHRXAEPRSHQQPAGVDPPAWLRPHLDPRHHLHLWAPRGLSVRCPLTIDPRPLLTMMXWQHGCCHHCPFRDGYVAHISVLCCWH

SEQ ID NO: 205552 - protein, 66 aa, Zea mays
  unsure (1)..(66): unsure at all Xaa locations
  Clone ID: MRT4577_11904C.1.pep
MSLIMQDKFHSFHSVATILSYLTKAPLVPPGTPVVNALAKXRAMLENIMRACVGLAPENNMILEYK

SEQ ID NO: 205553 - protein, 61 aa, Zea mays
  Clone ID: MRT4577_119050C.1.pep
SSGRPGRYSICSKLKKKKKKKKKKKKKKKKKKKKKKKKKKKKKKKKKKKKKKKTKGKGGGG

SEQ ID NO: 205554 - protein, 230 aa, Zea mays
  unsure (1)..(230): unsure at all Xaa locations
  Clone ID: MRT4577_119051C.1.pep
FLKFLEEPNSTFSKQLAGLHRSPSPPQTKRITVLKPTKFVESYCRREIRTHRINEGNEHVMRRTHWRSHSAEDTLSQPTRIVVLKPSPGKPSRTMAXANSRSSPSSFHXQIGFYGGLEGHNYPSDGLHRRDESLLSSVYSNGYGGDESSFGRSEVDYIDEEDSNLSDSEIVSPVLPLHSWDHFKRYSSPHSGSTFSRTSRSPESSVIREAXKRLSERWASVAYYETNQEK

SEQ ID NO: 205555 - protein, 140 aa, Zea mays
  Clone ID: MRT4577_119052C.1.pep
IAIPIDSIHSLDYKSTDLNQVEWGGVEESKASVDGEVEEDHESNLVTPEQNHQVPQSQQTENAANDGGNLLFGHFRPLFRDVVQIAPGGENTGQSVGKMNCGARGGKTPPPKRPKPTRAPGTPKAQCQPFSPGAPGQGIF

SEQ ID NO: 205556 - protein, 84 aa, Zea mays
  unsure (1)..(84): unsure at all Xaa locations
  Clone ID: MRT4577_119053C.1.pep
IHWATHATIVCTDSRINHMKGKCARKICTFHVNKAIPKLNRDSKLALCSRTLQSMLSFHFDISIKQIAMGLSQTLCLLHXXGEL

SEQ ID NO: 205557 - protein, 332 aa, Zea mays
  Clone ID: MRT4577_119054C.1.pep
MGRSPCCEKEAGLKKGPWTAEEDQKLLAFIEQHGHGCWRSLPAKAGLRRCGKSCRLRWTNYLRPDIKRGKFTLQEEQTIIQLHALLGNRWSSIATHLPKRTDNEIKNYWNTHLKKRLAKMGIDPVTHKARADVVGGSSGAGNNSGARYRAAAHLSHTAQWESARLEAEARLAREARLRALASPPPPPGPGPGPAFSGLESPTSTLSFSESVLFASAAHDTHALTSRAYAEAFGAEQQQRFADTAAAADAAPGFLAGVLLGCSVAGAEKGFAASSTDASVCEQQQEEEDKGYWSSILNMVNSSMSSSTSSLTSDAVTDPAAAYLPPATAAAEF

SEQ ID NO: 205558 - protein, 68 aa, Zea mays
  Clone ID: MRT4577_119055C.1.pep
PGAKKDPEHAQRHKSQKGVPPVTALGTGGFAFQEPHAKKEAKDAPEDPGEEEESAPPGEGKNKPPFFG

SEQ ID NO: 205559 - protein, 445 aa, Zea mays
  Clone ID: MRT4577_119056C.1.pep
MEQLQEKVLSYLKKLSKGKDGFVAADFTATEARYQAETDIWMVLVVEKNKENELTWRCGALQGILKEAHSLFAMFHGPIRTLLHKQPSAELARGHLRTFLTDYLSDFNVGKKLQFPTYRDSLKERGTVQMLTVSREVALDVQSLATVLGSCLGNVTCQSLVLFEDLLVSTTLPPDDTLNLYTYAVLRLTPRALYSNASSWSYLRKGTSVSAGQTSSSSNGTTAGERPLLREKLSKGKDGFVAADFTATEARCAVPSTPILWFQQADECMHLCIYQHKSLTILLLVPAPSVINGEEGITHVKKAILENASQKIVTVEQKLTRGWGGENAYHVSGYRYLLVDPERRVSRASPPGKVTTLAKDSLLALNMLRQEVDLEKSRYKRGDPCHDKDFEVCIRTKNNAWVIAKISQGRELYMALEKGGETLLYASTAVEKFSNRYCEGAFSTD

SEQ ID NO: 205560 - protein, 248 aa, Zea mays
  unsure (1)..(248): unsure at all Xaa locations
  Clone ID: MRT4577_119057C.1.pep
MALAFDEFGRPFIILREQEKKTRLRGLDAQKANIGAGKAVARILRTSLGPKGADKMLQSPDGDVIITNDGATILEQMDVDNQIAKLMVELSRSQDYEIGDGTTGVVVMAGALLEQAEKLLERGIHPIRVAEGYEMASKVAFDHLEHISEKFEFSADNIEPLVQTCMTTLSSKIADLERKDVNLDLIKIEGKVGGKLEDTELVYGIIXDKDMSHPXMPKRIEDAKIAILTCPFEPXKPKTKHKVDIDTV

SEQ ID NO: 205561 - protein, 536 aa, Zea mays
  unsure (1)..(536): unsure at all Xaa locations
  Clone ID: MRT4577_119058C.1.pep
MALAFDEFGRPFIILREQEKKTRLRGLDAQKANIGAGKAVARILRTSLGPKGADKMLQSPDGDVIITNDGATILEQMDVDNQIAKLMVELSRSQDYEIGDGTTGVVVMAGALLEQAEKLLERGIHPIRVAEGYEMASKVAFDHLERISEKFEFSADNIEPLVQTCMTTLSSKIVNRCKRALAEIAVKAVLAVADLERKDVNLDLIKVEGKVGGKLEDTELVYGIIVDKDMSHPQMPKRIEDAKIAILTCPFEPPKPKTKHKVDIDTVEKFQTLREQEQKYFDEMVQKCKDAGATLVICQWGFDGEANHLLMHRKLPAVRWVGGVELELIAIATGGRIVPRFQELSPEKLGKAGLVREKSFGTTKDRMLYIEQCANSRAVTIFIRGGNKMMIEETKRSLHDALCVARNLIRNNSIVYGGGSAEISCSIAVETAADRHPXGVEQYAIRSFADALDAVPLALAENSGLSPIDTLTAVKAQQVKESNPHCGIDCNDVGTNDMKEQNVFETLIGKQQQILLATQVVKMILKIDDVISPSEY

SEQ ID NO: 205562 - protein, 34 aa, Zea mays
  Clone ID: MRT4577_119059C.1.pep
MGSPPKKKKKKKKKKKKKKKKKKKKKKKKKKKKR

SEQ ID NO: 205563 - protein, 51 aa, Zea mays
  Clone ID: MRT4577_11905C.1.pep
SRQELEGRNPPLARPWAEAPGRRSCPSNRRYPSPIPHRSSDHNTNTCLLMI

SEQ ID NO: 205564 - protein, 311 aa, Zea mays
  Clone ID: MRT4577_119060C.1.pep
MSSPAAGTAAEPHVVEDCLGFVQLLSDGTVRRSTDYSMLRPIGRVPSDTDLPVQWKDVVYEDTRGLRLRMYRPTGAAAGETKLPVLVYFHGGGFCLLSFEVASFHAGALRLAAELPALVLSADYRLAPEHRLPAALDDAESAFAWLRAQAAPPSAVGAESDPWLAESADFARVFVAGDSAGGNISHHVAVRHASSGGGLSLAPLRLAGCVMLWPYFGGEEPMPSEAAFPADQPMDTALFDQMWRLALPAGATKDHPFANPFAAGSVPLRDLGAAFPPLLVVDPDQDPLHDRVVDYVARLKAAGKAVELVVF

SEQ ID NO: 205565 - protein, 93 aa, Zea mays
  Clone ID: MRT4577_119061C.1.pep
AVVVSCFDYSKGPVHITVELMLSLSVRHIVFSMSTNLGTPGLNPVPLTYGPDPVPATSLYNVPPHDKTLNALHFKDVWLLVLHHSSVVGNHIK

SEQ ID NO: 205566 - protein, 79 aa, Zea mays
  unsure (1)..(79): unsure at all Xaa locations
  Clone ID: MRT4577_119062C.1.pep
ASSGIREIFFLPFNPADTRTALTYIDTDGNWHCFSKGSPEQIFDLCHCKDDLRPMVHSTMRXYTKPGSPSLTAARPELP

SEQ ID NO: 205567 - protein, 69 aa, Zea mays
  Clone ID: MRT4577_119063C.1.pep
PSDACVNWGQCTSVVRLELSLSRVGNLMPVFGSVTSSRKSTLGTATHAQPGRISSEYDCPAGDVPTIFS

SEQ ID NO: 205568 - protein, 78 aa, Zea mays
  Clone ID: MRT4577_119064C.1.pep
MEPCANFSQLLTCIDCHCSLVFPFTLVACFPHALEYNSELQAAEPSIVLFARKCTLYGLLSKLEILCMCRTIRVFYKQ

SEQ ID NO: 205569 - protein, 64 aa, Zea mays
  Clone ID: MRT4577_119065C.1.pep
SSSKPILMLTPRSTLVVRAHQPRQPRPATAEEGAREAEVGRRRAQDREGQHLVHGDRGTERRLL

SEQ ID NO: 205570 - protein, 94 aa, Zea mays
  Clone ID: MRT4577_119066C.1.pep
PQKEKGTPGRYTLDIIASSTRNSGFRALRSTRSLKSCHPWSRSGGGRRIQHPYEGVSLHILHHLVRSQYPVGWRRSDSMDALIWQQGPSETWSS

SEQ ID NO: 205571 - protein, 46 aa, Zea mays
  Clone ID: MRT4577_119067C.1.pep
YTFNTIKKNKERWAKRACLSQGIKLTYDYTRPNRFYIFTPNLKSLT

SEQ ID NO: 205572 - protein, 62 aa, Zea mays
  Clone ID: MRT4577_119068C.1.pep
KMNPSLDRINKRSAGTRMNIKGNTLPLRIVQSTLQNIVEQLRCAYKLLILISVSVDGSIFPI

SEQ ID NO: 205573 - protein, 63 aa, Zea mays
  unsure (1)..(63): unsure at all Xaa locations
  Clone ID: MRT4577_119069C.1.pep
MDDAQVIESKHGTNKLASAFTAHDEAVQDRDHQLLTXAVQVAYRGFYCXDXRPFGAPDVRNDK

SEQ ID NO: 205574 - protein, 149 aa, Zea mays
  unsure (1)..(149): unsure at all Xaa locations
  Clone ID: MRT4577_11906C.1.pep
WRPRTATRRQARSFRHRLPVLISPPDRRAQTTPSSASLSXTFSASEEALVERAARREDELAHPAAGMXQHAKGYMMEDHVLXKSHPSFRESSENTDLIDKITLPPRRGIPTDGVILISEILTPLTVIVVTCEISDSKVPVEQSTKRPRD

SEQ ID NO: 205575 - protein, 88 aa, Zea mays
  Clone ID: MRT4577_119070C.1.pep
RTHCAPVPDRLVLTRSFEFAPLLLDPDPGLLSSSCLAQVVPWALEYGIQLVALNYRKLNRQQRSYTTVNVPLVSLFYFLGSSSFCFLV

SEQ ID NO: 205576 - protein, 183 aa, Zea mays
  Clone ID: MRT4577_119071C.1.pep
MVLKSEHQNLRQESVEYRKCVLDASQMFAAIQQYVSRYVSLECEFKDLKEKFNEEAKERKDLYNKLIELKGNIRVFCRCRPLNAEEIAEGASSAIDFDSAKDGELIVRGHVSSRKIYKFDSVFSPEEDQEKVFEKTAPYAISVLDGFNVCIFAYGQTGTGKTFTMEGIEGARGVNYRILEELF

SEQ ID NO: 205577 - protein, 68 aa, Zea mays
  unsure (1)..(68): unsure at all Xaa locations
  Clone ID: MRT4577_119072C.1.pep
PCLYYHVLLDQLAANTAIMHPSVKSTKSPRGNGLYDPRVNYALQVGIXLQMLQLHFVINNVLYYTPQT

SEQ ID NO: 205578 - protein, 40 aa, Zea mays
  Clone ID: MRT4577_119073C.1.pep
SYISGNHDSKGNCEQQMNHRHEEKLSPPTATEHTLNHREG

SEQ ID NO: 205579 - protein, 44 aa, Zea mays
  Clone ID: MRT4577_119074C.1.pep
MSRCGSNCVCGSGCKCGSGCGRCKMYPDMVDQVTTTTTTETLIM

SEQ ID NO: 205580 - protein, 73 aa, Zea mays
  Clone ID: MRT4577_119075C.1.pep
YFFFFVSALLYLLEICDAIGIDLHTIHTFLVANRRLIPLLYIWGTALYYYWRNQDEKNLCLSRDNAITHTILF

SEQ ID NO: 205581 - protein, 49 aa, Zea mays
  unsure (1)..(49): unsure at all Xaa locations
  Clone ID: MRT4577_119076C.1.pep
NVGGRSXXCIXLXXYRXREXDGXRGDSXPNHXXNQXSRXXNGVAGDRPQ

SEQ ID NO: 205582 - protein, 94 aa, Zea mays
  Clone ID: MRT4577_119077C.1.pep
ERITPSFLLPACFFPPRPFYFIVGSSHKKKNRRCLLRVCNGFAPILGVKPLLMWAHLPGGTKKKKKKKKKKKKKNPKKKKKKKKKKYSALLPLL

SEQ ID NO: 205583 - protein, 55 aa, Zea mays
  Clone ID: MRT4577_119078C.1.pep
MDFMKVFDQTVREIKREVNLKVLKVPEIEQKVGSRLAQILALSLCKKIPLYVMES

SEQ ID NO: 205584 - protein, 129 aa, Zea mays
  Clone ID: MRT4577_119079C.1.pep
DTAYLLLYVDDIVLTASSAGFLKYIIEALQREFAMMDMGQLHHFLGISVTHSADGLFLSQRQYSQDILERTGMSACKPCSTPVDLHSKLSADGPHVADATQYRNLTGALQYLTFTQPDIAFAVQQICLY

SEQ ID NO: 205585 - protein, 110 aa, Zea mays
  unsure (1)..(110): unsure at all Xaa locations
  Clone ID: MRT4577_11907C.1.pep
MASEIETLCFQREIILLVSLISNTLSTRMKEILLYQSVSNSSDVLEKIRSERLTDWTKLYGQPQLFIXIVLYYAHNTLTISDSGIGMTKXDLANNLGTIARSVHNSLCRQ

SEQ ID NO: 205586 - protein, 144 aa, Zea mays
  Clone ID: MRT4577_119080C.1.pep
MDFMKVFDQTVREIKREVNLKVLKVPEIEQKVLDATSDEPWGPHGSALSELAHATKKFAECQMVMNVLWTRLSERGANWRHVYKALTIIEYFIANGSERAVDDILDHHSKISVLSSFEYVEPNGKDAGINGEEKVETIGGIIND

SEQ ID NO: 205587 - protein, 243 aa, Zea mays
  unsure (1)..(243): unsure at all Xaa locations
  Clone ID: MRT4577_119081C.1.pep
AAPKIDASDFGAFVSSTEEAAKDPLXLSSGSNLGRTGQAPAAASKANAKKDNFQVKSGIWADSLSRGLIDLNITAPKKVNLADIGIVGGLGDGSDEKALPSWTMGAGSXPRNVWYSTVNTTSWWHRELGQLQQASFRLQHATTHHTPLCSSSMIGGRYVGHAVCVNSVACLLYFIQYSTQRFAVLEFIFNNKRTYALYVSKKKKKKKKKKKKKKKKKKKKKKKKKKKKKNIGTHKMQVTGTSS

SEQ ID NO: 205588 - protein, 79 aa, Zea mays
  Clone ID: MRT4577_119082C.1.pep
KKNKKLHQTNFLIYGGRLPCALVPLWGCYVCCVKLSCHYQSPEIHGRQLTMPTLIRLGSKLANIRCAKCAVYFPLFISA

SEQ ID NO: 205589 - protein, 416 aa, Zea mays
  unsure (1)..(416): unsure at all Xaa locations
  Clone ID: MRT4577_119083C.1.pep
MDFMKVFDQTVREIKREVNLKVLKVPEIEQKVLDATSDEPWGPHGSALSELAHATKKFAECQMVMNVLWTRLSERGANWRHVYKALTIIEYFIANGSERAVDDILDHYSKISVLSSFEYVEPNGKDAGINVRKKVETIVGIINDKEKIKAVRDKAASNRDKYIGLSSTGITYKSSSASFGSNYSSGERYGSFSGTKEADSYGDSYRDKESVKTSTSNSGSRKFGSKLRKDAKPDRRNEDYSSPSSLRPPSNTNNTXDDFDDFDRRPFTFFECQEKHLWQLPIDASDFGAFVSSTEEAAKDPLDLSSGSNLGKTGQAPAAASKPSAKKDNFQVKSGIWADSLSRGLIDLNITAPKKVNLADIGIVGGLGDGSDEKALPSWTMGAGSGLGMSGIPPSTQQAGGIESLANYNKHHFGFK

SEQ ID NO: 205590 - protein, 44 aa, Zea mays
  Clone ID: MRT4577_119084C.1.pep
LMQQTETFAQSSIQNRRARNTAHSFAICRSRQQQRTNLIHQLVL

SEQ ID NO: 205591 - protein, 63 aa, Zea mays
  Clone ID: MRT4577_119085C.1.pep
MARNEQYLAFAVVLAALQLFLRLARVNVTILFLPMLSQAVSFRSNPTLIGNVLLVMVTPSGIL

SEQ ID NO: 205592 - protein, 102 aa, Zea mays
  unsure (1)..(102): unsure at all Xaa locations
  Clone ID: MRT4577_119086C.1.pep
TSDVSSDSLELFAATGXQKLIEVDDERKLRTFYEKRMATEVXAADALESEWNGYVVRISGGHDKQGFSMKQGVLTHCRIRLLLSKGHSCYRXRRTADNRDIS

SEQ ID NO: 205593 - protein, 163 aa, Zea mays
  Clone ID: MRT4577_119087C.1.pep
EFLKAEIRASSGVDQYTPPALLGSATTWHRPRSVEEYYKLVDSELFDQSKTKVVVGNTASGVYRETEVYDRYIDLRCIPELNSVSKEANGVQIGAAVTISQAIEILRVEAGGCNDVIFCKIADHMEKVASPFVRNTASLGGNLVMAQRDQFASDIATILLAAG

SEQ ID NO: 205594 - protein, 43 aa, Zea mays
  unsure (1)..(43): unsure at all Xaa locations
  Clone ID: MRT4577_119088C.1.pep
RQPRTSXPSRXLXXSVTKXXXALPXRRPAXGVXSACYXNCXXG

SEQ ID NO: 205595 - protein, 63 aa, Zea mays
  Clone ID: MRT4577_119089C.1.pep
ISLFLEDATHTGHPKVGWFDKSQFMWAPVLVKIHGVSQRSANLKDQNASLIPIRSKRFWLSRQ

SEQ ID NO: 205596 - protein, 136 aa, Zea mays
  unsure (1)..(136): unsure at all Xaa locations
  Clone ID: MRT4577_11908C.1.pep
EPSNEFDKKNTADSSSALEHANTAIEFEGTSTSEXISKKTYMEQDNGKLHEPCAEDANALTESGSSINGRTNSGFSHGSSHAVLHEDQSSTGKTADPSFFAGLFNNGFKDLSLFNQPMDSVKVSITAHPISASTLK

SEQ ID NO: 205597 - protein, 84 aa, Zea mays
  Clone ID: MRT4577_119090C.1.pep
LGTSRPAGNERAWMCLRQYRSSASRMAEVELRASSPAHKEQLSPRVGNISPRDAAAHVVEILTSLSTSRTEPSPSPVDDCWGSG

SEQ ID NO: 205598 - protein, 77 aa, Zea mays
  Clone ID: MRT4577_119091C.1.pep
PTSSSLVSSTLAGCPFKTPKTPLAKTGTQKGPAYIHVCPSGMKQLNTAPPDRITAFTFDPCLRGRIKRSNPFYTKPV

SEQ ID NO: 205599 - protein, 81 aa, Zea mays
  Clone ID: MRT4577_119092C.1.pep
WQDSLQNQLSALLTIWSIYLVLPLYLSSVSLVFPQQRVLRGSLLLPDPPLNPCLFRLWGLSIPIGALESLTMASFDLGSIR

SEQ ID NO: 205600 - protein, 136 aa, Zea mays
  Clone ID: MRT4577_119093C.1.pep
MARTKQTARKSTGGKAPRKQLATKAARKSAPTTGGVKKPHRYRPGTVALREIRKYQKSTDLLIRKLPFQRLVREIAQDFKTDLRFQSHAVLALQEAAEAYLVGLFEDTNLCAIHAKRVTIMPKDIQLARRIRGERA

SEQ ID NO: 205601 - protein, 87 aa, Zea mays
  Clone ID: MRT4577_119094C.1.pep
LTLNQKKPLSNFPGLLWVWTSPKDEKDTGLREDQGEAEILLKLSAEVRLSIQWLQNFRENEGDGGEIQRENQIYRTNSKKRGKLILQ

SEQ ID NO: 205602 - protein, 82 aa, Zea mays
  Clone ID: MRT4577_119095C.1.pep
LVVADASSYLIIEPCTLPVLVFCMRIDYAAQWLPPVSLQNPCLELTGPARAVMMYGRVIFEASLYVKGATRSDDKELSLLAI

SEQ ID NO: 205603 - protein, 150 aa, Zea mays
  Clone ID: MRT4577_119096C.1.pep
MAGMTVGNKLALAAVLLCAAAAMATAQQASGVRATYNFYNPQQNNWDLNAVSAYCATWDASKPLSWRMKYGWTAFCGPAGPTGQAACGQCLLVTNTATGASITVRIVDQCSNGGLDLDYDTAFKPIDTNGQGFQAGHLTVNYQFVNCGDN

SEQ ID NO: 205604 - protein, 114 aa, Zea mays
  Clone ID: MRT4577_119097C.1.pep
EPENLHTILRVRANRERHTNQGGGVYRCIKCTGLWGGYKSWAKRSMETKTRTLGGGHKQERKDSDQYIPINLGKNKEQGEEKHATRRHLTDESASDQIQDHKDRRMVSGHAMKA

SEQ ID NO: 205605 - protein, 85 aa, Zea mays
  Clone ID: MRT4577_119098C.1.pep
HRRRGPRQGQHSLTGGLQAKGSTTQRATTTCQQNPRPSPSHRLKDHPAGRNRRERKCEGCWSGGYVLTPNTSSAPEDTPRAHPSA

SEQ ID NO: 205606 - protein, 79 aa, Zea mays
  Clone ID: MRT4577_119099C.1.pep
RGHGEHLPRRPRLLDAAHCSSPASCFLTMTASLPQCRQARLCAQVLLQPLPPPWTLLFPLRETLSCSVLSKSPSFASVR

SEQ ID NO: 205607 - protein, 328 aa, Zea mays
  Clone ID: MRT4577_11909C.1.pep
MPSFLVVAFFVLLCLGLNNLLALGDAGGGNDYSFVYSGFGGATGASLVLDGTATVTREGVLKLTNDEQANLKGHAFHPTPVQFRDSSSPNNGTNSARGFSATFVFAIISASTYWSSDGMAFVVSPGKDLSGASSAQYLGLLNSTSDGPGAAASNHVLAVELDTVMNVEFQDIDNNHVGVDVNTLSSVHSRAAAFYDDDTEGGGGGAWKNLTLSSGDAMQVWIDYDGEAKQLNVTLAPIATRGVKPSRPLLSNVTDLSAVLAAQASYVGFSAATGPIPSQHCVLAWSFAVDGPAPPIDFSKVPQLPDDTAGRREALVRELEIALPVAAF

SEQ ID NO: 205608 - protein, 84 aa, Zea mays
  Clone ID: MRT4577_1190C.1.pep
ISIIHGLTHTWPPIAEHKSTKKLFTSICLKIHIISIYISPGTDSKHQYETRFSQFRDGFHNDCFSTFPSSSHGRWPNGSRILAG

SEQ ID NO: 205609 - protein, 45 aa, Zea mays
  unsure (1)..(45): unsure at all Xaa locations
  Clone ID: MRT4577_119100C.1.pep
GTVGRARPPTXPPVRGKRARGKGVRQRDFVKGERTGRRDKPTRPR

SEQ ID NO: 205610 - protein, 106 aa, Zea mays
  Clone ID: MRT4577_119101C.1.pep
HSLLQTFTAGSAVFLQIAVHRPGSRQQAALEFVVPRARRDRRPPPRDPELQRAGTREHRTSAVRRAPRQEQGAGSTGGSPRLGARSRRPPHKEAGRTSESRASCRI

SEQ ID NO: 205611 - protein, 82 aa, Zea mays
  Clone ID: MRT4577_119102C.1.pep
GPIVVVERAFTSPELLNIRPSVRRAVYNSVKSWTRERNVIKYMDLVLPRCLLPPVIQINRVPVLYPVVALRLIRAPSALHEL

SEQ ID NO: 205612 - protein, 47 aa, Zea mays
  unsure (1)..(47): unsure at all Xaa locations
  Clone ID: MRT4577_119103C.1.pep
FEFSKTFISLFFFXXYVADDFITXSFFGLEPNIKLLLHQYSPGMCIS

SEQ ID NO: 205613 - protein, 210 aa, Zea mays
  Clone ID: MRT4577_119104C.1.pep
QGVVEYQELITQNPIFLERVEGVGFISGEEAVNWGLSGPMLRASGIQWDLRKIDPYESYNQFDWKVQWQKEGDSLARYLVRVGEMRESIKIIQQAVEKIPGGPYENLEARRFKKAKNPEWNDFEYRFLGKKPSPNFELSKQELYVRVEAPKGELGIYLVGDDSLFPWRWKIRPPGFINLQILPQLVKKMKLADIMTILGSIDIIMGEVDR

SEQ ID NO: 205614 - protein, 565 aa, Zea mays
  unsure (1)..(565): unsure at all Xaa locations
  Clone ID: MRT4577_119105C.1.pep
FSPPPPPLGARRQSTTCPPRRDVAQISSPPVAAGSAAGTGHLNRHYKACLAKLGKTQGGGTQTHLNFAADGTISTWVYNPQVARDEIAKFIVCEDLPIMLGESQNFKNLIQRAFCPQYQPVTRKTTKSDLIAIYKNKLAALKESFKKVQFSFALTSDIWTSSHQKTCYVSVVAHYLDDSYALNKRVIGFRMMDESHTGDAIANHILEVVRDFEIDGKILSITLDNASANTTAIDILTPRLQSYIQGYIIHHRCVCHIINLVVQAGITVANKYLNNIRAAIRFITSTPQMISRFAEYCKAQDMRPRKFGLDMKIRWNSTYHMLKSLEGYEQLITVFVNXPMEVKFLKYFEQISHVYCFATIFDPRKKLDGLQIALEGIGDALDMDFSDAFNHAKDDLFRVFGYYYKKYGESEIDSPAVEFGAEISDTSLTAHLWKRAKGKENVASSQRWNPNAELNHYLSTNFVGTDRALRGEKVKLLEWWRDHKYSFPVLSQFARDILVIPVSTVSSEATFSIVGRIIEERRSSLAPKTVEAITCLKDWNRAEERKQHQLEDPEIEFAAADLDID

SEQ ID NO: 205615 - protein, 208 aa, Zea mays
  unsure (1)..(208): unsure at all Xaa locations
  Clone ID: MRT4577_119106C.1.pep
MERVCENNFVPFIRSGEWSDIGGRDYMEDAHVCISDLAKNFGSNSADDEVISFYGVFDGHNGKDAAHYVRDNLPRVIVEDADFPLELEKVVKRSFVQTDSKFAEKFSHHKGLCSGTTALTAMIFGRSLLVANAGDCRAVLSRRGTAIEMSRDHRPCCMNERKRVESLXGYVDDGYLNGQLAVTRALGDWHLEGMKGTGRAGRGGGGKA

SEQ ID NO: 205616 - protein, 89 aa, Zea mays
  Clone ID: MRT4577_119107C.1.pep
MQHNDSCSGDSNGPTSTCKLLQLKENISKEIEKTELQIDSLEGELKSVNTEVVTTLESSPTGVTHTKNLSPSSGTSKVLEVPISVIHLI

SEQ ID NO: 205617 - protein, 64 aa, Zea mays
  Clone ID: MRT4577_119108C.1.pep
ARKRRVTLNSNDTETSPQPRARPKGIHIKTRALHYQACSLPWWISYNSQRCLNGLNGPSNPYKV

SEQ ID NO: 205618 - protein, 108 aa, Zea mays
  unsure (1)..(108): unsure at all Xaa locations
  Clone ID: MRT4577_119109C.1.pep
MAATSTAAAVLCRPSVAGLRQAPTPERTRVSIRAAPAPARRSVAAHAELSTALAIIQRQGVSLFLCRCVXFNIQSENMAKQVPAHNGRTHVESDDERAKEFAALHKSN

SEQ ID NO: 205619 - protein, 354 aa, Zea mays
  Clone ID: MRT4577_11910C.1.pep
MAEPEREQRPLLEVEQSVTSIPEDHEATCWGCGLRLVFAGYSPIYKCGWCGAITQSNQTTRKPDSVWFSHWRRVRDRFFVTVLILFMLFVICGGVWAVYPIVFKISNFCGIFHCMVTAVLAVFTITSYCLASSKSAGAPTNVRWGSYPLVGKRDLENYTFCTYCNKPKPPRAHHCRSCKMCVVDMDHHCPFIGNCVGASNHQVFVIFLISVVISCSYAAGMTIYASYQIWPSVDFPNLASSRHSMSFWKIWLEIITTVAGSAFFLSARGLVLVYLAFASLSVNAGIGVLLCQQLSYIYEGNTYLNHLSSPNALHGERGLHNIIRFFGCPYPISRVLLRYSNAGKLQDNSGSKLL

SEQ ID NO: 205620 - protein, 129 aa, Zea mays
  Clone ID: MRT4577_119110C.1.pep
LCGGGGRPPPLPPPERNSLLTFFAATLSGKHHMKDTRKAEKADQRQRQQLQQRQPADAEDPVAATTARSPSRRSSQTPSAAARGPMWATSRLRCGPLRAYPWSHAGHPYGQQQDSFRRAAPNFEHRAVR

SEQ ID NO: 205621 - protein, 92 aa, Zea mays
  Clone ID: MRT4577_119111C.1.pep
TEPNKKAKTGARHDREVYKQSTIKRQTIWHKRAHSNGTGITKGRGIFLRKDTQQHLNRGGSVQKRLNGGNKKKKKGGLQTPKCPLTKKKLSA

SEQ ID NO: 205622 - protein, 72 aa, Zea mays
  Clone ID: MRT4577_119112C.1.pep
CRCSRFFWSLSSPSGRGVGGHHYTPPPPKVFNVGRLGEQVGMHYVAGAPYLVLQHSVVLGLWEDHCVPPLVI

SEQ ID NO: 205623 - protein, 74 aa, Zea mays
  unsure (1)..(74): unsure at all Xaa locations
  Clone ID: MRT4577_119113C.1.pep
QHQPPPLSQLXDVRPCRLLXTQQQLLPFNRHGAPNAGTLLQLLQWLPFNHLVLTPPPPFNQKPIXGGALFRCLE

SEQ ID NO: 205624 - protein, 101 aa, Zea mays
  Clone ID: MRT4577_119114C.1.pep
LNTTTVFDLRKRCPPPWDARWPGGGQFPKRRKGNGTNARTHTGGSIQPKINNQKRSAGPDLDIHGYRVYFFFPRISSPPSFFPWGFLLDLDGQGFALPLLG

SEQ ID NO: 205625 - protein, 69 aa, Zea mays
  Clone ID: MRT4577_119115C.1.pep
LSPPSRESPSMSTSKVPTLWLPARYTVQFLSQGNGNGSARQVCAGKPVYPFKPNTEMLFGTKCIINILV

SEQ ID NO: 205626 - protein, 49 aa, Zea mays
  Clone ID: MRT4577_119116C.1.pep
ASDNWKRFKYLAHWIGYKARNVHTVGYYQYTDWNLYCQEKLFIMRCEVR

SEQ ID NO: 205627 - protein, 106 aa, Zea mays
  Clone ID: MRT4577_119117C.1.pep
MVNVPKTRRTYCKGKECKKHTQHKVTQYKAGKASLFAQGKRRYDRKQSGYGGQTKPVFHKRAKTTKKVVLRLECTACKTKAQLALKRCKHFELGGDKKTKGAALVF

SEQ ID NO: 205628 - protein, 256 aa, Zea mays
  unsure (1)..(256): unsure at all Xaa locations
  Clone ID: MRT4577_119118C.1.pep
MRPSLLVLAVIGAQACQRERAFHHHSHPHVKRQASFPPTLTPHEEILLNSFDALSISEWSYYYTHGAHLAGQNKSMAQWTADRWSDYGFTSRLDEYYVFLNYPVSNSLKLTYNNGSTYTPSLKEAVLEEDPTTSYLNSVPVFHGYSFTGNASAEYIYVGRGQQVDFDRLIELGVELEGKIALAKYGGPFRGLKVKNAQDHGMIGAVIFTDPGDDGNMTEAXGVAPYPHGGARNPTTVQRGSVQFLSTYPXDPTTPG

SEQ ID NO: 205629 - protein, 88 aa, Zea mays
  Clone ID: MRT4577_119119C.1.pep
CCKSNAYDRLPTGNRAVTSSQIYVTELVLEVLPGFALYVGCEDVVGDGTAYQEVPVVIVLPFLLQVPIVLSLNGAEARLGVGVPASGR

SEQ ID NO: 205630 - protein, 98 aa, Zea mays
  Clone ID: MRT4577_11911C.1.pep
LTSVYSLTIVPNQEGETLQQAEDLTETANWQYLRGTELQSRRVLLVAPQAQASWHGDGGDERGEEAGGQHEEWLLGVETRVMKSLEHSNPPPPHLQNG

SEQ ID NO: 205631 - protein, 131 aa, Zea mays
  Clone ID: MRT4577_119120C.1.pep
SLLQMENGREITEQSQLRGYSYFACLMSAASPRHRHRRAAFSLVVPSRLSFVNLQNLCSFFSPSFGTFLLPPCIQRSVIFAGPPCPKCPAFGCASFAFDSNRSQKLPEQTRLFGQCDPNYLDFLARRFPDH

SEQ ID NO: 205632 - protein, 183 aa, Zea mays
  unsure (1)..(183): unsure at all Xaa locations
  Clone ID: MRT4577_119121C.1.pep
MAEQDGDAGQIPPDSVPVVGVGDQNTNQHQPFFSMCQPLRTVSYSNSWDGTCVAAANENDHTGISGTLDREDDSCSRHSINKEVSLVQGVMKMEQSMDGVDVPHGGASEQPEPLGTQQPDSFDEVDLWDVQDNKQALPLNSNQCNFNIGETCDAEDMHXPLSAFYRRQPXCVGAGLSNMGNTC

SEQ ID NO: 205633 - protein, 113 aa, Zea mays
  unsure (1)..(113): unsure at all Xaa locations
  Clone ID: MRT4577_119122C.1.pep
IAYHPRLYISSLSAPAAPPPPDPSTGIALSDSXEHHFESKARAGASKTYPQQAGAVRXNGFIVLKNRGGAVVAVSPSPTGPHGPALCPFAALDLFPGPKLVDSVASSPPLRPS

SEQ ID NO: 205634 - protein, 72 aa, Zea mays
  Clone ID: MRT4577_119123C.1.pep
GKKTMGQGKTVLEMLAPAQTGIFAAQAGGQINNPNLRPTYESGFLLVGLNSFVVRAPQNKQTNQPTLDVFLK

SEQ ID NO: 205635 - protein, 108 aa, Zea mays
  Clone ID: MRT4577_119124C.1.pep
AGVAVSLGVRTIPVEHNAQLQGVFDSPLRLDYFSIGRLVGACLVMSQVGERGMCSRQFSWVCVRVISVRKLLVVGQFIEFRPRYKRRLLSHGCGRKIGSCRTVANDIG

SEQ ID NO: 205636 - protein, 72 aa, Zea mays
  Clone ID: MRT4577_119125C.1.pep
LYLFFQAVKGESLSSGGGDKNETRALAESRAGPREESGEPPTSSNALLRCGHVRRQLQVGGRETLIPTLQQK

SEQ ID NO: 205637 - protein, 60 aa, Zea mays
  Clone ID: MRT4577_119126C.1.pep
SVRSVDRTIAPCTFARSDPGISVRPVSPRVLTIVFVALRVHVTVLWFQYRTEVSQRSLSR

SEQ ID NO: 205638 - protein, 71 aa, Zea mays
  Clone ID: MRT4577_119127C.1.pep
TLEKKTKEYGSPERCMPATPMRTHVISGPKYVKPCLEVRYMTARIIASYHVTYQLALRNDKELNMLFRAVT

SEQ ID NO: 205639 - protein, 292 aa, Zea mays
  unsure (1)..(292): unsure at all Xaa locations
  Clone ID: MRT4577_119128C.1.pep
RLAENHARSARSTRGISLSRPPGRLGERQPPAXSQGQAMVESSGHRSTVPAAVGFFRVPGLFVRLSGKGGASNAVDPEDSVWSPTSPLDLKHVIRCSPPRACLGLADALTADGTGSLHSGGRSSFVDSIKPFLERALPKAACGKEAAAAASSSAGVVAATLGKQASEYADCEEYTCVISRGADPRTTHILAGETVEVRRGDVGGGCRKVVFIIEPLALSDRQPRASSSSSPAAPARVVASGRCCCCMKRLLEDRDIFIYLGEKAFCSDECRNGFIEEAAEEELMILDPARNL

SEQ ID NO: 205640 - protein, 37 aa, Zea mays
  Clone ID: MRT4577_119129C.1.pep
SIHMQPPNLNKKQNSFSLITAQPLIIFLGESAENQGG

SEQ ID NO: 205641 - protein, 120 aa, Zea mays
  Clone ID: MRT4577_11912C.1.pep
MVLSADDKTNIKNCWGKIGGHGGEYGEEALQRMFAAFPTTKTYFSHIDVSPGSAQVKAHGKKVADALAKAADHVEDLPGALSTLSDLHAHKLRVDPVNFKFLSHCLLVTLASHHPGDFTP

SEQ ID NO: 205642 - protein, 61 aa, Zea mays
  Clone ID: MRT4577_119130C.1.pep
QCIEIQIRVYRFRPEPGLSCEWEYSGGVKVSCTRNESSGYPNSTLFYRKATLALILNIAGH

SEQ ID NO: 205643 - protein, 81 aa, Zea mays
  Clone ID: MRT4577_119131C.1.pep
QSRTRSKTVSSRLYFFFLLFPHPGVATMFQRSRVTNRIPCLVRAMSQDHFNPQHQQADEREVMVEQQQPRRAPKLRYLDIA

SEQ ID NO: 205644 - protein, 114 aa, Zea mays
  unsure (1)..(114): unsure at all Xaa locations
  Clone ID: MRT4577_119132C.1.pep
PTRPATRHGIDKDTLDHVAAYTLXLLQRGICSSMARIMFSSSRQSEVEATHCINPRQQGPNQSDLSVSKARSLHKTCLQTXAAXPDSVNAAYDPQTMHAKANSLTQLSMYTSDR

SEQ ID NO: 205645 - protein, 331 aa, Zea mays
  unsure (1)..(331): unsure at all Xaa locations
  Clone ID: MRT4577_119133C.1.pep
VIGWTSGKDVPVYYDYSXFMPAGTGDKRLWIALHPSVSMKPEFYDAVLNGLEIFKMSDSSGNLAGPNPDPSRMLEEAEMGVTQGQFKAKQSNLQAMVIGGAAGGAAAFGIVAAICVVAYHSKKRRALGNSVSHSSGWLPVYGGNSHTNASKSSGGKSAALNPNITAMCRHFSFQEIKAATKNFDESLVIGVGGFGKVYRGIVYGDTKVAIKRSNPSSEQGVLEFQTEIEIPRPLRHKHLVSLIGCCEDDGEMVLVYDYMAHGTLREHLYKSGKPALTWRQRLEITIGAARGLHYLHTGAKYTIIHRDVKTTKILVDENXVAKVCDFDLSKT

SEQ ID NO: 205646 - protein, 195 aa, Zea mays
  Clone ID: MRT4577_119134C.1.pep
VRKKKKKKKKKRGGGGKKKKKKKKKKKKKKKKKKKKKKRGGGFLGFQFSILRSCRLASFFFSGPPVGGTLAPSLSNLPGWEIPWSFPFFHPFAALPPFPLFGVFPKGPGPCPFPFFPLFECFLGRALSRFFFLLGWGFCPLLARFPFHFPGPWPFFFFLFFFRSCPGFSPLPFYLGSPFWFPVWVFAAPGPQNPD

SEQ ID NO: 205647 - protein, 133 aa, Zea mays
  unsure (1)..(133): unsure at all Xaa locations
  Clone ID: MRT4577_119135C.1.pep
AISQQQRPRQGARAPASATXAXXXPQGAXXPKGKKTRGHPPXTPRGXEHPXEQAXRRQQANAASXRQQPXAQRQQQXEAQQTXQTXATQQQQQXRPARSHQARXNPAANXQQQXQAXNPXAPAKRXANQPQQQ

SEQ ID NO: 205648 - protein, 58 aa, Zea mays
  unsure (1)..(58): unsure at all Xaa locations
  Clone ID: MRT4577_119136C.1.pep
PSVHWCRSKRSWIYIIXIVSQPATFCRVEAFKDGLRDHYXCXXFRTRGTXAIGCHSMK

SEQ ID NO: 205649 - protein, 474 aa, Zea mays
  Clone ID: MRT4577_119137C.1.pep
MEKKAATTEEPLLAPRSEHTVAAEAKRLLSLAGPLVASCILQNVVQLVSVMFVGHLGELPLAGASLASSLANVTGFSLLVGMASALDTLCGQAFGARQYGLLGLYKQRAMLVLALACVPIAAVWANAGRILILLGQDRDIAAEAGAYSRWLILSLVPYVPLACHVRFLQTQSIVVPVMASSGATALGHVLVCWALVFKAGMGSKGAALSGAISYSVNLAMLALYVRLSSACKRTWTGFSTEAFRDLLRFTELAVPSAMMVCLEWWSFELLVLLSGLLPNPKLETSVLSICLNTGALLFMVPYGLCTAISTRVSNELGAGEPQAARLAARVVMCIALSAGLLLGSTMILLRSFWGYMYSNEPEVVTYIARMMPVLAISFFTDGLHSCLSGVLTGCGRQKIGARVNLGAYYLAGIPMAVLLAFVLHLNGMGLWLGIVCGSLTKLVLLMWITLRINWEKEATNAKETVFSSSLPVAL

SEQ ID NO: 205650 - protein, 50 aa, Zea mays
  unsure (1)..(50): unsure at all Xaa locations
  Clone ID: MRT4577_119138C.1.pep
WARTLRFDREXGHTKCIADENKVSAMGGGKDHIGRPDPRXPEATLPELHR

SEQ ID NO: 205651 - protein, 457 aa, Zea mays
  Clone ID: MRT4577_119139C.1.pep
MAAADPETAAALRGEVAALRMRVQELEAENQRLARIASTCTCGFKEGSVGSITAHHNVKFHQNSTMEKDLSSPFDHTVISNANEMQCNRNADDNGLPEDSSKHTKRTGRKVGILSHCPKRLVALKVMYFGQRFYGFSSEGNIEPTVESEIFKALERAKLMVANRKESCYSRCGRTDKGVSATGQVISLYLRSNIKDVGGDMLDERSEIDYVKVLNRILPRDIRVLGWCPVPADFHARFTCLSREYKYLFWKGDLDILEMQKAASKFIGEHDFRNFCKMDAANVSNYRRHITEFTISACDRRSNNDELCSMTIKGSAFLWHQVRCMVAVLFLIGQGLESPSVVDSLLDIMKTSRKPQYKMAPELPLILQSCLFDKANFMCSADASRSLTEHLNDEYRHHMLQAEIFHIASSCLPFPEPNSSETPQKKRNHIPLLSRETEPSYEERISKVKAKLADNLK

SEQ ID NO: 205652 - protein, 333 aa, Zea mays
  Clone ID: MRT4577_11913C.1.pep
MSNLGMPTTSDVNKCKEYIVLATPQAKSQMEQFKKAHALFLQATSQVLARLQQVDLAEIIAYEHTTDNHATSTTTSPLIVDLEKLLHTQALIIQKASQLTSSYQQVLASRNVTRNETTDEQKDAHQQTNDLGTCCCCEYYGIPCRQISTNESETTKQKNRILFSGIKSQWSSQEQLIADALSDDELLGFPKRKHHKDAQLQKEANECYIDGWTITCTQFQSRRRIRSKKQKWKHGKSQKITSRKACYLCGREDHYLRNCSEKSSLPNTSEIKLSQSPDMGYEPKCTETSINIVKNDKRNRKMFGYMSSPPQPQAKAPKTLGYSNRRIKPDSAI

SEQ ID NO: 205653 - protein, 83 aa, Zea mays
  unsure (1)..(83): unsure at all Xaa locations
  Clone ID: MRT4577_119140C.1.pep
HASADAWANFSDQYDMQYVSFMGTNHHAQPVLLGCGLLAGRSLGAYVWLFGTWLRCMNAKPPHSIITNYCHDVAIXIKKVFPN

SEQ ID NO: 205654 - protein, 284 aa, Zea mays
  unsure (1)..(284): unsure at all Xaa locations
  Clone ID: MRT4577_119141C.1.pep
MEKDLSSPFDHTVISNANEMQCNRNADDNGLPEDSSKHTKRTGRKVGILSHCPKRLVALKVMYFGQRFYGFSSEGNIEPTVESEIFKALXERAELMVANRKESCYSRCGRTDKGVSATGQVISLYLRSNIKDVGGDMLDERGGTLLRCIPXSVVDTKECSDMSNDMICFLNDSLXAKGKPRSSPIKXFCLLHLNDXVIVRLFLSPEIDYVKVLNRILPRDIRVLGWCPVPADFHARFTCLSREYKYLFWKGDLDILEMQKAASKFIGEHDFRNFCKMDAANVQQ

SEQ ID NO: 205655 - protein, 119 aa, Zea mays
  unsure (1)..(119): unsure at all Xaa locations
  Clone ID: MRT4577_119142C.1.pep
MCSPTFGLVCASSIRLEGMYLSQKVNKVNGKAPLWRGXTCCVGHQGKRIGYPSRRSRFSVWPTLFSFSSRLGSCSLLSFPTRSTRDTTLTSIRASSSCASFTAPDQVSPPALSCSSADP

SEQ ID NO: 205656 - protein, 148 aa, Zea mays
  unsure (1)..(148): unsure at all Xaa locations
  Clone ID: MRT4577_119143C.1.pep
LYPEDPFEKAQTKLWIERFSAIASAFYRLVYEENSDDVNAELLNTFYKELGNYETELIKRGTKYFAGTKPGIFDYAVWPWFERFGILKSIVGEKXNLDDRFPTLAKWAHVTREDLAVQKHLLSTYTHTQFSLGRRAGTPHYDLLVEDS

SEQ ID NO: 205657 - protein, 65 aa, Zea mays
  Clone ID: MRT4577_119144C.1.pep
HDCHLPWAGPPRGPPARTPTQGGLILSQEATTHSEATDQAQKGPPLRIYKTGAFQNARTMNICSK

SEQ ID NO: 205658 - protein, 140 aa, Zea mays
  unsure (1)..(140): unsure at all Xaa locations
  Clone ID: MRT4577_119145C.1.pep
KTKEDFKNFDEGPKMEAPAMALYCFLKGDENRGENIKGSAPPPGRECEFLTPQPVEIHVCENFTHQQFVMEPGTGSTADASKDGKKNLGYVASXKKGDPLGQAPTEAKFSGIKGSGRAIKQNPPGILPNGLDPQQTTFGL

SEQ ID NO: 205659 - protein, 115 aa, Zea mays
  unsure (1)..(115): unsure at all Xaa locations
  Clone ID: MRT4577_119146C.1.pep
MAAKXLGILMLLALSPCVANATIFPQYSQAPIAALLSPYLSLMTTSVCXNPSLLPYMLLQAMATSNXPLSPLFFQQLSALYLVQSSAQTITAQXQLHILVLPLNSQLXLANLFPY

SEQ ID NO: 205660 - protein, 459 aa, Zea mays
  unsure (1)..(459): unsure at all Xaa locations
  Clone ID: MRT4577_119147C.1.pep
MAKALLYSSLLPGLPRAVGSSRSAAARLLLLPPLRLRRGRRAASACAVRAGLHGLDSVGGPHLQAALERAEAALYTLADAAVAAADAAAGAGDDAGQAAAAVQKNGGWFGFISEALEVVLKVLKDGLSAVHVPYSYGFAIILLTIIVKAATLPLTKKQVESTMAMQNLQPQLKAIQQRYAGNQERIQLETARLYRQAGVNPLAGCFPTLATIPVWIGLYQALSNVANEGLLTEGFFWIPSLGGPTTIAARQSGAGISWLFPFVDGHPPLGWYDTICYLVLPVLLVASQYVSMEIMKPPQSDDPSQKNTLLVLKFLPFMIGYFSLSVPSGLSIYWFTNNVLSTAQQVWLRKMGGAKPVVSEGDRRIITAGRAKRSNAQPAGERFRQLKEEESMRKVNKALAAGDSNASSSTYDMEDEESDDETTEXREGPWXASSTGSDKKPPSYSGKKGKRSKRKRMVQ

SEQ ID NO: 205661 - protein, 68 aa, Zea mays
  Clone ID: MRT4577_119148C.1.pep
ASLFPLVNKIAPCYENFSVFCKKIKQLILIWLTVSCRSRWSFHMRNCPISLGNKVKNVKHRLLLLCSS

SEQ ID NO: 205662 - protein, 37 aa, Zea mays
  Clone ID: MRT4577_119149C.1.pep
AVCFCWSRSAFIWSMIACIFACCVFLVAPLCRLSSSQ

SEQ ID NO: 205663 - protein, 96 aa, Zea mays
  unsure (1)..(96): unsure at all Xaa locations
  Clone ID: MRT4577_11914C.1.pep
KKTPAAKKNNAEGQKVEAAVEETKKSTHVPRKLKKRKKGGTLDPHIKEQFASGRLLEXIFSPPGKCGQVNGYTLEGKKFEFYMKKLQRKKGKSLVV

SEQ ID NO: 205664 - protein, 65 aa, Zea mays
  unsure (1)..(65): unsure at all Xaa locations
  Clone ID: MRT4577_119150C.1.pep
MADQLTDFLIAECKEAFSLFDKDGDGCITTKELGTVMRSLXQNPTEAELQDMNNEAQADGNSTID

SEQ ID NO: 205665 - protein, 64 aa, Zea mays
  Clone ID: MRT4577_119151C.1.pep
FFVFISPVQQYNAERKGKKKSMALIRAFGYQQASLHRTPIKTKVCSLHTEDTTHTPVLIYTTTL

SEQ ID NO: 205666 - protein, 69 aa, Zea mays
  Clone ID: MRT4577_119152C.1.pep
VPKKFLQFAGIKNVKTQTGGSSKTPGKFVKATFNALINTFGFLTPDLWKETGFLPIPNQEFSDFLKDNV

SEQ ID NO: 205667 - protein, 99 aa, Zea mays
  unsure (1)..(99): unsure at all Xaa locations
  Clone ID: MRT4577_119153C.1.pep
MAARRGLEWDGDQQGAVLPTPGPLCAPVVCLLSSGGDLDPGAFAGFLVGYXKRWITNHGTKARLSIDGSSANTFAALAGVQSFIMCLLRTLRWKDDMNN

SEQ ID NO: 205668 - protein, 362 aa, Zea mays
  Clone ID: MRT4577_119154C.1.pep
MGSEDMLVEIHPRELRFLVEVKKQSSCCIHLVNKSDQYIAFKVKTTSPKKYCVRPNIGVILPLASRDFTVTMQALKNVPPDLQTKDKFLVQTTVVPFGTADEDIVPAFFSKETDQYIEEKKLKVVTVSVSEPQVEKLINGVPHAKETAGVTVAEQTLDSVNEAPNVVNEVRHSLKASFPSLSGTPATFNENSSSVNECPTILQEFLVPSKQASFALSESASNLQESSVASIETLFSSTEASVDLKESPPLEYTPAPSEVPSLSDKESTNADNVYIPQVTKDFQNLQMKLNNLEVKLDEAKTLIVKLREANRTTILERDKLQKEMVFLKRAEAAARSQSIGFPLLFVIYVAVVGILLGYLLHL

SEQ ID NO: 205669 - protein, 37 aa, Zea mays
  Clone ID: MRT4577_119155C.1.pep
MQAYSPLKSRPFNLLIMFYFPSFLFFFFLFCFFRTYF

SEQ ID NO: 205670 - protein, 106 aa, Zea mays
  unsure (1)..(106): unsure at all Xaa locations
  Clone ID: MRT4577_119156C.1.pep
GPSAXXKAAGXQASRRQXPPRARXPPXPPRPXXXTAXAPPAPPPPRPASGARPGXPGRGGGXPRERPRAVRGRGEDEGHSAGEESVGPEGAEEQGRHRAPLGRASL

SEQ ID NO: 205671 - protein, 112 aa, Zea mays
  Clone ID: MRT4577_119157C.1.pep
RPGPKRDPLSARLLVELLHPGPRARASRAAPAPPRPSSRFLRGGFLFFPINCLLRQYPSTNCLQLGDMVKTPRSPVTTAGGNDKASKCGCDIDNGEAGPSLVVVEQQALATL

SEQ ID NO: 205672 - protein, 53 aa, Zea mays
  unsure (1)..(53): unsure at all Xaa locations
  Clone ID: MRT4577_119158C.1.pep
FPRTVVDGGRPVGKGTKGLTEQEEEGIRSCRHCXXLRSSHWLAALGXDSRELL

SEQ ID NO: 205673 - protein, 38 aa, Zea mays
  Clone ID: MRT4577_119159C.1.pep
IGEGLERGIDGQERQPGASAHGRARGGFLPSNSSSCRI

SEQ ID NO: 205674 - protein, 153 aa, Zea mays
  unsure (1)..(153): unsure at all Xaa locations
  Clone ID: MRT4577_11915C.1.pep
KLYIMPGAVRTDMNDNMRLKNKAGLKTTTTXDTRRIHSSSDLEIVFTAIPDIHEDSIFXTIVVIQLHNPXAGASIPANTXVVTAILQTSSLMELLTSDIMQLGPDNLDMLKSVPEIFLTLVTGAEATAQDDDDVPELVLRDTFDDRCTTRSLN

SEQ ID NO: 205675 - protein, 378 aa, Zea mays
  Clone ID: MRT4577_119160C.1.pep
MKIVHRDLVRNGPGSVKLVPEEEDDLWHAYNLIAIGDSLQAVTVRKVLREVASGGRDAERVKLKLEIVVESVDYDKEGSVLRVRGKNITENDHVKIGQFHTLELELKRPFVLRKEIWDWLALETIQQACDPAASADLAVILMQEGLAHLFLIGKSITATRARIETSIPRKHGPAIAGYETALKKFFEYVLQAFLKHIDFEVVQCTVIASPGFTKDQFRDYLFLEAARRDLRVIIENKQRLVLAHATSGYKHSLKEVLDTPGVMALIKDTKAAQEVRALQDFFNMLTNESARACYGPKHVEFALQQFAIQTLLITDTLFRNADIATRQRYVKLVEDVKKNSGTVHIFSSMHVSGEQLAQLTGIAAILRFPLPELEDMEL

SEQ ID NO: 205676 - protein, 61 aa, Zea mays
  unsure (1)..(61): unsure at all Xaa locations
  Clone ID: MRT4577_119161C.1.pep
KGKEACPFYQLLPPPPPFMIHGQGRPQVYALCRINKKNDVDRTKTCASIRLXIVISSKFHL

SEQ ID NO: 205677 - protein, 158 aa, Zea mays
  unsure (1)..(158): unsure at all Xaa locations
  Clone ID: MRT4577_119162C.1.pep
MGLPAICHWSCCRGWKFTLLESMRKRCTFLEHAVEAMNLSNVDVVCDRAEKVGQSLDFRESYDIVAARAVAELKVLAEYCIPLVRIGGLFIAAKGHDPHEEVRNAEGAIKKLGASMLELCNVESMGPHGQRTAVLYVKERATPXKYPRLPGTPSKAPL

SEQ ID NO: 205678 - protein, 195 aa, Zea mays
  unsure (1)..(195): unsure at all Xaa locations
  Clone ID: MRT4577_119163C.1.pep
KKGLFFIWIKKRGSFFLQLNHPPHTKTGTKRVVQPNLCYKSTNNPNFHRTKKGPGPDQPEHTQVMFLYHTPHDQRTRETLGAGAEETQMEKGSWEQVKNFWKKLKPGGGGKTKGLFHIFPVGRGGKGPNIRVGGRPFPESHPPXKQKRQKIAPMPPAFMGRGRHKGRSPHRGQKKTAHACLGAWKRKAISLKKGG

SEQ ID NO: 205679 - protein, 118 aa, Zea mays
  unsure (1)..(118): unsure at all Xaa locations
  Clone ID: MRT4577_119164C.1.pep
TRNAGMGFSEKSDLTCMDCSTQEHTILKHQNDYYLTEDDSXPILIDLYDNHAGVDILKSTPGFQKDILTLVIYKKFYCXNRIGSGHLTLMELXPGNITNTLMHADVXKDTHKGFRYFS

SEQ ID NO: 205680 - protein, 115 aa, Zea mays
  unsure (1)..(115): unsure at all Xaa locations
  Clone ID: MRT4577_119165C.1.pep
GRKSPGSPDENHRLRDPNTQSQKPDXEDLSPTLSSVHKASTHLPKGSSGVVGGLGDRRTTFVRSSPIGKPWRCSTVSQTKNRVSIGVTVPPDPFQRCDRILVFKVCVGQTCAAYS

SEQ ID NO: 205681 - protein, 69 aa, Zea mays
  Clone ID: MRT4577_119166C.1.pep
NDDKLRTDCFIYSPQVDYSARTFLMYMATCGLSARPLAPHVARHVPGRHRAPRLPGGRRPRHARVPPVA

SEQ ID NO: 205682 - protein, 52 aa, Zea mays
  Clone ID: MRT4577_119167C.1.pep
AQALLIFFTHAISLWSLSPAAQAVDFFSRWSYLLHVNKIFHTFSLCSYPSDA

SEQ ID NO: 205683 - protein, 90 aa, Zea mays
  unsure (1)..(90): unsure at all Xaa locations
  Clone ID: MRT4577_119168C.1.pep
MSSRKTSEPKEENITLGPTVREREFVFGVAHVGASFNDTFIHVTHSSARETLVRFTGGMQAQAXRDESSPSAAMLAASDVAQRRAELGLT

SEQ ID NO: 205684 - protein, 92 aa, Zea mays
  unsure (1)..(92): unsure at all Xaa locations
  Clone ID: MRT4577_119169C.1.pep
MTLIDGEDFQHILRKLNTNVXDRKQKIMFDMTSMKGVGRRFCNIACKKADIDMNKRAGELTPDELERLMTDEANPRQIKVPDWFLNMKKAYK

SEQ ID NO: 205685 - protein, 68 aa, Zea mays
  Clone ID: MRT4577_11916C.1.pep
LPPASPTIFSYAKSCRNSNRPLSSRADTSWVFSFSTLMLSADAAAASPLPTPIVYTFQSSLPVSTTAV

SEQ ID NO: 205686 - protein, 56 aa, Zea mays
  unsure (1)..(56): unsure at all Xaa locations
  Clone ID: MRT4577_119170C.1.pep
MPKGTATCIDVILANILAPVGDFFDDGCSVEFWICVILTFLGXLPGVIYDDCSITK

SEQ ID NO: 205687 - protein, 61 aa, Zea mays
  Clone ID: MRT4577_119171C.1.pep
SNSLYKSSTKNISWHRLLDHLFKLMDRYWEKLHDTREKVPGWGSLIPRPTWDWQSNWPPPP

SEQ ID NO: 205688 - protein, 437 aa, Zea mays
  Clone ID: MRT4577_119172C.1.pep
MAQWQDVSRSMDVQELEAVDDCFGAITAARCFLPYKGEETSKGFAIFQVSKIEHSPSSRIHHLLGFTIKVSSPAADRDNHIFNLKSVRPRETSVCTSSQMDRSWINSRLFSNKYLAGVDEFMKFVEERFPDAEEILCPCRQCLNQLSKHKSEVEDHLYINGMASTYTTWIHHGEPLWINENADHLDEQPSLNEDASMNEYEQDNPDDRLPDMVHELFTSEEGTGKSMFAVVLDEMKQTLHPGSPFTKFSFVVRLLHIKSFYRISNVAFNAILKLLSLSFPQCSLPASYNEAKKLIRVLGLGYESIHDYAKKDECPVCEESRWKDGEGKNKSPQKEAQWHKLKRKVVENELNHPADGKAWKDFDKQHGWFAEDPRNIRLGLATDGFNPFGKMSSSYSMWPVFVIPYNFPPWVCVEQSNFMMCLLIPGKECPGKDFDVF

SEQ ID NO: 205689 - protein, 799 aa, Zea mays
  Clone ID: MRT4577_119173C.1.pep
MAASPDQFRGHARLPHFAAPLRYDLRLRPDLAACTFTGAAAIAVVVSAPTRFLVLNAAELDVDRASIRFQGLAPTDVAQFDEDEIMVISFDRELPFGEGVLTMDFTGTLNDQMRGFYRSKYVYNGESRNMAVTQFEAADARRCFPCWDDPAFKAKFKLTLEVPSDLVALSNMPVAKETVSGLTKTVYYEESPLMSTYLVAIVVGIFDYIESSTSEGTKVRVYTQVGKTNQGKFALDVAVKSLDLYKDYFATPYPLPKLDMIAIPDFSAGAMENYGLVTYRDTALLYDELLSSASNKQQVAITVAHELAHQWFGNLVTMEWWTHLWLNEGFASWVSYLAVESLFPEWNNWTQFLDETTSGLRLDALAESHPIEVEVNHASEIDAIFDSISYDKGASVIRMLQSYLGAECFQKALASYIKKYAYSNAKTEDLWVVLEEESGEPVKDLMTTWTKQQGYPVIYAKINGHDLELEQAQFLSDGSSGPGMWIVPVTACCGSYDAQKKFLLKDKMDKINIKEFSDSQSADGEKNQIIWIKLNIDQTGFYRVKYDDELAAGLVNAIKAKKLSLMDKIGIVEDSYALSVACKQTLTSLLRLLNAYNDESDYTVLSHVTSVCLSISKITVDATPDLNKDIKQLLINLLLPAVIKLGWDPKDGESHLDVMLRSLLLTALVRLGHNETINEGVRRFHIFFEDGKTSLLPPDTRKAAYLAVMRTVSTSSRSGFDALLKIYREASEPQEKSRVLGSLSSSPDQDIVLEALNFMFTDEVRNQDSFYILGGISLEGREIAWTWLKENWDHVEMAW

SEQ ID NO: 205690 - protein, 412 aa, Zea mays
  unsure (1)..(412): unsure at all Xaa locations
  Clone ID: MRT4577_119174C.1.pep
MAASPDQFRGHARLPHFAAPLRYDLRLRPDLAACTFTGAAAIAVVVSAPTRFLVLNAAELDVDRASIRFQDLAPTDVAQFDEDEIMVISFDRELPFGEGVLTMDFTGTLNDQMRGFYRSKYVYNGESRNMAVTQFEAADARRCFPCXXDDPAFKAKFKLTLEVPSDLVALSNMPVAKETVSGLTKTIYYEESPLMSTYLVAIVVGIFDYIESSTSEGTKVRVYTQVGKTNQGKFALDVAVKSLDLYKDYFATPYPLPKLDMIAIPDFSAGAMENYGLVTYRDTALLYDELLSSASNKQQVSYLAVESLFPEWNNWTQFLDETTSGLRLDALAESHPIEVEVNHASEIDAIFDSISYDKGASVIRMLQSYLGAECFQPGVASLGLAGQGLAAAGLDTVGPWQSQHCSTMPFCA

SEQ ID NO: 205691 - protein, 117 aa, Zea mays
  unsure (1)..(117): unsure at all Xaa locations
  Clone ID: MRT4577_119175C.1.pep
GRKARVAYLSDVSRILPRTEHAISKSGTATGQGQLDLLILETNRLHGAGDGRSCHLTLSQSLXLDAVKRIRPKRALLIGMNHEFEHHRENQLLARWSCRERIPVQLAHDGLRVFIDL

SEQ ID NO: 205692 - protein, 88 aa, Zea mays
  Clone ID: MRT4577_119176C.1.pep
PSSDHIDGSCCLLLPHMIVEKACGSGKRGTHDVAAGAEHIAAYLGMMIYIPKREGKKKAHKAKTNYYEAARSLFRWMRAGLRRLSGDE

SEQ ID NO: 205693 - protein, 501 aa, Zea mays
  Clone ID: MRT4577_119177C.1.pep
MERNGGREREGDDGLEWGAACMARTPRGATGEAGRGSDTWRGGGSTRGRAAWRRGEDDPAGRCHREGTGRKGVAHVDKCGCSQTEEAHGRMEEHRAHVRSYVSVDTRRRSTVASLTLMQPNRGAHNRMEKHRKALASYIKKYAYSNAKTEDLWVVLEEESGEPVKDLMTTWTKQQGYPVIYAKINGHDLELEQAQFLSDGSSGPGMWIVPVTACCGSYDAQKKFLLKDKMDKINIKEFSDSQSADGEKNQIIWIKLNIDQTGFYRVKYDDELAAGLVNAIKAKKLSLMDKIGIVEDSYALSVACKQTLTSLLRLLNAYNDESDYTVLSHVTSVCLSISKITVDATPDLNKDIKQLLINLLLPAVIKLGWDPKDGESHLDVMLRSLLLTALVRLGHNETINEGVRRFHIFFEDGKTSLLPPDTRKAAYLAVMRTVSTSSRSGFDALLKIYREASEPQEKSRVLGSLSSSPDQDIVLEALNFMFTDELSYCKIIPNTVFKSAP

SEQ ID NO: 205694 - protein, 122 aa, Zea mays
  Clone ID: MRT4577_119178C.1.pep
LVVQEYYIVTVALYITKIIKPITCMHGVLMLIIYIVLLLLLRVEALHAGVAGDLERLHVRRPLALLSGRRRAASSSCLLCRMWRRWPNADGQAQVQLRVVRGAAGRRRPRGVEEGSVQRRGC

SEQ ID NO: 205695 - protein, 41 aa, Zea mays
  Clone ID: MRT4577_119179C.1.pep
MAAAASAITAASAPCASPHLLIPPVVAAEGTSRDLLIPPAL

SEQ ID NO: 205696 - protein, 80 aa, Zea mays
  unsure (1)..(80): unsure at all Xaa locations
  Clone ID: MRT4577_11917C.1.pep
GRPRGAGHVLAPAXQCIIWYTLLLFLFKFRAARTLIADQFPDTTAAMWRQRRRQGNSHGCPRRYAAERLGRQRSARGILV

SEQ ID NO: 205697 - protein, 169 aa, Zea mays
  Clone ID: MRT4577_119180C.1.pep
MEPQHGEKELQLLLLPTTTPLNAAFLHAPRPAAASSPSDHPQLDLSLSISIGPPTPHAAEQAGRGRTATAAEQSKRAADVQALKQQAAEQARMASAERAYAERVKELARRELELAEREFARARAIWERARGEVEKVGRVKAMAARRIAAGASAAALEITCHACMQRFHP

SEQ ID NO: 205698 - protein, 173 aa, Zea mays
  Clone ID: MRT4577_119181C.1.pep
SKETVPSAAGDSDPWGKKVFSADGDSDPWGKKAISSAVEVWNTSATQKEGSSGNAWDKQAGVGGSDAAGSSWDRAVVNKESEKSDNWGEACRVMDMGTGADTDPWGSKVKAVDMEGPNSWEKATMPPDNKLEDVSQGWNQHKGNSTEDQAKDNVSKDEDNAIRTYRIQTTFSC

SEQ ID NO: 205699 - protein, 227 aa, Zea mays
  unsure (1)..(227): unsure at all Xaa locations
  Clone ID: MRT4577_119182C.1.pep
GDFWLYYTAYFXGATVGLVYSNNLGQIAQALHQQSQLTMLLAVYSSCSFFGRLLSALPNLPHRMVSLARTGWLAAALVPMPMAFFLMWKQQDVGALVAGTAMVGLSSGFIFAAAVSVTSELFGPNSIGVNHNILITNIPLGSLLYGQIAAMVYDANGQRMTLMDNRTGIIDTMIVCMGVKCYSTTFLVWGCITLLGLVSSVVLFIRTKPAYAAAGRSSCKHLHQVSS

SEQ ID NO: 205700 - protein, 68 aa, Zea mays
  unsure (1)..(68): unsure at all Xaa locations
  Clone ID: MRT4577_119183C.1.pep
MGLVKAGVDMEEGTLEIGMEYRTVSXCGPTLVILDKVQGPKYQDXVNIRLGAGTXRRGQVLEVDGEKL

SEQ ID NO: 205701 - protein, 47 aa, Zea mays
  Clone ID: MRT4577_119184C.1.pep
NSYSSETSKLVDILAFIMRLLVLTPLWLKDQGMSIEYASSLELGQAP

SEQ ID NO: 205702 - protein, 93 aa, Zea mays
  Clone ID: MRT4577_119185C.1.pep
LAPRVNYLYQVLTLTAMLPGQGGPLSPYQLWGKRGGVKGAPPPPGWFPLDQTLFFSGTGFYGQGSPPGTLIPRGDGCCWGPAPQMWLGGKCFG

SEQ ID NO: 205703 - protein, 83 aa, Zea mays
  Clone ID: MRT4577_119186C.1.pep
ISPPFFNLQAQGAKFLMAPSALSGCQMAPPLVKAFLRVWFPRPPMVGTFFKGVQEKPGFEWIFNHKNFFNLVIMVNNRFLGGS

SEQ ID NO: 205704 - protein, 119 aa, Zea mays
  Clone ID: MRT4577_119187C.1.pep
MVSVVARATVVTSVIEVSSSSYSSGRDAKWWCRGRLQRGHRGTAPHRLYLLLRRGRRALLLQLLSSTLLLLMQAVVQPVQMARLTSHWTTKRTLREMRRQERNDRLPCSVSKTSHRRVS

SEQ ID NO: 205705 - protein, 50 aa, Zea mays
  Clone ID: MRT4577_119188C.1.pep
PPAELGGRLFGSRRGAAHPFVLPVGGAVSIFILCPHQFFFFFYDRSIDKM

SEQ ID NO: 205706 - protein, 113 aa, Zea mays
  Clone ID: MRT4577_119189C.1.pep
IIFLLSNKHWSTHHFLYIYMVTDSWHDSQSTWLGRVTAETHTLHILDGASAPQSTQILGRNLTRKVHHKQSVRRSMAAPTWHRRFIIYEYIVRELTDVTCAEIDWHRAQLQQV

SEQ ID NO: 205707 - protein, 192 aa, Zea mays
  unsure (1)..(192): unsure at all Xaa locations
  Clone ID: MRT4577_11918C.1.pep
ISTNDLYAMNLRFLAADTLQKLVVLARLAACSSLPXQCIIWYTLLLFLFKFCAARTLIVDQFPDTTAAIASLHVDPDVLSLXGGRAEMEAEVAEDDRLHVTVRWLSVSQRSRGLTQRQSNFDERSALAQSSRPAAVVELGRLPCLGGQWPAGLHRWWLRWRQRGRQGNSHGCPRRDAAERLGRQRSVRGILV

SEQ ID NO: 205708 - protein, 122 aa, Zea mays
  unsure (1)..(122): unsure at all Xaa locations
  Clone ID: MRT4577_119190C.1.pep
KLXTXEGVMLSFELLGLFLTVILLLEHQYQPPNLKKGGHVSRLSYIYMLLMGKREVNVFLTREVIQSYELAGPAACTACSRRRMTVRNKPSNSKDSITSQHWVQGGIDERQALKFTPELQIR

SEQ ID NO: 205709 - protein, 79 aa, Zea mays
  Clone ID: MRT4577_119191C.1.pep
MVVALLTAGAAAGALSHPTSEDPAAKTPASIALAYGFKGLSAFLSEAQLTTHLDSIESKENGKLDSREEGICRAVDRIS

SEQ ID NO: 205710 - protein, 322 aa, Zea mays
  Clone ID: MRT4577_119192C.1.pep
MGAPALSSVVVVATAAVVCLCGAFARAQDMDSEWARPAYRGFFGAPAGSLLPQSDVDLLEFPLNLEYLETEFFCWSALGYGLDAIDANLTGGGPPSIGGQSASLTPFIRDVATQFCYQEVGHLRAIKQTVRGFPRPLLDISAANFGKIIEQALNATLDPPFDPYENSLNFLVASYIIPYVGLTGYVGANPRLLTPQARKLLAGLLAVESAQDAVIRTLLYERGMARVPSYAGGVAEITARISDLRNSLGRRGVKDEGLVVAPELGPEGLTVGNIIAGDHLSLAYDRTPEEILGIVYGTGNSAQHGGFFPQGADGRIARGLLA

SEQ ID NO: 205711 - protein, 117 aa, Zea mays
  Clone ID: MRT4577_119193C.1.pep
MASSNQFDLLGDVENDDPAHLLAAAEKKAAAVPKPAPAPAKLPTKPPPPAQPVREERNYGAPPRDGPGRGRGGRGGRTGPRRDFGDADAHGFEGGRQGGGGGFGDGGVARGENGEGR

SEQ ID NO: 205712 - protein, 34 aa, Zea mays
  Clone ID: MRT4577_119194C.1.pep
DKIGNIREVYLVLCWPPPLNFFTPPDLELLWFNT

SEQ ID NO: 205713 - protein, 172 aa, Zea mays
  Clone ID: MRT4577_119195C.1.pep
LHPFGWDFARELSLFRSATAKSAKLAAFFNAEQTARSLLHKHQIQQLGHASLLRVAHVPFNGNGRNYRAAFEMLEDILNSAHPLHRAVQEDSYKLVCIDDSAAREIGEMVHSEAFWIEVDAVHSLVKLIFDMVKEMEADRPLVGQCLPLWEELRSKVKDWCEKFNTDEGAAL

SEQ ID NO: 205714 - protein, 71 aa, Zea mays
  Clone ID: MRT4577_119196C.1.pep
QQKTKDQINGPPKRTGFNPEGGIQQGLQHLKDPKHKGPTIIGGGAPPNLNFQARKGLHMKPTEGGLIPTLK

SEQ ID NO: 205715 - protein, 447 aa, Zea mays
  Clone ID: MRT4577_119197C.1.pep
EDEGGIQRAERSGRHPRAHTYAQAHTPTKQSRSRARRRAPPPRTRPDAPRGGHGPGRAGARPRPGLAATLAARPAPEALGPATTAGTSAPALVTTTAASGAASAGLPRVAEAPEYRNGDGCPAAGTDAGVCDPGLVHIAMTLDAHYLRGSMAAIYSLLKHASCPESIFFHFLAAEAGAVDGADPEPELLRRAVAASFPSLRFEIYPFRAEAVAGLISASVRAALEAPLNYARNHLADLLPRCVPRAIYLDSDVLAVDDVRRLWETRLPAAAVVAAPEYCHANFSRYFTEAFWDDPVLGARVFAGRRRAPCYFNTGVMVIDLRRWRVGNYRQRIERWMEMQKEKRIYELGSLPPFLLVFAGEIEAVDHRWNQHGLGGDNVFGSCRPLHNGPVSLMHWSGKGKPWDRLDAGKPCPLDHTWKSYDLYIGENDSSPASGPSRSALSSLVAW

SEQ ID NO: 205716 - protein, 93 aa, Zea mays
  unsure (1)..(93): unsure at all Xaa locations
  Clone ID: MRT4577_119198C.1.pep
PHTNSSLTTTEYSPNFNTTSTPSHNCTRIKIFYLNIKGNYHQYLAXIKSYSYTKHSSYSTINPYKNAHDIALSYSTTTHPIKPSPSLNILNFY

SEQ ID NO: 205717 - protein, 85 aa, Zea mays
  unsure (1)..(85): unsure at all Xaa locations
  Clone ID: MRT4577_119199C.1.pep
GSDPYPAAGVITSVVCDSRLKRCKGNERGKDLREVXTHPAGARTRDGRAAAAVADRRRAAAPGPGPEPEPGRRRSPPPCRCPTRQ

SEQ ID NO: 205718 - protein, 281 aa, Zea mays
  unsure (1)..(281): unsure at all Xaa locations
  Clone ID: MRT4577_11919C.1.pep
MRKLAALMLILGGALGVSARVPCAGAAAAAACRSASITSLPSTFSSSTSSPTHQQLSQVAEYVAAPAEASAPVSMASISVPDPVPSATEDAENIRKAAVQGWGPDKKALMEILGHRTAAQRAEIAAAYAGRCNESLLDRLHSVLSGDFRSAMMLWTADPAARDAKLAHKAMKKKGERYVWVLIEVACASTPDHLVAVRKAYRESYPASLEEDVAACPLYKDPRVKQFLVRLVSSYRYSGDLVDDELARAEAAELHDAVVARKQLLHXQVVRIVSSRSKQQL

SEQ ID NO: 205719 - protein, 82 aa, Zea mays
  Clone ID: MRT4577_1191C.1.pep
TRGGFCYLFNPPNGQCLTFWTAGGHQWCRRCLRTTANGGCTIRPLPPYRCSTFFLNFCKGCCKTPVPFDFLSPYFRFLFLAF

SEQ ID NO: 205720 - protein, 49 aa, Zea mays
  Clone ID: MRT4577_119200C.1.pep
GTVSSISRPSERRYGLGILGYLKRMNTVAAGHGTICRVLSHECKTPSSP

SEQ ID NO: 205721 - protein, 42 aa, Zea mays
  Clone ID: MRT4577_119201C.1.pep
WQAAPFDISAPMFLIFPAGYNAKGAIIFIQLLSWEKTPRFVY

SEQ ID NO: 205722 - protein, 212 aa, Zea mays
  Clone ID: MRT4577_119202C.1.pep
MKRFAVQESEMARMLVLMSRSHGQDQALPLSACLAGGQQGEDRQAPERVFVCKTCNRVFPSFQALGGHRASHKKPRLDGDGGGDPSLAKPKLHGCSVCGLEFAIGQALGGHMRRHRAMTGGVPAVPPATTRIVVDEKPDGDVVGIIRHDHVHDHGGVKQPRGGLWLDLNYPPCDDGRDAVEAECGRNAAAATGITFHQFLDTATMAVDCLGY

SEQ ID NO: 205723 - protein, 175 aa, Zea mays
  unsure (1)..(175): unsure at all Xaa locations
  Clone ID: MRT4577_119203C.1.pep
YYELIGLTRDSLICLNACHFPFVFAGIACSSSDAILQMTVPHHCDPRRVQDFLGRGAXRIQYFNPLVMDVSKHAKTMLRYTXTXVSEYLPITVLRDFDIVRAKLIISAYGIVIXKNEXGYSSCWLSKNMVSRMGXNYLAYVXHERTIYFSHTTWTNYPXTSLYAGLTDRSIRYYD

SEQ ID NO: 205724 - protein, 53 aa, Zea mays
  Clone ID: MRT4577_119204C.1.pep
QGITSQFNSPWPPLKEAIVEKLFNWPSKEHNFRPKHFVFYKGRHPVKLKLLGA

SEQ ID NO: 205725 - protein, 117 aa, Zea mays
  Clone ID: MRT4577_119205C.1.pep
LLIGEVEQVVDVVEEVCALLVQETAVPSSSLVGESEACVSFDECEQRSSVSRYPACELLSVFTGQRSVYTRRAWTGVRLLVNTEKEDRFAVLSLSTSARPVSLSIAVEYLVVIVDRL

SEQ ID NO: 205726 - protein, 109 aa, Zea mays
  Clone ID: MRT4577_119206C.1.pep
MQYKNVGHVASVNISGYVVALSIEFSFLVTFTNNCITFIFVDFQVKNLLSVSADDEVPIKSVTIRKIPRVLEEMPLYDILNEFQKGHSHMAVVIRKNNPVTNQLNKLLM

SEQ ID NO: 205727 - protein, 111 aa, Zea mays
  Clone ID: MRT4577_119207C.1.pep
GGLSTPLHCQTTSGSSAGCGTARPEHTSSSLSTSSTHSHATTLHYPIQHPITNDVSHFETLWAAWYVLYCLNHALDQHTLAHTLDTHHQPLMNIYWRPILRLILCRTYIAY

SEQ ID NO: 205728 - protein, 69 aa, Zea mays
  unsure (1)..(69): unsure at all Xaa locations
  Clone ID: MRT4577_119208C.1.pep
KHSNLISNGHFKKHWQNYPKTSFNQSYLKQRRLILLQKKAVIIFPRPTAXHFTLIAQCHNIXYNMKSMP

SEQ ID NO: 205729 - protein, 121 aa, Zea mays
  Clone ID: MRT4577_119209C.1.pep
GFLLFFTGGFPRWPLLLVALQACTLFLMRFPYGPRGVQQVTLLFSPFFGSRQKYCWLPVGPYPKLGSSLVEIWGPVRPAFKLSMLPPASNQVCSVPPSIPCCLGWFLFWTIGFYPFKRPNL

SEQ ID NO: 205730 - protein, 206 aa, Zea mays
  unsure (1)..(206): unsure at all Xaa locations
  Clone ID: MRT4577_11920C.1.pep
HLYTLLLXLSKFHAARTLIADQFLDTTAAIASLHVDPNVLSLXGGRSEMEPEVAEDGRLHVTVRLLSASHRLLLMATPLPSNLTGAEIYSMSLSRQHSPQGSNFNHADFFAMVDGAPPTPATGARASSFGAAELYSMHSSRGPTQRQSNFDERSALVQSSRPRPLWSSGASPVSEVSGLQAFTGGGAGGVNVDAKEIRMVVPTEMP

SEQ ID NO: 205731 - protein, 33 aa, Zea mays
  Clone ID: MRT4577_119210C.1.pep
LYATGRGLGVASPAILSPFLDSDLTTLCRVHGT

SEQ ID NO: 205732 - protein, 106 aa, Zea mays
  Clone ID: MRT4577_119211C.1.pep
TKKTRGGGPPPVGGMGPLRGARKPPCFPLSGGAHPGGGFWPVPWDHFPLPKGGPPLIMVSTKQGGSLFTLYPCFLGGGVLPQGKKGKPFFDWGLGPSEFAHPICFR

SEQ ID NO: 205733 - protein, 103 aa, Zea mays
  Clone ID: MRT4577_119212C.1.pep
VDKVYLAAPSKIAIIDHEKKRTFVVTKEGLPDAVVWNPWDKKAKAMQDFGDAEYKSMLCVEPASVERPITLKPGEEWKGRLVLSAVPSSYCSGQLDPLKVLQG

SEQ ID NO: 205734 - protein, 297 aa, Zea mays
  unsure (1)..(297): unsure at all Xaa locations
  Clone ID: MRT4577_119213C.1.pep
RLLRGRLRRSPGSGSVQWFIGDDDDKPQKRADKAAAPHGRVVREGVEFYSNGDCYEGEFHQGRRSGSPVXPLVRVGKGKYEGDWVDGKYDGYGIESWARGSRYRGQYRQGLRHGHGVYRFYSGDCYAGEWAGGQSHGIGAQTCSDGSSYVGEFKCGVKHGIGSYHFRNGDRYAGEYFGDKIHGFGVYSFANGHCYEGSWHEGKKQGFGMYTFRNGDKRSGDWDSGTLKTPLPPADPSVQRAVQAAQRAAENAFRLPRVDEQVHRAVMAANRAATAARVAAIKAVQNRMDGKFCETYV

SEQ ID NO: 205735 - protein, 59 aa, Zea mays
  unsure (1)..(59): unsure at all Xaa locations
  Clone ID: MRT4577_119214C.1.pep
PVLRLAILASVVXSHALISGTFAVXISRTXSLSCFPRVKVVLTSEGIHGQVYIPEIHWM

SEQ ID NO: 205736 - protein, 94 aa, Zea mays
  Clone ID: MRT4577_119215C.1.pep
LIHTLCAIVVASPHTSVAVVSSVDKVLVELLKEGSVVKVFELDKRIVVFVEVFEVVPIYAAVVVLLLVHTKLGVVIELVIVHIFFDLMDEEPSF

SEQ ID NO: 205737 - protein, 35 aa, Zea mays
  Clone ID: MRT4577_119216C.1.pep
DAAVCRNRPILLFYPSTPQAYSDNSGRWEQTKTKT

SEQ ID NO: 205738 - protein, 112 aa, Zea mays
  Clone ID: MRT4577_119217C.1.pep
KKTGQQPRAPPVQTLPVKHPFPSRFFFLFKNPPLPPKNGLIPPQQTRGLGVEFFFFGGAPVKNWVPLPKTLPCVRVCKISANFLLGGPIGSFLKPNGRAYCPWVGAAFPYTI

SEQ ID NO: 205739 - protein, 62 aa, Zea mays
  Clone ID: MRT4577_119218C.1.pep
VRQTWVIQRHTFNYTAEGAWKLSDAMIKEMMCIFERAKDIRRTFYSNESSFAKDSAALIIFQ

SEQ ID NO: 205740 - protein, 68 aa, Zea mays
  Clone ID: MRT4577_119219C.1.pep
KKMLLFFFFYNFFLIFLFFNFFLIFSLFFSNHLFSLYIIPFHFNGSFRSLLTLPPMVMGDKQLFMSCR

SEQ ID NO: 205741 - protein, 95 aa, Zea mays
  unsure (1)..(95): unsure at all Xaa locations
  Clone ID: MRT4577_11921C.1.pep
GLISYSKYSNVLHSFYDKLDRDFVDIRTKTRIFFQREDYLNKIRHLRGKYALTEIYKITLXTTQLLRDDNFAQNAFTRYDKICPFYIYFCMMRNI

SEQ ID NO: 205742 - protein, 60 aa, Zea mays
  Clone ID: MRT4577_119220C.1.pep
LGQKFSPTTAPTRLRSPPMGPTKRIYFCRQGELLDFNFLGFQKTPLFCFSNPPENKLKTP

SEQ ID NO: 205743 - protein, 58 aa, Zea mays
  Clone ID: MRT4577_119221C.1.pep
ILVLMKKKKKKKKKKKKKKKKKKKKKKKRGGGGNYGEKAKNWILGESIDFLGPLWALI

SEQ ID NO: 205744 - protein, 82 aa, Zea mays
  Clone ID: MRT4577_119222C.1.pep
LINRLNYISSYKLSNNNVACIVIVKLQKRQHLHQVFLYNLLYLKSSVLGDEGAAINLLYHPSYLYFLTDLLKEAPFLTIPAL

SEQ ID NO: 205745 - protein, 67 aa, Zea mays
  Clone ID: MRT4577_119223C.1.pep
RGHYLAAPPDLEIVGLIGGGPPFFFFFFFFFFFKLNFSRPCHIIAAEVYPVWQFNFSSDSFPARGYK

SEQ ID NO: 205746 - protein, 93 aa, Zea mays
  Clone ID: MRT4577_119224C.1.pep
MAAAEEENRSNDGGQARATSNETLEKAYANNGENQDTKDNTDRETGRTRGTGNATNYTENTKHDANENKNGKEPDGRNKTRNQEQTRGGGGGS

SEQ ID NO: 205747 - protein, 1595 aa, Zea mays
  Clone ID: MRT4577_119225C.1.pep
MAAPAADDASASPGYVLRSTLEGHRRAVSTVKFSPDGRLLASASADKLLRVWSSSDLTPVAELEGHGEGVSDLSFSPDGRLLASASDDRTVRIWDLAVGGGARLVKTLTGHTNYAFCVSFSPHGNVLASGSFDETVRVWEVRSGKCLRVLPAHSEPVTAVDFDREGDMIVSGSYDGLCRVWDSATGHCVKTLIDDESPPVSFAKFSPNGKFILAATLDSTLELILAAIKNIIQFHQRNKRGLKRLWNFSAGKFLKTYTGHVNTKYCIPAAFSITNSKYIVSGSEDKCVYLWDLQSRRIVQKLEGHTDTVIAVSCHPKENMIASGALDNDKTVKVWQLGDDISELKCSVELFLGGWDHNSSVSASRRERATRRLRAPSRRERAFPLRLSIPVTRRTTLLVAASSRPPSSGGVQSRAAESIGDLGRSSGGSEYPSAALGMRSDFRHLSIHASLTVAPLPESNTRNLEHWEFEADDRTGSFHDLQGKIWTGWMPGVEIAQTFSSGGDFSPAGNRVTAQFEKAPLGDTWGRSHPNLHPTVVDSSCPNDLVGSRTLPHLAAFVSRMWLLPTDYVSLYGGGWHRLPFRPPSVLEEWPRLGAKGLRMMDPKQRSQGWDRRGPRDQQVTPPWGRNRNLSWRLSPPLGRGGPKVILPGSSTSGEIESAGIPNPIAPSSLTEIDSGRKLFCQKCGDEGHHARDCSKNLWCEICRKDTHVTTKCVWPKQTKPTMPIVGMAADGLGFYMMQFAKSQLKKPKPNALGLVKILEGGVSAEELVKDFDFHFPWGRVWKATKCQVGYIMQFPSQERLDEMVQFPELKMKMSGVKISVVPWISSATAKARLHTIWVVAENVPEELRNFQAICELGSALGAVEEVDLKALEMQNCVRFKVHVKSISMIPPVLEVGEGWNEESGNLGKRASVDTQHRGWWEKGKNGKKIRKETDEEKHVFLQTKNSQAGTDFDKTVISLEDDKVKIRSSVSEGLVEGSDYDDDKVNLEDSEEDLLSSQELEALAKSVGVDISTPQEEVDDKKEDAVTKKYNQAENEKKGKQKVGEQAEGPRRSPRLETSEEMNVTEKAISRVAAKDAFLSKDSELIDIANILNVDLGKNSREAESSLCHIKSLELVRSNMIIQDGKRGESVTVAPSSEKKGGGKGLRKQGKIEFLKELICDEKVDFIGLQETMKKNFSQSWLDAISGGKKFIWIHSIPRGRSGGLLVGFNSDCFDVREQENSLIELNLVDRLYTWSNNRDDPTFEKLDRFLVSPEWDLTYHDTCVRGLNRTFSDHVPLCLSSGTRIYNKRDFKYELCWKHRPDFGQIVKECWSKPVRSSSSLEIWKEKEKIVYEARLRNIVIEEETKDDHVIQGEDNINALATNFYRNLFGTSDDTHISMSNVDMARLGEEDKSFLTSPFSIHEIHNVVKSMKHNSAPGPDGLPAEFYQDFWEVISFDLYHMFEDFHKGVLPIERLNYESFSIHIPDMLTQSTASQRRFCLLNVSYKIITKTLNNRLASCITKVISNSQSGFLKERYILDSVVALHEILHEVKKEKQNGIMFRVDFKKVYDKADWQFFYQMLHKEGFGEKKFCCVIKTDSGGKVDVVTNVTFVP

SEQ ID NO: 205748 - protein, 115 aa, Zea mays
  Clone ID: MRT4577_119226C.1.pep
SRVRPRVRSVVKISVVPWISSATAKARLHTIWVVAENVPEELRNFQAICELGSALGAVEEVDLKALEMQNCVRFKVHVKSISMIPPVLEVGVKPYLFDIFFKIDGVEEKVGMKEW

SEQ ID NO: 205749 - protein, 127 aa, Zea mays
  Clone ID: MRT4577_119227C.1.pep
TVDLIRVRRYNAEWALTEQLDVISGHFDDIEDEYLRERKADIEQVVERVLKALAGAPSASQALGGAAGGKDDMIVVAHDIAPADMMQFKNQAFRAFVTDLGGRTSHTGIVARSLGIPGSVGVHHASA

SEQ ID NO: 205750 - protein, 267 aa, Zea mays
  unsure (1)..(267): unsure at all Xaa locations
  Clone ID: MRT4577_119228C.1.pep
VWSSSDLVAELEGHGEGVSDLSFXXDXXXXXXXXXDRTVRIWDLAVGGGARLVKTLTGHTNYAFCVSFSPHGNVLASGSFDETVRVWEVRSGKCLRVLPAHSEPVTAVDFDREGDMIVSGSYDGLCRVWDSATGHCVKTLIDDESPPVSFAKFSPNGKFILAATLDSTLRLWNFSAGKFLKTYTGHVNTKYCIPAAFSITNSKYIVSGSEDKCVYLWDLQSRRIVQKLEGHTDTVIAVSCHPKENMIASGALDNDKTVKVWVQKEED

SEQ ID NO: 205751 - protein, 37 aa, Zea mays
  Clone ID: MRT4577_119229C.1.pep
VYANSPGSSLSHSCSAGVRHRAASRLGHRTLLDDFKK

SEQ ID NO: 205752 - protein, 66 aa, Zea mays
  unsure (1)..(66): unsure at all Xaa locations
  Clone ID: MRT4577_11922C.1.pep
ERLLKEFLNFEGGLGKXVVAFGISVWKPSFXVIPXNFIISIITKKXVITKIYYNXFFKIKXFYFKK

SEQ ID NO: 205753 - protein, 230 aa, Zea mays
  Clone ID: MRT4577_119230C.1.pep
MDWHAWLSGARLEPALVYEYALVFARNELEADDVAFLDHEFLHSMGISVAKHRLEILKLAWRDRRSRGRAGARPAAAALARILLGRVARYVRSLVRREGDCSSTALVLVPPTTQPQRHPGDGRSPPCVGVGVGVGGVCVSKHSQQRRGGKALRRARSEPKGTPPRASSVVGGRAAAAVHAVGDDVEGGSGSEMVRWDRLFQDLKPTDTPSSSACRWDDGGRNHQRSECYV

SEQ ID NO: 205754 - protein, 135 aa, Zea mays
  unsure (1)..(135): unsure at all Xaa locations
  Clone ID: MRT4577_119231C.1.pep
PYFAYLGDPQPETLALCLFQPNTDPPDTGSVLTNTIFDALRDPDEDGATVENARAFVWGLVSHLRSLAGTLRAPGKYDDDLKPGKASERAXFGLFETSLTETYQTGLSRNGSAGLIPATAQAPITSAPALKPTPG

SEQ ID NO: 205755 - protein, 112 aa, Zea mays
  Clone ID: MRT4577_119232C.1.pep
TCHRGTFKRVNSNTMGADTSATQVGTKVGVIMGIKVSCGKKLSDNNTPKHKSRNLKGQSRGRTKSERTDINGRFLTGKFAVPKPLMKPALINETTLGERALVHWALYRFLAH

SEQ ID NO: 205756 - protein, 87 aa, Zea mays
  Clone ID: MRT4577_119233C.1.pep
LLLTLLLFSTTTSPQLLLIFNIYNHIIIIHYYIIYTFNNHPITYFTSSHNPYFSNYTISQFNHILIIKPTPHNTLINFPFKTYSISL

SEQ ID NO: 205757 - protein, 65 aa, Zea mays
  Clone ID: MRT4577_119234C.1.pep
RRMKHTLHTTSLPSLRGQATSPNPPHQSQVPRKQRAPKAAADQCTTHVGSTTCSTSITYRSRSGT

SEQ ID NO: 205758 - protein, 241 aa, Zea mays
  unsure (1)..(241): unsure at all Xaa locations
  Clone ID: MRT4577_119235C.1.pep
MGRQPCCDKVGLKKGPWSAEEDEKLVTFLLTNGQCCWRAVPKLAGLLRCGKSCRLRWTNYLRPDLKRGLLSSEEETTVIDLHAQLGNRWSKIASHLPGRTDNEIKNHWNTHIKKKLRKMGIDPATHKPLHPQPAAPPPTQQEQDTGGSPEEEGEKADAVMMAAATPIIGHETAPFFTDEEEMLAHLLDDIDDFPPAAYSPDDXFFALLLLLRVPVVSLGLRRHSAVVERSWWKQRRRRRAA

SEQ ID NO: 205759 - protein, 93 aa, Zea mays
  unsure (1)..(93): unsure at all Xaa locations
  Clone ID: MRT4577_119236C.1.pep
CSLKHHEFSWAGRLQSLGISLLLRPQERXGSSRRMHXYPFWXKPLSSPPPLLAPLVFTLFFSXLLLNRSIQPLYKCFSCSLIFLSPFSFIFSC

SEQ ID NO: 205760 - protein, 430 aa, Zea mays
  Clone ID: MRT4577_119237C.1.pep
MHRSFLLVSALVAAALWADTTVAAAQSQSQSQSQRSWAELSGRDNWDGLLDPLDGDLRRAVIRYGELAQATSDAFIGDPASPYAGASRYAPGAFLRRAQAPDPDAYNVTRFLYATSSARVPGQFITRPAPPGAWSAESNWMGYVAVATDAGVARLGRRDIVVAWRGTKRAVEWANDLDITLVPAAGVVGPGPGWSQPAVHRGFLSVYASRNSTSRFNKKSACMQVLAEIRRLLDAYKGENCSITLTGHSLGAALSTLTAIDIVANGLNVRGPNNDTVPVAAIVFGSPRVGDDQFKKAFDSAPGARLLRVRNAPDVVPTVLPNAFYKDVGVELLLDTRKSPHLKRPGPGPAAWHNLECYLHGVAGTQGAGDAAGFSLEVDRDVALVNKEVDALSDDYPVPAAWWVEGNKGMTRDASGRWVLQDHEEGNLAM

SEQ ID NO: 205761 - protein, 231 aa, Zea mays
  Clone ID: MRT4577_119238C.1.pep
APKGQKTHWVMHEYRLEGAYAYHFLPSSTRDEWVIARVFQKPGEVPPAARKHRLGALSSTTGTAAGDSCFSDSTSASIGGASSSSTPGPLFASAAAAVANAGAADGDTSSYCGGAANHGNLVTGRELVPCFSTATINGPLVAAALGIGQPYNAAPLPFEQQPPPPAFLPSLRSLQDNLQLPPFLSAGGLGGGGALHWLPAGGMEVKVEGRSAPPQMAVGPGQLDGAFGWSF

SEQ ID NO: 205762 - protein, 65 aa, Zea mays
  Clone ID: MRT4577_119239C.1.pep
SPSYGASRIYCTPRMSIVVINTKSCPPPDNACHHVARQSSVQRLRLVSSQLPVNSDELCSASAGN

SEQ ID NO: 205763 - protein, 182 aa, Zea mays
  unsure (1)..(182): unsure at all Xaa locations
  Clone ID: MRT4577_11923C.1.pep
ISRFLAADTAEAGRPREAGRVLKPALQCIIWYTLLLFLFKFCAARTLIVDQFPDTTAAIASLHVXPDVLSLXGGRAEMEAEVAEDDRLHVTVRWLSVSQRSRGLTQRQSNFDERSALAQSSRPAAVVELGRLPCLGGQRPAGLHRWWLRWRQRGRQGNSHGCPRRDAAERLGRQRSARGILV

SEQ ID NO: 205764 - protein, 158 aa, Zea mays
  unsure (1)..(158): unsure at all Xaa locations
  Clone ID: MRT4577_119240C.1.pep
RGPIILGGKNFFPKAPHFFFGPPNGNPKISPNKPLGGGPPPPVSFYRGGAKKDFRGGGKKTPGPPWGPGXPLGGQIKTGPPXQGRAFNPPGGGKKKFHSPQSPPFGTFGEPEIPGKHFPQRGQGGQKNKIPSPPKKAPPPGEKAWGNPPPGAFINQPG

SEQ ID NO: 205765 - protein, 46 aa, Zea mays
  Clone ID: MRT4577_119241C.1.pep
QPEGKKLPRTFCQLILDPIFKVFDAIMNFKIEETAKLIEKLDITQP

SEQ ID NO: 205766 - protein, 45 aa, Zea mays
  unsure (1)..(45): unsure at all Xaa locations
  Clone ID: MRT4577_119242C.1.pep
MVLIPSALMTEQMMPAVGGLYQEXFQLPSCRSSPCGVSAALPPYY

SEQ ID NO: 205767 - protein, 89 aa, Zea mays
  Clone ID: MRT4577_119243C.1.pep
PLFTPSPLLHPGRHDFSTVVLDCKPGYLHLILYDCTQQYRHTTNLSQLTSSNSFLHLELKIQSLRCLAAQLNNTLDDVSFEILLALDLV

SEQ ID NO: 205768 - protein, 46 aa, Zea mays
  Clone ID: MRT4577_119244C.1.pep
DTCIQLGCLVCMLVYVICLVLGFSAYPPEHICKKCNNIRVADATSI

SEQ ID NO: 205769 - protein, 86 aa, Zea mays
  Clone ID: MRT4577_119245C.1.pep
GTFGLIYVLVLSIYFALRCIRNADLVTVVILITASAFARGTGYPALTSEAGKWSSVCSVSFSIAIASATLPFVEVKWVLETIEYTC

SEQ ID NO: 205770 - protein, 64 aa, Zea mays
  unsure (1)..(64): unsure at all Xaa locations
  Clone ID: MRT4577_119246C.1.pep
CRCGFYLHPAEGSPAPNITQGKLSAPRILRIHKVANYVXEKLVLDKPLDGGSDAFMGLSSAHHS

SEQ ID NO: 205771 - protein, 83 aa, Zea mays
  Clone ID: MRT4577_119247C.1.pep
DLTGHETVRIPSVALVFADGATVHLHPSGVLYTWSNVSQTCLAFLPNPDDTSLGVLGNTQQRTLAVIYDVDNQKVGFGANGCA

SEQ ID NO: 205772 - protein, 421 aa, Zea mays
  Clone ID: MRT4577_119248C.1.pep
SALVDSAQPSRSLSTPLGPSGEAGGEARRREATGFHGVRRAVSAERVRSSTPLSSLAHSPPPRSQRQAAGEARRREAMDFKGFWESRFGGKKEPEPEQNGHANGVQNQKRTSDLAVYEQFEQQARQTQVRAAAIRDGDADVIQKPLLPSFESAEMRNLAETLLRDIIRGSPDVKWESIKGLENAKRLLKEAVVMPIKYPKYFTGLLSPWKGILLFGPPGTGKTMLAKAVATECKTTFFNISASSIVSKWRGDPEKLVKVLFELARHHAPSTIFLDEIDAIISQRGEARSEHEASRRLKTELLIQMDGLTKTNDLVFLLPATTSKLEIPYDILVEKTEGYSGSDIRLVCKETAMQPLRRLMSVLEASDELVPEEELPEVGPLKPDDIELALRNTRPSAHLHAHRYEKFNQDYGSHVVCSELA

SEQ ID NO: 205773 - protein, 102 aa, Zea mays
  unsure (1)..(102): unsure at all Xaa locations
  Clone ID: MRT4577_119249C.1.pep
MAGEKHFKYVILGGGVSAGYAAREFAKQGFIFGELVLFEKKGDYPSXXXXQXXXXPTNAARRPGXKXXXGSXGEKPPPERXPEKGTEXNPXTERXKXXXXTK

SEQ ID NO: 205774 - protein, 87 aa, Zea mays
  Clone ID: MRT4577_11924C.1.pep
TRDFRDRVRSSSVLILHDLRRCSTDHPWHHSSPSSLKTTYLPRSLFYSRRCGYQRASPLLRLLGARSSASSALVKAWHRLSCAFSYL

SEQ ID NO: 205775 - protein, 421 aa, Zea mays
  Clone ID: MRT4577_119250C.1.pep
MIVSAARVRSSTPLSSLAPSPPPRSQRQAAGEARRREAMDFKGFWESRFGGKKEPEPEQNGHANGVQNQKRTSDLAVYEQFEQQARQTQVRAAAIRDGDADVIQKPLLPSFESAEMRNLAETLLRDIIRGSPDVKWESIKGLENAKRLLKEAVVMPIKYPKYFTGLLSPWKGILLFGPPGTGKTMLAKAVATECKTTFFNISASSIVSKWRGDSEKLVKVLFELARHHAPSTIFLDEIDAIISQRGEARSEHEASRRLKTELLIQMDGLTKTNDLVFVLAATNLPWELDAAMLRRLEKRILVPLPEGEARQAMFEELLPATTSKLEIPYDILVEKTEGYSGSDIRLVCKEAAMQPLRRLMSVLEASDELVPEEELPEVGPLKPDDIELALRNTRPSAHLHAHRYEKFNQDYGSHVVCSELA

SEQ ID NO: 205776 - protein, 108 aa, Zea mays
  unsure (1)..(108): unsure at all Xaa locations
  Clone ID: MRT4577_119251C.1.pep
MQFATKAARKSAPTXSCVKKPHMYRLGTVALREIRMYQKSTELLILKLPFQRLVREIAQDFKTDLRFQSHAVLALQEAFEAYLVGLVEDTNLCAMHAKRVTMMPIDIQ

SEQ ID NO: 205777 - protein, 43 aa, Zea mays
  unsure (1)..(43): unsure at all Xaa locations
  Clone ID: MRT4577_119252C.1.pep
PPHSADYYSIITEYKSSHYEVKLIIYSSVKVHNDWTCXLXIML

SEQ ID NO: 205778 - protein, 52 aa, Zea mays
  Clone ID: MRT4577_119253C.1.pep
NLYKILRGDGGISPVEQILITSITLAHYLSSRTHCEIVQGAQPFTDYRQVLQ

SEQ ID NO: 205779 - protein, 65 aa, Zea mays
  Clone ID: MRT4577_119254C.1.pep
EMRLRSIARSLEGHRKSHLSATPWVLPLGSSMHDTPWVVVVRMPLMTATVDVHTMSDAVWPWDPL

SEQ ID NO: 205780 - protein, 107 aa, Zea mays
  unsure (1)..(107): unsure at all Xaa locations
  Clone ID: MRT4577_119255C.1.pep
KKIKIKRDKNKATHISCAQAXKADQFNDNDLMESVTRSSLFNXWLYIXIVRKTPFVSTMFSSYMQYIFGWILFFGIPCIVIVFSIVLFLLGTISYRLYTTVADSPFS

SEQ ID NO: 205781 - protein, 81 aa, Zea mays
  Clone ID: MRT4577_119256C.1.pep
KFENHHLLLVFERWRSGGSYCLLAATASDSSCGAVLVHQRQTAPFGEEIALAHLLSLVSIASATLLSTSLKLQKFDIFCMD

SEQ ID NO: 205782 - protein, 74 aa, Zea mays
  unsure (1)..(74): unsure at all Xaa locations
  Clone ID: MRT4577_119257C.1.pep
LXMHMSXDPIRTGDIVVFNIDGRDIPMXXRVIECHDRXDTADVDILTIGDNNCXDDXTIICTWQLWLXRHHIMG

SEQ ID NO: 205783 - protein, 52 aa, Zea mays
  Clone ID: MRT4577_119258C.1.pep
GKQLCYNGKTSGMLYPTLGTSRPIIFCLSMLSIGAEKTSIVHQHKLIAFVIY

SEQ ID NO: 205784 - protein, 66 aa, Zea mays
  unsure (1)..(66): unsure at all Xaa locations
  Clone ID: MRT4577_119259C.1.pep
DEGHLQGEEDIAGLGSIWLRSECKGSCPSDFGIVSDWPLEGAAPXWXXGEKMKNMVVVGGSDASSA

SEQ ID NO: 205785 - protein, 103 aa, Zea mays
  unsure (1)..(103): unsure at all Xaa locations
  Clone ID: MRT4577_119260C.1.pep
HRSSIPAARRSGARRPSPAARSRGRSRDRRGSSSRTTRPAXASRRSRCPTLIRRXRRSRPARAGSRARPASRPSPARSSRSSRASRCARAPDRTAARPAGDNG

SEQ ID NO: 205786 - protein, 128 aa, Zea mays
  Clone ID: MRT4577_119261C.1.pep
NQKEKLCLTRFAWKKMTTPRPPSTPLLQGSKFAWSQDPIPLLPSCVGILLRLIRFVTHTAHPYQQLQNRLAKPLRGRLEATELRIPPPHITIDIKKKTESKQNKESQLANRSMRARAIADDATPPENP

SEQ ID NO: 205787 - protein, 249 aa, Zea mays
  Clone ID: MRT4577_119262C.1.pep
QSEHINKSNRSLITLNPYRSSIKHLFDDGLDPTATGANGAFPIFPGRPPAPHHRRAALLPPTTPPLMVSRPAGPSSRGLFPPGAGAARLFLPRTAWTTLSNSITPSTLRFHHPSPSPPSPPDPPQRGTARFVSMASSRSATTDLLGSAAVEGHEPVPALAEAAPVVTVRCRPGWSTPDSRDRVSSFTTAYVRTARSICLAGSDGASAATGEVFCLFRRLIFFFFFFFFFFFFFFAYDSSLSISTNQTVP

SEQ ID NO: 205788 - protein, 122 aa, Zea mays
  unsure (1)..(122): unsure at all Xaa locations
  Clone ID: MRT4577_119263C.1.pep
PACRCPSCXXGSRGCSCXXCWVGXCWLPSFPGFPRXGSXXVLSCVXLWRXRXCPLPGFAVLXPGGWCVSGGAAFLLGVLSCVLXRPFLLRLLVVGRARXLXLVLCLCAAGFFYLIPSLXXFF

SEQ ID NO: 205789 - protein, 116 aa, Zea mays
  unsure (1)..(116): unsure at all Xaa locations
  Clone ID: MRT4577_119264C.1.pep
PRSAATGVPGVPEPGEQQRVQPRSCHAGGYSAGLQESAAGRMLFPFEDLKPAVSAAGGGASNGADHHHYEHSKDQAAGDGGGASGVTGGHEAPAGCWSNSMIGNGSSNGGGGXGKW

SEQ ID NO: 205790 - protein, 95 aa, Zea mays
  unsure (1)..(95): unsure at all Xaa locations
  Clone ID: MRT4577_119265C.1.pep
TSPNQTPTPXPKFSXVPPPTFYQKPPSNSPPKSLIPLPGEPHFCKNLPTLKSLKPPPSLKIFKPLKTLTLPSPFPFSYAYFGKKKSQPENPSPPL

SEQ ID NO: 205791 - protein, 149 aa, Zea mays
  Clone ID: MRT4577_119266C.1.pep
QETQNHNLMCACADRPAHRSGLSGPWTVRPQGRTVRHALSVRNTGAHRGDRGRSGSRLGRSALNLVLNTTRAGLDGRAANPPPTGARRARGTLREKETAAERAPAGMARRPGSRRARAGRLKIAGKNAGEQRAPPWASWRNAGDGAGAP

SEQ ID NO: 205792 - protein, 142 aa, Zea mays
  Clone ID: MRT4577_119267C.1.pep
GCIAQLMCNVSGWLNPLFPWLRWASVFSGFGVVLGCPCPCPLLNTPSFRRVCQFCRLIQIFQLVQFSQLVFVSLLANSVSFRVTSGGPPEKAGGVGVFGGSPYAPWVFWGWRAFCPAKKWFWDGPAVKGFVPWVLPLKNLFR

SEQ ID NO: 205793 - protein, 53 aa, Zea mays
  Clone ID: MRT4577_119268C.1.pep
PALKVNAPQVFPLGKFFEDKGGNMPHYLLGSAGVGGFEFIKNEPTEIDGNYCL

SEQ ID NO: 205794 - protein, 31 aa, Zea mays
  Clone ID: MRT4577_119269C.1.pep
MEKKKVLCADLVAAASATAVVCSVSSEAPSK

SEQ ID NO: 205795 - protein, 329 aa, Zea mays
  unsure (1)..(329): unsure at all Xaa locations
  Clone ID: MRT4577_11926C.1.pep
MKCHSVAALWSPLPPSHHVTAAATTPVALFTGAADGTVLHWPLALASASPSPRPSSLLCAHAAAITSLCPLPSPASLLVACTAGVLSLFSTSAPLRCLRRRSLPLWVGSPSLIASLPSITSADPRVAILCHAPDDGHRHVSALVVVDARTLAVLYTVFHGILSVGTPNAIAVSGGGDDAVSVVLADAQGRVQVMPVAEGAAVEVDPPRRLIVSXWPASRRRSWRTRGXEAVALSHDGKNVALVLKTRCLLKCVTEGVVLGEVSLLGTSLCKDKNPVDKVCPAGAFFLSSDEWDAHVSDDGVVVRNLVLWSNNGAVTMYRIALGSSYFDS

SEQ ID NO: 205796 - protein, 134 aa, Zea mays
  unsure (1)..(134): unsure at all Xaa locations
  Clone ID: MRT4577_119270C.1.pep
ASGAASNHSRTSXXSPPPVYKFPCFFYSIYGGHHIQEEGRAPRTFSARSGSTSTRASSCLTIFCSDHLQGSWSNLPLSTNKFSCLIFTFKTQLPSNPSLKPNLGTLGQQPGQKTTFTFAFINRIVARTLPHPTD

SEQ ID NO: 205797 - protein, 159 aa, Zea mays
  Clone ID: MRT4577_119271C.1.pep
MSYPLRLAVTAACAIILMWVVLVPNPTDAALDDICKAKCETPQPAVCLRCTGGVRIEDGKVVTTEVVPCSDGCIPATTRLQCDLACHFGGLLSSSPRTGCVRCPGPDPVPDPGLPDCAVQAALCRSLSAAERRQECLDACDRRCNSTAAAFCQDRCEMR

SEQ ID NO: 205798 - protein, 202 aa, Zea mays
  unsure (1)..(202): unsure at all Xaa locations
  Clone ID: MRT4577_119272C.1.pep
MLFLYITEATGIAYEHQHRRCPQTDRDASGVSVGVVTIACHFEGVSFVHGYCNENWYQFCLNHPESILHVMKSNVAVKSEHMYITDDRLLKEMGMDAYKVSISCSKILPKGTKEGGINPDGIKYYRNLINLLLQNGIEPYVTIFHCDVPQALEEXYGGFLYKSHKSIVEXYTYFAXVCFDNFGDKLKXWXTFNEPXTFTSFS

SEQ ID NO: 205799 - protein, 138 aa, Zea mays
  unsure (1)..(138): unsure at all Xaa locations
  Clone ID: MRT4577_119273C.1.pep
RILCVINSYVEENSEHMNQTDGRLLKEMGMDAYRFSISWPRILPKGTKEGGINPDGIKYYRNLINLLLENGIEPYVTIFHWDVPQALEEKYGGFLDKSHKSIVEDYTYFAKVCFDNFGRQVKDWLTFNEPXTFTSFPT

SEQ ID NO: 205800 - protein, 137 aa, Zea mays
  Clone ID: MRT4577_119274C.1.pep
LATSTQAQAACRPQWPAFLFSSASWPSSGSPGSPPRPPSPGRTHLHLLAQIKSPRPLLLTSKATILKCSLPRGALPTWPQGRRPQDHAGSKGLAAAIVGVVVDEYHHLLSCRCPADDDLCLRRRPPLVRGPPRPAPS

SEQ ID NO: 205801 - protein, 111 aa, Zea mays
  Clone ID: MRT4577_119275C.1.pep
MADLALAGLRWAASPIVNELLTKASAYLSVDMVREIQRLEATVLPQFELVIQAAQKSPHRGILEAWLRRLKEAYYDAEDLLDEHEYNVLEGEAKSGKSLLLGEHGVRITGA

SEQ ID NO: 205802 - protein, 140 aa, Zea mays
  unsure (1)..(140): unsure at all Xaa locations
  Clone ID: MRT4577_119276C.1.pep
VYGFGVVMLEMLSGQRALXPNRPSGQLSLADWAKPYLADRRRLARLMDPRFEGQYNSRQAFQAAQLTLGCLAGDPRSRPSMKEVVETLERVEAVKNRARGGGSGSGRAGAAPHHRSPRVGGGARAASRPAANGHNARPAR

SEQ ID NO: 205803 - protein, 68 aa, Zea mays
  Clone ID: MRT4577_119277C.1.pep
CTWLNRLLVEKLVLAKKTFGRVLLPETFKHLNAVKAGGVGPGELDMVRTLIPVALIERDTVLLPEPGG

SEQ ID NO: 205804 - protein, 69 aa, Zea mays
  unsure (1)..(69): unsure at all Xaa locations
  Clone ID: MRT4577_119278C.1.pep
TRLVPITRKGYWPVNMGDVPGDGKATWFWACGLATLANSXTFLLACPTTLITGINEKIGASCVIRPECQ

SEQ ID NO: 205805 - protein, 114 aa, Zea mays
  unsure (1)..(114): unsure at all Xaa locations
  Clone ID: MRT4577_119279C.1.pep
MAAKILSLGILLNLGASVATSTIFPQCSQASIASLLTTYLSPTVSSMCENPIVQPYMIQHAIATCILPLSPLLLQQPSALLQQLPLIHXVAQNINTQQLQQLVLANLTAYSQQH

SEQ ID NO: 205806 - protein, 79 aa, Zea mays
  Clone ID: MRT4577_11927C.1.pep
KNGLKRLLNAYAPSPNFGPKGGPKRQGGVPPGGGDPPLGKGKCSAFLGNQPLPFFLVKTKGSRVFTQCFFLGERVFFYL

SEQ ID NO: 205807 - protein, 216 aa, Zea mays
  Clone ID: MRT4577_119280C.1.pep
MPGSSGSPAAGYSRSGDGSHSASAIVAGAVTGSHVLKIVFYSRTKEVPNRQVICSRHFRLGGHTWFVKYYPNGNAADKADFISLYLAIHGAVVGKPVKAQVTISLLDQDGKPVPSYTKVTPFVDFAAKGDWGYTEFIERKALEESEHLRDDSFTVRFDVTIMSDIQTVEMPSVVVPPSDMHRHYADLLLSKEGADVKFRIGGQTFTAHRLVLSTRS

SEQ ID NO: 205808 - protein, 55 aa, Zea mays
  Clone ID: MRT4577_119281C.1.pep
IKPCNSPKNKKHRTCVHSKPKKPNFLVPNYPTQARPPLTNYAMIQFGTTLPQQST

SEQ ID NO: 205809 - protein, 55 aa, Zea mays
  unsure (1)..(55): unsure at all Xaa locations
  Clone ID: MRT4577_119282C.1.pep
MLVSRHGDHGRQKLDEKNSNKFLRFKKKKKKKKKKKKKKKKTKKKKKKKKKKXXX

SEQ ID NO: 205810 - protein, 73 aa, Zea mays
  Clone ID: MRT4577_119283C.1.pep
IINLRRHKKKKKKKKKKKKKKRKKKKKGKKKKNKLNNKRESKKNKRGGACFGRVPGFCTRGLGGGGAFFYPGP

SEQ ID NO: 205811 - protein, 287 aa, Zea mays
  unsure (1)..(287): unsure at all Xaa locations
  Clone ID: MRT4577_119284C.1.pep
SDPLNPKRPSPNPTHHPSQPAMMAAEPSPSVPSTAADALETLALDSSSSSAAATXLHXPPTPSSXPTSPTAAASDDPFVIDDFDEDDFSTAPAPNVARQPRAARGDAASPVFAKITVSDPKKHAEPSGGGAAGVIPGSGSYFSYLITTRLAGGGGEVRVRRRFRDVVTLADRLAAAHRGLFVPARPDKSVLEGQVMQRHDFVSQRCAALQRYLRRLAVHPIVGHSPDLRTFLTEPGAVPAFQGEPPRYWTTTLNAAAPLVPTKARRDLFGMFKGLKQTVVNGLVATK

SEQ ID NO: 205812 - protein, 111 aa, Zea mays
  Clone ID: MRT4577_119285C.1.pep
KPSEGILAHVQGGSTPNIAAIQKNTHTIHLGHVKDIRRTHYTMKRTDRQKTGREQKALLYSLLKRQTGPDGEPQMGGIMLGNQRTGNMIGTRRGSFCPMGWATTRPLRETT

SEQ ID NO: 205813 - protein, 105 aa, Zea mays
  Clone ID: MRT4577_119286C.1.pep
GFSWSAFCAGWASFLLPRLAAFVWPIMSSSPTPSLARSPFSFGPSALSFFTPFCFFFGIGFCVPVSPGQLFFPLFGFSLGPRHFLPCLSLWVACRKLLRKHPILS

SEQ ID NO: 205814 - protein, 138 aa, Zea mays
  Clone ID: MRT4577_119287C.1.pep
PPPCVARPLCFAASRARAKKVFRGPPPPFRKRTFWGGACPRARQKFLGQGGGAPPLDSPGGFLVGPPGLVGALVAPPNSGRGSGVPAVSRGSLLSSGGPVFSPPFFFAVCMEAAPSLKKRPFFPPAAPFSFFFGGGLQ

SEQ ID NO: 205815 - protein, 127 aa, Zea mays
  unsure (1)..(127): unsure at all Xaa locations
  Clone ID: MRT4577_119288C.1.pep
MAMTMSQVGSHSMHGENMDSIHMDSYYKDLLHKKGDHPPQPPTTQXCQELSKQIFYTRLGSLRGRYETFXKDLAGAKQVWNNMTDLSAHDLVIATLCAAELNAWIWQRXIDGIGFSITSYTVLADFQ

SEQ ID NO: 205816 - protein, 91 aa, Zea mays
  unsure (1)..(91): unsure at all Xaa locations
  Clone ID: MRT4577_119289C.1.pep
HSPIAHFFPTYLLQTLSSPCHNPLLHPYRIHYQIQVHILHVSRFNIQHPSSLFXSLXTVPLYSDYIYTQRLHLLQLLNLSDYSNXHNFFPF

SEQ ID NO: 205817 - protein, 185 aa, Zea mays
  Clone ID: MRT4577_11928C.1.pep
SSSKDVLKDEHGILILNDTSGNKESGTSTQIPNEKQGALLGRKNNDLTEVELGPCLEKGVPSHGHCFVQGDNGVDGVGSVENSFNTSNCSHGQPFFNFDDSHSYIHPFIKKKVSHHWDITFNQNKETLNHYIQESSYPSHEKIPTDSLVEVESTADTTVTDQVLKARSSKILEHSPDDEVEGEMV

SEQ ID NO: 205818 - protein, 75 aa, Zea mays
  Clone ID: MRT4577_119290C.1.pep
LPLMHHPDSPRTSEFTDHNFFVSKSKQQTISPQGTAANLRTSEPNLTLVTRAILCGSLYVAVPPRRWRACPVDHQ

SEQ ID NO: 205819 - protein, 98 aa, Zea mays
  Clone ID: MRT4577_119291C.1.pep
TLLNDIIFQKTIIPILMLSHREAAQWAPNPSRRRPAPGQTYINQRKNAPAVAAGGVGGESHAAWPVRAPKPRGWRLGVVGEAAARRRREMPRSLATAE

SEQ ID NO: 205820 - protein, 76 aa, Zea mays
  Clone ID: MRT4577_119292C.1.pep
DPGRLWLGPNVMLEYPSNKANPLFKKTLENAKASLKALVGDLQFLRDHQTITRVTIAGVFNWDVPPRKSKQPVKDP

SEQ ID NO: 205821 - protein, 80 aa, Zea mays
  Clone ID: MRT4577_119293C.1.pep
IFEMPSIDHRGVRLAIVEVKELLPSGPSSSFRVHEGPTLSAGSRVMVHEPAAPVSRVSSPPAVYICGSYESCDGRRPRTG

SEQ ID NO: 205822 - protein, 97 aa, Zea mays
  unsure (1)..(97): unsure at all Xaa locations
  Clone ID: MRT4577_119294C.1.pep
HEKTVMMLNLMPHPAXYPISELGYSSAANATQYKEFDRXNLFFTRGEVSRSTIIKXSRPQASGRSFSIKETMCNIPIVLNIVKRATAPLDQSPSSIN

SEQ ID NO: 205823 - protein, 108 aa, Zea mays
  unsure (1)..(108): unsure at all Xaa locations
  Clone ID: MRT4577_119295C.1.pep
SSFCCRISCRGEGGGKRAKWGERNNVLPNGHFKKHWQDYVKTWFNQPARXQRRRIARQKKAVXAAGSSSAGPGRPIVQCQTLKSNMESRAGRGFALAELAAAGLPRRL

SEQ ID NO: 205824 - protein, 327 aa, Zea mays
  unsure (1)..(327): unsure at all Xaa locations
  Clone ID: MRT4577_119296C.1.pep
PAGIRYESDEWGITWATELEEEAHRPPNLPNLKRRISEIVRVLSNFSKLRQKDVPRKDYIKQLKTDIISYYGYNDFLVEALIEMFPAVELVELLEAFEKRPPECLRTNTLKTRRRDLAAALIPRGFNLDPIGKWSKVGLVVYDSTISAGATTEYMAGHYMKQGASSFLPVMALAPQEKERIVDMAAAPGGKTTYIGALMKNTGIIYANEFNEKRLHGLLGNIHRMGVTNTIVCNYDGKELPKVLGMNSVDRVLLDAPCTGTGTIWKDLQIKTSKDIEDIRNCAFVQKQLLLAAIDLVDANSKTGGYIVYSTCSIMIPXNEAVIDYAL

SEQ ID NO: 205825 - protein, 229 aa, Zea mays
  Clone ID: MRT4577_119297C.1.pep
HASAHASAHASAHASAHASAHASADAWAVIDYALKKRNVKLVPCGLDFGRPGFIRYREHRFHTSLEKTRRFYPHVNNMDGFFVAKLKKLSNTIPVTSEPSKASEEAAKVDGEDEKAISNEQETGVPDKDEKTVEIKNHKNVTNIRTSVTKENGSHKRESNKPGKHLKKNKNNATKEIDGSESSETNRGGKEEHREQTKKMSHKRKFASDRSKKIWPRELLGCQREETGQ

SEQ ID NO: 205826 - protein, 52 aa, Zea mays
  Clone ID: MRT4577_119298C.1.pep
RRCEESGRPWPRRGRRRSSGTQQLMGTSSNRSTTPPNSGDPHETESVSGGGG

SEQ ID NO: 205827 - protein, 390 aa, Zea mays
  unsure (1)..(390): unsure at all Xaa locations
  Clone ID: MRT4577_119299C.1.pep
NGRISFVALMALAPQVKERLVEMAAAPVVKTSKMXTLMRDLAXTYTNGFNEKTDKGMVQRLGLVVYDSTISAGYDGKELPKVLGMNSVDRVLLDAPCAGTGTIWKDLQIENXTDIEDIRNCAFVQKQLLLAAIDLVDANXSKTGGYIVYSTCSIMIPENEAVIDYALKKRNVKLVPCGLDFGRPGFIRYREHRFHTSLEKTRRFYPHVNNMDGFFVAKLKKLSNTIPVTSEPSKASEEAAKVDGEDEKAISNEQETGVPDKDEKTVEIKNHKNVTNIRTSVTKENGSHKRESNKPGKHLKKNKNNATKEIDGSESSETNRGGKEEHREQTKKMSHKRKFASDRSKKSGPESFSGVKEKRQVSDKKRKKKWQFKLRRDWEAEKKGDKRRKV

SEQ ID NO: 205828 - protein, 138 aa, Zea mays
  unsure (1)..(138): unsure at all Xaa locations
  Clone ID: MRT4577_11929C.1.pep
HSNVWKLPLKNYGPGSRVGRVCANPHGLISKYGLIVYRQXFGTNPKDIGFIKSRSRGPYAPVDSFKQQTNGSFIRRPNLCALTVCSDRETHVVKQPCDIPNGYSALVRPGTIKRSEIFSLTTFGLIQGGCPVFFLQAW

SEQ ID NO: 205829 - protein, 51 aa, Zea mays
  Clone ID: MRT4577_1192C.1.pep
PPPRGVKFSRISPQGDSAIGKGFFFFFFFFFFFAIFFFFIFFVLFFVFFFC

SEQ ID NO: 205830 - protein, 173 aa, Zea mays
  Clone ID: MRT4577_119300C.1.pep
KLSNTIPVTSEQPKASEGAAEKADGEDEKVISNEQETAVPGKDEKTVQMINHKKSKVTNKRTSVTKEAGGHKREPNRSGKHLNKNKDTDTKEVDGPESTETNGDGKEEQREQTKQTSHKRKIDSVKTKKSGPVSFSGVQEKNQVSGKKTKRKWQFKLRRDWEAEKKGTKRSKV

SEQ ID NO: 205831 - protein, 45 aa, Zea mays
  Clone ID: MRT4577_119301C.1.pep
ALRPAEPGLGTDYNPELLLIYQWAFRSNTLSERSQHLAELLLSSG

SEQ ID NO: 205832 - protein, 122 aa, Zea mays
  Clone ID: MRT4577_119302C.1.pep
QNLKNVTNKRTSVTKETGSHKRESNKPVKHLKKNKNNDTKEIDGPESSETNRDGKEEHREQTKKMSHKRKFASDRSKKSGAETFSGVKEKRQVSDKKRKKKWQFKLRRDWEAEKKGAKRRKV

SEQ ID NO: 205833 - protein, 543 aa, Zea mays
  unsure (1)..(543): unsure at all Xaa locations
  Clone ID: MRT4577_119303C.1.pep
MAKKGAKRKQQPPPAAPTAKKGSKAVPPPKAAKRAPKKQELLESSDDSDTEQQLLEEASHLDVPSDSDAEELSGSDAEADELSGSDADSDGSSSSGDDVEDEEEEEGDGSDDDPLADDFLAGSDEGSEGGDSGLESDESDDLEAKSRAIDEQKLKAEEDAEEELQTNIRSESDEFRLPTTEELEEEAHRPPNLPNLKRRISEIVRVLSNFSKLRQKDVPRKDYIKQLKTDIISYYGYNDFLVEALIEMFPAVELGELLEAFEKRPPECLRTNTLKTRRRDLAAALIPRGFNLDPIGKWSKVGLVVYDSTISAGATTEYMAGHYMVSCLXXXXXXXXXITLTNNILXXQGASSFLPVMALAPQEKERIVDMAXCSPFPWARVNFYYDIKVSNVTVGLIMLQYXILCTCFRILIVNLQLIYSLGLCYHMQXXXXXXXXXVYRAAPRGKTTYIGALMKNTGIIYANEFNEKRLHGLLGNIHRMGVTNTIVCNYDGKELPKVLGMNSVDRVLLDAPCTGTGTIWKDLQIKTSKDIEDIRSCAFVQKQ

SEQ ID NO: 205834 - protein, 84 aa, Zea mays
  Clone ID: MRT4577_119304C.1.pep
GTGALSRVFFFFFFFFFFFFFGHIKIFFSCSGGERTAVKCCFFPYLFLLFLFFSIPFQWKIFLLFVPAFLTFSLSLPMPLGPAC

SEQ ID NO: 205835 - protein, 51 aa, Zea mays
  Clone ID: MRT4577_119305C.1.pep
SIGRLRGSSPPEPRCVGIPCASTLSTRSTPGGRSIVRILSITSISSCRYMS

SEQ ID NO: 205836 - protein, 82 aa, Zea mays
  Clone ID: MRT4577_119306C.1.pep
MITQQEAQPFVGLLEGTQAHNTRQETAQKITGDDWLSPGAPADANAHYTTAIQHARMTGDHGWHARALEGRVRALLDTTSWR

SEQ ID NO: 205837 - protein, 161 aa, Zea mays
  Clone ID: MRT4577_119307C.1.pep
HASAHASGRNIIGQSMYQLLMLGVLIFKGKSLLRLGSGGDVSDAQLNTFIFNTFVFCQVFNEVNSRDMEKVNVFSGIFSSWIFPAVAGATAAFQVIIVEFLGTFASTVHLSGRLWLASMMIGSGSLLMGAGLKFIPVDPGSEGSSDRHDGYQPIPTGPNAV

SEQ ID NO: 205838 - protein, 45 aa, Zea mays
  Clone ID: MRT4577_119308C.1.pep
VKKKKKKKKKKKKKKKKKKKEKKKKKKRNKRKKNKEKKKKKGGNF

SEQ ID NO: 205839 - protein, 40 aa, Zea mays
  Clone ID: MRT4577_119309C.1.pep
WFDGKHVLFRQVVEGMDVRLGIEKVVTRNGSPCKVVKVAD

SEQ ID NO: 205840 - protein, 259 aa, Zea mays
  Clone ID: MRT4577_11930C.1.pep
MALLLRRGVAIAARSFRAAAASSASTTVHRLPAGASLAGAGELAPAQLFFFENRRGFAKGKKSKDDRGDTVQAVPDIGPTVKSAATAQMDAAVIALSRELSKLRTGRATPGMLDHIMVENADVKVALNRIAVVSVLDAHTLSVMPYDPTSMKSIEHAIISSPLGINPTPDGNRIIAAIPPLTKENIQALCKVVTKSAEDFKQSIRRARQKALDTIKKSASSMPKDDVKRIEKEIEELTKKFIKSSDDMCKAKEKEISGN

SEQ ID NO: 205841 - protein, 238 aa, Zea mays
  unsure (1)..(238): unsure at all Xaa locations
  Clone ID: MRT4577_119310C.1.pep
MASPLLRRAAAGRGRCPSPAEALRRLVSSEAAPEQALPRPLREMPPFDHRPSPYAGMGGAEILEKRKKFLGPSLFYYYQKPLNIVEGKMQYLYDEQGKRYLDCFGGIVTVSCGHCHPDIVKAVQEQTKLLQHTTTIYLHHAIVEFAEALASKMPGNLKVVYFVNSGTEANELAMLMARLYSGNLGMIALRNGYHGGSAGTIGLTGLQTWKYPIXQGEIHHVMNPDPYXGAFGSDAAAY

SEQ ID NO: 205842 - protein, 38 aa, Zea mays
  Clone ID: MRT4577_119311C.1.pep
KNVFFFWAWEKKKKKKKKKKKKKKKKKKKKKKKKKKKK

SEQ ID NO: 205843 - protein, 145 aa, Zea mays
  unsure (1)..(145): unsure at all Xaa locations
  Clone ID: MRT4577_119312C.1.pep
PNSVDAPETELAHLTGMPTETFEQISQAAGECHKMGVKEVLVKLGSQGSAALFVEGXEPIRQPIIPATEGIDTTGAGDTFTSAFAVTLVEGRPKDCMGFAVAAMFFDEAEYHTTPTRSPSNRMNRGLFSDEVALSVHREQFIPSP

SEQ ID NO: 205844 - protein, 90 aa, Zea mays
  Clone ID: MRT4577_119313C.1.pep
VSNPTSPGQSTPPLPPCYSCPLSPSAYSLLRSQPLIKLPLFFPRLTPHSLLSRPFLFFLRVLFRLAFPSALVRFRRHLSFFFFSPVSFSL

SEQ ID NO: 205845 - protein, 100 aa, Zea mays
  Clone ID: MRT4577_119314C.1.pep
FACSVKDVILELYFCLLMGELVGHKYRRHFSRALVFSAINLFGSTLFLDICMHQQHFVQRIFYHFTLLFKLHRVYVDLSFYCFDRKFFCYLYMNITDCLH

SEQ ID NO: 205846 - protein, 140 aa, Zea mays
  Clone ID: MRT4577_119315C.1.pep
MPHRVAALLLLLPLAAASEEAPGPAAEAALLERHAAQLAKLEEVAESLARSVHALESALARSADPDPSQPVAPAAAVGDRRSPQGVAVTKRRPVWSERFHFTAAARLGEGAYVAAAVALPYEDAERLTKYFAVGDSRGRP

SEQ ID NO: 205847 - protein, 29 aa, Zea mays
  Clone ID: MRT4577_119316C.1.pep
PGYLYCLHRSCVSWMLLAFPSNSPSYCRV

SEQ ID NO: 205848 - protein, 117 aa, Zea mays
  unsure (1)..(117): unsure at all Xaa locations
  Clone ID: MRT4577_119317C.1.pep
MGLRIRAGSLLLWVALQLAVSLISQSAHHXFGINYGQIANXLPEPAHVATLLQSMGVNKVKLYDAHPHLLTALPPTGXVXFTIALDNQDLHAIAARPDAEHHWVAANVQAYXPGTRI

SEQ ID NO: 205849 - protein, 130 aa, Zea mays
  Clone ID: MRT4577_119318C.1.pep
APSVEATVYLSSVGQHLLRDTVIYCAAERYGLEELKRLALRKQGLQSGIDVGTILRSAQYCYAHTPDSDSRLRAHYLALIIRCRKTFKRSGTMQAEMEKSGEGGKLFFDLFVAMCNHLDDVIDASNARTP

SEQ ID NO: 205850 - protein, 120 aa, Zea mays
  unsure (1)..(120): unsure at all Xaa locations
  Clone ID: MRT4577_119319C.1.pep
KKFFFFFFFFFFFFFFFFFFESKNPQNKLRPFYTLHPPQNNHLQARIIFFFLQFXFSNSGSINQSIKALSLLPIWKQPLIKTLAPGMTIKLSRRPACLPSDRALCFFSNPKIIICPRSIP

SEQ ID NO: 205851 - protein, 66 aa, Zea mays
  Clone ID: MRT4577_11931C.1.pep
MLLLALCSITNFTMFVQALDTIKKSASSMPKDDVKRIEKEIEELTKKFIKSSDDMCKAKEKEISGN

SEQ ID NO: 205852 - protein, 117 aa, Zea mays
  Clone ID: MRT4577_119320C.1.pep
SGSSTSPPRRRRPKSTGPPTPTPPWPTSLRTTAPTTSRAPPPTPATPTTLAPTQATTLAPAGTPPSTTVASRRWTRRSPESPTAYGSVTSPGDTHPRHCPPTSSPAVATDRPCRRPP

SEQ ID NO: 205853 - protein, 69 aa, Zea mays
  Clone ID: MRT4577_119321C.1.pep
YIYIYIYSYSIRSPGLPSMQGAPTRLGVPRRGRRGRWSEYRAHAPSEGGSYVRTHYYHLCIRFTRIPYA

SEQ ID NO: 205854 - protein, 106 aa, Zea mays
  Clone ID: MRT4577_119322C.1.pep
AGVVFSKKGMEFSLLAALHTMQTTHLPFTSSHFGYPVVLLCLPFPLCLCAVYSNTGSHPHVVSNHLKQQNSCLNSNGEQALHCMESCLPHMLTGGCPDHRYSTHKL

SEQ ID NO: 205855 - protein, 96 aa, Zea mays
  unsure (1)..(96): unsure at all Xaa locations
  Clone ID: MRT4577_119323C.1.pep
TFDQFRENGFENCPFLKMGKEPGNVVNCPPPNFPGIFXFMDPSRNWAAPWFKIGRFISGWYTPAVLEELSKKYQGVCXDNNVQFFPPQGVLVSKRQ

SEQ ID NO: 205856 - protein, 178 aa, Zea mays
  unsure (1)..(178): unsure at all Xaa locations
  Clone ID: MRT4577_119324C.1.pep
RAAARAGTSFFFFFFFFFDFFFFFFFFFFFIFFFFLRKEPRPGPREGGNPKKRRPGQGGPGXGKRRGPKKGKAGPGEKRGSPNKAKKKTKPGAQREKAGGPKGRGNPNRGRRAXPGGPXKTERPAGGKNRPPPGERGXPGGGAEKRNRPTPGGGRXGGGGRGPSPPKGGQNPVPRTGG

SEQ ID NO: 205857 - protein, 64 aa, Zea mays
  Clone ID: MRT4577_119325C.1.pep
GFFFFFFFFFFFFFFFFFFFFFFWTKKRGFNFKKGAPMYFPGAAIKIHPKTLGGVRGPPKGLPP

SEQ ID NO: 205858 - protein, 185 aa, Zea mays
  unsure (1)..(185): unsure at all Xaa locations
  Clone ID: MRT4577_119326C.1.pep
AFHFGGRPYCLLMLHGXTVTADTATMGPHAXKAAVATLLGPYXSXAGMAACEEPVIGPYRIQQAAGRTVTPVSALXCQQGITPYYMTDLXHLLAQISRAHQRRQLVLSNKAVYSDHQQLVAWNQLAAXNSASYKAHQQLPCNQLPVAYPEQWLAFKQLGTWSSPAYXQHQQLLASSQLAGVSPGT

SEQ ID NO: 205859 - protein, 81 aa, Zea mays
  Clone ID: MRT4577_119327C.1.pep
PGFDDRLGSKSRLRVLYCVCLDSYLYDGILRIQTPHKKPLLECCIPPPPVVYERELIPSNLSMIATKFICPTRTLYCLYNS

SEQ ID NO: 205860 - protein, 39 aa, Zea mays
  Clone ID: MRT4577_119328C.1.pep
NKDFMFFVKQITPRFSNKLSAGSSFLYWTNRFIPCSVGG

SEQ ID NO: 205861 - protein, 120 aa, Zea mays
  Clone ID: MRT4577_119329C.1.pep
LAFGSVYGALHSMLFDGPQVGNNVKYPQLIRTTKVCGHYAASLAVFGATFVGVEQALARYRMKKDIINGAVAGFAAGASLGFSAGSFRAAFFSGSAVALTSVVLDVTGTKTTDEEEKGQH

SEQ ID NO: 205862 - protein, 89 aa, Zea mays
  Clone ID: MRT4577_11932C.1.pep
RSSLNSKPDDCEDDRRHHRNGHHVCQPQALDGVIRLRCQYHGPEDGEQLHSDLNVSCGQSTPRFVHRRHQGGPTFRQRCPGPQNLGSVE

SEQ ID NO: 205863 - protein, 59 aa, Zea mays
  Clone ID: MRT4577_119330C.1.pep
LADAPCHVCFGTDMAGRHAVRILNRSVLMHVCIGLLVNYYEEHIVSVSQVPSKFYIAVA

SEQ ID NO: 205864 - protein, 87 aa, Zea mays
  Clone ID: MRT4577_119331C.1.pep
LLRKNGEEKGEPPRSLTPDRDPRKGTAPTLKWKVGPTFGGIRRSYTDNTNTGEWTIPWLCQKNDIKHHPRRPDSLQMILFQPRTLHG

SEQ ID NO: 205865 - protein, 137 aa, Zea mays
  unsure (1)..(137): unsure at all Xaa locations
  Clone ID: MRT4577_119332C.1.pep
TGWGPVSMRPSLVPSPVMRGSSHMYQLSATKREGAVDLHMEAAMLNSQGGNQQCWEPGVVFDSRPTGLSRPQRLLCATVRGSGVEASWPAADGVRSAATPASASGARGRRSTGDENXAESPTPVRTSVPLKVSAVDV

SEQ ID NO: 205866 - protein, 109 aa, Zea mays
  Clone ID: MRT4577_119333C.1.pep
AQNGSCGKTSALCMILNRPGLDVTQTTSVPDRLSSSFEKESENVATSSVKETKPFGSAVCEVDRSAEAEQIDHSNNNGDEQHYTGIVRLLVVDSVNNVGRYGKQLFNGY

SEQ ID NO: 205867 - protein, 74 aa, Zea mays
  Clone ID: MRT4577_119334C.1.pep
FNATGQGPVPPFRSALLFCRTRRYGACSAIISSSPNERCDVMQIQFRWRHGFVLSSPLCCPRPGPLNIRLSVYT

SEQ ID NO: 205868 - protein, 72 aa, Zea mays
  Clone ID: MRT4577_119335C.1.pep
GLGQSVLYHCRIFCYYGSKRCIKLIAASKSMCPFEPHNAKWSFKLSSHIVSVNASYMVIISKKPADLRPAKT

SEQ ID NO: 205869 - protein, 85 aa, Zea mays
  Clone ID: MRT4577_119336C.1.pep
NHLFAGKAVAHRLVAESSCQELVNSLVTLEVLTSILLISSDEVKFIYSTVRVNSICVGLCNKRGYRYFFFHLSLNDFMNTLIIPI

SEQ ID NO: 205870 - protein, 78 aa, Zea mays
  Clone ID: MRT4577_119337C.1.pep
KKKKKKKKKKKKKKKKKKKKKKKKKKKKKKKKKKKKKKKKKKKKKKKKKGRGGGPCFWGTQVYPRGASQINPFFFRAP

SEQ ID NO: 205871 - protein, 60 aa, Zea mays
  Clone ID: MRT4577_119338C.1.pep
NFLLQSRRWCGLQETFAHKLVAERSCRVLVNSLVTLEVLTSILLISSDEVKIHMVDRESR

SEQ ID NO: 205872 - protein, 677 aa, Zea mays
  unsure (1)..(677): unsure at all Xaa locations
  Clone ID: MRT4577_119339C.1.pep
MVDLADLEGAGEAARSHLAACGQRDRLAALLELAAADDVAGFREALXREEAAXDAAELADGVGMWYGRSKAYEPRTPLMVAATYGSVEVVXNVGSASDXDVNRRPGVDVATPINRRELSXVRMAREMRELLLGAGACPVTPDSDGSLAXDVILSPCASPDALGDLEMLLGRRRGLAVATSVPSLSSSPPLSTSPDEGTGXASQIASSLSPITVDRAKKEYPVDPTLPDIKSRVYASDEFRMFAFKVRPCSRAYSHDWTECPFVHPGENARRRDPRKHPYTAVPCPNFRRPGGCPSGDSCEFSHGVFESWLHPSQYRTRLCKEGAACARRICFFAHDEDELRHVPHNSGAGLLSPRASSSIDMTAAAAALGLLPGSPTRHFVPPPLSPSAANNGGGAAAHWLQGSRLRSSFNARDAQADDLGSLLEWESQYLGALSLPQSSRSQPRLSTGLTIRPTAVAPSYLEEMYASDMAMSPRFTNDQGHSVFSPAHKSALLNKFHHQQKGLLSPVNTNRMYSPRGLDPSIIHSPFGGMSPRSPRTMELTSPLSVRVGAAATPRDMLDQFSSLNKHQVPSAGSPRNLNVSWGNIGTPKSKVDWGVDNDELVRLRHPVQPGNTEEEPDVSWVQSLVNHAELSGKRGEMAGMASPSTNKPELSSQDDSLDESVIASWLEQQMHLEPK

SEQ ID NO: 205873 - protein, 111 aa, Zea mays
  Clone ID: MRT4577_11933C.1.pep
RKMFIDEVMELVELLPLKDALVGLPGVSGLSTEQRKRLTIAVELVANPSIIFMDEPTSGLDARAAAIVMRAIRNTVDTGRTVVCTIHQPSIDIFESFDEVKKTIQNIVSYF

SEQ ID NO: 205874 - protein, 42 aa, Zea mays
  Clone ID: MRT4577_119340C.1.pep
HRHSKQGSDRHSTRDEHPYSSHLLTFFADLIPQHLTVMFVLY

SEQ ID NO: 205875 - protein, 86 aa, Zea mays
  Clone ID: MRT4577_119341C.1.pep
VTDWDNEDADGSSDEMTAAVSSERSVPGDLASCASDCNDGDGDDTSVDEELLKLAAKAEPDREEEVDRKADEFIAKFREQIRLQKH

SEQ ID NO: 205876 - protein, 107 aa, Zea mays
  Clone ID: MRT4577_119342C.1.pep
GTGEKGKGGKAPGPIRTTGRKGERATRRKKKGNRQGPRQSPTPENGKPRDQKIGNNEKTNENVSKHRRTQARNPGNRTTPRPFFFFFFFYNFFFFFFFFFFFFFFFF

SEQ ID NO: 205877 - protein, 57 aa, Zea mays
  Clone ID: MRT4577_119343C.1.pep
LNHVLIGTAGSWTWHNGKRVLVSVGKFWMWGSCLKTERGPNKRTTLGHAFHISSKSV

SEQ ID NO: 205878 - protein, 116 aa, Zea mays
  unsure (1)..(116): unsure at all Xaa locations
  Clone ID: MRT4577_119344C.1.pep
QNRCSMTHNLQTGEKIATESNGRVGDHYVDVVVGFGQRRGSRTERWEAREPRGTEFARGRARSVQRQQPPLVYAVAAAPPSRCLALSPMCARRCAWRAVSRVGVRVKARKXTRARP

SEQ ID NO: 205879 - protein, 57 aa, Zea mays
  unsure (1)..(57): unsure at all Xaa locations
  Clone ID: MRT4577_119345C.1.pep
RRRSRSPRRYRKSYKQHSINQFSCSYTYAHNTYNHIIFGNXLHFYFKMLDDFYTIYF

SEQ ID NO: 205880 - protein, 59 aa, Zea mays
  Clone ID: MRT4577_119346C.1.pep
ATRSPAFVVLEIKHSPGAGTTTIAKTLPRSGRGALFLAWCYFSRQPSVQKHSRFAKNPW

SEQ ID NO: 205881 - protein, 351 aa, Zea mays
  Clone ID: MRT4577_119347C.1.pep
MAGESWTVPTPVKELAALVDEPPSRFVQREEHRPGSLMLAADMPDPLPIVDLNKLSTADEAAKLRSALQTWGLFLSTNHGIDASLMEDLMEASREFFHQPLQERQKYSNMREGTRFQLEGYGSDPVVAQDHILDWNDRLQLKVEPEDERSLAQWPEHPESFRDLLHEYASKTKSMRDKILRAMAKILELDEEDFIKQLGASPQAYARFNYYPPCPRPELVLGIKAHSDGPVLTVLLVDREVGGLQVQRENTWFNVPSVPHTLVINLGDSLEIMSNGIFKSPVHRVVTNAEKERISLAMLYAVERDNVLQPAAGLLDEKRPARYRRITEADFLEGVKEHFSRGIRMIETLKI

SEQ ID NO: 205882 - protein, 82 aa, Zea mays
  Clone ID: MRT4577_119348C.1.pep
RRTACRTQSSCGRVWLDSRRRRRGRVRCEPAEVPASCIRIGMSVSSNSALPISISPHLAQAATATPTHTLATQEHAVGWLRP

SEQ ID NO: 205883 - protein, 142 aa, Zea mays
  Clone ID: MRT4577_119349C.1.pep
ASKYIRILQSISIAVLLTSHGFGLFTPHVHMLLLRSLRFCIRCCIATIPAEGEPKVILGILPATLINSSYKTVVELVFFYLRKEDFRQCTTSHLHYREQDCRHTVMTKTETAIYTTEPREKQRHNNKKRERKLDRQGHYYHG

SEQ ID NO: 205884 - protein, 93 aa, Zea mays
  Clone ID: MRT4577_11934C.1.pep
AARGQPPGAGGGARQAALCLLASVMGSSTDHGGAGAGARGKKQGSQLWKKALLHSSLCFRMRNNGEEPSQIWSDWTAAAADAAGPPGPKETTA

SEQ ID NO: 205885 - protein, 74 aa, Zea mays
  Clone ID: MRT4577_119350C.1.pep
TRSLYVSLCIISSTPDWRSRHQHSFALYISPSHSKGSFRSLLTLPPMVMDDTTLFIAFKLFNYRAMYVVGGSIS

SEQ ID NO: 205886 - protein, 116 aa, Zea mays
  unsure (1)..(116): unsure at all Xaa locations
  Clone ID: MRT4577_119351C.1.pep
YYWVGSFFFVFVFKKNNHLYLMGTYTNCHHPTANTCTPSTHAHSAHDQYITAFTVLNSTTDPPATGNSNKPPYDPNLTTTIQRLKQYSTNIRCPSNNRHSRXKNPSKKARTCSGLS

SEQ ID NO: 205887 - protein, 83 aa, Zea mays
  Clone ID: MRT4577_119352C.1.pep
QKGRFIRKGAFGCKNGAPPDLMGLMPAGGGSKGNAGGDAPPGDSRVGKGVEQFVRDKPGAQGVFGGQVGVALVKKPLDFLYPA

SEQ ID NO: 205888 - protein, 82 aa, Zea mays
  Clone ID: MRT4577_119353C.1.pep
VQRCRAVVAVCPESGDSEVSQRVSVLGLQAARHGVRVGRGLLQHEVYAVGSRVTLKSGHMVEHVYQDQGDPEVVLDGHVRGG

SEQ ID NO: 205889 - protein, 90 aa, Zea mays
  Clone ID: MRT4577_119354C.1.pep
SPDTAVFSLFTPSRLFLVVHPHNHCASLRVKKALGVASRPQWAKNCGFFARGSIWFSRSQSCVIIHFSGVGQRTILFLCCSPTFFFLGRF

SEQ ID NO: 205890 - protein, 75 aa, Zea mays
  Clone ID: MRT4577_119355C.1.pep
DNGRERSRRRRGGGGGRRREGRGDEVSRELDVDGYRAIAEKTEKMVGNGEGIEKSGRLNEREESEGVGRWIVHDL

SEQ ID NO: 205891 - protein, 89 aa, Zea mays
  Clone ID: MRT4577_119356C.1.pep
KSLLGMAPCTKSCFKRFRRIWGHAKAPHFLSRFFSAKGWVDIPGAFKKKPPFLMGFSPQLTQPIFWFLNRVLAMPLLQRGFLRPFVMNP

SEQ ID NO: 205892 - protein, 86 aa, Zea mays
  Clone ID: MRT4577_119357C.1.pep
HGMSCCRFFAPLLSASVYHRFLMSISVAVQVVDPGQFVVHCYAQLCGPVRRSPCVSGCPRSGQFRCSMSCCASTTAQAPRGCARLP

SEQ ID NO: 205893 - protein, 101 aa, Zea mays
  unsure (1)..(101): unsure at all Xaa locations
  Clone ID: MRT4577_119358C.1.pep
LEGPPGGDDVLLXSPAKGAPDYFENVGASPPARAIMGESLVGXDLFGPHSPLXVKVPPPKQPPFNQDXTPGFVLKIPPFLVPPAKLGLAVSVRVSPQSGFA

SEQ ID NO: 205894 - protein, 327 aa, Zea mays
  Clone ID: MRT4577_119359C.1.pep
MPRPPTMVIQDDYIDMDLTPAATPEPSPASPRFEFQSAGAGAAGDRHREAAFASPADELFYKGNLLPLHLPPRLQLVQRLLQDQEQPPPLRGAKRDAESDATAAAAAERGDADAAAAASKVCAAKKPSWAKKLKVVKRWASKEYIRSLFLARPPLPSDIVAAAGGASASGHGIGSVSARGSVLEQEEVCQCQHRKSFSGIIRRVRLVATKAPGTSPLCSSSSSSSSSSTPSCRNANGFFFRTPASAAGATPALKRSSSAGSSEEGAIQGAIAHCKRSQLLQPGMVASAAARRSVSDVMFYSVTNTPRASSVTAGEVAQERRQEMCRG

SEQ ID NO: 205895 - protein, 393 aa, Zea mays
  Clone ID: MRT4577_11935C.1.pep
MSEMKRSIMHLEDTESDEEVDHDMLIMMGEYKKRKNKQYKRRRGSVFGHQVYDRSRAENDMKLYQDYFAEHPTYPEKFFRRRFRMRRPLFIRIAEQKVTAAFRQLAYGVPADYVDEYLRIGESTAIECLRKFVRAVCEVFGPEYMRAPNKADTIRLLSIGEQRGFPGMLGSIDSWQGNYCGHVKEPTIILEAVASTDLWIWHAFFGLRGSLNDINVLHRSPIFDRLAQGEAPTVNYTNGGHNYNQGYYLADGIYPTWSTFVKTIKARVNLKDRNFAKAQESQRKDVERAFGVLQARFAVVRVPARMWDEATLRDIMQACIIMHNMIIEDECELGRQEAPYDKGDDDASGWVSHKGTSKFLFFLKKHKEIQNPKLHNQLQRDLVEHLWERKGDQ

SEQ ID NO: 205896 - protein, 174 aa, Zea mays
  Clone ID: MRT4577_119360C.1.pep
RPVGTASGTVNTSQADRLTQTKLQNGRSSSLCLQNNSDGIQWPRDHEGGLEGSLRPCSRNTSSEGDEQQKRPGDVKLFGQILSHQSTLQSSGLSCNGNKSKPPSPKIDTSVRSMNNPMDRVVCSSRPGTTPHLGLEERLARCYGHLDGSTAQPEPLLVMAKRQRVLGRRTVLLG

SEQ ID NO: 205897 - protein, 111 aa, Zea mays
  Clone ID: MRT4577_119361C.1.pep
SLRSMQVLERASWSPIMASSLPPINQGHLPESVSTSISASLSLGSQSIRVARSTPVHYFFGSGPSPTPSFVGFSIYGSSGDLAIARLVRLGSESGFRVRWGGVGWGGRLRG

SEQ ID NO: 205898 - protein, 1079 aa, Zea mays
  unsure (1)..(1079): unsure at all Xaa locations
  Clone ID: MRT4577_119362C.1.pep
MKLEISDDLPVKKWTYHDHKSDLLSSVTSANSAIAKEINEVLFKSLPADTPRLDLFASSHLLSQRKSDLIVKERLGVCKTRLRLKEQMLTMKFKAYCHLWKDVQLFSANKQRSKSNKRTDXQPNITNXGSQRQRSSNRSRLTMPAGNLSTFSTPEMSDVAMRLFSEFKIKRCRNYLKMPALIIDEKEKEWLKLMNKNGLVEDPVLVEEDRMMINPYTKEERTRSRTGRAFEAXSSRPTSSDGVQKQKRPGDVKLFGQILSHQSTLQSSGLSCFGNKSKPPSPLDDTSXKWNPESNARSRDMLGVASVIAAHGLEYAKQVEKISAKSLIRTAYGPSVTSVANKSSDKECIDHVPLHERESVAADVLAGICGTLSPDGMGSCITSSADPGQKISMKRVEHVLSQENDKTVEEEDTLSDQECEVDPVDWNDDEKSIFIEAMNNYGKDFARISSCVKSKSYEQCKVFFSKARKSLGLDLIHQGAADVSMPASDTNGGKSDTDEACAVEMDSAICSTQSCSKIAMDVCPTEGAIGGPNSVIISKQAEAYISNGCNADVKIEEDEKVADKNCSIVDDKRSSDATHEAGPIDINCPGSTDKLQGTDDVVDLVNMHSNSGISSSAKHAVAIHSEMRSTLHSVEVLQTDKGEGTGTDLSWVEECSHHALDNTPMKNGNSGAPAFLASDSGIKDNVRISNITAASTVSPAFTSSYQHSVPGDMPLPKPKPLVTPLTPKDLMPVQFSSVLPDPTAIRFEGIASITTPNFEDTGNRVSGALGAKEMSKYPAFRDPSGNQQSTLFCNIDGYMNHRLTTELPFFSERTASGTVNTSQADRLTQTKLQNGRSSSLCLQNNSDGIQWPRDHEGGLEGSLRPCSRNTSSEGDEQQKRPGDVKLFGQILSHQSTLQSSGLSCNGNKSKPPSPKIDTSVRSMNNPMDRVVCSSRPGTTPHLGLEERLARCYGHLDGSTAQPEPLLVMAKRQRSLAGVQFYSAKNGTLGVLPDYQQPSTQPQQSDPKRVERLSDPQKRNVLELISGFQQPGRVARFGGAGILVSGNVSDPVAAALKAQYGPGSKIMGSDVDPWTDIGSR

SEQ ID NO: 205899 - protein, 74 aa, Zea mays
  unsure (1)..(74): unsure at all Xaa locations
  Clone ID: MRT4577_119363C.1.pep
RPGKRGGKGRGKGHGPSPLRGRNSGGNRXHWGCATVGKRGRWGPVPNGASWGKREFLQGERVGKRRGFTQFRAL

SEQ ID NO: 205900 - protein, 100 aa, Zea mays
  unsure (1)..(100): unsure at all Xaa locations
  Clone ID: MRT4577_119364C.1.pep
PRKKGFKGGGFFQVVSPAPYIKVRGALXRVKKIRNPRGLGPYWGPRGRGQPPKNFGRGGKTVGVSKKRWGFFPPAKFWPPPRGGLGPNNPYKGVFFRQFS

SEQ ID NO: 205901 - protein, 69 aa, Zea mays
  Clone ID: MRT4577_119365C.1.pep
TAVTCASSSTLLLRASSIYVPIAIPYAPAAGVAPSQTAPMVGTLWTRSTSRLTGTKPYVNVGSIGLDLH

SEQ ID NO: 205902 - protein, 55 aa, Zea mays
  Clone ID: MRT4577_119366C.1.pep
MALRAEASRTSNKPLLLLALAFVLLGAAPAAWIAPGGAFCNWVAMNLQSYALYAQ

SEQ ID NO: 205903 - protein, 101 aa, Zea mays
  unsure (1)..(101): unsure at all Xaa locations
  Clone ID: MRT4577_119367C.1.pep
PPPPSQGRNPPPPSQGGNPPPPFKGGGPPGPPPPPQGGGPPGPPPPSQGGGPTGPPNWGGGNPGSPGGTPXPGSRGHLEFPGTRPPGPPCFKEPFSKKGGP

SEQ ID NO: 205904 - protein, 150 aa, Zea mays
  unsure (1)..(150): unsure at all Xaa locations
  Clone ID: MRT4577_119368C.1.pep
MGRSRACSLLGSAQLLLLLLLSLGSAAAQKGSTWKTLSGKAPVIVAKGGFSGLFPDSSDFAYRILGTISSPDTVMWCDVRLTKDGDGICLPSINMDNCTMIDNVFPEGKKTYNVNGVSTVGWFSVDYTSTDLLPNVTLKQSVLSRTPGYX

SEQ ID NO: 205905 - protein, 77 aa, Zea mays
  Clone ID: MRT4577_119369C.1.pep
GGDYYFLKNNTIFFFFWAIWAPSNPIPRGANYTFWKFFHRGYNINLKVVIGWKIEHKKTRSWGFGSLTGQKTSPGFK

SEQ ID NO: 205906 - protein, 109 aa, Zea mays
  Clone ID: MRT4577_11936C.1.pep
SAMALRRRAALAPAAVYWYASSTHLAMRWAVHMPPIPRQPRRFVSPHAHLRRRPASHGVLMSLESRALADPASPATAESRTHSHPWRHLVPRAAHSRSQTTLIGYSLVS

SEQ ID NO: 205907 - protein, 857 aa, Zea mays
  Clone ID: MRT4577_119370C.1.pep
KKASVSPEQQPVIASPQLKMDMPSFTPAIKHTAGFALSGSKLVPKTGEIASEPNYQVTGGMDSEQRIIFSEKIRCAVEQSTAQAKGASLDSMEAVKHKEGIWSNLSTISRNKLPPKVEEKLTSVAAAAEAAVSVAKAAAEAAKMASEAALQAKMMADEALSSSISVMSMHHEADQYNVISSPLILSSSTPASSLKIKDKSHAPGSIISVAREAARKRVEEASAAAKRAENLDAILKAAELAAEAVFRAGTIIGMGEPLPFTLRELLEAGPNGYWKSASVRNKSGSGNDNLVTETLEVDAPANPSKSGRKRGRKPKYDQALPNSEPFSNCKELQPYGIHSGHGVVGNVPVTEPMDGTNVTSPISIVWNGIEKGSAVEVLSDKVGFGVAWFSAKVIDINENNAFVSYDNHNGTGPREEWVPLRQEGDKPPQIRLAHPATLSKFKTRKRRRETAGSCLWVIGDHVDAWVNNCCWREGVISQNYETDETKYVVHFSVGGGGESLVVDAWSLRPSRVWKDVQWIEWSRARERKSKSNKGDSPLEKRQKTDLLQAGGNLSVVDETGGSSKDKNTNNAKKSDELKTLSLSQGEIVFNIGKSVVENKSDALAFKRPGLQKEGSKVVYGVPKHGKKKFMEVSKHYYAGQFDKISEGNASNRFVKHLVTQLPRERENDSKVDPIRGRRVGETRSRLPKPTKSQSVRASSAPGNDSFPMHVQNTCVSQRSFGFAGSSTSTSNNEKSTSEKNNPALGVGFRTEVPSVSELQTASTVPTNRAKKKYIPTVSNINRGILNTSEKANSDSGEPRRTTSDSTEPRRSNRRIQPTSRLLEGLQSSLIISKVPGEKVPRSNYKSASSRGRAQSHG

SEQ ID NO: 205908 - protein, 76 aa, Zea mays
  Clone ID: MRT4577_119371C.1.pep
IIFHRAQNGGLRKKTPIATKKNLRGGRAQPPPPRPPEKKPPKSSLTNGQTQNGTIFKSFCTQAQRVLKRKKGFNYG

SEQ ID NO: 205909 - protein, 72 aa, Zea mays
  Clone ID: MRT4577_119372C.1.pep
LVTSLLIYLITSTSRPPQHHATSYLPCATGPFCFTAENIDRVLYCLSCMMSSVVTLDIYKGFSKLTGSDSPF

SEQ ID NO: 205910 - protein, 83 aa, Zea mays
  Clone ID: MRT4577_119373C.1.pep
LFAVFFQTFAHWPWQVPVSLHDELTTCLHSEGRLMPIVMPCTPPEFCASTVTKGSLKKIREELTRGYVLTRSIQISVCTIIWK

SEQ ID NO: 205911 - protein, 76 aa, Zea mays
  unsure (1)..(76): unsure at all Xaa locations
  Clone ID: MRT4577_119374C.1.pep
SVPAPAPAPPVVVDTHAHHLHEGEHKPYFPAPAPPPHVETHHHPVVVHKIEDHFTKTXIPPQATVVEKKGLLLTIK

SEQ ID NO: 205912 - protein, 118 aa, Zea mays
  Clone ID: MRT4577_119375C.1.pep
MVLDGWEIAMGLDLGLDTRLFAARSARGMDKGAEPAGLQSCITSHQVERKKIEVFRHELQVWLRLLGDVIDELKEDAAKRGEYDHRALTVDDGHKRQWMSPAQLWVDSDAKLGESDKE

SEQ ID NO: 205913 - protein, 491 aa, Zea mays
  Clone ID: MRT4577_119376C.1.pep
GSRIIVTTRFQAVATTCSAHKDQDHIHLVDVLSIEDLVSGRVKTLSECRGNSARQSNQTKVPDRVWQMCGGLPLAIVTMAGVVASKPLMIRDEWIAVCNSLFPEPEKCHKPEEFMRIINYCYNDLPSDLKTCCLYLSIFPKGREVSRKRLIRRWIAEGFVSEKQGLSVEDVADTCFKQLMWGKMMRPVEHNSNGSVKSCRVHDMVLEYIISKAAEENFITVVGSHWSMSTSSKKVRRLTIHGSDPKRAKNVDSMNLSHVRSLTVFENLDKLRFKSFKTGIVQVLDLEGCKGFRESDANVSDICEMILLKYLSLRKTDIKNLPNNISKLKYLETLDVRETEVKQLPTTVGQLERITNILGGDKRRQRTLKLPKELKGTMKSLRILSGVEIVEGSTAASDFSYFTTLRKLAIYRIHHNEDIFKNLLSSIQYLSGYSLQTLLIVDESSEFFKTLESMSSSHLTDLRALELSGKLLYLPKWLDTLQHLVKLTLST

SEQ ID NO: 205914 - protein, 159 aa, Zea mays
  Clone ID: MRT4577_119377C.1.pep
SGCSEILLTTRPLVVFSKSGGEIVRVSRRLAESLVERRSAHPSSCVPRQEGTPSMAMVRTDPVWPGSSSAPPPPLRPSPPSPVAIFGIRLVPSSCFSPSPLPSPGKLVRSPCVDGSPCCLPRFWPAVAPSSLRSRKSHCSSLRLSSGEVVMRGLQRTRG

SEQ ID NO: 205915 - protein, 35 aa, Zea mays
  Clone ID: MRT4577_119378C.1.pep
HKKSFKSTSTHYTIQSLKHIFITHLLIKSISTHRL

SEQ ID NO: 205916 - protein, 77 aa, Zea mays
  Clone ID: MRT4577_119379C.1.pep
CAFAGTVLWRLKSWTYRGFVYSKMQRISTVQGHRIQMTCLKAIKPPCTLITTTNVLYDDLVDPLEGTCYLPTGHSLT

SEQ ID NO: 205917 - protein, 77 aa, Zea mays
  Clone ID: MRT4577_11937C.1.pep
TGGLLVTSMSRSVTARQRRVLREQQPEPRRPARPRRAHLHQQDEQQQHHHRRVRHERPCESHRDQQEQQPQHRHQQE

SEQ ID NO: 205918 - protein, 59 aa, Zea mays
  Clone ID: MRT4577_119380C.1.pep
LIYTADQNLDHRGAHGSPYISGSRYNLPLQFKSSISFPIPPIHLTAAGYMPANPNLPPN

SEQ ID NO: 205919 - protein, 65 aa, Zea mays
  Clone ID: MRT4577_119381C.1.pep
LNAKSSSFSGMTTSICVAPCRYRNMYVHRCMECEWQPHGMGKPNYCFFFIYYMSRLFLFFVMHVI

SEQ ID NO: 205920 - protein, 103 aa, Zea mays
  Clone ID: MRT4577_119382C.1.pep
KKKKKKKKKKKKKKKKKKKKKKKKKKKKKKKKKKKKKNLKKKGFPFLRFQFFFPFFGTSFFFFGGAFFNFFGGGFPRLSLGNPLLSPFFWLSGLSPFCPLWYY

SEQ ID NO: 205921 - protein, 63 aa, Zea mays
  Clone ID: MRT4577_119383C.1.pep
QRGMGTTRFTLPAGVTHEGTQTPLVHAIDAFAEKQTPKPWKDISVTIKALYERKLLDYETIDG

SEQ ID NO: 205922 - protein, 62 aa, Zea mays
  Clone ID: MRT4577_119384C.1.pep
FTINTPLYRIMMSLLSNFFFRYLLLYLKRSYLENKSTNLLSFFNEYNLFVKFGFFSMRYYKI

SEQ ID NO: 205923 - protein, 50 aa, Zea mays
  unsure (1)..(50): unsure at all Xaa locations
  Clone ID: MRT4577_119385C.1.pep
VIIRWWNNFGVKERILHFFRREFYPKSDWEAYCSYVAIRKYIIERVPSSX

SEQ ID NO: 205924 - protein, 81 aa, Zea mays
  Clone ID: MRT4577_119386C.1.pep
PPPGGCAHFVFSVGGSGFPIFIVAMGPTQVSVVCLVVRRPWFLSFSLLVVVFGVFWTHSRFARGCPWARVSAIRLSYFVFG

SEQ ID NO: 205925 - protein, 340 aa, Zea mays
  Clone ID: MRT4577_119387C.1.pep
MGSMTWLAAVLAALVVAASSSVASHASPPGKLEVGFYEHSCPQAEDIVRNAVRRGIAREPGVGAGLIRMHFHDCFVRGCDGSILINSTPDNKAEKDSVANNPSMRGFDVVDDAKAVLEAHCPRTVSCADIVAFAARDSAYLAGGLDYKVPSGRRDGRVSKEDEVLDNNVPAPTDEVDELIESFKRKGLNADDMVTLSGAHTIGRSHCSSFTERLYNFSGQLGRTDPSLDPAYAEHLKMRCPWPSSNDQMDPTVVPLDPVTSATFDNQYYKNVLAHKVLFISDNTLLENPWTAGMVHFNAAVEKAWQVKFAKAMVKMGKVQVLTGDEGEIREKCFAVNPHY

SEQ ID NO: 205926 - protein, 247 aa, Zea mays
  unsure (1)..(247): unsure at all Xaa locations
  Clone ID: MRT4577_119388C.1.pep
PIAQKLLALITLPSLIKLEGWESLVTVISSDMRCWAAPEKTEVLVIELLGSFGDKXLSSECLDGALRYLKPDAISSPSSYTIFTQPITESKLHDDIKAHKDIAHFETAYVVKLHRIATLAPPQQVFTFTHPNFSPNASNQRYTKLQFEMLPDMGSCLVHGFAGYFDSVLYKDVHLGIEPNTATPNMFSWFPIFFPLRKPIYVPEGSPIEVHFWRCCAPTKVWYEWAVTTPTPSPIHNSNGRSYWVGL

SEQ ID NO: 205927 - protein, 45 aa, Zea mays
  Clone ID: MRT4577_119389C.1.pep
GEFGLEVATAAVASLGPTSPRIMRQQSMHLPLRVSHLAIMKKGGR

SEQ ID NO: 205928 - protein, 78 aa, Zea mays
  Clone ID: MRT4577_11938C.1.pep
MTAHVKCSKAARWRSGNSTGTHPAAAAATDQPPRRPPPWLWPWQWPEENLQQKLRGKLPADAAPAVGLAVGVVLVLWL

SEQ ID NO: 205929 - protein, 338 aa, Zea mays
  Clone ID: MRT4577_119390C.1.pep
MRSTWLAFALSALVVVSSSAAHAHASPGKLEVGFYEHSCAQAEDIVRNAVRRGIAREPGVGAGLIRMHFHDCFVRGCDGSILINSTPDNKAEKDSVANNPSMRGFDVIDDAKAVLEAHCPRTVSCADIVAFAARDSTYLAGGLDYKVPSGRRDGRVSKEEEVLDNNVPAPTDEVDELIESFKRKGLNADDMVTLSGAHTIGRSHCSSFTQRLYNFSGQLGQTDPSLDPAYAGHLKARCPWPSSDDQMDPTVVPLDPVTPATFDNQYYKNVLAHKVLFISDNTLLDNPWTAGMVHFNAAVEKAWQVKFAKAMVKMGKVQVLTGDEGEIREKCFAVNPHY

SEQ ID NO: 205930 - protein, 322 aa, Zea mays
  Clone ID: MRT4577_119391C.1.pep
MGSTTWLAAVLAALVVAASSTVASHASPPGKLEVGFYEHSCPQAEDIVRNAVHRGIAREPGVGAGLIRMHFHDCFVRGCDGSILINSTPGNMAEKDSVANNPSMRGFDVIDDAKAVLEAHCPRTVSCADIVAFAARDGRVSKEEEVLDNNVPAPTDEVDELIESFKRKGLNADDMVTLSGAHTIGRSHCSSFTQRLYNFSGQLGQTDPSLDPAYAGHLKARCPWPSSDDQMDPTVVPLDPVTPATFDNQYYKNVLAHKVLFISDNTLLDNPWTAGMVHFNAAVEKAWQVKFAKAMVKMGKVQVLTGDEGEIREKCFAVNPHY

SEQ ID NO: 205931 - protein, 338 aa, Zea mays
  Clone ID: MRT4577_119392C.1.pep
MRSTWLAFALSALVVVSSSAPHAHASPGKLEVGFYEHSCAQAEDIVRNAVRRGIAREPGVGAGLIRMHFHDCFVRGCDGSILINSTPGNLAEKDSVANNPSMRGFDVIDDAKTVLEAHCPRTVSCADIVALAARDSTYLAGGLDYKVPSGRRDGRVSKEEEVLDNNVPAPTDEVDELIESFKRKGLNADDMVTLSGAHTIGRSHCSSFTERLYNFSGQLGRTDPSLDPAYAGHLKARCPWPFSDDQMDPTVVPQDPVTPATFDNQYFKNVLAHKVLFVSDNTLLDNPWTAGIVQFNAAVEKAWQVRFVKAMVKMGKVQVLTGDEGEIREKCFVVNPHY

SEQ ID NO: 205932 - protein, 51 aa, Zea mays
  Clone ID: MRT4577_119393C.1.pep
MRMVIALVVCLALSAASAYAMQMPCPCSRLQGLYGASSHLTTMMGAGLLDP

SEQ ID NO: 205933 - protein, 207 aa, Zea mays
  unsure (1)..(207): unsure at all Xaa locations
  Clone ID: MRT4577_119394C.1.pep
MRSTWLAFALSALVVVSSSAAHAHASPGKLEVGFYEHSCAQAEDIVRNAVRRGIAREPGVGAGLIRMHFHDCFVRGCDGSILINSTXVLEAHCPRTVSCADIVAFAARDSTYLAGGLDYKVPXGRRDGRVSKEXGGXDNNVPAPTDEVDELIESFKRKGLNADDMVTLSGAHTIXRSHCSSFTQRLYNFSGQLGQTDPFLDPAYAGH

SEQ ID NO: 205934 - protein, 205 aa, Zea mays
  Clone ID: MRT4577_119395C.1.pep
FILDTENKIYQFNGANSNIQERAKALEVIQHLKEEYHDGVCAVAIVDDGKLQAESDSGEFWVLFGGFAPIGKKAISDDDVVLETTSPKLFSISNGQLKLEDAVLTKSILENTKCFLLDCGAELFVWVGRVTQVEDRKAASAAVEKYIIKENRPKTTRITQVIQGYENHTFKSKFESWPVSNTSGSASTEEGRGKATALLKQKGGD

SEQ ID NO: 205935 - protein, 124 aa, Zea mays
  unsure (1)..(124): unsure at all Xaa locations
  Clone ID: MRT4577_119396C.1.pep
HGIIQCLLRRRQGPFVVVEVLDQVPEHSSGLCLCLWASLLASLDTCVSGGAWLGFCLWILNPFFFSISFSSSPCSSSFGCFGSLDRSVDRRVQWYIRLVSGVPRFFHSPHPVXSQSVSLKTKGR

SEQ ID NO: 205936 - protein, 88 aa, Zea mays
  Clone ID: MRT4577_119397C.1.pep
MKLLKPTWVNHNGKPIFSVDIHPDGTKFATGGQGQDSGKVVIWNMSPVLQEDDEKDENIPKMLCQMDNHLGITEWPFAGFACWQSAQG

SEQ ID NO: 205937 - protein, 613 aa, Zea mays
  Clone ID: MRT4577_119398C.1.pep
MEVADEVVRVLGAGFDLTSDFRLRFAKASEGRRLVELGEDTRDVPLPGGGGATLRGVPRDVGVDKGDRIRFRSDVLEFNQMSELLNQKSSVQGKVPSGYFNALFELSGAWLTDAKDTKHLAFDGYFISLYNMHLKASPLVLRDEVKKAVPSKWDPVALSWFIKTYGTHIIVEMGIGGQDVICVKQSHSSTVSTADLKLHLEDLGDFLFSDGKNHSPIHRKTKDGKSTVPDVFVRIVQHSNNLHLSSYSETSTKDGLTVTCSKRGGEAYLPNHSKWLQTVPKKPDAIMFKFVPITSLLTGIPGSGYLSHAINLYLRYKPDLQDLQYFLEFQVPLQWAPMFNELVLGPQKRKGSYPSMQFRFLGPKLHVSTSQVSSSQKPVVGLRLYLEGRKCNRLAIHVQHLSSVPSMIADSVASSMSEWRESQDSDPGYIEAIQWKNYSCVCTSAVKYNPEWHKRAPGGVFIVTGAQLVSKGAWAKKVLHLRLLYTHIPNCTIQRTEWRNAPAASQKGSFLTTISTTLSSPFTQRADTHQAKHEPAVQLNSGVYPDGPPVPLRSRKLLKFVDISEVVKGPHDVPGHWLVIAAKLVKEGGKIGIHVKFALLGYEGQSQGNSFMS

SEQ ID NO: 205938 - protein, 112 aa, Zea mays
  Clone ID: MRT4577_119399C.1.pep
QVHMAVVLNEYGGTIGIVTLEDVVEEIVGEIFDENDSKEEIQKKTGYIVRRGDGTFDVDANTSIDHLSEELGIKIPEGHQYETVSGFVCASFGYIPEEGGRMLVILEKNFRE

SEQ ID NO: 205939 - protein, 428 aa, Zea mays
  Clone ID: MRT4577_11939C.1.pep
MSEMKRSIMHLEDTESDEEVDHDMLIMMGEYKKRKNKQYKRRRGSVFGHQVYDRSRAENDMKLYQDYFAEHPTYPEKFFRRRFRMRRPLFIRIAEQVAQHDNYFVQKKNAIGVSGFSYLQKVTAAFRQLAYGVLADYVDEYLRIGESTAIESLRKFVKAICEVFGPEYLRAPNEDDTTRLLSIAEQRGFPGMLGSIDCMHWKWKNCPTAYQGTYCGHVKEPTIILEAVASPDLWIWHAFFGLPGSLNDINVLHRSPIFDRLAQGEAPTVHYTIGGHNYNQGYYLADGIYPTWSTFVKTIKAPVNLKDRNFAKAQESQRKDVERAFGVLQARFAIVRVPARMWDEATLRDIMQACIIMHNMIIEDERELGRQEAPYDKGDDDTSGWVSHEGTSKFSFFLKKHKEIQDPKLHNQLQRDLVEHLWERKGDQ

SEQ ID NO: 205940 - protein, 222 aa, Zea mays
  unsure (1)..(222): unsure at all Xaa locations
  Clone ID: MRT4577_1193C.1.pep
RSAEVANLTSRCKGLKEEGVADRKEACRLRAEVLGLKAEADHREEVLRWAQEGLQAVTEERNSLAKSLEDDWSSGQALAAQIEGLEKSLEGMAWTVEQQGAEAVADLFQDLDVVGMPRVGPMRPCMQALGDFVWGELRRAVHLGXKRALVVVASHYEIDLERVCDGFVLPDKPELAAAEGQRLMDVVEGPRTLWARHFEDEAVPLSPSHVAAEPPARPPPAA

SEQ ID NO: 205941 - protein, 385 aa, Zea mays
  unsure (1)..(385): unsure at all Xaa locations
  Clone ID: MRT4577_119400C.1.pep
SGSAWTTPRASGRRRRPPLRGPVPAPRIRHERQLHRFIHRYLSLFQLQGKPSSKWQPSMDIMALNARDEEQYGNNHLGLGLSLSLGLGVATAAPVEVEPPPPPAAAXSSSSELSASRPSPPSPRRSGXWNGPGLFFGTTMDPXWRGTSSSSXAAARHGHEMPFLRGVDVNRAPAGETRRGSCSEDDEEPGGASSSPNSTLSSSLSGKRAAPARSGGEVADHTPRAGGGSDDEDSGGGSRKKLRLSKDQAAVLEESFKEHNTLNPKQKAALAKQLNLKPRQVEVWFQNRRARTKLKQTEVDCEFLKRCCETLTEENRRLQREVAELRVLKLVAPHHYARMPPPTTLTMCPSCERLASASASADQAGRAGPCWGPLPVFVDGPARRP

SEQ ID NO: 205942 - protein, 84 aa, Zea mays
  Clone ID: MRT4577_119401C.1.pep
VIYDAHSLSSLYILEWSMRYNLVYHIEGGVRLARAVMGNGHNLEVGLLVTPWRKMKLLLTSRDRANLSPRVHSGRSRRGETRKV

SEQ ID NO: 205943 - protein, 331 aa, Zea mays
  Clone ID: MRT4577_119402C.1.pep
RCATSAECKTGILAVLTVMSSSDTQMIKNMELKLNLSYALHRRCYTSLRRGGAAEYRGGGIADEAAIARWFPNSIQVRLPEAKIMGKNMGKLILTGWATVWLTVAPWHTKSLGMDVTTQVFITSLTVSMDLSTEYGLIQPHEILGNSSQCGYGQGRVPLILSSPLTPCATVCLRWSARSFPLPIRAQQTHGFRGSLGFAAVKPGIALICLSDPVVPGGVSVTWVYKIHTPSLSLHPPLSLSPLQPRRITGSSAPESSEAAAGVIRGSPSLIPWYRAWGLYQFAWNLNTTSPGQNTSRSTGNGSPDVNPVPQTYGARGQSPVSSRSWLKCCT

SEQ ID NO: 205944 - protein, 84 aa, Zea mays
  Clone ID: MRT4577_119403C.1.pep
ARLVYQFYTLQRLRIFTHKSCYPFATELIRLHTPLPRKRGRVPLRGLYKVPLASDYPLQFIGSSSAGFLSDRHRSKINPRTSLH

SEQ ID NO: 205945 - protein, 145 aa, Zea mays
  Clone ID: MRT4577_119404C.1.pep
KSGVSSSKKSQSKSNKKKEKTRKKQSCKSSGEKNKNKTSSEGKYLEQPDSCYESKDEDSWSGNSSSSLSKRPTQHAFGATSRFSKDTVHFVQDESSRYSNGPIMDKDLEEWEADIEAEVEAFRKRLEELSAPLKNKPKVGAFPHR

SEQ ID NO: 205946 - protein, 94 aa, Zea mays
  unsure (1)..(94): unsure at all Xaa locations
  Clone ID: MRT4577_119405C.1.pep
FDYVVDQALDQVASTDLKQVMLVKALLNARDTLLAELQKLSAAINHAVHLTEFTSKMNDMKLFDSXARTGXAADAEDSAQGKPQNGLEVLALCY

SEQ ID NO: 205947 - protein, 84 aa, Zea mays
  Clone ID: MRT4577_119406C.1.pep
ARLVYQFYTLQRLRIFTHKSCYPFATELIRLHTPLPRKRGRVPLRGLYKVPLASDYPLQFIESSSAGFLSDRHRSKINPRTSLH

SEQ ID NO: 205948 - protein, 53 aa, Zea mays
  Clone ID: MRT4577_119407C.1.pep
RDGFMKMLQALTKPNYTLVVLFQKKNLDFFCISAGNNGQKLSSPTYLVHINSI

SEQ ID NO: 205949 - protein, 139 aa, Zea mays
  unsure (1)..(139): unsure at all Xaa locations
  Clone ID: MRT4577_119408C.1.pep
RSVVEIREVLRGSDSRVGRSDMVAPSVETRCSWSGLAWATDHHSIHXTLRTYGYALEAYIILXRETQRSRGSGSFALSTEDAMLKAMKGMNXKELDGRSITVDHGKSCGXRAGGRSAYCGGRRCCTYGCGRRCDGACSY

SEQ ID NO: 205950 - protein, 82 aa, Zea mays
  unsure (1)..(82): unsure at all Xaa locations
  Clone ID: MRT4577_119409C.1.pep
HWTTPGHHIGFIDMYRLTFFFDNFGPNATTFIVPSVIFPDRLPVTCHGISTDSRKXSAIIXCFKFLYLAQNRLPGQDRPLIP

SEQ ID NO: 205951 - protein, 171 aa, Zea mays
  unsure (1)..(171): unsure at all Xaa locations
  Clone ID: MRT4577_11940C.1.pep
RXFFSFFFFFFFFFFFFFFFFFFFFFFGEGPRWLERPLPPFGVFGQKALKIFLGEKKKNKARGNPPPNFFFLQGGGPHLTQGSRPQWAPKKRVAPVGFLLGEPLVDFLVRQGGPREPNLEWFGETPKGPKKIFTPFFLGAFLPREGNPPGPGPLGTLPKGPKLFYPPTRGF

SEQ ID NO: 205952 - protein, 61 aa, Zea mays
  Clone ID: MRT4577_119410C.1.pep
AYCGQAYRHQPLVDLLLQKHRCEHLRQIPHPGHPCLPIRCLSGLCRWMVLGEIERDQSTLE

SEQ ID NO: 205953 - protein, 47 aa, Zea mays
  Clone ID: MRT4577_119411C.1.pep
CSQERRVGAAPIGLGLLPGSSKGEAQKVASSQGAIGLASQEGSVHSS

SEQ ID NO: 205954 - protein, 52 aa, Zea mays
  unsure (1)..(52): unsure at all Xaa locations
  Clone ID: MRT4577_119412C.1.pep
AKGAFVHWYVGKGMKKGXFFEAREDLAALKKDYKEVGAEFNKGKDGPKGSEY

SEQ ID NO: 205955 - protein, 83 aa, Zea mays
  Clone ID: MRT4577_119413C.1.pep
LIYQTIPSVLATKKISPTFQSPNYYSHLITHCAPGTLSFPPNQNSQNPLPTKKKIFPILLFFKVFICLFLPTNLIKPTFLTAL

SEQ ID NO: 205956 - protein, 42 aa, Zea mays
  unsure (1)..(42): unsure at all Xaa locations
  Clone ID: MRT4577_119414C.1.pep
GKGMKEGXFLXAREDLAALEKDYQEVGAEFNKGQDGHQGYQY

SEQ ID NO: 205957 - protein, 65 aa, Zea mays
  Clone ID: MRT4577_119415C.1.pep
QCRGINNFYNIRGCKPHNTLEQTHITRLREQLLADHGIRAAHWPDAASLANFFSTCHPWRHSCPY

SEQ ID NO: 205958 - protein, 102 aa, Zea mays
  Clone ID: MRT4577_119416C.1.pep
TVVRAYLASDVTKAGFGDLDFGWGKPVYGGPAKGGVGAIPGVASFLIPFKNAKGEDGIVVPMCLPGPAMETFVKEMDKLLSAPADAEAEQQKDAFPVIRSAL

SEQ ID NO: 205959 - protein, 104 aa, Zea mays
  Clone ID: MRT4577_119417C.1.pep
TGNALRSDLRPVDPDAQGRLISAGSVRKIGPSPGIRNVLSYELNRMLITNGANDLGDLAKSVLLLPESGIRAMKRLVGALSLRTGVMSPSLKIESAATMPKLKM

SEQ ID NO: 205960 - protein, 132 aa, Zea mays
  Clone ID: MRT4577_119418C.1.pep
GGAQSTAVGHPGSGGGAKRATQRSVTSGRRSLYSVLLPVLAGDAPWQCFLYPYLMKETAIRLRGGGVSVLTRGFTFTSAGGTPTIRLNGACRLRRRNTLWARRTRGGTSSSRSNMARHLKGLMAATVGVIMT

SEQ ID NO: 205961 - protein, 88 aa, Zea mays
  Clone ID: MRT4577_119419C.1.pep
MSKRLLLHDEFEPLFFCYTIQWSKDEEEAFKAKVVEAYDREGSPYYSTARLWDDGVIDPADTRRVLSLCLSASAKPVPEDTRYGVFRM

SEQ ID NO: 205962 - protein, 113 aa, Zea mays
  Clone ID: MRT4577_11941C.1.pep
PKQKTKGRPPPVAPATESPKPPGRPHKVDKTPAKASPAKAAKGAGAPKEPGRKGVPSKGILWCVRPRRGTEFPRWGSPPPPLWGGFWGSCRGVPPPPGGAGWGCGNKKKNGPR

SEQ ID NO: 205963 - protein, 578 aa, Zea mays
  Clone ID: MRT4577_119420C.1.pep
MLSRLAAARRQLLLSPAVAYRSSSAAATASAVHERAAPASASVLPDTLERGSDAYQRNTAAVGGLLSDLRARVSQVLRGGGAEAVRRNAARGKLLPRDRIDRLLDPGASFLELSQLAGSDVYDEALPSAGIITGIGPVHGRLCMFVANDPTTKGGTYYPLTVKKHLRAQEIASECKLPCIYLVDSGGANLPRQADVFPDRDNFGRIFYNQAKMSSDGIPQIAVVLGSCTAGGAYIPAMADESVIVKGNGTIFLAGPPLVKAATGEEISAEDLGGASVHCKVSGVSDHFAQDEIHGLELGRNIVKNLHLAAKGTNIQSSACGYQEPLYDVEELRSIAPADVKQSFDIRSIIARIVDGSEFDEFKKLYGTTLVTGFARICGQPVGIIGNNGILFTESALKGSHFIELCAQRHIPLIFLQNITGFMVGSKSEASGIAKAGAKMVMAVSCAKVPKITIIVGGSFGAGNYGMCGRAYSPNFLFLWPTARISVMGGIQAAGVLAQIEKNNKRRQGVEWSKDEEEAFKAKVVEAYDREGSPYYSTARLWDDGVIDPADTRRVLSLCLSASAKPVPEDTRYGVFRM

SEQ ID NO: 205964 - protein, 60 aa, Zea mays
  Clone ID: MRT4577_119421C.1.pep
RLGLRLGFPLTPLGPVRVTKLGSFQTCPEFAAGIDGTIRRGVAPGVSRSVRRESACDLEP

SEQ ID NO: 205965 - protein, 63 aa, Zea mays
  unsure (1)..(63): unsure at all Xaa locations
  Clone ID: MRT4577_119422C.1.pep
XAXGXSSLLPNLHDPCTXGXAVXTWHXPRQLXAMXGLPXRLSWYXAXSLPSXKLPFLXXPXEV

SEQ ID NO: 205966 - protein, 53 aa, Zea mays
  unsure (1)..(53): unsure at all Xaa locations
  Clone ID: MRT4577_119423C.1.pep
GSFNIRLANEIGLRTMVLVNQLIKSIFLELRGLKXTLIYIQLHKRWQYIQIFL

SEQ ID NO: 205967 - protein, 153 aa, Zea mays
  Clone ID: MRT4577_119424C.1.pep
SDPLDTASPMLSTAMAPLQGGMLEFSGLRSSSSLPLRRNATSDDFMSAVSFRTYAVSTSGGSRKAPTEAKLKVAINGFGRIGRNFLRCWHGRGDSSPLEVIAINDTGGVKQASHLLKYDSTLGIFDADVKPVGDSAISVDDKVIKEETDRNPS

SEQ ID NO: 205968 - protein, 76 aa, Zea mays
  Clone ID: MRT4577_119425C.1.pep
PGKEGPPGVRVYSKAPEREIRPPAKLIAGTPPPLSKGVKAQEYPAGPPDLSPRGEWVKGPAKKGLGPLGLNPGATP

SEQ ID NO: 205969 - protein, 69 aa, Zea mays
  Clone ID: MRT4577_119426C.1.pep
TADKEHQSTYVIGTFLVPCRTALMCIFPLSGTYFQGIEGFSDHTSFLSPVRGEGDMLFNSHRLMVFFGT

SEQ ID NO: 205970 - protein, 87 aa, Zea mays
  Clone ID: MRT4577_119427C.1.pep
GIRYIWLRVHCNGHVPACTGVYASLYILVLVSHELLLSPQFLLVTTTMVFSVCRLSTWSHSPPLAPLIRNPWSPTPRPSPSWASRVR

SEQ ID NO: 205971 - protein, 492 aa, Zea mays
  Clone ID: MRT4577_119428C.1.pep
MGMIVGVALIAGWARAMARRAAKRSNKAAVISSLGSLNREDVKKICGESLPQWISFPEYEQVKWLNKQLSKLWPFVEAAATMVIRDSVEPILDDYRPPGISSLKFSRLSLGTVPPKIEGIRIHSFKKGQITMDMDFRWGGDPNIILAVETLVASLPIQFKNLQVYTIIRVVFQLSDEIPCISAVVVALLAEPKPRIDYILKAVGGSLTAMPGLSDMIDDTVASLITDMLQWPHRIIVPLGGVDVDVSDLELKPHGKLTVTVVRAESLKNKELIGKSDPYVVLFIRPMFKEKTSVIDDNLNPHWNETFHLISEDKETQSLILEVFDEDKMKQDKRLGIAKLPLSDLEMETVQEVKLQLLSSLDTTKVAYHQFTNAEAREALELEKQTVDERRKVKSETGAVSGAADAASGMASTVTNVAGTGIAAAGTVAGTGVSAAGSGVGMVGTGIGAVGSGIGAFGSGLSKAGKFVGRTVTGPFSSSRRSTSSVPNVVDD

SEQ ID NO: 205972 - protein, 377 aa, Zea mays
  unsure (1)..(377): unsure at all Xaa locations
  Clone ID: MRT4577_119429C.1.pep
MATSKNSSPSLSPLVVFLLGAASATVLLLFFLTATASPAWPALEAGPRSXAQAACAAVLXTPRANGTVVVDAXATRRRSRSXPANEAGASGSDDDAGFARMLRRAAMEDRTVIMTSVNEAWAAPGSLLDSFLESFRVGENVSHLAKHVVVVAMDDGAFRRCQAVHPHCHLLRPEKAGLDLSGAKSYMTKDYLDLVWSKLKLQQRVLELGYNLLFTDVDVAWFRNPLVHITMAADITTSSDFYFGNPDDLGNFPNTGFIYFKATPRNARAMAYWHAARRRFPENHDQFVFNEIKRELADGLGVRIRFIDAATVSGFCQLGRDLNRIATVHMTCCVGLENKLFDLKRVIVDWKRYMARPLWERQMGKIGWTFQGGRCIH

SEQ ID NO: 205973 - protein, 61 aa, Zea mays
  Clone ID: MRT4577_11942C.1.pep
LKKESAKRKEDHYSSKKSKDKKEKVSDSSSKPPVLMADRPTVPQYPLPVLPVDDDEISSKG

SEQ ID NO: 205974 - protein, 298 aa, Zea mays
  unsure (1)..(298): unsure at all Xaa locations
  Clone ID: MRT4577_119430C.1.pep
MGGQQNALHQLVSFILGASAAAVLLFFLTTATSGARFTXSRAGPXTTGFDDDAPVQAAPATRANHADAKGAAAEQEDELQRLLRAVADEDRTVIMTSVNEAWAAQESLLDLFLESFHIGERISHFADHVVVVAMDDGAFRRCQAVHPHCHLLRPXKAGLDLSGAKXYMTKXYLDLVWSKLKLQQRVLELGYNLLFTARASLXSLLPLSFHWFIHELRGGVPFDXGVAWRAQDVDVAWFRNPLVHITMAADITTSSDFYFGNPDDLGNFPNTGFIYFKATPRNARAMXAYWHAARRRFP

SEQ ID NO: 205975 - protein, 241 aa, Zea mays
  unsure (1)..(241): unsure at all Xaa locations
  Clone ID: MRT4577_119431C.1.pep
MAAFRSLRRRLPLALLLAVCVAASRSDPSGDDFYNRSICKLQPYRCGEVNITYPFYLSDDTADVLGNSSSYCGYPGLAIDCVDDEYPTIQLGGNSSNTGYSYNVTDIDYPTSTIYLADPDVLDDASCPRVDHNVTVSPSPTLWLNLSDYTVRYLLFFANCSINVLHVPNQSDINPIACASGSDGDYSFVIPSEMXPPASXLQMCSQQVILVPVLQNASLTPVDPQWSTSGYRDALKQGFQL

SEQ ID NO: 205976 - protein, 182 aa, Zea mays
  Clone ID: MRT4577_119432C.1.pep
HETRYGAAFRDWPGVAWRAQDVDVAWFRNPLVHITMAADITTSSDFYFGNPDDLGNFPNTGFIYFKATPRNARAMAYWHAARRRFPENHDQFVFNEIKRELADGLGVRIRFIDAATVSGFCQLGRDLNRIATVHMTCCVGLENKLFDLKRVIVDWKHYMARPLWERQMGKIGWTFQGGRCIH

SEQ ID NO: 205977 - protein, 214 aa, Zea mays
  unsure (1)..(214): unsure at all Xaa locations
  Clone ID: MRT4577_119433C.1.pep
MTYSAMAALCSPRRRLPLPLLLPLLLAVLVAASRGDDPSGDEYFNRSICKLQPYRCGEVNITYPFYLSDDTADVLGNSSSYCGYPGLAIDCVDDEYPTIQLGGGSSTGYSYNVTDIDYPTSTIYLADPDVLDDASCPRVDHNVTVSPSPTLWLNLSDYTVRYLLFFANCSXSTFSTFPTSLTSAPIACASGSDGDHYSFVVPSEMPHPASVAAA

SEQ ID NO: 205978 - protein, 197 aa, Zea mays
  unsure (1)..(197): unsure at all Xaa locations
  Clone ID: MRT4577_119434C.1.pep
MATSXNSSPSLSPLVVFLLGAASATVLLLFFLTATASPAWNALEAGPRSXAQAACAAVLXTPRANGTVVVDAXATRRRSRSSSSERGNALAASLFLATGDELMPCFFVLFQAGASGSDDDDAGFARMLRRAAMEDRTVIMTSVNEAWAAPGSLLDSFLESFQVGENVSHFAKHVVVVAMDDGAFRRCQAVHPHCHLL

SEQ ID NO: 205979 - protein, 278 aa, Zea mays
  Clone ID: MRT4577_119435C.1.pep
MSRLLPPVLSPLPAFSLPPPLLPRIHIRTSAVRGGAAENAMASGTTARERRLVKVREERRRREYDREHTYPGWAKVLENACRDDEELRAILGDSIGNPELMKQRIQERVRKKGRAQFNKSKTGSIVAFKVSFRDFNPLNSFIWFELFGEPTDRDVDLLGGVVQAWYVMGRLGAYNSSNLQLANSMMDYDPSYDSEEASTVMPSSFHDISDVEFQDNWARVWVDLGTSDYLGLDVLLNCLTQLSSEHLGIKQVVFGGKKMGDWEEGMTSSDYGYKHFKI

SEQ ID NO: 205980 - protein, 357 aa, Zea mays
  unsure (1)..(357): unsure at all Xaa locations
  Clone ID: MRT4577_119436C.1.pep
MGGQQNALHQLVSFILGASAAAVLLFFLTTATSGARFTGISSWANGTTGFDDDAPVQAAPATRANHADAKGAAAEQEDELQRLLRAVADEDRTVIMTSVNEAWAAQDSLLDLFLESFRSGERIAHFVDHLLVGALDGGALERCRAVHPHCYLLPTXAARNLSGEKVFMSKDYIDLVWSKVRLQQRILELGYNFLFTDVDILWFRTPFERMSVAAHMVTSSDFYFGDPYSPMNLPNTGFLYAKSSRRTVGAFEAWHGAREAFPGKHEQQVLNEIKVELVATRGLRIQFLDTEHNAGFCNNTRDFNTLYTMHANCCVGLGAKLHDLGNLLQEWRAYRQMDDEERARGPVRWKVPGICIH

SEQ ID NO: 205981 - protein, 305 aa, Zea mays
  unsure (1)..(305): unsure at all Xaa locations
  Clone ID: MRT4577_119437C.1.pep
MSRLLPPVLSPLPAFSLPPPLLPRIHIRTSAVRGGAAENAMASGTTARERRLVKVREERRRREYDREHTYPGWAKVLENACRDDEELRAILGDSIGNPELMKQRIQERVRKKGRAQFNKSKTGSIVAFKVSFRDFNPLNSFIWFELFGEPTDRDVDLLGGVXGIVQFHWILLIQKTTYCLDVKCSLQVVQAWYVMGRLGAYNSSNLQLANSMMDYDPSYDSEEASTVMPSSFHDISDVEFQDNWARVWVDLGTSDYLGLDVLLNCLTQLSSEHLGIKQVVFGGKKMGDWEEGMTSSDYGYKHFKI

SEQ ID NO: 205982 - protein, 80 aa, Zea mays
  Clone ID: MRT4577_119438C.1.pep
SGNLVGNKQGSVADCPGCNTCSIDCLEPMITNNATLTNENETASCPITTIKLFRSSFWLVAYQCKGDFWLLKVGYRLKAL

SEQ ID NO: 205983 - protein, 59 aa, Zea mays
  Clone ID: MRT4577_119439C.1.pep
LIDIIQYMIDVDAGVITIDNSRSDQKLLSVFHAGVKDRSSLGPGVYDIHYRMIPYTEEI

SEQ ID NO: 205984 - protein, 257 aa, Zea mays
  unsure (1)..(257): unsure at all Xaa locations
  Clone ID: MRT4577_11943C.1.pep
MGANGHPPLASTRAHNGSHSGGSGGGGGGGGGANPSNGGTAAALRHDPGLAREWLTEEHAILDELLVKYASDLPVVRYXKIAMKLPEKTVRDVALRCRWMXKKESAKRKKEDHYSSKKSKDKKEKVSDSSSKPPVLMADRPTVPPYPLPVLPVDDDEISSKAXIGGPTGEILETNSQVLSQISTNLSXHIQNNISLLCQTRDNILRILKEINDAPETMKQMPSLPVKINEDADAPATQMINEDLVNSLLPRPTVPMQ

SEQ ID NO: 205985 - protein, 47 aa, Zea mays
  Clone ID: MRT4577_119440C.1.pep
ELKKSDFLKVSFHLRVKPFFLFSARFYLSIYDMMLDTPQFHFFTYKS

SEQ ID NO: 205986 - protein, 92 aa, Zea mays
  unsure (1)..(92): unsure at all Xaa locations
  Clone ID: MRT4577_119441C.1.pep
TXCPPVATQAITPTLMANRQNVMVETPPSLKKRRKKLAHSGGGEKHGERTPPNVPTGGGPPGERPQGGGPTGLGGGKEEPGKHPNNRGRRTS

SEQ ID NO: 205987 - protein, 96 aa, Zea mays
  Clone ID: MRT4577_119442C.1.pep
KKFFWGSFLGGGGGPPPNKKKGGPCRLFIFFWPRPLFFGGPPPPKKGLKFWPFWWGKGEKFCFWFKTPPGGEGKRKFFWGGGFPPPKKKKNPPPPP

SEQ ID NO: 205988 - protein, 63 aa, Zea mays
  Clone ID: MRT4577_119443C.1.pep
HASAACHSRPALLPRPAVLSCSPWPAPAWPPSPMAMAAELPCRGLSRPCGQPLTQSVSTRANW

SEQ ID NO: 205989 - protein, 60 aa, Zea mays
  Clone ID: MRT4577_119444C.1.pep
VPRGRPGRDPLDYPAIDLVSNPSILVSSVPRDLNPMTHSRIGILALVWIDKAEGQGGSAE

SEQ ID NO: 205990 - protein, 58 aa, Zea mays
  Clone ID: MRT4577_119445C.1.pep
AECSEDHSQVSETKIPDAGRMGVICAHTHGKLYYDELLSLRSNQSTARRSAYDDSLAA

SEQ ID NO: 205991 - protein, 162 aa, Zea mays
  unsure (1)..(162): unsure at all Xaa locations
  Clone ID: MRT4577_119446C.1.pep
VGSGKIGKYTEGLYDGFGYEKWDSGDDARRLLCRXYGWDEEEIAXPQLEEMRTVHVGSMGXRIIVRLXSDYIAGGKTEITLDTRTRWGLLGMLTETDYVDSESIRRRTMHDDMEALPRVIVLASTTTGITVPKIPRSALKSGESDYVVTXTDAMIMAGNLLG

SEQ ID NO: 205992 - protein, 89 aa, Zea mays
  Clone ID: MRT4577_119447C.1.pep
MAQPVFLSSLRSRLCSAPPSPHHHLQPSRGYHVELGAREKALLEEDVALKRFKSYKNSVKQVSKIGNVLTLAVVFGCSYELGLLAASMK

SEQ ID NO: 205993 - protein, 188 aa, Zea mays
  unsure (1)..(188): unsure at all Xaa locations
  Clone ID: MRT4577_119448C.1.pep
RPLLQMCRRCLVLQIISRWPHPYPERRRPIFLVHVFPSDDGRCTCRSSHGSSTVEAGGLVCSQERNRTVQPGERQIYPLGGSTTEVTDRTWRGSWRRGEKAWRVQQGCAASXTWPAAWGSDAWCWRTAWCRLRGRSVYGATQDESRRPEGWFTGYCCKSLVFIGWNLFRGTLNIPIEDIIYSPPLQTV

SEQ ID NO: 205994 - protein, 81 aa, Zea mays
  Clone ID: MRT4577_119449C.1.pep
CSGVCKSYVIDFDFATSSSLEEWIRLLMLRFVYLYSTPQLLQPAYVCFCFVPFEVFFKLELSLEPQPVHFKKCPLQGPLWL

SEQ ID NO: 205995 - protein, 51 aa, Zea mays
  unsure (1)..(51): unsure at all Xaa locations
  Clone ID: MRT4577_11944C.1.pep
XXXXPXAIFSXIXLLRSREXPXXXTXXIGAVKWQXLRXNLVSGEEVVLGLL

SEQ ID NO: 205996 - protein, 125 aa, Zea mays
  Clone ID: MRT4577_119450C.1.pep
MGFGMVSLLDGFFRRALTSAGLRPGSAAVDADTTIHFWAHPSLLQAQAQPSSAAPRPVVVLIHGFGPDPTWQWAAQAGPLSRHFDLLVPALLFFGAFGTRAPARSDAFQAAALAALVAGGGHVPG

SEQ ID NO: 205997 - protein, 58 aa, Zea mays
  Clone ID: MRT4577_119451C.1.pep
MILRPTDGNIYTPVSSHSQTVPPISLYLQNSESGYPMDTRLPGGPLYLSRCFPTHTEL

SEQ ID NO: 205998 - protein, 65 aa, Zea mays
  Clone ID: MRT4577_119452C.1.pep
EFTPDAEGGYTVIVQKSRKVPANEEPIMKGSFKVGEPGKLVLTVNNPASKKKKLLYRSKVKSTSE

SEQ ID NO: 205999 - protein, 123 aa, Zea mays
  Clone ID: MRT4577_119453C.1.pep
MQLRISPSMRSITISSSNGVVDSMKVRVAPQPPPPPPPPHGAARRGGGGGGGWYWRAVAFPLVVALGCLLPFAFILAAVPALEAGGSKCSSVQATCISTPQQYLPLLLVVHPVFCFVLNSSVS

SEQ ID NO: 206000 - protein, 58 aa, Zea mays
  Clone ID: MRT4577_119454C.1.pep
AASSPTTCSMELFATPGYTQFVEQENIDRNSNLVATKCEPLKSYKVGLTISPARCLLV

SEQ ID NO: 206001 - protein, 560 aa, Zea mays
  Clone ID: MRT4577_119455C.1.pep
MQLRISPSMRSITISSSNGVVDSMKVRVAPQPPPPPPPPHGAARRGGGGGGGWYWRAVAFPLVVALGCLLPFAFILAAVPALEAGGSKCSSVDCLGRRIGPSFLGRQGGDSTRLVQDLYRFFDQVNKEEFPPDEKLPESFRDFLLEMKDNHYDARTFAVRLKATMETMDKEVKRSRLAEQLYKHYAATAIPKGIHCLSLRLTDEYSSNAHARKQLPPPELLPLLSDNSLQHYILASDNILAASVVVSSTVRSSSLPEKVVFHVITDKKTYPGMHSWFALNSIAPAIVEVKGVHQFDWLTRENVPVLEAIENHRGVRNHYHGDHGTVSSASDNPRVLASKLQARSPKYISLLNHLRIYLPELFPNLNKVVFLDDDIVVQRDLSPLWAINLEGKVNGAVETCRGEDSWVMSKRFRTYFNFSHPVIARSLDPDECAWAYGMNIFDLAAWRKTNIRDTYHFWLKENLKSGLTLWKFGTLPPSLIAFRGHVHGIDPSWHLLGLGYQDKTDIESVRRAAVIHYNGQCKPWLDIAFKNLQPFWTKHVNYSNDFVKNCHILEPQHVKE

SEQ ID NO: 206002 - protein, 110 aa, Zea mays
  Clone ID: MRT4577_119456C.1.pep
KQAMSMHVYSASEESKVSVCLPRVPPLQIKSARPIKTVGAVSDETMDRRKVIMQRIEGALWTQEPVRVAQEGKITVSALWFDVGGIIFSSTGDVQEFMLLYVNLKCDITS

SEQ ID NO: 206003 - protein, 105 aa, Zea mays
  Clone ID: MRT4577_119457C.1.pep
SIAVTTSVWMASRQPFCFATKPAASQTRFCCNLFSPTKGLVWRSKQAPHLCCSAAGVCCREHRWNQNKRRTCFSSSWNYCRSVGVLAVENVRESEVLSGLIETEA

SEQ ID NO: 206004 - protein, 95 aa, Zea mays
  Clone ID: MRT4577_119458C.1.pep
GLVGGIKFIGCLIVKKKKKKLRTSEKLSSVFFFFICVFSFWGFSFLGRFVFFFFLFDVFFLLKHCLKCSSWHGSFITRPFQNWALLLALGAIFFV

SEQ ID NO: 206005 - protein, 72 aa, Zea mays
  Clone ID: MRT4577_119459C.1.pep
SAGDGHPFLPRLRFVLSSTSPLPCRTVYPLLHGNPYGAAYTIFPAFQAAPPPPPTGSCCLLSHGRTPLASRR

SEQ ID NO: 206006 - protein, 43 aa, Zea mays
  Clone ID: MRT4577_11945C.1.pep
SLCMCCVRSLMSPGRYPEGLQTSLSIMSALTQCQTSDPEYLVA

SEQ ID NO: 206007 - protein, 52 aa, Zea mays
  Clone ID: MRT4577_119460C.1.pep
MVVVIWSLIFKNGGSNKLVKCFAIHSVFDILYVYPYYFIAPRFLLPSVMGVD

SEQ ID NO: 206008 - protein, 69 aa, Zea mays
  Clone ID: MRT4577_119461C.1.pep
HGVLHLMRALQEGFALPSQCRLSLLQVGIRSSQMSPQCFMQCPNSDHDVAACCFPSGRLLIHGSPSRSS

SEQ ID NO: 206009 - protein, 103 aa, Zea mays
  Clone ID: MRT4577_119462C.1.pep
MAYVDHAFSISDEDDLVGGAMGGPRGAPVKEIAFAAALLAFGALGTIGGLLMAVNRVGGDRAHGIFFMMLGIVMFIPGFYYTRIAYYAYKGYKGFSFSNIPPI

SEQ ID NO: 206010 - protein, 97 aa, Zea mays
  Clone ID: MRT4577_119463C.1.pep
SSGNNAEYFFFFFFFFFWRGVELPVAFIKFQKFCKNYRGLVPGDDSLAQNLGVKKEMGFFGPNYPILRQKGDFELPLLFNRGEFFKTYFCWLLRGIT

SEQ ID NO: 206011 - protein, 61 aa, Zea mays
  Clone ID: MRT4577_119464C.1.pep
GGVGDLAAVPRLALAGARVGRLARQLRGLGLDWACGRGRLDPSAGSSSVSMLLAESSSRDR

SEQ ID NO: 206012 - protein, 84 aa, Zea mays
  Clone ID: MRT4577_119465C.1.pep
VQGRCVTVVRAAVHLGLQHTYASCSTVSGSMHAVNHGGICSKFIIRKQWCLLVMHRKTSKGGRRLDRRRRPPKYNFRPGTCRRA

SEQ ID NO: 206013 - protein, 82 aa, Zea mays
  Clone ID: MRT4577_119466C.1.pep
GQAPGIGSTARTMKRLENQRAEIELYLAREQGTKVIMLSDGTRSIDLETNPSRESWVRLSWTIRASFSGLSSWVGVRCTRSN

SEQ ID NO: 206014 - protein, 47 aa, Zea mays
  Clone ID: MRT4577_119467C.1.pep
GCDTLACIVRACYLSYVSCMCFVYTPHELCETPVRRIPAVYHASGRI

SEQ ID NO: 206015 - protein, 63 aa, Zea mays
  Clone ID: MRT4577_119468C.1.pep
IPTAPSKESNLPSSSFQRITSLMVPLKSNSCASFYHLLTWKTPALPQLNRFPYHPLFPSCLIT

SEQ ID NO: 206016 - protein, 231 aa, Zea mays
  unsure (1)..(231): unsure at all Xaa locations
  Clone ID: MRT4577_119469C.1.pep
MPSIDKATDNGEMKKRQPEQELVCVTGAGGFIGSWVVKELLLRGYRVRGTARDPADRKNAHLLALEGAEERLTLCRADVLDYDGLRAAFHGCHGVFHVASPVSNDPDLVPVAVEGTKNVIRAAGDAGVRRVVFTSSYGAVHMDPNRSPDAVLNETCWSDYEYCKNTGNLYCCAKMMAEITATEEAAKRGLELAVVVPSMTXMGPMLQQSLNFSSSHVARYLTGVKPTNPNA

SEQ ID NO: 206017 - protein, 40 aa, Zea mays
  Clone ID: MRT4577_11946C.1.pep
KMNTYQILDFLKTKIFSLYQMVQKMARSSNLSFEGSFFLE

SEQ ID NO: 206018 - protein, 232 aa, Zea mays
  Clone ID: MRT4577_119470C.1.pep
MGSAQDPFYIVREEIQESIDKLQSTFHRWEQTASNTGEYVHLTKELLISCESIEWQVDELEKTISVASRDPAYYGLDEVELSRRRNWTGSSHKQVGTVKRAIEKGKSNAATSKYQDTSRTNHYSAEDNDDFLSSESDRQLLLMRQQDEELDELSESVQRIGGVGLTIHEELSGQERILNDLSLEMETTSNRLDFVQKRVAMVIKKAGIKGQIMLIVFLVVLFIILFVLVFLT

SEQ ID NO: 206019 - protein, 232 aa, Zea mays
  Clone ID: MRT4577_119471C.1.pep
MSSAQDPFYIVREEIQESIDKLQSNFHRWEQTASNTGEYVHLTKELLTSCESIEWQVDELEKTISVASRDPSYYGLDEVELSRRRNWTGSAHKQVGTVKRAIEKGKSNVATSKYQDTSRTNHYSAQDNDDFISSESDRQLLLMRQQDEELDELSESVQRIGGVGLTIHEELSGQERILNDLSLEMETTSNRLDFVQKRVAMVMKKAGIKGQIMLIVFLVVLFIILFVLVFLT

SEQ ID NO: 206020 - protein, 62 aa, Zea mays
  Clone ID: MRT4577_119472C.1.pep
EPVPASHKRLILGFIMRVTAGAGLVSSIGRALSVLQVYFISPSPQVWSIRRRLARRRPRAPV

SEQ ID NO: 206021 - protein, 232 aa, Zea mays; identical to SEQ ID NO: 206018
  Clone ID: MRT4577_119473C.1.pep

SEQ ID NO: 206022 - protein, 65 aa, Zea mays
  unsure (1)..(65): unsure at all Xaa locations
  Clone ID: MRT4577_119474C.1.pep
FFRGWVPTLVGYXAQGAWKVGFYEFFKKDYSDIAGPGFAPKDQTLIYLARSGFGEGIADGALLPF

SEQ ID NO: 206023 - protein, 49 aa, Zea mays
  Clone ID: MRT4577_119475C.1.pep
LPWISQNWHTILRAHQCQLNQISSWLSSPLSTAFYQLHSVHRPQLLQKA

SEQ ID NO: 206024 - protein, 83 aa, Zea mays
  Clone ID: MRT4577_119476C.1.pep
CKSNTNQPLTNYFFIETCSMRKTVCYIAKAILLLHYWLLQNSVPPLSRSLLFLLLDIQTGENRQTHKLLNNYESVTGGTTHHL

SEQ ID NO: 206025 - protein, 71 aa, Zea mays
  Clone ID: MRT4577_119477C.1.pep
NILCSLSVVCLFIHQLVVALSTLKTNCSPTGYTLYGNKALTKEFWCTSNDNYVRWVHSGHFHILALTEAVS

SEQ ID NO: 206026 - protein, 84 aa, Zea mays
  unsure (1)..(84): unsure at all Xaa locations
  Clone ID: MRT4577_119478C.1.pep
VGVIEPPRSVQPVPVVAPVRXAVVCXKKKKPPPPKXGECPGKKKCRRCXGLPSRLPPPSPLLLPPRRPXAFSRRSGTPAGAGPP

SEQ ID NO: 206027 - protein, 200 aa, Zea mays
  Clone ID: MRT4577_119479C.1.pep
MCGGAILAELIPTTPARRGGAAWPAGKCKRRKADDFEAAFREFDEDSASAAGAPASRKRARAADAVIDLEEQEQRPAAAALKHEAAECSGSDALPDFSWQGVSAAYDEPPAPRPAFDFEARPESAADEASPRASDSESDALFDSLLFGDQFAFFDAGAYESLDSLFSADAVQSNAAAAADQDMPLWSFDDGCLVEDNLSF

SEQ ID NO: 206028 - protein, 173 aa, Zea mays
  unsure (1)..(173): unsure at all Xaa locations
  Clone ID: MRT4577_11947C.1.pep
NSPAKLDFCYFCKLIFLLELFGIYMIXEWTYNNGVCVLWRLXEIVACXDYSGFLLVLVSHLGRSFVHHVGFKXRSVSXKDQILVIVIRGPFCXSCSLSVQFSAIGALVSVLPLPFDTIVASVSRRLSGSLDVEMSQYFCVVCPVKQRASIFSSFLFTLLAYMMWVWSLTWISE

SEQ ID NO: 206029 - protein, 68 aa, Zea mays
  Clone ID: MRT4577_119480C.1.pep
PKHMGLLHLPKKTTRDHSNLNIRPNSLTKTCTRWPALCRRHLLHTYKTMKELFYSYHYTQKMQMLGRF

SEQ ID NO: 206030 - protein, 307 aa, Zea mays
  Clone ID: MRT4577_119481C.1.pep
MCGGAILAELIPTTPARRGGAAWPAGKCKRRKANDFEAAFREFDEDSEEEEEDDEGVVESKPAFVVRASSAATQPRARQEQRSRRRAPDQQYRGVRRRPWGKWAAEIRDPVKGVRVWLGTFPSAEAAARAYDHAARHIRGPRAKLNFPSSSSASAAGAPASRKRARTADADAVIDLEEQEQRPAAAALKHEAAECSGSDALPDFSWQGVSAAYDEASAPRPAFDFEARPESAADEASPRASDSESDAMFDSLLFGDQFAFFDAGAYESLDSLFSADAVQSNAAAAADQDMPLWSFDDGCLVEDNLSF

SEQ ID NO: 206031 - protein, 61 aa, Zea mays
  Clone ID: MRT4577_119482C.1.pep
GLPHGTPAASLRLRHRQYPGTGEPGLPAAPLPDIFNGEQRPPDPAPAMESRVNPKAYPLAD

SEQ ID NO: 206032 - protein, 65 aa, Zea mays
  unsure (1)..(65): unsure at all Xaa locations
  Clone ID: MRT4577_119483C.1.pep
MLPPYLCLCWMERFKHLKKKKKKKKKKKKKKKKKKKKKKKKKKKKKKKKKKKKLKXKKKKKGGPF

SEQ ID NO: 206033 - protein, 53 aa, Zea mays
  Clone ID: MRT4577_119484C.1.pep
SMLLICPVIIKSIIQRGSCISSFMIPTPTFLLFLVLASKLLNENQPILRITLK

SEQ ID NO: 206034 - protein, 96 aa, Zea mays
  Clone ID: MRT4577_119485C.1.pep
TVPEEKLKSDNTDLIALHDGIKMTDTILINTLKKHGLERFDPSESAEKFDPNVHEAVFQAPQPDKEDGTCFHTQQKGFKLNGRVLRPAKVGVVKNA

SEQ ID NO: 206035 - protein, 136 aa, Zea mays
  unsure (1)..(136): unsure at all Xaa locations
  Clone ID: MRT4577_119486C.1.pep
THLAEGVHKQRVWFVGGLGFXTLWCLTCSVCKDVMSGNKEVSFSIARHQGMLMPSANPLLVEKNSRIIRLCIWEQKGPLDDNSTGVFLMRKQSLSPIESFCGLYEVKWCYASRRPCQQPECRIVFFVISLIVCVSP

SEQ ID NO: 206036 - protein, 88 aa, Zea mays
  Clone ID: MRT4577_119487C.1.pep
RPGYSLVPHELIKAVLAGHGVPHRHSHRGRQEDLHYESPVSLLKAAIHVIQVQLLRQDQLGAASEGTHTINLPKLSMCIHHQLLFTGT

SEQ ID NO: 206037 - protein, 155 aa, Zea mays
  unsure (1)..(155): unsure at all Xaa locations
  Clone ID: MRT4577_119488C.1.pep
MDAKKFLQMVEDKKKRLLEKKEAPLKWQQKLEAAIKAXEEKEKKLKSKKHRRRSYSSSESDSESESDSDRKHRKRKDRKRHRKHGHSDSDGARRRKHRSKRRSLDSSDESDSDEYDSESEEERPRKKHSHRRKHHRHSPRSESDASDXSSDDDER

SEQ ID NO: 206038 - protein, 68 aa, Zea mays
  Clone ID: MRT4577_119489C.1.pep
KQRFFKPKIQLNFSNKCRATKEVVFFRVTTDYSFSILKSGILCPLSRSGMEVKTNRTMINGKKIKSFN

SEQ ID NO: 206039 - protein, 247 aa, Zea mays
  Clone ID: MRT4577_11948C.1.pep
SRPAGYSLRNVMPVLADKYHAIAFDWLGFGFSDKPQPKYGFDYTLDEYTSSLEFLVNAVAPDKLSIVVQGYFAPVAVKYASEHQDKLNHLVLVNPPITDKHLNLPSTLASFSNFLLGEIFSQDPLRASDKVLTSCGPYMMKEEDAMVYRRPYLVSGSSGFALNAISKAMKKDLKAYIESMRSILRSSSWKTKTTVCWGMRDRWLSYDGVEDFFGGLNQKIVELPMAGHHVQEDRGEELGNIIKSILR

SEQ ID NO: 206040 - protein, 194 aa, Zea mays
  Clone ID: MRT4577_119490C.1.pep
MDAKKFLQMVEDKKKRLLEKKEAPLKWQQKLEAAIKATEEKEKKLKSKKHRRRSYSSSESDSESESDSDRKHRKRKDRKRHKRHGHSDSDGARRRKHRSKRRSSGSSDESDSDEYDGESEEERRRKKHSHRRKHRRHSSRSESDASDYSSDDDERRSTRKDHSRSRRRCHRSSDDESEGEIRSRHRKRHHRSSD

SEQ ID NO: 206041 - protein, 195 aa, Zea mays
  unsure (1)..(195): unsure at all Xaa locations
  Clone ID: MRT4577_119491C.1.pep
MDAKKFLQMVEDKKKRLLEKKEAPLKWQQKLEAAIKATEEKEKKLKSKKHRRRSYSSSESDSESESDSDRKHRKRKDRKRHKRHGHSDSDGARRRKHRSKRRSSGSSDESDSDEYDGESEEERRRKKHSHRRKHRRHSSRSESDASDYSSDDDERRSTRKDHSRSRRRCHRSSDDESXEKIRSRHRKRHHRISDE

SEQ ID NO: 206042 - protein, 161 aa, Zea mays
  Clone ID: MRT4577_119492C.1.pep
DAKLEERATPTAHIKGRSSRLDTCRRHESIWARGLPLLLLLLLLSVGEEAATARGHPVGMCIMTYNTENGTRRIQRTEPHAHAIYDLGLAEQGRSYNSRSPRLWLSRPKVALVMKKPTMMKLSQQARHLTLFASHYEPVIRPKQLRLPLLKPYLLGALIRK

SEQ ID NO: 206043 - protein, 200 aa, Zea mays
  unsure (1)..(200): unsure at all Xaa locations
  Clone ID: MRT4577_119493C.1.pep
MDAKKFLQMVEDKKKRLLEKKEAPLKWQQKLEAAIKATEEKEKKLKSKKXHRRRSYSSSESDSESESDSDRKHRKRKDRKRHRKHGHSDSDGARRRKHRSKRRSLDSSDESDSDEYDSESEEERPRKKHSHRRKHHRHSPRSESDASDYSSDDDERRSTRKDHXRSRRRRHRSLDDESEXQIKSSHRKRHRSSDEDSHQI

SEQ ID NO: 206044 - protein, 167 aa, Zea mays
  Clone ID: MRT4577_119494C.1.pep
NQQKVPASGGARDDTPFSYSYRAPSQGVPASGVSRDDTTFSYDDYKARSQEVAGSGPRDDQFSYDYSAYEAPSEHHHSEVRATARSGGAGTPTPHTAVFFHEEAVRVGERLTLHFQAAAPAALGLLPRRAADSIPFTTAALPAVLALFDVAPGSSRAAAMAETLRTC

SEQ ID NO: 206045 - protein, 87 aa, Zea mays
  Clone ID: MRT4577_119495C.1.pep
RSDAQVACLDELFKRGSARSLSPGHLADKSDPCYALASAQKRRCVWDFTRLPSVVCARLAAICRRSTTTVSRLKGLSEALTSGRTHG

SEQ ID NO: 206046 - protein, 137 aa, Zea mays
  Clone ID: MRT4577_119496C.1.pep
LLGVTTIAGGKSGRGGHVDGPSDEAKFSTDFEVRYIGSSCSLLVIDRGNQAIREIQLHFDDCVYQYEAGFPLGVALLLAAAFFGYMLALLQRRVLGMYSNGDEQEDESPVKAKLSSIPPPYQKPLKSSLRPPLIPMM

SEQ ID NO: 206047 - protein, 72 aa, Zea mays
  unsure (1)..(72): unsure at all Xaa locations
  Clone ID: MRT4577_119497C.1.pep
FNDSSDAENPANNLYVTCLSPRLTHLDLHNHLCTDCDVIDTSFVYDPXTKQSQGSCSFTIPSLKDTDRCIKY

SEQ ID NO: 206048 - protein, 259 aa, Zea mays
  unsure (1)..(259): unsure at all Xaa locations
  Clone ID: MRT4577_119498C.1.pep
PPGGGGGAAGRERERRXEMAGLAAVLDFDMLCASVALSAERRKAGAALAGAAGDCGGGGGGVQRMWEGDVVLDCLDDRRIALETSCCPCYRFGKNMRRANLGSCFLQGMVYCILLAAVLISLIAFSVTRHHIYLYMGIGSVLLIAIYTGYFRRRIRKQFNIRGTESSLDDCVLHLICPCCTLCQEARTLEMNNVQCGVWHGRGDTICLGSNGAGNKAFAALNKASLVPVKSPGLCGMDRSSSAADEQQPLVPPDQLEQV

SEQ ID NO: 206049 - protein, 84 aa, Zea mays
  unsure (1)..(84): unsure at all Xaa locations
  Clone ID: MRT4577_119499C.1.pep
MGKQNTHINIVVIGHVDSGKSPTCVLGSSKIGTHLTTVANLAXERKLPLIYLAANSGARIGIADEVKSCFRVGWSDERSPERGF

SEQ ID NO: 206050 - protein, 380 aa, Zea mays
  Clone ID: MRT4577_11949C.1.pep
MAPQLAAAGPTLYAPRFGTALPCRARTRKPVSRRRAALPKDEDYYLIDADESIGDGFSFSGGKYGDGPSKSDEWFAQGKMVNAYPVYGDKGKAKDPFFGLTMGSGSQSSYDIFRWFCVEAGSSSSPKVLLIHGLPSQAYSYRNVMPVLADKYHAIAFDWLGFGFSDKPQPKYGFDYTLDEYTSSLEFLVNAVAPDKLSIVVQGYFAPVAVKYASEHQDKLNHLVLVNPPITDKHLNLPSTLASFSNFLLGEIFSQDPLRASDKVLTSCGPYMMKEEDAMVYRRPYLVSGSSGFALNAISKAMKKDLKAYIESMRSILRSSSWKTKTTVCWGMRDRWLSYDGVEEFFGGLNQKIVELPMAGHHVQEDRGEELGNIIKSILR

SEQ ID NO: 206051 - protein, 94 aa, Zea mays
  unsure (1)..(94): unsure at all Xaa locations
  Clone ID: MRT4577_1194C.1.pep
PQVIPHVVSHAHWHFKFEAGGIWCEHHIIDHMAAYALNSDGCYAWTRKNYDGDMQSDILAEGVGSVGVMTXEMVCPGXKTIRAEADHGTVTRHL

SEQ ID NO: 206052 - protein, 109 aa, Zea mays
  Clone ID: MRT4577_119500C.1.pep
GGKRSHCIAGGSFPKGGRFGGPTKGGPPPGGGFKKKAAARPFIHSWGGGKKSTGPLELTMWVKHGENLIKNCPPPTLGGKFSPQRVFTHGETALGPKGACLTPHKKPFA

SEQ ID NO: 206053 - protein, 70 aa, Zea mays
  unsure (1)..(70): unsure at all Xaa locations
  Clone ID: MRT4577_119502C.1.pep
WLHPTVIFELIATVLVLYITSATGIAYKHHTDASLSGADTXCGXVGVLHICCAFGGMIFVLDYCTSEITK

SEQ ID NO: 206054 - protein, 74 aa, Zea mays
  Clone ID: MRT4577_119503C.1.pep
PHEPRRANRILYLSYSYSRFHLAPNHLLPLSLPDRPLRRCLCSIPHHHAPDVQELIIHDMALTWLPFEPWPLLA

SEQ ID NO: 206055 - protein, 84 aa, Zea mays
  unsure (1)..(84): unsure at all Xaa locations
  Clone ID: MRT4577_119504C.1.pep
RQPQAAPVAVDEHDATAPGLDPDRXYKMNLYGLRGRQRVXPEXVAAKTAPQEDVDETPSPTELGTEAPESPEEPLLVELTVTGS

SEQ ID NO: 206056 - protein, 75 aa, Zea mays
  Clone ID: MRT4577_119505C.1.pep
LVIGARVRGFFRPGPLFRSLLNLIPGGRSFPPRPSFFFFVLQQPTTHAHTGFTRTTQLFEIHTILSSGVIKVGTH

SEQ ID NO: 206057 - protein, 36 aa, Zea mays
  Clone ID: MRT4577_119506C.1.pep
GGSLGPRRAYYPLSSWCETSLVASCSVKRRFDDYQT

SEQ ID NO: 206058 - protein, 106 aa, Zea mays
  Clone ID: MRT4577_119507C.1.pep
LGLFRAIIMPLLSLSLKRHLRRPRKKNKSPHDVATCKELLNHPIRRHLLRTVPHEICPCGTRYVMIHNMVGRVGGFLHEGSLFFFFSPIYPLLLWGKSLVNGEGHT

SEQ ID NO: 206059 - protein, 101 aa, Zea mays
  unsure (1)..(101): unsure at all Xaa locations
  Clone ID: MRT4577_119508C.1.pep
RRVREHVIDLILDYVYVYCGAFFGVGMRPSKWTQTVKKTYNLLHTTSQHTXIQVYTGTLTTIMLTFDYSGMWNVHYNIXLRYYLCVHFYMSVISLGQSLNV

SEQ ID NO: 206060 - protein, 97 aa, Zea mays
  Clone ID: MRT4577_119509C.1.pep
MVLCALANTFQHCKKKATTLGELNKSYIEICRSTQVPALGMLEFSNMCMVLSDQGFMKLGQSKEDKLRRVTLQIDSSDITFAFKGNRFFQKCLEQRC

SEQ ID NO: 206061 - protein, 64 aa, Zea mays
  Clone ID: MRT4577_11950C.1.pep
MGHSGHWLHWHPWGRGKLRYLMAVNQGTSFWELGRGSITLLLKDLPGRAVQRANFGNFITMGGR

SEQ ID NO: 206062 - protein, 57 aa, Zea mays
  Clone ID: MRT4577_119510C.1.pep
TNGNHNMGESLIILGKGFHGLGLKNRTRSFWNPLFLTTMLSPFWLKSPNFGKIYQIK

SEQ ID NO: 206063 - protein, 101 aa, Zea mays
  Clone ID: MRT4577_119511C.1.pep
TVLHQLYEMNPPAYTWLYSDISVNDPLDGDYFLRLLAKERQDLAERVMITRLHLYGKWIKRCDHAMMYERISKENLDIMRQRLVETVVWPTDDTNFGESKD

SEQ ID NO: 206064 - protein, 155 aa, Zea mays
  unsure (1)..(155): unsure at all Xaa locations
  Clone ID: MRT4577_119512C.1.pep
MASLSSAAVTAPSFAAPAPARAVVRRRSFTVRASLRKATGTAAVAMAASALLAGGAMAQEVLLGAGDGGLDFEPSQFTVKVGDTITFKNNAGFPHNXLFDQQXVPSGVYATKISQENXLNTSEETYSDTLTVPITYGFYCRSHRGAEMDYKINVN

SEQ ID NO: 206065 - protein, 46 aa, Zea mays
  unsure (1)..(46): unsure at all Xaa locations
  Clone ID: MRT4577_119513C.1.pep
PSFYNILTTKTLTIPILISLHHIPLFSASLIANNPXPLSLPNSSSS

SEQ ID NO: 206066 - protein, 106 aa, Zea mays
  Clone ID: MRT4577_119514C.1.pep
GKLLHASSARPIETVKLAAGKWWERPDDTAMPGMDPGGRGSSRYFHQLLRPQQQQSSPLSPNSHVKMEHHRMSADKSPVGEAEAGGSQAGAAAPASSTSCCVEGGG

SEQ ID NO: 206067 - protein, 90 aa, Zea mays
  Clone ID: MRT4577_119515C.1.pep
TLAIIYVRTDELSNQDHHITSHELRRHGCTLPLACMRKKAARLSLSTNASVQYDGSKARTSRCRATTLRGDSDDQRLTGHAGGLGKDTSA

SEQ ID NO: 206068 - protein, 139 aa, Zea mays
  Clone ID: MRT4577_119516C.1.pep
EGGGPEQQLLQKKKKKKKKKKKKKKKKKKKKKKKKKKKKKKKKKKKKKKKKKKKKKKKKISRKQNGGPPPKFSPPGPGGNPLGMGFCPGKTRGPLKSPGGFPPRNSFSGNFLKIRFNVLKARISGGGTLNFFFPLRKNF

SEQ ID NO: 206069 - protein, 38 aa, Zea mays
  Clone ID: MRT4577_119517C.1.pep
LFNMYFFLLFFFCLVISDVPGLMLRTYLYVCISTAFAM

SEQ ID NO: 206070 - protein, 102 aa, Zea mays
  Clone ID: MRT4577_119518C.1.pep
APGLDPVATATRQLHQWQPSICQDPDWADEERSWELAGIAPTPVWPLLRFRRCQHAANLRYVQKDCGGTVVLPPSSTTLSTSIYMKLGHIRTTTHRFYNFFR

SEQ ID NO: 206071 - protein, 75 aa, Zea mays
  Clone ID: MRT4577_119519C.1.pep
TASGGEKLWSFLTRTSTSITLAMALLACSYVVWKRWLDAAAGTARGSREVEPAMESLQVCARPHSSFVAASQRPI

SEQ ID NO: 206072 - protein, 111 aa, Zea mays
  unsure (1)..(111): unsure at all Xaa locations
  Clone ID: MRT4577_11951C.1.pep
AXKGXISMXTAMLNNGSRKNXXLXLSTLRRQXXCXXGSHXTQTYSVLCCALPALNHXXGAMLTSSSFTEDSSSVXLXXGXSIQVGXWEERKTNMXMLLRTSLGXXDGSEXX

SEQ ID NO: 206073 - protein, 114 aa, Zea mays
  unsure (1)..(114): unsure at all Xaa locations
  Clone ID: MRT4577_119520C.1.pep
XDSASGTYTLYLIXWRCYVRSXHIPLLWVRPDVVIKFPEEEAPSTVLSQNPFTPKQDIQHLFREPEKWPPTVVSNTFTALILSPXLLLLFALWIRIGANIQHFTFAPSSDIFHL

SEQ ID NO: 206074 - protein, 34 aa, Zea mays
  Clone ID: MRT4577_119521C.1.pep
EMSLDKQFCAKTLSLIWSLANAIGSAMTDLFKAA

SEQ ID NO: 206075 - protein, 80 aa, Zea mays
  Clone ID: MRT4577_119522C.1.pep
LLFIVHYIKISFLDFHVSFRILNERLFQLFFTASRTNVKDTLCHRWDSCSSYFSLERSGVFFSHRQIYSLFHSQFEMYHM

SEQ ID NO: 206076 - protein, 177 aa, Zea mays
  unsure (1)..(177): unsure at all Xaa locations
  Clone ID: MRT4577_119523C.1.pep
KINGAFKGGQKRGKLVPXFKKNGPPKKKVFLGGPGGQGVSVXKGGGPQKQRAXLQRGFLKGKKKGVFKKRGGSPANLWGLLKDPGKGFFFQGXKLPPVFPQKGWKKDPGGKKFSKTPILGFPPGGPLGVMAKGFYLPLFCPWPGGQNDFPFPPPFPGNRGKTHCFFWWAKTHFFFKP

SEQ ID NO: 206077 - protein, 579 aa, Zea mays
  unsure (1)..(579): unsure at all Xaa locations
  Clone ID: MRT4577_119524C.1.pep
PRNWENPSDKDLNQGTLVIFNLDPSVSNEEVRQIFGAYGEVKEIRETPNKKHHKFIEFYDVRAAEAALRSLNKSEIAGKRIKLEPSRPGGTRRNLMQQLGHDLDHEEPRSYRHPHVGSPIANSPPGAWAHYSSPTDNNMLQAFTRSPTGNGMSPIGIPSLISNAPKIAPIGKDSNRSKYDQVFSNGNQSLGAAFQHSHSYQDHNSEQMSSSPGTLSGPQFLWGSPKPYSEHSKSPIWRPPANGPALSSSSRTQGQGFLYSSRQASLFGSLDQHHHHVGSAPSGAPFENHFGFLSESXRDILYEATXFGNMGNVGIGRNGGGLMLGMASHASVNPGSSLIGSLTDNVSSSFRPILSPRLGQAFYTNPPYHGPGTFGLDSSIDHARNRRVDSSVLQADSKRQYLLDLEKIHRGDDTRTTLMIKNIPNKYTSKMLLAAIDELHRGTYDFFYLPIDFKNKCNVGYAFINMISPVHIISFYQAFNGKKWEKFNSEKVASLAYARIQGRSALISHFQNSSLMNEDKRCRPILFNPNGQESVHQEAFPINGICIHMPLEDDCLDNEENKSLNEKTGENSTDIAGSL

SEQ ID NO: 206078 - protein, 67 aa, Zea mays
  Clone ID: MRT4577_119525C.1.pep
KDCTVYSFPNILQVFHHLGCAQCDARGPSNRWPSQPLLFKEYSLRLHISTRSSPSSPSTLSGKGCPT

SEQ ID NO: 206079 - protein, 94 aa, Zea mays
  Clone ID: MRT4577_119526C.1.pep
HNPNFAPNIEDGTETEKPNTSDVNHDAGKTWHEYGVGFSGQFDPEARDPHIYDIDGKEHLSLPNGVAGAPLERQMKFTVENNGVDDETYTGMFQ

SEQ ID NO: 206080 - protein, 227 aa, Zea mays
  Clone ID: MRT4577_119527C.1.pep
MLSPRLGQTFYTNPPYHGIGTFGLDSSIDRVRNRRVDSSVLQADSKRQYQLDLEKIHRGDDTRTTLMIKNIPNKYTSKMLLAAIDELHRGTYDFFYLPIDFKNKCNVGYAFINMISPVHIISFYQAFNGKKWEKFNSEKVASLAYARIQGRSALISHFQNSSLMNEDKRCRPILFNPNGQESVHQEAFPINGICIHMLPEDDYLDNEDGKSLNEKTGESSTDMAGSL

SEQ ID NO: 206081 - protein, 76 aa, Zea mays
  Clone ID: MRT4577_119528C.1.pep
CKLASLCTPAQAPSLYPSGIVCGVVMGTEFHSAQAQAQCQPPASRSTPPSIEQKRRGFSGAGPKNFFFFFFFLVFF

SEQ ID NO: 206082 - protein, 112 aa, Zea mays
  unsure (1)..(112): unsure at all Xaa locations
  Clone ID: MRT4577_119529C.1.pep
MASFCRAADAGVKRLEELLLTSTYMRPYLAVTDDVAXVYSCXSMFPSTXYINEARGFNDNDALARLCQITEKGQGVNDESXAVTSDLTADVGEAHALIAEDDDNNYVDLYGE

SEQ ID NO: 206083 - protein, 82 aa, Zea mays
  Clone ID: MRT4577_11952C.1.pep
HTSCTPVRTMSQSGAPMPFDPSTLLKMSFSTSGEVVLLCQDEWRPKKLFTLSTDYDLSVARSTSIILMDIFIKPMPGSIHPL

SEQ ID NO: 206084 - protein, 71 aa, Zea mays
  Clone ID: MRT4577_119530C.1.pep
KKKRKALRSYRGVWPFWLWGSAWGGFCNKERLMGTTPPKARCRGKLPNLLGGPALGLGSVWLLDGRGVLGG

SEQ ID NO: 206085 - protein, 93 aa, Zea mays
  unsure (1)..(93): unsure at all Xaa locations
  Clone ID: MRT4577_119531C.1.pep
MSCTNISMLALXLLVLGFMFHVEKEXANGIDAKSSCPVGSFYITKLFAFGNVKTYNSNAVHEAWSSSFCFTVNHTILIPNGDFLVGQLNFTSP

SEQ ID NO: 206086 - protein, 99 aa, Zea mays
  Clone ID: MRT4577_119532C.1.pep
SGLVSLLRPNSKRSSSPTYESLMGSPLSLAGEWPQYMTPNRWARYSSPSWHLTLGGEPRWTSNCCYQIYQSQLVLPHRRGRTADLAARSKQKKKKKLVP

SEQ ID NO: 206087 - protein, 57 aa, Zea mays
  Clone ID: MRT4577_119534C.1.pep
RSRVLAPLARARTTPECSWSRTEHRRYNTAETPVVRWAGPATTETCTSRRTCSTWRP

SEQ ID NO: 206088 - protein, 86 aa, Zea mays
  Clone ID: MRT4577_119535C.1.pep
AASTIDATGIAAPPCTWTIILSCQTGHNRYGADGDRGPSPHERNRKEISRRGGAPVTTTDTTSALPEGEEDHIQTQDTGVRGKRKR

SEQ ID NO: 206089 - protein, 170 aa, Zea mays
  Clone ID: MRT4577_119536C.1.pep
MAIRRQRRSFPLVPFLVSLLAVAAYGRLISDGMPATPSSSVLASPLSSAAIRLNSSSPATAAAEECEQTYGFLPCTTTVFGNMFLVLTYGFLMFKAATFLSAGSELLLEIMGPGLVGGLLLPILGALPDALLVLVSGLSGTKETAQSQVLIGMGLLAGSTVFLLTLLWGT

SEQ ID NO: 206090 - protein, 62 aa, Zea mays
  Clone ID: MRT4577_119537C.1.pep
NLVKVRLKLGNFLCPYPDHIWLVFMYLLGIITTFSYEIIGLHEVSFLQFSFPSMDTLIPKQE

SEQ ID NO: 206091 - protein, 81 aa, Zea mays
  Clone ID: MRT4577_119538C.1.pep
KVQHLAGCTFKTPRTPFAKTGTQKGAPYIHVWPGGKKHLNTAPTRRITVITFDPCLTGLINSSNPFLTNQAQLPPFLFLVT

SEQ ID NO: 206092 - protein, 57 aa, Zea mays
  Clone ID: MRT4577_119539C.1.pep
PPSCVTTDGRQPACSLLQSLSWMGLAPPFEVPSVKLPIAWPRWWIRSSGGVFPPNNQ

SEQ ID NO: 206093 - protein, 124 aa, Zea mays
  Clone ID: MRT4577_11953C.1.pep
GGGAFLLTLSELCAPAQKGCWALRGQPPTGAVPSRLHGTSGTDGATSMFVHGGAADTAPVVLDLFSYCDSDCPPDASSYTSFHVICHLFLLILRISATSATSGFGTTPEPWCSCSSPPFWRGWG

SEQ ID NO: 206094 - protein, 84 aa, Zea mays
  unsure (1)..(84): unsure at all Xaa locations
  Clone ID: MRT4577_119540C.1.pep
LPKEPTRAIKNFMVHKYPXSSYHQFHLLITNDLHEXPKTIFSKFFPNTFASPSLAHIHVSRTHDCQQLTHKFQHDHTTNTCIIH

SEQ ID NO: 206095 - protein, 129 aa, Zea mays
  Clone ID: MRT4577_119541C.1.pep
MGSASQVAFGYPAVQLPTLETGSSWAFGASSSAHAEDEKKADRGLSLMGSAIRPGIAPNVKFGGSGSYPDLPWVSTIGAGPNGRTISGVTYKFGRNEVKIVCACHGTHMSPEEFMRHASADAPAQDNSA

SEQ ID NO: 206096 - protein, 89 aa, Zea mays
  Clone ID: MRT4577_119542C.1.pep
NKAGKFPPLVTHQESLESKVNESKAMVKFQLKKVLCMGVAVGNVSMVEKQTSQNVQLSVNSLVSLLKKNWQNVRCLYLKITMGKSYRVF

SEQ ID NO: 206097 - protein, 477 aa, Zea mays
  unsure (1)..(477): unsure at all Xaa locations
  Clone ID: MRT4577_119543C.1.pep
MDDDNGLELSLGLSLGGSSGKAKARDAPLEPKAEPQVEESSSKGGLQTPDAPSGKFYQKSADNHEQNSKQRHSPVAPQFGNFWGQPGNSSGPVVDGSVEPVSHQPQLSSYQDGRMPIXWXNSEEQKPVSGNHKLPSEEMNFQKKHQTASDQPDAFSKSSDGGAKNAPISISTDDGSTGENEDVAESEAEGSNSWLVAQREDSAKGSVVNKGSDRKRSADAAADGFKGKRQPSFSGSESSSGKLTPGNLISMQASNVVALPYQVPGQVSGPPVLTNAPNFHPVCTVQLRPPTNGGLAVQTMGSASQVAFGYPAVQLPTLETGSSWAFGAPPQALSSFTAKDKADQTGTKQVDDGKKPQEAGASSSAHAEDEKKADRGLSLMGSAIRPGIAPNVKFGGSGSYPDLPWVSTIGAGPNGRTISGVTYKFGRNEVKIVCACHGTHMSPEEFMRHASADAPAQDNSATLPAFPAGNQATSAEN

SEQ ID NO: 206098 - protein, 112 aa, Zea mays
  Clone ID: MRT4577_119544C.1.pep
PRVRGKLPTPYPAHERSLQMTSALVERVTNDDRSVASLLDPTLGGDHREDELAVIGEVIRACMQSDPRRRPSMREVAARLREAVGISPVAATPRLSPLWWAELEVLSAAEAS

SEQ ID NO: 206099 - protein, 93 aa, Zea mays
  unsure (1)..(93): unsure at all Xaa locations
  Clone ID: MRT4577_119545C.1.pep
GNLPGTASDWFIQARPAXGRINGPTLHLADAXAYHXTSGRVDVIXCGRWGTLRTPGLRSLLVDHFRSRLGGGGSRSRLLIHIVWTFLQISCYL

SEQ ID NO: 206100 - protein, 382 aa, Zea mays
  unsure (1)..(382): unsure at all Xaa locations
  Clone ID: MRT4577_119546C.1.pep
RKLAYLSSCFDEYKQVDALSRINHKNFVNLLGFCEEEEPFTRMMVLEYAPNGTLHESLHXGGTEALLANTTTPLIEXAAAVAVAVRVVVVALKNTCARVIWTNSFVGGXNHVAAEDFERIAWRGRMRIVMGLAYCVQHMHELSPPVAHPDMQSSSVLLSEDGAAKVHTPCPALQLSMCLASYXYSLVFQFQPLSSPLPAXADMSVWHEVISQGKTTTNGDEQASSAGLLAGNVYSFGALLLEIISGKLPTPYPAHERSLQMTSVTSYRRNTVMFLTTRRRTPNGDVMFLLLPXLVERVTNDDRSVASLLDPTLGGDHREDELAVIGEVIRACMQSDPRRRPSMREVAARLREAVGISPVAATPRLSPLRWAELEVLSAAEAS

SEQ ID NO: 206101 - protein, 105 aa, Zea mays
  Clone ID: MRT4577_119547C.1.pep
KFAESFEMVPRTLAENAGLSAMEIISSLYAEHASGNAKVGIDLEEGACKDISTLKIWDLYVTKFFALKYSADAACTVLRVDQIIMAKPAGGPRRDAQPGGGMDED

SEQ ID NO: 206102 - protein, 69 aa, Zea mays
  unsure (1)..(69): unsure at all Xaa locations
  Clone ID: MRT4577_119548C.1.pep
MGPYSAQIIPMHIFCMKYKHXRYRTYYIFTPHIRLMHKIXQNIVVFSSLAPINSPLTTLHQSLFNTLWT

SEQ ID NO: 206103 - protein, 60 aa, Zea mays
  Clone ID: MRT4577_119549C.1.pep
RAHDSSCRYLEMQADYYTIPRLALTGTERLDASDNTMVRYQAVHDIALVELAPTHPSRVV

SEQ ID NO: 206104 - protein, 111 aa, Zea mays
  Clone ID: MRT4577_11954C.1.pep
EPGKSPPFKGGLPPWGGGADYHPFRIQIPPRGPGQAKFLTFSFSRPPQQTNQGGPPLLRTRGYDRHRGPAHGLGPQPTRGGALPQKDFRAGGNKQTVYANLPHIFWERGGT

SEQ ID NO: 206105 - protein, 147 aa, Zea mays
  Clone ID: MRT4577_119550C.1.pep
AAAAGGTTTTTTVKCLADAGLFLDAIDVSGGRSLRSYYSDIVAMQGVGPNLPPACTARLDTASCFFPKNVIDGVNTPIFLLNAAYDAWQIQESLAPSGADPSGAWRACKSNHSACDATQMKFLQGFRDQMVASVLGGRFAGSRSNNG

SEQ ID NO: 206106 - protein, 55 aa, Zea mays
  Clone ID: MRT4577_119551C.1.pep
IPCNHLILAWLKVTMSRGRNICGNCLLFEDCSRICFHLLRGALQFNGSLPPSYPG

SEQ ID NO: 206107 - protein, 220 aa, Zea mays
  unsure (1)..(220): unsure at all Xaa locations
  Clone ID: MRT4577_119552C.1.pep
MEAAAQPHPLQLFQDMDPGVRRFLDARFRSAADLATASDVEAEIRGHCAELEASIYDLYVRLQETAAAYSSCCEVAGSALRGVRGRLGALKASGSTGAGEEVEVRTEQMQFEQLPALASEVARVEMVREYAEMALRLDSLVGDIEDAVSSSVTGKLKSRVDNSEETHHVAIGYLKSIEDLLASVAVTRPQWTXLLSSVDXRVDRSLAIXRPQXIGDHRSL

SEQ ID NO: 206108 - protein, 85 aa, Zea mays
  Clone ID: MRT4577_119553C.1.pep
TPAVPFPNSRSGTRPGLLFVYIYLSKYLANIVLYAGAIYCHGSRYKSAIVFCISKLFTCPTCNFTSMYLNPEHLLNPSLNHLFTP

SEQ ID NO: 206109 - protein, 57 aa, Zea mays
  Clone ID: MRT4577_119554C.1.pep
SAPLLGPRVHGRGPWGGGPLPPMGLERTLMGDALFCFFRQPWNPPVLGSTKEWFGFH

SEQ ID NO: 206110 - protein, 648 aa, Zea mays
  unsure (1)..(648): unsure at all Xaa locations
  Clone ID: MRT4577_119555C.1.pep
MPPSHAAMLRSPSSLRLLLHLSRRLLSRNPLLPSSALSARPRFLSSSSSSTPGGAGWATYDPLSDSLSASAALSSASISDSEPSAVSDAWGVYDPVLGRIVKQGSPPPSSSITVEEDDEEGEEAGKLEEEKAGVKEKGKRRVTAVGVNGHIRWSSVAAARRPAGKGGKERSSYVCSNCGEGDSQWWGKCRHCNAMGTVDKYVGVAGPESGGVDVEWSHHIGRSWMPQKAKEVVPQSLQEVNKGVDQAQWRIPLWGSFGMEISRVLGGGIVPGSLILVGGDPGVGKSSLMLQLASNILEGFKAKESSPVVYVSGEESIEQIGNRADRMSITSSNLYLYSGTDIEDILDKIQPLSPXALIIDSIQTVYVRSFAGSAGNLSQVKECTSALLRFAKLTNIPVFLIGHVTKTGDIAGPRLLEHIVDVVLYMEGERCSSHRLLRSVKNRFGSADELGVFEMAEFGLQAVLNPSQMFLTEHDSDSEIMAGLAVAVILDGSRTFALEVQALCVSGYHRSGQVVGIPQSRADVIISVLIKQAGLKLQDNIVFLNVVSGFKLTETAGDLAIAASICSSFLEFPIPNDVAFIGEVGLGGELRTVPRMDKRVIAISKLGYKKCVVPKTSEKLLRPLDIDIEILPCSNLKQLINTVFRPQG

SEQ ID NO: 206111 - protein, 79 aa, Zea mays
  Clone ID: MRT4577_119556C.1.pep
YDAQRINVAFIFIKKKKKKKRGGKKKKKKKKKKKKKKKKKKKKKKKKKKKKKKGRPLLKEPKLLSPCLQRKTFFLGALK

SEQ ID NO: 206112 - protein, 64 aa, Zea mays
  unsure (1)..(64): unsure at all Xaa locations
  Clone ID: MRT4577_119557C.1.pep
XVPDAQAGQALLSTRGDEVIATTSPXSEAAELVDGPERDLPRGRAGAYVVGVGLGAAPKGRGLA

SEQ ID NO: 206113 - protein, 51 aa, Zea mays
  Clone ID: MRT4577_119558C.1.pep
QIAMNRTSQVIIHSIALCCANKYLFYPMLIDFKDSIHHYTKWFQLSHSLCL

SEQ ID NO: 206114 - protein, 187 aa, Zea mays
  unsure (1)..(187): unsure at all Xaa locations
  Clone ID: MRT4577_119559C.1.pep
MASDTARAPVAALRPTVSLKSSSSAAADFLGHSSRLGRTATASPTRRNLKAEGKGERLPGLPSPIYLDGSLPGDNGFDAMDLAEDPENLRCYVHAEMVNGRXEMMDEAVMLIPDELTKVGLINAPHGHDAGKXEHFASPTTVLVIEIILIHYMKIRMWQDINNPGRDNQDPIFKSYXLTAHNCGYAG

SEQ ID NO: 206115 - protein, 103 aa, Zea mays
  unsure (1)..(103): unsure at all Xaa locations
  Clone ID: MRT4577_11955C.1.pep
TPCWWTSGGTLRGTAPASLSGTHPSNAKHAKGMLMNVNFETGPGMLNKTLIGGGHSLSGWTGXGHVEYFSVGTQPGGMXLAEPHGMHALRLSSRASASQNVTV

SEQ ID NO: 206116 - protein, 109 aa, Zea mays
  unsure (1)..(109): unsure at all Xaa locations
  Clone ID: MRT4577_119560C.1.pep
TAQALATRRGVGDVLVTEARARPGGNITTVERPDEGYLWEEGPNSFQPSDPVLTMAVRSSLAPQRLLLRLMRSHGIEMLNGFYARAXVDSGLKDDLVFGDPNAPRFVLW

SEQ ID NO: 206117 - protein, 64 aa, Zea mays
  unsure (1)..(64): unsure at all Xaa locations
  Clone ID: MRT4577_119561C.1.pep
KQTPPPPPPFQSFPHHHYXHHHPSHCLSIRYPSPLNEYPSHLGNKAWPPSTVHAWASFWTSLWA

SEQ ID NO: 206118 - protein, 47 aa, Zea mays
  Clone ID: MRT4577_119562C.1.pep
QLLIPHPLHQLLHERFMIELHQLERPVNLCHSYTYKPSSSSRRSSSQ

SEQ ID NO: 206119 - protein, 55 aa, Zea mays
  Clone ID: MRT4577_119563C.1.pep
QNLGRGKVYFLTREDFFSYWGTNLPPRKPQKKSGPQVPPKHRGKRGAAPKYSPPP

SEQ ID NO: 206120 - protein, 62 aa, Zea mays
  Clone ID: MRT4577_119564C.1.pep
RLETPRVVPIYRRALGYRRRSQVPVPRPSTCPFHRRRAPTRCWELGIEMDHHHPQQQQQQYG

SEQ ID NO: 206121 - protein, 80 aa, Zea mays
  Clone ID: MRT4577_119565C.1.pep
HVLINVFTVMCTIRMLYNLSIGQAYKIVRYWSKIENVVTSIKCRLSLLDYLDASQSVLSISFEHNNCIYMFAKSVLCRKP

SEQ ID NO: 206122 - protein, 165 aa, Zea mays
  Clone ID: MRT4577_119566C.1.pep
MEHSEQEQHAMDLPPGFRFHPTDEELITHYLAKKVADARFAALAVSVADLNKCEPWDLPSLARMGEKEWYFFCLKDRKYPTGLRTNRATESGYWKATGKDKDIFRGKALVGMKKTLVFYTGRAPKGDKSGWVMHEYRLNAKLHAARTRRGSLSGGQAGVGPPTSG

SEQ ID NO: 206123 - protein, 50 aa, Zea mays
  Clone ID: MRT4577_119567C.1.pep
CQVSRPLSMVARTASLPQDCSLSFCTTRSLFTIICEFLLLRIQITMPIFP

SEQ ID NO: 206124 - protein, 185 aa, Zea mays
  unsure (1)..(185): unsure at all Xaa locations
  Clone ID: MRT4577_119568C.1.pep
LIQYLKAHPESPDAXEISXTTVNTPKRYALIIEKAKLSDSPQGYKIPKRSRNFTAKHRRHVKKTTPSNCXSNNADTTQYAPSEDGTPDTAVAMKPANEAKEPPTXTDDPDMAAYPADDTPASSPMEEYENDTEKSSNSVVPPLAQSMENTYYANPHEPEPAAPAPANYPTENXNPAPAEPDTVPT

SEQ ID NO: 206125 - protein, 74 aa, Zea mays
  unsure (1)..(74): unsure at all Xaa locations
  Clone ID: MRT4577_119569C.1.pep
NPPCQTYGFVSPQSLSGIMQGSQLYHNPYTSTIPALQSPYLSRVISLEAKGTSMDVPLGNFCSPSFXSSFLVMV

SEQ ID NO: 206126 - protein, 89 aa, Zea mays
  Clone ID: MRT4577_11956C.1.pep
LLSNNMFGMVTKCLSLRLSPRSLLRCRRFRVSRRVKAADFSVPRSLTGACCLAFGRLGSPFMCSVVCLCVPMAHVLQGFFRGWKKTDSA

SEQ ID NO: 206127 - protein, 87 aa, Zea mays
  Clone ID: MRT4577_119570C.1.pep
IGYLEAGRDPPSVNLASKLATDHCPFTSLSFLLTTKQSPPCVPSSLLPFPSLSCKPSPPCRSTSVPMPKTTAKTSRLHEAAVTSPAS

SEQ ID NO: 206128 - protein, 80 aa, Zea mays
  Clone ID: MRT4577_119571C.1.pep
TQRSMSTIHYNSHATKIALVIDGRWHLQISCPHMSSRSSHSKHDKSSPSYHRISSDLKPGMVFVVPPGHPFVTIASNKEN

SEQ ID NO: 206129 - protein, 140 aa, Zea mays
  unsure (1)..(140): unsure at all Xaa locations
  Clone ID: MRT4577_119572C.1.pep
LGMGFRGRPDAIGAATMTGLXIAFLTDRFAATLNAKVTGAVXTISTTLSXKLLPPITPVVGGRPSPTRSKHIWGRPLWAYGLFFGAESCILWLXNAXLLTGLSALLIRIFATGLHARLRTPKLKARQNTLQEGLLACWRY

SEQ ID NO: 206130 - protein, 262 aa, Zea mays
  Clone ID: MRT4577_119573C.1.pep
MVEMRRQTLTASMLLEDCAHPGLSSSTSNKASVVPTPLLPSGQSDLRFNRLRPSIDESDCKYKRLFGCYVAREAVIDEEYWIAAWLRAEDQYENESGNRYVESFKRKFASKEFHALKKRCNTQHREKYICLVAVKNDDIRRTVLNSVVGTLDVCVRHPLYGEKFPEEPGKPSLHCRIYQPDQPKFGYVTNVCVAKYARRQGIASNMLLLAIDAAKLNGAENIYIHVHKDNLPAWRLYDQIGFKIVDQDDACSSDLCLLSFSS

SEQ ID NO: 206131 - protein, 69 aa, Zea mays
  unsure (1)..(69): unsure at all Xaa locations
  Clone ID: MRT4577_119574C.1.pep
FILHKKTPKFPFSMHSAFTPPFPLKNTSQIISFSSHYFLPPFFPLNFFMPKFFFLFPTKCIFSLIFFXX

SEQ ID NO: 206132 - protein, 49 aa, Zea mays
  Clone ID: MRT4577_119575C.1.pep
FLADRDSLDWGFCYIVLAITICKAHVNVNCFMYNGMNAHMTECACRSLL

SEQ ID NO: 206133 - protein, 92 aa, Zea mays
  Clone ID: MRT4577_119576C.1.pep
AHSSHGPLALFGRTTFLLTDRSSSPSSAARYCLRPQDLQQCYRSISAPGNQQQDGAEAERGVKPYQQLQLSSQLERQQLARFAHPSYTDLSV

SEQ ID NO: 206134 - protein, 80 aa, Zea mays
  Clone ID: MRT4577_119577C.1.pep
YRLDRGFQIFLTAYPECRRLLDFPELRLRPFYPGALVFVGAGEPFYLLSDPFRLPLRSLSSVFSPVGTLTDKVLVGLTRL

SEQ ID NO: 206135 - protein, 70 aa, Zea mays
  unsure (1)..(70): unsure at all Xaa locations
  Clone ID: MRT4577_119578C.1.pep
PXIYTSHNGVVDMLYADQGHHQRSLVHRSSQQYVKIIKLVLTARTCAVYSASDHLLGVGGAPVHPFLRVL

SEQ ID NO: 206136 - protein, 68 aa, Zea mays
  unsure (1)..(68): unsure at all Xaa locations
  Clone ID: MRT4577_119579C.1.pep
SDFHRAKYQLEHVVRTHKGGDDRSLRSVYYXRLASXIKGLSISLNLLXVDCHSLNTNIITLGLLELPF

SEQ ID NO: 206137 - protein, 64 aa, Zea mays
  Clone ID: MRT4577_11957C.1.pep
SFQHGQKKRAARNSRRRGPQSNYIFSSDTGSKHTGQEPPKLSAKQVKGCRTDPQAVRTHPDVSS

SEQ ID NO: 206138 - protein, 92 aa, Zea mays
  unsure (1)..(92): unsure at all Xaa locations
  Clone ID: MRT4577_119580C.1.pep
YPRFGRTLIQHTPPPRITGRALQVCLAPSFTALYDCSTVHTHTRPGSCTAPMAGVEVQVPTAAPVEEAAQLAAASGGGSXNEETAAPAVDTE

SEQ ID NO: 206139 - protein, 74 aa, Zea mays
  Clone ID: MRT4577_119581C.1.pep
VFNIGVVHNVLEQVLVLVRGFVGPKTREMLRKVKQEALVGGEKDLKSVCSFDDGAWWCPPWMWCCPNMLPSLSR

SEQ ID NO: 206140 - protein, 101 aa, Zea mays
  unsure (1)..(101): unsure at all Xaa locations
  Clone ID: MRT4577_119582C.1.pep
PAGSXLLSDSDQIVAAKDSALRGCHEAEAPLSLPSPPRLLCHRGVRGVGVGVARGGRRQRRRMTTTTPSFMPRHNMHRFHTLYRRHGSARNKMRNDTICIT

SEQ ID NO: 206141 - protein, 78 aa, Zea mays
  Clone ID: MRT4577_119583C.1.pep
AVVNYSICANGDVCRGDLVGVRQGFPNQCSCKCTISDLDLSDPNGKICPCIAGSVSVGQPKKAPKFPCPMLLLLFLIR

SEQ ID NO: 206142 - protein, 135 aa, Zea mays
  Clone ID: MRT4577_119584C.1.pep
PRCSNTRRDDRAQTTYYTVVPTPHNTTQSQMGFFDNPSSIDNVCNVPHRRTINSNGIISLMNRLTDIRHATIGATVLQSYRQLCPLSPPARVKGLVPLRHIRKGLRKFMRELSCSVDSTARTKRSIALVELRHDK

SEQ ID NO: 206143 - protein, 60 aa, Zea mays
  Clone ID: MRT4577_119585C.1.pep
GKIFIMLVLFRYFQINSIGILSVLYSCVILLICFFFNQFDCCDCTLYLMFYILLEDLGIS

SEQ ID NO: 206144 - protein, 52 aa, Zea mays
  Clone ID: MRT4577_119586C.1.pep
FTWGNLILKNQTFFFVDSKTLFEPRPPYCPLFSSFNQKKKARGIKDRVQLLK

SEQ ID NO: 206145 - protein, 103 aa, Zea mays
  unsure (1)..(103): unsure at all Xaa locations
  Clone ID: MRT4577_119587C.1.pep
MSLAGGQKEYWGLDDKPGYTDKCEPGYGLELDLYQAVLGEGKNSDNASTHVKIDDQKLGIGTLSVDKNPHIQFDLAXNKEIEPTHTEQTTSVLLTGYKDEHAY

SEQ ID NO: 206146 - protein, 153 aa, Zea mays
  unsure (1)..(153): unsure at all Xaa locations
  Clone ID: MRT4577_119588C.1.pep
MYSTPSISNHGYRQALMDPKPRGDVRKAKKGAFVRKGGGPTNNCATRSVKAGLLFHVGRVXRYLNNGRLXAHRVXTGRPPYYLSXLEYLPAQVLXLADNPGNDNKMTPIIPXHVLLSILNDDKLSMLLTGSTIDHVAVIPNINPMLLLEMIAR

SEQ ID NO: 206147 - protein, 43 aa, Zea mays
  Clone ID: MRT4577_119589C.1.pep
IYNKIFIRTILLGTFCIKANQSLLIYKLFARNEKIDNDIIYLT

SEQ ID NO: 206148 - protein, 46 aa, Zea mays
  Clone ID: MRT4577_11958C.1.pep
SSCQSKVCINLSILDVGEGQPSWSAFYFQHRIILGRTKSLPPQASH

SEQ ID NO: 206149 - protein, 40 aa, Zea mays
  Clone ID: MRT4577_119590C.1.pep
QWDSSEVVREYLRAVLSGRLPAIMPQLWSVPFLGEEMGFP

SEQ ID NO: 206150 - protein, 102 aa, Zea mays
  Clone ID: MRT4577_119591C.1.pep
IGYLEAGRDAALHATPLPFLFGCSASPPSSQPLPGSESAATSHSSLPSSRTTPSIRSGWCLRNPVRRPSVARARPGSGPAAPFRSPAPPPAWASRWNYSVFY

SEQ ID NO: 206151 - protein, 79 aa, Zea mays
  Clone ID: MRT4577_119592C.1.pep
IRTAPPLPGVAIPPPPPREASPHLSPRPSQSGVSARLSATVNDPEREERQLLPRRSIPRPPLRLFPAATVAVLRLLQWP

SEQ ID NO: 206152 - protein, 152 aa, Zea mays
  Clone ID: MRT4577_119593C.1.pep
FGTRPFLCTAYSLSPSRASLALLLPPRPRTAASTTTRRPSPPPLRSRPSALPSPRHSQAGAAALPPSPSSRPLHTHNTYPIVPRATVDGSLGAQPVPPSMESLGAHLLHLVNAYLEQELDRRCRLYCFSESPLKSVKAHVEAHNWKALLERD

SEQ ID NO: 206153 - protein, 98 aa, Zea mays
  Clone ID: MRT4577_119595C.1.pep
DIYKIGRGQMRAFGKPIAVEYTSYAGETPSLSMSVHHNSKQYAITTLPTTFDHGFPALSDPITHTANSIHNGTGNNHTHENHWLSQDEPHSAVQFTGI

SEQ ID NO: 206154 - protein, 96 aa, Zea mays
  Clone ID: MRT4577_119596C.1.pep
APPTAGFSLFAVTTPRARSRARARSSPLTRLPSKGKKPGCIQWAHASGCAWGGYSIDHVLGGRAPHNKYCVGTYKPAPPGFVSKKKKSSAGAKKNL

SEQ ID NO: 206155 - protein, 116 aa, Zea mays
  Clone ID: MRT4577_119597C.1.pep
ESQSKHIYYLCYCYHSIKGVWPWKQPNWPLLWGGPKHLTRPVQKHWGLRHGLIWFLIRPPNGEKKPPPAKLGFDPYNLVFNPLGPTPGYPFWERSPKKKLDTLEGNKGGFSLAPGD

SEQ ID NO: 206156 - protein, 179 aa, Zea mays
  unsure (1)..(179): unsure at all Xaa locations
  Clone ID: MRT4577_119598C.1.pep
PHPVIXHFIADYKDVXEYTGYSILGAVRQKMGNPVLRPALGMKPXSKGVQVGGVEPTAAHSGCLPPCVLIFSFNGVDIGNDGTDAFTHGERIGXSYVFTHKYTEKKAVDKALGDSIVHEYKIGLATHMRIDAAHVKGNPPGNYIAADLVAASISAPYLGSXYGKDYEYDAPDKAPVKHL

SEQ ID NO: 206157 - protein, 77 aa, Zea mays
  Clone ID: MRT4577_119599C.1.pep
HGTHLRNESGRYDKRNTFLSIYSTLLWNAKIFASTTLLKLYTAHDANGIFHSTRETTLFLLTNYEPSCVLLTSPHEY

SEQ ID NO: 206158 - protein, 67 aa, Zea mays
  unsure (1)..(67): unsure at all Xaa locations
  Clone ID: MRT4577_11959C.1.pep
GTVVXWPPPKKGDQWEGRFLYNFRTPVWRLLWSLTGKKLGVFDGNNNVTLXKKTVAGEWHQVTTVDP

SEQ ID NO: 206159 - protein, 144 aa, Zea mays
  Clone ID: MRT4577_1195C.1.pep
RSAEVANLTSRCKGLKEEGVADRKEACRLRAEVLGLKAEADHREEVLRWAQEGLQAVTEERNSLAKSLEDDWSSGQALAAQIEGLEKSLEGMAWTVEQQGAEAVADLFQDLDVVGMPRVGPMRPCMQALGDFVWGELRRAVHLG

SEQ ID NO: 206160 - protein, 36 aa, Zea mays
  unsure (1)..(36): unsure at all Xaa locations
  Clone ID: MRT4577_119600C.1.pep
MASILXPFVYRSQNTIGAGRLRGVGGAHALTMALID

SEQ ID NO: 206161 - protein, 117 aa, Zea mays
  Clone ID: MRT4577_119601C.1.pep
ARAHPDTEDIYGVLHGLCRKAKVEGYAPLTELVTKDVSEEEREENLTFHSEKLAVAYSVLKTGPGTEIMVSKNLQVCSDCHEWMKIISKVLCRVIILRDRVRFHRFESGWCSCKDYW

SEQ ID NO: 206162 - protein, 95 aa, Zea mays
  Clone ID: MRT4577_119603C.1.pep
DDHSSSSSLFKSTETGHIIVTTTGGKNGQPKQTVSYMADRIVGQGSFGIVFVEFWCVLISHSTTLFSIILYHFTNRPFNLFIIHQHSPSRWAKYI

SEQ ID NO: 206163 - protein, 55 aa, Zea mays
  unsure (1)..(55): unsure at all Xaa locations
  Clone ID: MRT4577_119604C.1.pep
FFCSSXXGVSIVXVNIGXEVRXWXSLPHPLVSRRTTEPVAQLEKKTRSLGRGGAE

SEQ ID NO: 206164 - protein, 311 aa, Zea mays
  Clone ID: MRT4577_119605C.1.pep
MTRIHRLRPLFLFVLLASLQCGAATAAAGYGGGAEGFCSAEPSSKCSGDQPLYWKVTHPTLAPAHLQDLPGFTRSVFKRDHALITPESHVFSPLPDWINTVGAYLISPAIGAHFIMYLANMQDGSKSALPPKDVERFVFVLQGSISLTVGTGTIHSLLVDSYGYLPANTKHSMISDEPTTLVIFERRYNAIEDSHPDLIVGSTDKQPLLETPGEVFQLRKLLPTSLSYDFNIHIMDFQPGEYLNVKEVHYNQHGLLLLEGQGIYRLGESWYPVQAGDTIWMAPFVPQWYAALGKTRTRYLLYKDVNRNPLI

SEQ ID NO: 206165 - protein, 128 aa, Zea mays
  Clone ID: MRT4577_119606C.1.pep
SGTSKRTPRGTGPKGISYGRGGPHLALWGFPGNTTYPLCFWPWPLNGNWRGFRGIQPWWVKKAPKWVSTPTPRGGIKVLFRPLGGGIFKPQKLVYGPLIGLVSLQSEAMFSPPDKEKKGVPGRGVFRG

SEQ ID NO: 206166 - protein, 140 aa, Zea mays
  Clone ID: MRT4577_119607C.1.pep
RNPDTQTGRDPNARRPKDGGSSRGHDGPNGATGVKRLQDNGRNSPGPGKKAPNKNPPEDENGRHPREVVPGKNDTGKEVPEKDGAPRKGPTLGPKKNPGQKAGHQAPKARGRPNPGDGTKPPPRREELKTPPQDDEVVDA

SEQ ID NO: 206167 - protein, 44 aa, Zea mays
  unsure (1)..(44): unsure at all Xaa locations
  Clone ID: MRT4577_119608C.1.pep
PHYTXTPXLTLGNFFLTPPLPYLGLGIYSYLKPNIQKYKFKNIS

SEQ ID NO: 206168 - protein, 57 aa, Zea mays
  Clone ID: MRT4577_119609C.1.pep
HKLFFFFFFFFFFFFFFFFFFFFFFFFSLKPKLYYEAYIIGHPTHDNGGRLTALLHI

SEQ ID NO: 206169 - protein, 76 aa, Zea mays
  unsure (1)..(76): unsure at all Xaa locations
  Clone ID: MRT4577_11960C.1.pep
LCALIAEXKSCAPLMLRLAXYSAATIDASTRTXAPFWTMKXSAELAHGANAWLDIAVRMLEPIKXEFPTLSMPDFY

SEQ ID NO: 206170 - protein, 79 aa, Zea mays
  Clone ID: MRT4577_119610C.1.pep
CCKSCRRISFCSAISSCTVRARGGGGGGNLLVLPAMLPSCHMKTEIAAIVILIHNSEQYALYHIERKCHNITSTRTRIT

SEQ ID NO: 206171 - protein, 104 aa, Zea mays
  Clone ID: MRT4577_119611C.1.pep
NLKTPCFFLGNLFPYWEIRCFYGPLVGFSAVFTWIPKGLFLFSQNSPYKNKSFFFFKRTKFLPKGLFFKLFSPKNLPPLFLGCPVDIFEQWFQFAPQKIFFFMG

SEQ ID NO: 206172 - protein, 122 aa, Zea mays
  unsure (1)..(122): unsure at all Xaa locations
  Clone ID: MRT4577_119612C.1.pep
MSDVAENDPTVTGTDRCEKDKHEDGGDKEHGGGGFMDKVKDFIHDIGEKIEEDVWFGKXTADMCGMHMKDITLHCSELSVLGLIKNANQDLILLVDIVYLIDSHDTRADRGAHLGRRDHALA

SEQ ID NO: 206173 - protein, 67 aa, Zea mays
  Clone ID: MRT4577_119613C.1.pep
SANPSQLTCLTSATCGDVPLPSYEGRGLAYRRLTTYQLAVHNLQAPIVSHYVGMTHSHQKRLKLSCL

SEQ ID NO: 206174 - protein, 94 aa, Zea mays
  Clone ID: MRT4577_119614C.1.pep
SPTPNVETTSVFWCSQGPKIKQGPQTENSKFFPKTRELKRLAFFIWREKASPFIYFQKNPSGLFSTKKKITPRLSPLWGAQKCPPFFSPPRKPP

SEQ ID NO: 206175 - protein, 82 aa, Zea mays
  Clone ID: MRT4577_119615C.1.pep
AVESKDHGAQIPVDKYTTECRHIGRNRSSAAEMLGLEAYLVKPDPGDRPVTGTRRSLLQDLQRHKPVYDQEKHGVVIYKVRP

SEQ ID NO: 206176 - protein, 80 aa, Zea mays
  Clone ID: MRT4577_119616C.1.pep
QSWHSSTIRLISPSTHTMLIPFTTQNQNTTSNPVTLYSYPRPMTLQPKASHIIMNVIHHRPRMLSTYTTTREIHTTMSRI

SEQ ID NO: 206177 - protein, 65 aa, Zea mays
  Clone ID: MRT4577_119617C.1.pep
KPKWSMMYNLLVIPNKKMWEVLLLYCFLRMYGGGGGDDTHYHVWYDQWYVRGDNVGGFRGCGSAG

SEQ ID NO: 206178 - protein, 275 aa, Zea mays
  Clone ID: MRT4577_119618C.1.pep
MGRQPCCDKLGVKRGPWTAEEDRKLINFILTNGHCCWRAVPKLAGLLRCGKSCRLRWTNYLRPDLKRGLLTDAEEQVVIDLHAKLGNRWSKIAAKLPGRTDNEIKNHWNTHIKKKLIKMGIDPVTHEPLDRKTTSSGPATTSQSTKSDEATKEQSPQNDDAVIRDVPADGCSPTESSTNTVSTGGSSSSGGGGHDQDPLVKWLLEEEPATGDEAWLNFTGSVDVDEFSSIAAGPELLPWDGATDWLLDYQDFGLGDSSLVDGYMVNNNSSNGAKF

SEQ ID NO: 206179 - protein, 276 aa, Zea mays
  unsure (1)..(276): unsure at all Xaa locations
  Clone ID: MRT4577_119619C.1.pep
RTRGRTRGAAERLRRFEVYRQNMELIEATNRRAELSYQLGETPFTDLTSEEFXHTHHVHAPACVRGRAXGTGSSSRRTQAPSATAVASGTGGTTRRXDVPESVDWRTKGAVAPVKDQGACGGCWSFATVAAIEGLHKIRTGQLVSLSEQEGKCKLDKARNHVAKIRGRKLVDQNNEAALEVAVAQQPVAVGMNVHPIQQHYKSGVFHGPCDPEDLNHAVTMVGYGAESGGRKYWIVKNSWGEKWGEKGYFRXRLERPVKDVRGTCGIAEWANYPVM

SEQ ID NO: 206180 - protein, 63 aa, Zea mays
  Clone ID: MRT4577_11961C.1.pep
VHQERGLMSYREHWWVRRQTDGVPWEPHKHKREGCWWSDIPDARKGFCIISMPGRTLDYGAPH

SEQ ID NO: 206181 - protein, 124 aa, Zea mays
  Clone ID: MRT4577_119620C.1.pep
LNVKQGFTLCSKFPKSLLGGGGGAPILIRGFEPFNYPTTALKRNFTLTRTYRVLKRNLNTTPIRKLPLNNFGNISGIDIPKKRSSNIWQTKSPNIGLITSGPPVSKLKEKILKVTPFLKFGGKI

SEQ ID NO: 206182 - protein, 160 aa, Zea mays
  Clone ID: MRT4577_119621C.1.pep
FKACSLWTHHENKSRLQLAQNKLVRISKVAFGGFAVRAMSGGKGPVDTWPSLMRLPGPRARLAQDRMVLRARRCSGPSNGRRERVRGLMGNDIYKPGQVTSVMCVVSLCSPVHKEQVNHDPVPMTCSFIRRAPDGSWWYVRYIHQMSNQGTHLWGQRQRY

SEQ ID NO: 206183 - protein, 63 aa, Zea mays
  Clone ID: MRT4577_119622C.1.pep
LPLPNFPGGTFDPKLIFFILLSYFFSKSLNFLTLSKTSKYRSRSSIYNSLYVSMSFLLSFMII

SEQ ID NO: 206184 - protein, 58 aa, Zea mays
  Clone ID: MRT4577_119623C.1.pep
PPPYINPTITAPPTIEAHIVNAHSSRPSPFKYPYPPPNLYGYPHCAPSYGAPPPPTRP

SEQ ID NO: 206185 - protein, 71 aa, Zea mays
  Clone ID: MRT4577_119624C.1.pep
TQHTMSRSLLFLAEAFYDDTSVLNQPSAMKVTEKSLAETFSEIMKSAERERALNMLISLLCSHWLAWKCCY

SEQ ID NO: 206186 - protein, 101 aa, Zea mays
  unsure (1)..(101): unsure at all Xaa locations
  Clone ID: MRT4577_119625C.1.pep
RRGAGGRQGPPRGPVRGHQPRRHPRQAGHHQAQGQPARPPQPRGARQGGRPERPGPGAQALHGSPPPAGGTWXRRGEXXSNVPNQANPXGGTNGNRHQGGP

SEQ ID NO: 206187 - protein, 96 aa, Zea mays
  Clone ID: MRT4577_119626C.1.pep
DELYYIYLKYGIMEYKKTPAWGKGGFRKRDGNYQKGGTGKENGSLFIGTGKSLGGNTIIPPKKGYNIDLNLYGLKKILFLNRVGKPKLQEKEPWAI

SEQ ID NO: 206188 - protein, 59 aa, Zea mays
  Clone ID: MRT4577_119627C.1.pep
RGPARLFFFFFFRTERLLFGGHTYQNFFEFNYKHLKRAPNDGVEEAVVCKQLDKGTIVY

SEQ ID NO: 206189 - protein, 211 aa, Zea mays
  Clone ID: MRT4577_119629C.1.pep
RPAGPVPPNFFSILLPSRHSHPAARKHRRLADGEPPFSLFCHLFSFCQPHRTSAAKELWFLANRALLLPLSFFSCRARPVLLFLKKMSMADRTCCSNSVFSFFPCLCFCAFSSIWPLVHWSTCSSFVTPLAIQPYASRSLHHLNSAEKYRWSWPFLVTLVLISSLMYSPPPFCVMYVLDVSSCNLWDRVRRSKTWIWFPSIFSVNPVTGLN

SEQ ID NO: 206190 - protein, 141 aa, Zea mays
  Clone ID: MRT4577_11962C.1.pep
AARTYKHCPLSLVHLARTILLQLLTPSYSYKHLEGQPRVCGRTQNTDTGGRMSSLELRESSVRKMKVTGGWWPKNVSIPRAAGEDFFTSRMVHDFRVFPYGRNIAAVVSVVMDKDRQEAAQKRRAVVRLPEARPKRARGTA

SEQ ID NO: 206191 - protein, 109 aa, Zea mays
  unsure (1)..(109): unsure at all Xaa locations
  Clone ID: MRT4577_119630C.1.pep
GQVLFFFXXXXFPNRKIKYFCWSLVTYTKQKQSFQDSQVDAIGSYLSCLLKSGRSMSWILGIASASSLSFCVLYVLDVSSCNLWDRVRRSKTWIWFPSIFSVNPVTGLN

SEQ ID NO: 206192 - protein, 103 aa, Zea mays
  Clone ID: MRT4577_119631C.1.pep
HWVPRGRPGNPNFFSILLPSRHSHPAARKHRRLDDGEPLFSLLCLLFSFYQLRRTSAAKELWFLADRALLLPLCFFFLCRARPAARRLLADRDVVILTERFPG

SEQ ID NO: 206193 - protein, 144 aa, Zea mays
  Clone ID: MRT4577_119632C.1.pep
HASAHASLDSWVPRVDGLGYLYKLNVGVDLPLHTQARLGGRVGASPSLSAWCVTTTLNFTFDIGADTGKGRKFPGVTDAKGLLLNHNSLSGPLPADLGYSKVSYLALANNRLTGPIPQSIGHLQDSLFEMLLLDNQLSGCLPHE

SEQ ID NO: 206194 - protein, 118 aa, Zea mays
  unsure (1)..(118): unsure at all Xaa locations
  Clone ID: MRT4577_119633C.1.pep
GANGQSKLATKLHVNELPTRFXENNVHKPANFFHPGSIITTLFCSPSILNVFPRPLGKLVLKNFXQGAATPCYLAPPPHLKGVSREVLLRXTLYEPRANPKDMELAKRLWDFGVELIP

SEQ ID NO: 206195 - protein, 75 aa, Zea mays
  Clone ID: MRT4577_119634C.1.pep
CRLVMNSAKTARILLSSSPATSGVGSCSASSSGISPSSSYGASAKHPVNRVRQVRHEPGVEQSRAAEVSAAGLSK

SEQ ID NO: 206196 - protein, 150 aa, Zea mays
  unsure (1)..(150): unsure at all Xaa locations
  Clone ID: MRT4577_119635C.1.pep
SLVDRARPYLKHPDRLYKVMDPALECQYSCRGAEVAAVXAYKCLSQNPKSRPTMREVVRALEPVLGMDDFFPAGPFVFTISVEEDKVVGVKVEVEEHRSHQDRHRHKYPNSSIHAGIVLDSREGMVGGGDYIATLRRQRRASSYHKERGA

SEQ ID NO: 206197 - protein, 118 aa, Zea mays
  Clone ID: MRT4577_119636C.1.pep
MTLDESFKRPGTVPFKWEVQPGIPKQQGAAGDVPPPPTSPRLALPPAARVAAPLATPHPQPSHSHRRSMSARFVTSLALMPFVTRRGRGGGGGGGGRAGAGAGNCEDEFCLLYGDKAA

SEQ ID NO: 206198 - protein, 217 aa, Zea mays
  unsure (1)..(217): unsure at all Xaa locations
  Clone ID: MRT4577_119637C.1.pep
HSTCPAPRDSAESLSPSSPPHPGTHALFTSDLQDQSRVEVRLERSRLVSISQRKPRDHCQRQHERGRCLSEVSGDXTAPFFXFLGASAALVFSCMAAAYXSAKSAAGVTSMGAMRPXLAMKTIAPAVMAGVLGIYGLIIDAIISSGINPKVKAYYLFDGYALLSCVLACGLAELAACMATGICDDAGSQDNAQQTKLFVGMILIXIFFAEALVLYGL

SEQ ID NO: 206199 - protein, 97 aa, Zea mays
  Clone ID: MRT4577_119638C.1.pep
MDARPRRRRARTAEEAAATLRKAWCRLRLSARDPARVPPWDAVVLTAASPKQAALYNRQLERARALGRFPAFTAAIAVPDPDGARIGSGAATLHAVA

SEQ ID NO: 206200 - protein, 150 aa, Zea mays
  unsure (1)..(150): unsure at all Xaa locations
  Clone ID: MRT4577_119639C.1.pep
MSYYASPPTPLSSCASPFFAYNITHTPLYHPHSYLQHIMVKETKYYEALEVEPGCSDSELKKAYRKLALKYHPDKTGGATAEKFQEISHAYDILSDAQKRQVYDQYGEAGLSGEGGAGGGMGGLSXEDLFSHFFGGGGGGGRGGRPSGPR

SEQ ID NO: 206201 - protein, 43 aa, Zea mays
  Clone ID: MRT4577_11963C.1.pep
MGGVFFVGGFWKSHIVHHRKKVAAVFGQGFPYFFITLTCLEAA

SEQ ID NO: 206202 - protein, 73 aa, Zea mays
  unsure (1)..(73): unsure at all Xaa locations
  Clone ID: MRT4577_119640C.1.pep
LEIRFERIFPPWWTRPFGPTRILPHYITXSKIFNPKKPTQQHNWALFEDKTNCNHLTKPLIALTSNDNITLLE

SEQ ID NO: 206203 - protein, 87 aa, Zea mays
  unsure (1)..(87): unsure at all Xaa locations
  Clone ID: MRT4577_119641C.1.pep
AIVAVAVPEGLPLAVTLTLAYSMRKMMADKALVRRLSACETMGSATPICSDKTGXLTLNQMTVFXSFVLVGGGGFPLRSCAGSGRRG

SEQ ID NO: 206204 - protein, 68 aa, Zea mays
  Clone ID: MRT4577_119642C.1.pep
SSRPGREYTPISLAAGVLFVHRRDEEVSLSRRHSAVMKPPRSCRWARLPHVSRQQKSANTSSGRPRQL

SEQ ID NO: 206205 - protein, 89 aa, Zea mays
  Clone ID: MRT4577_119643C.1.pep
DDFSRQDHAADVGVHELDHEFIQKGSYVIGKAPPHVGRRGSTFGRGYRGFIQPGCNHLIAPLLSKYCCPLTIAHERCEGLSIHCTPSRS

SEQ ID NO: 206206 - protein, 107 aa, Zea mays
  Clone ID: MRT4577_119644C.1.pep
RNCTHRDVHYLVLGFRSVDNSACMHACIHNHTTEPRRAHYHKHKPDECYLQPLTPIRFRSRALDPPCPARRIPLTPQNHRENTRNAPPPPPRTRGRTRGRTRGRTRG

SEQ ID NO: 206207 - protein, 95 aa, Zea mays
  unsure (1)..(95): unsure at all Xaa locations
  Clone ID: MRT4577_119645C.1.pep
MEKQSSTRHGALEKLKSFRGIEKQRSFKFLSMEKQQSFKRNKDSPGKRGDTALHLAARAGSVAHVQRILAECDPELXGVAARQNPXRETALYVSA

SEQ ID NO: 206208 - protein, 232 aa, Zea mays
  Clone ID: MRT4577_119646C.1.pep
MEKQSSTRHGALEKLKSFRGIEKQRSFKFLSMEKQQSFKRNKDSPGKRGDTALHLAARAGSVAHVQRILAECDPELLVELAARQNQDGETALYVSAEKGHVEVVCEILKASDVQSAGIKASNSFDAFHIAAKQGHLALDTAATQGHVDIVNLLLETDASLARIARNNGKTVLHSAARMGHVEVVTALLNKDPGIGFRTDKKGQTALHMASKGQNAEILLGVVKPDISVIHVE

SEQ ID NO: 206209 - protein, 68 aa, Zea mays
  Clone ID: MRT4577_119647C.1.pep
FHFSVLLFTTLCLVIPWCSPTFSPCITSLFLLLSYFLMCLPLSPFLTFAQPDWLLCPSLFRLFFPFVF

SEQ ID NO: 206210 - protein, 167 aa, Zea mays
  Clone ID: MRT4577_119648C.1.pep
SKMGVLPKNRPQLMEKKYQLIRMSLQNLTSPSVSLVSSPTAAALALLCSARTLLWLLHTQTRVRSQICPYKQGEEIWQIFRTEMSPQTRENKQQILRPNQEHAGSKRASEAQGSVVLVLELQKSHHSSISEGWKGQGGRLGGSGYLGSWAPPKFFHRRPLSPTGKLT

SEQ ID NO: 206211 - protein, 563 aa, Zea mays
  unsure (1)..(563): unsure at all Xaa locations
  Clone ID: MRT4577_119649C.1.pep
MEKQPSVRHGALEKLKSFRGMEKQRSFKFLSMEKQQSFKRNKDSPGXKRGDTALHLAARAGSVAHVQKILAECDPELVVELAGRTNQDGETALYVSAEKGHVEVVCEILKASDVQSAGIKASNSFDAFHIAAKQGHLDVLKELLHAFPSLAMTTNSVNATALDTAATQGHIDIVNLLLETDASLARIAKNNGKTVLHSAARMGHVEVVTALLNKDPGLGFRTDKKGQTALHMASKGQNAEILLELLKPDVSVIHVEDSKGNRPLHVATRKGNTIMVQTLISVEGIEINAVNRAGETAFAIADKQGNEELVNILREVGGGTAKEQVNPPNPAKQLKQTVSDIRHDVQSQMKQTRQTKMQFQKIKKRIQKLHIGGLNNAINSNTVVAVLIATVAFAAIFQLPGNFLEDMTQAPDPDMTLGQALIASDPAFIIFLVFDALALFISLAVVVVQTSLIVVEQKAKKKMVFVINKLMWLACLCISAAFIALTYVVVGRDDEWLAWCTMAIGTVTMVATVGSMCYCVVAHRMEEKSMRKIRRTSMSQSWSISIDSEAELMNSEYKKMYAL

SEQ ID NO: 206212 - protein, 73 aa, Zea mays
  Clone ID: MRT4577_11964C.1.pep
PPPKVSPATLISSLPPRTAGPLRLPSSRLHEGVAARHGRLGAAGGRGNQGRGGPPGVWRVVLILFPVLSVLCL

SEQ ID NO: 206213 - protein, 107 aa, Zea mays
  unsure (1)..(107): unsure at all Xaa locations
  Clone ID: MRT4577_119650C.1.pep
SERHSLKHISHTSSRHDLRFKKEIFVKSLTGNTITLEEXWADTIGPCKGRIEDKEAIPPQQQRVIFDAKELEDGRTVDDYDVDKESAVQHVLRLRERMKIFEISRIG

SEQ ID NO: 206214 - protein, 134 aa, Zea mays
  unsure (1)..(134): unsure at all Xaa locations
  Clone ID: MRT4577_119651C.1.pep
VRLLALSACVASATILPQCSQAGIASLLTPYLPSMIASVCENPPLYPYMLQQAIXASNIPLSPYSVQQSPTLSLVQSYGHTIMAHQLPQLMLPVIHQTALANLATYSQHQHSLSFNQLYTLNPADYFHKHLYPF

SEQ ID NO: 206215 - protein, 57 aa, Zea mays
  Clone ID: MRT4577_119652C.1.pep
RACADSNCILLPHVTNSNTAHNQILYEQALNSSLVLAGEIIMHHTRISILQVLALLL

SEQ ID NO: 206216 - protein, 86 aa, Zea mays
  Clone ID: MRT4577_119653C.1.pep
GWGVVSVWLQGLLLGSCALPSWWSCRLSGGWPAWCRVSLLWFFGAVVPFVALFCPVRLPPFVRSAGVAGVFAFTPPCAPPRCRRYQ

SEQ ID NO: 206217 - protein, 121 aa, Zea mays
  unsure (1)..(121): unsure at all Xaa locations
  Clone ID: MRT4577_119654C.1.pep
RTTSNETLSFSHGYREDYMNIVDIGHVYSGKXTTTGHLIYKLGGIDRLAIERIKIQAADMNKRTFKTARMLDKLKAERDXSTTIDMVLWKVDTTIDYCTVIDATEHQDFIKNMITGTCQAD

SEQ ID NO: 206218 - protein, 89 aa, Zea mays
  Clone ID: MRT4577_119655C.1.pep
RGGEDRHQVWLAVDRYAPWRSLSVHPFGLAHHTYAFYALGRTVHSYQVAFIINVSIVGAVLQEPGKVPRFCHILSLGPLRISGHVEYGC

SEQ ID NO: 206219 - protein, 84 aa, Zea mays
  unsure (1)..(84): unsure at all Xaa locations
  Clone ID: MRT4577_119656C.1.pep
MYYKRIPVPPLVAISLINTIANGNTSLYAVQNSLYNFYVCHSSILFNRIQXIKDKVYPDRTHFIIPCFKPPIIXDVPSKPNYYY

SEQ ID NO: 206220 - protein, 58 aa, Zea mays
  Clone ID: MRT4577_119657C.1.pep
LPCRLDQMIFSRNQVWSRCKFVHVMLAVQCVVWSQVQVFRLQGFVPPMHVCIPLFFSV

SEQ ID NO: 206221 - protein, 63 aa, Zea mays
  unsure (1)..(63): unsure at all Xaa locations
  Clone ID: MRT4577_119658C.1.pep
MARIKVHELRGKSMTDPAAQLIELNSELFLLRVVKVTGGATIKLFKINVVRTXIARVLTVISY

SEQ ID NO: 206222 - protein, 95 aa, Zea mays
  Clone ID: MRT4577_119659C.1.pep
RLMLLLGWGAFRLKMGPSPTFFLSLGKTTRPDTGKRGLPQHTPLCRKNNFFYKGHKGENEHTGGPPDPKITTQNFSQRPNLENTTKKTSVSRNPR

SEQ ID NO: 206223 - protein, 196 aa, Zea mays
  Clone ID: MRT4577_11965C.1.pep
MGRAAEEEGDVEFADYDLDDEDAMEEDGRAARALPVPRIVSPAVVRTRGRFVGRSPSVLTSSRYRFDFTTNNGDHGPIPLPQRSIEGWAILVSGVKDDAEEDDLYNAFSDFGHVKDLHLNLERRTGYAKGYALIEYENFEEAQAAIRAMNGSQLFTKTINVDWAFSRGPIQNFKSARPSRPRSRTPPRRLAALTPY

SEQ ID NO: 206224 - protein, 87 aa, Zea mays
  Clone ID: MRT4577_119660C.1.pep
RPRTSPVFPGGRSTPYNPKRKRGKKERTTPFKRPNPKPKPPPFLQGKLNSTGPTTVLISGHLFYRPQTPTSLFKKNLLAAAPGPPQS

SEQ ID NO: 206225 - protein, 88 aa, Zea mays
  Clone ID: MRT4577_119661C.1.pep
ISNIRCLLYASNRQLSTGVTLICTPNSLAHPLQLLIISRIRRVSICINRVIYTHRGMPQLVHRLCPSSLISRHGRSRINELVPLTVVF

SEQ ID NO: 206226 - protein, 81 aa, Zea mays
  Clone ID: MRT4577_119662C.1.pep
MNESAQNYFSVQKPSETSSGPYTSPPPIGYPTRDAVVGDPPAAAVETNSKGVNPEAIMSCFSTCMECIFCCGVCSSLCTSE

SEQ ID NO: 206227 - protein, 45 aa, Zea mays
  Clone ID: MRT4577_119663C.1.pep
ILRGNRPYPRSHCVALLRELFTSSSQKIAPDVQVFDRPLRNSRSL

SEQ ID NO: 206228 - protein, 156 aa, Zea mays
  Clone ID: MRT4577_119664C.1.pep
SFRRNLANGSSSKQSLEQQQQNDDEASCDKAKQTCKRSPLIKINMDGIPIGRKINLSAYDSYQKLSSAVQDLFCGFLDAAQKDESRGRGAEEKMFSGLLDGTGEYTLVCEDSEGGRTLVGHLPWNVFVSTAKRLRVMESSELPHGLIKTASKRADG

SEQ ID NO: 206229 - protein, 60 aa, Zea mays
  Clone ID: MRT4577_119665C.1.pep
TAPPRGSAAATASMRRRRTTGGAASGGAAGTMLQFYTDDAPGLKISPNVVLVMSIGFIAF

SEQ ID NO: 206230 - protein, 39 aa, Zea mays
  unsure (1)..(39): unsure at all Xaa locations
  Clone ID: MRT4577_119666C.1.pep
LQKMWVNQFHPHXRIGILMAVXLVKLTPCLCSSGGGRDC

SEQ ID NO: 206231 - protein, 56 aa, Zea mays
  Clone ID: MRT4577_119667C.1.pep
MKTFDPWPVFFRREWKRNWPFLTGFAITGFIITKMTANFTEEDLKNSKFVQEHKKR

SEQ ID NO: 206232 - protein, 89 aa, Zea mays
  Clone ID: MRT4577_119668C.1.pep
RPTLLIGARQLTRRKTTSSRIWDVRSSNHRDSEISNCFCCSTASTLSCRSLYISWRYLIMFVVSRTLSVSSPALLEKTTTEVVEEANVY

SEQ ID NO: 206233 - protein, 56 aa, Zea mays; identical to SEQ ID NO: 206231
  Clone ID: MRT4577_119669C.1.pep

SEQ ID NO: 206234 - protein, 121 aa, Zea mays
  Clone ID: MRT4577_11966C.1.pep
RRPGPGPQRSIEGWTILVSGIKEDAEEDDFYNAFSEFGHVKDLHLNLERRTGYAKGYALIEYESFEEAQAAIRAMNGSQLLTKTIYVDWAFSRGPIQNFKSTRPSRPRSRTPPRRLAALRP

SEQ ID NO: 206235 - protein, 56 aa, Zea mays; identical to SEQ ID NO: 206231
  Clone ID: MRT4577_119670C.1.pep

SEQ ID NO: 206236 - protein, 56 aa, Zea mays; identical to SEQ ID NO: 206231
  Clone ID: MRT4577_119671C.1.pep

SEQ ID NO: 206237 - protein, 56 aa, Zea mays
  unsure (1)..(56): unsure at all Xaa locations
  Clone ID: MRT4577_119672C.1.pep
GSSRHYLIVINDLLVFLVIISKKPTRYMLLRIAXEFYINLYLKHANDVSSRGMTRQ

SEQ ID NO: 206238 - protein, 77 aa, Zea mays
  unsure (1)..(77): unsure at all Xaa locations
  Clone ID: MRT4577_119673C.1.pep
MAGKGDGPAIGIDLGTTYSCVGVWQHDRVEIIANDQGNRTTPSYVAFTDSERLIGDAXKNQVAMNPIXTVFDAKRLI

SEQ ID NO: 206239 - protein, 71 aa, Zea mays
  Clone ID: MRT4577_119674C.1.pep
PGKGVVFWVGRTKGVLRTGYPPVGPPGDMFPSRRDQTARGLFCGGGEPPLEKSRPRIFGAPEFFFKPPPAP

SEQ ID NO: 206240 - protein, 165 aa, Zea mays
  Clone ID: MRT4577_119675C.1.pep
SPCSNYPTQLFSPISIIKNVVDHQRSDSLAVVKAIIKSTKNSSQKKAPYYISQEHDSYIVVCPIHLHTRHPRLTHALLHQNMPNRRYPLRRREHGAVSVLQNSAHLLNRRRDGDLAAGDGARRVDLAGLPVGVLPGGVAAGEVELHAALGREAAALVGAVPRLVD

SEQ ID NO: 206241 - protein, 77 aa, Zea mays
  Clone ID: MRT4577_119676C.1.pep
GPSRCCSIGRRVMDIWIYALTSPRARDSFLTLIFRYSYARDLTSFALDQDLPFLNGLIVSEILNIILCFWIVYPNNI

SEQ ID NO: 206242 - protein, 64 aa, Zea mays
  Clone ID: MRT4577_119677C.1.pep
RTSFRSHGVPLTLGREGEGSQNTICLQPTMNTFKLRFHRAQRSSQLQILDKLRTSTRHTTHAPQ

SEQ ID NO: 206243 - protein, 588 aa, Zea mays
  unsure (1)..(588): unsure at all Xaa locations
  Clone ID: MRT4577_119678C.1.pep
GARHYPRRPLHDLVDKIDLDVPAGEDRDADGWLAEDQXKALERPEEXPLRXKKRGVTKVLDAGEDEGKMDSPEHVTSGKRQRKRSKYLLPPYTSLVVVXKIALKPVDLPRALVTEAAEDGSDMSPLPDSIVVEDVLLLVRRLGEVPRHKDDFPKDAEGFLCLFRSTTFVHGADYESCKAYECPLVRGSGKVGMEIVVALASDSHAFLNQGSCVLKRTRKKDEAVSGSPSIKKKREKTSLASADIPIAPAIPIRQLKAEDMRTLMKAESGLRGIGLGVKNNKGKPSPLKVPISAADPGAVELGHEHAQANVLAVCNTRPEQPAKENDATNLEATRSEMNMQNGTVDVPIRSVQTEAMKLQANNPIDVNAQSVAVDVPVGSVSKEATEPETSVHKDKNVQSDVSGVSDRIVSKEPTELETDDHINENVQSVAADVSARSVSKEAAMTDADIGIHENTQSAADLPDSSGPSPMHEDMSQPVDGHKEPGSVEVCIVQQSYASLEAMVPEMIKKVNANGAGTIGVNYTLKDEFQKDGQPVEKVKLPAGVANHSCGGGTNGTWLDPANLTPKKKKKVAQHFSNPAAVIVEFAPG

SEQ ID NO: 206244 - protein, 134 aa, Zea mays
  unsure (1)..(134): unsure at all Xaa locations
  Clone ID: MRT4577_119679C.1.pep
MAHTKGHQLRLKSMTDLQAQLKELNCELSLLRVPKVRRRAPNKLSIMKVVRTSIARVLTTIXTSNNSTLQQSYXKKKNLLPLDLHPKKTRXAIRRRLTKHQLSLKTDREKKREKYFPMRNYAIKAYVRTVRRCA

SEQ ID NO: 206245 - protein, 55 aa, Zea mays
  unsure (1)..(55): unsure at all Xaa locations
  Clone ID: MRT4577_11967C.1.pep
MHPEHAHRHYITXEVTAATRVPGDSYLFHEHHKKKKDHTDTEEASGXKKHHHLFG

SEQ ID NO: 206246 - protein, 83 aa, Zea mays
  Clone ID: MRT4577_119680C.1.pep
MSLPSATAPSSSGATQTLPTEQQGVSRERRMESLGWLTESAVMPKKHKAIEGVGAASILDLKAQLYRTQEEARNPTAPSAVAA

SEQ ID NO: 206247 - protein, 93 aa, Zea mays
  Clone ID: MRT4577_119681C.1.pep
QWCWLKFFCVYRPPHCPLSVASNSLRSIQTIVVHLCPQRHDLVPGNSRQSKSAILPGCFFAHAFSACEHSRRSSKQQFAPMLEFLVRGRAIIS

SEQ ID NO: 206248 - protein, 121 aa, Zea mays
  unsure (1)..(121): unsure at all Xaa locations
  Clone ID: MRT4577_119682C.1.pep
MKSRARXTDGDSRLSARKTNAEKDPNKPKRPPSAFFVFMEXFTKDYKEKHPNVKQVSLIGKAGGDKXKYLSDAXEKAPLRVIKTEKLKADYTKKIDSYNNKQSGDPTXSGDSDKSNTEGDE

SEQ ID NO: 206249 - protein, 332 aa, Zea mays
  unsure (1)..(332): unsure at all Xaa locations
  Clone ID: MRT4577_119683C.1.pep
MSSSPADLSCVLPRVLIVSRRTVRKNKFVDFVGEYHLDLIVGYGAVPVIVPRVAGVHALLDSFEPIHGVLLCEGEDVDPSLYESXTPSLSPEQLEAVRRLHASDAAVDREKDSIELRLARRCLERNIPYLGICRGSQVLNVACGGSLYQDVEHELAEAQQVQVQHINYADYDDHRHPVRVVPGTPLHEWFAGDLADGARLMVNSYHHQGVRRLAQRFVPMAFAPDGLVEAFYDPAAYSPGEGRFIMGLQFHPERMRRPGSDEFDYPGCARAYQEFVRAVVAPQEKTAAATQLPRPGAAPLPASSSPKLSKEMERRRKVISRSFSLAKDMYLS

SEQ ID NO: 206250 - protein, 239 aa, Zea mays
  Clone ID: MRT4577_119684C.1.pep
MSSCVAPRVLIVSRRTVRKNKFVDFVGEYHLDLIVGYGAVPVIVPRVAGVDALLDSFEPIHGVLLCEGEDVDPSLYESADDADGSLSPEQLEAMRRLHPSDVAIDREKDSIELRLARRCLERNIPYLGICRGSQVLNVACGGSLYQDLEHELVRPAAQVQHINYGDYDGHRHPVRVLSGTPLHEWFARDLADGAQLMVNSYHHQGVRRLAQRFVPMAIAPDGLVEGFYDPDTYNPGEGR

SEQ ID NO: 206251 - protein, 92 aa, Zea mays
  unsure (1)..(92): unsure at all Xaa locations
  Clone ID: MRT4577_119685C.1.pep
LAFPTESPHTPPKARXHTPRSPPTXHVHGHXCLHLPRHKWSPAXHVRPILLSSQSXLGDPNXASPLHTQAAALCATQEEFRKMVEKIHKPPA

SEQ ID NO: 206252 - protein, 213 aa, Zea mays
  Clone ID: MRT4577_119686C.1.pep
MYADAGFAFAFAAAYSPTLTSSQPQPPPPPFDYAFSSEPPLLSMPAMDHDAYLGNLVQPSMVSEYDLGGEGDLFKAPEAIIEEPLLSLDPVAAAFSMMAGNGSAVMDQTIKDAGTGTIQNDPLLSEVLYECEKELMEKSTIEGELTANVCVTISDLKTEERKQKLSRYRKKKIKRNFGRKIKYACRKALADSQPRVRGRFAKIEECDLLKPSK

SEQ ID NO: 206253 - protein, 263 aa, Zea mays
  Clone ID: MRT4577_119687C.1.pep
MHDALASSQPPPPPFLSMGVMDHEAYAAVPSMVSEYDLGGEGDLFKAPQVIIQEEALLSLDPVAAACSMMNQTIKDAGIQNDALLSEVLYECEKELMEKSAIEETISELMDVKIPMLQAEQLPAMENEKRSIPECSLQKSVSSGCLNSADWMNGAVRPNFLDFQGLDFEAAFGLRRAYSEGDIQNLGANTPRPAANVCVTISDLKTEERKQKLSRYRKKKIKRNFGRKIKYACRKALADSQPRVRGRFAKIEECDLLLLNSST

SEQ ID NO: 206254 - protein, 314 aa, Zea mays
  Clone ID: MRT4577_119688C.1.pep
MYADAGFAFAFAAAYSPTLTSSQPQPPPPPFDYAFSSEPPLLSMPAMDHDAYLGNLVQPSMVSEYDLGGEGDLFKAPEAIIEEPLLSLDPVAAAFSMMAGNGSAVMDQTIKDAGTGTIQNDPLLSEVLYECEKELMEKSTIEETISELMDVKIPMLQVEEIPSQAEQVLIQNQQLPAMEKEKQSVPECSLQKSVSSGCLNSADWMNGPARPNFLDFQGLDFEAAFGLRRAYSEGDIQNLGANTPRPAANVCVTISDLKTEERKQKLSRYRKKKIKRNFGRKIKYACRKALADSQPRVRGRFAKIEECDLLKPSK

SEQ ID NO: 206255 - protein, 164 aa, Zea mays
  Clone ID: MRT4577_119689C.1.pep
MPSWPSWCPENCITEMQLPSILSLHVHDLPSFLAVTSEDNPFAFVLPEFHELVDALKRDDGSSKPPTYVLANICDAMEANALASLRPHMDIFVFGHMLSFQHEADDGRCAPPPCNVFDHDKSRYSYLSWLDTKPAKSVVYISFRLVGAAPGAQWHHGRCDRNVP

SEQ ID NO: 206256 - protein, 88 aa, Zea mays
  Clone ID: MRT4577_11968C.1.pep
FMLMFGFLGILLILLHLRVPGCLRHPLVLRLFCWMLFDWLLFLCPCDRGGCLCVWVSVLCPFTCGSSSYYLLSCPCSCVVLPVCSCLL

SEQ ID NO: 206257 - protein, 31 aa, Zea mays
  Clone ID: MRT4577_119690C.1.pep
FLNVMGVQPRVNNSDSLKIGHNISNVINELK

SEQ ID NO: 206258 - protein, 89 aa, Zea mays
  unsure (1)..(89): unsure at all Xaa locations
  Clone ID: MRT4577_119691C.1.pep
RVFFFFFFFFGGCHKEHPSVGTDLKGVCEEPPYMEINKDRMNSKINQTAKRAWAGLHLLSLSHTQTQGRRARKGFLFXXSSKHASRDHA

SEQ ID NO: 206259 - protein, 223 aa, Zea mays
  unsure (1)..(223): unsure at all Xaa locations
  Clone ID: MRT4577_119692C.1.pep
GRVGGASXHVEGNYAVHVYIPVVIPSDARKQLALSMKRAASLVPDLYAVDADYALSELCKDEQKLEKVLLSREFHVSLGRPVAVQVHQIDSFIAMLRQKFQPQQQYWMEFNKWEHFVNDDCTRSFVSLEVTRTGLPEITRQILMVDEVYRLHGLPEFYTNPRPHISLVWALGDVSGKLKQALKXTLKNIRAXSSLQKCNVRCKFSRVVCKVGKKVHDICKVAD

SEQ ID NO: 206260 - protein, 120 aa, Zea mays
  unsure (1)..(120): unsure at all Xaa locations
  Clone ID: MRT4577_119693C.1.pep
WRTTAGGFATKPSSNNPSASVGCSRYGKHSDEGPLNYCEYGSSRNDSEKYLKEEKEHKHNEHLGNIGTLAVGAFDLYERHHAKNDPEHAQXHKIEEGLTAVAALGNSRLTFHEHHDKKRP

SEQ ID NO: 206261 - protein, 81 aa, Zea mays
  unsure (1)..(81): unsure at all Xaa locations
  Clone ID: MRT4577_119694C.1.pep
GVFYPXXXSKLSNFFYINXLNTRQTVKHISPAPTTTTRPPISHNTLTTPNSNTFTTPSPTTYISHIITTKTLTSFILILNN

SEQ ID NO: 206262 - protein, 90 aa, Zea mays
  Clone ID: MRT4577_119695C.1.pep
VDGVDDEQVAVGVDGGVDEERQVHGGACGEYDLSEEDEVGGVARQARMTRRRAREGVQEVCEIQGSCQVPLLSPRTARLRSSCPPRRPAC

SEQ ID NO: 206263 - protein, 82 aa, Zea mays
  Clone ID: MRT4577_119696C.1.pep
QADSGRPGPAHDLGPGLCLEAQVLRLVSLCTCPILRFLRAAMRCVKERCFHRQDRPRPARDECEGPFIHMDRMPIPPRITLS

SEQ ID NO: 206264 - protein, 94 aa, Zea mays
  Clone ID: MRT4577_119697C.1.pep
MTTSSATNELSSKIKNLRNQGICSTKFKTKKVISQPTCYTVDQAHLGNAIKLIATHILGKNLMVRQRHIKDSLLISVLTLLPGWLSLHRPGVGG

SEQ ID NO: 206265 - protein, 66 aa, Zea mays
  Clone ID: MRT4577_119698C.1.pep
IVSRYKILLDFIGNTCASPTSCKKYIQIAQRQGRIYPVGEPTREKQSCNLHPITYTCAQIKRIFIF

SEQ ID NO: 206266 - protein, 97 aa, Zea mays
  Clone ID: MRT4577_119699C.1.pep
DHSSNAHYENLVVVNLQQHQISKQSLQYKEALGKLLQTMTTGVAQNSCPHRVSWDLAGARSVVVPLGQLASLSTNRSSSIDQVFKPCREYIHDPRVL

SEQ ID NO: 206267 - protein, 509 aa, Zea mays
  Clone ID: MRT4577_11969C.1.pep
MPGAFHSLLLPLKRKRKSKRRSRRGHRKENNPNISKNHLAAAGDPSFHLKSCTSVSPRDIGLLVQPLGNLFLSATPRANLRDAGLGALRPLPDDLLLDVLGLLPARDLAALSVASKALYVVASHDPLWRALVLDELGGAFDFAGSWRATYIAAASGGQAYLIPPRALKIKGFYSDYLFQSWLCANMEMRHEWLARDNIERRRGLSVEQFIAEVEEPNRPVLLEGCIDMWPALQKWNRDYLLEISAGKEFAVGPVSMPLDRYFRYADNVQEERPLYLFDAKFAERVPEMGRDYEVPVYFREDLFSVLGKERPDYRWVIIGPAGSGSSFHVDPNSTSAWNAIIKGAKKWVMFPPEVVPPGVHPSADVAEVTSPVSIMEWFMNFYGACETWEKRPIECVCRSGEVVFVPNGWWHLVINLEESIAITQNYVSRRNLLNVIDFLKKPNASELVSGTEDRVNLHNKFRGAIEAAHPGMIKQLELEAQQKAAARKKKASFWDSAVDAKNGGFKFSF

SEQ ID NO: 206268 - protein, 84 aa, Zea mays
  unsure (1)..(84): unsure at all Xaa locations
  Clone ID: MRT4577_1196C.1.pep
EERNGNYRQIFXPEQVIGGKEXDACNNXTRGHYSIXKEIVDLXLDRIEKLADNCSALQGFLDFNAVGGGTGSGHGSLLLERLTV

SEQ ID NO: 206269 - protein, 51 aa, Zea mays
  Clone ID: MRT4577_119700C.1.pep
SFVPSLTISQQKALVLLLVNRTSIMLGGRMYLKDKLLRGGFTLGFENRLYS

SEQ ID NO: 206270 - protein, 88 aa, Zea mays
  Clone ID: MRT4577_119701C.1.pep
TSNAIHSSVCSRPCSHSLRSPPTLSGLSTDCKIFAMAYISTISMMSSPLSRALVMSRYAARPLSSMCLNASQAKMSAAMPTVQTRALQ

SEQ ID NO: 206271 - protein, 78 aa, Zea mays
  Clone ID: MRT4577_119702C.1.pep
NPAQKTPPPRPPPLLFPRPPTREWPPPTPLPPPQRKPFPPGVPPPRWSLNPGSFPPPLSLGIFLFWAPLVSPYMEVLL

SEQ ID NO: 206272 - protein, 63 aa, Zea mays
  Clone ID: MRT4577_119703C.1.pep
PLFFFFFSFFFFLSGKSPSYFGRISYNNTVTIEITRKQNENLEIRDLADSLPTHACRRAKRFL

SEQ ID NO: 206273 - protein, 94 aa, Zea mays
  Clone ID: MRT4577_119704C.1.pep
IYNFFFFLNKPGFRIYSIKTSQETSPKQTPIPTPPFFPKILLLWAPANFQHTHQCNAMQMPGPNQSPPKNQVLSRGPAFQPVKNRPFTTPLTLS

SEQ ID NO: 206274 - protein, 83 aa, Zea mays
  Clone ID: MRT4577_119705C.1.pep
HLVARASPRWVQPMCKLVVYQSLSDYVSQEGTQLLTPKPDRVNSFINHSDLAISFYMPYKLTAICSDRIPALADSSIEIEYVS

SEQ ID NO: 206275 - protein, 310 aa, Zea mays
  Clone ID: MRT4577_119706C.1.pep
LVNKFYYQILLFICLLTSKQISQVSLSLVFDRGVKSCVRYLDAVPWSESEEETIKRLMSQHPSYKAALRNLLAARLQPAERPASSAEAELVVELADSITKGTNNNARKELRNRICHSCLNSLARLLGEESPEPDQTSLPSVGRGGVPVPPPETETESIYRLVEDINWLLQILIDRQMGEEFVELWADQTSLSGVHGRASPMVRHELSRISATVFIAMGSGRLQCAGARRFGVFQAWFRPMLADFGWLRRYPKGLNVTALEEGIGQALLTLTLEQQQALFLEWFGAFGSHGRECPDLMRAFQVWWRRSFVR

SEQ ID NO: 206276 - protein, 65 aa, Zea mays
  Clone ID: MRT4577_119707C.1.pep
RPRSMRGMGSGISSAASRWSRSRSCTTYCRGGSSTAAARSCTVVRTIEGALFLVTVTTLPWYADG

SEQ ID NO: 206277 - protein, 132 aa, Zea mays
  Clone ID: MRT4577_119708C.1.pep
VGTFGLIYVLGKHGLKAIPYSEKGRGFNHSVPSAKHADGDGDTAVADAKEKGLDMHEFSKYLRGVTRRKDSDKLSKGFSIACSIIEGGIKIAHDDATFVNRKVNIHIKQPIPASITSQAGSRQSHQTGPDFK

SEQ ID NO: 206278 - protein, 200 aa, Zea mays
  Clone ID: MRT4577_119709C.1.pep
MIVCLLTTHLTFKLSISDMKTIILKLSEKEPRLLLSVLKSVIEMIDAKEELADKDESHSCLPAGPSKAKGLCSLMFVTSHRTKGHKDSGYIGLVHEKGVLSSDKNAIPHFCLAKLLQKLLNLSTTSERYLIDAAWLLIEMVNDSNTKEKLRKLPVLSLGRMAKSSSLPDSRTICNEQGSVENATETLELFKVQLKRQKNG

SEQ ID NO: 206279 - protein, 71 aa, Zea mays
  Clone ID: MRT4577_11970C.1.pep
LLFIFHQHPNEGAFRQWDGLLHHSLNILTLHILGTLLKILGGRFKFKPPSRKDNHYIPTTYSQTQSLTCGT

SEQ ID NO: 206280 - protein, 52 aa, Zea mays
  Clone ID: MRT4577_119710C.1.pep
YCCKIAVLDGCQPHGVHGCRHSMIPRALIALCCIHRVDVLVFADPKVHRPCD

SEQ ID NO: 206281 - protein, 151 aa, Zea mays
  Clone ID: MRT4577_119711C.1.pep
RRCLHQGLERPRLHGLPPPLPRDLRLDITTASFGIAIPVHAVARDTKSIEVVVVAAPLIHAGDRPCYVIFAARRITIGCSGGLVGGGVIMMTLIDLSLLTRRSMFCLITLVVFPCRRRFVRAAAFTLLGFGILVESGGGLLWRRRRRWPGR

SEQ ID NO: 206282 - protein, 73 aa, Zea mays
  Clone ID: MRT4577_119712C.1.pep
GARRTDQPASLYAATKKGVEEIKHTYKNIYGLYITGLRFFTVYGSWGRRDMAYFSFNRNILQGNTISLYCGKD

SEQ ID NO: 206283 - protein, 101 aa, Zea mays
  unsure (1)..(101): unsure at all Xaa locations
  Clone ID: MRT4577_119713C.1.pep
TNFIFFAVILTSDYHFGDTFHTNXVPHNXXSPXLPLIMLLNPFDXLVVDNNYFYLTPLINFIDAITIPIVDTFYKNPYNHPYLMKFLQSSSPKAILFLNFF

SEQ ID NO: 206284 - protein, 61 aa, Zea mays
  Clone ID: MRT4577_119714C.1.pep
NMLNCHKVCLNCLAAKKVCPCINRFPALTPVKYLWANAFVGHYKPNVVKVRKNKEVNARRT

SEQ ID NO: 206285 - protein, 97 aa, Zea mays
  Clone ID: MRT4577_119715C.1.pep
GREALMNGELDELGGILLEAWRLHQELDPFCSNKLVDKLFAFAGPYCCGYKLVGAGGGGFALLLAKNVSCAKELRRALEESATFDVKVYDWNVAMPR

SEQ ID NO: 206286 - protein, 113 aa, Zea mays
  Clone ID: MRT4577_119716C.1.pep
FPPPLRISPQGGFKPLFLRLGWPSPFPRFVFFSKRVPSGLAGKFSPPPLSWWGGGFKNPFLFFFQPPLVGPPPKGLKKKFQKSPPVGGILFFRFRSGDGQVFFPPKKKITRFF

SEQ ID NO: 206287 - protein, 53 aa, Zea mays
  unsure (1)..(53): unsure at all Xaa locations
  Clone ID: MRT4577_119717C.1.pep
LQPRQPXGXAXPPPXXPPPPPPPWGKRGXXPXPSPPLPPPPPPPPPPPPPPPP

SEQ ID NO: 206288 - protein, 276 aa, Zea mays
  Clone ID: MRT4577_119718C.1.pep
MEEDSIKGMISAISWVPRGAAKSVPVVADPPTQEEIAEAMKTFDLGRDSGSDADEDDDAATMELDGAAETVEEVDEAARAKAVAKALCKGSSKADDVADELRELNMDAYDDEDEEVDIFGSGLGDLYYPSNAMDPYLKKNNEDDEEDDDDDEEIEDKMIMPTDFVIVCAHSEDDIFSLQVNILEETNDGEQNIFVHHDVPLADFPLCTAWMDFNLKGGEKGNFVAVGTMDPAIEIWDLDMVDEVQPHMVLGGLSTMDPAIEIWDLDMVDEVQPHMV

SEQ ID NO: 206289 - protein, 81 aa, Zea mays
  Clone ID: MRT4577_119719C.1.pep
TDWHQAPKADVSEPCETGPREDQADEEDDSPICLVEYDTENAHSVTYCQHHWHLWCILSWMDRRVTCPVCDQITLTDRMYE

SEQ ID NO: 206290 - protein, 100 aa, Zea mays
  Clone ID: MRT4577_11971C.1.pep
PADEGLILANTGLWDVVTNKMACEVVRGCFHKNGPPAPAARANGGALPATKNGSPAPKGVRVEDSAKGWSDPAMLLAKLALARRSADNVSVVVGDLPRGI

SEQ ID NO: 206291 - protein, 75 aa, Zea mays
  Clone ID: MRT4577_119720C.1.pep
MAKVAKDLNPGVKKMSLGQLQSERGVACLGCKGTCSGFDPHSWRKICKSCKCSQEDHCLTSDLEDDRKIGRLLID

SEQ ID NO: 206292 - protein, 109 aa, Zea mays
  Clone ID: MRT4577_119721C.1.pep
PDGIAGLENGVPTESRQRATIRQQLSALANGKVVDEFTLPLGRKLKEGLKSLNKLTVSQRRNIKRQALLTQVSGRNDSVFFATVGAFVLVPPFAILAIAVITGYVQLFP

SEQ ID NO: 206293 - protein, 260 aa, Zea mays
  Clone ID: MRT4577_119722C.1.pep
MAAVEAKRSPHFVLFPFLAHGHVPAFLRLAGLLRALRPGLEVTLVSTPRLLGSLTLPPASPPVRLHALPFVPADHGLPPGADSLADVQIHQFITFFTASESLRPAFEKFVSGIGSPVCIVADAFFGWTAEVARARGASHAVFLPGGAFGNAVFFSVWEHLPHALTAADEFPLPDFPDVVLHRTQIPRFILSATGADPWTAFFRRVIASCRKTDALLVNTVRELEPSGLDMLRRSFGVQPWPIGPVLAEPTAPSSDLRDDA

SEQ ID NO: 206294 - protein, 84 aa, Zea mays
  Clone ID: MRT4577_119723C.1.pep
QQGMGHLWNKGRGLTSFVGVAQVLFVLVGAFLLDRVRRGRNGLSSQDPRVGALSSRGSALPQVPHGRHSEIRAVVGLCVESTIV

SEQ ID NO: 206295 - protein, 56 aa, Zea mays
  Clone ID: MRT4577_119724C.1.pep
LYFLPENCSRVENKKPFAPPREVHVQVTHSMPSHKTEIFKSLDDWARDYILTHLKP

SEQ ID NO: 206296 - protein, 156 aa, Zea mays
  Clone ID: MRT4577_119725C.1.pep
NNRRFEMLCPSRVQWKLPMSVLGISPFGLWGFCPLSPSAWSPPSGGVTPALSRVFKGAIGGFKRDFCYSRGRSLMNGRSLKGFTVELLIWPILNLEIYSSGSSGPVGPDFVSLVRRGFLHTVSVGSFKVTSPGLFMGSGSCVCKDSLPVVFWIPPF

SEQ ID NO: 206297 - protein, 131 aa, Zea mays
  unsure (1)..(131): unsure at all Xaa locations
  Clone ID: MRT4577_119726C.1.pep
RHTKRNTVTTIAAKIYYLLERLNLXRVLLTATIFHQCSQGHIDSLVYPYIXSPTXVSAVCNNTNLQTYIIXQTHSAMISHLSHLFFQQXTPITPHTSAAYIVTQHLGPLXLQQLVLQNLAEYSQIHQRLPY

SEQ ID NO: 206298 - protein, 34 aa, Zea mays
  Clone ID: MRT4577_119727C.1.pep
DPRRRERATLAEIGKSHVRRRPRGGSSDRRGIGT

SEQ ID NO: 206299 - protein, 151 aa, Zea mays
  Clone ID: MRT4577_119728C.1.pep
LSLFSRSRSKAPAAARRSGAPSGVTFFLPNTASGGTPTRLTPPRQRPAGRTARRSNSSGEFPCFCTPSGFGSRRRVISGRCARKWWLAEMGDRGSGYRSTTSCAAIRFSLLFPISLHGTPRSRDTSSGHTPGIELDTKLPATLSAISTTFG

SEQ ID NO: 206300 - protein, 170 aa, Zea mays
  Clone ID: MRT4577_119729C.1.pep
MSPLVRVLAPHATSTQAAQPRAVAMASKHLVLAACLLLLLPTASVATDVDYCSKKDYPVKVSGVQILPDPVEPGKPATFKISASTDKTIEKGKLVIDVKYFFFYVHSETRDICGETSCPATGDFVLSHQQTLPGFTPPGSYTIYMKIVGDDNEELSCISFGFSIGFVASS

SEQ ID NO: 206301 - protein, 110 aa, Zea mays
  unsure (1)..(110): unsure at all Xaa locations
  Clone ID: MRT4577_11972C.1.pep
LTPGVTVNATLIFSSPVSTRRSSSAPSASTFSMNSAVYRLPLLRVKHPDTTTTTFVRLRTACHQHPKRPHGPRGRRERAXKPRLRVPAAGHESPVVQVSARGRLXLRRHG

SEQ ID NO: 206302 - protein, 35 aa, Zea mays
  Clone ID: MRT4577_119730C.1.pep
AYAESNYRVDIKLKIQIYRKEMDNEFTEIYEVYVT

SEQ ID NO: 206303 - protein, 148 aa, Zea mays
  Clone ID: MRT4577_119731C.1.pep
MASKHLVLAACLLLLLLLPTASVATDVDYCSKKDYPVKVSGVQIVPDPVEPGKPATFKISASTDKTIEKGKLVIDVKYFFFYVHSETRDICGETSCPATGDFVLSHQQTLPGFTPPGSYTIYMKIIGDDNEELSCISFGFSIGFVASS

SEQ ID NO: 206304 - protein, 148 aa, Zea mays
  Clone ID: MRT4577_119732C.1.pep
MASKHLVLAACLLLLLLLPTASVATDVDYCSKKDYPVKVSGVQIVPDPVEPGKPATFKISASTDKTIEKGKLVIDVKYFFFYVHSETRDICGETSCPATGDFVLSHQQTLPGFTPPGSYTIYMKIVGDDNEELSCISFGFSIGFVASS

SEQ ID NO: 206305 - protein, 145 aa, Zea mays
  Clone ID: MRT4577_119733C.1.pep
MASKHLVLAACLLLLPTASVATDVDYCSKKDYPVKVSGVQIVPDPVEPGKPATFKISASTDKTIEKGKLVIDVKYFFFYVHSETRDICGETSCPATGDFVLSHQQTLPGFTPPGSYTIYMKIVGDDNEELSCISFGFSIGFVASS

SEQ ID NO: 206306 - protein, 64 aa, Zea mays
  Clone ID: MRT4577_119734C.1.pep
LPFYYHTTSRPRYILIVLRSIQHLFLSSFTLKKDGIYSLLIPLWWYELRYQLWRNRPNYSNLSA

SEQ ID NO: 206307 - protein, 82 aa, Zea mays
  Clone ID: MRT4577_119735C.1.pep
LPIFAVIIPLLSLTYAQGNWNCKNSDDPTYRDNPMIYNSAPYGLCVNDAGLGLLAHRCTSSNPCKTNNNGCIPINSYEAHCS

SEQ ID NO: 206308 - protein, 148 aa, Zea mays
  Clone ID: MRT4577_119736C.1.pep
MASKHLVLAACLLLLLLLPIASVATDVDYCSKKDYPVKVSGVQIVPDPVEPGKPATFKISASTDKTIEKGKLVIDVKYFFFYVHSETRDICGETSCPATGDFVLSHQQTLPGFTPPGSYTIYMKIVGDDNEELSCISFGFSIGFVASS

SEQ ID NO: 206309 - protein, 55 aa, Zea mays
  Clone ID: MRT4577_119737C.1.pep
TVRGTVHLFIDTGRSPDEIISMSLITNYNHNANYQGLYRLFLFKGVSAFAFIIIP

SEQ ID NO: 206310 - protein, 146 aa, Zea mays
  Clone ID: MRT4577_119738C.1.pep
MASKHLVLAACLLLLLPTASVATDVDYCSKKDYPVKVSGVQILPDPVEPGKPATFKISASTDKTIEKGKLVIDVKYFFFYVHSETRDICGETSCPATGDFVLSHQQTLPGFTPPGSYTIYMKIVGDDNEELSCISFGFSIGFVASS

SEQ ID NO: 206311 - protein, 81 aa, Zea mays
  Clone ID: MRT4577_119739C.1.pep
GPPFFFFFFFSLVAISHGQPRTVYPGPTCYFLIQSSINSKNRSLPPKEKPQIYPPMAIAEPNPPNLGNYERPTNSTHFTHA

SEQ ID NO: 206312 - protein, 71 aa, Zea mays
  unsure (1)..(71): unsure at all Xaa locations
  Clone ID: MRT4577_11973C.1.pep
LYGGATGNLKNTRIWPHHIQLYVFSDHXLTKLLRTSTIPSGAVMPTIHQPLLSSNADSSNASDNNHNNCDC

SEQ ID NO: 206313 - protein, 67 aa, Zea mays
  Clone ID: MRT4577_119740C.1.pep
PTLNLKIRLNLFFIPKKKTLRGGLPFSEKRYPKTHSPHFSFLWKPKIFCTHRFFHPRPFFNNTFYFS

SEQ ID NO: 206314 - protein, 48 aa, Zea mays
  Clone ID: MRT4577_119741C.1.pep
ARYLSLGPSSSSMTSFLTPACTSFYRSSSFLTPCSSNLLSTALTSSAF

SEQ ID NO: 206315 - protein, 116 aa, Zea mays
  Clone ID: MRT4577_119742C.1.pep
FNSARGIWGGGVGFLKCAILTKPQSYGVLLQLPAPQLENALSKNPTLKTPLAEHAEQPNIRSTLPRSTLVVLGLAEDQPQQPAVTQVQSSQNQAAETSSSAADTATEVTQESSGAS

SEQ ID NO: 206316 - protein, 40 aa, Zea mays
  Clone ID: MRT4577_119743C.1.pep
KMLASSRRFLSYFCSRISSRATGFRSLVLAALHLCYCWLL

SEQ ID NO: 206317 - protein, 737 aa, Zea mays
  Clone ID: MRT4577_119744C.1.pep
MILPANSPVPSSVNLPIEENSNSPTVPLCIETTEAKVTSAGGNSSIDIPESSEASHASTEPQGTQEHASTFAGPFPADNFSVGFSLAQSSETRSPSSSTLEANHSQLSSLSSQYVLPKLVVNNIDLSDEAKDLLQKEAFVRILESDKKEASGGSIARLPLLAHLGVEFPLEFDPWVILQKHILSDYANNEGHELTICILNRLYHEAEQDHDFLSSRTATSVYESFLLNIAENLRDMFPASDKSLGKLLCEIPYLPEGVLKLLESLCSPGSNERQDKDIQSGDRVTQGLSAVWNLIMLRPSNRDRCLEIALQSSTHHLEEVRMKAIRLVANKLFPMTSISKKIEDFANEKLNSVLEMTPSGDCVTTEMATPEAHKDIGLENLTASVTGMQTLMSLYFALCTKKHSLLRHVFAIYGNLPQAAKQAVHQQVPILIRTIGSSSDLLGIISDPPADCRDLLMQVLQTLTDAAVPSKDLISSIKILYSKTKDVEFLFAILVHLPKDEVLPVFPSIVNLPIDKFQSAISRILQGSPRNGPSLDPSEILIAIHVIAPDKEGIPLKKVMDACSSCFEQRTIFTQQVLAKALNQLVEQIPLPLLFMRTVMQAIGVFPALVDFVMEIMSRLVSKQIWKYPKLWVGFLKCAILTKPQSYGVLLQLPAPQLENALSKNPTLKTPLAEHAEQPNIRSTLPRSTLVVLGLAEDQPQQPAVTQVQSSQNQAAETSSSAADTATEVTQESSGAS

SEQ ID NO: 206318 - protein, 67 aa, Zea mays
  unsure (1)..(67): unsure at all Xaa locations
  Clone ID: MRT4577_119745C.1.pep
AQKRLXNPYTNYAFELAATLHSFYNAEKVLTQDNLELSKARYELMKAVRTTLQNALAIVGVSAPEKM

SEQ ID NO: 206319 - protein, 54 aa, Zea mays
  unsure (1)..(54): unsure at all Xaa locations
  Clone ID: MRT4577_119746C.1.pep
SYLTLTQCLCQLDMRADPXIHNTLRDNSNTVIHSIQANVKCHILSNKIHANFTI

SEQ ID NO: 206320 - protein, 469 aa, Zea mays
  Clone ID: MRT4577_119747C.1.pep
MGRKKNVAIDDDEYFFPQDDAADPAPPPPAPAAADKEKSKKGGKKGKKGGKAAAPDDDDYEPPPPPPPAADEDDDGEPINLVFTGKKKKKKGATPAAPFSAFSALGEEGEDQDEEDPAPSAAAEPEAINDPAEDDDDVVDFDFSKAKKKKKKDKGPRSAPAKDEDVEPAPPPPPVAEEEDEEPPVIAAAAAKKPQKKKKKKGAFMMDGENVDQILAGMEDPQLMDEPEPEEVKAQDSVAAPDADDATGKKSKKKKKKGGFTMDVDGEEFDQILAVIDDLPPPEEEPEPKDPKDEGTAATAALVDDAEGKKSKKKKKKSGRTAKEEEELDKILAELDGVPPVEEDKPTQAPQSAALAKEDVGAAEDGNVEDKAEEGGEVESAAAKKKKKKKEKEKEKKAAAKGAESKKGEEQEAPKGKVDMKKLPKHVREMQEALARRKEAEERQKREEEERLRMEQWLRPERKKHGKCW

SEQ ID NO: 206321 - protein, 91 aa, Zea mays
  Clone ID: MRT4577_119748C.1.pep
HGLGLRRASSMSTCSELSSPYGFCPCGCRRSSVARRSCCLYLIHDALLVLPVVLIVVVLALSVVLLAHSVLVLILVVAHDVECIVTCVDDA

SEQ ID NO: 206322 - protein, 55 aa, Zea mays
  Clone ID: MRT4577_119749C.1.pep
GTPDLTQNATGKKVVEGCDWPTNTPSQQYWPSNRGAQHNAGRGDANARRGPGRVT

SEQ ID NO: 206323 - protein, 66 aa, Zea mays
  Clone ID: MRT4577_11974C.1.pep
WQSRACSFYLFKGVKYFERKGCLCLGSLKTWVLGCQTKPKMSGKDGYLGCGVSNQKIKFVSWLILF

SEQ ID NO: 206324 - protein, 47 aa, Zea mays
  Clone ID: MRT4577_119750C.1.pep
KCNSILYLFIKDCILLIKALKVVCLLWFCHPRILTVSFNPKRSDRAS

SEQ ID NO: 206325 - protein, 85 aa, Zea mays
  Clone ID: MRT4577_119751C.1.pep
GPARVPEDMFFPPSKALADQAPQANFEKGSFFPPFPSIKKIFGPIVAPVVAKASELGLATRFPPPSDLVKYPKNCMYPPVSRNYR

SEQ ID NO: 206326 - protein, 69 aa, Zea mays
  Clone ID: MRT4577_119752C.1.pep
GTKHRALLVFLFWGMYRPFSTGPGKPYVGGPLIHISYNFTPPPAGLYSLISWGHGLFHFARRGACPFSS

SEQ ID NO: 206327 - protein, 52 aa, Zea mays
  Clone ID: MRT4577_119753C.1.pep
MPITWVATKRKPLEAGQENPVQKPKRLVWCMGPGHKGRVGSYFLTGPEILPS

SEQ ID NO: 206328 - protein, 105 aa, Zea mays
  Clone ID: MRT4577_119754C.1.pep
SSGNNAEYAGITQKYLEEHCAHIFLVCKSIFVMEEKQEANRLRAHSQERFSINLRNLRVSCAQPTGRDADGIDSSKFHDMFDEPYQFKKKKKKKKKKVLCVVTTA

SEQ ID NO: 206329 - protein, 122 aa, Zea mays
  Clone ID: MRT4577_119755C.1.pep
INPSSDGSALHAGTAPPARMTTTAARWFLGDGARPRRCFGRGTRWRGAGRGGTATGGVIWAWLHGSSNQRAGQPSPPCGTAPCFLPPSTVRREPMLFAPRRRLGSSTAVDIVTNYFIVPLLR

SEQ ID NO: 206330 - protein, 158 aa, Zea mays
  Clone ID: MRT4577_119756C.1.pep
KVFGFGLSSTTDPIAEQGKNKSCKQKTIRSLPLKKEINPSSDGSALHAGTAPPARMTTTAARWFLGDGARPRRCFGRGTRWRGAGRGGTATGGVIWAWLHGSSNQRAGQPSPPCGTAPCFLPPSTVRREPMLFAPRRRLGSSTAVDIVTNYFIVPLLR

SEQ ID NO: 206331 - protein, 77 aa, Zea mays
  unsure (1)..(77): unsure at all Xaa locations
  Clone ID: MRT4577_119757C.1.pep
MSCCCGSSSRLSSSCNARRKYPALXRRARRARPPQVLALTPYKKGSPEFFKARXENPDRAXHRCSCGGNCMCDPCNC

SEQ ID NO: 206332 - protein, 120 aa, Zea mays
  Clone ID: MRT4577_119758C.1.pep
FTTKLPQETWIIERRNYIIIQTEQFIQIEYQTTYVPYSIPDYAYITFIIFSYDTRDDVVFVVFVVFVVNVLFIVVDVGVTLLTVVSLVHNVFVVRFVFIDYAINLSGLDSTVNGAVSSHN

SEQ ID NO: 206333 - protein, 83 aa, Zea mays
  unsure (1)..(83): unsure at all Xaa locations
  Clone ID: MRT4577_119759C.1.pep
ESPPREDGGXPPQLKKGARTVSPTSPLKKAGHRTANRPTKGPKGPPKSSPERPAPSPPPPKIAPKEVTTKELNIKKKNKKKII

SEQ ID NO: 206334 - protein, 97 aa, Zea mays
  Clone ID: MRT4577_11975C.1.pep
QWTWSNILSMHKQLQVNQQNRGYIQIWQQQCETVRAYLKKTVHPHHGLGYWVSLPKHGCYTNYVCVSPKSPFLILLYKSSSGTNISLIRLHLDITDY

SEQ ID NO: 206335 - protein, 118 aa, Zea mays
  Clone ID: MRT4577_119760C.1.pep
MDVTTSPPRCLSAAATASMAITSDKICAMAATTTGMQMMHAAALPLCLAVLAASTRVALGNCRDDCMAACNGWTNVCQLTCASACYRELGIRTLRTSAVLAKAECPASAPHATQERSA

SEQ ID NO: 206336 - protein, 71 aa, Zea mays
  unsure (1)..(71): unsure at all Xaa locations
  Clone ID: MRT4577_119761C.1.pep
VDGLLDHTHLSYSFCESHDQMVSYHHSVKPQSIRRSXSINLDRCSRHSVRTACLLSINTSHVFYLWSFCLA

SEQ ID NO: 206337 - protein, 59 aa, Zea mays
  Clone ID: MRT4577_119762C.1.pep
PLTGLPPRCLACPVPFLPPAVSPYLGNLLFPSFPLSICLNPVRRPPFSCVVFPIFCAWS

SEQ ID NO: 206338 - protein, 118 aa, Zea mays
  Clone ID: MRT4577_119763C.1.pep
SFFLFFFFFFLFLGLWCLSLRLPIRKPPSRPSSSYGQPVAARAQAPRAGYSYGDFHPYDHYDNLSSRNVPSRPPSSHGHAPACWLRLKPLPALQEDERHVHAALPDDNLAREHPRASD

SEQ ID NO: 206339 - protein, 78 aa, Zea mays
  Clone ID: MRT4577_119764C.1.pep
RTVPGKVKFPPSLGSSLALISPIARVGGPLIIMHGYLCLLARHINCFISPMPNGLYIYMGVSLPIGVPPKKNIILVLP

SEQ ID NO: 206340 - protein, 500 aa, Zea mays
  unsure (1)..(500): unsure at all Xaa locations
  Clone ID: MRT4577_119765C.1.pep
MASAAGAAFAAITLLILVPLTAASDSDHKYQAAEPVTLWVNKVGPYNNPQETYNYYSLPFCHASENHVHKWGGLGEVLGGNELIDSQIDIKFGKNVDKATICSLDLDLVKAKQLSDAIENSYWFEFFIDDLPLWGFVGEADRNNDNKYFLFTHKNIVIRYNGNQIIHVNLTQESPKLIDVNKALDMTYSVKWEPTNITFAHRFDVYLDYPFFEHQIHWFSIFNSFMMVIFLTGLVSMILMRTLRNDYAKYARDDDDIETLERDVNEESGWKLVHGDVFRPPCNLVLLSALVGIGTQLAALILLVILLAIIGMLYIGRGAIVTTFIVCYALTSFISGYVSGALYSRHGGKNWIKAMAMTASLFPFMCFGIGLVLNTIAIFYGSLAAIPFGTMVVVFILWAFISFPLALLGTVVGRNWSGAPNNPCRVKTIPRPIPEKKWYLTPSVIALMGGLLPFGSIFIEMYFVFTSFWNYKVYYVYGFMLLVFLILIIVXICVTIVGTY

SEQ ID NO: 206341 - protein, 56 aa, Zea mays
  Clone ID: MRT4577_119766C.1.pep
DWPITKIQLRLSQRGHPNKSLVILHTCKVVKLLHTTRAHKIITLDISTSYTPDLAP

SEQ ID NO: 206342 - protein, 253 aa, Zea mays
  Clone ID: MRT4577_119767C.1.pep
FYKVLNVFNPFGGGAGKNWIKAMAMTASLFPFMCFGIGLVLNTIAIFYGSLAAIPFGTMVVVFILWAFISFPLALLGTVVGRNWSGAPNNPCRVKTIPRPIPEKKWYLTPSVIALMGGLLPFGSIFIEMYFVFTSFWNYKVYYVYGFMLLVFLILIIVTICVTIVGTYFLLNAENYHWQWTSFFSAASTAVYVYLYSIYYYHMKTKMSGFFQTSFYFGYTLMFCLGLGTLCGAVGYLGSTLFVRRIYRNIKCD

SEQ ID NO: 206343 - protein, 177 aa, Zea mays
  unsure (1)..(177): unsure at all Xaa locations
  Clone ID: MRT4577_119768C.1.pep
ERDVNEESGWKLVHGDVFRPPCNLVLLSALVGIGTQLAALILLVILLAIIGMLYIGRGAIVTTFIVCYALTSFISGYVSGALYSRHGGXAYLSCKIELCTYSSIRCSVVLNPFGGAGNIWIKGLAMTASLFPFMCFGIGLVLITIAIFYXSXAAXPFGSMVXVVFLLWAFFSFPLAL

SEQ ID NO: 206344 - protein, 154 aa, Zea mays
  Clone ID: MRT4577_119769C.1.pep
MANSNLPRRIIKETQRLLSEPAPGISASPSEENMRYFNVMILGPAQSPYEGGVFKLELFLPEEYPMAAPKVRFLTKIYHPNIDKLGRICLDILKDKWSPALQIRTVLLSIQALLSAPNPDDPLSDNIAKHWKSNEAEAFETAKEWTRLYASGAL

SEQ ID NO: 206345 - protein, 115 aa, Zea mays
  unsure (1)..(115): unsure at all Xaa locations
  Clone ID: MRT4577_11976C.1.pep
MDATLTAREIRERFINFFRRNEHTYVHSSATIPLDDPTLLFANAGMNQFKPIFLNTIDPSHPMAKLSRAANTQKCIRAGGKHNDLXDVGXDVYHHTXFEMLGFWSFGDYFKEWAC

SEQ ID NO: 206346 - protein, 39 aa, Zea mays
  Clone ID: MRT4577_119770C.1.pep
DNTMFNQLCRYVNPCCGVVGTAFCGKLPFSCACHTCLEP

SEQ ID NO: 206347 - protein, 180 aa, Zea mays
  unsure (1)..(180): unsure at all Xaa locations
  Clone ID: MRT4577_119771C.1.pep
NSARGACFPVIPADKLSCDTRAHAPSVAPPPTFSPTSPPSSCYRSSPLSPPSTPSATLSPSHASSPSCPMPGGGSPPXPXPSRSSLPTTPLLCSSPSASSLLGTTALASXPAPPXAPPPRPSHIVQPPPQXRQPPXPSPPPIAPPPRMPXPPKSSPPPPRXVSVPPNSCKLWFLPPSTDT

SEQ ID NO: 206348 - protein, 65 aa, Zea mays
  Clone ID: MRT4577_119772C.1.pep
KLLSSLQGSKLLLFHISNLGRKAFSLFLLFLNFFLGPFLPGFDDFILKHRARDSFILGKQHLVIP

SEQ ID NO: 206349 - protein, 103 aa, Zea mays
  Clone ID: MRT4577_119773C.1.pep
DQKRFESLNSFRFECGEYMCLIFEAGSMPKLEILDLEVSSVEDYMIQKLGFDFGINNLSCISKATLRFSNWGCSQEDEVAIRKAVSTHRNRPALEIIRKKLRS

SEQ ID NO: 206350 - protein, 60 aa, Zea mays
  Clone ID: MRT4577_119774C.1.pep
HYQHTLGIVIELIANTYRPMRTIEYHYIYKSDPIYYDPKKVSDRASCHHPRSLTCIFRRR

SEQ ID NO: 206351 - protein, 118 aa, Zea mays
  unsure (1)..(118): unsure at all Xaa locations
  Clone ID: MRT4577_119775C.1.pep
ANEPLMHLDLXHAIILLDDEGVSMIIDHTLDRILPKPIDEHTPHRMKSTDGTFYYMDRQNHKTXIVNKECASIFFGTVKLTILMPKGDLVLAHLLETGLERGDLTIHAQSESRSNTLT

SEQ ID NO: 206352 - protein, 175 aa, Zea mays
  unsure (1)..(175): unsure at all Xaa locations
  Clone ID: MRT4577_119776C.1.pep
PVTARVPHHLPPSKLSSNANANGAVVPVRKKNAPDNRFENPPKCLSPLVGVFACLQPNPLPPIXTPPXPIYKXKNTFXXPPPTXLXPHQPPTNNLNIXFKXQLKXXPSISLSSFILKTQPLYSXFGNLPPNXSXFFXXPKLTKPSLTFKIALKPNHSIRLXFXXXXXSGSPXXIL

SEQ ID NO: 206353 - protein, 74 aa, Zea mays
  unsure (1)..(74): unsure at all Xaa locations
  Clone ID: MRT4577_119777C.1.pep
PAGSARHXXSMAATHHQPSRAAGPRAVSCELSYPSXHXXPFLVCXGAIXXPXXXSLGKKEIKTXFNFLNIMYSF

SEQ ID NO: 206354 - protein, 75 aa, Zea mays
  Clone ID: MRT4577_119778C.1.pep
IRFNCGGQGFCFQYIYVPGLPPGFGFVVGLGWWVFCLGKTRGGAAFLKVSFCSPQWGLFLGAPLFGVEWLVLGAP

SEQ ID NO: 206355 - protein, 92 aa, Zea mays
  Clone ID: MRT4577_119779C.1.pep
TPVQPVLYTPSWPFVFIDRRKRLADAPARVFNRTTSSKPADDRQATSCVLFIRLQRRSSDVHVRLPTRALFDQINVSLSRALNLSNRLHTRS

SEQ ID NO: 206356 - protein, 211 aa, Zea mays
  Clone ID: MRT4577_11977C.1.pep
MRDAAVVVAVPGPGAATGGRGGGGGKPGAAGAAPCAACKLLRRRCAAGCVFAPYFPPGEPHKFASVHKVFGASNVSKLLQEIPAQHRGDAVSSLVYEANARVRDPVYGCAGAVSSLQQRVEALQAQLALAQAEVVRLRMSNDYVLRRLKAAGGGSSSSYAGSPSSMSSLKTAAAAAAEPDARCRATTPELLVLDMVVDQPGMDDDAHFWSY

SEQ ID NO: 206357 - protein, 87 aa, Zea mays
  unsure (1)..(87): unsure at all Xaa locations
  Clone ID: MRT4577_119780C.1.pep
GATFKGVGNENPSTLMXFPSKTTNAGHITSKLHVIELGAQPEQPLFSKKQAYLFCSADFQDDFSVPMQGLQKCGLMYVHTKPVLLLV

SEQ ID NO: 206358 - protein, 88 aa, Zea mays
  Clone ID: MRT4577_119781C.1.pep
ACSLPACLSGLRPTAQSLPRLRCFSSGAQRRRRKRRQQWRRQQEKKRTDGRGRWRWLCACAAPAAPLYKSSQRGEAGRESFIERERRG

SEQ ID NO: 206359 - protein, 48 aa, Zea mays
  Clone ID: MRT4577_119782C.1.pep
NIFIGGYLYSKKRTWYNQAYIHSIACGASSGINEEETPQTFIYSRRSL

SEQ ID NO: 206360 - protein, 270 aa, Zea mays
  Clone ID: MRT4577_119783C.1.pep
LEAGREATPLDVGDSLQSALLRAQVIVDEAMGRHIANQAMLQQLDMLRDAMHRACYVLDTSRCQSHDEEDAEDQVVNHSLSLQKLTSLKGISFASNRKTPPLLEQLQESLQNLSSMILDARELVVFFRSYPPRLYSQPYSMHLLLGNCMFGFQMETELVINFLLHAEPPPGSEELDVLPIIGPSKVGKTTLVAHVCRNQRVRDHFSGILLLHDHDFADDGDDDISTTFGQRCATKLQLRMPDSNKDGRLLVVVDLVGDLGEAAWDVLYHV

SEQ ID NO: 206361 - protein, 80 aa, Zea mays
  Clone ID: MRT4577_119784C.1.pep
LVCSLHQEDSLGRGATSELGWRRDGLGMRSLHTGGLSLANLVGVTHAPEGRRAAKDMKCGYPKRGSSRHRRCTRGAAAGP

SEQ ID NO: 206362 - protein, 99 aa, Zea mays
  Clone ID: MRT4577_119785C.1.pep
YKAKAKANLERARAPPRALDYSPRVASRPTRTWVEPVQETRARCGVPVLLLGSPLKSSKKNRVPEVQNKSYTRTTVYSHGAHSKRRGSPHYLIPAPVSA

SEQ ID NO: 206363 - protein, 77 aa, Zea mays
  Clone ID: MRT4577_119786C.1.pep
DKGRLALHHKTHTYKIQYFSRATTLNGLKASYVRTGLWRPTCLFNDQLIGDRTPTYVPGGWGGATRGDRGAYKRGGE

SEQ ID NO: 206364 - protein, 50 aa, Zea mays
  Clone ID: MRT4577_119787C.1.pep
SRSLPSRRHPPPGWRRRLVGLSFVAVARAPLLPFYCCGPPGYECARSRGL

SEQ ID NO: 206365 - protein, 37 aa, Zea mays
  Clone ID: MRT4577_119788C.1.pep
PTRAGTHAVSNVCFLLRSMLLVHSLLTKTSQWRILDR

SEQ ID NO: 206366 - protein, 198 aa, Zea mays
  unsure (1)..(198): unsure at all Xaa locations
  Clone ID: MRT4577_119789C.1.pep
MAPMKLYGAXMSRNATRCATALEEGDYDYEYXVSMNWGTGEHNSPEHLVRNPCGQVPXLHDGDLYLSKSRAICKYAARKNKPELLREGNLEEASMADAWIEVAANHYTVALNSILFQALISSMLGGTTDQKVVDENLGKLKNALEVYEARLTKCKYLAGDLLRLADLNHEYVTLCLIDTPYACVLDAYPHEKACWFRL

SEQ ID NO: 206367 - protein, 257 aa, Zea mays
  unsure (1)..(257): unsure at all Xaa locations
  Clone ID: MRT4577_11978C.1.pep
YILFIINLVFNSCSFTFISHCSSTDPCSLFFRVVEIVRHRNRVEVTVSSGQTFVADAAVVTVPLGVXVGVENKIVLHFGQVFWPNVEFIGVVSSSTYGCSYFLNLHKATGHPVLVYMPAGRLARDIEKMSDEAAARFAFSQLEKILPNAAEPMNYLVSHWGSDENTLGSYTFDGVNKPRDLYEKLRIPVDNLFFAGEATSVKYTGTVHGAFSTGVMAAEECKMRVLERFRELDMLEMCHPAMGDESPVSVPLLISRL

SEQ ID NO: 206368 - protein, 101 aa, Zea mays
  Clone ID: MRT4577_119790C.1.pep
HGPTTASIRISRCTLLLFADYGRNAPAPTLKKGARRTTRCNRRSYGGTRVKMSASCTGREDPAVHEVEGVYGESWLQDMRTTRRSTVKVNPLHDAFKTNGQ

SEQ ID NO: 206369 - protein, 212 aa, Zea mays
  unsure (1)..(212): unsure at all Xaa locations
  Clone ID: MRT4577_119791C.1.pep
RPGIQVLWEHDSSKSESDEQAAGDGVPXLIYVSREKSRTQPHHFKAGAMNVLTRVSAVLTNAPIMLNVDCDMFANNPQAALHAMCLLLGFDDEVHSGFVQAPQRFYGGLADDPFGNQMQVXSRYTSHRATTSRTTSRSSARYCYCMHILLSFQKVGHGIAGLQGIFYCGTGCFHRRKVMYGVPPGSGTGATKGEVSIYPNPRSMSGGLLDLS

SEQ ID NO: 206370 - protein, 44 aa, Zea mays
  Clone ID: MRT4577_119792C.1.pep
IGREVMKLVYFVEAFVLNLCSRRRVRFRTVTSSILNLIAWCILL

SEQ ID NO: 206371 - protein, 78 aa, Zea mays
  Clone ID: MRT4577_119793C.1.pep
SQILPECSSHILKRSRASSFCYLAFLAPPAQCPPRKWGAAGTSTPLHEQQALGDEITIFHGPWGPRRSGRVGRRRLAM

SEQ ID NO: 206372 - protein, 59 aa, Zea mays
  Clone ID: MRT4577_119794C.1.pep
SPLTPPPAPDRWGIIPWACTLLTLDYLPSFHMTPQETLAIHNNLTYKEHTHRLSQPVSL

SEQ ID NO: 206373 - protein, 65 aa, Zea mays
  Clone ID: MRT4577_119795C.1.pep
RRNSRGYCRPSAFIPPPTPYPSRSGVRSTLSSSLWAVTTPLSSYLAMGLSATICGMSPVWASARL

SEQ ID NO: 206374 - protein, 89 aa, Zea mays
  Clone ID: MRT4577_119796C.1.pep
ALCRVPGSSVELVSVFLCSFCAISFGLYYPLNYCRAGLCPDARIISLHRACRDSCCGREAVRAIEFVRPRPRFTPRVIVCRRVVEHVIL

SEQ ID NO: 206375 - protein, 548 aa, Zea mays
  unsure (1)..(548): unsure at all Xaa locations
  Clone ID: MRT4577_119797C.1.pep
MATAAADDDVKLESFLQWLQSNGADLRSCTIRACGGKGLGVFSTAAPEPGSNDGVAMVVPLDLAITPMRVLQDPLVGPRCRALLEDGVVDDRLLVMLFLMAERRRPGSLWKPYLDMLPSTFGSSLWFTEEELAELEGTTLHRATLIQRKSLQSSFDEKVKGLVEELLHVDESASSVEVLFEDFLWANSIFWTRALNIPLPHSYVFLGSCGDQQARADNDAHQEIDITAKDCSADENSKPSNTESIWVEGLVPGIDFCNHNVKALATWEVDSVGNATGIPASMYLLLADKSPAETGAEICINYGNKGNEELLYLYGFVVDNNPDDYLMVHYPLEALRQIQSADIKMKLLEMQKGELRCLLPRSLLDNGFFGIRSSEDKDSKKXLVRFQVLXSGQRKVPSYLPKIVFPHEFMSTLRTIAMQEHELEQVASLLGEVGYSEDRETSCAAIQSAIWEVCGDQGALGLLVDLLGVKMAELEEGSGTEASDAELLEQFDSIQPEDYASESGEKHERKSKTNYRSCVVYRRGQKQLTRLFLREVELFLELSAKEQS

SEQ ID NO: 206376 - protein, 299 aa, Zea mays
  Clone ID: MRT4577_119798C.1.pep
MATAAADDDVKLESFLQWLQSNGADLRSCTIRACGGKGLGVFSTAAPEPGSNDGNAPLLSPESTRLIWTMRRRCAGVAMVVPLDLAITPMRVLQDPLVGPRCRALLEDGVVDDRLLVMLFLMAERRRPGSLWKPYLDMLPSTFGSSLWFTEEELAELEGTTLHRATLIQRKSLQSSFDEKVKGLVEELLHVDESASSIEVLFEDFLWANSIFWTRALNIPLPHSYVFLGSCGDQQAKADNDAHQEIDITAKDCSADENSKPSNTESIWVEGLVPGIDFCNHNVKALATWESDSVGNATG

SEQ ID NO: 206377 - protein, 77 aa, Zea mays
  Clone ID: MRT4577_119799C.1.pep
QGCFYVITSKASGVCFFSKRIYMIQISYRLHSKKKKKIIKTTYKKNNKNKIKKKQKGRSILKESGGGGRACNTIDFL

SEQ ID NO: 206378 - protein, 305 aa, Zea mays
  Clone ID: MRT4577_11979C.1.pep
IHPILIQIVIVKEFNRAAQMANNSSYGENARRKPHTPSAIVIGGGFAGLAAADALRNASFQVILLESRDRIGGRVHTDYSFGFPVDLGASWLHGVCEENPLAPIIGRLGLPLYRTSGDDSVLFDHDLESYALYDTNGRQVPQELVEKLGKVFETILEETGKLREGTNEDMSIAKAIAIVMDRNPQLRQEGIAHEVLQWYLCRMEGWFATDADSISLQGWDQEVLLPGGHGLMVRGYRPVINTLAKGLDIRLNHKVLEIVRHRNRVEVTVSSGQTFVADAAVVTVPLGVLKANTITFEPRLPEWKE

SEQ ID NO: 206379 - protein, 106 aa, Zea mays
  Clone ID: MRT4577_1197C.1.pep
PDSSQDLLFGRPGLDPRTSRPPGTWRGSYVPPSPLGGPPAPTVAPPHGGLPLPSDQGPQPSVDRPPCGRLHPPPSVPCTGTSGWPLRRSSRPNGPVPGTQPRHLAR

SEQ ID NO: 206380 - protein, 55 aa, Zea mays
  Clone ID: MRT4577_119800C.1.pep
GPRLKPFTWGPHLKRGEGPPWVQTWEGAPIFLNFYKFTGAFILHQVPPFYLKKNG

SEQ ID NO: 206381 - protein, 239 aa, Zea mays
  Clone ID: MRT4577_119801C.1.pep
MVEETTKKQLRGLPADGRKEFVEACKRMDAETLVEFVICFSISSKKLLSAMHHAPDPAALVLQVVKLLVSNKNFRCYKVWVQCITLFRWLSMKSAKHSADTTEQAKLVAKDWKKMIDNTVCCRELDTLSRGLLQFLIAYNIVSEFNIHDIISIFAMVRKGYKNNNIAKLCEDLGLADRATGLIDYMIGNGQHPEVFHLVQNFNLEDKYPPFSLLKGYIQKAKQTFVEMFKKSQTHESLV

SEQ ID NO: 206382 - protein, 322 aa, Zea mays
  unsure (1)..(322): unsure at all Xaa locations
  Clone ID: MRT4577_119802C.1.pep
CGRGVYARAGNVWIVGRPNLVTYRGPTMLTTTLHAIAVLLRLRRRWDWFINLSASDYPLVTQDDLMEAFAGLPRDLNFIQHTSHLGWKIKKRARPVILDTALYEDGRAELIRPVNISTNLRRLPTAFKLFTGSAWTMLSRAFAEYVTMGWDDNLPRTLLLYHANIVSSPEFYFQTVACNSRRFRNATVNHDLHFIRWDTPPKQHPLYLTARDYRRMXLSGAAFARKFRDGDPVLDRIDRDILRRRDPAAHFAYGRLVLRGRRPKRRRRALLQPEEDPGKGGGPSSPGAGSRRLKAMLRKTLSPQEFQAAAVVVRGKLFSVLI

SEQ ID NO: 206383 - protein, 274 aa, Zea mays
  Clone ID: MRT4577_119803C.1.pep
MQGFTFLLMCLLAFIFSVGLIDYMIGNGQHPEVFHLVQNFNLEDKYPPFSLLKGYIQKAKQTFVEMFKKSQTHESLNWAIPKELWIAHYLAEQKLTDSKQRSAIMAEIKYLMSGYEKKQRSENLSTWASQHPPTESKRRNRKRKEEEQEHHEAQYNQQQQEQNENKLIQGKRHQLHQEENMAQVTQQQHMQPTTRPATLKLPTPAIPLVLNAAQIQNFARPAYAAVPGVHNYPAQPGWPAAQGSPFVPQFMSPQYMGLPFNPFGLHPTCYPRRR

SEQ ID NO: 206384 - protein, 120 aa, Zea mays
  unsure (1)..(120): unsure at all Xaa locations
  Clone ID: MRT4577_119805C.1.pep
IRHEDPVSPRRFVAPTNTRDELRRRGQARLLPYPCHRREGREQHTPPPPIFLVSHRVGGGVQXXPXLXTHXLRQGGAVSVSARGSGCHRSWEYWEARARGPEPVASCEQVGWLAGHRVAR

SEQ ID NO: 206385 - protein, 122 aa, Zea mays
  unsure (1)..(122): unsure at all Xaa locations
  Clone ID: MRT4577_119806C.1.pep
WSRVEENLDPLWXDSRGRYLKVRRDNPAIMPRADRVSPLKIEPASSPAVNPLVHASRAKKPRQNVTPPSLESYVITKEGATKVXKSIQVKHNTNNRXLPGQEQITSLYNLTESADSDSTVQK

SEQ ID NO: 206386 - protein, 61 aa, Zea mays
  Clone ID: MRT4577_119807C.1.pep
FDIMHHVLDILRNELHHVLDMLVYIGVSHPAESGASVAFQNISCISNFLTFLMMNSHFQCC

SEQ ID NO: 206387 - protein, 199 aa, Zea mays
  Clone ID: MRT4577_119808C.1.pep
LQSIWIEWPPLFFFFFAVKISLNLYNPLQSIWIKNNPTSQRAKVLRANASWLTPGRSQLEYGQLRRDTRGDVDARGSFCPHASNGHKRDGHGHGPATRTSSRQWWAHAPWHAMFTSGSWKTTRDLRVFSALSRTLYCRRGITLRRASGTHNPGRAQDPARNPRLACSALQQQAKSFMCQRCGHHAGQRTVNINLLYPAG

SEQ ID NO: 206388 - protein, 53 aa, Zea mays
  Clone ID: MRT4577_119809C.1.pep
ETMYIPQGWLLLSLFMLRVPSWLLIGAGLFLATLPGRHDLLPPTSSITVYLCI

SEQ ID NO: 206389 - protein, 214 aa, Zea mays
  Clone ID: MRT4577_11980C.1.pep
RPGDSVLFPGGPKSYALYDTNGRQVPQELVEKLGKVFEKILEETGKLREEINEDMSIAKAIAIVMARNPHLRQEGIAHEVLQWYLCRMEGWFATDADSISLQGWDQEVLLPGGHGLMVRGYRPVINTLAKGLDIRLNHKVVEIVRHRNRVEVTVSSGQTFVADAAVVTVPLGVLKAKTIKFEPRLPEWKEEAIRELTVGVENKIVLHFRQVFWP

SEQ ID NO: 206390 - protein, 116 aa, Zea mays
  Clone ID: MRT4577_119810C.1.pep
IRHEALAPSSRRSSTTLTRRSARPVKSSLLHHAYPSHAASASSPALPFPRGPKLSRGLDVPNLKKRCERFVSTMPCPRRFDLHCEHEAGKTEPPPPQAHVVELTAHDRLYGACGQS

SEQ ID NO: 206391 - protein, 130 aa, Zea mays
  unsure (1)..(130): unsure at all Xaa locations
  Clone ID: MRT4577_119811C.1.pep
KTIHALPQRTAEGCHPTPQLIMKGELHXLQPIFHIYLPCPEFHXPIAALNDYQDNCLCRXPLXHKRHAKPLVNEDEGXMLCAILERNPSQHPQKNEWARILCXACIWHEQXIKECDLRVRPLNXSHPMKG

SEQ ID NO: 206392 - protein, 99 aa, Zea mays
  Clone ID: MRT4577_119812C.1.pep
SPRPRGEGPPGPWVWVPPGFSPPPRCQAPAQGIDPGGPNARLSPSLGRVRTARGPLFAAPPFFFFFFFFLSGLQRHQEEVVQPRPQVQPPAAAESPPHS

SEQ ID NO: 206393 - protein, 239 aa, Zea mays
  unsure (1)..(239): unsure at all Xaa locations
  Clone ID: MRT4577_119813C.1.pep
MAFAAAARRSLASPRISDCLSRRFHPALPQLLPSNSIGDPRKPSPLPLPPAPRPXVSRSPLAGQLXTLDLLPFGIHLLAGPPRRGFSSSSRDIDFADVLTGAANAWPPVAAPASFPGEVALAAGDSSIAVAAVQHLIDAVHSFXWWISIALPTVLLRSVSCPLWMLARKRVYEVSGDXQTSKLVNNAKDDVSREEAERAAWSSLKKXGFASYLPLIVTPYTLITLHIAVSNMGDNVPSL

SEQ ID NO: 206394 - protein, 58 aa, Zea mays
  Clone ID: MRT4577_119814C.1.pep
AFSYHTKAGPAPQYNLDFVFCSKHKYSHPIKRDAGTKPTRIATPWGGLEHTLTNKGRR

SEQ ID NO: 206395 - protein, 51 aa, Zea mays
  unsure (1)..(51): unsure at all Xaa locations
  Clone ID: MRT4577_119815C.1.pep
HQRRKTLPGKTITLXVDSIDTVDHVQAKIQDXEGIPPDQQLLIFAGKQLDD

SEQ ID NO: 206396 - protein, 146 aa, Zea mays
  Clone ID: MRT4577_119816C.1.pep
GAADAAAVSASSSRPATCSHSSASLTPTSHLRWSSSSWSSSCRQSQQRGSPSSPSSSGGAHSSSSPSWKPSPKKDDAAVSRGRSMRGRTKLSASESGSGERAGKGGQNEGKETLLGSSSSTSDQQPPPRGSSRWWARESLAIGKRR

SEQ ID NO: 206397 - protein, 204 aa, Zea mays
  Clone ID: MRT4577_119817C.1.pep
MLSAWTILLLSPGQVSLAETTGGAFREYIDTFDGYTFLYPKNWIQVRGAGADIFFRDPMVLDENMSVEISSPSSSRYTSVEDLGPPEKAAEKVLGQYLTEFMSTRLGVRRESNVLSASSKVADDGKLYYEVEVNIKSYASNNELAVMPQDRVQSLEWDRRYLSVLGVENKRLYELRLQTPEQVFMQEEEDLRRVMDSFRVIKAA

SEQ ID NO: 206398 - protein, 68 aa, Zea mays
  Clone ID: MRT4577_119818C.1.pep
TSSTNPFKSPPTRIVPKTAHLLSINRLPLTCACKGLTAVHTPGRIAPNVPHILWDQPDRNPPRGLTEN

SEQ ID NO: 206399 - protein, 306 aa, Zea mays
  Clone ID: MRT4577_119819C.1.pep
MEATAVPRALSLLGPSLSTAPLLPWMRMNCLRVAVGGGVRRQGGVVWAKKTRRGRDDVAEERVDTHSFARKAGESAELFPEAVLLRKKMVREDGQVSPEFADANEEKLYDFLNIQLKSDMKRIQRRNVLSTMLSAWTILLLSPGQVSLAETTGGAFREYIDTFDGYTFLYPKNWIQVRGAGADIFFRDPMVLDENMSVEISSPSSSRLGVRRESNVLSASSKVADDGKLYYEVEVNIKSYASNNELAVMPQDRVQSLEWDRRYLSVLGVENKRLYELRLQTPEQVFMQEEEDLRRVMDSFRVIKAA

SEQ ID NO: 206400 - protein, 296 aa, Zea mays
  unsure (1)..(296): unsure at all Xaa locations
  Clone ID: MRT4577_11981C.1.pep
MGLRDIELTLPPGFRFYPSDEELVCHYLHGKVANEQLAGAXQPWVEVDLHAHEPWELPDVAKLSTNDWYFFSFRDRKYATGQRTNRATRTGYWKATGKDRAMRDPAARAVVVGMRKTLVFYQGRAPSGVKSCWVMHEFRLDSPRTTTTPPKEDWVLCRVFQKRKVDGSEQDNGVFPSPPVFAGTSQSQGVVLPPDQPSVVDAYVVVDQPGSSSVGLAPPQENLGSGLDALLTNGAMWQYTSSVFGHLLPQEATSSPPVMDLGSRGGGGGGDYGCSFFYDSSFEDMANIGFRQGWMG

SEQ ID NO: 206401 - protein, 70 aa, Zea mays
  Clone ID: MRT4577_119820C.1.pep
CRCLQGQSSTSHPHHIADSASPFMKSSGSGMSLLDSSLSGSSSTLSRSVSDLISRYQRSRLSSGILRASQ

SEQ ID NO: 206402 - protein, 209 aa, Zea mays
  Clone ID: MRT4577_119821C.1.pep
MVREDGQVSPEFADANEEKLYDFVNIQLKSDMKRIQRRNVLSTMLSTWTILLLGPGQVSLAETTGGAFREYIDTFDGYTFLYPKNWIQVRGAGADIFFRDPMVLDENMSVEISSPSSSRYTSVEDLGPPEKAAEKVLGQYLTEFMSTRLGVRRESNVLSASSKVADDGKLYYEVEVNIKSYASNNELAVMPQDRVQSLEWDRRYLSVLG

SEQ ID NO: 206403 - protein, 249 aa, Zea mays
  unsure (1)..(249): unsure at all Xaa locations
  Clone ID: MRT4577_119822C.1.pep
PHRRLWVKDRSQAWWDQCNSPDFPEAEFRRAFRMGRETFDMICEALGSAVAKEDTMLRAAIPVRQRVAVCIWRLATGEPLRLVSKRFGLGISTCHKLVLEVCGAIKSVLMPRFLQWPDEAAAGRFKEGFERSFGVPGVIGAMYTTHIPIIAPKISVAAYFNRRHTERNQKTSYSIXXLQGVVXPDRAFTDVCIGWPGSMPDDQVLEKSMLHQRAAAGMMHDACLVGGASYPLMDWVLVPYTHQNLTWTQ

SEQ ID NO: 206404 - protein, 310 aa, Zea mays
  Clone ID: MRT4577_119823C.1.pep
MEATAVPRALFLFGTSPAPYRMRMNCLRVAIGGDVRRQGAVAVWAKKKRGRGRDSETEERVDTHSFTPKPGEAAGLFPEAVLLRKKMVREDGQVSPEFADADEEKLYDFLNIELESDLNLKRMRHYEVVYLIHEDRVEEVENVVSKVQDFIREKKGRIWRLNNWGLRRLAYKIKKATHANYILMNFEIESRYINDFKTLLDKDERIIRHLVMKRDEAITEDCPPPPVFHTLRAQQYFDDEYEDEGEEEEDEDARSEPKSANYDEDDVEADDEPEIIYVDEADEDNYEDTRRRNTKLKVKKYTSEKVLRQH

SEQ ID NO: 206405 - protein, 273 aa, Zea mays
  Clone ID: MRT4577_119824C.1.pep
MEATAVPRALSLLGPSLSTAPLLPWMRMNCLRVAVGGGVRRQGGVVWAKKTRRGRDDVAEERVDTHSFARKAGESAELFPEAVLLRKKMVREDGQVSPEFADANEEKLYDFVNIQLKSDMKRTTNISAVQRRNVLSTMLSTWTILLLGPGQVSLAETTGGAFREYIDTFDGYTFLYPKNWIQVRGAGADIFFRDPMVLDENMSVEISSPSSSRYTSVEDLGPPEKAAEKVLGQYLTEFMSTRLGVRRESNVLSASSKVADDGKLYYEVEVNIK

SEQ ID NO: 206406 - protein, 326 aa, Zea mays
  Clone ID: MRT4577_119825C.1.pep
KQLFNLAGFSLRMSSSYHPQTDGQTERVNQCLETYLRCFVHACPTKWASWIAAAEFWYNTSHHSSIGRSPFEALYGYQPKHFGAQALDSSSTDLTEFLQEKERIHQLLHQHLLRAKQRMKHQTDKQRSERTFQVGDLVFVKLQPYVQSSVSSRANQKLGFRYFGPYCILSRIGATAYKLQLPSSSSVHPVFHVSQLKRVVQPATQVSSDLPDISDPFQIPVAVLQRRVVSRGLRAVQQGLIQWSSLSPSLATWEDLEALRQRFPLAPAWGQAGAQGGGNVSTQDNTLQTSTPSATDGDMGAEEVQVSRPKRTARPSSRVTGPEWVR

SEQ ID NO: 206407 - protein, 130 aa, Zea mays
  Clone ID: MRT4577_119826C.1.pep
ASAIAHSFVEDKQFHDRNSRHLSAAELSGRWTVYSIRGHFQQYMETPEVLPHNSTAPSCLEKWQRIAQPRCLLVLYHNIAPFVTSCARMDRETKDEAGSLRCPILSPEANRMAHFSFFLFARGSLIVPLV

SEQ ID NO: 206408 - protein, 45 aa, Zea mays
  Clone ID: MRT4577_119827C.1.pep
PLLATPVQKNLLWFTTLFAQFRCICYNAIMLRSVLCSTIGFYLYL

SEQ ID NO: 206409 - protein, 110 aa, Zea mays
  Clone ID: MRT4577_119828C.1.pep
WLTHPRISSPPRRTLLTPPRRTPAARFRTRPLHPRSVSLCPLIFLVIFWRLNDASLKLSPLPDRARILLRWILRTLLKVIRSCRRLISHPGPSALSFAHSNSLGTQPITP

SEQ ID NO: 206410 - protein, 46 aa, Zea mays
  Clone ID: MRT4577_119829C.1.pep
FVCLFVISICMQPALIHLVGRGFALGPDTSEDQHVFVVVQCPTRAM

SEQ ID NO: 206411 - protein, 587 aa, Zea mays
  unsure (1)..(587): unsure at all Xaa locations
  Clone ID: MRT4577_11982C.1.pep
EQQAISAISQLGSYGENARRKPHTPSAIVIGGXFAGLAAADALRNASFQVILLESRDRIGGRVHTDYSFXFPVDLGASWLHGVCEENPLAPIIGSXSLPSGDXILFDHDXESYALYDTNGRQVPQELVEKLGKVFEKXLEASXTGKLREEINEDMSIAKAIANCYGLRNPHLMXSKRLHVVCGRWPAPHITGRLNFRLHRRTKEDTMVIDSCLDRYARYDCHMRQVRLQSVRNLAKALEXAGRDWLIEGWLPMMRCHSQKPVPYLMLLLTGXEVRLAHEVLQWYLCQYGGXFDSDTGSISLRGWDEEVLLPGGHGLMVRGYRPVINTLAKGLDIRLNHKVVEIVRHRNRVEVTVSSGQTFVADAAVVTVPLGVLKAKTIKFEPRLPEWKEEAIRELTVGVENKIVLHFGQVFWPNVEFLGVVSSSTYGCSYFLNLHKATGHPVLVYMPAGRLARDIEKTSDEAAAQFAFSQLKKILPNAAEPINYLVSRWGSDENTLGSYTFDGVNKPRDLYEKLRIPVDNLFFAGEATSVKYTGTVHGAFSTGVMAAEECKMRVLERFRELDMLEMCHPAMGEDSPVSVPLLISRL

SEQ ID NO: 206412 - protein, 54 aa, Zea mays
  unsure (1)..(54): unsure at all Xaa locations
  Clone ID: MRT4577_119830C.1.pep
NVXTRTXXSXFGSRXXXAXWXVAXIXXXXXXXQRXRXXXXXVLXXLXXCVANXR

SEQ ID NO: 206413 - protein, 62 aa, Zea mays
  Clone ID: MRT4577_119831C.1.pep
HVHNLIVQWAMGFIPLPRPDGKRAQTKTLHDGGWLRRLQIHEAGWRTLCPPLKLLCRRHLRH

SEQ ID NO: 206414 - protein, 338 aa, Zea mays
  unsure (1)..(338): unsure at all Xaa locations
  Clone ID: MRT4577_119832C.1.pep
LAGAAVWYPVDTGLFXTASFDQLVKVWDTNSTQVVMEFKMPGKVYTAAMSPIATTHVLIATGSADVQVRLCDIASGAFTHTLSGHRDGIMSLEWSASSEWILMSGGCDGAIRFWDIRRAGCFRVLDQSRSQLGKRPLVKSALYKDHTDSLGPSPSARRRTGISKKSSSALRKIQNPTHGHMQQRLHPGLSSSQNRATAHYGAVTGLRTTADGMYLLSSGSDSRLRLWDIDSGCNTLVNFEAMRLQTVCHLRKHSXRFTFHRCYICLXAYNLWSGKTFQTFRGHYELVNCCYYSEQDQELYTGSNDRQILVWSPSTPAFTKMEDDDKILSAADEDNWSD

SEQ ID NO: 206415 - protein, 60 aa, Zea mays
  Clone ID: MRT4577_119833C.1.pep
QAWQAGAGHVWGGQVQKVEVMGPPWLLGAEPRLPGNVLPVKPFKGYSPFIWISSNPAWGE

SEQ ID NO: 206416 - protein, 145 aa, Zea mays
  Clone ID: MRT4577_119834C.1.pep
REQCGGTVHLFIGSGYNPYKITYMPFTFGDNSIAFYRGLNGLFIFKSVPLSANMPKLSCFTASALCQPSYLLSFSLSDSSPKIPGGQGGTDMPRGRSDRGPSIDWGLRRRLFPPSEPLAASSSVRVLACAQRARGETEPGRPRGT

SEQ ID NO: 206417 - protein, 167 aa, Zea mays
  unsure (1)..(167): unsure at all Xaa locations
  Clone ID: MRT4577_119835C.1.pep
VSNASCTTXNCLAPLAKVINDKFGIVEGLMTTVHAITATQKTVDGPSSKDWRGGRAASFNIIPSSTGAAKAVGKVLPVLNGKLTGMSFRVPTVDVSVVGLTVRLEKSATYDEIKAAVKAEAEGSLKGILGYVEEDLVSTDFQGDSRSSIFDAKAGIVLNGNFVKLVS

SEQ ID NO: 206418 - protein, 337 aa, Zea mays
  Clone ID: MRT4577_119836C.1.pep
MAKIKIGINGFGRIGRLVARVALQSDDVELVAVNDPFISTDYMTYMFKYDTVHGQWKHSDITVKDSKTLLFGEKPVTVFGIRNPEEIPWGEAGAEYVVESTGVFTDKEKAAAHLKGGAKKVVISAPSKDAPMFVVGVNEEEYKSDVNIVSNASCTTNCLAPLAKVIHDNFGIVEGLMTTVHAITATQKTVDGPSAKDWRGGRAASFNIIPSSTGAAKAVGKVLPVLNGKLTGMSFRVPTVDVSVVDLTVRLEKSATYDEIKAAVKAEAEGSLKGILGYVEEDLVSTDFQGDSRSSIFDAKAGIALNGNFVKLVSWYDNEWGYSTRVVDLIRHMNSTN

SEQ ID NO: 206419 - protein, 206 aa, Zea mays
  unsure (1)..(206): unsure at all Xaa locations
  Clone ID: MRT4577_119837C.1.pep
FIESGGFKICPLKCRNGIPRTQVQHLMQIDLKGWFLNYSTRFQVHSLMQILNCVADDIHITPRIPAMESMADVNLAXGREXKEVDSKTKPEDQQQAENKNMGTIDEESDDDEDYHVPEADIEEITNKSDNEAKHTDEPPEKIDLSCFSGILHHDPDEKSRNCWTVPDSTLFKXVRSKNFPNDKSKIPAASNLMELAAIDCSXDTKR

SEQ ID NO: 206420 - protein, 250 aa, Zea mays
  Clone ID: MRT4577_119838C.1.pep
TLLFGEKEVAVFGCRNPEEIPWGSVGAEYVVESTGVFTDQEKAAAHLKGGAKKVVISAPSKDAPMFVVGVNEKEYKSDINIVSNASCTTNCLAPLAKVINDKFGIVEGLMTTVHAITATQKTVDGPSSKDWRGGRAASFNIIPSSTGAAKAVGKVLPVLNGKLTGMSFRVPTVDVSVVDLTVRLEKSATYDEIKAAVKAEAEGSLKGILGYVEEDLVSTDFQGDSRSSIFDAKAGIALNGNFVKLVSWYL

SEQ ID NO: 206421 - protein, 468 aa, Zea mays
  unsure (1)..(468): unsure at all Xaa locations
  Clone ID: MRT4577_119839C.1.pep
MPSGRAILACGRFKICPLKCRNGRPRTQVQHLMQIDLKGWFLNYSTFFQYHSLLXILNCVAGXLKYCFSYDTTXQLYIYYERTNVIFKLTTQPVVLPIHSGPYGSNLHLLPGLREYFSQIDDIHITPTRPDSCNGXMFDADSEPKNRKLQEFDTKANRNMGMIDEESDDDDDYQVPEANIEEDVNKSHHDIKRTDEPTEKIDLSCFLSILHRDPEEKSRNCWTVPDSKIFKVRSKNFPQDKSKIPAASYLMELAAIDWFKDTKRMDNVARQKGCVAQVAADRGMHTFVVNIQIPGSTQYSLVMYFVTNTLRKGSLLQRFFDGDDEFRNSRLKLIPSVPKGSWIVRQSVGSTPCLLGKAVDCSYVRGPAYLEVDVDIGSSAVANGVLGIVFGVVTTLVVDMAFLIQANTYEELPEQVIGAARLAHVEPATAVVPDLSNTSNDSSNSNNDNNNNNNNNGSSEDDLSKKTN

SEQ ID NO: 206422 - protein, 82 aa, Zea mays
  Clone ID: MRT4577_11983C.1.pep
GGVGIGKLFFHVPYLNTPAKKNFFFPQLICFGKRFFFTTLSIKSPRPFNSPLSIEKRAPAIQTHGPPTVIFISKNRPGRDIV

SEQ ID NO: 206423 - protein, 86 aa, Zea mays
  Clone ID: MRT4577_119840C.1.pep
MSRTTPGITDSHPSAQNRSHMTAFVQNLLGKMQTTFKSMSHDIVSKINDMGTNIDELDESINDLNAEMGKDTPVKKPDEPTPADAA

SEQ ID NO: 206424 - protein, 337 aa, Zea mays
  Clone ID: MRT4577_119842C.1.pep
MAKIKIGINGFGRIGRLVARVALQSDDVELVAVNDPFISTDYMTYMFKYDTVHGQWKHHEVKVKDSKTLLFGEKEVAVFGCRNPEEIPWGSVGAEYVVESTGVFTDQEKAAAHLKGGAKKVVISAPSKDAPMFVVGVNEKEYKSDINIVSNASCTTNCLAPLAKVINDKFGIVEGLMTTVHAITATQKTVDGPSSKDWRGGRAASFNIIPSSTGAAKAVGKVLPVLNGKLTGMSFRVPTVDVSVVDLTVRLEKSATYDEIKAAVKAEAEGSLKGILGYVEEDLVSTDFQGDSRSSIFDAKAGIALNGNFVKLVSWYDNEWGYSTRVVDLIRHMNSTN

SEQ ID NO: 206425 - protein, 664 aa, Zea mays
  unsure (1)..(664): unsure at all Xaa locations
  Clone ID: MRT4577_119843C.1.pep
MIYVLCVYNQKEKEHQITMGAHDIEDALAWKKKIDLLIDQQPDSAVKTHKSFATIDFDMDLGGQFSLSDHDSAYEDEEERPNLVRRTIIGNGPPDSIHDWTKDADFGMSGQNEPTQLYSKKNWRLLRCQNGLRIYEELLEVEYLARSCSRAMRAVGVVEATCEAIFRLMFSKDGTRYEWDCSFRQGSLVEEVDGHTAVLYHRLQLHWCPRLIWPRDLCYAPYWRRNDDGSYVVLFRSTEHPNCIRQRGFVRAFIESGGLXICPLKCRNGRPRTQVQHLMQIDLKGWFLNYSTSFQYHSLLQILNXLAGLREYFSQTDDIHITPRIPAMESMADVNLAXGREXKEVDSKTKPEDQQQAENKNMGTIDEESDDDEDYHVPEADIEEITNKSDNEAKHTDEPPEKIDLSCFSGILHHDPDEKSRNCWTVPDSKIFKVRSKNFPQDKSKIPAASYLMELAAIDWFKDTKRMDNVARQKGCVAQVAADQGMHTFIVNIQIPGSTQYSLVMYFVTNTLKKGSLLQRFFDGDDEFRNSRLKLIPSVPKGSWIVRQSVGSTPCLLGKAVDCSYVRGPAYLEVDVDIGSSAVANGVLGLVFGVVTTLVVDMAFLIQANTYEELPEQVIGAARLSNVEPSTAVVPDLENNSDGNKDNSSNDATSSEDDSSKKTN

SEQ ID NO: 206426 - protein, 119 aa, Zea mays
  Clone ID: MRT4577_119844C.1.pep
NRGWRRRNHEWQRLNLGERSNPWLKRGRRKAAAQSGEREANRVSIWACRLAGAPTPSPFSISFFSFFFFLSLLHAAVLLVLMLIRCRLARLWRRLGVQRWFNALPRLPALRTMYETKLK

SEQ ID NO: 206427 - protein, 118 aa, Zea mays
  unsure (1)..(118): unsure at all Xaa locations
  Clone ID: MRT4577_119845C.1.pep
MQEEDMSLTQVHIAGLAAMEHILALNSAHKGSYIYEYNSTTSTEDEXTLQRTRAEGNLSKIRLTSPLXFGNFIEMQQWAIMLVKGNAPADHTIATLERDXEHGDCFIRGXNKWYQNTK

SEQ ID NO: 206428 - protein, 107 aa, Zea mays
  Clone ID: MRT4577_119846C.1.pep
RGKRVLEINPRHPIIKELRDKVAQDNESEELKHTARLVYQTALMESGFNLPDPKEFASSIYKSVQKSLDLSPDATVEEEDEAEEQPEIEEKESTKEESEPSYDKDEL

SEQ ID NO: 206429 - protein, 338 aa, Zea mays
  unsure (1)..(338): unsure at all Xaa locations
  Clone ID: MRT4577_119847C.1.pep
MAKIKIGINGFGRIGRLVARVALQSDDVELVAVNDPFISTDYMTYMFKYDTVHGQWKHHEVKVKDSKTLLFGEKEVAVFGCRNPEEIPWGXSVGAEYVVESTGVFTDQEKAAAHLKGGAKKVVISAPSKDAPMFVVGVNEKEYKSDINIVSNASCTTNCLAPLAKVINDKFGIVEGLMTTVHAITATQKTVDGPSSKDWRGGRAASFNIIPSSTGAAKAVGKVLPVLNGKLTGMSFRVPTVDVSVVDLTVRLEKSATYDEIKAAVKAESEGSLKGILGYVEEDLVSTDFQGDSRSSIFDAKAGIALNGNFVKLVSWYDNEWGYSTRVVDLIRHMNSTK

SEQ ID NO: 206430 - protein, 54 aa, Zea mays
  Clone ID: MRT4577_119848C.1.pep
MPSGRAILACGRFKICSLKCRNGRPRTQVQHLMQIDLKGWFLNYSTFFQYHSLL

SEQ ID NO: 206431 - protein, 74 aa, Zea mays
  Clone ID: MRT4577_119849C.1.pep
FFFFFFFFFLGFFFFFLGFFKRARGMGPNGAGRTGGNPPPSFFWKKRNTFGGEPSLFIFRVIQLFDPVKKKSFI

SEQ ID NO: 206432 - protein, 120 aa, Zea mays
  Clone ID: MRT4577_11984C.1.pep
MAAVLKVYADRLSRPSRAIIILCKVNRIDFQELTVDLAKGQHRAPEFTKINPMAQVPTIVDGRFKLFESHAILRYLATVFPGVPDHWYPADLFTRAKLESVLDWHHSNLRRGAATYVLHT

SEQ ID NO: 206433 - protein, 51 aa, Zea mays
  Clone ID: MRT4577_119852C.1.pep
FFYMFIFFLIMRTNYYYTEERRVHKASYENSERDGDGLTETIHLAADYSFR

SEQ ID NO: 206434 - protein, 57 aa, Zea mays
  Clone ID: MRT4577_119853C.1.pep
LGGSNRCTALNIQKKKGGDTTVHFRSDFVDVNHNSIKLLKRNIRPFYNLTLIIYVKV

SEQ ID NO: 206435 - protein, 69 aa, Zea mays
  Clone ID: MRT4577_119854C.1.pep
GAPPPTFCGDKKKGCEQGLLFFENFLENPQKVVGVIHSGFLYAKPRNQSPVGAFKVKLPFLFQGILKSV

SEQ ID NO: 206436 - protein, 67 aa, Zea mays
  Clone ID: MRT4577_119855C.1.pep
STGASIFLDGTFSLNQTGTANQGARDKIISLANRYMTEVRRLNLPQNQTENVYRGFRELEEKLLSPY

SEQ ID NO: 206437 - protein, 79 aa, Zea mays
  Clone ID: MRT4577_119856C.1.pep
PTIQHTLGGGGEPLTQQQTGGERAEPHPFEYTSAFSTALQPASKLRAPAFHPTRLNIQGGGGGGSILTTCIQNAWVCPS

SEQ ID NO: 206438 - protein, 169 aa, Zea mays
  unsure (1)..(169): unsure at all Xaa locations
  Clone ID: MRT4577_119857C.1.pep
KKAPYVFPPFGPKSPRGGPKXPGDPPNKPVFXDPTQTPRGPPPKKQNPYLTGGKFPGGKPPPPLVEQAGPNPPQKTPPPTXPDPKGKLTRGKKSPPFFCPPGPQGGRQGSPTAPGRGPPPGGPKTPQRPPWGGRPSXPLEPDPPKLGGAPGKPQRVKSPPGELFFSGAP

SEQ ID NO: 206439 - protein, 37 aa, Zea mays
  Clone ID: MRT4577_119858C.1.pep
DPVVRTGLRVNVIEAIWPPRQVVVPPASRLKGHRTSG

SEQ ID NO: 206440 - protein, 38 aa, Zea mays
  Clone ID: MRT4577_119859C.1.pep
SCYRIGFLFDRSGSIYEPMPQYECIDVRANASANACSD

SEQ ID NO: 206441 - protein, 110 aa, Zea mays
  unsure (1)..(110): unsure at all Xaa locations
  Clone ID: MRT4577_11985C.1.pep
MAYANALNDALSPVIAAGLREAGMIMPYTGHIKVLTVMHCHAYIGXYECVDDHRSYKIVCELXGRLNKCGVISPSSDVGEKDIEGWTARLLPNRQFGXIELTTSAGIMHH

SEQ ID NO: 206442 - protein, 75 aa, Zea mays
  Clone ID: MRT4577_119860C.1.pep
GPWGVASSVPPLYVRVIRSLWKSVERSGDHLVYAVSWMGLISHAQCSSLSVMWILHPSDILLSSAYSKKKKKKAA

SEQ ID NO: 206443 - protein, 117 aa, Zea mays
  Clone ID: MRT4577_119861C.1.pep
QFAQKGFLVPGKEKTGLGILLGFKNPFGGSNGAFFMFLTSGPLCPLFFFPPAFPGFLRFEDMVGVDFFGAGALPPSLLVGPPGGCPLRPPCTVNGSLFRFFGGGEGGWVLFLGPKPG

SEQ ID NO: 206444 - protein, 92 aa, Zea mays
  Clone ID: MRT4577_119862C.1.pep
RGAIHRYLYRDPVFIRGPTPWKGGANFQQERTHLNKDQAGYWRKGLYPPKGSFETPTGTLGAACPSMMPSSLMATLACFTGGRPVALIPTGG

SEQ ID NO: 206445 - protein, 111 aa, Zea mays
  unsure (1)..(111): unsure at all Xaa locations
  Clone ID: MRT4577_119863C.1.pep
VWSFNGIEGVLGIPKSGGKFPRHELSLALATRPHYFWGWAPITFWPANATLGKNFLFLFEGLMCWAQPSWPGCEDPTCKFVSSLMTNFAALFGPQKNKKTPQEKKKKKKKX

SEQ ID NO: 206446 - protein, 108 aa, Zea mays
  unsure (1)..(108): unsure at all Xaa locations
  Clone ID: MRT4577_119864C.1.pep
HYTKEXXYNSLKSTXXIPCRCALCLRIXAQRPLRFSDFMRAVQSRVIMGKRNIRYSFKYENNFRIVFNLWKIHIATKLILSSSYTFVIMLFITLCLCFNMKKTLKFIS

SEQ ID NO: 206447 - protein, 66 aa, Zea mays
  Clone ID: MRT4577_119865C.1.pep
YGGMSMTQILSTLDPENDPWLQEPDQQQSKVSKSPLCNFCNGLLVTFSYRLPQVRRIELEALVSLY

SEQ ID NO: 206448 - protein, 447 aa, Zea mays
  Clone ID: MRT4577_119866C.1.pep
MEETSRIPGYFKNKGILITGATGFLGKILVEKILRVQPDVKRIYLPVRAPDAASAKKRVETEVIGKELFGLLRETHGKRFHSFIEEKVVPLAGDIIHENLGVEGPQLRRMTRELNVIVNGAATTNFYERYDVALDVNVMGVKHICQLAKQCPNLEVVLHVSTAYVVGEKQGMILERAFKQGETLRMETELDMDAELRVARDYQQQVVPAVIVRPSIITSIHKEPLPGWMEGTRTIDAILIGYAKQSLSCFLADLQLTMDVIPGDMVVNAMMAATVAHASAPGGHKEESPTVYHATSSLRNPAPYAVLYRTGIRYFCDHPRVGKDGRPVRTRKVHFFGTVAAFTAYMLLRYRLPLELLRLLSLLSGGLLFSRLYADLDRKYRFVMHLVDLYGPFALFKGIFDDANMERLRMAMPVADRLEFNFDPNTIDWDDYFYKIHIPGVMKYVLK

SEQ ID NO: 206449 - protein, 36 aa, Zea mays
  Clone ID: MRT4577_119867C.1.pep
LPLNDLRAVFLSQASVANRALVDVIVGSIDLTGRRL

SEQ ID NO: 206450 - protein, 132 aa, Zea mays
  unsure (1)..(132): unsure at all Xaa locations
  Clone ID: MRT4577_119868C.1.pep
PPPPPXPPPPPPPPLSSTRPPPSPPXPSPPPPPPSPPPRPPPHPPPPXPGGPPGCWGGGAPPPPPPRAPRATPPRPGFRPPSPGSRGLLSSPGPAPLSSRRRPPRSARPFSASLPSFYSCAWVGPQLACFPA

SEQ ID NO: 206451 - protein, 236 aa, Zea mays
  unsure (1)..(236): unsure at all Xaa locations
  Clone ID: MRT4577_119869C.1.pep
HICQLAKQCPNLEVVLHVSTAYVVGEKQGMILERAFKQGETLRMETELDMDAELRVARDYQQQVAGDDAEQKNERKAMKELGLARARELGWPNTYVFTKALGEMMLARELGGVVPAVIVRPSIITSIHKEPLPGWMEGTRTIDAILIGYAKQSLSCFLADLQLTMDVIPGDMVVNAMMAATVAHASAPGGHKEESPTVYHATSSLRNPAPYAVLYRTGIRYFCDHPRVGKDGXPVR

SEQ ID NO: 206452 - protein, 94 aa, Zea mays
  Clone ID: MRT4577_11986C.1.pep
VPFFIFFSTTHSAYILHIMSLLIRSPCPCNKLYSSVPSWCFFHPKLQIAIVQISLSCMSLPNALATPWLPYSMVGRHRFQLRGCLSLDGQAPSR

SEQ ID NO: 206453 - protein, 54 aa, Zea mays
  Clone ID: MRT4577_119870C.1.pep
GARRMLWRFRERSRPSSPSQLWVAGPLSPYNVIIYLFYTELLLYSKDVTFDLVP

SEQ ID NO: 206454 - protein, 135 aa, Zea mays
  Clone ID: MRT4577_119871C.1.pep
MAPKAAEKKPVEKTPAGKKPKAEKKVPASKEGGDKKGKKKAKKSVETYKIYIFKVLKQVHPDIGISSKAMSIMNSFIYDIFEKLAGESAKLARYNKKPTITSREIQTSVRLVLPGELAKHAVSEGTKAVTKFTSS

SEQ ID NO: 206455 - protein, 155 aa, Zea mays
  unsure (1)..(155): unsure at all Xaa locations
  Clone ID: MRT4577_119872C.1.pep
TFLPNSSLAFCDSIACSAPWKFNLTSNHAQTQVAHINIVVIVHVPLLXSTTTXGHLIYELGVLLYYRVIERLDKEAAEMNNAAFKNAGVVYKLKAEHEKSIPPDNGLGKFENTKHYCTVIYSPGHPDFLKKMISGNSQADWSGLNHDFTTGGLEG

SEQ ID NO: 206456 - protein, 153 aa, Zea mays
  Clone ID: MRT4577_119873C.1.pep
MAPKAEKKPAAKKPAEEEPATEKAEKAPAGKKPKAEKRLPAGKSAGKEGGEGKKGKKKAKKSVETYKIYIFKVLKQVHPDIGISSKAMSIMNSFINDIFEKLAAESAKLARYNKKPTITSREIQTSVRLVLPGELAKHAVSEGTKAVTKFTSS

SEQ ID NO: 206457 - protein, 63 aa, Zea mays
  Clone ID: MRT4577_119874C.1.pep
FQSLKQYVASLTKFFDYSKIKWIVSMFITNVTENTCHARTFQPSPSTMYSTGSCMRPCLLIRV

SEQ ID NO: 206458 - protein, 129 aa, Zea mays
  Clone ID: MRT4577_119875C.1.pep
AEKAPPEKKPKAEKRLPASKSSGKEGGEKKGKKKAKKSVETYKIYIFKVLKQVHPDIGISSKAMSIMNSFINDIFEKLAGEAAKLARYNKKPTITSREIQTSVRLVLPGELAKHAVSEGTKAVTKFTSN

SEQ ID NO: 206459 - protein, 136 aa, Zea mays
  Clone ID: MRT4577_119876C.1.pep
MAPKAEKKPAAEKKPVETEKKPKAEKRVPGKDGGADKKKKKAKKSVETYKIYIFKVLKQVHPDIGISSKAMSIMNSFINDIFEKLAGESAKLARYNKKPTITSREIQTAVRLVLPGELAKHAVSEGTKAVTKFTSS

SEQ ID NO: 206460 - protein, 118 aa, Zea mays
  Clone ID: MRT4577_119877C.1.pep
MLRSVFPTLRTSVIARRSFVSTSLAREASPLDSVKQAAEKANKVAGDAAVKGIETVESAVNTATDAVKGSTGSLSAEAQKAAADVKNEGQKLGSDAQAAFNKGKIDLDQAAKDNGLKN

SEQ ID NO: 206461 - protein, 135 aa, Zea mays
  Clone ID: MRT4577_119878C.1.pep
MAPKAAEKKPVEKTPAGKKPKAEKKVPASKEGGDKKGKKKAKKSVETYKIYIFKVLKQVHPDIGISSKAMSIMNSFINDIFEKLAGESAKLARYNKKPTITSREIQTSVRLVLPGELAKHAVSEGTKAVTKFTSA

SEQ ID NO: 206462 - protein, 136 aa, Zea mays
  Clone ID: MRT4577_119879C.1.pep
MAPKAAEKKPVEKTPAGKRPKAEKKVPASKEGGGDKKGKKKAKKSVETYKIYIFKVLKQVHPDIGISSKAMSIMNSFINDIFEKLAGESAKLARYNKKPTITSREIQTSVRLVLPGELAKHAVSEGTKAVTKFTSA

SEQ ID NO: 206463 - protein, 96 aa, Zea mays
  unsure (1)..(96): unsure at all Xaa locations
  Clone ID: MRT4577_11987C.1.pep
KTLLKDAREVHRLADGLTSTPAVRKXVSDELAVVAESKDVAGEFITYAVLDQVLGDKXFENYGXWFISLRFSYHLAGSYIKVLSFKFVLPDAIQML

SEQ ID NO: 206464 - protein, 54 aa, Zea mays
  Clone ID: MRT4577_119880C.1.pep
SPFDPLVHPHVLTLLPPYYHSIHTPCDSIGKFHLSPGAHTLTSAHTSHYDIPSL

SEQ ID NO: 206465 - protein, 138 aa, Zea mays
  Clone ID: MRT4577_119881C.1.pep
MAPKAEKKPVAEKAEKTTAAKKTKAEKRPPASKEGGEKKGKKKSKKSVETYKIYIFKVLKQVHPDIGISSKAMSIMNSFINDIFEKLAGESAKLARYNKKPTITSREIQTSDRLVLPGELAKHAVSEGTKAVTKFTSS

SEQ ID NO: 206466 - protein, 146 aa, Zea mays
  unsure (1)..(146): unsure at all Xaa locations
  Clone ID: MRT4577_119882C.1.pep
MGGSTARTDKDVHPYEWDMAXATHLKALESSLLXYWVGHCTTHVMIKALXAYDPDWYYIYLVFVEXMIYAIQELDVGGFHNXYSGRHKNGSRPPHLCKSSGAISRNILQQLLEMGIIDVDPKGGRGITXPGKRDLDHTAARVAAEA

SEQ ID NO: 206467 - protein, 138 aa, Zea mays
  Clone ID: MRT4577_119883C.1.pep
MAPKAEKKPVAEKAEKTTAGKKTKAEKRPPASKEGGEKKGKKKNKKSVETYKIYIFKVLKQVHPDIGISSKAMSIMNSFINDIFEKLAGESAKLARYNKKPTITSREIQTSVRLVLPGELAKHAVSEGTKAVTKFTSS

SEQ ID NO: 206468 - protein, 47 aa, Zea mays
  Clone ID: MRT4577_119884C.1.pep
LPSSVVFSFSGDGLRSVPPPPGGRGGQSPECPLLMGRDYFLGKKRFG

SEQ ID NO: 206469 - protein, 95 aa, Zea mays
  Clone ID: MRT4577_119885C.1.pep
PLFFFFFWIVLEERELPGNLIYKSRVRAVDFKVKFLGGGEFCSLFFFFFPSSALLDGSQLKSKLNSLITRFANFFFKCKNDERIKVPFFNDCGLF

SEQ ID NO: 206470 - protein, 122 aa, Zea mays
  Clone ID: MRT4577_119886C.1.pep
PYRVVTDADSTYQLENPTTVRGWAPRRRRMICFFHLIIYHEIFPALHAAKGFVTLIDVDVFGFFELLTSPHQLFLTRRVVSRHTPHEARPPVAGLPPPAERGTGSGWVGVGTGDGEEEGARP

SEQ ID NO: 206471 - protein, 142 aa, Zea mays
  Clone ID: MRT4577_119887C.1.pep
MAPKAEKKPAAAEKTPAAEKTTAGKKPKAEKRPPKSKEGGADKRKKKAKKSVETYKIYIFKVLKQVHPDIGISSKAMSIMNSFINDIFEKLAGESAKLARYNKKPTITSREIQTSVRLVLPGELAKHAVSEGTKAVTKFTSS

SEQ ID NO: 206472 - protein, 246 aa, Zea mays
  unsure (1)..(246): unsure at all Xaa locations
  Clone ID: MRT4577_119888C.1.pep
MATDSSALQASSESIAQKMGFFRVPDLLVKLSAKCLSELDVVRSPTSPLDLKFFTGLGNKSPGSSSVDASQNQKILLGDRVGLGLVDSLTDDNPAPLGGRKVLFLGSEMRIIDNLSRKNSSTAPDQAGEVEQKDDNMSDELMGSAMSLGDIINSEDYTRVVSRGPNPRTTHFFGDRVFELQAEQLMPVEXEKLKEAEDIYIYQGDKSFCSVECRENFMVDYEMEEAYHPASPSPPSDGGRIFQLIR

SEQ ID NO: 206473 - protein, 83 aa, Zea mays
  Clone ID: MRT4577_119889C.1.pep
MPVESKVDQSTSPVEDGLMSFCYFCSEKLKEAEDIYIYQGDKSFCSAECRENFMVDYEMEEAYHPASPRSPPSDGGRIFQLIR

SEQ ID NO: 206474 - protein, 64 aa, Zea mays
  Clone ID: MRT4577_11988C.1.pep
RLFDRATGTLYDNSRLAETKAPRIREFHMSAKYQRKLKFALKGILRAQEGCCLSVRGSFLDSWG

SEQ ID NO: 206475 - protein, 143 aa, Zea mays
  Clone ID: MRT4577_119890C.1.pep
GRPNKNPFSDKSGFIHQLPRGGWPNPPRGIVQGKQRPLSHRKTPPHNMGGKRFSLKMASPGKTEKTLASYLFSPSGGISFLGMLQILGLFFWAPLVPFQGPFGVGYHQSQKQVFLGPYPKNCPVMWGLLKASHPWAHWLVPLQ

SEQ ID NO: 206476 - protein, 253 aa, Zea mays
  Clone ID: MRT4577_119891C.1.pep
MATDSSALQASSESIAQKMGFFRVPDLLVKLSAKCLSELDVVRSPTSPLDLKFFTGLGNKSPGSSSVDASQNQKILLGDRVGLGLVDSLTDDNPAPLGGRKVLFLGSEMRIIDNLSRKNSSTAPDQAGEVEQKDDNMSDELMGSAMSLGDIINSEDYTRVVSRGPNPRTTHFFGDRVFELQAEQLMPVESKVDQSTSPVEDGLMSFCYFCSEKLKEAEDIYIYQGDKSFCSVECRENFMVDYEMEEAYHPASC

SEQ ID NO: 206477 - protein, 79 aa, Zea mays
  Clone ID: MRT4577_119892C.1.pep
LLQRSMMCHLFGQISLKPNLCIYIYEEEGFRLEKKCKKKNHFILERILGVTETPLLHMSSLFFFLSLGTTRYLFALGAT

SEQ ID NO: 206478 - protein, 147 aa, Zea mays
  unsure (1)..(147): unsure at all Xaa locations
  Clone ID: MRT4577_119893C.1.pep
MLASTPSGSSQTLHRRRRRRPPASPPKMQTSAKTLTAKTXLTMKAEPSNTIHNAKANIQHKEGIPPDQKRLIFAGKQLKDNQLLFYYPPPTEPTPHLVLRLRGGAKKXRKKKTYTKPKKIKHKHKKVKLSELQFHKGDDTTRKATRL

SEQ ID NO: 206479 - protein, 73 aa, Zea mays
  Clone ID: MRT4577_119894C.1.pep
LLPAQQSTASPPPLSPPQQLQLRLLKHVLATVAVVDPRDHGASATADRSPRSSWCAGLFQLQQPLPCRSRRMH

SEQ ID NO: 206480 - protein, 125 aa, Zea mays
  unsure (1)..(125): unsure at all Xaa locations
  Clone ID: MRT4577_119895C.1.pep
XYCFFLPWCALXARXSNHIQGQGCGVEWRLESIVRAWLWLRHGSPPPSLTRCACQLWRGVGETINITTSVRRIRGWIDLLSSFDGDGWIQIWRKRRRRPPGPGSRPASEGWPAGCLAGGCCYSRC

SEQ ID NO: 206481 - protein, 38 aa, Zea mays
  Clone ID: MRT4577_119896C.1.pep
VPFACSFLAWSFAEGPSASPRFRTEMASELTYRSGFTA

SEQ ID NO: 206482 - protein, 157 aa, Zea mays
  unsure (1)..(157): unsure at all Xaa locations
  Clone ID: MRT4577_119897C.1.pep
VSNVXVRNVRIVDSDNGVRIKTWQGGAGAVSAVEFAGVQMQNVKNCIVIDQXYCLGHGCANPTRPVRVAGVAYRDIHGTYNPQAGAPIRLACSDAVACTDITMSGVELLPAGGDDGALLADPYCWNAYGVMETLTLPPVYCLLEGSPESLQDPLTSC

SEQ ID NO: 206483 - protein, 105 aa, Zea mays
  Clone ID: MRT4577_119898C.1.pep
VTFFFFFFFFFFFFVLTIFLFLAGLRKPKLAGGRAKENPRGNGPEGTRTATGQNWNTPKAPEKETPQKNHPGKTIESHREKRRKQRKNRDPKRSGSNKVHDMKKD

SEQ ID NO: 206484 - protein, 84 aa, Zea mays
  Clone ID: MRT4577_119899C.1.pep
HSHKGNKVLLPLKLIDSHPLTIPAYGSPLQVPAHSRVTRLTGFRGINLESGPGDLTTCPIMREMNRGAPPTKKIPPVPPRPPLL

SEQ ID NO: 206485 - protein, 64 aa, Zea mays
  Clone ID: MRT4577_11989C.1.pep
CTRRLLRWHVFVSFLLRRLMVRGAAIYSHRSLLLVSLRAPGYVPLGSVIRAIGSSSHLYTSSSG

SEQ ID NO: 206486 - protein, 73 aa, Zea mays
  Clone ID: MRT4577_1198C.1.pep
GGTHSAPARKKKKKKNAATKRRREAKKHKRLSSASYQTPAKTLARARQNLNSQVRHPINLNASHGLFQWRRAR

SEQ ID NO: 206487 - protein, 69 aa, Zea mays
  Clone ID: MRT4577_119900C.1.pep
LDLATKCCLLLTGTSKLDNVNTWTYIKFCWSFHFCRTDMIFTAYFSNSYCIYTAGCSYSNLVSGFSCIP

SEQ ID NO: 206488 - protein, 93 aa, Zea mays
  unsure (1)..(93): unsure at all Xaa locations
  Clone ID: MRT4577_119901C.1.pep
SDNISFTVWDVRGQDKITPLWRHYLQNTQRLISAVDSNDRDRAVKKWLLQGGEPNKDELPNNKLXGCANKQDLLTAMSAAXEITDKLGLHSLL

SEQ ID NO: 206489 - protein, 108 aa, Zea mays
  unsure (1)..(108): unsure at all Xaa locations
  Clone ID: MRT4577_119902C.1.pep
GPRPTHTNKSKSLATHSTLSKLTNSSMRRLISLIASPKNTTHSPQLQQPHIANPLPTHLTSMIAQPPXNTSLQPYKLQQAISSNHIPISXLVIXQSPSLSSLHALIQT

SEQ ID NO: 206490 - protein, 69 aa, Zea mays
  Clone ID: MRT4577_119903C.1.pep
VARVLNLGDPIRRAMQLDERGRKHGSFKADGRCLERADGVTPPFRSLRPVASDVGHSGLSSTYFISYAW

SEQ ID NO: 206491 - protein, 96 aa, Zea mays
  Clone ID: MRT4577_119904C.1.pep
LGGLHSSHTWYLPSMSSSSPMFSILEKETNTCNRSDPNINSMSLVTAHNLSEVLLFKRWKSVGRRILMNLVVVQKIDRGFYSRRKDHVIGVGKNDP

SEQ ID NO: 206492 - protein, 55 aa, Zea mays
  Clone ID: MRT4577_119905C.1.pep
GCIKPCATWSKALKKKKKKKKKKKKKKKKKKKKKKKKKKKKKKKKGALYERDWGI

SEQ ID NO: 206493 - protein, 41 aa, Zea mays
  Clone ID: MRT4577_119906C.1.pep
SDDQDNRKRKRRSISSLEDRKRKRQREKEEDLADKIREEEE

SEQ ID NO: 206494 - protein, 155 aa, Zea mays
  Clone ID: MRT4577_119907C.1.pep
SARGSFSGYKIYPGHGRRYARTDGKVFQFLNAKCESAFLSKRNPRQINWTVLYRRKHKKGQSEEIQKKRTRRAVKFQRAITGASLADIMAKRNQKPEVRKAQREQAIRAAKEAKKAKQASKKTAMAAAKAPTKAAPKQKIVKPVKVSAPRVGGKR

SEQ ID NO: 206495 - protein, 74 aa, Zea mays
  unsure (1)..(74): unsure at all Xaa locations
  Clone ID: MRT4577_119908C.1.pep
GLLLRGLGKCWGHNPTVTEILNSPSTDILIDNYDTFTRYIYQYLALXGAIITEYQTDQISLVGLCLNKPSQIAT

SEQ ID NO: 206496 - protein, 78 aa, Zea mays
  unsure (1)..(78): unsure at all Xaa locations
  Clone ID: MRT4577_119909C.1.pep
EHXASDVSTASYCDCTFRIRAMGPPVVLVPHSMMPSWSTGPVYGGREGGHFVPKGRVHGGGLLALLGGSFRDADVEKL

SEQ ID NO: 206497 - protein, 92 aa, Zea mays
  Clone ID: MRT4577_11990C.1.pep
SSSQGSRISNLPGSCFPRVCMGWWVRRCLHRPPPSPAQPVSPVVRGRLLSRSSGSAVKRDSRLTFGLGDLGVRKPLKMARSGSSQVGPPSPS

SEQ ID NO: 206498 - protein, 115 aa, Zea mays
  unsure (1)..(115): unsure at all Xaa locations
  Clone ID: MRT4577_119910C.1.pep
VKPAFTAVFFNVHYHYSTXCVPLGVGAALSLIDPPHPHLLYLPYILILKNLDGTPDHTDLMPGLIFDKKASHATGGPTQMENAKIAVIQLQIXPPNTDIDQRVILFDYSHMDRIL

SEQ ID NO: 206499 - protein, 57 aa, Zea mays
  Clone ID: MRT4577_119911C.1.pep
RRWHRGRQVRRQGPDGCYREGLLLGAVQESQALVQKALQENPSTTLSERHEAPVDSW

SEQ ID NO: 206500 - protein, 91 aa, Zea mays
  Clone ID: MRT4577_119912C.1.pep
PPGMPGGGLTERTGGATPRRNAGASTTNAKPGGADIAAVQKTEEPPKLWKEHSPQKAGTGQTRSEHPDNEEATDPTMAAAEETNIDHGKIH

SEQ ID NO: 206501 - protein, 73 aa, Zea mays
  Clone ID: MRT4577_119913C.1.pep
YHAGGGCIRRLAMAMWRPAALLVVALAGGLSAASRADALSVTGTYTWCIHYFVPYYGDTVSGNLFFVDHHIFW

SEQ ID NO: 206502 - protein, 66 aa, Zea mays
  Clone ID: MRT4577_119914C.1.pep
PKQKESQKKLAKTQKPPRGKEGTKWKKTTDTSKPPMGFRHWQYKPRYPTLKPQKLQKRSASSATPP

SEQ ID NO: 206503 - protein, 321 aa, Zea mays
  Clone ID: MRT4577_119915C.1.pep
MAGEEAGRRGVPSLLNPPSASSEGQQEHIASDVTQLIGWTPLVELKRIAAKEGVGARIVGKVEAYQPLCSVKDRSALRMIEDAEERGLISPGTTTLVEPTSGNLGLGLVLVALRKGYRFVAVMPGQYSLDKQILLTYMGAELYVTDPSLGFPGITAKVEELKKELPNVHVLDQFSNRANPEAHVRWTGPEIWKDTAGKVDVFVAGSGSGGTVSGVGKYLKTQNPSVKVICVEPAESPVVSGGEPGSHKIQGIGPGFIPEVLDTSVIDEAVTVTTEEAMAGARRLAREEGLLVGISSGANLAACLKVAAREESKGKMIVTVF

SEQ ID NO: 206504 - protein, 137 aa, Zea mays
  Clone ID: MRT4577_119916C.1.pep
GPLRRRMHQSLLISRRSEGDCSRRISPHRGQCSIRSDALHRRGAQCSPPHAVNMFPKPRPALVPLGNPLPRSGLKDDSTYWFSGPRPPVMDRLKISGLTPSKQQGFDVQSPKARHTLALPTSPPKRESCATARTLFP

SEQ ID NO: 206505 - protein, 72 aa, Zea mays
  Clone ID: MRT4577_119917C.1.pep
FFLSFFFGFFSFFFFFFSGNRLTGFHFCKKKGSCLKAPIYLSIVFKFLWQNWPLEQLKAQVPANFLGPQINF

SEQ ID NO: 206506 - protein, 48 aa, Zea mays
  Clone ID: MRT4577_119918C.1.pep
NRPKSEGNLEKFPLRGGGLKEKNLFKFLIIFYNLKKFFKNFFNFFFFF

SEQ ID NO: 206507 - protein, 126 aa, Zea mays
  unsure (1)..(126): unsure at all Xaa locations
  Clone ID: MRT4577_119919C.1.pep
GRTTRGKKERTQPNANTSTNEPRRTTPRPPTPTSTPXARQPXAARTRTTTRPTPPPRSAPAGPPPTPPPARXKTPRPRPPPQQPRTRPPXPRPDQGTRNTQHPAPRRRTPPASAPTPPTDPCRRPK

SEQ ID NO: 206508 - protein, 209 aa, Zea mays
  unsure (1)..(209): unsure at all Xaa locations
  Clone ID: MRT4577_11991C.1.pep
MNTTRLVAXDNAQVAGLDFVETFALVARLEPIRILLAYVAHHSFKLYQMDMKSAFLNGPIKEEVGKANPTLFTKTWNGDLFICQIYVDDIIFGSTNQKSCEKFSRVITQKFEMSMMGELTYFLEFQIKQLKEGTFLSQTKYTQDILKKFGMKDAKLAKTPMGTYKHLDLNARGKSVDQKECHLVAMKHILRYLVHMPCIGLWYPKGSYL

SEQ ID NO: 206509 - protein, 82 aa, Zea mays
  Clone ID: MRT4577_119920C.1.pep
PVAKPGHVAPASRRCGECQGVPLLPGGAGSLPCRRTPAKLLPAQRDGVAHVGWAVPFDREWNKRTVMATPVAPNSARVCVHS

SEQ ID NO: 206510 - protein, 102 aa, Zea mays
  Clone ID: MRT4577_119921C.1.pep
RPVRAPTAATVQISHPNCWGQHQERGCYGDRYSSDTAGGCLCDYHTPNPSAALLAIPLHNPARAHRYPSDIIAQAYTRADAHGMSIDHSLAVALMSYYPIIP

SEQ ID NO: 206511 - protein, 88 aa, Zea mays
  unsure (1)..(88): unsure at all Xaa locations
  Clone ID: MRT4577_119922C.1.pep
GPTFHGSTHASDHASESPALSLVQSLVETIRVQQLQQLVLAVITHVALAHLSPYSQRQQFLQVKHMSTFSXSAYLQHHLXPYNQLTTA

SEQ ID NO: 206512 - protein, 135 aa, Zea mays
  unsure (1)..(135): unsure at all Xaa locations
  Clone ID: MRT4577_119923C.1.pep
ARPAFGVRAASXSERPIWXPGTPPPPRVDDRLPGDFGXFDPWGLGSEXSSLRWNVQAELVHCRREMLGAEGIFIPELLTKIGELNAPFWYTAGEXXYFADTTTLFVIEXILIGWSEGRRWADXIKPGSAXTDPIF

SEQ ID NO: 206513 - protein, 152 aa, Zea mays
  Clone ID: MRT4577_119924C.1.pep
MAPVPIPNLQLPRTAALLEIRRGVAGVQPTWPANGPIPTRDFLRTKCLTTNAMEGLTARTNGGGSRLRRSAVRGGRVTTARNPPGPEDPRTRILPREQSTPTPECQGSGHRRGVVMEMSVNDGNDSARPTFKSLAELGSESTTYRTAIGAGS

SEQ ID NO: 206514 - protein, 128 aa, Zea mays
  unsure (1)..(128): unsure at all Xaa locations
  Clone ID: MRT4577_119925C.1.pep
RPLFAAKDLTTFYXENRPKIFPQKKXGLLPPLRNLLGLGRGPKTNGCFLTTRTKALTHNFRXGGTGAQRIVPGFEVKYLAANIFFTFQGQNHALKKPHLFHILIKTLGGPTYFPXHFLKTKATDGRPP

SEQ ID NO: 206515 - protein, 158 aa, Zea mays
  Clone ID: MRT4577_119926C.1.pep
RRASRGMGGRATPPARQRPASSCGMSGPAMPPQDRQCPASCGMDGQATPPARQRPASCGTGDPVAPPARQRPASRGMDGRATPPARQRPASSCGMSGPAIPPQARQCPASCGMGGQATPPARQRPASCGMGGRATPPARQRPASSCGMSGPAMPPQAH

SEQ ID NO: 206516 - protein, 49 aa, Zea mays
  Clone ID: MRT4577_119927C.1.pep
TPGSKTACLTRWGEVYLPKSPGALPRLQMSILKTALTTPVSEPFIMSPT

SEQ ID NO: 206517 - protein, 454 aa, Zea mays
  Clone ID: MRT4577_119928C.1.pep
MAAGRAVAVAMVAAAALPLLVGGAYADCYNYCFNDCMNKDKSMRDYCSYACDKTCAPDAAPRRPVAGLPINCQLACVRDSCRRRRADANDMKACYGQCYDRCETKAGLPRPLRAGGGVGIVWPAALPDHPFHKKQDAVWPAALPDHPFHKKQDTGGPAAELPDHPFHKKQDAVWPAALPDHPFHEKQDVVWPAALPDHPFHKKRDTGGPAAALPDHPFHKKQGAVWPAALPDHPFHKKQDVVWPAALPDHPFHKKQDTGGPVAALPDHSFHKTKQGAVWPAALPDHPFHEKQDAVWPAALPDHPFHKKQDAVWPAALPDHPFHKKQDTGGPAAALPDHSFHKTKQGAVWPAALPDHPFHKKQDTGGPTAALPDHSFHKTKQGAVWPAALPDHPFHEKHDAVWPAALPDHPFHKKEDAVGPAALQVDHKMHDAVKRAGEPDPGYVMYPAWSPVRP

SEQ ID NO: 206518 - protein, 281 aa, Zea mays
  unsure (1)..(281): unsure at all Xaa locations
  Clone ID: MRT4577_119929C.1.pep
MDGQATPPARQRPASCGIGDPVAPPARQRPVSRGMDGRATPPARQRPASSCGMSGPAMPPEAHQCPASXEWMVRQRRRPDRVLLLVERXPVAPPARQRPASRGMDDRATPPARQRPAFGPAIPPQARQRPASCGMGGLAMPPARQYPASCGMGGQATPPARQRPASRGMDGRATPPARQCPASCGMGGPTMPPQARQCPASCGMGGQSMPPARRRPASRGMDGRATPPARQRPASCGMGGPATPPARQRPASCGMGGQATPPARQRPASCGMGGPATPPRP

SEQ ID NO: 206519 - protein, 91 aa, Zea mays
  Clone ID: MRT4577_11992C.1.pep
FQGQFVDSFGYHAERLEDDTVHKYRVNRYEGDEEIHTVYFNPDQGTVNCSCCLFESCGILCRHALRIFIIEGVHDLPKAYILKRWTKHAKN

SEQ ID NO: 206520 - protein, 76 aa, Zea mays
  Clone ID: MRT4577_119930C.1.pep
PALAATRQRTLFCASTALVLCGPQSAHQALLACMLASPWVYCQTGLRRLASEPGIISTPGRQREHTHLTGYMHATI

SEQ ID NO: 206521 - protein, 245 aa, Zea mays
  Clone ID: MRT4577_119931C.1.pep
TSLPGRRRCLYFPFHKKQDTGGPAAALPDHPFHKKQDTGGHAAELPDYPFHKKQGAVWPAALPDHPFHEKQDTVWPAALPDHPFHKKQDAVWPTALPDYPFHKKQDTGGPAAALPDHSFHKTKQGAVWPAALPDHPFHEKHAAIWPAALPDHPFHKKQDAVWPAALPDHPFHKEEDAVGPAALQDHKMHDAVKSAGEPDPDTSCIRHGAPSAPNRRFVVGERRRSAGNGECHMHTCSWLPCNIKP

SEQ ID NO: 206522 - protein, 117 aa, Zea mays
  unsure (1)..(117): unsure at all Xaa locations
  Clone ID: MRT4577_119932C.1.pep
MGIATGVCFVVLVLICTFLREGRAATFTFVNRCTGTVWPGIQSNAGSSRLDPTGFVLPPGTSRAVQAPSGWSGRAWARTGCAQDASGKVVCATXDCGSGSLECNGQNAATPATLAEF

SEQ ID NO: 206523 - protein, 82 aa, Zea mays
  Clone ID: MRT4577_119933C.1.pep
FRHPGLYVNSMFMNVMTNFVRHWGTNDHCSECTSCPMCGSRMALPMLEFAARIKLIRLMQPPMSVTVVALCDDGPVLPADAA

SEQ ID NO: 206524 - protein, 201 aa, Zea mays
  Clone ID: MRT4577_119934C.1.pep
RTLAGLRWHCRTTDSTRNWALSGRRRCPTIHSTRSRTLSGRRRYRITRSTRSRTLSGRRHCLTIHSTRSRTLAGLRRHCRTTHSTRRNKALSGRRRCPTTHSTRSTTLSGQRRCPTTRSQEAGCCRAGGVAGPQDPRRGQAGRGAGSRIRHVSGIEPRPPLIVDLLLENDDAPPATANATCITCSWLPCDIKHYCTSRGSV

SEQ ID NO: 206525 - protein, 114 aa, Zea mays
  unsure (1)..(114): unsure at all Xaa locations
  Clone ID: MRT4577_119935C.1.pep
MAHSYKDTFLTNSHYHNSGLLIPHTNIHSNKTTYHTXKFSFLKKKIVYFTNNXNPLLTHKSHSFLKFFINIIYIDMWVLFTSIPIINFQLFLXLTKKFLNKSLFYSESYSKIIY

SEQ ID NO: 206526 - protein, 66 aa, Zea mays
  Clone ID: MRT4577_119936C.1.pep
VKMGEEIMGGEFLGDQIGPIDTCERSVEACRGKIFSYLQVFIDAIVFPCSSRAFYHLFTVRQTIRS

SEQ ID NO: 206527 - protein, 201 aa, Zea mays
  unsure (1)..(201): unsure at all Xaa locations
  Clone ID: MRT4577_119937C.1.pep
MPRMAPTRPCLALARWVLLAAVAARLAGADDPYRYFTWIVTYGPINPLGTTQQGILINGQFPGPRIDCVTNDNLIVNVVNNLDEPFLITWNGIKQRKNSWQDGVAGTNCPIPPGANYTYKFQAKDQIGTFTYFPSVALHRAAGGFGALSVYQRPAIPVPYPAPAGDFTLLVGDWYLAGHDQLRQTLDSXXALPXPDALLIN

SEQ ID NO: 206528 - protein, 855 aa, Zea mays
  unsure (1)..(855): unsure at all Xaa locations
  Clone ID: MRT4577_119938C.1.pep
MSQDKKVVAETKLTEEEKLFEQKKALNPYIAGFLESMAKTNTEKITKDILEGLSEDTAGGDNNVPAPEENEVVIYRSFFKAGLRFPLSRFVVEVLKIYQIFLHQITPEAVIRMGIFVWAVRSQGLEPSAKCFCGMHELTYETKAXQGKYHNNFGCYGFXPPAPTQATRYGDKFDEPNDDWLKCNEATSDKLLGSYSKAEDNALSAAFGSRGKKRLNRVFDAIGFVYPDYRYPLRGQGKKRKATAVAKTAASATPDEPAPKSKKLKVLTHRPRYIESAVVPEFGGETSSAAEPKEPIPSTQKAEDSAIIPKEPSVELVEMKVDKADKPETEETTKVSKVLSPPEKAIVPKVQMGTAITPRRRRMVNVLDVLETTDSIRLTPKEKAAEIDRAQPKIDIMQKDAEATITQAETEAGPSVPAETKPDATEQGAEETIPYTNITFEKSVVKGTKSLTPKALSKGFDYIIRHASGKRLSEEEVFEAKHYARELKYPKGALVFNGTDEDDFLYYIPDNKELSVCREMSRSMGFPKLEVGLCAMTKDDLADSLAYNGLKGLILSNALRAQKNAEDESCTIALNNLRTEVIRLRNEAKEKDKILLTLADKVKEDEANFKTQSEAQKTEIEDLQKQLFEAKEKXVSQRTIYKKQLMNFXSKERCFEKSVECVKKIKNSFTNVGAYSNEDNFIRGDPEGVIEWISEEAATFEEILSDRGDVCAFSGARGVVAVLEKAGCDHVKALAQAEAAFSVDDTKDPSAESSFLGGKFFTDIWENGGREMAHEIMKKSEKDIHDAREAEKKAEKAAELERRIAELSPPPKPFDPLADPEKRKAIEIINMVEAIIDEVVTKLLNKVAEKVLKEE

SEQ ID NO: 206529 - protein, 233 aa, Zea mays
  unsure (1)..(233): unsure at all Xaa locations
  Clone ID: MRT4577_119939C.1.pep
MSSDEEVREEKELDLSSNEVVTKYKTAAEIINKALKLVLSECKPKAKIVDICEKGDNFITEQTGNVYKNVKRKIERGIAFPTCVSVNNTVCHFSPLATDDSVLEENDMVKIDMACHIDGFIAVVAHTHVIRAGPVTGRAANVLAAANTAAEVAMRLVRPGKKNKDVTEAIQKVAAAYDCKIVEGVLSHQLKQFVIDGNKVVLSVSNADTKVDDAEFEEXRXNEVYAIDIVTST

SEQ ID NO: 206530 - protein, 52 aa, Zea mays
  Clone ID: MRT4577_11993C.1.pep
STLLYKRGWKKFYALFLAVCVSHIDGWLKRSKHPINIIKVMTCCHKIGHYVR

SEQ ID NO: 206531 - protein, 72 aa, Zea mays
  Clone ID: MRT4577_119940C.1.pep
RRLKKTRRKNSQPYSPGAKSNPSNYPKTKKSETSPVTPALHEGKIPNKWDHKTSPFQEKKLSSPFKKKTSPP

SEQ ID NO: 206532 - protein, 67 aa, Zea mays
  Clone ID: MRT4577_119941C.1.pep
GGVHSPPAMSSGHGSVHLRATGAAACHDPTDPPSAETVGGHGDNLNDQGTSRDQDPLRALSLADAFA

SEQ ID NO: 206533 - protein, 80 aa, Zea mays
  Clone ID: MRT4577_119942C.1.pep
PTRPKKKKKLNKNEKNKKNTKEKLKKKEELKESKTKYGGVRFWAPHWLSLSWGVTCPCLGLRALLECAYCYDSVLGKSTG

SEQ ID NO: 206534 - protein, 131 aa, Zea mays
  unsure (1)..(131): unsure at all Xaa locations
  Clone ID: MRT4577_119943C.1.pep
MATAYAPMASQVMKSSLVVHSRPRGLSGAAALTRRPGRFTVKAIQPEKATYQVVQPINGDPFIGSLETPVTSSPLVAWYLSNLPXRKKEADKLQTADGWAKFTGGFFFGGISGVLWAYFLLYVLDLPYFFK

SEQ ID NO: 206535 - protein, 214 aa, Zea mays
  Clone ID: MRT4577_119944C.1.pep
PAGPGSSTYRPVVVASAGRSELAGGSDPCACCCVCVGGDGRFTVKAIQPEKATYQVVQPINGDPFIGSLETPVTSSSLVAWYLSNLPAYRTAVSPLLRGVEVGLAHGYLLVGPFALTGPLRSTPVHGQAGALGAAGLVAILSVCLTMYGVASFNEGDPSTAPTLTLTGRKKEADKLQTADGWAKFTGGFFFGGISGVLWAYFLLYVLDLPYFFK

SEQ ID NO: 206536 - protein, 72 aa, Zea mays
  Clone ID: MRT4577_119945C.1.pep
FIYTFFFNSIMHLLGLIQTIKVFNRWDLIIVGVWTDLLQRNALRWSLARVDKNIIIGTLLCCNHNHSNFFCA

SEQ ID NO: 206537 - protein, 211 aa, Zea mays
  Clone ID: MRT4577_119946C.1.pep
MATAYAPMASQVMKSSLVVHSRPRGLSGAAALTRRPGRFTVKAIQPEKATYQVVQPINGDPFIGSLETPVTSSPLVAWYLSNLPAYRTAVSPLLRGVEVGLAHGYLLVGPFALTGPLRSTPVHGQAGALGAAGLVAILSVCLTMYGVASFNEGDPSTAPSLTLTGRKKEADKLQTSDGWAKFTGGFFFGGISGVLWAYFLLYVLDLPYFFK

SEQ ID NO: 206538 - protein, 72 aa, Zea mays
  Clone ID: MRT4577_119947C.1.pep
PKKALNFPKRLPKFKITWPGITYFKTRRKYLIIIISKKTGPQMRGTWARKAKQFFPWGGACLLHYKGGNKNK

SEQ ID NO: 206539 - protein, 211 aa, Zea mays
  Clone ID: MRT4577_119948C.1.pep
MATAYAPMASQVMKSSLVVHSRPRGLSGAAALTRRPGRFTVKAIQPEKATYQVVQPINGDPFIGSLETPVTSSPLVAWYLSNLPAYRTAVSPLLRGVEVGLAHGYLLVGPFALTGPLRSTPVHGQAGALGAAGLVAILSVCLTMYGVASFNEGDPSTAPTLTLTGRKKEADKLQTSDGWAKFTGGFFFGGISGVLWAYFLLYVLDLPYFFK

SEQ ID NO: 206540 - protein, 52 aa, Zea mays
  Clone ID: MRT4577_119949C.1.pep
PCNGFLNGLMYSRYAPRRWHRCLANVVERVRQLEGARAIRRAKDDATLVPDV

SEQ ID NO: 206541 - protein, 148 aa, Zea mays
  Clone ID: MRT4577_11994C.1.pep
RGDDKYFERIVETYILVATLIATVTFSATFTMPGGYNQSDGIALKGHHVAFQIFVISNTVAMCSSIVVVFCFIWAWQDPVRFKVDQLLWGHRLTVIACLAMLVSLMTAVYITVAPASRWPAYVVIAIGTSTPAVVVLMLGKEVIFVPV

SEQ ID NO: 206542 - protein, 43 aa, Zea mays
  Clone ID: MRT4577_119951C.1.pep
PKASNFIIIPLKRTKENSQLFVFHICCEFSLVLFKASNFIIIP

SEQ ID NO: 206543 - protein, 72 aa, Zea mays
  Clone ID: MRT4577_119952C.1.pep
VCLTMCGVASFIDVDPSQAPSLTLTGRKKQSVNLQTSNGWAKFTGGFFFGGISGVLWAHFLLYVLNLPYFFK

SEQ ID NO: 206544 - protein, 141 aa, Zea mays
  Clone ID: MRT4577_119953C.1.pep
MIARLPPDMGDKNQNDYSDSEPHERSTMAQQKAINKKKQERREAGLQSARSRSSSRRARRARLEEDKKNGKYMHTTPLEVLEEADANGDLQKMACLSVSGPTARPWMVLLRMRVRCVVRFLCVARIPMSRFAWSRRRAGVS

SEQ ID NO: 206545 - protein, 54 aa, Zea mays
  Clone ID: MRT4577_119954C.1.pep
MPTLTLTGRKKEADKLQTSDGWAKFTGGFFFGGISGVLWAYFLLYVLDLPYFSK

SEQ ID NO: 206546 - protein, 51 aa, Zea mays
  Clone ID: MRT4577_119955C.1.pep
LSWKHQKKKRTVLLFSLSRLRKVVVCTRSNVVCLNLFLWNRKSCWFKKPNP

SEQ ID NO: 206547 - protein, 211 aa, Zea mays
  Clone ID: MRT4577_119956C.1.pep
MATAYAPMASQVMKSSLQLHSKPRGLSGAALTTTRRPRFTVKAIQPEKATYQVVQPINGDPFIGSLETPVTSSPLVAWYLSNLPAYRTAVSPLLRGIEVGLAHGYLLVGPFALTGPLRNTPVHGQAGALGAAGLVAILSVCLTMYGVASFNEGEPSTAPTLTLTGRKKEADKLQTADGWSKFTGGFFFGGISGVLWAYFLLYVLDLPYYFK

SEQ ID NO: 206548 - protein, 234 aa, Zea mays
  unsure (1)..(234): unsure at all Xaa locations
  Clone ID: MRT4577_119957C.1.pep
MAKALLSSSLLPALPGAAGGSRXCARPMLLPPLRLRRGRRAASACEVRAGLHGLDSVGGPHLQAALERAEAALYTLADAAVAAAGAGADAGXGCGGXKNSGWFGFISEALEVVLKVLKDGLSAVHVPYSYGSAIILLTIIVKAATLPLTKKQVESTLAMQNLQPQIKAIQQRYAGNQERIQLETARLYXQAGVNPLAGCFPXXATIPVWIGLYQALXNVANEGLLTERFFWIHH

SEQ ID NO: 206549 - protein, 211 aa, Zea mays; identical to SEQ ID NO: 206537
  Clone ID: MRT4577_119958C.1.pep

SEQ ID NO: 206550 - protein, 74 aa, Zea mays
  Clone ID: MRT4577_119959C.1.pep
QNRGRNYSTYLHAHKAYSVKSVGWTEFSVPKMDKSVPFGGTRAAIIGAIRAPPGVSFFINIIVSSLLGLSYIFI

SEQ ID NO: 206551 - protein, 98 aa, Zea mays
  Clone ID: MRT4577_11995C.1.pep
SRCDHASRSPSPSLSIAGESGEITKSCRSCVWSAEQGSWRGRRIACRCLAESSPGILWRHCSVDRLHRRLLECEDTSYLKIILVPGISSPRSRTGTTG

SEQ ID NO: 206552 - protein, 57 aa, Zea mays
  Clone ID: MRT4577_119960C.1.pep
HSFGRPPTPHYGRGVLSASRAPSEAGGALSAADASAMHWLAGHFGETAETAPAEGCH

SEQ ID NO: 206553 - protein, 94 aa, Zea mays
  unsure (1)..(94): unsure at all Xaa locations
  Clone ID: MRT4577_119961C.1.pep
NLQMASLHVEAFRMTLHRSGDTFISFLWYELDYIXAKGRMRRVDRVWQIGYGSGFKCTSXAEWKRLRSMKTATNGPWDDCIHRYPVDVPEVVKL

SEQ ID NO: 206554 - protein, 134 aa, Zea mays
  unsure (1)..(134): unsure at all Xaa locations
  Clone ID: MRT4577_119962C.1.pep
TNRRKRPQDPAGGAVQRGKSGKNPNTGGRPSRHKKAPIPPKGGRKKRNGPGXTTPGGEKPGGNQRKPPGKKTPFHQRGKKQKGPHRGPSPXGGPPKRAKEPPLKRPIKRGGGGGXPPGGPKHWPXQGPGPSAFF

SEQ ID NO: 206555 - protein, 93 aa, Zea mays
  Clone ID: MRT4577_119963C.1.pep
RAVPYVWQSQQSRCALCFGGNHKMSDDGTGYRIRSTQVGTTDTSPSSRPQGPSPRPARTSRSFRRRYGESKSLGTTHMVCERTEGRRVCFTST

SEQ ID NO: 206556 - protein, 188 aa, Zea mays
  unsure (1)..(188): unsure at all Xaa locations
  Clone ID: MRT4577_119964C.1.pep
LEAGRTLASTDCFQHGRRTPLAHSPARGNSRRLGLHSSQPCPPLALRCSGLPPSQALDSPDSSAGSXPTVFRTFTPPSLFPYNGLNNMPVYLAVRGRVFDVTPGRNFYGPGGPYANFAGRDASRGLACGSFDEDMLTKDLDGPLDTLEGLDDEQLDALRGWEERFSEKYLVVGKLVPVGHPEAEEAKA

SEQ ID NO: 206557 - protein, 80 aa, Zea mays
  Clone ID: MRT4577_119965C.1.pep
LNINRAPAEIWGGGGGARPGGRAGQHYRASILRPRFIGHDDNRAQGGARRAQHTAQLLLAASDGPSEGGRDGSCAPYGGG

SEQ ID NO: 206558 - protein, 73 aa, Zea mays
  Clone ID: MRT4577_119966C.1.pep
GKRKGGEKGLGKIAISNDHSISNVFLVESLRYNLLSVSQSCNLGYNCLFTKGDESDFRRSDGSLAIKGALHDK

SEQ ID NO: 206559 - protein, 93 aa, Zea mays
  unsure (1)..(93): unsure at all Xaa locations
  Clone ID: MRT4577_119967C.1.pep
KXKXPPLAKLVATPNLRSGRRAPPRPRTVLLAKKAGEQAASWDEEQDDKGSGAGAPDGGDGNLGGSRGDDGGGGGGNLHHLRXLLXPVPVREA

SEQ ID NO: 206560 - protein, 107 aa, Zea mays
  Clone ID: MRT4577_119968C.1.pep
KRSATAIDTMTSISPNTIHALPIKIFILDDIERTICLLFGINSLFCNNDTLEFIQRAIYSESFSHDSRLLDTMMTCQKQSDTEGLAYDICSRQRCHQIELPLDDIYK

SEQ ID NO: 206561 - protein, 114 aa, Zea mays
  Clone ID: MRT4577_119969C.1.pep
TMCGTLDYLPPEMVEKAEHDYHVDIWSLGVLCYEFLYGVPPFEAKEHSETYRRIVKVDLKFPLKPFVSPAAKDLISQMLVKSSAQRLPLHKVLEHPWIVQNADPSGVYREGRSV

SEQ ID NO: 206562 - protein, 145 aa, Zea mays
  Clone ID: MRT4577_11996C.1.pep
REGQIYLFIYVAMVKHASPCPCPCTKLLSLVTTATQCHCSRTLCLALRPPPLQLLATVCNSAVCVRASARARRFSFLPWRPPTTVRGRVVLDDDEEEGQPGRAPPGGGGCTFRGRKGKRCCGVVVVASSVTTRHTPRILRHVARH

SEQ ID NO: 206563 - protein, 40 aa, Zea mays
  Clone ID: MRT4577_119970C.1.pep
FNPYFYCDMTLFRNYAPYFSLNLRLNSVRSRIDIELILIQ

SEQ ID NO: 206564 - protein, 334 aa, Zea mays
  Clone ID: MRT4577_119973C.1.pep
MVCSIVLAAAAAATLACLSAAAAATGELLPSSSETPLSFGDGYTQLFGDSNLALHGGGKRVHISLDERTGAGFASQAAYLHGHFSARVKLPADHTAGVVVAFYMSNGDVYERTHDELDFEFLGNVRGKEWRVQTNVYGNGSTAAGREERYGLWFDPTEDFHRYAIHWTRDRIIFYIDDTPIREMVRTESMGAQFPSKPMSLYATIWDGSSWATSGGRYKVDYKYAPYVAEFADLALRGCAAGPAAACATSGGDDDAYGHAAAAMPPARRSAMEAFRARYMTYGYCYDRLRYPAPLPECSVGAEAAAFLPSGDARAALHRHGRRNRMRRGADFAV

SEQ ID NO: 206565 - protein, 104 aa, Zea mays
  unsure (1)..(104): unsure at all Xaa locations
  Clone ID: MRT4577_119974C.1.pep
MELIEANIYEHKSLXMRKSPNHPHDGQTKSADLIIYLSYNYXQRTRYIYDHYXRTNEIYHNLYKTYLDQSYANRNQIXRANXPRYDCLCCLRYIQTRDHDCATI

SEQ ID NO: 206566 - protein, 93 aa, Zea mays
  Clone ID: MRT4577_119975C.1.pep
SPVGSIDLTYAVLSSSIGYISRSLSHAWIIKCASGSVTGIRFGPSVKARATLVLGSLAPSIGTTSRFAGTWVDRDNANLMKASLLSCQASTIT

SEQ ID NO: 206567 - protein, 102 aa, Zea mays
  Clone ID: MRT4577_119976C.1.pep
AASYRIDLAHKLEIACRGCHFTGASSYGSSQPFSCIQDHDVCYYPNNQVVPWRILSRARTTTSSSSSRSWTGNAAQVRPSEPPGVGVEQVRQKNAPGLCAFD

SEQ ID NO: 206568 - protein, 65 aa, Zea mays
  Clone ID: MRT4577_119977C.1.pep
KTEKLNPWLKATVNRNGRGGAPLFTPGPTKNWKEGPSLCFPLCSLKCTGGSGMSQEGPHGTSRGT

SEQ ID NO: 206569 - protein, 73 aa, Zea mays
  Clone ID: MRT4577_119978C.1.pep
IVHHKLILLVLSIHSPTPSNAICGTWLKVNLMHVDDLEGNTFSEPHGCCDLPKQRLDPVVITELTLHCSVFPI

SEQ ID NO: 206570 - protein, 63 aa, Zea mays
  unsure (1)..(63): unsure at all Xaa locations
  Clone ID: MRT4577_119979C.1.pep
MVGPGLYTEIGGKTRDLLYKDYQTDHKXSLTGYTSNGVAVTASSTKKADLVLGEIXSQIKNRT

SEQ ID NO: 206571 - protein, 292 aa, Zea mays
  unsure (1)..(292): unsure at all Xaa locations
  Clone ID: MRT4577_11997C.1.pep
TAAEATEEEEEXPAASQDLADLLRRAATADKTVLMTAINEAWAAPGSFLDLFLESFRQGEDTAGLPRHLLVVAMDGRALELCNAVHPFCYLFRVDGMDFAAEQKYMEGDYLEMMWRRNRFQQXLLELGYSFLFTDVDILLFRSPFPRLRPTAQVTRPADFFVGDADSPNNYPNGGLLYVRSSPATVGFYRHWQASRARFPGHHEQYVFDRIVKEGYAGARVQFLDTAVFGGFCQHGDDLGRVATMHANCCVGLDNKLFDLKNVLQDWKTYRARAAAGNAQGFSWRVPGKCIH

SEQ ID NO: 206572 - protein, 112 aa, Zea mays
  unsure (1)..(112): unsure at all Xaa locations
  Clone ID: MRT4577_119980C.1.pep
YPGKPSCPIVCYSAWPGGSFCFICLSIPISPRIRSGWXTRQPGFAPRLARFPQASIXGSVGSCFPKQSQELGRVEVSSSLFPKRSPDFVDWFVPTDLLLSCRLLGRLVHVIF

SEQ ID NO: 206573 - protein, 61 aa, Zea mays
  Clone ID: MRT4577_119981C.1.pep
KVGFFCYVSPFYQLVVFFGKGKKVVHFFPKKKKKKKKKKKKKKKKKKKKKKKKKKKKKKGP

SEQ ID NO: 206574 - protein, 85 aa, Zea mays
  Clone ID: MRT4577_119982C.1.pep
VTKLAVVLFLSLSVSPCFATGWPRVQDLRTPGPRRRLRSDPFRRRQPAPAGRGSRGSIRVAALSLRTYDRRPALFTGHSGSRMRQ

SEQ ID NO: 206575 - protein, 55 aa, Zea mays
  Clone ID: MRT4577_119983C.1.pep
AAPILINFFFFYVNPNSIQSISISYEQITRMCKAHVTLDWLGSGSFSLDPNFKYE

SEQ ID NO: 206576 - protein, 55 aa, Zea mays
  unsure (1)..(55): unsure at all Xaa locations
  Clone ID: MRT4577_119984C.1.pep
ADRCHSTXHIDMICNIHQHMTANYRALYQKSSCGSPRSDKVYLGECSVDKDMHAA

SEQ ID NO: 206577 - protein, 51 aa, Zea mays
  Clone ID: MRT4577_119985C.1.pep
HIGWYSNQTCDIPTCLLCIMRISTVKYLYITSITSNYTTTRAVLLEYPSFT

SEQ ID NO: 206578 - protein, 1286 aa, Zea mays
  unsure (1)..(1286): unsure at all Xaa locations
  Clone ID: MRT4577_119986C.1.pep
MDFPPPSDHPAAAALGTTSAAGLGAAPAVSGAGAAGLGMAAAAGHHVAAGAPTAASTRAADLAAVHRTAAATSVEHHNAAGAPTRASTRAADFGPSGFGLPGYPTCAGVFTCLPSPTRLTGHPPPRFPPTRPLVADATWASPPPSTDSTLPSTIAAIQAALAASQERERVASRALDQERALAATLTAQMATVQRLILSPPPVDSGTPPPTPDATHACGLEADHIAALHAQAAGLQNIWSLVSVVLDPASSHYPRWRGQVLLTLRRYALDDHVLDDVATPPSRAWSLMDSVVLSWLHGTITVELQDIIRDQADTGRQAWLALEDQFLGNRDARALHLDAQFHLFSQEDLSVDEYCRQMKGMADSLRDLGEPVADRTLVLNLLHGLSPRYGHLKALIKRTVPFPTFHHVRNELLLEELTMAYEAPAPAPALYSAPPGGQAPSGGQAPRPPSTGAPTRPTPAVPAAPRQASASDGSRRSRKGGRGGGGSSRGGPPGRGGGQAWPSLYNPWTGTIAMWPGQAPRASRPPAPALLTAPPYGVPPTPPYGVPASHTAPPHLLPSGTPTTTWSPLSGGWDNASLAAAFSTMAMTPPSSDWVIDSGASYHTTPTTGTLSRSHPPNSSHPSSIVVGNGSTLPVTSDLATKTPLARCDSSGPLYTLRPSTSGASLPPALASLPAIYWAEALHTATHLLNRLPSKAVSHPTPYFALYGTAPTYDHLRVFGCACYPNTSATAPHKLSPRSTRCLFLGYSSDHKGYRCLDLASHRIIISRHVVFDEDVFPLAGPSPXPISTPSSSPIRSPPLPASTPRLAPTLAPRAAPSNTPAPRAASTTPPAPRAAPMTPPAPRAAPPTPRSSTTVAATPPPRRLPTRARRRARPALPTPPSFITAASRPYPPLPTXPAARSESSVYHLVAIHRDPGHVHPMFATVRAVLSLALSRDWAIHQLDVKNAFLHGTLMETVYCSQPTGFVDADRPDLVCRLNRSLYGLKQAPRAWYSRFASYLASIGFVEAKSDTSLFIYRRGDDTVYLLLYVDDIVLTASTTDLLQRTIVALQREFAMKDLGPLHHFLGITAERQPQGLFLHQRQPDIAYAVQQVCLHMHTPREPHLTALKWILRYLRGSLDYGLLLRPSPTSELVVYTDADWAGCPDTRRSTSGYAVFLGTNLVSWAAKRQPIVSRSSAEAEYRAVANGVAEASWLRQLLHELHSPLQRATLVYCDNVSAVYLSTNPVQHQRTKHVEIDLHFVRERVAVGDVRVLSVPTTLQFADIFTKGLPSSVFLDFRSSLNICTG

SEQ ID NO: 206579 - protein, 609 aa, Zea mays
  unsure (1)..(609): unsure at all Xaa locations
  Clone ID: MRT4577_119987C.1.pep
MLASARGFWARHRRKILVTLGVAGLGYAAYRFYDRRRAQLVRVEQLRAMEERAAADLVKNQLQTHFEKVKMICDTTTLPLAMHHLSDKMIRTTTNMLRCLLFQASLPASYWAEALHTATHLLNRLPLKAVRHPTPHFALYGTTPSYDHLRLFGCACYPNTSATAPLRSDSSPTSGAPSCAVTCSSCGHDATAHDLFCATRDPVDSTCATRGHVDHACATCGPVDHACATRGLVDPACATRGPVDPVCATRGPVDHACATRGPVDPGSLRQPHTRLPSXRGHATTSAPPDSGLSTSAARFADPAVVYQRRXPAIPAALNVPAVRSESSVYHPVAIHRDPGHVHPMVTRRTAGVLCPVDRLLLAAATSSTPPDASPVPSSVRTALADPHWRRAMEEEYAALLANHTWDLVPRPPGTNVVTGKWLFRHKLTSNGSLDRYKARWVLRGFTQRPGVDYDETFSPVVKFATAIHQLDVKNAFLHGTLTETVYCSQPTGFVNTDRSDLVCRLNRSLYGLKQAPRVWYSRFASYLAFIGFVEAKSDTSLFIYRRDDDTVYLLLYVDDIVLTASTADLLHRTIVALQREFAMKDLGPLHHFLGITAERRPQGLFLHQR

SEQ ID NO: 206580 - protein, 93 aa, Zea mays
  unsure (1)..(93): unsure at all Xaa locations
  Clone ID: MRT4577_119988C.1.pep
MLPLSRVESXXGHPMGGELKNGETYNGHVGNGDTWMNIHRXEVICTSKDGDKVWRMPXCDGGGNTINYLRGPDEVIDKGXEETSKSRAXRKPP

SEQ ID NO: 206581 - protein, 96 aa, Zea mays
  Clone ID: MRT4577_119989C.1.pep
NKGGILLIYEKIGKKPFLFHSHHHEQPGFLIGAKRPPQTSNQILGFLNVSTSLGNQKQKEWGGFFSRFFIGPLWGTTRILMHYWVGQFCSKILRAL

SEQ ID NO: 206582 - protein, 201 aa, Zea mays
  unsure (1)..(201): unsure at all Xaa locations
  Clone ID: MRT4577_11998C.1.pep
LGPSRPAGNGNWENPWHQYEHVHAMFKIVNTKDMPEIPERLSKEGKDFLSLCLKRDPAQRPSATQLLRHPFVQDNQAIIQQRTFXKRSVAPLRDIGGIRARGFTGSSSACVSPHKTSSRHIDVRANMSLPVSPCSSPLRQLKQSNWSCVASPSHLAFSSGSVAHKQSXYMQNQMRGSDPVPDPWRDISHRPQSPYDSPKRF

SEQ ID NO: 206583 - protein, 37 aa, Zea mays
  Clone ID: MRT4577_119990C.1.pep
GGTGGGRERGYGGGHGGYGGSARYSRGGDSGEGNWRN

SEQ ID NO: 206584 - protein, 80 aa, Zea mays
  Clone ID: MRT4577_119991C.1.pep
MAPSSSRFDDPAAVRRPPQHERKPPYMLLLPLVYAPVLPLIRIGLRHNPVVRDRLFYGVLAGAFAHGAYLISELYDVESK

SEQ ID NO: 206585 - protein, 465 aa, Zea mays
  Clone ID: MRT4577_119992C.1.pep
MVTRRAAGVLRPIDRLILAAATSSTPPDASPVPSSVRTALADPHWRRAMEEEYAALLANHTWDLVPRPPGTNVVTGKWLFRHKLTSNGSLDRYKARWVLRGFTQRPGVDYDETFSPVVKFATVRVVLSLALSRDWAIHQLDVKNAFLHGTLTETVYCSQPTGFVDADRPDLVCRLNRSLYGLKQAPQAWYSRFASYLASIGFVEAKSDTPLFIYRRGDDTVYLLLYVDDIAKLSEDDGPPVADATSYRSLTGALQYLTFSRPDIAYAVQQVCLHMHTSREPHLTALKRILRYLRGSLDYGLLLCPSPTSELVVYTDADWAGCPDTRRSTSSYTVFLGANLVSWAAKRQPVVSCSSVEAEYRAVANGVAEVSWLRQLLHELHSPLQRATLVYCDNVSAVYLSTNPVQHQRTKHVEIDLHFVREHVAAGDVRVLSVPTTLQFADIFTKGLPSSVFLDFRSSLNICTG

SEQ ID NO: 206586 - protein, 130 aa, Zea mays
  unsure (1)..(130): unsure at all Xaa locations
  Clone ID: MRT4577_119993C.1.pep
KKGKQKTGVLPLNQSPPQGRGKTGGGPPRGFKPPPPXTRPEKPPXPQGGNPQRQPGGPKEKPGGKRXKVQKNGGPKRGANPQPKKSXKKPPPQRAHGSSQCPPKTGKTPRGAHGSFAPREQTSEKLYPPP

SEQ ID NO: 206587 - protein, 360 aa, Zea mays
  Clone ID: MRT4577_119994C.1.pep
MIRTTTNMICCLLFQASLPASYWAEALHTATHLLNRLPSKAMSHPTPYFALYGTAPTYDHLRVFGCACYPNTSATTPHKLSPRSTRCLFLGYSSEAIHQLNVKNAFLHSTLTETVYCSQPTSFVDEARPDLVCQLNCSLYGLKQAPRAWYSHFASYLASIDFAEAKSDTSLFIYRRGDDTVFLLLYVDDIVLTASTADLLQRTIVALQLEFAMKDLGPLHHFLGITAERRPQGLFLHQRQYAVDILEQVGMSDCKPCSTPVDTQAKLSEDDGPSVADATSYRSLTGALQYLTFSRPAIAYAAQQVCLHMHTPREPHLIALKRILRYLRGSLDYGLLLRPSPTSELVVYTDADWAGCPDTR

SEQ ID NO: 206588 - protein, 118 aa, Zea mays
  Clone ID: MRT4577_119995C.1.pep
GTGETRQIARSRASPEGNRVKISRTVYSDRFIPSRTGSNLALFDLAPSPSSAASSSHSHDAGPAASSGSAQPAASPYCTLLRAALIGVFESVQPSDTDLGAKAPKDVKIQGVWYAQLE

SEQ ID NO: 206589 - protein, 1415 aa, Zea mays
  unsure (1)..(1415): unsure at all Xaa locations
  Clone ID: MRT4577_119996C.1.pep
MDASTTAATGTIAPAATGSEPAHGGGPYITGLGPLHASSPLPLHRTSPPGFPAFASPTWSHHVAPSTIPTTDPPLVSTLASIQAAVTASRERERAASLALERERALGAALTTQMATTQRLLGHPTLADAEPPEDPHASDLDADLIAALHAQAAGLHNIRALVSVVLDPASPHYSRWRGQVLLTLRRFVLDDHVLIDHDTPSPRSWCLMDSVVLSWLHGTITVELQDIIRDQADTARQAWLALEDQFLGNRDARALHLDAQFRLFSQGDLSVGEYCRQMKGLADSLRDLGEPVADRTLVLNLLRGLSPRYGHLKALIKRSVPFPTFHAVRNELLLEELTMANEAPTPASALYSAPTSGPPPSGGQATRPPSTGAPTRPPPAVPAAPRPTSTTDGGRRSRKGGRGSGGSSRGGPSDRGGGPAWPPFYNPWTGTIAMWPGQAPSTPRPPTPALLATPHYGTPPYGVPVVPQAPPALLAPGTHTSTPWSPPAGGWDSASLAAAFSTMAMTPPSSDWVIDSGASYHTTPTAGTLSRSHPPLPSHPSSIVVGNGSTLPVTSVGASVLPGPFYLNDVLVAPHITHNLLSVRRFTTDNSCSIEFDPSGFSVKDLATRTLLARCDSSGPLYTLQPXPPACLHLLPWSPXSSTTWHRRLGHPGPDVMTKITSSLDLSCSRGHFEGLCHACQLGRHTRLPFTTSSSRAEQAFDLVHCDLWTSPVLSLSGYKYYLVILDDFSHFLWTFPLRLKSDTFTTLTHFFTWVSTQFHRPVRALQCDNGREFDNNASRSFFLTHGVQLRLSCPYTSAQNGRAERMIRTTTNMLRCLLFQASLPASYWAEALHTATHLLNRLPSKAPLPTFRWLTPSHPYTTRSPSIATPGTSTPMVTRRAAGVLRPVDRLILVAATTSTPPDASPVPSSVRTALADPHWRRAMEEAYATLLANHTWDLVPRPSGTNVVTGKWLFRHKLTSDGSLDRYKACWVLRGFTQRPGVDYDETFSPVVKFATVRAVLSLALSRDWAIHQLDVKNAFLHGTLTETVYCSQPTGFVDADRPDLVCRLNRSLYGLKQAPRAWYSRFASYLASVGFVEAKSDTSLFIYRRGDDTVYLLLYVDDIVLTASTADLLHRTIVALQREFAMKDLGPLHHFLGVTAERRPQGLFLHQRQYAIDILERAGMSDCKPCSTPVDTQAKLSEDDGPPVADATSYRSLTGALQYLTFSRPDIAYAVQQVCLHMHTPREPHLTALKRILRYLRGSLDYGLLLRPSPTSELVVYTDADWAGCPDTRRSTSGYAVFLGANLVSWAAKRQPVVSRSSAEAEYRAVANGVAEASWLRQLLHELHSPLQRATLVYCDNVSAVYLSTNPVQHQRTKHVEIDLHFVRERVAAGDVRVLSVPTTLQFADIFTKGLPSSVFFDFRSSLNICTG

SEQ ID NO: 206590 - protein, 1470 aa, Zea mays
  unsure (1)..(1470): unsure at all Xaa locations
  Clone ID: MRT4577_119997C.1.pep
MDDSTTAATGTIAPAAIGSEPAHGGAPYIIGLGPLHASSPLPLHRTSPPGFPAFASPTWSHRVAPSTIPTTDPPLVSTLASIQAAVMASRERERAASLALERERALGAALATQMATTQRLLGHPTLADAEPPEDPHASDLDADLIAALHAQAVGLHNIRALVSVVLDPASPHYSRWRGQVLLTLRRFVLDDHVLIDHDTPSPRSWCLMDSVVLSWLHDTITVELQDIIRDQADTARQAWLALEDQFFGNRDARALHLDAQFHLFSQEGLSVGEYCRQMKGLADSLRDLGEPVADRTLVLNLLRGLSPRYGHLKALIKRSVPFPTFHVVRNELLLEELTMANEAPTPASALYTTPTSGPPPSGGQATRPPSTRAPTRPPPAVPAAPRPTSTTDGGRRSRKGGRGSGGSSRGGPSGRGGGPAWPSFYNPWTGTIAMWPGQAPSTPRPPAPALLAXLTTVHLLXVPVVPQAPPALLPPGTHTSTPWSPPTGGWDSASLAAAFNTMTMTPPSSDWVIDSGASYHTTPMAGTLSRSHPPLPSYPSSIVVGNGSTLPVTSVGASVLPGPFYLNDVLVAPHITHNLLSVRRFTTDNSCSIEFDPSGFSVKDLATRTLLARCDSSGPLYTLQXPPPPACXSTSCPGLHHXSTTWHRRLGHPGPDVMTKIISSLDLSCSRGHFEGLCHACQLGRHTRLPFTTSSSRAEQAFDLVHCDLWTSPVLSLSGYKYYLVILDDFSHFLWTFPLRLKSDTFTTLTHFFTWVSTQFRRPVRALQCDNGREFDNNASRSFFLTHGVQLRLSCPYTSAQNGRAERMIRTTTNMLRCLLFQASLPASYWAEALHTATHLLNRLPSKAVRHPTPHFALYGTPPSYDHLRVFGCACYPNTSATAPHKLSPRSTRCLFLGYSPDHKGYRCLDLTSHRIIISRHVIFDEDVFPLAGSTPPTDLDFLLESDSIPPPPPAPRLAPLPAPRAAPKTSSAPRAAPSTPPAPRAAPSTPPTPHAAPSILPAPRAAPPTSPAPRVAPSILPAPRAAPSTPARFANPALVYHXAATPPXAPPDSSPSTSAARFADPAVVYHRREPAPPAAPDVPAXLRVVCIPPGRHPPRXRHVHPMVTRRAAGVLRPVDRLILAAATTSTPPDASPVPSSVRTALTDPHWRRAMEEEYAALLANHTWDLVPRPPGTNVVTGKWLFRHKLTSDGSLDRYKARWILRGFTQRPGVDILERAGMSDXASPAPRLSTLRRSSXEDDGPPVADATSYRRFTGALQYLTFSRPDIAYAVQQVCLHMHTPREPHLTALKRILRYLRGSLDYGLLLRPSPTSELVVYTDADWAGCPDTRRSTSGYAVFLGANLVSWAAKRQPVVSRSSAEAEYHAVANGVAEASWLRQLLHELHSPLQRATLVYCDNVSAVYLSTNPVQHQRTKHVEIDLHFVRERVAAGDVRVLSVPTTLQFADIFTKGLPSSVFLDFRSSLNICT

SEQ ID NO: 206591 - protein, 119 aa, Zea mays
  Clone ID: MRT4577_119998C.1.pep
MQLLNAGLMGYETSDYARDFLYRCSRSLGLHYESKRGYIGIDYFGRTVFLKILSVGVHIVLLELCLKSTATGSKVQEIEQRNKDRILLLGVDDMDIHKRIRMQLLALELFLDRNPKIRE

SEQ ID NO: 206592 - protein, 718 aa, Zea mays
  unsure (1)..(718): unsure at all Xaa locations
  Clone ID: MRT4577_119999C.1.pep
AVSHPTPHFALYGTTPSYHHLRVXGCACYPNISATAPNKLSPRSTRCLFLGYSPDHKGYRCLDLTSHRIIISRHVVFDEDVFPLAGSTPPTDLDSLLESDPVXPTPGAPSCAVTCSSCSHDATAHAHFRTTRGPVDPACATRGHDDHVCVTRGPVDLACATRNPVDHACATRGPVDPACATRGPVDPACVTRGPVDPGSLRQPHARLPPXRGHATTSAPPDSGPSTSATRFADPAIVYHCREPATPAALDVPAVRSEPSVYHPVAIHRDPGHVHPMVTRRAAGVLRPVDRLILAADTSSTPPDASPVPSSVRTALVDPHWRRAMEEEYAALLANHTWDLLTSDGSLDRYKARWVLRGFTQRPGVDYDETFSPVVKFATVRAVLSRALSRNWAIHQLDVKNAFLHGTLTETVYCSQPTGFVDTDRPDLRRGDDTVYLLLYVDDIVLTTSTADLLHRTIVTLQREFAMKDLGPLHYFLGITAERRPQGLFLHQRQYAIDILERAGMSDCKPCSTPVDTQAKLSEDDGPPVADATSYRSLAGALQYLTFSRPDIAYVVQQVCLHMHTPREPHLTALKRILRYLRGSLDYGLLLRPSPTSELVRHHVVSRSSAEAEYRAVANGVAEASWLRQLLHELHSPLQRATLVYCDNVSAVYLSTNPVQHQRTKHVEIDLHFVRERVAAGDVRVLSVPTTLQFADIFTKGLPSSVFLDFRSSLNICTG

SEQ ID NO: 206593 - protein, 98 aa, Zea mays
  unsure (1)..(98): unsure at all Xaa locations
  Clone ID: MRT4577_11999C.1.pep
LEKLQGTLFSTEDESSKPLVQNYRELQPLNQRMVFAXIIHAGSSYTTGEMLSLGXVGILVGCLCLLLAVYLIAIKIRKKRLENRESVVFSSAQATTEA

SEQ ID NO: 206594 - protein, 104 aa, Zea mays
  Clone ID: MRT4577_1199C.1.pep
RELRSSVTAGRPSCAHRSTSSRWSASAFRPRTSALSRQASLRSATPSSLQSLAPGRQVGHFGASLGQLLVRSKQHGSVALQCFPDPPFAAGEDGLSNRPQHEIM

SEQ ID NO: 206595 - protein, 65 aa, Zea mays
  Clone ID: MRT4577_119C.1.pep
ESMIINQSLRLTLSVNKPSTGMTWYMMISRWSKYLMDTGLTYISFYLNSYYCIHDTIWSMSLPCM

SEQ ID NO: 206596 - protein, 83 aa, Zea mays
  unsure (1)..(83): unsure at all Xaa locations
  Clone ID: MRT4577_11C.1.pep
RRRCEAEVGLRVRASSVVVCLAIEVAAVLVSVSAXQKFGVNYGQVAKNLPDPTQVATRLRIGNVNKVKLYDADPRGLTAFANT

SEQ ID NO: 206597 - protein, 107 aa, Zea mays
  Clone ID: MRT4577_120000C.1.pep
NPNQINPPFEIPNGQNPTPTLPAVDTPMPTGTTYLLAPPTSGVEVMSRRPRTPGARALTSQVAHWLKRRQSICDYDIIVKCASSREKASLSELRCAERQWHWVFRGH

SEQ ID NO: 206598 - protein, 107 aa, Zea mays
  Clone ID: MRT4577_120001C.1.pep
RPGVDYDETFSPVVKFATVRVVLALSWDWAIHQLDVKNAFLHDTLMGFVYCSQPTGFVDVARPDLVCRLNRSLYGLKQAPRAWYSRFTSYLAYIGFVEAKSDTSLFI

SEQ ID NO: 206599 - protein, 298 aa, Zea mays
  Clone ID: MRT4577_120002C.1.pep
LEAALARISAEACGGSEGGEGVVDKEDQRWREALDRNRDIADALKILPANSLSCKKVERRSCISLEEFICNYFLRDTPVIISGTIDHWPARTKWKDIEYLKKIAGDRTVPVEVGKNYVCSEWKQELITFSQFLDRMSSTVCPSNLTYLAQHPLFEQIKELSEDIIVPEYCYAGGGELQSLNAWFGPEGTVTPLHHDPHHNILAQVLGRKYIRLYPAFIAEDLYPHTETMLSNTSQVDVDNIDLKEFPRVENLEFIDCILEEGDLLYIPPKWWHYVRSLSTSFSVSFWWRAAVQPSGGS

SEQ ID NO: 206600 - protein, 328 aa, Zea mays
  Clone ID: MRT4577_120003C.1.pep
RTIVALQREFAMKDLGLLHHFLGITAERRPQGLFLHQRQYAIDILERADMSDCKPCSTPVDTQAKLSEDDGPPVADATSYRSLTGALQYLTFFRPDIAYVVQQVCLHMHTLREPHFTALKRILRYLRGSLDHGLLLRPSPMLELVVYTDADWAGCPDTRRSTSGYAVFLGANLVSWAAKRQPVVSCSSAEAEYRAVANGVAEASWLRQLLHELNSPLQRATLVYYDNVSAVYLSTNPVQHQRTKHVENDLHFVRERVAAGDVRVLSVPTMLQFADIFTKGLPTSVFLEFRFSLNICTGQSCDCGGVRLSLCNGPGPSTLIYQYNSNPG

SEQ ID NO: 206601 - protein, 42 aa, Zea mays
  Clone ID: MRT4577_120004C.1.pep
EESYGNSMKTRFYSIHGDFVNISFQKKKKKKKKKSTLRCYHC

SEQ ID NO: 206602 - protein, 69 aa, Zea mays
  unsure (1)..(69): unsure at all Xaa locations
  Clone ID: MRT4577_120005C.1.pep
MAAGAALQPAWARGPGERGPAQAQQPRRRSSLARGADHGPTRRGCGGPVAWPPXLAWGPARVSGHGTGA

SEQ ID NO: 206603 - protein, 155 aa, Zea mays
  Clone ID: MRT4577_120006C.1.pep
RSFGRSFRGDTAWCGHFLRYEWTCRVFQFPCVVVGGFHFQRVVPVLYARGCRRHRGRDSRLGVRHLVDPVELWGPFRPRPRLFPGFQRGPPAPPFRGGNRPPGVWLLVNRGGLRGCRGLFPPHLSPGFRGFPPPCGFCCLWGFSSFLLCKHRPIK

SEQ ID NO: 206604 - protein, 86 aa, Zea mays
  unsure (1)..(86): unsure at all Xaa locations
  Clone ID: MRT4577_120007C.1.pep
TXSEFPRRAXHXFLXXXRXPFFFFFFFFLSXDVHXDDLEKKPHTPSIPXSKQKKKMWTRTGKKSQLFKGTPQKLLLAVTSHRAPLP

SEQ ID NO: 206605 - protein, 43 aa, Zea mays
  Clone ID: MRT4577_120008C.1.pep
PYSQTPSSRIQRSVDPDLVTNAKNHSSMVMQASSPIVLTAEMG

SEQ ID NO: 206606 - protein, 57 aa, Zea mays
  Clone ID: MRT4577_120009C.1.pep
MVSRRVPKKLFRREGSEHTNYQSGSKTATGETAAEKKGFQQQLHMKKSKPKKQSTKR

SEQ ID NO: 206607 - protein, 94 aa, Zea mays
  unsure (1)..(94): unsure at all Xaa locations
  Clone ID: MRT4577_12000C.1.pep
IVFLADQFLTSASFLPTEPTVQLIISSHISKSKAENYRAQILQAFESVLRSAIILEIRYESKNDAKPGHTPSMFPYPENDSTLXRXSFTKHSPL

SEQ ID NO: 206608 - protein, 65 aa, Zea mays
  Clone ID: MRT4577_120010C.1.pep
PPFRGLPEVRGRAFKSIFFTKTVEWCTGMLWPMFFQVGPGRFMFKIFLKTALVCCSKFFWFYQIS

SEQ ID NO: 206609 - protein, 99 aa, Zea mays
  unsure (1)..(99): unsure at all Xaa locations
  Clone ID: MRT4577_120011C.1.pep
SWNSLSTARRKPRNRQPTNLPSQPXHTAAPSPDLAXRAALRPSPVPRLDPPATNSDGSSTLAVYPPALESNRSNSVAHLQQMESRENNMGSNDGPNSLC

SEQ ID NO: 206610 - protein, 111 aa, Zea mays
  Clone ID: MRT4577_120012C.1.pep
GNPTPGKIWKLFFKSRGIVGPGHVKPPRCPELKWRKGPRVLVPPLPLYNKTNNGPGGLKISGPHHPRGSKTFSPNDKGGYFYPPVGPRGREKTQRGPPAKKKKNLWGVGSG

SEQ ID NO: 206611 - protein, 56 aa, Zea mays
  Clone ID: MRT4577_120013C.1.pep
PYYPVIPPNVYTPHKKTTFISQPATNKHHFPLKILTDHLLSFTQKHAQLYSYQDFN

SEQ ID NO: 206612 - protein, 51 aa, Zea mays
  Clone ID: MRT4577_120014C.1.pep
RTHADDPVRASLSLMHKVTSMHLNDPLITTYSLREPCGYSTNTTCEAELLA

SEQ ID NO: 206613 - protein, 49 aa, Zea mays
  Clone ID: MRT4577_120015C.1.pep
IHMQSNCLAGESVHMSTSSVALAHQRVDEHRPHIICCTYVHSLPHRALI

SEQ ID NO: 206614 - protein, 198 aa, Zea mays
  Clone ID: MRT4577_120016C.1.pep
MWISDSAFVEPSSSSPSASASPPPSPPPARLLRQRNRRRRRSSRKQGSASAVDGVADPEAEDVWRGAQWEAAWPARRDSKPVVLAGGDDAVGRSRSLTDDDLEELKGCADLGFGFNYDEIPELRSTLPALELCYSMSQRLQLDDEKPQQHEAAAPDAATPSPPVTNWKISSPGDSPDEVKARLKYWAQAVACTVRLCS

SEQ ID NO: 206615 - protein, 105 aa, Zea mays
  Clone ID: MRT4577_120017C.1.pep
ADVVLCNTFEDLEPDIFGAHSPAAASILPIGPLRTWQRRTSEAPAGHFWRADDEACASFLDAQPRGSVTYVAFGSLTVMSPAQLQELALALLASARPFLWVFRPG

SEQ ID NO: 206616 - protein, 190 aa, Zea mays
  unsure (1)..(190): unsure at all Xaa locations
  Clone ID: MRT4577_120018C.1.pep
ASSISLFLTSSPTLPAXMDPAVERLKTGFEKFKTEVYDQKPDLFEPLKAHQSPKYMVFACADSRVCPSVTLGLEPGEAFTVRNIAAMVPSYCKNKHTGVGSAIEYAVCALKVEFIVVIGHSRCGGIKALLNLKDGTDDTFHFVEDWVRIGYPARKKVKDECSEMPFEEQCGVLEKEAVNVSLQNLSTYPF

SEQ ID NO: 206617 - protein, 35 aa, Zea mays
  Clone ID: MRT4577_120019C.1.pep
KSNSITRKDRHKQAEHMVTLIVLATNDYSVQTDAW

SEQ ID NO: 206618 - protein, 80 aa, Zea mays
  Clone ID: MRT4577_12001C.1.pep
MDSSALSNPRLMALIEEEKKRAMANELVAKLTFVCWDKCVTGSVGSSLSRSETSCLSNCAKRFAEVKMMALQRFTTTGRG

SEQ ID NO: 206619 - protein, 52 aa, Zea mays
  Clone ID: MRT4577_120020C.1.pep
LIRASSNPWTPWSPSYILSGWPLLSITSSQLVLLATKNWAPPFYYILTQQAF

SEQ ID NO: 206620 - protein, 132 aa, Zea mays
  Clone ID: MRT4577_120021C.1.pep
KGVLFFKRLGEPPLVFSPPGPCPIRGAPRAARKEFLVSPNPPKTPVPFQMDGPGTMPVVKEIFGLDVVERVPQKVFSPRAGPNPAKALIPPAPGGRWGPPQKYVCCPYVPPVPVQGKKIGGTPGLRGAIPSF

SEQ ID NO: 206621 - protein, 59 aa, Zea mays
  Clone ID: MRT4577_120022C.1.pep
SSATQGSQVGKEKVMHLSNLRINNDASIPRHGHGVGLLAVSIFFHRQPRLRGRGTPSPP

SEQ ID NO: 206622 - protein, 50 aa, Zea mays
  Clone ID: MRT4577_120023C.1.pep
PTRPLVLDRGSAALDLTHTGRAHYLLLCYHLQYTKPYFMFLVLLKALACY

SEQ ID NO: 206623 - protein, 156 aa, Zea mays
  unsure (1)..(156): unsure at all Xaa locations
  Clone ID: MRT4577_120024C.1.pep
VERIRLLVPAHLTERPPSLNXRSLSSLCRRXASALPWCAREISPGAPAVXNEVVEITKALNVKYXFDMKTALIIVDQGLHSXVXYPPKYGVIPRTLREYCDPMTWXILMLVPVVPATCLIGRQRVLMPLSDLGGSDAYSIXAMCAVCSEYRLCHDI

SEQ ID NO: 206624 - protein, 67 aa, Zea mays
  Clone ID: MRT4577_120025C.1.pep
PNTQTKSLVTFAFTSHHEHSKLLGPNTFSDTQFQDPLLDPTILLLLLLAHLISFYIHQQFYPTNLFY

SEQ ID NO: 206625 - protein, 48 aa, Zea mays
  Clone ID: MRT4577_120026C.1.pep
SRPAWGCKLSLNFTATLPQRNQPCAQSIARGTRMNCFVRMDDFSVETS

SEQ ID NO: 206626 - protein, 63 aa, Zea mays
  Clone ID: MRT4577_120027C.1.pep
QHRKHNCVPTMAAKGCCLLMLVGLPQSPVPPPIFHHSYQLPYTFLFTPYLLPTVCFGFENPIF

SEQ ID NO: 206627 - protein, 193 aa, Zea mays
  Clone ID: MRT4577_120028C.1.pep
PTRPPTRPCGPGHADCSAIQPGGACYQQNNLPAIASYAYNDYYQEMASTGATCSFNGTATTTTNDPSSGSCVFAGSSTAGSSSNSSVPVGASPPTSLSPPTGFAPPVGSSPPSSSSEFSPPAVGTAPLSGFTPPDGGGFGTPPGSFNGTGTFGPSGTLSPYNGGAPGLSRAGLSLTALSAAAVAVLLASIDAM

SEQ ID NO: 206628 - protein, 102 aa, Zea mays
  Clone ID: MRT4577_120029C.1.pep
VRPNIKKTRHAGAMTAPGHQIKKKAFSCRSRQPSNSCSTIHSGTVAHVRNDWYREQALDPHQNSLSREVESRRIQNQDLNNAIQTHLTNSVEVLSRVRPNIT

SEQ ID NO: 206629 - protein, 88 aa, Zea mays
  Clone ID: MRT4577_12002C.1.pep
YACCPVGFPGRPRFLAAVSPLARVHQFDERRRVGRAGSHVFLRIGYWLLFSIGWSAGPKFPYSNQGRWFVHDFFGCSGFLSLCLRRYR

SEQ ID NO: 206630 - protein, 297 aa, Zea mays
  unsure (1)..(297): unsure at all Xaa locations
  Clone ID: MRT4577_120030C.1.pep
LNSRLACCATHAAGYVCNECVWNTLGTFGQVLECWDKERKEMVAIKIIRGIKKYRDAAMIEIGMLEQLGKYDEXVDLVMHELCLIHTDLKPENILLVSPEYIKVPDYKVSSRSPKEGSYYKRVPKSSAIKVIDFGSTTYDQQDQSYVVSTRHYRAPEVILGLGWSYPCDIWSVGCILVELCTGEAIFQTHENLEHLAMMERVLGPLPYHMFKRADRHSDKYIRKGRLNWPEGCTSRESMKAVMKLSRLQNLVMQNVDQAAGDFIDLLQGLLKYDPSSRLTAREALRHPFFTQGFWRR

SEQ ID NO: 206631 - protein, 103 aa, Zea mays
  unsure (1)..(103): unsure at all Xaa locations
  Clone ID: MRT4577_120031C.1.pep
PSDPPFATKTPTRPASIAFYFEFLSSVKIVAEDVPAADKAPAGKKPKXTKRVPAGKSAAKECGDGKRGKKKGKKSVETYKIYIFKVLKQVHPDIGISSKAMSI

SEQ ID NO: 206632 - protein, 91 aa, Zea mays
  Clone ID: MRT4577_120032C.1.pep
KQIQVSSQSPKEGSYYKQLPKSSAIKVIDFGSTTYDQHDQSYVVSTRHYRAPEVILGHGWSYPCDIWSVGCILVELCTGEALFQTHENLEH

SEQ ID NO: 206633 - protein, 128 aa, Zea mays
  unsure (1)..(128): unsure at all Xaa locations
  Clone ID: MRT4577_120033C.1.pep
MYLHMDRSIKDLCGNVRSDIIQQKGCSDRGLIYNEHDEPVHRNLFIMNMYQPCDVVDEYNLNNGEHGHADWHFEAVDVGDGKNLYDLVPXGHNCYIPHVSRTDYLVLGISNDGYGIVITLHGYSDGDL

SEQ ID NO: 206634 - protein, 268 aa, Zea mays
  unsure (1)..(268): unsure at all Xaa locations
  Clone ID: MRT4577_120034C.1.pep
MTGMGIMFLXVGDNLTSRYKINAKMGEGTFGQVLECWDKERKEMVAIKIIRGIKKYRDAAMIEIGMLEQLGKYDESRSRFXSRSPKEGSYYKRVPKSSAIKVIDFGSTTYDQQDQSYVVSTRHYRAPEVILGLGWSYPCDIWSVGCILVELCTGEAIFQTHENLEHLAMMERVLGPLPYHMFKRADRHSDKYIRKGRLNWPEGCTSRESMKAVMKLSRLQNLVMQNVDQAAGDFIDLLQGLLKYDPSSRLTAREALRHPFFTQGFWRR

SEQ ID NO: 206635 - protein, 184 aa, Zea mays
  unsure (1)..(184): unsure at all Xaa locations
  Clone ID: MRT4577_120035C.1.pep
ERLVCLGPLPTHAECACTVASTTTQTPGGNRAXYCCHNGSECSLADACCSGLYSYWNIEQLTTFXSGQTQFLNLGAHCDPGCDRCTGQSSDIHTCHTLGIKELLYIGGDSGSCGLFYTDDTNSGADYLWDNLLGGRGSDRPLGARWLDGIYFDIENGQPEHYNDLVNALKXKESVLLTARPACP

SEQ ID NO: 206636 - protein, 230 aa, Zea mays
  unsure (1)..(230): unsure at all Xaa locations
  Clone ID: MRT4577_120036C.1.pep
NTLGTFGQVLECWDKERKEMVAIKIIRGIKKYRDAAMIEIGMLEQLGKYDESRSRFXSRSPKEGSYYKRVPKSSAIKVIDFGSTTYDQQDQSYVVSTRHYRAPEVILGLGWSYPCDIWSVGCILVELCTGEAIFQTHENLEHLAMMERVLGPLPYHMFKRXVRFMQLSHIICLRGQGYLNISAVRSGRCLVLINXVCSRHSDKYIRKGRLNWPEGCTSRESMKAVMKLSR

SEQ ID NO: 206637 - protein, 55 aa, Zea mays
  Clone ID: MRT4577_120037C.1.pep
REKKKPLFLRQVHSVFQLKSVHAALVSQDLAQGRIRISIRFRAGLLTVRPSPGSA

SEQ ID NO: 206638 - protein, 351 aa, Zea mays
  Clone ID: MRT4577_120038C.1.pep
LNSRLACCATHAAGYVCNECVWNTLGTFGQVLECWDKERKEMVAIKIIRGIKKYRDAAMIEIGMLEQLGKYDESRSSCVQIRNWFDYRNHICIVFERLGPSLYDFLRENSYRSFPIALVREIAKQLLECIAFMHELCLIHTDLKPENILLVSPEYIKVPDYKVSSRSPKEGSYYKRVPKSSAIKVIDFGSTTYDQQDQSYVVSTRHYRAPEVILGLGWSYPCDIWSVGCILVELCTGEAIFQTHENLEHLAMMERVLGPLPYHMFKRADRHSDKYIRKGRLNWPEGCTSRESMKAVMKLSRLQNLVMQNVDQAAGDFIDLLQGLLKYDPSSRLTAREALRHPFFTQGFWRR

SEQ ID NO: 206639 - protein, 90 aa, Zea mays
  Clone ID: MRT4577_120039C.1.pep
IYYNFTHETTITIISTTFLPTSNPLLTTHQYNPLPPQHISTFVPLNRHTLSLFLFFYHLSQVFIMSMHILLVHTTHDNVCLRLTPLPRDC

SEQ ID NO: 206640 - protein, 80 aa, Zea mays; identical to SEQ ID NO: 206618
  Clone ID: MRT4577_12003C.1.pep

SEQ ID NO: 206641 - protein, 246 aa, Zea mays
  unsure (1)..(246): unsure at all Xaa locations
  Clone ID: MRT4577_120040C.1.pep
MECVTDMPLATLDSRPRKRQRLGWDVVPAEMYQVTRPRLGWDVGPAEMNQFALCGQEVVNAFSAAVLGLSSGCVSSQVNQEQPHDGSPPLREDDKNGHYVFAVGDNLTPRYKINAKMGEGTFGQVLECWDKETKEMVAIKIIRGIKKYRDAAMIEIGMLEKLGKYGESXIQVSSQSPKEGSYYKQLPKSSAIKVIDFGSTTYDQHDQSYVVSTRHYRAPEVILGHGWSYPCDIWEXGCILVELCTG

SEQ ID NO: 206642 - protein, 69 aa, Zea mays
  Clone ID: MRT4577_120041C.1.pep
NSDASQNASSSSLVLFNSHPPLRGVITCFIFLFTLTLVQHQSLFLLFICTFSEFNLITYLSPQDMRICC

SEQ ID NO: 206643 - protein, 210 aa, Zea mays
  unsure (1)..(210): unsure at all Xaa locations
  Clone ID: MRT4577_120042C.1.pep
CVAVMHELRLIHTDLKPENILLVSPEYIKVPDYKVLFXYLIHLPKIYLVLCLFFYCVLVAGVEKYGTDPLFSFARSHPXPKEGSYYKQLPKSSAIKVIDFGSTTYDQHDQSYVVSTRHYRAPEVILGHGWSYPCDIWSVGCILVELCTGEALFQTHENLEHLAMMERVLGPLPYHMLKMADRHSDXYIRKGRLNWPEGCTSRESMKAVMK

SEQ ID NO: 206644 - protein, 520 aa, Zea mays
  unsure (1)..(520): unsure at all Xaa locations
  Clone ID: MRT4577_120043C.1.pep
LNVSGLWNTPGTFGQVLECWDKETKEMVAIKIIRGIKKYRDAAMIEIGMLEKLGKYGESRSRXLLVQLAPICVLTFIRLLVYKLVYFXCVQIRNWFDYRNHICIVSTLLDYDNYALTQKYNHMVLKRWXFGLMVSXFERLGPSLYDFLRKNNYRSFPIALVREFAKQLLECXHVCAQFFLLPLLHYNAYTLVLCIICAALQPVINPLLMLVLQGVSNIMXFLYLPSLCXVAVMHELRLIHTDLKPENILLVSPEYIKVPDYKVYLVLLYLIHLPKIYLVLCLFFYCVLVAGVEKYGTDPLFSFARSXQSPKEGSYYKQLPKSSAIKVIDFGSTTYDQHDQSYVVSTRHYRAPEVILGXIVSIEKLFLVQLDLVIFYDCVDLXGHGWSYPCDIWSVGCILVELCTGEALFQTHENLEHLAMMERVLGPLPYHMLKRADRHSDKYIRKGRLNWPEGCTSRESMKAVMKLSRLQNLVMQNVDQAAGDFIGLLQGLLKYDPASRLTAREALRHPFFTEGFGRRR

SEQ ID NO: 206645 - protein, 56 aa, Zea mays
  Clone ID: MRT4577_120044C.1.pep
MKKLYQGGKGRRVHPAPADASAAVALPAAVLALASALTAEEQEVLAYLLSCGGGGE

SEQ ID NO: 206646 - protein, 56 aa, Zea mays
  Clone ID: MRT4577_120045C.1.pep
MHEQCCGACFLWVCIRVEWLVLIHGGSICVFFNWCVVYECMLSLPYVFFLTVIYFL

SEQ ID NO: 206647 - protein, 377 aa, Zea mays
  unsure (1)..(377): unsure at all Xaa locations
  Clone ID: MRT4577_120046C.1.pep
GFYVFAVGDNLTSRYKINAKMGEGTFGQVLECWDKETKEMVAIKIIRGIKKYRDAAMIEIGMLEKLGKYGESRSSCVQIRNWFDYRNHICIVFERLGPSLYDFLRKNNYRSFPIALVREFAKQLLECIAFMHELRLIHTDLKPENILLVSPEYIKVPDYKVSSQSPKEGSYYKQLPKSSAIKVIDFGSTTYDQHDQSYVVSTRHYRAPEVILGHGWSYPCDIWSVGCILVELCTGEALFQTHENLEHLAMMERVLGPLPYHMLKRAEYVPYQCKSEHQCCEVXDILCLLILVCSRHSDKYIRKGRLNWPEGCTSRESMKAVMKLSRLQNLVMQNVDQAAGDFIGLLQGLLKYDPASRLTAREALRHPFFTEGFGRRR

SEQ ID NO: 206648 - protein, 66 aa, Zea mays
  Clone ID: MRT4577_120047C.1.pep
DFSNFATLRQLAIDKVQPVVISLKLGTLIQYLSGSSLRMLSVGEESCEYFRTMESMCASDLTDLIA

SEQ ID NO: 206649 - protein, 80 aa, Zea mays
  unsure (1)..(80): unsure at all Xaa locations
  Clone ID: MRT4577_120048C.1.pep
EPLCSQAPIAWPVTPYLSSIIGXISENPALXPYRLQQAIATRNIPLSPLLLEQSPALSSVQSLVQTIRAQQLQQLVLPLI

SEQ ID NO: 206650 - protein, 42 aa, Zea mays
  Clone ID: MRT4577_120049C.1.pep
VTVVDFSLDLDGRPVRLLCSNFINNSSIHNEFALHHPLLEVC

SEQ ID NO: 206651 - protein, 80 aa, Zea mays; identical to SEQ ID NO: 206618
  Clone ID: MRT4577_12004C.1.pep

SEQ ID NO: 206652 - protein, 35 aa, Zea mays
  Clone ID: MRT4577_120050C.1.pep
RYEHKLFSRHLWPMRHLKHVPYYLLEVTFNSNGQF

SEQ ID NO: 206653 - protein, 587 aa, Zea mays
  unsure (1)..(587): unsure at all Xaa locations
  Clone ID: MRT4577_120051C.1.pep
SRLWNXEHREASSTGFINKDVGPWNAESSGYEMGQEHSNQVLASDGSQSLKSSVWGRITSKRKPGGNNTAKSTPTSITGNQKSDYDDMAISTGQVKSAAKDTNGQPNSRIYGDVGWQSNRAAQKASRTLYVNGIPQESNRCETLLSHFQKFGQVIDIYIPSNSEKAFVQFSRREEAEAALKAPDAVMGNRFIKLWWANRDRVLDVGEGRISQKPSQLSTTPANSYPNRVKENVQPTAPGPSSGSSAELLSSGTPSSRMLPASSAKAVPPHAPKRQEGLELLEELRKKQEILAQKRDEFRRQLEKLTKQKGSANSVKHAETGGKEIASNDASQVKDAASTRVEGSQETAGSLEKRSSGEFALLSQKSAAISTQKPVVVTKQTTLPAPPQNRFKLDNRTTSFRILPPLPPEIANESVLADHFSSFGDLSSVVLEDTEAHNLDATLKPSLSCSACVTYTTRQSAEKAFIGGKSCKGHTLRFMWLTASPGSNNHYRHQNTSVHVRPSTIPGHTQSISSESPSPVGKVSSLATSVMVAIPHNKSISTVENTKTSPAGVSKVSCGSSSLSSNDKCPSECGSTRNVISDSDVPQ

SEQ ID NO: 206654 - protein, 159 aa, Zea mays
  unsure (1)..(159): unsure at all Xaa locations
  Clone ID: MRT4577_120052C.1.pep
MAPAAATIAVLGDDILQEVFILLPTPADLLRAALACQPFLRVARSAAFLRRFRRRHPSTCPVILGCLLYRPSKRRGASAPYLLPADLLRATHRTIEGGDFALSFLPRRXRPDGAGIPWRLLDCRNGSLLLRDGASGELAVADPLTRRWVSLPALPGGRR

SEQ ID NO: 206655 - protein, 63 aa, Zea mays
  Clone ID: MRT4577_120053C.1.pep
GASTRRMVVLCNAAYGLLVKVRVYPICTKFKKKTSILSSVKTVCDCSAPQNIPAFASASLHDL

SEQ ID NO: 206656 - protein, 129 aa, Zea mays
  unsure (1)..(129): unsure at all Xaa locations
  Clone ID: MRT4577_120054C.1.pep
ANLIGGFICALAAAYPRTRGPLGRXEPSEIYHFEDLIQRQAINVAINMLITFAIAQNFLVMLRHLKIGLFFFFAAFVLIMTIFIAKLLPETKNIPIEEMHTDWRSXWFRSKIVPHADDHPKPDAAQSLK

SEQ ID NO: 206657 - protein, 256 aa, Zea mays
  Clone ID: MRT4577_120055C.1.pep
RTRGIGGTNIRNEANQLLKGVNLLVATPGRLLDHLRNTKSFNYKRLQCLIIDEADRILEQNFEEDMKQIFKRLPQDRQTVLFSATQNQKVVEFANFTFGQNEERQKKLVYVGVDDSKLKPTVEGLQQGYCVIPSEKRFLVLYAFLRRMQLRKEDLKVMVFFSSCSSVKFHAEFLNFLGVGCYDIHGQQKQQKRTSTFFQFLKEKNGILLCTNVAARGLDIPDVDYIVQFDPPDDPKDYIHRVGRTARGDKGKGSAL

SEQ ID NO: 206658 - protein, 48 aa, Zea mays
  Clone ID: MRT4577_120056C.1.pep
ADVNLVPYQSPLPYQLGDTKYLCLLMLLVLTTKYCYLSIFSQCPQDTI

SEQ ID NO: 206659 - protein, 55 aa, Zea mays
  Clone ID: MRT4577_120057C.1.pep
MLPPNQKISCVNIMGKKKKKKGKKKKKKKKKKKKKKKKKKKKKKKKKKKKRGGAF

SEQ ID NO: 206660 - protein, 193 aa, Zea mays
  unsure (1)..(193): unsure at all Xaa locations
  Clone ID: MRT4577_120058C.1.pep
SHVLSTGVYTXQDNATAHVKGGAIXVVIYDPSXIAPMFDDDINNDNYTFVVNISSNTNCITNFLNAIDNVIHDNYGIITALITTVHAITATHKTLDRPXTNDWTGSWNIIFNIIPSSTGAAKAVAKVIANLNGKLTGMSSRDPTVDDLDVDLTNRIYNEDFYKDIKXAIKGAFKGITQDIIGYLEDDLFFTDF

SEQ ID NO: 206661 - protein, 135 aa, Zea mays
  Clone ID: MRT4577_120059C.1.pep
MAMRGNNVKTFVMMLVVVGVVAMEQTQQVQASHCCCDLKSVDTYFTCRQKSDSTVSDCCGASAGYISDAAGFECKPGYIDIETALQAVNYCKLGCTASLCNKVTLSGKDATERCTSGCHDLCTKNNAEIAQVVMA

SEQ ID NO: 206662 - protein, 450 aa, Zea mays
  unsure (1)..(450): unsure at all Xaa locations
  Clone ID: MRT4577_12005C.1.pep
MATAAADCRTRTVLKAALSRTTAAFLFVSVVAVGVVVSGRWITATTAGRLRRLPTTAAIPAAAAVLHPSETQQLQPPRPYSTPPPSRPPSPSYSISCPSLNLSSPAKAPKTSQTLARALSSPSICPASPSPPPPYSAASLSSNTSCPSYFRFIHEDLRPWRAAGGITRAMLDRAXLTATFRLVVLGGNAYVQRFRPAFQTRDLFTIWGVLQLLRRHPGRVPDLDLMFDTVDWPVVRSHLYRGKNAEMLPPLFRYCGDDKTLDIVFPDWSFWGWPEINIKPWDALKEDLKAGNNRVRWMDREPYAYWKGNPSVSATRKELVKCNVSSTHDWNARIYAQDWFKESKAGYKDSDLSSQCAHRYKIYIEGSPWSISEKYILACDSMTLLVTPRYYDFFSRSLMPIQHYWPVRDDNKCASIKYAVDWGNSHKQLVTCIYIYFVIYICRLYSSAKH

SEQ ID NO: 206663 - protein, 102 aa, Zea mays
  Clone ID: MRT4577_120060C.1.pep
LGPSRPAGIVYCTPLPDMLSPGMATRACRRLLYRRATTASLSWLLRYGTRSTKTMMSPTVSLSAPPLPPAVPLPDGAPPPSQNATTSRALTSASTMHPWTPR

SEQ ID NO: 206664 - protein, 245 aa, Zea mays
  Clone ID: MRT4577_120061C.1.pep
MASSACLLQASTAFAPRFSLPSRPQPPLHLRLRGSPNRRRGVSLTASSAASPEVEKESSPSSSPQESLSAVADSVKVLKVAAKTRKVPAPEILSALSKIKKAKLDTSAFFETLGGTESPGRTWMLIFTAKGRLEKGQYFPVTAVQRFDAAGKRIENGIYLGPIGCLTFEGRLSWKKKILAFVFERVRVKVGPFGPLEISLGSGDGGREPSTKDPFFVWFYVDEEIAVAQGRGGGVAYWCRCQRVP

SEQ ID NO: 206665 - protein, 30 aa, Zea mays
  Clone ID: MRT4577_120062C.1.pep
RLLQCVFVPGISYGPVNVCGVAILAFYVCG

SEQ ID NO: 206666 - protein, 92 aa, Zea mays
  Clone ID: MRT4577_120063C.1.pep
LVWKGNSSILSRLQSCLLGLQCYLSQRLHCNSQWPIALCVSRFGLPDHHTCRVRHQSCGKHCLSVEVRLKQRAISFVTMHVPVSHRDLSHAK

SEQ ID NO: 206667 - protein, 108 aa, Zea mays
  unsure (1)..(108): unsure at all Xaa locations
  Clone ID: MRT4577_120064C.1.pep
LARVGVSPLDPYTHHAAIRLYIMHLVIEHSYAQDGWLETEFLSVAPSTLRXWWQGLLMQLKMALSPSSEVSRLSNHIEHSIKRASQGSVILPQSQSVDSISSRDRFSS

SEQ ID NO: 206668 - protein, 62 aa, Zea mays
  Clone ID: MRT4577_120065C.1.pep
TKNNQFIYWKKLCITPYSVGNINRDIRIDILASGYFLSTGVRFPTIECMIRLHIYMHISCVL

SEQ ID NO: 206669 - protein, 54 aa, Zea mays
  Clone ID: MRT4577_120066C.1.pep
FSVNIKIRVWNLFQNHLHFIIDHTLAMNHMILFCYKITSPTIQILKITLKIIPY

SEQ ID NO: 206670 - protein, 123 aa, Zea mays
  Clone ID: MRT4577_120067C.1.pep
LEPLNFRVIVYLSGPWTYPLLFHLQILSELHPLWYLYPWFLCTFTSSLTFLFGITFSPCNIHTLTFMLTLNLPLKAFFLPSLFEDNVLPIFPLTAPPSLTPCKFLLKYILYCVFGHYYLNTCH

SEQ ID NO: 206671 - protein, 231 aa, Zea mays
  unsure (1)..(231): unsure at all Xaa locations
  Clone ID: MRT4577_120068C.1.pep
GSARCPHPAPPQSSNPPPHMPPPWQPSTYAAGTIVAASPCRSSSPAGFHASPYSDPLSSVSDEEKTIGDTSSAAPPISLDDEFPKATAMGPYASAGWSDLPIDLLIRILHLLELPEALAFHAVCPSWRSASVAAGGVPPRRTPWLVSLAEEPLPAGDQQRPVRRGLWDPTATSELRNLVDAEKTFQVSFPWGQAVACCGASHGWLIMANELSDLVLYNPFTTXSLSLPPIT

SEQ ID NO: 206672 - protein, 204 aa, Zea mays
  Clone ID: MRT4577_120069C.1.pep
MPSTSLAVPTGAVAGPGSRSYPFISNRSASSAPRLRRAPRLVMVSASASLEALIFDCDGVILESEHLHRQAYNDAFANFGVRCPPGSADLLYWDEAFYDNLQNRIGGGKPKMRWYFGENGWPSSKIFETPPSTDSDKEKLVDIVQDWKTERYKEIIKSGTVKPRPGVLQLMDEVKDAGIKLAVCSAATKSSVIMCLEKPIGLER

SEQ ID NO: 206673 - protein, 36 aa, Zea mays
  Clone ID: MRT4577_12006C.1.pep
RQPVKLCFGQRFRYVQFPGSFHCALWVRIKSKNSVS

SEQ ID NO: 206674 - protein, 129 aa, Zea mays
  Clone ID: MRT4577_120070C.1.pep
DALTIFSTQGCLYLLLHPTDWIGCTPSCLLILTACATGLVGYLKADLTTSLQNLPASCLEHDTSIRLPTRGHSLRMGSLYIRQPPLQCPPTPLITLRGLLPAADTLRTKSFVTLRHRDGLHPHGGPPSL

SEQ ID NO: 206675 - protein, 516 aa, Zea mays
  unsure (1)..(516): unsure at all Xaa locations
  Clone ID: MRT4577_120071C.1.pep
MAAATAAAATASASCLLRRSISSAFLAKRAVPSIPRTTLCYSSSASARLKPTPSLSPPVTSANDGGGGMRWESARKKRVVLRIGYVGTDYRGLQKQQELGVDSTIESVLESAIFKSGGILESNYGKLQKIGWERSSRTDKGVHSLATMISLKMEIPDRAWEDDPDGIALASFINSNLPDNVRVFSILPAQRSFDVRRECLYREYFYLLPAEIIGIKDGYSSEEMQEHLSEFNKILKGFEGNHPFHNYTARAKYRKVLAGRHRRAKGASSALKSMSSDTGMAESSSEESTSPDHDEDLNISSIFDSGIPEDTRVDGILKLSEDRVQIQARWLHEPDESDRLNASHFRDIITCSCGELQTSSGIQFVELTVCGVSFMLHQIRKMVGTAVAVKRGLLPRDIIELSLAKFSRIVLPIAPSEVLVLKDNSFXARRAREXIVRPGIQSMNKSEATRKGVEEFYRAALLPEVAKFLDPSLPPWKEWLENLDRFSGIPGSQLDEVREAYRAWRDDYDRAKMARN

SEQ ID NO: 206676 - protein, 78 aa, Zea mays
  Clone ID: MRT4577_120072C.1.pep
ISHELATTSSIRLILRYLFLTWDLRFQVPTCSSGDTCPHGQGGSGGPAHEFMRHRGGSPTPAGVRDDAIDLRILQLRI

SEQ ID NO: 206677 - protein, 117 aa, Zea mays
  Clone ID: MRT4577_120073C.1.pep
RTALHTSTSTLHGRWTQTHQASAPMAYYHEVDYCSEEVRSAAPDGLRRHVGGIQHHMRKEKIQEVDTVGRCLANHQQQHGHHSSHCFVARETHCEEDIITCTGQVHDRTESFLVRAN

SEQ ID NO: 206678 - protein, 51 aa, Zea mays
  Clone ID: MRT4577_120074C.1.pep
MPNEAASGSSQHGLVYLKYTFRLLLSLAKAWKEKKGYCFGYLYHAEGLNPK

SEQ ID NO: 206679 - protein, 69 aa, Zea mays
  Clone ID: MRT4577_120075C.1.pep
MESLKQGVNYVAETVQQAASGASKETNKQVAKDSNAPIGTRASAAKDALSDKADEKTHEGKASVHKEAI

SEQ ID NO: 206680 - protein, 68 aa, Zea mays
  unsure (1)..(68): unsure at all Xaa locations
  Clone ID: MRT4577_120076C.1.pep
DMLENSMMKLVXREDGDEDGFRLWQSLTRQTXXXXXXXSXMKDLXNVRGSAQKKIEKLRQLLXGVFSX

SEQ ID NO: 206681 - protein, 84 aa, Zea mays
  Clone ID: MRT4577_120077C.1.pep
NPNDTSSFNDCSCILLKNKKKKNMSASPIISTVRCLVGSSLFFQLETWRPADPILIENKHAIIIMFTTLIFIMDIMVITKRISL

SEQ ID NO: 206682 - protein, 57 aa, Zea mays
  Clone ID: MRT4577_120078C.1.pep
HALGPGCTSRCLTGPRTGPTIPAPEDEPVSGCGHKEEPLYEADVARRRAYVVNCRGT

SEQ ID NO: 206683 - protein, 59 aa, Zea mays
  Clone ID: MRT4577_120079C.1.pep
DQILIREGIISIYCSRNKLSKLNQSLCLVPRVMSEREPYSNGMTAPSCVWSITKSLDRG

SEQ ID NO: 206684 - protein, 76 aa, Zea mays
  unsure (1)..(76): unsure at all Xaa locations
  Clone ID: MRT4577_12007C.1.pep
VKKEKVGQLWPPHLTLLVTNFVHRSLYTSLYEEGXMVXCSPSSKSGRRAGKITQGGRADPEKAGEERVEEGGLDSL

SEQ ID NO: 206685 - protein, 108 aa, Zea mays
  Clone ID: MRT4577_120080C.1.pep
SSSDVAGASRPRTPIYIYGRLALRRHTPPRCGGTHRYFKLMDHHESVKASPEVRREPARSAPLDGGDLTGALMLLGSNGGGHVQSYCTVVQLFGGKVVVGGCQESACL

SEQ ID NO: 206686 - protein, 64 aa, Zea mays
  Clone ID: MRT4577_120081C.1.pep
GHRGFIHSRHPLIRYIHLSTIHIITSLSLLLALHGSLHHTLSAPFPRLVFPAATCRTASRLLLH

SEQ ID NO: 206687 - protein, 87 aa, Zea mays
  unsure (1)..(87): unsure at all Xaa locations
  Clone ID: MRT4577_120082C.1.pep
MSGVQKTPKTXAYFXTFSEKFKRTRAVCTHYRGRIMLINLDMNKYNTPIYRFVVRFTNDDITAQIISASIAGDMGLASAYSHELPRY

SEQ ID NO: 206688 - protein, 53 aa, Zea mays
  Clone ID: MRT4577_120083C.1.pep
ALLRLGLLPCRGLRVSGLVRRWLIRSRLLLRIRCHRCSCWVIRLDFRVLRRPA

SEQ ID NO: 206689 - protein, 62 aa, Zea mays
  Clone ID: MRT4577_120084C.1.pep
KDLWKTSWKWIHRFQISLLTHAINDLPRISEAHTHSPRPETWTTPCVFSPPPPPSSNIKIII

SEQ ID NO: 206690 - protein, 45 aa, Zea mays
  unsure (1)..(45): unsure at all Xaa locations
  Clone ID: MRT4577_120085C.1.pep
WSLILLGCYXCVVVTPTPEQLMHEAAPVRQWISVERACTSSKKIT

SEQ ID NO: 206691 - protein, 471 aa, Zea mays
  Clone ID: MRT4577_120086C.1.pep
MDAGTYSISSEKSHTAAAARPPLQEAGTRPYMPSLSTGSRNPSAKCYGDRFIPDRSAMDMDMAHYLLTEPRRDKENAVAASPSKEAYRRLLAKKLLNNRTRILAFRNKPPVSENVSAAIAASSHHAKLVKQRRHIPQSAERTLDAPELVDDYYLNLLDWGSNNVLSIALGDTVYLWDASSGSTSELVTIHEDSGPITSVSWAPDGRHMAVGLNSSDVQLWDTSSNRLLRTLRGVHEARVGSLAWNNSILTTGSMDGKIVNNDVRIRNHVVQTYEGHSQEVCGLKWSGSGQQLASGGNDNLLHIWDVSMASPMSTAGRNQWLHRLEDHMSAVKALAWCPFQSNLLATGGGGSDRCIKFWNTHTGACLNSVNTGSQVCALLWNKNERELLSSHGFTQNQLTLWKYPSMVKMAELSGHTSRVLFMAQSPDGCTVASAAADETLRFWNVFGDPEVAKPAAKASHTGMFNSFNHIR

SEQ ID NO: 206692 - protein, 135 aa, Zea mays
  unsure (1)..(135): unsure at all Xaa locations
  Clone ID: MRT4577_120087C.1.pep
PTRPVLSIALGDTVYLWDASSGSTSELVTIHEDSGPITSVNWAPDGHHIAIGLNSSDIQLWDTSSNRLVCALSCFNQKCMHALSLNLGCFLXQLRTLRGVHEERVGSLAWNNNILTTGSMDGKIVNNDVRIRNHV

SEQ ID NO: 206693 - protein, 97 aa, Zea mays
  unsure (1)..(97): unsure at all Xaa locations
  Clone ID: MRT4577_120088C.1.pep
RXRLXLRWXLXVXPLXLLFXSXXXLXFXXXXSXLWWWLPFFXXGXAGCXXXXLCGVCXXXXXXVLXFXLLSAFWRXSLCXCXXVCLPXCWLXXLXLL

SEQ ID NO: 206694 - protein, 84 aa, Zea mays
  Clone ID: MRT4577_120089C.1.pep
LFSHGFTQNQLTLWKYPSMVKMAELSGHTSRVLFMAQSPDGCTVASAAADETLRFWNVFGDPEVAKPAAKASHTGMFNSFNHIR

SEQ ID NO: 206695 - protein, 234 aa, Zea mays
  unsure (1)..(234): unsure at all Xaa locations
  Clone ID: MRT4577_12008C.1.pep
VPPAGTGPEFPGRPTRPGKSQFLPAKRARRGDAGGPRQLEPGLQGILITCNMNERKCVEEAYSLLNEYGDDMYGPEKFIDKDQQPSGSEGEDDDAEAALKKEVGDIKASTEKRLRRFQSVESGANNVVFIRTLGIEPEKLVHHILQDMYKTKKKKTRVILRMLPISGTCKAFLEDMKKYAETFLEPWFKAPNKGTFQIVYKSXNNSHXNRGRIIKELAEIVGSLNSETXVDLTN

SEQ ID NO: 206696 - protein, 85 aa, Zea mays
  Clone ID: MRT4577_120090C.1.pep
LITYWPCIYPFARSQISQTDRNPQTFSLPMAMNCYHICDLSDIDMTQSIYLDLADNLWTTGITLIVNYDSICIFDSNGTRALFTL

SEQ ID NO: 206697 - protein, 182 aa, Zea mays
  Clone ID: MRT4577_120091C.1.pep
GRALQPPEFPSSFPSLESSSVCYPGPAMLGNGAAGRGMGALSAMELLRSTGCYVPLQHVQLGMPAEYAAPAGFTLGEFRIPPPPQSQSVLGFSLDTHGTGGYSAGGLQESAVGRMLFPFEDLKPAVSAAGGGASNDGADHRQDDHRKDQAAGDGSSVTGGHETPGGFWSNSLIGNGSSNGGG

SEQ ID NO: 206698 - protein, 83 aa, Zea mays
  Clone ID: MRT4577_120092C.1.pep
KFSSKSRPPLGGHGPFFVFFCPVVVSITRVSLFSVGFFLFPLWWCPFPEWVIFFVPPSFFDGGPFFRSPLSFGFIFSLFFPRF

SEQ ID NO: 206699 - protein, 70 aa, Zea mays
  unsure (1)..(70): unsure at all Xaa locations
  Clone ID: MRT4577_120093C.1.pep
IRLETTDGSLTFXWDPSDGSVMYTIEGRRHLAGGRLMTHRRSSGNPSIGTVFTTLRYSADGSSILAGGNT

SEQ ID NO: 206700 - protein, 43 aa, Zea mays
  Clone ID: MRT4577_120094C.1.pep
ILIKGGWNSRTMSGVSMISSELGNSVSARIFQISYPTSFFIAY

SEQ ID NO: 206701 - protein, 45 aa, Zea mays
  Clone ID: MRT4577_120095C.1.pep
NRYPRYILPHQGGVLRATVMYYKTKCYRIISLSFLKKKKKKNDGC

SEQ ID NO: 206702 - protein, 179 aa, Zea mays
  unsure (1)..(179): unsure at all Xaa locations
  Clone ID: MRT4577_120096C.1.pep
LVDALERLCLDYLFEDXINDLVTQIHNVDVSGCDLQTVAMWFYLLRNHGYRVSSDVVFAKFRDEQGGFAANNPRDLLNLYNAACLXTHGETILDEAASFTSKCLKSXAPYTYMXASLASEIXRALEIPLPRSVRIYGAKSRXAEYGKQTEANELVLELAKLNYNLVXLQHQEELKIITR

SEQ ID NO: 206703 - protein, 81 aa, Zea mays
  Clone ID: MRT4577_120097C.1.pep
MMARTKHTARKSTVGKAPSMQLATKAARKSAPTTGGVNKPHRFKPGTVSLREILMYQKSTVLLIRKLPLQRLVREIAHDFK

SEQ ID NO: 206704 - protein, 780 aa, Zea mays
  Clone ID: MRT4577_120098C.1.pep
LLSDSFLPTAYAERRLVAENTSLPNMHKEELETIIRNQLRKPQLPPSSYDTAWVSMVPVRGSHQTPRFPQCVEWILQNQQDDGSWGVSQSDSSVSKDVLLSTLACVLALKRWNVGRENIWRGLHFIGRNFSVAMDQQFTSPIGFNITFPGLLNLGIDMGLEFPVRQTDVCGILHRREMELKRLAVDSSFGRKAYMAFIPEGFGNMLDWDQVMKFQRKNGSLFSTPSTTAVALIHKYNDQALQYLNLLVSEFGSAVPAMYPSMVHCQLSMVDALEKMGISQRFVSEIESILDMAYNCWLQKDEEIMMDIATCAMAFRLLRMNGYNVSSDELSHVAGASTFHDSLQGYLNDTKSLLELYKTSKVTLSENDLILDRIGSWSGNLLKDKMCCSRVQKDSIFGEMEYAVNFPLYSTLERLEHKRNIEHFDAWGSLMLTTKSSSFRINQEFLALAVEDFSFSQRVCRDELRHLDSWVKENKLDQLQFARQKLTYCYLSAAATVFSSELSDARISWAKNGVLTTVVDDFFDVGGSKEELENLIALVEKWHAHHAVEFYSEQVKIVFSAIYTTVNHLGAMASAAQGRDLTNHLVEIWLDLLRSMMVEAEWQRCQYVPTVEEYMTNAVVSFALGPIVLPALYFVGQELLEHAVKDEEYDKLFRLVSTCGRLLNDYQSLEREGNQGKLNSVSLLVLHSGGSMSIEAAKKAMQKSIDVSRRDLLRLVLRKESAVPRPCKELFWKMCKILHLFYSQNDGFSSPKEMVSAVNAVINEPLKVQNSTTFLSSSSR

SEQ ID NO: 206705 - protein, 827 aa, Zea mays
  unsure (1)..(827): unsure at all Xaa locations
  Clone ID: MRT4577_120099C.1.pep
MPDVMAAALTGFSPRGVIPSRGRASLPGVARAYAERRLVAENTSLPNMHKEDLETIIRNQLRKPQLPPSSYDTAWVSMVPVRGSHQTPRFPQCVEWILQNQQDDXGSWGVSQSDSSVSKDVLLSTLACVLALKRWNVGRENIWRGLHFIGRNFSVAMDEQFTSPIGFNFXFPGLLSXAFDMGLEFPVRQTDVCGILHRREMELKRLAVDSSFGRKAYMAFIPEGFGNMLDWDQVMKFQRKNGSLFSTPSTTAVALIHKYNDQALQYLNLLVSEFGSAVPAMYPSMVHCQLSMVDALEKMGISQRFVSEIESILDMAYNCWLQKDEEIMMDIATCAMAFRLLRMNGYNVSSDELSHVAGASTFHDSLQGYLNDTKSLLELYKTSKVTLSENDLILDRIGSWSGNLLKDKMCCSRVQKDSIXERCCKQXKFSFSPGRFSLCLCFVISDGVXAVNFPLYSTLERLEHKRNIEHFDAWGSLMLTTKSSSFRINQEFLALAVEDFSFSQRVYRDELRHLDSWVKENKLDQLQFARQKLTYCYLSAAATVFSSELSDARISWAKNGVLTTVVDDFFDVGGSKEELENLIALVEKWHAHHAVEFYSEQVKIVFSAIYTTVNHLGAMASAAQGRDLTNHLVEIWLDLLRSMMVEAEWQRCQYVPTVEEYMTNAVVSFALGPIVLPALYFVGQELLEHAVKDEEYDKLFRLVSTCGRLLNDYQSLEREGNQGKLNSVSLLVLHSGGSMSIEAAKKAMQKSIDVSRRDLLRLVLRKESAVPRPCKELFWKMCKILHLFYSQNDGFSSPKEMVSAVNAVINEPLKVQNSTTFLSSSSR

SEQ ID NO: 206706 - protein, 79 aa, Zea mays
  Clone ID: MRT4577_12009C.1.pep
SFFGLGPAGVPQSPFFCQVFAFLVEFPGPLCYLSWQQVLTCHLWCSPLRCLPRDNESVSMCGRCFLLGLVWLPAGSIPK

SEQ ID NO: 206707 - protein, 371 aa, Zea mays
  Clone ID: MRT4577_1200C.1.pep
MSRPTVTVVSAKGEVTQDTIPVPNVFKAPIRPDVVHAVHTGMNKNRRQPYAVSEKAGHQTSAESWGTGRAVARIPRVSGGGTHRAGQAAFGNMCRSGRMFAPTKVWRKWHQKINLNQKRFATASALAASGSPALLLARGHAISTVPEVPLVVSSTAFADAAIKKTSAAVALLKAVGAGADVEKARNSRKLRAGKGKLRGRRHKQRRGPLVIYNPDEDGKELVLAFRNIPGVETSSVYSLNLLQLAPGGHLGRFIVWTSSAFSALDKVYGSTTEPSALKKDFLLPSPMMVQPDLSKIINSSDIQKVLRPVRGGAVTKRSHTQKKNPLKNFQVQLRLNPYAATFAKEKLGQKKIEAGKAEPAADTFYELLQDN

SEQ ID NO: 206708 - protein, 659 aa, Zea mays
  unsure (1)..(659): unsure at all Xaa locations
  Clone ID: MRT4577_120100C.1.pep
YYVYTYGLPGLSPSPVFRIPSPTTITFHGTPGQRILKSPIDLDNAHEKSPKSCDARAFHSGGTHEAIASIALEGMIETISRTKDGIGRATRHAIECSKYGIAGEIVELLIQKLQSEPNFHRRIDLLFLVDSITQCSHSQRGVARASYVPTVQAALPRLLGAAAPPGAGARENRRQCLKVLRLWLERKIMPEDILRKYMGDIEVPNDDTSTTLMLKRPSRAERSVDDPIREMDDMLVDEYGSNATFELSGILSSKVFEDDEDFPKNNGSSPFVSQARPVENDVIRKTEDTIAPVYVEEHIIIVENVTTDAAMEDALELPGNKQQTDGAVLIEHDSIQDPGSEQAIDQNDFPSLPDGPPPLPSDSPPPPPPLPPSPPPVTPPPPPPPPLSPASPPPPPPPPLPSGPPPQPAPPPLATQVPPLPSIPLPVSSSPLSLGYQPPAPEYFMTPNGNQLAQMTVNTSIQAIGNTTTFIPGGPVNGQAAVNFVTSMPAEFGNTSVFMAQASNGNYQFRPTGVPFQQGNFSAFPSAQXSSSSPFSYGTHXPMGQQAVAPSHNPYAAQSFPNSQSHYPSEEHWRMASGNFSPDDQHNWIASGRSLPCSEGPFVHDGYSRSNIDRSSMNPMNHQHTVLNHLPSGAPLPGHISQMLPARSDMHTLNCWRPS

SEQ ID NO: 206709 - protein, 210 aa, Zea mays
  unsure (1)..(210): unsure at all Xaa locations
  Clone ID: MRT4577_120101C.1.pep
MRVLAFLLLLWISAAATASPPPLETLGIPPQDEAYYRGGVIKCRDGSGKFTRDQLNDDFCDCPDGTDEPGTSACPEAKFYCKNAGHSPITIFSSRVNDGICDCCDGSDEYGSNGTCKNTCWEAGKAAREKLKKKVATYKSGVVIRNQEVEKAKLAIAKDEAELTKLKGEEKILQGLVDKLKEQKRLIEKAEEEERLIKEKEXKRIKEEAE

SEQ ID NO: 206710 - protein, 67 aa, Zea mays
  unsure (1)..(67): unsure at all Xaa locations
  Clone ID: MRT4577_120102C.1.pep
NILFFLKTILVVFFNNQVILFVGWGAPXXKLXGXKKDTTNIQIIRLLSQQNVXAAHKXFLRRKXKLY

SEQ ID NO: 206711 - protein, 181 aa, Zea mays
  Clone ID: MRT4577_120103C.1.pep
CPSPCRHRRLLLHSFDCFLFRLSSPPGYGRRRVGWTRLVGRGAAVAAGNQAGDLDPRHHHRAPHGGGGEGGGGGGAQQEADEQQRHHNNRLLQFHQQVQQNQDPPPVPLFQLQHLQAAAAVRQRGGLSAEYALLDPMGDAGQSHSHHHHHGFQPQLLSFGGVGQHHMHQFTAQAPPATHSS

SEQ ID NO: 206712 - protein, 112 aa, Zea mays
  Clone ID: MRT4577_120104C.1.pep
AGPKPTRSILSMGQRGCRRSLILKGMGTRILSGNQSSPKTKTLSPLSPSTVHLLCLQLWARSSCSQFSRCRPVAALKTPNDAANGHPWKLPLCCLLSLFRPTPVEVFDTNRD

SEQ ID NO: 206713 - protein, 727 aa, Zea mays
  unsure (1)..(727): unsure at all Xaa locations
  Clone ID: MRT4577_120105C.1.pep
MPPRGAALLLLLVVLCVQLGTSSSTSLASYLFGFWSRTHQHRFPALAPGPAPSPQPEGAIIAHPVHRHHRRRHHASPPPSSFSPERQDCSRTTCSAPLTSTPIGSPCGCVYPMQIQLDLGVAPYQLFPRIDELEIEVAAGTFLKQSQVRIMGAGSSLQDPEKTTVTIDLVPLGQKFDRTSALLISNRFLQKKVPINSSTFGXDYVATYVHYPGLASLVPIPGSLGPVSSNEDPFGANIHNRRHHKINSKTVAIIALSAVVFVLTCLAIGITWRFNGLRDSHAMGPISSSSITRKGAMRSSFSGTSSSAASFGSTIGTCPSTVKTFTITELEKATENFSFNKIIGEGGYGRVYRGVIEDGVEVAVKLLTRKHQNRDREFIAEVEMLSRLHHRNLVKLIGICIERSTRCLVFELVPNGSVESHLHGSDKIYGPTDFDTRMKIALGAARGLAYLHEDANPHVIHRDFKASNVLLENDFTPKVADFGLAKEASDGMDHISTQVMGTFGYVAPEYAMTGHLLVKSDVYSYGVVLLELLSGRKPVDMTQPPGSENLVTWARPLLTTREGLQRLVDPSLPAGYDFEKLAKAAAIASMCVHVEASHRPFMGEVVQALKLIHSGGGGDETCSGSFVGGATEESPWNDVSRSSWNDDPPATPGPALPLGYGSDPAGADERRPRSASSAVLDKIESLAMYDWSGPLRTKGRGSFYRLRGSMSEHGRPSDDGSVEGYLM

SEQ ID NO: 206714 - protein, 96 aa, Zea mays
  unsure (1)..(96): unsure at all Xaa locations
  Clone ID: MRT4577_120106C.1.pep
MGDFNDEGVPKGYAFPLTMPTVTLIEXRFATFTHRSAAAHPWHXVDCSIXAPTVFNCVVVIIKSSTVKYELHTDSRLNWADHVLYSTIIYPQSYGF

SEQ ID NO: 206715 - protein, 99 aa, Zea mays
  Clone ID: MRT4577_120107C.1.pep
TGLAFVAVKRYSIPLPNHQLDSSIHLMSRHRSRLLFRISFLALTPSVLVRDQSGSTWIGRPAMELSRLENGVEVRRTRQAGSERVGKNYVEARCNTTWK

SEQ ID NO: 206716 - protein, 79 aa, Zea mays
  Clone ID: MRT4577_120108C.1.pep
DRRSLPALWLAASSPRCSHRSFERGEKTASVRISMEHVSDLRSILRHTTLISWFWFHARGSSTHGLISKMDKHVARATS

SEQ ID NO: 206717 - protein, 402 aa, Zea mays
  Clone ID: MRT4577_120109C.1.pep
MARVRSTSRVSHEGDETEAAETTPISEVMKRSGLVVTDEGASNAEAEQTVVEGEDVGESEEDYNILIPTKPSHLDFEKSTVTEDDMPMMMKLGYFGEAESKLIRFAGEETIPELKKDEVLTPNAIVRFSVYIWALRSQWMSPDAEAFYRVHELHYHTKARADGLHENFGCYNFAHRKDTKAPVLSYRTKWPTGWKNEWFYMKADEKKREKLMTMLAKVEFRVVAEQISTRDLVQEYLANRTYPTSSGWGMPKKKEAEKKHELVRLSYHFKFEKQFKKPCKKWLDMIETMCNEILRNYTKKEDPLMTAAFGAEGVKRKRVVSILSRQAARMVKEDEKASKKTKTSHEPKVAVSKKKKVEAPEPKVTEATEETPLTPPAVEIAEILKVLIESLPIKLLSPLCGG

SEQ ID NO: 206718 - protein, 45 aa, Zea mays
  Clone ID: MRT4577_12010C.1.pep
LDSMSSTFTDSANQWVDILSKEEKKFSQVPTCKHLNILHIQQLFT

SEQ ID NO: 206719 - protein, 110 aa, Zea mays
  Clone ID: MRT4577_120110C.1.pep
ILRKAPVLLGLLEKVKINAPHFCPQLLMVDGNGLLHPRGFGLACHLGVLADIPTIGVGKNLHQVDGLNQSEVRRQLGSKENCNRELVLLTGQSGTKWGMANSSEWRRRPN

SEQ ID NO: 206720 - protein, 231 aa, Zea mays
  unsure (1)..(231): unsure at all Xaa locations
  Clone ID: MRT4577_120111C.1.pep
MDDAQGYQEGDDHELVLKKQEWIKTQDMLKSKLILEDEFAWSLPSVGSGLDEPEWCKLKYIGGTDISFLKEDPSTACAAVVVLNADTLEVVHEEFNVVRLQVPYIPGFLAFREXEPRDSSMINPKSXLEXAPVLLGLLEKVKINAPHFCPQLLMVDGNGLLHPRAGFGLACHLGVLADIPTIGVGKNLHQVDGLNQSEVRRQLGSKENCNRELVLLTGQSGTKWGMVRDSK

SEQ ID NO: 206721 - protein, 175 aa, Zea mays
  Clone ID: MRT4577_120112C.1.pep
KKKKKKKKKKKKKKKKKKKKKKKKKGKKNVGGPIINKTYGAGVFADSLVISLCAVHLARRLPWGGRGGKPWGSPFFIPLHLIPFVAPFRYSGGGPLPSPFPPFSQPGRPLGPSLYGPFTGGLWGGSPLGSLYPCGPLASPFSLFFFFFFPPFRGFSPVCSFPGASWGVPFGCFSA

SEQ ID NO: 206722 - protein, 72 aa, Zea mays
  Clone ID: MRT4577_120113C.1.pep
DVDWLRRTRAGAHRLAQTNYSVLPTKSFRSDVESLTMPHFVPDCPVSKTSSLLRFSFDPSSLLTSDWLRPST

SEQ ID NO: 206723 - protein, 155 aa, Zea mays
  Clone ID: MRT4577_120114C.1.pep
ACSSRPNFLAQLKHDTTRLGSCPVRHNKPCRAWVGLPTVPGRRPGSARHKTVRTGSARCRGAGHKAQPPPSRPRLPVSHSHMASLAQLLLTFHHSLIHGRHRLVVTIVRCTLFFFLGFLTRCEFYLERFSIFMSFIQNVLMLIGSFFQTVKKKKK

SEQ ID NO: 206724 - protein, 79 aa, Zea mays
  Clone ID: MRT4577_120115C.1.pep
MASSRVIPTPRRRHTASDLARLAQAASRPGGGGSGPGSMNVEELLRGIYSDMPTPAPPASEPGRPMPPAPAPVSATRKT

SEQ ID NO: 206725 - protein, 268 aa, Zea mays
  Clone ID: MRT4577_120116C.1.pep
MDDAQGYQEGDDHDLVLQKQEWIKTQDMLKSKLILEDEFAWSLPSVGSGLDEPEWCKLKYIGGTDISFLKEDPSTACAAVVVLNVDTLEVVHEEFNVVRLQVPYIPGFLAFREAPVLLGLLEKVKINAPHFCPQLLMVDGNGLLHPRGFGLACHLGVLADIPTVGVGKNLHHVDGLNQSEVRRLLGSKENCNRELVLLTGQSGTKWGMAVRSCPGSSKPIYVSVGHRISLDSATAIVKSCCRYRVPEPTRQADIRSKVFLQKLQKPRQ

SEQ ID NO: 206726 - protein, 72 aa, Zea mays
  Clone ID: MRT4577_120117C.1.pep
AFIMYCFVHSFSSGTQDMLRRFCLTLVAICRRATILCALSEARQEIGVTYQRATVPAVVAHGRSGYSLLRAR

SEQ ID NO: 206727 - protein, 209 aa, Zea mays
  unsure (1)..(209): unsure at all Xaa locations
  Clone ID: MRT4577_120118C.1.pep
LILEDEFAWSLPSGGSWLDEPEWGELKYIGGTDISFLKEDPSTACAAGGVLNADTLEVVHEEXNVVRLRVPYIPGFLAFREXTWPVANCSFLLPLKARAXDSSMINPXIXLRKAPGLLGLLEKLKINALHFCPQLLMVDGNGLLHPRGFGLACHLGVLADIPTIGVGKNVGYFSAVAQFQLTSRSINIQLLRILSPNSISQCSPSFREH

SEQ ID NO: 206728 - protein, 93 aa, Zea mays
  unsure (1)..(93): unsure at all Xaa locations
  Clone ID: MRT4577_120119C.1.pep
ETCHIIGYCDNDVGLDTDHXQVLVSIXEQWPPDLFXGDDRHLIMRTEDIEAGNHGHMSEYATDDNPELMPISHELANRLGATVTDVHENGTCP

SEQ ID NO: 206729 - protein, 62 aa, Zea mays
  unsure (1)..(62): unsure at all Xaa locations
  Clone ID: MRT4577_12011C.1.pep
VVVFNPLPLLASSQGATTRMXLILKQKTLAXHMYHLRPAPDGSLLDAAFADLLHAHFYESCP

SEQ ID NO: 206730 - protein, 378 aa, Zea mays
  Clone ID: MRT4577_120120C.1.pep
MVGMLLNAGRSNGRGGRRTSIQSPPQVLSSVPLLVYEYEDPAGSTPTAAAKMLMYSLPERSIVYTHDSRPQAMEGNFFSTPQGWLVILGHGEVTSEASMWHPLTGETITLPPIHDDHYIPTNCKCLLTHNSAAHPDCAVVLLDVADPLMWFCRVNGGADRRWGQHTYDIGDYEFPDEFRTPSTPTKNVIRSVAALKGKLHFCFMESHQNKMCVVDLDFPSDHGHPPTAEFHEFDVSPEFGIKFPDGVCSASIHLVESMDELFAVCVFYVGFDPTNVSAAGIFKMEDSCGEETMAWHRVDDIGDRAFLLMGTNMATWCSASTNNLKGSTLYFFLHFLLGDRDLYIYDVQEQSLETVQVHDQLDLKVVHTEPYWINVPPF

SEQ ID NO: 206731 - protein, 54 aa, Zea mays
  Clone ID: MRT4577_120121C.1.pep
HAIDQRNEKISHNTNLLLSIVATGMYQGSVSFILLSKMAKEPIQPRAINFTGRQ

SEQ ID NO: 206732 - protein, 63 aa, Zea mays
  Clone ID: MRT4577_120122C.1.pep
ARAEPGRNPRGGLCPGYTETDHGLFEDPHVPFHVRCERRTSKVEVIELQDVECEERPRGSSSN

SEQ ID NO: 206733 - protein, 52 aa, Zea mays
  Clone ID: MRT4577_120123C.1.pep
GCPCLITPEFKGPWRVPKNLWGVLKCSRPPKFFPQEQGYCGFFTLSTRDVLS

SEQ ID NO: 206734 - protein, 113 aa, Zea mays
  Clone ID: MRT4577_120124C.1.pep
SVPCPDQWRLRCPSFHRSSIVRCTSSDGLESWLKEYVPSSQHRWHVQQVHSASATINMSVIQKRSLAPIRMAYSPCFPCHPRGLLGAHRIKHTASTSDCEINSWLKKKVKKVK

SEQ ID NO: 206735 - protein, 82 aa, Zea mays
  unsure (1)..(82): unsure at all Xaa locations
  Clone ID: MRT4577_120125C.1.pep
GGCLLRECNFKHAVIGVGSRVXSGCEPQDSAMMVADTYXTAEEACKLLLAGMVPVVIGRSTKIKNLVTDMKARRWKNVVITN

SEQ ID NO: 206736 - protein, 46 aa, Zea mays
  Clone ID: MRT4577_120126C.1.pep
VSGGSGLLRARGLGSGRPSARAVRPPGLVRGLGASGVAGLPGVGGR

SEQ ID NO: 206737 - protein, 220 aa, Zea mays
  unsure (1)..(220): unsure at all Xaa locations
  Clone ID: MRT4577_120127C.1.pep
GRASISFSDIESHTATPQRAADSGPRTRNQAWGPPLGSQLSVSPSRRRRRRRSGSPSRSTPCSSGLAHPAPTRASGTPGRATPTEASWRRSTRCSSWRRRTLSRSRRPPPRAAAWTAPSAPSTGSRSPPXQSRLIFPSAGKKDSSAGTGGVVDASDGSRSRASSSVPXRSRPSWTPRSGTTSISSAPQACPSFTRSRFGSFVPDAPRYSSGRSPTLPAMC

SEQ ID NO: 206738 - protein, 65 aa, Zea mays
  Clone ID: MRT4577_120128C.1.pep
RSVTLPVLDRQSPPGIGDMGTLVTQETELVHGLNGWEGGHVYQLCPLLVLAEGKLPEGRRSIQNP

SEQ ID NO: 206739 - protein, 87 aa, Zea mays
  Clone ID: MRT4577_120129C.1.pep
GREHHYHTNKQPSDDKQTLCRTVTRSPRTMVQKALECLQGCPISCTCFAHHQDIHGLGKVDGSLELNDFKSLMVRALAPHKTPCLSN

SEQ ID NO: 206740 - protein, 44 aa, Zea mays
  Clone ID: MRT4577_12012C.1.pep
TNFFTILILSLTSCVQHTLKSIRSYHHYSTLPHFNSIFHPLLSP

SEQ ID NO: 206741 - protein, 75 aa, Zea mays
  Clone ID: MRT4577_120130C.1.pep
KKGIGADTMEALYKKVHVPTRGDPFGGKSPKHPPKGPKGAPPKKLPYEQRKASLIERPTQLNPPGGANFADGDAE

SEQ ID NO: 206742 - protein, 62 aa, Zea mays
  Clone ID: MRT4577_120131C.1.pep
DARPLNHSQSLYGRSLVMSACTSHETRVTRSSIHESLQYGIIELESSYIDIQEHSGTPLSTV

SEQ ID NO: 206743 - protein, 162 aa, Zea mays
  Clone ID: MRT4577_120132C.1.pep
AIDLYYDWPRGRNLNLIRNQLSGDPTYDVEWTNGTSYIFDSASCRTIRFPVGVLPPDWLHGAVYLGRETTDGFDCHLWTKVDFVWYYEDVLTHRPVRWNFFNGMQQHVMSFEVGGVLEDSHWQAPSHCFTDNAAAAIATGTDGTSSLLRLARTTAAAVTSAA

SEQ ID NO: 206744 - protein, 56 aa, Zea mays
  Clone ID: MRT4577_120133C.1.pep
FFCFSSPSSRGAILFHRMSPNTTEDVQYSLWLLGSYVDGKQKIMVGMTIINKLRYP

SEQ ID NO: 206745 - protein, 153 aa, Zea mays
  unsure (1)..(153): unsure at all Xaa locations
  Clone ID: MRT4577_120134C.1.pep
PNVRPAYGFLVDITYVESAVAXGTGSQDGCAPVHHLDRGFGSGEKQXWSISREGGXGCNNATTCLHQKRTRLCSFNEMATQIAFSGILSXRTDDNPYFYNGNXLKVRHXRWSSFTVHAKNRSXTKLHYTGARIWXAAMGDLLAKWTDKAENIG

SEQ ID NO: 206746 - protein, 580 aa, Zea mays
  Clone ID: MRT4577_120135C.1.pep
MVRRRNPSVVESDSSDEQEIHEDTPPRSRSKRGRGSGNVMQGGEASGSHGARGRMTRNPSGRSRPATNPQAWEATSDDDGGKDDEIDLPPAHAPVIRGLVLHRAEARRSGNEPVTDFTASGGSALLQDIRFQNPALRIRDARIDGNRFWTLQHEGCEAIGDPEMTQALRACERKKMKNIMTFQYDWNDEVIAQFYSTLWIKLADEESPYNFPYLNFYIEGSWYKVSYRRFAHILGFTDNDISGDKIKIHYFRQPTKDEARDLHLSESGKYWESTNMHKYYRYINSLSRMTLIPKGGNQMNILGESKVLLSFMKPNSFESINVFDMIWQEIIHAACFPLKGCLHAPFIMKMIEVVTQFRYDKGTRHQSYTPFWIDPNNPVGRLRKAPSSSRAHTSAGPSAGPAAAAGASRPSPGRGSPTPRGRGRGRGRGRGMGARLAHGIAAFFSTCRNISADVHELARRQRETDDNLRRQASTMGMPFAPRSPDVPLHPPPPEINGWHQQAYGVPFMSADDEEEEEAYFDDREQFAPPPYQGDPGQSSSHPPPQDPSGSAPPPDQSGEEHFASHLAHHFFAPHQPPPNW

SEQ ID NO: 206747 - protein, 113 aa, Zea mays
  unsure (1)..(113): unsure at all Xaa locations
  Clone ID: MRT4577_120136C.1.pep
KNPPKTKPIGHKPNNPTPQPPHKPPENGNTXNPKTEKXRNGPKDTTGTNEHIRKVSPVVNAQGTQAKAGTTQPRSVASSTYSPNFSWAFGMSLAPYQSFPIPSLLMLPYTGGL

SEQ ID NO: 206748 - protein, 120 aa, Zea mays
  Clone ID: MRT4577_120137C.1.pep
SINVPTLNRLGFHKSNKDLRFIHSIKHLERVELKHCFFSIDFPRTLFQSLDKREGAGAWAFIHGEQKKKGEAAAGVGRNQGAERGGHEGARNLARGFDAMGSWSTPQTERGWASSAWGGR

SEQ ID NO: 206749 - protein, 66 aa, Zea mays
  Clone ID: MRT4577_120138C.1.pep
YDLYDRRRSPTQPMELWTDLRSHYQCSHCKRLGAYHPKGRYTVWTEEFLRSWILSGQFRDQANYHC

SEQ ID NO: 206750 - protein, 236 aa, Zea mays
  Clone ID: MRT4577_120139C.1.pep
ARPAPLCLWRAPVSHGVKAPSQVPSPLMAAPLCSLVSPHASSGKQPWRPAPAHPAPLCLWRAPVSHGVGPQPLGTGRPYSLLLFLPWCPSRVCPSPLPLGSLLVTLLSMGAQVSSPWWQIPCQARPMSELRRLSSLLLSPWRLRLHCFYFFPSSIPPCLYASSSTPEQSNVHDARHVFDGRIDQSSSSFFIRDTASFCTTMRLCSYLGVLFLGVAYKKLIMCIFMCGCVERIPDVG

SEQ ID NO: 206751 - protein, 130 aa, Zea mays
  Clone ID: MRT4577_12013C.1.pep
MDKLINAAKEYLDDDKDKRQDQSQQSHGQQQGYGGGQQQQGYGQQQGYGQEGGYGQQQGGQYGQQQQYPPPGGIQAQGAGAFGGFHGGDVDFNNAKEEAHQKAGSSGDKDLFGSILGALGQKKNKLADGP

SEQ ID NO: 206752 - protein, 55 aa, Zea mays
  Clone ID: MRT4577_120140C.1.pep
FGTRVLVRINPMIWGKTKSKHNTRQSLDEKSKPKPSAFSWVLKGFYFGTLDDYAS

SEQ ID NO: 206753 - protein, 227 aa, Zea mays
  Clone ID: MRT4577_120141C.1.pep
QILGVLLSVRGCQHTPPSPRGCSASTAHASTTVISQHLSSTPARPAPLCLWRAPVSHGVGPQPLGTSRPYSLLLFLPWCPSQVCPSPLPLGSLLVTLLSMGAQVSSPWWQTPCKARPMSELRRQSSLLLSPWRLRLHCFYFFPSSTPSCLYASSSTPEQSNVHDARHVFDGRIDQSSSSFFIRDTASFCTTMRLCSYLGVLFLGVAYKKLIMCIFMCGCVERIPDVG

SEQ ID NO: 206754 - protein, 44 aa, Zea mays
  Clone ID: MRT4577_120142C.1.pep
KPELGLRTWLSLLGPAYADLGLIFGRVALPLRSSGHNIRRDIID

SEQ ID NO: 206755 - protein, 54 aa, Zea mays
  Clone ID: MRT4577_120143C.1.pep
LELSDGIYQFEHNLVEAGGGRKQMGCHLSNETRSCKQYGLCKSTALLSAVTCRT

SEQ ID NO: 206756 - protein, 181 aa, Zea mays
  Clone ID: MRT4577_120144C.1.pep
LEAGRAGKSPSRCVFSSRELSSSLPTPASTTGHSSLVLAPPRSALQPSPSSSCYGAQPSSLPFLQHTSCSLPWPMPLSGARPCPLSSALPSRRSYPPVMEFVVSPSSPILCSVSTWSCLQTASFPAAGQRLSVFPTVAHLSVAAPRCRTSSGNPAPYPAPSAPVWCLIKCPSGVPCHGQPY

SEQ ID NO: 206757 - protein, 177 aa, Zea mays
  Clone ID: MRT4577_120145C.1.pep
GREHRNSPPPLPLRVNMSDTSCTAHCLISAVQHRITPTALLEMGLNRYARGNRKCTCELHDSLLYTHLAEHPCNARKRLPLISTAAAGRSCTRSMTVPVEPVNTPGATTSAICCAEVMGEKERRELLGYYWLDAQKDVQALWVISRTNHHRRDACILESILSVVGHPDVSIAIKRGQ

SEQ ID NO: 206758 - protein, 114 aa, Zea mays
  Clone ID: MRT4577_120146C.1.pep
DCRIHRLQNCYDHLCLMEKTETYMVTPHLSPWWKNHLHQNLHLHVSYLIPSYYCQQTLEHFQKFRPCCWTDDLQEPLHWYILLLKAYVYFYHLSSSNYGLNQKFMIQQLVCSFQ

SEQ ID NO: 206759 - protein, 226 aa, Zea mays
  unsure (1)..(226): unsure at all Xaa locations
  Clone ID: MRT4577_120147C.1.pep
MGSTALGGAAPARAGLAPKNGLLGSTFKPCGGFKLKTTPKVGRSSVCVRASIASSPQKQYSPKTPAVKSGEEVRIAVLGASGYTGAEIVRLLANHPQFRITVMTADRKAGEQFGSVFPHLITQDLPNLVAIKDADFSDVDAVFCCLPHGTTQEIIKGLPQQLKIVDLSADFRLRDINEYAEWYGHAHRAPXLQEKAVYGLTEALRNEIXNARLVANPGCYPPSIQL

SEQ ID NO: 206760 - protein, 356 aa, Zea mays
  unsure (1)..(356): unsure at all Xaa locations
  Clone ID: MRT4577_120148C.1.pep
MAGTEHPVHAVLRPFMAQGHVAPFRFLAELVRRARPDASITIVATPWVSESLRATLAASNVDVHALPFNPADHGLPADAHNSASIGPDQLGSLFAASESLGPAFCRFVAGLRATDPAAHVHIMADMFLGWTVGVARDDAGVSHSIVFTCGSYGAAVYFSLWNSVPLGAFSAGSTDDAFVLPQFPQISVRRSQLSDQLAAADGKDTRSTFIRKQIAFFSRADALIVNTAENLEXQGLTMLQQWFNVPAYPVGPLLRTTVAASSSETKDTSSTIFAWLDKQLPGSVLYVSFGSQFNINATQMVELAIGLEQSAHKFVWVIRPPSGFDDNRECWSEWLPDGFSERLVVTGQGLVVPCWA

SEQ ID NO: 206761 - protein, 94 aa, Zea mays
  unsure (1)..(94): unsure at all Xaa locations
  Clone ID: MRT4577_120149C.1.pep
RNKKVGEAXFSQNGAKRSFYKLEAEILGAPKPQGVSPPREVYEMLSXRGCQELFPLXSPVHEICVGQLPXPQSIVESSELAPNFSINGGHIPFY

SEQ ID NO: 206762 - protein, 373 aa, Zea mays
  Clone ID: MRT4577_12014C.1.pep
PRVRFAIAFGTAIGCIGLLVLAAGFLFWWRHRRNRQVLFDVDDQHMENVSLGNVKRFQFRELQSATGNFSSKNILGKGGFGYVYRGQFPDGTLVAVKRLKDGNAAGGEARFQTEVEMISLALHRNLLRLYGFCMTATERLLVYPYMSNGSVASRLKGKPPLDWATRKRIALGAGRGLLYLHEQCDPKIIHRDVKAANVLLDDCCEAIVGDFGLAKLLDHRDSHVTTAVRGTVGHIAPEYLSTGQSSDKTDVFGFGILLLELVTGQTALEFGKAANQKKGAMLDWVKKMHQEKKLDVLVDKGLRSRYDGIEMEEMVRVALLCTQYLPGHRPKMSEVVRMLEAGEGLAERWEASHSQSQRADSHEFKAVELSGPR

SEQ ID NO: 206763 - protein, 81 aa, Zea mays
  Clone ID: MRT4577_120150C.1.pep
RRARGPAPSPSSDPPLCAESPPAGPPPRHGRTNVSEPLTSYQTPVLSFPPPQPGQWFPPARAPVCRPGSWVPLRCSSPSIG

SEQ ID NO: 206764 - protein, 66 aa, Zea mays
  Clone ID: MRT4577_120151C.1.pep
TLSYVFGSPVHACGCMETFFIVQAQFPPDSIAPQMANSTTREDNEIITGVQQYSYNTHNTCSNFQW

SEQ ID NO: 206765 - protein, 59 aa, Zea mays
  Clone ID: MRT4577_120152C.1.pep
GLEPLGCFMCLGWCVELPVDHRRHRVGGRGRMSDGSWALCIDYATVRLRYIHDRINPKR

SEQ ID NO: 206766 - protein, 200 aa, Zea mays
  unsure (1)..(200): unsure at all Xaa locations
  Clone ID: MRT4577_120153C.1.pep
PSAPRPPPPPPPGPAPRPRSPPRPPPPPPRPRPPPPPRLPRPRPPAPPPVFPPSNPPPRPPPPXVRPPPPYPPPAFPLKPPPRFLWRNVPRSPFPPXPPFPLLTPPLVPSPDPLVPXPPFPGIPPLPVVTPPPPLFFFFFFFFWFFFFFFFFFFFFFFFFFFFFLRWNDSLLAEHQQTQGVRSRVLCVVPPAKAESADSI

SEQ ID NO: 206767 - protein, 55 aa, Zea mays
  Clone ID: MRT4577_120154C.1.pep
MNESLLALLCFKKKKKKKKKKKKKKKKKKKKKKKKKIKKKKKKKKKTTKKKEYYT

SEQ ID NO: 206768 - protein, 79 aa, Zea mays
  unsure (1)..(79): unsure at all Xaa locations
  Clone ID: MRT4577_120155C.1.pep
PPLXFFFFFFFFFFFFFFFFXFFFFFFFFSIEPTKISSQGIFFLFWIYSKRPSQQRLQKFRQVDQXQIRSRXLCVVXXA

SEQ ID NO: 206769 - protein, 58 aa, Zea mays
  Clone ID: MRT4577_120156C.1.pep
SDEPVPPVVQWRALAHLLFRGNSRITKLSFKLIMLLIPNLFTVVERRRIHVRQLPHTL

SEQ ID NO: 206770 - protein, 102 aa, Zea mays
  Clone ID: MRT4577_120157C.1.pep
MWGSNLSTAWSSWGLARRASTTRGGSPPGSGFLGRGSLRGLRTRIDSVRNTQKITEAMKLVAAAKVRRPQEAVVSFRPFSEALVEVLYNMNQEIQTEDIDLP

SEQ ID NO: 206771 - protein, 58 aa, Zea mays
  Clone ID: MRT4577_120158C.1.pep
MGMKKVACADLDGADCATVVLAAEAPAPAPTSAYSAAFPAVGAVLSASVLSLFAYYLQ

SEQ ID NO: 206772 - protein, 46 aa, Zea mays
  Clone ID: MRT4577_120159C.1.pep
VFHSLYLRSNSHALLISLYGHGPTSPRYVPAGRTLGVHQNTPPLAM

SEQ ID NO: 206773 - protein, 219 aa, Zea mays
  Clone ID: MRT4577_12015C.1.pep
GLLYLHEQCDPKIIHRDVKAANILLDDCCEAIVGDFGLAKLLDHRDSHVTTAVRGTVGHIAPEYLSTGQSSEKTDVFGFGILLLELVTGQTALEFGKTANQKGAMLDWVKKTHQEKKLDVLVDQGLRGGYDKMELEEMVRVALLCTQYLPGHRPKMSEVVRMLEAGEGLAERWEASHSQSQSADSHEFKVPDFTFSRCYSDLTDDSSLLVQAVELSGPR

SEQ ID NO: 206774 - protein, 83 aa, Zea mays
  unsure (1)..(83): unsure at all Xaa locations
  Clone ID: MRT4577_120160C.1.pep
DLENLDNRARSGDGADPVAXDXKEAKDTQDYIGQXAHDXRVGHSDGAPGENIIWSSAGLTWSAPNSLRSWVDQNENYQLIMNT

SEQ ID NO: 206775 - protein, 59 aa, Zea mays
  Clone ID: MRT4577_120161C.1.pep
IRWIEKAAVGQEVYLRSSNWEPRVSARPAQHAGERSGAAFRVRHYFKSTVILLLRQWFR

SEQ ID NO: 206776 - protein, 239 aa, Zea mays
  unsure (1)..(239): unsure at all Xaa locations
  Clone ID: MRT4577_120162C.1.pep
EELGVARRAADAVARGVCAEALXPCRTRXSRGPGWWKLELAALSPRSFGKVVTALRCRRAEPAVLAAAAGAYAELVLAEVLAAPQDRADHRALLESVVDVLPSPADAPGVPAPFLCRLLHAAVAAGASAKTCRDLELRVAAVLDQATAQDLLAVALDATGERVRNTDIVRRVVAAFVERQAAVTPGGERRSRRASMSGTTAATELGAARPGALEKVAMMVDELAAEIATEEALPISKFV

SEQ ID NO: 206777 - protein, 331 aa, Zea mays
  Clone ID: MRT4577_120163C.1.pep
MRWLSRLLSQAVAARRASAAARSNTSLVKGGSHGFASGGRDGSPEVPREWLRKLWVDELKKQKEAARRWGVGSSLEVAGATEEAPSRSYQYEYSGSNPVEAKLAPLLARANLVIARDIEWANIMFAFEQESRYIIMDPLFPQSPVGFIREKSNIIFRQLLRTRRPFVAEITDAMGNEIFKVRRPFWWINSSIYVEVNDKEIGVVHRRWHLWRRIYDLYLGNMQFAVVENPGFWNWTFNLVDEDDKMLAQIDRNWRGLGFELFTDAGQYAIRFGDEGQSHKFAPAEDVEELHVVRQLTLPERAVALALAISLDSDYFSRRGGWGLPFLIATE

SEQ ID NO: 206778 - protein, 57 aa, Zea mays
  Clone ID: MRT4577_120164C.1.pep
STLLHMDKVHPCLARSRTTRGASWLRAWSDVAVQRPRFHVRAAPTLTQFLGPFVPAL

SEQ ID NO: 206779 - protein, 132 aa, Zea mays
  unsure (1)..(132): unsure at all Xaa locations
  Clone ID: MRT4577_120165C.1.pep
KKKKTVVENPXFWNWTFSLVDEDDKLLAQIDRNWRGIGFELFTDAGQYAIRFGDDVQGDKFAHLPFIISGYVGAHFSQLVNVSQKLQTKELHVVRQLTLPERAVALALAISLDSDYFSRRGGWGLPFLIATE

SEQ ID NO: 206780 - protein, 95 aa, Zea mays
  Clone ID: MRT4577_120166C.1.pep
FTLVDEDDKMLAQIDRNWRGLGFELFTDAGQYAIRFGDEGQSHKFAPAEDVEELHVVRQLTLPERAVALALAISLDSDYFSRRGGWGLPFLIATE

SEQ ID NO: 206781 - protein, 228 aa, Zea mays
  unsure (1)..(228): unsure at all Xaa locations
  Clone ID: MRT4577_120167C.1.pep
MRWLSRLLSQAVAARRASAAARSNTSLVKGGSHGFASGGRDGSPEVPREWLRKLWVDELKKQKEAARRWGVGSSLEVAGTTEEAPSRSYQYEYSGSNPVEAKLAPLLARPNLVIARDIEWANIMFAFEQESRYIIMDPLFPQSPVGFIREKSNIIFRQLLRTRRPFVAEITDAMGNEIFKVIFLQATTAFFRXKLNCTAEXVRRPFWWINSSIYVEVNDKEIGVVHRR

SEQ ID NO: 206782 - protein, 58 aa, Zea mays
  Clone ID: MRT4577_120169C.1.pep
YERSPRAMTEFEPCKRGSMTSFIPSLLEACSCNRRNHMDHWLDGSHRYIGTWLFVTSM

SEQ ID NO: 206783 - protein, 221 aa, Zea mays
  Clone ID: MRT4577_12016C.1.pep
LGAGRGLLYLHEQCDPKIIHRDVKAANVLLDDCCEAIVGDFGLAKLLDHRDSHVTTAVRGTVGHIAPEYLSTGQSSDKTDVFGFGILLLELVTGQTALEFGKAANQKKGAMLDWVKKMHQEKKLDVLVDKGLRSRYDGIEMEEMVQVALLCTQYLPGHRPKMSEVVRMLEGDGLAERWQASQRADSHKSFKVPDFTFSRCYSDLTDDSSLLVQAVELSGPR

SEQ ID NO: 206784 - protein, 104 aa, Zea mays
  Clone ID: MRT4577_120170C.1.pep
PVDPRRPLKKKKKKKKKKKKKKKKKKKKKKKKKKKKKGVTVSKDSGLPSSLLANVLPAFFVPPIFLFTWPPLSRLVHWVNPSPFSLFLSPWRPFPLLPPWRLCL

SEQ ID NO: 206785 - protein, 77 aa, Zea mays
  Clone ID: MRT4577_120171C.1.pep
KGMKEKRLSLGLRSLVLTSDGSGNPNRSERSGSTGGPTVVSRNVVYVPAMPRRSWLSKSCSVLGAINRAAVHQYVLQ

SEQ ID NO: 206786 - protein, 130 aa, Zea mays
  Clone ID: MRT4577_120172C.1.pep
DVSCTRPSACILYSGTPSYWFIFLHNNRQRTLTGFLVVNKTALNLSTPKAVITRLVPRPCPHGTPPLLMVLIDTRTCPAHYLMGAPSSTVHGKRCLCTFAPGSHYRQRKDGNRCLFMEPASPCKKLHCPN

SEQ ID NO: 206787 - protein, 58 aa, Zea mays
  Clone ID: MRT4577_120173C.1.pep
DGPKINSEVKSTIAGSRWESICVTIVLNTMNRLDRAKINLISYRPQIYLQISNTPYLL

SEQ ID NO: 206788 - protein, 139 aa, Zea mays
  unsure (1)..(139): unsure at all Xaa locations
  Clone ID: MRT4577_120174C.1.pep
MDLARDFALKNALDKARAGPDTTNDRTLDLQLEKGLESGRACIGANLNYNPPXDAGGYAKETAYATTYTTKXGAYTSRANNMLHHMLTHTSTNTEQHLEHQLSVPHDELYDEHSDVYTPNKEANNEVKSENDREENMIA

SEQ ID NO: 206789 - protein, 78 aa, Zea mays
  unsure (1)..(78): unsure at all Xaa locations
  Clone ID: MRT4577_120175C.1.pep
TPRAPDCMGAIYTSGMSARACRPVSGPTHVFVXDVDRPVEDAFSRAFLCEGYLAEQVGRIRHFVIPSHRDKDGTPFCP

SEQ ID NO: 206790 - protein, 133 aa, Zea mays
  unsure (1)..(133): unsure at all Xaa locations
  Clone ID: MRT4577_120176C.1.pep
PPGRDIVFYGFPPPKRVGQNPVFLFKKGLCFFFNHGPRVIPRGFGPPIRSFKGALXCNGKTPPQFTGGLGFSKQFSHRFRFSPGPPPPFLGRGSPFYPGFRLGVAFPPKMLGVAPSGKLTPIFFFLCRLVCPP

SEQ ID NO: 206791 - protein, 87 aa, Zea mays
  unsure (1)..(87): unsure at all Xaa locations
  Clone ID: MRT4577_120177C.1.pep
MNDADECYKGNTESICQTFTXSLXYNQYGANNAQYVXWMTVVASIEXRAFIEILEKDDVKTSXXTGCGLYVEGFVIGSAFGHRETLL

SEQ ID NO: 206792 - protein, 93 aa, Zea mays
  Clone ID: MRT4577_120178C.1.pep
GEPQEGKKGKKRGFPKTPLVKKPHKIIQLINPKQKGIQRNQGVKNQDTEKKVGPHSKYFMFLHVWFILFFFFLYSFFLFFFPLLLFFFFFFFI

SEQ ID NO: 206793 - protein, 113 aa, Zea mays
  Clone ID: MRT4577_120179C.1.pep
IDSFIDSFIRIQFPCTRIGHTHHTLNHVTAALRKASRERNKLTPCERIIQKVRESKGGDCDGRNETSRRRGLALESGETRRPVGGARPLEKRDACRQRGALENGAAPWRNETP

SEQ ID NO: 206794 - protein, 90 aa, Zea mays
  Clone ID: MRT4577_12017C.1.pep
RAAAAASQTSMLPHSLRKHRILLMYRSVDGSPTLHVVPAAAPCSSRHSRYRRCFCSSSISLSPGLCICLLRTQEEIAVAQSHTSVVSDAC

SEQ ID NO: 206795 - protein, 56 aa, Zea mays
  Clone ID: MRT4577_120180C.1.pep
QSPGLRWAGTVSVKLLHPFLRRWPGMGHCRGSCLSFVAMVWCSACTKGRQRTDAAG

SEQ ID NO: 206796 - protein, 72 aa, Zea mays
  unsure (1)..(72): unsure at all Xaa locations
  Clone ID: MRT4577_120181C.1.pep
RLLPFKTSAFLGKAPGQPVILRYPYKRFNAAXDSMSGARHVFQPLCHFVYYLYVLRLPVYYPSEQEKEDPML

SEQ ID NO: 206797 - protein, 56 aa, Zea mays
  Clone ID: MRT4577_120182C.1.pep
TVVKKFPSSVPRQSTGLRLSPGRGRSHMGFNAAVLPPPPPSTCTSGFFFSKFHLIR

SEQ ID NO: 206798 - protein, 288 aa, Zea mays
  Clone ID: MRT4577_120183C.1.pep
TSRSTTDSNSNDITSSATRITSFMTALSEHRLNTTRQTPRVRPRVRHAILKFLKQSDSDLKDDFICLSIHQIHKMPWNLFHQLHAGGLASCAKDSRISTSNDSAQSGILTGSLLQLLGSLLDQSYLRDTDGQDMFVKLVDVVPKIALLSFGGQHDGSKSLYQYLKHKILMVMMRLKPYIQQDCSHIVSWLKLLRRYFGDLLHQPISQHIAKPENCLEGSPFLLDMVDLVESQDKSTRHLQRQTIYLFLSCSICLSYNRNDGALQCSCKRDECLLGHKVQGCSNQLHCF

SEQ ID NO: 206799 - protein, 106 aa, Zea mays
  unsure (1)..(106): unsure at all Xaa locations
  Clone ID: MRT4577_120184C.1.pep
TSNNTXHLNXXTTTXTTNTKPPNHHKPFPQXXTTNIYNSTHFLLTNXIXKXLSSFFSTISYYPLFLYSIIIPSFLFLSIYFFFFFFFFFFFFFLFFFFFQTSFFPA

SEQ ID NO: 206800 - protein, 89 aa, Zea mays
  Clone ID: MRT4577_120185C.1.pep
LDHLTLQMCNRRRKEPRVRIVTPCFYSQRCYLCSENTPLEKTFNVGTKEGTATLVQQKKKLDERNYTLSRRDVVQADLNELTEEKLRVK

SEQ ID NO: 206801 - protein, 56 aa, Zea mays
  unsure (1)..(56): unsure at all Xaa locations
  Clone ID: MRT4577_120186C.1.pep
MAAKCRAFFTLLALXTNTTIATHIPLHXPPFMPLCTMNPCIHYSMIQHALANLMAF

SEQ ID NO: 206802 - protein, 41 aa, Zea mays
  Clone ID: MRT4577_120188C.1.pep
SNGFHMVKIIHKGSVLFKSSSIKFQAPFLLIYSYCEKKTKS

SEQ ID NO: 206803 - protein, 31 aa, Zea mays
  Clone ID: MRT4577_12018C.1.pep
LYILKAFTCISMQTHSHGSHTVIPPLYLLCI

SEQ ID NO: 206804 - protein, 50 aa, Zea mays
  Clone ID: MRT4577_120190C.1.pep
NFVNKEFPHSRRRRRRRRSSRREVTGPRNSPSSKIENRFSQPGVCCVGWC

SEQ ID NO: 206805 - protein, 43 aa, Zea mays
  Clone ID: MRT4577_120191C.1.pep
NVPHDQIPNSMTKWLLPMAAYIFLLRNKSILAFGKSQSDSIHS

SEQ ID NO: 206806 - protein, 72 aa, Zea mays
  Clone ID: MRT4577_120195C.1.pep
MGKVPVRMKAVVYALSPFQQKVMPGLWKDITTKIHHKVTENWISATLLVTPVVGTYQYAMWYKEQEKLSHRY

SEQ ID NO: 206807 - protein, 73 aa, Zea mays
  Clone ID: MRT4577_120196C.1.pep
PFNQLTVSICVEYQQQRQQLLNPLSVPNPLVTAFLQQQQLLPYSQFSLMNPAPPPQQPIVGGAFFRLHMRCNR

SEQ ID NO: 206808 - protein, 134 aa, Zea mays
  Clone ID: MRT4577_120197C.1.pep
VLIERGGVVGVEVAHQPEGIHQDPPQQVVVELQIEDGDLGGHPVVHQGHLVLGGLRVVVLGHNRGRCFVVQVVRAGSPSSSGRRRSSRSRLSPSVAAILEPDRPCRRRPRGRGQGVSVSIIHGSLVYIIPWHVW

SEQ ID NO: 206809 - protein, 199 aa, Zea mays
  Clone ID: MRT4577_120198C.1.pep
YCQPNLAPSDSVGSPIVSFTIPRPLETIDSDDPIMQSMWSRAVPSQSSCRCVSCLSTVANGVTSRSATAASKRKLRIGNSVTALYTSIFAAAALADAKAKTQRRHDLEEKIAAVKAEVNELVDEEHRILQSLQSRRKNRGINRLLQEGGFGTVATSPRIRQRITPSQQPARSFYTQRHIYGNQGAQIDENLPTGGVWAS

SEQ ID NO: 206810 - protein, 89 aa, Zea mays
  unsure (1)..(89): unsure at all Xaa locations
  Clone ID: MRT4577_120199C.1.pep
GRGPEGSIKRNDFKGGNAPKGVHATPINLEYTKFTNAKEPLGEHPXARHSVTLCILRLVHHHHFADYPTIGVAFEFFLQITRLTMVPVF

SEQ ID NO: 206811 - protein, 56 aa, Zea mays
  unsure (1)..(56): unsure at all Xaa locations
  Clone ID: MRT4577_12019C.1.pep
ESAVASCLNGSRCICACAPCFSVVTVSNLTHCPCSITRXNFVTATGLTTVCSRCCY

SEQ ID NO: 206812 - protein, 97 aa, Zea mays
  Clone ID: MRT4577_1201C.1.pep
SEIKDFILIVRRKDARSVKIKRSKDVVKFKGIPNPVGVVPRIVGVALTGFFFDSTHSWSISLFAPSIFFYLTGTVVWLAFPSNKPQDFSKSGPPPPP

SEQ ID NO: 206813 - protein, 157 aa, Zea mays
  Clone ID: MRT4577_120200C.1.pep
MKRNPRVTSSRRKCRKAHFTAPSSVRRVLMSAGLSTELRHKYNVRSIPIRKDDEVQVVRGTYKGREGKVVQVYRRRWVIHVERITREKVNGSTVNVGIHPSKVIVTKLKLDKDRKALLDRKGRGRAADKAKGKFTADDVAAAAAGGAATGASLQEID

SEQ ID NO: 206814 - protein, 85 aa, Zea mays
  Clone ID: MRT4577_120201C.1.pep
LLVFKQLAALNSSAYVQQLRRLPFSQLAAVSPAVFLTQQQWLSVYLHSAPNICTLLQLLQLLTINQLALTNPSSFYLQPIIGRAL

SEQ ID NO: 206815 - protein, 70 aa, Zea mays
  unsure (1)..(70): unsure at all Xaa locations
  Clone ID: MRT4577_120202C.1.pep
KKLYLSRNVMCYKCKGKDMKSGALKMCRECQCXGMNVTIGEMNPYMMHQMLESCDERNVTGQSINEKDRW

SEQ ID NO: 206816 - protein, 95 aa, Zea mays
  Clone ID: MRT4577_120203C.1.pep
PGPAEPAGCPWIILESGVLGQERGAPARMVQARKNHPFETLLKSVLRVVLERIRIAYRTIGFLGSRLRREMEMARQGGQSSKRSGQGSSTSGGLR

SEQ ID NO: 206817 - protein, 137 aa, Zea mays
  Clone ID: MRT4577_120204C.1.pep
FHHRGFCWGQLNPIKFEKCVGKYLWGIGESTPAHGQLNCHFYRCAILAVLSLSPIQVTSVQLKSREAPQAAREAARQGLSMRFLSWYHCTCYVHSSRCIFVSCIEGNKREVGGRGDLFSRKTTRERMIIKRTGGLGG

SEQ ID NO: 206818 - protein, 162 aa, Zea mays
  Clone ID: MRT4577_120205C.1.pep
AASRIMGQSLHRCDVTTVSMTLSPLNHASDFFARGDRRYVCCLSTRTRIPQGPGRRGAAGRAPVPSLLRTVAAGAEAGVEASQLQARSSAGGAAAAVAAEATAHSSPHFISPPPCGGRRRRLCVGAWQTPRRVVGAWSSPASRRRSRCDRAGSACFLSPSTG

SEQ ID NO: 206819 - protein, 86 aa, Zea mays
  unsure (1)..(86): unsure at all Xaa locations
  Clone ID: MRT4577_120206C.1.pep
DNKDMTLVYRLLNMPLTHMLDKVGRERTTTNMDGDLDTKERVTTVQLFAALPAVDXETVEVKRIHNCRGLSYEWPAYISRTYYLRK

SEQ ID NO: 206820 - protein, 95 aa, Zea mays
  unsure (1)..(95): unsure at all Xaa locations
  Clone ID: MRT4577_120208C.1.pep
LALCRAFDLLPMLNKEDQILLAVKESKAKDGNAXXASQMLDERTKRAGPXHHKAARRLADSKPDDPITCSTFAQDVIQGRERVSQAHEHTTPVSD

SEQ ID NO: 206821 - protein, 66 aa, Zea mays
  unsure (1)..(66): unsure at all Xaa locations
  Clone ID: MRT4577_120209C.1.pep
FDLSGIKYTCQLQYLSILSPPFVQSISHFLMFPTRMNRKYNNYLFHLIVLFFRTLPPPPXWXGTAG

SEQ ID NO: 206822 - protein, 110 aa, Zea mays
  Clone ID: MRT4577_12020C.1.pep
GGSAVGGGNQSVNSPQAAGRQAGVCLFFLRPFPPLGRFIPPAGGGVSATDERPPTHPTNPPWLSAFFSLPDALLVSGKTSPPPPSPKKGWVGKHSLGDCLFAPLLIGWES

SEQ ID NO: 206823 - protein, 320 aa, Zea mays
  Clone ID: MRT4577_120210C.1.pep
MDMAASGALPVVDLAPFFTDGDEGGASRARATEAVRQACRTHGFFRVVNHGVPAHLMARALELSSAFFALPDDDKARARAPEGSEAPLPAGYARQPAHSADKNEYLLVFGPKLGFNVYPAEPSGFREAVEECYTKLTELGLLVQEVLNECMDLPPGFLTDYNSDRSFDFLAALRYFPATEEEDNGISAHEDGNCITFVIQDGVGGLEVLNDDGDWVPAEPIEGSIIVNLGDVIQVLSNNKLKSATHRVVRKPVHRHSFVFFFNIHGAKWIEPLPEFTAKIGEPPRYRGFVYNEYMQLRMRNKTHPPARPEDVVHVTHYAI

SEQ ID NO: 206824 - protein, 209 aa, Zea mays
  unsure (1)..(209): unsure at all Xaa locations
  Clone ID: MRT4577_120211C.1.pep
MSASFFSLQGQTALVTGGTRGIGQAVAIGLAEAGSDIILVQRDTTSQSTKESIEKLGRKAFIYTADLSSQESVAALVPKVLADGHEIRILINCAGIQRRHPCEVFPDSDFNEVIQVNLNSVFTLCRDVGAHMLNLEPSPVTGRRGSIINFGSLLTFQGGFTVPAYAASKGAVGQMTKSFANEWTAKGITVNAIAPGYIETDMNXALLNN

SEQ ID NO: 206825 - protein, 64 aa, Zea mays
  Clone ID: MRT4577_120212C.1.pep
LSNESGSAVSGLLYQGLRAKQNFYFHPLTNDVTIAFSSSNSDKLLIFNGKLPTYFDLKASTTFG

SEQ ID NO: 206826 - protein, 42 aa, Zea mays
  Clone ID: MRT4577_120213C.1.pep
PPGGGVGDGLMARRLVVARVVRWVEATTRAALRGACFREPAR

SEQ ID NO: 206827 - protein, 101 aa, Zea mays
  Clone ID: MRT4577_120214C.1.pep
GGKTLGFKRTHKMPALGVILVKQINPHPWGCMGITGLPQEDFPFWGGEKCKLSRGCRKPFFNRIGGAPGKNNRGLFFFHPPATRGLGPPPEKTTAAYFFFP

SEQ ID NO: 206828 - protein, 60 aa, Zea mays
  Clone ID: MRT4577_120215C.1.pep
VFVLLENMPNGPIVLETLELSGPINNMCCTHMMIYIIFFICSYRHVLLVTIVPCTRAKVH

SEQ ID NO: 206829 - protein, 103 aa, Zea mays
  Clone ID: MRT4577_120216C.1.pep
NHISWLVKRTLMRCAALCCRGAAIHSAHSPKASMDSSLLFMAGGASPGISLMFLLCGLTIDDRQGRRQGRKWVEMRNEELQIRGDDREPAPRSMPTTSSLFQT

SEQ ID NO: 206830 - protein, 809 aa, Zea mays
  Clone ID: MRT4577_120217C.1.pep
MVMDAGLHEPCALLPGSKRDSHMLVYPQIAAAANGFTAQELESLLFLSPDGITLAAGSGGGGGGGSYLNVAPTTVVPPAPTNRASPPRDVSAAPPSVGQPDDSEAFSDIVLGYINRMLMAEDIDDKFEHYPEHPAVLAAEKPFLEILAERPSSSGGSAVESPGGSSVGNSCYSARSCTCATATAASDAFGAVLTPALDFPSAAFLQPPQLYQDLSPEGSVVDAGGAWPYDSTEFYQLHSNPSSFASSNGSCATISDGFESLLSSPGVMPDVGFADFAVQSQQAMQFCRGFEEASKFLPDESKLVIDLEKPASVTSLVANIKGENRFAEVKAEKADVQAEIHRGKKHFYGDDLDAEEGRRSKHSAPAIDTDHLVREMMDKVLLCNGETCSKGVKELREALQHDVAKNSHGVHGKGSGHGKGRGKKQPKKEVVDLETLLVHCAQSVATDDRRGATELLKQIRQHASPNGDGDQRLAHCFANGLEARLAGNGSQIYKSLIMTRFPCTDVLKAYQLYLAACPFKKISHFFANQTIMNAVEKAKKVHIVDYGIYYGFQWPCLIQRLSTRPGGPPRLRITAIDTPHPGFRPAERIEETGRYLKDYAETFNVPFEFRAIPSRFEAVQIEDLHIAKDELLIVNSMFKFKTLMDESVVAESPRNMVLSTIRKMNPHLFIHGIINGSYNAPFFASRFREALYHYSAIFDMLETNIPRDNEQRLLIESALFGREAINVISCEGLERMERPETYKQWQVRYQRAGFRQLPINQDIMKRAREKVRCYHKDFLIDEDNRWLLQGWKGRIVLALSTWKPDHRSS

SEQ ID NO: 206831 - protein, 288 aa, Zea mays
  Clone ID: MRT4577_120218C.1.pep
MESEGAGEHFVEQADGSGHVVWTSAMSAYMLSNLASLVAEGIRTSTGFKKVHLNMCAKALNDYFKMKLTGEQVKNHLRTWKRRYAKINRLRKLSAASWNEDNYMITLDHEHYANYVQDHKSDAEFLNKPLENYKEMFIVFGNNMATGKYAKGSSEALGTEDRNSMAETEIDEGDGNAVPSPIDDIGASSSAPRPRKKAKVTGNEEAGLIGAFKDGAERLAMAIEKAGSDDLPPDLLQTLQSIPGFDDTHKAFYFAYLVKNPGLARQFPTLPLTYQISLLARFVSENLP

SEQ ID NO: 206832 - protein, 63 aa, Zea mays
  Clone ID: MRT4577_120219C.1.pep
NMLAGFPIFFPLRKPIYVPEGSPMEVHFWWCCAPTKVWYEWAVTTPTPSPIHNSNGRSYWVGL

SEQ ID NO: 206833 - protein, 324 aa, Zea mays
  Clone ID: MRT4577_12021C.1.pep
NSARGVDEAHRLKNCEASLYTTLLEFSTKNKLLITGTPLQNSVEELWALLHFLDPVKFNSKDSFVERYKNLSSFNETELANLHKELRPHILRRVIKDVEKSLPPKIERILRVEMSPLQKQYYKWILERNFQNLNKGVRGNQVSLLNIVVELKKCCNHPFLFESADHGYGGDSIGDRNKVERIVMSSGKLVLLDKLLVRLRETNHRVLIFSQMVKMLDILAEYLSLRGFQFQRLDGSTRADLRHQAMEHFNAPGSDDFCFLLSTRAGGLGINLATADTVIIFDSDWNPQNDLQAMSRAHRIGQQETVNIYRFVTCKSVEEDIWNA

SEQ ID NO: 206834 - protein, 129 aa, Zea mays
  Clone ID: MRT4577_120220C.1.pep
MESEGAGEHFVEQADGSGHVVWTSTMSAYMLSNLASLVAEGIRTSTGFKKVHLNMCAKALNDYFKMKLTGEQVKNHLRTWKRRYAKINRLRKLSAASWNEDNYMITLDHEHYANYVQDHKSDAGVFKQA

SEQ ID NO: 206835 - protein, 306 aa, Zea mays
  Clone ID: MRT4577_120221C.1.pep
MESEGAGEHFVEQADGSGDVVWTSAMSAYMRSNLASLMAKKWMSDTTCVNMLRLSRSSFFRFCKAFRNRGVHEDTKIMCVDEQVAMYLNTLGQNLRNRLVGTNYGRSGETVSRYFNKVLRAIGELRVELIRPPSLETPSKIAGNPRWDPYFKDCIGAIDGTHIRASVSIDMEPSFRGRKSYASQNVMAVVDFDLRFTYVLASWEGSAHDALVLRDALERENGLRVPQGKFYLVDAGYGAKPGFLPPFRAVRYHLNEWGNNPVQNEKELFNLRHSSLRVTVERAFGSLKRRFKILDDATPFFPFSTL

SEQ ID NO: 206836 - protein, 83 aa, Zea mays
  Clone ID: MRT4577_120222C.1.pep
MSLFCFIQATDLAGLLHLVKFYKSRRFDSDIGMPRPNDFHDVPEYFVLEAIPHAVALVRSSDKNSPKGAIEFILQLLKYNDNN

SEQ ID NO: 206837 - protein, 103 aa, Zea mays
  Clone ID: MRT4577_120223C.1.pep
PFNIPQFIQNQTFHARQTRGGSRWNETKKEERVLALTAWATVTVLTCNLYRPSPTNPRPLGGQVRSRDLLPPIVPVLGDKHRFVVLLGDDHGLAHRDALVLGG

SEQ ID NO: 206838 - protein, 47 aa, Zea mays
  unsure (1)..(47): unsure at all Xaa locations
  Clone ID: MRT4577_120224C.1.pep
NWKKKGTLTDKVIKCNXTVQAHLGPFENEGLDFGVFKLWMQDLRETV

SEQ ID NO: 206839 - protein, 65 aa, Zea mays
  Clone ID: MRT4577_120225C.1.pep
PVKKSPPEKNGLAPPEDDENGFFDAANNDELVPADFTPKLGLQSAKKKGIQVQLALKSNGGGPRG

SEQ ID NO: 206840 - protein, 188 aa, Zea mays
  Clone ID: MRT4577_120226C.1.pep
MPPSKPEPKKEAAKAAPAPAPAPAPEPPKEPAFDPKSVKIDFTADQIEEFKEAFSLFDRTPTGEMKITYGQCGDVLRALGQNPTNAEVLRVLGKPKPEEMNAKMLDFETFLPILQHISRNKEQGTYEDFVEGLRVFDKESNGTVMGAELRHVLATLGEKMTEAEVEQLLAGQEDANGCINYEAFVKHI

SEQ ID NO: 206841 - protein, 104 aa, Zea mays
  Clone ID: MRT4577_120227C.1.pep
GSFLTTISTTLSSPFTQRDTHQGKHEPVQLNSGVYPDGPPVPLRSRKLLKFVDISEVVKGPHDVPGHWLVIAAKLVKERRKIGIHVKFALLGYEGLSQNDSFMG

SEQ ID NO: 206842 - protein, 154 aa, Zea mays
  Clone ID: MRT4577_120228C.1.pep
RGGAPNPNLNWCHKIFGGGEGGNCPFFVLPKKMGPLLVFPLPFFLLKKGVQKGALAIFLGAFSGGGPYQTHKNWGFKGFFNFFFLGFYRPSRGVVPKKGIVFPPPQFFSVFGGPFFLNFFLGGSPLRGQCWKLNLYFGCPWVWNPIIFFVQNPF

SEQ ID NO: 206843 - protein, 71 aa, Zea mays
  unsure (1)..(71): unsure at all Xaa locations
  Clone ID: MRT4577_12022C.1.pep
PGQKGHPPKPAGCDFRGQTTGGGPPPSRXQHPKGEPSPPGAPPPGGAVNHGSFKRRRDLGICVVWGPLGAP

SEQ ID NO: 206844 - protein, 104 aa, Zea mays
  Clone ID: MRT4577_120231C.1.pep
VKCWRRGRSCHLTRSSTRIVGSDAMTRSGDSQCPAMKSNTRRRHGSSSGDTVEEALPLGCTELVPIRSRVVAVDERVVHRVDHRVYEHEHSRITEPRWRRCMQY

SEQ ID NO: 206845 - protein, 70 aa, Zea mays
  Clone ID: MRT4577_120232C.1.pep
KKAPPKSMPGAPVFLIQQKMIGQSFCRAAFALRNPAWEAQSFWQLAPASSLRGDLVLSTLMYVKCWTFLS

SEQ ID NO: 206846 - protein, 375 aa, Zea mays
  Clone ID: MRT4577_120233C.1.pep
MGWASCCKRSDGAEPGRRRRRRKKKDTAWRIFSLKELQSATNNFNYDNKLGEGGFGSVYWGQLWDGSQIAVKRLKSWSNKAETEFAVEVEVLARVRHRSLLSLRGYCAEGQERLIVYDYMPNLSIHSQLHGQHAAECNLSWERRMRIAVDSAEGIAYLHHSATPHIIHRDVKASNVLLDADFQARVADFGFAKLVPDGATHVTTKVKGTLGYLAPEYAMLGKASESCDVFSFGVTLLELASGRRPVEKLSPTTSAKQTVTEWALPLARARRFGEIADPKLQGGFVEEELKRVVLVGLVCAQDRPELRPTMSEVVQLLKGESAEKLDSLENDCLFKPGGSSFQGSDCVGEGEGRSPGADGGIQEAVDSSETVSSAS

SEQ ID NO: 206847 - protein, 71 aa, Zea mays
  Clone ID: MRT4577_120234C.1.pep
GTTTRQHFWIFGFVCCWSGCSRCEMAVVEDNRVFVGGHPWSVSEEDLRETFSKYGEVVDARVNIRVPFVLG

SEQ ID NO: 206848 - protein, 51 aa, Zea mays
  Clone ID: MRT4577_120235C.1.pep
NEFFSISSQPKSSKILFVLIKTHIFHLFTLLYTFYRLLQISPYLTFLSKIT

SEQ ID NO: 206849 - protein, 77 aa, Zea mays
  Clone ID: MRT4577_120236C.1.pep
AGYHGSENTKINKISQEPPTVVPAAARKASLGFLAFHNSLQDAKPSEKGVGIKEMQHKHHRDGSEVEKEFRLNCTDC

SEQ ID NO: 206850 - protein, 209 aa, Zea mays
  unsure (1)..(209): unsure at all Xaa locations
  Clone ID: MRT4577_120237C.1.pep
MAALHPQRLFLAQPSSSPSTSTARPRPRPRRSGAATCRAALRVASGIHTAQDNLSLKLGWIEAPRVPASPSTDVSVERLRAIAEAAADRAEMHDIIGKQRDNWNHLLLHSTNSLTLAASVMAALAPAAPTMVALKASAGVLLATAAVTMAAVNKIQPSQLAEEQRNATRLWREVERDVRAALALAAPTTRADVQEAMDXVLALDXAYPL

SEQ ID NO: 206851 - protein, 180 aa, Zea mays
  unsure (1)..(180): unsure at all Xaa locations
  Clone ID: MRT4577_120238C.1.pep
WQWLPATLLAGGGHGPRKVLSGRKATGEARLRSPAKFTVTGRRTPSTFKEQTRGFPAQRSFFDRRTRCPKRRSTATQDSPQEGGTSNAAKAKTLLLSPLTGAGETYGVXTAKPASKEAGNGRAKIPRQPNIKLAYRVEYPLHCITLVAILACVAPARSCPLSTMFIVFHTNLPLRTDYVI

SEQ ID NO: 206852 - protein, 97 aa, Zea mays
  Clone ID: MRT4577_120239C.1.pep
DGTPFIGILGGAFREILLAWISLQEIIAVQNYLYCLGMILELIGFIKLGVDHTNACRPYKIPLGTIGAILMIIPPGLLIIAGMALRCYKVMGMRILD

SEQ ID NO: 206853 - protein, 78 aa, Zea mays
  Clone ID: MRT4577_12023C.1.pep
YDLAFLAGFCILWSIFFFPPRYDPRNLLAEFVGSNRRDGFLGWCFLLTISLCIASRVVMSERKDSGPIKPCHIMEAYR

SEQ ID NO: 206854 - protein, 104 aa, Zea mays
  Clone ID: MRT4577_120240C.1.pep
MEAKFFRFLKLVGVGFKARSESQGRELFLKLGFSHEVQFTAPPAVRVFCFKPNIICCTGIDKDRVHQFAGAIRSSKAPEVYKGKGILYIDEVIKLKPGKKRKNK

SEQ ID NO: 206855 - protein, 183 aa, Zea mays
  unsure (1)..(183): unsure at all Xaa locations
  Clone ID: MRT4577_120241C.1.pep
QASIFTGYWEDGGXTKSKKGANKAHTEQPSKFKKHDPKTPFSTAQRCMPPTQVDKCKEXXERGGKKRTGKKRXGXRKYAFITEGCXLTECNIEHSVIGVSSRVSSGCELKDSVMMGADIYETEEEAATPPPARSALRQKASGATCVQKLDGSRDSAIHTRYRILLRSSSMREPRYHAKAAFST

SEQ ID NO: 206856 - protein, 169 aa, Zea mays
  Clone ID: MRT4577_120242C.1.pep
FPGRLLLQGNNNNGGQAEAQGSRGDERRQVAWKEHDGECSKEKQPTSGEMVTSKARAREMVAGKKRSTLKPRSVASLLRLLACKGGFATPVLEPRSPFPQSRMEKLLKAILEKKIHPQNPSTAAARRHQLDWKLDEKEIDECLDDALRDLDDDGAKWVKTDSDFIVLEM

SEQ ID NO: 206857 - protein, 58 aa, Zea mays
  Clone ID: MRT4577_120243C.1.pep
AICSSGACIRPPPRWQPNYLLLVNVVTTSIITKPCYVNITSSSALKSSNPFPLFFPVM

SEQ ID NO: 206858 - protein, 86 aa, Zea mays
  unsure (1)..(86): unsure at all Xaa locations
  Clone ID: MRT4577_120244C.1.pep
HAFSDYSLLXHVFGLVLHSGVMVXPYLWGKYSHRRHHSNTVSLERDEVFVPKKKEALPWYTPYVYNNPVGRLVHIVVHLTLWWSLY

SEQ ID NO: 206859 - protein, 770 aa, Zea mays
  unsure (1)..(770): unsure at all Xaa locations
  Clone ID: MRT4577_120245C.1.pep
MAVLLRPAAIAGGRQVWPVAEDEEGAREAEASSQRLVEAVARGDAREAGELLAAGRADVNYAGVVWLRARRVAEAEPREDAAAEARAVHEEIRADVSPLFLAAGNGDVALVRALLAKGADVNGKVFRGYPTTAAVREGCAEVAERVEGGRCSSCANEVEEAAELWVRGIRVXYQGGVWQERQGVSNAWLRSLRLESVGCSERVLVKSCSGRRAVGVLCGSVWGAAALVFSSRALXAMMVFGSGAWCCVVLCVYRLAVVSSTXVRLXACCWVASTGEELRVGAGLAEPYDAVWCAVEYYESTGSILRMLLRSGFTSTAAHLGRTLLHHAILCGSAGAVQTLLASGADSEAPVKTTRSNRSRPVHLAARLGQPEILRMLADRGCDLNARAEAGDTAAIICSRHKREDCLRVLVSAGADVALLNSAGDSSASVASSGGWKTGFERAVIGAIRCGAVPRSSERSVFSPLMFGALCGDATAMEVLLSQPDVDVDEQDSDGCSPIMAAAKMGNVEAFRALVFAGANVKLSNKRGETAIGLAQQSKKRDLFEQVMLELALEKGMPGGFYALHCASRRGDTAAVRHLASTGCDVNIPDGDGYTPLMLAAREGHAGVCELLISYGARCDLRTPRGETALSLARAALATAAFNKAEDVIMDEMGRQAVLQGARVRKHTKGGRARPHGKSLRMVAAAGVLRWGGSSRRNVICREAEVGGSSAFQRHRQRKGDAYEPGLFRVVTATGREVHFVCQGGKEAAELWVRGIRAVTRAAFGKRGKE

SEQ ID NO: 206860 - protein, 56 aa, Zea mays
  Clone ID: MRT4577_120246C.1.pep
MAKVPMRVLVTGAARQIGYALVLMIATGVMPGADQHAMLHMLDIPPTADSLNGDKT

SEQ ID NO: 206861 - protein, 75 aa, Zea mays
  Clone ID: MRT4577_120247C.1.pep
VYSVDGLLRGPYYLVLAMGYRCSMIPLLHMMRWTFSASPLTEGKDAFPVIISQGLIVEWPFAITNSNLVVNKPLL

SEQ ID NO: 206862 - protein, 72 aa, Zea mays
  Clone ID: MRT4577_120248C.1.pep
LKNWRCNIKRPENCWGDFRILGSHDRRHDTYPSCIHWWIGDTTGAMFYQSEGPIQKPTTMLTRGMGFPQLPR

SEQ ID NO: 206863 - protein, 73 aa, Zea mays
  Clone ID: MRT4577_120249C.1.pep
AFIGAEAGKTAPSSSRRGAETAPARTKRPCSYGDECGSRSCNDNAPAGRLEETYAGDACKRSGSVRERTQGEC

SEQ ID NO: 206864 - protein, 224 aa, Zea mays
  Clone ID: MRT4577_12024C.1.pep
QHQQQQQEDDVMQQPPPQQCNYAMKTEMPPWPAMAYDHPLLQPLCNAAAAAAAQGSAATSAPQLPAASAHLSATALLQKAAQMGATIGGAGYTQMAGPATSATAAFGLGLPGLQNAQHHHPQQQDGGGGVMAAGLARTASSHGRGGDEGGGGGSGDGMTRDFLGLRAFSHRDILGLAGLDSSCMGAITASASMGCYEPQQQHTQPQAPQQQQSSNEPWHGMGQP

SEQ ID NO: 206865 - protein, 58 aa, Zea mays
  Clone ID: MRT4577_120250C.1.pep
KCPAILPKTTPPALGIRSLNVTHVKKTTLDPCTYAKKKMSLQPVKLLGKTVFLLGLPS

SEQ ID NO: 206866 - protein, 69 aa, Zea mays
  Clone ID: MRT4577_120251C.1.pep
MYRSQDEEDDEKADEDKADSDAEDSKDSDDEKQHVRNSFLRPDQAICHVSLCLCPHTPVVMKCHLQDEL

SEQ ID NO: 206867 - protein, 52 aa, Zea mays
  Clone ID: MRT4577_120252C.1.pep
PQNPEPFFYAPLFWGVPPKPFARCLSIKTPPLFVAFLNLFFTPVPPQRFFLK

SEQ ID NO: 206868 - protein, 143 aa, Zea mays
  Clone ID: MRT4577_120253C.1.pep
STRSSAQQQSTRRTPPPPQQQQWRAPALSAWCCSASWPRTQPQRRSPRQPRPPRRPPPPPRRRPRPRSRPRPPPRRPPPQPPSPPRSPRPRRPRRRRSLPRPPRTRRRSPRPRLQPPSPRHPPAPSAPRLRHLRPAKPTHPAR

SEQ ID NO: 206869 - protein, 245 aa, Zea mays
  Clone ID: MRT4577_120254C.1.pep
LAGNSSGRARSTRSSAQQQSTRRTPPPPQQQQWRAPALSAWCCSASWPRTQPRRRSPRQPRPPRRPPPPPRRRPRPRSRPRPPPRRPPPRPPWPRPPRRPPRRPPPRPSLRRPLPRPPWHPPRRRPSPPPRRPLPPRRPRPRPPRRWPSCRPPPRLPPPPPPPRPPSPPRSPRPRRPRRRRSPPRRPRTRRRSPRPRLQPPSPRHPPAPSAPRLRHLRPAKPTHPARSAMAWPPTPRVLEGPWQA

SEQ ID NO: 206870 - protein, 126 aa, Zea mays
  Clone ID: MRT4577_120255C.1.pep
FFFGAAAAPGRFSDPAQNGSAFFFFTHQKTATNTFVRLSGAARPRLKFRVYRTHISPASPFLVYSFSSYTSFYVIRVSNVISPRREPFCRFHFFLTSKKSISTRNNSNFQLQSLKQNCFGPNTRKI

SEQ ID NO: 206871 - protein, 143 aa, Zea mays
  unsure (1)..(143): unsure at all Xaa locations
  Clone ID: MRT4577_120256C.1.pep
RPVAAEQPSRRPPRRRSRPRPRASPAPPAATCAXAAYTEPPPPRQHAGLVRSDAPRTELAPVPAVAHLDGACWPAAAALDVLLPELGGEQLFPYGYGDFFGGLQDRALEQQLSSCYFPNVAEIWGAAAVAPDGKPPGLCNRLT

SEQ ID NO: 206872 - protein, 53 aa, Zea mays
  Clone ID: MRT4577_120257C.1.pep
LMIVEPEQRVPDFIKAGADIVSVHCEQTSTIHLHRTVNQVISVPPYIYKLMLR

SEQ ID NO: 206873 - protein, 79 aa, Zea mays
  Clone ID: MRT4577_120258C.1.pep
MQIAHESSGEMSFGWGRQQLFLGTFSKRLNRCFNDATNGVPGDGWSLMSNDGAEDVPIVVDSFSKQTYWCSCQLLPDVF

SEQ ID NO: 206874 - protein, 83 aa, Zea mays
  unsure (1)..(83): unsure at all Xaa locations
  Clone ID: MRT4577_120259C.1.pep
RRRPSTAGRXKGRNRPRGARSAKQQDTRRAPPRXGGKGTPRQARTPPDTPTTPPGRPXRPRDAPPGXRTGPTTSPTRDVACFV

SEQ ID NO: 206875 - protein, 61 aa, Zea mays
  Clone ID: MRT4577_12025C.1.pep
QKTIMYPSTDPMEWNFNKPPCPYEKELLSTLITIYLRAVIQFMPELSLVHTAFILIKNAPT

SEQ ID NO: 206876 - protein, 54 aa, Zea mays
  Clone ID: MRT4577_120260C.1.pep
SGHCGLFLALPALLGPTSGLQLLHAPLEVNNHRVSHGARQGKIQVGFSSSRIPS

SEQ ID NO: 206877 - protein, 39 aa, Zea mays
  Clone ID: MRT4577_120261C.1.pep
VRDEPCMIMKHLAARSAVARMLVGRFYEGMVRLMYECIK

SEQ ID NO: 206878 - protein, 169 aa, Zea mays
  unsure (1)..(169): unsure at all Xaa locations
  Clone ID: MRT4577_120262C.1.pep
GGGATNKPQELDDAVLRRLVKRIYVPLPGPNVRRLLLKNQLKGQAFKLSSKCSRVSLYNYLIVVVVYVAQSFYVWHGSQPGTDXADHDFERLVVETEGYSGSDLRAVCEEAAMMPIRELGPQSILAIKANQLRPLKYEDFKNAMAVIRPSLQKSKWDELEKWNEEFGSS

SEQ ID NO: 206879 - protein, 105 aa, Zea mays
  unsure (1)..(105): unsure at all Xaa locations
  Clone ID: MRT4577_120263C.1.pep
GNIPLSPFVHQSPALSLVQSLVQTIKAHYLQQLVLPAINQVAQANLAFYFXLLHFFLFNQLFTLNRAAYLQVQLLPFFLLATVYSXYHQLYSFYQLVALXPVFYL

SEQ ID NO: 206880 - protein, 87 aa, Zea mays
  unsure (1)..(87): unsure at all Xaa locations
  Clone ID: MRT4577_120264C.1.pep
HFYSPNIMALGRGSMDHNSLCAEPDPTINVHLMDKYTFYVIEILEEITPANQTNMHNLFQVCPKSLXCVSTPGHRTDLFQRYPKNVL

SEQ ID NO: 206881 - protein, 90 aa, Zea mays
  Clone ID: MRT4577_120265C.1.pep
MAQPAFLSSLRSRLGSAPPPPPNHRLQPRRGYHVELGAREKALLEEDVALKRFKSYKNSVKQVSKIGNALTLAVVLACSYELAVLATSTK

SEQ ID NO: 206882 - protein, 97 aa, Zea mays
  Clone ID: MRT4577_120266C.1.pep
FYKQTVAPPKLNIQNDPPAMFNKASHPQKKRQKNPKPRWLVPGPGVGPWESNWGSGLQNPPIVTTRFRISAKQFFLGPGPCSTPQSRTRPNPRGFFF

SEQ ID NO: 206883 - protein, 48 aa, Zea mays
  Clone ID: MRT4577_120267C.1.pep
LIDRKISLWPFLKPKFAFFALFLKNSSVPESQSPLFIVCFLVEDHLMI

SEQ ID NO: 206884 - protein, 120 aa, Zea mays
  Clone ID: MRT4577_120268C.1.pep
MLEMMEVEIEGCYFRWELTSQSEKTSHAIVPQLGSTRPRPCGRASARLGAPLVARVLSAPLSTRLGASLAARVLGCGSLGARVLGASLGRPGCSAPRSAVAWWLAAWMLMEPWRVENDGG

SEQ ID NO: 206885 - protein, 239 aa, Zea mays
  Clone ID: MRT4577_120269C.1.pep
MAEKGCLKRLQKEYHALCKEPPPQIVARPLPNDILEWHYVLEGSKGTPFEGGYYYGKLKFPPDYPFKPPSISMTTPSGRFAPHKRICLSMSDFHPESWNPMWSVASILTGLLSFMMDDALTTGSIKTSDAEKRRLAKASLAYNCESKNCPHFRKLFPEYVEKYNQQQQLENTAAEPVPQENPAPVPSLAVQQAPVVANRAQPLAEVRRDKNQKKAVPFWMVLVMFSVFGAVMALPLMQL

SEQ ID NO: 206886 - protein, 51 aa, Zea mays
  Clone ID: MRT4577_12026C.1.pep
QRRVAALIWPDCHCVMKRYYSCKNSVVLFSALGFFYTCVWGGKFFFQAPPL

SEQ ID NO: 206887 - protein, 60 aa, Zea mays
  Clone ID: MRT4577_120270C.1.pep
TNPVFVSIHIKLRFPSDTHTDYFPCCNKIFFEATRHLTVFYPCTRHCKPNLWNIYFQVRP

SEQ ID NO: 206888 - protein, 239 aa, Zea mays
  Clone ID: MRT4577_120271C.1.pep
MAEKGCLKRLQKEYHALCKEPPPQVVARPLPNDILEWHYVLEGSKGTPFEGGYYYGKLKFPPDYPFKPPSISMTTPSGRFAPHKRICLSMSDFHPESWNPMWSVASILTGLLSFMMDDALTTGSIKTSDAEKRRLAKASLVYNCESKNCPHFRKLFPEYVEKYNQQLQLENTAAEPVPQENPAPAPSPAVQQAPTVANSAQPLAEARRDKNQKKAVPFWMVLVMFSVFGAVMALPLMQL

SEQ ID NO: 206889 - protein, 116 aa, Zea mays
  Clone ID: MRT4577_120272C.1.pep
HKRHVSSGQRQTLVSRQNQKFHLAIGTNFATATRDRVMENDVDNEIDHQTVSEIDNNERTGLCPFPHTESNNMTEGADIGMQHQAAPTVTTNEDDDEAALFEDDEDEGYLFAGQVS

SEQ ID NO: 206890 - protein, 159 aa, Zea mays
  Clone ID: MRT4577_120273C.1.pep
QSICFSSNCLHFLSFVGLTCKTLCCSILTGLLSFMMDDALTTGSIKTSDAEKRRLAKASLAYNCESKNCPHFRKLFPEYVEKYNQQLQLENTAAEPVPQENPAPAPSPAAQQAPTVANRAQPLAEARRDKNQKKAVPFWMVLVMFSVFGAVMALPLMQL

SEQ ID NO: 206891 - protein, 103 aa, Zea mays
  Clone ID: MRT4577_120274C.1.pep
SLTRSEPHCCTRGYGTTHCGQIWAHKPTGPQPLPRQTNEGGATDAHKLVKVLGRHHTMADHGSWIPTRMHSSLPSAQCDKPLGERLSCATSRLVGTGHNRLDS

SEQ ID NO: 206892 - protein, 158 aa, Zea mays
  Clone ID: MRT4577_120275C.1.pep
PRKLDWLNTAPLQFGRDLKGRVVLLDFWTYCCINCMHVLPDLDFVEKKYKEKPFTVVGVHSAKFDNEKDLEAIRNAVLRYNITHPVVNDGDMYLWRELGVNSWPTFVLIGPNGKVLAQISGEGHRKVLHISLENATVVYTLLLLHPSILQTIVFGIHF

SEQ ID NO: 206893 - protein, 274 aa, Zea mays
  unsure (1)..(274): unsure at all Xaa locations
  Clone ID: MRT4577_120276C.1.pep
MAEKGCLKRLQKEYHALCKEPPPQIVARPLPNDILEWHYVLEGSKGTPFEGXIIHNIPHYLLPPIFVLLLIISNDVFHASISLPAGGYYYGKLKFPPDYPFKPPSISMTTPSGRFAPHKRICLSMSGFHPESWNPMWSVASILTGLLSFMMDDALTTGSIKTSDAEKRRLAKASLAYNCESKNCPHFRKLFPEYVEKYNQQQQLENTAAEPVPQENPAPVPSLAVQQAPVVANRAQPLAEVRRDRNQKKVVPFWMVLVMFSVFGAVMALPLMQL

SEQ ID NO: 206894 - protein, 85 aa, Zea mays
  Clone ID: MRT4577_120277C.1.pep
LNLSCSTHTVGFMGTMISNLAFVVRTIFSKKGMKGKSVSGMNYYACLSIMSLVILLPFAVAMEGPKLWAAGWQQAVAEIGPNFVW

SEQ ID NO: 206895 - protein, 57 aa, Zea mays
  unsure (1)..(57): unsure at all Xaa locations
  Clone ID: MRT4577_120278C.1.pep
XXXXXXXXXXLTHIFIRQQRCKFPLQRKGLSGNSGLQECQQDQMYMDLLRKKRYDNK

SEQ ID NO: 206896 - protein, 86 aa, Zea mays
  Clone ID: MRT4577_120279C.1.pep
SFVRKFSWTSQGPRLLPLWGSGDKCTPFYNLPALSLFMMTTLRTETMLVQRKELVYFHTLYVSCSGTAGTWVLNLINPVGFLTIIA

SEQ ID NO: 206897 - protein, 225 aa, Zea mays
  unsure (1)..(225): unsure at all Xaa locations
  Clone ID: MRT4577_12027C.1.pep
MVNEKTHLNIVVIAHVDSGESTTTGHLIYXLGGIDRHVIERIEKEAADMNNRSFKYAWELDKLKDERERSITIDIALRKLXTTKYYCSDIDAPADRDFIKNMITGTSQDDCGALIIDSTTAGVEDAISKDGQTREHALLAVTLGVKQMICCCNNMDVATPKNSKDRYDEIVEEVSSYLQKGGYYPDEEPFVPISAVDDDNIIDRTTNLDXYKDPTLLEDVDQINE

SEQ ID NO: 206898 - protein, 81 aa, Zea mays
  Clone ID: MRT4577_120280C.1.pep
NSSFLEKKKKKKNKKKKKKQKRTKEQKFPLSKGSNPNSAAIYNQLSCDYSSPSIPCNPCPTRSVKITMTSNSRLLYKIPTF

SEQ ID NO: 206899 - protein, 63 aa, Zea mays
  Clone ID: MRT4577_120281C.1.pep
LHSTSIWKWTNVVQTHPRKNNFPFCTPKRLYASLTRFKCVCLFVAPQCFLILKEYYPSNETSH

SEQ ID NO: 206900 - protein, 59 aa, Zea mays
  Clone ID: MRT4577_120282C.1.pep
SNSVAVALTPRRPRHGPNESAARPLVVHGRRRQLCRRRKVLQVVLSEGQFHGPHYPSPG

SEQ ID NO: 206901 - protein, 245 aa, Zea mays
  unsure (1)..(245): unsure at all Xaa locations
  Clone ID: MRT4577_120283C.1.pep
LPRVFFFFFFFFFFFFFFFFFFFFFFFFFLRGAPKFYSGEGPPPRLKPTGKTGRKPSGAPFFFRGKPNPKPNRRRGGLFPPSRQRGKRGLKNRKPKGWREPPGAKRGPKFFALGRGHSPGRPKTGLAPPPPGLEGFSPANXSGKPRGXVPPRVAPGKKKSPSPPMGAPAGKPPGGRVALPQKAGFGGEEGNPPPRGKGARDRRPXRTPSIFSRGPPXRWAPGGFKTRPRGPPPWPNFFFGPPPGP

SEQ ID NO: 206902 - protein, 52 aa, Zea mays
  Clone ID: MRT4577_120284C.1.pep
DQITRSEDYSLNDNTESKAPTKVFTRVLLYSRSLLLDKSITSLPFGSSFLHT

SEQ ID NO: 206903 - protein, 88 aa, Zea mays
  unsure (1)..(88): unsure at all Xaa locations
  Clone ID: MRT4577_120285C.1.pep
GPESPGRPHPSNHNPTTLNKQXTAFGPHSRRGVYYYTAGQETLPPKSLPANQKECQAPTVTKVLPAQRFYPAWESHHAALKRAGQSAK

SEQ ID NO: 206904 - protein, 62 aa, Zea mays
  Clone ID: MRT4577_120286C.1.pep
WNTRADHTLPRHPWPTPWPFLVAGPLTLPRKDSLARKEAPRITPISKSTTTAINFPRNLSIA

SEQ ID NO: 206905 - protein, 83 aa, Zea mays
  Clone ID: MRT4577_120287C.1.pep
FFKNLYRLYNERERPENTTLQRCHKTQAARGLVHHPRALPLTAPQKWRVQYPQPVQPHPGENSSMFQPGSWRRPQVLNTHELV

SEQ ID NO: 206906 - protein, 598 aa, Zea mays
  Clone ID: MRT4577_120288C.1.pep
MNCSSCCAAATPSSPALLARPRGGLAASCSTTTANQKVLFLGSKQFPRITYSRASSRLSRREVIAFAGQQPWDIGRFVKTLYFFNGPPNLLKIVESIISSFTGPASSEVPKKMETSDVVLVTGATGGVGRRVVDVLQKKGVPVRVLARNVDKARSMLGPDVPLIIGDVTKEDTLDPKLFKGIKKVVNAVSVIVGPKEGDTPDRQKYKQGIKFFEPEIKGPSPEMVEYIGMQNLINAIKSSVGLSEGKLLFGFKASTIISFLGNLSGEIVWGALDDVVMGGVSESTFQILPTGSESSGPTGLFKGTVSTSNNGGFTSIRTKNFTVPEDLSAYDGVELRVNGDGRRYKLIIRTSYEWDTVGYTASFNTTKGGWQSVKVPFSSLKPVFRARTVTDAPPFDASNITSLQLMFSKFEYDGILNPTFTEGPFELPFSSIRAYINEPITPRFVHVSSAGVTRPERPGLDLSKQPPAVRLNKELGSILTFKLKGEDLIRESGIPYTIVRPCALTEEPAGADLMFDQGDNITGKISREEVARICVAALASPDAVGKTFEVKSTVPFSEPYVIDPANPPPEKDYEVYFKELKEGITGKEALEATPAQV

SEQ ID NO: 206907 - protein, 71 aa, Zea mays
  Clone ID: MRT4577_120289C.1.pep
TWSSCALPLRDPVDRCQSAGKPHARKVITCVDRGCRTQLRRAHGLWVLTQYASPQASSIAGSRVRLARTRG

SEQ ID NO: 206908 - protein, 46 aa, Zea mays
  Clone ID: MRT4577_12028C.1.pep
KKKKKEKKNKLTNPPQGKRAKAICCIISPYFTGRLFTTIGLGEPCR

SEQ ID NO: 206909 - protein, 67 aa, Zea mays
  Clone ID: MRT4577_120290C.1.pep
YSSLPGWVVFIHHFNLFSLLLHKLILKQKRVHPKKFHAPPPPGFFNTFLTPIQITACPKSEHIFCPA

SEQ ID NO: 206910 - protein, 55 aa, Zea mays
  Clone ID: MRT4577_120291C.1.pep
GISVNHIDRCRSQHVHWLHDRISGRHISVIGLHECSGVSFGSIQSVNDYHYHCFL

SEQ ID NO: 206911 - protein, 80 aa, Zea mays
  Clone ID: MRT4577_120292C.1.pep
LCVLGPQTRPLPGDQEACYARNAFCAGDASRARTVRTGTRIRAGRPAAEGDSPDAREACPDSQDHVRMPREARRRVGSPR

SEQ ID NO: 206912 - protein, 159 aa, Zea mays
  unsure (1)..(159): unsure at all Xaa locations
  Clone ID: MRT4577_120293C.1.pep
MPPKXDPSQVVEVFVRVTXGEVGAASLMSPKIGPLGLCPKKIGEDIPNDIANDWKALRVTAKLTAQNRKAKVSVIPSAVALVMKGLKEPERDRKMVKTMKHSGDIYLDDVIMIAKTMLNKYMAKELDVTGKEILGTCVSVGCTVDGNDPLGLLHEIYDG

SEQ ID NO: 206913 - protein, 609 aa, Zea mays
  Clone ID: MRT4577_120294C.1.pep
MDLRRPPRSSSGGVEPKIRQVGFFTPDASAPSEPLPPAAVVQAPSAQQRPVTASPPASDDFSQGRLSPVMIPPPRHADHLALGPHPPAAADVVLATSAPVRSSPRLDIVSEIGDDDSWSRAPSAVELEENKRGLAEIRNEGAPASIPQKQKTSKAERRAIQEAQRAAKAAAKEADKSGKSAGAAMSKQAKPAKTAQKKDVPQAASTLASEKKATERPPEREKKLDAPHPRMQFDDVHKVEKAKKRAVVNQSEARNRVELFRHLPQYVHGTQLPDLESKFFQLEPMHPSVYKVGLQYLSGEVSGGNDRCVAMLLAFKEAIKDYTTPTNKTLSRDLTAKISSYVSFLIECRPLSISMGNAIRFLKSRIAKLPHALSESEAKTSLQSDIDRFINEKIVLADKVIVSHAITKVRDNDVLLTYGSSTVVEMILDYAHELGRNFRVVVVDSRPKLEGQGLLRRLVAKGINCTYTHINAISYIMHEVTRVLLGASSILSNGTVYSRVGTASVAMVAHAFGVPVLVCCEAYKFHERVQLDSICANELGDPDVILKIPGKAEDHLKNWADSANLQLLNLTYDATPPDYVSMIITDYGMLPPTSVPVIVREYRKEQLWI

SEQ ID NO: 206914 - protein, 57 aa, Zea mays
  Clone ID: MRT4577_120295C.1.pep
TRNMTIYNNQYRQITYKYKHYLFSSTQPRDQLPDFDHPALPSLQPPSPQLVASFPLN

SEQ ID NO: 206915 - protein, 79 aa, Zea mays
  unsure (1)..(79): unsure at all Xaa locations
  Clone ID: MRT4577_120296C.1.pep
VLMGPVVFKVLTATXXXPQCVIYCLQSSLWAATPLPVFAIRKRLVVATPGTSVDVSTXXLXSNIFLPPXNIPNXKTKAA

SEQ ID NO: 206916 - protein, 127 aa, Zea mays
  Clone ID: MRT4577_120297C.1.pep
ARTRGNFERICPIKRDIWHNNRVHLTKIHTTDLQAFTNYKAFSSANEDARAHTHTRSHQTDTNAFLTCVHISTAFYSAVGVPHGHISTMMDAHALQAELAAAADGLEAALTGLEAAEAAARSEQACI

SEQ ID NO: 206917 - protein, 167 aa, Zea mays
  Clone ID: MRT4577_120298C.1.pep
PGDWELRRECSTTFLASFSSEDDLTSCLKNPEIQTLLDNKEVKLTVTRWNESDDGSPGLVEEWLLVSGVPRMYRNWKELYEVASALGVLIDVDEESLQVGDKEPIRLKLKTAFRSFDAAPFSYYFAFGCWSSRLVMVTAVQDKTQGMEHKIKRQHCKEHKKELNGGK

SEQ ID NO: 206918 - protein, 178 aa, Zea mays
  unsure (1)..(178): unsure at all Xaa locations
  Clone ID: MRT4577_120299C.1.pep
MSGKGYGPDISIDLGTTHSCARVRHHDRVQIIANDQGNRTTPSYVAFTDSERLIGDAAKNQVAMNPINTVFDAKRLIGRRFSDASVQSDIKLWPFKVISGPGEKPMIVVQHKGEEKQFAAEEISSMVLIKMREIAEAYLGSTIKNAVGTVPAYLNDSQRQATXDAGVIAGLNGLRIIN

SEQ ID NO: 206919 - protein, 74 aa, Zea mays
  Clone ID: MRT4577_12029C.1.pep
PHLIFYPIYEFLHPKPLPYIFNAYIASYLFSIPQTIFIYNLHYLISQSTHIHSHSSLLQAPLRQTGSEKCSITH

SEQ ID NO: 206920 - protein, 153 aa, Zea mays
  unsure (1)..(153): unsure at all Xaa locations
  Clone ID: MRT4577_1202C.1.pep
RGGKRNKPPPPGKGSLKGAPPGPWAGGAKPKXPGPWGGKPPNGGRGGRETKXPPGQTGIPXPKGGKTKTGPRELPPPGXNQARKPKGGKNGPPRPRGKNKRGGGKKGGKQTGPTRGKTQLTVPKGGGTTQPRGKLAPQGREKPPSKDQKATAL

SEQ ID NO: 206921 - protein, 128 aa, Zea mays
  Clone ID: MRT4577_120300C.1.pep
GPFFFFFFERIFPIKRDIWHNNRVHLTKIHTTDLQAFTNYKAFSSANEDARAHTHTRSHQTDTNAFLTCVHISTAFYSAVGVPHGHISTMMDAHALQAELAAAADGLEAALTGLEAAEAAARSEQACI

SEQ ID NO: 206922 - protein, 202 aa, Zea mays
  unsure (1)..(202): unsure at all Xaa locations
  Clone ID: MRT4577_120301C.1.pep
MAGKGDGPAIGIDLGTTYSCVGVWQHDRVEIIANDQGNRTTPSDVAFTDSERLIGDAAKNQVAMNPINTVFDAKRLIGRRFSDASVQSDIKLWPFKVISGPGEKPMIVVQHKGEEKQFAAEEIXSMVLIKMREIAEAYLGSTIKNAVXTVPAYLNDXDRXVTKDAGXIAGLNVLAAMNEPTAXVVGHGXLEGLACSVGECFF

SEQ ID NO: 206923 - protein, 118 aa, Zea mays
  Clone ID: MRT4577_120302C.1.pep
AAFFFFFLWHNNRVHLTKIHTTDLQAFTNYKAFSSANEDARAHTHTRSHQTDTNAFLTCVHISTAFYSAVGVPHGHISTMMDAHALQAELAAAADGLEAALTGLEAAEAAARSEQACI

SEQ ID NO: 206924 - protein, 194 aa, Zea mays
  unsure (1)..(194): unsure at all Xaa locations
  Clone ID: MRT4577_120303C.1.pep
MAGKGDGPAIGIHLGTTYSCVGVWQHDRVQIIANDQGNRTTPSYVAFTDSERLIGDAVNNHVAMNPINTVFDAKRLIGRRFIDASGQTDIKVRPFKGISGPGEKPMNVAHHKGEEKQSAAEEISAMGLIKXREIAEAYLGSTIKNAVVTVPAYFNDSQTQATKDAGXIAGLNALRIVHEPTGAAIAYDVERKLP

SEQ ID NO: 206925 - protein, 96 aa, Zea mays
  Clone ID: MRT4577_120304C.1.pep
MWRKMAMCIRKIASEEFGLSQGNRREVKDTWWWNEDVQKAIKEKKDCYKRLHHDKCAENIEKYRIAKKSAAAASSAWRAWASIIVEMWPCGTPTAE

SEQ ID NO: 206926 - protein, 69 aa, Zea mays
  Clone ID: MRT4577_120305C.1.pep
PTHPLFYLTFTTSLSPNMNTVTHKIVEITYNITARLPYINKHNTTFILTYHSYQHFPPVEFMIQIPLST

SEQ ID NO: 206927 - protein, 172 aa, Zea mays
  Clone ID: MRT4577_120306C.1.pep
ILDTHIANGKIALHTHTTLASISWDPCFKTWSCETSSSQVSLPPVDYIVFATGIQSDIRTIPFLQTIQKQHPIKYVGGLPCLTEDMMWNDDVPLFVTGRLAGLRLGPGAPNLVGARIGAERIAWNVEDVLKGLGRSRRDVRDQSDSEDGDEDLESYAAARDNRFSSLVAMDE

SEQ ID NO: 206928 - protein, 74 aa, Zea mays
  Clone ID: MRT4577_120307C.1.pep
TLILRAARTLPDFFDRAALPSWRTLPEYPIPTRMGILIMVSSFQQCAIKGNSGDCSKNSTCAHIFEEIHGLEGL

SEQ ID NO: 206929 - protein, 121 aa, Zea mays
  unsure (1)..(121): unsure at all Xaa locations
  Clone ID: MRT4577_120308C.1.pep
MAGKGDGPAIGIDLGTTYSCVGVWQHDRVEIIANDQGNRTTPSYVAXTDSEXXIGDAAKNQXATNPINTGWEAKXXIGRRGXXAXXQXXNKXXPXKGXXGPXEKPXXXXQHKGEEKQXAXE

SEQ ID NO: 206930 - protein, 130 aa, Zea mays
  Clone ID: MRT4577_120309C.1.pep
RCARTHTRSHQTDTNAFHTHTRSHQTDTNAFLTCVHISTAFYSAVGVPHGHISTMMDAHALQAELAAAADGLEAALTGLEAAEAAARSEQAKSLAEAQGREDNCSNRSDVNQGQTSHLDEGRCHMKRTSN

SEQ ID NO: 206931 - protein, 40 aa, Zea mays
  Clone ID: MRT4577_12030C.1.pep
DMMHPPGVMIIIVYAYTNHFLNIAFPSLLFTCPYIICNPY

SEQ ID NO: 206932 - protein, 112 aa, Zea mays
  Clone ID: MRT4577_120310C.1.pep
MAGKGDGPAIGIDLGTTYSCVGVWQHDRVEIIGNDQGNRTTPSYGGFTDSEGLLGDGGQNQGGMDPLHTGFDGQGLLGKKVRGGAGPNGIQVGALQGISGAGGKPMDGGPHQ

SEQ ID NO: 206933 - protein, 210 aa, Zea mays
  unsure (1)..(210): unsure at all Xaa locations
  Clone ID: MRT4577_120311C.1.pep
GDGPAIGINLGTTYSCVGVWQHDRVXEIIANDQGNRTTPSYVAFTDSERLIGDGDNNQVAMNPINTVFDAKRLIGXRRFRDASXMSDIKLWPFXVISGPGEKPMIVVQHKGEEKQFAAEEISSMALIKMREIAEAYLGNTIKNAVDTVPGYFNDSQKQGTKDDGEIAGLNVLRIINEPTAAAIAYGLDENATSVGGENVLIFDLGGGTFD

SEQ ID NO: 206934 - protein, 93 aa, Zea mays
  Clone ID: MRT4577_120312C.1.pep
SKKPGRGKNGFGTPGKAGPFNVLPGPFNTQLGPGTRGPENFWGGNKGFPGVFGVAAGSPPGGGPPSPSGGNPEGFPPGPNPDPNPGGGGFFFL

SEQ ID NO: 206935 - protein, 124 aa, Zea mays
  unsure (1)..(124): unsure at all Xaa locations
  Clone ID: MRT4577_120313C.1.pep
VRRREAGKGDGPXIGIDLGTTYSCVGVWQHDRVEIIANDQGNRTTPSYVAFTDSERLIGDAAKNQXAMKPINTVFXXRRXIGRRFSDASVHKDXXLXPFKVIXGPSXXPMDCXSQHKGEGESFA

SEQ ID NO: 206936 - protein, 172 aa, Zea mays
  Clone ID: MRT4577_120314C.1.pep
NPRRYNKGIPPQRGWFPFLWFLLAGAGAGASKNHFFSGGGNQSYKFNWGGGGNFTSAFGGRGFGNGFFSGGGAAGMGGKPNRFPKPKEGTFRFFPPSSAGKSSCYSFPFPPGGYYLRLFSVYKNYNSKLRTPSLKVSAAARLGFSFRSPWPKPAGGYGAYSNLIFPSATEPA

SEQ ID NO: 206937 - protein, 348 aa, Zea mays
  Clone ID: MRT4577_120315C.1.pep
MHGEASAQRNEWTAGTVVITKASPVVVRPSELELGRTPMPTPPLPAGDYTTVPLSSFDKRVPPMPATSLLVFERTIDEPVETIKRALSRALAHYRPMAGRLDGAGGIACTDEGVTFVGAAASCALKEATTTALQEMDLAVCYPSFLCRDVDPLLLVQVTKFACGGFVVGVTSNHVAADGLGMAQFLQALGELARGTSPLSCIPVRSWDESLPVSSAIPAAKGSMEHHEPQHLATLDIVIPSDLISRIKADGCCSVLDAVMAVLWRCRTRATMSPGDAESPAPLKFACNMRAHAGAPAGYYGNCIRVQVVPATAVVVASSGIGHLVGLIRRAKEKVPDLLSTPGSAAAD

SEQ ID NO: 206938 - protein, 35 aa, Zea mays
  Clone ID: MRT4577_120316C.1.pep
LYYSEVLPSTCLDSIPEHEEGYTEIVERRHDSPGG

SEQ ID NO: 206939 - protein, 206 aa, Zea mays
  unsure (1)..(206): unsure at all Xaa locations
  Clone ID: MRT4577_120317C.1.pep
MAGKGDGPAIGIDLGTTYSCVGVWQHDRVEIIANDQGNRTTPSYVAFTDSERLIGDAAKNQVAMNPINTVFDAKRLIGRRFSDASVQSDIKLWPFKVISGPGEKPMIVVQHKGEEKQFAPEEISSMVLIKMREIAEAYLGSTIKNAVVTAPAYFNDSQSRPTKEAXGVIAGLNVLXILNXQPLAAYPLWGLNTKATRGGEKNVPPL

SEQ ID NO: 206940 - protein, 89 aa, Zea mays
  Clone ID: MRT4577_120318C.1.pep
SEHSSCSCSLLERAYFIRRAIVCISYIEGSPYHNGDRLWRTLVAPVLTSVSRDRGWCPRVLYEREGGKVEMHPKPPSFSAEPDRSSCRI

SEQ ID NO: 206941 - protein, 46 aa, Zea mays
  Clone ID: MRT4577_120319C.1.pep
LSSRSLACDVGRRYASEVFNCQLQRLLYLRLVEHLYVRCGGAEILN

SEQ ID NO: 206942 - protein, 218 aa, Zea mays
  Clone ID: MRT4577_12031C.1.pep
MKRAAPSQEPLDVSSGDSSGSDSDQLGGKDKGGSASKAAAGAEDVKRVVLHKESQDVSSDDDLSSDSDDDAGKGNAWNAFGLPNSSKAASTAEGALIRRAEMYQQYMKRIPVPAYCDSVIPFTSWLGLAGSLKQLYEQPLHYLTNVLLKKWDQQRIGSDDEHRRLDAIIHPARAETLVWATEEVHRLTTSGQHLASLWASDPLYHAYVDPVFASVKLE

SEQ ID NO: 206943 - protein, 48 aa, Zea mays
  Clone ID: MRT4577_120320C.1.pep
RSKGQERSNLSVLIPVLLWEGPQNSLRRLIGAKKLRERICYNPRALGT

SEQ ID NO: 206944 - protein, 42 aa, Zea mays
  Clone ID: MRT4577_120321C.1.pep
TFTSTAEYNFYKNEVRDIKNHLNIKDTIVERILGETLTCGSI

SEQ ID NO: 206945 - protein, 59 aa, Zea mays
  Clone ID: MRT4577_120322C.1.pep
ACYNTTYTILYLGATKQSVLSSMTECEYWIIITATWNIFIGGSFSWRSYIDISMVWLWV

SEQ ID NO: 206946 - protein, 258 aa, Zea mays
  unsure (1)..(258): unsure at all Xaa locations
  Clone ID: MRT4577_120323C.1.pep
RPGPVSTFPLRRRLYSSRATLASSHAVTTAHQLGNRSSERPWPVLSPSPSSSSSSPPLSXSFAADEAPAASPKHSASTPSKAPSTSPDKSEKAPTASSEDGAATPAKAPASAASNSEASPSEAPTSGSESGAASPNESAASEEAPTSAPEDSSSASPSTSPSEAEAAVSPDSSSGGGATSKEPSASEAGAAEEPSAAEAGGASADSPPEATHTSSDSPAESPGPAADHESGSPSMLGGTGLALVMLVATVTSSAMLCF

SEQ ID NO: 206947 - protein, 93 aa, Zea mays
  Clone ID: MRT4577_120324C.1.pep
GLLVLFIRTPLERKKGNMHHLIWMRKPHDITKEEDARSDTTAATPVRKTRFQTRQTDTIFIGNQLTFCVINREGFIRLMFILRLWIGGGTAKP

SEQ ID NO: 206948 - protein, 50 aa, Zea mays
  Clone ID: MRT4577_120325C.1.pep
LVLKCPFTDPPPFIFVSLLVAQESNGRQEAAYDVQAPASLAGHSSLRGRN

SEQ ID NO: 206949 - protein, 124 aa, Zea mays
  unsure (1)..(124): unsure at all Xaa locations
  Clone ID: MRT4577_120326C.1.pep
GGRRLAGRMKPHPDPLDPPVGGHPPVCRLPALGTSHLXPVPSXCRSAGGARAPRRRVGLXCXXXXRRRPPLGPSIHKVIPKKVVRRGARARERPIVQKSPRGGLPARQRRXRPDELVXAGAGHR

SEQ ID NO: 206950 - protein, 62 aa, Zea mays
  Clone ID: MRT4577_120327C.1.pep
PYFYFVCFFFWPHAKRGKLDTKQDQEFASTKSLDGQCGNSVKKLCKVARVMKGLIFLGKFYH

SEQ ID NO: 206951 - protein, 95 aa, Zea mays
  Clone ID: MRT4577_120328C.1.pep
RRGLERPGLTGLAAALKPGAAPFPKGHCPATARARPGHHPRSSGKGKVCSQVSRVKPPPRASLFPGGSATELTLRNRKRMSFLARKPEGILTGTQ

SEQ ID NO: 206952 - protein, 66 aa, Zea mays
  Clone ID: MRT4577_120329C.1.pep
NRAVSFRVHNESCVCFCYPPFAACQANRAVRVRWNLMVLYRLLLSLTSVEHVGSKCFKPLTLCEMA

SEQ ID NO: 206953 - protein, 222 aa, Zea mays
  Clone ID: MRT4577_12032C.1.pep
MKRAAPSQEPLDVSSGDSSGSDSDQLGGKDKGGSASKAAAGAEDVKRVVLHKESQDVSSDDDLSSDSDDDAGKGNAWNAFGLPNSSKAASTAEGALIRRAEMYQQYMKHIPVPAYCDSVIPFTSWLGLAGSLKQLYEQPLHYLTNVLLKKWDQQRIGSDDEHRRLDAIIHPARAETLVWATEEVHRLTTSGQHLASLWASDPMYHAYVDPVFASVKLEYQPL

SEQ ID NO: 206954 - protein, 191 aa, Zea mays
  unsure (1)..(191): unsure at all Xaa locations
  Clone ID: MRT4577_120330C.1.pep
TNQVVVAEGLSQGPGTTGAAIDVRKLMEAIDILXKLMQASYIAXLCEDMNVRHLNKNIKAAEKETAINPANKVLTMNFRDKVFITRFNQKDLITSIDHEARFTLAVDQNMATLLVEHNLRTGLADHELCVFYKISKPYEEFKITMSQEELAALLADDEDAARVANREGTSPVVNLIPYRREVLLYRFLHEE

SEQ ID NO: 206955 - protein, 42 aa, Zea mays
  Clone ID: MRT4577_120331C.1.pep
KYPAFLPFFFFFLAPQERVFQSLPPLINFFTHGLLINSFSPK

SEQ ID NO: 206956 - protein, 209 aa, Zea mays
  unsure (1)..(209): unsure at all Xaa locations
  Clone ID: MRT4577_120332C.1.pep
VVDLRTNTASMPPYAXHPTMTASNTDYEAMGTDSSAKSFXSRYAQVMANEASLPSPPRTMCKLISMLWNXKSSTSETLLXHKSNIHVYENGGMSTIGGVHPNTGKXNNPDGTMYIDEIGGYIRDAELHYAKTRLICLNNTHDNTXGKCLXPLKTMTRVRLWYKSHGXKHHIYGSLIFNSCAIVGVPVDRLVKPADSXSECLSKGCSAPV

SEQ ID NO: 206957 - protein, 90 aa, Zea mays
  unsure (1)..(90): unsure at all Xaa locations
  Clone ID: MRT4577_120333C.1.pep
MPDSELAGKIVXTIQHKAFKGTSMESLDKDFIGYAKIDHSLXNSGLSFSNXHEDSNCQIEHMELKHXIQKLGLESTDQDIKDVFQAFDIY

SEQ ID NO: 206958 - protein, 54 aa, Zea mays
  unsure (1)..(54): unsure at all Xaa locations
  Clone ID: MRT4577_120334C.1.pep
XXPFFFFFFFTNRVKRTLLYKQRQTILFTVPHSLFYTTHEDGLGLSWTHKSFSL

SEQ ID NO: 206959 - protein, 52 aa, Zea mays
  Clone ID: MRT4577_120335C.1.pep
NLIFAENTIRSAIKKMPHVRSQIPKPQHPTRLKKPENSVTLSLMPTPRHTPK

SEQ ID NO: 206960 - protein, 137 aa, Zea mays
  Clone ID: MRT4577_120336C.1.pep
MASSGGKLFTLEEVAKHSSKDDCWLVIGGKVYNVTKFLDDHPGGDDVLLSSTAKDATDDFEDVGHSTTARAMMDEYYVGEIDATTIPTKVKYTPPKQPHYNQDKTPEFVIKILQFLVPLAILGLAVAVRIYTKAESV

SEQ ID NO: 206961 - protein, 81 aa, Zea mays
  Clone ID: MRT4577_120337C.1.pep
YIMSCPSIVVSGVRIFCFLAHFVTQIYVWTPRNFICTFGPDAQRHRLWRRGNTARRRAVTWQQRLLAPRADLAPTWGDAAS

SEQ ID NO: 206962 - protein, 43 aa, Zea mays
  Clone ID: MRT4577_120338C.1.pep
YLYMKERKVRTRWYAQKGLIKPDPARREGGGNQWGVKIKLEKN

SEQ ID NO: 206963 - protein, 83 aa, Zea mays
  Clone ID: MRT4577_120339C.1.pep
LFLNWGWGPIGDPKPEWRWVWDEFCTHDGYGYGYGDVSNMMGMGLGCYNPMGNYPLTSLARRDDGHHHVTLLLLGPCGALQVE

SEQ ID NO: 206964 - protein, 59 aa, Zea mays
  unsure (1)..(59): unsure at all Xaa locations
  Clone ID: MRT4577_12033C.1.pep
PEEAEEPPVDFDFLQXTLMPDGTPDVHYQTERGVQKLRDIMLDCYIDLYGPYDKVFLNC

SEQ ID NO: 206965 - protein, 115 aa, Zea mays
  Clone ID: MRT4577_120340C.1.pep
RKHTGYREMVSQWVEQEVRPGALPYGNQPGAEPVQPRARIGKRALAIQLEEQRTGQRGADHRRRMMKETHPVGEAHTITKMRPGLCDVAAGHASAAQPPTTARDARAGAGHPSWS

SEQ ID NO: 206966 - protein, 57 aa, Zea mays
  Clone ID: MRT4577_120341C.1.pep
YIYFWKRMIHLQCCKRLVFLNRQMVHCPTLTLTASKIFSELNLFRKVQSIEHLNLLK

SEQ ID NO: 206967 - protein, 84 aa, Zea mays
  Clone ID: MRT4577_120342C.1.pep
SRELSTRYIADPGLPSPTTPGTEARASGTPRRVPPRTPGSTPRREINEILVHHFDQDDHNHHPRNPVKPQTCAQPEISVLSAQP

SEQ ID NO: 206968 - protein, 119 aa, Zea mays
  unsure (1)..(119): unsure at all Xaa locations
  Clone ID: MRT4577_120343C.1.pep
MVKCRVLRQDTMSISTASRRALSRIGGALRRSLSSSSSSVPDASGYHVSGGPSFMRAAVFWEPGRPLTMEEFRMPRPKAGEVLVKTKACGVCHSDLHVMKGELPFASPCXAGHEITGEA

SEQ ID NO: 206969 - protein, 65 aa, Zea mays
  Clone ID: MRT4577_120344C.1.pep
MFMYWSADWGPKIDVVGFCFLDLASNYVPSEPLVEWLEAGDKPIYVGFGSLARSGGPFFMSCLYI

SEQ ID NO: 206970 - protein, 91 aa, Zea mays
  unsure (1)..(91): unsure at all Xaa locations
  Clone ID: MRT4577_120345C.1.pep
MVADRLRLALMLFACLCSTWAXRTRLEPTIRLTLERAAVDDADGTRWSVLIALSNGYYMYRHESDICHAYQIMMMGALKDVNILVCMYHDI

SEQ ID NO: 206971 - protein, 49 aa, Zea mays
  Clone ID: MRT4577_120346C.1.pep
MTSYCGNCDHELIGNDAYLRNCGKGILYADECTGIIGTRLSSINVDHVG

SEQ ID NO: 206972 - protein, 39 aa, Zea mays
  Clone ID: MRT4577_120347C.1.pep
LFSLMSIAKRNKSIHVCHQNYHFTYKHPLFNTTILHSSI

SEQ ID NO: 206973 - protein, 319 aa, Zea mays
  unsure (1)..(319): unsure at all Xaa locations
  Clone ID: MRT4577_120348C.1.pep
MASSSRLDLPPGFRFHPTDEEVVSHYLTHKALDSRFSCVVIADADLNKIEPWDLPXGKAKMGEKEWFFFCHKDRKYPTGMRTNRATASGYWKATGKDKEIFRGSSSSPRRVLVGMKKTLVFYTGRAPRGGKTPWVMHEYRLEGSLPPNLHRGAKDEWAVCKVINKDLAGKAGQQQMAPPPHAVSVGMERSDSLAFLDDLVLDNADDLPPLVDSTTYAAGSLFAAAGTTTTTNDDSXVPTSHXKAEPQPQLPAPSNSPYQHQQQAIRRHCKAEAPAPAMVLSPSRETPGADMFQLQHVDELLQLDGGFMEDYYNMNMWKV

SEQ ID NO: 206974 - protein, 69 aa, Zea mays
  Clone ID: MRT4577_120349C.1.pep
GGGAVGALWLTPVVVGAINPGPLLPKILEFVGLGYPGWFVYRSLLFKKNRKKLVAAIEPPKKKIVGTAE

SEQ ID NO: 206975 - protein, 43 aa, Zea mays
  Clone ID: MRT4577_12034C.1.pep
SVGSIMSNVLSQDLGKGLGKEKNRILLSSHGIKEEILGPPASS

SEQ ID NO: 206976 - protein, 88 aa, Zea mays
  unsure (1)..(88): unsure at all Xaa locations
  Clone ID: MRT4577_120350C.1.pep
EGQEQQQQTGRYQSHGECFVVLIHHNQSGMASEALIRARASYDCSSDSSSSPPPLPLLDDDEVLGLGAWEWMGAPARPAFYSVANXRP

SEQ ID NO: 206977 - protein, 88 aa, Zea mays
  Clone ID: MRT4577_120351C.1.pep
KQPFPLSTNTTACSSSFHLLLWSWLISEKLTTDTVYEIHEQVGFPFEFPPQAAGRCPAPTPALLIYLLIFIDAITMIKDQMQSCEIQK

SEQ ID NO: 206978 - protein, 91 aa, Zea mays
  unsure (1)..(91): unsure at all Xaa locations
  Clone ID: MRT4577_120352C.1.pep
LPRSPASPLEVLSVXRSLKSAGLPGSXGRAALHPAHFTGTLFTAVSTRCDRGGGEVEATATRQGREAXXCLLTWRRRVGSRLRAARTVGDR

SEQ ID NO: 206979 - protein, 192 aa, Zea mays
  unsure (1)..(192): unsure at all Xaa locations
  Clone ID: MRT4577_120353C.1.pep
MQSFDKTLTEKTITLEGECSDTIDNGKDKIQDKEGMPPDQQRLIFSGKQXEDERTLADYNIQNESTLHLDLRLMRGVQIFVKTLNEKTITLEGQPSDTIDNVKAKMQDNEGIPPDQQRLIFAGKQLEDGRTLADYNIQKESTLHLLLSLMSDMHIFMKTLTGKTITLEAQSSDTIDNVXAKIQDKEVIPPDQ

SEQ ID NO: 206980 - protein, 89 aa, Zea mays
  Clone ID: MRT4577_120354C.1.pep
IVGNHLVSQGLPDVKAPTLPEHRHLPGYDHVELPLVSLDARLEDQHPMDDHVLGDRVSLFEKEADHHSVEHGRLVSQRAQPLTGMRTRE

SEQ ID NO: 206981 - protein, 62 aa, Zea mays
  Clone ID: MRT4577_120355C.1.pep
PNDSKPPNPMSLTGKNLLSSTSYYLPPLKNHSHPLFYLPSPGNQSPMKGYKKSSTPKTRSTF

SEQ ID NO: 206982 - protein, 169 aa, Zea mays
  Clone ID: MRT4577_120356C.1.pep
MAVGHKGRDPPWGVTQVGWKHLRDVARAIKGADLFMPHSVGRLARIRRRPTYHRMMGQAEATEGLHDGVEIPKRKGSGFRGLDHFPFAVEDEVEAPKMDGHYEGPNNIVVDHPELGEENVGNMQGPYLAHQLSMVCSVGARFIPVRTERPLHPDFGGSRYRHLVAQFSQ

SEQ ID NO: 206983 - protein, 131 aa, Zea mays
  Clone ID: MRT4577_120357C.1.pep
IDREIDRIACRRRLRREDRGDQQVKIVRRSREVGDDRGRWGAVEQVTEGSEEGAESSQEGAESGEGEGRRSSGHRLKRVSRSLWEASRRDRAAARAGARVGDGSLIVATRSNALANRWILASDPRLGKGLK

SEQ ID NO: 206984 - protein, 131 aa, Zea mays
  unsure (1)..(131): unsure at all Xaa locations
  Clone ID: MRT4577_120358C.1.pep
MGPPEPSSRTTLSRGVRNLLLLLSLKVAAPVAGAMNPAEGKTLLRVMKSVSANRNWXRPPGPTPXSAPGPGFKGRPGTAGAGMHVARLDFGGPPHPTGRNTATFPFAAFALPKLRSLFLVGCLRNPRAVAA

SEQ ID NO: 206985 - protein, 156 aa, Zea mays
  Clone ID: MRT4577_120359C.1.pep
RGGMQIFVKTLIGKPITLEVESFDPIDNVKAKIQDKEGFPPDQQRLFFFGKQLEDGRTLPAYNIQKESPLPLVLPLRGGMQIFVKPLIGKTITLEVESSAPIAKVKGKIQAKKGFPPDQQGLFFVGKQLEDGRPLADYNIQKESPFPLVLRLPGGQ

SEQ ID NO: 206986 - protein, 163 aa, Zea mays
  Clone ID: MRT4577_12035C.1.pep
PSRKGQPHRVKPSPPQPAPASQANRRQRRTDEADRSGPTRARSSTRPRRSSAEFSIPQRQQKGASRHRKDVGPCAYRPGNGSKRYTGTPGRARGSCCNGTTPCHAKRQGRDNLFQCSPINPPWAETAYRVPMSYSARKKQYGCCLRRPRIPEVHPKKKKKKAA

SEQ ID NO: 206987 - protein, 42 aa, Zea mays
  Clone ID: MRT4577_120360C.1.pep
RGPRALSLAAWPETRHGDARQTTGASAKLTERGTHLYGHQKP

SEQ ID NO: 206988 - protein, 72 aa, Zea mays
  unsure (1)..(72): unsure at all Xaa locations
  Clone ID: MRT4577_120361C.1.pep
SSTYFHDSNQGEILICAHTLGECRQLFIKHVCVMRHNHLLHTHIWRLLSVIRSALNVRQGIGSGXVWCPQGL

SEQ ID NO: 206989 - protein, 234 aa, Zea mays
  unsure (1)..(234): unsure at all Xaa locations
  Clone ID: MRT4577_120362C.1.pep
RAHSREARLGRRSGXSLGPGMQGAARSAELEGEQRRRARTRRXAGTATMAGAGTRRGRAAAGRGRSQQPSPARKGXRGTAKTKHREXGCNSGGWRPTVSMDASRDPAKWKTSRGAVRAHGSSRTCGTQTRERKKGAAWESRRRARELHSERTPGNRSHGGGRRQRSAARREMEQGGHWRVHGDHGREACAGRRGRERSSTRERGATMEGLGQRWGRRSRGRGQEEDRGEERPRP

SEQ ID NO: 206990 - protein, 56 aa, Zea mays
  Clone ID: MRT4577_120363C.1.pep
ANILPPHHTHYAPCPIVPIPTEVSLMSRDTKTPTSNIILTNNTNHLVGSITSLLRS

SEQ ID NO: 206991 - protein, 291 aa, Zea mays
  unsure (1)..(291): unsure at all Xaa locations
  Clone ID: MRT4577_120364C.1.pep
MLEVGRPSYQGRSSVYQSSSKMMSAISVAHLGCKDMDALDVGVVGKMVDTQSLSSALEKLYFWERKLYAEVKAEEKMRLLISKNSKRLKLLDQKGAEPQKIDATRNLLRKLSTKIRIAVRIIAKISRKINKLRDEELWPQVNALIQGFVLMWQDKLDAYHRQCQVISEAKNCTSVLSGENGQDLVLELEVELIKWIISFSSWVNSQRNFVKALNGXLALCLNYGPNYDTADVPTGAPSYMGAPLGSPLCFVTCNKWSQAMDRISEKDVVNAMQALVSSVWHLWEQQYLEQS

SEQ ID NO: 206992 - protein, 56 aa, Zea mays
  unsure (1)..(56): unsure at all Xaa locations
  Clone ID: MRT4577_120365C.1.pep
RVHPDELRQAAVVRSSRTSSQSAHPPLPRPSXHELWLYTTREDHEPSTGSVTRRTD

SEQ ID NO: 206993 - protein, 216 aa, Zea mays
  Clone ID: MRT4577_120366C.1.pep
MSLFGLGSKNQKTFRPKKNAPSGNKGVQLKKHIDATLGSGNLRDAVRLPPGEDLNEWLAVNTVDFFNQVNILYGTLMEFCTPATCPTMSAGPKFEYRWADGVQIKKPIEVSAPKYVEYLMDWIEAQLDDESIFPQKLGTPFPQNFKEVVKTIFKRLFRVYAHIYHSHFQKIVSLKEEAHLNTCFKHFTLFTWEFTLIDKAELAPLIDLIESIVSVC

SEQ ID NO: 206994 - protein, 112 aa, Zea mays
  unsure (1)..(112): unsure at all Xaa locations
  Clone ID: MRT4577_120367C.1.pep
PWPPGTPDLAKRPPPPPINAPSPAPPLRPPXPPIPHTGRPASPLGPNSPPIREARFTLSGPPTRALTPLPPPIPAPSPLPPAPPPXKTPPPPPPKIKKKKKKKKKKKKKKKK

SEQ ID NO: 206995 - protein, 313 aa, Zea mays
  Clone ID: MRT4577_120368C.1.pep
MEPMNVDNGGCGGLDAQIEQLMQCRPLAEQEVKALCEKAKEILMEESNVQPVKSPVTICGDIHGQFHDLVELFRIGGKCPDTNYLFMGDYVDRGYYSVETVTMLVALKVRYPHRITILRGNHESRQITQVYGFYDECLRKYGNANVWKTFTDLFDYFPLTALVESEIFCLHGGLSPSIENLDSVRSLDRVQEVPHEGPMCDLLWSDPDDRCGWGISPRGAGYTFGQDISEQFNHTNNLKLVARAHQLVMEGYNWAHEQKVVTIFSAPNYCYRCGNMASILEVDDCNSHTFIQFDPAPRRGEPDVTRRTPDYFL

SEQ ID NO: 206996 - protein, 89 aa, Zea mays
  unsure (1)..(89): unsure at all Xaa locations
  Clone ID: MRT4577_120369C.1.pep
KIVAFXLDDPKAFFVNHVDDVXKAFPGPLTPLKDWFRDSKIPDGKPPPKFGLGNKPPSKEYPLRVLQEPPESWEKLVKRNFPPGELSLA

SEQ ID NO: 206997 - protein, 281 aa, Zea mays
  Clone ID: MRT4577_12036C.1.pep
MAVHGGEAVSVALLFSLAFFCARLLLDRLVYKPLAVYLFNTKASKLMNNEARQAKIVKFSESIWKLTYYASVQAWVLMIIKQEPWSLDMMQYFDGWPNQPIVSSLMLFYMCQCGFYIYSIGALVAWETRRKDFAVMMSHHVITSTLIGVSYLTGFFRIGTIILALHDASDVFLETAKLCKYTEKELGASLFFGLFAISWLLLRLIYFPFWIIKASSYHSITFLRKLDEFPTTLYYILNTMLLTLLVFHMYWWKLICLMIMRQLNNKGQVTDDVRSDSEDEE

SEQ ID NO: 206998 - protein, 395 aa, Zea mays
  Clone ID: MRT4577_120370C.1.pep
MVPTVPCVEQGGPPGGRGSRPIPPDSSIQTLSRASRLSSPRFPSPPAVSLTPRARALSFLAFAAGDELELELVLRIEDDGRGMEPMNVDNGGSGGLDAQIEQLMQCRPLAEQEVKALCEKAKEILMEESNVQPVKSPVTICGDIHGQFHDLVELFRIGGKCPDTNYLFMGDYVDRGYYSVETVTMLVALKVRYPHRITILRGNHESRQITQVYGFYDECLRKYGNANVWKTFTDLFDYFPLTALVESEIFCLHGGLSPSIENLDSVRSLDRVQEVPHEGPMCDLLWSDPDDRCGWGISPRGAGYTFGQDISEQFNHTNNLKLVARAHQLVMEGYNWAHEQKVVTIFSAPNYCYRCGNMASILEVDDCNSHTFIQFEPAPRRGEPDVTRRTPDYFL

SEQ ID NO: 206999 - protein, 94 aa, Zea mays
  Clone ID: MRT4577_120371C.1.pep
EFRSTPDEALGKESFFMLNGPATLYFGDTEVGEQHSVRAPVMLRGSGAPPGSLENTETECTSHALKLITTSRLYSEQPVDSGTMDATYVGLSDA

SEQ ID NO: 207000 - protein, 476 aa, Zea mays
  Clone ID: MRT4577_120372C.1.pep
MDKFLKRDMGDPRNTNELAIVLVEPVDEQIGGNSEYQGPTDHNVSDHDNISHPTATESASVDEPPVVTIDIYDPRNWNNLDNKARDTLVEKGPIREKNLVFPMDGNSRHFSYSHYFRKLSNGEQHDRKWLVYSKHVDRVFCFCCKLFNSDSCTSSLAHDGYRDWKHISERLKEHENSAEHITGMNSWNELRDRLRKQETIDKDLQRQITKEKERMRQVLFRIVAIVKFLGKRNLAFRGSNNHLYNEQNGNFLACVEMVAEFDLVMQDHLRRIERKDIHYHYLSNKIQNELISLLASDITNTIIKIIKEAKYFSIILDCTPDVSHEEQMSLIVRCVNISSNKIEVEEYFLGFLKVDDTSGLGLFNVLIDSLESFGLDIDDIRGQGSTKRWKVLLDHVPSLTVKSLCNTRWESRIKSVAAIRYQAPHIRAALFELHHASDPEPMAKSDAKSLYDLIGTFEFILGMVIWHDILYACRGP

SEQ ID NO: 207001 - protein, 130 aa, Zea mays
  unsure (1)..(130): unsure at all Xaa locations
  Clone ID: MRT4577_120373C.1.pep
MGTSTTVVVVLDTTTVAGLGLAPTALSXRGVTXEQALLTVAAHAEMSPLIMISLSTDVTVFMGRSAFXTSQRVERVRDHCAPSINGKTHFDIXHERANEFXDRAKSKDDEGFNRGHILVXGSIGHIAVYY

SEQ ID NO: 207002 - protein, 45 aa, Zea mays
  unsure (1)..(45): unsure at all Xaa locations
  Clone ID: MRT4577_120374C.1.pep
ARNKFGYNCGHKAVWFTSGALLLDGNPLSXFGYSIPINLVVAVSQ

SEQ ID NO: 207003 - protein, 89 aa, Zea mays
  Clone ID: MRT4577_120375C.1.pep
GSVNVNCEELTEVLKSATQLLEPLTSCIANFLPKVEQIDDVACNLAQVIATEKTLIEECGNLLFHAQNLQMRESSLWSQAMQLKQNEAK

SEQ ID NO: 207004 - protein, 66 aa, Zea mays
  Clone ID: MRT4577_120376C.1.pep
CQLECRLHLNGVWYREIPGYNIVADSAAEAVDAYKEDNIYLQEIVHCRSDTSTSCKSAVSDQCSLT

SEQ ID NO: 207005 - protein, 99 aa, Zea mays
  Clone ID: MRT4577_120377C.1.pep
MLDSVSGGKQHQIWDSLMDYGKNDYAEEHQKFITLTEKLKFFAGDPEDVACTVIHALTSPFPKTRYLVGLDANVLSFIAWAYPDRLRDVMIKIVERITK

SEQ ID NO: 207006 - protein, 92 aa, Zea mays
  Clone ID: MRT4577_120378C.1.pep
VELLLSPATGPHGANRPIGRARKPGRRSARSPSRTTRTRGPYRTTKTGRPSYGPTTTSTTRHTGEEPAEQKRAQEPCEAGKSGEQVKRKEHA

SEQ ID NO: 207007 - protein, 220 aa, Zea mays
  Clone ID: MRT4577_120379C.1.pep
MASSPSLRPTDRLRRPPASPAFCSFSAVSLRGLVSLSSASRVLSVSFRQRLLTAVRSSRDPGEVIDVASGEGTELPGGSTGPRKDGKETAKSFSTKELLEKLKRYGVAGVLSYGLLNTVYYVTAFLLVWFYVAPAPGRMGYGAAVERFVKLMAMVWAGSQVTKIFRAGGALALAPFVERGLKWFTVKFNFKSEGKAFMTIVGLCFAVAALMFFGLTILWA

SEQ ID NO: 207008 - protein, 68 aa, Zea mays
  Clone ID: MRT4577_12037C.1.pep
YPRGRPGKKKKKKKKKKKKKKKKKKKKKKKKKKKKKKKGRPRHSWETPIISQGFHKRAGGSKGINLIC

SEQ ID NO: 207009 - protein, 38 aa, Zea mays
  Clone ID: MRT4577_120380C.1.pep
ELTRDDQKCKNDEATEGGDKCEQMNPITSVINDHNEIE

SEQ ID NO: 207010 - protein, 69 aa, Zea mays
  Clone ID: MRT4577_120381C.1.pep
GVVRVPRYQRLLQLHHKRLLLLHRRHVGCAVLQIQGMHVHGQGHYRLGLCLSLVRQHVNVSRLQRRNFH

SEQ ID NO: 207011 - protein, 70 aa, Zea mays
  unsure (1)..(70): unsure at all Xaa locations
  Clone ID: MRT4577_120382C.1.pep
NGVLYGSHFMSLLFPFTXAHSRSQALYPSRFFCILTSALFISSTPFINNAVYSVKKKKKKKKKKKKKKNS

SEQ ID NO: 207012 - protein, 93 aa, Zea mays
  Clone ID: MRT4577_120383C.1.pep
RAGEQFSQNKTLAADRFLTTEANHYGARVATEATEPRDCVLEAENIALSPCPPGLPQRAAAVDIHHFLHREGDYLGTQAGIVGPSVASFPAEE

SEQ ID NO: 207013 - protein, 100 aa, Zea mays
  unsure (1)..(100): unsure at all Xaa locations
  Clone ID: MRT4577_120384C.1.pep
TYSHQSPPPHCVEHLVFAGTDPTEPYLHQQHHQSTTTHLPHVHTLPSSVHHRYISRRPFLPSPSFPPXTXPPTPCCHHFCHXLPRRRILHGPRFTWCLTP

SEQ ID NO: 207014 - protein, 119 aa, Zea mays
  Clone ID: MRT4577_120385C.1.pep
AGRAGLCHARAARKFPKPTVPCTQWPCAPCTALTRAPGRAAPTPSSSSRATPGCLRPRASACHDRAGRRSPDPMRPARRSSPELAPAGARPTSRTPARFPYSPTPLPSYLHFPAQWTVR

SEQ ID NO: 207015 - protein, 78 aa, Zea mays
  unsure (1)..(78): unsure at all Xaa locations
  Clone ID: MRT4577_120386C.1.pep
KGEGKVVQVALMKKGAPPWRPLNQLWGSIWGLDSNPGLKPPFSIGTGTDLGKTLFAREVFPLNWGPNTFXRSLVQYPW

SEQ ID NO: 207016 - protein, 44 aa, Zea mays
  Clone ID: MRT4577_120387C.1.pep
LAFYLPCPCLPFGLLWLAFCYCLNLINEHDVTIYEKKKKKKKRP

SEQ ID NO: 207017 - protein, 99 aa, Zea mays
  Clone ID: MRT4577_120388C.1.pep
PHRAIGHVVIVSSVWTHIHVRMGDSVLIWCHRHGVEAASTAAVLEPCETSHGWLHTPKSIQFFPWRTVEQKLACALFSSATSAPAVFFLACEYRAGAQN

SEQ ID NO: 207018 - protein, 102 aa, Zea mays
  Clone ID: MRT4577_120389C.1.pep
MGDASVRLARHSQFSHLYLRTIMMVLASVATTSFVPGAVLHRRRQRGRLRARLPVPAKPRGLQGVLLRHGVGIGLRTRCCRRSAGEGNALQHTPRTLRCYHC

SEQ ID NO: 207019 - protein, 70 aa, Zea mays
  Clone ID: MRT4577_12038C.1.pep
NPGPRQQDITYFEYLETKIPFHGDPHKWGFHNITKMQIILKLPRFQGTNFSGGLNKCAPLTAMPTTKLFQ

SEQ ID NO: 207020 - protein, 98 aa, Zea mays
  unsure (1)..(98): unsure at all Xaa locations
  Clone ID: MRT4577_120390C.1.pep
VAYPVAFLRQLLPFNHLSLXSTFAAYLQQRHQLLNPLVVANPLVAAFLQLRLLLPFNQFSLMLPVLSRQLPFVGGAFFLVSYELFSPCGALLPACVSY

SEQ ID NO: 207021 - protein, 78 aa, Zea mays
  unsure (1)..(78): unsure at all Xaa locations
  Clone ID: MRT4577_120391C.1.pep
FYKVKAGPDDFFVLLTFRGPVFPFIKIGCMHGKFFNSPNFSFSPPVLFYFPSLAXKLRKQFFNPIXTKGGQNLIGYKA

SEQ ID NO: 207022 - protein, 69 aa, Zea mays
  unsure (1)..(69): unsure at all Xaa locations
  Clone ID: MRT4577_120392C.1.pep
RGTFSRKEALGARLWSDSRFLGWCGEKRTRRRVXSLLSCAGGKDAKPRAGGGGVYFIDRDGDTTWRVPA

SEQ ID NO: 207023 - protein, 71 aa, Zea mays
  Clone ID: MRT4577_120393C.1.pep
DHTLPEGRSIGFGLIFNTFEFAKRLGPKSRLIGNGLVTKVEKSRRQLKERRTRAKKIRGVKKTKVGDAKKK

SEQ ID NO: 207024 - protein, 119 aa, Zea mays
  Clone ID: MRT4577_120394C.1.pep
KKRKKRRLVPKAGVFVSSAGYPRTKCPPRLNQARPPKTKMAQGNRNGSPRPGCPSKKNPRGGNTRAARLFSACRYSNPFSSINLGHPFLCLYLYADGSRISRAFVSGLALGSFATLPGL

SEQ ID NO: 207025 - protein, 143 aa, Zea mays
  unsure (1)..(143): unsure at all Xaa locations
  Clone ID: MRT4577_120395C.1.pep
QKIAESDSFDPITIPQAKSLSGSSGLSAFCFVLFCFVKAQRVAALGPLLLLRQSRSTTWGPLWPARSDSDGDEWDDGGRPWSPVDRSTSVSFRTIMVQYTDRATWCGQRATHLSGLRQVMLMHAHTYDXRSLITSCIYPCFAM

SEQ ID NO: 207026 - protein, 229 aa, Zea mays
  unsure (1)..(229): unsure at all Xaa locations
  Clone ID: MRT4577_120396C.1.pep
ISVFLLVGXQSRVEAAMVNARIQKTVRATQAKVGYIGPPADFNYDTWHLGTGPDTLVEIAEGRHPFCSILKSAKNPVIIAGAGLFEREDQGAVFSTIETVAKKFNVTRPDWNGLNVLLLHAAQAAALDLGLVANPTESVKSAKFLYLMGADDVNLDNLPADAFVVYQGHHGDKAVYRANVILPSSAFSEKEGTYENTEGCTQWTIPAVPTVGDARDDWKIVRALSEAAG

SEQ ID NO: 207027 - protein, 128 aa, Zea mays
  unsure (1)..(128): unsure at all Xaa locations
  Clone ID: MRT4577_120397C.1.pep
PAEYGMDGDVSIQGDLYSYGVLLLEMFTGKRPTDASFQGGRTLQSYVASCYPDKVLEVADPGLRHXGQRVXSGGDVCCDEIDAEKLRRCMASVFRVGLQCSQEPPRARMHVGTAIKELEAVKDALLND

SEQ ID NO: 207028 - protein, 661 aa, Zea mays
  unsure (1)..(661): unsure at all Xaa locations
  Clone ID: MRT4577_120398C.1.pep
MAAAMDAPNPGAAAGPGMPSDALYQELWHACAGPLVTVPRRGERVYYFPQGHMEQLEASAHHQQLDQYLPMFDLPPKILCRVVNVELRAEADSDEVYAQIMLQPEADQNELTSLDAEPQEREKCTAHSFCKTLTASDTSTHGGFSVLRRHAEECLPQLDMSQNPLCQELVAKELHGTEWHFRHIFRGQPKRHLLTTGWSVFVSSKRLVSGDAFIFMRGENGELRVGVRSLILYESNMXSEIVTFSSTCXGCRVARWENVSTGTLFSVFYKPRTSRSDFIVSVNKYLEAKKQKISVGMRFKMRFEGDDAPERRFSGTIIGIGSLPAMSKSLWADSDWRSLKVQWDEPSSILRPDRISPWEVEPLDAANPQSPQPPLRAKRPRPPASPCMVSELPSGFGLWKSPIESSCTLSFSEPQRARELFPSIPTSTLSSSSNVSFNSKNEPSMLTSQFYWSARHTRADSCAASTNTVVIEKKQEPSSGGCRLFGINICSAEEEVLPEVTAPGVGYEQTAASVELNSDKLSQPSDVNNSDALAASSERSPLESQSRQVRSCTKVIMQGMAVGRAVDLTKLSGYSDLCQKLEEMFDIQGELGSTLKKWRVIFTDDEDDMMLVGDDPWDEFCRMVKRIYIYTYEEAKKLTSKSKLPVSSDSSKLSAANSLSE

SEQ ID NO: 207029 - protein, 31 aa, Zea mays
  Clone ID: MRT4577_120399C.1.pep
KYTYRYITCILDIGFYVPFIHKNMLYPLFRC

SEQ ID NO: 207030 - protein, 64 aa, Zea mays
  Clone ID: MRT4577_12039C.1.pep
HITPLSLIIEHNFRRMPRKRSPSRITGTHLSRSSPTPTNRFPLGSHSYSPQGSRYPRPERGPLL

SEQ ID NO: 207031 - protein, 83 aa, Zea mays
  Clone ID: MRT4577_1203C.1.pep
NLHLTTSSRTKKAQCHTSPASFSVSRKTRWHGYNSYHQAKECIISLLPSLLSTLHSWTSYNIQLATLNNSWRCSRVNNPKSGI

SEQ ID NO: 207032 - protein, 225 aa, Zea mays
  unsure (1)..(225): unsure at all Xaa locations
  Clone ID: MRT4577_120400C.1.pep
KSTAHSFCKTLTAWDTSTHGGFSVLRRHAEEEVLPEVTAPGVGYEQTAASVELNSDKLSQPSDVNNSDALAASSERSPLESQSRQVRSCTKVIMQGMAVGRAVDLTKLSGYSDLCQKLEEMFDIQGELGSTLKKWRVIFTDDEDDMMLVGDDPWXRTLCLCINECMFSIIGSPNXCNASSFSEFCRMVKRIYIYTYEEAKKLTSKSKLPVSSDSSKLSAANSLSE

SEQ ID NO: 207033 - protein, 84 aa, Zea mays
  Clone ID: MRT4577_120401C.1.pep
LPWPTQKVKSFLGSFPLGFGPYFFSRFWFFFFFSWWLPGGPFPNFWVSPKKKKKKKKKKKKKKKKKKKKKKKKKKNKKNKNKIK

SEQ ID NO: 207034 - protein, 89 aa, Zea mays
  Clone ID: MRT4577_120402C.1.pep
TRPSFREQCAGTSSRSSGMSTLSTGAVSPALYKHRVTSNPVPRIRQNHDSVFTCLSLKQGTGQQSPLISGNEVVTQHVWKGSAWLTIWT

SEQ ID NO: 207035 - protein, 159 aa, Zea mays
  Clone ID: MRT4577_120403C.1.pep
CFCPGFPWPPFCFQKPPGIFSCAPKTCGPNFLAPRAPPWGPPLVPPFFFSQWLENGFGLQPRLPQGTPVKPREPGFPGALLECSKPCFWGNKMWGVCFPPFYLLILNVAPKVLLLPIRFGIFFVTGPPGSLSKKKKKKKKKKTKKKKKKPKKKKKKKKN

SEQ ID NO: 207036 - protein, 53 aa, Zea mays
  Clone ID: MRT4577_120404C.1.pep
KKEMIRFKNDKTRIKDLIAKNGNIKNHQLKPRINPISSKGMIKKYLNFSCLII

SEQ ID NO: 207037 - protein, 35 aa, Zea mays
  Clone ID: MRT4577_120405C.1.pep
MATTAMDYENANGDRFYEDAPRYERDRSASPRRDD

SEQ ID NO: 207038 - protein, 85 aa, Zea mays
  Clone ID: MRT4577_120406C.1.pep
FFRLREGWGSKCNPTNVISRWGFPTCQSVFPPFPPVKVSKTNPFFSLNKGVPSFVQIFCSLGFGSLQRQKKENKKKKRKKKKKEN

SEQ ID NO: 207039 - protein, 94 aa, Zea mays
  Clone ID: MRT4577_120407C.1.pep
RIHELIIGMNASARSVREIAVFFVFAACSLRLATATIQLRLRLLQYFSLYGLQLQQSKQLQQCRLVATRTRPWFPSSFLVQFWVSFSSSFGHEL

SEQ ID NO: 207040 - protein, 135 aa, Zea mays
  Clone ID: MRT4577_120408C.1.pep
DMMLQIHYLWLMPLQVGVALGLLYTYLGPPVTSALIGVAGVMVFVLLGTRRNNRYQFSLMKERDQRMKATNEMLNYMRVIKFQAWEEHFNARIGRFRRLEFGWLSRFMYSISGNIIALWSAPVVVSALVFATCVL

SEQ ID NO: 207041 - protein, 59 aa, Zea mays
  Clone ID: MRT4577_120409C.1.pep
RQESFPQAKLGSCHPSVHATMRRTKTSEPKEEDDTLGPTAQEGERVFRGAHIWASLNDT

SEQ ID NO: 207042 - protein, 117 aa, Zea mays
  unsure (1)..(117): unsure at all Xaa locations
  Clone ID: MRT4577_12040C.1.pep
MPSPNSKFVPNLPIPSLTGHRSESYTAPEFPQCLLGKGSRAALAPALCWSPPKRRQENGSIYRARARLLVRSRSPKNWLCTXPLLLSHAQTSVPGAVHRGSSSDTAPRGHGPGVGLW

SEQ ID NO: 207043 - protein, 106 aa, Zea mays
  Clone ID: MRT4577_120410C.1.pep
GKKGMGIIDPENTFTGNGFMGGNRVLCHHSKTGVKGHQKGLGLGETKLFFGGGQVCKLGANLFTPLGGFVTASMGACSPKSKGGGVRTHPMGGGPLPTGEGGPPLG

SEQ ID NO: 207044 - protein, 48 aa, Zea mays
  Clone ID: MRT4577_120411C.1.pep
NKNKDVTTTPILWGAKHLGVQTFLETQACQLFLIKRITPYFLFNIFSP

SEQ ID NO: 207045 - protein, 54 aa, Zea mays
  Clone ID: MRT4577_120412C.1.pep
RPPLSVYAPETSGPSPGRGRRPLPGLPGLTRFPPCPSCTPCGVSFGQVSRCTSW

SEQ ID NO: 207046 - protein, 44 aa, Zea mays
  Clone ID: MRT4577_120413C.1.pep
PLTCIKSMRTAYHYITYLNRSPINAFVWNTTGSILFLFHHLQEL

SEQ ID NO: 207047 - protein, 124 aa, Zea mays
  Clone ID: MRT4577_120414C.1.pep
MSALALALVLLCSATIMVAPAAADVESHSFPVFNVTTTESLWVATNMSIVMPAALLFMPEQPLPEVNVSEGFLLLPKRIDVWRAGAGALPTREASFNTSFTVESSAPPVSFVLLLDRFPTLNNP

SEQ ID NO: 207048 - protein, 36 aa, Zea mays
  Clone ID: MRT4577_120415C.1.pep
LFQNSAAYTDCYRQRKIWLSGNILPKRRLIGEKINS

SEQ ID NO: 207049 - protein, 97 aa, Zea mays
  Clone ID: MRT4577_120416C.1.pep
TTRTSFLCIGRQQAVVERYVENIKSSTLLAILVLQALSGLCGRAKGPCRADDEEAVLVRRVHQLSVRVDLRRPPHQVRLHLQELRPRVHGQVGHQVQ

SEQ ID NO: 207050 - protein, 225 aa, Zea mays
  unsure (1)..(225): unsure at all Xaa locations
  Clone ID: MRT4577_120417C.1.pep
CSMLFSCCSSQCECDDTCTNKSFQHRPLKKTKLIKTEKCGHGLVAEDEIKKGEFVIEYVGEVVXMVIDATNKGNRSRFINHSCEPNTAMQKWTVDGETRVGIFALRDIKIGEELTYDYKFVQFGAAQVCHCGSSNCRKMLGTTKYSGSSQNHHAKKKKRKTSCENCIQQFLRLWHPHKKMYVGCWIIDFDQETKMHTLKFNDLHTEKFNLKEEEWHFLEVDFDED

SEQ ID NO: 207051 - protein, 116 aa, Zea mays
  Clone ID: MRT4577_120418C.1.pep
NWICFKTLKKAGHVKIVILTRGHLGVTQSDIKKCLVPFFKPGGSFQKDIHKPRNLLLLASIYQGLYRWPLFPYTWAMCLPPVNTLNPKGGNNSPFEKWIPTFFKKKKPKKEKKFAS

SEQ ID NO: 207052 - protein, 69 aa, Zea mays
  Clone ID: MRT4577_120419C.1.pep
MALNGGETLVPDQEKQQIFLQKHTEKHFTCGEGVRDINIRVWDGLTLPFALAVGVFGANTYSALVVTAG

SEQ ID NO: 207053 - protein, 47 aa, Zea mays
  Clone ID: MRT4577_12041C.1.pep
TFPNNSQIFMGKFIQQHLTSLTYDKSTAFQKKSQAPPHKHLCMKKKP

SEQ ID NO: 207054 - protein, 79 aa, Zea mays
  Clone ID: MRT4577_120421C.1.pep
SSSVDHGIHCAIPIECEKDDRLSCRHVLVHSQNTKHAAVPDRSELDYQYSQFSPFDKFMMRASCSFESMNSVAEFLYSD

SEQ ID NO: 207055 - protein, 153 aa, Zea mays
  unsure (1)..(153): unsure at all Xaa locations
  Clone ID: MRT4577_120423C.1.pep
MAMPIPSMVMAMAMAMVLAVASTAHYGHQALADAPAAAPSPRHHHGHRAPAAQASGSHHAHGHDGAPAPGHRGHHGHHXHQHXAPSHHGHHGHHHAPASAPGPHGHHGHHHAPGPHGHRAPAPVHNDHQSAQAPKLHHHHRHAAAPAPVQSSY

SEQ ID NO: 207056 - protein, 74 aa, Zea mays
  Clone ID: MRT4577_120424C.1.pep
SASREELNLDLPCSIHFADLNKSSTRSVHQATSWPPMNHYRFNSSRLRFKTHASTFPHQTSGGRRSRIADPPSF

SEQ ID NO: 207057 - protein, 132 aa, Zea mays
  Clone ID: MRT4577_120425C.1.pep
MSRSLGIPVKLLHEAAGHVVTVELKTGEVYRGSMVECEDNWNCQLENITFTAKDGKVSQLEHVFIRGSRVRFMIIPDMLKNAPMFKRLEARIRGKGSAVGVGRGRAVAMRARAAAGRGGGPVGRGGAPPVRR

SEQ ID NO: 207058 - protein, 45 aa, Zea mays
  Clone ID: MRT4577_120426C.1.pep
QPCGSYRNPNTKFLPAKDLIPAQGYFLAWPIKHRISGVWLYVYHR

SEQ ID NO: 207059 - protein, 87 aa, Zea mays
  Clone ID: MRT4577_120427C.1.pep
GCPSRCSMLMYVSQAPAYGFTERMKPHNIFPTSDVSTLMAATDPFVEREMDILLAPIGYGVVCDPSCFRPAHVLPFFFCILLKDWAG

SEQ ID NO: 207060 - protein, 33 aa, Zea mays
  Clone ID: MRT4577_120428C.1.pep
IYIFAIEDQMMLVRVDCRTLADHHVDGAHVDSC

SEQ ID NO: 207061 - protein, 77 aa, Zea mays
  Clone ID: MRT4577_120429C.1.pep
DSSHPSYADLLDKVAPSFFFMFFSMYRSLVLVGAFFYFEMSPIQCIYLHASRCLHCLNVWPSPLTGLCHTKATEIGC

SEQ ID NO: 207062 - protein, 107 aa, Zea mays
  unsure (1)..(107): unsure at all Xaa locations
  Clone ID: MRT4577_12042C.1.pep
MREFCVWSPIRCVSSPHMLLARGIDVQQVSXLVSTYDLXPPSQMIYLHRIGRSGRFGRXGVAINFVTXPTERILFDYQKFYYVLIEDLPAYVADLLDAIYEKKKKRG

SEQ ID NO: 207063 - protein, 110 aa, Zea mays
  Clone ID: MRT4577_120430C.1.pep
MVKCLNTGEALILLQRRFPGRNAVIERLFQEGTRDRPYGHCLVSGLDKYPKKVMRKDSAKKTAKKCRDQCLIMLVKVTHLMPTRYTLDVEFKDITSCVTDALYTRDTNEE

SEQ ID NO: 207064 - protein, 253 aa, Zea mays
  Clone ID: MRT4577_120431C.1.pep
MPGQNADPCCAFHPMSRAATRFFLTRCLLPLPLLSPRWRQRRRGSICATRAFAMAASGFGGGEAFRLSAAPGAGLLKLHKGDITLWSVDCATDAIVNAANERMLGGGGVDGAIHQAAGPELVQACRKVPEVKPGVRCPTGEARITPAFELPASRVIHTVGPIYDLDEHPEVSLKKAYENSLKLAKDNGIQYIAFPAISCGVYRYPPKEASKIAVSTAQKFSEDIKEVHFVLFSDDLYNIWRETAQQLLSQFEK

SEQ ID NO: 207065 - protein, 40 aa, Zea mays
  Clone ID: MRT4577_120432C.1.pep
LVYSPFNLMAGGPFGMCSVTAGMYCAGRYITDIGLRNDVA

SEQ ID NO: 207066 - protein, 200 aa, Zea mays
  Clone ID: MRT4577_120433C.1.pep
MAASGFGGGEAFRLSAAPGAGLLKLHKGDITLWSVDCATDAIVNAANERMLGGGGVDGAIHQAAGPELVQACRKVPEVKPGVRCPTGEARITPAFELPASRVIHTVGPIYDLDKHPEVSLKKAYENSLKLAKDNGIQYIAFPAISCGVYRYPPKEASKIAVSTAQKFSEDIKEVHFVLFSDDLYNIWRETAQQLLSQFEK

SEQ ID NO: 207067 - protein, 81 aa, Zea mays
  Clone ID: MRT4577_120434C.1.pep
PGWKRFTLSFGLGLKKVPGKVFRFGPFGTPKKVEFFGFFNGLEMVLKNLGAPVKFGKGVAPPGGFLLNSPPLFPFWVLDPF

SEQ ID NO: 207068 - protein, 54 aa, Zea mays
  Clone ID: MRT4577_120435C.1.pep
SADRTPQHGTTGAAEARPPEKFKIKDFEAFSSLKNSEDKFTLHHHLMNEKHAVV

SEQ ID NO: 207069 - protein, 92 aa, Zea mays
  Clone ID: MRT4577_120436C.1.pep
RLPPLQKIKCGPNRVISVTAGFYQAPRIKIRARKKKVSHPKEELGSREPEERSPETFKAAAPFFFFFFYFFLFFFFFFNFFFFFGKVDGRVG

SEQ ID NO: 207070 - protein, 177 aa, Zea mays
  unsure (1)..(177): unsure at all Xaa locations
  Clone ID: MRT4577_120437C.1.pep
QFFFFFFFIFFFFFFFFFFFFFFFLKLKFIRKAKIKEKKKKKKESKKKXREKKKGEKGRDRGKGKKRGKGEKGGKETERGKGGGRQKGRGDQGGNQDKGQYHHKGERKKRGRAGKKTRGKKGHRGNRGKSGIREQMEQHTKRKKKRKSKGKRKREGSQMRGVTHNNRLTPRKPVAPG

SEQ ID NO: 207071 - protein, 103 aa, Zea mays
  Clone ID: MRT4577_120438C.1.pep
GPPARSQTSSCCTSPTTASRAASPPPSPCSTGPPSLAALPRLTSLLLDRNLLTGATAASSGAREERRGTRAREERRKMSARRRREGTSRRRSRRWRRRQYQRY

SEQ ID NO: 207072 - protein, 38 aa, Zea mays
  Clone ID: MRT4577_120439C.1.pep
RILAARCAAETLSLADLSRFSPGRMPARRAQGSGELVV

SEQ ID NO: 207073 - protein, 33 aa, Zea mays
  Clone ID: MRT4577_12043C.1.pep
MAAQGEPQVQFKLVLVGDGGTGKTTFVKRHLTG

SEQ ID NO: 207074 - protein, 145 aa, Zea mays
  Clone ID: MRT4577_120440C.1.pep
FAQQQVSYLGHVINAQGVATDPVKIQAIAEWPVPNCLKDLRSFLGLAGYYRKFIRHFGVICQPLTALLKKGSLFVWTNDHGIAFDTLKKALVTAPVLALPDFTAAFIVETDASADGVGAVLMQKGHPLALLSKALGPKSKGLSTY

SEQ ID NO: 207075 - protein, 90 aa, Zea mays
  unsure (1)..(90): unsure at all Xaa locations
  Clone ID: MRT4577_120441C.1.pep
FVAGPXPCRXAAAPRXGXXASARXPXXWVPPGVPARXFPLXXSAPPLLLAAPXXFVSAPLAXXWPSGPLVSPWXXPAXXXXXLPAPARWV

SEQ ID NO: 207076 - protein, 86 aa, Zea mays
  Clone ID: MRT4577_120442C.1.pep
HASGTPPLSHLLPPQTFAALTTQNPSRPPPPPPFLPLLQGAALPCGSPSCGCDLNWSLEGGRRKEEGKNLRWWTSGSYLGICPNFR

SEQ ID NO: 207077 - protein, 74 aa, Zea mays
  Clone ID: MRT4577_120443C.1.pep
SWPLGVGVGSVLVSVSSLPLCPSGVLLFAPVRRRLCRSCSGRGGSCSPSPPSSLGCASKSKARGSSRVFRAGPR

SEQ ID NO: 207078 - protein, 76 aa, Zea mays
  Clone ID: MRT4577_120444C.1.pep
REEEKTKGEGPASGINLGTTYSRVGEGQHNRCMSMGDNQGDTTTPGYDDYTNTERIRGEAAENQVGKNPTNTVVDT

SEQ ID NO: 207079 - protein, 50 aa, Zea mays
  Clone ID: MRT4577_120445C.1.pep
RSQRSIRSAIHDDYGVYTSVDIESDEIYMCEDIDAEGDPTTYETATRIAN

SEQ ID NO: 207080 - protein, 310 aa, Zea mays
  Clone ID: MRT4577_120446C.1.pep
MYFEGYGFRGSTFEQTYRCYPASFIDKPQLEAGDKIIMPPSALDRLASLHIEYPMLFEVHNAAAERTSHCGVLEFIAEEGMIYMPYWMMQNLLLQEGDMVFIKNANLPKGTYVKLQPHTTDFLDISNPKAILEKTLRNFSCLTTGDSIMVAYNNKKYYIDIVETKPSNAISIIETDCEVDFAPPLDYKEPEPVKPAVPASTEPGTDVPAEEEPKFIPFTGSGRRLDGKPSKDKDVLASSPAKRQANATNGVQPSTATTSQGSSSRKATGKLVFGSGGNRAEKAPEKEAEEPKKEDPKFAAFTGKKYSLKG

SEQ ID NO: 207081 - protein, 90 aa, Zea mays
  Clone ID: MRT4577_120447C.1.pep
KLGAIFIFATNTWKKRGKGKMGGEKNGMNLSRQKELPSRQGEKPITKQQRVPGGDKRFDTHLDTLKRGFKTNTCMLEKPGHTKRDKQCSK

SEQ ID NO: 207082 - protein, 88 aa, Zea mays
  Clone ID: MRT4577_120448C.1.pep
KAALRHVYSLSDITGLANNYVSPCSEHRRVPVVNLLDVQYQAACTTTVVVLFTDIDPGESLTGIVQYKSSAPCVSSAKVGIFARNRLF

SEQ ID NO: 207083 - protein, 336 aa, Zea mays
  Clone ID: MRT4577_120449C.1.pep
MYFEGYGFRGSTFEQTYRCYPASFIDKPQLEAGDKIIMPPSALDRLASLHIEYPMLFEVHNAAAERTSHCGVLEFIAEEGMIYMPYWMMQNLLLQEGDMVFIKNANLPKGTYVKLQPHTTDFLDISNPKAILEKTLRNFSCLTTGDSIMVAYNNKKYYIDIVETKPSNAISIIETDCEVDFAPPLDYKEPEPVKPAVPASTEPGTGKTIVLCDYCSPYGFLMHIIFMILVSDVPAEEEPKFIPFTGSGRRLDGKPSKDKDVLASSPAKRQANATNGVQPSTATTSQGSSSRKATGKLVFGSGGSRAEKAPEKEAEEPKKEDPKFAAFTGKKYSLKG

SEQ ID NO: 207084 - protein, 188 aa, Zea mays
  Clone ID: MRT4577_12044C.1.pep
MKRQWSHPSVVLPLLVAVFLLLTFRCALRHAQQQASSLRADDAGTSTSYAVDATLAELAAVDPAASGVLRAAEALLEANLTRAPPERRNAAVRGLRDWLGKQRFEPQVMAELVDLIKRPMDRYAAGARGGDGDGDAPRPYASCAVVGNSGVLLAREHGALIDAHDLVIRLNNAPAGAGAGGRYARHVG

SEQ ID NO: 207085 - protein, 156 aa, Zea mays
  unsure (1)..(156): unsure at all Xaa locations
  Clone ID: MRT4577_120450C.1.pep
GNPGRPRASHGHARPPTPGGPRRPRGVTQHAPTGPQXQRGAPRGRGGAPRPGAERGEDDGPHGKGPPPAGPAAAGRHGGGRVQPRHGPRGAAPEEGAXTRTGGTRARAQPPQGHRPHGGPXRGPGPGKKTTEPPXGQPTPHGRQQGPPPQEPPGRP

SEQ ID NO: 207086 - protein, 77 aa, Zea mays
  Clone ID: MRT4577_120451C.1.pep
MHGLLNKDCKQIFTMSVTCNEQEQLLTGIHQLPPTFFIINTSIKTILNIFMILQIVSTHIASKINTSVTIFIVPATF

SEQ ID NO: 207087 - protein, 379 aa, Zea mays
  Clone ID: MRT4577_120452C.1.pep
MMGWCEVGMMKVLVLSLVAGAVAAVRPSKLLPAAVPAVYVFGDSTLDVGNNNYLPGKDVPRADKPYYGIDLPGSGKPTGRFSNGYNTADFVAQALGFKKSPLAYLELKARKMLIPSAVTRGVSYASAGAGILDSTNAGNNIPLSQQVRLFESTKAEMEAAVGQRAVRKLLSASFFLVSAGSNDFFAFATAMAERNRTATQGDVTAFYGSLLSNYSATITELYKLGARKVGIVNVGPVGCVPRVRVLNATGACADGLNQLAGGFDGALRSAVAALAADQLPGLAYSVADSFGFTQASLADPLGLGFASADSACCGSGRLGAQGDCTPAATLCADRDRYVFWDSVHPSQRAAMLGAQAYYDGPAQYTSPVSFKQLARMRIG

SEQ ID NO: 207088 - protein, 233 aa, Zea mays
  unsure (1)..(233): unsure at all Xaa locations
  Clone ID: MRT4577_120453C.1.pep
FQNTRREGPRCTHHLISVTYAVRSLRYLHCAALHALATTPTEAGKAAPPHEQDANGHGDDEQNTRHSXSYTESLLKSDDLYQNIXLDTSLVPDVEPXSMXELRRXILAKHPCNXMTTSADDGXQFLYMLIKLIGAYKTMEXIGVYTGYSVLDTALXALPEDGTXILVMDINRENYXLGLPCINEAGERHKIDFREGPALPDLNDRLVRDKXRARGRVDFXFLDADQDYYLNYH

SEQ ID NO: 207089 - protein, 33 aa, Zea mays
  Clone ID: MRT4577_120454C.1.pep
AKPLPECRFTRSTCVEDSTHIEQRHTRRSLRVS

SEQ ID NO: 207090 - protein, 50 aa, Zea mays
  Clone ID: MRT4577_120455C.1.pep
TISPERTKSCCGEQVSPIFFPINPRRNPPPKTLSRWGMPKKRKKPRSGPL

SEQ ID NO: 207091 - protein, 61 aa, Zea mays
  Clone ID: MRT4577_120456C.1.pep
RNFEGLKSNKKFFYVTLWNKGLISYKSYKIPIEWTILVRFWRIFNTRSKFLEIFLWNASVI

SEQ ID NO: 207092 - protein, 44 aa, Zea mays
  Clone ID: MRT4577_120457C.1.pep
VFISFVIRVWYYGRSGSVKHECMREQLFASFREFKNLFFFFFVS

SEQ ID NO: 207093 - protein, 58 aa, Zea mays
  Clone ID: MRT4577_120458C.1.pep
SCFLLSSLKKKIFSPPTQLILFPYTRLSHLFSLLNSTLSSFSLPALAFVSTKDGSMAS

SEQ ID NO: 207094 - protein, 36 aa, Zea mays
  Clone ID: MRT4577_120459C.1.pep
YVWSRQSCLWHSASELRPKSVLLRDRYTITSLRTFG

SEQ ID NO: 207095 - protein, 143 aa, Zea mays
  Clone ID: MRT4577_12045C.1.pep
MKRQWSHQSVVLPLLVAVFLLLTFRCSLRHAQQQASSLHADDAGTSYAVHAMLVELAAVDPAASAVLRAAEALLQANLTRAPPERRDAVVRGLHDWLGKQRFEPQVMAELVDLIKCPMDLSIRKATKSRFALRESRLLEKAAS

SEQ ID NO: 207096 - protein, 224 aa, Zea mays
  unsure (1)..(224): unsure at all Xaa locations
  Clone ID: MRT4577_120460C.1.pep
NTERREKERRGNTETREEEEEGEIEIDHAPGEQILRLAIRDKDSCEMPPELGMSSRTVAGAVVNRRPRRLFGRSSERKNPLNLQFERQVARLEARQQQQRCVIVTVIPFNFCYDFKSLSLTESASEDPSSRPTSPEENPETSSSPSILFLHLNAQDVSHRRWQDNSSRLLEDKPTTSNSTSDSDFLVNSFTKPSDNARPSRRKSXKKSRNTGHAVGSRLMGSEL

SEQ ID NO: 207097 - protein, 120 aa, Zea mays
  unsure (1)..(120): unsure at all Xaa locations
  Clone ID: MRT4577_120461C.1.pep
MPAQLTDDQIARVKEGFSLFKKPGTRCLPTTEMGTAMRSLWQNXPTEAELHDMINEDRADGNGTIDFPXESLNLMALQMNDTVSXEGPGRTLRVFDMDXTGFIIGRATSGLVLTKRCART

SEQ ID NO: 207098 - protein, 53 aa, Zea mays
  Clone ID: MRT4577_120462C.1.pep
YSMYASRIVLWIARLVTCIGLLSARVSGSPQDQTLNQRISGCASCSRRHTHNR

SEQ ID NO: 207099 - protein, 60 aa, Zea mays
  Clone ID: MRT4577_120463C.1.pep
DHFNLTRVWFGGPESGSSNIVQKWWMGLSLKKIRDRVNQGLISSHPSLTPNQTLPYLPVP

SEQ ID NO: 207100 - protein, 301 aa, Zea mays
  Clone ID: MRT4577_120464C.1.pep
INSTKNPTAVILHTEDVGDFKPAPVVASFSARGPGLTESILKPDLMAPGVSILAATIPSTDSEDVPPGKKQSAYAIKSGTSMACPHVAGAAAFVKSAHPGWTPSMIRSALMTTATTTNNLGKPLASSTGAAATGHDMGAGEMSPLRALSPGLVFDTSTQDYLDLLCYYGYKEQQVRKISGAARFSCPAGAPSPDLIASAVNYPSISVPRLKRGRPATVARTAMNVGPSNATYAATVDAPPGLAVRVSPDRLVFSRRWTTARYEVSFDVAAAAAVSKGYVHGAVTWSDGAHSVRTPFAVNVL

SEQ ID NO: 207101 - protein, 97 aa, Zea mays
  Clone ID: MRT4577_120465C.1.pep
IVGVGMLEAHIDPAQHNRKGMGFSMGVFFSFSGEKSFLILKVRPMLFGVVALDMSAAFHQVSLSHAVEELSGAIQDEVDKNGKVSWEEERRRSQARP

SEQ ID NO: 207102 - protein, 164 aa, Zea mays
  Clone ID: MRT4577_120466C.1.pep
AARDFIIKGISGDAAISACCCTDATIIVIGGTVDNAGLQAIICHHPVGLLVHVDAQVLGPPPAARQRLHLHSPPIPPPLLLPRRNASSNNFAASTPPQQQRVSDQRASDTEEKPNRLSRGRESSSAGKGKGWKLELEGEGPKGSGWDSGVRVVVEMELELSETD

SEQ ID NO: 207103 - protein, 102 aa, Zea mays
  unsure (1)..(102): unsure at all Xaa locations
  Clone ID: MRT4577_120467C.1.pep
ALNFSRTDKEEGIEPGGGVVLLYATNVLDKISTANXGXKMGFKIIMNSLKDPXMTIAANADIDGAILIWKLIEQKDLTLGYDATKGEYVDMINDGIMYPLKV

SEQ ID NO: 207104 - protein, 71 aa, Zea mays
  unsure (1)..(71): unsure at all Xaa locations
  Clone ID: MRT4577_120468C.1.pep
DPRIRHEAAAVPGLRAELEALKQRHFQALELXXXRDEELEELRNDIVDLKEMYREQVDLLVSQLQALGARV

SEQ ID NO: 207105 - protein, 63 aa, Zea mays
  Clone ID: MRT4577_120469C.1.pep
MGELNYFLGFQVKQLKDGTFISQMKYTQDLLKRFGMKDAKPAKTPMGTDGHVDLNKGVDRILC

SEQ ID NO: 207106 - protein, 77 aa, Zea mays
  unsure (1)..(77): unsure at all Xaa locations
  Clone ID: MRT4577_12046C.1.pep
MAHAVVPAIHSPVGVNAAAGRVWSAARTSTGRGGASPRFMVMADSTGSTAVVPRLQQLLXLDTTPYFDKVIAEYIRL

SEQ ID NO: 207107 - protein, 44 aa, Zea mays
  Clone ID: MRT4577_120470C.1.pep
PYQAQNTELFIVHADLIHPFVHVSQVASYPCDALNGMHFLFLSE

SEQ ID NO: 207108 - protein, 99 aa, Zea mays
  unsure (1)..(99): unsure at all Xaa locations
  Clone ID: MRT4577_120471C.1.pep
ASDDDVALHAKKLIRDLNLFPDADVNIVPVANCTLQPRRIVEKRLRFPKLLASDSEPSVEDLGHHAGYYPIQHSHGRRMFYFFFESRNRKEDPVXIWLT

SEQ ID NO: 207109 - protein, 62 aa, Zea mays
  Clone ID: MRT4577_120472C.1.pep
KDFDRKTILSTSSLPSLTSSLPSPNTGSSTITAHALMNYAYSCRTYSSPEPLSCNKQIKIRS

SEQ ID NO: 207110 - protein, 70 aa, Zea mays
  Clone ID: MRT4577_120473C.1.pep
VIANIINGDAECGRGPDAGGQDRIGFYKRFCDILGVSYGDNLDCFDQKPFGAATAAALAETTSGPRHADA

SEQ ID NO: 207111 - protein, 117 aa, Zea mays
  Clone ID: MRT4577_120474C.1.pep
ALEALIASCSPSCLGHIKAFPCPPGQQIFGARKNPVPLGGGPFKSLRARKGPPPLFFFFGQPFKGPPGYPCFAFHQRRCFFCGPPPLWETKCWFGRTPPPPQPGAKKSPLCRLLWGP

SEQ ID NO: 207112 - protein, 131 aa, Zea mays
  Clone ID: MRT4577_120475C.1.pep
SAMPAAAAVAAAAASSSSSCFWVSPFSFSAAVAPLHLPNTSPSPTPNLNPIQSPNPDPTHRSRPPLQSPLRSSPAASPPPPLHAPPPQSPFPCWLRCKRNLCKTCCRAAGECVLSISQLTSTVPASMYLVF

SEQ ID NO: 207113 - protein, 48 aa, Zea mays
  Clone ID: MRT4577_120476C.1.pep
MKTSKRLSITLMTHVAFKALTINPFGELFSDRFTDIDLITIIDRKAMF

SEQ ID NO: 207114 - protein, 225 aa, Zea mays
  unsure (1)..(225): unsure at all Xaa locations
  Clone ID: MRT4577_120477C.1.pep
MSYSRGSSERYGSRLPYSRSTRYRSRSRSVDSSDAENPGNNLYVTGLSARVTDRDLEKHFSTKGEVIDASVVYDPWTRESRGFGFVTMAAVKDADRCIKYLDRSVLQGRVITVEKQQGRXVAALQQTXNPTPNHANLSQRAKRRRGRTPTPGKYLGTKSSRGRRYSTSYSPDRRGRHGRDRSYSPYDRRRSYSPYSRDGSYSPYYGRRSYSPYYSRRYRSRSHTA

SEQ ID NO: 207115 - protein, 122 aa, Zea mays
  Clone ID: MRT4577_120478C.1.pep
MSYSRGSSERYGSRSPYSRSTRYRSRSRSVDSSDAENPGNNLYVTGLSARVTDRDLEKHFSTEGEVIDASVVYDPWTRESRGFGFVTMAAVKDADRCIKYLDRSVLQGRVITVEKILLTATG

SEQ ID NO: 207116 - protein, 80 aa, Zea mays
  Clone ID: MRT4577_120479C.1.pep
GHRCISGPFQQPMGDQSIHPTAVKRKRSCLLRSEGKKQNHCEGKHLLESNYQSNSIPVSQSPQLTVDLLPSAGRTQAPSG

SEQ ID NO: 207117 - protein, 73 aa, Zea mays
  unsure (1)..(73): unsure at all Xaa locations
  Clone ID: MRT4577_12047C.1.pep
RFSVQTPSYLIGEFLGDYCWDGAGLSADPDAFSRNRAXEVIHGRWAMLGALGCITPEVLDKWVLVVFKEPVWF

SEQ ID NO: 207118 - protein, 229 aa, Zea mays
  Clone ID: MRT4577_120480C.1.pep
MSYSRGSSERYGSRLPYSRSTRYRSRSRSVDSSDAENPGNNLYVTGLSARVTDRDLEKHFSTKGEVIDASVVYDPWTRESRGFGFVTMAAVKDADRCIKYLDRSVLQGRVITVEKAKRRRGRTPTPGKYLGTKSSRGRRYSTSYSPDRRGRHGRDRSYSPYDRRRSYSPYSRDGSYSPYYGRRSYSPYYSRRYRSRSPYCYRRRRSPSVSPYYRRHRYRSVSKSSSSSP

SEQ ID NO: 207119 - protein, 315 aa, Zea mays
  Clone ID: MRT4577_120481C.1.pep
MSYSRGSSERYGSRSPYSRSTRYRSRSRSVDSSDAENPGNNLYVTGLSARVTDRDLEKHFSTEGEVIDASVVYDPWTRESRGFGFVTMAAVKDADRCIKYLDRSVLQGRVITVEKAKRRRGRTPTPGKYLGTKSSRGRRYSTSYSPDRRGRYSSRYSPDRRDCHGRDRSYSPYDRRRSYSPYSRDGSYSPYYGRRSYSPYYSRRYRSRSPYCYRRRRSPSVSPYYRRHRYRSVSKSSSSSPRARGRSYSCSLSPQRSYSRSHSPESERSTSYSPKKGSKREPSRSRYSGKSRHSRESHSHSRSSYSRSVSRERSA

SEQ ID NO: 207120 - protein, 101 aa, Zea mays
  Clone ID: MRT4577_120482C.1.pep
AEALLQVALELVHSSPEPCFSYHVQLHPMPEGSWPEIISDDGSGSLHACAVRDLRPCAKRANGWRRWPSSRSDRSPAPPAALMMPRPRPGTRIPAGLEVPN

SEQ ID NO: 207121 - protein, 157 aa, Zea mays
  Clone ID: MRT4577_120483C.1.pep
MRGARGKKAQRQCRDRFETQEKDRDEAAVFRGSIVSATKMSYSRGSSERYGSRSPYSRSTRYRSRSRSVDSSDAENPGNNLYVTGLSARVTDRDLEKHFSTEGEVIDASVVYDPWTRESRGFGFVTMAAVKDADRCIKYLDRSVLQGRVITVEKVKS

SEQ ID NO: 207122 - protein, 167 aa, Zea mays
  unsure (1)..(167): unsure at all Xaa locations
  Clone ID: MRT4577_120484C.1.pep
RPGTPPSSPLSGFTRLASLLRAPELSERGTHRFPLDHAPTRALPTPTDEHPTIYRMNLWATNHDHPKLNMWHFLRSLNIVXKTNDQMLDINEIFKRNPTTIENYGIWLXHQSMTGYHXMHNEIHXDASLKRSLRSRCTTKMHSRHRVMTPWMHXILTETVHFYAEHE

SEQ ID NO: 207123 - protein, 115 aa, Zea mays
  unsure (1)..(115): unsure at all Xaa locations
  Clone ID: MRT4577_120485C.1.pep
MAAALLPETAPRLLTPETLRTAAKQSQGIHLVPLSLRRAIKRYLRDQDRAHMNRKVLLLSASFDRAKGTGAELAAAATRAALLDDPNAPSGAEQRSARWKVRXAYGDIGLRYRED

SEQ ID NO: 207124 - protein, 50 aa, Zea mays
  Clone ID: MRT4577_120486C.1.pep
QTVAAAKPMVGGWIMMIRNRYGMRSTHAGRREPSFKHECGHATHKTLAYL

SEQ ID NO: 207125 - protein, 93 aa, Zea mays
  Clone ID: MRT4577_120487C.1.pep
QPRGPPLGWVVPWNGPQNKFIWPCPGFQFHNQGKVVRGPGPLSLALVPPDVDDGKVLFVPWVEADFRAGQDPWWKALGLSETNGGQWFPIKPT

SEQ ID NO: 207126 - protein, 70 aa, Zea mays
  Clone ID: MRT4577_120488C.1.pep
EAGWGPLSACGADHCISRGEHGRRRRRACTQRCCAGISSRTTTRTTTSLDASPAYHLCSTASVAWRATAS

SEQ ID NO: 207127 - protein, 120 aa, Zea mays
  unsure (1)..(120): unsure at all Xaa locations
  Clone ID: MRT4577_120489C.1.pep
PARKPQTXPQPPPPRRQRQGRKAPGKTGPXRPQPXRPKGGQTRRNRHPPRXXXKXGKRXXGKKXXXXGXXGGAXGNXKKKXGGGGGGGLPGLCSAPHSGGESGSRGWVRXLLDGAVQSQA

SEQ ID NO: 207128 - protein, 58 aa, Zea mays
  Clone ID: MRT4577_12048C.1.pep
EKTGFLGFELILTKGNIFSGWPNHLSLRNWGWGGCLKKNRFEWGEGVFLRINFKGGEN

SEQ ID NO: 207129 - protein, 92 aa, Zea mays
  unsure (1)..(92): unsure at all Xaa locations
  Clone ID: MRT4577_120490C.1.pep
RDKSRSADAKEETWMLVLGGDAVGKERVARELARSVLGSRSSVLSSRPGGVVSASSPPPASSGSSVVHRSRKRPRMPDVVPAXYLERLHEAV

SEQ ID NO: 207130 - protein, 102 aa, Zea mays
  Clone ID: MRT4577_120491C.1.pep
MTALATGVWAAEYAAMAGTMERELLSVELRAAQRWCAVFARARFGRVEKERHTIVIQHQFDTGYRENHLLHAARAYVGTRIDPRAMRRLCLARFRTKEPDSS

SEQ ID NO: 207131 - protein, 71 aa, Zea mays
  unsure (1)..(71): unsure at all Xaa locations
  Clone ID: MRT4577_120492C.1.pep
LVIGFSIIVFGNKISTQIGIGRSIAIDGVAMYFYIKVKIXEEKRKKRACFFLIILWGLFLEKKFLKITTYF

SEQ ID NO: 207132 - protein, 53 aa, Zea mays
  Clone ID: MRT4577_120493C.1.pep
RILDINIAFLPSAFALSVVSPVLAISVPLEFASPYGWSDIQDLVFSGSSPWIG

SEQ ID NO: 207133 - protein, 103 aa, Zea mays
  Clone ID: MRT4577_120494C.1.pep
KSRTQGKPSQLHHNRERPNSSPVFTSGWSSPYIPKRKRGKKERTTDFKWSNPKEKHTTFLQGKVISTGPMAVLILDNLFYWVQKPTSLFKKNPLASGKGRSQR

SEQ ID NO: 207134 - protein, 63 aa, Zea mays
  Clone ID: MRT4577_120495C.1.pep
SSKGFVAGFGEYLVGTPFARHEASVRRARGSHWWGKFGWYGADTKRGGFFSPPFNLNKFFPWV

SEQ ID NO: 207135 - protein, 74 aa, Zea mays
  Clone ID: MRT4577_120496C.1.pep
SAALSRRNSATIVPTNTTPNTLRGGATAYLYKVTLDSREERCALEQGSTCGIACMQRPEVAEPIRAQTPANYGY

SEQ ID NO: 207136 - protein, 92 aa, Zea mays
  Clone ID: MRT4577_120497C.1.pep
HLGGGKATQVGEAFCLKWPFFSVRSFWWFFVLKRGWKWFLVVGSYMVVGFGAIVCVEPWVMFVDFIGPVSAVWPLIGVMNPPHERKTPPRLF

SEQ ID NO: 207137 - protein, 96 aa, Zea mays
  Clone ID: MRT4577_120498C.1.pep
WPSSTIRSYTSHLLCISMARQLEYLSSHIHRCMGMSRCPLCLIMTCTYPRSSLLSFGRISSAFPRISHSNCCCVMQCCEDVSHPQLALCTLHVRSL

SEQ ID NO: 207138 - protein, 60 aa, Zea mays
  Clone ID: MRT4577_120499C.1.pep
NREGHRHKRLGNSTKTTTKIAIILFISKEMKWDRPCPSPPSPREGTRPDQRSRAGHSQRP

SEQ ID NO: 207139 - protein, 60 aa, Zea mays
  Clone ID: MRT4577_12049C.1.pep
WVPRGRPGSAAKSDVYAGSAFAVSPSPEALPLPSFSTKKQASAAVDDSATRDLRRLLRLE

SEQ ID NO: 207140 - protein, 230 aa, Zea mays
  Clone ID: MRT4577_1204C.1.pep
MALAARLVSRSRQLYSVQAALANGGLTQVRSFAKEAAPVSGDDLLKGIFFEVKKKFETALGVLKKEKITIDPDDPTAVANYAQVMRTVREKADLLNDSQRIKYTIETFTKGIPDARTYLDTLQQLRKKSGLIDDMGIEDMMMEALEKVEKDIKKPLLRSDKKNMNLLLAEFDKINKKLGIRKEDLPKIEENLEMELAKAELTELQKEVVEAMEGQLKREEFKDEVMPDVR

SEQ ID NO: 207141 - protein, 56 aa, Zea mays
  Clone ID: MRT4577_120500C.1.pep
MKTFDPWPVFFRREWKRNWPFLTGFAITGFIITKMTANFTEEDLKNSKFVQEHKKC

SEQ ID NO: 207142 - protein, 59 aa, Zea mays
  unsure (1)..(59): unsure at all Xaa locations
  Clone ID: MRT4577_120501C.1.pep
VLLRPAGSDSFXSXRVFVAPSSACRRVSSXSFPSDPPKXRMCAFVPXFXXXLSARLXVD

SEQ ID NO: 207143 - protein, 56 aa, Zea mays; identical to SEQ ID NO: 206231
  Clone ID: MRT4577_120502C.1.pep

SEQ ID NO: 207144 - protein, 196 aa, Zea mays
  Clone ID: MRT4577_120503C.1.pep
PRFPGSPFLVSTLGLFFWALFFFASPRGLNLGPRVCPFGFSRFTLLFNPLFLNSAFGLSPQVFPPLTAPRSGPPGLFPLSFSGPFLWGFPPPSWPPPLGGGFGFGFFSNVFLPWGFFFFSRVSQFGSPPFIFPPPSGPCFPRLFLWFPPGPSRFPLGIFLNQIWGQKKKKKKKKKKKKKKKKRKKKTKKKKKKKAA

SEQ ID NO: 207145 - protein, 37 aa, Zea mays
  Clone ID: MRT4577_120504C.1.pep
KKNFEPYGLRSSGRLRSTTVVFEEISAVGWCGNIGLA

SEQ ID NO: 207146 - protein, 118 aa, Zea mays
  unsure (1)..(118): unsure at all Xaa locations
  Clone ID: MRT4577_120505C.1.pep
VGFXGAARLAXLWWPXALSCWAPLPLXPRRCPCGAPVXCLPPWRRGWSRPPXAXXPPPPPGAARLGGVGALVVRGWGXPLSWAALRAAASSVVRVGRXAAPGSCPSLLAAPPSSSSPR

SEQ ID NO: 207147 - protein, 385 aa, Zea mays
  unsure (1)..(385): unsure at all Xaa locations
  Clone ID: MRT4577_120506C.1.pep
MEAQATATATVKEALAALYHHPDDAIRTAADRWLQEFQHTLDAWQVADSLLHDESSNLETLIFCSQTLRSKVQRDFEELPSEAFRSLQDSLYVLLKKFNKGPQKVRTQICIAIAALAVHVPVEDWGAGGIVNWLSDEMKAHPEFIPGFLELLIVLPQETSSYKIAARPERRRQFEIDLCSSANVAIDLLTACMAIDQLKEQVXEGFSNSARGCHGISASELASHPLVHLALSSLNSDQFLEAAVNVTSELIHATVSHGSGAIAERMPLIQILVPHIMGLKEQLKDPSKDEEDVKAIARLYADMGESYVDLIATGSDDSIQIVNALLEVTSLLEFDISSMTFNFWHRLKRNLIKRDSYVSYGSEVAIEAEKNRRLQVFRPKFELWS

SEQ ID NO: 207148 - protein, 83 aa, Zea mays
  Clone ID: MRT4577_120507C.1.pep
MAEPKAAAARKTRVGPYEVGKTIGEGSFAKVKHARDSRTGAVRAIKVLDRNHVLRHRMVEQVCPSVIRPSRLPSPARCGTYVM

SEQ ID NO: 207149 - protein, 101 aa, Zea mays
  Clone ID: MRT4577_120508C.1.pep
PPGREQKKKKKKKKKLQKKKKKKKKKKKKKKKKKKKKKIWGNYIPGKKPFGGVFVPRAKKLGKGQRECLLKGKFLIWLGWPPLFGWNNVFPRLFPFFIQKL

SEQ ID NO: 207150 - protein, 64 aa, Zea mays
  Clone ID: MRT4577_120509C.1.pep
NTSVSGHDSPPLPFAEMADHHAVNGTDPCYTRSLWFFRGNESGLGGPPGRNANSLGELRAHGYT

SEQ ID NO: 207151 - protein, 67 aa, Zea mays
  Clone ID: MRT4577_12050C.1.pep
WFRPLKPRFLFVDPVILLPLIVFVVTVGCLVLTLRFHPPGEFPFFTPVVSNIFGWLPASICFVGSVL

SEQ ID NO: 207152 - protein, 53 aa, Zea mays
  Clone ID: MRT4577_120510C.1.pep
NTTQTEKSNHPDPCPSRYGTTLGYANHTPILNKTKSTRTSKTRTLRRYTHVKN

SEQ ID NO: 207153 - protein, 77 aa, Zea mays
  Clone ID: MRT4577_120511C.1.pep
GQSLGQALTTVDSTERGTIMHATLLAGADNDLPNITPVPYPRHGTSCGTRYVTVKQKGLHVVTAVASLHDARTRGRT

SEQ ID NO: 207154 - protein, 136 aa, Zea mays
  Clone ID: MRT4577_120512C.1.pep
MARTKQTARKSTGGKAPRKQLASKAARKSAPSTGGVKKPHRYKPGTVALREIRRYQKSTELLIRKLPFQRLVREIAQDFKSDLRFQSSAIGALQESVESYLVSLFEDTNLCAIHAKRVTIQSKDIQLARRLRGERN

SEQ ID NO: 207155 - protein, 57 aa, Zea mays
  Clone ID: MRT4577_120513C.1.pep
WYRQEDMHHEEEGFYWDDALTKQQKITWPRMIRLLHRLNRLMMQNHMIPLVGKQLLE

SEQ ID NO: 207156 - protein, 84 aa, Zea mays
  Clone ID: MRT4577_120514C.1.pep
PTREKVLSHLGFGGPHPRLVILMLYVHFLKKSLACSNSDFLYYCASNNLTVCLRRNTLTKTSVHSYNHNLQRSSVYLTQHNFRA

SEQ ID NO: 207157 - protein, 90 aa, Zea mays
  Clone ID: MRT4577_120515C.1.pep
MSTRGGEAARQATVKIIETVHVEADRYSFKSIVQRLTGRDAVVGGGGDYSEGAPDRGSYEEAAAQRAAGFTSKQASRPFADRHACKDESC

SEQ ID NO: 207158 - protein, 577 aa, Zea mays
  unsure (1)..(577): unsure at all Xaa locations
  Clone ID: MRT4577_120516C.1.pep
RPRGKVSHTGQDADTACSAYLHLNGFCLLMIAHDEANIILRESKVHDAIRCFFRAASGYEAPKALENFSLETGFQVSGESRSISLWRLNYYEWAMQIFEQHSMSEGAYQFALAALELVDIVDGIDNGIEAEGLPETAAMIKGRLWANVFKYSLDLKHFHDAYCAIVSNPDDDSKYICLRRFIIVLCDLGETKVLCDGEIPFTGLVEKVEQELFWKAERSDLSSRPNLYKVLYSFEAHRNKWRKAAAYMYSRXDKISPSKRPRNLLMENSAFGTNSELSRLQFCVDIEILEKEYILTEAQYMLSTLKSSFDFSESQSIESLMDILINEKLYDIAFTIVLKFWKESEIKKQLDRVFSVIAQQCCSNRSDNKSSKQVPLLPSSENDAWEINNRSIAVTQQLQGSNHWETLELYLDKYKDLHPRLPVIVAETLLYTDPEIELPLWLVQMFKANKAGNKISWGMSGKEADPAALFRLYINYGRHAEATNLLVEYLESFASSRPVDVLHRKKMSAVWFPYTAVERLWCQLGEMQRAGHSVDQCDRLKKLLHGALMSHLQQVVVDSDDVLSSVGDGQGMEDQSS

SEQ ID NO: 207159 - protein, 166 aa, Zea mays
  unsure (1)..(166): unsure at all Xaa locations
  Clone ID: MRT4577_120517C.1.pep
MATHFAPMARQVMKSRLXCSRGQGPVCAAELTRRPRIXVKAIXCENATFHVRHTIHGHPVIVSLNTPDTSMPLWERYVSNVPFYLRAVRPVLRSVKIXLAHGXSRVAAWDSMQPLQRTSXQAQAGTXICYCGLITILRVCLTMYNMASIYECDQNIEPSSAFTSRN

SEQ ID NO: 207160 - protein, 57 aa, Zea mays
  Clone ID: MRT4577_120518C.1.pep
QKSSHTAFYSLHHNFINTLFTQIHFHSHHPSFSFLYLLPLNPFLHPINTIPILYFLF

SEQ ID NO: 207161 - protein, 142 aa, Zea mays
  unsure (1)..(142): unsure at all Xaa locations
  Clone ID: MRT4577_120519C.1.pep
MVTEMAARGGEAAAFGAETDRGDFEVFRSGSAPPTVEGALGAAAAAADLLVDDDLRADPAYQSYYYSNAHLNPRLPPPFLSKEDWRSSHHRLRSGAFGGIGDGRRQQQPAALXDGRRLPGIDPCPAGGLVPRGVRVRGGRCG

SEQ ID NO: 207162 - protein, 797 aa, Zea mays
  unsure (1)..(797): unsure at all Xaa locations
  Clone ID: MRT4577_12051C.1.pep
MARVRSTARVERDGDETEAVETVPISEAMRRSGLVPSEDTPAAEATQADVEEVGSEDEYNCGMPSKPSHLDFGKSTISEADLPKMVKLGYFSXNKKELVRFGGEEITPKPEKNEVVVFKXSFFKAGLRFPLNGMIADVLKKFGVYLHQLTPNAIVRLSVYIWALRSQGVEPFGEGFCRVHELHYQTKARGDGLHENFGCYNFAYRKTSKFPVISYRSKWPAGWKSEWFYVKVDKDEDKLVQSPLELTFGEMRPRCNMISGSPSQIALAEFRVILDHIGTRDLVQEFLAFKVFPTMRDWEMPKLEGEKKKGEFVRLSKRKGTPPKPASPKPKTSAQEEETPATPSAVEVEEILKKGKEASAAESPAKPKKRRMMQVADVIHQTPPPTSASKIITVDPTAIEAETAGAETEGAEATEAEAGTNEDPNLETTLEDIDNMLLRMAEEETAVVTVNTATEKGKEQIEDILEKENFNFQDILGQELSDAEKEELKKYAISCGYKPGSLLFGGVNEGKLRCLRNRTEAKVVRTFSKSVGLPKIEANLCRYQRQHIAGSLLYANFKSILLSKVLRMQQDLEDEKNEATIKDLESKVKNYEAALKEKDSVVQDLKIKVKDHEAALEKKDFVIQSMEEKSEQEKKNLETSLKTEIEKNSNLQKSLKELQEKCLNFGSRCVQRLKDVFHSIGASSDIFTPSAENLPSTLEYIEGEVDALDEVIAGHADFCALLASRGTATAFLKAGCTHGKIVNRPNFSLSPADLVDIPSLARSIGNRFMTQIWVNGGRKMAGDEARSHLKPDDEAEE

SEQ ID NO: 207163 - protein, 68 aa, Zea mays
  Clone ID: MRT4577_120520C.1.pep
FFSFFFLTKLGDGVINIEHLTPPQHKIEMLKNYTYTLHQNIKGGKLQVKLNKKHSKLEEKTCALKKEN

SEQ ID NO: 207164 - protein, 119 aa, Zea mays
  Clone ID: MRT4577_120521C.1.pep
MEDAVGLPMDGACARLDTSGATTAVYITVHHIAVFIEAIDLFDGDGDRSISARDLEADVRSLGQNSTEDDLHDMTIEGYTDGYCTIDFTELMHLMVSLMKDTDLYEELNDDCMVITDDH

SEQ ID NO: 207165 - protein, 120 aa, Zea mays
  Clone ID: MRT4577_120522C.1.pep
PLLFFFFFFFFFFFFFFFLFGFFFFFFHNQPGPFLLYFHPTHQHDKLSKPIGLNPSNPAKSNSARNRLSAEANQAQGFQAPLGNKGQDRNRKGEALGHWGKEGKTSLRPGFLRPLMQCST

SEQ ID NO: 207166 - protein, 92 aa, Zea mays
  unsure (1)..(92): unsure at all Xaa locations
  Clone ID: MRT4577_120523C.1.pep
GNEILIADAIGSTGMDLKHXRGVSIVYDGSGQLMLTTCISYVSDSQIWAFEDASTVXVGGKTNCATLEFCEDMXRLLDKVAELMXXDENVLD

SEQ ID NO: 207167 - protein, 58 aa, Zea mays
  Clone ID: MRT4577_120524C.1.pep
QMWPPSNSEVHGLPFPMNRGWSTLLFIRALYFGVWVFQVLLILFYRGERVRIIAPGQG

SEQ ID NO: 207168 - protein, 87 aa, Zea mays
  Clone ID: MRT4577_120525C.1.pep
TYKTTTDFGITHTAAKGADLVRRHVSPGETVSSQPNHAQAVTGKPGILQLGYNQIAIENELGDETNRNEKQVEEDAPTSYTVSSNIT

SEQ ID NO: 207169 - protein, 45 aa, Zea mays
  Clone ID: MRT4577_120526C.1.pep
MFSILGFFFQPIVPGKGPLKTLLYPIFYPVNNNAWAYPPNFVPAN

SEQ ID NO: 207170 - protein, 88 aa, Zea mays
  Clone ID: MRT4577_120527C.1.pep
PAADTRHPSTACSPPSPGWSAGGARRTRPAPPCTRATSARTAPARRANQRPTGAPRSAATTYPAAAAASCFCLPDWDSFDFAFGFSFS

SEQ ID NO: 207171 - protein, 74 aa, Zea mays
  Clone ID: MRT4577_120528C.1.pep
QFGYPLSCLLGMNKQCNTSANTNDKKTLAPKSDNWNIISISTRNPVKTLKLLTFIRITLGIKSHIDETSSHYNM

SEQ ID NO: 207172 - protein, 144 aa, Zea mays
  unsure (1)..(144): unsure at all Xaa locations
  Clone ID: MRT4577_120529C.1.pep
RAPGERAPKRPRGKKPGSPPLXPRGPPPPGGRRGNPXGPHPEGGFPRVKAPRGKVWGFTPPFPLGGEPFFPPPQNKVLGAKKTPLDFLNKLVGRNKGPLFPVAGLCWVGVVAPPGENRPPPRFFVFPQPPVKKTPRGQIVGGPG

SEQ ID NO: 207173 - protein, 69 aa, Zea mays
  Clone ID: MRT4577_12052C.1.pep
SPGPPCVLRVASWEEGVLFLWHHIPSCARSDKERLSLLIVFPGAHGDGRRTAPAAAGERPGEGGGLWPV

SEQ ID NO: 207174 - protein, 68 aa, Zea mays
  unsure (1)..(68): unsure at all Xaa locations
  Clone ID: MRT4577_120530C.1.pep
KVFSRXIPHNFHLXMYPKRPFVHWYVGKGIHXGXFSQARKDLXALKKDYEEVGPEFHKGEDGHKGDEY

SEQ ID NO: 207175 - protein, 94 aa, Zea mays
  unsure (1)..(94): unsure at all Xaa locations
  Clone ID: MRT4577_120531C.1.pep
SAMVAIHPSILYQSFYCKRKSFPIQDXSLXTGRASPGAIAPKGTMEPLFLIGQNLLTRPFARGTTSPGLSXARQGXGPKPQSLANFAKQFFARP

SEQ ID NO: 207176 - protein, 150 aa, Zea mays
  Clone ID: MRT4577_120532C.1.pep
FLQDLLKKLHAVQLAANKKLSTVEGVKPTAERNLSTSTNDSTPSPHEDPPKIVPACDGLKKVLLKSAQQAQHVANHFDPFFWWFHSIRLKFGKIHIVLPSGKLVFLFSLLFSAMYVLRRKTAGLKRAVFQQAASLRRAFFDALQLRSLSR

SEQ ID NO: 207177 - protein, 68 aa, Zea mays
  Clone ID: MRT4577_120533C.1.pep
DAWARVLPLPCLRPRPPSPRPGPGLCRQPPPSSSSTSTQLPTRTLSQGHPKVLIYCLPNRDIGANYCC

SEQ ID NO: 207178 - protein, 241 aa, Zea mays
  unsure (1)..(241): unsure at all Xaa locations
  Clone ID: MRT4577_120534C.1.pep
MAAETFLFTSESVNEGHPDKLCDQVSDAVLDACLAQDADSKVACETVTKTNMVMVLGEITTKATVDYEKIVRDTCRNIGFISDDVGLDADRCKVLVNIEQQSPDIAQGVHGHFTKRPEEVGAGDQGIMFGYATDETPELMPLSHVLATKLGARLTEVRKNGTCAWVRPDGKTQVTVEYLNEDGAMVPVRVHTVLISTQHDETVTNDEIAADLKEHVIKPVIPAKYLDENXIFTLNPSGRFS

SEQ ID NO: 207179 - protein, 63 aa, Zea mays
  Clone ID: MRT4577_120535C.1.pep
TTNHHHHACSTQMLMLRPVTSRPLIIRNQTKAAPNQSMPLLRGTFHPLHSHPFRPLYLPTYCT

SEQ ID NO: 207180 - protein, 91 aa, Zea mays
  unsure (1)..(91): unsure at all Xaa locations
  Clone ID: MRT4577_120536C.1.pep
IATAVITLFNEPSAEDSTKGPLTVAQKKAQNIMESFENPFRMFLPSLGHRVXVSQAAKFDPSTKIYEISNRWKLAQVQVQKDSXEAVKKKA

SEQ ID NO: 207181 - protein, 230 aa, Zea mays
  unsure (1)..(230): unsure at all Xaa locations
  Clone ID: MRT4577_120537C.1.pep
MAAETFLFTSESVNEGHPDKLCDQVSDAVLDACLAQDPDSKVACETCTKTNMVMVFGEITTKATVDYEKIVRDTCRNIGFISDDVGLDADHCKVLVNIEQQSPDIAQGVHGHFTKRPEEIGAGDQGIMFGYATDETPELMPLTHMLATKLGARLTEVRKNGTCAWLRPDGKTQVTIEYLNEDGAMVPVRVHTVLISXQHDETVTNDEIAADLKEHVIQPVIPXKYLDENT

SEQ ID NO: 207182 - protein, 77 aa, Zea mays
  Clone ID: MRT4577_120538C.1.pep
FFFFFFFGLFFFLVVFFFFFFQQGNQTTFFFKIKKNHPLWKLKGPNFSWKTIPLGSFPAEKKFRCSNGSLKYILVFN

SEQ ID NO: 207183 - protein, 88 aa, Zea mays
  Clone ID: MRT4577_120539C.1.pep
RYTRRITSLRLSTVLIKEETHELLTPKYEPWNKKVASPRMHMYGQALSKVSVPCTYSRSIVTLSRLPYGRATISSPTCEPNISHSYMT

SEQ ID NO: 207184 - protein, 97 aa, Zea mays
  Clone ID: MRT4577_12053C.1.pep
RITIRHRQTSCTCVFHNDALVIIRAADNVVVLAASATQAITTLFSGGGFAAPSILHLHGDGGSYGHVPRSSTTLSYQRLSCRVSFHDVNPFLNGRRV

SEQ ID NO: 207185 - protein, 131 aa, Zea mays
  unsure (1)..(131): unsure at all Xaa locations
  Clone ID: MRT4577_120540C.1.pep
AGRDNISHTRWNHSAFSLRDLLAKRKESQHPGHSIREGGLDDYXAMPXRLGEGLENPLHALXYVDDILLPYSLISKTCXEVSXSSGEDFDNHLXEQHKEIPDHREPNLDKEVHLYLTTAAAYEGEFIEPMN

SEQ ID NO: 207186 - protein, 97 aa, Zea mays
  Clone ID: MRT4577_120541C.1.pep
MAWRGAASRSIFAAVRARAASSSSSSAATRLRSAAPIAATPRRTVPAFAFAAARPLAAMAGYPAAVAVRLTGHSATSVRACCELSQGTLFCRTCQDR

SEQ ID NO: 207187 - protein, 34 aa, Zea mays
  Clone ID: MRT4577_120542C.1.pep
FKPQNDVSMKIVGIGIHTKGVLKYKLVDEDSYWA

SEQ ID NO: 207188 - protein, 220 aa, Zea mays
  unsure (1)..(220): unsure at all Xaa locations
  Clone ID: MRT4577_120543C.1.pep
SDVLRILQKXLCSKTSSNHRANGSELSKLLLAAESSLDSSCLEVQGTALEILVEIFCILKEVGSDNISVLKGSSFAHAEWQGITNNVPLTEDNSMNGPLCKIIAMIVNHIISLANEVASRDICISSAVDKAYKTPFRLMLKLVSCYPSAAAVTLHILKSLVKELFLINGSDYSEVSVTSVEPFQTSVALKELSTSDDNVQLLATCIKASCIGTLIGNGKL

SEQ ID NO: 207189 - protein, 95 aa, Zea mays
  Clone ID: MRT4577_120544C.1.pep
PGAKIPWKEFRTKKYFFYRGQGLKPKNGLIRKFEPPLLLEKKPRPIFYKSPKKAKPPEGSKTPRPFQKVFGEPWWGWNWWLWLKPKTWGKAPFLP

SEQ ID NO: 207190 - protein, 58 aa, Zea mays
  Clone ID: MRT4577_120545C.1.pep
LVACSLRKLRGKDDGINAGVAGCCTGLALSFPGKVSENVQSINSLELFYFTIAEQSVP

SEQ ID NO: 207191 - protein, 275 aa, Zea mays
  unsure (1)..(275): unsure at all Xaa locations
  Clone ID: MRT4577_120546C.1.pep
MLAVFSGQVVEVPAELVAAGSRTPSPKTKASQLVGRFLAASEPAVSVQLGDHGHLAYSHTNQALLRPRSFAAKDEVFCLFEGVLDNLGRLSQQHGLSSKGANEVLLVIEAYKTLRDRAPYPASFMLAQLTGSYAFVLFDKSTNSLLVASDPEGRVPLFWGITADGCVAFSDDIDMLKGSCGKSLAPFPQGCFYSNALGGLKCYENPKHKVTAVPADEEEICGAXSRWWKGLXLXRRCTDRSSAGGGDATMMQNFVHAWWVCNIVWLATSHAHANR

SEQ ID NO: 207192 - protein, 182 aa, Zea mays
  Clone ID: MRT4577_120547C.1.pep
GRDGTILNCSRQEHVLPETDDVGEAAPSPTASSGGSKDPTTAIFVASLYADYYRRLTSRYSAAKGGGATRRVGVFQRTHEERQATESLAHNQRALAEIYLLSFCEELVTSGLSTFGYVSSGLAGIRPAILLTAFDHVVPETPCRRAASIEPCNLTPPRGVECRSRPADKDDLARHVRVCEDF

SEQ ID NO: 207193 - protein, 57 aa, Zea mays
  Clone ID: MRT4577_120548C.1.pep
MATQIRQGVLGIKVKIMLDWDPKGKVGPITPLPDLVTIHTPKDEDEPRPPVLAPPEV

SEQ ID NO: 207194 - protein, 233 aa, Zea mays; identical to SEQ ID NO: 203300
  unsure (1)..(233): unsure at all Xaa locations
  Clone ID: MRT4577_120549C.1.pep

SEQ ID NO: 207195 - protein, 193 aa, Zea mays
  unsure (1)..(193): unsure at all Xaa locations
  Clone ID: MRT4577_12054C.1.pep
KXSXTGASGEXSDRQERRREGGEPTRPXQRGEEGNAPGPKETHSDRTRGKHNRRNKGEPRRNPXGRGGEKKXPKXEEKKXGRXNRTGTHGEENXAAAGXGXQRAXPTPRAERREDTTEEEAAKXEEKGGGXXPXRDRXXXNKXQXAKXTREGXTXXPPXXXKTDGGXXHXENPAQGXXGXXKAAQARNGESQN

SEQ ID NO: 207196 - protein, 82 aa, Zea mays
  Clone ID: MRT4577_120550C.1.pep
TGDDRYIVLCCFGIRFEGQSCAAELGCPHWATVSVCMCVLRYLAIALKPAGCRICQTVRPVCCVLSRLLLRHVCKPSETGTR

SEQ ID NO: 207197 - protein, 107 aa, Zea mays
  unsure (1)..(107): unsure at all Xaa locations
  Clone ID: MRT4577_120551C.1.pep
MATQISKKKKFVSDGVFYAELNEMLTRELAEDGYSGVEVXIAQAESLRYKLLGGLAVRRACYGVLRYVMESGAKGCEVIVSGKLRAQRAKSMKFKDGYMISSDLPEN

SEQ ID NO: 207198 - protein, 233 aa, Zea mays; identical to SEQ ID NO: 203300
  unsure (1)..(233): unsure at all Xaa locations
  Clone ID: MRT4577_120552C.1.pep

SEQ ID NO: 207199 - protein, 87 aa, Zea mays
  Clone ID: MRT4577_120553C.1.pep
PRAQKAKSMKFKEGYMISSGQPVNEYIDSAVRHVLLRQGVLGIKVKIMLDWDPKGKVGPITPLPDLVTIHTPKDEDELRPPVLAPEV

SEQ ID NO: 207200 - protein, 233 aa, Zea mays; identical to SEQ ID NO: 203300
  unsure (1)..(233): unsure at all Xaa locations
  Clone ID: MRT4577_120554C.1.pep

SEQ ID NO: 207201 - protein, 229 aa, Zea mays
  Clone ID: MRT4577_120555C.1.pep
MATQISKKKKFVSDGVFYAELNEMLTRELAEDGYSGVEVRVTPMRTEIIIRATRTQNVLGEKGRRIRELTSVVQKRFNFPENGVELYAEKVVNRGLCAIAQAESLRYKLLGGLAVRRACYGVLRYVMESGAKGCEVIVSGKLRAQRAKSMKFKDGYMISSGQPVNEYIDSAVRHVLLRQGVLGIKVKIMLDWDPKGKVGPITPLPDLVTIHTPKDEDEPRPPVLAPPEV

SEQ ID NO: 207202 - protein, 293 aa, Zea mays
  Clone ID: MRT4577_120556C.1.pep
MLAVFSGQVVEVPAELVAAGSRTPSPKTKASQLVGRFLAASEPAVSVQLGDHGHLAYSHTNQALLRPRSFAAKDEVFCLFEGVLDNLGRLSQQHGLSSKGANEVLLVIEAYKTLRDRAPYPASFMLAQLTGSYAFVLFDKSTNSLLVASDPEGRVPLFWGITADGCVAFSDDIDMPGLARPPQVGLHRGPAVARDDRGVHGRRGDGGVPAAAEGHAGPRPLHHLHRRRLRHGIRLQPDTPVAVGERPARLRLPLLPPRHPLHQQEASQAVLDLRGGAVDVRRAWERSGVPHAR

SEQ ID NO: 207203 - protein, 68 aa, Zea mays
  unsure (1)..(68): unsure at all Xaa locations
  Clone ID: MRT4577_120557C.1.pep
YLQHTLLFCHNNHHSLNIIIYXXTIQFTLIYYKYPNFNPILFHISNHLCEISFYYHTSTPHXLYFTKI

SEQ ID NO: 207204 - protein, 47 aa, Zea mays
  Clone ID: MRT4577_120558C.1.pep
YVSAPLECQIAHAGFHGRGHNVPDQLTTEPSRARRQAWDRGREPAGT

SEQ ID NO: 207205 - protein, 135 aa, Zea mays
  Clone ID: MRT4577_120559C.1.pep
PRVRSLPFNPATAFRAAYESLSIDAIGTKSVSMQKVWHLIQALVGEGLTHRNVSRKMSLVVGARHHLEWGHEKYILETINSHPALAALGGSVGNLQKIRAFLRVRLRDQGVLDFDATDLRRQPPVDTTWQQIYFC

SEQ ID NO: 207206 - protein, 44 aa, Zea mays
  Clone ID: MRT4577_12055C.1.pep
ILQLLTSISMPLQVLGNAKGAVAVVVSIMIFRNPVSITGMLGYT

SEQ ID NO: 207207 - protein, 141 aa, Zea mays
  unsure (1)..(141): unsure at all Xaa locations
  Clone ID: MRT4577_120560C.1.pep
ERTARANVGLLARGWARXMRILSHPSTGAFLSHCGWNSVLESLSRGVPLIGWPLGAEQFFNAKLAVEWGVCVELARGNLESSAVESRAVVEAERTVMGDTAKGDEMRRVVAAIARTMEAAWEAPGGSAAESLEGFLRCVEP

SEQ ID NO: 207208 - protein, 45 aa, Zea mays
  Clone ID: MRT4577_120561C.1.pep
FAIGSLLTEPILLSCNYITLITCTIMLQISPEIVWPCTDCLAMNV

SEQ ID NO: 207209 - protein, 65 aa, Zea mays
  Clone ID: MRT4577_120562C.1.pep
SLSTPAPLKGPRCTTNACDDINLLMSQLNLIHSPTLNNFPTMKTTSIPNLITLQHIPLVSSVFIN

SEQ ID NO: 207210 - protein, 139 aa, Zea mays
  Clone ID: MRT4577_120563C.1.pep
KKIFFFFFFFFFFFFFFFFFFLGSTKRPAPGNTDPDQKGDQLFLGGGGLKLGEIMAIAEKKEKWVSGQNATQQKSRKQKRERPGGLKGGVTQKKGGGPNGPFPGRKPGGAGALMNRPTRGERGLAEWAPRGVLFSRGDG

SEQ ID NO: 207211 - protein, 71 aa, Zea mays
  unsure (1)..(71): unsure at all Xaa locations
  Clone ID: MRT4577_120564C.1.pep
FPTRRTHPIXTNYQHIKFITTPTLTTNIGFLKYGRSYYSNYYYIDHFNPLLTFIYNSHFSHLPLHNHTLTY

SEQ ID NO: 207212 - protein, 155 aa, Zea mays
  unsure (1)..(155): unsure at all Xaa locations
  Clone ID: MRT4577_120565C.1.pep
GVCVAFLLRRLSRRGGVYLAGRGAARPLGAASLARPVRAPSAVVCRTLTGRFVCSGWPPYVWSICSFVYFCLFTISSFSISGIGLCFFFFSILCLIFYSIVCFTFXFFILFIFIYYYXLFFFYFQIFLFLFYFFFFTLLYFYFFYSIRFSYSFIF

SEQ ID NO: 207213 - protein, 161 aa, Zea mays
  unsure (1)..(161): unsure at all Xaa locations
  Clone ID: MRT4577_120566C.1.pep
IILFPFKGGYCNKPNCLKGPPPHTNKPDGGGGGRGPTPHTHKQGRGGKGAQPGPPKQTPPPRXDQIKNPTPPPPFPREGTPQKKKRTRGARQXRPPGKGPGEKKQTKGRRRPPPRKKKNPPPPXGGPQKKRPPDAPPGRGGSPPSPRKGRPPPWGPWGGTP

SEQ ID NO: 207214 - protein, 645 aa, Zea mays
  Clone ID: MRT4577_120567C.1.pep
TQVDKLKASLGTTNIWEFWVQLVDIMQHREKSGEERLQRSTDEMHSQIELYEHSIVEFHGTLSKLINESEKKSMEHYAEGMPSEFWSRISLLIDGWSLEKKISINDASMLREMAWKRDNRLREAYLSSRGMEERELIDSFLKMALPGTSSGLHIVHIAAEMAPVAKVGGLADVISGLGKALQKKGHLVEIILPKYDCMQHNQINNLKVLDVVVKSYFEGNMFANKIWTGTVEGLPVYFIEPQHPGKFFWRAQYYGEHDDFKRFSYFSRVALELLYQSGKKVDIIHCHDWQTAFVAPLYWDVYANLGFNSARICFTCHNFEYQGIAPAQDLAYCGLDVDHLDRPDRMRDNSHGRINVVKGAVVYSNIVTTVSPTYAQEVRSEGGRGLQDTLKVHSKKFVGILNGIDTDTWNPSTDRFLKVQYSANDLYGKSANKAALRKQLKLASTQASQPLVGCITRLVPQKGVHLIRHAIYKITELGGQFVLLGSSPVQHIQREFEGIADQFQNNNNVRLLLKYDDALAHMIFAASDMFIVPSMFEPCGLTQMVAMRYGSVPVVRRTGGLNDSVFDLDDETIPMEVRNGFTFLKADEQDFGNALERAFNYYHRKPEVWKQLVQKDMKIDFSWDTSVSQYEEIYQKAATRARAAA

SEQ ID NO: 207215 - protein, 57 aa, Zea mays
  Clone ID: MRT4577_120568C.1.pep
VLRKNKVYRYHIYINVNSSDYSSSGRLPNAVKKNSVHSGFIIYVTTSPFPVLTKTYL

SEQ ID NO: 207216 - protein, 134 aa, Zea mays
  Clone ID: MRT4577_120569C.1.pep
MGFEGIADEFQNNNNVRLLLKYDDALAHMIFAASDMFIVPSMFEPCGLTQMVSMRYGSVPVVRRTGGLNDSVFDLDDETIPMEVRNGFTFLKADEQDFGNALERAFNYYHRKPEVWKQLVQKDMKIDFSWDTSV

SEQ ID NO: 207217 - protein, 808 aa, Zea mays
  Clone ID: MRT4577_12056C.1.pep
MPRTRKTARKSTGPIGVPRHQLAPRHEGSSSGSNNPIGDLESQVEQLRMELRHRNKVWAQDGQRINELAADVRRLHDELAERDLAVDWAINSRSVAWDLEAKARARMTELSVALDNLQMPSRTRAHDGAGTSRGREDTPNPPPIPPTLAEAIAALVNVTADSTRFLREMAGNQFQQHGRRAPPQGPRETSYLDFFETRPPLFVKAEDPLEADEWIRKPLFAAQQLRCPASTWWGNFMEVQPVGHQVTWDEFKLAFREHYIPEGVLHMKQEEFIRLKQGADTVMQYLNKFNHLSQYAIDQVNIDLKKKNCFMRGLNDRLQRKMATCLDLTYNRAVSTALAVEAKNTGQGKSKGFGGDRSNQGPEKRTRGQIFTKEVAFHVPVTLAERDFPTNMIVLKGQDIDHKAILNTDLRTIKLSHGHGEVLLSIPIAVPAKPFGWVYEAIILEIQDIPVGCPAIFVKKKDQTLRMCMDYRPLNEVTIKNKYPLPQIDILFDQLTGARVFSKIDLRSGYHQIRIRPEDIPKTTFTTCKCAFWLEEIQFLGHVLSANGIAVDPSKVNDILEWKPPTTVHQVRSFLGLAGYYRRFIPDFSKIVKPITSLLKNDTKFNWSSRCNEVFEQLKEGRVIAYASRQLRRHEEHYPTHDLELAAVIEIARYVAKCDTCRHVKAIHMKTAGPLQSLPIPTWKWEDISMNFIVGLPRTTKGFDSIWVIIDRLTKIAHFVPVKTTHPVAVYAQLYIARILSLHGVPNIIVSDRGPQFVSKFWEELHKSLGTKLLHSSTYHPETSGQIERVNQIPEDMLRACVLEFLQK

SEQ ID NO: 207218 - protein, 115 aa, Zea mays
  Clone ID: MRT4577_120570C.1.pep
NKYGLYQLKIKHLPRKRGPSRHGCTKGDVALRAVPNEAKRQKKYSCTERISCEAHIGIRTFGAAATFGAEAHIYETCQGEQIPSYTRDCSALSSCELKDFYSVFTQRFHKLVSYV

SEQ ID NO: 207219 - protein, 126 aa, Zea mays
  unsure (1)..(126): unsure at all Xaa locations
  Clone ID: MRT4577_120571C.1.pep
EGGRGLQDTLKVHSKKFVGILNGIDTDTWNPSTDRFLKVQYSANDLYGKSANKAALRKQLKLASTQASQPLVCFLSSQPCTCLNIFLSPRFIRELKFPQAXGCITRLVPQKGVHLIRHAIYKITEL

SEQ ID NO: 207220 - protein, 41 aa, Zea mays
  Clone ID: MRT4577_120572C.1.pep
VKSAVASTSSSMPMKMLRLRSVKCLLAQEMMRIVVSVFKAC

SEQ ID NO: 207221 - protein, 34 aa, Zea mays
  Clone ID: MRT4577_120573C.1.pep
HMCRAITQETRTCCMVSSALITQRANNWMGQSLF

SEQ ID NO: 207222 - protein, 72 aa, Zea mays
  Clone ID: MRT4577_120574C.1.pep
GRPSKLSHITPSSPRCSPSPTKNSASSITQGPTTGKCTSALREPPAWPSSSRSSQRGRTLCPSWRSASPFCR

SEQ ID NO: 207223 - protein, 41 aa, Zea mays
  Clone ID: MRT4577_120575C.1.pep
PTRAPLVGHFEDTNLCATQAKGVTTRPKDIHLARRIRGERA

SEQ ID NO: 207224 - protein, 157 aa, Zea mays
  Clone ID: MRT4577_120576C.1.pep
MKVELSSFSGYKIYPGHGRRYARTDGKVFQFLNAKCESAFLSKRNPRQINWTVLYRRKHKKGQSEEIQKKRTRRAVKFQRAITGASLADIMAKRNQKPEVRKAQREQAIRAAKEAKTGKQASKKTAMAAAKAPTKAAPKQKIVKPVKVSAPRVGGKR

SEQ ID NO: 207225 - protein, 38 aa, Zea mays
  Clone ID: MRT4577_120577C.1.pep
WHGRLSSASRKPPRRSEPFPAPPEDDAATAKEAAKHSS

SEQ ID NO: 207226 - protein, 54 aa, Zea mays
  Clone ID: MRT4577_120578C.1.pep
MGTASNTWAADYCALYYAYDSSTGPDRVLKGWCSVLLNVLHGDLSNLAGKSARD

SEQ ID NO: 207227 - protein, 314 aa, Zea mays
  Clone ID: MRT4577_120579C.1.pep
GVVARFLFYYLKCRVAGASAEEKKAMLQASVAVMAKLDRSAVSCKGLFGILRIAAPLRLADACQERLVAMIGRKLDHATLDNLLVPAPPGTGSLYDVSLVLRFLAAFLRGGASDEPARLKKVGKLVDLYLAEVAPDPSLRPAKFLELATALPAHARDCHDALYRAIDVYFQVHGRLTDEEKMKICRGLSYEKLSPESCKHLARNGEFPTRAAVQALASQHTVLKSIVLREPAGQLKPVSLSPPPSTGKHRDVGGGENDEGQVVLYAGRLDLSLENQNLRSLLDGMHWRVMELEKVCSRMKTQMSKMKQPRRGGG

SEQ ID NO: 207228 - protein, 48 aa, Zea mays
  Clone ID: MRT4577_12057C.1.pep
ASGQVPGDPFKTGLASSDVDNHEPTVVNGNRSLSPHLYQSPLILISAE

SEQ ID NO: 207229 - protein, 69 aa, Zea mays
  unsure (1)..(69): unsure at all Xaa locations
  Clone ID: MRT4577_120580C.1.pep
AGGRLDQELDITXNDGQGKVLDNRRLLTLSMDHTYSYGFQSRHEYLYGKIYMQLQLVPSNYAGTETDYY

SEQ ID NO: 207230 - protein, 100 aa, Zea mays
  Clone ID: MRT4577_120581C.1.pep
SVRPAVSTHDGAAVLHAAQDVAGQPRHHAGPTSLQARTFPCTVGASSTQALSSAELGFCSMPSDHHELARKNLHTWEHNTHTFTRHLGQRGGLKGDDAWS

SEQ ID NO: 207231 - protein, 255 aa, Zea mays
  Clone ID: MRT4577_120582C.1.pep
MESAGGEAQPVLPQPPPPPPVQELAGAANDVPARYVARAGNEPKVTVTAPVPVIDLARLCEPGGGADEASKLRLALESWGLFLVTNHGIEATLMDAMMDASREFFRQPLQEKQKHSNMIDGKHFQLQGYGNDRVASEDQVLDWCDRLYLLVEPQEDRSLDLWPACLRDVLHDFTTECTRVKDCLLREMAKALDELGDDDDYFIDQFGDRADTHASVGGLQVFRDGVWYDVRTRPHTLLVNLGDQIEVIHLLTNYH

SEQ ID NO: 207232 - protein, 281 aa, Zea mays
  Clone ID: MRT4577_120583C.1.pep
MSSMQVTNHGIEATLMDAMMDASREFFRQPLQEKQKHSNMIDGKHFQLQGYGNDRVASEDQVLDWCDRLYLLVEPQEDRSLDLWPACLRDVLHDFTTECTRVKDCLLREMAKALDELGDDDDYFIDQFGDRADTHARFSYYPPCARPDLVFGLRPHSDGTFLSLLMLDDSVGGLQVFRDGAWYDVRTRPHTLLVNLGDQIEIISNGIFKSPVHRVVTNAEKERLSVVLFYSIDPEREIRPADKLIDENHPALYKKVKVKEYTAGLYEHFSRGKLVKETAKI

SEQ ID NO: 207233 - protein, 125 aa, Zea mays
  Clone ID: MRT4577_120584C.1.pep
MKHFRVSFIVTALCLLGSAWWGYEHAGVAGALTAMGIAAILAVMEVSLSFDNAVVNASVLKTWDEFWKKLFLGVGIIIAVFGMRLLFPLVIVAVAADLGLMDVWNMALQDPKQYSMHLTNHHAEV

SEQ ID NO: 207234 - protein, 131 aa, Zea mays
  unsure (1)..(131): unsure at all Xaa locations
  Clone ID: MRT4577_120585C.1.pep
MDATATPQRRAAYLKXVKLMSPKRXVAEKNYPDLTSTTFFHSRWNYIISGPAKAMGRKAKRAVTTGRKIIXGTNPLASEPGTIRGDFDVHIGRNVIHGSDSLERATEEIALWIPEGPADWQSSQHPWIYEK

SEQ ID NO: 207235 - protein, 117 aa, Zea mays
  Clone ID: MRT4577_120586C.1.pep
TVRSLASVSDQTVKHFPPNQTRTQTLTAQSDAASSSPATPGSTSACSNRARSSVRKEMEEFQAESRRFEAETREEVRRLRVYMVPILGNHKEVQSSAMYSKSRTTQRLLQEKLGSLI

SEQ ID NO: 207236 - protein, 74 aa, Zea mays
  Clone ID: MRT4577_120587C.1.pep
ALLPLGARARLFCRVPDGCLSCPAWRYYSPTAPSFMSHPCTLIRRPQLDPLVQRHLCRRGLKERDLFQIPYSLW

SEQ ID NO: 207237 - protein, 102 aa, Zea mays
  unsure (1)..(102): unsure at all Xaa locations
  Clone ID: MRT4577_120588C.1.pep
MARTKQXTARKSTGGKAPRKQLATKAARKSAPATGGVKKPHRFRPSTGALREIRTYHKSTXLLIRKLPSQPPGRGDPQALHTRPRIKALNESERDRKKVKQH

SEQ ID NO: 207238 - protein, 99 aa, Zea mays
  Clone ID: MRT4577_120589C.1.pep
LAHRRSIIRQPQCLVKVAASSSPSLGSCCLFSRGGHRRGDKAGCSRPLQLGRFQSALCVMPSPGVAWCTWFPTIRCVIHWSQRSEELASRVESLTSAKP

SEQ ID NO: 207239 - protein, 433 aa, Zea mays
  Clone ID: MRT4577_12058C.1.pep
MAMMGSTSEKMYLCQTNTRKANTQWKWRDGESSVNPPWQEAGRWCICALGWREPSLVLRAPVVKRSWARKSIQIPNLSSYYVHLQGCPRCTTILYMRKYMYCMHDCTRTCLPTLLQWEPDHQGQQMPSQTRAHDGAGTSRGQEDTPNPPPIPPTLAEAIVALVNATVDNTRFLREMAGNQFQQHGGRAPPQGPRETSYLEFSETRPPLFVKAEDPLEADEWIRYLNKFNHLSQYAIDQVNTDLKKKNCFMRGLNDQLQRKMATYLDLTYSRAVSTALAVEAKNIGQGKSRGFRGDRSNQGPEKRTSSSPWGCPAIFVKKKDQTLRMCVDYRPLNEEIQFLGHVLSHPVLEGKPNANHPGLYRPDLHYQGEWPGIHYVAFTKTPLVHSCSLGFDSRINAVHLPKVLTERYSGKRLEPPKVSQYHPQYQDNSIVS

SEQ ID NO: 207240 - protein, 140 aa, Zea mays
  unsure (1)..(140): unsure at all Xaa locations
  Clone ID: MRT4577_120590C.1.pep
GSRRKGKAPSHKKKTLTRNVEVELPVPRIRIYLYIEKDPHAERAGTAAYVYLVVGLLYLDAQDLEVNANTDNDNTNIIMIPRLLVMRIHNDLEIVMVRGXITIGDGLAIINFQFLLLNEKEKENEASSNRTESPSTENEA

SEQ ID NO: 207241 - protein, 66 aa, Zea mays
  Clone ID: MRT4577_120591C.1.pep
GRSYCLSISNKNRLIYEMISNAKRAEVIMGSQIVQLEHGLCIRCGAYNTSIRFGPCPRSGQTYNKI

SEQ ID NO: 207242 - protein, 72 aa, Zea mays
  Clone ID: MRT4577_120592C.1.pep
ALLMKKNFGSQHKDGTGSLNHGIHSPYFCHTNHRWFLDKSFRIGAPQEGPKTPYTLYPPWHKETRAYVPPRG

SEQ ID NO: 207243 - protein, 631 aa, Zea mays
  Clone ID: MRT4577_120593C.1.pep
MAGRGWPRPGSLQALVVAAVILLLAAASGAGAGSPDRPVPRPPLFLPLTRSYPNASRLAASLRRGLGDGVHPNARMRLHDDLLTNGYYTTRLYIGTPPQEFALIVDSGSTVTYVPCSSCEQCGNHQDPRFQPDLSSSYSPVKCNVDCTCDSDKKQCTYERQYAEMSSSSGVLGEDIVSFGRESELKPQHAIFGCENSETGDLFSQHADGIMGLGRGQLSIMDQLVEKGVISDSFSLCYGGMDIGGGAMVLGGMLAPPDMIFSNSDPLRSPYYNIELKEIHVAGKALRVESRIFNSKHGTVLDSGTTYAYLPEQAFVAFKEAVTSKVHSLKKIRGPDPSYKDICFAGAGRNVSKLHEVFPDVDMVFGNGQKLSLTPENYLFRHSKVDGAYCLGVFQNGKDPTTLLGGIIVRNTLVTYDRHNEKIGFWKTNCSELWERLHIGDTPSPAPSSDTSSEHDMSPAPAPSNLPEFDVGLITVDMSINVTYPNLKPHLHELAELIAKELEIDSRQVRVMNITSQGNSTLIRWGIFPAESDNAMSNATAMGIIYRLTQHHVQLPENLGSYQLLEWNVQPLPRRSWFQEHVVSMLLGILLVILVTLSAFLVVLVWRKKFSGQAAYRPVDSVVPEQELQPL

SEQ ID NO: 207244 - protein, 241 aa, Zea mays
  unsure (1)..(241): unsure at all Xaa locations
  Clone ID: MRT4577_120594C.1.pep
LDQDVIDALPVFLYREVVGAGAGAKEPFDCAVCLCEFAGEDRLRLLPLCGHAFHIGCIDTWLLSNSTCPLCRCALGADAAALFDEEGMWEHEDAVLPVRLGKFKNLARAAPGPVRAGAGXIVTREAGETSSSSLDARRCYSMGSYQYVLAEASLQVSVHRRHGDGHGRGGAGLRGVGVGSNRAGATEGKRIGAGSKGDSFSVSKIWQWPRNGKEKLPVLASDDSPAMNGRLPWQRPSPGDS

SEQ ID NO: 207245 - protein, 63 aa, Zea mays
  Clone ID: MRT4577_120595C.1.pep
NSICRLFKFWRHIGVETIEFLTRSLPQLMSARLCSGTRLCSGTKFLCCVIESSLILRSNFSFD

SEQ ID NO: 207246 - protein, 58 aa, Zea mays
  Clone ID: MRT4577_120596C.1.pep
DERLGVYAVIQLALRIRAREPPIRQAGVVPGSACAPPPGRQVLRPVRSACPRYDTARV

SEQ ID NO: 207247 - protein, 88 aa, Zea mays
  Clone ID: MRT4577_120597C.1.pep
YALLPTGAHNKGTSRLISQHVLMVRPRLTNTVAPQSLESCHVALVSVQLLCDLLLWICSPMHCPRSSDTACPQADVCDERSFKAVASS

SEQ ID NO: 207248 - protein, 73 aa, Zea mays
  Clone ID: MRT4577_120598C.1.pep
GCFFLIFFWVYLNNNSPVLYGLKNSGVGRKIHVHKDYQLNGPIRDQGNPAIGMGVLYKANHTNAFSQNLVQPP

SEQ ID NO: 207249 - protein, 62 aa, Zea mays
  Clone ID: MRT4577_120599C.1.pep
MSCCLAPGFFLVPSPPLLVICPCALNGPSFSLKKKKKKKKKKKKKKKKKKKKKKKKKKKKAA

SEQ ID NO: 207250 - protein, 598 aa, Zea mays
  Clone ID: MRT4577_12059C.1.pep
MAGNQFQQHGRRAPPQGPRETSYLDFSETRPPLFVKAEDPLEADEWIRVIEQKFGLIRCTETQKSLFVAQQLRGPASTWWGNFVAIQPARHQVTWDEFKLAFREHYIPEGVLHMKQEEFIRLKQGGDTVMQYLNKFNHLSQYAIDQVNTDLKKKNCFMRGLNDWLQRKMATYLDLTYSRAVSTALAVEAKNTGQGKSKGFGGDRSNQGPEKRTRLVIRPFNQNHSSPRPPSYPFKQPVFIRPTTAPASTNQLSAPGARFPAHPSSSTGCFNCGKSGHFIKDCPYPKLNKFNNQQNSGTSNQGKGNMANNSVGKNVKKTGRIYYTQVATTPEGEPIMMDLPGLPLERDVEFVINLKPDTAPISRRSYWMPPNELAELKMKLQDLMEKGFIRPSSSPWGCPTIFVKKKDQTLRMCVDYRPLNEEIQFLGHVLSANGIAVDPSKVKDILEWKPPTTVHQVRSFLGLAGYYRRFIPDFSKIVKLITSLLKNDTKFNWSSRCNEAFEQLKGFKGCHLQAGLITVVMSKLCQRESGGGKPNFLLAWFPKTLAIAPKIWQLIGLLGTANLSSSLSGTIIRGTLKTPNSQLVTPISIKLQRPDGYD

SEQ ID NO: 207251 - protein, 58 aa, Zea mays
  unsure (1)..(58): unsure at all Xaa locations
  Clone ID: MRT4577_1205C.1.pep
FNFWRYINYYXKVMANKENCKIVGRVCLFPGSYNPDYGLCKHIVTWLWIYYNLGIWXI

SEQ ID NO: 207252 - protein, 201 aa, Zea mays
  unsure (1)..(201): unsure at all Xaa locations
  Clone ID: MRT4577_120600C.1.pep
SVLAAIVMYDANVLAVLSVAQSASYSEYANSMPYCTXRESHSCSTTRXSIEAAAIMEYILQGISLMKQAKNVNDLDPLLKPKQDTYALRTSSXWMRLHIEVMRAATKSIEREVDYCNDNPVIDVHRCKGSGGGNFHGTPIGVSMDNARLYMDDIGKLMXAHVYELVNECYSNGLTSNLTGSRKPRLDYGLKGTEIAMGSYC

SEQ ID NO: 207253 - protein, 37 aa, Zea mays
  Clone ID: MRT4577_120601C.1.pep
FIKLSYSAPQVSTLANDRSPTANGESRARAPERTISA

SEQ ID NO: 207254 - protein, 36 aa, Zea mays
  Clone ID: MRT4577_120602C.1.pep
RSRLDPVVHEMWHYPYLDSAVTSVVYHLSGIIAVSC

SEQ ID NO: 207255 - protein, 616 aa, Zea mays
  unsure (1)..(616): unsure at all Xaa locations
  Clone ID: MRT4577_120603C.1.pep
MQRSRRALLRRTAAAQEQSAVAEAAANGRRRRLYGFSASLVVASWXVAVLLLHSLVGHGDGQRDGGGSTVDLTVVEPAVNVGPINPVVQEEHGEDLEMPGDSCVNSDENAVLSEDTLVQADQLCSSDEVQNENTEAVTIDSQVELSGDQGGYLPQSGVDSGVQPGEKVESKDLPRPPRLSRVAPPDLDEFKTRAIAERGPGISSQPGNIIHRREPSGKLYNYAAASKGAKVLDFNKEAKGASNILDKDKDKYLRNACSAEGKFVIIELSEETLVDTIAIANFEHYSSNPKEFELLSSLTYPTENWETLGRFTAANAKLAQNFTFLEPKWARYLKLNLVSHYGSEFYCTLSVLEVYGMDAVEKMLENLIPVENKKTEPDGKIKEPIEQIPLKESAGGKESSQEPLDEDEFELEDGKPNGHGDSSKNGANDPVSETRTLQAGRIPGDTVLKVLMQKVQSLDVSFSVLERYLVELNNRYGQIFKDFDADIDSKDALLEKIKTELKNLESSKDSIMNEIEGIISWKVVASSQLNQLVLDNALLRSEFEIFRQKQADMENRSLAVIFLSFVFACLALAKLSIGIMSRFCRFYDFEKFHNVRSGWLVLLLSSCIISTILIIQ

SEQ ID NO: 207256 - protein, 159 aa, Zea mays
  Clone ID: MRT4577_120604C.1.pep
MNPPMMPGSRPPSPAFPYPLVPPGLWGCFSGWPPTAWNVVCVSPPPPPPLSPSPSSNSSSCSGNGSPTLGKHSRDTNPLREEKREKSLWVPKTLRIDDPDDAAKSSIWATLGIKPGDPGTFIKPFQSKVESKGQRSDAAQVLQANPAAMSRSQSFQESS

SEQ ID NO: 207257 - protein, 65 aa, Zea mays
  Clone ID: MRT4577_120605C.1.pep
SDLGAGCSCRVVSSYLICLLDTELVTSIYIKGYLYRSDQFRIKGKYPRENGGGSKMQQRSEAPRY

SEQ ID NO: 207258 - protein, 158 aa, Zea mays
  Clone ID: MRT4577_120606C.1.pep
MEVGEMDDVQAVGEQVISSRGGSVLGKKTILKSDHFPGCQNKRLTPHIDGAPNYRQAGSLRVHGVAMPTMEGIVNVLNHIGAQKKGKQTRVLWHSLREEPVIYINGRPFVLRDAERPFSNLEYTGINRERVEQMEFRLKEDILQEASRYGNKILVTDE

SEQ ID NO: 207259 - protein, 38 aa, Zea mays
  Clone ID: MRT4577_120607C.1.pep
MRKVKEGTSQGFQWIKDKCQRKNGGGNKKQQGSEVPGY

SEQ ID NO: 207260 - protein, 57 aa, Zea mays
  Clone ID: MRT4577_120608C.1.pep
WEIFLARGKMPGFCKQGWWSGNDSTPVSAQPLSTRVHPSKLLHASRLCVIIHSIECF

SEQ ID NO: 207261 - protein, 47 aa, Zea mays
  Clone ID: MRT4577_120609C.1.pep
YVIFLRWGPYNSSGWPFKRHYTLVITVATSQKALSSVLSKPNIFTFT

SEQ ID NO: 207262 - protein, 58 aa, Zea mays
  Clone ID: MRT4577_12060C.1.pep
IYRNNIELHLYLRLTGGKGTDLKGKRLFSSHWFIHKAIVNIKGMNVNLHRLRPVPINR

SEQ ID NO: 207263 - protein, 339 aa, Zea mays
  Clone ID: MRT4577_120610C.1.pep
RSCSLIVILKDSSSSDTIKGYKLWDWKSREQPSMEKPVIVSKDERKILLYDLTPCTEYSFRVISFTDDGVLGHSESRCRTESKEIFVMRAPKNAVGGGATHAQKKDRNQSCKSTGFKIRDIWKNFQEALDAEGCFEGFSEDVHEGSCSRSVTETELSGACRKLHFNSSSVPDLNAEVPVPVDYTENHYYSKKGLVRSNDSGDSETCAVGQTAEPPAVESRQVSKVNSVPVNKCEQNGASAICHEKMLSGSTRQLDGDYEHCVKVVRQLECDGHIENGFRMKFLTWYSLRSTDQERKAVSTFVRTLSNEPSSLAEQLVDSFGEILNSKKAKTGFCSKLWH

SEQ ID NO: 207264 - protein, 59 aa, Zea mays
  Clone ID: MRT4577_120611C.1.pep
PHVLLHVQLFYHYQHTLSMSIDLIANNYIPIHTIENHYIHNYLPYTMIQRKIHTYHPVT

SEQ ID NO: 207265 - protein, 90 aa, Zea mays
  Clone ID: MRT4577_120612C.1.pep
PLLYQQTVYIKDRGSILSTETNWSKHLHPLDRTGATKAHDSPTSIYTPIICNVRHHAGTVGLDLRVLGTPEGYDRSQLHDVGGQHRQKIV

SEQ ID NO: 207266 - protein, 89 aa, Zea mays
  Clone ID: MRT4577_120613C.1.pep
LTTCSLRSEAALGPLPSPVRGHHGVRRPSPRPDTPDGHLPWPLLWAAPFLHVHCRGQKGGPIPTLLPGRLPLWFPRRGMYESRSPATSH

SEQ ID NO: 207267 - protein, 103 aa, Zea mays
  Clone ID: MRT4577_120614C.1.pep
ASFVLDVSARFWLVPGGKKRSGLESSHFIMSYSFRPKSKTGVTWFGVFSIFYSPVRILTNYPPDRILATTRNITGLSEPTGFTESLPWNRSGWNRSPSYRMSP

SEQ ID NO: 207268 - protein, 85 aa, Zea mays
  Clone ID: MRT4577_120615C.1.pep
FSFIGVFFDGMMEAPPPTGLAAQAMRGYLFTAHGWAMAMLKDSFLSTHKVNILPNQVRRLAWSLLFAITNLPMLLKRITILQWRF

SEQ ID NO: 207269 - protein, 129 aa, Zea mays
  unsure (1)..(129): unsure at all Xaa locations
  Clone ID: MRT4577_120616C.1.pep
HGQGLLSPGSVDDTRRLVLGNALXFRGAWARKLDASETRDGEFHLLDGSSVEAPFMSSTDDDQYIASYGDLLRLPYEQGGDKXKQRQFSMYILLPEARDCLRALAXEKLSAEPGFLDKHIPTRKVPVGE

SEQ ID NO: 207270 - protein, 131 aa, Zea mays
  Clone ID: MRT4577_120617C.1.pep
GQYPFFFFFFFLCFFEGLSPLFPPTRKHQKQNKQKTKKKKNPKTPKAKRPNRPKSPTRPPSKKPKPNRTQCPKRLTCSTTRPTRALCEGPESPQSSPRQPRKQSRQPTQPCPPSQPSKAHPTRQRAQEREQ

SEQ ID NO: 207271 - protein, 130 aa, Zea mays
  unsure (1)..(130): unsure at all Xaa locations
  Clone ID: MRT4577_120618C.1.pep
CLPGRGLGSPXLXLLSSSFWGSFCSSSSVCLFCXAFPFACAARFCPGVGXPRALVVXRVLGACCCVLVWWFAWWALPFLGLCSLXPFXGCXXFXLXXXCXXFPPPLCSVXWPSFSRCFCFLLFLXXXLLF

SEQ ID NO: 207272 - protein, 259 aa, Zea mays
  unsure (1)..(259): unsure at all Xaa locations
  Clone ID: MRT4577_120619C.1.pep
SKPAGRFLLSPTATNKTVEEARSSTAYSSALLYVYFFYLLVQLQPPPLSLIVESKKHAVKFWSSSKGARRHFSFPGIHSCSVAACIPDPQSHPRWLLAQQIPCYPVYGCLRRIPRYLPCAAFTEANKLKNFPDSTRPAWTVLETWDTPSGCSGFAAIVPEMNKALLVFRGNADMEQNLPLEVSSWNELGEGIGSTCYNCTVNSYALQGYLEAKEATNNWQITRDAYAXQGLVFSITGHGLGGMHSLIASADFNYQQICY

SEQ ID NO: 207273 - protein, 68 aa, Zea mays
  Clone ID: MRT4577_12061C.1.pep
NPQNITHKILTANATKACQLVIKKNKKNSFHLYYAKGIKKTKSPHGHSTVCSHKKGLDKKKPSKQTGP

SEQ ID NO: 207274 - protein, 49 aa, Zea mays
  Clone ID: MRT4577_120620C.1.pep
RKNAYAIPHTKLLTLAWSLRICWSRKHKAYHIQGDWVYIACPTRELYLN

SEQ ID NO: 207275 - protein, 75 aa, Zea mays
  Clone ID: MRT4577_120621C.1.pep
YMITHYSNTFKRIAHETIIRDFNLKCNLGIKALVPMETPPKSKPVRTPCTYLMNIDSSKLSFICHLVVFESLAPC

SEQ ID NO: 207276 - protein, 37 aa, Zea mays
  Clone ID: MRT4577_120622C.1.pep
FKVQFFLVKSEICVKLLTVNQTCVRIKNSLTKLDFIP

SEQ ID NO: 207277 - protein, 124 aa, Zea mays
  Clone ID: MRT4577_120623C.1.pep
SVSPLCTIYACNPAPLAPVPASSFSLVLIVVFGFGVFPPMVVRTSVPVVGSLPSIIEPACSVSARAFSVPQWARGIAWPACQGFSGSVLWAPSGITIINPVALLPKAAPLAALVHGLSTRACET

SEQ ID NO: 207278 - protein, 87 aa, Zea mays
  Clone ID: MRT4577_120624C.1.pep
SYRYIYPSMLILIPRQERATMLLLSSPFVTVSTPPSGGQLPWGSPGAADPGEKTTDGAAGDDQGELDALRDMCHCTTCTQNLPRDET

SEQ ID NO: 207279 - protein, 72 aa, Zea mays
  Clone ID: MRT4577_120625C.1.pep
HYLCPRALRTWDDMIAYDSYASHGRFQAQGGGDPVYRGYRSRSSSSGLCGHSSVDYRKRHRYHDGQCLIKHG

SEQ ID NO: 207280 - protein, 70 aa, Zea mays
  Clone ID: MRT4577_120626C.1.pep
TAPTALPSVSAHTLVLYTLGQSMATHIHQHQHQPLMLVSHELNDVCYKDSVVPQSNYWTIKKKRIRLTSG

SEQ ID NO: 207281 - protein, 77 aa, Zea mays
  Clone ID: MRT4577_120627C.1.pep
MPGAGYGAAGGGVSGTTGGGSGSTVLNANNPGGNSMYGGYDNTAGLTAGSAPLPCGGGWTVLCLVWMVTFAFVKEKV

SEQ ID NO: 207282 - protein, 138 aa, Zea mays
  unsure (1)..(138): unsure at all Xaa locations
  Clone ID: MRT4577_120628C.1.pep
QHRKHNSVPTVAANIFSFLMLLDHSAIAATVTIIPHCSQATIAYFLPPYLSPTASSXYENPILXPYTIQHAINTXISPLSNLFLQQYQVLLQXLPQTHLPTHNIXTLNPLTMANYAAYLLQXHRYLIHWQLLTHNSAA

SEQ ID NO: 207283 - protein, 75 aa, Zea mays
  unsure (1)..(75): unsure at all Xaa locations
  Clone ID: MRT4577_120629C.1.pep
ITGTHLLETAGRYYITXXRVSKAGCCCXVLTPRXRLXCMVQLGVLFFSLSLHISYRPAGPRYVLLQGKVLRSSRS

SEQ ID NO: 207284 - protein, 93 aa, Zea mays
  Clone ID: MRT4577_12062C.1.pep
WQGSAAFATAIVLERAKKKKKKKKKKKKKKKKKKKGGRNKKTKAKKKKKKKGGRSKERNLNTIKWPALYILWDRENPIDCQLNNNAENGKTRR

SEQ ID NO: 207285 - protein, 64 aa, Zea mays
  Clone ID: MRT4577_120630C.1.pep
LPAYQGSQVLVPTISAPCPLGALLPPSLNNSFIFFSSLLSISHSSFFNQPLTNSFARLPFSDFY

SEQ ID NO: 207286 - protein, 88 aa, Zea mays
  Clone ID: MRT4577_120631C.1.pep
VGKLGKLFGVFIRTNMRASKKGGNYDTKETGPKKRSPGGSQRDAYIMAKKMTPATHSRRNQGGGAGEAPTPHMGRTGPQPQVSSPLGK

SEQ ID NO: 207287 - protein, 301 aa, Zea mays
  Clone ID: MRT4577_120632C.1.pep
MKPAADHRPTAVLLTGALDETVRAWLPDDLAALGSPTRGHALGVVSLAAHPAGSLAAAVSLDSFIRVFDVDTGASVATLEAPPSEIWGVQFHPKGNALAAAGGGSGSVKLWDTEKWKAITSLAVPRPEGARPDKTGSGKFVLSVAWSPDGRLLACGSMDGTIAVYDAVRMKFLHHLEGHHMPVRSMVFSPVDPHVLFTACDDCHVHIYDAREKGLVGAMSGHASWVLSIDASPDGLAVATGSSDRTVRLWDLNMRTSVQTMSNHSDQVWAVAFRPPGGAGVRAGRLASASDDKSVSLYDYS

SEQ ID NO: 207288 - protein, 126 aa, Zea mays
  Clone ID: MRT4577_120633C.1.pep
MKLAGLKSVDGAHEESIWAAAWAPAADHRPTAVLLTGALDETVRAWLPDDLAALGSPTRGHALGVVSLAAHPAGALAAAVSLDSFIRVFDVDTGASVATLEAPPSEIWGVQFHPKVKWRRVEEGQR

SEQ ID NO: 207289 - protein, 192 aa, Zea mays
  unsure (1)..(192): unsure at all Xaa locations
  Clone ID: MRT4577_120634C.1.pep
FTACDARVPPGNRRSAPSASTTLASAVAGPGAAATAVASHELQAPIIVLQNESDNVCLDSLVCCVCTFTDPTNLASCYSRVARAATSAVQCSAEQERGSRRAAGWWTRLRLVATRPSRVTWRYKFGGNENQLDGYEKXLLPQLKPEQRWYGLEQDEGALGXRSMERSQQFLLLSALLTLLLAVAAVXAVAMN

SEQ ID NO: 207290 - protein, 56 aa, Zea mays
  Clone ID: MRT4577_120635C.1.pep
VNSFYALMGLACAAGQFLGVLVEIIHSLPYTNPKVGLGERPTVADVVDDDADLTGG

SEQ ID NO: 207291 - protein, 75 aa, Zea mays
  Clone ID: MRT4577_120636C.1.pep
CSSIVRMKDHLCNICLGAYMGIDHEVLRVLVTYIFHSRDGAGVACFSRNRKNCYCRPARGVGVATHRKRHWRVRI

SEQ ID NO: 207292 - protein, 76 aa, Zea mays
  Clone ID: MRT4577_120637C.1.pep
GKVFKKQPNFLKNGYVSMVKITPPKPMVVETFSGYPPLGRFAVRNIKQTVAVGVIKSVKKKDPTGAKVTKGAPKKK

SEQ ID NO: 207293 - protein, 322 aa, Zea mays
  Clone ID: MRT4577_120638C.1.pep
MKLAGLKSVDGAHEESIWAAAWAPAADHRPTAVLLTGALDETVRAWLPDDLAALGSPTRGHALGVVSLAAHPAGSLAAAVSLDSFIRVFDVDTGASVATLEAPPSEIWGVQFHPKGNALAAAGGGSGSVKLWDTEKWKAITSLAVPRPEGARPDKTGSGKFVLSVAWSPDGRLLACGSMDGTIAVYDAVRMKFLHHLEGHHMPVRSMVFSPVDPHVLFTACDDCHVHIYDAREKGLVGAMSGHASWVLSIDASPDGLAVATGSSDRTVRLWDLNMRTSVQTMSNHSDQVWAVAFRPPGGAGVRAGRLASASDDKSVSLYDYS

SEQ ID NO: 207294 - protein, 172 aa, Zea mays
  Clone ID: MRT4577_120639C.1.pep
MAGTRALYLLVAAVAALLATPAAVDAATLAEICRGTAFPDICTSTVGSEAQSAGVLDAMAVLRMQVDAFNKRTEAARAHVKEAAVTASPKARTVLDLCNNLYLDVEDNLGACRRAIGFKDAVTIRATMGMAAQDMQNCDEQFRQIGEKNPMEQFDASLVEMSENCRSLSNMI

SEQ ID NO: 207295 - protein, 52 aa, Zea mays
  Clone ID: MRT4577_12063C.1.pep
GKKQIVIIHFFSQYQLCSTLNSFDGVKITSIIEHYNRTYYYLKKFHYKVINF

SEQ ID NO: 207296 - protein, 69 aa, Zea mays
  unsure (1)..(69): unsure at all Xaa locations
  Clone ID: MRT4577_120640C.1.pep
MGXXXXRXXQXPSKXIHVRNLPWECTDEELTELGSLFGKVVNTKRNVGANRNQAFIEFADQNQVIAMIS

SEQ ID NO: 207297 - protein, 41 aa, Zea mays
  Clone ID: MRT4577_120641C.1.pep
LTNFIPFSHLLANPTALESKSKDNTTHCLCLPDQFNRLTHA

SEQ ID NO: 207298 - protein, 150 aa, Zea mays
  Clone ID: MRT4577_120642C.1.pep
PEERPKRVSASARGLALHITHRVSPGFGLFIGPGGPPGLCEVDRSVGPPRFTLVGSRLWLPGHCTVSLLSRRGVVLPWVRHFWQRAGIPLVPPPVGWSSALSSGRPGGSFFFFLFFVRPGRFFFFFFFFFFFFFFFKENNKSTACSPLLF

SEQ ID NO: 207299 - protein, 122 aa, Zea mays
  unsure (1)..(122): unsure at all Xaa locations
  Clone ID: MRT4577_120643C.1.pep
LASVVRGSFLWFGLRVAFXSXLGPPRGXXLPAVAFXXWXWPRCLCCRXWRRXFLGGSXRFVAXFVVLLLRLLXVPRGCXLGFLXPXLCFCLAGCSLVLSRVLXGFVGPLGXVFAXVPGLFGA

SEQ ID NO: 207300 - protein, 210 aa, Zea mays
  unsure (1)..(210): unsure at all Xaa locations
  Clone ID: MRT4577_120644C.1.pep
MAECEELVESGGDEDMPRVVAALAGILERVANRNDAATPPXAEVSAVAPASAFRATTKPGISVRAYMARIARFAGCSPACYVVAYVYLDRLLRRGRLLALAVDSYSVHRLLITAVLAAVKFMDDICYNNAYFAKVGGISLVEMNYLEVDFLFGVGFDLNVAPETFGDYCAVLHSELLCAEAAPAPLRLQHCCLSEDDAGAGCSAQQQLAA

SEQ ID NO: 207301 - protein, 89 aa, Zea mays
  unsure (1)..(89): unsure at all Xaa locations
  Clone ID: MRT4577_120645C.1.pep
SSRRXXSSHCYSAHYELSLDAASPLAFQFAADRDAASGRTKCSCRTNGLRRTPRRQGPPRRDAAVRAAPPLQLPRMSTQSIHNPLNGES

SEQ ID NO: 207302 - protein, 84 aa, Zea mays
  Clone ID: MRT4577_120646C.1.pep
GALFVVAHADLSVGDIDDDFRPSPELWRLFVPCIEPASIILAIQVTFLKFGGVVLWQALHHTASACLKRVRILPHVVSLVQVWR

SEQ ID NO: 207303 - protein, 110 aa, Zea mays
  Clone ID: MRT4577_120647C.1.pep
AGRVGTNLLRYTCRAKMGSTPPRACHRPPPMDANVHDATGTPDSASDKAAYNAEAPSGHQHEDAGQDYTLDACSSAQFLRRQSRYPQSDATTQVPLEGLQRLNWGEQPEW

SEQ ID NO: 207304 - protein, 65 aa, Zea mays
  unsure (1)..(65): unsure at all Xaa locations
  Clone ID: MRT4577_120648C.1.pep
SGGASGASSLFFVYSLDYARTRLANDAKAAKGGXGERAASXGLVRCLTDKTTASRDGXVAGLYRG

SEQ ID NO: 207305 - protein, 134 aa, Zea mays
  Clone ID: MRT4577_120649C.1.pep
LRLLAQAALLNRITYPVAFRLRRRATRRSTTRSSDRSTGTSSPQCACSSIRRHCVQPLPLDSALCEGKDLRHHCLVLDHAGPLYLDELVDSATVKGDWVDTNTHGLTAGFKAHLAQAGVRPGHRPLAYSLGAMQ

SEQ ID NO: 207306 - protein, 237 aa, Zea mays
  Clone ID: MRT4577_12064C.1.pep
MSDAQATGDGPRCVGCGGRVKTLFVQYSTGNIRLMKCDKCKAVADPYIECEFMIILIDLVLHKTRAYRHVLFNKLSMGSSVDKGILYRSTLIHIALDTFRISFSKGNRAGGASSRSIFSTVSNCTEVVGDALLGNIVFIFMLLLGVRFFLKLSFDIIRYRDILFAVIISSYFKLFLFTMMVWEFPSSVIFIVEMFVLSSNVVALRVVSQFPRAHCFAVCLLAHAAKYLTQRWILGTP

SEQ ID NO: 207307 - protein, 69 aa, Zea mays
  Clone ID: MRT4577_120650C.1.pep
SAYRLAICFTLRFVSARGFCPIIAWPLFRTPYRVSSWHFPYVTARVFHAKNKQFSCFQVNKVKPKNNHI

SEQ ID NO: 207308 - protein, 54 aa, Zea mays
  Clone ID: MRT4577_120651C.1.pep
PQKGAQKTFKGILGLKPQNRGGFFPHGWKSPYTPSFTFKILFQGANLKLGGNPF

SEQ ID NO: 207309 - protein, 125 aa, Zea mays
  unsure (1)..(125): unsure at all Xaa locations
  Clone ID: MRT4577_120652C.1.pep
LFFACFFSRLTMFVIRTDMFHVQNLIKGVTTGYRSKMRITYAHLPINACIINXTAAYHISELXQGQKRLKWCDMLDSQTILRSENAIDELILHGHDANFFSTYHFLMNQXMHVKXQDVNKALDGL

SEQ ID NO: 207310 - protein, 147 aa, Zea mays
  Clone ID: MRT4577_120653C.1.pep
RGVKGLAKRRCNMGGNTKTPGVKRAIKGGAHLPIRVGKSWEGGLGGAFLFISQLGKGGCVSKRIRWGTPGVFQVWGGKKTGKEMELGATKKKVKRCMPGGVNLETIKGAALFFFFFLPFLFFFFFFLKLKFFFFFFFFFFFFFLGRV

SEQ ID NO: 207311 - protein, 197 aa, Zea mays
  Clone ID: MRT4577_120654C.1.pep
MSTLPLCDGTANSPCWSECSGSRLAAARRVGREAAVSCRWEKPGTLCLLRAKSPSLRRHSRKVQWAIRTMSDDSGDQSGNSTRLFSAIRSFWNQLSAKLKKARRGLPVKILFFLIGFYCATAFATVIGQTGDWDILSAGLAVAIVEVIGALMYRASFAFLGRIGNMITVFNYWKAGLTLGLFLDSFKYEVDEFLEFL

SEQ ID NO: 207312 - protein, 151 aa, Zea mays
  unsure (1)..(151): unsure at all Xaa locations
  Clone ID: MRT4577_120655C.1.pep
MWPKGHKKAGAKXPAQEEPAVAKAPADQXKPRTDKRLPAAKSTEKERGHQRAKKNAKNXVXTYYIYIFKVLKCDHSHIYISSEGMXSIMNSFINDIFEKLVVEAAKLARXNKKPTITSREIQTSVRLVLPGDVDKYALSEGTMGATKLTSS

SEQ ID NO: 207313 - protein, 114 aa, Zea mays
  unsure (1)..(114): unsure at all Xaa locations
  Clone ID: MRT4577_120656C.1.pep
PKKKGGGPKPPRKKKAHNRGAPRARGEKIAAKPAXPPKKKIEGPLTRAPNWRDPNPLPEAGGFDAKMKEVESLCNPLIAKMYQGAGAPMGGSGGMDEDPPAGNGGPGPKIEEGG

SEQ ID NO: 207314 - protein, 93 aa, Zea mays
  Clone ID: MRT4577_120657C.1.pep
MPGSHGRPLAIDGLGRPPPVDPFQGLKCTASLPDSARSFISLGNVSNGGRILCMQVWPDYGTKKFQTLSYLPQLTTEDLLKQMDSLLCNRWIP

SEQ ID NO: 207315 - protein, 79 aa, Zea mays
  Clone ID: MRT4577_120658C.1.pep
PIKPFSARAHSRIIAKLSGKEGREGGSHVCHFEVTRFALLETIKEALPADMWGPEMRNAWGEAYDQLVAAIKQEMKPSE

SEQ ID NO: 207316 - protein, 61 aa, Zea mays
  Clone ID: MRT4577_120659C.1.pep
FLAVITPPPRIRPLSWSAKSPAYTAEYYDPNRSMLELGFAPADEWIGRSDTEIIDATMEEL

SEQ ID NO: 207317 - protein, 108 aa, Zea mays
  Clone ID: MRT4577_12065C.1.pep
MSDAQATGDGPRCVGCGGRVKTLFVQYSPGNIRLMKCDKCKAVADPYIECEFMIILIDLVLHKTRAYRHVLFNKLSMGSSVDKGILYRSTLIHIALDTCILRIHNFFL

SEQ ID NO: 207318 - protein, 132 aa, Zea mays
  Clone ID: MRT4577_120661C.1.pep
MSWRSLIISVRRHGVVVDEKWYPKKAESNSKSLRLKGIKRYCRESRMKNKCRENSGLLQDSLHLEDRNLELLLLASDPTVGVGLVTSGLVVSVLPGLLGTLGSEGCVALGLVPTALLHAGPVLEDGDDAGLA

SEQ ID NO: 207319 - protein, 206 aa, Zea mays
  unsure (1)..(206): unsure at all Xaa locations
  Clone ID: MRT4577_120662C.1.pep
MSAAEGAVVFSEEKEALVLKSWAIMKKDSANLGLRFFLKIFEIAPSARQMFPFLRDSDVPLETNPKLKTHAXSLSVFVMTCEAAAQLRKAGKVTVRETTLKRLGATHLRYGVADGHFEASQNRPPNHMSINSPLIPDSDLERQERNVRLLDXIETRXYIQVTGFALLETIKEALPADMWSLEMKKAWAEAYSQLVAAIKREMKPDA

SEQ ID NO: 207320 - protein, 131 aa, Zea mays
  unsure (1)..(131): unsure at all Xaa locations
  Clone ID: MRT4577_120663C.1.pep
KGDKTKEAADPRRDILRAPQVWGGRLVAQRMKDTEGVGSYDHCNVLHPWGPPYVAHTRHFCVGTSVECLHISFQECALWVFEFPVSREVECYLIFNIGMKCPHTPFLQSWMMXNSYSFIKKKKRADRRHSE

SEQ ID NO: 207321 - protein, 149 aa, Zea mays
  Clone ID: MRT4577_120665C.1.pep
GDRAPTDTLALLSSTWPGAAGLTSPHGPRSMFLPVDSTWLARQGDVEAEPTPTASPGRGRYFRGGTAGGCASPCASPPSWAPKPVLAPGTPDHEPRVSNLFGVEIYWLSRRATPPRGGSSFKPRRLFQHRRRRPQRKRKSGGGRGEWRM

SEQ ID NO: 207322 - protein, 153 aa, Zea mays
  unsure (1)..(153): unsure at all Xaa locations
  Clone ID: MRT4577_120667C.1.pep
LGRXXPRARSCGLRVGASLVVPGCCLFARCXLXXXSXRSLGXXXXXGVGGRXGXXPLXRSLAAVWXXXXXRXVXXXXVXXRPRXXXXXXXXXXXAXXLSXXFPPPXRAXSFXRXFWXRXSVWXVXXRXXRXLVXALLLLLXAXXPPSAXXLVV

SEQ ID NO: 207323 - protein, 32 aa, Zea mays
  Clone ID: MRT4577_120669C.1.pep
LLLLHGWKGLLLRARWPGMDAVSKDAQKMTFR

SEQ ID NO: 207324 - protein, 66 aa, Zea mays
  unsure (1)..(66): unsure at all Xaa locations
  Clone ID: MRT4577_12066C.1.pep
RPGXKKKKKKKKKKKKKKKKKKKKKKKKKKKKKKKKKKKNFGEKWAFFEFFSPPGGETWKKVGPPF

SEQ ID NO: 207325 - protein, 63 aa, Zea mays
  Clone ID: MRT4577_120670C.1.pep
MAEGRVPLDYRDEGGLLHIPKKQRHVHQPLPPLERLPQQPRVGQVFFLAPPPAEGPEANAERC

SEQ ID NO: 207326 - protein, 350 aa, Zea mays
  Clone ID: MRT4577_120671C.1.pep
FLSSSRYLSEKATSLATGVISELVKELRVKPVPTVLASFSGGSKGCMYKVIQLLAGICEGDATMKDYRLVRNCICGQIYDSSPVDFVSDVGTQFLQKPAVGNSSQSTILRSWMAKLLASGMDTLFPSRIEAQRAEYWHTLYSAAGLGPVLIFCSEDDNLAPCHIICGFARRLIELGTDVKLMKWSDSQHVGHYNSHEIEYRKAVDDTLKKALVTFCHRSQLYDSNMAGDQEYKIAHSVCSLHNAAANSNESLRRVANSPSDHFFLPSSKDHDESREPSSLIEDQRRHISHPPCMEPKGVLGQILFDVCVPNNVEGWDIKPTVSPNGRPTFASARQLGPFNPIRYFRRSRL

SEQ ID NO: 207327 - protein, 406 aa, Zea mays
  Clone ID: MRT4577_120672C.1.pep
MWPGCGGRFYWAPESAPPGQARGVAVLFAWVWSDEAQLRPFFELYSSLGWRCLVCHPDLVALYLSEKATSLATGVISELVKELRVKPVPTVLASFSGGSKGCMYKVIQLLAGICEGDATMKDYRLVRNCICGQIYDSSPVDFVSDVGTQFLQKPAVGNLSQSTILRSWMAKVLASGMDTLFPSRIEAQRAEYWHTLYSAAGLGPVLIFCSEDDNLAPCHIICGFARRLIELGTDVKLMKWSDSQHVGHYNSHEIEYRKAVDDTLKKALVTFCHRSQLYDSNMAGDQEYKIAHSVCSLHNAAANSNESLRRVANSPSDHFFLPSSKDHDESREPSSLIEDQRRHISHPPCMEPKGVLGQILFDVCVPNNVEGWDIKPTVSPNGRPTFASARQLGPFNPIRYFRRSRL

SEQ ID NO: 207328 - protein, 48 aa, Zea mays
  Clone ID: MRT4577_120673C.1.pep
CQGTKHQRLLHDLGHQGQGQMNYRGPGPLLIKKVCRIRTTWLEQKAPA

SEQ ID NO: 207329 - protein, 97 aa, Zea mays
  Clone ID: MRT4577_120674C.1.pep
RLNSPATRAHHAHPCNHAPRAPASSQREAYLHMQQHGGARAQLTRAAHRRRLPWIPRRCWPGRCIWSSSSGRSTGGDGAQLHWDRVESGKKTGRFLG

SEQ ID NO: 207330 - protein, 198 aa, Zea mays
  unsure (1)..(198): unsure at all Xaa locations
  Clone ID: MRT4577_120675C.1.pep
KTTNTRNSKKAQNTHTKKKKTEKENKKGAKKTPDQKKGEKNPPPGPRRYKKPREGQKPGKQGSTGKKHPPGGKKKGXEDNPPHYGGGARPKKKPPGXEEGKKAPGTPPPQGKNPGEKKPTXGPPPPGGGKKKNPKPGKGPPKXGGRGKKTRENPEPPPQGGDGGGRPPPKKXKPAPPPRQKGRRRGGPPERKRRPPND

SEQ ID NO: 207331 - protein, 48 aa, Zea mays
  Clone ID: MRT4577_120676C.1.pep
FAFSSPSASCSYLNLSKITNQTTRVLIGLVDSGCLSELSGLISQLNHD

SEQ ID NO: 207332 - protein, 57 aa, Zea mays
  Clone ID: MRT4577_120677C.1.pep
SHGYHGWLSGWCLRARPHKVCIVQSSAGLPAHEYRIMHHCIIKVLFRSRDWKVAYSS

SEQ ID NO: 207333 - protein, 104 aa, Zea mays
  Clone ID: MRT4577_120678C.1.pep
QTHPPNQTRTTRHQVEELEGTNHGRCALQRRRAQARRGSAASRRRIISGKTGECGHVPTGRRTDQSSLTAVVHVPTSQIQLMAQFSSPYSKGLQTHTSIARLRC

SEQ ID NO: 207334 - protein, 86 aa, Zea mays
  unsure (1)..(86): unsure at all Xaa locations
  Clone ID: MRT4577_120679C.1.pep
MDWLIDLRNLKLSDNSEKICAEYIWIXGYDMDLGSKVRILSGPMTDPRELPMRNXDGSSTGQGDGEDSEAILYQKAVLKDPLTDAE

SEQ ID NO: 207335 - protein, 62 aa, Zea mays
  unsure (1)..(62): unsure at all Xaa locations
  Clone ID: MRT4577_12067C.1.pep
RRRRSXRGXRXPNPHCARVXRPXIDGWRRGAXXXXXRWCXVXLAVAXALGVXGPGSXGATXR

SEQ ID NO: 207336 - protein, 766 aa, Zea mays
  Clone ID: MRT4577_120680C.1.pep
MQQPLVLLLLFFIGSAKYAVASRADAGAATYIVYLNPALKPSPYATHLHWHHAHLDALSLDPARHLLYSYTTAAPSAFAARLLPSHVAALTTHPAVASVHEDVLLPLHTTRSPSFLHLPPYSAPDADAGGPDVIIGVLDTGVWPESPSFGDAGQGPVPARWRGSCETNATDFPSSMCNRKLIGARAFFRGYSSGAGDGSRVGADLMSPRDHDGHGTHTASTAAGAVVAGASLLGYAPGTARGMAPGARVAAYKVCWRQGCFSSDILAGMEKAIDDGVDVLSLSLGGGAFPLSRDPIAVGALAATRRGIVVSCSAGNSGPSPSSLVNTAPWVITVGAGTLDRSFPAYAQLANGETHAGMSLYSGDGLGDGKIPLVYNKGIRAGSNSSKLCMEGTLNAAEVKGKVVLCDRGGNSRVEKGQIVKLAGGVGMVLANTAQSGEEVVADSHLLPAVAVGAKSGDAIRRYVESDANPEVALTFAGTALDVRPAPVVAAFSSRGPNRVVPQLLKPDVIGPGVNILAGWTGSIGPTGLAADERRSEFNILSGTSMSCPHISGLAAFVKAAHPDWSPSAIKSALMTTAYTTDNTGSPLLDAATNTTATPWAFGAGHVDPVSALSPGLVYDASVDDYVAFLCTVGVAPRQIQAITAEGPNVTCTRKLSSPGDLNYPSFSVVFDRRSSRSTVKYRRDLTNVGSAGDTYTVKVTGPSDISVRVKPARLEFRRAGDKLRYTVTFRSANARGPMDPAAFGWLTWSSGEHDVRSPISYTWGM

SEQ ID NO: 207337 - protein, 56 aa, Zea mays
  unsure (1)..(56): unsure at all Xaa locations
  Clone ID: MRT4577_120681C.1.pep
GIINGGSNKSSGLIIKRIIRRGLNINLARHRSWVGRRIGNRKQEKCERTRARAXFF

SEQ ID NO: 207338 - protein, 55 aa, Zea mays
  Clone ID: MRT4577_120682C.1.pep
SMSILLNNFWGSLVQEFIHSFINSLIGYPNPIKTPLQGWIGLRVKRFRKRKKLGF

SEQ ID NO: 207339 - protein, 61 aa, Zea mays
  Clone ID: MRT4577_120683C.1.pep
SYLYLYPRWCLRTLTPSSAMAFCWLPYHNNEVKYYGLFDSLLFKNLHYDHKNNNHYHHHSD

SEQ ID NO: 207340 - protein, 153 aa, Zea mays
  unsure (1)..(153): unsure at all Xaa locations
  Clone ID: MRT4577_120684C.1.pep
MIPTRAAHASFRERTNEIRAAVERWCRHAVPSSTSSPGASSSCSTAXPLLVDRXATAARSEICRRASEIGLRIHQTSQILSRLAKLSKTTTVFDDPTAQIQKLTASFNKDIAALNSAXADLESLXNSQNESATLSYETSNDYTTVWHDLTNRS

SEQ ID NO: 207341 - protein, 82 aa, Zea mays
  Clone ID: MRT4577_120685C.1.pep
RLIIMVPEYKQFYSHNQASQKSILSPEISVPITSLITAEVLHCYNLGHTFPCSTGSNLPAIAMNLEPLHQHKGRTVAHTTMV

SEQ ID NO: 207342 - protein, 64 aa, Zea mays
  Clone ID: MRT4577_120686C.1.pep
EQGNFEFLIRSIFLANGKGETRGVGFLAARGTHLHTIFWVGRATKKGYLAYGYNGEIALGIEIY

SEQ ID NO: 207343 - protein, 81 aa, Zea mays
  unsure (1)..(81): unsure at all Xaa locations
  Clone ID: MRT4577_120687C.1.pep
MNPLIXVVSVLVVXMGLRLGFNGPGIGQGTGARQAGKRIGRPPEAESKIRSTLLLRLTFIETLTIYGLGVALALLYANPFV

SEQ ID NO: 207344 - protein, 44 aa, Zea mays
  Clone ID: MRT4577_120688C.1.pep
VRYCPCRSGNPYVNEHIDGAALEFRGAPLLLKAASRTVLDRWLR

SEQ ID NO: 207345 - protein, 40 aa, Zea mays
  Clone ID: MRT4577_120689C.1.pep
NVVRFKFYTPSYSKRTNFIPLILHFELPNQNQDPDETYRH

SEQ ID NO: 207346 - protein, 114 aa, Zea mays
  unsure (1)..(114): unsure at all Xaa locations
  Clone ID: MRT4577_12068C.1.pep
LLSVAVPCWFVPLSAPLFGLAFVVSXRVFSVCCLLRLLVGAFWAXVLGFPPLRLXLVXGLGVLGLLLASCVPCGXXVALASLAXCXXGFGGPLSWSPLLLCCSPWXXLSXLLVG

SEQ ID NO: 207347 - protein, 147 aa, Zea mays
  unsure (1)..(147): unsure at all Xaa locations
  Clone ID: MRT4577_120690C.1.pep
LLGEGGAFFDGHGPEGNPPGGXPLKXNGPNVAQGLGGFRAVTFYDFKGRFPPPLGPRVKASPSLGVPLFFPKRVRKKRIRLGVNNNLPLPPLGFFVAGAPPQRGLGKLWWLRKKKNPPPPVFFKLKVGPPWGGWWGFFAPISFWGKL

SEQ ID NO: 207348 - protein, 66 aa, Zea mays
  Clone ID: MRT4577_120691C.1.pep
RVHTSILSLDLDLQVSSIHAHFTRAIRGPISWHLTPYNSPPAHYVQTGNTQDPPVTIRHSPHTTFA

SEQ ID NO: 207349 - protein, 28 aa, Zea mays
  Clone ID: MRT4577_120692C.1.pep
MALAALLLLLLLSRSRLATCCFSCDALT

SEQ ID NO: 207350 - protein, 246 aa, Zea mays
  Clone ID: MRT4577_120693C.1.pep
SHWGCSDPQVVVLSKVEHPHIVRLIGVCPESCGLVYEHLPNGTLKDRLSKGLLWKDRVRILGELRSALAYLHSRRPHAIIHADVKLTNILLDAGNASRLGDFGTARAVHVKPLEEETIGRRTNPMGTAGYMDPVFFMTGELTTESDVYAFGMVILQMLTGLLDLNVAEQAREAVKMDAVHSVLDASAGPWPEVQAEKLMKLALRCCSLERRRRPAITSDAEWRSLDILRAMVNPASKSWKWNSHAS

SEQ ID NO: 207351 - protein, 53 aa, Zea mays
  Clone ID: MRT4577_120694C.1.pep
VGILGAIWGLLICCSDATTWSMAHVCSRVYGEVLQRQRYAQFDARQRVMAVEA

SEQ ID NO: 207352 - protein, 182 aa, Zea mays
  Clone ID: MRT4577_120695C.1.pep
CCRNNLYISRPLESQPVWHGMYRCIDGTKLATVCLPPPATGSALSSTQVRTERLQPFGHQPAPSIFLSLARAWPRNKGGAWRPPQHSPIKKAPPGPGPASRVRPNGGTTKRGRHEKGSSSQQGAPPVFSSISVLGESRRRRLRRRQRGQKWLRLAGGRESRQLHGRLVGRLMSTTWFGVPCC

SEQ ID NO: 207353 - protein, 106 aa, Zea mays
  unsure (1)..(106): unsure at all Xaa locations
  Clone ID: MRT4577_120696C.1.pep
LTPXSDVYAFGMVILQMLTGLLDLNVAEQAREAVKMDAVHSVLDASAGXWPEVQAKKLMKLALRCCSLERRRRPAITSDAEWRSLDILRAMVNPASKSWKWNSHAS

SEQ ID NO: 207354 - protein, 240 aa, Zea mays
  Clone ID: MRT4577_120697C.1.pep
TKPLVKNPLKWGDLINLEPEIEPWPEPRPQKDSSHFLKDLGNFFQENADQSDEIQNFRNISDKAEKIMEEIDRLQKKLKQLQGEERNHDERSLSPRQMAASLMRKTLSAYTELQIPENIEQFSMSQIEKATDNFHSRNFIGGGGYGPVYKGKVGSTSVAIKLLKPRGRQGFSEYQQEVVVLSKLEHPHIVRLIGVCPESCGLVYEHLPNGTLKDRLSKGLLWKDRVRILGELRSALAYLH

SEQ ID NO: 207355 - protein, 82 aa, Zea mays
  Clone ID: MRT4577_120698C.1.pep
SAGGPFFFFFFKKDWQGLIPTTSYISPNSEGCSWPLLVPNYTAHVRWHVGRQASRRSPSTYYQTLKKSSAGPVRGTRLHLAV

SEQ ID NO: 207356 - protein, 502 aa, Zea mays
  unsure (1)..(502): unsure at all Xaa locations
  Clone ID: MRT4577_120699C.1.pep
MTEVALLRGPTNLASTASRAPASPSPSPSSSSLRYLANADSDVLQGSGSPERTAGSAGSRRLLELRGQEAAEEEEERWSFLALLFELLRKSLLGCRTVGGGEGEHGGCGMEIGLPTDVQHVAHVTFDRFHGFLGLPVEFEPEVPRRAPSASASVFGVSTESMQCSYDSRGNSVPTILLMMQRCLYEQGGLQAEGIFRINAENSQEEFVRDQLNSGIVPDGIDVHCLAGLIKAWFREMPRGVLDSIPPEQVMQCQSEEDCAWVAKCLPLAEAALLDWAVNLMADVVQEEHINKMNDRNIAMVFAPNTTQMADPLTALMYAVQVMNFLKMLVQKTLKDREESTPEDALLPQKDPSDENGHQKPTVTLDSLLEEGSRRPSFAKEEPLLNSPGHSTDDKSNETNTDLGATAAFTAQTSEVATGXRTPLVVAHSLHLLAQLLSLMLPARQPQILSRQARXSRSLNRRRTRKGKGQSGTRTTPAAEKSRGASIVSRINSRVERIEAWR

SEQ ID NO: 207357 - protein, 279 aa, Zea mays
  Clone ID: MRT4577_12069C.1.pep
MVSSARALIGLLVAAASLAVALSDGGGMAAPVYGYAAGSPNGPENWGKLSPAYKLCGEGKQQSPIDIVTKQAVPAATLDTLNRTYGATNATLINDGHDITLALEGKVGTVTVNGKAYSFEKLHWHSPSDHTINGQRFPLELHLVHRSADGALAVIGILYQLGAPDSFYYQLKRQLGEMAQDRCDFAEEEESRVEAGLIHLRSLQKRTGSYFRYTGSLTVPPCTENVVWSVLGKVRQISQDQLQLLKAPLPGSDARPTQPLNGRTVQFYNPPNSTISFQI

SEQ ID NO: 207358 - protein, 35 aa, Zea mays
  unsure (1)..(35): unsure at all Xaa locations
  Clone ID: MRT4577_1206C.1.pep
VFFLLLRKGLCGIXLISLGPNLAGDPPHETGTMVH

SEQ ID NO: 207359 - protein, 94 aa, Zea mays
  Clone ID: MRT4577_120700C.1.pep
RRVTSLMSARFSSEHMHPIAHIMCIGIELCQCLFLVYRRMHICMIRLVDSSVVFGLQCWPSIHDCTCPKGQDKHPGTEPVVCLSKSARVGRQRR

SEQ ID NO: 207360 - protein, 74 aa, Zea mays
  unsure (1)..(74): unsure at all Xaa locations
  Clone ID: MRT4577_120701C.1.pep
GVTWSPREQLPPGILGPIKNKPFLLEDGRLLCXSSVESWNSWGAWLEVFRLLFDSIFASLCTPSVRMDSPCVVY

SEQ ID NO: 207361 - protein, 102 aa, Zea mays
  Clone ID: MRT4577_120702C.1.pep
KGGEGLLKNRGVKQETWGTPQLALFGGLALGQKKPKKNSLGLCGGPPKIPWGLILGNVPPRGDTKRVNYNTARGGSHSPYFPWLTGGTTGVLKPIGPPSFGF

SEQ ID NO: 207362 - protein, 58 aa, Zea mays
  Clone ID: MRT4577_120703C.1.pep
QQTFFFFFCTTLKCGRPPQGFDGGFIRGLFFHKKKFFFGGGFLGPFPKIMLKKTVLQF

SEQ ID NO: 207363 - protein, 230 aa, Zea mays
  Clone ID: MRT4577_120704C.1.pep
MSYFGPYQLVRNVLIDAWVTTNQREWVLTAVKLQRALTMEVDGPAVILRYRREIAPPEGLSMPESTNSHDHHSPAHPPNHTRKGRRMDEGRGGWLDEAMGRGWPREPARARSDTATPAATMWEKSEWRSCEGENAEALVYAGVRRRPGCNVLTTQATIVPPRAGFLLRLASLIGAAIFVEIGSASSEWVKKDDDWAPLVKEGPDTGAQSSQIGPRRELSGVGRGMVSNRI

SEQ ID NO: 207364 - protein, 68 aa, Zea mays
  Clone ID: MRT4577_120705C.1.pep
RLICFLPAKSLPPCFNKHDCAINWVWFALQKKKKKTETLRGHPRMEPNIARLAVPATLAGAQAWTTRT

SEQ ID NO: 207365 - protein, 110 aa, Zea mays
  Clone ID: MRT4577_120706C.1.pep
SAQHLGDLYRDFVKDFPIVSIEDPFDQDDWSSWASLQSSVDIQIVGVMVSHRSGETEDNFIADLAVGLASGQIKTGAPCRSERLAKYNQLLRIEEELGNVRYAGEAFRSP

SEQ ID NO: 207366 - protein, 192 aa, Zea mays
  unsure (1)..(192): unsure at all Xaa locations
  Clone ID: MRT4577_120707C.1.pep
VNPRLVLLPGSPPSASDTWPTRGNPTVEVDLVAGDGRLHRSAVPSGASTGIYEALELRDGDKAVYGGKGVLQAVRNINEVIAPKLIGVDVRNQSDVDAVMLDIDGTQNKSKLGANAILGVSLSVCRAGAGAKGVPLYKHIQELAGIKELVMPVPAFNVINGSSHAGNNLAMXEFMILPVGATTFAEALRMGS

SEQ ID NO: 207367 - protein, 529 aa, Zea mays
  unsure (1)..(529): unsure at all Xaa locations
  Clone ID: MRT4577_120708C.1.pep
MAHPHLVLPSPKSLLPAAATPSRRAVAIRAALSTALSPAKAAAGAEAVRSIRARQIVDSRGNPTVEVDLVAGDGRLHRSAVPSGASTGIYEALELRDGDKAVYGGKGVLQAVRNINEVIAPKLIGVDVRNQSDVDAVMLDIDGTQNKSKLGANAILGVSLSVCRAGAGAKGVPLYKHIQELAGIKELVMPVPAFNVINGGSHAGNNLAMQEFMILPVGATTFAEALRMGSEVYHVLKSIIKSKYGQDACNVGDEGGFAPNVQDNREGLILLMDAIEKAGYTGKIKIGMDVAASEFLTKDGNYDLNFKNQPNDGAHILSAQHLGDLYRDFVKDFPIVSIEDPFDQDDWSSWASLQSSVDIQIVGDDLLVTNPKRIADAIDKKACNALLLKVNHLLNNLKWSTIYPXFFCFLPVLNIMTAKQYLARDKLALQNXVFAKVGVPFSRXQIGTVTESIQAALDSKAAGWGVMVSHRSGETEDNFIADLAVGLASGQIKTGAPCRSERLAKYNQLLRIEEELGNVRYAGEAFRSP

SEQ ID NO: 207368 - protein, 84 aa, Zea mays
  Clone ID: MRT4577_120709C.1.pep
RHTHAVLEFCSVGRGPPHFVFFFWFLFFWFFSFGETLKFIQKVLQAFTNYKAFSSANEELIGILYSPPYGGKGTGIQAGPTIFF

SEQ ID NO: 207369 - protein, 278 aa, Zea mays
  Clone ID: MRT4577_12070C.1.pep
MVSSSRAVVVVVGLLVAASSLAVAASDGGGPTYGYTAGSPNGPENWGKLSPAYKLCGQGKQQSPIDIVTKQAVPNANLDTLNRTYAATAATLINDGHDITMTFEGKVGTVMVNGKAYSFEKMHWHSPSDHTINGQRFPLELHLVHRSADGALAVIGILYQLGAPDSFYYQLKRQLGEMAKDRCSFGEEESHEGVALIHLRSLQKRTGSYFRYTGSLTVPPCTENVVWSVLGKVRQISKEQLQLLKAPLPGNDARPTQPLNGRTVQFYNPPNSTVSFHM

SEQ ID NO: 207370 - protein, 144 aa, Zea mays
  unsure (1)..(144): unsure at all Xaa locations
  Clone ID: MRT4577_120710C.1.pep
MGKSKKGGGSSHHSGDKRKCEPTPPSEDFGDSKYSEEEFSSESEGSLAPASPRASSDDSDDSQGIAAEVCTYIRVVERARLEGSDESEYSSDEENSSDSSEEGSGGDGGDGDDDGGXGEGGGDSGKGGSGDGGGGSKGSSKASG

SEQ ID NO: 207371 - protein, 275 aa, Zea mays
  Clone ID: MRT4577_120711C.1.pep
PLPLRLVSTLSAYSTSPSPISSFLPTAAAPGPRNVGRRRHRRAKDVRALLGDDAVYEAAAAEAFPEYNKARLVSLELPDRSGDIIITTYGEIDKNNYLDPRTAQVATIDHMKQTCTKLRPAEDEELPSAYIEEFRCALDVELSKYVAEAYPKGTCAVYCTSGKDIEGPGADFSFAAVISATKRSPQNFCNGSWRSIWTMEFNYELQFVDIKGNIQVDAHYFEEGNVQLDTNIDRKDSTIMQSPDDCAVSITSIIRHHESEYLSSLEESYLNLSDA

SEQ ID NO: 207372 - protein, 120 aa, Zea mays
  Clone ID: MRT4577_120712C.1.pep
KKKKKKKKKKKKKKKKKKKKKKPKKKKKKKKNLFPWAGPPLGAILGVFLPPGGPSTFLLGAPFPPFGGPFTIPWPGFSTVLPGKPLGYPTLFPLKKIPFSPPGVLPLGPAPLPFPKICPP

SEQ ID NO: 207373 - protein, 74 aa, Zea mays
  unsure (1)..(74): unsure at all Xaa locations
  Clone ID: MRT4577_120713C.1.pep
GRVRGRVGPTRVQDGGRVESEHRGGQPMDDDIEPCKLAAQADARAMAIDEPSNVQNEPESXAKLHGQPDVVHKP

SEQ ID NO: 207374 - protein, 308 aa, Zea mays
  unsure (1)..(308): unsure at all Xaa locations
  Clone ID: MRT4577_120714C.1.pep
MSDEGGAGEPLSDRQKREIATWFLSNAPAGEIHYIAKDVRALLGNDAVYEAAAAEAFPEYNKARLVSIELPDRSGDIIISTYGEIDKNNYLDPRTAQVATIDHMKQTCTKLRPAEDEELPSAYIEEFRCALDVELSKYVSEAYPKGACAVYCTSGKDIEGPGADFSFAAVISAAKRSPQNFCNGSWCSVWTIEFNYELQFVDIKGKIQVXVDAHYFEEGNVQLDTNIDRKDSTRMQSPDDCAVSISGIIRHHESEYLSSLEESYLNLSDATFKDLRRKLPVTRTLFPWHNTLVFGLTRDLAKELALGK

SEQ ID NO: 207375 - protein, 238 aa, Zea mays
  unsure (1)..(238): unsure at all Xaa locations
  Clone ID: MRT4577_120715C.1.pep
MSDEGGTGEPLSDSQKREIAVWFLSNAPAGEIHYVAKDVRALLGDDAVYEAAAAEAFPEYNKARLVSLELPDRSGDIIITTYGEIDKNNYLDPRTAQVATIDHMKQALLLLLPSHDKXCTKLRPAEDEELPSAYIEEFRCALDVELSKYVAEAYPKGTCAVYCTSGKDIEGPGADFSFAAVISATKRSPQNFWYCLVHAFCLFLIPEEICHIFLNLAHMDQLGLLCIRKRLNFLTDPL

SEQ ID NO: 207376 - protein, 124 aa, Zea mays
  Clone ID: MRT4577_120716C.1.pep
EGRSVGRGLRSGSRGWWTVDLADCWVPASDRGRRRCYGLRASPVSQPAAASAEADLRRSSPATWILVRTSCRAAGILVPRLLVCAEKWSRERRRSRERRRKGAGAALGLGLWTCAFSVRRRGVW

SEQ ID NO: 207377 - protein, 213 aa, Zea mays
  Clone ID: MRT4577_120717C.1.pep
MATATMATAAGAAALLYYTLNRRLQTERLNKEGECSDSRDVTPRAAQGSPTRVRPRVRDVRAPATWLETISTLSETLRFTYSETLGKWPIGDLAFGISFLLKRQGNLSVASIYAGNDSVELKGAEVIADLKYLLNLLTLCWHFSKKPFPLFLEATGYTTEDVLMQEPKAGILKPAFTILLDRDKKSILLLIRGTHSIRDTLTAATGAGVPFHH

SEQ ID NO: 207378 - protein, 94 aa, Zea mays
  Clone ID: MRT4577_120718C.1.pep
CCSRVQGILSTCLSSLFTERQPTVFFGETPASQAIKSILVPFKKNLGTAPPIFLAQNQNGGGILCPPRRVWPFGRKRGKKKPCAYAVEGPRTRF

SEQ ID NO: 207379 - protein, 113 aa, Zea mays
  Clone ID: MRT4577_120719C.1.pep
NEPAKRLKATDTKDNEKPASESSGGDLSETSRPYLCTGFDIYLVWEPCTMCAMALVHHRFKRVFYAFPNPVAGALGGVYRLHGERSLNHHYNVFRVSVPEAYLNGLNCYSKEC

SEQ ID NO: 207380 - protein, 89 aa, Zea mays
  Clone ID: MRT4577_12071C.1.pep
HYCKGTGHRKHWDQTRGPPRGPRSARGQDHGHTDQGSALTAHWRRTARWDTTDLVSITPKEGLAHMALLTLKGSWPCMIKYGDQCRIKT

SEQ ID NO: 207381 - protein, 46 aa, Zea mays
  Clone ID: MRT4577_120720C.1.pep
ASCTQPGRLHHTHSRHACAGAMCSHQRARCTPTTEIAPGPHSDTHP

SEQ ID NO: 207382 - protein, 67 aa, Zea mays
  unsure (1)..(67): unsure at all Xaa locations
  Clone ID: MRT4577_120721C.1.pep
LTTNINNTPPNNLLIYYIYHICTSTSTPPQLNFXIHLIKVPNHNLLQLYFLHNPISHKKKNTPPPPL

SEQ ID NO: 207383 - protein, 86 aa, Zea mays
  Clone ID: MRT4577_120722C.1.pep
GDIATSGPIDYIEFIGATLPLNKLEREEHLVAAFWYFDKNGSGYIPVDELQQGCKEHNMPAAFFDDVIKKAAQDNVSILVSYVNLH

SEQ ID NO: 207384 - protein, 97 aa, Zea mays
  Clone ID: MRT4577_120723C.1.pep
AISCRVGVFYRPRQQVGNLWSMHAFVVIRGRCGCSCRASSASVRFCASERQTELRSFGVSELPMSLFGSLNASVDGILSILGDVAHSWLGRMDQLAG

SEQ ID NO: 207385 - protein, 82 aa, Zea mays
  Clone ID: MRT4577_120724C.1.pep
GGSTPNSNRPGGKNPKNRLGKMGEPGGKGSLPPPRGFKNFKMVKIFFFPIRRGVKSKGNLKGKTPISGFRGLGTPVPPPGRG

SEQ ID NO: 207386 - protein, 217 aa, Zea mays
  Clone ID: MRT4577_120725C.1.pep
MATTTRVAATAAGVLLVLSALATLARAEDPYLFFEWKVTYGTKSLLGVPQKVILINGEFPGPRINCSSNNNIVVNVFNQLDHPLLFTWNGMQHRKNSWMDGMPGTQCPILPNTNFTYKWQPKDQIGSFFYFPSIGMQRAAGGYGAISVVSRLLIPVPFDQPPPENDHVVLIGDWYTKDHEVLARRPTPPRAKTTKASFSPRGLTIQSKLKRTNTKEA

SEQ ID NO: 207387 - protein, 114 aa, Zea mays
  unsure (1)..(114): unsure at all Xaa locations
  Clone ID: MRT4577_120726C.1.pep
MATRELSSLMLLAXIAACLAYATLLPXMLTSSYSXMLDPYPPSMIATVCENPAIEPYRLQQAIXEADIHLSPLXFNNRHALSLEHTLVHTIMAHDFQHLVLPEINPVAVAKPSA

SEQ ID NO: 207388 - protein, 243 aa, Zea mays
  Clone ID: MRT4577_120727C.1.pep
GRAAGWAWSINQARSFRWNLTASAARPNPQGSYHYGQINITRTIKVMVSRGHIDGKLRYGFNGISHRDPETPVKLAEYFNVTDGVFSYNQMGDVPPAVNGPLHVIPDVITAEFRTFIEIVFENPEKSIDSLHVDGYAFFGVGMGPGKWSPEVRKTYNLLDTVSRHTIQVYPRSWTAIMLTFDNAGMWSVHSNIWERYYLGEQFYISVVSPARSLRDEYNMPDNALRCGKVVGLPLPPSYAPAR

SEQ ID NO: 207389 - protein, 249 aa, Zea mays
  unsure (1)..(249): unsure at all Xaa locations
  Clone ID: MRT4577_120728C.1.pep
PAKLPEGPSGWAWSINQCRSFRWNLTASAARPNPQGSYHYGQINITRTIKLAMGRGKVDGKERFGFNGVSHVDPETPVKLAEYFNVTDGVFSYNQMGDVPPXAVNGPLHVIPNVITAEFRTFIEIVFENPEKSIDSLHLDGYAFFGVGMGPGTWSPEMRKTYNLLDTVSRHTIQVYPRSWTAIMLTFDNAGMWSVRSNVWERYYLGEQFYISVISPARSLRDEYNMPDNALRCGKVVGLPLPPSYAPAR

SEQ ID NO: 207390 - protein, 308 aa, Zea mays
  Clone ID: MRT4577_120729C.1.pep
RPGCRTSYDSLDVHVGHCLSVLVDADQKPGDYYMVASTRFIHDAKSASAVIRYAGSSAPPSPNMTEPPAGWAWSINQARSFRWNLTASAARPNPQGSYHYGQINITRTIKVMVSRGHIDGKLRYGFNGISHRDPETPVKLAEYFNATDGVFSYNQMGDVPPAVNGPLHVIPNVITAEFRTFIEIVFENPEKSIDSLHVDGYAFFGVGMGPGKWSPEVRKTYNLLDTVSRHTIQVYPRSWTAIMLTFDNAGMWSVHSNIWERYYLGEQFYISVVSPARSLRDEYNMPDNALRCGKVVGLPLPPSYAPAR

SEQ ID NO: 207391 - protein, 126 aa, Zea mays
  unsure (1)..(126): unsure at all Xaa locations
  Clone ID: MRT4577_12072C.1.pep
VVVCFFFFFFFFFFFFFFFFFFFFXKKKTGFYPAHKKNKLGRWATQKKNFVAENALGQKGLHKPPHKKNLKSRFNTTFSPPPLKANKQQKGTKGTPPSPPPHWGRARKNPTPPPRGCGGQTGCLWA

SEQ ID NO: 207392 - protein, 171 aa, Zea mays
  unsure (1)..(171): unsure at all Xaa locations
  Clone ID: MRT4577_120730C.1.pep
GSSTIDDVDLFDEXTKDEKKDNKKSDTTTKASGKKKESGKSSVLRDVKPWDDETDMTKLEGAVTSVQMEGLLWGAYKLVPVGYGIKKLLIMMTIVYDHVSVDTLXLRNYMCDEPVIXFVQSFPPGAFNKILGVLSIESFQWGTGEGGGWAMHQPKFPTAICLLCGASNPPV

SEQ ID NO: 207393 - protein, 58 aa, Zea mays
  Clone ID: MRT4577_120731C.1.pep
GKIASWLVLSLRMVGLALVMDLVGMGMNKPLYMMRYTPVIVGGGGFFFGGIYVFVGPS

SEQ ID NO: 207394 - protein, 346 aa, Zea mays
  Clone ID: MRT4577_120732C.1.pep
FTFEAGKTYRLRVCNTGIKAGLNFRMQGHYMKLVELEGSHTLQNTYDSLDVHVGHCLSVLVDADQKPGDYYMVASTRFIHDAKSASAVIRYAGSSAPPSPNMTEPPAGWAWSINQARSFRWNLTASAARPNPQGSYHYGQINITRTIKVMVSRGHIDGKLRYGFNGISHRDTETPLKLAEYFNVTDGVFSYNQMGDVPPAVNGPLHVIPNVITAEFRTFIEIVFENPEKSIDSLHLDGYAFFGVGMGPGTWSPEMRKTYNLLDTVSRHTIQVYPRSWTAIMLTFDNAGMWSVRSNVWERYYLGEQFYISVISPARSLRDEYNMPDNALRCGKVVGLPLPPSYAPAR

SEQ ID NO: 207395 - protein, 559 aa, Zea mays
  Clone ID: MRT4577_120733C.1.pep
MATTTRVAAAATGVLLVLSALATLARAEDPYLFFEWKVTYGTKSLLGVPQKVILINGEFPGPRINCSSNNNIVVNVFNQLDHPLLFTWNGMQHRKNSWMDGMPGTQCPILPNTNFTYKWQPKDQIGSFFYFPSIGMQRAAGGYGAISVVSRLLIPVPFDQPPPENDHVVLIGDWYTKDHEVLARQIDAGKGVGRPAGVLINGKGGKDLEAAPAFTFEAGKTYRLRVCNTGIKASLNFRIQGHYMKLVELEGSHTLQNTYDSLDVHVGHCLSVLVDADQKPGDYYMVASTRFIHDAKSASAVIRYAGSSAPPAPNMTEPPAGWAWSINQARSFRWNLTASAARPNPQGSYHYGQINITRTIKVMVSRGHIDGKLRYGFNGISHRDPETPVKLAEYFNVTDGVFSYNQMGDVPPAVNGPLHVIPNVITAEFRTFIEIVFENPEKSIDSLHVDGYAFFGVGMGPGKWSPEVRKTYNLLDTVSRHTIQVYPRSWTAIMLTFDNAGMWSVHSNIWERYYLGEQFYISVVSPARSLRDEYNMPDNALRCGKVVGLPLPPSYAPAR

SEQ ID NO: 207396 - protein, 137 aa, Zea mays
  Clone ID: MRT4577_120734C.1.pep
SSYSSAPGSFGNQLGADGLQQQQMQLDAPHDSQNQQQQQQQMPMTYNQQHMMPQTQQQQQPAVKLENGGVLGGVKLEQQMGQPDQSVSTQMQRSSSGGVKLEPQLQALRSLGAVKMEHQSSDPSVVLQQQQHQQQRH

SEQ ID NO: 207397 - protein, 560 aa, Zea mays
  unsure (1)..(560): unsure at all Xaa locations
  Clone ID: MRT4577_120735C.1.pep
MATSTMRVAAGVLLVVSALATLARAEDPYLFFEWKVTYGTRSLLGVPQKVILINGEFPGPRINCSSNNNIVVNVFNQLDHPLLFTWNGMQHRKNSWMDGMPGTQCPIAPNTNFTYKWQPKDQIGSFFYFPSIGMQRAAGGYGAISVVSRLLIPVPFDQPPPESDHAVLIGDWYTKDHEVLARQLDAGKSVGRPAGVLINGKGGKDLEAAAPMLTFEAGKTYRLRVCNTGIKASLNFRIQGHDMKLVELEGSHTLQDVYDSLDVHVGHCLSVLVDADQAPGDYYMVASTRFIHDAKSASAVIRYAGSSGAPPAPNMTEPPAGWAWSINQARSFRWNLTASAARPNPQGSYHYGQINITRTIKVMVSRGHIDGKLRYGFNGISHRDTETPLKLAEYFNVTDGVFSYNQMGDVPPXAVNGPLHVIPNVITAEFRTFIEIVFENPEKSIDSLHLDGYAFFGVGMGPGTWSPEMRKTYNLLDTVSRHTIQVYPRSWTAIMLTFDNAGMWSVRSNVWERYYLGEQFYISVISPARSLRDEYNMPDNALRCGKVVGLPLPPSYAPAR

SEQ ID NO: 207398 - protein, 282 aa, Zea mays
  unsure (1)..(282): unsure at all Xaa locations
  Clone ID: MRT4577_120736C.1.pep
REGGGRERGRRGEERKERXRGRGGERKREGERRREEKREMGREENREEXREGKEGVKRVGEERERRREEGERXEERRREEEGKEEEERRRERXKREKEEKSRERKEREEEKRRRVEKGERESKEKVRERRKKEXKREENKGRXEGRKREGEERGKEIEKEEEXEREEKERVREEEKEEKEGKKRGKGGRKRREEGGRVRRRSKGREWAEGREEREVRREKERKRSERGEEGEGKERRSERXRERRRRRGRRRRRNEVREXEERGRRRGKKGERGRRGRGRGE

SEQ ID NO: 207399 - protein, 37 aa, Zea mays
  Clone ID: MRT4577_120737C.1.pep
TQTKNHQGCTNMKRTLNNFQLSIRDQAYHSFLRRYRS

SEQ ID NO: 207400 - protein, 40 aa, Zea mays
  Clone ID: MRT4577_120738C.1.pep
TKPTSYRYRELSTLRTHLTIQNLLTTSFFTKTSGALTTEG

SEQ ID NO: 207401 - protein, 67 aa, Zea mays
  Clone ID: MRT4577_120739C.1.pep
LGLVSIMGFHSPFFGTPPMLVKPLPKFKLWTVLYSSVILHNTKKPDRVRNKSVKKIENRFIRRNMSP

SEQ ID NO: 207402 - protein, 58 aa, Zea mays
  Clone ID: MRT4577_12073C.1.pep
GTSSRPGPTPRITKKQTIRPLERVEMRSRSWAETRNGLPDEDERQRREEPPTDASYGT

SEQ ID NO: 207403 - protein, 239 aa, Zea mays
  unsure (1)..(239): unsure at all Xaa locations
  Clone ID: MRT4577_120740C.1.pep
GPTASYFAKKPPQTLEKLLQKMDEYIRADNDFRQRREEAYRYSKMTRGFGGRFYSMHVRTIHNPSXSEDRGNHTQGHQHSSQSSGTQHSSFRRPAPRGRGGRSFGGRFSLQPRRLFCLFCGEXGHTTRTCQVTIQKQNEIAEAEARQNQPKQVLHTTSCYSPYISEYVGNQQPTVSVASASHYPAAWALPPPPPPIMAPTSSRNQQPEGHRQIQQQCDAREESEARTVNNTIPESRHIY

SEQ ID NO: 207404 - protein, 260 aa, Zea mays
  Clone ID: MRT4577_120741C.1.pep
MPPERTRKSRTEELWEREVGGLPPKRFANSVMASKEFVQSLNIQKRLRKHRSCVNTISFSADGRLLLSGSDDRTLVLWDWEEAAPALSLHTGFSSNVYHALFMPVSGDRSIVSCAAEGDVIHSQIQEGGRVVTHTHKLVELGFAVHRLAVEPASPHTFYCCCQDSSVWLFDLRARNAMELFKCRAANYHTAENIALYAISLDPRKPCCFAVAGSDQYVRIYDTRKIFVDGNSSFSRPTEHFCPPHLIGRVEEEITGLAYS

SEQ ID NO: 207405 - protein, 361 aa, Zea mays
  Clone ID: MRT4577_120742C.1.pep
MADFRTSTQRERWIFQSHDLYGTTRLNVDLLDGSVSYPESMPDHVEGSSVVKPLSYEEEQLTRVFYEQKIQEVCAAFKFPHKIQATAIIYFKRFYLQWSVMEHQPKHIMLTCVYASCKVEENHVSAEELGKGIQQDHQIILNNEMILLKTLDFDLIVYAPYRSIEGFIDDLEDFCRAGNGPFQRLKCAQTEVNHVQQQQSSLVLNKLGPTFYTIQHSMCHIFVGQHSTPYNIAWVELRQAAISHVDKMMLTDAPLLYTPGQLALAALHKSNDLLRVVDFERYLEIIFSRQHSDCPIEQFVQSINEINYLVDQLNIPTVKDMRHVDRKLKHCWDPSSHDEHNKKKEKKSKHKSKRTSTDAQL

SEQ ID NO: 207406 - protein, 94 aa, Zea mays
  Clone ID: MRT4577_120743C.1.pep
LYQPLNTLAHRICPAFNVARSEQKPVSHVLRTSHWDRAESPHQVLYDRSVNSLPTSLALSECLVVCVKPLQRAYSHSVHVPPLVHRVLEKSYIF

SEQ ID NO: 207407 - protein, 329 aa, Zea mays
  Clone ID: MRT4577_120744C.1.pep
MADFRTSTQRERWIFQSHDLMERWAAANQRAAQTLAQYGTTRLNVDLLDGSVSYPESMPDHVEGSSVVKPLSYEEEQLTRVFYEQKIQEVCAAFKFPHKIQATAIIYFKRFYLQWSVMEHQPKHIMLTCVYASCKVEENHVSAEELGKGIQQDHQIILNNEMILLKTLDFDLIVYAPYRSIEGFIDDLEDFCRAGNGPFQRLKELRQAAISHVDKMMLTDAPLLYTPGQLALAALHKSNDLLRVVDFERYLEIIFSRQHSDCPIEQFVQSINEINYLVDQLNIPTVKDMRHVDRKLKHCWDPSSHDEHNKKKEKKSKHKSKRTSTDAQL

SEQ ID NO: 207408 - protein, 133 aa, Zea mays
  Clone ID: MRT4577_120745C.1.pep
RLDLSNNFISGSIPDSLSRMENLEVLDLSSNNLSGVIPSSLTELTFLSKFSVAHNHLVGQIPSGGQFLTFSNSSFEGNPALCRSSSCNHLILSSATPNDTDIKPAPRMTNKKNKILGVAICIGLALAVFLAGI

SEQ ID NO: 207409 - protein, 191 aa, Zea mays
  unsure (1)..(191): unsure at all Xaa locations
  Clone ID: MRT4577_120746C.1.pep
LCTSTLLLSLILRLRLIHPRQGSTCSDSQEHHFESKADAAACKTYPQQAGTXIRKNGFIAIENRPXKVDASDSXTSKTDRHDHAICHFVAIHIFHAKKLEDIVPXSSHNWDLPHVNRTEYQLIDISEDGFASHLTSDDNTKDDLRLPXDGDLLTCPTSXEGFESEKDLVVTVQSRXMHEEHICAWNDDGPQ

SEQ ID NO: 207410 - protein, 208 aa, Zea mays
  unsure (1)..(208): unsure at all Xaa locations
  Clone ID: MRT4577_120747C.1.pep
MASSQLTKSVIEAIKERRTYYQLNKEAPISDKKIQELVEQALLHVPSSFNSQSTRLVVLLNKDHEQFWDYVIEVLKPLTPEDKFDGTKQKINSFRAAYGTVLFYEAPEPVENLRKAFPLYAHHFGDWSEHTNAMHQYALWVALEAEGFGANLQHYNXIIDQKAAEHWSIPLEWKLRSQLVFGGRAGEPGEKQFQKTFGERLFVHGSKE

SEQ ID NO: 207411 - protein, 103 aa, Zea mays
  unsure (1)..(103): unsure at all Xaa locations
  Clone ID: MRT4577_120748C.1.pep
MAPWSGFWGGKPGGDAYRGTPVVVKMENPNWSISEISSPEDDDEDILAAAAAGRRNKGGRTKNAKQIRWVLLLKAHRAAGCLASLXSAAVALGGAARRRVAAG

SEQ ID NO: 207412 - protein, 83 aa, Zea mays
  Clone ID: MRT4577_120749C.1.pep
KTVNSVSSQVFVGSALCHFPIRSISFDPLGICGPGTRLCTFFFFRNSPGGLRPHIYEYPPIKGHNDDIHRSINGTGLCAMYHV

SEQ ID NO: 207413 - protein, 99 aa, Zea mays
  Clone ID: MRT4577_12074C.1.pep
KVVVIDFPATWCPQGGARAPIWGGTAKKSPKVVFLKVHVDGMKTTAEPFSVEAKPAFLFMREGNVGARVVGAAKEGPPRRLDLHGASETSDAVMPPSPQ

SEQ ID NO: 207414 - protein, 111 aa, Zea mays
  unsure (1)..(111): unsure at all Xaa locations
  Clone ID: MRT4577_120750C.1.pep
SDVKRSGEFTIALDLETRAGVRVGALKTKKIGILVHCDGVKVAAPAPAAPAKSKKKLAKAAVAAAVAPAADAPAPAASAAVDDAPAPPAAATSVARVCQVRIRVKXWKWTX

SEQ ID NO: 207415 - protein, 49 aa, Zea mays
  Clone ID: MRT4577_120751C.1.pep
ILLFYILFAFSYFLRIYLKKLSYWVKRFMQSIVKFLELHFWKGDVNILS

SEQ ID NO: 207416 - protein, 78 aa, Zea mays
  unsure (1)..(78): unsure at all Xaa locations
  Clone ID: MRT4577_120752C.1.pep
SHGESTTEDSCLLKHKIDEESKGDEQQELGVTVDDDLVHEDTLETDNAIEHTDDGQHDQDQRTLKGKRGHKTCKHRXQ

SEQ ID NO: 207417 - protein, 101 aa, Zea mays
  Clone ID: MRT4577_120753C.1.pep
EKREGADRLLKLQNERGGRALFQDVQKPSQDEWGKTLEAMEAALALEKNLNQALLDLHALGSARTDPHLCDFLESHFLDKEVKLIQKMGNHLTNLRRVAGP

SEQ ID NO: 207418 - protein, 478 aa, Zea mays
  unsure (1)..(478): unsure at all Xaa locations
  Clone ID: MRT4577_120754C.1.pep
RTYTRVTEPRGQPTHGIAGTTQSKTPFVRLSFSRSTPEENGLLRWRRGLRSPPPFPAPPVRRGQRRPCLEREARGGGGKAGPPGPQPGEGGQGPRRRRGGRPAPRRLPVRQARGQARRWVPREGRGVPPPVRPQGRGRRQASGGRXEGKYGKNPGGGHGGGXGMRRRXGYKKKPSGGRYEEDEYKKKPGGGSGMEVGRYEEEEGYKKKPGSGGYGGGKYEDEDDYRKKPSSGSYGGGRYEDEDDYKKKPTSGGYGGGRYEQEDNYKKPTGGGFGDGRYEQEDEYKRPLSGGGSSYGGGRYEDDEYRKKPSGGGYGGGRYEDEDDYRKKPSAGGYGGGGRYEDEYSKKPAGGHGGGRYEEDDEYRKPSGGGYGYGASSGGGHGGRYEEEDYKKKPSGHSGGRYEEEEGNKKASGYSGGKYGKEEDDKKKKHGEDGSESGGIGDYLKLAQGFMKKQDGEGDSGGGMGDYLKLAEGFLKKR

SEQ ID NO: 207419 - protein, 88 aa, Zea mays
  unsure (1)..(88): unsure at all Xaa locations
  Clone ID: MRT4577_120755C.1.pep
QCSHYVPVYIPENTDLTSVLNCLGNYLCLSNSIXKPLLYLSLNITLXFTLDFTGLGLSGHDYDSLNWHEKEYLKCALSCLPDNKHVYT

SEQ ID NO: 207420 - protein, 51 aa, Zea mays
  unsure (1)..(51): unsure at all Xaa locations
  Clone ID: MRT4577_120756C.1.pep
SXFXRSSASXLSLXRXEVXXLVXXLSXAPRSTNGSGTQAPQAPVSRKRVVS

SEQ ID NO: 207421 - protein, 140 aa, Zea mays
  Clone ID: MRT4577_120757C.1.pep
TVGYIIADANGGLNQMRLGISDMVAVAKLMNATLVIPTLDHKSFWTDPSDFKDIFDVQHFKQTLEDDIMVVDSLPPDFKRFKPYTRAPKSWARASYYRAFTRILKKAKVVRFTHTDSRIANNGLPPSIPRLRCRANYEAL

SEQ ID NO: 207422 - protein, 32 aa, Zea mays
  Clone ID: MRT4577_120758C.1.pep
HTQTYICLAFPRIKQESAKKNKSVIRNPCKMD

SEQ ID NO: 207423 - protein, 110 aa, Zea mays
  unsure (1)..(110): unsure at all Xaa locations
  Clone ID: MRT4577_120759C.1.pep
GRHVRILQNRPFERPPGQVKLFFFXFFYFYWFFFFFFFFFFLKKEQGKPVIMKKTRHPPRPVNPTWGAAAPTPQRAKPTTLAAGTRGPPPRPKLGGKTGKGGTRGKGETP

SEQ ID NO: 207424 - protein, 88 aa, Zea mays
  Clone ID: MRT4577_12075C.1.pep
TCDCRVRLPCRRRCRQPVAVSVAVTATAAVGNRDRGLLHEHGAGRAPAIRRGVQLRRRPRPPAGGALRVGAAAADGGSEVVNPSQSVR

SEQ ID NO: 207425 - protein, 67 aa, Zea mays
  Clone ID: MRT4577_120760C.1.pep
SRLVPEARAMWGLKYKWWAQTGCGTRHAWLESDAKGLSGMKSLAVAPLFLTSLVACFMIILAVFYSC

SEQ ID NO: 207426 - protein, 48 aa, Zea mays
  Clone ID: MRT4577_120761C.1.pep
IRCKHQRNLMVSVNSAFFTTSDCSLRIIRQEACCCISLRRAANVLDVF

SEQ ID NO: 207427 - protein, 71 aa, Zea mays
  Clone ID: MRT4577_120762C.1.pep
MMKSMVENGAKQGLKDNYVQFSELLAKNFRPVDAKDTTYSNEVLSSVQPEQESDWKLAFRVFGNFTLFSSV

SEQ ID NO: 207428 - protein, 107 aa, Zea mays
  unsure (1)..(107): unsure at all Xaa locations
  Clone ID: MRT4577_120763C.1.pep
DAWXKKSMSSFPRRACQYSIGTACLAPATATVASAAGTSGPRVSTHLSTGARASPPSMSRPSHSFSSTASSGGPPVSPLSCICFASHFEQVQRWTLAHQRKTRRQIF

SEQ ID NO: 207429 - protein, 73 aa, Zea mays
  Clone ID: MRT4577_120764C.1.pep
TAWWRWEHSDHLGGLVGDPARDCKRSCGIHRAGVAKDHLIVSIWFLRGLGNSADSSIPQEKIEPSKLCFTFRT

SEQ ID NO: 207430 - protein, 48 aa, Zea mays
  Clone ID: MRT4577_120765C.1.pep
AERGFYHFEVLEKRAAYFSCSRLDIQTKTYGAPRFGYCHVVRFTFKIV

SEQ ID NO: 207431 - protein, 48 aa, Zea mays
  Clone ID: MRT4577_120766C.1.pep
KVSSKSLHKAIPLYAGLRLLKLGRFMMWSFFMAKLDLLTCGDGNNQET

SEQ ID NO: 207432 - protein, 84 aa, Zea mays
  unsure (1)..(84): unsure at all Xaa locations
  Clone ID: MRT4577_120767C.1.pep
TGXGPRXLKLEXCKEGTGXXTXTFXFFXXVLXWASNRDMVVPXIKLXXGAPSNLFLXXXVCKXLNFSKCLPLXERXQXRHQXXL

SEQ ID NO: 207433 - protein, 116 aa, Zea mays
  Clone ID: MRT4577_120768C.1.pep
VDSLLDIMKTSRKPQYKMAPELPLILQSCLSHASDFMCSADASRSLTEHLNDEYRHHMLQAEIFHIASSCLPFPEPNSSETPQKKRNHIPLLSRETEPSYEERISKVKAKLADNLK

SEQ ID NO: 207434 - protein, 83 aa, Zea mays
  Clone ID: MRT4577_120769C.1.pep
YVSKYMYILYTHTYRERETTRRRRIGDATASKQTPELYRTCATEAADAARRMMRYSRVGGTGLGQQAAEVHAVGDRRRGTELI

SEQ ID NO: 207435 - protein, 50 aa, Zea mays
  unsure (1)..(50): unsure at all Xaa locations
  Clone ID: MRT4577_12076C.1.pep
VCIVIVLFCQNIQPXTISLYIYKLYFSFKQIVLIPISMLSFTNLPLHNSS

SEQ ID NO: 207436 - protein, 66 aa, Zea mays
  Clone ID: MRT4577_120770C.1.pep
LITAPRRHPRACRPFFSIPSFLLARSSCAYKRTYTGSALPAYPPLPLVASCFGASRFKSEASNGDC

SEQ ID NO: 207437 - protein, 80 aa, Zea mays
  unsure (1)..(80): unsure at all Xaa locations
  Clone ID: MRT4577_120771C.1.pep
MGDDIKTTLETLMANMQTLQSIVQANAAAIQTLANRSSSSSNGPRPGTGDHHNDRPPQFQKMDLSRYDGKSNPXIFINRW

SEQ ID NO: 207438 - protein, 71 aa, Zea mays
  unsure (1)..(71): unsure at all Xaa locations
  Clone ID: MRT4577_120772C.1.pep
MEALTVPVINCNIFTGLFFSIIAQELFHFPSPPSDTSQLWLWVATXHATVHLXLSFGQISFKVRTDDYFDN

SEQ ID NO: 207439 - protein, 43 aa, Zea mays
  Clone ID: MRT4577_120773C.1.pep
FFLTKLGASLVKKKKKKKKKKKKKKKKKKKKKKKKKKKKKKPP

SEQ ID NO: 207440 - protein, 90 aa, Zea mays
  Clone ID: MRT4577_120774C.1.pep
TNVHIIPRDNEAAQPFHTTFTHIINRHKDADHPDRGIQYIHVYQRRKHKLRHANYSARINQSTSTHAHTILPVIGRAKRRRRYRALQGLG

SEQ ID NO: 207441 - protein, 641 aa, Zea mays
  unsure (1)..(641): unsure at all Xaa locations
  Clone ID: MRT4577_120775C.1.pep
NFRGLTDGSMKDQIIGLLLEVLSRCSWLGCTKLCSCPIVITSYLRVLDLMLDVARTGKSRHTEVIQALLLELTSQCLSNTASTQYAFHDPTRIELKQQATESFLSCVGLSKKTDETNDDDVQLQILGESTLDISKVDYSLHEVHKEILSCLTDPSYDVRITVLKRILWLTKSIRHGYADNILHQWAGVNLQPALMERLFVEEHPKCLYYNLKIIFSWNMEFPFNNGEDSSTLLSLWDRLVHLNSTMSHAKTREIVLCCMGMCMKLFTKQSRGGISMDCLKTSEXLHPLSESMKGMDYLMPCLXNLFVTLVKNQSEPSESMNARRAAAEAIVASGLLEEASYVASSVSNMYSPSEFDEDHTKEKCMEDSVFEFVSLYTCKILDLWFVCIQLLEDEDAYLRQKLAKDIQKIIAKGSANTFCVSEYPPQVDRVIELSLDYLTSLFGLWLKYVEFLLRIVLGTGNALNSRGDLVRQIFDKEIDNHHEEKLLICQICCSNIQKLLNSKCQMEAGAETKLFLQNWREIFLKQLTSLTGGYIEKEGKNDWIGGIGNPKDVFISVYAVLLGLYALTQSGSLDQLEDHCAVYLQEFANLERSITPFLKNPLISNLYALVKLSHERFISSDKPEDQVGDSGSSFDPYFLIR

SEQ ID NO: 207442 - protein, 80 aa, Zea mays
  unsure (1)..(80): unsure at all Xaa locations
  Clone ID: MRT4577_120777C.1.pep
ITVNQAQXXGGGGGGGGYCGGRGCXXXGGXRRDCGYGGGGGYGGRRECGGGCYXGGGGYCGRRXGGGGGYCGCGCSGWRD

SEQ ID NO: 207443 - protein, 75 aa, Zea mays
  Clone ID: MRT4577_120778C.1.pep
TLHGNKRGPKRIMLAVQTGFKFFFAYKTGAKFLPDRQTTTGPPAGGTFGRDQWLKPFPCSTGRTTLLHEQKTNLP

SEQ ID NO: 207444 - protein, 70 aa, Zea mays
  unsure (1)..(70): unsure at all Xaa locations
  Clone ID: MRT4577_120779C.1.pep
EEAVRSVHIEGLLWGASKLVPVAYGTQKMXIMIXIVGPYVSVGTVTGDYLCDDSINEYEPSCGIVAFNKI

SEQ ID NO: 207445 - protein, 110 aa, Zea mays
  unsure (1)..(110): unsure at all Xaa locations
  Clone ID: MRT4577_12077C.1.pep
ISLYSCLXXSDWGGGGGLRLRSGRRSRPLRSRSDRWSCLCTWFIDVIPRLLTVFVSYATRTGRGGGGXXQAXWGTHKRGLERRRMRQRPCRIGPRCGSGDTVILLHVRPT

SEQ ID NO: 207446 - protein, 260 aa, Zea mays
  unsure (1)..(260): unsure at all Xaa locations
  Clone ID: MRT4577_120780C.1.pep
PALPCRQSPPVVGSQCCPPAAAVSASSPSPSLSATSXAVSTTTTTTSDAAAXTPLSSTWNPPARSPPPPPPALRTPSASPPRSPPRRPTPSSTSSAGMASPTPRYPPPSASSPSSSSPTPSRHSSPSSTSSPPSASTRRSSPGSSPSAPSSSTAASRTTSPRSSDLSASSSVPMPASSPRSARCRSLSAAAPTVPSTSCSXAXEMSTACPRRTSPSSSPSTPASSCRAPTAWXRLSRPSRTSASKPASPCSSTHLPSFPD

SEQ ID NO: 207447 - protein, 57 aa, Zea mays
  Clone ID: MRT4577_120781C.1.pep
KKAPKRPNGERYKNVLYVLQILFIFFIIFILFFFFFYFLFFFFFFFFFFFFFFFFFF

SEQ ID NO: 207448 - protein, 89 aa, Zea mays
  unsure (1)..(89): unsure at all Xaa locations
  Clone ID: MRT4577_120782C.1.pep
SDTPDEAAEMLADIKAXAWKPAELDGDVVAVPKKRDSDEARIWKEFILSPTRAMRRIHLSGIGMHFFHQGSGIDAVVLYSPRVFKAAGI

SEQ ID NO: 207449 - protein, 63 aa, Zea mays
  Clone ID: MRT4577_120783C.1.pep
PKPLWGGPGDNLKRGRQRNHNLVTKLARSLLLLKVWIINRDVMTGISFLILLLACLSIYVIIN

SEQ ID NO: 207450 - protein, 66 aa, Zea mays
  Clone ID: MRT4577_120784C.1.pep
VIPPGGCLISWFHGDPPNGPVGAHPCLGSFTILGCSWLMFPLDIYVKGPALPLFGSSGEKVNIIQY

SEQ ID NO: 207451 - protein, 516 aa, Zea mays
  unsure (1)..(516): unsure at all Xaa locations
  Clone ID: MRT4577_120785C.1.pep
METSAPPNAPAPPAQXHGGGCXDFQQSVRLKYVKLGYHYLISHGMYLLLSPLMALVAVQLSTVSPHDLADLWEQLRFNLLSVVACSTLLVFLSTVYFLTRPRPVYLLDFACYKPESERKCTRETFMHCSKLTGSFTDENLEFQRKILERSGLGEDTYLPPAVLRVPPNPCMDEARKEARAVMFGAIDQLLEKTGVRPKDIGVLVVNCSLFNPTPSLSAMVVNHYKLRGNIVSYNLGGMGCSAGLLSIDLAKDLLQVHPNSYALVISMENITLNWYFGNNRSMLVSNCLFRMGGAAILLSNRRSDRRRSKYELVHTVRTHKGADDKCFGCVTQEEDEIGKIGVSLSKDLMAVAGDALKTNITTLGPLVLPLSEQLLFMGTLIAKKVLKMKIKPYIPDFKLAFEHFCIHAGGRAVLDELEKNLELTDWHMEPSRMTLYRFGNTSSSSLWYELAYTEAKGRIRKRDRIWQIAFGSGFKCNSAVWKALRTVNPAKEKSPWMDEIDNFPVDVPKISKVGGA

SEQ ID NO: 207452 - protein, 83 aa, Zea mays
  Clone ID: MRT4577_120786C.1.pep
SFFFHVKICKCTCAFVVAHMHHREHFMIEVHQMSNLKEGTTNHVLLVADRWVCQSELDIGHQDPVGGRVAERGDGRVGGRLGR

SEQ ID NO: 207453 - protein, 87 aa, Zea mays
  unsure (1)..(87): unsure at all Xaa locations
  Clone ID: MRT4577_120787C.1.pep
SEKKNSSGXYAAQFKARGFAKTRCSSKKXAPFPSIAMXXXVERXRGLSILPXKRXXXXKKKRSPPPRXVXXXKKKKKKICLQYLFLV

SEQ ID NO: 207454 - protein, 131 aa, Zea mays
  Clone ID: MRT4577_120788C.1.pep
GGKTIFGVKFPKLLGPWGGFKTFPHFQGGEPPPLFKKKLAPPPTLFLGGGQLPPYPFLALRSFSGPPFLLGGFGFKLGPKLGGVFPPGPTGTICPKTPPARAFGPFWGPLESPKKLWAFKNARGPRGGPPP

SEQ ID NO: 207455 - protein, 154 aa, Zea mays
  Clone ID: MRT4577_120789C.1.pep
MFCFYGERLPSQRKFNFPAAPRPAIPDHLRARLTVANIKAIAADYGRSCAAFFLAPAQLCPSAPAAAAASTTPPLMVVPPATESAAAAASRAEEAVVSTTTDHVVPAAAGNAGNHVDGGFMETADCLLSCNPDDFVGVLEDMDDVDLFIGQQHN

SEQ ID NO: 207456 - protein, 148 aa, Zea mays
  Clone ID: MRT4577_12078C.1.pep
PPAFSCPIPPPPTPSSPSPHAAGCRALSSAISLNILPPENAICSVVPNLRLRSGRRSRPLRSRSDRWSCLCTWFIDVIPRLLTATGSYATRTGQGSRGWVQAVWGRSTSCCPPSRPAARGLISLVVRVRHSLLPALLSYACSIPSRDA

SEQ ID NO: 207457 - protein, 39 aa, Zea mays
  unsure (1)..(39): unsure at all Xaa locations
  Clone ID: MRT4577_120790C.1.pep
VRSSGLSGGGGGFRRACGESPARSSTSPIRAVGLGFXIR

SEQ ID NO: 207458 - protein, 308 aa, Zea mays
  unsure (1)..(308): unsure at all Xaa locations
  Clone ID: MRT4577_120791C.1.pep
PTRSSSSSSSDLRFIHTHRIPFFSLSGEGRRVERRASGPSDTTGIXPRCPPXCPPPLPXPXXTXEGGGSXSLPPPXXXPXXLPPXXXXXPPXPXXXPXTPXPPXPPPPXXXHPPPPPPPXPXPPPXXXXPPPPPPXPPPXXXPPPPPPPHPPPPPPPTPPPPXXXXPFLXXPXPXXSPPPPPPPPPPPPLPPTLPPPPPXXXXPPXXPTQPPXXPPPPPPXXPPSHPPNNPXPPHPXPPPPPHPTXPPQXXPPPTPPXPTPPPNHXTPXXPPPPHDXPHTXQNTQQPPPPSKHPTPPTKPTHPPPRRP

SEQ ID NO: 207459 - protein, 64 aa, Zea mays
  Clone ID: MRT4577_120792C.1.pep
GYPPPPPLKAPTTKCIVQKSRVVRAPKGSRVVKSGWGSSTAPGAPVGGHVVLVMSRRWGFRPGT

SEQ ID NO: 207460 - protein, 73 aa, Zea mays
  Clone ID: MRT4577_120793C.1.pep
NKSLKQEKIPEWIPGPRGRQDHCINQKLGSSPKKKNSLKPSQIFCCVVGANPTCTGNPGLDPQFLRRLQSDPW

SEQ ID NO: 207461 - protein, 101 aa, Zea mays
  unsure (1)..(101): unsure at all Xaa locations
  Clone ID: MRT4577_120794C.1.pep
MNHPDMGVKLTRLHRLLERLDASLSFHLNELIPLFCTDVHQGKGMLRAXSLLAXFDALFDKRQGTNHAPFEHILRAAQEALVLHPWRAVAIRARPGVWDYI

SEQ ID NO: 207462 - protein, 109 aa, Zea mays
  unsure (1)..(109): unsure at all Xaa locations
  Clone ID: MRT4577_120795C.1.pep
GRWADAWAKAELEAKSLEFEQELTRAGAENDALXRALQERAELPMKTDEEKAQAEAEIETLKSTTQSGERETNPLKHEPHVASKELDIRNEEQNMSVRSADXVATKQHQ

SEQ ID NO: 207463 - protein, 77 aa, Zea mays
  Clone ID: MRT4577_120796C.1.pep
FFIHRVIRPLRKTITPERPEVTDQASPIRVPRSTAGKQSFIEYAVDPHEHGDVLKDNEIVERFRTEARVLNGLRIIA

SEQ ID NO: 207464 - protein, 137 aa, Zea mays
  Clone ID: MRT4577_120797C.1.pep
MRRAVEAARAAEADGMLAVSVLPGFSLADIPAPCISVVVVADGDRAAADAVAERIARQIWDERDAFVYRSAPLAESVAQAAALARGADRPVLMLDHGDNCMSGGPCDTMDLLEAALAHGLDGIVSGPLCDPQAVAAL

SEQ ID NO: 207465 - protein, 142 aa, Zea mays
  Clone ID: MRT4577_120798C.1.pep
MQHILLQCVFAREVWFHTLSLIGLQCLTPGTAESSFQDWWHRSGTKIQKAQKKGFNSVVILVAWWLWKHRNSCVFDGATPDISKITQDIRDDAKMWCLAGLAACRAERFVALTHGEFRPGRLLYSHLCNIPLSNFVTIFIWW

SEQ ID NO: 207466 - protein, 42 aa, Zea mays
  Clone ID: MRT4577_120799C.1.pep
VFTCVYRKEDYIFCNHEEENTLGSDYVLCNWHSSMLLKTGKK

SEQ ID NO: 207467 - protein, 68 aa, Zea mays
  Clone ID: MRT4577_12079C.1.pep
AQSVSGRQKVNCRWKADSVCFNINKIFFGTLSFTVFYYPIQSVVILSFFLFRWWRCMLVSFPLHISFY

SEQ ID NO: 207468 - protein, 109 aa, Zea mays
  Clone ID: MRT4577_1207C.1.pep
FPPRVGPTPRGGFFFSGLGARKLLTPNLGALFWSKFPVWGFPPLGLNGPKEPLRAGIFTLSFFGPQPKKICLSLTGRPGIFRKFKGPRFFTGGSSQKKGGFFFEKFKFV

SEQ ID NO: 207469 - protein, 106 aa, Zea mays
  unsure (1)..(106): unsure at all Xaa locations
  Clone ID: MRT4577_120800C.1.pep
DQIMIPYRRVARHLSALPTDRAQLPSSKRIIDLTLTYKCTLADDTELXPXVALLHNRLYENKLQSQFXSISDTYERXIYSSGDEYPSDLRLAIGVYTLQLYIWHEH

SEQ ID NO: 207470 - protein, 73 aa, Zea mays
  Clone ID: MRT4577_120801C.1.pep
RKRDNRPMRVGRGSLRILSIPAMPSSPDTRSTPHHRDLTNLLLACWGAPGVIRGQEAAAAGAPGDVGARPPAC

SEQ ID NO: 207471 - protein, 583 aa, Zea mays
  Clone ID: MRT4577_120802C.1.pep
MDAGDTMERGVRAVLRPKLLALPSGLTRSISMGTPRLPTPCTPRSPFLITPHRLASFTPDRQRSIGARSHGDMEKTQGPETQDGDLQVPLLDDKNCAGSKAPLVVLGFECLESTAFNGISTNLVMYLETVLHGSNVASASNVTLWFGTSYLTPVFGAIIADAFWGNYNTILVSLAIYLLGMILVTLSAFLPTDTVLGGSSVFGAHTVAFVGLYLVAIGSGGVRSSLLTFGAEQFDDDNAADRENKLSFFSWFYLCVDFGPIVSGLFIVWIQENISWGLGFGISTACIALALGAFVLATPMYKRSTPTAGKASVISDSETGLEAISEEAGSSQKLRAATKAEEFKTLLGLLPIWATSIIVSSAYTQMNTTFIQQGSAMNVSVLSVQVPPASMGSFEVVCVLIWVLLYGHVIVPALRGCGFSFGGDGEPSQLQRMGAGRLLMALAMAVAALVEMKRLGSAARGEEITIAWQIPQYFFLAGAEVLCYIAQLEFFYEEAPETMKSTCTSLALLTIALGSYLSSFIYAIVAAFTATADSPGWISDNLNQGHLDYFFWTMAAISTLNFVVYSVFARNYKPKSQDYALMT

SEQ ID NO: 207472 - protein, 53 aa, Zea mays
  Clone ID: MRT4577_120803C.1.pep
VLTIDDSITRKTIRLSACSHVTPDAPGYMMLYRQQNVSLQDRVDLSISNQQFG

SEQ ID NO: 207473 - protein, 70 aa, Zea mays
  Clone ID: MRT4577_120804C.1.pep
ELNKVFSQKLEVQTQRLELLTSQRMANENALAKPIDTRPINEATMYADEGDEVSVLHQVFRWNLVVDPTT

SEQ ID NO: 207474 - protein, 79 aa, Zea mays
  Clone ID: MRT4577_120805C.1.pep
STCCCAFGFKNVCLVWGCCPVEGATCCKDHASCCPPGYPVCNVRAGTCSVVNSLLLDVWHNSMLFVLLTRLVYLTACMS

SEQ ID NO: 207475 - protein, 57 aa, Zea mays
  Clone ID: MRT4577_120806C.1.pep
SRCTTRSTDSPDDHSCSDPSTREHHRSLFPLVSSVSPVGVPSQRLPTSPLGTSPEVV

SEQ ID NO: 207476 - protein, 40 aa, Zea mays
  Clone ID: MRT4577_120807C.1.pep
NKIWLQFFFPPQKKKKKKKKKKKKKKKKKKKKKKKKKKKK

SEQ ID NO: 207477 - protein, 36 aa, Zea mays
  Clone ID: MRT4577_120808C.1.pep
NRMRGQGPQRRYRMVVKLLTRPLSHMNNDSTEVKIA

SEQ ID NO: 207478 - protein, 76 aa, Zea mays
  Clone ID: MRT4577_12080C.1.pep
SQPPLRSSQGALVVAFIPLKTNCQGLAQTICVYMDKHMGIQSFAFVTHMHAVVCSCSMWNCSFTCPTHIYVPPDNR

SEQ ID NO: 207479 - protein, 127 aa, Zea mays
  Clone ID: MRT4577_120810C.1.pep
MGRMHSSGKGISGSALPYRRTPPSWLKVTSSDVSELICKLAKKGLTPSQIGVILRDSHGVAQVKNVTGNKLLRILKANGLAPKIPEDLYHLIKKAVAIRKHLEKNRKDKDSKFRLILVESRVHRLAR

SEQ ID NO: 207480 - protein, 53 aa, Zea mays
  Clone ID: MRT4577_120811C.1.pep
MNFYFGTGRELLFQFMLGGLPRNSLIKTPVFFWSLKENNKKGARAIGYPSTRA

SEQ ID NO: 207481 - protein, 103 aa, Zea mays
  Clone ID: MRT4577_120812C.1.pep
VRGQNLLRGGRAVAPRMGLRRGGVRGRGGPGRGGLGRGAMGRGGIGGRGRGMIGRGRGGFGGRGRGRGRGRGALARPVLTKEQLDNQLDAYMSKTKGHLDAEL

SEQ ID NO: 207482 - protein, 46 aa, Zea mays
  unsure (1)..(46): unsure at all Xaa locations
  Clone ID: MRT4577_120813C.1.pep
XIMPRTRLGVRLSRSLGFTWSPTSXTCPWWMCCSLDSTCLLLATAC

SEQ ID NO: 207483 - protein, 185 aa, Zea mays
  unsure (1)..(185): unsure at all Xaa locations
  Clone ID: MRT4577_120814C.1.pep
MREILHIQGGQCGDQIGAKFWEVICGEHCVDFTGXRYSETSSDXIELERIIFYYSEAGGGRYLPRAVLMDLEPGTMEYIRAGPFCGILRPDNYCYGQGCAANICVKGHYTDGAELIXDYVLDAMRKEADNCDWLQGFQGCHSLCGGTGSGMGTLFISKIREEYPDRXMMLTFYVFPLPIVSDTVV

SEQ ID NO: 207484 - protein, 94 aa, Zea mays
  Clone ID: MRT4577_120815C.1.pep
TCRAPFFFFFLIFIFSVFFFFFFFFFFFFWTMACSFKEHARKQRRRKNTSYMFVHGPDHSWSRPPARGNARSIVFPSEIERYHHTHDHHILVHM

SEQ ID NO: 207485 - protein, 83 aa, Zea mays
  Clone ID: MRT4577_120816C.1.pep
GPPVGLWGPPFDDPRAVCLGPLMVKGRDRVVPIYPPGFVPPSRPWIWFPERVPLFVFLLFCKIWPLFFWSGCARGFFPFFPWF

SEQ ID NO: 207486 - protein, 85 aa, Zea mays
  Clone ID: MRT4577_120817C.1.pep
IRGPYGHNLFPLYVRPKKFRTLGFSVGLFLELAVGGSAAGAGAYGRLVMVLLAWLLPPSPRESQGALRLYFLSPNLRNLVGILVI

SEQ ID NO: 207487 - protein, 160 aa, Zea mays
  Clone ID: MRT4577_120818C.1.pep
KKKKKKKKREKGKKKKKKKKKKKKKKKKKKRGGRPKGPKQTNPGMQRKSPSKEQPKLNKRTAVKQRRNGKNQAVTKQNRLAENPPYTSGQKSKKAHTNRPAKKWPNLKGKGNPPGSGKKTPAGGVVTPSVTATPARAQTPAPLRLLPYLLKNVHRLPPKS

SEQ ID NO: 207488 - protein, 123 aa, Zea mays
  Clone ID: MRT4577_120819C.1.pep
GAFFFFFFLRNISHDPYCTNHPAHRISQVSALSHHGSYRNLPSLPFTPFTHTDTPRVQIRRHMMIPHMYSINDNNKKNPYHFIEHLPCAIHNEQPRLKGGETYPTSRAWPRCWRLSILLDHSL

SEQ ID NO: 207489 - protein, 74 aa, Zea mays
  unsure (1)..(74): unsure at all Xaa locations
  Clone ID: MRT4577_12081C.1.pep
PPPWTVPYQDPSLSDIPPLRYMQHSEAAITVSPPDLTGVPLRTRRSSSRARRAVRRRPRTRRPGTARARAVXPG

SEQ ID NO: 207490 - protein, 361 aa, Zea mays
  unsure (1)..(361): unsure at all Xaa locations
  Clone ID: MRT4577_120820C.1.pep
MPKLSCRVLFAALLIASLAALLVRFPIHRLLNPHAAMDPDSELEFEMPGVLRVYKTGRVERFDGTETVPPCPDGDPANGVASKDIVLDPAAGISARLYLPAGVDAGKKLPVVVFFHGGAFMVHTAASPLYHIYAASLAAAVPAVVVSVDYRLAPEHRIPAAYDDAFAALKAVIAACRADGAEAEAEPWLAAHGDASRIVLAGDSAGGNMAHNVAIRLRKEGGIEGYGDMVSGVVLLYPYFWGKEPLGAEPTDPRLPRNVRXTWEFICGGKFGLDHPYVNPMASPEEWRQLGSRRVLVTTADQCWFVERARAYAEGIKKCGWEGELEFYETKGEAHVFFLPKHGSEKAVKELALVAEFVRRC

SEQ ID NO: 207491 - protein, 236 aa, Zea mays
  unsure (1)..(236): unsure at all Xaa locations
  Clone ID: MRT4577_120821C.1.pep
MGEPPVKLISSFGSTFSHRTEVALRLKRVPYELIVEDLHNKSQLLLTHNPIHKKVPVLLHGDRPAISESLVIIEYVDEAXXAGRPLLPTDPHARTTARFWAHFIDQKCMKSLWAALWMEPSEAQRRSMVEAKGSLALLEEHLGERSFFGGDSIGLVDIAASVLAHWLGVMEKISGVTVVTKEEFPALCHWSRRYVGDEDVKTCLPERGDLVAMFSGCKEMFRSMAMAMPQVVEVVH

SEQ ID NO: 207492 - protein, 209 aa, Zea mays
  unsure (1)..(209): unsure at all Xaa locations
  Clone ID: MRT4577_120822C.1.pep
LALAHQQXXEQAKLSWYYAIGTNADLDTWPSSEVLELFNRAEDNMEKGTEMWEEMEEQRLKNRSKPNLENAVLEKMGMEEYIKDVSTDDAAERASNMRSQINILWGMLLYERSVVEFKLGLPAWEDCLMAAIEKFKLGGASATNIAVLVKNHCANETAQDGLGFNVDEIVQAWNEMYDIKRWLRGAPSFRLEPLFXRRTPQLHMALEHI

SEQ ID NO: 207493 - protein, 103 aa, Zea mays
  Clone ID: MRT4577_120823C.1.pep
RRIRSKSSLCPVEAPQRPMRMNPRFWARRGYSSTQPPAFPTFSHPLCFCYDVVACSVLGDEGIGWADGNGSPPPLIMVRAVASFKLRFLVAADPLGKTWRHRD

SEQ ID NO: 207494 - protein, 203 aa, Zea mays
  unsure (1)..(203): unsure at all Xaa locations
  Clone ID: MRT4577_120824C.1.pep
RIQAALLTSGQLPRSGELHDALIRALSRSARPHLALPLYAHLLRAGLLPTPHTLPSLLKSMALSPAVPGAAVLALTVHTHAVKLGLDRFVLVSNALIRVHAGFLGSLADGLLLLRTAAAXDASTFNTLITAYARAGRLADARALVDEMPARNAXSWSAMVNXYVQAGDGREALXIFARMXAXDVRPDDTVLXGVLAACAQTGH

SEQ ID NO: 207495 - protein, 190 aa, Zea mays
  unsure (1)..(190): unsure at all Xaa locations
  Clone ID: MRT4577_120825C.1.pep
GTAHHPSRIAPSLGPRSYGASVALHAFLFLVWHRDPPHPTQPXTGHSRPASAGPVPGGAWLQSYCHDCSLYLRGGGGAAHFIAGAPVGDFSGLGEGRLLPGGHVAVVGWAATASGCGSFWFSSKRTMLQSFAFCLYLAGACTCQPSVTVASLTAFLKVDASPHFARMIPGTLCGIFFEVIDHAGAVWLVG

SEQ ID NO: 207496 - protein, 71 aa, Zea mays
  unsure (1)..(71): unsure at all Xaa locations
  Clone ID: MRT4577_120826C.1.pep
KNIPYSDERFCYLRRGDXTAGEGRYFPTQALNCAFKDCFKTLINFANDRDRYSKWEAGDLAFTGAAHAYSM

SEQ ID NO: 207497 - protein, 67 aa, Zea mays
  Clone ID: MRT4577_120827C.1.pep
YTAVRVCLEFRTLAVVSAPQVLFVFLFFVQCERMYSEQASNHSHTDPSMTNNKHSRSQFSQTKRDKQ

SEQ ID NO: 207498 - protein, 80 aa, Zea mays
  Clone ID: MRT4577_120828C.1.pep
RRLLVGLVSGVVGSALQRRQQSPIHEPTKTSSPSPVHAQIQSLREMMANGFVRLPLRRDVDGGGVRARAHGQGRGPRRLR

SEQ ID NO: 207499 - protein, 107 aa, Zea mays
  Clone ID: MRT4577_120829C.1.pep
ISICLKQGRVGGTKHRALSGFSFWGVYRHYFSGSFLPGGGGTLIHICYNFTHTPGELYSLISWRHGLFHFARRGGCAASLSALSETAGFGPLAFIPGVSIQGRQNEI

SEQ ID NO: 207500 - protein, 137 aa, Zea mays
  Clone ID: MRT4577_12082C.1.pep
AFDVVIIDEAAQAVEPATLIPLIHGCRQIFLVGDPVQLPATVISQTAQKLGYGTSLFKRFQAAGFPVQMLKIQYRMHPEISTFPSKEFYEGVLQDGEGLSRKRPWHSYSCFGPFCFFDVDGIESQPSGSGSWVNQDE

SEQ ID NO: 207501 - protein, 74 aa, Zea mays
  Clone ID: MRT4577_120830C.1.pep
VKGGSKVFAALIVPNHLHLVRKLKNNQKGGGFFFVPRPSCKNNIDHPGVFYFPRTKNMWDKTKSKIPSENVRNF

SEQ ID NO: 207502 - protein, 159 aa, Zea mays
  Clone ID: MRT4577_120831C.1.pep
MSRFGRSGPPPIRDTYSLLVLNITFRTTADDLFPLFDKYGEVVDIYIPRDRRTGDSRGFAFVRYKYEDEAQKAVDRLDGRLVDGREMMVQFAKYGPNAERIQKGRIMETVPKPRGRSRSRSPRRGYRDDHRGRDSRRRSRSRSGDRYGRDRYRERDHHR

SEQ ID NO: 207503 - protein, 92 aa, Zea mays
  Clone ID: MRT4577_120832C.1.pep
AEVGVLHHASVSENIGLVTWVSADRRRSEHVFQHRWSRGNATHPQFPGICATSSHGKHRLLSRRWMTDATSCWSRRWPWSRLGQQLASTWSS

SEQ ID NO: 207504 - protein, 75 aa, Zea mays
  Clone ID: MRT4577_120833C.1.pep
MGGGGAAAVAAALVVVVLWAGVASAAVYEVGDKTGWTIMGNPDYAAWANSKKFHLGDTVVFTYNKQFHNVLAVSK

SEQ ID NO: 207505 - protein, 49 aa, Zea mays
  Clone ID: MRT4577_120834C.1.pep
ACFFPFRPFYLIRWSSPMFNTSRCIVVVCKGIFLYLVRKSITPRGIFPR

SEQ ID NO: 207506 - protein, 114 aa, Zea mays
  Clone ID: MRT4577_120835C.1.pep
KISDLSPESQLIVVVQSTFFSIGGHGETPRIRSFPGSVPHQVMASTVCCQDDGWLTRHPAGLDDGHGVASDSNLRQHGRRDIFDRWHRHRHRTETHGDGAHYSCSTFLRHRSDT

SEQ ID NO: 207507 - protein, 242 aa, Zea mays
  unsure (1)..(242): unsure at all Xaa locations
  Clone ID: MRT4577_120836C.1.pep
MSLAAHSRAEKAKKGIHSDKLPPVMRITDLTMVNSKKAKDFLPFLQRNRRHTAVVEYVFSGHRFKLTIPKETCSIAFSLSGVRCPGKDEPYSSEAIALMRRMILQRDVEIEVETVDRTGTFIGSLWESKTNVGSVLLESGLAKLSSFGLDRIPDAHVLTRAEKLAKQQKLKIWENYVEGEEVTNGSASESKQKEILKVVATEVLXXGGKFYAQTVGDQRVASIQQQLASLKLKEAPVIGAFN

SEQ ID NO: 207508 - protein, 142 aa, Zea mays
  unsure (1)..(142): unsure at all Xaa locations
  Clone ID: MRT4577_120837C.1.pep
SSPPDSWFATTPGSLSLSLPSLPPLVADRLRLALLLSAGLCSARARPLLEPTIRLPHERAMVDETHHHAPRTLRALLLLXTLAYHDHPHHRDIRHAYPMVKSGGLNANRIVCXMNDELRVSLKNLSPLGNINPPQDGSEKPE

SEQ ID NO: 207509 - protein, 290 aa, Zea mays
  Clone ID: MRT4577_120838C.1.pep
RLLVALVLVYLGAPCDGGVAVALSCHLVDQSCDLRVPLLTTTQGLNTTFRRPLDRSPPIYFGKGKVRDDVQAAAAAGRPLIFKGGSFTVECQIDVHSSRDSDSVSLPSSDLPQHLGELLRNQSGADVTFIVSGESIAAHKSILAARSPIFMAQFFGNMLERGSQCVEIQDMHPAVFKAMLHYIYTDTVPDLGTDTTTVEETAVMAQHLLVAADMYALHRLKEICEERLTRGIGIGTVASTLALADQHNLAQLKAKCIDFITGGSSENLLAVLRRKSTGIWRPATATEFEL

SEQ ID NO: 207510 - protein, 88 aa, Zea mays
  Clone ID: MRT4577_120839C.1.pep
NFHQAQNSTSGSSQLLSCQTKGQRLLQHVSPLSQCETQSIMPLMSHAICLDHSLCSMYLHVSEQSGHDVLQELGVLIVRQTLCLWSSS

SEQ ID NO: 207511 - protein, 74 aa, Zea mays
  Clone ID: MRT4577_120840C.1.pep
CAAKGYRGSVDRNTKGLQCCMCLSLDQQGEQQQQQKKKKPVKRSKREATLFLYIFFFKGKRTAPPETTQLWSEL

SEQ ID NO: 207512 - protein, 90 aa, Zea mays
  Clone ID: MRT4577_120841C.1.pep
TRTSHRYCTKPNLSSCGVHPPPSCIGASGTAMFYLTPTSRPRLSIYRFDEVLAEKNTHASAKINRTIWFLGPDHATRVDCILHSTFRFYP

SEQ ID NO: 207513 - protein, 53 aa, Zea mays
  Clone ID: MRT4577_120842C.1.pep
KTKQKKKKKKKKKKKKKIITTKQQIIPSIIQSHLFIILNPIIHSHINSSLSPI

SEQ ID NO: 207514 - protein, 77 aa, Zea mays
  Clone ID: MRT4577_120843C.1.pep
VIRLETHPRASKMTGAASMLKLSRYRPCVGGRHTYALRRYFGYVIHTKSPYLCAEKRHKDPAAPPIAGQKTVHLLNY

SEQ ID NO: 207515 - protein, 491 aa, Zea mays
  Clone ID: MRT4577_120844C.1.pep
SIECINTLNEGLLLHHASAGCPKPQWSKYLSFLKSRRFSELTKPKYWKGEQVDSIMTMQHVALSKANNEYPKIHTLFSTECSSYFDWQTVGLMHSFRLSGQPGNITRLLSCTDEDLKNYKGHDLAPTHYVPSMSRHPLTGDWYPAINKPAAVLHWLNHVQTDAEFLVILDADMIMRGPITPWEYGAKRGHPVSTPYEYLIGCDNILAKIHTRNPSACDKVGGVIIMHIDDLRRFALLWLHKSEEVRADKAHYATNITGDIYNSGWISEMYGYSFAAAEINLRHIIRRDIMIYPGYVPLPRAKYRVFHYGLRFGVGNWSFDKADWRNADVVNTCWAKFPEPPDPATITKQDLDARERDLLSIECGRALNKALYLHHKRRNCPRLDTISSTSKKTDQVSASNKIVSVAQKSRSISRGNIESMDEGRLKTVKRTAASVQPLHRSRRLARSSRMWIIAVWALSIVVFLLVISMFFTEQRRNASRSRVSRSLKAHV

SEQ ID NO: 207516 - protein, 501 aa, Zea mays
  unsure (1)..(501): unsure at all Xaa locations
  Clone ID: MRT4577_120845C.1.pep
APPPPPGPPRGSKARLAQLSPXSQVVLKDHLPASRPANHLXEVNAPRTKLRPFYWDKVLANPDQSMAWHDIKFGSFHVNEDMIEELFGYSGGSRNNLKDKELPSADPASQHISLLNVKKSCNLAVVLKAMNIRVQDIHDALIEGNELPRVLLETILRMKPTDEEEQNLRLYNGDFSQLGLAEQVMKALIDTPFAFKRVDMLLFMSSLQEDASSLRDSFHQLEAACGELKHRLFLKLLEAVLKTGNRLNDGTFRGGANAFKLDTLLKLSDVKGADGKTTLLHFVVQEIVRSEGVREARLAMENGRSPAHSASDDTSNGSLEEDGDHYSNRGLSIVSGLSSEMDNVKRVAALDAEPLFATVVTLRQELLKSREFLNEIATVEETSGFRRSLESFVEHADNETGFLLKEEKRLRSLVKKTIRYFHGNDSKDDGFRLFVVVRDFLVMLDKACKEVGASQKGTNKSRSSGSGSGNGNGNPTFPSILQEQQFPAVIDGHSDSSHTSN

SEQ ID NO: 207517 - protein, 35 aa, Zea mays
  Clone ID: MRT4577_120846C.1.pep
CNGKKDPVDIFTTQTKKVRYASHFYTLKGELDCDT

SEQ ID NO: 207518 - protein, 48 aa, Zea mays
  Clone ID: MRT4577_120847C.1.pep
EVWFTTARAAIMLALFAILASCACATSATLYFQGTRYHTFQWVPLPHA

SEQ ID NO: 207519 - protein, 494 aa, Zea mays
  unsure (1)..(494): unsure at all Xaa locations
  Clone ID: MRT4577_120848C.1.pep
RHRKPRTARRNQVRKQPLNLQLPALLPLAVLRTRSYSCRVRLPVVPRGAKTLPAAATRSANVSSPSVVHSHHAILPAPAQRIPEVKQADSETTPAREREWKPLCDVTSNRRIDWCELDGDVRVVGANASVTLVAPPGADNRTFRAESWRIKPYPRKADPNAMRFVRVLTVRSVASGSGEAACTDGGRRXDVPALVFSDRGYTGNYFHAFTDVILPLFLTARRYAGEVRLLVADLQPWWVGKFLPVLRSISKYELVDLDRDPRVRCFRHVQVGLTSHADFSIDPRRAPNGYSMLDFTRFMRAAYGRPRGVAAAAARRPRLLVVARARTRRFVNTEEIVRGAEAVGFEAVVSEGTHEVAPFAELANGCDAIMGVHGAGLTNMVFLPTGGVVIQVVPLGGLEFVAGYFRGPSVDMGLRYLEYRIEPEESTLVDQYPRDHPIFTDPNGIKSKGWESLKDAYLDKQDVRLDMERFRPTLQEAIAHLRKAKAKANGDGNN

SEQ ID NO: 207520 - protein, 188 aa, Zea mays
  unsure (1)..(188): unsure at all Xaa locations
  Clone ID: MRT4577_120849C.1.pep
GPSSKRRPRLLLIARARXXRRFVNAEEIVRGAEKLGFEVVVPEGTHEVAPFAELANSCDAIMGVHGAGLTNMVFVPTGGVVIQVVPLGGLEFVAGYFRGPSRDMGLRYLEYRITPEESTLINQYPRDHPIFTDPNGIKSKGWESLKDAYLDKQDVSLDMKRFRPTLKKAIAHIRKARAKANAGGGGNN

SEQ ID NO: 207521 - protein, 58 aa, Zea mays
  Clone ID: MRT4577_12084C.1.pep
WILLQSLDLALNYWEKIRRKGKPFKSIFQNQSGGVLSHLTLEVFDEPIQFCRKLGQNS

SEQ ID NO: 207522 - protein, 95 aa, Zea mays
  unsure (1)..(95): unsure at all Xaa locations
  Clone ID: MRT4577_120850C.1.pep
WSNKKKGQEKKRKRKWWEGKTGKANWLKPQLEKKGXPEKNKKVGKRAKVLANQKRCKKEKQXKKKRTWKREKKGPKKSKVEKEKQKKKKFKNIKN

SEQ ID NO: 207523 - protein, 224 aa, Zea mays
  unsure (1)..(224): unsure at all Xaa locations
  Clone ID: MRT4577_120851C.1.pep
RHXDFSIDPRRAXHGYSMLDFTGFMRAAYGLPRGDVAAAAGPSSKRRPRLLLIARARXTRGGVFSVXIXRGAEKLGFEVVVSEGTHEVAPFAELANSCDAIMGVHGAGLTNMVFVPTGGVVIQVVPLGGLEFVAGYFRGPSRDMGVRYLEDRITPEESSLITQGPRYHPIFADPNGIKSKGWESLKNAHLDKQHVSLDMKRFRPTLNKPFAHIRKARAKAICCR

SEQ ID NO: 207524 - protein, 419 aa, Zea mays
  unsure (1)..(419): unsure at all Xaa locations
  Clone ID: MRT4577_120852C.1.pep
MGMDAGGGKLPYSYPAHQDGKLVKSFSRVEPRKFGLGLVAGFLLVTCAYFSTAKFDAIHVAMTSAPSPAMXAGIGPLVGAANADTSDSKQRLDLGKQDPDDALSRSEEEEGSRADEVLEKDDGKASSSSGTDSGSNAPLEDTRRDETFVGDSGGASSAAGAXSEAVPARHEHDDDAPAAALLPPVTSEGAANSTQGSGVLEDEELQVQDAVANPSKRSNDSAATRSSSSGRSPSVVHSDPAILPAPSQQIAPAAPQEADKALAVQHIPAIPEVKQSDSETPAREWKPLCDITSNRRIDWCELDGDVRVLGANASVTLVAPPGGADGRTFRAESWRIKPYPRKADPNAMRVVRVLTVRSVPGEAPACTDRHGVPALVFSDRGYTGNYFHAFTDVILPLFLTARQYAGEVRLLVTDLQAWW

SEQ ID NO: 207525 - protein, 78 aa, Zea mays
  Clone ID: MRT4577_120853C.1.pep
RGSFFSPKRINTQRPPMGLLGRAHKNFGGDLCFSREAKQPIIGGYMGFSNFGCKKHNNDGRRGNKITFSQVGLQLQRW

SEQ ID NO: 207526 - protein, 59 aa, Zea mays
  unsure (1)..(59): unsure at all Xaa locations
  Clone ID: MRT4577_120854C.1.pep
PVWGRXXAPFLGVKKKMSPPPPVFMGASVDRLGLFPCWWPVLFFSFVVGRSQPLVRLGT

SEQ ID NO: 207527 - protein, 165 aa, Zea mays
  Clone ID: MRT4577_120855C.1.pep
VLASSAPAPLHPRKKNSEKKIKKKKKKKKKKKKKKKKKNPGEGAEIIGLVWFGFASLLFFPPPGKGRLTVTEQKKESRVEEKNKGPGRGGNSGNPPGARKKNLKAIKFGGFGAPKKKRKTNARLKFKRLGKGRNKVGAGTLNNLTVKEKKPGGAKKNLNKAKGGK

SEQ ID NO: 207528 - protein, 95 aa, Zea mays
  Clone ID: MRT4577_120856C.1.pep
GQGHGFQGFRVRSVRHLLFAETGKVLFVLGGSEVQLIYRPWPSVRQLGGPEAEDKPLDAENYNLGGDVGGRSQRLPLGLSHYESDDIFICYVHKK

SEQ ID NO: 207529 - protein, 93 aa, Zea mays
  unsure (1)..(93): unsure at all Xaa locations
  Clone ID: MRT4577_120857C.1.pep
GTIPSELXNMYNLISLDLVKNNHSGTIPSSLGKXKPLEFRRSKGQNWPGPTQRELSGILSLKVWEVKSKDIWGTIPTWGPLEHIPVRNCEKNP

SEQ ID NO: 207530 - protein, 58 aa, Zea mays
  Clone ID: MRT4577_120858C.1.pep
GLAMAAEAQTPCHKLRPGKAHTRKTTQRATWGQPISAADAAEEPSVAPEQSTRRGSCG

SEQ ID NO: 207531 - protein, 571 aa, Zea mays
  Clone ID: MRT4577_120859C.1.pep
MATAAAAAVAAPEQPRRRKPAPGRGGVALPAGLSEEEARVRAIAEIVSAMGELSRRGEDVDLNSLKSAACRRYGLARAPKLVEMIAAVPEADRATLLPRLRAKPVRTASGIAVVAVMSKPHRCPHIATTGNICVYCPGGPDSDFEYSTQSYTGYEPTSMRAIRARYNPYVQARSRIDQLKRLGHSVDKVEFILMGGTFMSLPAEYRDYFIRNLHDALSGHTSANVEEAICYSEHSAVKCIGMTIETRPDYCLGPHLRQMLSYGCTRLEIGVQSTYEDVARDTNRGHTVAAVADCFCLAKDAGFKVVAHMMPDLPNVGVERDLESFREFFGSPAFRADGLKIYPTLVIRGTGLYELWKTGRYRNYPPELLVDIVARILSLVPPWTRVYRVQRDIPMPLVTSGVEKGNLRELALARMDDLGLKCRDVRTREAGIQDIHHKIRPDEVELVRRDYAANEGWETFLSYEDTRQDILIGLLRLRKCGRNVTCPELVGRCSIVRELHVYGTAVPVHGRDVDKLQHQGYGTLLMEEAERIAQKEHRSKKLAVISGVGTRHYYRKLGYELEGPYMVKCLA

SEQ ID NO: 207532 - protein, 61 aa, Zea mays
  unsure (1)..(61): unsure at all Xaa locations
  Clone ID: MRT4577_12085C.1.pep
MSAYCGKYKDELIKNAAYIGTPGKGIVVADESTGTIGRRLSSINVETFEXNRRCLRELLIW

SEQ ID NO: 207533 - protein, 55 aa, Zea mays
  unsure (1)..(55): unsure at all Xaa locations
  Clone ID: MRT4577_120860C.1.pep
RKAFLPWYTGQGMDXMEFPQAESNMNDLVAEYHQYQGAPSQDXEFQEEEEKKEKT

SEQ ID NO: 207534 - protein, 70 aa, Zea mays
  Clone ID: MRT4577_120861C.1.pep
LLRKGNTLLANCKKSKALEILEPLRSKKKFSLFSTKGATQTLSDPPSTSNGKMGAPGITPANYFSESMPA

SEQ ID NO: 207535 - protein, 111 aa, Zea mays
  Clone ID: MRT4577_120862C.1.pep
MDRGMGDRRVLASCIPGMEAAADKEDKGLELNLSLDPFPSSAPKVQAGFACCFCPRKFRSSQALGGHHNAHNLQRNLAWGGREGTSGAPAPPSAAAVVDQGIGRAFGSDSA

SEQ ID NO: 207536 - protein, 87 aa, Zea mays
  Clone ID: MRT4577_120863C.1.pep
VIMHQKNDVLSQRERRVSGQIACCGENTSTHSLVYNEHSWRTLLKHDHTFTKTAHIVMLIGRDTPYLIYDMTDCCNKQTDRACWLCL

SEQ ID NO: 207537 - protein, 83 aa, Zea mays
  Clone ID: MRT4577_120864C.1.pep
FLLKWTKVDLGLHFLGYARVYSGQFQNLNLWNKGLGMPSNTQTLLSCKRMSNFIHKSFGDSYSGPVWFEGLKISLSILVTFRL

SEQ ID NO: 207538 - protein, 104 aa, Zea mays
  Clone ID: MRT4577_120865C.1.pep
NIPLRRRPGRRRPPKENEFTFKSAIAANLGNFLGVPTLRFTSERTLDSRKNVGVRSAADNIHEHPTHDGTEYHRPEDVYTANSPLPLKVHGTTGRCAGHTVPLN

SEQ ID NO: 207539 - protein, 49 aa, Zea mays
  Clone ID: MRT4577_120866C.1.pep
WSLLDCFPWFAGFPERYGIVYVDRINSCPRYMKESAPWFYRFTPSKLPC

SEQ ID NO: 207540 - protein, 183 aa, Zea mays
  unsure (1)..(183): unsure at all Xaa locations
  Clone ID: MRT4577_120867C.1.pep
VCKPGPSNIQHPQCHXGEHLPSTRRGSNSYISPLNLKTCGAFLRHKTPPFGNAFISISLXLQPTLCQALQHHCRPDLWLIVLQYIRHSIYYMAQCILQAAQQHQPCESCXSQQATXECGRHLHRLPLPTINVRDRTSPASTLTVSAALPRAASNAGTLLQLLQLLPYNQLAVTNPAAFYLPHH

SEQ ID NO: 207541 - protein, 203 aa, Zea mays
  unsure (1)..(203): unsure at all Xaa locations
  Clone ID: MRT4577_120868C.1.pep
MARSSSSPTARLPLPLLVLLLCLSSLSMAAAQKYNAVYSFGDSITDTGNLCTNGRPSAITFTQPPYGETYFGSPTCRCSDGRVIVDFLSTKYSLPFLPPSKSTSADFKKGANMAITGATAMDAPFFRSLGLSDKIWNNGPISFQLQWFQTITSSVCGSSCKSYLANSLFIFGEFGGXNDYNAMLFGNYNTGQASTYAPQIGDP

SEQ ID NO: 207542 - protein, 98 aa, Zea mays
  Clone ID: MRT4577_120869C.1.pep
GAVAAAKNTRMARALTRQHLMDGTMSMARLKVGLRLSLTQNSVVAGDQFITHRTSVQTAEMLKNPPVSSRHHGGPEEVAGNHQPNSEHYVRGRFRHTL

SEQ ID NO: 207543 - protein, 96 aa, Zea mays
  Clone ID: MRT4577_12086C.1.pep
KTNGKRNGERGGLFPRCSKQKTIGPLVTPLILGPARLGKTRPQEPSIQFQQKKFPPGWEGRGCKNECWNWDDPKTGDHWVFLASGLGSDPASVSGG

SEQ ID NO: 207544 - protein, 197 aa, Zea mays
  unsure (1)..(197): unsure at all Xaa locations
  Clone ID: MRT4577_120870C.1.pep
MARTSSSPTATRLPLLLVLLSSLALQAAAQKYNAVYSFGDSITDTGNLCTNGRPSAITFTQPPYGETYFGSPTCRCSDGRVIVDFLSTKYGLPFLPPSKSTSADFKKGANMAITGATAMDAPFFRSLGLSDKIWNNGPISFQLQWFQTITSSVCGSSCKSYLANSLFIFXEFXGNDYNAMLFGNYNTDQASTYAPQI

SEQ ID NO: 207545 - protein, 88 aa, Zea mays
  Clone ID: MRT4577_120871C.1.pep
CMVTLRPLLSLAIACASQAGFACATCQSPNQDVPFIRNLKCSGRVSVILAPPLLSHYMAGRICCPFVCPRDPCASQTSLHQRRSVITV

SEQ ID NO: 207546 - protein, 215 aa, Zea mays
  Clone ID: MRT4577_120872C.1.pep
FFPSRRSGRLKILLAGRISGVVCPCFPRCPPHSRLLPLLVAEIRRPRTPMAHPQSLLSLCLSLLSMAAGRSFLSRLVLCTAPSLGLRLAACARFLWFSRSSSSPCVPALLCLPRAECRGSCSTAPLWLLSLPPSLSAHRGSSPSLVPWRLSAATLPGSVPAAARPSPSSPSSPSWGSSPWCFSVPAALTSAPPGWASSSPCRASCSPSAFHGARP

SEQ ID NO: 207547 - protein, 78 aa, Zea mays
  Clone ID: MRT4577_120873C.1.pep
GGEFFSPIFPGPKKFPWGGGGVPKGVQKKNLKPVKNFLKVEKIAPPRGPPQKKGESGGFLFKKGRPPRPLTPSRGPKI

SEQ ID NO: 207548 - protein, 172 aa, Zea mays
  Clone ID: MRT4577_120874C.1.pep
STSGVVLEDFDSHFSNRFYHSYLDNPVNINSSSIAAAAALVARSLYILASDDSVVDLITLNTIKVNVSLVEELIGCLLTCNPGLSCGLVKRFISPSNPCPSHYVGVFLDDPSGTQFPSYADDTSRFVWNFLADRTNSAGNKSSCTGKCGDEGEVCVGAEVEGGGRCVVSTTR

SEQ ID NO: 207549 - protein, 115 aa, Zea mays
  Clone ID: MRT4577_120875C.1.pep
CSYANCSFRHAFRSCEMRIQKKREQILKNCAPLLTLEFLVGLSHTIYLVIVHVIIISSPTVLVSESYTLFILDNQMLFIVNRLTIVARPGSLDDAGWLAEKLSPPMLPFVFVYKF

SEQ ID NO: 207550 - protein, 91 aa, Zea mays
  Clone ID: MRT4577_120876C.1.pep
RRKSVRGCIVSQDLSDINLVRVKKGENDLPGLTDTDKPKMRGPNRASKIRKLFNLNKDDDVRKYVNTYRMTFTTKNGTTVSTAPKIQRLVT

SEQ ID NO: 207551 - protein, 123 aa, Zea mays
  Clone ID: MRT4577_120877C.1.pep
GGGGKRKSSGKFGYNGGGGVKGKGPTRLIGGENLWGEENKSSAPTPKGKGKRGGKTAPFFALKGSKDCLLRAHNKKHRGRLELNIPAKKKMGTLFLILRGGGKKTYIWGDVNRWSGFWDFEKN

SEQ ID NO: 207552 - protein, 123 aa, Zea mays
  Clone ID: MRT4577_120878C.1.pep
FSTPAASFGSQNQCRPPANLFVAGTCAPSLSRVSLARRPGLPFLAPSLCCPPCPFLARAYLFWLHDRAGWAGVTLCELNHPPPLILLVCGNLVGFFFLFSLKEAKKKKKKKKKACQKKKKACT

SEQ ID NO: 207553 - protein, 105 aa, Zea mays
  unsure (1)..(105): unsure at all Xaa locations
  Clone ID: MRT4577_120879C.1.pep
PCSWPPGWSSSLPGIQRSGSLPWGSQALGTTGAARGRRGFHFISFFYSSFSPGLWGSPPPQWLLVKFKRFSFIFLNFRPIVFXYFPFFFIFPFLTKFLVSPNKNK

SEQ ID NO: 207554 - protein, 60 aa, Zea mays
  Clone ID: MRT4577_12087C.1.pep
MSHGNSILEFYVFKKKKKKKKKKKKKKKKKKKRKKKKKKKKKKKKNLSAGKTTGKWGNES

SEQ ID NO: 207555 - protein, 108 aa, Zea mays
  Clone ID: MRT4577_120880C.1.pep
SAHGSGPRPAGQNPSGTKFGASPWSPPPKNPWNNPPATRGLITPQLFWMFPNPVQKHKRTALLFPGQLEPKLVCFAFKKHQFGKKSGSAPCLIEQNQKLCQLGMPNFF

SEQ ID NO: 207556 - protein, 89 aa, Zea mays
  unsure (1)..(89): unsure at all Xaa locations
  Clone ID: MRT4577_120881C.1.pep
MVPITQETVNGLKDIINKLESRVADLEGASCSXSTDSNSKSMADQFRIVLMGTPGAAMGTHAPRLKEQFCMCHLATLDMLPSQVAKKTP

SEQ ID NO: 207557 - protein, 157 aa, Zea mays
  Clone ID: MRT4577_120882C.1.pep
MAGDAEQPSSSGHDVREGSLMWPMLTRSNYTEWAMLMQCNFEALEIWETIEPGGEGVKRWQDRQAMSALLRSVPPEMWQMLGAKNTVKDAWTAVKSMRVGAERVKEANAQRLLREFENIEFKESEAVDDFAMRINALAADLRTSGENLDKSVRPTRG

SEQ ID NO: 207558 - protein, 138 aa, Zea mays
  Clone ID: MRT4577_120883C.1.pep
MDAGSRSISSAKNRAAAVAAAPRPPLQEAGSRPYMPSLSSGPRNPSAKCYVSPLVLVLERVGCSTFCLTKLGSFSPPPSHVCVLQGDRFIPDRSAMDMDLAHYLLTEPKRDKENASGMAASPSKEAYRRLVAEKLVNN

SEQ ID NO: 207559 - protein, 477 aa, Zea mays
  Clone ID: MRT4577_120884C.1.pep
MDAGSRSISSAKNRAAAVAAAPRPPLQEAGSRPYMPSLSSGPRNPSAKCYGDRFIPDRSAMDMDLAHYLLTEPRRDKENASGMAASPSKEAYRRLLAEKLLNNRTRILAFRSKPPEPENVSFADTTSSNLQAKPAKQRRHIPQSAERTLDAPELVDDYYLNLLDWGSNNVLSIALGDTVYLWDASSGSTSELVTVGEDSGPVTSVSWAPDGRHMAVGLNSSDVQLWDTSSNRLLRTLRGAHEARVGSLAWNNSVLTTGCMDGKIVNNDVRIRDHVVQRYEGHSQEVCGLKWSGSGQQLASGGNDNLLHIWDVSMASSMPSAGRNQWLHRLEDHMAAVKALAWCPFQSNLLATGGGGSDRCIKFWNTHTGVCLNSVDTGSQVCALLWNKNERELLSSHGFTQNQLTLWKYPSMVKMAELNGHTSRVLFMAQSPDGCTVASAAADETLRFWNVFGTPETPKPAAKASHTGMFNSFKHIR

SEQ ID NO: 207560 - protein, 84 aa, Zea mays
  unsure (1)..(84): unsure at all Xaa locations
  Clone ID: MRT4577_120885C.1.pep
MAPQPTHSRPCPTDDRWCRPIHACDHSTMGGKFDHVDRLFQSMESAYINSLSNTNDVKELIPEFFYMXDGEPIGDVALPPCANG

SEQ ID NO: 207561 - protein, 49 aa, Zea mays
  unsure (1)..(49): unsure at all Xaa locations
  Clone ID: MRT4577_120887C.1.pep
PPQYLFWVLYKDLSLRMHVSEIWFSIKGPPNPFILXIIIIWNRIQLLFR

SEQ ID NO: 207562 - protein, 59 aa, Zea mays
  Clone ID: MRT4577_120888C.1.pep
FAWTHDRECKKKKKKKKKKKKKKKKKKKKKKKKKKKKKKKKKKKKKKKKKKKKKRGGPF

SEQ ID NO: 207563 - protein, 98 aa, Zea mays
  Clone ID: MRT4577_120889C.1.pep
PPPLVKVVWAQWVPQNNNGADSPLDGGAFSNFPGLGGMGGLGYMPALGGLGGMGGLGMDFFGVIVLKKKFLTPKFPAIFFGPKKFSRGNPKFSRLNPV

SEQ ID NO: 207564 - protein, 342 aa, Zea mays
  Clone ID: MRT4577_12088C.1.pep
MDSRCPHLLLLLPLLLLAALLPPPSSGVPEVIWLPTSGGAGPLSCAPPDPAVYDRPVIGIVSHPGDGAGGRISNTTATSYIGASYVKFVEAAGARVIPLVYNEPEDRLLEKLSLLNGVLFTGGSEKEGVYFDTIKRVFQYVLDKNDAGEPFPLFAQCLGFELVSMIVSKDNNILEAFDAQDQASTLQFPSYALEGSVFQRFDTDLIKKVSTNCLVMQNHRYGISPRRYRENDALSSFFKILTTSPDENGKVYVSTVQANNYPITCTQWHPEKAIFEWRKPMIPHSEDAVQVTQHFANHFISQARKSPNRPPADKVLDNLIYNYSPTFTGKKSKSFEEVYIFS

SEQ ID NO: 207565 - protein, 98 aa, Zea mays
  Clone ID: MRT4577_120890C.1.pep
LAPPLLDRHAGQRACLLQLLLVYGSRSLKRDMEDDQGMKKHQLIITDAISHVMIVMPDDAHIHALHRYVCSPDDNANGPNEVSCDEEDLTPLRDRFYL

SEQ ID NO: 207566 - protein, 63 aa, Zea mays
  unsure (1)..(63): unsure at all Xaa locations
  Clone ID: MRT4577_120891C.1.pep
NFFLKNKKFLPPKNKKNAVSCYRTRGDEHQFYKGTXIMPGGTFALPHLNKIFAKLFLVGGGGP

SEQ ID NO: 207567 - protein, 617 aa, Zea mays
  unsure (1)..(617): unsure at all Xaa locations
  Clone ID: MRT4577_120892C.1.pep
MGFFIPPPKVYKPAAEVDLGPDSDEHYISPNVKAPRVAGFLVKMLAWVLETPVLGWIVLGVLKRDNLVYKLVSDAEIPEPPLFXHPHMASSDPXEQSVRVTESRLSPAERVQEAVACVPAAAQAQLEPAAGFRRWTVRDFHRAYRSGQATPTMVARRSLAAVGECSAPDSNMGFFISCDPADVLRQAEDSTRRYQQGAPLSARDGVLVAVSDERDHRPCPIRGGRRSLGAARRFAADAVCVAQLRACGGERAGKDSMHELGAGTSGINPHHGATRNPYNVGRVSGGSSGGSAAAVCAGLCPVALGADGGGSVRMPAALCGVVGFKPTAGRLSNSGLLPLNWTVGMPGILAATVEDTLIXVFSVLPFRYAAIADQSKPSPLQQPELXAHXTRTRSMPSIRLAKYAKWFDDSSEDIRSLCGKALQMLRTHYGWESVDVTVPEIEEMRLAHYVTMGSECTASLAAKYLDSMDRSEVGWDVRIALSAYGSFSSRDYLSAQRLRCRQMYFHEKIFETADAIVTPMTGVTAYALQDDALSTGELDYINGAALVRYSIAGNFLGLPAITVPVGYDRGGLPVGLQFIGRPWSEATLLHLAYAMQEACGKKVLRKPKVHYDLLTKE

SEQ ID NO: 207568 - protein, 486 aa, Zea mays
  unsure (1)..(486): unsure at all Xaa locations
  Clone ID: MRT4577_120893C.1.pep
PVGIKEGDRATYSPHSREIASPPSFPRRHWAPLSAMDGVLVAVKDELDCLPYPTSGGTRWLGSARRCAADAACVAQLRACGAVMAGKANMHELGAGTSGINPHHGATRNPYNVGRVSGGSSGGSAAAVCAGLCPVALGADGGGSVRMPAALCGVVGFKPTAGRLSNSGLLPLNWTVGMPGILAATVEDTLIAXAGQLASCFSHKPNLSIHMSALFSPXVMKTPRKCCLLCFPCFLSGMRRLLISQNXPLQPELNLPMLTRTRSMPSIRLAKYAKWFDDSSEDIRSLCGKALQMLRTHYGWESVDVTVPEIEEMRLAHYVTMGSECTASLAAKYLDSMDRSEVGWDVRIALSAYGSFSSRDYLSAQRLRCRQMYFHEKIFETADAIVTPMTGVTAYALQDDALRTGELDYINGAALVRYSIAGNFLGLPAITVPVGYDRGGLPVGLQFIGRPWSEATLLHLAYAMQEACGKKVHRKPKVHYDLLTKE

SEQ ID NO: 207569 - protein, 86 aa, Zea mays
  unsure (1)..(86): unsure at all Xaa locations
  Clone ID: MRT4577_120894C.1.pep
MQRLDLLITAGAPLSAMDGVLVAVKDELDCLPYPTSGGTRWLGSARRCAADAACVAQLRACGAVMAGXANMHELGAGTSXINPYHG

SEQ ID NO: 207570 - protein, 361 aa, Zea mays
  Clone ID: MRT4577_120895C.1.pep
MIDRDNGHSKDGCFIVLPKHAPVLSIRSSMDMPSCLEGSSQGSGTEAHLSSAHCFQNLTGDNFSTPDCLNDKVLLTTDEDVVRQSAESEPSRFNLQVSRKQRVTVLPFHCHEDESISVSDHTDGTKFCKGSKEVEQPSPVSILEPPINEDICFPRCFNYDLQGMANKQRGCHQYHNESEVNMSSDDEDHSFYQSLEAFQVEENWDFSYLLDILICSGIIVVDWQLICKSWYLPGYPVGPHVFDRLERKYNKIATWAKPERRLLFDLVNSILSEVLAPCVDVHPWVQPSRHCVAFWGPEGPVEKVWQTIVRLQEDCVTRHPDEMVLDTNWLEVGTDINMVGKQIARMLHGDLLEEVIVDFLG

SEQ ID NO: 207571 - protein, 90 aa, Zea mays
  unsure (1)..(90): unsure at all Xaa locations
  Clone ID: MRT4577_120896C.1.pep
PEGACQTSHIFXKLASLFTKIYSRSAKGVEKNLKFFNPGEVGLPKIIPTGPMVGHPLWQKQALGRFPGGQMSQPXNIEVTKSVERKVFAR

SEQ ID NO: 207572 - protein, 220 aa, Zea mays
  unsure (1)..(220): unsure at all Xaa locations
  Clone ID: MRT4577_120897C.1.pep
GWESVDVTVPEIEEMRLAHYVTMGSECTASLAAKYLDSMDRSEVGWDVRIALSAYGSFSSRDYLSAQRLRXQSPAATSTYMRTHRMHGQRXHCLFCENDACRCRQMYFHEKIFETADAIVTPMTGVTAYALQDDALRTGELDYINGAALVRYSIAGNFLGLPAITVPVGYDRGGLPVGLQFIGRPWSEATLLHLAYAMQEACGKKVLRKPKVHYDLLTKE

SEQ ID NO: 207573 - protein, 210 aa, Zea mays
  Clone ID: MRT4577_120898C.1.pep
HSKDGCFIVLPKHAPVLSIRSSMDMPSCLEGSSQGKNNLNISNIYNNGKFQIDSSRDKPRSLKQIGSGTEAHLSSAHCFQNLTGDNFSTPDCLNDKVLLTTDEDVVRQSAESEPSRFNLQVSRKQRVTVLPFHCHEDESISVSDHTDGTKFCKGSKEVEQPSPVSILEPPINEDICFPRCFNYDLQGMANKQRGCHQYHNESEVNMSSDD

SEQ ID NO: 207574 - protein, 118 aa, Zea mays
  unsure (1)..(118): unsure at all Xaa locations
  Clone ID: MRT4577_120899C.1.pep
SRLPRKLTSPPQTRAEEAMSGRGKGGKGLGKGGAKRHRKVLRDNIQGITKPAIRRLARRGGVKRISGLIYEETRGVLKIFLENXIRDAVTYTEHARRKTVXTAMDVVYALKRQGRTLY

SEQ ID NO: 207575 - protein, 102 aa, Zea mays
  unsure (1)..(102): unsure at all Xaa locations
  Clone ID: MRT4577_12089C.1.pep
FSVGLAGNLFPPRPLLGLRAXXGPGYKVPRGGPFGFFACPPYLFEIPPFFGFPKIFQTLYALPVSPGKGASPPGRKWAPQRGGRSQFQDFPPRIKTFIPSRL

SEQ ID NO: 207576 - protein, 63 aa, Zea mays
  Clone ID: MRT4577_1208C.1.pep
FISFCGHSSVVSVRTGAYYILYVDIPGYIVGYKNALCFCYRGSYIFFKQQQGKNLPRCIFSLC

SEQ ID NO: 207577 - protein, 223 aa, Zea mays
  Clone ID: MRT4577_120900C.1.pep
MARVSAAVAAMPPSPSSAAGSASPSGSASASASDPTPSWWESVSQARSRILALSSILPAPASHDVAALADADRPARALLRSPAAYAALSDALRAGGGADDPACHWLYDTLLSADPDLRLAALAFLPLLAALYLRHLPPELPSSLSGFEAVLLAVYSSEAKNRQGKPVLVLMPDLSVPSLYHTPAMASSLSSKSPRLVAAPAVPNPPSAGDSRGGGSLAAAGAT

SEQ ID NO: 207578 - protein, 61 aa, Zea mays
  unsure (1)..(61): unsure at all Xaa locations
  Clone ID: MRT4577_120901C.1.pep
HIPSDTLLGWDHTIEQAYRIQFALAVSVAHHPIEQLQQHYXAHLILQNIPSQQNQQILVMT

SEQ ID NO: 207579 - protein, 287 aa, Zea mays
  Clone ID: MRT4577_120902C.1.pep
MLYLVGLGLSDETDITVKGLEVVKKASRVYLEAYTSILLVEQSVLESYYGRSITVADREMVESNSDEILRNAQNEDVAFLVVGDPFGATTHTDLVLRARELEIPVRTVPNASIMSGIGACGLQLYNFGQTVSMVFFTDTWKPASFYDRIKENRQIGLHTLVLVDIKVKEQSLENMARGRLVYEPPRYMTVGQCAKQMLEIEDERKEGVYTKDSLAIGAARVGGKTEKFVAGTLEELCSTDEVLGPPLHSLVLLGRRTHELELDYVRQFAVDKEKWDRLWKAEYGKQL

SEQ ID NO: 207580 - protein, 77 aa, Zea mays
  unsure (1)..(77): unsure at all Xaa locations
  Clone ID: MRT4577_120903C.1.pep
SXQRTDQRTSXDEMTKXEKKWPXRGXXSQXGXLARSXLAXXHRYTPXSDXIHAXWPCMYTMHSHPKRMYVHDILDGM

SEQ ID NO: 207581 - protein, 55 aa, Zea mays
  Clone ID: MRT4577_120904C.1.pep
TNKGGPHVPYLKRMINNRGQICVRQYKHGLSPSMVRTGIAHSNTLYPQQSSSLHM

SEQ ID NO: 207582 - protein, 229 aa, Zea mays
  unsure (1)..(229): unsure at all Xaa locations
  Clone ID: MRT4577_120905C.1.pep
FARRRXGERATCDHXRRPNRXPLTHTTGXSSAFYVNQSSPVKEPLNCPXEIHQXLIFSVSSDLASPPRPAASGLLGAKIPASDLRPSGIRGPFXLKFTMGGCVGKGRSIVEEKLDFKGGNVHVITTKEDWDQKIEEANKDGKIVVANFSASWCGPCRVIAPVYAEMSKTYPQLMFLTIDVDDLMDFSSTWDIRATPTFFFLKNGQQIDKLVGANKPELEKKXQALGDGS

SEQ ID NO: 207583 - protein, 283 aa, Zea mays
  unsure (1)..(283): unsure at all Xaa locations
  Clone ID: MRT4577_120906C.1.pep
LTVVDRILKYTHFIVLGHPYTASSIACVFFTGIVXLHGFRMSIINDGDPLFISVVWHDLFQMAGGVKLCMSTTFHPXIDGQFEAANKTIAMYLRCISGDRPGAWXEWLHWVKYCTTSCATLFQVVYGXDCPLECSIGYLVWLRLLHHQAASLVTHPNVKLGPCYAVPFQLKEGIDVVEYRLLLPEGALIHVIFHAGLLKQYHDAPPFGPPNLPPMEHRRLLSITLKGIEDHPVEGRTLLLKWKTLPGTLFRTRRVANSLFFPSAGQRMALLDPASMAYAVEGT

SEQ ID NO: 207584 - protein, 73 aa, Zea mays
  Clone ID: MRT4577_120907C.1.pep
MTFKRRNGGRNKHGRGHVKYIRCSNCAKSCPKDNAIKRILVRNIVAHAAVTDVHEACVHDGYVLPKLFAKVYH

SEQ ID NO: 207585 - protein, 107 aa, Zea mays
  Clone ID: MRT4577_120908C.1.pep
TLVVLLRLIQSLRFISLFFPQGFEDRFQREANLSASAICPSLVKHGAVHCAQEVLLETNCLELARLCCAPFAAVHVTAVPMQVPMLESTVRQPQFIPDCCEVLVHLV

SEQ ID NO: 207586 - protein, 41 aa, Zea mays
  Clone ID: MRT4577_120909C.1.pep
ARYSAWLGGAILAKVVFPQNQHVTKGEYDETGPSIVHKKCF

SEQ ID NO: 207587 - protein, 68 aa, Zea mays
  Clone ID: MRT4577_12090C.1.pep
NCPHLMQKAIFEWRKPMIPHSEDAVQVTQHFANHFIRFVIVGFNLYYYTIQVGSTSCWFKHMQERTLL

SEQ ID NO: 207588 - protein, 70 aa, Zea mays
  Clone ID: MRT4577_120910C.1.pep
PGGEFGKNVVFGPGFFGPGFKMGPPVERFLAKMALDGEASPGAKAGVNPPPLTIGRFGGNPKGNLFSTQG

SEQ ID NO: 207589 - protein, 360 aa, Zea mays
  Clone ID: MRT4577_120911C.1.pep
MEAVVVDAGSKLLKAGIAAPDQAPPLVMPSKMKLDVEDQELADGAVVEEVVHPVVRGFVKDWDAMEDLLNYVLYRDIGWEIGDEGQILFTEPLFTPKTLREQLVQLMFEKFNVSGFYASEQAVLSLYAVGRISGCTVDIGHGKIDIAPVCEGAVQHIASKRLEIGGVDLTNLFAQELKKSNPSVNLDVADVELLKEQYACCTEDYLTFEGIESSCQPEKHTLPDGQVITIEKEGYIVGEALFQPRILGLEDYGIVHQLVTSVSNVSSEYHRQLLENTMLCGGTSSMTGFEDRFQREANLSASAICPSLVKPPEYMPENLARYSAWLGGAILAKVVFPQNQHVTKGEYDETGPSIVHKKCF

SEQ ID NO: 207590 - protein, 183 aa, Zea mays
  unsure (1)..(183): unsure at all Xaa locations
  Clone ID: MRT4577_120912C.1.pep
RVRDCCVELSTTIAINSPLLLPARGGHDPRHSPGLPSQIDTISTVGKRHELEAQQGRRRRQVQERRDAGAADSAGGGGGSGXGGSVPRGCVAVLVGGREDGAEPEERVVVDVRALGQPCVRALLDMAAREFGYGQKGVLRIPCAAAELRRAVAADRHRGSRRACAGHALAALGPRRPAPTDTD

SEQ ID NO: 207591 - protein, 209 aa, Zea mays
  unsure (1)..(209): unsure at all Xaa locations
  Clone ID: MRT4577_120913C.1.pep
FIPGAPGLFRSPALPGXPLPPRCTRWPPPVPPPRVPPVPPGVKIPGLIPPPPPGWVTPLPPPPFFPPXVPPVPVGCKGNFLGGPFFGDKPRKXGPGNPPXVPPPVYPSLFPHPQGIKFFXSPPPGAKGLLRVFFLPLWGFGVQNRRPTQVGVVFGGVKRTNQTRGPKGKSFIYLAPPKKKKKKKKKKKKKKKKKKKKKKKEKKKKKKAP

SEQ ID NO: 207592 - protein, 218 aa, Zea mays
  unsure (1)..(218): unsure at all Xaa locations
  Clone ID: MRT4577_120914C.1.pep
TQILLQFVKQLFNTASKRLEIGVVDLTNLFSHELKXTNPSVNLDVSDVERLKEQYACCTEDQLAFEXAIESSCQPERHXPDGQVITIEKERYIVGEALFQPHILGLEDYGIVHQLVTSASNVSSEYHRQLLENTMLCGGTTSMTGFEDRFQREANLSASAIFPSLVKPPXEYMSENLARYSAWLGGAILAKVVFPENQHITKGEYDETGXSIVHQKCF

SEQ ID NO: 207593 - protein, 247 aa, Zea mays
  Clone ID: MRT4577_120915C.1.pep
EFPGRPTPKVESIKRDKAATEKLLQETIERNQTELAAQKEFYTNALNAAKEAEALAEARVNSEAKIELENLLGEAGEKENMLIKTIEELRHFLTRQEQEAAFREERLKGDYDDLQKRYQASELRYNELVTQVPESTRPLLRQIEAMQETTARREDAWAGVERTLNSRLQEAEAKAASSEEKERSVNERLSQSLSRITVLETQITILRTEQTQLSRSLEKERQRASESRQEYLAIKEEAAIQEGRAKQ

SEQ ID NO: 207594 - protein, 53 aa, Zea mays
  Clone ID: MRT4577_120916C.1.pep
LHKVCVSDKLVVPTVFTAFLCIITQKAVYGNYASADILSKQRKQVLSWDGLLR

SEQ ID NO: 207595 - protein, 106 aa, Zea mays
  Clone ID: MRT4577_120917C.1.pep
RPSSTSSLPASLSKSICQPLLSSLLQCPFWLFGEICRYLRRLQFVVHFLKFKKACFVPIFLPRPKVRDCSRYDFLCFGSPSIVIFHFAFSSSYSYGFVCSNALRVA

SEQ ID NO: 207596 - protein, 137 aa, Zea mays
  Clone ID: MRT4577_120918C.1.pep
AALCDSSLGSLKFYCPFKECSALLVDDPGHGEEVITNVECPHCCRMFCAQCKVPWHAGVTCAEFQRLGKDERGREDLLLRKVAQESKWQRCPKCKIYVERIEGCVFIICRCGHCFCYLCASPMSRDNHCCKTCNRTW

SEQ ID NO: 207597 - protein, 108 aa, Zea mays
  Clone ID: MRT4577_120919C.1.pep
MGFEAGDAKKGANLFKTRCAQCHALKEGEGNKIGPNLHGLFGRKSGQVEGFSYTDANKQKGVVWEDNSLFEYLENPKKYIPGTKMAFGGLKKPKDRNDLITFLQEETK

SEQ ID NO: 207598 - protein, 197 aa, Zea mays
  unsure (1)..(197): unsure at all Xaa locations
  Clone ID: MRT4577_12091C.1.pep
TDLIKKVSTNCLVMQNHRYGISPRRYRENDALSSFFKILTTSPDENGKVYVSTVQANNYPITCTQWHPEXLVVAVSGVPHLVFLLVLPFLLCTVFIPRLYSQHIKLWPLTKYKWLYATIKLSSFDXKAIFEWRKPMIPHSEDAVQVTQHFANHFISQARKSPNRPPADKVLDNLIYNYSPTFTGKKSKSFEEVYIFS

SEQ ID NO: 207599 - protein, 68 aa, Zea mays
  unsure (1)..(68): unsure at all Xaa locations
  Clone ID: MRT4577_120920C.1.pep
MAKQLVNPALLSFKLQQGNCXKDIPLSALLSEQSPALSLVQVLVQTIMAQLVEELVLPVINQVALGKL

SEQ ID NO: 207600 - protein, 66 aa, Zea mays
  Clone ID: MRT4577_120921C.1.pep
DLAPAPPLSSVLAHTSCSSSRQILPLVLPPHHSPQAEKSEDASSQAQILQVQVLVDELQLQDLRIS

SEQ ID NO: 207601 - protein, 91 aa, Zea mays
  Clone ID: MRT4577_120922C.1.pep
IRLEVLHAFFDREGRQAHMEACGPRERDCTLTHVQGQSTGLDARRLACPEGCRGQLAAPLYREGAQTTQLGTESHPMRSTQAGITTHEPTV

SEQ ID NO: 207602 - protein, 93 aa, Zea mays
  unsure (1)..(93): unsure at all Xaa locations
  Clone ID: MRT4577_120923C.1.pep
QLDNRETCSIDVDEGTTCGRVXEHTGCSFDGSGNGQCQTSDWRVVLHCAHXSQAPNTMCEIVLKRSTXLDFFDISLVHGFNVPMDFLPAGDAS

SEQ ID NO: 207603 - protein, 65 aa, Zea mays
  Clone ID: MRT4577_120924C.1.pep
IFFFFFLRTLGPTYLHNGENRHPKQSLWGHRKNPVFGNPEDPGEQTWQRRTNYRAGRLLVARLVR

SEQ ID NO: 207604 - protein, 75 aa, Zea mays
  unsure (1)..(75): unsure at all Xaa locations
  Clone ID: MRT4577_120925C.1.pep
PPPPVMGVVFDRVCWARVVYLYYYFSLSLPSKTYSXMMKRLRSXPHVGDLHKGQPPPQRQFHNITQVNGSXNIVX

SEQ ID NO: 207605 - protein, 134 aa, Zea mays
  Clone ID: MRT4577_120926C.1.pep
IGYLEAGRGYIQRQPRKGGNPSQLMINLIASIARIPSSCSRWGYGLLLRGRDGCVFQSIPRTAGPSPLCPRPSLSHAPRTTPARSIYGPPNILQIQAELQTSHAHPAGYTTCRGLIIERLTYYIREWTMKRTYM

SEQ ID NO: 207606 - protein, 176 aa, Zea mays
  unsure (1)..(176): unsure at all Xaa locations
  Clone ID: MRT4577_120927C.1.pep
PRRRRLLLFALHVSLLPSPPRFQRLPPCGSVSWILWLGIGIRKRRRDSLIPFLNSSAEADWIRAASFSLLIFLCGGSSNRIWRASFCVRCCQFIAVTQLDDASTELNMFDEISYPSYLSKEGLLRSELHLQGCRLATVFPNLKSDGRTARSKTHLGAXLGDKELGXIFLPHPVHIT

SEQ ID NO: 207607 - protein, 55 aa, Zea mays
  Clone ID: MRT4577_120928C.1.pep
YNPPSQYPSQSVIVGPQKSDRMSINARVRPVRGMLPGKVRMYIRCNVIHQFRRVC

SEQ ID NO: 207608 - protein, 70 aa, Zea mays
  Clone ID: MRT4577_120929C.1.pep
QDQTSYIRKGEKNVSVELQITEHSCDTDKYEIYTLDGAQEHKDAAPLVHSMLPWLFGMAGPATYFVLEVL

SEQ ID NO: 207609 - protein, 88 aa, Zea mays
  Clone ID: MRT4577_12092C.1.pep
SMSMKRQSFWWRTVAPPPVPLPSPFCVLAFAIPGAPPRSSSSCARVWKLLQGVRWRPARLSELWRCRDTPRHPEAGLCDARRGAGASL

SEQ ID NO: 207610 - protein, 82 aa, Zea mays
  Clone ID: MRT4577_120930C.1.pep
APALLGGLERVAAALRVRRAAGRSHQAASDSVLTWDTFREMARLYFPKEGSLEMCAGVLYGLELHDDDGRGTKPRAEYALLR

SEQ ID NO: 207611 - protein, 104 aa, Zea mays
  unsure (1)..(104): unsure at all Xaa locations
  Clone ID: MRT4577_120931C.1.pep
MAYLFLQQTGMFKELARAAHDQDEHMDSXQDLLMKETKRQEKDKKAEAQETEKCEKKTRELIMSHDTIYNLRDENAKLTAQVDKTSVCDDAIEHLKKDKARSSS

SEQ ID NO: 207612 - protein, 128 aa, Zea mays
  Clone ID: MRT4577_120932C.1.pep
FIFFFFFFFFWFFFYFFGVFFFWARETLYTYNWPKKVWHKNLDSFLEGLTYRGGNPRAQPGFQLLCIRENGPLSGRQKRTGSRCFTNKRLLCRKLDGSTNETFHMNYPLLGRSPSCGTAKRINACKKL

SEQ ID NO: 207613 - protein, 409 aa, Zea mays
  Clone ID: MRT4577_120933C.1.pep
MAAMPGGAHAAGAGDQMQVDQPLPAAAAHGPADAKHAGSMIEGNDPVTGHIISTTIGGKNGEPKKTISYMAERVVGTGSFGIVFQAKCLETGETVAIKKVLQDKRYKNRELQIMRSMDHCNAVSLKHCFFSTTSRDELFLNLVMEFVPESLHRVLKHYSNMNQRMPLIYVKLYTYQIFRGLAYIHTVPGVCHRDVKPQNLLVDPLTHQVKICDFGSAKMLVKGEANISYICSRYYRAPELIFGATEYTTSIDIWSAGCVLAELLLGQPLFPGESAVDQLVEIIKVLGTPTREEIRCMNPNYTEFRFPQIKAHPWHKIFHKRMPPEAIDLASRLLQYSPNLRCTALEACAHPFFDELREPHARLPNGRPFPPLFNFKQELANASPELINRLIPDHARRHLGLTLLPTAGP

SEQ ID NO: 207614 - protein, 63 aa, Zea mays
  Clone ID: MRT4577_120934C.1.pep
EWLTYLKGPRMVFPCGSVHGQLKRNQFKILLVFWVPLEHPCGDPIVKGGGLGFGFPYPIHIMP

SEQ ID NO: 207615 - protein, 161 aa, Zea mays
  Clone ID: MRT4577_120935C.1.pep
TRIDIWSAGCVLAELLLGQPLFPGESAVDQLVEIIKVLGTPTREEIRCMNPNYTEFRFPQIKAHPWHKIFHKRMPPEAIDLASRLLQYSPNLRCTALEACAHPFFDDLREPHARLPNGRPFPPLFNFKQELANASPELINRLIPDHARRHLGLTLLPATGP

SEQ ID NO: 207616 - protein, 418 aa, Zea mays
  unsure (1)..(418): unsure at all Xaa locations
  Clone ID: MRT4577_120936C.1.pep
MAAMPGGAHAAGAADPMQVDQPLPPAAAGTAHAPADAKHAGSMIEGSDPVTGHIISTTIGGKNGEPKKTISYMAERVVGTGSFGIVFQAKCLETGETVAIKKVLQDKRYKNRELQIMRSMDHCNVVSLKHCFFSTTSRDELFLNLVMEFVPESLYRVLKHYSNMNQRMPLIYVKLYTYQIFRGLAYIHTVPGVCHRDVKPQNLLVDPLTHQVKICDFGSAKMLVKGEANISYICSRYYRAPELIFGATEYTTSIDIWSAGCVLAELLLGQPLFPGESAVDQLVEIIKXICFAXVLGTPTREEIRCMNPNYTEFRFPQIKAHPWHKIFHKRMPPEAIDLASRLLQYSPNLRCTALEACAHPFFDDLREPHARLPNGRPFPPLFNFKQELANASPELINRLIPDHARRHLGLTLLPATGP

SEQ ID NO: 207617 - protein, 54 aa, Zea mays
  Clone ID: MRT4577_120937C.1.pep
PRVRSPVQLKHILTNLFENLIEEDAVNMNIYETIQQQIKKNLRRLRYGLYQTTQ

SEQ ID NO: 207618 - protein, 68 aa, Zea mays
  unsure (1)..(68): unsure at all Xaa locations
  Clone ID: MRT4577_120938C.1.pep
FPVNLAARLSALALSVGSSKEATCGRCLLLSRAAIAIAFMTTSADVDDRXFHXCCFXFAHYLWRDLPL

SEQ ID NO: 207619 - protein, 73 aa, Zea mays
  Clone ID: MRT4577_120939C.1.pep
PVEASCPISSCSASLYGVALSHGRFFVRYHALCFTLLRPFYLAVLVLVSLLPALACIQVSVLSCEQGELGFGP

SEQ ID NO: 207620 - protein, 171 aa, Zea mays
  unsure (1)..(171): unsure at all Xaa locations
  Clone ID: MRT4577_12093C.1.pep
RTPFLDYILHGYLPXNSNEKFRMSKEAIKYIHXIDTLYRRXVXDGIILRCTXAAEAIRSLXEMHSEICGAHQSGPKVHYQLRHLGYYRTTMFDDAMKFAKRCHECHIHGNFIHQTHKPLHPTNMSXPFETWRIDVVGPIHPPSSKGHKFILAATDYFSKWAESCALKEVKA

SEQ ID NO: 207621 - protein, 60 aa, Zea mays
  Clone ID: MRT4577_120940C.1.pep
NVSPPGLGGPQTNAPLFFLEHFNAQRGDGGLNPFPPYAPGELDFLGHEKDPLGDDWAKVG

SEQ ID NO: 207622 - protein, 58 aa, Zea mays
  Clone ID: MRT4577_120941C.1.pep
NFVASSSRENLVTNYRLVQAILNLNEMNTGFKRYMWLFPTLSYLFIGTHGRRHLCKWI

SEQ ID NO: 207623 - protein, 167 aa, Zea mays
  unsure (1)..(167): unsure at all Xaa locations
  Clone ID: MRT4577_120942C.1.pep
MLAYQDLLFVDXSCSDSFSYKELQNRCLREDQGKWVTQSAGDVDIGGNPSGXGGEDQSVDDTTAKVDDIADTFRLXNNTPFDQKSFVXYIDXKYIKNLTDVVNAEKAHEIKNGDXGATTFLLNEMKDLLFFGADAXMRIDASVVFTYYKDGATNTTFLYFSHGLKEI

SEQ ID NO: 207624 - protein, 59 aa, Zea mays
  Clone ID: MRT4577_120943C.1.pep
DIVTTSHAIAVLPFFPLFSRRVSIIQCLWICSLADKTSLSSKGAYQLILLMPPPAGLEV

SEQ ID NO: 207625 - protein, 109 aa, Zea mays
  Clone ID: MRT4577_120944C.1.pep
PKGLKNQNWKFFNSFRTNSKRGKKKKKPGETQLGGKKKNQRIKPGWGPPKFFQSLNRAGGPTWFGGGIAICQNLFNQLFFYLISRGQNSQSLIKHTSRGGSKKKNPWGF

SEQ ID NO: 207626 - protein, 75 aa, Zea mays
  Clone ID: MRT4577_120945C.1.pep
ETFCTIDIYNTGCIDTVNSVYIFQHDCHNFEGHNGGGLPRTSAMLHNTRPYAGTQMNVRFLVSYILLSRNSITII

SEQ ID NO: 207627 - protein, 110 aa, Zea mays
  unsure (1)..(110): unsure at all Xaa locations
  Clone ID: MRT4577_120946C.1.pep
SIPPLIPPINXXQSPXFPSXXKKKNPNPPXTXFXKNPPSXXKKSPXTKKPLKFSLPXXXPTFPXFNPXLNFPTPPPXXPPNTFFPPPTPFKLPXXFLLIPLLIKIPFLLN

SEQ ID NO: 207628 - protein, 78 aa, Zea mays
  unsure (1)..(78): unsure at all Xaa locations
  Clone ID: MRT4577_120947C.1.pep
LNRCRLSSTLLXWGGGGPQPXHHTHXSRRTSHGPCSRVRHVDGTACVPRLGGAGTQRAARRRHVATAAAADERERRQG

SEQ ID NO: 207629 - protein, 128 aa, Zea mays
  unsure (1)..(128): unsure at all Xaa locations
  Clone ID: MRT4577_120948C.1.pep
SVTYPERSELSEPTIREWDAKKTQAQNDPPDHQRNCETLXPITHIHHHRSRYIYDLHYTRNQISHHLYQFXLDQSYADHHLISKXKKPGYXHIRWLRCIQTPDHNFATTCTCLVPKHLMDDQDIQCVH

SEQ ID NO: 207630 - protein, 123 aa, Zea mays
  Clone ID: MRT4577_120949C.1.pep
KAQSSGQNWTTTHSWAEKTPEWKKVKDKCPKMAFKKKRGQKPKWQTFKKAPRDGPPGCLDGKRPDGGNIKAPKGFLNESGGGRGSGPPPRGLPWGACFGGGGGLGHPGQGSFCLWGGGHGLHG

SEQ ID NO: 207631 - protein, 53 aa, Zea mays
  Clone ID: MRT4577_12094C.1.pep
TNQVNPGPHTNRTAKPRPTIKPSKKPRNTHFHFDTDLDRTIIRLLTPLKFQTF

SEQ ID NO: 207632 - protein, 619 aa, Zea mays
  unsure (1)..(619): unsure at all Xaa locations
  Clone ID: MRT4577_120950C.1.pep
GAGRSTIGTVASWLEVAPPELSRQQPQLVTRPGDDRDGXISNSPPRDRHHERRQEGTCGVSTLTSRLRAIQWPPNFKVSNVDKYEPKQDPGGRLIIYTTAARTAGATEDMMTAYFPIVLEQDALQWLRHLPQHCIDDWSDFIRCFIANFQSLSDKSAQPWDLKSIRHQGDETLRSYLKRFQTMRNHIPEVTEAAAIEDFYRGSNDSAFIRAILQKSPTTSEQMFREADLYITADERAQDLIGGAKLAPPAPRRNANQQPDKRWEKRPREEVHAAGPLVSRARGAPRGGERTLDDILNAQCTYHKDMRHTLRNCKTSSIPSGMADRSSLYHLAHHEEGLASPGSLNXEGGRGGAFSRVDRKINVIFGGHGSQENRRQQKLNDQXAPAPYRWSEYPITFSRADQWLNFDHSGKYPLLVDPVIRESRVKKVLVDRGSNINVTFPRTLLGLGVALKDLTKSDTPFFGILSTEGEYPLRHIYMPVTFGTPQNYRTKFLRFKVASFDCGYSAIIGSLGLAKFMAISHYSYMILKMSGPQGIIIVRTYFHGAAECFRGAIQAALTTRPPPTSSTQANTKPEGGLAVPANEAQAMTSMRPTEETKRINLGFVDERKTAIISSRLDNK

SEQ ID NO: 207633 - protein, 150 aa, Zea mays
  unsure (1)..(150): unsure at all Xaa locations
  Clone ID: MRT4577_120951C.1.pep
GKAGGDHAAEKPGNQQRTEEAGAGHAPATEEPAEGPRAQAAEXAPKANKAPKENKAPKEKKLSAANKPAAHPPYAETTAEASATLKERKGSSSVAISKYFXGNHSGKLPTNFRKQLTTQLKKLAANTKLTRVKNSFKLTGTDAKPKAAKP

SEQ ID NO: 207634 - protein, 76 aa, Zea mays
  Clone ID: MRT4577_120952C.1.pep
TGPLATIPIPLGFSLILRFCLPQVTQCYDKRPEERQPCPRRYKIPLGPRNLFRVGALLEPHVCPQLCRYFGLNPPS

SEQ ID NO: 207635 - protein, 287 aa, Zea mays
  Clone ID: MRT4577_120953C.1.pep
MRWLPRLLSHSIEVGRASAAGRSNPSLVKAGSHGFASGGWDGSLAVPREWLRKLWVDVLKKQKEDARRWGIGASPGNAGSGAEPSLCAFANSVEAKLAPLLARANLIIARDIEWANIMLAFEQESRYIIMDPLFPQSPVGFIREKSSIIFRQLLRTRRPFVAEITDAMGNEIFKVRRPFWWINSSIYAEVDGKEIGVVHRRWHLWRRIYDLYLGNRQFAVVENPGFWNWTFSLVDEDDKLLAQIDRNWRGIGFEVISFSSYNDQSIPFCYTRWTSMSIHDLMNQLHV

SEQ ID NO: 207636 - protein, 50 aa, Zea mays
  unsure (1)..(50): unsure at all Xaa locations
  Clone ID: MRT4577_120954C.1.pep
GGPRGAPGDFGGDKSGAPAEFQPSFRSSGARPGFGRGGGSGXGAGRPFHG

SEQ ID NO: 207637 - protein, 72 aa, Zea mays
  unsure (1)..(72): unsure at all Xaa locations
  Clone ID: MRT4577_120956C.1.pep
PQGRPPRGGPGGPXPPPPLXYFFRKPAGVNPPXPGQPGXSPRGTRPRSRPPIPPAPKGGPGPAPDGRKMAEI

SEQ ID NO: 207638 - protein, 23 aa, Zea mays
  Clone ID: MRT4577_120957C.1.pep
MLGVVAHNRFSTIHHSWLNPTDP

SEQ ID NO: 207639 - protein, 467 aa, Zea mays
  Clone ID: MRT4577_120958C.1.pep
MAAPAAAPLDEGKAKKVLRQVEFYFSDSNLPRDKFLRETVEQSDDGLVSLPLICSFSRMKSHLGLDADVKPETVPEETVLAVAEVLRPSPALRVSEDGKKIGRASELLKPDEIIEQVDSRTIAVSPLPCNVKQEDVQSFFTNYAKVNSVRLPRNIANKKHFCGTALVEFSEEEEAKRIMETALVFAGANLEIRPKKEFDAEQKSKKEAYEKTHLKKDNQYEGYQKGLIVAFKLEKATADTVVQQDNIDKENDSATKLDVSSSMEKPSGQGPEESILESDVIKQGMSSDDMTKEKDLNTGEATESEKCISDVPIESDKHGDSEPLSREGKIISGNVNVKNQISREDLKEAFKKFGAVRYVDFSIGDNSGYLRFEDSKAAEKARMSAVLADGGLIIKDHIVTLEPVTGEAEKDYWDTIRSIQGKYKDSRSYKGRASNNQRGGKRFNAKRDRNPDSEKNSNKARKVEAIA

SEQ ID NO: 207640 - protein, 217 aa, Zea mays
  Clone ID: MRT4577_120959C.1.pep
MSYQFTSKNFPAPASRQTGLRITAQPMASSPWLRTAGAAPVPPPEAAAAAATAAATPAPTSEQHRVKEEGNAAAATVPKQEEAKLHLPRDNDSEAVTQEHGQKINRYQAILAARLKAKFFSKKAFDRGNIFESETIVGGETIRSSRWPCTRSFANPEFFSRDKNSHEKGNSPSSAADFSAKNNSPPLAGEASPKNNASALVTENNLTTGNRQQSKKN

SEQ ID NO: 207641 - protein, 111 aa, Zea mays
  Clone ID: MRT4577_12095C.1.pep
RVRPRVRKHETCEAAIAMYLNLSCIPEAQAIIGSSVAIHFLVNSLGEGGPRSDTCRMDALLTLYNLSLHAPNIPPLMASGIIENLRRVLVPSSPWTDKALAVLLNLALTRK

SEQ ID NO: 207642 - protein, 74 aa, Zea mays
  Clone ID: MRT4577_120960C.1.pep
IASGRYRVVACARNTARHGRGAVTARSDRVEMPEVQYRVQCPRVIPRGGARTRCMGGALHEARRRGRHPHGRRV

SEQ ID NO: 207643 - protein, 48 aa, Zea mays
  Clone ID: MRT4577_120961C.1.pep
YSPPLYFNPSLIYPNFPTNTTFINILPPFPNLTKTYFQNASHPYFSPL

SEQ ID NO: 207644 - protein, 84 aa, Zea mays
  Clone ID: MRT4577_120962C.1.pep
SSICKAFTTSAFKELVGLRTTRTTTTLTKIRQLLPPLSNVLTTQPTQKHRTHITLIMLLMLLHPRHSLIQPSPNWPNLDPEDPD

SEQ ID NO: 207645 - protein, 58 aa, Zea mays
  unsure (1)..(58): unsure at all Xaa locations
  Clone ID: MRT4577_120963C.1.pep
GXGCAPEXXGXXGGGNLYXGGGSPGGGGSGGAAAGSVFVAGGYAGGNRGGGYGNSPGN

SEQ ID NO: 207646 - protein, 114 aa, Zea mays
  unsure (1)..(114): unsure at all Xaa locations
  Clone ID: MRT4577_120964C.1.pep
MATKIFSLLMLLALTTCVAHATIFPQCSQAPIASLLPPYLPSIIASVCENPALQPYKLQQAIAASNIPXIALVFQQSPALSXCSHKVQTIKAQQLXQLELPVINQVALENLSNF

SEQ ID NO: 207647 - protein, 223 aa, Zea mays
  Clone ID: MRT4577_120965C.1.pep
MESHNGEANDLPPPPPLIAGVEPLKADETKMPLKPRSLVQRNGFGRKGQPIKLITNHFKVSLVNAEEFFYHYYVNLMYEDDTPVDRKGSGRKVIEKLQQTYAAELANKDFAYDGEKSLFTIGALPQVKNEFTVVVEDFSTGKTPANGSPGNDSPPGSDRKRLRRPYNTKTYKVELSFAAKIPMSAISQALRGQESEHTQEAIRVIDIILRQHSAKQGCLLVRQ

SEQ ID NO: 207648 - protein, 154 aa, Zea mays
  unsure (1)..(154): unsure at all Xaa locations
  Clone ID: MRT4577_120966C.1.pep
MESHNGEANDLPPPPLLIAGVEPLKADETKMPLKPRSLVQRNGFGRKGQPIKLITNHFKVSLVNAEEFFYHYYVNLKYEDDTPVDRKGSGRKVIEKLQQTYAAELANKDFAYDGEKSLFTIGALPQVKNEFTCXVXEDFSTGKTPANGSPGNDS

SEQ ID NO: 207649 - protein, 66 aa, Zea mays
  unsure (1)..(66): unsure at all Xaa locations
  Clone ID: MRT4577_120967C.1.pep
LQLLTSQNIFNDNLNCMLHAQMFLFDYTHTGAIIIKDSNEQXXLYPNIPYNLSSYVISILQNLGTI

SEQ ID NO: 207650 - protein, 52 aa, Zea mays
  unsure (1)..(52): unsure at all Xaa locations
  Clone ID: MRT4577_120968C.1.pep
XTVTLPETVQFLYRRLKTNSLQTANYQKPYGSAYYQTPTDSLGKLLRGLTTR

SEQ ID NO: 207651 - protein, 99 aa, Zea mays
  Clone ID: MRT4577_120969C.1.pep
RRLLDEPVWTAEVNGESVGHASRREATERDDCVMRMLHSTSMGAGVLPSDMSHPSDGELTYMRAHFDRLVGSKDSETYYMHNPEGGTAGPELTIFFIRT

SEQ ID NO: 207652 - protein, 61 aa, Zea mays
  Clone ID: MRT4577_12096C.1.pep
MYGKSLARVLPFLLSLQLTVFYPTTAVEIYTSGALEAVNGTDIRLKCTFSRLCPVGDALTV

SEQ ID NO: 207653 - protein, 141 aa, Zea mays
  unsure (1)..(141): unsure at all Xaa locations
  Clone ID: MRT4577_120970C.1.pep
RTVSSTASCPRNPRDLPKVINMLNPXNRXGRSYLKTRMRDENIITKWLHTIPTVLKSTLNVTXILSISMNNTIDDRCXGSILRHVYSILAKTSSCLQYGXDTKSRRPRSVXLKSTGNNASKCLGASPTTTLHECTNPYTTH

SEQ ID NO: 207654 - protein, 98 aa, Zea mays
  unsure (1)..(98): unsure at all Xaa locations
  Clone ID: MRT4577_120971C.1.pep
NENIGTLLRGSIDATTEYLMXXXVLMLHTKQYEYTSSLSFELQQKWEKQSSFFFLHLMTIWHYQKALLEFFNIEETGYGLTPDWTQNSFQTKGSATSR

SEQ ID NO: 207655 - protein, 94 aa, Zea mays
  unsure (1)..(94): unsure at all Xaa locations
  Clone ID: MRT4577_120972C.1.pep
PQYCRYFTRVKNPSPAXYAWVKCEREXEDDDCYEALLKARIIRPCGAGYDASSRYTRVSLIKSDDDFEVLVERVTDLVNAENYDDDVPGGSSSM

SEQ ID NO: 207656 - protein, 372 aa, Zea mays
  unsure (1)..(372): unsure at all Xaa locations
  Clone ID: MRT4577_120973C.1.pep
MQPSDIWKAHAGSSQSEGSGLDMERNGCNHNYCPSPLQPIASAGQHSESSAAYFSWPTSTLMHGSAEGRANYFGNLQKGVLPXTXGRLPKGQQATTXLLDLMIIRAFHSKILRRFSLGTAIGFRIRKGTLTDTPAILVFVARKVHRKWLSATQCLPTALEGPGGVWCDVDVVEFSYYGAPAPTPKEQLYDELVDGLRGSDPIVGSGSXRHVAVDLDYPNQKMFHPLPPNLGPGVYLGAVERATSFITDDVWYGIYAGTNPETFVRADGAFIPFADDLNXTSVSTSVKGVGVIGDVKAIDLQSSIGSLIGRQVVKVGRSSGLTTGTVVAYALEYNDEKGICFFTDFLVVXENQQXFDLEGDSXSLIILTGQDG

SEQ ID NO: 207657 - protein, 76 aa, Zea mays
  Clone ID: MRT4577_120974C.1.pep
IMSPIEGNIFYYVIVFIILLILFSNRFGAILLIIQSFFLFCLLYFKTDLEQSFYCQAIFNNLRILTLISLHIFYKQ

SEQ ID NO: 207658 - protein, 536 aa, Zea mays
  Clone ID: MRT4577_120975C.1.pep
MQSSGIWKAHAGSSQSEGSGLDMERNGCNHNYCPSPLQPIASAGQHSESSAAYFSWPTSTLMHGSAEGRANYFGNLQKGVLPGHLGRLPKGQQATTLLDLMIIRAFHSKILRRFSLGTAIGFRIRKGTLTDTPAILVFVARKVHRKWLSATQCLPTALEGPGGVWCDVDVVEFSYYGAPAPTPKEQLYDELVDGLRGSDPIVGSGSQVASLETYGTLGAIVKSQTGNKQVGFLTNRHVAVDLDYPNQKMFHPLPPNLGPGVYLGAVERATSFITDDVWYGIYAGTNPETFVRADGAFIPFADDFEIASVSTSVKGVGVIGNVKAIDLQSPIGSLIGRQVVKVGRSSGMTTGTVVAYALEYNDEKGICFFTDFLVVGENQQTFDLEGDSGSLIILTGQDGEKPQPIGIIWGGTANRGRLKLKSGQGPENWTSGVDLGRLLDLLELDLITTSEGLQAALEEQRITLAAAAAAATNSTATESSPVAGPQEDDKIDKIYEPLGINIIPRDSSCHINRPTQRECGRAKPDVSDAQRSRRQR

SEQ ID NO: 207659 - protein, 224 aa, Zea mays
  unsure (1)..(224): unsure at all Xaa locations
  Clone ID: MRT4577_120976C.1.pep
MQPSDIWKVHAGSSQSEASGLDMERNGCNHNCCPSPLQPIASAGQHSESSAAYFSWPTSTLMHASAEYFGNLQKGVLPGHLGRLPNGQQATTLLDLMIIRAFHSKILRRFSLGTAIGFRIRKGTLTDTPAILVFVARXVHRKWLSPTQCLPGALEXVAFHKQGPGGVWCDVDVVEFSYYGAPAPTPKEQLYDELVDGLRGNDPCIGSGSQVASLETYGTLGAIV

SEQ ID NO: 207660 - protein, 71 aa, Zea mays
  Clone ID: MRT4577_120977C.1.pep
GQSKFIGARKGLPIDAASASSGRPELKAPECVRPQSIGRQRRRRRRVPGGAVAALGADHLWQQRLLSRIAT

SEQ ID NO: 207661 - protein, 145 aa, Zea mays
  Clone ID: MRT4577_120978C.1.pep
PTRPFVLLTLESSTFLLPSLRLVSNGVLLPPDASLVRPLYLPPPASSLRCSWCVYAPAPPLDDFGRAPLRRRAVLRGRGSWIRQTDLHRPRRRYAGALAKRLRHPSGVRSSQLINRSSLDTFPLYIMCRVPSKMVYYSNIVVHQF

SEQ ID NO: 207662 - protein, 521 aa, Zea mays
  unsure (1)..(521): unsure at all Xaa locations
  Clone ID: MRT4577_120979C.1.pep
MQPSDIWKAHAGSSQSEASGLDMERNGCNHNCCPSPLQPIASAGQHSESSAAYFSWPTSTLMHGSAEGRANYFGNLQKGVLPGHLGRLPNGQQATTLLDLMIIRAFHSKILRRFSLGTAIGFRIRKGTLTDTPAILVFVARKVHRKWLSPTQCLPGALEGPGGVWCDVDVTXSSYYLRQAPTLPQKLYDELVDGLLIKSTKSINLSASTSFLGTGLPYQQTNPTRSNKQVGXSPMRNGQEGNGDLNNLMDLELENSPDGISIALNLGEREPKRLRSDFDSTLDMDLQKFGRYDGDLMQYALDYXAFGLSISVMAIKEIVNFXTTGLQSPIGSLIGRQVVHVRRCSGLTTGTVVVYXLEYNGDKGIRFSTDLLVDGKXFLHVFLNVRVKAQTFELDKNSGSLIILTGQDGEKPQPIGIIWGGTANRGRLKLKSGQGPENWTSGVDLGRLLDLLELDLMATSEGTLAAAGLQPLIQLPQNRHLLLALKRMIKSTKSMSLSALTSFLETVLPYQRTNPTRMWKS

SEQ ID NO: 207663 - protein, 138 aa, Zea mays
  Clone ID: MRT4577_12097C.1.pep
SGKPPPPPPLGWRSPSPMPQQKRSAAPSPQDKALPGFDPGFPITGKAGPTSSGAPSRAALISPPRGIIWGFPKAIWFPFGGKSWARGFNRLRWAEFGNLEPCFKKRVFPPKKKKKKKKKKKKKKKKKKKKKKKKTRGG

SEQ ID NO: 207664 - protein, 128 aa, Zea mays
  unsure (1)..(128): unsure at all Xaa locations
  Clone ID: MRT4577_120980C.1.pep
SAVRRCPPPPSFGRRXXPAPXSGPPPSPLASRPRLXRRPPPXXFPSCPPPLSLSPPALXPPPRPSSRWPCXWRRPPRPWRWPSPPAGCPXCCXFLPPPSGASSGALSCLACWSAAFCSAAWARCSRLF

SEQ ID NO: 207665 - protein, 42 aa, Zea mays
  Clone ID: MRT4577_120981C.1.pep
IIHIIEHHLGKLFNERHLLSDYKISVDDKPSYPQNKNRMYES

SEQ ID NO: 207666 - protein, 124 aa, Zea mays
  Clone ID: MRT4577_120982C.1.pep
MTVHFTLRAEIYTRWNISYGYTFRLIQAMGGQLHMIQYKRCSDVNIDSGYEAFKDGFSDYIIKMEVSKGDSIHRFLGPEGTLLEHYSHALEEGKTVGVILGGIEEHERIKTMRCGTIAVHPNYR

SEQ ID NO: 207667 - protein, 79 aa, Zea mays
  unsure (1)..(79): unsure at all Xaa locations
  Clone ID: MRT4577_120983C.1.pep
NIEAKEEACVETEAANSILRAQTMELADRLRFLNSILRSLKRSKGYPXEIPEIPDPLLKPWQIPHPIQPIMATANMFLR

SEQ ID NO: 207668 - protein, 325 aa, Zea mays
  Clone ID: MRT4577_120984C.1.pep
MTTYTTQRDQVSRIWVGLRVADMISDIIPGLRDGELMPQKLEEMQAFTQSWKIGGHSHETQRQIMFEVNSFTCPAYGKFCNDAQRHATLKLEVELRNWRSCFTSYFNAQKAYIEALDGWLSKFVLTDTIRYSRGISSIAPDRAGAPTLVVMCHDWYTTMSKFPSKRVSFTMRNFLRSVRVLWLKQGEEQQQKRKVDSLAKELDKKLTAYKRAENRIIGTKLLEHSPETDAKQRMEHLSEKKEVLNLLKRRIEAEKGKHHACMRDTHDVTLNGFKIGLASIFESLAEFSKDSVKLYEDLLGRAHGKDSEKAHIVVDDGNLHVLGPS

SEQ ID NO: 207669 - protein, 92 aa, Zea mays
  Clone ID: MRT4577_120985C.1.pep
NYQFSYEMLHNGSESQYRPLLVEPISMPTNCVCRFQKYSTLWKVENLSEASDMTMTAIWKVQGCNSVALLQINCKINSVTQQLYRHPSWKRK

SEQ ID NO: 207670 - protein, 48 aa, Zea mays
  Clone ID: MRT4577_120986C.1.pep
SHKQLTLGFMPIYPVHNCFTTHYYFQSKCFTWFHIHIHKYGNVILAIA

SEQ ID NO: 207671 - protein, 95 aa, Zea mays
  Clone ID: MRT4577_120987C.1.pep
YVFVDELNIVKFVERSFPNKILDVIDGSLCDDFKSAQINMVTERETYRCLFSLLQVALSCTREIPGERTTMEEAASRIGSIQTTYARGIENASRH

SEQ ID NO: 207672 - protein, 29 aa, Zea mays
  Clone ID: MRT4577_120988C.1.pep
RKMYSVTNRFEWIELIWVMRKTNSFEKHV

SEQ ID NO: 207673 - protein, 45 aa, Zea mays
  Clone ID: MRT4577_120989C.1.pep
VYVGVCALHQMVLMNSAGQFMCFRGLFGVSKKNAKLNESDPCPWS

SEQ ID NO: 207674 - protein, 115 aa, Zea mays
  unsure (1)..(115): unsure at all Xaa locations
  Clone ID: MRT4577_12098C.1.pep
LFIVVLEHLREGINTGEARVKDYTTLLFVEKEVAVFGSRNPEEIPGRSVXAEFVAESTAVFTDQEKAAPHLKGGVNNDVISSPSTDAPKXQEAATXKDYNSDINIVFNASCTNQL

SEQ ID NO: 207675 - protein, 67 aa, Zea mays
  Clone ID: MRT4577_120990C.1.pep
TVPVPLLKGFVGKKVFFVLTNKVDGKLVQVEFMGRSEVHKQNGIAPTEKKGGQIPKFLSKPGKQSLN

SEQ ID NO: 207676 - protein, 99 aa, Zea mays
  Clone ID: MRT4577_120991C.1.pep
IGPKVLKMVRRAYFPVVNPPLGGLTNQALARKKTGAFKTPVPPAHGAPPKPLSISKVMCVPWAFQKNCTPFWPAVILSLARFFRTLPEGSEQMPKKPFF

SEQ ID NO: 207677 - protein, 101 aa, Zea mays
  Clone ID: MRT4577_120992C.1.pep
IRFFFFFFASKTQIMIDSSGRYHNLQDLCEFPLQLFCFFELLPFSIINSFLELQLLPHASTTKERRRRRKKNEYSKNTHVIYNKNYNLIYTMAVARGQQEQ

SEQ ID NO: 207678 - protein, 52 aa, Zea mays
  Clone ID: MRT4577_120993C.1.pep
APGFSYYLLCLSWGLFCGFWRCFFLPFFSLCQTVCLNRGLLRLMVLFVGVHF

SEQ ID NO: 207679 - protein, 59 aa, Zea mays
  unsure (1)..(59): unsure at all Xaa locations
  Clone ID: MRT4577_120994C.1.pep
KFVGIGKGNAVIGYDGTKPREMEGVRKRRAINAGGKIKGRSLLDKNGSTXXLGSGTGER

SEQ ID NO: 207680 - protein, 86 aa, Zea mays
  Clone ID: MRT4577_120995C.1.pep
GWVFFFCFFFFFLPQSNYLLPRGLKKTPKRGANDQQPTKIHFLAPPLGRGNTGVKRQRGEGNARPTHWIWALPLYNQGLSDRGETS

SEQ ID NO: 207681 - protein, 994 aa, Zea mays
  unsure (1)..(994): unsure at all Xaa locations
  Clone ID: MRT4577_120996C.1.pep
MAKPAPAEPFSIRGYAMRMRAVDAAECYPFVGGCRSDVEGESPPRFRPMDPKPLSRWWKHELAAGQARLLAGAKGGEAAASGGGLRKGTKRKGSRSSSTGERARKRRHVLQFRSFLTKKEITAKPQSTSCLHEHKLHMAFPRKHKSSTVHPSTELQPRKKREEARDHMPTHGNSMNKRNRERAGPSSEMNSDLIGIKEVTSAVNKQSIEVNGSTNNPTNTGYELVKTPTGPKDDIFGDLPLLELESSKTMFRTGVHELPTVIEESLITNQTEADSIPEAVPLKLIDASDITAQTPSPLEDLVKSEATEPPCISHNDVAGSHPSTVEIDGLPNHMNINMVKPGLGDMQLKFTDVSALGSHSVLRSKRGSGNPMQGCFDVNKNCSQEMKKHGTNSISSPPAMRTRPEETKFKDAPVKGKKSTDITGAVVTLPTLANQLSYQASVLPSAVSHTVFSIRVDSNDLSSLRSMPAEECIPTTRPGNFRTNVCHGSREHVDPYAAQSTDNQGSSHSKLHPICSPANIGMAFMKLPGLERMEISNCNARIGENRFSNAESMNTVRCQKQQLLSGMTYVMEGQKQIGLSSSQVGKPGLDGYGGQGDHHLQQPTVRLMGKTVSVCSHGKDHNVWTMDKVSPDNVAIETSRLSNSTSGQNTTFSGLHNQRPEPISSVPIVKDCTWNFGNQFVRQAELNKAAIGSSNSQTRHLELHQPPHLISIPQNQQSHLWTPAAHMSRKDQCFVGPAANQSSLVPKSLLNASMQEKYQKSTLLSYDDPSSMPIRQPYQTPGVKSSSGSVISFFEYGANNSLSRSSSPGLTLSLTTGLANDSISAGRAACAGSLTNADGRKAASFAEPIGNRSVYADNVSQQPARPISNRTAYATDNVSQQPAKRQXLQIDMILCLWAQTXNHSPGWSLSDAVGPQVLDFSKRVARDAVQTSRNESNNPRASSGPVLPIETWSRPGVVAGANNMLKPGQNLNDHSKLLYSTKFPVDSAINSVVL

SEQ ID NO: 207682 - protein, 435 aa, Zea mays
  unsure (1)..(435): unsure at all Xaa locations
  Clone ID: MRT4577_120997C.1.pep
MVFASGSAAGGPQVLTARFVRQVVQGRWFMVFACLLILSASGATYIFSIYSKVLKSTLGYDQRTLNTLSFFKDLGANVGVISGLINEVTPPWVVLAMGAAMNLAGYLMIYLAIDGRTARPPVWLMCIYICVGANSQSFANTGALVTCVKNFPESRGVVLGLLKGFVGLSGAIFTQLYLAIYGDDAKSLVLLIAWLPAAVTILFVHTVRIMPYXRQPTPGPVSGSXSNDAFFCFLYISIALATYLLVMIVVQKQVNFSHAAFAVSAAALLLILFLPLAVVVKQEYKIQKELEESLREDPTVTVEKPATAASLQLVAAAAAAPEPAVAQSMTTGTEAKPSSCLGSCLRHMFSPPAQGEDYTILQALVSVDMLVLFLATICGVGGTLTAIDNMGQIGQSLGYPAKSINTFVSLISIWNYAGRVTAGFASEVFLARYKF

SEQ ID NO: 207683 - protein, 109 aa, Zea mays
  Clone ID: MRT4577_120998C.1.pep
RPTRSFIFSFAANECYDQLESAKNVAWMGRCLCVYISHNISHGVLNGSKLHNASNVYHLLTTNVRLQNKTVMHAENCTMYLAIIRPIGSILGIVLQHGELYYRCVSSSL

SEQ ID NO: 207684 - protein, 175 aa, Zea mays
  unsure (1)..(175): unsure at all Xaa locations
  Clone ID: MRT4577_120999C.1.pep
GHPLTQSLAPLTCACRDYLALCYVSYGYDTTIQQFALSLREYVITSLHLMILKHGSNYYIAADQRILKRDRASNARIYCLLQKKPIGAIDGLMHVTDLCEQMKAHLDVIPHDMHPIELDVWLRLLSEITHVPYWIVTGTFRLWKIVQTNDALNLXLTTVQNXDXLEFLKILQSIN

SEQ ID NO: 207685 - protein, 133 aa, Zea mays
  unsure (1)..(133): unsure at all Xaa locations
  Clone ID: MRT4577_12099C.1.pep
FSRSQPRPLLSHXSRWGVSHTLGRTHLXXSRVDMRADASRCECHRLLQDAWHSIDTSLILRSSGRRRPRPVGRRPARGGDRRSALPQTLSLRSSAQLGARPILGGKIICALLPPRKHPSPSYVRQTTIKGAGS

SEQ ID NO: 207686 - protein, 52 aa, Zea mays
  Clone ID: MRT4577_1209C.1.pep
NKTVLAPIHAKLEPSGGRWLNNVTPRGYFNTTFILRFPTTPYTNAYTQPGKN

SEQ ID NO: 207687 - protein, 79 aa, Zea mays
  Clone ID: MRT4577_120C.1.pep
GVPPGVPLPFLPPGGGGEKKKRCVGVFVGVVLLRLFAASLLLVSAAVRVGAVGSGCLPAPWCCSLSLCRGPFRRLPVFV

SEQ ID NO: 207688 - protein, 76 aa, Zea mays
  Clone ID: MRT4577_121000C.1.pep
KTPPENLYTPASGRFKRSSWLPKDHEGLDPSIKPCYFSIMYSYEHVLRCSTNKKKKKKKFPTKKKKKKRTSRAAAD

SEQ ID NO: 207689 - protein, 110 aa, Zea mays
  unsure (1)..(110): unsure at all Xaa locations
  Clone ID: MRT4577_121001C.1.pep
GPNPIHPQESKPPGPPQITSAKPPGKKPQISGPVLNPPPPLWAPLLGFPPLVNNKPPPPHKRGSTLAPVLLAPRPQXPPLSRGPVKGGWXYWDPPKPIPPPLWRGALAPP

SEQ ID NO: 207690 - protein, 175 aa, Zea mays
  Clone ID: MRT4577_121002C.1.pep
TGNRGYSCKLIFKRQSFLERNPRQVEGLVKDGDGSTVASLMGKWDERMYCSASGQNVILLWEKNEASTNPTRYNLSSFAITLNELTPELKESLPPTDSRLRPDQRHVENGEYSKANAEKLRLERRQRMSRKMQDNGWKPRWFRRDDGTFRYVGGYWEARQQRKWDGCHDIFGEFV

SEQ ID NO: 207691 - protein, 259 aa, Zea mays
  Clone ID: MRT4577_121003C.1.pep
MASKSTMRSLVLIMGLLLLSCSGMSSAARLLEEVAPKEEYPHPEVPELPKPELPPHPTVPELPKPDELPPHPVVPELPKPEVPVHPAVPELPKPEIPPHSTVPELPKPEVPELPKPEVPEHPAVPELPKPELPPHPTVPELPKPEVPELPKPEVPEHPAVPELPKPELPPHPTVPELPKPEVPELPKPEVPEHPAVPELPHPDVPEHPASVPELPKPEVPEHPTVPELPKHELPPLPEPELPLPPKAESHYPEPGMAKP

SEQ ID NO: 207692 - protein, 852 aa, Zea mays
  unsure (1)..(852): unsure at all Xaa locations
  Clone ID: MRT4577_121004C.1.pep
MMIDVDLNLEVLGGVGVYKLEEEWRRGEPNASAIHGSKSNPKKLVEVMRARDLHPLCCLPAADGGPPPPPLGHAPPAVAGLLYKWTNIGKGWRPRWFAIRGAVLAYSKIPRRSTSAPSSASSSTATRIIGHARYGHDSPVGLVHLKISSFRESKSDDRRFSEITSTNLIQLRTDYANERTAWNDSLVSARAESXLLSGVXCYYDCASLSLDGTRNFQHWTGDDVVRAAIQNXDDVGQQELDELLKQRCEEYVSFLKSFSDSAGLSCLNMKCSNSGKDTLLYGDKFVKPKAGTGDSXACHRFSSXTKLPDPVEKEKSASLWSMIKDNVGRDLTQVCLPVYFNXSGKDTFLYGDKFVKPKAGTGDSECLPPFFKRRTKLPDPVEKEKSVSLWSMIKDNVGRDLTQVCLPVYFNEPLSSLQKCFEDLEYSYLLDRAYECGLKGDNLMRILNVAAFAVSGYASSVGRPCKPFNPLLGETYEADYPENGIRFFSEKVYSLLKSHPFFVAVKSXGGLGPLTRQINGLAILTELCSVTSFXQYFNSMKTKSVFQLKKINIAVSXLSRNYSWSSCYDAVFVAIXSHHPMVMACHCEGKGWKFWGDSNVKSKFWGQTIQLDPVGVLSVEFDDGEIFQWSKVTTTINNVIIGQVYCNHYGTMSITGNRGYSCKLIFKRQSFLERNPRQVKRNAASHFGIDLMDVTKMXVCKVEGLVKDGDGSTVASLMGKWDERMYCSASGQNVILLWEKNEASTNPTRYNLSSFAITLNELTPELKESLPPTDSRLRPDQRHVENGEYSKANAEKLRLERRQRMSRKMQDNGWKPRWFRRDDDTFRYVGGYWEARQQRKWDGCHDIFGEFV

SEQ ID NO: 207693 - protein, 251 aa, Zea mays
  Clone ID: MRT4577_121005C.1.pep
MASKSTMRSLVLIMGLLLLSCSGISSAARLLEEVAPKEEYPHPEVPELPKPELPPHPTVPELPKPDELPPHPVVPELPKPEVPVHPAVPELPKPELPPHPTVPELPKPEVPAHPAVPELPKPELPPHPTVPELPKPEVPELPKPEVPEHPAVPELPKPELPPHPTVPELPKPEVPELPKPEVPEHPAVPELPHPDVPEHPASVPELPKPEVPEHPTVPELPKHELPPLPEPELPLPPKAESHYPEPGMAKP

SEQ ID NO: 207694 - protein, 467 aa, Zea mays
  unsure (1)..(467): unsure at all Xaa locations
  Clone ID: MRT4577_121006C.1.pep
MRARDLHPLCCLPAADGGPPPPPLAHAPPAVAGLLYKWTNIGKGWRPRWFAIRGAVLAYSKIPRRSTSPPSSATSSTATRIIGHARYGHDSPVGLVHLKISSFRESKSDEXRFYLITPAKTLQLRTDSANERAAWIEALVSARAESSPXGGLLTNQNDASFSTERLRNRMHEEGXGEEIIKDCEQIVHSEFSQYHTQMKPRCEEYVSFLSRLPQQFEVLSADDNANMIELHSHLMKPDYCSSGQGKCSESSNTESSDDVGQQELDELLDDDDYQFYDTRQSFSDSAGLSCLNMKCSNSGKDTFLYGDKFVKPKAGTGDSECLPPFFKRRTKLPDPVEKEKSVSLWSMIKDNVGRDLTQVCLPVYFNEPLSSLQKCFEDLEYSYLLDRAYECGLKGDNLMRILNVAAFADSGYASSVGRPCKPFNPLLGETYEADYPENGIRFFSEKVSHHPMVMARHCEGKGWKFWG

SEQ ID NO: 207695 - protein, 108 aa, Zea mays
  Clone ID: MRT4577_121007C.1.pep
TNPTRYNLSSFAITLNELTPELKESLPPTDSRLRPDQRHVKNGEYSKANAEKLRLERRQRMSRKMQDNGWKPKWFRRDDGPFPYVGGYWEARQQRKWDGCHDIFGEFV

SEQ ID NO: 207696 - protein, 115 aa, Zea mays
  Clone ID: MRT4577_121008C.1.pep
HPTVPELPKPEVPAHPAVPELPKPELPPHPTVPELPKPEVPELPKPEVPEHPAVPELPKPELPPHPTVPELPKPEVPELPKPELPKHELPPLPEPELPLPPKAESHYPEPGMAKP

SEQ ID NO: 207697 - protein, 59 aa, Zea mays
  Clone ID: MRT4577_121009C.1.pep
RVSARPVLSAAIEHSGPAGCRVGSHMSINNDTIQFRWSTALLSPVKLSVDRDILDVDYL

SEQ ID NO: 207698 - protein, 100 aa, Zea mays
  Clone ID: MRT4577_12100C.1.pep
KRRRKDIIALRSSARTSQQRDDDDYRHYSTYHIRMPSPPPPTCMSSIKLGANLHATRLFNDERIGPYGMRMSPSTVKNSMAAGDMWSVQRPVVWYHMAPT

SEQ ID NO: 207699 - protein, 114 aa, Zea mays
  Clone ID: MRT4577_121010C.1.pep
IVVVVEAGVNEQRQEGEGQIHQREVHRWCVAGESALTMRDREHQRAQLARGIHGRKSFLFFFLSFGVTPRQTYPPPEGFGRNLRSKTRWFAGFCNSHQVSHFATFLVNARADIQ

SEQ ID NO: 207700 - protein, 126 aa, Zea mays
  unsure (1)..(126): unsure at all Xaa locations
  Clone ID: MRT4577_121011C.1.pep
IMWNSANEMAPRPQRNVVSPAAINGSDHDPHVITTVAMLFRLDKKVAKVSNWLDTTVTHAPXIGDLWALYYKFILQHINVAWYKDVFKKCVASKTKHGEKWQAISKSVVNSHRPVKAIVNKTVVSA

SEQ ID NO: 207701 - protein, 184 aa, Zea mays
  unsure (1)..(184): unsure at all Xaa locations
  Clone ID: MRT4577_121012C.1.pep
MMACGTGRDPVAALRPASTSAFLGYSSRLGRTATASPTRXSLKAEAKXEWLPGLPSPAYLDLSLPGDNGFHPLVLAEDPQNLRRNLQSELVNERXDMLGVGGMLIPKTLTKGEVINATQGKDADKAQYFASSATLYEXRLVLFHYVNIYRCSDIRIPVKNSMDXISKRYPLPPHEXCGLPPTTT

SEQ ID NO: 207702 - protein, 239 aa, Zea mays
  Clone ID: MRT4577_121013C.1.pep
MRALLSLSKLARRLPTSLAATRVAPPLLQRHLHADSALPPQAPPPFASRILQSEESPDPSTDLEHAQPAPDPVLDEFLARLVTALRPTLAAAFPTHTRPVLDEMLRLIAEAVLNRLSGADPGPDTVELSDDLWAAVWEVSASVREAMRRDQVRADLRNYLHSDDVKEMTRFAVDVGIRGAMLRELRFKWAREKLEEVEFYRGLEVMRQQADAADSPAAPPPARLTALPQRKGEVKFQIS

SEQ ID NO: 207703 - protein, 180 aa, Zea mays
  Clone ID: MRT4577_121014C.1.pep
MPFSIGDENCYKKVCAGEYVYEITVHWLETKCVCPGKEMGITDFIDPNDICDKPVHEVIREMTDGGVDYSFECTGINDVLREAFLSTHDGWGLTVVLGIHSTPKMVPLHPMELYGRRITGCVFGDFKGKSQLPDLVDKCVNGEVNINFDGFITHKMPFSDINKAFRLLEEGKSLRCLLSL

SEQ ID NO: 207704 - protein, 65 aa, Zea mays
  Clone ID: MRT4577_121015C.1.pep
SLLISLGSFSNICPNLTKAFPSSFFLPAASIFSSWFKSHGVLGLCDQIRLICFAIAHRSNDLDQT

SEQ ID NO: 207705 - protein, 123 aa, Zea mays
  unsure (1)..(123): unsure at all Xaa locations
  Clone ID: MRT4577_121016C.1.pep
PMAAXQQQQFFSFSPLAMGKAPTYLQQRLLHHRLLHQIVPAFTQLAGANPVASLQQLLPFNQLIVSNFVGSLQQGHQLFNPLAVANPLVAAFLQQQQLLPYNQFFLMNPALWWQQPIVGGAIF

SEQ ID NO: 207706 - protein, 171 aa, Zea mays
  unsure (1)..(171): unsure at all Xaa locations
  Clone ID: MRT4577_121017C.1.pep
MALPNIRNCSMSKALRKFPQGDFHTLSSAMYLQVSTINQXALTYTVSHARNWSFVYRPRFLLTFAFLVAQLLSHPTLVPYLTVVCGLSASPYILWCLQNATLIVVYANWAFAAIKGIGWGWAGVKWLYIIVFYFLLRIINFLIXYTLSRRAWNLVLMYILGVCPYVATGVC

SEQ ID NO: 207707 - protein, 281 aa, Zea mays
  unsure (1)..(281): unsure at all Xaa locations
  Clone ID: MRT4577_121018C.1.pep
MALLESFQLGFMLLALIWKFDFPTFTVQIIAILNDXSSILGKLTTSTWRHEXTIVAISKDIVKPPAQLDSWKXYLVVMTVIFXFWATYKTDFFXRCNVSTVSQALIVTRXSWSFVERXFLLVFAFLVAKLMPLIAVYANWAFAAIKGIGWGWAGVIWLYNIVFYFPLDIIKFLIRYALSGRAWNLVLEQRIAFTSKKNFGTEERERKWAHAQRTLHGLQPPEASIFENKTTFNELNQLAEEARRRAEMARLREVSTLKGRMESVVKQKGLDIXTIQQSYTV

SEQ ID NO: 207708 - protein, 346 aa, Zea mays
  Clone ID: MRT4577_121019C.1.pep
MGVDYYKVLQVGRGASDDELKKAYRKLAMKWHPDKNPSNKKEAEAKFKQISEAYEVLSDSQKRAIYDQAGEEGLKAQVPPTGAGGPSGSSFYGGNASTFQFNPRSADDIFAEFFGFSSPFSTMGGMGGGAERGMRGSRFGMFGDDIFGSHPQFPGEASMHVPQRSQKVPPIENRLPCNLADLYKGTTKKMKISREVLDASGRTLVVEEILTIDIKPGWKKGTKITFPEKGNEAPHIIPADIVFIIDEKPHDVFTRDGNDLVMTQKITLAEALTECTVNITTLDGRNLTVQINNIIYPGYEEVVPREGMPIQKDSSKKGNLRIKFSIKFPSRLTSEQKAEIKRLLGS

SEQ ID NO: 207709 - protein, 402 aa, Zea mays
  Clone ID: MRT4577_12101C.1.pep
MAFGRRSPGSSRHPPALTIVTALLLASLYSAAAAAALSPTDAMHNNNWAVLVCTSRFWFNYRHMANTLSLYRTVKRLGIPDERIILMLADDMACNPRNSYPAQVFNNENHQLNLYGDNVEVDYRGYEVTVENFLRVLTGRHESAVPRSKRLLSDEGSHILLYMTGHGGDEFLKFQDSEELQSHDLADAVKQMKEKHRFKELLIMVDTCQAATLFSQLQSPGVLAIGSSMKGENSYSHHLDSDVGVSVVDRFTYYTLAFFEKLNMYSNASLNSLFTSYNPSMLLSTAYYRMDLYERPLNEVPVTNFFGSVMKTLHTDSAYTGFLAAHDNETPMSTGDNLDDHFMLKGRAIARRSTIEKEAQLTPHGWTEVLAEQLEGKNTDTVVMYGLGAMGILLALSTWLSM

SEQ ID NO: 207710 - protein, 654 aa, Zea mays
  Clone ID: MRT4577_121020C.1.pep
CNLRHLGRQQASARHKASYVILTLLKRDHRSNYDTEISDSEIDAYEGKNYARLMSGDLKLNKNGENYICPFCSSKKKNYSKSSLVQHASGVSAAPNREAKEKAVHRALFKYLKNGLAKSPEPGSHATPVEPQPLQNRDEKFVWPWMGVLVNVPTEWKDGRQIGESGNRLKEQLSHFCPLRVIPLWTFRGHTGNAIVEFGKDWNGFRNARTFESHFAAGGFGKKDWIGKKNQGSELYGWLARADLFISGYMLALLLRKNGDLKSVNDLAKEGARKNDRLVANLANQIEVKNRYLQELECKYSETTASLEKMMGQREQLLQSYNEEISKMQQLARRHSQKIIDENQKLRSDLEAKMNDLDVRSKQLDEIAAKSDYDRRSLEQEKQKNAIKSSHLKLATLEQQKADENVLKLVEEQKREKHAALKKILMLEQQLDAKQKLELEIQQLKGKLKVMEHMPGDEDSASKNKINELSEALQEKIDELDGMESLNQTLVIKESKSNIELQEARKELENGLLDLSGGQTHIGIKRMGELDLKAFSKACQKERTENAEVTAAFLCSKWEAEIKNPDWHPFRVVTIDGKEMAIIEDDAKLRALKEEHGEEIYAMVTKALLETNEYKSKGSYPVGELWNFKENRKVTLKEAVQFVLRQWRTNRRKR

SEQ ID NO: 207711 - protein, 67 aa, Zea mays
  Clone ID: MRT4577_121021C.1.pep
ALAHALQGCKGDQLAIGKETTRRLGMGTKCKDESLASLPIDELTEKADGFARVFPAWFYASCADMEV

SEQ ID NO: 207712 - protein, 247 aa, Zea mays
  unsure (1)..(247): unsure at all Xaa locations
  Clone ID: MRT4577_121022C.1.pep
EKQKNAIKSSHLKLATLEQQRADENVLKLVEEQKVCTLAPVIXALGFKQCVLWXLTVWKLQREKHAALKKILMLEQQLDAKQKLELEIQQLKGKLKVMEHMPGDEDSASKNKINELSEALQEKIDELDGMESLNQTLVIKESKSNIELQEARKELENVCYFTNKIYVTNIVHQISLLSIFCSMACSXGLLDLSGGQTHIGIKRMGELDLKAFSKACQKERTENAEVTAAFLCSKWEAEIKNPDWHPF

SEQ ID NO: 207713 - protein, 384 aa, Zea mays
  unsure (1)..(384): unsure at all Xaa locations
  Clone ID: MRT4577_121023C.1.pep
CKIHVHEVPDGTKGSHEGPXFHYLLAIPPPPPPPRHDSAGPLNLDVNDKMITGDQLAIGKETTRRLGMGTKCKDESLASLPIDELTEKADGFARVFPXIYVESITICIVLGFMLLALIWKFDFPTFTVQIIAILNDXSSILGKLTTSTWRHEXTIVAISKDIVKPPAQPDSWKXYLVVMTVIFXFWATYKTDFFSXGPVAGLALFKVLRNHRSVPILFMVANIQKLFHVESLEKISQGDFHTLSSAMYLQVSTINQXALTYTVSHARNWSFVYRPRFLLTFAFLVAQLLSHPTLVPYLTVVCGLSASPYILWCLQNATLIVVYANWAFAAIKGIGWGWAGVKWLYIIVFYFLLRIINFLIXYTLSRRAWNLVLMYIFFCLVDNY

SEQ ID NO: 207714 - protein, 73 aa, Zea mays
  Clone ID: MRT4577_121024C.1.pep
QPVSLLFQPYIPTLLYPHRVCLIGFDAICCASSSGRWEDWFCQSVPNGLVPLKLHNSVVSWAGSLSCAFNYSP

SEQ ID NO: 207715 - protein, 160 aa, Zea mays
  Clone ID: MRT4577_121025C.1.pep
MDHSSDEDTEISDSEIDDYEGKIYARLMSGDLKLNKNGENYICPFCSSKKKNYSKSSLVQHASGVSAAPNREAKEKAVHRALFKYLKNGLAKSPEPGSHATPVEPQPLQNRDEKFVWPWMGVLVNVPTEWEDGRQIGESGNRLKEQLSHFCPLRVIPLWT

SEQ ID NO: 207716 - protein, 92 aa, Zea mays
  unsure (1)..(92): unsure at all Xaa locations
  Clone ID: MRT4577_121026C.1.pep
PYIIIQRELKKFPKPRVVWSQMDPMFMGAYKCISLRCITRMKVLGWGGIMSFKFVGRALSEATVAGFYXVHVQKHSELVQKVFELDPLICPL

SEQ ID NO: 207717 - protein, 57 aa, Zea mays
  Clone ID: MRT4577_121028C.1.pep
QLSTKASGESRLLPPPGSNKMAPSLPLTKQCQRKLAKTGGLNKIQVSEHDTNMSRFQ

SEQ ID NO: 207718 - protein, 122 aa, Zea mays
  Clone ID: MRT4577_121029C.1.pep
MGRTPCCDRAAVKRGPWSPEEDEALRSYVQRHGSGGNWITMPKKAGLKRCGKSCRLRWLNYLRPDIRHGGFTAEEDAVIMSLYAQLGSKWSLIASQMEGRTDNDVKNHWNTKLKKRLLAAAA

SEQ ID NO: 207719 - protein, 216 aa, Zea mays
  unsure (1)..(216): unsure at all Xaa locations
  Clone ID: MRT4577_12102C.1.pep
MAVGRRSPGSQDPPALTIVTSLLLAFLSSSAAAAASSSTGAMHNNNWAVLVCTSRFWFNYRHMANTLSLYRTVKRLGIPDERIILMLADDMACNPRNSYPAQVFNNENHQLNLYGDNVEVDYRGYEVTVENFLRVLTGRHESVVPRSKRLLSDEGSHILLYMTGHGGDEFLKFQDSEELQSHDLADVVKQMKEKHRFXKELLIMVDTWQAATLFSQ

SEQ ID NO: 207720 - protein, 202 aa, Zea mays
  unsure (1)..(202): unsure at all Xaa locations
  Clone ID: MRT4577_121030C.1.pep
MGRTPCCDRAAVKRGPWSPEEDEALRSYVQRHGSGGNWITMPKKAGXIERVLPLACVYVPYVASKSHICTGALTTGRSLPVGVACXLKRCGKSCRLRWLNYLRPDIRHGGFTAEEDAVIMSLYAQLGSKXTDRTHVNPRSSSSFFDPPISXRAHAMPCQSVSLNLTDRRAXWSLIASQMEGRTDNDVKNHWNTKLKKRLLAA

SEQ ID NO: 207721 - protein, 61 aa, Zea mays
  Clone ID: MRT4577_121031C.1.pep
IDTINNYNACTNNAVSSCTFFNTKCFYYYTYNLFHDLFLSDLNKNLIHSMVYMNLTHAHLF

SEQ ID NO: 207722 - protein, 88 aa, Zea mays
  Clone ID: MRT4577_121032C.1.pep
AGGFRYGVAISADSDDFRVSLRVVKWFLSPVSHYRWVVCLCSQLEGALSGAVPCEFFVKYPRAGVGRMCKKIIALLGVRMEPRAEFRG

SEQ ID NO: 207723 - protein, 148 aa, Zea mays
  unsure (1)..(148): unsure at all Xaa locations
  Clone ID: MRT4577_121033C.1.pep
KTLDLVKASVAAPDALTLVXIRERATTSGSTEPLVEMRRNSTNALPASPLAEPDASTRAPGLDTFDKRLPLSRKNKMTTKNSINNSAKNIKIKRLPRTLTAIGGEELETGGDPTLSTVTLEPCLNTGPLRCTYTDPHIHKHINQPKGS

SEQ ID NO: 207724 - protein, 98 aa, Zea mays
  Clone ID: MRT4577_121034C.1.pep
STPPSRGAVHIKSGAAITTRFKNNRMKRWHVFSGHGRILKHKKHPGGRGNSGCMHHHRILFDKYHPGYFRKVGMRYFHKLRNKFYCPAVNIERLLFMV

SEQ ID NO: 207725 - protein, 52 aa, Zea mays
  Clone ID: MRT4577_121035C.1.pep
TDLVQEYMNQIGEQMNKLLHFSNMGKLISILRANQLPLDTKKLQGFTFTLRM

SEQ ID NO: 207726 - protein, 51 aa, Zea mays
  Clone ID: MRT4577_121036C.1.pep
FISTFLHLSFTNCPLSSFSNLILALAKFETQKALATPTSSPATIGEPGEAD

SEQ ID NO: 207727 - protein, 48 aa, Zea mays
  Clone ID: MRT4577_121037C.1.pep
PGGVMRCIVQGRPGTTAPGLAKAALAAEAGPGSGCVVNMAGKDYVHLR

SEQ ID NO: 207728 - protein, 164 aa, Zea mays
  Clone ID: MRT4577_121038C.1.pep
HEVPQALSRIDTQGILFFLGILLSVGSLESAGILRQLANYLDANIPNADLIASAIGVASAIIDNVPLVAATMGMYDLTSFPQDSDFWQLVAFCAGTGGSMLIIGSAAGVAFMGMEKVDFFWYFRKVSGFAFAGYAAGIISYLAVQNLHLSLPTSLVEIPFISGS

SEQ ID NO: 207729 - protein, 256 aa, Zea mays
  unsure (1)..(256): unsure at all Xaa locations
  Clone ID: MRT4577_121039C.1.pep
GQSVYDDWFMLLFNVVLTSLPVISLGVFEQDVSSEICLQFPALYQQGPKNLFFDWYRILGWMGNGLFSSLAIFFLNLCIFYDQAIRAGGQTADMAAVGTTMFTCIIWAVNIQIALTMSHFTWIQHLFVWGSITTWYIFILAYGMTLXGDNYQILLEVLGPAPIYWAGTLLVTAACNIPYLIHISYQRSCNPLDHHVIQEIKYLKKDVEDQTMWKRERSKARQKTKIGFTARVDAKIKQIKGKLHKKGPSLTIQTVS

SEQ ID NO: 207730 - protein, 80 aa, Zea mays
  unsure (1)..(80): unsure at all Xaa locations
  Clone ID: MRT4577_12103C.1.pep
GGFSISLEEEGCATMENDNSNIQDKEGRETHQDLSSVSGKQSEDSRTVCDYNIXTGATFDLELGHPGGMHIAYKTLTGMT

SEQ ID NO: 207731 - protein, 116 aa, Zea mays
  Clone ID: MRT4577_121040C.1.pep
FKPGRPGPPFPALACSSIHQLQEEQDTTTVAPHAGTKKATNMARLALEAAVPLCLLLETGPQGADSAEGMWPLDNLISCKVLGNCRQEPVPQGLPTREHPPTTTPACATLSPDDEA

SEQ ID NO: 207732 - protein, 204 aa, Zea mays
  unsure (1)..(204): unsure at all Xaa locations
  Clone ID: MRT4577_121041C.1.pep
MKLILSTSNIISGGPSVVRRPFFEKSNTELTSSLRGNFTSHQSESGTNYKSWTTQADGSLYVPTHEPSPLIEPRESYDITVKLFYLPNVPADRRCAQTREAIELVLKELGSISIDLLIVSFPGMAFDADDEDSDLEDXICPSVDXEGCDDTEVPPEDIETMAATWKTLEKLHSEGLVSKLGIAEXGVARLEKSWNTPPSSRASI

SEQ ID NO: 207733 - protein, 134 aa, Zea mays
  unsure (1)..(134): unsure at all Xaa locations
  Clone ID: MRT4577_121042C.1.pep
MVIDMGPPADWVKINVRKTKDCYEVYALVPGLLREEVSKCKTFLMIDFCPXYVLLFVLQKLERLMHGLMQVHVQSDPAGRLIVTGEPEQLDNPWGVTPFRKVISLPSRIDPHQTSAVVTLHGQLFVRAPFEQSK

SEQ ID NO: 207734 - protein, 175 aa, Zea mays
  Clone ID: MRT4577_121043C.1.pep
MPGFAQRLAGIPWRSIARQGLSRVFLVAKAYCVIHVVNDHLCSVTLVRGASMLPSLNLAGDAVAVDRVSVRLGRVAPGDIVLMISPEDPRKSVVKRVVGMQGDSVTYLVDPGKSDSSRTVVVPQDHVWVQGDNIFASNDSRQFGAVPYGLITGKIFCRVWPPESFGAIDDATKQS

SEQ ID NO: 207735 - protein, 176 aa, Zea mays
  Clone ID: MRT4577_121044C.1.pep
MPGFAQRLAGIPWRSIARQGLSRVFLVAKAYCVIHVVNDHLCSVTLVRGASMLPSLNLAGDAVAVDRVSVRLGRVAPGDIVLMISPEDPRKSVVKRVVGMQGDSVTYLVDPGKSDSSSRTVVVPQDHVWVQGDNIFASNDSRQFGAVPYGLITGKIFCRVWPPESFGAIDDATKQS

SEQ ID NO: 207736 - protein, 88 aa, Zea mays
  Clone ID: MRT4577_121046C.1.pep
KHGTSIKTHNALCFAVEMRCGRSSKALELKEGPPLQLAIIESLGASKTIWVHVLSVPPRLLLSVKTASLRHQLRQNSLAAKPGKRSSL

SEQ ID NO: 207737 - protein, 39 aa, Zea mays
  Clone ID: MRT4577_121047C.1.pep
SSASIFNPHNNSRLRCTFWHISPLKAPLDTTRVLSISQI

SEQ ID NO: 207738 - protein, 153 aa, Zea mays
  unsure (1)..(153): unsure at all Xaa locations
  Clone ID: MRT4577_121048C.1.pep
MPGFAQRLAGIPWRSIARQGLSRVFLVAKAYCVIHVVNDHLCSVTLVRGASMLPSLNLAGDAVAVDRVSVRLGRVAPGDIVLMISPEDPRKSVVKRXVGMQGDSVTYLVDPGKSDSFRTVVVPQDHRAVQGDNIVCTNDSTHPGILYFYQPSF

SEQ ID NO: 207739 - protein, 118 aa, Zea mays
  Clone ID: MRT4577_121049C.1.pep
MLCVPFCCFGTFLCLSISPLSTSSSVRSSFPFGLVDGLGNTPAIRYCAPHVALVLVKARPVGAPVSLYLLVRRGCEPSSPSTSRSVPARLSCHSSVGASAPPQLSGLFFGPGREARAF

SEQ ID NO: 207740 - protein, 62 aa, Zea mays
  Clone ID: MRT4577_12104C.1.pep
LMHRYRVSPLYNSGSITLCKGDTVLGMVDYVRPFSKLGYLAKRFSWATPVISQSPRFYQSAR

SEQ ID NO: 207741 - protein, 175 aa, Zea mays; identical to SEQ ID NO: 207734
  Clone ID: MRT4577_121050C.1.pep

SEQ ID NO: 207742 - protein, 392 aa, Zea mays
  Clone ID: MRT4577_121051C.1.pep
MEVEYHEEYVRSSRGVQLFTCGWLPAAASPKALVFLCHGYGMECSGFMKECGVRLAAAGYGVFGMDYEGHGKSMGARCYIRSFRRLVDDCGHFFKSVCELEDCRGEVADRSIRCVPSPSAAAAMPGFAQRLAGIPWRSIARQGLSRVFLVAKAYCVIHVVNDHLCSVTLVRGASMLPSLNLAGDAVAVDRVSVRLGRVAPGDIVLMISPEDPRKSVVKRVVGMQGDSVTYLVDPGKSDSSRTVEVPQDHVWVQGDNIFASNDSRQFGAVPYGLITGRIFWPVAPTPVGAPHCRTSPPPPAPHHRRCPQRRRRAAATSRRSGGPSSPRSTSSGRAPTGTPSPSRSSAPPPCLGARAQAHPPPPHPARRASPSASSGTRPAPSSSPPATTKLTC

SEQ ID NO: 207743 - protein, 384 aa, Zea mays
  Clone ID: MRT4577_121052C.1.pep
QAGRAGCCVPFVSGNLIFTGGRDSVVRMWKMEEGLLIDTSRALGGTIRAIAADSRLLVSGGTNAYIQCWRAVEGNGQLFHISGSGTDQNAEFRLWGHEGPVTCLALDSLRIYSGSWDMTVRVWDRDQMECVQKFMHADWVWDLALRGNTVASTAGRDAYVWDIRAGELTSLISNAHVGSAYSIAWTHLPDVLFTGGEDGAIRLFNVSDVSDDEGDIKPVATWVPHSGPVHSLAFEYPWLVSASSDGRIALIDLRKLLSSKSSSKGLRVKRVDGSAIEPPQRMLHGVGCDLFSIAIGADRIVCAGEDGSVRVWNFSEALEIERRAQALRSLRQENRIRRRKSQAEMNTNTRRPDQCSIAMKKNQLKGDKSATWHNKRAINEKAKS

SEQ ID NO: 207744 - protein, 105 aa, Zea mays
  Clone ID: MRT4577_121054C.1.pep
TREEATEHRQQQRTRPEIRPHHETSPAGGHRGRLAPQLVTEEETRRKLTCNSQNLNLEVQQQEGRPQHQGKRLQWDPPNNGRHPPPHDPSTRTSSHPWRRVWDKT

SEQ ID NO: 207745 - protein, 101 aa, Zea mays
  Clone ID: MRT4577_121055C.1.pep
NIYLVHNHRMLGYGVFLERNAGQHPKTKAPRGHGMLTRTGHNDSGAGRTATRDERMTGSERANWPEPCCCGRYPPTGVSPESLPCRQGQGLGGYHRESPVL

SEQ ID NO: 207746 - protein, 70 aa, Zea mays
  Clone ID: MRT4577_121056C.1.pep
QHDHSLVRPRTVGSRTSPQAPTPGNGCASRRCGARDASHAARTRREDVEGDATCLTTYPCCAWPCRMSIS

SEQ ID NO: 207747 - protein, 30 aa, Zea mays
  Clone ID: MRT4577_121057C.1.pep
LYSQGMYPTAVAILKMHFEITLPQHTHASA

SEQ ID NO: 207748 - protein, 115 aa, Zea mays
  Clone ID: MRT4577_121058C.1.pep
TPGPNDCSGPQRFFPPRTPFPFWGGFFSVGPAYPKMKPPNFLGGPKPGAALLKGHLSQKISFWVEAFFAAEVPRPGIFFYNIWKTFTPLVGAGPSFIVGAGIKKGETPLGTSLRC

SEQ ID NO: 207749 - protein, 251 aa, Zea mays
  Clone ID: MRT4577_121059C.1.pep
MEMVFILGEQGFAIGGEERLSRSNADPFKNGLGFNNGNGIYSGEQGFAIGGEERLSRSNGYLSELVAAAYVCHGGVQRVHIIDGCVDGSLLLELFTRDGAGTMIARDVYEGTRMATAEDLPGIRKIIRPLEDSGVLVRRTDAQLLEALESFYVVERDGSIIACAALFPFPEEQSGEVAAIAVSEECRGRGQGDKLLVSVSSHPFRFSLVAFVLDQAKKSFFVTHGGCHSSDYVEKMALSLGLKKYSCLLHE

SEQ ID NO: 207750 - protein, 71 aa, Zea mays
  Clone ID: MRT4577_12105C.1.pep
GNFQNLAFERPAGQGPGPSGQVPAQPLGGFRCPSALKMNHENWGIPPNQPLPIKKGIKQLNDPPYHGWEGP

SEQ ID NO: 207751 - protein, 180 aa, Zea mays
  Clone ID: MRT4577_121060C.1.pep
MVWEVPAAAWTHLKSIKVALKGHGVIGRWHGLVDSIASGNFLGAKRRGVVNGIDYGFTGEVTKIDVSRIRERLDSDSIVVISNMGFSSSGDVLNCNTYEVATACALALEADKLICVVDGQVFDDHGRAIQYMSIEEADLLIRKRARQSDIAASYVKVVDEESINFLAKGDDRPSLSPKAY

SEQ ID NO: 207752 - protein, 608 aa, Zea mays
  unsure (1)..(608): unsure at all Xaa locations
  Clone ID: MRT4577_121061C.1.pep
MHEHLSRVGSLYMATSVVVARLAGEASQPKVLPSANGVSSESYWRVAATRRWQGRGVRCCAAGFRGGGADADAVIASEDFVGFFREAWPYIRGHRGSTFVVVISSEVVCGPHFYRVLQDISLLHGLGIKFVLVPGTHIQIDKLLSERGKKAKYVGQYRITDEDARKAAMDAAGRIRLTIEAKLSPGPPMLNLRRHGVIGRWHGLVDSIASGNFLGAKRRGVVNGIDYGFTGEVTKIDVSRIRERLDSDSIVVISNMGFSSSGDVLNCKYIFLIIFKFFRMIVQCIHQNCVVVCLLPSQAXSYECKXFRKTCSFAYIAATILNKIDLCCLXNXTYEVATACALALEADKLICVVDGQVFDDHGRAIQYMSIEEADLLIRKRARQSDIAASYVKVVDEEGINSLHKGDDRPSLSPKAYINGYAASFRNGLGFNNGNGIYSGEQGFAIGGEERLSRSNADPFKNGLGFNNGNGIYSGEQGFAIGGEERXADQMAIFLSWSRQHMCAMDVYEGTRMATAEDLPGIRKIIRPLEDSGVLVRRTDAQLLEALESFYVVERDGSIIACAALFPFPEEQSGEVAAIAVSEECRGRGQGDKLLGMFFAYMDNQNPFS

SEQ ID NO: 207753 - protein, 245 aa, Zea mays
  Clone ID: MRT4577_121062C.1.pep
RASLLHLSEARWNEGDMHGTLLSENVIGVIHDHYVTFRLDMDVDGADNSFVRVEMARQETGPGDESPRRSYLRATRRVAETEKDARVRLSLYDHPAEFHVVNPAKKTRVGNPVGYKVVPAGTAASLLDPEDPPQKRGAFTNNQIWVTPYNKSEEWAGGLFVYQSKGEDTLDTWSERDRPIENKDLVLWYTLGFHHIPCQEDFPIMPTVSSSFDLKPVNFFESNPILKQRPTKEDDLPICTASTAA

SEQ ID NO: 207754 - protein, 185 aa, Zea mays
  unsure (1)..(185): unsure at all Xaa locations
  Clone ID: MRT4577_121063C.1.pep
AFRPTRXXFFFLFFFFFFFFFXFFFLKRRKLCLFRFSSQNLFPHGREEKKKKKGRGXNEVAHLHRVSEIKKVGAPKQLPAGRQRTPRTTYRHTDHDTNHRAGGGFYYCKTNGRAGPLDNFPWGQDFAFCFHTGAGGAGHCHQNGEGPRMELPLPNRSSFLGGGRRRDRFRVVVSRPPDITAGLGV

SEQ ID NO: 207755 - protein, 115 aa, Zea mays
  Clone ID: MRT4577_121064C.1.pep
QHLNVDYSSAVEKDQQTTQFHNKIRKRNHHPHKDTRNFPSSTVDREALNINGVCCIWRKGGLRCTKIRNPIVYIRPIKLSYCSIGYCCFLLMASHMLSVIVVWLPCVGRVVGRVV

SEQ ID NO: 207756 - protein, 65 aa, Zea mays
  unsure (1)..(65): unsure at all Xaa locations
  Clone ID: MRT4577_121065C.1.pep
VPPPPPPPPPPPPPPPPPPPAAAAACCCSVVAFNNREERGGWGRRGGRGGCRSRGXRVRGRGTCY

SEQ ID NO: 207757 - protein, 108 aa, Zea mays
  Clone ID: MRT4577_121066C.1.pep
IRLERFLNTPFWCTQRDVGTDTQTHGWAMLLIRLTMLQQKSCCCEVERFRYRATCTARRTLWNLDATVARPGKNYTHTLILLLSLRTTLYLHDMDSRYSRLKAKFRGR

SEQ ID NO: 207758 - protein, 275 aa, Zea mays
  unsure (1)..(275): unsure at all Xaa locations
  Clone ID: MRT4577_121067C.1.pep
EAGRGFLTIRQKPDLVPALHWHCRDLNTVPSHLPFPIPTIFASYSNRTNFYITIARTMSRRNSAMYTPHPLTAQFDSAKFMVGGGVAIFHLATGRVVLCSYEQHGRKVYFLPKGRRDAGEESGTGAEREGYEESGYRNRLLPLPTKHCQPQAHPRVHAATHTAEPVLLQLMPLREYQYVVYWYISETLPPLLEGDLETEPGSPYKPPPRYPENLSLRARIAMEPQGYEPRHHEGTGVDNMERQFKSELCSAEDAIKKLGQGHMMGXAMADVVRKG

SEQ ID NO: 207759 - protein, 92 aa, Zea mays
  Clone ID: MRT4577_121068C.1.pep
FCKKFRFSYTIQGISSHYIANLNSASSGPPYTTGFSSQLTDRIDQQSTTLLPSAHHLRCRCRIRHAFHPIHSAQVTSAGTTNRSLHANIVIC

SEQ ID NO: 207760 - protein, 43 aa, Zea mays
  Clone ID: MRT4577_121069C.1.pep
MEDSQLVEPRTGLRMAGLMCRPPKHHHGKPPKCPPCTPPYVPP

SEQ ID NO: 207761 - protein, 89 aa, Zea mays
  Clone ID: MRT4577_12106C.1.pep
IIFMWVHIYAYILANLSIYIHIIYYVHQKLKTAFPTKLCSESPSLPSQSCCCTDLKKKTFTLPPLFSFFLAKKVKGRVGGRVGGRVAAR

SEQ ID NO: 207762 - protein, 232 aa, Zea mays
  unsure (1)..(232): unsure at all Xaa locations
  Clone ID: MRT4577_121070C.1.pep
NFRQVTDGSLKPFEATNGENRGGGGAGAPLPDASGGSSGRGXGRRTATAVIDLSSSDSDSDGEGAVGSGKRVRGVGGDGSATKRARVSAVVDLPPGFLEPIPXAAGAGAXAACATKQFWKAGDYDGKPLGDGVAQQSVSGMDHVRVHPRFLHSNATSHKWALGALAELLDNSLDEVINGATXKKKKKRPMIKXDKKKSRMLLVEDDGXGGMDPRXMRQCMVLGYSAKKQVAS

SEQ ID NO: 207763 - protein, 102 aa, Zea mays
  Clone ID: MRT4577_121071C.1.pep
GTPFFTIQALVPVAESFVFADEMRKRTSGAAQPQLIFAGFEILDEDPFWVPFTEDDLEDLGELADKENVANRYMDGVRRKKGLLVEGRNVATDAEKQKTLNR

SEQ ID NO: 207764 - protein, 77 aa, Zea mays
  Clone ID: MRT4577_121072C.1.pep
QSTNLNQVRPVNNQRSSTTFITHTSLLTKACPEQNQIVQGCTTKRKKWCRTRTPAVTTPWIRLQQLQIRSQINPGPD

SEQ ID NO: 207765 - protein, 86 aa, Zea mays
  Clone ID: MRT4577_121073C.1.pep
IREIGNDFPIQTICRAFGRCYTNFTHTNFFFLDIFSWGWGGSARSQFGGFTLAPTSRRGDRTTTTKFWLETTGFQRQALEFYDGRR

SEQ ID NO: 207766 - protein, 66 aa, Zea mays
  unsure (1)..(66): unsure at all Xaa locations
  Clone ID: MRT4577_121074C.1.pep
FPVATPKKGVLGLMVHVGGAVRPVSRSFWPFXRLGSTVSSIGGLLSPVWXRHVTPFXACFSWGGGG

SEQ ID NO: 207767 - protein, 49 aa, Zea mays
  Clone ID: MRT4577_121075C.1.pep
IYDRSSSVFCLRNVELPLVITLTYAVHYYNTSMQLSLCLGMIKIFGLDV

SEQ ID NO: 207768 - protein, 114 aa, Zea mays
  Clone ID: MRT4577_121076C.1.pep
NEKKKVLFQKKKQQKQSSRPGRAGKHAAYWQLIVHPLWGLLATERGSTIHTPAPLLHFYDQQHGLPQTNQTATKTGPVCPTSWEKNSNYLPSKHHVSTPWIIQGRRLNALITPR

SEQ ID NO: 207769 - protein, 212 aa, Zea mays
  Clone ID: MRT4577_121077C.1.pep
MASAVAAVKEACLLAAVCVVLLHSSSSMGQQPLAPESSSASPYYYTGQQPPPPPASPVDCPYTGQQPTPPPVVVPPAPTPTPTPTPAPAPSPTINCSYSDCGAQCTTSCQASYNATARNCTALGDGAFQGCYGSCTNNSCPGKSCVHSVCDSSCSCDNPHASSCCQSCRTAVNAAMGVGGEYQRCLSYNDRYMGYCMMSCVDSCYKNCTQGA

SEQ ID NO: 207770 - protein, 71 aa, Zea mays
  Clone ID: MRT4577_121078C.1.pep
LHLLLLRAGSDPSALLLLSGPVQQQLLGRFPGCRGAAWRSAVPGPPLHPVRCVGTGSGSRSHGGGALPQQQ

SEQ ID NO: 207771 - protein, 60 aa, Zea mays
  Clone ID: MRT4577_121079C.1.pep
RLPVSDGIWIARHKKNLTEYVLDLIGERKNVADLGSSIRDNRFKDQKTRLQVLFGLSLTT

SEQ ID NO: 207772 - protein, 70 aa, Zea mays
  Clone ID: MRT4577_12107C.1.pep
LFLPCHSCCHCSTSGISRCPLLAGDGAVTAGRPVPFNSGSPPGPPRPPAKDTPAASAAPCCQASADGWST

SEQ ID NO: 207773 - protein, 79 aa, Zea mays
  Clone ID: MRT4577_121080C.1.pep
NPGWGLPKAGALLLLGSAAAAGLAYPLGDPVNGFSNATRFRSFLISLMALRLATNSRKAGSALILASRKKHRTVSLTFS

SEQ ID NO: 207774 - protein, 78 aa, Zea mays
  Clone ID: MRT4577_121081C.1.pep
GFWRGGEDQREEKNDRQQSERVPDCVSSMSFNRCPQHLMTSSCQRMAVVCCEPGCIKFFSNMNASRCIINPTINMPSV

SEQ ID NO: 207775 - protein, 451 aa, Zea mays
  unsure (1)..(451): unsure at all Xaa locations
  Clone ID: MRT4577_121082C.1.pep
MEDPYTSFLKNPHYYYCTSSXRPSPHPSPPSSLPTLRRPLPRRGRGCDRSSSPPVPXFFQHQPAQPAHHYSTAPPSPPLREALPLLSLSPTPAARPRAAQQHDVADTDSDDDDNDCCYHLQQEXGGLEDDXRAHRSSPTSTACRPAATTATATRWTSXLLVHVHGRRRRCSAHRPAGRXEADLLSGLSGRAAEEDEEEEDDCKPGGGHEEVPLGFSSSAPIGRLTKGQYWIPTPSQILIGPTQFSCPVCYKTFNRYNNMQMHMWGHGSQYRKGPESLRGTQPTAMLRLPCYCCAAGCRNNIDHPRARPLKDFRTLQTHYRRRHGIKPFMCRKCGKPFAVRGDWRTHEKNCGRLWYCACGSDFKHKRSLKDHIRAFGRGHAACGVDDCFDDDDDRDDPSSSEVDHAATNTTSNSTTTTAAAANAHHHHHTSWKPPPPPLSSSSRGSGDDRLL

SEQ ID NO: 207776 - protein, 176 aa, Zea mays
  Clone ID: MRT4577_121083C.1.pep
METCPSVKNILLLDSEGKRVAVKYYSDDWPTLSAKLAFEKSVFTKTQKANAGTEVEIVMFDGQIVVYKFIQDLHFFVTGGEEENELILASVLQGFSDAVERLLKNMVDKRTALENLDMILLCLDEIVDGGIVLETEGREIAEKVSGHGLEGASSAEQTLVNALTQAREHLAKSLLM

SEQ ID NO: 207777 - protein, 105 aa, Zea mays
  Clone ID: MRT4577_121084C.1.pep
SQLLRQRHQRHVGDTSFISCGHYNEVYLSAKGEPFPSDPKKQLELAEPAVVNSWESARGPKCGGGDRITGLLGTAVNVRRVGFANMGNTPGSGVLFSWSPHTGEK

SEQ ID NO: 207778 - protein, 176 aa, Zea mays
  Clone ID: MRT4577_121085C.1.pep
METFPLVKNILLLDSEGKRVAVKYYSDGWPTLSAKLAFEKSVFAKTQKANAGTDAEIVMFDGQIVVYKFIQDLHFFVTGGEEENELILASVLQGFSDAVERLLKNMVDKRTALENLDLILLCLDEIVDGGIVLETEGREIAEKVSGHGSEGASSAEQTLVNALTQAREHLAKSLLM

SEQ ID NO: 207779 - protein, 279 aa, Zea mays
  unsure (1)..(279): unsure at all Xaa locations
  Clone ID: MRT4577_121086C.1.pep
METFPSVKNILLLDSEGKRVAVKYYSDGWPTLSAKLAFEKSVFAKTQKANAGTDGNLHLISLNTEELFSTDGERCCAPLRXPEYLINIIISXEXECDVXCACLRVFSFLQVFHMFICFSLTAEIVMFDGQIVVYKFIQDLHFFVTGGEEENELILASVLQGFSDAVERLLKXFPLLKFIFSTIVCSVTCYCVNADCIWMCFQPWWFXNMVDKRTALENLDLILLCLDEIVDGGIVLETEGREIAEKVSGHGLEGASSAEQTLVNALTQAREHLAKSLLM

SEQ ID NO: 207780 - protein, 176 aa, Zea mays
  Clone ID: MRT4577_121087C.1.pep
METCPSVKNILLLDSEGKRVAVKYYSDDWPTLSAKLAFEKSVFTKTQKANAGTEVEIVMFDGQIVVYKFIQDLHFFVTGGEEENELILASVLQGFSDAVERLLKNMVDKRTALENLDMILLCLDEIVDGGIVLETEGREIAEKVSGHGLEGASSAEQTLVNALTQAREHFAKSLLM

SEQ ID NO: 207781 - protein, 61 aa, Zea mays
  Clone ID: MRT4577_121088C.1.pep
FSLSVLDGVDWEETCLGGGVCYQNWGGVNSVNRAWVCGEEGKGRPHRKWPGQGRWLVGEKQ

SEQ ID NO: 207782 - protein, 115 aa, Zea mays
  unsure (1)..(115): unsure at all Xaa locations
  Clone ID: MRT4577_121089C.1.pep
EVINWSYIELIGYQDGADLTEKKPGGIIALLDEACMVATSTPGTFAHKTGQTYKNEQRFAEPKLSRSGFTISQXGGHGTYRTALFLDKDQHYGGGEHQGPMRGLKWAIDPGPYRF

SEQ ID NO: 207783 - protein, 87 aa, Zea mays
  Clone ID: MRT4577_12108C.1.pep
ATRVTPPATTTTPSLTARTTTQTRQTPTRTTTTTATAPTTTRTPTAPSTTTTPTPAPPATPPRVAMKSTPKVAESINGLSFRGQWLY

SEQ ID NO: 207784 - protein, 122 aa, Zea mays
  Clone ID: MRT4577_121090C.1.pep
IKVTMMFCTSKKTPLISLQAGSVSIMWYKGRIRNGSVDISLRRGREDIPSTEWVVWQVHRRSEVRQPWLEEHEPSQHRCVQVASVLEPQRATRALLSRRVAVSSGALQTQSVETNRLTLEPN

SEQ ID NO: 207785 - protein, 65 aa, Zea mays
  Clone ID: MRT4577_121093C.1.pep
LHCIIWYMRCIFLVLLLIVILFPLYFFLQRTHFFDAFLYFSFLILYQCLYKHSIADWLPTFSPYV

SEQ ID NO: 207786 - protein, 473 aa, Zea mays
  unsure (1)..(473): unsure at all Xaa locations
  Clone ID: MRT4577_121094C.1.pep
MASTPRLARLAAAVAAWMLAAAASAGVEAGDPPLSPKGLNYEVAALMAVKSRLRDERGVMALWDINSVDPCTWSMVACSPDKFVVSLQMANNGLSGTLSPSIGSLSHLQTMSLQNNRISGEIPPEIGKLINLNALDLSSNEFIGDIPSSLGHLTRLNYLRLDRNNLSGPIPTDVARLPGLTFLDLSFNNLSXPVPKIYAHDYSLXGNRFLCNSSVIHGCSDVTAMTNGTMSRQVQKAKNHHQLALAISLSVTCSTILVLLFVYWLSYCRWRLPFASADQDLEFELGHVKHFAFHDLQSATDNFNSKNILGQGGFGIVYKGCLRNGTLVAVKRLKDPDVTGEVQFQTEVELIGLAVHRNLLRLYGFCMTSKERLLVYPYMPNGSVADRLRDYRNGKPSLDWSKRMRIALGAARGLLYLHEQCNPKIIHRDVKAANILLDGNFEAIVGDFGLAKLLDRQESHVTTAVRGTIGHIA

SEQ ID NO: 207787 - protein, 51 aa, Zea mays
  Clone ID: MRT4577_121095C.1.pep
QVAIKEAPCIALSMDSKWRLYYCEVVIEIVLYNCQCLGLWSKKKKKKGPAP

SEQ ID NO: 207788 - protein, 405 aa, Zea mays
  unsure (1)..(405): unsure at all Xaa locations
  Clone ID: MRT4577_121096C.1.pep
HFPIYRRKLCILKGVFPRQPKKKVEGNHKTYYHTKDIAFLAHDPLIEKFREIKVHRRKVKKAVAKKNRDLADRLLNRPPTYKLDRLVLERYPTFVDALRDLDDCLTMVHLFAALPAVDGERVEVKRIHNCRRFIXSYMVTFKPACNLWTALCGPHIVTSKVXHECLTFISVKGIYYQAEVQGQKITWLTPHALQQVLTDDVDFNVMLSFLEFYETLLGFVNFKIYHSINVNYPPILDPRLEALAVELYALCRYMSAGSRRMIGNSQTDEVMEDKDEKSKAEEVIEEEKVVKNKASSKADESEFRLAQLQHQLPTNEPGALMNLVEESTADDADDDDTKDCKGLFKNLKFYLSREVPRESLLFIIPAFGGTVSWEGEGAPFKEIDEDITHQVDSICNNLLHQSLTI

SEQ ID NO: 207789 - protein, 421 aa, Zea mays
  unsure (1)..(421): unsure at all Xaa locations
  Clone ID: MRT4577_121098C.1.pep
MDDDKQQLARQEDQAGRASWVPGAVIVGAGPSGLAVAACLAARGVPATVLEMSDSLASTWRHRTYDRLTLHLPKRFCELPLLPFPRGYPAYPSKGQFVAYLEAYAAAAGVAPRFGARVEEAAFDAGAGAWALRLAGAGGGGAGDLLLARWLVVATGENAVPRLPDLPGAARFAGRVLHTCDYRSGEEFAGRKVLVVGCGNSGMEVSLDLCRHGAAPSMVVRNTVHVLPREMLGLSTFGIAMALLKLLPVRVVDRILLAAARLALGDTGKLGLRRPKTGPIELKNLTGRTPVLDVGTLAHIKTGKIKVVGAVKEVTQRGVRFADGKEEQFDAIIQATGYRSNVPSWLKDGGDVFTSEGMPRIPFPNGWKGKNGLYAVGFSQRGLLGASADALNIARDIHRQWXTRPQDPSCSDVTVLSSDSF

SEQ ID NO: 207790 - protein, 287 aa, Zea mays
  unsure (1)..(287): unsure at all Xaa locations
  Clone ID: MRT4577_121099C.1.pep
MSSIGTGYDLSVTTFSPDGRVFQVEYAGKAVDNSGTIVGIKCKDGVVLGVEKLITSKMILAGSNRRLHSVHRNSGLAVAGLAADGRQVVSRAKSEAANYEKVYGEPMPVKELADRVASYVHLCTLYWWLRPFGCGVILGGYDRDGPQLYMIEPSGLSYKYFGAALCKGRQAAKTEIEKLKLSQLWCCLGERKAGRKDLDRKVETFGAYXREGIVEVAKIIYGVHGESKGIAFXLEFSWICYELNPQPQKVPNELLEQAKAAAQAAFXEMDSDLKTWQIKKRFMPPPR

SEQ ID NO: 207791 - protein, 95 aa, Zea mays
  Clone ID: MRT4577_12109C.1.pep
RRMIEGWEMLFTASGRSMQMDPKRRRFQACVQSLFTSFSSFGSFQRLLSQQQQQQQQKKGSAKIIQQGTLSWWKLERNRLTVFFYFELLNQIARL

SEQ ID NO: 207792 - protein, 255 aa, Zea mays
  unsure (1)..(255): unsure at all Xaa locations
  Clone ID: MRT4577_1210C.1.pep
MRGYRRRRLAELRRRLARESEVGAHGAVRERDGAAVEVLQPVPRWRRDGCYHRLHRGYGEQRPRRGQGRQKRRRAGRRVVLLVRVRERRGDQRRAAGLPVDARGRLWGRGGGSGVARVGPLVWVGVGGGRRRGRRLGGSDLRVLRRRGGRRGRRQRRGLDLRIGGGHHAGGFLGFRRDWKSILGKKGWTSASSSCEPFFYWLDVGNGRDLHHHKCPRSKLNSQLIMYLGPNERAAYEVVVXEEGRLVYRQSGDPV

SEQ ID NO: 207793 - protein, 125 aa, Zea mays
  Clone ID: MRT4577_121100C.1.pep
SEARAAAHRAPNRTVIGCAPVPLIEHERRARWLGESEAEASTPSTDVLSPRWCGPTPRREQSNVNIGVVLLLFFLSRVPSPLVAVGEEAHILPLHEIESLCMRCSENLVWASDDMYQINCSASGI

SEQ ID NO: 207794 - protein, 136 aa, Zea mays
  unsure (1)..(136): unsure at all Xaa locations
  Clone ID: MRT4577_121101C.1.pep
VGWDPDTXLTDIXQAPRVVSSCRSHWCVLAPXGCNSNAKSLWXSTRAPDLXLAYMCGMDTLGRGLRCCGELIKDGTLNALARRRHHSLTSTIAAXINDGKGDFHALDKKVLEWGEPTAPSGKQELADMSDTLLSLN

SEQ ID NO: 207795 - protein, 201 aa, Zea mays
  unsure (1)..(201): unsure at all Xaa locations
  Clone ID: MRT4577_121102C.1.pep
PLEFFFFFFFFFFFFFFFFFFFFFFFFFFFFLKKTKPRGSSGKRKNPPFLQRTPNPPFXQPSFYHFAQRLPRPKQRETGPPFXYGGGREPNPPKTGWSFKNPPPXQPGPPPGVNNNNPNVXGPSPPPAFVWKKKSPPGAPPCPPRFXVFWTPPPSPGGPPTSLPPFFLLLPPLALFCQGPRGEGGFNGPRPPGGPLFRGEG

SEQ ID NO: 207796 - protein, 81 aa, Zea mays
  Clone ID: MRT4577_121103C.1.pep
SYPISPPSKSRAYSHLMFITDGVYRSGSHAASTDTEEQKVRRPEFAPTSFLQHRTIPFPNLFEPFAFNGSLLLSCVFRCPR

SEQ ID NO: 207797 - protein, 86 aa, Zea mays
  Clone ID: MRT4577_121104C.1.pep
IKHSVTFFYFLFFLFFQWILLSMPCARSLCIIVIVLCSLSATPPWYSLLVVVVVRVQLLEQRGADGLATSTTWQMSSSWLSLSSIV

SEQ ID NO: 207798 - protein, 34 aa, Zea mays
  Clone ID: MRT4577_121105C.1.pep
CGKMVCASALAHSPCSISRPDIWSPTVGALVSLL

SEQ ID NO: 207799 - protein, 61 aa, Zea mays
  Clone ID: MRT4577_121106C.1.pep
YQDANLPSDHRKASTVQLGGLQIIGRASTVQIIRRASTNIAESSVDTVRRVYIKTANDHMV

SEQ ID NO: 207800 - protein, 104 aa, Zea mays
  Clone ID: MRT4577_121107C.1.pep
SPRKDCDEVQALRDRVYCDTCRAGFVTNVTEYIAGAKVRLECRHFGTGKLERAIDGVTDATGTRNVGISDSLRPANPLGYFKDVPLPVCAALLKQLDSDDDDDQ

SEQ ID NO: 207801 - protein, 187 aa, Zea mays
  Clone ID: MRT4577_121108C.1.pep
MASILVTTTTATAILLCVLFCAAAANTTGANDPNLPDYVIQGRVYCDTCRAGFVTNVTEYMAGAKVRLECKHFGTGEVERAIDGVTDATGTYTIELKDSHEEDICQVVLVQSPRKDCDQTQPLRDRAGVLLTRNVGIADSLRPANPLGYFKDVPLPVCAALLKQLDSDNDDDHSRSHTVDDDHRGRR

SEQ ID NO: 207802 - protein, 73 aa, Zea mays
  unsure (1)..(73): unsure at all Xaa locations
  Clone ID: MRT4577_121109C.1.pep
NMNMLQAGMIVEGWDKAEEGQTFSDPLRGTIXSNHLAIGGPGCSYLYTLLEHHWAVRVSLEEAXEKFVVKVVA

SEQ ID NO: 207803 - protein, 85 aa, Zea mays
  Clone ID: MRT4577_12110C.1.pep
MASASAPAVVVVFDFDRTIIDWDSDDWVITKLGAADAFQRLRPTMRWNPLMVLLPVLVLPERRHAPSRFRFLFQDRMIGGAPRPG

SEQ ID NO: 207804 - protein, 116 aa, Zea mays
  Clone ID: MRT4577_121110C.1.pep
TASNQATCICVERNPRGCSAELYQANGDQCTDSHYHVYVCLRAAMTTTFTHAHTENAMLPLHMTLRCFDMAVRLLANKESRGPKGEIINNRKHYMDMRFWVSLFPIINVLIYSIYI

SEQ ID NO: 207805 - protein, 172 aa, Zea mays
  Clone ID: MRT4577_121111C.1.pep
MASVPAPATTTAAVILCLCVVLSCAAADDPNLPDYVIQGRVYCDTCRAGFVTNVTEYIAGAKVRLECKHFGTGKLERAIDGVTDATGTYTIELKDSHEEDICQVVLVASPRKDCDEVQALRDRAGVLLTRNVGISDSLRPANPLGYFKDVPLPVCAALLKQLDSDDVDDDDQ

SEQ ID NO: 207806 - protein, 62 aa, Zea mays
  Clone ID: MRT4577_121112C.1.pep
IFITYKGFCLITPPDTINQKPVLCAMLCPRITLIDEKATHQIQKSIMNMSNISCFDQLHSTP

SEQ ID NO: 207807 - protein, 138 aa, Zea mays
  unsure (1)..(138): unsure at all Xaa locations
  Clone ID: MRT4577_121113C.1.pep
MASKRILKELKDLQKDPPTSCSAGXTIMGPPDSPYAGGVFLVNIHFPPDYPFKPPKVSFKTKVFHPNINSNGSICLDILKEQWSPALTISKVLLSICSLLTDPNPDDPLVPEIAHMYKTDRPKYEATARSWTQKYAMG

SEQ ID NO: 207808 - protein, 100 aa, Zea mays
  Clone ID: MRT4577_121114C.1.pep
LVPFSATPVVVSVHVNLLFQVPFPLPLFPCKPWVPPTLRCFRVSFPQSESGFHHRIVCSPFFFFSTQLFYYSVVHSFVIKAAPFPACLLLHHVCVSPAFF

SEQ ID NO: 207809 - protein, 53 aa, Zea mays
  Clone ID: MRT4577_121115C.1.pep
MSFTLRTRGTGTYFPDPICARTDHLLDVGREEGIIPIRIIIISFTTTPDRICL

SEQ ID NO: 207810 - protein, 34 aa, Zea mays
  Clone ID: MRT4577_121116C.1.pep
HASAQRPEIAHMYKTDRPKYEATARSWTQKYAMG

SEQ ID NO: 207811 - protein, 57 aa, Zea mays
  unsure (1)..(57): unsure at all Xaa locations
  Clone ID: MRT4577_121117C.1.pep
VGGEGRRCAPAARGXPGTWRRADGGEGREEGLPWSVDSVQSQTVVALSEADWGTGLL

SEQ ID NO: 207812 - protein, 148 aa, Zea mays
  Clone ID: MRT4577_121118C.1.pep
MASKRILKELKDLQKDPPTSSSAGPAGEDMFHWQATIMGPPDSPYAGGVFLVNIHFPPDYPFKPPKVFFKTKVFPPTLNSNGSICFSIFKEQWSPALTIFKVLLFICSLLTDPNPDDPFVPEIAPMYKTDRPKYEATARSWTQKYAMG

SEQ ID NO: 207813 - protein, 194 aa, Zea mays
  Clone ID: MRT4577_121119C.1.pep
MYIIAKKKKKEAKGHHHSFLVPSPAPQAAHRPPSAPPIQIQIQGLVMASKRILKELKDLQKDPPTSCSAGPAGEDMFHWQATIMGPPDSPYAGGVFLVNIHFPPDYPFKPPKVSFKTKVFHPNINSNGSICLDILKEQWSPALTISKVLLSICSLLTDPNPDDPLVPEIAHMYKTDRPKYEATARSWTQKYAMG

SEQ ID NO: 207814 - protein, 44 aa, Zea mays
  Clone ID: MRT4577_12111C.1.pep
HPENMKYNVKIGIIGGSGLDDPDFFKDATEQKVSTPYGDPSDML

SEQ ID NO: 207815 - protein, 51 aa, Zea mays
  unsure (1)..(51): unsure at all Xaa locations
  Clone ID: MRT4577_121120C.1.pep
TGHARXQSSEYGSSPSTRGKRVGRDKARGGGALLFYIFASLHYIFFLVPNP

SEQ ID NO: 207816 - protein, 194 aa, Zea mays
  Clone ID: MRT4577_121121C.1.pep
MDRTWTIVGVKKKKKKKNHHSFPNSAGCSSPSLHAGRAPIQIQGRNMASKRILKELKDLQKDPPTSCSAGPAGEDMFHWQATIMGPPDSPYAGGVFLVNIHFPPDYPFKPPKVSFKTKVFHPNINSNGSICLDILKEQWSPALTISKVLLSICSLLTDPNPDDPLVPEIAHMYKTDRPKYEATARSWTQKYAMG

SEQ ID NO: 207817 - protein, 120 aa, Zea mays
  Clone ID: MRT4577_121122C.1.pep
GNTCVLPLKAVMAGMLGGRVGIVVGRLRQGWNGVLWMGAEALIGSLPHTMEVSRLLWKLGDGNGRNTHSRDASSLRGIEGGVGFGRRASGVKGRRGHCTGEIHGGHGGDSRRGQEGDEGE

SEQ ID NO: 207818 - protein, 148 aa, Zea mays
  Clone ID: MRT4577_121123C.1.pep
MASKRILKELKDLQKDPPTSCSAGPAGEDMFHWQATIMGPPDSPYAGGVFLVNIHFPPDYPFKPPKVSFKTKVFHPNINSNGSICLDILKEQWSPALTISKVLLSICSLLTDPNPDDPLVPEIAHMYKTDRPKYEATARSWTQKYAMG

SEQ ID NO: 207819 - protein, 65 aa, Zea mays
  unsure (1)..(65): unsure at all Xaa locations
  Clone ID: MRT4577_121124C.1.pep
THIDNVTGANYSRKGERSFDLLAWDREINRSSFLFFLEHTYXDVYWGDFFFIYGQRVSFWGTTWV

SEQ ID NO: 207820 - protein, 72 aa, Zea mays
  Clone ID: MRT4577_121125C.1.pep
HKSVKGPVLLLFETALLPSGFSPGDPHPFGSRLPRMLKLGLSLPQGQEAPEAYPPLPPLEDYPGQSQMEEVA

SEQ ID NO: 207821 - protein, 110 aa, Zea mays
  Clone ID: MRT4577_121126C.1.pep
KPPNHKKKTGWPAIGKKLRPGNGGHGSWKTKRRVLKKKGCPFWVGHPNPLKIWGGSKGGKRKIGVRVEKPQLKWYVGKTRIGVFKTRFFFVLIIKREPFFWAVVICKKGF

SEQ ID NO: 207822 - protein, 172 aa, Zea mays
  Clone ID: MRT4577_121127C.1.pep
MIPVSLVVVVVGGWTAVYLTDLVLKSSVYFKHSYEDWLENNGLSISPFHIRWQTAVFNRAFYSWGRRKARMLYQWFNFGMVFGIIAMFSSFFLLGRTLMQTLAQMMADSPSYSSSSSSSSFSSSSSSSSSSSSSSSSSSSSSSSSLHNDQVLQVVVPGINLPVNQLTYFFAA

SEQ ID NO: 207823 - protein, 134 aa, Zea mays
  Clone ID: MRT4577_121128C.1.pep
VASHSYARGPSPLPPPPKEVTTCRKSPQFSTSDTNQGAATRDCLSSVYAFRKAQGLCYKCGQPFQRGRQCRESVQMHLVEELWHQFHVTFWMTYESSPMNLQEGRSGVCVLSQVPLWRGVPHVSVLCKFVVRVF

SEQ ID NO: 207824 - protein, 60 aa, Zea mays
  Clone ID: MRT4577_121129C.1.pep
RGGHTSSTRPSRFYFSPLFFFLARDLFYLGRIPQHLKGSFMAYLTHSPKFIDHTTLPITP

SEQ ID NO: 207825 - protein, 58 aa, Zea mays
  unsure (1)..(58): unsure at all Xaa locations
  Clone ID: MRT4577_12112C.1.pep
VSHADIRKXQAFGQTLEQSRGFGSEFRFADQPGHTGCGAAADPFASTGAAADDEDLYR

SEQ ID NO: 207826 - protein, 85 aa, Zea mays
  Clone ID: MRT4577_121130C.1.pep
ILTMMGVQRLSSSFMSCTVLCPPPRAGWRPASDGRVDESTRSSSSRGQHSLERDLLVLLVRAWCRGSSPASYMDTAVILCTWSSI

SEQ ID NO: 207827 - protein, 46 aa, Zea mays
  Clone ID: MRT4577_121131C.1.pep
ESSCRTGPCLTTLHDHVAVHTARPWKHSTYTQGLQDPILGQPAPIW

SEQ ID NO: 207828 - protein, 79 aa, Zea mays
  Clone ID: MRT4577_121132C.1.pep
SRGPLGFWLIKKNFGEKLKKKGDVEKGDSNYRLLGLFNFLKNTPRKGIWGEVFAKKIDKLYFWGHQGHENWGIKKGGRT

SEQ ID NO: 207829 - protein, 75 aa, Zea mays
  Clone ID: MRT4577_121133C.1.pep
LRSATTFDRFPSLPFRSCSALANSPEGPGRRRQRQSQKVRPPPKKNRHPQVSPSLWVRPSGRPNTTKKSSPTGAI

SEQ ID NO: 207830 - protein, 557 aa, Zea mays
  unsure (1)..(557): unsure at all Xaa locations
  Clone ID: MRT4577_121134C.1.pep
MAAMNGEVLGECGRNINSLKRKRESPAAYAAGVFCTSELHQHTVNDSAVRFHLDKDRKAKIVCHFNKQVLQSYKKFMSSAPPKRILLRQGAVWKDFPEKIVKLAQADFRAKKMITETGYQNQLFXLLDFAHMTFIDTKTGLQRPIAWIDENGNRYFPESFVQDQKIFMKKDFGNGYHDYISVESNGTREMNDQLGTSESSAESSNFGSSTEDVSSPKRARAENNSIIKKYCDMGEAIGENEPCTLLPTACNLLPRQANLGEVSRAQRTIEAVEKLLLQGMGSVIESKDIIGIYRTPLLDDHGQVRYHNHEKHVQVTRCHRGNANVRYAWLPCSKSTVHEMMLNSSLQVHKPPIKCAAYGEGTFLTPANRSDACVKFSAVDENGIVHMMLCRVIMGNVEIVHPGSKQHQPSSDYFDSGVDDLKNPQHYIVWDMNLNRHIYPEFVVTVKLPSKTKDYFVSQEDCQNSSDLSLVLNSSSPDCISXAISTKVSPQIMDMVIGCYEEFKSKKISRCELIKELRHVVGDRVLISTIMRLQDKLPPVERREAPGASAAKMVAKP

SEQ ID NO: 207831 - protein, 71 aa, Zea mays
  Clone ID: MRT4577_121135C.1.pep
QSASQSMNMVMGSYQEFKSKKISRCELVKKLRHIVGDRVLISTIMRLQDKLPPVKRREAPGASAAKMVAKP

SEQ ID NO: 207832 - protein, 595 aa, Zea mays
  Clone ID: MRT4577_121136C.1.pep
MAAMNGEVLGECGRNINSLKRKRESPAAYAAGVFCTSELHQHTVNDSAVRFHLDKDRKAKIVCHFNKQVLQSYKNFMSSAPPKRILLRIGAVWKDFPEKIVKLAQADFRAKKTITETGYQNQLFLLDFAHMTFIDTKTGLQRPIAWIDENGNRYFPESFVQDQKIFMKKDFGNGYHDYISVESNGTREMNDQLGTSESSAESSNFGSSTEDVSSPKRARAENNSIIKKYCDMGEAIGENEPCTLLPTACNLLPRQANLGEVSRAQRTIEAVEKLLLQGMGSVIESKDIIGIYRTPLLDDHGQVRYHNHEKHVQVTRCHRGNANVRYAWLPCSKSTVHEMMLNSSLQVHKPPIKCAAYGEGTFLTPANRSDACVKFSAVDENGIVHMMLCRVIMGNVEIVHPGSKQHQPSSDYFDSGVDDLKNPQHYIVWDMNLNRHIYPEFVVTVKLPSKTKDSFVSQENCQNSSDLSLVLNSSSPDCISQEMNLEAPPALGGGCAAPMLGDSMAKAPSSPWMPFSMLFAAISTKVSPQIMDMVIGCYEEFKSKKISRCELIKELRHVVGDRVLISTIMRLQDKLPPVERREGPGASAAKMVAKP

SEQ ID NO: 207833 - protein, 81 aa, Zea mays
  Clone ID: MRT4577_121137C.1.pep
EVWGSPMFAQPRGKNGTGSSNVSDIKPGETAKEKACELLKIKGNFGPSKGAALGLRPGILGSLTNLMKGLVIKKTLLLCLF

SEQ ID NO: 207834 - protein, 614 aa, Zea mays
  unsure (1)..(614): unsure at all Xaa locations
  Clone ID: MRT4577_121138C.1.pep
MAAMNGEVLGECGRNINSLKRKRESPAAYAAGVFCTSELHQHTVNDSAVRFHLDKDRKAKIVCHFNKQVLQSYKKFMSSAPPKRILLRQGAVWKDFPEKIVKLAQADFRAKKMITETGYQNQLFLLDFAHMTFIDTKTGFQRPIAWIDENEKCYFPESFIQDQKLFMKKDFGNGNHEYISEERNGTRETNHQFGASESSAESSNFESSIGDVSSPKRARAEKNFIVKKYCDMGEAIGENEPCTLLPTACNLLPHQANLGEVSRAQRTIEAVEKLLLQGMGSVIESKDIIGIYRTPLLDDHGQVRYHIHQKQVQVTGCHRGNANVRYAWLPCSKSTVHVMMLNGVLQVDKPPNKCAAYGEGTLLTPANRSDACVKYSDVDENGIVRMMLCRVIMGNVEIVHPGSKQCQPSNKYFDSGVDDLKNPRHYVVWDMNLNSHIYSEFVVTVKLPSKTKDSFVSQENCQNSSDLSLVLNSSSPDCISQEMNLEAPPALGGGCAAPMLGDSMEKAPSSPWMPFSMLFAAISTKVSPENMDVIIGCYEEFKSKKISRGELVKKLRHVVGDRVLISTIMRLQDKLPPVDKREEPXHIGVQGGGGTMRWVSGGGRGMQKGRNQPT

SEQ ID NO: 207835 - protein, 37 aa, Zea mays
  Clone ID: MRT4577_121139C.1.pep
HIHTKAISFPTDLLGLCIKLSLFLPISSVCFPLASRS

SEQ ID NO: 207836 - protein, 78 aa, Zea mays
  unsure (1)..(78): unsure at all Xaa locations
  Clone ID: MRT4577_12113C.1.pep
KXMIVNIKXFPXPPIILYFPGHQISPNGDYKGMEMIIEYKLFSNQESVLISFDVTWQGKAWCIKSMSCINHKNYQQKL

SEQ ID NO: 207837 - protein, 108 aa, Zea mays
  unsure (1)..(108): unsure at all Xaa locations
  Clone ID: MRT4577_121140C.1.pep
FYSHLYTNLFHISFSFNIPNFQTHSIFFHFSSVXFFPSYXISGSSDFRVPSHRRGGTRCPGEGDGTATAAAATRVRGGGGPPSAPASGRRRMGSAGPRARVISRPAAR

SEQ ID NO: 207838 - protein, 68 aa, Zea mays
  Clone ID: MRT4577_121141C.1.pep
IRLELLGATFILTTANPMKASNKDNEEADDRHPLHVGTRDLTPKARTGERPILCPNCSPPHPSPPPPP

SEQ ID NO: 207839 - protein, 36 aa, Zea mays
  Clone ID: MRT4577_121142C.1.pep
VPSHLVKGGDLKDRQDRRPRMDVLSLVLVMDKRLVS

SEQ ID NO: 207840 - protein, 72 aa, Zea mays
  Clone ID: MRT4577_121143C.1.pep
LPNVIFSQDNGHKNSYHHQNTKLQEESKLQQGIISIYDILQPIDQSRAHPDFPLQFKKITTEICFCTLFNLK

SEQ ID NO: 207841 - protein, 95 aa, Zea mays
  Clone ID: MRT4577_121144C.1.pep
MCERERIRGGIGRAALLLTLLAESLAVEIQADPGYGYTPTHTPATPTPKPEKPHTKGPKPEKPPKEHKLPKEHWPKPEKPPKEHKPTPSTYTPSP

SEQ ID NO: 207842 - protein, 115 aa, Zea mays
  unsure (1)..(115): unsure at all Xaa locations
  Clone ID: MRT4577_121145C.1.pep
DLQALQSLLYMKDNDEVFIELGYDKDKKKENAERDERAKKSVSINELLKPAEGXRYYGXRGRGRRRDDRGDFRGVYXGGYSHGPSAAAPSIEDQAQFPSLDGEVNVRPAADVTER

SEQ ID NO: 207843 - protein, 123 aa, Zea mays
  unsure (1)..(123): unsure at all Xaa locations
  Clone ID: MRT4577_121146C.1.pep
RASISNLLTLIIDANTHYTSQVFQQDLTFIXREWIMEHCERNLYIPALAGANNGSSLVIMSRGTQYAQQYYQVRDTFSFKCLNKKCKEGFYVTAIVTTVNQCAIIMSRNACFTCYRVELDFLY

SEQ ID NO: 207844 - protein, 166 aa, Zea mays
  Clone ID: MRT4577_121147C.1.pep
FLPTPLPRRRPAPSAPPTHRRGLGHSASRRSGCRIYPRAELEGRHTPPSPPIAIRESPNCERKETNEAAERGEDFFRFSGSDLPSPARETERQQLPSPDMTPHLPAVSSSSTTTTSRAAAAAAAPPSSPHQYRRRRRRRVPGCLRPRAASVRCCAAAAPAPQAAVP

SEQ ID NO: 207845 - protein, 71 aa, Zea mays
  Clone ID: MRT4577_121148C.1.pep
IWASPFVQGKYFETTCLFGTGGLKGLFQQEKKTVSDRFLNEKKPKKKKKKKKKKKKKKKKKKKKKKKKKTR

SEQ ID NO: 207846 - protein, 59 aa, Zea mays
  unsure (1)..(59): unsure at all Xaa locations
  Clone ID: MRT4577_121149C.1.pep
ATPWGMPXXELCCCCHACXTKYGSRGAIMKGIKHSYSXIIGWESVXXCGTXETILFXIL

SEQ ID NO: 207847 - protein, 45 aa, Zea mays
  Clone ID: MRT4577_12114C.1.pep
VGRLVHAFCYPSHPLVMQSALPARASTARAWSRTFMVSSCPIWSS

SEQ ID NO: 207848 - protein, 57 aa, Zea mays
  unsure (1)..(57): unsure at all Xaa locations
  Clone ID: MRT4577_121150C.1.pep
MRNYASAAAWEGPMAAELKTTGVEVIADGVHVKGWVIXSHKGPILNAASLRRCEPPA

SEQ ID NO: 207849 - protein, 75 aa, Zea mays
  Clone ID: MRT4577_121151C.1.pep
ALGDSLATRDKTVFFRGTSALLREANHVSLSNRRSNCTPAVVADKKRLLLPPHHRARADSGAQLQGFLENPTREA

SEQ ID NO: 207850 - protein, 79 aa, Zea mays
  Clone ID: MRT4577_121152C.1.pep
GVGAVRMDDDKLGHSDGLRGGAEKPGGPMIDVLKDVGSEDAVRASDVETLYRSNIRANQGQKQMSRGCWADERNKPYIV

SEQ ID NO: 207851 - protein, 77 aa, Zea mays
  Clone ID: MRT4577_121153C.1.pep
LSDPQHSEDDIEDIQKLQAGPPLDEMSIPYISRDLLHAIEYLHSEGLVRNRGPQVKASGQWSRQQLNQMADWSLMLG

SEQ ID NO: 207852 - protein, 83 aa, Zea mays
  Clone ID: MRT4577_121154C.1.pep
KLTQQFGSFRNTRTRTRNSGYVKPVVISGIDSQNLKLKIPELSDPKFLVTRMSTPSLYGCVTLPLSVPCVCHPFCSPRETRIW

SEQ ID NO: 207853 - protein, 518 aa, Zea mays
  Clone ID: MRT4577_121155C.1.pep
GRGGPGLVPSSLLPFDVSVVLRGPYWIRIIYRKKFSVDMRCFAGDQVWLQPATPPKGGPSVGGSLPCPQFRPFIMEHVAQGLNALEPNFMNATQASGHLNNNAGVPQTAPSANRLNATPGVSMVRPTSGVANHVAASLSRAGNAMLASSALASGISGTSVRLTAGAGLPVHMKGELNTAFIGLGDDGGYGGGWVPLAALKKVLRGILKYLGVLWLFAQLPELLKEILGSILKDNEGALLNLDQEQPALRFYVGGYVFAVSVHRVQLLLQVLSVKRFHHQQQQQQAQSNAQEELAAVEINEICDYFSRRVASEPYDASRVASFITLLTLPILVLREFLKLITWKKGLSPVHGDIATAQRARIELCLENHSGSASSDNTENSSLAKSNIHHDRAHSSVEFALTFVLDHALIPHMNVAGGAAWLPYCVSVKLRYSFGDNNHIAFLAMNGSHGGRACWLQFEEWERCKQKVSRAVETVNGSGVAGEVGQGRLRMVAEMIQKQLQLCLQQLRDDPLSAGSTAS

SEQ ID NO: 207854 - protein, 105 aa, Zea mays
  Clone ID: MRT4577_121156C.1.pep
KTKKKGAFLPNFGSPKGREKAFPTRFLFFQKKGPKCPFINQKGGFPFKKNPPKGAKTGGGHLFLRGFIAGGEQKNWAQPPPSGDGGGTPEIPARSPRGTPFSLKG

SEQ ID NO: 207855 - protein, 36 aa, Zea mays
  Clone ID: MRT4577_121157C.1.pep
TCHTREVMHSCRARNISHLGCRIVSDVEVSGVVMYD

SEQ ID NO: 207856 - protein, 78 aa, Zea mays
  Clone ID: MRT4577_121158C.1.pep
GERRGNFFLLTGIFFKKNNSLFRGQRARTPKLSGGRRPKPFSNTFIYSSRALFLGARFLPGGGGSGPLGFPLIFGPVP

SEQ ID NO: 207857 - protein, 56 aa, Zea mays
  unsure (1)..(56): unsure at all Xaa locations
  Clone ID: MRT4577_121159C.1.pep
WVPRGRPGDSPPPTAHPVAGASPSSPLARHSPCRSALPIPRASPSHCXLXVSPTEG

SEQ ID NO: 207858 - protein, 86 aa, Zea mays
  Clone ID: MRT4577_12115C.1.pep
NTSVCIVVSHICTIVITSPRRPKPFSSPPVVSSLCQPLHCILKPLPRAKFVHLTEVCPQRIIKIRQKSAQQMNQHSLKFRIDKITV

SEQ ID NO: 207859 - protein, 147 aa, Zea mays
  Clone ID: MRT4577_121160C.1.pep
TTLLHNGAVLEDVDGGGGGIERHGVVEGSVIHVALLDGQHLPQPQDKRTEKRRGEGPAPPLRVIVVSGCAEGRVEMAVGARAAVSMLRAELERARGAGARFPLPRDGAYFFIHEQSVMDESRSFEWHGVAAGDEIVVFNSSVTRNQA

SEQ ID NO: 207860 - protein, 69 aa, Zea mays
  Clone ID: MRT4577_121161C.1.pep
LWFGFFFFFFFFLQSHFSLLTPPSPPSPGPPNFFSKLKRYWALLPNWDLQAPRKPLVYLPKDWKPEKKT

SEQ ID NO: 207861 - protein, 95 aa, Zea mays
  Clone ID: MRT4577_121162C.1.pep
SSFLTLQVQEKELYDGKMDFSLLNPYMLLCRPRCAWSLVVEISDQELWSLDSGLQRAKSVTGVTGLFPRSRTAATCNRLLSSLNCQRHCHHRKVV

SEQ ID NO: 207862 - protein, 74 aa, Zea mays
  Clone ID: MRT4577_121163C.1.pep
RFARASSHAGRVILLIRKRIVRKLTANSDTYKLIATYVLRHLPLLSQRKLVQGSYKDVESHFSNKRSKATALED

SEQ ID NO: 207863 - protein, 99 aa, Zea mays
  unsure (1)..(99): unsure at all Xaa locations
  Clone ID: MRT4577_121164C.1.pep
MDPTKLRECSSHXSTETTTNAGSXVRNDNDALTVGPRXTILXLEDYHLIEKAGHFPRERMLQRVVHAHGGSYXGLFECTHHGTDLTCADFVLARVCGRP

SEQ ID NO: 207864 - protein, 55 aa, Zea mays
  Clone ID: MRT4577_121165C.1.pep
IFVLCFFFLGAGSVKEKTSTRYKKNRWNWISSRQHRNHPDTTQILEKMILPYYKN

SEQ ID NO: 207865 - protein, 115 aa, Zea mays
  Clone ID: MRT4577_121166C.1.pep
RFPGKKKKKKKKKKKKKKKKKKKKKKKKKKRKKNKGTKKKKQNKSKENGILYKDTINSINWTEIFTTLDRGEPPGVPHLPPPCSATPFRRLGYSQKGPRLFPPVGRPNWRRGRPL

SEQ ID NO: 207866 - protein, 61 aa, Zea mays
  unsure (1)..(61): unsure at all Xaa locations
  Clone ID: MRT4577_121168C.1.pep
KFLLLYIFSLLVLLEIEHVPFFRDMISSVWPNXXSPIFFSTTSSASCXVYNLFCVVYVLCS

SEQ ID NO: 207867 - protein, 56 aa, Zea mays
  unsure (1)..(56): unsure at all Xaa locations
  Clone ID: MRT4577_121169C.1.pep
KRLTVHEVLRYPWVHVGGXAPDKTLDSAVLARMKQFSAMNYLKKMALRVIAVNLAE

SEQ ID NO: 207868 - protein, 82 aa, Zea mays
  Clone ID: MRT4577_12116C.1.pep
DHYLLYRQQSPKGMNSITIRMQAFSYTLTSRHLSPTLITIPTLTHHHSTATTNLLTFPRHLTTIMHLSGSNTNTNLKPDSTT

SEQ ID NO: 207869 - protein, 170 aa, Zea mays
  Clone ID: MRT4577_121170C.1.pep
MASPDPSAADAGTGGESTSQAAAVEPIRMPTVEEIKGQDIWNNCAVRSVVSGVMGGGLGVLMGLFFGALENPIMAEQMTARQQIVYTAKQMGSRSISNAKTFAVMGLIFSAAECTIEKVRAKHDTTNTAVAGCVTGGALAVKGGPKATCFGCVGFAAFSVAIEKFFDRHT

SEQ ID NO: 207870 - protein, 76 aa, Zea mays
  Clone ID: MRT4577_121171C.1.pep
PITTQYPHRPEWWHPPTSSRSCPTPTRCACYSLRAHSGYQAGLLRCYGRGRAIGLDHSAQMPSQRRRPKATWINCS

SEQ ID NO: 207871 - protein, 170 aa, Zea mays; identical to SEQ ID NO: 207869
  Clone ID: MRT4577_121172C.1.pep

SEQ ID NO: 207872 - protein, 618 aa, Zea mays
  Clone ID: MRT4577_121173C.1.pep
MSSFFAVAVALVLSSLIHGTTMATASSEESFFQKCPASSCSEGGPEIRFPFRLATSPLSCGAPGMELVCSKADTVLVHPNLGLCKVTAIWYGGSTITIVPLAAEPEPKCPFQKIISTNLSTDVYRPYGDRATLVSCSAEFIVPSHPASLAGPISCLTNASRRFTYLVPSFRPMDFLPLDCTVLSNSISVPYPASVNAGFNGTARGAVAFGETMLEWRVPNITDVCRDCEAEGRLCGFSSESRQAFCKSKNHSSRLKVIAVTTPVAAVLVLSAMAGAALLHLALKSKYDDEIHRKVEMFLETYRTLKPRRYTFSEVRKMTRRFSSRLGQGGFGSVYKGELPNGGVPVPVAVKMLEDSTGEEEFISEVATIGTIHHANVVRLLGFCSERSRRALVYEFMPNASLEKYIRCSSQEQSLIPTASKMLEIATGIARGIEYLHQGCDQRILHFDIKPSNILLDYNLNPKISDFGLAKLCARDQSVVALTAARGTMGYIAPELYSRNFGTVSCKSDVYSFGMVVLEMVVVSAKRRKYSPAETEDQNDDVCVPEWIYEEIVTGQEPREMARGERDMVRKLAIVALWCIQWNPPNRPSMTTVVNMLTDSLQSLKIPPKPFVSSFVGQ

SEQ ID NO: 207873 - protein, 141 aa, Zea mays
  unsure (1)..(141): unsure at all Xaa locations
  Clone ID: MRT4577_121174C.1.pep
RGGGGGEREEXAAADXEXRSXEGGRTRATDDHAHNNAHSTDGEDHEPKNNXDRERGRTRGEGKETPNTEDARRSATEGXNGKERDGRNSTENEAQTRGGRGGGGGGHXGGRRXGGGXGXGGGGHGGGRGGDGGGGGNGGEN

SEQ ID NO: 207874 - protein, 671 aa, Zea mays
  unsure (1)..(671): unsure at all Xaa locations
  Clone ID: MRT4577_121175C.1.pep
MSSFFAVAVALVLSSLIHGTTMATASSEESFFQKCPASSCSEGGPEIRFPFRLATSPLSCGAPGMELVCSKADTVLVHPNLGLCKVTAIWYGGSTITIVPLAAEPEPKCPFQKIISTNLSTDVYRPYGDRATLVSCSAEFIVPSHPASLAGPISCLTNASRRFAYLVPSFRPMDFLPLDCTVLSNSISVPYPASVNAGFNGTARGAIAFGETMLEWRVPNITDVCRDCEAEGRLCGFSSESRQAFCKSKDHSSRLKVIAGTWFQCTFXIECSFYFLTTXRSTLSYIVVSSTKDLNNRLQSNNRLMFSNPVCSVTTPVATVLVLSAMAGAALLHLALKSKYDDEIHRKVEMFLETYRTLKPRRYTFSEVRKMTRRFSSRLGQGGFGSVYKGELPNGGVPVPVAVKMLEDSTGEEEFISEVATIGTIHHANVVRLLGFCSERSRRALVYEFMPNASLEKYIRCSSQEQSLITTASKMLEIATGIARGIEYLHQGCDQRILHFDIKPSNILLDYNLNPKISDFGLAKLCARDQSVVALTAARGTMGYIAPELYSRNFGTVSCKSDVYSFGMVVLEMVVVSAKRRKYSPAETEDQNDDVCVPEWIYEEIVTGQEPREMARGERDMVRKLAIVALWCIQWNPPNRPSMTTVVNMLTDSLQSLKIPPKPFVSSFVGQ

SEQ ID NO: 207875 - protein, 100 aa, Zea mays
  unsure (1)..(100): unsure at all Xaa locations
  Clone ID: MRT4577_121176C.1.pep
WEXKGAGNTXVPNEKEFFYPLFKAPNLKGLAPPFALKGKRGFPAGNLXAKKGFGEEALGDXPFENPLXGQARGFLPKRSKTPGIAPRFGGKISFQQKGGG

SEQ ID NO: 207876 - protein, 60 aa, Zea mays
  Clone ID: MRT4577_121177C.1.pep
ATIHYPSISKHGATQNHVGAPPTAMCVMWISTRVTEFGGILDSSSIPTIIVRLVPLIVPK

SEQ ID NO: 207877 - protein, 38 aa, Zea mays
  Clone ID: MRT4577_121178C.1.pep
KKQYSPTIFYKPKKPITTVRTFKLLTITQPKQFHSLLT

SEQ ID NO: 207878 - protein, 40 aa, Zea mays
  Clone ID: MRT4577_121179C.1.pep
HGAEHGEHSEDGELTRAHRRRLILRGLTETRLVEMEARLK

SEQ ID NO: 207879 - protein, 46 aa, Zea mays
  Clone ID: MRT4577_12117C.1.pep
YRVPPTRPLLSIPSIMIHPITISTKSNMQREAFNFICHEASACGYR

SEQ ID NO: 207880 - protein, 42 aa, Zea mays
  Clone ID: MRT4577_121180C.1.pep
RRNNNPRETFGPSTTPLGKMCSPHKNFLVPSSRTHECKLSPV

SEQ ID NO: 207881 - protein, 76 aa, Zea mays
  Clone ID: MRT4577_121181C.1.pep
VRNKNGNGGAGGVHCPWTAKKGFVTGGKGVPWSGTAKVVAVETFDPPAEELGLLLWKSWGVTEGGGFFGGPVSYVW

SEQ ID NO: 207882 - protein, 90 aa, Zea mays
  Clone ID: MRT4577_121182C.1.pep
GPPPPMEFVCLKRGVAGGFIGLLLQTETSKGPWHAQFRLGRNEFQYLGDGKGVKVFAPLKAKYKGPFLPNAPLHGRWGPPFLDFFYHKNP

SEQ ID NO: 207883 - protein, 87 aa, Zea mays
  unsure (1)..(87): unsure at all Xaa locations
  Clone ID: MRT4577_121183C.1.pep
FHFWTKSANAFNSSKVKGMSFRSGSLTKPSTLSNSLFIRFMATKATMGHAKSFAGIGLNHLTTKKNNPSLIILSCTDGWVRPGIPXP

SEQ ID NO: 207884 - protein, 76 aa, Zea mays
  Clone ID: MRT4577_121184C.1.pep
RLEMDHHRYLWADGIDVDIPTGFAGWFFCITLRKLVWVILQPLFYAFRPLFINPKPITHLEVINNVIQVTFDVLVY

SEQ ID NO: 207885 - protein, 73 aa, Zea mays
  Clone ID: MRT4577_121185C.1.pep
TVQVPQPRRAHGRSVRARATYARAGGVFGGSMLTREWWSHHPAKGDDWRRSVDEILRCSFFFVGFPALFMTLP

SEQ ID NO: 207886 - protein, 203 aa, Zea mays
  unsure (1)..(203): unsure at all Xaa locations
  Clone ID: MRT4577_121186C.1.pep
HARLAPRIDRARSLQRWTRCLPPPLLAGPPLLPAPAAARAAGWAIGALLTCIFAVVGSLVGIFIGAFMGMSTESGMFRGAGVGAVSGAVFSIEAVESCIEIWRSSHSGKYSILFVLDIISSLFSGRIVWEKVSPALQRAVQSQMSLMSTPFIDNSDLFETGSTGGMSRDLIDRIPKTRFSAASNCDXGTDSSCCPVWLQDFGA

SEQ ID NO: 207887 - protein, 54 aa, Zea mays
  Clone ID: MRT4577_121187C.1.pep
GGKIMPYTETKETSIVAKQKFHGKNFGRKKKKTSEKKQGGETPNHPWVNNKGGL

SEQ ID NO: 207888 - protein, 246 aa, Zea mays
  Clone ID: MRT4577_121188C.1.pep
MDSVPSPSSSTRATAAPGPCCRFDALRRACARHAAAAARAAGWALGALLTCVFAVVGSLVGIFIGAFMGMSTESGMFRGAGVGAVSGAVFSIEAVESCIEIWRSSHSGKYSILYVLDIISSLFSGRIVWEKVSPALQRAVQSQMSLMSTPFIDNNDLFETGSTGGMSRALIDRIPKMRFSAASNCDKETDSSCCSVCLQDFGAQQFVRALPQCQHIFHVRCIDNWLLRHASCPLCRAGVHIDHIHM

SEQ ID NO: 207889 - protein, 41 aa, Zea mays
  Clone ID: MRT4577_121189C.1.pep
SGCRRSHAAGRGFSYGRRTQLTERNHVVTFSPHGFFSRVIF

SEQ ID NO: 207890 - protein, 148 aa, Zea mays
  Clone ID: MRT4577_12118C.1.pep
ALCTKGSWRPTIPPPWLAEDHACARAARNRGGQLKDRSNILCRDGSALSQRAAVSHQEPEGSGKSGADGGATQREHHGQAWPRTAPSQRDVVERYSLFLCHVPCGVAPGAAGDEQECEQPRQRAGVGFCMRPGQLVHQLPDHMREREP

SEQ ID NO: 207891 - protein, 135 aa, Zea mays
  unsure (1)..(135): unsure at all Xaa locations
  Clone ID: MRT4577_121190C.1.pep
PRPPRVRPASADAWADAWAGALVCXDDPDTCLTALQCPCLLVVLNVEAVREDMPWTTTCVCGAVFVDRGITLAILTAIFYGVDPWTSFLIGEGLVFKXWLCSTYTGIFRXGLHRKYXFKNSPCEPCIVHCCLHWC

SEQ ID NO: 207892 - protein, 246 aa, Zea mays
  unsure (1)..(246): unsure at all Xaa locations
  Clone ID: MRT4577_121191C.1.pep
MDPVPAPSSSRRAAAAPGPCCRFDALRRACAGNAAAAARAAGWAIGALLTCIFAVVGSLVGIFIGAFMGMSTESGMFRGAGVGAVSGAVFSIEAVESCIEIWRSSHSGKYSILFVLDIILSLFSGRIVWEKVSPALQRAVQSQMSLMSTPFIDNSDXFETGSTGGMSRDLIDRIPKTRFSAASNCDQETDSSCCPVCLQDFGARQFVRALPQCQHIFHVRCIDSWLLRHASCPLCRAGVHIDHIHM

SEQ ID NO: 207893 - protein, 261 aa, Zea mays
  Clone ID: MRT4577_121192C.1.pep
GPPALSPWRVSCFSSRVLSLPSAVSVPFLALGTQLPCAQLTEARRRSSQARPAARSSQLLLAQPSPLLSPSAAALQLTAPCSLYLPWLAVPSLLPPSLLQHADILRSSEFSLHVCGLLPARRPLAISSSCVHTSGLLFAAAAELLCSPAVLPASAVRSAEVSLHGRRAPCSMAAHPVACSHPALSEARLLQLPQPSSSFARACVLATPSAVKSLPAAARFFHPACVPCVSVLGLWYSFTRSRGRLLGYGSSRALGAPWYSS

SEQ ID NO: 207894 - protein, 68 aa, Zea mays
  Clone ID: MRT4577_121193C.1.pep
VDLHHCSFSPAVVTGRTVVRNNTQYRAHRALYKPLLTIASVMYVRRISPQAWSRCQVLKLAPFFRRTI

SEQ ID NO: 207895 - protein, 36 aa, Zea mays
  Clone ID: MRT4577_121194C.1.pep
SYPCPGISFRPAPLALLVSSEYLYSPPYFPGPPTHP

SEQ ID NO: 207896 - protein, 57 aa, Zea mays
  Clone ID: MRT4577_121195C.1.pep
SLLGRIFISTRGAYSVYTCAKSMCYYITRRAYAQEQAWPHVSEQTRQDTQGWLRMLT

SEQ ID NO: 207897 - protein, 71 aa, Zea mays
  Clone ID: MRT4577_121196C.1.pep
YAMLYYLRSNTNFTRNQRCIRKVQMGRRILLPASHVGRPRRVMQPTAHQHHMQEDHHQAVARPLLLQQAAA

SEQ ID NO: 207898 - protein, 83 aa, Zea mays
  unsure (1)..(83): unsure at all Xaa locations
  Clone ID: MRT4577_121197C.1.pep
CAAXASGASEGIKLASFLCSSSPAPETAPHDTRRNPSTGGAGLSLLRPLCPHVAYSPRAASMGTRPXLCXAXXALISTLLIXL

SEQ ID NO: 207899 - protein, 44 aa, Zea mays
  Clone ID: MRT4577_121198C.1.pep
WRMPRHNNYLARNGRAKVAISHAHCELGNSGHYRAPTWELNDQS

SEQ ID NO: 207900 - protein, 45 aa, Zea mays
  unsure (1)..(45): unsure at all Xaa locations
  Clone ID: MRT4577_121199C.1.pep
LFFVEENYDEKVDYLNLPCPVPFEVIHLEALIYFKPELFXGFRFD

SEQ ID NO: 207901 - protein, 60 aa, Zea mays
  Clone ID: MRT4577_12119C.1.pep
GGGTFDIFLGGPSPNNALCAIIAACRSKNLSIFFHVVAGGPPSYKIYISRNAFHSRPGYA

SEQ ID NO: 207902 - protein, 66 aa, Zea mays
  Clone ID: MRT4577_1211C.1.pep
KSPPLLLFLASVTLVLLVTVFKLRAKALSRFVYETRPRLLVIVCGTTDSFPQSPQKKRGAAAVRSA

SEQ ID NO: 207903 - protein, 113 aa, Zea mays
  unsure (1)..(113): unsure at all Xaa locations
  Clone ID: MRT4577_121200C.1.pep
PLNMHEIFHASLSQTINTAAVTILANFNDSHTTATPHAAAIAGPTVMRIINXQQQPAIDYXLDNNATIDREKKXLNFEHGGDTFNVSLHTIEEDIFDGKGTPGVTHLAAEDFD

SEQ ID NO: 207904 - protein, 89 aa, Zea mays
  Clone ID: MRT4577_121201C.1.pep
IGSLEAGRVNRNLSSYITPPKHQCYKTSSYITRAIRLAPPRSSKGSCTLNLEDEVLYSLQQCSLNGPLNLEDVVGSSIYKVSINGSLFI

SEQ ID NO: 207905 - protein, 38 aa, Zea mays
  Clone ID: MRT4577_121202C.1.pep
RVDALERAVRRVEDAERRRRRGKKLKKDGKGSNKCYTD

SEQ ID NO: 207906 - protein, 55 aa, Zea mays
  Clone ID: MRT4577_121203C.1.pep
DLFELGGLAYVEKNNARMAGALYDTIIACGGYYVCPVVKYERSHMNVPFTLAKGL

SEQ ID NO: 207907 - protein, 126 aa, Zea mays
  unsure (1)..(126): unsure at all Xaa locations
  Clone ID: MRT4577_121204C.1.pep
MATSSRRVPLLLLCLGVLGSCSFXAGSWGRXXXITWGDGRGKGLDNGRVLTLXLDRTCGSGFQCRHESLFGKIDMQLRGGXGNSACTVTGYYLSAQGGAHHQIDFEFLGNGCGEPYTRHTNGSTRG

SEQ ID NO: 207908 - protein, 99 aa, Zea mays
  Clone ID: MRT4577_121205C.1.pep
ELVVAATTGARRVVVTTVHGVPVPTYRHVVVITDQLVVSTLASSVVISAEQDVEASVVVVAGPGMLVKKRLYSSTMVHAHRFDSRVQSITRVELYACSS

SEQ ID NO: 207909 - protein, 38 aa, Zea mays
  Clone ID: MRT4577_121206C.1.pep
AHRLATIRFEDSIAEVQDGRVVEHGSHGDLVSRLNGAY

SEQ ID NO: 207910 - protein, 106 aa, Zea mays
  unsure (1)..(106): unsure at all Xaa locations
  Clone ID: MRT4577_121207C.1.pep
PKTPDGTPSQGALTGQLLICWATTXLVKKVLYLEGSPQLPLITKKQGGTGGGKKEPLGMTKGIPPSPFQVGIKPGQPFGWHCFERRQKAKIYLGNRNIHNGPAKTI

SEQ ID NO: 207911 - protein, 208 aa, Zea mays
  Clone ID: MRT4577_121208C.1.pep
QELELSLGDSRAPAKSASTPAALTPIHAGAGGEGHELALELGVGAAKRAEQDNQKTPVQPEHVQEEEEEEETCPYSESPAELSLIGCPLLPAASAEIGSVNSSEVCVRRGFGVDAVLVDGGDAAQGRPALSTSFLPSEFLVRRQADDQEAAAEDEEMSGVGGGARKKLRLSKEQSAFLEDSLKAHSTLTPKCVNPVVFTLFYCICGTC

SEQ ID NO: 207912 - protein, 423 aa, Zea mays
  Clone ID: MRT4577_121209C.1.pep
MAQAVVPAMQCRVGVKAAAGRVWSAGRTRTGRGGASPGFKVMAVSTGSTGVVPRLEQLLNMDTTPYTDKVIAEYIWVGGSGIDIRSKSRTISKPVEDPSELPKWNYDGSSTGQAPGEDSEVILYPQAIFKDPFRGGNNVLVICDTYTPQGEPLPTNKRHRAAQIFSDPKVAEQVPWFGIEQEYTLLQKDVNWPLGWPVGGFPGPQGPYYCAVGADKSFGRDISDAHYKACLYAGINISGTNGEVMPGQWEYQVGPSVGIEAGDHIWISRYILERITEQAGVVLTLDPKPIQGDWNGAGCHTNYSTKTMREDGGFEEIKRAILNLSLRHDLHISAYGEGNERRLTGKHETASIGTFSWGVANRGCSIRVGRDTEAKGKGYLEDRRPASNMDPYIVTGLLAETTILWQPSLEAEALAAKKLALKV

SEQ ID NO: 207913 - protein, 79 aa, Zea mays
  unsure (1)..(79): unsure at all Xaa locations
  Clone ID: MRT4577_12120C.1.pep
PGEFSMRHLPKVVQFTIDPKALMEFRPNTADDPHKRKHGISCAKKLLGCEPKVPLLEGLRRMVTDFRXKRIFGDQGGSS

SEQ ID NO: 207914 - protein, 70 aa, Zea mays
  unsure (1)..(70): unsure at all Xaa locations
  Clone ID: MRT4577_121210C.1.pep
MSIRMLNQNAEVMNKSAXLAMXIGAAKGRQDVLKSKIGRQGSLQMLVGGAGDIKMTXDGHTLAQRNAHPK

SEQ ID NO: 207915 - protein, 53 aa, Zea mays
  Clone ID: MRT4577_121211C.1.pep
LKIKTDLVSSFQSISQLQITVARGKRRMKFRKKFIFPQPFQAIKFTYTASHRV

SEQ ID NO: 207916 - protein, 182 aa, Zea mays
  unsure (1)..(182): unsure at all Xaa locations
  Clone ID: MRT4577_121212C.1.pep
CVGLPGSSVATLSCEVXGAAALLSIEAGETLASDSGIARGLARTLGSINXRVIEAACNSILDLSASSVGEAVKYQRTNEKLEKRVLCLKGKAQGFIATVQSVAILLAPLFMSPLTSYFISEETPFDCKGFSFIVASFFLAISFCLAWMLNPGMKDKGTKAVVSDSADEEAAQAPLLAKWTRP

SEQ ID NO: 207917 - protein, 243 aa, Zea mays
  unsure (1)..(243): unsure at all Xaa locations
  Clone ID: MRT4577_121213C.1.pep
MDRSGKRRKRKKRGDERAAAGAPSPSSASFDLHFFPVLLAAARTTRQSSSSCSPAALAARLLRRVLSHSSQTLSPLPASLVALLPFFLSSRCXDYVRHKLRFRPPSICRKALPCALHTCPSDTTCAATWXCSCSSVATLSCEVLGAAALLSIEAGETLASDGGIARGLARTLGSINQRVIEAACNSILDLSASSVGRERLAGSPVLPRTLVGGSGIDIRSKSRTISKPVLDPSELPKWNYHGS

SEQ ID NO: 207918 - protein, 451 aa, Zea mays
  unsure (1)..(451): unsure at all Xaa locations
  Clone ID: MRT4577_121214C.1.pep
MGGDAAAMRPVLHLMVGLVLYGVAEEMTVPALVDKVTAALCPADDQSCPEALYLTGLQASVGGIFRTVGFTLMGQLADEYGRKPLILLTASTSIIPFAVLAWNSSRTAVYAYLALRTLSFMVGQGTIFCLAIAYTADAVEPSRRAAAFGFLTGIFSAAHTLGSVLSRFLPGKWIFEVSIVLLICSILYIKVYLXHCLQTSFCAFSAFGHAILCLSNYRKNVGNLSRYNISIVKNSANXGESHMLPSFTNWXIAISDVLMYYLKSVFGFDKDQFSEILMVVGVGSIFSQILVLPFLSQIIGEKGVLCISILASIAYALLYGVAWASWVPYFSSSLGIIYVLAKPAIYAIISGEVLSTDQGKAQGFIATVQSVAILLAPLFMSPLTSYFISEEAPFDCKGFSFIVASFFLAISFCLAWMLNPGMKDKGTKAAVSDSADEEAAQAPLLAKWNRP

SEQ ID NO: 207919 - protein, 129 aa, Zea mays
  unsure (1)..(129): unsure at all Xaa locations
  Clone ID: MRT4577_121215C.1.pep
CVHASGPVLEAVXFSRSSFPTGGSLQKFARRHRFLVEHGACQDPLIVSGALFPQCYILPEMYQXIRYTIFFFPTGQIGNLADTRNRTLHGVXRVHSCFMGHQARRYARXPTRTVLTLXSFISGENAPQI

SEQ ID NO: 207920 - protein, 318 aa, Zea mays
  Clone ID: MRT4577_121216C.1.pep
MPMAASVLAGAAASPPLTWRRWAPLLAASHPRANPPPALRLRAPAPPLRASSVPRDSCAGAAVRRTPCAAAAALGGGVKAESTEREAPDRDALKRVALLALGCCAAAAALGCGAARAAAEDSIKASGFGLRVAESLRRLGWPDDTVVFALATLPVIELRGAIPVGYWLRLHPVRLTILSVLGNMVPVPFIILYLKKLATFLSQNSASATRIMDLLFERARRKAAPVEEFQWLGLMLFVAVPFPGTGAWTGAFIASVLGMPFWSGFTANFVGVVLAGLLVNLLMNLGLKYAIVTGVVLFFVSTVMWSVLRSLKKSVNVK

SEQ ID NO: 207921 - protein, 327 aa, Zea mays
  Clone ID: MRT4577_121217C.1.pep
MPVAASVLAAAAVSPPLTWRRWTPLLAASHPQANPPPALRPRAPAPPLRASSVPRDSCAGAAVRRTPCAAAAALGGCVKAESTEREALDRDALKRVALLALGCCAAAAALGCGAAAAALGCGAARAAAEDSIKASGFGLRVAESLRRLGWPDDTVVFALATLPVIELRGAIPVGYWLRLHPVRLTILSVLGNMVPVPFIILYLKKLATFLSQKSASATRIMDLLFERARQKAAPVEEFQWLGLMLFVAVPFPGTGAWTGAFIASVLGMPFWSGFTANFVGVVLAGLLVNLLMNLGLKYAIITGVVLFFVSTVMWSVLRSLKKAVNGK

SEQ ID NO: 207922 - protein, 74 aa, Zea mays
  Clone ID: MRT4577_121218C.1.pep
SLAVVTTQSTFFFFFFFFFLFFFFFFFFFFFFLDQKGGNFGPLAAPNKIKREKEKTRGAPLQKHQRIKDRKENH

SEQ ID NO: 207923 - protein, 140 aa, Zea mays
  unsure (1)..(140): unsure at all Xaa locations
  Clone ID: MRT4577_121219C.1.pep
SFLGPRGRPHKGAPPRGRFPLVPPGPAPKKPEPRPPPPPVGPPRLLASSPXSFLPRGPPXPIRPPPGXKVPGSRPPPGWPPHPPCPGIPPFPFPEWGPPXPGPPPXKYPPGWVPPSPXLPPPPFFLCGKWGRDFPGPPFL

SEQ ID NO: 207924 - protein, 90 aa, Zea mays
  unsure (1)..(90): unsure at all Xaa locations
  Clone ID: MRT4577_12121C.1.pep
PPYEPRRATLELSARSAAPCCRRRSARLRRWTTGQNSWFAAMRGAGKHEASEQGRAQXLEAIVXVMNCNYSGLTTYHSDCMKVCLQCCAA

SEQ ID NO: 207925 - protein, 69 aa, Zea mays
  Clone ID: MRT4577_121220C.1.pep
KLDGNTSETPATILWKETAKTISYNNPLCKTSLKNLTKNYLFKRTKLNYLLMRTDNFYIGVHKLNYLDI

SEQ ID NO: 207926 - protein, 102 aa, Zea mays
  Clone ID: MRT4577_121221C.1.pep
VGEAFQEGAAWPPFPFADSRYRVLHPSHPVAILYFDPEKMPASHLSRSSGDSYSSHRRPCPPQLDVTASRRSRHRHDWGKFLNNYAGTLLPKLLYTGHCNHH

SEQ ID NO: 207927 - protein, 244 aa, Zea mays
  Clone ID: MRT4577_121222C.1.pep
TLGDSKERLCGAIQLSNLFGIGIGVSIAASVSMQAIRRAGCFHYRGHEDPCHASTSPYIAVFGVMQIVFSQIPDLDKVWWLSTVAAIMSFSYSTIGILLGVVQIVEHGGPRGSLAGVIGAGARVTMMQKVWRSLQAFGNIAFAYGFSIILLEIQDTIKSPPPSEAKVMKKATAVSVAVTTVIYLLCGCVGYAAFGGAAPDNLLTGFGFYEPFWLLDVANAFVVVHLVGTYQVMSQPVFAYVERR

SEQ ID NO: 207928 - protein, 53 aa, Zea mays
  Clone ID: MRT4577_121223C.1.pep
LGPRAGPAALGEARLTTRYLPKREKELEGGSLYWIHQHIIVGRSPILGFEQKP

SEQ ID NO: 207929 - protein, 96 aa, Zea mays
  Clone ID: MRT4577_121224C.1.pep
ELQHKAHVPTGSKIFALTLGFLSAVAPFPHATLYASFPRPYHGLVVKTHLNPMDPTASVHYLIPCLNNQAYTSPWALCTNIAHTQQLVQTCALRTQ

SEQ ID NO: 207930 - protein, 35 aa, Zea mays
  unsure (1)..(35): unsure at all Xaa locations
  Clone ID: MRT4577_121225C.1.pep
VEYGRPYLLTHMLSFNLGVSGAWTPVAPHXHRTPM

SEQ ID NO: 207931 - protein, 36 aa, Zea mays
  Clone ID: MRT4577_121226C.1.pep
RQVPALAPFVPMSFHSSSKLLNDVTSILRDLSPAFD

SEQ ID NO: 207932 - protein, 51 aa, Zea mays
  Clone ID: MRT4577_121227C.1.pep
KKKNVPFYTNWGVTKVFQKTNTTLGFSFGTQVKNLGAFILSNLFLIIMAPF

SEQ ID NO: 207933 - protein, 112 aa, Zea mays
  Clone ID: MRT4577_121228C.1.pep
GFYPRVLYLLIVLSDGRNIFSEGEKKVKNAIKLARLSRVFIVYIIIDNPKNDSSIFDIRVPHFSADRKTVTMRSYLDTFPFPYYVIVRDLKQLPLVLSEAMRQWFELVSSEQ

SEQ ID NO: 207934 - protein, 110 aa, Zea mays
  unsure (1)..(110): unsure at all Xaa locations
  Clone ID: MRT4577_121229C.1.pep
MPGLVKTNNTNASSKRXQVKVIRMRTAKTDYRATIRLINHDRNTVITPKYRFCAQSTNWDIPAQIICASLADDMVLASAYXHDLPRXGLEDTMTNYSNAYCTGLLKLRLV

SEQ ID NO: 207935 - protein, 164 aa, Zea mays
  Clone ID: MRT4577_12122C.1.pep
EVHCHGCFVLQSCIKARGRYLANLIMEICLHGFELAQDPFGNYVVQCVLEQEIPSANAHLASLFEGKYVYLSKQQGSSNVVEKCLMFFPDDAKAVIIQELLMLSGSDFEQLLQDRFANYVFRTALDHTRGRLYDVLVEAILPYENAIRNSPYCNKRIIMHLTRR

SEQ ID NO: 207936 - protein, 61 aa, Zea mays
  Clone ID: MRT4577_121230C.1.pep
CLHKHFTYYQGKLFCCRNSGFHANFLSVLLVTGVLLCMLTLSMWTFSSLVLQIVENFEVLK

SEQ ID NO: 207937 - protein, 190 aa, Zea mays
  Clone ID: MRT4577_121231C.1.pep
MGQALRRASGRVKPPPAPSPPARQPHPPPPPPQASPAPAGGATQDRLDGLSGDDITAPTEHGHGVLEERDPSYDEMLKHMVGRITTKPGGKPEMGEASVVQRYNRPLPKVRTSKAEPGQGGGRQLPSGALNVQHIQEIIRLYQGKSTNHQGPMSVDDIASRFGVEASAVQNIVRFVSLPQDEGVEKKEEH

SEQ ID NO: 207938 - protein, 80 aa, Zea mays
  Clone ID: MRT4577_121232C.1.pep
ILRASHRSNLESSIKATRDHHELGFQPRWRPSRLADLARASLAKRMAAVTGVATVHEPATTAGPVHDGESARSISRFFGA

SEQ ID NO: 207939 - protein, 218 aa, Zea mays
  Clone ID: MRT4577_121233C.1.pep
SARELVKGDRDPEPLPCSPMLYSGQAHTNSQMNKFLETMADWYRYADNRKKIVGFCAYVIRSSLAKLYAARYRLKSRAKVYKIASRDLSRPLRESTRNDAPEYSDLLRMGLVDVIEGVQFARMSSIPTCDYTPFPRNWVPHHELILLEYIKLQDPKFFCELHKTIKRQEISSPQDDVSKMVWYYKVHGVYDDKRSLVGAKELRNDEIINGNKQLLLDT

SEQ ID NO: 207940 - protein, 34 aa, Zea mays
  Clone ID: MRT4577_121234C.1.pep
MIRTLLLSTLVAGALSCGVSTYAPDMSRMLGGEE

SEQ ID NO: 207941 - protein, 75 aa, Zea mays
  Clone ID: MRT4577_121235C.1.pep
LRVQPNGSVSQTGTSSGECRSRSIMVAPAAVSSVESTLASKSSSSAGVISSRQSVAGDHVPVDAGGEGLNSSYPG

SEQ ID NO: 207942 - protein, 60 aa, Zea mays
  Clone ID: MRT4577_121236C.1.pep
NVLGGVGSMGIPVLGLFMGSVLEAQVACACLGDVSGLFVRNVFMLYSGMIFGSRVGKVMK

SEQ ID NO: 207943 - protein, 84 aa, Zea mays
  Clone ID: MRT4577_121237C.1.pep
RALCCYRVPPRQIFTGKFLNWPPSQNWAFHKKPLWVGEFGQMYHLPTTFVRGPSPLGIFFLAGPPFFFFVCFWDPIRECGFLFR

SEQ ID NO: 207944 - protein, 50 aa, Zea mays
  Clone ID: MRT4577_121238C.1.pep
LSYSNLVHTKICNYSSTAGIWNLDLFYRCKLDMDRRVHSFILDRRNISSI

SEQ ID NO: 207945 - protein, 114 aa, Zea mays
  unsure (1)..(114): unsure at all Xaa locations
  Clone ID: MRT4577_121239C.1.pep
HTPHILQALRLAMGIYEDALVLIVNFRYQDAFQSTFCHLKPXYMDTLVIIPVSSDGTSILGLKLXRSLIXNRINGFHTELDLLTFKGLYHTWIKYTIXLENIHVEXSYKRMLSA

SEQ ID NO: 207946 - protein, 138 aa, Zea mays
  Clone ID: MRT4577_12123C.1.pep
LGFFKPIPNKRGSFYTNRFPKNPRVEIKQTLLPLGEKKRPTRSCMCNNAPTQFFKANLYLFAKPQPVNHPCFFPKKKTQPFQPVLAKPLTKKNSLLLLKTNTPHRPYKSLPPSRRPTQLDRNPLMFSPALFSQTKAFF

SEQ ID NO: 207947 - protein, 82 aa, Zea mays
  Clone ID: MRT4577_121240C.1.pep
SSFFFFFFFFFFFFFFFFFLDMWKQTFHSSSYIHRPHSANSASSYHHFTRRPETRLQVVQHGIYFAFCNKFPVLDAILTKKL

SEQ ID NO: 207948 - protein, 56 aa, Zea mays
  Clone ID: MRT4577_121241C.1.pep
HNIWLYVPAWANILARSQYATTLVQFNYVPMCDGVWSVHMIVQLSSLRIMNSPPPY

SEQ ID NO: 207949 - protein, 41 aa, Zea mays
  Clone ID: MRT4577_121242C.1.pep
SKSHSITCDIDPHSCFCHTYPFHPLSCPSFLVLARMFIKVN

SEQ ID NO: 207950 - protein, 69 aa, Zea mays
  Clone ID: MRT4577_121243C.1.pep
VFGARNAKSNLKAKKPGQATGWRWSSTATMVLQLDRLYAYVCTFGTVEWLRIHLAHHFLFSSHKEERGK

SEQ ID NO: 207951 - protein, 485 aa, Zea mays
  Clone ID: MRT4577_121244C.1.pep
IASGLSRSRTSVLDRDAKVRGISGGEKKRLSLACELIASPSVIFADEPTTGLDAFQAEKVMETLRQLAQDGHTVICSIHQPRGSVYGKFDDIVLLSDGETVYMGPAKEEPLTYFSSLGYQCPDHMNPAEFLADLISIDYGSTESVQSSQKRIEDLIEAFSNKSVVTEGNNLIAIPEDPELSAKLVRKTTVKKRHGWWRQFRLLFKRAWMQAFRDGPPNKVRSRMSVASAVIFGSVFWRMGKSQTSIQDRMGLLQVAAINTAMAALTKTVGVFPKERSIVDRERAKGSYALGPYLSSKLLAEIPIGAAFPLIFGSILYPMAKLHPTFSRFAKFCGIVTVESFAASAMGLTVGAMAPTTEAAMALGPSLMTVFIVFGGYYVNPDNTPVIFRWIPRISLIRWAFQGLCINEFKGLQFEQQHSYDIQTGEQALERFSLGGIRIADTLVAQGRILMFWYWSTYLLLKKNRPKYQQLLPPLEEDKNKQQVE

SEQ ID NO: 207952 - protein, 57 aa, Zea mays
  Clone ID: MRT4577_121245C.1.pep
MTTGSNGDGGGAGSWYPQGPPHYGYGGGSASFRGCCCCLLLLLTLLALLGLAFALVV

SEQ ID NO: 207953 - protein, 83 aa, Zea mays
  unsure (1)..(83): unsure at all Xaa locations
  Clone ID: MRT4577_121246C.1.pep
SQLNDCLGLWAVAMPLQINYLQIAVQSTTTGRVPVVLVSYGFLSVRASSTSFLITGVVPINACPFRLKKKNXXXXXXXXXXXX

SEQ ID NO: 207954 - protein, 42 aa, Zea mays
  Clone ID: MRT4577_121247C.1.pep
GWFCPSHGSPYDISGRIRKGPGPFNLEGPTYSFLEENKLLVG

SEQ ID NO: 207955 - protein, 59 aa, Zea mays
  Clone ID: MRT4577_121248C.1.pep
RRTPAYVCSEFGSRLRTVVPDQNSSLRTGEFMDSLYNKPTKKNNKNGRPPPSELFHPES

SEQ ID NO: 207956 - protein, 119 aa, Zea mays
  unsure (1)..(119): unsure at all Xaa locations
  Clone ID: MRT4577_121249C.1.pep
TKKEGGNRFPPGNRARSATQKKGGGPPKRPPRVNXLSXRVEKGGERAPENKFTQETARARXXPRVGPRPEPQGTAAKGXENAPPNGPPGRNGQXEGPRGGRPHPPKXXGGKGKKKKNPP

SEQ ID NO: 207957 - protein, 68 aa, Zea mays
  Clone ID: MRT4577_12124C.1.pep
AYAGGLSATRSLGLRRLSHQDLQDHGCTHAPSRACLPPPGRIRTRACARRTTRIRFLRYTCASRRDVP

SEQ ID NO: 207958 - protein, 35 aa, Zea mays
  Clone ID: MRT4577_121250C.1.pep
RGVWAQKKKKKKKKKKKKKKKKKKKKKKKKKKKKK

SEQ ID NO: 207959 - protein, 125 aa, Zea mays
  Clone ID: MRT4577_121251C.1.pep
EADGSRFVRLRLPGASESVPAEGVCERESTGSGSLRAILCRRSTLFLYASSDFKQGVITFSLYWPTGAYSLIRAPTSGLTACITPDIIISVSNDLTVKLSGGSPFSGNLEMTSFVKGGYDSYSST

SEQ ID NO: 207960 - protein, 155 aa, Zea mays
  Clone ID: MRT4577_121252C.1.pep
CRANAYACDGKLLLLPAPLSARSGGSSRCCMRLVGVLIRRRELPRHGWPRADERWATNKATKARPATCMAWRWRSETAEARRGRPTGAGEARWQRSVEEGHSLIRRRTSSMRISAAVSSRREVRDEDGSRQTEVEADRATDEGAAPGAGHQQGRC

SEQ ID NO: 207961 - protein, 178 aa, Zea mays
  Clone ID: MRT4577_121253C.1.pep
PEFPARPTPSVHGIILELETVTQSEATRKRYRYLSHFSLTTTFQFCEIDLGDMLPPSSLAPFMDEIKKREKQRKRTANIDESDRVKAEVAAAAQASAMLFEHTSFSPSSGPHGDFMFSLDDFEALGNNAGPFTSPPASERKLFFDGARLGFASAQDSPSLRVESGDLTGKSESTGEPG

SEQ ID NO: 207962 - protein, 89 aa, Zea mays
  Clone ID: MRT4577_121254C.1.pep
PITQMFATISIFVVTSFKGYKILNFSCYDLQYLKKRSRFPRHLLSRTKPSMNWLKLIQIYSMKVDGGSHLALNATSLQFRPLLNIAAYV

SEQ ID NO: 207963 - protein, 66 aa, Zea mays
  Clone ID: MRT4577_121255C.1.pep
LDKHRLEIEGLEGVGKFETDPVEGLVSSARTAFRAGFSVAAAALFPLAHRRRRGGNRGNWGELRSC

SEQ ID NO: 207964 - protein, 100 aa, Zea mays
  Clone ID: MRT4577_121256C.1.pep
PAAPPPPAPTTPPPAPAAPSQNSSCPSGFPNSASFARGVREYLRRGIILILSAVKVTPGTSTTRCFCYFSTNITIPVPFSPPIMVPNPNGPLACVPGRQI

SEQ ID NO: 207965 - protein, 224 aa, Zea mays
  Clone ID: MRT4577_121257C.1.pep
MAAAAIATVSLSSVPREKRPRHCASTFNFNARQFSNSSSHCHSFTLRPGVPRPRAACRVIVAQAGGGYKVAILGAAGGVGQPLSLLAKMSPLVSALHLYDIAADVEGVAADLSHCNTPARVSGFTGEDELAGCLSGADVVVVAAGVPRKPGMTREDDRFGANAGVVRELVAAVADHAPPGALVHVISDPVDSTVPVAAEVLKHKGAYDPRRLLGVTALDVVRAN

SEQ ID NO: 207966 - protein, 89 aa, Zea mays
  Clone ID: MRT4577_121258C.1.pep
LQGVGQCLVSNYRVVCHILKGHYSKDFFEGCRAILIDKDRNPKWEPSKLELLSDSDVNRYFSKLDDKGWKDLELPKRFNNLPTYAISKL

SEQ ID NO: 207967 - protein, 58 aa, Zea mays
  Clone ID: MRT4577_121259C.1.pep
MNGERRAPAPVRSDRLPSIGQAFPERIMATRGRRIARSPAPKHTGHVARRTAPVGVAR

SEQ ID NO: 207968 - protein, 49 aa, Zea mays
  Clone ID: MRT4577_12125C.1.pep
GLNGKSNKFYGSINMFIPKLNYFNIYIINISTIYMHCHPTFYSFEPSLF

SEQ ID NO: 207969 - protein, 71 aa, Zea mays
  Clone ID: MRT4577_121260C.1.pep
CAKKKKKKKKKKKKKKKKKKKKKKKKKKKKKKKKKKKKKKKKKKKKKAFSWPGGRFKKGKFLKISIKLGAV

SEQ ID NO: 207970 - protein, 135 aa, Zea mays
  Clone ID: MRT4577_121261C.1.pep
MASLKNHCKSCKLRGYNSGMDASPLPNATASLVCYGDAESKYRVLNQTSTATDTNGYFIVMVYDVGMFDRRSCRLYLRSSPTALCAAPFIPSNPKLGLTLVRDRAATAPRGARGIFHPKTALMYAPATAGKCPPY

SEQ ID NO: 207971 - protein, 72 aa, Zea mays
  unsure (1)..(72): unsure at all Xaa locations
  Clone ID: MRT4577_121262C.1.pep
VYEAXRLTKGKYLGGDFXISLADLNHVSVTLRLFDTPYAFVLDPHPHVKAWWSGLMKSPSVQKVAALINPSA

SEQ ID NO: 207972 - protein, 38 aa, Zea mays
  Clone ID: MRT4577_121263C.1.pep
AHCVFSSVHLPRLMWHLFSFYLRPCFLMCRGCVQSCVL

SEQ ID NO: 207973 - protein, 197 aa, Zea mays
  unsure (1)..(197): unsure at all Xaa locations
  Clone ID: MRT4577_121264C.1.pep
MASLKNHCAVVAAVVVAICFVVLAAALPSHASTAVDEPAKYKPSRAPAPSPASASSSYVPPPVQPVIVVQGVIYCKSCKLRGYNSGMDASPLPNVTASLVCYGDAESKYRVLNQTSTATDTNGYFIVMXTNVGMFDRRSCRLYLXPSPXTALCAAPLHPXNPKLGLTLVRGPRXTAPQGAARGIFHPKTALMYAPGT

SEQ ID NO: 207974 - protein, 245 aa, Zea mays
  unsure (1)..(245): unsure at all Xaa locations
  Clone ID: MRT4577_121265C.1.pep
MASLKNHCAVVAVVVAICFVVLAAALPSHASTAVDEPAKYKPSRAPAPSPASASSYVPPPVQPVIVVQGVIYCKSCKLRGYNSGMDASPLPSXSRKINPQTTHRFAGPAVSLLTQLTPELKLIYSXVVNEXTCVHADATASLVCYGDAESKYRVLNQTSTATDTNGYFIVMVYDVGMFDRRSCRLYLRSSPTALCAAPFIPSNPKLGLTLVRDRAATAPRGARGIFHPKTALMYAPGTGGKCPPY

SEQ ID NO: 207975 - protein, 77 aa, Zea mays
  Clone ID: MRT4577_121266C.1.pep
YLLRAILGAGVFQICLSSMASRHTLKSKPKGKVGKNATVDYEDSTVFATTVLLMNEVTTWTMNKANVGAHYHFIPLV

SEQ ID NO: 207976 - protein, 80 aa, Zea mays
  Clone ID: MRT4577_121267C.1.pep
KKYMYGGVRFRDSKFPWPSLDQLAFCTPPSKSIVVPSSAHPPVGKTLSFPHLIAHGAYPLLGGLLQLWMLPPGLIPTPLP

SEQ ID NO: 207977 - protein, 38 aa, Zea mays
  Clone ID: MRT4577_121268C.1.pep
EVNSKIKVLHSIFADANRYHLVAGQPGAPTIHPRFRSP

SEQ ID NO: 207978 - protein, 102 aa, Zea mays
  Clone ID: MRT4577_121269C.1.pep
EVVGPTYMPVPSAASQPGLQAYGVPVALSVPPQVVPVEFVSAASAVRFRPPCCYPAPLLAIVVVPCASLVTSPVRDALRARVCASCFMACTCHSVFPYQRRE

SEQ ID NO: 207979 - protein, 35 aa, Zea mays
  Clone ID: MRT4577_12126C.1.pep
SYTNTFQIIRKAFYLTTNDTHKRQLLLLTDTDMPY

SEQ ID NO: 207980 - protein, 61 aa, Zea mays
  Clone ID: MRT4577_121270C.1.pep
IYLSQRCIVLNLFARVPQFTWEVNKNEQSVMELCVLQNVYTFSCSHSTWPDSSYVLIPHVV

SEQ ID NO: 207981 - protein, 124 aa, Zea mays
  unsure (1)..(124): unsure at all Xaa locations
  Clone ID: MRT4577_121271C.1.pep
MAPKGEYNPGANKPAEDEPAVDNTTVGKKSKAEKRVPVGKSVGKEGGXGNRCMNKGMKSVETYNIYIFKVLKQVHPDICISSKVISIMNSFINDIFXKLAGEAFKLXALYNKKXTITFREIHTF

SEQ ID NO: 207982 - protein, 132 aa, Zea mays
  unsure (1)..(132): unsure at all Xaa locations
  Clone ID: MRT4577_121272C.1.pep
NKTPLLQLPSQIFQPIFLIEGALVRFINGVYTVDMPXRHTLYDLIQTDIPQTXHLQVEVMVSLKEXECTLVKTMPVLCAIDQNNSWFTFSDFQEPATARSCLSIHAKQLTMVNTYRSMLHTDIMGGAISHST

SEQ ID NO: 207983 - protein, 56 aa, Zea mays
  Clone ID: MRT4577_121273C.1.pep
LDQLLRTFTENTKLVQMCCFKENVSITTPQFMVMTKNTQINKHPLIKVSGRVGGAS

SEQ ID NO: 207984 - protein, 96 aa, Zea mays
  unsure (1)..(96): unsure at all Xaa locations
  Clone ID: MRT4577_121274C.1.pep
VRKLGIRLEQRFINVFSGIVTYSTVTTXATDDAGDVAELDVSKGTSLLIPPTTEHGTNLVGIDGSWFRAFNGDCQSWGPVLGKLXFXILLNLHLYP

SEQ ID NO: 207985 - protein, 59 aa, Zea mays
  unsure (1)..(59): unsure at all Xaa locations
  Clone ID: MRT4577_121275C.1.pep
CEWXGDFCPLRTHHNSQSLAQQACYYGAIKGKDLHAVSPGRKLLGGQRLARDRATVDEA

SEQ ID NO: 207986 - protein, 77 aa, Zea mays
  Clone ID: MRT4577_121276C.1.pep
KPNGVMKSNVIVQKHFKSYRNGMTPMLQENHLHTVVHVSSKIRYICSHLKRSYDFIPRKKNPRDSFPSKNPPAPKIL

SEQ ID NO: 207987 - protein, 96 aa, Zea mays
  Clone ID: MRT4577_121277C.1.pep
MATRRTVAASVTAHQPAWAAVARRMEGVSRYFSDKASGRVLSEEERAAENVYIQKMEREKLEKLRRKEDKAKAEAAKRAAAAARGDTKNGEEAHPS

SEQ ID NO: 207988 - protein, 98 aa, Zea mays
  Clone ID: MRT4577_121278C.1.pep
MATRRTVAASVTAHQPAWAAVARRMEGVSRYFSDKASGTGRLLSEEERAAENVCIQKMEREKLEKLRRKEDKAKAEAAKRAAAAARGDTKNGEEAHPS

SEQ ID NO: 207989 - protein, 96 aa, Zea mays
  Clone ID: MRT4577_121279C.1.pep
MATRRTVAASVTAQRPAWAAVARRMEGVSRYFSDKASGRLLSEEERAAENVYIQKMEREKLEKLRRKEDKAKAEAAKRAAAAARGDTKNGEEAHPS

SEQ ID NO: 207990 - protein, 52 aa, Zea mays
  Clone ID: MRT4577_12127C.1.pep
YAFKAACPCIGGRGGRWQCMLGLALVDSLLHFHCKLLSLLVLDLLLSFREVF

SEQ ID NO: 207991 - protein, 185 aa, Zea mays
  unsure (1)..(185): unsure at all Xaa locations
  Clone ID: MRT4577_121280C.1.pep
PVLLNQNTPPSQRPRGPAIPSGQXKXTKPRQPPPLGGPLLGTQAXGGPKQPGGAPGAPPAPGHSRPFGQSFPQANAVPILPPPSSGPPPRRPTPGKGAGRPAPPVNAEHSPMPAARXRLSRRQVAAQASPTPPPCXPVARKRRFRTSPFRAQATNPRGRRLKKLRRKGRMADGARRPRTPRAHCV

SEQ ID NO: 207992 - protein, 147 aa, Zea mays
  unsure (1)..(147): unsure at all Xaa locations
  Clone ID: MRT4577_121281C.1.pep
FLPRGLPVCWLAWGFFLALPVGAFPALVXSASPLLGARLFRGGCPLFRXXSGFXLLXWLRLPPSXSGARCFFSXXPSPLFSLVRFVFVLSXLVGGPRCPGXVLXGPRWWLXWLGXXXXRXXXXXKSXXXXXSSALXPLLKGGCQHTG

SEQ ID NO: 207993 - protein, 70 aa, Zea mays
  Clone ID: MRT4577_121282C.1.pep
IFLTYPTTQILMSLTPLRPSRPSSSICSSCYLAFYFTGLLLLTLTLVLLSYVSSTITYDKPIKSSVTLVL

SEQ ID NO: 207994 - protein, 35 aa, Zea mays
  Clone ID: MRT4577_121284C.1.pep
MVFMAALEADLRALSAEARRRHPAVKDAAEHAILK

SEQ ID NO: 207995 - protein, 107 aa, Zea mays
  unsure (1)..(107): unsure at all Xaa locations
  Clone ID: MRT4577_121285C.1.pep
ALTAAWPAMEEGIEPGGXIXLLYATNXLDKNSTANXRTKXGLKIIKNTRQDPYMTISEYADIDGAILIAKRIEQEDLSWGYNATKGEYIYMIYAGIMYHLKVIRTVL

SEQ ID NO: 207996 - protein, 110 aa, Zea mays
  Clone ID: MRT4577_121286C.1.pep
MHRRGSSRCSSTSTSTSWDGDMKLLTRKKKEKPNTGEEGSGSRRKERENRVQLQAEAEAEEEEEDAAAPRRRLRRSVSMGSRLASAAREQRARLYIMRRCVSMLVRWKHD

SEQ ID NO: 207997 - protein, 47 aa, Zea mays
  unsure (1)..(47): unsure at all Xaa locations
  Clone ID: MRT4577_121287C.1.pep
MTTRFNKNRKKRGHVSAGHGRIGKHRKHRXGRGNAGXMQQXRILFDK

SEQ ID NO: 207998 - protein, 70 aa, Zea mays
  Clone ID: MRT4577_121288C.1.pep
IFLCERQSLYKTLHILEPLTSLYNNRTPTQVHKTATTQTLTQGTIKIHSRIHNLSLMAHGRLLDLYEVLL

SEQ ID NO: 207999 - protein, 130 aa, Zea mays
  Clone ID: MRT4577_121289C.1.pep
AGGGGQRLEAVAEEELERRRCRSSRRRSAWLALSRIRASHGTEHWGGISGGGGGLPCGRAGGIGSDWVGDARSGTRGVVGWGEGKARRAERNGGWQGGRPDDDGGSVRCYSTDTGEGEEDTGCLARQARN

SEQ ID NO: 208000 - protein, 171 aa, Zea mays
  Clone ID: MRT4577_12128C.1.pep
PLFMSVSEDEKSLVNLEYHPPDGHTHLQLCNGRKIFSVRCSPESFIVQVGEAADILSQGKLKSTLHAVSRPSSSTDISRETFVVFLQPSWDKLLAYPGYSLDAEGEPILSKQTSIISDGSAGPCNEDAFMQGILKKIPPLSSRLKEGMTFAEFFRQTTKQYYGGNGIQQNN

SEQ ID NO: 208001 - protein, 151 aa, Zea mays
  Clone ID: MRT4577_121290C.1.pep
MKLTITPRSPKSRKFPITLDLNGTPAEVKVEAVQAAIAKQFPEFYPDRQRLTVEKTALETGKTLAEYGLKDGDSVAFKDLGPQISWRTVFLIEYGGPLLIHPLIYYLPSLFYGKDFTHSWMQTVAYWMVMLHFLKREYETVFVHRFSHGTM

SEQ ID NO: 208002 - protein, 68 aa, Zea mays
  Clone ID: MRT4577_121291C.1.pep
HKLGLNKAMAGIFPFIGGKDSTVPFCFVSSVEKPANEEFGHFRANKRAYMYEQKSSTLLELNYTSQNS

SEQ ID NO: 208003 - protein, 73 aa, Zea mays
  Clone ID: MRT4577_121292C.1.pep
LQPLRQAVNMRPSCRWPYPSRWSCTFSCSSQVVSLHISRGDRLCAGRTAALPIQTLRHGWRSFGTPWKSDSGH

SEQ ID NO: 208004 - protein, 154 aa, Zea mays
  Clone ID: MRT4577_121293C.1.pep
AGSLSGTVACRRGRCSQLRAWLLARPRSPRWLPLATVVPPAKSGLLACCLVLCRLALPVTVRAVLLLAVAGHGSRCYPRLALGLLLLACCLVPPTAVPCLPCTADRRAGLLSCLVPSADHRPPCRGSQIRRELSRPRHRARVSVVCPGRPRGTQ

SEQ ID NO: 208005 - protein, 368 aa, Zea mays
  Clone ID: MRT4577_121294C.1.pep
MADEKPHGPKFNIGFFNRMFEGLTEAGRIDDALKVYGRMPDKEIKPNMTTFEILVKALCKEEDLDQARGLVMDMARGGIVPPQGFRESVVNFFKEAGRQEEIEKAFEEKPMPTPQPRTEYQPRTEYHSRNADGAAQIKQPGFSSAPAVGPEFLHSQPQQSTLSNTPNQQPEFGSSRSWNSGFGAPQAQPGYGAPQPVQTPQPQFGASRGEPGYSNIGNQHVQFRSPQREPKFSNHPPQVGYGAQLPQSGYRFELQQEQVGFGNQVAQPAHVASRQPSYDTRWSSRDYGSTQGQLGYGGPQAQSYESQLPHHQGSFGMPHVQNNNGFYRYNPGYGPSNGSQGFDAPHGDSKTAESTTPEDRQQAAFLKA

SEQ ID NO: 208006 - protein, 169 aa, Zea mays
  Clone ID: MRT4577_121295C.1.pep
RPAGLPGNFLEDMSQAHGPDMTLGQAWIASEPAFIIFLVFDALALFISLAVVVVQTSLIVVEQKAKKKMVFVINKLMWLACLCISAAFIALTYVVVGRDDEWLAWCTMAIGTVIMVATLGSMCYCIVAHRMEEKSMRRIRRTSTSQSWSISIDSETELMNSEYKKMYAI

SEQ ID NO: 208007 - protein, 61 aa, Zea mays
  Clone ID: MRT4577_121296C.1.pep
NHNRGQSHSSTYTHEISGITTMRCGTSQRLLEKQTTTTRTTRGGRPGGHGDGLGTRLDGML

SEQ ID NO: 208008 - protein, 102 aa, Zea mays
  Clone ID: MRT4577_121298C.1.pep
SRWRLTSHRPPLPLHSVQLCKAVPGGSRDMGWQVDGRDPQPQRCCMVKPGPDRCHLPYHGDMTGHPDLPAWAEVRDLLPDRDRQRYVLVDTALSGAHREHEL

SEQ ID NO: 208009 - protein, 63 aa, Zea mays
  Clone ID: MRT4577_121299C.1.pep
CTPQFQHESPYATVQINQLLSSVLMCSSLSLSMKYNVLKLFPHQSCFSGPSSFLSQSQLSHKA

SEQ ID NO: 208010 - protein, 63 aa, Zea mays
  Clone ID: MRT4577_12129C.1.pep
SIFLNWKSYWYQDPLNPHCKGHFYRNCMIWTHVHPYSSQTGGAYPRPAYWRCPLRIQPDNMPP

SEQ ID NO: 208011 - protein, 55 aa, Zea mays
  Clone ID: MRT4577_1212C.1.pep
PTFFSFSNITKKLIHKDKIPFSFTECIQLADKDFGQPLLSIVHICASEQQHCQAA

SEQ ID NO: 208012 - protein, 65 aa, Zea mays
  Clone ID: MRT4577_121300C.1.pep
TLFFLKHIDKVLYKIHRLSRQQGWHAHVFVISKQKTRSPARDLEPDAWVEQGPPCLRYTAGVPAF

SEQ ID NO: 208013 - protein, 87 aa, Zea mays
  unsure (1)..(87): unsure at all Xaa locations
  Clone ID: MRT4577_121301C.1.pep
KACGQIATLQVYASPRITLKPLMPTFPSFEKILVSLMVQPHGNFGLRLAGAYVMAIPGLYRFDDATIKKQGASMSLWPKTLXVPIMD

SEQ ID NO: 208014 - protein, 94 aa, Zea mays
  Clone ID: MRT4577_121302C.1.pep
GPRPRMFFLFSDALLMAKPRRPLHLLQSGTFACRALYPMGECQLHRVFGHSGGPCGGLLSLSFPHEKLLLMSTDQEELSHWYHSLTLAISSQKN

SEQ ID NO: 208015 - protein, 118 aa, Zea mays
  Clone ID: MRT4577_121303C.1.pep
SFPHTENCFRRLTLHPRNKNPKNCMSTEISEDETHPLFACCGVVLRFEYVYSGVTQQYAHRTRPLSGVDDIVEMFLKVTVDGIEAARGVGVLVVYSVIIDVRTGPYSQLLPSDNTILM

SEQ ID NO: 208016 - protein, 36 aa, Zea mays
  Clone ID: MRT4577_121304C.1.pep
CIYNSQFPWQGGPTDKIINELSSGIIVLRSHKRITS

SEQ ID NO: 208017 - protein, 176 aa, Zea mays
  unsure (1)..(176): unsure at all Xaa locations
  Clone ID: MRT4577_121305C.1.pep
KKKRRKKTNTKNHHTKKKKHQKGNTKKQNKNHPKTXXAQPTQKTVNKTNPQTXNKHKNNKKDHQVVGTTGXSRTGKPNNGPVGNRQKRXRHGXRRLRRTGKSGTAXXXKHQAPQLARXQDWSGKVEQAENDNCNVVREAPGLXXXPLRPSSYARLGFRRCGRRPPEXGALRSXGGG

SEQ ID NO: 208018 - protein, 129 aa, Zea mays
  Clone ID: MRT4577_121306C.1.pep
MVCVGGLGGGGGGSWHTGTVPAKVLLQLTTAFRDGGLRNRTGTFFFKEHLNKIKVPVLALAGDEDLICPPEAVYETVKLIPQHLVTYKVFGGPEGPHYAHYDLVGGRKAVHEVYPCIIKFLFQHDEVSS

SEQ ID NO: 208019 - protein, 97 aa, Zea mays
  unsure (1)..(97): unsure at all Xaa locations
  Clone ID: MRT4577_121307C.1.pep
GPHPSAKASGDPWLLSNWHLRRPIGGPPLAAKFFCLLMLLGFFEGAVTXALFPEWXQALMASFFPPYLXPAGSWVWETPILKPFRFHQAFAVGFLPL

SEQ ID NO: 208020 - protein, 36 aa, Zea mays
  Clone ID: MRT4577_121308C.1.pep
DALAHEAARPRNARSARQLASVRSRAHFARVLAHTQ

SEQ ID NO: 208021 - protein, 145 aa, Zea mays
  unsure (1)..(145): unsure at all Xaa locations
  Clone ID: MRT4577_121309C.1.pep
IIVIWVVFGWCSARSYWHEHRGGTARGPGAAFPHRQXGAAVHGKTDSTKAVLQVLASTAAXTGNQTXILIPQGDFLATQLNFTGPXCWGDETILVYAKLMXTTDLTXTSDHGNXIESLCAVINCCITXKENLDAYRPVVXSMNSC

SEQ ID NO: 208022 - protein, 324 aa, Zea mays
  Clone ID: MRT4577_12130C.1.pep
MVIVRRSRSPRLGRHVDNEGSYHTDVNSGPNPDDISRSEFDFANHQEFENSTLTVEGGIVSGECHDAMQGSAEVKCPLCSTSVSGWIPAGDVRQYLDNKLRTCSHESCKFTGTYEQLREHARTAHVLTKPAHVDLSRKRAWDRLEREQEVGDVISAIRSQVPGAIIVGDYVIETRDDMSPDIDSGDDESSEWWSDQVESPDARLDPPRVWPHEALGSPSIWSDERRNLARIPQNNRVPPRFSLGSRRPLHSGWQGGRRSSTRNRLQRGFSNHHSGHRSNYRGHRHLLLDRSYVGTRDSGSGRSLNSSVVPSRRQRLRYTHRSHY

SEQ ID NO: 208023 - protein, 61 aa, Zea mays
  Clone ID: MRT4577_121310C.1.pep
VAKNTLKIMPLKLPPAGPYKVHGPMKAMGICGSNVHYLKETRIGHSIGKEPMQIGHECSGL

SEQ ID NO: 208024 - protein, 53 aa, Zea mays
  unsure (1)..(53): unsure at all Xaa locations
  Clone ID: MRT4577_121311C.1.pep
FIPPAQTVVLKLVLHHLTYGEGVKHLAQCLMAIPSLYDGWIVIIXDIMIDHSG

SEQ ID NO: 208025 - protein, 224 aa, Zea mays
  Clone ID: MRT4577_121312C.1.pep
MASLGTPAHVSSNKKPLHRWSWKAKRVRCAVSPPTWREGRRTVSLSLVLSHLLLIPNRDTALASPFDKYVKRKKLDPLEVYIPAVILTEFQIKDLEKTLEDEEPQFAPCRSLLRSGPAASLRVNIRAVAQYASDSGNGKTAFNDVDECLRSLEELDSLLLHASRNDPEASVKSMKAKINSALGALDSLLQTVPSDVLSKGKVIADSYREPEDEETGSLDPDLSN

SEQ ID NO: 208026 - protein, 45 aa, Zea mays
  Clone ID: MRT4577_121313C.1.pep
NKTNHGASCILGHLNICKVDMYMCTPVMNSCIHLCTHICKVDMYM

SEQ ID NO: 208027 - protein, 267 aa, Zea mays
  Clone ID: MRT4577_121314C.1.pep
MTSTTTTMSSLALALALLLLSGDIGGAARQLQELPKPDLPPLPKPEVPPRPDLPPLPKPEEQPPLPKPELPVPPQPLPIPPQPLPKPELPVPPEPLPVPPRPELPVPPQPMPKPELPVPPQPLPKPDMPVPPESLPKPELPVPPQPLPKPELPVPPEPLPKPELPVPPQPLLKPELPVPPEPLAKPELPMPPQPLPKPELPVPPEPLPKPELPVPPEPLPKPELPVPPEPLPKPELPPPVLPGELPPKPELVPLPPKAEIMPPLPKP

SEQ ID NO: 208028 - protein, 133 aa, Zea mays
  unsure (1)..(133): unsure at all Xaa locations
  Clone ID: MRT4577_121315C.1.pep
MSDSEEHHFESKADAGASKTYPQQAGTVRKNGFIVIKNRPCKVVEXXXXXXXXXXXXKWHFVXIXIFNGKKIEDIVPSSQKWDFXFLPPPPHQLIDTPDDVSVPLPNHNVSSNFHPRPPSSPPPPLPALPPPP

SEQ ID NO: 208029 - protein, 65 aa, Zea mays
  Clone ID: MRT4577_121316C.1.pep
PFNRMLVISLNVRCALSNQAVHAPYPLLLRIHVMHPKAIPSITPCPWYSTPRCYRYFPGLFPASL

SEQ ID NO: 208030 - protein, 187 aa, Zea mays
  Clone ID: MRT4577_121317C.1.pep
PAGAAGAPEPLPVPPQPLPKPDDMPVPPEPLPQPELPVPPQPMPKPELPVPPQPLPKPDMPVPPESLPKPELPVPPQPLPKPELPVPPEPLPKPELPVPPQPLLKPELPVPPQPLPKPELPVPPELLPKPELPVPPEPLPKPELPVPPEPLPKPELPPPVLPGELPPKPELVPLPPKAEIMPPLPKP

SEQ ID NO: 208031 - protein, 140 aa, Zea mays
  Clone ID: MRT4577_121318C.1.pep
LPGPAQPMPKPELPVPPQPLPKPDMPVPPESLPKPELPVPPQSLPKPELPVPPGALPKPELPVPPQPLVKPELPVPPEPLAKPELPMPPQPLPKPELPVPPEPLPKPELPPPVLPGELPPKPELVPLPPKAEIMPPLPKP

SEQ ID NO: 208032 - protein, 309 aa, Zea mays
  Clone ID: MRT4577_121319C.1.pep
MTSTTTTMSSLALALALLLLSGDIGGAARQLQELPKPDLPPLPKPEVPPRPDLPPLPKPEEQPPLPKPELPVPPQPLPIPPQPLPKPELPVPPEPLPVPPQPLPVPPQPLPKPEAELPVPPEPLPVPPQPLPVPPQPLPKPELPVPPEPLPVPPQPLPVPPQPLPKPDDMPVPPEPLPKPELPVPPQPLPNPELPVPPEPLPKPELPVPPQPLLKPELPVPPEPLAKPELPMPPQPLPKPELPVPPEPLPKPELPVPPEPLPKPELPVPPEPLPKPELPPPVLPGELPPKPEPEVVPPKAEIMPSLPKP

SEQ ID NO: 208033 - protein, 168 aa, Zea mays
  Clone ID: MRT4577_12131C.1.pep
MTSKKSNRSTVTPHTALHMEWDRISCPICMEQPHNAVLLICSSYKNGCRCYICNTSHRHSNCLDRFRKMNGDSKVRASHSTYSVLSNSNIRTVQPRAHYNMISRRSRSPRLGRHVDNEGSYHTDVNSGPNPDDISRSEFDFANHQEFENSTFTERWYCIGGNAMMPMQ

SEQ ID NO: 208034 - protein, 46 aa, Zea mays
  Clone ID: MRT4577_121320C.1.pep
KKMLGPDETVVAKRIDSFSILCARYGRVVISALQYLWLGRNILNII

SEQ ID NO: 208035 - protein, 85 aa, Zea mays
  Clone ID: MRT4577_121321C.1.pep
KGAFLNKHKDSIFCQGEPPTSHRIHIMSDDTSEPCLSIGSHMVKANLTQWFWLHSFSSVQPSPLQKPLLLAALSSGRYLKHLTGW

SEQ ID NO: 208036 - protein, 68 aa, Zea mays
  Clone ID: MRT4577_121322C.1.pep
LNLSGPFLITQATVKSLPRPNFFTIHLISHYTGDLFKPKFLKKPYRFQFYHFYDKCYFPCVPTLNIGP

SEQ ID NO: 208037 - protein, 70 aa, Zea mays
  Clone ID: MRT4577_121323C.1.pep
PLWVLRDSQLFFFVGNSLTKGGHYLCMAGGSVYRIIVGGPWPAYNCTFQYFVLDQCGQALQGSVLAPFFW

SEQ ID NO: 208038 - protein, 137 aa, Zea mays
  unsure (1)..(137): unsure at all Xaa locations
  Clone ID: MRT4577_121324C.1.pep
LLTRKADWAPTRNXPRQRKRLSDGQNXAKRDDRAIWGKEKAKKSTVVXDKNYIFNVMNQVHPDIGIXSRLMSIMNSFINDIFXEAQRGESTKLSRYNKKPTVTSREIQSSVRLLLPGXLAKHAVLRGXTRAVTKITL

SEQ ID NO: 208039 - protein, 239 aa, Zea mays
  Clone ID: MRT4577_121325C.1.pep
MAMKTAFLAASLVLQSARAIDVEGLLAAPRRSNGILSPKGDRALFSETKFNWTTEKASTAWYFLDTQTGDVKKAPFGSAASEVVWVGDSDDSILYINSTNEQIPGGVTLYTADLSKDSFEPTLVASLHAPLSGLKAVKTDSGINFVGNCLAYEHNGSAYNPELVTAPKTSGQLYDANFVRHWNYYITAERVSVFSGVLSNLNGTYSYDGKLTNLLSGMNYTITRPESPVQASSSDPGDY

SEQ ID NO: 208040 - protein, 51 aa, Zea mays
  Clone ID: MRT4577_121326C.1.pep
KLYALPIQILVRGGSLLLELVQFSNVVIRRSHRSICVQQRSSALRLGLTFR

SEQ ID NO: 208041 - protein, 43 aa, Zea mays
  Clone ID: MRT4577_121327C.1.pep
IISSAELASLPSEIDEGMVCINTFGTSRNTPATLQKMPSWLAS

SEQ ID NO: 208042 - protein, 68 aa, Zea mays
  Clone ID: MRT4577_121328C.1.pep
AEVGGPSDQTTVLDKSCVLTHLRSIMGDGDRLRDICPYAVLYAWLAHARNCMAHSLTCPKTNSESGHQ

SEQ ID NO: 208043 - protein, 258 aa, Zea mays
  unsure (1)..(258): unsure at all Xaa locations
  Clone ID: MRT4577_121329C.1.pep
MSVSDHGASSSRNQDTLQVNQTRDAPYPAEESICSFKSSSPIDHAFEGIGLGASSAGKGPTSKSAASFSKLSTPGSNSLHESQNAVGSQSKDADNHFWAFRIGGHLVYLDGRACVHEGAFSIDSLKVEVACVYYLQISDEKRAKGLLPIIGELKFRGKVLEDAVSIYYDDQLASEQKCVDVVIDDWVPKQLMKLYVDFCMKSLEAPNKKLLTKLYNLEISEDEIIVSDCGLQDMSIVPFLDALRISHNTSXLDLSHIL

SEQ ID NO: 208044 - protein, 90 aa, Zea mays
  unsure (1)..(90): unsure at all Xaa locations
  Clone ID: MRT4577_12132C.1.pep
CREGHPLGDIDRRFNDRSSCQHLFAYPLVSCLRLRRYGAPSPHPLRHHRHSQGRPPEWDGARKQLAGALGPRHRRGASANRVIGVVXADA

SEQ ID NO: 208045 - protein, 597 aa, Zea mays
  unsure (1)..(597): unsure at all Xaa locations
  Clone ID: MRT4577_121330C.1.pep
MGGLAAGFLPSDNNXIFDIMNLLEDRLQHANGAVVLATIKVFLHLTMSMTDVHQQVYERIKAPLLTLVGAGSPEQSYSVLCHLHLLVMRAPMLFSSDYKSFYCQFSDPSYVKKLKLEMLTAIANESNTYEIVTELCEYAGNVDVPIARESIRAVGKIALQQYDVNAIVDRLLQFLEMDKDYVTAETLVLVKDLLRKYPQWSHDCIAVVGNISSKNIQEPKGKAALIWMLGEYSQDMHDAPYILESLVENWDEEHSPEVRLHLLTAVMKCFFKRPPETQKALGDTLAAGLSDTHQDVHDRALFYYRLLQYSPNVAERVVNPPKQAVSVFADTQSSEIKDRIFDEFNSLSVVYQKPSYMFTDKEHRGPFEYSEDLTGLTEDPENVISAQRYQENDNDLLLSTSDKEDNGTRASNGSSTSTYNAPSDLISPSLISSQAPAETSLVNTGGTYSSQSNFSLDDLLGLSVTEAPALPQPTLALNSKPVLDPGTFQRKWGQLALALSQECSLSPQGAVALMNPQSLIRHMQSNHIQCIASGGQPPNYKFFFYAQKDGAAAFFLVECIVNTASAKAQLKIKADDGTAAEAFSSLFQSALSKFGLS

SEQ ID NO: 208046 - protein, 214 aa, Zea mays
  unsure (1)..(214): unsure at all Xaa locations
  Clone ID: MRT4577_121331C.1.pep
GPTPASAHASAHASAHAFAFAWVKLEMLTAMANESNTYEIVTELCEYAGNVDVPIARESIRAVGKIALQQYDVNAIVDRLLQFLEMDKDYVTAETLVLVKDLLRKYPQWSHDCIAVVGNISSKNIQEPKGKAALIWMLGEYSQDMHDAPYILESLVENWDEEHSPEVRLHLLTAVMKCFFKRPSETQKALGDTLAAGLSDTHQDCHDRAXFYYR

SEQ ID NO: 208047 - protein, 106 aa, Zea mays
  Clone ID: MRT4577_121332C.1.pep
WGQLALALSQECSLSPQGAASLMNPQSLIRHMQSNYIQCIASGGQPPNYKFFFYAQKDGATAFFLVECIVNTASAKAQLKIKADDGTAAEAFSTLFQSALSKFGLS

SEQ ID NO: 208048 - protein, 96 aa, Zea mays
  Clone ID: MRT4577_121333C.1.pep
HSFYVNGNKDAVGDESFEIIRGPANTEGALDAYVYTATGPTGPSPITLMPSLADLPVLVLRGDRDPFTPIDRPVRKFLTNLHGQLPNLTLLHSGWR

SEQ ID NO: 208049 - protein, 39 aa, Zea mays
  Clone ID: MRT4577_121334C.1.pep
MARKVSLQQFMERRKGRVATRGSPYRRPASLPDHLTLTL

SEQ ID NO: 208050 - protein, 127 aa, Zea mays
  Clone ID: MRT4577_121335C.1.pep
MHPRGSLFRQHRQGTGGTTGMGGTGGEAGSYGPGGDQAKQLRKEPMLHRTGSGSSSSSEDDGQGGRRKKGGIKEKLMEKIPGMGGKNTDHQQHTTGAGAAYGDQYQSGQQQEKGMMDKIKEKLPGSH

SEQ ID NO: 208051 - protein, 101 aa, Zea mays
  Clone ID: MRT4577_121336C.1.pep
MLRTAVNSINTIVFRSNKLGLLSCRSKHTLPDLPYDYNALEPFISAEIMQLHHSKHHAAYVNNLNIAEEKLAEAQHKKAISETIALAPALRFNGGGHINHS

SEQ ID NO: 208052 - protein, 65 aa, Zea mays
  Clone ID: MRT4577_121337C.1.pep
PTIVVNPQTLAPNPPTSRIRSVGARGPPSQGGFEAAAGQLKGTGARQRDSRGFPSFLRVGGFEAR

SEQ ID NO: 208053 - protein, 99 aa, Zea mays
  Clone ID: MRT4577_121338C.1.pep
KIIKKTNIKGKNGQFRRRQKKKRMHLTRYLFYKLIYNNLIPLNIPTLLTLKTLAFPNFIPLKPMPLSTDSALTKRPFPNVISNHSAPYMANFTTLFQAH

SEQ ID NO: 208054 - protein, 83 aa, Zea mays
  Clone ID: MRT4577_121339C.1.pep
YVYWASTRVFHTKPPHPQVVSIATPVQEKMKSWKVFSRSSKISAGFWGGLGATPRWFLFKAGGIYVLFSPFDYCEYKGEVSGI

SEQ ID NO: 208055 - protein, 87 aa, Zea mays
  unsure (1)..(87): unsure at all Xaa locations
  Clone ID: MRT4577_12133C.1.pep
MVNSDLDVYDDEMRLHTDDSAEHNTGTSRVSSSDENMRYFNAMILGPDQSDYNGGXLKLXLFTPQEYPMPGTKVRLLTKIYDYNMDN

SEQ ID NO: 208056 - protein, 153 aa, Zea mays
  unsure (1)..(153): unsure at all Xaa locations
  Clone ID: MRT4577_121340C.1.pep
IRKPPRKKKEDRRRKGGDRQRGKGKEGGTDKKGQRGPGTEPXGPKPSGGGRGPPPSKQASXTPPAGXKRRKPNEPGGAHKGVGPGKGPKAGGPEGKKXKTRGPKKRGAPKKRAPKRQGKPESPXPDGGGLAPGDGQRQHRRGNPGRPXGPPGA

SEQ ID NO: 208057 - protein, 92 aa, Zea mays
  Clone ID: MRT4577_121341C.1.pep
RTRGRTHVVAAYPALMVDYLRQGVHTGGAARTGAVAGLTVLLSMGNFTGLSVRGWGAEELGARCLAHAVLMTAMAEPHVRPRWRTVTEEGYF

SEQ ID NO: 208058 - protein, 52 aa, Zea mays
  Clone ID: MRT4577_121342C.1.pep
DYITFSKSRCTLLIQTIKTTNTVDVCQLQCGLSDGRLKPCSAYEFKREKPHT

SEQ ID NO: 208059 - protein, 122 aa, Zea mays
  unsure (1)..(122): unsure at all Xaa locations
  Clone ID: MRT4577_121343C.1.pep
RPAASDLPRPAAGGCPHPGGRPHPGGSPSPPGARPPRWSVTHGPFTRRAVPGSVGRLVPAGVPLDGCGRLTLFRGLCALVAGCGFAGSLVGACPLWCSRPSSAAVWLVSICSWPLVLNKKXX

SEQ ID NO: 208060 - protein, 60 aa, Zea mays
  Clone ID: MRT4577_121345C.1.pep
YKKSSYRDILEILLEKTGGNDAQTSQRRALHTKGRVSYSFLNTNARGGKKAGNMKQKQES

SEQ ID NO: 208061 - protein, 59 aa, Zea mays
  Clone ID: MRT4577_121346C.1.pep
TFFSKPYPFCLLPYLPNFLNGNLLPGDLVFPPHFFLIPPLLNPQPLLFNPTFYRPKPPL

SEQ ID NO: 208062 - protein, 94 aa, Zea mays
  unsure (1)..(94): unsure at all Xaa locations
  Clone ID: MRT4577_121347C.1.pep
SFTHHAPXXSDRFLIKLAGANLPSPXLSPLPAHPPYPSPPAPRSPHPTPACRYQQNRSPFMRRRRGRAVLLLRLLFPIPTTTTLSIFSSFKTAV

SEQ ID NO: 208063 - protein, 157 aa, Zea mays
  Clone ID: MRT4577_121348C.1.pep
HGQGHGYGRTKGSSFLGDRGDVGGFSLNKVLAVVATLPIGGTLLTLAGFTLLMTVVGLAIITPLFVIFSPVIVPAVSVIGLAISGFLTSGACGLTALSALSWILRYIRQGRGVSMMQELDLDHTKKKMQEAAGYVGQKTKEAGQAIQSKAGAQETKA

SEQ ID NO: 208064 - protein, 166 aa, Zea mays
  unsure (1)..(166): unsure at all Xaa locations
  Clone ID: MRT4577_121349C.1.pep
WRVPXXXVSXVCPXRVLXXXGGRRAWAAGSXXXPPAXXXPXXXXAWAXPSGCXLALWRXXXPXAXPXXXXWXXWAPVXRXXPCXXXXGXXXXFPRRRRLPAAAAXXXXXXXGGLLXGXGFPXXPWXXXWRLXXCAGWLXAXPSXCRCRGXGXXAXLLPPXPCARLL

SEQ ID NO: 208065 - protein, 118 aa, Zea mays
  Clone ID: MRT4577_12134C.1.pep
SFCLRGRAFSPQPTGRLPPPLCLGPSAPFGAPGLALFLPGFFFGRYSPRSYFPPFSPACRFPPMFWSGLGSPRCGPQWGGNSPCRAGRPGGYLKKIKKKKKKKKETKFFLLHNKCSFR

SEQ ID NO: 208066 - protein, 82 aa, Zea mays
  Clone ID: MRT4577_121350C.1.pep
KKKGRIIKRRPLSRFQHLLPLACHLLAFLSHSLNSLHYSTVYNIFPCKPSVYPNLFTYQDIPFLPAGVNTMSSLPNVLLISY

SEQ ID NO: 208067 - protein, 46 aa, Zea mays
  Clone ID: MRT4577_121351C.1.pep
LTILFVNFFGFFWSTVIMNLCSNCHKGIITHPDQANLVFFGYFLNF

SEQ ID NO: 208068 - protein, 517 aa, Zea mays
  Clone ID: MRT4577_121352C.1.pep
MASSASTLEIEARDVVKIVLQFCKENSLQQTFQTLQNECQVSLNTVDSIDTFIADINAGRWDAVLPQVAQLKLPRKKLEDLYEQIVLEMAELRELDTARAILRQTQVMGVMKQEQPERYLRLEHLLVRTYFDPNEAYQESTKEKRRALIAQAVASEVSVVPPSRLMALIGQALKWQQHQGLLPPGTQFDLFRGTAAMKQDEEETYPTSLSHQIKFGKKTHPECARFSPDGQYLVSCSVDGIIEVWDYLSGKLKKDLQYQADESFMMHEEPVLCVDFSRDSEMLASGSQDGKIKVWRIRTGQCLRRLERAHSKGVTSVTFSRDGTQILSTSFDTTARVHGLKSGKMLKEFRGHSSYVNYAIFTTDGSRVITASSDCTVKVWDTKTTDCLHTFKPPPPLRGGDASVNSVHLFPKNTDHIVVCNKTSSIFIMTLQGQVVKSFSSGKREGGDFVAASVSPKGEWIYCVGEDMNMYCFSYQSGKLEHLMKVHEKDVIGITHHPHRNLVATIAEDCMMKIWKP

SEQ ID NO: 208069 - protein, 70 aa, Zea mays
  Clone ID: MRT4577_121353C.1.pep
GSLGTYLCCALECIGITEFPKSKEEPWHSKVHVRPDGLLSFIFRLLFERQEDARFKSVLSKSAFKFILLA

SEQ ID NO: 208070 - protein, 158 aa, Zea mays
  unsure (1)..(158): unsure at all Xaa locations
  Clone ID: MRT4577_121354C.1.pep
NPAKSNGPRAEXYXPGGGGXDDTPSRARGEDRDRRRHKTHEEPRTERKQKMETSTNQASQRREREGKRGRGGPPRGEEEPTTDGRGDQPAGDGRGGEQRGQEPRAETPGEGGPKHQQERGGAAQQHGHTTQERRQAGKQAXKPQPEPGGQRRAPQRAA

SEQ ID NO: 208071 - protein, 70 aa, Zea mays
  Clone ID: MRT4577_121355C.1.pep
FHLLAHFLLRPVPPFWPCPPPLLWGPPASLGYLTMAGRICMGSARYKGGFSWAMQFVPQFLFLQMKSIFF

SEQ ID NO: 208072 - protein, 62 aa, Zea mays
  unsure (1)..(62): unsure at all Xaa locations
  Clone ID: MRT4577_121356C.1.pep
ARXRKLGSSSTAALCFVFWEQYFVLWISIGHSGHWAHCPCHPWGCGSQFSSVVAAQRLNWLA

SEQ ID NO: 208073 - protein, 71 aa, Zea mays
  Clone ID: MRT4577_121357C.1.pep
KTREQCRGINNFYNIGGCKPHNFLKQTPITRLRGQLLANHGIRATHWPDAGLSENFFSTRHPCRHPCPNGT

SEQ ID NO: 208074 - protein, 52 aa, Zea mays
  Clone ID: MRT4577_121358C.1.pep
MADGEDIQPLVCDNGTGMVKAGFAGDDAPRAVFPSIVCRPRHTGVMVVMGQK

SEQ ID NO: 208075 - protein, 219 aa, Zea mays
  Clone ID: MRT4577_121359C.1.pep
KTFFFAGHDTTSHLLTWAMFLLGTHLEWQQRLREEVIQECGSAEVPLDGDALNKLKLVTMVLYETLRLYGAATMVGRQATADTDLCGVKVPKGTIIFIPVAMLHRDEEVWGEDVGVFNPLRFRDGIGRAAAHPNALLCFSLGPRSCIGQNFAMLEAKATMALILRRFEFEVAPEYVHAPVDILTLQPSKGLPVVLKLLDASTKDWKPSQAPSKCPTMLM

SEQ ID NO: 208076 - protein, 51 aa, Zea mays
  Clone ID: MRT4577_12135C.1.pep
GHCDHRTTDAKKKALNSKKNTSHPQKNLSEQTLKRIKNRYSLHLLQIYVLP

SEQ ID NO: 208077 - protein, 112 aa, Zea mays
  Clone ID: MRT4577_121360C.1.pep
AGRVREPRSTTLHLSTHTRRRSHTRRRSSSFDRDRDAGSYKLAKTGIIMAASTVASLSVPVTTATFAAAAAAGGADVLIVVHHQVCIRLSLEECPVTSRGAYCLSLAAFASS

SEQ ID NO: 208078 - protein, 76 aa, Zea mays
  Clone ID: MRT4577_121361C.1.pep
DSMPARSDNYVGSMMGINEGDAGCGTDLARSFTGTALELCIQSITMICIILLMVSNLRLNALVRTMITVKIDILVL

SEQ ID NO: 208079 - protein, 82 aa, Zea mays
  unsure (1)..(82): unsure at all Xaa locations
  Clone ID: MRT4577_121362C.1.pep
AIDRIDPRGRGTPSAMELIQSAVNEAXKGLSRGYPRTAARTSGTALATRRREPGPLDRWRLTERSRCASPRMHCAWRASAAG

SEQ ID NO: 208080 - protein, 213 aa, Zea mays
  Clone ID: MRT4577_121363C.1.pep
TPRCLLNLLTGATAAASGGGSIIRKKNTHGILNAVSWGLLLPMGAIFARYLKTFRSADPAWFYLHVACQLLGYGVGVSGWATGMKLGKESRGVTYTDHRNIGIAVFALGTLQVLALFLRPKKEHKFRVYWNTYHHSVGYAVIVLGVVNIFKGMSILGVEQRWRTAYIAAVCVLLVAAAALEAVTWGVVLRRRKADGKTFSSAPNGHLPHSVSV

SEQ ID NO: 208081 - protein, 73 aa, Zea mays
  Clone ID: MRT4577_121364C.1.pep
RPFFWGKDFIFFTGPEDQTEGRGIKLQKGEPAPTQGNPETPHSTPTNSPKRTIPCRGNPTRPSRGRTAAGGSR

SEQ ID NO: 208082 - protein, 421 aa, Zea mays
  Clone ID: MRT4577_121365C.1.pep
MSFPRLLLAVLAATVAAAYAPARAAGAGAGACAAEKLSSNRVFQTCADLPRLGASLHWSYDAAASSLSVAFLAAPPSAGGWVAWGLNPKGQSMDGTQALVAVPSGGGGGAYEVQTYSISGTSLGSPGAPLAYPTSDLAAELGGDGRVRIFGTLKLPNGTGAEVNQVWQVGPYSGGIQIHEMKGDNMNAKGTLNLLTGATAAASGGGSILRKKNTHGILNAVSWGLLLPMGAIFARYLKTFRSADPAWFYLHVACQLLGYGVGVSGWATGIHLGNLSKGITYSLHRNIGITVFALGTLQIFALFLRPKKDHKYRVYWNAYHHSVGYTVIVLGVVNIFKGMAILDVEQRWKTGYIAAISVLGAVAVALEAVTWGVVLRRRKEESKSYNDLQRRPLAAVYVIYIYIPHRRRRRGRLTIYLSDLI

SEQ ID NO: 208083 - protein, 129 aa, Zea mays
  Clone ID: MRT4577_121366C.1.pep
VQTYSISGTSLGAPGPLSAYRTSGLAAEVGGDGRVRVFATLVLPNGTGAEVNHVWQVGPYSGGIQIHDTKGDNMNAKGTLNLLTGATAAASGGGSIIRKKNVSWSVPQTPDPTHPSSVRVINKACPHSF

SEQ ID NO: 208084 - protein, 52 aa, Zea mays
  Clone ID: MRT4577_121367C.1.pep
FAVKSDPRANKSDASKYLAVHLRFEIDMVAYSLCYFGGGKDEEDELEAYRQI

SEQ ID NO: 208085 - protein, 403 aa, Zea mays
  Clone ID: MRT4577_121368C.1.pep
MAMATAGAVIAACILALLAPPPARAAGGGRCAGESFSANRAYAACNDLPRLGASMHWTYDRASGDLHVAFVAAPAAPGGWVAWALNPSGDGMAGAQALVAGPFPDGGGTWAVRTYNVSGYALGEPGPIAFPASDLAAELGADGRVRVFGTLGLGAAAVGGGGVLLNQVWQVGAAVSSGGVPAPHAMGADNLAAKAKLDLLRATTVAAGADSATRKRNIHGVLNAVSWGLLLPMGAIFARYLKTFRAADPAWFYLHVTCQLIGYGVGVSGWATGMKLGKESRGVTYTDHRNIGIAVFALGTLQVLALFLRPKKEHKFRVYWNTYHHSVGYAVIVLGVVNIFKGMSILGVEQRWRTAYIAAVCVLLVAAAALEAVTWGVVLRRRKADGKTFSSAPNGHLPHSVSV

SEQ ID NO: 208086 - protein, 85 aa, Zea mays
  Clone ID: MRT4577_121369C.1.pep
IKNTPTLVGPLDNANIYTNLTDTSSTGNAHPPSTPNTWTTGPPTSPTMRTTRYTETRTPALSTFSCDTPSPTTSRPATTTHRTKT

SEQ ID NO: 208087 - protein, 70 aa, Zea mays
  Clone ID: MRT4577_12136C.1.pep
SSSPYKPTTPILLSQTTWGVLSPHCPKPKISTKIHVCISTVIPNELGSGAPKNQFTSMHLFPLDLADRLF

SEQ ID NO: 208088 - protein, 54 aa, Zea mays
  unsure (1)..(54): unsure at all Xaa locations
  Clone ID: MRT4577_121370C.1.pep
TSYYDMWPKTCPEXTMHXDDDRGDSGGSCPESSGAVATSISNDYGGMNYPSLFR

SEQ ID NO: 208089 - protein, 408 aa, Zea mays
  unsure (1)..(408): unsure at all Xaa locations
  Clone ID: MRT4577_121371C.1.pep
MSIPRLLLLAVLAAAAACAPAHAAGAGACAAEKFSGNRAFAACADLARLGASLHWSYDAAAASLSVAFLAAPPSAGGWVAWGLNPRAQSMDGTQALVAVPSSGGGGAYEVQTYSISGTSLGAPGPLSAYRTSGLAAEVGGDGRVRVFATLVLPNGTGAEVNHVWQVGPYSGGIQIHDTKGDNMNAKGTLNLLTGATAAASGGGSIIRKKNTHGILNAVSWGLLLPMGAIFARYLKTFRSADPAWFYLHVACQLLGYGVGVSGWATGIHLGNLSKGITYSLHRNIGVTVFALGTLQIFALFLRPKKDHKYRVYWNAYHHSVGYTVIVLGVVNIFKGMAILDVEQRWKTGYIAAISVLGAVAVXLEAVTWGVVLRRRXRKARATTAPHTARRCRGVGGRHVGRRPQAAQG

SEQ ID NO: 208090 - protein, 68 aa, Zea mays
  Clone ID: MRT4577_121372C.1.pep
MGFKALILLAVLGLFVNGTNGVNNPKWLIGSDGNNPKVLPSSNSMGFGKPAVEAYRLQQALGASVLEQ

SEQ ID NO: 208091 - protein, 73 aa, Zea mays
  Clone ID: MRT4577_121373C.1.pep
RSYKLILQKKVFFTTCSGFMLKTNSSTNGNFCGWGTGQINLPGLGQQRIFSIHGTRAQSLLKNRGLIRVENMG

SEQ ID NO: 208092 - protein, 467 aa, Zea mays
  Clone ID: MRT4577_121374C.1.pep
GSASVFYTRPSSFPLFRRSGSKLRLHIRRSWSFAARPLCHSLERLEITGCPMITDKGLVAVAQGCPELKSLTIEACSGVANEGLKAIGRCCAKLQAVSVKNCAHVDDQGVSGLVCSATASLAKVRLQGLNITDASLAVIGYYGKSIKDLTLARLPAVGERGFWVMANALGLQKLRCMTVVSCPGLTDLALASVAKFSPSLRLVNLKRCSKVSDGCLKEFAESSKVLENLQIEECSRVTLTGILAFLLNCSPKFKSLSLSKCVGIKDICSAPAQLPVCKSLRSLAIKDCPGFTDASLAVVGMICPQLENVNLSGLSAVTDSGFLPLIKSSNSGLVNVDLNGCENLTDAAVSALVKAHGASLAHLSLEGCSKITDASLFAISESCSQLAELDLSNCMVSDYGVAVLAAAKQLRLRVLSLSGCMKVTQKSVPFLGSMSSSLEGLNLQFNFIGNHNIASLEKQLWRCDILA

SEQ ID NO: 208093 - protein, 97 aa, Zea mays
  Clone ID: MRT4577_121375C.1.pep
YQHNHPRCKIQSFSYPNLLLSCVMSQRNPVKRHLDFHVQGRSATCDRKMCTRIMGGSGESAYRGRSASLRTDMHGMLLCVRYEIISVLETDSWRYER

SEQ ID NO: 208094 - protein, 88 aa, Zea mays
  Clone ID: MRT4577_121376C.1.pep
ASEVTSYYLVVVSLTPPSRLPHQIKSRPFPTFTGGTGNQRAWPRFRRRPSPSSYPSSSVPRLAAPFTMSSPTTSSMGTSISNTGAPGS

SEQ ID NO: 208095 - protein, 77 aa, Zea mays
  unsure (1)..(77): unsure at all Xaa locations
  Clone ID: MRT4577_121377C.1.pep
MAYVNKCGCSLPCPGXAKTSCARXSVMQREHTTCGCRXHMQCNVLTCGRATMPSSRXNRMANCSCGAFCNCASCAYS

SEQ ID NO: 208096 - protein, 176 aa, Zea mays
  Clone ID: MRT4577_121378C.1.pep
MDAAAAARGDTKKKKMLATLVGCNYAGTPYELQGCINDVHAMRAVLLARFGFAPADVTVLTDDQHGRGGGGGVLPTGAAVRRALDDMVARAAPGDVLFFHFSGHGTLVPPVGGGRRRRRDDEAIVPCDFNLITDVDFRELVDRVPRGATFTIPGTGRHQGQEQLSKERWLLRHHHA

SEQ ID NO: 208097 - protein, 56 aa, Zea mays
  Clone ID: MRT4577_121379C.1.pep
SGATASPSDSMIGDTGHHHYDEAHYTVQHLVKTQHCITERIYSIAFSNIYRPLGQF

SEQ ID NO: 208098 - protein, 80 aa, Zea mays
  Clone ID: MRT4577_12137C.1.pep
YTGARVDEVSVHEVRLAHRSERLDAGSTRHAVCEISSIQPSLASLLYPTVHMMLFDLRIDNYIVVAMYFTRRYHEIVSKT

SEQ ID NO: 208099 - protein, 325 aa, Zea mays
  Clone ID: MRT4577_121380C.1.pep
DEEAVLRRDIYDRPPTMNWGKGRVTLLGDSVHAMQPNLGQGGCMAIEDGYQLAVELENAWQESVKTETPIDIVSSLRRYEKERRLRVAIIHGLARMAAIMATTYRPYLGVGLGPLSFLTKLRIPHPGRVGGRFFIKYGMPTMLSWVLGGNSSKLEGRLLSCRLSDKANDQLYQWFEDDDALEEAMGGEWYLIATSEGNCNSLQPIHLIRDEQRSLFVGSRSDPNDSASSLSLSSPQISERHATITCKNKAFYLTDLGSEHGTWITDNEGRRYRVPPNFPVRFHPSDVIEFGSDKKAMFRVKVLNTLPYESARSGNRQQQQVLQAA

SEQ ID NO: 208100 - protein, 56 aa, Zea mays
  Clone ID: MRT4577_121381C.1.pep
APNGKGKGYPAPPVQWLHTSIFHLNKPCLLDKNTHYTPKGKNPLPRCIELNEKKKP

SEQ ID NO: 208101 - protein, 482 aa, Zea mays
  unsure (1)..(482): unsure at all Xaa locations
  Clone ID: MRT4577_121382C.1.pep
HASALQQILARAVGDDAILNGSHVVDFTDDGSKVTAILEDGRIFEGDLLVGADGIWSKVRKTLFGHSDATYSGYTCYTGIADFVPPDIDTVGYRVFLGHKQYFVSSDVGAGKMQWYAFHKEEAGGTDPENGKKKRLLEIFDGWCDNVIDLVNATDEEAILRRDIYDRPPTINWGKGRVTLLGDSVHAMQPNLGQGGCMVTDXQVEETAIACSLAXMWDVETPLVRVSSFXDYEHAXIVRVAVIHGLARMAAIMATTYRPYLGVGLGPLSFLTKLRIPHPGRVGGRFFIKYGMPAMLSWVLGGNSSKLEGRPLSCRLSDKAHDELYRWFDDDDALEQAMGGEWYLFATSEANNNSLQQPIRLIRDEQRSLSVGSRSDANDSASSLSLPFPQISERHATITCKNKAFYLTDLGSEHGTWITDNEGRRYRVPPNFPVRFHPSDVIEFGSDKKAMFRVKVLNTLPYESARSGKQQGLQQEQVLQAA

SEQ ID NO: 208102 - protein, 166 aa, Zea mays
  unsure (1)..(166): unsure at all Xaa locations
  Clone ID: MRT4577_121383C.1.pep
MAPWLLLLLRAPKRILLNALHYLLSLLXSSIIHIDLLNAHNRITAXCEEICMSRDLAAEIKTPFSARMNQAPTTLHFRPPXKICVYTVRAMIPHXTNRIDIPLSRINIKDAFPATYNKTWRMDISDALNVLRVHPGHNXXLLRELSMXAGWNYXHDIIMELDENHD

SEQ ID NO: 208103 - protein, 122 aa, Zea mays
  Clone ID: MRT4577_121384C.1.pep
AVRSASFFVSSAFSVETSTLSTSSSVSSTVILVLRTTYLEISLPKGTYTASSTAFSITSTARSVASVTTSTIFSALSSGTLGLLWENATTTVTTPGVRDRSRDESNVKVVIELPPPRFTKRK

SEQ ID NO: 208104 - protein, 71 aa, Zea mays
  unsure (1)..(71): unsure at all Xaa locations
  Clone ID: MRT4577_121385C.1.pep
MAESYTSITGLSHGVLPRTLTLSRTSTAVTRRTPPAYGNASPHSGRRTAIGLLLTVITSWTMSXPSRAETV

SEQ ID NO: 208105 - protein, 48 aa, Zea mays
  Clone ID: MRT4577_121386C.1.pep
QLEALISDVNDQGEPSYTLEDFLIKENKPHAIAKKCLCSRDTKMRTSN

SEQ ID NO: 208106 - protein, 52 aa, Zea mays
  unsure (1)..(52): unsure at all Xaa locations
  Clone ID: MRT4577_121387C.1.pep
GESSDTIXSLQAKIHDKEGMPPDQQGVIFAGKQVDDGRTLSYYNIHKESALH

SEQ ID NO: 208107 - protein, 51 aa, Zea mays
  Clone ID: MRT4577_121388C.1.pep
FGSSGTARLYGPSRVAASSGNDNAIRTLRARGPAIQHRILLVLEAFMMTGL

SEQ ID NO: 208108 - protein, 53 aa, Zea mays
  unsure (1)..(53): unsure at all Xaa locations
  Clone ID: MRT4577_121389C.1.pep
MATAGNVIKCKASVACEAGKPPSIEEVEVAPSXAMEVRVKILFTSLCHTDFYF

SEQ ID NO: 208109 - protein, 59 aa, Zea mays
  Clone ID: MRT4577_12138C.1.pep
AHNLITRACRYGQSFPEERLEPQHPLGVSRRGAAFRRRIFLRTAVQLANLLSLLLGPMH

SEQ ID NO: 208110 - protein, 261 aa, Zea mays
  unsure (1)..(261): unsure at all Xaa locations
  Clone ID: MRT4577_121390C.1.pep
MPSATRPSYARKLTTTSGDYDMSYTPDVRRSLGTYGLTPPAVESYDVQTDRCLRLLAMKPTPLEKFQYLVHLRATNVHLFYRLLGENIKELTPLIYTPTVGEACLRWHEIWTQPEGMYLSWSDRGNLRKILDNWPHEVDITVLTDGSRILGLGDLGVNGMGIPVGKLALYTACAGIKPDSTLPLTLDLXTNNKALREDPLYMGSRMPKVTPEQEKXFLDELMVXLYDRWPSIGIQFEDXQKPFPAXDATRXQYSWFXDDVQ

SEQ ID NO: 208111 - protein, 72 aa, Zea mays
  Clone ID: MRT4577_121391C.1.pep
STQVLFSPMEGMVDPTGIVHMVDLAALMVSEASYISCSLGTDEDMVVVIYGGGMYEGDMYGGMEGYRVYGTG

SEQ ID NO: 208112 - protein, 51 aa, Zea mays
  Clone ID: MRT4577_121392C.1.pep
YEISANSNSHFDKPFLSLARQLAGDHNLHFVEAVALKPPEVHIDMAVQHLV

SEQ ID NO: 208113 - protein, 163 aa, Zea mays
  unsure (1)..(163): unsure at all Xaa locations
  Clone ID: MRT4577_121393C.1.pep
PLIVYRQMRGEELQRLSVQQLQELEKTLESGLGSVLKTKXVCPADILMSWXASDCIQYSNDAXITISFLFLGKNKLQSQKILDEISGLERKRTQLIEENSRLKEQVTRMSRMETQLGADPEFVYEEGQSSESVTNTSYPRPSTDTDDCSDTSLKLGLPLFSSK

SEQ ID NO: 208114 - protein, 349 aa, Zea mays
  Clone ID: MRT4577_121394C.1.pep
MASSSSLVKCLAVTVAVALLALSSCGVVASAAAWRGKPQKLKPGEKPSGKCKFFALTPGMFGHKRDYQAACSDEGGPACYVGCPKDCPNKCLVFCAYCLSFCMCDIFPGTSCGDPRFTGGDGNTFYFHGNKDKDFCLVSDAGLHINAHFIGNHNPALNRDFTWVQALGVTSAAGGDQYHRLYVGARRAAEWDEEDDHIQLTLDAEPVDVDAVENARWASKALPGLSVTRMDAVNTVMVELDGVFAISANAVPITDRDDRIHGYGKTGADSLVHLDVSYKFHNLTADVDGVLGQTYRPDYVSKLDIGAKMPVMGGAPKYRSSGLFATDCAVSRFHRVGGGADAGFSSFAS

SEQ ID NO: 208115 - protein, 67 aa, Zea mays
  Clone ID: MRT4577_121395C.1.pep
HFHSHLLFILILAYMLFWYVLNTHLMKSCSKAQIPFHSSMIVIQMYDATGALIQYMSKDSCVTTYMS

SEQ ID NO: 208116 - protein, 57 aa, Zea mays
  Clone ID: MRT4577_121396C.1.pep
ARKLLLPGKSVQVRVENMCSWEEICFERQTLDLKTMNDSGCPLPMGTDTKQISFFAP

SEQ ID NO: 208117 - protein, 150 aa, Zea mays
  unsure (1)..(150): unsure at all Xaa locations
  Clone ID: MRT4577_121397C.1.pep
FHNLSASNGSNRPEKDNPPGDGGLLHAPTQDHGFAKEDQCXARMPTADCCTGKAPTRHNLSMAEGDEELRRPTNPTYWTSAETKASTYPSHAVRRPESSCVHLREASMLTAIIAHTDIYHMTTRIARRLAWSHGLRTRTLRQPHRYAQRG

SEQ ID NO: 208118 - protein, 79 aa, Zea mays
  Clone ID: MRT4577_121398C.1.pep
PPQKNSPVLLNSPLTPNSLHPAQSFIIPTLPIWGKIGPSFPGSPKFPCKPLYKKPSPISDQGFYSHNFLTQVPRCPKVF

SEQ ID NO: 208119 - protein, 142 aa, Zea mays
  Clone ID: MRT4577_121399C.1.pep
PPYRHTLLHSSPDYHPRPPPRSNPVFSSIRRVATWSVQSVREEFIRIFVCVASFLRRISCSFWGRKASSLMSTIATPPPPIAQEKAASRNKRKYRAEPPSTELGPYGLEYPLTADCMGFEFMSPEKAAMAAAVAAAEGVSLD

SEQ ID NO: 208120 - protein, 53 aa, Zea mays
  Clone ID: MRT4577_12139C.1.pep
QRDGRQLAREVRARPRGGQCWSPMSLSLQQCSTLRGSLTCQEILIMSTTDSGR

SEQ ID NO: 208121 - protein, 36 aa, Zea mays
  Clone ID: MRT4577_1213C.1.pep
KTRFLYFLFYYWTEWEDMGRDYFSTYVQILTPHSSL

SEQ ID NO: 208122 - protein, 158 aa, Zea mays
  unsure (1)..(158): unsure at all Xaa locations
  Clone ID: MRT4577_121400C.1.pep
MDDQRDLXSNHEQLPILGQRARAPESNCNRGVLYTSVSVLVALLLAGQATTAYFLYQQQGRLDKLTVTSQNLQLENLRMKLPKSAKPVSPMRMATPLLMRPLSMDNMLQAPVKNVTKYGNMTQDHVMHLLTKSGPVNYPQLKGSFPENLKHLKNSMNG

SEQ ID NO: 208123 - protein, 44 aa, Zea mays
  Clone ID: MRT4577_121401C.1.pep
QICFVSVTRWFYEFAPPAVLLLLCMLLDTRQCFKSPPYVVYLKR

SEQ ID NO: 208124 - protein, 107 aa, Zea mays
  unsure (1)..(107): unsure at all Xaa locations
  Clone ID: MRT4577_121402C.1.pep
VPAGXFFPAVSFGGLVLGSFSGRLVPFSVLAFVSRFSVCWPCASAFCWLVXLGPVAVAFAPACFPGLPSARFPXASVWCPACPLAFPLCAWPLPARCFPPGRGLLVL

SEQ ID NO: 208125 - protein, 236 aa, Zea mays
  unsure (1)..(236): unsure at all Xaa locations
  Clone ID: MRT4577_121403C.1.pep
MEFWGEEVKPGATVSCKVGDGLVIHLSQAALGEPKKASENAIVSVKIDDKKLVLGTLSVEKHPQISCDLNNEIKISTAKVPVKXLVYKMLMKMXTSSGDDDDFTDSDSEMSEEDESSDEDEVSSDTDTSDDSGSEEQTPTPKKTEVVVGKKRAIEAETPSGKKAKSEQSAQKTGDKVSTSHPAKQSSKTPADKSTKTPTANKKSPKSGSHACESCSKSFGSASALESHQKAKKHEA

SEQ ID NO: 208126 - protein, 286 aa, Zea mays
  unsure (1)..(286): unsure at all Xaa locations
  Clone ID: MRT4577_121404C.1.pep
MEFWGEEVKPGATVSCKVGDGLVIHLSQAALGEPKKASENAIVSVKIDDKKLVLGTLSVEKHPQISCDLVFDKDFELSHNSKTASVFFCGYKSPVPLFESDSGEDSSDEEVEPDLIPMQNNEIKISTAKVPVKXLVYKMLMKMXTSSGDDDDFTDSDSEMSEEDESSDEDEVSSDTDTSDDSGSEEQTPTPKKTEVVVGKKRAIEAETPSGKKAKSEQSAQKTGDKVSTSHPAKQSSKTPADKSTKTPTADKKSPKSGSHACKSCSKSFGSASALESHQKAKKHEA

SEQ ID NO: 208127 - protein, 56 aa, Zea mays
  Clone ID: MRT4577_121405C.1.pep
MQRTVVKTRSVEYMPFSLSFFLFLNGGVWSIYSLLVKDYFIGVRTASALLHTLSIS

SEQ ID NO: 208128 - protein, 70 aa, Zea mays
  Clone ID: MRT4577_121406C.1.pep
MAEEHSNPHPQQAVERDVIVEQHQHPRRAPKLRYLDFVQVAVAQAAMCLAGLYGLSKDHAGPFRPSVDTV

SEQ ID NO: 208129 - protein, 96 aa, Zea mays
  Clone ID: MRT4577_121407C.1.pep
ESNDAPPNPVQPIPDPRMARHPNPWEKQGQGSLACHLKSHPRETNVLRSEVKLGAGPPPVRESAHGATPTDSFFQAGEAYGFEFHGVAEHTAFFLG

SEQ ID NO: 208130 - protein, 189 aa, Zea mays
  Clone ID: MRT4577_121408C.1.pep
IRGSRLLLKLRGVLCLGTCQVPTAIGGVSLQSTNTSRAMDGDSKKLRVWFSGVGKGGRGERQSSAVPPQESAPIGREMNSSGEFDAAFAATIAAAAFAIAAREEKLAAQKKYVPIEEVPRPLSLVKRAGSTKKPAGGNKISRWFSGKEPLEHDDDGPVRRPLKPAPGKPEGMPADHKVAPKILETSLSA

SEQ ID NO: 208131 - protein, 40 aa, Zea mays
  Clone ID: MRT4577_121409C.1.pep
MARGCIARLLATLLLFLLLATPLADGASDAEAAGLAHGAS

SEQ ID NO: 208132 - protein, 61 aa, Zea mays
  Clone ID: MRT4577_12140C.1.pep
LQYSIGGNMLFHRGSSASPVDALRSMRVGKHAVHRPEMCADVMMMLDQPQIVGQPAFTVVV

SEQ ID NO: 208133 - protein, 528 aa, Zea mays
  Clone ID: MRT4577_121410C.1.pep
MAPPPPALAEETAAFHPSLWGDFFLTYQPPTAPQQACMKERAEVLREDVRKILMGPCELPETLGLILTLQRLALDYYYENEIDKLLHCIYDDDDSDYDDKDLNLVSLRFYLLRKNGYDVSSDVFLVFKTEEGSFAYADDTASLLSLYNAAYLRKHGEEVLDEAISFARRRCLEAGILRTPLFRRVGILEARNYIPIYEKEAARNDAVLELAKLNFNLQQIAFCEELKHCTLWWKDFLAKSKMAFVRDRIVEVYFWMNGACYDPPYSRSRIILTKITSLVTIIDDMFDTYGTTEDCTKFHEAIGRWDESALPLLPQYMKGFYLFQLETFRSFEDELGPENSYRVHYLKKSMERLVQQYYREIKWRDENYVPKTMTEHLQVSMESIGSVALACAAYVGMGDVITKETLDWVLSYPQFLTTYGIVRLSNDVVSTKREQTKDHSPSTVHCYMKEHGTTMDDACEKIKELIEDSWKDMLQQSLALKGLPKAVPRTVFDFLRTADNMYKNCDAFTSSEVLREMIRLLFVEPIPE

SEQ ID NO: 208134 - protein, 61 aa, Zea mays
  Clone ID: MRT4577_121411C.1.pep
FSSFLYWCSNPLSLNSVHTFVEVPSSCSSYLVLGRSWLLELHLDAHVCCPCTMSIGSSSSS

SEQ ID NO: 208135 - protein, 137 aa, Zea mays
  unsure (1)..(137): unsure at all Xaa locations
  Clone ID: MRT4577_121412C.1.pep
QPKLYTPTPKRGNRPEGKPFPREGESPGEGPKPQXLWPNQGRQTQAGSRARGAHAPSRSTQPLXRDPYVPPPPGAPIPRGGGIMPVHKTLTPERPTPHLGPSPPQGSPTASGPQEHPPTGLPVTXGPLPXRPTRGTH

SEQ ID NO: 208136 - protein, 182 aa, Zea mays
  Clone ID: MRT4577_121413C.1.pep
MAGSTKVLAAILLVDLVAFGLAIGAVQSRPSARLETDERQEWTYCVYRTDAATALGGAALALVFVGQAVAAAASRCFCCGSVLRPGGARACALVLFISSWVTFVIAEACLLAGLLQSAYHTGYRKVFFQNPPDCETVRRGTFGAGAAFALFTCVLTSAYYYCFFKARIYYHRPEAAIGMTPL

SEQ ID NO: 208137 - protein, 77 aa, Zea mays
  Clone ID: MRT4577_121414C.1.pep
SPQAASLDSPLGSPRGGALFFRVGPFPAPPLGGFFCWGSKKKLKKKNKKKKKKKKKKKKKKKKKKKKKKKKKKKKAC

SEQ ID NO: 208138 - protein, 115 aa, Zea mays
  Clone ID: MRT4577_121415C.1.pep
PKPPVVPLSPAAPPAMSLAYTRIKYRSRNTMARQSPVRLSAASGSCRMAPQAAGVHHCCGRARVPTSRPDWEIQVTCDDAKIRDALDAAYHHRNLRHFKGEPTGYDEEHAEQGPD

SEQ ID NO: 208139 - protein, 93 aa, Zea mays
  Clone ID: MRT4577_121416C.1.pep
FQLGKWLLQGYLLSNCTSLSDVEVAVEGRPEARTPGKTIRYSPKGYPERPRIKGPKPRSAEGEDEALEHEEGACFSPTGSAPPASDGVVPSFC

SEQ ID NO: 208140 - protein, 48 aa, Zea mays
  Clone ID: MRT4577_121417C.1.pep
FSQGGLVFFHRFWPKIGAAFKLNNPLFVLKGGFFFYPGQGPLLRPKGG

SEQ ID NO: 208141 - protein, 203 aa, Zea mays
  unsure (1)..(203): unsure at all Xaa locations
  Clone ID: MRT4577_121418C.1.pep
LGPSRPAGRSYHAGRAAAANHIVTSPHASPRLGFATQPKQIAWRLTHRLQLQWPPQPRATASLTTRSPAAGKRFVLSSPCLSFSSHRLTIAGLRHRHHTAAASRTARRRAASASPMVATIAVGDKLPDATLSYFDPADGELRMVTVAELTAGKKASLFAVPGAFTPTCSQXHLPGFXVEKAGELKAKGVDTVAXVSVNDAFVM

SEQ ID NO: 208142 - protein, 101 aa, Zea mays
  unsure (1)..(101): unsure at all Xaa locations
  Clone ID: MRT4577_121419C.1.pep
WYLYQHKDKKDPTGTQSNRAIDAWFWKGTAXQTHLRINLRGAVCLMNTLVYYNGRASFGHXXDWIMHHYRLHQGCQRTLVYPAVMLHAGLHLKMEPSCMTL

SEQ ID NO: 208143 - protein, 61 aa, Zea mays
  Clone ID: MRT4577_12141C.1.pep
ALMPTHYPWMLQDDRGQVLQIILTYATVWTSVDLPGLLQSHVPHHILLDTPGDEEHAQLRL

SEQ ID NO: 208144 - protein, 65 aa, Zea mays
  Clone ID: MRT4577_121420C.1.pep
DPRVLPHVLLHVQLFYLNQHTLSISICLISNNHKPIQTIKFHYIHNSLPYTIIQINNLTFHPVTP

SEQ ID NO: 208145 - protein, 117 aa, Zea mays
  Clone ID: MRT4577_121421C.1.pep
APRGLSGICSLRGAGPRACCPPGGCTRLGSVGFLGPPDWGVVLPLFRPCLSLGVAVVRGLPGGSLCRISEGCQINLFFFLPLGVFWGLRCFVSFRAFCHPPPRVVCPFFFKFAFPPP

SEQ ID NO: 208146 - protein, 37 aa, Zea mays
  Clone ID: MRT4577_121422C.1.pep
NKLVLLASSGVYMLGCVSKRFGLYFLLHYYYMCRCFN

SEQ ID NO: 208147 - protein, 80 aa, Zea mays
  Clone ID: MRT4577_121423C.1.pep
QRYRLSMSGNSMISSTSARKQLIMWGTEPYVGFQGRRGNPMRRCALWYPHVGIFFDVAGDLVGVGCVVVSEVRVGSSAAW

SEQ ID NO: 208148 - protein, 76 aa, Zea mays
  Clone ID: MRT4577_121424C.1.pep
IQLACCGICGCIPASSPIAAVSDSGHVSKHEWCYMSLSAIRQQLRLLVPSVLWSHAASDRQQQWLPQIVPCDGASV

SEQ ID NO: 208149 - protein, 29 aa, Zea mays
  Clone ID: MRT4577_121425C.1.pep
FLKQERLSFQSWHGDPQHLCSFTRISPCV

SEQ ID NO: 208150 - protein, 91 aa, Zea mays
  Clone ID: MRT4577_121426C.1.pep
GYNQGRQAQTWSRFLKNPGTSFLVKTKNPNGPSFPKLGSHPWAQLNPQGVVWPQGKPPAKKAIYPARLGQPVNGFWPATWTKTRTRWRKRG

SEQ ID NO: 208151 - protein, 126 aa, Zea mays
  Clone ID: MRT4577_121427C.1.pep
IYPTRNDCVDKINLKRIDRFQGEEMVYHNFDSVEDDRHNYYQPEFLNTLTPNGLPPHMPKLIFFPIILLRNIDPANGLCNGTRLVVRGFQKNAIDAEIVVGQHSGVRVFLPRIPLCPSDNNMFQSI

SEQ ID NO: 208152 - protein, 35 aa, Zea mays
  Clone ID: MRT4577_121428C.1.pep
ENIEPVAAKLDGACKLGSDDVVQDEPHVLPKTFIA

SEQ ID NO: 208153 - protein, 166 aa, Zea mays
  Clone ID: MRT4577_121429C.1.pep
EFSGGGMGELSLADRATIANMAPEYGATMGFFPVDAKTLDYLKLTGRSDETVAMIETYLRANNMFVDYKQVQAERVYSSYLELDLDEVEPCLSGPKRPHDRVTLKNMQSDWLSCLDNKVGFKGFAVPKESQGKVAEFSFRGTPAKTKHGDVAIAAITSCPTTSNPT

SEQ ID NO: 208154 - protein, 73 aa, Zea mays
  Clone ID: MRT4577_12142C.1.pep
KTRDAPSISTVVSAMGYKHKYVLTSMQANSQRNRRSNLCGTQLNVPVLHLFMIMNWNILSITHDTTSFRSNQC

SEQ ID NO: 208155 - protein, 81 aa, Zea mays
  unsure (1)..(81): unsure at all Xaa locations
  Clone ID: MRT4577_121430C.1.pep
ATANGTASTSTRNIPRPPRPLPNAALSLNITIKLDTKYIRILGVPRRGDNAHXHLRPHHTSTPNPSYLHHTARLGITTTLD

SEQ ID NO: 208156 - protein, 155 aa, Zea mays
  Clone ID: MRT4577_121431C.1.pep
MAPKAGRGKGRGGKGDKRKKEEKVVPSVVDVTVVTPDESQVTLKGISTDRVVDVRKLLGSNVETCHLTNYSLSHVARGHRLEDGVEVVALKPCALRIVEEEYATAEQAEAHVRRLLDILACTTAFARPRDGAKHRAKHGPTPAFSPTPAAGAHGV

SEQ ID NO: 208157 - protein, 69 aa, Zea mays
  Clone ID: MRT4577_121432C.1.pep
MGWWIPRNGGRGKVGKAAHLEEAVVSLKSTADGETVYRVSFEWDESQGIPGAVLVRNLQHAEFFLKTLT

SEQ ID NO: 208158 - protein, 88 aa, Zea mays
  Clone ID: MRT4577_121433C.1.pep
VSAQVGTVSCLVVRTVSTNWIFWNGAGLELPVPWRGSPKRPHRPTYLKCENRWSGVAPRMPINHWLSADRTCVGCRLFLRGIVEVMRY

SEQ ID NO: 208159 - protein, 129 aa, Zea mays
  unsure (1)..(129): unsure at all Xaa locations
  Clone ID: MRT4577_121434C.1.pep
PEPGGRTPPTPKKKKKKKKKKKKKGKEKKKKKKGKKKKRGGRPRGPKXTNAGRRRQSXPKGAPKXKARAGXXKRRDGENPGGTEEKRREAHPXXASGGKSEKAGTDRXXQQXPSRKGEGDAPGGAKSAA

SEQ ID NO: 208160 - protein, 90 aa, Zea mays
  Clone ID: MRT4577_121435C.1.pep
SAGSVVYQSFFPFIRHPQTRVYREKSLVPPEKNSSKQARVWTHMRGGTQRCRLTLPHFMFQKNKNSATLEGGRKFFRFPQGPFPHGSGIK

SEQ ID NO: 208161 - protein, 286 aa, Zea mays
  Clone ID: MRT4577_121436C.1.pep
MERAAPVRSSHTSTADLLAWPQPQGPAPATPSPPRRPGQPSEAIRKVVFGGQVTEEEADSLTKRKPCSAPKWKEMTGSGIFAAGSNGDAGEAAAAAKPARTSSRQASSTVSHISFAEDGTDPPKKPTSVAEVAKQRELSGTLQSEADSKTKKQISNAKSKELSGHDIFADTLDSRSNRARNPSNGSTASHAPAKNTNASTFSFGDANTDSTPKTARKITGKKVNDLTGNDIFKGDVPPASAEKHLSTAKLKEITGSNIFADGKEPIRERVGGNRKPPGGESSIALI

SEQ ID NO: 208162 - protein, 102 aa, Zea mays
  Clone ID: MRT4577_121437C.1.pep
KKKTQSLVQIKGGVLIVFFPRVHQKRWNYQDGGPPILRGWRPKILALFFSGKRGWIFPHQKFPRGGGNSYFNKTLLGNFIFYGPSKRKGLAQIRLDPGGTPG

SEQ ID NO: 208163 - protein, 122 aa, Zea mays
  Clone ID: MRT4577_121438C.1.pep
DSSWPPALHLQRAPTQQSPPAEHLVLSGLLVGGQEAKKSVHEEVRPGGEVIAPASNSMVGRPPPRAQFTRNDPRPPDTSPERLAKAQILAILWSAGGHLTQLCSAQMASMGLASREGRTSLF

SEQ ID NO: 208164 - protein, 64 aa, Zea mays
  Clone ID: MRT4577_121439C.1.pep
KKQTPNPKLLQNKHFWGSCTNKGSKNTFYGLLYPTNRERSKPQIFGPRTFKPANSLRASKALLF

SEQ ID NO: 208165 - protein, 152 aa, Zea mays
  Clone ID: MRT4577_12143C.1.pep
SEKVVDKMVNQVHVVGEGLIGRTLISGEHQWISDDIPFSFSQISDEDNLGLCQGYTWWQHQFLSGIKTIAVVPMPAFGVAQFGSMQKFLDQVKGATFLMESLSWSPSTKDAQKDAFMYNPQFQLDSSTTREGLPRTKAEPENRGECNIHRFS

SEQ ID NO: 208166 - protein, 77 aa, Zea mays
  Clone ID: MRT4577_121440C.1.pep
ICCGQNSWEGSHWSSTKAYPINSVNPKALPYCLWGVLPVPQRVLDMICPPPPHLVHPLVQWPVGGIKSVRTGQIPRL

SEQ ID NO: 208167 - protein, 248 aa, Zea mays
  unsure (1)..(248): unsure at all Xaa locations
  Clone ID: MRT4577_121441C.1.pep
RSGRAEASLSFPREQKNPKIPIPFHACYALNPQFPTRPASPPAPLPPARISAASSPAXSASPRSCSSWAPSASTGSRWPSCARTARSTPASPPPSSSRSRPSSSPTSPSPTPSSPPSTPTTPPSSPPPPGPPPSSGSSSGSAPTGPPSSSSRPHTSSRSSSSRSSPPLPPSSPSPPSTPPSTTRSPSRGCSPSCPASGAASRPPSSPPSRCSSPTTSSSPSSSSRSSSPSTMAPPSPGSSPSSSSSPT

SEQ ID NO: 208168 - protein, 89 aa, Zea mays
  Clone ID: MRT4577_121442C.1.pep
LGTSSRMTSLVTLTTCRLGVMFGCCPRCRMALSVCDRFSSPRDSQRLLSTGRSCQGFSLRHRAAPCATTCTLSIRRAADLYFSCQQCAL

SEQ ID NO: 208169 - protein, 77 aa, Zea mays
  Clone ID: MRT4577_121443C.1.pep
IGYLEAGRDQATREPLDDPIRHHDKKMSRRLNMMKTDAEHRTWQRVADMTTSMRNIKGQYFTATAIGSHTSSAMSSG

SEQ ID NO: 208170 - protein, 123 aa, Zea mays
  unsure (1)..(123): unsure at all Xaa locations
  Clone ID: MRT4577_121444C.1.pep
GADCLDISGEPEFMERVXSELHEPAARSGSLIISACGFDSVPAELGFLFHSRQWEPPSAPATVEAYLSLQSTKMIVGNIGTYESAVLGVFNAGQLQALRLSRPRRPRPNIPGPPPPKGSLIEG

SEQ ID NO: 208171 - protein, 147 aa, Zea mays
  Clone ID: MRT4577_121445C.1.pep
PAWARTLLEPDSGDGRICIDNFRMALLQNCTDAMKESRTLEILNALEPLAYRRMDFEEFRAATISPYQLEAVPRWEEIASTAFEYFEQEGNRAITIEELAQEMNLSAAAYSIVRDWIRPLDGKLSFVGYTKFLHGLTMRSGNTRRHH

SEQ ID NO: 208172 - protein, 126 aa, Zea mays
  unsure (1)..(126): unsure at all Xaa locations
  Clone ID: MRT4577_121446C.1.pep
KAPTNQQQQEQQQREPARTQQAEANPAAHXQQLLPFNQRAGPNXAADXQQRQQXLNPWAGANPLVATFLQQQQQLLPDNQFSLTXPALQQPIVGGASFRMRCTRQWCPTDMCFLEIINILIEIYLD

SEQ ID NO: 208173 - protein, 49 aa, Zea mays
  Clone ID: MRT4577_121447C.1.pep
RVRAVRSTLDESPDLDSSTAETSERHYVNKKWFTGVRTTRRATSTTLSE

SEQ ID NO: 208174 - protein, 40 aa, Zea mays
  Clone ID: MRT4577_121448C.1.pep
THNLFLGFTNPTPLTKISSSRFVRKEIQKDWFVVQLLVYS

SEQ ID NO: 208175 - protein, 116 aa, Zea mays
  Clone ID: MRT4577_12144C.1.pep
MAEALGALCRAGGWSYGAIWRPDRRDPRLLTVGECHCEDEARKVVEKMVNQVHVVGEGLIGRTLISGEHQWISDDIPFSFSQISDEDNLGLCQGYTWWQHQFLSGIKVFCSISFIF

SEQ ID NO: 208176 - protein, 124 aa, Zea mays
  unsure (1)..(124): unsure at all Xaa locations
  Clone ID: MRT4577_121450C.1.pep
MVRTKQTGRKWTGGKAPQMHLATKAXARMSAPATDGIKKPHRFLPGTVQLRXILKHQKSTELLMRKLSCQRLVREIEQDLKTDLLFQFSAVAVLQEAADAHLVVLFEDTNLCAIQAMRVTIMPK

SEQ ID NO: 208177 - protein, 37 aa, Zea mays
  Clone ID: MRT4577_121451C.1.pep
TGARKRNGRRNRRRCCAHHAAAGVMNAGHSPSPDPPG

SEQ ID NO: 208178 - protein, 46 aa, Zea mays
  Clone ID: MRT4577_121452C.1.pep
ISPFLSKFTIFQLMWSIYSTTSWELVMFFGRVFTIRIWAMWMLTII

SEQ ID NO: 208179 - protein, 64 aa, Zea mays
  Clone ID: MRT4577_121453C.1.pep
GSNKCIVALAQQLLSRFFRGSPSSSKDWDPSSLSLDPDGWWSALLVKCLRTRILMSQVILVVAS

SEQ ID NO: 208180 - protein, 92 aa, Zea mays
  Clone ID: MRT4577_121454C.1.pep
TMHVSVYRPDGCFRLYCGLERLPCLLGRLVDLVHGEEHNWCFFVDPASADSYVHHLISVIMVPSDGKQDVTWNDARFISVLCSGLREMDHSF

SEQ ID NO: 208181 - protein, 46 aa, Zea mays
  Clone ID: MRT4577_121455C.1.pep
MALVSGGRSTLNPNAPLYIPAAFRQVEDFSPEWWQLVTTLTWYHDY

SEQ ID NO: 208182 - protein, 235 aa, Zea mays
  unsure (1)..(235): unsure at all Xaa locations
  Clone ID: MRT4577_121456C.1.pep
PPDLTSSCLPPPGSLSLFYYCQKYEDVLINNDNYVDTPGKEILTXDDSTGTIEPRLSRLYAHHPEDYPPPLRDLQYCSPGALLYILXQILFEETLYQMIQDTNTYVLAPKDHIVLSXINGYNPTIDLLCTDKETTTLEHDHLRIDLCQHYXAXPAFAIPRATLQICPNHSSQLAIDLHDHEMALYAIICHDNGLVSIAQPENLCYGPHDSDHYAYRSENVLAACYNHLHNHHVLL

SEQ ID NO: 208183 - protein, 77 aa, Zea mays
  Clone ID: MRT4577_121457C.1.pep
PVIKGFFSIGGVIVVAPCCYMLLGVLKHGVILWLMAGLGHAHVLNSLDEGWILCVSAGGGFVWVIENEPPPFVVVLV

SEQ ID NO: 208184 - protein, 98 aa, Zea mays
  Clone ID: MRT4577_121458C.1.pep
LAGTSVKLRETGLLGTLDILGTQGRLTRNCAPCAISHEHAVDDGGQTDTHDRRASCDRTYAQGGIQLGHAWCVSCTVSSMAFMLMALVPVDRTISGRR

SEQ ID NO: 208185 - protein, 115 aa, Zea mays
  Clone ID: MRT4577_121459C.1.pep
HTNTAISDDGVYECIKNMRSDPNFVNLEDVLDDPNIHKFYIVFDFFERKMVCDGGLYKGSALTYSRDILSGLMFLHSNNDIHGDIKPHNLWDTTAGTENIGDFRDSHFFEDDDDM

SEQ ID NO: 208186 - protein, 94 aa, Zea mays
  Clone ID: MRT4577_12145C.1.pep
YLCADAWADAWAFVLLQQQSLAHLTIQTIATQQQQALSHLAVVIPIAYWQQQLVAFNPLALVNVAAYHHQQQLQQILPVLSQLAMVNPIAYLQH

SEQ ID NO: 208187 - protein, 56 aa, Zea mays
  Clone ID: MRT4577_121460C.1.pep
WVGPENEKLGPPQNDFMDSSRSNPAKRAVGGPFFPLSLPKKMKVFFKNKKVDCLKG

SEQ ID NO: 208188 - protein, 37 aa, Zea mays
  Clone ID: MRT4577_121461C.1.pep
TGKTQITVPPAENRGGGTSPSYISVSHLPPFKALTGG

SEQ ID NO: 208189 - protein, 82 aa, Zea mays
  Clone ID: MRT4577_121462C.1.pep
YGVAGCQSGPCSYHIPVHRADRLTIVSHLYSVASRSLFELSTSLFEHLASLVLLLFSLKPKSIDCSGVFNPPTSQKFYSTKF

SEQ ID NO: 208190 - protein, 71 aa, Zea mays
  Clone ID: MRT4577_121463C.1.pep
IGHLYYQLYSAERMAPDQPAVDITHVDANIDFTNHKLLDILTNSIIKPNKSTLHCIPHYLSTIDNDIPTDY

SEQ ID NO: 208191 - protein, 107 aa, Zea mays
  unsure (1)..(107): unsure at all Xaa locations
  Clone ID: MRT4577_121464C.1.pep
PLGKKGGNKVSFFLLEXCKSGFSSKNXLMAVKWPFFKRESSSLKGXQGQSKTFSKNFSVRVKSERDFPSKVVSQVAQASVLGSFKKSEVAKAAKTEETLRGASVLXQ

SEQ ID NO: 208192 - protein, 57 aa, Zea mays
  Clone ID: MRT4577_121465C.1.pep
CCGNVPPHPPFALSLSSVTVSRASVFTRSRFCVWYAPRTHRRVVRGRLPSGALVCCT

SEQ ID NO: 208193 - protein, 92 aa, Zea mays
  Clone ID: MRT4577_121466C.1.pep
VLPVLSAIRSSGFSIGRLARLVPRQICGALLYYVPYPRLIRLLRWKSVKQHIYLLLRPLTVSPSFLRFPYTVTSRLGKYMGFFLSGVVFVSG

SEQ ID NO: 208194 - protein, 169 aa, Zea mays
  unsure (1)..(169): unsure at all Xaa locations
  Clone ID: MRT4577_121467C.1.pep
SVIAQEHHEQQHQQQFQGHDKQQQPQQPQQYQQGQEKSQQQQCHCQEQQQTTRCSYNYYSSSSNLKNCHEFLRQQCSPLVMPFLQSRLIQPSSCQVLQQQCCHDLRQIEPQYIHQAIYNMVQSIIQEEQQQQPCELCGSQQATXKCGGNLDSSTIPTINVRLVPLILPK

SEQ ID NO: 208195 - protein, 59 aa, Zea mays
  Clone ID: MRT4577_121468C.1.pep
TLVRRLDLQLVQRDSGSKLKNFKPPQPSQSGRLGGRRRRALTRSTESPSFVNKSLGPLP

SEQ ID NO: 208196 - protein, 149 aa, Zea mays
  unsure (1)..(149): unsure at all Xaa locations
  Clone ID: MRT4577_121469C.1.pep
VLELEKHLDESFDKALEKEEVAAADRKSTETFXEKLDKGSEDAAVQEVNCDXPXKVKDKFTRDNEAHVAPHRAAKLSELCXKYEAQLTKAQAEPAESHVHAPTEDTWPAITELLPRETTTAALGHQTAAPALELDEATEKELPAKPAQH

SEQ ID NO: 208197 - protein, 273 aa, Zea mays
  unsure (1)..(273): unsure at all Xaa locations
  Clone ID: MRT4577_12146C.1.pep
MLERSRGAFPFSSPSHPSPPPPRRLASRQIAMALHAPVLVLKDSLKRESGAKVQHGNIQAAKAVSDIIRTTLGPRSMLKMLLDASGGIVVTNDGNAILRELDIAHPAAKSMIELSRTQDEEVGDGTTSVIVLAGEMLHVAETFIEKNYHPTVICRAYSRALEDAIAVLDKIAMPVDVNDREAMLGLVKSSIGTKFTGQFGDLIADLAIDATTTAGVDLGQGMREVDIKKYIXVEKIPGXQLEDSMVLXGVMVNKDGVAPGKMRREIVXPRIIP

SEQ ID NO: 208198 - protein, 91 aa, Zea mays
  unsure (1)..(91): unsure at all Xaa locations
  Clone ID: MRT4577_121470C.1.pep
KKKQKKKKKTKKXKXKRKKPTTQKQKTKKKKKEKKKKKKKKRNKPQNXSQKKKTXKEREKKKKKAXXPPPQDXKKVTTKLGPREPRRGVLC

SEQ ID NO: 208199 - protein, 64 aa, Zea mays
  Clone ID: MRT4577_121471C.1.pep
GAFDGASMNPAVSFGPAVVTGVWENPWVYWVGPLAGAAIAALVYDIIFIGQRPHQQVPTPAANY

SEQ ID NO: 208200 - protein, 111 aa, Zea mays
  unsure (1)..(111): unsure at all Xaa locations
  Clone ID: MRT4577_121472C.1.pep
MCPRVRPIGVPCAIWRSEHSVPRRKTTGVARGNIGKTPVRMNAVMYALSPFQHKVMPGLVXDITTKIHHKVTVNWISVTLLLXPLVGXTYQYAMCYKVHEKLSHIYLMRCP

SEQ ID NO: 208201 - protein, 57 aa, Zea mays
  Clone ID: MRT4577_121473C.1.pep
VKNRKVNPTCDLLVQVRPHAGKLTVYVYRGSIGGPILQISITSSVKHRSEAVCMASS

SEQ ID NO: 208202 - protein, 59 aa, Zea mays
  Clone ID: MRT4577_121474C.1.pep
RRIAFLVTFASVRCHRCIGVLASDVSCQSGYPFHQKTVCCVIGSQAKHCNYAGCQCDPS

SEQ ID NO: 208203 - protein, 166 aa, Zea mays
  Clone ID: MRT4577_121475C.1.pep
PRGRPGRAVHAITATQKTVDGPSAKDWRGGRAASFNIIPSSTGAAKAVGKVLPELNGKLTGMSFRVPTVDVSVVDLTVRIEKGASYEEIKKAIKAASEGPLKGIMGYVEEDLVSTDFTGDSRSSIFDAKAGIALNDHFIKLVSWYDNEWGYSNRVVDLIRHMFKTQ

SEQ ID NO: 208204 - protein, 141 aa, Zea mays
  Clone ID: MRT4577_121476C.1.pep
YWRGGRAASFNIIPSSTGAAKAVGKVLPELNGKLTGMSFRVPTVDVSVVDLTVRIEKGASYEEIKKAIKAASEGPLKGIMGYVEEDLVSTDFTGDSRSSIFDAKAGIALNDHFIKLVSWYDNEWGYSNRVVDLIRHMFKTQ

SEQ ID NO: 208205 - protein, 77 aa, Zea mays
  unsure (1)..(77): unsure at all Xaa locations
  Clone ID: MRT4577_121477C.1.pep
ETFAPVALLXTIGFLLAYAECYDIKLYQMNQKSALINSCIHELKYVQQPHFLEDPIYPNHAYRLSKALYELYQSAKA

SEQ ID NO: 208206 - protein, 200 aa, Zea mays
  unsure (1)..(200): unsure at all Xaa locations
  Clone ID: MRT4577_121478C.1.pep
KYTSDVNIVSNASCTTNCLAPLAKVIXHDNFGXIIEGLMTTVHAITATQKTVDGPSAKDWRXGRXASFNIIPSSXGAAKAVGKVLXPELNGKLTGMSFRVPTVDVSVVDLTVRIEKGASYEEIKKAIKAASEGPLKGIMGYVEEDLVSTDFTGDSRSSIFDAKAGIALNDHFIKLVSWYDNEWGYSNRVVDLIRHMFKTQ

SEQ ID NO: 208207 - protein, 60 aa, Zea mays
  Clone ID: MRT4577_121479C.1.pep
YDGGLLRSGMCVSFMSRTLMYACRSLSKNPMEPYRILSMCGNLAFSVVLSRGLKSRMHFS

SEQ ID NO: 208208 - protein, 201 aa, Zea mays
  Clone ID: MRT4577_12147C.1.pep
PSVRGRVGSRVGNHGKGGRIRRTTHSTSHTPSCTGTTTAGTPSRTPLGTLPELLHTLIHIRRELSRVHIQLQLLVLQMLLRIRLLPPEELLQELLLVLPQGLLQPVLLWGELCHQPGLHHQLQEHGHVRGPDRGPPRGGRGGRSGQPSHQPLRTTWRCTCGWTCRRGSRTWPCPCCCRTCRATRRCSCRCRTTSRTTCAAP

SEQ ID NO: 208209 - protein, 356 aa, Zea mays
  unsure (1)..(356): unsure at all Xaa locations
  Clone ID: MRT4577_121480C.1.pep
MYTAMAARPLLLPPPVLLLLVVLAASSAAHGYGAYGYGDAAAELRVGFYKDSCPDAEAVVRRIVAKAVQEDPTANAPLLRLHFHDCFVRGCDGSVLVNSTRGNTAEKDAKPNHTLDAFDVIDDIKEALEKRCPGTVSCADILAIAARDAVSLATKVGDQGRXWSRDGNLYQVETGRRDGRVSRAKEAVKNLPDSMDGIRKLIRRFASKNLSVKDLAVLSGAHAIGKSHCPSIAKRLRNFTAHRDSDPTLDGAYAAELRRQCRRRRDNTTELEMVPGSSTAFGTAYYGLVAERRALFHSDEALLRNGETRALVYRYRDAPSEAAFLADFGASMLNMGRVGVLTGAQGEIRKRCAFVN

SEQ ID NO: 208210 - protein, 107 aa, Zea mays
  unsure (1)..(107): unsure at all Xaa locations
  Clone ID: MRT4577_121481C.1.pep
TSQRKQRSFDFCIIPFVFIKWSPILLSDSWTKAPKGDRTDWVMYEYRMEDEDLVSAGFSKDAYVLCKIFKKRGLGPRIGEHHGXPXNEDGWNIAEGRTSKFYSELRR

SEQ ID NO: 208211 - protein, 121 aa, Zea mays
  Clone ID: MRT4577_121482C.1.pep
GGFFQLAARLARITGDNKYLDWALKIWDWSWEVGFIDHRNYHVYDGASVEDNCQKTTYHSFTYTSGIYLYGAAVLANYTEKPEWVDRSKRLLKGTDWFFSPFPNATNVMYEAACENVNTCN

SEQ ID NO: 208212 - protein, 180 aa, Zea mays
  unsure (1)..(180): unsure at all Xaa locations
  Clone ID: MRT4577_121483C.1.pep
TLSGYDASAHMTEETKNAGRNGPVGIITAIGVSLVVGWGYILXXTFAVKXIPALLSTGNDAGGYAIAQVFYXAFKGRYGNGAGGIVCLXVVAVXXYFCGMSSMTSNSRMTYAFSRDGAMPFSSVWHKVNEQEVPVNXVWLSAFVXXCMALPSLGSLVAFQAMASXATTAVYXAYALPILF

SEQ ID NO: 208213 - protein, 119 aa, Zea mays
  Clone ID: MRT4577_121484C.1.pep
KMFRWRLVHFSLKPSSKSQGHWSLAQDIRSLCSYLQSLAQDALRIVQVWLCSFIHVTEHIPRGASSLHPTMQALTEPGNQTRPYLFGVTCVCHLTLIIVLDTCADDKRGHCKTASIITL

SEQ ID NO: 208214 - protein, 84 aa, Zea mays
  Clone ID: MRT4577_121485C.1.pep
KLVRNDSSIESSTHCTQLARIINSGGHGGLHDLLVISGCGASRPDAPLPPRLLLRRRPLQEDDHSALDPTGLWVDLPSTSTRSV

SEQ ID NO: 208215 - protein, 81 aa, Zea mays
  Clone ID: MRT4577_121486C.1.pep
DPSSKSDVFFLPTSYPTQRTCMILRITYWRVEAETCSLLFAASATMARGHSTIFPEKYRVLPKQRKCGSWETHKNTVPTSM

SEQ ID NO: 208216 - protein, 96 aa, Zea mays
  unsure (1)..(96): unsure at all Xaa locations
  Clone ID: MRT4577_121487C.1.pep
SVVRFRVSVSTAGIVSPKSLGPKKRSKTEIXYRLLTPRVYDRDLDEMERIFNAEINKQLNEVXHDSLLQESKTDYNQTQLWRNPXEFKAAFSRMEC

SEQ ID NO: 208217 - protein, 75 aa, Zea mays
  unsure (1)..(75): unsure at all Xaa locations
  Clone ID: MRT4577_121488C.1.pep
ITTLQDYIYEDELQTFLEEGALSELIVAFSRXGPTKEYLLHKMVEKVRYNIHPSLIYYHFSSVLSIQCPLENVLN

SEQ ID NO: 208218 - protein, 128 aa, Zea mays
  Clone ID: MRT4577_121489C.1.pep
ASIMGYVPILQRVHQLHLVDSARSLARSSSVGACVGPTGHRPERGFLFPTERMRTSCLTAKNAWRQRAPVVGQAMGIKSASAPRASAGGHRRLLFPCSSATHPFSPFAHARRLSVLIGQDGSGRNHVS

SEQ ID NO: 208219 - protein, 72 aa, Zea mays
  Clone ID: MRT4577_12148C.1.pep
PPRMGPPFGPLISSAQKGGPLALKALGRPNPVEGPISPPLREDFIFGSKAPEVVAPLVRQPKRGIAPPRVFF

SEQ ID NO: 208220 - protein, 46 aa, Zea mays
  Clone ID: MRT4577_121490C.1.pep
PFYIQTNCSMPIMPNILPYIKHTFYIQYIFFVLPTLTLQMDYYQRL

SEQ ID NO: 208221 - protein, 94 aa, Zea mays
  unsure (1)..(94): unsure at all Xaa locations
  Clone ID: MRT4577_121491C.1.pep
YRIGGLPVGEVXTTPIXYPGGRCDPLGLADDPMAFSDLRXTDLNNGRLTMVYLFGYFIQAGGACNGPLXNLADHIGDPVNNNAWAYDSKFYSGQ

SEQ ID NO: 208222 - protein, 83 aa, Zea mays
  Clone ID: MRT4577_121492C.1.pep
VFFFFKSEVLFSFNLRTKCLKFTNATRNHLSLLLLHYASVLIYCRLLRRFYLKEPLLLCGNKLTPPKLRSVNCLSSLAPCSVL

SEQ ID NO: 208223 - protein, 220 aa, Zea mays
  Clone ID: MRT4577_121493C.1.pep
RIENSTEVSVHWFRILLGNCRTVYDGLIADILGDPYIIALSRLQQMLPLSVIFPPAYSIFAMVLWRRYIFNREDPQLYQSLSNAISDITRHQPFREICFRNTHRLYNLLASDVGDSEFAAMLETHSPDRNSKILPFIPLRARLFLDALIDCNTPTIQGDGASEPCDPKDNELKLSERLMQLLDTLQPAKFHWQWVEMRLLLDEQALMEKLQQARQHLNHF

SEQ ID NO: 208224 - protein, 81 aa, Zea mays
  Clone ID: MRT4577_121494C.1.pep
FCGWNVGWIEGEGWYCFLTPLNSSQLWPHLPLVDLTSHPQVFFFMHTLSSSWCRSWPHDPSSENPCSPAPCPPPPVDTCLV

SEQ ID NO: 208225 - protein, 55 aa, Zea mays
  unsure (1)..(55): unsure at all Xaa locations
  Clone ID: MRT4577_121495C.1.pep
TSTTHPGAHGKFRGIRXARDLNQSVAALRSHVTARKHGEEEDQGSPREERRSLGP

SEQ ID NO: 208226 - protein, 47 aa, Zea mays
  Clone ID: MRT4577_121496C.1.pep
FIRRRRLLSAAVGMSGHDAKCYRQIANMSYTKSTYCRGVSDHNIRLY

SEQ ID NO: 208227 - protein, 70 aa, Zea mays
  Clone ID: MRT4577_121497C.1.pep
TIITKKKKNIKFKKKKKKKEKRKKKKRKKKKKKKKKKKKKKKKKKKGRPFKRTQGNLNLHATPKVYNKAT

SEQ ID NO: 208228 - protein, 170 aa, Zea mays
  unsure (1)..(170): unsure at all Xaa locations
  Clone ID: MRT4577_121498C.1.pep
LRPPPPRXISPRTPLSSSPLISPPXMPLPPPPYEPPPXADPTIVEPALPTPTNLARASTILAAILAPPPPSATPPPLSRLHPCTRPPPLATVEPMSPAXSSPSSRPRLQSKPTXLPSGTSPTPSSXPLPSQCLPMPSPGAHASSPRWPPRQPPATSTASLTLSGFSPLHY

SEQ ID NO: 208229 - protein, 573 aa, Zea mays
  Clone ID: MRT4577_121499C.1.pep
SLRAPKLGNARTDVKPDHFAREAKEFLRMRLIGKQVAVEMEYSRRISTVDGQSVAPTANIADTRVLDYGSVFLGSPSQTDGDDISSAPSSASQPGVNVAELLLSRGFAKTSKHRDYEERSHYYDALLAAESRAEKAKKGVHSQKESPVMHITDLTTVSAKKAKDFLPFLQRNRRHSAVVEYVFSGHRFKLTIPKETCSIAFSLSGVRCPGKGEPYSDEAIALMRRRILQRDVEIEVEAVDRTGTFIGSLWESKTNMGSVLLEAGLAKLSSFGLDRMSDAHVLTRAEQFAKQQKIKIWENYVEGENASNGSAPESKQKEILKVVATEVLGGGKFYVQTVGDQRVASIQQQLASLKLKDAPVIGAFNPVKGEIVLSQFSLDNSWNRAMIVNGPRSVESLNDKFEVFYIDYGNQEVVPYSRLRPVDPSVSSSPALAQLCSLAFIKVPSLEDDFGQEAAEYLSECLLSSSKQYRAMIEERDASGGKSKGQGTGNVLIVTLVDAETESSINATMLEEGLARLERSKRWDTRERKTALQNLEQFQEKAKKERLRIWQYGDVESDEDEQAPAARKPGGRR

SEQ ID NO: 208230 - protein, 112 aa, Zea mays
  Clone ID: MRT4577_12149C.1.pep
MESEMADAPAAAIPAAAAEPLAAVAEEGEGEAEGEAPAEAAVGSTLTMERVAAAKKFIENHYRSQMKTIQERKERRFKLERQLASSQVPKEQQIDLIKDLERKETEYMRLKR

SEQ ID NO: 208231 - protein, 165 aa, Zea mays
  unsure (1)..(165): unsure at all Xaa locations
  Clone ID: MRT4577_1214C.1.pep
MNKERLMKMVGVVRTGGKVTMLRKKSDMRKTVTTXTRSVRADQESLQRTRPXVLVNTIPAIDEVNIFKNHLVIQFLNPKVQASIAANTWVVSGSPPTKKLQDVLPGIINQLGPDNMEQLERIAEEMQKQVAAAGAAAQVKEDNDDDVPELVPGETFEEVAQETKA

SEQ ID NO: 208232 - protein, 154 aa, Zea mays
  unsure (1)..(154): unsure at all Xaa locations
  Clone ID: MRT4577_121500C.1.pep
RCKNELDKDITSIILSFAVASVLAQHSYTIPMKRDFNGVYLWVNTNITNHTAIFFLDSGGGRTIIKKSALKNGVTVGHDNQCCCHKSASFSFTASYGPTIEGRIAIVDDDVIKHDNADGYIGLDLMLKCEMVMPIHTSEITXHCWCGPAAVRGR

SEQ ID NO: 208233 - protein, 84 aa, Zea mays
  unsure (1)..(84): unsure at all Xaa locations
  Clone ID: MRT4577_121501C.1.pep
SVSXTNPKAHDPKGLLATHRLLPPTPPRGRRPRPRRRPCSRGAGRRARPVAGRMGGGGVSEQLEQQELGGWKMGQAKGERGTRT

SEQ ID NO: 208234 - protein, 180 aa, Zea mays
  Clone ID: MRT4577_121502C.1.pep
MSFVQIVNGPRSVESPDDKFEVFYIDYGNQEVVTYSRLRPVDPSVSSSPALAQLCSLAFIKVPSLEDDFGQEAAEYLSECLLSSSKQYRAMIEEHDTSGGKSKGQGTGNVLIVTLVDAETESSINATMLEEGLARLERSKRWDTRERKTALQNLEQFQDKAKKERLRIWQYGDVGLCREL

SEQ ID NO: 208235 - protein, 66 aa, Zea mays
  Clone ID: MRT4577_121503C.1.pep
GGDLSSRPPFFIKSTFREFYSLGFKNEGVIIRAWVSRCFNRGLGRGPKLVGYDHYGPPCLRVLFLI

SEQ ID NO: 208236 - protein, 187 aa, Zea mays
  unsure (1)..(187): unsure at all Xaa locations
  Clone ID: MRT4577_121504C.1.pep
KKKKKKKKKKKKKKKKKKKKKKKKKKVPYSRLRPVDPSVSLSPALAQLCRXLAFIKGPSLEDDFGREAAEYLRECLLSSSKQYRAMIEEHDTSGGKSKGQGTGNVLIVTLVDAETESSINATMLEEGLARLERSKRWDTRERKTALQNLEQFQEKAKKERLRIWQYGDVESDEEEQAPAARKPGGRR

SEQ ID NO: 208237 - protein, 58 aa, Zea mays
  Clone ID: MRT4577_121505C.1.pep
AVNRAARLQLSLAKGCRRPAALESLIHCLAVRRLLIIQDSKVPSSLPHRHRAGPGDLH

SEQ ID NO: 208238 - protein, 58 aa, Zea mays
  Clone ID: MRT4577_121506C.1.pep
FTAFLSINKYYILTTQRTAAHRRPLLCSEKKQCTFNLISLRSKKRNIKSAQTEKVSPR

SEQ ID NO: 208239 - protein, 694 aa, Zea mays
  Clone ID: MRT4577_121507C.1.pep
VVAGTDSFSNIIGSVYYPDGETAKDLALELVENGLAKYVEWSANMLDVEVKIKLKNAELQAKKDQLRIWTGFKPPATNSKPIHDQKFNGKVVEVVSGDCIIVADDSAPYGSPSAERRVNLSSIRAPKLGNARTDVKPDHFAREAKEFLRMRLIGKQVAVEMEYSRRISTVDGQSVAPTANIADTRVLDYGSVFLGSPSQTDGDDISSAPSSASQPGVNVAELLLSRGFAKTSKHRDYEERSHYYDALLAAESRAEKAKKGVHSQKESPVMHITDLTTVSAKKAKDFLPFLQRNRRHSAIVEYVFSGHRFKLTIPKETCSIAFSLSGVRCPGKGEPYSDEAIALMRRRILQRDVEIEVEAVDRTGTFIGSLWESKTNMGSVLLEAGLAKLSSFGLDRTSDAYILTRAEQSAKQQKIKIWENYVEGENASNGSTPESKQKQILKVVVTEVLGGGKFYVQTMGDQRVASIQQQLASLKLKDAPVIGAFNPVKGEIVLAQFSVDNSWNRAMIVNGPRSVESPNDKFEVFYIDYGNQEVVTYSRLRPVDPSVSSSPALAQLCSLAFIKVPSLEDDFGQEAAEYLSECLLSSSKQYRAMIEEHDTSGGKSKGQGTGNVLIVTLVDAETESSINATMLEEGLARLERSKRWDTRERKTALQNLEQFQDKAKKERLRIWQYGDVESDEDEQAPPARKPGGRR

SEQ ID NO: 208240 - protein, 168 aa, Zea mays
  Clone ID: MRT4577_121508C.1.pep
MGDWVPRGRPGTKPAQHETNQSRTTPSLPLPSSFLSLRRLRGGLDHILVGATMAGKLIANLIVMGSTIIGRAMLQAYRKALDNANKTGVAHEAINNIRRASKTMTEQEARQILGVSENSTWEEIVQRYDNLFERNGKSGSFYLQSKVHRAKECLETVYQKNKQDEPPN

SEQ ID NO: 208241 - protein, 75 aa, Zea mays
  unsure (1)..(75): unsure at all Xaa locations
  Clone ID: MRT4577_121509C.1.pep
RPTLRTPFWPPLPPXKKFGGAEWPPTLEMAPPKIPNFFSGGPFPPPGTPPLGKADPPPPWIGFSGPPLIARMEIF

SEQ ID NO: 208242 - protein, 79 aa, Zea mays
  Clone ID: MRT4577_12150C.1.pep
CSALGRLRGSPGVLSVSRWWRLLCVWFVALPSGLSASVLWLAPAVAVCRRRLPRVPVGVSVRVGRPGCSGPVPPGGSFP

SEQ ID NO: 208243 - protein, 116 aa, Zea mays
  Clone ID: MRT4577_121510C.1.pep
MAGKLIANLIVMGSTIIGRAMLQAYRKALDNANKTGVAHEAINNIRRVSKTMTEQEARQILGVSENSTWEEIVQRYDTLFERNGKSGSFYLQSKVHRAKECLETVYQKNKQDEPPN

SEQ ID NO: 208244 - protein, 91 aa, Zea mays
  Clone ID: MRT4577_121511C.1.pep
NVDINRRHKSVKKELIDHILFLICAMFSPFDFIIECSNVSLLCCCKFLTLTTFFVHNKFTTTTLREALSQSTLLTVSTSTHLGIKPTLCKT

SEQ ID NO: 208245 - protein, 116 aa, Zea mays
  Clone ID: MRT4577_121512C.1.pep
PLNLCILHYYQTHNNPIHNITPTDLSKSLLALKSIYTYSPTITTLPTHPHTHLNQTTHYPILPTTHHPPTLHLNIIIHTPTTPNLPTNNHILHPFHYSNHYLHHTYYNISYQHSYT

SEQ ID NO: 208246 - protein, 45 aa, Zea mays
  Clone ID: MRT4577_121513C.1.pep
LKLRRVWQRKSRGQCERGTSHRNVLTYAQMQHIMASKPTRLTADL

SEQ ID NO: 208247 - protein, 85 aa, Zea mays
  Clone ID: MRT4577_121514C.1.pep
GQADVTTNIVGLQLLCLSCGLLQSVHYLDLLARLSDNALVAMMMWSLLDAVREARSAQEVCLLRARNLSSPWLRRQCGRRPHEHD

SEQ ID NO: 208248 - protein, 121 aa, Zea mays
  unsure (1)..(121): unsure at all Xaa locations
  Clone ID: MRT4577_121515C.1.pep
PGNPSPVGRHADHPGGRVTLAARRLASSAPGNVVDRPRHAAPQRRRGEIVPRRRXAEVVHRLRHEKRRRPAPPXRSSCXVRCLSRGRRPVVAVVVRGLRGVGPSRAPPRVRGRGRRRGCGG

SEQ ID NO: 208249 - protein, 81 aa, Zea mays
  unsure (1)..(81): unsure at all Xaa locations
  Clone ID: MRT4577_121516C.1.pep
AFLIILVSDILLGYHSESGWHTFVEVIXLEHYGLEADEAAVTFFVCLVPVAFDVYIKYWVYKYLPRLSPSVGNVLDEIKRH

SEQ ID NO: 208250 - protein, 190 aa, Zea mays
  unsure (1)..(190): unsure at all Xaa locations
  Clone ID: MRT4577_121517C.1.pep
MSGGVEPETPPSSGGSATGSPMARKPPRHQLTAIRHYASSARIAAASTDLGLDSGTLSLISPADIRPSFLPVFRSGSCANIGPKSYMEDEHVCIDSLIEHLGMLTPAIPAPGAFYGVFDGHGGTDAVCFVRKNLLKFIIEDGHFPNSMEKAIRSAFVKADHAIADSLSLDRNSGTTALTGLIFGRXLLVA

SEQ ID NO: 208251 - protein, 88 aa, Zea mays
  Clone ID: MRT4577_121518C.1.pep
RCRLKKNTIRDNQRTQNGKQHKALSFLLIPSIKSSDQQSMHERQIQNVANKAKKFIGLSKHLKEEPTGCTGRRTRNHYRSRSSEQHFT

SEQ ID NO: 208252 - protein, 53 aa, Zea mays
  Clone ID: MRT4577_121519C.1.pep
EFPILSVLTMSPELSGSSPTKQLAVAEIYYLTYIYQDTITSMLSLYFQNAEII

SEQ ID NO: 208253 - protein, 60 aa, Zea mays
  Clone ID: MRT4577_12151C.1.pep
GDPNKKKKTPPPIGKRGGLIQGPDGMKEKRARSLALPFKRDGPEPPDKRASQNPWGAPRF

SEQ ID NO: 208254 - protein, 419 aa, Zea mays
  Clone ID: MRT4577_121520C.1.pep
MAVGDVETAAPLLPPPASALADEPSAGPPPDDRLGIGYLIFFTLGAGFLLPWNAFITAVDYFDFLYPGAPVDRVFSISYMVSALLPLLVIVLFFPKSSAPIRINTGLTLFTLTLVLVPAMDLIYVKGRAGLYGAFDVTVAATALCGVADALVQGGVIGFAGELPERYMQAVVAGTAASGVLVSALRVFTKALYPQDANGLRQSAILYFVAGIVLMVICIVCYNVADRLPVVIYYKNMKKRAQKAEVGGGMTGPAWRSTLWSIVGTVKWYGIGVALIYAVTLSIFPGYITEDVHSEALGDWYPIILITAYNVFDLVGKALPAVYLLQNGSAAIAGSFARLLFYPLFYGCLHGPSFFRTEIPVTVLTCLLGLTNGYLTSVLMILAPKAVPIHHSETAGIVIVLFLVVGLVIGSIVAWFWVI

SEQ ID NO: 208255 - protein, 92 aa, Zea mays
  Clone ID: MRT4577_121521C.1.pep
LVDVYIALFKVLMSSGDTKGDTYSKDSKKKVGKIEGGNNKMDSRSKGNNEVGSTAGSDLELDSRILSALLTGVNRALPYVASSEVDDIVEVQ

SEQ ID NO: 208256 - protein, 43 aa, Zea mays
  Clone ID: MRT4577_121522C.1.pep
KLRYPCDIRCILHNSKIATGQYSPLPILLTDMSTFSGYFGYSF

SEQ ID NO: 208257 - protein, 53 aa, Zea mays
  Clone ID: MRT4577_121523C.1.pep
LPSPPLWHCRPRAGGAAAEALAKGGVETVLIERKMDNCKPCGGAIPLCIVAYC

SEQ ID NO: 208258 - protein, 83 aa, Zea mays
  Clone ID: MRT4577_121524C.1.pep
CSWAFKLGPGGPVSSHLWGLPIVSPVCKRGFVDACFPEPSSLALTHGCASGWGLPPCSKGWPVGALIPRYSLLNGESWKFFVS

SEQ ID NO: 208259 - protein, 65 aa, Zea mays
  Clone ID: MRT4577_121525C.1.pep
GRVGKSSKKEKKKTNKEKKKKTKKKKKTKKKISNTRVDLNDVPRLGATSIQLHNPSNLSRNFMSS

SEQ ID NO: 208260 - protein, 113 aa, Zea mays
  Clone ID: MRT4577_121526C.1.pep
CPRPHWAQSPACASTLTVISDLSWCTESDYIWSVSDYRNIDIGDMRTVLEGGEPRTRRLRSRPDESAWSRGITNVLCSLLTSTTRAAQISMSGGYDCNVRIWDFMSGRCTHAI

SEQ ID NO: 208261 - protein, 109 aa, Zea mays
  Clone ID: MRT4577_121527C.1.pep
GGNQFGQLGPGFYQAKTVPKLVDAPPLKKKKPKFVFFGAPQRAFITNKGGVFFWGWNKYGQLGLGDPKDKNGPSRVPVGAFPPLKVSCGWGPPLGLGDSPPLNLPKKFP

SEQ ID NO: 208262 - protein, 76 aa, Zea mays
  unsure (1)..(76): unsure at all Xaa locations
  Clone ID: MRT4577_121528C.1.pep
MGVNWLQSYIQGYIIHHRCVCHIINLAVQAGITVANKYLNNICVAIRFITSAPXMISRFAEYCKAXAMRPRKFSLD

SEQ ID NO: 208263 - protein, 82 aa, Zea mays
  unsure (1)..(82): unsure at all Xaa locations
  Clone ID: MRT4577_121529C.1.pep
MELPLPSVRKTIGQLGGYSLREDYLTYWMHRLLHTQWCYXRIHRVHHEFTAPTGFAMSHSHWAENVGLVIPVLGEPALMPCH

SEQ ID NO: 208264 - protein, 67 aa, Zea mays
  Clone ID: MRT4577_12152C.1.pep
IKQGKPCARAHPYGRGDNQCIQHLISEPINQSIVTQPQRHNAYGTQRVRDMSSPLAPNKQYISTRCF

SEQ ID NO: 208265 - protein, 694 aa, Zea mays
  unsure (1)..(694): unsure at all Xaa locations
  Clone ID: MRT4577_121530C.1.pep
DRALWQAYVSANKIFADKVLEVINPDDDFVWVHDYHLMVLPTFLRKRFNRIKLGFFLHSPFPSSEIYKTLPVREELLRALLNSDLIGFHTFDYARHFLSCCGRMLGLSYESKRGHICLEYYGRTVSIKILPVGVHMEQLKTVLGLPETEAKVSELMEMYSGKGRVVMLGVDDMDIFKGISLKLLAMEELLRQHPEWRGKLVLVQVANPARGRGKDVAEVQTETYAMVRRINEAYGEPGYEPVVLIDEPLQFYERVAYYVIAEVCLVTAVRDGMNLIPYEYIVSRQGNEKLDRMLRQGKPEEKKSMLVVSEFIGCSPSLSGAIRVNPWNIEAVADAMETALVLPENEKRLRHDKHFRYVSTHDVGYWANSFLLDLERTCKYHSQKRCWGIGFGLRFRVVSLDLTFRKLSLENILMAYRRAKTRAILLDYDGTLMPQAINKSPSTESVRILNSLCRDKDNVVYLCSGYDRRTLHEWFPCENLGIAAEHGYFLRCKRDAEWKTCVAATDCSWKQIAEPVMCLYRETTDGSTIEDRETVLVWNYEDADPDFGSCQAKELVDHLESVLANEPVSVKTTPHSVEVKPQGVSKGLVARRMLVSMKERGQCPDFVLCIGDDKSDEDMFQLIATAACGDSLXASKAEVFACTVGRKPSKAKYYLDDAAEVVRLMQGLSYVSEELALANQRDEDEDSSLDDVWE

SEQ ID NO: 208266 - protein, 48 aa, Zea mays
  Clone ID: MRT4577_121531C.1.pep
TRPPFFLGEGARHGIEKRTPLSLSPSQEVSHGIGDLDGRAHAASELPA

SEQ ID NO: 208267 - protein, 84 aa, Zea mays
  Clone ID: MRT4577_121532C.1.pep
VMSVCRPCACLILMSLSNLNYYRNPKLTTRRTSMKMNRGMVAKLLSCDHPKQNHLRLPTARHLMDHTTCTFILLQPVTISPRVR

SEQ ID NO: 208268 - protein, 59 aa, Zea mays
  Clone ID: MRT4577_121533C.1.pep
SKSYNYDGASHAIPKLLYIRPPALFFFFFFFLVGFFFWWVFKKMDPSILFHKPNKKLRR

SEQ ID NO: 208269 - protein, 49 aa, Zea mays
  Clone ID: MRT4577_121534C.1.pep
NTVQPAEIASVAQLGRDRSYTPKLHIAADPKRRICHLRTILPRRHNAVS

SEQ ID NO: 208270 - protein, 36 aa, Zea mays
  Clone ID: MRT4577_121535C.1.pep
LAQALSLHPRLAASMQHAATHHGVRRDLIGHTCESL

SEQ ID NO: 208271 - protein, 139 aa, Zea mays
  unsure (1)..(139): unsure at all Xaa locations
  Clone ID: MRT4577_121536C.1.pep
PLRAGRAGTFPNLPSPPPPLLGSFSFLRVMGKENTHVNIMVIGHVDSAKSSTTGHLIYKLGGIDKRVIQRFEKEGAEMNKRSFMYAWVLDYLTAEREISITIDIALRNLKTTKYYCTVIDAHGHREFIXNMIIGTSQVD

SEQ ID NO: 208272 - protein, 95 aa, Zea mays
  Clone ID: MRT4577_121537C.1.pep
RPGMAPTCEVCWSNHRPNHAGGEGLLCHRCRRTEGVSHSQGWPQRITEGDCVRRFRYCLRLVPSARTSGAPQGCMRLLFLQLPLSSGECVPLPGP

SEQ ID NO: 208273 - protein, 92 aa, Zea mays
  unsure (1)..(92): unsure at all Xaa locations
  Clone ID: MRT4577_121538C.1.pep
QEFSVVXXEEKKRYVLDNIVQSSYLKLTIFSCRLFQHYMGVQFMLSRFTKYDIFLDNFYIIAKPYSYXWYFWISRTFXPRFSDRNQRSLSXL

SEQ ID NO: 208274 - protein, 88 aa, Zea mays
  Clone ID: MRT4577_121539C.1.pep
KGPFFTKKTFPHELGGQLQQDPQKLTPPEAPSFRSLSDRGTYPDRAYWPKKKTFINFCWQVSGLWPSLAQKSTPWPHFPVRSFGKNLQ

SEQ ID NO: 208275 - protein, 91 aa, Zea mays
  Clone ID: MRT4577_12153C.1.pep
WSGTIAPPGSVVHAQSRPLHVHINTWGYKVHSEQGEMIQTRDEPPECHTMTNLRKRMRNTCSIRSGRCTSQRYVHDDMHGATDHIVRRRRF

SEQ ID NO: 208276 - protein, 52 aa, Zea mays
  Clone ID: MRT4577_121540C.1.pep
SSLCGSYFKNFYLGEGQGLKNEISMEKVEGVYPGWITLCLSFRPLAFGKLLT

SEQ ID NO: 208277 - protein, 37 aa, Zea mays
  Clone ID: MRT4577_121541C.1.pep
SHPTRLTSGSSSKPRIDPGASGRLGARAATRSWCRRR

SEQ ID NO: 208278 - protein, 132 aa, Zea mays
  unsure (1)..(132): unsure at all Xaa locations
  Clone ID: MRT4577_121542C.1.pep
CFNLLLYILFSTDKLSESVILEVVTKNFKDHLILGEEGGLVGDSLSEYLWCIDPLDGTTNFAHGYPSFSVSISVLFRGKPAASTGXVKFVAGPMXWSTRTXFLHLRGGGSLXCNGAXRFHGSVRQNKVGTKS

SEQ ID NO: 208279 - protein, 58 aa, Zea mays
  Clone ID: MRT4577_121543C.1.pep
IRLEVRSIANFFKQGAWHDQSNTRMHSLEDIVICKHDEPMLPLGHPVVGALVPTVRHC

SEQ ID NO: 208280 - protein, 314 aa, Zea mays
  Clone ID: MRT4577_121544C.1.pep
MAVASEQAAPPARYPKVAAPTTGPIPAAELLGVIEAAAKAGADVIMEAVNKPRNIHYKGVADLVTDTDKLSESVILEVVTKNFKDHLILGEEGGLVGDSLSEYLWCIDPLDGTTNFAHGYPSFSVSISVLFRGKPAASTVVEFCGGPMCWSTRTISASAGGGAYCNGQKIHVSQTDKVEQSLLVTGFGYEHDDAWTTNMNLFKEFTDISRGVRRLGSAAADMSHIGLGITEAYWEYRLKPWDMAAGVLIVEEAGGVVTRMDGGEFTVFDRSVLVSNGLVHGQLLDRIGPPTEDLKKKGIDFSLWFKPDKYPTDF

SEQ ID NO: 208281 - protein, 53 aa, Zea mays
  Clone ID: MRT4577_121545C.1.pep
SFFFFFFNQFSVRREEFLAVDKLAFWAQNNPPKTNMSHINLNFKMDLAGPMLK

SEQ ID NO: 208282 - protein, 133 aa, Zea mays
  Clone ID: MRT4577_121546C.1.pep
GFKQLATDDTSVNPSLTGKNISGMPPLVYIEEKEGPNTDSTKGVSNPQHAHASECAQPCHSLCRFVSASASGSPAAAGSLNVVGEEGGDAGPEGGAAGGRDGGGAAGGARSRSLRGERHGDSRPGDEDGAGDH

SEQ ID NO: 208283 - protein, 43 aa, Zea mays
  Clone ID: MRT4577_121547C.1.pep
LGLTSITPHLHLPITRTLSCDGIVQAKWHLNSTYCHPCTPPND

SEQ ID NO: 208284 - protein, 38 aa, Zea mays
  Clone ID: MRT4577_121548C.1.pep
ASAQYANSPFVYAFQHVTACVLLRVSERSLSVFDDDAS

SEQ ID NO: 208285 - protein, 109 aa, Zea mays
  unsure (1)..(109): unsure at all Xaa locations
  Clone ID: MRT4577_121549C.1.pep
MGNMSLAANDDFHHILRVLYTDVIGKQMIPFAMXSVDGVGRXLADIASQKAVADLNDKASEWTDADGDSELTVVASPKQXQIPDWLLDEXMDHLAGAYSVLGATALDLS

SEQ ID NO: 208286 - protein, 81 aa, Zea mays
  Clone ID: MRT4577_12154C.1.pep
WLYPAFLFHIRFLFFPPHGAPSTIRLCCLFIVFLLPWRFYPPLFSRPWDLLGCWPPSPVGLICFGAGCFEPPFNGSAFFFP

SEQ ID NO: 208287 - protein, 155 aa, Zea mays
  Clone ID: MRT4577_121550C.1.pep
AQAVQETLVDFEVAVEKNNSKTTVQNGNLHPFTIEVINYVKGLFDYQSTLKILFQQSESDSETESELATVIMKVMQAFQNNLNGKAKQYKDPALSHIFLMNNLHYMVTSVSKSESKDILGGDWIQRHRKIVQQNAYQYMRVSWAKIFQTLFIQCL

SEQ ID NO: 208288 - protein, 134 aa, Zea mays
  unsure (1)..(134): unsure at all Xaa locations
  Clone ID: MRT4577_121551C.1.pep
MAESFIIWSKENIRAKEHLPNILRQALICKTPGFGMSSFAHVSLILAPDRSKLSRRHGATSVGQVTYRLFPILKLYQHILFYSRHKNEPXYFFPAQYKEMGYQPQAMEIYLALLGXGDGTENEFFTIDDLVLFL

SEQ ID NO: 208289 - protein, 134 aa, Zea mays
  Clone ID: MRT4577_121552C.1.pep
RKNYSINYTMDLLKHILGAKPAPHNALSKAHVKTHSLSLELANESDSRSGWTLGNTLENILYQCHWGSCAAYGAQDRLHNHLSINLIMSIKLLLKYLLSFCGYMCDDSCDIDYSIYAWHYCVQTGDCTAYCDPY

SEQ ID NO: 208290 - protein, 335 aa, Zea mays
  Clone ID: MRT4577_121553C.1.pep
MGSGDWFKTIISKKKSKRGKSKHAKLSGQVTNGGNQTNQKLDGPSSSSEDHEDNAALEEWAATRIQNAFRKYKARKTLRCLKGVKRLRVVGQANPVKKQTAATLSYIQSWNKLQSEIRNRRAFMVTEGRNRKKKQENQMKLEAKLHNLQIEWNGGSDTMDEILARIQQREEAAVKRERAMAYAFNHQWRARSATSLGNFSYEVGKGGWGWSWMDRWIAARPWEPRSMVHPENPKKAQAKKENTTNPSALKLQGSITLSNNINDRKTLKKKPLPSASPADQKKPSPSPSSDQKKPVPKEQRAKAAGTPPKPKAKDMKGSQEKKPQPQQKVPPPVSA

SEQ ID NO: 208291 - protein, 84 aa, Zea mays
  unsure (1)..(84): unsure at all Xaa locations
  Clone ID: MRT4577_121554C.1.pep
LPVLNDYGQYHHHHHRSYHCTXSSCYGQPCASGTVTSAASVRALAAGCVTTGCAAAAAAAPAVYPXSXVSPRSEPXLSPLSLCX

SEQ ID NO: 208292 - protein, 117 aa, Zea mays
  Clone ID: MRT4577_121555C.1.pep
QADPPDPQKKKSPTWFLFANLFRPRSFYSFGFMRCLGPRPVLAIVSKNPRCAVSSPPFPRSNPGHGGVFFKRWKSLCWVLPVQVWHVGKAWHGGCSKILGRRGGHQDHHLCHQHPGL

SEQ ID NO: 208293 - protein, 189 aa, Zea mays
  unsure (1)..(189): unsure at all Xaa locations
  Clone ID: MRT4577_121556C.1.pep
MVLTLLLLLLLPAASRARDTITPGQPLXXNDTLVSSGAGSFVLGFFSPPGSNSTYVGIWYAKVPVRTVVWVANRAAPVRGAASESAGATLSVSSECALAVADANATVVVGGRVVVFPGRAAGAIQEGNGWGVGTQARAWVLAKGGSNQPPPRCSRMRRWDSRRGAEHTLTGVGRSPSGPVADPRGWAAM

SEQ ID NO: 208294 - protein, 96 aa, Zea mays
  Clone ID: MRT4577_121557C.1.pep
AARSAGRRTVGGARARRGPVDEIRRERGEVRALRRRRRRGPGLMFFGVPAAPAVRRRGRRRAGPGGEGRRRGGRGRPGLVPVHQRRRESPRRPRVR

SEQ ID NO: 208295 - protein, 48 aa, Zea mays
  unsure (1)..(48): unsure at all Xaa locations
  Clone ID: MRT4577_121558C.1.pep
MGDLPHLLQRLTENXNIANCTDYESEQLSEAVGYGAGKYADLINNRVT

SEQ ID NO: 208296 - protein, 75 aa, Zea mays
  Clone ID: MRT4577_121559C.1.pep
DPWALKPLKRFSCSLFLCRWHTDTRSCSSFLASSGDEFIICCFRPHAGLVLAQLTYRCCGSTTADRPISGPLMPS

SEQ ID NO: 208297 - protein, 69 aa, Zea mays
  unsure (1)..(69): unsure at all Xaa locations
  Clone ID: MRT4577_12155C.1.pep
TEITLSDGTRVPYGLLVWSTGVGPSXSVVRSLHLPKSPAWRVGVDEWFRVPTGPDVFALGNCPGFLKGT

SEQ ID NO: 208298 - protein, 108 aa, Zea mays
  Clone ID: MRT4577_121560C.1.pep
GREMDHPWGYDKIKTPGGEAFTKKNHSNTGVISPQPQPQKNKPPGYKQGGNTPPPHWGGEEKVPSRQFLAPKALGTRRGKKNRNWALFKGESWPKTPLNWAFIGPLFS

SEQ ID NO: 208299 - protein, 277 aa, Zea mays
  Clone ID: MRT4577_121561C.1.pep
MRSWSEEEAVSVNLAREEMGKGGELWDDSALVDAFDHAVATYKAMHGKNNQGAPSEKQESEDVAAAAAAYAAAAVAEEPVSTEVADEQTEKNDSCTNLPIGPVETPQQPCEERKTDKQAPLRETDLGKETNISESKTCFSDVTNTEGKDSSNQQTEDYNELLRKYYELEVQSQKVLEQLHQTNFWNYQTPEQSSAYQQQQVPAYIVTAPDPNSSTTQTSCCSLNAPMVSISCCSTGQQSGDSSGMLPNGGCSVSFTCDHCPGASTHILLVQPSRSYH

SEQ ID NO: 208300 - protein, 130 aa, Zea mays
  unsure (1)..(130): unsure at all Xaa locations
  Clone ID: MRT4577_121562C.1.pep
GSTLTAMDELLQSGCTTSTVTIHHRTNRPKTQRAASGSEALQPSRXAMSVGQRDGGLPPDSVVEREPDILRDAQRLIETYHDEGRYAMLRVVVAPCSPFSVSRELMRDAAVLAREYGVSLHTHLAENVND

SEQ ID NO: 208301 - protein, 56 aa, Zea mays
  Clone ID: MRT4577_121563C.1.pep
QLSLISSRSPIGPTWLIRAPSASSHTDILLDLVSFRTLCVRMLGEQTSSQTWSLRN

SEQ ID NO: 208302 - protein, 209 aa, Zea mays
  unsure (1)..(209): unsure at all Xaa locations
  Clone ID: MRT4577_121564C.1.pep
VKHTPYGCGTWPALWLTDPNNWPTNGEIDIMEAVNQAASGNIMALHTTADCTMADIRRNMTGAAGQGDCHNATNFNTGCNVSGAPATYGPEFNAAGGGIVAMEWRDEGIRVWVFSRXEIRGAIRSXQGVPDPSTWGSPLADFPATSCDVGSHFRNQSIIVNIDLCGYLTNAVWESSGCPSNCTDFVANNPSAFTNAYWEFGAFQVYKAR

SEQ ID NO: 208303 - protein, 73 aa, Zea mays
  Clone ID: MRT4577_121565C.1.pep
PLGLKRRQCPGLGFGRPFFPLVFPVLFEPRNRPRLLLSVRFRAFFCARLYFTPCLLTHISIAQELVNLNKWNT

SEQ ID NO: 208304 - protein, 92 aa, Zea mays
  Clone ID: MRT4577_121566C.1.pep
FLGYLGVHFVHSLQMRTLINKVTTVVNIVLHKIKEGNPGDRGRRGKFTKFATGRDVIDRISRRCHGITGKKEEEDLDVVNGALGWGDCGPGD

SEQ ID NO: 208305 - protein, 75 aa, Zea mays
  Clone ID: MRT4577_121567C.1.pep
MQMAAAVAPTDAPASAAAPAPHPPHAHAAHGPSHPHHHMPQPRWVVIPYPPPHHPNMYAAAYGAYPYYGNQQLVS

SEQ ID NO: 208306 - protein, 76 aa, Zea mays
  Clone ID: MRT4577_121568C.1.pep
YSWLRCMVHMRYCSTLVDIRILPIPHCVTYPAKSVVIGATDVFLLGAKSLTFSFFMSQWVMFHSVNAHLSLVGSKC

SEQ ID NO: 208307 - protein, 83 aa, Zea mays
  unsure (1)..(83): unsure at all Xaa locations
  Clone ID: MRT4577_121569C.1.pep
MAQISSPTETERCTQSLIAVFQKYAGKDGDNYTLSKTEFXSFMNTXLAAFTKNQKDPGVLDRMMKKLDTNSDGQLDFSEFLNL

SEQ ID NO: 208308 - protein, 138 aa, Zea mays
  unsure (1)..(138): unsure at all Xaa locations
  Clone ID: MRT4577_12156C.1.pep
MEMIPRTARMGLLSTPRTYSAAAAAGASPTTSSAIRRLPPSPAMSNTADVVTSKVHDLRNXGSKASIWPMTFGLDCCAVEMMHCGAARYYVYRLGAVLRPASRQIERMIDDGTCTSXMAPALREAYDXMPDSRWAIYT

SEQ ID NO: 208309 - protein, 157 aa, Zea mays
  Clone ID: MRT4577_121570C.1.pep
MIIPKEDRRTIYENLFKDGVMVAKKDYDAPKHVELDVKNLYVIKACQSLNSRGLIKTQFSWKFHYYTLTDEGIEYLREWLNLPSEIVPATFKKVQRAVPAGRPQQASGVYRPPRGEGGGDREGYRKKESGADGRFRPRFAGIGRGAPSGDAPAAGGW

SEQ ID NO: 208310 - protein, 91 aa, Zea mays
  Clone ID: MRT4577_121571C.1.pep
KKNGSDPECLQPLCGTHLRPVFFEHFFFYPRKKGDESFFFLIGYILSPESTANFLGCWFTFNNLAKFLGILKWIANLPPTSNPLIVPHSFF

SEQ ID NO: 208311 - protein, 69 aa, Zea mays
  Clone ID: MRT4577_121572C.1.pep
MRIRSSLLLVVLLALETQLPVVLCRKNGDKLGGCPPDDGPCSQVIPDQCANDKQCPSSWKCCSRACFLQ

SEQ ID NO: 208312 - protein, 126 aa, Zea mays
  Clone ID: MRT4577_121573C.1.pep
TLFARAAAKLLAPARIYNVRVLSLPPDQAKGAACGRPRPGVCACGTTATSMAGWRPSAPSCRRSELLAYAFDMEKGYINGQQEYITGIEREPERAAHRGAHGKDAEEADWRRSEKLLMAKDAECTE

SEQ ID NO: 208313 - protein, 70 aa, Zea mays
  Clone ID: MRT4577_121574C.1.pep
MAEQTFIMIKPDGVQRGLIGEIISRFERKGFYLKGLKLVTVDRPFAEKHYADLSAKPFFSGLADYIVSGP

SEQ ID NO: 208314 - protein, 227 aa, Zea mays
  Clone ID: MRT4577_121575C.1.pep
SQVASITQLAMVAMGMGSTKRGVVWCAGLLVTGLLLVAAEADFCSEDCRGKTDFLGRARRCRSQLEVARPTNCVALCHGKPNFMACCNRHRYARRVTPHLQRRAGRESTTHEEEARGGAVGVLKAPAPAPCEVVCRDRVGWVEYERCLDRCRWGAFVRRALLHLKLAGRQSATHEEARGGGRGEAHILTAMAARLSDPCQDMGHNHKHYDWCVRSLPVWARILCLPV

SEQ ID NO: 208315 - protein, 29 aa, Zea mays
  Clone ID: MRT4577_121576C.1.pep
VLESRILNVWQLMGGSVIEKAPLKNLVEL

SEQ ID NO: 208316 - protein, 148 aa, Zea mays
  unsure (1)..(148): unsure at all Xaa locations
  Clone ID: MRT4577_121577C.1.pep
SLPQPPRKDDSFATIKPPWGTKIFPFLRLLALFTGVVTATIFPHCSQAPIASFLPPYLPXIIAQVGKNPAFKPYRLNQAIEASTIPXSPLWFKQSPALSLGQSLVQTIRAQQLQQXGLPGITQVALANLSPYFEQQQFLPFNQLSTLN

SEQ ID NO: 208317 - protein, 89 aa, Zea mays
  Clone ID: MRT4577_121578C.1.pep
PPVRFPKCTALLPKGRTKLGRASRIHRATLTARRLSELHLGSSNYSAKGIPFHPHGCTVFSGGHATNRSLRRGTRETARAPLNDTSITS

SEQ ID NO: 208318 - protein, 141 aa, Zea mays
  Clone ID: MRT4577_121579C.1.pep
MENLALLWGIIGPGVSGAIFGAGWWFWVDAVVCSAVQVSFLHYLPGIFASLAALMFNCVNKDEIGYDYYSPYGDDSEWRVKLWLFVAYVVSFVCLAGSVGLLVQDALTNKGPSVWTGVAGVLQCVLVLISGLVYWTCHSED

SEQ ID NO: 208319 - protein, 131 aa, Zea mays
  Clone ID: MRT4577_12157C.1.pep
CREETATPLMALDGAVGYLSLSLAPSPLPLLLYKGQSSLLPSSPCPKLSLTSHSHVHADHWSVASSPSAEARRSPPRSRPPRAEPLPQRSSTHAAIPRPSLAPRSPCRSCHLFVARLKITQNNLLIFEITC

SEQ ID NO: 208320 - protein, 140 aa, Zea mays
  Clone ID: MRT4577_121580C.1.pep
IWGEGDPVPPSQAKGKKKKKGGKKKPRPPVGGGFQMGGHSGCPHPAPRGGVPQGGGGPRVLGLPPPPPSGGNPRGFFPPFRPPQKKLGCFPFRKRTKVPALGVFKSLKPPFAGRRWFKSIGFWSRAPPLDFLFPGRHNFC

SEQ ID NO: 208321 - protein, 186 aa, Zea mays
  unsure (1)..(186): unsure at all Xaa locations
  Clone ID: MRT4577_121581C.1.pep
STVIEAXINALVGSNMLGRLLHVQHPTAKQAVITAIDLLGRAVISAAEMGISFPLKRRDQLLEYVLTLMGRDQSNDLTDFNTELLHTQSLALSACTTLVSLEPRLPMETRNRVMKATLGFFALPTEPSSIVESLVTNLIILLGAILLTSGEDGRSRAEQLLHILRQLDPYVSSSLEHQRRRGCVAV

SEQ ID NO: 208322 - protein, 94 aa, Zea mays
  unsure (1)..(94): unsure at all Xaa locations
  Clone ID: MRT4577_121582C.1.pep
MASMILSFLALLALLVSATNAFIIPQCLLAPSAIISHFLPPVTLLGLXISALQAYRLQLALAASFLHHLIAQLHHXSLAHLNLLSIVSQHLYHF

SEQ ID NO: 208323 - protein, 61 aa, Zea mays
  unsure (1)..(61): unsure at all Xaa locations
  Clone ID: MRT4577_121583C.1.pep
APPPLVVFCFVAAIVLXVPPFRVVVFLPGLYIFRPPRFPPKKPSVPLKFFRGFPGRNYTIL

SEQ ID NO: 208324 - protein, 100 aa, Zea mays
  unsure (1)..(100): unsure at all Xaa locations
  Clone ID: MRT4577_121584C.1.pep
EKCKSLDTQCQQSSSIKICTQESARFFFTSPVKLNITGSSCSTQRSGRQGNQDSSFRTWTHSNRRTQLSPEGAHDXTASMYETRTSSRGQXQQQXTRVPD

SEQ ID NO: 208325 - protein, 89 aa, Zea mays
  Clone ID: MRT4577_121585C.1.pep
ITSLHAYYSSTETTFFSKRMTMLMQWHKEAEWENKKVMVHNGDVWKTLDSFDPKFAKDARIICIDWRKTASYLSIKPMHPIPIGPCLLN

SEQ ID NO: 208326 - protein, 203 aa, Zea mays
  Clone ID: MRT4577_121586C.1.pep
DYFFSGLGFQNQGGVWYDVCPTTRGDDRRQLREEYNPIHLRWGIFYADILGIAGDSDNYNRELGPQLGAMNLGKAFVTNAVCVLSRYPADVERVDLSPRQALAGLMFMLSESAKFNHLYHLFESRWVEGVKPQDEGDLRLDYMWNWFTISDTLLAWKEERNHKRRADCVTKLKGLGTTGLQDALSNLHFVIGNDIHSILGRKY

SEQ ID NO: 208327 - protein, 86 aa, Zea mays
  Clone ID: MRT4577_121587C.1.pep
SPCPIAARTSSAPSCNQRSLILQGTNNKLTKFIINEQICHSSENSCARCTAWGDPASLRRRAALTANAGRAPPSLGVGFRRVSRRV

SEQ ID NO: 208328 - protein, 64 aa, Zea mays
  Clone ID: MRT4577_121588C.1.pep
TYLSSKTLQMSHRIYPNIGTTQTKDQGELSSFGLLPVLALTLLLLLVTLFSSLSLILSLMTYTT

SEQ ID NO: 208329 - protein, 118 aa, Zea mays
  Clone ID: MRT4577_121589C.1.pep
PTDTRNSLLPIKGPLQTTTSTSASTTTSLLPLPLKLKLQSTLKLKLHSPLKLKLHSPPKLKLHSPPKLQLHPLTTKLQLLPSKLQLQLRLLLFSLPLKLPPQSRPLPSPPSFNNKLVA

SEQ ID NO: 208330 - protein, 84 aa, Zea mays
  Clone ID: MRT4577_12158C.1.pep
QVYRDAVATGDAAFAEAVWPAVYVAMAYMDQFDRDGDGMVENEGVLDQTYDMWSVSGVSSYTVGVWVAALQAAAGMARVVGDRP

SEQ ID NO: 208331 - protein, 37 aa, Zea mays
  Clone ID: MRT4577_121590C.1.pep
IAMNFSTAPLEKVDGTRPDSKPNPSVRVRGSQGSSIV

SEQ ID NO: 208332 - protein, 62 aa, Zea mays
  Clone ID: MRT4577_121591C.1.pep
HVFEVGFVQIFFPIFTHIFVPRVPECTTFLSAPVGADTLICEPLSCVIVLWKKKRNHYIKPT

SEQ ID NO: 208333 - protein, 47 aa, Zea mays
  Clone ID: MRT4577_121592C.1.pep
SQVYTGNNATQVVFGVRNFRKPISIVIPLTRGAFGMTRTQAIFNDEC

SEQ ID NO: 208334 - protein, 147 aa, Zea mays
  Clone ID: MRT4577_121593C.1.pep
LAVDLFPLNPHGFGTTNGLMHNINLCCLNMTGFVLFEYDRFCHIYNEISPFGPNTAGVSLKFKWLIILLRKRGHLGKVAIWFLPQIFLLPAILTRKALAFLPPFIIGTEDSIPPFVPAIIGGTGKRILLVCCAHTAAQRGKGRSSSL

SEQ ID NO: 208335 - protein, 100 aa, Zea mays
  unsure (1)..(100): unsure at all Xaa locations
  Clone ID: MRT4577_121594C.1.pep
SSFRGGSTSAGNGGYSLAGDYASTRVQTEDAAPLIGLVEERRVVGRMSGGDRFILPLLTLTPRGRKLGGGSEVGGGGAHGEXEANDDQQAAIVLLFLGDD

SEQ ID NO: 208336 - protein, 44 aa, Zea mays
  Clone ID: MRT4577_121595C.1.pep
PTWPPTFRILRTHLIPILFWPMGLKSSGPKKPRLIDFKPRSMPP

SEQ ID NO: 208337 - protein, 866 aa, Zea mays
  unsure (1)..(866): unsure at all Xaa locations
  Clone ID: MRT4577_121596C.1.pep
MVSKSYSNLLDLTSGDGFDFRQPFKSLPRVVTSPGIISDTDXGYNXSDGDSVGSASSTERKIIVANFLPLNCTRDETGVLSFSLDHDALLMQLKDSFSNETDVVYVGSLKVQVDPGEQDQVAQKLLREYRCIPTFLPSDLQQQFYHGFCKQQLWPLFHYMLPICLDKGELFDRSLFQAYVRASKLFADKVMEAINADDDYVWVHDYHLMLLPTFLRKRLHRIKIGFFLHSPFPSSEIYRTLPVRDEILKSLLNADLIGFQTFDYARHFLSCCSRLLGLHYESKRGYIGIEYFGRTVSLKILSVGVHVGRLESVLKLPATVSKVEEIEQRYKGKILMLGVDDMDIFKGISLKLLALELLLDRNPKLREKVVLVQIINPARSTGKDVQEAITEAVSVAERINTNYGSSSYKPVVLIDHHIPFYEKIAFYAASDCCIVNAVRDGMNLVPYEYTVCRQGNEEIDKLRGLGKDTHHTSTLIVSEFVGCSPSLSGAFRVNPWSVDDVADALCRATDLTESEKRLRHEKHYRYVSTHDVAYWARSFAQDLERACRDHYSRRCWAIGFGLNFRVIALSPGFRKLSSEHFVSSYNRASRRAIFLDYDGTLVPQSSINKAPSEEVISVLNTLCNDPKNVVFIVSGRGRDSLDEWFSPCEKLRLAAEHGYFIRWSKEAAWESSYSSPRQEWKHIAEPVMQVYTETTDGSSIESKESALVWHYLDADHDFGSFQAKELQGHLERVLSNEPVVVKCGHYIVEVKPQGVSKGLAVNKLIHTLVKNGKAPDFLMCVGNDRSDEDMFESINGMTSNAVLSPTMPELFACSVGQKPSKAKYYVDDTSEVIRLLKNVTRIPSQRQDVSASHGRVTFRGVLDYVD

SEQ ID NO: 208338 - protein, 52 aa, Zea mays
  Clone ID: MRT4577_121597C.1.pep
LQRSRLCVCLVDMQLLDHAFVSIAEFIVFRMVYPTWFLSTSPVVAMSIAGSD

SEQ ID NO: 208339 - protein, 868 aa, Zea mays
  Clone ID: MRT4577_121598C.1.pep
MVSKSYSNLLDMTPGDGFDFRRPFKSLPRVVTSPSIISDHDWDSISDGDSVGSAFSIERKIIVANFLPLNCTRDETGELSFSLDHDSLLMQLKDGFSNETDAVYVGSLKVHVDPREQDQVAQKLLREYRCIPTFLPSDLQQQFYHGFCKQQLWPLFHYMLPICLDKGELFDRTLFQAYVRANKLFADKVMEAINTDDDYVWVHDYHLMLLPTFLRKRLHRIKIGFFLHSPFPSSEIYRTLPVRDEILKSLLNADLIGFQTFDYARHFLSCCSRLLGLHYESKRGYIGIEYFGRTVSLKILSVGVHVGRLESVLKLPATVSKVEEIEQRYKGKILMLGVDDMDIFKGISLKLLALELLLDRNPKLREKVVLVQIINPARSTGKDVQEAITEAVSVAERVNTKYGSSSYKPVVLIDNRIPFYEKVAFYAASDCCIVNAVRDGMNLVPYEYTVCRQGNEEIDRVRGLDKDTHHTSTLIVSEFVGCSPSLSGAFRVNPWSVDDVADALCRATDLSESEKRLRHEKHYRYVSTHDVAYWAHSFAQDLERACRDHYSRRCWAIGFGLNFRVIALSPGFRKLSSEHFVSSYNRASRRAIFLDYDGTLVPQSSINKAPSEEVISILNTLCNDPKNVVFIVSGRGRDSLDEWFSPCEKLRLAAEHGYFIRWSKEAAWESSYSSPRQEWKHIAEPVMQVYTETTDGSSVESKESALVWHYLDADHDFGSFQAKELKDHLERVLSNEPVVVKCGHYIVEVKPQGVSKGRAVDKLIQALANNNGKAQDFLMCVGNDRSDEDMFECINGMASNDVSSTTVPEVFACSVGQKPSKAKYYVDDTSEVIRLLRDATRFSSSQRREDVNASRGRVTFRDALDYVD

SEQ ID NO: 208340 - protein, 137 aa, Zea mays
  unsure (1)..(137): unsure at all Xaa locations
  Clone ID: MRT4577_121599C.1.pep
GNXTQXHPXPXPXSSPXXPXSXTRRRLRDVGTGFATXKETYRLXEDEARCPGYSCHAXGGHGXRARXPEAQRRKRRRTTAEGWGAAAAGAPGVRLGGRDMFEELPDDLVESILRDDGGSRRVAGRSTPLSAAPQPGG

SEQ ID NO: 208341 - protein, 87 aa, Zea mays
  Clone ID: MRT4577_12159C.1.pep
FVWFMGYASSSTMPYQRYPNAQELYAIRHHAHTVCLTHGPNTHNHLVLTQPIAVPYLRHLEPTPHVVPSTGSGIELRTSSTDRVELH

SEQ ID NO: 208342 - protein, 77 aa, Zea mays
  Clone ID: MRT4577_1215C.1.pep
YAPKKEKASFYPFHPFFTYPSPLGDSLATSGTSFMLSPTEPFPSSFSSAETDNRVSVTLEGNVNAILPTTWVSRDLS

SEQ ID NO: 208343 - protein, 67 aa, Zea mays
  unsure (1)..(67): unsure at all Xaa locations
  Clone ID: MRT4577_121600C.1.pep
PGTHAVXKKKKKKKEKKKKKKKKKKKKKNEKKKKKKIKKKXKKKKMEKKKKKKKNEKNRGGPLFRSP

SEQ ID NO: 208344 - protein, 184 aa, Zea mays
  Clone ID: MRT4577_121601C.1.pep
SGKKYIRFYRAVIAGDSYPHTATMLSSTSQVDLDNIDLKEFPTVESLEFIDCILVEGDLLYIPTKWWHYVRSLPTSFSVSFWWHYKVVDYWLDRGKSGFDVYKCRLLRIEGQEPMGTVNYRVADSSLRCVKLVVSLQHLPSTGSSFGDCAVSLRRWLKLPSATLLEALTSLDSEVHSVLLSGSA

SEQ ID NO: 208345 - protein, 129 aa, Zea mays
  unsure (1)..(129): unsure at all Xaa locations
  Clone ID: MRT4577_121602C.1.pep
PAGIVCVPLPPCVSLSPSIAQKLQPVARDLAQTRRLTRRRPHAVGDDWTRCSPPAPNTTPASPSIQAAAGVLDATLPARRWLIPLLLPLVAGDGXXARVRHPSACAIHARNNTGGGGHDASSNTQPGPR

SEQ ID NO: 208346 - protein, 67 aa, Zea mays
  Clone ID: MRT4577_121603C.1.pep
TSRSGMHEKGQTALHNKMQQLLIYILLHSSMSLHALSNRSSVVLARLPPELLSAGASRPFPLGNPSI

SEQ ID NO: 208347 - protein, 61 aa, Zea mays
  Clone ID: MRT4577_121604C.1.pep
LVAKLLRPSLNMSRFTPFSTKTLVTPIFDTVSIFLFSSRHGHSLLYSAICSAPLPNRAHAC

SEQ ID NO: 208348 - protein, 46 aa, Zea mays
  Clone ID: MRT4577_121605C.1.pep
QKKLTFQNKTNTGTKLLYTFILSIGGKVNKEVHKAKKTFWGQKGSF

SEQ ID NO: 208349 - protein, 95 aa, Zea mays
  Clone ID: MRT4577_121606C.1.pep
HTHDQISLKSTRRHLRFRMQIFVKTLTGKTITLDVESSDTIVHVKAKIQDDVGVLPGHQRMIFAGEQLEDWRTLAGYNVREEINIHLVLRVGGRL

SEQ ID NO: 208350 - protein, 43 aa, Zea mays
  Clone ID: MRT4577_121607C.1.pep
TLGLSNDTNRLLLYLQAMRGLQPILICIILPVYLVHAPCHPSG

SEQ ID NO: 208351 - protein, 92 aa, Zea mays
  Clone ID: MRT4577_121608C.1.pep
KNNPPAFKFWQSIAKGRRGNPKNQKWLKNPGTSLTKPLTRKIPRQPKNEGRATYNPTGKGPLIRIPRGNLQNPGSLGRDPPRGKSQTTGGRS

SEQ ID NO: 208352 - protein, 117 aa, Zea mays
  Clone ID: MRT4577_121609C.1.pep
RARQLSMTDDDEMIVVGHVGIFVVAAVVVSDVVGRGGGRVDIDARALLLMVHWIVHWTDAARVVVTGAGHALGIGAARRHHHCRRMRGGLPRGIGRPQLEQRVRMHPCAGATTPRVL

SEQ ID NO: 208353 - protein, 53 aa, Zea mays
  Clone ID: MRT4577_12160C.1.pep
SNSSKAPSRVHYSVAAFVLSPKLHLLGYIGFAFSVYCEAHCTRSPPGWPSSSS

SEQ ID NO: 208354 - protein, 77 aa, Zea mays
  Clone ID: MRT4577_121610C.1.pep
HTHGQNFQNWGGKKLNRVKKLNLWGEQKRGLNLDLEKKHKNRGGGLFYNKRAYFSCPKSPPGVWGPCLFKGIGPEKF

SEQ ID NO: 208355 - protein, 80 aa, Zea mays
  Clone ID: MRT4577_121611C.1.pep
RLPPRLRGGPKVFYFWERGWKPRSRGGAEKKKKKSCFFCQRWGNFFPPKKSTGGGGGIRGGGFPEKNINPPPGEGLIFGE

SEQ ID NO: 208356 - protein, 45 aa, Zea mays
  Clone ID: MRT4577_121612C.1.pep
HSACNVVKPTSAFKCSMVITLCSLYSHSLPKSVLKLYCCSFCQYV

SEQ ID NO: 208357 - protein, 147 aa, Zea mays
  Clone ID: MRT4577_121613C.1.pep
DEWVCLGYFIFRNQLFNVYAPKYDTGGKFWPVVHNTTIFSLVVLHIIAIGVFGIKKLPLASSLLLPLPPLTLLFNEFCRNRFLPIFEAYSTESLLKKDREEQSKPDMAEFFSNLVTAYCDPALKPFQRTSNSDERTEPLLASLSSSR

SEQ ID NO: 208358 - protein, 221 aa, Zea mays
  Clone ID: MRT4577_121614C.1.pep
MEASLAAAAVGLFPPPRIRIRITKSSPLPRPRCLQSGPSKIWTSGSRACLVAASASTPPAPGGGLYSAATYELTPENVDRVLDDVRPYLISDGGNVTVVAVEDGVISLKLEGACGSCPSSTTTMNMGIERVLKEKFGDAFKEIRQVFDGDQPAAETTAEAVNRHLDILRPAIANYGGSVDVLAVDGEDCLVRYDGPESIGSGIKAAIKEKFPDITSVVFTL

SEQ ID NO: 208359 - protein, 81 aa, Zea mays
  Clone ID: MRT4577_121615C.1.pep
KGPNAFLIGLSCRPFVGEVILAIIQLEPPPVSMLNCPEGSLFGGPPLGFFWIYHFPFPKINLKGRSRTRGFGFGKKTPKKF

SEQ ID NO: 208360 - protein, 55 aa, Zea mays
  Clone ID: MRT4577_121616C.1.pep
VDFHAGGDLAYKESSLMILVGYGLSTHLLCYFAKGNRPCYLCLISPLVASYPSPP

SEQ ID NO: 208361 - protein, 67 aa, Zea mays
  Clone ID: MRT4577_121617C.1.pep
AGSMGKKGAVELMASCPRKKSLTRSVKAELKFRFCLIGRYLNYGRFAQCVGTGTPVYFAVVLEYLCV

SEQ ID NO: 208362 - protein, 103 aa, Zea mays
  unsure (1)..(103): unsure at all Xaa locations
  Clone ID: MRT4577_121618C.1.pep
NNQHIKFNTATIQQWRREILSIRMXLSLSSFVSNSTIFPQYSQTPIAALLPPYLPSITSSLXKTQPFQPYMLQQSISTSNLPLSPLFFQQSPSLSLVQSFVQT

SEQ ID NO: 208363 - protein, 65 aa, Zea mays
  Clone ID: MRT4577_121619C.1.pep
KFPPAHGQCWIKAVGLYLFERLANFLCTWWLYKLEMVRIICEWLTMQQSVYSLFHHSILPPGLST

SEQ ID NO: 208364 - protein, 41 aa, Zea mays
  Clone ID: MRT4577_12161C.1.pep
SLEVASNNLLVNCILIHFFNLTRVPHHEYDKSMLLLLRMLD

SEQ ID NO: 208365 - protein, 81 aa, Zea mays
  Clone ID: MRT4577_121620C.1.pep
KERAGRPIRTKQHKNTNFLPPIAHQQRRGLNIFGCSAIFPTATLNPQCSQTAINLLLLPYFSPTLHQRYSKPSLNPTSGTL

SEQ ID NO: 208366 - protein, 66 aa, Zea mays
  Clone ID: MRT4577_121621C.1.pep
EFAAASTFDIILWKGVDDLYIPIGLSLVLEFKLGGVKMENVYKATVGAIAQNGYYVAYDGWENREE

SEQ ID NO: 208367 - protein, 94 aa, Zea mays
  unsure (1)..(94): unsure at all Xaa locations
  Clone ID: MRT4577_121622C.1.pep
RVRPRVRPLFPLFVVLVPPSGAHNTEVLAHAPTGFFITHWGXNSVLESSLYGAPMVAWPFYAEQRQNAVLLFDNVWTPFLVLKSAKLREIMDYT

SEQ ID NO: 208368 - protein, 54 aa, Zea mays
  unsure (1)..(54): unsure at all Xaa locations
  Clone ID: MRT4577_121623C.1.pep
SPPRSTPPXSPPPPGAPPAXPMAPPPRPRPAPSPPAPAPPPPRPRGARPPRSPP

SEQ ID NO: 208369 - protein, 66 aa, Zea mays
  Clone ID: MRT4577_121624C.1.pep
DTHSPRSHSKTDNEEKIRAALHEDYPNKRCYPHKEHTYHQHGHPTFESNLPLCSQNINCRHLYINM

SEQ ID NO: 208370 - protein, 81 aa, Zea mays
  unsure (1)..(81): unsure at all Xaa locations
  Clone ID: MRT4577_121625C.1.pep
APDDSYDSYLYAFNHNPSHYNSAPLAFQPIAITTCMNQQFISYYAELLIYSSLXFSQTILSHDRLNSFYFSYRPVNNPTLN

SEQ ID NO: 208371 - protein, 528 aa, Zea mays
  Clone ID: MRT4577_121626C.1.pep
EGRERKKEKEDQLEYLEERRLKDLVKKHSEFISYPISLWTEKTTEKEISDDEDEEEKKDAEEGKVEDVDEEKEEKEKKKKKIKEVSHEWSLINKQKPIWMRKPEEITKEEYAAFYKSLTNDWEEHLAVKHFSVEGQLEFKAVLFVPKRAPFDLFDTRKKQNNIKLYVRRVFIMDNCEELIPEWLSFVKGIVDSEDLPLNISRETLQQNKILKVIRKNLVKKCVELFFEIAENKEDYNKFYEAFSKNLKLGIHEDSQNRGRIAELLRYHSTKSGDELTSLKDYVTRMKEGQNDIYYITGESKKAVENSPFLEKLKKRGYEVLYMVDAIDEYAVGQLKEFEGKKLVSATKEGLKLDETEDEKKRKEELKEKFEGLCKIIKEVLGDKVEKVVVSDRVVDSPCCLVTGEYGWTANMERIMKAQALRDSSMSGYMSSKKTMEINPENPIMDELRKRAEADKNDKSVKDLVMLLFETALLTSGFSLDDPNTFGTRIHRMLKLGLSIDEDESAEAEAEMPPLEDDAGESKMEEVD

SEQ ID NO: 208372 - protein, 197 aa, Zea mays
  Clone ID: MRT4577_121627C.1.pep
SRYRGQYRQGLRHGHGVYRFYSGDCYAGEWAGGQSHGIGAQTCSDGSSYVGEFKCGVKHGIGSYHFRNGDRYAGEYFGDKIHGFGVYRFANGHCYEGSWHEGKKQGFGMYTFRNGDRRSGDWDSGTLKTPLPPADPSVQRAVQAAQRAAENAFRLPRVDEQVHKAVIAANRAATAARVAAIKAVQNRMDGKFCDTCV

SEQ ID NO: 208373 - protein, 56 aa, Zea mays
  Clone ID: MRT4577_121628C.1.pep
FLLKNPARKIKVGATRNVVRGRKKGIHKFVIYKRAAPFECLCILDLPPLFGAPVVF

SEQ ID NO: 208374 - protein, 80 aa, Zea mays
  unsure (1)..(80): unsure at all Xaa locations
  Clone ID: MRT4577_121629C.1.pep
LCWXNTVCYVLCIKNFPDHRRFPNRLATSYVXSSXELYTTMVDTIPMSARTRYSTTKEYLLINDGNAMTLELEKGPALQL

SEQ ID NO: 208375 - protein, 104 aa, Zea mays
  Clone ID: MRT4577_12162C.1.pep
VPQGGFYPRGTKGPGPLGGGPPARPKWGVKTPKRGGFKKKMPPLFKFGATPKSFGFSTGTRFKMQPGGWAQIKPRSPLGGKGRFLNTIGETVQTQGGWAPFFSP

SEQ ID NO: 208376 - protein, 112 aa, Zea mays
  Clone ID: MRT4577_121630C.1.pep
MGRCRCLSYRSRGELLSYLVLRACGDTAATENVKINVERTAPESVLSELDVQQLTEIPCENSKFQRTYYSYETCYLLNVKDYVYDRRARQGARRARRGIPCRLPHRHEPLLG

SEQ ID NO: 208377 - protein, 79 aa, Zea mays
  unsure (1)..(79): unsure at all Xaa locations
  Clone ID: MRT4577_121631C.1.pep
RDLNDILMGAARDQLSRVLESALLMSLIHSLAVFQXXLLGGGGFFFFFSXLPLXLSFPFFPFFFLFFFFLLLFFFFSFF

SEQ ID NO: 208378 - protein, 78 aa, Zea mays
  Clone ID: MRT4577_121632C.1.pep
AMSSFKTFQTKNQSPIFLTDDYTSPVKMALAHVQTSSVQTQQQKAKKKKKKKIMQDKLSLSLSPTSILSIAPSTRSHI

SEQ ID NO: 208379 - protein, 219 aa, Zea mays
  unsure (1)..(219): unsure at all Xaa locations
  Clone ID: MRT4577_121633C.1.pep
PGGPLGLFGAAPGGGSPNVPPRGPSARPLGEFPFPPGERGFIAPFFRWARTFVYPVVRGPQNGQIFSQGFAGVIFFFGGKPTPVALPAIPVFGGKGALKGAPPGCFFRKAKFFXIGPGPFWVKKNLIGRGVFKKGWNFFFSTPISKPFFFWGGGGGFFFFSNPPRGSKLFFNPPPPPKKVPLFFLLPGGLKKKKKKKKKKKKKKKKKKKKKKKKKKKKK

SEQ ID NO: 208380 - protein, 110 aa, Zea mays
  Clone ID: MRT4577_121634C.1.pep
PYVIFALNFTRASMVLETNQPARTQQHTRVKKLTISQVVTSEHNSMPMGHGSVYITKGSAGALPDTVKGTDRNMCRSQQIGLSRPRAKGFIEPFWPTTSTLLTGLSDLLL

SEQ ID NO: 208381 - protein, 109 aa, Zea mays
  Clone ID: MRT4577_121635C.1.pep
NSPLTSGNNAEHAGSFPGSNIRYVLSLSKRSVYELNLASFKLQILAGPYTPPMSAELRQVANDFAYRVKKYSRYDVNGYRFRTTNYDQRRPKKKKKKKKKKPSALLPLL

SEQ ID NO: 208382 - protein, 37 aa, Zea mays
  Clone ID: MRT4577_121636C.1.pep
KDHFFLRINLQQILTGLTPSIDPHSILVDPLLYSTLG

SEQ ID NO: 208383 - protein, 57 aa, Zea mays
  Clone ID: MRT4577_121637C.1.pep
MADEKKHHHLFHRHKDGSEDEASPGREVDYDKKEKHHKHLGQLGGLGAIAAGAYAIH

SEQ ID NO: 208384 - protein, 65 aa, Zea mays
  Clone ID: MRT4577_121638C.1.pep
NLNRRYPWELLGCHHKINEMSKKLYCLCHNNMLILSTVQNQNDSESNDYGNLLITWGSGDLLCNM

SEQ ID NO: 208385 - protein, 142 aa, Zea mays
  unsure (1)..(142): unsure at all Xaa locations
  Clone ID: MRT4577_121639C.1.pep
MEEDHSVILISEGAIKSIKLSLSTGEEICFTPXNECPVTHPSQLGNPFLGLPLEAGKCESCGASENDKCEGHFGYIELPVPIYHPCHVTELRQLLSLICLKCLRIKKGKVKQSNGKGNAAPTLCSYCRDIPALSLKEIKTTD

SEQ ID NO: 208386 - protein, 198 aa, Zea mays
  Clone ID: MRT4577_12163C.1.pep
LLPCSHNLCQACARNILVQTPESESPQSRRASGSGVSDYDYLDLDKMSLYSEADSGYGSYGGFASAPTTPCQKSPNGVRVFPPAMPPPATHLSPALAPVPRNSCITCPQCHRSLILDDRGLRGFPKNRVLEGVIDRYQQSKAAALKCQLCEKAPKEATVMCEQCDVFYCDPCRLRCHPPRGPLAKHRLVPPAQGRVSR

SEQ ID NO: 208387 - protein, 37 aa, Zea mays
  Clone ID: MRT4577_121640C.1.pep
LYDITRLKNGGTSRETILKILNAYQDSSDKIFHIRNR

SEQ ID NO: 208388 - protein, 587 aa, Zea mays
  Clone ID: MRT4577_121641C.1.pep
FGSREELRRLLELLPRELSGRVETHPELPALVEVVMDLGRPPLARFPSGDFLLSQRPISFDDLRHATSQVGDFGADNRAGISRTLHRISAIRNRKGVIVGLTCRVGRAVPGSANLLQDLVKDGGSLLLIGPPGVGKTTVIREIARMLADDYKKRVMIVDTSNEIGGDGDIPHPGIGNARRLQVPNQDMQHKVLIEAVENHMPQAIVIDEIGTKLEAMAASTIAQRGIQLVATAHGVTIENLIMNPSLEMLVGGIQSVTLGDEEANRRGVQKTVLERKGPSTFTCAAEIVSKKELRVHRSLEATVDALLAGKLPNFEIRKLDSKGSMQEVSVQKEQSHLGIYDATEFGSDSLRNARRSLDSAFSLDSAEGHIVRSDGADSSFNLYAYGISESTALQAIHQLELDGSVTLTYNISEADAVIALHSKLKKNSQIQAVLKSQDIPVFLVKTNSLPQITRALRALVDDHMDEVIDYNDKEEARSSEETDALEEARLAIEQVVIPKGESVQLLPRPSSIISSQVGLVESFSLKWEVVGQEPKACVRILPHFAPKQVEAVARETPAEPADSDWESHDDSDHTQSGITRLPFLPD

SEQ ID NO: 208389 - protein, 393 aa, Zea mays
  unsure (1)..(393): unsure at all Xaa locations
  Clone ID: MRT4577_121642C.1.pep
DIPHPGIGNARRLQVPNQDMQHKVLIEAVENHMPQAIVIDEIGTKLEAMAASTIAQRGIQLVATAHGVTIENLIMNPSLEMLVGGIQSVTLGDEEANRRGVQKTVLERKGPSTFTCAAEIVSKKELRVHRSLEATVDALLAXSLRNARRSLDSAFSLDSAEGHIVRSDGADSSFNLYAXELSLYVTYWIGCSRSXESTALQAIHQLELDDSVTSTYNISEADAVIALHSKLKKNYQIQAVLKSQDIPVFLVKTNSLPQITRALRALVDDHMDEVIDYNDKEEARSSEETDALEEARLAIEQVVIPKGESVQLLPRPSSIISSQVGLVESFSLKWEVVGQEPKACVRILPHFAPKQVEAVARETPAEPADSDWESHDDSDHTQSGITRLPFLPD

SEQ ID NO: 208390 - protein, 196 aa, Zea mays
  Clone ID: MRT4577_121643C.1.pep
MASASVSLSSLASSAAAAAAISSSPGCPPSKPFHDPKPLHLSVRLFPRFAKPQPLSCSGPHAPHAATGDGSGAGNRGDDSGGNGGKDGGGNDGDGGDDDYEEAEFGPLLGFSEVARLAAARGVKLPADMIEAARDAGIREVILLRYFDLQAAPWPLAAMIRAFSVLRNRMLADPSFLFKVGIEVVIDSCCATLAEV

SEQ ID NO: 208391 - protein, 402 aa, Zea mays
  unsure (1)..(402): unsure at all Xaa locations
  Clone ID: MRT4577_121644C.1.pep
PRGRPPLARFPSGDFVLSQRPISFDDLRHATSQVGDFGADNRAGISRTLHRISAIRNRKGVIVGLTCRVGRAVPGSANLLQDLVKDGGSLLLIGPPGVGKTTVIREIARMLADDYKKRVMIVDTSNEIGGDGDIPHPGIGNARRLQVPNQDMQHKXFTVLPVHGISCLVLYVEYEXLLGYTLAFFLAVLSXVLIEAVENHMPQAIVIDEIGTKLEAMAASTIAQRGIQLVAXAHRVTIENLIMNPSLEMLVGGIQSVTLGDEEANRRGXSKTVLERKGPSTFTCAAEIVSKKELRVHRSLEATVDALLAGKLPNFEIRKLDSKGSMQEVSVQKEQSHLGIYDATEFGSDSLRNARRSLDSAFSLDSAEGHIVRSDGADSSFNLYAYGVRMSSIAHSFDALVF

SEQ ID NO: 208392 - protein, 55 aa, Zea mays
  Clone ID: MRT4577_121645C.1.pep
NVKGCRINIMEREALARTLSYGSFTNPGKTYGGLTKKTPLTFLNFPCANYWCLQV

SEQ ID NO: 208393 - protein, 205 aa, Zea mays
  unsure (1)..(205): unsure at all Xaa locations
  Clone ID: MRT4577_121646C.1.pep
VFTAAFFLFISHARPLQTLSAERPHPNIXLSAERPQPNIFCAYVLLSILGQFAMHIFFLITAVNEASKHMPEECIEPDSDFHPNLVNTVSYMVNMMIQVATFAVNYMGHPFNQSISENKPFKYALYGAVAFFTVITSDMFRGLNDYMKLEPLPEGMRGKLMLWAILMFCGCYGWERLLRWVFPGKIPAWEKRQKQAVASLEKKHH

SEQ ID NO: 208394 - protein, 86 aa, Zea mays
  Clone ID: MRT4577_121647C.1.pep
RLHRYRHGVCLNDKLQIALVQISHHADLADAQAPHGCSYSTGRKSQVSAQRIPVRGWPSCIAMMCRGSHGGGHPPVRRRAVTVVGV

SEQ ID NO: 208395 - protein, 60 aa, Zea mays
  Clone ID: MRT4577_121648C.1.pep
PPPCVLSTCAPLLPTVCSLSLSPHSSCHPKNPPSQPPFSASLDLMEALLRLFLSFAWVGP

SEQ ID NO: 208396 - protein, 104 aa, Zea mays
  unsure (1)..(104): unsure at all Xaa locations
  Clone ID: MRT4577_121649C.1.pep
MWIYTLSHPDAAAAGAGSGKYLLPGGPAGQNGHYXKVRVPVHAAVSAVNEGVHAEDRVLQVTQVSRELRLQWGDKGKGKLVHAVFPRSNIQMRWLGGANDRHTI

SEQ ID NO: 208397 - protein, 177 aa, Zea mays
  Clone ID: MRT4577_12164C.1.pep
TSEKEPEPEPVKKVVPRVEQIDLLGMDEPIPDTSELDQNNALALAIVEPDNAPKAAASSENVATSWELALVTAPSASENVATSRNLAGGLDLLTLDSLYDDAHRHTQQNASYNPWEQPTPASSAPMAPMMQQQYQQQPMHNPLYASAQQQQAFMLQQQQAFVLQQQHQYQQQHQPMM

SEQ ID NO: 208398 - protein, 55 aa, Zea mays
  Clone ID: MRT4577_121650C.1.pep
GQLQTSASPPPTPRESVPRCRADLATATLCSKTRWRAKNAFLLALARMGLTSRFG

SEQ ID NO: 208399 - protein, 82 aa, Zea mays
  unsure (1)..(82): unsure at all Xaa locations
  Clone ID: MRT4577_121651C.1.pep
MEWMGTXRGWREVGPYPPGLKAGTARAVCVGGGEKVVVTGALDGEGGRHALWVFDVKTKSWTVVRPPPEFAGFVFSVASVRI

SEQ ID NO: 208400 - protein, 102 aa, Zea mays
  Clone ID: MRT4577_121652C.1.pep
NLRRTLSRDNLDLSSPSSRENFIIKHFKGNGDAFRGLRLKKKLRDFNKYAKVRPLKCGWIVYYNDPTSSPIGRAKATRLVPPPSRSPASPSPERPAERLTWA

SEQ ID NO: 208401 - protein, 89 aa, Zea mays
  Clone ID: MRT4577_121653C.1.pep
LDRGPPAAGVGRIRLLRRVRPDLRISIFFDPPAAACSTSTYVHCFRRCWIRGRLAPSKIYVCNGWICASADLLVRLAFDSSKDGNRRQQ

SEQ ID NO: 208402 - protein, 54 aa, Zea mays
  Clone ID: MRT4577_121654C.1.pep
ARGCGDKVVSSGALAAAAGRYALWVFDVKTKSWTVVRPPPEFAGFVFSVASVRI

SEQ ID NO: 208403 - protein, 93 aa, Zea mays
  Clone ID: MRT4577_121655C.1.pep
SSTSSIIFVTNSIEGNRSLSKELRTAPLTLQPYCTVSPWTWRRLRSNPSNSIRTTAWAARSLLLLASATESSRDSIQTEWSESVEAVEVKWFR

SEQ ID NO: 208404 - protein, 107 aa, Zea mays
  Clone ID: MRT4577_121656C.1.pep
TRRPRVFFFFFCMYVCTVVFITSKQLASDSKSMAVGQEQQTTVCVLHLGTKTPHSSKFTLTTRSKFTLTTFFSDFTTAHGSRSSMYLSLLARRTSKSADAQIHPLQT

SEQ ID NO: 208405 - protein, 65 aa, Zea mays
  Clone ID: MRT4577_121657C.1.pep
SRPYQAFGRHNFRPFLGNKTEPNLSFARNATDVEPKKGVLNQPPAPIEVYDFIEPVHYLPPPKGD

SEQ ID NO: 208406 - protein, 156 aa, Zea mays
  Clone ID: MRT4577_121658C.1.pep
RQCVIVSPDAGGAKRVTSIADRLNVDFALIHKERKKANEVASMVLVGDVKDRTAILVDDMADTCGTIVHAVTKLKESGASKVYAILTHGIFSGPAIPRVNSACFEALVVTNTIPQESNMLQCPKIQCIDVSMILAEAIRRTHNGESVSYLFSHVPM

SEQ ID NO: 208407 - protein, 55 aa, Zea mays
  Clone ID: MRT4577_121659C.1.pep
IIIAHCIGGHRSWKPYGEKICSFLWPCTNDPYRCALYLCRHLYFIQGPACKFKVE

SEQ ID NO: 208408 - protein, 157 aa, Zea mays
  Clone ID: MRT4577_12165C.1.pep
RWHVCWVLVCFYQKFVSRWIAWSRSVCSIKVDRVTLAVSVAACVGRGTYGLYFGPKSKVTVGLDVVYLGLLNYEQLRVVIRLGYLDALIIALVSAQRASVLACIYICSLSFGCGRSLGDQKVASVGMWVRFWFAFTKSLFQGGSPGQGPCALLRWIA

SEQ ID NO: 208409 - protein, 76 aa, Zea mays
  Clone ID: MRT4577_121660C.1.pep
QKTGPVAKGWVNLNTPGVLGKYWATQPQGQVGPPKPGNLPPCFFPPPAFKPPIKVRGQFEAPVNKRRFPHWVFQQN

SEQ ID NO: 208410 - protein, 81 aa, Zea mays
  Clone ID: MRT4577_121661C.1.pep
GCINPVALSAGGKGFKGWLPKNTFKKASSSAGIIPFRVPKINPKTAEVTGVLKSVQPSSTDFGAKVPKDVKTQGVWYPQLQ

SEQ ID NO: 208411 - protein, 78 aa, Zea mays
  Clone ID: MRT4577_121662C.1.pep
FVAPTVKQENDLMLGEEDLLISGIICVATSFLTITGALLMSNSQSLFSFQFAHLVLIHGTINTNTKVGWFVRIHVAIS

SEQ ID NO: 208412 - protein, 114 aa, Zea mays
  unsure (1)..(114): unsure at all Xaa locations
  Clone ID: MRT4577_121663C.1.pep
PRLLKFYSFQPPEKHQDLVRCVFQLLSARPESVSNFXQVFVETLDMCFKNVCELDIVFNFNKLHTILDEMISGGQVIETSSEQIMKSGEEIERLEKQSSTTSFIPKSITERFTP

SEQ ID NO: 208413 - protein, 85 aa, Zea mays
  unsure (1)..(85): unsure at all Xaa locations
  Clone ID: MRT4577_121664C.1.pep
QLQPYLINVXFREHTRELRILLMLLFKNHVTDHERLDYQINWKGVSGKQRLFFLMVKKSTVFRGNIRCINQQELELHHNMDQSEA

SEQ ID NO: 208414 - protein, 178 aa, Zea mays
  unsure (1)..(178): unsure at all Xaa locations
  Clone ID: MRT4577_121665C.1.pep
MIQAVMVISTQAKPRLLKFYSFQPPEKHQDLVRCVFQLLSARPESASNFVKVDSIFGPGTKMVYKHLATLYFVFVFDSSENELAMLDLVQVFVETLDRCFKNVCELDIVFNFNKLHTILDEMISGGQVIETSSEQIMKSVEEIXKAGETIEHNQLHTQVDYRAFYPLSFHSFPEQCDI

SEQ ID NO: 208415 - protein, 40 aa, Zea mays
  Clone ID: MRT4577_121666C.1.pep
SEVLSYYPSPFSTRVLLCVLAGQTRSEKLQGQHAAGSRSY

SEQ ID NO: 208416 - protein, 137 aa, Zea mays
  unsure (1)..(137): unsure at all Xaa locations
  Clone ID: MRT4577_121667C.1.pep
PPFPSPPGVPKGAKLPPKRGAPGSVPSKGPKGNRFPTKKQLPPQSSPRICPPQKALDPPPIGFQKGWMLEPFPTKNGGRKIFNHRKRLAPPSNFRKKRSLGLGITHPRKKTPQGECGREQTQELEKKMVFVAIIFXR

SEQ ID NO: 208417 - protein, 88 aa, Zea mays
  unsure (1)..(88): unsure at all Xaa locations
  Clone ID: MRT4577_121668C.1.pep
MHHELCILLICSISPMSTPHPTGSVYKSFVQSSVLIARCGHHTIIVHGTFNNTVLISLHTVIXLHLLTAGTLTSSWHVKFYWNHAYYS

SEQ ID NO: 208418 - protein, 123 aa, Zea mays
  Clone ID: MRT4577_121669C.1.pep
RLHKRRVGFCVHQAAQKTSFILCAPLRHYVVSAILIKKAWEGVHPQKKSQRKRGSQEQPGLGSIPKPRDLFLQLGPTGKGLLKKKFHRALKKRRVQVSFWNPSWGNWPGEGQPKWPQINPNSF

SEQ ID NO: 208419 - protein, 161 aa, Zea mays
  unsure (1)..(161): unsure at all Xaa locations
  Clone ID: MRT4577_12166C.1.pep
RXRTTPTRITPSTSHNTRTHQRPRTKNRLHRNMMRLTRLHTKIRPHHNNLTISTRLPRRKRIRRNRHLQLNKPMQRTLMIIPTTPRTSPRPILTPTHRNNLSIHNLNKNSGMRQLRHLIQRRLSIPSNKLPSKTMHAQTLTIRRPQKGTLKHINQPKGSKP

SEQ ID NO: 208420 - protein, 58 aa, Zea mays
  Clone ID: MRT4577_121670C.1.pep
NPRKVRSLLPWDYGSAARTVNRSERLLWRLLVATARSWMALRYGAGGTRERSCCACAF

SEQ ID NO: 208421 - protein, 99 aa, Zea mays
  unsure (1)..(99): unsure at all Xaa locations
  Clone ID: MRT4577_121671C.1.pep
TLHLVLGLRRGMQIPVKTLTGMTITLEVEPSDTIENVKAKIQDKEGIPPDQQRLIFAGKQLEDGRTLSDYNIQKESTLHLVLRLRGGMQIFVKTXTGKT

SEQ ID NO: 208422 - protein, 131 aa, Zea mays
  unsure (1)..(131): unsure at all Xaa locations
  Clone ID: MRT4577_121672C.1.pep
HSLNVYMAKLPERAYRHEEMVYFMENVTKTDDSHELTVEEHYLLSAAYKNVIAVRSALXHMISFIEQHDQGQGAEDXVTLLRXIPGSTETELTKICDGEMKLVXCELVPSYIVPEIKALYLKMKGDYYRYT

SEQ ID NO: 208423 - protein, 212 aa, Zea mays
  Clone ID: MRT4577_121673C.1.pep
KSDRSAETWNDMPHHSIVSTQVNQQPEVRDEYVLPMKRDHLYLEREPLVEHNIHRSGVSLYGRDPALSALRPSGMHGAGPLLTQITQTMQIPLTYAEDIIGVKGANIAYIRANSGAVVTIQESLGSPDDITVEIKGTSSQVQSAQQLIQDSLATHREPVRSSYPGGLDPLYRSSYPYGSSAYPSSSLPSYSNMDGSGYSSSGLGGYGSTYRY

SEQ ID NO: 208424 - protein, 71 aa, Zea mays
  Clone ID: MRT4577_121674C.1.pep
ARNSARGQAEDLWFAQGPLCLTVGSVHMTWAALRLAINYWNIAKKSKNGIILPNLGLPCGFCLSHTNCVRH

SEQ ID NO: 208425 - protein, 101 aa, Zea mays
  unsure (1)..(101): unsure at all Xaa locations
  Clone ID: MRT4577_121675C.1.pep
EYPWPRIPSPCKTLRNRGSRRRSKSSKLARRSKRVFARPSVFSLRSPSTPTGQMXLWCACSKAFPLASATGTWPCASAFPISLAGITLVLGIWLWVLHCFV

SEQ ID NO: 208426 - protein, 46 aa, Zea mays
  Clone ID: MRT4577_121676C.1.pep
SFTKSSLRTPLRETEIKQIKARPLTHQVVQWGTRDCITQSHLRQVF

SEQ ID NO: 208427 - protein, 33 aa, Zea mays
  Clone ID: MRT4577_121677C.1.pep
PPPMPPPPPNPPPPPKPAPPPAPPPNPPPTPPP

SEQ ID NO: 208428 - protein, 81 aa, Zea mays
  Clone ID: MRT4577_121678C.1.pep
PRVRPRVRPRVRPRVRRDPAPLHRAARILINLQSENGEFPQQEIIGVFNQNCMIGYSQYRNIFPIWALGEYRTKVHVPRKK

SEQ ID NO: 208429 - protein, 62 aa, Zea mays
  Clone ID: MRT4577_121679C.1.pep
RRASEQRRAALIHEVLEVSTRVKGEGRSSGFYQYQHLSPKAFRGGWASRILTRPAQCGLSTG

SEQ ID NO: 208430 - protein, 92 aa, Zea mays
  unsure (1)..(92): unsure at all Xaa locations
  Clone ID: MRT4577_12167C.1.pep
VRGCSXXPWFLXFXAXLXXXXXCXCXFAXXPVXXVXLVXAXXCLXXXXXXVGVLWPXAXXGXGXLLXXXXPFPXXFLPXXFRVVLDCAVQFP

SEQ ID NO: 208431 - protein, 68 aa, Zea mays
  Clone ID: MRT4577_121680C.1.pep
VEQVLSTDGHRGTRVEYMSGSNKHVVSRYIILHVHGAPSEFRVNPETVLSGPNWVDERIGGRVDGRVG

SEQ ID NO: 208432 - protein, 90 aa, Zea mays
  unsure (1)..(90): unsure at all Xaa locations
  Clone ID: MRT4577_121681C.1.pep
RTLGRRGAQRRDKPGPPPPPPPPPNNTXREXXXXHXGQAXXQXGNAXREGGGXEHGIQXXGQXPXDKTXGGXXXAPNTPPRETGXGKHEP

SEQ ID NO: 208433 - protein, 57 aa, Zea mays
  Clone ID: MRT4577_121682C.1.pep
SADKPPDRLPPLLSCACVVAVCLVAAPVMVMVEMDCGVGGGGGGGLYDALKIISHIL

SEQ ID NO: 208434 - protein, 81 aa, Zea mays
  Clone ID: MRT4577_121683C.1.pep
PSICRPGKKKKKKKKKKKFHQVKATGIIQISLTGVWTCTCLFHLHLGAQPPSFLHLHWHCKCFISGFGALHHLTLDYNDYE

SEQ ID NO: 208435 - protein, 107 aa, Zea mays
  unsure (1)..(107): unsure at all Xaa locations
  Clone ID: MRT4577_121684C.1.pep
XXXFFFFFARNHTVLLLFYSLTPFSEIPPVSKQLLNITSFKTTFFSTTTVGLTPFGGKFSFKFTKSLSAFFFFLGIGDLFGNFFFQSPNIFLFWGSPPLSFFFFFFF

SEQ ID NO: 208436 - protein, 237 aa, Zea mays
  unsure (1)..(237): unsure at all Xaa locations
  Clone ID: MRT4577_121685C.1.pep
MGSAILNSIAPEEPKVVVPEYGETADIQDKEVSMEQLCSISTYDQWTPLSVSGQLPKPRYKHGAVVIQQKMYVFGGNHNGRYLGDIQVLDFKTLSWSKLEAKSQAEPSESAGAVPFSACAGHSVIQWGNKILCLAGHTREPAESLSVKEFDPQTCTWSTLRTYGRSPSSRGGQSVTLVGDTLVVFGGEGHGRSLLNDLHILDLETMTXDEFETTGTPPSPRSEHAAACFAERYLLIF

SEQ ID NO: 208437 - protein, 526 aa, Zea mays
  Clone ID: MRT4577_121686C.1.pep
MGSAILNSIAPEEPKVVVPEYGETADIQDKEVSMEQLCSISTYDQWTPLSVSGQLPKPRYKHGAVVIQQKMYVFGGNHNGRYLGDIQVLDFKTLSWSKLEAKSQAEPSESAGAVPFSACAGHSVIQWGNKILCLAGHTREPAESLSVKEFDPQTCTWSTLRTYGRSPSSRGGQSVTLVGDTLVVFGGEGHGRSLLNDLHILDLETMTWDEFETTGTPPSPRSEHAAACFAERYLLIFGGGSHSTCFSDLHLLDTQTMEWSRPKQQGVTPESRAGHAGVTIGEYWFITGGGNSRKGVSDTLVLNLSTYEWSVLTNLEARAPPVSEGSSLVMHTINGENFLVSFGGYSGRYSNQAYALKASLKPSVPSQQINESDTNGFSPLSVAENSSRKVIFEIEELKDEKPGNRADNSKTLGQVVMVEQNEIENRLNQEHLQSLRLKQELTGLENRNAELTEELHLVQDQLSIEQTRASKFENEISDIQQRLQKMDTLEKEIESLRYELDSTVSEEESSSGNELHRSRGFWRWNG

SEQ ID NO: 208438 - protein, 122 aa, Zea mays
  Clone ID: MRT4577_121687C.1.pep
HLIPGDKVPNHAASPQTTPGPRSSSSHTRLNLLWISACITDHQGIPLSPHWGPGGRISTKPSAWIDHRARPLLASRDFQRRASAQGRERKVSATAGTRETRLTTYRSLELCPGDSPGLEEEG

SEQ ID NO: 208439 - protein, 49 aa, Zea mays
  Clone ID: MRT4577_121688C.1.pep
LGPSRVRPGKKKKKKKKKKKKKKKKKKKKKKKKKKKKKKKKKGWWGAPL

SEQ ID NO: 208440 - protein, 76 aa, Zea mays
  Clone ID: MRT4577_121689C.1.pep
SRSTGDSCSTLWEFLAARNYPVVDRGSSWPRLSLLLALTSKPQRIKGFNRWRLLSRSSLKASCALDHFLFTQSCSY

SEQ ID NO: 208441 - protein, 284 aa, Zea mays
  Clone ID: MRT4577_12168C.1.pep
MAAPSPKPPTPRGRCHHPPNATRRLHVATRCFPDPPPPPASMPPIPSPNPVLSLLSAVPDWADAIQERRVRDRRPLYDHATWRHHRSSRRHLRHLLTSLSSRAILSLAPPVSAFTAFAAAIATYNTLLPAYALTASSLPYELTAPALALLLVFRTEASYARFDEGRKAWMRVLASAADLAGMLMRHPPPNNLHTGGAPNPGPGGRQADDEPLRRALVNYVLAFPVALKCHIICDSDVKGDLEGLLGEDDLSVVLASKHRPRCIIEFIAQSLQMLDLDEQKRSIM

SEQ ID NO: 208442 - protein, 74 aa, Zea mays
  unsure (1)..(74): unsure at all Xaa locations
  Clone ID: MRT4577_121690C.1.pep
QHTPLSPASPILRGGESCXPSPTSTACLLDIGTHPLAAHINRLVIQIHTPLPLLLSQNNISASFLYLTLLSRTN

SEQ ID NO: 208443 - protein, 81 aa, Zea mays
  Clone ID: MRT4577_121691C.1.pep
MRIVYMAAVMFLVLATMSSTSPSFCQAGGCIGCPRAPPPPSDETCYEDLKCSASRCHLGCIHRGYKGTGSYCRGRDCCCKH

SEQ ID NO: 208444 - protein, 123 aa, Zea mays
  unsure (1)..(123): unsure at all Xaa locations
  Clone ID: MRT4577_121692C.1.pep
PQPLAVVQLCYNQLTGSIPTQLGNLSRLTVLALQSNRLNGAIPASLGDLPLLARLDLSFNRLFGSIPVRLAQLPSLVALDVRNNSLTGSVPAELAAKLQAGFQYGNNSDLCGAGLPALRXCTP

SEQ ID NO: 208445 - protein, 571 aa, Zea mays
  Clone ID: MRT4577_121693C.1.pep
MAIRESSQMPELLRLPLPPPATTGSPYSVCLSVPASPSGLHLGVCASVRSVAPAPQPQPAEDQQLLQNQARYHSQPTLTIRTEEPPPLQRVRTVSRSDSARDRRFDHFKTFSGRLERQLSNLRGVVPVDIEPAGADSTSNKIISEEETDDDDEVPSADRYFAALEGPELETLRPTEVSALPEDETWPFLLRFPINAFGMCLGVSSQAMLWKTLQSEPSTAFLHVSPAVNHVLWWVSASLMALVSFIYLFKVVFYFEAVRREFHHPIRVNFFFAPWIACLFLVKGLPHPVWTIHHAVWYILMVPIFLLDLKIYGQWMSGGARRLSKVATPTNHLAVVGNFVGALLGAKMGLREVPIFFFAVGVVHYLVLFVTLYQRLPSNAQLPRELHPVFFLFIAAPSVASVGWARLCGDFNYAAKILYFTSLFLYMSLVVRLNLFRGVRFSLAWWAYTFPMTSVAIATAVYASAVTNVITRALAVGLSVVATVTVAGVLVTTMYRAFVCKDLFPNDVSIAVTQRPKAKFGKILAHIRASGDGVKDLVLAVSRHGGSPGSDTNGTSDPSSPVAHGRGEAEP

SEQ ID NO: 208446 - protein, 87 aa, Zea mays
  unsure (1)..(87): unsure at all Xaa locations
  Clone ID: MRT4577_121694C.1.pep
VGLPHTYIHISILCENPALQPYRLQQAIAASNIPLSPLLFQQXSPALSLVQSLVQTIMAQQLQQLVLPVIXNQLGVANLCPYSQQQQ

SEQ ID NO: 208447 - protein, 106 aa, Zea mays
  unsure (1)..(106): unsure at all Xaa locations
  Clone ID: MRT4577_121695C.1.pep
VLGYTGLTYVFTSNGNLSEMVVSLSVGDRLCVSSSIHEACSWVXHSXSIAASVSVEFIMLRCLMRLWDFVVVHPFLFXVRKAYRGAFLFIGQVNDQISRLIGLCCV

SEQ ID NO: 208448 - protein, 172 aa, Zea mays
  unsure (1)..(172): unsure at all Xaa locations
  Clone ID: MRT4577_121696C.1.pep
MADATMYITYSTLMQLAXVIDIGVTSLWDDARIHHAHRPSPSLRRGTSSATATLPYRMIYLNPNAGSPXSYLTGDYRVQYLWHIAGSAADXPRPSASNREXLEVXHWRWXMLPAIFCKNPELLVIHCLXFMQAALFNVVSQMFSHGGLNYLEDPSLKDAYNILTMCALHYLL

SEQ ID NO: 208449 - protein, 35 aa, Zea mays
  Clone ID: MRT4577_121697C.1.pep
SHFLRKRPTHCIWSIPSSHTATKLLINSYYCYKYY

SEQ ID NO: 208450 - protein, 125 aa, Zea mays
  unsure (1)..(125): unsure at all Xaa locations
  Clone ID: MRT4577_121698C.1.pep
MEGKQFLWSLDGCGLQFTVWFVINKFLLLLLSADILYDSWSPAMTVSSVCISILSMLSSSPAKXHLVIILLDLLKPRCPHSIARLXSXMYCLQQRPADNDRYVRNCRNGRSPKETRWXWFHDDTV

SEQ ID NO: 208451 - protein, 51 aa, Zea mays
  Clone ID: MRT4577_12169C.1.pep
SPSVVKTKTSLFRKKKKKKKKKKTKKKKKKKKKKKNKKKKKQKIKKKKKKR

SEQ ID NO: 208452 - protein, 111 aa, Zea mays
  Clone ID: MRT4577_1216C.1.pep
MNKERLMKMAGAVRTGGKGTMRRKKKAVHKTVTTDDKRLQGTLKRVGVNTIPAIEEVNIFKDDLVIQFLNPKVQASIAANTWVVSGSPQTKKLQDVLPGIINQLGMLQSVP

SEQ ID NO: 208453 - protein, 60 aa, Zea mays
  Clone ID: MRT4577_121700C.1.pep
THESAGLRWTPRQPATRKGVPSDNLPWGLANEPRSGDSHVSQAFESLADSLIMYDTILLN

SEQ ID NO: 208454 - protein, 86 aa, Zea mays
  Clone ID: MRT4577_121702C.1.pep
NLKGGNTCKASKDRRKQNIFYNHFLTTDDDHELIHVWTITFADLCIFIYPGDTIQPHRVYGHIPHPPDLIAPLFSMITIKKTDTKG

SEQ ID NO: 208455 - protein, 234 aa, Zea mays
  Clone ID: MRT4577_121703C.1.pep
MGGDLAKPVAAMVVVQVMSAGVNIFYKLAVLDGMDMRVLVAYRYLFASAFLAPLAYFIERKRRTKLTWRVLVISFLCGLTGGSLAQNLYISGMKLTSATFASATTNLIPGVTFVLALIFRYERLAVRASSGQAKVAGTLLGVAGAMLLTFYKGADITPWHTHVNLVASSSAHHAADEAADANRVMGSLLCIASCVFYALWLILQANLSRDYPFHYSSTALMCVMSTLQSVALGA

SEQ ID NO: 208456 - protein, 116 aa, Zea mays
  unsure (1)..(116): unsure at all Xaa locations
  Clone ID: MRT4577_121704C.1.pep
GAGRRRRRHEGRGDGLRGEXLAPRMVVSASSRVQELERFSHYVARQIGFDDVKECPHLCTLAYDYLRKXQGYEETFXAVFQKAMDPEPLMVXLIEELDXCIVGYFSFIGKCHLLIP

SEQ ID NO: 208457 - protein, 62 aa, Zea mays
  Clone ID: MRT4577_121706C.1.pep
GTFYFKLATENTGSTGGGLLKSTSGPPDPTPGWTHMKFKVTARVLAQCRSSRAGVGDAGQRP

SEQ ID NO: 208458 - protein, 57 aa, Zea mays
  Clone ID: MRT4577_121707C.1.pep
TMPRQMCTSIGRKASSYHHKLQSNLAICHESTTGQHYSLKGNDPRLLFIINQLDFTS

SEQ ID NO: 208459 - protein, 84 aa, Zea mays
  Clone ID: MRT4577_121708C.1.pep
LLPLKRYPSHLVFLYTRFYSCTRTFPSAPLALFASADHTYVPALAHYRPPPDIALVSIPSTNAVFFRAGPAISHHFGASSLPKN

SEQ ID NO: 208460 - protein, 82 aa, Zea mays
  Clone ID: MRT4577_121709C.1.pep
MGNSETDGEEITQRGRSDSVQLDRSLVSAAPPVAVAREGWTSPMCGVRVHSIARRRLLGGGVVAGCLGVGRVVSPRARVLGV

SEQ ID NO: 208461 - protein, 46 aa, Zea mays
  Clone ID: MRT4577_12170C.1.pep
RCILMCALFCGRKRYSSLHFLCCSLRKASIFLLQALFFFIFHYFNL

SEQ ID NO: 208462 - protein, 38 aa, Zea mays
  Clone ID: MRT4577_121710C.1.pep
YGECYREDGDDLKDCRPGPHRMNLFTEDVVFDSVSRDG

SEQ ID NO: 208463 - protein, 69 aa, Zea mays
  Clone ID: MRT4577_121711C.1.pep
MPAKLYRLIKLRALSSSAAMVSMVAQRSQPPIAKLHRAYLSPGMPSVCENQLLLPSWIQKALQEGMLPH

SEQ ID NO: 208464 - protein, 109 aa, Zea mays
  unsure (1)..(109): unsure at all Xaa locations
  Clone ID: MRT4577_121712C.1.pep
SHARPSGKGAFECGSARGRVRRGLGVSPIGTGLRWWRRTASNLWVRGPGRARPEXCRLARLWXFXXCRGVTKSXXPAPQSSFSRPLGIFQLKSPMTHMCVRSIGILLVL

SEQ ID NO: 208465 - protein, 48 aa, Zea mays
  unsure (1)..(48): unsure at all Xaa locations
  Clone ID: MRT4577_121713C.1.pep
GPGPQNPVGPTRPFSIPQTXATGEGGPYLHIRGRETRHRHTRTILMTA

SEQ ID NO: 208466 - protein, 58 aa, Zea mays
  Clone ID: MRT4577_121714C.1.pep
LLPLHKLVPSLLGIRASLIKGVGPPTCQRSVVWLSQRNVFQSSLPRGVEPNGNLHFKT

SEQ ID NO: 208467 - protein, 125 aa, Zea mays
  unsure (1)..(125): unsure at all Xaa locations
  Clone ID: MRT4577_121715C.1.pep
KKRAGPPQGPTXPTPPKPXRKTPQKGPPKQRPRPAPXPRAGENPGGTQPKRPGKQPPFPSWPYFEKAPSRCPSQPFSPPXPRGPPPXGPXPPGXVVPPXGPLPLPGPXPPPFLFFPSFFPPVPGF

SEQ ID NO: 208468 - protein, 69 aa, Zea mays
  Clone ID: MRT4577_121716C.1.pep
ERGIHVSYFLQLMSISGALQENWTWHLPIFLRVRPLHDLLSYEVVEPARQHLSHLLKCHFQPVQLSVKQ

SEQ ID NO: 208469 - protein, 72 aa, Zea mays
  Clone ID: MRT4577_121717C.1.pep
ASGDDIDNMVPKVKGAFKCSIFYPFNPVQPQSAVMFTLVRRGTPRDTSVMSVMLCKGLPVSKCPGSSSLHRR

SEQ ID NO: 208470 - protein, 79 aa, Zea mays
  Clone ID: MRT4577_121718C.1.pep
MGGPGIHFSKLDRAERAQTLAQILNGWEEWGFFQLGNHGIPLELAQRVKKVCSDRYRLREARVNAVEPGPTLEGPPQPE

SEQ ID NO: 208471 - protein, 35 aa, Zea mays
  Clone ID: MRT4577_121719C.1.pep
WGGVGKLKGGKDFNVGEPWFTLKTSLGYVNKPRGL

SEQ ID NO: 208472 - protein, 112 aa, Zea mays
  Clone ID: MRT4577_12171C.1.pep
CRKCRRLVKLARPEPRQSYRVNRPNAAEFPRLVDKRKGPKKIKTGFTEPLPSDVANRAAEHHLPQGDKPATATVTRRRRRQRGTEKAGAELVGRRRRGSTPRHPCITRTHCS

SEQ ID NO: 208473 - protein, 123 aa, Zea mays
  Clone ID: MRT4577_121720C.1.pep
MDQLLHQMERPMDGFLTLGESCFIGSADNKKDLNNHCSSSGKSSMMWASEEQQAKSGNDQLQMGSSTRMEGAGIDVMDPVTGLYEGAVSGDSMDSKGFEGSNSRLEMKPPAQQAPVGSQRIRI

SEQ ID NO: 208474 - protein, 62 aa, Zea mays
  Clone ID: MRT4577_121721C.1.pep
VPFRRFNTGVNFVHDWTKPLSSYGGSFGAHTGKGNFFFLWPWVSPGGSTSGYLPAIQEHAFF

SEQ ID NO: 208475 - protein, 119 aa, Zea mays
  Clone ID: MRT4577_121722C.1.pep
PLSPLENFGRPPGPRGPFLFPGLFSDLGVTLLFFLTACSQSWAPLRFFPGSGFSVRARTVKKGFPWTWGSFFFITGPGRVLSLPLLFYGGGGLKWVNLLLGPPLLTWVWVLGPAPLGPL

SEQ ID NO: 208476 - protein, 54 aa, Zea mays
  Clone ID: MRT4577_121723C.1.pep
LVCGPPPLVKKKLPFAVGFRRSFLGASCSFFGPSAVSLSRPCLCALPLGVLGPA

SEQ ID NO: 208477 - protein, 62 aa, Zea mays
  Clone ID: MRT4577_121724C.1.pep
HIAKKILHFLLEQAERYRQGTSHDDVVAPEGRHKSALGLSKAPHVRCFVTTFRASPSTRSVC

SEQ ID NO: 208478 - protein, 329 aa, Zea mays
  unsure (1)..(329): unsure at all Xaa locations
  Clone ID: MRT4577_121725C.1.pep
VPSTVPRDGAGYPERANRAKKAVKISARSLAKLDKNEVMKAAAKARASSSVLRPIDARHGHEADVISSGSASVRSSMSVDYSGTKESNSEMKLSPLHNSYPQSLASQDEYDTGTPTASSLSSLVNIHKLASHSQFSAAPRPAPPERPVPAMVRPPVXHHTNNQPRDTAASCSHNTNNQPDVPXSATSYVRENRRASVVWDQEAGRYVSVPAQTRXKWSRSASKKPTVLDEPKWRAKQPXRSVVPGNASSSAMPSGQPSERLTYSGQSIFFGGPMLSTPGVGANRNEADARARPEGSRDPNALCEKARTGSGSSPIFAPGAFQRNPPFDK

SEQ ID NO: 208479 - protein, 213 aa, Zea mays
  unsure (1)..(213): unsure at all Xaa locations
  Clone ID: MRT4577_121726C.1.pep
SSIAGFFHGRCLLASPAHAHVSHSLPFSLLRASASCALSSLVLAPLQPSSSPSPSSXPAAFPWCAPSSSPPWRSSXPAARPRPSALFLAPAPAHRPRTRPAPCAPGPSXPSARPPSSXPARAPSPSXAPARPSPQRPTGAPWLAPALATTPEPVIPAVSPSRXAATPANLVPASSLLSRPWRPSRIFAWLPAVSQCRGLAQPRPVKVVPARTP

SEQ ID NO: 208480 - protein, 63 aa, Zea mays
  Clone ID: MRT4577_121727C.1.pep
TGEGLVKPPRSHHFGTQKTEPPGVTYIWHLLSIFILGGAHDTYIGGLADPKLPKAPLCFRCTP

SEQ ID NO: 208481 - protein, 153 aa, Zea mays
  Clone ID: MRT4577_121728C.1.pep
MFQSATSYVRENRRASVVWDQEAGRYVSVPAQTRTGTGADLPARNPRFLANPSGEPSSHVRGVAPGNTSSSAMPSGQPSERLTYSGQSIFFGGPMLNTPSLGAQRNEAGARARPEGSRDPNAQQRDIRGEKARTGSLPVFAPGTVQRNPPFDK

SEQ ID NO: 208482 - protein, 215 aa, Zea mays
  Clone ID: MRT4577_121729C.1.pep
ASTLTYACQDNRVLQICDVTGNKKKVVILGTGWAGASFLRNIDTSLYDVHVVSPRNYFTFTPLLPSVTCGTVEARSIVEPIRNIVRKHLKFASQVAQAHGYGPRHSALLSNVSQQVLESHLQTSDFLAICLPFMEDKPVSCLNVKALFRTSAGMPRSPQSSIALRCELSGCGRTMYAITRVAIGLSDQYPRLSIVSLAFQPAAGTFPPSSVPQVW

SEQ ID NO: 208483 - protein, 124 aa, Zea mays
  unsure (1)..(124): unsure at all Xaa locations
  Clone ID: MRT4577_12172C.1.pep
GPLEKXPALGTGLFLFMWDFLKVIFNILKKKIYIYFPXYPYFVTLIHLVEGDGYCLISWRGGLPKLAPINGTLLKLVFSDALCHGIGHIISNVAFAAGAASFAHTMKTLEPFFRADATQHMLGQ

SEQ ID NO: 208484 - protein, 336 aa, Zea mays
  unsure (1)..(336): unsure at all Xaa locations
  Clone ID: MRT4577_121730C.1.pep
RPAGPGPKNNFXFWGSHWRHGDALLFSLACAQVMYAFVMRPESLPKSYQEFILKTGPVAEPVYKVVKECCRGGPVDLTALSAHLSNKRNPDLINLTTNPSIIPCSVIHPDRASCLAQNVNVVSSTFKKTFPLYFSLTFVPFVVLRLQKFLESPTTTCWRALVGAVRSTTFLSAFVTVFQAAICLHRKVANKDHKLVYWFAGLMSGLSILLEKKARRAELALYVLPRAGDSLWYILINRHLLPNIKNAEVALFCMCMGGIMYFLEYEPDTMAPFLRGLIRRFLASKISNPSPPPPNRNASYSYLQTLNALEQSRTQPGVDNGLTTSEKYNLESIPGL

SEQ ID NO: 208485 - protein, 130 aa, Zea mays
  Clone ID: MRT4577_121731C.1.pep
MEVPMNSTQSGPHFPVQHRSLSLDIKGNKTDIVISKYEDTFLVIVAQIGCMGTILAAKKDESVFSDPTYNVSVLFGKRNEPLLQACARQLIEHISGSGSARSLVISLGLKDHSQGTLKDIIVAVIENRLW

SEQ ID NO: 208486 - protein, 153 aa, Zea mays
  Clone ID: MRT4577_121732C.1.pep
MEVPMNTTQSGPHFPVQHRSLSLDVRGNKTENYPHAYEDTFLVIVTQIGCMGTILAAKKDESFFSDPTYNVYVLFGKRDEPLLLACARQLIGHISGSGSARSLVISLGLKDHSQWQWLSPVIGDFSGSERSFSGNAEGYYCSCDRESPLVMIE

SEQ ID NO: 208487 - protein, 130 aa, Zea mays
  Clone ID: MRT4577_121733C.1.pep
MEVPMNSTQSGPHFPVQHQSLSLDIKGNKTDIVISKYEDTFLLIVAQIGCMGTILAAKKDESVFSDPTYNVSVLFGKRNEPLLQACARQLIEHISGSGSARSLVISLGLKDHSQGTLKDIIVAVIENRLW

SEQ ID NO: 208488 - protein, 57 aa, Zea mays
  Clone ID: MRT4577_121734C.1.pep
KTANPHGYIRLPKLYPPDKKWRDGLTGHVSTLRRGLHFSFHVLALPNCELTWLHYGD

SEQ ID NO: 208489 - protein, 105 aa, Zea mays
  Clone ID: MRT4577_121735C.1.pep
LSRLCLLDTFGVRGLKAHRRYHTPNWAEPSPEPLTAGSAPSPAPAARPVLSYYTLGAVRCDQDNETITIYVSVEGVDHETVETTFKPTSLAIKHHDVEGYTYRRA

SEQ ID NO: 208490 - protein, 133 aa, Zea mays
  Clone ID: MRT4577_121736C.1.pep
TCSIILLLRGERRKKIIFLSHTSSMPSRVPLVRLRCIHSYPWGQATSETRPHIPQTHTVFASRNRNPHVAASSDRSNRTSFDVYSSHTHTSASNSSLPRSIPFPRRSRSVHPLSPLTFWSHMTSSPPVSEAIA

SEQ ID NO: 208491 - protein, 86 aa, Zea mays
  unsure (1)..(86): unsure at all Xaa locations
  Clone ID: MRT4577_121737C.1.pep
IFGVISHTGRTGKDKPGEETKKNVXVVGAIVYHHEDEIVFIGIRVARAAGGERLPTVNSLVVNRHKLEYSKRLENRVSAEKVKHTH

SEQ ID NO: 208492 - protein, 110 aa, Zea mays
  unsure (1)..(110): unsure at all Xaa locations
  Clone ID: MRT4577_121738C.1.pep
MLQPREADVPALFLVFIVLPVVAYFLLGRWHDSASKKARASVLAQRAAEEAYREETMACPDIIPPGPSLRTMPYFKPAPSLRQEYHECATCHAPXKTRCSRCKSVRYCSG

SEQ ID NO: 208493 - protein, 43 aa, Zea mays
  Clone ID: MRT4577_121739C.1.pep
VTRRLLAEFNKEAFGYFMFLLSTRAEGLGLNLHTAVHCNYVRL

SEQ ID NO: 208494 - protein, 115 aa, Zea mays
  Clone ID: MRT4577_12173C.1.pep
FGFRHLNTKMVKGVCLKPRVTAGSPGSNLLRKNTYHPFTMVYLLPPRLEKQQKMPHWVGSWAPQRKCVPFPHIGNPMLFYTVYTNACKTVYPLFEEYMPGMGVLAGGGGGILLFF

SEQ ID NO: 208495 - protein, 115 aa, Zea mays
  unsure (1)..(115): unsure at all Xaa locations
  Clone ID: MRT4577_121740C.1.pep
APTRPVYPNVNSVSAGLFLNXRFKGPTNNLADGGYHMYKDMLEWIGRSAKNVPRQPTQSLRVSISKKLRAYVEDKYSRAGVEKGKYVVVHCIAYDSVDSMPYRGDDYWLLHSSTG

SEQ ID NO: 208496 - protein, 91 aa, Zea mays
  Clone ID: MRT4577_121741C.1.pep
SWLIRNPMPRLRHRPRGRRPVDMKRGRPIKQGGLNQKLIKGSIGGQASPVLAKIIFRCAKGGQAPPHASCWMPPDIYYPTRSCQIVSAASL

SEQ ID NO: 208497 - protein, 76 aa, Zea mays
  Clone ID: MRT4577_121742C.1.pep
MSCNCGSSCSCCSSCKRGKKYPDLEETSTDGQATVELSLSPEKKGTPEFLDASKEFMQGCHSWRLCSSCKCDPQNC

SEQ ID NO: 208498 - protein, 185 aa, Zea mays
  Clone ID: MRT4577_121743C.1.pep
AVRQYNRSKLPRLRWTPDLHMAFVHAVERLGGQERATPKLVLQTMNVRGITIAHVKSHLQMYRSKKLDQESAGHERAATSSVFSPMDFHMMRTGDHHRYHDMFLHRPAAGSAISSRLLHGGEFFGSRNAAVSPEARRLYELLLRRQPTMQTFDFKGYSSGSGLRDQEWRFSQHAAATARAVSIND

SEQ ID NO: 208499 - protein, 131 aa, Zea mays
  unsure (1)..(131): unsure at all Xaa locations
  Clone ID: MRT4577_121744C.1.pep
HDRVXQAEILFKDQDHPEHRSFTFRHCWHVLRNQPKWLDKLCQLAEVKASNKKQKTTKNSSPGIVDLTTQDGHDKDPQEIVNSSMDAPKRPPGKKKAKEALRRGGNDAGTEALELLWAKKREDEVAKELKR

SEQ ID NO: 208500 - protein, 144 aa, Zea mays
  Clone ID: MRT4577_121745C.1.pep
INRSHRGFRRAIQTKGIKFEGVHKGGLFKTDRVLGTAQLKLDALETACEVREVLEVLDGRRPTGGRLEVMVRIREPLTAQQLETTTERWLVIDPVPASVPTQVVGPKGKAPPIPAPTREPGNRSARPLHSLSVLAFDQERLERK

SEQ ID NO: 208501 - protein, 83 aa, Zea mays
  Clone ID: MRT4577_121746C.1.pep
GGGGKTFPLLGGFYQCFVYKSKTKEKKLLNAFGKRLPLSFFGLFPPYFFPPFFKRGGFFFFFGRFFFPPFFFFLHPFLCPRLF

SEQ ID NO: 208502 - protein, 202 aa, Zea mays
  unsure (1)..(202): unsure at all Xaa locations
  Clone ID: MRT4577_121747C.1.pep
RNPASRRSPSAISHRGAPPSSRVPRSPSRSPAPCPRRPARSPPCRDLPSPPLLAAVSSPRQAPALALPPARRRNPTSRRSPSAISXAAPPPSSRVPHSPSRSPAPCSPLPSATPSSPANRASRCNPPWIQSDSSPSXIPHGSGRTSATCRACPPAAETPPWRDSQLPSSSSTSRVPAAASGDAASREVRAPLHLICPVMLIT

SEQ ID NO: 208503 - protein, 56 aa, Zea mays
  Clone ID: MRT4577_121748C.1.pep
LYIILSPHRERGVLWGNFWFMFLAPIIGKCKTSAHQARAFTLIKRIIKKTGLARLI

SEQ ID NO: 208504 - protein, 68 aa, Zea mays
  Clone ID: MRT4577_12174C.1.pep
AAPSISLSLIDQLKRRAKESGITTAINITWPLSKITGNHLRNSHQNSQPTTPPFHPQKSTWLSLITSQ

SEQ ID NO: 208505 - protein, 65 aa, Zea mays
  unsure (1)..(65): unsure at all Xaa locations
  Clone ID: MRT4577_121750C.1.pep
SRLYWTSSAGIPLLMCSIWSSXQHLSSLSSTPDRGSRDDHQKVDGNHEFCTSRSSHLSHTDIHRQ

SEQ ID NO: 208506 - protein, 93 aa, Zea mays
  Clone ID: MRT4577_121751C.1.pep
SFCMSWCSLCWFATRTRFMLLIAFFLFSLILFTFSVRSLHFPLFRNVWQLFNIFCKNIRVAPRSAKIHSRTVDLSIIIVYLRPSSYVLEAFLR

SEQ ID NO: 208507 - protein, 64 aa, Zea mays
  Clone ID: MRT4577_121752C.1.pep
GLPLLLGGRAFPGLSPFLGWCVLRARRPCFCLRASGCDADLHAGGGVACTLRCRPVSQPGLSRS

SEQ ID NO: 208508 - protein, 93 aa, Zea mays
  Clone ID: MRT4577_121753C.1.pep
MSYQFTSKNFPAPASRQTGLRITAQPMASSPWLRTAGAAPVPPLEAAAAAATAAATPAPTSEQHRVKEEGNAAAATVPKQEEAKLHLPRDNDS

SEQ ID NO: 208509 - protein, 87 aa, Zea mays
  Clone ID: MRT4577_121754C.1.pep
LKPTQFKIKLGPRILRPFFPNNHIKLGPPSPMILQTLLNPLQRELFCMFMTSIVTFGPRMFLCPYNSTAGTFLVLYMFKRSLALELP

SEQ ID NO: 208510 - protein, 116 aa, Zea mays
  unsure (1)..(116): unsure at all Xaa locations
  Clone ID: MRT4577_121755C.1.pep
NALEKPPDLHPINTGFDGKEFIXTMLEDVPAHXDISVWPFXGFSGSGDKSMREPAHAXEEXHFATEDSSSMXVLLQARDPLRXYPSYTINNAVSTHPLYFIHSERWRTKNTVWIAN

SEQ ID NO: 208511 - protein, 53 aa, Zea mays
  Clone ID: MRT4577_121756C.1.pep
VRSHLHRQPHEDPSTDRAEGPLPGAHRCCTRPCITSPTAILTGIHTPMHICAS

SEQ ID NO: 208512 - protein, 191 aa, Zea mays
  Clone ID: MRT4577_121757C.1.pep
MESESAMGTEGESGKEQDLLLDPGRKLGKMEIELGKWTEQASGKEQETVRDLKKRHRKLSKNRRYLLQDIVSGKFKELYSDSGRNRVMGIFREAEELDKELMIIKEKEKEKQETVVDSGEEEMGRDSARHQSLMEGQLRKEQERLRKVRYQLKKKMRSESDKDPAMQRMLLSQQQILWTKEQALLTVMRQS

SEQ ID NO: 208513 - protein, 82 aa, Zea mays
  unsure (1)..(82): unsure at all Xaa locations
  Clone ID: MRT4577_121758C.1.pep
TXGPQIFKNLCXTYQKNNLLKPNDYLQQGPNGXYFGRMLIKLGSIVAQNFLRGFAXTRFFFKNRERRLGRXFRXLRPTLDTR

SEQ ID NO: 208514 - protein, 119 aa, Zea mays
  unsure (1)..(119): unsure at all Xaa locations
  Clone ID: MRT4577_121759C.1.pep
KIWLSGRIQPLKTGRSVLIAWCLFALPPFWAENEQGIFEEVLHGRLDFDAEPWPSVSEGAKDLVRRMLIRDPRKRLTAHEVLRXGGLAPDKPLDSAVLSRMKQFSAMNKLKNMALRCEK

SEQ ID NO: 208515 - protein, 286 aa, Zea mays
  Clone ID: MRT4577_12175C.1.pep
MTSHRQRQETSQRPTAARENLSKPAGNSAPIPTRIAQNARRNFPSSWTPLCSSSFPRSSSTRSAPIPPASADPDPAPAPMATRRRMLLKVIILGDSGVGKTSLMNQYVNNRFSNQYKATIGADFLTKEVQIDDRLFTLQIWDTAGQERFQSLGVAFYRGADCCVLVYDVNVSKSFEKLNNWREEFLIQASPSDPENFPFVVLGNKIDVDGGNSRTVSEKKAKAWCASKGNIPYFETSAKEGFNVEAAFECIARNAVKNEPEEDMYLPDTIDVGGAGRQQRSSGCEC

SEQ ID NO: 208516 - protein, 77 aa, Zea mays
  unsure (1)..(77): unsure at all Xaa locations
  Clone ID: MRT4577_121760C.1.pep
LISPAYLQQAITIIISQLAGVSPTAFLIQPQLLPIYQHAAPNAGTLLQLQQLLPFNQLALTNPAVLXQLPIIGGALF

SEQ ID NO: 208517 - protein, 133 aa, Zea mays
  unsure (1)..(133): unsure at all Xaa locations
  Clone ID: MRT4577_121761C.1.pep
RIVGSESVVVEAWAGRKGDXLFLHMNKDPVRTGDIVVFNVEGRDIPIVHRVIKVHERHDTVDSDILTKGDNNPGDDRVLYAHGQLWLQRQHIIGRAVGYLPYAGWLTIVMTEKPVLKYLLIGALGLLVVASKE

SEQ ID NO: 208518 - protein, 91 aa, Zea mays
  Clone ID: MRT4577_121762C.1.pep
PPPQARFQVGALPSPLGFPAFKTPPSHLMPQGWGDPDFPPFYLFTHTPGAGGPGGLSALPVFPSLPPSESKEDSVNSRIFPICNLQNHIHC

SEQ ID NO: 208519 - protein, 66 aa, Zea mays
  Clone ID: MRT4577_121763C.1.pep
NKKKKKKKKKKKKKKKKKKKKKKRNKVKRGPFFKLPTLLSLPSKIIILLYCHINLIHWPFFYNPLT

SEQ ID NO: 208520 - protein, 89 aa, Zea mays
  unsure (1)..(89): unsure at all Xaa locations
  Clone ID: MRT4577_121764C.1.pep
SSLSPPVGAQLCILRCPGVSSGIWFFCYGAMFGVDPSVDAHSGIHLAPLPVYLFLIPWSFTYYKNTPQLSKTTFRKLXKKKDGRSRGVQ

SEQ ID NO: 208521 - protein, 91 aa, Zea mays
  unsure (1)..(91): unsure at all Xaa locations
  Clone ID: MRT4577_121765C.1.pep
KELSNKVNKNTTDYNNYNKIYKTIGQPVENELKEQLKENVLLNHLQKILNSNSTGNGETSDYSVNCQKIKLKQRLGXYECQKQYRSIEWSM

SEQ ID NO: 208522 - protein, 68 aa, Zea mays
  Clone ID: MRT4577_121766C.1.pep
FWLKEQPSLVGRSHHVSLKTRYKDQYHEPSTKRRKLPFKKCICTPTMLDLFTSHHDSLHFSYRQPYWP

SEQ ID NO: 208523 - protein, 243 aa, Zea mays
  unsure (1)..(243): unsure at all Xaa locations
  Clone ID: MRT4577_121767C.1.pep
QQRPAGGDRRGRRRGVRGERRXSRSRTCLTWRSSPSLTRTSPNARMTTRRRQPPRPRRGRKRTRSRRRSXKYDLPPLXRRRRRWLTCRRTTSRSWSGSPVSWTTRSPSCSPRRSRSRPLLWSRRRQRGPLWRSSGVRSRTTVHTGRWRRRRRRXPQRTPTICALSTEAMIPVKAKRSKRSRGPGWSRPGASFLPDSASSSSTTTTSSCSSSGSISPFLRLDSSPFGGGLELGEGLFSYGHILP

SEQ ID NO: 208524 - protein, 261 aa, Zea mays
  Clone ID: MRT4577_121768C.1.pep
MPGRPRTPLLLWISFRCPSAGPASHPNSSCASWIRGSRLATRRQTSRGADRDRAAMSTSRRRTLLKVIVLGDSGVGKTSLMNQYVHKKFSQQYKATIGADFVTKEVLIEDRLVTLQIWDTAGQERFQSLGVAFYRGADCCVLVYDVNSNRSFDTLNTWHDEFLNQASPSDPKTFPFILLGNKIDVDGGKSRVVSDKKAMEWCASKGNIPYFETSAKEDYNVDNAFLTVAKLALEHERDQDIYFQSVADPVPETEQRSGCAC

SEQ ID NO: 208525 - protein, 66 aa, Zea mays
  Clone ID: MRT4577_121769C.1.pep
QRSKESWLDIVTSLSWEAASLLKPDTTSKGGQMDPGGYVKVKCLACGHPSESFVVKGVVCKKNVAH

SEQ ID NO: 208526 - protein, 99 aa, Zea mays
  Clone ID: MRT4577_12176C.1.pep
LPVIPIAVVVKGKFYVFQLLLQGRKGRCISFMYAGEKRCSGHREISAVEIVCMRPGDKVELDGICAFLFLNETSSSVCTPSPSCRLITFMRWVFDGMLH

SEQ ID NO: 208527 - protein, 282 aa, Zea mays
  unsure (1)..(282): unsure at all Xaa locations
  Clone ID: MRT4577_121770C.1.pep
MLPAHKTNLPSLRSRARRLYRYSQPSNPLLLHTDAMLPSPPATSPARLHKLVTSQQDPLLALELVNVTSPTTTPHPATLHSLLLRLARRRDHLPHALALLRRLPSPPSPRLLLPLLLAALRLRRPPQLFLSTFNSLFVSGPSPLPLHPHLLLRLLGVLSSTPSHFPSALHLLRLVSSRLPLPAPLVLASHNLLIDAAARSGHVAVSLSLYHRLRSLHVSPDADTYRILTQSLCRKAQVRTAATLLDEMLHRGIPADPLAYTTVLNALCRKKQLREAYXLLCL

SEQ ID NO: 208528 - protein, 97 aa, Zea mays
  Clone ID: MRT4577_121771C.1.pep
AVRARYGATLRLEVFDAYAPFADLLSHPAQYDFDDAKRSCLDIPKPSSLTYLTAQTPRADCRDPARFVFWDTLHPTTRTHAWVAERITPFVRARLLD

SEQ ID NO: 208529 - protein, 31 aa, Zea mays
  Clone ID: MRT4577_121772C.1.pep
YDFLRRNSRGPNYAVSIPHASTLEVGMMYYI

SEQ ID NO: 208530 - protein, 110 aa, Zea mays
  unsure (1)..(110): unsure at all Xaa locations
  Clone ID: MRT4577_121773C.1.pep
VPVSSFPLGLEFNKGSLQNXFXKKAGCGPFSAKLKFVSLGKQTCPLRTQSSKTQGPVDFRVGIQLAFFGPDKPKSVLNSWYKVSPLRQYPLXGLYPPPKDPLSGQFTKIF

SEQ ID NO: 208531 - protein, 126 aa, Zea mays
  unsure (1)..(126): unsure at all Xaa locations
  Clone ID: MRT4577_121774C.1.pep
VAISYPRDGTLERRKAARIDTCAKVVDIVDTFRLQEQPPIDKKSSVTYIRKYITNLTGVVXPEKAHELTKAVEAATKFLLIELKDLQFFVGESMKDDASVEFIYYEDGATNSTFLYFSHGHSEIIC

SEQ ID NO: 208532 - protein, 95 aa, Zea mays
  Clone ID: MRT4577_121775C.1.pep
CPQIPHGFSRSHFLISLRRLRSNRDARMSKWREDRPRCFSFSWIGRGKGEIFFNGVETDRIGWGERPQVGASAQGDGGGATTGGGTVTHAGRVGG

SEQ ID NO: 208533 - protein, 96 aa, Zea mays
  Clone ID: MRT4577_121776C.1.pep
TQRGLWALPLNFFFYGRGFKKPAFGQKEEIPPPLLKKRPGGFLTKGRNHNRETGYWGWEGPFKDPNGFRPLLETFPIPKKPGGIKTTGGGGFQRPL

SEQ ID NO: 208534 - protein, 98 aa, Zea mays
  Clone ID: MRT4577_121777C.1.pep
MAVTTTGMQMMHVQQAAALLLCLVALAACNGWTIVCQLSCASACYGEVGITTLGTSAVLAKAEAPALAPQAAHERGAVAGVSALRGFKLSLPTTRGRG

SEQ ID NO: 208535 - protein, 39 aa, Zea mays
  Clone ID: MRT4577_121778C.1.pep
RYCSAHRNASSSFLVIVQYTANFFLLSWYHIRQVIDYIG

SEQ ID NO: 208536 - protein, 114 aa, Zea mays
  Clone ID: MRT4577_121779C.1.pep
MAATTTGMQMMQVQQAAALLLCLVVLAASTRVALGNCRDDCMAACNGWTIVCQLSCASACYGEVGITTLGTSAVLAKAEAPASAPQAAQERGAAAGVSALRGFKLSSPTTRGRG

SEQ ID NO: 208537 - protein, 213 aa, Zea mays
  Clone ID: MRT4577_12177C.1.pep
MFMKFVGHRWTNRSVGFEFLRSGETVSRYFNVVLDALCVLSRDLITMRTTETHPKISNSSRRFHPYFEKCIGALDGTHIPAWVPIYMQDRFRGRKHYPTQNVLAAVDFDLRFTYVLAGWEGSAHDSFVLQDALSRPSGLKILEGHYFLADAGYAARPGILPPYRGVRYHLKEFQGTRRPENPKELFNLRHSSLRTTIERAFGTLKNRFKILTR

SEQ ID NO: 208538 - protein, 41 aa, Zea mays
  Clone ID: MRT4577_121780C.1.pep
GGSPSIHIVPTCDPFLRIKIPSSGQRQDIYRLAQTVRTRRS

SEQ ID NO: 208539 - protein, 39 aa, Zea mays
  Clone ID: MRT4577_121781C.1.pep
TGTAEFLRRFPAHKVRLFESDDGFCVLESKAIVYYVSTE

SEQ ID NO: 208540 - protein, 74 aa, Zea mays
  Clone ID: MRT4577_121782C.1.pep
FLAAPALRLPLSATAGAAVAPPPVSGQSRWTLCFGTDRTACIAACLACQTLGSSSWLHRSCITSSRGKADHNFF

SEQ ID NO: 208541 - protein, 173 aa, Zea mays
  unsure (1)..(173): unsure at all Xaa locations
  Clone ID: MRT4577_121783C.1.pep
MEPAAEDVAAAAPDSWESADIDGPISRLILSARRVSSSPDLADNPDPPQPPPALQPQGPPSVPSAAREDLMAQVDQFLREALEKPRERLSVLRMEQEILKFIGDPRFTEYEFNGLPTSYLRLAAHRLAQHYFLQSIAXDNSLPDGTGSHIILRKTSSECKLADVCLXRYPVNL

SEQ ID NO: 208542 - protein, 75 aa, Zea mays
  unsure (1)..(75): unsure at all Xaa locations
  Clone ID: MRT4577_121784C.1.pep
EEGTEDELNGSRVHLAMWDGGQCEAKRFTGRXLSRFGLLKESRATNGFGGDGISPVRTHCASQEDHARGQRRALD

SEQ ID NO: 208543 - protein, 88 aa, Zea mays
  unsure (1)..(88): unsure at all Xaa locations
  Clone ID: MRT4577_121785C.1.pep
YNVYIVPNFMMANITLLLTLIHTYLTKYFSFKAVYYNYXFSSKVIFTISLSLIXALNSPLIALLHKHKTSNFFIYFQYYNEPDPWTHQ

SEQ ID NO: 208544 - protein, 64 aa, Zea mays
  Clone ID: MRT4577_121786C.1.pep
KFNPFSPGASGGGGAGFLQPLPTFLPLKNTAKTNMGGGVIFLQLPIGSFGRGNTSKLDKGIEFQ

SEQ ID NO: 208545 - protein, 173 aa, Zea mays
  unsure (1)..(173): unsure at all Xaa locations
  Clone ID: MRT4577_121787C.1.pep
STCTHEAKPYLFRQKGPKLKHVSPFPGPLARGTRARALPLGPLPQPTAARMPQPXPPXRQPKAGPAPPRARASTTVAAASGPSAXPRRXSPSPSPIPASRSPPHPSISQPRPXPRISQPRPIHGAAGSTPPPPPSPXPPSPYXSPPHPSIXAAAPTAVLPAYSPPPSXRPPPR

SEQ ID NO: 208546 - protein, 62 aa, Zea mays
  Clone ID: MRT4577_121788C.1.pep
RNQVGFPVWSACFSLGSVTGGMGKLWLGPALKLGVFQNPGKIKKKKKKKKKKKKKKKGARAI

SEQ ID NO: 208547 - protein, 88 aa, Zea mays
  Clone ID: MRT4577_121789C.1.pep
SHRPLCSSHSSPYPPSPADVMTLTSHQNACATDSSPGCYIEKAAADTTASSAATSCSTRGGHTVCDILETRIAHCIYDWNKQSHDTHC

SEQ ID NO: 208548 - protein, 82 aa, Zea mays
  unsure (1)..(82): unsure at all Xaa locations
  Clone ID: MRT4577_12178C.1.pep
PFPRSRRSYVPGTLQRLPPSMGTADAQGRKARAVMAMKQVKTPICLEAMPEASLDDERASYSCFDIIQRSXCXIRSDIPAGS

SEQ ID NO: 208549 - protein, 55 aa, Zea mays
  Clone ID: MRT4577_121790C.1.pep
FLSRRPVRFFTTPFLDPVRIKAQLVLAVCPQSFLGVLLFPEQDLRCYFPVCFFFP

SEQ ID NO: 208550 - protein, 94 aa, Zea mays
  Clone ID: MRT4577_121791C.1.pep
MCMDGAVPVKRVWLGIAARLGLRRKTGLRKLRKEVRTCEYRDVHVMWEMLRATDGPAVPLAEKEAAAAAAVAAAAGARKRRNAWRRFVYYCCAF

SEQ ID NO: 208551 - protein, 379 aa, Zea mays
  unsure (1)..(379): unsure at all Xaa locations
  Clone ID: MRT4577_121792C.1.pep
FACHSLVNGVGVSAGLFFPGSPSSPPPREFNRPRGDVKRRAGLATVCPPERSLGSDCLRAGADPRLAIHVALRCRSASSTGRGTRAAATMTKKSVGDLTAADLEGKRVLVRADLNVPLDDSQNITDDTRVRAAIPTIKHLISNGARVILTSHLQELDYLVGAVSNPKRPFAAVIGGSKVSSKIGVIESLLEKCDILLLSGGMIFTFYKAQGHSIGSSLVEDDKLELATSLLRKAKEKGVSLMLPFDLVVADKFAPDASSQXQVVPASAIPDAWMGLDIGPDSISAFSSALETTQTVIWNGPMGVFEFDKFAVGTKAIAKKLAELSGKGVTTIVGGGDSIAAVEKVGVADSLSHISTGGGASLELLEGKELPGVAALDEA

SEQ ID NO: 208552 - protein, 763 aa, Zea mays
  unsure (1)..(763): unsure at all Xaa locations
  Clone ID: MRT4577_121793C.1.pep
CSCFVLSNCTPLPAVSCSSMSDLFVRLAKFSNLKKEGSSFAGRVVEPVLRLLNQNGLVADEAIDLLRTVIKLYPSSVNRHYNKVESAIAAKIMSNVKPSEKFARTLALLPSVRVSEDSWSLMIRXLFTCFACFGCPCPPSSPFSGKNSSCKLWVQLHCTENNSFXLEHTRSHHLGTSLKQWRSXHXTMTSALTLCCSVMLTSYYPVQXVKIRTFXYLQKLIXLTSVXAMMRRVLLVDGSLHNKLFPSTTSLHQELICFDLPSLHSTFLDLLNATIKGMRSQLLPHGASIIRLITEYFKIAKLPTLRTKTYSILQLLLTSMGVGTSLHLLEATVRNAVADLNDDGEINMTMINTNSSQLTNESSSKVYSKKRKQEPQMQNSTISGXESSNQPKEKKXLPYQLHXGVAPESTGDVTLSTPHSVKIAALETLEVLLNVGGSLRMDRWRSEVDILLINVARSACGMGGSYEQKPSTFGEPNISDFQLASLKGLLASFLSSHARPPYLANGIELFRKGKLEIGTKVAEFCSHALLALDVLVHPRALSLERTVPASSGFNYTAQKKTVFGAGTHQISPFGDQPQAMEVEDMNDDWLISNNNEPPEVPVNGSDAVVSKGVLVEDGKQLNPIAEDPKVDPPRITDAAQDAPASTKTDVKVVDAAAATAAKPNTAENPSSSNAVPSPVRTTDSDSRKHASFPEQDSPHENKSAAVHPGEASATPGVGSSHHRHEAPEARSASFTELFGSESGIESESEDLMPDIVDGDPDSD

SEQ ID NO: 208553 - protein, 512 aa, Zea mays
  unsure (1)..(512): unsure at all Xaa locations
  Clone ID: MRT4577_121794C.1.pep
VKKVNVPIHALMALMRRVLLVDGSLHNKLFPSTTSLHQELICFDLPSLHSTFLDLLNATIKGMRSQLLPHGASIIRLITEYFKIAKLPTLRTKTYSILQLLLTSMGVGTSLHLLEATVSNAVADLNDDGEINMTMINTNSSQLTNESSSKVYSKKRKQEPQMQNSTISGXESSNQPKEKKXLPYQLHXGVAPESTGDVTLSTPHSVKIAALETLEVLLNVGGSLRMDRWRSEVDMLLINVARSACGMGGSYEQKPSTFGEPNISDFQLASLKGLLASFLSSHARPPYLANGIELFRKGKLEIGTKVAEFCSHALLALDVLVHPRALSLERTVPASSGFNYTAQKKTVFGAGTHQISPFGDQPQAMEVEDMYDDWLISNNNEPPEVPVNGSDAVVSKDVLVEDGKQLNPIAEDPKVDPPRITDAAQDAPASTKTDVKVVDAAAATAAKPNTAENPSSSNAVPSPVRTTDSDSRKHASFPEQDSPHENKSAAVHPGEASATPGVGSSQPPPSST

SEQ ID NO: 208554 - protein, 47 aa, Zea mays
  Clone ID: MRT4577_121795C.1.pep
TNATSTSEPPTLPAPHIIRYRTRSRPPYRWSIVRWRAHLPRCATVQR

SEQ ID NO: 208555 - protein, 75 aa, Zea mays
  Clone ID: MRT4577_121796C.1.pep
TSPNNHFFLPRNPSATTTMPFTASDICKILLAIILPPVGVFLERGCGADFLINILLTILGYIPGIIHALYIIFKF

SEQ ID NO: 208556 - protein, 62 aa, Zea mays
  Clone ID: MRT4577_121797C.1.pep
IPSINNRGTKGFVFYRLTDDAPFDPFWSLDSPPLHLEQGVEVKINTIIMNGEDPHARTGGRP

SEQ ID NO: 208557 - protein, 88 aa, Zea mays
  unsure (1)..(88): unsure at all Xaa locations
  Clone ID: MRT4577_121798C.1.pep
SGREWPXWGCEKSXFLWTYSAXETCYLLQGKVKVYPEGHGEEFVEIVAXDLVVFPKAMTCTWDVPRGRSQPLQLYSIRRRPTTAYVIL

SEQ ID NO: 208558 - protein, 76 aa, Zea mays
  Clone ID: MRT4577_121799C.1.pep
GIGPGPSKKNASKGFGLYTKMLGKKPIWRACFPKHFNRTGGSFGPGSGNPGKNGPCPIKKLEPEKLTPRHKNRRFF

SEQ ID NO: 208559 - protein, 56 aa, Zea mays
  Clone ID: MRT4577_12179C.1.pep
SVVLTSGISEEAPGVKASGVVLAVVGLGTPAQDNSPLVVVPALVQKSDSSAVARAE

SEQ ID NO: 208560 - protein, 85 aa, Zea mays
  Clone ID: MRT4577_1217C.1.pep
ERQDRDRARPRICEEETPGLPSPPPRRLHRTTPCGRRSIFAMIDDVIFRSRLPHAANFRFLLSLNLRSIVDLCPESYPKENARAL

SEQ ID NO: 208561 - protein, 152 aa, Zea mays
  Clone ID: MRT4577_121800C.1.pep
HRARPGAPSLATCIGLCPPCSVFPSRAPQVPSALPNSPARALSSSIAPSSPSSDCAQLPALGSPSLLARTLPKPSHGGAPSSSVAVRARLQLCHPRRYSSTRLPVLSLHRRPQLPKPELPGRLLSYVVSQAAPQRRPISCSSAALSSTSHWF

SEQ ID NO: 208562 - protein, 106 aa, Zea mays
  Clone ID: MRT4577_121801C.1.pep
GGAENKKISVKIVYAKYSIVNLIKQKTETIGQMRIRTHSVQKRNVEPHASSIIFSPGLIVRLHTLFRSINHLRPTPVPLPLSPLHRFLPSHIHILSLGLGDPPTRP

SEQ ID NO: 208563 - protein, 40 aa, Zea mays
  Clone ID: MRT4577_121802C.1.pep
PTKRKKKKKKKKKKKKKKKKKKKKKKKKKKKKKKKKGGPF

SEQ ID NO: 208564 - protein, 88 aa, Zea mays
  Clone ID: MRT4577_121803C.1.pep
DLESVSVWVLTMSVTACHHRPSSLDMHPSARQLPYPFWPQHTRIWQGLVVPTMAPQTPCRPHAVPLVKSPAMLLTGLDHQTSQRHVPE

SEQ ID NO: 208565 - protein, 194 aa, Zea mays
  unsure (1)..(194): unsure at all Xaa locations
  Clone ID: MRT4577_121804C.1.pep
TFVRLMILCLAVTIEVSSTKQMANASGLAVITVMIVTTCFMSLVIVLCWNKNVVFALAFLLFFGAIEAVYFSASLMKFHEGAWVPIIVSFIFLTVMCVWHYGTAKKYEFDVENKVSISWLLNLGSSLGIVRVRGIGLIHTELVSGIPAIFSHFVTNLPAFHQVLVFLCITSVSVPHVQPEERXFLVGRIGLKQY

SEQ ID NO: 208566 - protein, 92 aa, Zea mays
  Clone ID: MRT4577_121805C.1.pep
TFAVGYVTSTSHGLEVNSTKFFFLVSGLAVITVMIVTTCFMSLVIVLCWNKNVVFALAFLLFFGAIEAVYFSASLMKFHEGAWVPIIVSFIF

SEQ ID NO: 208567 - protein, 73 aa, Zea mays
  Clone ID: MRT4577_121806C.1.pep
MGVDYYKVLQVGRGASDDELKKAYRKLAMKWHPDKNPSNKKEAEAKFKQISEAYEVRATASWPHWASDLRWCS

SEQ ID NO: 208568 - protein, 148 aa, Zea mays
  unsure (1)..(148): unsure at all Xaa locations
  Clone ID: MRT4577_121807C.1.pep
MVSLRCTTAHHSLLGSPTXLERPRRRACPVVRADVGEESGAQAKVSLIRIVTRGSPVALAQAHXTREKLRAIHSELAXEGXIEILRIKTTGDMILDKRFAHIGGKGLFTKDIHDALLHGTIDIAAHSMKDVPTYLPRGTRALCNLPRE

SEQ ID NO: 208569 - protein, 133 aa, Zea mays
  unsure (1)..(133): unsure at all Xaa locations
  Clone ID: MRT4577_121808C.1.pep
AHPQPWRVPPPPPPWCSPSSPSALPRPCFLFPVPTPLPFSPSPSLDVXPRSRASSSPAELPQLRLQPPXPHGELAQTPSPCAPFVLLQPFSTPCSPPMAPLASPVSTSPNGIAAYRCQTRVRDARQVLDGIPQ

SEQ ID NO: 208570 - protein, 98 aa, Zea mays
  Clone ID: MRT4577_121809C.1.pep
MGEHGVENDWNRTEGALGTESRGAAGLRASSASTKGEVEAASAMAEGELTVKVEQSQGAGRSRGEGAMGGMGKTTWRPALEEDGEDDLAAGTRGRWGR

SEQ ID NO: 208571 - protein, 65 aa, Zea mays
  Clone ID: MRT4577_12180C.1.pep
LITSGRRARYKQKVDEQDLTREWAGHAEGIFLPKPEIGPRNIEMLLGSLNHYARSPFAYKTIHEQ

SEQ ID NO: 208572 - protein, 292 aa, Zea mays
  unsure (1)..(292): unsure at all Xaa locations
  Clone ID: MRT4577_121810C.1.pep
MEVKVMSSRLVKPSYPPGVPQPDTTQHVPCSVFDKITYHIQMAIIYAFSPPVPSIADIEHGLAAVLGVYRAFAGQVRPGPDGELGVLLNDHGAQLIEAFVDAHLTVVAPARPSPELQQLHPGLHVEIEEVVQVQLTRFTCGSLMVGFTANHAVADGRATSSFLVAWGRTMRGFPIGLPPPPLHHHPGLFPPRDPPRFEFEHRGVEYRPXRLHHHHRHPTSSQPTVRXHRHDIVIHKAHFTGEFITALRAKASEGRGHPFSRFETIVGHVWRAMTRARGLXPAPASAIRISVD

SEQ ID NO: 208573 - protein, 68 aa, Zea mays
  Clone ID: MRT4577_121811C.1.pep
NEENTLITTGKKNWVGGTQKRGKKPPPQGAAQGGNRGPKKGASFFWGEQTPKNILERGPQTLIGRKLF

SEQ ID NO: 208574 - protein, 76 aa, Zea mays
  Clone ID: MRT4577_121812C.1.pep
AGVRPSRLRSHHDGGSGMTSERYVTTADRRDEATTPASLPPGGTASKKHIHAPLLILISDHGGGTMKSITPLNYEL

SEQ ID NO: 208575 - protein, 55 aa, Zea mays
  Clone ID: MRT4577_121813C.1.pep
HGFNVGKSKGPWGLTFNGNNPKPPLRAQAPCFLGGVELIKGPFNKTHLNRGFCGP

SEQ ID NO: 208576 - protein, 376 aa, Zea mays
  unsure (1)..(376): unsure at all Xaa locations
  Clone ID: MRT4577_121814C.1.pep
HLLVAAAAPPSSPHQYRRRRRRRVLGCLRPRAASVRCCAAAARAAEATTRVFVVSDLHTDYPENMEWVRRLPAQVGAGEGRGVDALVVAGDVAERRGHFARTMEVLRERFAAVFYVPGNHDLWLRREGGLYMDSLEKLTALLDACSELGVDTGPRTIGDLGIIPLFPWYHKSFDKEKDVNSVRVPSLEMACKDFHACQWPSDLTNDDEALALYFDKLNDKNHDAXLKKVKSSSKHIXLTFSHFVPRQELCPEKRMLYYPYLPKVIGSDFLERRLRDIHSNREDRAACHVFGHTHFCWDSVVDEIRYVQAPLAYPRERKRRMNGEGWLPFCVYRDGFNPEIYPALWSDYYNKNKREPENTQLAPWVASHYAKYHKFH

SEQ ID NO: 208577 - protein, 75 aa, Zea mays
  Clone ID: MRT4577_121815C.1.pep
EAAPAGRPIPSTHLVRRRTKPNLPHKPTLVRCSRVHGSERMGLRRSNRARAEHIGQLHLRWWTTQGPVVDSADGA

SEQ ID NO: 208578 - protein, 87 aa, Zea mays
  Clone ID: MRT4577_121816C.1.pep
ENHVSPDVILVIIYANSACGHYRMTSILWKLTLSILTCTLVICLCQPIQFRLSHIYGVLSFYVARISFVSLPVVLIFELSPKTFLAQ

SEQ ID NO: 208579 - protein, 148 aa, Zea mays
  Clone ID: MRT4577_121817C.1.pep
FLPMLFAMANEWTYLRAILGGLPMCGVVCVAYRVPVMQRRNSPAVASRGRAAWCLPPASGPGCCLASIPSGSRSRFCKSLIFFYFKVKLSSSLGTRKRELLVPRLSRLNLDKMRVIYPGPADGKFVNSRSSLNDRFSQAHKSAQRFQS

SEQ ID NO: 208580 - protein, 68 aa, Zea mays
  unsure (1)..(68): unsure at all Xaa locations
  Clone ID: MRT4577_121818C.1.pep
RPXPNTAQDPLSLYLPLAAAPARPLRQPPGPPVRRAPPRHRRRREAAGLTKWVSCGGGYPSAGAASRA

SEQ ID NO: 208581 - protein, 112 aa, Zea mays
  unsure (1)..(112): unsure at all Xaa locations
  Clone ID: MRT4577_121819C.1.pep
WSTTLSSELLALMMRGHPVLSMVAEXDILFDWGGTMNGSYGTAYVCTSYRLLLSFYTEYPYYASKVTVDTSYFHPNGDXTGTSCQYILQESALRYTTKSSWHAQTGWRARQQ

SEQ ID NO: 208582 - protein, 101 aa, Zea mays
  Clone ID: MRT4577_12181C.1.pep
SIRVLIPGTVRYVLPLVQKLGEGPFFKKDSKAVSYIANNCKNPHLMQVRENLVHLDSKKKIVLKSTHRGGVRFGKKKKKKKKKKKKTKRKTGRENGKATQR

SEQ ID NO: 208583 - protein, 147 aa, Zea mays
  unsure (1)..(147): unsure at all Xaa locations
  Clone ID: MRT4577_121820C.1.pep
GGGGXGGGPEGGRGKGACQKPNGGXTQKKAKGGXKXGEGQKEGRRKGQPQGRRGGRHKRGAGFRGKGAQRKXGGQRQPPGQGGXERGDNKXAGGGRKTGHQAGGPPTGPQGPAGEGRGKSHQKGQRKKQKKHRGQGKGAKAARYSLH

SEQ ID NO: 208584 - protein, 178 aa, Zea mays
  unsure (1)..(178): unsure at all Xaa locations
  Clone ID: MRT4577_121821C.1.pep
SADVASTFMGTPLADPXPXNGRIXVDRIGFGKRDKGNPALKKRITTSTXCDLSLWFPGAIKPNYLHRSMDADYXFNTRYCLGXKPVQYLHXELNSLDHNLAKNEAYCMINTRNENSRIKSNPXQPYNKAYGLQXRMRKSELIHXRWTMLDTLCTLFVXRITWVTWIHAXQVELVDRCC

SEQ ID NO: 208585 - protein, 47 aa, Zea mays
  Clone ID: MRT4577_121822C.1.pep
KATLSRGSWEVPGFTKLNYGFGGEMGWRPAKHNEHNTKAPTDSRRSV

SEQ ID NO: 208586 - protein, 155 aa, Zea mays
  Clone ID: MRT4577_121823C.1.pep
TSHEHIAASSKRLIMWYLFLTWDLRFQVPTCSSGNTCPHAAWGGPDADSARVPPRHWPWVAASTGDNGNHQWMEILHRVTRSRAGVPAHLQSHDTRSRHLFRYACTAPIRGQERATTSNIQEHWWSYSRTGAKVSLHAPSRLAHTVHFFFFFSRP

SEQ ID NO: 208587 - protein, 201 aa, Zea mays
  unsure (1)..(201): unsure at all Xaa locations
  Clone ID: MRT4577_121824C.1.pep
IILLPLTXLSKKHIIXINTTTHSLIISIIPLLFFNQINNNLFSCSPTFSSDPLTTPLLILTTXLLPLTIMASQRHLSSEPLSRKKLYLSILISLQISLIITFTATELIIFYIFFETTLIPTLAIITRXGNQPERLNAGTYFLFYTLVGSLPLLIAXIXTHNXLGSXNXLYSXLNAXXYXTPEAXIEYXLAYXMXFXVKIXL

SEQ ID NO: 208588 - protein, 211 aa, Zea mays
  Clone ID: MRT4577_121825C.1.pep
MALAGITNQDLLDAQVELWHSTFAYIKSMALKSALDLGLADAIYHHGGSATLPQIVDRVTLHPSKTLHLRRLMRVLATTGVFSVQHPSPLGDDSSSASDSEPVYKLTAVSALLVGPRRSHVPLAAFVVDPALVTPFFELGKWLQRELPGPCIFEHAHGQTIWEHANGDAAFNALLNDGMLSDSHFIMDIASKECADVFQGISSLVDVGGGL

SEQ ID NO: 208589 - protein, 83 aa, Zea mays
  Clone ID: MRT4577_121826C.1.pep
FQCPFAGPIAKVVRATGVVVASPSRGGREGNGARLSVIRVGGDAHRRRVPRSNGGHKGHVIYIRGRGDALPWPGMSKTTASSA

SEQ ID NO: 208590 - protein, 46 aa, Zea mays
  unsure (1)..(46): unsure at all Xaa locations
  Clone ID: MRT4577_121827C.1.pep
SLNEVNYTCGIYQCMYILWELTVRKFWVKFKCFNLDKKKXXRAAXI

SEQ ID NO: 208591 - protein, 116 aa, Zea mays
  Clone ID: MRT4577_121829C.1.pep
RRMNRYGLLAEGQNKLDYVLALTAENFLARRLQTLVFKAGMAKSIHHARVLIKQRHIRVGRQIVNVPSFMVRVESEKHIDFSLSSPFGGGPPGRVKRKNLKKASGGGGDAGDEDEE

SEQ ID NO: 208592 - protein, 161 aa, Zea mays
  unsure (1)..(161): unsure at all Xaa locations
  Clone ID: MRT4577_12182C.1.pep
DREREKEWERXRERDMGRSGDREREKEREREKEREREREREQEQEHEREKDKDRERDRERERERDRQKDRERDKKDYDSKHERYEDGGSRKSGSKTSRAEEDAYLYRRDTDVNEISAKGKYNNPDMQADKHSRRKDDSEDTDKWPTDNRDSYDRKTLSRYE

SEQ ID NO: 208593 - protein, 104 aa, Zea mays
  Clone ID: MRT4577_121830C.1.pep
SQPRLVFPNPSVVPPPCPLPLFLHSLAIEAAARGQLDVVALSPPAWSAHGRWLHSPHAPSSLALVVAAQPGVASQPTVAYSQPTRLTTRLAWTSGTSCRRSRPW

SEQ ID NO: 208594 - protein, 66 aa, Zea mays
  Clone ID: MRT4577_121832C.1.pep
KGSIRSDGLLIIAITTYFLSLHISSVKLNANRLVIGTLRRFDQFMNLVINNTVDVSGNTHPYGMCY

SEQ ID NO: 208595 - protein, 257 aa, Zea mays
  unsure (1)..(257): unsure at all Xaa locations
  Clone ID: MRT4577_121833C.1.pep
METASFLSVALALAALVPVSLLLVNRLLYGKLPPGPRRRPVVGNLFDVQPVRCRCYQEWARRYGPIMTVWLGTSPTVVVSTSELAKEVLKTHDQQLADRCRDRSTESFSRGGQDLIWADYGPHYIKVRKLCNLELFTQRRLEALSXIREDEVXGMVESVYKAXTAPGSAGKNTMPSPSRGKYNECLCCKQKLGANAILAVSLAVSKAGAMVKKIPLYQHIANLAGNKTLVLPVPAFNEINGGSQCWKQACHAGVHEP

SEQ ID NO: 208596 - protein, 73 aa, Zea mays
  unsure (1)..(73): unsure at all Xaa locations
  Clone ID: MRT4577_121834C.1.pep
TQECDPIERVRKLMLVHKLAPAQXVKNMENELREXVHFAISTAKKCPQPDPSKLFSDVYVKVTGLEXFGVDRK

SEQ ID NO: 208597 - protein, 526 aa, Zea mays
  unsure (1)..(526): unsure at all Xaa locations
  Clone ID: MRT4577_121835C.1.pep
METASFLSVSQPAMETASFLSVALALAALVPVSLLLVNRLLYGKLPPGPRRRPVVGNLFDVQPVRCRCYQEWARRYGPIMTVWLGTSPTVVVSTSELAKEVLKTHDQQLADRCRDRSTESFSRGGQDLIWADYGPHYIKVRKLCNLELFTQRRLEALRPIREDEVTAMVESVYKAVTAPGSAGKPLVVKNHLSMVAFNNITRLAFGKRFVDAAGELDEQGREFKGIVHNGIKIGASLSIAQHIPWLRWLXPVDEQAFKAHGERRDRLTVKIMEEHARALKQRGAQQHFVDALFTLRDKYDLSDDTVIGLLWDMITAGTDTTVISVEWAMAELLRNPRVQEKLQEELDRVVGRDRVLSETDFPNLPYLQAVVKESLRLHPPTPLMLPHRASASVKIAGYDIPKGANVVVNVWAVARDPEVWDSPLEFRPERFLRENIDIKGADFRVLPFGAGRRVCPGAQLGINLVASMIGHMLHHFTWTLPSGTCPEDVSMMESPGLVTFMATPLQAVATPRLDKEELYRRVPSDV

SEQ ID NO: 208598 - protein, 98 aa, Zea mays
  Clone ID: MRT4577_121836C.1.pep
RALLPPLYQSPSPPTPALLFLETETEREAWRLLRRAVVSYCGEPVGTVAAENPECMEMLNYDQVFIRDFVPSVLAFLMRGETEIVRNFLLHTLQLQDF

SEQ ID NO: 208599 - protein, 70 aa, Zea mays
  Clone ID: MRT4577_121837C.1.pep
GKAFSRDKGFSPAPPIKVHILRGWTLGQVVFLTKTSWPFKSFFFKFSAPPSKLFQGSFKFAPSPVRGVFS

SEQ ID NO: 208600 - protein, 144 aa, Zea mays
  Clone ID: MRT4577_121838C.1.pep
RTSAEAETPHSLILPPVSFSPRAAVSGNLPFFDRVLYPDSFPLETPPSKEEDAAARQTDEAVAPAVPLREETETEREAWRLLRRAVVSYCGEPVGTVAAENPECMEMLNYDQVFIRDFVPSVLAFLMRGDLVMASRHFTSRDVA

SEQ ID NO: 208601 - protein, 220 aa, Zea mays
  Clone ID: MRT4577_121839C.1.pep
MTLYRRVLLLRRLSHLHPSPVPAICSSPPPTLAGLLTPMGRRHFAFSSAEEAAAERRRRKRRLRIEPPINALRRGPPPPRDPNAPRLPDTTSALTGPRLSLHNRVQSLIRSGDLDGASAAARAAVSSRVRPTVFTCNAVAAAMVRAARHDDAVVLFDFFFRRSNIVPNIVSYNTLILAHCEADRVDTALQVYQDMLASAPFSPSAVTFRHLTKGLVAAGR

SEQ ID NO: 208602 - protein, 85 aa, Zea mays
  Clone ID: MRT4577_12183C.1.pep
VSRRRLALALAAAASSVRTGGCSRWRRTRRRRRNRRSSGVRRGREQAHVRALRRERHRAQRALSDYDQGVLGHGRRSSQRRSRQP

SEQ ID NO: 208603 - protein, 142 aa, Zea mays
  Clone ID: MRT4577_121840C.1.pep
RAPPPTLIPVPVPSDPRAAVSGNLPFFDRVLYPDSFPLETPPSKEEDAAARQTDEAVAPAVPLREETETEREAWRLLRRAVVCYCGEPVGTVAAENPECMEMLNYDQVFIRDFVPSVLAFLMRGETEIVRNFLLHTLQLQDF

SEQ ID NO: 208604 - protein, 130 aa, Zea mays
  unsure (1)..(130): unsure at all Xaa locations
  Clone ID: MRT4577_121841C.1.pep
HFVFPSSQATSREVKCLDAITRSPVYAQFSETLNGLSTICAXKSYDRMANINGRSMDNNIRFTLVNMGANRWLAIRLETLGGIMIWFTATFVVMQNQQADNQKAFASTMGLLLTYTLNITNLLTAVLLEF

SEQ ID NO: 208605 - protein, 175 aa, Zea mays
  unsure (1)..(175): unsure at all Xaa locations
  Clone ID: MRT4577_121842C.1.pep
PHLVGGGGDLPCALSTAXDPTQVYRSRAXVGKPVNVLGLSMVLGVGEGGLVCQAASSISVDRVPALDKRMLMNLLLLGAFSLPTVGMVVPYGAFFVPAGSGNAGGGTYARDMLGNDIAVVAWLTTHGPNGRSLARGPLRDPPDLGVARVFYLATYXGINAVCTHLGXCFVPWDGS

SEQ ID NO: 208606 - protein, 380 aa, Zea mays
  unsure (1)..(380): unsure at all Xaa locations
  Clone ID: MRT4577_121843C.1.pep
MNGQTPMGLAAVAVRPCCSRLISSASAAAASKTAAGTATSLFPRLPHPXYPPYGRRLPFLVSAASQSQAGPGTPPTPVPAPVPSDPRAAVSGNLPFFDRVLFPDSFPLETPPSKEEEDAAALQTDEAVAPAVPLREETETEREAWRLLRRAVVSYCGEPVGTVAAEDPECTEMLNYDQVFIRDFVPSALAFLMRGETEIVRNFLLHTLQLQSWEKTVDCYSPGQGLMPASFKIRTVPLDENNEGFEEVLDPDFGEAAIGRVAPVDSGLWWIILLRAYCKITGDNALLERVDVQTGIQLILSLCLADGFDMFPTLLVTDGSCMIDRRMGIHGHPLEXQALFYSALRCSREMLGVNNGSKNLIRAINNRLSALSFHIREYYW

SEQ ID NO: 208607 - protein, 189 aa, Zea mays
  Clone ID: MRT4577_121844C.1.pep
LGAAAPPGSLVPDPPPPTPHRLPHPHHPPYGRCLPFLVSAASQSQAGPGTPPTLIPVPVPSDPRAAVSGNLPFFDRVLYPDSFPLETPPSKEEDAAARQTDEAVAPAVPLREETETEREAWRLLRRAVVSYCGEPVGTVAAENPECMEMLNYDQVFIRDFVPSVLAFLMRGETEIVRNFLLHTLQLQDF

SEQ ID NO: 208608 - protein, 143 aa, Zea mays
  Clone ID: MRT4577_121845C.1.pep
GPGTPPTLIPVPVPSDPRAAVSGNLPFFDRVLYPDSFPLETPPSKEEDAAARQTDEAVAPAVPLREETETEREAWRLLRRAVVSYCGEPVGTVAAENPECMEMLNYDQVFIRDFVPSVLAFLMRGETEIVRNFLLHTLQLQVS

SEQ ID NO: 208609 - protein, 413 aa, Zea mays
  unsure (1)..(413): unsure at all Xaa locations
  Clone ID: MRT4577_121846C.1.pep
SWEKXVDCYSPGQGLMPATFKIRTVPLDENNEGFEEVLDPDFGEVAIGRVAPVDSGLWWIILLRAYCKIIGDNALLEKSHASAGIQLILSLCLADGFDMFPTLLVTDGSCMIDRRMGIHGHPLEIQALFYSALRCSREMLVVNDGSKNLIRAINNRLSALSFHIREYYWVDMKKINEIYRYKTEEYSHDATNKFNIYPEQIPSWLVDWIPEKGGYLIGNLQPAHMDFRFFSLGNLWAIASSLTTPKQAEGILSLIEEKWDDLVANMPLKICFPAMEDDEWRIITGSDPKNTPWSYHNGGSWPTLLWQFTLACIKMGRPELARRAITVAEERLSDDKWPEYYDTRSGRFIGKQSRSYQTWTIAGFLTSKMLLENPELASILTCDEDLELLEGCACCLSKKRTRCSRRAAKSHAA

SEQ ID NO: 208610 - protein, 53 aa, Zea mays
  Clone ID: MRT4577_121847C.1.pep
TNTDPTQDTNRRYLLNPRMERAPNNAGTLKVETPQGLLAPTETGHKGGGALLL

SEQ ID NO: 208611 - protein, 50 aa, Zea mays
  Clone ID: MRT4577_121848C.1.pep
RLGGASPLACPPWECRRLSPTSGPRGRCRSPALGPHRRSPSGSGVAAIAP

SEQ ID NO: 208612 - protein, 174 aa, Zea mays
  Clone ID: MRT4577_121849C.1.pep
MAAAWGQKALGALPQLVKSLRSDPVSGSARHRRLPSLRRTFSLYDQINLIDSVPEDELRFQSYDDTGFKINNVKYEGSVLIVENKIMTWAPKTFSEITPESLSIFKVVHPIPEIFILGCGRHVQLVSPELRMFIRSTGMKLEAVDSRNAASTYNILNEEGRPVAAAVLPYGVTC

SEQ ID NO: 208613 - protein, 76 aa, Zea mays
  Clone ID: MRT4577_12184C.1.pep
MAWHGSTGLGHLWERDQDHMVYEIFNGAQMHFRVQDLQIGMTGFWITNKAWVAQKMQGTLLQVLPFWTGAFAPGIF

SEQ ID NO: 208614 - protein, 116 aa, Zea mays
  Clone ID: MRT4577_121850C.1.pep
LGAAAPPGSLVPDPPPPTPHRSSSVTPIAPPAPAVPLREETETEREAWRLLRRAVVSYCGEPVGTVAAENPECMEMLNYDQVFIRDFVPSVLAFLMRGETEIVRNFLLHTLQLQDF

SEQ ID NO: 208615 - protein, 177 aa, Zea mays
  Clone ID: MRT4577_121851C.1.pep
MGAMAAARGQKALVALPQLVKSLRSDPVSGSARLRHLPSLRRTFSLYDQINLIDSVPEDELRFQSYDDTGFKINNIKYEGSLLIVENKIMTWAPKTFSEITAESLSIFKVVHPIPEILILGCGRHIQPVSPELRKFIRSTGMKLEAVDSRNAASTYNILNEEGRPVAAAVLPYGVAC

SEQ ID NO: 208616 - protein, 60 aa, Zea mays
  Clone ID: MRT4577_121852C.1.pep
ITPWNTGYKKCASCELKYHIIATIIFYNQKTCRKRRYLKLKRNLCSCSWSPRVLCACYHC

SEQ ID NO: 208617 - protein, 54 aa, Zea mays
  Clone ID: MRT4577_121853C.1.pep
LSHCQSRRLLSCLARGTPHVEALTRADSELYLLHTSSRSMAVTNILQCTPHSTA

SEQ ID NO: 208618 - protein, 86 aa, Zea mays
  Clone ID: MRT4577_121854C.1.pep
ILSVPVLCVAYNTNLVHVKIAPYYIYSIPFSCRSSWLDSEQQAVPPCRTHVHWCFVVDMSSDSFHGCSSTLVFKTTPLVEEKYCMV

SEQ ID NO: 208619 - protein, 239 aa, Zea mays
  Clone ID: MRT4577_121855C.1.pep
MGSKASFRVTLLLLLLAAAWGPAAQADDAAELPDHIAITLKEQVSSTKIPVRLKSGSPLCSACENFTGKAVSYISEKQTQDKVMGFLHDACSQSFSFEQKCDELMDSYATLLFAKITEIKPEAFCKQYGLCRGTALFSGVTSDSTCVFCHHLLDEVMSKLKDPDAEFEIIQILIKECNKIEGHVQQCKRLVLQYIPLILVNGEKFLEKNDVCALVQACPATHKKTFSSALKEALLLSDA

SEQ ID NO: 208620 - protein, 44 aa, Zea mays
  Clone ID: MRT4577_121856C.1.pep
GLSSTRALLSIQQPHGVTPQKDHSSVPQGCTADDEAFGDIVAIP

SEQ ID NO: 208621 - protein, 241 aa, Zea mays
  Clone ID: MRT4577_121857C.1.pep
MGSKASFRVTLLLLLLAAAWGPAAQADDAGIAELPDHRAITLKEQVSSTKIPVRLKSGSPLCSACENFTGKAVSYISEKQTQDKVMGFLHDACSQSFSFEQKCDELMDSYATLLFAKITEIKPEAFCKQYGLCRGTALFSGVTSDSTCVFCHHLLDEVMSKLKDPDAEFEIIQILIKECNKIEGHVQQCKRLVLQYIPLILVNGEKFLEKNDVCALVQACPATHKKTFSSVLKGALLLSDA

SEQ ID NO: 208622 - protein, 405 aa, Zea mays
  Clone ID: MRT4577_121858C.1.pep
EPQKCKWTKKARKKKKTKNEQNGLAALVEEISLSNSPKHRAAAGEILRIGNHNIPSRVFTFRELVDATNSFCPENLLGEGGFGRVYKGCIPDTMEVIAVKQLDKDGLQGNREFLVEVLMLSLLHHPNLVTLVGYSTDCDQRILVYEYMSLGSLQDHLLDLSPKSQPLSWHTRMKIAVGAARGIEYLHEVANPPVIYRDLKASNILLDASFNAKLSDFGLAKLGPSGDNTHVSTRVMGTYGYCAPEYAMTGKLTKTSDIYSFGVVLLELITGRRAIDTTKPTREQILVHWAAPFFRDKRKFVKMADPLLDMKFPLKGLYQALAISSMCLQEEASSRPLISDVVTALTFLADPNYDPPDDIKDPLPITVPNLDMETTGQNGTEGGKEQLQQNEGESRHSTKNEEEGS

SEQ ID NO: 208623 - protein, 235 aa, Zea mays
  Clone ID: MRT4577_121859C.1.pep
MGSKASFCVTLLLLLAAAWGPADDAAELPDHRAITLKEQVSSTEIPVRLKSGSPLCSACEDFTGKAVSYISEKQTQDKVMGFLHDACSQSFSFEQKCDELMDSYATLLFAKITEIKPEAFCKRYGLCRGTALFSGVTSDSTCVFCHHLLDEVMSKLKDPDAEFEIIQILIKECNKIEGHVQQCKRLVLQYIPLILVNGEKFLEKNDVCALVQACPATHKRTFSSALKEALLLSDA

SEQ ID NO: 208624 - protein, 89 aa, Zea mays
  Clone ID: MRT4577_12185C.1.pep
VVPLVVARSSLVWSQADRARQSVQTRERRESKQLIVRHGVHHRGSMAPQVHATRICCDRVCSRGIQQQEQVHGCIMVDSSKESAVVSQC

SEQ ID NO: 208625 - protein, 77 aa, Zea mays
  Clone ID: MRT4577_121860C.1.pep
LCAHRHDDIYALVGCQLAHDLTDCGVLRCLADSLAALSCRGVGWHTAGLDRVNCSNSFGSRCRISNRCFTIYMRTPE

SEQ ID NO: 208626 - protein, 58 aa, Zea mays
  Clone ID: MRT4577_121861C.1.pep
SLCSGRPLILFFHTKHLMRQITDERRHWFSYIHGSHYRVAKAILNPSNMYLHCYIITS

SEQ ID NO: 208627 - protein, 273 aa, Zea mays
  unsure (1)..(273): unsure at all Xaa locations
  Clone ID: MRT4577_121862C.1.pep
MGSKASFRVTLLLLLLVAAAAAWGPAAQADDAAELPDHRAITLKEQTSSTEIPVRLKSGSPLCSACEDFTGKAVSYISEKQTQDKVMGFLHDACSQSFSFEQKCDELMDSYATLLFAKITEIKPEAFCKQYGLCRGTALFSGVTSDSTCVFCHHLLDEVMSKLKDPDAEFEIIQILTKECNKIEGHVQQCKRLVLQYIPLILVNGEKFLEKXDVCALAQACPASSRKTFCSMLKKNFFSYLCFQPPPFFFFFFGGPPFYTLPHFFGVFIIFFF

SEQ ID NO: 208628 - protein, 81 aa, Zea mays
  Clone ID: MRT4577_121863C.1.pep
GLFDCTSILYSPHFLRSRTKEVCTNYNLTGSMITVKNLSSQKTEIRKKFPCKRLGGSTPQCSPGGGQPAWARYGGFMFPTG

SEQ ID NO: 208629 - protein, 171 aa, Zea mays
  Clone ID: MRT4577_121864C.1.pep
MGSKASFRVTLLLLLAAAAWGPAAQADDAAELPDHRAITLKEQTSSTEIPVRLKSGSPLCSACEDFTGKAVSYISEKQTQDKVMGFLHDACSQSFSFEQKCDELMDSYATLLFAKITEIKPEAFCKQYGLCRGTALFSGVSSDSTCVFCHHLLDEVMVKLKDSDAEFEIFR

SEQ ID NO: 208630 - protein, 81 aa, Zea mays
  Clone ID: MRT4577_121865C.1.pep
KHGLGWNCHHGSKKTNCTYIYCLLNLKWTPSVLFRAWASNKTLDTLGGAHRHKTVFKWRGNTKKRLPGWLGELCVTAGKIS

SEQ ID NO: 208631 - protein, 241 aa, Zea mays
  Clone ID: MRT4577_121866C.1.pep
MGSKASFRVTLLLLLLAAAWGPAAQADDAGIAELPDHRAITLKEQVSSTKIPVRLKSGSPLCSACENFTGKAVSYISEKQTQDKVMGFLHDACSQSFSFEQKCDELMDSYATLLFAKITEIKPEAFCKQYGLCRGTALFSGVTSDSTCVFCHHLLDEVMSKLKDPDAEFEIIQILIKECNKIEGHVQQCKRLVLQYIPLILVNGEKFLEKNDVCALVQACPATHKKTFSSALKEALLLSNA

SEQ ID NO: 208632 - protein, 46 aa, Zea mays
  Clone ID: MRT4577_121867C.1.pep
DAKTGLLSEQTEEQLINRSWRCWLDMADWPYYRMTERPFRVYLQEG

SEQ ID NO: 208633 - protein, 79 aa, Zea mays
  unsure (1)..(79): unsure at all Xaa locations
  Clone ID: MRT4577_121868C.1.pep
TGLTDEKIRSNLNQRKCVLKALDDPLTSVVPCWVRQEDDPEGXYLDMLDCGHDCETACVKQWLVITDLCXICKNTGLDT

SEQ ID NO: 208634 - protein, 69 aa, Zea mays
  Clone ID: MRT4577_121869C.1.pep
EKKPWKGPIILVLKRAPNGQSIKGIKLAWHSPQIFARTQISYFFGPQKAFGSLRNPFMFMPLDPLVNGS

SEQ ID NO: 208635 - protein, 107 aa, Zea mays
  Clone ID: MRT4577_12186C.1.pep
SAAARDLASTKREEAACHMLSEQTAASTSSSGGGVERQDRWLQPVAENEEEEEEFRDIHALSPPPSQPSSYRRTPTASRGGPSHAGSGTRASAPSGATPCPASPSRL

SEQ ID NO: 208636 - protein, 121 aa, Zea mays
  unsure (1)..(121): unsure at all Xaa locations
  Clone ID: MRT4577_121870C.1.pep
LVGTNRAYLDRSVVIVVGLYDECDFAVKWHVQSYLRPGDAFVLVQVRSTSGLYGADWGSMPVYXHDEDYAGEDADGGAEGGAYVEELFMIRVEDYGALTCTKAQDLARPMVDDQIQYKIHV

SEQ ID NO: 208637 - protein, 71 aa, Zea mays
  Clone ID: MRT4577_121871C.1.pep
RIRGCNRAPPMGSTPHSRLPSLHGQSLSVAETPPIQYPFMIYKARHYFLCPGQLSSSLGPIIKGPVRPGRR

SEQ ID NO: 208638 - protein, 37 aa, Zea mays
  Clone ID: MRT4577_121872C.1.pep
SFGFNEKKKKKKKKKKKKKKKKKKKKKKQKKKKKKKK

SEQ ID NO: 208639 - protein, 65 aa, Zea mays
  Clone ID: MRT4577_121873C.1.pep
GRNHPKVPLRFNQTKDTRPLLRNPLNGRGKNGPRWGPRKKNPFYLTPTRGSNKNGGSQPPVKLEN

SEQ ID NO: 208640 - protein, 108 aa, Zea mays
  unsure (1)..(108): unsure at all Xaa locations
  Clone ID: MRT4577_121874C.1.pep
RCIDKAGGIMIILXKTPYNKMDTEMGIVWKANIEKMYSDLAEIEVGFFPPEVEAKIKKGLDEVRAAKRDFRREGRRALAKQSQLEASSVGDDQTSEVIDTKQVFAAKV

SEQ ID NO: 208641 - protein, 89 aa, Zea mays
  unsure (1)..(89): unsure at all Xaa locations
  Clone ID: MRT4577_121875C.1.pep
MWRSKTNDYKPAKSRRLAHKEEKLRKSNDEQTTKPGTATEFHNIQTGAGELLVTYEGSRLAIKDLRRLMDTCHKEDMTGAXRPLFCIVK

SEQ ID NO: 208642 - protein, 334 aa, Zea mays
  Clone ID: MRT4577_121876C.1.pep
MVSSWPLNYWRTAPVFRTPLINQHASMQEAKVNDAGPSSNLNMPAMYGHTEDSLLSADLERDWIIEENPRTETTLFGDSSSEILDEPQMVMSAEPFHAPAYLNLEAGNSSPTVHVELTNSDEKLANLAEDKNRRLSDASQLRTGSNPMVDVELTNFDEKLANLAEGKNQRLSDASQLRTGSNPMVDVELTNFDEKLANLAEDKNQRLSDANQLRTGRLGEELVEKYLAKQLGSNNVRWVNNRIETGLPYDIVITHPEGFTEYVEVKTTVSSRKDWFDVSAREWQFALEKGDSFSIARVILGTKKASIEMLKNPHKLCKQKALRLALLISRSAAT

SEQ ID NO: 208643 - protein, 66 aa, Zea mays
  Clone ID: MRT4577_121877C.1.pep
MAHRVLLLLSLASAAAVAAAVDAEDPLIRQVVPGGDDNDLELDAESHFLSFSQRLGGGTPSSSLVA

SEQ ID NO: 208644 - protein, 77 aa, Zea mays
  unsure (1)..(77): unsure at all Xaa locations
  Clone ID: MRT4577_121878C.1.pep
GMELLVCYADEGVYVNTYGRIXQGCSSTVGXCYISSIYSIQSDNGLGREGHRDPICGNWSIGWCVHAQKGSKTKILV

SEQ ID NO: 208645 - protein, 101 aa, Zea mays
  Clone ID: MRT4577_121879C.1.pep
NSQLLSGDRARPALSPGITTAQVRNFPATLPGLPRRHGSDQISPAYPRPKRPIQSGSPSPARIRRSPARVAGKEKYEVGASPGWPVGRRRGKATRKGTANR

SEQ ID NO: 208646 - protein, 56 aa, Zea mays
  Clone ID: MRT4577_12187C.1.pep
MAENSLVIVGKGSLGAVSLPTERTDVCLLPPAADPHGSPPRARRYDDGWLGGGLSA

SEQ ID NO: 208647 - protein, 76 aa, Zea mays
  Clone ID: MRT4577_121880C.1.pep
PTRPPTRPPTRSKKKKKKKKKEKFKKKKKKKKKKKKKKNNKKINKKKKKGVLFKESKFTYPCFQNHNFFIMPPKFN

SEQ ID NO: 208648 - protein, 127 aa, Zea mays
  Clone ID: MRT4577_121881C.1.pep
QKFQRDILLALPSFGVFVRYPRIGRFLYRSRWHRLLALRRQQEESFLPLVAAIRNRREASRGNTTLTTYVESLLDLRIHEDGGRAVTDGELVSLISEFLGAGTESTAAALEWTMANLVKSPDLQQKL

SEQ ID NO: 208649 - protein, 746 aa, Zea mays
  unsure (1)..(746): unsure at all Xaa locations
  Clone ID: MRT4577_121882C.1.pep
MSESESSNTGFAAALELWQENQLRILVLISLATQCFLFVFAPLRQHRIPGPLRLSIWLAYLGSDAVAIYALATLFNSHRCDTGXHRHRPRXVELLWAPIMLVHLGGQDSIPAYNIEDNELWRRHVVTAVSQVAAAIYVFVKSWPXHGGDXAHLVVDQDTRNRINAFMAHKSEMAAYGRILGPALLLFFSGITKCVCKPWDLKRVSVNSLVDSSSSGSSEEKADAGESEMDSLQEYVGAAAQYFESVGHEEEEDDGGGGDDDDDDTCKAEEVWKPYNLCVDLAPPYSGRLSCLKHLARSPADEAHRLVKSSLSATFHQLYTKESLKLHDMSHIVLTDNRALNRLKLVTSARGLRTVAATTLLGAIAAFYGEGDVDQDPTDVTITYALLWSAFVMECVLPTVIHHTFGWIERLFTGHRTWPDQVAQYSLMGYVARGRSHSWLMKAVACLGCGDLVDQLWTMKPRMGASSREITGLVHAHVAGAWMEGHIAGADSFRAFNDYRGQWTLGNCREIGVGVSSMVVLMSSVSRPFDESVLVWHLATDFCFHLLQVQGDPSRATATATATARRCIEMSNYMAYLLFVKPEMLMPGARRKLFRDACRELVGLLEEDRPGAPXHGAKRDLAHKVVQLLKRDGGDVLGXQQASASAXGVVRRAWCVAEKLVDSHSGDEEKMWTVIQGVWVEMLCFSASRCKGYLHAKGLGTGGEYLSYVWLLLLYMGMETLAEKMQRTELYEGSTAAALSISGQNV

SEQ ID NO: 208650 - protein, 125 aa, Zea mays
  unsure (1)..(125): unsure at all Xaa locations
  Clone ID: MRT4577_121883C.1.pep
XXXXKSTNNXTKXKKXRXXXXXXKEKPEKKXXXXQXXXXXDXTXXGGXXXNXHTQXXGAPRPEREQXQQXXKDQXXHKRRXKXQKQXXQXXKKGXXXKKXKXAXKKTTXKQPKXDXETTXKTXHE

SEQ ID NO: 208651 - protein, 77 aa, Zea mays
  Clone ID: MRT4577_121884C.1.pep
KLSTNKTGYMLRLQPTGVQLSTEPEHGKKKCPTTALPFDPWIPGIHPEMKWSRKPASIPGSTIKLPGQQLCQVDSMG

SEQ ID NO: 208652 - protein, 66 aa, Zea mays
  unsure (1)..(66): unsure at all Xaa locations
  Clone ID: MRT4577_121885C.1.pep
MVKICCIIAGYANAPTMRXIALKXPDIEEDEEDISKPRIEEWDSDFFPTPPPGLDDDEKQSKGTNL

SEQ ID NO: 208653 - protein, 109 aa, Zea mays
  unsure (1)..(109): unsure at all Xaa locations
  Clone ID: MRT4577_121886C.1.pep
MNELLRLDAXVVADGXVKAQRRMQVKRVQKYVETLDAVAARNXXTVRKSGAKPAPPPPQQQQQARQARWEMLDLLSSLPSTSSASSTTTVSSTASSGAPPTNRLDWMLF

SEQ ID NO: 208654 - protein, 101 aa, Zea mays
  Clone ID: MRT4577_121887C.1.pep
ASPNKSLLKLNPFQHLLISFLFILIPNKTILPSIIQIFILHLYFLLLPYFKFIFLRPSLPSSFFLCKTSKLTTFHMMLFCITLCYSSFFSSPSDYLECTST

SEQ ID NO: 208655 - protein, 114 aa, Zea mays
  Clone ID: MRT4577_121888C.1.pep
IELAGTVPCRAMQFVAKLGSPCPIMEATRFLQGVQFLAHKHRICSSALRLPLSPTSGLTAFAPVAGRRRAALHSPARQNSIQSRRLVGGAPEDAVELTVVVDEAEDVDGSAHAS

SEQ ID NO: 208656 - protein, 48 aa, Zea mays
  Clone ID: MRT4577_121889C.1.pep
PLDPRVRQPYDTFYIFWTSYYTMCNWLNLYSNSPAPISYSRFISSITT

SEQ ID NO: 208657 - protein, 128 aa, Zea mays
  Clone ID: MRT4577_12188C.1.pep
MMRSTLLLENCCPCLSQMSLIPVTVLQRRMVYRGVRAVQQGLIQWSTLPSSLATREDLEALRQCFPLAPAWGQASAQGGGNVSTQETTPTVQAPTAVIADRGTDEVQTSKPKRRVRPSSRVMGPEWVH

SEQ ID NO: 208658 - protein, 94 aa, Zea mays
  Clone ID: MRT4577_121890C.1.pep
VRRSSRPVIQNYLLLLAHHLPFSISTHLTPVVQRQSSTQPCPPCTEQPEHHTNGSDATTHTIARRAHGMNEEPLMGASSRQSRLMGPRLLQDTR

SEQ ID NO: 208659 - protein, 125 aa, Zea mays
  Clone ID: MRT4577_121891C.1.pep
APREKEPGAGPPRPRRRHLGLPACAPLAPSWIATSAAALIRCPTGTAAAAAAIYYRRRSDESVEVERSGTKPEQGGHGHGQWKEAPSQTSQPGPGELWMDMIYGKSLAAGGTNSLVARSRIVLVG

SEQ ID NO: 208660 - protein, 158 aa, Zea mays
  unsure (1)..(158): unsure at all Xaa locations
  Clone ID: MRT4577_121892C.1.pep
RATALLSTDIANRAVEPLVPYASSPTFSACVRRRLPDFLHSPNLKYSCLGYYYLISHAVYLVTHSPVIELECRAELCSLSRDELXQGDGGRSPYDLVDAKLALLDVLFFTISAYIMSRTRSGYLIDFSCYNAVDKIKVSKEEFIDLERKYGKLHQDKL

SEQ ID NO: 208661 - protein, 796 aa, Zea mays
  unsure (1)..(796): unsure at all Xaa locations
  Clone ID: MRT4577_121893C.1.pep
MAAPPQPHPQAAEERAAPAVPLPTAPAGPRPYDVAVAAAELRPVDCNLAALCDHVQAEGFGLGAFSDLVVEAAGATYRLHRLILSRSAYFRNMLHGPWREAGAPTVVLHIDDANVDSEAIAIALAYLYGQAPKLNDNNAFRVLAAASFLDLQDLCTICTDFIISELWTSNFLQYQLFAESQDYGSHGERVRNACWGYLCQSATLELREVLPKLSSQTLHALLTSDELWVPNEEKRFELALFTLLAKVTTCEIQVSGNETSLPSADRSMRKGKAPMNESGEELLMDSELKNLKLHDNLGNEIPHNIIAISDMNGEAPKRMEFDCSTGGPSGESTSYQFNENNWISSEQTANNYFSRTFSSGVVPTEWGRPNAPLWGGRVVGRRQIRYIRGSSCLSTDEYNAFMNIFERGSLLYCNMSFDALLSVRKQLEEFGFPCKAVNDSLWLQMLLCHRVQAIVADTCRNCCLMNSSCACKQAYVSSHTHYRQEHDRSSASDNIGNVYLADGQGDGNGVLGPVRVNVRGAVDGLAGIGRGNSNVPGAAWAPTRXVFSRVPYGLGSRNGQQFAIDESEPRIDRNGDISADGLTALVNLSQENNAAHLQDQSLFETGMQTRYRSVPSVSTPGGSSVQMQESKEHEWETTKDATISLDMKTPLSHFPPFRFGVEFDDVHRLADGHVKHSTEVFYAGSLWKVSVQAFNDEDPHGRRTLGLFLHRRKAELLDPLRKAHLYVDPREKVTARYQLICPSKREVMVFGCLKQAGTLLPKAPKGWGWRTAILFDELADLLQGGALRIAAVVQLV

SEQ ID NO: 208662 - protein, 63 aa, Zea mays
  Clone ID: MRT4577_121894C.1.pep
THAYAGIYTFLFFVLQTFPEDHQNDNFTRLAGLILRFPTSYTLLNNDELDNTKDIAPDNFRLD

SEQ ID NO: 208663 - protein, 81 aa, Zea mays
  Clone ID: MRT4577_121895C.1.pep
DAWASADMLLTGHQPNRELIKRAGGFHYRSINLIAEPWPTGQFPAMENGQKGRALVFYYPNLKEALLAFREEGRTQNLNIW

SEQ ID NO: 208664 - protein, 488 aa, Zea mays
  unsure (1)..(488): unsure at all Xaa locations
  Clone ID: MRT4577_121896C.1.pep
MVKLPREWSLIVLPEGHQEKALHINXENNWISSEQTANNYFSRTSSSVVVPTEWGRPNAPLWGGRVVGRRQIRYIRGSSCLSTDEYNAFMNIFERGSLLYCNMSFDALLSVRKQLEEFGFPCKAVNDSLWLQMLLCHRVQAIVADTCRNCCLMNSSCACKQAYVSSHTHYRQEHDRSSASDNIGNVYLADGQGDGNGVLGPVRVNVRGAVDGLAGIGRGNSNVPGAAWAPTRYVFSRVPYGLGSRNGQQFAIDESEPRIDRNGDISADGLTALVNLSQENNAAHLQDQSLFETGMQTRYRSVPSVSTPGGSSVQMQESKEHELGSDWETTKDATISLDMKTPLSHFPPFRFGVEFEDVHRLADGQVKHSTEVFYAGSLWKVSVQPFNDEDPHGRRTLGLFLHRRKAELLDPLRKAHLYVDPREKVTARYQLICPSKREVMIFGSLKQAGTLLPKAPKGWGWRTAILFDELADLLQGGALRIAAVVQLV

SEQ ID NO: 208665 - protein, 74 aa, Zea mays
  Clone ID: MRT4577_121897C.1.pep
ESHLPRVSVTGNQEPTLGGVTCCHRLAEPPSGSGTSRAAKRGGAYETRTNCRREQRSTSTGRASDDSRPASRVP

SEQ ID NO: 208666 - protein, 46 aa, Zea mays
  unsure (1)..(46): unsure at all Xaa locations
  Clone ID: MRT4577_121898C.1.pep
PSVXKKKKKKKKKKKKKKKKKKKKKKKKKKKKKKKKKKKKKGGGGF

SEQ ID NO: 208667 - protein, 65 aa, Zea mays
  Clone ID: MRT4577_121899C.1.pep
SLGLGPPPWWWWCPWYVTPRSRYYARKEAPQCPWACSPRPRFWSLGLLLIGDRFLNYKNEKFLPH

SEQ ID NO: 208668 - protein, 76 aa, Zea mays
  Clone ID: MRT4577_12189C.1.pep
GLVRPGVRGDETSLALAIRLVPMAGLGKCGCQAGESGETRRPKAAFFFARGAPAGASNPSYLKMIMEAMPGLRERT

SEQ ID NO: 208669 - protein, 80 aa, Zea mays
  Clone ID: MRT4577_1218C.1.pep
FFFFFFFFFFFFFFKRAKRGRVNTTTQIITLQLTTLHFDLGTVKHFTLALPLIFRQITNLHYKEILFSMWAIATTTHNTQ

SEQ ID NO: 208670 - protein, 77 aa, Zea mays
  unsure (1)..(77): unsure at all Xaa locations
  Clone ID: MRT4577_121900C.1.pep
ILAEKGVVVLPDIYANSGGVVVSYFXEWVQNIQGFMWAEEKVDDELEKDMSSAFQHMKAMCKSLVLPKCVVTLELQV

SEQ ID NO: 208671 - protein, 48 aa, Zea mays
  Clone ID: MRT4577_121901C.1.pep
KKKKKKKKKKKKKKKKKKKKKKKKKNKKPKIKKKKKKNKVFSFPGGPF

SEQ ID NO: 208672 - protein, 45 aa, Zea mays
  Clone ID: MRT4577_121902C.1.pep
NVSRGCVNYTCDMEIWIQWVLSCVIGVYGTPDDMLRSVLLSNAGR

SEQ ID NO: 208673 - protein, 65 aa, Zea mays
  Clone ID: MRT4577_121903C.1.pep
LIRHRPDAIDNIFYTRESKIVGFGSEQLTREVYFITSECNLFYFSELLPLAYVVDSRREGSSSIT

SEQ ID NO: 208674 - protein, 72 aa, Zea mays
  Clone ID: MRT4577_121904C.1.pep
REGGDCLQQNCNARTNPPVLIRNDSHQGLSIYHLPQFLLCRKTKKKKLLRGHGFYLTPSISPCYTLGYKFSM

SEQ ID NO: 208675 - protein, 105 aa, Zea mays
  unsure (1)..(105): unsure at all Xaa locations
  Clone ID: MRT4577_121905C.1.pep
ILVEKGVVVLPDIYANSGGVVVSYFXSEFXKMPVRRCFIARLVPCSNLLSCAMLIXVQNIQGFMWAEEKVDDELEKDMSSAFQHMKAMCKSLVLPKCAVTLELRV

SEQ ID NO: 208676 - protein, 76 aa, Zea mays
  unsure (1)..(76): unsure at all Xaa locations
  Clone ID: MRT4577_121906C.1.pep
ILAEKGVVVLPDIYANSGGVVVSYFEWVQNIQGFMXAEEKXNDELEKDMSSAFQHMKAMCKSLVLPKCVVTLELRV

SEQ ID NO: 208677 - protein, 52 aa, Zea mays
  Clone ID: MRT4577_121907C.1.pep
VSLTDEQADVPEPAWSTIVGCSIRFPKGGISPVSIQVGRLSCSGLTYRYLVS

SEQ ID NO: 208678 - protein, 83 aa, Zea mays
  unsure (1)..(83): unsure at all Xaa locations
  Clone ID: MRT4577_121908C.1.pep
IILFTRILAEKGVVVLPDIYANSGGVVVSYFXEWVQNIQGFMWAEEKVDDELEKDMSSAFQHMKAMCKSLVLPKCVVTLELRV

SEQ ID NO: 208679 - protein, 76 aa, Zea mays
  Clone ID: MRT4577_121909C.1.pep
LDERPWDQNTSSLSLVSGYFVHSAINPAGPAYVWLQNFGLQADRNDHGGTGKSIEGQGYNSGLSGAPPLTSYRGNR

SEQ ID NO: 208680 - protein, 225 aa, Zea mays
  Clone ID: MRT4577_12190C.1.pep
YLICGLCVHFDIKFIFFIGRYSDVDLRTAKDGEYVKVTGVVTCGNLPLESSFQRVPRCVYTSTCLYEYRGWDSKAANATHRRFTWGLRSMERHAVDFYISDFQSGLRALVRTGSGARVSPYVDESVVIDINPDNKDMSPEFLRWLRGRNLSSDDRIMRLKEGYIKEGSTVSVMGVVQRNENVLMIVPPAEPISTGCQWAKCILPTSLDGLVLRCEDTSDLDVVPV

SEQ ID NO: 208681 - protein, 104 aa, Zea mays
  unsure (1)..(104): unsure at all Xaa locations
  Clone ID: MRT4577_121910C.1.pep
ILAEKGVVVLPDTYANSGGVVVSYFEWVQVKCLFVAASLLDCFLDLIYFLVPCXDRXNIQGFMWAEEKVNDELEKYMSSAFQHMKAMCKSLVLPKCAMTLELRV

SEQ ID NO: 208682 - protein, 76 aa, Zea mays
  unsure (1)..(76): unsure at all Xaa locations
  Clone ID: MRT4577_121911C.1.pep
ILVEKGVVVLPDIYANSGGVVVSYFXXVQNIQGFMWAEEKVDDELEKDMSSAFQHMKAMCKSLVLPKCAVTLELRV

SEQ ID NO: 208683 - protein, 76 aa, Zea mays
  Clone ID: MRT4577_121912C.1.pep
ILAEKGVVVLPDTYANSGGVVVSYFEWVQNIQGFMWAEEKVNDELEKYMSSAFQHMKAMCKSLVLPKCAMTLELRV

SEQ ID NO: 208684 - protein, 87 aa, Zea mays
  Clone ID: MRT4577_121913C.1.pep
WVVKGPFWGPQSRPGSRGGHFLVAPPGGVLTLLAGKSGFHFGWCFKNTVRARRIWGGPPFFMGQNPGAPFEGPFWDNPPVGPPLGWP

SEQ ID NO: 208685 - protein, 83 aa, Zea mays
  unsure (1)..(83): unsure at all Xaa locations
  Clone ID: MRT4577_121914C.1.pep
IILFTRILAEKGVVVLPDIYANSGGVVVSYFXEWVQNIQGFMWAEEKVDDELEKDMSSAFQHMKAMCESLVLPKCAVTLELRV

SEQ ID NO: 208686 - protein, 56 aa, Zea mays
  Clone ID: MRT4577_121915C.1.pep
APSLRWLYSLLMRFPPSFITLSREVASPKQPSTPPAHQIACPCFRSSRQLGAYLCL

SEQ ID NO: 208687 - protein, 77 aa, Zea mays
  Clone ID: MRT4577_121916C.1.pep
TLRKIKKEVGIGTRKYKESSRLGLSYLGKRMWHVHKFLFRISYGKSMNKQLRKYGIPWRNFFLFLFMIVPERERERQ

SEQ ID NO: 208688 - protein, 90 aa, Zea mays
  Clone ID: MRT4577_121917C.1.pep
TTYMANKRIPNGGPQTLFLKIWGKKNFPNSPLDRRTGVPLKPELGVGRLNGGGVTKKGVNYGGFLDPNWTSQNKNQCFLQLEALALERFF

SEQ ID NO: 208689 - protein, 53 aa, Zea mays
  Clone ID: MRT4577_121918C.1.pep
IGDPIEARDYEWTERGSSVDQLVNCINSFREAASTNDQTVDHIDISEKQKVIN

SEQ ID NO: 208690 - protein, 184 aa, Zea mays
  unsure (1)..(184): unsure at all Xaa locations
  Clone ID: MRT4577_121919C.1.pep
MRRPRDPLMCGQNKIYRQVTFSNLRSVLGPKADKISEVCDGDGAXLIIISQRGKLYQXAHSCITNAIQWDQHWXYNAQHSNAALSATQSCHHXMTNTTAKFEALXQRTHMHLLVEELGPLSVTEMKLLETPLECAXXSQARQLKTLLMMEQEQKLRRKDRHLRELNRQVTFKLAAVGWRNYRIV

SEQ ID NO: 208691 - protein, 478 aa, Zea mays
  Clone ID: MRT4577_12191C.1.pep
MGSRFPSHQLSNGLYVSGRPEQPKEKSPVICSSAMPYTGGDIKKSGELGKMFDLHRKSGPLGNQTSRNTSFGGAASNSGPVSNAVGRSNYSGSISSAIPNTGGSSRTKTNSGPLNKHGEPTKRSSGPQSGGVTPMARQNSGPLPPVLPTTGLITSGPITSGQLNSSGAQRKVSGPLDSSVSMKMRTTSFAHNPAVTNLNVGDGYSIKGSIPTTIIWLVALLFLVGFVAGGFILAAIHNPILLIVVVVIFGFVAALVTWNICWGTRGVIDFIGRYSDVDLRTAKDGEYVKVTGVVTCGNLPLESSFQRVPRCVYTSTCLYEYRGWDSKAANATHRRFTWGLRSMERHAVDFYISDFQSGLRALVRAGSGARVTPYVDESVAIDVNPDNKDMSPEFLRWLRGRNLSSDDRTMRLKEGYIKEGSTVSVMGVVQRNENVLMIVPPAEPISTGCQWGKCVLPTSLEGLVLRCEDTSGLDVIPV

SEQ ID NO: 208692 - protein, 78 aa, Zea mays
  Clone ID: MRT4577_121920C.1.pep
PPSVPGKAFNFLGPKNANRGGTVFTASLFWPRFCCRFFIRATKVLFRFFGPRFSPLFFKTPITVATYGFPLGFLGPIC

SEQ ID NO: 208693 - protein, 205 aa, Zea mays
  Clone ID: MRT4577_121921C.1.pep
MLLRWIAAEGRRRARPSRSLARALSYGRVVDAAARDGELRVFVVAGEVSGDSLASRLMAALRALSPVPVRFAGVGGELMCKEGLQSLFPMEEIAIMGMWELLPHIYSIKRKIEDSANAAMLFQPHAVVTIDSKGFSFRLLKQLKCRSNQKVQSPLHIHYVSPSFLAWKGGEKQLSKLHNFVDHMLCILPFEEKYADKRVACYLCG

SEQ ID NO: 208694 - protein, 52 aa, Zea mays
  Clone ID: MRT4577_121922C.1.pep
CSHYWNFPCLESLLPSDQEDKRVVERVTWTFSCSMASSCYPLRSYTTVSRIL

SEQ ID NO: 208695 - protein, 98 aa, Zea mays
  Clone ID: MRT4577_121924C.1.pep
VLVSLRRQASRANASFGPGQFLSLCQHTPDRNLGLLREFGTVDDQFPMYHCWLFSGSRVTIFIPTCAPLNNLSRFTSFLIFVGCRLCFGKLVLLIHRT

SEQ ID NO: 208696 - protein, 166 aa, Zea mays
  Clone ID: MRT4577_121925C.1.pep
MPPPFSPAGGAGQRISLAEAPSPISSRPPASTPAKQYDELGASGAGAVGFDAEGLAAAAAGEEGASGGSAGNRWPRQETLELLKIRSDMDAAFRDATLKGPLWEQVSSPTTTLPRTEAPGTGTAAAHQSTAPEACKRRRATAALEPAGSSAKAAARPRRRRSQRTL

SEQ ID NO: 208697 - protein, 137 aa, Zea mays
  Clone ID: MRT4577_121926C.1.pep
MATAAKTLARAGSSLFGRILASPSIIRPGLPLAGLRPHFPPTAPAGLDAYEAETVARLSSLPGEISFPCGLPSLRFFIDDVEDPVANDPLQLLPKRTYQPSTIKRKRTHGFLTRKSTKGGRKVIARRIAKGRHRISV

SEQ ID NO: 208698 - protein, 123 aa, Zea mays
  unsure (1)..(123): unsure at all Xaa locations
  Clone ID: MRT4577_121927C.1.pep
MATSAAPASPHALFLPYPAQGHVIPFMELAHRFLDRGFAVTFVNTKFNHRRVVAAAGGAATAYSSAGGGRLRLVAVEDGMDDAGDHENLILLNAAMXEAIPPQVEGLLDGEDVDGDGVEKVKC

SEQ ID NO: 208699 - protein, 37 aa, Zea mays
  Clone ID: MRT4577_121928C.1.pep
NQHYNSILQARKARGPLRRCLARATRLVRRYSEQPFD

SEQ ID NO: 208700 - protein, 82 aa, Zea mays
  Clone ID: MRT4577_121929C.1.pep
HELVPLVMANLNGLSHQLAIEWAHRLRCSYLPVGRCWCWIVYPQTHLAPEDGVVCSKTEARSSDSGTKNTHLSRAEFRAYVR

SEQ ID NO: 208701 - protein, 83 aa, Zea mays
  Clone ID: MRT4577_12192C.1.pep
PLILSRWGCLSCVWCASFSRPVCPPALPVPVVWPCVSPAVRPWLCPVSQWSSLPFSSPPSWCNRGFCLFTPPSGFFLPSGFAP

SEQ ID NO: 208702 - protein, 59 aa, Zea mays
  Clone ID: MRT4577_121930C.1.pep
VTILQRQHQYTGRLKDQNRSLLYSSDVTLDRSRDNGQRYVPYIRWKPTSQLNQECHHRR

SEQ ID NO: 208703 - protein, 85 aa, Zea mays
  Clone ID: MRT4577_121931C.1.pep
KDPNPRNRGLGANFHSGKKKRKLAVPLTAKPKLAFCTPRPRFNFIMPGGKEPHAFKGMEAQTKTKGPFSFYHKTEGRGAPTPSFF

SEQ ID NO: 208704 - protein, 37 aa, Zea mays
  Clone ID: MRT4577_121932C.1.pep
YDRKNYVFIASRSSTKVIILHDQVNIDILDYLFTPQL

SEQ ID NO: 208705 - protein, 74 aa, Zea mays
  Clone ID: MRT4577_121933C.1.pep
NIIRTAMVIRSSLASADSLRRSHIMTTRIFSSMDVRLLQRAKSCQRYCKHLPSSVRVTASSWLVSALTSISSIS

SEQ ID NO: 208706 - protein, 110 aa, Zea mays
  unsure (1)..(110): unsure at all Xaa locations
  Clone ID: MRT4577_121934C.1.pep
SSDSSCRPFFTFSFNIFFLEILFILFAFFFSPPTDTQISPSLLSNYTPHTFQIFYPHNDITQICNHFVPKNIFLLIIHHYTPHFTPPPPSLFLFKKFPPSGTKTKXLFSY

SEQ ID NO: 208707 - protein, 57 aa, Zea mays
  Clone ID: MRT4577_121935C.1.pep
CAERMPVSAVEWSWRAWTRVRQALRRSSPSSPFLCSESVGKGKERGDSRLVIEIIFV

SEQ ID NO: 208708 - protein, 78 aa, Zea mays
  Clone ID: MRT4577_121936C.1.pep
GKFNVAEGNFLVAHTHSEELERQRILLSEVVNPMQGCFGCFPRLGLNQSSPASKASSVGSESSRRNPSTMGSARLSPS

SEQ ID NO: 208709 - protein, 732 aa, Zea mays
  unsure (1)..(732): unsure at all Xaa locations
  Clone ID: MRT4577_121937C.1.pep
MDDEGWITIPCKALPESWNDISEMVQLQALDRSFLFPXSGEQVPILACLSASKQDVQVISPFRIAAVMSKNGTSMQNFTNKSSPVSANGHDNGAAGESGYEDVEPNGEASPSGHDILETQSLLQMEDHKQQIEHVLRRFRESNFFVRIAESVEPLWSKKSVTSTTIADERSDNQGNSKRSRSNVYNTISDKGVFDGNTSGGVARDVVKCYSLQNGDIAVVLQVNVSVNKLEDPVLEVLQFEKSISNNCMPGNLVDGHCDXTMNSSMTITIVFEEASKGGAPLSLPIASIEVGHGHSLPNLALRRGEEHSFILKPATMSSRERKTNSHAPLALSLPTMTGATLNTHTPKAGEPYADLSDQYAVLVSYRCNYTESKLFFKQATSWRPSAASDLMISVSSELSLRNPSLGARVPQLPVQILTLEATNMXPKTLLEESLLRGAPXSSSVASIEVGHANSLPNLALRRGEEHSFILKPATMSSRERKTNSHAPLALSLPTMTGATLNTHTPKAGEPYADLSDQYAVLVSYRCNYTESKLFFKQATSWRPSAASDLMISVSSELSLRNPSLGARVPQLPVQILTLEATNMTSENLTLTVLAPEASGSSSVVSLNSSPTTPNGSFDGVNESSKRSGLGKDGIGFRRLNSVLATPKEGDNGGNRMSNASGCTHLWLQSAVPLGCVPARSSTTVKLELLPLSDGIITLDTLQITAREKGLAYIPEHSLEIHATSGMSSGRS

SEQ ID NO: 208710 - protein, 74 aa, Zea mays
  Clone ID: MRT4577_121938C.1.pep
AFRHPVAGAAGRYRCHRRDDLLSCRPTWSLPTPRGEPSGLSYLMHICSKETGETSLCSTVLNSPVDYSGDVGKG

SEQ ID NO: 208711 - protein, 513 aa, Zea mays
  Clone ID: MRT4577_121939C.1.pep
VRIAESVEPLWSKKSVTSTTMADERSDNQGNSKSSRSNVYNTISDKGVFDGNTSGGVARDVVKCYSLQNGDIVVVLQVSVSVNKLEDPVLEVLQFEKSISNNCMPGNLVDGHCDSNDDPCQELLSWLLPLDRTLPPRSLAPPTLNPSVSHKQSYSASGSQIFNFRSYSMPSASSVQTPNNIRPPPISEGQEFMPEKPAKTPDIINDGQLSFRGVPLEPERYSVRCGLEGVYLPGKRWRRKVEIIQPIEVHSFAAKCTVENLLCVTVKNIAPTHAKDIVVFIDAITIVFEEASKGGAPLSLPIASIEVGHGHSLPNLALRRGEEHSFILKPATMSSRERKTNSHAPLALSLPTMTGATLNTHTPKAGEPYADLSDQYAVLVSYRCNYTESKLFFKQATSWRPSAASDLMISVSSELSLRNPSLGARVPQLPVQILTLEATNMTSENLTLTVLAPEASGSSSVVSLNSSPTTPNGSFDGVNESSKRSGLGKDGIGFRRLNSVLATPKEVIMGETE

SEQ ID NO: 208712 - protein, 56 aa, Zea mays
  Clone ID: MRT4577_12193C.1.pep
YHIQCRWELGDVVWANAQFKDVPTTKKLWTTLTHQSSCINSRGSWILPKARKASSS

SEQ ID NO: 208713 - protein, 58 aa, Zea mays
  Clone ID: MRT4577_121940C.1.pep
LDLHFVDQHVLPPLHHQEQEPLSPASEASALLLLLRLKRLMITSMDICMQNSIYIRAL

SEQ ID NO: 208714 - protein, 40 aa, Zea mays
  unsure (1)..(40): unsure at all Xaa locations
  Clone ID: MRT4577_121941C.1.pep
VGTVLGQVPCCPCIFRLCMERIWVMYXIRRDQLISSNLSV

SEQ ID NO: 208715 - protein, 49 aa, Zea mays
  Clone ID: MRT4577_121942C.1.pep
IFRRGLCRQWATSTNQEKTRLYSEVCGMHSDTGLHLPIDTLFDADTMEG

SEQ ID NO: 208716 - protein, 79 aa, Zea mays
  Clone ID: MRT4577_121943C.1.pep
LLFFTGHTWICKFTPFVHPFRPSSVPSNTVRPSLGPVAVARLGSFLWLLAVAPPPPYGSRCSPVLPVKRRPVKDERAGP

SEQ ID NO: 208717 - protein, 66 aa, Zea mays
  Clone ID: MRT4577_121944C.1.pep
HGIMGNHQIVRRRTPYSPLERCRSRSFVPGADHAAPAAGWGKSSGQMSMHSCSRMSACAPGRPRGT

SEQ ID NO: 208718 - protein, 59 aa, Zea mays
  Clone ID: MRT4577_121945C.1.pep
KWGPAPAPIFSLFVKKPRCFFRQKKKPPKPFTLMLVFFAKEGGKNRVNLGCSPKNVLEN

SEQ ID NO: 208719 - protein, 97 aa, Zea mays
  Clone ID: MRT4577_121946C.1.pep
MELFARAKVVRLKSHHDKFLYADEDEAHVTQERDGSSANARWAVEPAPHNPGAIRLRSRYGHYLTASGEPFLLGMTGLFLTHTAPAAPRPANASEDW

SEQ ID NO: 208720 - protein, 115 aa, Zea mays
  Clone ID: MRT4577_121947C.1.pep
TAFALFFFFFFFFFFFSVKEKHIVRGKCLEVPTGCGVHESECRMGLNIYNFTPLSLDWDSTPLEGLHWRTKHCPSGKKLQGGSTFFFFTPHIPQPGFGGYYSGTRSRPVYPIGPF

SEQ ID NO: 208721 - protein, 105 aa, Zea mays
  Clone ID: MRT4577_121948C.1.pep
SQIQTIIGILLIEILSKPSSHEVYLGQGDTPEWTSHARGLGGFKRFNDAPVKIKGKVVGENPDPQLRNRNGPPEFPYMVVYPNPFDPSGAPPGLPAKGIPNSISI

SEQ ID NO: 208722 - protein, 227 aa, Zea mays
  Clone ID: MRT4577_121949C.1.pep
YIRRNSPASPSIPSSVCLGIRQDRRSRRNLALAVPTPAGSPCSRVIDGSWDPEGVAEEFSAMSRLASELHRLRRSPWEVLCSALVSCGLVLFSQLAVAIVPRLLPSISLLAMLPVAGLVFLAAILVGRFWRRFIGVAASAPLFVLFNVLFLWGVYLFVIRRDTSSLLDMLINAECALLLWGLYRILSGDPGIVAYESSFLEEAGCKDFVDAICSSEKYPITLKGEAL

SEQ ID NO: 208723 - protein, 88 aa, Zea mays
  unsure (1)..(88): unsure at all Xaa locations
  Clone ID: MRT4577_12194C.1.pep
TTSARRPVSPVPPLLXGCEPKIVLFGFXXXSKLKALIKDKFLVKKLPSSCQKFFLGNKKTTAVNELLQIVVSSLLLTPTEVTSPTTIT

SEQ ID NO: 208724 - protein, 38 aa, Zea mays
  unsure (1)..(38): unsure at all Xaa locations
  Clone ID: MRT4577_121950C.1.pep
SSCKFGNKCPAVEETIXTAQATVVMVVAPEKKSAPQFV

SEQ ID NO: 208725 - protein, 123 aa, Zea mays
  Clone ID: MRT4577_121951C.1.pep
KREGPRPKIKRGPETQNPKKTPKNSNTSGGKGGSEKKKKKGDPLPKGKLNKKNPKGKPKKNRPPKKAGGALEKTPPGILEPKGKKKTPGELKTRGGDRPPKGTRAPKSGGGKAPSQRKVLQGN

SEQ ID NO: 208726 - protein, 57 aa, Zea mays
  Clone ID: MRT4577_121952C.1.pep
DYDRDAGVLLAAHYVILGSEHLYEVDHLLVHLDRFCESEMQATGNGFRSGRFTVDWP

SEQ ID NO: 208727 - protein, 81 aa, Zea mays
  unsure (1)..(81): unsure at all Xaa locations
  Clone ID: MRT4577_121953C.1.pep
STGHFLTLEDDIIKYSSDATRSALDDAGDGMDDANCVTVTANSAVMRLTIDISWMEAVQXAEPTLRTVLPXTYADRAFSTR

SEQ ID NO: 208728 - protein, 49 aa, Zea mays
  Clone ID: MRT4577_121954C.1.pep
IFHLTIHIKCFHSNITQHHGLQSEIVVLMSHETCSPSTVLHQQHREATS

SEQ ID NO: 208729 - protein, 50 aa, Zea mays
  Clone ID: MRT4577_121955C.1.pep
MRCGTGAGAAATMSSNGKPTPQPAAVSAGAGGPTKMYQRPIYRPQEAPAK

SEQ ID NO: 208730 - protein, 80 aa, Zea mays
  Clone ID: MRT4577_121956C.1.pep
LGPKKGKIKRGRGETRGVNLKPLGKGGTKPLVEGGPLLNKPLGQLVQKKNPPLGKTKKKPRGGLKVKNPNKIVPFNPIVI

SEQ ID NO: 208731 - protein, 363 aa, Zea mays
  Clone ID: MRT4577_121957C.1.pep
MDKYEPVREIGAGNFGVAKLMRNKDTRELVAMKFIERGNRIDENVFREIVNHRSLRHPNIIRFKEVVLTPTHLAIVMEYAAGGELFERICDAGRFHEDEARYFFQQLVCGVSFCHAMNICHRDLKLENTLLDGSPAPRLKICDFGYSKSSVLHSRPKSTVGTPAYIAPEVLSRREYDGKHADVWSCGVTLYVMLVGAYPFEDPKDPKNFRKTIQRIMSVQYKIPEYVHVSHNCRHLLSRIFVQNPYKRITMSEIKTHPWYLKNLPRELKEEAQAAYYYSRQGDSSSSSSNNATAAPAYSSQSVEEILRIVQEAQTVPKPPSRPDEAEQQEEEDDHDDDDDYDRTVRQVHASGEFDMIMSRLQI

SEQ ID NO: 208732 - protein, 72 aa, Zea mays
  Clone ID: MRT4577_121958C.1.pep
KKKKKKKKKKKKKKKIKEGELTFLCLQTVITFFLRSPNFFFRAAVFQLPLLGYNPGVSQLILRSSHSPFCQL

SEQ ID NO: 208733 - protein, 153 aa, Zea mays
  Clone ID: MRT4577_121959C.1.pep
LSLKPVAKISTDVIDSTSRDMAPEALSNLAPLQLEALSAFHPSRAASCVNAGGSSPDSSLDSPDLHLYRVSAVSSSGAEDLQLTALTAPGSTPQQGIQLSRSTSDGYEASGGEDSDRIPSRIVHRSSNWASIILNSDQSASSSGILVPKNRLS

SEQ ID NO: 208734 - protein, 401 aa, Zea mays
  Clone ID: MRT4577_12195C.1.pep
MAPVVRSEVGLTWSAFMTVEAAVLCLASKNGGKNGSICLSLKRILSSACAGYIHAEEFNPRDWIIPCLDYDERDNKKISFLAPNGMYSQRKMSIKSKRIADSVEALIGAYLSTAGEKAAFLLMKSLGMNIEFHTEIPVERKISMKAEEFINVRSLEGMLGYKFNDSLLLLEALTHGSYQTSGPTSCYQRLEFLGDAILDHLFTEYYYSKYPDCTPELLTDLRSASVNNNCYAHAAVKSGLNKHILHSSSELHRKMSYYLEEFGQSFTGPSYGWEAGIGLPKVLGDVIESIAGAIYLDSKCDKEVVWRSMKRLLEPLATPETIEPDPVKGLQEFCDRRSFKITYEKNHVDGVSSVIARVKAGETTYSATKSGPCKLVAKKLASKAVLKDLIAGHKDTEAAAV

SEQ ID NO: 208735 - protein, 69 aa, Zea mays
  Clone ID: MRT4577_121960C.1.pep
QLVSDSVKMKQACSSLLSDKLMLEKQLQQVNTSLESSKLKIARGEEQVLSYFCFDTSFIWYHLVASYGH

SEQ ID NO: 208736 - protein, 85 aa, Zea mays
  Clone ID: MRT4577_121961C.1.pep
HWTPKARVETRTTLQVENPDEKENVEAWPREAHVGGVNTRAYRDRACRIRMGGRVALEKKAESREDHALGRHERQQGRPSQVPTA

SEQ ID NO: 208737 - protein, 622 aa, Zea mays
  unsure (1)..(622): unsure at all Xaa locations
  Clone ID: MRT4577_121962C.1.pep
MRRHGWQLPYHPLQVVAVSVFLALAFAFYVFFAPFVGRKVFQYVVMGLYTPLVLCVFFLYIWCAAANPADPGVFKSKKYLSLYGSSKHKHLKESRKGSSDARLQIEGTREKQEHEVAASSERSITQYKDNNPSCLSPTXCFSPSILPSXSFVFSCCQPHESSSEQQATEEGMFFCSLCEVQVLKYSKHCRVCDKCVDGFDHHCRWLNNCIGRRNYRRFFILMSTAVILVSMVCAIWXLILQSAIGVLVLVLCFVERKEFSMQIVSKLGSSFSVVPFVIVVASCTILAMVASLPVAQLLFFHILLIKKGISTYDYIIALREQEQDDLSGQQSPQMSRVSSYTGLSSTSSFGPLRRGSWCTPPRLFLEDQFDVIPSEAASSHNSAMKRKEDQGKRKKGSGAVKISPWALARLNAEEVSRVAAEARNKSKVLVPIRKDDYSRGHETDSSYGGTSSGRIDLGPDSKRRTNRRGRQPSDLFLKPVAKISTDAIDSASSDMSNLAPLQLEARSAFHPSRAASSVNVGGSSPDSSLDSPDLHLYRVSAVSSSGAEDLQLTALTAPGSTSHQGIQLSRSTSDGYEASGGEDSDRIPSQIVHRSSNWASIILNSDQSASSSGILVPKNRLS

SEQ ID NO: 208738 - protein, 43 aa, Zea mays
  Clone ID: MRT4577_121963C.1.pep
VQGSFCICLINKYSMHNALSSHMYASMRTILVVDSSCKNKQHE

SEQ ID NO: 208739 - protein, 68 aa, Zea mays
  Clone ID: MRT4577_121964C.1.pep
GSKITIILLPAVQTKLKNAHCMLPQLGYKCPIRSDQLTSCTVSMYCIISCRTGKKKKKKGRALAPTRP

SEQ ID NO: 208740 - protein, 128 aa, Zea mays
  Clone ID: MRT4577_121965C.1.pep
MGSADRSKIDGIVVTEKGARSCVECRATTTPMWRSGPTGPRSLCNACGIRYRKKRRQELGLEHNKQQQQQQNNGEAKTGVKDSSSNSSSSGSSNFHVVQKRRLLMEVEEAALLLMTLSSSPASTLLHG

SEQ ID NO: 208741 - protein, 312 aa, Zea mays
  Clone ID: MRT4577_121966C.1.pep
MGSGRNGAVVRRYVRSKEPRMRWSADLHRSFVQAIDSLGGQHKATPKLILQFMGARGLTISHVKSHLQMYRAASLGAERGGGTPAQLLQRRYSCSGDERGGPKEEFLCCPPPPPLKRARMGYESMQGSHGVSDARTTAGGGGLYCIDDYMQAMAVGWRIKEEGLIRWQRRDAAAAAAAPSNLQAMGCLVQESAPFKVRRPEAHRLGSALKQQDDDDSSKEDGNGRPQSSNAAKEDGPSEQCSLSLSLGNLDAKCGRGTAAAASSRSGESSCILTASPARRSSSDDCSGHSGCFVVGPGGVVSLELSLSICGS

SEQ ID NO: 208742 - protein, 86 aa, Zea mays
  unsure (1)..(86): unsure at all Xaa locations
  Clone ID: MRT4577_121967C.1.pep
CGLKDFHMGIFRICHHLHFAWPVNHTSFIPHCTLAAIXGDSPDGLLIDSNSGETVHTLHGHLDYSFASVLHTDXRTFVTGNQDKTV

SEQ ID NO: 208743 - protein, 88 aa, Zea mays
  Clone ID: MRT4577_121968C.1.pep
SGCPFPFVLFGGGGISPIVFWPVSGLRLPGPSFLLRVRIPPPPCVGLFFALFLVSRFLLFPFFVSRSFSWGWPCFLSLEHVNAPKYPN

SEQ ID NO: 208744 - protein, 152 aa, Zea mays
  unsure (1)..(152): unsure at all Xaa locations
  Clone ID: MRT4577_121969C.1.pep
MRLCVADLHYCGGVRVLEGASSSLTSVFMPDVFPAPARAAEEEDDPAADRAGSXTCHSSTAAAQCAAAAMACLKNTESGKASSYLLGTASEHVMHMSELDEAVRRAQMDGXLCRASKLVPLGYGINKLHTVMTIVYDXIVSGDTLIEDYQCA

SEQ ID NO: 208745 - protein, 46 aa, Zea mays
  Clone ID: MRT4577_12196C.1.pep
ARAGRRAGSRNMPDVHARPCDGYGALRHDCSAGHHGCDLTTVLTGP

SEQ ID NO: 208746 - protein, 53 aa, Zea mays
  Clone ID: MRT4577_121970C.1.pep
MHTNKPHYRYESMDAEGEKKMINHKSSDGEVFEVEEAMAMESKTIRHMIEDNC

SEQ ID NO: 208747 - protein, 44 aa, Zea mays
  unsure (1)..(44): unsure at all Xaa locations
  Clone ID: MRT4577_121971C.1.pep
AGLQGTYGCGXAANGHRXALRRLVSLMPKSLCFAHHRFMTLSID

SEQ ID NO: 208748 - protein, 84 aa, Zea mays
  Clone ID: MRT4577_121972C.1.pep
ANIQNVPPAKSQSFTCKILIVTDLQPSYKDVANSSATWWCSSPAKTPTNASALEAAAAVVHPGVARARRTVASGRPMKASAPSG

SEQ ID NO: 208749 - protein, 100 aa, Zea mays
  unsure (1)..(100): unsure at all Xaa locations
  Clone ID: MRT4577_121973C.1.pep
RLLLLVSAKARRLNQKWNDVVDXLIQEHVQSLPSGESEESDADFIHGVLFIQEEDGLTTDNLKAIFVDMFXAGIYTXSYLTLEYGMGDLINNNHAIEKLY

SEQ ID NO: 208750 - protein, 65 aa, Zea mays
  Clone ID: MRT4577_121974C.1.pep
KKYQYIIISDNNMKLNTKTESLVAYQNFTHEPDWTPKVTNRLGSKVANGLKRMKHFVLQFRTSKR

SEQ ID NO: 208751 - protein, 81 aa, Zea mays
  unsure (1)..(81): unsure at all Xaa locations
  Clone ID: MRT4577_121975C.1.pep
IMLFDGVXTLXNGGVRLRGQHDPDRSIHYVPLQSESDSNLLHRAGRPPDDISSVGLVEKHRPXLKSEAVLTIMXYLNLPFP

SEQ ID NO: 208752 - protein, 89 aa, Zea mays
  Clone ID: MRT4577_121976C.1.pep
VDADFSQRKSGQSSSRQHASRPEASPLDFVIRPQSKIDPEQIRARAKQAVQDQRRLKMNKKLQQLKAPKKKNLQASKLSVEGRGMIKYL

SEQ ID NO: 208753 - protein, 80 aa, Zea mays
  Clone ID: MRT4577_121977C.1.pep
LAILVFRILYHLIIIRHTYCLDIPPKTSDLMTGLILLYGFLIRRTWVISQKPNAHCTECINIEIMKIFSYCDCWDDLDFL

SEQ ID NO: 208754 - protein, 66 aa, Zea mays
  Clone ID: MRT4577_121978C.1.pep
AHHTTENWHKFSTNWCPRMFEFIPIDKFWLVKTKICHYECISKVLLLALCVHCHLFILHCYPLIAL

SEQ ID NO: 208755 - protein, 72 aa, Zea mays
  Clone ID: MRT4577_121979C.1.pep
GSPHRPSRVRHAKAPLPSYSGSRSHRARWTGRPRPARACRPPCSPRSPPARPASADRYARHRWSSPSCRPRS

SEQ ID NO: 208756 - protein, 66 aa, Zea mays
  Clone ID: MRT4577_12197C.1.pep
ESNRRDTCRGDSGGPLVCGDAVEAVVTWGSRVCGNRRKPGVFTRVATYVPWIENVLSGNVSVNVTA

SEQ ID NO: 208757 - protein, 112 aa, Zea mays
  Clone ID: MRT4577_121980C.1.pep
MGFEKEILKAGTGPKPVKGQKVTVHCTGYGKDGDLSKKFWSTKDPGQQPFSFNIGLGSVIKGWDEGVMGMQLGEVARLTCTPDYAYGSGGFPAWGIQPNSVLIFEIEVLSAK

SEQ ID NO: 208758 - protein, 133 aa, Zea mays
  Clone ID: MRT4577_121981C.1.pep
GRGGATGGGGETAKGGAPTPKKKGTATFTIDSTKPEEDKITEGASLEKSLQERNKDAGGKAGNLGDSVTISREKTKGTATSDGPYSKRNQKYLTKKNLKKHNVRERQHVVAANKDRNDYELRYLNKAENQGEE

SEQ ID NO: 208759 - protein, 105 aa, Zea mays
  Clone ID: MRT4577_121982C.1.pep
MNRARRGGRLFPLWLCAVVCLMARPGACSVVLMANNTTLSFSDVEATFTPEVKGSGLNGVIYTVEPLDACSPLTKKAVEGPASPFALILRGGCQFDDKSRNAQDA

SEQ ID NO: 208760 - protein, 272 aa, Zea mays
  Clone ID: MRT4577_121983C.1.pep
FQIVDIKNLPSAIPEKSVYVWYTKTKPDAFIRDGGRLDISSKTGKSIGAGFQCEPTGEIILTVMVDQACFGASSSSNKPEPLGKVSISLQEVTGHDSKLSFERWFELKTGGAYAGSPPVSLRVAASCSVPRQAPQVLSMVNVKPCSLKACLLPHSIKDQNMSSWTRFVYDCGTELIRLQIREHKAKSGMALVRELVGVTKSSEQPLQLAQFTENKWSFNNSNSSITLDLKPSKDGCINELKYDSKLIRLYRGRRLAYELKCCSQHAEDTAAV

SEQ ID NO: 208761 - protein, 104 aa, Zea mays
  Clone ID: MRT4577_121984C.1.pep
RHEIRSWLVDALQCNPGPGDLEQLVDSHLPQIRCQDAYGAHDLSTRIFVQFSSSDVKSLLRCPAYSYYLRCTCSWCLLLPCLCFQHSMIILFPPLYTAIRACLP

SEQ ID NO: 208762 - protein, 88 aa, Zea mays
  Clone ID: MRT4577_121985C.1.pep
VIPKRKARLPFDYCVRFVYTWIMWVALWSNTWNKRAGCVQRGTFLVLRGGVILYPHVFFLLGYVFRLYMLKIVLFLLGWASRLFNLIP

SEQ ID NO: 208763 - protein, 60 aa, Zea mays
  unsure (1)..(60): unsure at all Xaa locations
  Clone ID: MRT4577_121986C.1.pep
NEKKRGGPPPLFXFFFYFFFXFXFCFFFFFLFLXFXFXLFFFFFXFXLERIRDNLIINHL

SEQ ID NO: 208764 - protein, 111 aa, Zea mays
  unsure (1)..(111): unsure at all Xaa locations
  Clone ID: MRT4577_121987C.1.pep
AKHISNNLTTFATKILSLLALLALFASATNAFIIPQCLLASSSIITQVLPPVTLMGFEHPSVHAYWLQQAIAVSVFQQPIFHLQQQSLXHLTIHTIATQQHHYFLLLLSHL

SEQ ID NO: 208765 - protein, 145 aa, Zea mays
  Clone ID: MRT4577_121988C.1.pep
RRFRLQSHVQYEQEDKRGFIEQKQHRTAVVNSMVCRRVVNKEVWRASRLPGCGWIGTRWWPVWACMSSPCACCGVCSALASTGIGDGDGRFGGCLVINLSRERRVTYSGFEALCLYLTVIRPFFLVSSGFMMRFYIWFSIYVYSV

SEQ ID NO: 208766 - protein, 91 aa, Zea mays
  Clone ID: MRT4577_121989C.1.pep
LGLLKNCCCCCRCLGFFVHTPFFGGFLLVQKHNFALDLPEGAKRILIFASPWRGHILRARNPDLMTGKVTREGKIHAGQETAHGQARALDL

SEQ ID NO: 208767 - protein, 84 aa, Zea mays
  Clone ID: MRT4577_12198C.1.pep
KKKKKKKKKKKKKKKKKKKKKKKNQKKNKKKKRFVKKKKVCPWAETPLGAIFGDSLHPGGGWPILLGGPFPPIGGGFTFHGPGF

SEQ ID NO: 208768 - protein, 185 aa, Zea mays
  Clone ID: MRT4577_121991C.1.pep
MEQHPTCAQPPAPAPLAGPVVPVDFKVVKKGPEMAMHDAIGRLAFRVAGSAGGATALQDDAGGVLVTVRSSGQGEWQAFSGNSLEERHIIFTAKAIPASSSREEVHVFISPRSTVEDSKPSYRLVGSAFQRACTIIKGDSIIAQTNLLYKLKKNIYSRRKFRVTIYPANDNILVMAMVATFFIKK

SEQ ID NO: 208769 - protein, 138 aa, Zea mays
  unsure (1)..(138): unsure at all Xaa locations
  Clone ID: MRT4577_121992C.1.pep
LPYSTPSSLLLFPPPPPPAGGGGCFFWGEXXHLPQGGAKKKRSRRHRSXGDILALXLLMXCRGDRLLXQAPPPPGRGPVFMCSFCGKSFGSYLALGGLMTRLRVLLSSPPGAHGQFPAPPGCPLGWVPPFLPPVSAPP

SEQ ID NO: 208770 - protein, 61 aa, Zea mays
  Clone ID: MRT4577_121993C.1.pep
NEPADAPLGAETKKGSQTRKKGEEVPSFGFDQVLNDFSSFDLANGLVFFKTKQPKKSHRKQ

SEQ ID NO: 208771 - protein, 197 aa, Zea mays
  unsure (1)..(197): unsure at all Xaa locations
  Clone ID: MRT4577_121994C.1.pep
AFFCKTIDVLVEGGGGKKXVDAISLPPPELYRHVEEXSGDELVKALQIKGKIPRRKALSALEGRXVSILSEQGYVSKDGLSGGTESLADIVEDEDEDEIVDDGEVDEGDVHIKPVSRKPPQLFAEVDVKLVFKEISSKYLRKRIVEGGKRSDGRSPWELRPINSQCGLLPRAHGSALFTRGETQSLAVVTLGGYQMA

SEQ ID NO: 208772 - protein, 92 aa, Zea mays
  Clone ID: MRT4577_121995C.1.pep
NSESLVTWSPTLDLRSLEAWRWIAFSPDHHDEAQRGETDNRLAKLRWGRCLASGFLQLLTGAGPRHAELCAGEPRAELRRGKGWSCPRAGRR

SEQ ID NO: 208773 - protein, 71 aa, Zea mays
  Clone ID: MRT4577_121996C.1.pep
LLPLSMVRLDFLHHHNCFEPVTLLSSLIVFVSLLFFFIFQVETLFLIVLFYFIFSFVYSFFFILSFFFISF

SEQ ID NO: 208774 - protein, 76 aa, Zea mays
  unsure (1)..(76): unsure at all Xaa locations
  Clone ID: MRT4577_121997C.1.pep
XATGAXDXXDDHRSXTLLXHDVXECXXSSAGXGXRRXXQAXXSPXIVFSPXVTMIXXXTRPPAXPXLLXXSCPPFP

SEQ ID NO: 208775 - protein, 58 aa, Zea mays
  Clone ID: MRT4577_121998C.1.pep
TNPIYPLSPVFDFPPAYMNRGHEHAGVEFASKERVLVLPPPSLGHSRRLTLLDRSLYA

SEQ ID NO: 208776 - protein, 61 aa, Zea mays
  Clone ID: MRT4577_121999C.1.pep
DHLWKADQEVGALIRMDITDHLGKRGLFLLADQAVLRSRAIAVDLRMVAPQLCLCKPNMFC

SEQ ID NO: 208777 - protein, 85 aa, Zea mays
  Clone ID: MRT4577_12199C.1.pep
KLEPELVCNTGSIKCQKGSGSYEVKRRKVCILEPNQLGKFLFGTQFCFAISKFRALCKSVNIGASQTDTYLTKFHVIGLHLHGLS

SEQ ID NO: 208778 - protein, 108 aa, Zea mays
  unsure (1)..(108): unsure at all Xaa locations
  Clone ID: MRT4577_1219C.1.pep
PTRPPTRPPTLPPTRPLPSTLSCSIRAIIALISHPXPHSPLNYHSCNLLRSGDIRGYLSMDLIYTTLADMPNKGQIYNICQANILCHYNISSFITSALRLSTLSFFFT

SEQ ID NO: 208779 - protein, 134 aa, Zea mays
  unsure (1)..(134): unsure at all Xaa locations
  Clone ID: MRT4577_121C.1.pep
MATKILGLLRLLGLSASAATATIIPQCSLAPIAIILQLHLSPTVTCLXHNPIHEXYMIQQASADGILPLXTLXLQQSXALLQHTXMAHAQPQHIQAHQLLQHVLADNAVYYXQQQLLAFNQLCSSNCASYQQQQ

SEQ ID NO: 208780 - protein, 57 aa, Zea mays
  Clone ID: MRT4577_122000C.1.pep
AGRSRSTSTLVFCLLRQGLEPSSEGRAQVVNVLAWYYQKLFTPSILFYLSRFSLKMN

SEQ ID NO: 208781 - protein, 37 aa, Zea mays
  Clone ID: MRT4577_122001C.1.pep
IESRRLPNTALGKIIQYRRYYSDLKDQRRPYIKKWCS

SEQ ID NO: 208782 - protein, 47 aa, Zea mays
  Clone ID: MRT4577_122002C.1.pep
YFETQIIRLKGPLIIIIICSYSITLMSFWNQNDIRMYNAYFCKYHIV

SEQ ID NO: 208783 - protein, 105 aa, Zea mays
  Clone ID: MRT4577_122003C.1.pep
DMGRGSGSSIPPWRGHLVEICEAPDSAHSYYGPSESLGLPTRCIFFTQRLGPGGVANSFYDPPSDKKTWIVDGFFFANAPLGEEILTCLLRSSLGVDDPETDWGL

SEQ ID NO: 208784 - protein, 59 aa, Zea mays
  Clone ID: MRT4577_122004C.1.pep
NPIRGPSPHPIWVSLSIFNFPREPQPLTLNFYPPAAAPPKLSLRHHRAQNPFQSHIIYF

SEQ ID NO: 208785 - protein, 48 aa, Zea mays
  Clone ID: MRT4577_122005C.1.pep
MYILPHNETITFKPKKKNKQKKIKKKKKKKKKKKKKKKKKKKKKKKKK

SEQ ID NO: 208786 - protein, 69 aa, Zea mays
  unsure (1)..(69): unsure at all Xaa locations
  Clone ID: MRT4577_122006C.1.pep
CFQQLRQVKVQPRCQGILGLFLQSFCEEQPXTDQVSGLLAEQIGQQLKEMWGLQQPTPCPYPAAAGVPP

SEQ ID NO: 208787 - protein, 58 aa, Zea mays
  unsure (1)..(58): unsure at all Xaa locations
  Clone ID: MRT4577_122007C.1.pep
WVGFCXFKAPAGGCMXFVPVGWXCCXFCXWVXLCXRVALXLRVFVCLSGSRVSFFFCA

SEQ ID NO: 208788 - protein, 60 aa, Zea mays
  Clone ID: MRT4577_122008C.1.pep
VRAWPLVRSRSPPLRYPPPFHRSSSLLLNAVGEMHKREVDQSGSRMAPRIVELEQGPARV

SEQ ID NO: 208789 - protein, 181 aa, Zea mays
  Clone ID: MRT4577_122009C.1.pep
MMVGKRERDCKNPMRRTTSMTEFAPPDALAAVMEDEEGPQLSDDSSRDGGQQDWLSALGGGGGGVGGAAAQEDWLAAYHARAAPARAGLRRNSADYSAVETAAFLRACGLCRRRLGPGRDTFMYKGEAAFCSLECRERHMTQEEWKDKCAVTSIKDAAAGSAKVKGRRAGSGKAGGTVAAA

SEQ ID NO: 208790 - protein, 81 aa, Zea mays
  Clone ID: MRT4577_12200C.1.pep
DTNVHHRFTIISLYVHQLVWLQDANFPVFDFIGTRALLTLQTNSGSKCLGKFETTSITDQFWFQFLVLTENHALLLQPEPF

SEQ ID NO: 208791 - protein, 44 aa, Zea mays
  Clone ID: MRT4577_122010C.1.pep
EGNNAERGDTAKGPEKLTCCLTTSEILTAYVVINEEICFFLLSL

SEQ ID NO: 208792 - protein, 100 aa, Zea mays
  unsure (1)..(100): unsure at all Xaa locations
  Clone ID: MRT4577_122011C.1.pep
MPPFNQVAGLDSNLDVQRPQLPIIHVPDDYPQKLLATNQQWIVNSTAYLQKQLLLRYKPLAGVSPATFLMQPQMATLYHHDVHNAVTXSHMPHELSFNQI

SEQ ID NO: 208793 - protein, 110 aa, Zea mays
  Clone ID: MRT4577_122012C.1.pep
MMVGKRERDCKNPMRRTTSMTEFAPPDALAAVMEDEEGPQLSDDSSRDGGQQDWLSALGGGGGGVGGAATQEEWKDKCAVTSIKDAAAGSAKVKGRRAGSGKAGGTVAAA

SEQ ID NO: 208794 - protein, 75 aa, Zea mays
  Clone ID: MRT4577_122013C.1.pep
EHKARRCPCYRVKILCCLSRLGNLLMSSYHRFATVYKDVCAWNWVLCVCRSTRKAIIIFIQHLITTCYLIRIIIE

SEQ ID NO: 208795 - protein, 181 aa, Zea mays
  Clone ID: MRT4577_122014C.1.pep
MMVGKRERDCKNPMRRTTSMTEFAPPDALAAVMEDEEGPQLSDDSSRDGGQQDWLSALGGGGGGVGGAAAQEDWLAAYHARAAPARAGLRRNSADYSAVETAAFLRACGLCRRRLGPGRDTFMYKGEAAFCSLECRERHMTQEEWKDKCAVTSIKDAAAGSAIVKERRAGSGIAGGTVAAT

SEQ ID NO: 208796 - protein, 104 aa, Zea mays
  Clone ID: MRT4577_122015C.1.pep
MMVGKRERDCKNPANSADYSAVETAAFLRACGLCRRRLGPGRDTFMYKGEAAFCSLECRERHMTQEEWKDKCAVTSIKDAAAGSAKVKGRRAGSGKAGGTVAAA

SEQ ID NO: 208797 - protein, 120 aa, Zea mays
  unsure (1)..(120): unsure at all Xaa locations
  Clone ID: MRT4577_122016C.1.pep
NGHLYSADCRDGCRXRVYNREMGSWTRFIDTRHHMGSSRSLEAAAFVSLNGKLCIIRNNMSITIVDILDPTTATEVDSARMWEAFARKGQHRSSFMANLWLIITGRNLKTDIMHCQVLQV

SEQ ID NO: 208798 - protein, 343 aa, Zea mays
  Clone ID: MRT4577_122017C.1.pep
MSGENLIMSSVNGVSSIRPEIALNGLANGLKSNGINGHHEHTNGHTNGVDHKQANGHKHATVDPRNYDDIIRLAEVIRDMVDLKESPTIGVICGSGLGDLADLLVDKQVVPYTKIPGFPQTSVVGHKGNLVFGYLSGKYVMCLQGRFHPYEHDMDLVLCTMPVRIMHHLGVKTMIVSNAAGGINHKFNYGDLMIIKDHVFMPGLVGFSPLVGLNDSRFGARFVSVHDAYDKQLRKMALRIAVEEDIRAHEGIYVMSGGPQYESPAEVKLYKVLGADALGMSTCHEVTVARQCGIRVFGFSLITNIGNDDADTSVEVSHEEVLETAKEASVRACRFVSRIVDHL

SEQ ID NO: 208799 - protein, 124 aa, Zea mays
  unsure (1)..(124): unsure at all Xaa locations
  Clone ID: MRT4577_122018C.1.pep
GASGPVPPHVQGPAGIPGSRSTCPSLYTRLSPWISXPPAPCPPFFAMTASALLAEADHGLXXPAPCPHPPPPHXKLPAFSRSRAARQAGGETRHPRKLLRPCDVSRPGARRXSPPLHPCASCRI

SEQ ID NO: 208800 - protein, 62 aa, Zea mays
  Clone ID: MRT4577_122019C.1.pep
LSNLGICFIWRVETNFFSNKGLCVLKLGGKAVTKTSPRHRNDESIRIVIAGGNTIMHPYCLL

SEQ ID NO: 208801 - protein, 100 aa, Zea mays
  Clone ID: MRT4577_12201C.1.pep
RADAAACRSSLGGWISSAPRAGAVRCAGLLQASSLGRRAGLLRRIFGVARAGAGSTLRCTHPCSTPVQLRPGNLYFIMDYLLQYTITTLVPLHCCPFMTC

SEQ ID NO: 208802 - protein, 79 aa, Zea mays
  unsure (1)..(79): unsure at all Xaa locations
  Clone ID: MRT4577_122020C.1.pep
RFLISETWXTRGVALLLLAAVLLLQALLPASSAGLVRVALKKLPVDQNGRVAARLSAEERQRLLXLRGSNALGSGGDDH

SEQ ID NO: 208803 - protein, 49 aa, Zea mays
  Clone ID: MRT4577_122021C.1.pep
ISVLCTSDIIHAAMQQSLHPNVRYTVAFHIHSSSAIYLDHHSSKSPSRS

SEQ ID NO: 208804 - protein, 75 aa, Zea mays
  Clone ID: MRT4577_122022C.1.pep
QSSLCSLRRRWSCTQSLHVIDTKWFTHHANLSTEISEVFGVLGYLHLLDIVVRNMAACVVAYFLEIHAFLVHFVI

SEQ ID NO: 208805 - protein, 208 aa, Zea mays
  Clone ID: MRT4577_122023C.1.pep
EVAFLGHIIIDGGIKVDPGKISEILNWKQPTDVSKIRSFLGLAGYYRRFIEGFSKIVKPLTSMLEKGLGCVLMQEGKYHPEKANVVADALSHKGQVNSIATYLMPQELCWEIEQLNLSMVNNTKATIMEVESALEQEIRKGQESDEKIKEIKTQINLGKASDFTEDEQGTILFKKRICVPKIEHLCQLIFTEAHDSAYSIYPRSTKMY

SEQ ID NO: 208806 - protein, 589 aa, Zea mays
  unsure (1)..(589): unsure at all Xaa locations
  Clone ID: MRT4577_122024C.1.pep
MVEQGKPRSIPTKAKKSPFVEVEVDEIGQASGVVFARESPLAPKSDQGCSVSHSHGDDETHESDGCVQSQGLDEHGWVDFGHSLQLVLFSRQWSLAESLVDLADQQPMLDYGLSIALDAIWFLRTKQDLEGLNSLISKIVASGAXDFARAILRTSLLASCVAACQSKAITVGNSKEIVAERLHDRLRDCPGAEHLKIEAGAKVQKFMEWALQCIHMHHCSEDTHMYRWNYNTLQEVQLHVSAFRTFLDIAGDNLSGKIFTEAFDAVCFPLTLFSSLFEPGWSSGSSAVSIKGLLSSLVEGGADNVNQCFLEAARFGSTELVRILLKVAYQNSLAVDTDLALVYASHYCKFKTMECLVDEGNVSSFLGPLIKAAERGCLQVVHWFVSRGVSDIEMCLALTTAASSGHFVVASYMLAHIPQQILEALSTQILKAARGQGSRPLDGVTFLLRSNFLRDAAATYEAADIIATGGTNGELPDLVAFLKEHWSQDAFAEGVSAGEMHFVNVMRVLRRGASPICLEDLPPEMVLGITYLPLYRECLSAGGQLLPQRLRGELLEAVHRLGEPVGPESQGKDLVLALERHMPSFLVGS

SEQ ID NO: 208807 - protein, 255 aa, Zea mays
  Clone ID: MRT4577_122025C.1.pep
MRLSTGIIASLLTWTTIASNNNKVVPRQNNNTDYKIGFTPLKTEWTDTVGTNPWPEYPRPRLQRPDWKNLNGVWRYQNTQNGSDASPPFGQRLEKAVLVPFCLESALSGVTEKDRIWSWYSTSFEVPSTWPSGNSVVLNFGAVDYEATIFVNGQKAGFHRGGYFEFSVDVTSYLNANGTNELLVYVYDPTDMDRVQIPIGKQTLNRGGMIWYTPCSGIWQTVWLESAPKDHISKLDLMAHNGWERSSSLCILALI

SEQ ID NO: 208808 - protein, 217 aa, Zea mays
  Clone ID: MRT4577_122026C.1.pep
MLPPMEGWLRLCLVALFTLLAIWLLKLITGGKCRPAAKKQLPPGPWTLPVIGSLHHVASVLPHRTLMELSRRHGPLMLLRLGEAPTVIVSTAEAAALVMKTNDLAFAGRPQSATLDVFGCGGKGIALAPYGDHWRQMLKVSIVELLSSRQVKRLEGIRAEEVGNLLRSITAAASSGGATINLSEKMTALSNHVVTRAVFGGKFSQKEEYLREMAKVF

SEQ ID NO: 208809 - protein, 82 aa, Zea mays
  unsure (1)..(82): unsure at all Xaa locations
  Clone ID: MRT4577_122027C.1.pep
WGGSLGASLRLPLNPWGGKNFLSPPACLDIPGFCVRRLGFPSPSFLVSSQIKLSCSKAACGFWARRPXAXXKKKKKKKKLEH

SEQ ID NO: 208810 - protein, 306 aa, Zea mays
  Clone ID: MRT4577_122028C.1.pep
RFAPDELTLCYKTLNDACPYSKFAHLTANQAILEATGAATKIHIVDFGIVQGIQWAALLQALATRPGEKPSRVRISGVPSPYLGPKPAASLAATSARLRDFAKLLGVDFEFVPLLRPVHELDRSDFLVEPDETVAVNFMLQLYHLLGDSDEPVRRVLRLVKSLDPSVVTLGEYEVSLNRAGFVDRFSNALLYYKPVFESLDVAMPRDSPERVRVERCMFGERIRRAIGPEEGAERTDRMAASREWQTLMEWCGFEPVRLSNYAMSQADLLLWNYDSKYKYSLVELPPAFLSLAWEKQPLLTVSAWR

SEQ ID NO: 208811 - protein, 86 aa, Zea mays
  unsure (1)..(86): unsure at all Xaa locations
  Clone ID: MRT4577_122029C.1.pep
VLSVWXVXLAXGWGXLSPPPPVGGXRWGAFSGXCSVARPPLGLVLPVPGSPLARXRAPGLPAXFXALRWARRPRPCRAPLCFCPSR

SEQ ID NO: 208812 - protein, 62 aa, Zea mays
  unsure (1)..(62): unsure at all Xaa locations
  Clone ID: MRT4577_12202C.1.pep
SGGAIRVQLTXGGKKXLCXGPHHMEKXPSWETGXHYXDXXXPXXRXXPPGEXPIMRGDXXXM

SEQ ID NO: 208813 - protein, 70 aa, Zea mays
  unsure (1)..(70): unsure at all Xaa locations
  Clone ID: MRT4577_122030C.1.pep
MHAYAHAFEDTRAEGQICTDRQLHNKQIYPRINVLXSLXRLMKRAXVGDGLTRRYHSDVSYQVCANYAIG

SEQ ID NO: 208814 - protein, 86 aa, Zea mays
  Clone ID: MRT4577_122031C.1.pep
LWWPRPLVGRGRPPCCVVLRAVSFPDCLFSALFLFVHVVAALLLERLVIPHFGGVLLGVGLPLGLLCLLRAYEPPLFALFQKNKGG

SEQ ID NO: 208815 - protein, 82 aa, Zea mays
  Clone ID: MRT4577_122032C.1.pep
MREMEHKRPVVRRQEPTVARTEDDVASGDEESDVEFEFPFVSQESGAGAGAAAADELFADGRIRASYTVFGRVLDEAAAPAP

SEQ ID NO: 208816 - protein, 91 aa, Zea mays
  unsure (1)..(91): unsure at all Xaa locations
  Clone ID: MRT4577_122033C.1.pep
KQKTLFIHVYLYYLYMSSAIVSTSCXVYLGRHQLARGTGTHGRLGRAHPKNTLERLCYPIAQKSSFLNAKRKKISQSFTLLAWIPVPHHYS

SEQ ID NO: 208817 - protein, 141 aa, Zea mays
  unsure (1)..(141): unsure at all Xaa locations
  Clone ID: MRT4577_122034C.1.pep
QSRRQEEADGGDTRRGRHKKTGGQAHRFKPQHRPEQQAPPRERQHRXSERRGREARAGQANRAEENPEEKXRDGEKPQQPPSRXTRGRKQHEAGRTSSDRNRHHKARKQAXDGRNKAPAAQARADTPPHPAGRNNEAKKTK

SEQ ID NO: 208818 - protein, 46 aa, Zea mays
  Clone ID: MRT4577_122035C.1.pep
MLAPAVGKRIWFPGGGRKKKKKKKKKKKKKKKKKKKKKKKKKKKKK

SEQ ID NO: 208819 - protein, 80 aa, Zea mays
  Clone ID: MRT4577_122036C.1.pep
GTKDPGAWFWRLAINQSPFGPVPCLTTRPVCFYPFNVFQTPPVDVCPFSLSFKCPVCIWYGPPRPYVLKGCFPPIPYLDG

SEQ ID NO: 208820 - protein, 114 aa, Zea mays
  Clone ID: MRT4577_122037C.1.pep
NCHICKPWQHHKNMDMLQHGFIADMSQLGIPVSTPQCRLPDSTPQLWLPDGCHSLSSRYLLVRPSLGSMLVPLSLGFRSLLVRTNRGIPCNIPQSGLHTDTQGGNWHMPLHMGL

SEQ ID NO: 208821 - protein, 91 aa, Zea mays
  unsure (1)..(91): unsure at all Xaa locations
  Clone ID: MRT4577_122038C.1.pep
KIVETIHSAKASQIFDSRXLPRVQVDAYLSHGPLVRAVCPRGASTGIYEAMXFRDGGSHYXGKGVFQAVNTENTDIGPAMIGWDPTAQTEM

SEQ ID NO: 208822 - protein, 602 aa, Zea mays
  unsure (1)..(602): unsure at all Xaa locations
  Clone ID: MRT4577_122039C.1.pep
RKPSVSSVPDSVTREDPFTKYELLHELGNVAYGAVYKARDLRTQELEAVEIISLTDGEEGYEDIWGQMGMLHQCFHPNVDRYFGSCLGEDVRWIIMEYCGGGSVADLIGITEEPLDESQIAYICREALKGLAYLHSIFKVHRDIKGGNILLTEQGEVKLGDFGVAAQLTRTMSKRNTFIGTPHWMAPEVIQESRYDGKVDVWALGVSAIEMALGTASAXTIYAVREHFIQYHFLKAIDISPEKWSLLFHDFIAKCLTKDPRLRPAAIEMLKHKFIEKCNSGASKMLAKIKVAKKIRATLAVQNELSDPDNTTQDVPFRINEDYGETVPTSSQQHMKHGTYNDCQAGDFGTMIVHTEDGDEVTESPIFPRTEFIPGLGSINSFTHDPKRAELISSFWAENIGDSDANKDRDTDYGPDMQESKVISPLTGTVKKNIGAEGTIRCHDNQINLSPGLANTTTKLNNSPSRKAFSVQDKLWSIYAAGNTVPIPFLKAIDISPLALVSENESGNGLAGSSTNDALEAVRELFSGDGQAKKGRKGQNEVPLPPGVHHRLTTSPTLMNLAQALAYHKTCYEDMPLQDSQATQEQQTIQNLCDTLRTILRL

SEQ ID NO: 208823 - protein, 105 aa, Zea mays
  Clone ID: MRT4577_12203C.1.pep
MTTVGPAVPCTPTSLCAPLFSRHHSFLFFFAICRLIMTRVIVFNIRSSSDTCLAVLRLLVISLIWVMGAEDLNTCQMFNDKPEPEFINILISIESRLMLVRELTM

SEQ ID NO: 208824 - protein, 55 aa, Zea mays
  Clone ID: MRT4577_122040C.1.pep
YVVQCWYPCLMSVLVKRLMYTPPGFRKSPNMFFSLAKKKKGGRLYKSIQAYAAMH

SEQ ID NO: 208825 - protein, 144 aa, Zea mays
  unsure (1)..(144): unsure at all Xaa locations
  Clone ID: MRT4577_122041C.1.pep
DFGSSLWIIMEYCGGGSVADLIGITEEPLDESQIAYICREALKXNTTFVGQLNVFEYLTFVCLFSSXGLAYLHSIFKVHRDIKGGNILLTEQGEVKLGDFGVAAQLTRTMSKRNTVFLTVFLLLLQIPKFKKLHIDVTNKMKCR

SEQ ID NO: 208826 - protein, 87 aa, Zea mays
  Clone ID: MRT4577_122042C.1.pep
KNQGKGSLTRRTGSPTTGRGMGGKKIPGQHPKENCSLGRKQKCIFRGLQLKKASGSQKKKNSYKFQLIFTSHWDIFNPGGGLKTTLL

SEQ ID NO: 208827 - protein, 182 aa, Zea mays
  unsure (1)..(182): unsure at all Xaa locations
  Clone ID: MRT4577_122043C.1.pep
TQTPAGPAAQTXQNPKAGGPGPAADTAATAXXHAXGRXXXXTQXXGXPGXQXGDEGKGKXXDXPAPRXDRGGRXQGGANXGXTXXNXEGKKXAXXXXXXXXXXEGTLXXXGXGAXXXXPGXXGEXXXXEXXGXRXXGRKPXXDRAQXXXXXHQXXXGPREAEXEKTXXGTXKRGXGXXDSSK

SEQ ID NO: 208828 - protein, 127 aa, Zea mays
  Clone ID: MRT4577_122044C.1.pep
CSIKFMTDGILLREIQGDFLLKRYSVIILDEAHERSLNTDILIGMLSRIIKIRKDLYAKQQEKLRSGFKIKPEDKISQLKVVLMSATLQLKDFISNRRLFGVIPPAVKVPVRQFPVSVHFSKRTHDD

SEQ ID NO: 208829 - protein, 40 aa, Zea mays
  Clone ID: MRT4577_122045C.1.pep
QCSFSGILLSSLKTCVASCSGCDLSSLMVEKVPGRVGARV

SEQ ID NO: 208830 - protein, 43 aa, Zea mays
  Clone ID: MRT4577_122046C.1.pep
MWNAVGKEIVDLCLDRVRKLADNCTGLQGFLVFNAVGGGTGLW

SEQ ID NO: 208831 - protein, 109 aa, Zea mays
  Clone ID: MRT4577_122047C.1.pep
MLMGFPVGYSETPKLLLHLLLLQDHLRRLSSWLLRLTGAADADADTDTCHPRQPCANDQLLEEHSTAVRFNSLTCGSGGGVTAPHPMPEGCCICLGDFHADDEVRRDRG

SEQ ID NO: 208832 - protein, 74 aa, Zea mays
  Clone ID: MRT4577_122048C.1.pep
RGKKKPAPPPWGRGKTPQFKNSGGLKIPPSKARKVHHKKFVFYQRGRPRLLFALKKSFFFGPIGHQFILPFCPP

SEQ ID NO: 208833 - protein, 119 aa, Zea mays
  Clone ID: MRT4577_122049C.1.pep
KKIWEVAQARLKNLIIMGFIMERAGSLVPFLSMGIPFFGWGKPLKVFRFVGKVFDPFKAPRVETIAPKLLFKAPNLAPMGLGKGKLKTLGLFPTNPSNWGFFRAPAGGVENPGGGPPLI

SEQ ID NO: 208834 - protein, 60 aa, Zea mays
  Clone ID: MRT4577_12204C.1.pep
ALNAGGGTPSIHTSLREALPTPSSRSKPRGSDPSRGATRLRAPCFQRGAGIPSLSGLREG

SEQ ID NO: 208835 - protein, 165 aa, Zea mays
  Clone ID: MRT4577_122050C.1.pep
MASSAPGRGGRQLILLPAAAAAVAVMVLIGAEPALACYPRVFSFGDSLADTGNFRFYYGNSSGEPALRQPYGETFFRRATGRFSNGRLILDFIADTMGLPFVRPYLSGRRAEDFASGANFAVGGATALGPDFFRSRGFDIGDGRVHLGMEMKWFHDLLELLCRSG

SEQ ID NO: 208836 - protein, 226 aa, Zea mays
  Clone ID: MRT4577_122051C.1.pep
MKSLTPTAAGSAADFSDSLPSPISPAAVPCHSSPGRHYYLAVDRTQFKMRTLLELLGVVADRRGGLPIATCVSSRDELDAVCAAVANLPFVSASPLYSDQAEAERASILENFRQETTQWNKTAKATNIAESSKLESTGSKISIIVATDACLPQAAMAEAPLMARVLINYELPTKKEAYLRRMSTCLAADGIVINMVVGGEVVTLKALEENSGLLIAEMPIHVSEIL

SEQ ID NO: 208837 - protein, 116 aa, Zea mays
  Clone ID: MRT4577_122052C.1.pep
MILTIMMFLLHINLQILLMVFYVQYSDQAEAERASILENFRQETTQWNKTAKATNIAESSKLESTGSKISIIVATDACLPQAAMAEAPLMARVLINYELPTKKVSFNYISVHICCF

SEQ ID NO: 208838 - protein, 70 aa, Zea mays
  Clone ID: MRT4577_122053C.1.pep
LNVHNSIRERVAVDALVTARHHHLLQPHLGVFRVAGHGECAEEASIKDAGSSVREASIGFSKFQIVADAW

SEQ ID NO: 208839 - protein, 81 aa, Zea mays
  Clone ID: MRT4577_122054C.1.pep
IMKQTDSSTNFPSCGNKLVGPWFFRALVNINPMASKERASKTGSRLGPPPLFSIIMPPAFPGQKQKKLAQTESMQPEGCGP

SEQ ID NO: 208840 - protein, 48 aa, Zea mays
  Clone ID: MRT4577_122055C.1.pep
MLHQRLVCCLRACRSHNAEASPCNQCVRYDSLIDVYESSCCCQLVLLR

SEQ ID NO: 208841 - protein, 71 aa, Zea mays
  Clone ID: MRT4577_122056C.1.pep
HCICFVDFSFEVVDSINNSWASSAPRGQGKCITVIEGSRTKWRTSLKKFKANVTPIVKGTDQAGLHFNENI

SEQ ID NO: 208842 - protein, 106 aa, Zea mays
  unsure (1)..(106): unsure at all Xaa locations
  Clone ID: MRT4577_122057C.1.pep
MVSGELACTYAALILSDDGIAIAAEKIATIVMAANLKAESYWPADXAKLLPLRGAGSRCSPACRWRASTAGLALPTTVVLPRRLPLGLPPPPPSARSTRRPPRPPR

SEQ ID NO: 208843 - protein, 88 aa, Zea mays
  Clone ID: MRT4577_122058C.1.pep
KKKKGAPPFKEPNFPSPSFPPYIFFFCPPKLNSLPSFFHPLYLKPPFLPQLFPLSPIPLFPLCFYTKKPPPLPLSQIFPSLISLCPPP

SEQ ID NO: 208844 - protein, 69 aa, Zea mays
  Clone ID: MRT4577_122059C.1.pep
TRCLCPRKHLPPHSICHLCIIKLVVVMRCIHPACQTQPWLLGCGIPRAGGVKWAKGSHIWRDVLRLRLR

SEQ ID NO: 208845 - protein, 62 aa, Zea mays
  Clone ID: MRT4577_12205C.1.pep
SVHLLHLILYKYYLSFTEFYPPYFQSPSLSHLTPLNLTTLPTLFPYLLLNQLQHFLSLNHII

SEQ ID NO: 208846 - protein, 61 aa, Zea mays
  unsure (1)..(61): unsure at all Xaa locations
  Clone ID: MRT4577_122060C.1.pep
PVFFFITPLSGGKKPLXDIPLAPGVAEGPLRNLSKGLFPFPPRLFPNTFPKEEALKNFCPP

SEQ ID NO: 208847 - protein, 107 aa, Zea mays
  Clone ID: MRT4577_122061C.1.pep
STSGEASMTCSDRIEGLKRSVPPSQVISGRLLRAFHLRGVRSEGERTRGVGHVQNGQKRSSRMRIRGTEVVQLQRAVAASNLLHSILLTYEIDRGHTRSRPASRYPM

SEQ ID NO: 208848 - protein, 130 aa, Zea mays
  unsure (1)..(130): unsure at all Xaa locations
  Clone ID: MRT4577_122062C.1.pep
SEPLKIYGLKQAPRAWYSRFTSYLVSLGIVXTKSNTSLFIHRRNGDIIYLLLYVYDIVLTPSSVSLLQHKIVALQREFAMKDLGPLHHFLEINMERQPQGLFLHQRXYVLDILEQADMSDCKPYSTHVDT

SEQ ID NO: 208849 - protein, 76 aa, Zea mays
  Clone ID: MRT4577_122063C.1.pep
MDPKGKGIVINDKEKESFVNELKDDKPTDSGSGHRQKEGKKKKTRRIKEIVYYDDSDESTSSQKDDDHNDYEQRKP

SEQ ID NO: 208850 - protein, 111 aa, Zea mays
  Clone ID: MRT4577_122064C.1.pep
PRVRTSLLTRLFTSTHIGLASSSFCCSPSRRNLHLTRHLHSYSSDQLHLSTRPRRSRLICRPREKPTLHCLHGSRRGAGSASSRTLAVHHATCLQSALSTSPPTPGRCPYP

SEQ ID NO: 208851 - protein, 226 aa, Zea mays
  unsure (1)..(226): unsure at all Xaa locations
  Clone ID: MRT4577_122065C.1.pep
MASCYNPWRLFPGMSTAVPAGPVTAPAHSRTCKSSKVFGALPHRRGLLFLGTRRARIKCVKDNSLHFDPSKIEPPPYSSYFDSTSGQLEPASGARASIPGKEYWPEGTAARVRAARAPAPVGESAGMPSFGTKPGSRRRGYKEQVTSASGTEGAQTDDRKDGDEPDVAIIGSGDDALEEIKDSXDEYVIYETPREEELSEYDMDKMMGRPHPFIDPAKAMSLGEPK

SEQ ID NO: 208852 - protein, 89 aa, Zea mays
  Clone ID: MRT4577_122066C.1.pep
AGTAESPMIAVITLAKRIAPVAISRGMGSVDWKHQVRHACLSKACGGRQSSVVVGTNLVYHRHRPSVQLVAHHVTCASSSQSRSESASW

SEQ ID NO: 208853 - protein, 222 aa, Zea mays
  unsure (1)..(222): unsure at all Xaa locations
  Clone ID: MRT4577_122067C.1.pep
SEIWQHFIKIKDDKGIVKTARCKYCHRNMKAEAGQHGTSSLKRHFVVCKRNPNKFNKDPSQCILQATHCEGISTFKFDQEALRLAFAEMVIEDEQPFCFGEKPGLRKFLSKACPXFQPPSRRTCTRDVVRCFFQEKAKLKKFFKDSCQRVCLTTDGWTSQQQDSYMTVTASFIDENWRLHKKLIGFFMVKGHKGDDIGRNVLRCMTDWGLQRVMTVTVDNAS

SEQ ID NO: 208854 - protein, 69 aa, Zea mays
  Clone ID: MRT4577_122068C.1.pep
PLISIIIKFIKPMSNNTMKMWSLINLHHQFYVTNRYLNTDITKKFDCSHHRTVCVCCAIPRTLYVHCAM

SEQ ID NO: 208855 - protein, 78 aa, Zea mays
  unsure (1)..(78): unsure at all Xaa locations
  Clone ID: MRT4577_122069C.1.pep
GTGAPPSSFFFFFFFFFFFFFFFFFFFFFFFFFFGWPPXKNYKGIPLDERKYNQSISSRFWVMKKIKPYPFGQRCLTK

SEQ ID NO: 208856 - protein, 82 aa, Zea mays
  Clone ID: MRT4577_12206C.1.pep
KFFFLQRGGWYPGVYRHSDPQSCMGPGFNTGKHGPGKGGHTLHRFYLLLDTIFDACRENEAGAGFQEHAFFDVAPRPPPFFP

SEQ ID NO: 208857 - protein, 67 aa, Zea mays
  Clone ID: MRT4577_122070C.1.pep
AIYRSGTHKCDSCTAIWSIHSTSICLLRLTNSYSWEAFPSTKYSYAHERTRSAWTALLQLARDKTII

SEQ ID NO: 208858 - protein, 116 aa, Zea mays
  Clone ID: MRT4577_122071C.1.pep
PESEKHSLVGIIFGLYSCHETRRRGACLTNFFLLPLLEKIRKGLFFCAPPKKGPARGFHYFSAPAGNTPKNGFPKSFSHVQTRRFPSGLPVGKSRWDNKGVGWKFPPQKIGFFSCP

SEQ ID NO: 208859 - protein, 38 aa, Zea mays
  Clone ID: MRT4577_122072C.1.pep
IYFVSVGHATKIHCASNESKRCFSMRCQLSAVNEANRL

SEQ ID NO: 208860 - protein, 130 aa, Zea mays
  Clone ID: MRT4577_122073C.1.pep
FPPLGPSGPLGGGGKNPQRGKNGKRGGTGTRTRGGLKSERGNGSAPFPNKNKTGHPLGPGFFFFLRAPRGLTGPLGAPKSPTRPLGGPKGPPIRPWPVRPLRGGATGWGIHVLGWGGGGPIALGALGPSF

SEQ ID NO: 208861 - protein, 83 aa, Zea mays
  unsure (1)..(83): unsure at all Xaa locations
  Clone ID: MRT4577_122074C.1.pep
GTQTXARNPYRDRFFLLLNNRACYIQHFDGQTHAQYQLHEKLSNLHLPSSQCLSYQNLPNKKHHQTNKNTHLHNYTNIHNCTT

SEQ ID NO: 208862 - protein, 55 aa, Zea mays
  Clone ID: MRT4577_122075C.1.pep
MGLVALVLTSLAISTAWGLPPSPPIVDTAQGRVLGKYVSLKGFAQPVGVFLGISF

SEQ ID NO: 208863 - protein, 58 aa, Zea mays
  Clone ID: MRT4577_122076C.1.pep
GRIYGGMGHSLTMCKTISSLNLINTRVLVHATGWPCMNHDPCNPLGSFTTLMHLSLHS

SEQ ID NO: 208864 - protein, 56 aa, Zea mays
  Clone ID: MRT4577_122077C.1.pep
KIEGLPVRNNAWQGIGVTLGLWCGDVETGLVGLESPLICRRLRLPVSIVVYCERSY

SEQ ID NO: 208865 - protein, 96 aa, Zea mays
  Clone ID: MRT4577_122078C.1.pep
SWRKRPRRISSPSDLAGGNSAWDGGGLLFSSLYELLYEISSDFFSARVKSVYGPNPKRLINLRSFSAIAGLRIVFFSKGTQEGRCQCPPCPILPCF

SEQ ID NO: 208866 - protein, 61 aa, Zea mays
  Clone ID: MRT4577_122079C.1.pep
HIYSSLSNQKHERKEILWGPFNSIESAGGWPPAQALDPLSADPTALAEALSLDELDFLLIL

SEQ ID NO: 208867 - protein, 82 aa, Zea mays
  Clone ID: MRT4577_12207C.1.pep
SFPHISKSDDRFGREYRFDLLPEFTDGSPRSVIVHHFVGPDRCVPAGALHSRSGWPSGTAGEPLPLVSFLAERVVVPEFGSV

SEQ ID NO: 208868 - protein, 90 aa, Zea mays
  Clone ID: MRT4577_122080C.1.pep
RPQRSRRRRIIISPGTTLIISAAAPLVFKGVFDKDRSTSILTRGSNQIHSDPEGRTWGPVRVLHFGTRNFSIDKYRVARRVKALVLELYY

SEQ ID NO: 208869 - protein, 112 aa, Zea mays
  unsure (1)..(112): unsure at all Xaa locations
  Clone ID: MRT4577_122081C.1.pep
GKNESRXXRMNVGXKNEGLDYEWIEVWFIKXKXFGGGGGIIXVXXNKWXXKIGEEGEYYNVLKGDKKNKKRRIEKXEXRKNKGWKWYKENDDVKKGDDXIGIEMXXKGKXLX

SEQ ID NO: 208870 - protein, 32 aa, Zea mays
  Clone ID: MRT4577_122083C.1.pep
YIIPIHYNGSYRSLLTLPPMVMGDNTLLITDK

SEQ ID NO: 208871 - protein, 86 aa, Zea mays
  unsure (1)..(86): unsure at all Xaa locations
  Clone ID: MRT4577_122084C.1.pep
SPVSFREASCTQGGTTRESSLRSGPGFQPTXTMEGSSMGSSSLLSSEPPQIIINPARQKMVQKLALYEEGVLDSLQLLSSGFFPGL

SEQ ID NO: 208872 - protein, 55 aa, Zea mays
  Clone ID: MRT4577_122085C.1.pep
YENSSEVMGVKVEKDRGGKKKKSGFLCRTLCAVKHTRYGRPQLDSERSKSSFVSV

SEQ ID NO: 208873 - protein, 45 aa, Zea mays
  Clone ID: MRT4577_122086C.1.pep
QVSPMTFLPFLLNRSKLPICSYYFFLFWLLTLQTLNGSSTVVVST

SEQ ID NO: 208874 - protein, 92 aa, Zea mays
  Clone ID: MRT4577_122087C.1.pep
SSRAVVVRHRLQPRLPPSGHQVIEVVVLRPGPVASVDPPPRAKEQANHRAPSLFVIDYSPVFPQAPMFVPNSIHTEHEVSPVFVCAKKINLD

SEQ ID NO: 208875 - protein, 58 aa, Zea mays
  Clone ID: MRT4577_122088C.1.pep
LIVTMYIQSIYNISNLVLAELHATGLSCDITINAIVWLQIQKRCDCRLLARIAPYLKR

SEQ ID NO: 208876 - protein, 38 aa, Zea mays
  Clone ID: MRT4577_122089C.1.pep
GFWLITTRTMRGVHWLNCSARSFQTCLTCLLTWKRLKC

SEQ ID NO: 208877 - protein, 74 aa, Zea mays
  Clone ID: MRT4577_12208C.1.pep
VIIYIAGGGGCAIISEAERAAIHRYCVVCVRHRETELCSLLSLAGCLASVFVLMYVCVSTCMLVDPIACAVSIY

SEQ ID NO: 208878 - protein, 57 aa, Zea mays
  Clone ID: MRT4577_122090C.1.pep
SLTVVTTQSTFFFFFFFCFFFFFFFFFFFFFFLPCTGLSAITIYSIYKTLPQFAFCT

SEQ ID NO: 208879 - protein, 84 aa, Zea mays
  Clone ID: MRT4577_122091C.1.pep
RVIKLKSPTDIFYRGRTYARGTHRTAEEHRRDRVNQLRASLESAHERAPHDIIMPGGQARYGSVGQLLLYGGSGWGAHCDPKRV

SEQ ID NO: 208880 - protein, 69 aa, Zea mays
  unsure (1)..(69): unsure at all Xaa locations
  Clone ID: MRT4577_122092C.1.pep
VYKGDKTKAYHCGISIDGLAPDLSHDRGDLPEPISGNGXATKGRDXGPSGTRAGEKRKSKTFVKTGHGE

SEQ ID NO: 208881 - protein, 74 aa, Zea mays
  Clone ID: MRT4577_122093C.1.pep
RRAAQDDRSVLPYRGGTVTAKASTIGRDGGQGAHAISTSGGRSICPAPYDSTRSTKRRTTPSTRTDTRSRMRSL

SEQ ID NO: 208882 - protein, 64 aa, Zea mays
  Clone ID: MRT4577_122094C.1.pep
SPVPSVRFSFAAVIKMLKLLIGRPSCFHVILESKGRRMSSVVRCQVLPICKGGLSGIINLGVVK

SEQ ID NO: 208883 - protein, 56 aa, Zea mays
  Clone ID: MRT4577_122095C.1.pep
GRLHTWGNRILVTCDRARGQGLDTASVCYCWLVALHTEIGGGTATKAPHTACSLPE

SEQ ID NO: 208884 - protein, 209 aa, Zea mays
  Clone ID: MRT4577_122096C.1.pep
MSKKGGKKAAAGGGELSRFLQPHLQTITDTLQMMSEAAPGGLERTEWSEVVALGHVVSRQATVAGMVWSGDLPGAETLKENIAAYFNVLQGFLLACHGSTVGAGPTLHKYITSSAKGVVDASFSLFKLAVSAYESGSPDRKTIIPPVTGTVWEACLALKKVPATNCIAIGRAMTQICVCLKDILREMKELPIGDSDGTKAEKSPTEMSP

SEQ ID NO: 208885 - protein, 58 aa, Zea mays
  Clone ID: MRT4577_122097C.1.pep
LFDSYNHGFYMKDGYRTPILIIRGGRHTINRRDHKHHQSTRPCSYTSTAQILRRHAKD

SEQ ID NO: 208886 - protein, 69 aa, Zea mays
  Clone ID: MRT4577_122098C.1.pep
SSFLHHKWHLKAGGLIMLLVLPPTADTGSLHSERTQASIPILFNTYLSPATYLDYQNSNNLPYLIQHTN

SEQ ID NO: 208887 - protein, 464 aa, Zea mays
  Clone ID: MRT4577_122099C.1.pep
MPPPPQRPRNRPKHPQGPGDAPKGSESHTVQSNKKQGLGTGPLVGIIAGSIVAVLCVFLLLLCCMCNAQKRTDDASSESKDFGGPLTVNIERASSREIPEQMDDTSIATVKLPPAEKMTPERVYGKNGSVRKTKVPITATPYTVASLQVATNSFCQDSLLGEGSLGRVYKADFPNGKVLAVKKIDSAALSLQEEDNFLEAVSSMSRLRHPNIVPLTGYCVEHGQRLLVYEYIVNGTLHDMLHFSVEISRKLTWNIRVRIALGTARALEYLHEVCMPSLVHRNLKSSNILLDEEHNPHLSDCGLAALTPNTERQVSTEVFGSFGYSAPEFAMSGIYTVKSDVYSFGVVMLELLTGRKPLDSSRERSEQSLVRWATPQLHDIDALARMVDPALNGMYPAKSLSRFADVIALCVQPEPEFRPPMSEVVQQLVRLMQRASIVRRQSGEELGFSYRVPEREGDLRDISL

SEQ ID NO: 208888 - protein, 56 aa, Zea mays
  Clone ID: MRT4577_12209C.1.pep
PLPLILAWLEHMPHIFFFKWREFRSFVRILALQCHGTITYLIIKTLTRPSSSSLFY

SEQ ID NO: 208889 - protein, 92 aa, Zea mays
  Clone ID: MRT4577_1220C.1.pep
TLLEKKQKKKKPRAALISPGYLQDKQLLPFTQLVGGTPVAFLTHPQLWPFYQHAAPKVGTLLQWKQWWPFNQLALTNPAGLYQQPIMGGALF

SEQ ID NO: 208890 - protein, 64 aa, Zea mays
  Clone ID: MRT4577_122100C.1.pep
LSPQLLQVASALGVTVSFFSAAPVEGRNQARYGEPRSSSGAGECLFFALAGSAGVCFIPEVLSV

SEQ ID NO: 208891 - protein, 49 aa, Zea mays
  Clone ID: MRT4577_122101C.1.pep
VMNLDALIQRAGAQTRGTRAGRRVAEAPRREEKLLIEYFDITQAACSSL

SEQ ID NO: 208892 - protein, 53 aa, Zea mays
  Clone ID: MRT4577_122102C.1.pep
KYVKNIVERSNSVLSLDLRSKQLHFYFIFFYFTISSYITFVNSYCNIFFTLCS

SEQ ID NO: 208893 - protein, 133 aa, Zea mays
  Clone ID: MRT4577_122103C.1.pep
KRAKGSSSTLCARRLTRRTSRGGAAPPSRPCRRERGPMRRRPFLDQRRPSFKRRWQQRPWWVRLLLSLLLALACVLLLAVLLGSPDPDTSPSTFAAFSRSEATSSPLLSQRTYLEGITDALNMTDEMLSAGSF

SEQ ID NO: 208894 - protein, 53 aa, Zea mays
  Clone ID: MRT4577_122104C.1.pep
VVLEIVVKKDDLFSIRNHPMLINQHVLTASRTRPMVITACYVISHKEMDPTSP

SEQ ID NO: 208895 - protein, 96 aa, Zea mays
  Clone ID: MRT4577_122105C.1.pep
MADHQRSATGGGGGYGDLHRGGGMHGQAHQQQKQGAFMTAVKDDTDATFSGAMLVLSELILIGTTIALTVDTPVLEILNPVLETDAIELELMAVGL

SEQ ID NO: 208896 - protein, 163 aa, Zea mays
  unsure (1)..(163): unsure at all Xaa locations
  Clone ID: MRT4577_122106C.1.pep
PKKENKTGERGKKGKKRPPPHHKKRRGKKNQNXNKKGGGRKHHPRPPKGRKNXPANPPSPGKGQTETPQTPKKXGTKNQKGPPKANPNNKNKEERPKKTPRGNKGNKHGAKRPNXPHQPKKAKQGHPNGGPKRASGPKNTNTPGPGGEPRKPGPEPAGNQQPQ

SEQ ID NO: 208897 - protein, 108 aa, Zea mays
  Clone ID: MRT4577_122107C.1.pep
INQEHSTCLLLTYSYHAYEHIPFFLLHARKKGIDINLVTKKINAPLMTAWKYLPYRLVHSLHAWKPCIMPRNRVVFHDIQELHCPKSFRKQNLQIFQLQHGLVGYHTI

SEQ ID NO: 208898 - protein, 73 aa, Zea mays
  Clone ID: MRT4577_122108C.1.pep
MFAWFFLSALYMQRVLGYGPLQVGLAFLPANLIMAAFSLGLSARIVMRFGIRGPIAAGLLIAACGLALFSSAP

SEQ ID NO: 208899 - protein, 78 aa, Zea mays
  Clone ID: MRT4577_122109C.1.pep
LYFLFIKTNETKTQLLAFYKWAVNYRQLTYRGVDAKLATSKGFFFTSENNIQPLRDILATYKEKMGYWQLWMDPGTLG

SEQ ID NO: 208900 - protein, 54 aa, Zea mays
  Clone ID: MRT4577_12210C.1.pep
PQGYGFSSLDSLTAFALKLCKVFLSDEKVKILLTLIHGAFHLLDMKFLCGLISN

SEQ ID NO: 208901 - protein, 35 aa, Zea mays
  Clone ID: MRT4577_122110C.1.pep
LLLTLKLAKMFANFFMHGFLPEPVKALCSKKGIMC

SEQ ID NO: 208902 - protein, 89 aa, Zea mays
  Clone ID: MRT4577_122111C.1.pep
VPRGRPSWTSGAGRDVVPLNVTKTYYIISGRGFCFSGMKIAVHVEKLPPPPKAAPVKSAAPTLFSQDRILLMPVVFAIGAAWDAFIHFW

SEQ ID NO: 208903 - protein, 60 aa, Zea mays
  Clone ID: MRT4577_122112C.1.pep
IASGRRFFFFGGWVFLLTKPFVLFVTFSENRRIAVRAWTDDFIYSHAVYLDWCYYGLCQK

SEQ ID NO: 208904 - protein, 207 aa, Zea mays
  unsure (1)..(207): unsure at all Xaa locations
  Clone ID: MRT4577_122113C.1.pep
SRHRSARWTPVVVAPTMLQYLDFSHASTSRKWAHRRQGDGLEAPRNSMEFALEASHSYGVFQEDVPHYPCNMRQYPKSGLNHGFNPVKKLIQEDISFRTNEVQKRPGGVIARLMGMESPPLNAATESISRSEITPRPTMPRRDPPERETSAKHVSFVQHGNRDSTKQASKQEIRAYGEGXDVFGQQNKRGNDWSKPQPREHPQXGGA

SEQ ID NO: 208905 - protein, 144 aa, Zea mays
  Clone ID: MRT4577_122114C.1.pep
PRDSEMSNEWTPELKAMAERIINMRQQPSKAPKPRGTPGDWSHTIKQKGRFTSTGLKSEQAPSMRQESPTHMTPDGRTSMPGLSMRTVPHLAEAKHAAVTQRKGGKNPSFREKTRNPPQQCPKYPPRGINGWPHRSLRRKRKVV

SEQ ID NO: 208906 - protein, 122 aa, Zea mays
  Clone ID: MRT4577_122115C.1.pep
AIPARERTRKQFCGAIRAQAGPIEPQIARLCSPSLFPRRVINEKAAALRLKKDHNQTPAALSPPPCRTQQSTFYLDKPAPICERANKSTSFCSQSEGTAGAESRARGPEARGVHSLAQLAQR

SEQ ID NO: 208907 - protein, 153 aa, Zea mays
  unsure (1)..(153): unsure at all Xaa locations
  Clone ID: MRT4577_122116C.1.pep
MSSASSSAAAANAGEGSGGAEEGVEITYVSYGGEQHLPLVMSLVDEELSEPYSIFTYRYFVYLWPQLTFLXTELVTRSIRAMMESGCEELVSSDQVTLEAEVTNKGALALYGRLGFIRAKRLYRYYLNGVDAFRLKLLFPRPDNDPQIFGIID

SEQ ID NO: 208908 - protein, 98 aa, Zea mays
  Clone ID: MRT4577_122117C.1.pep
RRRSRASSSSLRCTRSHPSGSRVLAFAVGPLNPFSPARPRLRPSGGHRQYSAGRLLFIWSHRLSIFLVLFVQTSKLRHRHSTARPVCARKFSWSCPLS

SEQ ID NO: 208909 - protein, 100 aa, Zea mays
  unsure (1)..(100): unsure at all Xaa locations
  Clone ID: MRT4577_122118C.1.pep
LFIFFFFFYFYFFFLFNRWALFNSSTYLQHQQLLPFIQLSDFSPATFLIQPQLLPXYNITXPNATTLIQLQQLLPFNLTYXLTNTSIXFYQHPIIEHALN

SEQ ID NO: 208910 - protein, 201 aa, Zea mays
  Clone ID: MRT4577_122119C.1.pep
MSSAAASSSPAAGSEGSGGAVEGREIAYVSYGGEHHLPLVMSLVDEELSEPYSIFTYRYFVYLWPQLTFLAFDARDGKCVGTVVCKMGEHRGAFRGYIAMLVVLKPYRGRGIATELVTRSIRVMMESGCEEVTLEAEVTNKGALALYGRLGFIRAKRLYRYYLNGVDAFRLKLLFPRPDPGLPPMMVGNDRDDQKMDSPYL

SEQ ID NO: 208911 - protein, 191 aa, Zea mays
  unsure (1)..(191): unsure at all Xaa locations
  Clone ID: MRT4577_12211C.1.pep
RCPGEYRKCTVTATLQIVLNTYDSPTDTSFTGSVRMPPIRRPDMRXCMLVDGLPAEEAXTWHLTXLADEGLWKMIMDKKLVKILDEKYTCRFLASEDIXLSLIPRLLGPGLNKAREVPTLGTHLLSLESRVMLTKVAVKFXLHDVLCVMDDVVYLLMCRDDILQIIHMSVNFLXVLLNKTVMMSXCLYVKS

SEQ ID NO: 208912 - protein, 153 aa, Zea mays
  unsure (1)..(153): unsure at all Xaa locations
  Clone ID: MRT4577_122120C.1.pep
SSGRPGRCTSFFFFFFFFIKKTTAAAPPGRAADINNNDGGGRTRIKGAGPPLPGGGRKKRGRSSTYKRGEKKTPPPTKILGKKNIFPPAGGGKRKRPIALFPTRAASGGKEEGLSLGIKNNGGGGGXXXNRXNXKRPKTHDPRFCFFFFFXGG

SEQ ID NO: 208913 - protein, 228 aa, Zea mays
  Clone ID: MRT4577_122121C.1.pep
MSSASSSAAANACEGFCAFDTSFTYSVFHTTAAMSSASSSAAAANAGEGSGGAEEGVEITYVSYGGEQHLPLVMSLVDEELSEPYSIFTYRYFVYLWPQLTFLAFDARDGKCVGTVVCKMGEHRGAFRGYIAMLVVLKPYRGRGIATELVTRSIRAMMESGCEELVSSDQVTLEAEVTNKGALALYGRLGFIRAKRLYRYYLNGVDAFRLKLLFPRPDNDPQIFGIID

SEQ ID NO: 208914 - protein, 121 aa, Zea mays
  Clone ID: MRT4577_122122C.1.pep
MGLSARRTAEVVVRHDDFLTQEEYVDGAHRYRWREATRDLEVVLSVTVTGSSSSSAEAVAHRVTVRHCCPAPPAPLPANRRSAAASPRDDVAASDNQSNHLHRSDLASFGSSEVRDLCGGL

SEQ ID NO: 208915 - protein, 143 aa, Zea mays
  unsure (1)..(143): unsure at all Xaa locations
  Clone ID: MRT4577_122123C.1.pep
MVVLRGRKRRANYKMLDKLWDDVEAGPRPHTGLEKLRKATTDRPLGINKDADGGXLAGXSMTSTPTTPVTXTRRRASTTSRGAVNLWRSDFHPGSPLYTKGMGVRLFDRSQSNSPTVYHWVYCEXTRSNHRYIWRDGCTRNTA

SEQ ID NO: 208916 - protein, 429 aa, Zea mays
  Clone ID: MRT4577_122124C.1.pep
MPTNISDGIRKSSRLERNEDVKVADKAISRAEAKDAFLNKGHYKKLKKDLISKIDTLDKISETSGLSDTDRFMKLDLESNLKKIVDEENISLKQKARDKFMLDGDENSKYFHLLAKHKKRRLKILTLSHGDSLAHDDSSISFDNLDMKHLEEEDKDLLICPFSLEEIKEVVFSLKHNSAPGPDGFPSEFFQDFWDTIKSDLFNLFNSFHDGSLNIERLNFGIVTLIPKVPDATDIKAFRPICLLNVCYKIITKVLTNRLAHCITSMISDLQYGFIKGRYIMDGVLSLHEIIHEVKQKKHNGVIFKVDFEKAYDKVNWKFLHNMMIKKGFGDKWSDWVLKTVKGGKVAIRTNDVVDPYFKTHKGVRQGDPFSPLLFNVAADGLACLIQKAKDEGIIKGLIPHIISGGCCCLQYADDTIFCCKMILKMPEI

SEQ ID NO: 208917 - protein, 407 aa, Zea mays
  Clone ID: MRT4577_122125C.1.pep
MKPLHLRSSGSFKRLLLLSIGHRSPPTTNPPVADADARESPEEPGSPRCSSSGPAWRCFSYDEVDRATGGFHERNLVGRGGSSEVYRGELPGGRAVAVKRLLGASACERRERDFLAELGTVGHARHPNVCGLLGCCVDRDLYLVFDLSRRGSVAANLHDEALPAMGWAARYGIAVGTARGLEYLHKGCRRRIIHRDIKASNVLLTDDLQPQISDFGLAKWLPSEWTHRAIAPIEGTFGCLAPEYYTHGIVDEKTDVFAFGVFLLELVTGRKPVDGRHRSLLSWVTVARPLLSGDGKVEALVDPRLGGDYDGEQARRVTFVASLCVRAAATWRPSMTEVLELLEGGEIRQDRWAMPETAVANDDGEQQPWWFDVLDDFDDDDDDQDAGGEEFSTPSPSSSSSSSTTSN

SEQ ID NO: 208918 - protein, 73 aa, Zea mays
  Clone ID: MRT4577_122126C.1.pep
RPSLLTFPGEFLLLSLEVPHPHRLFILSPAPMKGPSSAWRIRRPGRLQRCQGLPAATLSPVIHLSSGSPTESC

SEQ ID NO: 208919 - protein, 50 aa, Zea mays
  Clone ID: MRT4577_122127C.1.pep
NKHYFKNKPSKNIQTYGPFTEGRKKLFYSITLNSVHFPSRHIFIPGHTLP

SEQ ID NO: 208920 - protein, 39 aa, Zea mays
  Clone ID: MRT4577_122128C.1.pep
MGGVILQVMRSLLCKSVIPDLLSSQFLIITGFIRMSFAY

SEQ ID NO: 208921 - protein, 24 aa, Zea mays
  Clone ID: MRT4577_122129C.1.pep
AGQKVREESERLRACDSRNMSRLQ

SEQ ID NO: 208922 - protein, 84 aa, Zea mays
  Clone ID: MRT4577_12212C.1.pep
SPPRLSTTWPWTGCFSGKARPKFQSISQKAQKTQERVSKPGGQRFQGKVAGRFPPFRAWGGFSSPWQEKRVVGPKGFFFSVALE

SEQ ID NO: 208923 - protein, 86 aa, Zea mays
  unsure (1)..(86): unsure at all Xaa locations
  Clone ID: MRT4577_122130C.1.pep
HTLGLKSRLTTLRTSKGQLIIIASNXPSLTKFVIEHYAMLPKVSVHHLHGHNVDVGTVCRLDFRERCLYFIDPGDLDIIRTTPGTQ

SEQ ID NO: 208924 - protein, 69 aa, Zea mays
  unsure (1)..(69): unsure at all Xaa locations
  Clone ID: MRT4577_122131C.1.pep
VSHLRGKTSISDFNSCHYFATELLTLNALTSACHYYEYPLPIWGLSGGFFXKIFLQNSLIYYSHHSHII

SEQ ID NO: 208925 - protein, 291 aa, Zea mays
  Clone ID: MRT4577_122132C.1.pep
MRPAAAAATATTAALRLRAASLSPSLAASLSPSLAALLSHRRSSLILPPLRRICSLAPPHSSAAPNSQPPPQLLSPIMDAQFVLFRAQLDESSTLRDRIRAVVAEIESASRVATAALLLVHQPVPLADVLVKAKAQVEVIKGLYARLAEVLKECPGQYYRYHADWRTETHMVVSMLAFMHWLETGGLLMHAEAQEKLGLCSGEFGLDVEDYLTGLCFMSNEFPRFVVNRVTAGDYDCPKRVLGFLTDLHASFRMLNLRNDFLRKKFDGMKYDLRRVEEVYYDVKIRGLVPA

SEQ ID NO: 208926 - protein, 45 aa, Zea mays
  Clone ID: MRT4577_122133C.1.pep
VREARNDIIVGSRSQRELLLPGVMLPGTVRGLDVWTTRRRECARF

SEQ ID NO: 208927 - protein, 61 aa, Zea mays
  Clone ID: MRT4577_122134C.1.pep
KKLLLLKVTSKFHSTLIDSVLVAAAVEVASVRVNGAADVLTMSVATELMDVVGLSSMLVRC

SEQ ID NO: 208928 - protein, 119 aa, Zea mays
  Clone ID: MRT4577_122135C.1.pep
CFAGIHIISCYPLKYTILKPLVDSVLVKINSFEEKTTSGILLPTTSQSRPQGGEVVVVGKGMIIGDNKVDVNIQKYVKEKFRTTTEKINSRTGRFNKSLSMRMACSITCPSIELGGYNA

SEQ ID NO: 208929 - protein, 117 aa, Zea mays
  Clone ID: MRT4577_122136C.1.pep
NPPKISRAPLVFAVTTPIFFLSGFSRAGFFGPLFFLFSSTPQKRAMPPFPRGVPPYIYIRISSKARAFFFFFFLLQYGSTPFFGDLPPNIWGCFFFLKSPPPLPFFFLFYSPPPPKR

SEQ ID NO: 208930 - protein, 160 aa, Zea mays
  unsure (1)..(160): unsure at all Xaa locations
  Clone ID: MRT4577_122137C.1.pep
PRGAGREXKKKKKKKKKKKKKKKKKKKKKKKKKKKLERGGRGGPRTFPPLKELPPSPGARGPTNNGSRSRRPPPARWAEPPCPGPEHQKKPAAESGLPLFRRGKAARPVPRGERKGVWVRRGGRVKPFGKQRPVPLHGRKQNPEGQASAAAYPRALQNLY

SEQ ID NO: 208931 - protein, 60 aa, Zea mays
  Clone ID: MRT4577_122138C.1.pep
LCRHDDLSIDAANLTACNRAIDCCITKVDVVNMSAAIASRIVKSLSNGFSHTEETSVYRF

SEQ ID NO: 208932 - protein, 145 aa, Zea mays
  unsure (1)..(145): unsure at all Xaa locations
  Clone ID: MRT4577_122139C.1.pep
RSVFPRWSPAPRCLPFFGCSPPRWCPPYLPFLIRALMFLGXFVRGQLGLGPELGPKVLRTFIFLQKLYPGPPPGSGPEFSGPRFFPGGALGMFFPEHPSGRVVSSRGLVPIWVFCPCSAVPVCRLFVVCPRRPYQFSVPVFAPSK

SEQ ID NO: 208933 - protein, 199 aa, Zea mays
  unsure (1)..(199): unsure at all Xaa locations
  Clone ID: MRT4577_12213C.1.pep
MHLCASCDFFQPTPPTQPRARTLHVASAGNWHSHCAAVGSTGSSPPMGFFRRIAGFLGISRDDADHPDSPTSVXRRGGGGTXHDRAAAHGVRQGFSVKVPVHVERQVPVPVLVPCPQGDGGVQGFRWYTRRLRIDEDGDVADEFLDEIIPEGSISNDKSARFQVKYNNKPAAVALRKQVIAVDGDIRHSLEHQGQLRWV

SEQ ID NO: 208934 - protein, 161 aa, Zea mays
  Clone ID: MRT4577_122140C.1.pep
MGSASRAVSCLCCPCKCLACGLLSCLCSILVSLAVVLGVVALILYFIFKPHMIAATVDSASLSQFALSASSTLSYDLNVTMTVRNPNTRVGLYYDDVQALALFSDQRFGYAPLDAFYQGTQASTQLSPGFRGTQLLQGDVTAAEFRQEQSAGNFAVDVDLT

SEQ ID NO: 208935 - protein, 85 aa, Zea mays
  unsure (1)..(85): unsure at all Xaa locations
  Clone ID: MRT4577_122141C.1.pep
MGSASRAVSCLCCPCKCLACGLLSCLCSILVSLAVVLGVVALILYFIFKPHMIAATVDSASLXQFALSGSSTLSYDLKVTMDGRN

SEQ ID NO: 208936 - protein, 120 aa, Zea mays
  Clone ID: MRT4577_122142C.1.pep
GIHSSESLSGNKVSNNYFGSDAVSGNGDATYPAKSNAQQPSSCAPDVRKQSKASITVYQPDMSVYLTSDMVSSCEGSYVSAGEPLQRSLSSGRTIGKVTVVNKRPSYPSSKVVSAQKSQD

SEQ ID NO: 208937 - protein, 206 aa, Zea mays
  Clone ID: MRT4577_122143C.1.pep
MGSASRAVSCLCCPCKCLACGLLSCLCSILVSLAVVLGVVALILYFIFKPHMIAATVDSASLSQFALSASSTLSYDLNVTMTVRNPNTRVGLYYDDVQALALFSDQRFGYAPLDAFYQGTQASTQLSPGFRGTQLLQGDVTAAEFRQEQSAGNFAVDVDLNAKLRVKVWAFKVRGPKAKVTCKLSVPAPGAANASPFQPTVCKVWF

SEQ ID NO: 208938 - protein, 104 aa, Zea mays
  Clone ID: MRT4577_122144C.1.pep
MLNIDVPDHPDGGSNALNVNSLRIPLQSVTHPETVVGKQNPSPKSHANNPARKLARKILEDSLVKLDSMPSINSRIIRWELGSSWLQQLQKKDSPASENVKRNA

SEQ ID NO: 208939 - protein, 116 aa, Zea mays
  unsure (1)..(116): unsure at all Xaa locations
  Clone ID: MRT4577_122145C.1.pep
HCPGALSHPPPKRQVPRTIKTHSKNKERNESPLHNLTLYCNRRDRLLVQVKFRTCRKKSMYVGLNTSAFXESSSITKKIMMDLXCQNCIHYSLHAINKGQNVYIAADEIRHGMSLL

SEQ ID NO: 208940 - protein, 53 aa, Zea mays
  unsure (1)..(53): unsure at all Xaa locations
  Clone ID: MRT4577_122146C.1.pep
IYMPQCIFCGFCQKACPVHAIVXGPTFSLPLXTPQELLFPKEKFLXNGDPWET

SEQ ID NO: 208941 - protein, 329 aa, Zea mays
  unsure (1)..(329): unsure at all Xaa locations
  Clone ID: MRT4577_122147C.1.pep
MLSMRPPSTTLSRPSIWPRRGRLGGAAAPQYVSAAAPAPALEPAAPPESVSFPILVNGCTGNMGLSVAEAAALRGLHLVPVSFSSREKVEKTMQVGQTDIQIYGPSKREDVLSSIADEFPDVIVVDYTGPGSVNSNAELYCKLGLPFVMGXTGGNKHLLYKSVQDSKNYALISPQMGKQVVAFVAAMKIMAEQFPGAFSGYHLEVLESHQAGKLDTSGTAKDVIACFEKLGVSYDMNRMVKIRDPEQQLEMVGVPEEHIQGHAFHLYHLTSPDDSVSFEFQHNVCGRSIYAEGTIDAAMFLHRKVQSKDSKRIYNMDDVLQEETCHKAY

SEQ ID NO: 208942 - protein, 70 aa, Zea mays
  Clone ID: MRT4577_122148C.1.pep
MAQFNITLKKDAPKEELEAAKKKVTDQGGKIINEFTLIKGFTAEIPDDVVSTLESNEHVTVEKDAEVRTQ

SEQ ID NO: 208943 - protein, 118 aa, Zea mays
  Clone ID: MRT4577_122149C.1.pep
MREGIWTHMGQPGIQAENPCWKLTCLNHGIKAEGQIPGDKTMGGGDDALNTFLRETGPGKHVPRAVFVDLDPTVINEGRTGTYRQFFHPEQLIRGKEDAPNNFVGGHYTIGKEIVDLS

SEQ ID NO: 208944 - protein, 79 aa, Zea mays
  Clone ID: MRT4577_12214C.1.pep
ETITDLAVAIWGVPKPFYQKSPTYAWGGGAPLSYHKQKPCTRSKTLLMGTLRTKRTQTPFSLLNWPKHEHSRPRFSVPK

SEQ ID NO: 208945 - protein, 77 aa, Zea mays
  Clone ID: MRT4577_122150C.1.pep
GAKHYLHIRSWYQKPGITMGMDVHSPKLIYNQTATIYNIFLHTDKKKLYVIKLKTHIKRWCLMCHLSTPETHAGHLH

SEQ ID NO: 208946 - protein, 56 aa, Zea mays
  Clone ID: MRT4577_122151C.1.pep
TTPTGNERKPFFFLQGTGAFFGFMCEHLAPLVSDHSYAFHHGSLPGLKSVFTPGTK

SEQ ID NO: 208947 - protein, 122 aa, Zea mays
  unsure (1)..(122): unsure at all Xaa locations
  Clone ID: MRT4577_122152C.1.pep
TDKAIERLLSQLRKESLKIIPVNASSEVDALYSFKTEFSVNEDLHLIXLYSEKGISKDRILIKIAATXEDIKARRDPPAXHGINTNLTLMVSLIQAIGAAEAAAYLISPFVGXILDWFKPLP

SEQ ID NO: 208948 - protein, 77 aa, Zea mays
  Clone ID: MRT4577_122153C.1.pep
STSGASLNVNHPPPHFCQTESNSCFVKNGAAYPKGGCIVKKGVLPVVISYPPLSSPAVGSSKPGGVIRKMFSKCCFF

SEQ ID NO: 208949 - protein, 324 aa, Zea mays
  unsure (1)..(324): unsure at all Xaa locations
  Clone ID: MRT4577_122154C.1.pep
MERDGQQTRRDKLIIDTDPGIDDSMAILMAFRAHTLEIIGLTTIFGNVDTEGATCNALLLCERAGHPEVPVAEGSHEPLKGGKPRIADFVHGSDGIGNLFLPAPSAKKVEESAADFMVNKVSEFPGEVSVLALGPLTNVALAIKRDPSFASKVNKIVVLGGAFFVAGNVNPAAEANVXTYCIILEEANTLTXYXLECITLQIHGDPEAADIVFTSGADIVVVGINITTQVCLTDEDLLELRNSKGKHAPFLYEMCKFYRDWHVKSDGFHGIFLHDPVSFIAVLHPEYFTFKKGVVRVETQGICTGHTLMDQGLKKYVFFFLSNS

SEQ ID NO: 208950 - protein, 149 aa, Zea mays
  unsure (1)..(149): unsure at all Xaa locations
  Clone ID: MRT4577_122155C.1.pep
MERDGQQTRRDKLIIDTDPGIDDSMAILMAFRAHTLEIIGLTTIFGNVDTEGATCNALLLCERAGHPEVPVAEGSHEPLKGGKPRIADFVHGSDGIGNLFLPAPSAKKVEESAADFMVNKVSEFXGEVSVLALGPXDNVALASNRPSLQ

SEQ ID NO: 208951 - protein, 170 aa, Zea mays
  Clone ID: MRT4577_122156C.1.pep
IVVLGGAFFVAVNVNPAAEANILGDPEAADIVFTSGADVIVVGINITTQVCLTDEGLLELRNSKGKHAPFLSETCKFYRDWHVKSDGFHGIFLHDPVSFTAVLHPEYFTFKKGVVRVETQGICTGHTLMDQGLKKWNSENPWSGYKPISVAWTVDVPKVIGFVKKLLMAP

SEQ ID NO: 208952 - protein, 78 aa, Zea mays
  Clone ID: MRT4577_122157C.1.pep
SKFKQPSEYHRILVSFIRCIHRAFYGFLALWHLSDATASAAALWWQKQNGWWWRSSGGSSSSSSTAVAAAVGRALKFS

SEQ ID NO: 208953 - protein, 326 aa, Zea mays
  unsure (1)..(326): unsure at all Xaa locations
  Clone ID: MRT4577_122158C.1.pep
MGQDGQQIRRDKLIIDTDPGIDDSMTILMAFRAPSVEIIGLTTIFGNVDTKGATRNALLLCERAGCPEVPVAEGSHEPLKGGKPRVADFVHGSDGIGNLFLPAPSAKKVEESAADFLINKVSEFPGEVSVLALGPLTNVALAIKRDPSFASKVKKIVVLGGAFFAAGNVNPAAEANIHGDPEAADIVFTSGADVIVVGINITTQVCLTDEDLLELRNSKGKHAPFLYEMCKFYRDWHAKSDGFHGIFRSELENCTSENPWSEYKPIAVAWTVDVAXGHQLYKELLIQGLKKWNSENPCSRYKPISVAWMVDVPIVISFIKKLLMAP

SEQ ID NO: 208954 - protein, 278 aa, Zea mays
  Clone ID: MRT4577_122159C.1.pep
MASAEIPNSSPDATNPAPAAAAAAATGPDLSSSPPPLPPRKRRLSPSPPPTRSASRSRSPRSRSPHGRRSRSRSRSPQQYPTDGKRQRHNGLTVDACRDFLRDRCTRSDLECRYAHPHNSVSIDLDNKVTACADSLRNNCFRGMTCRYYHPPPHIQEQLLRSVGVEDPKVKTICRDFTRGKCSRSANECRFLHHSSVEDAAIVCQDFLRGQCNRIACRYSHVVAHPVPPMSHVPMPYPEMLYMPPPPPPPLGVPMMGPLPSPPNLLIIRTELKFVGTS

SEQ ID NO: 208955 - protein, 81 aa, Zea mays
  Clone ID: MRT4577_12215C.1.pep
SPPEPYGYPVFGGPFTHQTRGDSGSNLGKDGPPVDPFPVCPPDTSGWNPKPVAFQGLRVKPGPGPIFPFLPQGPVVWTPGG

SEQ ID NO: 208956 - protein, 57 aa, Zea mays
  Clone ID: MRT4577_122160C.1.pep
VLAVELMAATDPQVAVANKKRAADSGKATDANKIHDDYCSTLCEGKKGTDLVEYKEC

SEQ ID NO: 208957 - protein, 85 aa, Zea mays
  Clone ID: MRT4577_122161C.1.pep
SKFKQPSEYHRILVSFIRCIHRAFYGFLALWHLSDATASAAALWWQKQNGWWWRSSGGSSSSSSTAVAAAVGRALKLRKQAVPIC

SEQ ID NO: 208958 - protein, 192 aa, Zea mays
  unsure (1)..(192): unsure at all Xaa locations
  Clone ID: MRT4577_122162C.1.pep
AAFFFFFLFFFFFFFFFFFFFFFFFFFFFFFFWKKARTAPRLFPGKKKVLEQSPWGNPKAGGQGNPRNKNPAGEGWVFKTEINPPRGQGKSHNSKSXTGQPGKNPTQGKPNPQLFQNPPAGPGGPQXPPQRGGDNPPPXPGFNNGGTGKTRXTPTKRPGKXKPPFPRGGKSKKAPPKPPSKKGPTPEGKGKL

SEQ ID NO: 208959 - protein, 66 aa, Zea mays
  unsure (1)..(66): unsure at all Xaa locations
  Clone ID: MRT4577_122163C.1.pep
KKKKKKKKKIIKKKKKKKKKEQKKKKKKKKKKQKKKKKKNKKKTHKXKYKKTKIKKRIDCKNPHNT

SEQ ID NO: 208960 - protein, 113 aa, Zea mays
  unsure (1)..(113): unsure at all Xaa locations
  Clone ID: MRT4577_122164C.1.pep
GRAGGLWGHQLTHGRVDKDTGRNLRLDFEKTPDTLEGPLEQPVTKANRTLKDAIGGGGKLPIRXDRGGVGRPRQAGGXQCSGRERWPEAWVRGIVGVLRNAESNADVKGLGVG

SEQ ID NO: 208961 - protein, 38 aa, Zea mays
  Clone ID: MRT4577_122165C.1.pep
LTQPLAPLAAPRHHRNRDLRGRRRRIVTCAGLTSADTG

SEQ ID NO: 208962 - protein, 48 aa, Zea mays
  Clone ID: MRT4577_122166C.1.pep
HSPCIHSLIASDPRFYSQRDSYYFHLSISRSFCFLTLLSIHIILLFHL

SEQ ID NO: 208963 - protein, 69 aa, Zea mays
  Clone ID: MRT4577_122167C.1.pep
RPYKTLINCRLYCLLKEIHVQAEHVQSELALRATWRQPGSFKRVDIQHDWMKRKVSCKMEWRDQRRKWL

SEQ ID NO: 208964 - protein, 89 aa, Zea mays
  Clone ID: MRT4577_122168C.1.pep
MTKDDAVPVAVAPAKRPPINKYAFGCALLASMNSVLLGYDISVMSGAQIFMKEDLKNTDTQIEIPRGVIHIYSLFGSLAAGMTIDWLGR

SEQ ID NO: 208965 - protein, 99 aa, Zea mays
  Clone ID: MRT4577_122169C.1.pep
PLPPANVSGPTCRLACNPRRQAAAAARGTPLTATRGRGRTQQQHRDATGRAWGKRDDDGGTWLWWTGSGRGEKKNKVVETISPSERMSRARAEGQRQAG

SEQ ID NO: 208966 - protein, 39 aa, Zea mays
  unsure (1)..(39): unsure at all Xaa locations
  Clone ID: MRT4577_12216C.1.pep
QDTELGQVIQLQGEQGXNVATFLVQAGIVKKVSFNIHGF

SEQ ID NO: 208967 - protein, 420 aa, Zea mays
  Clone ID: MRT4577_122170C.1.pep
MQGKAQLSDSNRRIMELDAPPRRVYQAWKGSNLFFLGGRLIFGPDVRSLVLTVCLIVVPEIFFAATVCPQLGHEFHSQIGGWVASVAVIFTGYILIVLLITSGRDPGIVPRNTHPPEPEDIDESSNLPDCPGGQQGSTGLPPTRDVLVNGVSVKVKYCHTCMLYRPPRCSHCSICNNCVERFDHHCPWVGQCIGKRNYRFFFMFVSSTTVLCIYVFAFCWVNLRRIMDTHQCKIGRALLKSPISGLLILYTFIAVWFVGGLTSFHLYLISTNQTTYENFRYRYDRRTNPYNLGVGQNFIDVLFSRIPSSKHDFRAKVKADSSTFASSLSMGRVLSPPKTSVDLEMGMKRQAVAAEDLEDLHSQIGSAMGLERCGTEPPHFVGRKGCSEMSPDIEVFAEEFGMEGGHSERKKIERRTNDDS

SEQ ID NO: 208968 - protein, 79 aa, Zea mays
  Clone ID: MRT4577_122171C.1.pep
CLLRVVCSILLICRWPPPRSSFMAYVPRRCLSKRIIVHCSWPPPITMSSVIGIVVMPFGHRLQWYIHPPHAPQPLYQLE

SEQ ID NO: 208969 - protein, 62 aa, Zea mays
  Clone ID: MRT4577_122172C.1.pep
WLRGEQKALIIFAIEPIVTGSHHAYMRGTRISMHNVYRGLTSLTEAAGPRHSEMAWILAAGQ

SEQ ID NO: 208970 - protein, 69 aa, Zea mays
  Clone ID: MRT4577_122173C.1.pep
VPPLSWPPQSNVFPLQCRPLPVSAYHMLFARASYSAQNRTFILLHIFNEDLDFSSDTSFTSPTLTSLIS

SEQ ID NO: 208971 - protein, 57 aa, Zea mays
  Clone ID: MRT4577_122174C.1.pep
HCIGGLSVSDRTVGLDEPIQARRPWRKLVSGCLAQGHATGEQVRIVLGPREAYASIT

SEQ ID NO: 208972 - protein, 68 aa, Zea mays
  Clone ID: MRT4577_122175C.1.pep
AYREIYKLKFKEIMKGRLTRMATMGDIIQGFVSGVVPFLNLFDHLVDPVSNHVLTSFMFHYKLVYQQT

SEQ ID NO: 208973 - protein, 64 aa, Zea mays
  unsure (1)..(64): unsure at all Xaa locations
  Clone ID: MRT4577_122176C.1.pep
MSDPSLDTSSXITTKDLKQKKEVVEDAENGRDPTANGNANDENWEQEAHNEVDXKYEEGGEEEH

SEQ ID NO: 208974 - protein, 76 aa, Zea mays
  unsure (1)..(76): unsure at all Xaa locations
  Clone ID: MRT4577_122177C.1.pep
ANAVLDWVYCIMRSGXTAKGDYPLEAARHEQLIAREADAAIYHLQLCDELRRLAXVTSYPTEATAVGSVDASFKFC

SEQ ID NO: 208975 - protein, 40 aa, Zea mays
  Clone ID: MRT4577_122178C.1.pep
PYYLDLYPGFPIIRCVLVVEIKWKMYFLTPVGSQLYNWSP

SEQ ID NO: 208976 - protein, 59 aa, Zea mays
  Clone ID: MRT4577_122179C.1.pep
RHVLFPRPMDKHFIESRLLKNLQWRRHRAGGAKHVPVAPVKLNPFPDSSSMRFNIKVLH

SEQ ID NO: 208977 - protein, 67 aa, Zea mays
  Clone ID: MRT4577_12217C.1.pep
TSRPGTPEPAARGAPVGHCGRHHARGHPIRSIERTACPDRSKDHARPAGRAAKQHPRARAIRRTSAP

SEQ ID NO: 208978 - protein, 99 aa, Zea mays
  Clone ID: MRT4577_122180C.1.pep
FCYTSSVANSRATWAVRPAPFTLPPCLLLPSQRPRLDLYWIKRAFLLLPLNTMRPRPGPGRKSGSLRKQGFTPSNTTRSWPLSPICVFGSGMVTKLLIC

SEQ ID NO: 208979 - protein, 88 aa, Zea mays
  unsure (1)..(88): unsure at all Xaa locations
  Clone ID: MRT4577_122181C.1.pep
VSRVRKCSISSSSXMRSFVFSSKRLEEPMFTIHCIFYQYCENILSLHRINRVPLKTYGSDPLGLVRFFQLENRHVFIPAPDEVDPGGS

SEQ ID NO: 208980 - protein, 160 aa, Zea mays
  Clone ID: MRT4577_122182C.1.pep
MEDALAPPSVAPTPSPLAAAAVLTRRRSHLDSASFRTGARLFSHCLHINPSPCGISPPVPEPVAADFVGGDPDDSPERPNGADFDRLKDVQIEAADAGGPSLHGTVHQPAAANSTLDLVEAEAEALQLEGADAVGVVESTSCMTRAEAGESAVLVVESTS

SEQ ID NO: 208981 - protein, 82 aa, Zea mays
  Clone ID: MRT4577_122183C.1.pep
PTRPPTRAWISRPPTSKPPGERSLTHDSQSAAHGCSYTACFDRHRYTAQIIAYLIPLRHIYACKDPNSAHRQHFSHVEIAAF

SEQ ID NO: 208982 - protein, 127 aa, Zea mays
  unsure (1)..(127): unsure at all Xaa locations
  Clone ID: MRT4577_122184C.1.pep
MGAHRIRYGKRHEAFTESGGMKXRKPDDDTXAPGPENTVHRYLRTSRKIASVIVKRGEIAKQGRTETQTKIRMGHSVPAXEERVATIVNTSRKTNTSDGAEHEACPTQDTLFRVHKRLAIEDVIGNE

SEQ ID NO: 208983 - protein, 206 aa, Zea mays
  Clone ID: MRT4577_122185C.1.pep
PAASTAAAAAAASSRSRRATRSLSPFRVRGGGGGGGGVDDDEESPPSPRTSMMRGCGSGSKKWRLKDLFLFRSASEGRATTGGGSKDPLFKYTMLSSSSQQTLRTGGDGSASMRKGRGSAASASDMPMPYAVPRGAAAAEDARRRTTATTPLPFHRNSLFGYLRSNPAIHSISRKLGGGGGGGGSSSSNHPVPPAASNSSSRGRPT

SEQ ID NO: 208984 - protein, 83 aa, Zea mays
  Clone ID: MRT4577_122186C.1.pep
TVSIGLHTSLLLYAIQQKASDTNTEAQSIFSEVPPKIVCFSAQYIDSPTLMSLSGFRPPEAGKSREDINGLSDLLGLGNQLGE

SEQ ID NO: 208985 - protein, 43 aa, Zea mays
  Clone ID: MRT4577_122187C.1.pep
YISCSHTNLHRKVPILDDVLPSALVNVIHHSVNIGVSRRRTRR

SEQ ID NO: 208986 - protein, 155 aa, Zea mays
  Clone ID: MRT4577_122188C.1.pep
MMPSSFIKFEPITPTSITVVFDLARCPYISQGVAGFKVWHQVDGTGFYSLNPTGTVHLMSKTFVVTELKPATCYMIKVTAFSNSSEFAPWEARVSTSSLKESDLKGLAPGGAGLVDQNNRSPKTNSGGQSDRSSEGVDSNNNATVYTDLNNVAGK

SEQ ID NO: 208987 - protein, 187 aa, Zea mays
  unsure (1)..(187): unsure at all Xaa locations
  Clone ID: MRT4577_122189C.1.pep
MLALAGGAHHVCRCRRFRDLAAHPAVLSRASAAAVAVPAGRWSDAAHRFLRRCAASGNLHACYLLGMVXPTDRRPPHSSASWNCQFVPLFPEPWYLSVCVVRLLMIPGXFYCIGGRATGAALLARSAAGGHAAALYALAVVQFNGSGGDKADKDPRAGVALCARAAWLGHVPALRELGHCLQDGYGA

SEQ ID NO: 208988 - protein, 173 aa, Zea mays
  unsure (1)..(173): unsure at all Xaa locations
  Clone ID: MRT4577_12218C.1.pep
MDHRQPPPPPNKTAELDPVLHSIGFQIEEVSPSQVTGRLPVTPKCCQPFQVLHGGVXSALVAEGLASMGAHMASGFRRVAGVSLTINHFRRPXVGDVVLVRAAPLHVGRSTQVWDVKLWMEDQQGKKGSQISESRVTLLCNLPVPDNLKHAGDALKKYADAPAAQKSTAPSRL

SEQ ID NO: 208989 - protein, 58 aa, Zea mays
  Clone ID: MRT4577_122190C.1.pep
EELRCTPNKCLKRFFDTGGNGITFKGKGAYRRRRGLNGKTPLPRGAKTYQPTVLAVRG

SEQ ID NO: 208990 - protein, 138 aa, Zea mays
  Clone ID: MRT4577_122191C.1.pep
MCLASLVWEHEHVMDTALTNQIVITPCLPLGRSAAPPVALEALHASGANTDTITALHAQVARVHNFRSPDTSVCASVLMGSFYINYVLVAPQIIHNLLSVLWFTIDNSCSIDFDPFGLSMKDLSTSTLLVRCDSSRSL

SEQ ID NO: 208991 - protein, 63 aa, Zea mays
  Clone ID: MRT4577_122192C.1.pep
KISPLAPANVFFFFFFFFFFFFFFFFFFFFFFFFFNSTENIISTQHRNLSVHIARVLCVVTTA

SEQ ID NO: 208992 - protein, 274 aa, Zea mays
  Clone ID: MRT4577_122193C.1.pep
LRRSGGDRIYGVFDHKLPAAFKKLSFDRYLSVQNVKKVVSEADGYQPHLMAPEQGYRRLIEKGINYFRGPAEATVDAVHVVLKDLVRKSIGETEQLRRFPTLQAAIATAANEALERFREDGRSTALRLVDMEAAYVTVEFFRKLPQDPPADAPASKAGGKPSAEPAAAPPPDRYGDGHFRSIASNVSQYIRMVGDELLQKIPKAAVHCQVREAKRSLLNHFYVQMGKKEAGEFGHMLDEDPAMMERRQQCFKRLELYKSARDEVDSVAWGGSSR

SEQ ID NO: 208993 - protein, 34 aa, Zea mays
  Clone ID: MRT4577_122194C.1.pep
YLLHCPITPICDVKFILTPTHSLIPYPNHVYPLT

SEQ ID NO: 208994 - protein, 477 aa, Zea mays
  Clone ID: MRT4577_122195C.1.pep
MGGGAVNDHFPGASDPLLPTKRDGDGDEDDAGASAFHEFDGASFAGAVFNLSTTIVGAGIMALPATMKVLGLVPGLVMIVLAALLTDASIELLVRFSRAAGARSYSAAMADAFGWWGRRLLQVCVVINNVGVMIVYMIIIGDVLSGSTSGGEHHYGVLEGWFGIHWWNGRLFVLLVTTLCVFTPLACLKRIDSLSYTSTISVALAVVFVIITAGIAVIKLIGGQIPMPKLFPTVSDLASVWELFTAVPVLVTAYVCHYNVHPIHNELKDSTQIKPIVHTSLTLCSTIYITTSFFGYLLFGESTLSDVLSNFDSNLGIPYSSVLNDAVRVSYAVHLMLVFPMIFHALRLNLDGLLFASARPLSSDNRRFGIITASLLLVIFGSAIFIPSIWDAFQFTGATAAVCIAFIFPAAITLRDSQGIAKKWDKILAIFMIVLAVVSNVVAVYSDAYKIFNKESAPSNAWIGESTENRSSWWLVR

SEQ ID NO: 208995 - protein, 146 aa, Zea mays
  Clone ID: MRT4577_122196C.1.pep
EVADRDTLLHLHSAIQYKVGRRPKEVRRRGTQKRLSPPGSRSAQKHAVPVRSARSGADQNLVKPVAGDEGGHQEQVGEAPVAVLPVNGRGVPARRTSPHPSPTWPTTTCHMRPEFHVETRGNRVWRSSDSLATRASIDGRTSSTGQ

SEQ ID NO: 208996 - protein, 106 aa, Zea mays
  unsure (1)..(106): unsure at all Xaa locations
  Clone ID: MRT4577_122197C.1.pep
TSPSSPVRNATLPNRENARNELKAPCRKKNDKXTNPLFKKRPSHFGIGGPLPPXKDLHRFLKLANVVRIQRQRRILKQRLNVPPALKQFTRTLDKNLATNLFKMLL

SEQ ID NO: 208997 - protein, 97 aa, Zea mays
  Clone ID: MRT4577_122198C.1.pep
QNMVPPPSPTSAMPPTVPSTVPMTPTPTAPDTGTPVYGLSPPDYSGSTSPPGYGSTSPPDYNDVSAAAARVRQQGGAALALTLLCVVVATVSLRVSK

SEQ ID NO: 208998 - protein, 97 aa, Zea mays
  unsure (1)..(97): unsure at all Xaa locations
  Clone ID: MRT4577_122199C.1.pep
VKAGFAGDDAPRAVFPSIVRRXPRXHGLLMFAMGHKDAYVRDEGQSKRGILTLNYPVEHVIVNNWDAMEKIWYHTFYNELCVAPEKXPALLSKAPRK

SEQ ID NO: 208999 - protein, 159 aa, Zea mays
  Clone ID: MRT4577_12219C.1.pep
APCPAPVIAEVDIYKFDPWDLPAKAVFGEAEWYFFSPRDRKYPNGVRPNRAAGSGYWKATGTDKPITLSSSSSAAAAAGMIGVKKALVFYRGRPPKGVKTSWIMHEYRLAEALHAVVNAYRPTRFKNNASSSMRLDDWVLCRIYKKTTPQLAYSMSAAA

SEQ ID NO: 209000 - protein, 59 aa, Zea mays
  Clone ID: MRT4577_1221C.1.pep
RWPWHKKALSKGWTSMYGWVYDWEAFFEREALGSVIAVASKRSQLSLQKCNVMRTVNSY

SEQ ID NO: 209001 - protein, 82 aa, Zea mays
  unsure (1)..(82): unsure at all Xaa locations
  Clone ID: MRT4577_122200C.1.pep
MAKEPMLVLVTGAARQIAYPLVPMIARGVMLGADQPDILHMLDITTAAXTLNGVKMDLIDAALPLLKGLAATTDSVEACTGV

SEQ ID NO: 209002 - protein, 434 aa, Zea mays
  unsure (1)..(434): unsure at all Xaa locations
  Clone ID: MRT4577_122201C.1.pep
KLRYVVVEEDAGVELFYYFVQAESGAAAAADDTPFLFWLTGGDRCSVFSGLAYEIGPIRFVLEPYNGTLPRLRYNHNSWSKVSHILFVDSPVGAGFSFSRDPKGYDVGDISASLQLQEFLIKWFSDHPEYLANPFYIGGDSYVGKIVPFLGQMISEGIELGRRPFPNLKGYLVGNPITGESIDFTSRVPYAHGVGIISDQLYETILGHCQGEDYTSPANALCAQALDTFNNLINEVQNAQILLDTCVYASPAPNVXADRXGGRRILRAAGMGGGATLNHPPARPRFGCITYGYYLSYFWANDERTRTALGIKKGTVDEWVRCHDADLPYTIDLKSAIKYHRNLTSRGYRALVYSGDHDLLVPHLGTQAWVRSLNFPVVDDWRAWHLGGQAAGFTINYSNNMTFATIKGGGHTAPEYEPERCFAMFSRWILDRPL

SEQ ID NO: 209003 - protein, 143 aa, Zea mays
  unsure (1)..(143): unsure at all Xaa locations
  Clone ID: MRT4577_122202C.1.pep
ITSRTRYTVGGGPCCEARNLRHSSASLCIYCGKHAREXTKSAAYIGXPWKGFLADAESTGTIGKXLLQQSNVRITGARRTRGALLRAATCSSCPGALHYIIGXVILFXETLYHKTNDGKPFVDVLNDGGVXLTRLKVDKGTIE

SEQ ID NO: 209004 - protein, 500 aa, Zea mays
  unsure (1)..(500): unsure at all Xaa locations
  Clone ID: MRT4577_122203C.1.pep
MTTAAWPRPRFLVLPQPGFLRSVCHGLCSRCLFCFLLLLAFACSSSSGRVVVTSLPGFDGDLPFHLETGYVEVEEDAGVELFYYFVQAESGAAAAADDTPFLFWLTGGDRCSVFSGLAYEIGPIRFVLEPYNGTLPRLRYNHNSWSKVSHILFVDSPVGAGFSFSRDPKGYDVGDISASLQLQEFLIKWFSDHPEYLANPFYIGGDSYVGKIVPFLGQMISEGIELGRRPFPNLKGYLVGNPITGESIDFTSRVPYAHGVGIISDQLYETILGHCQGEDYTSPANALCAQALDTFNNLINEVQNAQILLDTCVYASPAPNVXADRXGGRRILRAAGMGGGATLNHPPARPRFGCITYGYYLSYFWANDERTRTALGIKKGTVDEWVRCHDADLPYTIDLKSAIKYHRNLTSRGYRALVYSGDHDLLVPHLGTQAWVRSLNFPVVDDWRAWHLGGQAAGFTINYSNNMTFATIKGGGHTAPEYEPERCFAMFSRWILDRPL

SEQ ID NO: 209005 - protein, 41 aa, Zea mays
  unsure (1)..(41): unsure at all Xaa locations
  Clone ID: MRT4577_122204C.1.pep
KRTTRAFFPFEPKLIQFTPTHPHTLQNHFFAPCLLRPHQXF

SEQ ID NO: 209006 - protein, 300 aa, Zea mays
  unsure (1)..(300): unsure at all Xaa locations
  Clone ID: MRT4577_122205C.1.pep
MTTAAWPRPRFLVLPQPGFLRSVCHGLCARCLFCFLLLLAFACSSSSGRVVVTSLPGFDGDLPFHLETGYVEVEEDAGVELFYYFVQAESGAAAAADDTPFLFWLTGGDRCSVFSGLAYEIGPIRFVLEPYNGTLPRLRYNHNSWSKVSHILFVDSPVGAGFSFSRDPKGYDVGDISASLQLQEFLIKWFSDHPEYLANPFYIGGDSYVGKIVPFLGQMISEGIELGRRPFPNLKVLNLXDQGYLVGNPITGESIDXHFQAYAHGVGIISDLYEYWGIRGLLPATLSWTFTSSREITQTT

SEQ ID NO: 209007 - protein, 83 aa, Zea mays
  Clone ID: MRT4577_122206C.1.pep
GCTLSPLASRSTATYCNEPHHRPLRTVTGYKPNSTTRTTKPHVSLHHRHHELPMSVPPHLPSPQPRLNLLILLITYNFQQTHM

SEQ ID NO: 209008 - protein, 154 aa, Zea mays
  Clone ID: MRT4577_122207C.1.pep
RCCRSHTTLPPLCSWRGKLLPCPWRPPLLPLLHPQAQQWWLSSLPLQWWCSPPPSLLSPCCSSKCPLLPSSLPRLCPNHRAAAAGELTPASSPWATTFLHCSSSPPSSLCCYLKPISRRACKSFDKMSQGCSKPGQRIPSPAGFPCSPGDFPLL

SEQ ID NO: 209009 - protein, 88 aa, Zea mays
  unsure (1)..(88): unsure at all Xaa locations
  Clone ID: MRT4577_122208C.1.pep
MGDSGKLEATIDRLLNEEKQMRLAENVAGTRKAATEILQLCFDAKDWKLLXNEQILNLSKKRGQLKQAGHSMVQQALHYIDQTPDIET

SEQ ID NO: 209010 - protein, 47 aa, Zea mays
  Clone ID: MRT4577_122209C.1.pep
WEKLQELRSRRVQKKKKQGHFLPEEDDKYLERVKAAAEEEERQAASA

SEQ ID NO: 209011 - protein, 125 aa, Zea mays
  Clone ID: MRT4577_122210C.1.pep
RTTTTCSCTRSRRSAPSPPPRDDLHEKHMAEKDPENKYGHRIMDEASGVASVSSVSSRLPQASREEGRLEARPLLIRHMLPQPNHSTSSRQMVLLFSQTLIRLLRAASELVLTLCATDICTYEGT

SEQ ID NO: 209012 - protein, 95 aa, Zea mays
  Clone ID: MRT4577_122211C.1.pep
SRGWSCTRWRAGRPCSSSGRRKRKRWRWPCCRPPRPVSRAAAAKSHDCAGQGPGGSPRSSRACSRSGVCVEPRRIGQSTGATELCSNCRAVIIRL

SEQ ID NO: 209013 - protein, 108 aa, Zea mays
  Clone ID: MRT4577_122212C.1.pep
MAEGAAQRPGEIRTGAKEMGVHAQSSRSDRARAGARREEDEGAGSSQRCSTTAITGVEQGHNLASWEAGRRKVCAPPTDRDMAQAGSAGLGEIRAKPWTRRGSSTAGG

SEQ ID NO: 209014 - protein, 81 aa, Zea mays
  Clone ID: MRT4577_122213C.1.pep
VALPCSPLSLSLSLIISRSSVPRCSSLRLSTNATSRNRTRKRAACTTSAGSSPSHSQPPSPPVHVGVGMMGAIRKARQPRL

SEQ ID NO: 209015 - protein, 191 aa, Zea mays
  Clone ID: MRT4577_122214C.1.pep
MNEKASVSKELNARHKKILEGLLRLPENRECADCKSKGPRWASVNIGIFVCMQCSGIHRSLGVHISKVRSATLDTWLPEQVAFIQSMGNEKANGYWEAELPPNYDRVGIENFIRAKYEDKRWIPRNGTSKLPSGARDEKSSESQASHANRGGHAQKPSFEQHRVSPAATKRTVPVASRMHTQASPQPKAEL

SEQ ID NO: 209016 - protein, 77 aa, Zea mays
  Clone ID: MRT4577_122215C.1.pep
LQINSACTNTCTLVVETHTPRLKRHLQVQVHGLDIFSDTAISRSITTRSSIQFFTTTTTGNTLHNMDHDCGAKELYA

SEQ ID NO: 209017 - protein, 59 aa, Zea mays
  unsure (1)..(59): unsure at all Xaa locations
  Clone ID: MRT4577_122216C.1.pep
MRADTRHYRVHHLGGETXTNSIGXIFAWTRRLAHKTXIDDKARLLDFTHKLEAPCLGTP

SEQ ID NO: 209018 - protein, 211 aa, Zea mays
  Clone ID: MRT4577_122217C.1.pep
MSSGGTPPVGLAPVDGNSGGMFSTDRIGGFGYGVGVSVGILLLITTITLASYFCTRAPVDAAGEAAAAAAAPSSSRRHGGGGGGGEGAQAHDVELGIDEDTLKGYPEVVYEKEAKAAAANKKGTTCTCCSICLDNYGDGEVLRMLPDCGHLFHRECVDPWLRYHPTCPVCRTSPVPSPMPTPLAEVTPLAMAGVIVNLGWAQALSVFSISP

SEQ ID NO: 209019 - protein, 226 aa, Zea mays
  Clone ID: MRT4577_122218C.1.pep
MTTGEGAEAAAVPRVVSILSALLQRVAERNDAAAAAPPPAAAAGPPVLSAFQGLTKPAISIGGYLERIFRFAGCSPSCYVVAYIYLDRFLRRRPALAVDSFNVHRLLITSVLTAVKWVDDICYNNAYFARVGGISLVEMNYLEVDFLFGIAFDLNVTPAAFASYCAVLQSEMAYLDDAPAPVVEAPPRLHYCYGAAGTSDRHDDPAAVAAAAAACHRHSSQPQLTV

SEQ ID NO: 209020 - protein, 120 aa, Zea mays
  Clone ID: MRT4577_122219C.1.pep
ALKFVSRDYFARLLFWGKPLGPHPPGFEDPLKPSQLFRKTNHGGFFFGGEEQVVLGGPLFLYSPPGKKEKFCPTKQRGAVPWGSFFKKSPQPPKQGGGVKQKISGGPGKSKNNPPGGGEK

SEQ ID NO: 209021 - protein, 45 aa, Zea mays
  Clone ID: MRT4577_12221C.1.pep
MPTTAPVLLRSPRAFLPEMESHIVARAKQREVKFANRKAKVTTEV

SEQ ID NO: 209022 - protein, 95 aa, Zea mays
  Clone ID: MRT4577_122220C.1.pep
AGLCKICTENASMGIGQSIPATLVCIIFGFWVLRIPLFGYLKAAKNCSVALKSQCLFILLLLRKLQDEILCPFLIREPLFCALVHFLVIYIMITF

SEQ ID NO: 209023 - protein, 95 aa, Zea mays
  Clone ID: MRT4577_122221C.1.pep
TATYYLPNHQQNGTELGSRNRPQAAARSRWRAGCPRSCCCSPSPHLARRWRATPWRPAATPSQPSSRRSPSLTGLAQRPNCSKDNARGFFPARPA

SEQ ID NO: 209024 - protein, 58 aa, Zea mays
  Clone ID: MRT4577_122222C.1.pep
PRVRSQLQLAKQFHGETWSMNTSGTYHVISDSFFGSFITELNWDESRNAKLLDGMQIF

SEQ ID NO: 209025 - protein, 95 aa, Zea mays
  Clone ID: MRT4577_122223C.1.pep
QKGRPGPWKRAPKPWKGGGNPLWGKSGAGAGKGVIPRGGENPGGGTGKAAFWVGSRGGGGLGFQGQRGRGKKKTPGGQKKPGGRGNPAPGGGGGF

SEQ ID NO: 209026 - protein, 108 aa, Zea mays
  Clone ID: MRT4577_122224C.1.pep
PSPPLDLLLYPRAPFSPTYTSPRRVIIPIPAPNHLSSSPASAGPSGCGGRSKAQRWCEDGSTGVGAVPAGVGATPHPCRLSYKEALVFSQPSVSHFVGVLVAASERVG

SEQ ID NO: 209027 - protein, 48 aa, Zea mays
  Clone ID: MRT4577_122225C.1.pep
LWIGKTLITYISKPKKEIYSTPSLFLQLTSPPSLTLLLPFLFLPFPFD

SEQ ID NO: 209028 - protein, 95 aa, Zea mays
  unsure (1)..(95): unsure at all Xaa locations
  Clone ID: MRT4577_122226C.1.pep
MAEQRTHERKKRSMKPSTRTTGATPAXREASARPPRTRRSMVAARGGPNGKTEPQRRSEPRGGIIQQQQGPFRGSPTAMAIAPMWLQQPFGGAAC

SEQ ID NO: 209029 - protein, 61 aa, Zea mays
  Clone ID: MRT4577_122227C.1.pep
KQYIQQPPLGKGPKRRRQNGKLNDPLLTYPPGNGAKGRGCPPFGWCNKVRYGPPSTVFGRV

SEQ ID NO: 209030 - protein, 73 aa, Zea mays
  Clone ID: MRT4577_122228C.1.pep
DTASITFTYFEGHSVSQIQIGRPPPAQVYGYGLNTNTDFTRTGVGIWIWETTKNLGHNDTQARIGIALHATAK

SEQ ID NO: 209031 - protein, 63 aa, Zea mays
  Clone ID: MRT4577_122229C.1.pep
CRAEGIHLVRQIVKLGRAVAAVDEDLEVRGGGGSGGGERILAAPHRKPSSPSNDGAVEVDAVR

SEQ ID NO: 209032 - protein, 297 aa, Zea mays
  unsure (1)..(297): unsure at all Xaa locations
  Clone ID: MRT4577_12222C.1.pep
MGIAVVALHTMPGAFTTHSPASILSLRPDFTRINSRTNSVPNARTLQGVLRIPRLRSVRRLCQRIDDRVTEGNGPWVKDAMNNASQVLGDISVLGQAVSGNGGLNGSAAKTPPQRRKSSSVEDEAWELLQESMVYYCGSPVGTIAANDPNDSDPVNYDQVFIRDFXPSGIAFLLKGEYEIVRNFILHTLQLQALFYSALLCAREMLTQEDGSADLIRALNNRLIALSFHIREYYWLDMQKLNEIYRYKTEEYSYDAVNKFNIYPDQISPWLVEWIPXXGGYFIGNLQPAHMDFRFFS

SEQ ID NO: 209033 - protein, 655 aa, Zea mays
  unsure (1)..(655): unsure at all Xaa locations
  Clone ID: MRT4577_122230C.1.pep
IWIAGMPLKSFXKYVVAAVIMAMAVPGLALLPTKLRFLLELGLIGHTLLLCYIENRLFNYASMYYYGFEEDIIYPNYMVFITTFLGLALVRRLYVDQRLGPKAAWILTCLYSSKLAMLFMTSRSVIWFSAVLLLAVTPPLLLYRDKSKGASKMKVWQAYFHASVIAFSAWLCRETIFEALQWWNGRPPSDGLLLGSYILLTGVACIPIVALHFPHAQSAKRFLVLIVATGLLFVVMQPPIKLSWVYRSDFITAAHLSDDDISIYGFVASKPSWPSWLLIATVVLTLAAVTSIIPVKYVVELRTSYAVAVGITLGIYISVQYFFQAVVLYPLLVATIVSAAVFVVFTHLPSESSTRVLPWVFSFLVALFPVTYLLEGHLRAKSFADEDEAEKFTNMLAIEGARMSLLGLYAAIFMIIALEIKFELTLLLREKAADRGMHGPSSRSAAFPPKARLLQQRRAHAAPTFTIKRLAAEAAWMPAIGNVSTVLCFGICLVLNLTLTGGSNRAIFFLAPILLLLNQDSDIFAGFGDRQRYFPVTVSISGYLLLTALYRIWEETWPGNGGWALDIGGPGWLFAVKNFALLVLTLPNHILFNRFMWDYVRQTDAKLLLTLPLNLPSIIMTDILTIRVLGLLGAMYSLAQYMISRRIRIAGMRYI

SEQ ID NO: 209034 - protein, 243 aa, Zea mays
  unsure (1)..(243): unsure at all Xaa locations
  Clone ID: MRT4577_122231C.1.pep
YRPNIPVLEYHTCCSILRARDHRRVRTINPYVRSPPYSWRRTYAFIIAQWSLAPRATIPQXLRPDTSXLGYEHLRCACLQTQQALEASDLQQPVTVATQALAHLTIHTIGAQQEQHYLPTXLANVDVGNPXNYLKQEALACYPLASGYVAVYHQQQQRRQILPALTQLVMENPAAYLHQQRLHSSLPHAVGDAPTYLTHLSLQQIEPAVTELDEAQPAAYSQHVLAFNQLTESNSAAYLPQRQ

SEQ ID NO: 209035 - protein, 72 aa, Zea mays
  Clone ID: MRT4577_122232C.1.pep
RFHVPLTALLWGESVLWPLAVGLTRRRALTIAVTLVDASHVACHTHADDGYRSRHRPRPETPRPRHLKLRGK

SEQ ID NO: 209036 - protein, 102 aa, Zea mays
  Clone ID: MRT4577_122233C.1.pep
LVALLGLFRSSSVRMGARLLGTSSSRSRSFRLVRGVLVGSSSFCLIGRLGRVWLLGTSSRKSSSLLLGGCILLDLRSLLGTMQEQQPPPRRPVRQRRAPRHL

SEQ ID NO: 209037 - protein, 113 aa, Zea mays
  Clone ID: MRT4577_122234C.1.pep
VLAWCSGAVAWCLGASTAINSAAGPLKLGRLLAGLGNCRCAVLRRGPSSSQSNHRWAVNLFAMVGASFVRSRIWAVFSVIVDDAVGVMPRTAVLVAEEEEGVLTMDHLVEGRD

SEQ ID NO: 209038 - protein, 82 aa, Zea mays
  Clone ID: MRT4577_122235C.1.pep
YVLYALSASLSRLFAHELVSILMCATTSRICDGDRLPSNKSQVVNIVRHPSSRCPPVFPVLTKRITLGLLAEPVLTTKSHGR

SEQ ID NO: 209039 - protein, 134 aa, Zea mays
  unsure (1)..(134): unsure at all Xaa locations
  Clone ID: MRT4577_122236C.1.pep
KMDRNGYWKWNASDMYFVDATGACXTTNVYSLHYDMTWSSNDAXSCQXRSDLQFNRSGDLXRTTLRSDGIATLXSASNISGTTIIAXXGLNVRLYDPIRAXALTXSYIDNCFASYDLERLITNQARLECQPIDT

SEQ ID NO: 209040 - protein, 948 aa, Zea mays
  Clone ID: MRT4577_122237C.1.pep
MSKSKKGSGSSPRSGDKRKREPTPPSEDFGNSEYSEEEFSSEFEGSPAPTYIRAVERSGLEGSDESEYSSDEEDSSDSSEEGSGGDGGDDDDDGGDGDGGGDSGRGGDGGSKGGNGGGSKGSNKASPLCPFAILLPLPLAGEVEMAPKRKASSSSIAVIPPINPNIQLPFAGRQPDVRTPSWTESPIDEEVAAAGALLAEVGLLKERGPTAEAVVADFVFKNIQPLKDRAYLAYLYRGLADSTRVTNRRILVVDLVSRLEMILRGKAFNSFVSNPPAGDSGLGLRVRPSPEEVSALVASLGEIPDDERQVHFEVPLNPSDAEISAMLDMLAKDSSDVAPAETLVVAPIPEADKALDAQKSVNVRLKRSRRADQASFPAEGEKKKKRRLRRVSSLDQGADLSAPVAEEVPVPEFTEADPNGRDPSYADPNGCVVRVVDEDDEEEDEIPLIRKNSRRYIASGESSGVPSPALSALIGLQELSLANFDQTLEDMVPEDLLSEPADGGAMDVCAGVLDAGLGSSRAACCASSTLERGLEGQEAGLDCPDPMEVTEGPSALEVAATENSTLKDGAGAYPAPEGVAGDDPARMGSASCDPAPEGVRVGSPSHTSMDVHIGSSPPHSGCMAIAPALDQGVALEASAPDDRVLTSADDTELVVADSLRVVPVGDPSPSHQLTSHDLGVPSFFSNLQALVDEMSSRLKLQGASVLEGALSLARWNPVLLQRRVSDLEAANADMARQLSSLEEKHSRGQAELARRCSDLEEKYSQGQTKLARVSASLNDANTLNSTLRAQLNSEKEEKRALVTSRDNLDRLYRDASNSLTILERSHRFTREELDNHRYKLQESLDDVIRLRQLVSTKDAVIKDLCASKKSVAQELETAQLAVKVAEETSATLRAQRDKVMDKAIRVGWILMRRPGVVVPDDIRADVNAAPDSSSHPSSSVAPEKNIAK

SEQ ID NO: 209041 - protein, 38 aa, Zea mays
  Clone ID: MRT4577_122238C.1.pep
RFQKLDFPRFDGKSDPMLFLNKCESYFRQQRIMAEERA

SEQ ID NO: 209042 - protein, 151 aa, Zea mays
  Clone ID: MRT4577_122239C.1.pep
MGKSKKGSGSSPRSGDKRKREPTPLSEDFGNSEYSEEEFSFESEGSPAPVSTPASSDDSDDSQGLAAEVWTYIRAIKRSRLEGSDESEYSSDEDSSDSSEEGSGDDGGDDDDDGGDGDGGGDSGRGGDGGSKGGNGGGSKGSSKGSNKASG

SEQ ID NO: 209043 - protein, 601 aa, Zea mays
  Clone ID: MRT4577_12223C.1.pep
MGIAVVALHTMPGAFTTHSPASILSLRPDFTRINSRTNSVPNARTLQGVLRIPRLRSVRRLCQRIDDRVTEGNGPWVKDAMNNASQVLGDISVLGQAVSGNGGLNGSAAKTPPQRRKSSSVEDEAWELLQESMVYYCGSPVGTIAANDPNDSDPVNYDQVFIRDFIPSGIAFLLKGEYEIVRNFILHTLQLQSWEKTMDCHSPGQGLMPASFKVRTIPLDGDEDATEEVLDPDFGEAAIGRVAPVDSGLWWIILLRAYGKCSGDLSVQERIDVQTGMKMILKLCLADGFDMFPTLLVTDGSCMIDRRMGIHGHPLEIQALFYSALLCAREMLTQEDGSADLIRALNNRLIALSFHIREYYWLDMQKLNEIYRYKTEEYSYDAVNKFNIYPDQISPWLVEWIPPKGGYFIGNLQPAHMDFRFFSLGNLWSIVSSLATTHQSHAILDLIESKWSDLVAEMPLKICYPALENQEWKIITGSDPKNTPWSYHNGGSWPTLLWQLTVACIKMNRPELAAKAIEVAERRIATDKWPEYYDTKRARFIGKQSRLYQTWSIAGFLVAKLLIEKPDAARILWNDEDAEILNASSTNRKRGKKVLKKTYIV

SEQ ID NO: 209044 - protein, 162 aa, Zea mays
  unsure (1)..(162): unsure at all Xaa locations
  Clone ID: MRT4577_122240C.1.pep
MGTFFQSGAPLVEPAKNGGRGPXASLPPPPFSKFXRGFGVKPXGPPRITVSLKNSXRGVKPRKFPGFRFPTLGFLFLGGKGGGPPKKVALQEIPKKTLFGGKGQGPGKQGPNIQGGGEFFPFKGGKYQNKKFGLEPNFFPRKGGGFPKKPPPQFQKNKFFTP

SEQ ID NO: 209045 - protein, 393 aa, Zea mays
  unsure (1)..(393): unsure at all Xaa locations
  Clone ID: MRT4577_122241C.1.pep
WRPSEKPRVRPSLSFPPSIPTASCLSQAFLGILPHFGLWKYLYXLSPWDGRRTASAGGGASLEMRHGRKTDYLDIPLKDSIKGWRMEWFIVENHKNSLPPRSGRQPDVRTPSWTESPIDQEVAETGALLAEVGLLKERGLTAEAVVANFVFKNIQPLKDRAYPAYLYRGLADSPRVTNRRIPAVDLVSRLEMILRGKVSNVGAPVAYSAWILPPSKAFTHFVSNPPAGDGGLGLRVRPSAEEVSALVASLEEIHDDERQIHFEVPLDPSDAEISVMLDMLAEDSSDVARAETLVVVPIPEADKALDAQKSVNVRPKRSRRADQASFPAEGEKKKKRRLRRVSSLDPGAGPSAPVVEEVLVPEFTEADPNGCDPSDADPNGCDVRVVDEDDEEV

SEQ ID NO: 209046 - protein, 71 aa, Zea mays
  Clone ID: MRT4577_122242C.1.pep
LPLPLISNNSSLIPTANSPFSAPSINNFTSFTFSPIFTPFLFFSTIIIFFPFLLLDNHQIFFPSFTKPYFF

SEQ ID NO: 209047 - protein, 122 aa, Zea mays
  unsure (1)..(122): unsure at all Xaa locations
  Clone ID: MRT4577_122243C.1.pep
MLQTLYDYFWWERLWLPVNLTWADLEDRDGRVYAKASDLYITLPLALLFLIVRYFFELYVATPLAALLNIKEKTRLGAPPNATLEHFYLTSGKQPKQVEVEPFGXRQSGLSGPQVARWVPRR

SEQ ID NO: 209048 - protein, 84 aa, Zea mays
  Clone ID: MRT4577_122244C.1.pep
KTEAEKDADMPKMPPRAFFVFMEEFRKDYNEQYPSVEQVSLIGNAGRDEWKSLSDAEKAHYVSKAVKLKDEYTKKIDVYSNKQS

SEQ ID NO: 209049 - protein, 72 aa, Zea mays
  Clone ID: MRT4577_122245C.1.pep
PVGVCQPRVPWLLPVLLAPYKFPWPLSPPSLARSPLSWFPGQYAPMGMNGKLEPPGSPLVLVVKKSLVPPPS

SEQ ID NO: 209050 - protein, 49 aa, Zea mays
  Clone ID: MRT4577_122246C.1.pep
MGKLCCSNEAEEEAGFNLLGLLVAAIIALVFMLLCAPPRRRCVAVYPCC

SEQ ID NO: 209051 - protein, 64 aa, Zea mays
  Clone ID: MRT4577_122247C.1.pep
CYLYSRITKPRGTNLSLLLHPILNIPYRLLIIFTPQISLPDLQVFSLSRISHSSFHQHLNKYRI

SEQ ID NO: 209052 - protein, 58 aa, Zea mays
  Clone ID: MRT4577_122248C.1.pep
RSDISKLMEQGYAYLPSGVCMSGMGRHVSFDQAVAWKVLGEDSNVHCLAFCFVNWSFV

SEQ ID NO: 209053 - protein, 42 aa, Zea mays
  Clone ID: MRT4577_12224C.1.pep
TTRSPTLSIYHNMMSCSNKARRALFLLFPLCIMLGVKEESMG

SEQ ID NO: 209054 - protein, 76 aa, Zea mays
  Clone ID: MRT4577_122250C.1.pep
LTGSMVWLTCKLSCLLFHKRRSRVIIERDWTQTHQSTKVQIRSYQTKEVTSHHPRSTIIKTCIKGEYKPSPIRSMA

SEQ ID NO: 209055 - protein, 50 aa, Zea mays
  Clone ID: MRT4577_122251C.1.pep
SFKRKLGLWRRVQLAGIGQLFFNNENIEAVLLKTCDFLWIHLPFFCWKVV

SEQ ID NO: 209056 - protein, 99 aa, Zea mays
  Clone ID: MRT4577_122252C.1.pep
QVTPVSQKALKRARSSSLLDFRHARRVMLCSSGILSPSHSGQRPSPPSSFQYCRPGGRKKAEQSRFVARAREALEPRRGGVGGKTREVAENRAGRHEML

SEQ ID NO: 209057 - protein, 78 aa, Zea mays
  Clone ID: MRT4577_122253C.1.pep
LSIKILDIFLWSLHPFRWTTASIISDVLGPVWTEWHYLVCGRRRPSDLLACLCLLPLTVVILCRVTALCLGSAPSVAR

SEQ ID NO: 209058 - protein, 139 aa, Zea mays
  unsure (1)..(139): unsure at all Xaa locations
  Clone ID: MRT4577_122254C.1.pep
TLPQHFPLPPPPQPNRKDRRKXPAAHGXRPRTRDQTARPHRKKGDSPHTTNXRTXKNGDYVDVKVNGAVHKGMPHKFYHGRYRRVWNVTKRSICVEINKHVNGRIIRKRIHVRVEHVQPFPCTXEFRLMKAKNDQFKVD

SEQ ID NO: 209059 - protein, 75 aa, Zea mays
  Clone ID: MRT4577_122256C.1.pep
QTAWNRVANKFFMPNSCIQNYTTQPPSPFPRLTVTFQPTGINTGIRNNFLLRSPRIISAGLYNKTAQKSQTSHGF

SEQ ID NO: 209060 - protein, 226 aa, Zea mays
  Clone ID: MRT4577_122257C.1.pep
MLEDDAAMDADSLVGQDPRSGVRPSGGERDWAAAVLEPVRWMRMLCRELGATFVAGVVLVYGLSQGFAGSFFRVASDYYWKDVQQVQPATVQFLSVFFFIPWVLKPLWGIMTDVFPVCGYRRRPYFLFSGILGTVSAAIVAVTIGLPMSSAVLCLMGISTAVAIADVTIDASIAKNSIDKPALAPDMQSLCAFSSSLGALVGYGTSGLFDHHLGAQVSFCLNALFC

SEQ ID NO: 209061 - protein, 72 aa, Zea mays
  unsure (1)..(72): unsure at all Xaa locations
  Clone ID: MRT4577_122258C.1.pep
MVGTKLLALGCVVLVSIGLANAARVARYSSASGVGTGGGEGGGSQGGAGSGSGSGTGSGVSSSSXTHASGGG

SEQ ID NO: 209062 - protein, 98 aa, Zea mays
  Clone ID: MRT4577_122259C.1.pep
PDIKVTAKLTFLDQLVCVVLLIVVLAALGLQFRGSTWQALTVGVAPRCLWGSRWFVYQIQNHSDTEGIIQHNLLVQTLSAHMCCIDMCGAATQVDISI

SEQ ID NO: 209063 - protein, 75 aa, Zea mays
  Clone ID: MRT4577_12225C.1.pep
QKKRPPRARWPGGEEKNGFDSLIPRQSKRKVNGEAVWFNFPRGGEAPNPLERPPSGSHVVGQLIRGGNGAKGSRT

SEQ ID NO: 209064 - protein, 174 aa, Zea mays
  unsure (1)..(174): unsure at all Xaa locations
  Clone ID: MRT4577_122260C.1.pep
APPAFPFLLPVRLLGGIFTGYHFPPGTPFSPDFPQLGPRPGPPSTAPPGAGIPXRGVPPQVPGAPLFPXSPKGVGEPFFPFFRNNNFFPSPPGFPXEPPPAATPXVGGAPFLIPHGGAPPRGPPPRPGFPKKNPNFGWGFSPKKKKKKKKKKKKKKKKKKKKKEKIKKKKKKRK

SEQ ID NO: 209065 - protein, 65 aa, Zea mays
  Clone ID: MRT4577_122261C.1.pep
CVCDSRRSLSPLQGLAVDGAVNRLPIRSPYRWREKLAYEANKARMGHDEDHDQGMRVEEHLRLET

SEQ ID NO: 209066 - protein, 73 aa, Zea mays
  Clone ID: MRT4577_122262C.1.pep
PTRERTRVPSSFDTMLIDIGDYPLPLLLLLPLSLHCDDYQVIAECPTTSCRPIHARLDPQTLHPRNLELFHHH

SEQ ID NO: 209067 - protein, 212 aa, Zea mays
  unsure (1)..(212): unsure at all Xaa locations
  Clone ID: MRT4577_122263C.1.pep
GMWAMKLPSADXVVVKRTLSTLTEHPDPLPGAEETPEYSDHRKKFXSSVKPAHFGVKIASRSLLILVRFIFTGIFIGLLANFSFGRSLLLKYPEFFSAGLFSRAGPTEEEVKSASFKMWFVGHGYSNVDSSLELGRSKPDKEVITKVSGPEVGYVTTPIVLVQCALVLLSQRANLPKGGVYTPGTVFGPTDLQQRLQDNGLSFEVNTTRAMH

SEQ ID NO: 209068 - protein, 88 aa, Zea mays
  Clone ID: MRT4577_122264C.1.pep
ICPLLHVRFMQFQAEDCHVLLCKPTNTCSLVQTLAANPAAYAAPRALVSISAGLKDFVLLESNSLLLTACIICHARLIIPFIEDYVLN

SEQ ID NO: 209069 - protein, 76 aa, Zea mays
  unsure (1)..(76): unsure at all Xaa locations
  Clone ID: MRT4577_122265C.1.pep
MATIIGEVYILLDLSNNIATSTIFPQFSQSPIXSFLPPYLLPSVSSICXTPIFQPYLIQHSISTNILTFSPFYPST

SEQ ID NO: 209070 - protein, 126 aa, Zea mays
  unsure (1)..(126): unsure at all Xaa locations
  Clone ID: MRT4577_122266C.1.pep
PFVPAIKETLDDPXEGLGVYILQKALGAPPPLIAPKFGVESXVILDKIPENQWGFGFNPLGGKPKNLVGGGVFPPPQMTRGAPQNPPPGGGKGLAPPPIVVGKPQKGPPPTFQRPPRVFSPRKKPF

SEQ ID NO: 209071 - protein, 94 aa, Zea mays
  unsure (1)..(94): unsure at all Xaa locations
  Clone ID: MRT4577_122267C.1.pep
PPPPFQGRNPPPPFQGGSPPGPPPPFRGGRPPGPPPPFRGGSPNGPPYLGGGNPGYPGGSPXPGSRRQLELPVNMAPGPPCFKVTFFKKWWAVA

SEQ ID NO: 209072 - protein, 45 aa, Zea mays
  unsure (1)..(45): unsure at all Xaa locations
  Clone ID: MRT4577_122268C.1.pep
XVXIVEAXLTNFXHRXTXYXPMXLRPKXLXNGLHLXGKLVTPWXV

SEQ ID NO: 209073 - protein, 182 aa, Zea mays
  unsure (1)..(182): unsure at all Xaa locations
  Clone ID: MRT4577_122269C.1.pep
MSANVGESTSGVSSSDAAGGSFECNICFELPQEPIVTLCGHLFCWPCLYRWLHIHAHSPECPVYKALVEEDKLVPLYGRGKDRVDPRSKNMPEGEIPHRPTGQRPATAGNXAFSAAFGGLFPMLSFQVHGXFPDAAAYAQPAGFHYGYGHGHGHGGPPWRAYGDSTSPWATDRHRLGQQQQQ

SEQ ID NO: 209074 - protein, 52 aa, Zea mays
  Clone ID: MRT4577_12226C.1.pep
ERPCWSPYIKGSPTTDSRFKVRYQPEYYTEHWRVTFTHGTARPGALNVTNGL

SEQ ID NO: 209075 - protein, 72 aa, Zea mays
  Clone ID: MRT4577_122270C.1.pep
ISSRRGSHVSRSSSTSENTAHSKCKQRMNQVVLGFHAHHHLQGGNCLQPCTSEHHPPRLAKDPSTRAVGMFR

SEQ ID NO: 209076 - protein, 94 aa, Zea mays
  unsure (1)..(94): unsure at all Xaa locations
  Clone ID: MRT4577_122272C.1.pep
RXRPTRSXCFTWAKDVHALRTLIPLVISHRGRHYLEPAPHRNSRVRRPNSNEQVIEDPGVQQVEVAEEELIEGGPRGALQRGVRAYLGGVSQSA

SEQ ID NO: 209077 - protein, 40 aa, Zea mays
  unsure (1)..(40): unsure at all Xaa locations
  Clone ID: MRT4577_122273C.1.pep
APALSSVSNNSDLAVGGVANCLPGPTLLEIVVSGDTVPEX

SEQ ID NO: 209078 - protein, 85 aa, Zea mays
  Clone ID: MRT4577_122274C.1.pep
MATGILALLALLALFLIATHTIIIPQCTLAPSAIIPQLLRPLTLMFFEHLTLQAYRLQQTLAVSVLHQPIHQLQHQSLALLTLQT

SEQ ID NO: 209079 - protein, 508 aa, Zea mays
  Clone ID: MRT4577_122275C.1.pep
MGRNLPAEQVEAPRSSKMDKKRKKDKKRKLAAEAEEEAAVTATVETVKSSKKKRVENEPGAGAVEAENGAEKTVAVTGKGSEDPKYAPLRSFSAAELPSQVLECCSAFARPSPIQAHAWPFLLDGRDFIGIAATGSGKTIAFGVPALMHIRKKVGGKAGKKAVPRCLVLSPTRELAQQIADVLSEAGAPCGIKSVCLYGGTKKEPQISALKSGVDIVIGTPGRMKDLIEMGVCCLNEVSFVVLDEADRMLDLGFEPEVRAILSQTSSVRQMVMFSATWPLAVHKLAQEFMDPNPIKVVIGSEDLAANHDVMQIVEVLDDRTRDSRLLALLDKYHQAQSNRVLVFVLYKKEAARVETMLQRRGWKAVSVHGDKAQHDRTKALSLFKEGKCPLMIATDVASRGLDIPDVEVVINYSYPLTTEDYVHRIGRTGRAGKKGVAHTFFTQANKALAGELVNVLREADQVVPPALMKFGTHVKKKESKIYGSHFKELTADAPKSTKITFGDSDED

SEQ ID NO: 209080 - protein, 79 aa, Zea mays
  Clone ID: MRT4577_122276C.1.pep
LRLSRPLMSQGSFLGVAFFSPHPFCSGPFAGLTKRGFKNFSLGVGKERLMVFWRGPFFRPPACFNVFFFYPSLSKCPGK

SEQ ID NO: 209081 - protein, 98 aa, Zea mays
  unsure (1)..(98): unsure at all Xaa locations
  Clone ID: MRT4577_122277C.1.pep
DGSSHLGPPGSIQLSSSLQSFCGGLQAVPGRIPTAFTISVASATPLGGVAAALSGCVVPRRXAVGPSAXALRSGCARWLQAXPSASASPVFLAWCWPV

SEQ ID NO: 209082 - protein, 108 aa, Zea mays
  unsure (1)..(108): unsure at all Xaa locations
  Clone ID: MRT4577_122278C.1.pep
LDNITLIYLASSVLFKSXRFXKPFNTIFTLLYNHTTISPLKXCNXNTQYLSLSSLYYIFFLLSYIFIPTYHFPSNFSYNLMIHHMYYSFLTTITPNINALSPILINII

SEQ ID NO: 209083 - protein, 34 aa, Zea mays
  Clone ID: MRT4577_122279C.1.pep
RTYMGIYGLCAMSNSSKYSVALEACPRRCSSTSA

SEQ ID NO: 209084 - protein, 568 aa, Zea mays
  Clone ID: MRT4577_12227C.1.pep
MRGYEYETNGYHQEVEDEYGDEYYDQDEYEEEGSGAGDGYAEEEEPTEGQKEILELRERLKEQIRRKAKAAAACTAGRSSSSQIPQARDKFGSFFGPSKPVISRRVIEERKSLKELHSTVAREPRPSGVHKDIPSSSKVQSRVNGHQHKQKIVNQVKKKAEALKDNRDYSFLLSDDADLSSSPKEKPAARSSLTQRADREVTQSTVKRKAPTSQPARLSNGYGPKNTMSTQRHAEGKVNSMRREDFSNTERVVSRDNERMYERVVSRDNERMHSIARNGSNQASTSKTTIQKHPSRGPIANKQPSKDSNDATLRKSSVASKHHPLEIDRPKSSQSQRMQSAGQRPQHSSHGQTPHQSMQHRTQQSLQSRRPQQMTQGQKPQQSLQSQRTQQSLQNRRPQQSSHIQKSQSSQAHRPQSLSNRSQALQGQRPLSSQGQYPEQRRVHASDRVKQAERQIRPPSKSMPSRPVSSNGIRDDHAKRKQVAKRRFDEDDEDPLAMIRNMFGYDPSRYAGRDEDVSDMEADFATIEMEEKRSARIARQEDEEQLRLIEEEERREQERKRRKMARGR

SEQ ID NO: 209085 - protein, 63 aa, Zea mays
  Clone ID: MRT4577_122280C.1.pep
FAPTRPNPCPTAFFFYLSKSSLGDSGFRAATRTKPSSLVVATGPCGAGPRPICATMSMLSYNP

SEQ ID NO: 209086 - protein, 51 aa, Zea mays
  Clone ID: MRT4577_122281C.1.pep
AVHVSKYLLTLLRHRENYYCFYCICNAYETMNESTCSTPHLISILNKLQAL

SEQ ID NO: 209087 - protein, 246 aa, Zea mays
  Clone ID: MRT4577_122282C.1.pep
MARRLLLLPALLVAAALAGGAGAQLSAGFYSSTCPTVESVVRQAMSQAVTNNTRTGAAMLRLFFHDCFVNGCDASLLLDDTPTTPGEKGAGANAGASTSGFDLIDTIKTQVEAACPATVSCADILALAARDAVNLLGGPSWAVPLGRRDATFPNSTGDDALAPLDSLTPDEFDNGYYRSLMTGAGLLHSDQELFNNGALDSLVRLYGTNADAFSSDFPASMVRLGNIAPLTGAAGEIRLNCRTVNS

SEQ ID NO: 209088 - protein, 89 aa, Zea mays
  unsure (1)..(89): unsure at all Xaa locations
  Clone ID: MRT4577_122283C.1.pep
AERRRGPLXLPPPPYXATXAGDGHHQRGPXRGTXTXXEXTHKGRRGTDIFFLXGKRNQXGXXAVPFXXGGDDSEAYFVRRAGVLCGFVG

SEQ ID NO: 209089 - protein, 151 aa, Zea mays
  Clone ID: MRT4577_122284C.1.pep
MARRLLAALAIVVVAAALACGAEAQLSAGFYSSSCPAVHSIVRQAMSQAVTNNTRSAAAVLRVFFHDCFVNVSKSDHASLLLDDTPTTPGEKGAGPNAGGSTVGFDLIDTIKAQVEAACPATVSCADILALTARDGVNLVSVRSVPSLPNR

SEQ ID NO: 209090 - protein, 48 aa, Zea mays
  unsure (1)..(48): unsure at all Xaa locations
  Clone ID: MRT4577_122285C.1.pep
NTDAEGRLTLSDALVXPATQGFXKIIGFATPTRPCLGALRPYLCGIFT

SEQ ID NO: 209091 - protein, 325 aa, Zea mays
  Clone ID: MRT4577_122286C.1.pep
MARRLLAALAIVVVAAALACGAGAQLSAGFYSSSCPAVHSIVRQAMSQAVTNNTRSAAAVLRVFFHDCFVNGCDASLLLDDTPTTPGEKGAGPNAGGSTVGFDLIDTIKAQVEAACPATVSCADILALTARDGVNLLGGPSWAVPLGRRDATFPNSTGAATDLPGPDSDLAGLVAGFAAKGLSPRDLAALSGAHTVGMARCASFRTRVYCDDNVSPAFAAQQRQACPSSSGADADDALAPLDSLTPDQFDNGYYRSLMAGAGLLHSDQELFSNGALDSLVRLYGTNADAFSSDFAASMVRLGNIGPLTGSAGEVRLNCRTVNSNS

SEQ ID NO: 209092 - protein, 112 aa, Zea mays
  Clone ID: MRT4577_122287C.1.pep
PRVRGRVGGRVGGRVGGRMGVRNRRGRHAPTRWPDPLRRMRRDPYIESTYIHTSRVLRHRTIIMNSYQTYRRTIHKCTENDRLHSNYTYPTMAVDTPRWITRHACMYMHAWS

SEQ ID NO: 209093 - protein, 109 aa, Zea mays
  Clone ID: MRT4577_122288C.1.pep
VSVLEIPTEITVALSEILEPLIACPDKPESKYDLLRRFGLFDKTSQVFAMRKIRDPSSLPTRSCPQAPSSELNRWIRIDSPIVSVSPPVSRCCTTVSGTTKCCARMYPP

SEQ ID NO: 209094 - protein, 148 aa, Zea mays
  Clone ID: MRT4577_122289C.1.pep
VDWWTLGVFMYEMVYGRTPFKGADNEKTLVNIIKQPLAFPRVVAGSGREWDEHLRAQDLMTQLLAKNPKKRLGGCTGSAEVKRHDFFKGVNWALVRSVRPPEVPKPPVVPAPALALAPQKKVLMMSRKERQEPYNYNPRPDDERFEYF

SEQ ID NO: 209095 - protein, 69 aa, Zea mays
  Clone ID: MRT4577_12228C.1.pep
RTAALAGQVISRRGGGASSRRRGPHRRIVVLLYLVVLVDSVTPGANGAVAARSSSIFDLCACSGSLFAS

SEQ ID NO: 209096 - protein, 82 aa, Zea mays
  Clone ID: MRT4577_122290C.1.pep
RTVGSKDRFPLIVEREGRPWGPPRRRNNPGRKKPTFENALEGFLIPVPSFLGSRRSRLPFRRGDACRGERGEREGEGTARRL

SEQ ID NO: 209097 - protein, 92 aa, Zea mays
  unsure (1)..(92): unsure at all Xaa locations
  Clone ID: MRT4577_122291C.1.pep
PTPALRSAAALPPKLEPSQVAEVFVRVTGGXVGAALSLAPKIGPLGLSPKKIDEDIAKETARDWKGLRVTVKLTLHNRQAKVSLFPSSCALV

SEQ ID NO: 209098 - protein, 498 aa, Zea mays
  Clone ID: MRT4577_122292C.1.pep
MATIREESDYDSSRSSLTAPGGSRRSWISDIGSASSVSARSVAGRGWDAPACRHRHKPHKANQAEWEAIGRVRAAAGRVGLEHFRLVRRLGSGDLGNVYLCQLREPWSTTGCLYAMKVVDKDALAFRKKLRRAEVEREILRALDHPFLPTLYADFEASHYACLVMEFCPGGDLHVARQRQPGRRFSISSARFYVAETVLALEYLHMMGVVYRDLKPENVLVRGDGHIMLSDFDLSLKCDVVPRLLRHNSLPAQNGSSAGGGRADSGKPSCVPPIQPVLSCLFNGVHKCHQAKEGAAAAARDGGEADDSTEPCDRNPELVVEPVSARSRSFVGTHEYLAPEVISGQGHGSAVDWWTLGVFMYEMVYGRTPFKGADNEKTLVNIIKQPLAFPRVVAASGREWDEHLRAQDLMTQLLAKNPKKRLGGCTGSAEVKRHDFFKGVNWALVRSVRPPEVPKPPVVPAPAPALAPQKKVLMMSRKERQEPYNYNPRPDDERFEYF

SEQ ID NO: 209099 - protein, 67 aa, Zea mays
  Clone ID: MRT4577_122293C.1.pep
SSHHSLSVTERHGLPAPRTRRSPATTSGASVPALGYRPSPSPSADGRPLALSPPAINTPLTSKYRTT

SEQ ID NO: 209100 - protein, 58 aa, Zea mays
  Clone ID: MRT4577_122294C.1.pep
GRAAFPPSPPPRFFFFWPRKKKKKKKKKKKKKKKKKKKKKKKKKKKKKKKKKKKKKKK

SEQ ID NO: 209101 - protein, 102 aa, Zea mays
  unsure (1)..(102): unsure at all Xaa locations
  Clone ID: MRT4577_122295C.1.pep
FIFIWXWFLWFVVFFFFLQPNDFFKKASNYILHALKSMAIHEYCKAHPPFLFIYDMGIPKPATHMHTYVCKYIFHGLTLKATHRGPNSFKILYSLNPVLVKS

SEQ ID NO: 209102 - protein, 70 aa, Zea mays
  Clone ID: MRT4577_122296C.1.pep
KKKKKKRKKKKKKKKKKKKKKKKKKKKKKKKGRPLKKEQKKQTHESKKKNNYKWKPKKKYTTQRVSTFYN

SEQ ID NO: 209103 - protein, 106 aa, Zea mays
  unsure (1)..(106): unsure at all Xaa locations
  Clone ID: MRT4577_122297C.1.pep
RXGXTGASQASDRSSVFSLNTPIPQQGRGINRPRTTNGSMATLSSCSRLSSGTGAAVIHRQPVRAGAALVDTCRQSFYATVRALAIATEEAPAAVKLQNKGVSLPT

SEQ ID NO: 209104 - protein, 186 aa, Zea mays
  Clone ID: MRT4577_122298C.1.pep
MVRRRHVMASKSRARASEANRNPSSSSIGELAQTAANVGVAAGELGVDAGELDLGVGCVAAGESTTIPFVVYGGELGDAVAAECAPPSASSSSAKCSSRADCWKHMVKKEVIEDGVVHFFAVCNYCKTELSTGSAAGTGHLNRHYKACLAKLGKTQGGGTQTHLNFAAGGTISTWVYNPQVAHDEI

SEQ ID NO: 209105 - protein, 81 aa, Zea mays
  Clone ID: MRT4577_122299C.1.pep
KKNPPFLPNPLKRIEPPTCLCTKVFIFKGVWGTGRGSPKALPLRRTPVLVLSLILDKNIFRFPPFCKKSFFYPFKSVACLM

SEQ ID NO: 209106 - protein, 76 aa, Zea mays
  Clone ID: MRT4577_12229C.1.pep
GHTGNQLIGRNQGPEKKSPQEGWPTDALNWYLRCLPCSLEEKTHPVWRFSEANLKVSSPPHPVLNFFKKGFSVFCT

SEQ ID NO: 209107 - protein, 76 aa, Zea mays
  Clone ID: MRT4577_1222C.1.pep
GAASRSSCAETYIPSPFPCTPPNVTPTPWPPPWAVSASTTSTGPLLSPSQTWTYSVVALTVPFSKRRWSGSPYPSR

SEQ ID NO: 209108 - protein, 146 aa, Zea mays
  unsure (1)..(146): unsure at all Xaa locations
  Clone ID: MRT4577_122300C.1.pep
TGRSCSHEPSPSRHRRACRSXGLRRGASPPRRLAPPRTCPSGVRWRRAIPTPERSCLTLSLSVSPTAGKEARRTSCVRNAKDSPGRAGGRARGEGRKRAPMESEAQAVGEGKRRYLGISRICNGGECFTAIACCPSDGAWWCCERI

SEQ ID NO: 209109 - protein, 50 aa, Zea mays
  Clone ID: MRT4577_122301C.1.pep
PNHTQAGQAYDAHTFYHRNTSLYKLLMGQVQTQTAVNAFWPGASNPRGVT

SEQ ID NO: 209110 - protein, 156 aa, Zea mays
  Clone ID: MRT4577_122302C.1.pep
APCFRPVPCIMLCFRGVLNLEAPPPVFRLYKPLGFVAPFFFPLKTCLGAPLFFAPIVGCLPAPPPGSGSLKAQMRLGSLQGHPISPKTPTKTVGSYPFPVRFKGGKPVPFRGLFENPKSFLTPITCEKNFGLWYWFALKRLGTSFMAKTPYLINCC

SEQ ID NO: 209111 - protein, 127 aa, Zea mays
  unsure (1)..(127): unsure at all Xaa locations
  Clone ID: MRT4577_122303C.1.pep
RFHLYSGGQSAVVDRIITMYIRWLAGGHAKXWLIWXPSAELSSNTSYESELKWNAFKVDYGQDAPAMASYQAGDXKXAAIDSTLHDRDEFTAEIKDRLRPAQVALQRCKDSRPREVLFDIGDWAMLQ

SEQ ID NO: 209112 - protein, 143 aa, Zea mays
  unsure (1)..(143): unsure at all Xaa locations
  Clone ID: MRT4577_122304C.1.pep
MPLRVRMMTSSPLGAXCTPSKEXVKIFAIEFLMSMXVPCSLSKTAAAPIERVKLLIQNQDEMIKAGRLSEPYKGIGDCFGRTIKDEGFGSLWRGNTANVIRYFPTQALNFAFKDYFKRMFNFKKDKDGYWKXFGGNLASGGAA

SEQ ID NO: 209113 - protein, 69 aa, Zea mays
  unsure (1)..(69): unsure at all Xaa locations
  Clone ID: MRT4577_122305C.1.pep
MRSYTTLTGFLFTVTVIVGGIFNCTCYSVCXHVPLWELVWLSLGVNTSINGMNLRLMLNFVGFYQVRSP

SEQ ID NO: 209114 - protein, 94 aa, Zea mays
  unsure (1)..(94): unsure at all Xaa locations
  Clone ID: MRT4577_122306C.1.pep
FFFFFLGNGHYYPPQIFYTTITYHVFMLQKPKKLNEIILQFSYKFVAXPQKSLNNKNXXXHPITTXHKFXEKAPLKKTXXHXTXLKIFLXXYFL

SEQ ID NO: 209115 - protein, 42 aa, Zea mays
  Clone ID: MRT4577_122307C.1.pep
ARRAPDHTYAQVVYPARSKCILLQTCILWRKIVIITSNAHNI

SEQ ID NO: 209116 - protein, 121 aa, Zea mays
  unsure (1)..(121): unsure at all Xaa locations
  Clone ID: MRT4577_122308C.1.pep
MYSSLPVVMAGMRVVKLPLAAELMCAEVVMATAHQASCVRATYSLYNPQQNTWDLNXIVSTYCATCDASMLLYXPMKYGWTALCXGPTARTGQSMCGQRLLLTNTXTGAYITERIMDQRMN

SEQ ID NO: 209117 - protein, 206 aa, Zea mays
  unsure (1)..(206): unsure at all Xaa locations
  Clone ID: MRT4577_122309C.1.pep
VRLLYGPSGFFFFPGNRRACASAISPGVCGRRAGKAKLRGRRRRRPPNGSSDDDNDYQEQDNGSRAELERGVAATGPRRYAYRDLAAATDNFAEDGKLGRGGFGSVYRGKLTVAGEERPVAIKVLSSESSAQGRKEFEAEVRIISRLKHRNLVQLLGWCDSRHGLLLVYELVAQGSLDRHLHGSERFLAWPDRHQIILGLXSALRY

SEQ ID NO: 209118 - protein, 71 aa, Zea mays
  unsure (1)..(71): unsure at all Xaa locations
  Clone ID: MRT4577_12230C.1.pep
MTGTVSKLAAPRPAAPPLRPASLRAAAIAFAPSPRRVRVFVAGRARIPWVXFXLLPRKEMVHRPRKPRFTI

SEQ ID NO: 209119 - protein, 92 aa, Zea mays
  Clone ID: MRT4577_122310C.1.pep
MPAGHGLRSRTRDLFARPFRKKGYIPLSTYLRTYKIGDYVDVKVNGAVHKGMPHKFYHGRTGRVWNVTKRAIGVEVNKQVGKQELSGKRIHV

SEQ ID NO: 209120 - protein, 246 aa, Zea mays
  Clone ID: MRT4577_122311C.1.pep
MPPPPPPSQGAMATGAANHPLPCSVGRPKGTNQRRRPASLSVRASSDANTVTLLDYGAGNVRSVRNAIRHLGFNIRDVRSPEDILAADRLVFPGVGAFGSAMDVINRTGMADALREYIRRDRPFLGICLGLQLLFDSSEENGPVSGLGVIPGVVRRFDSSEGLIVPHIGWNALQITKDTQLLQGADGHHVYFVHSYHALPSDANRDWISSTCNYGESFISSISMGNIEAVYFLPEKTRSSGTFPFF

SEQ ID NO: 209121 - protein, 71 aa, Zea mays
  Clone ID: MRT4577_122312C.1.pep
ATSVVSCLCAAAAAADSSIFASLRATFSSWLSSSLDSSTVASPDGSSSCSVSASSIFAFSARGAESSFTDP

SEQ ID NO: 209122 - protein, 61 aa, Zea mays
  Clone ID: MRT4577_122313C.1.pep
VAYYSAAFLLKRMMTEEPEIYQRMLQSLISKAQQCNNEKLLENPYLQMRGILQLSNDLGVQ

SEQ ID NO: 209123 - protein, 83 aa, Zea mays
  Clone ID: MRT4577_122314C.1.pep
GLSSTSVHFFLSFQLPRGTCYINQTANAERGTTQERHRGPGQLIAQARINLRVFYWIRNSSLLFFFYHFFFFFFFFFFFFFPR

SEQ ID NO: 209124 - protein, 63 aa, Zea mays
  Clone ID: MRT4577_122315C.1.pep
LHVPPSHLARRSRPCRSPRTSAIRFDKGLRPEAMAAKLAHVRTQVTRGGELSFDPRVLLAQRG

SEQ ID NO: 209125 - protein, 97 aa, Zea mays
  unsure (1)..(97): unsure at all Xaa locations
  Clone ID: MRT4577_122316C.1.pep
VVVGPGCLSTLPSFGGSLRLCVFLFSVGGGTMLLLGPPLDWCLLRRFRLSLVSLSLGSLLGAGAVPPPFVVLSGRXLVWCVSYLMCGCVGRAGVSGP

SEQ ID NO: 209126 - protein, 94 aa, Zea mays
  Clone ID: MRT4577_122317C.1.pep
KGWYSWVLSMLYGFLLTFGFITMTPQLFINYKLKSVAHLPWRMLTYKALNTFIDDLFAFVIKMPVMYRIGCLRDDVVFFIYLYQRWIYRVDPTR

SEQ ID NO: 209127 - protein, 67 aa, Zea mays
  Clone ID: MRT4577_122318C.1.pep
YGHAFRVRPRVRGRVGAHAACLSIEISFTPLSAIAQLSRRYYYPLGRSVSPARTTIDYLKVEVVHSS

SEQ ID NO: 209128 - protein, 168 aa, Zea mays
  Clone ID: MRT4577_122319C.1.pep
MLSGYERSREAFMMVDALATVVAGGATAGARQHQVSPEGQWWSDYYAGDVTPPPPPPSLSAPAAHEHGAARIPATTASPSSSSQAPSPSSTGSGTPRRRYRGVRQRPWGKWAAEIRDPHKAARVWLGTFDTAEAAARAYDVAALRFRGSRANLNFPESATLAKPPPTA

SEQ ID NO: 209129 - protein, 123 aa, Zea mays
  Clone ID: MRT4577_12231C.1.pep
VEQESKSEVLRSQLQVARSEAEHAIQLRQRFDGAVVSNGTGSNSSLLMITPTEHTAAMIQGSGVRLTSPQLQSLNPATSLAPTVSAVGDEPKRTAAAMADKLASLSAPVQVLSSIFSSFVAEH

SEQ ID NO: 209130 - protein, 176 aa, Zea mays
  Clone ID: MRT4577_122320C.1.pep
MCDIWEEFRAALCISGGNRRPPPTLPPPNLAGGGDEDGGGVESGGGQEEGDIISALPDDVLLFILSRLPSAAAARTSVLSNRWRLLWAQLPVLWFPLPAEPARALPSPATAARTRDRSHRWRRRLLAHLPALRFPLPVGPARALPSLASARAALTQHSAPSLWILRIDANDADPVD

SEQ ID NO: 209131 - protein, 100 aa, Zea mays
  Clone ID: MRT4577_122321C.1.pep
NILSFLAFLAPVSTLLHADRKKSTDAFRSVPYVEALFISVLRIFYALEKTNSRPLLTMNAFGCGVEADYIVLYLLYAPPWGAPADSGLLLSAGTCGLCAR

SEQ ID NO: 209132 - protein, 68 aa, Zea mays
  unsure (1)..(68): unsure at all Xaa locations
  Clone ID: MRT4577_122322C.1.pep
SLFNFRAYSLYGLTCMVNTYTRHVCLRTATLSYRYSLYKYEAIIPSDIYRKEGIIVIIPTTLMRTXVG

SEQ ID NO: 209133 - protein, 494 aa, Zea mays
  Clone ID: MRT4577_122323C.1.pep
MQPPHQPPMNGQHSQPPPQGPGVPMPPQQQAPPLPYYQQQQAPQYYQQALPQPWGQQQQYAAPPPQYPPPPQTQQYATPPQQYAPLPQQQYAPPPQQQYAPSPYGTTPGSGEVRTLWIGDLQHWMDENYLHYNAFAAVAQQIASVKIIRNKQTGHSEGYGFIEFYSRAAAEHTLMNFNGQMMPNVEMTFKLNWASASTGDKRGDSGSDHAIFVGDLAHDVTDSMLEDVFRAKYPSVRGAKVVVDRMTGWPKGYGFVHFGDLNEQARAMTEMNGMMLSTRKMRIGAAASKKNTDAQQTYATNGAYQSSQGNCSENDPNNTTVFVGGLDSNVDEEYLRQIFTPYGEISYVKIPVGKHCGFVQFTSRSCAEEAIRMLNGSQVGGQKVRLSWGRSPQNRQASQHDANNQYNGNSYYGYQQPGYEGYGYGASSAQDPSMQNYYGYSGCGNYEQQQPTQEQQLQQPPPPQQQLTIACTPLECYRIRVTVESRGAAMRHPI

SEQ ID NO: 209134 - protein, 107 aa, Zea mays
  Clone ID: MRT4577_122324C.1.pep
GRIPPAHASNYPLPRIHRLRPSPEATDGAFASGKHQHLQRLTHLHATLRNNVSRTYKLRSACVRLARHPMKDTETAAMTPILRKGVTPVCTGAESIRLYAMRVRALV

SEQ ID NO: 209135 - protein, 503 aa, Zea mays
  Clone ID: MRT4577_122325C.1.pep
MQPLHQPPMNGQHGPPPPQGSGVPTPSQQQAPPPSYYQQQQQQQQAPPPQYYQQGPPQPWAQQQQYAPPPPQYPPQMQQYAPPPQQYAPPPQQQYAPPPPQQYATPPPQYATPPQQYAPPPQQYAQPPQYAQPPQYGTTPGSGEVRTLWIGDLQYWMDENYLHYNAFAPVAQQIASVKIIRNKQTGHSEGYGFIEFYSQAAAEHTLMNFNGQMMPNIEMAFKLNWASASTGDKRGDNGSDHAIFVGDLAPDVTDSMLEDVFRANYPSVRGAKVVVDRITGRPKGYGFVHFGDLNEQARAMTEMNGMMLSTRKMRIGAAASKKNTDAQQTYATNGAYQSSQGNCSENDPNNTTVFVGGLDSNVDEEYLRQIFTPYGEISYVKIPVGKHCGFVQFTSRSCAEEAIQMLNGSQIGGQKARLSWGRSTQNRQASQHDANSQYNGNNYYRYQQPGNEGYSYGAPNAQDPSIQNYYGYPGYGNYEQQSTQEQQQQQPPPAQEQPPPAPQ

SEQ ID NO: 209136 - protein, 70 aa, Zea mays
  Clone ID: MRT4577_122326C.1.pep
PAGESQFLSNGRCIFLIGLSIHESYLLWLALVDRDINMLIVSVINLAIGKDVLAVGISWLGIEYLILLMK

SEQ ID NO: 209137 - protein, 72 aa, Zea mays
  Clone ID: MRT4577_122327C.1.pep
AHTGTAPPVKKFCKGGGQDPPLRGQSRPHEFTGTGPLGLDSWGHFYGEAQPGEAPKRPESWPHLTVKWAGAT

SEQ ID NO: 209138 - protein, 124 aa, Zea mays
  Clone ID: MRT4577_122328C.1.pep
PAADGVLTSDSCGSASYGGGGHETMELGASVSMSILEKLVQSCSFPDSWRGPPDAEVQALIGYLEELRSSVLDLSKEDEDEDDSATSSSTLKMSLTSQLQELCYDAEDYLEMAQHSRGGCSWQI

SEQ ID NO: 209139 - protein, 32 aa, Zea mays
  Clone ID: MRT4577_122329C.1.pep
YPSNAPNVGISFKTALTVINRAPHVCIALAQP

SEQ ID NO: 209140 - protein, 126 aa, Zea mays
  unsure (1)..(126): unsure at all Xaa locations
  Clone ID: MRT4577_12232C.1.pep
VRXGNPDVXVAYIYLTYFEDDDEXLQKIYDDYKSGTLLTGELKKMAIEALQSVVETFQDRRKAVTDEVLRSYMKPRKLQWAGNPNPKPKESKPKGKRRKRTTRRRPSCLTVLQRSRPRHYWYANGR

SEQ ID NO: 209141 - protein, 87 aa, Zea mays
  Clone ID: MRT4577_122330C.1.pep
MASRWVRPEVDPLIAATNMAVGICGFHLFRNITDSPEVGENEAGTPADVLDNHEEVRRYAMHGLKSFAHDKTPEIMPAVNKVFTDPK

SEQ ID NO: 209142 - protein, 63 aa, Zea mays
  Clone ID: MRT4577_122331C.1.pep
ETFPPFDKKKNAPGKFNKGPFSLGQFSLGGPGFVPFLEGFPIFFSPLKNFFFSKGRPPLPKFF

SEQ ID NO: 209143 - protein, 91 aa, Zea mays
  unsure (1)..(91): unsure at all Xaa locations
  Clone ID: MRT4577_122332C.1.pep
MAEEEHHHHHLFHHNKDEEQLADGGYGKSAKYTEATVTEVVGTGENECDEYXKEEKEHKHKQHLDEDSTIXQNLXRLYKKRKAKNDQRHTH

SEQ ID NO: 209144 - protein, 60 aa, Zea mays
  Clone ID: MRT4577_122333C.1.pep
QKLTPFEKPHLTYHRTTKIGLIIRAYKTKNPIATILINTKKAQKNLRLQKGFQKPLKGEP

SEQ ID NO: 209145 - protein, 57 aa, Zea mays
  Clone ID: MRT4577_122334C.1.pep
METIDQAKDGGKKSLEVPSAQEKVKETKNPKLGVKKKTCKVKVDRVKKSYGASRNTT

SEQ ID NO: 209146 - protein, 51 aa, Zea mays
  Clone ID: MRT4577_122335C.1.pep
PLTTSRIISAPYRAVIGTASRCRALTKKKARQAHKKKNPSPRPRGGRDKTR

SEQ ID NO: 209147 - protein, 58 aa, Zea mays
  Clone ID: MRT4577_122336C.1.pep
TIIPYQSSPPIVIRHRINSRLFILASLVAHFCSKYQSYYLPLHTAPFISHVSQLTHLT

SEQ ID NO: 209148 - protein, 72 aa, Zea mays
  Clone ID: MRT4577_122337C.1.pep
KKFKYLLRERDIWSVEWVNIETEIINSQMSYERYYCFSSDLMQTEIINNQMSYERYYCFSSDLMHILCVFLS

SEQ ID NO: 209149 - protein, 71 aa, Zea mays
  Clone ID: MRT4577_122338C.1.pep
YLSLYWGCSSFSAGPSISRFLWRPKTVPCLREGFFIFARKQNCRGMKTPLPVKIPFFFHTSRQGNLFSPMP

SEQ ID NO: 209150 - protein, 54 aa, Zea mays
  Clone ID: MRT4577_122339C.1.pep
IIYLISDVIISKLKMDNNSKMWGPYVRLYGIICYDNIKNSIIYLNLFYFLFNLF

SEQ ID NO: 209151 - protein, 90 aa, Zea mays
  unsure (1)..(90): unsure at all Xaa locations
  Clone ID: MRT4577_12233C.1.pep
FRKRAAILSGVVPSLGREFLMRTSLAGSDGGGGGGLVLRGEEAHEVLAAEAAAHGXRGEGHGGDAAARGGHSGXGFGGGGGDARSSRADX

SEQ ID NO: 209152 - protein, 86 aa, Zea mays
  Clone ID: MRT4577_122340C.1.pep
ALDQLFRLHATFMAPNNTPRYRGLKPCVPLIAANPFPVGIQRPTVPSTVHLNGEDPRAPLRGWGYPGRHCRLARLRSTFSPLRFRS

SEQ ID NO: 209153 - protein, 116 aa, Zea mays
  Clone ID: MRT4577_122341C.1.pep
AQKKRGLLSWIAFIITTQFLNSRKKKNVQRLQWTPHFWGEAKKRAFGLGLPIGSPARKGDSPFFFCFLGALALKNEVRGGPSPCLWTLSLRPPRNLAPRSLGGIPGVFYLCFPAPK

SEQ ID NO: 209154 - protein, 86 aa, Zea mays
  unsure (1)..(86): unsure at all Xaa locations
  Clone ID: MRT4577_122342C.1.pep
EKADILHAGIENTFTLGYTDSSGSDSKRHARDSHVPILDPLTIGIAEIMVHLATIHITGTGXHPSRSLVAAMILQQXHAWNNHWIL

SEQ ID NO: 209155 - protein, 78 aa, Zea mays
  unsure (1)..(78): unsure at all Xaa locations
  Clone ID: MRT4577_122343C.1.pep
MAKSNLPXRRIIKQTQRPPTEPPPSXRASPPEDNMRQFNEMILAPAQAPYEGAPFRLDTFVTEQYPMAAPKDETPHHK

SEQ ID NO: 209156 - protein, 47 aa, Zea mays
  Clone ID: MRT4577_122344C.1.pep
KFPPCRVTASSSRAPTVYRKSVSKQRVGSFRSSLFTGVLQATLIPAS

SEQ ID NO: 209157 - protein, 40 aa, Zea mays
  Clone ID: MRT4577_122345C.1.pep
GKLIAHVSSLMLLFFTLWGLTTDYDTDRMVNYKRFMYTFN

SEQ ID NO: 209158 - protein, 57 aa, Zea mays
  unsure (1)..(57): unsure at all Xaa locations
  Clone ID: MRT4577_122346C.1.pep
CSPTATPXXSPQRQWAGQQRCQHVTQGEPQHRYQAIFGLALHSILXQESQSGQVAGL

SEQ ID NO: 209159 - protein, 91 aa, Zea mays
  Clone ID: MRT4577_122347C.1.pep
NRSPTSAAIVGSCRSSPLAPTGRNARSRPPRAPTKGRAGSVTHTSGKPSRVWIVPVRGTESAIETHRPIGRDAGRTRRAKVEGSPTARSRP

SEQ ID NO: 209160 - protein, 103 aa, Zea mays
  unsure (1)..(103): unsure at all Xaa locations
  Clone ID: MRT4577_122348C.1.pep
TRLPIAHAGEGNLHTIILLDARQEDQPKEAERLNXHMTVXQVLPMEGTSTGEHGAGTGKMKXLEKERGTESLRTMTRKKAALDPNTIMNPGKLNPHKSDMTVT

SEQ ID NO: 209161 - protein, 210 aa, Zea mays
  unsure (1)..(210): unsure at all Xaa locations
  Clone ID: MRT4577_122349C.1.pep
MMVGHLPGVLPLSSAAIATSLASVSGFSLLTGMASALETLCGQAYGARQYHTLGLHMYTAIVTLLVACVPLSLLWAFMGNLLVLIGQDPLIAHGAGRYIVWLIPGLFANAVIQPITKFLQSQSLIMPLLLSSVVTLALHVPLCWVMVFRAGMGYTGAALAISVSYWLNVAMLVAYIAMSSSCKETRTPPTIKAFRGXGGFLRLALPSALM

SEQ ID NO: 209162 - protein, 45 aa, Zea mays
  Clone ID: MRT4577_12234C.1.pep
NLKKSFMGRRTSFHGKRLLHTLFILITDIPEFCTNWTSKLTGPLG

SEQ ID NO: 209163 - protein, 133 aa, Zea mays
  unsure (1)..(133): unsure at all Xaa locations
  Clone ID: MRT4577_122350C.1.pep
LSLPKFIDYTGVKGSHSANKKTKFWIQQRSIVGTEGXSSLRXHRTVRCTPDSVRCTRGLQLQRYTFGNLAGRNKKKKKKKKKKTGQCPVRPEPHCLRERSAEQASRKGIKGPPSSTEGLSDPPSSAGHLGEPP

SEQ ID NO: 209164 - protein, 461 aa, Zea mays
  Clone ID: MRT4577_122351C.1.pep
MPRTTVVESSGCPPLRALTTDILGLVKVVEAHARPAGAAKVVETWGAPDASRAIVAASLADRAADPVLAVARRNGVVELLNPLNGSALAAVKTAGSAPNDSGAEGDPLAALHLFARQTSDSILGTFLACTEKGKASIRSITKENADSGSDVGPSATWDVCNGANVQFCSVDHGESYVIFGGKGIEVNLWDITSSSKTWSAKSPRANSLGIFTRPWFTAGTFLCKNDHRKIVACTNNHQVRLYDTALQRRPAVSVDFRESPIKAVAADPNGHDVYIGTGTGDLASFDMRTGKLLGCYIGKCSGSIRSIVRHPELPLIASCGLDSYLRIWDTNTRQLLSAVFLKQHLTTVVLDSHFSVEEPGEMKFKQLESLVEAEAEVRKEKKKKKSRPTEEDEEQVGVVDHSDNNGEMYARKEKKKKKKKKSRTIERDEEPDNDGEMCSPKRRKSVERSKCLKKSKKQQVA

SEQ ID NO: 209165 - protein, 139 aa, Zea mays
  Clone ID: MRT4577_122352C.1.pep
MAASRIPPCHLHPSSSSSSSSSMATICPRPGTRQSSAFRFRASAHGSGSSPHLSSFTAVTGKKVKVFEDQLRGIVCYRDEDGEMVCEGYDEGPRLGMRLPEKASFPWPVGVRITDFIQLATLQVFDDDVDVLQLTGDQN

SEQ ID NO: 209166 - protein, 70 aa, Zea mays
  unsure (1)..(70): unsure at all Xaa locations
  Clone ID: MRT4577_122353C.1.pep
RFEQPGXQAFRFHQALGGGVYXQPIFQVEQQFLAHLTIQTIGTQQEQQFLPGLGQLGMGDPGGFLEQEVV

SEQ ID NO: 209167 - protein, 94 aa, Zea mays
  Clone ID: MRT4577_122354C.1.pep
IKVLGKHWGAPGKGSRVLVAVPTGKMNVGAGLPSNNGLQPKNVPFGGGGVPVPPVNVSVKRHKKPCSSSDFGGFSCQLVPCNLVFNAIKLWVPP

SEQ ID NO: 209168 - protein, 107 aa, Zea mays
  Clone ID: MRT4577_122355C.1.pep
MAASRIPPCHLHPSSSSSSSSSMATICPRPGTRQSSAFRFRASAHGSGSSPNLSSFTAVTGKKVKVFEDQLRGIVCYRDEDGEMVCEGYDEGPRLGMRLPEKASFPW

SEQ ID NO: 209169 - protein, 46 aa, Zea mays
  Clone ID: MRT4577_122356C.1.pep
PLFWGASFKKDRGWFWWEKFKSSKYYGRSEGFPRFPYGLSRFFPSL

SEQ ID NO: 209170 - protein, 132 aa, Zea mays
  Clone ID: MRT4577_122357C.1.pep
MRPAATAEAADAHQSRLLYELCALLLTVLRASPDDGAGARPLLPRQVTPAGVASMLLGASMALMLCGSVTFMLGFFLMPWVVGLGFLFLFVGFVTNLSGIWRAILLWPSAACSPKEASSPWHILPKPSFMSM

SEQ ID NO: 209171 - protein, 84 aa, Zea mays
  Clone ID: MRT4577_122358C.1.pep
LTKSRAGTRRQGDDVGAHSRCPFRMLQPASPYRLSPRSLERSCPSFSRSANRLAFECHPGVWTRHTPGCGDPCQGFRALQSHVS

SEQ ID NO: 209172 - protein, 43 aa, Zea mays
  unsure (1)..(43): unsure at all Xaa locations
  Clone ID: MRT4577_122359C.1.pep
MSTVTRAYLDQRLAAAKRCSKEATMAXGAKAADVATVAAAVPT

SEQ ID NO: 209173 - protein, 153 aa, Zea mays
  Clone ID: MRT4577_12235C.1.pep
IVWGGFWGLITVSSRKRSLVLQTQKDWQNAGEDRPKRKRGKRREHKQHRHYQTNPRPPKTQEQRGDNRGHPPKTGQSKENKERAPQRSTKGGGGARETNRNTTKCDTPATPGGITPPLVKNQAPQGEPQNSKKGEPPREPTKRGTEPRPQKTP

SEQ ID NO: 209174 - protein, 104 aa, Zea mays
  unsure (1)..(104): unsure at all Xaa locations
  Clone ID: MRT4577_122360C.1.pep
MAMAAVRRALLAHLRVPVXSTLQLQQRPFLPXGRLLSSTTETNGSLLDKGEVDDRVVCXRKNFQKGEPSKATPRAHFQKDLGLDSLDTGEIANAFEEENFSEIP

SEQ ID NO: 209175 - protein, 100 aa, Zea mays
  Clone ID: MRT4577_122361C.1.pep
MSGEHAKKKMETGDKPTTSHGKASSEGSRKKGKGKEKKASSHKSHRSGDKKKKMRKVVYYETDTSSPSTSGSDAPSVTSKRHERKKFSKIPLHYPRTSRV

SEQ ID NO: 209176 - protein, 105 aa, Zea mays
  Clone ID: MRT4577_122362C.1.pep
PNVGELIEDSKRIPRKLLRSTRAYGEASQLLYTREAGRGGHQLILRTNHKTTAGRKGRPFRDKVLYVRDGYSSRRLNRVRPINMVIRRYHEHGGRPIGRSPGSRR

SEQ ID NO: 209177 - protein, 102 aa, Zea mays
  Clone ID: MRT4577_122363C.1.pep
GRNGNAEREPFGGLHGCPWRATAKRGLAVRALVLAYRDLQVTQELEHDLKKETLFYGTRIYAGAGMSGWHLDIRCHKSQWDPRIRCNPMMEPPGTLTPDRLP

SEQ ID NO: 209178 - protein, 78 aa, Zea mays
  Clone ID: MRT4577_122364C.1.pep
GRDCGLSWVVLLHRGLVKRAEGREGRRRASRRGRRRRHTQLLEASELHPCLHDLSWRSCSDRGSPWPAAVIASITGQE

SEQ ID NO: 209179 - protein, 92 aa, Zea mays
  Clone ID: MRT4577_122365C.1.pep
QLLNASDTLTTKPYTPRTAAWCIRRPWPPPPSRSTAASSPPWPTCTPLITGRSYCALKLISTRPCGTFSRHVEHEQHHLSFVELTHGAADDP

SEQ ID NO: 209180 - protein, 161 aa, Zea mays
  unsure (1)..(161): unsure at all Xaa locations
  Clone ID: MRT4577_122366C.1.pep
GTSSRPGRDRTNLSWRXTTLTSRTRPRAPAEGQGELKNTCARXRRHATWTSRSGSRAAPPSSPQLWGRRXXPRPDTPAGGRPGPVFPCQRLRGHACGXXRXXPRAEEGCPISGADPTTLSGNDDRGGFEQAGPRDGELKLRCLPKFKGQTKWGLVAPGFDE

SEQ ID NO: 209181 - protein, 83 aa, Zea mays
  Clone ID: MRT4577_122367C.1.pep
KLFQAWLDLIFWTAFEMLLFIHTTPKMVKPCLFLRTPWEIGSRCLLHDLMVNFQKCSCPSNSGCMDFSRSITVHASCYWRIPI

SEQ ID NO: 209182 - protein, 113 aa, Zea mays
  Clone ID: MRT4577_122368C.1.pep
MCSGSWFWSGSGGSSSSKERPSLVVVNLERQLKKTLTVRRRRRRRLRLRRLRAGGAEAMEMVNLKLYLENRCIIAENERLRERASALRRENLALLRNLSSRTAAVPEPGAGAA

SEQ ID NO: 209183 - protein, 40 aa, Zea mays
  Clone ID: MRT4577_122369C.1.pep
KATGKKNRPFRFRRLPQNGSAGATPTESFTLLLTNPQIDS

SEQ ID NO: 209184 - protein, 79 aa, Zea mays
  Clone ID: MRT4577_12236C.1.pep
MSVFQLLMKRKELIPLVVFMTVAAGGASSFAVYSLWKTDVILDRKKNPEPWETVDPTVPQKLITINQQWKPIEELQSVQ

SEQ ID NO: 209185 - protein, 56 aa, Zea mays
  Clone ID: MRT4577_122370C.1.pep
MEMVNLKLYLENRCIIAENEKLRERASALRRENLALLQDLSKTPAVPEAGAGAGAA

SEQ ID NO: 209186 - protein, 53 aa, Zea mays
  Clone ID: MRT4577_122371C.1.pep
RPLLCLAAVPVSAGCRHPGFVPCSPHPLVGGGTAVVCPFAPLFDPSPHPVLAS

SEQ ID NO: 209187 - protein, 116 aa, Zea mays
  Clone ID: MRT4577_122372C.1.pep
MCSGSWSWSSSKKRKRPSLVVVNLKRRQLQKTPPPTPPRSSVAIRRKRLRLRRLRAGAEAMEMVNLKLYLENRCIIAENEKLRERASALRRENLALLQDLSKTPAVPEAGAGAGAA

SEQ ID NO: 209188 - protein, 118 aa, Zea mays
  Clone ID: MRT4577_122373C.1.pep
MCSGSWSWSSSKKRKRPSLVVVNLKRRQLQKTPPPTPPRSSVAIRRKRLRLRRLRAGAEAMEMVNLKLYLENRCIIAENEKLRERASALRRENLALLQDLSKTPAVPEAGAGAGAGAA

SEQ ID NO: 209189 - protein, 57 aa, Zea mays
  Clone ID: MRT4577_122374C.1.pep
TGSTLTFLSCYIPERSHSISLNIGTTQTKGRSALSSVGLVLGLFWTFVLLLGTLVSL

SEQ ID NO: 209190 - protein, 114 aa, Zea mays
  Clone ID: MRT4577_122375C.1.pep
MCSGSWSWSSSKKRPSLVVVNLKRQQLQKTPPPTPPRASVAIRRKRLRLRRLRAGAEAMEMVNLKLYLENRCIIAENERLRERASALRRENLALLQDLSKTPAVPEAGAGAGAA

SEQ ID NO: 209191 - protein, 117 aa, Zea mays
  Clone ID: MRT4577_122376C.1.pep
MCSGSWSWSSSSSSKKRPSLVVVNLKRQQLQKTPPPTPPRASVAIRRKRLRLRRLRAGAEAMEMVNLKLYLENRCIIAENERLRERASALRRENLALLKDLSKTPPVPEAGAGAGAA

SEQ ID NO: 209192 - protein, 417 aa, Zea mays
  Clone ID: MRT4577_122377C.1.pep
MQDLRIAMDSESEKSVRRVSGKGARGKQHGNEFVDLHTMLIHCAQAMATGDRRSATEMLKQIKQHSSLRGDATQRLAYCFAEGLEVRLAGTGSQVYQSLMAKRTSVVEFLKAYKLFLAAISLNKVHIIFSNGNIVDAVAGRSKLHIVAYGVQYGLQWPGLLHFLAGREGGPPEVRFTGIDLPQPGFRPAYQIEETGRRLSNCAREFGVPFKFHAIAAKWEMVSAEDLNIDPDEVLVVNSDCHLSNLMDEGVDADTPSPRDLVLNNIRKMRPDIFIQIVNSGTYGAPFFLTRFREALFYYSALFDMLDATIPRDNDERLLIERDIVGRSALNVIACEGADRLDRPETYKQWQVRNHRAGLKQLPLNPEVVKLARDKVKKYYHKDFLIDEDRQWLLQGWKGRVLFAMSTWVAEDNNSTF

SEQ ID NO: 209193 - protein, 964 aa, Zea mays
  unsure (1)..(964): unsure at all Xaa locations
  Clone ID: MRT4577_122378C.1.pep
MLVTWQPNYMGFDTSANHHGYTDANGVASTQGFVPMQTTYQGQTQAIANSQVHLSNSYLGIDNSMNFNQQQFLGANASNLQFGHSPHEGRSSAGRPPHALVSFGFGGKLIVMKETTSMPASFNSGIQGNSSSTVSVLNLLEVVFDKIDSSSITNGSALSYFHALCRQPVPGPLVGGSAASKDVNKWIDEMIAWYDSSSSELHRGDTRKLLISLLKILSQHYGKLRSPFASDPSQEETDGPEMAVTKLFSSCKRSTVHMGDYGSLVPCMKSIPSESQMQAVAQEVQSLLVSGRRKEALHCAQAGQLWGPAIILALQLGDKFYVDTVKKMAHFHFVSGSPLRTLCLLIAGQPADVFNVENNVNSDYGASHQPMEPGPNGMLDDWEENLAIITANRTKGDVLVITHLGDCLWKEKNEIAAAHSCYLVAELNIDSYSESARLCLIGADHLKCPRTFASPEAIQRTEVYEYAKVLGNSQYILLPFQPYKLIYAYMLVEVGKVSDSLRYCQASIKVLKASGRAPELEVWKQLFSSLEERIRTHQQGGYGTNLAPGKIVGKIFTSLDKSISRMMGTPSAPLPPLPHGSFSDKESHSIPAAAKFVNSQSVMVMPSLIPSASMQSMTEIAEDSGGTGRKIAHNRSVSEPDFGRSSKQGAGGSDGTQSSASGSSSSRFGWLVQKTMGLVSKSHRQAKLGDQNKFYYDEKLKRWVEEGAAVPAEEPPLPPPPTKPSFQNGMLDNKLNGPMSVSHXQWSXNGNPXSSEQGLGMPPIPPSQNQFSARGRMGVRSRYVDTFNRSGASGAMPSYNKPAAPSMTPPAGAKFFMPTAAPVAADQMIPHQAAEIHSETIHQDERSASPPAETSFSSTPPPTQFPSPVQSTIYRQSSMENISTPYQGSGVSSLSNDSSFSKSRAASWSGTYSEQFNAFAGTISPDRQTTHSPLMPGKPPHSRSNSNSSGHLNGLAEDLHEVEL

SEQ ID NO: 209194 - protein, 112 aa, Zea mays
  Clone ID: MRT4577_122379C.1.pep
MCSGSWSWSSSKKRPSLVVVNLKRQQLQKTPPPTPPRASVAIRRKRLRLRRLRAGAEAMEMVNLKLYLENRCIIAENERLRERASALRRENLALLQDLSKTPPVPEAGAGAA

SEQ ID NO: 209195 - protein, 62 aa, Zea mays
  Clone ID: MRT4577_12237C.1.pep
FFYFFLSQNPTFIIRFFKNYKKPSFFVFHHPKNSHNLVFLQKHLSLISHHLKNIPNFPSPIF

SEQ ID NO: 209196 - protein, 151 aa, Zea mays
  Clone ID: MRT4577_122380C.1.pep
MCSGSWSWSSSKKRPSLVVVNLKRQQLQKTPPPTPPRASVAIRRKRYPANPPCSSFPSFLCSSFSSISDSFLQSHKYTVHVRRLRLRRLRAGAEAMEMVNLKLYLENRCIIAENERLRERASALRRENLALLQDLSKTPAVPEAGAGAGAA

SEQ ID NO: 209197 - protein, 43 aa, Zea mays
  Clone ID: MRT4577_122381C.1.pep
SEIYQLIYKNIKNGMTANSTKFRVISAHDGKQVALQTKSCLFP

SEQ ID NO: 209198 - protein, 192 aa, Zea mays
  unsure (1)..(192): unsure at all Xaa locations
  Clone ID: MRT4577_122382C.1.pep
FXCSVXPLLFAGXGGCXXFFSXXXXVLRVGVLXGXLGAPWSGSAGVRXAXXSRPRFGPPXXXLLSLXACXFAXGCLPASCPWXAWWAVAXGRFGGGXLCCPPFLCXSLXLAGAVCGASXXXSXXVFAXPKKREVESPLVRRXRGXPEWRRLWAAXSXGPPGAFXXXPXWXLAVGXPAAPVXXXXRPPPPPPP

SEQ ID NO: 209199 - protein, 164 aa, Zea mays
  Clone ID: MRT4577_122383C.1.pep
EQAVYTPSTTATCAPAPGPGAAAAARSARLLLSSTSSGSSCRRRRRRRRLVPQLLSGGRGTQLTRPARVSQASSAQVSAASATVSCNHTSTLYTYVRRLRLRRLRAGAEAMEMVNLKLYLENRCIIAENERLRERASALRRENLALLRDLSKTPPVPEAGAGAA

SEQ ID NO: 209200 - protein, 90 aa, Zea mays
  Clone ID: MRT4577_122384C.1.pep
VLGFFFFFSFFLFFVYTQRIFLNTKGALFNPQCGPHRPVFLKPTPFVPPFLLGGCRKKNLTPPTNKLPNGTPTHPNRTGSPPRNDSPPKP

SEQ ID NO: 209201 - protein, 97 aa, Zea mays
  unsure (1)..(97): unsure at all Xaa locations
  Clone ID: MRT4577_122385C.1.pep
TFSNLLNGLLKKTFYLSVLYNSFFSLVVFYPHVNLYXFAIGIPHKTIXLYRTYTNYNVSNNTSHQYIEQLKSYAXGXLSNKLXTLXSYKRKLLGERL

SEQ ID NO: 209202 - protein, 335 aa, Zea mays
  Clone ID: MRT4577_122386C.1.pep
MEKWRRRRHLLLAVAAVALVAAITLPSAEAKLSPDYYRSTCPDVEAIVQAVVAKKVNETFVTVPATLRLFFHDCFVEGCDASVIIASRDNDAEKDAPDNVSLAGDGFDTVVRAKAEVEKKCPGVVSCADILAIAARDVVTMSSGPHWTVQLGRLDGLVSKAGNVAGKLPGPNMRVKDLAALFAKHNLTTLDMVALSGAHTVGFAHCTRFADRLYHHGVGDSDGASVDPSYNPAYARQLMDACPPGVGADIAVNMDPITPTAFDNAYYANLAGGLGLFTSDQALYSDGASQPAVRDFAKNQTRFFEAFKDAMVKLGSVGVKTGRHGEIRSDCTAFN

SEQ ID NO: 209203 - protein, 135 aa, Zea mays
  Clone ID: MRT4577_122387C.1.pep
GGGGRLAGAIHPLFVAPAPYSNNLGAAGMFWFPGPNGLSPGMFGLSGQDNFLVPNWGAPPFWGGKPQAKLFGALLGLAQAKKVFFAGPGPGFFCFFFFPWVPFLVWVLVKLFGVLFFLKKNFLFPPSPWFFFPGR

SEQ ID NO: 209204 - protein, 192 aa, Zea mays
  Clone ID: MRT4577_122388C.1.pep
MYTARKKIQKDKGVEPSEFEDTVAQAFFDLENGNQELKSDLKDLYINTAIQMDVVGNRKAVVIHVPYRLRKPFRKIHVRLVRELEKKFSGKDVVFVATRRIVRPPKKGSAVQRPRTRTLTAVHDGILEDVVYPAEIVGKRVRYRLDGAKVIKIYLDPKERNNTEYKLETFSAVYRRLCGKDVVFEYPVTETA

SEQ ID NO: 209205 - protein, 130 aa, Zea mays
  Clone ID: MRT4577_122389C.1.pep
SRLSIRGLGSSFQARTSIHPGTGWCSFSSLSPHALREVHPWPGLSSVAGGWTLSGACRAMDQDTPTLKPGWMQHDKAAGAPNIWTIASSHSDYQAAGGSSRSHSSEHYRNHGSPASSSRESSGSNGSRQP

SEQ ID NO: 209206 - protein, 398 aa, Zea mays
  unsure (1)..(398): unsure at all Xaa locations
  Clone ID: MRT4577_12238C.1.pep
MAETSTYQILVRLLDGRTRCLRFSTPTVSGAVLLDAVASISRVPAAALRLVTGGIDVSPSSVLAAAADGQFPYSSALLRLRGXAADRQLEKLAENFIKKKAKEAGRGGGPSTAEVDKYLEKYRKDAEICVNAVEESVRASLGKRKTAPKLPSGADAKKLKIWLGKNKVEEDESDSDSDVDDEDSEDLESADAKSVVVDEGNYSNGSRKNEEKLDLGSVSGSSHSEGESSGEKSQLTTSSGAEGGDFESGDSAELEVGMLDHPISVAAASEEVTADEDNTALATSNQNNPEVPQVEEVRKADKDNTASATSNQNNQEVPQVEQHVGISNSYSEPLDLAKYSSSAELEVLGLEKLKIELQSRGLKCGGTLQERAARLFLLKTTPLDKLPKKLLAKTNGRK

SEQ ID NO: 209207 - protein, 70 aa, Zea mays
  Clone ID: MRT4577_122390C.1.pep
IRLELSLTGNFSEEVAQPHGAGTRMHSLADNGRCKRNKPMDPCGAPVLPAFSPNRGQLLDLRTQATSVIL

SEQ ID NO: 209208 - protein, 96 aa, Zea mays
  Clone ID: MRT4577_122391C.1.pep
KNRPPPKGFFLPQLIKNRVYLIQKNFPFNERGEKMGALKEPSKLFKNVMWNRSLKGGGPFFNRPLSGGGGFTGKPRKGTIGRGPCFIFPRCRRFFF

SEQ ID NO: 209209 - protein, 54 aa, Zea mays
  Clone ID: MRT4577_122392C.1.pep
HLKHFKLSYKCGIIPQFCLNFGVPTGRREAYINNRFTFFMPGFCFKTCLWGYHF

SEQ ID NO: 209210 - protein, 102 aa, Zea mays
  unsure (1)..(102): unsure at all Xaa locations
  Clone ID: MRT4577_122393C.1.pep
LGFVCPLFAGAFTRGAPLMPPPPSPXRIWVGASLFFGGGGVPPPFFKSEGGGPMFFPAPGPPFFRAPPPGEKACPQNPFPPLGPPPNGSLAPVVSREPFFPF

SEQ ID NO: 209211 - protein, 50 aa, Zea mays
  Clone ID: MRT4577_122394C.1.pep
HCRFIDKYGTHVVVGLSVGGQDVVYVKQDGSSALPPAEIKEHLDRLGDQL

SEQ ID NO: 209212 - protein, 232 aa, Zea mays
  Clone ID: MRT4577_122395C.1.pep
MMDCAGGRDPVEDFLLGGAGAGDDGDLVAVFCDDGGLGIEGIHGDACGFEQSNLGKRGRDEPCSSGPTSKACREKMRRDKLNDRFLELSSVMSPGKEAKLDKANILSDAARMVAQLRGEAEKLKESNEKLRENIKDLKEEKNELREEKVRLKVEKDRLEQQVKAMSVAPTGYVPHLPHPASYHPAAFTPFAPPPANKSAPIPAPFPGMAMWQWLPPTIVDTTQDPKLWPPNA

SEQ ID NO: 209213 - protein, 95 aa, Zea mays
  unsure (1)..(95): unsure at all Xaa locations
  Clone ID: MRT4577_122396C.1.pep
MVFNIIFFLNKAQNNNPPLNLYKSLHNINLFSIITIISFFLFAPLTLLTXLLNLFQHTLHSSTFNFKQIYTNSFIPSCFFHSYQHLSYIILSIVF

SEQ ID NO: 209214 - protein, 226 aa, Zea mays
  Clone ID: MRT4577_122397C.1.pep
IFEKLFCTCISFPVVAFVRYLLCNCSRLGIEGVNGDACGFEQSNLGKRSRDEPCSSGLKSKACREKMRRDKLNDRFLELSSVMNPGKQAKLDKANILSDAARMVAQLRGEAEKLKESNEKLRENIKDLKEEKNELREEKVRLKVEKDRLEQQVKAMSVAPTGYVPHLPHPASYHPAAFAPFVPPQQAAGNKSAPIPAPFPGMAMWQWLPPTIVDTTQDPKLWPPNA

SEQ ID NO: 209215 - protein, 184 aa, Zea mays
  unsure (1)..(184): unsure at all Xaa locations
  Clone ID: MRT4577_122398C.1.pep
TESAGASPHKAHQVAPAAGMGLRATDPGPPPRCQLTRAVFSPRHSQAAPGKSTRQSLLDTYRAPYDTRAQRETPVPVASDQLNPVSCCHVRARATSPSRAHGDPLRPGRRRCVRXGSIDGLLGLLRSSRLRLGGRLLGTSRSRSLRFVLVELLESSEPLPRRQARPRRAPRHQQEEQPPPRRAA

SEQ ID NO: 209216 - protein, 94 aa, Zea mays
  Clone ID: MRT4577_122399C.1.pep
MGTKILSLLALLALLVSATNALIIPQCSLAPNAIISQILPPDTSMGFEHTTVQAYTIPIRAGGKGLKQPNAQFEQQFLAQFKLQTIGTPPGPQF

SEQ ID NO: 209217 - protein, 189 aa, Zea mays
  unsure (1)..(189): unsure at all Xaa locations
  Clone ID: MRT4577_12239C.1.pep
MAETSTYQILVRLLDGRTRCLRFSTPTVSGAVLLDAVASISRVPAAALRLVTGGIDVSPSSVLASAADGQFPYASALLRLRGGKGGFGSLLRGAASKAGQKKTSNFDXLEEWKAEAADRQLEKLAENFIKKKAKEAGRGGGPSTAEVDKYLEKYRKDAEICVNVVEESVRASLGKRKTAPKLPSGADAK

SEQ ID NO: 209218 - protein, 86 aa, Zea mays
  Clone ID: MRT4577_1223C.1.pep
GYHTSPRNLVHFTELGKHLVACMSCGADGRVCTDPGQVLCEQALGCFKTPGRRTPPRSVKTPPRPSWALDCKVGGSATPRAEFRAY

SEQ ID NO: 209219 - protein, 62 aa, Zea mays
  Clone ID: MRT4577_122400C.1.pep
KASSIVNPIVCSLKQKTKKKTKKEKKRKKKKRKKKKDKKKKKRKKKKKKIKKKKKKKKTRKG

SEQ ID NO: 209220 - protein, 78 aa, Zea mays
  Clone ID: MRT4577_122401C.1.pep
ANGADSSASTKATWSVGRGFCPCQWCSAQVGEDKVPLRTVGAVRLQDQGGPMVKGMRMLRNQRCSVVRHEAYVCLRSV

SEQ ID NO: 209221 - protein, 66 aa, Zea mays
  Clone ID: MRT4577_122402C.1.pep
KGNPPYGPGFTRLGGCVTLGGKPPKTRGPAWGVLKNPQFLGNSSQRANFTGSLNAWEFPPPRKNKG

SEQ ID NO: 209222 - protein, 89 aa, Zea mays
  unsure (1)..(89): unsure at all Xaa locations
  Clone ID: MRT4577_122403C.1.pep
MGMLLTPIFSCVLSHRXAYILQLGLYNAGTTTILCILQMGEGDSTIRTLEFIEGTARCSNVKFQLWHLGGDTSIMPYWRSYYPNTQAMI

SEQ ID NO: 209223 - protein, 165 aa, Zea mays
  unsure (1)..(165): unsure at all Xaa locations
  Clone ID: MRT4577_122404C.1.pep
SQLPELRYLRXMVIKETLRLHPALPLTHAHSPSCESPMTGXHVAYRCRVFVNVWAIDRNPLVWSEPLEFNPERFSEDDDGRRWDFTGRQFDYLPFGSGRRICAGIAMADKMTPRVRAMLLQAFDWKLPQGTELDLSEKFGVVMKKATPLMVIPKSRFPKPDLYCS

SEQ ID NO: 209224 - protein, 88 aa, Zea mays
  Clone ID: MRT4577_122405C.1.pep
RGDQCFHMHTLIQFRNDCMMYSYLASSCATGSSVVYICMPQERISSRGQLRCRYLWMPGRWVVRRLIPRWGSGPRGCAPAQPAPAGTW

SEQ ID NO: 209225 - protein, 63 aa, Zea mays
  Clone ID: MRT4577_122406C.1.pep
RKAPPTFPFLIEMRERHYWVTHRTERSVDMLLHGKKPLVEVRKRDSEFQVVIERWATYDGDGL

SEQ ID NO: 209226 - protein, 624 aa, Zea mays
  Clone ID: MRT4577_122407C.1.pep
AHTPDAFAPRIPLAGGRLYQPGRCWEDVFDAISNARHLIYITGWSVYTEITLLRDGSRPRPGGEATLGELLKRKASEGVRVLMLVWDDRTSVESLGMKWGFMSTHDAETAEYFRGSGVHCVLCPRNPDAGSSAVMGAQIAYMITHHQKIVVVDHEMPAKRSDRRRILSFVGGLDLCDGRYDTQFHSLFRTLDTAHHKDFHQPNLAGASIDNGGPREPWHDIHSKIEGPAAWDVLYNFEQRWRKQGGGIDLLVNLKAMADLIIPPSPVMFPEDQDSWNVQLFRSIDGGACFGFPSTPEAAAQSGLVSGKNNVLDRSIHDAYIHAIRRAKHFIYIENQYFLGSSFAWKADGIKPEEIEALHLVPRELSLKIVSKIEAGEHFAVYVVLPMWPEGPPASGSIQGILDWQRRTMEMMYNDISVALDAKRIDRDPRDYLTFFCLGNREVKMDGEYEPSGRPLDGTDYARAQNARRFMIYVHSKMMIVDDEYIIVGSANINQRSMDGGRDSEIAMGAYQPCHLNTKGQVARGQVHGFRMSLWYEHLGMLHDDFLNPGSLECVRRVNQMADRYWDLYAGDSLDADLLGHLLRYPVTVTKEGTVTELPGAKFFPDTQALVLGALSKLPPILTT

SEQ ID NO: 209227 - protein, 64 aa, Zea mays
  Clone ID: MRT4577_122408C.1.pep
SRSRTSSIFDAKAGIALNDNFIKLVSWYDNEWGYSNRVVDLIRHMFKTQHGAGVQRHHSHLFSA

SEQ ID NO: 209228 - protein, 82 aa, Zea mays
  Clone ID: MRT4577_122409C.1.pep
WLLRCCSSPGCLLPAHGLGRQLKRVTYLGICGSTFSFTYQKHLVTCYAHYYSLGDGVSSEGLSSVEHPHDYAKSCYPFGRPY

SEQ ID NO: 209229 - protein, 511 aa, Zea mays
  Clone ID: MRT4577_12240C.1.pep
MANLKPTLILNSKAAPGRAISREKKKKKNHSLRSLRQRRRELGFRAPLPLPPAMAETPTYQILVRLLDGRTTCLRFSTPTVSGAVLLDAVASISRVPAAALRLVTGRIDVSPSSVLASAADGQFPSASALLRLRGGKGGFGSLLRGAASKAGQKKTSNFDACRDINGRRLRHVNAERRLEEWKAEAGDRHLEKLAENFIKKKAKEAGRRGGPSAAEVDKYLEKYRKDAEICVNAVEESVRASLGKRKTAPKPPSGADAKKLKIWLGKNKVEEDESDSDSDSDMDDEDSEDQESADAKSLVVDEGNCSNGSIKNEKLDLGSVSGSHSEGESSGEKSQPTTKSGAEGGDFESDGSAEPELGMVDHPIPVNNAVAAASEEVLKSDEVTADEDNTTSATSNQNNPVVPQVKEALKADEDNSASATSNQNNPEVPKVEEYADASKSYSEPLDLAKYSSAVELEVLGLEKLKIELQSRGLKCGGTLQERATRLFLLKTTPLDKLPKKLLAKAAIGGK

SEQ ID NO: 209230 - protein, 78 aa, Zea mays
  Clone ID: MRT4577_122411C.1.pep
SPEGRVFPWQGNFGLFFFYPCRGVPPQAVFLKVPFLSLEKWSVPDRVPVETFLARKDPESLDVPLFRLGIFVIEIGVL

SEQ ID NO: 209231 - protein, 53 aa, Zea mays
  Clone ID: MRT4577_122413C.1.pep
FAQAPNAHSARYLQLEHPSPFHSPLHLWLSGPHCFPVSSRIYLSEEYVRLSSS

SEQ ID NO: 209232 - protein, 134 aa, Zea mays
  Clone ID: MRT4577_122414C.1.pep
NYPSKTARTCARAKNHHHHSLWSLLQPSPLLWPHHICNKLAVPLYGYGKSRENSQSKRYARSMLSSHAARRTSDMSEARCHLPTWLQNLGSYKNEYQTFRFDATRSFVRSLCIPKESYADQSCQQVSCNVSKMV

SEQ ID NO: 209233 - protein, 48 aa, Zea mays
  unsure (1)..(48): unsure at all Xaa locations
  Clone ID: MRT4577_122415C.1.pep
MYAKRAFVQWYVGXGMQEGQFSHARKDLAALKKLSKEVGREFNKAQNA

SEQ ID NO: 209234 - protein, 72 aa, Zea mays
  Clone ID: MRT4577_122416C.1.pep
QFPHKVTATLPLLTPELMYPRPRAPSERPPSRTGPPPSSVVASQAYRLVTGLGSYTHKSCVVCTTHACHGRS

SEQ ID NO: 209235 - protein, 385 aa, Zea mays
  Clone ID: MRT4577_122417C.1.pep
MGHHCCSKQKVKRGLWSPEEDEKLVKYITAHGHSCWSAVPKHAGLQRCGKSCRLRWINYLRPDLKRGTFSDHEERTIIDVHRILGNRWAQIAKHLPGRTDNEVKNFWNSCIKKKLIAQGLDPKTHNLLPASRTLLHGNGANPSSNNPAHFNSNGCAAVVSVATTPFTISSPTKAAAYGTVTATPPPETMAPATYDVPNNYPDGMLMRHDQAATAAAIPGYPYHPGNGGGVLMSFRDQNAGLQTSVDFVNGSSSSSSMDHAAGMPNGNGFSQQGMGAAFMDVTAGMWSTAAVDSGMCAGMEVAQPPPPPPQQPLPPQGLVQGEVLVGRQTVMNGGGAVADKGMDMMDVSSVYGGAGAMAFDLELMESCALFCGSTGNTMEQLQWDC

SEQ ID NO: 209236 - protein, 61 aa, Zea mays
  unsure (1)..(61): unsure at all Xaa locations
  Clone ID: MRT4577_122418C.1.pep
QEDIENIREELRIALLALKAXELKVEADKEXRSXQPLXYKKEYDEVLIKQGSDKDNLMENA

SEQ ID NO: 209237 - protein, 89 aa, Zea mays
  Clone ID: MRT4577_122419C.1.pep
QRGSAPSSRCLETLNAGIYDFLGPPPPFSIFNHKPMQVCYHNSGTNWILRATTFILSDLIGFLAFVLVSSLIQLFCFKSIFVFFSSFLS

SEQ ID NO: 209238 - protein, 81 aa, Zea mays
  Clone ID: MRT4577_12241C.1.pep
STSAITSKSKLSKRRIRRMAQTGTTQNSDTRSTSTAITGRTCSTRTARAAVGTRSTLRFMRADQTLITYQTNPACMASYYI

SEQ ID NO: 209239 - protein, 170 aa, Zea mays
  Clone ID: MRT4577_122420C.1.pep
MEIAKNSIAISRVRDLPPSKRFRHIGSHLGSTPSVPLPAKKRMLPSHTPEEAAVALCLPVKKRVIAAPRVEVAGATFCLPAKKRAIVPSPPEDAAPACLPAKKRACAAPADAAVPACVPAQERPCAPLPPPPVVVSWARVSTKKRVHAPAPRGHAAGSVPARRPANGLSC

SEQ ID NO: 209240 - protein, 76 aa, Zea mays
  Clone ID: MRT4577_122421C.1.pep
WVYNQTSSPVFNDLGGVCLGDFNPPLLGGSLNFFIAKWEALKKKPGRAMFLFKAMPDCWDKSSRWINKKRVFFRVF

SEQ ID NO: 209241 - protein, 102 aa, Zea mays
  Clone ID: MRT4577_122422C.1.pep
SANSLQQPDSLQIVSHSCKNNNKKKSERLQRPPWLRLNAKTAAKRTASVSVVVSGGQPIEKAQRKRRQVSELATYYDKQVADAVVWQATCNTVRFMMILICL

SEQ ID NO: 209242 - protein, 124 aa, Zea mays
  Clone ID: MRT4577_122423C.1.pep
MAGEKAPRAFSIEELPGHLIGEVLTSGGLAAADLARLEATCRALRPLAEYAASKLCAARAAFAAMGPAARGELLERCGGSWKRVLRFLQSVEQSSGTVETSSGSMQVATGRYHTLLVHDSSAYS

SEQ ID NO: 209243 - protein, 56 aa, Zea mays
  Clone ID: MRT4577_122424C.1.pep
HVQKLPGGNGAQFILGNLTDQSFQNRLGTGKPDAWVQCNITYDKNTFVSQFARVKN

SEQ ID NO: 209244 - protein, 34 aa, Zea mays
  Clone ID: MRT4577_122425C.1.pep
SWHFEQLVAAPMCSVKVGNHLYLNHLLSLISLYL

SEQ ID NO: 209245 - protein, 81 aa, Zea mays
  Clone ID: MRT4577_122426C.1.pep
GYGCINATKTIRLNWLLQQLQSILDWRSQVRFLLIASFFVQLLGTTTSKSQTHARYDFFLCTRRMLLFCTGGSTWFRAPAG

SEQ ID NO: 209246 - protein, 100 aa, Zea mays
  Clone ID: MRT4577_122427C.1.pep
ETTIHAPGHHRKKRGGGGETQPPPFLRVLQKRPGGAIPALPPGFSNQGIGHKKCHALPYRKKAFFFKPGGPCPANLFWAGGPCPRGTPIFPGPLELKPLT

SEQ ID NO: 209247 - protein, 72 aa, Zea mays
  Clone ID: MRT4577_122428C.1.pep
GRDAPSSAPPGEQNQAQGASQGTHSRQGPRDDAEAVIGAGGARNSYNRRQRGATMKNQEGAPGEKTEENTGR

SEQ ID NO: 209248 - protein, 38 aa, Zea mays
  Clone ID: MRT4577_122429C.1.pep
VLAGTKRGLYRHWETKTLLGDGKHLMAIVVYLAPVYEI

SEQ ID NO: 209249 - protein, 277 aa, Zea mays
  unsure (1)..(277): unsure at all Xaa locations
  Clone ID: MRT4577_12242C.1.pep
EILLNAEICVXAVEESVRASLGKRKTAPKLPSGADAKKLKIWLGKNKVEDESDSDSDVDDEDSEDLESADAKSVVVDEGNYSNGSRKNEEKLDLGSVSGSSHSEGESSGXKSQLTTSSGAEGGDFESGDSAELEVGMLDHPISVAAASEEVTADEDNTALATSNQNNPEVLXLKKSXKAXKDNTASATSKXNNQEVPQVEQHVGISNSYSEPLDLAKYSSSAELEVLGLEKLKIELQSRGLKCGGTLQERAARLFLLKTTPLDKLPKKLLAKTNGRK

SEQ ID NO: 209250 - protein, 145 aa, Zea mays
  unsure (1)..(145): unsure at all Xaa locations
  Clone ID: MRT4577_122430C.1.pep
SARATPPYIFQLPLSVAAVDSTFIMIKPDGVQRGLIGEIIIRFEKKGFYLMALRLXNVPRSFAEKHYANLASKPFFQGLVDLLSSTGPLXEPVVMXWHRRCISHTGXKIIGSTNPLASVPGNIRDNFAVDIGKHVIHGSDSIESA

SEQ ID NO: 209251 - protein, 253 aa, Zea mays
  Clone ID: MRT4577_122431C.1.pep
MDVKCRRLEGKVAIVTASTMGIGLAIAERLGLEGAAVVISSRKQKNVNEAVEGLRAKGITAVGAVCHVSDAQQRKSLIETAVKSFGHIDILVSNAAANPSVDSILEMKESVLDKLWDINVKASILLIQDAAPHLRKGSSVIIISSIAGYNPEQGLTMYGVTKTALFGLTKALAGEMGPDTRVNCIAPGFVPTRFASFLTENETIRKELNERTKLKRLGTVEDMAAAAAFLASDDASYITAETIVVAGGVQSRL

SEQ ID NO: 209252 - protein, 71 aa, Zea mays
  Clone ID: MRT4577_122432C.1.pep
LPKCEMHYLILEGIAPSEMVVCGPKDSNRPFLQRLGWSCFSNCEIVMDPDESPGGLCFWKVLGSCFIWGNF

SEQ ID NO: 209253 - protein, 105 aa, Zea mays
  unsure (1)..(105): unsure at all Xaa locations
  Clone ID: MRT4577_122433C.1.pep
NFSILPMQQQNALSTVLGLGATXXTXXXATXQHTTTIPTRRNDPILNINRLPNLPPTILHNSHINQHPNKTNYRHRKSPHIHKIRTKKYRCHHNIYKTKLKTPKQ

SEQ ID NO: 209254 - protein, 105 aa, Zea mays
  Clone ID: MRT4577_122434C.1.pep
VSCVLIDYHTFSHIDIGPILYVSYRSILDSYVSVASRGRAASYAYMIIYGCVHVQPARVKRIVHISSYVDGTSPMSAYAPVLSSCRGCLKFDLRGGRRLEPNSEL

SEQ ID NO: 209255 - protein, 92 aa, Zea mays
  unsure (1)..(92): unsure at all Xaa locations
  Clone ID: MRT4577_122435C.1.pep
GGVFFFFFTPTHKRRAILDSKRIEATKQGGLSSRFSKPKPGGRWGDHPPPXXRCLLMLTPLGARRGFPPPSWRGGRAPGRAWPFPWPPAAPL

SEQ ID NO: 209256 - protein, 43 aa, Zea mays
  Clone ID: MRT4577_122436C.1.pep
YINIQNSHYQKKSKTLKNPYSYSPTINYTPSILKNFKQYLFII

SEQ ID NO: 209257 - protein, 67 aa, Zea mays
  Clone ID: MRT4577_122437C.1.pep
FPKTVNGSKILLRSKVLKGPSSKKNGCTNFFLIPTGDKQTTFMQFPTLCKLSSGKKAKNIPPCPLDC

SEQ ID NO: 209258 - protein, 91 aa, Zea mays
  Clone ID: MRT4577_122438C.1.pep
AHACMISEDVPSDPPSGFLTPPRDKTKSWRRSPPQTGVQGELLCRTLGTAVPPAAADVYYSFAIILIMRKQNHTFCQQIPADVKLQTRLAN

SEQ ID NO: 209259 - protein, 88 aa, Zea mays
  Clone ID: MRT4577_122439C.1.pep
EQASSIEGRKRLRYLIITSETDESPQAEAGEIEYTTTTTGCGNQPHATRRGKEGHNTYYRTTTGNNHIWIQESTHRHAVDACSSRRHT

SEQ ID NO: 209260 - protein, 103 aa, Zea mays
  unsure (1)..(103): unsure at all Xaa locations
  Clone ID: MRT4577_12243C.1.pep
HAFNLRGGGDVTVEELQELFGGIGQVGRIKQKRGYKDQWPWNIKIYADDXXKAKGGGGLAYEDPSAAHSAGGFYNNYDMRGYKISVVMAEKSAPRAAPSYGHG

SEQ ID NO: 209261 - protein, 66 aa, Zea mays
  Clone ID: MRT4577_122440C.1.pep
NKVFFNGFWPRSLFLVTTKQPGAVKPKNFLMALELNPWSNFFFKKRKGLFWFLKRVFNFPRPPFFR

SEQ ID NO: 209262 - protein, 111 aa, Zea mays
  Clone ID: MRT4577_122441C.1.pep
FVTGACLNLIEHCQTIKHITQAVLLDCRCRIHIQVTGLQNTAGGRGHSRSYRRTKMRLNEISKICSHLKCHIVLETSGSSTGKTLCNRLGYEAGCAQLFLQPFNLFHRFSI

SEQ ID NO: 209263 - protein, 33 aa, Zea mays
  Clone ID: MRT4577_122442C.1.pep
PARVRPTWGRMARVAAGVFGCFDVLRLGVGLTP

SEQ ID NO: 209264 - protein, 42 aa, Zea mays
  Clone ID: MRT4577_122443C.1.pep
KKLGGGGKYIYTQLIYLETWALYYCKEAKEKFDYFLSKGGRV

SEQ ID NO: 209265 - protein, 87 aa, Zea mays
  Clone ID: MRT4577_122444C.1.pep
PPGGRGFPGPGPPLPGFGVPGGGKKGKDLSPFPPGLGPILFSLFPCLDPPLLGLCGYPFLGLNGGVFFLIRCCWGQTALPFFFWVVP

SEQ ID NO: 209266 - protein, 42 aa, Zea mays
  Clone ID: MRT4577_122445C.1.pep
TIYQQIRLLFSSFPRPAAAYGFLDHQLRICLFPSVSGWMRET

SEQ ID NO: 209267 - protein, 68 aa, Zea mays
  unsure (1)..(68): unsure at all Xaa locations
  Clone ID: MRT4577_122446C.1.pep
MIAGSILDTLIAALSYMPPKVPPXQNITTNNNGKYLTTKPTMNRQTNHTVALDNHPHLGIKNGNLPPY

SEQ ID NO: 209268 - protein, 82 aa, Zea mays
  unsure (1)..(82): unsure at all Xaa locations
  Clone ID: MRT4577_122447C.1.pep
FHVFVDEFSCIGTDEFVLNRNFIWIQFGELLIVXTHIPLHPSAGCKNCANVCSKVFQIEDDFGRARVYDQSGSTELIQELLT

SEQ ID NO: 209269 - protein, 68 aa, Zea mays
  unsure (1)..(68): unsure at all Xaa locations
  Clone ID: MRT4577_122448C.1.pep
WSRLYIRNLHPQVTARELENELRTIADLRXCLPARKPPDFAYIDFDDKMDAQDAILDLHGKNGWKDEV

SEQ ID NO: 209270 - protein, 40 aa, Zea mays
  Clone ID: MRT4577_122449C.1.pep
HPKRESYQTYLPSRISMHHCSSRTDCTEGGTETVKTDYML

SEQ ID NO: 209271 - protein, 228 aa, Zea mays
  unsure (1)..(228): unsure at all Xaa locations
  Clone ID: MRT4577_12244C.1.pep
RPGLELHPHQTPPTPRSAVPHCCPVISHKFTRLASARPAARLPSRRPGAIIAVHHDYSGARIPDSYRWLEEPDSEETXKEFVXEQAQLPETELDECTHRENLRREATXRLFDHPXRHXAPFRRGNKYFYFHNSGLXCQSGIYMLNDVYWKAQVLLDPNTLRKDATXVLLSTYSIREDDYIAYDLSESASXRVSIHEMSITNKQAMADKLSSSKISSISXTHDVKGCFY

SEQ ID NO: 209272 - protein, 94 aa, Zea mays
  Clone ID: MRT4577_122450C.1.pep
RRNVRQAYHNVCRDCSKDLGICAKCCTCVNELVGRDANEEESERKSLEEAVRGARERERRTLLAFCWLNNGLVFSVSAFPVDLIPAALTDAGDF

SEQ ID NO: 209273 - protein, 85 aa, Zea mays
  Clone ID: MRT4577_122451C.1.pep
RYFLKLTDRREFIGGAGTNTQIKKRSFLMAPAQITRCLNADRGEAKSGVLYLSTLGRTHELLKQGRRKIWYGLCNGVWPGKTLNG

SEQ ID NO: 209274 - protein, 33 aa, Zea mays
  Clone ID: MRT4577_122452C.1.pep
SRSGICMRFSFSFSGFFLELCVIMFISEICCNI

SEQ ID NO: 209275 - protein, 96 aa, Zea mays
  unsure (1)..(96): unsure at all Xaa locations
  Clone ID: MRT4577_122453C.1.pep
KIRKKNKKNKKKIKKKKKKKKKKKKKKNKKNKXKKNKKKKIKIKKKKXKKKKNKNNIKKKKKKKKKKKKKKKKKKKKKKKKKYNKXKKKKKNKKRK

SEQ ID NO: 209276 - protein, 121 aa, Zea mays
  Clone ID: MRT4577_122454C.1.pep
MKTLLVLAAVVGFIAFSDACIGLGGGGGGCGCGAPPPPACGPPPCAPPPAPACAPPAPACAPPPPAAPVGGCGGASGFGGGQQISGGGPIIVCGGTVEQVPASSLGSGAGGCGAPSGGCGG

SEQ ID NO: 209277 - protein, 75 aa, Zea mays
  Clone ID: MRT4577_122455C.1.pep
QKTNSISIFSKIWNWGGRPIIFFHQTKPFPSFLINSFSSDTIFNHIFSNKNIIYPSFFKGGYQKSKTYIFFNAPP

SEQ ID NO: 209278 - protein, 51 aa, Zea mays
  unsure (1)..(51): unsure at all Xaa locations
  Clone ID: MRT4577_122456C.1.pep
ILNHLLIPSACYSQLGHVNMSXPRQLLKEQITXGAGLXLGPARNECGXGNR

SEQ ID NO: 209279 - protein, 129 aa, Zea mays
  Clone ID: MRT4577_122457C.1.pep
MDRRLRSPARRPERQQLAGSGSPHRFLRPGALARLRDSRVLARSLRCAARAWAPPSSSLPPRSPAPPAAWDGVPCFLGPASAARGMRYPLRKKLAAARAVVLLSPPLEVVEAFMDAFAPAASPDVVAAH

SEQ ID NO: 209280 - protein, 101 aa, Zea mays
  Clone ID: MRT4577_122458C.1.pep
RRCTPRPPATADGQDEQDQAPHADGPPKRARGGRHDRKPSRRSSQKKEHRPPRAGMRRVNNGAGGNEGGPPRGRKWRQGDDGSGFVVGLHHEPPAGKQDPA

SEQ ID NO: 209281 - protein, 130 aa, Zea mays
  unsure (1)..(130): unsure at all Xaa locations
  Clone ID: MRT4577_122459C.1.pep
TIRALHAINVRATTALIIPNSNLDHTASNPQPTPQNTXQGTERQHGTAHSRIHRTLDDYHSHKPMARAXDPFLTQPPMQAVTXQHXHQRLPPLRQLHMVNPNQHAQEHLLASNPLAMANVVANQEQQQLQ

SEQ ID NO: 209282 - protein, 70 aa, Zea mays
  Clone ID: MRT4577_12245C.1.pep
ILQKLRYQKSFDITQEERSKLRPSGFIMVKGVDTWLQHNEKEVERSTLSSSRLRYDKTIRRRKEKVLLKL

SEQ ID NO: 209283 - protein, 304 aa, Zea mays
  unsure (1)..(304): unsure at all Xaa locations
  Clone ID: MRT4577_122460C.1.pep
LGTSRPAVGRANSPYNGVDFPGSIPTGRFSNGYNIADYVAKSMGFACSPPPYLSLAQAPAPAQSSGPGLAQTALTIGINYASGGAGILDSTNAGNTIPLSEEVKYFGATKAKMVAAAGPSAVNPLISRSIFLIGMGNNDLYVFGASERARNRSDAEQRRDAAAALYASLVSNYSAAVTELYSLGARKFAVINVWPLGCVPGERVLSPTGACSGVLNDVAGGFNDALRSLLVGLAERLPGLVYALADSFGFTLDVLADPRASGYTDVASTCCGGGRRLGAEAWCTRSSTLCVDRDXHVFWDRVIR

SEQ ID NO: 209284 - protein, 104 aa, Zea mays
  unsure (1)..(104): unsure at all Xaa locations
  Clone ID: MRT4577_122461C.1.pep
GKKVWRLFGPRGQMEDPFRSGWHLVFVSRGGNVLLVGDVPRQGFLYSVSCIKILSPXEVQRMGKPGLPLLRAAPSKRVGNGSARSASIQKPRGLWAGGAPVGSV

SEQ ID NO: 209285 - protein, 81 aa, Zea mays
  Clone ID: MRT4577_122462C.1.pep
LVRQAINPLQSTAACTLHCTAAKPSHPVVSHAAGLVRRAIATRFRITPHLETRQQAHFVYVVAGKNYIGYRFVHLSVSLYP

SEQ ID NO: 209286 - protein, 208 aa, Zea mays
  Clone ID: MRT4577_122463C.1.pep
MSSPPPPPMSTLHKCCSSPSQPSPKLPPKLQRAPDSRHRPICGGARLSVTRRAHAASLLLLGLAGGAVPAPVRAAEDDGSSGGEGVLGAIKSIFDPNETTKAGKVLPKAYLKAAREVVRTLRESLEEDDGGDMARFRRNADAAKESIRAFLGGWRGQQAVTDEESYVALEKAIRSLAEFYSKAGPSASLPQDVKNKILDDLSAADAYL

SEQ ID NO: 209287 - protein, 205 aa, Zea mays
  unsure (1)..(205): unsure at all Xaa locations
  Clone ID: MRT4577_122464C.1.pep
PSSPRILAAGFVPKFSARVLALPHRTFGVSTTITAVASPCPRNHRGGQIHYLAFLPGDVLFIAHHLATLFVFLTCCHLVRHSAYALLVLAEVTSLLQNXWTLAGNSARGRDQSPAAARIYGALSPPFYALYTLVRGVAGPLFLLKMATFYLSGQAVDVIPWWVRISXILVVGTAIAVSNLWIWNLWTELVREWKQQAPPKSKKDT

SEQ ID NO: 209288 - protein, 144 aa, Zea mays
  Clone ID: MRT4577_122465C.1.pep
PNPPFLPFPQIYGPHHFPFYAGDGPHSPPWFFWAQCSPPNMVFKNPVVPTALKWFRLCLFSKRPSIFFFPPAPNPPAIRLCFSPLFRMGIFFATFSMNPFPPQTLFDPPIFKNAPFLGKSMGVPPFPPPFFFPIISQRGQGPIF

SEQ ID NO: 209289 - protein, 90 aa, Zea mays
  Clone ID: MRT4577_122466C.1.pep
DQLTPRPRRVGRSARFASLPRSAPGGDWRPPAGRGVWSAPSPGVVGASPAAVSGRHIALGCVRKSLGRGRPTSSGRERCDEWLEPNSELR

SEQ ID NO: 209290 - protein, 256 aa, Zea mays
  Clone ID: MRT4577_122467C.1.pep
MDLLASLAAEERWLFPLFLAMYAAIYCVGQLLVFRRWAPRQRLDGASCLISLFHGTPAALAAAGAILALPAGSRSFAAPNARLQDHVLDYSVAYFTMDLLHYLAFLPGDVLFIAHHLATLFVFLTCRPLVRHGAYALLVLLLLAEVTSLLQNVWTLAGIWRDQSPAAARVYGALSPPFYALYTLVRGVAGPLFLLKMAAFYLSGQAVDVIPWWVRISWILVVGTAIAVSNLWIWNLWKELVREWKQQAPPKSKKDT

SEQ ID NO: 209291 - protein, 94 aa, Zea mays
  Clone ID: MRT4577_122468C.1.pep
APSPQQRQWTSPPDHSLSLKRSLRTLRDPTMPGSGSPFLRHRQPRINICRERAMASTSAPPPLFIFYWYHRRRPRSLQSPHTYPQKRRSCTAAQ

SEQ ID NO: 209292 - protein, 109 aa, Zea mays
  Clone ID: MRT4577_122469C.1.pep
QDAACLFAWMFFFWLGHMSLASVRVKKVRFRRCELAVFVSRLDRDSVCLQGSNHLRMTCGRVTHFIEHLGVTEGGVRVGVTIGSKFHSIRFKNQIPRAGLRASARVLVA

SEQ ID NO: 209293 - protein, 86 aa, Zea mays
  unsure (1)..(86): unsure at all Xaa locations
  Clone ID: MRT4577_12246C.1.pep
IAARGSHAISAAAGQAWRRRRRRSWRSLVSASTRGIQCWCDRSAFAAPTLPSPPRDLGCGGFSLLFXXTPSPLLSRLGLGLLGCAA

SEQ ID NO: 209294 - protein, 345 aa, Zea mays
  Clone ID: MRT4577_122470C.1.pep
MGDLGGGDWREAVAEKGLAEADGGPDHLVIMVHGIVGSTADWKFGAEQFGKLLSDKVIVHCSNRNMHKLTLDGVDVMGERLAQEVIEEINRRPYIKKISFVAHSVGGLVARYAIGRLYKPPKRTSENTPQTLDDNNIGTIHGLEAVNFITVASPHLGSRGNKQVPFLFGVTAIENFACYIIHLIFGRTGKHLFLTDNDDGKPPLLQRMVDNWGDLQFMSALQAFRRRVAYSNVGHDHIVGWRTSSIRKDSELPKWVDSTNKIYPHIVYEELSKAEAPDQCADTDNCTLEEHLLQGLKRVSWEKVDVSFHNSKVRSAAHSVIQVKDPVMHSEGADVIQHMIDQFIL

SEQ ID NO: 209295 - protein, 74 aa, Zea mays
  Clone ID: MRT4577_122471C.1.pep
SLSIREFSFRDRTETNRSEHLISLIMGPETFKTPSVSKHLDSVCYKPYNHPAWVVVLIHSRHIHKDDRHTETKL

SEQ ID NO: 209296 - protein, 181 aa, Zea mays
  unsure (1)..(181): unsure at all Xaa locations
  Clone ID: MRT4577_122472C.1.pep
MRDVTRGTHSAAEALAARRPRRAMASPLICGCALLLYLLGHLATCHAARDTITPSSPLTANETLVSGGDGNFALGFFTPPGANSTYLGVWYNKVSLRTVVWVGNREAPIAGAVGDNPGATLSVSGGGTLAIAAGNGTVVWSVRSASSRRLASPAAQILDXGNLVLKEXGGGGAVAWEGFDY

SEQ ID NO: 209297 - protein, 182 aa, Zea mays
  Clone ID: MRT4577_122473C.1.pep
PPGGFWRGQTLFGKPSGIFFTPGPPGGGPKAPPLAGFSPLPPPPLGFGPVGSPLGPHFFGMAPVQGGGPLGAGPFPPPGLRGPTQGELGPPPPPGEFFRGLPQKPKGFFFFAPPPLSDFLNPFQFFSPPPKMGLGFPGGPGSFGVPPPPPRLNFQDCFGALVCNLGLALRCFPPLNFHGWAG

SEQ ID NO: 209298 - protein, 79 aa, Zea mays
  Clone ID: MRT4577_122474C.1.pep
RKKFRPFCKCYAHTKKFFSVLGLGTSLFVVRYVHVKLASIYALFSLKHRLRFLCLLWERNASSDQKGTLKKNELLQLIF

SEQ ID NO: 209299 - protein, 43 aa, Zea mays
  Clone ID: MRT4577_122475C.1.pep
GKLHFIHYGEWAILGPINQKTQLIRLALQIIKEFSGPFQLKNH

SEQ ID NO: 209300 - protein, 73 aa, Zea mays
  Clone ID: MRT4577_122476C.1.pep
LLIIFTKSDAEIQGQFRRAFGVKGTNISTQKRNAPEMESPHPCESCEGNRDAMTCQVTTTVPTSTEKERGGFH

SEQ ID NO: 209301 - protein, 48 aa, Zea mays
  Clone ID: MRT4577_122477C.1.pep
PIIPLIRLFMCNYFTNLFLSSIPSSFFKHLIHLFHSINIIFPLSYYYP

SEQ ID NO: 209302 - protein, 41 aa, Zea mays
  Clone ID: MRT4577_122478C.1.pep
LMQLHLNYLTGLDFYCHMILCWLLVPFMLLLQLKLINFIVC

SEQ ID NO: 209303 - protein, 74 aa, Zea mays
  Clone ID: MRT4577_122479C.1.pep
CLTLKVVLLLNGHPVRASSPCACERVVGRKTHNRPCHFGWLVWFSVLSVLIWSHGLLLPSRHTFNLDHAGMCPM

SEQ ID NO: 209304 - protein, 104 aa, Zea mays
  Clone ID: MRT4577_122480C.1.pep
TASTESVSVADVIRARMAHFVQFEHTLSIGVLSNLVHMYTNSGVNCITSYNPYHVSAKYRVDLSASSASCECNSHRIGAEMPCTRLLCSFHYVFPISHTRHLRY

SEQ ID NO: 209305 - protein, 48 aa, Zea mays
  Clone ID: MRT4577_122481C.1.pep
YVTELYYIFFSSSNEIWYPTQASVPQYLTLSNGRPDVKQDKVLCVVPL

SEQ ID NO: 209306 - protein, 115 aa, Zea mays
  Clone ID: MRT4577_122482C.1.pep
MQMQLSVPPQVVVCLALAFLLPCHATATAPAGTIRRVTKQQILASIPPHWDENPVLFLTSPSGKYAAYFMRSQTEPGAGGLGADFCYVEVLDTTAPGAEGRSVWESECMAVSTVN

SEQ ID NO: 209307 - protein, 112 aa, Zea mays
  unsure (1)..(112): unsure at all Xaa locations
  Clone ID: MRT4577_122483C.1.pep
YQQATYIALSSPINTATVETKIFSLLMLRCMRTFHAYTTMLHLXSHAPIASIFPRYLASTIASGCENPXLQPYKLQQAIAPSNIPLLPLVGHQSPALSLVHSLGHTTRAHQL

SEQ ID NO: 209308 - protein, 65 aa, Zea mays
  Clone ID: MRT4577_122484C.1.pep
NAPVIVASIRVGVELLFSPFVQASYRHGPGVAAEGGITTRVLVLVVSAASGSTRWLLLDRRWARI

SEQ ID NO: 209309 - protein, 46 aa, Zea mays
  Clone ID: MRT4577_122485C.1.pep
TYFFFFFLLITQIEVYLYISQNFHQRLTPPIQIQIAMLSKMYTWNT

SEQ ID NO: 209310 - protein, 98 aa, Zea mays
  unsure (1)..(98): unsure at all Xaa locations
  Clone ID: MRT4577_122486C.1.pep
GYGDGKPTDNASRFYKWFAEGEEKEXLKDLKYCVFGLGNTQYEHFNKVAKMVHELLQEQGGKRLVPVGLXGDDDECIEDFTAWYEGYNNAIWLHSFPW

SEQ ID NO: 209311 - protein, 158 aa, Zea mays
  Clone ID: MRT4577_122487C.1.pep
LGAGSGRPTAFVNLPCRFHATPVCFFPSSRLVSLRLVFGWAHNSLQLARFFLPPPSYFFPSTGWEALSCLVNSAPNHFFHSARWFGVSLLPFLTPLGWVRLARWVGPWPAPLYATSHCCPPPHLGWPNQWFARPPPLVGGGLFFVLLLGWVFTFVFFR

SEQ ID NO: 209312 - protein, 87 aa, Zea mays
  Clone ID: MRT4577_122488C.1.pep
KIKMQKKLTTAYSKSKFATKTNSKHTPSSTRILAHSKTNSTTRSLSSNRKTRVETHHSVYIVHPFSLPLIFFLFFFFHFFFFLFFFF

SEQ ID NO: 209313 - protein, 101 aa, Zea mays
  Clone ID: MRT4577_122489C.1.pep
PSRCQDNVSPAYHGIILSINTAAVVFIYHQKNSVMSEIVHTAYSTAVYPLGTEAYDSTVLGTREAEASTAAVPAADGGTDVWAHPGFARVILSIYSMALPF

SEQ ID NO: 209314 - protein, 94 aa, Zea mays
  Clone ID: MRT4577_12248C.1.pep
RPVREPRSTTLHHTTHTRRRSHTRRRSSSLDRDRDAGSYKLAKTGIIMAASTVEELSATASHARDSLKETNANDPLEKYCKDNPDSEECRIYDN

SEQ ID NO: 209315 - protein, 79 aa, Zea mays
  Clone ID: MRT4577_122490C.1.pep
KNGAQNSLPFLLYKVMIKSMMRLKIENFQKKVIKGLEKDKVKGGRPCVFFTKGASQECKPRSVSPIVDQVNNCETKLAI

SEQ ID NO: 209316 - protein, 131 aa, Zea mays
  unsure (1)..(131): unsure at all Xaa locations
  Clone ID: MRT4577_122491C.1.pep
TTNTGAQNHYIISVEMIDVLLMRLPSDWDGQMMMLTDNKEITKLQKNEMPTDIVHHLKTWSHXYTRYMNFQDNRXVIVNPKXRSKGYDITGPIGHERVHLXPTIAMVAKAIELRACCNMPTLLYDHPIITS

SEQ ID NO: 209317 - protein, 63 aa, Zea mays
  Clone ID: MRT4577_122492C.1.pep
GNMEHMSFIRYDLLAIIGESAYSASALVLMYDHFASLSTRCSRRRLDFLRKAGIIMMMIATDL

SEQ ID NO: 209318 - protein, 114 aa, Zea mays
  Clone ID: MRT4577_122493C.1.pep
SWPTHASEQCMIQVTRKETDGAAHHTTKSCTRSLLQPELQVELLVGAAGPVVAPCSSGANNGHPVVLVLLWRTQRVSYESLGSCAYIKDALAKVMLTIYRSTAHCSCCGPPKTD

SEQ ID NO: 209319 - protein, 50 aa, Zea mays
  Clone ID: MRT4577_122494C.1.pep
TMEDKAYTLPTYIRLTLLIQMILLNQVAFNSYKIKKWHLSFVIKTFRTIS

SEQ ID NO: 209320 - protein, 189 aa, Zea mays
  unsure (1)..(189): unsure at all Xaa locations
  Clone ID: MRT4577_122495C.1.pep
MDAAPTGHHWTVVIAKKTNPDCIKGHNRRRSLTSPPIRRRRGIRPSPSPGNNRRRTAVAADMSILQHNXPPVMAMEGKNCFTIARDRGFDEQLHNIETDFQRVLKIRDQLYIGXSGLAMDAQTVHQREVFMHQLHQLREERXDMKCESFASLGSALLYDKRSXTYVCQPVIAGLVDXNGPFSWSMHCLA

SEQ ID NO: 209321 - protein, 68 aa, Zea mays
  Clone ID: MRT4577_122496C.1.pep
MNVEIPCQEGLLVHRHPRVVSHVCLVRCNQIPNLSLYDNLDVGHMCMSLLAPLYIHLLRQGVLMIENL

SEQ ID NO: 209322 - protein, 48 aa, Zea mays
  unsure (1)..(48): unsure at all Xaa locations
  Clone ID: MRT4577_122497C.1.pep
APPPPPPHTVALMVSRTAGPVDDMLALACELYILNGEIYYRLLITARX

SEQ ID NO: 209323 - protein, 64 aa, Zea mays
  Clone ID: MRT4577_122498C.1.pep
PRVRRRVRLHARGDTLWARGGVDLIDFARHQGRAQSEARLLQAGMVRIVSRRGHEPCTDRLDIN

SEQ ID NO: 209324 - protein, 508 aa, Zea mays
  Clone ID: MRT4577_122499C.1.pep
LRPCPPISSWPPIKLSTQRHFGAPPSHSSSLDLEPAGNPYPNPPPRPPPLWLTHQPRAASPSLSSSSAPSAPPSPPRGSPRRTTTSLRAARRRPPSSPTAAASCRTLAAHPPASGHPPRPSASARVFSCRASYDLDVRRRGHHILRLHFYPFVPALAASRFHVGAGGLLLLHNFTASSPVVKEFILPVDSDVLVLTFVPDSGSTAFVNAIELVSAPEELVGDIGTLVTSGGAAQIHGLSSQVFETLYRINVAGRKVTPFNDTLWRTWVNDEKFLIDTDSSNYMVWSSSGRIAYPKGSKQMTREVAPDNVYNSARSVRPGVNVTWGFPVPASSRYLVRMHFCDIASKALYELYFNIYVNGDLAVKDFDLSSATGFLAYPYYIDFIVDVKDEGILKLAIGGLKKSRSDEVSGILNALEIMRMNKTSGGMDGDFPIDLHMEYVVSKGIGEFARSLLCGFIFVGLFVALVTLMVRLRTELRNNGTAWSWRQMNSDEGKLARTYQLVPSKTDY

SEQ ID NO: 209325 - protein, 65 aa, Zea mays
  Clone ID: MRT4577_12249C.1.pep
ASQDRNNNGGVDGGEPLCPGDDDDLRGGRAASHARDSLKETNANDPLEKYCKDNPDSEECRIYDN

SEQ ID NO: 209326 - protein, 62 aa, Zea mays
  Clone ID: MRT4577_1224C.1.pep
WFGAGKSSCPKTGQVLTNLELVPNKALKNLISRWCRENGVAMEGSEPGKPEPAPPVAANKAA

SEQ ID NO: 209327 - protein, 114 aa, Zea mays
  Clone ID: MRT4577_122500C.1.pep
GGGEKKGCSSLSCRWHRQVPDVASGCHCRPRRYRASFSGFWVLCMEAVLKWGFRVSVAECGAVLAVMVLQRALLGGHVGLLLLGHSPFTEVQGRMGLLLRRPRGCQAGSVRCSR

SEQ ID NO: 209328 - protein, 179 aa, Zea mays
  Clone ID: MRT4577_122501C.1.pep
DTPLRTVSVTRWPTRSSTCRMFSVLARVVRRSQLVPQRLLCSVEKRRQGAASCVSSAGQAACYDGRDPLALPARNIAVARLGPPAPPARGISAALVGELAHAAHLGDMPAPLTGDHHPRSSETQTSAARRRWIWPLEDDDVRGLRSTLRSTTTHAWSALVTIWEEKGKGESVDGFADAW

SEQ ID NO: 209329 - protein, 235 aa, Zea mays
  Clone ID: MRT4577_122502C.1.pep
PRAASPSLSSSSAPAVLPDGRRFVPDSGCASTRLRSSSPSLSSAAPPGSPPPPSPLLASARVFSCRASYDLDVRRRGHHILRLHFYPFAPALAASRFHVGAGGLLLLHNFTASSPVVKEFILPVDSDVLVLTFVPDSGSTAFVNAIELVSAPEELVGDIGILVTSGGAAQIHGLSSQVFETLYRINVAGRKVTPFNDTLWRTWVNDEKFLIDTDSSTTWCGRPVAGLLIPGVASR

SEQ ID NO: 209330 - protein, 266 aa, Zea mays
  Clone ID: MRT4577_122503C.1.pep
MAPPPTSRRLALALILIGALCTAVAAARFAPADNHLLACGAAAPAVLPDGRRFVPDSGCASTRLRSSSPSLSSAAPPGSPPPPSSLLASARVFSCRASYDLDVRRRGHHILRLHFYPFVPALAASRFHVGAGGLLLLHNFTASSPVVKEFILPVDSDVLVLTFVPDSGSTAFVNAIELVSAPEELVGDIGTLVTSGGAAQIHGLSSQVFETLYRINVAGRKVTPFNDTLWRTWVNDEKFLIDTDSSNYMVWSSSGRIAYPKGSKQM

SEQ ID NO: 209331 - protein, 67 aa, Zea mays
  Clone ID: MRT4577_122504C.1.pep
VFLWTQGMLEKFVYYSTYSTPHEPMRHTHITDKYSGTSNALSCYKNLLSVSLSISIWIKLCVPKKGD

SEQ ID NO: 209332 - protein, 185 aa, Zea mays
  unsure (1)..(185): unsure at all Xaa locations
  Clone ID: MRT4577_122505C.1.pep
RPGPQYEEFVCCDSLVCPTRNLCLYSLEAFTVCNMHQLMVPXTDKTKYIGIGCAIEYAVWALKVEDLVRIGHXCWGGIREVLCLRGRAPDNFDFGENWVKMGFPAKIIVKKDHVSETLDDQCSILEKEAVNLSLENLKTYPFVKEGLCNGTLKLVGGHYNFVSGEFLPWDNKEPSLIYIYTLHDA

SEQ ID NO: 209333 - protein, 68 aa, Zea mays
  Clone ID: MRT4577_122506C.1.pep
KKYVFGLGSWQVLATTAAVGVIAHRFAVLPGPAAIVVGSGLALSSTAVVLQVLPVSAHWFIKLLFLCY

SEQ ID NO: 209334 - protein, 80 aa, Zea mays
  Clone ID: MRT4577_122507C.1.pep
TTIFPFTLKLCILYIFIKALISLDRKDESVFSDPTYNVSVLFGKRDEPLLLACARQLIEHISGSARSLVISLGLKDHSQF

SEQ ID NO: 209335 - protein, 133 aa, Zea mays
  Clone ID: MRT4577_122508C.1.pep
AKSVRRRLQWCHSKLDLLLSRPNNCNKLRQGLSIYTSCSTVRCSFLLNLQVIVTQIGCMGTILAAKKDESVFSDPTYNVSVLFGKRDEPLLLACARQLIEHISGSARSLVISLGLKDHSQGTLKDITVAVMIE

SEQ ID NO: 209336 - protein, 56 aa, Zea mays
  Clone ID: MRT4577_122509C.1.pep
YWYLKLYKMALTYVHHYILHVVSYPTDQHTMHADPSLDNRQFFLASLYFIRDQSHK

SEQ ID NO: 209337 - protein, 114 aa, Zea mays
  Clone ID: MRT4577_12250C.1.pep
ATCDALKARGKETAPQRPKPSTLLLPFHSGRVQWMADISCGRRQPPVFSPSDPVLYILKVVNGVFPGGGLSTCTVLCYRRNREGQATLGAVEGVASALRSPRGLREASAIPIQG

SEQ ID NO: 209338 - protein, 75 aa, Zea mays
  unsure (1)..(75): unsure at all Xaa locations
  Clone ID: MRT4577_122510C.1.pep
LSRCTVMSGVGIYKQACIXYSIIRWLSTVGQWSRIQNMTIVGEKVQVCNRCXSNSGVVVPHKEIKSSILXPEIVM

SEQ ID NO: 209339 - protein, 400 aa, Zea mays
  Clone ID: MRT4577_122511C.1.pep
MSKKVGKLPPPAAAHEEAREELFASCSFADLGLHSTLCAHLQDKMSFQAPTRIQAQAIPVAISGQHMLVKAATGTGKTLAYLAPIVHVLQMREPRVDRTHGTFALVLVPTRELCLQVYGIAQQLVHRFHWIVPGYVMGGENRAKEKARLRKGISILIATPGRLLDHLQRTASFSYSNLQWIVFDEADSILELGFGKAVEDILEHLGSRNGATGQIKNKGGHIRRQNLLLSATLNEKVNRLAKISLKNPVMIGLDDQSKPSGKSNNVGNNHTSLLSDEDDEILEKQNDLMEHAVDDFKLPTQLVQRYVKVSCGSRLAVLLMILKSLFERQVSQKVVVFFSTCDSVDFHHTALSQLEWSSGPQRDMDKKQKFLSCKVFRLHGNMEQDDRKKSFLGFGSEKSA

SEQ ID NO: 209340 - protein, 122 aa, Zea mays
  unsure (1)..(122): unsure at all Xaa locations
  Clone ID: MRT4577_122512C.1.pep
KNRWQKPQRRGKRKTMELGGNAPSIVIDEANIDVAAKGRHAAKTRNSGQTWVSANRXIXQEGNYEKFASAYIKAEQRQKAGNGLEESTSQGPVRNEAAGQKEQNWATNMHQRLSRPTRLPQP

SEQ ID NO: 209341 - protein, 106 aa, Zea mays
  Clone ID: MRT4577_122513C.1.pep
RVYSRIVFNADPRRRDHVLATVRWEDGGYCHQLTTDTGTDARILEQIHFDIGEGLCSLEDPRNTSHMQRTLARLKCRKGGFTEFSLQPPNICRARGREPSSLTTTR

SEQ ID NO: 209342 - protein, 67 aa, Zea mays
  Clone ID: MRT4577_122514C.1.pep
RYRSGINSRVDELTSRRPPFFFFFKNHGCNLILFLSRAIYIDTGKITFCSFPPLLLITCPDILKSGM

SEQ ID NO: 209343 - protein, 96 aa, Zea mays
  Clone ID: MRT4577_122515C.1.pep
WHHLTDQPEHHPERLILRLEPNRHPDVHLAGDDLLTHSSTTSLGRSTQRGGPTPTRPAPPVSTDLDKDAQTTVKQIFGTLTKNIVQRTRVKQATHR

SEQ ID NO: 209344 - protein, 83 aa, Zea mays
  Clone ID: MRT4577_122516C.1.pep
GRPPPPYLLSRRLRGNLPTSHELVHAPKSICLSMHALHRVFTLCLPYAQTAAHNGLHAFLTRLHIINRSIHPCIYTLYSSITQ

SEQ ID NO: 209345 - protein, 529 aa, Zea mays
  Clone ID: MRT4577_122517C.1.pep
MVLGALASAVASMSLLIVYGVLGALLLWKAARLLDRLWWEPRRLERALRAQGLRGTSYRFLTGDLREYRRSKEEAWARPLPLRCHDIAGHVEPFIHGAVLEHGKTCFTWFGPVPRVTVVDPDLARDVMANKFGHFEKPKFPALTKLFSDGVANHEGEKWVKHRRILNPAFHLEKLKLMLPAFSACCEELVSRWAQSLGPDGSCELDVDPELQTLTGDVISRTAFGSSYLEGRKIFQLQAEQAERLMSIIDKFAVPGYMSLPTKNNRRMRQIKSEIDSILRGLIGKRMQAMKQGESDKDDLLGLLLESNARETGDQSGQPGQGLTMEEVMEECKLFYFAGMETTSVLLTWTMVLLSMHPEWQDRAREEVLGLFGKKNQPGYDGLSRLKTVTMILYEVLRLYPPAIAFSRKTYKEMVVGDVTYPAGVTLELPVLFIHHDPDIWGSDAHEFRPERFAEGVARASKDRLAFFPFGWGPRICIGQNFALLEAKMALSMILQRFQFELAPTYTHAPRRVIMLRPMHGAQIKLRAI

SEQ ID NO: 209346 - protein, 51 aa, Zea mays
  Clone ID: MRT4577_122518C.1.pep
MVHGAYHTMQPINLTILTKRPITTSQDEEKLNHKCKNTKLILIQNTLIISR

SEQ ID NO: 209347 - protein, 60 aa, Zea mays
  Clone ID: MRT4577_122519C.1.pep
CQHWKTYYLLFQVERIRAFHRASSEDSAKLSTWAHNLTPLRAFRYAGEELRRLFYFFTPF

SEQ ID NO: 209348 - protein, 144 aa, Zea mays
  Clone ID: MRT4577_12251C.1.pep
MAASTVASLSVPVTTTTFAAAAAAGGGDVLIVVPRRAGAGRVWFPAAARRGGGSGRLVAVRSSGPATPPEISDKVSESIKQAEETCADDQKGDAECAAAWDEVEELSATASHARDSLKETNANDPLEKYCKENPDSEECRIYDN

SEQ ID NO: 209349 - protein, 135 aa, Zea mays
  unsure (1)..(135): unsure at all Xaa locations
  Clone ID: MRT4577_122520C.1.pep
DSVAYWCGSPNYGVFTWDDKLPGTHVLVSRLRLXLSSGYRYEEILRTFHILTDNAMCSYXLPIFNSFNFTKGGLIHLDHGRPHSLQYAVXANFLASLYSDYXMERXDTPGRYWGPIFYTTXVLPMFAWSQLVYIL

SEQ ID NO: 209350 - protein, 195 aa, Zea mays
  Clone ID: MRT4577_122521C.1.pep
MVVSYTEEHVYRHPWHRVTAAAMRKFTDPAARAASGALSHILDVHTLSRDVDARSGRLRAVRAIAGRTPPLPFPIRAAVAGAGGDVVVLCVERTDVDAPARDMRVASRNATLRGLVDVRERCSYEPHPARPDEWTLFRQETTIRCCAPLAAVAAKVAELVERRCAERFAQNAGRGKEVVERICEDLAAEQDSLAS

SEQ ID NO: 209351 - protein, 177 aa, Zea mays
  Clone ID: MRT4577_122522C.1.pep
MFFHIVLERNMQLHPRHFGPHLRDKLVSKLIKDVEGTCSGRHGFVVAITGVEDIGKGLIREGTGYVTFPVKYQCVVFRPFKGEILEAVVTMVNKMGFFAEAGPVQIFVSNHLIPDDMEFQSGDVPNYTTSDGSVKIQKESEVRLKIIGTRVDATEIFCIGTIKDDFLGVISDPGAAV

SEQ ID NO: 209352 - protein, 142 aa, Zea mays
  Clone ID: MRT4577_122523C.1.pep
MAAEPREPTSSLDAQLAASSSSAAGVGGPNPCCATQWKNCQKLVRSRTALREAVKLLQAENEKLRKENSELSKVCKEERLRGDSAEASRATESDARDLLEKEIIELKTQNMSLKQTQNTCKNNDELLRISELEEEIESSYRF

SEQ ID NO: 209353 - protein, 97 aa, Zea mays
  Clone ID: MRT4577_122524C.1.pep
GVKTGGKRGLRISDTIQLMGKDDLTAKFKIQSGIALTADMMCVRMDECECGSGRNPINSERGRSGLGAGPARRQCFIKYVLAHCDWTMNSDKKEHGS

SEQ ID NO: 209354 - protein, 159 aa, Zea mays
  Clone ID: MRT4577_122525C.1.pep
MALMEVITCILSRTTITEATLVLVGAIMGLQTTRSLLTPGGATQHGQNAQQGQQYFPPPPGQQPHEPSSGTGYPDIQAHGGHFGGPPDQHAQQSQGYSAPPTSGNQNFPTPPPGAPHGGYNPFYNAGQGSQPSYGGQPQFDSGAPPVPHGSHPQYGGAY

SEQ ID NO: 209355 - protein, 63 aa, Zea mays
  unsure (1)..(63): unsure at all Xaa locations
  Clone ID: MRT4577_122526C.1.pep
VKTVIPQIGGLVRIFNGAYWGSKTRLFLVDPXKFFSKIQVXKGLFNGKVFRAFENEDIFKNSS

SEQ ID NO: 209356 - protein, 63 aa, Zea mays
  Clone ID: MRT4577_122527C.1.pep
LTSILSKRAILLYQSREFCTNGSNSTTIKLRQVHLKLNLRIGQLENMEEKCSKAQPLIYFLLY

SEQ ID NO: 209357 - protein, 100 aa, Zea mays
  unsure (1)..(100): unsure at all Xaa locations
  Clone ID: MRT4577_122528C.1.pep
MATGRLSLLALFALLVSATNASIIPQRSLTRSTISEQALRPGTSMGFXHASVQAYTLQLALAASVLQQPIAHLXHQSLAHLILQSIATQQQXQFLTSMSH

SEQ ID NO: 209358 - protein, 88 aa, Zea mays
  unsure (1)..(88): unsure at all Xaa locations
  Clone ID: MRT4577_122529C.1.pep
EYMNIDLRLVGVSASVTMLLSDIRVDLTHWKAKPPTEAKPAILDEFAHPFPENHCYTNRAFVDCTPDTSVASHYYDXLTKAIHVITAN

SEQ ID NO: 209359 - protein, 167 aa, Zea mays
  unsure (1)..(167): unsure at all Xaa locations
  Clone ID: MRT4577_12252C.1.pep
MANPRVFFDMTGGAAPADRIVMELYANDVPKTEHNFRALCTEENGVGKSGNPLHYKDSTFHRVIPHVMCQGVDFTRGNGTGGDFIYEDNLPDDKFVRKHTGPGLLSMGNAEPNTNGSQFFICTEHIPXLDGKHVLFGQLVHGMQVVHAIEKVASRSDLTSKEVNFVD

SEQ ID NO: 209360 - protein, 62 aa, Zea mays
  unsure (1)..(62): unsure at all Xaa locations
  Clone ID: MRT4577_122530C.1.pep
MMVLICALALLALAASAFFSTSXGCGCQTLPFYLPTPFYMPTSVYLPPYHHPXPWXYPIQPL

SEQ ID NO: 209361 - protein, 120 aa, Zea mays
  Clone ID: MRT4577_122531C.1.pep
NHNLGGEGRKHPKITQGGPDKKKGFLKPQCGSPGKKIFEGGQVFPLLGKVIIGHLLGDLLVDLFQGGEDQGGLGKNPLLNALDDVPMEKNPLGAHKVKLVCNGEKNLHQVGGGGNKHTGR

SEQ ID NO: 209362 - protein, 102 aa, Zea mays
  Clone ID: MRT4577_122532C.1.pep
PRHAPAPAAESAPRPSLPQQAQASLLSFSAPMARFQLAAVAMAMLFAAAAAQAPTATPTPAPKASPPPATPPPTPAPVSPTVPPATMLTTASRGKNPWAPPK

SEQ ID NO: 209363 - protein, 320 aa, Zea mays
  Clone ID: MRT4577_122533C.1.pep
MGPCGVQRSRARCLPGCPTAPSRSGGPARSSGPATFVCLLLLRSSAPLLAAVAWSLYITPPPSGPRPSSAALLASLDSGFSEFGQNPACPCRPTPPPASLRRVSCRSSRPGEMDGVVVRRVIPSDNSCLFNAVGYVMEHNRNKASELRQVIAATVAGDPEKFNEVFLGKPNEAYCAWILDPEKWGGAIELSILSEYYGREIAAYDIQTTRCDLYGQEKNYSERAMLIYDGLHYDALAMSPAEGAPEEFDQTIFPVNHDRSIGPAEGLALNLVREAQRKRSYTDTANFTLRCGVCQIGVIGQQEAVEHAQATGHVNFQEYK

SEQ ID NO: 209364 - protein, 79 aa, Zea mays
  Clone ID: MRT4577_122534C.1.pep
RVSLCYGDQRRCVRGHALRSSAGGRHSLGRAWSGWRETHSRDRVSGISSSLSRRYAASLAAPRVRPCAAKISTRAWLKL

SEQ ID NO: 209365 - protein, 57 aa, Zea mays
  Clone ID: MRT4577_122535C.1.pep
KYKHPYRLRTYGHCNKANALMEENCKENGLLFPCQLIHFISTRLIKGLFVLLLIHVD

SEQ ID NO: 209366 - protein, 85 aa, Zea mays
  Clone ID: MRT4577_122536C.1.pep
MDGVVVRRVIPSDNSCLFNAVGYVMEHNRNKASELRQVIAATVAGDPEKFNEVFLGKPNEAYCAWILDPEKWGGEFQHYRPVHQL

SEQ ID NO: 209367 - protein, 34 aa, Zea mays
  Clone ID: MRT4577_122537C.1.pep
LNLGDFISHYTLCPKTHVNSFSCLVQKHLKAQIT

SEQ ID NO: 209368 - protein, 136 aa, Zea mays
  unsure (1)..(136): unsure at all Xaa locations
  Clone ID: MRT4577_122538C.1.pep
RTRGWILDPEKWGGAIELSIGSEYYGREIAAYDIQTTRCDLYGQVXSFFPLTTYAKFVNLLISFAPLDTXKNYSERAMLIYDGLHYDALAMSPAEGAPEEFDQTIFPVNHDPSIGPAEGLALNLVREAXRKRSYTD

SEQ ID NO: 209369 - protein, 89 aa, Zea mays
  Clone ID: MRT4577_122539C.1.pep
SLWLAVVTVVVSVFLRFFFGEMLIWFTSVVYMKGSCKITVTGKMSFFSHTELSLWRGKMTSFSQFLIPFSVFFFIFPSLRSLIQMKTNC

SEQ ID NO: 209370 - protein, 103 aa, Zea mays
  Clone ID: MRT4577_12253C.1.pep
NSQNTKLSFIFPTFIISFIFITLLFTHLLFLFPDIPSLLLAFNLHLIHSSHQLVDGISIGLSNFFMFFQRQIGQEFINLNHIFILFFIILLRGITLLFLFLLF

SEQ ID NO: 209371 - protein, 98 aa, Zea mays
  unsure (1)..(98): unsure at all Xaa locations
  Clone ID: MRT4577_122540C.1.pep
YQKTRCPVXPSDRWSQADVSTSHWSAGTLDCPALRADFLMIYSLRLLIFLQSSHLVGPCIELSDAHRTVRWVASDRPVLHIVVQLSLFYLESFLLLLA

SEQ ID NO: 209372 - protein, 38 aa, Zea mays
  Clone ID: MRT4577_122541C.1.pep
MYKKNKKKKKKKTMKKKKKKKKKKKKKKKKTKKKKKKR

SEQ ID NO: 209373 - protein, 334 aa, Zea mays
  unsure (1)..(334): unsure at all Xaa locations
  Clone ID: MRT4577_122542C.1.pep
MSTRKWSLSTRTRPSRTRTGRPTATTPGPATACCASPSPVSSPPLTAHRWSASAAGRAAAPRPXRTVVRERPPLLRKRGPPSQRRNHSGGRLRXAAAAQRASRPXRDTXPTPRRHATAGQPSPAAATGGRTSRPTTAASRLSTSPRPRRVPAGRRRPHARRRPCQARQTPRGPTSPRPRTRLSRRAPRRRRRPPRSPPAGRSCCYTSARPSWYHPSPAGKIPIQVVCQNHKFPTPEGKQGGSRKKVFSSLGFFFCLSLGINKGNKEKHPKNLFLSPSIVYGQHGRHRSLPEGCYGGARMTAWRRSLAGRVGCRNNTGPGLWWRRWRRGGRADAW

SEQ ID NO: 209374 - protein, 373 aa, Zea mays
  Clone ID: MRT4577_122543C.1.pep
MALKKLLQLFCVGKKDSKKKGKFIDPLWQASASRSSVNVTANKTHLDPCSSGNDTVSVQNHEVESSSTVSSWARTEQGTEIAHHTPFSQFDVVQDFSDHHYAKTSAGKVTKDWVKAIQSEWDLLQKNLPESIYVRVYEDRTDLLRAAIVGPAGTPYHDGLFFFDVRFPCEYPKCPPKVYYHSGGLRLNPNLYESGKVCLSLLNTWWGKGCEKWGKSSSSMLQVLVSIQGLVLNDRPYFNEPGSKNSAETTGGERCSLAYNQTAFVRSCKTMLYSLRKPPMHFETLVLWHFHEHERAILDACRAYMSGTVVGSSAGTGSNRRYVHDKCFAEFHKSLTLYTEHLRAEFAANTRRVMELETEDEIVPSIAASVKSC

SEQ ID NO: 209375 - protein, 115 aa, Zea mays
  unsure (1)..(115): unsure at all Xaa locations
  Clone ID: MRT4577_122544C.1.pep
MALKKLLQLFCVGKKDSKKKGKFIDPLWQASAXPASSVNVTANKTHLDPCSSGNDTVSVQNHEVESSSTVSSWARTEQGTEIGXHTPFSQFDVAQDFSDHHYAKTFTQPRPLRIG

SEQ ID NO: 209376 - protein, 210 aa, Zea mays
  unsure (1)..(210): unsure at all Xaa locations
  Clone ID: MRT4577_122545C.1.pep
SPVLPYDLIQEIRLSGAFCVRXRRRRMALKKLLQLFCVGKRDSKKKASASRSSVNVTADKTHLDPCSSGNDTVXRVKXHEVESSSTVSSWARTEHGTEITHHTPFSQFDVVQDFSDHHYAKTSAGKVTKDWVKAIQSEWDLLQKNLPESIYVRVYEDRTDLLRAAIVGPAGTPYHDGLFFFDVRFPCEYPKCPPKVYYHSGGLRLTRTCT

SEQ ID NO: 209377 - protein, 180 aa, Zea mays
  unsure (1)..(180): unsure at all Xaa locations
  Clone ID: MRT4577_122546C.1.pep
KQREILAALGFSNSNSNQDERFHPSAFCVRXRRRRMALKKLLQLFCVGKKDSKKKGKFIDPLWQASASRSSVNVTANKTHLDPCSSGNDTVSVQNHEVESSSTVSSWARTEQGTEIAHHTPFSQFDVVQDFSDHHYAKTSAGKVTKDWVKAIQSEWDLLQKNLPGQFKQIMIIVNWRIYT

SEQ ID NO: 209378 - protein, 226 aa, Zea mays
  Clone ID: MRT4577_122547C.1.pep
FIESGERAEQISPAGAMGAAGAIRRAAASVVDRACAGTRGFRRALARFAPRPSAFGPAADAEAAAVRAVRNLRTFRFHYAVLQWVLLLASLAPRHRASVVFLMAASKGLLVYGGLLKAFPNSALLRRLLDRRLVAAVFVALVLADIVAAGAVANLLAALAAGVPVIVLHASFRVRDDLEAPSPDAAAAAENGKEDEASAVVEKKEDGDVEAGPTRRSMAAAPRSPK

SEQ ID NO: 209379 - protein, 95 aa, Zea mays
  unsure (1)..(95): unsure at all Xaa locations
  Clone ID: MRT4577_122548C.1.pep
GAVGAPLIXDIPRKNTCCHLASRLANGRQQANVDMAVSMVVDKCDLFHRRAVTXYRKRSTSLNQHGLDGIKAWANRANNVQEAFLNAAGARRAGR

SEQ ID NO: 209380 - protein, 56 aa, Zea mays
  Clone ID: MRT4577_122549C.1.pep
QMLLGRSGGDPLRTYILLIWKIIYSSLSLFNIRFHLLQTKNAIQCSCDFCVKLLYF

SEQ ID NO: 209381 - protein, 144 aa, Zea mays
  unsure (1)..(144): unsure at all Xaa locations
  Clone ID: MRT4577_12254C.1.pep
MAASTVASLSVPVTTTTFAAAAAVGGGDVLIVVPRRAGAGRVWFPAAARRGGGSGRLVAVRSRGPATPPEISDRXSESIKQAEETCADDQKGDAECAAAWDEVEELSATASHARDSLKETNANDPLEKYCKENPDSEECRIYDN

SEQ ID NO: 209382 - protein, 399 aa, Zea mays
  unsure (1)..(399): unsure at all Xaa locations
  Clone ID: MRT4577_122550C.1.pep
MALKKLLQLFCVGKKDSKKKGKFIDPLWQASASRSSVNVTANKTHLDPCSSGNDTVSVQNHEVESSSTVSSWARTEQGTEIAHHTPFSQFDVVQDFSDHHYAKTSAGKVTKDWVKAIQSEWDLLQKNLPESIYVRVYEDRTDLLRAAIVGPAGTPYHDGLFFFDVRFPCEYPKCPPKVYYHSGGLRLNPNLYESGKVCLSLLNTWWGKGCEKWGKSSSSMLQVLVSIQGLVLNDRPYFNEPGSKNSAETTGGERCSLAYNQTAFVRSCKTMLYSLRKPPXELNKYEWILHLLIDXDXDIASSPSLQHFETLVLWHFHEHERAILDACRAYMSGTVVGSSAGTGSNRRYVHDKCFAEFHKSLTLYTEHLRAEFAANTRRVMELETEDEIVPSIAASVKSC

SEQ ID NO: 209383 - protein, 364 aa, Zea mays
  unsure (1)..(364): unsure at all Xaa locations
  Clone ID: MRT4577_122551C.1.pep
MALKKLLQLFCVGKKDSKKKASASRSSVNVTANKTHLDPCSSGNDTVCVQNHEVESSSTVSSWARTEQGTEIAHHTPFSQFDVVQDFSDHHYAKTSAGKVTKDWVKAIQSEWDLLQKNLPESIYVRVYEDRTDLLRAAIVGPAGTPYHDGLFFFDVRFPCEYPKCPPKVYYHSGGLRLNPNLYESGKVCLSLLNTWWGKGCEKWGKSSSSMLQXLVSIQGLVLNDRPYFNEPGSKNSAETTGGERCSLAYNQTAFVRSCKTMLYSLRKPPMHFETLVLWHFPEHERAILDACRAYMFGTVVGSFAGTGSNPKYVHDKCFAEFPKSLTLYTEHFRAEFAANPRRVMELETKNEIVPSIAASVKSC

SEQ ID NO: 209384 - protein, 185 aa, Zea mays
  unsure (1)..(185): unsure at all Xaa locations
  Clone ID: MRT4577_122552C.1.pep
MALKKLLQLFCVGKKDSKKKGKFIDPLWQASASRSSVNVTANKTHLDPCSSGNDTVSVQNHEVESSSTVSSWARTEQGTEIAHHTPFSQFDVVQDFSDHHYAKTSAGKXKGLXRQSKVNGDLLQKNLPESIYVRVYEDRTDLLRAAIVRPSRTPYHDGLFFFHDRSPCEYPKCPPKVYYHSAGLQ

SEQ ID NO: 209385 - protein, 120 aa, Zea mays
  unsure (1)..(120): unsure at all Xaa locations
  Clone ID: MRT4577_122553C.1.pep
SARVKLSDFGLCKPLDCSTLEENDFSEGHNVNGSTQSSTPKRSQQEQLQHWQINRRTLAYSTVGTPDYIAPEVLLKKGYGMECDWRSLGAIMYEKLAGYPSFYSEDPMVTXRKIVNGENL

SEQ ID NO: 209386 - protein, 258 aa, Zea mays
  unsure (1)..(258): unsure at all Xaa locations
  Clone ID: MRT4577_122554C.1.pep
MTDLLHVLPDFDATPFSHLLPSLDKALITTNDVLTLDAPTIAKRAQVPTGELRKLADAVVAALHRQLGFGPEEPAPTPKRDWACISTLDDELDAALGGGIPRGYLVEVTGESGAGKTQLLLTLLLASQLKPPHGFAKSAVYISTEAVLSTTRLAQLLSTHPALVALPDAEKPSLSRILSIQTPDLESQEHILRYQLPVAIKKHDVGLVILDSVAANYRAEFDXSGGNAAASMARRGTQLAQLGALLRELARTEGIAIV

SEQ ID NO: 209387 - protein, 68 aa, Zea mays
  Clone ID: MRT4577_122555C.1.pep
PASEKKKKKKKKKKIKKKKKKKKKKKKIWGGGFPATNQTFPSAGLLLLWYTDTIFRLCKVFFWRGCLT

SEQ ID NO: 209388 - protein, 181 aa, Zea mays
  unsure (1)..(181): unsure at all Xaa locations
  Clone ID: MRT4577_122556C.1.pep
MGISKVTGIAATAFLVTSVSLCQLGMRIIMLPFLATGIVASIVTVASHDAINLPWILGKNSVGRLPLWSIILFGPFLTLARTYAMVKRYMRKEAVYDKIVEGLYLGGWPFLLKHLPXPGNPSVIDCTCELPRSSFVPADEYLCLATWDTRAPTPYQIEKAARWACEKRSEGKPVYVHCAFG

SEQ ID NO: 209389 - protein, 80 aa, Zea mays
  unsure (1)..(80): unsure at all Xaa locations
  Clone ID: MRT4577_122557C.1.pep
GICCETAIINSSIKKTYQLLPAQVITIRALRFSSSKLLFHSSLIIMQSPGIHETTYYXIMIXDADISKDLYANIVLSGGT

SEQ ID NO: 209390 - protein, 63 aa, Zea mays
  Clone ID: MRT4577_122558C.1.pep
HIAHRSATDRHPRARGRRALPRTSSRRSPTCSRRPARAMASENTRSVRAPAPVLLRGARRRPT

SEQ ID NO: 209391 - protein, 239 aa, Zea mays
  unsure (1)..(239): unsure at all Xaa locations
  Clone ID: MRT4577_122559C.1.pep
MAAAPAGAPAITASSSFVSSSPFCLKASMTSQRRPAGRVSIVIRCVSSPPAVDTSFKTNVPRNANMAKLQAGYLFPEIARRRAAHLLKFPDAKIISLGIGDTTEPIPNVITNAMAERAHALSTIDGYSGYGAEQGEKKLRAAIAATYYADLGIEDSDIFVSDGAKCDISRLQAYVDSSVIMGQTDLYQQDVQKYGNIEYMRCGPENGFFPDLSTVPRXDXXIFFCSPXNPTGAAASRDN

SEQ ID NO: 209392 - protein, 46 aa, Zea mays
  Clone ID: MRT4577_12255C.1.pep
YSTNEQKGSQKSILFSVITFTSHIVIHFLKVALATFRRKKFPLCVD

SEQ ID NO: 209393 - protein, 462 aa, Zea mays
  Clone ID: MRT4577_122560C.1.pep
MAAAPAGAPAITASSSFVSSSPFCLKASMTSQRRPAGRVSIVIRCVSSPPAVDTSFKTNVPRNANMAKLQAGYLFPEIARRRAAHLLKFPDAKIISLGIGDTTEPIPNVITNAMAERAHALSTIDGYSGYGAEQGEKKLRAAIAATYYADLGIEDSDIFVSDGAKCDISRLQVLFGSNVTIAVQDPSYPAYVDSSVIMGQTDLYQQDVQKYGNIEYMRCGPENGFFPDLSTVPRTDIIFFCSPNNPTGAAASRDQLTKLVKFAKDNGSIIVYDSAYAMYISDDSPKSIFEIPGAKEVAIETASFSKYAGFTGVRLGWTVVPKELLFSDGHPVAKDFNRIVCTCFNGASNIAQAGGLACLSPDGLKAMQDVVGFYKENTEIIVETFTSLGFNVYGAKNAPYVWVHFPGRNSWDVFAEILEKANVVTTPGTGFGPGGEGFVRVSAFGHRENIIEAARRLKQLYK

SEQ ID NO: 209394 - protein, 169 aa, Zea mays
  unsure (1)..(169): unsure at all Xaa locations
  Clone ID: MRT4577_122561C.1.pep
LVRPRVRWIGGIGTCPVGRINTGVITHDVLYLFKLLMYLLLIGLAYIHHEPVVWHIDVDPQNFXVDTVTDKDMLCDLXVAYNSLVDADQEYATYAXQVMIMNHPGQIGNGYAPVLDCHTSHIAVKFAELVSKIDRRSGLELEKELIFLRNGDAGMGKMVPTKPMVVETF

SEQ ID NO: 209395 - protein, 60 aa, Zea mays
  Clone ID: MRT4577_122562C.1.pep
EEHVQMSIYGEKSSNVYCSSLLLSVCVGDPIKMKHLTECRGGAHERPQRTVESNLPISIR

SEQ ID NO: 209396 - protein, 85 aa, Zea mays
  Clone ID: MRT4577_122563C.1.pep
TFLGFGDEPPLCLIFICQRCVSPRAVSRAILLALGGFLYSVQGVVGCCPFPLFHLVGFHSVPRIWSAFMSLFFLELIFRKLVWNG

SEQ ID NO: 209397 - protein, 49 aa, Zea mays
  Clone ID: MRT4577_122564C.1.pep
KCYHYEVYIFRDDYLYVLTQKDHGPRRCRGLWSQAGRCDHACNSKSFFN

SEQ ID NO: 209398 - protein, 44 aa, Zea mays
  Clone ID: MRT4577_122565C.1.pep
KDARIILNIALSQFTRHYQPIPAQTKFGQTVVTDGKTVYHSCDI

SEQ ID NO: 209399 - protein, 109 aa, Zea mays
  Clone ID: MRT4577_122566C.1.pep
TRSLNFLSFPSPRDGPRTRKRCTLLRYRSEDCNSAIRPHRNIRFAPLLALNGETRFVGLPRNRNAFVLILSRGTLLMLVYGMKPKPLRFGGNPSGAFPSSPTFGNGNRY

SEQ ID NO: 209400 - protein, 129 aa, Zea mays
  Clone ID: MRT4577_122567C.1.pep
GYLTSLMYCEVLLDSAHFIMGSSTEENVKALLKVLVDCAEDATKSLGGLVDHASDHMHDEKIVSRTLFVIKERLELLQQDALDAKVQAFPEIAKYHGDDISLEPTTPSTSPTVTDRSFDEYENVLTRCQ

SEQ ID NO: 209401 - protein, 40 aa, Zea mays
  Clone ID: MRT4577_122568C.1.pep
MKSYHHALLSSRSSTNSLLLACSCSSIHPLIYLGVNAPAT

SEQ ID NO: 209402 - protein, 114 aa, Zea mays
  Clone ID: MRT4577_122569C.1.pep
MAEQTEKAFLKQPKVFLSSKKNGKGKRPGKGGNRFWKSIGLGFKTPREAIEGTYIDKKCPFTGTVSIRGRILAGTCHSAKMVRTIIVRRNYLHYIKKYQRYEKRHSNIPAHISP

SEQ ID NO: 209403 - protein, 163 aa, Zea mays
  Clone ID: MRT4577_12256C.1.pep
MEELRAAVTAHLDQVAGLVQALSSELRRGIGPAADNLRAFIRAVDWTEPWLMCLMAFHVVLLLTAVGFRRNANFQLFLLFLAYSGVYLAEKMNRYLGENWKSFTSRNYFDRSGVFISVVWSGPLIVISIVSVISSLVALCRLMVKWKRAELRHRARLAHDKKD

SEQ ID NO: 209404 - protein, 118 aa, Zea mays
  Clone ID: MRT4577_122570C.1.pep
PPSGGVFSEKGKPAQVLLPGAGAGVPKQIFFPPGPVFFQNFPWGKKDLMAPQFFGQPGGEKGLRVVEKYVLEEETPLKDKFPKGPFVFKGPKAIPAPGGATISRVFFKPDFLVYITKF

SEQ ID NO: 209405 - protein, 41 aa, Zea mays
  unsure (1)..(41): unsure at all Xaa locations
  Clone ID: MRT4577_122571C.1.pep
IEPSFPFEFQFILKQIYVSTYPVVLSVLAACRXSFFLTKIG

SEQ ID NO: 209406 - protein, 86 aa, Zea mays
  Clone ID: MRT4577_122572C.1.pep
FLKEPVATLTYIYQEKSCVAPAVGPGVDLPSQHSEKLAQHLFHEESLCSPFCAISPSSSFSSPLWCTASIISDPPTNSPLIKFMET

SEQ ID NO: 209407 - protein, 70 aa, Zea mays
  Clone ID: MRT4577_122573C.1.pep
GTPRSSLVKNLVSTARRSFCSSPGPGFWFCLKVKKKNNDQVKKKKKKKKGRPPTSELVDPGINSGPVPAG

SEQ ID NO: 209408 - protein, 69 aa, Zea mays
  Clone ID: MRT4577_122574C.1.pep
IKAGSQLCDLNLTKEQHTRAYKKEDSVTLQSGQNYMQRVRRMAPRNLVTCMEATNGLPRHTGYHWKLVS

SEQ ID NO: 209409 - protein, 112 aa, Zea mays
  unsure (1)..(112): unsure at all Xaa locations
  Clone ID: MRT4577_122575C.1.pep
SLPEGPTKEGSPAQRRPPRXGPPPPGRPPPGAPPGREQKAQQPRPPGPTKSXGKKQPPPPRAPQKRGRTPPVPPPPGEPRAATRPQGTXAPGGXQQTGRGPPTPRGPKHPPG

SEQ ID NO: 209410 - protein, 509 aa, Zea mays
  Clone ID: MRT4577_122576C.1.pep
MDGSSKGSGHSEALRNYNLGRTLGIGTFGKVKIAEHKLTGHRVAIKIINCRQMRNMEMEEKAKREFKILKLFIHPHIIRLYEVIYTPTDIYVVMEYCKYGELFDYIVEKGRLQEDEARRIFQQIISGVEYCHRNMVVHRDLKPENLLLDSKYNVKLADFGLSNVMHDGHFLKTSCGSPNYAAPEVISGKLYAGPEVDVWSCGVILYALLCGTLPFDDENIPNLFKKIKGGIYTLPSHLSALARDLIPRMLVVEPMKRITIREIREHQWFQIRLPRYLAVPPPDTTQQAKMIDEDTLRDVVNMGFNKNHVCESLCSRLQNEATVAYYLLLDNRFRATSGYLGADYQESMDRNLNQLASSESSSSGTRNYVPGSSDPHSSGLRPYYPVERKWALGLQSRAHPREIMVEVLKALQELNVRWKKNGHYNVKCRWCPGFPEVNDTLDASNSFLGDSTIMDNDDANGRLPTVIKFEFQLYKTKDDKYLLDMQRVTGPQLLFLDFCAAFLTKLRVL

SEQ ID NO: 209411 - protein, 145 aa, Zea mays
  Clone ID: MRT4577_122577C.1.pep
VTALRDAPPHGVYFWTYERARERLHPGCRRSSSSQDQDGDEGLGTMLVAGGLAGVASWVCCYPLDVVKSRLQAQGAASASAPRYRGVVDCFQRSVREEGLPVLWRGLGTAVARAFVVNGAIFSAYELALRFIASGGGPRLVMEDK

SEQ ID NO: 209412 - protein, 79 aa, Zea mays
  Clone ID: MRT4577_122578C.1.pep
TLSNDVKETDKASVLLLWGAHSVQSVDFKCESANQTVPSDCVVLVNVFTGTGLSRDWVAPLSQCRNLTVIQLSFFTKEW

SEQ ID NO: 209413 - protein, 150 aa, Zea mays
  Clone ID: MRT4577_122579C.1.pep
PAGPSYVFVGPFPAFVASFAVDENKRDFYRQKKKGGVAKTASSSKNKTRHYTGGASVGASDAAQTSALVSHGSWDLKDDFGDEEEQLRQFDVDMKFGPCIGVTRLQRWERASAMGLQPPAHLRDLLLHAASTKNRGDGSPSVECLWEGKV

SEQ ID NO: 209414 - protein, 140 aa, Zea mays
  Clone ID: MRT4577_12257C.1.pep
MAASTVASLSVPVTTTTFAAAGGADVLIVVPRRAGAGRVVWFPAAARRGGGRLVAVRSSGPATPPEISDKVSESIKQAEETCADDQKGDAECAAAWDEVEELSATASHARDSLKETNANDPLEKYCKDNPDSEECRIYDN

SEQ ID NO: 209415 - protein, 131 aa, Zea mays
  Clone ID: MRT4577_122580C.1.pep
MSSGGVKDFYRQKKKGGVAKTASSSKNKTRHYTGGASVGASDAAQTSALVSHGSWDLKDDFGDEEEQLRQFDVDMKFGPCIGVTRLQRWERASAMGLQPPAHLRDLLLHAASTKNRGDGSPSVECLWEGKV

SEQ ID NO: 209416 - protein, 127 aa, Zea mays
  Clone ID: MRT4577_122581C.1.pep
MALLGMGRLDGMRNGLPAVSCTGILVLSLHREKTTGMDRARRVVLLGCGRAAVRPCSRVNGVRLVSFAQVGAEVIKLRGRCSPLVSGCTYIVLTSRALFTKGLILSKALKAKKDVEDKSTRIALHNL

SEQ ID NO: 209417 - protein, 219 aa, Zea mays
  Clone ID: MRT4577_122582C.1.pep
MAPTSKLSMGIKRASRSHAYHRRGLWAIKAKNGGVFPKAEKPAAAAEPKFYPADDVKPRVPSTRKPNPTKLRSSITPGTVLILLAGRFMGKRVVFLKQLNSGLLLVSGPFKINGVPIRRVNQTYVIATSTKVDISGVDVAKFDDKYFAREKKQKVKKTEGELFETEKEASKSLPDFKKDDQKAVDAALIKAIEAVPELKAYLGARFSLRDGDKPHEMVF

SEQ ID NO: 209418 - protein, 159 aa, Zea mays
  Clone ID: MRT4577_122583C.1.pep
PSCTSIYHSSPEHYDGRSGSIYRQSGSKSSHKEFATNVGVSYPIGVSGELEHTPTGLIPVSSILQLCGGVLISSPRCFFVWGMAPLSPCIMILRQGQIHCHRSVMFHALCFGQVMRRHHCAESHPCIGVLLAVRGGISRGSLGGHHRPRPRASRRDRRD

SEQ ID NO: 209419 - protein, 303 aa, Zea mays
  Clone ID: MRT4577_122584C.1.pep
MEAYCDEVRRLEDKFYGLELNHVARWYNETADELAKIASGRTTVPPNVFSREIYQPSVKLNDAPKPEETSAQPKVPSAAEAPRALVGNAFRQGFYWPTAVADATRIVRSCRGCQFYARRTHLPAQALQTIPITWSFAVWGLDLVGPLQKAPGGFTHLLVAIDKFSKWIEVRPLTSIESKQAVAFFTNIIHRFGIPNSIITDNGTQFTGKKFLDFCEGHHIRVDWAVVAHPMTNGQVEQANGMILQGLKPRIYNDLRRHKLTPPWEGSFIIAKILKPRTYKLGNDQGEVYSNAWNIEQLRRFYP

SEQ ID NO: 209420 - protein, 40 aa, Zea mays
  Clone ID: MRT4577_122585C.1.pep
KKKSVHPRATSQVRECAKSGKWSLVRCRASKNPVKGVWFY

SEQ ID NO: 209421 - protein, 146 aa, Zea mays
  Clone ID: MRT4577_122586C.1.pep
MDKEKKEDTYGGSTGVYPAHGAHGYAGDRGSTIVGSDHERGAYGGNEKEDFYDPSLESRATRLGLNWESFKRAPGATRGLVVHGGAAPELVGHQNPLLQQKMKPRHLAMIAVGGSIGTGLFVASGGALRTGGPAGVIIARCIIGVM

SEQ ID NO: 209422 - protein, 455 aa, Zea mays
  Clone ID: MRT4577_122587C.1.pep
MAEYEALVNGLRIAIELGVRRLDARGDSQLVIDQVMKNSHCLDKKMEAYCDEFRRSEDKFYGLELNHVARRYNETADELAKIASGRTTIPPNVFSRDIYQPSVNLNDAPKPEGTSAQPEVPSATEGEALRVEIERNGVTPNLNWQTPYLEYLLRGELPLDKAKARRLARRAKSFVLLGDEKELYHRSPSGVLQRCISIAQGQELLQEIHSGACGHHAAPRTLVGNAFRQGFYWPTAVADATRIVRFCRGCQFYARRTHLPAQALQTIPITWSFAMWGLDLVGPLQKAPRGFTHLLVAIDKFSKWIEVRPLTSIGSEQAVVFFTNIIHRFGIPNSIITDNGTQFTGKKFLDFCEGHHIRVDWAAVAHPMTNGQVERANGMILQGLKPRIYNDLNKFGKRWIKELPSVVWSLRTTPSRATGFSPFFLVYEAEAILPTDLEYGSPRTKAYDDQNNQTR

SEQ ID NO: 209423 - protein, 104 aa, Zea mays
  unsure (1)..(104): unsure at all Xaa locations
  Clone ID: MRT4577_122588C.1.pep
MRNRGVALXLLAARMMXQWLLPAETEGRRRLALKKQPVDQNGRVAARLSAEERQRLLLRGANALGSGGDDDSDGIALKNYMNAQYFGEIVVGSPQKKFNGILNT

SEQ ID NO: 209424 - protein, 225 aa, Zea mays
  Clone ID: MRT4577_122589C.1.pep
MGEGEGADGWGPAVSGRGLRKREGEQALEFFTNIIHRFGVPNSIITDNSTQFTGEKFMYFCEDHHIRVDWVAVAHPRTNGQVERANGMILQGLKPRIYNDLNKFGKRWMKELPSVVWSLRTTPSRATGFSPFFLDYGAKAILPTDLECGSPRTKAYGDQNNQTSREDSLDQLEEARDVALLHSAWYQQSLRRYHARRIQPRGFQVGDLVLQLRQDARGSHKLTPP

SEQ ID NO: 209425 - protein, 171 aa, Zea mays
  unsure (1)..(171): unsure at all Xaa locations
  Clone ID: MRT4577_12258C.1.pep
MEELRAAVTAHLDQVAGLVQALSSELRRGIGPAADNLRAFIRAVDWTVFSPDPPTGDRIRITXLVSFPLPLPGLTNIMRXLCCALNVLLFQEPWLMCLMAFHVVLLLTAVGFRRNANFQLFLLFLASLFRWCHSIHTLPCEMKPLEGKSILTLISIILFSNRPRAMYMFVH

SEQ ID NO: 209426 - protein, 1384 aa, Zea mays
  unsure (1)..(1384): unsure at all Xaa locations
  Clone ID: MRT4577_122590C.1.pep
MAMLLQTMLVPSTTEGRRIQGELKGLLEDAAVRQAESSASRRRGDPSEHRATPSRRLQEASVHTARTRDGTPTAPDRLGDEQHRRDRRARLEERVRRGYHPRRGGRYDSDEDRSPSPEPPGPRVFSQAIRRAPFLAWFRAPTTITKYSGETRSELWLTDYRLACQLGGTDDDNLIIRNLPLFLSDAARAWLEHLPLAQISDWDDLVKAFARNFQXRTELPXITDSDVIGAFLAGTTCRDLVSKLGRKTPTKVSKLMDIATKFAFGQEAVEAIFRKDKQPQGGQKEDTLEASVQCGTKKKAKKKAQAKRNAVDVNLVAAAEHRNPQKPPGGANAFDKMLKESCPYHRGPVKHTLEECDMLRCYFNKAGPSAEGGKDQGNNKKGGDKEEEFLKVHNCFMIYGGQVANASARHRKQERQEVCLVKVAASVYLDWSDKPITFDQGDHPDYVPSPGRYPLVVDLIIGNVRLSKVLMDGGSSLNIIYAETLELLGVDRSEIRASVAPFHGIAPGKRILPLGQIDLPVCFGTPSNFRKETLTFEVVGFRGTYHAVLGRPCYAKFMAIPNYTYLKLKMHGTNGTITIGPTYRHAYECDVECMEYAEALAESEALIADMDCLSKEAPDAKQRAGNFEPAKAVKSVPLDPSNDADKKSGSASSLTPNRKQCSSTFSAQTLKFLRGVPRTCPAYRGMSPSTHWTFEPVPYPLPRIDQIVDSTAGCETLSFLDAYSGYHQIKMKESDQLATSFITPFGMYCYTTMPFGLRNAGATYQRCMNHVFGEHIGRTVEAYVDDIIVKIRKASDLLSDLEVTFGCLRAKGVKLNPEKCVFRVPRGMLLGFIVSERGIEANPEKIAAITNMGPIKDLKGVQKVMGCLAALSRFISRLGEKGLPLYRLLRKAERFTWTLEAEEALGNLKALLTNTPILVPPAEGEALLVYAAATTQVVSAAIVVERQEEGHALLIQRSVYFIRELRHYFESHLVTMVSSFPLGEIIQCREASGAGAGLLFISPLGEHVRYVLRLHFPVSNNVAEYEALVNGLRIAIELGVWRLDARGDSQLIIDQVMKNSHCRDQKMEAYCDEVRCLEDKFYGLELNHVARRYNETADELAKIASGRTTVPPEVFSSDIYQPFVKLDDAPEPEETSAQPEVPSAAEGEALRVEGEQNGVAPNQNWQTPYLEYLLRGELPLDKAEARRLARCAKSFVLLGDEKELYHRSPSSILQRCISIAQGQELLQEIHLGACGHHAAPRALVGNAFQQGFYWPTAVADTTRIVRSCQGCQFYARQTHLPAQALQTKPITWSFAVWGLDLVGPLQKAPGGFTHLLVAIDKFSKWIEVRPLINIGSEQAVAFFTNIIHRFGVPNSIITDNGTQFTGKKXWTSARTTTFVWTGPP

SEQ ID NO: 209427 - protein, 82 aa, Zea mays
  Clone ID: MRT4577_122591C.1.pep
KNLRGSSFNARAFSGDDENFCRHNTQLFPPSALGWGTLSQHPIRAPLFEGFSSNNPRPPTVYICFFGGGPPACPFFGLLGLK

SEQ ID NO: 209428 - protein, 58 aa, Zea mays
  Clone ID: MRT4577_122592C.1.pep
TARIDSYRLCWAYTSRIHYQTCMCLIGRTSTVLNEPVKARVSMDRDTVTRLTRLAIVE

SEQ ID NO: 209429 - protein, 81 aa, Zea mays
  Clone ID: MRT4577_122593C.1.pep
DIFGVRYPHSKPSGHQLSWGHTWVPHHNSKGHLKWVASPENSFRDTWNRKLRRSSFHCLGGSLNQKTLCRLTQKVGELLER

SEQ ID NO: 209430 - protein, 42 aa, Zea mays
  Clone ID: MRT4577_122594C.1.pep
KNKNGLKNIFFLFFLYYYLFFFFFNKYFCLVKLFPIVIFIVR

SEQ ID NO: 209431 - protein, 69 aa, Zea mays
  Clone ID: MRT4577_122595C.1.pep
LFYTTGNPKPHELVIGELQTEQSAAIQFSANLVTARWTNCQRWSPPRDWYTKLWADGLRYWEGINSGET

SEQ ID NO: 209432 - protein, 90 aa, Zea mays
  Clone ID: MRT4577_122596C.1.pep
ISPRVVSPQGHGGDIHRAAPYNIQKVTHAGWGETIIKPGVSLNIGKRQTGSTSPPKLEIFFSPFIPCTKTTPALVQNICACFPLFTHQKK

SEQ ID NO: 209433 - protein, 73 aa, Zea mays
  Clone ID: MRT4577_122597C.1.pep
GRGTSIPSADSACSARERRDREQDALSTTEASYSGPRTKYVGGVHRLGASQRPEPSAAHINNMHHQPVPKYLM

SEQ ID NO: 209434 - protein, 208 aa, Zea mays
  unsure (1)..(208): unsure at all Xaa locations
  Clone ID: MRT4577_122598C.1.pep
SYESVGESVMAVLLKDGALRVQDGHSIRHYFTANGEKAERDSNIQLMDAEVALYWKIMCKHLQAEAQVKGSEAAATTGAEAAVYASEATDKNDLLDSVLPSTITDYVDLVKAHLSAGPNYHFTSRQLLLLGEMLEFSDTMNRKIASSFLHELLVRPLEHEVDDDGNQIAIGDGVSLGGDKDWAXAVAELAKKVHSSXGEFEMVVSTCC

SEQ ID NO: 209435 - protein, 202 aa, Zea mays
  unsure (1)..(202): unsure at all Xaa locations
  Clone ID: MRT4577_122599C.1.pep
MEGAVTENAAVPVRAAAPEAAVHSDQHVEHVESGAMVEDSAASTVAPESTSDADQAIEDAAPEDGVDEDTVTNVDFSPEDMRSIIEVIADTGKFWHDWRFLKSVLSIQLKQVLDEYFEVEMVSQSDGQQRSLSELFSRLNGALERFEEGPPFTLQRLCEILLDPKGTYTKLPKLTLALEKNXLVTSTITKCTDPYAAHGLCS

SEQ ID NO: 209436 - protein, 68 aa, Zea mays
  Clone ID: MRT4577_12259C.1.pep
FVYSIHFASDRRVSVSDKVKSLKAYFFLHLIISPINFNKENMYVNQLSWADYIQKAPEFDYLFKFRTF

SEQ ID NO: 209437 - protein, 151 aa, Zea mays
  Clone ID: MRT4577_1225C.1.pep
FGPLGARVGPFPLFVPGNAPIPPGVGKIGLKFRVPPASLGGKLKYKGPPQSFNQDVGVFWPGVEIPFWFPPPCCLKLFTPWAPRGTPVGPQGPGAAQTPIFSFTKVPSFGVFPAFSPREKFPFKRQKPFLPLFLKALLPCFSPVGGQWVFF

SEQ ID NO: 209438 - protein, 295 aa, Zea mays
  Clone ID: MRT4577_122600C.1.pep
MEGAVTENAAVPVRAAAPEAAVHSDQHVESGAMVEDSAASTVAPESTSDADQAIEDAAPEDGVDEDTVTNVDVSPEDMRSIIEVIADTGKFWHDWRFLKSVLSIQLKQVLDEYFEVEMVSQNDGQLRSFSELFSRLNGALERFEEGPPFTLQRLCEILLDPKGTYTKLPKLTLALEKNLLVTSTITKCTDPYPAAHGLPCSDCTQITEISGPADVGSVSTPEHTTAVPNGTEHVAGDVDGEMAEAEAEESSGSHDIEMQEDKPDQVDNVNADANPGAAAAPEAFNASESTSQPQS

SEQ ID NO: 209439 - protein, 55 aa, Zea mays
  Clone ID: MRT4577_122601C.1.pep
VIFQIIPIKTIRQGFLAHCSSSCNVKIEGKNIINSKSLGQNLKPESGLTNNNPPD

SEQ ID NO: 209440 - protein, 81 aa, Zea mays
  unsure (1)..(81): unsure at all Xaa locations
  Clone ID: MRT4577_122602C.1.pep
GPESPVRLHSDGXLFSKRLRADPMSEHTHGDMGESRHELELQMPSGSGHRAVTDREPRRAHHRIPGSRRHQGVECRDSRPG

SEQ ID NO: 209441 - protein, 108 aa, Zea mays
  Clone ID: MRT4577_122603C.1.pep
AWLSNVGLRRRRRVGMVVGGVRLWCCSGRSLSIRCLLLSIRFWVCLRCMILLHCLVLLLVLILCFFLFLCCSSCCCRCIGVVMVWGCCLVVRWWRIWSWRGVGGWMVR

SEQ ID NO: 209442 - protein, 93 aa, Zea mays
  Clone ID: MRT4577_122604C.1.pep
KQKNSSGRFIHFFQLQNPKQSPIYKSFRGEFETGLRARVKSPLKRPSGGSKNRVSPRGPSGGLGVLFGFALPPLRKFLDQLPVFKRKIFGDGA

SEQ ID NO: 209443 - protein, 76 aa, Zea mays
  unsure (1)..(76): unsure at all Xaa locations
  Clone ID: MRT4577_122605C.1.pep
MGSGHGMRTANANXNPMAMGARRGMNHSAHDLSQLGQLHQQQQQHQQQHDIGNQLLGGFRSASSFNNIQYDWKPSQ

SEQ ID NO: 209444 - protein, 101 aa, Zea mays
  unsure (1)..(101): unsure at all Xaa locations
  Clone ID: MRT4577_122606C.1.pep
MMIIIKTYLQSITVRVEEWRLKQRXTEEWMRHRQLPCELRERVRRFIQYKWLATRGVNEESILQALPADLRRDIKRHLCLGLVRRVNTSTCFCQSTYEINF

SEQ ID NO: 209445 - protein, 104 aa, Zea mays
  Clone ID: MRT4577_122607C.1.pep
FLDDSIQACSTTQYNTTIDTTVLYTSVSHFSPRLRLLSGWAVMGLLRSRDPPPVLEKKTARTDSVSTSRSDVSFLLAALTPCFRAVCLSSSSSCSSSLSSPSST

SEQ ID NO: 209446 - protein, 91 aa, Zea mays
  unsure (1)..(91): unsure at all Xaa locations
  Clone ID: MRT4577_122608C.1.pep
YLQHHQLLPFRPLAAGYHQQFLPFNQLELIGTLLRYVQQQLLFFFTXVLKSPAAFLTQQQLLPFYLGAAPNVGTLLQLKHWLPFNQHAWTN

SEQ ID NO: 209447 - protein, 224 aa, Zea mays
  unsure (1)..(224): unsure at all Xaa locations
  Clone ID: MRT4577_122609C.1.pep
SQNPGAELLPCVSFRPRPSFKLLKPSRIRAPLPWSSSSAFLARPPPRQVCARRAAPPSPQAAMPSQPISLLIPKCTSAIILRRAPPWARLTQLLARRVGRLVVAIAALAFLWCSASLSAHNTAPSTPTWQIPVRLFSKLIGHALSSPWRSGGPHHLALCHLSLSPSSLCHQRLLGASACPLHRPCPYSATAXRDRAARPKTCIALFVSSSPCYCIRCGAICVCR

SEQ ID NO: 209448 - protein, 88 aa, Zea mays
  Clone ID: MRT4577_12260C.1.pep
HASAVYYHFVHGLAEFPREDDLEARFMLPGLPTLSVADVPSFLHASDPYKVLGDTIQDQFRNMGKASWVFVNSFAELERDVIAALPSV

SEQ ID NO: 209449 - protein, 55 aa, Zea mays
  Clone ID: MRT4577_122610C.1.pep
GPAAPPAAPARSKQFFASTRSFRSYNAPARPTRASSGAPATSGSRTTIDIKSQTS

SEQ ID NO: 209450 - protein, 85 aa, Zea mays
  Clone ID: MRT4577_122611C.1.pep
CCRPWIFFFCVLSDEISINIYTLYIYIYVCVCVCVCMYIGSSWVWFSIRGGLFGQVNFYWSLLFSSLYKVKNLTLCILVADVMKL

SEQ ID NO: 209451 - protein, 61 aa, Zea mays
  Clone ID: MRT4577_122612C.1.pep
MYSSCSLKKKKKKKKKKKKKKKKKKKKKKKKKKKKKKKKKKKKKKKKKKKKKKKKKKGGVL

SEQ ID NO: 209452 - protein, 141 aa, Zea mays
  unsure (1)..(141): unsure at all Xaa locations
  Clone ID: MRT4577_122613C.1.pep
LYQDLSISLSTEGASSTPNPTCVCVCLPLFIIRSFHYSTPSSISCPAPSPPQPXAPSXRPWRPPPAIASPPLPPSPPPTEPPTKSSPPPTTTTTAAAAASSXPPPSXPPPPPSCPAYTSTPPSTASSPLHLPPRRPRRPLP

SEQ ID NO: 209453 - protein, 62 aa, Zea mays
  unsure (1)..(62): unsure at all Xaa locations
  Clone ID: MRT4577_122614C.1.pep
MYGFRTAFKFCDLCQKLEEMFDIXGELGSTLKKWRVVFTDDEDDMMLVGDDPWGEFCGTVHI

SEQ ID NO: 209454 - protein, 149 aa, Zea mays
  Clone ID: MRT4577_122616C.1.pep
PNPLSLQRQLGFTFRRKQILKGVAQQEHDCIPDEHYVQTLFSIKGLEDELERRTLTYTSWNQSSNPKDKMTWHPMKFEYDTSSHEHINAIKRIDHVNYQMEHRTEWCQCNGTSVPCFLFARKFSYSAAMHLLEQGAIGTPKSAQLMINF

SEQ ID NO: 209455 - protein, 74 aa, Zea mays
  Clone ID: MRT4577_122617C.1.pep
MAFVPVCVQCGTRSNPCRCKVVGPTLGFVAFVVAGVIEWPLGAAVYLFRHRKGRRIMAHPATVVYPRVTRAIPI

SEQ ID NO: 209456 - protein, 79 aa, Zea mays
  Clone ID: MRT4577_122618C.1.pep
PQGRLPPTLLKATTSGRTILPPVWETTQNTATPPIRRDELSGKMAGRSGLLLFDRRVLLPAVHHLPQLALDEEQPIGHI

SEQ ID NO: 209457 - protein, 580 aa, Zea mays
  Clone ID: MRT4577_122619C.1.pep
MADSYGDGKGPSLKSQSQNQQPRPGPRLKPAIEMEDLINLLHGSDPVRVELTRLENELQFKEKELGDAQAEIKALRLSDRAREKAVQDLTEELAKVDGKLKLTESLLESKNLEAKKINDEKKAALAAQFAAEATLRRVHAAQKDDDMPPIEAILAPLEAELKLARQEIAKLQDDNRALDRLTKSKEAALLEAERTVQMALAKASLVDDLQNKNQELMKQIEICQEENKILDRMHRQKVAEVEKLTQTVRELEESVLAGGAAANAVRDYQRKVQEMNEEMKTLDRELARAKVSANRVAVVVANEWKDGDDKVMPVKRWLEERRILQGEMQQLRDKLAIAERAARSEAQLKEKFQLRLKVLEEGLRMSTSRTNVSGTRRQSIGGADGLSKANGFLSKRPSFQMRSPVSTTTTLVNHAKGASKSFDGGCRSLERYKGHVNGNGMNVSTDSSEDKDSNNSDEKCNEFASAESEDSVSGVLYDMLQKEVISLRKACHEKDQSLKDKDDAVEMLAKKVDTLTKAMESDAKKSRRELAAMEKELAAVRLEKEQDNRARRFGSSSGSASSSQLPPGRTLPRSGSARNM

SEQ ID NO: 209458 - protein, 160 aa, Zea mays
  Clone ID: MRT4577_12261C.1.pep
MMGIPLVCYCLAVPKPVIAFCRLLSAVRDAALLMLAVVGLCRFPPDSAVDAGHQPGEVKARLPAVEYGQLLAEHDEQQQSGDHDCDGDAASSDCIVCLETLEAADEVRRLGNCAHAFHRACIDRWIDLGRATCPLCRSDLLPRAPGWASRLGLGRLTRVR

SEQ ID NO: 209459 - protein, 169 aa, Zea mays
  Clone ID: MRT4577_122620C.1.pep
IGTLEAGRHSCTPHGRGASVRLIPPTRQQRAPAPVLSSPLATPVAVGRRSSPPRLPPYLPTSPWHPRKEYPFHSVPCFFTTPPCIRVSLPLNFPVSLRSFVILDLGCLGWFTGLMLKCYPIFSENEVLKNRSCNAFDAPFICFCMSLYLLRELPSTKTLYRRHLQHQMA

SEQ ID NO: 209460 - protein, 119 aa, Zea mays
  Clone ID: MRT4577_122621C.1.pep
MERTKKPCLGVVALLLFLLLASAAHGAQPADAKDIAGDGDGDGERVTVRTGHGHGYSSSHSSGHPSGGTPEQGGAGVVDPRNLNARSHHRRGAATRATAYSSWLVCTLVAGGVMLLLLL

SEQ ID NO: 209461 - protein, 95 aa, Zea mays
  Clone ID: MRT4577_122622C.1.pep
TTDDPVIRKLAKSQGNVYATGAILATLMSCTRSVYSWDIVVQRVGSKLVFDKFDNSDFDLLTVPETANEPPQDEGNSFNSTRNLAMEATYINHNF

SEQ ID NO: 209462 - protein, 136 aa, Zea mays
  Clone ID: MRT4577_122623C.1.pep
VHVDWTNGFIFGGNQSNCGTWMDKMGESEKAGSKGVPGTPRDGAAIEITGLLYSTLKWLAHRNSKGGFAHEGVKKADGSSITFKDWAALIEDNFERCYYVPQLPSDDENYDVNPKVVNRRGIYKDLYKSGKEYEDY

SEQ ID NO: 209463 - protein, 87 aa, Zea mays
  unsure (1)..(87): unsure at all Xaa locations
  Clone ID: MRT4577_122624C.1.pep
LCASEPVTTMVFYHPPAPAYWLGQADAGSGGQPPVAQVHQQXLAHGTVQTIGRQHHPGVLPALIHLTMGNPVAYLXQQQVRASNPLA

SEQ ID NO: 209464 - protein, 67 aa, Zea mays
  unsure (1)..(67): unsure at all Xaa locations
  Clone ID: MRT4577_122625C.1.pep
PPPNFFSFFYNTFYLVRFPSSSFTPAFIPNRMVSWXXLISLFMLLLCIFSATPPLSLSRLATREKPR

SEQ ID NO: 209465 - protein, 93 aa, Zea mays
  unsure (1)..(93): unsure at all Xaa locations
  Clone ID: MRT4577_122626C.1.pep
MAMDPDAVAKAFVEHYYRTFDTNRAALVGLYQETSMLTFEGQKFXXPSAIAGKLGSLPFQACEHPIKFSQAFHLLPAAGSFFVQNDMFRLNYG

SEQ ID NO: 209466 - protein, 80 aa, Zea mays
  Clone ID: MRT4577_122627C.1.pep
MAMDPDAVAKAFVEHYYRTFDTNRAALVGLYQETSMLVFVSGSIRTGPEEHPIKFSQAFHLLPAAGSFFVQNDMFRLNYG

SEQ ID NO: 209467 - protein, 124 aa, Zea mays
  Clone ID: MRT4577_122628C.1.pep
MAMDPDAVAKAFVEHYYRTFDTNRAALVGLYQETSMLTFEGQKFQGPSAIAGKLGSLPFQACEHQIVTVDCQPSGPQGGMLVFVSGSIRTGPEEHPIKFSQAFHLLPAAGSFFVQNDMFRLNYG

SEQ ID NO: 209468 - protein, 143 aa, Zea mays
  unsure (1)..(143): unsure at all Xaa locations
  Clone ID: MRT4577_122629C.1.pep
VFLTDNKQRPPQLPVPCSPGRPSPCQAYLLPCLRCASWLASPLTQEGVEGLSTAGGPGPSLPAPGQDAFFCRDQSLPPSQRDQTDASDRLLPDGPVDLPLESPAPAPFGGQAGDTGESRLDASCGAAPSGCLGVRTPXWWGLG

SEQ ID NO: 209469 - protein, 160 aa, Zea mays
  Clone ID: MRT4577_12262C.1.pep
MMGIPLVCYCLAVPKPVIAFCRLLSAVRDAALLMLAVVGLCRFPPDGAVDAGHQPGEVKARLPAVEYGQLLAEHDEQQQSGDHDCDGDAASSDCIVCLETLEAADQVRRLGNCAHAFHRACIDRWIDLGRATCPLCRSDLLPRAPGWASRLGLGRLTRVR

SEQ ID NO: 209470 - protein, 124 aa, Zea mays; identical to SEQ ID NO: 209467
  Clone ID: MRT4577_122630C.1.pep

SEQ ID NO: 209471 - protein, 66 aa, Zea mays
  Clone ID: MRT4577_122631C.1.pep
VSLSLYFFVTPTCTIRSVWPSCILHPHICTNSVVKCFCKWSHVFYKRSYKSGSLHSASSMNLSIRI

SEQ ID NO: 209472 - protein, 247 aa, Zea mays
  Clone ID: MRT4577_122632C.1.pep
MASRDLRRLLDGVALVAREATRGTSLRDVLRSALLATTDLAGLTRGTPRRPPHPPGAGPLPATESSRPSSVVYFSHDEATASPQDHALERPPPAQEAPHPARTQETVRTGTTASVAAEPAAVAADRPEPAAPPPDPSPLPQQAPPLASAAPGEKRRRLRERKVPSTPFTRALGFAGLGAGLAWGTVQESARRVMYGTPVDTEGKRSALSPFLSDQNAERVALALCRMRGAALKVGQMLSIQDESLVP

SEQ ID NO: 209473 - protein, 124 aa, Zea mays; identical to SEQ ID NO: 209467
  Clone ID: MRT4577_122633C.1.pep

SEQ ID NO: 209474 - protein, 124 aa, Zea mays; identical to SEQ ID NO: 209467
  Clone ID: MRT4577_122634C.1.pep

SEQ ID NO: 209475 - protein, 72 aa, Zea mays
  Clone ID: MRT4577_122635C.1.pep
VMCTTGITSIQPWTNKMNASAAASARINNMTKKYIKHSQQLTPAIAGASVRREKTPGEDRDGLGYPVPGSAP

SEQ ID NO: 209476 - protein, 125 aa, Zea mays
  unsure (1)..(125): unsure at all Xaa locations
  Clone ID: MRT4577_122636C.1.pep
MAMDPDAVAKAFVEHYYRTFDTNRAALVGLYQETSMLTFEGQKFQGPSAIAGKLGSLPFQACEHQIVTVDCQPSGPXQGGMLVFVSGSIRTGPEEHPIKFSQAFHLLPAAGSFFVQNDMFRLNYG

SEQ ID NO: 209477 - protein, 125 aa, Zea mays
  unsure (1)..(125): unsure at all Xaa locations
  Clone ID: MRT4577_122637C.1.pep
MAMDPDAVAKAFVEHYYRTFDTNRAALVGLYQETSMLTFEGQKFQGPSAIAGKLGSLPFQACEHQIVTVDCQPSGPQGGMLVFVSGSIRTGPEEHPXIKFSQAFHLLPAAGSFFVQNDMFRLNYG

SEQ ID NO: 209478 - protein, 257 aa, Zea mays
  Clone ID: MRT4577_122638C.1.pep
MASLTLPPAPPNPRQDAIDLHKAFKGFGCDSTTVINILTHRDSVQRGLIQQEYRAMYHEELSHRISSELSGNHKKAMSLWILDPAGRDATVLREALNGDTMDLRAATEIICSRTPSQLQIMKQTYYARFGTYLEHDIAHHTSGDHLQLLLAYVGIPRYEGPEVDPTIVTHDAKDLYKAGEKRLGTDEKTFIRVFTERSWAHLASVSSAYHHMYDRKLEKVIKSETSGNFEFALLAILRCAENPAKYFAKVLRPCCFQ

SEQ ID NO: 209479 - protein, 86 aa, Zea mays
  Clone ID: MRT4577_122639C.1.pep
CFEIPADGNDWVLFFKAVLSLFILSFLGAFSLQSLYTIGVTFAFIAFYVSEQKEEEIGGLFIKTHSLGCKLKSDLPRKFLSSKKID

SEQ ID NO: 209480 - protein, 161 aa, Zea mays
  Clone ID: MRT4577_12263C.1.pep
QNNNNNNLLAWGSQKNSRKEITGQGTNISSSIHRDKSACPLGCHHLRLHKPTGLLPTYTQPILRLLDSVCQSNAYTFRGTRILSFLFVPSHPQRRCLFSWSSSCCLHLGPFGIRNTLDALQDRLLIPLHPVRRPPCTTRRAEPFTSRDRTARWIHAVSVVS

SEQ ID NO: 209481 - protein, 89 aa, Zea mays
  unsure (1)..(89): unsure at all Xaa locations
  Clone ID: MRT4577_122640C.1.pep
NFEFALLTIXRCAENPAKYFFKLFRKAMKGLGTDDMTLIRVVVTRTEIDMQYIKAEYLKKYKKPLAEAINSETSGNYRTFLLSLVGHGH

SEQ ID NO: 209482 - protein, 51 aa, Zea mays
  Clone ID: MRT4577_122641C.1.pep
NYLDGHLHALRWLHLHLVDWQRVTKVPTPQRICTLSRCPAVHMSCGLMGNS

SEQ ID NO: 209483 - protein, 316 aa, Zea mays
  Clone ID: MRT4577_122642C.1.pep
MASLTLPPAMANPRQDAIDLQKAFKGFGCDSTTVINILTHRDSVQRGLIQQEYRAMYHEELSHRISSELNGNHKKAMLLWILDPAGRDATVLREALSGDTMDLRAATDIICSRTPSQLQIMKQTYYARFGTYLEHDIGHHTSGDHQKLLLAYVGIPRYEGPEVDPTIVTHDAKDLYKAGEKRLGTDEKTFIRVFTERSWAHLASVSSAYHHMYDRKLEKVIKSETSGNFEFALLAILRCAENPAKYFAKLLRKAMKGLGTDDKTLIRVVVTRTEIDMQYIKAEYFKKYKKPLAEAIHSETSGNYRTFLLSLVGPGH

SEQ ID NO: 209484 - protein, 124 aa, Zea mays
  Clone ID: MRT4577_122643C.1.pep
ARGSFGSQSSRHSDSDGAVNSGRDLPVENTQHNCDAADIRYNESPVCEGVTSRSTSRHQGDGASTSWPDEKLPSAKSSPGHCSSDLCMGAMDVQRRSAWGLVIVTAGRAGEIRVFQNFGFPVQV

SEQ ID NO: 209485 - protein, 71 aa, Zea mays
  Clone ID: MRT4577_122644C.1.pep
NSRGLYSESRRPCSCHTADSYHCCEAAKTTDNKCQAKEISPLKTRLMVDALGFPSLVINFYELELAEKAYL

SEQ ID NO: 209486 - protein, 316 aa, Zea mays
  Clone ID: MRT4577_122645C.1.pep
MASLTLPPAPPNPRQDAIDLHKAFKGFGCDSTTVINILTHRDSVQRGLIQQEYRAMYHEELSHRISSELSGNHKKAMSLWILDPAGRDATVLREALNGDTMDLRAATEIICSRTPSQLQIMKQTYYARFGTYLEHDIAHHTSGDHQKLLLAYMGIPRYEGPEVDPTIVTHDAKDLYKAGEKRLGTDEKIFIRVFTERSWAHLASVSSAYHHMYDRKLEKVIKSETSGNFEFALLTILRCAENPAKYFAKLLRKAMKGLGTDDMTLIRVVVTRTEIDMQYIKAEYLKKYKKPLAEAINSETSGNYRTFLLSLVGHGH

SEQ ID NO: 209487 - protein, 300 aa, Zea mays
  Clone ID: MRT4577_122646C.1.pep
HLPAQQLQTIHVTWPFACWGLDMIGPFKKAQGGCTHVLVAFDKFTKWIEYKPIAFLTSAKAVEFIQDIIFRFGIPNSIITDLGSNFTSSEFFDFCEQKSIQIKYASVAHPRANGQVERASGMILEALRKKVFDKNEKFTGKWIRELPYVIWSLRTQPSRALHRNTPFFMVYGSEAVMPADLKFGAPRLIFENIAEAEATRLEDVDILEEERLNTVIQSARYQQTMRRYHDKAIRHRSFAVGDLVLRRILAGEGRHKLSPLWEGPFIVAEVTRPVSYCLTQMDGTEIGNSWNIEHLRKFYP

SEQ ID NO: 209488 - protein, 159 aa, Zea mays
  Clone ID: MRT4577_122647C.1.pep
GGRLQVPVRNSRVDPRVRTGIAISVAAVALGAKVLERHITLDKTWKGSDHSASLEPGELAELVRSVRLVERALGSPTKQLLPCEMACNEKLGKSVVAKVKIPAGTTLTLDMLTVKVGEPKGYPPEDIFNLAGKKVLVTIEEDDTVMEESVESHSKKIKA

SEQ ID NO: 209489 - protein, 105 aa, Zea mays
  Clone ID: MRT4577_122648C.1.pep
PVVWGYVDPPKSKDFVGGPPRACTWLQAVPRAGATKNPPLWGPWFLPKLRGRGGPHKDSWGGQPFRGFRQPLRNFLIFPKQISFLKKKKKKKKKKKKTKKKKKNK

SEQ ID NO: 209490 - protein, 108 aa, Zea mays
  Clone ID: MRT4577_122649C.1.pep
LVRQSPFIDRLSLFGSCTSSVSMLIRISDELLLFFLHGTVHLHHAMTYLLLHMHLANFVLFEQLIPFLFSLSRNCHDFFVLIIYPEGSNAPLSKSKSCNFCACCGIKR

SEQ ID NO: 209491 - protein, 124 aa, Zea mays
  unsure (1)..(124): unsure at all Xaa locations
  Clone ID: MRT4577_12264C.1.pep
PRGGFKGINPKFPDFLFPQIKAPPWPKIFPQRIPPEXVIFLARVFQDPPTPGGPPLGGFIPPFFYXXGAPNPRLPKGRSPPPFFYFYPYGFRGGPRGFFWHFTPPPAKNQWAFFGVLKTRPFFF

SEQ ID NO: 209492 - protein, 173 aa, Zea mays
  Clone ID: MRT4577_122650C.1.pep
PTRPGTVVAKSRDDSEPPLLATCEGLEYVAISRPLPIIRGRALFKLKISQLSSKCDNKLFRIKFSTLHMQRYSFLEAYSKPIHCISRSRTVRPLGPTKRASSATANEIDMLSNGQGFVSTDKVNSRGHSVCLHTPMFPKIEDGMVEVVEAPKIVSQNKNARKVVVSKEAQNVR

SEQ ID NO: 209493 - protein, 71 aa, Zea mays
  unsure (1)..(71): unsure at all Xaa locations
  Clone ID: MRT4577_122651C.1.pep
KGIVIFCALTARLVTKGGRTNAPIIKIHNTSLQAXFCMPNSTPTGPNPGGTXWGXHTAHGETSGGIRHAGA

SEQ ID NO: 209494 - protein, 148 aa, Zea mays
  Clone ID: MRT4577_122652C.1.pep
MPTRLTKTRKHRGHVSAGHGRVGKHRKHPGGRGMAGGQHHHRTNIDKYHPGYFGKVGMRYFHKMQNLFWKPVINLDKLWSLIPADKRDEYLANKGGNAPVLNLLDYGYSKVLGKGRLPAVPIVVRARYVSAEAEKKIKEAGGVVQLVA

SEQ ID NO: 209495 - protein, 80 aa, Zea mays
  unsure (1)..(80): unsure at all Xaa locations
  Clone ID: MRT4577_122653C.1.pep
FGLSDFVXPDEMLNGIVGSAEGVAPQILHIFYSTEARVWSIGGMGYILFCGRPPFWARTESGIIRSVLKAEPRYNEAPRS

SEQ ID NO: 209496 - protein, 90 aa, Zea mays
  Clone ID: MRT4577_122654C.1.pep
QAAWKEYPVPPSPIRTLMVRPKTRIRVSSVTSWAQRAAIKVGAPSTFFPFRSACRGWPAPLCCPLSPCLAQFGLNRRTPKWVVVAWDATG

SEQ ID NO: 209497 - protein, 42 aa, Zea mays
  Clone ID: MRT4577_122655C.1.pep
LLDGLHHHEELFNTLRGLSLYQFLPLLIAPPDPSLIKSHSIA

SEQ ID NO: 209498 - protein, 160 aa, Zea mays
  Clone ID: MRT4577_122656C.1.pep
MAEQTERAFLKQPKVFLCSKKATKGNKPGKGGNRFWKNIGLGFKTPREAIEGTYIDKKCPFTGTVSIRGRIIAGTCHSAKMNRTIIVRRNYLHFVKKYQRYEKRHSNIPAHISPCFRVKEGDHVIIGQCRPVSKTVRFNVVKVIPAGSKSGAVKKAFTAA

SEQ ID NO: 209499 - protein, 187 aa, Zea mays
  Clone ID: MRT4577_122657C.1.pep
MTSETPQELLSALLQTLEHDIVPLTEQGVASGSKVFGAAILSSQTLKPLTVSTNDERVSPLLHGEINCIQTFYMKTFPDPKTRPNPREECIFFATHEPCSLCLSGITWSGFKELYYLFTYEDSRDQFSIPYDIDILEEVFRVRTEGESDTALKDRALYNKTNKFFTAKSVQDLVNEIQDGDEKQRLE

SEQ ID NO: 209500 - protein, 115 aa, Zea mays
  Clone ID: MRT4577_122658C.1.pep
IFPPSSLAFASPAGDFHHHRRTTPTLLPSRAMAQTVVLKVGMSCEGCVGAVKRVLGKMEGVESYDVDIMEQKVTVKGNVTPDAVLQTVSKTGKKTSFWEAEAVTSESATPAGATA

SEQ ID NO: 209501 - protein, 139 aa, Zea mays
  Clone ID: MRT4577_122659C.1.pep
GDFSITRLLPDEKKETRTAYKAAREESDHAAEASVGEKVSSALTDGVDAMLQKLEKEIDDVDARIGNRWHRLDRACDGAVTPAEVAAAANYLKDAIGAEGVQELISNLSKDNEGNILVEDIVKLASQTEENNEAEETAR

SEQ ID NO: 209502 - protein, 62 aa, Zea mays
  Clone ID: MRT4577_12265C.1.pep
MASQQRARAEGFETALNESVKNCKALAQAAEQKEANRVAMSEAISAFCRAFDLDDVPSASSP

SEQ ID NO: 209503 - protein, 75 aa, Zea mays
  Clone ID: MRT4577_122660C.1.pep
TSSDSCSHSPMSFILIPPSFTDQNPIKKPEVLVLVSLCRARQRETYRQEGLAAGFCLFSSPSGAPFLLIFALVEW

SEQ ID NO: 209504 - protein, 140 aa, Zea mays
  Clone ID: MRT4577_122661C.1.pep
KKKKKKKKKKKKKKKTPSLSPSSDRSFPRPPSPSPSPAGDFHHHRRTAPTLLPSRAMAQTVVLKVGMSCEGCVGAVKRVLGKMEGVESYDVDIMEQKVTVKGNVTPDAVLQTVSKTGKKTSFWEAEAVTSESATPAGATA

SEQ ID NO: 209505 - protein, 71 aa, Zea mays
  Clone ID: MRT4577_122662C.1.pep
DSSFFVSVRRYSLQVPLRQQPKQNSTSFLSVGTWKPCIGGFCKTVAGSTMCRRWLDAYFRVSTQPEICLTY

SEQ ID NO: 209506 - protein, 71 aa, Zea mays
  unsure (1)..(71): unsure at all Xaa locations
  Clone ID: MRT4577_122663C.1.pep
AGEMARTKQTARKSTGGKAPRKQLATKAARKSAPTTGGMKKPHRYRPVTDALRXIRQYHKSTELLIRKLPF

SEQ ID NO: 209507 - protein, 72 aa, Zea mays
  Clone ID: MRT4577_122664C.1.pep
KKRNAVTKSFTLRNKSNGARQKGDIMKESYLSILICKSMVSVTSQIACLSFVKYFFLLEPETSEHVFGSAAI

SEQ ID NO: 209508 - protein, 374 aa, Zea mays
  unsure (1)..(374): unsure at all Xaa locations
  Clone ID: MRT4577_122665C.1.pep
MGDSTSTGFAAALELWQEHQLSILVVASLAIQWFLFVFAPLRQHRIPGLLRLSIWLAYLGSDAVAIYALATLFNSHRCDTDTGRPGVELLWAPILLVHLGGQDSITAYNIEDNELWRRHVVTAVSQVAAAIYVFVKAWPKSLVTTAHQAVNQATLXALLLFFCGITKCVFKPWDLKRVSVNSLVDSSSGSEEKGGESEMNSLQEYVGAATRYFESRGHGRGAGLQEDDGDDDTCKAGEVWKPYNLCVDLAPPYSGRLSCLKHLARSPADEAHRLVKSSLSATFHQLYTKESLKLHDTSHFVFTNNAALNRWKVLTSARGLRTVAAATLLGAIAVFHYGGGAADQVKADVTGTYALLWSAFVMEYVLPTGIHHTF

SEQ ID NO: 209509 - protein, 150 aa, Zea mays
  unsure (1)..(150): unsure at all Xaa locations
  Clone ID: MRT4577_122666C.1.pep
XGXXWXSFXSGVCXXRGVXXXXXLAVFFPFXXAPXRXRXRXLWLXXXXASCLLXPAPRXXXXXGXLGXFLAPAARXGXGVRXXXPCXPLXXXXXVVVRVLPXXLXXXGVVXXLCWARXWXGCAXPSXXGXXAWPXCPXXSCSRXCCASRS

SEQ ID NO: 209510 - protein, 48 aa, Zea mays
  Clone ID: MRT4577_122668C.1.pep
CSSCSPFSVGRSSSDKAPLKTSSRPTGNPLETSCSPLFPGSAKINPTC

SEQ ID NO: 209511 - protein, 49 aa, Zea mays
  Clone ID: MRT4577_122669C.1.pep
LTSKDQSDKIPSSPSIIPGPKGPTLRGTPSIYKKKLLALYLTLPPTLIP

SEQ ID NO: 209512 - protein, 71 aa, Zea mays
  Clone ID: MRT4577_12266C.1.pep
GSLVGAPFFVFCKIAPVQNAKICGCSTLTSQLHRKATAILRNNGMQQPLDFVTVESRANQTKRGRPRHDRG

SEQ ID NO: 209513 - protein, 190 aa, Zea mays
  Clone ID: MRT4577_122670C.1.pep
MRGSEMLTASGGTGTAPSTASSSSAAAADLVAGAGGLGAIGVGGGGGNFPLAVALLAFACANFINLLSIWLKEKRWDARKFLTSAGVMSSLSATVGSLAVAVGQREGADSSAFALALVFAAVVMYDASGIRWHTGRQAALLNQIVCEFPAEHPIISTFRPLREPLGHSPLQVFAGALVGCAVAYFMGKSV

SEQ ID NO: 209514 - protein, 66 aa, Zea mays
  Clone ID: MRT4577_122671C.1.pep
EKHQNPKDGKGKMLTRSKNVIYEYGILRFLSFKESIKVSSREWDELSLGPAQRVVALFKVVEENVN

SEQ ID NO: 209515 - protein, 178 aa, Zea mays
  unsure (1)..(178): unsure at all Xaa locations
  Clone ID: MRT4577_122672C.1.pep
DLVAGAGGTGAIGAGGGGGNFPLAVALLAFAFANFVNLXHLTXRLKEKRWDARKFLTSAGVMSSLSATVGSLAVAVGQQEGADSSAFALALIFAAVVMYDASGIRWHTGRQAALLNQIVCDFPPEHPIISTFRPLREPLGHSPLQVALLHTSIFYSWMQVFAGALVGCAAAYXMGKSV

SEQ ID NO: 209516 - protein, 188 aa, Zea mays
  Clone ID: MRT4577_122673C.1.pep
EGVSDIVSHLLPFLSSLDPPLVFEVGINVLALADVPGGKPEWASTGINAILTLWDRQEFSSMRETIVRAVVTNLHLLDLGMQVSLFKRLLQMVRNLRAESDRMHALACICRTALCVDLFAKESVRRGQKPVPGTDVISLFEDVRVKEDLNSVTSKNLFREELVASLVESCFQLSLPLPELKNSGTESR

SEQ ID NO: 209517 - protein, 232 aa, Zea mays
  unsure (1)..(232): unsure at all Xaa locations
  Clone ID: MRT4577_122674C.1.pep
LAFLARNASRLSSKPPTSITSCRDYCXKSTGDIILNAAYIATPAEDILTGDXQLPTIANRLSLIHXQNFXENPHALPDLLFCCPWCPLYYMRXVILCQSRTLYXKTKDVLTFDDVLTEEXCLPGIIAHKATFEVXGTDNETTTHCRDDSRKSAEXNYEGTARCAKKSRCSNIAPXNQPAQLDIDLNGLXLDRYGIIXTTNHVTTIVEPDMLVDVPHDIDRCAYLNDTDLAAR

SEQ ID NO: 209518 - protein, 69 aa, Zea mays
  Clone ID: MRT4577_122675C.1.pep
GCLFPEYRPAASPTFVPSIHSNLHKRVVEMRQKAVRNGDPSWDLFQFIPPRDLRSGTGLPDCRSVLSPI

SEQ ID NO: 209519 - protein, 53 aa, Zea mays
  unsure (1)..(53): unsure at all Xaa locations
  Clone ID: MRT4577_122676C.1.pep
AAAFPQTNPSTXARACDEXWRPSPYPGGXPFRAXSAXRDRGXDEXVXRQRRYG

SEQ ID NO: 209520 - protein, 153 aa, Zea mays
  Clone ID: MRT4577_122677C.1.pep
PPSLFILRPRLFWDISWVNNFSQEAPLPAMPPPFFNAPYNIPGPPSGPGCLFQSDPPGSFIRGLPFFVLLRGVRIWVLKGLSSSSQPRKLRVDLVAAPLFPQQKNLRLFFCGAPLCARRQQRLALFGGNAFAPSYAKEKRSLVISMVPPYPGM

SEQ ID NO: 209521 - protein, 136 aa, Zea mays
  Clone ID: MRT4577_122678C.1.pep
NLLLNITTTMLSLLSTLLLASSALALPSRVVPRDANTSYPPPAPTATGCTAASTKVSQWTVDEFDFHASYIFSTPAHQNSWGYVNFTLSNPALSYSPVCSAPSNQLSDFFYRNFGYNCEGPAYAGSFKATFTLGPP

SEQ ID NO: 209522 - protein, 58 aa, Zea mays
  Clone ID: MRT4577_122679C.1.pep
QPEIRSDISSRIHQAIATGILPLSPLFLQQPSALLQQLPLVHLVAHNIMAQQLQQLVL

SEQ ID NO: 209523 - protein, 103 aa, Zea mays
  Clone ID: MRT4577_12267C.1.pep
KKSVSHERGKLHAPGKPTLVYITPPSLTIFKQKRAWGPTLAGKRLLCLKFYYPHIYPPPPGGGPITAGGPGIISRGPAKITYGGIWGKKVLNKFGNPRWLPRF

SEQ ID NO: 209524 - protein, 80 aa, Zea mays
  Clone ID: MRT4577_122680C.1.pep
EGSMHERGQKGQLATTKTKATYVSKPREKNGLVLDVVLDILWDYSLVKMQKHNHVSLVLCAIIKTKWGYLSLDYELHLVV

SEQ ID NO: 209525 - protein, 155 aa, Zea mays
  Clone ID: MRT4577_122681C.1.pep
MASDGDHGGALQKPLLPKAARGGGWFRKGTSTAHPSGLSAAAAGTSSKAAALRPTHHVPALLCTLVVALGPIQFGFTTGYSSPAQDGVTRDLNLSISEFSAFGSLSNVGAMVGAIASGQMAKYVGRRGVRTQTTALRRLWVVCFRLIEPHSPTAH

SEQ ID NO: 209526 - protein, 65 aa, Zea mays
  Clone ID: MRT4577_122682C.1.pep
KGKKTQKSARKGGGQEKQFLLRDTIYISPLIMLLLLGVDYSSLSPVLLLGKFYRFCFFFFNNSSF

SEQ ID NO: 209527 - protein, 118 aa, Zea mays
  Clone ID: MRT4577_122683C.1.pep
MPPPPELCRDLLVDIFTRLPPDDPGCLFRASLVCTAWRALLTSPEFARHYREVHRTPPLLGFFENHDTVTPWFAPSSPAASPFPPLFPDRRALHVFDSRHGLVLLRNPIRITENDHAV

SEQ ID NO: 209528 - protein, 86 aa, Zea mays
  Clone ID: MRT4577_122684C.1.pep
RGPNSPRGGIASPPGGVIPRFFQKGLVGFEEIFGESTCLLSEKKMGRLFSKWIKRGGAGLKYSMAGEAGYWALGAGGCTWRGGPPP

SEQ ID NO: 209529 - protein, 112 aa, Zea mays
  unsure (1)..(112): unsure at all Xaa locations
  Clone ID: MRT4577_122685C.1.pep
MCKKISMKLELPLEKMKYDRNLIKQKNPDTFPVTVHIRDTSDILVTSHIKKNLPPDNLTGEQFLYGVKKKNKLTAEKDIIICLNITLPSXAALMSSIYEDNHDXEDXFLYMT

SEQ ID NO: 209530 - protein, 47 aa, Zea mays
  Clone ID: MRT4577_122686C.1.pep
GYPPLICRLQSQAIILLALMHRSLYVKYVRRISYVLHPLIGAKSFSV

SEQ ID NO: 209531 - protein, 134 aa, Zea mays
  unsure (1)..(134): unsure at all Xaa locations
  Clone ID: MRT4577_122687C.1.pep
MGYRESAPSTLRYMGHGESGGWTTTAHXVILPLLEGIEKRVIERVENEAAVMNKRGFEYAXVLDQLEGDRDRRITIDIALRNVDTTKYYCTVIDAPGHRDFIKNMITGTSQADCAVLIIDSTTGGFEGGISKDG

SEQ ID NO: 209532 - protein, 180 aa, Zea mays
  unsure (1)..(180): unsure at all Xaa locations
  Clone ID: MRT4577_122688C.1.pep
EPKEADSAALGDGGCAAERRDRGRFGLEGGSGCSAETTAHQLQIPAHLHLSFLVYRRASLRPXDLRPLSRXTEMATAQELLTFRDVCVDFTLEEWQQLDSAQKNLYRDVMLENYSHLVSVGYLGAKPDVVLRLGRGEEAGMTEGETPTWKYPDVAPLDVNRTGLLWKEASCQHPDAYDEK

SEQ ID NO: 209533 - protein, 76 aa, Zea mays
  Clone ID: MRT4577_122689C.1.pep
GGYVLCAPKTTLPAPPAPITRNILPLRLSGIRATRIYGYLCRAMHPLGTNSFTSTASLLPLLNRVWCSAFRPELTK

SEQ ID NO: 209534 - protein, 39 aa, Zea mays
  Clone ID: MRT4577_12268C.1.pep
NKTLGVKKLIGGRGGNFRANRSGGGNRFGRPFFFRTLGG

SEQ ID NO: 209535 - protein, 111 aa, Zea mays
  Clone ID: MRT4577_122690C.1.pep
SVQVGRELHGDQRDHGAQPQAFTIWSSLSNSSPTDAVYPGRSSGTRAVRIRVQGDDHRPRHWLLCPLCKLPVHDRALRELQLIPKPIGSDQLQACIFSMHTACLPVPNMYA

SEQ ID NO: 209536 - protein, 63 aa, Zea mays
  Clone ID: MRT4577_122691C.1.pep
SFTAAVAAATVAFAKSHRISTGKMGGKKKTVNSFSNIDLADIKAPNDSIVRNNAKTLEFSTHS

SEQ ID NO: 209537 - protein, 80 aa, Zea mays
  unsure (1)..(80): unsure at all Xaa locations
  Clone ID: MRT4577_122692C.1.pep
IYFVLLIIWKEXFDXCSLFMDTLDGENFFKYXXEXXFGKSXXLXMIVXXRLDFIXRGCIFXWVESGXLKVYDXXEKFXIV

SEQ ID NO: 209538 - protein, 58 aa, Zea mays
  Clone ID: MRT4577_122693C.1.pep
KFILHCLVFSVYLGFSVTKGCQSADTEKSTLLLNQRAMITRGHLLLSCHIRCLSQRSI

SEQ ID NO: 209539 - protein, 40 aa, Zea mays
  Clone ID: MRT4577_122694C.1.pep
IRLEGQRVTDVWRGLLPRGLPGVHLLLPGEQPGVREVGRL

SEQ ID NO: 209540 - protein, 156 aa, Zea mays
  Clone ID: MRT4577_122695C.1.pep
MPLGQRPGDKSDARYCGAEVLDFPAGEDLPAVLNHSLASAFDFILVPLVDPNYRPAPGSVLPVSASDLILGPAQWSNHVVGKISEWIDLDSEDERLRFDSELTLKQEIAWASHVSLQACGLPAPQRSFLWNYARVVNQILQGLTHMHVASGEVRAY

SEQ ID NO: 209541 - protein, 71 aa, Zea mays
  unsure (1)..(71): unsure at all Xaa locations
  Clone ID: MRT4577_122696C.1.pep
HPANMGELRAHHTNSASAMLRPPGHQLETEASNRQILCFSEQVELKHLXDVNLCTPKFRILSAILAVFIHA

SEQ ID NO: 209542 - protein, 631 aa, Zea mays
  unsure (1)..(631): unsure at all Xaa locations
  Clone ID: MRT4577_122697C.1.pep
LDFLHLLAGPSLINRSHATRVRVRVYGHEQTSSSATSVIAQPRARPWRPCTRRRAPRSRRWRPPRHPRGRWIRKWSWERWKRHFALIEESERLVDELQLQLQASVYREDYRSAHKLRLAIATTVKNDTVGRAVSDLNMAIDEERYKDAAYIRDHAGTGLLGWWSGISGNLSDPYGLIIRISAEHGRYVARSYDTRQLTSDSSGLPIFEIYFAEANGGYNLQAVHLKPDDSDSDQVPNMLREKLGMDSINISSSSVSKHEEFDGSVNMDDXSDDSNIDAGPGSKDLSSDPTAVPRIKILKVVPMQNVDKDYIINIFDQISEENDDPEVENESSEDAGDEDNSGVAETVSAEENGDESGDESDIEPLVSIDFVIENNDDYASHPSAEAFERMPARLEKRDRFSFSFYTEEYSKKLDAGKAQQTSKKTVRLHTDQQDYDGFVELDRVKLSGSNKKLSILQLGIKRNNKVQKKLHGVTHFSRIQMPISSDPLTGLYLTASGFDSEILSLQRKFGQWREDGPSEEHSDLLFYEYVEAVKLTGDNLMPAGQVVFRAKVGEHYRLPHKGIIPRELGVIARYKGQRKIADPGFQNPRWVDGELLILDGKFIRDGPVIAFFYWTSNVHLFEFFRQLKLPD

SEQ ID NO: 209543 - protein, 701 aa, Zea mays
  Clone ID: MRT4577_122698C.1.pep
MASVYTAPRAPLPTVASSSSSARQVDPNPSGSRFLAGRRLRVVRRLAGAAPSRRAPWVCYSARSPDADAGDEQRRRGWDAMLHDAFQGAVRRWSEYVSNYWPLPPSVKEAGTGKRVGSSYDEEVMNGDEEEMKVGEEEGKWSWERWRRHFALIEESERLVDELQLQLQAAVYREDYRTAHKLRLAIAATSKNDAVGRAISDLNMAIDEERYKDAAYIRDHAGAGLLGWWSGISGNLSDPYGLIIRISAEHGRYVARSYDTRQLASDSPGLPIFEIYFAEANGGYNLQAVHLKPDGSDSDQVPNMLREKLGIDSINISSSPLGSKHEEFDGSVNMDDKDSDDSNIAAGPGSKNLSSDLTAVPRIKILKVVPMQNVDHDYIINIFDQISEEDDDNDNHEVENESSEDVDNDDNSGVAETVSAEENGDESGDESDIETLVSFDFVSENNVYASRPSAEAFERMPARLEKRDRFSFSFYTEEYSKKLDAGKARQTSKETVGLHADQQDYDGFVQLDRVKLSGSNKKLSILQLGIKQNNKVQQKLHGVTHFSRIQMPISSDPLTGLYVTTSGFDSEILSLQRKFGQWRDDGSSEEHSDLLFYEHVEAVKVTGDNLMPAGQVVFRAKVGERYQLPHKGIIPRELGVIARYKGQRKIADPGFQNPRWVDGELLIIDGKFIRDGPVIAFFYWTSNFHRFEFFRRLRLPE

SEQ ID NO: 209544 - protein, 51 aa, Zea mays
  Clone ID: MRT4577_122699C.1.pep
MSSLTTAASSSSSMEEHCYSVSAEEVVGTHLSLGIGGGGGGGDKRMLTTPR

SEQ ID NO: 209545 - protein, 70 aa, Zea mays
  Clone ID: MRT4577_12269C.1.pep
LNSPNTLHYNKYIHPITPTQTFSLTQFYKKNTFYLYPSSSITNQQNNNFYFTLIIIYKFFTTSKSSLNNP

SEQ ID NO: 209546 - protein, 104 aa, Zea mays
  Clone ID: MRT4577_1226C.1.pep
LVVLFCFWRRKTPNLLLGLHVLSQGTLQTFGTSNVPPGSSCMGVYLDHPPGMNFSIHRSRLRGTGCGANRPCPEATKKEITCPDQWAQEDIRSGQQHISFSRKC

SEQ ID NO: 209547 - protein, 74 aa, Zea mays
  Clone ID: MRT4577_122700C.1.pep
EWWCAAWCDAACACDGVKCVAIPAVAAADSQQSTQPRENHLLPNGALFAQTRSKSSHEILPPRDTSCTTLPTKS

SEQ ID NO: 209548 - protein, 138 aa, Zea mays
  Clone ID: MRT4577_122701C.1.pep
PLFHRAQRPDFGLLAAVMVLHRSSPVPMVQPSLLGHLRLCSPLALCRAPCLLVALPQVQEVFLPHRCYHSWPVAVSIYTTTLPSSSVLYHRSSSSQLRESSTPLGLDGLSASRCGGLVKSVVRLSVTITKTLTYHHRR

SEQ ID NO: 209549 - protein, 69 aa, Zea mays
  Clone ID: MRT4577_122702C.1.pep
QFSPGRVFAPVFPKIGTKFGSNKKDHKFNKIKKKKKKKKKKKKKKKKKKKKKKKKKKKRKKKKKKKKSL

SEQ ID NO: 209550 - protein, 49 aa, Zea mays
  Clone ID: MRT4577_122703C.1.pep
PLFFFFFSFFLEGILVFLIQKNHINNSNNLGKQTGLPRLYNPDYIIQII

SEQ ID NO: 209551 - protein, 105 aa, Zea mays
  Clone ID: MRT4577_122704C.1.pep
LCKPTVCLPCACLQNEVSVLSPRVAFLDQQRTILSVGNSHLKQRIAALAQDKIFKDAHQEELKKEIERLRRVYDQQNLRMSAGGAAASDHGPPPPVVRAEKELMS

SEQ ID NO: 209552 - protein, 354 aa, Zea mays
  unsure (1)..(354): unsure at all Xaa locations
  Clone ID: MRT4577_122705C.1.pep
MDATLSTTTTQDSLLFLLPSAATLLSPLLTVLLVAVSLLWLFPGGPAWAFVSRSRATPPGAPGLVTALAGPAAHRALASLSXPCPAXALSAFSVGLTRLVVASQPDTARELLASAAFADRPVKDAARGLLFHRAMGFAPSGDYWRALRRISSAYLFSPRSVAAAGPRRAAIGERMLRDLLSGAAGREVVMRRVLHAASLDHVMATVFGARYDAASPEGAELEEMVKEGYDLLGMFNWGDHLPLLRWLDLQGVRRRCRSLVGRVNVFVARIIEEHRHKKDDAIGEPAAAGDFVDVLLGLDGEEKLSDSDMIAVLWEMIFRGTDTVAILLEWVMARMVLHPGIQSKAQAELDAVVG

SEQ ID NO: 209553 - protein, 119 aa, Zea mays
  Clone ID: MRT4577_122706C.1.pep
FQYLSRPQEVLGLFEKMFERGCQPRMDTYVMLIKRFGRWGFLRPVFIVWKAMEKQGFSPDAFAYNALIDALLQKGMVDLARKYDEKMLAKGLSPKPRKELGTKLPEAEFDSDNPLDGVL

SEQ ID NO: 209554 - protein, 79 aa, Zea mays
  Clone ID: MRT4577_122707C.1.pep
SVKQVILHLAVVAILVQETGFTRFGCLYALLAPCWPFQLQSPPLLRMRYELITGNSECDSLCRWLCRIFNVCQPTYLSG

SEQ ID NO: 209555 - protein, 72 aa, Zea mays
  unsure (1)..(72): unsure at all Xaa locations
  Clone ID: MRT4577_122708C.1.pep
FYFIQDTTSKYISKYEIXDDTQDFIPHALALNLHYTYLLXPAIDTNNMMKHFTKSLDHFXGRSPYIYPLYTF

SEQ ID NO: 209556 - protein, 89 aa, Zea mays
  Clone ID: MRT4577_122709C.1.pep
NDRLGPSGPRSLCNACGLFWANRGALRDLSKRHQEHSLPPVEQVDEGNDSDCRTATADPAHNNLHAFSEHDNPALVADHKVFQSQKMLK

SEQ ID NO: 209557 - protein, 122 aa, Zea mays
  unsure (1)..(122): unsure at all Xaa locations
  Clone ID: MRT4577_12270C.1.pep
PPAGRPLGGVKGREEAEGPPPPSPPPREGWRVHYASGPPRCVGRFPGGAGTPGFLTGPPPVAPPPLLLXARSVGSPDFTPEAPGPEGAGKPEGTPSSAPPPAPPGPPPGGPRAPPPRGRPAG

SEQ ID NO: 209558 - protein, 49 aa, Zea mays
  Clone ID: MRT4577_122710C.1.pep
ISYEELATHLSAEIDSVLSDTHNSKPVILENISFCFVMKDTQDDQHKLG

SEQ ID NO: 209559 - protein, 80 aa, Zea mays
  Clone ID: MRT4577_122711C.1.pep
YPPGPAGLRIPSSSLSPVVLCCRPHGEKGCADAICQHQETMPYTHSAGTAVVSSDPKYRIYDVGMNRKGEGAHHLLCTPC

SEQ ID NO: 209560 - protein, 47 aa, Zea mays
  Clone ID: MRT4577_122712C.1.pep
FFFFFKTTYRVYTIMFHQTETFYLYIRYCFIELKRFIMKPPVVFYSS

SEQ ID NO: 209561 - protein, 78 aa, Zea mays
  Clone ID: MRT4577_122713C.1.pep
MSKSQHILFGLTDTMCDLRASGSMSAWVGVYRLSYSVSRPDLLSLPHTCSTQCQIAFENGSLSSMTMAADKFESALID

SEQ ID NO: 209562 - protein, 119 aa, Zea mays
  Clone ID: MRT4577_122714C.1.pep
QEGCRPMVHTYTPIVQGYCRQGQIEEATNLIGFMEEAGCPPNAVTYNVLIRALCDDARFAEVEQVLAEIETKGHELSTVTYNIYMDALGKKGMAKEALKQFEALQCKGLHPTAFTLSII

SEQ ID NO: 209563 - protein, 84 aa, Zea mays
  Clone ID: MRT4577_122715C.1.pep
PLRHPQLHHPLLVPGRIVVVPGAGPVVVASSGAAPANRLRSYVTASPETVKSFVYWSATRCCRPPGIFNNNGVCRLPVKKKKKK

SEQ ID NO: 209564 - protein, 51 aa, Zea mays
  Clone ID: MRT4577_122716C.1.pep
KWQDRSGYVASPKTRRRADIAANRKETLTRGQLESVTGTDQQGAERGHVGV

SEQ ID NO: 209565 - protein, 39 aa, Zea mays
  Clone ID: MRT4577_122717C.1.pep
TAMTPSFEATTWTSSRRKTRRCADENAYINILASEKYSA

SEQ ID NO: 209566 - protein, 69 aa, Zea mays
  Clone ID: MRT4577_122718C.1.pep
VNCDPRVAEPVLFVSPHPPLGVKRLLPKSMSLVPGGPRFNFKCCFGKKKKKKKKKKKNKKKKKKKKKTP

SEQ ID NO: 209567 - protein, 66 aa, Zea mays
  Clone ID: MRT4577_122719C.1.pep
IGGSTNKPLIKMLVNVLVSGHFQQAVGNQFFRWQPFINRVLSSVVQPVSYSMQSPFANGSSLCSGV

SEQ ID NO: 209568 - protein, 67 aa, Zea mays
  unsure (1)..(67): unsure at all Xaa locations
  Clone ID: MRT4577_12271C.1.pep
THGLPVQGIEIRVNKSGCEGCGNRALRFKTNKRILVRFVVRVQLHCSPCVCVCLAYXQQKKQTKSSS

SEQ ID NO: 209569 - protein, 180 aa, Zea mays
  Clone ID: MRT4577_122720C.1.pep
GGVAGVSSRYRRTPPTVSRHTLVPNRLVVRLLLYRRSAATELCQRWTTLVPRRRIPPGLGGRGRRWPPVTGENRRICHTLACAPGASTASTALIHPLGSGSADEVAAASQTPLAMSRRRMPKVPGVRRPLRCQARRMDLIFRIEARHPGELHPPRRPKRAKPNRGSTPRVGARASSTALT

SEQ ID NO: 209570 - protein, 61 aa, Zea mays
  unsure (1)..(61): unsure at all Xaa locations
  Clone ID: MRT4577_122721C.1.pep
MINFVLLISREGNVRLTKWYSSYSQKERSKVIGELSGMILSRXPSXCNFVEWRGDKVVYKR

SEQ ID NO: 209571 - protein, 217 aa, Zea mays
  unsure (1)..(217): unsure at all Xaa locations
  Clone ID: MRT4577_122722C.1.pep
RSIRPLTQFSTCRGGGPIIHLAQAPRPFSTTPTQAASAPSPAAAVTDLCRRPADRGPAPASXARRPPPSRPADRGPASSLHPPAHRPPASGLRPPWAASCPQPTWPSPXSGPRPPVSSRPRLLVSAPAVVVPHWAEEEQLPVPGADLERRGAQVGGGVAGETEVSQKEPYQKKSSSATAYVTKILRRPGRSRPVSPASGLGSPFTLHLEIFIHSIQS

SEQ ID NO: 209572 - protein, 87 aa, Zea mays
  Clone ID: MRT4577_122723C.1.pep
WIEGTYQSQLIDSTPPKTAELKHNHAERVGAGARAYLYAVLEHIAAEVLELAGNADRDNRKNRIVPCHIQLAVRNDEELSRLLCTVT

SEQ ID NO: 209573 - protein, 46 aa, Zea mays
  unsure (1)..(46): unsure at all Xaa locations
  Clone ID: MRT4577_122724C.1.pep
PKSLMHVLFRLTLLPVSPHDYCKCRXYCSSILAIESTTREVHQRNP

SEQ ID NO: 209574 - protein, 108 aa, Zea mays
  Clone ID: MRT4577_122725C.1.pep
AIHIQDHRGIECALPSHLVCTCRSQHMAHPCIDYRHPDSTAIVTAHRIHLAVVHVIQKALQHLKDRSQQYSKKSSAHMDIIVSSSKGFVDSSVKLVKFCGVKAYHHRL

SEQ ID NO: 209575 - protein, 38 aa, Zea mays
  Clone ID: MRT4577_122726C.1.pep
NPPGFFKKKKKKKKKKKKKKKKKKKKKKKKKKKKTREG

SEQ ID NO: 209576 - protein, 62 aa, Zea mays
  Clone ID: MRT4577_122727C.1.pep
QALYINLILGSVMITHSCCIIDHVHICGLIFSSFIKFYIIVSMSFVHGCLCHVISGVSAVPR

SEQ ID NO: 209577 - protein, 229 aa, Zea mays
  Clone ID: MRT4577_122728C.1.pep
PVRPGILLYIFTWEPRVFASHTPKQLKMGKVLLVLYDGGIHAEQEPQLLGTTENELGIRKWIEEQGHELGTTSNKEGEDSEFDKHLVDAEVIITTPFHPGYLTAERLAKAKNLKLAVTAGIGSDHVDLNAANKTNGGITVAEVTGSNVVSVAEHVVMTILTLVRNFVPAHEQIAKGEWNVAEVAKNEYDLEGQVVCTDAVGRIGERVLRRLKPFDCKELLYFDYQPLSA

SEQ ID NO: 209578 - protein, 399 aa, Zea mays
  unsure (1)..(399): unsure at all Xaa locations
  Clone ID: MRT4577_122729C.1.pep
MELVAWLVIVSSVSLAGLLPVVSASTTTPQQQCGGNNVGPAGVRAGYWSPSSNRYSAVGSIDASLYTHLYYSAVTIDETSCAVAPPPPTAEGASLLAAFSGAVKSASPSTRTVLSVGXRVQGGRVERXAFSRMASDAGLRAVFINSSLDLARANGFDGLDLSWIFPATQADMQNLGALLAEWRARITEESVAKSLPPQPQPLLLTATLYFSNHLFGTPDGNLDYPVDAIASSLDWANVLTFGFRGDSGVTAADAPLYDTSSHFSASYGVVSWLDAGLPPCRLVMGIPLFGRSWFLRNKAKNGLGAPAAAAGTKQRRSNQTGIIAYAETEEYLSSQGTVVTYDDQSVAEYFCSGDLWVSFDGAQVVQRKLEFAARSQLLGYFLWTVGFDDSNSTISRKGQ

SEQ ID NO: 209579 - protein, 49 aa, Zea mays
  Clone ID: MRT4577_12272C.1.pep
NEPALESSGLVLGCVMLSIISVLGCAPWCRQPPGTRVCRRVSCALNGRG

SEQ ID NO: 209580 - protein, 144 aa, Zea mays
  Clone ID: MRT4577_122730C.1.pep
LGFLFFFFFFFFFFFFFFFFFFFFFFFFWAISGIFLKKALPPQQKSLIGQGRVYTTIAPGGPPQPPKGNSSGKTKTPFPPKDPPTKQGGKAPPPEKAPPPKYRKNIGPPFIQPLKENFFPGKAAKFGASFLGPPASFSRALSAR

SEQ ID NO: 209581 - protein, 149 aa, Zea mays
  Clone ID: MRT4577_122731C.1.pep
HPCQPQSRGGRCLLAVQSSGSQHSLPGSLVLHLSRFEVRVGSPTRGARLVTRSRPHWVPPWALRHRPSPLRLGLASVPSRCLRNACSRSTSWCVVRVVIQAPLGDGHGRAAGQKRNRVRPTRSFGRRQAWPVDTDAVHIIHSALECAAF

SEQ ID NO: 209582 - protein, 93 aa, Zea mays
  unsure (1)..(93): unsure at all Xaa locations
  Clone ID: MRT4577_122732C.1.pep
GICGEHGGEPSSVAFFAKAGLGXVPGSLFRVPIARLAAAQVLALGCLLIGNRFACFWGIGGPPVFFPDPPFEPFSGPSSFKLSIPMPFFPQPV

SEQ ID NO: 209583 - protein, 81 aa, Zea mays
  Clone ID: MRT4577_122733C.1.pep
RVDPGVGWRFLGQVGVAPRKFFPPLGEDAFRPFLDHYWGPKFRLEFSVPKALPPLEFFADKGNACSPWVLLWGPLKLGCPN

SEQ ID NO: 209584 - protein, 447 aa, Zea mays
  unsure (1)..(447): unsure at all Xaa locations
  Clone ID: MRT4577_122734C.1.pep
MDASHPEGEATAGWLTGEEWSGSSASALSRTAVLTASASSLTAHSFGSRWERIGSRMLGAFVPEGFPGXSVTSGFXIPFQAVWXMVQSPPHYIRCMLSSTTLFWAGGIGVQEQSAIEIGAHCQPAAAYLRAARLRVTLSLELENYLDFNQKGQDQVFMNENDVGMFIVVSTVLFSLTLIMCLRSLSRSFTGVASGATRAALTQHFALXNNAADISAKEGSQETLATXMLGMGLGMLXLAQITRGHALSVWASFLSLTMFHMYANYKAVQSLSLTTLNYERASILLQYFKECGEVLVPRKVSQQEHILPSWSNWRKLNRIKLPHERVHLGAKASMLTHSDMLVIAKTRYHYENANYFLLDKQGIVYVFIHKEATPADVLRSFVHGLVLASSTQNSKPQHLEARRWMDEMYTSFISKLQTEGYSTERLLSHSILWRAHWLHGQLDEKLK

SEQ ID NO: 209585 - protein, 447 aa, Zea mays
  unsure (1)..(447): unsure at all Xaa locations
  Clone ID: MRT4577_122735C.1.pep
MDASHPEGEAPAGWLTVVEWSGSSASALSRTAVLTASASSLTAHRFGSRWERIGSRMLGAFVPEGFPGSVTPDYVPFQMWDTLQGLSTYIRAMLSTQALLGAIGVGEQSATVIGATFQWFLRDLTGMLGGILFTFYQGSNLDSNAKMWRLVADFMNDLGMLMDLLSPLFPSSLIVIMCLGSLSRSFTGVASGATRAALTQHFALANNAADISAKEGSQETLATMLGMGLGMLLAQITRGHALSVWASFLSLTMFHMYANYKAVQSLSLTTLNYERASILLQYFKECGEVLVPRRVSQQEHILPSWSNWRKLNRIKLPHERVHLGAKASMLTHSDMXSKFWLVIAKTRYHYENANYFLLDKQGIVYVFIHKEATPADVLRSFVHGLVLASSTQNSKPQHLEARRWMDEMYTSFISKLQTEGYSTERLLSHSILWRAHWLHGQLDEKLK

SEQ ID NO: 209586 - protein, 62 aa, Zea mays
  Clone ID: MRT4577_122736C.1.pep
CVCFFFKESSYSMPFCGYKQAPKKFLTAYRPEPARSYDNQMPKEPASTMTFLAGVRVTTSIN

SEQ ID NO: 209587 - protein, 64 aa, Zea mays
  Clone ID: MRT4577_122737C.1.pep
YSSLSCSRMPPARASGTAAQQLVIVASCFEGVSLGAGRLTQQKSFVFSYASCPSLEFPPARGTQ

SEQ ID NO: 209588 - protein, 108 aa, Zea mays
  unsure (1)..(108): unsure at all Xaa locations
  Clone ID: MRT4577_122738C.1.pep
IICGTYGWSLXPISQHFDEVLRGILXLSHEFIKLPDLETTLPEDPEWKXFEDCLGALDGTHIHVNIPLTDQGRYINRKQWNTTNVPLTECSCWREGCSPPRSVFFNNN

SEQ ID NO: 209589 - protein, 118 aa, Zea mays
  unsure (1)..(118): unsure at all Xaa locations
  Clone ID: MRT4577_122739C.1.pep
KSWRSLGKMVVSKCRKMLXPEKRKLGAGICHLSPKDFSKGLKIVAQDNLSFLTKAKKVGFVMDAQSETTFWRVKFFLREALERQANVAFGKMGENPKKKRGICNVLAKTPSRGVKKQP

SEQ ID NO: 209590 - protein, 74 aa, Zea mays
  unsure (1)..(74): unsure at all Xaa locations
  Clone ID: MRT4577_12273C.1.pep
SAQVMNLGFYRPVRMAIPEGLTVKVHQNTGISVSGYTKSAIGQFSFTIMKXSPPEPYRVKGMIYMDLLVLRKEA

SEQ ID NO: 209591 - protein, 42 aa, Zea mays
  Clone ID: MRT4577_122740C.1.pep
MSRTLHRARASSLKAQSRHRTPCTCRLQTQCRFSGRSPEPLP

SEQ ID NO: 209592 - protein, 66 aa, Zea mays
  Clone ID: MRT4577_122741C.1.pep
KEGNPGLPARVRPLIACCHPPPLRVQKFWWSRRLCSLPKVFPLSRPPGPLFWGGLCFSAGIRPVFL

SEQ ID NO: 209593 - protein, 160 aa, Zea mays
  Clone ID: MRT4577_122742C.1.pep
LELWADLCACTNTHKSKDTSTKDANDILGGDTFNMDGTNTNNLRVATTINIITRAGHDRTLTRFRILKSNTICSIRRYGYGTSTISSRWLKDENDPLDTNSQHRMSNKIVNGPSTHVHEDISPYSISRKTYHENTKTDDLGHFTTTDTNHRFNTTRISNG

SEQ ID NO: 209594 - protein, 41 aa, Zea mays
  Clone ID: MRT4577_122743C.1.pep
LPGPTPKPIPPPLAPVTGVWRRTVTSECTTPSTYIGQSHPS

SEQ ID NO: 209595 - protein, 112 aa, Zea mays
  unsure (1)..(112): unsure at all Xaa locations
  Clone ID: MRT4577_122744C.1.pep
RNSRVDPRXPSTLYXWTPDVLCLESGDIIHLWEDNMRLVRSISLCSSKFLSHDVQTVRRRTADIVIVNWSDENDKLLQQHITYTLPITCCYEDANYEWINISHCSVRAFVDL

SEQ ID NO: 209596 - protein, 96 aa, Zea mays
  Clone ID: MRT4577_122745C.1.pep
LNFWARVLGLDWPRRPLQRGGEPNFRFLFFRVCLPRQCFKSSLKLFPLWPPNDGANWVPGWVWIFSFQGLGEGFPFFFAPNGAERVETRVKPGSNV

SEQ ID NO: 209597 - protein, 129 aa, Zea mays
  Clone ID: MRT4577_122746C.1.pep
FVSVASPFSVCPRHSNCSNACLGSLQQRLLPALTSPQPSLVHLVPEMPQVFHLSHGVRSLNPHRPFMCLPLLRCDQRFQLHHLHSPCPLRPELPPSDGTTPSVLPSSLALIRSPPCRGPHGGCSLPDAR

SEQ ID NO: 209598 - protein, 47 aa, Zea mays
  Clone ID: MRT4577_122747C.1.pep
IPGGRHARPNVQALRAGSTRFGAGARAVPYEPARPHITVRPAAGHHS

SEQ ID NO: 209599 - protein, 47 aa, Zea mays
  Clone ID: MRT4577_122748C.1.pep
HTFGVFLKHCPPICSPLLPHNIRYVGISNSSIVTVGSKAANLYYLLT

SEQ ID NO: 209600 - protein, 43 aa, Zea mays
  Clone ID: MRT4577_122749C.1.pep
IKYTPSKKWTNVSCYMNHEMEFFKNRWTFITLSSRPGDAFSPR

SEQ ID NO: 209601 - protein, 725 aa, Zea mays
  Clone ID: MRT4577_12274C.1.pep
SLVLPSSDPKQGMSFGDLDGGGSKRKKPYNRHAPRQIEQLEAMFKEFHHPDEKQRAQLSRQLGLDPRQVKFWFQNRRTHLKNQLERQENARLKQENDKLRVENLSIREAIRDLVCSCCGGPAVLGELSPEEHQLRLENARLRDELARVCTVTSKFIGKPMSHMELLLAKEPHPITGSSLELAVAVGVGSGVPSSKMPVSTISELAGSTSSSTGTVTTPMVTASLPMVSIVIDKSKFAQLAVSAMNELVKMARMNEPLWIPTIPSPGSPIMETLNFKEYLKAFSPCVGVKPTGFVSEASRESGIVTIDSSAALMEVFMDERRWSDIFYCIVAKASIVEEILPGVAGSRNGALLLMQAELQMLSPRVPIREVTFLRFCKQLAEGAWAVVDVSIDGLQTDQCLDTNTKCRRLPSGCVLQDTPNGCKVTWVEHAEYPEASVHQLYQPLMRSGLALGAGRWLATLQRQCECLAILMSSLAAPEHDSAAVSLEGKWSLLKLARRMMENFCAGMGASSSREWSMLDGLTGSMGKDVRVMVQNSVDEPGVPPGVVLSVATAVWLPVTPERLFNFLRDEELRAEWDILSNGGPMQQVLRITKGQLDGNSVALLRSDHTDSHLNSILILQETCTDRSGAMVVYAPVDFPAMQLVLGGGDSKNVALLPSGFVILPAGSSAGGVGHKSRGSLLTVAFQILVNSQPTAKLTVESVDTVYSLISCTIEKIKAALHCDVC

SEQ ID NO: 209602 - protein, 58 aa, Zea mays
  unsure (1)..(58): unsure at all Xaa locations
  Clone ID: MRT4577_122750C.1.pep
SNSIXCLRQDXXXLRXWAVANPLVAAFLQXQHLLPYNRLSLMNPVLSRQQPIVGGAMF

SEQ ID NO: 209603 - protein, 81 aa, Zea mays
  Clone ID: MRT4577_122751C.1.pep
YLQIRLSSGTTQRLFFFFFFFFSFFFFFFFGERTIYISRFLIWLQVPVVLIPQGQNLIHSPQVPGGGTPPGNHWMRATPDA

SEQ ID NO: 209604 - protein, 63 aa, Zea mays
  Clone ID: MRT4577_122752C.1.pep
KSDNHPTPYKFYSISKTNPQGPTKKIEIIQHLLYILGLKKNKVMTVSTHSKKSSPCKKKQQSP

SEQ ID NO: 209605 - protein, 49 aa, Zea mays
  Clone ID: MRT4577_122753C.1.pep
RRPPQASRWARHGSRCPHPSRLPRPPHQPLDGDMTARPWSSARPSKKPL

SEQ ID NO: 209606 - protein, 200 aa, Zea mays
  Clone ID: MRT4577_122754C.1.pep
ARIRLEHFHASKAPDHPSMTTSSSEVTVCSHLFTVRGYTHTRGIGVGRSIESQAFDAAGHRWSVVFYPDGDDQDARGHISIFVRLIGSGGAGDVTVLYGFSLVDPSGAAPASEASKAPKVATFRHSAGGDYRGIGRFMEHQRFEASPYLRDDCFTIKCIIGAVERPGLPPLPAAASELHHDFDRLAVDGGRSEDAMSDVD

SEQ ID NO: 209607 - protein, 126 aa, Zea mays
  Clone ID: MRT4577_122755C.1.pep
MTSMLSAFSSWFVNPRRNPLARIHMLTISNRLKNYGLRYDDLYDPYFDLDIKEALGRLPREVVDARHQRLKRAMDLSMKHQYLPDDVRALQTPFKSYLSDMLALVKKEAAERKALGALPLYERTLP

SEQ ID NO: 209608 - protein, 91 aa, Zea mays
  Clone ID: MRT4577_122756C.1.pep
WNYLITLLIVAALLYTLGLDVNAICIGMLLATLSQTDVLVFITSETDWEKQVEVGQEMLKIQVMEENIRLQGSRLNPHAGPQLHCVSLVFH

SEQ ID NO: 209609 - protein, 56 aa, Zea mays
  Clone ID: MRT4577_122757C.1.pep
VFGNNLKGENVSKKNFRGEKQGVSIFTSYYTGAGGARIGSLFPKGSCPALDWCCWG

SEQ ID NO: 209610 - protein, 123 aa, Zea mays
  Clone ID: MRT4577_122758C.1.pep
GRPAAVHLSTSAKCHQCLANMYQSTSLHVVYLHQQPRLDQQPPQNRSFVCPVYAVTTYDRAAPRSPPRSLAHRRGRTGPAPLDPRQQAGARREGAEQQRPGGRLAPRRNRPERSRWPSEWISR

SEQ ID NO: 209611 - protein, 139 aa, Zea mays
  Clone ID: MRT4577_122759C.1.pep
AETVQLHVVQELWDMLSVDQPESKGEFEDSVDQLMLLLSKESMSANTLSKAFRICGQLQGMEMLMLLDSGSSHSFLNSVRTTDLSGFVPLDTPLSVRVANGNVLLCSVELPNAQWSVQGVTFSSTFKVLPVPFYDIILG

SEQ ID NO: 209612 - protein, 49 aa, Zea mays
  unsure (1)..(49): unsure at all Xaa locations
  Clone ID: MRT4577_12275C.1.pep
TCAVAFQADLARLRPTRVLGSVQHAARRGKFRCVYWGQSTXIKFINSLT

SEQ ID NO: 209613 - protein, 106 aa, Zea mays
  unsure (1)..(106): unsure at all Xaa locations
  Clone ID: MRT4577_122760C.1.pep
RIRRSYLRSQVRHKKPATEYVSRQSKLIKMRSRWWRGPPCSRAATTELRRRKRSSSRPTWKAYDTRRLGELLLISLXWRAFPALLKNPPQNPVLLAEKNARKHKKT

SEQ ID NO: 209614 - protein, 145 aa, Zea mays
  Clone ID: MRT4577_122761C.1.pep
MPLQDINNDENALVNDVEERSKEEHPSTESLKGSKRRSSFSAKPEYPENGSKNSPALPSYMAATQSAKAKLRGNSSPKLSSDSAEKNGFTRRHSLPSSNNGKMVSHSPRTQRPANAGGKDGAKGDKAMLSSRDASERPLKAEWRR

SEQ ID NO: 209615 - protein, 58 aa, Zea mays
  Clone ID: MRT4577_122762C.1.pep
MLMTPKGHKRTITSSLAPPATHASAAWFITLLQENGDFWRLLSFNLTGVKPPSAKSMP

SEQ ID NO: 209616 - protein, 110 aa, Zea mays
  Clone ID: MRT4577_122763C.1.pep
RIFNSDEFQSVVNPIKKNAKRFVFKKNPLKNLNVMLKLNPYAKPPKRMSLLVEAQRVKAKKKKLPKKRKPVTKEEGLAIKAAGKLWYKIMFSDSDYPEFDNFPKWLGASQ

SEQ ID NO: 209617 - protein, 35 aa, Zea mays
  Clone ID: MRT4577_122764C.1.pep
VEHSPKLLHNSSTIILSLLTYHQCLLHRPHYLICT

SEQ ID NO: 209618 - protein, 44 aa, Zea mays
  Clone ID: MRT4577_122765C.1.pep
VVNLLHDILVSDLKILRSFCHVIASYMFKLNSQQQKCITLCIVH

SEQ ID NO: 209619 - protein, 41 aa, Zea mays
  Clone ID: MRT4577_122766C.1.pep
RNWKLMAQPTKNQVLNPLQPLNQPGRSMGQCHTPPNAAAVG

SEQ ID NO: 209620 - protein, 214 aa, Zea mays
  unsure (1)..(214): unsure at all Xaa locations
  Clone ID: MRT4577_122767C.1.pep
MVLSHAASAGSSDDSVRSTFASRYVRASLPRFRMPENSIPKEAAYQIINDELMLDGNPRLNLASFVTTWMEPECNKLMMDSINKNYVDMDEYPVTTELQNRCVNMIAHLFNAPLGETETAVGVGTVGSSEAIMLAGLAFKRRWQNKMKAAGKPCDKPNIVTGANXVQVCXWEKFARYFEVELKEMKLSEGYYVMDPEEGVEMVDENTICVAAIL

SEQ ID NO: 209621 - protein, 192 aa, Zea mays
  unsure (1)..(192): unsure at all Xaa locations
  Clone ID: MRT4577_122768C.1.pep
MVLSHAASAGSSDDSVHSTFASRYVRASLPRFRMPENSIPKEAAYQIINDELMLDGNPRLNLASFVTTWMEPECNKLMMDSINKNYVDMDEYPVTTELQNRCVNMIAHLFNAPLGETETAVGVGTVRSSEAIMLAGLAFKRRWQNKMKAAGKPCDKPNIVTGANVQVXCWEKFARYFEVELKEVKLSEGYYV

SEQ ID NO: 209622 - protein, 490 aa, Zea mays
  unsure (1)..(490): unsure at all Xaa locations
  Clone ID: MRT4577_122769C.1.pep
MVLSHAASAGSSDESVHSTFASRYVRASLPRFRMPENSIPKEAAYQIINDELMLDGNPRLNLASFVTTWMEPECNKLMMDSINKNYVDMDEYPVTTELQNRCVNMIAHLFNAPLGETETAVGVGTVGSSEAIMLAGLAFKRRWQNKMKAAGKPCDKPNIVTGANVQVCWEKFARYFEVELKEVKLSEGYYVMDPEKAVEMVDEXNTICVAAILGSTLTGEFEDVRRLNDLLAANNRRTGWDTPIHVDAASGGFIAPFLYPDLEWDFRLPLVKSINVSGHKYGLVYAGVGWVVWRSKEDLPDELIFHINYLGADQPTFTLNFSKGSSQIIAQYYQLIRLGFEGYKDVMQNCRDNAAVLREGINKMGYFDVVSKDSGVPLVAFSLKDSSKYTVFEVAESLRRFGWIVPAYTMPADAEHVAVMRVVIREDFSRGLAERLIADLGKTMADMDAHAGRKQAPEQPKKSVHDIEKEVTTFWRRLVANSKKKSSMVC

SEQ ID NO: 209623 - protein, 223 aa, Zea mays
  Clone ID: MRT4577_12276C.1.pep
MEKTVVLYPGVGVGHLVPMVEVAKLFLKHGLAVTVVLIDPQVESTDFSAAVARARASNPSVAFHVLPPPPADSNSNSAPTHPVIQIFRLLKSMNAPLLDFLRSLPSVDALVLDMFCVDAQDVAAELKLPVYYFYASAAADLALFFNLPSKLAGSKVKELGDSIITFPGVPPLKASDLPEVTHNDEVLKAISGMFDRMPDANGILINSFESLETRAVRALKDGL

SEQ ID NO: 209624 - protein, 534 aa, Zea mays
  Clone ID: MRT4577_122770C.1.pep
MGDWVPRGRPGSSDLLLSSRTRQIYRQRTAKARGPQPLSPKGEDEMALSTTNTNAAESQLHCSTFASRYVRTALPRFKIPEQSIPKEAAYQIINDELMLDGNPRLNLASFVTTWMEPECDKLIQSSINKNYVDMDEYPVTTELQNRCVNMIAHLFNAPIGDDETAVGVGTVGSSEAIMLAGLAFKRKWQNKMKAAGKPYDKPNIVTGANVQVCWEKFARYFEVELKEVKLKEGYYVMDPEKAAEMVDENTICVAAILGSTLNGEFEDVKLLSDLLTAKNAETGWDTPIHVDAASGGFIAPFLYPELEWDFRLPLVKSINVSGHKYGLVYAGVGWVIWRSKEDLPDELIFHINYLGADQPTFTLNFSKGSSQIIAQYYQLIRLGFEGYKDVMQNCRDNAAVLREGINKMGYFDVVSKDSGVPLVAFSLKDSSKYTVFEVAESLRRFGWIVPAYTMPADAEHVAVMRVVIREDFSRGLAERLIADLGKTMADMDAHAGRKQAPEQPKKSVHDIEKEVTTFWRRLVANSKKKSSMVC

SEQ ID NO: 209625 - protein, 58 aa, Zea mays
  Clone ID: MRT4577_122771C.1.pep
TPLGFQKFYQHPAGWEEHITRVQKKSPGFKPRSKHFWKTMLANRCIQAKPSSGGLLEN

SEQ ID NO: 209626 - protein, 231 aa, Zea mays
  unsure (1)..(231): unsure at all Xaa locations
  Clone ID: MRT4577_122772C.1.pep
MRMATSPCPSALQTFVGTAPHVPTPLFAEVRMTIRKTAAKENSRRSSQSPGXRPDYLLYLGLLCGAPPRYLPLHPMRDYRCDAXAVSEDSETLXENRALQVVHSRCDMLDXMSCMITXLFDRHGCPLCKDSCFFRPXSPIFSEGGLCYLRXPTLMHXRVSISIWYCQLPIMLIIDSYRVSMEPLLEAADPLXCDSIFDTVMLDDYPDVFAEILMNELLNGRLAMFSMFGFF

SEQ ID NO: 209627 - protein, 74 aa, Zea mays
  Clone ID: MRT4577_122773C.1.pep
SIYYFHCKLIHLFYHQPFIIYVIHVIHHEMRLNTNAPCVVRNDGHFELSQINLIFIFFTDVRCIIRGISKKRCF

SEQ ID NO: 209628 - protein, 97 aa, Zea mays
  unsure (1)..(97): unsure at all Xaa locations
  Clone ID: MRT4577_122774C.1.pep
TDPEKVKLVTVLSIDGGGVRGIMPATILALLEEKLQELDGPDARIDDYFDVVAGTSTGGLLAAMLTATGLHDHDXRRQPLFDAKDLAQFYIDHSPKI

SEQ ID NO: 209629 - protein, 119 aa, Zea mays
  Clone ID: MRT4577_122775C.1.pep
MISIVTKLNKYLGQPLHKEFVVFMTIKSIPKKYETFHVQHNISVQDKWTLDQLMAQCVQEEESFQVLKQGFILYARDNGISGLLVGFYVSDLTITRNYASEIVKFKREMSTEFKLSDLD

SEQ ID NO: 209630 - protein, 55 aa, Zea mays
  Clone ID: MRT4577_122776C.1.pep
KEQSATTYVPRTYSKHALGINYRRVLTPFQIFSSYIVFDMHIDIWSNLYTSRNLE

SEQ ID NO: 209631 - protein, 41 aa, Zea mays
  Clone ID: MRT4577_122777C.1.pep
ACSGRSECRPPPAPPHSSPPSTPALHPPPWARDPYSTPQPP

SEQ ID NO: 209632 - protein, 268 aa, Zea mays
  Clone ID: MRT4577_122778C.1.pep
MRIRRRPPGQPLAYLLPSDPSAAPQSPPRASSIDRQERPPPPPGGKQGEGELHLHPATNDSPAPADLEDGRSRSSALRRPALLPQLQEQDDAVEQRSRCGGLGAQQRQRQGPSDGRSSLDNGRDCHVPEPVTIQAGERRLSNGVGAAAVATTTTATAGAKATRQQQEAKQDTGGGARRPARGPAGALMEGSRCSRKNGRGWRCSQPTLVGYALCQYHLGKGRMRSGSAATGGRGPGQLGRTEHAKKTSAAAPKADVPLPLPPPSVQRC

SEQ ID NO: 209633 - protein, 95 aa, Zea mays
  Clone ID: MRT4577_122779C.1.pep
FVIQSALFLSPPPIFFLLEVCLPNYYPPLLFLFFFKKIFLGACSVPPPPVVWKIPHMPRFFPKKEAQCPGLFVPPPLFCFGFLLRHVDPQCYFLF

SEQ ID NO: 209634 - protein, 93 aa, Zea mays
  Clone ID: MRT4577_12277C.1.pep
LRQIPCFGVPRRRSRVVRSCWCCPAFQKKCPVWPLTSYLFLLTLSRIPSFISSLHGPVLSSLNNLVSLDDRRFSCIMKYPWYTHPNNSLLLNN

SEQ ID NO: 209635 - protein, 83 aa, Zea mays
  unsure (1)..(83): unsure at all Xaa locations
  Clone ID: MRT4577_122780C.1.pep
SVDTGMVLRYNSSEVISGQDLTVYGALSSLASFDRSYLKSTFTDNINFRNYLHLVPEVQQLVTDLYATRYRSCLXHLEKLKPN

SEQ ID NO: 209636 - protein, 112 aa, Zea mays
  unsure (1)..(112): unsure at all Xaa locations
  Clone ID: MRT4577_122781C.1.pep
ALAXLLAAAVVAPPAAVRAAXSCSTVSSTLMPCLPXVFFFFFXPPRGWWGGFFFLLXXAXGGGEGRTICGCLKNVAYGANGSGTYISRAAALPSKCGVALPFSARLLLTIIK

SEQ ID NO: 209637 - protein, 85 aa, Zea mays
  unsure (1)..(85): unsure at all Xaa locations
  Clone ID: MRT4577_122782C.1.pep
CLIFGWTKGLAHRAKLYDNVRLLDFPQKLXAAWVGPVEFGKITKALALFVQGFLNIPRSPFLNPEGFFYAVVYELRLRVGANLNL

SEQ ID NO: 209638 - protein, 112 aa, Zea mays
  unsure (1)..(112): unsure at all Xaa locations
  Clone ID: MRT4577_122783C.1.pep
GRVGFRREXSDIHVDAVLNVTQAILGGTVQVPTLSGDVVLKVKPGTQPGQKVVLRGKGIKARNSPYYGDQYVHFNVTIPMNLTPRQRVLIEEFAKEEQGEDEKDAKAAGASG

SEQ ID NO: 209639 - protein, 250 aa, Zea mays
  Clone ID: MRT4577_122784C.1.pep
MLWVLHIMPMFYMICGSIVEETTALIHIRSTLEGRYSVPASWKQSDDCCSWERVRCNNGRRVVDLNLSDLRLNSTTGGGCWNLNLAIFSAFHELQQLDLSYNQACLQSFDGLQGLTKLRYLNLSDNNLMGRSIDVFRYLGKLVSLEVINLDRNNMSGALHDTAFRNLKNLRELHLRSNRLSGSIPGSLFELQLLEFLDLSTNHLEGHIPISLASNLSSSLHTLKLSDNHLNGTFDFFWLRAAPCSDGELE

SEQ ID NO: 209640 - protein, 429 aa, Zea mays
  Clone ID: MRT4577_122785C.1.pep
MRLHAGARLALLLARRSLSSSPRIPRVHTGIRSEAPSRSSPFYPPSSARRSFHGTRPVAARDYYDVLGVSKSASQAEIKKAYYGLAKKLHPDTNKGDADAERKFQEVQRAYETLKDEQKRSLYDQVGPDQYEKTASGGGGTGFEGGFGNPFEDIFGGGGGGGGMNDFFRNIFGDRDFGGRDVKVALELSFMEAVQGCSKTVTFQTSVTCEICGGAGVPPGTTPETCLSCRGSGFIFMQTGPFRMQSTCTKCGGSGKTVKEFCKACRGNKVVPGRKSVRLDILPGLDNEDTIKVVRSGGEDPDGRPGDLYVTLEVREDPVFRREKGDIHVDAVLNVTQAILGGTVQVPTLSGDVVLKVKPGTQPGQKVVLRGKGIKTRNSPYYGDQYVHFNVNIPENLTSRQRELIEEFAKEEQGEDEKDAKAAAGASGG

SEQ ID NO: 209641 - protein, 58 aa, Zea mays
  Clone ID: MRT4577_122786C.1.pep
MPSVLFLKVGVVYFLFCPKRAFLDPLSLKKKKKKKKKKKKKKKKKKKKKKTKKKKKKR

SEQ ID NO: 209642 - protein, 84 aa, Zea mays
  Clone ID: MRT4577_122787C.1.pep
ATRYCYTKQSCGYPMCSKPARDFYIHSISPNRDDCTCTHNCISNNAFNPRKVSELMSSLHAKRPTLACPTNYGVHFWGHEREKH

SEQ ID NO: 209643 - protein, 66 aa, Zea mays
  Clone ID: MRT4577_122788C.1.pep
GSTTSKKAIFFNGTSFNFCPPSLTFFIDWDFFFLKFPKVSFFSSIFFSFLFFSFYMVRFILFIFFQ

SEQ ID NO: 209644 - protein, 73 aa, Zea mays
  Clone ID: MRT4577_122789C.1.pep
PHAEELEQYMMEGTYNHKVIAIDDEPHETNIYLMNHVDKTHKQEIDWYIEKGHKSLYDSEAKHMIMAKYRPRA

SEQ ID NO: 209645 - protein, 69 aa, Zea mays
  Clone ID: MRT4577_12278C.1.pep
TPAGSLWVSTHTGAQGPFSKNFGGYQLLLVLHGDAAPATRHIREQRCPLLDTMPILFTGETLFSGTPRV

SEQ ID NO: 209646 - protein, 76 aa, Zea mays
  Clone ID: MRT4577_122790C.1.pep
KKKRRDPLQDFSGTICLPPGILSMMTSETQVWIIGSTPNCLTKTFANKRAQPFCFLPVGDYLLHVYPAAEKPACLG

SEQ ID NO: 209647 - protein, 108 aa, Zea mays
  Clone ID: MRT4577_122791C.1.pep
VSSVRFIKYSKSTRSQSQGHLSRFCDRGVRFLRSKKPPAAVPPKGGNVHRRLSGARAPPVCGLSSSLPPTPPDLAKKVSESFLAGTENVNKRNGERKVREGVEKGKED

SEQ ID NO: 209648 - protein, 113 aa, Zea mays
  unsure (1)..(113): unsure at all Xaa locations
  Clone ID: MRT4577_122792C.1.pep
MPTSPVRRAGARLPFHSRANRHAGKLTKTGGAERTGGKGSVRRKKKAGHKTTTTHDXRGGGTSRRIGANSIXPGIEEVNIVKEDADIENVKPKGEASXGAKTRADRGTRQTKK

SEQ ID NO: 209649 - protein, 78 aa, Zea mays
  Clone ID: MRT4577_122793C.1.pep
NKQRQGLTYLIKNKKKKKSTKKKTTTTKNRRSCPLEAPGIRNSCLGKQASYIGRPGKNSCGRLFKMTGFGNRPCWGSP

SEQ ID NO: 209650 - protein, 67 aa, Zea mays
  Clone ID: MRT4577_122794C.1.pep
PIVVPEVFSFGEKFSKGRALRPFIRSLEATVGLYLVPIKRGTTLFEASGTTLADFPFSAANGGCVGG

SEQ ID NO: 209651 - protein, 89 aa, Zea mays
  Clone ID: MRT4577_122795C.1.pep
MMERETDRALVMPLPHPMDVARAGGTDEGGALRNYDVSFGQGEAKPPRDARSGHRGDCAVRAVAAAADLGGSLVAWSPQTEDGNILPAA

SEQ ID NO: 209652 - protein, 123 aa, Zea mays
  unsure (1)..(123): unsure at all Xaa locations
  Clone ID: MRT4577_122796C.1.pep
KGTPAPTPPRAKAPTPGPRPGGTQPEPNPGXEGPTRNPGKKGQPGTKPQKXGPQKKRENPGEPKGGTNPQKMGRPPGPPSKRKTPPPXGGRKRPKPGERPLGKGALIPVPRQGRGGLGQSGGG

SEQ ID NO: 209653 - protein, 55 aa, Zea mays
  Clone ID: MRT4577_122797C.1.pep
MLTKLDIWSHRNTCARRRSQKLLFFAFGCQAALRHWIGIDVLRVTVGFSTTTART

SEQ ID NO: 209654 - protein, 65 aa, Zea mays
  Clone ID: MRT4577_122798C.1.pep
FLLAPSFEKKKKKKGRGPLFFSPCLGAFSGNLWPVAGGSAMDKKHHVHPMMRQSTIQGWRLMKKK

SEQ ID NO: 209655 - protein, 143 aa, Zea mays
  Clone ID: MRT4577_122799C.1.pep
KQLSIMISVSGSAHLSWRRSRCAVSELGQDQHLAAYHLRNASQTQGTDWDGDGNVDVGTCRRLSAPGRAEVGRYARNTVRKPPSPRLPRRVEALWWRRAAARSVKDGRWWWSPCRRRNAAARDAAAGSRATAPRERNRRTAMS

SEQ ID NO: 209656 - protein, 243 aa, Zea mays
  Clone ID: MRT4577_12279C.1.pep
ALAFEVTGEGKWPRAHTCGLCTISPPSSASVSLEFRGEERVMVFTMRGGKDAVDAAVVRPGRLDVHIQFTLCDFEAFKALASNYLGLKDHKLYPQVEEGFHAAGARLSPAELGEIMLANRASPSRALRSVITKLQHVASGGAAVPRNPAHRRNTSWSGAWTGHQWEDQAQPARASAVSVEVDETAAGAPATCGGVFGKEAPMREFKKLYGLIKVRSRREGAGAVPLEGDAHGPPTPGNHDRER

SEQ ID NO: 209657 - protein, 85 aa, Zea mays
  Clone ID: MRT4577_1227C.1.pep
GVLGPHWGNQNLKRKHKNFNRPPFEKTPLPSKRRKGEKTKLRVYPQTKGTGGAKPKTWVAHYMDNLLEKKKLLNYKEGHPKGMPL

SEQ ID NO: 209658 - protein, 85 aa, Zea mays
  unsure (1)..(85): unsure at all Xaa locations
  Clone ID: MRT4577_122800C.1.pep
MAHKKGXAGGTIKGXRSSKGQRLGVKNCGXQLAKPGAIIIRQRGTKVYPANNVGKGKDHTLFSLIGGLCKFDKHGPDRKRASLYP

SEQ ID NO: 209659 - protein, 106 aa, Zea mays
  Clone ID: MRT4577_122801C.1.pep
MPKEIPSYIVSHQTHTTIRSCLNKKVDDELDGVMTSSSDAVSRTTRESSTLATTMRPPCLTMDNAVQLLWTASKRRLCESLSYTTAHATTYDCECLLLMVFVQGFK

SEQ ID NO: 209660 - protein, 95 aa, Zea mays
  Clone ID: MRT4577_122802C.1.pep
GARPRRSRSPSSPPPPPPCTSAAPSPTPTSPPSTRRHPPSTTPAGPATPEAAASTRSSPSPSTTPSARARPYSPRWRRHPAPSPRDRKGVGSSRR

SEQ ID NO: 209661 - protein, 76 aa, Zea mays
  Clone ID: MRT4577_122803C.1.pep
TMGPGAPYIAWVRLGTHIMPQFFRCGHEYILLNTWVYTCWELMYVQDRGNKLDMLLRRKTPGLYGIWQIQSCFSLK

SEQ ID NO: 209662 - protein, 127 aa, Zea mays
  Clone ID: MRT4577_122804C.1.pep
FHLVTNGGFKRVEPRVVVNRNRAPAKVSVGCFFNGGIPRSPRVYGPLGGFFPPEKKNGAGRALYKKVTVPEFLAPFPKKGLAGCPGLPRFQVFQKFFIPPVLPLGKSCQYVPVGYPGPLNQFWVGPF

SEQ ID NO: 209663 - protein, 93 aa, Zea mays
  Clone ID: MRT4577_122805C.1.pep
GPETPMDLYINLPLTERGTSEPDWTDYAGRGTEEPDPRLWCRLLRGHFLGPRSRERQTNGWRPTGPCPMHRANIRTPRAAHPALRAAPGGLNT

SEQ ID NO: 209664 - protein, 70 aa, Zea mays
  Clone ID: MRT4577_122806C.1.pep
ALFRLLAASGHQKLLRTAKRSAFQPASIKFVGAKIIQNQHKHIIDSVVVIVGFRHFLDPESYEQLYLPHM

SEQ ID NO: 209665 - protein, 64 aa, Zea mays
  Clone ID: MRT4577_122807C.1.pep
IFFFFLYFYRVCFYNCWACINDTASTIEHLFKYNRFISTKKSTRTPFCIHLLVPWELNQLLTTN

SEQ ID NO: 209666 - protein, 142 aa, Zea mays
  Clone ID: MRT4577_122808C.1.pep
MQSLLAGIPAGGAAAAAAVGGLVAAAALAERADQKNRLNLPPAVPGLPIIGNLHQLKEKKPHQTFARWSEEYGPIYTIRTGASSVVVVNSAEVAKEAMVAKYSSINTRKLPKALSALTRDKTIVAMSDQCELYKMAKRYNMA

SEQ ID NO: 209667 - protein, 98 aa, Zea mays
  unsure (1)..(98): unsure at all Xaa locations
  Clone ID: MRT4577_122809C.1.pep
MAAKIFCLLMLLGLSASAATATIFPQCSQAPIASLLPPYLSPAVSSXCENPIFXPYGSQASSWIYLIPLSQHISYTEYLVLIAKHRHTLQHWLEPAAT

SEQ ID NO: 209668 - protein, 91 aa, Zea mays
  unsure (1)..(91): unsure at all Xaa locations
  Clone ID: MRT4577_12280C.1.pep
VTEGFHFPYYHVSTFIGQSSKKXDVFGFGVLLVKLIIGQKALDFGRVANQKGGMLDXVKKLHKEKQLXSLVDKGLGSNXDRVESVPLVSLA

SEQ ID NO: 209669 - protein, 85 aa, Zea mays
  Clone ID: MRT4577_122810C.1.pep
MGIHLVAFVAARGFLQVFQVSAPLLWPLNLWLPLARHLPEACAAFYDALVSHAARLRATVRRRRRDSGDALDEYLRSAIMLTLSD

SEQ ID NO: 209670 - protein, 250 aa, Zea mays
  unsure (1)..(250): unsure at all Xaa locations
  Clone ID: MRT4577_122811C.1.pep
PRVRAGAPARRLTPVSVLDLQRRVLRWDGLGGGCLSGAGACGASEFRRLRRSLGDSGECDPRAMVFPGDGGDEERVGWKADMDVDSSRQLSPVSVLDLHSDDDDDDESLAHSYWGDEKPSTSGSSPPSEPFLGPTSPCFSYYSHSPARXKFREMEVDEGEEETARTGRSVEEQISSWEKIAGDISRIPAMVELDLARSARQWREPRLEAREVGARIETLIFDDIRRETVCDMLASHCRSAAAAAAAATSC

SEQ ID NO: 209671 - protein, 96 aa, Zea mays
  Clone ID: MRT4577_122812C.1.pep
RELSIGSPPASCAMLLKRLGFSLVVSNGNIVLYLRVFAPRWLIFFFGGFFGPFFWLFVLFNRSPPLFFFFLGPGGIKGWFPPAVFIFLARAKKKCI

SEQ ID NO: 209672 - protein, 60 aa, Zea mays
  Clone ID: MRT4577_122813C.1.pep
HIITQSSPLNDSTSYLAHRLFYSPFFFSSGGPPPASPFRAWNSAFAGPTFTSFFFPFFRP

SEQ ID NO: 209673 - protein, 58 aa, Zea mays
  Clone ID: MRT4577_122814C.1.pep
LRVFRDLRIVLRLYPHHLHCLVYEIHCTQQLVPSVVFCDPNINLLFSCLIPVCKQVRY

SEQ ID NO: 209674 - protein, 46 aa, Zea mays
  Clone ID: MRT4577_122815C.1.pep
AGQFLEGVEERPHGGAHPPGDHQDLDDLPARSFPPPPLKARRARGR

SEQ ID NO: 209675 - protein, 105 aa, Zea mays
  Clone ID: MRT4577_122816C.1.pep
NWDQGTINNLDEPHEQIDTVIATALRESKPDYLNISCNLPGLSESTLRREPMPFLLTPRTSNKMGLEAPTAATGQFLKKADNSGLVAGHKMLMAKARKASTDMGE

SEQ ID NO: 209676 - protein, 106 aa, Zea mays
  unsure (1)..(106): unsure at all Xaa locations
  Clone ID: MRT4577_122817C.1.pep
HPGFHPTPLSSVPSHPHPYSQDHFSNSHCPKHFTTIPTPPPQSYTTLHTPTPPSNLSFTNDIQQNTTNIYTHLHHYMDQNYLHNCXLPNSHILTIKLIHNTQTQQS

SEQ ID NO: 209677 - protein, 117 aa, Zea mays
  Clone ID: MRT4577_122818C.1.pep
APQVSTAVVEPYNSILTTHTTLEHSDCAFMVDNEAIYDICRRNLDIERPTYTNLNRLISQIVSSITASLRFDGALNVDLTEFQTNLVPYPRIHFPLATYAPVISAEKAYHEQLSVAE

SEQ ID NO: 209678 - protein, 87 aa, Zea mays
  Clone ID: MRT4577_122819C.1.pep
TVAHRTHGGGPACKRSIGHVGQLSSLPGVHHHQWDTTLQFSPCERMRKLKGGRRTPLGPRGSKSRNGMHPSLSWSSAHWTILIYRQK

SEQ ID NO: 209679 - protein, 118 aa, Zea mays
  Clone ID: MRT4577_12281C.1.pep
LGGAVGYYARGQKMGGPDHQRPLPPGTLPATGPRGTTYPKIFAESPKDCLLPPKGQKPAHKGDLKQPLVKRTGGQKGGNPFTGFVLHIRKNSPAECIYHGILQYGAIFVARTGGNEPK

SEQ ID NO: 209680 - protein, 123 aa, Zea mays
  Clone ID: MRT4577_122820C.1.pep
GGRAGVFLLKRVQRGGTGSIPQQPRDIETIPFEEPGGDPSTFFGQRPLSRFFSDNPKNPPCRHHQVSKNLLQCVDNGHFYSPAAQNPKTYSASKTLSLDKGPSPTCFWPMRHQPKPCGPPFPG

SEQ ID NO: 209681 - protein, 371 aa, Zea mays
  Clone ID: MRT4577_122821C.1.pep
MRRHMAPIKEQKHTTSAEQQVMLDAELQLWNHTFGYVKSMALKAAIDLGIPEAIHQHGGTATLPQIVTRVTLHPSKTPCLRRLMRVLTLTGVFGAQEAHDDDGGCDDELVYTLTPASRLLVGSPGQNVGPFLTLMLGPIFVSSFLDLRGWFQHETPDPSPFKMTHGRDIWELAAHDAAFGRLFDAGMVADSSFIMDVVVRECGGVFEGISSLVDVAGGLGGATQTIAKAFPNLECSVLDLPNVVASAPADTAVKYVAGDMFESVPAADAVFLKWIMHDWGDADCVKILKNCKKAIPAQGGKVIILDIVVGAGSSCDRKNVETQCLFDLYIMTINGVQRDEREWKKIIFEAGFTSYKIIPVLGTRSIIEVCP

SEQ ID NO: 209682 - protein, 377 aa, Zea mays
  Clone ID: MRT4577_122822C.1.pep
MALSKEQKLTIPDQQHTTSSEQQVALDAELQLWNHTFGYVKSMALKAALDLGIPDAIHQHGGSATIPQIVTRITLHPSKTPCLRRLMRVLTLTGVFGTQEPHDDGGGCDDELVYTLTPASRLLVGPSGQNVSPLLNVMLCPILVSSFLDLRGWFQHEMPDPSPFKVTHGRDIWELAAHDAGFRRLVESPGLQADSGFIMNVVVRECGSGTVFQGISSLVDVGGGFGGATQAIAKAFPHLECSVLDLPNVVAGAPADTAVKYVAGDMFESVSSADAVFLKSIIHDWGDADCVKILKNCKKAIPAQGGKVIILDIVVGAGSSCDRKNVETQCLFDLYIMTINGVERDEREWKKIIFEAGFTSYKIIPVLGTRSIIEVCP

SEQ ID NO: 209683 - protein, 371 aa, Zea mays
  Clone ID: MRT4577_122823C.1.pep
MRRHMAPIKEQKHTTSAEQQVMLDAELQLWNHTFGYVKSMALKAALDLGIPEAIHQHGGTATLPQIVTRVKLHPSKTPCLRRLMRVLTLTGVFGAQEAHDDDGGCDDELVYTLTPASRLLVGSPGQNVGPFLTLMLGPIFVSSFLDLRGWFQHETPDPSPFKMTHGRDIWELAAHDAAFGRLFDAGMVADSSFIMDVVVRECGGVFEGISSLVDVAGGLGGATQTIAKAFPNLECSVLDLPNVVASAPADTAVKYVPGDMFESVPAADAVFLKWIMHDWGDADCVKILKNCKKAIPAQGGKVIILDIVVGAGSSCDRKNVETQCLFDLFIMFINGAERDERQWKKIIFEAGFTSYKIIPVLGIRSIIEVCL

SEQ ID NO: 209684 - protein, 110 aa, Zea mays
  unsure (1)..(110): unsure at all Xaa locations
  Clone ID: MRT4577_122824C.1.pep
VQWDIVPRVPERAQRRRIHVCPDLRVEQYQPRCPNRQEQRNTDTSNNLYTTTPAATDGWVKVDEEEEGKDRDVQQRLGKPQARNSNGKGNCSNWDDYYPRAXALGIGFWP

SEQ ID NO: 209685 - protein, 54 aa, Zea mays
  Clone ID: MRT4577_122825C.1.pep
ITWNCPLKYSNNQSFSGVLGSHMNFLGPVVQPLGFLFLRKNFLGGGGGFFFQNG

SEQ ID NO: 209686 - protein, 108 aa, Zea mays
  Clone ID: MRT4577_122826C.1.pep
CEFSSIPFPLSRLWRLRPMMLRASSFSGVCSPLPCVLVAHHPRRRSLATPGPLLPLHDLRPGVGAVVVVPGRGILTTSGDLASRETVISLRSCALPSLSRFFCLTVSL

SEQ ID NO: 209687 - protein, 120 aa, Zea mays
  Clone ID: MRT4577_122827C.1.pep
SPPNWRGTATKPHDLQRFGRQRRENTEGKVPRALTAMRSRSHQGMWSPPVKKLLTDSKKRPILASINLLSGVGVGWSGSEEVAEQGRAILGFVCRMGTDETAEEKGLGLDSRRRARSKRT

SEQ ID NO: 209688 - protein, 86 aa, Zea mays
  Clone ID: MRT4577_122828C.1.pep
SMGPARQRKRTSDRNLIIFLRTSPSVLGPGPTPSGPGSILPLYFGLHLSIWASFFPLSLPSLPRRWRRRDLVGRHPLAMSDQPRAD

SEQ ID NO: 209689 - protein, 67 aa, Zea mays
  Clone ID: MRT4577_122829C.1.pep
CLFFYGIHIPSNVIGQIFKLWYWEVMSQILDIFCTTVIFKVLFRTAASFEMLFYFFQFVLQLLDGTI

SEQ ID NO: 209690 - protein, 93 aa, Zea mays
  Clone ID: MRT4577_12282C.1.pep
RAPRRPCRTSSAAWTPAARARAAACIAVSSRFPVSCFVIFLRRVAACAALGESIAGCGLSSPLVWFVFASHQIKLGGTPSQQWLKSHAPPSVR

SEQ ID NO: 209691 - protein, 217 aa, Zea mays
  unsure (1)..(217): unsure at all Xaa locations
  Clone ID: MRT4577_122830C.1.pep
IRHEAAVSLGDLGLGVAAGTRSIRERRPAPNAFFDVGSDSDTEHDDDDDEEQTTIDQANHESAKTGDSVKKGGRPRKMEAGQLHTRTQISNGKSNGHTNGNPAGKKRGRGRPKKLTVEQAITRCQFSNGETNKSGAEAARSKQSRNRRISQNAKKRKRDEGKESMTKKLNKRSKMLTGENALMCHQCQRKDXPRVVRCQSCKXKRFCLPCIETWYPN

SEQ ID NO: 209692 - protein, 167 aa, Zea mays
  Clone ID: MRT4577_122831C.1.pep
EKQIKPKIVHSAAKKQEDAPRSQFLVVRGVVVIVVLLPYNGGGLQSERWERWGSRNHCGGSTSPQRAYCQVLLSLYIILSYYKAPDLMVDGSTIVLRHNFIKTSPKGSDATLDHQSVCYAATHLPTPPQCRLSLPQLYHVSSALSAAHPGQPCLRRCPPSGFVLAAG

SEQ ID NO: 209693 - protein, 54 aa, Zea mays
  Clone ID: MRT4577_122832C.1.pep
KSFCGCVLKILFQGYFKIEWFCFGNKILFSPFFLFFDPKLRKTKLYWFCFLEVF

SEQ ID NO: 209694 - protein, 358 aa, Zea mays
  unsure (1)..(358): unsure at all Xaa locations
  Clone ID: MRT4577_122833C.1.pep
SSCQHVMCRLGSARAVNRRYISDCVPLKMRLQASAGFVSASALGMACGPALAGFLQIKFKIYSLKXVLXNTLPGWVMCISWLIYLLWLWLTFKEPEHFTKTMXSMNNHPNLAAKEILTWQAGLAEPLLQGIERRQDENSEVNDDTEVESESSHEPTRQQASAYRLLTPSVKAQLLIYFMLKYAMEILLSESSVVTTYYFSWSTSAVAIFLAILGLTVLPVNAFVGSYITNLFEDRQILLASEVMVLIGIIMSFCFTPHYSIPQYVLSALITFVFAEVLEGVNLSLLSRVMSSRLSRGTYNGGLLSTEAGTLARVVADATITAAGYLGTDLLLNVTLLPSLVICIVSIAATLYTYNNLY

SEQ ID NO: 209695 - protein, 60 aa, Zea mays
  Clone ID: MRT4577_122834C.1.pep
KKYISNHPDSYNPIIWLHPANSRYCMGLLLLTTPLSKDPNSPRYCSQGLISGFSYSVSLT

SEQ ID NO: 209696 - protein, 151 aa, Zea mays
  Clone ID: MRT4577_122835C.1.pep
GGIKQAHPFIYLKEEGWTHYKEFFEGILPILLKNPAKKLRMFNYFAHARTCLPTTGDCLDYYGGPSPSQMGLTQRLTFLADSSEIFGGQFCHFGILKMDQPNKGHLLKPLPPQVYRKKEPGPKGKHLWLGLAQKYLPGPMQFLTDIPNPNP

SEQ ID NO: 209697 - protein, 88 aa, Zea mays
  Clone ID: MRT4577_122836C.1.pep
GTCNYQVIIRMQNFVLSRYLVEIGVYIRSSRSVGTSGELDRHSGCSVCARCMRTMHYNPSFQGQRESPDHFTQRPAQRRMEAARRYQS

SEQ ID NO: 209698 - protein, 69 aa, Zea mays
  unsure (1)..(69): unsure at all Xaa locations
  Clone ID: MRT4577_122837C.1.pep
FFPAAAPRVSACAVSPRGGSCSAGRVXFAXCPGPLSFAPLWCGASAFSSLACCFPVVXXCVLSLLLSCL

SEQ ID NO: 209699 - protein, 127 aa, Zea mays
  Clone ID: MRT4577_122838C.1.pep
MRVLLVALAILAVAVSATFTHTSGGCGCQPPTSVHLPPPGHLPPPVHLQPPVHVPPPVQLTSPVQLISPVHVPSPGHLTSPPCHYRTQPVMSQPHHETHLCPCQQPHPSPSQLHGTCGVGSTPILGQ

SEQ ID NO: 209700 - protein, 94 aa, Zea mays
  unsure (1)..(94): unsure at all Xaa locations
  Clone ID: MRT4577_122839C.1.pep
MECGEKTLSGFEGAGASGVDTKLLQAFHISFVQVHTLLIQNLFLIKXINHNHXSKVPGDLSLNVGLSRKLNINFRRVVDLYTDIYLXFARTDDD

SEQ ID NO: 209701 - protein, 86 aa, Zea mays
  Clone ID: MRT4577_12283C.1.pep
MTRGGGCDMKSFFRQQKTHAGVATTKPTGGVFKKAAANHHKKAVLATNVHPAPDHGAGSRQQEEAEAEHWERAGREFNMDPPLRAM

SEQ ID NO: 209702 - protein, 110 aa, Zea mays
  Clone ID: MRT4577_122840C.1.pep
VRGAAYFTLSNFLIFAEFIMWRCFLVRKKHRRLGKFTLFMYNGGCLLVNWEHIFHVRKDREGQLVALPVYPDNAVLLCCTTCVRFGVGEEAHNFNWKWSSSWMLIVLLIC

SEQ ID NO: 209703 - protein, 65 aa, Zea mays
  Clone ID: MRT4577_122841C.1.pep
PRPILRPGRPSRSRASRSPCPSPSPFLSPCRPWRSNAHDRMRSQRARSTVRVGERVDVRVVVRVG

SEQ ID NO: 209704 - protein, 106 aa, Zea mays
  unsure (1)..(106): unsure at all Xaa locations
  Clone ID: MRT4577_122842C.1.pep
LAGILPTLETLPGGSGLYRALSNVTNEGLLTEGFFWIPSFGXATTNCCLXIEQGIYWLSPFTDGHSPLGCVDTXAYLALPALLVISQYISSQVMQPPQIIDPSQQC

SEQ ID NO: 209705 - protein, 74 aa, Zea mays
  Clone ID: MRT4577_122843C.1.pep
IFVTPLKCQFISFMIQAACKLSTTSYNRYLVSSVYVVVACFSPTANPDWYDSRDHLESSKAPSHFVSHDTYLFG

SEQ ID NO: 209706 - protein, 88 aa, Zea mays
  unsure (1)..(88): unsure at all Xaa locations
  Clone ID: MRT4577_122844C.1.pep
RSPPSPKVPQFKKGKDSLSPQGKPRFAPHPSGFVGQAKPVFPKKAKPPQKIVFNLQCQSCKPYSQPPLKRCKPFXFGGAKKGKGPSLF

SEQ ID NO: 209707 - protein, 212 aa, Zea mays
  Clone ID: MRT4577_122845C.1.pep
GVLLLPEPPKPSTTGPPDPPETKAAAAAAGKEPAPAPPPAPAPTPAQSGRRISGRHSTGSVRAPGRVGPASRRSADGGVAVGCFDGAKVRKDRVLLVEPAAVVAEPDPVAFDRRFGHRILVSTAGGCKGETAPAAQQRWSDLRPSDLMFVRAEFLVTDAGRHSCSAAVNSGNARSAIGVRSVSELAGVRRLPPIRAGTCEGEPRSRGGGAPR

SEQ ID NO: 209708 - protein, 493 aa, Zea mays
  Clone ID: MRT4577_122846C.1.pep
TVDIDKITNPVDRRATQDQIAYFGQTPSQLLTVPHMKRKPLAEVLQLQTIFRNPSELKSYVLPHSDRCNVPASAMLVSNDSIVVVDVNAPAAHVALHQWQANTPDGQGTPFLFHHGRNSTNSTSGALMRIFKGSAGSAEDYGFPRAIAFAASAIRSSAVVAVTCDKEIITGGHVDGSLKLISLDGAKTIETASGHIAPVTCLALSPDSNYLVTGSRDTTVILWRIHQTGSSHKKNAQEPPPTTPTTPRSPLSGSTSTMSSLSETKRRRVEGPMHVMRGHLGEVTCCSVSPDLGLVASSSNATGILLHSLRTGRLIRRLDVDEAHAICLSSQGIILVWNGTKKTLSTFTVNGLPIANSVLLPFSGQVSCIEISTDGHFALFGTSLFNNYKCDNSTETGDHELGPNGTDDVSKNSEQSVHAPSICFVDLHTLKVFHTLKLAKGQDITAIALNKENTNLLVSTADKQLIVFTDPALSLKVVDQMLRLGWEGDGLLQ

SEQ ID NO: 209709 - protein, 94 aa, Zea mays
  Clone ID: MRT4577_122847C.1.pep
KPVYLVMGNGCFAPRPFFFHFLRHNFVVGHHRAGCPLVNPAPQIFPTLGSEPFKNNLHVGYVVNAQLMLVPPRRVFVFSVFFKKKSPKLVVLVL

SEQ ID NO: 209710 - protein, 76 aa, Zea mays
  Clone ID: MRT4577_122848C.1.pep
LSHKKFIIEISLIFKLKGGHQAMTAGRLIFFPLVIPHWWGGGDCLPWETVIWAKHRGITTPTPLGYETLGTTVNTS

SEQ ID NO: 209711 - protein, 59 aa, Zea mays
  Clone ID: MRT4577_122849C.1.pep
PEGSLPLPNHQWWKTVRLKPNLWQARPRRIRAAKEIFSASQHDEMQSTAHPFNPGCKQV

SEQ ID NO: 209712 - protein, 77 aa, Zea mays
  Clone ID: MRT4577_12284C.1.pep
ASIRGGAGVKQKSFLLSKTSKTHGASPHACMQKVSHFFCFKIHVNLCPPWIVSFFGKSFQNVKLLAREFFPKRGLSK

SEQ ID NO: 209713 - protein, 136 aa, Zea mays
  unsure (1)..(136): unsure at all Xaa locations
  Clone ID: MRT4577_122850C.1.pep
PLLSSCSVSRWLCSWECQWVCFLARSKGKTSWTASSCSGLMGLVCFFCFXLKLFFFLILLIHITFIFPKPIXFLIFFYLIFIFFFFFFTVFIIIFFFLNNYCGCCFFYIIHFLLISLFIIFYRFLKFFYYFFIFIF

SEQ ID NO: 209714 - protein, 50 aa, Zea mays
  Clone ID: MRT4577_122851C.1.pep
SQLASKPFCPNKKNNSFAKLPPGSFKTVGWKEKRHFGQWFSVFFHLCATS

SEQ ID NO: 209715 - protein, 83 aa, Zea mays
  unsure (1)..(83): unsure at all Xaa locations
  Clone ID: MRT4577_122852C.1.pep
MANSNLPRQIIKDTHRLLNEPAPDISATPTXENMRYFNRKNLEPSQSPYKRGLYKQERAIPEEYPMAAPKEKNLTKIXNPNIT

SEQ ID NO: 209716 - protein, 71 aa, Zea mays
  unsure (1)..(71): unsure at all Xaa locations
  Clone ID: MRT4577_122853C.1.pep
HTNTHVWFQTHXKKREGNKCFGYANHNHXNTWLTDRQGSQHTNSTPNITRLTHPTNRNHDATNPPPLISYA

SEQ ID NO: 209717 - protein, 84 aa, Zea mays
  Clone ID: MRT4577_122854C.1.pep
RTSAMINGSRAHQDLGSWCELDAEYCSQIVTVVASYHDGTTVLQRTIDRTLSVQLENHLLALGWSIKFKKDKIQENGHYKHTTR

SEQ ID NO: 209718 - protein, 173 aa, Zea mays
  Clone ID: MRT4577_122855C.1.pep
LGTSRPAGKNNPSSENKGRSLPSRFHLWRPAGRIRSHRAVTRQQHRQMAAGAHPLVSARALNGDMDTDSASDHASGRPPRAHPADIVRFVHRHPVSCNTRQPYAEYLSRLTTIPPPTPGGLCATSTISPTMLAIIPTATSIEPTITCSSAVHIACAQQDQAPLTPPPQHSPQA

SEQ ID NO: 209719 - protein, 422 aa, Zea mays
  Clone ID: MRT4577_122856C.1.pep
LCVLAASQSFMGINYGEVADNLPPPSSTARLVQSTTITKVRLYGTDPAIISAFSGTGVSLLLGATNGDIANLASSPAAAAAWVAAHLPASSPAVSTVSVGNEVLFADASLASQLVPAMQNLHDALPPNSSVKVSTVNAMDVLASSDPPSSGAFKPELAAALDPLLAFLSKTGSPFLVNPYPYFAYLSDPRPETLAFCLFQPDAGRPDAGSGLTYTNMFDAQVDAVRAALDAKGYKDVDIVVAETGWPHKGDPDEAGATVENARAFVSGLVSHLRSLSGTPRAPGKSVETYIFAMYDEDLKPGKASERYFGLFQTSLAETYPTGLLRNGTAGPIPATAPAPAPTTSAATLKPTPGQQTQVTPAQQGSTAAAGPSGICRPGPGTATSRGTTTACAQPSAAESSRASSMLPIIAGFPVIALLMFT

SEQ ID NO: 209720 - protein, 86 aa, Zea mays
  Clone ID: MRT4577_122857C.1.pep
NITAARFLQVLDEEVEGKNLHVDGVDQKSAVEGQDLRCTAMVGGLFTASRSGLHSKDYIVHDLEGADHVTDLDHNHVAELKILGLY

SEQ ID NO: 209721 - protein, 41 aa, Zea mays
  Clone ID: MRT4577_122858C.1.pep
VRCSLSCCCNLCPARVPTLVPIQWVLTYVFFLCYGTMLLVR

SEQ ID NO: 209722 - protein, 155 aa, Zea mays
  unsure (1)..(155): unsure at all Xaa locations
  Clone ID: MRT4577_122859C.1.pep
STVTSTGDVFLEGSITMRKTAGKPKAGADVRPWYWADRVLDLGPVDRQTGSYLTXEHXGYYGCETXGLSSDPWTLIKNRIIGAIQCLCVMLRTLGCLFPELLARNGVKFGEGLCIKARFKIFSKGGLDYLMDPSMIHAQSILXIWAYREEAHGPQ

SEQ ID NO: 209723 - protein, 75 aa, Zea mays
  Clone ID: MRT4577_12285C.1.pep
IRKPLGGGFIVKITCRRGEPLHYIGGQKGRHLAKKREAGATCTHLARREAGRHACPPPSRGPHFFTATSTARTRG

SEQ ID NO: 209724 - protein, 110 aa, Zea mays
  Clone ID: MRT4577_122860C.1.pep
SSLVLFSQIDHGVVNLINEEDSRITVLLDCHGISPFRFPMQMMRSFITVVQENYPNRLGVLFVIRLPPVVRVIAQTFLQIAISHGIRGDEDDIASKSAPPASIDGARSSR

SEQ ID NO: 209725 - protein, 96 aa, Zea mays
  Clone ID: MRT4577_122861C.1.pep
LQTASPHPLGPLPALHPRSTLIPAPVSCELPCCSCPLDRSTCRLTRTICDAPIAAWVSFGTLYAKPKKNATLWIWTTITTSTRSMITLDYLPAGPV

SEQ ID NO: 209726 - protein, 69 aa, Zea mays
  Clone ID: MRT4577_122862C.1.pep
DLHCGILRPDKRDWILPSRQPDRTTVYKNRALRTPFVKLGHNSTLRIEIDDHVVQDIESLIFDDTHNKW

SEQ ID NO: 209727 - protein, 80 aa, Zea mays
  unsure (1)..(80): unsure at all Xaa locations
  Clone ID: MRT4577_122863C.1.pep
MGPEQDEAVLETIWDLHDKVSDANHALFRAHFLRAVRRRSSGSDPXLDVKGGGLGLGARGKNEVVALAVLAEEARSLHAL

SEQ ID NO: 209728 - protein, 70 aa, Zea mays
  Clone ID: MRT4577_122864C.1.pep
RVHTYKLLNATESLSYSSTYIYFTGLNFPNGLLAKPCDTQLNRFAYLPIYPIGALAYRSTSMAISNSCPN

SEQ ID NO: 209729 - protein, 129 aa, Zea mays
  Clone ID: MRT4577_122865C.1.pep
LTITNTRLAAKSTRKYSLIQSWFAVSYTRCAAVNIELPQYCSCTMSKKNSTKDLILKMNSKELHFCNAKLNIGKKTHQTIMNSVKYSTLYLGTLQHNSGFVLASFRHRGCCYGNVPQKAFHLILLLELD

SEQ ID NO: 209730 - protein, 116 aa, Zea mays
  unsure (1)..(116): unsure at all Xaa locations
  Clone ID: MRT4577_122866C.1.pep
PWRGKVRRSAQAPPRRPRPGSSKSGLQFPGARTARFVGGGKNAKRVCSSAPGYLTPLLQYIAGEVLALGVNACTXDSRKANIVPAHIQLAAGPTDILHRWLLSRPIGGVGVMLEHL

SEQ ID NO: 209731 - protein, 99 aa, Zea mays
  Clone ID: MRT4577_122867C.1.pep
RTLSKSSVEDALLSTVLSQEHQDAVNRCNHLRGVHVAYFRLCIDPTWRGPGGFFRRQSRISRTTGAGYASGGRIIYLEQQEQQRPNYISPTLLRSFGRH

SEQ ID NO: 209732 - protein, 47 aa, Zea mays
  Clone ID: MRT4577_122868C.1.pep
MALTNFIGTAAAVGAAVLIFTTDIRTSGTLFRRNARQLRMWLEEDTR

SEQ ID NO: 209733 - protein, 274 aa, Zea mays
  Clone ID: MRT4577_122869C.1.pep
SNQTSLIQSLSGSRSPSTPLGRAPGFLGFKELAEPAVRRPAHLHYFPPSPEPTPSSPHAAMAFSFASPAASNPFQTPATPNPFQTPAPATSQAPSLSPSPFQFSFQQQPQPQQQVAPAAQPPQPQPQPQPQKLMLYTTDMKSAGYSTKWEELHAESQKALLQIEDKIRDYKDECERLDQCSRLYDSSISNANFELDASRIAQELGGTTTVMEREKASIQELMNVVNEMMWNTEFGIRSYLMLRPRFTRPSAGVANGGSSNPSAGAPPNQPVVDF

SEQ ID NO: 209734 - protein, 50 aa, Zea mays
  Clone ID: MRT4577_12286C.1.pep
GCIFFTVYMGCMVFMVILANDRRIIKALPCLPFMDFLPDRYFYKQIGECG

SEQ ID NO: 209735 - protein, 325 aa, Zea mays
  Clone ID: MRT4577_122870C.1.pep
MATIQNKPTPTAPSTTTGGGLRAMDLYEKLEKVGEGTYGKVYKAREKATGRIVALKKTRLPEDDGGVPPTALREVSLLRMLSQDPHVVRLLDLKQGVNKEGQTILYLVFEYMDTDLKKFIRGYRANHEKIPAQTVKILMYQLCKGVGFVHGRGVLHRDLKPHNLLMDRKTMALKIADLGLSRAITVPVKKYTHEILTLWYRAPEVLLGATHYSTPVDIWSVGCIFAELVTNQPLFPGDSELQQLLHIFKLLGTPNEEMWPGVGKLPNWHVYPQWKPTKLSTLVPGLDSDGYDLLEKMLAYEPGKRVSAKKALEHPYFNDVNKEVY

SEQ ID NO: 209736 - protein, 78 aa, Zea mays
  Clone ID: MRT4577_122871C.1.pep
ARVQDDVHHRAQLREDGLGLQREHREDRNARLGKLLHIKSPHGVRVQHEGERSVNVTMALPVLTFLPRVLEWKAGGRR

SEQ ID NO: 209737 - protein, 97 aa, Zea mays
  unsure (1)..(97): unsure at all Xaa locations
  Clone ID: MRT4577_122872C.1.pep
MKITALLVLKPGTIGXGAPSPAASHXPRCMXLVNAIDIRHFGYFQRRAMRQFIDFXARTICQLTQPCQRQSLQHEKYKVHSYNINRLCTXALMDDHY

SEQ ID NO: 209738 - protein, 97 aa, Zea mays
  Clone ID: MRT4577_122873C.1.pep
LRVTGKREEGASNYERSGGVDAAEPKAPIFIPKDLLQVEDYSAKRTDLNYHHCLGTEPLMAASALTRERGSSTHIGRTPPIRQGPLLNDHLEQGTPR

SEQ ID NO: 209739 - protein, 66 aa, Zea mays
  Clone ID: MRT4577_122874C.1.pep
DMEFQDLAWYLTSCILAICSLARYILIFFCCGSTVLGFQTVGLCHESLSFLLFHCSVPLTCLQLPC

SEQ ID NO: 209740 - protein, 112 aa, Zea mays
  Clone ID: MRT4577_122875C.1.pep
NQHLKKKKGLQAKKAKSRSRKHPSTRRGQYKTEPYPHPKREPGHPGQKLKQKQHFKRGQTKKCLGEKYARALGQNEGRKHVHRNRAKPWGEHGRAGRRPQEERTSTRRETSP

SEQ ID NO: 209741 - protein, 60 aa, Zea mays
  Clone ID: MRT4577_122876C.1.pep
GSSLLRAMSYSSMNSKKALVAVLGLLGSWTAFPFLTLTGLSGPLAIKQPRLKPGIHATGT

SEQ ID NO: 209742 - protein, 149 aa, Zea mays
  Clone ID: MRT4577_122877C.1.pep
MAGREEEEERWTMRPCTAVRSTMAGDHGPATRVVSESKRGKAVARSSRKKGERRPECAAAGAGDRALPDPHGKAAMPTKKVVGAAAAAQAGGKGKRPLKKSEIRTIIALKPEPFPEDDYLDGMAKYLPAGVARAEEEGARTRRRVFRED

SEQ ID NO: 209743 - protein, 130 aa, Zea mays
  Clone ID: MRT4577_122878C.1.pep
PPLGPRVFFPGPCFLGSLPIFFGRLGTCCWAFFPPGGFPPKAPLWTDLVGGYFMGFFVNALFSRAGVSFLGFLRFWWFLVFFPVLCFWFIWGGGPGGPEPGSANHFYRVKKRRTLQKTPKKKEGGRRLRA

SEQ ID NO: 209744 - protein, 35 aa, Zea mays
  Clone ID: MRT4577_122879C.1.pep
ATTFEHGTKCYGYHENDSLVNEISAPTHSSPVGDL

SEQ ID NO: 209745 - protein, 177 aa, Zea mays
  unsure (1)..(177): unsure at all Xaa locations
  Clone ID: MRT4577_12287C.1.pep
RPPSVFPASGLVVCRQLAASSTSGVAVVVVLTARDEARGAAAVXEAXRGLGLSNVFFHQLDITDXRGRRSAGRFLXSRFGKLDLLVNNAGFVGLESIQDRFDGSSSTSEEFCGLVHGHEAGAAAEMVPPVDLRCWEGMPDVLLPRFEACHPSSPASGAGLLQREDRSSVSLVLGPSQ

SEQ ID NO: 209746 - protein, 67 aa, Zea mays
  Clone ID: MRT4577_122880C.1.pep
FRFLVLPPIFLGLSVRRRGLFVFRPAFVCLMRSGSTLGVFKSFPLAWPMCVKSYFLSGSSRIPSLRT

SEQ ID NO: 209747 - protein, 47 aa, Zea mays
  Clone ID: MRT4577_122881C.1.pep
KKQLLSAGPIFNFLKGNFQNPSSKLKKTTLLGLANLNKIAWWPTPGG

SEQ ID NO: 209748 - protein, 59 aa, Zea mays
  Clone ID: MRT4577_122882C.1.pep
VFSPLYVLASLYMSFLGVGNSNPLQYCLETSTARGACWAIVHQIHNMTEGLSTHMCVRF

SEQ ID NO: 209749 - protein, 88 aa, Zea mays
  Clone ID: MRT4577_122883C.1.pep
SFLYRTACKRHIVASTPHRLDGQAFILTPHLAASLWATRVPWNHQPGAARDMGRSRVTDAGADTLNGNGQGDCDPAYDGLERLHSLMG

SEQ ID NO: 209750 - protein, 155 aa, Zea mays
  Clone ID: MRT4577_122884C.1.pep
GMQWLLPPKSGALVLNIPFQKFVLGVSPGGSLTWATGHPNPQNWRSPGGEGEAKGECFGQASFPSCWGSFLQHLVIGGIGSSADRICICLKCASPWVPLWPGTAGLGARFISSPRLGMGSTSFLANPAFFPILFRVGPTLGPTGPKRAQRGLPGP

SEQ ID NO: 209751 - protein, 47 aa, Zea mays
  Clone ID: MRT4577_122885C.1.pep
PRIRRHVGNSIQDERIHPTNPFSFLFVFIFNFLVRFLITGSGLGPYP

SEQ ID NO: 209752 - protein, 148 aa, Zea mays
  unsure (1)..(148): unsure at all Xaa locations
  Clone ID: MRT4577_122886C.1.pep
MSVCVTGGRQGQVVLAMVFDDARLGGIASSIRVIPDFSKSGIMFXDITTLLLDPKAVRDIIDLFDERHQEQGITVGAGVQARGFSFGHPIGXANDAKFVVLLKSKNLPSVAIFEEYALEYGREQIEVHASVVRATQRALVLDELIATA

SEQ ID NO: 209753 - protein, 81 aa, Zea mays
  unsure (1)..(81): unsure at all Xaa locations
  Clone ID: MRT4577_122887C.1.pep
MATNILSGRALLALDXSATNAFIIPQCLLDPXYIISQFIPPGTTKALEDPDVQAYKLQQVIAASVLQQPIVQLQQQSLAHL

SEQ ID NO: 209754 - protein, 198 aa, Zea mays
  Clone ID: MRT4577_122888C.1.pep
MAEGKRWRFAMVCSSNMNRSMEAHSQLGRAGLDVESYGTGTHVKLPGPSLHEPNVYDFGTPYGAIYDDLRRKDPELYKRNGLLPMLKRNTSVKLAPQRWQDNAGDGVFDMIMTFEERVFDLVVEDMNNREPRLMKCVLIINMDVKDNHEEAGVGAKLAVELCQKLEAIDGDWEDIIDDLITAFEKQHKRRLAYSISFY

SEQ ID NO: 209755 - protein, 76 aa, Zea mays
  Clone ID: MRT4577_122889C.1.pep
MLKKQKQQLLKFNHFTSFIPTTLSINQYSPFYHHTSINSPTLLKLQHLITFNQLNLTNLPTFYLLPIIAIAINYIS

SEQ ID NO: 209756 - protein, 35 aa, Zea mays
  Clone ID: MRT4577_12288C.1.pep
YRYRPIPGVSTIAQPRFRFQKEHFRIQIMEVIFSL

SEQ ID NO: 209757 - protein, 233 aa, Zea mays
  Clone ID: MRT4577_122890C.1.pep
MLLFLPTPPLLIWGRRCTPVFRVVDGVLAKFSVHLMETDNNHYSLLQFGIVARNISVSWRKIICTLAELGLQGCLWRCFPVSLCAHIALSGTLHDNLKRSALVDFCGEPSRYKRNGLLPMLKRNTSVKLAPQRWQDNAGDGVFDMIMTFEERVFDLVVEDMNNREPRLMKCVLIINMDVKDNHEEAGVGAKLAVELCQKLEAIDGDWEDIIDDLITAFEKQHKRRLAYSISFY

SEQ ID NO: 209758 - protein, 98 aa, Zea mays
  Clone ID: MRT4577_122891C.1.pep
HGHTCSSHPFLQPPTSQGCALAAGLPRMRSCRPSSRAAAAIAMSKRATYAPSSIRSRRSDSFVCCSFRLLPDLAGFCVEMDELPRSHTFSGIQKFRTL

SEQ ID NO: 209759 - protein, 212 aa, Zea mays
  Clone ID: MRT4577_122892C.1.pep
RPGRGINPKPNPYPAPWVSLSPALSPPTASPISAPPVQRATAASACSARRRRQISALPPQDQRATASPPTAPPPAHRTAASPPTALSSVDITISTVVGQREGPPGFIPFPSLSIICISLSQITTRSVTAPGWGTPPPLRPRPPNPLSDSPSPTPSSRLRQVDKDCELLEAERIMDYSLLVGIHFKDRCKDKLKRCMLLTHAWSCKMHLELGD

SEQ ID NO: 209760 - protein, 68 aa, Zea mays
  Clone ID: MRT4577_122893C.1.pep
KKRGSQFPNRDGKNLKKRKVLALLLINKNVKKGIYVRPLMLGKTGFLQFRSFKKRGQRNHLGFPIKKL

SEQ ID NO: 209761 - protein, 76 aa, Zea mays
  Clone ID: MRT4577_122894C.1.pep
EQITRSYMLIYTTESIGTPINTYIQYIAHYESLSQDAQCRKVSGGDHTFLIQHKRSLDTGTSSCASHICGGCASRP

SEQ ID NO: 209762 - protein, 133 aa, Zea mays
  Clone ID: MRT4577_122895C.1.pep
FGPPVFPPVFSPFFFGGIFWGNFFSPTIFPWPWFCPCFFPPFFGPPFGPPGSPPGFRGEFPGGPPGPPFWCFGIVSPVFNGVFWLDAFFPPPSLLALTPVGASVWGPPLCFNGGGLLPQCFPPLVVEIDLSRS

SEQ ID NO: 209763 - protein, 85 aa, Zea mays
  Clone ID: MRT4577_122896C.1.pep
RKQRGRTEGKEEDDRPGANKNPARQTNGTEAQGTRDNDHKEPPPGPRNETGETKDRSPRPRRKPRERRHRPRPRQHQTHRQARKT

SEQ ID NO: 209764 - protein, 57 aa, Zea mays
  Clone ID: MRT4577_122897C.1.pep
GAYPYHDRSHHHVIPLALEHHHHLSELQLLRLYRCCRVGVHVFVPAVDDWQEHGGHR

SEQ ID NO: 209765 - protein, 115 aa, Zea mays
  Clone ID: MRT4577_122898C.1.pep
RKKQWPKKEKLKLSISMERDSTIALVGLVRIAPPDHHQPHEASSTILQYQFGEECSRLVGSRSRRRRRLEVQQRVAAPVHLVGRRVRHVQIERQRVRRRRGGLVGAARAGRAVLA

SEQ ID NO: 209766 - protein, 75 aa, Zea mays
  Clone ID: MRT4577_122899C.1.pep
KAGLPARAGPDWRAGRRFPFFFFFLSIFSIFLPPTTYISWQTTCIKGNIFSYGDQKQDKPYCFTPFTALKNSHDL

SEQ ID NO: 209767 - protein, 79 aa, Zea mays
  Clone ID: MRT4577_12289C.1.pep
PLLRLAWAELGPLSAGPQCPQFCPYRGNSPVSRSARAGSVIILWSRWLASKLLFSLYIRPSDFVGSPRSLVAMLTNGHG

SEQ ID NO: 209768 - protein, 123 aa, Zea mays
  Clone ID: MRT4577_1228C.1.pep
MRASGSHAYHRRGLRAIKAKNGGAFPKADKAAAAAEPKVYPADDVKAGVPRTRKPKATKLRSRITPGTGLILLAGCFMGKRVVFLKQVWGGLLLISGAFKINGVPVRRVNQTHVIDTSTTVDI

SEQ ID NO: 209769 - protein, 38 aa, Zea mays
  Clone ID: MRT4577_122900C.1.pep
VAVLCMLLVFAIFPLLLWRRRSDAVTSDNHRVPLQPLQ

SEQ ID NO: 209770 - protein, 210 aa, Zea mays
  Clone ID: MRT4577_122901C.1.pep
MATQISKKKKFVSDGVFYAELNEMLTRELAEDGYSGVEVRVTPMRTEIIIRATRTQNVLGEKGRRIRELTSVVQKRFNFPENGVELYAEKVVNRGLCAIAQAESLRYKLLGGLAVRRACYGVLRFVMESGAKGCEVIVSGKLRAQRAKSMKFKDGYMISSGQPVNEYIDAAVRHVLLRQGVLGIKVKIMLDWDPKGKLGPTTPLPDLVTI

SEQ ID NO: 209771 - protein, 33 aa, Zea mays
  Clone ID: MRT4577_122902C.1.pep
PNIRGGNYNRGAPTLNTLALDIQRHDWQNPHRT

SEQ ID NO: 209772 - protein, 78 aa, Zea mays
  Clone ID: MRT4577_122903C.1.pep
YQMSLRSWMTTTEVFLAWASIVIILFERQKFLVFYGHARRFGDGVLSRAWQECDLQLDTTYLTQHPAFRDRSLGLHVT

SEQ ID NO: 209773 - protein, 73 aa, Zea mays
  Clone ID: MRT4577_122904C.1.pep
ALQRAPQVPITPPLAMISINSLRASSIKSMQTPQRLSWGAAGLIFLASVKEAKRTHTRRKATVTADLILVVLL

SEQ ID NO: 209774 - protein, 71 aa, Zea mays
  Clone ID: MRT4577_122905C.1.pep
CFYLIKLNYISLYTLIHSSQFIFSISIMLFKNYNCINQSHYNSIHFKLHIFYINNVYISLYFTIFSHLFTP

SEQ ID NO: 209775 - protein, 69 aa, Zea mays
  Clone ID: MRT4577_122906C.1.pep
MSVLTPLLLRGLTGSARRLPVPRAKIHSLPPEGKLGIMELAVGLTSCFVTFLLPAGWILSHLETYRRPE

SEQ ID NO: 209776 - protein, 238 aa, Zea mays
  Clone ID: MRT4577_122907C.1.pep
PRVRCSKVTLMGILAFFLNCSPKFKSLSLSKCIEIKDICSAPAQLPVCKSLRSLAIKDCPGFTDASLPVVGMICPQLENVNLSGLSAVTDSGFLPLIKSSNSGLVNVDLNGCENLTDAAVSALVKAHGASLAHLSLEGCSKITDASLFAISESCSQLAELDLSNCMVSDYGVAVLAAAKQLRLRVLSLSGCMKVTQKSVPFLGSMSSSLEGLNLQFNFIGNHNIASLEKQLWRCDILA

SEQ ID NO: 209777 - protein, 267 aa, Zea mays
  unsure (1)..(267): unsure at all Xaa locations
  Clone ID: MRT4577_122908C.1.pep
QNNRRMHQINNEIESILRGIIAKRMQVIQEGERTKDDLLGLLLESNMTDTDENGQSTLGMSSDEVMEECKLFYFAGMETTSILLTWTMIVLSMHPEWQDRAREEVLGLFGKHKLEYEGVNRLKIVTMILYEVLRLYPPATVFTRKTYKKIEIGGITYPAGVMFEMPVLYIHHDTDIWGEDVHQFNPDRFAKGISKASKDPGAFFPFGWGPRICIGQNFALLEAKMALCMILQRFEFELAPSYTHTPHSVMMLRPMHGAPIXLHTISS

SEQ ID NO: 209778 - protein, 36 aa, Zea mays
  Clone ID: MRT4577_122909C.1.pep
AHDAQHEDSYTGVVTGDCTDGMWLIRGSRHLGLADV

SEQ ID NO: 209779 - protein, 42 aa, Zea mays
  Clone ID: MRT4577_12290C.1.pep
QFNSLSDYDSCFSLFTKLLPMNYKGQLFHYSLAFYNHCLYLP

SEQ ID NO: 209780 - protein, 115 aa, Zea mays
  Clone ID: MRT4577_122910C.1.pep
LKAGSDGRRDQTSREFMNFLKERNVYDADVLLTPSERDEDGDSSLVSSYSQLGLTQLCQQEVSQEQEAQSARRHGQVEAEAEARTCSLEPSLPSTETCSTPATIRKSSSDNRLQG

SEQ ID NO: 209781 - protein, 39 aa, Zea mays
  Clone ID: MRT4577_122911C.1.pep
IWVMRYYVRNVSLRGLMKISLCLRLTIVDCLVERVKAGR

SEQ ID NO: 209782 - protein, 103 aa, Zea mays
  unsure (1)..(103): unsure at all Xaa locations
  Clone ID: MRT4577_122912C.1.pep
TTGYPAAYLQLLXCKPLPMGNAPTNLQQPVVPHIGPPLTXTHAANPADYSQQXLPFNQPHVSNSAAYLQQRQQLLNALTVANPLEPTLLQQQQQXLPYNHGYL

SEQ ID NO: 209783 - protein, 56 aa, Zea mays
  Clone ID: MRT4577_122913C.1.pep
QPWAWCYTSFILRSTPTDTYTGEPPSLAARRGRRVANLSPVVCQGGRKTPAGSCTP

SEQ ID NO: 209784 - protein, 117 aa, Zea mays
  Clone ID: MRT4577_122914C.1.pep
MSASASAAAALNPHCFGRGLPVDGFVPCSLFSFYGRTGHPSCNPRRVFNKMEGPPDLASCNALLDALCHAGDLDGAGDFFERMAVREPVSWTTLVSGLSRGGRHRCALEVFKGFLLG

SEQ ID NO: 209785 - protein, 48 aa, Zea mays
  unsure (1)..(48): unsure at all Xaa locations
  Clone ID: MRT4577_122915C.1.pep
AKXHNMPXAFLXDVINEADQDNVSLTLIRPQTFNLYNGISFLFLTHLR

SEQ ID NO: 209786 - protein, 98 aa, Zea mays
  Clone ID: MRT4577_122916C.1.pep
RKCLGHDVRRTCGGAPPSARNSSIEVAVFCLMMPRTPFPITSEYPIAMARSARRRVRVFSHGGGRRVSLPHGPRWRHNQRPWRPWDKEQCSVDWIPAG

SEQ ID NO: 209787 - protein, 63 aa, Zea mays
  Clone ID: MRT4577_122917C.1.pep
DFAHSLARLDSGRFCSYSPRFTSARRIPFPFFRTPLTITTRFRYRVSRSSILYIVYLENRVDL

SEQ ID NO: 209788 - protein, 73 aa, Zea mays
  Clone ID: MRT4577_122918C.1.pep
HSPPAPPKSKSDRAPRTPDPAGGRRRRAPGGQEAPPSQRSSPLPLRIPYQGEITLPESFSGPGVAARITQFNG

SEQ ID NO: 209789 - protein, 88 aa, Zea mays
  Clone ID: MRT4577_122919C.1.pep
TRYRVFELGTSEEFRSHFLWLQDRPNKKTNNSNSYMNIWASLFLENVELEFSEEFRSHFLWLQDRLNKISYDFFSYMLLFLLFYFCAP

SEQ ID NO: 209790 - protein, 227 aa, Zea mays
  unsure (1)..(227): unsure at all Xaa locations
  Clone ID: MRT4577_12291C.1.pep
WDTVAADSLPXCMRSCXXKALHTVXTNEIAEIAXRKHGSDPINRLRKAWAVLFDGFMVEARWLAXTXVPMAEDYLRNGVITSGVPLTFLHIFSMLGYDDDRSTEEEEEAIIDHMPSIISCPAKILRLWDDMGSAEDEAQEGFDGSYRDFYLMENPSRSPGEAEAHMRSLIMREWVELNRECFCRRTFPSDIAQVCLNTVRMVSVMYSYNKEQRLPVLEDYATMMLVV

SEQ ID NO: 209791 - protein, 45 aa, Zea mays
  Clone ID: MRT4577_122920C.1.pep
QPYNPRVKGDFFFFYDKPTHKLTQNIRQLLHTKPIGELNETEYLF

SEQ ID NO: 209792 - protein, 51 aa, Zea mays
  Clone ID: MRT4577_122921C.1.pep
PNISFHRTEFTTGDYVQAEPRSRGIHTLRKGRIGRLLELDLIHGREQNCGR

SEQ ID NO: 209793 - protein, 419 aa, Zea mays
  unsure (1)..(419): unsure at all Xaa locations
  Clone ID: MRT4577_122923C.1.pep
MKVERDLHMSRGDGEDSYASNSRLQEKSILKTRPVLHKAVAAAHALSLSSGGPGGGAMVVADLGCSSGPNTLLVVSEVLAAVAMVAGGSAQPQHVQFFLNDLPGNDFNLVFRSLDLLKXRSWPPRTGGRSRCYXYYVAGLPGSFYTRLFPDHCVHLFHSSYCLMWRSKVPDELAGGAVLNEGHMYIWETTPPAVVALYRRQFQEDMSLFLRLRHRELVPGGHMVLAFLGRKKSKDVLRGEVSYTWGLLAQALQSLVKQXLLLISLVHACKCNIMSACFLMHCIAFALHCMHMYGMQGRVKKDKLDSFNLPFYAPSMDEVRDVITRSQAFDITHIQLFESNWDPHDDDDVEMKMEEDVAAVQSGVNVARSIRAVIGPLIARHFGEHILDDLFELHAKNVAVHLQKVKTKYPVIVVSLQAK

SEQ ID NO: 209794 - protein, 440 aa, Zea mays
  Clone ID: MRT4577_122924C.1.pep
MDPSAVGSSRRKAEQWLSVAEKLMVARDIEGCKQFASQALAADPHTPGADDLHAAAISLLAAQQRRLPNGQPDPYGVLGLDPANPASRRPDAIHSQYRRLSFLLNRSHQDRPCSLAFAEAARLVADAWAFLSDPVLKSSLDVDLDAAAAARAYHSPPNLPQPHSQPHLPARLTPPVAAPSPRSTPPLVSPLPRATSPPAASPPRQTQRPAVPQTRSTPPPAASAPRSTPPPPVSPQTLSTPLPAAPAPAPRSTPPPVVPQTPSSTLRPTTPQTPVAATVPAAKSGAAPSSTFWTVCSACCHIHQFDCQYETCKLLCPSCRQPFVAKAMAEPPPIVPGTDMYYCTWGFFPVGFPGCPGFERMVNAQPSGVDQLNAPWLGSAGGVHGNAQNGVPPVSAPVVEVPVKDPIEVPAVTPPAKPMRVKVGAKKRGRPKGSKNKKKL

SEQ ID NO: 209795 - protein, 119 aa, Zea mays
  Clone ID: MRT4577_122925C.1.pep
ITSSTVIHTNERTLAPITIYLRSTMAAVLNSRKTPQEVDRAEEGGAAGFFLLRGHHLREGGVVAGSVHPLRNCEGQRSPLSTSCSGHQEPQQRSANQRGRIRQLASASRDTSTFPKNAT

SEQ ID NO: 209796 - protein, 54 aa, Zea mays
  Clone ID: MRT4577_122926C.1.pep
RLIGWLNHFICLNFVITLSFRKHILLVLHHDFCHDSSDLVQPNLDKSIELPRAE

SEQ ID NO: 209797 - protein, 222 aa, Zea mays
  unsure (1)..(222): unsure at all Xaa locations
  Clone ID: MRT4577_122927C.1.pep
VRLQVPVRNSRVDPRVRKICEHEMNEIEVCPECYLAACQKRDNWFCEPCSNPHPLVWAKLKGFPFWPAKALRDKDGQVDARFFGQHDRAWVPVNNCYLMSKEIPFSVKKTKSIFNSAMQEMEVYVENIRRKFGVFNYSPFRTPYTPNNQYQMLLDPSNPSAGTAKTDKQEKVKLNFDMTASPKILLSKPLLSXGAGRRISLSDMPRSPTSTNSSVHTGSDVE

SEQ ID NO: 209798 - protein, 99 aa, Zea mays
  unsure (1)..(99): unsure at all Xaa locations
  Clone ID: MRT4577_122928C.1.pep
HSYGHKDLLYGDLXLKQRLGLRDAFITSLDDCQAYTLNRIHDPDYHVELCTELINXIMDSTKAAEVLAKLNYGSEFAHTLVDTLILTMNGIPNSLQNTG

SEQ ID NO: 209799 - protein, 41 aa, Zea mays
  Clone ID: MRT4577_122929C.1.pep
EEGSNLVPHANYIEDTPLHYAKTIIFFFLSFLLHRPYVSRS

SEQ ID NO: 209800 - protein, 115 aa, Zea mays
  Clone ID: MRT4577_12292C.1.pep
KHGSNPVNRLRKAWAVLFDGFMVEARWLATDQVPTAEDYLRNGVITSGVPLTFMHIFSMLGYDDPSTEEEEEEAIIDHMPSIISCPAKILRLWDDMGSAEVVVSSSNHTLHILAC

SEQ ID NO: 209801 - protein, 84 aa, Zea mays
  Clone ID: MRT4577_122930C.1.pep
VSVVRRCPLDDYPSVEHLLDLTIFRLIRLTTSSCGNVQSLHYPGSTWGRLPHHVINYRTIQTLWDFLSWAFTAGEETCDDVAVA

SEQ ID NO: 209802 - protein, 83 aa, Zea mays
  Clone ID: MRT4577_122931C.1.pep
IPLSSACSHCLCLSGALMDASSVLRQSIASPRAVLVLEHTSVLAHPMFQTRPWCGLLRLEQPSPPARQWVVRPGSAGVASFPV

SEQ ID NO: 209803 - protein, 61 aa, Zea mays
  Clone ID: MRT4577_122932C.1.pep
QGFLGAERGGAPSAKFVFPCFYGGNVEGAPPPTKKGRKGGNFFSWGEEKDPLGGKAGGLEE

SEQ ID NO: 209804 - protein, 66 aa, Zea mays
  Clone ID: MRT4577_122933C.1.pep
CPYAPALVSRLPSQLGCLYAALSSAVPVSCCSPPGFSRYALSSCSWVCNYAVGPFCVEGRPLSQCM

SEQ ID NO: 209805 - protein, 56 aa, Zea mays
  Clone ID: MRT4577_122934C.1.pep
ILDVIHHGSCGTRIARCIQEIINEVIECIYNVIVYLSLRPYYCPFVAVNPDPVIIK

SEQ ID NO: 209806 - protein, 137 aa, Zea mays
  unsure (1)..(137): unsure at all Xaa locations
  Clone ID: MRT4577_122935C.1.pep
ADIDEKSIRRENPDDLVMVLAEAKADAIMSRLNIDDYQKEGSQPTLLITSDXIIREKPTTKEEARQFLXVYFHDIPDEVIKSLIDEGVVFRVAGGLLLEHPLTLPFVEAVVGSSDSVMGLSKEVANKLIHDALVYLA

SEQ ID NO: 209807 - protein, 197 aa, Zea mays
  unsure (1)..(197): unsure at all Xaa locations
  Clone ID: MRT4577_122936C.1.pep
MATAGSSPPASQQPFKLILGSSSVARKHILEEMGLEFQVMTADIDEKSIRRENPDDLVMVLAEAKADAIMSRLNIDDYQKEGSQPTLLITSDIVCLDYLCIPNWVELLFHGCGGMYLLICFCXCYHSYDCILNCSXFEVVVHEGIIREKPTTKEEARQFLKGYSGGHVSTVGSVVVTNLTTGKRLGSLDKAEAIFTF

SEQ ID NO: 209808 - protein, 40 aa, Zea mays
  Clone ID: MRT4577_122937C.1.pep
PRLLARAGACESMRPNQKTRNSCLSRRWSGYPVVVGDVLR

SEQ ID NO: 209809 - protein, 213 aa, Zea mays
  Clone ID: MRT4577_122938C.1.pep
MATAGSSPPASQQPFKLILGSSSVARKHILEEMGLEFQVMTADIDEKSIRRENPDDLVMVLAEAKADAIMSRLNIDDYQKEGSQPTLLITSDIVVVHEGIIREKPTTKEEARQFLKGYSGGHVSTVGSVVVTNLTTGKRLGSLDKAEVYFHDIPDEVIKSLIDEGVVFRVAGGLLLEHPLTLPFVEAVVGSSDSVMGLSKEVANKLIHDALST

SEQ ID NO: 209810 - protein, 71 aa, Zea mays
  unsure (1)..(71): unsure at all Xaa locations
  Clone ID: MRT4577_122939C.1.pep
LDAHQTMSKDKTVVKVELDRWGEAVTYPFNGIHVVDTPTLDVLKQEGPERXRLINAHRTVAALSTDYYVGN

SEQ ID NO: 209811 - protein, 144 aa, Zea mays
  unsure (1)..(144): unsure at all Xaa locations
  Clone ID: MRT4577_12293C.1.pep
FSARITSSSPTRSSTQRSTVLMVLCCHYAKRPMGDGVLACGVLHNIFASLEDQDIALGADNSVLIPTLSQALKAYEPGQMSDAVGWANPFEYQQLALEILASIGTTLNTASEVEPQEEDXPEAKDDEEMGDADQEISDGEEEGG

SEQ ID NO: 209812 - protein, 46 aa, Zea mays
  unsure (1)..(46): unsure at all Xaa locations
  Clone ID: MRT4577_122940C.1.pep
KTXXCXRSFRVQKXEEGLKNXKYLIKRRXVQTSXSGRRGYDPRNFR

SEQ ID NO: 209813 - protein, 80 aa, Zea mays
  Clone ID: MRT4577_122941C.1.pep
SRPNLVPNLGSIPKKGLVATDQRLVLPMAAGTLPPTDHSHKMGRQGCRRWNSVRPRSRGSTSLIRVVGHAGFLRREPDRE

SEQ ID NO: 209814 - protein, 194 aa, Zea mays
  unsure (1)..(194): unsure at all Xaa locations
  Clone ID: MRT4577_122942C.1.pep
MGCCGGRMMGSPEGRAGALAVAGRCPLRGGGPWAACAAGRANVPGDGAAVGNSGGRTGWEPEPREARACATWXDADKXLSWRXKHGWTXAFCGPAGLKGQAACGKCVRVKNRATGASLVARVVGQCXXGGLDLAYETVFSMIGTNGQGLLMGAPHVDYQVVACWAAGLSRILPVCVCVPACLAGGAGTDVVVKR

SEQ ID NO: 209815 - protein, 88 aa, Zea mays
  Clone ID: MRT4577_122943C.1.pep
DNWNRTTWRRALYSVRGLLFTLVPPPDHGHVVVWHFWNSVDDTWLVQDMSRGQDRGIEGADMKYMLGTRVLACWLRTGVCGMEYRGYS

SEQ ID NO: 209816 - protein, 93 aa, Zea mays
  Clone ID: MRT4577_122944C.1.pep
MIATMFLAALALSTGVIASPAEANANVGAASAIQATTATAQVGTQTQTGANAKTFGPWGGYPYGGAYYYGGYPYAGYSYGGYRYGGYPYGGYP

SEQ ID NO: 209817 - protein, 60 aa, Zea mays
  Clone ID: MRT4577_122945C.1.pep
FLERTSPLHSSGPLHMLLHMLCISLWAPHVDMGQINSRLSCTTEHFSSHLNGVLNCVPRA

SEQ ID NO: 209818 - protein, 197 aa, Zea mays
  Clone ID: MRT4577_122946C.1.pep
LLHARPLILLKAKQHYLVHYKTGVHRLYAYSGRKPAEHLQQTKPYYGACRCSSMHPLYTYVLIVGEQRHTAGMIRKHLIRGHIHLHACSSHEDFSLWQCCRRQSNTTESRGCRSSSPAPFSANQSNTTESRGCRSSSPAPSSANQSNTTESRGCRSSSPAPSSANQSNTTESWRCRGSCSSSRRLSAHGPPRADGEP

SEQ ID NO: 209819 - protein, 60 aa, Zea mays
  Clone ID: MRT4577_122947C.1.pep
PFTYVISPMPYKLLACNALIRPSWITSIVLMVRNPYRSRKASPTHYKFQTFIPLPLTHGL

SEQ ID NO: 209820 - protein, 65 aa, Zea mays
  Clone ID: MRT4577_122948C.1.pep
AARLLGIEHQSRFLWSQAKKLNFARAHSGSPIKLGDGPWRQHPLDDRKKDGRCKMILIDPPRERE

SEQ ID NO: 209821 - protein, 100 aa, Zea mays
  unsure (1)..(100): unsure at all Xaa locations
  Clone ID: MRT4577_122949C.1.pep
LEGKEHDVSVGSTMISGRQTAGTAAHSRYYSLDYQEPAPAPLDEPTEFTSWSXYRTGVAKFEATDLLLYXTVLSVMVGAGAVYICNTVWTHGVSCTFSAM

SEQ ID NO: 209822 - protein, 78 aa, Zea mays
  Clone ID: MRT4577_12294C.1.pep
VAHGKVVTVSVDPQIMGRVKKQTDTHASRETTAAVNKGRNLKAKKSYVDRETWTVPHQRTRTEGGWSTSRRGGRELHS

SEQ ID NO: 209823 - protein, 85 aa, Zea mays
  unsure (1)..(85): unsure at all Xaa locations
  Clone ID: MRT4577_122950C.1.pep
SRPQRAATSMHQHRPGAACFRSTETSRAELDEFDSQAISRAIVQCPPPKSPSPXPDSPTPPSEHSDDDVASRHGFLYYTYSRMEP

SEQ ID NO: 209824 - protein, 76 aa, Zea mays
  Clone ID: MRT4577_122951C.1.pep
PPLSARLDQEIIGGSPWFLTPDTGQLVAVIDSVAARRGPIPSSRNFRVCGKRGRFVTERCAPSESQAMTDTGRRLP

SEQ ID NO: 209825 - protein, 91 aa, Zea mays
  Clone ID: MRT4577_122952C.1.pep
MLSKNHRYMLTNISLIISEFLVLRRLRVFGGCSEIMHLHGGYPLLVRFTCECHRLDNVVYPARTLYAHIAGILVLVDKVSKGYAITSFQWE

SEQ ID NO: 209826 - protein, 121 aa, Zea mays
  Clone ID: MRT4577_122953C.1.pep
GGGASRKRRRQRTAASCLGVTARCRTHHASDCHGNIEVLLSEGGRLSVARLSYAVCPACHVDVCDDQRPRSSTPLHAESTMIIAHNIEHIQVRVISHLLFGASEDHGRWPRRSSRSRHSRA

SEQ ID NO: 209827 - protein, 31 aa, Zea mays
  Clone ID: MRT4577_122954C.1.pep
MRRVALLLVAAVCALAAPAAAVVTDGESSRT

SEQ ID NO: 209828 - protein, 106 aa, Zea mays
  unsure (1)..(106): unsure at all Xaa locations
  Clone ID: MRT4577_122955C.1.pep
MRRVPLVLVAAVCALAEPAAEVDTDGLLPXNGNYQDGPTNLALENGTGVSGAHAIPGWETCGFVEYIQSWHNQGDMLLVEPQGAHAVRLGNEAYIRQILTLARGAY

SEQ ID NO: 209829 - protein, 60 aa, Zea mays
  unsure (1)..(60): unsure at all Xaa locations
  Clone ID: MRT4577_122956C.1.pep
YDAKLXADQPVDQSTISLHMSTNXGASQAGXMTAPGTKRQITEPRLGMEHCXDTLNVSLQ

SEQ ID NO: 209830 - protein, 98 aa, Zea mays
  Clone ID: MRT4577_122957C.1.pep
DLLNNFPGQGIFMLVSGYFRLPYDIPKPFWRYPMQYISFHYWALQGQCQNDMKGLVFDNQYPDQPKIPGDFILKYIFQINVDRSKWIDLSGIFSMNFI

SEQ ID NO: 209831 - protein, 61 aa, Zea mays
  Clone ID: MRT4577_122958C.1.pep
GNHKSRLKLINSTLEQLNEQVLQVLKVVSAQVQLLYRISFGEDTYSGTFKSINVSVQELKE

SEQ ID NO: 209832 - protein, 77 aa, Zea mays
  Clone ID: MRT4577_122959C.1.pep
NIIMSTYYKKNSIVNYYMVRSTFCHILFIIWSMMLLTSWQSYIYKFYLWLYSCSPSVQFSFRKIIAAKKISSLCGRN

SEQ ID NO: 209833 - protein, 39 aa, Zea mays
  Clone ID: MRT4577_12295C.1.pep
ESRPAQMMAFLAKLSDDPGLVLRAMLAKKDELALADKES

SEQ ID NO: 209834 - protein, 104 aa, Zea mays
  Clone ID: MRT4577_122960C.1.pep
PLLELGGRHSAPSSSSWRPPAVQNWIQVEGDKFKFPGGGTMFPRGADAYIDDINKLISLSDGKIKTAVDTSCGVACLGAYLLKRNIIAMSFAPRDTHQAQVQFP

SEQ ID NO: 209835 - protein, 725 aa, Zea mays
  unsure (1)..(725): unsure at all Xaa locations
  Clone ID: MRT4577_122961C.1.pep
LPVLGLCAPNADQVNSSGKSVDPVENPGXKIRHEASGDIVKQLSTPADHSNVHRNEAQSASDKAIFPGASEEALRRISNMIPDSYFPFSHIPPISGKGVDPVENPGPSIASFQGNLGLPNFSLEDNAPLKHIKPIPDIFPSLSLGAHKDYIRSSVPELPDGSLLPNFMADITGTSKQKSFMSGLLPGLGLSPGQPIHSAMPDNHKKVLDNIMMRAQYASNKFLKKRSKLDYWSEDELDALWIGVRRHGRGNWDAMLRDPKLKFLNNRTSEELASRWILEEQKIIDEPMSAATRRSNSTAFPGISDAMMSRALNESNLSKMRMEQPKLQSHVTDIQLGSSDILSRFPHVEAPNYINSGEGGPPQIPWQDFKHRSSYGGDFPGGAFDKLEKPDVGLIPPFMPNPFMTDSIDSLPINRKNNSSIPRSEIRSSSRENILFSGVSDGQINLLHEMQRHVRSGKQPIEIKLNHIDHSNPQLGNASDLGGLKSNKLPHWLQEAVRAPASSKPPERGLPATVSAIAQSMCLLLGEQEPSIPPFLILGTPLSPPKDPRINSKKRKLRKAHQSTSHVGDCIATQAPPSVKASAAPLAVDCNDGAPSLNLNSALLSSSAVSKKLDELPPTFKESNQTMDGSEAVAGKLEAPEIGCQVTGSSPVDDKARESSGSPVKDTPDAGVRLQGSDNSAMAFSALPLEAPVTSSRAEPVACDGSDMKEDIPLDAESNGNLEER

SEQ ID NO: 209836 - protein, 295 aa, Zea mays
  Clone ID: MRT4577_122962C.1.pep
MATNLKWAPVLALLLVAAMVGSTSAGNIAVYWGQNGNEGTLADTCNSGLYAYVILAFLTTFGNGQTPVLNLAGHCDPGSGGCTGLSSDIQTCQSQGIKVLLSIGGATGSYGLSSTDDANSVADYLWNSYLGGSDGSTRPLGAAVLDGVDFDIENGQSAHYDDLATALKGKGSVLLSAAPQCPYPDASLGAALQTGQFDNVWIQFYNNPGCAYANGDDTNLVNAWSTWTSSVTAGSFYLGLPASTQAAGSGYIEPGTLTGTVLPAIKGVGKYGGIMVWNRFYDVQNNYSAQVKDSV

SEQ ID NO: 209837 - protein, 53 aa, Zea mays
  Clone ID: MRT4577_122963C.1.pep
SRHELVRHNDRYDGARTVIPTSVSTLTQMRRIRLRGLLEGSDATKRSCDPSVT

SEQ ID NO: 209838 - protein, 96 aa, Zea mays
  unsure (1)..(96): unsure at all Xaa locations
  Clone ID: MRT4577_122964C.1.pep
MWGFDMDSVMAEVQGRGVTHLCCVPPVMIALAKLGSVEKYELSXLRFMGSGASXVDKDVMEGVANNFTDTVIAHGYGMTETWGINIFRVTHKKDKF

SEQ ID NO: 209839 - protein, 74 aa, Zea mays
  Clone ID: MRT4577_122965C.1.pep
ADVALGGAEQVGVLLLVHKACVERARYSIEKVDRAQDCCLDGEPFLLAVLDGTQGAVISVAHEMIEMGSMWPVV

SEQ ID NO: 209840 - protein, 65 aa, Zea mays
  Clone ID: MRT4577_122966C.1.pep
PLWLFSFIMPASMFMLIFMLGCFFLSSIDNLFSPPLVPRTVPSFLVSGAVESATQRDRLVRSSFL

SEQ ID NO: 209841 - protein, 127 aa, Zea mays
  Clone ID: MRT4577_122967C.1.pep
SEISASTVDIGMCRKGEASYVDHPSEVWSWSIRTLRCPWLRLLGARRSAPCRKRSSVGYDGRVAIEAHANTSRRSSSKKACGTSSISPSISTNDEGRPCDVRSHFEQGEKVIQGSCGYLFLARIWDR

SEQ ID NO: 209842 - protein, 137 aa, Zea mays
  Clone ID: MRT4577_122968C.1.pep
MSNKAKASTKFRMTLALPVGAVVNCADNSGAKNLFIIAVVGCGARLNRLPAASCGDMVMATVKKGKPELRKKVHVAIIVRQRKPWRRRDGIFLYFEDNAGVIVNPKGEMKGSAIAGPVAKECADLWPRIASNAGTVV

SEQ ID NO: 209843 - protein, 63 aa, Zea mays
  Clone ID: MRT4577_12296C.1.pep
LTLPPTPTPNNFLYFILHHQTEDLQFFWPFTTHISHQLYYKFLSSLHYSIPLLYLLLLSTLNK

SEQ ID NO: 209844 - protein, 67 aa, Zea mays
  Clone ID: MRT4577_122970C.1.pep
LVIVSIKGINPNFLFSQQMLVKHFPKFKLWKIQRSAVDYEYDRNQHRVRYGSVKKRESRLSRRDSSA

SEQ ID NO: 209845 - protein, 123 aa, Zea mays
  Clone ID: MRT4577_122971C.1.pep
MESTFIMIKPDGVQRGLIGEIISRFEKKGFYLKALKLVNVERSFAEKHYADLASKPFFQGLVDYINPLASEPGTIRGDFAVDIGRNVIHGSDSIESANKEIVLWFPEGPADWQSSQHPWIYEK

SEQ ID NO: 209846 - protein, 54 aa, Zea mays
  Clone ID: MRT4577_122973C.1.pep
PRVRPRVRQILPAAVAVPVPPSVDHKQAASVMLKGMTAHVLLRRVFKVQTNPKP

SEQ ID NO: 209847 - protein, 59 aa, Zea mays
  Clone ID: MRT4577_122974C.1.pep
NLSVLAHKIQWKESLYLAQLRGKDYRLAVEYRSTSSSFIDDDPMTRTRLHSCCRTASSG

SEQ ID NO: 209848 - protein, 91 aa, Zea mays
  unsure (1)..(91): unsure at all Xaa locations
  Clone ID: MRT4577_122975C.1.pep
FLTLCCSTLGAVVRVLCIAHKRGHYILHDPCYMKDTVFPMTERDRLALHGXLPARVMFCDQQCERFINSFRSLDHNARGEPDSIXALARWR

SEQ ID NO: 209849 - protein, 124 aa, Zea mays
  Clone ID: MRT4577_122976C.1.pep
LTVHAMHKHPPGPNLSLAFGVPAAGSAAHHTRVANAFMFPPPETDSLAGSARAKRESDWVRKKRVWWRVASTMSGGATCRVPSLPEKQAWKGWAEGERRSEPPVGVGITSGSSDKEPSYRSRAA

SEQ ID NO: 209850 - protein, 199 aa, Zea mays
  unsure (1)..(199): unsure at all Xaa locations
  Clone ID: MRT4577_122977C.1.pep
AAAEEEEDTREDGASDRDRAAXERXERAXEXGPREXKXXXXTDXXGDPLXRXRHSPAXLMLVAESGAGGEVVGVVRGCVKTVACGRDDELELFSKVGYLLGLRVSPAHRRRGVARALVARMEEWFRQAGAEYAYVATDRANEPSVRLFTSRCGYAKFRTPSVLAHPVFRHDLAPPRRAGVVRLCPRDAELLYRARFAGV

SEQ ID NO: 209851 - protein, 296 aa, Zea mays
  Clone ID: MRT4577_122978C.1.pep
LLSDQVVGSKHLSLSRPHSCGNLQKILEECTNDQRTHMIREITKAPIKLHKASCNVHGTRVVQKVIDTMNTPDQVSMLVSALNTGMMCLMTDSYGNHVVDHCLQKLLPEHKAFILEAAASCYLQLARDRHGCCVLQKCIGHSSDEQRNNLLCKITSSALTLSEDPYGNYVIQFILDLNIEWITVRVVDELAGHFGNLSMQKCGSHVVEHCLKLAPRLICDRIINELMHDPKLLDIILDQYGNFVIQTALKQCQGEHHAAFVETIKPHTAVMQSNMYGKKVLSRICLKNKHCRFDLH

SEQ ID NO: 209852 - protein, 77 aa, Zea mays
  Clone ID: MRT4577_122979C.1.pep
KCLERALKKKRAFSIGVKKKKKNNFFLQAQQRAWFVCTKGKKPFVWGPTRKKTKFGFPLAKPREKIFRPVQPKFKGA

SEQ ID NO: 209853 - protein, 98 aa, Zea mays
  Clone ID: MRT4577_12297C.1.pep
CGPMPFNPSGGGSIYVDEAYGTAKHAKTASAAAAANNVACNVYSSITMPVHPMPWQQQGYENFYGAYGSRMYSSYMGYRVPYGDNMCSGYGRGYGGSS

SEQ ID NO: 209854 - protein, 78 aa, Zea mays
  Clone ID: MRT4577_122980C.1.pep
GYNNLDPSPGAAEQKRGENKTARHGTPTGKKEAKEAMPTQEIPSSNDGDDAASCPVCLEDYAAAEHPRQKPCTHTIHS

SEQ ID NO: 209855 - protein, 82 aa, Zea mays
  Clone ID: MRT4577_122981C.1.pep
IFMIYNQLYEQNSLCTKCVGPIMLHEGMRLLCIKSVLGFTWHLHDVYGFASLMIELCNKELYKFHGLELKLDAHLFLMLLEL

SEQ ID NO: 209856 - protein, 61 aa, Zea mays
  Clone ID: MRT4577_122982C.1.pep
GPSRDLRVQESMTARSPFLCATPYKMVFNRQGLTVTKKKKKKRGAPLKGSKLWWGGIEGHI

SEQ ID NO: 209857 - protein, 39 aa, Zea mays
  Clone ID: MRT4577_122983C.1.pep
NKSLFTCPQVFKTLLPTYIESVLGCFFLKKQWVFNLCCP

SEQ ID NO: 209858 - protein, 159 aa, Zea mays
  unsure (1)..(159): unsure at all Xaa locations
  Clone ID: MRT4577_122984C.1.pep
RVAASNMLQKDDPIEHSDVMQNVRWQMRELCNEYQATGPLAKLSNTRGSSWDSPGALINSMTGRWNWSNDSTTPTGGATSEHXTLKSRRWQRXRTEMRSFDGSTVRSYALDSEHNDERSSIQDVLPDPYDADTTDVHLPGAKLIFDGAESHPFDIAACL

SEQ ID NO: 209859 - protein, 91 aa, Zea mays
  Clone ID: MRT4577_122985C.1.pep
LFFSVMLVPSRRRGFVNERLGPAAARAASDALNRNTPPSSTLTHTMSAAGGGGILPSGGPAAAAGAVPPHHLSVHRGHPPSSYDSWARLEQ

SEQ ID NO: 209860 - protein, 201 aa, Zea mays
  unsure (1)..(201): unsure at all Xaa locations
  Clone ID: MRT4577_122986C.1.pep
KMAALALKAISVGAEKVPDKFFEKIPGGYFTPAEQKEIKKHRKERSDRHERERHHSEERSSKRSSRQERSPPTEYSDYYTDDTDYERERERRKRERRRAKSTGTTASRGLSRGRHGRHSSDFDGQHSPPRDMAQPQQGQPYFPPPPTSEYKPYNPQEYAPSPVQDHRPSATPAYGYSPQPALAEPRGVTLDYXQRDAPRSS

SEQ ID NO: 209861 - protein, 78 aa, Zea mays
  Clone ID: MRT4577_122987C.1.pep
TPGGVGVFKPRGKPKGGFDPIPVGDSMGPQFAPRMGKVFPFGKGTNPWVGLPKGKGFKLGFLGGQGGGGFFAQVAAKA

SEQ ID NO: 209862 - protein, 82 aa, Zea mays
  Clone ID: MRT4577_122988C.1.pep
SSPRVLWNPILHVVLSSIVAPEILTTPKTTSKEDRSRDKLTREQGHASLGGGVGDRTAHECDGGTNGHGRTPLTSASTTSSR

SEQ ID NO: 209863 - protein, 81 aa, Zea mays
  Clone ID: MRT4577_122989C.1.pep
RPSRIRTDVTGLADVIELPIVMSPSAVGLASRSSPLDRRSHAHEDADHWPRYTERSIRAPRAVQPMASSDSTHCLHLLPLC

SEQ ID NO: 209864 - protein, 158 aa, Zea mays
  Clone ID: MRT4577_12298C.1.pep
RADRGLLDSLLGRKNHFYDQEKKEKKGDDFDLFGDDEEDEEHQAEITRRAKEQAAKKAEKLAATGKKAESLKSAIVIDVKPWDDTTDMVEMERLVREMVLDGLEWKASKLTPIGYGIKKLQISCHVEDAKVSVDDIQEKMEAIEELVQSTDIDGFTKL

SEQ ID NO: 209865 - protein, 91 aa, Zea mays
  Clone ID: MRT4577_122990C.1.pep
FFFFFFFFFFFFFFFFFFFFFLGNKGMGFLLFYRGRLEARKILIHSKFFGTRVFRLLNNLDIHSFRHPKKKKRELANPSKGGPYFKCDKPG

SEQ ID NO: 209866 - protein, 137 aa, Zea mays
  Clone ID: MRT4577_122991C.1.pep
MKLNIKIERRRLHMMINNHPTVSEVVIGSGEKQPKACNTNYETKSSSIKEPSSSSKLAEEPLPKKERQIIKEDGGGEDEAYPCGTCGGMYSENGVFWIGCDICDKWYHGDCVRITPAEATHIDQYSCPACSNKRSRE

SEQ ID NO: 209867 - protein, 91 aa, Zea mays
  Clone ID: MRT4577_122992C.1.pep
LTSSTLRGDSNFHKKKVKRVPLKALTDRPQNSKINKFFNFTGIFYVWDTQGTNSQFNKGRRTRADTPRRSAARVFNRNRSPSRGSKGATPG

SEQ ID NO: 209868 - protein, 88 aa, Zea mays
  Clone ID: MRT4577_122993C.1.pep
FQQHQEDHFVIRRCLICLAHGRSRLLLVDHPAYSGSQHSQLDSGDSYPQLRSRGRTNTESEALSLCVSGTLSEDEIDWLGRSRPGRPR

SEQ ID NO: 209869 - protein, 70 aa, Zea mays
  Clone ID: MRT4577_122994C.1.pep
NTKKKAPASPDDQEPDTPAFLGPPGTPNQTPPLVEGGTDRAPIPAGFNKALVAKVPLAGGKAGVSLTPGA

SEQ ID NO: 209870 - protein, 243 aa, Zea mays
  unsure (1)..(243): unsure at all Xaa locations
  Clone ID: MRT4577_122995C.1.pep
MARVTAFLLGLSQFPVWAAAGSPAVIQTSSGKVKGFTDDITPNVAQYLGIPFAEQPVGARRWLPPTSVKRSNKLIEANVLGPSCPQFEVDRPNVWLADAPEFIITPRLFQSEECLKLNIWAPLAQCQDGGRKKELLPVLVWIHGGGFVTGGPTVPYQVPSRWVERTGEHIVVGINYRLNIFGFPNSKSLKADEQNLGLXDQRVAFGWIRDNIXNFGGDPSRITPFGXSAGASSVDTTTSTLKT

SEQ ID NO: 209871 - protein, 170 aa, Zea mays
  unsure (1)..(170): unsure at all Xaa locations
  Clone ID: MRT4577_122996C.1.pep
KNQNQCSVLTVVGGPPPPGVPPPFCGGRAFTPSXPPFFSPPMRGMPQKKILIGPPPPHGRWPQXPPPPTPPLFPFPLPLKLSPPASXDFPKPPRQLPPPHWAPPPPGLTPPPRFCPPPXPSPPPPPPLKNKKTPPXNFPGNGWGDPAPXPPPGGPPLFLIGFAPPGAGWS

SEQ ID NO: 209872 - protein, 135 aa, Zea mays
  unsure (1)..(135): unsure at all Xaa locations
  Clone ID: MRT4577_122997C.1.pep
MDKERKQGFFAALKEEVVRGLSPSRSRGKSPAPPRSASPARXADPAPAQDARGSAAAAAAGEGAGAXYLGEQLVARSGSLRPGGEALAPLIEGPDAERLAAGDHDAEDSGRREGFGHWVRXHLTRTPSMXSSAAG

SEQ ID NO: 209873 - protein, 180 aa, Zea mays
  Clone ID: MRT4577_122998C.1.pep
MGGVGEAVEVTELELRIQLMDGGSYNINDNADLLAEILARLDGRSLAAAAGVCRLWAAVARRDAVWEALCLRHVGPAPSAAAAAAVAGPATRAVVAALGGYRRLYRLCLGPALDRLAQAQAQVQAARAHRLSLSLSLSLFSIDCYERLGSGGGPSAGASAPGRRQQPSSLLFLCKPVDVS

SEQ ID NO: 209874 - protein, 79 aa, Zea mays
  Clone ID: MRT4577_122999C.1.pep
CPGMQRCYQNNRGFISQGVFCMHASSCLDKAGASPRVFMYIAAGSLYVWPLAPCNNTYNNKVARGVFFFPKKKKKLGSD

SEQ ID NO: 209875 - protein, 53 aa, Zea mays
  Clone ID: MRT4577_12299C.1.pep
SFLLYLYHLNRAFRKKKKKKKKQKKKKKKKKKKKKKKKKKKKKKGPPLKKKPN

SEQ ID NO: 209876 - protein, 153 aa, Zea mays
  Clone ID: MRT4577_1229C.1.pep
GPGGKVKKFFFFFPKGGSLFKKRVNFETRGPPQFLGVLWEKSRFLPKGLKVKGLGGGVKTLGTPSFFYGKGKVVTGHGFGAHPLARGGEKFSQGGPKSRKGAQVGTPGPPPLGEILGNHFGAPKFFLGGTKKKKKKKKKKKKKKKKKKKKKKK

SEQ ID NO: 209877 - protein, 76 aa, Zea mays
  unsure (1)..(76): unsure at all Xaa locations
  Clone ID: MRT4577_122C.1.pep
ATHVLASSGVLTTTDKASARLKGGAKKAVISRPSANAHMIGDGANENSYHPXMNVAYNASCTNNCLAPVGNDEHDE

SEQ ID NO: 209878 - protein, 99 aa, Zea mays
  Clone ID: MRT4577_123000C.1.pep
LWFWSSFSCFSWQMHRSSRYHHHPLRCLWPCCQWRLSSRPGFCAAQRSSLAIAVLRGVVQWRCSFGRPWCRPPCTPGGGRRVVCHARTRGRTRGRYAWV

SEQ ID NO: 209879 - protein, 93 aa, Zea mays
  Clone ID: MRT4577_123001C.1.pep
FFFIPFFFFGLFWIFFFFLTPPLPFFFKVKTKQHLLMNNPFAAPPKIWETKTQLAQKTILSPTHDTNPTNSFKNTPLPWQRPKPLIPQIQQNL

SEQ ID NO: 209880 - protein, 126 aa, Zea mays
  Clone ID: MRT4577_123002C.1.pep
VAQRKEANNPITFKEIDSRKHLGQGMARAMIYQGELYIIEYGDMMYTASRAKSTLHSLHRALVAMPDRESLPSIEFHFSADDFVWDDLKATGGPVWSYSKRDSVDIDEENVDDSNIWLMPDFGYWA

SEQ ID NO: 209881 - protein, 56 aa, Zea mays
  Clone ID: MRT4577_123003C.1.pep
HLKKKVGFQNEKETKNSGLFYPLAYNVRLFFTKHVAGPGKTACADNLGKTKLKMLP

SEQ ID NO: 209882 - protein, 109 aa, Zea mays
  Clone ID: MRT4577_123004C.1.pep
QNGWIEIRLVDQRPSIAEPTVDAPSRGFEHFSPTNCSVRRRQPPFVPQSTIPHPPRPPGPPTLSLFFLTPLSLSLSLSLSLVLRHTPRPSPGRKEGGGKMMMTRGTMGP

SEQ ID NO: 209883 - protein, 268 aa, Zea mays
  Clone ID: MRT4577_123005C.1.pep
VDFSVFLKLTPKQKDIVHKLEMHDRFKRSAVGSALYIHPCLSGLSEVNAENRAHTLRDDSVDSLMDSINVRDGVKANFFMNILSLANSAGEKVLAFSQYILPMTFFERLLVKKKGWHVGREIFMISGDTSQEDREAAVDRFNISADAKVLFGSIRACGEGISIVGASRVVILDVHLNPSVTRQAIGRAFRPGQQKKVFVYRLVAADSDEVKVHETAFKKEVIQKLWFEWSEQCTTEDFKLGQVDIDDSGDELLDTRAIRQDIKALYRR

SEQ ID NO: 209884 - protein, 83 aa, Zea mays
  Clone ID: MRT4577_123006C.1.pep
MQLDSLGPADNWLARSSSQQLAAAAALAAALLLLAAGAGTESAAGSCGEVTSPVAPCLEYAMGIAAAPSAGCCSEERSLNSRA

SEQ ID NO: 209885 - protein, 202 aa, Zea mays
  Clone ID: MRT4577_123007C.1.pep
MSMAGIARGRSRWRQGDGSSNRNAAHSTVPNPDHQGVVSSRKQATYPGMLSDSVFATVDRQSKTRKAIAVPMKILIEEEFSNDVNSRHISPGAVGRLMGLDSLPSSGIHNKHRHTKSHAPKTSPSSFHGRTGLHDIPHRRSVDTINVFEGMEATKTNMHRSPRSKIGSTTSRSDKVVSADIDFIRQKFMDAKRLSIDESLHI

SEQ ID NO: 209886 - protein, 56 aa, Zea mays
  unsure (1)..(56): unsure at all Xaa locations
  Clone ID: MRT4577_123008C.1.pep
XNXFNILNIXHTIYIXQPYHHLYTLFNPQHXNNMYIPLXXPQKKKNTAXPXXRTQN

SEQ ID NO: 209887 - protein, 118 aa, Zea mays
  unsure (1)..(118): unsure at all Xaa locations
  Clone ID: MRT4577_123009C.1.pep
GRVTLPLRRRRTTYAPMSRTTHPASSPREPRVLELPPAWRSRGASRIRPTVPPVASAAGTFGVSAYTTGLARETVLAGKRGNRSNLIGLLGHRLREDYHTMAHXLYIHWGETKVGEDT

SEQ ID NO: 209888 - protein, 108 aa, Zea mays
  unsure (1)..(108): unsure at all Xaa locations
  Clone ID: MRT4577_12300C.1.pep
IFALPCKNADXPFLAPPKTQIFVGFRKGKKHPNLPIGILVSVVLGFVPVFCQLLFGGKKPVAPVKPAAEGKKPKAPETDGAGTSGAKDXEKGLKGGAXGPRRRAPRET

SEQ ID NO: 209889 - protein, 49 aa, Zea mays
  Clone ID: MRT4577_123010C.1.pep
PTHPPTLLFLVVKPIHKNFVGNIIIFLRTLIKSDHLNDPTPPPGTCSPF

SEQ ID NO: 209890 - protein, 92 aa, Zea mays
  unsure (1)..(92): unsure at all Xaa locations
  Clone ID: MRT4577_123011C.1.pep
PQARILYSARPFFPXCLIPXXFFLTYWGFFWGHFFEIFFPNHIYIGQAKIDPIALKRSPPLKIKTHPKPGGTNWWLPLHAKEPRPGSEKYEG

SEQ ID NO: 209891 - protein, 134 aa, Zea mays
  unsure (1)..(134): unsure at all Xaa locations
  Clone ID: MRT4577_123012C.1.pep
FAFSLLCNVISSLTFLAPIPTSTQLHRXREASGTPYVXCLFSDMLXILYALIKSYETFLITINVDECVIQTIYVAMLFIYASYKAXAALLHDLVLLNAGVFTAYLLVTLLLXQGIKRNGLLDWICVGFSITVFV

SEQ ID NO: 209892 - protein, 363 aa, Zea mays
  Clone ID: MRT4577_123013C.1.pep
MLPAGCGLLSCLRLHKQGDEGRTDPRVADEPAASSSASLGKGSGSSARRFAWAEIESVTAGFSSRVIGQGGFSTVYLACLSSSRLGAVKVQRSSERLHRAFRQELHVLLSLRHPHIVRLLGYCDEREEGVLVFEYAPNGDLHERLHGSGGKATLPWARRLAVAFQVAMALEYLHESRDPAVVHGDVKASNVLLDASLDAKLCDFGSAHVGFSAALQPPEAAAASRASSARARPDPVVGSPGYVDPLFLRSGVATRKSDVYSFGVLLLELLTGREAICADTGCRLAAAVGPTLSEGEVADVVDRRLGDEYDAHEAATVAALALRCVSEGSGMRPSMTEVVRVLQEKTTALISAAGCRPAGKMDS

SEQ ID NO: 209893 - protein, 492 aa, Zea mays
  unsure (1)..(492): unsure at all Xaa locations
  Clone ID: MRT4577_123014C.1.pep
GIIGMHVSGLKNRVMGYAETLTQEALMAAVDTLKERAIVRMPLNEIFEELPEHCTKHSVKIEGKGNIGLIGVLPNNLVPNVPTKTTICKSVIHGMLGPVRTEPSVLSAWDNRLPYPKGEWDPMVNAVLKYGSRIVPFSTDAVLAVEMHLKQMFRKFDNSRRQRQVNDLEVGINGYDQSDFWQPIEMKTSPGFPYVLTRPSRATGKSYLFSQVGEYESGRPKWEFKDELLIHNYETKLEDIRSGRCPQNLTMECLKDERRKLDKIYTKPATRTFTILPPETNILFRQYFGDFAAMVMHTRANHFCQVGINPESMEWSDLINKLLMKGKKGFAGDYSKFDGIGSPAIYHSIVNVVNAWYDDGEENAVARHCLINSIVHRDGICGKLLLKYSQGMPSGFAMTVISNSFVNYYFMAMAWMDIVGRSALSPKLICXSFDTFTKLIVYGDDNXVGRSTSEFLDTYNLQTVAAYFEFXGVTYTDGAKNPIPLSVPYEDI

SEQ ID NO: 209894 - protein, 99 aa, Zea mays
  Clone ID: MRT4577_123015C.1.pep
GWLKLLYLCPRLTTLREWRVHRPATLRAQQSRPGTGQYQWPQMPDWCTDLSITLSQCWLPGKKKHAVFIQSRHTGQTPDYKRARSCRTDTMSLIPVDHL

SEQ ID NO: 209895 - protein, 312 aa, Zea mays
  Clone ID: MRT4577_123016C.1.pep
MLCSDLPTLFYLTSHYCFQMVQLLLSYESLEVNAINSQNETAMDLADKVPYGESKTEIIEWLTEAGAKNARNVGKIDEASELRRTVSDIKHNVQAQLSENAKTNKRVTGIRKELQKLHREAIQNTINSVTLVATLIASIAFVAIFNLPGQYFQDVNSGGDIGEAEIAKLTGFRVFCLLNATALFISLAVVVVQITLVAWETGAQKQVIKIVNKLMWTACLSTGVAFISLAYVVVGPQHAWMAFTASAIGGPIMIGTFLFLAYLLLRPRFKFGEDRQRRIKRASGSKSFSWSIHDGFSDLEAFSDHEKRIYAL

SEQ ID NO: 209896 - protein, 161 aa, Zea mays
  unsure (1)..(161): unsure at all Xaa locations
  Clone ID: MRT4577_123017C.1.pep
VAVAGVKDAVKACMSAGIVVRMVTGDNINTAKAIAKECGILTDGGVAIEGPEFRNKSPEEMRDLIPKIQVMARSLPLDKHTLVKNLRGMFREVVAVTGDGTNDAPALHEADIGLAMGIAGTEVAKESAXVIVLDDNFTTIINVARWGRQHGIQPYPGSQSH

SEQ ID NO: 209897 - protein, 40 aa, Zea mays
  Clone ID: MRT4577_123018C.1.pep
MIRTVKIQYLFYFTTPFQTVSCFVFSRYIAFAIPLDTQYT

SEQ ID NO: 209898 - protein, 323 aa, Zea mays
  Clone ID: MRT4577_123019C.1.pep
LTLVAKLALNVRDKKGNTALHIATRKWRPQMVQLLLSYESLEINAINIQNETAMDLADKVPYGESKTEIIEWLTEAGAKNARNVGKIDEASELRRTVSDIKHNVQAQLSENAKTNKRVTGIRKELQKLHREAIQNTINSVTMVATLIASIAFVAIFNLPGQYFQDVNSGGDIGEAQIAKLTGFRVFCLLNATALFISLAVVVVQITLVAWETGAQKQVIKIVNKLMWTACLSTGAAFISLAYVVVGPQHAWMAFTVSAIGGPIMIGTLLFLAYLLLRPRFKFGEDRQRRIKRASGSKSFSWSLHDGFSDLEAFSDHEKKIYAL

SEQ ID NO: 209899 - protein, 71 aa, Zea mays
  Clone ID: MRT4577_12301C.1.pep
MIIPVRCFTCGKVIGNKWDHYLDLLQADYTEGDALDALGLVRYCCRRMLMTHVDLIEKLLNYNTLEKTETS

SEQ ID NO: 209900 - protein, 116 aa, Zea mays
  Clone ID: MRT4577_123020C.1.pep
VAWETGAQKQVIKIVNKLMWTACLSPGVAFISLAYVVVGPQHAWMAFTASAIGGPIMIGTFLFLAYFLLGPRFKFGEDRQPRIKRASGSKSFSWSIHDGFSDLEAFFDHEKRIYAL

SEQ ID NO: 209901 - protein, 111 aa, Zea mays
  Clone ID: MRT4577_123021C.1.pep
FVFALCGFYFFVSLSAPDLLELHLRTFFLGHGLQPGPRKKTVVLCCRGGHPTGFGVEVQRAGGDGNHAAPATIRRKSGALGCHGPIFHSAMLATPPLISGGGCSGSIKGPP

SEQ ID NO: 209902 - protein, 70 aa, Zea mays
  unsure (1)..(70): unsure at all Xaa locations
  Clone ID: MRT4577_123022C.1.pep
CVSCAIHSHIFRVRSREKLKGRRXSERFRLXXDRPSDVQGGPRPGPSATATAPSPASIASRPYALSFPPC

SEQ ID NO: 209903 - protein, 63 aa, Zea mays
  Clone ID: MRT4577_123023C.1.pep
QKNYSFAQISWYGLRWILSFLLMEGMTHFFHYNAFVVSRLWQQLSPFEVFIISYGVLNFMWVK

SEQ ID NO: 209904 - protein, 42 aa, Zea mays
  Clone ID: MRT4577_123024C.1.pep
AGPGMNGFRRRRLRSRASSRGWTGEAAERKTTRGRTPIFPFS

SEQ ID NO: 209905 - protein, 76 aa, Zea mays
  Clone ID: MRT4577_123025C.1.pep
SVHPPTATAAYFVDNFCRGGEIGLKKNGAPFLNSSQWAWVSVSRSFGIWAPFSARDRLLWEDLLLRCLVWANPCEL

SEQ ID NO: 209906 - protein, 101 aa, Zea mays
  unsure (1)..(101): unsure at all Xaa locations
  Clone ID: MRT4577_123026C.1.pep
EGGIFQDLGVLPXGASIGQTLAYLLKKLSPCGKPTNNTLDSRDSGHDAXLFHIPAVHAVMDSNSQMELLQWHTXNANDNPNIIHSYEISSSGIIQAIGHFN

SEQ ID NO: 209907 - protein, 37 aa, Zea mays
  Clone ID: MRT4577_123027C.1.pep
FRVPPHPPPNMWILGQTKGPPLGFIKIPRGFPPGLFV

SEQ ID NO: 209908 - protein, 86 aa, Zea mays
  Clone ID: MRT4577_123028C.1.pep
KNSRSSPLELVNASLQLVNIVTAVVTCSPDSGSSEMVPSNYIACVSVGSPSEEKCQAWMQMITLVSLKSLHLGDDAFNKGCRAIYC

SEQ ID NO: 209909 - protein, 246 aa, Zea mays
  unsure (1)..(246): unsure at all Xaa locations
  Clone ID: MRT4577_123029C.1.pep
RPNEKMYSILIYGWCKVNRRDMAXKFLKDMLVHGIEPNIVTYNILLNGICRHASLHPDYRFDRTVHAAEDLLKEMRGRGIEPDVTSYSIILHVYSRAHKPELCLCMFRSMKERGICPTVATYTSVIKCLSSCGRLEDGEILLDEMVAEGVCPSPATYNCFLKEYRGRKDVTAALELYNKMKAPGSLTAPDIHTYNILLGMFSKLNRHGTVMDIWSEMCESTVXPDLDSYTLLIHCFCDSQKWREAC

SEQ ID NO: 209910 - protein, 131 aa, Zea mays
  unsure (1)..(131): unsure at all Xaa locations
  Clone ID: MRT4577_12302C.1.pep
MPFRSRHQRLASLTKLLTTHVNAGRHRDALGLFSRMLSAPDLPPLTDPSFAHAFPLALKSATALRVPGADAYFHALAXKCGLLSSPFLASALVASYGXRRLRCLRCXLRTHXRRLCDELPARNAVVWSAMI

SEQ ID NO: 209911 - protein, 66 aa, Zea mays
  Clone ID: MRT4577_123030C.1.pep
PRRSKRVDFIINAKTVLGYKYRRQLYTTRLRCYIILPSFISAAATTASATPSPAPFPTLRAAAAAT

SEQ ID NO: 209912 - protein, 94 aa, Zea mays
  Clone ID: MRT4577_123031C.1.pep
TMFSGLRWRREPLFHWLFRMVIRPQPRLLKPGAPSPMFPVSFFHAILRPLRVIRPVPVPISWLHLLGCWFQNMPCLEGLQCFGLAVIWVLYPHN

SEQ ID NO: 209913 - protein, 91 aa, Zea mays
  Clone ID: MRT4577_123032C.1.pep
GDSSDPRDLTRIAARSFLATAECGTPSSVRICRGLTLRKPPARPPIATTQPGDTPWPRDRWIMLSISGSTRQHRPHPFSLHSLLLLCETTR

SEQ ID NO: 209914 - protein, 99 aa, Zea mays
  Clone ID: MRT4577_123033C.1.pep
KKPPPFFFFKTPSKGASRGAPKGFFCSPTKEVFSKNFVGFTRSSIFFPKGGIGLSFPFKKIFFWYYTKGGSTNRVLVFIPPKGFVSPKHKVLEWFPPAP

SEQ ID NO: 209915 - protein, 79 aa, Zea mays
  Clone ID: MRT4577_123034C.1.pep
KGGLFRRARPTPFCSHKINRGILGGGNNGEGTLKGGPPPPQIIFWAGGVFFPNPVKKSLFFLGAFVKVQGKGLLFWGFF

SEQ ID NO: 209916 - protein, 155 aa, Zea mays
  Clone ID: MRT4577_123035C.1.pep
MARALGACVLLAVLLGALAPAPAPAAAARAHDDQGSGAGIRQPSGEYRGRKVGARTEVRDVEGDGEVQELGRFSVAEYNRQLREGGGGGGRLEFGRVVAAQRQVVSGLKYYLRVVAVEEGGGAGNGGERVFDAVVVVKPWLDSRTLLTFAPAAAK

SEQ ID NO: 209917 - protein, 102 aa, Zea mays
  unsure (1)..(102): unsure at all Xaa locations
  Clone ID: MRT4577_123036C.1.pep
LFAGNHLKKDNRLADYNIMTNSCVHLYVTDGIHICQYPHVWDPIVFANVKAVIEXDXGVLLDEQILMHGCQKLEDNKLLSQCSLSNGHTLHVLVYPTKKMHI

SEQ ID NO: 209918 - protein, 369 aa, Zea mays
  Clone ID: MRT4577_123037C.1.pep
MDALLVTTTFLVPVVALLLGSGSGSAAALPRAFFVFGDSLVDNGNNNYLMTTARADAPPYGIDFPTHMATGRFSNGLNIPDIISEHLGSQPALPYLSPDLRGAQLLVGANFASAGVGILNDTGIQFVNIIRIGQQLRNFQEYQQRLAAFVGDEDAARQAVSDALVLITLGGNDFVNNYYLVPFSVRSRQFAIQDYVPYLISEYRKILTRLYELGARRVVVTGTGMIGCVPAELAMHSVDGECARDLTEAADLFNPQLVQMLSELNADIGADVFIAANTNRVSFDFMFNPQDYGFVTSKVACCGQGPYNGIGLCTPASNVCPNRDVYAYWDAFHPTERANRIIVGQFMHGSTDHISPMNISTILAMDIRN

SEQ ID NO: 209919 - protein, 64 aa, Zea mays
  Clone ID: MRT4577_123038C.1.pep
LPRINRVCNAPLLAPMFPCFPYPPANQTELCMGPVLPEKKRAISAGSTVYLALSLPPGIFVFCG

SEQ ID NO: 209920 - protein, 120 aa, Zea mays
  Clone ID: MRT4577_123039C.1.pep
AALFNPQLVQMLSELNADIGADVFIAANTNRVSFDFMFNPQDYGFVTSKVACCGQGPYNGIGLCTPASNVCPNRDVYAYWDAFHPTERANRIIVGQFMHGSTDHISPMNISTILAMDNRN

SEQ ID NO: 209921 - protein, 60 aa, Zea mays
  Clone ID: MRT4577_12303C.1.pep
LIKITITCPHINTRGRSKEHFQHSTDTGDMNPKCQRIRSTDNPYRNLPFNGSRMMPIRFA

SEQ ID NO: 209922 - protein, 49 aa, Zea mays
  unsure (1)..(49): unsure at all Xaa locations
  Clone ID: MRT4577_123040C.1.pep
CCRPGHFIYHPELYSEMFHVLEDLGGYLNLEQVSTTPPRSXXXXFAFXX

SEQ ID NO: 209923 - protein, 119 aa, Zea mays
  Clone ID: MRT4577_123041C.1.pep
WTTPTREERQPTLPTPNNLLTCPGYIMRRAPSRVRCVPTRCRRHSSCCSPSSSMSPRSARVPPTVVLNGIPGANTGCMGPANNEATEALNDHQGLKFDGVFFFSPPPAERGDVARDPTG

SEQ ID NO: 209924 - protein, 64 aa, Zea mays
  Clone ID: MRT4577_123042C.1.pep
VAEGDLWKGDESTRGPRARHAARSQTVLKQRDAAIRDPTHPRNAKPRKNLHEARDPNGKGKREA

SEQ ID NO: 209925 - protein, 69 aa, Zea mays
  Clone ID: MRT4577_123043C.1.pep
IQGRGLFNTPIAKGFAKAIPPPGLGNTLELSGCWKRNLTIGGATLAPFCALPKWGKIKKTRVMPLATQS

SEQ ID NO: 209926 - protein, 105 aa, Zea mays
  Clone ID: MRT4577_123044C.1.pep
MADENQAGKKEEEEFSTGPLSVLMMSVKNNTQVLINCRNNKKLLGRVRAFDRHCNMVLENVREMWTEIPKTGKGKKKALPVNKDRFISKMFLRGDSVIIVLRNPK

SEQ ID NO: 209927 - protein, 33 aa, Zea mays
  Clone ID: MRT4577_123045C.1.pep
PATMLDSLSLEISVPCIALLEQRIIRTVATVGR

SEQ ID NO: 209928 - protein, 76 aa, Zea mays
  Clone ID: MRT4577_123046C.1.pep
CVQVLINCRNNKKLLGRVRAFDRHCNMVLENVREMWTEIPKTGKGKKKALPVNKDRFISKMFLRGDSVIIVLRNPK

SEQ ID NO: 209929 - protein, 55 aa, Zea mays
  Clone ID: MRT4577_123047C.1.pep
GVRERGDLRRVLLCGCLSVGPIEAMCTFTPRSVVDHQLIITCYSRYEQIVMRLNR

SEQ ID NO: 209930 - protein, 154 aa, Zea mays
  unsure (1)..(154): unsure at all Xaa locations
  Clone ID: MRT4577_123048C.1.pep
FTPTHSIKTPPFAPPPGGLKKNNAPPXGKRPPXSPTSSRPPPPQKTRSGAKTPPGXEEXAPPPRGTLPPRGPPRGTPPKQKPWQTPRPPARRKXPIKXTPSPPGGKTTQPGLKTSPRAPXHXPPLPKKTGPPPRGQPPPPAXPCGAPRGPCPYP

SEQ ID NO: 209931 - protein, 60 aa, Zea mays
  unsure (1)..(60): unsure at all Xaa locations
  Clone ID: MRT4577_123049C.1.pep
WPRPRRAPPRAEVGVAGEPHLDVAEADXXRPXRTXSDVAXREPVXGAHEPGEVQHGVAVG

SEQ ID NO: 209932 - protein, 72 aa, Zea mays
  Clone ID: MRT4577_12304C.1.pep
RRTCQRRMSIAEDVLSIQDSTRPLTRPHTGRTKPHTSDNVTAAEDEENPNNVKKAAPAAPKVLHITLNELDF

SEQ ID NO: 209933 - protein, 93 aa, Zea mays
  unsure (1)..(93): unsure at all Xaa locations
  Clone ID: MRT4577_123050C.1.pep
WFDGGRCSGVVRCSAGGTCSAGGPPPEGGICSVVGIFLVVGGCQPHPSACMRGGGAPSESQESEGNEQHPHGVXRVLLRSGVDKTYVSXPSGG

SEQ ID NO: 209934 - protein, 166 aa, Zea mays
  unsure (1)..(166): unsure at all Xaa locations
  Clone ID: MRT4577_123051C.1.pep
MRVHEYGWELWTRKQTYMMRFVQRGCCWKNWEXPDIVHLTRTTRPTRGPSHSPYQGQLAYGDYHVCVNGEAXKKDVPNVIDYGKINHHPITQVKHLMNKRDCYEERGEPILAELRXLNSYCLNDDNTYNDFEIILVDDDHTLIXNDPRXNCLCNPVHKHCELRSFY

SEQ ID NO: 209935 - protein, 249 aa, Zea mays
  Clone ID: MRT4577_123052C.1.pep
MICSRSIMDNHLMSSFAILLLSSFAAMVAYPARSELQPNQMKNHHSVSSYSPQPKDFPTEQLYSAYLVIQRFKSTITSDPKNVTATWIGHDICGETTYVGFYCGSPAGGDKKLTVTGVILNGYSLHAPTLEGFVNQLPDLALFHAASNNFGGDIPQLTALGYMYELSVAAKDVPLQTRDADDFVGGRGIGRVQLGRCVTADFDFSFNVGINKGHKFPGFTHAKALLLNRNNLSGPLPSKLGFSKLSYLA

SEQ ID NO: 209936 - protein, 98 aa, Zea mays
  Clone ID: MRT4577_123053C.1.pep
ITGFEIWQLSLYTCCHPSTAQGRGGGINAGRDTNPHVRCLIPLLEGGRRGRMTRCRSMGQTPIPHPREPRSLHRWRREARCECCPRFSVENSVPGRLR

SEQ ID NO: 209937 - protein, 178 aa, Zea mays
  Clone ID: MRT4577_123054C.1.pep
MTCSRSIMDNHLMSSFTILLLSSFAATVAYPARTELLPYQMKNPQPKDFPTEQLYRAYFVIQRFKSTITSDPKNVTATWIGHDLCGETTYVGFYCGSPAGGDKLTVTGVILNGYSLHAPTLEGFVDQLPDLALFHAASNNFDGNIPQLTGLGYMYELSVAAKDLPPLQTSDIDGIVGG

SEQ ID NO: 209938 - protein, 60 aa, Zea mays
  Clone ID: MRT4577_123055C.1.pep
RDTYHIIIYVPNIRPNTGESVNFIHQYFYKYLSIHTHTHLLIQPKHHPFIHLLFFFYNHQ

SEQ ID NO: 209939 - protein, 456 aa, Zea mays
  unsure (1)..(456): unsure at all Xaa locations
  Clone ID: MRT4577_123056C.1.pep
MSIISAKSRTTCSRSIMDNHLMSSFTILLLSSFAATVAYPARNELQPNQMKNHHSSVSSYNPQPKDFPTEQLYRAYLIIQRFKNTIISDPKNVTATWIGHDLCGETTYVGFYCGSPAGGDKKLTVTGVILNGYNLHAPTLEGFVNQLPDLALFHAASNNFGGDIPPTNXLGYMYELRVAXRSAITGXPKRDIPPDDSVGLGGNTHGHGHLGNCIIADFNFSXTSESVRVTNFQVXDAKALLLNHNNLSGPLPSNLGFSKLSYLALANNKLTGPIPPSISNLEDSLFEVLLLNNQLSGCLPHELGMLTKAAVIDAGMNQLTGPIPSSFSCLISVEQLNLAGNRLYGQVPDALCKLAGPAGRLANLTLSGNYFTSAGPACAALIKDGVLDVKNNCIPGLTNQRRPAECAAFQSQPKTCPAASTQVTCPAAAASRNAAAPGERKVKDYSSYVTYATLHD

SEQ ID NO: 209940 - protein, 81 aa, Zea mays
  unsure (1)..(81): unsure at all Xaa locations
  Clone ID: MRT4577_123057C.1.pep
PTKSTKRDLISTNPFRSSHPQQACGQCTPPKRLADETVKFAHQHFPQGYAVVQKKVEQKQTVNKKXLPFLNVILKCKKTHP

SEQ ID NO: 209941 - protein, 72 aa, Zea mays
  Clone ID: MRT4577_123058C.1.pep
TLDKCFKNVCELDLVFNFNKLPPFLDKIISGGQVFEPSSDQILKFLEKFERLENQWGPPSFIPKWITGGFPR

SEQ ID NO: 209942 - protein, 234 aa, Zea mays
  unsure (1)..(234): unsure at all Xaa locations
  Clone ID: MRT4577_123059C.1.pep
MQRSKPKISAEEVIEAIFTVPERLEEEPKLKRYGLGANRNRVPHQKPVLKPLEDVPTYSTEFPINIIIGSKAPSMNEDEYQNYRRAAKQHWFMMKQYYEKAADAFREGNQKEVDYLIQEGKRYYQMARLADEKSAREIIKPRETESKNEFCLDLRKQDAGNVSNLLRLHLKQLANIPSFDYLRVIIGIDDSSFKMGQRRRKVMKYVEKNSLQWTEEDLALXILIRINQVENRQG

SEQ ID NO: 209943 - protein, 74 aa, Zea mays
  Clone ID: MRT4577_12305C.1.pep
GPKPLYFFFFSPLLGLFGLAPHPFGFSGIGWVLIPTKSNFFPIFFHPPPPMCFGKNPPTPLFFGPPQPPPFFFP

SEQ ID NO: 209944 - protein, 57 aa, Zea mays
  Clone ID: MRT4577_123060C.1.pep
ALARGGAPTELLDVLWEARRSSVRLRALQQRKEAAHVLELERRFRLFDNLIQRSVPS

SEQ ID NO: 209945 - protein, 127 aa, Zea mays
  unsure (1)..(127): unsure at all Xaa locations
  Clone ID: MRT4577_123061C.1.pep
PXXKSIILYRKASAIIRWLDSLMRNLLGRLSSPGXTESKNEFCLDLRKQDAGNVSNLLRLHLKQLANIPSFDYLRVIIGIDDSSFKMGQRRRKVMKYVEKNSLQWTEEEPRSGNILIRINQVENRQG

SEQ ID NO: 209946 - protein, 96 aa, Zea mays
  Clone ID: MRT4577_123062C.1.pep
DDGGTCIGTIDLGPHDNNGSGSKLVLPASDPSCNKLISITSVFSPDSSPMQHPRPRARVAPTSSGCAKIPTLAPSLAPANTRKNQRRAHEEQEGAS

SEQ ID NO: 209947 - protein, 95 aa, Zea mays
  Clone ID: MRT4577_123063C.1.pep
APHPRLFVGMILILFWQKGLLCRVSLLELSFHPGGVNPEQIKGTPFLGFRDCFLCYFKRIETLGPGLVYFGSQVLMNHFGVEGGGPFHPCWFGGC

SEQ ID NO: 209948 - protein, 79 aa, Zea mays
  unsure (1)..(79): unsure at all Xaa locations
  Clone ID: MRT4577_123064C.1.pep
MGATNGAFSTGADRRPSWLALTFFGHIPALVDGDQVLYXSRAFNRYIATMYASSGAALLPATASAMLVVWLGVESFHFY

SEQ ID NO: 209949 - protein, 80 aa, Zea mays
  unsure (1)..(80): unsure at all Xaa locations
  Clone ID: MRT4577_123065C.1.pep
LSTXRLWWKQANEKKLSPSQRRVFTGLLGFMCVECPLCRSFAEGGGXQCGPVEHFRNNLISFVQNQHIXLWRRRRXLCIW

SEQ ID NO: 209950 - protein, 85 aa, Zea mays
  Clone ID: MRT4577_123066C.1.pep
QIIRIIFDLIYMAAATMAITSRSLVCMPAVCTRDVIVEVRYHYSQDRRQFQFCCVRHLIVLFRPLPVPFLAFWLALLLFDLLFPR

SEQ ID NO: 209951 - protein, 105 aa, Zea mays
  Clone ID: MRT4577_123067C.1.pep
HHASHPITHLYLQYIHIIAGLFIIKMVILLIKSLALSTTSSSSIQIPFPCTNLHIFYSSHSNLTTMIIPIPLYPYYKYLIHSHFIPLSDAPYYSPYFHTNAIYHS

SEQ ID NO: 209952 - protein, 120 aa, Zea mays
  Clone ID: MRT4577_123068C.1.pep
MGDNLLQQSISLLRVKDPLFKRMGASRLARFAVDDQRRMKVVEIGGAQELLNVLEGAKDDKTRKETLKALAALSKSEEAAGFLDKVGAYAIVSSTPDSQEYAEIQTYKTSLLTAFDQLKS

SEQ ID NO: 209953 - protein, 64 aa, Zea mays
  unsure (1)..(64): unsure at all Xaa locations
  Clone ID: MRT4577_123069C.1.pep
GSAVCGPGRQIEMAASDVKYRCFVNSLAXTTDYHSLHNAFSTYTEVLKSKVRSHPRSGHGSVHI

SEQ ID NO: 209954 - protein, 147 aa, Zea mays
  Clone ID: MRT4577_12306C.1.pep
FGTRQVGAPAASLQAQAPGINQGLVSGGSMGGSVGWQGWQGGNAASVGGIPQAIPGAAPSQAAQGGFGPGLPRTIGVALVQQVQAMSPSTLPTQSNSAGLPQDSKALVMSGNGPAINSGSSTDIFSALTQQKPSISAPAPETSSIPS

SEQ ID NO: 209955 - protein, 76 aa, Zea mays
  unsure (1)..(76): unsure at all Xaa locations
  Clone ID: MRT4577_123070C.1.pep
AALVLITRRDVPAMLLSRSRGRATESNRVAESARRLSXGXGSGRANAHALLVGGGLRSLRFDSLEIALALLFFVGG

SEQ ID NO: 209956 - protein, 156 aa, Zea mays
  unsure (1)..(156): unsure at all Xaa locations
  Clone ID: MRT4577_123071C.1.pep
ESEGTFEYGNYYKEVDDLRDVILHFKKHKRDTHAIAGHSKGGNVVILYASIYHDISKVVNLSGRFKLERGIEDRFGNDYMEKIDQHGFIDVEDKTGRIIYRVTKQSLMDRLKTDMHSACLSIDPNCRVXTVHGANDDVVPSEDALEFNKYISNHEL

SEQ ID NO: 209957 - protein, 54 aa, Zea mays
  Clone ID: MRT4577_123072C.1.pep
PTECTEHFKWIKIWDHMPQLSGSLTRGLHRIGQGSPLPLSHGLGCPFLFSEGFP

SEQ ID NO: 209958 - protein, 172 aa, Zea mays
  unsure (1)..(172): unsure at all Xaa locations
  Clone ID: MRT4577_123073C.1.pep
MHRWNGAPLAAVLGGEAADAGHLPGVAPNDRQKKRSXLLAKGKKRASTKTRQGYXGRTVXACRRQHXEDSAEKVGQALRGERIENCPXVLETGEPKMRQMICKTKIDDKQTKELKEKIEDEHRVNMIVDNLPLVECIARQDRGATVYQAGYHVGGKGQNAGNKDEKTLIHKH

SEQ ID NO: 209959 - protein, 102 aa, Zea mays
  Clone ID: MRT4577_123074C.1.pep
AVAPYSGAGGVLSVEMEVGASSLPPHAPLPSGIVVTSDQSGQHLPYEIRFPTVCAFSRGLWLERKCYWSPSGRWINYVLRPSVLRRGSTSSMFSTPRLTWPS

SEQ ID NO: 209960 - protein, 49 aa, Zea mays
  Clone ID: MRT4577_123075C.1.pep
ETELVNSSEQGLYIQKFYLFLGEKRICYAQTKGKERPLKLKYLRPRCVR

SEQ ID NO: 209961 - protein, 71 aa, Zea mays
  Clone ID: MRT4577_123076C.1.pep
VTTSCVALEDIRVTINNVSIYNYRMFFSEYVIIEAIKSTDVTISGVVKRVDQNINNYVIAKARSVSYFVSK

SEQ ID NO: 209962 - protein, 116 aa, Zea mays
  unsure (1)..(116): unsure at all Xaa locations
  Clone ID: MRT4577_123077C.1.pep
SNQTIWFGHFTTSTILSPSPGIRTVMGSATAYLCGHLHTLGGMMLVLHTRHFTGTLELEVGDWKDNTRYRISAFDHDLFSFADVTFDKWPXSLITNPKSLLYSCAKHATLKALLFD

SEQ ID NO: 209963 - protein, 113 aa, Zea mays
  unsure (1)..(113): unsure at all Xaa locations
  Clone ID: MRT4577_123078C.1.pep
SLFRFIGGVSRNMIVANVFASFMLLVVMVLGGFILVRDKVKKWXWIWGYWISPMMYAQNAISVNEMLGHSWDKILNSTASNEALGVQVLKSRGVFTEAKWYWIGFGAMVGFTI

SEQ ID NO: 209964 - protein, 217 aa, Zea mays
  unsure (1)..(217): unsure at all Xaa locations
  Clone ID: MRT4577_123079C.1.pep
MDEDEGPVMGIDLDTIYSCVGVWHNDRVDIIHNEQGNCNTTCYDAFIDIELIIRDDAKNLAVMMPNITVFLVXLLIGRRISVPAEHRDVNLCPFHVIPGPVDEPMIVINYKDQEKQIAAEEIXSSMVLIKMKEIAEDYLGSAIENAVVTVPAYFNDSQRQATKDDGVIAGLNVMRIINEPTAAAIAYGLXKKATSSGEXNMLIFDLGGGTSDVSLPP

SEQ ID NO: 209965 - protein, 222 aa, Zea mays
  Clone ID: MRT4577_12307C.1.pep
MVPLPLLPSCDRPGWRAVRRVPAVYLGAYDDEDAEERAHDLAELKYWGPAGTVLNFPLSGYDEERREMEGQPREEYVASLRRRISGFARGVSKYRGVARHHHNGRWEARIGRVLGNKYLYLGTYATQEEAAVAYDMAAIEHRGFNAVTNFDISHYINHWHRHCHGPCDGSLGAMDVAPNVSLELDLLECPVTVRLSLEETTGDDEFHNREDYLGHLFGVQQL

SEQ ID NO: 209966 - protein, 69 aa, Zea mays
  Clone ID: MRT4577_123080C.1.pep
SSELDLLLHTEVLPINHHITCDVSRAIGISLTWDREPALGLFHIIPVRRGGSRSAWRCWRSGPSSQSHA

SEQ ID NO: 209967 - protein, 131 aa, Zea mays
  unsure (1)..(131): unsure at all Xaa locations
  Clone ID: MRT4577_123081C.1.pep
MLGHAYLDQHLFCXIQGQHLTGAGIVGHDGSARSHLESFPXLKPEEVAGIIKDFDEPDTLAPTGLFVGGTKYMVTHSEPEVTMRRKKATGGITIKKTGMSLIIGVYYKPMTAWQCNMAAERLRHYLIEQGF

SEQ ID NO: 209968 - protein, 221 aa, Zea mays
  unsure (1)..(221): unsure at all Xaa locations
  Clone ID: MRT4577_123082C.1.pep
MALAASHHGFLPFAPAATPTPSRGHLRFRAARPLPRPARRICCQSINSANVLGASSTTSDEAVPVPVVQIDQDSDRDATIVQLSFGDRLGALLDTMKALKDLGLDVTKGSVTTDSAVTQTKFHIMRFGRKVEDPDMLERIRLTIINNLLQYHPESSEKLAMGEFFGIKPPEKKMLFCIVLSRFGHLFNYXVDVDIATHIVVEDDGPKKSILYIETADRPGL

SEQ ID NO: 209969 - protein, 259 aa, Zea mays
  Clone ID: MRT4577_123083C.1.pep
MALAASHHRLLPVAPAPAATRTPSRGHLRFRASRPLPRPRSRRICCQSINSTNVLGASSKTSDEAIPVPVVQIDQDSDRDATIVQLSFGDRLGALLDTMKALKDLGLDVSKGSVATDSAVTQTKFHIMRFGRKVEDPDMLERIRLTIINNLLQYHPESSEKLAMGEFFGIKPPVKKVDIDIATHIVVEDDGPKRSMLYIETADRPGLLLEIIKIIADTNIDVESAEIDTESLVAKDKFHVSYRGAKLNSSSSQVLINCL

SEQ ID NO: 209970 - protein, 82 aa, Zea mays
  Clone ID: MRT4577_123084C.1.pep
MADVRGPTGEARRGAQPQPGPDKNPPKYKVNRFKESLQCKINKLPMFLCSSGSTVVCTHFCNFSLPYLSHRTVIPVPGGPTG

SEQ ID NO: 209971 - protein, 97 aa, Zea mays
  Clone ID: MRT4577_123085C.1.pep
VDVDIATHIVVEDDGPKRSILYIETADRPGLLLEIIKIIADTNIDVESAEIDTEGLVAKDKFHVSYRGGKLNSSLSQALTNCLRYYLRRPETDEDSY

SEQ ID NO: 209972 - protein, 63 aa, Zea mays
  Clone ID: MRT4577_123086C.1.pep
VVYSQRHQFVPFDHLHAVSCGAYMQPQFPFRQVVGAFLQQCFPFSRLRAFSCGAYWQQPHRVP

SEQ ID NO: 209973 - protein, 227 aa, Zea mays
  Clone ID: MRT4577_123087C.1.pep
MFAMSSAGGKAEPGLLVKQGSKLHAKMLSKEAAAQLAVPSFRVYYSVASAGAVPFLWESQPGTPKHDSSSAAELPPLTPPPSYYSAGRGGAGAGRSRSRRPGLLAAILPRITLHRWPGSSRTTSACPSWSSTSWSSSSSNTSSTMSPVFTVQSSPAVHVGASRGHHGRAISAGGAYDEATPRCFSVERECYERRVVKGCGVAVALRNALATVVVGKPGRRAATSAAA

SEQ ID NO: 209974 - protein, 93 aa, Zea mays
  Clone ID: MRT4577_123088C.1.pep
TINRQGTAKEDSGVEPQEENVVDPDQGVDDFSVLDEGNVVAQCTSDQLRTTMEDNAAEMQEVVEQEGAIFEKGVTSDGITVEDQDKEMDNLQA

SEQ ID NO: 209975 - protein, 137 aa, Zea mays
  unsure (1)..(137): unsure at all Xaa locations
  Clone ID: MRT4577_123089C.1.pep
NDKQKEKXDKKSTNQKGTXKKKTXQKKKKQKRRXRRKRGNRXTKQTRAARGAGEATTXGRGRSGXAGRRKRPKEGKQXXFFFFGGKKRRKRXXRGGEEXERGKGXGXGTFFVRFLTGKEGGRQGKNTAGNGXRAGRR

SEQ ID NO: 209976 - protein, 42 aa, Zea mays
  Clone ID: MRT4577_12308C.1.pep
HDSGKSVKITFKRGAQINLLKGHLNFFFFFFFFFLFFFFFFK

SEQ ID NO: 209977 - protein, 38 aa, Zea mays
  Clone ID: MRT4577_123090C.1.pep
AFRTTYMCCINQFVRLGIILGRGNTSRGEEYNKPIYTA

SEQ ID NO: 209978 - protein, 77 aa, Zea mays
  Clone ID: MRT4577_123091C.1.pep
CVLVSCHLPFSYSFYVLFLLFTLYVFFFIVTFISLFFIFFSSLYLFFFFFNQIFVVGWSLDFVNSYRFGGDFKISFF

SEQ ID NO: 209979 - protein, 161 aa, Zea mays
  unsure (1)..(161): unsure at all Xaa locations
  Clone ID: MRT4577_123092C.1.pep
LEAGRAGIVCLLTLRDISHDPLKHQADGSDERSRAARCRRSGVEDANINNETSSFTIDCTKPVEDEIMEVASLENLLLERIKVLGDKAGNLGDSDTISRENTKVTVTSDGPFSDRHLTVLXTKKYLKSHNGRDXLPLLAANXDRNVYELRYFYIADNEGEE

SEQ ID NO: 209980 - protein, 63 aa, Zea mays
  unsure (1)..(63): unsure at all Xaa locations
  Clone ID: MRT4577_123093C.1.pep
NFXLVFGLXTQXHRQLSDYQLWHXKTEPATVLGDDQCFKVCCPKSIFVALLWINLVKHSIDMD

SEQ ID NO: 209981 - protein, 57 aa, Zea mays
  Clone ID: MRT4577_123094C.1.pep
KPLLVLQQKKNFHLKMKNYLKPTLLPYQKNNMVITLLPTRQSHLIFIHKTQPALNIP

SEQ ID NO: 209982 - protein, 63 aa, Zea mays
  Clone ID: MRT4577_123095C.1.pep
ERCMSVVVPSHFHSFSVVSFVALEHADQEFYQEPLCQQASVSHKFPAGVAHQKKNSEASSRAE

SEQ ID NO: 209983 - protein, 184 aa, Zea mays
  Clone ID: MRT4577_123096C.1.pep
MLLRSSSTPFLRSFLSSPSPPSSLQLRRAFSDGHLPSLNPSSSGDNDSNRTTGLHTELSFSIYNTFSKAKLEPHQEQEMEEEQEQTAQPELPELPLFLARGMGIDRLASGLFTAGMGSEAALARMASGVDQKAVLALDAQYKEMVDEQPGNALFLRNYAQFLHEVKCDPRRAEEYYSRAMLADP

SEQ ID NO: 209984 - protein, 105 aa, Zea mays
  Clone ID: MRT4577_123097C.1.pep
MEEDLEVDDEDSWDLVGRDLRLKATFLYIDLSRVITFCEGEEHKKALTVLANKFFYSMDELSDAVESRSLPLTQVRYSDTADALREVVAVLAPSLLQVGPHDPEE

SEQ ID NO: 209985 - protein, 52 aa, Zea mays
  Clone ID: MRT4577_123098C.1.pep
ACCLLSQSGTQLDTLERDVTDQASTPLHQRRLACTVDPHTYWSARTEVGGEG

SEQ ID NO: 209986 - protein, 46 aa, Zea mays
  Clone ID: MRT4577_123099C.1.pep
GKPPSPKPRTHKPTPPRFPPSPKPPSPKPTPRRYPPSPGPKIEEVD

SEQ ID NO: 209987 - protein, 69 aa, Zea mays
  Clone ID: MRT4577_12309C.1.pep
VPTCRSIVVVVEAQAHYCTPGHKACRQLYASVPGVQRCPDKRRLAYTTIGRSTVRRDSVVETRELTRGS

SEQ ID NO: 209988 - protein, 43 aa, Zea mays
  Clone ID: MRT4577_1230C.1.pep
KGNRFNFYFRKKIEYNLEKISYIKFTDYEKIIENLTEQMKMRA

SEQ ID NO: 209989 - protein, 59 aa, Zea mays
  Clone ID: MRT4577_123100C.1.pep
PPSKVLVPKLKLAKARKALLAPKARGRPPAKVKGKFSADEVPPPPAGGPAPGAFFQEMD

SEQ ID NO: 209990 - protein, 58 aa, Zea mays
  unsure (1)..(58): unsure at all Xaa locations
  Clone ID: MRT4577_123101C.1.pep
CYISNKITYIKSELNHVAMARTKRKPTCDSDYRINSVQXICSPPSENXDHPTQSVSRI

SEQ ID NO: 209991 - protein, 113 aa, Zea mays
  Clone ID: MRT4577_123102C.1.pep
TELTEGRLAFFFISEQEKTTLDGNGTGKRTRLVHKRGGLMCYTTQKEMRGEMPLTGDPSGVSFPAGGGGVKHGVGKLMRAVSVLEERARGYGDNSFLETGHSRAKPFERRTAL

SEQ ID NO: 209992 - protein, 154 aa, Zea mays
  unsure (1)..(154): unsure at all Xaa locations
  Clone ID: MRT4577_123103C.1.pep
PVVPEPTVYHPVTIHHAPGHTHPIVTRRASGVLRPVDMLILAADTFATPPDASPVPFSVCTALADPHWRRAMEEEYAALLANHTWDLAPRPPGTNVVTGKWLLRYKLTSNGSLDRYKARWVLRXGFTQRPGVXNDETFNPVVKFATVRAGLFLA

SEQ ID NO: 209993 - protein, 108 aa, Zea mays
  Clone ID: MRT4577_123104C.1.pep
WWETMGRRQAYSCVMVHPFGHVLTSGTKYIRSVGGISTPTYCVTELEFYQPPVYTKPLLPSLPFQINIPGVKTPLTILRNLFLQVHLKMILFYRFKFQKTLFYNHPLF

SEQ ID NO: 209994 - protein, 30 aa, Zea mays
  Clone ID: MRT4577_123105C.1.pep
IIFFFSCSFAYTLALPEKARLYLQAWLGFL

SEQ ID NO: 209995 - protein, 321 aa, Zea mays
  Clone ID: MRT4577_123106C.1.pep
MSSSAGSPRVTERKADRDSHEHHDDDDDGEKGSGFFDKVKDFIQDVGEKIEEVVGFGKPTADVTGVHIPHISLEKAELVVDVLITNPNPVPIPLVDIEYLIESEGRKLVSGTIPDAGTIHAHGSETVTIPFLLVYDDIRSTYREIEPGSVIPYKVRVVLHVDIPVVGRVSLPLEKDGEIPVPYRPDVSVDRIKFEQFSFEESTATLHLSLDNRNAFDLGLNSMDYEVWLGGVSIASAELREATDIKRREVTTMNLPISFRPKDFGSAMWDMIRGKGTGYTIKGHIDVDTPFGHMKIPISKEGGTTRLKKGDDDDDDDDDKD

SEQ ID NO: 209996 - protein, 67 aa, Zea mays
  Clone ID: MRT4577_123107C.1.pep
MVRLCAGEHTSSRKYKGMDRTKLWQGRAKTPAGGVFFLPGVAEKGTQRTSHHGKLEGTGGELKSYML

SEQ ID NO: 209997 - protein, 58 aa, Zea mays
  Clone ID: MRT4577_123108C.1.pep
LKTSTSKTPQLFPKKKKKNPRGPVKIPPLKPADNPHDSLSQQTPPGKFHRHRQNREAC

SEQ ID NO: 209998 - protein, 79 aa, Zea mays
  Clone ID: MRT4577_123109C.1.pep
EGTGFSSADASHGMDNMPSDDVLVHPLLEVAASRRRIVRSRGRYQQDENHASSGVNAQSSIALPTMIHTYFPLSMRRDR

SEQ ID NO: 209999 - protein, 71 aa, Zea mays
  Clone ID: MRT4577_123110C.1.pep
ISTNFNNYFWGQVGNLKCRRILDKKKKKSFFLVGPGTFWDRGPVPQKKLKQNGEKYIFKQENFPALLFGIC

SEQ ID NO: 210000 - protein, 94 aa, Zea mays
  unsure (1)..(94): unsure at all Xaa locations
  Clone ID: MRT4577_123111C.1.pep
ERDVIMREFRSGSSRVLITTDLLARGIDVQQVSLVINYDLPTNRENYIHRIGRGXRFGRKGVAINFVTEDLQRILRDIETFYNTTVEEMPMNVA

SEQ ID NO: 210001 - protein, 94 aa, Zea mays
  Clone ID: MRT4577_123112C.1.pep
SVERPVAVEHLGRGLFLLPGGGRFFNRGGVGTSGVCAGCGCWRTVFFGDTVVYVQGWKLNFGQGIRELVHTFHGHVHDLVPVQVHLLLDGDAVH

SEQ ID NO: 210002 - protein, 73 aa, Zea mays
  Clone ID: MRT4577_123113C.1.pep
RSPWRSSTPSFKQCAEEPPARIGCGRSHGCTHRCSPQGSISLRMSFSSGASSGTSPEATHGAMYGRLFLRLCC

SEQ ID NO: 210003 - protein, 99 aa, Zea mays
  Clone ID: MRT4577_123114C.1.pep
NPLAWFLAVSTTMSPLEDSSWHVSSPMPLFPTVTRAILLLVGLAAAAAVVCAQSGFMQVLFRILHRAGRWMMHIYMHRPHIRYYISNGNSSTVCAGRVG

SEQ ID NO: 210004 - protein, 123 aa, Zea mays
  Clone ID: MRT4577_123115C.1.pep
TDSVIVVNQTKQPHSFVPWKKRNQTVAVIGKPKAVSSAAGRDRQVGSFCPLHPVARRSIHLKKKEPSFHKCHESNNNLFVTAGHTDAFVRQVGKQTYMTPNKQCYYANDIIFYDVSDNINLLS

SEQ ID NO: 210005 - protein, 59 aa, Zea mays
  Clone ID: MRT4577_123116C.1.pep
AMAQSGSGITSQLACSCTNVSVVAGASRARCPESVASHRKFGRVTIACGASPYRGSPRT

SEQ ID NO: 210006 - protein, 139 aa, Zea mays
  Clone ID: MRT4577_123117C.1.pep
ANMQLVFILNTAVIYFLSSKTFLYMDSTCLMVHAHGCQHASSCYQHNSKPMYKKRGGTKHIIYVFLVFGNSGESYLTKSLGRGFKATSLYFQGPSPDPIQMGASDTMSSPFCFWKPSLQFSSFIAHILPFSPYLDVVLL

SEQ ID NO: 210007 - protein, 217 aa, Zea mays
  unsure (1)..(217): unsure at all Xaa locations
  Clone ID: MRT4577_123118C.1.pep
PAGEEAGSDLPEIQGTESAPFKSLLEAYFRHGAESEYQVKKKDDEEYKPAAKSALKKAVAYAAGQKKKLDAAAKRAEKDAQDEAARLAVLEEAKKIKITNDPSLPEPVSISLHQTDSSVIGTLRKSKDEPTEGVKRVSVQGRVNRVAKQGGLIFVTLRRGVNYMQCLLSGDLSKTYDALTLSRETSLEIIXELWEVPAGAHAPXRPRLRADYFRVIA

SEQ ID NO: 210008 - protein, 145 aa, Zea mays
  Clone ID: MRT4577_123119C.1.pep
SSEYGSRREGEKQIRFRTADKDKRVGAQQQTTQPPGHKDKERRDPRKYSAHGAGRPRQDTTTSEAWRRTKTGQRRTMPRHRAWHDKRGVRRNVQARNKRTGETQRRTQRAHRKADEDLAREALKRGRTKADRASSLRYQQDQPKE

SEQ ID NO: 210009 - protein, 90 aa, Zea mays
  Clone ID: MRT4577_12311C.1.pep
STQLYAVITLGRHDYLATSMLAFYSTSNWWSLGCWPVFASDKPLYSILLNIIAHYIPCPTVLLGFIILGHQIVIFTVNCSHMTHEFLHQY

SEQ ID NO: 210010 - protein, 407 aa, Zea mays
  unsure (1)..(407): unsure at all Xaa locations
  Clone ID: MRT4577_123120C.1.pep
MARVRSTARIDREGDETEATETVLISEAMRRSGLATSGDIPATEAERSDVEETDSEDDYXAVPSKPSHLDFGKSTISEADLPKMVKLGYFSEAKKELIRFGGKETIPKPGKNEVVVFKSLFKAGLRFPLNKMIVDLLKKFGIYLHQLTSNAIVRLIVYIEALRSQGVEPFAEGFCXVHELHYQIKARGDGLHENFGCYNFAYRKTTXKFPVNSYRSKWPAGWKSEWFYVRVDEDEDKLVQSPLELIFGETXXPPCKMLPGSPGQIALAEFRVIADHIGTRDLVQEFLAFRVFPTLKEWEMPKLEGKXKKGELVRLPYHFKFKKLFKVPCQEWLDTIKVMCNEILGNYSKXEDQLMTAAFGTRPKRRLNRVXDALGFEYPDYERLDKGAEGQKRKRVADVLNKDDEEQ

SEQ ID NO: 210011 - protein, 248 aa, Zea mays
  unsure (1)..(248): unsure at all Xaa locations
  Clone ID: MRT4577_123121C.1.pep
APDEPAAVPAPVPETESVAEPAAVPAPVPETESVAEPAAVLAPAPETKPDAKPAAVPAPAPENKPDAEPATAPVPETKSVAEPAVAAAAPVPETKPVAESAADAXCFSPETKPDAEPAAAAPVPETKPVAESAADAVAAQAPETKSDAEPDAAPVPGTKPVAESAADAVAAPAPETKSDAEPAAAADPAPEIKSDAAAADPAPXTQADAAAADAAPGAEPDAAPLEDTAADKGGSEESSQPVNNGPLT

SEQ ID NO: 210012 - protein, 448 aa, Zea mays
  Clone ID: MRT4577_123122C.1.pep
MATPGEQPAEVVSVEMPAPDGWTKKFTPLRGGRSEIVFVSPTGEEIKNKRQLSQYLKAHPGGPAVSEFDWGTGDTPRRSARISEKVKVFDSPEGEKIPKRSRNSSGRKGKQGKKETPETEEAKDAETGKEAEEAPSEDAAKETDVEMKPAEEVKGASAETEDADMADAPAPAPMEEDKKQTEELAEAIAAPPVPSEEKKDVKPAEPEAAASNPTEDSAPAPAEPADVAAPAAETKSDAKPAAVAAPVPETKSDAEPAAVAAPAPETKSDAEPAAVAAPAPETKSVAEPAAVAAPAPETKSDAEPAAVAAPVPETKSDAEPAAVAAPVPETKSDAEPAADAAPVPEMKSESEPAAVAAPASETKSDAEPAAVAAPAPETKSDAEPAAAAAPVPGTNSDAAATDPAPGTKATAADPAPGAPAENSTDKDGSQESQPVNNGQLPHSTVKCT

SEQ ID NO: 210013 - protein, 192 aa, Zea mays
  unsure (1)..(192): unsure at all Xaa locations
  Clone ID: MRT4577_123123C.1.pep
MPAPDGWTKKFTPQRGGRSEIVFVSPTGEEIKNKRQLSQYLKAHPGGPAASDFDWGTGXPLTTTPCYFFKSLALIEMWMALEILSSPSKMLCKXDTPRRSARISEKVKVFDSPEGEKIPKRSRNSSGRKGRQGKKEAPETEEAKDAETGQDAPSEDGTKETDVEMKPAEEAKEAPTETDDAEKAADKADDTP

SEQ ID NO: 210014 - protein, 112 aa, Zea mays
  Clone ID: MRT4577_123124C.1.pep
NISCDPACARSFHCFLLETAVCLACCKDLHTLACIPVSFSLLCLMKTPDLTCLPDQHAGLMRTFSCAEMLSCWNTAKCEMVPPVKNDSMQNAKRLPLFLKLAVEVRYQSTGR

SEQ ID NO: 210015 - protein, 202 aa, Zea mays
  unsure (1)..(202): unsure at all Xaa locations
  Clone ID: MRT4577_123125C.1.pep
MATPGEQPAEVVSVEMPAPDGWTKKFTPLRGGRSEIVFVSPTGEEIKNKRQLSQYLKAHPGGPAVSEFDWGTGXTFDYHSVISLDLWLXQMWMALEVLSSPSKMLCKXDTPRRSARISEKVKVFDSPEGEKIPKRSRNSSGRKGKQGKKETPETEEAKDAETGKEAEEAPSEDAAKETDVEMKPAEEVKGALCXTEDADMAD

SEQ ID NO: 210016 - protein, 103 aa, Zea mays
  Clone ID: MRT4577_123126C.1.pep
PGRPTRPHAPECTTPSGSHSPPAAPSTSFGSFQLMLLSRQHARFLLIRLAFLCQPRTPRRVTAHTPAAKDLPYTDAADTTGTSTRNAETNPKYNNYHNATLTT

SEQ ID NO: 210017 - protein, 113 aa, Zea mays
  unsure (1)..(113): unsure at all Xaa locations
  Clone ID: MRT4577_123127C.1.pep
FCPMDFIXHVLIVCHFFCLWNFHGQIASSKQLVAIGLFRFVLHETCSSPXSSLPPSKLCSTTYGKELDKVTGQKRRGVINYDTSLCLVYPYISTLKCLLIHLNKASHIYSPQL

SEQ ID NO: 210018 - protein, 428 aa, Zea mays
  Clone ID: MRT4577_123128C.1.pep
MPAPDGWTKKFTPQRGGRSEIVFVSPTGEEIKNKRQLSQYLKAHPGGPAASDFDWGTGDTPRRSARISEKVKVFDSPEGEKIPKRSRNSSGRKGRQGKKEAPETEEAKDAETGQDAPSEDGTKETDVEMKPAEEAKEAPTETDDAEKAADKADDTPAPAPMEEDEKETEKPAEAVVAPLAQSEEKKEDAKPDEPEAVAPAPVSNPTENSAPAPAEPAAVPAPVPETESVAEPAAVLAPAPETKPDAKPAAVPAPAPENKPDAEPAAAAAPVPDTKSVAEPAAAPAPDTKSVAEPAAAAPVPETKLVAESAADAVAAPAPETKSDAEPAAAPVPETKPVAESAADAVAAPAPETKSDAEPAAAADPAPEIKSDAAAADPAPGTKADAAATDAAPGAEPDAAPLENTAADKGGSEESSQPVNNVNNGHST

SEQ ID NO: 210019 - protein, 78 aa, Zea mays
  unsure (1)..(78): unsure at all Xaa locations
  Clone ID: MRT4577_123129C.1.pep
VFNPLKFXPTFKAKKKEFPNGRLAMLGFLGFLIQHKVPGKGPFDNLLQHLFDPWHNPIIQPFSGLVKVEEENDPSLVS

SEQ ID NO: 210020 - protein, 82 aa, Zea mays
  unsure (1)..(82): unsure at all Xaa locations
  Clone ID: MRT4577_12312C.1.pep
PLAGLNPAAYLERRIXLPLSQVAAANHASFLTQQQXLLPFYQQWADNHATLLQLQQWLPFDQLGXTDPAASYQQHIIGGALF

SEQ ID NO: 210021 - protein, 258 aa, Zea mays
  Clone ID: MRT4577_123130C.1.pep
LLNISISARDQVASAPGVLDALTAALRSGDAAHHAAAVVHSLLCGGEPHRAAVCERRPLLAALVALLRAPPHRPGATRATKDALRALFGAALYPPARAALVSLGAVQALFALVLTDARAGVVEDATAVVAQVAGCAESLEAFRWVSGVRILLDLVESGGAATPRARENAAAALLNLVVAGGEAAAADVVAVGGAEETVRLLAEDSAASPRGKAKAEALLRALEDAAARRREHRLADFLDGLVQSDPYISSPASASTHG

SEQ ID NO: 210022 - protein, 75 aa, Zea mays
  unsure (1)..(75): unsure at all Xaa locations
  Clone ID: MRT4577_123131C.1.pep
FRLAYSIKATFSTTQMLPTTAAXVRAAVDHGRPLLLPERAARHAHPGYDLHAAALADVLHSHVQWYTRGRHDGPA

SEQ ID NO: 210023 - protein, 38 aa, Zea mays
  Clone ID: MRT4577_123132C.1.pep
VALLGSQECQPPELIEWLAMICRPFVSTSVRTFGRTIV

SEQ ID NO: 210024 - protein, 145 aa, Zea mays
  unsure (1)..(145): unsure at all Xaa locations
  Clone ID: MRT4577_123133C.1.pep
KLEGKTRIRGEKGRQNTKKGEKRKKKRGRGLGSGTLKLGGKKEPPKGKPQKQRGKKSXKKSKNGGNIRKVPALRKRAPSPKKKKRXEKPKEFQKPQGLKTSPQLNKKGPPKKGKVATKKRKGDPPNGGRKGPKSNPKREKRKKKF

SEQ ID NO: 210025 - protein, 277 aa, Zea mays
  Clone ID: MRT4577_123134C.1.pep
MSHYRRLLRQIEEKPIASQCSEFPVVGPPKGSSTPGVSEMPAQRTKLDIFAALEDSRCTLFAGYMMAVLRQNPSGLSDADKTSLAASRFAAIEKKPFHFLHCWAILKDQPKWMDNHMGQQQQQANANPTHSNTVDLDAEESVPSSFTSKRPLGRDASKEKAKRTKSVDTSSSDSEFMTRMGDLSLERLSVYKTAVSTEEKKLDSMNRNVRQKLLLEKKQLNLEKLRLERQKLKEDKEEEIMILSMDLSKCNPLLRQYYEAKQKEILARVTGSTSSGQ

SEQ ID NO: 210026 - protein, 129 aa, Zea mays
  unsure (1)..(129): unsure at all Xaa locations
  Clone ID: MRT4577_123135C.1.pep
PMPASDASTVAYKPANTAMDIKIDTSAPSSAPSWSPCRSPWRCPLRLPLGVPPGSPPRSQPPSWAPSWRTSLRAPLAEAPDPGPFRRRRGLGLGARVVFFASSGRVGRRVFGGLVRAGXPALVLVGGLA

SEQ ID NO: 210027 - protein, 51 aa, Zea mays
  Clone ID: MRT4577_123136C.1.pep
SGTSSTRIGPTRLLSTARVCSSYAIIESPFIQYCSSVEDQHLSWHRVYFRA

SEQ ID NO: 210028 - protein, 105 aa, Zea mays
  unsure (1)..(105): unsure at all Xaa locations
  Clone ID: MRT4577_123137C.1.pep
LVLDLYSSRDEKVLPLPEYFNLVDTETTLKTIEXVPDEESRHLDERLIDVIVGHSFLLXHGDCTESFKEFDNDNICGTVYVLMXMFVVLTFGTQMPMDRDQVIPL

SEQ ID NO: 210029 - protein, 56 aa, Zea mays
  Clone ID: MRT4577_123138C.1.pep
MNTTGVEIIRNDQGNQTTPSFVAITDSERLIGDAAKNQVVMNPINTVFDAKRLIGR

SEQ ID NO: 210030 - protein, 137 aa, Zea mays
  unsure (1)..(137): unsure at all Xaa locations
  Clone ID: MRT4577_123139C.1.pep
TLGQSTRPGGEDESVDDTAAKGGXKADTXRQQEQPPFGKRSYVSRTEECIKNLGAGLEPEKAGGFKKGARGATKGHQXERKDKRGPARRTREEEASGGTRKKQERKQKKKQKKKKKRKKKKKKNKKKKKKKKKSLYS

SEQ ID NO: 210031 - protein, 87 aa, Zea mays
  Clone ID: MRT4577_123140C.1.pep
LSVIYLILIKIVCYISDLKSFGIVFLFAMILKTCKCLLYINFFISLFCFPLKFIQYILVLFKREIFCHFVVVVFFFIIYLKHAKFHF

SEQ ID NO: 210032 - protein, 169 aa, Zea mays
  unsure (1)..(169): unsure at all Xaa locations
  Clone ID: MRT4577_123141C.1.pep
WSNMAFCTMYTIHLSVIVLLAVTYMHVPVTAIIVVPTSNCYTFDNESRLVDFTHLIGNVFEYKEQGSPRSDLVVEFCKDVQKRSQEGYLEFGRFVSPHSFLTGSGPIDYIQKMHXGDLVHCETTFHKMGRTAQVNIICGHCSNKVCKDEQGCICNISYHERMVQGDCRT

SEQ ID NO: 210033 - protein, 101 aa, Zea mays
  Clone ID: MRT4577_123142C.1.pep
GYPELQGRATDAGAQIAVEKLQAVAAVLLSRRSCRPEVPILLSSPTSSTSRRAGSLPKRVPAIPSAGTGQVCRTPIRSTGDPVNHVRSMVALYYLPLRFVQ

SEQ ID NO: 210034 - protein, 159 aa, Zea mays
  unsure (1)..(159): unsure at all Xaa locations
  Clone ID: MRT4577_123143C.1.pep
QAFCTMYTIHLSVIVLLAVTYMHVPVTAIIVVPTSNCYTFDNESRLVDFXPYNHALHYAPCTLKLDEILSCCSPKQLSDXLIGKXFEYKEQGSPRSDLVVEFCKDVQKRSQEGYLEFGRFVSPHSFLTGSGPIDYIQKMHNGDLVHCETTFHKMGRTAQ

SEQ ID NO: 210035 - protein, 53 aa, Zea mays
  Clone ID: MRT4577_123144C.1.pep
TQGSLVPTVIHPLLVLNPFFDPNGLRKTPAYLWYPSEKVLFRDLKNLMSQCRS

SEQ ID NO: 210036 - protein, 118 aa, Zea mays
  unsure (1)..(118): unsure at all Xaa locations
  Clone ID: MRT4577_123145C.1.pep
FGAKGTKHGFPEXRPRPPRLPAKPQALPQTDLAHQQPQLQHSSRGPPASLGLAGRPFLGTWSLTWKASASLTASETGCSSRRRRGLSAKAEVKKREQLYNLTKXFXITSTPPPTKKYN

SEQ ID NO: 210037 - protein, 70 aa, Zea mays
  Clone ID: MRT4577_123146C.1.pep
DRITFLKFQLPKLTISATSPQHYPGQKVACFRRHIPSTLSKLSDNKCKFQPDGPQGGGRWLPLHFLSIHI

SEQ ID NO: 210038 - protein, 137 aa, Zea mays
  Clone ID: MRT4577_123147C.1.pep
GGGGEGAPKPRGGPPPGAAAKARGAAPRAAGGVPGGGQGQGAGPPGGSPGAGGRGPRGPPGGSPGPRGNSNGRAGAKMRPQSPREGRSGVMPLIRSQNVEDEFVLGLGRDLCCPPGYRKRTRWGSAEIACRPPPIAP

SEQ ID NO: 210039 - protein, 106 aa, Zea mays
  Clone ID: MRT4577_123148C.1.pep
SVQMTTAAALTKTTDSLGAGDWICGAPKNESCLMKSAQHIKTCLRGCYMLEPSGVYCSDEYDRRRRLSDPRRSRCQLLARCRRGRRTPLTDTTPSSSTLRDEMCNS

SEQ ID NO: 210040 - protein, 39 aa, Zea mays
  Clone ID: MRT4577_123149C.1.pep
PLWVGALAPRVIESTRLFPDALPFPFLNSSSSYARDGML

SEQ ID NO: 210041 - protein, 77 aa, Zea mays
  Clone ID: MRT4577_12314C.1.pep
GAHTAKPEILSVVHNNNQMKRRKTTIAAVSSLINLQFSRFTVTFSKLVSSLTMGVPLNLMYTTIMKTSHATASAISP

SEQ ID NO: 210042 - protein, 137 aa, Zea mays
  unsure (1)..(137): unsure at all Xaa locations
  Clone ID: MRT4577_123150C.1.pep
YVMPLERVKGRLNNKKVFMLVDPAPQKASKKIEVENLIQVAVLCTQGSRLERSKMWEVVRKLEAPPLAERWAXWQKLXVVRQEGHWAPLPHDWIVDSTSNLCAVKLSRSKRSNQSRTLKKEFHTQLPRILFFCGLRI

SEQ ID NO: 210043 - protein, 107 aa, Zea mays
  Clone ID: MRT4577_123151C.1.pep
SDIPGPRRSRQRFMVERGFFRQCALNVVACEGVDRVERPETYRQWQARNRRAGLRQLPLDPDTVRALREKVREQYHRDFVIDTDRDWILQGWKVRILYTMKTWVVDD

SEQ ID NO: 210044 - protein, 101 aa, Zea mays
  unsure (1)..(101): unsure at all Xaa locations
  Clone ID: MRT4577_123152C.1.pep
RAPTTPTDTNPPVVPNHGGGQXEIANAAAEADHNPNSTRHRAALSARQDHERHETQNSCRRGPPEAKKKHRGGDLGCGXSKRKLHRATERSDDTEAQRGNA

SEQ ID NO: 210045 - protein, 86 aa, Zea mays
  Clone ID: MRT4577_123153C.1.pep
KIFQVIKVPFPWKMGFKMEPPKGAWGVFRPFFNVPPQTPRWASQQIGQAVPLFPFAFPLPKWEKPFFPCFLTSSPKNFSDAFCKQL

SEQ ID NO: 210046 - protein, 115 aa, Zea mays
  Clone ID: MRT4577_123154C.1.pep
MVAAKKTKKSLESINSRLQLVMKSGKYVLGYKQTLKMIRHGKAKLVILANNCPALRKSEIEYYAMLAKTGVHHYSGNNIELGTACGKYYRVCTLAIIDPGDSDIIRSMPEQTGEK

SEQ ID NO: 210047 - protein, 39 aa, Zea mays
  unsure (1)..(39): unsure at all Xaa locations
  Clone ID: MRT4577_123155C.1.pep
FFILYCISGLFFSQLLPTXXSVQAXMFAXLVFPRKKAPG

SEQ ID NO: 210048 - protein, 94 aa, Zea mays
  Clone ID: MRT4577_123156C.1.pep
AVVTTQSTRGSDIHFSMKKKKKKKKKKKKKKKKKQKKKKKKKKKKSSALLPLLKGEFWGDTSHFLPFDPAFRGPISPYLEWVSHLMAVLLQPTS

SEQ ID NO: 210049 - protein, 123 aa, Zea mays
  unsure (1)..(123): unsure at all Xaa locations
  Clone ID: MRT4577_123157C.1.pep
MARIKVHELRAKSKTDLHAQLKELKSELSLLRVGKVTRGVPQKLSKIEGVRSSIAAXAPVISPKHKSGLREADNNKNLLPLELRPKKDPGIRRRLIXDQISLENEREHERGKDLPLGEDGNQA

SEQ ID NO: 210050 - protein, 69 aa, Zea mays
  Clone ID: MRT4577_123158C.1.pep
ATKPVRAPIPAVLWLQVWVDSPNGDLQLLPVGCHRQLPPEGSMLGVVVALSCSTELQCERIEPLKAHYQ

SEQ ID NO: 210051 - protein, 302 aa, Zea mays
  unsure (1)..(302): unsure at all Xaa locations
  Clone ID: MRT4577_123159C.1.pep
VTTPSSRTIDLTCCNLITNNALDSIADNCKMLECLRLESCSLINEKGLERITTCCPNLKEIDLTDCGVDDXQHLAKCSELRILKLGLCSSISDRGIAFISSNCGKLVELDLYRCNSITDDGLAALANGCKRIKLLNLCYCNKITDTGLGHLGSLEELTNLELRCLVRVTGIGISSVAXSGCKNLIELDLKRAXSVDDAGLWALDSLCXNLRQLTISYCXITGLGLCHLLSSLRXLQDXKKVHSHGSQXEGFEXLCXATCGEGXKKLKKPTRPKTVLSPELIQMLQACGCRIRWVNKPLVYKD

SEQ ID NO: 210052 - protein, 55 aa, Zea mays
  Clone ID: MRT4577_12315C.1.pep
ATKWPDGATAFLGCTTSGDVVYEQPLVKLRAPDTTWHDQLIVLEILNHVHDIVEH

SEQ ID NO: 210053 - protein, 85 aa, Zea mays
  unsure (1)..(85): unsure at all Xaa locations
  Clone ID: MRT4577_123160C.1.pep
QGFKNRNPTVFITPFPRVFRQNQALRGSLQPFFDLFFLEIDERRSATLAGSSSIKKVVELLNVNPPAFVVRGHKNIENIFNTKXT

SEQ ID NO: 210054 - protein, 105 aa, Zea mays
  Clone ID: MRT4577_123161C.1.pep
GNNYTLTNPIKWDHSTARYIHMNITGASVCIHRYTGAESDKWRKKCPKGTITTSWGRELTPPTIIADSQREPGQTCKILTIHADADTAHTMRNTSLSSPCRQEAC

SEQ ID NO: 210055 - protein, 48 aa, Zea mays
  Clone ID: MRT4577_123162C.1.pep
MSSYSYDPYYTPYKRRVVESSPRVHIRSSYVSPSRTTYSPLVSTTMRR

SEQ ID NO: 210056 - protein, 96 aa, Zea mays
  Clone ID: MRT4577_123165C.1.pep
PAGGEGLISRSESGSRQCDEHREQPPCQCQGVGLSPTTWPVVNAQLRSLCRYLEYIFSNVMSRIIHASCNYPQELQEAVNINFWATATSTIVHPRH

SEQ ID NO: 210057 - protein, 404 aa, Zea mays
  Clone ID: MRT4577_123166C.1.pep
MAPVRGAKKRKRPEKPAPAPTPGLPLPPLPDGSDWWGVFYRRVAGHSPFPREHQNMESVLKMSRRTFDYICSLVKKDLTTKTYGFRNFRFGDKKVLGVEDQVAVALMRLTTGESLQNIGMWFGMNHSAISNITWRFIESVEERAICHLKWPSPEEMATIKTRFDKVYGLPNCCGAIDTTHILMCSSAQPNSKVWLDNENKNSMVLQAVVDADLRFRDVVSGWPGSMDDTCILRTSGLYRLCEKGLRLGGQMELPGGSAVREYLVGDASYPLLPWLMTPYREHGLQAAKVEFNKRHTAAAAVVQTALATLKGRWRVIQGELWRPDKHRLPRIIFVCCLITNIIIDMEGTPSRDELVSGNHDLGYKQQFSDAADDNAIKQRDDLSRHVDNAIKRRDDLSHHVTAGE

SEQ ID NO: 210058 - protein, 121 aa, Zea mays
  unsure (1)..(121): unsure at all Xaa locations
  Clone ID: MRT4577_123167C.1.pep
FRSSMLNMLSISFGGAMAAYGKGRFNVRGVALNLVAAALKATRLGLIQILLTSKGISLNLITWFYYVGPGCLCFLVGPWVFVKLPRLPPVGTFQPNFFAFGTNXLWAFGLNLAGFLLGGKT

SEQ ID NO: 210059 - protein, 66 aa, Zea mays
  unsure (1)..(66): unsure at all Xaa locations
  Clone ID: MRT4577_123168C.1.pep
SPTRXLPSAPPFRPLSLASSILPPPMGKEKPHLTIVLIAHADSAKPTTPGHLIYQLAGPAPPLCST

SEQ ID NO: 210060 - protein, 83 aa, Zea mays
  unsure (1)..(83): unsure at all Xaa locations
  Clone ID: MRT4577_123169C.1.pep
KVQFCSNNSTTKTAGIYTLRALPNFCSCNAYATIIPQCXHAPISSILPPYLPSXILTLXEYPPLHPSRLQHAIHDSNIPLLPS

SEQ ID NO: 210061 - protein, 122 aa, Zea mays
  unsure (1)..(122): unsure at all Xaa locations
  Clone ID: MRT4577_12316C.1.pep
LNQAFRSNPNFQRPHIQPRPHFLLTGLPLPNKGPVNSPTLKLVISANVXTCKTTFFKKHLTGEFENXYGPTIGIEIHPLDFNTNLCKIKVYFLDTLRQEKFGGLKDXYHIHCQCSIIMLDVT

SEQ ID NO: 210062 - protein, 86 aa, Zea mays
  Clone ID: MRT4577_123170C.1.pep
LRLPYSVSMNVCERETLETQNNMLSEPSKVLNNITEISHFEGEFLKAREILVNCFLPCLEYDQSYHVCHGHPFYTTTIHTLINGSS

SEQ ID NO: 210063 - protein, 83 aa, Zea mays
  Clone ID: MRT4577_123171C.1.pep
FSPVCRGHCPCCNQGLTIRRRRGSIPIHTLGVHKSISRSWLGQNYTYGKCYQRKRARIFKLKKSVPLIENPLRVNRAFLQTLS

SEQ ID NO: 210064 - protein, 82 aa, Zea mays
  Clone ID: MRT4577_123172C.1.pep
SLAGDHTIHANGILLKQLHVHRGHAATVIYLQKLRRLVTLTSYHLVWGKGGDNLGQKIITHFAYLIPHHILQCPFPAVSYRP

SEQ ID NO: 210065 - protein, 126 aa, Zea mays
  Clone ID: MRT4577_123173C.1.pep
KQKYDKISEKKVLTSIEALCKSYPSEFVTYFHYCRSLQFEDKPDYSYLKKNFRDLFIREGCQPDYVFDWTVSRQAADNNRLRVCLLLFWKLPVLLLARFAVLNVVCHSLPAEWEDRWVGGTICGSG

SEQ ID NO: 210066 - protein, 76 aa, Zea mays
  unsure (1)..(76): unsure at all Xaa locations
  Clone ID: MRT4577_123174C.1.pep
MAAKIYAKRILLALSTFFANSTIFPHFSQTPISVLLSPYLSSMYRSLXKTHPFNPTLLQQAISTSILPLSPLVFQQ

SEQ ID NO: 210067 - protein, 148 aa, Zea mays
  Clone ID: MRT4577_123175C.1.pep
MAGKELSDEQVASMREAFSLFDTDGDGRIAPSELGVLMRSLGGNPTQAQLRDITAQEKLTAPFDFKRFLELMRAHLRPEPFDRPLRDAFRVLDKDASGTVSVADLRHVLTSIGEKLEPHEFDEWIREVDVAADGTIRYDDFIRRIVAK

SEQ ID NO: 210068 - protein, 85 aa, Zea mays
  Clone ID: MRT4577_123176C.1.pep
QDHECATQIRIRRRSWPTPLDVRPRSVTIAAANRARYTRQLPVGTTAAEPQPWLSRGSATESSSCAAHTPEPTDANEYASAAAEH

SEQ ID NO: 210069 - protein, 48 aa, Zea mays
  Clone ID: MRT4577_123177C.1.pep
ENMVLLNGIYPWTLSLIIPAMLGKHPRKVDGEHHGRSRSPVRCDHLVG

SEQ ID NO: 210070 - protein, 91 aa, Zea mays
  unsure (1)..(91): unsure at all Xaa locations
  Clone ID: MRT4577_123178C.1.pep
GFPGGGFKVKGPYFFFIKPRSTVEIPFLSQVPQNLPFNGGKLPLQGGHFFPKTLNGQLGFXGPSLPPQEKLGMVSGPHGRVPFQNQGKGKG

SEQ ID NO: 210071 - protein, 124 aa, Zea mays
  Clone ID: MRT4577_123179C.1.pep
GSSIYAGHSAYCDPNVKFTPEIIDIPGGGKIGMHWGTYIDKRNVDEKKAVMIVLPGLTASAREPYVKNIVSEAMENGYEVVVYHNRGNDVEMTLPENGFFEPIDDFKVAVEYVQKKFPDHQIFA

SEQ ID NO: 210072 - protein, 60 aa, Zea mays
  Clone ID: MRT4577_12317C.1.pep
MGIKCIYIRGRLWYLLELKLQSPLGFIAEKISEQKREKTTKGADTNGGVLGLSSEGQAKG

SEQ ID NO: 210073 - protein, 216 aa, Zea mays
  Clone ID: MRT4577_123180C.1.pep
GTSRPAGYDPLCDAEKEWSSKELPVACGNFRVGRTLLTEDTKMFSHVVSWTKGRKRNRYEIYPKKGEVWALFRGWDINWVSDSDDHRHHDYDIVEITSDFAMGLGTYVIPLVKIKGFVSLFVRSSSEAPFLIPSGNTLSFSHSIPFHRLVENGRQHIPTGALELDTASLPSDLEKAFTPVNLDNSFMSTGSGSTPCNVSSTSSCEVPVGKTEQTQD

SEQ ID NO: 210074 - protein, 45 aa, Zea mays
  Clone ID: MRT4577_123181C.1.pep
LLFKIGGTTNHSKVHSFFNYTTTKRTFKSQNHTTTIKVPSYLKLI

SEQ ID NO: 210075 - protein, 53 aa, Zea mays
  Clone ID: MRT4577_123182C.1.pep
VSEKLWRITIEVHRSKLRHDDVRKRRKENVLSKLLRANDNNISVIFVNFICNL

SEQ ID NO: 210076 - protein, 71 aa, Zea mays
  Clone ID: MRT4577_123183C.1.pep
ECQQLLVKKQKKKKKKKKKKKKKKKKKKKKKKKKKKKKKKKIKKKKKKKKERKKKKNKNKVRFFKNPIIIQ

SEQ ID NO: 210077 - protein, 36 aa, Zea mays
  Clone ID: MRT4577_123184C.1.pep
KSIHWSNNSSLLTRCEGEQNFLPDGFWTTEVELFSN

SEQ ID NO: 210078 - protein, 200 aa, Zea mays
  Clone ID: MRT4577_123185C.1.pep
LPCCRRPCALLAGSEGTVLDPAMVSAAAAPAPCTLAAPARPHGVPRLPVAPARADAVVSQLHRLASGRASTACLPSPLGLGCRIPCLSLSSFITLRWPSGRPPQHRRSTLASSSRLWSASVVLLDLTVVLGLAVLLDHSAIGSLSGFNLAVDLLLITPNCSPASSSCPRRHAPYVSLSARPGMGSRRQPSAWMLVLEHLQ

SEQ ID NO: 210079 - protein, 59 aa, Zea mays
  Clone ID: MRT4577_123186C.1.pep
KMSKFVIFFLKSVKQFLTYIAQNKSGLPARCFLLSSKTINLSQLLEKKNKRPNKGSQLP

SEQ ID NO: 210080 - protein, 102 aa, Zea mays
  Clone ID: MRT4577_123187C.1.pep
TNPHAFVHFLVDYISRIYIHCKITRWLPTSDRRKKKRGNHPLYFTPCAHSLRARAPPVQTNPSPFNPWGTMQATRAVHSHITPRRLKKKSLPFGPLTGPPGD

SEQ ID NO: 210081 - protein, 68 aa, Zea mays
  Clone ID: MRT4577_123188C.1.pep
KDNKRKLVLLVIRSHTRWHVNSLGGGGGRIFSGGTSSGGGGGATLSTLQPKLRSPTCRKPVRYIQRQR

SEQ ID NO: 210082 - protein, 131 aa, Zea mays
  unsure (1)..(131): unsure at all Xaa locations
  Clone ID: MRT4577_123189C.1.pep
MACAAYSIRSPLKLAVRHGSDVLSSNNLCNGFKSSVSYLNSQRWSSNCSSVTMRHVASHCHSIVKAPAMWPSKASATDAATASDERITVLVIGGGXKEHALCYALXPFPSCAAVLCAPGXAGIAQSRMHMY

SEQ ID NO: 210083 - protein, 52 aa, Zea mays
  Clone ID: MRT4577_12318C.1.pep
QQRPQMAELCVCFKTRFISPGTSHIGSGRNVYSSRTCLCLLSIHIHAHHRQT

SEQ ID NO: 210084 - protein, 70 aa, Zea mays
  Clone ID: MRT4577_123190C.1.pep
MSRRAAAALALACLAVLAAALADGALLPWFGERRRGGDKAAAAAASPLSGPGVGLLADPFRIPEHVLLGF

SEQ ID NO: 210085 - protein, 84 aa, Zea mays
  Clone ID: MRT4577_123191C.1.pep
IGKKRTRSGFRGRKRVARTTFKLSKAVGIKPRRRSDERTIVFRHRHHTTSSSIPIRRTASGIMEESIRNQNERAARRSNLHGRQ

SEQ ID NO: 210086 - protein, 51 aa, Zea mays
  Clone ID: MRT4577_123192C.1.pep
SVSVGQCLPALTCKISVVSALRFTAMKGVSFCAGAMPVSWYVWRRRQSLVI

SEQ ID NO: 210087 - protein, 120 aa, Zea mays
  Clone ID: MRT4577_123193C.1.pep
DPVLVPPARPLPTVATFTAMPRRTGAIEWWGPHGQVILFAPVLFTQVQSVDLRWPRVWCGPAVYFIAGRSESVVSAVFILGSSRPMHQPAWLADRWVLLPPSGFVLGSIITKRILLLGAA

SEQ ID NO: 210088 - protein, 43 aa, Zea mays
  Clone ID: MRT4577_123194C.1.pep
FECSFFSQIDLAQNRYFEDEAFIGYLKYLKYWQRPRVIKYIMY

SEQ ID NO: 210089 - protein, 52 aa, Zea mays
  Clone ID: MRT4577_123195C.1.pep
NPMPQFPQHTPPAGHPQHNGCRQRNLTFNEVIQRYLQTLLLATLQHQPQGPS

SEQ ID NO: 210090 - protein, 203 aa, Zea mays
  Clone ID: MRT4577_123196C.1.pep
MSDVENPGVGGKPPPYKDPDNGSQRFLLELEFVQCLANPTYIHYLAQNRYFEDEAFIGYLKYLKYWQRPEYIKYIMYPHCLFFLELLQNANFRNAMAHPTNKELAHRQQYFFWKNYRNNRLKHIIPRPPPEPAPSQAPATLPLQASVPTPVAPPVPAPTSSMPPVVAGGASAMSPMQFVGTPGTNMPKNDMRNAMDNRKRKMG

SEQ ID NO: 210091 - protein, 145 aa, Zea mays
  unsure (1)..(145): unsure at all Xaa locations
  Clone ID: MRT4577_123197C.1.pep
HWVPRGRPGHPXNKELAHRQQYXXFWKNYRNNRLKHIIPRPPPEPAPSQAPATLPLQASVPTPVAPPVPAPTSSMPPVVAGGASAMSPMQFVGTPGTNMPKNDMRNAMDNRKRKYAPPPLQSSNSHFMKLFVHALFSFLAILSVL

SEQ ID NO: 210092 - protein, 98 aa, Zea mays
  unsure (1)..(98): unsure at all Xaa locations
  Clone ID: MRT4577_123198C.1.pep
PRVRPRVRPWVLLNLASLGRVXFNTDGILYPDSVVGTDSHTTMIDGLGVAGWGVGGIEAAATLLGPAMSMALPGVGGFKLTGMLRSGVTATAPGFTVT

SEQ ID NO: 210093 - protein, 260 aa, Zea mays
  unsure (1)..(260): unsure at all Xaa locations
  Clone ID: MRT4577_123199C.1.pep
MAAASYDRLAVAASAVVVAAVALAVAGLPAAGALGVNWGTMATHQLPPATVVRMLEDNGIRKVKLFDADAGPMDALAGTSVEVMVAIPNNMLDMMTDYGTARDWVRQNVSRYNFDGGVNIKYVAVGNEPFLSSFNGTFLNVTLPALQNIQRALNDAGFGDTIKATVPLNADVYNSPKDNLVPSAGRFRPDIAGLMTEIVQFLNQSGAPFTVNIYPFLSLYDNDDFPLDYAFFDGTGRPVVDTASQYTNVXDAXFETLCVG

SEQ ID NO: 210094 - protein, 54 aa, Zea mays
  Clone ID: MRT4577_12319C.1.pep
NNIKEKNYVKNPKWNINPKGKFRNLEKEKKGINYANKNKYKYKYVYYFYTDLSL

SEQ ID NO: 210095 - protein, 44 aa, Zea mays
  Clone ID: MRT4577_1231C.1.pep
MEPNLKLAIEEQPRILRDISDRLSAQDSRWAALESVVARQTSSI

SEQ ID NO: 210096 - protein, 46 aa, Zea mays
  Clone ID: MRT4577_123200C.1.pep
KLQGIATTQTRLRWDYNKIMPIKFLKHALPKIKGVTENCKHNEICN

SEQ ID NO: 210097 - protein, 74 aa, Zea mays
  Clone ID: MRT4577_123201C.1.pep
KILSTFKSPNNFIMKIHSNIYLVLLIMFYINFTSQEARMTLILEQGEYHLENKRTNITLNLDRMKHIKNWTCGG

SEQ ID NO: 210098 - protein, 189 aa, Zea mays
  Clone ID: MRT4577_123202C.1.pep
MGSSSKVVRPEEVLESLKNDGSIDALRMKIIAQLKANEDMKKNTMMMVEQSKVLNTPGAEKKTKRELFDALRQELETPVLEKASKAVWELILDNGGLGKEITETVEKVFCRLSGIDMMPPLPSGAGAHQEKDDMAFDEKVVKSKGVDAFEPSSSRKRPFSDVNRKGAGALPNGSATDQHDESEDSDQKM

SEQ ID NO: 210099 - protein, 82 aa, Zea mays
  Clone ID: MRT4577_123203C.1.pep
GVLPPFYKAPGVFFFCQPALFRRLGFLEIKGLLWNRVFWALTPARPFLRAFQCRPPYFLGGVVSPSGQTDKVTTTQDHKEQG

SEQ ID NO: 210100 - protein, 76 aa, Zea mays
  Clone ID: MRT4577_123204C.1.pep
LRPRANSFTPRQGSSRWRSGSVRGAYGRLLLDALRATGDGQPCPLAVKVAADSELALTARGQTRWSRAILLAGAVC

SEQ ID NO: 210101 - protein, 128 aa, Zea mays
  unsure (1)..(128): unsure at all Xaa locations
  Clone ID: MRT4577_123205C.1.pep
KKFFFFFFFTTLRAIFWRFSSPWGPLEPPFGGPYWPLFWPFFSIYWAGFSHVLPGKTRVFPFFFWLDDLLFFTALVISMRAQPAPFFKIFPPLLGIVPPLLRLFYGGGCGGYRQXDHLRWHRFNPPFF

SEQ ID NO: 210102 - protein, 69 aa, Zea mays
  Clone ID: MRT4577_123206C.1.pep
MAWFLGPAWQYRFVPKNGRPVFKDGAPVLRLIKGNTCGYSCKKRARGCKRGKGVKIQACPNQREWPKNN

SEQ ID NO: 210103 - protein, 58 aa, Zea mays
  Clone ID: MRT4577_123207C.1.pep
SDNSLHQAKPGRGNGKNPTNSRCKRGKNCAQPPNPFKVRPWRLRAYTTSMGGTVLRRA

SEQ ID NO: 210104 - protein, 78 aa, Zea mays
  Clone ID: MRT4577_123208C.1.pep
TPFRDTLGRTLGLTLGRTLGRTLGAILTEGTKLITVNPNTKVLQAMQLITKNRLKNIPVINGPGILGMVSIGNFFPPL

SEQ ID NO: 210105 - protein, 63 aa, Zea mays
  unsure (1)..(63): unsure at all Xaa locations
  Clone ID: MRT4577_123209C.1.pep
MVRVSVLNDALKSMYNAEKXGKRQVMIRPSSKGIIKFLGGRXRHXYIGEFXYVDDHRAGKIVV

SEQ ID NO: 210106 - protein, 54 aa, Zea mays
  Clone ID: MRT4577_12320C.1.pep
QTKPIFRKKAKTTKKIVLKLECSECKYRKQVSLKRTKHFEIGGDKKRKGQMIQF

SEQ ID NO: 210107 - protein, 132 aa, Zea mays
  unsure (1)..(132): unsure at all Xaa locations
  Clone ID: MRT4577_123210C.1.pep
GRRRVRQYVPCNDQSNTNAAGEAASEDTGTSDSNSGQKVVIFAPAXPHLNKVXTSLSDAVQDAAKAALAXYKXEMEKAKEIKLASKTXSLIPNDKNMSNVLTLWTQRNQERLAARIGLDDKEPANSDDQFTH

SEQ ID NO: 210108 - protein, 81 aa, Zea mays
  Clone ID: MRT4577_123211C.1.pep
FPGCRSHRSAVFFRRCPVVATMVKKNASGPKVQKSACVLVRLQVQNGVVLTWARNVACYNNDDIYAELIWECCQIGWRRVT

SEQ ID NO: 210109 - protein, 43 aa, Zea mays
  Clone ID: MRT4577_123212C.1.pep
PNTETQLQTDWQWFIRELIIGDLILETRANERSNLKRNLVARA

SEQ ID NO: 210110 - protein, 75 aa, Zea mays
  Clone ID: MRT4577_123213C.1.pep
GGVFSLKNLFSQKKNAIDGVSKNLKGGVSKGFHLFLMDLFISGKKQGIFAVGPKGKFLHPFRGGWPPKWKPPRPF

SEQ ID NO: 210111 - protein, 57 aa, Zea mays
  Clone ID: MRT4577_123214C.1.pep
PQLATYLSGTRMTLIQSDVQCQGTRYYPSMGEAVKESRGYTKRTGRYRLVPIYLVNC

SEQ ID NO: 210112 - protein, 95 aa, Zea mays
  Clone ID: MRT4577_123215C.1.pep
PRNRWRNLSRSAASFWCLACPSARRPRSCMCNSLASGFGFHPSSSGPRPQSSAAQEGSSHRVRAPWSSIARHPRSVAMKGLGFLSRGPVRFRIRV

SEQ ID NO: 210113 - protein, 70 aa, Zea mays
  unsure (1)..(70): unsure at all Xaa locations
  Clone ID: MRT4577_123216C.1.pep
GFYQAHKDMDGDFEILWLGTNAKDATNEQKALMSMARQIKNRMAGEPARXAXKPATDKMRDQPVSQQNSC

SEQ ID NO: 210114 - protein, 60 aa, Zea mays
  Clone ID: MRT4577_123217C.1.pep
YVPLWFTSSAPRFIHRWHPWHRPSLQFSPFLASLDVPLVHGDWPCQQTNAYARQEPHKWP

SEQ ID NO: 210115 - protein, 195 aa, Zea mays
  Clone ID: MRT4577_123218C.1.pep
KMNSTRRASKAAKSTINYHRFSLDEHHLFEPDALITKERDANHQSRQSSQSCRTYAYRRLTTPQFVSALSGIWNLVGQPESSGTAQRSSIHGISSREDPVCFSRDQQGNILTPCCVENSSGLRSQYCFSTPKEIYEDLIYVKKKMLTLTPFNNIVGASSTWMHMHSTNKVEGAHYLQFGTIYSVQAEKMEKIETS

SEQ ID NO: 210116 - protein, 183 aa, Zea mays
  unsure (1)..(183): unsure at all Xaa locations
  Clone ID: MRT4577_123219C.1.pep
KKSLGYVXKIKASFANVGAYSNEDNFIRGDPKGVIEWISGEAEAFEEILSDRGDVCAFSGAREILAILEKAGCDHVKTLXRPKLSSPWMIQMIPQLKQXMGGKFYNDIWVNGGREMAHKIIKKREKDIHDARVQAKQAEEAAERERRIETKEALEIINMAEAIVDKVINKLLNEVAEKVLKED

SEQ ID NO: 210117 - protein, 81 aa, Zea mays
  Clone ID: MRT4577_12321C.1.pep
HAYGTRGRTRGQVTRLKCVGFGLGLTMNHCMFDGISAMEFSNSWAETARGVSELTVPSFLDRSVLNALDPSVPTLPHHEFA

SEQ ID NO: 210118 - protein, 148 aa, Zea mays
  unsure (1)..(148): unsure at all Xaa locations
  Clone ID: MRT4577_123220C.1.pep
STRRNAALCASRLSPGAAPLLHAAGLSGVPAEEPALFPARLLAVGSLLGHPGLPALWCVPVCCGDRSAGVNLPRPSGCVGPPAALAPCPRPDVAPRRCPAFGLSRLSPGPRVFFLFFGVGPKKIKKKKKKKKKKKKKKKKKKKKSLYX

SEQ ID NO: 210119 - protein, 79 aa, Zea mays
  Clone ID: MRT4577_123221C.1.pep
NLRVIFLCGGEQKHLVLFPYGLLRKNGNERTVAMAKRLLPSQNQLLVEKPVQPNNTACGISLPETSKPLNASKMATVSP

SEQ ID NO: 210120 - protein, 45 aa, Zea mays
  Clone ID: MRT4577_123222C.1.pep
CYCHAFIQASVVNNTIKAYRSHRTSFGGQESDLVIRMIMPAPMSS

SEQ ID NO: 210121 - protein, 107 aa, Zea mays
  unsure (1)..(107): unsure at all Xaa locations
  Clone ID: MRT4577_123223C.1.pep
LQHQHLPFTQLLSAYPQQFFPFNQLAALISPVYLHHQQLLPFSQLVGVTPSPFLIHPQLFPFYQHVAPNVGPLLQLQQLLPLKNXPLTXPEGFYQQPILGGAPFSFL

SEQ ID NO: 210122 - protein, 103 aa, Zea mays
  Clone ID: MRT4577_123224C.1.pep
PPGGGAFPQNPCQKGQRGQHGARCPHPRKVGGFRGIPHKGVPRLHQDQLGFSAPKPNKPPQGTRTSRARPGFLTPGSNKINPVVFPGAACSFAPKKNWPGGLF

SEQ ID NO: 210123 - protein, 77 aa, Zea mays
  Clone ID: MRT4577_123225C.1.pep
AKDQAKSSRIPHMMCHAANRDLISAASSGISASTAMIKLELSSSRQVQVWLHDLFGAPRARSSVRPEPLWGAQRNLG

SEQ ID NO: 210124 - protein, 82 aa, Zea mays
  Clone ID: MRT4577_123226C.1.pep
LGTSRPAGASYFSDILITSSAHGLLWVPCACQPLFRRRASVQAEISLSVIMSYLPGSCLLSATPVLTVNQVRRSVNRSTPRS

SEQ ID NO: 210125 - protein, 122 aa, Zea mays
  Clone ID: MRT4577_123227C.1.pep
GILALYHTLESLWQLSGSDLCGESGGRKHWRGVFCKGPSIIAIGSQEDIAKNALKTPLSDKKAKVATLLLRRQVTRKVPLMWQPHTQQGARPLQTMTNQRRNKTFNSEMPLYAVSKAKHGAK

SEQ ID NO: 210126 - protein, 394 aa, Zea mays
  Clone ID: MRT4577_123228C.1.pep
MVKKAVSTAPADAEADERRRLRSLAFSNGLLQRGDPAAPRAPLAPAAAVTRLQGRDVVRRGGQRKSRYLFSFPGLLAPAASGGRVGELADLGTKNPLLYLEFPQGRMKLFGTHVYPKNKYLTLQMTRSAKGVVCEDVFESLIVFSEAWWVGTKEDNPEELKLEFPKEFQNDGTTADCDFRGGAGGAIDEATGSKAGKEIAEPRSPKFASDDDAPEDSNHKDENNTQTMSGTPVRQSARNAGKTLKRYTDLSSGGESSDNNNETDISEDLDDKEVESPEIKDEIESEDVKPADSSAISLSSKKEPLVQATLSSMFIRAEEKKRSTRSPKGSPATKGAAAKKQRASPMAKQPAGIKKVSGTRGKKKPKVGEDEIEELSSSSQDNDADDDSDEDWAE

SEQ ID NO: 210127 - protein, 292 aa, Zea mays
  unsure (1)..(292): unsure at all Xaa locations
  Clone ID: MRT4577_123229C.1.pep
DSILEVLAQDDMLNAKELVQWENGLSFNDIAARQGIRIRRHCRPTASLKEIEEELGAPLNILEKIIWDKEIEVAEGHAKKPLEEVIQAATKAPPSRDFYGALEAAYKRNGVPALIAEVKKASPSRGVLRENFNPVEIAQAYEKNGAACLSILTDEKYFQGSFDNLEKVRSSGVKCPLLCKEFVIDKWQIYNARSKGADAILLIAAVLPDLDIRKFLQICEELGMTALIEVHDEREMERVLKINGVELIGINXETFVVDTSNTKMLLEKHGDIIREKGILVISLSWVYIDPLK

SEQ ID NO: 210128 - protein, 81 aa, Zea mays
  Clone ID: MRT4577_12322C.1.pep
VKVPSGGLRSAGGDYDIVITVPTSWRILVPCVMWLAIIVVRSGGASGERVAFPRSRGLSSKSNLMRRIRCRIPQAGCFQYV

SEQ ID NO: 210129 - protein, 58 aa, Zea mays
  Clone ID: MRT4577_123230C.1.pep
NLILGLLPVDPCVKGLRPSDWFFGGKKVGRRRRHKGAEGRRLAGSVSEGLVGPGILGP

SEQ ID NO: 210130 - protein, 74 aa, Zea mays
  unsure (1)..(74): unsure at all Xaa locations
  Clone ID: MRT4577_123231C.1.pep
REKVLVAVRAQQPHAYARSLARFASTLGAVGRDVAAHRIRTALPPGTSFGARSVVDGEXTSKSQWALQHRLITL

SEQ ID NO: 210131 - protein, 73 aa, Zea mays
  Clone ID: MRT4577_123232C.1.pep
TLLPRPQHPAHLLQHAVLLYRPAIRYHYRHATHGLYRARSLTPDGRSVTTRTRPTTRFITSSVTTITSFTGST

SEQ ID NO: 210132 - protein, 58 aa, Zea mays
  Clone ID: MRT4577_123233C.1.pep
MARNIFIRANDNYCLDVRDDTTELAHHMPNHRPPACGTRTCTPARRRRTSKACRRSCS

SEQ ID NO: 210133 - protein, 146 aa, Zea mays
  unsure (1)..(146): unsure at all Xaa locations
  Clone ID: MRT4577_123234C.1.pep
MAEDPAAEQETRQLEDRLRDVGERLQAPSDDAEDLLNLLIEVEECLIKVEQSPRESISNALRPATEALVKKELLGHADSNVRLAVASCISEITRITAPDAPYDDDAMKDVFSLIVGAFEHLDDIESPFFXRRTSFLYCAKFGLRGC

SEQ ID NO: 210134 - protein, 256 aa, Zea mays
  Clone ID: MRT4577_123235C.1.pep
EQETEEPPRSRKSKGLDKSLVGARIKVWWPDDKMFYNGVVESFDSVSKRHKVAYDDGDVEVLLLRDEKWEFISEEKGASVASETPGGRKRKADAVKEETTETPKSDAVDHPKKRGRPKGVRSSNGTPSNSATPSTKGKTAGKNTKETPKTGPNLIKELEKSSKDKASVSTETKDELPKDDKSASRPKEAISKGKDSKDEGKSTEGKARPGRKLKNAGTPAGDADKEKGKEKEVKAAEIEQEAPGNASTGKKRRRKA

SEQ ID NO: 210135 - protein, 791 aa, Zea mays
  unsure (1)..(791): unsure at all Xaa locations
  Clone ID: MRT4577_123236C.1.pep
MAEDPAAEQETRQLEDRLREVGERLQAPPDDAEDLLNLLIEVEECLLKVEQSPPESTSNALQLATAALVKKELLGHADSNIRLAVASCISEITRITAPDAPYDDDAMKDVFSLIVEAFKHLDDIESPFFGRRTSILDTVAKVRSCVVMLDLECDDLINDMCHHFLRTANSGHSEGIICCMETIMRLVIEESEDVQPQIASCLLQNVRKEEKESSPSFELAEKVIGTXREKIKPDLMKELKNSSMDKASVSTETKDELPKDDRSASRPKEAISKGKDSKDEGKSTEGKARPGRKLKNAGTPAGDADKEKGKEKEVKAXNRAGXQETLLQDQGPHGRNEKIEQPCYAQNIADAMQLKSDHNEGAESNAAKPNKKATLGSVKNTKLKPSDKCEPTVHSDADTKKQDLVASAEGSNGAADDTSTPADSTPKPKRGRPPGPKSLQKAPGKDQSPGLDLKKVNDDSAGKLAKRSAKDEKPSAKNTGEGEPSKKTQKNNLKQHKGENLSEDDPAKDLSLKEMISLKSSTKVPGRTKGQTTENSTPKMKQEQETEEPPRSRKSKGLDKSLVGARIKVWWPDDKMFYNGVVESFDSVSKRHKVAYDDGDVEVLLLRDEKWEFISEEKGASMASETPGGRKRKADAVKEENTETPKSDAVDPPKKRGRPKGVGSSNGTPSTSATPSTKGKTAGKVTKETPKTGPNLKKELEKNSKDKANVSTGTKDDKSVSKPKEAIIKGKDSKDEGKSTEGKAKPGRKPKNAGTPAGDSDKEKQEVEVKAAEIEEASGNASTGKKRRRKA

SEQ ID NO: 210136 - protein, 72 aa, Zea mays
  Clone ID: MRT4577_123237C.1.pep
VKSPVSVFLIVALDPASVCTQLPIDSIIDAQLTHGWDGLHGKNHQVREAFVLIAAQHKLKEHPAYSALLPLL

SEQ ID NO: 210137 - protein, 50 aa, Zea mays
  Clone ID: MRT4577_123238C.1.pep
IYTGTMPPAVEHRARRCSRDPVVVTDGTAGNATDLITQNVIMVERVRQRC

SEQ ID NO: 210138 - protein, 50 aa, Zea mays
  unsure (1)..(50): unsure at all Xaa locations
  Clone ID: MRT4577_123239C.1.pep
FWKCVHGKKLGNVNVXVYKXEXEVWLAQQIRFVLSTXDVLSNYKHRYIYN

SEQ ID NO: 210139 - protein, 181 aa, Zea mays
  Clone ID: MRT4577_12323C.1.pep
MGAFAKEEHQFLAELGLAQRNPGAFACGAWGGSGPTVTSTSPTNNQVIAEVVEASVHDYEEGMRACFDAAKTWMAIPAPKRGEIVRQIGDALRAKLHHLGRLVSLEMGKILPEGIGEVQEIIDMCDYAVGLSRQLNGSIIPSERPNHMMMEVWNPLVGVGVITAFNFPQCFLQRCRPGGKN

SEQ ID NO: 210140 - protein, 51 aa, Zea mays
  Clone ID: MRT4577_123240C.1.pep
SVSPYTIALTVKLDFAIIKSFLNILRPKLRPRYKMHPPSNISVLHIEWHLS

SEQ ID NO: 210141 - protein, 38 aa, Zea mays
  Clone ID: MRT4577_123241C.1.pep
PMSAPSSSCISTIFIFAFARAQRVSLPRLDRARPICAF

SEQ ID NO: 210142 - protein, 132 aa, Zea mays
  unsure (1)..(132): unsure at all Xaa locations
  Clone ID: MRT4577_123242C.1.pep
VGHAGEIEASVVACKAVXEIVKVFLYAVXEQVGGIYLVPADXHGNAKDMVGRNKCGGPLFDDNASXQILASETXQTVQVGIEGPGLPTGVTFXRKTFPTKGLANVAATVMNLQIFRAGSDSDLTFLSKWVTI

SEQ ID NO: 210143 - protein, 59 aa, Zea mays
  Clone ID: MRT4577_123243C.1.pep
LCFDLLVRLCRSPLPSVHPEGPLFGRASCFSLPSVPAPPTDLSVYAALSRRFTLPRADF

SEQ ID NO: 210144 - protein, 88 aa, Zea mays
  Clone ID: MRT4577_123244C.1.pep
MGGDLAKPVAAMVVVQVMSAGVNIFYKLAVLDGMDMRVLVAYHYLFASAFLAPLAYFIERYAGAAAPASGGCMDDGRPIQFQSMHGCL

SEQ ID NO: 210145 - protein, 101 aa, Zea mays
  Clone ID: MRT4577_123245C.1.pep
GLTQAGQIFITCGVQKTIGHFWGSFPTFENNRALIILGAYPGFSSYFKKTFKICGWDKKLFLRHFEQKNKTFKLSLSWGEPSSKNPFLVYPKRRGTPGTGF

SEQ ID NO: 210146 - protein, 45 aa, Zea mays
  Clone ID: MRT4577_123246C.1.pep
FKYRKSCCNKFFVCLDLSECLIVDSNVFAPGFLVKKKKKKGRPPV

SEQ ID NO: 210147 - protein, 35 aa, Zea mays
  Clone ID: MRT4577_123247C.1.pep
THKTFWSVSTVPSKSLNSKFHPVNISYVPTTPPPN

SEQ ID NO: 210148 - protein, 393 aa, Zea mays
  Clone ID: MRT4577_123248C.1.pep
VPPSSAGKEWWEAQERGDQVASVLDVGEVGPRAACRCQVVRSVGPWSAGTTQIEGSIHNAYFSLIGKAEHFVYIENQFFISGLSGDDTIKNRVLEALYRRILRAEKEKRRFRVIIVIPLLPGFQGGIDDGGAASVRAIMHWQYRTICRGPNSILKNLYDVVGSKADDYISFYGLRAHGRSDDGGPLVTNQIYVHSKLMIIDDRMALIGSANINDRSLLGSRDSEIGIIIEDKEVLSSIMDGRPWEAGKFSLSLRLSLWAEHLGLLPGEVSCIMDPVDDSAYKNIWMATAKENTVIYHQVFSCVPNDHIHSRYQFRQSFAHRKEKIGHTTIDLGVALENLETQQEGDLACAKPMERLQDVRGHIVCFPLEFMCQEDLRPFFSESEYYTSPQVFH

SEQ ID NO: 210149 - protein, 63 aa, Zea mays
  Clone ID: MRT4577_123249C.1.pep
NTRFGGWAWFLTIFKGATSKILLKAYFKGNHPALGVRGTLKLYTMLATLNILFPPRAWGKQIS

SEQ ID NO: 210150 - protein, 67 aa, Zea mays
  Clone ID: MRT4577_12324C.1.pep
TVAMHLWCSVVIHASMVQAMQTLYVRFVVAATLICMLVLARAVSACQSQAAVLGETVGLLHSARPPS

SEQ ID NO: 210151 - protein, 163 aa, Zea mays
  Clone ID: MRT4577_123250C.1.pep
SKDGEELRAPRVRQWGLWGSKDMTVMPPARHRPAAKRPMWIIVLLCLVCVVLIGAYVYPPRHYSQCYLSASSVCTPFKDWLPSIGRREKTDDEIISAAVIRDILGMPMSTSKNPKIAFMFLTPGSLPFEKLWEKFLQGHEGRYSIYVHASRQKPVHTSSLLVG

SEQ ID NO: 210152 - protein, 166 aa, Zea mays
  Clone ID: MRT4577_123251C.1.pep
MGWKFSKISLGFSPLPGLGTPRGFSNPGGDFFGFPFVPPVKGKVFFQKNFKKGWKSRGAKPRGKKDKNLVGKGNPLSEKGKGIPGKKGFQPPGVYGFFAFSPKTPGFKKKEKTRGLNFFGKPKKNFAGGGGNPKLWGGGENQKNFGGNPFYRFIFDPKFWGNTPKK

SEQ ID NO: 210153 - protein, 104 aa, Zea mays
  Clone ID: MRT4577_123252C.1.pep
SAEAPGCVGYHKGLCAEATTSGAAATVVARHLYPATEASPELRCVLLRQIYVLTIPPSDEQQSSKQHPGNQSTSSGFLKDARVLSVDDACWRKAAVASDTRDVR

SEQ ID NO: 210154 - protein, 71 aa, Zea mays
  Clone ID: MRT4577_123253C.1.pep
PTPAICYRLFCLAAYLPIVRAVLIRIWACKNRHNCNSCDRLQLTHRIKRPQRCLYNGTGLILIHRAECMSP

SEQ ID NO: 210155 - protein, 41 aa, Zea mays
  Clone ID: MRT4577_123254C.1.pep
SMVLGPCVVGHIARTHCRSRWVSEIHLQHRSDPSASGAGAN

SEQ ID NO: 210156 - protein, 87 aa, Zea mays
  Clone ID: MRT4577_123255C.1.pep
VMLPSGPRKVLNVLFHAAHISSSHSRVPAICSAAAGILECRGPSDRYRGSSYGAGLPAERIGIFLYVELAPLSQGAMSESHSCVCIT

SEQ ID NO: 210157 - protein, 83 aa, Zea mays
  Clone ID: MRT4577_123256C.1.pep
RWRMVVQSRPSPQFFVGPPGWLRRRSAAQVNMVGCRRERRRRSVNVGGEEGGLGPLTLEERRAAASGRLGLHGSTRRRGGRRC

SEQ ID NO: 210158 - protein, 241 aa, Zea mays
  unsure (1)..(241): unsure at all Xaa locations
  Clone ID: MRT4577_123257C.1.pep
WTPAGTGPEFPGRPTRPRRALHFXFKVGNRFQTVHFFRDVLGMQVLRHEEFEEGCKAACNGPYDGKWSKTMVGFGPEDDHFVAELTYNYGIGDYKLGNDFMGITLASSQAVSNARKLEWPLSKVAEGIFETEAPGGYKFYLQDRSPSQSDPVLKVTLAVSDLQKSLNYWSNLLGMKIYEQDEEKQRALLGYADNQCKLELQGIQGAVDHAAAFGRIAFSCPQKELPDLEDLMKKGDHSILT

SEQ ID NO: 210159 - protein, 34 aa, Zea mays
  Clone ID: MRT4577_123258C.1.pep
IGEITGIGDGVAARYGRDFNDVNRILSAPTTGDN

SEQ ID NO: 210160 - protein, 124 aa, Zea mays
  unsure (1)..(124): unsure at all Xaa locations
  Clone ID: MRT4577_123259C.1.pep
AWGGTRGGEMTREAEARNEGDGGQIGKTGWYAGPMFNTRAGLGTSMLHGAWSTAPNSYVLPQDHSLIXAMSFRVAGLIWARVKLPRGDMRPNKILGVGLSALYSIFLFXRVGSAVGILPLPGSS

SEQ ID NO: 210161 - protein, 508 aa, Zea mays
  unsure (1)..(508): unsure at all Xaa locations
  Clone ID: MRT4577_12325C.1.pep
MGAFAKEEHQFLAELGLAQRNPGAFACGAWGGSGPTVTSTSPTNNQVIAEVVEASVHDYEEGMRACFDAAKTWMAIPAPKRGEIVRQIGDALRAKLHHLGRLVSLEMGKILPEGIGEVQEIIDMCDYAVGLSRQLNGSIIPSERPNHMMMEVWNPLGVVGVITAFNFPCAVLGWNACIALVCGNCVVWKGAPTTPLITIAMTKIVASVLEKNNLPGAIFTSFCGGTEIGQAIALDIRIPLVSFTGSTRAGLMVQQQVSARFGKCLLELSGNNAIIVMDDADIQLAVRSVLFAAVGTAAQRCTTXRTLNLHENIYQXNINQTFLYQHVEVYKLVRIGEPLEERHLTXSSDTPASNMKILKGIRTIKSXGGKVLEGGGTFVQPTIVEITPSAPVVKEELFGPVLYVMKFQSLKEAIEINNSVPQGLSSSIFTKRPDIIFKWLGPHGSDCGIVNVNIPTNGAEIGGAFGGEKATGGGREAGSDSWKQYMRRATCTINYGSELPLAQGINFG

SEQ ID NO: 210162 - protein, 203 aa, Zea mays
  Clone ID: MRT4577_123260C.1.pep
RGRPGLSTNAPAQYRQSANNMSSMVDQTPEFPAHMTSMESSASEAEPPNGSQNSVLSDRYMSKPASTGAESGTYSCTYHGCSQRFETPQKLQKHKREGHRSANLSTAMTSAAILERNSQAGPHKCERINPTTGKPCNTVFSRPYDLTRHEDTIHNARKQKVRCALCVEEKTFSRNDALTRHMRVVHPEVDFPGKHRRRGGNHD

SEQ ID NO: 210163 - protein, 34 aa, Zea mays
  Clone ID: MRT4577_123261C.1.pep
HPKVYTTPHMIQSLPHVRVSPLHKQDKITPQTCT

SEQ ID NO: 210164 - protein, 167 aa, Zea mays
  Clone ID: MRT4577_123262C.1.pep
MVYNLAYRRPQRQARASTESVTGEHKQLSIRESVRTGSSGMSHGIPEALSFDRIIAGGVCPPCTVRDFMNFLKYIELSAENLQFFLWYRDYSKRFNELPASEKVLSPEWTGASNGDASKLAIQNAHPEVSAMLEGTDFDGSQQNEKNPFYTPPHTPTNGSRPPGGVA

SEQ ID NO: 210165 - protein, 668 aa, Zea mays
  unsure (1)..(668): unsure at all Xaa locations
  Clone ID: MRT4577_123263C.1.pep
LHCLLVYVLPVLKGIYSDQCFEIGVETRSSGPKTDVLRAKITSDEQMCCDFCKVPVFDYHRYCPRCSYDLCLDCCHDIRHSRANVARGEYTEGYVEDKGRDSFNRRARLEPSAESVNDKSLSWPIDINNIDIKSLFPTWRVNNDGSITCGPHEAGGCGSSKLVLRRIFKINWIAKLVKSSEEMVNGCKVHDLEDXDACXSDGRRSEFTGQQNLGLSKCSNSDGIGRNCLYSPVLEDLKYEGIIHFRKHWKNAEPIIIREAFEPSLSSSWDPLSIWRGIQEIMDEEMDEDVIVKAVDCXEPIRDIELKQFIKGYSDGSKGGDGHLLMLKLKEWPRPSVLEAFLLCQRPEFIVNFPLVDFIHPRWGLLNLAAKLPPDALQPELGMKLLIAHGSHRELGKGDSMTNLMINMSDVVHMLMHATEVHYQCPKRVRVQSDVSEMIANGTSVHVNAHTPVQNLNLDIEEQSHKHSKSHIEEPNTNNSEGSLAGAVWDVFRRQDLPKLNEYLAAXIGKNVQLDVXVSSVKYPIYDQTVYLNDYHKKMLKDQYGIEPFTFHQHIGEAVFIPAGCPFQLKNLQSTVQLALNFLSPESLPESVRLSQEIRCLPNGHLAKLKMLEVKKISLYAASSAVREIQRITLDPKFNLDPSFEDQNLTRAVSENLARVNKRKVSCS

SEQ ID NO: 210166 - protein, 109 aa, Zea mays
  unsure (1)..(109): unsure at all Xaa locations
  Clone ID: MRT4577_123264C.1.pep
SPGPLPRAPRLSTTETQAQXRRRPQITESSCPGTTGGRQACPAPARSPTGLHCLAGPPATHPRHHEHAQGCSHLRGAHCHPVPSPWTYRWNPPASPDQPSCSPRCPPRP

SEQ ID NO: 210167 - protein, 58 aa, Zea mays
  Clone ID: MRT4577_123265C.1.pep
ERSSLFFFFFSRIKKQGLVPILTCGSFTDGSRKGSKKSKNVQTQHEPCDPKARAIHIY

SEQ ID NO: 210168 - protein, 56 aa, Zea mays
  Clone ID: MRT4577_123266C.1.pep
WSCSCALNSCHTSWSPSVREHYRLTLIAQRAGRRLVTFYNALFLCSPSQWIRCAWN

SEQ ID NO: 210169 - protein, 87 aa, Zea mays
  unsure (1)..(87): unsure at all Xaa locations
  Clone ID: MRT4577_123267C.1.pep
SPAHLKNTFYNQHSKIIAHHQPNPLXNNKPKHSNIFLNINKTIHLLTLLFFQLPLHIFTISIKILCTPIFCALVPLMQSIPYRKFFL

SEQ ID NO: 210170 - protein, 41 aa, Zea mays
  unsure (1)..(41): unsure at all Xaa locations
  Clone ID: MRT4577_123268C.1.pep
SFPSVNRQFGWLALLPSAPGISKRTTGVVSESXGFPGRVVP

SEQ ID NO: 210171 - protein, 134 aa, Zea mays
  Clone ID: MRT4577_123269C.1.pep
ELDLHLRQKHVKQAGIHRLEVGIGRRHNGQTVVAERQMSVNKSVNERVVQQLLKLAELVVLERLVQVCGRGSVSSARAVRRRRRRPWRRIRRRRSLRGGLPDLRSAAVTPPPGAPGGWRGEACWWWPCCCCSCQ

SEQ ID NO: 210172 - protein, 528 aa, Zea mays
  Clone ID: MRT4577_12326C.1.pep
MGAFAKEEHQFLAELGLAQRNPGAFACGAWGGSGPTVTSTSPTNNQVIAEVVEASVHDYEEGMRACFDAAKTWMAIPAPKRGEIVRQIGDALRAKLHHLGRLVSLEMGKILPEGIGEVQEIIDMCDYAVGLSRQLNGSIIPSERPNHMMMEVWNPLGVVGVITAFNFPCAVLGWNACIALVCGNCVVWKGAPTTPLITIAMTKIVASVLEKNNLPGAIFTSFCGGTEIGQAIALDIRIPLVSFTGSTRAGLMVQQQVSARFGKCLLELSGNNAIIVMDDADIQLAVRSVLFAAVGTAGQRCTTCRRLILHENIYQTFLDQLVEVYKQVRIGDPLEKGTLLGPLHTPASKENFLKGIQTIKSQGGKILFGGSAIESEGNFVQPTIVEITPSAPVVKEELFGPVLYAMKFQTLKEAIEINNSVPQGLSSSIFTKRPDIIFKWLGPHGSDCGIVNVNIPTNGAEIGGAFGGEKATGGGREAGSDSWKQYLPGRPLERRNQFELQCIQSAHFWLSLLQQCTSKGSRAGPKHV

SEQ ID NO: 210173 - protein, 39 aa, Zea mays
  Clone ID: MRT4577_123270C.1.pep
MATSALAALSATAAAAGKRILLSRPAFTNSSAEDMLNAL

SEQ ID NO: 210174 - protein, 61 aa, Zea mays
  Clone ID: MRT4577_123271C.1.pep
TYKAMFARNLHLCSALVTAPVTTVAAVTQAARAEVAMEMGWVAMRSRNWPGAGGFCPGPAG

SEQ ID NO: 210175 - protein, 182 aa, Zea mays
  Clone ID: MRT4577_123272C.1.pep
MATSALAALSAPAAAAKTIAVGDRLPDATLSYFDTSSPDGELKTVTVRDLTAGKKVVLFAVPGAFTPTCTQKHLPGFVAKAGELRAKGVDTVACVSVNDAFVLFAWKESLGIGDEVLLLSDGNGELARAMGVELDLSDKPVGLGVRSRRYALLAEDGVVKVINLGEGGAFTNSSAEDMLNAL

SEQ ID NO: 210176 - protein, 233 aa, Zea mays
  Clone ID: MRT4577_123273C.1.pep
MATSALAALSATAAAAGKRILLSRPASSSSLSFASRRLAAGAPLRGFLGAPIRAVASSASAAPAAAAKTIAVGDRLPDATLSYFDTSSPDGELKTVTVRDLTAGKKVVLFAVPGAFTPTCTQKHLPGFVAKAGELRAKGVDTVACVSVNDAFVMRAWKESLGIGDEVLLLSDGNGELARAMGVELDLSDKPVGLGVRSRRYALLAEDGVVKVINLEEGGAFTNSSAEDMLNAL

SEQ ID NO: 210177 - protein, 112 aa, Zea mays
  unsure (1)..(112): unsure at all Xaa locations
  Clone ID: MRT4577_123274C.1.pep
WGAVIFGPDDTLWNGGTFNLSWQFTQDEPXNKPSTVLFVPRMFHPNIYAAGCICLDILQNXQCSSIYDVAAIVTYIQCLLSDPNPLSAADSESARVFIDNXSSINRKVREIF

SEQ ID NO: 210178 - protein, 139 aa, Zea mays
  unsure (1)..(139): unsure at all Xaa locations
  Clone ID: MRT4577_123275C.1.pep
PALSARIYVLPIGDAXVGVVAQASNRCFLGPSGLGQMVXISDEVFSGXXSPSPFLLVLYYLELLVVDGRLSPRLCTFSSRYPYLGPPTAICALRSPLLRRSPWRTXXASYSWAPATGFLXXDTIVQSPXXLSFPRDGDG

SEQ ID NO: 210179 - protein, 155 aa, Zea mays
  unsure (1)..(155): unsure at all Xaa locations
  Clone ID: MRT4577_123276C.1.pep
GGDPIHSGTIVXNLEGDLXTTLVFVLFLPNYFIQKIRSRGXFFPQEWVSIPGVKPVGFGGFCVWFFPAASEIFVYNAEFPFGGGSLGPPWGNSPGAAGYRLALKAFVQRLXEGAVFPPKGNEFFXPVCKWRSVLTPSLXKWKQFLFDGFKAVHAL

SEQ ID NO: 210180 - protein, 81 aa, Zea mays
  Clone ID: MRT4577_123277C.1.pep
VKIVRSQQIIISLLGDPVQRDRGLRRLNKVIGVSFLIFVISLIVFVLRILLRIYGNVFQDLLIFHGRRLILGVLLIASRKR

SEQ ID NO: 210181 - protein, 48 aa, Zea mays
  Clone ID: MRT4577_123278C.1.pep
WGFFFFWQHIHLRHQLAEISSKLQNTWGPIKVHKPTQYIILSRVDHTN

SEQ ID NO: 210182 - protein, 59 aa, Zea mays
  Clone ID: MRT4577_123279C.1.pep
FTKSYRGFLSRYILSNRPRHYLTGLLARYLFTVDWMIQRPHCFGRFLFHLVSGTTKRSL

SEQ ID NO: 210183 - protein, 84 aa, Zea mays
  unsure (1)..(84): unsure at all Xaa locations
  Clone ID: MRT4577_123280C.1.pep
KIQHFCVCLKGQKVCDPPFTTPGTVTLSMSPWPFPFSTPPFPXPIXNKKKNKNPKKKKKKKKKKKKKKGGRRLVSSSIGNNPDG

SEQ ID NO: 210184 - protein, 178 aa, Zea mays
  Clone ID: MRT4577_123281C.1.pep
AAFFFFFLLWFFLFFFFFFFFVFFFFVFAFHIFTYFSSFFDLSSSPASNQTTGQRPPTNPGGGGGGEPQEANSGRQNNTNSGCAGRAANSQATWRGGPPRPTTEGQDASRETPPTAPGGGRQPGPRKNRSRRAWCGGGQRGTGGPPRKSPGTGAGGPTQRGGGNHRGRLAGGTGRGRG

SEQ ID NO: 210185 - protein, 88 aa, Zea mays
  unsure (1)..(88): unsure at all Xaa locations
  Clone ID: MRT4577_123282C.1.pep
TASQLTSYITHIRLDEINKKLRSGEIYPTYRDRSPSPEPIYNSSGKRINSREQRYKKKLEDERSKLIEQTIKXTIPNLIRILTIRLTW

SEQ ID NO: 210186 - protein, 64 aa, Zea mays
  Clone ID: MRT4577_123283C.1.pep
HRMANAVLHVFEECLREAKSNGIINGGNVESELSKRWRAQRMDELDVLSRRLRLLVEYAAAVGH

SEQ ID NO: 210187 - protein, 65 aa, Zea mays
  Clone ID: MRT4577_123284C.1.pep
CSPCVLLRVMVGCLVQMLYSPVRLYGLTLSVGLRFWVLFCLVLVPPFGPIFPPKSSQGGRRKMSS

SEQ ID NO: 210188 - protein, 48 aa, Zea mays
  Clone ID: MRT4577_123285C.1.pep
PCPPLYQFKPRLVDVLLLLLLRYHIHGPLLPQYVCVSSYRINARAAAN

SEQ ID NO: 210189 - protein, 115 aa, Zea mays
  Clone ID: MRT4577_123286C.1.pep
FLNLDIFPLFDQRLSIECHCSQCPGHCPPLKNHVYHPQLSLSYPKEILAAPVAALCARPPCAAPSVSRRHHPRPCSHKRSERRTPGSGHAGGSPCLRGARLCRAYRLWSVARINP

SEQ ID NO: 210190 - protein, 34 aa, Zea mays
  Clone ID: MRT4577_123287C.1.pep
HVHGVKLGLLGLAIGSHPPCPHVVFHNRSVSVSA

SEQ ID NO: 210191 - protein, 68 aa, Zea mays
  Clone ID: MRT4577_123288C.1.pep
MAEEKHHHHHLFHHKKDEEQEEQLAGGGYGESAEYTEATVTEVVSTGENEYDEYKEEAGGEKKHHFFG

SEQ ID NO: 210192 - protein, 43 aa, Zea mays
  Clone ID: MRT4577_123289C.1.pep
LDAIENMNGKELDGRNITVNQAQSRGGGGGGGGYGGGGGSWSH

SEQ ID NO: 210193 - protein, 87 aa, Zea mays
  Clone ID: MRT4577_12328C.1.pep
LFWPRYEGNFSLGLITPHSSWSVLQMAPWLCGQMPKSSHVELNMMAPTARQNSNNDDKMTDGGHSSKEDEDVSTKVKKKAPSEDEVD

SEQ ID NO: 210194 - protein, 222 aa, Zea mays
  unsure (1)..(222): unsure at all Xaa locations
  Clone ID: MRT4577_123290C.1.pep
MAEEKHHHHHLFHHKKDEEQEEQLAGGGYGESAXVHGGHGDGGGVHGRERVRRVQGGEAAXAQAAPRRXAAPSPPAPSHSYVVLRSIRSSLSSIYIHERDNEXILIERTEXDHGSXCDVDMHSTRSTRQRRTXGARAPPQDRGGGRGGGGRRLRRLRLPRAPREEEGPQGRRGGRRREEAPLLRLIDPXPVSSSLPXCATRACVRXIERPPCCARVRMYALV

SEQ ID NO: 210195 - protein, 78 aa, Zea mays
  Clone ID: MRT4577_123291C.1.pep
MAEEKHHHHHLFHHKKDEELEEQLAGGGYGESAEYTEATVTEVVSTGENEYDEYKEEKQHKHKQHLGEAGEKKHHFFG

SEQ ID NO: 210196 - protein, 76 aa, Zea mays
  Clone ID: MRT4577_123292C.1.pep
MAEEKHHHPHLFPHKKDQEQEEQLAAGGYGESAEYTEATVTEVVSTGENEYAEYKEEKQHKHKQPLGGEKKHHFFG

SEQ ID NO: 210197 - protein, 129 aa, Zea mays
  Clone ID: MRT4577_123293C.1.pep
MASEKDAALAAVPNDNPTIFDKIIKKEIPSTVVYEDEKVLAFRDINPQAPTHIVIIPKVKDGLTGLSKAEERHVEILGCLLYAAKVIAKQEGLEDGYRIVINDGPSGCQSVYHIHVHLLGGRQMNWPPG

SEQ ID NO: 210198 - protein, 59 aa, Zea mays
  Clone ID: MRT4577_123294C.1.pep
MAEEKHHHHHLFHHKKDEEQLAAGGYGESAEYTEATVTEVVSTGENEYDEYKKKHHFFG

SEQ ID NO: 210199 - protein, 222 aa, Zea mays
  unsure (1)..(222): unsure at all Xaa locations
  Clone ID: MRT4577_123295C.1.pep
MAEEKHHHHHLFHHKKDEEQEEQLAGGGYGESAXVHGGHGDGGRVHGRERVRRVQEGGEAAQAQAAPRRXAAPSPPAPSHSYVVLRSIRSSLSSIYIHERDNEXILIERTEXDHGSXCDVDMHSTRSTRQRRTXGARAPPQDRGGGRGGGGRRLRRLRLPRAPREEEGPQGRRGGRRREEAPLLRLIDPPVSSSLPXCATRACVRXIERPPCCARVRMYALV

SEQ ID NO: 210200 - protein, 41 aa, Zea mays
  Clone ID: MRT4577_123296C.1.pep
RRPLAAQDRPGTTELACCMARARAIDLPTECYYWRRETVRR

SEQ ID NO: 210201 - protein, 65 aa, Zea mays
  Clone ID: MRT4577_123297C.1.pep
MAEEKHHHHHLFHHKKDEEQEEQLAGGGYGESAEYTEATVTEVVSTGENEYDEYKKEEKQHHFFG

SEQ ID NO: 210202 - protein, 80 aa, Zea mays
  Clone ID: MRT4577_12329C.1.pep
AAPNWYTTVLSVNQFTIYGTSVRSGPLSREIPSSPCRFRKDIRSPKWTAHVMRCRSSTRTEYSSPPMTHSMSCPTGTCTD

SEQ ID NO: 210203 - protein, 59 aa, Zea mays
  Clone ID: MRT4577_1232C.1.pep
LPMWLARPSFLSVTGLISTLWLPLSSVFHDTNISGLLCLVRLDCIFNMGATLFFLIAYA

SEQ ID NO: 210204 - protein, 122 aa, Zea mays
  Clone ID: MRT4577_123300C.1.pep
NPGVFFLAIFKNKKIQTQGKNFQQKPNRLVLKKQKTGVRPRGPPSLRHGVIKGIPPFLLGGPWETPPEVMRGTFGERAKRAPLLPREPVIFSHTLFLPLKKPPVSPEGPEKVPLSPTGKSGG

SEQ ID NO: 210205 - protein, 57 aa, Zea mays
  Clone ID: MRT4577_123301C.1.pep
FKLLMLYIMSVELCTHVPVKRSIVSLLGYGVIRSGTLFSVAKLGWPVVSTAKGWASQ

SEQ ID NO: 210206 - protein, 65 aa, Zea mays
  Clone ID: MRT4577_123302C.1.pep
IEVQGSSVVYPLIKKGTNYLKKSRPQTTLHRNMDSPKRRVNKILLPRKAKSNNQAVVTRGYDMVW

SEQ ID NO: 210207 - protein, 69 aa, Zea mays
  Clone ID: MRT4577_123303C.1.pep
KRCVATGENPGGLNCLEKKRGVFYLVTRSQGIVPGWGKMFPLNIKAGPHHQQPLSTSPILLRPSIPDTH

SEQ ID NO: 210208 - protein, 165 aa, Zea mays
  unsure (1)..(165): unsure at all Xaa locations
  Clone ID: MRT4577_123304C.1.pep
MENAPSILALCLITLLCTIYIPXATQNSDCXIYICMQNVVYCITTDSYCLDLCHFFPCPSLADANIGXSMNTGSSGXAHASTTAADDTYFNDTNNLADNLSHANHFYTQNADLSTINAYHGYDHDXSRCRATREIDEXYPHVLHETGRLCYITEIAWSDAXYCDS

SEQ ID NO: 210209 - protein, 295 aa, Zea mays
  unsure (1)..(295): unsure at all Xaa locations
  Clone ID: MRT4577_123305C.1.pep
GVDLPAWALXAIDKIRRGFLXRGRRDVKGGHCHVXWGIVCRPRELGGLGISSIKELAWSLRMRWLWLAKTEPTRPWASLAIQVPKKVKDFFSMTMQTEIGNGATTFFWTNRWLSGHRIRDLVPRLFGIIPKRRVSKRIVVDAISNQSWISDIQGALSVGIINEFLILWDLIDSIVLRPQVEDKHFFRLAANGKFSSKEAYRGEFFLGSSEFEPFHRIWKSWAPPKTKFFMWLVAHRKVWTADRLQKRGMDHPERCPLCDQDQETLDHMLIGCVFAREFCFKLLLQVNLQFLAPPI

SEQ ID NO: 210210 - protein, 200 aa, Zea mays
  unsure (1)..(200): unsure at all Xaa locations
  Clone ID: MRT4577_123306C.1.pep
MAKSFLAMKTGPAAGASEASQALLESDLRELTMAARKLANHAIVLGGGIGFIGTFLQWLAFAAAVYLLVLDKTNWKTNMLTGLLVPYIFFTMPGLLFGFIRGEIGSWVAFVFVVLRLFFPRHFPDWLELPGSLILLTVVAPAIFADTFRGSWLIIGVGVCLVVGCYLLHEHIKAXSGGLKEAFQKPNGWSNTIGILLLFI

SEQ ID NO: 210211 - protein, 72 aa, Zea mays
  Clone ID: MRT4577_123307C.1.pep
QNKMPILAFSLGTGPFHAVGPSILSHFFHDVPPFFFDGPPFFLQLVPHPFPEIHYSSSPPAFLLCVLSNGGC

SEQ ID NO: 210212 - protein, 134 aa, Zea mays
  Clone ID: MRT4577_123308C.1.pep
VLHAQQAARGSNKVSKNDGDTDTHVSKSKSKNIHHHHHHPVCTYTRHIEKKKKIKVVNGQEEPQRASSVGSVVVEEEHDDALPDDAEPGHLLPQRRAEPTASSSPALPLLLATPTPRPVHRPGRTAASKRRHGG

SEQ ID NO: 210213 - protein, 120 aa, Zea mays
  unsure (1)..(120): unsure at all Xaa locations
  Clone ID: MRT4577_123309C.1.pep
LPLFSPYLSPEVGLFFENPILQPHRIQQAIAAGILPLSPXILQQSSALLQQIPLVHLXLKTIRAQQLQQHVLANLAVYSKLHXFLXIHQLAXALNSAFLLQQQQLLFNQIADAFPLQLIP

SEQ ID NO: 210214 - protein, 60 aa, Zea mays
  Clone ID: MRT4577_12330C.1.pep
NCYPRIMSVEHDESRIVLIAKKNVCAGDELTYDYLFDPDEGDEREVPCLCQTANCRKFMN

SEQ ID NO: 210215 - protein, 72 aa, Zea mays
  Clone ID: MRT4577_123310C.1.pep
ALAKLSGLGAKFPPPRVSLWLISPAPDPQSVSRKTLPLKRLGSPLPFPCSSPIIVQDGLVPLFHDAIWGLLL

SEQ ID NO: 210216 - protein, 187 aa, Zea mays
  unsure (1)..(187): unsure at all Xaa locations
  Clone ID: MRT4577_123311C.1.pep
KGGFGAKIWAPKKKIFFGFPKAGFHFPLGGEGGSPKKGRFPQGGGPGAPFFFPPGFRDPPPQGLKWAANPGKETKKRGFFPPPGFLGIPKTFXFAKIWGGVPPGPGGVPPQKNRVFFPKKGGEKGFKGAPKKKNSLKKAPKSPKKEPKSPKKVLKLFPPPGFPLKKFWFKIWEFFGSAQISFFPLGF

SEQ ID NO: 210217 - protein, 98 aa, Zea mays
  Clone ID: MRT4577_123312C.1.pep
TGNIQKIANPHIHPFFTHSKSRWGILGGGGATLAQAHKFWGNSDRYKTTTTSNMGMTKGTGDTIDNKLWADCTPTRGGNHLRGGFTRDLTFRFFRTPG

SEQ ID NO: 210218 - protein, 60 aa, Zea mays
  Clone ID: MRT4577_123313C.1.pep
RDISALNFVFVAYWSFYLYMAHHAMLSLSLIPLSFATFKEKTSPTHFLLTITNQPLLLFY

SEQ ID NO: 210219 - protein, 154 aa, Zea mays
  Clone ID: MRT4577_123314C.1.pep
MKAKALPFIAFEHKRDAYGFAVRPQHLQRYREYANIYKEEEEERSDRWKNFLDRQAEDGESSGEDAKVAPSNEEDGVAAKDGRTEPRPHKIQIWSEIRPSLGHIKEMMNSRVKKQSSSVNDGYTRDEPHPGNSEGSKPSGDSDDEVYDVEKVDP

SEQ ID NO: 210220 - protein, 68 aa, Zea mays
  Clone ID: MRT4577_123315C.1.pep
HTLHLLHVVIPITGADECAQKKKKKKKKKKKKKKKKKKKKKKKKKKKKKKKKKKREKKKKKRGGPQTP

SEQ ID NO: 210221 - protein, 82 aa, Zea mays
  unsure (1)..(82): unsure at all Xaa locations
  Clone ID: MRT4577_123316C.1.pep
MRESMRERIAQDIVQAGIQCXDPCWVLHCLQAGIQTHGHMTSDGGNEGGDDAFNKTCTENDAQKDVPGDVFATVVPTVMTEA

SEQ ID NO: 210222 - protein, 106 aa, Zea mays
  Clone ID: MRT4577_123317C.1.pep
GSKYLMMRATPNTGGRLPSTRFLCFQLHHSSCVCSKLSHEMFSVKRQRLGEFCKALVCDVSAVAPSPSRRPNDCPRHVSPASVEDGTLCSGKCHNTRVSKALEAPE

SEQ ID NO: 210223 - protein, 197 aa, Zea mays
  Clone ID: MRT4577_123318C.1.pep
KVYYHSGGLRLNPNLYESGKVCLSLLNTWWGKGCEKWGKSSSTMLQVLVSIQGLVLNDRPYFNEPGYKNSAETTGGERCSLAYNQTTFVRSCKTTLYSLRKPPMHFETLVLWHFHEHERAILDACRAYMSGTVVGSSAGTGSNRRYVHDKCFAEFHKSLTLYTEHLRAEFATNRRRVMELETEDEIVPSIAASMKSC

SEQ ID NO: 210224 - protein, 88 aa, Zea mays
  Clone ID: MRT4577_123319C.1.pep
GKMHATTCYRGLTNINAGANTLMRAPPLKLRRDAHGSCPEVSYMGRPQILPTLNNNTAAYNGDSHEPMCPDHLLPSVIRQHPPLGPYS

SEQ ID NO: 210225 - protein, 509 aa, Zea mays
  Clone ID: MRT4577_12331C.1.pep
MGAFAKEEHQFLAELGLAQRNPGAFACGAWGGSGPTVTSTSPTNNQVIAEVVEASVHDYEEGMRACFDAAKTWMAIPAPKRGEIVRQIGDALRAKLHHLGRLVSLEMGKILPEGIGEVQEIIDMCDYAVGLSRQLNGSIIPSERPNHMMMEVWNPLGVVGVITAFNFPCAVLGWNACIALVCGNCVVWKGAPTTPLITIAMTKIVASVLEKNNLPGAIFTSFCGGTEIGQAIALDIRIPLVSFTGSTRAGLMVQQQVSARFGKCLLELSGNNAIIVMDDVDIQLAVRSVLFAAVGTAGQRCTTCRRLILHENIYQTFLDQLVEVYKQVRIGDPLEKGTLLGPLHTPASKENFLKGIQTIKSQGGKILFGGSAIESEGNFVQPTIVEITPSAPVVKEELFGPVLYVMKFQTLKEAIEINNSVPQGLSSSIFTKRPDIIFKWLGPHGSDCGIVNVNIPTNGAEIGGAFGGEKATGGGREAGSDSWKQYMRRATCTINYGSELPLAQGINFG

SEQ ID NO: 210226 - protein, 104 aa, Zea mays
  Clone ID: MRT4577_123320C.1.pep
RSQGQNRRILLIVSHCLYPHKYINHTSTSYNGNCNSNPDLLIRPLGDAVRSPSHSLTTLPSSAAMSMWRYQPRSLLRLTAISLLPTAPWPGPPLFLSPALTRSF

SEQ ID NO: 210227 - protein, 121 aa, Zea mays
  Clone ID: MRT4577_123321C.1.pep
MDAGMSKSTEIADKAIILMQDHAKHIYRICNEKLILGKGLTAFEVKELREALEFAAEGLDQDSLFCQEELDATVKEEQLEHDEKVASQMIESPLLLLIRTASYPLKSTLRSFGALITTRTR

SEQ ID NO: 210228 - protein, 166 aa, Zea mays
  Clone ID: MRT4577_123322C.1.pep
MNRKPGDWDCRACQHLNFSRRDACQRCSEPRGVGDRSGGGGDLGGRGGSSFGGGFGAGSDVRPGDWYCSCGAHNFASRSNCFRCSAYKEEAAGAFDSDMSRSRGYAGFGSGAAARTNRPGWKSGDWICTRSGCNEHNFASRMECFRCNAPRDSGSAATTTYENYLH

SEQ ID NO: 210229 - protein, 80 aa, Zea mays
  Clone ID: MRT4577_123324C.1.pep
GKLSYGVFAYGTSGKTHVKKNSLYFNKRCFIRMYEWMLKNPEIIWLYESMPFVGLVKKKKKKNFKQKPRRQIKDPSLRRG

SEQ ID NO: 210230 - protein, 264 aa, Zea mays
  Clone ID: MRT4577_123325C.1.pep
MSACFLPSAPDLKIEQIPASSSLSPTSARTPPLMWLPWVKTRPSSATSTSNSPSTALVAAASPRLSFSSPSLKDLQALLLSDAATLSPPPAAPCSPSSSVRVFHRVRVAASALRALRTLQAPPSSGGGAAFEADRRVVLYFTSLHVVRSTYEDCRAVRAILRGLRVAVDERDLAMDTRYFQELAALLPRPVAPRRVTLPQVFVGGRHLGGADEVRRLHEAGELRRVVAGAVAASLATCGRGGGERDVLCGSCNGRHKLDNTKDG

SEQ ID NO: 210231 - protein, 116 aa, Zea mays
  unsure (1)..(116): unsure at all Xaa locations
  Clone ID: MRT4577_123327C.1.pep
APLPVXSFSFRPPGPAACRSACGLXGXXALXXASRXRAGSXXXPSPPSPSPSSPXPAPAGLGLLLXXGVWVLGXAXSXLXXXGACRGVASLGGXXVVSXPSXFXLRFXLCVXVFRG

SEQ ID NO: 210232 - protein, 33 aa, Zea mays
  Clone ID: MRT4577_123328C.1.pep
KKKKKKKKKKKKKKKKKKKKKKKKKKKKGRAGS

SEQ ID NO: 210233 - protein, 104 aa, Zea mays
  unsure (1)..(104): unsure at all Xaa locations
  Clone ID: MRT4577_123329C.1.pep
ACQVVLMGPVKGFRVAGGPLEKVVDPLYPGGSFDPFGFSANPEGFPELKVKEFKNGPLPMFSMFGFFVQAIVPGKGPLKNLPDHIPDPVNNNAWAXAPNLVPGK

SEQ ID NO: 210234 - protein, 70 aa, Zea mays
  Clone ID: MRT4577_12332C.1.pep
YFLERPKLRGSFLFWRLNKGPPLGFFPHKLCFSITGVTPPSKSKPWNGFVPYKCSGHFFFIWQLLSGPGI

SEQ ID NO: 210235 - protein, 46 aa, Zea mays
  Clone ID: MRT4577_123330C.1.pep
SRFQVATGGFACRPARTKVRRSGPQGPCHWLRPAGRRAAAGRLEAP

SEQ ID NO: 210236 - protein, 67 aa, Zea mays
  Clone ID: MRT4577_123331C.1.pep
CHVEHPRPYQVMSVLSPSALQRERIRSTSRASFSCPRTTANSVFFKCGQKWHMSGCPLATRQTGRVG

SEQ ID NO: 210237 - protein, 169 aa, Zea mays
  Clone ID: MRT4577_123332C.1.pep
GRPRTGPLAAPGPLASVSLGPPRPARWAALCSPRGRSPDWRSRAARSRRATARWAASRQGPLSGRGRALSSLPELEDDFKEGYLETVAAYYEEQHPELTPLLEKERDGLRCRGNRSPVPDVEDPATEEPGESFCDKVMRWFQAMLQRLQTWWHGVLAWVKEKVVALVHA

SEQ ID NO: 210238 - protein, 52 aa, Zea mays
  Clone ID: MRT4577_123333C.1.pep
NPYPGDANVACWPSTQNMYGLCTHLDLIMVIITITHQSYSESDQFPLPGWRT

SEQ ID NO: 210239 - protein, 62 aa, Zea mays
  Clone ID: MRT4577_123334C.1.pep
SYSSQRNWNFFSWQLSSGYYNVARQVVCVIVTSRSAYTPKSTAMNVRYLPTAPARTRAQCCL

SEQ ID NO: 210240 - protein, 118 aa, Zea mays
  unsure (1)..(118): unsure at all Xaa locations
  Clone ID: MRT4577_123335C.1.pep
MASLAFGSTVAADVDATSGMTRAARRCLLVVPSAGSRGGREPAKEENGLRETILGFMLKKDQLVDTDPLLNKVXSSVPACAYRAKTTAGKKADGGDDSGSGGGFNLERLRGLFGKKST

SEQ ID NO: 210241 - protein, 85 aa, Zea mays
  unsure (1)..(85): unsure at all Xaa locations
  Clone ID: MRT4577_123336C.1.pep
RSKSHTKSAKLSAKFQAGKKWEKASQDPNKPKRPPRAFFAFIEEFREQYKKDHPKNKSPAGVGKACGDXLKSLSXTKKAPYVSKA

SEQ ID NO: 210242 - protein, 109 aa, Zea mays
  unsure (1)..(109): unsure at all Xaa locations
  Clone ID: MRT4577_123337C.1.pep
XVRKKKKKKKKKKXKKKKKKKKKKKKKKKIKKKKRVDSFKRSRIYKTGAVRGNPLLCPCSLILFALARCCQPRGIGAKRWRPANFFRLAPISPFRRGGTLGRGLNRSPC

SEQ ID NO: 210243 - protein, 53 aa, Zea mays
  Clone ID: MRT4577_123338C.1.pep
AYTKSIIRLYSMTLPYPYRLHLIDRRGDLRTIPSAHNKRRSLLMQTPHNSSNV

SEQ ID NO: 210244 - protein, 94 aa, Zea mays
  Clone ID: MRT4577_123339C.1.pep
ECYDCASSSAFPGHISISLNGELSQTARRDTSTHHDTFAELDSSSWRVARNLKAADVLLVLMRAKRQLPLVPGSPKLKRYFVTHREGDVFLTEM

SEQ ID NO: 210245 - protein, 90 aa, Zea mays
  unsure (1)..(90): unsure at all Xaa locations
  Clone ID: MRT4577_12333C.1.pep
GRASVAXGAVPVPLLXVVXLXFVXVAAGWVXRXGGVXXRXAXXVPLLAXLXPRFVVAXGXFPAAVLAAXVCLGVPXCGXPRGAWVXRSSS

SEQ ID NO: 210246 - protein, 73 aa, Zea mays
  Clone ID: MRT4577_123340C.1.pep
MVPTPKIRGLEKVCQKGPGVPPLPPGVFCLFFPKKKKKKKKKKKKKKKKKKKKKKKKKKKKKKKKKKKKKKKK

SEQ ID NO: 210247 - protein, 94 aa, Zea mays
  Clone ID: MRT4577_123341C.1.pep
GPYLCKGISPRKGILFHVFVVKSDWITLRSYFTRVRLVPEGPFQWTRSAFLLLRHILSFDSMGSGQRPLLCWRFSQHFFGPEAVVMFYMVRCRA

SEQ ID NO: 210248 - protein, 118 aa, Zea mays
  unsure (1)..(118): unsure at all Xaa locations
  Clone ID: MRT4577_123342C.1.pep
MPVIFFLSQAGQMGRHCSGINSHKKQDSTTNGNILIYAKGGLNQMRTVICDMVAVAKILKASLVLPXLDHTSYWAEDSQSKDHLNWRHLIVSLKEDIXLGETLSPVYRDIEPLAKAPV

SEQ ID NO: 210249 - protein, 73 aa, Zea mays
  Clone ID: MRT4577_123343C.1.pep
KQRYLAQTPETNKKEGEKLRPPKNQTRLSPERKKKPRRDTGGPWGPNPPFWLKGKKNSAWPPRGRGGTTAGPE

SEQ ID NO: 210250 - protein, 230 aa, Zea mays
  Clone ID: MRT4577_123344C.1.pep
MSRLRALWQASFNATKRALVWSSDDLIPPSERCIFNFNSKDELKRWHLYSDSEYGGLSSASLEITDGASVGDTPLTGVFSGNLSLDMSEESTWRIRRYGFCGMRSKKFDGFIDLDAYDTIAMKIKGDGRCYISTIYTENWVNSPGQQEDNSWQAFVYIPPQDRWEVLKIPLDRYLPTWRGNVIQAKLEMNPARIVGMSLSVNAEGGVPGAKTGPGDFRLDVAWIKALRAL

SEQ ID NO: 210251 - protein, 95 aa, Zea mays
  Clone ID: MRT4577_123345C.1.pep
KKNFNFCWFKMPNKKGDPTKGPSFPVFGWPFALFELSVLGPSKGIPLFQLQFVLQLFEPLEQEGFEPFFVAPDLLLYDDLGDWWPPLCGVLLWVL

SEQ ID NO: 210252 - protein, 66 aa, Zea mays
  Clone ID: MRT4577_123346C.1.pep
TYIVLMKLFYIILDFNAFLSVTVFSFLVSTVIVFLSCNRLVLFIRQALCTVIFVDFSFKKKKKRAT

SEQ ID NO: 210253 - protein, 58 aa, Zea mays
  Clone ID: MRT4577_123347C.1.pep
PPQVIVLFHIGPFLLYHPAPVAPLNSSADHNHRSNHSTDSQLLYALNNGFCFTSEVYE

SEQ ID NO: 210254 - protein, 138 aa, Zea mays
  unsure (1)..(138): unsure at all Xaa locations
  Clone ID: MRT4577_123348C.1.pep
SARGRIRRYCTCGMRSKKFDGFIDLDAYDTIAMKIKGDGRCYISTXXFSHKTHSCXFNXXPRPVFPPRNLHLXIYTENWVNSPFLHEDNSWQAFXYIPPQDRLEVLXIPLDRYLPTWRGNVIHAKLEMNPARIVGMSL

SEQ ID NO: 210255 - protein, 315 aa, Zea mays
  Clone ID: MRT4577_123349C.1.pep
MDVVKAAQLSGRTLERVVVHPLVLLSIVDHYNRVARDTRKRVVGVLLGTSSRGSVDVTNSYAVPFEEDDKDPRIWFLDHNYHESMFSMFKRINAKEHVVGWYSTGPKLRENDLDVHALFNSYVPNPVLVIIDVQPKELGIPTKAYYAVEEVKENATQKSQKVFVHVPSEIAAHEVEEIGVEHLLRDVKDTTISTLATEVTSKLAALKGLDARLREIRSYLDLVIEGKLPLNHEILYHLQDVFNLLPNLNVNELIKAFAVKTNDMMLVIYLSSLIRSVIALHNLINNKVGCFYLLLVLFQSLCAPLVDFDICDIDH

SEQ ID NO: 210256 - protein, 44 aa, Zea mays
  Clone ID: MRT4577_12334C.1.pep
LRKGSTSGSGSRWQRRRRHRRWLMAGRRGWRLRTSRRISSTLDH

SEQ ID NO: 210257 - protein, 84 aa, Zea mays
  Clone ID: MRT4577_123350C.1.pep
CMPQSIRRHTETIHKRLGSIERRRARPGPAIPLRHSGGPPHETPILNRLGGDKLECHGGRGLHERGLWTTPKAAQLTKMSFHNL

SEQ ID NO: 210258 - protein, 222 aa, Zea mays
  Clone ID: MRT4577_123351C.1.pep
RPAGPGFFARRPQSRSEAVPRTISIQWRRRRSCRRASSALRGRTRTIAVEPKFYPADDVKPRVPSTRKPKPTKLRSSITPGTVLILLAGRFMGKRVVFLKQLKSGLLLISGPFKINGVPIRRVNQTYVIATSTKVDISGVDVAKFDDKYFAREKKQKVKKTEGELFETEKEASKSLPDFKKDDQKAVDSALIKAIEAVPELKTYLGARFSLRDGDKPHEMVF

SEQ ID NO: 210259 - protein, 65 aa, Zea mays
  Clone ID: MRT4577_123352C.1.pep
MDPETCPCPSGGSCTCADSCKCEGCKCTSCKKSCCSCCPAECEKCAKDCVCKGGEAAEAEAEKCS

SEQ ID NO: 210260 - protein, 191 aa, Zea mays
  Clone ID: MRT4577_123353C.1.pep
MAPTSKLSTGIKRASRSHAYHRRGLWAIKAKNGGAFPKADKAAAAVEPKFYPADDVKPRVPSTRKPKPTKLKSGLLLISGPFKINGVPIRRVNQTYVIATSTKVDISGVDVAKFDDKYFAREKKQKVKKTEGELFETEKEASKSLPDFKKDDQKAVDSALIKAIEAVPELKTYLGARFSLRDGDKPHEMVF

SEQ ID NO: 210261 - protein, 219 aa, Zea mays
  Clone ID: MRT4577_123354C.1.pep
MAPTSKLSTGIKRASRSHAYHRRGLWAIKAKNGGAFPKADKAAAAVEPKFYPADDVKPRVPSTRKPKPTKLRSSITPGTVLILLAGRFMGKRVVFLKQLKSGLLLISGPFKINGVPIRRVNQTYVIATSTKVDISGVDVAKFDDKYFAREKKQKVKKTEGELFETEKEASKSLPDFKKDDQKAVDSALIKAIEAVPELKTYLGARFSLRDGDKPHEMVF

SEQ ID NO: 210262 - protein, 182 aa, Zea mays
  Clone ID: MRT4577_123355C.1.pep
MASEKKQSNPMREIKVQKLVLNISVGESGDRLTRAAKVLEQLSGQTPVFSKARYTVRSFGIRRNEKIACYVTVRGEKAMQLLESGLKVKEYELLRRNFSDTGCFGFGIQEHIDLGIKYDPSTGIYGMDFYVVLERAGYRVARRRRCKARVGIQHRVTKEDSMKWFQVKYEGVILNKAQANTV

SEQ ID NO: 210263 - protein, 686 aa, Zea mays
  Clone ID: MRT4577_123356C.1.pep
MVRVRPRSALDARRQLRRRRHWIEMVRGTASDRGLGAAAGSASESGGSPAASAAAAAAAAFPATSLYVGDLHESVQDAQLFDVFSQVGGVVSVRVCRDINSRKSLGYAYVNYNNTSDAARALELLNFTPINGKPIRIMYSNRDPSSRKSGAGNIFIKNLDKSIDNKALYDTFCVFGNILSCKIATDPAGESKGYGFVQYERDEAAHAAIEKLNGMLMNDKKVYVGPFVRKQERDNSPGNVKFNNVYVKNLSDTTTDDDLKEIFGKYGTITSAVVMRDSDGNSRCFGFVNFENADAAAQAVQELNGKIFNDKELYVGRAQKKSEREMELKEKFEKNIQEVAEKFQNTNLYLKNLDDNIDDEKLREIFAEYGNITSCKVMRDSYGVSRGSGFVAFKSAEDANRALTEMNGKMVGSKPLYVALAQRKDDRKAKLQAQFSQMRPVAMAPSVGPRMPMFPPSVPGVGQQLFYGQPPPAFINPQAGFAFQQPMMPGMRPGGPMPNFMMPMVQQGQQPQRPAGRRAGSGGMQQPMPMGSQQQIFPRGGRGYRYATGRGMPDPGMHNVGAVMPSPYEMGGMAMRDAGVSQPVPIGALATALANASPDQQRLMLGENLYPLVEQLEREQAAKVTGMLLEMDQTEVLHLLESPDALKAKVAEAMEVLRSAQHLQQSNASTEQQLANLSLNDGVLSS

SEQ ID NO: 210264 - protein, 116 aa, Zea mays
  Clone ID: MRT4577_123357C.1.pep
MASSSSEVRPASRRIVDYLNDGEELGAQGAVETPPCSPAAVAVGKQAKSALPRFRWPRLVRLRREGGGDEGKPGVVVVERGDDLPVAAASTSGACVLPDLVVLGVQGAIVDCLAKS

SEQ ID NO: 210265 - protein, 79 aa, Zea mays
  Clone ID: MRT4577_123358C.1.pep
SRQTLECTLLKGRHTAQMPCAPLIEAMEGNSVAVLMSRDTDLIHVHPTRGGMTLSTELRWIKTRRDIFIRRYPLLENIC

SEQ ID NO: 210266 - protein, 194 aa, Zea mays
  Clone ID: MRT4577_123359C.1.pep
MRRRGSGRFLAPMASEKKQSNPMREIKVQKLVLNISVGESGDRLTRAAKVLEQLSGQTPVFSKARYTVRSFGIRRNEKIACYVTVRGEKAMQLLESGLKVKEYELLRRNFSDTGCFGFGIQEHIDLGIKYDPSTGIYGMDFYVVLERAGYRVARRRRCKARVGIQHRVTKEDSMKWFQVKYEGVILNKAQANTV

SEQ ID NO: 210267 - protein, 98 aa, Zea mays
  unsure (1)..(98): unsure at all Xaa locations
  Clone ID: MRT4577_12335C.1.pep
TRTTAYYQHLVFXSYNQXTALDPAAEWREQILLPFSQLATASRACFLTQQHLLSFYQHFAANXPQPFLQLQQLMPFVQLALTNPAASYQQHIIGGALL

SEQ ID NO: 210268 - protein, 37 aa, Zea mays
  Clone ID: MRT4577_123360C.1.pep
MALYDRSRESLLPSYLYASSARSFAATGAAARLPVSS

SEQ ID NO: 210269 - protein, 182 aa, Zea mays
  Clone ID: MRT4577_123361C.1.pep
MASEKKQSNPMREIKVQKLVLNISVGESGDRLTRAAKVLEQLSGQTPVFSKARYTVRSFGIRRNEKIACYVTVRGDKAMQLLESGLKVKEYELLRRNFSDTGCFGFGIQEHIDLGIKYDPSTGIYGMDFYVVLERAGYRVARRRRCKSRVGIQHRVTKEDSMKWFQVKYEGVILNKAQASTI

SEQ ID NO: 210270 - protein, 182 aa, Zea mays
  Clone ID: MRT4577_123362C.1.pep
MAHEKKLSNPMREIKVQKLVLNISVGESGDRLTRAAKVLEQLSGQTPVFSKARYTVRSFGIRRNEKIACYVTVRGEKAMQLLESGLKVKEYELLRRNFSDTGCFGFGIQEHIDLGIKYDPSTGIYGMDFYVVLERAGYRVARRRRCKSRVGIQHRVTKEDSMKWFQVKYEGVILNKAQANTL

SEQ ID NO: 210271 - protein, 237 aa, Zea mays
  Clone ID: MRT4577_123363C.1.pep
RGRPGPKDGRRRGTAVSSPPWYAASVPSPCYHSHLVSFLFLVRPVICEANSPGVPQAHEKKLSNPMREIKVQKLVLNISVGESGDRLTRAAKVLEQLSGQTPVFSKARYTVRSFGIRRNEKIACYVTVRGEKAMQLLESGLKVKEYELLRRNFSDTGCFGFGIQEHIDLGIKYDPSTGIYGMDFYVVLERAGYRVARRRRCKSRVGIQHRVTKEDSMKWFQVKYEGVILNKAQANTL

SEQ ID NO: 210272 - protein, 44 aa, Zea mays
  Clone ID: MRT4577_123364C.1.pep
LTQSMPTSTLTIRTMMDYTYLRNLYLIVRLGLALNLGSRHLNYG

SEQ ID NO: 210273 - protein, 64 aa, Zea mays
  Clone ID: MRT4577_123365C.1.pep
RCRQANSKSLLRWRTPTPGNPGPMALIKRSAGVDWHTLLAAEPVYTEAARGLLLLLRVACFGRR

SEQ ID NO: 210274 - protein, 59 aa, Zea mays
  Clone ID: MRT4577_123366C.1.pep
SVGASAARRIGRPHHSPEVGLPTFSRSAALSAGPLRRPPRTRGAIFLFFLTVPQKNRRL

SEQ ID NO: 210275 - protein, 82 aa, Zea mays
  Clone ID: MRT4577_123367C.1.pep
RTVTQSLGYISDPQGRPLLGTWACRAGARSTKGMPHSGAVPRGGMEGALCAPQEEESLSPGIRHPFTCIPTQMQAYQGPLSV

SEQ ID NO: 210276 - protein, 94 aa, Zea mays
  Clone ID: MRT4577_123368C.1.pep
PPIRWVSGWQRRKGSGLRRVIRFLRAARGLCLPQRCRTGAQEPTRRWRYKKIACLYTCSCSFVPAICCGLKHQFSAQFKGEDKKKKKTLLVSME

SEQ ID NO: 210277 - protein, 86 aa, Zea mays
  unsure (1)..(86): unsure at all Xaa locations
  Clone ID: MRT4577_123369C.1.pep
VIALKFKAFMRNTFVQRYPITVIVSSYSKSTYEVHXXSHXXIGRVSXQPTHLKVPLTNXFEYRSFXDCEHWPPARRGVVPGEFRNR

SEQ ID NO: 210278 - protein, 60 aa, Zea mays
  Clone ID: MRT4577_12336C.1.pep
EGPAAPHCLQSGTLIQTSELPLIRITCKPTRSARDTSHRSVYQDSSSELCFFRPIALESY

SEQ ID NO: 210279 - protein, 65 aa, Zea mays
  Clone ID: MRT4577_123370C.1.pep
PSSSLMHCPHNALALLGVRGHPHLRIPFLALPSSSAKYSRAPVYSRVVCAVSAQSSYVGNTIVRV

SEQ ID NO: 210280 - protein, 46 aa, Zea mays
  Clone ID: MRT4577_123371C.1.pep
AQAVYASGGKAHGMFILLAYDIHSGRVKVRRGGAPRSAALIFRPST

SEQ ID NO: 210281 - protein, 634 aa, Zea mays
  unsure (1)..(634): unsure at all Xaa locations
  Clone ID: MRT4577_123372C.1.pep
MEDDYDFPAAGGYDPMGMMGMGMGGYGLGGPMGMXLRPRRSHGDGGLRPRRRGRRRCHEGPXAGDEVEVHYTGTLIDGTIFDSTRDRDSPFKFTLGQGQVIKGWDLGIKTMKKGENAVFTIPPELAYGEDGSPPVIPPNATLQFDVELLSWVCIKDISKDGGILKKVVAKGDKWENPRDPDEVVVKYEARLEDGTVVSKSDGVEFTVRDGVFCPAISKAVKTMKKNEKAHLTVMPQYGFGVKGRQASGEEASVPPNATLHIDLQVVSWRTVTELGSDKKILKKILKEGEGYDCPNDCAVVRVKLIGKLEDGTLFVKKGHDGEEPFEFKTDEDQVIEGLDKAVLSMKKGEVSLVTIPPHHAFGTNETTKDLATVPPNSYVYYEMELVSFDKEKDSWDLKNVAEKIEAAAKKKEEGNVWFKIGKYARASKRYEKALSFVEYDSSFTEEEKQLSKPLQISCKLNNAACKLRLNDYKEAKELCTEVLEIXDNTNVKALYRRAQAHMHLVDLDLAEADIKKALEIDPDNRDVKMGYKRLKEKVKEYKRRDAKLYGNMISKLSKLEDTEDNGQMSQAVNKKRELLWPLAEMLRRFFTADGSKGSTLWLVLRLLIPVIVLVAVCVGYFMHSSVEEIDCINC

SEQ ID NO: 210282 - protein, 67 aa, Zea mays
  Clone ID: MRT4577_123373C.1.pep
VVIKFQGFLLWSASVFQCSSIIKCLAVSGHTTSYSFLNYSVKIPLIHKTKFVKHYSLIKLSSIKRVN

SEQ ID NO: 210283 - protein, 183 aa, Zea mays
  Clone ID: MRT4577_123374C.1.pep
MLFTRALLVAAQRRDVTGNPALQGLLEMLGKKAKEAENTLHELHHFMTRDKIDGTRYAAPELGDGLGAKAEHAHHAARHTADNWLSCLSCCCRRDDDDDDAAHAMPRRPRDDGHVAKLPFNRVAMSNKIRQLIEEMHSYCTRISNVLDEMPSRSRDIHTPERNLGIPFQEKYMSVLDAERERQ

SEQ ID NO: 210284 - protein, 58 aa, Zea mays
  Clone ID: MRT4577_123375C.1.pep
EPPWRPAPHTCTPTHGRFFFGLRPKTQGRIVQKAALQKVAKFYTFFLSSYIYHLHIPA

SEQ ID NO: 210285 - protein, 95 aa, Zea mays
  unsure (1)..(95): unsure at all Xaa locations
  Clone ID: MRT4577_123376C.1.pep
EYYRAIDGAILRYICGESTCNWISNNYLAVVTEKFGAALVSPEHRYYGKSSPFNKLTIXNLQFLSSKQALFDLTIVRQYYQETEIPVYRSGATVL

SEQ ID NO: 210286 - protein, 58 aa, Zea mays
  Clone ID: MRT4577_123377C.1.pep
PSQKGAGEPPLARIRIENRGFQPEPQVGPNNPAIIRRASNGTPHDLEFALPLDRVWEP

SEQ ID NO: 210287 - protein, 213 aa, Zea mays
  Clone ID: MRT4577_123378C.1.pep
QVFREHHDGGGGGDDGGNPFAAQLMEVMELLHGNLEAKSRLYKDPSLSNIFLMNNGRYMLQKIRGSAETNAMLGEAWARKQSTNLRQYHKNYQRDAWSRVLGLLRDDGVLTVKGHVQKPVLKERFKQFNAAMDEIHRTQGAWVVSDEQLQSELRVSIAAVVVPAYRSFLGRFAQHFSAGRQTEKYVKLSAEDVETIIDELFDGNATSMTRRKT

SEQ ID NO: 210288 - protein, 186 aa, Zea mays
  unsure (1)..(186): unsure at all Xaa locations
  Clone ID: MRT4577_12337C.1.pep
PQAGIEDPCPARSGGRPSPSDEVVQIVHGDAAGDPTVVTVSCPNKTCLGCDLCRLVVLFGLNVHKGDMSTDDRWCYIVLGVAASRRAGXDWDVLKERLVELRSHRRWSRPASAPPSRPTPRRGKFRLIRANDDADWFWMLSPSALVKLDCFTGLTVEKKNYVQEPSLVDMHEGGGNCLPTQGGCLS

SEQ ID NO: 210289 - protein, 61 aa, Zea mays
  Clone ID: MRT4577_123380C.1.pep
PVSRELTSHQAITISRVIYTHPCGKDCEAWLKWMVHVLARSRARHGDYESYNVLLRLTMHS

SEQ ID NO: 210290 - protein, 647 aa, Zea mays
  Clone ID: MRT4577_123381C.1.pep
MERYFTRTSQTTQPAETQAQDEGESSHVLNLDDIANDPALRKQIHEYAPEIRDQARRAYIAKGPHQPIIKFPRRQFGVVTRAFSQSWYEKFNWIEYSESQDAAYCFYCFLFKQPGRADQFGSEVFTRTGFTNWKHTYKSLPEHVGVVNSIHNNCLKHCDDFNNQRQSVARKFCIASQEAEELYKIRLTSSLECSRYLLAQGLAFRGHDESSTSLNKGNFREMIDWWKDKDGTYISLIVNTTSASCKRRDALIEAHHQSILEKLESDQMWNSVIEVLGMVETDGRAPSQAGGLIEKMESFKFAFILKLMLRLLGITNELSHILQRKDINIIHAMELVSDVKDQLITMRESGWENLFDEVKQFCNEKSIPVPNMVDEIPVKVYKLIELSIILPVSKASVERAFSAMKIIKNKLRNRISDEWFNHLMVPQLSLKDSVHAVAKRCSVQQYITLTVYSSLDYTCTVQQADDRCTQKHAAFMDNLEVRGKRYLGAAALSAASLKPVVPPSMSVNNLFVTVFAGEDLVLERKVPFHRLTWEQAGLVVGKGLIDNVLSDYLWAKAILLTTTTVATAGLTIQVPIAAIVDTLTGHAPHLLDYVGAAAVLVGFAGINIPAGESPQDVQQEQETPIVSMVDDDPVHLPSSTNATDVVS

SEQ ID NO: 210291 - protein, 60 aa, Zea mays
  unsure (1)..(60): unsure at all Xaa locations
  Clone ID: MRT4577_123382C.1.pep
QADHIDPCQQCTGIHPRQVVYTIDTDRVRRLIRLKPPVKXPFACKAYVGVDVMQMQMGLD

SEQ ID NO: 210292 - protein, 95 aa, Zea mays
  Clone ID: MRT4577_123383C.1.pep
RPKKKKKKKKKKKKKKKEKKKIKKKKKTNKKHAKKKKKKIKKKKKKKTGRAVLKVQRSGNPLRATQFIFFWGTQNFCQWPYFQKGPNGKTFPTPN

SEQ ID NO: 210293 - protein, 49 aa, Zea mays
  Clone ID: MRT4577_123384C.1.pep
VSKMYHVIHGIIIIPCLSCGPRALLENQKLSSQSCADAVLTLESSLNTK

SEQ ID NO: 210294 - protein, 122 aa, Zea mays
  unsure (1)..(122): unsure at all Xaa locations
  Clone ID: MRT4577_123385C.1.pep
QQRKVSGENQDPSNRIYHKEKHXTSEYPGLVMASAAYSTXNNGSCIKPKGTRLERGIRDLQKIAAEYRPPTIDINEVDPNGQAAVKRRLPPEVKQKVARLSANQGKIQEHELMNRLMGIVGH

SEQ ID NO: 210295 - protein, 67 aa, Zea mays
  Clone ID: MRT4577_123386C.1.pep
ALGVSENLEEQSLIQILSASLGPWQVPCPPGWELIGWWGRRTEGNSLLDRSGWLLGQDSDAATQSFR

SEQ ID NO: 210296 - protein, 122 aa, Zea mays
  unsure (1)..(122): unsure at all Xaa locations
  Clone ID: MRT4577_123387C.1.pep
EQRKVSGENQDPSNRIYHKEKHXTSEYPGLVMASAAYSTQTMXGFIVAQESLKYISTFSIVSAPVVGRAGSCIKPKGTRLERGIRDLQKIAAEXANQGKIQEHELMNRLMSIVGHLVQRRTL

SEQ ID NO: 210297 - protein, 52 aa, Zea mays
  Clone ID: MRT4577_123388C.1.pep
KTNKLRAFFPKINRSSAGSISKIMRGGEYYPYYNIIEPNQVGIGSFFHENCH

SEQ ID NO: 210298 - protein, 618 aa, Zea mays
  Clone ID: MRT4577_123389C.1.pep
MARRHGWQLPAHTLQVVAITVYSVLCIAFYAFFSPFLGKDLYQYIAVGIYSFLALSVLILYVRCTAIDPADSGILISMDDILIYKSEAHVDTQDEAGKPGLRNDEDIRKHKSCFGRVCFCCAIFTTGDCRGGDEANHQEDYGEEALFCTLCNAEVRMLGPNRSKHCRSCDKCVDGFDHHCRWLNNCVGRKNYITFLCLMAVSLAWLAAECGVGIAVFVRCFTDKTVIEDQIGEKLGYGLSRAPFATIVALATALSMLASVPLGELFFFHMILIRKGITTYEYVVAMRAQSEPPGPSVNDDQQSLASSPMSSAPTAFSGSSFARHYKGAWCTPPRIFIDQDEIIPHLEPGRVPSTVDPDTTDPMERTKTHPKRPVRISAWKLAKLDSNEAMKAAAKARASSSVLKPINTRNQYEADSDSLSSRNSVISADTGHHRYPRSCGNSQYKPSYPPSRASADDIELYPQTPSSFQSNSRTSTPIAEHHPSKHFNPIYQTSANRSPFSAKASVSEAPVSEITNAGRSYPPPQADRSSRSSVYWDQEAGRFVSAQANQGSSSRPAYPDLLYTGQNIFFGGPLIADPAARSFRDPGGSSQRSAGPRSHQLPVFVPSDPQKDQLSRLP

SEQ ID NO: 210299 - protein, 87 aa, Zea mays
  Clone ID: MRT4577_12338C.1.pep
KKLVVNKRTKQKKKPPQNEKPTQKKKKGEHRKKKRDKTQKPGKNQKKKRGKKKKETQKKRRGRLKETPKTKGKPNRTKARGWQERAV

SEQ ID NO: 210300 - protein, 94 aa, Zea mays
  unsure (1)..(94): unsure at all Xaa locations
  Clone ID: MRT4577_123390C.1.pep
XADRSSRSSVYWDQEAGRFVSAQANQGSSSRPGYPDLLYTGQNIFFGGPLIADPAARSFRDPGGSSQRSAGPRSHQLPVFVPSDPQKDQLSRLP

SEQ ID NO: 210301 - protein, 44 aa, Zea mays
  Clone ID: MRT4577_123391C.1.pep
KVITFNLEQYFFGFSSIVYSCYCSHRHCHPWRCVTHYYSFIAAK

SEQ ID NO: 210302 - protein, 125 aa, Zea mays
  Clone ID: MRT4577_123392C.1.pep
PAVPSFRVVDTQDEAGKPGLRNDEDIRKHKSCFGRVCFCCAIFTTGDCRGGDEANHQEDYGEEALFCTLCNAEVRKHSKHCRSCDKCVDGFDHHCRWLNNCVGRKNYITFLCLMAVVLKQALKEL

SEQ ID NO: 210303 - protein, 52 aa, Zea mays
  Clone ID: MRT4577_123393C.1.pep
PPCQRTFRWGRGSVLRGPNRHLKHHDKNMISWGYCQSRAIVRTYESGLYIGS

SEQ ID NO: 210304 - protein, 117 aa, Zea mays
  unsure (1)..(117): unsure at all Xaa locations
  Clone ID: MRT4577_123394C.1.pep
KEPANRSXSPNDVFEFNSKFTDRMRRIKIPLPPVDEKKKVVEDVDKDRRYAIDASIVRIMKSRKVMGHQQLVAECVEQLSRMFKPDFKAIKKRIEDLITRDYLERDKDNANTYKYLA

SEQ ID NO: 210305 - protein, 155 aa, Zea mays
  unsure (1)..(155): unsure at all Xaa locations
  Clone ID: MRT4577_123395C.1.pep
MVKVAAVLGQQDGVKGTIXFFTQQGDGPTTDTGSVSALKPGLHGLHVHAVGDTTNGCMSIEPHYNPAIKEHGAPXNENRHASDLANVTPAPHGGAYITVSDSXIPLTDPKSIIGTSVVDHADPYDPXNRVHXFRKNTVNAVDRAACEIIGLQGLN

SEQ ID NO: 210306 - protein, 172 aa, Zea mays
  unsure (1)..(172): unsure at all Xaa locations
  Clone ID: MRT4577_123396C.1.pep
AIELIVTXYQAALLLLFNGSDRLSYSEIVTQLNLSDDDVVRLLHSLSCAKYKILNKEPASRSISPNDVFEFNSKFTDRMRRIKVPLPPVDEKKKVVEDVDKDRRYAIDASIVRIMKSRKVMGHQQLVAECVEQLSRMFKPDFKAIKKRIEDLITRDYLERDKDNANTYKYLA

SEQ ID NO: 210307 - protein, 271 aa, Zea mays
  unsure (1)..(271): unsure at all Xaa locations
  Clone ID: MRT4577_123398C.1.pep
MEPMIRPRCCSRWTRCAWRRGRRTRRCARGRASTAPPARADPSSPSPPQPLASAAGCAGGGSRRRRQRRRRRRRARRAGWAWARRWRRPXRASAVRRFMRHARXPRRRTRPGTPTAGAGSRRFPAAARRRAGTARAPAAAGAPTSTARTPSRRRWRRRRGRRARRGSASRAPRSPRRGPRSPPRTRWCGSPAPRRTAAAHAPSPATRRCSPSGRLRRRERGCSACWRLEMRLTGSGATTTDETWAAARQAEAEPGRPRGTHFFFFFFFFFF

SEQ ID NO: 210308 - protein, 406 aa, Zea mays
  Clone ID: MRT4577_123399C.1.pep
MKAARGRRWESRTSTPPSIPPTTKLAAYQTRQLRARSATVMPREGDGGIAAGQIRLLARERKEGRSGGNAGRAATSAPPPIPPPTNPVLEPAPLQARPIPYSATGFTALPSAPAIKRMDTGDPSNPSPLSSDPPIHSRSCISQREFRIFALRFSPSADASELCYEQLELEGIQRISARRKEQEQVRREATEDLAEDLSEGEKGDTIGELAPVETTKKKFQRNFSDLTVWSDDNKEKKLYIVLISWYMPEEIPKGSKIEAISYRDNVQRFDTLLQQGSTYTLYGVAFYFLPYPKHLMPFHEVLQQPHKRFIDVIEIVIHLAPLEHIGGRPYREAILMDSRRVIFYSNNTSFIYRWDIIVVGIWPELLQRNALRNSALHDPKSEECFNQQLSREETGLSGNSGTGCVV

SEQ ID NO: 210309 - protein, 98 aa, Zea mays
  unsure (1)..(98): unsure at all Xaa locations
  Clone ID: MRT4577_12339C.1.pep
LPTPPTSLLPDPSIEKILHGSVSHVRLPEFFIFPAYKLPQSKATSSTVSLPIFYLFLGRYXVLLSILDSVKEIGFFHLVNHSVSLYAIHDMYTVFHQF

SEQ ID NO: 210310 - protein, 94 aa, Zea mays
  unsure (1)..(94): unsure at all Xaa locations
  Clone ID: MRT4577_1233C.1.pep
GNQAWYCLVLLEVLCQLAELGYSKPVRAIQPILGYPLINYPEVLLLGVSHINTAYNLIQHEVLSCVFPAVVKNTMHSSLMNYLXHINPYLTLQG

SEQ ID NO: 210311 - protein, 200 aa, Zea mays
  unsure (1)..(200): unsure at all Xaa locations
  Clone ID: MRT4577_123400C.1.pep
LPPPALPPPKPRPSSSLRCQSATSPASSRQSTPAPGPGPGPXAHRSTGSSPEPSGWAASSRRRARRGRCGRAPGCXDPHQRVRGGLRWPRRGYRGARDALPRRAXGPPPPPPPGRGTCCARRRTGCSRGAGRSGPTTRCSREPSTSCSRSRCSRPSPPPXGPRVPHEPPHGARPQGRRQRRAQAQPARRALRRRSRRRRL

SEQ ID NO: 210312 - protein, 92 aa, Zea mays
  unsure (1)..(92): unsure at all Xaa locations
  Clone ID: MRT4577_123401C.1.pep
VFDQLTDDSQKRYKESLIFEEVYIIVLCVYNDINNYLPGPHHYPLSKENLMAMMXEYYVNLDGLLYQKEFAEFIPKLTEVSLCSINEKLLIT

SEQ ID NO: 210313 - protein, 62 aa, Zea mays
  Clone ID: MRT4577_123402C.1.pep
RFCEAVQDYESLLSDIAVRALAESFPVRANGIIKARQGFASLHVIRVCIENAPGLGNCPRRW

SEQ ID NO: 210314 - protein, 422 aa, Zea mays
  Clone ID: MRT4577_123403C.1.pep
MGAKRAVLVGINYQGTKAELKGCHNDVARMRRCLVDRFGFDESGIRVLIDDGSAPQPTGANIRRELARLVGDARPGDLLFFHYSGHGIRLPAETGKDDDTGYDECIVPCDMNLITDQDFTELAQKVPSGCLFTIVSDSCHSGGLLDKTKEQIGHSTKQKQKQTQTQTQSRELEERSPSGTSFREFLKGTVREAFESQGIHLPHRSRSHQQGSGHGDDGDQESRYINTADAHVKNRSLPLSTLIEMLKEKTGKDDIDVGSIRLTLFNLFKDDASPKIKKFMKVMLNKLQQGQHGGIVGFMGALAQEVLKAKLDGKEEEEFDPAMKQHVHSDQEVYAGTTARVPSNGVLISGCQTDQTSADATTPKGVSYGALSNAIQAILAERGTVTNKELVLKARKMLSKQGYTQQPGLYCSDENASAAFIC

SEQ ID NO: 210315 - protein, 108 aa, Zea mays
  Clone ID: MRT4577_123404C.1.pep
RGVQSKIFFFSMWLPVKVSSRISPPPPLQKKAINWVTLDPTWFTNRFLDPPSFENVVATFKFKAMLKKGGFSLTQMFRDFLNNKLWQYVCIFNLKFKFGAVSMLLGGG

SEQ ID NO: 210316 - protein, 96 aa, Zea mays
  unsure (1)..(96): unsure at all Xaa locations
  Clone ID: MRT4577_123405C.1.pep
MGRTYIVEETVGQYLSNINLQGKAFVSGLLIGQCSSQKDYVILATRTPPKEEQNESPTHSKAKLDNLDEEWATEHAHQVSRXMLPRGLLVLGVFII

SEQ ID NO: 210317 - protein, 99 aa, Zea mays
  Clone ID: MRT4577_123406C.1.pep
RNKGSQNADFFFLDAPFSAVDAPPATSLFYVSVKKPPVNLSFYPRLGLLKKSILLAGICHGSFVRQACSFGAPPSCFPPRIRFYSGMLYYVTPVRMERK

SEQ ID NO: 210318 - protein, 69 aa, Zea mays
  Clone ID: MRT4577_123407C.1.pep
DGRIGYKQNGNDDGAEHDGIGWNLPVLAVELEKGKNVEFRGGITLILMIINILGISYMYIFIWIYVIME

SEQ ID NO: 210319 - protein, 118 aa, Zea mays
  unsure (1)..(118): unsure at all Xaa locations
  Clone ID: MRT4577_123408C.1.pep
SASIAKDVSSDLASIVPSEFQDFXDSSATESSKSELLIYLDEANVSMDDKKFNLVNYWKVNSHRFPVVASMAKRFLVVPAGSVSSESTFSCGGRILDDYRSSLKPAIVQSLVCASSWI

SEQ ID NO: 210320 - protein, 162 aa, Zea mays
  Clone ID: MRT4577_123409C.1.pep
PPPPLSPLSLSSSSSPLRVPLVSPAPLSFSSGGAAAWSGDERGAWAAHVYSSSRCRFAVLVVFGLVPWIGVMPSGSWSPELASSFWWSPLEPSALPPWWRPKEGAGSGESPHNKLVGPLDQTSVVILSLPTVAVAELPTRVVSFPDREKGFRCESGGRRWGS

SEQ ID NO: 210321 - protein, 147 aa, Zea mays
  Clone ID: MRT4577_12340C.1.pep
HHVRTCMDLSPLRQPPFFFFFFQAVGGSVLFVVGTISLKVSGFRPPTRIFTILSIQRRLPHINTILNPTIMRQQPIRTQLRKLNPTTQQMEHNIILEPRRSPQHRPTRTIPSMTRHQPTTNSSLINRTRRMRLHRHQAHKSAQRFQA

SEQ ID NO: 210322 - protein, 68 aa, Zea mays
  unsure (1)..(68): unsure at all Xaa locations
  Clone ID: MRT4577_123410C.1.pep
LSXRLVLFFCAVLGRSGFGCCRRPWLVGAFCCRWCACXLGVGPWFVPLCRLPXXFGGGXAXCLVXRCL

SEQ ID NO: 210323 - protein, 124 aa, Zea mays
  unsure (1)..(124): unsure at all Xaa locations
  Clone ID: MRT4577_123411C.1.pep
MATKILSLLAXLLALFASATNAFIIPQCSLAPSSIITQLLPPVTSMGYEHPPVQAYRLQQAIDESVLPQPIFQMQQQHLAHVTLQTISTHQYQQFLPALYHLAMVKPDAYLQQQLLALNPLALA

SEQ ID NO: 210324 - protein, 93 aa, Zea mays
  unsure (1)..(93): unsure at all Xaa locations
  Clone ID: MRT4577_123412C.1.pep
MHGFQVSSDRQLTLSSSLSHSHSHSPSSPSCPSPSGRAAAAPLAAPARPPSPRRRSSPRRHPPPRPRPLLRPPIHRLPHPRPDPPXPSRPPRH

SEQ ID NO: 210325 - protein, 139 aa, Zea mays
  unsure (1)..(139): unsure at all Xaa locations
  Clone ID: MRT4577_123413C.1.pep
VXIKGALLTXGSACFFSHSXMLGSARSAAGPQANLRQSARVRSGRVPRRRLPRVAPEAAVATGRRTTDGPTARAARGALRQRGCACARRGADPGRKELPRRARSRRSVSPLLLTLKLPASQPRTRGSTREFRTGSCRRT

SEQ ID NO: 210326 - protein, 73 aa, Zea mays
  Clone ID: MRT4577_123414C.1.pep
ATETKATRLLHRSVTHATFAYDCVNHACYYDDFSWALGHGTSAWSRGLGWLSALSRWSEIDLHLNFLGGQQSS

SEQ ID NO: 210327 - protein, 60 aa, Zea mays
  Clone ID: MRT4577_123415C.1.pep
WATPVRLISVVNALYSCSVGGSRHAVCNGCRNACKATGFVTSLHQHEIAVHVVRVGARVT

SEQ ID NO: 210328 - protein, 54 aa, Zea mays
  Clone ID: MRT4577_123416C.1.pep
RSFSDDDRGVPEIRKDISGGAKSKDYVHVHIHQLNGRNSLTTVQGLKKEYSYNK

SEQ ID NO: 210329 - protein, 65 aa, Zea mays
  Clone ID: MRT4577_123417C.1.pep
MKQPYAELKPQGDRSMVPTRGAPHSHVSPSTQVTIHSGPTQRNATPNMLSLPRQILHGKPHKNKR

SEQ ID NO: 210330 - protein, 51 aa, Zea mays
  Clone ID: MRT4577_123418C.1.pep
KSLVLNEDFKELNFPASSSVLTTSEIYAAVILLDLYLAKCYMYDKTMRVLA

SEQ ID NO: 210331 - protein, 37 aa, Zea mays
  Clone ID: MRT4577_123419C.1.pep
CHLSDVCKSLVHLYEVLTSFQNTSCFISWFLSLYSNI

SEQ ID NO: 210332 - protein, 261 aa, Zea mays
  unsure (1)..(261): unsure at all Xaa locations
  Clone ID: MRT4577_12341C.1.pep
MWQSKPVLLLLLLAVTTAATSGKPLLTKITKGAASTALYTAPLSAGRPLVLDLSAPAITTPCSGQTTTVTLSANSTDGSNPLSPVSFAATATCAAAPSGAVGVAGLARSSASFPAQVASTQKVANSFALCLPSDGRTGFSGNGVGAAIFGGGPFFLAPPADRPSITTLLSDGVPLRQPFAGNPGYFVTATNGIAIDXRRVTVSGSGALVVGLSTTIPYAQLRSDVYRPFITAFDRAMGSSAKVAAVKPFELCYDSSKLAPT

SEQ ID NO: 210333 - protein, 92 aa, Zea mays
  unsure (1)..(92): unsure at all Xaa locations
  Clone ID: MRT4577_123420C.1.pep
KKKKKKKKKKKIKKNKKKKKRKDKXKKERKKKKKKKKKKKKKNLKFKKKYGQLFKISKFYTIIFLNVQLFLNGILIKTFCSGFKNGFKKKPF

SEQ ID NO: 210334 - protein, 45 aa, Zea mays
  Clone ID: MRT4577_123421C.1.pep
NSRSLLLIMSLSILFPAVQECYVLPLLFSECEDFTLGLIFPSTQC

SEQ ID NO: 210335 - protein, 74 aa, Zea mays
  Clone ID: MRT4577_123422C.1.pep
EDRMMMTGMHTVSDIFCVGCGSIVGWKYEAAHEKSQRYKEGKFILERYKVSGPDGSQYWIPQDPHLGGSDADDI

SEQ ID NO: 210336 - protein, 181 aa, Zea mays
  unsure (1)..(181): unsure at all Xaa locations
  Clone ID: MRT4577_123423C.1.pep
PANRQGLIFSVKQIEDGRTLADYHLQKERTLHLVVRLRGGMQIFVKTLTGKTITLKVETSDTIDKVKAKIQDKEGIPPDQKRIIFAGKQLEDVRTLADYNIQKESTLHLELHLRGGMKIFEKTLTXKTITLEEESSETXIDNGKDKNQDQGGXIPPDQQGIIFAXGKQLEDGRXTVADYNI

SEQ ID NO: 210337 - protein, 129 aa, Zea mays
  Clone ID: MRT4577_123424C.1.pep
MGRLFLMHLDGNVYSCKHCRTQLGVASDIISKAFHCRHGKAYLFHKVANVTSGVKEDRMMMTGMHTVSDIFCVGCGSIVGWKYEAAHEKSQRYKEGKFILERYKVSGPDGSQYWIPQDPHLGGSDADDI

SEQ ID NO: 210338 - protein, 71 aa, Zea mays
  unsure (1)..(71): unsure at all Xaa locations
  Clone ID: MRT4577_123425C.1.pep
DAFHVGEGAPEIPHPLFYQLKPGGRMVIPVGPSSQALQVVAKNPVGSFRVRKNGVLGXVPFTTRPGQFKGP

SEQ ID NO: 210339 - protein, 192 aa, Zea mays
  Clone ID: MRT4577_123426C.1.pep
MDSFSLLKYLRGGVAAGAQRAPAAASTTIAASACENGDGDGDDDAASFFDLEFAVPGDESAASDAEEERVEFNFAVAPGAADTVAVAVDAPAAEAEAESEADAEAPPPAPLLRPATRFRVLLLKLRKPKAPPADGAGAGSAQAPPRQPAVASRFLVKFRVEDAPLASLFTRDNSSRTSDAGVDRRAPRAAAA

SEQ ID NO: 210340 - protein, 202 aa, Zea mays
  unsure (1)..(202): unsure at all Xaa locations
  Clone ID: MRT4577_123427C.1.pep
PPPGXPGPHPIAPPRGPKKVPPXPPPGPKXPGAKNQPEGEKSGPPXPPGXNHKRPKGGGPEPPQKKGPTPPXPPPRGKGPPRTPRGGGAPPPPRCQPGPANTPGEKVPHPDPQGTGSPTNAPPKTPWPPNXPGGNPPPPGTQEIVKPPETPPPNPPPGKKKKKKTKTKKKKKKKKKKKKKKKKKKKKKKKKKKKKKKKKKTQ

SEQ ID NO: 210341 - protein, 43 aa, Zea mays
  unsure (1)..(43): unsure at all Xaa locations
  Clone ID: MRT4577_123428C.1.pep
VXHHXWKVVPIXXRLLTSKLQSCCFLMQLSFSKLKHSSKYIFP

SEQ ID NO: 210342 - protein, 77 aa, Zea mays
  Clone ID: MRT4577_123429C.1.pep
MAAVSQGAVLFLFLLLVAAEVGTIDAKMGVAMPMHALIMENVKQQQEKEKEKEEKSTEKEESRCLSQSLQFIGLANC

SEQ ID NO: 210343 - protein, 45 aa, Zea mays
  unsure (1)..(45): unsure at all Xaa locations
  Clone ID: MRT4577_12342C.1.pep
AERSRSRVTLWNVLGLTGQPNYDNCFFTLXDEPVDRSNTGEIWRK

SEQ ID NO: 210344 - protein, 96 aa, Zea mays
  Clone ID: MRT4577_123430C.1.pep
MVHAEVGTIDAKMGVAMPMHALIMENVKQQEKEKEKEKEEKSTEKEESRCLSQSLQFEGFCFNSDRCAEVCMKESFPGGECKRDVAMRKCFCKKPC

SEQ ID NO: 210345 - protein, 81 aa, Zea mays
  Clone ID: MRT4577_123431C.1.pep
MGVAMPMHALIMEKAKQQETEKKEEKSTEKEESQCLSPSLQFEGFCFNSDRCAEVCMKESFPGGECKRDVAMRKCFCKKPC

SEQ ID NO: 210346 - protein, 90 aa, Zea mays
  unsure (1)..(90): unsure at all Xaa locations
  Clone ID: MRT4577_123432C.1.pep
FLFFSYLIFLPIYFFFFLLXLTFICIIIFPCYYLSLIFFLXFLFLVFSFVXLNFYFFLFFFLFFYLFFILYLFYFLVFFFVFFSFIFFYI

SEQ ID NO: 210347 - protein, 156 aa, Zea mays
  Clone ID: MRT4577_123433C.1.pep
KWTCSSSSIGIKGTIGYIPPEYGVGGHASTCGDVYSFGIVLLEILTSKRPTDPMFEDGLNIINFVENNFPNQIFQVIDAHLLEECRNSTQGNNLVQENEIYQCLVDLLQLALSCICPLPSERLNMKQVASRMHEIKKHHILGGSTSNNSKGDRSRI

SEQ ID NO: 210348 - protein, 111 aa, Zea mays
  Clone ID: MRT4577_123434C.1.pep
MAAVSQGAVLFLFLLLVAAEVGTIDAKMGVAMPMHALIMENVKQQEKEKEKEKEEKSTEKEESRCLSQSLQFEGFCFNSDRCAEVCMKESFPGGECKRDVAMRKCFCKKPC

SEQ ID NO: 210349 - protein, 107 aa, Zea mays
  Clone ID: MRT4577_123435C.1.pep
MAVSQGAVLFLFLLLVAAEVGTIDAKMGVAMPMHALIMEKAKQQETEKKEEKSTEKEESQCLSPSLQFEGFCFNSDRCAEVCMKESFPGGECKRDVAMRKCFCKKPC

SEQ ID NO: 210350 - protein, 111 aa, Zea mays; identical to SEQ ID NO: 210348
  Clone ID: MRT4577_123436C.1.pep

SEQ ID NO: 210351 - protein, 68 aa, Zea mays
  Clone ID: MRT4577_123437C.1.pep
NSSRRRRRRRRRKARRRKRVDAYRRVSSSRASASTATKCAEVCMKESFPGGECKRDVAMRKCFCKKPC

SEQ ID NO: 210352 - protein, 106 aa, Zea mays
  Clone ID: MRT4577_123438C.1.pep
LVHKLSIQNHIKPNYNTYMTLLDSYSKKGDVRNSEKVFNKLRQSGYTGRIRMYQSLLHAYVRAKAPAYGFRERMKADNIFPNSAVSTLIAATDPFVKKKSISDLLD

SEQ ID NO: 210353 - protein, 44 aa, Zea mays
  Clone ID: MRT4577_123439C.1.pep
DYLLTDVTRGTGTWDHQIDRLLRIQKMLYKMLNDRRYGVPVKPT

SEQ ID NO: 210354 - protein, 76 aa, Zea mays
  Clone ID: MRT4577_12343C.1.pep
FVSAGKKIAAAFHYGASPLRGAFIANHHLVRHGRGVTPPITPQAPGALAPPGHWRGVTPPITPQPPGSTCTPAALA

SEQ ID NO: 210355 - protein, 156 aa, Zea mays
  unsure (1)..(156): unsure at all Xaa locations
  Clone ID: MRT4577_123440C.1.pep
MEKKYTTIRAQXSESDENARRKLRRLMAKKSCTSLMVGFGGNXQGPSHAASXTLAPPXLCQRPAELRHRGYAXVNICVQILQENKDDLATLAYGDFXQLGAREAAEMSDDPAMRFHPQXQYRAPAPQEGRQCDRRQESGHLDATTMASSAPRMIRK

SEQ ID NO: 210356 - protein, 247 aa, Zea mays
  Clone ID: MRT4577_123441C.1.pep
WVPRGRPGIRGLLKLPANKRCINCNNLGPQYVCTNFWTFVCTNCSGSHREFTHRVTSVSMAKFTAQEVAALQEGGNERAREVFFKEWDPQRNGYPDSSNADKLRNFIKHVYVERRYTGERSTDRPPRAKDDKDEYSENRRSDGNWGGSRSPPNGSYSDRQIYSGRSDDRNSRYSYGDRSPGYDQNDYKRSPRYFEVGDNRSGKRTPIQGFEDRRFSEPRKRDSGSPDFQKEADGSKSCCTASEGYIG

SEQ ID NO: 210357 - protein, 80 aa, Zea mays
  Clone ID: MRT4577_123442C.1.pep
STFSSTTLYTASDTQCRPRLNTSQSLELAFILPEKLKKRMMRPSSFSSRLDFNILPLPPFGFLFLARSLCAYRVQFKCVS

SEQ ID NO: 210358 - protein, 68 aa, Zea mays
  unsure (1)..(68): unsure at all Xaa locations
  Clone ID: MRT4577_123443C.1.pep
CQWPSDLTNDDEALALYFDKLNDKNHDVIEELKNXXKHVGTWGDXVPRQELCPEKQMLYSPYLPKVIG

SEQ ID NO: 210359 - protein, 83 aa, Zea mays
  Clone ID: MRT4577_123444C.1.pep
DSETGLSRGVRAGRPGGRWRGLVLHLTPHVHRPPLSRDPAGCCRGVPLPHRAPTLQLRRSPPRPQLQRTSVTLLRWPRPHAVR

SEQ ID NO: 210360 - protein, 106 aa, Zea mays
  Clone ID: MRT4577_123445C.1.pep
ITDPLYSKGSLRTTTRERPHQGHNSKTGLRNKKTGPGVQKKHNPRSSMDIKSRESLCKRSRTCMPKDMVGVKRGGKKTGPDGDKYEGYRLGANHHIYTGEEQSICK

SEQ ID NO: 210361 - protein, 70 aa, Zea mays
  Clone ID: MRT4577_123446C.1.pep
VLLTRDYKLSGSSDVTSWPLLARSSIRPDHHVPRCSLPTYLYFDYVYSFCLPLADLISCRIDLSPALVLI

SEQ ID NO: 210362 - protein, 97 aa, Zea mays
  Clone ID: MRT4577_123447C.1.pep
MVLPMGVFVGSSIQIGLLLTPVMVILGWIMDKDMFFFFTLFETVCLFVSGFIVNFFVLDGRSNFFEGVLLCGVYIIIAVVAFFYPNKDKASEWGGGT

SEQ ID NO: 210363 - protein, 65 aa, Zea mays
  Clone ID: MRT4577_123448C.1.pep
NCWFPPGTCWRTGGSKFQPIDTQKKLLDLMEPTSLVTGHVLKEPGWAILARFIGPNPVFGLAEPA

SEQ ID NO: 210364 - protein, 109 aa, Zea mays
  Clone ID: MRT4577_123449C.1.pep
MGERLDTLSLADAVELVCVLRRVEDGTASDCKWAGLDEGVARAARGLRERAEDVVLRRTVEERRLVRRDAAGSASARTILPIRAAAGDGGAVRFGSTRWAGTVSAPRRR

SEQ ID NO: 210365 - protein, 46 aa, Zea mays
  Clone ID: MRT4577_12344C.1.pep
VHNALASQLMQHPAASAHRNSCIKSSMPNTIITSSPIKPRTLFERN

SEQ ID NO: 210366 - protein, 67 aa, Zea mays
  Clone ID: MRT4577_123450C.1.pep
TTRQVSSITATNDALMLMKNRPLQTVNITVTMDCYGCQRHVKSGVNSMHGVPSVTVNTSQSTCTVNG

SEQ ID NO: 210367 - protein, 70 aa, Zea mays
  Clone ID: MRT4577_123451C.1.pep
RFFFTLWNCRKGTKTYQFWGKGQPKNDILWSPFSSGLTVSFSPNNKLCKLLTLLLRAASHSFYSEHAVRA

SEQ ID NO: 210368 - protein, 120 aa, Zea mays
  Clone ID: MRT4577_123452C.1.pep
HFFFVWIFCFYLFISFFFLFFFKTKGDDLFHTQKGGGGNRLTERKGTHPQKKKLVGTGGGMGDRAIDTGPQHNFHPPHTFFYPRNFKTAPDKCPRKNFLITHRVVFHTHPRMGAPVTGAY

SEQ ID NO: 210369 - protein, 73 aa, Zea mays
  Clone ID: MRT4577_123453C.1.pep
APLKIDNPSYEGSTEMKMRGLTAKNFNAHTYSGRWPRGKLRETEICWTGTRRLAHVLKHCNNLKHQTHWRGYL

SEQ ID NO: 210370 - protein, 50 aa, Zea mays
  Clone ID: MRT4577_123454C.1.pep
RDFFEPLCFRNPIPLFSGWVYKLGEGAISLKHISIGEHFLLFSLNGYHYA

SEQ ID NO: 210371 - protein, 81 aa, Zea mays
  Clone ID: MRT4577_123455C.1.pep
GQGHVLAVAVAVEAGVAEPAARPGSQEPPWPRACDLTGSDANHATYRLLPSQLAVWLSLLCLCMSAMWLQLDMDESNEPHI

SEQ ID NO: 210372 - protein, 49 aa, Zea mays
  Clone ID: MRT4577_123456C.1.pep
LVTLILTVKLDAHIYTWMLTREIKKDYGNHAHLIDNTYRLLLTLIQDVW

SEQ ID NO: 210373 - protein, 176 aa, Zea mays
  Clone ID: MRT4577_123457C.1.pep
YQFCRPAYKEGLLPPHDVEIAKGKQEILNEVLPPKNRSFRFGGAMDFPNKWPCYESKPFYGQGFAFKGIPNFKNPCFRSAVFQGLFMLGKLLKRILPSPWLALQGGSRTGIAPQGNSPQFFCFIHKQFSVKLVKPPIGPSLFYVYITSGLPKKKKKKKKKKKKKKKKKRKKKNSRR

SEQ ID NO: 210374 - protein, 73 aa, Zea mays
  Clone ID: MRT4577_123458C.1.pep
APSAQAAVVLRALCACGAVNPRTSLSSFIVNCSMVSRIMVMLLAVVKHGAYLLTCRSAKRPATGGPARQKTGR

SEQ ID NO: 210375 - protein, 80 aa, Zea mays
  Clone ID: MRT4577_123459C.1.pep
AGGPTISCYHIFPTNNQPALFIALTHHPVSFTILAYTNNFHIYNYHFIYGPLLTQINHLVPAYPYITAANAHYYIIINNS

SEQ ID NO: 210376 - protein, 106 aa, Zea mays
  unsure (1)..(106): unsure at all Xaa locations
  Clone ID: MRT4577_12345C.1.pep
TVRLRSQHIYPRKSAPSRYKLEHYAIIKFPMTSESAVXKIEDSNTLVFIVDVKANEHQIKQAVKKLYDIDVAKVNTLIRPDGEKKAYVRLAPDSDALDVAYKIGIV

SEQ ID NO: 210377 - protein, 135 aa, Zea mays
  Clone ID: MRT4577_123460C.1.pep
TPTSGCPRSSVQGLDQGGHLYDRLLMSGVERPKPKPEHLEEITSIYASLGPGSSEQALAAYVLTYASSTSTRTPSSWAPSRSRTRTWRSCCSLGRSGRYGTTPMASSMSSSNATSLQTRCTHQVQTCADMVANDR

SEQ ID NO: 210378 - protein, 49 aa, Zea mays
  Clone ID: MRT4577_123461C.1.pep
KLGIRLEQNMKTCGPYNNLLLTSGGAPKPMAGVPPLKPMQPESSLTRMG

SEQ ID NO: 210379 - protein, 67 aa, Zea mays
  unsure (1)..(67): unsure at all Xaa locations
  Clone ID: MRT4577_123462C.1.pep
LGIRVPAFKVGNGRTHAGINLAMHEFRTXPVGATAFVEALRMGRELYDVLKSINKSKYGHGASSCRT

SEQ ID NO: 210380 - protein, 179 aa, Zea mays
  unsure (1)..(179): unsure at all Xaa locations
  Clone ID: MRT4577_123463C.1.pep
HPLGTLLGLIVLQQRRHGAHTKWAAVVVLLCGWEDAAETGSGWPADARRARRGGPQQTSWLLGMTPPSRVYGRLLGDLGXDPCGLXYDTESLRTNIXQTELLHCPGSMTGTAGMYMPDILTKDQLXLNTPLWYNVRKQHYLTDTTTLLIIXLILIGWAEGSRCADMIXKPGSVNSHPYL

SEQ ID NO: 210381 - protein, 80 aa, Zea mays
  Clone ID: MRT4577_123464C.1.pep
RQLITNFPPSPWVAVLPIPLITPLNGKEFFLGKKVFFNFFKKKKKKKKKKKKKKKKNQKKKKKKKKKKKKKSLTCPGGRS

SEQ ID NO: 210382 - protein, 65 aa, Zea mays
  Clone ID: MRT4577_123465C.1.pep
CSTAGPPIAHKKALSLALLEYRGPTTKYVRAHGLATPRIWKVLMISQSAWCTREDGRRTAWRRTR

SEQ ID NO: 210383 - protein, 172 aa, Zea mays
  Clone ID: MRT4577_123466C.1.pep
VLQVIQMQRQKITDARSTLQEVSSRRTSIQQEMDSFKQKLSFIDKRGPELEAEKKVAAAARNFKEAGRIAAEAKALNSEKNELRGKLEKAAADLEIIEKDIAATTDKIQECEGLIVLKEKDSALTSYKRLRLDCAAARAELTAATEIHDNEEVEILCKEAETADSKAMEQTC

SEQ ID NO: 210384 - protein, 143 aa, Zea mays
  unsure (1)..(143): unsure at all Xaa locations
  Clone ID: MRT4577_123467C.1.pep
MVKSYGLDLRFKFDLYSLAGKESASVYTSWYLNDVDYYGGFEQDELDELFEAMQSNYKAWCLGFAPLCVGGDMESVAVQEFSRTLFNIRPDIAINVAQTIFQSDVRSLLPXVSVPCHIVQSTKSXAVPVVXVSEYLHRHLWWR

SEQ ID NO: 210385 - protein, 271 aa, Zea mays
  Clone ID: MRT4577_123468C.1.pep
MGIVEEAHNLRVVGEGKRGVIVLAHGFGTDQSVWKHLVPHLVADYRVVLFDTMGAGPTNPDYFDFSRYATLEGYALDLLAILQELGVRSCIYVGHSVSAVIGALASISRPDLFTKLVLLSASPRYLNDVDYYGGFEQDELDELFEAMRSNYKAWCSGFAPLCVGGDMESVAVQEFSRTLFNIRPDIALSVAQTIFQSDVRSLLPHVSVPCHIVQSTKDLAVPVVVSEYLHRHLGGDSIVEVMPSEGHLPQLSSPDIVTPVLLRHIQHDIAV

SEQ ID NO: 210386 - protein, 271 aa, Zea mays
  Clone ID: MRT4577_123469C.1.pep
MGIVEEAHNLRVVGEGKRGVIVLAHGFGTDQSVWKHLVPHLVADYRVVLFDTMGAGPTNPDYFDFSRYATLEGYALDLLAILQELGVQSCIYVGHSVSAIIGALASISRPDLFTKLVLLSASPRYLNDVDYYGGFEQDELDELFEAMQSNYKAWCLGFAPLCVGGDMESVAVQEFSRTLFNIRPDIALNVAQTIFQSDVRSLLPHVSVPCHIVQSTKDLAVPVVVSEYLHRHLGGDSIVEVMPSEGHLPQLSSPDIVTPVLLRHIQHDIAV

SEQ ID NO: 210387 - protein, 59 aa, Zea mays
  Clone ID: MRT4577_12346C.1.pep
QLVLMVTVGWLTLRQNVKSFVILWAHIMLPEVCTINIRLNCEINGHAARVHHVPEGLKK

SEQ ID NO: 210388 - protein, 73 aa, Zea mays
  Clone ID: MRT4577_123470C.1.pep
TLFIPTWCSHWKLDQVLLWIITMKLTMTSTSSSLMFINTIKTSIHVDDESSSDMYTAQSQDSRSIVTKAVDIE

SEQ ID NO: 210389 - protein, 135 aa, Zea mays
  Clone ID: MRT4577_123471C.1.pep
MGIVEEAHNLRVVGEGKRGVIVLAHGFGTDQSVWKHLVPHLVADYRVVLFDTMGAGPTNPDYFDFSRYATLEGYALDLLAILQELGVRSCIYVGHSVSAVIGALASISRPDLFTKLVLLSASPRNLNDVDYYGGN

SEQ ID NO: 210390 - protein, 72 aa, Zea mays
  Clone ID: MRT4577_123472C.1.pep
GGVGFFLGGEEGSQSCGWGRVVGLSRTARGADSSFPDLNKVKRVLAGLFRTVGLTGLGLSRRISEPRDASET

SEQ ID NO: 210391 - protein, 619 aa, Zea mays
  Clone ID: MRT4577_123474C.1.pep
MLYAHLHLRRPCSPFAYCPYSKLSVSIPTLNPLPRGPLSRRACACAHRYLRHVASPADEEEAGYGEGSVEGDDLGPASAAAVAATIRRASSASPVRFRCVLGEAVEEPRGEEGLADPSPDFRRLCAEQLEIFRVLISRDAVLSVYVRPAGSYIMDQLELRRVALYPGINNLSEKDTPVLVCNFSISSGLRAAEAFLVKQQMEVIREFGAIVLPMVKHPFVVGFLVVELPELHGGRAMNSYTADTELPPNTFMDKSSDVTPHTAWDIQTYGDQAKGYSQLVNEWKNSALMISRTLAMAYVMDQKAYLLQQTSWQNNVRMSGLVEQIWGPLSSIRALAKMLSFHTKRSEIPYDIIEDMLTQGDHMKDALQQIQDAVYLTKANIVRSNEETLKTIQRSPHPSRTLSDYKSVPGNDSQKLDPVLALSSDGYDMVMPMPPLWLAPLQHQYDRPCDLCDVLKDLVAGALPLAYKQQRTLDLTEISHPLHVAVEESALRKALSNLIEGALLRTQHGGVVQICAVEAPAGGALVVIDDDGPDMQYMTQMRSLAPFGSDLADGMLEDNMTWNFIAGLTVARELLEEYGCVLRVISPRRTDAVIGTGGSRVEIWLPSFQTQAAKTSQEV

SEQ ID NO: 210392 - protein, 100 aa, Zea mays
  Clone ID: MRT4577_123475C.1.pep
MAGNGAIVESDPLNWGAAAAELAGSHLDEVKRMGSQGRHPVPNIQGSTLRVGQVASVASAKDASGVVAEPDEDARSRPTASRERILFCIAQGGDMYGVTT

SEQ ID NO: 210393 - protein, 222 aa, Zea mays
  Clone ID: MRT4577_123476C.1.pep
MKMSASVAAASPTLRFSSATHPLHRPLRRRLPSVRCSLAAAAAGPGVRAPPELVDSILSKVKGTDRGVLLPKDGHQEVAEVALQLGKYCIDDPVKSPLIFGEWEVVYCSVPTSPGGLYRTPLGRLVFKTDEMVQAVEAPDVVRNKVSFSVFGLEGAVSLKGKLNVLDSKWIQVVFEAPELKVGSLGFQYGGESEVKLEITYVDEKIRLGRGSRGSLFVFLRR

SEQ ID NO: 210394 - protein, 26 aa, Zea mays
  Clone ID: MRT4577_123477C.1.pep
SGFVFSLGQQYSCSRLKDNRVRSMAY

SEQ ID NO: 210395 - protein, 82 aa, Zea mays
  Clone ID: MRT4577_123478C.1.pep
IVVHSVSLHPKGVDLYSTRCMTDRQTRYDLIHVLPAWRQLNRRVRFDSCACRMAPIETHSKVPFVSFYFEEKQSYYCNSPFF

SEQ ID NO: 210396 - protein, 51 aa, Zea mays
  Clone ID: MRT4577_123479C.1.pep
KWSIGTKSLNGGLGFNGHVYSLPFNLLNLFESQILLQKSKNEKIYKVDKCI

SEQ ID NO: 210397 - protein, 54 aa, Zea mays
  Clone ID: MRT4577_12347C.1.pep
EYQQFLPLSHQFVANSAIFLQVRLMLAFVRLALADPSASFRHGIIGGGLFLIAY

SEQ ID NO: 210398 - protein, 141 aa, Zea mays
  Clone ID: MRT4577_123480C.1.pep
LAQLCCRALPSWPLRTCLCSAPSLFAADAGRRAAQAALSTQSRSLAGSSLFVVIARSRDKLTACRVSHILAPRRRVIRLRTMCDNIVVRRVLSKYFRLAARTSPLSWSSMPRNHPHVVVLTGTASHHHIVFTIRSVIIGIS

SEQ ID NO: 210399 - protein, 89 aa, Zea mays
  Clone ID: MRT4577_123481C.1.pep
HTRDLSASETATECDDTAQPPEGVRTQDPKKVLLDDAAAPTQMDVTKKSNACRWMAMKEGPPTPGAKTTSSVFKQKPAAKPLATGVEGL

SEQ ID NO: 210400 - protein, 151 aa, Zea mays
  unsure (1)..(151): unsure at all Xaa locations
  Clone ID: MRT4577_123482C.1.pep
MSLIRRSNVFDPFSLDFFDPFEGFPFGSGNSGSGSLVPRTSSDTAAFAGARIDWKETPEAHVFKADVPGLKKEEVKVEVEDGNLLVIXGQHSKEEDKNERWHRVERSSVPFTRRLRLPENARTEQVEAGLENGVLTVTVPKAEVKKPEVKS

SEQ ID NO: 210401 - protein, 184 aa, Zea mays
  unsure (1)..(184): unsure at all Xaa locations
  Clone ID: MRT4577_123483C.1.pep
FSRVYVVALIQVRSILLITSACDTSIYTSPVMALTXHPLGVGLRLALSLLLAELVCVYIPYDCDRLIFDXQRTNGKCSLCDYDLSKIGASYLTTPVQTRXSFFLTTVCGGLIRLFHYASDILSAFFCTVPDLFDLFLXYFYVIFLTILLYDRRTMDDDRSSSENTHHWKMYCNRVLYIFIPALS

SEQ ID NO: 210402 - protein, 65 aa, Zea mays
  Clone ID: MRT4577_123485C.1.pep
PNGPALGAPTPLPWFGPAGNQSPRWLLGILTKRRQVLIRATEVFATLVFKPTPETNGGNKRFFWS

SEQ ID NO: 210403 - protein, 58 aa, Zea mays
  unsure (1)..(58): unsure at all Xaa locations
  Clone ID: MRT4577_123486C.1.pep
FLPXXRSILNXPWPXIKXRXSXWVRQGXRKAWWPGVXPCRSGTMXRARSLVERSPFIQ

SEQ ID NO: 210404 - protein, 81 aa, Zea mays
  Clone ID: MRT4577_123487C.1.pep
VGYMEMLERSRNVQVELVRSREGEVKGLELRLRSLYIKIGCRMRNESLVKTSEADIILVELCMMCKNCRMARWDYKTVPWM

SEQ ID NO: 210405 - protein, 55 aa, Zea mays
  Clone ID: MRT4577_123488C.1.pep
VQEHSAMKENPRVLMSTHMPEAPYLHGSELDLPSRLLETLCSNRNHRGLEKNMSF

SEQ ID NO: 210406 - protein, 87 aa, Zea mays
  Clone ID: MRT4577_123489C.1.pep
RLRARTRGRTRGMRIRTSYTGSPPPPALILNTDSPLKALNLGSSNSGDAPRRFRQKPRHCEKPTQCASSPKSRSASGTHQPSSVRWT

SEQ ID NO: 210407 - protein, 49 aa, Zea mays
  Clone ID: MRT4577_12348C.1.pep
FDQLESLVAIKGFLINACSCFVVCCALGIRLSCWFSFLGTSCFCLGGLF

SEQ ID NO: 210408 - protein, 48 aa, Zea mays
  Clone ID: MRT4577_123490C.1.pep
RAPADELDGGAERVAPERRGIRHCWGLEVLGFEEPVRTWEMDGNPDAW

SEQ ID NO: 210409 - protein, 92 aa, Zea mays
  unsure (1)..(92): unsure at all Xaa locations
  Clone ID: MRT4577_123491C.1.pep
MERPLVAKQWGLLKLVGFCARVVIETMLPQRSHDTVDKLLSPYFLPRASQLRENPIVQTYRIQHARATRLLPLSPXLLQHSSALLHQPPYGH

SEQ ID NO: 210410 - protein, 54 aa, Zea mays
  Clone ID: MRT4577_123492C.1.pep
AQPKPFPRFAKKSGAPTDLGGFGGGREPRGGRHVCSSRVWVGVGTIRLVRTRGR

SEQ ID NO: 210411 - protein, 42 aa, Zea mays
  unsure (1)..(42): unsure at all Xaa locations
  Clone ID: MRT4577_123493C.1.pep
LPIPXGRRFPXSPCGLALSRYLSSKSSSLSKYIAHQTPYSSY

SEQ ID NO: 210412 - protein, 65 aa, Zea mays
  Clone ID: MRT4577_123494C.1.pep
DKSEKKGHLFVAIEVFEVAPSLHMVELGKTGGDPLEFPNFYKNFSSKLKNIVWKVEFYASMKQTK

SEQ ID NO: 210413 - protein, 112 aa, Zea mays
  unsure (1)..(112): unsure at all Xaa locations
  Clone ID: MRT4577_123495C.1.pep
TPKRGPPTLTKPPRPVPRAKGGPPDPKSPGRKTPPPPPNPGGTPPGIGGYSFPSPPSPFPXKAPPPKGGPPPPGVLPPGLHIHFTPKGXTPPNPGPPQPRXPHPPTKLGGPP

SEQ ID NO: 210414 - protein, 44 aa, Zea mays
  Clone ID: MRT4577_123496C.1.pep
LANGASDVRRTMDKAKAILSTQAVRIATKAAQHERFIFEVTHLL

SEQ ID NO: 210415 - protein, 66 aa, Zea mays
  Clone ID: MRT4577_123497C.1.pep
KTLAIFVSLNKFNDTNYVHFRSHESGNWETSVQSWSLKGNILYYYKHTKSQQPWSVGYHDISMVDL

SEQ ID NO: 210416 - protein, 179 aa, Zea mays
  unsure (1)..(179): unsure at all Xaa locations
  Clone ID: MRT4577_123498C.1.pep
LRLLVCARLWNPASRRDLLXFTAHAFEAKEAXRLTRLTSPAAKKEHSPSIGPSQRSLLEGCPXFRLPKPPLGVIICILXPRLPPGYYSISSLPTLATATIHVTCALRYGSTSTGRIHISXCSTLLKHPTRSEDNTDTSCAPILXRQSNFKLTADATVPMIMIGRWTALAPFSGMLQELL

SEQ ID NO: 210417 - protein, 102 aa, Zea mays
  unsure (1)..(102): unsure at all Xaa locations
  Clone ID: MRT4577_123499C.1.pep
MCALRAGKDWTRSGAKRQRRGLRDNIQSITNPSIRTLSRRLEVKRIWALIYXETRSVLKIFLYNVIRYADTYTEHARRMTVTDMDVAYALKRYGRTLYSFCS

SEQ ID NO: 210418 - protein, 140 aa, Zea mays
  unsure (1)..(140): unsure at all Xaa locations
  Clone ID: MRT4577_12349C.1.pep
DNEDHLHLIVHFSTDIIRLAIISGSICLGKEDLVILNSWVQEVFYNFNDSIIAYFILVXVCDSFCARDSAYSPSGWRNYHRFVWCHSSILGWXAPNRANRXIRVCSNPVILVTCFKVWVXYCLIRLSRSLVVLYHSLSRA

SEQ ID NO: 210419 - protein, 106 aa, Zea mays
  Clone ID: MRT4577_1234C.1.pep
KKKGPYSLFFFLILMWAHPPFIQNSNYKNPPPPMGTKNTLTFSKTFNPIEKNLPFFSIRKKTASSGGGDGPKRENLFVIKTFGYFYHKKKSRKFFFPSFLSFYKKS

SEQ ID NO: 210420 - protein, 71 aa, Zea mays
  Clone ID: MRT4577_123500C.1.pep
AHAYGKLLLLTWGYLLLELNTDGEFSRETKGNFMEGILSKIEDIIPLLLMKCTHLIRTQVAVIMLSIDACS

SEQ ID NO: 210421 - protein, 135 aa, Zea mays
  Clone ID: MRT4577_123501C.1.pep
LSPRRQTGDIFRNQGAIQTAKGESHVCRELRPTPRDNSGDQLAPIEEQNIYLARLREHPADSPANANDLDHCTASRSNLTDETDILDAKNEELNARRPSTSTSEHVTICTRCRDVAVNAIHDHTALIKQQSDHIA

SEQ ID NO: 210422 - protein, 150 aa, Zea mays
  Clone ID: MRT4577_123503C.1.pep
MGDGSCCVCKEAPPKYKCPSCRTPYCSVTCFKKHKEESCQKILHQEEISKSALQEEVTLHTTCTAESPNTACPTKALEVEDLSWLVDNNRLRSLAELKGIQDALRDPELQRMILQIDGSSESEKELEKVMEGQAFREFTDKILDIVNPQE

SEQ ID NO: 210423 - protein, 127 aa, Zea mays
  Clone ID: MRT4577_123504C.1.pep
SQLASALCFTTTSQVEELEQEKQELEFIADMYVKESSESRTIADIEESETRARNQAEYLRSNLEEHSLELRVKAANEAEAACQQRLSFAEVELEELRTKVDASERDVVELKEALRIKEAEGDAYISD

SEQ ID NO: 210424 - protein, 55 aa, Zea mays
  Clone ID: MRT4577_123505C.1.pep
DTNLNPTNTHIPLTVINRGFTTKRDKSQCLTIADRHVHAVKDPNQLLTILHDDYE

SEQ ID NO: 210425 - protein, 169 aa, Zea mays
  Clone ID: MRT4577_123506C.1.pep
MGDGSCCVCKEAPPKYKCPSCRTPYCSVTCFKKHKEESCQKILHQEEISKSALQEEVTRLVEDATKCPNDKDHPSLSLHTTCTAESPNTACPTKALEVEDLSWLVDNNRLRSLAELKGIHDALRDPELQRMILQIDGSSEPEKELEKVMEGQAFREFTDKILDIVNPQE

SEQ ID NO: 210426 - protein, 209 aa, Zea mays
  Clone ID: MRT4577_123507C.1.pep
MQGGNHMLLEEPVRLASVLAPAKPKVFPSLTKIVGTLGPNSHSVEVIEECLTAGMSVARFDFSWKDATYHQETLDNLRKAAQNVKKLCPIMLDTVGPEIQVHNSTGGAIELIGGNHVTITPDLSKAPSADILPIKFGDLAKVVKKGDTLFIGQYLFTGSETTSLWLEVTETSGAEVICYVKNTATLSGPHFTLHVSPVHISMPTLSEYD

SEQ ID NO: 210427 - protein, 44 aa, Zea mays
  Clone ID: MRT4577_123509C.1.pep
NSPFLLCPLVVGTTTAVIIQQTNLGGYAPCELQHGILSWSSREP

SEQ ID NO: 210428 - protein, 185 aa, Zea mays
  unsure (1)..(185): unsure at all Xaa locations
  Clone ID: MRT4577_12350C.1.pep
PTRPDGQAVAAQEPAKKAVKVETPSSDKKKVQFTKNLEMGPTGSPRVDEKKEAAKPAAKGPRNVSGVTVDDKREGKGKAAKKGDRVEMRYIGKLMNGKVFDXRXIPTNLSCTDVLPANKKGKPFAFKLGVGQVIKGWDVGVAGMTAGGERRLTIPAGMAYGKKGAPPDIPPNSDLIFDIKCISVN

SEQ ID NO: 210429 - protein, 43 aa, Zea mays
  Clone ID: MRT4577_123510C.1.pep
DPRIRGRVGSPAVKRLISQFHPISHGVFSNALILAPLYPGASK

SEQ ID NO: 210430 - protein, 142 aa, Zea mays
  Clone ID: MRT4577_123511C.1.pep
MGKTRGMGAGRKLKTHRRNQRWADKAYKKSHLGNEWKKPFAGSSHAKGIVLEKIGIEAKQPNSAIRKCARVQLVKNGKKIAAFVPNDGCLNYIEENDEVLIAGFGRKGHAVGDIPGVRFKVVKVSGVSLLALFKEKKEKPRS

SEQ ID NO: 210431 - protein, 105 aa, Zea mays
  Clone ID: MRT4577_123512C.1.pep
KPFAGSSHAKGIVLEKIGIEAKQPNSAIRKCARVQLVKNGKKIAAFVPNDGCLNYIEENDEVLIAGFGRKGHAVGDIPGVRFKVVKVSGVSLLALFKEKKEKPRS

SEQ ID NO: 210432 - protein, 142 aa, Zea mays; identical to SEQ ID NO: 210430
  Clone ID: MRT4577_123513C.1.pep

SEQ ID NO: 210433 - protein, 414 aa, Zea mays
  Clone ID: MRT4577_123514C.1.pep
MDAAALFFSHLLPIVVVAAIAGAAPLDPQQLLALRALGLGAHPRADPCGAAAVVAAVNASCDAGEPFRRVTSLALTNCSDTTSVSAAALEALAPSLRALAFSDCPAAPPRALPPEQLASGLRAFSCTASLHRLSAVWLSHLTNLTELAVADTPLATGSPTELAVVVSHMEHLTRLTVSNANLSGFLPHHWHCPNLTHLDLSGNRITGAIPDTLTLLAGITHINLSSNALDGPIPTSIGDLISLTALDLSNNRLSGGIPDTLSTLPELEVLDLGSNRLNGSIPPFLAEMHGLRELNLENNDFDGMVPFTAKFLSRLRVFRAAGNGKLCYNRSVLPAELAMSVAPCDKYGFPVLPPPATARSERSADYDDGGGDGEADGGADTRGGPSATVLGVAIGLSCLAFLIILLVCICKVCR

SEQ ID NO: 210434 - protein, 86 aa, Zea mays
  Clone ID: MRT4577_123515C.1.pep
VRSVCAGLLVVTSSGETRVLCCKGMLGSDRVVLDADVVVGRRAVCVMVDLYMICYVVFLFFFCLVFLFFLFFFFFFFFFFFFFFFL

SEQ ID NO: 210435 - protein, 158 aa, Zea mays
  unsure (1)..(158): unsure at all Xaa locations
  Clone ID: MRT4577_123516C.1.pep
XDEAEXINYSRSGQLGSAELQGFPTLSGDFFTYADRNQDYWSGYYVSRPFFKAVDRVLEQTLRASEILGSFVLGYCQKFQCAKLPISFSHKLTAARRNLALFQHHDGVTGTAKDHVVVDYGTRMHTSLQDLQLFMSRAIEVLLGDFHDRSDPTLLSHF

SEQ ID NO: 210436 - protein, 75 aa, Zea mays
  Clone ID: MRT4577_123517C.1.pep
MGFSRDSMHKRHATGGKHNAWRKKRKFELGHQSVNTKLSSNKTVRRVRVSGGNMKRRTLKLDTENYYWKSETVTV

SEQ ID NO: 210437 - protein, 71 aa, Zea mays
  Clone ID: MRT4577_123518C.1.pep
GAEGSLGNEDDDDDLINRGYICWFGQTRNKIRKKNESNAPKITTTRGYLSTYGHTSVSFSPSLAGPLTRHY

SEQ ID NO: 210438 - protein, 62 aa, Zea mays
  Clone ID: MRT4577_123519C.1.pep
IILLWNWQKLHFYCPYQQQFASSHAVSVGCGVTVCVHMCICIYHAAGVSFMLLSPGEVTSTI

SEQ ID NO: 210439 - protein, 91 aa, Zea mays
  Clone ID: MRT4577_12351C.1.pep
RTRGFDATLTALLEQEQHHGLDTGDLPQIDGLSEVAYYPTATDEATIGQFNQMGLPTTLAEQMLPMQMNSSASALMALTSDYHEGFTRAVG

SEQ ID NO: 210440 - protein, 44 aa, Zea mays
  Clone ID: MRT4577_123520C.1.pep
VILVSCCYCSSLLMYNSISIPHRFASFWVLKHYSAQQCIIETFG

SEQ ID NO: 210441 - protein, 25 aa, Zea mays
  Clone ID: MRT4577_123521C.1.pep
VTRMLCYCNRSGMKGKLMAEMPIEY

SEQ ID NO: 210442 - protein, 69 aa, Zea mays
  Clone ID: MRT4577_123522C.1.pep
NSDKNLGGGKKICGTPVRPPRPSLPGGFNVMAPLLFFYNECFADRDFCGLVPRHLPFNLGGEQTAIPPP

SEQ ID NO: 210443 - protein, 56 aa, Zea mays
  Clone ID: MRT4577_123523C.1.pep
MVFLVLEEFWEQNGFFIFFSSIPHYVRNLSPLVSVLCAEIFLKFFIPTTLIKHSRP

SEQ ID NO: 210444 - protein, 91 aa, Zea mays
  Clone ID: MRT4577_123524C.1.pep
HGCCGYRRRRPCPSSHAPSAPLASALRPSTRWPRRSAAASPPAAFPPTRSRKPRPPASFVRRRSRSSTAIAPSRQHPRPSVPSTPPLGSPV

SEQ ID NO: 210445 - protein, 137 aa, Zea mays
  Clone ID: MRT4577_123525C.1.pep
KDRPKPIQAAWKNSAARICTACKNTGEKQMEATTRPLGRATAEGESFWLGWGCATRRPAAKTANQAAIPTPGSNHSLALLPPSRFSSELRCTDHALSFHRAKSEDNFRHCHGGAVRQKDERSRGFPCHDSHRRSTSF

SEQ ID NO: 210446 - protein, 171 aa, Zea mays
  Clone ID: MRT4577_123526C.1.pep
LLRVEEGRVTILASTVEGSTIRFADEAIEASDGTVYFSDASTRFGFDRWFHAYVESQPTGRLLKYDPRTGKASVALDNLSFANGVALSRDEAFVIVCETGRFKCTRLWLKGDKTGQAETFVGDLPGSPDNIQLAPDGSFWIALIQRSPWLDLVMRWTFTKRVVASFPALDA

SEQ ID NO: 210447 - protein, 60 aa, Zea mays
  Clone ID: MRT4577_123527C.1.pep
MAHKGKATYNVPYNPKDGPEVYSNPSVYNCLMTICGIQQPSWIAQCIFEPVQPPTLLMFF

SEQ ID NO: 210448 - protein, 122 aa, Zea mays
  Clone ID: MRT4577_123528C.1.pep
TSSVPSGGLIWDLATWENRARSRIPGRRHQLHPGLLAWPASNHHRKKSRRRGRGSCMNSCRRSRGRRGSNHTLGRLAARDKNPPSPTRKRNWAPSNLANRMPNHGDEMSTTHLVLYSLMFLI

SEQ ID NO: 210449 - protein, 82 aa, Zea mays
  unsure (1)..(82): unsure at all Xaa locations
  Clone ID: MRT4577_123529C.1.pep
RDRETEXKGQGTAKMDKSKETTKAEXEXGEXGPQGTEADKQQKAGPRTGKPAEKGTPEEXDRPQKKEETRKTRXNGQDEGDK

SEQ ID NO: 210450 - protein, 348 aa, Zea mays
  Clone ID: MRT4577_12352C.1.pep
HECSETPFATPPSLVPEIQSTPGIFTFNLTWANISSSALKPRISSPVSDYYLVRNPRYANQGNFLKLSDFLAIVMERDLSGAMIIIENAAYIAKSLGIDIVDSVTTALSAAGFDNQTAKEVLIQSKDSDVLVKLKQQKTKCKLVYTLPSGIGDASNSSLKDIKKFADYVAVDSKSVFTLSSDFIIRQNSLVQDLQSAGLALYAEVFQNEFVAQPLDFFGDETVEINYYIQSFNLSGIITDFPKTVRRYKRNTCTVLGKDMPSYMQPPQAGSLAQFLQTFKTQPPSLPPMPTLNSSSVEEPPLPTVALRSVSDGSASGATKTPGTPSDAPTATVNAGMLLVMVFTALLI

SEQ ID NO: 210451 - protein, 81 aa, Zea mays
  Clone ID: MRT4577_123530C.1.pep
PPFFKRVSLRPPERVVGLAPLQQAKRKDFNCPLTAPPLIQKIPSANRCPYLRPLLHARAKNRGGPTPIIFRRCLNFPFAWT

SEQ ID NO: 210452 - protein, 50 aa, Zea mays
  Clone ID: MRT4577_123531C.1.pep
CLVLVLVPHDRESVYATSSVVTWYRQVCYHVGLVGFVHRVLAIPKASQGR

SEQ ID NO: 210453 - protein, 96 aa, Zea mays
  Clone ID: MRT4577_123532C.1.pep
FTQGGRGERGGTDSHPQGLAPRMTRLKSWGCLCPLYPYPPSQPIPRAPPTHCKFPLLGLGLRFLSPRVWRSWRKGLCFAHCCFPCRKDGAGHTVGQ

SEQ ID NO: 210454 - protein, 107 aa, Zea mays
  unsure (1)..(107): unsure at all Xaa locations
  Clone ID: MRT4577_123533C.1.pep
RPPTSPATVPKVNRFQVPLVHQHNQPIVLHKLGAQCHLRSIISEGVTAXNICPSVSSYESAFATRNYMTQSLLPPSMSDSGXINDPLQRTPLCANAPAVYXGHNFMI

SEQ ID NO: 210455 - protein, 59 aa, Zea mays
  Clone ID: MRT4577_123534C.1.pep
ILNKSIIFGGYPAPLHLLPFPCAHIIPLVTTSCCASARFMPRTLSRPSLMRRGIVWIDT

SEQ ID NO: 210456 - protein, 33 aa, Zea mays
  Clone ID: MRT4577_123535C.1.pep
NYNMSMTHLNVLYHTLTTFIYPTTLYPCTTSSD

SEQ ID NO: 210457 - protein, 137 aa, Zea mays
  Clone ID: MRT4577_123536C.1.pep
RPPGFKTPIFSKQSPRNRGQNQTPCPPQQRDQQSHGKTLKKKKGFTPYKTKTKKHRSIQQRQKTGGKKKKPPCNRWFPHPDPPLLKSPAELCPGQGFPEPQPLLLQRFGVRDIIQDPKLLTPKRPGPRASILEGLGG

SEQ ID NO: 210458 - protein, 213 aa, Zea mays
  unsure (1)..(213): unsure at all Xaa locations
  Clone ID: MRT4577_123537C.1.pep
MTTTSRDEIVFLDVETTAPTSXPGRWWLLEFGAILVCPRKLVEVGSYDTLIRPGDLSAVSRRFTDGVEAIASAPPFKDVADKIFGILDGRVWAGHNIQRFDCPRIREAFADIGRPAPEPAGVIDSLNVLAAEFGRRAGDLKMATLATYFGIGKQKHRSLDDARMNLEVLKHCATVLLLESSLPHXPLRQAPVSPSRRRRGHHQEDGGAADASA

SEQ ID NO: 210459 - protein, 170 aa, Zea mays
  Clone ID: MRT4577_123538C.1.pep
GAAAVIIGADPRECEAPFMELHYAVQQFLPGTQNVIEGRLTEEGINFKLGRDLPQKIEENIEEFCKKLMGKAGDESMEFNDMFWAVHPGGPAILNRLETKLKLEKEKLESSRRALVDYGNVSSNTILYVMEYMRDELKKKGDAAQEWGLGLAFGPGITFEGLLIRSLTSS

SEQ ID NO: 210460 - protein, 38 aa, Zea mays
  Clone ID: MRT4577_123539C.1.pep
LLHSVGFTTALPTPGFLVHVPRPPCKGHSARAARFRDP

SEQ ID NO: 210461 - protein, 49 aa, Zea mays
  Clone ID: MRT4577_12353C.1.pep
FIIFLKILLFEGFQQYQSLNELARFETNWNKKKLRVNLGTPLLYRLFNF

SEQ ID NO: 210462 - protein, 50 aa, Zea mays
  Clone ID: MRT4577_123540C.1.pep
LFLPRLVIERIDVSSGYSRDSFIMPYVLARARTPPLCLGRKHFLEFLDNC

SEQ ID NO: 210463 - protein, 84 aa, Zea mays
  unsure (1)..(84): unsure at all Xaa locations
  Clone ID: MRT4577_123541C.1.pep
DKHSLEYGIDSIEMHVGAVQASNRASADHDLSGKKGXTLCAAVKLIERVGAKVVECACVIELAELKALHEQGDMPALCLDETHA

SEQ ID NO: 210464 - protein, 83 aa, Zea mays
  unsure (1)..(83): unsure at all Xaa locations
  Clone ID: MRT4577_123542C.1.pep
FGSRAYKTFLLRSKARSADGDTGQVSWRXTIRLMTDPDILGTRGRGLIKSVQRGRVTEYCSHSCKVPPIIIAPEKKPGEQSVI

SEQ ID NO: 210465 - protein, 348 aa, Zea mays
  Clone ID: MRT4577_123543C.1.pep
MEALRKQASKFKEQVAKQQQAVIKQFSTTGYERSDSIVIDEVELQRHQQLEKLYTSTRSVRDFQKDIVRAAEGLVSIGNKHIEVGTKFSEDCYRYGSENNASDEALRKAASLYGGALRNIEKEYEDFNRILSSQTIDPLRAMAMGGPLEDARGLAQRYSRMRHEAEILSTEIARRKARVREAPIAEHTTKLQQSEARMIEHKASMAVLGKEAAAALAAVESQQQRVTLQRLVGTAEAEKLFHLRLAAILDDVEAEMSSEKQRRESAPPIISSHKRAEKAQYFLAEVMHNFNGTTEKELSLIVGDYVVVRQIAPNGWAEGECRGKAGWFPAAYVERRENIPPNKVFPQV

SEQ ID NO: 210466 - protein, 87 aa, Zea mays
  unsure (1)..(87): unsure at all Xaa locations
  Clone ID: MRT4577_123544C.1.pep
PPVLGGGLPGQXAAPGRRGRGKGVSHFVAKXGATVGGSRPFSPGVGWSPPGGVSVGGPPGLLFWAVPPPGVLGGGAPLVSTPGALPG

SEQ ID NO: 210467 - protein, 47 aa, Zea mays
  unsure (1)..(47): unsure at all Xaa locations
  Clone ID: MRT4577_123545C.1.pep
FSYAGDEXIKXQDMXKERIKXXXRXRGGXHRFXSRSWSAFRWGSPXG

SEQ ID NO: 210468 - protein, 84 aa, Zea mays
  unsure (1)..(84): unsure at all Xaa locations
  Clone ID: MRT4577_123546C.1.pep
XFFFXFFXFFCFCLCFFFFLFFFFFFFFFFGGNTREIKLTPNRNGGVKGKKKFWGGWANGTQWKGIRGKKKNRVPAKNKKYWPD

SEQ ID NO: 210469 - protein, 134 aa, Zea mays
  Clone ID: MRT4577_123547C.1.pep
GLIEPQRGGAHSPGRGKTVRKGIHEGPIRDYRPREKGDLIPRAKQGVPPGVPRRPREQRPAQLLWRGQRKAPNGLPGFQIRCPPHPPPFFFFFFFTIVLFPCLFWFPVVCFFSFLLPSLGSSYFISNCFWFFFL

SEQ ID NO: 210470 - protein, 82 aa, Zea mays
  Clone ID: MRT4577_123548C.1.pep
QVRDRGCSVRRYRYPSVTLCSDIVIGHADISNLLTLDNALPSVCTRANFDMNEGVCALVHQQSISDRQPVVLVIYVGDLFRT

SEQ ID NO: 210471 - protein, 173 aa, Zea mays
  unsure (1)..(173): unsure at all Xaa locations
  Clone ID: MRT4577_123549C.1.pep
MRVXLVALDHLGIATNANCTHTKTRGCGXHPPTAGNIPXGKKKTPAVHLPDPRQLTPAGHLTAPVHXTPNAHERAPVQTPPLEKHXPNQTXMASTNPAXYPCAGQQKRPRPSHLHKTCGAGXTQTRAWXVEIKRHRCSXDRTPYWYTSQRPXRQHCCQHLMHVEPDHRYQAIF

SEQ ID NO: 210472 - protein, 70 aa, Zea mays
  Clone ID: MRT4577_12354C.1.pep
GAALVPAKPCVILPTKYGELPGMDSRPRWPIQIRVYLFVKVVVNMVSWCTKTPKQAIVTVVWRFLYTFDT

SEQ ID NO: 210473 - protein, 64 aa, Zea mays
  Clone ID: MRT4577_123550C.1.pep
VTSSSERSDEADSAKYTQSVSWRHVVVVLESGTRESVSRGEGVTSEREPRDLSVIVRCLTIGSG

SEQ ID NO: 210474 - protein, 92 aa, Zea mays
  unsure (1)..(92): unsure at all Xaa locations
  Clone ID: MRT4577_123551C.1.pep
GNDNLLHIWDVWMASSLPSVGHNQWLHRLEDHMAAVKALAWCRXNLLATGGGGSDRCIKFXHTHTGWVPELLTRDDRCALFSLVSFSWLKDH

SEQ ID NO: 210475 - protein, 127 aa, Zea mays
  unsure (1)..(127): unsure at all Xaa locations
  Clone ID: MRT4577_123552C.1.pep
IKIWDALGSRTCMRTYMGHSKAARDISFSNDGTKFLSAGYDRNIQYWHTETGQVISTFSTGKAPYDVNXNPDEDKKHILLAGMTDKNIAPWHMKSGQITQEYDHHXGGANTLTFGDNNRTFVTYYDD

SEQ ID NO: 210476 - protein, 30 aa, Zea mays
  Clone ID: MRT4577_123553C.1.pep
RCTIPESTHASTRAYSLKLELHRNKLRHLN

SEQ ID NO: 210477 - protein, 39 aa, Zea mays
  Clone ID: MRT4577_123554C.1.pep
PKTGSSLYIQYPPKDVVAQIQHLFEGAAKYSLKCIQAPR

SEQ ID NO: 210478 - protein, 97 aa, Zea mays
  unsure (1)..(97): unsure at all Xaa locations
  Clone ID: MRT4577_123555C.1.pep
MYENVEENQHALRQLLFXCPGALQYMSGGSLILETLYQRTRRPXPCRDALSEGGVRPVIKVGYGTTKDVASVQGTTTLCHDELGQLCPMXAEAGARF

SEQ ID NO: 210479 - protein, 69 aa, Zea mays
  unsure (1)..(69): unsure at all Xaa locations
  Clone ID: MRT4577_123556C.1.pep
AHXSXASHSIFYPLSPPTXXRTLVHIFKCSTTQTTXSIFLTAQYYLSYNHTHTMPSRSLCSTTLSTYSL

SEQ ID NO: 210480 - protein, 87 aa, Zea mays
  Clone ID: MRT4577_123557C.1.pep
LVSINYVSTNLKTKLKLSSVINNIFYYGSFKGRTRSAQRVGNMRVKQHKRTLSRDGNHRNSESDEFDELSTSPKQQLVVSGAVTKGD

SEQ ID NO: 210481 - protein, 66 aa, Zea mays
  Clone ID: MRT4577_123558C.1.pep
LSVNLRLYLIIPRLVSQVRRGRSPSHPVARYHSPLHGSSCNAVPPESSIDSVMLSALSKLVVSGQV

SEQ ID NO: 210482 - protein, 165 aa, Zea mays
  Clone ID: MRT4577_123559C.1.pep
FFWKGGPQGLLLGVNTSGGLPLFFFFRPNFFLPPPSLAQKHPFFPLKFFPFPVWPQALGFSNPKPFPPKTLSVQFGRFCFFFNPPYFFFGLGPFPGKGPPLFKGKKKGGLLLVFFIPQPCFFFRALFWVWFPQKKKKKKKKKKKKKKKKKKKKKKKKKKKKKKKK

SEQ ID NO: 210483 - protein, 442 aa, Zea mays
  Clone ID: MRT4577_12355C.1.pep
MARSPCDLRLLLLAAAAAFIYIQVRLFATQSHYADRLAEAERSENQCTSQLKSLIDQVSMQQEKIVALEEIKVRQDEERAHLRILIKDLEKRSVQKLLDKNVVPVAAVVIMACNRPDYLERTVESILKYQTSVASKFPLFISQDGANGAVKNKALEYKQITYMQHVDLEPVQTERPGELTAYYKIAKHYKWALDNLFIKHNFARVIILEDDMEIAPDFFDYFEAAAKLLDNDKTIMAVSSWNDNGQKQFVNDPKALYRSDFFPGLGWMLTKSTWIELSPKWPKAYWDDWVRLKEVHGHRQFIRPEICRTYNFGKHGSSLGQFFEQYLEPIKLNDVQIDWNSEDLSYLREDKFSTKFGKEVASATPLRGSDAVLKAHNMAEDVRIQYDDQEGFEQIARQFGIFEEWKDGIPRTAYKGVVVFRYNSSQRRIFLVSPDSLRQLGV

SEQ ID NO: 210484 - protein, 190 aa, Zea mays
  Clone ID: MRT4577_123560C.1.pep
IGYLEAGRDTLRPTLHALGAMSVSGVTLTSSDKPFAGVTSASSSSGRCCRAPDLRISRRTLREGRCAATEGPGEATQEGRWPSQIMLLEEYEDRCRRVRTSTTETWRRSTTRRSRTTMSTTMPTTTTLCRTAALGTATENCKAHGQHLDGCWMERPHTSSCAMMHSITGVMYVTPIIINIGNRNQPSADG

SEQ ID NO: 210485 - protein, 56 aa, Zea mays
  Clone ID: MRT4577_123561C.1.pep
GGGPRRCLTGHSAWQKGRTWKCVPGSPWPIWSPQTLLDSVLDPVNKSAKKQGFVPG

SEQ ID NO: 210486 - protein, 198 aa, Zea mays
  unsure (1)..(198): unsure at all Xaa locations
  Clone ID: MRT4577_123562C.1.pep
MGMRGGADFIAXSHGANRVGRNYPQYKIVVLDKIEYCANLKNLNPSRGSPNFKCGGGEIASADLGNYLLSTEAIETIMRFAAQTHVDNSFGDSFEXTKNNIYGTHVLLEALEVTGXIRRGIHVSTGEGCGETDEXAVXGNHEASQLRPTNPYSATKAGAEMRVMXYGRGYGLPVSTTRGNNVDGPNQCPEKLIPKFIL

SEQ ID NO: 210487 - protein, 134 aa, Zea mays
  unsure (1)..(134): unsure at all Xaa locations
  Clone ID: MRT4577_123563C.1.pep
TFTHLMSSAYKIETHSSPKTSHKFICPXTYXRHPPVTLPPTPSPXGXXGLSTKRRLTQGAPITQXXSHAGSLNXSFTHGPNTSQSRRESAHPCIAQVXLSSNDASDGAAQLNAIREYFFPQADTLTPSLLTFWS

SEQ ID NO: 210488 - protein, 81 aa, Zea mays
  unsure (1)..(81): unsure at all Xaa locations
  Clone ID: MRT4577_123564C.1.pep
KKKKTITLEXTRLEVCVRGAFIQRKLFHSDGQPCSAKALGGGAFSNANHDLXPFPCCPCRAFQGGSSPLGWGLLVTCRPCK

SEQ ID NO: 210489 - protein, 77 aa, Zea mays
  unsure (1)..(77): unsure at all Xaa locations
  Clone ID: MRT4577_123565C.1.pep
LGSIFSRXGTKLPEGLPCCEAIRIQDHPQFFPKLHGVDVFHSLLSVFQVDSNLENDGLDRSPLRECLICNSSVKILR

SEQ ID NO: 210490 - protein, 104 aa, Zea mays
  Clone ID: MRT4577_123566C.1.pep
QSLPAYSYSQSSLCSTRRHALAMSRRLQPRSSGSLCTGYFNIGDQRASGGCVHHASVSTPVVPVCPGSVRVRTSGVFMFLMCPCVSEEQSMTHNRRSDCLRLKG

SEQ ID NO: 210491 - protein, 94 aa, Zea mays
  Clone ID: MRT4577_123567C.1.pep
PTPPTDCKPTQAYLSSQSRYISGLVCQLPNASMKRCPGIRHVKMPAYNFPEHRPSLQMQASEPEERGPDEPQRDRVVQHALHSALIPAAEALTR

SEQ ID NO: 210492 - protein, 56 aa, Zea mays
  unsure (1)..(56): unsure at all Xaa locations
  Clone ID: MRT4577_123568C.1.pep
XIAAPHPLTFHRPKPFYVSNNLPTLQTCHPDNICMFIKNNKLFMKNKTTNKNLEHP

SEQ ID NO: 210493 - protein, 163 aa, Zea mays
  Clone ID: MRT4577_123569C.1.pep
LPLPLGARGRFLPYAAVLGHLSAASGVAATHHHHLHVADHLLALFGADASAKFQLQVLHRHGHHGAGADAGILLSGCQTDETSADVAQDDDAALGGRACGAFSAALQVVLAAHPAPLTNREVVCRARVVLSDQGFQQHPCLYCSDANADAPFLGQDGTKAKSK

SEQ ID NO: 210494 - protein, 117 aa, Zea mays
  Clone ID: MRT4577_12356C.1.pep
RPGKMPIINADVPPTSTDDTHYVVYFASGEPSWCPDCRNALPALNAVFGDASAPNAHLVMAGSREEWRGNPDNKYRKAPYDIQCLPTVVKVKYGEEIGRLGDNESQNESDLRKLVKL

SEQ ID NO: 210495 - protein, 52 aa, Zea mays
  Clone ID: MRT4577_123570C.1.pep
HTHCMGKYINLVLYFYNEWILTNINNCLIKLSNIIKTIMNFNSHCLSVLHIT

SEQ ID NO: 210496 - protein, 80 aa, Zea mays
  Clone ID: MRT4577_123571C.1.pep
GGSGSFIRVEWTLTYPCQKPQVRSICSDRYCSLHESGRKVLILTPQQNFAGSDKEPTAKTGSGDCRYPTGFATHCILGPQ

SEQ ID NO: 210497 - protein, 73 aa, Zea mays
  Clone ID: MRT4577_123572C.1.pep
SRRGGPFTGSSFSSAATQLNTFLLGGPKLNYVAVVSHPLDWKNLGVTQLNRFAHNSHFPGGGNIKKAPPVPLS

SEQ ID NO: 210498 - protein, 182 aa, Zea mays
  Clone ID: MRT4577_123573C.1.pep
MNAVVRTWILNTISDDLADAVSQRGVTDRVLWLSIESQFLGNRTTRALYADQEFRSSQGDLPVAEYCRRYKKLAEDLRDLGEPVSDRTLVLNIIRGLNEHFLALGLHLRRTYPLPSFLQVRDDLALEELTMAKAPPAAALAALTAPGSMGSTTSPAPSTGTPRHSQQPATQLPAPSQPLGEA

SEQ ID NO: 210499 - protein, 100 aa, Zea mays
  Clone ID: MRT4577_123574C.1.pep
LSCRSSIGYKYPLSYISLVFFKDNESRYHPGSSERLVFEIGDILSITHYSEDPSFMFGTTRRKQTPSPPMRIESLDISFIPPNRIEPSDCVKPRSSYYFF

SEQ ID NO: 210500 - protein, 97 aa, Zea mays
  Clone ID: MRT4577_123575C.1.pep
LVLTVPPGTLESIRSPTWETRNPCLIFKQQCSPSGSLHPALWPQPAAQRPLHPLGCEAPGQAEVARAGRHGPGVSRICWGISFVFLRLLGHGLTPEH

SEQ ID NO: 210501 - protein, 95 aa, Zea mays
  Clone ID: MRT4577_123576C.1.pep
KVMPGHDSYIEPFVHSILYLLTLNSTAFCLVILKTGEKAMVVQRKTCQDLCLYVTNHTRQRKGGNPRFQKRFSKQGAGLYGGSIFTFCACPLGPH

SEQ ID NO: 210502 - protein, 101 aa, Zea mays
  unsure (1)..(101): unsure at all Xaa locations
  Clone ID: MRT4577_123577C.1.pep
MPRSLDLLIPRRIELILHIPPGQCAHQIVAKFCYVWCHKHAIDPTALYTGSSYLHTDRANVYYXEVSCIRFVPRTVLMDLATGTMNCARTXLYNQIFRPDN

SEQ ID NO: 210503 - protein, 276 aa, Zea mays
  Clone ID: MRT4577_123578C.1.pep
GKSMLREEVTDVDIAEIVSKWTGIPVSNLQQSEREKLLLLEDVLHKRVIGQDIAVKSVANAIRRSRAGLSDPNRPIASFMFMGPTGVGKTELGKTLAEFLFNTENALIRIDMSEYMEKHAVSRLVGAPPGYVGYEEGGQLTESVRRRPYSVVLFDEIEKAHQEVFNILLQLLDDGRITDSQGRTVSFTNCVIIMTSNIGSPLILDTLRNTTDSKEAVYEIMKKQVIEMARQTFRPEFLNRIDEYIVFQPLDTTEINHIVEIQVDWVLNRVGRRCVG

SEQ ID NO: 210504 - protein, 66 aa, Zea mays
  Clone ID: MRT4577_123579C.1.pep
DTIRMLLNHQFIIRFLDNNFCNIFSYMLNFEKGFRLWNPCKINYEQRLNPKAPYPTTFLVAQVDVF

SEQ ID NO: 210505 - protein, 64 aa, Zea mays
  Clone ID: MRT4577_12357C.1.pep
IGFYLCPCAVVVLCVHGRRRESRSPEISGRGGTADSSVHHVRFCPRADGYVLRTHRPITGCVHT

SEQ ID NO: 210506 - protein, 95 aa, Zea mays
  Clone ID: MRT4577_123580C.1.pep
TRSSLRNLWVRGKQGRNTGQGELGTGLQSLLPVMSQISYPISITSLIGTIVRPWEKEEKQVDGSRPKCGHQTISQRQKKPWVTPGISEPLLIPPA

SEQ ID NO: 210507 - protein, 68 aa, Zea mays
  Clone ID: MRT4577_123581C.1.pep
ILNFFLFFPPLLIATDAFFSVPGQTMPFPGEFIPPPGPIFFQPFLLFQSTHILNPAIFFNEKTKNHDN

SEQ ID NO: 210508 - protein, 241 aa, Zea mays
  unsure (1)..(241): unsure at all Xaa locations
  Clone ID: MRT4577_123582C.1.pep
MSLLYVGIPVETIMQRHTEMVEKQGGPSNRDDLLTHRYVRRLERKIRRSVYELDDDDAISIGLWVENNQDCVFFYEDFSDTDTFVLGIQTDWQLQQMIQFGSHSLMASDSKFGTNKLKYPVHSILVFDQHKNAIPVAWIITPNFAHGEIYKWVGALYDRAHTKDPTWQLGGFIIDGPLTDVRTIREVFHCPVLISLWRIRHAWHKKXLTKCSDXEKRSEMGKRLGDAISIICRNWVMVELF

SEQ ID NO: 210509 - protein, 97 aa, Zea mays
  Clone ID: MRT4577_123583C.1.pep
PMTTLQIKPKKSPEYEFIPVLGTALRCCWSSVGAVLWAASNLIRACCPFRPVGSPRCIVASLSTLVRYTRGASAAASGMGDGETRGDLLSQAARKRA

SEQ ID NO: 210510 - protein, 79 aa, Zea mays
  unsure (1)..(79): unsure at all Xaa locations
  Clone ID: MRT4577_123584C.1.pep
MSCRAVLFLALKILICTXGNACGKXPTPTPTKDPPTTPPDNTPPPSRRLQCPINALKCVVSPHVLRLRQRYRRTVTAKL

SEQ ID NO: 210511 - protein, 89 aa, Zea mays
  Clone ID: MRT4577_123585C.1.pep
SKMFRILLFLVFSILNHADGDVQVFTRFIYDDPLLVDEIEDIPAIFGDDIPQGGVIVSYLTEIPNRNNQGCHFFRQILCMQAQSLHAQL

SEQ ID NO: 210512 - protein, 69 aa, Zea mays
  Clone ID: MRT4577_123586C.1.pep
MGFKEEMVRVLHIGLLCASSLPINRPAMRRVVKMLQEVRAPPARVVVDRDGKLSPYYYYEDASSEQGSS

SEQ ID NO: 210513 - protein, 391 aa, Zea mays
  unsure (1)..(391): unsure at all Xaa locations
  Clone ID: MRT4577_123587C.1.pep
DAWVRQLLHLPAALLLLCAASLRCSATARGRLWAGGVSIAAAGSGGEEECDLFDGDWVWAGGGGGYPLYDSRDCPFLDVGFRCAENGRPEASYTKWRWQPSRCHLPRFDAKSMLEKLRNKRVVFVGDSIGRNQWESLLXDYNCTGKSYSPLLTTLQGRAPAGAPEIVRYSIRVDAMDWMSDRGKWKDADVLIFNTGHWWNNEKTIRGGAYFQVGDEVKMGMSVAEAYRRSIETLSDWLRKEVNTSKTHVIYRTYAPVHFRDGDWKTGGSCHLETLPDXDASEVPXDEWADLLQPVDEFLGSDLGSELAGVDLLRVTGMTAQRKDGHLSVYLSPSGPVPRYRQDCSHWCLPGVPDAWNELLYALVMRRHKKMAGTRTPDAEEGDVFSSGSSS

SEQ ID NO: 210514 - protein, 71 aa, Zea mays
  Clone ID: MRT4577_123588C.1.pep
IRHRPKSSKRRASQGKNKQTNEITQILAMATHITARAGRPACARPPPVLAVAWHWPVAARSAQESQSERVS

SEQ ID NO: 210515 - protein, 144 aa, Zea mays
  unsure (1)..(144): unsure at all Xaa locations
  Clone ID: MRT4577_123589C.1.pep
GEPPPPPGLKGPDRGGPIPHQGGQIFGKGIGAGPXSIRQPGKRGFGPRGLRGGTPGXPGPKGGNPGPGIGKGPPKGGNGPPKRKAERPPGXGIRGNPPQGGCGPGPNPFFFFFFQNFAFFVVFVFLFFFFFFFFFFFFFFFFFF

SEQ ID NO: 210516 - protein, 119 aa, Zea mays
  Clone ID: MRT4577_12358C.1.pep
RGRQRKIDKPVTANTVKTSLSIQEFGHSYFLLQQIGLKGKGKSLKQPYNSFKHAPAPEGVLIRAQWWSFVSNKPSGPALHNCMMYQKWKSKIHNRWPEVYEAVRQQEKVAAAADSTVFH

SEQ ID NO: 210517 - protein, 69 aa, Zea mays
  Clone ID: MRT4577_123590C.1.pep
FLLSCTIMMPLCRHRHGCKKNNLSKKKSNEFIYPQLHRSATCLIEEPSSQTQKINPSTIWVSYVKPFPP

SEQ ID NO: 210518 - protein, 134 aa, Zea mays
  unsure (1)..(134): unsure at all Xaa locations
  Clone ID: MRT4577_123591C.1.pep
GKAGTPGGTGTENPGRPTRILTRPHERNTRDPPKGSGGDRQPAAETTGRGKGGKGHGKGGTKRHRKAPRDNTQGNTKPATRRPARRGGAKRNARPNNEETRGRHKNTDENDKQNAETXTEHARRKNNTEKDGGN

SEQ ID NO: 210519 - protein, 80 aa, Zea mays
  unsure (1)..(80): unsure at all Xaa locations
  Clone ID: MRT4577_123592C.1.pep
TTRRETGPSTYKGKVLLIVNVAFQXGLTNSNCAELAQVYEKYNDQXFEILAFPCNQVWCAGALVPYEEEGSVWLAHRFNG

SEQ ID NO: 210520 - protein, 67 aa, Zea mays
  Clone ID: MRT4577_123593C.1.pep
CTAKIYDQSNRHSQSSSERMSIYSRIGVVMHIAYHSSNGRRLSSIVACFKWGYSFMSMLINKLSVMI

SEQ ID NO: 210521 - protein, 77 aa, Zea mays
  Clone ID: MRT4577_123594C.1.pep
VGLYPVVPFGLSAPVRESRRVVSCRVVRPPWVRVLRPFPGGAVAVSVAFGGRGVDPPFVSMVTPCVPAPAGVTNAWV

SEQ ID NO: 210522 - protein, 53 aa, Zea mays
  Clone ID: MRT4577_123595C.1.pep
WRECPTMYRPGWTGLIYSELKALLRPPPPSLLLLCRLGCSLFSRLPPQLPSTY

SEQ ID NO: 210523 - protein, 106 aa, Zea mays
  Clone ID: MRT4577_123596C.1.pep
PKVRSSVRSVVFQDNPPTKIRRTLSSDISSQINQNPLTATTASRGDLGIARVEELGFRENGDAKNRWKGIWILERLGQLYLGNGNQRYRVYIRESSSTRVRPFNFS

SEQ ID NO: 210524 - protein, 72 aa, Zea mays
  Clone ID: MRT4577_123597C.1.pep
YNKHNPPLKNAEKKKKCWLYTRTKIVNPRSLSTKGQNPPHNKSPTLPNSVQPPPPTLIPPGQLHRAWFFFDK

SEQ ID NO: 210525 - protein, 61 aa, Zea mays
  Clone ID: MRT4577_123598C.1.pep
MCGMTNNICMVIIKFLVLMNQKKKKKKKKKKKKKKKKKKKGKKKKKKKKKKKVFSCPGRPL

SEQ ID NO: 210526 - protein, 86 aa, Zea mays
  Clone ID: MRT4577_123599C.1.pep
YGLSIAVRVSLITPITSSNCRSLFTKSSKMGHVYWLANVYFNQAYVSQSSEENHYFPKHCFHYYSSYPAWCGGSIDLYDLSFWEFV

SEQ ID NO: 210527 - protein, 84 aa, Zea mays
  Clone ID: MRT4577_12359C.1.pep
AVVTTQSTRGFVQICNIHSSLHRSDVRGTFGCLAQAYCVFDETLLFHGSIMSSLRKCTTVLVAKCKRSKKKKKKKKKKKKKKIK

SEQ ID NO: 210528 - protein, 63 aa, Zea mays
  Clone ID: MRT4577_1235C.1.pep
VMVAHRLSPVKTPNVFSVLQTAKIIKQGAPKPLIKDKTGASPKLVSFHHHHQIQTHQSSSEAI

SEQ ID NO: 210529 - protein, 108 aa, Zea mays
  Clone ID: MRT4577_123600C.1.pep
KPTSPNIFMGGGQSTPQRTKNLLTWPGFKTPYSPPGKLPLPKKKQKNPYFHAKLPKGGEKTKKGPKGLSGKDPQKKGYPPTLKWPLVSPGGKGPRPILPNKGQTLSPF

SEQ ID NO: 210530 - protein, 49 aa, Zea mays
  Clone ID: MRT4577_123601C.1.pep
TLQHVLFWHHAEKLLICKESFGIIHIANKLRPGQKKKSPNCALVGRLNV

SEQ ID NO: 210531 - protein, 59 aa, Zea mays
  Clone ID: MRT4577_123602C.1.pep
YLQNRSRQVLQISGIQSSKTLLVMDTVPLYKMRWHVICDDNYQKQMIKQNISHLKNPQI

SEQ ID NO: 210532 - protein, 113 aa, Zea mays
  Clone ID: MRT4577_123603C.1.pep
KTEPRVLGGDQRSRGRLHGQPRDAAIHSGENRFFPLVNRDALLARARCCCYHKEQQKAMMNEMVGKLTSACWDKCITSAPGSKFSSGESTCLTNCAQRFLDMSVLIAKRFEMQ

SEQ ID NO: 210533 - protein, 72 aa, Zea mays
  Clone ID: MRT4577_123604C.1.pep
MDNPEMQRFIQKEQQKAMMNEMVGKLTSACWDKCITSAPGSKFSSGESTCLTNCAQRFLDLSVLIAKRFEMQ

SEQ ID NO: 210534 - protein, 56 aa, Zea mays
  Clone ID: MRT4577_123605C.1.pep
GLEESLKLGMEDVYKKIGCNVIVRVMVLKCRVCIVCIHLVGRKIMVFYFLGWVLWV

SEQ ID NO: 210535 - protein, 77 aa, Zea mays
  Clone ID: MRT4577_123606C.1.pep
GTPPLGGKAVPKCVLSLEGVFFFGVCFWGEGGALVIPRNESGRLPIGSPNLDCRPPLGRGNPLSFCPHAPRTPTGVF

SEQ ID NO: 210536 - protein, 79 aa, Zea mays
  Clone ID: MRT4577_123607C.1.pep
PRVKSPAAGMETGQSPEHAECGAAALRVCSDQDITGHDLRSATAKRRWQHPRCNICCRASNGYSMTLRQGSVVLGTTTT

SEQ ID NO: 210537 - protein, 84 aa, Zea mays
  unsure (1)..(84): unsure at all Xaa locations
  Clone ID: MRT4577_123608C.1.pep
HTVREQRYAVRLPCTYVSLCVVLSTIQGPHPANATGDSEGDRGIKRGSCMXKKKKKKKKKKKKKKKKKKKKKKKKKKKKKGRPN

SEQ ID NO: 210538 - protein, 83 aa, Zea mays
  unsure (1)..(83): unsure at all Xaa locations
  Clone ID: MRT4577_123609C.1.pep
TEXCAGKPNGQQLFSAFIYPLGSLSSFTSSPSHEFTIDLLSNKCIHSLSHPKSHPLQSIGGSLCEVKLVNWLWISSLSPHSLF

SEQ ID NO: 210539 - protein, 58 aa, Zea mays
  Clone ID: MRT4577_12360C.1.pep
YVYVCVYGYGIGLKLKGLGCSRHHHASQDFVMRALDLSYSSWLSPASSNLMSSSSERT

SEQ ID NO: 210540 - protein, 259 aa, Zea mays
  Clone ID: MRT4577_123610C.1.pep
AERGDGSDWECTSTTTLMFRGNIPERAMFPASYTYDRVFNPKCSTRQVYEEGAKQVALSVLSGINSSIFAYGQTSSGKTYTMVGITERSMSDIYDYIDKHPEREFVLKFSAMEIYNEAVRDLLRPVATQLRLLDDPEKGTVVEKLTEETLKDKGHLLELLAVCEAQRQIGETSMNEASSRSHQILRLTIESSAKQFMGRGNSSTLLACVNFVDLAGSERASQTQSAGMRLKEGSHINRSLLTLGKVIRQLSKGRNGGFR

SEQ ID NO: 210541 - protein, 75 aa, Zea mays
  unsure (1)..(75): unsure at all Xaa locations
  Clone ID: MRT4577_123611C.1.pep
RQLALASSPFAVANGVANQSLFLLFEFLSVVGGGAFLNPVAYLLRWEVLSSTQFVVAICCYIPAAAXVVLILYRP

SEQ ID NO: 210542 - protein, 115 aa, Zea mays
  Clone ID: MRT4577_123612C.1.pep
LSRHGPPSQCHSSATSCDLHSLHRSNTLHLQQSLLKKHVSLVAVQVYCNVPKLKRFLPRMGLYICSSMVCKQTVALSFTFSMSQAGQKRTQVCGNAHVIRQTDVISPAYLFLMII

SEQ ID NO: 210543 - protein, 89 aa, Zea mays
  Clone ID: MRT4577_123613C.1.pep
QDWIEKSNRHPNQSDQEKRIHMCSKCSIKGYILLRFKKKNYAVVEDKILEEIEPFQAIRITNDVQCPPILTFNTPCYSCLRAYKSLSRN

SEQ ID NO: 210544 - protein, 105 aa, Zea mays
  unsure (1)..(105): unsure at all Xaa locations
  Clone ID: MRT4577_123614C.1.pep
HETGHFCYISXINKSNFYGDXSNRQWPCAAVQKYYGRGPLQISWNYNYGPAGRDIGFNGLADPNRVAHERRIAYKTALXYWNEHQGGGGDALNYHIYYSLIMISY

SEQ ID NO: 210545 - protein, 89 aa, Zea mays
  Clone ID: MRT4577_123615C.1.pep
WNLDRACTALYCYASPGQLLGDENTHTHMARGQTWRAEHITPPLTMTVLSLRCTQGPCSSPDVEFLMSKYLTLHHVPTSKRSTNSSTER

SEQ ID NO: 210546 - protein, 52 aa, Zea mays
  Clone ID: MRT4577_123616C.1.pep
REQPGSGTPCVRSPNAAPGSGWRRNSTSPSITASASYVQGRRCVLHYVLVLD

SEQ ID NO: 210547 - protein, 76 aa, Zea mays
  Clone ID: MRT4577_123617C.1.pep
FISGAPTLYFLKVTNVGQKWNRRSFGLKCADEARWQWQENEERTYQHVHQGFERKTMMALVDSVVDFTRSCTMGCP

SEQ ID NO: 210548 - protein, 134 aa, Zea mays
  Clone ID: MRT4577_123618C.1.pep
RVQGKGRDCVRSRHACLLVLSETTYLSPPLVLAAASPAHDNPLYGRLRQPVGSRRYWLPEQGRRRAHRAGGLLRGQSTTVHLLLAWGVKNAEKRVIVFRLTQEELRLMLNNILHEHEADTLSIPYLHSATHGGD

SEQ ID NO: 210549 - protein, 98 aa, Zea mays
  unsure (1)..(98): unsure at all Xaa locations
  Clone ID: MRT4577_123619C.1.pep
SALPTKESTLGQARAQTSKALLAQGQSSEQAAKGSTLDLVTSKDTVGSATTDQCASVAATEHSAHQTTSGEEASGDTESFGTSPSSNAQXQSTGASPL

SEQ ID NO: 210550 - protein, 84 aa, Zea mays
  Clone ID: MRT4577_12361C.1.pep
RGISLSQKPKKGPLFKRPTLYTPIGVNEKDNGFILSTHVPQQNDNFPLWPPGKPTPLQKKTKRLFLRSAKQRRKKTTPHTGENP

SEQ ID NO: 210551 - protein, 95 aa, Zea mays
  Clone ID: MRT4577_123620C.1.pep
SRLTRPNPPPVTVFSVPPTSVVPQKIMVTGAVPTVMPSLSDTTGALRVVTAATKSVTSPPVGARLVMKSTATVPTAGRNDVWAHPGFARVILSIV

SEQ ID NO: 210552 - protein, 146 aa, Zea mays
  Clone ID: MRT4577_123621C.1.pep
IFFFFFFFFFWFFFLVFFWGGIRKTKNMVSALFLPQGSTAKKPPLGFSGGPPKKGFDQKNPPKPPGAGGLTGHRATHIGPRLMGDRVFAPPKSWPNRGSACRGGCPSWAGRGGPPGLGGPPSGGVGAPAPPGVFWGGTPWTGGGGG

SEQ ID NO: 210553 - protein, 264 aa, Zea mays
  unsure (1)..(264): unsure at all Xaa locations
  Clone ID: MRT4577_123622C.1.pep
YPPSLAGSGVPYYVMLKWLFALLIGVGTGLAAIFINLAVENFSGWKYTATFAIIKHSYFVGFFVYTVFNLALVFSSVYIVTNFAPAAAGSGIPEIKGYLNGVDTHGILLFRTLVGKXFGSIGSVGGGLALGKEGPLVHTGACIASLLGQGGSAKYHLSSRWVRIFESDRDRRDLVTCGCAAGVAAAFRAPVGGVLFALEEVTSWWRSHLMWRVFFTSAVVAVVVRSAMNWCNSGKCGHFGXGGFIIWDISXGQEDYSYQEIVSY

SEQ ID NO: 210554 - protein, 113 aa, Zea mays
  unsure (1)..(113): unsure at all Xaa locations
  Clone ID: MRT4577_123623C.1.pep
LKGEPRRFPPGVSKAISRLYAWYSDRRGSVESPPAYIIRGLCRRCCLPXEXILRSMQAWFALSPAGNRNVENXANLFXLVGSTQFGNMPLFSPPPLQEFLIFERGYFLCSMEF

SEQ ID NO: 210555 - protein, 283 aa, Zea mays
  Clone ID: MRT4577_123624C.1.pep
MGDFVGHVLPGTLLLAVGLWRVWASVARFAADPAAFRVRAWNPVPAAGPRLLELHVVAGGAFLDMCVELYYANPLRVLTGGGVDPGHLGGLEHASMLLMFFLFGALALVSEKTRYLPLSDGALSLVFASAFTAEFLLFYFHSTTHAGLEGYYHRLLLAVLALCIAALVAGALLPASFPADLGAGVLIAVQGLWFYQAALALYGPMLPAGCVRHFDSPHSDARIECHGGAAQERAEQLANFQLFGLVFLAFVYALGCYAVAAARYGNNLELTTVHHTHVAATAM

SEQ ID NO: 210556 - protein, 82 aa, Zea mays
  Clone ID: MRT4577_123625C.1.pep
FISTDECMLHLQGPVELYQLCLVSYGTELQIRELSCLGCFLLLGVFYAPFHLFNIKTHNSLACLRKRIVNFPEKKTGEKCYT

SEQ ID NO: 210557 - protein, 49 aa, Zea mays
  Clone ID: MRT4577_123626C.1.pep
LEGPGRLFPGLEVSPWFRFCVSPPLCVCVFSLEHCSSMLGACSVWLPWH

SEQ ID NO: 210558 - protein, 73 aa, Zea mays
  Clone ID: MRT4577_123627C.1.pep
ARCDVPLRHKFIFLVQIVAIRDIIPAPLREAFNDVYIAYELMDTDLHQIIRSNQALSEEHCQVLDSIHLRNAY

SEQ ID NO: 210559 - protein, 86 aa, Zea mays
  Clone ID: MRT4577_123628C.1.pep
SVKFSLTFNARLHYEVLTFLCLINVDCCRLERPGGLIGYMTTSGRTSRASLSLAEHAVYVVLDFKLLDMSGFVDLEFLEKYQFASF

SEQ ID NO: 210560 - protein, 126 aa, Zea mays
  Clone ID: MRT4577_123629C.1.pep
MDPQVNLFVVVKVMGRTGSRGQVPQVKVKFLDAQNRLFIRNVKGPVPEGDILPLLESKRGARRLRLSPSVLGGLLFGFWGLRICAMFELLCPCFESSKPGDKIPVLFFLVENGIGVETWLPLLFYL

SEQ ID NO: 210561 - protein, 67 aa, Zea mays
  Clone ID: MRT4577_12362C.1.pep
LSFSIYFSSPPKKIPLGGFFMFLYDSKTRHFFSYKWTPLSCFNFLYPSPLTSLLSYHVLLPFTPSLM

SEQ ID NO: 210562 - protein, 148 aa, Zea mays
  Clone ID: MRT4577_123630C.1.pep
AVIVFGGSIGIAWLLFRHRKESQEATDWKMTAFTQLSFSESDVLGNIREENVIGSGGSGKVYRIHLGSGNGASRDEEGGGGRMVAVKRIWNSRKGDEKLDREFESEVKVLGNIRHNNIVKLLCCISSQEAKLLVYEYMENGSLDRWLH

SEQ ID NO: 210563 - protein, 27 aa, Zea mays
  Clone ID: MRT4577_123631C.1.pep
KGQATSLNQETVSGLYVCDRGLANWSI

SEQ ID NO: 210564 - protein, 116 aa, Zea mays
  Clone ID: MRT4577_123632C.1.pep
KKKPYPYSLWSVFHSMQRTLTMIRRPIKKSKGFLYDFTQLLYIRFYPGHSSQGTCSTISISRTVESLLVPVSSPLSHLASSPHIGLLITRTHIGPVGVQLSASDLGPCPLPSVLYH

SEQ ID NO: 210565 - protein, 126 aa, Zea mays
  Clone ID: MRT4577_123633C.1.pep
LAYTKHPETTSATSSTVLPVLEAWNYRSSPNYVTPSSDLKLQTEVSIPESITLHYTTGYSRTCEIMATRLQVQKQKQPKAGAQNWQPGWASSSGASSDDSLPRPTPAQTPSIELARARSSAAAREQ

SEQ ID NO: 210566 - protein, 62 aa, Zea mays
  Clone ID: MRT4577_123634C.1.pep
NKTFNQIMLIKERNKVKKFSYVPSSSLLTIATINSMKRSHLFLLYLHKYGRIPLSMTCLWTD

SEQ ID NO: 210567 - protein, 220 aa, Zea mays
  unsure (1)..(220): unsure at all Xaa locations
  Clone ID: MRT4577_123635C.1.pep
MAACLRCRRRLPLSPPAAPLEDDGLLSENLLRLPPQPSSLPRASAVCSRLLSDPAFRRRFRIHHRGSALLLGSFIHYPGITFQPAPDAPDRLPLEQFRLKLDDHYIALGCRHGLALFFLPIRLQVLVWDPLAGHQLRLAVPPDFEFQGAKGDISXAVLRAAGDVDHFRVVLVGCDGEQPRTALACVYSSETGVWGGCVSTPIPSEGLVIFKGEPAMLAGD

SEQ ID NO: 210568 - protein, 61 aa, Zea mays
  Clone ID: MRT4577_123636C.1.pep
SAQMVLVQIQNMLLQNNRRHVSDMAAQLLPLTALYLNCVDLPTTSLHRLLYCINQPNGVQQ

SEQ ID NO: 210569 - protein, 78 aa, Zea mays
  Clone ID: MRT4577_123637C.1.pep
QRPSYQTGATLLERVASAQMVNQSTREVMYKSLLEENITACGMDGHKQQRPHFSLSLNWVESTNIKNKVPTGRLERRT

SEQ ID NO: 210570 - protein, 296 aa, Zea mays
  Clone ID: MRT4577_123638C.1.pep
MRAAPTDPPTAPAKSMLRRLFDRQLLRISPAERLPSAGAGEKDEAEPSSVCLDGMVRSFMEDDVGSEKAAHGGRYCNCFHGGDNSDDEEDDEAAAAASDVAETIKGLVHCATLRERNLLADVCAHLERHREAGARRRDLLRLVASSLRGAGHDASVCVSRWDKSPSHPVGEHAYIDVLLPAASDRGARERVLVDVDFRSAFEVARPTKAYRALLQRLPAVFVGKDDRLRLLVAAAADAARASLKKRGLHLPPWRKPEYMRAKWLSPYHREAPVAEEAASASADEDDGYGPGTGTAA

SEQ ID NO: 210571 - protein, 72 aa, Zea mays
  unsure (1)..(72): unsure at all Xaa locations
  Clone ID: MRT4577_123639C.1.pep
RRSTTPTAAAGTTTTTASSLAMLAGRVLRRRRRQRPAGYARPKEWPRPVVARRANFIAWRSYQSARNXDRYC

SEQ ID NO: 210572 - protein, 40 aa, Zea mays
  Clone ID: MRT4577_12363C.1.pep
VLKHNNSIWTLENAACHGGGQRFLRSYTVFVLKHNNRTRG

SEQ ID NO: 210573 - protein, 60 aa, Zea mays
  unsure (1)..(60): unsure at all Xaa locations
  Clone ID: MRT4577_123640C.1.pep
HRELLDGYIILTSSTLGGRIEFXSAVGKGEVCTRRHRPRGRNXLAAPERXGERVGYILGP

SEQ ID NO: 210574 - protein, 78 aa, Zea mays
  Clone ID: MRT4577_123641C.1.pep
TLSIIFSILFMINNISISNMEAKAKEFNEVIQEQYYPWFAQYMVMKRASIEPNFHDLYLKFFDKVNSKSLNKEILKAT

SEQ ID NO: 210575 - protein, 46 aa, Zea mays
  unsure (1)..(46): unsure at all Xaa locations
  Clone ID: MRT4577_123642C.1.pep
MSSLSRELVFLILQFLDEEKFKETVHKLEQESGFYFNMKHFEXLVQ

SEQ ID NO: 210576 - protein, 234 aa, Zea mays
  Clone ID: MRT4577_123643C.1.pep
DRCRIGHEEMFADIILQLQIPSNQILCLDIKTQWNTTYLMLQAALDYKEAFTMLEKCDGNYSQAPSAVDWEKVEVACRYLKLLYDSANNIMAVENPTANIFFHDAWTIQREISNATDHQDPNSVSSSIAKGVHETFGKYWKDCNVVLAIAVVMDPRFKMKIVEFSYSKIYGPTKGAKYVKLVDGVVHELYKEYVTLTLPLMPNHVGDKNIPRDPTSIGNLQSGFEVSIVKSELD

SEQ ID NO: 210577 - protein, 65 aa, Zea mays
  Clone ID: MRT4577_123644C.1.pep
MGSGVRALMRLKQVDSERTRAAGCAHQLRKELSVTQLVHIGVGSSIGAGVYVLGGTAERERCVPA

SEQ ID NO: 210578 - protein, 61 aa, Zea mays
  Clone ID: MRT4577_123645C.1.pep
MFPLSPTNTTPRLPYCDPHASPKIRRGIDGMAADGKLLLLVAAVLMAYLVADARPCGHAQT

SEQ ID NO: 210579 - protein, 50 aa, Zea mays
  unsure (1)..(50): unsure at all Xaa locations
  Clone ID: MRT4577_123646C.1.pep
ILAVICRYSEVVHHLHAIVEQRQLVWVEGLLGPSVAGYIVYKEASXRPSK

SEQ ID NO: 210580 - protein, 223 aa, Zea mays
  unsure (1)..(223): unsure at all Xaa locations
  Clone ID: MRT4577_123647C.1.pep
METLMAAELPQQKAGGLARRLARLLRLKRSPAGSGVAYSAASDVYDESLDSSINSLSQLKLSGNMAAAYSLDAFFKTAAKKKGAPRQSPVPAADAHAFVASLFVGVSAVKASYAQLQLAQHPYDAEAIQSADAALVVELGKLLDHRRQYVRDPVGAAKNAEAGPAAIANEKRHLIRTYEITARKLETELRARDAEAQRARGELADELHAARALEERXHPGRTL

SEQ ID NO: 210581 - protein, 79 aa, Zea mays
  Clone ID: MRT4577_123648C.1.pep
SWLDPSVPCFEVIGFLLLELGVVPSYGGCLSLGRVGPYVACNLACCLSVVFWGVISQKGCKKPTQGEGGRRLVSTSSRE

SEQ ID NO: 210582 - protein, 58 aa, Zea mays
  Clone ID: MRT4577_123649C.1.pep
QPKHVCAAYPFRIIIILTTTTHESYSEPDELPVPDCRTLRLAEAVDCFKACAVPSPSR

SEQ ID NO: 210583 - protein, 78 aa, Zea mays
  Clone ID: MRT4577_12364C.1.pep
ALCWRLCPGFRMVGRPEPFKNPPAQRFGIYTKAPFPVILPDHFCSGAPVNHVSVSPKKAAVSSLVVVKRTETNKEVNT

SEQ ID NO: 210584 - protein, 463 aa, Zea mays
  Clone ID: MRT4577_123650C.1.pep
MAAKAHVLVLPMPCQGHVTPLMELSHLLVDQGFEVTFVNTDVDRAAVVAALEASGGGGGVAALGGGIHLASIPDGLADDEDRKDISKLVDAYTRHMPGYLERLLADMEAAGRPRAKWLVADTNMGWSFEVAKKLGIRVVSFWPAATACLAFMLKIPKLIQDGLLDDKGLPVRQETFQLAPGMPPLHSSQLSWNNAGEPEGQHIIFELVTRNNKLNDELAEMVVSNSFYEAEAGAFKLFPGILPIGPLSADGAFRKPVGHYLPEDERCVKWLDAHPDASSVVYVAFGSITIFSARQFEELAEGLELTGRPFLWVVRPDFTPGLSKAWLHEFQRRVAGRGMIVSWCSQQQVLAHRAVACFVSHCGWNSTMEGLRNGVPFLCWPYFCDQYLNRSYIVNVWRTGLAVTPDADGIVGREELRSKVEQVVGDADIKDRARVLKDEAHRCVAEGGSSNDNFKKLVNLLSE

SEQ ID NO: 210585 - protein, 54 aa, Zea mays
  Clone ID: MRT4577_123651C.1.pep
LRCHRAGCLPYPYSAPAGGDRRTAAPRRRVERPVRLAPSCSLYCDSTICYMSII

SEQ ID NO: 210586 - protein, 59 aa, Zea mays
  Clone ID: MRT4577_123652C.1.pep
SNHPKGTASDSNTSLQKEDQGAPRARLQTVVPILLPYTEGGLNVNEFKNTRVAIYSMLG

SEQ ID NO: 210587 - protein, 125 aa, Zea mays
  unsure (1)..(125): unsure at all Xaa locations
  Clone ID: MRT4577_123653C.1.pep
LMXRQRIQEWLEFLNRHIGHLRNSPLKLISLRRATTLLNMQLACQKSMESAGTAQMSFTHPPLIATLHIERLIWSYRAACTSHQWSLPFRNSGMYLLPMELAFPHQCYALPMELAFPQQCMVVTK

SEQ ID NO: 210588 - protein, 104 aa, Zea mays
  unsure (1)..(104): unsure at all Xaa locations
  Clone ID: MRT4577_123654C.1.pep
RSRDMRSLLLDHHAYPSVRTLDGXTPLDXLRGLTFKFLFKGAGPGLTHIEPNKLRLCLELVHTAVMVTTLEDHTGAGGGGSDAPYYSLGSLTMNSTLMYHCQDI

SEQ ID NO: 210589 - protein, 79 aa, Zea mays
  Clone ID: MRT4577_123655C.1.pep
FCYNRNLMFIPLSHTSSISKYYYNEIYSSLRTFSATSFKSLLTTSSIMESAMLIMPSAFFISGSARGSYGSGAGIVQLE

SEQ ID NO: 210590 - protein, 100 aa, Zea mays
  Clone ID: MRT4577_123656C.1.pep
RGNFNQDPQLPFHNAVRVPLYHRQTDPLLLKRPPSFMTLTQSHMPRELQDLYQDQLDAGIRQEYYHYAHVLLEELAQHLPLYTIFNQPQSPVNLQFILAA

SEQ ID NO: 210591 - protein, 250 aa, Zea mays
  unsure (1)..(250): unsure at all Xaa locations
  Clone ID: MRT4577_123657C.1.pep
VPRGRPERCLPSHISSATISSLPIPLRLPPPPPLPLPPPPLRSCLRRSIRSPRRRRCHGREMLSVDIHDGFLEAFVWCDRSCLLTDADYDNLCRCEILDDFXMLVTATEXYGAYLHNEXDLLHTTTIVERRSLRLCYEYXHMLCHDTVPLCTLLQYITYGHMIDSVVLIVTVTLHERYVNKLLENCHPLGMLDSIDSLADALXMRELYRLALDDTAVAPYFSXSITSEDVDDVTIVIMSDALYXAYLEDF

SEQ ID NO: 210592 - protein, 94 aa, Zea mays
  Clone ID: MRT4577_123658C.1.pep
HASADSLADSRVYITLCVIGHFFCTDVFIFNTADIMSIQDAHVNKLSNRTGTLMCESVDALFNYMTRTVLHYTTGHVRDALQVARRLPGSTALV

SEQ ID NO: 210593 - protein, 77 aa, Zea mays
  Clone ID: MRT4577_123659C.1.pep
SSGLRIPFTTDRSTTTPSDVGARRPPRPALDRPRRAPRRTSAAGPRWRPPSPLPSTHPLHVTLSDHPRGLLHLPHRL

SEQ ID NO: 210594 - protein, 52 aa, Zea mays
  Clone ID: MRT4577_12365C.1.pep
IVVLLQFRWMEGDGRMHLLTDAPTISAEKIIFPNLLLLEIVFSHICFDCKAQ

SEQ ID NO: 210595 - protein, 63 aa, Zea mays
  Clone ID: MRT4577_123660C.1.pep
TYSYKRDRGTLLKYPWVNGLRLLLPKPLPVYPMGGNFGPYPYPLGQFWANTRTLIGESPKGYP

SEQ ID NO: 210596 - protein, 60 aa, Zea mays
  Clone ID: MRT4577_123661C.1.pep
QHACRRSYIRTYTGTCVGSWMLPEQFPEFMCCPTIILQLWNLIISYPAIGFFASYKSDFI

SEQ ID NO: 210597 - protein, 79 aa, Zea mays
  Clone ID: MRT4577_123662C.1.pep
GSTRSQDLCNPNFWQKVLGPGDEMDSRNQVLNKSGSGVNLGTLLWHRKEESSHVLHMYVLGMKDLPDKVFQRFTNLISA

SEQ ID NO: 210598 - protein, 77 aa, Zea mays
  Clone ID: MRT4577_123663C.1.pep
HWVPPSRPGGFSVFAPPPPPIPILAERCRDKTFRINNKMQNKRRQNRPIPYWIRMRTDNTIRYNAKRRHWRRTKLGF

SEQ ID NO: 210599 - protein, 157 aa, Zea mays
  Clone ID: MRT4577_123664C.1.pep
LGKQFQILSITHGRHRHAHTHSPLCLCLCLSLPLSLSPFLSMVCSAVEQRQQLKANSCRIFLELAQQPPSEARGRPQQSWPPAGEERTDTRGKSRRRWVGGGGGGGGKRNSVRAKGKKASTWHQSRPELYLSAARFQGRTGEGKRERARIPKTLVPN

SEQ ID NO: 210600 - protein, 76 aa, Zea mays
  Clone ID: MRT4577_123665C.1.pep
NEPTITGDGGATTASHDTFADQNILPNKMRQSRPIPYWIRMRTDHTIQYDDQRRDCRHTKLPLLSIGIGRVLPPEA

SEQ ID NO: 210601 - protein, 65 aa, Zea mays
  Clone ID: MRT4577_123666C.1.pep
LKPLQLFWWRAQKLKTPLVGGRGKGKGKGNPKAELPQRPKPLKPETFHWRNRAKGCFNQPDTLHI

SEQ ID NO: 210602 - protein, 262 aa, Zea mays
  Clone ID: MRT4577_123667C.1.pep
MALYLLFESASGYALFHAHGIDEIGQSVDAVRSTVLDLKRFSKAVKLAGFTPFLSAVDALNQCNAISEGIMTDELRNFLELNLPKVKEGKKAKFTVGVMEPKVGSHITEATGIPCQSNDYVQELLRAVRLHFDQFIEQLKPSDLEKAQLGLGHSYSRAKVKFNVNRVDNMVIQAIFLLDTLDKDVNSFSMRVREWYGWHFPELVKIVNDNYLYAKLAKFVVNKSDLSEKDIPALADLIGDEDKAKEIVEAAKASMGQDLFTW

SEQ ID NO: 210603 - protein, 601 aa, Zea mays
  Clone ID: MRT4577_123668C.1.pep
MAQIPNLDNAPLNLAALREQSQKDLFGILKNIRGKKCLVIDPKLAGTLSLVVQTSLLKEYGAEVRILSPEPLQTECPKIVYLVRSQLRFMKFIASQIKNDEPKGLQREYFLYFVPRRTVACEKILEEEKVHQKLTFGEYPLYLVPLDDDVLSLELDHSLQECLIEGDTSSIWHVAKAIHKLEFAFGVIPNVRAKGVASTKAAELLNSMQLEDPVNMDDMGIPEINTVILLDREVDMVTPMCSQLTYEGLLDEMLQINNGSVEVDASIIGAQQDGKKVKVPLNSSDKLYKEIRDLNFEVVVQVLRQKATSIQQDYAEVKSTNTQSVSELKDFVRRLHSLPEIARHVHLAQHLQSFTGKPSFHARLDIEQTILEVQNFEICFEYIEEMIHKQEVIENVLRLLVLLSLTNAGLPKKNFDYMRREILHSYGFEHMHLLYNLEKAGLLKRQESRSNWVGITRALQLIVDVNDTANPTDISYIFSGYAPLSIRLVQHAVRSGWRSIEELLKLLPGPHLDLKRGGLTINSSPEVHPGLGAQQSIDRVGHRSLVLVVFIGGVTFAEIAALRFLSAQEGMGYDFLVATTKVVNGNTILRPIIANSKEGMM

SEQ ID NO: 210604 - protein, 59 aa, Zea mays
  Clone ID: MRT4577_123669C.1.pep
APLSLLLVLSTFLPTTLMFGFSWLFCPVVGACNWFGGLGLWDYPSKKKKTLIWLFKKRR

SEQ ID NO: 210605 - protein, 63 aa, Zea mays
  Clone ID: MRT4577_12366C.1.pep
ARSEVEDVHETSARALWNLAFYSGNALRIVHECRVPVLVKICLSSQAKMARLMSALALAYMFD

SEQ ID NO: 210606 - protein, 90 aa, Zea mays
  Clone ID: MRT4577_123670C.1.pep
FSLVVCLAALAPLPACPLVWRLRRCRCCWCSALPCFLLARWWCCPSCRLSAGVGGARAPWRGPGPPRVGGFGPFSLPPPTRGAAAVCPFM

SEQ ID NO: 210607 - protein, 89 aa, Zea mays
  Clone ID: MRT4577_123671C.1.pep
ILQVLYAFKRIKLKGFNENQFAPRPLGFPSTNPLNRTPRYIGPYEINETCGPVAYQLKLPSHMSAIHDVFHVSPPRKCVRLPTEVLPKP

SEQ ID NO: 210608 - protein, 124 aa, Zea mays
  Clone ID: MRT4577_123672C.1.pep
QTRRNSDPSQLGGHEAAPEAEGCLASRPQLLPRCGWWPAVQPLSPISAGWPTAGRAQEAGRGSPPLLLSLRRQEDEGEEHKSETPLPPHLEWLRGGTVVAFWLQARPDPQRPVRYPAAMAVGIM

SEQ ID NO: 210609 - protein, 222 aa, Zea mays
  Clone ID: MRT4577_123673C.1.pep
MVRKKRTGPGGSGETSGESSGASGQGSSQRPERTQQPGAGRGWVPQQGGRGGGQHQGRGGHYQGRGGPGPHHPGGLPEYHQREYQGRGGEYQGQYQGRGGARSRGGISQPYYGGHRGGSVGRNVPPGPSRTVPELHQAPYVQYQAPVISPSPSGPGSSSQPMAEVSSGQVQQQFEQLAIHGQSSMSQEVQVAPASSKSVRFPLRPRGTYGDRCIVKANHFLL

SEQ ID NO: 210610 - protein, 39 aa, Zea mays
  Clone ID: MRT4577_123674C.1.pep
SDINEKSNRARRHRSWRRAQCHVGATASDCASAARTSAP

SEQ ID NO: 210611 - protein, 180 aa, Zea mays
  Clone ID: MRT4577_123675C.1.pep
TPPEQIYATPCEFCPGCDSSDCKDEAWEPKPKDRRIQRSPQGTKIKALYHLADINIGVQPTGPKYPSAAEHTPTDFLHLAHGSRACRLPTSPRSSSHARHARSRRRGLLPNLAPTQAINPAAQSPGRILLPTRRRPPPAGAPQCANKKEEKYLLFVAGVHRVRGQSGGLTLTQISRIRRR

SEQ ID NO: 210612 - protein, 70 aa, Zea mays
  Clone ID: MRT4577_123676C.1.pep
LLRVGQHGSLGGQAAKKGFELLPSKIGLDRMFQRNTHSGRGTIPPTPAGRGYLQWCNLANKIGLGDHVIS

SEQ ID NO: 210613 - protein, 109 aa, Zea mays
  Clone ID: MRT4577_123677C.1.pep
ETLCDGCRKSPGLRIARGYPTTCPRRNRRSRTPAVSRTGYTAHDGPPTGICWYLTQSGLSLSSIVWNGVGTVSSDLPSMPTAGVTVVRRVRWYPLMAADLDESRLQLLK

SEQ ID NO: 210614 - protein, 94 aa, Zea mays
  unsure (1)..(94): unsure at all Xaa locations
  Clone ID: MRT4577_123678C.1.pep
ESPRGCRRFGTRHQPTSKNSQSSRVRANMYGRGXGREGLXKGESKRNRKVLCDIMQGITKSEMRRLRRRXGCERAFXGLMYEETRGGVWIWVEN

SEQ ID NO: 210615 - protein, 43 aa, Zea mays
  Clone ID: MRT4577_123679C.1.pep
YPEHIYKFCKRRLPSMRGLSALIMYSWNSGPVSKILKLHFVRH

SEQ ID NO: 210616 - protein, 47 aa, Zea mays
  Clone ID: MRT4577_12367C.1.pep
SVLQIKISIGCMYQFSFCGPCHVLCDAYHYLGGCIAQIIFKKPPSAW

SEQ ID NO: 210617 - protein, 254 aa, Zea mays
  Clone ID: MRT4577_123680C.1.pep
MARDDGFPVWEAALLAGVAAVFAAGLAGVYISMPRSDYSFLKLPRNLQELQVLTVHLEGYSSDYTIQVLVGYCAVYIFMQTFMIPGTIFMSLLAGALFGQLGGLALVIFAATAGASSCYFLSKLVGKPLVFSLWPDKLTFFQKQVAKRREKLLNYMLFLRVTPTLPNTFINFSSPIVGVPYHTFFFATAIGLVPAAYVTVRAGIALSDLRSLNDLYDPQSIAVLFLIGLVSVAPTLLGKNEKPTSASDMAANTN

SEQ ID NO: 210618 - protein, 55 aa, Zea mays
  Clone ID: MRT4577_123681C.1.pep
PAGDPSGRAALGVHDAAYEDTAGKTPASADPVSDKGLRPAIGESLGTPVASATAV

SEQ ID NO: 210619 - protein, 77 aa, Zea mays
  Clone ID: MRT4577_123682C.1.pep
GSSSPIEGVPRGRQRHVSMPEDLDPDRCCPTARGLLRSFFSSVKPCWRNWVVLFTCGKWLGLLLVGFYGCLFMSCVK

SEQ ID NO: 210620 - protein, 238 aa, Zea mays
  Clone ID: MRT4577_123683C.1.pep
PAVSRYQKKEFHDETCRKIKALHLYDCLRANKATSAWGVEARVPFLDKSFISVAMDIDPEWKMIKRDLGRIEKWVIRNAFDDEERPYLPKHILYRQKEQFSDGVGYSWIDGLKDHASQHVSDSMMMNAGFVYPENTPTTKEGYYYRMIFEKFFPKPAARSTVPGGPSVACSTAKAVEWDASWSKNLDPSGRAALGVHDAAYEDTAGETPASADPVSDKGLRPAIGESLGTPVASATAV

SEQ ID NO: 210621 - protein, 75 aa, Zea mays
  unsure (1)..(75): unsure at all Xaa locations
  Clone ID: MRT4577_123684C.1.pep
HXXTTQTTQLSXSFKLDYXXIXXIPVXXVRYMXXHRXLTVIXXXRXKTLISSSNXYCXFLXTILILVTXNNLFQL

SEQ ID NO: 210622 - protein, 591 aa, Zea mays
  Clone ID: MRT4577_123685C.1.pep
MCGILAVLGVAEVSLAKRSRIIELSRRLRHRGPDWSGLHCHEDCYLAHQRLAIIDPTSGDQPLYNEDKTVVVTVNGEIYNHEELKAKLKTHEFQTGSDCEVIAHLYEEYGEEFVDMLDGMFSFVLLDTRDKSFIAARDAIGICPLYMGWGLDGSVWFSSEMKALSDDCERFITFPPGHLYSSKTGGLRRWYNPPWFSETVPSTPYNALFLREMFEKAVIKRLMTDVPFGVLLSGGLDSSLVASVASRHLNETKVDRQWGNKLHTFCIGLKGSPDLKAAREVADYLSTVHHEFHFTVQEGIDALEEVIYHIETYDVTTIRASTPMFLMSRKIKSLGVKMVISGEGSDEIFGGYLYFHKAPNKKEFHEETCRKIKALHLYDCLRANKATSAWGVEARVPFLDKSFISVAMDIDPEWKMIKRDLGRIEKWVIRNAFDDDERPYLPKHILYRQKEQFSDGVGYSWIDGLKDHASQHVSDSMMMNAGFVYPENTPTTKEGYYYRMIFEKFFPKPAARSTVPGGPSVACSTAKAVEWDASWSKNLDPSGRAALGVHDAAYEDTAGKTPASADPVSDKGLRPAIGESLGTPVASATAV

SEQ ID NO: 210623 - protein, 95 aa, Zea mays
  unsure (1)..(95): unsure at all Xaa locations
  Clone ID: MRT4577_123686C.1.pep
MALEKKQSYPMRETNVQNLVLNISGSXSADRLTRAAKVLEQMSGQXPLCHKARYTERTFAIRTTENIACYVTARREYAMQMLESGSNVKDYYLMM

SEQ ID NO: 210624 - protein, 114 aa, Zea mays
  Clone ID: MRT4577_123687C.1.pep
GAGKWKGPTEKNPQKPPPQMPQIQRENKSTSKRANRWKRQTVQANSGIPKAAKGGKAARQKRKGSPKVLQPHPVIKGIDNQKRNTPKQRGKWGPTKRKPQKAPPPEKKQQKKAP

SEQ ID NO: 210625 - protein, 64 aa, Zea mays
  Clone ID: MRT4577_123688C.1.pep
PLPHLLLDFLSLGCPFFFCSPRKGPPPSQSCPWFSIKAPPMGAILRLFYMWEGRLCSFFPLDVG

SEQ ID NO: 210626 - protein, 73 aa, Zea mays
  Clone ID: MRT4577_123689C.1.pep
MVSDYSVAVLAAAMQLKRRVLSLSGCMKVTQKSVPFLGSMSSSLEALNLQFNFIGNHNIASLEKQLWRCDILA

SEQ ID NO: 210627 - protein, 61 aa, Zea mays
  Clone ID: MRT4577_12368C.1.pep
NNGRILASGVGIRIVDIAPPQLSWHSIIVMCPAVDISYSYEHFKAYFEAFPLLDGKVRLDS

SEQ ID NO: 210628 - protein, 97 aa, Zea mays
  Clone ID: MRT4577_123690C.1.pep
KNASSVPHAQPSPPSVAPELAPTGRSHAQGWKSSNPNNKTNRLPAPSYPPPRAQGPEVSQSPRQTGTINYTHHAPPPFPQGHPSFPVHSSSPSRASS

SEQ ID NO: 210629 - protein, 90 aa, Zea mays
  unsure (1)..(90): unsure at all Xaa locations
  Clone ID: MRT4577_123691C.1.pep
KKNNVEGQEVXATXEETKKTPLVTRNLKKPKEGRPLPPPIKNHFASGRFLEFFFSPPEKCAQIYGYILEGKKFYFYIKNLQRKKGKSPVP

SEQ ID NO: 210630 - protein, 30 aa, Zea mays
  Clone ID: MRT4577_123692C.1.pep
NLFRTCHYKRDLNTRWFPWCLTSALHLQFF

SEQ ID NO: 210631 - protein, 34 aa, Zea mays
  Clone ID: MRT4577_123693C.1.pep
EATISLLLVIDLEVLEHFRHHIYLLAHNIRSTKV

SEQ ID NO: 210632 - protein, 306 aa, Zea mays
  unsure (1)..(306): unsure at all Xaa locations
  Clone ID: MRT4577_123694C.1.pep
MELPYVTLDVFTRTRFAGNPLGVRTIPASGPKPTQAQKQSIAREFNFSETIFIHDVADPATNTTRTIDIFLTTAEIPFAGHPTIGGAVTLLSQGVTQIITKAGLIPVTPTGPDSVSIGIPHNVHLHATSLASYPGLEPAAHLQRNETIRQLELAAPVFSLVKGMTFVPIELPSLELLAAVNVSSMEFKADNFLXPTGSKALSXFYHVITXLDHGRRRAGXQLRTRMMAHDLEDPATGSASCCLAAYMSIHGADKQTTQTRRYEFTQGVEMGRESFIVVDVSVKDGALDTVTLAGSAVQVMRGHVTI

SEQ ID NO: 210633 - protein, 62 aa, Zea mays
  Clone ID: MRT4577_123695C.1.pep
SHPSGGKVTVKQASQGMYTKTILGPGGNLKARVPYNCIVVQNYRFLKTLRRLIQSEEKMETS

SEQ ID NO: 210634 - protein, 111 aa, Zea mays
  Clone ID: MRT4577_123696C.1.pep
LFVGCKFVLRFPFPYFHLGPVFWACILGGKGKRTLPCKHSSPRSCCRYGSCTCVVTAYKRGKVVRSDGIVVGVMLPFDQCTCIGSPENVYWPAPHSIVDNIPAQALFWDVK

SEQ ID NO: 210635 - protein, 104 aa, Zea mays
  unsure (1)..(104): unsure at all Xaa locations
  Clone ID: MRT4577_123697C.1.pep
MDTHIGSVNGAASNQTVXGCPASADXDPMASTXAPGLTSVAAGXASLGXHLARRXVQVGVNELFAVXPGDFKLTLLDHLIAEPALRLVGXCNELNAXYAADRYA

SEQ ID NO: 210636 - protein, 53 aa, Zea mays
  Clone ID: MRT4577_123698C.1.pep
GPSRPAGTRVYYSCLRRTRTDTNSPVGFILEQPLQHQIRRPLLRCSASELWHT

SEQ ID NO: 210637 - protein, 71 aa, Zea mays
  unsure (1)..(71): unsure at all Xaa locations
  Clone ID: MRT4577_123699C.1.pep
EIGSVPRTLQAETDADARGGITHLDYHDSRGFSMXWPSXATLSRACHSAATCPSHSLEEAHRPLVPQATHM

SEQ ID NO: 210638 - protein, 65 aa, Zea mays
  unsure (1)..(65): unsure at all Xaa locations
  Clone ID: MRT4577_12369C.1.pep
XKKKKKKKKKKKKKKKKKKKKKKKKKKKKKKKKKKKKKKKKKKKKKKKKKKKRGGAVLGEKNFIG

SEQ ID NO: 210639 - protein, 76 aa, Zea mays
  Clone ID: MRT4577_1236C.1.pep
ISMAARVSASQAQACTKQRAATNRRTARRRTGPLTRQMAQRHTHDHLLHGSGSSGVNCRAEAECGPSQASDPHGSQ

SEQ ID NO: 210640 - protein, 69 aa, Zea mays
  Clone ID: MRT4577_123700C.1.pep
HVEQEPPLRRFLSHGRDPADQSSEISPQPRGHLPFTFMWNEPSFPLIVNLLDLFFLLIFFSHASAYAWV

SEQ ID NO: 210641 - protein, 157 aa, Zea mays
  unsure (1)..(157): unsure at all Xaa locations
  Clone ID: MRT4577_123701C.1.pep
KRGCDADRQQVLELPAIDIVAQDAYDHNVLXNELQTVPMDQASSSHVXLFYRLSLLHLYHIFLFMIXIIIAVLILIKAFLERATPDFRLSLCLIPEHVFMLEYCNVLISLSHYLQTARFSLVXDETVENRHISHIVHSXFDIASQSYTIHVLSLTYQ

SEQ ID NO: 210642 - protein, 121 aa, Zea mays
  Clone ID: MRT4577_123702C.1.pep
FLGRSPSLPPYRLFPSAEKLPCSLRLLRLSSSPASAPSGKRPESHTPPSFLRRIFVWAARLCPRVSCGSVVVACSRGSVDPAVVEPSYMCGSWFLPAMGGRRSRGSWGLEACWFWVLGLES

SEQ ID NO: 210643 - protein, 58 aa, Zea mays
  Clone ID: MRT4577_123703C.1.pep
SYTPIPMISFTLNRLIACLCSLHIEDALCTTLTLPYDAFSWNTTLRTYYHMLIAEDSI

SEQ ID NO: 210644 - protein, 395 aa, Zea mays
  unsure (1)..(395): unsure at all Xaa locations
  Clone ID: MRT4577_123704C.1.pep
PPPPALAGSAAQFRGQAQLPRFAAPRRYDLRLRPDLVTCTFSGTAAVTVAVSAPTRFLVLNSADLSIDSASIRFRDLAPKEVVFFADDEILVLGFSKDLVLGEGVLSMKFNGTLNDQMRGFYRSKYQYKGKMKNMAVTQFESVDARRCFPCWDEPAFKAKFKLTLEVNVGMVALSNMPIANQTVAGPIRTVHYVDPPLMSTYLVAIVIGLFEYIEGVTPEGTKVRVYTQVGKSSQGKFALDVGIKSLHLYKDYFGTPYPLPKLDMVAIPDFAAGAMENYGLVTFREVALLFDEESSMESSKQSIAITVAHELAHQWFGNLVTMEWWTHLWLNEGFATWMSNLAVNSFFPQWNIWTQFLDDTTAGLKLDSLEESHPIGVEIHHATXVDEIFDAISY

SEQ ID NO: 210645 - protein, 195 aa, Zea mays
  unsure (1)..(195): unsure at all Xaa locations
  Clone ID: MRT4577_123705C.1.pep
ISDMGETMGRRTVSGLLVTKGGSILVFREESPRHKATACCTRLWCSSKLFPNKDTNTRRASRETSALQRSQVSRKSNWMSHQGSISYDRSTSRNTASTFGETHNKPREKENPGCDLPSRLKERINTSRKSSLGGLGSPNKSSTNTSSSSQSVSRSVCRPASRMRKDGGRGAESMRVHRARDSGGSSXXRCVDKKF

SEQ ID NO: 210646 - protein, 52 aa, Zea mays
  Clone ID: MRT4577_123706C.1.pep
KIGTICESITSLNVDLSSTASIKKSPSLLSAVSTSSASRAFGTSFQDQNPTG

SEQ ID NO: 210647 - protein, 206 aa, Zea mays
  unsure (1)..(206): unsure at all Xaa locations
  Clone ID: MRT4577_123707C.1.pep
GYLEAGRGRGRLSRLDRIPSFLSSPRTAERDEEERPGATEKASTSIWLCWFSFVRALFHSCKQISAAEYLIWVKPWEGEQSVAFLSPKEAQFLSSGRKAHATRPPHVVPASGAAVSFSRTKTRIHAGHPGKHRLFRDHKCLGNPTGCPIKEVFLMIEAPVGIQQVLLVRLTTNQEKKKIXGCDLXGSVERKDQYIQEKLIGWTGKS

SEQ ID NO: 210648 - protein, 48 aa, Zea mays
  Clone ID: MRT4577_123708C.1.pep
MIFCYASVSKSMYTGTLKLGRPRIYVAVNSFGFTILFEPLYTKRIILD

SEQ ID NO: 210649 - protein, 55 aa, Zea mays
  Clone ID: MRT4577_123709C.1.pep
VHQQLPKQHHKQTNSVTYKFFNSLFVFWLCACVLVGGCFFWGGLGILNFPIRKLD

SEQ ID NO: 210650 - protein, 113 aa, Zea mays
  Clone ID: MRT4577_12370C.1.pep
WNLSLSKKETRTILKPINHSPTACLNPMCVTLYNPRSCAPILLQFYSPEKNGERLLSLALLGRHYLIPPIKQGSYPRPLRQNSIKCKPVPAEGDSCCYYLCDEGGWGPYCHPR

SEQ ID NO: 210651 - protein, 58 aa, Zea mays
  Clone ID: MRT4577_123710C.1.pep
LIAFENKSPTGISCQHVAVYTKLCVHSGHEHICMSSVSGWRRACNITLNVATIEVIPW

SEQ ID NO: 210652 - protein, 146 aa, Zea mays
  unsure (1)..(146): unsure at all Xaa locations
  Clone ID: MRT4577_123711C.1.pep
YHEHSVTHQAKHIIRNLTAVATKILFSLLRFLSCMLSASNALIIADCXLAPRSIITQCTSPVTLMCLXHASVQAYRLXQQAIAASVLHQRIFQLQQQSLAHLTIQSIATEQEQQLVPAMSELTMVYNAVYFQQKLLAXKPLALANV

SEQ ID NO: 210653 - protein, 187 aa, Zea mays
  unsure (1)..(187): unsure at all Xaa locations
  Clone ID: MRT4577_123712C.1.pep
MMARRALVAIAVLAAAAALLVAAEAQQAPAQQGHQTERISGSAGDVLDDDPVGRLKVFIYDLPGKYNKKLLKKDPRCLNHMFAAEIFMHRFLLSSAVRTTNPEEADWFYTPVYPTCDLTPSGLPLPFKSPRMMRSAIELIATKWPYWNRSEGADHFFVTPHDFGACXHYQEEKAIGRGIFPLXQRAT

SEQ ID NO: 210654 - protein, 53 aa, Zea mays
  Clone ID: MRT4577_123713C.1.pep
AALFLKAMGYPSSTRIYVVSGEIYGVRSMDALKAEYPNVYTHYSLATVNELES

SEQ ID NO: 210655 - protein, 75 aa, Zea mays
  Clone ID: MRT4577_123714C.1.pep
KKKKNKKKKRQKIKKKWGQNLREWGSRTAGLPGHVPWLASPIFLSPAAFFHSLVLLFPCLLPDLSLRFPVLFPRS

SEQ ID NO: 210656 - protein, 46 aa, Zea mays
  Clone ID: MRT4577_123715C.1.pep
SNRVWNVESCPKRQGGGPSTGYTFKFGVSKLGFVRPGGGGPPLVKD

SEQ ID NO: 210657 - protein, 61 aa, Zea mays
  unsure (1)..(61): unsure at all Xaa locations
  Clone ID: MRT4577_123716C.1.pep
DGFVSLLSSDGPPKDDFRLPPDXTLVAPIKEGFENGKDLVVTVPFSMGEEQICPFKDVGPQ

SEQ ID NO: 210658 - protein, 116 aa, Zea mays
  unsure (1)..(116): unsure at all Xaa locations
  Clone ID: MRT4577_123717C.1.pep
LGMSRQLPFGGGGXRYFYPPYFFARGAAPIGTMFPGFLAGGRALGPPSLFPAMVFSFPSNPMGGAPPSGMGPAPVFXGAGDGPLAQWWGYGFVIPVGKIIIWPGGGGFWWKKTGVW

SEQ ID NO: 210659 - protein, 151 aa, Zea mays
  unsure (1)..(151): unsure at all Xaa locations
  Clone ID: MRT4577_123718C.1.pep
RTRAIAAALGPDDVRLCVLXASVRHVLKLEPGYYGNAIFPVKVCAPAEKVAGSSVVELVGMVRDAKRRMAEECLRWAEGRTGGVDPFQMTFNYESVYVSDWSKLGFADVDYGYGTPMSAGPLVNCDLIASVIVMRAPAPLAGTRFLASCVT

SEQ ID NO: 210660 - protein, 58 aa, Zea mays
  unsure (1)..(58): unsure at all Xaa locations
  Clone ID: MRT4577_123719C.1.pep
HQYCYSICSIESYMETCITQSQPTRDYSFLFTTLNQXTXFTPVHPKHGIAILGIEPQS

SEQ ID NO: 210661 - protein, 69 aa, Zea mays
  Clone ID: MRT4577_12371C.1.pep
WVYPLRIIVDSRTWLVVDQWGCGGIPRPWPRRVNRCSCCSQHPRPHVIRSPRTRTPETSRTRTRPEGEG

SEQ ID NO: 210662 - protein, 67 aa, Zea mays
  unsure (1)..(67): unsure at all Xaa locations
  Clone ID: MRT4577_123720C.1.pep
SGEDLFAPGGGSGVFQGHLGGGMGWAPVRGPFFVDEKKTVKKKKPVREEREDRFKKNNLXXXRAAAG

SEQ ID NO: 210663 - protein, 41 aa, Zea mays
  Clone ID: MRT4577_123721C.1.pep
PWFGKKHGSILDKRGALSFCGAPFPPEEGGGGKKKKKRGEG

SEQ ID NO: 210664 - protein, 89 aa, Zea mays
  Clone ID: MRT4577_123722C.1.pep
DLEVVGFSFPFPFPPNSSIKCCKIPLMLVPFFNVGFTTPRARHRAVERKSRACTVAPCWAHANQPGRLRGRHGGQLGVVVRGSVQDGRQ

SEQ ID NO: 210665 - protein, 129 aa, Zea mays
  unsure (1)..(129): unsure at all Xaa locations
  Clone ID: MRT4577_123723C.1.pep
PAENKAESEHVTCAFTTARTRLTVLPVVXDGIALVGNGAGXGTGMRGGAVGFSQPDGATGSACGRGGVLLRGFGRACGSGFHNVGTRIPTILARRHRVDGVRGGRLXDIVVAMQRAARQVGXAVRVVVA

SEQ ID NO: 210666 - protein, 103 aa, Zea mays
  unsure (1)..(103): unsure at all Xaa locations
  Clone ID: MRT4577_123724C.1.pep
RGPTITGELGRYHMIPNTGRXSEHHLKFPTSGPYDMLCHVYTAISDPVTEVRIFVGREEKKKAHLLSAEDLEPSLIESKTIPDPVDXMPDDGDERAIIPDPHA

SEQ ID NO: 210667 - protein, 77 aa, Zea mays
  Clone ID: MRT4577_123725C.1.pep
LEENQAEQKHNWAYNGSFDLQGSRLQSTRSIEHITIFWLKKPLSQLSFYRRNLLYSLNKMLPIRSDSGTKLRGGPQH

SEQ ID NO: 210668 - protein, 41 aa, Zea mays
  Clone ID: MRT4577_123726C.1.pep
VSNAANCCLNCKHGFCLGTVWVIYPIPSLTLLVKGCRSPGS

SEQ ID NO: 210669 - protein, 81 aa, Zea mays
  Clone ID: MRT4577_123727C.1.pep
ENPARPTHPPTHPPTRISITTPPTSKRALFNSKTHHPQTPTHNSIYTSYLYPHTYTHQNIPYLIPLLHIYTSYHPNTTHHQ

SEQ ID NO: 210670 - protein, 204 aa, Zea mays
  unsure (1)..(204): unsure at all Xaa locations
  Clone ID: MRT4577_123728C.1.pep
PKAPKKIKFHKAPPPWVGPFKGFKXLXQLGRDKKLSYXRVVFPRNLRPXSFSQVDPEDSPFSVGGPIGKGPPPGPFFNPFQNPPPWVFFFCQNLQKVXNQPPQPFLGSPQKNPAPPALGFFFFFKGLGGKNKRGFSFSPVFFSLFFWGGQNSFWGPPTPFFFPPRGTGPLKGVFFRGGPPNFGGFPGPGEKEFNPPQKKKGVFF

SEQ ID NO: 210671 - protein, 52 aa, Zea mays
  Clone ID: MRT4577_123729C.1.pep
YFLCIDSLQCAENPCIHAYRLQQAIAARKIPLSPLLFQQWPALFFVQGLVPA

SEQ ID NO: 210672 - protein, 66 aa, Zea mays
  unsure (1)..(66): unsure at all Xaa locations
  Clone ID: MRT4577_12372C.1.pep
MANESQLAVPCRVRAHARSSSSSVRQISPLFPAAAVASDSGDTSVPSAILRAFXSVRQCRCGALRV

SEQ ID NO: 210673 - protein, 117 aa, Zea mays
  Clone ID: MRT4577_123730C.1.pep
NERGGNKGPFTTPVIFGKLGKKIPWVHLPKGKGGFYLLFGAELNSPRGDFPPPRKKKASPRPGKQKVFVSPGRGLLGIQVGGKGAPSPSFFGTRGGGKGAEKPPDPLGFFPRGLFRK

SEQ ID NO: 210674 - protein, 56 aa, Zea mays
  Clone ID: MRT4577_123731C.1.pep
FNHNSGRPQLMRTPTRYQVAAALLDPRYSFLYHGRSTLGLAVVIAVQRLSSLDANH

SEQ ID NO: 210675 - protein, 87 aa, Zea mays
  Clone ID: MRT4577_123732C.1.pep
YLRRSNSFFCFGSRRGPFAKFRYHGRFDVTRPVSQNLQLFSLWHMLIWGGRSSSFSLFALSTQRVAVVGVNKANGVEHSVQSLLSPA

SEQ ID NO: 210676 - protein, 42 aa, Zea mays
  Clone ID: MRT4577_123733C.1.pep
SILQYTEKMVAYTSYEKNKWNETINLTHTALLKMWTFSEKKQ

SEQ ID NO: 210677 - protein, 164 aa, Zea mays
  Clone ID: MRT4577_123734C.1.pep
MGATFQLFKMVTLTEVEDEHFQHGQAGPDVEEDDEDYSDTNSEISNESDYDPSDETLAERLYALRDIVPPTTRSWISGKASTVSNAAWSVLSFSGKGAWVITTSALFFGVPFALSFAEDQQLTAMEQEYNMRQSGSDLLTAGSEQSTADQVGAALEGKPAQPSL

SEQ ID NO: 210678 - protein, 444 aa, Zea mays
  unsure (1)..(444): unsure at all Xaa locations
  Clone ID: MRT4577_123735C.1.pep
MIPREQPPGMFRPPNAFGAPPPFLPQPPPLQWQWQQPPPPPXALALACGXFWQRDNVRDHVRKLQQTIELSTALIKELEEIAAAGNPGDGATETRESASSSAELPWGSGDSSEDKRLGFVELARSMGISQDTHESMATDAANYLCHQLQHLLGPISSATSQSGPWEERSAMVRLTQKLQKYKRNKRWRQRRRKHVAELFQKERADYDRVDQEADEWRAKQIAKDIAKRRVESMQQIARKKTNEERKRLESELELALMVEKLQELRSIRVQKMKKQGHFLPEEDDKYLERVKAAVEEEERQAASAARTDAVKDAILTAEESRKPLQYTNSQEGGSEQPKSGPSEDEDQGDGGMSXEMTRQAKXEHEDEGHRFEGKGHGHHDPVSNLPFEFYHYYHGSDYDMGTLIEVRRMWDSFISPGGSRIPGHWVQPPPPADEVWASYLVQHK

SEQ ID NO: 210679 - protein, 60 aa, Zea mays
  Clone ID: MRT4577_123736C.1.pep
IKNKLRKMNKYVTVSTGCWYIFRFKSMQWTMSTSECSLKQAKFAASLQATTRVIILPEDG

SEQ ID NO: 210680 - protein, 46 aa, Zea mays
  unsure (1)..(46): unsure at all Xaa locations
  Clone ID: MRT4577_123737C.1.pep
PSEKPXXLYLNSRXRRRNXAFRHXXRVVAXRCXFALPXALALRARH

SEQ ID NO: 210681 - protein, 58 aa, Zea mays
  Clone ID: MRT4577_123738C.1.pep
CGASSKVCCPRVMWRLVKERSVFVSSPLFLQLSPINLLQRARLGLRPTCSCAVFSCTP

SEQ ID NO: 210682 - protein, 116 aa, Zea mays
  Clone ID: MRT4577_123739C.1.pep
TRPDSDFKRRLIKALTKPVARKEYYRLFDTVTIRTPLMKLRQVRNETKFYPTEEMGSSYLDHYPDLAEQIMNNGRRNGLALMRGFLFWLQNAVHEDQFKPWVDDSNKEHEVIYLVD

SEQ ID NO: 210683 - protein, 100 aa, Zea mays
  Clone ID: MRT4577_12373C.1.pep
GRARHFPRSDDDSVRHPSPGLFSPSPFPRTQLPRSPTTPPSTRSPAPPSTQAKLPLLDPELSSTSASPLRLSTGCRGVGIRPDFLLSLILSWLGVQAFST

SEQ ID NO: 210684 - protein, 128 aa, Zea mays
  Clone ID: MRT4577_123740C.1.pep
LSSSAGSKGLGRLPPSRPAGSQTVDGSEAVAAKSDAPEIGCQVPGSSPLHDKGSESSGSPVKDTPDAGIRLPGSDNSVMAFSALPLVDEAPGTSSRAADTPVPCDGNESKEDVPLDNAESTRKLEPNG

SEQ ID NO: 210685 - protein, 268 aa, Zea mays
  Clone ID: MRT4577_123741C.1.pep
MATSSCYCVSSHGHGLSRAGPARLRIASLHLHLVFPSTPSPRLSSRRIPASPDPPLDVAAGDATGEVDWPAPNDDQEDRDEGIGFQIQVSKVGKRNRRLVRARVRVHAPLEAVWATLTDYEGLADFIPGLSECRLLDRHDGFARLYQVGEQDLALGFKFNAKGTVDCYEGDIELLPAAGARRREIAFNMIDGDFKLFQGKWSVEEAGGENSEEQELETTLSYVVELEPKLWVPVRLLEGRICSEIKNNLVSIREQAHNRRIQRLQHEL

SEQ ID NO: 210686 - protein, 71 aa, Zea mays
  Clone ID: MRT4577_123742C.1.pep
MRLATTPALGKPASRTAKPAAAPKPKPAAAKPKAATAGASHPPYFEMIKEAITALKERTGSSLHCERLVCG

SEQ ID NO: 210687 - protein, 83 aa, Zea mays
  Clone ID: MRT4577_123743C.1.pep
AGGENSEEQELETTLSYVVELEPKLWVPVRLLEGRICSEIKNNLVSIREQAHNRRIQRLQHEVTFPAAAGYTIITTSRRHPIS

SEQ ID NO: 210688 - protein, 60 aa, Zea mays
  Clone ID: MRT4577_123744C.1.pep
LLLFLSVLYEGTRLDVPCNGRTASFNLTTPHITRPILHLLLIWICKGKSYDGTLGKTAHF

SEQ ID NO: 210689 - protein, 169 aa, Zea mays
  Clone ID: MRT4577_123745C.1.pep
SDHSSSSSRHPTLSQLPVQRNNNQPQQQYRQANDNMCSTCGNTRHYAKNCPRNQQRQGQNSNQNQGKRQNAQVRQGRLNFTTMDDIPEGAPVLTDCNLADGEYILVSEQGVAQEVAQDPAPEPAVEDLPASALEGSLEDMVAGVTWPSILPPGWTVEWDPTSVEEEHEE

SEQ ID NO: 210690 - protein, 57 aa, Zea mays
  Clone ID: MRT4577_123746C.1.pep
GTFTSSFYFEWTSVLSGLEVTIKCCGSQCEHAVQHQLECDISCCRTCVVSLVGVSNV

SEQ ID NO: 210691 - protein, 213 aa, Zea mays
  unsure (1)..(213): unsure at all Xaa locations
  Clone ID: MRT4577_123747C.1.pep
MLSTAASSAGLPGPRYSXLPPQPLQHLXXSPXSPRHPXTXRPXGPPASAFQPFPXXSXPGTPXXPXPHGXLFYPPXXXAPPPXPPXPPPPPPPXXPPXPXPPPXPPPXXPPPPPPPPPPPXXPPPPPXPPPXPPPPPPPPPPPPXLFFFSFPPPFPXXFFFPPLPPPPPPPXPPPPPPPPPPPPXXPPXPPPPXXPPPSPPPXPPPLPPXPPT

SEQ ID NO: 210692 - protein, 313 aa, Zea mays
  Clone ID: MRT4577_123748C.1.pep
RSKKNHTNMVTLENLRRIYGHVVERATLARDLLAPAAGQLSGNLHSRCILAQQLDLSFPEKDDDLRADLEKFGAIEAIALCRHLFMAVIVFRDEASVPVAFRRQEEISSGLYSAVPPPHLALSTSFIHPNSIKVNLYSNTSTASSGDSTTAKHSTEPTTTEAATSIGQSMMPLWMESRPATVFQNYLGDGSRFVPSRRSQIYGPTLGADGRLWMEGFNIVQCGNYAQSVPTAIPVAQVPQLLYQSEDELAARRTRSYITISSSVGSPINPLQRSPIRATPLRVGSYPRSTEVSVCTAVNIGSAFPAIMIRARK

SEQ ID NO: 210693 - protein, 70 aa, Zea mays
  Clone ID: MRT4577_123749C.1.pep
QDPHIRELLQGLLSSLGTSETIVALHGPHECYVVIFNSSYDRWQKYQKNISVYRSIEARLTLVSVLRYLT

SEQ ID NO: 210694 - protein, 116 aa, Zea mays
  Clone ID: MRT4577_12374C.1.pep
FRLRNLYSTLGQHLIENSDCFHPVQNVAKALPLAPPTPFATLLFSQWSEETSALVAATFEKDGTPQCSPDQDRAEAKTNGGGGAGGSCCCSRRRACAGERDGHWPRRLEAVHLPGR

SEQ ID NO: 210695 - protein, 74 aa, Zea mays
  Clone ID: MRT4577_123750C.1.pep
PIAFCETIIESLSLSFVGLRLDNQAYLDLSSREKTDDSVAQQVADAALQNEANMNGATITPHVSCSRDCSLNLM

SEQ ID NO: 210696 - protein, 144 aa, Zea mays
  Clone ID: MRT4577_123751C.1.pep
DGKKVQERAAWGASDGGGNLVQDAVDYRGCRADKSSTGGWVAAALALGIELCERLATMGIAVNLVTYLTATMHLPSAAAANVVTDFMGTSFLLCLLGGFLADSFLGRYLTIAIFALIQAIVSTVLRSNSNDCSGMHAVTSAHGS

SEQ ID NO: 210697 - protein, 90 aa, Zea mays
  Clone ID: MRT4577_123752C.1.pep
GGLVRPAAPVVDGVLHQVAAAVAGSPCRPLLHLLPVLVNQRHASTQKQRAVSASNQQIIQHCMHIYAGTVYIYIYIYIYIYIYVLTVTTK

SEQ ID NO: 210698 - protein, 90 aa, Zea mays
  unsure (1)..(90): unsure at all Xaa locations
  Clone ID: MRT4577_123753C.1.pep
PSLKRHRXCCRDNIQGITKPAIRRLARRGDEKRISRLIYEETRGALPSFLXNDIRDDVTYTEHARRMTVTAMYAFYVLKGLGRTLYGFYG

SEQ ID NO: 210699 - protein, 95 aa, Zea mays
  Clone ID: MRT4577_123754C.1.pep
GWSRKWTKIQTFFYILWGGGGSTGTETGRWGPLFYNPKGGVSFGKKGPLEICQNHLPGGGATKRGAGKQGETPITQGGKGTTRGFLWGTSHGDSS

SEQ ID NO: 210700 - protein, 132 aa, Zea mays
  Clone ID: MRT4577_123755C.1.pep
MAQVVATRSIQGSMLSPNGGSVSTRSEKLLKPASFAVKVLGNEAKRSGRVSVRSRRVVDTTVRSARVETEVIPVSPEDVPNREEQLERLLEMQQFGDTSVGMWSKPTVRRKTKIVCTVGPSTNTREMIWKLA

SEQ ID NO: 210701 - protein, 61 aa, Zea mays
  Clone ID: MRT4577_123756C.1.pep
PSKTTARLIIFFRNQKVRFHVSSSLYSLLSSQVRLICSTTHVGSFLSFATLASSSNYVLFA

SEQ ID NO: 210702 - protein, 94 aa, Zea mays
  Clone ID: MRT4577_123757C.1.pep
FTYVSFPFPQAVSPKIQHAAEILCDMRRSIESLSGQGYSNGVIKWPKSPSEKVMKARKPSSQFGITESSSGSRNNDATWNGSSHSTKKFCDREE

SEQ ID NO: 210703 - protein, 65 aa, Zea mays
  unsure (1)..(65): unsure at all Xaa locations
  Clone ID: MRT4577_123758C.1.pep
FYLGGPIKKFFYCMAGEVKLGPFRGPPPFFYFIFFFFFFFFIFIIFXFFFFYLLNFLFIFILFIF

SEQ ID NO: 210704 - protein, 124 aa, Zea mays
  Clone ID: MRT4577_123759C.1.pep
TNTFNFPLISLSCVHFRPYWRCYFPNTQAIIYVVDSSDTDRLVTAKEEFHAILEEDELKGAVVLVYANKQDLPGALDDAAITESLELHKIKSRQWAIFKTSAIKGEGLFEGLDWLSNTLKSGSS

SEQ ID NO: 210705 - protein, 92 aa, Zea mays
  Clone ID: MRT4577_123760C.1.pep
QLLPFNLLVSFYPTAYLHLLIQRLFSEPAPSCRASFLSPLADPALHKAVCVLPRTPLWGAPLVALCPGCFHKPSFFRPCCAPPVVPSFSLHY

SEQ ID NO: 210706 - protein, 98 aa, Zea mays
  unsure (1)..(98): unsure at all Xaa locations
  Clone ID: MRT4577_123761C.1.pep
MATKNPILYTSCIXSCSHRDPIALNLPGVHYQDNPAHPTTHPHYQKIHPLQYIPPLLHGDIPLPDSLAISLHLEQKHPQHPLLPNQLTTNLLTLPVQT

SEQ ID NO: 210707 - protein, 49 aa, Zea mays
  Clone ID: MRT4577_123762C.1.pep
FFFFFFFFFFDERDPSSLFIQHTPQHKVYVEVAVMGCVDCVPVSPWWAL

SEQ ID NO: 210708 - protein, 116 aa, Zea mays
  unsure (1)..(116): unsure at all Xaa locations
  Clone ID: MRT4577_123763C.1.pep
GRXNPGPTHAVRLLRHYPCSPDLEVETQYEHVLRWNLLRGPRVTCSTRAIAFMTNAETTFDFTTEALRAVLRVEPVAVLGRMTNGPLPLRRSRDLQHITKEAITLNTGGVHLTHVG

SEQ ID NO: 210709 - protein, 104 aa, Zea mays
  Clone ID: MRT4577_123764C.1.pep
EPLYPTNDPAGNIPRTDDKRCTQNMPGLDHILMEQIRIPCDWVRSLELAILRFGDSPPGKHFYAVGAPPPTNWLGAGLLPCSAPWTMWGTPGNLSSSGYTPWAG

SEQ ID NO: 210710 - protein, 143 aa, Zea mays
  unsure (1)..(143): unsure at all Xaa locations
  Clone ID: MRT4577_123765C.1.pep
GLNAVSGKPICAVLAIFFELLGIYGEGKFAWKYGYPYLAVVLNFSQTWALYCLIQFYTATKEKLQPIKPLSKFLTFKSIVFLTWWQGVADVFLFSTGLFNGHLAQRFQTRIQDYIICLEMXXVAAVVHLKVVPAKPYRRXERN

SEQ ID NO: 210711 - protein, 118 aa, Zea mays
  unsure (1)..(118): unsure at all Xaa locations
  Clone ID: MRT4577_123766C.1.pep
SAHLKKLYFGWAPPGFFLLLTVAPPGLFNFIFGFPFFXLFPSHARFPFPRPPYTDRPFFFFFFFFFFFFFFFFFGSSRARSSSTAITFITRCAHHAYGENIVQSYTYHLVTHYYILGV

SEQ ID NO: 210712 - protein, 66 aa, Zea mays
  Clone ID: MRT4577_123767C.1.pep
HTHSCEVLPLKQDHLQPIPYSNSHKAKATNSLTPVTYSSPKTIHQQTRPHTISFMSRNSSMTQLAF

SEQ ID NO: 210713 - protein, 122 aa, Zea mays
  Clone ID: MRT4577_123768C.1.pep
SRTFYLATYLVMGKLEPGYSIHEKTIAHWEWRDGESGTYPPGNRPPKRVVCSRVLQTCSCGGGSVGMVDMCNRVKRSICHVVGDLQLGINQFGSPNFSDMKTGSLTLIVDNKRNKGWILKES

SEQ ID NO: 210714 - protein, 124 aa, Zea mays
  Clone ID: MRT4577_123769C.1.pep
LDYLVMIQHNINKASLTMNQLAAIGLNSKGFPPLLACRFYSQMVRAQLDYGLAISPLTTKFIHPLDTFQNQCIRRIFGGHSRSSVQVMLHLVNLPSMRTRVAVLQAQYLFRSTHLPHDTLLAHL

SEQ ID NO: 210715 - protein, 66 aa, Zea mays
  Clone ID: MRT4577_12376C.1.pep
KNYPRLKKTYFRPLYKKTNKILAKLSTRLSPLFSPGGGRIPNGVLQILTKKKSRAGGNKLSPVFCP

SEQ ID NO: 210716 - protein, 142 aa, Zea mays
  unsure (1)..(142): unsure at all Xaa locations
  Clone ID: MRT4577_123770C.1.pep
KKQGGKKPKRGGEEGKQGNLQKQGGRGKNTHPPAGGPKKQTEPREPTGGGGPPGRKQGGPGSKRSPPGPTWGENPAHTPSERREKHPPDRRNHPGAPVKEERTRGKXFRGNPGTKXTKREKRPPGGPPKTGPAPPGGPPIPI

SEQ ID NO: 210717 - protein, 89 aa, Zea mays
  unsure (1)..(89): unsure at all Xaa locations
  Clone ID: MRT4577_123771C.1.pep
RTLLDRLDRGILRGGSSLLYWAKTSLAMTQLRDIGRPTLMFMNTGELILNRANVNNHAKTVPSKLLDNAQIGNAESVTHXGKPSPAVVH

SEQ ID NO: 210718 - protein, 53 aa, Zea mays
  unsure (1)..(53): unsure at all Xaa locations
  Clone ID: MRT4577_123772C.1.pep
SLNQPCSPRRSTXPTPTPGGGPLRTNAMPPRKRXXHXHPXPXXTXNSQXXAEA

SEQ ID NO: 210719 - protein, 65 aa, Zea mays
  Clone ID: MRT4577_123773C.1.pep
CMRYSYDTGHTYGLDYINHATGLIKCIRAGSRGMFLFKILYDNKVCHHSGCSSNSIWMSGNVSQK

SEQ ID NO: 210720 - protein, 64 aa, Zea mays
  Clone ID: MRT4577_123774C.1.pep
DSRRVHRILFFFSSQNRFGSRTSGSSFVSLILRALYVSQEPGGRGTLFVPLDERAISTSSPQRT

SEQ ID NO: 210721 - protein, 88 aa, Zea mays
  unsure (1)..(88): unsure at all Xaa locations
  Clone ID: MRT4577_123775C.1.pep
AADNSLPSETPSTSAAAAAAATIAVGKNKRLYKGXMGGMKNTVNTFSKKDWYDIKAPPVFSVRNIGKTLVFRTQGTRIAFEGLKHRVF

SEQ ID NO: 210722 - protein, 144 aa, Zea mays
  unsure (1)..(144): unsure at all Xaa locations
  Clone ID: MRT4577_123776C.1.pep
KFNSPPIRPETAPAPNPXPKRQPPRPRKARNPPSSGVFWPCQTSPGPPNGRKTXFFGPPEPPPXGPPPRFPRKGFPPPPPPPKKTGGLPSXPPPPLKPPEKKPSHFNDPNSDPYFRNKYSPQSGYRFLRFANCPVLSPRGKKRK

SEQ ID NO: 210723 - protein, 70 aa, Zea mays
  Clone ID: MRT4577_123777C.1.pep
PPPAARKRQQGRRARQRTGRQNGRQIDSGGAGVPSEDSKQVGSNKLHRAPRNRSTANTWNNQASGTNVSD

SEQ ID NO: 210724 - protein, 318 aa, Zea mays
  unsure (1)..(318): unsure at all Xaa locations
  Clone ID: MRT4577_123778C.1.pep
MAATRRLSCFLLAVLLAGVAAATAFDEAAAAGFGLGHGARFARKHGRAAAEMPQPEPEPKPKPMPHPEPKPEPQPKPNPEPQPMPKPQPKSKPEPLPTPKPEPKPEPKPEPKPEPKIKPKPKPEPKPEPKPEHKPEPKPEPKPKPKPEPKPEPQPKPEPKPEPKPEPKPEPKPEPQPKPEPKPEPKPEPKPEPQPKPEPKPEPKPEPKPEPKPEPKPEPKPEPKPEPRPEPKPEPKPEPKXQTKPEPEXKPKPEPEPQPKPEPKPDPKPEPKPEPKPEPKPEPQPKPEPKPEPKPQPEPKPEPKPKPDPPHIPPAAIN

SEQ ID NO: 210725 - protein, 107 aa, Zea mays
  unsure (1)..(107): unsure at all Xaa locations
  Clone ID: MRT4577_123779C.1.pep
PPNCSLRPHIQRFAIANEGGRCGRWRSRSPKPFSRLFATKXEMRILXMAGLAASGKTTIXLYKLKLGEIVTTIPTIGFNVGPVNYKNISFTVWAVGGHDMTXPLWRH

SEQ ID NO: 210726 - protein, 121 aa, Zea mays
  Clone ID: MRT4577_12377C.1.pep
RRGGPTREKQVKQMLGLIGDGEFSTEKAEVFYEKRPLLISHVENFYRMYRALAARYDSVTEQLRKNIPSSLQSYGSFGVSESDSETQRSSSPESDVQENMPRQKQKPGPDFLDISAGSGVG

SEQ ID NO: 210727 - protein, 241 aa, Zea mays
  unsure (1)..(241): unsure at all Xaa locations
  Clone ID: MRT4577_123780C.1.pep
MAATRRLSCLLLAVLLAGVAAATAFDEAAASGFGLGHGGRFARKHGRAAAEMPQPEPQPKTKPEPHMQPLPQPEPKPXKPMPHPEPKPEPQPKANPEPQPLPKPLPKSKXTTHNTAERLPTXSPSSRARERKTHRRVSRLITCRSSRNGGDASPLLLSPRRASGRSXPLPPPSTKRLLPASGLATARVSXKHGRAAAEMPQPEPQPKTKPEPHMQPLPQPEPKPEPKPKPDPPHIPPAAIN

SEQ ID NO: 210728 - protein, 66 aa, Zea mays
  Clone ID: MRT4577_123781C.1.pep
TTAPDAINVHHDDMKLKHDIHTLDQQHSEGCYKVKYSILLNTLSAPHISETLLYTIRVRNKKKNFP

SEQ ID NO: 210729 - protein, 378 aa, Zea mays
  Clone ID: MRT4577_123782C.1.pep
MAATRRLSCFLLAVLLAGVAAATAFDEAAAAGFGLGHGARFARKHGRAAAEMPQPEPQPKTKPEPHMQPLPQPEPKPKPMPHPEPKPEPQPKPNPEPQPMPKPQPKSKPEPLPTPKPEPKPEPKPEPKPEPKIKPKPKPEPKPEPKPEHKPEPKPEPKPKPKPEPKPEPQPKPEPKPEPKPEPKPEPKPEPQPKPEPKPEPKPEPKPEPQPKPEPKPEPKPEPKPEPKPEPKPEPKPEPKPEPRPEPKPEPKPEPKPKPDPKPEPQPKPEPKPEPKPEPKPEPKPEPKPEPKPEPKPEPRPEPEPKPEPKPEPKPKPEPEPQPKPEPKPDPKPEPKPEPKPEPQPKPEPKPEPKPQPEPKPEPKPKPDPPHIPPAAIN

SEQ ID NO: 210730 - protein, 49 aa, Zea mays
  unsure (1)..(49): unsure at all Xaa locations
  Clone ID: MRT4577_123783C.1.pep
TDRHMEWGRYISREKGDHIGPLKLSLATGTLLLMQGTSIDXTKRAMPAT

SEQ ID NO: 210731 - protein, 151 aa, Zea mays
  Clone ID: MRT4577_123784C.1.pep
KPEPKPEPQPKPEPKPEPKPEPKPEPKPEPKPEPKPEPKPEPRPEPKPEPKPEPKPKPDPKPEPQPKPEPKPEPKPEPKPEPKPEPKPEPKPEPKPEPRPEPEPKPEPKPEPKPEPQPKPEPKPEPKPQPEPKPEPKPKPDPPHIPPAAIN

SEQ ID NO: 210732 - protein, 261 aa, Zea mays
  unsure (1)..(261): unsure at all Xaa locations
  Clone ID: MRT4577_123785C.1.pep
MAATRRLSCFLLAVLLAGVAAATAFDEAAAAGFGLGHGARFARKHGRAAAEMPQPEPQPKTKPEPHMQPLPQPEPKPKPMPHPEPKPEPQPKPNPEPQPMPKPQPKSKPEPLPTPKPEPKPEPKPEPKPEPKIKPKPKPEPKPEPKPEHKPEPKPEPKPKPKPEPKPEPQXPKPEPKPEPKPQPKPEPKPEPKPEPKPKPEPEPQPKPEPKPDPKPEPKPEPKPEPQPKPEPKPEPKPQPEPKPEPKPKPDPPHIPPAAIN

SEQ ID NO: 210733 - protein, 162 aa, Zea mays
  unsure (1)..(162): unsure at all Xaa locations
  Clone ID: MRT4577_123786C.1.pep
MVDQALLSGRQLLGRPVQSAASRSSSRKAPFVVRASSRPPDKQGADRQLWLASKXSLSYLEGTLTGDYGYDPVGLSDPEVTGGFIXSKWLVYVEVINGRYGMLCARCDIAPDDLPKDXIISPKSELTCFQTIVIPPVESYDYRXDSYTLFVFNMAIMXFAEH

SEQ ID NO: 210734 - protein, 267 aa, Zea mays
  unsure (1)..(267): unsure at all Xaa locations
  Clone ID: MRT4577_123787C.1.pep
MAATRRLSCFLLAVLLAGVAAATAFDEAAAAGFGLGHGARFARKHGRAAAEMPQPEPQPKTKPEPHMQPLPQPEPKPKPMPHPEPEPKPEPKPEPKPEPKPEPQPKPEPKPEPKPEPKPEPKPEPQPKPEPKPEPKPEPKPQPQPKPEPKPEPKPEPKPEPQPKPEPKPKPEPEPKPEPKPEPKPEPXKPEPRPEPKPEPKPEPKPKPEPEPKPEPKPEPKPEPKPEPKPEPQPKPEPKPEPKPQPEPKPEPKPKPDPPHIPPAAIN

SEQ ID NO: 210735 - protein, 69 aa, Zea mays
  Clone ID: MRT4577_123788C.1.pep
QELFLSSTNHTAAVLEIPSCSTKALHLLAPTPTHALSMRFAKSEEEKFQFRSGGYPLFNNMAHYPIPWQ

SEQ ID NO: 210736 - protein, 135 aa, Zea mays
  Clone ID: MRT4577_123789C.1.pep
LLSCPNLGGYEFVEFDQYYNPKYFIDQAAPRFELGVKDLQSPALPLGHAAKKSDLKSRKEQVFIHIFLLITKIFFSFILNLILLTFLESFSKNRFCFFGCSGNNAEYAGFSSMDSILKHTLLTLENFPLLSILLR

SEQ ID NO: 210737 - protein, 111 aa, Zea mays
  Clone ID: MRT4577_12378C.1.pep
IVPVRSPPRKHHQIYFLLSCGLPSERTRHGKGRPTLPMYWYIKLYNTHVLACASSAYQHNYLSVMFGDRPESSCEQKGTRTSFDRQTETIYWMARFLLAPYEKDSRKHSSA

SEQ ID NO: 210738 - protein, 79 aa, Zea mays
  Clone ID: MRT4577_123790C.1.pep
IEYTRSDSTATVALTIVTDKGLLNPDRPRVVVDPPDGDGRNAADGAGDRRHDDQCILPHATRPSWRRPLMALVVLIRLT

SEQ ID NO: 210739 - protein, 153 aa, Zea mays
  unsure (1)..(153): unsure at all Xaa locations
  Clone ID: MRT4577_123791C.1.pep
GKLEECLQLLIESICISEAALMARGYGPSKVPEIVALWKKDLQKVNSKAAESLADPNEYPNLFEDWQIALNVEAAVASKRSIYPPAEEYMIHAERSNKXLXEVFKNMHVHEEMVPDDNEDTVHEVIEATGGAVLVNGNNSEEQWGMKNEEPSA

SEQ ID NO: 210740 - protein, 106 aa, Zea mays
  Clone ID: MRT4577_123792C.1.pep
GKKSANFLLGGHNEQVRNRVKADNGKWREISLHHGILDPRSKYIWQRNLKLQLHSHRRGWLEHLGETFLSNTLPYPSLSERDNPLRSSHYPGSVAWVRLSVGRTYP

SEQ ID NO: 210741 - protein, 365 aa, Zea mays
  unsure (1)..(365): unsure at all Xaa locations
  Clone ID: MRT4577_123793C.1.pep
SGRGVGGEVTTLFHLDRPMYLLGYLANQSRVYLIDKQFNVVGYTLLLSLIEYKTLVMRGDFDRANDVLSSIPKEQYDSVARFLESRGMLEEALEIATDTNYRFDLAVQLGRLEIAKAIATEAQSESKWKILGELAMSSGKLEMAEECLLHAMDLSGLLLLYSSLGDAEGINKLASVAKEQGKNNVSFLCFFMLGKLEECLQLLIESNRIPEAALMARSYLPSKVPEIVALWKKDLQKVNSKAAESLADPNEYPNLFEDWQIALNVEAAVASKRSIYPPAEEYMIHARRDGPMIMKSMXSEVIEDGGVEESQEDAVEVDAEDDGVEESQDEAVEVEAEDSTDGAVXLVNGNNSEEQWGMKNEEPSA

SEQ ID NO: 210742 - protein, 84 aa, Zea mays
  unsure (1)..(84): unsure at all Xaa locations
  Clone ID: MRT4577_123794C.1.pep
LGWNSGCGTYNKRQTGYLDPIGRWRNPVGGVLFLTASKQIDCLYKPGSLLSESCLSRGRQTLSLEGAYLFXIPVSACTLISGAL

SEQ ID NO: 210743 - protein, 55 aa, Zea mays
  Clone ID: MRT4577_123795C.1.pep
GFPYPHNAASSSHGELYDGATPNTRVKLSKRTRHRVYTPSWVALNGGHAKGQKGT

SEQ ID NO: 210744 - protein, 62 aa, Zea mays
  Clone ID: MRT4577_123796C.1.pep
RLLTAIEYMISIFSPAVLINTFIFVPDRKFCASLSTCRSGLRRRRHFIAYHEVLVSRRWYMI

SEQ ID NO: 210745 - protein, 60 aa, Zea mays
  Clone ID: MRT4577_123797C.1.pep
CARGLAYPYTKLHPQLINTSIFVPDRKFCASLSTCRSGLRCRRHFIAYHEVLVSRRWYMI

SEQ ID NO: 210746 - protein, 144 aa, Zea mays
  Clone ID: MRT4577_123798C.1.pep
GRVGGRVGSLADPNEYPNLFEDWQIALNVEAAVASKRSIYPPAEEYMIHAERSNESLVEAFKNMHVHEEMVPDDNEDTVHEVIEDGGVESQEDAVEVDAEDDGVEESQDEAVEVEAEGSTDGAVLVNGNSSEEQWGTKNEEPSA

SEQ ID NO: 210747 - protein, 615 aa, Zea mays
  Clone ID: MRT4577_123799C.1.pep
VASMDSSGKIIWAKHNEIQTVNIKSVGADNEIADGDRLPLAVKELGSCDLYPQSLRHNPNGRFVVVCGDGEYIIYTALAWRNRSFGSALEFVWSTDGEYAIRESTSRIKIYSKNFQERKSIRPSFSVERIFGGVLLAMCTNDFICFYDWVECRLIRRIDVNVKNLYWADSGDLVTIASDTSFYILKYNRDVVSSHLDGGGSAGEEGVEDAFELLHEINERVRTGLWVGDCFIYNNSSWRLNYCVGGEVTTLFHLDRPMYLLGYLANQSRVYLIDKQFNVVGYTLLLSLIEYKTLVMRGDFDRANDVLSSIPKEQYDSVARFLESRGMLEEALEIATDTNYRFDLAVQLGRLEIAKVIATEVQSESKWKQLGELAMSNGKLEMAEECLLHAMDLSGLLLLYSSLGDAEGINKLASVAKEQGKNNVSFLCFFMLGKLEECLQLLIESNRIPEAALMARSYLPSKVPEIVALWKKDLQKVNSKAAESLADPNEYPNLFEDWQIALNVEAAVASKRSIYPPAEEYMIHAERSNESLVEAFKNMHVHEEMVPDDNEDTVHEVIEDGGVESQEDAVEVDAEDDGVEESQDEAVEVEAEGSTDGAVLVNGNSSEEQWVLTEQ

SEQ ID NO: 210748 - protein, 99 aa, Zea mays
  Clone ID: MRT4577_12379C.1.pep
FGPRKFSSSVNVSLIISTPYSSIAVSFSHGCPADIEASSPSESGFFFFFKNSEPPAATGFSRTSSAFYFFFFSPSRWPAGAAKQTMFFVFYLEPNSELT

SEQ ID NO: 210749 - protein, 55 aa, Zea mays
  unsure (1)..(55): unsure at all Xaa locations
  Clone ID: MRT4577_1237C.1.pep
NKAVQEEAELPPKKLVKENVGRQDAYKHLKKHEYNXLMSSVIVETLGTMLKRVVF

SEQ ID NO: 210750 - protein, 184 aa, Zea mays
  Clone ID: MRT4577_123800C.1.pep
MEALATAPAPSRPGPPPPTRCSHLRRPKALATSKLPRRVIAALHMDGPRAAPLRCTPAETDAVATTSDQTETAAAVEATELGNNGAPAPAADAPAASIEGLDGIKIRRRPVTGPSVHHVGPFQFRLENEGNTPRNILEKIVWNKDVEIWQMKEKMPLYRLKGPLDNAPPARDFAAELKATYHRT

SEQ ID NO: 210751 - protein, 54 aa, Zea mays
  Clone ID: MRT4577_123801C.1.pep
HVSLSEHIGRISLAILGHHHRGFISLVHLGASRGHGEFGEDGPHPRFSSCGVYF

SEQ ID NO: 210752 - protein, 65 aa, Zea mays
  Clone ID: MRT4577_123802C.1.pep
PRVRQVHTSIPPTIISYPTNPSTPRLFHSKRSTNKHQLSDHNKQILPIQHILNLKLITSHHIFLL

SEQ ID NO: 210753 - protein, 64 aa, Zea mays
  Clone ID: MRT4577_123803C.1.pep
GDALALRQKFLVSVLAWNHSCLALSVAEGRECPCTSVVVELESPLIDWLKLVLAWDFLGLLGFL

SEQ ID NO: 210754 - protein, 109 aa, Zea mays
  Clone ID: MRT4577_123804C.1.pep
ENIGSEIKNIKDLVWGLDGKIDSMEAKQDFSCAGVMYLCQFIEQNGGKLPDRLEGPKVTTKRFADQRFIQGLQLAIESGNCGKDTIDMLLKNADSSDKINRTSSIKSSS

SEQ ID NO: 210755 - protein, 58 aa, Zea mays
  Clone ID: MRT4577_123805C.1.pep
TAQEGSKVTTKRFGGQKFLQGLQLAIESGNCGKDTIDMLLKDADSSDKINRTSPKSGS

SEQ ID NO: 210756 - protein, 298 aa, Zea mays
  Clone ID: MRT4577_123806C.1.pep
MALVQAGMGLTRVVILVGAGVAGSVVLRNGRLAEILGELQEILDKGKKVKDGGGGDGETDLNEALTSQVRRLAMEVRQLGNSRSITVLNGGSAQSGVSGLIVPAATVGALGYGYMWWKGISFSDLMYVTKRNMANAVSSMTKHLEQVQSSLAAAKRHLTQRIEKLDDKLDQQKALSGQIRNDVTDARLKLENIGSEIKNIKELVWGLDGKIDSMEAKQDFSCAGVMYLCQFIEQNGGKLPDRLEGSKVTTKRFGGQKFLQGLQLAIESGNCGKDTIDMLLKDADSSDKINRTSPKSGS

SEQ ID NO: 210757 - protein, 110 aa, Zea mays
  Clone ID: MRT4577_123807C.1.pep
APRSSRIPLLDSHIEPSPSLERAWLGLGIQRPSLSCFMFSFQLTLGQECRNSSWLTARRHVAGREDGGGGTPVAASERRRETNQRPPAAVSFRWCGGVRQESFLCSEQGR

SEQ ID NO: 210758 - protein, 82 aa, Zea mays
  Clone ID: MRT4577_123808C.1.pep
RRAQMCHICSLRVLSTTKAARGYVLIYCLEPYPCSTALGHPHFCCRRCGPKRPSCNFEKVCIFILVGPCPLGHTKKNGVRSV

SEQ ID NO: 210759 - protein, 128 aa, Zea mays
  Clone ID: MRT4577_123809C.1.pep
EKLQQPSERASDYQSSAPPSFIAVKRLKTFLPNNQLDSSIHLLNRHWSKLLFHNHFVLNLHSFCSELLLSCLGHGDMAKLTGVVTTGRPMVCQHLCRANLVAGKRLASTGAQGLPHFYTGLGLESEGQ

SEQ ID NO: 210760 - protein, 66 aa, Zea mays
  Clone ID: MRT4577_12380C.1.pep
SRSRQGSGPIRSAAGRDLSPAPREQVRRRGRGRRPRAVVGGSVGASPCRLSGIRESQGVRSGRRGC

SEQ ID NO: 210761 - protein, 244 aa, Zea mays
  Clone ID: MRT4577_123810C.1.pep
MAMVQAGMGLTRVVVLVGAGVAGSVVLRNGRLAEILGELQGILDKGNKGKDGGGGDGETDLNEALTSQVRRLAMEIRQLANSRPITVLNGGSGQSGVSGLIVPAATVGALGYGYMWWKGISFSDLMYVTKRNMANAVSSMTKHLEQVQSSLAAAKRHLTQRIEKLDDKLDQQKALSGQIRDDVTDARLKLENIGSEIKNIKELVWGLDGKIDSMEAKQDFSCAGVMYLCQFMEQNGGKLPDRLV

SEQ ID NO: 210762 - protein, 81 aa, Zea mays
  unsure (1)..(81): unsure at all Xaa locations
  Clone ID: MRT4577_123811C.1.pep
SFASSLRFLGGFLLPRPXPSPSPSGAQLARDGNARSVSCDDDASQSGLQSRAHVLLQMDDSQEIVVTVGPHTRAHTLRDAA

SEQ ID NO: 210763 - protein, 82 aa, Zea mays
  unsure (1)..(82): unsure at all Xaa locations
  Clone ID: MRT4577_123812C.1.pep
YFXXFFXFXYFFLGRETHPCGVKTISQKNADTPFGISVRVGPHIATYRGGHFCLEQTFWGFVSTKQGPTGISVSHYVFPSPG

SEQ ID NO: 210764 - protein, 149 aa, Zea mays
  unsure (1)..(149): unsure at all Xaa locations
  Clone ID: MRT4577_123813C.1.pep
SPGLASVGPGVPSAVAFSARLSSCLGAAPSACGCPSFLWLVSCRGRARGPSSPLVWGLCVVRAGAPWGFSPPLPVGCVSSTCLVGLSPSLSERGAGWVLRARSVGRRVGPHRAPGCVACARCAWPPCAWAACGVLCWCGFSVVPRXRPG

SEQ ID NO: 210765 - protein, 44 aa, Zea mays
  Clone ID: MRT4577_123814C.1.pep
VIYWSGSRGEPTQNSGVICLFTLGGALMFCHPLMAVPHLWYLSV

SEQ ID NO: 210766 - protein, 52 aa, Zea mays
  Clone ID: MRT4577_123815C.1.pep
RSFKDTQPYHIIVRAVYRTYTSFAYKMQSSNITGEYSTERMGQSQLDPSYST

SEQ ID NO: 210767 - protein, 50 aa, Zea mays
  Clone ID: MRT4577_123816C.1.pep
KKKKKKKKKKKKKKKKKKKKKKKKKKKKKKKKKKKKKKKKKKKKKGGRCF

SEQ ID NO: 210768 - protein, 91 aa, Zea mays
  Clone ID: MRT4577_123817C.1.pep
MMRRGREMVQGPRCVALLLLVCMAALVASDTTDGLLPNGNFEEAPDRSQMDGTRVTGRYAIPRWEACGCVEYICSGQKQGDMVLPVPEGAY

SEQ ID NO: 210769 - protein, 105 aa, Zea mays
  Clone ID: MRT4577_123818C.1.pep
DGGAGRPVVAREGERARGVNSRTEGSGEFRGCYWMVIAAPLGHRAATRVCGSSALGMCLLPCDVCYTIGFMAPEFPKLGRGPASGVSESERKHHRGRWTAGPRAE

SEQ ID NO: 210770 - protein, 68 aa, Zea mays
  unsure (1)..(68): unsure at all Xaa locations
  Clone ID: MRT4577_123819C.1.pep
FLAKWGVGPILAEKSQKRAMLVRVPGDAFIRSRTLFMRPGEVNKLVGIXGEAFKATKKRVEAFQSKKN

SEQ ID NO: 210771 - protein, 62 aa, Zea mays
  Clone ID: MRT4577_12381C.1.pep
WFFPFFFFFFFFFFFFFFFFFFFEEETIKFYCLGLMAITYKWDVLQNKTVFFGGVPKKTQPL

SEQ ID NO: 210772 - protein, 73 aa, Zea mays
  Clone ID: MRT4577_123820C.1.pep
HPVGKGASRGSAAERASGWLSQVDGRLGRERPNLGLRVRLAKAPGDSSDSELEESPPNQANGSFRPLALIPRP

SEQ ID NO: 210773 - protein, 98 aa, Zea mays
  Clone ID: MRT4577_123821C.1.pep
NSKSLITWSSKLDCRFLEAQERIAVYFVEAFSQNRLSSSEQNAGRGRTGVNSGGLAGSAPRCWLADRLSAVALLRRGAGRGGQGGWAPWPRCRGWLAG

SEQ ID NO: 210774 - protein, 66 aa, Zea mays
  unsure (1)..(66): unsure at all Xaa locations
  Clone ID: MRT4577_123822C.1.pep
KVFFRMDHKLDLMYAKRTFVHWYVGXGMKEGYFFKAHKDLAALEKDYKKVGSEFDEGEDGAKGVEN

SEQ ID NO: 210775 - protein, 85 aa, Zea mays
  Clone ID: MRT4577_123823C.1.pep
VSQSPPLCGVILAQSETTLRVDASCFSSRLHIPSRRVRYPSALASPHRRSCILTSHCDCEARTPSSGIRRRVEGACETSTPSSGH

SEQ ID NO: 210776 - protein, 112 aa, Zea mays
  Clone ID: MRT4577_123824C.1.pep
STERKYITAFSLLSSVQIFCTSKPPHLFIPNAKHGMFLGQQKIKFGRAGTIAISIFALSSTRKETIRQHGSTILNNTCLSTFVIQKRHLTGLDCRCATRLKRLINGKLHIFQ

SEQ ID NO: 210777 - protein, 52 aa, Zea mays
  Clone ID: MRT4577_123825C.1.pep
RGVLHCGGFSIFFFPFFFFFFLHKHMSSPSYSYSPKLKLILLNYYSILLHPK

SEQ ID NO: 210778 - protein, 63 aa, Zea mays
  Clone ID: MRT4577_123826C.1.pep
QPRGFRVGDSPPLDPAGSVAGFKIYAKMGVFIGIYTPGLLWGGLSKAPMGKGPTRFHLGLPIG

SEQ ID NO: 210779 - protein, 103 aa, Zea mays
  Clone ID: MRT4577_123827C.1.pep
NFFFFFFLEGGELIPTGGKNSSRSLYYITRTIRPTWGLADAHSAFGRQSFDAGLSLELGSKAQLVERPCTIRAFFTWKRSSRASSKGGLAVYFTLCIQTGIFS

SEQ ID NO: 210780 - protein, 114 aa, Zea mays
  unsure (1)..(114): unsure at all Xaa locations
  Clone ID: MRT4577_123828C.1.pep
MAKIKSGIKGFGRIGRLEARADLQNDDAELVGGNDPXVITDYMTYMFKYDTVHGQWKHHEVKAKDCKTLLFGEKEVTAPGCTNPEEIPWXSDGAEYVAESTAXITDQENAAAHL

SEQ ID NO: 210781 - protein, 376 aa, Zea mays
  Clone ID: MRT4577_123829C.1.pep
MASASRLVSFAALCLCLGAALQAARGADAAARAFFVFGDSLVDNGNNNYLLTEARADSPPYGIDTPDHRATGRFSNGKNVPDIISEHLGAEPVLPYLSPELDGDKMLVGANFASAGVGILNDTGIQFANIIHISKQLRYFEQYQRRLAALIGPEAASRVVRGALVLITLGGNDFVNNYYLVPYSARSREFSLPDYVSYLLSEYAQVLDRLYDLGARRVLVQGVGPIGCVPAELALHSLDGTCDAELQRAAEMYNPRLMALLEELNARHGGGDPVFVGVNMQRIHNDFIDDPKAYGFQTATDACCGQGRFNGMGLCTMVSSLCADRDTYVFWDAFHPTERANRLIVQQFMSGSTDYITPMNLSTVLAVDLQKQQLRT

SEQ ID NO: 210782 - protein, 132 aa, Zea mays
  Clone ID: MRT4577_12382C.1.pep
TTKALLKRNPPIPTAHYHVSNSPRTSHKHRSPHAAQQQHTYPPTKKTSPPTREKNTISPPQNPKNRPPPPKKPPQTTKNYPPQTPTKKTPKTKGTPTPTRKRKPPKKPRPPPKGPQKKTHPKKSPKKKAPLP

SEQ ID NO: 210783 - protein, 155 aa, Zea mays
  Clone ID: MRT4577_123830C.1.pep
SPRAGVQGRGVAAVGGAGGDGVDPGADGDQLRLLGLYILAFITGIYLVVFGSFTATSSTAWVILTGAMVLLALPLIIPACSSCSDGPDPAYDDPHKPLLIGQMESNAMMQKPKESQKQVKGPLGTLGEEHSAKKLIAVWTSGSTTQPTFGSPCWP

SEQ ID NO: 210784 - protein, 67 aa, Zea mays
  Clone ID: MRT4577_123831C.1.pep
LSQTFSGIGVTNSLEQGCTKFFYSQQLLSKFHDKTPSPFPGFTVIFQPKVINTGFWNNSPLTITKNN

SEQ ID NO: 210785 - protein, 50 aa, Zea mays
  Clone ID: MRT4577_123832C.1.pep
AGSHAVITYNVLGIQKHTMRPTLAATQQPRLPRYYRLLALLALSCSATNA

SEQ ID NO: 210786 - protein, 179 aa, Zea mays
  Clone ID: MRT4577_123833C.1.pep
MASSASVSVSGRGGGFLLPAAVLLAVAVIHARGAPAAPCVPRVFSFGDSLADTGNFPFLYGNDSREPALRTPYGETFFRRATGRFSDGRLIVDFIADTMGLPFVRPYLSGRTAEDFASGANFAVGGAMALGPDFFRGRGVPMGDRMHLGVEMKWFHDLLDLLCPADRADCMGMMNQSLF

SEQ ID NO: 210787 - protein, 88 aa, Zea mays
  unsure (1)..(88): unsure at all Xaa locations
  Clone ID: MRT4577_123834C.1.pep
MNINANGGILSYGNMEGYARWVATGVASAFFASLERFSCIHLHTAEDDGSDEDPDEAKDLXXLIFSRPDALPEYYYSRSASSVSFAKM

SEQ ID NO: 210788 - protein, 92 aa, Zea mays
  unsure (1)..(92): unsure at all Xaa locations
  Clone ID: MRT4577_123835C.1.pep
SIQQVQSSLDKKEAKVKELXKKRKGWKSKAWQGTMEEVQLLFALIDIKVVSRVLRMGKLSKEQLLWCEEKMSKVDLTENRLRRDGSPILFPC

SEQ ID NO: 210789 - protein, 482 aa, Zea mays
  Clone ID: MRT4577_123836C.1.pep
MRKNLGLGSGPARPFGDRRWLLPFLATMLVTATLLLAAACGLFSPPYPGGGSDAVLFDVVSLADWDDGGSSTGGDGAPSVEAGIKNRLLEGNAASDSDDENPDDAAVNSDDSDAEPPRIAYLLEGTKGDGLRMRRTLQAIYHPRNQYILHLDLGAPPRERIDLAMYVKGDPMFSRVGNVRVIAKGNLVTYKGPTMVACTVIRVAILLKEGLQWDWFINLSASDYPLMTQDDILHVFSSLPRNLNFIEHFRLSGWKVNIRAKPIVLDPGLYLSKKFDLTMTTERRELPTSFKLYTGSAWIMLTKSFLEYCIWGWDNLPRNLLMYYVNFISSPEGYFQTVICNSDDFRGTAVGHDLHYIAWDYPPKQHPLILSMKDFNRMVKSGAPFARKFPKDDKVLDKIDRELLHRSEGWFTPGAWCDGSSEGGADPCLSRGEDSVFEPGPGAERLRGLMKKVLSWDYRNGSCSSLAYDQTKRDWYVPKSRG

SEQ ID NO: 210790 - protein, 92 aa, Zea mays
  Clone ID: MRT4577_123837C.1.pep
SGSSYRRSTCNGSSPLPQQWTLHTTKSISKAAHGRSIPRVHGLFDKMTHCVTEDQPGLQFQQQHPVHQSLPILTSSTRTSSNATSHANNQSL

SEQ ID NO: 210791 - protein, 397 aa, Zea mays
  unsure (1)..(397): unsure at all Xaa locations
  Clone ID: MRT4577_123838C.1.pep
AWPRGWLLASRAVFARLVKGPGSLNTPKKSPRSASKLASTLRSLSFKRKDELPEDCEQLQQQQSADDPHQTLETAYVAHVSLSWEALHCTYVHLSLIVAAQPDNPTTYSCAAQAFQQFQVLLQRFIENEPFEHGTRVEIYARSRSLLSKLLQVPTFQVTDRKSNAEDQTEPAISAPDLIKLLEESILTFRLFLKKDKRKSGVLMSASHGHAGSSIQQVQSSLDKVSQVLSCGPTDNESLLHNXLHDRSFLYRPYGPTHRNSXSKDTSFLAFDSVHSXLSLRKLQMSLLSSNYITHPXTFCAVLYSLFLXIASKTPQKEAKVKELLKKRKGWKSKAWPGTMEEVQLLFALIDIKVVSRVLRMGKLSKEQLLWCEEKMSKVDLTENRLRRDGSPILFPC

SEQ ID NO: 210792 - protein, 149 aa, Zea mays
  Clone ID: MRT4577_123839C.1.pep
AECVSHVPIAVGAEPAHFDLLLARSAISQGTYLSNDWLVLKLQELVSLSYQISTGQFEGMQPIGVKLLCLIMDKFGKAVDPEFPGHILLEQFQAQLVSAVRMAISTASGPLLLEAGLELASRVITSHIIGGDRLAFSRLVSLITRPLSD

SEQ ID NO: 210793 - protein, 52 aa, Zea mays
  Clone ID: MRT4577_12383C.1.pep
SEHGLTPHYNAAIISYNDAMLEFGLGTVMHTHGVQPSCPIQYLVDLTTQRQN

SEQ ID NO: 210794 - protein, 37 aa, Zea mays
  unsure (1)..(37): unsure at all Xaa locations
  Clone ID: MRT4577_123840C.1.pep
GGTNDSEMHIPFGCPCEITCFIKLGXFPYPRHGAYSP

SEQ ID NO: 210795 - protein, 85 aa, Zea mays
  unsure (1)..(85): unsure at all Xaa locations
  Clone ID: MRT4577_123841C.1.pep
HNQTINAYHTMTHGDLPKLTVIISHXNHHTXLFQAYSPQNVPPETVFDSCILHTKHYYFYIDTHARPIGTSKPTHYHVQPDEIGF

SEQ ID NO: 210796 - protein, 116 aa, Zea mays
  Clone ID: MRT4577_123842C.1.pep
NFGDIFDGRHFINFLKDEGRVIEQFPERLGPRDSTIIILEMPPVSWSNEKYYLHQILPLLNKSSFIHLTKPMARLANIGFRPELNWLRGRVNFHALKSTLKMEGLGNKLVHKLQAR

SEQ ID NO: 210797 - protein, 35 aa, Zea mays
  unsure (1)..(35): unsure at all Xaa locations
  Clone ID: MRT4577_123843C.1.pep
PAVSGXSYLYINDNHDIKSSLIYQHHISSFKLIKF

SEQ ID NO: 210798 - protein, 53 aa, Zea mays
  Clone ID: MRT4577_123844C.1.pep
ESFGKGLSFPQLKIQIFKIGGDRILIHITGIRGDWTTVPAIGLISLLPIKKRQ

SEQ ID NO: 210799 - protein, 151 aa, Zea mays
  Clone ID: MRT4577_123845C.1.pep
LLSVPSLTACFVFPPSSYCSRLTSLIASSHCCLTASSSLADIGGKIKRSVDSALFPAGCNSLSIFRLWMPQSFQFFASCCSALLCFEGLAVAAGNSRTGAGRRRRKMGDATTELVEAFLRAESWRFGGGVSLVAGAGRGLRARSVRVRTRF

SEQ ID NO: 210800 - protein, 89 aa, Zea mays
  Clone ID: MRT4577_123846C.1.pep
REPACDYCWLKLRWGLSFSEASAPVVPAGPVNLTGCLSTEYCMSFRGLLGRDPNGFGSLQRDRGHRTHGHLPRPRDGGCLHVLVLEPHG

SEQ ID NO: 210801 - protein, 128 aa, Zea mays
  unsure (1)..(128): unsure at all Xaa locations
  Clone ID: MRT4577_123847C.1.pep
DILFDIDSTLCNSDPIYFCAFRELLQYGGFNGGVPITEECYCSHICGSHNDYLTTSVFPTMNYPKAMRFMNDTETMIPSLTTCQLKPVNGLLELCVWIAXRDMKRASLTIATRANDELMLALMVLTDF

SEQ ID NO: 210802 - protein, 97 aa, Zea mays
  Clone ID: MRT4577_123848C.1.pep
QELHCSISTPRPQHRVGSESTGDAEAQLTPHSLHPSASHGQGVRQTRRRRPAAVVQAAGSHHRGARGDRRRRRGDRLAGAPAHGAGGSTCRTRRCGR

SEQ ID NO: 210803 - protein, 47 aa, Zea mays
  Clone ID: MRT4577_123849C.1.pep
CVVYQGAESYTPSTGKTIEKHWHTDPSYLVCLDAPDTKLTITTIIKL

SEQ ID NO: 210804 - protein, 54 aa, Zea mays
  unsure (1)..(54): unsure at all Xaa locations
  Clone ID: MRT4577_12384C.1.pep
PFRSGFQVPPKRVGSFAWLTQKALWVFPGKWLITPEENGGLFXXXXPRPKSPHP

SEQ ID NO: 210805 - protein, 79 aa, Zea mays
  Clone ID: MRT4577_123850C.1.pep
VVAGQGDRLRRSDSAQGRQGGSKSPTPGLRSYMPAYMRYRSSILSMEVRFLVGRVGPRIRSRDRKKVSGACRRDRNIPA

SEQ ID NO: 210806 - protein, 138 aa, Zea mays
  Clone ID: MRT4577_123851C.1.pep
PILPIPLQPSSPPDHGVPAASSLEISASLKVQVSSPARRHLLPRTPHHAPPVRPPSPHPVSPLPPVTARRRTAYRRWLSPAPRSHLFRRSSPTRSSSQRAPTHTGMLRGGTSPLLADAWTRVSRCRRQRQLQRTTCSG

SEQ ID NO: 210807 - protein, 194 aa, Zea mays
  Clone ID: MRT4577_123852C.1.pep
LQPRRWTSGAAATAGAASCSSWLAYTYATSWVSLVYVSQQPRPGQQQLPCILWARRHPYKLARPRSLDRERRSPVLFPGAMPRSAQHRHGLRWSQYQSSRPKSPSLYRGRYRSTTPDAAGILVSGLDGRTSARASLWHACTARADACRSVSLGHLDARTMVISASYLRRHLVCPLEQSSKAVKLGSNQIAISPV

SEQ ID NO: 210808 - protein, 73 aa, Zea mays
  unsure (1)..(73): unsure at all Xaa locations
  Clone ID: MRT4577_123853C.1.pep
ILLALPACTGYSSKLPQCSQTRIVCLLPPYLPSIIASVCXNPSLQPYTLEQAITASHIPSSLLLQHSAAVSSV

SEQ ID NO: 210809 - protein, 94 aa, Zea mays
  Clone ID: MRT4577_123854C.1.pep
KQSPLFFKGDTKNQRNFFTNQNSDSAYFQITATSHPQIQTKNLSQNLFQFLFAPIIFQTKKTSQSLPFYFHSKQKQFLTTGKSLFFPNPIKHFV

SEQ ID NO: 210810 - protein, 66 aa, Zea mays
  Clone ID: MRT4577_123855C.1.pep
PALMADSHLCPLFIRHRCITERGHILCPCEHWRPCCPYSSFPSHCRSTVCSCLVGFAKSTLHSGGV

SEQ ID NO: 210811 - protein, 84 aa, Zea mays
  Clone ID: MRT4577_123856C.1.pep
SRLSEKKREKERVTPLAHDLPVVDAPTTAHSPATTEPPAPCSPTSPLPFAPSAQLSRPLSRSTHANREPLPPPADVHRLFRGRH

SEQ ID NO: 210812 - protein, 240 aa, Zea mays
  Clone ID: MRT4577_123857C.1.pep
MRVTDIISCALLQASIALSTPVEELGAKAVVAKRFPPVPFLPGKASSVPGSRNKTCMLKALGGGKDDSANILSAVKQCNNGGHVVFPKGQQFTIGTALDLTFLNGIDLDIQGTIQFTNDTDYWQANSFKQVFQNATTFFQLGGKDINVYGGGTLDGNGQAWYDLYAKDIYILRPILFGLIGAKNAKISDLKFRYSPQWYTLVANSSQVVFSNIDIFGDSKSKNPAKNTDGWDTYRSDNII

SEQ ID NO: 210813 - protein, 56 aa, Zea mays
  Clone ID: MRT4577_123858C.1.pep
IDSERRQPSRCPERTGWPAQSLARSHRHRTCSLGPLLRRRAAPHPVMAAILAACTG

SEQ ID NO: 210814 - protein, 191 aa, Zea mays
  Clone ID: MRT4577_123859C.1.pep
PTRFPTRPPTRPPTRPHVQGHGFRKGLVSMLMDLKPRFLRFPGGCFVEGGWLRNAFRWRQNIGPWEERPGHFGDCWQYWTDDGLGYYEFLLLSEDIGAAPIWVFNNGISYNDEVNTATIAPFVKDILDSLEFARGSANSTWGSVRAKMGHPKPFPVKYVAIGNEDCERKFYRGNYLKFYNAIREVYPDIQL

SEQ ID NO: 210815 - protein, 135 aa, Zea mays
  unsure (1)..(135): unsure at all Xaa locations
  Clone ID: MRT4577_12385C.1.pep
RNPSNPTHTNMNHLLLSLLLSRRPXVIPTFLSNFCSLLTTHDADLTKGLNAYFNKLNDVTSFDFISKTYFYVHPLVTELSKGAPNKAANWVNWQLHPLVTLGLLIVLEEPLVHTFHLPPFXLFKGHYKXALYKYF

SEQ ID NO: 210816 - protein, 207 aa, Zea mays
  unsure (1)..(207): unsure at all Xaa locations
  Clone ID: MRT4577_123860C.1.pep
QRPIFQQQLLSGGKKSNSTFRLLPKLTELDLKSCGLTEIPSFLVHLDHITILDLSCNKILGTIPNWIWHTWDHSLRNLNLSNNAFTNLQLTSYILPNSHLEFLDLSSNRIQGQIPIPNMLTMESNYEQVLDYSNNSFTSVMLNFTLYLSQTVYLKLSDNNIAGYIPPTLCNLTYLKVLDLANNDFKGEGPSCLXEEWHLXNLLNFEG

SEQ ID NO: 210817 - protein, 75 aa, Zea mays
  unsure (1)..(75): unsure at all Xaa locations
  Clone ID: MRT4577_123861C.1.pep
YDKVMNCIGKTTHKEIQVQPSWQELQLPFMNTKDYKFHLGTTGTNSCTSLMHLNIKMPKIVKDQWIRKSLXQFNA

SEQ ID NO: 210818 - protein, 164 aa, Zea mays
  unsure (1)..(164): unsure at all Xaa locations
  Clone ID: MRT4577_123862C.1.pep
PSIVPCALWCSGLMYLVRAWAITXLSVFYLMHKDPSIKYKAQHLMDQAQGSLDQDHGSSDRARILLEPVPALLHMALKGGDMSFERCGRVSVPSITVSIRLIAVPCGCMSCALGEPAQVSGQSGQCLYYIVKGACSACTDRISFKLNIFSMNVMQFSGDKKQCT

SEQ ID NO: 210819 - protein, 61 aa, Zea mays
  Clone ID: MRT4577_123863C.1.pep
SQWSTSQSVIRWGHGKRTNRYKLLGASAISELRLRHRPGIDRAILSSPKNYSSKPISALVA

SEQ ID NO: 210820 - protein, 181 aa, Zea mays
  unsure (1)..(181): unsure at all Xaa locations
  Clone ID: MRT4577_123864C.1.pep
MGKSEPECVNSSNPAHECNDYCLNKIAEAKRRLLEEQPDSWKGPPEDRTVHPDCINASNPYHDCSEYCFKKIADTNAAAERGELEKPAGGSGKSGVTPEQADGDDDSERQEDAAAAEDGYPQMTGKQKKLFELQLKMNEARKANQQAMVAEKKXMEPRGESRGVSKEKWLEXQKKKIGKLL

SEQ ID NO: 210821 - protein, 124 aa, Zea mays
  unsure (1)..(124): unsure at all Xaa locations
  Clone ID: MRT4577_123865C.1.pep
SGQRRPAASRNKQEKELKKPRKTXNIENMMNKYLETRSKQVEDEAAREKEAREKETREKEATQSEDFSIKRCISVLNTMEEVTKLEKAKAYSVFTKSKENRETFICACEADQESALIWLRNEMA

SEQ ID NO: 210822 - protein, 351 aa, Zea mays
  unsure (1)..(351): unsure at all Xaa locations
  Clone ID: MRT4577_123866C.1.pep
RVGGRVGGGKASPKCSGAKKSGSSPRVVKQRADWNPGLERSLVDILHEFKESGXRGDNGWNSEGWNRMVKEFHVRNKYVSFTKSQIQDKEGQLKRDYKMLKAAKQQSGSTWNEKRNMVEGPPALWENLMVTFPKIKKFNNNKATFPLFDALGELYDGHLAEGTWNCTSLEAPQEEEPNEQLQDAEDGPQGFDLNVVHDVDDEVDDALTERNEDMLQGRANTLSRDEESGQRRPAASRNKQEKEPKKPRKTDNIENMMNKYLEMRSKQVEDEAAREKEAREKETREKEAAQSEDFSIKRCISVLNTMEEVTKLEKAKAYSVFTKSKENRETFICACEADQESALIWLRNEMA

SEQ ID NO: 210823 - protein, 62 aa, Zea mays
  Clone ID: MRT4577_123867C.1.pep
HASADSWLIKGCTMNLYPWPTVTISYEGIPDQHRALIEDQHFYKDNDWLNTNGSRRAHSLEH

SEQ ID NO: 210824 - protein, 74 aa, Zea mays
  unsure (1)..(74): unsure at all Xaa locations
  Clone ID: MRT4577_123868C.1.pep
RAPPXMSDYFSKHSPKIYRTSSAFIQDLELMSILQRAPAARQRRRLFREDLLPAPVYGRWNFTEQVLPDDLIKM

SEQ ID NO: 210825 - protein, 401 aa, Zea mays
  Clone ID: MRT4577_123869C.1.pep
MGCASSKANADVAVADVYCPPPTSVSLFDINAVEEPWLIAKQNKAADDDDDDDEEEEEETTDDDDEDHDDEKQPAAKTVVPLPLLDKLEGYELAPASWSEVSKALEDMKPVLDSKSPPAPAPAPKKKKTKKKKKKKTKTKQQQQPMQPVVPAATDDGDAAAGSKKAPATSSVDDLPDSSRPAPPELAGRRVVKDNPFLTRDRESNKGAGADGGPRWKRRDPFEGCPERRPPGAAGGGVVLYTTTLRGVRRTFEDCERAREAVEACAAAAGVEAVDERDVSLHGEYLRELRELLPGDGGAAPPPRLFVMGRYVGGAEECARLAESGTLREMMRWVKARGEACAAKDGRGCEGCGGARFVPCWECGGSCRVLVAPPDGGTPTTTTERCAKCNENGLMMCPICH

SEQ ID NO: 210826 - protein, 106 aa, Zea mays
  Clone ID: MRT4577_12386C.1.pep
QSPKKLKLGNSLQGGGFLVKTQKGNLAKTRFDPRAGGPGKIYFQHKQAKKMGWDQRPLGPPHDGGGEIFFFTNLLGLEHGGDQGNHPGGGPPLVGHPRDKLGKRGF

SEQ ID NO: 210827 - protein, 251 aa, Zea mays
  Clone ID: MRT4577_123870C.1.pep
MEEEDSSKKDLEKEIAPKDNKDMEASDGSKLGVNGPGIILSKHNDECGGGAQEAESMENTPTAQLMMHQDQLLDDMVTDTVTETGGAVADTEEEDTVAETEDVVTDTEDTVTDTEDTLAETEAEKGERAIADKGELEQDEKKDLVALAELASSPALSSLVKPTVVKKELDFPRPNETGMKTEQDYTNGELREHNDLVSKVQGEGGVATTMESRSSALMIILALIFALATGITIVVRLYSPSRATKLQMDLP

SEQ ID NO: 210828 - protein, 81 aa, Zea mays
  Clone ID: MRT4577_123871C.1.pep
SNMKQLFLGVRARPLPPYGGCSHQRGPHSRQCALPRPQQLATRPFRDHDRAPHRAIFPPSRASVVVGGSSMCGRTGWSAQP

SEQ ID NO: 210829 - protein, 98 aa, Zea mays
  Clone ID: MRT4577_123872C.1.pep
KSKRKHRSPSDSDSSNSAASVFDSDSESSGSEYSSGTSSSYSSSDSEDKKRQHRRKQKKRRHRRDSTSSSSSESESASDSDSDDKNSRRKSKRRGGRR

SEQ ID NO: 210830 - protein, 72 aa, Zea mays
  unsure (1)..(72): unsure at all Xaa locations
  Clone ID: MRT4577_123873C.1.pep
EDGRTTGSRSASADSGRRSSSRLAPVAIPHVDTPREIPYKEIVAITNDFSESQVVAELDFGTGYEGXLDTGH

SEQ ID NO: 210831 - protein, 59 aa, Zea mays
  Clone ID: MRT4577_123874C.1.pep
PNSHSYKLTTYTFNNYSLTQVSHIYNTYTLTDLFLLSFLLIFQPTTPIASTSSLLTSPS

SEQ ID NO: 210832 - protein, 77 aa, Zea mays
  Clone ID: MRT4577_123875C.1.pep
SGPLTWISENIFTRVRAQLWALIVRGGPHAGLQAHINGSINVTRYRGWNIDNASMLSNLSVAKSFHTVLTCPGYAAG

SEQ ID NO: 210833 - protein, 62 aa, Zea mays
  Clone ID: MRT4577_123876C.1.pep
YPPRGTQAIIFFLLIRTVRGSACSIKGPGGGSEFSIGGEGLPCALHGRISRSSAPEVVAPPG

SEQ ID NO: 210834 - protein, 141 aa, Zea mays
  unsure (1)..(141): unsure at all Xaa locations
  Clone ID: MRT4577_123877C.1.pep
SRPPKQISPLFLQQPVALRQLLPLVHLQAQNIKAQQLQQLMLGNLAVYSQQQQLLSFNQLATLXNSAAYLQHQLPFSQLAAAYPQQLLPFNQLAAXTLAAXLQTXQLPQFSQLAEVSPIALLTQXQVLPFFLNAAPYADTL

SEQ ID NO: 210835 - protein, 65 aa, Zea mays
  Clone ID: MRT4577_123878C.1.pep
VFSTGPIIFWFGNRNYAPVKTFILPGEPAPRKRGLFHFAQGLGFQISSSLLNSYRFANFRRYTQL

SEQ ID NO: 210836 - protein, 61 aa, Zea mays
  Clone ID: MRT4577_123879C.1.pep
DGFFLLLLTLCGARIFFFFFAILTRHAFPWVMFSRPVISMGPFVKTLNFFSQEPVNSCCFP

SEQ ID NO: 210837 - protein, 79 aa, Zea mays
  Clone ID: MRT4577_12387C.1.pep
DSRYQLALQVTRNLADGVVADWLAMAYDGHKVPYDDDEEFPLTRLPPRPVRLITRLHESRRTTAATLQGSGGNRRQPSP

SEQ ID NO: 210838 - protein, 45 aa, Zea mays
  Clone ID: MRT4577_123880C.1.pep
AREGNEVACQLHEDSVHLPQLVKPIAFDLTKARPRSLGGQKIMKG

SEQ ID NO: 210839 - protein, 87 aa, Zea mays
  Clone ID: MRT4577_123881C.1.pep
DETASIRRCSMLCAAVTTSIAAVVHSSSFVFEVLNLVVAEMNYYENSGQEQVPQDEALGGCCDEFMRGLGRRLPVNFGLLDRCLLIM

SEQ ID NO: 210840 - protein, 56 aa, Zea mays
  Clone ID: MRT4577_123882C.1.pep
LYEIHLLYRTLNLLYWADLRGARFLASAGDQYPVRVANDLAVMDLSVAIKGTLYNV

SEQ ID NO: 210841 - protein, 66 aa, Zea mays
  Clone ID: MRT4577_123883C.1.pep
CRFKGAFKGGFYWALRLGKGWEALSVQTLELLGKLEKGGFLARGISGERGRFCKVIRLEKWGSVLV

SEQ ID NO: 210842 - protein, 151 aa, Zea mays
  Clone ID: MRT4577_123884C.1.pep
MKIQSVGKLSIPDKVTVTGKGRIITVKGTRGTLTKDLKHLNLDIRVNAKKKLITVVRWFGRRGDLCCINSAIAAVKNLITGVTKGFRYKLRFASAHFPINVTVEGQEVEIRNFLGEKRVRKQQVRPSVKVYRTDVKLTKDELVLEGNSIDD

SEQ ID NO: 210843 - protein, 39 aa, Zea mays
  Clone ID: MRT4577_123885C.1.pep
GECAIYLLFDLTPKIWGNNNRQFIILLFGHLSFTRNLMV

SEQ ID NO: 210844 - protein, 42 aa, Zea mays
  unsure (1)..(42): unsure at all Xaa locations
  Clone ID: MRT4577_123886C.1.pep
FYAQRCLYNMCHMDVMLITLQVYSVHRDVSTICAICKSXVRR

SEQ ID NO: 210845 - protein, 81 aa, Zea mays
  unsure (1)..(81): unsure at all Xaa locations
  Clone ID: MRT4577_123887C.1.pep
AELAIHTILPCLRKLEFGGISLXQKGTIMLTFFPAVAQGXYDYTQKQLFALTSTEAGSLVSLGPAESCELSHGSSMRSSLE

SEQ ID NO: 210846 - protein, 64 aa, Zea mays
  Clone ID: MRT4577_123888C.1.pep
PLSTTATTTKTTKRQLFSRKLTCPGRITGADSLYRNSFSFSDEKLNSPTDSTPALLSATNTSQK

SEQ ID NO: 210847 - protein, 152 aa, Zea mays
  unsure (1)..(152): unsure at all Xaa locations
  Clone ID: MRT4577_123889C.1.pep
RHPASCLQIWHWNGKAGFAGDDAPRAVFPTIAGRPRHTGCLXRMSQNDPYVAYDVACPTRGILTLKNPIEHGIVSXADDMEKIWHHTFYDDLLVSPDELPVLLTDAPLNPKAYRENMTQIMFETFNVPAMYGAILAALFLYANGRTTGIVLH

SEQ ID NO: 210848 - protein, 106 aa, Zea mays
  Clone ID: MRT4577_12388C.1.pep
CERIAGTYCAGVLPCLAGFIYKHWLRGSNCCCCQKGATYGWGTLPASFNSVACVVPIALASVGGLHGQRCCKRFWGRSLILAWGTVPSACTNNNCFYLGRLLWAMG

SEQ ID NO: 210849 - protein, 34 aa, Zea mays
  Clone ID: MRT4577_123890C.1.pep
TIDYLWRAISVCFSMVVPLSSTCHRPESMSIEAH

SEQ ID NO: 210850 - protein, 50 aa, Zea mays
  Clone ID: MRT4577_123891C.1.pep
GQQLIAPFFFTIHKWTYSQWCSSIRAQNAFANSFGGGKKTNNGNLTPAHR

SEQ ID NO: 210851 - protein, 123 aa, Zea mays
  Clone ID: MRT4577_123892C.1.pep
LGPSRPAGKPFLLLAIQSPGRGHTEGEREQTDTDRAREMSIVTRRWGPRDRRRRISALYLLRSRYHRSPSSLSDLVWACMTMSLTHCITFSSSGAYFSCKELFHEHSLWPSSGHLLKIKTQMI

SEQ ID NO: 210852 - protein, 76 aa, Zea mays
  Clone ID: MRT4577_123893C.1.pep
VNHGILSLLFPRLALAALLGNKNRKAFIGLPPLPRKKPSPPSLSRAPPHAGLLATGFFSALGAICAAAAGGRDSRG

SEQ ID NO: 210853 - protein, 169 aa, Zea mays
  unsure (1)..(169): unsure at all Xaa locations
  Clone ID: MRT4577_123894C.1.pep
MALPXQGTVXYPSFKLVIVGXGGSXSTTFVNRLGGVGEFXXKFEPXLGVEVHPLDFTTXCGXIRFYCWDTAGXEEFGGLRDGSYIHGPCAIIMFDXPLRLTYKSVPSWRRDLCRVWGVIPIVLCGSPVDVQNRPVPAXRVTFPRAKHLPGCDLSALSSSGFXKPFLCLA

SEQ ID NO: 210854 - protein, 242 aa, Zea mays
  unsure (1)..(242): unsure at all Xaa locations
  Clone ID: MRT4577_123895C.1.pep
IKLIPSKVQQIQTVQDTMTNGCWXVRHIRGAVMLKRXMEFLQLXVIXNEFNLAPGVQDVHLWTPSASGCYSSKSAYERFFVGSVAFKPAKRVWKTWGPPKCKFFIWLASLNRCWTVDWLARRGLEHLELCLLCDQKEETVQHLLVACAFGRQVWFQVLSLINLQHLSPMPREVNFQDWWNQAERRVPKPQGNEFNSVVILVAWWLWKHRNXTIFEEGVADVSQVLRDIGEDARNWPLLGLLS

SEQ ID NO: 210855 - protein, 57 aa, Zea mays
  Clone ID: MRT4577_123896C.1.pep
KSAYRRISSDTERIERKKEVIDLRMPQRYKIGYEKSVGHLLEQFKSWGTLLGAVHRT

SEQ ID NO: 210856 - protein, 150 aa, Zea mays
  Clone ID: MRT4577_123897C.1.pep
MSGLYGQQGFSPSRNLSPQIRSNPDVDSQYLAELLAEHQKLGPFMQVLPICSKLLSQEIMRVSNSAHNPGFSDFDRHRFRSPSPMSSPNPRSNLSGNGFSPWNGLHQERLGFPQGNSMDWQGAPPSPSSHVMKKILRLEVPVDSYPSFNF

SEQ ID NO: 210857 - protein, 84 aa, Zea mays
  Clone ID: MRT4577_123898C.1.pep
PPPPPPRGVAPRRALRGGAVWPPRSPAPGGAAQRGAPAVDRRPPLLRRASGPRRADEARGSAGLASLPRSTTGRVGYRCYAAYA

SEQ ID NO: 210858 - protein, 60 aa, Zea mays
  Clone ID: MRT4577_123899C.1.pep
AVFNLKHTDLPRKSLGKKGEQQNRISHHKEVTFTPVGIWIAVHFLFLKLDNRRSCIYNKI

SEQ ID NO: 210859 - protein, 139 aa, Zea mays
  Clone ID: MRT4577_12389C.1.pep
MEKEHIKMAMLRQEQTFRQQVHELHRVYQVQKQLMTQTQITQHHQQRCGSSGKTEEEEDFNLELTLATGAGRTRQEKPSTSDSEATMSSSTSAESEQAQRFMPSSNVTNLRFQGESNRHDDHQVMQSAWRYQCLSLKMA

SEQ ID NO: 210860 - protein, 55 aa, Zea mays
  unsure (1)..(55): unsure at all Xaa locations
  Clone ID: MRT4577_1238C.1.pep
CLXHFAAGRWLTPLAFSSFQAPLHLSQFEMSRAINQIISECYRLVMDLDSKFFKR

SEQ ID NO: 210861 - protein, 59 aa, Zea mays
  unsure (1)..(59): unsure at all Xaa locations
  Clone ID: MRT4577_123900C.1.pep
IRKKERKKRKKTNRXKKKYKPEKKKRKMKNRRKEKKQTKNKEKXKKKKKVSKKHASKQR

SEQ ID NO: 210862 - protein, 425 aa, Zea mays
  unsure (1)..(425): unsure at all Xaa locations
  Clone ID: MRT4577_123901C.1.pep
MRPIRLPEPPGVDGMETPEIFSGSGTGGAAVVRRAVLIGNGSPGAENQCLGLARALGLADNLTFYRVTRPRGGINEWLHFLPISMHKFIDQILRQFFRNTRFAIVVQGRKPRVLNGASVGLSAVLEANVKKIVTVARDTYEKEGPTLVVACGWDTISYSSLIRKVASDNVFVIQIQHPRSRLDRFDLVVTPRHDYYALTASGQQEVPHLFRRWITPQEPPRSNVVLTVGALHQADSAALRLAAIAWHDELAPLPKPLLIVSIGGPTRNCKYGVDLARQLITSLYNVLDSCGSVRISFSPRTPXRVADTIFKEFAGHPKVYIWNGEEPNPHMGHLAWADAFVITADSISMLSEAGSTGKPVYVIGTEHCKWKFSAFHKTLRERGVVRPFTGLEDISNSWSYPPLNDAIEVATRVREVIAERGWTVG

SEQ ID NO: 210863 - protein, 194 aa, Zea mays
  unsure (1)..(194): unsure at all Xaa locations
  Clone ID: MRT4577_123902C.1.pep
GRPPATTTPTPTRSWRRRAAAARKPTNASRSTGKCRRARCAGCHAHPVSKARDKAKGARKLRACDVALNHRLVSWRVVDQGPGYSGASASSLLAYLAGGSSWHEEEEDDDEXERRPTAGSLTSTTXVGRGQEEDGVDAVGEIQAVEEQGLLDAKDGEEEEVEDDGDDMGFCMVGTTIALEFSDGEEDWIVVEEI

SEQ ID NO: 210864 - protein, 219 aa, Zea mays
  Clone ID: MRT4577_123903C.1.pep
MKRDGWQHGAVRGSRSKVLRTAAGDDNSDADAVVETAAAAARKPTNASRSTGKCRRARCAGCHAHPVSKARDKAKGARKLRACDVALNHRLVSWRVVDQGPGYSGASASSLLAYLAGGSSWHEEEEDDDEGGAAPDGGLSDLYDLFVGRQADGRGQEEDGVDGVGEIQAVEEQGLLDAKDGEEEEVEDDGDDMGFCMVGTTIALEFSDGEEDWIVVEEI

SEQ ID NO: 210865 - protein, 100 aa, Zea mays
  Clone ID: MRT4577_123904C.1.pep
TRKKSDLWLCTTTHHGDSTRLSTPFACLAKHTHTHTHTPLLGAQKKKNKATTHHSTHAQSFPLSLPLVPSKQLHLSPRHVSGLLLAAAPLLADNARGEGT

SEQ ID NO: 210866 - protein, 89 aa, Zea mays
  Clone ID: MRT4577_123905C.1.pep
VLKYLTAKVLELAASSSKGHKKTRLISSQVLLSIRTDQELSNLLSGVTIAHAGVLPTIILVLLPKKSADKAAPSETKSPKKAVKSPNKA

SEQ ID NO: 210867 - protein, 100 aa, Zea mays
  Clone ID: MRT4577_123906C.1.pep
TRKKSDLWLCTTTHHGDSTRLSTPFACLAKHTHTRTPLLGAQKKKNKATTHHSTHAQSFPLSLSPPPSKQAASSFSSPCLWFAASCCSIVGTDNARTRGA

SEQ ID NO: 210868 - protein, 229 aa, Zea mays
  Clone ID: MRT4577_123907C.1.pep
MEVAAASAAGYGFKADDDVDSLRATELRLGLPGTEEEEAEESQNKAPPPPPSTPRGKKRDVVASSGPEDAPKKRDCETDTDAAPPPAAKAQLVGWPPVRSYRKSCFQQQAAAKNKPAAALAEEAPAAGGLFVKVSMDGAPYLRKVDLKMYKGYRELREALEAMFLCFSGAGAADAPAVNPSDFAVTYEDKDGDLMLVGDVPFGMFISTCKRLRIMKGSEARGLGSAKNN

SEQ ID NO: 210869 - protein, 229 aa, Zea mays
  Clone ID: MRT4577_123908C.1.pep
MEVAAASAAGYGFKADDDVDSLRATELRLGLPGTEEEEAEESQNKAPPPPPSTPRGKKRDVVASSGPEDAPKKRDCETDTDAAPPPAAKAQLVGWPPVRSYRKSCFQQQAAAKNKPAAALAEEAPAAGGLFVKVSMDGAPYLRKVDLKMYKGYRELREALEAMFLCFSGAGAADAPAVNPSDFAVTYEDKDGDLMLVGDVPFGMFISTCKRLRIMKGPEARGLGSVKNN

SEQ ID NO: 210870 - protein, 230 aa, Zea mays
  Clone ID: MRT4577_123909C.1.pep
MEVAAASAASYGFKADDDVDSLRATELRLGLPGTEEKEEAEEPQHKAAPPPPSTPRGKKRDVVASSGPEDAPKKRDCETDADADAAPPPAAKAQLVGWPPVRSYRKSCFQQQAAAKNKPAAALAEEAPAAGGLFVKVSMDGAPYLRKVDLKMYKGYRELREALEAMFLCFSGAADAPAVNPSDFAVTYEDKDGDLMLVGDVPFGMFISTCKRLRIMKGSEARGLGSAKNN

SEQ ID NO: 210871 - protein, 187 aa, Zea mays
  Clone ID: MRT4577_12390C.1.pep
MRKRMESVDDLIEEAKLRTVWWALCIFAVSYFLTHTSKSMWTNVPMSILILAFLRYLSFKVEFRWREHPVRKQTHLSQASKRQLSANDHRLSTVPPVSRWRRKVGSPSVEAAFESFIEKILRDFVLDLWYSDITPDREAPELIRGLVLHALGELSGRVKEMNLVDMLTRDMVDLIGNHLDIFRENEI

SEQ ID NO: 210872 - protein, 65 aa, Zea mays
  Clone ID: MRT4577_123910C.1.pep
AHSSAHSYKDTCALINTFTQLSLPLNLQQLLHHGQVSSSHPSSLVGASPPPNSTTSHLPPSPASP

SEQ ID NO: 210873 - protein, 102 aa, Zea mays
  Clone ID: MRT4577_123911C.1.pep
TDRQERRVIFGFVQPRIMEIQLDSPLLLHVLLNTHAHTPLLGAQKKKNKATTHHSTHAQSFPLSLSLSLLPSKQLHISPRHVSGLLLAAAPLLADNARGEGT

SEQ ID NO: 210874 - protein, 44 aa, Zea mays
  Clone ID: MRT4577_123912C.1.pep
KIFLPKGQQRGQPFLKIDYTPLKKKKKSLLVALVVNYGEPFCRG

SEQ ID NO: 210875 - protein, 91 aa, Zea mays
  Clone ID: MRT4577_123913C.1.pep
RRVLIGRFVYLTCQLPHAAIFFCDRAISIITDFSAQDVYVQKVGCSCKQKKKKKKKKKKKKKKKKKKKKKKKKKKKKKKKKKKKKNKKKYK

SEQ ID NO: 210876 - protein, 88 aa, Zea mays
  Clone ID: MRT4577_123914C.1.pep
SWRISTVATASGVSRSPPFLASCIGRRARLPRLMLSPGGGRRRAQAGRSDPPSDGSLHDRLYAYVCARCRARLSSNAPPHPLATSACR

SEQ ID NO: 210877 - protein, 96 aa, Zea mays
  unsure (1)..(96): unsure at all Xaa locations
  Clone ID: MRT4577_123915C.1.pep
RPXPRVRPRRPXCFYEGDIXXXXTXLVRXPXKXPAHHXWCLMPWCLQARFLVMGRXSPAFGLKKNAPXVESKGHGDINPGAASSACTQLXTSSFLR

SEQ ID NO: 210878 - protein, 131 aa, Zea mays
  Clone ID: MRT4577_123916C.1.pep
MESENEKLRKALATFLRVVQKRSCDIVDVVNATFQPFNSPLLDEMNRALVEIDDLATDLEDIAVQTQWEVNNMDHCEVNEIPPQEEAVEEILIEDGSEDGLLIEEESPINYDEIVGYDDGRDYSIDDTYPY

SEQ ID NO: 210879 - protein, 112 aa, Zea mays
  Clone ID: MRT4577_123917C.1.pep
YTPWRSCITRISIVRAHILGILRKNYTALLSSSRRQITEARLGIDILYYLGDVTVCVLLLNLIVRLYCARCRGHLSCYFGRTVGVGRVLRRQRSQLYVMMLGVPLSSSGGVI

SEQ ID NO: 210880 - protein, 60 aa, Zea mays
  Clone ID: MRT4577_123918C.1.pep
GTRARKFYHIHKLKRSFTPNNLKHLLWPDYLNESGTPTGLKKGAAIQNLSILYIRQDRSG

SEQ ID NO: 210881 - protein, 431 aa, Zea mays
  Clone ID: MRT4577_123919C.1.pep
MAMRAAARQAILSPPLGPRSPRPFLCGCSLSIAPRLEPCRAASSTTAPAAGKHLPPLFSVAPMMDWTDNHYRTLARLISRHAWLYTEMVVAETIVHQKDNLDRFLAFPEEQHPIVLQIGGSNLENLAKATELANDYSYDEINLNCGCPSGKVAGHGCFGARLMFDPEFVGDAMSTIAANCDVPVSVKCRIGVDDRDSYEELCEFVDKVISKSPTRHFIIHARKALLSGLSPAENRKIPPLKYEYYFALLRDFPEIKFTLNGGITNVSQVSASMRQGAHGVMVGRAAYNKFAGLSSPWNMLGHVDGEIYGKQTRYISRRQILENYQAYGDSIIDQYGPSRPNVRQLVKPLLNLFHSEPGNSLWKRKADSALRHCKTVKTFLEETLDAISDSVLDKPVNREPSSDEEYFASVDSLLPPKYTTPMHERLVAAST

SEQ ID NO: 210882 - protein, 94 aa, Zea mays
  Clone ID: MRT4577_12391C.1.pep
GPRHLFISLRRGRGPPKKHAKKQEKLLYGGVPPFLKKGGRPEKHGETHPLAPWGKIKGIFPPHFSGRKPRPPSLGGPFSRDTGTHFLQGGPPFG

SEQ ID NO: 210883 - protein, 183 aa, Zea mays
  Clone ID: MRT4577_123920C.1.pep
NLQWCFTTSYVDELLSIQKISAETMLYSVWDANSRMCDSMVIKRNYVQQLRQEVKLGIVLKEQMDYLDHWAALQTEHSSSLSSATEALKASTLRLPVSGGAKANVLTVKNAVSSAVDIMQAMGSSICHLLSKLQASHSLVTELSAVAAKESTLLNEYRELLATAAALQVQESSLRTQLIQETE

SEQ ID NO: 210884 - protein, 76 aa, Zea mays
  Clone ID: MRT4577_123921C.1.pep
PLSEVHRADLREEEDTIGWAVSIAYVLVAVAAAIFGCHRSAYDPALVMCAIPLNLRLAPVPSTEVVRRTLPFKVSM

SEQ ID NO: 210885 - protein, 237 aa, Zea mays
  Clone ID: MRT4577_123922C.1.pep
MSVGHASSGVTEWKSSNSSEQGLGMPPIPPSQNQFSSRGRMGVRSRYVDTFNKSGASGAVPSYNKPAAPSVTPPAGAKFFIPTAAPVAADQMMPHQAAEIHSETMQQDERAASPPAGTSFSSTPPPTQFSSPPPHTQFSSPMQSTIHRQSSMANISTPYQSSGVSSLSSDTSFSKSRAASWSGTYSEQFSAFAGTRSPDGQTVRSPLMPGKPSHSRSNSNSSVQLNGLTEDLHEVEL

SEQ ID NO: 210886 - protein, 69 aa, Zea mays
  unsure (1)..(69): unsure at all Xaa locations
  Clone ID: MRT4577_123923C.1.pep
KCPGETPLPPLPVFVTGGWALFFIPTATKTLRGXWGLPLVLHSRVALXVFSLPVSIPHIWGCCLPRALW

SEQ ID NO: 210887 - protein, 54 aa, Zea mays
  Clone ID: MRT4577_123924C.1.pep
TSRIVLSSSSVRLRSPSAPPPSTDPLSDLNTPMIKRLFPLLQKDARDRDPESPC

SEQ ID NO: 210888 - protein, 79 aa, Zea mays
  Clone ID: MRT4577_123925C.1.pep
PARILNPMCMTMVPTMTNIGWTLPEPRTNIASHLTNRCGDYYHHTPLVTGYYNWENFLYLTNYPYWEPWLISTTLSTAV

SEQ ID NO: 210889 - protein, 85 aa, Zea mays
  Clone ID: MRT4577_123926C.1.pep
LLILGPQFAVCIHRPLCAQVNHASRVSDFEVGTGRGGCPLVHKRVCGPCNVQIQEFHHGLLGSPLCTCVSFIKCHPLLEKTVSRC

SEQ ID NO: 210890 - protein, 53 aa, Zea mays
  unsure (1)..(53): unsure at all Xaa locations
  Clone ID: MRT4577_123927C.1.pep
QXXHXRRKDLXNXSIQHHSGKGARPAMXXLGXLAAXLXDLAXLAAAFSAVXLG

SEQ ID NO: 210891 - protein, 65 aa, Zea mays
  Clone ID: MRT4577_123929C.1.pep
TCSNLYPLAIHLGVWYTSCRSSQSLSTGCWSDWLILPTSQRVAPTSMRDMTVMEASPSLFYRIYS

SEQ ID NO: 210892 - protein, 97 aa, Zea mays
  unsure (1)..(97): unsure at all Xaa locations
  Clone ID: MRT4577_12392C.1.pep
MTSLSRHSTWLVALTHLSRGGVFKEARGTSTIIAQWXKHFLSPETCXGFQYPTIQSYMGQEAIQACIVRALALTLLQPYALLEHPSLMHLYLQRIGV

SEQ ID NO: 210893 - protein, 49 aa, Zea mays
  Clone ID: MRT4577_123930C.1.pep
CSSASYRGHHEYTKPRPPRERERENHSTVMPPDPTAARASSAVSAASAA

SEQ ID NO: 210894 - protein, 53 aa, Zea mays
  unsure (1)..(53): unsure at all Xaa locations
  Clone ID: MRT4577_123931C.1.pep
LHRAXKKKKKKKKKKKKKKKKKKKKKKKKKKKKKRKQNKQKKKKKKKKGAPPF

SEQ ID NO: 210895 - protein, 150 aa, Zea mays
  Clone ID: MRT4577_123932C.1.pep
PTRPLSPLHLASLLTFVSVVLSYGVRSGTLGTSLPFPGSAAAMLAQVLLVHLLLLLPATYSADHHRHYRGRRSLHEPLFPLESTPALPPPPPAPFFPFLPGAAAPPTPEVGSASAPADTGAADASSSSSSPHPTGPANISFLAGLPVSRA

SEQ ID NO: 210896 - protein, 32 aa, Zea mays
  Clone ID: MRT4577_123933C.1.pep
PHRLGALRTQTSARPQPYCYHGLKTLPGSHGQ

SEQ ID NO: 210897 - protein, 37 aa, Zea mays
  Clone ID: MRT4577_123934C.1.pep
KGKGSLTRSMFRTEMSPANIIMLIVSCLYIDMVSVYY

SEQ ID NO: 210898 - protein, 280 aa, Zea mays
  unsure (1)..(280): unsure at all Xaa locations
  Clone ID: MRT4577_123935C.1.pep
MLLKTQREGCHLMIATPGRLYDILSDEYSRIAAPNLNALVLDEADRLMDDGFQKEIDDIKTLLPDPAEVERQNLMFSATIPRDVVNLVRQTMRPGFHFAKCVSEDEEPTHARIPQKMVMVTGFENNIPALYELVLQQHQKAQASGGRPFKAIIYFNSTAEVTLASSVFYKLSGGFKRNSPLSGLRGFEIHSKLSQGQRTRAADDFRFAKSGILFSSDVTAXXGMXFPXVTHVIQVGLPRERESYIXHRLGRTGRAGKEGEGWLILTPFEKQKADAVSVTC

SEQ ID NO: 210899 - protein, 208 aa, Zea mays
  unsure (1)..(208): unsure at all Xaa locations
  Clone ID: MRT4577_123936C.1.pep
MSMADAKDDAAMAEAQPLGRWPVLSYGVGHMLNDITSACWFTYLLLFLQQIGLAPRXDRFGRFKLWHIGGSVLVGFSFSSVFGGCLLCTILGTESYLVRTVGYSFFAAVFNVGWAATQVSHMSMVNCMTLNPTSRVALASCRNASTMVANLGLYGIALAVFGAIKAKEYSDIVTQYRWIAYLSIFIGCCLPGXSSCWKQEPTLKSEPN

SEQ ID NO: 210900 - protein, 63 aa, Zea mays
  Clone ID: MRT4577_123937C.1.pep
NLISLRQFLWLTTLNTIIAPSRTYLHSTPSASNLGHHLACGRLSIQRRRSSPGARAPRRPWTG

SEQ ID NO: 210901 - protein, 221 aa, Zea mays
  unsure (1)..(221): unsure at all Xaa locations
  Clone ID: MRT4577_123938C.1.pep
MSMADAKDDAAMAEAQPLGRWPVLSYGVGHMLNDITSACWFTYLLLFLQQIGLAPRAAAVVMLSGQVADGLMTILAGEMIDRFGRFKLWHIGGSVLVGFSFSSVFGGCLLCTILGTESYLVRTVGYSFFAAVFNVGWAATQVSHMSMVNCMTLNPTSRVALASCRNASTMVANLGLYGIALAVFGAIKAKEYSDIVTQYRWIAYLSIFIGCCXFLVGFHAG

SEQ ID NO: 210902 - protein, 80 aa, Zea mays
  Clone ID: MRT4577_123939C.1.pep
FFFFKIYIFFCTFNFHIFQDVISNVICACINLIKRYFCCPTIGKYLLVHPFMNFLFKVLLNLHKTPSYRPAIDRQVSSNK

SEQ ID NO: 210903 - protein, 163 aa, Zea mays
  Clone ID: MRT4577_12393C.1.pep
MSVGSKSKSLPARRGNEGRENGDGAVAREKGDLAAGGSVGSRSRKQKAAARRYDRSSSGLEFSIGRGPLKNVDAGRLKGQIKRWAKAVVAFARQISFGSPRSVPTPRSGHGPGHAAIGPVAGVQFLQPPRCRWRQGRSLRRQCLMYKNFFAYDLYRTTSTNLQ

SEQ ID NO: 210904 - protein, 47 aa, Zea mays
  Clone ID: MRT4577_123940C.1.pep
NTLHFPHFSPFQKSPFSTFLKITINPKCKLFPPLSPPINPNGPSFFP

SEQ ID NO: 210905 - protein, 134 aa, Zea mays
  Clone ID: MRT4577_123941C.1.pep
IENQKGNSTIGSLEGELKTLTTQIADRESRPCSIDTTHILMCSSSQANSKVWLDNENKSSMVLQAVISGAWTSKGSERHRPGRCQRLASGCDKLASGCDEQSSTPGSAEQSSIAHAAVIHARQGSQHCAKQSRA

SEQ ID NO: 210906 - protein, 72 aa, Zea mays
  Clone ID: MRT4577_123942C.1.pep
PPTRPRGGGPLFKPGVGFNQEGERLSWDFPAPSKSRAVWWPWVCRRSSEEPPKKAKTLPATTTNKSKLVLYG

SEQ ID NO: 210907 - protein, 59 aa, Zea mays
  Clone ID: MRT4577_123943C.1.pep
LPIAGWGHLDSGHLECAFAISFLFLETGLLPLNCSGLHFFFQHHCLRISKLRLLIKTPQ

SEQ ID NO: 210908 - protein, 116 aa, Zea mays
  Clone ID: MRT4577_123944C.1.pep
PPSSLRFSRPWRGIQAAPSSSIAGHDKPSSNDNKSVLLNHVPSSNGNNPVMPKLNPIPLPKPTQIMRCSDMPVSHIPAYPVVNGRIGGYGFSSTPYPNGFHPQALPGGPVHSHGKV

SEQ ID NO: 210909 - protein, 177 aa, Zea mays
  Clone ID: MRT4577_123945C.1.pep
MARNPGRTVFIGNLDEKVSERVLYEILIQAGHVVGLHVPSNKESNSRKGYAFAEYETEDIAQYAVRLFSGLVRINGKTLKFVIAGHGKPSSNDNKSVLLNPVPSSNANNPVMPKLNPIPLPKPTQIMRCSDMPVPHIPAYPVVNGRIGGYGFSSTPYPNGFHPQALPGGPVHSHGKV

SEQ ID NO: 210910 - protein, 75 aa, Zea mays
  Clone ID: MRT4577_123946C.1.pep
GLMHGLRYVHCYMISFVHAHYIYRERTSKKSPMARAARERRSGAPLRRLGAEVAVCAASATSKMAARAKNRMACH

SEQ ID NO: 210911 - protein, 43 aa, Zea mays
  Clone ID: MRT4577_123947C.1.pep
APFDAVTTADPVDGALLTAVECTGIEAAYWTHPSGILSVRPYG

SEQ ID NO: 210912 - protein, 50 aa, Zea mays
  Clone ID: MRT4577_123948C.1.pep
RMHPMESFLKSFKGISPPSKKLFPFKKKKKKKKKKKKKKKKKKKKKKKKK

SEQ ID NO: 210913 - protein, 82 aa, Zea mays
  Clone ID: MRT4577_123949C.1.pep
IVKLASCTRPGHYRVRPTRPGSLPTQPAAQLTRTKRRISCIAGHLHPHSNRWVPFLLTTLVDLDRCLIFSRLSYKHTWERLL

SEQ ID NO: 210914 - protein, 694 aa, Zea mays
  unsure (1)..(694): unsure at all Xaa locations
  Clone ID: MRT4577_12394C.1.pep
MATEEGAEPSAPVAEDGGAPSASAPAPSLPPSALATSVQVPNAADMAKAAAAARALQTRAEILSTSQLLVPQATPSQPAAAPTTLAAVQVQVNPDPETQTEADMEGIRQNMTRLQDMLRQMQGQQQAYEAARRSKAQLQAFLQQLSQPHNISSTAPSALPEGNTSQDAPSWLPSNQPANSIYSWEQLRDVFVLNFRCTYEEPKMQQHLLGIRQRLGESIREYMRRFSQARCQVQDITEASVINAASASLLESELTRKIANKELQTLEHLLHIIDGFVRGEEDSKRRQAMQAEYDKASVAAAQAQAQVQIAEPPPLTVRQPQPAIQGQPSRQGQAPMTWRKFRTDRAGKAVMTVEEVQALRKEFDAQEASNHQQPARKKARKDLYCAFHRRSSHTTEQCRNIRQRGNEQDSRPQQGAAVEAPREVAQEQAPPAEQRQDAQRRVIQVITRADPPIQLSKRQKKMQLRTIHNITSAGEGSPQYLNQQISFGPEDAEGVMFPHQDPXGFGGEAVQXLMIAFGSGENRREEQVLFDVVDIPYSYNAIFGRATLNKFEAISHHNYLKLKMPGPKGVIVVKGLQLSPASKCVLAIIKRAVRNVEAEPHDRAKHASKPAPHGKIVKMQIDDADPTKLVSLGGDMGEEEAKNILEVLKKNIDIFAWGPDEVGGVSADLIMHHLAVKPDAKPRKQKLCKMSADR

SEQ ID NO: 210915 - protein, 55 aa, Zea mays
  Clone ID: MRT4577_123950C.1.pep
SEDLVMVHAVGIIKQLTVFYIPKVRYGMCTPCICNTPVMVAVSFDALSVVHLYDT

SEQ ID NO: 210916 - protein, 79 aa, Zea mays
  unsure (1)..(79): unsure at all Xaa locations
  Clone ID: MRT4577_123951C.1.pep
YLTGEFLCDYSWDTVLLYVYPETLAXNRELEVIHCLWALLFALRGNFAEMLAHYGVQFGNAAWFKDGFQIFIXDGLDYL

SEQ ID NO: 210917 - protein, 92 aa, Zea mays
  unsure (1)..(92): unsure at all Xaa locations
  Clone ID: MRT4577_123952C.1.pep
MVVAPMMGMSLGPGGGPSGGSSGGSGSGKKRFRTKFTQEQKDRMLAFAERLGWRIQKHXEAAVQQFCEEVCVKRPVLKVWMHNNKPTLGKKP

SEQ ID NO: 210918 - protein, 133 aa, Zea mays
  Clone ID: MRT4577_123953C.1.pep
DLLSGDELLINQHLNAGVLEGVLWDVEAKLLTRGAVDVDIGANSYVEGGEDESVDDTAANVVDIVDTFRVQEQPPFDKKSFASYIKKYMKNLTAVLQPEKADEFIKGVEGATKFLLSKLHDLQIFDGESMKDD

SEQ ID NO: 210919 - protein, 175 aa, Zea mays
  Clone ID: MRT4577_123954C.1.pep
RPSCAPRLHPSASASCSDFVRAKLHPWSCLACRRPAVIFHLPAPPSHGRPSLLARLPAPWPSSRLPARRRSPRSSWRPTSAAPPSLWSSPGRLQPHAHGSSPPHRAPLLAVTSPWFPWRSAAHLPGARTRPPRSRPRRRTRADCSGVRDGTGRPSSSSSPRLSPCRSSFSSRHQP

SEQ ID NO: 210920 - protein, 63 aa, Zea mays
  Clone ID: MRT4577_123955C.1.pep
RSTHASERAEMITLRLQMISQSPGSELGKTQRARSPQRIRAISTKRHRKSKAMNPSQERRKKE

SEQ ID NO: 210921 - protein, 80 aa, Zea mays
  Clone ID: MRT4577_123956C.1.pep
LTLPASVRKIQAPFSSSLLLPPVLAQYFCLGHHSILVLAPVCSPRFIAFFSSRLFSFFFYFFLYFFFFLVTMLRILIKSK

SEQ ID NO: 210922 - protein, 72 aa, Zea mays
  Clone ID: MRT4577_123957C.1.pep
LLARQYPDREDGVGEVRTAGGAVPSCAQLKEIASLGLQFSSPVKISTSSMALVVMCGQPCSGKTAAAACIAV

SEQ ID NO: 210923 - protein, 82 aa, Zea mays
  Clone ID: MRT4577_123958C.1.pep
PRVRPRVRRAAVLFFFFFFFLETRPGCIMVIQSESVTAFISASAQRNTEVILGSIFIGSGGNQWFLNQVQKPMTTKYDLIWR

SEQ ID NO: 210924 - protein, 85 aa, Zea mays
  Clone ID: MRT4577_123959C.1.pep
MSKTRTTMTALMVLVTAATRDGARKTTASAIMGTAADVVRQFYDGVNLLDLATVEPVISEGCVYEDLVFPHPFIGREGVVHFFLG

SEQ ID NO: 210925 - protein, 61 aa, Zea mays
  unsure (1)..(61): unsure at all Xaa locations
  Clone ID: MRT4577_12395C.1.pep
XISIIYNXMIEFELIIXLICXASFIKYMVSVKSRVFKFMLILYLKXTSKYQICFKRKRCNI

SEQ ID NO: 210926 - protein, 147 aa, Zea mays
  unsure (1)..(147): unsure at all Xaa locations
  Clone ID: MRT4577_123960C.1.pep
NRGGRESPKAGDHTDARRAAXAHAHHGTHAGDDKATHXTTRRGGGGGTRFFFDIILXSSTPKRINTPCPPCTDETSDSSTETNGVVSSCLSCSLPGGALYRFEYAGNPALFLPKARGGTCPLPPLDPHDTVARRARYPLSNRSTRHT

SEQ ID NO: 210927 - protein, 137 aa, Zea mays
  Clone ID: MRT4577_123961C.1.pep
KSTVTSLAPASTVGGSALALHYANIVIVVEKLLRYPHLVGEEARDELYQMLPRSLKLALRKSLRARARSTAIYDAFLAHDWRETLEKTTLAWLAPMAHNTVRWQAERSFEFEQQQQRVVSERSVLLLQTLYFADREK

SEQ ID NO: 210928 - protein, 206 aa, Zea mays
  unsure (1)..(206): unsure at all Xaa locations
  Clone ID: MRT4577_123962C.1.pep
NHKTRARFLWTRTASGMHTXLCSGHKYVCTCLATCQHDRSEPGRASWTGCVLRALLQAAPTKQDVTRTPGSLPATVDVLLRSARRQKEGGWAWGRKKSRVLCWPWPRRPAVLSVRRIARAEHVRTSRRETDHRDKNGLFLLTVTTTTSTSRVVSFKHAKPGEYSPGRHVCRAHTHAAQHRPSLPPPARGTAAPVDRESSIVLRPGR

SEQ ID NO: 210929 - protein, 69 aa, Zea mays
  Clone ID: MRT4577_123963C.1.pep
PTRNKKLHFQIQKKKKKKKKKKKKKKKKKKKKKKKKLKKKKKKKKKGLTLPGGPLKGANFENFNKIGGR

SEQ ID NO: 210930 - protein, 63 aa, Zea mays
  unsure (1)..(63): unsure at all Xaa locations
  Clone ID: MRT4577_123964C.1.pep
YYSXPKCFLKNYLGQKHXPTYSTRPPSYINYITLHQHQSQFSTQPTPKHNTPQTHTYPCSFPT

SEQ ID NO: 210931 - protein, 59 aa, Zea mays
  Clone ID: MRT4577_123965C.1.pep
EDRRLTTKAWHGQVLVRHHKGLHDLDAQLMPEHAKATAGEMHDYQATYNPLYAQSIDGP

SEQ ID NO: 210932 - protein, 65 aa, Zea mays
  Clone ID: MRT4577_123966C.1.pep
HWWIWELSDTHMMFFQIQYGGVHRWSRLGGPCKDFVPGNPKKIAKTLLPIVVPHLVLKKKKKQNK

SEQ ID NO: 210933 - protein, 261 aa, Zea mays
  unsure (1)..(261): unsure at all Xaa locations
  Clone ID: MRT4577_123967C.1.pep
MRGSMVSRKIDLEEKRVYVPTPMFHEPIFELPIPVARTMQDNVVTTPVVSSPVATMNGHEELVLQDPIENDATSFTKIEGIDYNETFSPVSCKDSFKIIMALVAHYDLELHQMDVKTTFLNGDLEQIVYMAQPKGFVVKEKEGMGCRLKKSIYGLKQASRQWYFKFDRTIKNFGFKENVEDNCVYAKFKNAKYIFLVLYVDDILLACSDVSLLLETKKFLSSKFDMKDLGEAYFVLGIEVHRDRTKXGIGLSQKLYIQKIL

SEQ ID NO: 210934 - protein, 229 aa, Zea mays
  Clone ID: MRT4577_123968C.1.pep
KEQYCDAFLTAHFEVPGEMFSLAMEAKQRGMGVVGSTQNILDFIKDHVMGALDKNVDEHLQFVLGTESGMITSIVAAVQELLHFYSSQERANIKVEIVFPVSSDAISKTSNGSHHVGSSMATDLDNLTIVPGVSSGEGCSIHGGCASCPYMKMNTRPGLIKICHQLPDKNNKLSVYQANRINVRTPLGKSVAEVGCEPILHMRHFQKTRRLPNKLVHQVVHGNGDKPLQ

SEQ ID NO: 210935 - protein, 70 aa, Zea mays
  unsure (1)..(70): unsure at all Xaa locations
  Clone ID: MRT4577_123969C.1.pep
MLALTAENKPAEXKRSEEMAEMYQRVEKSVPSMEGGDKKGLKXAMTSVETYKIFICEVLKQVHPDIGISS

SEQ ID NO: 210936 - protein, 48 aa, Zea mays
  Clone ID: MRT4577_12396C.1.pep
MLGDAPGAVTAMGGAGASMVGPKNGTPEGKKKYTAICVPMPPAKVCGN

SEQ ID NO: 210937 - protein, 470 aa, Zea mays
  unsure (1)..(470): unsure at all Xaa locations
  Clone ID: MRT4577_123970C.1.pep
PRVRKVSGLVNTLKEKKIGVVAHFYMDPEVQGILTAAKKQWPHIQISDSLIMADSAVKMAEAGCDYITVLGVDFMSENVRAVLDQAGFNKVVVYRMSSEQIGCSLADAASSCEYTHFLREASRCYPSLHVIYINTSLETKAHAHELVPTITCTSSNVVPTILQAFAQIPNLNVWYGPDSYMGANIADLFQRMATMSDEEIAKIHPDHNRKSLSSLLPRLHYYQGGNCMVHDMFGHEVVGKIKEQYCDAFLTAHFEVPGEMFSLAMEAKRRAMGVVGSTQNISCFIRDHVMGALAANPDDQEVTQQACSPGXMVMVTNPCNSCSSILVFILSRRLDEGVXFPVSSMLISHTEEISHHVGSSMATRLNSLTIVPGVSSGACCSIHGGCASCPYMKMNTLGSLLKVCHQLPDKNNKLSVYQANRINVRTPLGKSVAEVGCEPILHMRHFQKTRRLPDKLVHQVVNGNGDKPLQ

SEQ ID NO: 210938 - protein, 30 aa, Zea mays
  Clone ID: MRT4577_123971C.1.pep
RPLFVIFVQQHRTLFTYPKHRMFHIELGHL

SEQ ID NO: 210939 - protein, 66 aa, Zea mays
  Clone ID: MRT4577_123972C.1.pep
LICERYITVHHSQFRHHRLGLFVTFVLLGNPRKLVCVPMYRDTRHSKNMYCTLFSTHCVCKFGLVT

SEQ ID NO: 210940 - protein, 195 aa, Zea mays
  unsure (1)..(195): unsure at all Xaa locations
  Clone ID: MRT4577_123973C.1.pep
LEAGRSSLRFSQLPCASVRLPPCCSSASSSPVVAHALSPACSSSSAQSPARPLAPSLVLAPVRSTAPTAERRGSPCAQPRFLPSASSSRAAALVSSRPDAXSAARPSSSSXTRSAPSPWRSLSLSSSARSRASLSXGRTRSVPSSLAVPSSPLRAAPHAPWSTPSDLVRASSAPSPSSSLLGAQPPCRRRGPPRC

SEQ ID NO: 210941 - protein, 68 aa, Zea mays
  Clone ID: MRT4577_123974C.1.pep
KKTLNTAVVEHAISEDDLTHPALYRFKINSPPCYNYHPKPSKPTPVIVETKIDYDLYPSIMRDMKNHE

SEQ ID NO: 210942 - protein, 109 aa, Zea mays
  unsure (1)..(109): unsure at all Xaa locations
  Clone ID: MRT4577_123975C.1.pep
VEHISRPLSGWAVRVGEGQSLVLKTSILKXKIKESGGKRGELPVPGSPVAGFPGTTRILRMGFQLSTFCFGILRRVALWRAQYDESCKLCSGGSYCLSLSSMVEPVGEA

SEQ ID NO: 210943 - protein, 80 aa, Zea mays
  Clone ID: MRT4577_123976C.1.pep
CDAGPTVTLGFYNTRSRFHSATTGHAAGTPRIPYSLVPILLTPRHLRRANRHHGRRTPWSAPTVPTSSSVPAPSTVSSAS

SEQ ID NO: 210944 - protein, 121 aa, Zea mays
  unsure (1)..(121): unsure at all Xaa locations
  Clone ID: MRT4577_123977C.1.pep
ISKKKKTKTKKKKKKKKKKKKKKKKLNPDKTFKWTGPWACPWRGPCRAPSPRMGPPPRPSLWAGPFPAPLPPFFPPALPXPCPCPFPNPRGVTTPSLPPXPSPFPAPXPFPPXPPLPQPAR

SEQ ID NO: 210945 - protein, 114 aa, Zea mays
  Clone ID: MRT4577_123978C.1.pep
GKVVPGKTIKIRNNVLHHRGRGTTGLQKMSLQKQGGGGGKEKPRGPGHGSAPKKPEGGKRVPGLSPAGGGVVFGGVPKGPKPGGVHHVYENRGKQCKPGGTASSSGGTGPPPRP

SEQ ID NO: 210946 - protein, 73 aa, Zea mays
  Clone ID: MRT4577_123979C.1.pep
NETNSKEKKMIPPGRGLQPKTETRLMGGKKILALHRQENIPRPRTFIQKNPLGQGLVKHRPLGYQKRPEFRGE

SEQ ID NO: 210947 - protein, 78 aa, Zea mays
  Clone ID: MRT4577_12397C.1.pep
LGTSRPAGLASPYPCYLLVATEVATLPAAQHSRATHDKTLVNQASCPILSLLQSIARFHIWILEMNDLMIEGRSMRNV

SEQ ID NO: 210948 - protein, 88 aa, Zea mays
  Clone ID: MRT4577_123980C.1.pep
LGTSRPADDVLLGVIPSVLSGLPPYYLWPEILIFCPISMEEYEMLPLRLWIPLSPRARAGLKQERQCSFSSEIHLNDGDRFRMGRRFP

SEQ ID NO: 210949 - protein, 45 aa, Zea mays
  Clone ID: MRT4577_123981C.1.pep
IFFSTLTFKMSCFQWINVHYFWFLSRLQPNSGLQHYKAMTTAILE

SEQ ID NO: 210950 - protein, 78 aa, Zea mays
  Clone ID: MRT4577_123982C.1.pep
ICKSSKKLGTPHKFVPKGVHHTVSPPPPMYIVLDEDIMYTLLEGPRNQILHLFIKSLSFLKKKKKNKKKKKKKKKKPS

SEQ ID NO: 210951 - protein, 95 aa, Zea mays
  Clone ID: MRT4577_123983C.1.pep
MATGAALSTAANPRGGYRSRASLGNPVNGLGLSMGRERPQLSIVCQTASTISAHRLSHMDNPKLMNLLLLLFISFPTVRIVLPHGAFFLPAGSRN

SEQ ID NO: 210952 - protein, 95 aa, Zea mays
  Clone ID: MRT4577_123984C.1.pep
KNPSHESLAFRDNRLVRCVSTIVRLLRSSIGGSLVHIWASQGSGSTWCGRFYSRDICTWSYACSLCSPLSPMKFALCFLVGTVEHSLSLWCFITG

SEQ ID NO: 210953 - protein, 69 aa, Zea mays
  Clone ID: MRT4577_123985C.1.pep
IALEHNMSILYIEFFIFMVMFFLGPRVFEDELIFENVLKESKKLFFIVIIIDKLFLIVVEDIMFFQTIK

SEQ ID NO: 210954 - protein, 93 aa, Zea mays
  Clone ID: MRT4577_123986C.1.pep
MAASVACAFFFDAEPVGEPGMPALDACALCAKPLARDSDVFMYRGDTPYCSKECRHEQMHLDAVSARQAARRLQRFSSGAESGRARQGVSVSS

SEQ ID NO: 210955 - protein, 107 aa, Zea mays
  Clone ID: MRT4577_123987C.1.pep
PGVPPLPKQIPGIKGFFFFSRRKDARLVRIKRAKDPVKFKVGCSRDLFPLWVPDAAKAPKVKQLLPPGFSVPGILGFQPPTVFFFGVRDVCPRVSFVCGGGPLLCFN

SEQ ID NO: 210956 - protein, 159 aa, Zea mays
  unsure (1)..(159): unsure at all Xaa locations
  Clone ID: MRT4577_123988C.1.pep
LDTSGIVWSVGGHRPAGSGAVACPASGVSGFITSTGGGGEPPPRDATLGRHLARRLVQVGVSDVFAVPGDFNLTLLDHLIAEPGLRVVGCCNELNAGYAADGYARARGVSACVVTFTVGGLSVLNAIAGAYSENLPVLCVVGGPNXSNDYGTNHVLHHT

SEQ ID NO: 210957 - protein, 77 aa, Zea mays
  unsure (1)..(77): unsure at all Xaa locations
  Clone ID: MRT4577_123989C.1.pep
CSRLYYPMCHMIDYMGGTRCTYIAVQAITSSXSTSTPTVLDWXVMLCSSLCIRVHRVNPCVQAHPSMLAIAKSCMRP

SEQ ID NO: 210958 - protein, 56 aa, Zea mays
  Clone ID: MRT4577_12398C.1.pep
GRSASIPCCLVFSYRRTCVDVQFLMRIVFGLRKFLLYSGPGVARKICNCPPPSCFT

SEQ ID NO: 210959 - protein, 225 aa, Zea mays
  Clone ID: MRT4577_123990C.1.pep
MSKFNSSLRRSCSPPPSSSSPPFLPPVSPPSAWPAVSPTLLTASPAVFWTMSPAPLTKSPPGTPSVMSSSPPPPPCFPFFCFWRWRRPPDALTSERATDSASLSCEPPLRPRPRLWRRRDCWRSCWGSGSSSPSAWAPPSASASASAPPSPSASSVWSGVGCCFCSFLPPSFLGVFFAGVCCSDMAVKVLLVGLCVCLVLQRGFSGEEWMVTFDGVMPAGLEVPN

SEQ ID NO: 210960 - protein, 111 aa, Zea mays
  Clone ID: MRT4577_123991C.1.pep
LQPCSRTLLLQGNISASPLTPMDCRLLIPGVRLLRGRLRMMLAQLPTVGLAHVLPRRFTPSSGRTLNTAQIPFVVTHPNVYEPCDHYFAIVDAVLSQIADSRHCSHRHEWR

SEQ ID NO: 210961 - protein, 35 aa, Zea mays
  Clone ID: MRT4577_123992C.1.pep
GQAFGAHLGRRSFGSLECSLVYNNLIIYLASMKCI

SEQ ID NO: 210962 - protein, 52 aa, Zea mays
  Clone ID: MRT4577_123993C.1.pep
SRYRTCSRSSTHSCLYSTHTSISGPRNKTTDELTISSESELRNGILTDHDRA

SEQ ID NO: 210963 - protein, 96 aa, Zea mays
  Clone ID: MRT4577_123994C.1.pep
MEGIIPFIFKVIAQYKEEGQAASFGGMASDGSVEPSPPVSSSYVLLPSDSDGRHRDERNDDGRPVCPTSSLDSGAVTTCTARPSPLRCSSTLRRRA

SEQ ID NO: 210964 - protein, 79 aa, Zea mays
  Clone ID: MRT4577_123995C.1.pep
GGEKGTGHGEGHIPKEWRLKLGRTVRSDRQSGRANVEKGEWGGALQGFPSRGKGNLRQCKLGRVPPGFTKKNVGKRRAG

SEQ ID NO: 210965 - protein, 176 aa, Zea mays
  Clone ID: MRT4577_123996C.1.pep
MPTYLDCSTGMDASVGMLTTPSVVVSTGSSNMPADSGQSLKYGGPLAADWTQLELEILRDGMEKYVHEQGIMKYIKIAASLPNKTVRDVAMRCQWVGKKVNTRRRKPQEHHTGRNTKERKDKFVEPAPRGTNHPLQTASEIDRPVLHLLEENNRLLNQIENNILRFQPYNNIPSLP

SEQ ID NO: 210966 - protein, 194 aa, Zea mays
  Clone ID: MRT4577_123997C.1.pep
MADDPNMNFREFSQSLCNQDVVSFQTSVATSGSGDMPTYLDCSTGMDAGVGMLPTPSVVVSTGSSNMPADSGQNLKYGGPLAADWTQVELEILKDGMEKYVHEQGIMKYIKIAASLPNKTVRDVAMRCQWVGKKVHTRRRKPQGRHTGRNTKERKDKFVESALWGANHPLRTGMRASSFVLHNVQNNMFLCGGW

SEQ ID NO: 210967 - protein, 158 aa, Zea mays
  Clone ID: MRT4577_123998C.1.pep
LTELSHLVLWHFLSCLGAESPRLEDPTSVLENLLYLQMADDPNMNFGAFSQSLCNQHVVSFQTSVATSGSGGMPTYLDCSTGMDASVGMLTTPSVVVSTGSSNMPADSGQSLKYGGPLAADWTQLELEILRDGMEKYVHEQGIMKYIKIAASVPNKTV

SEQ ID NO: 210968 - protein, 264 aa, Zea mays
  Clone ID: MRT4577_123999C.1.pep
MAGLFTEQAAVYAAARPAYPKDLFAKLSALTAHHRRAWDVGTGNGQAAIGVAEHYDSVVATDVSAEQLRHATPHPKVRYLHTRDATPGEEDLVAMLGGGEASVDLITVAQAVHWFDLPAFYGAARRVLRRPGGVIAVWGYNYRVSPVEDMMARFFSTTLPYWDPRARYCTDGYRDLPFPFEDIGLGKEGEPASLDVEHEMSFEGLIGMLRSWSAVTTAKQQGVDLLGARVVKELEEGWGGAELVRKVTYKAFLLAGTPGPMADE

SEQ ID NO: 210969 - protein, 67 aa, Zea mays
  Clone ID: MRT4577_12399C.1.pep
KGVGGFTPFLARGLALLFWGELPLENGSIRRFVGFNPLSSFFPREGFFPLKTGPKTPLGGLPPPSFC

SEQ ID NO: 210970 - protein, 91 aa, Zea mays
  unsure (1)..(91): unsure at all Xaa locations
  Clone ID: MRT4577_1239C.1.pep
QASAQAAGYGYPPPQQAGYGYGYPPPQAAGYGYQQQAVRPQKKKNNFXXGXAAGLXEGADXGLLIGDTISDSAAYDAGYDAGXDDGGGSDF

SEQ ID NO: 210971 - protein, 47 aa, Zea mays
  Clone ID: MRT4577_123C.1.pep
IGIRPEHPPYGGQRGLLGEDQSRLGGRTLKPPPPGGGGGHRGPSWFH

SEQ ID NO: 210972 - protein, 257 aa, Zea mays
  unsure (1)..(257): unsure at all Xaa locations
  Clone ID: MRT4577_124000C.1.pep
MRHANIPGLFHWDEWLPRGWPGTFIGCFHWFIYMPADSGQSLKYGGPLAADWTQVELEILRDGMEKYVHEQGIMKYIKIAASLPNKTVRDVAMRCQWVGKKVNTRRRKPQEHHTGRNTKERKDKFVEPALXNKSSSSNRHDSLFXVPHNGQNAMFISGASEIDRPVLHLLEENNRLLNQIETNIQRFQPHNNIDLFHRARRNINDLVQITTQLPGLRTKMPPLTVAIDENLASFVLPGITMDQVLGSNDLKEEPRGW

SEQ ID NO: 210973 - protein, 94 aa, Zea mays
  Clone ID: MRT4577_124001C.1.pep
INDAIFFAECTKLISASFVEVTHVMCYFSGYQGDGSMLVYSKVGWHWYRKMPYFSLVLIIGPAMTIWENKWLASFCSFAGIILIFNLYLICFKL

SEQ ID NO: 210974 - protein, 93 aa, Zea mays
  Clone ID: MRT4577_124002C.1.pep
STSTDLILGCPQPVAMMLQLRHCNAIAPLQDGQGVTRLTIQPIHIVMRSNECSFSSLHARTSLSIEASRARSRSSQGSLPTCAIFSESSVHSE

SEQ ID NO: 210975 - protein, 115 aa, Zea mays
  Clone ID: MRT4577_124003C.1.pep
MPCLNVSTNVNLEGVDTSAVLADASSTVATIIGKPEAYVMVVLKGSVPMAFGGTQEPAAYGELVSIGGLNADVNKKLSAGIASILESKLSIPKSRFYLKFHDSKRSDFGWNGSTF

SEQ ID NO: 210976 - protein, 70 aa, Zea mays
  unsure (1)..(70): unsure at all Xaa locations
  Clone ID: MRT4577_124004C.1.pep
XKXXXXKKKKKKKKKKKKKKIREKKKKGGGIXKKKIKKKKKKKKRGPPFKKQNFTSPKLQLKTFFLGSPK

SEQ ID NO: 210977 - protein, 100 aa, Zea mays
  Clone ID: MRT4577_124005C.1.pep
FFPRRHQLLPHHDISVPLVHPGRCHCQAIVFDLAVQAVVLSLPVCSSWHGRGTSSASCAYSLCTEHPLQLTGAESALAWTSSSLTSAAVAPRSPHHVCDP

SEQ ID NO: 210978 - protein, 81 aa, Zea mays
  Clone ID: MRT4577_124006C.1.pep
MDMEAQAAKARTEDPRRPPSDGGAAGAKCVEGGGDGASRSTAKREAEKAAAVEAEGAKPLPLPYERVPQPRDVYNEQLERM

SEQ ID NO: 210979 - protein, 41 aa, Zea mays
  Clone ID: MRT4577_124007C.1.pep
MAKDIEAAAAHEGKDYSDPPPAPLVDAEELTKLGSSASFSR

SEQ ID NO: 210980 - protein, 189 aa, Zea mays
  Clone ID: MRT4577_124008C.1.pep
MGKDDVIESGAGGGEFAAKDYTDPPPAPLIDAAELGSWSLYRAVIAEFIATLLFLYITVATVIGYKHQTDASASGADAACGGVGVLGIAWAFGGMIFVLVYCTAGISGGHINPAVTFGLFLATIPVTGTGINPARSLGAAVIYNKDKPWDDHWIFWVGPLVGAAIAAFYHQYILRAGAIKALGSFRSNA

SEQ ID NO: 210981 - protein, 177 aa, Zea mays
  Clone ID: MRT4577_124009C.1.pep
MGKDDVIESGAGGGEFAAKDYTDPPPAPLIDAAELGSWSLYRAVIAEFIANSLASGYSRGTGLGAEIIGTFVLVYTVFSATDPKRNARDSHVPVLAPLPIGFAVFMVHLATIPVTGTGINPARSLGAAVIYNKDKPWDDHWIFWVGPLVGAAIAAFYHQYILRAGAIKALGSFRSNA

SEQ ID NO: 210982 - protein, 53 aa, Zea mays
  Clone ID: MRT4577_12400C.1.pep
PTRPPTRPLMMHNGTYCAEIAHNVSTKKRTEIVERAAQFDIAVTNKLARLRSQ

SEQ ID NO: 210983 - protein, 62 aa, Zea mays
  Clone ID: MRT4577_124011C.1.pep
VTLAVLNSHLRIIIRCKFSSIKSLGQLHEGGASLTGVITIAGSCASVSGSPKSYYMSLSESH

SEQ ID NO: 210984 - protein, 143 aa, Zea mays
  unsure (1)..(143): unsure at all Xaa locations
  Clone ID: MRT4577_124013C.1.pep
MPACSSRLRALLLVACSQQPTRYRMPSRSLCDNGAKTTILYRLLMSEGVSTIPTNVFSVETEHYNNVKLQLWDLDVQRRIRTYWRRYCPETQGIIYGDDTRETEYARNSERXFHXILEXHELKGAAGLVKAIKQGHPRRTRMM

SEQ ID NO: 210985 - protein, 317 aa, Zea mays
  unsure (1)..(317): unsure at all Xaa locations
  Clone ID: MRT4577_124014C.1.pep
RLAREWPSDIEAAAHEGKDYSDPPPAPLVDAEELTKWSLYRAVIAEFVATLLFLYITVATVIGYKHQTDAAASGPDAACGGVGVLGIAWAFGGMIFILVYCTAGVSGGHINPAVTFGLFLARKVSLVRALLYIVAQCLGAICGVGLVKGFQSAFYVRYGGGANELSAGYSKGTGLAAEIIGTFVLVYTVFSATDPKRNARDSHVPVLAPLPIGFAVFMVHLATIPITGTGINPARSLGAAVIYTKDKPWDDHVRKRLCGLQDNQPALVMYNXISSFKPFXWIFWVGPLVGAAIAAFYHQYILRAGAIKALGSFRSNA

SEQ ID NO: 210986 - protein, 294 aa, Zea mays
  unsure (1)..(294): unsure at all Xaa locations
  Clone ID: MRT4577_124016C.1.pep
MGKDDVVESGAGGGGEFAAKDYTDPPPAPLVDAAELGSWSLYRAVIAEFIATLLFLYVTVATVIGYKHQTDASASGATADAACGGVGVLGIAWAFGGMIFVLVYCTAGISGGHINPAVTFGLFLARKVSLVRALLYMVAQCLGAVCGVGLVKAFQSAYFDRYGGGANSLASGYSXRGAGLGAEIVGTFVLVYTVFSATDPKRNARDSHVPVLAPLPIGFAVFMVHLATIPVTGTGINPARSLGAAVVYNKDKPWDDHWIFWVGPLLGAAIAAFYHQYILRAGAIKALGSFRSNA

SEQ ID NO: 210987 - protein, 294 aa, Zea mays
  Clone ID: MRT4577_124017C.1.pep
MGKDDVVQSGAGGGEFAAKDYTDPPPAPLVDAAELGSWSLYRAVIAEFIATLLFLYVTVATVIGYKHQTDASASASGAGADAACGGVGVLGIAWAFGGMIFVLVYCTAGISGGHINPAVTFGLFLARKVSLVRALLYMVAQCLGAVCGVGLVKAFQSAYFDRYGGGANSLASGYSRGAGLGAEIVGTFVLVYTVFSATDPKRNARDSHVPVLAPLPIGFAVFMVHLATIPVTGTGINPARSLGAAVVYNKDKPWDDHWIFWVGPLLGAAIAAFYHQYILRAGAIKALGSFRSNA

SEQ ID NO: 210988 - protein, 132 aa, Zea mays
  unsure (1)..(132): unsure at all Xaa locations
  Clone ID: MRT4577_124018C.1.pep
MAAKKFFLLMLPALSGCGGNATIFPXVTNLXIAFLLSPYLSSMIGXVCENPAFEPYKLQQAIAXSNIPLSPLVKQSPTLCLVHPLVQTIRAQPPXQPCLLELTKVLLVTFFPYFKXRQFASLNQLANLKPAA

SEQ ID NO: 210989 - protein, 55 aa, Zea mays
  Clone ID: MRT4577_124019C.1.pep
VKSVALAQVAIGMFVQEHSYFMRTRCQSLGSPMYNVAQGAGETEYVSAKEWVEPW

SEQ ID NO: 210990 - protein, 66 aa, Zea mays
  Clone ID: MRT4577_12401C.1.pep
LLPKPHAVYGRNRTQPPPLGFAAAVGGGKPAATAAMAGHGQDRKTIDLEDGWAFMQRGITKLINIL

SEQ ID NO: 210991 - protein, 68 aa, Zea mays
  Clone ID: MRT4577_124020C.1.pep
ENITTPTADPPLQSVNARLSRPTRTYRLGAATPSKRTRPRSLKHVFLNPLAITPITAPRQITGRAAGQ

SEQ ID NO: 210992 - protein, 54 aa, Zea mays
  Clone ID: MRT4577_124021C.1.pep
ILGVTSSIVAGRPFFFFLAKTVLDVLLSMAVFRNYHKSSRTFYRGFRSWDIEWL

SEQ ID NO: 210993 - protein, 363 aa, Zea mays
  Clone ID: MRT4577_124022C.1.pep
AAGHFGVFANTQTRSCSLEGSVKLKNLFGYCETWDASGALELDKTAELSAGVQMPRIGAIPTPLMARISFLSGDWLKSSLKEHLMGVSVGLLSTMNHNIAYNLTWRKFTDPTRMTSNSVQEELGHSLLSSIKYAYKVDQRDSSIRPTRGYAFMSTSQVGGLAPESKYSRFLRQEFDLRVALPLGVLNGALNAGVAAGVIHPLERGSTGSVSPLVERFNLGGNRPLVCRLGGSSSLLGFKTRGLRATESRTHDLDNSDSGTSPNGDVAVTAFADLSFDLPLKPLRELGIHGHAFVCAGNLGKLTECDLGKFPVTDFLQTFRSSAGFGVVVPTRLFRIEMNYCCILKQLDHDRAKTGVQFNFSSS

SEQ ID NO: 210994 - protein, 80 aa, Zea mays
  Clone ID: MRT4577_124023C.1.pep
KKRHYYLLYEKHRYNKFMSQEPGQLKNTNKNLIRCGMIRKYQKRRLITFSLNIRKMIECKTIEKTKTSNCLIRPARRVPQ

SEQ ID NO: 210995 - protein, 98 aa, Zea mays
  Clone ID: MRT4577_124024C.1.pep
ARAPSQRSFSGPWLEAQEAQLLSQPWQCQLYQGERLLGAAVYFTELSSPGAQRSGRAPGALPAGHLLLFLILGVLSLLLLVTGAFGFHLWRRQVSQGH

SEQ ID NO: 210996 - protein, 100 aa, Zea mays
  Clone ID: MRT4577_124025C.1.pep
APPPLPPQEIQSNHGETPHHARPQAGHQGTGQGRRQEQPHGAACQHPEHQQPPRCPETPTRTANKRISGIIYNKTPHELNTFHENAIRNGVTYTQHARHH

SEQ ID NO: 210997 - protein, 83 aa, Zea mays
  unsure (1)..(83): unsure at all Xaa locations
  Clone ID: MRT4577_124026C.1.pep
IKKNKKGKKNQNQYYQKQQYYXFNQLSTLYPAAYSHXHLLPFSQLATAXYSQYQQLAAFNQLTALNPAAYMQQHILLTSIQLA

SEQ ID NO: 210998 - protein, 57 aa, Zea mays
  Clone ID: MRT4577_124027C.1.pep
SQVPYSRAGLPNRASGRQPQAQTMSILSMNLATQRHPPSSFILCLHKHHPSMISRGK

SEQ ID NO: 210999 - protein, 99 aa, Zea mays
  Clone ID: MRT4577_124028C.1.pep
HWKLAVVYLEYVITICQGESLSGSMTVIPDKSNPGDIAFRLEYSINGHRCQVSRTQFCGMRWQWFNQELRQSSSKFCSTSILFDSKCATFSVHVPCTQY

SEQ ID NO: 211000 - protein, 150 aa, Zea mays
  unsure (1)..(150): unsure at all Xaa locations
  Clone ID: MRT4577_124029C.1.pep
MIYIFPSELLLDLFPLQTTSMFLSYLGTSHRNLAVMCELDIQMPTGFDPFPEVNDGYSGAEPGTKDYVSXCIEQRNVRKRLTTDQRVNKEISYSKILKDLEKECCXNGTVDQDPELGQVIQVQEDQRKNVSNFLVQCGIENKEHIQIHGF

SEQ ID NO: 211001 - protein, 108 aa, Zea mays
  Clone ID: MRT4577_12402C.1.pep
LYAQTPRDLVVIINCIFTSITMLSRSLWARQVAPLRRQVVAAPFAARRSVTTDAASAHAENIPEADDKPFTVRLSDESFETYELDPPRYTLETTRRAEQMYYDMCIGE

SEQ ID NO: 211002 - protein, 58 aa, Zea mays
  Clone ID: MRT4577_124030C.1.pep
TMMRMSHTQMNSLKGTTTHPAYCSITLITTKLTKSTHINHRQTNTSILIIYLLIHFLS

SEQ ID NO: 211003 - protein, 72 aa, Zea mays
  Clone ID: MRT4577_124031C.1.pep
SILKKIGRGKGPNGGGKIPRPGVSLGGGLFEPSKKFNSWVKKTFQNLVGEGGFSPGVAKVAKKGFGIGNGFF

SEQ ID NO: 211004 - protein, 69 aa, Zea mays
  Clone ID: MRT4577_124032C.1.pep
QVGVFGDHGNRRLQGDSAADEGHSRQGQLTGALYIISKTEVITYLRRATLTVTQITHGWPLMLHKTVYL

SEQ ID NO: 211005 - protein, 51 aa, Zea mays
  unsure (1)..(51): unsure at all Xaa locations
  Clone ID: MRT4577_124033C.1.pep
QTSGTTDEQRKQAQPAQADARQEEHHIAFLLLFVPXXESPLCMTPPSPPRA

SEQ ID NO: 211006 - protein, 72 aa, Zea mays
  Clone ID: MRT4577_124034C.1.pep
SPHSYPNCGQTLRWCHCFLLYYPKTFKLLFTFPHSTPYISKKLNYLPSIKKLIHLQHYPKISHQIFLLQKNI

SEQ ID NO: 211007 - protein, 69 aa, Zea mays
  Clone ID: MRT4577_124035C.1.pep
GNTSIGNILEDDQSPRERMKKLKPMNISKGLLRKTNTKHREVFLLDRYKSVLMVVGALMVVGSLVFLLS

SEQ ID NO: 211008 - protein, 108 aa, Zea mays
  Clone ID: MRT4577_124036C.1.pep
MLVPSTPCSGHCPLGPLFFFGKNKFFSATPVFVGLKKKGPYVKPCFTSQIGLANFPCPPRCCKVYTGHLFSGTNFLSGLGSKKKKKKKKKKKKKKKKTKKKKKKKKKK

SEQ ID NO: 211009 - protein, 147 aa, Zea mays
  Clone ID: MRT4577_124037C.1.pep
MAMSPTTTTLLLAAAALLVASCSAWEANIRMPTSLDQAVVAPLIHALRPLLGSGKHSGVACDSWVLGVEAHNVRDWKTVPASCEGYVGHYMLGSHFRRDSKVVVDQALAYVDSLKLAGNGKEVWVFDIDETTLSNLPYYAKHGFGAT

SEQ ID NO: 211010 - protein, 167 aa, Zea mays
  unsure (1)..(167): unsure at all Xaa locations
  Clone ID: MRT4577_124038C.1.pep
PTPESLPCRLTWHTHTPQEKAFKAADPYDRHPSYLDAYSRRNFPPTXWAXYLLPHPSHTWWVGHKPTPDDKDYTVHLGGMQRKGRSRETNHHAFNEKETRSMKLEFFMAESVPQGAHCGMTGGGIQXHHCRATLGATQNMNFDXYLILRTSKLVGAHDPCWVGNLIA

SEQ ID NO: 211011 - protein, 90 aa, Zea mays
  Clone ID: MRT4577_124039C.1.pep
VRNAPQGCYCAYWLPRPEPTIRPTRHHFVSWPLPHAGGAHGIFLELAAGARAKERQVLPPVTMHGRAVPTPGKGIKKGQDVMARTRRPRP

SEQ ID NO: 211012 - protein, 95 aa, Zea mays
  unsure (1)..(95): unsure at all Xaa locations
  Clone ID: MRT4577_12403C.1.pep
DDATNNAEPRKAGGQCXDVPTLAHLHEHDFRKFCPDLEHEETDHVLAEAFSIYPCINMAKDIRDNRTGXTKGYRFICTAEEGDHTCDLEVTNRLY

SEQ ID NO: 211013 - protein, 115 aa, Zea mays
  Clone ID: MRT4577_124040C.1.pep
MNEMQNKIEQKSFLEMKLVDPFDDMSKRFECTMIVTRIADNEPWFYQGCTKCNTSTKYEGKTYICKQGHASSQMVHRYKISLYATDGTCELEFVLFDERATSLIAKTAEKLLRHS

SEQ ID NO: 211014 - protein, 52 aa, Zea mays
  Clone ID: MRT4577_124041C.1.pep
TLTGCSFIGYTCTVQQAYNHCTQKLIKLLRLKHERFEICLRQQAFILSVACA

SEQ ID NO: 211015 - protein, 58 aa, Zea mays
  Clone ID: MRT4577_124042C.1.pep
QLLHLQSKRFECTMIVTRIADNEPWFYQGCTKCNTSTKYEGKTYICKQGHISSQMVHR

SEQ ID NO: 211016 - protein, 333 aa, Zea mays
  Clone ID: MRT4577_124043C.1.pep
MDINSQSNQKQESCGPNGSKDRILRSTSRSSSSREKTMEKSCSSAHKGKRTLWGRTSARKDLSTEEIECCSDDEALVEKLESNKIDLQSKIAKEAKENAILWSSLEKRKEELHERRLALEKEVENLRDQLKRVMNLRRGQVSSPSTIDSKVRGQQLCCESCNQRLLNTDRLSGPESSSVEASPTVGSDPAFDMGDIEQSRKQAAQHSPSSRDKPSHEAVGGITQRAPQRGHSIAREGQDGSSSLSSSNSKWNLAQKQYSNSPLIRGLHVSSRLEDFGGSISPAASSALAKLTNRLNFLKERRALLASEMQSLDLGRPPTVKSPTPKGHESKNS

SEQ ID NO: 211017 - protein, 62 aa, Zea mays
  Clone ID: MRT4577_124044C.1.pep
NNYDCTRTQAQTPNPGSLFFNSTPTKRALEGCWVVPQNTPLATAPTLLTKALSSPTLRLPKH

SEQ ID NO: 211018 - protein, 88 aa, Zea mays
  Clone ID: MRT4577_124045C.1.pep
HIKGRLFSFIAKDITIYLTLVTRIKLNLYKKASHPITPYTTNQTVYPLKARLGPDVMKGTQGAKIPYYLNSKVCLIRNGLRRIREEFT

SEQ ID NO: 211019 - protein, 184 aa, Zea mays
  Clone ID: MRT4577_124046C.1.pep
MRGNVSPCAAAKARGKVRPEDVAEAARLAAAGQSFEVVYYPRASTPEFCVRAAAVRAAMRVQWSPGMRFKMAFETEDSSRISWFMGTVAGVQVTDPIRWPQSPWRLLQVTWDEPDLLQNVKRVSPWLVELVSSMPAIHLASFSPPRKKPRIPAYPEFPFEGQLLNPAFPPSPLPHGQQHHHNFL

SEQ ID NO: 211020 - protein, 111 aa, Zea mays
  Clone ID: MRT4577_124047C.1.pep
VRQKLNRIGPVGWKGAWRKRGRERGIRGWGIREDGRERWGSAPSKLKMEGGRWDEGGGWKERGTTAGCGRDVRGGCGAGCARQNMDKLFPYYCLSINHAQRFKPSCTTFLF

SEQ ID NO: 211021 - protein, 207 aa, Zea mays
  unsure (1)..(207): unsure at all Xaa locations
  Clone ID: MRT4577_124048C.1.pep
MARKRTAARHQHQEPPPNPNPNLRRRAAASDPASDEPPPSSKRMLAFHFLRALARIHSTTPAPRRPRTIRRAAYSSMARAASPRRAWTQALLRQARARRAAARSSRGAVLLRRRVASAAASPPPXAPRQRRGVDVGADAXAPAAVAARGPPPRQAGEPARADALRRLVPGGAEMEYGSLLDETGDYVRSLRAQVQLMQSLVDLFSAQ

SEQ ID NO: 211022 - protein, 209 aa, Zea mays
  unsure (1)..(209): unsure at all Xaa locations
  Clone ID: MRT4577_124049C.1.pep
MAGGKRTTARHQHHHPPPPPPNPSPNGRRGVADPPPASDDSPSSKRMLAFHFLRALARIHSTTPAPRRPRTIRRAAYSSMARAASPRRAWTQALLLRRARSRGVAVVGSSRRAVLLRRRVSASAPPPMLRAXAPGRSAAAPPVQGPPPRQAGEPARADALRRIVPGGAGMEYCSLLDETADYVLHLRAQVQLMQSLVDLFSRPTQPVIN

SEQ ID NO: 211023 - protein, 111 aa, Zea mays
  unsure (1)..(111): unsure at all Xaa locations
  Clone ID: MRT4577_12404C.1.pep
MRRVIRLQRIGCGXSLFESHTDHRKGPARFRSLDFGXRNGYLKVVLTDVVHDPGRGAPLAKVTFRHPFWSKHQNVLFVAGDRLYTAQFAYCDRRASLVTENVLPLRGIPEG

SEQ ID NO: 211024 - protein, 121 aa, Zea mays
  unsure (1)..(121): unsure at all Xaa locations
  Clone ID: MRT4577_124050C.1.pep
VPWYLSEGDLKTAALLVMLYFHMLCHCRSLCIKTKAAQTDXAAHKHQMVKSMLWHDCEGKGALLCTMCKRPGENAGDYLEGLLTAGSVRSESQGKRVLPXGNGKGAGVVCGSNNTICETGH

SEQ ID NO: 211025 - protein, 84 aa, Zea mays
  unsure (1)..(84): unsure at all Xaa locations
  Clone ID: MRT4577_124051C.1.pep
GFLYPMVDLKNTRRGGLXVLAVYPPDEEVINSVLVGGKINAHVKGLKNGHAHGRGGVPKVSPPCKCCKMVGNTLPQKREKMATG

SEQ ID NO: 211026 - protein, 61 aa, Zea mays
  Clone ID: MRT4577_124052C.1.pep
RVLKGCQSNGINGIKVIVVFLELRIVFSVVKKGRFVLNLMSFKPLNGIYVYVHGFLGEYNL

SEQ ID NO: 211027 - protein, 132 aa, Zea mays
  unsure (1)..(132): unsure at all Xaa locations
  Clone ID: MRT4577_124053C.1.pep
GSLFLGLLSGXXLFPPPXXXGXVAXGFLXGLFVLXXXXGLFGRAFXXXRLXRXLCRXXWGAVLXPPGRPSLGVVGCFRLLVACLPWSGPLRGPGAPPPSALACVFVALPVLFVLPWPVRRCLGGASVVSCVA

SEQ ID NO: 211028 - protein, 101 aa, Zea mays
  Clone ID: MRT4577_124054C.1.pep
DRRERDDDTIYRLNNLAERSMVTDIMLSRRHRYGHKRNQYARSDLLKLHRVERPHHYPHAKRRTLHESVIVVKEVGTIAADFAIDVVASVVNVTGKGLILV

SEQ ID NO: 211029 - protein, 39 aa, Zea mays
  Clone ID: MRT4577_124055C.1.pep
KVLVLQTIWLYTCTLYTISPIHNTINKCAFSIFVLLCHS

SEQ ID NO: 211030 - protein, 82 aa, Zea mays
  Clone ID: MRT4577_124056C.1.pep
EHASVDWASLLERASLRAAAMYTIRLGSRSQSAPNRGLISGVSKKLGLPDNGAYAYPFRSTEFSPETTQSSFLTCASADILR

SEQ ID NO: 211031 - protein, 155 aa, Zea mays
  Clone ID: MRT4577_124057C.1.pep
DAWGANNLPSPFDPLDKLQEKFRNFNLDDTDLVALQGAHTFGKVQCQFTQENCTAGQPEETLENLDQVTPNVFDNKYYGNLLHGAAQLPSDQVMLSADPVAEMTTAPIVHRFAGNQEDFFRNFAASMVKMGNISPLTRNDGEIRKFCRRINSEGY

SEQ ID NO: 211032 - protein, 66 aa, Zea mays
  Clone ID: MRT4577_124058C.1.pep
KSVSCEGGATPRIGARVQLPSTVVQRASSGSVYMRCSRRLDVTFLLCATNSCPLIGTRYVEYADSR

SEQ ID NO: 211033 - protein, 143 aa, Zea mays
  Clone ID: MRT4577_124059C.1.pep
NGEDMFYLEQEPGHLGDHEGAAPVADSRFGVIVQEQGVIVHEQGEAVGTLPNGNNGIGNEMNVECKMVVPCSNEHRMANAVLDVFEECLREAKSNGVINGGNVDGSGEESELSKRWRAQRMDELDVLSRRLRLLVEYAAAAGQ

SEQ ID NO: 211034 - protein, 47 aa, Zea mays
  Clone ID: MRT4577_12405C.1.pep
YHAYLSLIQNHIHNKGGSLNPNWGHINHQKLKRIQSISTNLTLLQLQ

SEQ ID NO: 211035 - protein, 66 aa, Zea mays
  Clone ID: MRT4577_124060C.1.pep
QNFTLTNDYSACSFEIDIQLLCLTSTEKTDQICKKKNDPGYVPLLVMLVKSPHKRNLTYATQNHPG

SEQ ID NO: 211036 - protein, 61 aa, Zea mays
  Clone ID: MRT4577_124061C.1.pep
STTGWGKHGLPFQIFTKWRANFWDNFDDFYEGASGCFLGSAAWNWGNLDGFIRGPFQDWGH

SEQ ID NO: 211037 - protein, 606 aa, Zea mays
  Clone ID: MRT4577_124062C.1.pep
MRRWWSPALAAVEPRSVQLLLLGVALVAASFYAGTLFGSSASPALVLPPSRPRSPDSFRAKVTDVPVFTNRVSRTYRAKSVTVPDHGVDVCPLEYNEYVPCHDGAYISSLKSLDTSRHEDLESICPPWEKRLFCLVPPPNDYKIPIRWPTSRDYVWRSNVNHSHLAEVKGGQNWVHEKGKLWWFPGGGTHFKHGASEYIERLGNMTTNSTGDLRSAGVVQVLDVGCGVASFSAYLLPLDIRTMSFAPKDGHENQIQFALERGIGAMISVLATKQLPYPENSFEMVHCSRCRVDWHENDGILLKEVDRLLRPNGYFVYSAPPAYRKDKDFPVIWEKLVNITTTMCWKLIAKHVQTAIWVKPEDESCRQKNVDMNLLSICESNDNISPSWKIPLMNCVKLNKDKSNIQKLPSRSDRLSFYSKSLEIIGVAPERFEKNNQFWKNQVHKYWSFLHVEKTSIRNVMDMNANYGGFAAALSSDPVWIMNIVPYTMMNTLPVIYDRGLLGSYHDWCEPFSTYPRSYDLLHAFHLFSHYKRRKEDCLLEDIMLEMDRIIRPQGFIIIRDENDTLSRIINLAPKFLWDVTTHMLENEESGTDQVLFCRKKFWAIV

SEQ ID NO: 211038 - protein, 89 aa, Zea mays
  Clone ID: MRT4577_124063C.1.pep
PRHHVIPAASSSRGGPLRRPFSARADVADGVARRKSSRWVLCELRRQGEEVDGTSAGTACDRARRRRRWTADDPESGGAAAARSAGERK

SEQ ID NO: 211039 - protein, 59 aa, Zea mays
  Clone ID: MRT4577_124064C.1.pep
ITVYKVRWHCSVTIHINNALNESAISGYLHLKDIHYNHLEPTACMEAQTQWLIHLRNNQ

SEQ ID NO: 211040 - protein, 116 aa, Zea mays
  Clone ID: MRT4577_124065C.1.pep
SCVYVEIINLLDWSADIASRSRPSFAPLGVNLDPGHRISIISVPDAPAAPSPVAVVYHELLQLSNDDFNFCNVGKPAFRKSRFLVHLWFDFCVLASKSQTKHILISTLYQIRIQIY

SEQ ID NO: 211041 - protein, 119 aa, Zea mays
  unsure (1)..(119): unsure at all Xaa locations
  Clone ID: MRT4577_124066C.1.pep
GRVHSEPKLGFLAEVDPSTRVLSTDSFLKHTDVAILLDNDAIYDICRRSLDIERPTYTNLNRLVIQVIXYLTACLRIDGALNVDVNEFQTNLVPYPRIHFMLSSNAPIMSAEKAYHKQL

SEQ ID NO: 211042 - protein, 71 aa, Zea mays
  Clone ID: MRT4577_124067C.1.pep
STDSPARSSVGQSPAPVRSVTARVVVSASPGRIFLRLPLPSPVVVDARMLVPVLSFSIYHAYSLGPRAAKE

SEQ ID NO: 211043 - protein, 42 aa, Zea mays
  Clone ID: MRT4577_124068C.1.pep
TLHGLRGINIEPESCAAVPHIRKCNPYYKKKYISYTKTINLE

SEQ ID NO: 211044 - protein, 78 aa, Zea mays
  unsure (1)..(78): unsure at all Xaa locations
  Clone ID: MRT4577_124069C.1.pep
VDDNMSAWLVVKNTLKIMPXFKLPSVRPYDVRFRMKAAVICSIYLHYLREMRLPHLVHIEPMAIGHDCAGVVYEVCAS

SEQ ID NO: 211045 - protein, 50 aa, Zea mays
  Clone ID: MRT4577_12406C.1.pep
IPSFISSNSSPPYLINQSYRISSSTRNNNNHYLVSHSSFIFSNPPYLINR

SEQ ID NO: 211046 - protein, 93 aa, Zea mays
  unsure (1)..(93): unsure at all Xaa locations
  Clone ID: MRT4577_124070C.1.pep
VFPGFSLAPWTPPPPSRPFGVPPLVLLFHIFLPRPPPPVSAPPVPGGPGFGPRFSVHCAFPSFAPPRWSSSRSSPSASSSPFGMLVERAFLXX

SEQ ID NO: 211047 - protein, 66 aa, Zea mays
  Clone ID: MRT4577_124071C.1.pep
LSWLSLLAPPTRIQAKISALISPSIHELLPPLHMISSHFHLSFVVNLTIYCFIFHILLLFFINNYI

SEQ ID NO: 211048 - protein, 79 aa, Zea mays
  Clone ID: MRT4577_124072C.1.pep
GKDRKRGIDQKGLFKKTKNFFWGAKKKHLFLAPKQIIHYPQGWDFLPRGLTGGGGIIIGPKFIIGERWGHNKRRLFGQT

SEQ ID NO: 211049 - protein, 104 aa, Zea mays
  Clone ID: MRT4577_124073C.1.pep
PLCFVKKAQRGGPFKIPRSSPHSKLNNEKNPPSLPWKAGRLLAPLPQCLLWVPPPHGPGPVGNPPPPPFLRIGRGVGNSPPGTPPVFFLGQAGGGFFWAPPCFP

SEQ ID NO: 211050 - protein, 173 aa, Zea mays
  Clone ID: MRT4577_124074C.1.pep
MSRALEPLVVGKVIGEVIDNFNPTVKMTVTYGSDKQVFNGHEFFPSAVLSKPRVQVQGDDMRSFFTLVMTDPDVPGPSDPYLREHLHWMVTDIPGTTDASFGRELVMYESPKPYIGFHRFVLVLFKQSSRQSVCPPSSRDYFNTRRFAADNNLGLPVAAVYFNAQRETAARRR

SEQ ID NO: 211051 - protein, 45 aa, Zea mays
  Clone ID: MRT4577_124075C.1.pep
GWLFEVVVATDCRIRGLIEPLGYSKKPPVPSALVPKRFENVRVRA

SEQ ID NO: 211052 - protein, 176 aa, Zea mays
  Clone ID: MRT4577_124076C.1.pep
MSRALEPLVVGKVIGEVIDNFNPTVKMTVTYGSNKQVFNGHEFFPSAVLCKPRVEVQGDDMRSFFTLVMTDPDVPGPSDPYLREHIHWIVTDIPGTTDASFGRELVMYESPKPYIGIHRFVFVLFKQSSRQSARPPSSGGSRDYFNTRRFAADNNLGLPVAAVYFNAQRETAARRR

SEQ ID NO: 211053 - protein, 68 aa, Zea mays
  Clone ID: MRT4577_124077C.1.pep
EDWSRISSPGSRRRASVELVRRNSVSFPYESSLLLSVASSWGRDKLERRGLPLRRRAVSSSGSHLSPF

SEQ ID NO: 211054 - protein, 42 aa, Zea mays
  Clone ID: MRT4577_124078C.1.pep
PETRRISHLLSSSVEAHVDAEAWTSRRCSLPTARRNVYPRVR

SEQ ID NO: 211055 - protein, 98 aa, Zea mays
  unsure (1)..(98): unsure at all Xaa locations
  Clone ID: MRT4577_124079C.1.pep
MAAKIXCLLMLLGLSASAATATIFPKCSXAPIASLLPPYLSPAVSSDVXNPILTLRTTGIQCITLYLSHNIAIIVLVLCQHRHTHTGSLSLRQVSYTV

SEQ ID NO: 211056 - protein, 93 aa, Zea mays
  Clone ID: MRT4577_12407C.1.pep
TGDAWAAAWSEAWSDAWADSWGTSSTRIHCLLSELCAGPDRWPSRHLSDGLRSSRTTLTRWSRCVDPTLRGLYPCKCISGPPDSPMPSLYAFR

SEQ ID NO: 211057 - protein, 228 aa, Zea mays
  Clone ID: MRT4577_124080C.1.pep
MASSSSTAEPVTKVQLEGKVIAITGANRGIGLGIAHSCLTNGASAVYSLDIGTPDTDFTTLASKYPNQLFALGADVTNEASIQAAIDKVLAEAGALHGMVCNAGRTKHKPALEFTTEEIDQLWGVNLYGSFYSARCAARAFIKQGVKGSIVFTASMASYRPNKRVPSAPYGASKAGIRNMTHTLAMEWAQYNIRVNSVSPGLVKTAMTYWVEQQPDWEQQLRYYGGMP

SEQ ID NO: 211058 - protein, 85 aa, Zea mays
  unsure (1)..(85): unsure at all Xaa locations
  Clone ID: MRT4577_124081C.1.pep
GXNGPTARVRLFKLLPLSTSYSHKNPLYTSVVLHTVHCLLVLDCKTHIQTYYWLYQATTQSHLPIIAPSVYTKSTPNFGASINTK

SEQ ID NO: 211059 - protein, 83 aa, Zea mays
  Clone ID: MRT4577_124082C.1.pep
DKWWHDTESSIPIRMNCWFKSDNQSIGKKEGITVRWNARVGIHSSRYGSLRAFKSSVRASQLIEACSYEALRISYFTKIGWGW

SEQ ID NO: 211060 - protein, 98 aa, Zea mays
  unsure (1)..(98): unsure at all Xaa locations
  Clone ID: MRT4577_124083C.1.pep
KRLTYPLLXPRIEEKIMGLDEHIGWPMSGITVDARTLDEHARVTNSHSMFPFREPMTVKSAHKLLWTXPLRFXEGDEKSMSXAFAVSALXAGHDENGP

SEQ ID NO: 211061 - protein, 65 aa, Zea mays
  Clone ID: MRT4577_124084C.1.pep
DYPVPSGVTYLGIEAVVDGCDRAEHQEEHYYRVWTVHPCLIKRSAVGRLVFGSAWRRAGKTVVSR

SEQ ID NO: 211062 - protein, 216 aa, Zea mays
  unsure (1)..(216): unsure at all Xaa locations
  Clone ID: MRT4577_124086C.1.pep
INAVVYYSTSVFRNAGITSDVAASALVGAANVFGTMVASSLMDKQGRKSLLMTSFSGMXCPCVQQIMCLFSLSISKWRVHIHFFSPLKGASMLLLALSFTWKALAPYSGILAVVGTVLYVLSFALGAGPVPALLLPEIFASRIRAKAVALSLGMHWVSNFFIGLYFLSVVNKFGISNVYLGFASVCVLAVLYIAGNVVETKGRSLEEIERELSVAE

SEQ ID NO: 211063 - protein, 163 aa, Zea mays
  Clone ID: MRT4577_124087C.1.pep
TITTVIKKMMRCAATGGGCVASWSGDWRLPAVNPCSVRMPTGNDGWCAGLRSRAADLAGLEMANLRGGVGGLFRASPRYGRLQATAAVDPEDIPLEKVQVKSSGHVLPYVGVACLGAILFGYHLGVVNGALEYLAKDLGIAENAVLQGWVAYTSLPGATLGPF

SEQ ID NO: 211064 - protein, 114 aa, Zea mays
  Clone ID: MRT4577_124088C.1.pep
ALAPYSGTLAVVGTVLYVLSFALGAGPVPALLLPEIFASRIRAKAVALSLGMHWVSNFFIGLYFLSVVSKFGISNVYLGFASVCALAVLYIAGNVVETKGRSLEEIERELSVAE

SEQ ID NO: 211065 - protein, 107 aa, Zea mays
  unsure (1)..(107): unsure at all Xaa locations
  Clone ID: MRT4577_124089C.1.pep
FIFIITFPXTFRESFQHEEGHPSLLFPLSVIYHLLSNPYSLPLLRSSLLIPHLLLPYYYDVPLLSLPLLLVPLSTTLPPSYILFPLLLFYPFYRHFPFSSTTFTFSF

SEQ ID NO: 211066 - protein, 71 aa, Zea mays
  Clone ID: MRT4577_12408C.1.pep
MASFNKLNDALNSMYNSEKICKRQSMIRPTYKVIIKLLTVIQSHDYIIYFEYIYDHRSNNILFKLKPRIKQ

SEQ ID NO: 211067 - protein, 58 aa, Zea mays
  Clone ID: MRT4577_124090C.1.pep
STHGKTPLNLSWSGPYNPKGKARNLNLPTGGYIFAATKKEGKKPNTRKNIARFFLKKK

SEQ ID NO: 211068 - protein, 306 aa, Zea mays
  unsure (1)..(306): unsure at all Xaa locations
  Clone ID: MRT4577_124091C.1.pep
SHFEIPKRRPRHSSEPVVAYPLPTQRQTVEIFFITYFYLWWWWWWCAIAGTITTVIKKMMRCAATGGGCVASWSGDRRLPAVNPCSVRMPTGNDGWCAGLRSRAADLAGLEMANLRGGVGGLFRASPRYGRLQATAAVDPEDIPLEKVQVKSSGHVLPYVGVACLGAILFGYHLGVVNGALEYLAKDLGIAENAVLQGWVVSTSLAGATLGSFTGGSLADKFGRTRTFILDAVPLALGAFLSATAQDIRTMIIGRLLAGXIGIGVSSALVPLYISEISPTEIRGTLGTVNQLFICIGILAAVISES

SEQ ID NO: 211069 - protein, 50 aa, Zea mays
  Clone ID: MRT4577_124092C.1.pep
RPPIIRSQLTTRPFKPEHQSSPDLLGSYQGGEISTTASIPPSAFLLIKAT

SEQ ID NO: 211070 - protein, 225 aa, Zea mays
  unsure (1)..(225): unsure at all Xaa locations
  Clone ID: MRT4577_124093C.1.pep
MVKHNNVIPNGHFKKHWQNYVKTWFNQPARKQRRRIARQKKAVKIFPRPTAGPLRPIVQCQTLKYNMKSRAGRGFTLEELKAAGIPKKLAPTIGISVDHRRKNKSLEGLQANVQRLKTYKAKLVIFPRRARKVKAGDSTPEELATATQVQGDYMPFTRGEKRSVEVVKVTDEMKSFAAYGKLRLERMNKKHLGARQKRXAEAEKEIRSEAEDSTLVSIQLVNATT

SEQ ID NO: 211071 - protein, 86 aa, Zea mays
  Clone ID: MRT4577_124094C.1.pep
PIVQCQSLKYNMKSRAGRGFTLEELKSAGIPKKLAPTIGISVDHRCKNKSVEGLQANVQRLKTYKAKLVIFPRRARKANAGDYTPS

SEQ ID NO: 211072 - protein, 98 aa, Zea mays
  Clone ID: MRT4577_124095C.1.pep
RPEGHILLFVPPSVVPPRGVQLEHPDRAGAPSRFHCALSNAKCLVSPESSCWRAGTLFLNMISKRRGRRIFSMSPCSAPSPLLQSFSANPFNIFIFFF

SEQ ID NO: 211073 - protein, 208 aa, Zea mays
  Clone ID: MRT4577_124096C.1.pep
MVKHNNVIPNGHFKKHWQNYVKTWFNQPARKQRRRIARQKKAVKIFPRPTAGPLRPIVQCQTLKYNMKSRAGRGFTLEELKAAGIPKKLAPTIGISVDHRRKNKSLEGLQANVQRLKTYKAKLVIFPRRARKVKAGDSTPEELATATQVQGDYMPFTRGEKRSVEVVKVTDEMKSFAAYGKLRLERMNKKHLGARQKKAAEAEKEDRK

SEQ ID NO: 211074 - protein, 208 aa, Zea mays
  Clone ID: MRT4577_124097C.1.pep
MVKHNNVIPNGHFKKHWQNYVKTWFNQPARKQRRRIARQKKAVKIFPRPTAGPLRPIVQCQTLKYNMKSRAGRGFTLEELKAAGIPKKLAPTIGISVDHRRKNKSLEGLQANVQRLKTYKAKLVIFPRRAHKVKAGDSTPEELATATQVQGDYMPFTRGEKRSVEVVKVTDEMKSFAAYGKLRLERMNKKHLGARQKKAAEAEKEDKK

SEQ ID NO: 211075 - protein, 44 aa, Zea mays
  Clone ID: MRT4577_124098C.1.pep
TAGSGLGFGGPKEELIRRKKGDVSLDTLKRPPPHVCVCKLGSFY

SEQ ID NO: 211076 - protein, 69 aa, Zea mays
  unsure (1)..(69): unsure at all Xaa locations
  Clone ID: MRT4577_124099C.1.pep
ASPREWVPRRGPPRRAGAGSPPQQRGPGAARHAAHVLIAHGRCAAAKLLGASLRLLLRSHCECEXQXER

SEQ ID NO: 211077 - protein, 211 aa, Zea mays
  Clone ID: MRT4577_12409C.1.pep
MELAEAPAPVPDEDGLDERGVALHLPRLLAGVVSGALTGLFALAGALTGAVTGAVAGRASDSGGVLRGAGLGAVAGAVLSIEVLEASRAYWCSSDRLGSHGGASSMADFIEQLLRARFVQEQFTASGYASYRWQLSISYFGQDDLYDIFGDISSEGLSQESLKKLPHHVVSDQTRDLLGEILCCPICLQVRSEQARSYHYRVTVKETFCHN

SEQ ID NO: 211078 - protein, 64 aa, Zea mays
  Clone ID: MRT4577_1240C.1.pep
TPLSSRRPGASLQLSRRLPTVVEASDTANYMHDPKQESLSSASPRWMYPRLGLHAFRPAHASAE

SEQ ID NO: 211079 - protein, 208 aa, Zea mays
  Clone ID: MRT4577_124100C.1.pep
MVKHNNVIPNGHFKKHWQNYVKTWFNQPARKQRRRIARQKKAVKIFPRPTAGPLRPIVQCQTLKYNMKSRAGRGFTLEELKAAGIPKKLAPTIGISVDHRRKNKSLEGLQANVQRLKTYKAKLVIFPRRARKVNAGDSTPEELATATQVQGDYMPITRGEKRSVEVVKVTDEMKSFAAYGKLRLERMNKKHLGARQKKAAEAEKDEKK

SEQ ID NO: 211080 - protein, 208 aa, Zea mays
  Clone ID: MRT4577_124101C.1.pep
MVKHNNVIPNGHFKKHWQNYVKTWFNQPARKQRRRIARQKKAVKIFPRPTAGPLRPIVQCQTLKYNMKSRAGRGFTLEELKAAGIPKRLAPTIGISVDHRRKNKSLEGLQANVQRLKTYKAKLVIFPRRARKVKAGDSTLEELTTATQVQGDYMPITRGEKRSVEVVKVTDEMKAFAAYGKLRLERMNKKHLGARQKKAAEAEKEDKK

SEQ ID NO: 211081 - protein, 65 aa, Zea mays
  unsure (1)..(65): unsure at all Xaa locations
  Clone ID: MRT4577_124102C.1.pep
PLQKSPIXCFYLSLYYTFHKYLSSIDSSFLSLKLFSHSILHDYIILSLIIHKILQSXDIPIPSYL

SEQ ID NO: 211082 - protein, 45 aa, Zea mays
  Clone ID: MRT4577_124103C.1.pep
RAPSTRLISPPLILRHLLARPSRHHRPGRSDSRYSARRSTLGSVL

SEQ ID NO: 211083 - protein, 84 aa, Zea mays
  unsure (1)..(84): unsure at all Xaa locations
  Clone ID: MRT4577_124104C.1.pep
MSLDNRCVLFEVSVCYARVVRIKMELSTNHVPKTDINYRAMCTADNVACKSGKPVNYNGSTFQCNMVEICAKAADXTHGNVTSG

SEQ ID NO: 211084 - protein, 122 aa, Zea mays
  Clone ID: MRT4577_124105C.1.pep
VRGGELNRRSAVRGGRRRQKAGRIKNLHWLGRFLFGPGPVYFWGLAILMGLTNAQNLGLGGVGVAPPTGKLASSAPGVSVMKYWNIFRGEGVPNPEAPYYNHKTGHMIQEHQNCLKYGRPNL

SEQ ID NO: 211085 - protein, 121 aa, Zea mays
  Clone ID: MRT4577_124106C.1.pep
FGMPSRGGGRPFSFCSASAGQGPAPPIPPPISLCGWGGSSAFFPRCGGSTAPSPPRKCSPPPPDSLAHPPQGNAFLSLALFFLFFGPFRLAHPSFANPKVRFGFRCFFLYYTVTFLYIYLY

SEQ ID NO: 211086 - protein, 63 aa, Zea mays
  Clone ID: MRT4577_124107C.1.pep
MASIIVQAVVILLDVIAFGLGEEFEEEEAGAMESQTVGGMIEDDCADIGIPVPNGNCEMLCEV

SEQ ID NO: 211087 - protein, 258 aa, Zea mays
  Clone ID: MRT4577_124108C.1.pep
IIAGADEFSWPSFVMGSMFLAILLIMKNTGKSNKRLHFLRVSGPLTAVVLGTIFVKIFHPPAISVVGEIPQGLPRFSIPQGFEHLMSLVPTAVLITGVAILESVGIAKALAAKNGYELDSNKELFGLGIANICGSFFSAYPATGSFSRSAVNHESGAKTGLSGIIMGIIIGGALLFMTPLFTDIPQCALAAIVISAVTGLVDYEEAIFLWAIDKKDFFLWAITFITTLVFGIEIGVPVGVAFSLAFVIHESTNPHLAV

SEQ ID NO: 211088 - protein, 104 aa, Zea mays
  Clone ID: MRT4577_124109C.1.pep
CSVVPCTILILYSIRYVPNLKNLVDALLMLANAQILLRDLIVHFYPLVDALMSCLHELLKLLNSHDLFENDGPSYSMLCVTLHDSHLFVARGHMDSNPLFLTPH

SEQ ID NO: 211089 - protein, 299 aa, Zea mays
  Clone ID: MRT4577_12410C.1.pep
QRKLADGQFVAVKRLTKGGNKEDRVSDFLSELGIIAHVNHPNAAQLLGFSVEGGLHLVLQFSPHGSLASVLHGTKEPLKWKVRFKIALGIAEGLLYLHEGCHRRIIHRDIKASNILLTEDYQPQISDFGLAKWLPDKLTHHVVYPIEGTFGYMAPEYFMHGIINEKTDVFAYGVLLLELVTGRKAVDSSRQSLVIWAKPLLDANNIQELVDPSLGNEYDPEEMVYTLAVASLCIHHSSTSRPSMKSVVCFLKGDRESLELVRRPKIVKPLMFDSGDSEDYTRSSYLSDLNRHKQLALEQ

SEQ ID NO: 211090 - protein, 51 aa, Zea mays
  Clone ID: MRT4577_124110C.1.pep
IMWSSKGDRFIQDRRSATTPRSGDLHHPAIMFLSSPSSVSLDDYLSGLETV

SEQ ID NO: 211091 - protein, 67 aa, Zea mays
  Clone ID: MRT4577_124111C.1.pep
CGEYTILPVDLKVPPQGNTWGGDPTKLVTRNGSIDIFFYRPVLVFECSCSRGGGGTFFFSKSAAKSL

SEQ ID NO: 211092 - protein, 44 aa, Zea mays
  unsure (1)..(44): unsure at all Xaa locations
  Clone ID: MRT4577_124112C.1.pep
SPNPTRTPSGSTKPRASRRVASRRPRSDPQIDMVRRXXANMTHY

SEQ ID NO: 211093 - protein, 130 aa, Zea mays
  Clone ID: MRT4577_124113C.1.pep
MSLQILVTLAAIVALVVAQDLTVNTPTSVQECLPVALSWTGGVPPVYVSLIPGGQPGGAMIKDFGAQNGNLLTWNVDQPAGTSLTVQIRDSTGKLNYSDKFTVQESKSCGADGKTASTPGGSTASNPPAV

SEQ ID NO: 211094 - protein, 58 aa, Zea mays
  Clone ID: MRT4577_124114C.1.pep
SVMMRLIVDLLMVSLCFFFNMSFFYYAVSVFFCFVVFNFLLVLVFFMGRVASCLELGI

SEQ ID NO: 211095 - protein, 74 aa, Zea mays
  Clone ID: MRT4577_124115C.1.pep
RGGVKAVAESAATYRLELLAELGANLYDHTPKDTWRWGQGGCHRLSHEGGVLRVDFVVRLTDMQVIRRAEGWPL

SEQ ID NO: 211096 - protein, 199 aa, Zea mays
  Clone ID: MRT4577_124116C.1.pep
GETVSSWWRSALLWRAFFTTAMVAVVLRALIDFCQSGKCGLFGKGGLIMFDVTADYVTYHLIDLPPVITLGVFGGILGSLYNFFLDKVLRLYNLINEKGKAYKLLLAATVTVCTSCCLFGLPWIAACKPCPTDTREACPSIVRSGNFKKFQCATDEYNDLASLFFNTNDDTIRNLYSAGTDDEFHISSILVVFIASHFL

SEQ ID NO: 211097 - protein, 34 aa, Zea mays
  Clone ID: MRT4577_124117C.1.pep
SHAYYHSLASTSGCIYAVYYFLSNPLSTQYFLTN

SEQ ID NO: 211098 - protein, 285 aa, Zea mays
  Clone ID: MRT4577_124118C.1.pep
MSCAGQAGGWLLDYALVEEEIQGSEFIYMVDDPAVSSVILGFDAPRKEDGVQDNPGAKKRQSFSSSFLSVDPQHKRKSVHITLSPILLPLKSVGIICCAFLFPFLLRRSRPESSAPPGTKACREKLRRDRLNERFNELCAILEPGKPPKADKVAILSDAARLLNQLQGEAQKLKQSNESLQESIKSLKAEKSELRDEKTRLKAEKERLEQMLKGVVSHAAVAAPGPFVPHPAAVAPSFHHHPAAFAQAGKFVPYPSYPPPAAFWQWIPPTSLDTTKDPAHWPPVA

SEQ ID NO: 211099 - protein, 65 aa, Zea mays
  Clone ID: MRT4577_124119C.1.pep
LHGENCSLTYHIAEKDTMDNERKPYLVLYALPLILRKSEGSFPRDRILIDESEHYYLRLRNQTLS

SEQ ID NO: 211100 - protein, 82 aa, Zea mays
  unsure (1)..(82): unsure at all Xaa locations
  Clone ID: MRT4577_12411C.1.pep
PVSIPLVDVAPAEAIEVPMKILFTILFHTLFHSYEYXWQTNVYTPIFPHISGRIIESVIESVTDVVTDDHVLHYFIAECTEY

SEQ ID NO: 211101 - protein, 37 aa, Zea mays
  Clone ID: MRT4577_124120C.1.pep
MSCAGQAGGWLLDYALVEEEIQGSEFIYMVDDPAVSR

SEQ ID NO: 211102 - protein, 91 aa, Zea mays
  unsure (1)..(91): unsure at all Xaa locations
  Clone ID: MRT4577_124121C.1.pep
MATQTAAVPENSSTGYLLIATSGGLNQQRIGXDCLPMSXXICFYHPLCYLYDVQLADXMAVVXCXILNATLVVPELDHHSFWKDDSDFSDI

SEQ ID NO: 211103 - protein, 86 aa, Zea mays
  Clone ID: MRT4577_124122C.1.pep
APGRLYWSSPPHDQGELPGPYNPFGFKERLGKGNFPNFIKQNWGGKAAETPQGVGPELGNWNPGRDPPQGGFWKSPIPWGGGGLLF

SEQ ID NO: 211104 - protein, 151 aa, Zea mays
  Clone ID: MRT4577_124123C.1.pep
YILFFFFTHRAESGGEVPFAKQLPHTKTTILNGHDNPQGCPRKNNERCHPHRSCTPHKHVPTHSKQLGDPVARMLIHQRYTGTRGWRTPAWLRPHDSSSNMGMERANAKNEPLHEVTQDGKHGQPAVIQLRELEHIHHIHGLAQTDRFEEG

SEQ ID NO: 211105 - protein, 215 aa, Zea mays
  unsure (1)..(215): unsure at all Xaa locations
  Clone ID: MRT4577_124124C.1.pep
MGRKPDAVAKSYHSGGGGAAASSPRAARKASPSPVFLGTALFVLGFVSLFTGHVVTDADWARIRSRWRPKQHRNYEPIDIWESKYSSMYYGCSERSASFRSAVPENSSTGYLLIATSGGLNQQRIGITDAVVDAWILNATLVVPELDHHSFWKDDSDFSDIFDDEWLISHLSKDXTIVKRIPYEVKLSMDKLPWTMRAPKKSVPEIYIDEYVTLL

SEQ ID NO: 211106 - protein, 65 aa, Zea mays
  Clone ID: MRT4577_124125C.1.pep
LKPLFKIGTKEFLEVKKKELQILHQVLFKAWRHLKFFLIKASGRMQIKNKMLQAGDHVVAPCGPG

SEQ ID NO: 211107 - protein, 120 aa, Zea mays
  Clone ID: MRT4577_124126C.1.pep
SRASRAPRRQRRFPPGRPPSPSCRRASCSSSLAHGAKHQGIVCLHHGLLLVLMSRSLPPPPLAECPSRPNNHRPLARSVFLSPRPVILILCAAGVRSAAAALFYQIRAAPPPKKKKKKAA

SEQ ID NO: 211108 - protein, 91 aa, Zea mays
  unsure (1)..(91): unsure at all Xaa locations
  Clone ID: MRT4577_124127C.1.pep
SSGRRXNXRVNMICDSXLLPPYAWVLYKLLIGIAQHTTLYEITFTSSSHIHRNYRGCCYLCLLETFRTCRLNPPSSPCHTLQVPRCALAKR

SEQ ID NO: 211109 - protein, 85 aa, Zea mays
  unsure (1)..(85): unsure at all Xaa locations
  Clone ID: MRT4577_124128C.1.pep
KLVLYNYNWRRGTVLVRDDSTRREVXGKQALMENRVWGQASGRGPRLLMRDAGLWTTGATTLAGLPKSCTARALLAVGDHFLRAC

SEQ ID NO: 211110 - protein, 292 aa, Zea mays
  unsure (1)..(292): unsure at all Xaa locations
  Clone ID: MRT4577_124129C.1.pep
GGRTGPRRDFGDADAHGFEGGYGGGGGGFGDGGVARGENGEGRQAERGRGPRQPYRGGGRRGGYSDGQAGNEFGRPRRAYERHSGTGRGYGMKREGAGRGNWGTATDEGLEQDTVDAVNPEETTAVVEDEKKPEDAPQSEVEKDKEGAENEEEEKEPEDKEMTLEEYEKVLEEKRKALLSLKAEERKVEIDKELQAMQQLSVKKDGDEVFIKLGSDKDLKKKESAEREERGKKSLSINEFLKPAEGERYYNPSGRGRGRXRGXGSRGGYNGGYRGPAAAPAIEDQAQFPALA

SEQ ID NO: 211111 - protein, 102 aa, Zea mays
  Clone ID: MRT4577_12412C.1.pep
MVYTLAVASLCIHHSSTSRPSMKSVGGSFLLIKVQMRKLTLEFFLLLLQVVCFLKGDRESLELVRRPKIVKPLMFDSGDSEDYTRSSYLSDLNRHKQLALEQ

SEQ ID NO: 211112 - protein, 107 aa, Zea mays
  unsure (1)..(107): unsure at all Xaa locations
  Clone ID: MRT4577_124130C.1.pep
EKPLCVPPWGAKYFAFLMRPGLSARAGSATTFPQWSQGPIWFFFFPHLSPPGCFECVKPIFLTPTIQHRLSEGVFHLXPVLLXQPXAISQDTPCAHVGAQHIEAPPP

SEQ ID NO: 211113 - protein, 164 aa, Zea mays
  Clone ID: MRT4577_124131C.1.pep
TETELKEKKLRVEDALNATKAAVEEGIVVGGGCTLLRLSSKVDAIIETLENDEQKVGAEIVRKSLSYPLKLIAKNAGVNGSVVTEKVLANENFRYGYNAATGKYEDLMAAGIIDPTKVVRCCLEHAASVAKTFITSDAVVVDIKVPEQAPAPANPMAGGSGFGF

SEQ ID NO: 211114 - protein, 187 aa, Zea mays
  unsure (1)..(187): unsure at all Xaa locations
  Clone ID: MRT4577_124132C.1.pep
MEETLVPKRPREEAQVERGLDFEEDYSSSKRHKPYNHILSLLDSEEEDSTQDLSPLMTTLQQEITCASKNTQDALLVCPTQENDQNTLTISSLEDNNATTSQVLKEEEENDKERVMRHLLQASDDELGIPNSGDGLWGFEDNEFTSXDGFSSLCDKMWELEDERANYYDFLQSELFLGGGGNINIRQ

SEQ ID NO: 211115 - protein, 605 aa, Zea mays
  Clone ID: MRT4577_124133C.1.pep
MASAFGTASTCGIKHAPAGVALAAPMKHLSLVSPSLVSLPRKMRPRRKYNFRVNAAKELHFNKDGSAIRKMQNGVNKLADLVGVTLGPKGRNVVLESKYGSPKIVNDGVTVAKEVELEDPVENIGAKLVRQAAAKTNDLAGDGTTTSVVLAQGMITEGVKVVAAGANPVQITRGIEKTAKALVSELQKMSKEVEDSELADVAAVSAGNNYEIGNMIAEAMKKVGRQGVVTLEEGKSAENNLYSVEGMQFDRGYISPYFVTDSEKMTVEYENCKLLLVDKKINNARDLITILEDAIRSGYPILIVAEDIEQEALATLVVNRLRGALKIAAIKAPGFGERKSQYLDDIATLTGGTVIREEVGLSLDKADNAVLGTAAKVVVTKDSTTIVGDGTTQEEVNKRVTQIKNQIEATEQEYEREKLNERIAKLSGGVAVIQVGAQTETELKEKKLRVEDALNATKAAVEEGIVVGGGCTLLRLASKVDAIIETLENDEQKVGAEIVRKSLSYPLKLIAKNAGVNGSVVTEKVLANENFRYGYNAATGEYEDLMAAGIIDPTKVVRCCLEHAASVAKTFITSDAVVVDAKVAEQAPSSPANPMAMGGGSGFGF

SEQ ID NO: 211116 - protein, 210 aa, Zea mays
  unsure (1)..(210): unsure at all Xaa locations
  Clone ID: MRT4577_124134C.1.pep
VLSSIKPQQVTYVVPGIMNFDYSKIDEFLEKTQNLXECAWMELSEKDKSITVEEFAEIVYGTKESLESYCAHLLLSRDVVYFVKVESRDYSMYQPRSPAQVEELLRRKLAKEAADKELEEFVHLLKSAKALPMESKPPKASWLVEEKVRQQIESLQAYAVDACDDEQRRLAGNILKAMGFTRTSSAALKLLINVGYFPVHVNLDLFRYDV

SEQ ID NO: 211117 - protein, 193 aa, Zea mays
  Clone ID: MRT4577_124135C.1.pep
MKKATKYLKHLFSAIVAAVKARSTAVGTKASSLQMRLIVLGIMRNKKLLLSAIQKKIHAIIGAGNGSGNAVASHGSGNRMAAVLQSLPSFAVEQETRALVLLSSLPSFVLERDAAGAGANEDKQDVVEATAGDKHVAVVDDDATAQAKAEGDFLLEDQIDHVADVFIRRFHEQMRLQKLESFKRFCEMLERGA

SEQ ID NO: 211118 - protein, 80 aa, Zea mays
  Clone ID: MRT4577_124136C.1.pep
KKKKKKKKKKKKKKKKKKKKKKKKKKKGCQLYRNQNCDHPNNKTLGGLLFWGRYLVITSGVCPTSSLFGKSPYFPFFVPL

SEQ ID NO: 211119 - protein, 109 aa, Zea mays
  unsure (1)..(109): unsure at all Xaa locations
  Clone ID: MRT4577_124137C.1.pep
ILLEAWMFCGSPRHPSVXAQHGEDAIRVYNLLLGIRRSTPSRYCDEHLRIAKQPPMSGSSCLGVSSGSVPSSIHCTISMVHSLQRTSAYSGDRARCMCLYWSVSSAPFP

SEQ ID NO: 211120 - protein, 284 aa, Zea mays
  Clone ID: MRT4577_124138C.1.pep
MEALLELEKMQRVLSLMSSRGLSHTDSSCGGAAADRFLAQFLLFMLDASNEDCLHVVPDDNTSKVLGKKEESLNETSLSQMIEPLEGLLQCQGLMTDRLRTELKSGIQYWSLERKLCQALLRNEKISIEDVMMAIHLKSFDYRVLNLLMFQLTGQRVNELHMDFLSVSEFLVEISDDLYDYEDDVMNNTFNILRMFAAIYGPLEAPNMLAKCIGEAEEKYESFSKKLDPSLSGSYWGRCEEATKEGGKTSGHAYGTWNIPRVISNEDAFRRERRSKHDACAVIT

SEQ ID NO: 211121 - protein, 403 aa, Zea mays
  Clone ID: MRT4577_124139C.1.pep
MEALLELEKMQRVLSLMSSRGLSHTDSSCGGAAADRFLAQFLLFMVQPFDSLTLENKFLLISELLRKATPNTLEEVQHLTHLEANKDICSGGSLQPIKKFKMHAEKSTVQAMPMVGFDAMARAKSTLEDFCRSYFMFHGLDVNKPQAIFKYLPVLSFTESYIYQLDASNEDCLHVVPDDNTSKVLGKKEESLNETSLSQMIEPLEGLLQCQGLMTDRLRTELKSGIQYWSLERKLCQALLRNEKISIEDVMMAIHLKSFDYRVLNLLMFQLTGQHVNELHMDFLSVSEFLVEISDDLYDYEDDVMNNTFNILRMFAAIYGPLEAPNMLAKCIGEAEEKYESFSKKLDPSLSGSYWRRCEEATKEGGKTSGHAYGTWNIPRVISNEDAFRRERRSKHDACAVIT

SEQ ID NO: 211122 - protein, 58 aa, Zea mays
  Clone ID: MRT4577_12413C.1.pep
TLGNGGRDYLTRYSCNAEERYPTLGILWSSCGRSQGLTWPPPCNLGFWSTFPRATTGG

SEQ ID NO: 211123 - protein, 41 aa, Zea mays
  Clone ID: MRT4577_124140C.1.pep
LQTQSRADVTQGYLHIACSRQLLPTRRVLYLLFTTNNINSL

SEQ ID NO: 211124 - protein, 32 aa, Zea mays
  Clone ID: MRT4577_124141C.1.pep
QNFHQVILKKKVSSNFSKLSQIFPNEVPKMII

SEQ ID NO: 211125 - protein, 113 aa, Zea mays
  Clone ID: MRT4577_124142C.1.pep
SKPAGKILIRSPQTMSVSVAHTGREAMIAVPLPRATHTSHRYRRYMKREVTRSQPRILGEMLLRSVAGRHRGLRIAIAPTKDGHLHHLNPGRRGEKEGLQDEHAQGVPRNASG

SEQ ID NO: 211126 - protein, 87 aa, Zea mays
  Clone ID: MRT4577_124143C.1.pep
CPRYEVMRSSWRLGRLLSTAIRHTGEPKEWRLTGTTSSSEGHTVLCRGQLMPSSGRWISSTRDLPVASFTYTIEESLLAGAGCQLSV

SEQ ID NO: 211127 - protein, 176 aa, Zea mays
  Clone ID: MRT4577_124144C.1.pep
KNSGSISTHRGELNLFRCSGFTCSFWIRAYSFGNRQIKNCGIAGRLSKRLQSSADSLPVLAFNWPQSLILLPQMGSLFLISTAWRLAVKITSDTSCSSPSQPRQLGDAVDELEQHLLELSDEARTSPSPSSVSAYGQLLAVVLTSMSLLALLPITRCGVLLSSTSASCDPGPAGLE

SEQ ID NO: 211128 - protein, 87 aa, Zea mays
  Clone ID: MRT4577_124145C.1.pep
LEGRAGKKKKKKKKKKKKKKKKKKKKKKKKKKKKKKKSPEQGPRRLAPKPSPSTPILTGSRLKGVLSPFPGPWTAQREGRWRTFTTS

SEQ ID NO: 211129 - protein, 48 aa, Zea mays
  Clone ID: MRT4577_124146C.1.pep
AYRFNKSQWCSQDCQHHRLIQAGGCGIQSSAGISTTRSTYMRGRGSLP

SEQ ID NO: 211130 - protein, 105 aa, Zea mays
  unsure (1)..(105): unsure at all Xaa locations
  Clone ID: MRT4577_124147C.1.pep
RDCSVETEYEAIXWASAYGARGVPKKDIIALRYLETKXCENDHKISSDCYKERDPLKPTVRGVXGSFPSPKSNLXNMYYLGPAPLQDMPMQIATDNGRTVYNRDY

SEQ ID NO: 211131 - protein, 169 aa, Zea mays
  unsure (1)..(169): unsure at all Xaa locations
  Clone ID: MRT4577_124148C.1.pep
MEAPDRLYPSVEPYDLEPPQLDDDAAVGTGEARVCDPPVRWDEEPKEGTHVCEQGAKDNPDRDDMEDHLSVVNIYESDDEMTTFKGSGENIHSDCPLRQQTGIWVPPSVPPMTKHDHEEWQKGFVSNAGYFIEDEYKWDMDEDIREMTMXXDVFAEMAVAGKINYICCI

SEQ ID NO: 211132 - protein, 58 aa, Zea mays
  Clone ID: MRT4577_124149C.1.pep
VAGGGRRRCNVRADSSEGARGIEPCLIRILAGGGASPSGRVRVRLSSAFLIWIVLVPN

SEQ ID NO: 211133 - protein, 46 aa, Zea mays
  Clone ID: MRT4577_12414C.1.pep
TRGAGPAPTIDSSLNPTAYPLADAQLTMGILDIIQQAANYKQLKKG

SEQ ID NO: 211134 - protein, 111 aa, Zea mays
  Clone ID: MRT4577_124150C.1.pep
FFFFFFFFFFFFFFFFFFFFAKQNDHFNRGFSFNPFQIYKGPLIMFAKQTALKRPQEGLEPIKEFKGAQINWVGKTKFGPMSRGEKMGELRPPSMAKRKGPQWATYLQTYL

SEQ ID NO: 211135 - protein, 58 aa, Zea mays
  Clone ID: MRT4577_124151C.1.pep
LQPPTDKSLRKGFLACMRDQYISPHLVQSSVIVRHNTCQSRHYCPSSAKSRSSNPRAE

SEQ ID NO: 211136 - protein, 82 aa, Zea mays
  Clone ID: MRT4577_124152C.1.pep
NQHFIVVYTRSDLINIHIWKVTPRGVRISIYHCLHRAATVTVHEDGHTRRRTAALSSKLAVMITEQYSKLFSPSFRNLKFYM

SEQ ID NO: 211137 - protein, 38 aa, Zea mays
  Clone ID: MRT4577_124153C.1.pep
LEPLDCFLVPHGDGAQIVPETLRRHLDQPLLGSCRELG

SEQ ID NO: 211138 - protein, 191 aa, Zea mays
  unsure (1)..(191): unsure at all Xaa locations
  Clone ID: MRT4577_124154C.1.pep
EVKLVRQSGASTNDIAVDGCTTSIILARGLIDEGIKVLADVIGPVQVSKXGIKKTVAALVYELRMMXRVIQDHVIAHVATVSAENDYAVVDMIYDDFSXVGRQGMVIIENGTGSXYSLKVLEGMLFARGALSPYFVADCGDMALEFPPCQTLLVDKKSTYASLIIGKVDSADKKSXPLLIIPKKYEKTDNE

SEQ ID NO: 211139 - protein, 206 aa, Zea mays
  Clone ID: MRT4577_124155C.1.pep
MKPLVARLLLCYSLLCLAPAAAPLRLQHDHVRGHGHGHAHPPPYARNATAYGVSAALCPGCGAWADALEFLYYHNLVRLASLEPPLAWSPRLASYAGWWAAQRRGDCALRHSFPDGQFALGENVFWGGPGGAWRPRDAVADWAAEGADYSYADNACAPGRECAHYTQIVWRRTTAVGCARVACDGGGVFITCNYYPPGNVVGERPY

SEQ ID NO: 211140 - protein, 362 aa, Zea mays
  unsure (1)..(362): unsure at all Xaa locations
  Clone ID: MRT4577_124156C.1.pep
MSTTECADLGEEFWLPEDFLDDDFFSEEEKAAVAARSESDEEDSLAGLSRRLAGLLGDGGERKAPAAKAEVTVGSPQSTLCGLPKSGQESPSGGASKGTSPPSSPLEQRPADPWDLLYEAAGQVARMRAANSVPVQAANGFHGQSGFAPPPRKPSPPPXHLPSAKVPAGGHYYDPFARLVSQRQMQAAQFHLLKQQQLLKLQRERQQLAAAAAWSARQGACAKPVGCVRGDALLGLNPAACLPLQKPQQHHHHHHAPAAPASGMRAVFLTPSGPKRERNGTGVFLPRPAGAPAEPKKKTGCSTVLVPARVVQALNLNLDDLGAQPRYPGGFVLDHEALISRSNAMLASQKRRAASQALCHSS

SEQ ID NO: 211141 - protein, 72 aa, Zea mays
  Clone ID: MRT4577_124157C.1.pep
NKKGKQGQTFGRKKDQGSLSLSHLPSMCKYFRSFLSMEECVGRVLRANNTRGIYIMGEDDNDLCYLYIETLA

SEQ ID NO: 211142 - protein, 24 aa, Zea mays
  Clone ID: MRT4577_124158C.1.pep
TTSKIVQLVVSVKAFALYLLCWVL

SEQ ID NO: 211143 - protein, 233 aa, Zea mays
  Clone ID: MRT4577_124159C.1.pep
MAQAAGTADATDEAPLLLASSAAAGSTPSPPAAAPRRNRFAFVCATLASVTTMLHGLTTDPYTCPADLTLMSGAELFMREDVGLTDGEVEVLAGSMNVFMLASILAAGWVADHLGRRRTLVLANAFLMAGALAMSLGTSFAALMAARFVTSVGSGFARVVAPVYNAEISQAATRGVLSSMLDIFINVGILLSYVSNYAFAGLPVHIGWRLMYAIGDWGRTRTRRGRGRRRWWK

SEQ ID NO: 211144 - protein, 156 aa, Zea mays
  Clone ID: MRT4577_12415C.1.pep
LALAGNGVPPGAINLIPLNEIVVDINGTFVPSLSAPAPTNTGFSLTIDEVDNTWLEAPPAAEAPPSLVTPQEHGHLVTKHSLDCLSHLTKNDFEGISPDLRWEEEGPQHVPSEKVMYLKLGLAAKDERENKVERMLAIIQVMQIFEMSWKMMVQPP

SEQ ID NO: 211145 - protein, 59 aa, Zea mays
  Clone ID: MRT4577_124160C.1.pep
QAMLRRYLSSLLIVLIKFHRTRSPSIARSSCPVLMSRSGSLTQNKSAAWAPCNDTASLS

SEQ ID NO: 211146 - protein, 62 aa, Zea mays
  unsure (1)..(62): unsure at all Xaa locations
  Clone ID: MRT4577_124161C.1.pep
SGFVVPLGGRFFVSVLFSLDSVGFLLLFSLSFAFCRGLFVLCKFAPFXXXXXVCYSIXKXLL

SEQ ID NO: 211147 - protein, 162 aa, Zea mays
  Clone ID: MRT4577_124162C.1.pep
MAMRALPLTPSRSSSFGAHQTRPSGGGPRSVRAYAKGDEEGDKQSLFGSITEALDFSQVRSEKDAELLYEARESTKGGGRMTREQYGALRRKIGGTYQDFFKSYVEVDGQYVEEGWVDKTCKICKKDTRGEPRQVDKLGRYAHVACLENPKPTNFFAKIFAR

SEQ ID NO: 211148 - protein, 114 aa, Zea mays
  Clone ID: MRT4577_124163C.1.pep
GRSLKPLAPGLRPSVRSSWEKQQKRGPPPPTTPGFAPPPPGEGGALRVGFQFYNPRAPRWGLCFPPCEGKKFRPNQPLALRGMAPLKIRAGGAPGPPQGKKLKNPPPPPVWETP

SEQ ID NO: 211149 - protein, 137 aa, Zea mays
  unsure (1)..(137): unsure at all Xaa locations
  Clone ID: MRT4577_124164C.1.pep
MEKFEGYSEKQKSRQRYFVYPLLFQEYIYAFAHDYGLNGSEPVEIFGCNNKKFSSLLVKRLIIRMYQQNFXLINSVNYPNQDRLLDHRNYFYSEFYSQILSEGFAIVVEIPLSLGQLXCPKKKKKKKKKSTLRCYHC

SEQ ID NO: 211150 - protein, 84 aa, Zea mays
  unsure (1)..(84): unsure at all Xaa locations
  Clone ID: MRT4577_124165C.1.pep
KQQAIYRIVAIEVRSRREXRDLRKVSFYDPIKNQTCLNVPAILYFLEKGRRXTQTLTEVLLQPHQTTCRLLLLVKGTTGSLPPV

SEQ ID NO: 211151 - protein, 139 aa, Zea mays
  Clone ID: MRT4577_124166C.1.pep
SCLLHWTILCQYEMLNDEIARKGKSNRGRKAKNAPRRSKITSIVCPECQGTGIHVNGDELEKPSISLSEMFRFKMKAIEAHKAWLKRPEVLENCSTGLHFPSEHVENSEVESEAHCSQCSVNTGINPLTPVSISLCRRR

SEQ ID NO: 211152 - protein, 401 aa, Zea mays
  Clone ID: MRT4577_124167C.1.pep
MSAAETAVSPTTTPQPQLQSDPNAAADAASSNSLWVADETQTLTEVLLQPQPNHLSPPPSGEGDDGITASGAPVGGDAAASASAAAAANATIEERVRGPWSPEEDAVLSNLVEKFGARNWTLIARGIPGRSGKSCRLRWCNQLDPQVKRKPFTEEEDRIIMAAHAVHGNKWASIAKLLDGRTDNAIKNHWNSTLRRRYCNDGQCKHGGSVERSIPKVSREVSEEPWPLNDLNSFTAMDVKDDPVQTAPDTSPRARHITDHCSITQVVDPPYLSRPAAKIGAFRPYYLGHTEPTQQEMPGAVVMFDSTHKVSTPESEVFKFVDPICFAAEVPDKCGYGCCGAHEQHRKNSLLGPEFSEFEGHPPVLNISFASLVSEISSIAWMRSGMQSSDSSNLMQSIPPT

SEQ ID NO: 211153 - protein, 117 aa, Zea mays
  Clone ID: MRT4577_124168C.1.pep
MGAARSASQQLVAAAAAAVLAAALLLLAAGAGTASAAVSCGPVTFLVAPCLGYAMGKGAIPSSAFCSLLQSVNNQPFLSAANLQTMLSIQLRGSASQGKLVKVKASYKLSGAAKKAS

SEQ ID NO: 211154 - protein, 433 aa, Zea mays
  Clone ID: MRT4577_124169C.1.pep
MVGKELVVQRNGPVDIREIAAKATLREVRQSGHTYVELRRVGKRVIFFCTICLTECFSDNVLFDHLKGNLHSRRYAEAKVTLFGPMPWPFNDGVLFFNNSREKDPLLLDSSSQSTRELALVPEPEVSGNDTEVTSRLRDGSTSSNGVKGARYGAKGRANGRTAAVSEDHMLSNHGTDGPVVIPGVLLKDVVSDLPVHLLGYGNISYRICEASKNCRKISKIWCAWVGQGSHGFESCNTYEQSGFAIVNFSYTYDLGRKWSSEEQDLSVSAGSFFVIDDAGHRGKRMRKSFSDQEASSEESNGQNSSLQGSRQAIVTCSPVGTSNDLQVGLLSSKAARRELRKQKRIAAEKVCDLCGRPMLSGKDVATLLNCNTGKLACSSRNSSGAYHLFHTSCLLHWTILCQYEMLNDEIARKGKSNRGRKAKNAPKRRQEV

SEQ ID NO: 211155 - protein, 63 aa, Zea mays
  Clone ID: MRT4577_12416C.1.pep
WMYCHMSLVCWCNLLHFLQFYKVIIVAGSLMQRLYSIYESPKTSKYFKLNQLSMKNSLTHIIF

SEQ ID NO: 211156 - protein, 162 aa, Zea mays; identical to SEQ ID NO: 211147
  Clone ID: MRT4577_124170C.1.pep

SEQ ID NO: 211157 - protein, 131 aa, Zea mays
  Clone ID: MRT4577_124171C.1.pep
MAMRALPLTPSRSSSFGAHQTRPSGGGPRSVRAYAKGDEEGDKQSLFGSITEALDFSQVRSEKDAELLYEARESTRGGGRMTREQYGALRRKIGGTYQDFFKSYVEVDGQAVDYLWTISFSFNALFQSSRR

SEQ ID NO: 211158 - protein, 53 aa, Zea mays
  Clone ID: MRT4577_124172C.1.pep
SIGARKRLRMYACGPSLQCRRCRKGRCSWVRWHQAGSDDPIGLLSAYMSVRSS

SEQ ID NO: 211159 - protein, 114 aa, Zea mays
  Clone ID: MRT4577_124173C.1.pep
MAMRALPLTPSRSSSFGAHQTRPSGGGPRSVRAYAKGDEEGDKQSLFGSITEALDFSQVRSEKDAELLYEARESTRGGGRMTREQYGALRRKIGGTYQDFFKSYVEGILSTPFP

SEQ ID NO: 211160 - protein, 63 aa, Zea mays
  unsure (1)..(63): unsure at all Xaa locations
  Clone ID: MRT4577_124174C.1.pep
TDGRQCDGHAPQAEXEPILSSFLYASVLSHDCLERALSFVLAIXFEXSTLLATQLIDIFYDVM

SEQ ID NO: 211161 - protein, 121 aa, Zea mays
  Clone ID: MRT4577_124175C.1.pep
GGRARTGNMGRTKGVIKGEKDCKKAPQNFGLPGFSGTGPEPKPLLVPPQVVKINVLGPFFLVPPKPGKDAPLQEASAITRVFKQVLLYGGGGDHFPLHFRAGGVLSKVHKTTDHTLVDVYP

SEQ ID NO: 211162 - protein, 525 aa, Zea mays
  unsure (1)..(525): unsure at all Xaa locations
  Clone ID: MRT4577_124176C.1.pep
RPSXLLRRRLPAARLAASAASRGQASATAGAAAPAAVETRGGDREGQVTPRSTRLNAWYTDVIAAAELADYGPVRGTMVIRPYGYAIWEAIQDYLNVKFKETGHSNMYFPQFIPYSFIEKEASHVEGFSPELALVTIGGGKELEEKLVVRPTSETIVNHMFTKWIQSYRDLPLMINQWANVTRWEMRTKPFIRTLEFLWQEGHTAHATLEEAEKEAMQMIDVYTKFAFEHAAIPVIPGRKSRVETFAGANRTYTIEAMMGDKKALQAGTSHNLGQNFSRAFGTQFMDENGQIEHVWQTSWAISTRFVGGIIMTHGDDAGLMLPPRIAPIQVIIVPIWKKGDEKAVVVEAVDSVQKILKEAGIRVKVDDSELRTPGWKFNHYEMKGVPVRIEIGPRDVTNKSVVVSRRDVPGKQGKEFGVSMEPSILVNHIKGRLDDIQASLLQKAITFRDSNIVDVSSYGELKEAISEGKWARGPWSASDADELKVKEETSATIRCYPFEQPEGTKKCFMTGNPAEEVAIFAKSY

SEQ ID NO: 211163 - protein, 92 aa, Zea mays
  unsure (1)..(92): unsure at all Xaa locations
  Clone ID: MRT4577_124177C.1.pep
GFKSKPPKXSRGLXPNGLGFSKSXVNSPKMKGLFXLEXIFVKKKPKGSRCHFFGVKTKGTILXENSGXVGLGNPPGKIVWGEFGXVSNNPEK

SEQ ID NO: 211164 - protein, 46 aa, Zea mays
  Clone ID: MRT4577_124178C.1.pep
SYGRLGPSRPAGIILVMLFKGKNGNDSCHWCHYLNCVPTSRWKCDT

SEQ ID NO: 211165 - protein, 62 aa, Zea mays
  Clone ID: MRT4577_124179C.1.pep
ENTLWHRSRRKVGVAKPGPPRLLTFFFFFFFFFFFFFFFFQQFTVWSTKTLFYNILHYRLYC

SEQ ID NO: 211166 - protein, 59 aa, Zea mays
  Clone ID: MRT4577_12417C.1.pep
MAAEESPRISSGPSARVGIKSARGYISAHDIIRKNDFHGPLPIESTLTQIYLSAVATRD

SEQ ID NO: 211167 - protein, 65 aa, Zea mays
  Clone ID: MRT4577_124180C.1.pep
LFFSSVFQSFFSIPHFAFPCLLEFLSPCVLSLPHSSFHAFLNIWFIPTEHSLHVSVRVLPCILPS

SEQ ID NO: 211168 - protein, 36 aa, Zea mays
  Clone ID: MRT4577_124181C.1.pep
RSARLVTQWWPSVSIPFAAPLLVLRYSSVMEDPRSG

SEQ ID NO: 211169 - protein, 40 aa, Zea mays
  Clone ID: MRT4577_124182C.1.pep
ACISSGPGHCARANGSTLEGKELEFYIKKLQRKKGESAVG

SEQ ID NO: 211170 - protein, 42 aa, Zea mays
  unsure (1)..(42): unsure at all Xaa locations
  Clone ID: MRT4577_124183C.1.pep
TVLYVNVAPHSEVRYRFCAASLLSLYXNHLDWIGNGRHRYVV

SEQ ID NO: 211171 - protein, 142 aa, Zea mays
  unsure (1)..(142): unsure at all Xaa locations
  Clone ID: MRT4577_124184C.1.pep
MSAYLQSTSNRIWEICLMRFSMXTSARITPIQMEFHDSNNKARNALFSCLSLGEFERVGHLTMAHQIWSTLERFHEGNXNVKTRLFETYRREYENFTQLAGETIDSMLSRFQSIVNKMRATKAQLPYNDHERAMKLLHALSC

SEQ ID NO: 211172 - protein, 48 aa, Zea mays
  Clone ID: MRT4577_124185C.1.pep
PSGRRMQFKECLHVGSTHIRFSDEFLCNFVDISGFIHNSFRGSHFDLV

SEQ ID NO: 211173 - protein, 185 aa, Zea mays
  Clone ID: MRT4577_124186C.1.pep
MAARRRSLLMLLPLLLLLLSHFLSLAAAFQSDELLLHDDDEFEGTRASSTPSPRPPSTPPVVSSRRRSADATQAVGASESNTVQFTLEHDLGAGLGFAPAGSFSARLKSSAHGSQTLTKLRFTRNELTEDEKNAFKKLLEEDSFYTIRLPSNVLDPTRNDYIYSSIKARCIPRDSLDEHIVIHMD

SEQ ID NO: 211174 - protein, 121 aa, Zea mays
  unsure (1)..(121): unsure at all Xaa locations
  Clone ID: MRT4577_124187C.1.pep
AFRAPPNLPKGNPVSFFVLHIWGEPTPAQXKGTHVAQTPVRHSKKNGALEKWSIVRAHGTSGAPPSYYHRGHSKLGHNALGXGQIFPQGFKLVDKAFPPENFYNGKGFKHPKKFFKRGYFS

SEQ ID NO: 211175 - protein, 119 aa, Zea mays
  Clone ID: MRT4577_124188C.1.pep
RLLYSFLARLSRKSVNTCSYPGILPYPATNKSLVRKKGSISRIGGREVMGLWLISLSNQRIYPQENRLSWDNFGVPGSSHSLDSKLFLKTIKPTEWNPCPSTGISFVQYIHQAVYLISS

SEQ ID NO: 211176 - protein, 44 aa, Zea mays
  Clone ID: MRT4577_124189C.1.pep
RWCNAYGRCRGQRSTLNMTARESADVSLKKKRQSEWRLGRTRGS

SEQ ID NO: 211177 - protein, 200 aa, Zea mays
  unsure (1)..(200): unsure at all Xaa locations
  Clone ID: MRT4577_12418C.1.pep
GRQHGHLVTKRSLDCLSHLTKNDFEGISPDLRWEEEGPQHVPSEKVMYLKLGLAAKDERENXREDACNYTGHANIRNELEDDGSAALDCVHFLPHETRVFYDSNHPVMEVGSLYASMTEFRLAMWQYDIEKEFELGTEASTSKKYRGYCRGGDCPWSIHARIERDGSPTIIVCFYLFTNHGAYMQELRACMKKLTPKKKK

SEQ ID NO: 211178 - protein, 61 aa, Zea mays
  Clone ID: MRT4577_124190C.1.pep
METWGGFLPPTPKKIKKKKKKKKKKRKKKKKKKKKKKKKKKKKKKKKKKKKKKKFLKKKHP

SEQ ID NO: 211179 - protein, 169 aa, Zea mays
  Clone ID: MRT4577_124191C.1.pep
VLVTHQFGFPGVADLCPSCPVWVRRSALLRVRPLRVCLSTCALCWVPGSSCRCCSVRSGLACGVGKRSPRLVCPVPCRSLGTVRSSALSGLLVPCGSVSSLFPGLASSLLPLRVSPFSPRLRLGVSSAAAAVAALVGLALPVASPVLVPPDRASGAVLPPPWGASAPGA

SEQ ID NO: 211180 - protein, 70 aa, Zea mays
  Clone ID: MRT4577_124192C.1.pep
LASWQNVVWVIPVMFLPGRHGFDRNAGIKMKWQIWVFGARIFLLRPSPLKKKKKKKKKKQKKKKKKKKIK

SEQ ID NO: 211181 - protein, 87 aa, Zea mays
  unsure (1)..(87): unsure at all Xaa locations
  Clone ID: MRT4577_124193C.1.pep
NDRERVVEAIDFLHRMMNSHELSGAVMLVFAGXQDLPNAMNGAQKTLKLCLQSVXQRPWFIHSTCSTYGXGLFEGLLWLSSFISSKS

SEQ ID NO: 211182 - protein, 77 aa, Zea mays
  Clone ID: MRT4577_124194C.1.pep
MRSMKRNDAFQIIPPMWFWCKACKGATRLLRGFNFVGHGNPSRKQMSIGKAFGVLGIVVGGFLCIQRVKLPFFLYRD

SEQ ID NO: 211183 - protein, 71 aa, Zea mays
  Clone ID: MRT4577_124195C.1.pep
RPGRAASASAPGSPTVLQPLPCDSRTPLRSFSSDLPKTFQCDGPHRHFFQRLGLVMVSCLLCAFQTIFEHC

SEQ ID NO: 211184 - protein, 49 aa, Zea mays
  Clone ID: MRT4577_124196C.1.pep
ATAALPLALASASSVIPTVAGTHWRAIGEVERSSSSDSYRLAVPARVGR

SEQ ID NO: 211185 - protein, 152 aa, Zea mays
  Clone ID: MRT4577_124197C.1.pep
MESAVNPKAYPLADAQLTMGILDIIQQAANYKQLKKGANEATKTLNRGISEFVVMAADTEPLEILLHLPLLAEDKNVPYVFVPSKQALGRACGVTRPVIACSVTSNEGSQLKQQIQGLKIFQCDGPRRHIFQRLGLVMVSCLLYPQTIFEHC

SEQ ID NO: 211186 - protein, 127 aa, Zea mays
  Clone ID: MRT4577_124198C.1.pep
MESAVNPKAYPLADAQLTIGIIDIIQQAANYKQLKKGANEATKTLNRGISEFVVMAADTEPLEILLHLPLLAEDKNVPYVFVPSKQALGRACGVTRPVIACSVTSNEGSQLKQQIQGLKDSIEKLLI

SEQ ID NO: 211187 - protein, 139 aa, Zea mays
  Clone ID: MRT4577_124199C.1.pep
MESAVNPKAYPLADAQLTMGILDIIQQAANYKQLKKGANEATKTLNRGISEFVVMAADTEPLEILLHLPLLAEDKCFLLLDLFLCDKNVPYVFVPSKQALGRACGVTRPVIACSVTSNEGSQLKQQIQGLKDSIEKLLI

SEQ ID NO: 211188 - protein, 159 aa, Zea mays
  Clone ID: MRT4577_12419C.1.pep
TFHAATEYSIFPLSYEFPSFEYSPPPLFCPFPRRRCCGRKGCTARNGVPPELDDQALDWPSPEMESPPGATNLIPLNEIVVDINGTFVPSLSAPAPTNTGFSLTIDEVDNTWLEAPPAAEAPPSLVTPQEHGHLVIKRSLDCLSHLTKNDFEGISPDLR

SEQ ID NO: 211189 - protein, 138 aa, Zea mays
  Clone ID: MRT4577_1241C.1.pep
CILTCAFPPATTSPRRQKAQDFSFPRVFPPSSSRLAAQPLGTMNPSTPLSSRRPGASLQLSRRLLTVVEASDTANYMHDQTGKPLKRVASLDVSTAGPACFRAGGHGYPCMLCSATSNSIDLQQNVWPGGAKKPDLKE

SEQ ID NO: 211190 - protein, 49 aa, Zea mays
  Clone ID: MRT4577_124200C.1.pep
VSLPVRPLFCDVRVGLRHSPTTSYASAEAFIDLLAVDKHPRDARLNETA

SEQ ID NO: 211191 - protein, 127 aa, Zea mays
  Clone ID: MRT4577_124201C.1.pep
MESVVNPKAYPLADAQLTMGILDIIQQAANYKQLKKGANEATKTLNRGISEFVVMAADTEPLEILLHLPLLAEDKNVPYVFVPSKQALGRACGVTRPVIACSVTSNEGSQLKLQIQGLKDSIEKLLI

SEQ ID NO: 211192 - protein, 42 aa, Zea mays
  Clone ID: MRT4577_124202C.1.pep
HPSEQITSAAHILHRRHEAKSLFRLPLLIQSQPIFSNRKSST

SEQ ID NO: 211193 - protein, 51 aa, Zea mays
  Clone ID: MRT4577_124203C.1.pep
RPNSRSPTSFTSSLPSGPQSWRPCPGAQDRDENTPSNKPPAGTLKPLSRTD

SEQ ID NO: 211194 - protein, 80 aa, Zea mays
  Clone ID: MRT4577_124204C.1.pep
TRTLHKGKIKVLLVLYALGLKVSTQKKGTVFLVDLSKEYLKCLFGKKIKKKKKKKTKKKKKKKRASALQYTELKPRQRAS

SEQ ID NO: 211195 - protein, 46 aa, Zea mays
  Clone ID: MRT4577_124205C.1.pep
FHQVVSSNRASLHMNFWDELTLAFPYKSSKELVSYYFNVFMLRKTA

SEQ ID NO: 211196 - protein, 619 aa, Zea mays
  Clone ID: MRT4577_124206C.1.pep
MWRSCVSRGLSRAKASASRLLSTASSSYTVVDHTYDAVVVGAGGAGLRAAIGLSEHGFNTACITKLFPTRSHTVAAQGGINAALGNMSEDDWRWHMYDTVKGSDWLGDQDSIQYMCREAPKAVIELENYGLPFSRTEEGKIYQRAFGGQSLDFGKGGQAYRCACAADRTGHAMLHTLYGQAMKHNTQFFVEYFALDLLMDNEGKCQGIIALNMEDGTLHRFRASNTILATGGYGRAYFSATSAHTCTGDGNAMVARAGLPLQDLEFVQFHPTGIYGAGCLITEGSRGEGGILRNSEGERFMERYAPTAKDLASRDVVSRSMTMEIREGRGVGPLKDHIYLHLNHLPPEVLKERLPGISETAAIFAGVDVTKEPIPVLPTVHYNMGGIPTNYHGEVVDIKGDNPDAVVPGLMAAGEAACASVHGANRLGANSLLDIVVFGRACANRVADISKPGEKQKPLEKDAGEKTIAWLDKLRNANGSLPTSKIRLNMQRVMQNNAAVFRTQETLEEGCELISKTWESFHDVKLSDQSLIWNSDLIETLELENLLINACITMYSAEARKESRGAHAREDFTTRDDEKWMKHSLGYWENEKVRLAYRPVHMNTLDDEVESFPPKARVY

SEQ ID NO: 211197 - protein, 619 aa, Zea mays
  Clone ID: MRT4577_124207C.1.pep
MWRSCVSRGLSRAKASASRLLSTASSSYTVVDHTYDAVVVGAGGAGLRAAIGLSEHGFNTACITKLFPTRSHTVAAQGGINAALGNMSEDDWRWHMYDTVKGSDWLGDQDSIQYMCREAPKAVIELENYGLPFSRTEEGKIYQRAFGGQSLDFGKGGQAYRCACAADRTGHAMLHTLYGQAMKHNTQFFVEYFALDLLMDNEGKCQGIIALNMEDGTLHRFRASNTILATGGYGRAYFSATSAHTCTGDGNAMVARAGLPLQDLEFVQFHPTGIYGAGCLITEGSRGEGGILRNSEGERFMERYAPTAKDLASRDVVSRSMTMEIREGRGVGPLKDHIYLHLNHLPPEVLKERLPGISETAAIFAGVDVTKEPIPVLPTVHYNMGGIPTNYHGEVVDIKGDNPDAVIPGLMAAGEAACASVHGANRLGANSLLDIVVFGRACANRVADISKPGEKQKPLEKDAGEKTIAWLDKLRNANGSLPTSKIRLNMQRVMQNNAAVFRTQETLEEGCELISKTWESFHDVKLSDRSLIWNSDLIETLELENLLINACITMYSAEARKESRGAHAREDFTTRDDEKWMKHSLGYWENEKVRLAYRPVHMKTLDDEVESFPPKARVY

SEQ ID NO: 211198 - protein, 62 aa, Zea mays
  Clone ID: MRT4577_124208C.1.pep
YYCLARCNFCPASTFIPYTRLGNDTHANNRHPIRTDRRCVTHIIDMPEDMVHACTCHRDTNF

SEQ ID NO: 211199 - protein, 58 aa, Zea mays
  Clone ID: MRT4577_12420C.1.pep
NTINYIKMLGHPNLNLTIKMGGYPKKKGQLFIPGVPNRRGETTAPFPNYYKKAGELFK

SEQ ID NO: 211200 - protein, 372 aa, Zea mays
  Clone ID: MRT4577_124210C.1.pep
MHTETQHSAQADIIPTRFWYTTSSSDNGKAGGATVPPRPSDDRDVRLLLVVAADAEEADAVARAVAGERGLHGHHMAAVVSHAGDEDALQPPIQRQPELLAAAEPLVDHGDRGRPERVRPRQGAQPAAADWPLVREDRAPRGRSCGFERSKANVMGTLNMLGLAKRIGARFLLTSTSEVYGDPLEHPQKESYWGHVNPIGVRSCYDEGKRTAETLTMDYHRGGGVEVRIARIFNTYGPRMCLDDGRVVSNFVAQALRRQPMTVYGDGKQTRSFQYVADLVAGLMALMESDHIGPFNLGNPGEFTMLELAQVVKETIDPMATIEFKPNTADDPHMRKPDITKAKQLLHWEPKVSLKEGLPLMVQDFRQRISDE

SEQ ID NO: 211201 - protein, 223 aa, Zea mays
  Clone ID: MRT4577_124211C.1.pep
RPGHARPRPGPKMHAQSRTRILKQACAAALALLLAVTSTAASARPARRGSSPPSRSSAQTITLYTTGTGVASPKPTAAPSTRRPVFTDEGPIGSRWLRALTRPDALRPAAVTVVDERLRGSKEFGLPLDGRLQGVLVTGVADNGGHMVAVKASFAGDGADDTISFFGVRRDDQEESHVAVVGGTGRYSGASGFAVVRAAGGVPETGGNNVSLSRVLSFSVHLK

SEQ ID NO: 211202 - protein, 94 aa, Zea mays
  unsure (1)..(94): unsure at all Xaa locations
  Clone ID: MRT4577_124212C.1.pep
ADLGTTQVLTHPSXTAMYFVHYCQPPXIXYGTINTXPPVVHKNPIHIKTPSPCLQASTAINPQLSHINCNSKATPXHPLGYQQTLPXPLTVHST

SEQ ID NO: 211203 - protein, 116 aa, Zea mays
  Clone ID: MRT4577_124213C.1.pep
KSKFLGGGGPPPKITGSLSAPPPRSLIAVKACKQAPPESPQGFFFVNQAPPCPKNNCLCKNAPPPPDLAKKKGRFYSSKTSLRVFPRNDKRSFCVRNPFSRNPGALFFLKNCPHAP

SEQ ID NO: 211204 - protein, 77 aa, Zea mays
  Clone ID: MRT4577_124214C.1.pep
MALTNFILTVVGVGAAVMLLRKDVKQSATVFRRNVRHIRNWLEEESAAAAKSTEQSSVKELESQAAKKDAVPKDDKH

SEQ ID NO: 211205 - protein, 414 aa, Zea mays
  Clone ID: MRT4577_124215C.1.pep
AGPAVDSTIQALSPYLEPGDAIVDGGNEWYQNTERRIQEAAARGVLYLGMGVSGGEEGARNGPSLMPGGSADAYANIRDILQKAAAQTEDGACVTFVGPGGAGNFVKMVHNGIEYGGMQLIAEAYDVLRRLGGLSNSEIADVFADWNRGELESFLVQITADIFTVADPLDGSGSAGGALVDRILDKTGMKGTGKWTVQQAAELAVAAPTIAASLDGRYLSGLKDERVAAAGVLEEEGMPAGLLETVNVDKKVLVDRVRQALYASKICSYAQGMNLLRAKSVEKGWNLNLAELARIWKGGCIIRARFLDRIKSAYDRNPELANLIVDREFAREMVQRQNAWRWVVARAVEAGISTPGMTASLSYFDTYRSSRLPANLIQAQRDLFGAHTYERIDCPGSFHTEWTKLARRSNGAAI

SEQ ID NO: 211206 - protein, 79 aa, Zea mays
  unsure (1)..(79): unsure at all Xaa locations
  Clone ID: MRT4577_124216C.1.pep
GFALGRLPVASGALGGAVVAAAAGRRGVVALVLAPQVLVLVCLPPLLRSARWSFPLXGGSRPVVLGGSSRAXGPLGFEA

SEQ ID NO: 211207 - protein, 507 aa, Zea mays
  unsure (1)..(507): unsure at all Xaa locations
  Clone ID: MRT4577_124217C.1.pep
MASPAPASPAAAAAHCPPPRIGLAGLATMGQNLALNIAEKGFPISVYNRTAAKVDSTLSRARDEGSLPVLGHRDPRGFVLALARPRGGVLLAQAGAAVGDTIRPLSPYLEPGHAIADRGHEWHXTTDRPLEESXAAGRWLTGFWTRLGXEGDREMDRAARGGACGGSDHDCRVAGRXRSQTEDGACVTFVGPGGAGNFVKMVHNGIEYGDMQLIAEAYDVLRRLGGLSNSEIADVFAEWNRGELESFLVQITADIFTVADPLDGSGSGGGALVDRILDKTGMKGTGKWTVQQAAELAVAAPTIAASLDGRYLSGLKDERVAAAGVLEEEGMPAGLLETVNVDKKVLVDRVRQALYASKICSYAQGMNLLRAKSVEKGWNLNLAELARIWKGGCIIRARFLDRIKSAYDRNPELANLIVDREFAREMVQRQNAWRWVVARAVEAGISTPGMTASLSYFDTYRSSRLPANLIQAQRDLFGAHTYERIDCPGSFHTEWTKLARRSNGAAI

SEQ ID NO: 211208 - protein, 77 aa, Zea mays
  Clone ID: MRT4577_124218C.1.pep
PSGSEPGKGVFFIHFFSIFFSFFFFLCFFSFLFFSFLFFFSGSDDTNCEHHVVVTGLFVAGTPLGIKNRAFTTHHIP

SEQ ID NO: 211209 - protein, 89 aa, Zea mays
  unsure (1)..(89): unsure at all Xaa locations
  Clone ID: MRT4577_124219C.1.pep
MSYKLGITSMSLGRATAGHSLTHKLNMAQKYGYNGIELFYEDLVEEAATRFGNGAPPSKEAQLEAARYIRGLCAERDLFIICLQXFAHY

SEQ ID NO: 211210 - protein, 95 aa, Zea mays
  Clone ID: MRT4577_12421C.1.pep
SDGHAYFTEYLSLLHHERQINPTSFYHCGKIELITYSKCAFSSKEGERSTSNKHPGGKGVVTVQGHSQFIFRHGGQPWSKCPLALYICLGTFKTP

SEQ ID NO: 211211 - protein, 103 aa, Zea mays
  unsure (1)..(103): unsure at all Xaa locations
  Clone ID: MRT4577_124220C.1.pep
PNYIYQKIFNTSKSIXSTNSLDYTTNFSHMLYFHDPQILYLIRLYITIHTNHHITNVSAHTVHLVGTSLSNPYLSFASTLNGLTVPLHVLSNHELLLFIKSVI

SEQ ID NO: 211212 - protein, 83 aa, Zea mays
  Clone ID: MRT4577_124221C.1.pep
APFSRVSSMGGSDDLFLGVVGGLFHLARDRKDMGRRWPLLRVTEAPPPVHDQVGWSSGALTDRPVGALQLHTEMGGTVTVNNG

SEQ ID NO: 211213 - protein, 154 aa, Zea mays
  unsure (1)..(154): unsure at all Xaa locations
  Clone ID: MRT4577_124222C.1.pep
FHTLAIXXCIAIGFLAVYDSHNLDNPPKPNFYSLHSWLGMVTMGLFALQFVIGFFTFLVCLICNKMTYGCRGALVPVHASIGLATFLLAISSCLSGLTQKAIWTLGESYSKFTEEGLVINSLGCVLIALAVLVSFAVRRSNAPATAKVYVTERI

SEQ ID NO: 211214 - protein, 82 aa, Zea mays
  Clone ID: MRT4577_124223C.1.pep
RKLDVDKTNQSCYGETKSTDLTTDRAHRTELPTQKGRTSTRCAEVILWLQNRSRNTRVSLPRKQYSTGRATLLLSLGKDPTM

SEQ ID NO: 211215 - protein, 102 aa, Zea mays
  Clone ID: MRT4577_124224C.1.pep
SSVWEVRVSSSSEGPATVARASHSPRAVRLSSSIQPRLPLPYLGHPPLLKVLFRTPLQSGVSQYSFDGRYVCPCYRKSLRWSSQSVMHLQYEKYPPQALLKQ

SEQ ID NO: 211216 - protein, 80 aa, Zea mays
  Clone ID: MRT4577_124225C.1.pep
DVSLPATTIHGRAKAFLDVNAALPNDGHNGQALRPHHACLHDPVQLLIHQLEAHLDNGHPAQSLERKRQLTDLKKHLQEP

SEQ ID NO: 211217 - protein, 43 aa, Zea mays
  unsure (1)..(43): unsure at all Xaa locations
  Clone ID: MRT4577_124226C.1.pep
XSTHPQHHPALSTRYGXAHQSTRYAREMSPYAAERTPLFTPRR

SEQ ID NO: 211218 - protein, 95 aa, Zea mays
  Clone ID: MRT4577_124227C.1.pep
SDRDMSNHTKASYWEELPCGIYSMHMKDIGKHGACMKEGWIVEVNTHKWMASSLNGLIKWERKLTVPTMENIPVDRGNHQLSQSFISSREPEENT

SEQ ID NO: 211219 - protein, 105 aa, Zea mays
  unsure (1)..(105): unsure at all Xaa locations
  Clone ID: MRT4577_124228C.1.pep
KKGGSKPKSSPPTNLAIEKXQDPALPQEQRDRPRAHHGERRVXRPPPPTKARCPSRPWPASXRQQAPPGRRRAPWXRTHQRRGSXTHXXRXQTRPRHPTGRRERA

SEQ ID NO: 211220 - protein, 51 aa, Zea mays
  Clone ID: MRT4577_124229C.1.pep
VSTFCCGYAHIRPCPASPQPLRRCQICMSLRQGPSLAKTITAGGGSLSDTY

SEQ ID NO: 211221 - protein, 188 aa, Zea mays
  unsure (1)..(188): unsure at all Xaa locations
  Clone ID: MRT4577_12422C.1.pep
PXKDEGEQKANEXXAAXPRXKKXDXTRAAQPAQPXXGGEXPEGLQKXGGSKAFFFCKGGXGKXXXXXXXAXTPPGXGARXGXXDADXXGPSXPXXXXXENRXXXXNPESKXXXPTEXXGXKXXXPGXXGQGRANTRXPXXXGXXXQXXTXXDXXEXDXXGXXXXXGTGDXHXTLXQXXPXXAAXKGTT

SEQ ID NO: 211222 - protein, 95 aa, Zea mays
  Clone ID: MRT4577_124230C.1.pep
FSLLRTGWKGGVVWIRKPPQAFTHIDQPTAIPTYRKECATDKTYICITAHMPAPTHTHTHTDRHPTHTERSNIWVYSRWNDSYPLSLREEMSTTY

SEQ ID NO: 211223 - protein, 85 aa, Zea mays
  unsure (1)..(85): unsure at all Xaa locations
  Clone ID: MRT4577_124231C.1.pep
LVFLYLRVGFGTVFGFCSVWCFWFCLNVFFCGVGQFVNLLSFVVRFNVFSSFVGCFQNKILLKTPGXNGGRPPISELGRPGFLFR

SEQ ID NO: 211224 - protein, 51 aa, Zea mays
  Clone ID: MRT4577_124232C.1.pep
MMLAVFCLLGPVPCLLKKKKKKKKKKKKKKKKPKKKKKKKKKKKYSALLPL

SEQ ID NO: 211225 - protein, 50 aa, Zea mays
  unsure (1)..(50): unsure at all Xaa locations
  Clone ID: MRT4577_124233C.1.pep
DIFSIFLLHDDNARLDCNNTLLATVLENMTPLPXXWGQKQKQKFRFQTPP

SEQ ID NO: 211226 - protein, 41 aa, Zea mays
  Clone ID: MRT4577_124234C.1.pep
FQNISPGAADSLLQVAVNHTHQPVWYFNEKIPLHVFVGEDG

SEQ ID NO: 211227 - protein, 89 aa, Zea mays
  Clone ID: MRT4577_124235C.1.pep
SSSFFNSSIKTQCSSFDAPGPSARTHMIFAFDVDHRFYTAHHKPRDMDTYTHNLVLWLVYDLHQSNTHVNNYLSSTRTTKVKLTLCSQQ

SEQ ID NO: 211228 - protein, 374 aa, Zea mays
  Clone ID: MRT4577_124236C.1.pep
MSGGAKAYAAVVLIRIMYSGMHVMSKVALDQGMNPLVFLFYRHTTAALVLIPVTFVVERRKAKPVTFKIGWKMFIHALYGVTACGDLFNLGLNYTSATSSSALYNVQPVVTFILAVIFGMETLKLTRFHGKVKFAGILFCVAGVTILAFYEGPMFRSFNHHHLFQNGGGGGGSSAAGAGDTHSKKQWVLGIFLMTLSNVLAGLWTVLQGPLIEDTSKLMNTTLQISWASLQAFLVAVAVERDFSKWRLGWNVGLAAIIYSGVIVTALSYYMQMWTIAKRGPVFLAMSMPLTFVFTIVISSFVIGDAVSLGSIFAGALLVGGLYNVFWGKSIEERDDDDLMNKISGPGKAGQQDKAADNNPASSQVPDDGAEAKV

SEQ ID NO: 211229 - protein, 60 aa, Zea mays
  unsure (1)..(60): unsure at all Xaa locations
  Clone ID: MRT4577_124237C.1.pep
PPRAEPAGGPRGARAQRRQGATEGRQRRPPWTMNLWRHRRARGRRDAKVSGRTYTVRRXP

SEQ ID NO: 211230 - protein, 128 aa, Zea mays
  unsure (1)..(128): unsure at all Xaa locations
  Clone ID: MRT4577_124238C.1.pep
IPGPTHASATSPLPQQPAIPTTQCSASAPPPAPRLRSPFSATPLRAASTPAPRRALRALPTTPSIARGPLSSSTLLTLLAPGASFPSTXVIPSIIXSPVSTPTGSGPSTGSTSPRDQLLRTSPSTPSR

SEQ ID NO: 211231 - protein, 244 aa, Zea mays
  Clone ID: MRT4577_124239C.1.pep
RVKHPDAERLLPDFDFVAAVGPRLASPSGARSLVLLLADASDFDGSFPRAVARLVAAAGEAHRADWKHGAPANLPRALLVVTKLDLLPTPSLSPDDVHAWAHSRARAGAGADLRLAGVHLVSATRGWGVRDLLEHVRELAGTRGNVWAVGARNVGKSTLLNAIARCCGIVGRPTLTEAPVPGTTLDVIKLDGVLGAQAKLFDTPGLLHGHQLTSRLTSEEMKLVQVRKEMSPRTYRIKTGQSIH

SEQ ID NO: 211232 - protein, 76 aa, Zea mays
  Clone ID: MRT4577_12423C.1.pep
TLPPHEWGFPGRFFNPLNFAPPLGAKGKEFPPGGVGNLAFLGFLIQPNVPGKGPFDNLLQPLFCPWPNPFFQAFFG

SEQ ID NO: 211233 - protein, 60 aa, Zea mays
  Clone ID: MRT4577_124240C.1.pep
NLVASSIDHQLTLPDRHIYHVQSWVSVHRCLLRLTGYHQLTLPSPHVTLDLTPSSIHIEV

SEQ ID NO: 211234 - protein, 215 aa, Zea mays
  Clone ID: MRT4577_124241C.1.pep
MADHDDAAVLSDVDEDLLPSSSPSISSASSHKTLPQAQPLPQSDAQAQQQRLLALAAELEEERRLRHAAEASIAGAESRVARYKAFAQDVLRKSDALTAEAAASARSLAALQAEATTASSMLSSGFERISAKASPSAADAPLPTSQKYSSGLPALAYGVLKRADDIVDDLLAQINAANRDRDRAREQMEHRNYQIAIEVSELEASLASRSAEGES

SEQ ID NO: 211235 - protein, 48 aa, Zea mays
  Clone ID: MRT4577_124242C.1.pep
RPNGSISMEGVIIESSRQKLSETVLFILFNLHIYAYLITTVPLLRHLT

SEQ ID NO: 211236 - protein, 177 aa, Zea mays
  Clone ID: MRT4577_124243C.1.pep
MADSSAPTRVMMAVNESSLKGYPHPSISCRTAFDWTLSKLVRSNPGGFHFLFVHVHVPDEDGFDDMDSIYASPEDFHQMKQRDKIRGLHLLEYFVNQCHQLGIKCEAWIRHGDPKEVICSEVKRVQPDLLVVGSRGLGPFQRVFVGTVSEFCVKHAECPVITIKRNATEAPQDPVDD

SEQ ID NO: 211237 - protein, 520 aa, Zea mays
  unsure (1)..(520): unsure at all Xaa locations
  Clone ID: MRT4577_124244C.1.pep
MPATMPGLSRRRLLCFFLIACLAALLLSIAGSAGKPKETDNGDXKFRVLRGIDTLGRMQKQRHGHGISPASAPAPAAARARLPLLHKDARLPVPGKVTRNHKRGGSATAXAEPAARRGRQRRRRRREXKKSMPLAVVAAAAALSGAALVLLAVLVVFLACKKLQGKRGGGGDQSGGTNKVSFEPGPGMFYLDAIKPYLDDAGRDSEGKAAPEIAAPKDEEPKRDDEEGDGACSDYDCAQSVHSSCCFQSSHFSYSEXREGRPGXDGVSPSPSVRSKRRGSAPTTPSDKAKVASPYSPLGPRTPSSEERGRRTHSPSSTSVSVLTEQSFNDHEIQGTAHSVRSLKFHGGGVCHAKEAGAETDAASRKTVPPPPPPPPPPMMVKQQQIVQMSCGTLAVPAPPPPPPPLLIPQRQNGQRSNGPTLPPPQAPPPGLFRQTAPVGKNGAPLPKLKPLHWDKVRAAPNRRMVWDRIRSSSFELDEQTIESLFGYNAAARCSVKLEEGQGRSPSLGHHVLDPKRLQN

SEQ ID NO: 211238 - protein, 134 aa, Zea mays
  Clone ID: MRT4577_124245C.1.pep
QMNQPSSCAWGSRGRGRAGRRLRRARPWKVGRSCCRSPAAATEVATGRPERWRMEAEEGIRAWEPSRRRTHGDATAAALLRRISALARGEGRGPAARGGGEGAEACEERVRRHGRGWSGEETRRRGRGARDEKI

SEQ ID NO: 211239 - protein, 79 aa, Zea mays
  unsure (1)..(79): unsure at all Xaa locations
  Clone ID: MRT4577_124246C.1.pep
LPPXPFSPVGXFVXVLALXSXVXVLLXXAXALSRXVXXVXPWXLPGXXFXXLGCGVGSXRPPAADEAALSLRXPPLRNT

SEQ ID NO: 211240 - protein, 54 aa, Zea mays
  Clone ID: MRT4577_124247C.1.pep
WANHTNPREQLPKLSHLYSFAIILHITITSKLFTNILFPILFISTLTIFLKPAY

SEQ ID NO: 211241 - protein, 61 aa, Zea mays
  Clone ID: MRT4577_124248C.1.pep
LPCVLIHWSSSEINELCLSVQCSGHESSTLLTLRCLSLSLFLPPVDCRVTSAGDVGCDDRS

SEQ ID NO: 211242 - protein, 45 aa, Zea mays
  Clone ID: MRT4577_124249C.1.pep
AGRPTHWVTHGCPARAATMIQPTDFVLLCYPPTTATTQTEYTWTG

SEQ ID NO: 211243 - protein, 105 aa, Zea mays
  unsure (1)..(105): unsure at all Xaa locations
  Clone ID: MRT4577_12424C.1.pep
SAVRGRMDRRHGLGAGEQKKVARRPRDVGRVDVQASTVVSPSPHLQDLCGRLDGDSLGVDEGGEEDQHSSPCVARAFPPLPGRPSAVPFSXPPLPGSLRVLLVGL

SEQ ID NO: 211244 - protein, 52 aa, Zea mays
  Clone ID: MRT4577_124250C.1.pep
GYFLRTSFIETKIRGQALPYKSTSQNYYFEQYYNLIITAFITSQISNPDARP

SEQ ID NO: 211245 - protein, 97 aa, Zea mays
  Clone ID: MRT4577_124251C.1.pep
VDVAVHEALSVLHQVFWLRELGSHSCLWKCTCLHNISSNNVRLQLSEIKCSEGYKLLCSTCKCYVSWYHLDYMIGGVDQPHNQILNREACCVNLNMG

SEQ ID NO: 211246 - protein, 81 aa, Zea mays
  unsure (1)..(81): unsure at all Xaa locations
  Clone ID: MRT4577_124252C.1.pep
AESQTKIDLFVGINSGHVFRKLELTSGPFLLRGESTTRVYIVRRLNREAARCVAYEKRISXLVKVGXDKRALNVAKIKLGT

SEQ ID NO: 211247 - protein, 222 aa, Zea mays
  Clone ID: MRT4577_124253C.1.pep
LGARPGSVSPVVRVAVQCKVASDLPKLVEGLKRLAKSDPMVLCTMEESGEHIIAGAGELHLEICLKDLQEDFMGGAEIIVSPPVVSFRETVLEKSCRTVMSKSPNKHNRLYMEARPLEEGLAEAIDDGRIGPRDDPKVRSQILSQEFGWDKDLAKKIWCFWASKEGALAEENMRGICFEVCDVVLHADAIPGVGGQVIPTARRVIYASQLTAKPRLLEPVYL

SEQ ID NO: 211248 - protein, 229 aa, Zea mays
  unsure (1)..(229): unsure at all Xaa locations
  Clone ID: MRT4577_124254C.1.pep
VRSXILSQEFGWDKDLAKKIWCFGPETTGPNMVVDMCKGVQYLNEIKDSVVAGFQWASKEGALAEENMRGICFEVCDVVLHADAIHRGGGQVIPTARRVIYASQLTAKPRLLEPVYLVEIQAPENALGGIYGVLNQKRGHVFEEMQRPGTPLYNIKAYLPVIESFGFSSQLRAATSGQAFPQCVFDHWDMMGSDPLEAGSQAAQLVLDIRKRKGLKEQMTPLSEFEDKL

SEQ ID NO: 211249 - protein, 149 aa, Zea mays
  Clone ID: MRT4577_124255C.1.pep
HADAIPRGGGQVIPPARRVIYAFQLTAKPRLLEPVYLVEIQAPENALGGIYGVLNQKRGHVFEEMQRPGTPLYNIKAFLPVIESFGFSSQLRAATSGQAFPQCVFDHWDMMGSDPLEAGSQAAQLVLDIRKRKGLKEQMTPLFEFEDKL

SEQ ID NO: 211250 - protein, 59 aa, Zea mays
  Clone ID: MRT4577_124256C.1.pep
RGPPRGPPFLGLGPSSKFVVVGSPVTAAGSIVNWFSCKPSVCSCAASLMLYFKTPPVSF

SEQ ID NO: 211251 - protein, 551 aa, Zea mays
  Clone ID: MRT4577_124257C.1.pep
RRKVEYHHLKQSSASWKPRLHNTLHQSFANQLLLISLHGNIELLQHGPQFLLLVIHAGLADAWEGPLDDVYATAIRNCDPEGPLMLYVSKMIPASDKGRFFAFGRVFSGKVATGMKVRIMGPNYVPGQKKDLYVKSVQRTVIWMGKKQESVEDVPCGNTVAMVGLDQFITKNATLTNEKETDACPIRAMKFSVSPVVRVAVQCKVASDLPKLVEGLKRLAKSDPMVLCTMEESGEHIIAGAGELHLEICLKDLQEDFMGGAEIIVSPPVVSFRETVLEKSCRTVVSKSPNKHNRLYMEARPLEEGLAEAIDDGRIGPRDDPKVRSQILSQEFGWDKDLAKKIWCFGPETTGPNMVVDMCKGVQYLNEIKDSVVAGFQWASKEGALAEENMRGICFEVCDVVLHADAIHRGGGQVIPTARRVIYASQLTAKPRLLEPVYLVEIQAPENALGGIYGVLNQKRGHVFEEMQRPGTPLYNIKAYLPVIESFGFSSQLRAATSGQAFPQAVFDHWDMMGSDPLEAGSQAAQLVLDIRKRKGLKEQMIPLSEFEDKL

SEQ ID NO: 211252 - protein, 54 aa, Zea mays
  Clone ID: MRT4577_124258C.1.pep
VYMQSKFAQRNALHCSNAVEEFSVVKSKWPAAVLVFYIVTPSISHCHPSPRCQN

SEQ ID NO: 211253 - protein, 843 aa, Zea mays
  Clone ID: MRT4577_124259C.1.pep
MVKFTAEELRAIMDKKNNIRNMSVIAHVDHGKSTLTDSLVAAAGIIAQEVAGDVRMTDTRADEAERGITIKSTGISLYYEMTDESLKNYKGERDGNQYLINLIDSPGHVDFSSEVTAALRITDGALVVVDCIEGVCVQTETVLRQALGERIRPVLTVNKMDRCFLELQVEGEEAYQTFSRVIENANVIMATYEDKLLGDVQVYPEKGTVAFSAGLHGWAFTLTNFAKMYASKFGVDESKMMERLWGENFFDPATKKWTTKNTGSPTCKRGFVQFCYEPIKQIIKTCMNDQKEKLWPMLQKLNVTMKADEKELIGKALMKRVMQTWLPASTALLEMMIFHLPSPAKAQKYRVENLYEGPLDDVYATAIRNCDPEGPLMLYVSKMIPASDKGRFFAFGRVFSGKVATGMKVRIMGPNYVPGQKKDLYVKSVQRTVIWMGKKQESVEDVPCGNTVAMVGLDQFITKNATLTNEKEVDACPIRAMKFSVSPVVRVAVQCKVASDLPKLVEGLKRLAKSDPMVLCTMEESGEHIIAGAGELHLEICLKDLQEDFMGGAEIIVSPPVVSFRETVLEKSCRTVMSKSPNKHNRLYMEARPLEEGLAEAIDDGRIGPRDDPKVRSQILSQEFGWDKDLAKKIWCFGPETTGPNMVVDMCKGVQYLNEIKDSVVAGFQWASKEGALAEENMRGICFEVCDVVLHADAIHRGGGQVIPTARRVIYASQLTAKPRLLEPVYLVEIQAPENALGGIYGVLNQKRGHVFEEMQRPGTPLYNIKAFLPVIESFGFSSQLRAATSGQAFPQCVFDHWDMMGSDPLEAGSQAAQLVLDIRKRKGLKEQMTPLSEFEDKL

SEQ ID NO: 211254 - protein, 194 aa, Zea mays
  Clone ID: MRT4577_12425C.1.pep
MNGAGNGEPSLVVVAEEGPPNDGNGAGVHAPNFGANEADTLLVVATLITALTYQLGTNIPGGYWQDDLKGHDGLAGHVAGDPIMRDKHRRRYWLFMAASWVGFGTSMLLTVGLITGVPARSRFVRFAFLLAYSSLVLTFVTSQPRTSLFWDLIIWAVVMALLAIATKYLRLDRLPRWARTLCHAPPSAFCCSRS

SEQ ID NO: 211255 - protein, 62 aa, Zea mays
  Clone ID: MRT4577_124260C.1.pep
KKQKGTKSSKQPTLKNPKVFICPQKGGGYTNYNPPHGNHLKWDNLLFRNFFDDIWGKCPPWA

SEQ ID NO: 211256 - protein, 84 aa, Zea mays
  Clone ID: MRT4577_124261C.1.pep
QRPGTPLYNIKAYLPVIESFGFSSQLRAATSGQAFPQAVFDHWDMMGSDPLEAGSQAAQLVLDIRKRKGLKEQMIPLSEFEDKL

SEQ ID NO: 211257 - protein, 768 aa, Zea mays
  Clone ID: MRT4577_124262C.1.pep
SLYYEMTDESLKNYKGERDGNQYLINLIDSPGHVDFSSEVTAALRITDGALVVVDCIEGVCVQTETVLRQALGERIRPVLTVNKMDRCFLELQVEGEEAYQTFSRVIENANVIMATYEDKLLGDVQVYPEKGTVAFSAGLHGWAFTLTNFAKMYASKFGVDETKMMERLWGENFFDPATKKWTTKNTGSPTCKRGFVQFCYEPIKQIIKTCMNDQKEKLWPMLQKLNVTMKADEKELIGKALMKRVMQTWLPASTALLEMMIFHLPSPAKAQKYRVENLYEGPLDDVYATAIRNCDPEGPLMLYVSKMIPASDKGRFFAFGRVFSGKVATGMKVRIMGPNYVPGQKKDLYVKSVQRTVIWMGKKQESVEDVPCGNTVAMVGLDQFITENATLTNEKEADACPIRAMKFSVSPVVRVAVQCKVASDLPKLVEGLKRLAKSDPMVLCTMEESGEHIIAGAGELHLEICLKDLQEDFMGGAEIIVSPPVVSFRETVLEKSCRTVMSKSPNKHNRLYMEARPLEEGLAEAIDDGRIGPRDDPKVRSQILSQEFGWDKDLAKKIWCFGPETTGPNMVVDMCKGVQYLNEIKDSVVAGFQWASKEGALAEENMRGICFEVCDVVLHADAIHRGGGQVIPTARRVIYASQLTAKPRLLEPVYLVEIQAPENALGGIYGVLNQKRGHVFEEMQRPGTPLYNIKAFLPVIESFGFSSQLRAATSGQAFPQCVFDHWDMMGSDPLEAGSQAAQLVLDIRKRKGLKEQMTPLSEFEDKL

SEQ ID NO: 211258 - protein, 65 aa, Zea mays
  Clone ID: MRT4577_124263C.1.pep
LTPPLLDRLSPLPHPINSFYFHQYVGHAPITGVLFHSFCHPPLTDLVYEKLPPVYVSPSRGLIYL

SEQ ID NO: 211259 - protein, 843 aa, Zea mays
  Clone ID: MRT4577_124264C.1.pep
MVKFTAEELRAIMDKKNNIRNMSVIAHVDHGKSTLTDSLVAAAGIIAQEVAGDVRMTDTRADEAERGITIKSTGISLFYQMTPESLEMYKGDRDGDEYLINLIDSPGHVDFSSEVTAALRITDGALVVVDCIEGVCVQTETVLRQALGERIRPVLTVNKMDRCFLELQVEGEEAYQTFSRVIENANVIMATYEDKLLGDVQVYPEKGTVAFSAGLHGWAFTLTNFAKMYASKFGVDETKMMERLWGENFFDPATKKWTTKNTGSPTCKRGFVQFCYEPIKQIIKTCMNDQKEKLWPMLQKLNVTMKADEKELIGKALMKRVMQTWLPASTALLEMMIFHLPSPAKAQKYRVENLYEGPLDDVYATAIRNCDPEGPLMLYVSKMIPASDKGRFFAFGRVFSGKVATGMKVRIVGPNYVPGQKKDLYVKSVQRTVIWMGKKQESVEDVPCGNTVAMVGLDQFITKNATLTNEKETDACPIRAMKFSVSPVVRVAVQCKVASDLPKLVEGLKRLAKSDPMVLCTMEESGEHIIAGAGELHLEICLKDLQEDFMGGAEIIVSPPVVSFRETVLEKSCRTVMSKSPNKHNRLYMEARPLEEGLAEAIDDGRIGPRDDPKVRSQILSQEFGWDKDLAKKIWCFGPETTGPNMVVDMCKGVQYLNEIKDSVVAGFQWASKEGALAEENMRGICFEVCDVVLHADAIHRGGGQVIPTARRVIYASQLTAKPRLLEPVYLVEIQAPENALGGIYGVLNQKRGHVFEEMQRPGTPLYNIKAFLPVIESFGFSSQLRAATSGQAFPQCVFDHWDMMGSDPLEAGSQAAQLVLDIRKRKGLKEQMTPLSEFEDKL

SEQ ID NO: 211260 - protein, 43 aa, Zea mays
  Clone ID: MRT4577_124265C.1.pep
RERAPVPEAAYPSAFRAVLLAAFRRQEAGRGTPRRGVALLGEA

SEQ ID NO: 211261 - protein, 120 aa, Zea mays
  unsure (1)..(120): unsure at all Xaa locations
  Clone ID: MRT4577_124266C.1.pep
WKEPVTGSSHPXGIVLNNIGIXAKQPNSSISKCVGVQHVKNGNNMVAFGANDGCFNXLGHNHSVSSAGFGSKGPPLADIIGVRXKVDKVSXVYRQPLFKEKKYKPGSFCAQDAKLIKREV

SEQ ID NO: 211262 - protein, 58 aa, Zea mays
  Clone ID: MRT4577_124267C.1.pep
VPCWSSAGILRPRRLGSRPVACLAVALPGVLSLPPSVRLLGNRRVGRPVFRAVLRRLP

SEQ ID NO: 211263 - protein, 94 aa, Zea mays
  unsure (1)..(94): unsure at all Xaa locations
  Clone ID: MRT4577_124268C.1.pep
GRPRVSSXTRAAALFFFFFFFFFFFFFFFFFFFFFFFREEIPWPSRLNYPNLGKGWFLTSQLXINTGGGHVWLKKLIGAKLKLKTIPKPRGFFP

SEQ ID NO: 211264 - protein, 102 aa, Zea mays
  unsure (1)..(102): unsure at all Xaa locations
  Clone ID: MRT4577_124269C.1.pep
MDPSMEPLYAHVEPYDYGFLMVYNVHTIYYKHSGNRQGHADVLLHGWCMSQHVXPNRMFFDPKFYRIGLCDHRGAXKXTTHACIKQTTTCDLIAHLGKLKVH

SEQ ID NO: 211265 - protein, 441 aa, Zea mays
  unsure (1)..(441): unsure at all Xaa locations
  Clone ID: MRT4577_12426C.1.pep
PFFTSTPLLQLAEPTVGAPAPAPAVVNGTPTPPTTGGARREFTTSKTGRVLAITLPIVAAVLATVVLCSCLWRRKRKTQGKSSLPDTTNPEDIQSIDSLIIDVSTLRAATENFAEANKLGEGGFGSVYKGILPDDQEIAVKRLSQTSRQGMEELKNELVLVAKLQHKNLVRLVGVCLEDHEKLLVYEYMPNKSLDTILFNHERCGELDWGKRFKIVNGIARGLQYLHEDSQVKIIHRDLKASNVLLDNDFNPKISDFGLARLFGSEQSRDVTNRVVGTYGYMAPEYAMRGHYSVKSDVFSFGVLILEIVTGRRNGGSYSSEESADLLSLVWEHWTTGTLVEIMDPSLSSLAPRDLMLKCIHIGLLCVQDDHEDRPMMSTVNVMLSSSTVTLQAPSRPAFLXPKSGFNSEINSEVYPPGAYQSASRSPMSLNDVSITELEPR

SEQ ID NO: 211266 - protein, 70 aa, Zea mays
  Clone ID: MRT4577_124270C.1.pep
GIMAHDFFNLSLVELSIGKFRKSSRTRPAKCSGSSAREADTGACHWRQRWHSHRNLVQASKIEIGHNTYP

SEQ ID NO: 211267 - protein, 69 aa, Zea mays
  Clone ID: MRT4577_124271C.1.pep
AAQPDEELDQCTAISESCIHTANTKESVAPHLTKAEECGEIGEIPSTWRLVRASYGASLTAPCTLQEVD

SEQ ID NO: 211268 - protein, 65 aa, Zea mays
  Clone ID: MRT4577_124272C.1.pep
KKCFKNAFNSKISLNITMKRQLPKFLAFPPAPSKKIFISRWTVKTFYLSGLAKLIFGFEWLRHPL

SEQ ID NO: 211269 - protein, 112 aa, Zea mays
  unsure (1)..(112): unsure at all Xaa locations
  Clone ID: MRT4577_124273C.1.pep
PLPFVDWGPTGFKWGINNHPPKVLPGGALPKVQRPVGIFSPPPRVGGGFSRLAPKFALMFPKGAFLPWFVRKGMEKXSFFXAPEDLAGLQKEYKEVGPXFYKGEDGPQGAEF

SEQ ID NO: 211270 - protein, 193 aa, Zea mays
  Clone ID: MRT4577_124274C.1.pep
MATLRVDEINKILRERIEQYNRKVGIENIGRVVQVGDGIARIIGLGEIMSGELVEFAEGTRGIALNLESKNVGIVLMGDGLMIQEGSFVKATGRIAQIPVSEAYLGRVINALAKPIDGRGEIVASESRLIESPAPGIISRRSVYEPLQTGLIAIDSMIPIGRGQRELIIGDRQTGKTAVATDTILNQKGQDVI

SEQ ID NO: 211271 - protein, 125 aa, Zea mays
  Clone ID: MRT4577_124275C.1.pep
MKNDKAAGTRSGLGGGRLVAKTVSKDKRAVEGLPDGWRKEYRPRKNGSFLDVYYIDPVSGYEFRSFKDVHRYLETGDIRQCAVRPKKSTICEVHIIESQTHASASPQHTRPGTADKGIQCEILTS

SEQ ID NO: 211272 - protein, 120 aa, Zea mays
  Clone ID: MRT4577_124276C.1.pep
MLPIELHREAYNLGEHFEEPLQDYQRAVHSIQATMLDRTNAFKQHYDMNHERLYQELNLDIFKFMNPETYAEAQSEFPDLKADTEEAAHIFGLMDGLMNEEHARLPDHITLDIGLSFHEY

SEQ ID NO: 211273 - protein, 94 aa, Zea mays
  Clone ID: MRT4577_124277C.1.pep
VKHPNFAIRKCARVHLVKTGKKISPFFPNNGCFTSLEETDEVLIAGFGRKAPPLGNFPGARFKVVKVFGVSPLPLFKEKKKNPGFLTPPRVLEI

SEQ ID NO: 211274 - protein, 108 aa, Zea mays
  unsure (1)..(108): unsure at all Xaa locations
  Clone ID: MRT4577_124278C.1.pep
MASKPMLKELKDLQKDPQHDAVQGPGGEDMFYWEANIMGPADRPYAGGVFLVNMLFXPPDYPLKPTKVFFKTKVLHPHINSDGSICLDILKEQWSPALTIIKVLLSIC

SEQ ID NO: 211275 - protein, 361 aa, Zea mays
  unsure (1)..(361): unsure at all Xaa locations
  Clone ID: MRT4577_124279C.1.pep
MAASSSIQRGERRGRWGSPERTVVWTEPKPKPARKVAVVYYLCHRDGHLDHPHFLEMELSQHQQSHSSRPAPGLYLRDFKARLNALRGDGMPGMYSWSSKRSYKNGYVWQDLTEDDLIHPAHGNDEYVLKGSPLLLFPQPPPQQEDADKWAGRHRKNWSSFDLGDCDSKLVVVAQHQQSAATRVDRDDADPSSTELAIDEISPPPSSSSPDEPESCGREVGVVAGGRMWASAVLMQIFSCGSTAAVRRGRHARTRSDLVMSSASNRRAKKEADXRGRGRVSKSXECLSVSGVVERDYFSGSLIESGKKXAGMTPXLKRSSSCNADRGAAKLKLPPVPATAKEXPCRAPCLPREPRAQEKYD

SEQ ID NO: 211276 - protein, 145 aa, Zea mays
  unsure (1)..(145): unsure at all Xaa locations
  Clone ID: MRT4577_12427C.1.pep
KGLLGDQGSRELRLVESQXKRGPYQCKRCFKFGHIEKGCNATQAELEQELPPPRPKKQKKQSKTKSEAYENSTKGAEPSNIDVDPKLTSSPGVTTRRMASLSPARASPCVTTRRMASLSPTSPGVSTRRMAFISPGGINRRLIID

SEQ ID NO: 211277 - protein, 72 aa, Zea mays
  Clone ID: MRT4577_124280C.1.pep
PVTHITWYLSFAPPHLYFLIIFEPTLNPFHLVFHSMWCLSLNFPYHVIHITLWRYLDSYSPFAPIIMCWHFT

SEQ ID NO: 211278 - protein, 122 aa, Zea mays
  Clone ID: MRT4577_124281C.1.pep
IFALFTCKKKTPLGPKKQTPFPRGLGNFLNQRAPQVFPLETGRLGQPIYFCLAPFLGPPGFSLFPSGFFFVGNFWGKPFFPGEHLCPCFPPALKPPPIGKPGTPPGPGPKSPGPPPRPVFRG

SEQ ID NO: 211279 - protein, 150 aa, Zea mays
  Clone ID: MRT4577_124282C.1.pep
FFGFGGPPHFWRGKYPPPPPNWGRGVFGVEKKSGGLLFLSPPPFFSFSPGGGLPLTLLWGKKTPPLFLCPPGTRFLTPALIIVLLRIFCIGFFFLVAHFKSFSPLWICGTPLHLLFSGGALFLLELSSCFTCSNGPPSFFPLPWWVPFFL

SEQ ID NO: 211280 - protein, 56 aa, Zea mays
  Clone ID: MRT4577_124283C.1.pep
VQFLYCTKTPVSFFLGKPIKIFSTRGGGSFFSFIKNWFTSHELFFSFSVCEKHLSL

SEQ ID NO: 211281 - protein, 170 aa, Zea mays
  unsure (1)..(170): unsure at all Xaa locations
  Clone ID: MRT4577_124284C.1.pep
TKRGGTDEAGNXDPDPGHGFEDXREQNGGTADTPAEPXPKXESAQNARGXGXGRGGSXTSGXKPDAAPSDAARADDXAGXDRGXAXGPTATQPNRQXDHXATAHGRTGNARKDXSQXXPQKTXXDSPEEKGQTXGNDDQNSPATPXDQSXRRQKHRRKXHQDRXKGKADA

SEQ ID NO: 211282 - protein, 509 aa, Zea mays
  unsure (1)..(509): unsure at all Xaa locations
  Clone ID: MRT4577_124285C.1.pep
MAALPASAPAPAPAPSEAAELVPTLSSLEPVYGAGAQLDEARLRFARLGDRFHAVYGARPALFARSPGRVNLIGEHIDYEGYSVLPMAIRQDMIVAIRRANGRXQVRVANVDDKYPLCVYPADPDKEIDVKNHKWGHYFMCGYKGVYEYCRSKGIDLGKPVALDVVVDGTVPQGSGLSSSAAFVCSATIAIMGILDKNFPKKEVAQFTCLSERHIGTQSGGMDQAISIMAKPGFAELIDFNPIHATDVQLPSGGTFVIAHCLAESKKAETAATNYNNRVVECRLAAIVLAIKLGMDRKKAISSVTTLSDVEGLCVSFAGREGSSDPAVAVKKLLHEDPYTAGEIEKITGEGLTSVFQGSQTSLDVIKAAKHYKLFQRATHVYSEARRVYAFRDTVSSKLSEEGKLKKLGDLMNESHYSCSVLYECSCPELEELVKVCRDNGALGARLTGAGWGGCAVALVKEPIVPQFILKLKEMYYKSRIDRGVIKQGDVGLYVFASKPSSGAAILRL

SEQ ID NO: 211283 - protein, 196 aa, Zea mays
  unsure (1)..(196): unsure at all Xaa locations
  Clone ID: MRT4577_124286C.1.pep
GEAALRAVTRAAVAGPPRPGPQGATXAPPRLRPSGQGSTPXLPGPRSRGAAPXAAQPSXAPEPPGPHAVGHRGARQGPCPPXPCAPPDXPAPAGARXGCTLAPRAAPTAKVVPTLEAEPPGAXRRPCPAPAVAGXPPEPGXPARPLTAAPAHGPGRLLPRRRGRPCPPGXRPLLGPXPPGRNPRPPMPEVLGSEPP

SEQ ID NO: 211284 - protein, 46 aa, Zea mays
  Clone ID: MRT4577_124287C.1.pep
YATIQSEFQVTHAFDSKSSRVLGSILTGGELYNLSNFKNNPLKKKL

SEQ ID NO: 211285 - protein, 140 aa, Zea mays
  Clone ID: MRT4577_124288C.1.pep
APQPDWGRTPCIAGEPGRGRAHRTVCAAGCCPHPLEHVPGLRTRTEGCSSRQGRAPASAVAGAARAGSVLLALDRRARAGAGTAATASPGQAVPTRRGRCKGRAAGEEPAPAHAEGARIGAAMTGGITMAATEMRKSPAG

SEQ ID NO: 211286 - protein, 122 aa, Zea mays
  unsure (1)..(122): unsure at all Xaa locations
  Clone ID: MRT4577_124289C.1.pep
MRAQKNPIDTRREGVGALALLAVAASATYTHTSGGCGXQPPASDHIPPPVHIPPTVHLPPTVHVSPTVHLPTTVQLPPTVHVPAAGHMSAAPCHYPTXPTRPQPHSQPHTCPCQQTHSIPCQ

SEQ ID NO: 211287 - protein, 66 aa, Zea mays
  unsure (1)..(66): unsure at all Xaa locations
  Clone ID: MRT4577_12428C.1.pep
ASGSIAASLSLNCHAVRVGAVPPVAVGSLCYPLKXQSSPHDSPMFSMLSRHESLWHPIAGYEWRDC

SEQ ID NO: 211288 - protein, 156 aa, Zea mays
  Clone ID: MRT4577_124290C.1.pep
MECNPSLALKASETAVKKLESRDFVGAKRIALKAQRIFPEIENIPQLLTVCEVHCAAEAKVNGMLDFYGILQVEGTADEVTIKKQYRKLVLSLHPDKNSYAGAESAFKFVAEAYSTLSDRTKRYAYDVKWRAAPKVAPKQATQPTQPNQATQQKQD

SEQ ID NO: 211289 - protein, 790 aa, Zea mays
  Clone ID: MRT4577_124291C.1.pep
MESSGCSSEIVESTEEFDTTPSGGSSLLHIKLKDEEKRGKSHDYSVEDDLDQLLKAIDSRTFRRALSPGSTGGDALGKSVLKKPARSGLSQNAGIGISSKAVNMKQALRRLCISQASEMAAMKRLSMSPGSSSSSEAGTIHRLYASLMVQSSSEGLLHDDEKMNLIEVSITPEKIDKSSSRGTSEFSEDCEFETADGSAVTSTSICSASSTYTDIRKIRIQDVIIGDPMDNESSLGENGNLGNKFSAATDDGSPKGPILSKPITTSRLVKPVFRCKPSGKKKVKQEPSSLGDSSNSTKFCSSKESISLTSTSCSSTSSFTNPANRAEEKSSPGPEKSDGTSPEWLAEQNECSQNSKSSISEYGCSTSISGESQFGLCGYSNRPHMAKDLRWLTIRQLALQQGSLGLDNFKLLKRLGCGDIGTVYLAELVDSDCLFALKVMDIEYLINRKKMLRAQAEREILEMLDHPFLPTLYAHFTTDNLSCLVMEYCPGGDLHVLRQRQPGKSFPEPAARFYVAEVLLALEYLHMLGVIYRDLKPENILVREDGHIMLSDFDLSLRCSVNPVLLRSSSVTANHQPRKHTGPCAENYCINSSCLQQPSCAQTSCFTPRLPSIPKPRKPKSSQKRLPQLVVEPTDARSNSFVGTHEYLAPEIIKGDGHGSAVDWWTFGVFLYELLYGKTPFRGPGNDETLANVVSQNLRFPDHPAVSSNTKDLIRGLLVKEPENRFGSLRGAAEIKQHPFFEGLNWALIRSAAPPETQPCNIVTLAKERKKEGKCLEFRSNSEDLEFEVF

SEQ ID NO: 211290 - protein, 56 aa, Zea mays
  unsure (1)..(56): unsure at all Xaa locations
  Clone ID: MRT4577_124292C.1.pep
RGAXVFVKFCFFRFGGLYHFPILTVAVVVIVVFLTKTLGXVFXXVSAXAWVEFXXG

SEQ ID NO: 211291 - protein, 34 aa, Zea mays
  Clone ID: MRT4577_124293C.1.pep
QSRFCPSDAEGCRRAAHISSGFALNRQDHVHDCV

SEQ ID NO: 211292 - protein, 524 aa, Zea mays
  Clone ID: MRT4577_124294C.1.pep
MAEVKPEEISHPPMEQLQGFEYCIDSNPPWGEAIILGFQHYILALGTAVMIPTVLVPMMGGDDGDRVRVVQTLLFVTGINTLLQSLFGTRLPTVIGGSYAFVIPIMAIIQDPSLSGIPDGHERFLETMKAIQGALIVSSSIQIILGYSQLWGIFSRFFSPVGMTPVLALLGFGLFERGFPVVGRCVEIGLPMLILFVVLSQYLKNIQIKEIPILERFSLFICVALVWAYAQILTSGGAYKNSAEVTQNNCRTDRANLISSAPWIKIPYPLQWGAPTFNAGQSFGIVSAVLVSLVESTASYKAAARLASATPPPAHILSRGIGWQGIGILLDGLFGTGTGSTVSVENVGLLGSTRIGSRRVIQISAGFMIFFSMLGKFGALFASIPFTIFAAVYCVLFGLVAAVGLSFLQFTNMNSMRNLFIVGVSIFLGLSVPEYFFRYTMAAHRGPAHTKAGWFNDYINTIFSSPPTVGLMVAVFLDNTLEVKQAGMDRGMPWWVRFRTFKGDSRNEEFYRLPFNLNRFFPPA

SEQ ID NO: 211293 - protein, 303 aa, Zea mays
  unsure (1)..(303): unsure at all Xaa locations
  Clone ID: MRT4577_124295C.1.pep
MEFPHHHHHHGHRRDDDEDDRRGPPPPVYGGYGQPPPPDPYGRAPVDPDPYGRPPPQSAYGGAGDAYGHSGQGYAPPPAYGAGGGYGNVVHVAHEVGDERPYYGGXAAVLVAPTEAVAPSXHEGRPHHGGGGSQYGHETRPHHGGAPPVRQQTYRIYCKAGEDQYSLASRDGKVCLVRTDRDDDAQHWIKDMKYSTRVKDEEGYPAIVLVNKATGEALKHSLGQSHPVLLTRHNPDSLDESVLWTESRDVGDGFRCIRMVNNIYLNFDALHGDKDHGGVRDGTALVLWEWCEGDNQRWKIVPW

SEQ ID NO: 211294 - protein, 231 aa, Zea mays
  Clone ID: MRT4577_124296C.1.pep
MEFPHHHHHHGHRRDDDEDDRRGPPPPVYGGGGLGGAYGGGGSEYGHEGRPHHGGGGSQYGHETRPHHGGGGGAPPVRQQTYRIYCKAGEDQYSLASRDGKVCLVRTDRDDDAQHWIKDMKYSTRVKDEEGYPAIVLVNKATGEALKHSLGQSHPVLLTRHNPDSLDESVLWTESRDVGDGFRCIRMVNNIYLNFDALHGDKDHGGVRDGTALVLWEWCEGDNQRWKIVPW

SEQ ID NO: 211295 - protein, 507 aa, Zea mays
  unsure (1)..(507): unsure at all Xaa locations
  Clone ID: MRT4577_124297C.1.pep
MAEVKPEEISHPPMEQLQGFEYCIDSNPPWGEAIILGFQHYILALGTAVMIPTVLVPMMGGDDGDRVRVVQTLLFVTGINTLLQSLFGTRLPTVIGGSYAFVIPIMAIIQDPSLSGIPDGHERFLETMKAIQGALIVSSSIQIILGYSQLWGIFSRFFSPVGMTPVVALLGFGLFERGFPVVGRCVEIGLPMLILFVVLSQYLKNIQIKEIPILERFSLFICVALVWAYAQILTSGGAYKNSAEVTQNNCRTDRANLISSAPWIKIPYPLQWGAPTFNAGQSFGIVSAVLVSLVESTASYKAAARLASATPPPAHILSRGIGWQTFKTEKKRCSCERQGIGILLDGLFGTGTGSTVSVENVGLLGSTRIGSRRVIQISAGFMIFFSMLGKFGALFASIPFTIFAAVYCVLFGLVXGHPVSFLMMCFGVMQCNAAWADGFSLTXAAVGLSLLQFTNMNSMRNLFIVGVSIFLGLSVPEYFFRYTTAAVAPSTATRHARTTAAGAAPRL

SEQ ID NO: 211296 - protein, 191 aa, Zea mays
  unsure (1)..(191): unsure at all Xaa locations
  Clone ID: MRT4577_124298C.1.pep
PRGRPDLLLSLAPENIASAWPSLTEVSFNXTDVLNGMRSHISFTYWSIYTNKDMTXDCSTTNACAYILTIALTACIPPALIFARSKLKWQAFSAAIAKRRLTKHVIEPFLGALFYHLYNQTATNTLETVASLAHGGSKGMEMVIASGNPNIGYCNENITRTASGNPNIIGGAAIDPYTQAHIGNVKRKKNP

SEQ ID NO: 211297 - protein, 66 aa, Zea mays
  Clone ID: MRT4577_124299C.1.pep
AQYNQIFETTKRHRALFSNLSALNMQLSRVHSSCTCTVKFQPKLRRHHHAACRRWLTQNENHMVRE

SEQ ID NO: 211298 - protein, 70 aa, Zea mays
  Clone ID: MRT4577_12429C.1.pep
EDPPPLSEGPRLKNFRGKAKNCCNEIIGWELQPTDGRLVQLPHVPPSQNFLKPADPLPNLLFELIPFFSP

SEQ ID NO: 211299 - protein, 397 aa, Zea mays
  unsure (1)..(397): unsure at all Xaa locations
  Clone ID: MRT4577_1242C.1.pep
MARLGRAGCRSGPARAFFSGIPEDTLRNFMSNVLPAVLILEFLSGTNLIVQTFALEVVAPAMPPFQDLSRPPVQHTRHLATAAPAHVDADPPDAASNSSAAPLGLVQPPVSPHSGCCAPNMVQKRGTRDCHCVYPVRIELFLRNVSLTSNWSNKFLQELASQLNLRVNQFEIVNFYVVGASGLNITMDIAPYTGISFAADQVKAMNYSLTLHTVRIDPVLVGDYNLLNLTWFRSLAPAPAPAFTMAPRASPSTASTFPRQSEGPSNNRHASLITVVIICVGSLIGVLLIVLTICFCTFRKRKKRVPHVETPKQRTADAVSTVESLPRPTSTRFLSYEELKVATNNFEPSSVLGEGGFGRVFKGVLGDGTAVAXKKLTNGGHQGDKEFLVEVEMLSRL

SEQ ID NO: 211300 - protein, 106 aa, Zea mays
  unsure (1)..(106): unsure at all Xaa locations
  Clone ID: MRT4577_124300C.1.pep
PQGXILVGQRGXTDNYYDNHRHGXPNWWYAHAMSLRPGTYKGASSGWCELQXSSSISRPWQPRHEAXAMNQKFGDQSTSTSIYXAVVPPPPRPGANATRAQGFKNT

SEQ ID NO: 211301 - protein, 59 aa, Zea mays
  unsure (1)..(59): unsure at all Xaa locations
  Clone ID: MRT4577_124301C.1.pep
LDPSVFWLGWLKKGLGGTRASGARVSPQPWWRAPPCLXSTATFFVXIGTVXXSSTGALA

SEQ ID NO: 211302 - protein, 53 aa, Zea mays
  Clone ID: MRT4577_124302C.1.pep
LSNDNGQIFYLITSIFLLLPSYYIWGTSVLFVVFLSMTRLSHFRSISKAAPLA

SEQ ID NO: 211303 - protein, 120 aa, Zea mays
  Clone ID: MRT4577_124303C.1.pep
HTSSPSGFTTLLCSFCSAIPHAVALVRSSDKNSPKGAIEFILQLLKVVAALWFTFYLFVICGPVTVLLIFIDYGVIVVLFFFLNPQESCIILIREETAIQNRGGEDPHLHTPTSPKTLQI

SEQ ID NO: 211304 - protein, 98 aa, Zea mays
  unsure (1)..(98): unsure at all Xaa locations
  Clone ID: MRT4577_124304C.1.pep
VLLHLAFPEFTQRIQVADTYKEHDCLLXGPLYNLKQSIVQFQKPLKVYRSRILFLRGGQSVMHCTNFEARDSRHAADLRSGRRLGLSFTPYGTPNVVH

SEQ ID NO: 211305 - protein, 101 aa, Zea mays
  unsure (1)..(101): unsure at all Xaa locations
  Clone ID: MRT4577_124305C.1.pep
MLRLHKLYVQTKDGAANRFAXLWVLTLTLVTLWWILDPIFCXAFALXPVNPLGHAWCHVLLGLNLYHADTLLMVCXSQQRMLLARIPLPVGNLAYVMAQKP

SEQ ID NO: 211306 - protein, 69 aa, Zea mays
  Clone ID: MRT4577_124306C.1.pep
FPPCLHLNSICCLSYRLAHCIRAHDGIGWIGSVNCASSGLSDYYSCRKMQSENSVSSGLGLPPSSRSSY

SEQ ID NO: 211307 - protein, 210 aa, Zea mays
  unsure (1)..(210): unsure at all Xaa locations
  Clone ID: MRT4577_124307C.1.pep
HASGFISCTIPGRKKVGIVGRTGSGKSTFIQALFRIIEPRGGTIQIDNVDILKIGLHDLRGRLSIIPQDPTMFEGTVRGNLDPLNEYPDHRVWEILDKCQLGDIVRQNPKKLDSIVVENGENWSVGQRQLFCLGRVLLKRSNVLVLDEATASVDSSTDAVIQGTIREEFRXCTVLTIAHRIHTVIDSDLILVFSERRIIEYDTPSKLLEN

SEQ ID NO: 211308 - protein, 66 aa, Zea mays
  Clone ID: MRT4577_124308C.1.pep
GGRNAQVLQARHVGLITGAPPPDVSARGCRFLVVPGDPEDGRDEWKALDGSAIDGGRGGATRSPRV

SEQ ID NO: 211309 - protein, 42 aa, Zea mays
  unsure (1)..(42): unsure at all Xaa locations
  Clone ID: MRT4577_124309C.1.pep
PPPASQRSXARGAPPAXSRRRTRGHAXWSGWLRTTPSHQHPR

SEQ ID NO: 211310 - protein, 66 aa, Zea mays
  Clone ID: MRT4577_12430C.1.pep
MQDLSRMSRIIVETKKKKKKKTKKKKKKKKKKKKKKKKKKKKKKRQKKKKKKKKRSLGRNHLKGNF

SEQ ID NO: 211311 - protein, 142 aa, Zea mays
  Clone ID: MRT4577_124310C.1.pep
LAQCQKAIACVDRRIKSFQYLDSVVLEPERLESSRYIPVPLDFMNGNVKFTMSSYKLCDFGIVKHHTQASFCRCSQSIQYLVSAHVRCQYHQGGCSTFNSSRSLKNKYKVINKMLPKSHANKQSMHAPICAGRSMHHTKSDW

SEQ ID NO: 211312 - protein, 38 aa, Zea mays
  Clone ID: MRT4577_124311C.1.pep
NASIPLTYFLGCLSWGAHPAGESLQRANSGRSVKLAGG

SEQ ID NO: 211313 - protein, 211 aa, Zea mays
  Clone ID: MRT4577_124312C.1.pep
MRPASWNMNYEKSLVDILHEHNNPRFRGQNGWIPEGWRSITQMFNEKFPLAQFSKAQIQEKEKELKANYKLIKEARKQSGAGWNDSLGMINALPPIWDRIIKNHPKMKKFQSKPFPLYNQLELLYQGSCATGDLNFTSTQQLAPVQQVSNPQDDAVNEAVSSFRNDDLELDSGLNPCFSNVQRHAVSSTHADLGTNDRTPASSDCREDSHG

SEQ ID NO: 211314 - protein, 109 aa, Zea mays
  Clone ID: MRT4577_124313C.1.pep
GIFEKLGLDGPPGKVFFFRAPPQFEVFLFQGRGFFCFQAQKIPFFYQEKGDYYFATWETPFGGKKNGILWGAKKKKKKTRKKKKLKWKGKERKKSKKGRKKKYSGRDHA

SEQ ID NO: 211315 - protein, 91 aa, Zea mays
  Clone ID: MRT4577_124314C.1.pep
EQVLTKHDNYRRRAHNYLSTVLQRNNDQRRDHELESLMMKHIGSLSVWNCYTLNQYIFLLGVPEPNRKNTPPQALDRGGLPVMNLSLAHKD

SEQ ID NO: 211316 - protein, 256 aa, Zea mays
  unsure (1)..(256): unsure at all Xaa locations
  Clone ID: MRT4577_124315C.1.pep
VQAVWGAIFGRVYLCFGMPEVYRVLFEAFGMDPDDESCQPKLRRQLEDVDYVSVEFEKRQLTWQDVAAYRPPPDALFAHPRLFRACVPPGMHRFRGNIWDFDSRPKVMTTLGYPLPMNDRIPEITEARNIELGLGLQLCFLHPSKHKFEHPRFCYERLEYVGQKIQDLVMAERLLMKHLDAPGRWLAEKHRRTLMNKYCGRYLRDKHLQHYIIYXETVQDRFEHNRRLRNPSTTSVQQALHGLXAYCVYGNPDGRR

SEQ ID NO: 211317 - protein, 127 aa, Zea mays
  unsure (1)..(127): unsure at all Xaa locations
  Clone ID: MRT4577_124316C.1.pep
VDCIIRYFXLSLGRFYXAVGAYHKALTAFKTSXWXNHATVASAFVRITXPYNKSWNLMEPKSYCENALNIYQRPIPRTSLEEIATVLTXXSSIYXTINEHEQALXLLQKALKIYNNFACQHNTISCN

SEQ ID NO: 211318 - protein, 77 aa, Zea mays
  Clone ID: MRT4577_124317C.1.pep
SSDILTALVIRQLLAFGIYTVVHVYVHRQGRCSSAALFSSRFSWAEHLYSSDSHWPISLRSILSHVKRRELRIQRQS

SEQ ID NO: 211319 - protein, 83 aa, Zea mays
  unsure (1)..(83): unsure at all Xaa locations
  Clone ID: MRT4577_124318C.1.pep
CEDXSSSRALFLKLPFCNHXFAVDLSTLVTSCVKRSXCENVRSPGRFSLGELSLPLKAGKQDGYTYITRIKHQVREQPRLKAD

SEQ ID NO: 211320 - protein, 122 aa, Zea mays
  unsure (1)..(122): unsure at all Xaa locations
  Clone ID: MRT4577_124319C.1.pep
RYDSQGILGFVYRLVVPNHRDLRNKILDEDHPCKFSMHPGGTKMYHDIKPLCWWTRLNREIAQCVSASDTSQRIXASHLKSAGASQPLSIPSWKWDDINMDLIVGLPTTFGLMMHFGALRTD

SEQ ID NO: 211321 - protein, 136 aa, Zea mays
  Clone ID: MRT4577_12431C.1.pep
KSHWGSPPGPLSWFGSPRVPGFPKFPSPSGFFCPFCLKFFFFPRVLAWLAPPPLAPGSPACSNSFWASFRPTLFGQGFKSPPFGAPLVKPKWGGLLKFPFACFPFFFSPVKPPVIVFFSLFFGVFGPFSVFLLARL

SEQ ID NO: 211322 - protein, 74 aa, Zea mays
  Clone ID: MRT4577_124320C.1.pep
TFSSSLLYPIISSLLSVSITRAFLIWAWDISISSERMRLCAISLEASQLCVDICQDYRYSVHQLPRYQALQVNI

SEQ ID NO: 211323 - protein, 57 aa, Zea mays
  Clone ID: MRT4577_124321C.1.pep
EQLEGLSVVARQMLPGPVVRRSWQNVSLRMRREISQSVVVSVTRGKKKTGPTMHFPL

SEQ ID NO: 211324 - protein, 206 aa, Zea mays
  Clone ID: MRT4577_124322C.1.pep
MGTATTNGSAEQASAPVPVPALKFLIYGRTGWIGGLLGGLCAARGIPFVYGAGRLENRAQLEADIDAAAPTHVFNAAGVTGRPNVDWCETHRAETIRANVVGTLTLADICRGRGVLLINYATGCIFEYDAGHPLGSGVGFKEEDTPNFVGSFYSKTKAMVEELLKNYENVCTLRVRMPISSDLSNPRNFITKITRYDKVVNIPNSQ

SEQ ID NO: 211325 - protein, 37 aa, Zea mays
  Clone ID: MRT4577_124323C.1.pep
NFAQKVNFRTVDSRTAAMPLLLPGREAAIGQVANGGT

SEQ ID NO: 211326 - protein, 302 aa, Zea mays
  unsure (1)..(302): unsure at all Xaa locations
  Clone ID: MRT4577_124324C.1.pep
MAASTNGSSPPALKFLIYGRTGWIGGLLGKLCTAQGIPFAYGAGRLENRAQLEADIDEVAPTHVFNAAGVTGRPNVDWCETHRVETIRANVCGTLTLADVCRARGLVLINYATGCIFEYDAGHPLGSGVGFKEEDTPNFVGSFYSKTKAMVEELLKNYENVCTLRVRMPISSDLSNPRNFITKITRYDKVVDIPNSMTILDELLPISIEMAKRNLTGIWNFTNPXGVVSHNEIXLEMYRDYIDPGFSWKNFNLEEQAKVIVAPRSNNELDQTKLKREFPELLSIKESLVKYVFEPNCKASKA

SEQ ID NO: 211327 - protein, 110 aa, Zea mays
  Clone ID: MRT4577_124325C.1.pep
KKKKKKETKIKKKKKKKKKKKKKKKKNFVLLAGTTLGGIFGDFPPTGGRSGFLLGGPFWPFVGRVPFPWPGFYTSWPGKTLAFPPLFPLGHIPFFPAGVLARGPAPFAFP

SEQ ID NO: 211328 - protein, 307 aa, Zea mays
  Clone ID: MRT4577_124326C.1.pep
MGTATTNGSAEQASAPVPALKFLIYGRTGWIGGLLGGLCAARGIPFAYGAGRLENRAQLEADIDAAAPTHVFNAAGVTGRPNVDWCETHRAETIRANVVGTLTLADICRGRGVLLINYATGCIFEYDAGHPLGSGVGFKEEDTPNFVGSFYSKTKAMVEELLKNYENVCTLRVRMPISSDLSNPRNFITKITRYDKVVNIPNSMTVLDELLPISIEMAKRNLTGIWNFTNPGVVSHNEILEMYRDYIDPGFSWKNFNLEEQAKVIVAPRSNNELDQTKLKREFPELLSIKESLVKYVFEPNCKASKA

SEQ ID NO: 211329 - protein, 477 aa, Zea mays
  Clone ID: MRT4577_124327C.1.pep
MAHRGHLDGLTGQAPALMRHGSFAAGSLSSRSPLQSSSTLEMLENKLAMQTTEVEKLITENQRLASSHVVLRQDIVDTEKEMQMIRTHLGEVQTETDLQIRDLLERIRLMEVDIHSGNVVNKELHQMHMEAKRLITERQMLTLEIEDVTKELQKLSASGDNKRLPELLSELPRVRKEHHNLRSQFEFEKNTNVKQVEQMRTMEMNLITMTKQAEKLRVDVANAERRAQAAAAQAAAHAAGAQVTASQPGTAQATTVSAAAATDSYAGAYTSYPPAYQQGAQAGAYQQGAQAGVYQQGAQAGAYQQGAQAGAYQQGAQAGAYQQGAQAGAYQQGAQSGAYQQGAQAGAYQQGAQDGAYQQGAQDGAYQQGAQAGAYNYAYDAGTAYAYAGYSGYPVAGYAQSAVPNYSYAAPPQPTSSGAATNAAGGQYGAVGSAGYPTGQVQPSSGTANAAQAPPPPPPPAAPYPPSTYDQTRGAQR

SEQ ID NO: 211330 - protein, 75 aa, Zea mays
  Clone ID: MRT4577_124328C.1.pep
NYVVITTLRIKCSSYQLAPKYRKPRFKHHLRLRSTETWETDSHEQLQKNHNSISVASSSLSSPLASLAAWFCPSS

SEQ ID NO: 211331 - protein, 106 aa, Zea mays
  Clone ID: MRT4577_124329C.1.pep
ALLKAARPPWWSSGWWLPLPSGRGRRGRVSSPPSEPGATREARTQGHRPVCGGPEARARGDWREAGGEAAAAAAAAVAESPSLSAGAARKMKKQRRLWRSRNNPAG

SEQ ID NO: 211332 - protein, 63 aa, Zea mays
  Clone ID: MRT4577_12432C.1.pep
CMSVFASLHLEYVELALGKQFRFQRRRLQHRPNEPANGTDSSALISATLLVQNEEWTLTEMLV

SEQ ID NO: 211333 - protein, 373 aa, Zea mays
  Clone ID: MRT4577_124330C.1.pep
MAHRGHLDGLTAQAPALMRHGSFAAGSLSSHSPLESSSTLEMLENKLAMQTAEVEKLIMENQRLASSHVVLRQDIVDTEKEMQIIRTHLGEVQTETDLHIRDLLERIRLMEADIHSGDAVKKELHQVHMEAKRLITERQMLTLETEDVNKELQKLSASGDSKSLPELLAELDGLRKEHLNLRSQFEFEKNTNIKQVEQMRTMEMNLMTMTKQAEKLRGDVANAERRAQAAVAKATGHAAGAQVTASQPGTAQATAVPAAATDPYAGAYASYPPAYQQGAQAGAYQQGAQAGTYQQGAGTQAGGYQQGAQAGGVPAGSGSPGWGVPAGSPRLGRTNREPKLGRTNREPKLGISTGSPSWDISARKPGWSISLCL

SEQ ID NO: 211334 - protein, 89 aa, Zea mays
  Clone ID: MRT4577_124331C.1.pep
TAAALRPMGCLSSSFPPRPMPPCLIIGSGADSTRLTMYGTPNNTPTWVFNMNSSLSGTCCKKTYSYYFSTHAETTEADGLFKHIMTTGQ

SEQ ID NO: 211335 - protein, 49 aa, Zea mays
  unsure (1)..(49): unsure at all Xaa locations
  Clone ID: MRT4577_124332C.1.pep
RGGGGXIKMTIRXACXXQRSRNVEKNMVPGEFKRITVKVHYLKSASLDG

SEQ ID NO: 211336 - protein, 45 aa, Zea mays
  Clone ID: MRT4577_124333C.1.pep
AGKGGRQVPLPVWKNRKPKVFMPTRTGLGHGSGGYKGIMPGAQTL

SEQ ID NO: 211337 - protein, 59 aa, Zea mays
  Clone ID: MRT4577_124334C.1.pep
LMLYKRICLVSSGDTVGIKTRPYTYHLFHHRRDLCQCSTRYSKASRKSPSSHIFYPGAR

SEQ ID NO: 211338 - protein, 335 aa, Zea mays
  Clone ID: MRT4577_124335C.1.pep
MGNSIYRFLCGLCAPSSSEHGLHGAHPAVAALGRDVLSFQSTSQVPDELSRHVVSSKKAQANWYKKLLVAWKRARPPPKTPEEAAAFVVQTLKNHQKADVEGLLSFYGLPHPNAAAAAAGAPAARPPPKKAQQGAKFELHTLPIDPKSVADGDTVNVYVDAADPREAGSVPREVQKAAAERARARAAKDYQKADALQKVIVDAGYRPVPNARGEEVLAKKYRIRLRGIDAPESAMPYGKEAKEALLKLVQGKSLKVYVYDEDRYGRCVGDIYCDGVFVQEQMLKKGFAWHYTAYDQRPELAKWEKQAQTGRKGLWAASKPQKPWEWRKDKRNGTA

SEQ ID NO: 211339 - protein, 63 aa, Zea mays
  Clone ID: MRT4577_124336C.1.pep
ILTACIYSEEHSHQASQPGTGVREKGFFHLFFSSRVINRAGRSKKGGRSMFGDCQVLSSMAAV

SEQ ID NO: 211340 - protein, 42 aa, Zea mays
  Clone ID: MRT4577_124337C.1.pep
GFHPLALMMGQNIPAMGGLFQYQLPSFRPHPCGVSAALPPYY

SEQ ID NO: 211341 - protein, 38 aa, Zea mays
  Clone ID: MRT4577_124338C.1.pep
GRVGSSSGSQTHRHVTARSRQGEHSNRPAASHLCWIAA

SEQ ID NO: 211342 - protein, 108 aa, Zea mays
  Clone ID: MRT4577_124339C.1.pep
RCCGGWCPPAPSYFFVKQVFQSVKGTVCASFFLSGLWGGPPGVLGARYFLFGCSVGAPFCNACLFGLSLGVWLVCFCWVVAARGARLVGFWGPLPPLGALCFSLIGGW

SEQ ID NO: 211343 - protein, 227 aa, Zea mays
  unsure (1)..(227): unsure at all Xaa locations
  Clone ID: MRT4577_12433C.1.pep
MADVKANAEALVPKFKLDRVLNQDQAGRRISLYGSIDENPALLILERAPFSTSQKYLADVPAQLAQVQNLGANDIYHWYMGRSGAETTKPDDSDFFADLKINLIYPCTEAHVKKYSKQGVRFVTETPEIYMNHIRPYMLSKREQGRLNWVXHIIEGRKEVEDVMYRTKLGEAGDEGFLMLPDLNWDRKTLDALLLLALVERRDIWSLRDLRXEHIPWLQHMKTRLID

SEQ ID NO: 211344 - protein, 73 aa, Zea mays
  Clone ID: MRT4577_124340C.1.pep
IGNAKVFPVTKFLKKDQGIEIRFTNRKIKTLNNCVRKIGTLKRAAPFLFLFFLFFIFFYFFFFLFFFFCFFVF

SEQ ID NO: 211345 - protein, 128 aa, Zea mays
  unsure (1)..(128): unsure at all Xaa locations
  Clone ID: MRT4577_124341C.1.pep
QTPQSPKPPTPFSLSLRRRCALLGTRAPGVYAFVCRLSGRERTACARPATIAASAATPYELQGRLAAAGSAAGAAYGVQAPFSVVXPGSTCFMPLVGAVGRRGHDAEPGCPPCCCFRGCCWRAPRRGF

SEQ ID NO: 211346 - protein, 95 aa, Zea mays
  Clone ID: MRT4577_124342C.1.pep
RVPGRNIIFRVDELSFRRARSFFFFGWYNTPRLYSSTHTPSTYSVHAGWCHTQTRQTCCRIPRYNIHVGYITPTSPVDLTRGVVDHHAGIRGPTP

SEQ ID NO: 211347 - protein, 123 aa, Zea mays
  Clone ID: MRT4577_124343C.1.pep
CSVTFQEGLSKDQQQHGSAVAKDSAKAGVYPLAVAPLELSAIVTSVSLSSSKNCSWRIRSVMSAPCGKAASTLMISIPVQQATHTISADVRDSAPHPAILASSDVAHTTRSSINGSKGCRSSR

SEQ ID NO: 211348 - protein, 105 aa, Zea mays
  Clone ID: MRT4577_124344C.1.pep
KAKRILPKGGPPQFFTKNNVLVYKSNSPKGPVLKHLNGVGGPTVGWHHKLKLYSPNGAYTKRPKLATTHRCILFARLPGFSFEGSPFGEIEPPGVKRSGFPRGGG

SEQ ID NO: 211349 - protein, 99 aa, Zea mays
  Clone ID: MRT4577_124345C.1.pep
FGSSDKHYGWALTDHSPRGMGRRGHGLRGQKQRTKPKTCRSERAQQDRTKSQIGRQPAQRPDQPIEPEGGHQQARRHYSGTRSWAKKHQWHTTQSQNAR

SEQ ID NO: 211350 - protein, 83 aa, Zea mays
  Clone ID: MRT4577_124346C.1.pep
FGLGNQTGPSNFLGGFCAARVKNSIDRFFLWGPFRARVKLKIFYSIGPAPKSSSLGGICFCFLKPDCGFENLGDVFWEGKVGA

SEQ ID NO: 211351 - protein, 42 aa, Zea mays
  Clone ID: MRT4577_124347C.1.pep
HRFRFGSVALREIRKYLKSSELLIRKLPSQRLVRKIAQDSKT

SEQ ID NO: 211352 - protein, 62 aa, Zea mays
  Clone ID: MRT4577_124348C.1.pep
FRVGPQVTAIMGGGAAPLPQFHGDAIRHPMQPLFKHWAGRRPRCSGLQLTSSSLSLSRACKI

SEQ ID NO: 211353 - protein, 151 aa, Zea mays
  Clone ID: MRT4577_124349C.1.pep
MQVLLQLLPLVLSAAAILIAWRATPPAVKARLAALQSGIARARKPIMLVTDFATAHHLLVRGSSAGSFSNRPPSMAPSAVLSGRRYHNINSVPYSQLWRALRSNLTSGVLHPTRLRHYAAARRRALHRLAADLREQQLADDGVEALAAESI

SEQ ID NO: 211354 - protein, 136 aa, Zea mays
  unsure (1)..(136): unsure at all Xaa locations
  Clone ID: MRT4577_12434C.1.pep
VYNVTKFLEDHPGGDDVLLSSTXIKLHTPHIRSLKLVNEGVISNFLLIQNAAKDATDDFEDVGHSSTARAMMDEYLVGEIDAATIPTKVKYTPPKQPHYNQDKTQEFVIKILQFLVPLAILGLAVAVRMYTKSESA

SEQ ID NO: 211355 - protein, 166 aa, Zea mays
  unsure (1)..(166): unsure at all Xaa locations
  Clone ID: MRT4577_124350C.1.pep
HASAHASAHASAFAKIAPACPAMAHPITVRNLFDAITNSTGGRLHFLIYHKYLRILNEAFCSAKRVLGGHRAPALQLSDDEVILDIHGAATTKPVLQHIGTSTWPGRLTLTNHALYFEAIGVDFSYGEAVVYDLARDLKQSVKRESTGPWXAHLFDKAVMYKSSLT

SEQ ID NO: 211356 - protein, 50 aa, Zea mays
  Clone ID: MRT4577_124351C.1.pep
LMIPFIPTAYSSYIYRYVVALYHASARKCLCDRVGVHIHIIIKCRFGLSF

SEQ ID NO: 211357 - protein, 108 aa, Zea mays
  unsure (1)..(108): unsure at all Xaa locations
  Clone ID: MRT4577_124352C.1.pep
HACAHACADAWGLTEVRKNGTCLWLRPDGKTQVTVXYRNXGGTMVPIRVHTVLICTQHDETDTNDEIAADLTEHVIKPVIQKQYLDEQTFYHLNMSGRYVIVGPNGYP

SEQ ID NO: 211358 - protein, 44 aa, Zea mays
  Clone ID: MRT4577_124353C.1.pep
SKRMFSSVRPPSFVSSRSYINKLLLLFGMFDGETLSSWFGVKYW

SEQ ID NO: 211359 - protein, 102 aa, Zea mays
  unsure (1)..(102): unsure at all Xaa locations
  Clone ID: MRT4577_124354C.1.pep
ARILGLRALYLSMNAPVMVELLGLPDXLCVYSRRCXARKLPFAFRRXFPDXLYEGWGVQQLVVDGSWQRHVVAACKPGFPWLWKGVSGAVGLSRPHPFSSTL

SEQ ID NO: 211360 - protein, 874 aa, Zea mays
  unsure (1)..(874): unsure at all Xaa locations
  Clone ID: MRT4577_124355C.1.pep
MEPQLTPGAVAAVSAHADGNGTLQPVLQVVDVRMVNNAKNPSAERFRMVLSDGEHTMQSMLATAENARVRDGSIQKGSIVHLLECTCSTIQSRRIIIVIKLDVLQSECAIIGNPRPYEMRNQPNEQGTNIPANAAQANTGTYSSGXSSVXPAASERAQVANNVPYSGFYXCLMVMASLRPCVQDANHPLLCLCVKLELCISTSLCFRLINPRXVSKKKELSPEPKXAVPSMAGGSGAPGNTYGQPAQSFYQQPPPGHMNRTPVSKNDAYRLVPLAQLNPYLDKWTIKVRVTAKTDLRFYNNARGAGKVFSFDLLDEQRGEIRATCFNTQADQFFNLIEVDKVYLISKGSLKPAQKKFNSLNHEYEISLDSRTSIEVCADDDSNIPRQQYNFRKISEIENIEKDAILDLIGIVTSVGPSVTFIRKDGVETQRRTLELKDMSGRSVQLTLWGKLCVAEGNQLQSLCDSGLNPVLALKGARVTDYSGRSVSSAGSTQLKIDPEIPEAESLRRWYATGGKTAACVSLSVVSMGGTCVRKSIAQIKDENLGQLEKPDFITVKAAISHLIADNFCYPACTIDVNGRMCNKKVTDNGDGTWRCDKCDQSLPNCEYRYVLNGQIQDHSGVTNFTAFEDAAKVMIGHSGHELNNISVEDSERFAEILQAARWQQFLFTLKVKEEIYNDAPQVKCNITKAEKLDPAIESSYLLGVINGLLQDDTGSSSGAQGAMAYNAGISNTGAGRSVPTTNSAYTTNLSGPRYGESANQLAQQESTYTXDHSSVGGTEXQQTCVSCGSSGHNVQNCPAGTYRQQAAASAASSYGSSQPRNGLCFKCNQPGHFANSCPLLAPAPQQQQQQYRSGGAPSGGYGRQQPYVGATNY

SEQ ID NO: 211361 - protein, 69 aa, Zea mays
  Clone ID: MRT4577_124356C.1.pep
SFYCVLGGTGILNECRLCKYMQNCSFYLGETQNPYCSHLWQGTLTVTFMYVRDMTILKDESNDIPTDRT

SEQ ID NO: 211362 - protein, 106 aa, Zea mays
  Clone ID: MRT4577_124357C.1.pep
GRARISCYTVVFIESPSNQTSYTSEERRGHESLDLRHHGSDENIRAADVKERDPMNNAAARACIRLLHLPHQLLHRYLKRPEHLIREPLAPPPTSPPACLTSSPTL

SEQ ID NO: 211363 - protein, 111 aa, Zea mays
  unsure (1)..(111): unsure at all Xaa locations
  Clone ID: MRT4577_124358C.1.pep
ALNVWASFLSDTIVHANPLFTCLCNMKTTVGYHETLSDILDAEDNVNVVEDLNDALMWLDYIQSAXNDDYYEKLKEVDAVCIPIVSAVYQRSGGTPGGDADGGVDDDHDEL

SEQ ID NO: 211364 - protein, 82 aa, Zea mays
  Clone ID: MRT4577_124359C.1.pep
SLPFPSTVGARCSTISRERGRSQLIFSFPSHSISRSSLMKRTFFMLAEVLAPSEVVMQMSVAELYGVGARKEGANGPQPLLV

SEQ ID NO: 211365 - protein, 89 aa, Zea mays
  Clone ID: MRT4577_12435C.1.pep
GRPFFFFFLVIITTSNFTKNLAKNRIVFSRFFFLSVIPGAREPSSFLFFSPFGFGTPRGEEPVNYRLSSLDRPLSLLAGACGVARRNRF

SEQ ID NO: 211366 - protein, 241 aa, Zea mays
  unsure (1)..(241): unsure at all Xaa locations
  Clone ID: MRT4577_124360C.1.pep
MADLVMAPPPAMDLFGEPIEAHPPWFKPDAFLRAGFDADAYVAELRSYVPLDSLAAELRAHLAALRAELVGLINRDYADFVGLSAHLKGVDAAAARMRAPLADLRDKVAAFRAGASAALAALREGLQQRAAATAARELLELLLDTSHVVSKVEKLIKELPTAPSDSSNAEIPINDTGTPNGKAGTGVRETQSILLERIASEMNRLKFYISHAENLPFIENMXEKRIQGATKLLDGNLERCF

SEQ ID NO: 211367 - protein, 109 aa, Zea mays
  Clone ID: MRT4577_124361C.1.pep
MRCAAAALAVALIAVVAGATAPGSPAAGTCARRVAPPFLDAVGSRCPFVRIEPSPPLEVGPPPTRRLSPVAASCCQNRYMSQQELVATRDALFLFFNLPSIYGYIRSAC

SEQ ID NO: 211368 - protein, 739 aa, Zea mays
  Clone ID: MRT4577_124362C.1.pep
MADLATDLFGEPIEAHPPWFKPDAFLRASFDPDAYVAELRSYVPLESLAAELRAHLDALRAELVGLINRDYADFVGLSARLKGVDAAAARMRAPLADLRDKVAAFRAGASAALAALRAGLEQRAAAAAARELLELLLDAFHVVSKVEKLIKELPTAPSDLSNAEVPNSDTGTPNGVAGTGVSETQSILLERIASEMNRLKFYISHAENLPFIENMEKRIQGATKLLDGSLERCFVDGLEHRDAKVIYNCLRAYAAIDNTSSAEELFRTAVVSPLIQKIIPQNYARAVAGTSSDELEDDYQQIKECVQKDCKFILEISSSENSGLHVFDFLGNSILKEVLSTIQKGKPGAFSPGKPKEFLRNYKASLGFLDFLEGYCISKSAVTKFRSEPAYTDFMRQWNVGVYFSLRFQEIAGGLDSTLTNTFSPTGSNEAQQKPLLLKQSIKLLESLDSCWSDEVLVFSHCDKFLRLSLQLISRYTTWLSCGLSARKASDRSPNSPADAEWALSIPIEDFIYIMHDVHAVIGELSESGSFIGHVNQLLGSCPIEVFNLVKQSILQAAEPLKELLPAIINVMIGIIVKKSNEDLKHLKGITATYRMTSKLPVRHSPYVSGILHPLKVFLEGDRIRYLSEDDKTKLCRGSTDKITAIYYDLVSEVVTVARKTESSLQRLRQGAQRRVGASTDASDNIISDTDKICMQLFLDIQEYARNLRAIGIDAREIDSYRALWQCVAPKDKQENIQF

SEQ ID NO: 211369 - protein, 77 aa, Zea mays
  unsure (1)..(77): unsure at all Xaa locations
  Clone ID: MRT4577_124363C.1.pep
QKNRKRLLLTLRESSSSEKECQHKGQQTASRSPQALVLIKKRLNPIKLCPTEETGIEILREISIGINYHXNRKFAHF

SEQ ID NO: 211370 - protein, 97 aa, Zea mays
  Clone ID: MRT4577_124364C.1.pep
MGINYPSNWSLVDSVSLRQVCANLDMARWPSVNGPSAGVKLCAVGDNAEFVLLEIFGTIVFLDITSRQAEKVYELTPEDKELVSGRPLEGDMASCFP

SEQ ID NO: 211371 - protein, 109 aa, Zea mays
  Clone ID: MRT4577_124365C.1.pep
ARKAERAREETEPDSIQCSVQDAHEAEGAVLMKLDVVLLATNSANLTDSDSNDTFFYKKAEHLPTMGLFICDDYDRLQADTNDIVKHHMGTTTLGYILDKVIVVNDDSR

SEQ ID NO: 211372 - protein, 84 aa, Zea mays
  Clone ID: MRT4577_124366C.1.pep
NRKQHNSHDWLIGWGGLGPRGHVDHAELVFGRMEGMTTGCTPPCRIELFLGAGLYQQKPKKTTFPAIQASARRALDMSQKPNTP

SEQ ID NO: 211373 - protein, 104 aa, Zea mays
  Clone ID: MRT4577_124367C.1.pep
LKRSNSCARTFHVIWRWLRSSPCVNIGVQVPFRPLACAARRMPARGVGSLMARPRAHGGDDGRRRRRSSQRPPKAECGSAAAWCGAADGSRLWGWGTGMVVGWG

SEQ ID NO: 211374 - protein, 107 aa, Zea mays
  unsure (1)..(107): unsure at all Xaa locations
  Clone ID: MRT4577_124369C.1.pep
RLQCTGPLLHGRPQRSNSKLQQIDPSLTEITVANPGAXYLQHMLSFNQQIAPNTGGCLQERQQKLNSLAGTNPLGSSLLEQHNIAAYNQLSFVNPALRPPIXGGATF

SEQ ID NO: 211375 - protein, 57 aa, Zea mays
  Clone ID: MRT4577_12436C.1.pep
DGLKFLFPGVLNFWGERNNTTMCNCGRNYHNIIFLLLKKEGSILKTKIFFCIYGKCR

SEQ ID NO: 211376 - protein, 60 aa, Zea mays
  Clone ID: MRT4577_124371C.1.pep
FPQFQKILKILKACNIPGKKKNKPPTSGDEQPFINKMCPLNVLSSQTRDLLFRCKKSLNF

SEQ ID NO: 211377 - protein, 87 aa, Zea mays
  Clone ID: MRT4577_124372C.1.pep
LPLNLLFFTVANACGSCPTPTPPVVPPPSATGATPPPSSSSGKCPLNALKFGAGVNGLGLRTGEARKVPAEPCRNVIKGLADFMAVH

SEQ ID NO: 211378 - protein, 64 aa, Zea mays
  Clone ID: MRT4577_124373C.1.pep
QWCNFKYRARSISLDTRSRRTTPGYEHTTDWGKQIAIIYGSVCQDNTGAADIDPHALSSLIMHT

SEQ ID NO: 211379 - protein, 54 aa, Zea mays
  Clone ID: MRT4577_124374C.1.pep
TRHVPRCPEPYFYLLPPLLRLWFRRRSPASAARPRRAYPAGSPQARLGPQTRTA

SEQ ID NO: 211380 - protein, 53 aa, Zea mays
  Clone ID: MRT4577_124375C.1.pep
GLESFKRAVFFFFFSFFFFFLFYFFVATAFTDTRLSPYPRILEVKLGCTLLAP

SEQ ID NO: 211381 - protein, 121 aa, Zea mays
  unsure (1)..(121): unsure at all Xaa locations
  Clone ID: MRT4577_124376C.1.pep
TATAPNVLNTKRKTAERSRMXSTTQDRVYDTSNTITKNNMGAMPVGKPAQNKSMPGIITETEXFRKSTFQPRTCTXTKVRDIMTEKHTLVTVHANTXVLHAMHFMTENRLRHTTVIDGTPM

SEQ ID NO: 211382 - protein, 46 aa, Zea mays
  Clone ID: MRT4577_124377C.1.pep
LSPEAAGLIQISHVSVATYRYHNQKTEYIMFCYRCYTTYVTTLHDI

SEQ ID NO: 211383 - protein, 91 aa, Zea mays
  Clone ID: MRT4577_124378C.1.pep
ASPLRPRRRVGSRDELIILCRIYDQDRLAFQIPMIHVYRNQPSMAEKDPVQVIRKALAKTLVIYYPFAGRLKERPDHKLMVDCTGEGVLVI

SEQ ID NO: 211384 - protein, 102 aa, Zea mays
  unsure (1)..(102): unsure at all Xaa locations
  Clone ID: MRT4577_124379C.1.pep
ITPHPPKRSCQEVIRGQWGPSPDKVAPGRLPGYGVLPNIIKGGLEWGQGADACVATRMGFYKRYWDMFGFSXGDNLDCYDQSPLGNPILSPPNNPPSYPVDA

SEQ ID NO: 211385 - protein, 47 aa, Zea mays
  Clone ID: MRT4577_12437C.1.pep
LLSTQPQVMTSCIIRKDCIAIIKNSDSWPRTMYQSGLVSTKLVSFAG

SEQ ID NO: 211386 - protein, 78 aa, Zea mays
  Clone ID: MRT4577_124380C.1.pep
DQKLGGWKGSDPVLFLSINVSAQGSGGVFFWTPLAPFLKSNFFGFGGGLVPWFKFKGGFFLLLVCGRAWALFFFSCFV

SEQ ID NO: 211387 - protein, 47 aa, Zea mays
  unsure (1)..(47): unsure at all Xaa locations
  Clone ID: MRT4577_124381C.1.pep
VGVFFFLTLQAPAIIYEHATYVHYILRELATLCAMYVRSQVLWVPGX

SEQ ID NO: 211388 - protein, 47 aa, Zea mays
  Clone ID: MRT4577_124382C.1.pep
DHSFISDWSVPRSLIHAAINNVYANVSEPVNDKLDVEVREQQLLKPA

SEQ ID NO: 211389 - protein, 257 aa, Zea mays
  Clone ID: MRT4577_124383C.1.pep
AAAAGGGGGSGSGVASGLRLALSKVLCGRGMRRVLRLDDLCGGCFSGASACGAREFRRLRRSLGDSGECDPRAIVLPGADGEEEQMGWKADMDVDSSRQLSPVSVLELHSDDDDDESPVHSHWGDEKPSTSGTGSSPPSESFLGPTPTSPCFSYDLQDKFCEMEVDETEEEPAVRTGRSIEEQVSSWEKIAGDISRIPAMMELDLSRSTRQWREPEPEVREVGARIEVLIFDDIRRETVCDMLASHCRLAAAAATSC

SEQ ID NO: 211390 - protein, 47 aa, Zea mays
  unsure (1)..(47): unsure at all Xaa locations
  Clone ID: MRT4577_124384C.1.pep
VSAPGSTAAVIFESKGPPRRVFKPGDSGSVSCXSLHTLRRRTIHCCL

SEQ ID NO: 211391 - protein, 70 aa, Zea mays
  Clone ID: MRT4577_124385C.1.pep
WWRSCITLIGSPQKSSPLKTSWGKQPTVVTKKGRKTTEAAASTLLTIVVVMRVVTTTAAVNNALQGGSHY

SEQ ID NO: 211392 - protein, 188 aa, Zea mays
  Clone ID: MRT4577_124386C.1.pep
MQISGFVTPIGPLSEENHTIDKNLLPLECEGTMECHTRDNDAVGLDARAEGVVCELTDLQNNIQVYDIELTVLGNYTGHGLPLDFLESKTTGGPIKGYPVVVDVLEDCSSVSIHDHLPVARRVGKKRQRRRHDGRWTKRTPLRFPAASTAVRAISTTVQTKKNSNKDPVLEECSLLLALAAKASLLHT

SEQ ID NO: 211393 - protein, 101 aa, Zea mays
  unsure (1)..(101): unsure at all Xaa locations
  Clone ID: MRT4577_124387C.1.pep
VVLMVISGVFATNHKHHWSLTXPKVLLVYMPGVMAFGLNYGPLTWSHQILGPGMGALYSPFXPGASAXLAMNFLGNPIXPGKIFGGTSIILRLLPGTRGPP

SEQ ID NO: 211394 - protein, 123 aa, Zea mays
  Clone ID: MRT4577_124388C.1.pep
AYASALSPKTVLQGVRRRPRWARRGASAFRTTPSAGGGLFSRNWSKLTAGASNKNGYGDHERHAAGPDAPWCYPEYWCSHSSSFDFTCFAVHGHGTRSLTIARGPPTDGRLCLRMTTATRGAR

SEQ ID NO: 211395 - protein, 68 aa, Zea mays
  Clone ID: MRT4577_124389C.1.pep
KKSNTPPNRTLLISIIQWGYHPNRPKNPLHNLTRKNGAAHPTSKQKGLRDMTHPRQPMKKSIVTEQRP

SEQ ID NO: 211396 - protein, 69 aa, Zea mays
  Clone ID: MRT4577_12438C.1.pep
WGVTLHPIHSPIFYPIFTVLAPFYSTAEVEKTQFLPNLFALHNILLSPACLLSNRPSQITLPNCLSCRI

SEQ ID NO: 211397 - protein, 53 aa, Zea mays
  Clone ID: MRT4577_124390C.1.pep
KTPLARRPKWDAKKGGPSQKGGSQTWKRPPKLNQTPGSNQTNEGPKPKPKAKN

SEQ ID NO: 211398 - protein, 71 aa, Zea mays
  Clone ID: MRT4577_124391C.1.pep
GRTGFLTTHRAALFSQKASPGGVFIYILWGPLAESTILPVGEKTSSPSIVKTIVVVRPIAVMSVATIERHM

SEQ ID NO: 211399 - protein, 71 aa, Zea mays
  Clone ID: MRT4577_124392C.1.pep
GLPAGLFRGHQNVGRVAPRQLVQRGRDQDDDVAGFSCLAAVFSFVRKDSPGTFKCQPNLSLEHPSFSDVFC

SEQ ID NO: 211400 - protein, 150 aa, Zea mays
  Clone ID: MRT4577_124393C.1.pep
AVNKSSAGTKKSRKPYVVSRPRERWTADEHGRFLHALLLFGRDWKRVQAFVATKTGTQIRSHAQKHFLRADKKLGLAVPPPDVETVQLPLSPDDLRFAQVYRFVGDVFGCGAMWPVEAQLQRLLGADPVVVDTILRVLANLQDNFPPCSL

SEQ ID NO: 211401 - protein, 195 aa, Zea mays
  Clone ID: MRT4577_124394C.1.pep
MSAAVNKSSAGTKKSRKPYVVSRPRERWTADEHGRFLHALLLFGRDWKRVQAFVATKTGTQIRSHAQKHFLRADKKLGLAVPPPHPRRSAADYGGALAPDVETVQLPLSQDDLRFAQVYRFVGDVFGCGAMWPVEAQLQRLLGADPVVVDTILRVLANLQDKTSLPVACRSTIFCSQLRYGGIGFESCDYKFPAR

SEQ ID NO: 211402 - protein, 64 aa, Zea mays
  Clone ID: MRT4577_124395C.1.pep
SSSYIDNSPSGWWCAIYMHGFISIYVDMEVLYVSEISRCQWRRSVGLYEHVPLLLMSMQITPFL

SEQ ID NO: 211403 - protein, 106 aa, Zea mays
  Clone ID: MRT4577_124396C.1.pep
MLKLMTTYIAKCLVQKHVVDICSQTMDGFILLDQQPLEAFTQQGDPIYVHIYNRPPPPRGLVISSISRSVGSFFHREDLNYNMLRNLIPTIHPYMEPDAWLEFRTG

SEQ ID NO: 211404 - protein, 103 aa, Zea mays
  Clone ID: MRT4577_124397C.1.pep
LMDGISWLLSKLPRSGLDLRLPAVSNGTRSATEMESLYSRYFAAADNSPSYSKIGTGSKNSIYRVPFPFTPYLSPLCFPNYRTRAPVCAPNVSFVARGTRSKE

SEQ ID NO: 211405 - protein, 37 aa, Zea mays
  Clone ID: MRT4577_124398C.1.pep
HSQNHKQGLNSQKGLLCPKETYFSCSYKCGFANQIYI

SEQ ID NO: 211406 - protein, 62 aa, Zea mays
  unsure (1)..(62): unsure at all Xaa locations
  Clone ID: MRT4577_124399C.1.pep
DTHPSRVCLMCSVAFYPSDARLSSYSGVLMSHAAMCCLVVXVQLLGLHSRSYPTMFLLLSCS

SEQ ID NO: 211407 - protein, 54 aa, Zea mays
  Clone ID: MRT4577_12439C.1.pep
SAAPSCGPLVPAPLLLPLSHCCLTCSGAFSVQPFIGGAFIWTSYESCFITKFLS

SEQ ID NO: 211408 - protein, 91 aa, Zea mays
  unsure (1)..(91): unsure at all Xaa locations
  Clone ID: MRT4577_124400C.1.pep
GAYVARQAAKSIVASGLXRRCLVQVSYAIGVPEPLSVFVNSYGTGTIPDKEILKIVKENFDFRPGMISINLDLKKGGNRFIGLRLGVSLWT

SEQ ID NO: 211409 - protein, 90 aa, Zea mays
  Clone ID: MRT4577_124401C.1.pep
LVQVSYAIGVPEPLSVFVDSYGTGTIPDKEILKIVKENFDFRPGMISINLDLKKGGNRFIKTAAYGHFGRDDADFTWEVVKPLKFDKASA

SEQ ID NO: 211410 - protein, 93 aa, Zea mays
  Clone ID: MRT4577_124402C.1.pep
MNLLPPFFRSRLMLIIPGLKSKFSGAIPDKEILKIVKENFDFRPGMIIINLDLKKGGNGRYLKTAAYGHFGRDDPDFTWEVVKPLKAEKPSSA

SEQ ID NO: 211411 - protein, 66 aa, Zea mays
  Clone ID: MRT4577_124403C.1.pep
GQARDPVLGVHRSEGHRDEGIRAPLPYPESVRWQATAAPRFPYPRPPRDQVARLMRRGLVVGPDRS

SEQ ID NO: 211412 - protein, 41 aa, Zea mays
  Clone ID: MRT4577_124404C.1.pep
SEHPFSFSLCTKPTYLKRETGETPSICITHLHSLTKQQQPH

SEQ ID NO: 211413 - protein, 49 aa, Zea mays
  Clone ID: MRT4577_124405C.1.pep
PHQPPRVHSNRSTDSLNPKLSYSPAYISGHTTHVKSQCPTALFHVWYDQ

SEQ ID NO: 211414 - protein, 109 aa, Zea mays
  unsure (1)..(109): unsure at all Xaa locations
  Clone ID: MRT4577_124406C.1.pep
QGQRKENPVRNKNNLNLTRENVPKFKAKLSNICNGILKLLDSHLVPSFTAAESKVFYLKMKGDYHRYLAEFKTGPERKESAESTMMAYKGAQXIARVNLEPTHPIRLGL

SEQ ID NO: 211415 - protein, 65 aa, Zea mays
  Clone ID: MRT4577_124407C.1.pep
KKIENAGQSWLAPGMKKTEVLANWGEKHHWEVRRVTKFTGNTVAKIKGQGHTLLGRGFFWFKTLG

SEQ ID NO: 211416 - protein, 80 aa, Zea mays
  Clone ID: MRT4577_124408C.1.pep
TCDTFEKMWLHLIRLIYYRYKRIGKLKINNRRKQKDVPDSKRSKYISLEYFSRYPPSKLGTPAAVAAPCASATNNQPQSL

SEQ ID NO: 211417 - protein, 71 aa, Zea mays
  unsure (1)..(71): unsure at all Xaa locations
  Clone ID: MRT4577_124409C.1.pep
MTLLGEACSTTQLLDAFFSISLKIGSAPMSLFKGXAGANXILRAIAGAGVLSGYDQLQILFFGKKYGSGGA

SEQ ID NO: 211418 - protein, 217 aa, Zea mays
  unsure (1)..(217): unsure at all Xaa locations
  Clone ID: MRT4577_12440C.1.pep
MDDGDSVVRSVEKAGAGPGDDGSTTPLPETVQIGNSPSYRIDRKLGKGGFGQVYVGRRISSPSVSDRTPGANALEVAIKFEHRTSKGCNYGAPYEWQVYNTLSGIHGVPRVHYKGKLGEYYIMIMDMLGPSLWDVWNNNSHSMPVEMVACIAIEAISILEXMHSKGYVHGDVKPENFXLGPPGTLQEKKLFLVDLGLATRWKDTGTGEHVEYDPEAD

SEQ ID NO: 211419 - protein, 135 aa, Zea mays
  unsure (1)..(135): unsure at all Xaa locations
  Clone ID: MRT4577_124410C.1.pep
LLPEPVFSPEYSAAITFFAKSFAYLGTDLDFARCMYGVKAIGVPVAPPELNIGTVSFCYPEHSMYHILSSSSEVSVVPDAQAAGLPVVVVVSXKGSXREARLMRYRYKRXIRRFDKTIRYTSRKAYTKGRPPTVS

SEQ ID NO: 211420 - protein, 73 aa, Zea mays
  unsure (1)..(73): unsure at all Xaa locations
  Clone ID: MRT4577_124411C.1.pep
KFQIFAHRSALCLLWNCRCLDFTIVTSLLVSHSIENPSPDAPQPLLNYYSYSDQPLSRGQGSGVGXLWRPAAV

SEQ ID NO: 211421 - protein, 48 aa, Zea mays
  Clone ID: MRT4577_124412C.1.pep
FKTACLSNNQPHGRGLCLLMLEPRRLGVRRNRRTMSKNAPWSAGASHA

SEQ ID NO: 211422 - protein, 79 aa, Zea mays
  Clone ID: MRT4577_124413C.1.pep
LKSNLILLSFRAKYKRQSFVFQGVGEISFFLFLRSLFIPLLLYMGGPLVPGLLGIPKKKKKKKKKKKKKKKKKKRAAAL

SEQ ID NO: 211423 - protein, 901 aa, Zea mays
  Clone ID: MRT4577_124414C.1.pep
MGSGTVGLATHHNVCPAPGASGGASGGGYMIGGWNGPPPEPEPPPPEPEPGSGPDPGGLGTTMMGLGGTDPNGVPGPTCGGEFGVVREGWVENSSSSRGARGMALAARQTRSGATGRSQLNLMKASGPGTRVSGSSSPKSSATPIPSLPPLAYTRTPEDAVAATLRAGLDLDCGPFLALYAGSVVAAGKVADADVDVALLNTVTVQMRLGMFDGDPAAGPFGRMGPADVCSREHQDLALDVARTASCSSRTGAAPSTTGTASPRNPRGLCSRPAAPTSRAAGTNPSPRPSRRRAKLKPPSSSRASTRMWRPRAWTGPVSALEILDSRCAIPRRPRSVAMEYHDSTHKLLEQMQQMEDCLTQKIEGRCVGLERRFEERCANFHNHFTARCEELQHAVDNTASHDEERLIALEMARTEMEQLKPDFEKRLTDMTLEITCVNKFLERERRSPAMGEPGICGPYGSTTGRVPAGLQQVDGQFGHRSDQCYRDRESGYANTQTNGQVKGTYLPSFHRCTGFGNDTDCSREIRHSSMGRLPKINFPQFDGSQPQLWKRQCESYFEMYETEPAMWVKVASMHFSGRASRWLQSVEKRLRQFGWEEFCGLIHDRFGREQHESLIRKLFHIRQNGPVSEYVEQFASLVDELAAYESHTDPLYYAMRFVDGLRDEIKTIVMEEAVESSRRRRFEPSASKVWKSGSASAETAWTERLPIQAAVMDKATSDTARHTSVLDRMCYYGAIAEVWELLGSEEITEEVFEPEQQIMMVLSMAAWEVVQGYEQDDSAQQLLSQLAVTSQIANSDFTLKDGVIRYKGRIWLGTNVQLQNKVISALHDSALGGHSGAPVTYRRIKQLFYWKRMKQAIHRFVQTCSICQQAKPDRLKSPGLLSPLPVPPHAWHTVSLDFIE

SEQ ID NO: 211424 - protein, 87 aa, Zea mays
  unsure (1)..(87): unsure at all Xaa locations
  Clone ID: MRT4577_124415C.1.pep
GGRVVPPRVFPGCSGPFWVAVXFCACLFFPLRGGLGCSFSCAGWSRVSLLSCSFRCLVAWPLGLCLFPWVPSLXWCFGCARRLPPRG

SEQ ID NO: 211425 - protein, 101 aa, Zea mays
  Clone ID: MRT4577_124416C.1.pep
MSLKNDKFPASAAFDAIQAAINASDADRKDAIKQGNGVYAFTLKNASGDEASWHIDLKETGKVGTGTGAKPDVTLILSEENFGKLVAGKANAQRLFMGGKL

SEQ ID NO: 211426 - protein, 120 aa, Zea mays
  unsure (1)..(120): unsure at all Xaa locations
  Clone ID: MRT4577_124417C.1.pep
HASAHSYALACGWATTETRAGIIALAEDTLTNLGCATAXASSDMYSSFTDQVIVQLGLWKEXSSDKYETNVYVLPMHIDENDAALQLGKLDAILTNLTKSHDDYISVPIEGTYKXAHYRD

SEQ ID NO: 211427 - protein, 88 aa, Zea mays
  Clone ID: MRT4577_124418C.1.pep
GGGQTVVGRPAPQGEKTQALFNWRDPRGAAIFINLSLVGAVVLYVTPLQVVALVLGLYLLAQPRFRNKKPWGPFKFYKRVPAKSDNLL

SEQ ID NO: 211428 - protein, 76 aa, Zea mays
  Clone ID: MRT4577_124419C.1.pep
VSCCGSGGVLMSLGQGLKFLYWFGGVVHASERCWFGFRGPCLDMGRWLSVVSYSVSVWFAIGGRGVKSSRCVAVFL

SEQ ID NO: 211429 - protein, 56 aa, Zea mays
  Clone ID: MRT4577_12441C.1.pep
PPPDRVPQNAWSREGDSPMPFERGCVLVEPSYFHFGHLTGGIVMKPFIIRPLLQQL

SEQ ID NO: 211430 - protein, 84 aa, Zea mays
  Clone ID: MRT4577_124420C.1.pep
SPMSTGIGNKKQTTHKVALYTFSPEHKKNTLLTACGVGNRKSHWRYGQQKKNANNRQNQRHRSLRLRFSFFFFFFSHSLKPKRT

SEQ ID NO: 211431 - protein, 163 aa, Zea mays
  unsure (1)..(163): unsure at all Xaa locations
  Clone ID: MRT4577_124421C.1.pep
GFNPKKNVGNENATKVSSAFFGPKKKFVGFTKPVYPTERVPVNPPKFPKNCFKCCHGGGPISPFKYIAPKGKLFFKPPPIQLIKEXRGTSPSFRMAPRRHPRLGPWRRMTQSFFPLAPPPMKNESFCICLKPYVFFRGGSISVFPKEVMCVQKTKKLLFCICR

SEQ ID NO: 211432 - protein, 130 aa, Zea mays
  Clone ID: MRT4577_124422C.1.pep
MATRAPPQSSSTGSVTVTIDPSPSSSSSSAPPASAPAPAPAPESVVLRLKRRAKKKVSWKEGTVDNEGLGRKSSKKCCIFHKEVPFDEDCSDDEAPGGGGGGGHRCPRPHGDAGEGTSGCSSSSHDHGHH

SEQ ID NO: 211433 - protein, 89 aa, Zea mays
  Clone ID: MRT4577_124423C.1.pep
CPGSRGCAAATPRMPRTRPQPHQGRTRDTAHRSARDDRLSGVRAGALALAHVHEGHRAEPRVHQPPAWRASLLRDLPPSSGSFYTIYTL

SEQ ID NO: 211434 - protein, 67 aa, Zea mays
  Clone ID: MRT4577_124424C.1.pep
AYPSGNKIELQEGHPAPKMKKDRRFSRYRGDKKPDAGGSFTTLKLKKKAGPFQPFDPEGPKIRSHHA

SEQ ID NO: 211435 - protein, 78 aa, Zea mays
  unsure (1)..(78): unsure at all Xaa locations
  Clone ID: MRT4577_124425C.1.pep
VLFSLSAAAVAXXLXPGSAASSCGXGSSSSSLAPFFLRPLRGXLGPWPPXRLGWGRPPXFSAXGAARPXGXXXLPAWG

SEQ ID NO: 211436 - protein, 74 aa, Zea mays
  Clone ID: MRT4577_124426C.1.pep
KNGNHMINGFHIPTLLRQDYCKNSYLNTMAVTQHAKQTSKLKNKDFLSLTHSPHSAYDWQSVNPLLSLINHQHM

SEQ ID NO: 211437 - protein, 103 aa, Zea mays
  Clone ID: MRT4577_124427C.1.pep
AASSIRMVVLCNAGGELLVKVRVNPVSAESKEEPSIMSSVETVSDCSAPPNVPAFASESDACLVNAPDHYLMLLSLSNQSKHLFTVQNEEEGGRHIMSASAQP

SEQ ID NO: 211438 - protein, 217 aa, Zea mays
  Clone ID: MRT4577_124428C.1.pep
MAGCWAVLLPSALLVWIVCCNWVLIMSVDAGSPYGANMTDLMRHVQFFDEDRDGLLTIPESTKGFIAIGLTPAFALSLATATHAAFGPLTTPPGKLPSINIYVSHIHGAVHPSDSGAYDKKGNFVPKKFERIFQKFSHSEEDALSWLEIEAMLVANRDFLRPLSWPEAETEWQLIHMLGKDRHGYLHKDTLRGLYDGTVFPKMRDHTIDPHARHSDA

SEQ ID NO: 211439 - protein, 123 aa, Zea mays
  Clone ID: MRT4577_124429C.1.pep
LYGGSHLIIHSHKGLHLLNGGALVGAQKTLVFELVPHHDPRAVQVPTAHTMPHRRRDLRPKLQRGLGHPGAGDATKVPQQAVVLQRAYMDVSQNLFPRACVCHPRGGVPTFIDLNLQGPDDPV

SEQ ID NO: 211440 - protein, 111 aa, Zea mays
  unsure (1)..(111): unsure at all Xaa locations
  Clone ID: MRT4577_12442C.1.pep
GLCALGGGLPVGVVSEEETGGAREDHTAVSPVGGQLARDAHVFCGLWVGGXPVCGAGADVWERGGVCDAEGHQGXGALSALRGVEXEPPLFLKSVLWRVSGEIIRVIRVLW

SEQ ID NO: 211441 - protein, 41 aa, Zea mays
  unsure (1)..(41): unsure at all Xaa locations
  Clone ID: MRT4577_124430C.1.pep
IKINKTKYYNNLQWQNXWLHPTSSLCCSYSFLSFRALANIP

SEQ ID NO: 211442 - protein, 51 aa, Zea mays
  unsure (1)..(51): unsure at all Xaa locations
  Clone ID: MRT4577_124431C.1.pep
CMAYRMTRLLECITSLSWAIDTILXCISSDMLCVFSPRLISDVVITMRDLQ

SEQ ID NO: 211443 - protein, 145 aa, Zea mays
  unsure (1)..(145): unsure at all Xaa locations
  Clone ID: MRT4577_124432C.1.pep
LRAFKKNRKKRGHVSAAYGRIVKDRKXHRGXRGNAGGMHHHRILFDXYHPGYFGKVGMRYFHELRNKVYCPAVNIDRLWSMVAAEKAAEGGGDKVPQIDVTQLGYFIVLGKGVLPSKPIVVLAKLISXSATXKIKDAGGAVVLTA

SEQ ID NO: 211444 - protein, 151 aa, Zea mays
  Clone ID: MRT4577_124433C.1.pep
MVGAQEQGLKLLVPRSGVSIYAIRVQMALAMKGLAYDYLPEDPRCKSDLLLASNPVHKTLPVLIHSGRPVCESLIIVEYLDDAFPGNGASILPADPYRRAVARFWAAYVDNKMFPSCIGILNTANQQERADKVEETLAAFGLLEAALAECS

SEQ ID NO: 211445 - protein, 70 aa, Zea mays
  Clone ID: MRT4577_124434C.1.pep
RRLQTNDHHATVADHRSEHGAVLPRSVVTVLHAVERQLLHARHQPVGGDTVLYELPQQDVHQRPARLHRG

SEQ ID NO: 211446 - protein, 98 aa, Zea mays
  Clone ID: MRT4577_124435C.1.pep
WPGGSTASLVTVPGLLSLAPKKPKHAEFQIVLVKFSQKIKHPPSPYLTVGGSMHASQSMFYFPLNFFQLLQTPPLSLPPKMPGKALKGIHEPIKTHLR

SEQ ID NO: 211447 - protein, 113 aa, Zea mays
  Clone ID: MRT4577_124436C.1.pep
RPHVLIVLAAAVAVLAARPASAVCLAAAVADICIKTPTPDLCTRTAGKHANKYKVVDSETVLEMQVDSFKKRVKAARMLVKEEVKTAATPEARKALNLFKTYYLDSADNLGAC

SEQ ID NO: 211448 - protein, 94 aa, Zea mays
  Clone ID: MRT4577_124437C.1.pep
LERAFTVLSCITNPICLSRLHMKGIALIDLVCCPMAVAHLTRYLVSLSTPFSISTSKVNNVMVLIVGVKHSAMLFCLSITCCTQNQISDAMLES

SEQ ID NO: 211449 - protein, 293 aa, Zea mays
  Clone ID: MRT4577_124438C.1.pep
MATTMNVRALCLAVATVFCVLSRQSLAAGEGSKEADRIAALPGQPPDAAVQQYSGYVSLDDKAGKSLFYYFVEATADPATKPLLLWLNGGPGCSSFGIGAFQEIGPFRVDTDGKTLCNFKYAWNTVANVLYLESPVGVGFSYAANTGVYKVMGDNMTADDSLQFLLKWLDRFPEYKGRDFFIAGESYAGHYVPELAASILAANNARPKDMASVNLKGIAIGNAILEFAAEQSALYEYLWQHAFLSDTGHTLIGYAVHNLVYLPFRYCVLFGIHTIIKMALRGSHTKKKKKKAA

SEQ ID NO: 211450 - protein, 451 aa, Zea mays
  Clone ID: MRT4577_124439C.1.pep
MGCAQGKCCLPRHPRRGSAAVGGRGGATLGRAAVPGAGLVLEYAALAVAGLYPDSPARESQDTHLVATRFAGDPDLHLFAVFDGHGAAGASCAGFARDALPRLLLASLAAGPAAAFRDAMLAANAEMHAAPGVDDSMSGTTAVAALVAGGALHVANVGDSRAVAGVWRAGRLVAEDLSWDQTPFRADERARVKACGARVMSVEQVEGMRDPEDVGWTPNEGDPPRVWARDALYPGTAFTRSLGDLAAEAVGVIAEPEVKSVEITPSHLFFVVASDGVFEFLSSQEVVDRVAMYQDPRDACSAIAAESYKLWLEHENRTDDITIIIVHIRDMENAGSDKADYGSIGASIAGQTIQSEIPVFVQPEASNMNRSAATGMRSPSFGSPTERSLSCVAPSPTDPLLIHGRVSDASKPGQSEQRAASQPPVQTWHQIDGVTTELERSMQQSILPTSC

SEQ ID NO: 211451 - protein, 107 aa, Zea mays
  Clone ID: MRT4577_12443C.1.pep
QGGRISRDKLRRAVRSSRSRFSGCRSRQGISYADSAVCGFFVAREVDGLIEFAHNNLGLKIVGLLISHRARRTAVRGWHALAPLELAIVAMYVTITLLGSNKSCLIY

SEQ ID NO: 211452 - protein, 148 aa, Zea mays
  unsure (1)..(148): unsure at all Xaa locations
  Clone ID: MRT4577_124440C.1.pep
AGCRTLVRDEQAGRPALAVRSAGVPERXPIWVLVSTPHSGLFGXLPENSASIPEXLASDPESLRPNVQAEMMHCLWAMLRAEGMSMPELMTKNGALNTPFWYTDEQXRLDPHASRLFMIELILIXWPCGRRWTDMLKPNCLITVPIFC

SEQ ID NO: 211453 - protein, 101 aa, Zea mays
  Clone ID: MRT4577_124441C.1.pep
YLDRHQLRINLYLVKRKQSTNETENNSIPLSPWLDDPTQDQEPRIVGSSRCSTKTRATARDLLLANIASMVRLVAPRWRWVISRPLFVIQLAFCNRMCELM

SEQ ID NO: 211454 - protein, 57 aa, Zea mays
  unsure (1)..(57): unsure at all Xaa locations
  Clone ID: MRT4577_124442C.1.pep
FSPYKXXSSGWSSDSDPTMEEKLKPCRLRGWWAPSRSTGAGAGAADDMPGQAGLEVP

SEQ ID NO: 211455 - protein, 141 aa, Zea mays
  Clone ID: MRT4577_124443C.1.pep
YRVFFSRPPKKNGAPWAPLWFFQAPWVNPAPVVKPFFPFPVWLSPGPFLGGGPFLAGLFSFAPEKTVWSPGGPLSLKGFKKFFLKFFTPFLGGSRGAPFLRFQGGPFFFVFPPRKRDFFFFSPPFFFPIPNDFGPFFFFSP

SEQ ID NO: 211456 - protein, 93 aa, Zea mays
  unsure (1)..(93): unsure at all Xaa locations
  Clone ID: MRT4577_124444C.1.pep
YPFPGGPLGRVFPPLFXPGGSFTPGGLPETPGPFFEPRVKGLKTAPLPLFSMFGFFVQPFVPGKGPLKTLLAPIADPVNKKVWAYPPNLVPGK

SEQ ID NO: 211457 - protein, 94 aa, Zea mays
  unsure (1)..(94): unsure at all Xaa locations
  Clone ID: MRT4577_124445C.1.pep
SRERCAPSFRAAMPAKISRRCWGLRGNAHSLSWGYLALHIGQWXSEPPPPSKGDSVLHRSICHSTENLGRPXXLRAXRPPGXEGRSLPSEMLGS

SEQ ID NO: 211458 - protein, 20 aa, Zea mays
  Clone ID: MRT4577_124446C.1.pep
VPAMRMIAGSSPHLLQLGTS

SEQ ID NO: 211459 - protein, 461 aa, Zea mays
  Clone ID: MRT4577_124447C.1.pep
MNAPCMKNGICSKGYPKDFQEETTIDGNGFTVYRRRNNGRFIDKGGVRFDNRSVVPTNLLLLKRFQAHINVEWCNKSIFIKYLFKYVTKGPDRSKIFLKRVQAGEDVPYNEQTDAKDEIKEYLDTRYICDKDACWRVFGFEIHRHYPAVERMPVHLPNQNYITYTSRSNMAQVLSEAFLRQTMLTEWFVCNSNNPNARDLTYCEFPSKWRWDEKTRSWRPRLARDSKIGRLYYVHPSAGERYYLRMLLLAVKGACSYECLRSFNNTVFPSFKKACQARGLLGDDKEWFDAFDEAASWATGPQLRQLFVTMLLYCQISDERSFFDKIWKLMVDDIEYNIQKAMNCPTYQMADDDLRNELLERLTVLFNKSGGNIHDFNLPQKVHTTQQDLNRLIEEETSYDPEILHNESQSLISQLNIDQLNAFNKIVECVLCDRPGLYFVSGYGGTGKTYLWNAIVAYLRS

SEQ ID NO: 211460 - protein, 96 aa, Zea mays
  Clone ID: MRT4577_124448C.1.pep
TVQPVLVWFSGRETPGSVSFWTSRARAMPPGYYFSCSIWLRSLSVGHWWAVLFCTVFVRSLPVLRCIFFPPWVTVFARLKVIYQGMFINKKDFVRV

SEQ ID NO: 211461 - protein, 75 aa, Zea mays
  Clone ID: MRT4577_124449C.1.pep
LFYNTQQLFHSRQITSAVVQNKQLYKTHSKKKDQGLLTRNLTQEGLPCYGRLHLPPAMLNAKRGRDQREKVSTLW

SEQ ID NO: 211462 - protein, 307 aa, Zea mays
  unsure (1)..(307): unsure at all Xaa locations
  Clone ID: MRT4577_12444C.1.pep
MPAWWPRSKLRSRSKAKPGAGSVSAASSPRKSADLESPSPSPSPTPTPTPRDRKAHSLDFPGAAAARGRPAGAAPGHGSVGYKLPTPVEAVEPVGTLYEVVLAAAAAAAAGDGCSXEESSVCSPGSLDEPHYQHGFRPMDPVAFARERNMTSDSDRILNEDKRFMSCSMPRENQKFFDVPAASVRELHLQSDGPSTSEANCSRGRMISGDLFAPRTRSLSPIPKGHAFAVSNGNSREFGFSPRSPVRKMDGLRSPPHPLPLPPASGACSPLHPASGACSPLHPASGACSPLLPTHSFCSPLLSSPSS

SEQ ID NO: 211463 - protein, 96 aa, Zea mays
  Clone ID: MRT4577_124451C.1.pep
PPPGAGEVPIGPGGSGVQLQNRPWPGVRKLPGAGAGAKPLAPGDYNLGRKIVGQPQRLPLGVSHYESGAIVIFYVPQKKKYWGGVEKMARGVFFLF

SEQ ID NO: 211464 - protein, 186 aa, Zea mays
  unsure (1)..(186): unsure at all Xaa locations
  Clone ID: MRT4577_124452C.1.pep
MASVHKATTLVLMFCLLALGRAEYLKYKDPKQPVAVRIKDLLGRMTLAEKIGQMTQIERENATADALAKYFIGSVLSGGGSVPAPQASAQAWAAMVTEMQKGALSTRLGIPIIYGIDAVHGHNNVYKATIFPHNVGLGATRDPDLVKRIGEATALEVRATGIPYAFAPCIAGCRDPRWGXRCYESY

SEQ ID NO: 211465 - protein, 76 aa, Zea mays
  Clone ID: MRT4577_124453C.1.pep
LRKNKPILSEMLRTCAIGLLAMALCSGGQLVEDVLTLGVPVKLMHFLRIRVLGDASSSQRDANHPQDTKYPRGGAR

SEQ ID NO: 211466 - protein, 191 aa, Zea mays
  unsure (1)..(191): unsure at all Xaa locations
  Clone ID: MRT4577_124454C.1.pep
EEGFHKKQGGARNDGDGAFAHQGESTRPTGQSKRSHRGDSGGQGANTDDAXSEAASKXPGPGTTGDEQTRRREXAAXAGQTAHETTGGGATAPEGFFLATPPPKEQKQTDPPNKGRGPTQQTQKDNYRPAGQAPNQNRAGDPDPGARDPAAAXKTGIRXGKTPQXPKPXGHAGTTGDWRPPANERGAGRLP

SEQ ID NO: 211467 - protein, 51 aa, Zea mays
  Clone ID: MRT4577_124455C.1.pep
SDHLVARSMCWCHSVCDNMLQPGLWCWCCAVCSAWCRWVVVFFFCWPRGGP

SEQ ID NO: 211468 - protein, 89 aa, Zea mays
  Clone ID: MRT4577_124456C.1.pep
MSRLRLNVTVDRAALSEGYPFSVTVLHISPWEIQVGIHFYLVIANKILTNLLKAKLLGKPYTSHEPPPCDIKETDAVGFTYIGGQRRRQ

SEQ ID NO: 211469 - protein, 100 aa, Zea mays
  unsure (1)..(100): unsure at all Xaa locations
  Clone ID: MRT4577_124457C.1.pep
MQIFMKTTTGXTITLLVVAIDTIDNPKGKXIHGTERIGGDHQGLIFGGKHHEVGRTLAVYNIHKESTLHLVLRVKSCMHIFLQTLTWKCITLDGAEYCAI

SEQ ID NO: 211470 - protein, 578 aa, Zea mays
  Clone ID: MRT4577_124458C.1.pep
MRSQFHTSTHLQSQKSRRWPAAKTHVGFRRRRQELGDKATPAGATFMRVPPGSHAYTSAAELNAPLRGKLICCSQVPPATAPSANGDCSDFYAGGVAVYSGLLWSTPCRDLPVLLAQPRSLPVIVTYRPNWEGGQYAGEDEPRFEALLLAMELGAEYVDVEFKVADKFMKYLSGKKPQNCKLIISAYDYKTTPSVHELLNLVAQIRATGADIVKIETTAADIVDTSRMFQVLAHCHEKQVPIIGLVRKEHGFISRIICAKYGGYLTFASLENGKESTTEQPTVADLINKYKIRQIGPDTKVFGIIGNPVSHSKSPIVQNQAFRSVGFDAVFLPFLSDDLVQFLYTFSAPDYAGFSCTMPHKETALRCCDDVDPIARDIGAINTIIRRPDGKLVGYNTDYSGAISAIEDGIRASQPTDSITSPLAGRLFVVIGAGGAGKALAYGAKEKGARVVIANRTFARAQELAHIIGGTALTLSELESYHPEKGMILANATSVGMHPNVDETPLSKHALKSYAVVFDAVFVPRETRLLREAAVCGATVIDGLEMLIRLVMVQFKLFTGGMTAPERLMREAILTKTH

SEQ ID NO: 211471 - protein, 135 aa, Zea mays
  Clone ID: MRT4577_124459C.1.pep
MPTLTKLYSMKEAALHNTPDDCWVVVDGKIYDVTKYLEDHPGGADVLLEATGKDATEEFDDAGHSKSAKELMQDYFVGELDSDPTPEIPEMEVFRKEQDTGFARKLMDDVVQYWSIPAAVIGISAVVAILYARRK

SEQ ID NO: 211472 - protein, 108 aa, Zea mays
  Clone ID: MRT4577_12445C.1.pep
GREGLFQTYSRPRHRCMHTLCSWCHSSFPVSDLTSRRRSARLYHHHSSLPRLTKPTSYNVACVHCADNRTSSRLFRDIRLLHRITVGWDLPLAGCLINHPLGLRAPLC

SEQ ID NO: 211473 - protein, 285 aa, Zea mays
  Clone ID: MRT4577_124460C.1.pep
MATAAAARRHHQHLFLQRRGAQRGRRRGSGIRCSSPAQEFASLAAVFRRRLVVGATPAATAAVAAGFGGVTSFLLGLSPELGRSLRLDVLYPVGGFTRCLDSDNGFEFIYPSSWVGDQTLLYREAKKAELQRSLDPPPLPNGGSPSGPRNISEPVAAFGPPGSNGELNVSVIVSTVPRDFSIETFGSPKDVGEVVLRRIARTRRSPDINATLIDAAVREDAGRVKYYKLEFRVESPSFRRHNVAVCCVRDGRLYTMNAQAPESAWKAVQKEFLAMADSFGLVSDA

SEQ ID NO: 211474 - protein, 68 aa, Zea mays
  unsure (1)..(68): unsure at all Xaa locations
  Clone ID: MRT4577_124461C.1.pep
QHLLGFNQLGGVSPALLGMQXQVVSMYQHAAPNTGTLLQVQQSVPFNQLAVSNPGALCQHPIIGGALF

SEQ ID NO: 211475 - protein, 61 aa, Zea mays
  Clone ID: MRT4577_124462C.1.pep
QCFIWSDSLSGFFLLIRDCVIAALITSLRPVSFNLWSLVCRVRVAPVSKDPTLSAMCREAH

SEQ ID NO: 211476 - protein, 64 aa, Zea mays
  Clone ID: MRT4577_124463C.1.pep
VSRLFGFNLGQLVARQFCLSRDFVPPGLTVQTLPLSWWFPPPGGSPGAGFLKWFPSLNPENSFN

SEQ ID NO: 211477 - protein, 97 aa, Zea mays
  Clone ID: MRT4577_124464C.1.pep
GAGGSREPRGSQLLRPYQAGRHEDTHRHPPHACSQSSTGACRSSTTPGPTTGRCTSSLPERPAWRTSSRSSQRGASLCPSWKMSERIFPACVALHRR

SEQ ID NO: 211478 - protein, 96 aa, Zea mays
  Clone ID: MRT4577_124465C.1.pep
VMHIALARCCCRYHQAHRDAVRLWSRRVSWWREQDFGSRVERVHRNGVGRGEGTGGCERSCLSGGGRRRSARPCRSQSQGNSRARSSLEIIPGRPR

SEQ ID NO: 211479 - protein, 115 aa, Zea mays
  Clone ID: MRT4577_124466C.1.pep
ESSSRRPPFIYNWDFFMFFFFFALHFFAQRNRDSSITHIPIKVWVDKTYDNQILIWGNKTKSISQNAWSHKGTKKFGEPTHSWDKLATDDQRCFTSPLPIQGLFGDIKALVRRGR

SEQ ID NO: 211480 - protein, 40 aa, Zea mays
  Clone ID: MRT4577_124467C.1.pep
LIVAPKTSLRPCSRKCFIFNPTFLNMYLSSFDIVSLIHPR

SEQ ID NO: 211481 - protein, 68 aa, Zea mays
  Clone ID: MRT4577_124468C.1.pep
RHLQVVHILVVLVLRQDVYVDFVTCLSLSSIPANASGEATARNTRMTRILGAIAVICRDGRNFTTPAG

SEQ ID NO: 211482 - protein, 62 aa, Zea mays
  Clone ID: MRT4577_124469C.1.pep
TSPTGEHTHCHPFTAGEPINIFRFHTTDTELGLHYLKKKSSSTPFSDAIIADVDMYKFDPCK

SEQ ID NO: 211483 - protein, 157 aa, Zea mays
  unsure (1)..(157): unsure at all Xaa locations
  Clone ID: MRT4577_12446C.1.pep
ILFLPSXSASFATSLREEEESQDNPFYFNSDNSWNTLFKNQYGHIRVLQRFDQQSKRLQNLEDYRLVEFRSKPETLLLPQQADAELLLVVRSGSAILVLVKPDDRREYFFLTSDNPIFSDHQKIPAGTIFYLVNPDPKEDLRIIQLAMPVNNPQIHD

SEQ ID NO: 211484 - protein, 87 aa, Zea mays
  Clone ID: MRT4577_124470C.1.pep
IFFFAPVHDLASALNNRVGTNLNTGSLTAKWKTVQKNTTRAHRRSPVISRQTTGEKEILGALRETQGGLIGQGRFAWPPPRPGNWSP

SEQ ID NO: 211485 - protein, 47 aa, Zea mays
  Clone ID: MRT4577_124471C.1.pep
MLLLSSRPISKTKHFLAIPLPPRDTRRKSQLLPPLQSDDDQEPSSRE

SEQ ID NO: 211486 - protein, 179 aa, Zea mays
  Clone ID: MRT4577_124472C.1.pep
RVGSKQRAEDPLRESSNKLQKRVTALNRDLPPRDEQFISDYEQLRMQFPDAEQLQAITESVLISFVLQCSSHAPQSEFLLFATRCLCARGHLRWDSLLPSLLNTVSSIEAPMVQGVSVTGGGSVTPSSAITMPNAPNFHQSNPASPLSVMNTIGSPTQSGIDQPVGAYVSPIKAAEFSS

SEQ ID NO: 211487 - protein, 169 aa, Zea mays
  unsure (1)..(169): unsure at all Xaa locations
  Clone ID: MRT4577_124473C.1.pep
MLLLSSPFVSVSPPPPPLSSHGARPALRIEAARQLTGRVVTTKANKTVGVEVVPLPPHPKYKRRERIKKKYQAHDPDNQFKIGDVVELQPSRPISKTKXFLAIPLPPXDTRQSQLLPPLQSDDDQEPSSRLIIDCCLSMASSKLLSIAASQFQMRIHFFYFLFLFDQRL

SEQ ID NO: 211488 - protein, 81 aa, Zea mays
  Clone ID: MRT4577_124474C.1.pep
GRPRCQADPRRFCGSDEQLRVGQPSIPPATTAVGFALAWCRPLTNLSRVAHSLGEGPLSLSHGSKAALLLLCSKGKGEINP

SEQ ID NO: 211489 - protein, 132 aa, Zea mays
  Clone ID: MRT4577_124475C.1.pep
MLLLSSPFVSVSPPPPPLSSHGARPALRIEAARQLTGRVVTTKANKTVGVEVVRLAPHPKYKRRERIKKKYQAHDPDNQFKVGDVVELQPSRPISKTKHFLAIPLPPRDTRRKSQLLPPLQSDDDQEPSSRE

SEQ ID NO: 211490 - protein, 104 aa, Zea mays
  Clone ID: MRT4577_124476C.1.pep
LFFFDIQQQFTTINQILPHSSAVNKEQFFKTKQGHYKISLAIQKMTNPILQTLHKMHQALPILPKKTSLHLTSQISSPPHPKIPLKPLHSDFQPAQKTNNYVNM

SEQ ID NO: 211491 - protein, 101 aa, Zea mays
  unsure (1)..(101): unsure at all Xaa locations
  Clone ID: MRT4577_124477C.1.pep
GPAKGAKGLGKGGPKPPPKVLGATIQGFPNPAIRRLPRRGGVKGIFGFIXEETRGGFKFFLEKVIRDPVPYTENAPPKTVPPMDLVXGLKPQGRPLLGLGG

SEQ ID NO: 211492 - protein, 123 aa, Zea mays
  unsure (1)..(123): unsure at all Xaa locations
  Clone ID: MRT4577_124478C.1.pep
MDASSGDRSSPRSRQLQGPRPPRLAVSKDSHKVRKPXRRAAAAPPAAAAGRAAAAXQYHHQQQQQQARQPVIIYDASPKVIHTKPGDFMALVQRLTGPGSTSQAQFDAAAAAASAWPKQMRGF

SEQ ID NO: 211493 - protein, 165 aa, Zea mays
  Clone ID: MRT4577_124479C.1.pep
ARVPSPPAPPAPFLRPHPAAMVRKKRTGPGESSGETSGAPGQGSSQRPQATQQGARGGGQHQVRGGYPGHGVPPSEHPGGGPPEYQPRGYQGRGVPPLLPGGGPPEPQPRGYQGRGGYQGRGGPPSQHPGGGPSPGSQPRGYQGRGGLRPRGGVPQPYRGGHVGG

SEQ ID NO: 211494 - protein, 182 aa, Zea mays
  Clone ID: MRT4577_124480C.1.pep
ASTGTSAEHGISKVCVWTYNKKEKKIEKSYIIILSRSLHLISTIITNFSSSSTARCIVLPPRPMSLSPHRNGRDPEREDEPNQRLVNQVVKQAAATASTDGPYRVVRRGSSQRSAAGGGGAGAGAARRSSRSVSLAWLVAARLQEEQGEGTDSRGWWLEAGREGPRVGAGDGEAEDGEGGVA

SEQ ID NO: 211495 - protein, 46 aa, Zea mays
  Clone ID: MRT4577_124481C.1.pep
PWRTDLGGRTVGDREYCHAIFTKYFTSRFWSDQRFAGTFVVRRPCY

SEQ ID NO: 211496 - protein, 134 aa, Zea mays
  Clone ID: MRT4577_124482C.1.pep
MPGRHHHHQQQQQLAAVAPKGCVTVRVGLEGEEQRRFAVPLGHLKHPLFGALLEEAEREYGFRHQGALAIPCRVDRFVQVEHLIGQDLRGTSCAQHLVDLDGALASGGGGGGGAHHHHQHHHLHLPRFVGCFRA

SEQ ID NO: 211497 - protein, 85 aa, Zea mays
  Clone ID: MRT4577_124483C.1.pep
YPRSSQIFRHRQQLDASSSHPGPCLSRHRASSRNGRDPEREDEPHQRLVNQVVKQAAATASTDGRTDRVVRRGSSQPRAEFRAYG

SEQ ID NO: 211498 - protein, 129 aa, Zea mays
  Clone ID: MRT4577_124484C.1.pep
MPGKHQQHMTATATAAAAAAAPKGCVTVRVGLEGEEQRRFAVPLGHLKHPLFGALLEEAEREYGFRHQGALAIPCRVDRFVQLERLIGRDLHGACAHHLVDLDGAAVAAAQHQHQHHLHLPRFVGCFRA

SEQ ID NO: 211499 - protein, 88 aa, Zea mays
  unsure (1)..(88): unsure at all Xaa locations
  Clone ID: MRT4577_124485C.1.pep
FLKVAEPKWYQRALVLAVQGVFPKADCLGYLISPKFAHRVVGDLEEEAIPSYTEYPKDLQAGKIENVPAPAIAIDXWLVPQRKLYIRL

SEQ ID NO: 211500 - protein, 45 aa, Zea mays
  Clone ID: MRT4577_124486C.1.pep
HVVGNQEGLSDGYRVVIKDGPSGCPSVSPLPVHLLGGRQMIWPPG

SEQ ID NO: 211501 - protein, 158 aa, Zea mays
  Clone ID: MRT4577_124487C.1.pep
VRPFPLFFFHRASDQPSKQKEQRAPSWCLSCPAGISNHQQQQQLAAVAPKGCVTVRVGLEGEEQRRFAVPLGHLKHPLFGALLEEAEREYGFRRQGALAIPCRVDRFVQVEHLIGQDLHGTSCAQHLVDLDGALASGGAHHHQHHHLHLPRFVGCFRA

SEQ ID NO: 211502 - protein, 103 aa, Zea mays
  Clone ID: MRT4577_124488C.1.pep
MPGKHQQHMTTATAAAAAAAAPKGCVTVRVGLEGEEQRRFAVPLGHLKHPLFGALLEEAEREYGFRHQGALAIPCRVDRFVQLERLIGRDLHGACAHHLVDLD

SEQ ID NO: 211503 - protein, 75 aa, Zea mays
  Clone ID: MRT4577_124489C.1.pep
MSSSYFTSLSAMVLLCLPAGAVASAQLSTTFYSRSCPTALATIKGDVTVDDAQDARMDTFLLRLHFHDCFVQRCH

SEQ ID NO: 211504 - protein, 154 aa, Zea mays
  Clone ID: MRT4577_12448C.1.pep
MGAGAQEDEEEITTVAEGGVGEEEQAAAERTMDGAAYHDHWNTLAGLSDGRRPWAYYPQPNSDNGIAEQQGLPLGAMAVGGVDSESQQRGSLSLFYGNGSGRQRIPGVPPMAPQFTRAHGNINDQFQQTASLFAGSQQSGGMRPLGAVGPSVPP

SEQ ID NO: 211505 - protein, 112 aa, Zea mays
  unsure (1)..(112): unsure at all Xaa locations
  Clone ID: MRT4577_124490C.1.pep
RHGARAAAAAAPKGCVTVRVGLEGEEQRRFAVPLGHLKHPLFGALLEEAEREYGFRHQGALAIPCRVDRFVQLERLIGRDLHXACAHHLVDLDXGAAAAGKXQDQDHLQLAR

SEQ ID NO: 211506 - protein, 125 aa, Zea mays
  Clone ID: MRT4577_124491C.1.pep
MVAFSLKIFYWPEGNPTTASMQEILYWQGHTMSMMYKIVADALRKEGLHERHPQEYLNFYCLGKREVSNEVPTTGNSNENSAVRLSQKFKRFMIYVHSKGMIVDDEYVLIGSANINQRSMDGSRD

SEQ ID NO: 211507 - protein, 63 aa, Zea mays
  Clone ID: MRT4577_124492C.1.pep
QSHQLYISDDAGMESILQNSGGLSTAKLATARCHTVKTCNVMGKTHAVRRSPQSLPPTLRSYY

SEQ ID NO: 211508 - protein, 71 aa, Zea mays
  Clone ID: MRT4577_124493C.1.pep
TVAAFVIGEHQSHRHIHLYVHERYIATTQPGPAGGLESPVAANSGVGSMDVGRHERWRASHRLGQGARLDR

SEQ ID NO: 211509 - protein, 57 aa, Zea mays
  Clone ID: MRT4577_124494C.1.pep
MACSTASLAAMLLAFALMFQACVAGRRRLTALAYVWVGNPASQSTRTLGATGGAWRT

SEQ ID NO: 211510 - protein, 59 aa, Zea mays
  Clone ID: MRT4577_124495C.1.pep
TTIVNKPRRRALSAESSTAGLYWWFCCIKAEAATVTDGCPGFKHCISGQWTASGHNWLP

SEQ ID NO: 211511 - protein, 41 aa, Zea mays
  Clone ID: MRT4577_124496C.1.pep
VRRACGSPKIRALTTTTTFASYNQFCCFKYPCCLSSSPSIF

SEQ ID NO: 211512 - protein, 61 aa, Zea mays
  Clone ID: MRT4577_124497C.1.pep
ACRTASISSSKRNACCRRWGSRSHGRWTSTRTKLDSCPPRRATGRRTSGRTRERTSGRTRE

SEQ ID NO: 211513 - protein, 53 aa, Zea mays
  Clone ID: MRT4577_124498C.1.pep
WVVSRWWCQDGEPSLALQCLCSLLVPHTTSYRPKWNSSGPLLLDSLASSASLS

SEQ ID NO: 211514 - protein, 79 aa, Zea mays
  Clone ID: MRT4577_124499C.1.pep
FWPIHGPRCFLGEKFFPFHFPPFLAGYLIFNPGVPFGGAPPYYFGPPSLFHWCIPLSLFFYISPPGGGFFFFPPVFFFP

SEQ ID NO: 211515 - protein, 97 aa, Zea mays
  unsure (1)..(97): unsure at all Xaa locations
  Clone ID: MRT4577_1244C.1.pep
MFLRSKIQEMILRRRSRSMNSAGAQRGHVPDQAPSSSTGPCDDDSGXGAGGSRSAGARALFASPRLLHSSSLPAGAGAGVAFARSPAGEPEPETGSS

SEQ ID NO: 211516 - protein, 78 aa, Zea mays
  unsure (1)..(78): unsure at all Xaa locations
  Clone ID: MRT4577_124500C.1.pep
TQRVLASWSFSNNDGRPVDKLXGQKYNATLHADGSILGPLTNLHYAGLNLPVWLIPSLVHAIELSTTDSIHFLKQWLT

SEQ ID NO: 211517 - protein, 56 aa, Zea mays
  Clone ID: MRT4577_124501C.1.pep
STTSNICWYLCFGSTFCGVSLNPHLEKGPKTYCLRLDHSIWIHIPGNAVQWMLHAI

SEQ ID NO: 211518 - protein, 115 aa, Zea mays
  unsure (1)..(115): unsure at all Xaa locations
  Clone ID: MRT4577_124502C.1.pep
PKGSTTYRMTQARIRVSSYRDCERKKKQKPIGGGGGGFFNPKNHXXFFPTKKNPKNTNHPFXXFKXNFSSNXXILPPKTLFFNKLXFPKNFPPHLIFSITHTPSKXXSTXPYPLP

SEQ ID NO: 211519 - protein, 75 aa, Zea mays
  Clone ID: MRT4577_124503C.1.pep
VTLRSVHSATKQKTEPLRSRLPNTEQSGSVPRIRNRTAPFYLAPQPNTPKRRQLNTKSDGRSSFGLGRSAASRSD

SEQ ID NO: 211520 - protein, 53 aa, Zea mays
  unsure (1)..(53): unsure at all Xaa locations
  Clone ID: MRT4577_124504C.1.pep
AGAPXXFFFFKRICCFLWQLFSQSVPFLIEDGANHVFSHSPTSYKQGLSTRSK

SEQ ID NO: 211521 - protein, 166 aa, Zea mays
  unsure (1)..(166): unsure at all Xaa locations
  Clone ID: MRT4577_124505C.1.pep
LPTSTPRQAVEGADLPDGRSGGAGARRGVDGGAARDVPRPPGALLRPAGARRHRRAXASRRLXPAGAAGRRLARPGPVPAPARPTTTRQRRGVQPVGPGRSSATRGKRRAPPARGPSCRLVKVKPVARACLWYCKVEMYASSHLFPCISSVGRQMFQVAKFQKKKF

SEQ ID NO: 211522 - protein, 25 aa, Zea mays
  Clone ID: MRT4577_124506C.1.pep
FIMPKTQAFICFSPEIDSNHIRPSL

SEQ ID NO: 211523 - protein, 153 aa, Zea mays
  Clone ID: MRT4577_124507C.1.pep
IKKKKKKKKKKKKKKKLNLKTKTKLRASLCLNPFPLLGGNPLGVDSPGFPFRRASFGPFSPWAQLPFWGVPGISRRRAFQTPAVFNLWGLPVFALFARPFFPCGPIPEGLPPLALPLWAKAVGFWGPLCGGLLGALPAGPPPFFPSLLAGFLG

SEQ ID NO: 211524 - protein, 97 aa, Zea mays
  Clone ID: MRT4577_124508C.1.pep
FPSPPKAWSCCLRRREVVALLATDQRAPPVLDRQSGTQCKKCTLQFREVASLPDSGSSMYCSMTECKASGKQAFSASTCCSQEAADRQFAVASPSTL

SEQ ID NO: 211525 - protein, 41 aa, Zea mays
  Clone ID: MRT4577_124509C.1.pep
WYSDMSTLKKLCQPWVQYVVCRGGRSFKTDQVSAFYNILIR

SEQ ID NO: 211526 - protein, 60 aa, Zea mays
  Clone ID: MRT4577_12450C.1.pep
DRYLPLCAYLGTHYTNVPEPPYPPHCIIGTGEELFGPDLQRSEKAPNVTIKRKTSIDGYN

SEQ ID NO: 211527 - protein, 150 aa, Zea mays
  Clone ID: MRT4577_124510C.1.pep
MEDDSPATKTVKGAVTGLAAGTIWGTIVATWYDVPRVERHVALPGLVRTLKMCGSYGVTFAAVGGLYIGVEQIVQSQRKKRDFVNGAIGAFVSGATVYGYRGKSIKSALIGGSSLAFTSAILDVGGNTTRVDNGKAYHAYTTEKKPEPAH

SEQ ID NO: 211528 - protein, 31 aa, Zea mays
  Clone ID: MRT4577_124511C.1.pep
MARLISLAVAVAVAVLALASGAASQAPGPAS

SEQ ID NO: 211529 - protein, 171 aa, Zea mays
  Clone ID: MRT4577_124512C.1.pep
MSTGTIPIARCAATVNNTACIPGRKRRCCNVTARATATSSSAAGRAPGSTRRDYYTVLSLEQHPAAEDVGAEEIKRAYRRLALRHHPDVCAESTELFLELRRAYETLSDPARRVRYNADLRGAGGTGGEVASPGGVAFARHVWESQLAVLRARSEQRQRARSSQSQPQRPV

SEQ ID NO: 211530 - protein, 342 aa, Zea mays
  Clone ID: MRT4577_124513C.1.pep
GTSRPAGKDLLPIERYRESVELSRSDIKCLDPGVYLSSPVINFYIQYVKRNRLSSEDFRDKFYIFNTYFYGKLEEALCRQDEFSKLRRWWKGVNILNKAYIILPIHGMAHWSLVIICIPAKESISGPIILHLDSLAMHPSTKILNTVEMFNRSWFKPEEASGLRRRIRELLLEEFESAKLDDALPGADASERDDSINDGELKPDASSDSSEMVVEVVGGLGGTDKSNEGIKVVASEEASGESGDAGKSTEGTVAASEEKSIEGINVAEPEDACESIGGIYVAESDEASGEFGEIGKTNKGTKVAVSEGASVSGYTDKNMEDISDSEGAVLDKAPTSSFRRGE

SEQ ID NO: 211531 - protein, 188 aa, Zea mays
  unsure (1)..(188): unsure at all Xaa locations
  Clone ID: MRT4577_124514C.1.pep
MSFTGTQDKCTACDKTVHFIDLLTADGAIYHKTCFKCSHCKGVLSMXQLFKETGSFSKNFTPGDKSSDKGELTRAPSKLSSAFSGTQDKCAACQKTVYPLEKLTLEGESYHKSCFKCSHGGCILTTSSYAALNGVLYYKIHFAQLFMEKGSYNHMNKKSPSQEVLPDVADEEQPPEPAPPQDEKEEDN

SEQ ID NO: 211532 - protein, 160 aa, Zea mays
  Clone ID: MRT4577_124515C.1.pep
GTRGSSQYSIVSRITHAHQNVYTQHTHTPSLFSLLILWQPTRPTIHFSEPSYLHSHYQTMTTLAPLRTSFGPHAQPTATKAVQSLFNTLHHTTYASHKRFLASSYHSTATTGFARPCSILTPASTIRYRQESSSMQLHQQQQQQQQQQRQQSQRRALSLF

SEQ ID NO: 211533 - protein, 87 aa, Zea mays
  Clone ID: MRT4577_124516C.1.pep
MRKQIPPVSCLVLLAAAFALLAKASAASPAQAAVAVNVTGVLSAFPDLSDFTRLLASSPVLAELAGRSSLTLLAVPNGNLPQSPSAF

SEQ ID NO: 211534 - protein, 108 aa, Zea mays
  Clone ID: MRT4577_124517C.1.pep
MSFTGTQDKCTACDKTVHFIDLLTADGAIYHKTCFKCSHGGCILTTSSYAALNGVLYCKIHFAQLFMEKGSYNHMNKKSPSQEVLPDVADEEQPPEPAPPQDEKEEDN

SEQ ID NO: 211535 - protein, 140 aa, Zea mays
  Clone ID: MRT4577_124518C.1.pep
WLGRTLARGNKDHRSGARNKGAPRTGAIQERGRHGELVRKGFRPWMEPSRSKEKEAPCLGTGKMDKQRNAEQGVPVGRGSWSLPCVEEDNVRPKNKKLLRRNILGKGRRKDEDPVIFFLIFLFNFFNKKSRIFWIKKNLA

SEQ ID NO: 211536 - protein, 204 aa, Zea mays
  Clone ID: MRT4577_124519C.1.pep
MSFTGTQDKCTACDKTVHFIDLLTADGAIYHKTCFKCSHCKGVLSMCSYSSMDGVLYCKTHFEQLFKETGSFSKNFTPGGKSSDKGELTRAPSKLSSAFSGTQDKCAACQKTVYPLEKLTLEGESYHKSCFKCSHGGCILTTSSYAALNGVLYCKIHFAQLFMEKGSYNHMNKKSPSQEVLPDVADEEQPPEPAPPQDEKEEDN

SEQ ID NO: 211537 - protein, 656 aa, Zea mays
  Clone ID: MRT4577_12451C.1.pep
FGTRVGYTCETAAYFWLLHVYARWEQFLAACAQNQDKPSFVKDRFPFSEFFSDTPQPIFTGESFEMDMHAAKGCFKHLSTIFQELEECRAFELLKSTVERANYLMTKQAKIVAMTCTHAALKRRDFLQLGFKFDNLLMEESAQILEIETFIPMLLQRQEDGHARLKRCILIGDHHQLPPVVKNMAFQKYSHMDQSLFTRFVRLGVPYIELNAQGRARPSIAELYNWRYRELGDLPYVREQAIFHKANAGFSFEYQLVDVPDYKGKGESAPSPWFYQNEGEAEYIVSVYIYMRLIGYPANKISILTTYNGQKLLIRDVINKRCKPWNIEPPNKVTTVDKFQGQQNDFILLSLVRTRFVGHLRDVRRLIVAMSRARLGLYVFCRRSLFEQCYELQPTFQLLLQRSDKLALNLEECTPFTERPLEETGNIHYITGIEDINHLVKFRLEHLRQVQYMQYYAPPANELPQAAPENIADAIPSENGNAGRALNDGNEDMTREENGGATDTVISNRIEEDSVEAKDDMTQEGDKGEVSGKGHMATEDRKGEAQGGADGKLEEANVMSADKMMEEANATSADKMEEANATSADKMEEADATSSDKMEEADATLPDKMEEADATLPDKMEEADATLPDKMEEANAMSPDKMEEKNSDPKDKMDEE

SEQ ID NO: 211538 - protein, 205 aa, Zea mays
  Clone ID: MRT4577_124520C.1.pep
MSSFTGTQDKCAECDKTVHFIDLLTADGVTYHKTCFKCSHCKGILSMCSYSSMDGVLYCKTHFEQLFKETGSFSKNFTPGGKSSDKGELTRAPSKLSSAFSGTQDKCAACQKTVYPLEKLTLEGESYHKSCFKCSHGGCILTTSSYAALNGVLYCKIHFAQLFMEKGSYSHMMKKSPSQDTLPDMAADEQPPEPAPPQDGEGEDN

SEQ ID NO: 211539 - protein, 54 aa, Zea mays
  Clone ID: MRT4577_124521C.1.pep
QIAGNHLNNKRGSYNSRDDAKPLVHAKYQKGDQTHVDETSKKVLESECTNVETL

SEQ ID NO: 211540 - protein, 90 aa, Zea mays
  Clone ID: MRT4577_124522C.1.pep
PTRPPTLPPTFSFTLRLTHFLVQFTTLPNSPSSPRSNTTPPSHQAIHRRVPNPATQVHTLHSPSIPSPSSFSQFSSIYPSAVLASIAFQN

SEQ ID NO: 211541 - protein, 79 aa, Zea mays
  Clone ID: MRT4577_124523C.1.pep
EEVQNRDRVAEVTNEADELNNINKSNNNYLRKTSQLQAQIEMPLLNIKLITKLLDCQISLRIFQKLVTFLLRCLAKNKG

SEQ ID NO: 211542 - protein, 236 aa, Zea mays
  Clone ID: MRT4577_124524C.1.pep
MLVLFETPAGFALFKVLDEGKLSKVEDLWQDFASSDKARKVVELKAFNKFENTSDALSAATLLIDSKPSKGLRKFLQKHCDGETLAVADSKLGNAIKEKLKIDCLHNSAVMELMRGLRNQLTELMSGPAEHDLGPMSLGLSHSLSRYKLKFSPEKVDTMIIQAIGLLNDLDKELNTYAMRVREWYGWHFPELTKIVADNIHYAKAVKMMGNRVNAVNLDFSEILPEDVEAELKEAA

SEQ ID NO: 211543 - protein, 86 aa, Zea mays
  Clone ID: MRT4577_124525C.1.pep
WKVFKVNTKRSATVQRTVGALACWCNDDTRGMVPNLQSPKQAAHHQCYNVMCAKLPHNYSYLAKAELYSHHRLAQELFMQYLGRME

SEQ ID NO: 211544 - protein, 205 aa, Zea mays
  unsure (1)..(205): unsure at all Xaa locations
  Clone ID: MRT4577_124526C.1.pep
MLVLFETPAGFALFKVLDEGKLSSVEDLWKDFASSDKARKVVELKAFNKFENTSDALSAATLLIDSKPSKGLRKFLQKHCDGETLAVADSKLGNAIKEKLQIDCLHNSAVMELMRGLRNQLTELMSGLAEHDLGPVSLGLSHSLSRYKLKFSPEKVDTMIIQAIGLXLDDLDKELNTYAMRVREXWYGWHFPELTKIVADNIHYA

SEQ ID NO: 211545 - protein, 81 aa, Zea mays
  unsure (1)..(81): unsure at all Xaa locations
  Clone ID: MRT4577_124527C.1.pep
MRECISIQSAGRIQVGNARWSXDCLXHGMXXDGQMPGDKTIXGGEEAFNTFFSETGAGKHVPRAVLGDLEPTGIYEARTGG

SEQ ID NO: 211546 - protein, 453 aa, Zea mays
  Clone ID: MRT4577_124528C.1.pep
MGHAPANGKRSPPPPPLGRCHFWLPNKRRHCANSPLPSSQYCGNHLPESAPGAGRRVPCPVDPSHTVLEENLEAHVGKCPLKKQVAALTAQPYYSKGINSGTPEAGCGVTSAEKRAAVYRLTEEEFRLLLGKIRSVHAAVAAPIRESNLITAACDKWMSGQVDRKMPYQERHVAQQASIVGNMEAFGLLQKASHEVVDGENAAVSAQAVVEFGAGRGYLTQVLVDCYGIRNVFLVERRSYKLKADRSLRQNEDVTLERLRIDIEDLKLHGIEALRGLQYLAIGKHLCGPATDMTMMCCLPERYDQTEENGKRSLQGLALATCCHHLCQWKHYTNKSFLSGLGITEEDFHAMTWFSSWAVDGDHSYPDAPVEVEDTPSEVRGREKLDQEAVGIERVIRSIPAGERATLGSMCKDIIDTGRLLWLGQKGLVADLVSYVPSSISPENRLLIAKCTS

SEQ ID NO: 211547 - protein, 89 aa, Zea mays
  unsure (1)..(89): unsure at all Xaa locations
  Clone ID: MRT4577_124529C.1.pep
MAGRMVYPDHLRHLDTARRQLRAVISIIGXAPIMLRIAWQETGTXNLSTRIGGTHGSIRYDEEYTHGSXSSLXIANDIREPITVQNPHI

SEQ ID NO: 211548 - protein, 49 aa, Zea mays
  Clone ID: MRT4577_12452C.1.pep
KQSGINYPILLGKHMPILSLDQKKNFGGTNKPQKCEGAIGSTTKLLIQH

SEQ ID NO: 211549 - protein, 145 aa, Zea mays
  Clone ID: MRT4577_124530C.1.pep
WVCHNWPPMWGNLPMNRSSPSGLGLPVGFLLENARPPLRWGGPPRGFVCNLSLNHSPKNFPFFFPCPPKFLVHQVPSFLVFWAVWKKGPPVALLFFWQNFDFFGWPPFKGGFGFLGGGNPPNFQKKVLKFGFPGEAPDPFWVPLG

SEQ ID NO: 211550 - protein, 120 aa, Zea mays
  Clone ID: MRT4577_124531C.1.pep
PEQLASALWWFMSPLKHIGVPVPEIILTLLLSLRFINLVFDEVRNSALAIVARRISWKKLTAMETIDIFFSYVQRIFKNIFDHAEQISKAMVARGFRGNPINHKIYFLTESSFGIADFFS

SEQ ID NO: 211551 - protein, 172 aa, Zea mays
  Clone ID: MRT4577_124532C.1.pep
LPVPVATGPAAAAAWETGTSRTTLPLFPVRTAGTAEITRPEEGKATLTIFYQGQVSTFHHFPADRAKVLMQMASSVTGNTPEKGVAVATAVPKKAQTSDDQPSPAGAGMPPIARKLTLQNFLRKRKNRIAGTDDADRNEDASPWKKRDSAAGAGGTPAGDVPDDASWLALRL

SEQ ID NO: 211552 - protein, 43 aa, Zea mays
  Clone ID: MRT4577_124533C.1.pep
PRNNTIPINMYHHIATDCDTGTALMNQEYNLKRAKTKDNYLPC

SEQ ID NO: 211553 - protein, 62 aa, Zea mays
  Clone ID: MRT4577_124534C.1.pep
SLANKVGVTIGPKRVKILPVTLLARPYYLMLVFSICFPMLPCHNPPVFLIKRKKNKKRGRAL

SEQ ID NO: 211554 - protein, 142 aa, Zea mays
  unsure (1)..(142): unsure at all Xaa locations
  Clone ID: MRT4577_124535C.1.pep
KTKKKSPRLKPKPEKKPTGGNPPRKKTGGNPKSPFGPRGGTPLGGXPKHGGPFLGXEPGXPGGNXGEKGFPGEKGXSGPNPPQKTRREEKRENPGGPKGGPNXTNNGGGPTARFPGGKPGGPSDLKNSATRAGKGRWRKGGF

SEQ ID NO: 211555 - protein, 116 aa, Zea mays
  unsure (1)..(116): unsure at all Xaa locations
  Clone ID: MRT4577_124536C.1.pep
VPYCARGLRHGAQRGIRLMHLSDVRDXAHYGSHDRSALGRTYAVYLDRRLEIYLPERKHVLNAGRIASRANGPSPLDRDRWCSSGAYGRRSRYYSSPLGYRGYDDYCEWNDENKDD

SEQ ID NO: 211556 - protein, 108 aa, Zea mays
  Clone ID: MRT4577_124537C.1.pep
CLLCSRFRFVLSPHPTASLIYLAKRCGWASSEELEKIEHIEVCPKAMELTEQIADRISSDGGGALIIDYGKNGIVSDSLQVWILNQFIHCAKSKFKRLPVWYYWYIYS

SEQ ID NO: 211557 - protein, 187 aa, Zea mays
  unsure (1)..(187): unsure at all Xaa locations
  Clone ID: MRT4577_124538C.1.pep
MPSRRRALLKVIILAYRVYANTSLMNQYVNKKFSNQYKATIGAYFLFNDAHIXDRLFTLQICYTAGHXRIHSLAVAFYRRANCXVLVYDVXSMKSFDNLNNWREDFLIHATPSDPDNFPFDLLGNKTDVDGENIRVPSEKYAKAWCACKGNIPYFDTSAKDTTYVQDDFQCIVKNALKNDSEEQLYV

SEQ ID NO: 211558 - protein, 84 aa, Zea mays
  Clone ID: MRT4577_124539C.1.pep
KISLYSNYLHTPPFYYQTIKQSTKSHHSTYTQAFLYNILYKLNKIFISTIYNLYFTFIQTIYTYFESIFPLPPPHVLLSILYKE

SEQ ID NO: 211559 - protein, 116 aa, Zea mays
  unsure (1)..(116): unsure at all Xaa locations
  Clone ID: MRT4577_12453C.1.pep
MYIGKDWFTPTSIELRVVNAETSFTGLINTYGVHTDRTYYELFILSADLNTFCECIXRLLTLVKTNMAWITISIALFEDPVGQKCYLLLRCKCFGGIDYNNLQFYGYRYSTELDMY

SEQ ID NO: 211560 - protein, 47 aa, Zea mays
  Clone ID: MRT4577_124540C.1.pep
GKKGPGGISIQKTGRALIFGFFFKPISPGQYNMVVERPGDSLVEQGF

SEQ ID NO: 211561 - protein, 107 aa, Zea mays
  Clone ID: MRT4577_124541C.1.pep
PKKNFPKVCLSHQNPVVAFQKPNHDRLLPLAAFGLTLAIMALVFKKFLKINGLGGFLEGKFLERIVHKLHVKNDPFPILICYKLNTPVKFVKNCLVIINEIKMVGFY

SEQ ID NO: 211562 - protein, 100 aa, Zea mays
  unsure (1)..(100): unsure at all Xaa locations
  Clone ID: MRT4577_124542C.1.pep
MCAYIDDHARLHDIPTKSGVEPNFTKPGIAAQSFIVGSPIAMAIRAALVPLTKPLNIXPSKLLSXEYILEYRRHXLDMHVGASEPGERALKVDDLIATAG

SEQ ID NO: 211563 - protein, 219 aa, Zea mays
  unsure (1)..(219): unsure at all Xaa locations
  Clone ID: MRT4577_124543C.1.pep
DQYVFSVTIAPGLLATILKRIINKRTVQEAMINRRWISYIKGALTMGALVDYLYLWDSLSSLCLQPNREDRHIFTRASDGKYSAKAAYNGLFLGSSSFGHHKRXWRTWAPPNXRLFMWLVAHNKCWTADRLAKRGMNHPAXCPLCDQHPESINHLLVSYVFTRVFWYTMLRRFGLHSLAPQPDATSFLDWWEISSDIVPRMIKKGLNSLIILXAWDGLG

SEQ ID NO: 211564 - protein, 161 aa, Zea mays
  unsure (1)..(161): unsure at all Xaa locations
  Clone ID: MRT4577_124544C.1.pep
MIKRTSTRKKLVPAAKKISAAASTAPSSSTSCCGAVSVSIESSKSELLIYLDESNVSINEKHFDLLNYXKVNSHRFPMVSSMAKRFLDVPASSVSSESTFSTRGRILDDYRSSLKPATIQALVCASSWIRGSRSSPILLTGEGDDGDIESVEFPKCVVASN

SEQ ID NO: 211565 - protein, 135 aa, Zea mays
  Clone ID: MRT4577_124545C.1.pep
RKKGAMSPPSWARKKGYPISPGPGSPLPFSFGAKGEPGFFPPSGDSPERKPQKKWGGGGIPKAKGEKKGKKPLTYNNTGPTPFFFFGGVAPPPRKGPRNFFHTTQAPPKGGAPPPRGGGGGTRGGFYPILQLRGG

SEQ ID NO: 211566 - protein, 98 aa, Zea mays
  unsure (1)..(98): unsure at all Xaa locations
  Clone ID: MRT4577_124546C.1.pep
PTRAPEHATAVDPKNGSLSAIVSIGIGFIQGANIMVGGSFYGAFINRCLSFCRDVVRWEWGYQWAYCFGPLIGGXLDDVIYQLLLICHTHEQHPCSDY

SEQ ID NO: 211567 - protein, 285 aa, Zea mays
  unsure (1)..(285): unsure at all Xaa locations
  Clone ID: MRT4577_124547C.1.pep
RGCSCRHRSRAAGGGAVVRVTSGGTTVPLEQRCVRYIDNFSSGQRGAASTEYFLKAGYAVIFIHRRGSKHPYCRFLPEDSFLDLFELGEDSEIQVPQSHSSVVKAAISNYRKAIDECLLLKLPFTTIFXEYLQLLQMVATSMNCLGHRGMFYLAAAVSDFYVPWESMAKHKIESAGGPLNMQLNQVPKMLFVLRKNWAPAAFCVSFKLETDPNILLQKAEMALKKYGMNVVVANELANYKDVVVMVTSNGGRTTVSRRSKAEDLEAQLTDLLVKMHSEHIAQPNS

SEQ ID NO: 211568 - protein, 49 aa, Zea mays
  Clone ID: MRT4577_124548C.1.pep
AKHALNLFIRNAYLIDRALQAVRARTRPTLTCCSRHYSRTTPRRLGRWK

SEQ ID NO: 211569 - protein, 89 aa, Zea mays
  Clone ID: MRT4577_124549C.1.pep
SRVLMGFFPIHSCSFQLRAPWLTIRWEYVVLLSCISRVLRIVPLFFFTVTSLFLCRFLLAIAPVFIPKCKRHPVSYICIHFSWVQRKKS

SEQ ID NO: 211570 - protein, 63 aa, Zea mays
  unsure (1)..(63): unsure at all Xaa locations
  Clone ID: MRT4577_12454C.1.pep
MWIGARIEAGRPRRALCAPVQVSYDEHIQDRERVLRAMFPEHRMXQRVGDGEWRVHILPLQFL

SEQ ID NO: 211571 - protein, 108 aa, Zea mays
  Clone ID: MRT4577_124550C.1.pep
HLAVARRDLNLHRRRTTRAETPDDEGCEVASRGVERRWKARAPCHIIHRGGVVHPPRVLPAQQRQKRRLLAALPSRPCVRRRRALLVRRVRRCREAAVPAAAQEQAPT

SEQ ID NO: 211572 - protein, 229 aa, Zea mays
  unsure (1)..(229): unsure at all Xaa locations
  Clone ID: MRT4577_124551C.1.pep
MSTTTTTTNQPITAASMLRLFPDIDTSSAPLSGHDEEQIRLMDEVCIVLDEDDKPIGTASKKICHLMTNIDKGLLHRAFSVFLFNDKNELLLQQRATEKITFPDMWTNTCCSHPLHIPTETGSTLEXSIAGVKRAAQRKLEHELGIKKEQVPLXEDFHFLTRIHYKAPSDGMWGEHEIDYILFIKANVDLXLNKNEVRDTPYVTPESLXQQFDIPXLGFTPWFKLICKL

SEQ ID NO: 211573 - protein, 68 aa, Zea mays
  Clone ID: MRT4577_124552C.1.pep
YAPGAIKPLARHGRLSILDEESTTHSSRGGDPQLGPKQKQKFWCTLHLQHYSPLNKAPLAQAPAYGYP

SEQ ID NO: 211574 - protein, 111 aa, Zea mays
  Clone ID: MRT4577_124553C.1.pep
SGVRIALFLGGFDTAQAAARFIDFFFLARICSIFSSYLIYLYIYESICRAYDQAAIKFRGVNADINFTLDDYKDEMKKVIPPLLQLRIERPTPVEEGAHTHRHEWSVNRTN

SEQ ID NO: 211575 - protein, 46 aa, Zea mays
  Clone ID: MRT4577_124554C.1.pep
RNDVRGRSATCLMYLKSPEGFTCFSRGYGEANSGLWLLKCWFYIWI

SEQ ID NO: 211576 - protein, 76 aa, Zea mays
  Clone ID: MRT4577_124555C.1.pep
MGFEPYQGTAAGPDNTMWRVIVCLSILSITIFLPIGYFRAVHREEGVKPKLPGQYNGHVVSGGTCCSCGGLESEPG

SEQ ID NO: 211577 - protein, 65 aa, Zea mays
  Clone ID: MRT4577_124556C.1.pep
RGAPCAEGDKDEELKGEEGEQEEHDEPRATGSPLWMLGANQCHEGGDGGESIQSLTRGSGIARQR

SEQ ID NO: 211578 - protein, 96 aa, Zea mays
  unsure (1)..(96): unsure at all Xaa locations
  Clone ID: MRT4577_124557C.1.pep
LPHVRXHNPXSTNGYNIXLADSGTEQLHFIALSERRGDPNYQHNVXNIIKQXLNKXYPSDSLLLIYINPHSXGTASYSSITFCAMSHSFYQNLLNV

SEQ ID NO: 211579 - protein, 116 aa, Zea mays
  Clone ID: MRT4577_124558C.1.pep
MAALDTFLFTSESVNEGHPDKLCDQVSDAVLDACLAEDPDSKVACETCTKTNMVMVFGEITTKANVDYEKIVRETCRNIGAGDQGHMFGYATDETPELMPLSHVLATKLGARLTEV

SEQ ID NO: 211580 - protein, 51 aa, Zea mays
  Clone ID: MRT4577_124559C.1.pep
SRTLMYRTRVRLELIMPIVWRRFLGGRTLRRYVAGEYGRVRKPKFFGRIRR

SEQ ID NO: 211581 - protein, 216 aa, Zea mays
  unsure (1)..(216): unsure at all Xaa locations
  Clone ID: MRT4577_12455C.1.pep
SNAISKLVTPPRHSSSILSFGSEFFSSILSGDMAFASSILSGNVTFVSSIFSGNVASTSSILSDVVASASSILSADVASASSILSADVAFASSILSADMAFASSILSADVTFASSIILSADITFASSSLPSAPXLVLPLSAPADAWDPCHSLHSCPLPVSXSSFASTLSSSILLLITVSVVPPFSSRVMPSFPSFRALPALPFSEGIASAIFSGAA

SEQ ID NO: 211582 - protein, 117 aa, Zea mays
  Clone ID: MRT4577_124560C.1.pep
FHLNPSGRFVIGGPHGDAGLTGRKIIVQVSYAIGVPEPLSVFVDTYGTGAIPDKEILKIVKENFDFRPGMIIINLDLKKGGNGRYLKTAAYGHFGRDDPDFTWEVVKPLKAEKPSSA

SEQ ID NO: 211583 - protein, 151 aa, Zea mays
  Clone ID: MRT4577_124561C.1.pep
DETRRSPLCLTGTCFTPSHPTDSTRAFSGKDPTKVDRSGAYVARQAAKSIVAAGLARRAIVQVFYAIGVPEPLSVFVDTDGTGAIPDMEILKIVKENSDFRPGMIIINLDLKKGGNGRYLKTAAYGHFGRDDPDFTCEAVKPLKAEKPSSA

SEQ ID NO: 211584 - protein, 390 aa, Zea mays
  unsure (1)..(390): unsure at all Xaa locations
  Clone ID: MRT4577_124562C.1.pep
MAVDTFLFTSESVNEGHPDKLCDQVSDAVLDACLAEDPDSKVACETCTKTNMVMVFGEITTKATVDYEKIVRETCRNIGFVSNDVGLDADHCKVLVNIEQQSPDIAQGVHGHFTKRPEEIGAGDQGHMFGYATDETPELMPLSHVLATKLGARLTEVRKNGTCPWLRPDGKTQVTVEYRNEGGAMVPIRVHTVLISTQHDETVTNDEIAADLKEHVIKPVIPEQYLDEKTIFHLNPSGRFVIGGPHGDAGLTGRNNDTYGGWGAHGGGAFSGKDPTKVDRSGAYVAKAGRKSIVAXXXXXXXXXQVSYAIGVPEPLSVFVNSYGTGTIPDKEILKIVKENFDFRPGMISINLDLKKGGNRFIKTAAYGHFGRDDADFTWEVVKPLKKASA

SEQ ID NO: 211585 - protein, 83 aa, Zea mays
  Clone ID: MRT4577_124563C.1.pep
NTFPPSVGYPVIVLGFVNIFKGMSFLGLEQRWRSAFFPPVWLLFFPPSALEAFTWGFFFRRRKADGKTFNRAPNGHLPHSVSV

SEQ ID NO: 211586 - protein, 398 aa, Zea mays
  unsure (1)..(398): unsure at all Xaa locations
  Clone ID: MRT4577_124564C.1.pep
MAGLDTFLFTSESVNEGHPDKLCDQVSDAVLDACLAEDPDSKVACETRTKTNMVMVFGEITTKANVDYEKIVRETCRNIGFVSNDVGLDADHCKVLVNIEQQSPDIAQGVHGHFTKRPEEIGAGDQGHMFGYATDETPELMPLSHVLATKLGARLTEVRKNGTCPWLRPXDGKTQVTVEYRNEGGAMVPIRVHTVLISTQHDETVTNDEIAADLKEHVIKPVIPEQYLDEKTIFHLNPSGRFVIGGPHGDAGLTGRKIIIDTYGGWGAHGGGAFSGKDPTKVDRSGAYVARQAAKSIVAAGLARRAIVQVSYAIGVPEPLSVFVDTYGTGAIPDKEILKIVKENFDFRPGMIIINLDLKKGGNGRYLKTAAYGHFGRDDPDFTWEVVKPLKAEKPSSA

SEQ ID NO: 211587 - protein, 398 aa, Zea mays
  unsure (1)..(398): unsure at all Xaa locations
  Clone ID: MRT4577_124565C.1.pep
MAGLDTFLFTSESVNEGHPDKLCDQVSDAVLDACLAEDPDSKVACETCTKTNMVMVFGEITTKANVDYEKIVRETCRNIGFVSNDVGLDADHCKVLVNIEQQSPDIAQGVHGHFTKRPEEIGAGDQGHMFGYATDETPELMPLSHVLATKLGARLTEVRKNGTCPWLRPDGKTQVTVEYRNEGGAMVPIRVHTVLISTQHDETVTNDEIAADLKEHVIKPVIPEQYLDEKTIFHLNPSGRFVIGGPHGDAGLTGRXKIIIDTYGGWGAHGGGAFSGKDPTKVDRSGAYVARQAAKSIVAAGLARRAIVQVSYAIGVPEPLSVFVDTYGTGAIPDKEILKIVKENFDFRPGMIIINLDLKKGGNGRYLKTAAYGHFGRDDPDFTWEVVKPLKAEKPSSA

SEQ ID NO: 211588 - protein, 396 aa, Zea mays
  Clone ID: MRT4577_124566C.1.pep
MAAVDTFLFTSESVNEGHPDKLCDQVSDAVLDACLAEDPDSKVACETCTKTNMVMVFGEITTKANVDYEKIVRETCRNIGFVSNDVGLDADHCKVLVNIEQQSPDIAQGVHGHFTKRPEEIGAGDQGHMFGYATDETPELMPLSHVLATKLGARLTEVRKNGTCPWLRPDGKTQVTVEYRNEGGAMVPIRVHTVLISTQHDETVTNDEIAADLKEHVIKPVIPEQYLDEKTIFHLNPSGRFVIGGPHGDAGLTGRKIIIDTYGGWGAHGGGAFSGKDPTKVDRSGAYVARQAAKSIVASGLARRAIVQVSYAIGVPEPLSVFVDTYGTGAIPDKEILKIVKENFDFRPGMIIINLDLKKGGNGRYLKTAAYGHFGRDDPDFTWEVVKPLKSEKPSA

SEQ ID NO: 211589 - protein, 237 aa, Zea mays
  Clone ID: MRT4577_124567C.1.pep
MGNCASAIDAFVQRGNRASPAATAGMSASRRTSSSATTGKLSTLSSASTFMPSTVSGGDDDDDDPVGQILESPNLKIYTFAELKSATRNFRPETVLGEGGFGKVYKGWVDEKTMNPSKASTGVMVAVKKLNPESVQGMEQWQSEVNFLGRISHPNLVRLLGYSMDDNELLLVYEFMAKGSLENHLFRRGAVYEPLPWSLRLKILIGAARGLAFLHSSERQIIYRDFKASNILLDSHF

SEQ ID NO: 211590 - protein, 397 aa, Zea mays
  Clone ID: MRT4577_124568C.1.pep
MAGLDTFLFTSESVNEGHPDKLCDQVSDAVLDACLAEDPDSKVACETCTKTNMVMVFGEITTKANVDYEKIVRETCRNIGFVSNDVGLDADHCKVLVNIEQQSPDIAQGVHGHFTKRPEEIGAGDQGHMFGYATDETPELMPLSHVLATKLGARLTEVRKNGTCPWLRPDGKTQVTVEYRNEGGAMVPIRVHTVLISTQHDETVTNDEIAADLKEHVIKPVIPEQYLDEKTIFHLNPSGRFVIGGPHGDAGLTGRKIIIDTYGGWGAHGGGAFSGKDPTKVDRSGAYVARQAAKSIVAAGLARRAIVQVSYAIGVPEPLSVFVDTYGTGAIPDKEILKIVKENFDFRPGMIIINLDLKKGGNGRYLKTAAYGHFGRDDPDFTWEVVKPLKAEKPSSA

SEQ ID NO: 211591 - protein, 131 aa, Zea mays
  Clone ID: MRT4577_124569C.1.pep
SPKKGPYAKGVGKGAPVYLGAVLEDLPPGVLELPGNPPKEKKKTGFVPPPVLWGIPNKKELGKFFPGVPLPPGGGLPKINRVLLPKKTGEKGPPGGNKGAHSPKKAPQPPQKAKGLGGDPMLPWVGCNRPM

SEQ ID NO: 211592 - protein, 120 aa, Zea mays
  Clone ID: MRT4577_12456C.1.pep
FKTGYTTTSLFIHLVLRIRIFLLHPVRRHGICFLHLVRQCGICFFHLVRRRGICFFHLIRRRGICFLHLVCRRRICFLHHLVRRHHICFLQLAICATLCFPFPILCSHVTLATHFTLVPF

SEQ ID NO: 211593 - protein, 403 aa, Zea mays
  unsure (1)..(403): unsure at all Xaa locations
  Clone ID: MRT4577_124570C.1.pep
MAAVDTFLFTSESVNEGHPDKLCDQVSDAVLDACLAEDPDSKVACETCTKTNMVMVFGEITTKANVDYEKIVRETCRNIGFVSNDVGLDADHCKVLVNIEQQSPDIAQGVHGHFTKRPEEIGAGDQGHMFGYATDETPELMPLSHVLATKLGARLTEVRKNGTCPWLRPDGKTQVTVEYRNEGGAXVPIRVHTVLISTQHDETVTNDEIAADLKEHVIKPVIPEQYLDEKTIFHLNPSGRFVIGGPHGDAGLTGRKIIIDTYGGWGAHGGGAFSGKDPTKVDRSGAYVARQAAKSIVASGLARRAIVQVSYAIGVPEPLSVFVDTYGTGAIPDKEILKIVKENFDFRPGMIIINLDLKKGGNGRYLKTAAYGHFGRDDPDFTWEVVKPYKSMIKHSRPPKASY

SEQ ID NO: 211594 - protein, 122 aa, Zea mays
  unsure (1)..(122): unsure at all Xaa locations
  Clone ID: MRT4577_124571C.1.pep
KGRLFYATPNSQSSSTLPSHRSRLHGTSGGPQIRARDLAAQADGKRRGVRGLEEEEGGGGLRSSSLGSGRPGRGRACAGTPPRPWWAQPRRRDVSSSSSVLRFSVVREASLRAFESYHMXRI

SEQ ID NO: 211595 - protein, 84 aa, Zea mays
  Clone ID: MRT4577_124573C.1.pep
SFLSSNLISSFTFFSSTLLNKFIISFKMAAVVHPNNTFEPNDEDRKLFVGGLSWNTTEDDLFQYFNQFGSIANVNIKYNPEGKS

SEQ ID NO: 211596 - protein, 120 aa, Zea mays
  unsure (1)..(120): unsure at all Xaa locations
  Clone ID: MRT4577_124574C.1.pep
LQFLPLHQLAPLSSDPYXARPHAFCQLASAHHRHLFPFHPLAAFSSLAYLQHQLLRPLPLLPDLSLLAFWPLHQPSAFPLRNLRSYGPLPLRHTLLRLLSLVLTVQPVFYQLPVQSSTMF

SEQ ID NO: 211597 - protein, 71 aa, Zea mays
  Clone ID: MRT4577_124575C.1.pep
MASSSCSPVFKILIVVALVAAALSSYGAAEYICIQPCWELPHCDAWCRDAKFAKGGDCVDFGSGLTCCCRR

SEQ ID NO: 211598 - protein, 46 aa, Zea mays
  Clone ID: MRT4577_124576C.1.pep
RPAECNVICEEGFDHDLTRYSGRFRRCQMVLGFLTFVLLFTVFCLI

SEQ ID NO: 211599 - protein, 68 aa, Zea mays
  Clone ID: MRT4577_124577C.1.pep
VFVEETRIDDIAGPYVSEWCRRRYCGATWAPTINSCWLSTPVKANIQRAVHQAISSSTNSTPLKRVHV

SEQ ID NO: 211600 - protein, 123 aa, Zea mays
  unsure (1)..(123): unsure at all Xaa locations
  Clone ID: MRT4577_124578C.1.pep
RGTHHATHDAKLPSNDLTTLGTKIVSGLALSALCLHAHSAFMIPQCSLARSAILPELVRLDTXNGLXHLAVQDYRLQQALAASVLQQPVKQLLRPLLAHLTIEAIAAQQQQQFLPVLSQLDVV

SEQ ID NO: 211601 - protein, 130 aa, Zea mays
  Clone ID: MRT4577_124579C.1.pep
SPSGQCHPLPPRRCRRHESHPPPPQTPSLCPCRPSSACTRRLLQRSAGSPPAALNHGLRTASPLDASWSLARPYGHNNRFLQFRLPHHVYLTMQSQQQAPAASPDWSPTCLRLFVCVLSLKTSSCSHNRC

SEQ ID NO: 211602 - protein, 202 aa, Zea mays
  Clone ID: MRT4577_12457C.1.pep
MMDDPPPSLHRLLLPPLLLVLLVLVSVSCPLAHGSPATGGGLGAEEWTARTDAASVQLRNSHPRRRLQVGGGNHLPPQFLQPRHRHHRRTHSPAPSPAPFTAPSPSPSAFRPSLAPPQLAWPLPSTPQPSHDPQVGAPVNPLHKHSWRAYGLVSAGGAAFLVMAAVFAVYCRAKKVSTVRPWVTGLSGQLQRAFVTGVPFLK

SEQ ID NO: 211603 - protein, 120 aa, Zea mays
  Clone ID: MRT4577_124580C.1.pep
MANKGVSGARSPLNLVVAMALCCFFYVLGAWQRSGYGKGDRIAAAVSRQTACGDVAAGLSFETHHGGAGAINASSSLPFGADAAPPAFAPCAAALADHTPCHDQDRAMKFPRKNMVYRER

SEQ ID NO: 211604 - protein, 297 aa, Zea mays
  Clone ID: MRT4577_124581C.1.pep
MESKQWGKTPQEAVGAGGGRQVDLDEEDDLEEFRLPMGHRPTENLDTDGLQQASVYTQLTASNVGFRLLQKMGWKTGKGLGKNEQGILEPIRADMRDAKLGVGKQEEDDFFTSEENVQRKKLNIELEETEEHIKKREVIAEREHKIRSEVKEIQKVFFCNLCNKQYKLAHEFESHLSSYDHNHRKRFKEMREMQSSSGSRDDRQKREQQREEKELAKIAQLADAHRKQQKDKQEKSETEDAAPKNMAASSNQDQRQTLKFGFSKMAPSKVLVGSASKKPKVATKVSSVFGNESDEDS

SEQ ID NO: 211605 - protein, 161 aa, Zea mays
  Clone ID: MRT4577_124582C.1.pep
MKDKPNILVPIATLRSFVLTVRPTLRKREEGSLTDCERRVSPVAVQLWMKTHCHLSSTSLASAPTGALATTAGAVVKVVLYLSADVAIVAEAEVREAPQPADAGRYAPGELVSVEAKLEEPEVIDGRRDRHVEAEGGEPQGRDVPAGAAHADVMGEELKNE

SEQ ID NO: 211606 - protein, 55 aa, Zea mays
  Clone ID: MRT4577_124583C.1.pep
PARIILSASLVRTPKRPQAGSAIKIRMYPRSRILMMCRLRRHYPIMTQAAAREIN

SEQ ID NO: 211607 - protein, 57 aa, Zea mays
  Clone ID: MRT4577_124584C.1.pep
KNPFPLLLVQFSTASCRKKLEGFLFQLLGIRSGVHNGWSWGTLNDWRRLPGADPWCV

SEQ ID NO: 211608 - protein, 88 aa, Zea mays
  Clone ID: MRT4577_124585C.1.pep
RERLAALLEQENARDNVDVACLVGDAHLLTLLEVARGLGVPTMVLRTTSAACFRCFLAYPMLHRMGYLPPQESKLYMPVKELTPLRVR

SEQ ID NO: 211609 - protein, 168 aa, Zea mays
  unsure (1)..(168): unsure at all Xaa locations
  Clone ID: MRT4577_124586C.1.pep
DPGVMGVRQSVTIQXPAKYAGLEIGATDLSEQNEAFAFQLVXLRXKPALDRSKVNLNGGWIAVGHPLGATGVRCVATLLNKIEHRGIECSIGXVSPCXGSGMASSAVLDRGHVVNGLSNVVDIAGASFCSLRMSSTGAENPSILDQHKRRAFVIYSESVFFFFASSPL

SEQ ID NO: 211610 - protein, 74 aa, Zea mays
  unsure (1)..(74): unsure at all Xaa locations
  Clone ID: MRT4577_124587C.1.pep
GETVNQAVPSADNARVYWEDVACKLVNDNVNLYYYILQDVQRGNPSPSFGIMPGGDLAQVSPLFDLSSPGAXKN

SEQ ID NO: 211611 - protein, 384 aa, Zea mays
  Clone ID: MRT4577_124588C.1.pep
MAQQQTNPEEVVLGQEVGAARVATLNRPRQLNGISDRVVYLLAQFLEKWEKDENAKFVIFKGAGRAFSAGGDLKMFYEGKSNDSCLEVVYRMYWLCYHIHTYKKTMVALVNGLVMGGGAAMVAPLKFAVVTEKTIFATPEASVGLHTDCSFSYIHSRLPGYLGEYLALTGARLNAKEMISAGLATHFVSSEKLEELEKRLLDLDTGAESAVRAVIEEFSTDVQTDEDSILNKLSTINKCFSAETVEDIIKAFESEASIDGNQWIAPVLKGLRRSSPTALKITLRSIREGRKQSLPECLTKEFRLTMNILRSVVNGDVYEGIRALSIDKDNAPKWNPTTLEEVKYEDIDRLFQPFSPELELQVPSDDSNRWSGKYENTVYGRASQ

SEQ ID NO: 211612 - protein, 274 aa, Zea mays
  unsure (1)..(274): unsure at all Xaa locations
  Clone ID: MRT4577_124589C.1.pep
MAQQQTNPEEVVLGQEVGAARVATLNRPRQLNGISDRVVYLLAQFLEKWEKDENAKFVIFKGAGRAFSAGGDLKMFYEGKSNDSCLEYRMYWLCYHIHTYKXTMVALVNGLVMGGGAAMVAPLKFAVVTEKTIFATPEASVGLHTXLKNLKNDCSFSYIHSRLPGYLGEYLALTGARLNAKEMISAGLATHFVSSDLLDLDTGAESAVRAVIEEFSTDVQTDEDSILNKLSTINKCFSAETVEDIIKAFESEASIDGNQWIAPVLKGLKRSSPT

SEQ ID NO: 211613 - protein, 28 aa, Zea mays
  Clone ID: MRT4577_12458C.1.pep
KINQHAIRTLDIIIRTRDLFEGSMTHHL

SEQ ID NO: 211614 - protein, 123 aa, Zea mays
  unsure (1)..(123): unsure at all Xaa locations
  Clone ID: MRT4577_124590C.1.pep
RKQSLPECLTKEFRLTMNILRSVVNGDVYEXDVVPMSCCCLKNDSSTWXDIFSLILRQGIRALSIDKDNAPKWNPTTLEEVKYEDIDRLFQPFSPELELQVPSDDSNRWSGKYENTVYGRASQ

SEQ ID NO: 211615 - protein, 111 aa, Zea mays
  Clone ID: MRT4577_124591C.1.pep
MAPVGGANHFPAPRSLVFAFYLTGHGFGHATRAIEVVRHLIADGHEVHVATAVPEFVFTAEVRSPRLRIRRVILDCGAVQADALTVDPLATLDKYREAAVLPREFILRAEA

SEQ ID NO: 211616 - protein, 59 aa, Zea mays
  Clone ID: MRT4577_124592C.1.pep
RKAKLAQWPLPLDPAQNARSLDPYSPDAHPELRNQLIQTETPLAPAPASRIAPHKTRGI

SEQ ID NO: 211617 - protein, 95 aa, Zea mays
  unsure (1)..(95): unsure at all Xaa locations
  Clone ID: MRT4577_124593C.1.pep
NXILLXFPNXTFXXGXXPSRPXGGXLNGXWXGXTFMVGRKXKGFPVXXSLXFGPXREXXGFCSPIFRLALWPXXXLRXQAAXSLSXGXPVLVLGX

SEQ ID NO: 211618 - protein, 43 aa, Zea mays
  Clone ID: MRT4577_124594C.1.pep
HCSLSAMLFTSTTGSMIRHKSLHQYHLVVKHTLINIDDDTCST

SEQ ID NO: 211619 - protein, 50 aa, Zea mays
  Clone ID: MRT4577_124595C.1.pep
RQDHIDLFNQIRQLFFGIGYWPFEGLRVKIDPVGQDFISFREFSIHVINS

SEQ ID NO: 211620 - protein, 120 aa, Zea mays
  Clone ID: MRT4577_124596C.1.pep
NTCRFYLPVPALHTYCTSKQRQGHASTSGRAVPNGRRPAIKKPHLFSTERYIRLRKTSSAATTNKGCKPNTHRHLPIKRLSYMDAIKVACMCDRSVIVHDLILRRYSGPSVSPNRLTRRV

SEQ ID NO: 211621 - protein, 79 aa, Zea mays
  Clone ID: MRT4577_124597C.1.pep
HRAWLKRYWAEGTVCRIMSSSLSVRIRASSRSVCSPPAVTLVSAFAPQETVTLAQTVRSSWSGGPPGSSLDHVGRAKSV

SEQ ID NO: 211622 - protein, 46 aa, Zea mays
  Clone ID: MRT4577_124598C.1.pep
VVKWNDWAVCYIQFHPFHKEKKGCIIRDVRYLRLLIACPHKKWHEQ

SEQ ID NO: 211623 - protein, 70 aa, Zea mays
  unsure (1)..(70): unsure at all Xaa locations
  Clone ID: MRT4577_124599C.1.pep
ALDSGSMTEVSSNKPWXSRSFAIVRDLHVSTLKIWCGKVETVEKGRTAFLERCKPLWEETSGTYKGDVGE

SEQ ID NO: 211624 - protein, 169 aa, Zea mays
  unsure (1)..(169): unsure at all Xaa locations
  Clone ID: MRT4577_12459C.1.pep
HVKVEIDGRIQCRHNLFKNIVYSPICEVCNIEDETSDQIIFRCGFAVAFLEAIVFSWPTDQPISELYRTXSIPEEQFGTFIALCCWQLWKRWNGIVSRNETQSLQQVLAACKIEAQLWRLRMPVASRAIADLWCNLFNYVMQLCQSKASLLHADKTFCASSNVIRPFKF

SEQ ID NO: 211625 - protein, 62 aa, Zea mays
  Clone ID: MRT4577_1245C.1.pep
PGALILLIKQECSPTRIYASRQTGCFTNFDDNGCLKLRRQATLNTGVQTYFQQTPCFHTQKG

SEQ ID NO: 211626 - protein, 92 aa, Zea mays
  Clone ID: MRT4577_124600C.1.pep
PTSPSYCGAFVAHTSPGRWHTHDLSGLGLSAQAVSRAQHDEPHATKAKGWHSPNDSARAHIACTVHNKKYGTVMRPQARVALPHGKTPNFTS

SEQ ID NO: 211627 - protein, 69 aa, Zea mays
  Clone ID: MRT4577_124602C.1.pep
THETPRSSSTLTRRSGVVLILVISSMHRVAWSPILKIPSPSPLFHLSLFSRQFTFLCRSVLSRIPPQQG

SEQ ID NO: 211628 - protein, 136 aa, Zea mays
  unsure (1)..(136): unsure at all Xaa locations
  Clone ID: MRT4577_124604C.1.pep
MTDSYCPHCNKHTEVAXDHSXAGDTERTEERLVLEEHSVDETXSEWRTFANQPNDIDRGRLQGPSNPLLSDPGLSSDLPILKGAQGDFLSSPHGRRQNRGSNPDRYLXILDYLTITDMDDRLRLVATIKGRPNVNL

SEQ ID NO: 211629 - protein, 184 aa, Zea mays
  Clone ID: MRT4577_124605C.1.pep
MGTRGLAVLLLAAVLLQALLPASEAEGLVRIALKKRHIDRNSRVAASLSGREEGQHHLIGGANTLRSEEEGDIVSLKNYMNAQYFGEIGVGTPPQKFTVIFDTGSSNLWVPSAKCYFSIACYLHARYKAGASSTYKKNGKPAAIQYGTGSIAGYFSEDSVTAGDLAAKDQEFIEATKEPSVTFL

SEQ ID NO: 211630 - protein, 123 aa, Zea mays
  Clone ID: MRT4577_124606C.1.pep
HEFKHEFTRCQCRLVWGLVIQNCQGKQKKKIFFKILGQGGFICKKLFFFSLNKMGPRGKPRKVFLPKVSTLRTCFLGVKLLGSLPLFAPIFFFKKQKKKKKKPKKKKKKKKKKKGRAGRWRGA

SEQ ID NO: 211631 - protein, 105 aa, Zea mays
  unsure (1)..(105): unsure at all Xaa locations
  Clone ID: MRT4577_124607C.1.pep
RGRPTRPRNFPDNGIFFFLSHSTYNWAGSKRSAGMCASSDXWPKDPASYTIHVASDAYNTAFLGEXLHPYWDMFHTVHPMADYHSASXAVGVCPIYVINKPGIHN

SEQ ID NO: 211632 - protein, 123 aa, Zea mays
  Clone ID: MRT4577_124608C.1.pep
ARNFPGARFSPFFEGKKKKPQGGFLGGAPPQAKKNPRPPKGKKGNPNRGTKIRGFFGSPLGQAGFQVGNPFWEFFSPEPGFEPNGPLPRFSSVGVAHNPFTPFFTKTGSANPSPCIFQKWWYP

SEQ ID NO: 211633 - protein, 103 aa, Zea mays
  unsure (1)..(103): unsure at all Xaa locations
  Clone ID: MRT4577_124609C.1.pep
MADKRGPILMLLALSACVANATIFPQYSQAAIAVLFPPYLTSMNRXLCDYSFLQPYRLQHAIATSNLPLSPLFFQQSPALSLVQSLVQTYQAHQLQQLVLPVI

SEQ ID NO: 211634 - protein, 71 aa, Zea mays
  Clone ID: MRT4577_12460C.1.pep
GVFSHPGVLVWCAFPPLFFRVLLWAITGGGVVFNARAPFCFFGCWKVLSRECMVSPLGLGQNKRIWPDKYI

SEQ ID NO: 211635 - protein, 73 aa, Zea mays
  Clone ID: MRT4577_124610C.1.pep
NSSGSLCLWPGVTCSRRHEGTISVLDLSSVGLAGTIPTSGTNLTFLTSLNPAMHYCHRLHVVASFIQLQLPIL

SEQ ID NO: 211636 - protein, 100 aa, Zea mays
  unsure (1)..(100): unsure at all Xaa locations
  Clone ID: MRT4577_124611C.1.pep
LNPRSLILDLHAIEAVKLGSFVXVLKSGINSPIYRDLHALVSHPRLLSVVASLLHMPGLVCNVPYTALPXVVLCVDRSIPMLMRRKEAKPYDMIDRHWRV

SEQ ID NO: 211637 - protein, 124 aa, Zea mays
  unsure (1)..(124): unsure at all Xaa locations
  Clone ID: MRT4577_124612C.1.pep
TGPNQAVASDFLINTHMLLISLGAAGYAGATXPPRPRRCTLPFRAXASPAALDRRRRPHNVAGDFFVDHRCIDCQTCRWMAPVRRQLSPILHLQSLAWLTIIHGVRRAGIYAGGVQEGGWQRPP

SEQ ID NO: 211638 - protein, 90 aa, Zea mays
  unsure (1)..(90): unsure at all Xaa locations
  Clone ID: MRT4577_124613C.1.pep
NHFPQKPPTLIXTPTLFTTSYPLETPASAPEIALSIVTTHPQPFFVLFFLPHQPHNFIMTMHILLYPSLTIYICVQPRKSHTHFHVWYYQ

SEQ ID NO: 211639 - protein, 62 aa, Zea mays
  Clone ID: MRT4577_124614C.1.pep
HASEEHILVPVYINYKTIYSYELFDQFLASKIMFIQDLWDMLFHLSVLVFQHEILASYYIIT

SEQ ID NO: 211640 - protein, 62 aa, Zea mays
  unsure (1)..(62): unsure at all Xaa locations
  Clone ID: MRT4577_124615C.1.pep
GAPPRCIGKSRHVQWPQFLCEYSPSTWVKENVTALHGSQHSGMNKRKSHMRPPGRPVTXVXK

SEQ ID NO: 211641 - protein, 87 aa, Zea mays
  Clone ID: MRT4577_124616C.1.pep
KTPGGLKKASNGMGSKPWPSMKTGSPPTLFIYEIITPSHAMPPHTYIFLWLEKYMDRPGAISRIHFEGNTSSKFLEDLVFAEPCFGE

SEQ ID NO: 211642 - protein, 46 aa, Zea mays
  Clone ID: MRT4577_124617C.1.pep
GSSSSYVRRGQIVSCHWRAHVCMYVCACIRCLTILNLCQTSARRLA

SEQ ID NO: 211643 - protein, 139 aa, Zea mays
  unsure (1)..(139): unsure at all Xaa locations
  Clone ID: MRT4577_124618C.1.pep
WPAPGFFFPRGPPGGAKTPPGFPLXAGKNPSNPGGGGSKPVLALPGGVPPPRAKNLGPLLAPGGPPPPFCFPFSPPRFPPFREGGKKPPIVRSRFGLGFPPKKNWAPQGFPPVFPVCXPGGGPPPPXILGAPKKKKFLP

SEQ ID NO: 211644 - protein, 46 aa, Zea mays
  Clone ID: MRT4577_124619C.1.pep
RTLRNLSVICGPAPRVLYSHTNHYVGFKGSKFHKATVRRNISGLKV

SEQ ID NO: 211645 - protein, 73 aa, Zea mays
  Clone ID: MRT4577_12461C.1.pep
FPHLFSIPAALLAFQLPTGDFLNGFTVSDFSIQPGVKGKKFLFPARGITVRKYPLLYGRTFLATKYLEEKVKT

SEQ ID NO: 211646 - protein, 83 aa, Zea mays
  Clone ID: MRT4577_124620C.1.pep
ACSSVPQCRARRPCACTVGPRLSQQGYGGPHPPLGAAGLRRCRRGQRSHSTLCVCFERECSLTTLIVRPVSITSIFAPAFLMC

SEQ ID NO: 211647 - protein, 32 aa, Zea mays
  unsure (1)..(32): unsure at all Xaa locations
  Clone ID: MRT4577_124621C.1.pep
GGFASQLVVFRGRIFCCEFIVLKKRRRMKGXG

SEQ ID NO: 211648 - protein, 40 aa, Zea mays
  Clone ID: MRT4577_124622C.1.pep
SSFFYLEKRMHTCLPLNGQSLFYFCKSLPTPVLLCHYCLL

SEQ ID NO: 211649 - protein, 123 aa, Zea mays
  unsure (1)..(123): unsure at all Xaa locations
  Clone ID: MRT4577_124623C.1.pep
HAXDVXFFREMRRRGVLGSSGTARTGHLRGPRVSVDARAGFPRRWVAKMSARRRGPACLMTLKHRQPSWDVPWDTRTGYAVARPTLGPVPNQFLVGVGTSPRICRARGPMSPHHHSRARTRII

SEQ ID NO: 211650 - protein, 50 aa, Zea mays
  Clone ID: MRT4577_124624C.1.pep
ATGRAYHAVRPRMAVVRKEAVDTMHSTRLSCMRSSSTMTITGSGRGGARG

SEQ ID NO: 211651 - protein, 50 aa, Zea mays
  Clone ID: MRT4577_124625C.1.pep
VPFFLFFHLELRNQPPHVYFCPFPSTVHFLLKIINMNHTQPPSFCAIKTG

SEQ ID NO: 211652 - protein, 377 aa, Zea mays
  Clone ID: MRT4577_124626C.1.pep
PMDVLKRELQRKRQLLNADFGGRKIIRRAEIEARELQRIREVERQLLLQKQHRHSRPLSSPSSSSSSSSPTSAAADADADASRAESGSKESLPREEVIRRLRVLRQPATLFGEDDIARLRRLQVLIEDPGALADIDAAEIGEGQTNDFLRDIQAMRAKAATVTKPKAAGAETERGEGDSVSIDVPFEELCDEDKITAFFRRLLNEWTQEVDGMPEAERRTAKGKAAIATCKQCTRYLDPLFKQCKKKALPSDVRQALLEVVKCCRRRDYLAAVDNYIKLAIGNSPWPIGVTMVGIHERSAREKIYTNSVAHIMNDETTRKYLQSVKRLITFCQRKYPTDPSRSVEFNSLANGSDLQSLLAQQNAKNSEETLRLVAAS

SEQ ID NO: 211653 - protein, 81 aa, Zea mays
  unsure (1)..(81): unsure at all Xaa locations
  Clone ID: MRT4577_124627C.1.pep
GYPSCPAGAHPPSHPXAAPHARPYALRAVRRPCILAVRARGTIAISDRRGPALWKAYFPPLPDRCGLLLGLFPDLMAAGLL

SEQ ID NO: 211654 - protein, 99 aa, Zea mays
  unsure (1)..(99): unsure at all Xaa locations
  Clone ID: MRT4577_124628C.1.pep
YYPXQHQHHQHSSQHPNPGCSVMSWRCPPARALDGQTDRAISVWSQSHYHGQCRSRGERNFYFFPRVVLFLFVPRGFRLFIYFRELSCACEQSMLMVSI

SEQ ID NO: 211655 - protein, 111 aa, Zea mays
  unsure (1)..(111): unsure at all Xaa locations
  Clone ID: MRT4577_124629C.1.pep
IGTLEAGLQSPNGXIGLYLKSGRYSXRSXSGAPVYLCVDVEHLAXEFLDWGNAPRDNXKNRIIPCXPLLAIRSHEELGNLQAGRPIAPGXXVLDDINPXSLPKRNDVAADI

SEQ ID NO: 211656 - protein, 49 aa, Zea mays
  Clone ID: MRT4577_12462C.1.pep
VLEKSPTKTYEHLVCDYARIRRAILSFGDSHPLIRAARTRGGGNRTTLW

SEQ ID NO: 211657 - protein, 51 aa, Zea mays
  Clone ID: MRT4577_124630C.1.pep
VRPCAAHHTYVVSCTCITSAFLLPGVCLSMQDFFSVKKKKKKKKKKKKKNN

SEQ ID NO: 211658 - protein, 109 aa, Zea mays
  unsure (1)..(109): unsure at all Xaa locations
  Clone ID: MRT4577_124631C.1.pep
NWPPCPISYHRGWSRRLTTALRECLSLHIRQAGVQDINAGWELNCLEHAIHADGHMPCDMIIVGRDDAFNTFLRDTAAAMHVPQTAYDDLKPTVIYEXVMTEPYRHLFH

SEQ ID NO: 211659 - protein, 56 aa, Zea mays
  Clone ID: MRT4577_124632C.1.pep
MIFLCVRKNGLFYVLPRLTIGVNGVSQHILEKYTCVQLYAFDILYKSVIPGRKGYA

SEQ ID NO: 211660 - protein, 133 aa, Zea mays
  unsure (1)..(133): unsure at all Xaa locations
  Clone ID: MRT4577_124633C.1.pep
MQSAPXPRAXGAPAHEGVGLAHXVRVPRAGGGGGRHARXGASXGTDTESEXXADSXPXPGRGGGAVVERAHRXSQRHXPPWSLSASTAPXLXATTSDGAFXLXAAAIXLLGSARXVLARFVSLSPXGQYRSSD

SEQ ID NO: 211661 - protein, 104 aa, Zea mays
  Clone ID: MRT4577_124634C.1.pep
PRACGIGGFRKSPRPQGDRTQTVGGQKEIPCRPGPPLPKRTGVFQPLRRDAPQHRGGPRTYFPYPVKTTYFLQFPYSCIKSLFVKSFPGQKTSKDPLFMHARQF

SEQ ID NO: 211662 - protein, 310 aa, Zea mays
  Clone ID: MRT4577_124635C.1.pep
MGSEQKKPAYIKYLFGGLSGMGATLFVQPLDLVKNRMQLSGAGGGKKEYKNTFDALSKILRTEGITGIYKGLGAGFLRQATYTTTRLGVYTGLNDSYKIKFGGSPNLLASMLMGVIAGASGAFVGTPAEVALIRMTADGRLPLNERRNYASVFNALTRITREEGVLTLWRGCIPTMGRAMVVNAAQLASYSQAKQYLIRSGYFTEGIKLHFVASMMSGFITTVASMPVDIAKTRLQNMKVSADGKAEYRGTVDVLSRVIRQEGLFALWKGFTPYFCRLGPHTVLTFIFLEQMNSMYNKFVLGDSGSGSGL

SEQ ID NO: 211663 - protein, 81 aa, Zea mays
  Clone ID: MRT4577_124636C.1.pep
MADKEKPEVREEEYESDLDDAPLSALWRRDAASDDEGEDEDEDGGTPLRRRKAGFDADSDGQGAAEVYDEEGEEEYGGFEA

SEQ ID NO: 211664 - protein, 86 aa, Zea mays
  Clone ID: MRT4577_124637C.1.pep
VKPRGEGTGGRVLAAAATPSPYRSSCSLTRIEPSLGFRIGLPPTPIPSPSLRHARAGSYQTLRRQIRCDRPRWMPCLPTRGAVRGL

SEQ ID NO: 211665 - protein, 152 aa, Zea mays
  unsure (1)..(152): unsure at all Xaa locations
  Clone ID: MRT4577_124638C.1.pep
MQIFVKTLTGKTIXTLEVVFFDTIDNVKAKIQDREGIPPNQKGLIFFGKQFEDGRTLADYNIQKESPLHLGLRLRGGMQIFVKTLTGKTITLGGESSDTIDNVKAKIQDKEGILPNQQGLIFAGKNFEDGRTLADYNIQKESTLHLVLRLRG

SEQ ID NO: 211666 - protein, 57 aa, Zea mays
  Clone ID: MRT4577_124639C.1.pep
YSRLPHIMAFGILDRHISVFPLLQPRGRLVFLFPVVATVLDKRVMVCSQIASTYVTN

SEQ ID NO: 211667 - protein, 132 aa, Zea mays
  Clone ID: MRT4577_12463C.1.pep
PTSDPSTRGLMHRWLKQQFQCHRRRLGNTTVSYDNPRLTLREHTCTLINQQLFMHQFNTAGPAPCEPMIVTQPKTWSRGPLTSLKNAGLYLTWFRFCFTGSGAPMFGSVSSLSLNHCSTTPNTLLTEQHSLV

SEQ ID NO: 211668 - protein, 219 aa, Zea mays
  unsure (1)..(219): unsure at all Xaa locations
  Clone ID: MRT4577_124640C.1.pep
MDTGRKRIAPGGANGAGGXEARESTAGCPFGSNCHFLHNFPGGYLAVSKMTNLGGPPVPAPPGRMPMGPGGPDGPPSPALKTRLCNKYNTAEGCKWGSKCHFAHGERELGKPLQMDNSMGAPPMGPGPNGHFMPPPMPIPDMVPHSTFGASATAKISVDASLAGAIIGKSGINTKHISRVTGAKLAIRENEADPTIXNIELEGTFDQIXHASAMVTELI

SEQ ID NO: 211669 - protein, 144 aa, Zea mays
  Clone ID: MRT4577_124641C.1.pep
FQVHPNLQKFRLPYAFLETKGLPPGWVFPAVFKAKNFFVGRGKWFPPFLGFPIKLGILLDPGSQTLAPACNWNPSLSFQGQQKGPFWRAKAFLQIFPGSQGVRGAPSGGVAKVPFLFPAALLPSDFYPFRGVVPPKGLFGIKRG

SEQ ID NO: 211670 - protein, 265 aa, Zea mays
  Clone ID: MRT4577_124642C.1.pep
MFSMCSTAGCPFGASCHFLHNFPGGYQAVSKMTNLGGPPVPAPPGRMPMGPGGPDGPPSPAVKTRMCNKYNTAEGCKWGSKCHFAHGERELGKPLQMDNPMGPPPMGPGPNGHFMPPPMPFPDMVPPSTFGASATAKISVDASLAGAIIGKGGTNTKHISRVTGAKLAIRDNEADPNHKNIELEGTFDQIKHASAMVTELIVRISGKPPPQAKNNPGRGPGSHAGGPGSNFKTKLCENFNKGSCTFGDRCHFAHGEGELRKPAAA

SEQ ID NO: 211671 - protein, 80 aa, Zea mays
  Clone ID: MRT4577_124643C.1.pep
GLFHTVGTQNVALCPMYLDQDCFFFRSKINCSPRPSLCWAPFLNPFSFLEKKKVRPYPCLLPAGFMFLFWPSKRRIFLVA

SEQ ID NO: 211672 - protein, 68 aa, Zea mays
  Clone ID: MRT4577_124644C.1.pep
KPKQYKNKRNTILTVRGAHKLLPHFLPPSLYPSFHELLLIMAIFFYILSLIFRFFFNFPFFYLFLTHI

SEQ ID NO: 211673 - protein, 36 aa, Zea mays
  Clone ID: MRT4577_124645C.1.pep
FLSMPEYLYVSFHFLVKGYYLKAGIWYIHHIMFNLG

SEQ ID NO: 211674 - protein, 66 aa, Zea mays
  unsure (1)..(66): unsure at all Xaa locations
  Clone ID: MRT4577_124646C.1.pep
EEXRAQLGQXALPRGAQVPKARPSMGHVVARIEEIRKSSVTTTMAEEVDDQSSKAESEAPTNPFAS

SEQ ID NO: 211675 - protein, 679 aa, Zea mays
  unsure (1)..(679): unsure at all Xaa locations
  Clone ID: MRT4577_124647C.1.pep
MRSPSPPPWRLRRIRFAFPMLLVVASLAGADDLASDARALVAFRDAVGRRLAWNASDVAGACSWTGVTCEHGRVAVLRLPGATLSGTVPAGTLGNLTALHTLSLRLNGLSGALPADLSSAAALRNVFLNGNRLSGGFPQAILALPGLVRLSLGGNDLSGPIPTELGNLTRLRVLLLENNRFSGEISDVKLPPLQQFNVSFNQLNGSIPASLRSQPRSAFLGTGLCGGPLGPCPGEVPPSPAPAGQTPSPTPVPSGSGGGGGTNGGSGVENGHKGKKLSGGAIAGIAIGSALGAALLLFLLVCLCRRSGGIRTRSLEMPPSSPAPAGGRKPPEMTSAAAVAPLTTIGHPNAPIVQSTSGKKLVFFGSAAAEASFKLEDLLRASADPSQAALXTTRVSTCPDGXSALAVKRLKDVTLSEPEFRERISEIGELQHEFIVPLRAYYYSKDEKLLVYDFMPKGSLSAVLDGNIIEQKTPLNWDLRIGIALAAARGVEYIHSTRSTASHGNIKSSNVLLGESYQAHVSDNRLTALVGPSSSPSRATGYRAPEXTCVRQSHPVLRKVXVVCLGASFXVRLLNCCAHSSLDQVGFSLXAVAAACLSAIHGVNIELMRQEAGEEPMAQLVLLALDCVAQVPEARPSMGHVVTRIEEIRKSSVTTNMEEEVDDQSSKAESEAPTNPFAS

SEQ ID NO: 211676 - protein, 172 aa, Zea mays
  Clone ID: MRT4577_124648C.1.pep
MRSPPPPPWRARRLHSPLPMLLLFVAALAARAGADDLASDARALLAFRDAVGRRLTWNASDVAGACSWTGVSCENGRVAVLRLPGATLSGAVPAGTLGNLTALHTLSLRLNGLSGALPADLASAAALRNVFLNGNRLSGGFPQAILALPALVRLSLGGNDLSGPIPAELGSL

SEQ ID NO: 211677 - protein, 404 aa, Zea mays
  Clone ID: MRT4577_124649C.1.pep
MEPAAEDAAAAAPDSWETADIDGPMSRLILSARRVSSSPDFADDQDPPQPPPTLQPQGAPSAPSDAREDVVAQVDQFLREALEKPRERLSVLRMEQEILKFIHDPSRTEYEFNGLPTSYLRLAAHRLAQHYFLQSIAIPDNSLPDGTGSRIILRKTTFDCRLPAVRLADIPVNLPQEDISVAKVAIKQRPQKNLHGMNSSSAHSSRDNHQKSVEERKEEYNKARARIFNNSNSSTATDERSAEEVTLPSTLHRSTSLELNSSNRIGQGAEITLERSLTTTSASSRSNRSKIDKEPAVSRNKQNNRVAIFRDRESERKDPDYDRSYDRYMQRFDPGFGFSGGPYTIQPLYTPAVNYNTEFPQLGSAHRSPVAVEQQPRPIAQHMPASWSVAQASNAIGYGPNGVM

SEQ ID NO: 211678 - protein, 46 aa, Zea mays
  unsure (1)..(46): unsure at all Xaa locations
  Clone ID: MRT4577_12464C.1.pep
GKFGFEVLLSVFPFNPSLYHYTETQASTELATNISTCLRIXLNGCH

SEQ ID NO: 211679 - protein, 160 aa, Zea mays
  Clone ID: MRT4577_124650C.1.pep
CHVHQISSSWKRSSPICLLLPRGAGAAFPSSAHAPLPRGPLQASLHAATEVVANIYTSALLEEETIENGTLEHTVSNLEKLEKPCLFYPPPRRRCGCCYCDARSCRHRMRVWSASAAVPSWQLPLSHRTLTTAWFARNRRGRPVRGDRAGVASLGTGCWN

SEQ ID NO: 211680 - protein, 84 aa, Zea mays
  unsure (1)..(84): unsure at all Xaa locations
  Clone ID: MRT4577_124651C.1.pep
KNRQVKPKQVPFHSKNNLQWYYISAKRTXNFEEPLVYLASKMAGDXNLRFVQSVALNPPSVTTTMTIQPPHRPKRPAATTNPFP

SEQ ID NO: 211681 - protein, 85 aa, Zea mays
  Clone ID: MRT4577_124652C.1.pep
VLYLLAVALPQMSIAQLGRQIDFFFTPYGQMLVRKQQIFSVAKNECHINVAEVDERASMSDKDVSSLVLCDDMLFKTYVKRKYQA

SEQ ID NO: 211682 - protein, 105 aa, Zea mays
  unsure (1)..(105): unsure at all Xaa locations
  Clone ID: MRT4577_124653C.1.pep
ISTWWPLHVMLIFYNMKGLNAITNPWFTPTVSVSAGSDIMLAFWASRIXGVPXTDLDEWKALTTIAICDTIGHYSATVTVGNAAXSXTHIIKSGEPSYRVLVSSF

SEQ ID NO: 211683 - protein, 110 aa, Zea mays
  Clone ID: MRT4577_124654C.1.pep
CSLHEKCSSGIPPNISATAASDNKVANHAERTDHNCSRHIHLHLKALLQKEGSEQPFLPIRAVPSQLECCRTWRSHLIISSVLRNPPPRENRRAPQETDRSLPHILSERR

SEQ ID NO: 211684 - protein, 69 aa, Zea mays
  unsure (1)..(69): unsure at all Xaa locations
  Clone ID: MRT4577_124655C.1.pep
TVESNIINLSTKATDIGLLLMLLAISMCITLATMYLQCAQATITVLXTPYTSSLTAPLXENPSLKPYMF

SEQ ID NO: 211685 - protein, 105 aa, Zea mays
  unsure (1)..(105): unsure at all Xaa locations
  Clone ID: MRT4577_124656C.1.pep
EGPKPXCPDFTMKLSKICHAGSVXXEXLTMSFPLIPLHYLXRLSPPXLPFLWPAXRPTKNLVSPPPSXXXLAPXFAGLGSLSPPSACCAVFPGXLXXXLXSWLWG

SEQ ID NO: 211686 - protein, 217 aa, Zea mays
  unsure (1)..(217): unsure at all Xaa locations
  Clone ID: MRT4577_124657C.1.pep
NVALLFYNVVMIDTTTAFHIMTXWVLKSNQLSLLLSCHSVLDSYVXIRFYQNFGNGHTPAVDLAGDCHPRSGWXRRQRQDVLTCARLCYEVLLSIRRGSGXYDLCFTDDXNTVVEYLSYYFLXTAGXSRPLGTVEIYGIDFDIENLQSVHYYDLVNALKGKGSVLLTVEPQCLYPDASLGPALQTGQFYNMWIQFYNNPGCAYANGDDNNLVNAWNT

SEQ ID NO: 211687 - protein, 87 aa, Zea mays
  Clone ID: MRT4577_124658C.1.pep
CSGLWCSFLSALCPGCSVRSWRPWCWPPCPPGPFALRRLGAPLCRRRFACSGRGPACSPCRPWCSRVDPLVVALRCVSFLSGLCYPV

SEQ ID NO: 211688 - protein, 93 aa, Zea mays
  Clone ID: MRT4577_124659C.1.pep
DWVLFCSRKWAPNQGPQGVVLVQGLTLSVEWGILGPSMVLFRSCLLGVFLPRCPCFWWFLRLLGAPSPCFFLRKKLKGSVLDELQWRNGRSFW

SEQ ID NO: 211689 - protein, 97 aa, Zea mays
  Clone ID: MRT4577_12465C.1.pep
WHAHLASSCSHTLAACLLPCSLALNWRSCLYMRFSSGLTCSPRAHGGWRMWFAHTATHRRLAARGAREGIRGGSPHLLAGHRHARETLARPRSPAQP

SEQ ID NO: 211690 - protein, 77 aa, Zea mays
  Clone ID: MRT4577_124660C.1.pep
AEVVLNFWAGNEKLVFLPMRDHGNYFFQFVKWLLWNLFQWGWPLFTGKCIFRISNLVHFVLSKYRTKKFRGKVLPCP

SEQ ID NO: 211691 - protein, 125 aa, Zea mays
  Clone ID: MRT4577_124661C.1.pep
SSSSCGAMCKKTMWIWARMISSLLFLSHPRESAVIQVIILECFSVIKPPGYLHTSAEGCRGEGYVATQQILGSLVPSEVHKSEKLFVVSSLSVPWILVFVNVPNNMGDAKLDKFCGGTLWRFFSG

SEQ ID NO: 211692 - protein, 58 aa, Zea mays
  Clone ID: MRT4577_124662C.1.pep
YTAVGPPIKLADARGSNNRSVLTHRVATEDPYPLRRRARATEADGGTSVHVRRHRPVQ

SEQ ID NO: 211693 - protein, 71 aa, Zea mays
  Clone ID: MRT4577_124663C.1.pep
IARRILFLWILVSFHPLLRFFHPPCALSFAVQLGRHILGASHLPAFRETTCLRRSDLTLQLYASLVFVPKK

SEQ ID NO: 211694 - protein, 158 aa, Zea mays
  unsure (1)..(158): unsure at all Xaa locations
  Clone ID: MRT4577_124664C.1.pep
SLVPEQARGMSSIKXMARLPYAPAPAGCSPVRYTCRSSASAPTGSAFFLTAFSSFTYAMHQVCQGQLVRRALQEXEVAARTAILTMLPAEEDDRLVTXLKXYLEVDDRIIKDARLWKVVKSEDYSSXCMCPNTVDLRPEAWYRPGVGTWKVIWTCCHE

SEQ ID NO: 211695 - protein, 46 aa, Zea mays
  Clone ID: MRT4577_124665C.1.pep
ATVRYSLEKETKKNYLYHATSLPQCCLICFVHQASPVELNGRFVHV

SEQ ID NO: 211696 - protein, 48 aa, Zea mays
  Clone ID: MRT4577_124666C.1.pep
KQHHHGSMVAYYHPAIPARERSQRPTVPLFLGHAKSSPRKGARARKKP

SEQ ID NO: 211697 - protein, 85 aa, Zea mays
  Clone ID: MRT4577_124667C.1.pep
SSRGSFTRKTVLKSQRLKQYLLSIHRVPTRAGVPAEDMCQRRQRTNGAHVCDTRPEERAAAPDRDPLAPRKPARLDASTATPCST

SEQ ID NO: 211698 - protein, 88 aa, Zea mays
  Clone ID: MRT4577_124668C.1.pep
GKVRALTRDVLSPVGVTCITQMPMKGEVMVGHVDSILKHGVLLKCVPGESIFLSEKSVSDYKYIGAETAMCMNDHSKLEKDTVVRFKV

SEQ ID NO: 211699 - protein, 91 aa, Zea mays
  unsure (1)..(91): unsure at all Xaa locations
  Clone ID: MRT4577_124669C.1.pep
PKAKKEAPAPPKAEAKAKALKAKKAVLKGVHSHKKKKIRTSPTFWRPKTLRLRRQPKYPRKSAPRRNKLDHYAIXKFPLTTESAMKKIEDN

SEQ ID NO: 211700 - protein, 99 aa, Zea mays
  Clone ID: MRT4577_12466C.1.pep
FVQHVLVLFTGIMSRLTLGSLLGLIELEILQHSGTDTKAQAKVFEKEREQTKMGIVRNKEKHCGWDSFFSMVHLVLVIYEMIHQISGKRKYNAMDNHKK

SEQ ID NO: 211701 - protein, 64 aa, Zea mays
  Clone ID: MRT4577_124670C.1.pep
SHCNIADSSHTHLMITRYTILYRTLHVLTHFKISFIGQYPDNYHRTDLYRQYLHVTQVTTYGNF

SEQ ID NO: 211702 - protein, 42 aa, Zea mays
  Clone ID: MRT4577_124671C.1.pep
NATHSYVYPPEPNHPWVFSTNEGVATKIPISITPPKIPQIPQ

SEQ ID NO: 211703 - protein, 75 aa, Zea mays
  Clone ID: MRT4577_124672C.1.pep
NERNHVSRDSVPKVPKRRGRSLFTEEQERLIRDLYEKYKDGPKCSHLIAESLDPSGKISSAQVSRKLTQLGLRNV

SEQ ID NO: 211704 - protein, 73 aa, Zea mays
  unsure (1)..(73): unsure at all Xaa locations
  Clone ID: MRT4577_124673C.1.pep
RAHRIGGERETLSCPLTGAYDYRVTSRVLVLLGDRPPSGDRPDFXCAGFPGRKEDFCSIMGLPTPTPILVDEN

SEQ ID NO: 211705 - protein, 46 aa, Zea mays
  Clone ID: MRT4577_124674C.1.pep
SNASVFSIFMFYSSFRNLFSDHMNYVHLLFGEHPSCCRLIASIQRI

SEQ ID NO: 211706 - protein, 94 aa, Zea mays
  Clone ID: MRT4577_124675C.1.pep
ESLLQQTGYPSAIRHVPSVEQSLAEVSAQIEAVTEKMIMEEEKVKTWKTENLRRKHNYVPFLFNFLKILEEKQQLNPLIEKAKAKHKSHCPSPR

SEQ ID NO: 211707 - protein, 105 aa, Zea mays
  Clone ID: MRT4577_124676C.1.pep
SVVFVVVSLTSVPNAPYFLVLQDLLLVLFRLLIAFVFVFLVDEAFFFYFLFLLLVNVRFFSFFFYFLSLLLVLLDQGAFLLLLQFVVLVRDYIRGFQALNQPKGP

SEQ ID NO: 211708 - protein, 81 aa, Zea mays
  Clone ID: MRT4577_124677C.1.pep
RWREDLFEQVMYAAGTVGLFWLVNHGVPEELMGRMLRGVRQFNEGPLEAKQALYFRDLARNLRLSSNLHLLKAVAVDWPDT

SEQ ID NO: 211709 - protein, 239 aa, Zea mays
  Clone ID: MRT4577_124678C.1.pep
MKLNISYPNNGTQKLIEIDDERKLRVFMERRMGHEVPGDSVGDEFKGYIFRITGGNDKQGFPMKQGVMHPTRVRLLLSDGHSCYRPRRTGERKRKSVRGCIVGMDLSVLALSIVKKGDEDIPGLTDIVHPKRLGPKRATKIRRFFGLSKEDDVRKFVIRREVQPKKEGSKPYTKAPKIQRLVTPQRLQHKRHRLALKRRRAEASKDAANEYAQILSKRINDAKAAHDEARKRRASSMKH

SEQ ID NO: 211710 - protein, 125 aa, Zea mays
  unsure (1)..(125): unsure at all Xaa locations
  Clone ID: MRT4577_124679C.1.pep
KRNKALNEQAISLLMPHYHMVIPHYKGRSKETNDEAEGKQYNDKDVDIGKPVLTSRTSCQDVPLLLPQELEPRELSSSDLRVNDLDINHSDRLNKKNFNQPLLNRKAKLDSSHXDLPIIMFVDNF

SEQ ID NO: 211711 - protein, 138 aa, Zea mays
  unsure (1)..(138): unsure at all Xaa locations
  Clone ID: MRT4577_12467C.1.pep
HPLFSFNSVLLLSLKCCLLFTLFVAAVGLPVVQKQHQLHVTLLLCNVAAMEALPIXFDRMFHHVLFVLLSATFVLAFGEGSCLGSQRGSCCSASSSWRSSNVAAKASQETINSMKRSIEENNLLHQLLSFNRGQVPPS

SEQ ID NO: 211712 - protein, 372 aa, Zea mays
  Clone ID: MRT4577_124680C.1.pep
MGCSCPPLADAACLALLLLALSLACRHHHGCAAATLSTASRWVLDESGSRVKLACVNWPSHLEPVLAEGLGKRPVGAIAADVAAMGFNCVRFTWPTFLVTDASYSDRGWPVILSEFGVDNRGVNTNDNRYYGCAAAAAADLDLDWALWALQGSYYLREGVLGLDEVYGVLDWAWCRPRNDTALRRVQALQRPLRGPGLAEAAPYTVLFHPVSGMCVVRRSPTPSLTQPFQLSLGPCNETEAWEYSAQQQRLALRDAALLCLRAEGAGRPASLAVSCGDAMARWGFVSDSKLHVAVNATSSAGSVGDGLLCLDVGADGRSVVTNPCRCLSADNSCDPQGQWFKLVSSTRSVVTKQTMLAQLPLKLKDWKIRSF

SEQ ID NO: 211713 - protein, 84 aa, Zea mays
  Clone ID: MRT4577_124681C.1.pep
RTRGLFIGAPDAKWKIHNMLEEHFYASCTLLTNSRAVHGLRRRGPRSEARPSADASHYQIAMDSLPFHHTQYDDLYKRTIISVI

SEQ ID NO: 211714 - protein, 99 aa, Zea mays
  unsure (1)..(99): unsure at all Xaa locations
  Clone ID: MRT4577_124682C.1.pep
VSCPSRGCGPCRCGCRGSIAWVWSKSLSWSCSVSKFGLGSILSIGCGLVPLWWCGYKRLWPASTNARGRMPACSFVPLQTMGSVTLKIHSAVCIKXWKK

SEQ ID NO: 211715 - protein, 56 aa, Zea mays
  Clone ID: MRT4577_124683C.1.pep
AFILAQFQATFELTLCTLVQLCTSTFALVCVGINRPEGGKKQGISQKNPSYIILVV

SEQ ID NO: 211716 - protein, 58 aa, Zea mays
  Clone ID: MRT4577_124684C.1.pep
KKSFCVYENIIIYKLDPRETIMRNASPSLFIRRDNFFPVYISVEEEHFSSPLGLFSYG

SEQ ID NO: 211717 - protein, 89 aa, Zea mays
  Clone ID: MRT4577_124685C.1.pep
SSFAVASLHSPSLVYSSLICFICQREKVVRRWVLMIPLLAIHAKGGESMSPKEKDRTHHPNFKIGDFQFVNFKLVSYYVQKGEEVVFQK

SEQ ID NO: 211718 - protein, 94 aa, Zea mays
  Clone ID: MRT4577_124686C.1.pep
KCFSKSYSFAFDYLQKNFEKIYKRFCKNKTCGASVVQNVKNEETIHAYLVSIYIGSIPSNLCTYIMQTSSIMHFYICFGLCWHQSPKRGRLKRH

SEQ ID NO: 211719 - protein, 36 aa, Zea mays
  Clone ID: MRT4577_124687C.1.pep
IITFYHSKYKLYFILPRLSKLIFGGRVNGRVGERVG

SEQ ID NO: 211720 - protein, 45 aa, Zea mays
  Clone ID: MRT4577_124688C.1.pep
PYSEALKRVQGELAKDGREPVGLSSFKVRERSAAGAGKSAIVKYS

SEQ ID NO: 211721 - protein, 48 aa, Zea mays
  Clone ID: MRT4577_124689C.1.pep
ALLQVILLPPGRYGQPEEVAGLVEFLALNPAASYMTGQVLTIDGGMVM

SEQ ID NO: 211722 - protein, 163 aa, Zea mays
  unsure (1)..(163): unsure at all Xaa locations
  Clone ID: MRT4577_12468C.1.pep
VTTSHHHLAINIEQTTFHCSAPRERHHRPSCLQRSLIRCXSYLAHELTISSGLXYIGSGQVSLTSRRYSSEAXWPLYXAAHGSIMFGVCVIPHECLHXSFSRYGLLNERLGLVLESXLLAPYFSXKIXHQXQQGNISALSXDEVLVHKHRAEMALYSPLLYKR

SEQ ID NO: 211723 - protein, 410 aa, Zea mays
  Clone ID: MRT4577_124690C.1.pep
MCLSVYGKNGGSDSAMCSAVGPFSMDTQKKHLESTAKLTHIEGPDSGVFPSHGSLTCISYTASLVTKDKAKTYLLESHNEFEFEIGTGAVSNQLESCVTQLSVNQTARFVAELPPRDLIMAASCEFSHDLSNVSSESCFLEFSVKVLQVTEPLEDRMEKALFSPPLSKQRVEFAVRHINELHATTLVDFGCGSGSLLDSLLEHPTTLEKLVGVDISRKGLTRAAKSLHQKLSKKSTTQTNVPTAVLYDGSITDYDSRLYGFDIGTCLEVIEHVEEDQATLFGNVVLSSFRPTVLIVSTPNYEYNPILQGSAMPNKDDEADESAGPCKFRNHDHKFEWTRLQFQCWATGLAVKHSYSVEFSGVGGSGEEPGYASQIAVFRRLVQGQEAMCLDEDGDQPYEVLWEWPNACVN

SEQ ID NO: 211724 - protein, 42 aa, Zea mays
  Clone ID: MRT4577_124691C.1.pep
LFVSATYAFFIPHCSLARGAIIPLLLRPGSLMGLDHLDVLAY

SEQ ID NO: 211725 - protein, 56 aa, Zea mays
  Clone ID: MRT4577_124692C.1.pep
HASAHASAHASAVSSSVVEVSYSLSFMLQTSSDELPTTIRCCKSKVQESPDRALGW

SEQ ID NO: 211726 - protein, 88 aa, Zea mays
  unsure (1)..(88): unsure at all Xaa locations
  Clone ID: MRT4577_124693C.1.pep
KIARYNGTHPIGKFPGTTNFFAPRFIRSVMPEPTWTPHSLDEQMQWFKKLLPFIAPSETELNEIMSKSLLFXGEIGGNDYNHLLVRDK

SEQ ID NO: 211727 - protein, 67 aa, Zea mays
  unsure (1)..(67): unsure at all Xaa locations
  Clone ID: MRT4577_124694C.1.pep
QQLLPFNQLAGVSPATFLTQPQVLPVYQHVAPNLDPLQRKLCINQLALXNPAGLQQPIWGPFLIFRG

SEQ ID NO: 211728 - protein, 48 aa, Zea mays
  unsure (1)..(48): unsure at all Xaa locations
  Clone ID: MRT4577_124695C.1.pep
STNTNRNCISKLGSSSLXXNTIFIYPTLVRFTPQCNQDNKKNKLDFSN

SEQ ID NO: 211729 - protein, 113 aa, Zea mays
  Clone ID: MRT4577_124696C.1.pep
IPTEPAGSDGAPLGWLLLRPISSQELPIRPGHLPLVQDIKANPTNRDGSRRHRARGWSPLGPRQLLAVLLNCCDVELMQPRGLQDPWSSSEFVDDGHPPPRKHVAPWPGNLRT

SEQ ID NO: 211730 - protein, 139 aa, Zea mays
  Clone ID: MRT4577_124697C.1.pep
LGGIWGAKNFPPGKGVGSFFPQPWNAPLKRKWGSSQDPGRKNRGAHGGPKKRPLLPPGVGKNKGLFYPNKNGPLLPPRGGENFPLFPQKPKVAFNTTAFWEPPPLLGQTPPLGGPPFAFFSLSPGKKNFPTPKGDPPPL

SEQ ID NO: 211731 - protein, 79 aa, Zea mays
  Clone ID: MRT4577_124698C.1.pep
REQTGVIPASLHSALKSIDSFRDLTSLVKDPMTNMRRAFSQISPRTRGNLNTVLTRAPKYITSASRMVNDGARLLLPNI

SEQ ID NO: 211732 - protein, 145 aa, Zea mays
  unsure (1)..(145): unsure at all Xaa locations
  Clone ID: MRT4577_124699C.1.pep
IEHILMVVIMPDAAVRKALNDIYACQXLQLVSXLKGGSINXILLVKKAGAEPEAKYLFGVGICNQRLAITXVLIENILIFLHWLYCTIANEVIDLIMFTHYFDTIKXLSDVFKNTIIFIPTLPDHVNDISNQILHVMMHASSIYT

SEQ ID NO: 211733 - protein, 83 aa, Zea mays
  Clone ID: MRT4577_12469C.1.pep
QLLVLGHLAGAVAHPSRNGRFPPPTSSNTLTVQQYVHLPRSRVSSTPPTNSTGRYVRSRVMPSPQVPTWANYRAFLWRVALFL

SEQ ID NO: 211734 - protein, 416 aa, Zea mays
  unsure (1)..(416): unsure at all Xaa locations
  Clone ID: MRT4577_1246C.1.pep
SCDIKFHYVVIKKPASQLNLRVNQFEIVNFYVVGASGLNITMDIAPYTGISFAADQVKAMNYSLTLHTVRIDPVLVGDYNLLNLTWFRSLAPAAAPAFTMAPRASPSTASTFPRQSEGPSKNRHASLITVVIICVGSLIGVLLIVLTICFCTFRKGKKRGPHVETPKQRTADAVSTVESLPRPTSTRFLSYEELKVATNNFEPSSVLGEGGFGRVFKGVLGDGTAVAIKKLTNGGHQGDKEFLVEVEMLSRLHHRNLVKLIGYYSSRESSQNLLCYELVPNGSLEAWLHGTQGASRPLDWDARMRIALDAARGLAYLHEDSQPCVIHRDFKASNILLENDFHAKVSDFGLAKQAPEGRTNYLSTRVMGTFGYVAPEYAMTGHLLVKSDVYSYGVVLLELLTGRRPVDNXQSSWQEN

SEQ ID NO: 211735 - protein, 117 aa, Zea mays
  Clone ID: MRT4577_124700C.1.pep
IRHEVFFWEKKLVLEKLVLTLRRHGTVWPPTGAAGRGPGPCPGKFQKKKKGRGVRFRGLAIKLPKPGRGARWWPPPGEGPPGPRGRGPGTPTGVVENHKPKGAARVVENNKPKGLKG

SEQ ID NO: 211736 - protein, 58 aa, Zea mays
  Clone ID: MRT4577_124701C.1.pep
NADIQNHSSEFFRTPNRQVALAVVAARKMSFRHGRWRTYMHAIYYSSIQDAKPQTVNS

SEQ ID NO: 211737 - protein, 141 aa, Zea mays
  unsure (1)..(141): unsure at all Xaa locations
  Clone ID: MRT4577_124702C.1.pep
PVLTCVKMGRPAIGEPKNPVRLLTRASVQLELEASCARRGFSRAVKAEQVSHNGQLSVELATPHSGTPRLVSLEALRLRMPCRPPPRHMGFLSGSHAMHHDDAQAXDSGSPEEQARNASEVPVPESPGPPPRVPPTKPNPP

SEQ ID NO: 211738 - protein, 121 aa, Zea mays
  unsure (1)..(121): unsure at all Xaa locations
  Clone ID: MRT4577_124703C.1.pep
RGHTTEGKIRGREGRNQKNRNRNPPTRKKPRSKQTDNKPGKAPHRGLGERNRENPRGPGPGGEKKGERRGKKGRAXKSPPXKHGKQRGPGNQEGWGALGPPPPPPKNGGGRKKKRKKPQGP

SEQ ID NO: 211739 - protein, 89 aa, Zea mays
  Clone ID: MRT4577_124704C.1.pep
SFVEKADKKAALQVFNVLVVYSPLTLSVERTVKKQLQVYSFEAYTYVFRGSFFSGCPLVREDCKNIFNAHKFAFLSYRIPTFMYALILL

SEQ ID NO: 211740 - protein, 102 aa, Zea mays
  Clone ID: MRT4577_124705C.1.pep
LTSFFFFFFFFVCFFFVFGCFFFLKTPKTKTTGGFKIKGPGGPKRTPTPNGSNQTKERGPQKTKGVGLKPKRPFHSLNFKNRTGAPAQLESPKNIRAQSIAN

SEQ ID NO: 211741 - protein, 62 aa, Zea mays
  Clone ID: MRT4577_124706C.1.pep
RPRWPSSPHNPPPWPPRPGPRSADPWISFPRAAPYKMRGTGERVCSLWPVSGCPRVPGCVGQ

SEQ ID NO: 211742 - protein, 228 aa, Zea mays
  Clone ID: MRT4577_124707C.1.pep
PRVWHKVRSDVPMEYAATITVNPLTALRMLQDFVKLNPGDAIVQNGATSIVGQCVIQLAKVHGIHTINIIRDRPGSEEAKNKLKQLGADEVFTETQLDMKNVKSLLGALPEPALGFNCVGGNAASLILKLLKQGGTMVTYGGMSKRPVTVPTSYFIFKDLSLRGFWLQKWLNSDKTEDCRRMIDYLLGLVHEGKLKYEMESISFGEFSLALEKALGKHGSQPKQVIKF

SEQ ID NO: 211743 - protein, 45 aa, Zea mays
  Clone ID: MRT4577_124708C.1.pep
NFPGYTQYKRHTFTGKIGAQCLKAHVFKQTNLVTGDKHRLFADPW

SEQ ID NO: 211744 - protein, 171 aa, Zea mays
  Clone ID: MRT4577_124709C.1.pep
MGRSPCCDKTGIKRGPWTAEEDMTLVAHIEQHGHSNWRALPKQAGLLRCGKSCRLRWINYLRPDIKRGNFTGEEEDAIIQLHAMLGNRWSTIAARLPGRTDNEIKNVWHTHLKKRLDSSSSKTSGQAAPKRKAKKPVAAASTADGPVSMPVSSPEQPISSSATDYSMASSL

SEQ ID NO: 211745 - protein, 113 aa, Zea mays
  Clone ID: MRT4577_12470C.1.pep
STGTSPVCSTRSVRSWNFGSHLFFHQVEGQIREPGFWQSFPVLVTRSPTFCFFFRPLALRNIQFSARLYFECFFSAPFQCMNCCKGYPMTLSLIQPQTLFLIGKVLPFGCYFP

SEQ ID NO: 211746 - protein, 50 aa, Zea mays
  Clone ID: MRT4577_124710C.1.pep
GILLLISICLSGWRGGSPTVCSPEGCGLAVLFECPPLYWRLLVHLTRTRG

SEQ ID NO: 211747 - protein, 49 aa, Zea mays
  Clone ID: MRT4577_124711C.1.pep
ISLLTLFRWPHLFNCLLLLMTVLFLASLMTNTVIKLARNNTVINKSMQL

SEQ ID NO: 211748 - protein, 53 aa, Zea mays
  Clone ID: MRT4577_124712C.1.pep
APSNVFLYCSRKGALLSSQCEGMVHLWVCVAPGGNSLPINLTHPARAMGSRKI

SEQ ID NO: 211749 - protein, 71 aa, Zea mays
  unsure (1)..(71): unsure at all Xaa locations
  Clone ID: MRT4577_124713C.1.pep
VHCYGRSRKRNKTDISILIVSKFDDYAQLPLEMQCAIXVTMPXSYARAMKATVLFSSATHNIDVNKIFKFI

SEQ ID NO: 211750 - protein, 86 aa, Zea mays
  Clone ID: MRT4577_124714C.1.pep
YLFINVDPLTSQQMPLTHSLERIPSQLHNRRSLGAGGSWMCARRMHTPPPRRAAAAVRPGAARDKGVDQPLRLAAILPRIPTSRRR

SEQ ID NO: 211751 - protein, 216 aa, Zea mays
  Clone ID: MRT4577_124715C.1.pep
MVSPAPGCRDSGEDGGKAEWLIYAFVARGIAVLAEYTEFTGNFPAIAAQCLQRLPAGSSSASTGPDGRGGAPVRFSYACDGHTFNFLLHRGYAYCVVAKESVPKNVSVAFLERLKDDFMKRYGGGKADTALAKSLNKEYGPVIKQHIQYVLDHSQELDKTLKVQAQVSEVKNIMLNNIEKTLDRGEKLSELQDKTSDLHSQAHDPLSSGEFWASFL

SEQ ID NO: 211752 - protein, 132 aa, Zea mays
  Clone ID: MRT4577_124716C.1.pep
VHSTRVLGTFGYHAPEYAMTGQINQKSDVYSCGVILLELLTGRKPVDHTMPKGQQSLVTWATPRLSEDKVKQCVDPKLNSDYPPKAVAKLAAVAALCVQYESDFRPNMTIVVKAITPLLNAPKPAAPAAPQS

SEQ ID NO: 211753 - protein, 35 aa, Zea mays
  Clone ID: MRT4577_124717C.1.pep
SAQGLAACTHHSVCYKDQWTLFPPAVMYPCRSINR

SEQ ID NO: 211754 - protein, 169 aa, Zea mays
  unsure (1)..(169): unsure at all Xaa locations
  Clone ID: MRT4577_124718C.1.pep
ADFNLTNQGPDTAARLHSTRVLGTFGYHAPEXMKEQYNNIHKLCNNHCIALLLXSIXFLPSATLDRFLRYAMTGQINQKSDVYSFGVILLELLTGRKPVDHTMPKGQQSLVTWXSINALCQNLLTDCNLLTDCERHCXXATPRLSEDKVKQCVDPKLNSDYXPKAVAKV

SEQ ID NO: 211755 - protein, 87 aa, Zea mays
  Clone ID: MRT4577_124719C.1.pep
MSRGRDPLALSQVIGDVLDPFIKSATMRINYGDKEITNGTGLRASAVLNAPHVEIEGHDQTNLYTLVMVDPDAPSPSKPEYREYLHW

SEQ ID NO: 211756 - protein, 43 aa, Zea mays
  unsure (1)..(43): unsure at all Xaa locations
  Clone ID: MRT4577_12471C.1.pep
XIHICIQGRDLTFLMLIITPITSNLYPFTYSSLLTFLKKIFKI

SEQ ID NO: 211757 - protein, 59 aa, Zea mays
  Clone ID: MRT4577_124720C.1.pep
PYNSIHSPYIVYKQTHYSLMRAVGVLATPSSATRKVATSSRTMDEVVLDVNSTLRSLSM

SEQ ID NO: 211758 - protein, 64 aa, Zea mays
  Clone ID: MRT4577_124721C.1.pep
EPKQTVRNTRRGRTAPRDMYIYCTATKEREMTAPGQRRMIWGHTCIHTHSLNVGWSTWKRPRLR

SEQ ID NO: 211759 - protein, 72 aa, Zea mays
  Clone ID: MRT4577_124722C.1.pep
LSIQSVSPRSSILYCLHRFHLRSIPFHASKLHQGHDDGSYDDYDLSISACVDVAAADGVPVPPDRRGAHPAL

SEQ ID NO: 211760 - protein, 86 aa, Zea mays
  Clone ID: MRT4577_124723C.1.pep
IYATHICNFSLSTLMPSNTPPSIYPLVLVSVPPEAYNHYSAHAPASTPQRSTTKPPRTIVTTRHTSMSMCLSQSPLLSSFFSLFCF

SEQ ID NO: 211761 - protein, 72 aa, Zea mays
  Clone ID: MRT4577_124724C.1.pep
MPPKRIRCTAATCREPAQRIVGDCTFCQGHFCGKHRLLEDHKCTGLEDCKKQSYERNAIQLESERTQVIRGV

SEQ ID NO: 211762 - protein, 63 aa, Zea mays
  Clone ID: MRT4577_124725C.1.pep
NGKKHQRALGMSMRVERASLEQLCRRLLIFTWRTMQPRRYTRYKKFNQHFPSMSECRSIKLRR

SEQ ID NO: 211763 - protein, 73 aa, Zea mays
  Clone ID: MRT4577_124726C.1.pep
GGPTSLRTSSDGQAAYDGSLSLTVLKSSVFSADKPVSVGKVSLGSRPVIPATGEGESVYKWTAALVIKIDTSK

SEQ ID NO: 211764 - protein, 77 aa, Zea mays
  unsure (1)..(77): unsure at all Xaa locations
  Clone ID: MRT4577_124727C.1.pep
ARATGTARPEGPPTSKPPPPRPGHGREEKSTGAPAAQARGGAQGHQQRPXPSARQSGQQRQEQEQGQHAPRPRAXXR

SEQ ID NO: 211765 - protein, 53 aa, Zea mays
  Clone ID: MRT4577_124728C.1.pep
HALARASMVIKCSSAMTLKVGAPLAIFYVEDNTAQDSDVRIMILLAALCHTDG

SEQ ID NO: 211766 - protein, 159 aa, Zea mays
  unsure (1)..(159): unsure at all Xaa locations
  Clone ID: MRT4577_124729C.1.pep
RSDNSQALEDRCMGAARRLKTHRRNQCWAYKGYTKSXWGNVWKXPFGRSFDAKGIALDKIGIDANQPNCDLLKCARVQXLIRMCKXKIADLLPKDGXMNYIEVKCMKSLIASIXLKVHSVGYIPGVRFKVPMFTSESLFALLKENKEKSRAYIALATKI

SEQ ID NO: 211767 - protein, 61 aa, Zea mays
  Clone ID: MRT4577_12472C.1.pep
VLPGGRDRSPFTGIRSFLEGRVLSTDICVRALNYCRRPPPPPAASVSGSDHLPRAAYGHLP

SEQ ID NO: 211768 - protein, 55 aa, Zea mays
  Clone ID: MRT4577_124730C.1.pep
HYDHCHNNAQIFLIRRYRITFGHFRLLTLALRLVSTSREMPLSPTSWLSPIQSKP

SEQ ID NO: 211769 - protein, 190 aa, Zea mays
  Clone ID: MRT4577_124731C.1.pep
MKYINISRGKNLLMEIHDGQCGIHVASRTLVRKAFRTRFYRSKTKQDAIDLIQRADFFCEHKGILLKYASVVHPRANGQVERANGIILDALKKKIFDNNDKLIDKWIKELPYIVWSLKTWPSRALQGNTPFFMIYGSEVVLHADLAFGASWLDFKDIAEAKATRLEEIDTLEEQRLNTIIESAHYQQRNL

SEQ ID NO: 211770 - protein, 60 aa, Zea mays
  Clone ID: MRT4577_124732C.1.pep
GALSYGRNGRRETGFFSAESSSFSVRQNNLKRLTCPPTPYIAVRLPLSCALLSAVCTALF

SEQ ID NO: 211771 - protein, 354 aa, Zea mays
  unsure (1)..(354): unsure at all Xaa locations
  Clone ID: MRT4577_124733C.1.pep
IRRIYSYVLGFQIPALGRADQSPAVVWQPVYTSIIQALKTFMISTVASSAAWNELEAFLLENIFHPHFLCLEIITELWCFFIRHAETETSINLVNQVSLLLKTVASPEDVLSPLSALRKVARSLCIILSYASSATVDQIYTCVLNGENSSKSSILHLALLMEGFPLDSLSDGTKELAMKKMFTSFAGYLESYXEPPSNXVPTCKLGVVGLPIHALASALQHSVINVDSIVDENSITAMFKFTISLIKMYRIAPDSSKDNLAKHISSMLVIISNTRHLCAFSEMEKLTLQLRTLFVSTSDKSNAVLSQCKPSMASFMSTLGHLNVSEDDAYELCSAIWDLYHLLLNERHWALIHL

SEQ ID NO: 211772 - protein, 72 aa, Zea mays
  Clone ID: MRT4577_124734C.1.pep
EKHIVMKWRFKSWPEGHFATITLTFIDKNGETELCMEGRGIPSPEEERTRQGWQRYYFEGIKQTFGYGARLF

SEQ ID NO: 211773 - protein, 76 aa, Zea mays
  Clone ID: MRT4577_124735C.1.pep
QTTTIWEHRIATNKTQPNNNDVPDKTTSGLSDQPQGEATSKGTLITKTGEMRVNAKTAPWKAIFIFIIPHTTLKLR

SEQ ID NO: 211774 - protein, 74 aa, Zea mays
  unsure (1)..(74): unsure at all Xaa locations
  Clone ID: MRT4577_124736C.1.pep
CFFFFFFFFFFFLKRKEXLKLTWGSSYFEGGGVSCAIEKTKACHRSLAKVSSRGERRWRTPETNPQKRISPKRT

SEQ ID NO: 211775 - protein, 128 aa, Zea mays
  unsure (1)..(128): unsure at all Xaa locations
  Clone ID: MRT4577_124737C.1.pep
MFRLASRLLARTTTPWRRSRAFSSDLPATPAQDSNFIESWSKVIPNIDPPKTPSSFMTPRPATPSAIPSKLTVNFVLPYASELSAKEVDMVIVPATTGQMGVLPGHVPTIAELKPXILSVHEGNDVTK

SEQ ID NO: 211776 - protein, 102 aa, Zea mays
  Clone ID: MRT4577_124738C.1.pep
RFVGLLPALPSAVVSVPVAPPLVARVVPASFQLRCRLWRSWRAARAVVRAYPRERSVPRCPFVQRVLPFCGLERSLVLNTPLLRPRVGWYKRVDDRVSGPVR

SEQ ID NO: 211777 - protein, 121 aa, Zea mays
  Clone ID: MRT4577_124739C.1.pep
SVGCALPQHRDLRSTCCRWLAWDVAVPGQPSFCFPVFPSALLGICGVGWGGGTSECNLPVPCDSRGPGLLFVRPGNGVSAWLFGVPYACRTRSSVELLVHLMGVRIVDRSGEETASKMGMC

SEQ ID NO: 211778 - protein, 55 aa, Zea mays
  Clone ID: MRT4577_12473C.1.pep
TAMSFFFFATPSLQTFIMFAVIIVFNFIIYAIIILSKYLLSSHWNFLVRIPNFFL

SEQ ID NO: 211779 - protein, 285 aa, Zea mays
  Clone ID: MRT4577_124740C.1.pep
MTNEWQTNFRKFIQTTFGGSARGETAPCPCSRCRCMSYRTQSQVHSHLVIRGFDESFIEEGIQANDSDEGNDAAIVNNDETSDSDIVEWHYLMLYFGFEKFQRDPETGIEPTDLTLWMSTHSKNGEWSEEASRGIYEKASEKIVEKETTGCKANRLHGHGYLSRYPTRSQVMDSKFLEQARATAATNLKNIELESQVQLLNEKLVSEVAERERILQEKMQALQEEEANRESITPIDPPLVIPTETPELIPADPLAPTLRNKNNVHSADTNNKKDIVPRTILALTL

SEQ ID NO: 211780 - protein, 78 aa, Zea mays
  Clone ID: MRT4577_124741C.1.pep
VWRTPCFSLHRKPKWQAGGSLLAIFTLLLLTPPPPTWPLSAQGQAQWHFNHLNVQGLCSWERFLTTPMILHCCDKQEG

SEQ ID NO: 211781 - protein, 107 aa, Zea mays
  Clone ID: MRT4577_124742C.1.pep
AAIWRLLPPPLEAKPRLLRPSPSLNFMAWGISSLKKWGGGGCSPITSWGGPVFKVQKQIAGQTSGLKCLKTPFLGVSKENSMWRGKTPPDPRFCFFFGKICIAGRDS

SEQ ID NO: 211782 - protein, 108 aa, Zea mays
  Clone ID: MRT4577_124743C.1.pep
ECEWVHYFLGECAAGEDPSLPTILCVASPASSVFWVFSRSAALGWHVVWNMWARQSWISLKHEALVGGAREGVVRTSCASTCSSAAQPVPRGRGGRGATEAECLRSRL

SEQ ID NO: 211783 - protein, 67 aa, Zea mays
  Clone ID: MRT4577_124744C.1.pep
IRNGSWHTLFIDEGGSDQASMVSTDIQALDRGRHQRSTEDDLSVVNSPVMTVYTALAHTPVLHTFDE

SEQ ID NO: 211784 - protein, 68 aa, Zea mays
  unsure (1)..(68): unsure at all Xaa locations
  Clone ID: MRT4577_124745C.1.pep
MFPIAPSVIVENLNPKVLKCEYSVPGEIVIHAXSLHXHLQTQPGSLSFDEILFLNISNPQSLCQLPFK

SEQ ID NO: 211785 - protein, 326 aa, Zea mays
  Clone ID: MRT4577_124746C.1.pep
MALVAGSYERFIWGFSLKTLTTPSATGASLSETLTLAPLFSYPAHTGPVRCVAAAPRAGLVASGGADDSVRLYDLPSAADLGPLLDPSAAVSALAFYSRGPVPRNLLAACDDGSLHIYDADGFALLSTLRAFPRHEAAEALAVHPSGRVALAVGRAGAFAMLNLVRGRRSFACRLEHPASAIAYAEDRDGGDRFVMAAENKVSVHDSVDARVIHDMDCGKKVLAMAPAKSGVLYTGGEDRCITAWDLSSGKVSSRIEGAHATRVKGVVVFGNSNDGSQLSNLISSASSDGVIRIWDIRTIGNGKPTPLAEANTKARLTCLAGTSLK

SEQ ID NO: 211786 - protein, 70 aa, Zea mays
  Clone ID: MRT4577_124747C.1.pep
ELSILHYTKISSSSCLATALSSVQLHCTPFHSILFYYNQTSLSSSSCTSTPWHPSPFTKYRFKKCLLLLH

SEQ ID NO: 211787 - protein, 65 aa, Zea mays
  Clone ID: MRT4577_124748C.1.pep
KDSLVHESRTIDEAKQLNRVPSPYVRPPTMENTRPNSNSNRETERKTESYDTQKKSNGVKVKKKT

SEQ ID NO: 211788 - protein, 86 aa, Zea mays
  unsure (1)..(86): unsure at all Xaa locations
  Clone ID: MRT4577_124749C.1.pep
KALAEFEEKMNEXWKKELEKHREKLLSGSESLSKKRQRKIKEKKKSGRYSSSSLSSSDSSSSSSDSEDEDKKQGKRRKNKKXRSHK

SEQ ID NO: 211789 - protein, 105 aa, Zea mays
  unsure (1)..(105): unsure at all Xaa locations
  Clone ID: MRT4577_12474C.1.pep
NLPTFAASTLCGTANLXTDSVCIGERXVDGEDCFVLKVEAEASRLRARNSGSVEIDRHTLWGYFSQRTSLLVXLEDSHLLQIRCSQSRRSTSILSETTRECTLGN

SEQ ID NO: 211790 - protein, 83 aa, Zea mays
  Clone ID: MRT4577_124750C.1.pep
GVQSATVSPQLRSQLPPPQCKIILGILTNATPALILLFSRTILIPLPCGVLRSCEYSERDRTARIIPTGKVSMQLFEMARSCA

SEQ ID NO: 211791 - protein, 161 aa, Zea mays
  unsure (1)..(161): unsure at all Xaa locations
  Clone ID: MRT4577_124751C.1.pep
RSAYKDIITAAXGSATIDSEVFGDAWNSMLYYRAXYPEDSFSYVKRYWLTMLLTHDEGVNNFIVSLTSQLSGXKLQRIXLVIMSKVTRRGALSXNFNIATDDEVIDKEVINDNSDNDIMXREIQVIVRQISSCITYLPXRLVMTCVHVLAFADTDVCATGT

SEQ ID NO: 211792 - protein, 62 aa, Zea mays
  Clone ID: MRT4577_124752C.1.pep
SGYNGKRSSLAPLAGGFASGLGGLWVVPLASHQRGLLVPKLLFPLSSSSANLVIMSVWVMFD

SEQ ID NO: 211793 - protein, 124 aa, Zea mays
  unsure (1)..(124): unsure at all Xaa locations
  Clone ID: MRT4577_124753C.1.pep
LKQMICCCNKMDATTPKDSKARYDEIGKEGFFYLKKGGYNPDKIYFVPISGFEGDNMIERATNLDWYKGPTLLEGLDLINEPKRAXNKPLRLPLQDVYKIGGIGTGPVGRVETGVIKPGMVVLL

SEQ ID NO: 211794 - protein, 215 aa, Zea mays
  unsure (1)..(215): unsure at all Xaa locations
  Clone ID: MRT4577_124754C.1.pep
SRLPLVSPRCRTGWSPCFTLGGKQMICCCNKMDATTPKYSKARYDEIVKEVSSYLKKGGYNPGGGHFXPISGFEGDNMIERATNLDWDKGPTLLEGLDLINEPKRASDKPLRLPLQDVYKIGGIGTGPGGRVETGVIKPGMGVTFGPTGLTTEGKSGEMHHEALQEGLPGDNGGFNVKNGAVKDLKRGYVASNSKDDPAQGAASFTCQGIIMNHP

SEQ ID NO: 211795 - protein, 221 aa, Zea mays
  unsure (1)..(221): unsure at all Xaa locations
  Clone ID: MRT4577_124755C.1.pep
XXXXXXXXXXXXXXXXXXXXXXXXXXXXXXXXXXXXXXXXXXXXXXXXXXXXXXXXXXXXXXXXXXXXXXXXXXXXXXXXXXXXXXXXXXXXXXXXXXXXXXXXXXXXXXXXXXXXXXXXXXXXXXXXXXXXXXXXXXXXXXXXXXXXXXXXXHPTISPPLSHRCRRSPREKAPPLLVVVRLRRRRVFCLARAPVGLPRLAVASGGVLSAPICPSVVWAGV

SEQ ID NO: 211796 - protein, 118 aa, Zea mays
  unsure (1)..(118): unsure at all Xaa locations
  Clone ID: MRT4577_124756C.1.pep
NPGAPMDVFVPKVGELIGGTQREDRLNVFKQRILYAGLPLDPYEWYLAPRPFGSVKPSGFGLGFXRKILFAPGMETPRDVIPFPRSPGRADLCSLEPLVYPMRVEFPPRLVIFICFPR

SEQ ID NO: 211797 - protein, 80 aa, Zea mays
  Clone ID: MRT4577_124757C.1.pep
EVKVSLRTLRLERGAGVTVDAAGMLFVVRKDGSQVCLAMASLSYEDETPIIGNYQQKNKRVVYDTLGSRLGFADEDCNYV

SEQ ID NO: 211798 - protein, 103 aa, Zea mays
  unsure (1)..(103): unsure at all Xaa locations
  Clone ID: MRT4577_124758C.1.pep
AGSYTTILRKVGALCRLRSCIAGAPPGVRLTAFHPDREALMYCDVKNSEHTFXVLKDRTRPIMFXMARLDRVKNMTGLXEMFXGKNARLRELANLVSVCGDHG

SEQ ID NO: 211799 - protein, 116 aa, Zea mays
  unsure (1)..(116): unsure at all Xaa locations
  Clone ID: MRT4577_124759C.1.pep
GGQKEGGRGGKQGGNGKGTRAKNPPQGHKKKGGNTESPNGAKKTTKGPKKQXPGPGAKNPNTERGAPKPGKGAXKPGTGTPMRETPPKHKGXGGPRAPEKPAKLPGNPHKKMGHTP

SEQ ID NO: 211800 - protein, 223 aa, Zea mays
  unsure (1)..(223): unsure at all Xaa locations
  Clone ID: MRT4577_12475C.1.pep
MLQVRASPAFLPSTSSPSPPSSSQAPAPAPFRLSGKSQRRGGLVAVPQASRVARRSVMAAAGAAAAAPAAAKLEDADALIDSVETFIFDCDGVIWKGDKLIDGVLETLDLLRSKGKRLVFVTNNSTKSRKQYGRKFETLGLSVDEEEIFASSFAAAAYLQSIDFPKDKKVYVIGEEGILKELELAGFQYLGGPXDXIVVLQTDGDKKIELKPGLYMEHDEDVG

SEQ ID NO: 211801 - protein, 89 aa, Zea mays
  Clone ID: MRT4577_124760C.1.pep
ERPPGQVQAFFFFFFFFFLFFFFFFFFFFFFSEQITTPACQANTTGCKTSTIPGQGEHLSQPPTRVAPPQQRLGFSQNKPGRGDHTWDH

SEQ ID NO: 211802 - protein, 95 aa, Zea mays
  Clone ID: MRT4577_124761C.1.pep
TPPTTPASHALIVYCTSPLALAPYFLTEDSSANLSSTITARTTNISSNGELRADALILAAQPVNQDCYLRNTARMLNNPMDKRKTHALSYNLCIN

SEQ ID NO: 211803 - protein, 26 aa, Zea mays
  Clone ID: MRT4577_124762C.1.pep
VKHGLNHFITGELQAWNNSHHLLKYR

SEQ ID NO: 211804 - protein, 102 aa, Zea mays
  Clone ID: MRT4577_124763C.1.pep
SSALDQISSHRDANMFATALREKDAPNYRQIVLQPQDITSIRSAIKAGNKAALQAAANLSGGDPGTASVWLPISDDLVPPRGIINSAHLERELVHMFCMPSC

SEQ ID NO: 211805 - protein, 56 aa, Zea mays
  Clone ID: MRT4577_124764C.1.pep
QLERVKNAPRSLGTIKTLFPFSCKGHVYKKNWSNWTIQVLLRPFFQPTVMYRLVSP

SEQ ID NO: 211806 - protein, 156 aa, Zea mays
  unsure (1)..(156): unsure at all Xaa locations
  Clone ID: MRT4577_124765C.1.pep
EQETAGKGEGPAIGSERGTTXSSAGAGQNDRGESIANDQGNRTTPWGGGTTDSKRPIGEAAKNQAAGNPINTXXEAKRRIGRRSSDASAQSDIKLWPFKVIAGPGEKPTIAVQHKGEEKQFAAEEISSMRRIKMREIAEAYLGSTIKNAGGTVPAY

SEQ ID NO: 211807 - protein, 154 aa, Zea mays
  Clone ID: MRT4577_124766C.1.pep
KAEKAKKQDSVDAAASDVGSCVSLSLATDERSEAASESSVATSSVAGPERSPRTKPARRRPASADLGSARRERDRDRAVAASYGVRSRSARASASPPPRQVPRDRSVRHSPSPAAKRRALSEPRRATSPTPSVQRKPSVPARPASRVWLPSFDF

SEQ ID NO: 211808 - protein, 90 aa, Zea mays
  Clone ID: MRT4577_124767C.1.pep
PIGDWVPQGRPGSPRNTVLPPTSSSADCPHPLHSQATTTLNPDSPLRRKIQLGYNRLEKNKMHLTVGTVRLHGNDSKYDGLQHITAAKPP

SEQ ID NO: 211809 - protein, 85 aa, Zea mays
  Clone ID: MRT4577_124768C.1.pep
PKFFPQKAREPEKKNHNPQWNPGFWPSKLTHVSLACHAVQCFTKTQKTLLQGGGPPGELNLWKGWWARKGNSFKGPLQKKKGRKV

SEQ ID NO: 211810 - protein, 85 aa, Zea mays
  Clone ID: MRT4577_12476C.1.pep
RTPTWYAPAKQLYVGDRWQVADTPAPWQLWMVVLNNGSVDTTRAACPENGRTARTLAQTSRLAFPARARWMAHGLVFDNRTARGR

SEQ ID NO: 211811 - protein, 72 aa, Zea mays
  Clone ID: MRT4577_124770C.1.pep
PAGPREDLEETEPELVWGCPCPVCGRWNGKLDTNNHILCMGCRGHYCALCRRRVMKSSEHYGPRGCQQHTDP

SEQ ID NO: 211812 - protein, 40 aa, Zea mays
  Clone ID: MRT4577_124771C.1.pep
DYMSCHKATTRCEVEQGITCIALMLKCTQSLLQYLYLIYS

SEQ ID NO: 211813 - protein, 82 aa, Zea mays
  unsure (1)..(82): unsure at all Xaa locations
  Clone ID: MRT4577_124772C.1.pep
MKEIIKPMKTGNIXWGSETDTRKTRILKKDYNASNNELVRTQTLVKKAIVQDNAVPFKHWYXLTYYRLDIGKNKKTPGGKKD

SEQ ID NO: 211814 - protein, 385 aa, Zea mays
  unsure (1)..(385): unsure at all Xaa locations
  Clone ID: MRT4577_124773C.1.pep
RXIEWSGYRXLFGIIKEFKLKVQVVLSFHGSGETGSGDVLISLPKWIMXIAKENQDIFFTDREGRRNTECLSWGIDKERVLRGRTGIEVCFDFMRSFHMEFRNLSEEGLVSSIEIGLGASGELRYPSCPETMGWKYPGIGEFQCYDRYMQKNLRQSALSRGHLFWARGPDNAGYYNSRPHETGFFCDGGDYDSYYGRFFLNWYSGVLMDHVDQVLSLATLAFDGAEIVVKVPSIYWWYRTASHAAELTAGFYNTTNRDGYSPVFRMLKKHSVILKLVCYGPEYTVHEKDDDEAFADPEGLTWQVINAAWDQGLPLCIESALPCHNGEAYSRILDTAKPRDDPDRHHAAFFAYRQQQQPPLREACLSELCTFVKCMHGEAPQNGEG

SEQ ID NO: 211815 - protein, 104 aa, Zea mays
  Clone ID: MRT4577_124774C.1.pep
LSLRCPPPWAWAGKRKPSLLLSTAIPWGTQTGTGLGRKEEDGCDQHSSRITWAALVNVSRLNTNWVNQLLFRSPEWALPLYYPAELHYILHVCSVQPTSNRADG

SEQ ID NO: 211816 - protein, 101 aa, Zea mays
  Clone ID: MRT4577_124775C.1.pep
LGLLRAWRLWGFAGVVLGFLGAPGLSSVCPCGCLCLGAVVLHCGCCGLVGARFAVVVSGSSRVLPCLLGCVGPSLDCSPLFFWAAAAESTGRPGSYSGPVP

SEQ ID NO: 211817 - protein, 339 aa, Zea mays
  Clone ID: MRT4577_124776C.1.pep
RPGIAKENQDIFFTDREGRRNTECLSWGIDKERVLRGRTGIEVCFDFMRSFHMEFRNLSEEGLVSSIEIGLGASGELRYPSCPETMGWKYPGIGEFQCYDRYMQKNLRQSALSRGHLFWARGPDNAGYYNSRPHETGFFCDGGDYDSYYGRFFLNWYSGVLMDHVDQVLSLATLAFDGAEIVVKVPSIYWWYRTASHAAELTAGFYNTTNRDGYSPVFRMLKKHSVILKLVCYGPEYTVHEKDDDEAFADPEGLTWQVINAAWDQGLPLCIESALPCRNGEAYSRILDTAKPRDDPDRHHAASFAYRQQQQPPLREACLSELCTFVKCMHGEAPQNGEG

SEQ ID NO: 211818 - protein, 263 aa, Zea mays
  Clone ID: MRT4577_124777C.1.pep
MEMHRPLRILLPIVVLVAAAWPSVPAGADDSAWSKGTATFYGGGDASGTMGGACGYGDLYWSGYGTETAALSSALFNDGAACGECYRVTCDDGASQWCLPGTGRRSVTVTATNLCPPNHELSGDDGGWCNPPRRHFDMAQPAWLRIAQYKGGIVPVLYQRTACVKQGGVRFTVSGSNYFVLVLISNVAGSGSVKAVWVKGSATDRMPMARNWGANWQSLAGLAGQALTFGVTSTDGRTVVVPDVVPAWWKFGQSFTSGVQFSN

SEQ ID NO: 211819 - protein, 87 aa, Zea mays
  Clone ID: MRT4577_124778C.1.pep
VGVVRSNVHNREHRSLPPTSVYWPVHDVCKERLQFANRSDAVNALVFAETLVSNALKSAAPWYLSTWVRRTRLDIVWHNGAAIVVGL

SEQ ID NO: 211820 - protein, 162 aa, Zea mays
  unsure (1)..(162): unsure at all Xaa locations
  Clone ID: MRT4577_124779C.1.pep
KQKKLETPGPKKRKKKKPKARGGGXGKRGEEKEERAGGGGGEGGGAKRRTRGGGEGGGKREKTGRTKRPGPGATGGTSARASRTRSPSAPGKNLVAPPPPPPNPGERRAGXTRRPSGGNEGGEGKANRGNRTRGGSRELQTGTGTRTTAANRESNKSTAKTT

SEQ ID NO: 211821 - protein, 408 aa, Zea mays
  unsure (1)..(408): unsure at all Xaa locations
  Clone ID: MRT4577_12477C.1.pep
MLQVRASSAFLPSTSSPSPPSSSQAPAPAPFRLSGKSQRRGGLIAVPQASRVARRSVMAAAGAAAAAPAAAKLEDADALIDSVETFIFDCDGVIWKGDKLIDGVLETLDLLQSKGSNNKNVVFFSSRCVNVLSVIITYSRQVFQILTFSXGRRPFQGKRLVFVTNNSTKSRTQYGRSFETLRLSVDEGEIFASSFAAAAYLQSIDFPKDKEVYVIGEEGILKELELAGFQYLGGPTDGDEKIELKPGLYIGFVEDVGAVVVGFDRYFNYYKVQYGTLCIRENPGCLFIATNRDAVTHLTDAQEWAGGGAMVGALLGSTKQEPLVVGKPSTFMMDYLAKKFGITTSQICMVGDRLDTDILFGQNGGCKTLLVLSGVTSLQTLQSPDNSIQPDFYTNQISDFLTLKAATV

SEQ ID NO: 211822 - protein, 63 aa, Zea mays
  unsure (1)..(63): unsure at all Xaa locations
  Clone ID: MRT4577_124780C.1.pep
AEQFQATPLIILXCTHIWXALPMQLCKXMEXXXHFFGCQRLKVANRDASXQLQFVYVTTSYLN

SEQ ID NO: 211823 - protein, 52 aa, Zea mays
  Clone ID: MRT4577_124781C.1.pep
TYGFSCLALLKLAALDALPLVFLSSLLCVCASGVKIASFVSRGTTTTRPRVR

SEQ ID NO: 211824 - protein, 60 aa, Zea mays
  Clone ID: MRT4577_124782C.1.pep
NPSHPTSLLYTYLITSTLHSSHHISHSISYLLKLFLSSLNLSNHSFFLIHLLSFFTSFLK

SEQ ID NO: 211825 - protein, 55 aa, Zea mays
  Clone ID: MRT4577_124784C.1.pep
FKEVVVGVTWSCGSCDVFYHFLFIWTLLQLDGSGQLLIGSLIACMQCNLTTDKLY

SEQ ID NO: 211826 - protein, 65 aa, Zea mays
  Clone ID: MRT4577_124785C.1.pep
VCVCGGGFFFFNAGFRFLAVKAEPMHGCIMQMQSIESRHSQVRLKQNATPLYWGGGGPASQIKPR

SEQ ID NO: 211827 - protein, 202 aa, Zea mays
  unsure (1)..(202): unsure at all Xaa locations
  Clone ID: MRT4577_124786C.1.pep
LGTSRPAGIRPLLAFDPRILLEISHSAQPQEWRNVDGDEHGARSSRKLFRRLFTKNEMRILMDGLXSGGKTTILYNLMLGEIVTTIPTIGFKVETGDYXNISFTVWYVDGHDNIIPLCRDYFQNTHRIIWVVNSNDRDRVVEATYELHRMLIDDDXRRAALLAFANKQDPPNAMNDAEITDKFALHSLRXGHWHIRSTSAST

SEQ ID NO: 211828 - protein, 75 aa, Zea mays
  Clone ID: MRT4577_124787C.1.pep
APLGSQPPDQPHPTSTGAQLSSNFGVWPLRTPEWLLSVAWAITSPITQLTLTSTSLRPPLAPAKTQRSGNGPPWA

SEQ ID NO: 211829 - protein, 205 aa, Zea mays
  Clone ID: MRT4577_124788C.1.pep
MTALSSWPRTGRSGITAGGGASTIPTSVATGGSAGESATAPVGVDAGAGNESAGLEAAATSAASPSVMAAPTGGQPGRFAPWQLVPPGPPPESALCGGQPTGMARRSTGCRGRPRLKGLRGGQTGRALPPLAERKRERESKFKTHREETKTKVSSDTYPLRGKANRARGEAPQAPVSAGAAEGCPAVGFRAAFASGARGTEGRPA

SEQ ID NO: 211830 - protein, 56 aa, Zea mays
  Clone ID: MRT4577_124789C.1.pep
KRFMRQNCSKNHKKSENNRKYFRKCNRSIDSYIDSKGINLVILMLLVCCNKDHATY

SEQ ID NO: 211831 - protein, 119 aa, Zea mays
  Clone ID: MRT4577_12478C.1.pep
WLPEVQSRCLFLALAPAPASRFLGSPRSPPSLSSAPIYLLSLQRRPSPAGAQPSGPSSLSLKLSARREAPARRSLPSSPWLPDESLPSLLVLFELGSCARAPLLPWRVPAPAWISLLSS

SEQ ID NO: 211832 - protein, 77 aa, Zea mays
  unsure (1)..(77): unsure at all Xaa locations
  Clone ID: MRT4577_124790C.1.pep
AVVVMPVVVKHILLISLQAXNPPNQHCHQLQVLHLFRNHLLQKLILPNKFLIELPVKPIASTXLIDKTISTFLPTLL

SEQ ID NO: 211833 - protein, 70 aa, Zea mays
  Clone ID: MRT4577_124791C.1.pep
AACHVTAAPSLVCYVLQSAMSCKPLVVLCGPGPDCSLWARATRSGPVVPAPVASGREASFPRAVACSQTL

SEQ ID NO: 211834 - protein, 76 aa, Zea mays
  unsure (1)..(76): unsure at all Xaa locations
  Clone ID: MRT4577_124792C.1.pep
PPPPQHPHTYHTPNTQHCPVCAPITXPSNPINASQQPHTLKTSHLVWHXTLQMIALPPNALXKLIXXKTVPSRYGQ

SEQ ID NO: 211835 - protein, 144 aa, Zea mays
  unsure (1)..(144): unsure at all Xaa locations
  Clone ID: MRT4577_124793C.1.pep
GNPRRPAFFLPLGGGAXXXLXXVGAXIRVVGGXPPVLLRLVFAGXLLVGGRSLAVCCLXXGSRRGGGLRLLGGLLVFVRTLAGGPFALGVGSSVSVAGVPALVLGGGGVPPXPSRLLFAGGPFAAGRPLAGFRFLAVRSLPLVL

SEQ ID NO: 211836 - protein, 53 aa, Zea mays
  Clone ID: MRT4577_124794C.1.pep
IIFFFFYIKLGGFLNSWGGFITCDLLRILFIQTDSNVSTIITLLCTGSINLPC

SEQ ID NO: 211837 - protein, 59 aa, Zea mays
  Clone ID: MRT4577_124795C.1.pep
VAALHLLVQLDRGRSWVVQFQKDVALLSGCVGLLHRNGLNSREETFTMGSNTREGYAPS

SEQ ID NO: 211838 - protein, 47 aa, Zea mays
  Clone ID: MRT4577_124796C.1.pep
AMISSTHMRNFYSNSRISPKTNHISGRNILDSALKLTKQWYSRNKRN

SEQ ID NO: 211839 - protein, 96 aa, Zea mays
  unsure (1)..(96): unsure at all Xaa locations
  Clone ID: MRT4577_124797C.1.pep
DFSGLRPGSCSVERLPRGQASFSDVLGAQXVANATGENAVRAPAEANSKVAINGFGRIGRNFLRCWHGRDDSQIDVVVVNDSGXLRNASHLLKYDS

SEQ ID NO: 211840 - protein, 85 aa, Zea mays
  Clone ID: MRT4577_124798C.1.pep
INCPPFYNVLTGKTLPFPNLIPLHKIPFSPVGLLPKRPSPFAFPNIFPPYNGKWNPPFIAPLTPACFVFTPIFTVTFANSLTPVL

SEQ ID NO: 211841 - protein, 43 aa, Zea mays
  unsure (1)..(43): unsure at all Xaa locations
  Clone ID: MRT4577_124799C.1.pep
MPGEXTETVPATEQELPQPQAETGSGTESDSDESVPELEDQDS

SEQ ID NO: 211842 - protein, 122 aa, Zea mays
  Clone ID: MRT4577_12479C.1.pep
FLYTEGQSNFTKLLQYLFIFFGCGTRTSHLIQTHIWNLTPHIIYPEHNKTDSTNRAIQKEKLDPSITDGFLVLSPKPHTINPIERLMRIVHESLRTSQAYGKLKKPPGKIELFLQGLVFRDI

SEQ ID NO: 211843 - protein, 216 aa, Zea mays
  Clone ID: MRT4577_1247C.1.pep
SQEGKAAAQAQKANQSHTTTTTGSCREPRPRPNTRESGRRGKPNPSTPPRTPPPSLSLPSSRAHGPQIASAATSAPAPAAAVAAAAAAAVCFASSPGMARLGRAGCRSGPARAFFSGIPEDTLRNFMSNVLPAVLILEFLSGTNLIVQTFALKVVAPAMPPFQGWGPFHSLASQTKVLVSVSAQPDDGLQSAPLLTHTLTLSLSLSLSLSLSIVSL

SEQ ID NO: 211844 - protein, 57 aa, Zea mays
  unsure (1)..(57): unsure at all Xaa locations
  Clone ID: MRT4577_124800C.1.pep
VQCLIAVGFRDDSTVIYLVDILKLQXFTREYQRFIFTFMGHSHLIMCSHMARVLDRS

SEQ ID NO: 211845 - protein, 94 aa, Zea mays
  Clone ID: MRT4577_124801C.1.pep
ACCHGPVRFVSFAHSGLPVVGVLTCLHSISVVSRADLLPVSLHNLVACFLCPMAQGQYLPHTGCHGWAVSSSEPLRPSQYRSSPSPVRSWPRAE

SEQ ID NO: 211846 - protein, 89 aa, Zea mays
  Clone ID: MRT4577_124802C.1.pep
KQYVHFFLPFIHKILPAPKKHKMRGGARKTPPETSLYRRKQTKNYSLLQIKEEPRTLNGREGTTKPLIVVLKKLGVNTPPSPGQKSSLL

SEQ ID NO: 211847 - protein, 40 aa, Zea mays
  unsure (1)..(40): unsure at all Xaa locations
  Clone ID: MRT4577_124803C.1.pep
LPENAKVDQVKAGLXNGVLTVTVPKAEEKKPEVKAIEISG

SEQ ID NO: 211848 - protein, 414 aa, Zea mays
  Clone ID: MRT4577_124804C.1.pep
MDLERSPPPSPAEAAGAAACSICLDPVLACVAGRSVAKLQCGHEFHLDCIGSAFNAKGAMQCPNCRKIEKGRWLYASGRHPPADIDMGGWVTSDNYDITSELPFGFQWCPFSGFTQLASMFGVREAEPTYHTTGDHSSAASSSLVCPYLALRGFLHPVHVPSTSNSGAESTSFHRHSTGLEGHVTPDLNNAPVFHATESRNHDSEHRHLSNLPVSGTPEYSMTPFGIGVPRYDSGSQQGFRSYAHHHPLIHRLTPRSGSNLVAPLGSVPAVVAETRGHGHGAPGHMYQHSSVQGSPFPPTTRRVRPRALTITSFIAATSSAEIAGPLGHGFPAPGAVNRSVSDAEGIDRAYTWGREGYDLFPWTPAEWGTFNPMQNHAHGSFTRRPAGERMPQSRPENGYQPPVPTSQRMPPFL

SEQ ID NO: 211849 - protein, 78 aa, Zea mays
  Clone ID: MRT4577_124805C.1.pep
SKWSLGNYRGFVMSAAVQGEGRCSKPTVEVGVAHVGCAEDAAAFVALAAAVDLSMDACRLFSHRLRKELSHPQADLLR

SEQ ID NO: 211850 - protein, 97 aa, Zea mays
  Clone ID: MRT4577_124806C.1.pep
GISRVVLSSLLRLETARDQALLLFISRESIENGIPEYVGYSLPGMGKPNYHADGHRLAQACWYCDAAESGRCRVFTDIFQKARYDNNTTTVPGAENA

SEQ ID NO: 211851 - protein, 373 aa, Zea mays
  Clone ID: MRT4577_124807C.1.pep
MRFHAEGGHPDSERERGAFARSNSLASASSSPACSAARQTNHSRRRCRPRRAGSAVRSLPISRGPYNSKTLMMATTAYIDDSCSEVIDPPKTEVLDVAELPGDHTQNPPKPNVVVSSSVRELLECPVCLSAMYPPIHQCSNGHTLCSGCKPRVHNRCPTCRHELGNIRCLALEKVAASLELPCKYQCFGCPGIYPYYSKLKHESQCQYRPYSCPYAGSECTVAGDIPYLVNHLKDDHKVDMHNGCTFNHRYVKPNPHEVENATWMLTVFSCFGQYFCLHFEAFQLGMSPVYIAFLRFMGDDAEAKNYSYSLEVGGTGRKMVWQGVPRSIRDSHRKVRDSYDGLIIQRNMALFFSGGDRKELKLRVTGRIWKEQ

SEQ ID NO: 211852 - protein, 47 aa, Zea mays
  Clone ID: MRT4577_124808C.1.pep
VGETCKDANFSVRPPSLSVCCPLVSPGKVRCAGDHFICKCALLLIIL

SEQ ID NO: 211853 - protein, 64 aa, Zea mays
  Clone ID: MRT4577_124809C.1.pep
TRRSFTTKCQPYVSTWTAIDSGSVTGTCRNTGTYGLRAPPCLLGNQRIVGMPSYGAVHGGTSGK

SEQ ID NO: 211854 - protein, 182 aa, Zea mays
  Clone ID: MRT4577_12480C.1.pep
SFSTFWGWVWHAVRSRPTKWHAFGGFVLQVGAVVVGFDRYFNYYKVQYGTLCIRENPGCLFIATNRDAVTHLTDAQEWAGGGAMVGALLGSTKQEPLVVGKPSTFMMDYLAKKFGITTSQICMVGDRLDTDILFGQNGGCKTLLVLSGVTSLQTLQSPDNSIQPDFYTNQISDFLTLKAATV

SEQ ID NO: 211855 - protein, 124 aa, Zea mays
  Clone ID: MRT4577_124810C.1.pep
LLADSHQNAWKWKQQCRDWRPCPWRWRSWRGCAAGGNDDGSSGPNPSRRSSRQRRCRLVRRVRRQSSSRRHPQRSLGLPRFADLIGQTPPLYQTVRECASTLSFFFSSIRKKKILLVFSLLSLG

SEQ ID NO: 211856 - protein, 86 aa, Zea mays
  Clone ID: MRT4577_124811C.1.pep
RMFCSTDWEDLFPGFLLQSAASQDSDHCPLLLGLQDVNRAKGCFFFQAFWVKLEGFHDTVAQAWSLVAPGPCPFVTLSRKLQGTAR

SEQ ID NO: 211857 - protein, 96 aa, Zea mays
  Clone ID: MRT4577_124812C.1.pep
GLQELHEQYELRENTGAAAISQALAPGSLCGQISEKALELVNASGAAAQQRSTKHQRLDRGPAGSQLLQYLRSQRRFPCKALVIFSHQAEMKHTNN

SEQ ID NO: 211858 - protein, 92 aa, Zea mays
  Clone ID: MRT4577_124813C.1.pep
RLVKRQMITFQIGSLEYCCDLCFEIDIVFSGSLANLIVAALTFHGVFDLWGGGGWETVNPFFKVVQLDGMPNQWGYSPEILDGMSMQIWWTE

SEQ ID NO: 211859 - protein, 187 aa, Zea mays
  unsure (1)..(187): unsure at all Xaa locations
  Clone ID: MRT4577_124814C.1.pep
AFRNTLTKRTNNDLATLATKMXSIFAPFALLVSTSNAXIMADASLGPSALITHGLLAATAVGLGQPAPQAYTLLEALAAGVFQQPTAQLQQQSLGHMTIHTIGTQQGQPHLASLNLLHAVNPAAYLRTSRCIDTHNPVALANIVAFQQQQQLRQXLPALRPLAMTDPAAYLQQLQLFSSSPLAVVNA

SEQ ID NO: 211860 - protein, 78 aa, Zea mays
  Clone ID: MRT4577_124815C.1.pep
KTSPLILASAPPNFSNHLARQWPPHFFLRQFPFSKTFLTIFFFIHLLWNQAALHLSNTHPRAAATTTILSGFNKTQPK

SEQ ID NO: 211861 - protein, 45 aa, Zea mays
  Clone ID: MRT4577_124816C.1.pep
SKHSTGRQHESTQNQWFLAHPADSHGLQYIIRRVNRDEVAASSVA

SEQ ID NO: 211862 - protein, 46 aa, Zea mays
  unsure (1)..(46): unsure at all Xaa locations
  Clone ID: MRT4577_124817C.1.pep
LSFDSITXDXVKVFVAGPSKPGAXFPNAARWYETVFSAXASKFPGK

SEQ ID NO: 211863 - protein, 58 aa, Zea mays
  Clone ID: MRT4577_124818C.1.pep
TARGTVHLFIGTRRNLCGFTSMPLTFTIDLGIIYQGLDNLFPFKPVSFSTAKPKLLHT

SEQ ID NO: 211864 - protein, 196 aa, Zea mays
  Clone ID: MRT4577_124819C.1.pep
LRKLGVGACTVVGFSYGGMVSFKMAEAHPDLVRSLVVSGSVVAMTDSLSEATLEGIGVKSSAELLLPESVKGLKALLSVATYRKLWFPDRLHRDYLEVMFTNRKERGELLEGLVVSNKDATVPVLPQKILLLWGENDNIFNIELAKTMKEQLGEKTTLQSISKAGHLVHLERPCVYNRLLKEFLACVTATETTNKE

SEQ ID NO: 211865 - protein, 68 aa, Zea mays
  Clone ID: MRT4577_12481C.1.pep
GCLLTALSFVRGSPTPGCSLKHLVNNHGGVRGARFVKLSLLEATFKSYGPWVEHSFPNLLRGSWTTPP

SEQ ID NO: 211866 - protein, 72 aa, Zea mays
  Clone ID: MRT4577_124820C.1.pep
FGKFRSVNYHPIGTVVILRLVAREHPLVPEIQSGSNKNHEFEFPGLNQQLYFRQNLGVVCELNIRGWVVLLL

SEQ ID NO: 211867 - protein, 127 aa, Zea mays
  Clone ID: MRT4577_124821C.1.pep
VIITEHIPITNLFTCLWFNEVDRFTSRDQLSFSTVRDKIRWRVNWTADMFLDCERRDFVVQSYHRELLEQRQSALRRWPPQRSPIARFQPRKMLPDNAAREPWKASATKKLSRKRARDKKSSSRRTH

SEQ ID NO: 211868 - protein, 237 aa, Zea mays
  unsure (1)..(237): unsure at all Xaa locations
  Clone ID: MRT4577_124822C.1.pep
TTTVPDPVSSERPLRPPRVSVASPSPSGRRFPSDTTAIASWLPSPAGAGRGDDLSLGFNAGAASASSGASLAAGLWGSSASRQAAAAAAAAAAAAALGYGAIGPTGDVGMLVVAPPGSFHHQRAADDDDPVLPLVTAAQRTLVNADAASGXATAIRPCRPLVPSSFGTRSRPRMGMGPTARRPSPXLDHASGGSGSGSGGATCQDCGKPAKKGCAHSRCRTCCNSRGFECDTHVRST

SEQ ID NO: 211869 - protein, 55 aa, Zea mays
  Clone ID: MRT4577_124823C.1.pep
PISDSRTDNTLSILRRRRECTTLDLIDVELHVHRNTLMWDPRVRIVRIRRLYFSV

SEQ ID NO: 211870 - protein, 107 aa, Zea mays
  Clone ID: MRT4577_124824C.1.pep
MMPTKKMRTKARTVICSRHGGPAWSEKALSTDSAFTCRVVVVGGREMGGGAPVVALPLLAAALGSSVAVPESAGLLRRLLLDGCAAGCGGMRRHLWLGGALFTLSES

SEQ ID NO: 211871 - protein, 100 aa, Zea mays
  Clone ID: MRT4577_124825C.1.pep
GQGRGAACRASFLTQQQLLPFYQQFADNPETMLQLQQWLPFEQLALTNPAASYQQHMIGGAHFDIAYYMELNNKDLRMMCEDSQKLEPTFPDSSVKMMLL

SEQ ID NO: 211872 - protein, 220 aa, Zea mays
  unsure (1)..(220): unsure at all Xaa locations
  Clone ID: MRT4577_124826C.1.pep
MLNFPPKWHDPSHDELSFANELLQLHFQSALEDLLTICQTKVHSDTAGDEKEHLKITLLRIHSALHGVMSCLPEIRPSYKDGRSLEVESAFFIAGSAGSTVGSSEMREKAAEFVHIACRYLLKERTDDSILLSLVVRVIDALVNYGSLEYQEWSSHVQAWKLESASIIEPPCNFIVPFHAQGKKRPRWALVDKAXLHSTWRCSQSSYHRYRMMQMFATVP

SEQ ID NO: 211873 - protein, 67 aa, Zea mays
  Clone ID: MRT4577_124827C.1.pep
WSSVISFPGEQGIPQHRKEGCPPRFSKEHVHSLQYPRVFIGSTWLVSFPSLFTHGRKKARVMTPGNQ

SEQ ID NO: 211874 - protein, 44 aa, Zea mays
  Clone ID: MRT4577_124828C.1.pep
ADDHHLGPNAGTLLQLQHWLPSNQLAMTDPAGFYQQPIFGGALL

SEQ ID NO: 211875 - protein, 90 aa, Zea mays
  Clone ID: MRT4577_124829C.1.pep
ESKYWLSLCVELWMHHCVLCCLKLCFRNYGSVVVVIWLNDPSCVHVSVHVCEVDHCDIESHECLSAFDMSPSYEERHIDEKYIRYMSRDG

SEQ ID NO: 211876 - protein, 208 aa, Zea mays
  Clone ID: MRT4577_12482C.1.pep
PAGFFEPLALSLAGFFFLSTHGAPSVLFPWLSAPRSSPSQAFGSSAARSSPLLAGSLSPSSMAAAPPQPSGSSPRRSLPASPSLSRLLLAGVLLLQPWHAPLLPWMPRPLLAPLASPVRAPSPRLPMAGFELTQPFLCFFHGRVSFSLVAAVFLCRGLAQPFLLFPLARVQSSSPLRLPWWPSGPYQPELARLRSRPGSCCGSPRPCV

SEQ ID NO: 211877 - protein, 214 aa, Zea mays
  unsure (1)..(214): unsure at all Xaa locations
  Clone ID: MRT4577_124830C.1.pep
IPHIVPSSSLEARFHTLSRLRIHDTPPPWPARPPPGAPPPSRAQHARNGCGRRLHLARDGADQGDGGMYDSQLRKEVLSHFHLAQRVFLSFSVIGYHTXSSHPEMYKXPFTISLFMRPMAICSSLTIEVVRVLREEELPRSPSMTPQFYSSSRVHMVAVYEMSLWLSNSHYIXLLPSFVQMLKVVMPMAVYSILVLFMNETLRYSSMIKMTYVS

SEQ ID NO: 211878 - protein, 188 aa, Zea mays
  unsure (1)..(188): unsure at all Xaa locations
  Clone ID: MRT4577_124831C.1.pep
MSVPAFIDISEEDQAAELRAYLKSKGAELSEENSEGGLHVDLAQIIEACDVCLKEDDKDVESVMNSVVSLLLILEPDKQEALIESLCEKLVKFREGERPSLRLQLLSNLFHGMDKNTPVRYTVYCSLIKVAASCGAIQYIPTELDQVRKWISDWKLTTEKKHTLLXLLYEALVDCKTSDAASKXVMVE

SEQ ID NO: 211879 - protein, 35 aa, Zea mays
  unsure (1)..(35): unsure at all Xaa locations
  Clone ID: MRT4577_124832C.1.pep
ATPAXTKMSVVAQNPWSLRRPGESXRLRCYSXPDA

SEQ ID NO: 211880 - protein, 56 aa, Zea mays
  Clone ID: MRT4577_124833C.1.pep
TSNFPSTITTLLSFMSSNSTFSMQNSSMRQSRTLVILALHRNQSRSTVISSIPIML

SEQ ID NO: 211881 - protein, 163 aa, Zea mays
  Clone ID: MRT4577_124834C.1.pep
CLAALRLPVSLAPTSRRRRRRRRPRSRKMPFKRFVEIGRVALVNYGKDYGRLVVIVDVVDQNRALVDAPDMVRCQMNFKRLSLTDIKIDIKRIPKKATLIKAMEEADVKTKWENSSWGKKLVVQKRRASLNDFDRFKVMLAKIKRGGAIRQELAKLKKEVAAA

SEQ ID NO: 211882 - protein, 120 aa, Zea mays
  Clone ID: MRT4577_124835C.1.pep
KNSLVPRGTSLPMASGLETASTVESLGVRIAVNGLEVSIGPPSRWVFGGPAGAIKVLLLGRDPQRATRIWLSAPASMGFIKYYQPRQASARNRVSVLPGGLVCSVVLCWAQRMFFKCIAL

SEQ ID NO: 211883 - protein, 120 aa, Zea mays
  Clone ID: MRT4577_124836C.1.pep
ILPPDTELDPRVSFPCVGLQELSLCRASTRISTKSARVAYHSLFCMSFLVLPSLFCDSDSHSYSLLCDSHSRLCGVRCSLLPSPRDAATRRLFSPPSLALSSLPHGVFASPIDPSHHGFF

SEQ ID NO: 211884 - protein, 679 aa, Zea mays
  Clone ID: MRT4577_124837C.1.pep
MLSNSARGKRERKRGDQRGREMLQVEEALAAVLSAAAGHAEPHAVPLQGALGLVLAEDVCAPDPLPPFRASIKDGYAVVASDGPGEYPVVTESRAGDDALGVVVVPGTVAYVTTGGPVPDGADAVVQVEDTEQLPGGADGSKRVRILARASQGQDIRSVGCDIEKDSIVLKSGEHIGPAEIGLLATVGVTTVKVYPRPTIAVFSTGDELVQPATATLSRGQIRDSNRAMLLACAVQQKCKVVDLGIAEDTEESLKEHMDAALRSNADIIITSGGVSMGDRDLVKPCLAKMGKIHFEKIQMKPGKPLTFAEITTQDTPKPSKTVLAFGLPGNPVSCIVCFNLFVVPAIRLLSGWSNPHLQRVHVRISHPLRADPHRTEFHRAAIRWVLDDGSGRPGFVAESTGHQASSRLLSMKSANALLEIPSTGQILAAGTSIQAIIISDIITSSDKLPTPSNPYPSCGPSAKSISADVSQIASPQDAEVKVAILTVSDTVSSGAGPDRSGPRAVSVVNSSSEKLGGATVVATAVVPDEVDKIKGILVQWSDIDHVNLILTLGGTGFTPRDVTPEATKMVIQKEAPGLTFVMLQESLKITPFAMLSRATAGIRGSTLIINMPGNPNAVAECLEALLPALKHALKQIKGDKREKHPRHTPHAAAVPVDQWERSFRAASSGNGGGCSCDP

SEQ ID NO: 211885 - protein, 42 aa, Zea mays
  Clone ID: MRT4577_124838C.1.pep
GRVRERVSDSRIARTDSGTSSICNYTRVIRRWQLHGASSITD

SEQ ID NO: 211886 - protein, 59 aa, Zea mays
  Clone ID: MRT4577_124839C.1.pep
AIIERLLYMSMASQFLQGTYDRNWLQCPHCFRPVFFFFFFFFFFYIIERLLYMSMASSC

SEQ ID NO: 211887 - protein, 93 aa, Zea mays
  Clone ID: MRT4577_12483C.1.pep
PHEEVSFIAHSSYICMGWAMMGTKMYRALPNGGRQERKDVHELCEKSLYIGCAYSQRDMAFLCGANRDRRTCGEEPDIRESQMTYPNFLMCSA

SEQ ID NO: 211888 - protein, 99 aa, Zea mays
  Clone ID: MRT4577_124840C.1.pep
SIYSLKKKKKKKKKKKKKKKKAGIRGSTLIINMPGNPNAVAECLEALLPALKHALKQIKGDKREKHPRHTPHAAAAPVDQWERSFRAASSGSGGCSCDP

SEQ ID NO: 211889 - protein, 92 aa, Zea mays
  Clone ID: MRT4577_124841C.1.pep
SKTIIIFLTLPVHTCLLWMMNLHVCGLPGGPPKLYTDRDKVSKSTSQLALVSQCHCKELLLCRIDTYDQRHWNHTVNECVTSSKHSERLVIF

SEQ ID NO: 211890 - protein, 175 aa, Zea mays
  unsure (1)..(175): unsure at all Xaa locations
  Clone ID: MRT4577_124842C.1.pep
MLQVEEALAAVLSAAAGHAEPHAVPLQGALGLVLAEDVCAPDPLPPFRASIKDGYAVVASDGPGEYPVVTESRAGDDALGVVVVPGTVAYVTTGGXRAFSLAPPCPFVCPGRLSDRLSLLAXPVPDGADAVVQVEDTEQLPGGADGSKRVRILARASQRQDIRSVVCKVWSLHGY

SEQ ID NO: 211891 - protein, 52 aa, Zea mays
  Clone ID: MRT4577_124843C.1.pep
LSSYSVGNTSASIIWSRTLESLLCVSCNAFVLGVLIVVSASPPVIWIPSQRR

SEQ ID NO: 211892 - protein, 53 aa, Zea mays
  unsure (1)..(53): unsure at all Xaa locations
  Clone ID: MRT4577_124844C.1.pep
HPDGRRSRKALVXXVXQAESGRERRXXPEXPHQPLDTVRRGACEXLRPRRSTA

SEQ ID NO: 211893 - protein, 188 aa, Zea mays
  unsure (1)..(188): unsure at all Xaa locations
  Clone ID: MRT4577_124845C.1.pep
PRVRPRVRPVRPPHTRVVPXEPHCRPEPGTADHVHAPPPPGHRLTVPPLPRPAXNPTTPAPRSWSSTSATSSGPPPPARPPRPRLPPRRPRPPASGGRSPRRPPATSPRAAWGCPRCSPTTITTSARPPRPSPSSRAXGETAAAARPAAVPPLGSRRRAGLAQGDAAGDGQAPPGSGAAAGRARRRLR

SEQ ID NO: 211894 - protein, 184 aa, Zea mays
  unsure (1)..(184): unsure at all Xaa locations
  Clone ID: MRT4577_124846C.1.pep
MSQIQSFSRNNCVLLVVLCGKYAEXASTSSEVXLEAKRPRPSYPFPELSSAGRLEVHTLFNPTPEQFLEAQRVVQPNFLYIQGQQLEDEKEIGSLVWGDADVSDPQAFSTLISPPFPTIVYLEVPIGEKLAQAVHSKGIPYVIYWRNXFSSYAASHFRHALMSVVQSSVSHTWDAFQLAHASFR

SEQ ID NO: 211895 - protein, 65 aa, Zea mays
  Clone ID: MRT4577_124847C.1.pep
GQNQKNFLVHQNQFRQTTLRRGQTPPRQNLEGEKKKNRFFLVLGPPQKKHLSSFGANTTIHLLGP

SEQ ID NO: 211896 - protein, 78 aa, Zea mays
  unsure (1)..(78): unsure at all Xaa locations
  Clone ID: MRT4577_12484C.1.pep
TSSRVDYEKNVXKHHKHMEKLGELGAIAAGAYALHEKHKAKKDPENEHGHRVKEEVAAVAVVGSCGFAFHEHHEMKDS

SEQ ID NO: 211897 - protein, 81 aa, Zea mays
  Clone ID: MRT4577_124850C.1.pep
WYLNYFSSHLPPFEGVHFIFASVPVVLLVLPTPSSLATYFFCISFPFPPSLACLPSTYSYSSEVRLSSSQLSLPSTFFTYP

SEQ ID NO: 211898 - protein, 85 aa, Zea mays
  Clone ID: MRT4577_124851C.1.pep
NVTMLFLLHHVVRVRDTMRVDRRKRGTGASYAKTRPWQKGGTGQASVHDQEAVTLAATLRRAPPSADPGEEERCAPRRSVQHGAD

SEQ ID NO: 211899 - protein, 47 aa, Zea mays
  Clone ID: MRT4577_124852C.1.pep
SNLKHLKKFYILPNNSFFSNHISTISITYLSLTHTNFFSLTFLYLIK

SEQ ID NO: 211900 - protein, 170 aa, Zea mays
  unsure (1)..(170): unsure at all Xaa locations
  Clone ID: MRT4577_124853C.1.pep
FGITVKAMEVQPELSLGFAPAVKIPRRSSSNSEGSGGGAGNKRKHFAWESHGSSLDLQLGDPLPLDWEQCLDLHSGRMYXPXXQEDQXTKKLGIGPEFQKKEQGHPETWELXISTNPGNLQKPTIRGATWGAETRGKMAPPPFYVCGGEPPPRGAPPKRKGGGRPPPPPP

SEQ ID NO: 211901 - protein, 48 aa, Zea mays
  Clone ID: MRT4577_124854C.1.pep
QAPRLVAALQKLVKCLKLYMVCFMVISAPWAQNYPSPCHLCWQRSTNP

SEQ ID NO: 211902 - protein, 81 aa, Zea mays
  Clone ID: MRT4577_124855C.1.pep
NPVNASDAAVGRIYFRNRAAYVDADAFDSDHEIRQHVIGSDDYTADKTLRMDGITQKARAICGDAMSDTVMRSLKPSEVDV

SEQ ID NO: 211903 - protein, 47 aa, Zea mays
  Clone ID: MRT4577_124856C.1.pep
ADRKQPNHHLYGCLPLYSTKQDNSYTISSHNTPSIRRFKAYNTHITS

SEQ ID NO: 211904 - protein, 42 aa, Zea mays
  Clone ID: MRT4577_124857C.1.pep
PLHTTTLEGAFSKISHPTSRVRSQMSGDDLICAACAPIFHVH

SEQ ID NO: 211905 - protein, 77 aa, Zea mays
  Clone ID: MRT4577_124858C.1.pep
TGGLFKRLGGGTPHPIKINARAPRNCPRNLPSLAPSKGPSTIQSVLENTLYGHNGCTRGARHQILGGLMKQSCILIF

SEQ ID NO: 211906 - protein, 59 aa, Zea mays
  Clone ID: MRT4577_124859C.1.pep
AHSVRTRRPTTRPQNVVSAVKNVSRNTSIPKNIVGQCDKYEGQPAAEEGRPAACYRGGS

SEQ ID NO: 211907 - protein, 55 aa, Zea mays
  Clone ID: MRT4577_12485C.1.pep
FSIQTIILDWHTIIILPYITMYSLHHFIHLLSKQFDTFHYIKILLYISCALRTQT

SEQ ID NO: 211908 - protein, 62 aa, Zea mays
  Clone ID: MRT4577_124860C.1.pep
TAAPPAGTRGPGVLSKLARCEGFMCVVSLISSPAASYLALSTAVCAVSLCLLLTTVTTFTAP

SEQ ID NO: 211909 - protein, 138 aa, Zea mays
  Clone ID: MRT4577_124861C.1.pep
MASSTAIATARAHDAAVYGAAGTHSNLRSFLDSVTPVVKAHTVPMASYLPLSNGYYEKIADGVRCFYLGDLWNSFYEWSACGVGTSVCIAPGETVVQYFVPYLSAIQLYTNTRNAPVSQSMIYDGRFDRNNHYSVGMY

SEQ ID NO: 211910 - protein, 79 aa, Zea mays
  Clone ID: MRT4577_124862C.1.pep
QLFFIFFFFFFFFFFFYFFFFFLIIIVTASILLQTVFQTIHYRGFEVSLFSSLDTQLRKRSCIHKGHMYKLDKCDDPKR

SEQ ID NO: 211911 - protein, 56 aa, Zea mays
  Clone ID: MRT4577_124863C.1.pep
ANAPECSQGSIPERRFLSIASRAAAASDDSIGVVSVFVFFFYLLIFFGSIFWGECR

SEQ ID NO: 211912 - protein, 73 aa, Zea mays
  Clone ID: MRT4577_124864C.1.pep
KTAASSNIMSMTKRCMDRYVILHHIYQRTYVYYQLDEIIQPTKRPIEGHVILKNTETSGGHAWHTRWRGGWGK

SEQ ID NO: 211913 - protein, 154 aa, Zea mays
  Clone ID: MRT4577_124865C.1.pep
MAETVFAPCLEGMKHVRSDSGVMLAKPFLDVCKQILPVLDKFGAAMAIVKSDIGGNITRLENKYSSDPTKYEHLYTMVQEEVEKKTAKGSSSCTNGLLWLTRAMDFLVELFRNLLDHPDWTMSQACTDSYTKTLKKWHGWLASSSFTVAMKLAP

SEQ ID NO: 211914 - protein, 46 aa, Zea mays
  Clone ID: MRT4577_124866C.1.pep
LYLECLSNFDSASHSSHLKTNNIILSSYTLLFKIILICLVCHLLLL

SEQ ID NO: 211915 - protein, 134 aa, Zea mays
  unsure (1)..(134): unsure at all Xaa locations
  Clone ID: MRT4577_124867C.1.pep
MREILHIQGGQRGNQIGSKFWEVICGQHCADCTGYSATSXLQLELERINVYYNVAGRDRYLLRAVLMDLEPGTMQSIRAGPLGGIFPPDNFVYCQSGAGHNWAKGHYIEGAQLIDFVLXDFVLPAAVNCYCLPV

SEQ ID NO: 211916 - protein, 83 aa, Zea mays
  unsure (1)..(83): unsure at all Xaa locations
  Clone ID: MRT4577_124868C.1.pep
TCSIIFFLGKXHFNEGIPPLERRFIYSNKNXSFLLLMLPLQNHLSSSLANTTIHLLLPYKHFYKMHHRACISSHENIPILFLS

SEQ ID NO: 211917 - protein, 112 aa, Zea mays
  Clone ID: MRT4577_124869C.1.pep
KWATKRFSPAPPGRSGLSAKRSIFRGWEIGKGHLPVLLSNLLAPGGFRLSQTGPNQKNISPSLWRKSPSLEGFIQGGKKLKMGSGTPGPFLAQREKKKNGGFFKRKSAFSSL

SEQ ID NO: 211918 - protein, 54 aa, Zea mays
  Clone ID: MRT4577_12486C.1.pep
IFNEISFGGLYTWTCRHFIIYFKPCYVSNLRYCLWLRICSLSAIDGCMFVTTEH

SEQ ID NO: 211919 - protein, 59 aa, Zea mays
  Clone ID: MRT4577_124870C.1.pep
AYRGFFLGSSEFEPFHRIWKSWAPPKTKFFMWLVAHRKVWTADRLQKRGMDHPKRCPLC

SEQ ID NO: 211920 - protein, 70 aa, Zea mays
  Clone ID: MRT4577_124871C.1.pep
EPAGYPLARSLMCTSRVSIDGEVTIRDTQTHLQLKPKAFFLNKAHYTSDSLLVIKRLSLNDVFYEQNTPC

SEQ ID NO: 211921 - protein, 510 aa, Zea mays
  unsure (1)..(510): unsure at all Xaa locations
  Clone ID: MRT4577_124872C.1.pep
MATVSLTPQAVFSTESGGALASATILRFPPNFVRQLSTKARRNCSNIGVAQIVAAAWSDCPAARPHLGGGGRRARGVASSHAAAASAAAAASAAADVSAIPNAKVAQPSAVVLAERNLLGSDASLAVHAGERLGRRIATDAITTPVVNTSAYWFNNSQELIDFKEGRHASFEYGRYGNPTTEALEKKMSALEKAESTVFVASGMYAAVAMLSALVPAGGHIVTTTDCYRKTRIYMENELPKRGISMTVIRPADMDALQNALDNNNVSLFFTETPTNPFLRCIDIEHVSNMCHSKGALLCIDSTFASPINQKALTLGADLVIHSATKYIAGHNDVIGGCVSGRDELVSKVRIYHHVVGGXVLNPNAAYLILRGMKTLHLRVQCQNDTALRMAQFLEEHPKIARVYYPGLPSHPEHHIAKSQMTGFGGVVSFEVAGDFDATRKFIDSVKIPYHAPSFGGCESIIDQPAIMSYWDSKEQRDIYGIKDNLIRFSIGVEDFEDLKNDLVQALEKI

SEQ ID NO: 211922 - protein, 229 aa, Zea mays
  unsure (1)..(229): unsure at all Xaa locations
  Clone ID: MRT4577_124873C.1.pep
MATVSLTPQAVFSTESGGALASATILRFPPNFVRQLSTKARRNCSNIGVAQIVAAAWSDCPAASAAAEVSAIPNAKVAQPSAVVLAERNLLGSDASLAVHAGERLGRRIATDAITTPVVNTSAYWFNNSQELIDFKEGRHASFEYGRYGNPTTEALEKKMSALEKAESTVFVASGMYAAVAMLSALXVPAGGHIVTTTDCYRKTRIKMEPEXPKGEFRMTXLACCDMDA

SEQ ID NO: 211923 - protein, 77 aa, Zea mays
  Clone ID: MRT4577_124874C.1.pep
RLDDLIKSQDVRCSPSGRHLTNTNIVLSQAIPDAFDTSFYFKNFYHLYAALGDRSCVNKQLMHHHSLEFDVVFLSII

SEQ ID NO: 211924 - protein, 201 aa, Zea mays
  Clone ID: MRT4577_124875C.1.pep
VKHSTCESLCSPLGFDAENAREDLGIHHIVVDDWNKGVDGEQNVVLISVPSVLSKDLAPPGKHILHAYTPGTEPFSLWEGLDRKSAEYRRLKEERSEVMWKAVELALGPKFSREKCDVKLVGTPLTHRRFLRRNRGTYGPAIKAGEATFPGQATPIPQLFCCGDSTFPGIGVPAVAASGAIVANTLVPVSQHSELLDAVGI

SEQ ID NO: 211925 - protein, 54 aa, Zea mays
  unsure (1)..(54): unsure at all Xaa locations
  Clone ID: MRT4577_124876C.1.pep
THGSAISNTPPVFCCGDSXFPGIGVPAVAASGAIVANTLVPVSQHSELLDAVGI

SEQ ID NO: 211926 - protein, 109 aa, Zea mays
  Clone ID: MRT4577_124877C.1.pep
TPIHRSTLALPPTTPTEPSTSPTTPSPARSPTTSSAWLSQRRDMEDERAPGESRLDLNFRGGELGRGQVQTGISLNTLGSLGYEIDHGSRWRIAVSHSKLGDQPKRSHG

SEQ ID NO: 211927 - protein, 273 aa, Zea mays
  Clone ID: MRT4577_124878C.1.pep
MSAYILRKFADLVGQGVKTDKGFKEVHVNSVAKALTEFSGQEVTGTQVYNHLRKWRQKWIRVCRLKDLSGAHWDENTFTIILDDEHLLGHTKDNPKDAEFLNVPNENYVQMQIIFGAGQATGKYAMASNEPLGTISDITEGAGASEEPCLVGTGATASGSVGANPSHSGAGAGSSYGSNGKKRRLSDEELGIMAGLTGAVNKLAEAVQAPVVVQTTDVHPDLYQICMSIPGFTNEELMTCLTYLLDNKRQGDGFVKMEPKHRVLWLRQHLAKI

SEQ ID NO: 211928 - protein, 56 aa, Zea mays
  Clone ID: MRT4577_124879C.1.pep
HYEHGTSELILSRSDSNRAKTCLCVTHLLLEACIKRPGIRSLKPYTQPGPRGMNIG

SEQ ID NO: 211929 - protein, 67 aa, Zea mays
  Clone ID: MRT4577_12487C.1.pep
VRSEHQYIVLLLVHKGTTPPPLSPHRFTQIREIWALSAKKGVSERSPDRGRATRSQVRELPPLTSTG

SEQ ID NO: 211930 - protein, 64 aa, Zea mays
  Clone ID: MRT4577_124880C.1.pep
DSFFIQLQCPFLYHASVETYLTNLGTVRYIDNRQLKKINSFWPQRPSELFMECRISNGQNTLSF

SEQ ID NO: 211931 - protein, 95 aa, Zea mays
  Clone ID: MRT4577_124881C.1.pep
FQKHTGTNTQKGGGAFTNFDNAGKKPPKLFWGGTQTWNHRIDYLGRHHYMISTPGGPKNLPWRKTQKGPFAPPKLHFLEKGVWKMKAPLSGGFIF

SEQ ID NO: 211932 - protein, 82 aa, Zea mays
  unsure (1)..(82): unsure at all Xaa locations
  Clone ID: MRT4577_124882C.1.pep
VKDSHHPINPFISPNAMRYYLRVYFKSTGDTYFSLLKLSLTKANLYLQDLIAHKHAIPFPRYXPAVTHTVQANNHHFNVHLL

SEQ ID NO: 211933 - protein, 519 aa, Zea mays
  unsure (1)..(519): unsure at all Xaa locations
  Clone ID: MRT4577_124883C.1.pep
MEDLLYYSLTIAICIAVIALLSILRSFTATGPPPALPPGPSLLSLITPLLFLGRTNFGIERILSAARSRYGPVFTLYLLPSRPAIFIADHAVAHRVLVQGGAAFADRPPASLPFRLFSSGQRNITSGAYGPVWRALRHNLTGNVFHPSRMGRFAAARRRALRGLVAGVARDAGSGAVVVEGLLHRAMFHVLVTMCFGERLXRRXVASVEALQREFLKSVLGFQVFDVCPALTSLLFRRRWKQMLSLRRRQEELFAPLIRACRAQRGSDANAGADTYVDTLLDLRIPEDGGRNLTEGEMVSLCAEFVAVGTDNTATEAQWIMANLVAHPEIQARLRAEIHQVTGGAGVQEQDLPRMPYLRAVVLEGLRRHPPGHFAIPHAATGIQDDDGGGDHATIEGFRVPRRASLNFTLVALGLDEAVWPDPLRFRPERFLPGGEGADVDLTGAKEVKMIPFGAGRRICPGRALALLHLEFFVASLVAEFEWLQVPGEPVEFAEKQELSVVMRRPLRATVVRCTRNAN

SEQ ID NO: 211934 - protein, 52 aa, Zea mays
  unsure (1)..(52): unsure at all Xaa locations
  Clone ID: MRT4577_124884C.1.pep
DDVSFGGDCCCFFSFGSLMIFFGGNIRQTISNSSVRPFYIXNNRAGGYVXHS

SEQ ID NO: 211935 - protein, 77 aa, Zea mays
  unsure (1)..(77): unsure at all Xaa locations
  Clone ID: MRT4577_124885C.1.pep
KXXFFFCTXHRTXNGPDYLGESIAIIKTHASICMKLAATVRFSSPRISAHCAGSGMDTLHQPLEWILILAYVQHGPV

SEQ ID NO: 211936 - protein, 492 aa, Zea mays
  Clone ID: MRT4577_124886C.1.pep
MTTSPVPSQADHVAIFPLMAKGHTMPLLDLACVLRGRGLAAVTFVTTPGNAAFVRAALRQGGAGDAAVLELAYPASSAPAGGEGAEGVASAASFAAFAEATSALRPRFQEALAALRPPASLLVADGFLYWAHASAAALGVPSVSFLGTSAVAHVVREACVRDRPGAGADVGASAGATTCYTVPEFPHLQFSLRDLVPPPPQMIHLDAKMAAAVAASRGLIINTFRQLEGRYIEHWNQHIGPRVWPIGPLCLARQSYSPGGTGSQQRHDAKPSWMQWLDDMAAAGKPAVYVSLGTLASISQAQLKEVSDGLDSAGVNFLWAVRRPDNADDLGTGYEDRVVGRGKVVREWVDQRRVLRHPSIRGFLSHCGWNSVLESVAAGVPLVAWPCDFEQPMNAKFVVDELRIGVRVHTSDGAVGGLVKSEEIATAVKELMFGEAGKAMALRAKGIAAQARLAVSDGGSSWKEVEEMISELRLRGVDMNGKANGGTCASIL

SEQ ID NO: 211937 - protein, 60 aa, Zea mays
  Clone ID: MRT4577_124887C.1.pep
RLSGFLVARSFCNSCKSCIHPRINQSRVPNNMVSDHMYVVTPVRLYYKLILSTPWCFLPL

SEQ ID NO: 211938 - protein, 88 aa, Zea mays
  Clone ID: MRT4577_124888C.1.pep
NNFFFFFFFFLCFFNFFGGFTLFFFWGGEFGRVEHGSKVPLPGGNKNEGANPHSWRSNHPVKLKGAGKPPPQMGGAHGGGGGFFETLT

SEQ ID NO: 211939 - protein, 69 aa, Zea mays
  Clone ID: MRT4577_124889C.1.pep
PPPKIFSPRSTRTIMPPYTSWHSADHIYHCTRHDLLMNRSDRDLPVRSAHAGPAVPAAGARPHRRLRHH

SEQ ID NO: 211940 - protein, 137 aa, Zea mays
  Clone ID: MRT4577_12488C.1.pep
MEAQDDCGKWRQIPAFGDWNMWEEMPVTQYFEPAATFFFTAQAGEDDVDLFKVPHFAANPYTYKKCVVRVKKREENEKPNANANAGAMSGRRKKGGRKQQQQNHQQGKKEQQQQRRKKQAPQGRATSTSPPTSAGKK

SEQ ID NO: 211941 - protein, 51 aa, Zea mays
  Clone ID: MRT4577_124890C.1.pep
HESLGTDLLNWIFNSPYTEILKKNIMNIHTHIYLHIYCNNTITVNYVNNIT

SEQ ID NO: 211942 - protein, 492 aa, Zea mays
  Clone ID: MRT4577_124891C.1.pep
MEDGVSTYTVDEALVSMGFGKFHAFVLAYSGMAKISEAMEMMLLSFVGQSVQAEWGLSAHEESLITSVVFVGMLVGAYAWGIVSDNYGRRVGFNFTAIVTGGAGLLSAFAPNYLSLIVLRFMVGVGLGGGPVLGSWFLEFIPAPNRGTWMVMFSAFWTVGTIMEASLAWAVMPAFGWRWLLALSSLPSFALLLFYPVTLESPRYLCMKGRIAEAVHVLETMSRVNCVSLPSGRLVSGHRVELHDIGDSSETAQLVTSNKNNTADRGSKSEIGGLSAILKLLSPNLIRSTLLLWTVFLGHAFLYYGLVLLTSELNHGNRICGSEEGAEVTTTAHIHDENLYRNVFITSFGEVPGLLLSAAIVDKIGRKLSMSSMLYISCLCISPLMFAQTESLTTVFLFCARVCISASFTVLHIYAPEIYPTAVRATGVGFASSIARFGGILCPLVAVGLVHACHQMAAILIFITVMLASGIAVSYFPLETSGRKLSDHVAAA

SEQ ID NO: 211943 - protein, 74 aa, Zea mays
  Clone ID: MRT4577_124892C.1.pep
MDSARSCLVDDVSSGATTGKKVSPASVAPATKPLQRVRSGASAVMDAPEPGAEAHSGRGWALPSLMYEGVVPHP

SEQ ID NO: 211944 - protein, 72 aa, Zea mays
  unsure (1)..(72): unsure at all Xaa locations
  Clone ID: MRT4577_124893C.1.pep
HLRPQRRRKTGKTTVRIKAALYTLSPFRHKVMTSLWQDITXTEIHHKATKNWISATILLTPRTYRHLTRLTP

SEQ ID NO: 211945 - protein, 74 aa, Zea mays
  Clone ID: MRT4577_124894C.1.pep
IIFSTGAKGSTQTNKNIKLGFKKKGAKETEEHCWGLVLKCYELRTRQHKMLVVKDLRPSKHYLPKDIMIFRRRL

SEQ ID NO: 211946 - protein, 87 aa, Zea mays
  Clone ID: MRT4577_124895C.1.pep
VHLGPPHVLDLNGSSGQLAVQPLSPQLSARLFPAKFQNRKRWQVSLILVTAQVWRLEFIYIKLGPSVVLPVDIQVFPLEFSLGSSVH

SEQ ID NO: 211947 - protein, 52 aa, Zea mays
  Clone ID: MRT4577_124896C.1.pep
ARTRPGIHITPSGRYLFFWMSYLRYTSLVSYILCICIMYRYVLFFTCSNYNV

SEQ ID NO: 211948 - protein, 54 aa, Zea mays
  Clone ID: MRT4577_124897C.1.pep
GSSGVRRHDIAMAGRSFSLCFRGAGGSICYQQVQEARAVECRRSRIGSGGLRVP

SEQ ID NO: 211949 - protein, 103 aa, Zea mays
  Clone ID: MRT4577_124898C.1.pep
PGCHKEAPPQKFPRPRRLPPQELDGAKPGNGPVQYSSSPFIDGSHFISARPWFGLVPALVPYFAYNQDRSPGPCPCLWLMFAAGARRAPQNVWLRCPPALPSQ

SEQ ID NO: 211950 - protein, 290 aa, Zea mays
  Clone ID: MRT4577_124899C.1.pep
GCLSVSPWRDNVPSDSVTVGNSSYSKIERSMAILNTFISFIKVSMPRSDLIILTDPGSKISVNQGTATLLPVEGNYSRGNLMLQRIKTYIAFLEQKLVEFDRMERLNHFVLTDSDIAVVGDLGHIFKKYPHFHLAVTFRNNKGQPLNSGFVAVRGTRDGITNAVEFLKQVLGTYSLRYMKASRMLGDQLALAWVVKSHLPSAFGKFSKNEAFTGEVNGTSVLFLPCAVYNWTPPEGAGQFHGVPLDVKVVHFKGSRKRLMLEAWNFYSSTSKLSDMLCLILRSGRTKYDF

SEQ ID NO: 211951 - protein, 33 aa, Zea mays
  Clone ID: MRT4577_12489C.1.pep
GQISFGQPLPKKAKAVKHDLVIHILDQTKPSEG

SEQ ID NO: 211952 - protein, 218 aa, Zea mays
  Clone ID: MRT4577_1248C.1.pep
MARLGRAGCRCSGPARAFFSGIPEDTLRNFMSNVLPAVLILEFLSGTNLIVQTFALEVVAPAMPPFQGWGPFHSLASQTKVLVSVSAQPDDGLQRQKKLYSSAVAMSSTHPPISAPSYRYMPGALDLAIYSSDLSRPPVQHTRHLATAAPAHVDADPPDAASNSSAAPLGLVQPPVSPHSGCCAPNMVQKRGTRDCHCVYPVRIELFLRNVSLTSACE

SEQ ID NO: 211953 - protein, 147 aa, Zea mays
  Clone ID: MRT4577_124900C.1.pep
VGFGTGAPAVASSAGGRTTNVGRPFAGQFLGGKTKGSRGDGGKPVEEKGLVQTIFGALDQEEPLVENDPVLNQGGNKGQGRRRPGPKKGGEKGRNGGLNPGGFFFKPKKGGTDLPYGTSNSNGDRFGPVLAFWNEVLDWNGMDRFDG

SEQ ID NO: 211954 - protein, 69 aa, Zea mays
  Clone ID: MRT4577_124901C.1.pep
MNVYLTICVSFHFSLADSLSYTSIIYVAIIITVVFIIIIVEIAIIKLIGGQIPMPKLFPTVNDVNVIGV

SEQ ID NO: 211955 - protein, 100 aa, Zea mays
  Clone ID: MRT4577_124902C.1.pep
MAFFNKQQFFPFNQWPALNPVVYLHKQILFPFSQQVEPTGVSFLTKHQLFPFYNQFGVNPAPFLQFHQWLPLVHLVLPNPEASYQQPIMGGALFKMAYKW

SEQ ID NO: 211956 - protein, 37 aa, Zea mays
  Clone ID: MRT4577_124903C.1.pep
KVFKAHQRGISHHLLRGVNLTFRHFFRGGLFFLTRFS

SEQ ID NO: 211957 - protein, 69 aa, Zea mays
  Clone ID: MRT4577_124904C.1.pep
MGWAIFYHKPKTEPYRTEPKFRFFGSSVRFRFLYLISSVFGIVIGFHRIPNRNTKKIEYQTLSILKFGY

SEQ ID NO: 211958 - protein, 75 aa, Zea mays
  Clone ID: MRT4577_124905C.1.pep
RNSVKAILHSAKCFFAEYFFRFAECQKTLGKLRIEKIKKNSKTFFKILGTTLQHCLLSIALSFFTIILNQNLYVL

SEQ ID NO: 211959 - protein, 141 aa, Zea mays
  Clone ID: MRT4577_124906C.1.pep
ASSQITCRYVSISESSAGVVKNLVVINISSIGNVVSDLIRDQQVYGCWSLHSLVAMVHVLSKRQRSSSLRPAMLDVAQVRCRVSMDVTQGINEQLKTVISKILERGSEVDRDDGLDSLGMWTSMRSLGILIAGSGDHLWIF

SEQ ID NO: 211960 - protein, 154 aa, Zea mays
  Clone ID: MRT4577_124907C.1.pep
MAAAGHAVVPKFGSWDAENIGYTVFFEKVRDNKAPPAAPPAAAPKPSAPAAGGNGGYDFDPYEHYESISRKPPSRPPSSHGQPAAARAPAPGAGYGYGDFDPYEHYDNLSSRNVPSRPPSSHGHAPAAGYDFDPAGHYFDPSARNVNLSARNVP

SEQ ID NO: 211961 - protein, 60 aa, Zea mays
  Clone ID: MRT4577_124908C.1.pep
RRGPGDQSPELARGGGWILRGRRFPSVHLADSLKLGRGLLLLFSSDSQGGPLSDVSVDDA

SEQ ID NO: 211962 - protein, 84 aa, Zea mays
  Clone ID: MRT4577_124909C.1.pep
MGAFSSYAGFLVVLVLVAGSTLAQAQATPAAAANFLWPFNGFVPVFNITKGLGLVAELDLDTVRQWLLNGLERGNFLGRLLLRF

SEQ ID NO: 211963 - protein, 69 aa, Zea mays
  Clone ID: MRT4577_12490C.1.pep
SFLGVFTPIKIRQEHIHAYTLRKFVFRDGPFSFENVQVMVWYLERLDYSPRHEDHRLGYHWWAKFTLLG

SEQ ID NO: 211964 - protein, 62 aa, Zea mays
  Clone ID: MRT4577_124910C.1.pep
MGKVHGSLARAGKVRGQTPKVAKQDKKKKPRGRAYKRMQYNRRFVTAVVGFGKKRGPNSSEK

SEQ ID NO: 211965 - protein, 57 aa, Zea mays
  Clone ID: MRT4577_124911C.1.pep
NFERFIFCLKKKFCAERKEAKIKLGTLAIWEGFFGGHVTNNDHQTGTFTIEGIFERG

SEQ ID NO: 211966 - protein, 69 aa, Zea mays
  Clone ID: MRT4577_124912C.1.pep
TGLSVCGAGKVHGSLARAGKVRGQTPKVAKQDKKKKPRGRAYKRMQYNRRFVTAVVGFGKKRGPNSSEK

SEQ ID NO: 211967 - protein, 157 aa, Zea mays
  Clone ID: MRT4577_124913C.1.pep
MSRGSKLRWLWRAPARALGRARDMYVRGLTGCARYVPADAGFGYPVFVPAPLSRSHSADWRGGAGSGADEDLRELVRAASQRRVEQRRAELQAVARSQSMAASLSMARIDEDAPCEFGADAGDGPGALYPRSQSCVGDAAGRRAHAHRRHGKVVALV

SEQ ID NO: 211968 - protein, 88 aa, Zea mays
  Clone ID: MRT4577_124914C.1.pep
DHFSPVGQRSGVYPAAEFPHMVEPFVPRWKVGELYPGLSRKGGRAQDYVCGLPPQIPRMGEVGQNRAGQMGAPPVCFSWGFERPVPLP

SEQ ID NO: 211969 - protein, 74 aa, Zea mays
  unsure (1)..(74): unsure at all Xaa locations
  Clone ID: MRT4577_124915C.1.pep
TXNLNPLNSILXFLHLFPQNFLNLFLSTFLYLHLKFSFNFSSSIISIPSFSLSFLFHLLTHLPFPIFSTTAGDF

SEQ ID NO: 211970 - protein, 235 aa, Zea mays
  unsure (1)..(235): unsure at all Xaa locations
  Clone ID: MRT4577_124916C.1.pep
NAPPLFFFFFFFFFFFFFFFFFFFFFFFFFFFFFFFFFFFFFFSKHKRLHHQNLRATPPRSASPPANVLPSYSYSTNKFVRFTSTLPPAARFVFSRLAWWCSSTGVSTPGAWCGGGGSGXRGSRLRWLWRAPARALGRARDMYVRGLTGCARYVPSDAAFGYPVLVPAPPLSRSHSVDWGRGAADEDLCELVRAASQRRVVEQRRAELRAVARSQSMAASLSMARIDEDAPCELG

SEQ ID NO: 211971 - protein, 65 aa, Zea mays
  Clone ID: MRT4577_124917C.1.pep
ANIVFINRFINSGSINCINLHHNSRDLRILVVFASSLVMYLECHLLSLVYDRICFHRRKGQALVR

SEQ ID NO: 211972 - protein, 151 aa, Zea mays
  Clone ID: MRT4577_124918C.1.pep
MSRGSKLRWLWRAPARALGRARDLYVRGLTGCARHVPSDAAFGYPVFVPAPLSRSHSAVGWGAGSSEADEDLRELVRAASQRRVEQRRAELQAVARSQSMAASLSMARIDEDAPCDFGAPGALCPRSQSCVGDAAGRRPHRRGHGKVAALL

SEQ ID NO: 211973 - protein, 88 aa, Zea mays
  Clone ID: MRT4577_124919C.1.pep
KRGIDCSTMDHIRPVRHPKNRVLSVTITSGRRTELRKLLPNYTHTLWLKYYSIESLISQKHWTRNLDEIWVLALVPRSCLLKLSEKHV

SEQ ID NO: 211974 - protein, 77 aa, Zea mays
  Clone ID: MRT4577_12491C.1.pep
GPVRGSGGQRAAHQDDQGRRAVGRRPVVGPGPVRRRELTVIQCEVDDKDSFIHHIEQVTKPVLWLNCKDRTQDTGEI

SEQ ID NO: 211975 - protein, 45 aa, Zea mays
  Clone ID: MRT4577_124920C.1.pep
FLGVFIACDLGLKIPPPAIQSPPMEGPKFFQLGKLAKYLFQLQQK

SEQ ID NO: 211976 - protein, 158 aa, Zea mays
  Clone ID: MRT4577_124921C.1.pep
MDTDLDRGRHRGCHELCLQLRLRQDLELNRDKDVATERTIVADGEDDGTINISIKISFKNASDRTYAHSDMHGDLTGFNALLNELLKNVLANEDAARTTAEPKPEHELQKKGSTADRDGYRDNNFTNIASYGLCSCRSTSGSNRHSDGQSDLCRAFCI

SEQ ID NO: 211977 - protein, 628 aa, Zea mays
  Clone ID: MRT4577_124922C.1.pep
WLGEDPKRTRRLLQQNATQKEVTLEILFDDCSNYDSWSTSVLNAFRTIHPQLEQIIDKSIFPSSFNGEIVSEEDQRCFRLNYLAFDILSNSLSKEDYRAFISNYDESVHDAHDIWTRIRSKFDESKHDSSFCVSASFGICDTNPCKEEEENERWRPNDESTSPKGLSSHFDSHMCCVANENDSGSTNEDEEEESSFVHLYARLSQEDKAVMLKLLERAREQSEARQRLEDILSMKMLHFDELTKEHEELKCSHVDLVQRYETISIEQDNASHCIAQLVNRNTLLKDQVEKLKVENLAFQDKYDMLLCSHENLRDDHIMLNIAHEVVIEYLKSQQPHSCTCVHIDTILPCANACCPSTSKSSFELEFAGTNDDTYQKLEEENERLKMSLTQLKGKCIAQPSQDNRDHMVKELETGTTVACTTSLEENVKDLRIAKRKKQKMKFNTSSKSLNHASIQGNIQGNDQATLHTKKSKKCSECFEEGHLIRSCPYIKNGLIINKDDRHCFKCSKKGHLVKSCPHLKQKGIGLEKKIFTNHVASKKQGKKKSSKLEDRLCYICRKKGHQCKDCPIGNYPTPSLSIDSYVTRQPKIATCARKVMSLPSASTKDIWVPRSLLTNLDGPIKRWVPKYA

SEQ ID NO: 211978 - protein, 80 aa, Zea mays
  Clone ID: MRT4577_124923C.1.pep
GNQISLQQIAPHRTPRSDSEGPKIRPHFHNPGEITTSPVPDERPRGAALSQLISLPLDRHNLDLAQHGAEKRDPLGNLGG

SEQ ID NO: 211979 - protein, 623 aa, Zea mays
  unsure (1)..(623): unsure at all Xaa locations
  Clone ID: MRT4577_124924C.1.pep
MARRRSQKNKKTQENPTRKEVTLEILCDDCSNYDSWSTSVINAFRTIHPQLEQIIDKSIFPSSFNGKINSEEDQRCYRLNYLAFDILNNSLSKEDYHAFISNYNESIPDAHDIWTRIKIKFDESKHNSSFDASTSFSFCDTNPCKEEGENERWRPNDESTSPKGLSSHFDSHMCCVANENDSGSTNEDEEEERSFVHLYARLSQEDKAVMLKLLERAREQSEARQRLEDILSIKMQHFDELTKEHKELKCSHVDLVQRYETISIEQNNASHCIAQLVNRNTLLKDQVEKLKIENLAFQEKYDMLLCSYENLRDDHIILNIAHEVVIENLKSQQPHSCTCVQINTILPCANACCPSTSKSSFELEFAGTNDDSYQKLKEENERLKKSLTQLKGKCIAQPSQDNCDHMVKKLETGTTVACTTSLEENVKDLRIAMRREQNMKFNTSSKSLNHASTKGNIQXMIKSHFTXRCSECFEEGHLIRSCPYIKKGLIINKDDRLCFKCSKKGHMLRSCPHLKQKGIGLEKKVFTNHVAGNKQGKKKSSKLGKRLCYTCRKKGHQCKDCPIGKIPTPNLSLDSYITRQPKIATCARKVTSLPSASTKDTWVPRSLFTNLNGPXSDGYQNVL

SEQ ID NO: 211980 - protein, 489 aa, Zea mays
  unsure (1)..(489): unsure at all Xaa locations
  Clone ID: MRT4577_124925C.1.pep
MARRRSQKNKKTPPSNVTQKEVTLEILFDDCSNYDSWSTSVINAFRTIDPRLEQIIDKSIFPSNFNGKINSEEDQRCYRLNYLAFDILTNSLSNEDYCAFISKYDEPIHDAHDIWTRIKSKFDGSKHDSSFYASTSFGICDTNPCKEKEENERWRPNDESTSPKGLPSHFDSHICCVASENDRESINEDEEEERSFLQLYARLSQEDKAVMLKLLERAREQSEARQRLEDILSIKMLHFDELTKEHEELKCSHADLVQRYETISIEQDNALHCIAQLVNRNTLLKDQVEKLKVENLAFQEKYDMLLCSHENLMDDHIILDITHEVVIENLKSQQPHTCTFIQIETILPCANACYPSTSKPSFELEFAGTKDXISKAQRRXERLKMSLTQLKGKCIAQPSQDNHDHMVKKLETGTTVSCTKSLEENVKDLRIAKRSKQKNKINTSSKSLNHASIQGNIQGNKEIILCRKVKIYNMEESQRMSHRKRKHLK

SEQ ID NO: 211981 - protein, 509 aa, Zea mays
  Clone ID: MRT4577_124926C.1.pep
MARRRSQKNKKTQENKEVTLEILLPDCSNYDSWSTRVINAFRAVDPLLEQILDKSIIPPNYARENASEEDLRCIRLNYLAYDILSKSLSKEDYHAFIIKYDKPICDMHDIWTRIKNKFNKSKHDSSFCASTSFGICDTNPCKEEDENERWRPNDESTSPKGLSSHFDSHMCCVANANDSGSTNEDEEEERSFVELYACLSQEDKAVMLKLLERAREQGEARQRLESILSMKMQCFDELTKEHEELKCSHVDLVQRYGTISIEQDNALHCIAQLVNRNTLLKDQVEKLKVENLAFQEKYDMLLCSHENLRDDHIILDIAHEVVIENLKSQQPHSCTCIQIDTILPCANACCLSTSISSFELEPAGTKDDTYQKLKEENERLKMSLTQLKGKCIAQPSQDNRDHMVKKLETGTTVACTTSLEENVKELRIAKRKKQKMKFNTSSKSLNHASTRGNIQGSEEISCAKIKAYNMEESQRMFERKKKHLQREDSQMKEEDIKNNTTYLDMNDSN

SEQ ID NO: 211982 - protein, 234 aa, Zea mays
  unsure (1)..(234): unsure at all Xaa locations
  Clone ID: MRT4577_124927C.1.pep
ICFYLAXVLVLRRLVLPRLPALPPPALRALSASHNAVLLALSAAMAAGCALSTAATAPGXRWAWPFSAGPRGATEASGPVFFWAHVFYLSKVYELGDTLLILLARRPLTLLHVYHHALVVAMCYLWLATRQSLMPVALVTNAGVHVVMYSYYLSCSVGLRWPGRWKRAVTELQIAQFLFSFAASVVMLWLHFAAGGCEGMAGWVFNAVFNASLLALFLNFHGAAYKGAAQGQQG

SEQ ID NO: 211983 - protein, 37 aa, Zea mays
  Clone ID: MRT4577_124928C.1.pep
VEACIHCFYANLLLVLCRLYVLNSCKEHYKLFHVIKF

SEQ ID NO: 211984 - protein, 507 aa, Zea mays
  unsure (1)..(507): unsure at all Xaa locations
  Clone ID: MRT4577_124929C.1.pep
MARRRSQKNKKTPPTNATQKEVTLEILLDDCSNYDSWSTSVINAFRTIHPQLEQIIDKSIFPSSFNGKINSEEDQRCYRLNYLAFDILNNSLSKEDYRAFISNYDESIPDAHDIWTRIKIKFDESKHNSSFNASTSFSFCDTNPCKEEGENERWRPNDESTSPKMCCVANENDSGSTNEDEEEERSFVQLYARLSQEDKAVMLKLLERAREQSEARQRLEDILSMKMQHFDELTKEHEELKCSHVDLVQSKSSFEQEFAGTNDDTYQKLKEENERLKKSLTQLKGKCIARPSQDNRDHMVKELETGTTVACTTSLEENVKDLRIAKRRKQKRKFNTSSKSLNLASTKGNIQXMIKPHFTLRXKKYNECFEEGHLIRSCPYIKNGLIINKDDRLCFKCSKKGHLVKSCPYLKQKCMMLEKKVFTNHVASNKQRKKKSSKLGKRLCYTCRKKGHQCKDCPIGKNPTPNLSFDSYITRQPKIVTCARKELKNHHVRKIKAYNMEDCQRMI

SEQ ID NO: 211985 - protein, 77 aa, Zea mays
  Clone ID: MRT4577_12492C.1.pep
KEKKRPRTRATTQPDGRPQTPPGRIALGSARPTSTRTCPIPLFTPQCHTTLRGLLISMSYSSIIKFFASWASQIRKL

SEQ ID NO: 211986 - protein, 67 aa, Zea mays
  unsure (1)..(67): unsure at all Xaa locations
  Clone ID: MRT4577_124930C.1.pep
PPPTGCPLLVAFAIRCKSLPCLVCCKEXQLSRXCFFLTFRLLLKEEVKGSRQRRVRGGRRNREGGGG

SEQ ID NO: 211987 - protein, 328 aa, Zea mays
  Clone ID: MRT4577_124931C.1.pep
MAHRRSQKNKKTTPKENNEVTLEILLSDYSNYNSWSTRVINAFRIVDPQLEQIIDKSIFPSSYNGEIISREDQRCFRLNYLAYDILSNSLSNEDYRAFISNYDESIHDAHDIWTRIKSKFDESKHDSSFCTSTSFGLCDTNPCKEEEENDRWRPNDESTSPKCLSSHFDSHICCVANENMSRSTNEDEEDERSFMQLYAHLSLEDKAVMLKLLKRAREQSEARQMLEDVLSMKMLHFDEFTKEHEELKCSHVDLVQSKSSLELEFAGTKNDTYQKLKEENERLKMSLTQLKGKCIAQPSQDNRDHMVKKLETGTIVACTKSLEEMSRT

SEQ ID NO: 211988 - protein, 332 aa, Zea mays
  unsure (1)..(332): unsure at all Xaa locations
  Clone ID: MRT4577_124932C.1.pep
MARRRSQKNKKTPPKENKEEEEENERWRPNDESTSPKGLSSHFDSHMCCVANENDSGSTNEDEEEERSFMQLYARLSQEDKAVMLKLLERAREQXSSSKARRCSLHENATLXELTKEHEELKCSHVDLVQRYETISIEQDNALQCIAQLVNRNALLKDQVEKLKVENLAFQEKYDMLLCSHENLMDDHIILNIAHEVVIENLKSQQPHSCTCIRIETILPCANACCPSTSKSSFELEFAGTKDDTYQKLKEENERLKRSLTQLKGKCIAQPSQDNRDHMVKKLETGTTVACTKSLEENVKDLRIXSKRREQKKKSNAAAKSLNHASMQGNIQ

SEQ ID NO: 211989 - protein, 451 aa, Zea mays
  unsure (1)..(451): unsure at all Xaa locations
  Clone ID: MRT4577_124933C.1.pep
MAHRRSQKNKNTTRKEVTLEILFSDCSNYDSWSTSVLNAFRIIDPQLEQIIDKSIIPSDYDASEKDQRCILLNYLALDILGNSLSEEDYHAFITNYNEHIPDAHDIWTRIKSKFDKSKNDGSFDTSPSFSSCDTNPLKEEEDNERWRPNDKSTSPRGLSSHFDSHMCCVANENDSGSTNEDEEEERNSVQLYARLSQEDKAVMLKLLERAREQXSSSKTRECSLHENAMLXELTKEHEELKCSHVDLVQRYETISIEQDNSLHCIAQLVNRNALLKDQVEKLKVENLAFQDKYDMLLSSHENLMDDHIILNITNEVVIENLKSQQPHSCTCIQIETTLSCANACCPTTSKSSFELEFAGTKDXISKAQRRXERLKMSLTQLKGKCIAQPSQDNRDHMVKKLETGTTVACTKSLEENVKDLRIVKRREQKKKINNSSKSLNHASIKGNIQVT

SEQ ID NO: 211990 - protein, 359 aa, Zea mays
  unsure (1)..(359): unsure at all Xaa locations
  Clone ID: MRT4577_124934C.1.pep
MARRRSQKNKKTPPSNVTQKEEEEENERWRPSDESTSPKGLSSHFDSHMCCVANANDSGSTNEDEEEERSFVQLYARLSQEDKAVMLKLLERAREQGEARQRLESILSMKMQCFDELTKEHEELKCSHVDLVQRYETISIEQDNALHCIAQLVNKNTLLKDQVEKLKIENLAFQEKYDMLLCSHENLRNDHIILNIAHEVVIENLKSQQPHSCTCIQIDTILPCANACCPSTSKSSFEXNLQEQTMIHIKSSRKXNERLKMSLTQLKGKCSARPSQDNRDHMVKKLETGTTVACTKTLEENVKDLRIAKRKKQKMKFNTSSKSLNHASTKGSEQISYAKNQGLQHGGKPKDGNTYLLSI

SEQ ID NO: 211991 - protein, 96 aa, Zea mays
  unsure (1)..(96): unsure at all Xaa locations
  Clone ID: MRT4577_124935C.1.pep
DAGGTRVIFLGQLSHSNXVKLDWYCCDVXAPRLVYEYMALGSVDSHLFSRTSPLLPWATRMMIALGCAPGLSXLYXGPRSVIYRDFKISNILLDAH

SEQ ID NO: 211992 - protein, 39 aa, Zea mays
  Clone ID: MRT4577_124936C.1.pep
MVILGYRKKKKKKKKKKKKKKKRKKNKKKKKKKKKQKKK

SEQ ID NO: 211993 - protein, 94 aa, Zea mays
  Clone ID: MRT4577_124937C.1.pep
ARNSARGGGGGYFCGGYGGGYGGGSGGYGGGGSGDYGGSSGGYGGNYSNRAGGGYGGGGDYGAAYRALRRSIQKSFSTYIQHQQESTILTAPIS

SEQ ID NO: 211994 - protein, 84 aa, Zea mays
  Clone ID: MRT4577_124938C.1.pep
RESEPTYPPREKEAKSGRASAPNGFHFPLQEGLSFMLLFLQCYCSSSRDGTGSGHEPAGSAGCIASYKTWTPAPQCNVTPAEDN

SEQ ID NO: 211995 - protein, 171 aa, Zea mays
  Clone ID: MRT4577_124939C.1.pep
MEMASSSAPTASYNVSVAQAVLTLSINAILLWLTTVIKSYSSSSSSARRRDAAPASAPAPAKPAAAAVAVDLDVVLGLMGAGAESVGFEEAAALFEEEEATVEEARQAFAVFDRDGDGFIDAAELRTVLTSLGFESGVAAAECQRMIDAYDEDKDGRIDFREFVKLMETSH

SEQ ID NO: 211996 - protein, 144 aa, Zea mays
  Clone ID: MRT4577_12493C.1.pep
ELPERLLLTYKPEELEDIPEPASVEEENAPVEEPVLVPPVTEVVSPPKTEVADTGDLLGLNDPNPAVSAIEESNALALAIVPTDGASTTGNTAFQDKGFDPTGWELALVTAPSNTTSSASVGQLVIDFSIWADWSNRWLFYRHE

SEQ ID NO: 211997 - protein, 180 aa, Zea mays
  Clone ID: MRT4577_124940C.1.pep
MEMASSSAPTASYNVSVAQAVLTLSINAILLWLTTVIKSYSSSSSSARRRDAAPAPAPAPPSPSPAKPAAAAAAAVDLDAVLGLMGAGAESVGFEEAAALFEEEEATVEEARQAFAVFDRDGDGFIDAAELRAVLTSLGFESGVSAAAEAECQRMIDAYDEDKDGRIDFREFVKLMETSH

SEQ ID NO: 211998 - protein, 72 aa, Zea mays
  Clone ID: MRT4577_124941C.1.pep
FLNHFPEKRQATNNALVSVVHRKLGTSPGRQGLHGSVFHSQNQASGRHTLSYAIMQLQMHVKATTMYRVLPC

SEQ ID NO: 211999 - protein, 64 aa, Zea mays
  Clone ID: MRT4577_124942C.1.pep
FLASASSRLICTRPAAEGNGTVLSLIAEREMPTQRTLLLWTGPLEGARSQGSNQGLRELLYKRY

SEQ ID NO: 212000 - protein, 121 aa, Zea mays
  Clone ID: MRT4577_124943C.1.pep
IGAILTYILHEHYEFLSCSCLAFAPPACMTWELAESGKDFITSLVNRNDVVPAFSKVSSESLRSEVMVSSKLDNVQDHFHHGLFATISQRVAFIRSHMLSISHSTGKIADHGFSISEPLLK

SEQ ID NO: 212001 - protein, 75 aa, Zea mays
  Clone ID: MRT4577_124944C.1.pep
MNDLMTKSFMSYVDLKKAAMKDLEAGGDETGTELTQAGGGGATDERLKGFFREAEAVREEMAPIRDALARLHAAN

SEQ ID NO: 212002 - protein, 407 aa, Zea mays
  unsure (1)..(407): unsure at all Xaa locations
  Clone ID: MRT4577_124945C.1.pep
MDPKGNAKVIKEKEKENPSNETPKRGEIVDSGSSKKKKDGKKKKRIKNILYYDNDASSSSLKEEDDSSSTKKRWEEYNKVSGLDNAKKLWDTLEISHEGNDVTMITKMELVEDELGRFAMKRGEEPTETYNKLKALVNKVLPDKVAKIEAIGLNEEKMALVMKRFQTALKGHKDYPSKSKSRGKRTCFKYDKKGKEKKKFDKKKKGVAHISKEWDSNCFSSNSDDEGLVASAFNKSSXSLFPNEXHTCLMAKEKXRFLEKQEDILYEEHGKLVNVEKSLALEIKKNEMFALELSSCDDSICSLKSLNVDLNARIEKMSIVYASRGSSWIIDSGCTNHMTEEKKMFSSYVKNKDSHDTIIFVHGNQGKAGKQVGTSHPNKNMATMSRPFELLNMDLFGPVSYLSIRGR

SEQ ID NO: 212003 - protein, 83 aa, Zea mays
  Clone ID: MRT4577_124946C.1.pep
NNFFLASNPPPNLPHRGLFGPHILPPKGPWKFCNPPSWQAGPRGTKWGSCVGWPNVNYLHAGPQCTKCGSGVSCADVNISFAF

SEQ ID NO: 212004 - protein, 100 aa, Zea mays
  Clone ID: MRT4577_124947C.1.pep
HACVIPGSYYTADPLFRPMPISLILTSIFITFYSNTFIPSAWHKQYYRAARKTITNLSLNSSSKTVHLFFSAGHNLSEITFMPLTRGDNHNILSWDDRTY

SEQ ID NO: 212005 - protein, 62 aa, Zea mays
  Clone ID: MRT4577_124948C.1.pep
TSSQFRGLALHHVRAPPSVSRGGRTACSPQYAEFQHPKHRDYCPLLSSFLVSKKFFNFYFFF

SEQ ID NO: 212006 - protein, 53 aa, Zea mays
  Clone ID: MRT4577_124949C.1.pep
VLRRDGRGSNVRHQSRRSTPVTIRRHDLQAFYDAYLRRKRLPDLGLMSMRCIL

SEQ ID NO: 212007 - protein, 89 aa, Zea mays
  Clone ID: MRT4577_12494C.1.pep
ITFILYLLTGPCVGKTTSRPEARQRLAEVGGACSESGCRGRDIGLRAFLASDREARGSYLVTSRGRRVAAHEQGEGGAGRGKATGIPAG

SEQ ID NO: 212008 - protein, 65 aa, Zea mays
  Clone ID: MRT4577_124950C.1.pep
TDQSELATVRFIPGSISVVHGRASVTSLGSLHQLPDERDARGFVACFVSSELQYCNKKYCLVTQL

SEQ ID NO: 212009 - protein, 138 aa, Zea mays
  Clone ID: MRT4577_124951C.1.pep
KKIRSFFVPQGPCVYFCPSPEEILGPPFSLSGPFFFFFVPKPIWFPLGSLNRFNFGIKEILVLAAPPFFAGGFCFLLFGPLVRKTPLEGPPPFFFPGKFGIIFSGGEPPPCLKKKKKKKKKKKKKKKKKKKKKKKKKK

SEQ ID NO: 212010 - protein, 195 aa, Zea mays
  unsure (1)..(195): unsure at all Xaa locations
  Clone ID: MRT4577_124952C.1.pep
SPSYASRCRHCTLAASIGQWDHGWSVRVLSVEGKMRGHNGEVTAIATPIDNSSFSVSSSRDKTLLVWERTNPAQSAPEGGDTDEYSGLFRRLNGHSHFGXDASLSCDEQRALSDSWDGEVRXWDLSTCLSTRRCRGHENEGISVAYSDDDRRIGSAXRDKAIGVWNTLGEREYTIGDGLDGGEGHNGRVSXCVRF

SEQ ID NO: 212011 - protein, 80 aa, Zea mays
  Clone ID: MRT4577_124953C.1.pep
YGSLGWVMGPTYQSSVRRVSPLPTAWSINVSARRMALVVRPMTVVVRAVRVRSRTPASQVPPDPTGLVEHPVALDGRPAA

SEQ ID NO: 212012 - protein, 103 aa, Zea mays
  unsure (1)..(103): unsure at all Xaa locations
  Clone ID: MRT4577_124954C.1.pep
GGGTEAPPSPTAGTXRTAXQRXAERGGGAXXAFLLALACHASDPAEAERLKFLAXASGKDEYSQWITASERILVEDMAAFPXTKPPLEVDFAGIATEVGPRYY

SEQ ID NO: 212013 - protein, 101 aa, Zea mays
  Clone ID: MRT4577_124956C.1.pep
PRVRYDQNEYEELWRKATDRKPVSRQRHLRSASKRYVTEAIGLSYLDYYPDLAVQIKSSDRDKRLSLLRRFFFWLENLCHEGAYMPWISKPLACNPISPDG

SEQ ID NO: 212014 - protein, 57 aa, Zea mays
  Clone ID: MRT4577_124957C.1.pep
RNGSPPPHFCKTSGVVARNILQQLQIMGIIDVDPKGGPLFPPQGRGVLAQVAGRVPF

SEQ ID NO: 212015 - protein, 70 aa, Zea mays
  unsure (1)..(70): unsure at all Xaa locations
  Clone ID: MRT4577_124958C.1.pep
KRYCVLLIVDSNDFSKKKKKKKKKKKKKKKKKKKKKKKKKKKKKKKKKXXXXXKKKKKXQKKRGGFKEPN

SEQ ID NO: 212016 - protein, 334 aa, Zea mays
  unsure (1)..(334): unsure at all Xaa locations
  Clone ID: MRT4577_124959C.1.pep
MSYDQMLSPLFGAGGRSAWRAGAQHGGGDAVTRQILKCTRWQLEETTDFVTCPYHYYCDSSYPGDYPAAVGALVAAFAAYCFLSTLAFTVLDLVXEQQRVGAGAGRPRRXRKYLVPSGPFLLPLVLLALARGQRVNAVFPLAQLGPALLLLLQASALAFRNEADGDVRYAVLEASTVSGVLHASLYLDAVVLPYYTGLEALRWSRFSGECASCLCRMEPLLVGGSAVRYRGLSKTALAVIFALCSRMVCRIYGEERLSAWTRSALEAAGWVLVAADAVYLVGWVAAEGGGVGVAAYSLVAGLVFLSVFGKAYRFLAWVEARQSQWKSSLCHSAV

SEQ ID NO: 212017 - protein, 261 aa, Zea mays
  Clone ID: MRT4577_12495C.1.pep
MTTSGAPKRPSFKRSSPGKKSRLRNRRVAAGGREGEAEAAGTSALARALLPASVALDAVPPVGRALPRHFFEVDALDLAPRLLGKLLRRDEVVLRITEVEAYRPNDSACHGRFGITARTAPVFGPGGHAYVYLCYGLHMMLNVVADIEGVGAAVLIRSCSPVSGLETIQRRRGQQTEKPILLTGPGKVGQALGLSTDWSNHPLYAPGGLEVLDGPEPESVLVGPRVGIEYASPEHVAAPWRFAIAGTPWISAPKNTLRPRY

SEQ ID NO: 212018 - protein, 329 aa, Zea mays
  unsure (1)..(329): unsure at all Xaa locations
  Clone ID: MRT4577_124960C.1.pep
MSYDQMLSPLFGAGGRSAWRAGAQHGGGDAVTRQILKCTRWQLEERRGFVTCPYHYYCDSSYPGDYPAAVGALVAAFAAYCFLDLVRXTVAAPRRRRRPASGASXRKYLLPSGPFLLPLVLLALARGQRVNAVFPLAQLGPALLLLLQASALAFRNEADGDVRYAXWXASTVSGVLHASLYLDAVVLPYYTGLEALRWSRFSGECASCLCRMEPLVVGGTAVQYRGLSKTALAIIFALCSRMVCRIYGEERLSAWTRSALEAVGWVFVAADAVYLVGWVAAEGGGVGVAAYSLVAGLVFLSVFGKVYRFLAWVEARQSQWKSSLCHSIV

SEQ ID NO: 212019 - protein, 45 aa, Zea mays
  Clone ID: MRT4577_124961C.1.pep
HTYYYSHTFTTTHSNPTIRSLLKSQSSTTIITTPSTTYLTNSLTP

SEQ ID NO: 212020 - protein, 60 aa, Zea mays
  Clone ID: MRT4577_124962C.1.pep
FLHPLASVTICCVSPSFISKINVSCKPSNRLWYTSLFASGLRLQKWVLLAHLYGITVITK

SEQ ID NO: 212021 - protein, 126 aa, Zea mays
  Clone ID: MRT4577_124963C.1.pep
GSARRACAGWSLVVGGTAVQYRGLSKTALAIIFALCSRMVCRIYGEERLSAWTRAALETVGWVFVAADAVYLVGWVPPEGGGVGVAAYSLVAGLVFLSVFGKVYRFLAWVEARQSQWKSSLCHSAV

SEQ ID NO: 212022 - protein, 556 aa, Zea mays
  unsure (1)..(556): unsure at all Xaa locations
  Clone ID: MRT4577_124964C.1.pep
MPLQTIYVAISDLDIWYCVVFVLRNILLGTYYLEIIDESSEVHDAYMLADFLEKKVDEIGRDKVVQVVTDNGANYKAAGKLLMERIPTLFWSPCAAHCLDLMLEDIGNLKEFKKPIARARRVTTFIYRHGRILAAMREKTSGADLVRPAATRFATSFLTLKSLYKHKDALKALFASTAWTDNRLSKTSAGLDVYNIVFSTQFWNSVEDCLRASGPLLIVLRVVDGDERPAMPEVQALMKCAREKINQSFAVQSKKTLLKKIITIIERRWEKQMDHPLYGAAMYLNSGKLHHLIRNDDXCYCWLAKXVAFLMCLQEXDDEETRDKINSQAMDYEFLRGAAFSNKMAKDNLQTMTPLEWWRSYGGRAIELQRFARRLVSLCASSSGCERNWSTFEFIHTKKRNRLLHKRLNSIVFISYNRKMKARFQKLRQKKGKNFDPLVHEDFNWDNEWADSLHVVPEGGRGCECDLTWDLVDNAIGASQALRGRNLPRRAHNVYSRRNSVAAQNMSEAEEEDEDEDEDVPHDDAEITDCEDESNGGNDGEEGEAPNIPGEFDDDF

SEQ ID NO: 212023 - protein, 214 aa, Zea mays
  Clone ID: MRT4577_124965C.1.pep
MEGNVISEVLSGNGAVYENGAKDCATEVCGSKNDRREEGLFLLNDPIISPSTDEVSMTHSKDNHEKEGMILIGASETCAASVGQPEENSKIAEAAVAHVACKEEGNLLNNPRETDVAPFGSWGTLNTTEISVNKITQEKEWRIPIEPNEAIVPEANKEHQSCKSSLLPICSSEKVSAPKEDSKKALSDSVVNSVVKSPPRIILAPQYWRYLLSR

SEQ ID NO: 212024 - protein, 59 aa, Zea mays
  unsure (1)..(59): unsure at all Xaa locations
  Clone ID: MRT4577_124966C.1.pep
MDGRTRRQLYTGFGQVXVTPRVDTKVLHAFQTSFVQVQTQLDQNRLLINEINHNHESKV

SEQ ID NO: 212025 - protein, 714 aa, Zea mays
  Clone ID: MRT4577_124967C.1.pep
MQGTGHGRRDNASSSNSSLHVSQTSGLPPKLPLKKNSKSQNSYIRKGNALIRNPANGNNHLHSSSSLDSQNKLSKPVMRRSMNFVRNVDSKDAAHSHISVERPKTPPLPLHTKSISCAVNVLEPLSQNLQQQVLETEKEDSSGQVNSGADNLSIISLHKSEALDAGKAIYVRPKLNQLVAQGRHLGESSNISLDKVTLLQPSATSDLYFKKRKNQIILGPSTSDAPSSKDTFQAENIKSGESKVLMSSSWNNNITVAKDRLHKALQTTNTVRSFSHVWTLNGQNPRKKSYVGASHMKVLPRILPWKRKIFCQNFRGSYSSLLNTSSIGIMRKLLQTRKRSTIYTVSTDGFSLRKSGVLSIGGSSLKWSRSLEKHSRKVNEEATQAVAEVERKKREKRKRQSLRSKGRNDRYSASVAANQLTNRSRASSDSRVSSTCNEYVRVNKGNQLVRNPKKVIRMLASEKVRWSLHTVRTRLAKKRQYCQFFTRFGECKKSGGKCPYIHDRAKVVICTKFLKGLCSSTSCKLTHKVLPERMPDCSYFLQGLCTNTACPYRHVKVNSNAPVCEDFLKGYCADGDECRKKHSYVCLVFEATGECPQGSRCKLHHPKKKSKSKRSKVDTVQNNSRGRYFETNVGHGSGARIVYLEEDERQKPEQVSGEEFADFIELGAGIEVPEDADTSDDIQLMELDSGNLEVQADNNDAIIKPLRIMRTARV

SEQ ID NO: 212026 - protein, 101 aa, Zea mays
  Clone ID: MRT4577_124968C.1.pep
NNLCYEQCRKKHSYVCLVFEATGECPQGSRCKLHHPKKKSKSKRSKVDTVQNNSRGRYFETNVGHGSGARIVYLEEDERQKPEQVSGEEFADFIELGAGIE

SEQ ID NO: 212027 - protein, 122 aa, Zea mays
  unsure (1)..(122): unsure at all Xaa locations
  Clone ID: MRT4577_124969C.1.pep
QFFTRFGECKKSGGKCPYIHDRAKVVICTKFLKGLCSSTSCKLTHKVLPERMPDCSYFLQGDSFVVSLLPSLTILCNXACLHSYIYMYVLASLLGLCTNTACPYRHVKVNSNAPVCEDFLKG

SEQ ID NO: 212028 - protein, 261 aa, Zea mays
  unsure (1)..(261): unsure at all Xaa locations
  Clone ID: MRT4577_12496C.1.pep
MTTSGAPKRPSFKRSSPGKKSRLRNRRVAAGGREGEAEAAGTSALARALLPASVALDAVPPVGRALPRHFFEVDALDLAPRLLGKLLRRDEVVLRITEVEAYRPNDSACHGRFGITARTAPVFGPGGHAYVYLCYGLHMMLNVVADIEGVGAAVLIRSCSPVSGLETIQRRRGQQTEKPILLTGPGKVGQALGLSTDWSNHPLXAPGGLEVLDGPKPESILVGPRVGIEYASPEHVAAPWRFAIAGTPWISAPKNTLRPRY

SEQ ID NO: 212029 - protein, 158 aa, Zea mays
  unsure (1)..(158): unsure at all Xaa locations
  Clone ID: MRT4577_124971C.1.pep
SCSWPSWGWPCRRPPGRFWPPRPASXPFWLLLXGWCSPVPLSVGFACYGRCGAPPPGSVVLALFQXLDGSLGLSPLSAGXFRRLSRRLCSLVPSGPPRPPLXALFRRLRVPLGGSAPGAVVPAGGLFPAPPWGVLASASEERARAWVGPGLPGRSGGR

SEQ ID NO: 212030 - protein, 60 aa, Zea mays
  Clone ID: MRT4577_124972C.1.pep
CIYVCIYAANADAIHAVCTPRPSFSTNHLFQPSDTQIIVFQTSVYPAYMKHLTASIPCNN

SEQ ID NO: 212031 - protein, 52 aa, Zea mays
  Clone ID: MRT4577_124973C.1.pep
HIYKTDHTGNYSRTPVWWFLTRGPNLCGHMTKRKTPRTELCQGCASCLAGSA

SEQ ID NO: 212032 - protein, 79 aa, Zea mays
  Clone ID: MRT4577_124974C.1.pep
LHHKTLAFESPSLKIQKPFYYNTCHDRCCSNDEPKKVFFDQLVWSTKDKTSHLLFPLKFKFFMSNQTKLMSNSKSTTFF

SEQ ID NO: 212033 - protein, 97 aa, Zea mays
  Clone ID: MRT4577_124975C.1.pep
SRPAGPGHSKRVKKLAVELGNPNVVWSASEDGTLRQHDFRECSSRPRAGSANQECHNVLVSILHSFPCNVLLVTSSLHSSYGAWHFSLSSICSSFFS

SEQ ID NO: 212034 - protein, 255 aa, Zea mays
  unsure (1)..(255): unsure at all Xaa locations
  Clone ID: MRT4577_124976C.1.pep
PPQPFSLSSFQPTHTTTSRCSQAHGAAAAPPPCSSLRGDVQHLSMDASLPKLQGAQGSSTFIPHGSMVLGVFSPLLEFVAAFPCTGSSHGRPPFFLPIPGSSTPAQGQRLPWPAPQAPAPPCELPPPAARYPELLLFSHGGRPEIFPAPSLFIFLPAGPACCSPAPWHPCNIPLPPPRLPHPGTQAAPFLAPLCPQRQAAALPPKDSAPISLSRQRSSSQPSFPRSPQHRRVIGVRRNARXKYYVVRSSPDVFAR

SEQ ID NO: 212035 - protein, 89 aa, Zea mays
  unsure (1)..(89): unsure at all Xaa locations
  Clone ID: MRT4577_124978C.1.pep
FPPPKGFFPKPVPRGGVFVFPXGLVPFHQNRGGGPPPVFPPFNTQSRGPRAFPITLFGPVPPVPPDILPRAFRINRGGVGPLRAHFGPK

SEQ ID NO: 212036 - protein, 123 aa, Zea mays
  unsure (1)..(123): unsure at all Xaa locations
  Clone ID: MRT4577_12497C.1.pep
RTGRIFPGGRATSRPGGFEDPLYVVDEDCGGALALGGDPDMLQDVCVFDYFFRGGVNXIPCKANEIGHXFLFEGVMISGNTNNPGGSAVTGANVDKFPGENTLRXFMGRXDYAPGGQNPAXTH

SEQ ID NO: 212037 - protein, 245 aa, Zea mays
  Clone ID: MRT4577_124980C.1.pep
FSSFDGRRQGNLWTCFAHIITAVIGCGVLALSWSVAQLGWVGGPVAMLCFAFVTYLSAFLLSHCYRSPASDDGSLKRQRNYTYMDAVRTHLGEKRTWLCGLFQYLNMYGTAIAYTITTATCLRAIVRANCYHSQGHSAPCGAGGDHLYMLLFGAAQAVLSLIPNFHSMAWLSAVAAVMSFTYATTFFYLAVGCFGYAAFGNAAPGNLLTGFGFYEPYWLIDFANACIVLHLLGGYQMFSQQIFTF

SEQ ID NO: 212038 - protein, 86 aa, Zea mays
  Clone ID: MRT4577_124981C.1.pep
MALSIPSATRANAGHNEGLEPRVEARDKGRWNGNGRFKARLHTDLKANVKEEPMKVPMDVCMDGLVRNLMDMLVDVKLTMDFSKVH

SEQ ID NO: 212039 - protein, 384 aa, Zea mays
  Clone ID: MRT4577_124983C.1.pep
MGIWDSILPGGGRRFIKRKDSDAGEAGRALEELRGSLYNDFHTSEGARRQQQKLCGPIVALTFNFVVAVGIIMANKMVMGAVGFNFPVALSLIHYLFAFALMSVLKALYLLPIASPSKSTPFSSLFALGAVMSFSTGLANISLKHNSVGFYQMAKIAVTPTIVVAEFILFKKKVSLRKVSTLVVVSFGVAVATVTDLEFNFFGACVALAWIIPSAVNKILWSNLQQSGNWTALALMWKTTPITIFFFIVLMPLLDPPGLLSFSWDFKNSSTIIISALFGFLLQWSGALALGATSALAHVVLGQFKTIVIMLSGYLVFKSDPGFTSLCGAVIALAGMSVYTYLGMKESAASGRRNSLNSRQNSHLKKPKAIIDGENPETKPMDSV

SEQ ID NO: 212040 - protein, 80 aa, Zea mays
  unsure (1)..(80): unsure at all Xaa locations
  Clone ID: MRT4577_124984C.1.pep
GLHTVGRPAITCWQVSSPITPWLCYTRVSAAGPSRYWCSXAGNLKSARTTDADRGPGCNCLKNCIRGGNRLNVGNYTMSA

SEQ ID NO: 212041 - protein, 43 aa, Zea mays
  Clone ID: MRT4577_124985C.1.pep
AYIMELEAEVAKLKDQNEELQKKQVEMLKKQKDERKTADLSGC

SEQ ID NO: 212042 - protein, 56 aa, Zea mays
  unsure (1)..(56): unsure at all Xaa locations
  Clone ID: MRT4577_124986C.1.pep
RPWDRIEKSRRKKKKKKKKKKKKKXKKXKKXXKKXRGKKKKKKKKKKRASGWFPLF

SEQ ID NO: 212043 - protein, 287 aa, Zea mays
  Clone ID: MRT4577_124987C.1.pep
AIQEPLLFLLSAYSLPESTMRSMLSLSSAPPPPPGAQDAAGLHAAVAALAPPHMLPQGLSPDLTAALLAKDRGNSFAIMEPYRHGMSLELLKARAYAVYPRASLFNHDCLPNACHFDYPDRPGPGNTDIVVRALHDIPEGREVCISYFAANWRYADRQRRLLEDYGFRCECDRCQVESQWKDDDDNNGDDGDDTMEEEGEDDVGDRGDDGIEEEEGDGATNGGDDDFPHAYFFVRYLCDNEGCWGMLAPLPPSPNGDLSHVFECNLCGKLRKEEDVIPDEGTSGMVH

SEQ ID NO: 212044 - protein, 52 aa, Zea mays
  Clone ID: MRT4577_124988C.1.pep
GGCYSRAICLNVGIRILVVELDMEVIVSLVFIKGFLYGFVAWFLFLFAPCPF

SEQ ID NO: 212045 - protein, 88 aa, Zea mays
  Clone ID: MRT4577_124989C.1.pep
LQVHTVVIIFDQPVVAPHPSPQGHLHDGSDCHPHGCCPTAPLVSASCRALRPSDCPWSDLPAPNKCHRRPPLLRRKEEYTRWFESGPI

SEQ ID NO: 212046 - protein, 43 aa, Zea mays
  Clone ID: MRT4577_12498C.1.pep
LVFNKKIFTSQSSLCINVPPCFVSRSDSAIGQIVEFKGYGEPL

SEQ ID NO: 212047 - protein, 163 aa, Zea mays
  unsure (1)..(163): unsure at all Xaa locations
  Clone ID: MRT4577_124990C.1.pep
MVSAAAQAGVVAACVVLFVPMGLAGWHLSRNKVLFFSGALFISLAVGVHLSPYLPSLPHLASSFLLPHSGAASASASSSSGSSCVPFLHRVSWSDAAGAADDGSGGGKARAWSWPPSLASACGFARLSRDDASLLLNGSWVMVAXDSQARLLVLALLRLLLDP

SEQ ID NO: 212048 - protein, 87 aa, Zea mays
  Clone ID: MRT4577_124991C.1.pep
NEPNSPGAGAEKELVWANLLFKGQVGREENPPFTGKPFKGPNPRKPPGPFLQHHKKNLFGGEHLKPLGGKLYGGVFLGGPTQGMGPA

SEQ ID NO: 212049 - protein, 129 aa, Zea mays
  Clone ID: MRT4577_124992C.1.pep
PAGPGHPLILISLSLSLICRIPFFISLFHYSVVATASSYGLQRLPQFVTIGHGCPHWQPLQPVSIDGEENEAAAGVLGHVPQKAFAGEADEPGCRGRRQGQDEVLRATGHGGGGEDGSPEAPRPDRQLR

SEQ ID NO: 212050 - protein, 106 aa, Zea mays
  unsure (1)..(106): unsure at all Xaa locations
  Clone ID: MRT4577_124993C.1.pep
MFXAEHHHHLSHHRMPREEGASGEVDYEMKRSTHTHMXXATGETAXPSLSGCVHPCYQKHYAKKDPXTXHGHRLKXEVACPTSGGSAAFTFHEHHQMKDSNKHSHN

SEQ ID NO: 212051 - protein, 48 aa, Zea mays
  Clone ID: MRT4577_124994C.1.pep
GKKKKTKKKKKKKKKKKKKKKKKKKKKKKKKKKKGGPWTPSFCPFKGG

SEQ ID NO: 212052 - protein, 70 aa, Zea mays
  Clone ID: MRT4577_124995C.1.pep
FLGPGNAIGSTNMRGDPPSLINPKTGPKHAEGDSKLKNFFFFFFTHPTKYLFLGARLASFFFVQPPPQAG

SEQ ID NO: 212053 - protein, 94 aa, Zea mays
  Clone ID: MRT4577_124996C.1.pep
KLSGIMGDSQKIFAGATRPSLTINSTRYHDLKHVNQQITIRTRTKFKRYMCPAIADYNHVGIKKLISANLINQLDGRQLQELQYLNKDLWRERA

SEQ ID NO: 212054 - protein, 96 aa, Zea mays
  Clone ID: MRT4577_124997C.1.pep
VRSDTLIRICHLYPCTVILFNISNGSWTSNKSCTLYFRYINLHGLCMLFWYTLFIAYGLMDFLSQAPVPSKPMYIVFSIGIMSSMVHRFISASRLL

SEQ ID NO: 212055 - protein, 138 aa, Zea mays
  Clone ID: MRT4577_124998C.1.pep
ATKRRAPADGTSRRDGVLVLATATTAVAPAVVFTPPPPPASVNVALPPVQVPPPQYEKASAGGKHDVSAFGFFWDAVARVQEAHASLDEYVSTWFGLDQSKYQWALNDYYETIGKVSKEVDCIKGGMPKEPTTKVQKL

SEQ ID NO: 212056 - protein, 391 aa, Zea mays
  Clone ID: MRT4577_124999C.1.pep
YTPSLHAPTRGLARRCSQSGAKHDDDLCIRLKYTGYRAFMAEVKDYACDRAGVPTSSSGSAASSANNSEGKKARVLKREPCQSKRCGCGFRIRAIVPIANYNEKDKTFVYLEEGTAVFKLYAVHSGHEPGPLDGNARIVHRLVGHKGALEFDPDIYGVSEEGDPTFSAKGDEYVDIDDSHQAVLQQVRDLRSEVLLLEGKVAKMHPELLGSLSTELSEVLHRIRKFNLEGNVYQHETLMVGNEEVRGWGSADVSHQLDQHDRAFCKDDEMLDDDTDFGSSLGPIVSWDRMEAECEDRKMLMGDSPKCDKWMLKDDVGEFDAKSILNCGDDDGVGDSKVIKPLMHDDTMVTGPSLVGIHVEGFYAGTKWYDSQGLDSSVDGGDSSFRHGGIV

SEQ ID NO: 212057 - protein, 98 aa, Zea mays
  Clone ID: MRT4577_12499C.1.pep
AVGLLWRGSSTVATRKNLLARRALTPLIATKDQDSVRLLAVEGCAALGKLLEPQDYVAHILPVIVNFYQYLTENNYFVMIGVIGLPGVGKSTIMNELC

SEQ ID NO: 212058 - protein, 85 aa, Zea mays
  Clone ID: MRT4577_1249C.1.pep
RPQEDCTATPAPQRVARAGQAFERWPGPGRPLPPGCLPNCLAVIFGRVGGVIQVKVKHEGLVKFSGNSNKSVETCVSIAPFWDLN

SEQ ID NO: 212059 - protein, 65 aa, Zea mays
  Clone ID: MRT4577_124C.1.pep
TQALKNNNYLTLAVPHHDAHTLLVHSINPFYNNYNPNTLKDDPVVLKALYYIYILNEETIVYCYN

SEQ ID NO: 212060 - protein, 190 aa, Zea mays
  Clone ID: MRT4577_125000C.1.pep
MGSSSSPPPPPPLPLPMIGRAGNLTIFITPPSPASTPRGAGRTPPLESPRSDISTPIPQRAAPSPSLSPSPRNHESRAVAPAVVFTPPPPPASVNVALPPVQVPPPQYEKASAGGKHDVSAFGFFWDAVARVQEAHASLDEYVSTWFGLDQSKYQWALNDYYETIGKVSKEVDCIKGGMPKEPTTKVQKL

SEQ ID NO: 212061 - protein, 55 aa, Zea mays
  Clone ID: MRT4577_125001C.1.pep
SSIKLVKVRFMASDNHLNIPQSISTRKSYIPIQILKMFTMLKIFSFRTDFTNIKP

SEQ ID NO: 212062 - protein, 45 aa, Zea mays
  Clone ID: MRT4577_125002C.1.pep
VLIPAQVKFVTRSFSTLIYICLVITSVLFSLALCIQIVSRVCRFK

SEQ ID NO: 212063 - protein, 74 aa, Zea mays
  unsure (1)..(74): unsure at all Xaa locations
  Clone ID: MRT4577_125003C.1.pep
ASIYARQNMLINVLRAIPTCFCKEECPAVLPHALVVAFVKTDKDFXLWLTFVIIDEWVVTXASVGDSHCIREST

SEQ ID NO: 212064 - protein, 122 aa, Zea mays
  Clone ID: MRT4577_125004C.1.pep
PRRRQHRRACAGPCATSPSSTSYRIRSYGASISQLLVPRALGLGRGVFYEAFGTAIEISFARMLHLTAVVWNATRLAGIGSERRLREAIRIVGGEATVLADIVVIFVLAEKDSTSSALTWFF

SEQ ID NO: 212065 - protein, 81 aa, Zea mays
  Clone ID: MRT4577_125005C.1.pep
CSSSLKQGALTYMGRAFFVSAAPGFLPFNKQYTVNPKAYVRLEPLLPSEEVALASMVQEAFLPFSECAHWAPPVSLAAVLQ

SEQ ID NO: 212066 - protein, 65 aa, Zea mays
  Clone ID: MRT4577_125006C.1.pep
THSYLATYIDKHTINILAPLYTYMAKAPCPPCYFIKRYYLDSYSTMLTTIPLSSVTLIISILNYT

SEQ ID NO: 212067 - protein, 83 aa, Zea mays
  Clone ID: MRT4577_125007C.1.pep
MTGKAKPKKHTAKEIAAKIDAATTNRGGGKAGQADRLGQDKGGHAKLACPLCRTPAPDIKSMQIPPAWGAIPFGFNPIRRPDL

SEQ ID NO: 212068 - protein, 295 aa, Zea mays
  unsure (1)..(295): unsure at all Xaa locations
  Clone ID: MRT4577_125008C.1.pep
MISTAHSRQQHHAFEKSPGNSHMKSIDRKLQQAMSQAASKYMQRIYPLGMQRSSSSLTLSSLSLSQNSNDSSISSSNSSWEPKVPLLYGGTFSPWGDVMVSREMRREDDDKVSDHDVEGGEEDLDCSEPGSLRRCSWITKNSDEAYVQFHDECWGVPVYSDNRLFELLSLSGMLIDHNWTEILKRRDMYREAFADFDPSAVARXGAGVGYMWGHVNHRPVVGKYRHHKYIPFRTPKSEAVSKDLVRRGFRLVGPVIVYSFMQAAGMAIDHLVDCFRFHDCVRLAERSWGITNVAA

SEQ ID NO: 212069 - protein, 115 aa, Zea mays
  Clone ID: MRT4577_125009C.1.pep
MTGKAKPKKHTAKEIAAKIDAATTNRGGGKAGQADRLGQDKGGHAKLACPLCRTPAPDIKSMQIHHEARHPKLPFEPEKLLNLHSSAPAAAAAAAATAEATTSKPKPRSRPAVYC

SEQ ID NO: 212070 - protein, 73 aa, Zea mays
  Clone ID: MRT4577_12500C.1.pep
AFDDSTLTLSSYSVHPLNLINVSKSLCYVDMLKCGSERTRGIDKQAVKSTLVARYAPMYERVIIYSSNFFIGL

SEQ ID NO: 212071 - protein, 169 aa, Zea mays
  unsure (1)..(169): unsure at all Xaa locations
  Clone ID: MRT4577_125010C.1.pep
MVSREMRREDDDKVSDHDVEGGEEDLDCSEPGSLRRCSWITKNSDEAYVQFHDECWGVPVYSDNRLFELLSLSGMLIDHNWTEILKRRDMYREAFADFDPSAVARMEEEDVAEISGDRELRIAECRVXHRGEPRCIQRLGREFGSFSGYMWGHGPGGGGQVPPPQYIPF

SEQ ID NO: 212072 - protein, 119 aa, Zea mays
  Clone ID: MRT4577_125011C.1.pep
MTGKAKPKKHTAKEIAAKIDAATTNRGGGKAGQADRLGQDKGGHAKLACPLCRTPAPDIKSMQIHHEARHPKLPFEPEKLLNLHSSAPAAAVAAAAAAAAAAEATTSKPKPGVRGSLKK

SEQ ID NO: 212073 - protein, 299 aa, Zea mays
  Clone ID: MRT4577_125012C.1.pep
MISTAHSRQQHHAFEKSPGNSHMKSIDRKLQQAMSQAASKYMQRIYPLGMQRSSSSLTLSSLSLSQNSNDSSISSSNSSWEPKVPLLYGGTFSPWGDVMVSREMRREDDDKVSDHDVEGGEEDLDCSEPGSLRRCSWITKNSDEAYVQFHDGCWGVPVYSDNRLFELLSLSGMLIDHNWTEILKRRDMYREAFADFDPSAVARMEEEDVAEISGDRELRIAECRVRCIVENARCIQRVAREFGSFSGYMWGHVNHRPVVGKYRHHKYIPFRTPKSEAVSKDLVRRGFRLVGPVIVYSFM

SEQ ID NO: 212074 - protein, 121 aa, Zea mays
  Clone ID: MRT4577_125013C.1.pep
MLDKLWDDVVAGPHPETGLEKLRKAATARPILIDKDADAGAAGSYKRTQSMPSTPTTPVTPSSSSTTTTPRGASNVWRSVFHPGSNLATKGMGANLFDRPQPNSPTVYDWLYSDETRSNHR

SEQ ID NO: 212075 - protein, 105 aa, Zea mays
  Clone ID: MRT4577_125014C.1.pep
CPVNVLLLLMAGPRVPFFPNGLLGFVCCPRSYGAWWTAKMSPRCLEFLDISSQFPVHEHPCSVSLPAPLSVFPAFPSSFALPVFAVFLYLVSPPPYFLSVYKTPP

SEQ ID NO: 212076 - protein, 54 aa, Zea mays
  Clone ID: MRT4577_125015C.1.pep
LTESPHCISEKDLTELSLYILPPSQNKIYFTFLVIHTITNVFILYMSLYSSSSI

SEQ ID NO: 212077 - protein, 150 aa, Zea mays
  Clone ID: MRT4577_125016C.1.pep
MISTAHSRQQHHAFEKSPGNSHMKSIDRKLQQAMSQAASKYMQRIYPLGMQRSSSSLTLSSLSLSQNSNDSSISSSNASWEPKVPLLYGGTFSPWGDVMVSREMRREDDDKVSDHDVEGGEEDLDCSEPGSLRRCSWITKNSGKKFSSAS

SEQ ID NO: 212078 - protein, 53 aa, Zea mays
  Clone ID: MRT4577_125017C.1.pep
FKGFLLLGNCGFNCECIFLENLVGRKRYLCGLNLYIIMHILDIRSAPPGLQLC

SEQ ID NO: 212079 - protein, 69 aa, Zea mays
  Clone ID: MRT4577_125018C.1.pep
WFAPARRRPDRVLYGPAGGHSRLDGQTDALARAQQRVAGPRRRTMACGGTRCTSGRRGRRLGGPEPQLL

SEQ ID NO: 212080 - protein, 111 aa, Zea mays
  unsure (1)..(111): unsure at all Xaa locations
  Clone ID: MRT4577_125019C.1.pep
YSYSIFFLSSVFYVKLLKFNHSRFFFLIIYLFIKLFLFIFFLSFLSILIYXILFIIFFIFIYIINLFFIXFIFIFFYLFKFFIIYXMYFYFYFIFSLLIIFYIYIYIFFIN

SEQ ID NO: 212081 - protein, 67 aa, Zea mays
  Clone ID: MRT4577_12501C.1.pep
NFFFFFFFFFLIRPFQAGGLANHRRYMENKWPNDVIQTAMQQTWGGGGGYTVAFQTFKPPNISKPSL

SEQ ID NO: 212082 - protein, 115 aa, Zea mays
  Clone ID: MRT4577_125020C.1.pep
KKKNIQKKNNKNLKQIYKKRAGALLESGLISQYILNHNPCYRRHQNSINWTSFYIIDHWENTVVTEIKLLEPNSSLLKWLTIYQARILAFMPTMLTLDGKWATPMSDALNPVGAL

SEQ ID NO: 212083 - protein, 63 aa, Zea mays
  Clone ID: MRT4577_125021C.1.pep
SYLQPPPPYNMPLRFSQHHPPLNKLCPLVYPLPNYLLESFSSNDILITTHASTSLPSSVIPMT

SEQ ID NO: 212084 - protein, 38 aa, Zea mays
  Clone ID: MRT4577_125023C.1.pep
LTPALQIPVGEGPPLARGLPPRAAADEAIPAGGRKEDP

SEQ ID NO: 212085 - protein, 223 aa, Zea mays
  Clone ID: MRT4577_125024C.1.pep
MEDGGLRASILAKDDATCHGEESQSLLEVSQQPELKPRGSDWRPPAIILGLECLESMAFNGIATNLVVYIRSVLHGGIASSASIVSLWYGTSFFVPILGAGIADAYWGNYKTVLISLVMYLLGMVLITVGSFIPSAPALCNFGSCSSSKGTENLIFFSGLYLSAVGCGGVRSALLPLGADQFNNENSLDTPKRRNFFSLFYISDIFGVITSETIVNWVQENVS

SEQ ID NO: 212086 - protein, 55 aa, Zea mays
  Clone ID: MRT4577_125025C.1.pep
PHTPRVGPSVTIKCSAHVAGRGHLWKRGAIDCKQGLYQYMMNKTRQHCDEKKKKK

SEQ ID NO: 212087 - protein, 41 aa, Zea mays
  unsure (1)..(41): unsure at all Xaa locations
  Clone ID: MRT4577_125026C.1.pep
XIVLVRADISRLPFVSGSIDALHAGAAIHCWPSPACAVRLI

SEQ ID NO: 212088 - protein, 106 aa, Zea mays
  Clone ID: MRT4577_125027C.1.pep
GCGHCCRRRRAHSSLNAVSRRILTFSDMPPWTSRLPPCPTVVPVVGKYRWQQSLAQCSNLLDLECEQGTYGYCVSVLRISAILSRATLFVPSNGVVDDVFPDCADA

SEQ ID NO: 212089 - protein, 70 aa, Zea mays
  Clone ID: MRT4577_125028C.1.pep
GSHCARPLPFWLKNSLNVGLAGSTMLPAYDAAPYADSSELFNSQLCLGLYYCLFLTLRRRQVQEMLEVTL

SEQ ID NO: 212090 - protein, 69 aa, Zea mays
  Clone ID: MRT4577_125029C.1.pep
ATHRTLLSSSPVSRLEHAESIGEEESRGERGLTVLRSSPASGMKEAALDLMRMRRAREVPCPEKDDIIR

SEQ ID NO: 212091 - protein, 136 aa, Zea mays
  unsure (1)..(136): unsure at all Xaa locations
  Clone ID: MRT4577_12502C.1.pep
PFWNVKAHSLVXMIQGQFRVQVVSNFGKTVFDGVLRPGQLLIIPQHYAVLKKAKGEGCQYIAIKTNANAFVSPLAGKNSVFRAFPVDVVANASRISREQARSIKTNRGEEPGAFPPRFHHQYSPGFSNESESETSE

SEQ ID NO: 212092 - protein, 111 aa, Zea mays
  unsure (1)..(111): unsure at all Xaa locations
  Clone ID: MRT4577_125030C.1.pep
YQVHNTLLALLGLFGRPPNAYIKPEXDSLKVPILYMHLPPNTXVGAVQPSVLAYRLPHIIAXASASQLSIAHLQQRSLAHLTMQTILSQQQQQLLPELRLLAMVYPVAYLQ

SEQ ID NO: 212093 - protein, 123 aa, Zea mays
  Clone ID: MRT4577_125031C.1.pep
AVPRSGRTVQAGDTVRIQRYRYGISLGFSIKRQLVYVVCKRVSRRPFCAVLSSTVWSSIMPGEGVCVPSDLVAPPCPLGFFVFRMLVGHTASVHGRFVVSVHIKEGYAYVFGGHIGIDWPGQR

SEQ ID NO: 212094 - protein, 44 aa, Zea mays
  Clone ID: MRT4577_125032C.1.pep
SKKCTCHNIIHKSMQQTQIIIYNAKICKSKCILYIENNKTYKTK

SEQ ID NO: 212095 - protein, 75 aa, Zea mays
  Clone ID: MRT4577_125033C.1.pep
RSSLLLLATQFISIIPLWRFPLPVPFCRCHAITNADELKKKTSLQRAVSDLALMEPVSACANGRSDFGLQIGTGG

SEQ ID NO: 212096 - protein, 59 aa, Zea mays
  Clone ID: MRT4577_125034C.1.pep
GLDAGPFFFFGFSRNCFCPSVHATKRKNFQALGICKNGYCKGTVSWTEQAHTASCSSAG

SEQ ID NO: 212097 - protein, 126 aa, Zea mays
  Clone ID: MRT4577_125035C.1.pep
TPTALGRRYNRFDDDRHLLRAGTTRAASPDTNHSSCRVRFGAASVSHLAIMIAREDTAEWWSTSARVLLISFTQGFDNVPDTPRLRIQIHLRWTGRTPHLARHGPGRCRACRIPPCRQSRYARALA

SEQ ID NO: 212098 - protein, 86 aa, Zea mays
  Clone ID: MRT4577_125036C.1.pep
HSLDLRCRSHRSLRHTSHVWAVKQSETRKSSEEATPKVVAFSPLEAVIAKPRSSPLSSESSKVRRSEIATQVTFYMIPVLLIAFKN

SEQ ID NO: 212099 - protein, 65 aa, Zea mays
  Clone ID: MRT4577_125037C.1.pep
MVIVHAACLAVAAASASGVHRPCPCAGLKGLYGAGAGLTTIMGTGGLDPYTEHLRQAYCRPMAAG

SEQ ID NO: 212100 - protein, 89 aa, Zea mays
  Clone ID: MRT4577_125038C.1.pep
RAVSLCPLAPPQDLSNKVLLNAVRAFSPPLLLRLGGSLQDKVVYGYGSAGAGRPCAPFARNASEMHGFSHGCLPLRRWDDLNAFFRRSG

SEQ ID NO: 212101 - protein, 148 aa, Zea mays
  unsure (1)..(148): unsure at all Xaa locations
  Clone ID: MRT4577_125039C.1.pep
AGLDRERPPLIFFNSLPFSIKPDFLRKFSNLFSLYQXASLNSSAYFQQQLPFIHLTATYPQQFFPFNQLSSFNSSSYLQQQHLPPFTHLSXFNPISFFTQQQFVSFXLHTTPNSITLLQLXKLLPFNQLSFTNPTSFYQQPIICNALF

SEQ ID NO: 212102 - protein, 188 aa, Zea mays
  unsure (1)..(188): unsure at all Xaa locations
  Clone ID: MRT4577_12503C.1.pep
SSXTSVTQLXDDHLSETRSGKLDQSTCITGLVSDNCVVSEDKTLMSEDHEEQSPVSGERRVSLEANANEAEEKNLANVISTDLHTKSLQHDIDRIAEETDKDVLSLVFPIEEHEEKYAVSPTAVEKSVRREASACESAGKPLTVIFSNDLHTKHLLHDCDVLIKETGEDVLAQENCNDQPVLAQTDLE

SEQ ID NO: 212103 - protein, 105 aa, Zea mays
  Clone ID: MRT4577_125040C.1.pep
PEASVFVSNQAKRASRAGSSSRRAPGLRGASSHSMSTWAWSSKMVREPTSRLALVAHGPDTPQRWHYRFDDQRWRVQVRMAVVMFGASRSVFVALLPCQPLTIPC

SEQ ID NO: 212104 - protein, 50 aa, Zea mays
  Clone ID: MRT4577_125041C.1.pep
PCCGCLLDQFSTYASRCMLRETIKQSRQELIVVASLVERIPNLAGLTRTC

SEQ ID NO: 212105 - protein, 78 aa, Zea mays
  Clone ID: MRT4577_125042C.1.pep
GLCTTNGEMVGGTLTEPPTSKLEWPGSVAYSTSNLSLRIKTVKVMHTLSSSPLGELVVHIDTIVYPGTLWFLRHSSNT

SEQ ID NO: 212106 - protein, 207 aa, Zea mays
  unsure (1)..(207): unsure at all Xaa locations
  Clone ID: MRT4577_125043C.1.pep
MDKAHLGGGLLALDASPRPLGFLNLLSPPTSSPPFHRTRTMEADDVPAVPGNKGRRSIEVDFFSDDKDKKSAAAAANDKKEDLTTINLLPGSNANDDDDEAATRLRLPNDQDRQNRNTNELSAMQSELARMNDENQRLRGMLTQVTTSYQALQMHLVALMQARADGQPMMPPAVAQTLPVTDAAAVMPSPRQFLXLGPAAAAEETSN

SEQ ID NO: 212107 - protein, 193 aa, Zea mays
  unsure (1)..(193): unsure at all Xaa locations
  Clone ID: MRT4577_125044C.1.pep
GYAMQXSADFETVQRXIKKKLCYVXYDYKREYQLGLETTILVKSYTLPDGRVIKVGTERFQAPEALFTPELIDVEGDGMADMAFRCIQEMDIDNRMTLYQHIVLSGGSTMYPGLPSRLEKEILDRYLDVVLKGNKDGLKKLRLRIEDPPRRKHMVYLGGAVLAGIMKDAPEFWITRQEYQEEGVACLRKCGQS

SEQ ID NO: 212108 - protein, 71 aa, Zea mays
  Clone ID: MRT4577_125045C.1.pep
SPKLVPRLIRPTQNKKDKWCCVECNKPGSPTLICLNKVKKLGPNQHRFVKIGPVPNTPKETFRNVWGLCHH

SEQ ID NO: 212109 - protein, 58 aa, Zea mays
  Clone ID: MRT4577_125046C.1.pep
HVFSVSCGETFSNCTQKLRLRIEDPPRRKHMVYLGGAVLAGIMKVILVYANGVYTVMD

SEQ ID NO: 212110 - protein, 105 aa, Zea mays
  Clone ID: MRT4577_125047C.1.pep
QTVVSDGGKQRSSCGSTTARNFGSGIGARGRAELEQEINCGAIGNYGAYFCQPMAEGHGGAQTTAKMASDCAAASGREQQAGCDAVQINRSKGLASSGRGRTRPA

SEQ ID NO: 212111 - protein, 83 aa, Zea mays
  Clone ID: MRT4577_125048C.1.pep
WIAWWVKILILLPTCDNIRASRLTRQHEYDFHTQIDIYGKSTLLGSEHTYSAWKFTVREGESGYSSKSSFMNYCKAIQKCSQA

SEQ ID NO: 212112 - protein, 84 aa, Zea mays
  unsure (1)..(84): unsure at all Xaa locations
  Clone ID: MRT4577_125049C.1.pep
RAGINFWVDSFLTAAAPXXNGGFFLRIFSDHFTSEQKILMLVDMGCFVEERKGFTPATIVYGWRKTTPPDPGRVFLGCQKISPG

SEQ ID NO: 212113 - protein, 61 aa, Zea mays
  Clone ID: MRT4577_12504C.1.pep
TNLAFRGNYQPTIDPIGISHVLAAVYGVKGLGKGGVNRHRTVLRPKHPRAPPRRSPGRRRR

SEQ ID NO: 212114 - protein, 272 aa, Zea mays
  Clone ID: MRT4577_125050C.1.pep
RKWDAGAIAKAIENNGGGWHGFGWLGRGKWTVAHSNINENGVCLACGEKLAIIDLDPKETEDFATFVAKLAIKRERKSNFENFQKWLEKHGPFEAVVDAANVGLFSHKHLSLSKVNSVADAIRLRFTSKKWPLIVVHNKHLIGERMIKLNDHKLVQKWQQENSIYATPTGSNDDWYWLYAAIRCKCLIITNDEMRDHTFQILERNFFPKWKERHQVHFTLEDRCVTFQMPPPYSVVIQESDKGRWHIPVSEEGLLEKDRTWLCVTRQNSQAQ

SEQ ID NO: 212115 - protein, 79 aa, Zea mays
  Clone ID: MRT4577_125051C.1.pep
SNSILNPKTRDSRTLPLDTFSTEEAMLNDIQEINPNDVHPLNITGKHDQPRHGRGRGAVHIPRRRAAIETATRLASTTT

SEQ ID NO: 212116 - protein, 106 aa, Zea mays
  unsure (1)..(106): unsure at all Xaa locations
  Clone ID: MRT4577_125052C.1.pep
DGCDQPSRPTQVHAHSFPSVRRGTAHTATATEESAELEPAIGTLTRLLCETTTDLGGSHXSCIKTHKLXDFSWPIGALFGXLDLEDISSNGSSKLIXLCSASDASE

SEQ ID NO: 212117 - protein, 37 aa, Zea mays
  Clone ID: MRT4577_125053C.1.pep
FINVRSKVSDQKEKNNLDISRNEHFVDDRWVDKFNQT

SEQ ID NO: 212118 - protein, 140 aa, Zea mays
  Clone ID: MRT4577_125054C.1.pep
MTRGFGGRVHPRHVRSIHSTQNEDRGSQQQRPQYSSQASGQQQSYPRPPAPRGRGARGFGGSEDKGHTTRMCHVTIQKQKEIAEAAAQQSQPKQVMHTASYHSPYIPEYVGNHSAASVASASQSQASWQQLPPPPPIQRG

SEQ ID NO: 212119 - protein, 271 aa, Zea mays
  Clone ID: MRT4577_125055C.1.pep
MAKSFVMAVKNVAQTWYSSLRPGTITSWQKLKDMLITSFQGFQTKSVTAQALFQCTQDHEEYLQAYFRRFLRLRAQAPTVPNEIVIEAMIKGLRPGPMAQYFARKPPQTLEKLLQKIDEYIRADNDFWQRSEEAYRFSEMTRGFGGRVHPRHVTSIHSTQNDDRGAPRGKGARGFGGRFGDQPRKIYCLFYGENKGHTTRMCHVTIQKQEIAEAAAQQNQPKQVMHTASYHSPYILEYVGNHPAASVASASQPQASWQQPPPPPPMQPAYL

SEQ ID NO: 212120 - protein, 333 aa, Zea mays
  unsure (1)..(333): unsure at all Xaa locations
  Clone ID: MRT4577_125056C.1.pep
EQNRRPQHRELHQEGFHNEDDXELQATPWPPSYKPLQLPMYDGHSDPKQFLMSYEATISSYGGNTAVMAKSFVMAVKNVAQTRYSSLRPGTITSWQKLKDMLITSFQGFQTKPVTAQALFQCTQDQEEYLQAYVRRFLRLRAQAPTVPNEIVIEAMIKGLRPGPSAQYFARSRGFGGRFGDQPRKIYCLFCGEDKGHTTRMCHVTIQKQKEIAEAAAQQSQPKQVMHTASYHSPYIPEYVGNHPAASVASASQPQSLQRKINADSAEVKGEEAPKGGLQRKINADSAEVKGEEASKGGLQRKINADSAKVKGEEAPKGGLQRKVSAATPKNKR

SEQ ID NO: 212121 - protein, 344 aa, Zea mays
  Clone ID: MRT4577_125057C.1.pep
MPPKKASATGAAALQPLDPNQETLSLREARSQKRKATSLTPQEDDLDQEIRNMEMLHQQATPWPPSYKPPQLPMYDGHSDPKQFLMSYEATISSYGGNTAVMAKPFVMAVKNVAQTWYSFLRPGTITSWQKLKDMLITSFQGFQTKPVTAQALFQCTQDHEEYLQAYVRRFLRLRAQAPTVPNEIVIEAMIKGLRSGPLAQYFARKPPQTLEKLLQKMDEYIHADNDFRQRREEAYRFSEIARGFGGRFHPRHVRSIHSTQTDDRGSQQQRPQYSSQASGQQQSYPRPPAPRGRGARGFGGRFGDQPRKIYCLFCGEDKGHTTRMCHVTIQKQKEIAEAAAQQS

SEQ ID NO: 212122 - protein, 273 aa, Zea mays
  Clone ID: MRT4577_125058C.1.pep
MPPKKASATGAAALQPLDPNQETLSLREARSQKRKATSPTPQEDELDQEIRNMEMLHQQVQKKKEKMARLADLQRNNHIMAEAEGHADHQFPRVSNKAGYRSSFVLVHARSRRIPSGASGQQQSYPRPPALRGRGARGFGGRFGDQPRKIYCLFCGEDKDHTTRMCHVTIQKQKEIAEAAAQQNQPKQVMHTASYHSPYIPEYVGNHPATSVASASQPHASWQQPPPPPPIQPAYSRGQQPEGSQHTHQQRDFREESEARTVNNTMPESKHIY

SEQ ID NO: 212123 - protein, 48 aa, Zea mays
  Clone ID: MRT4577_125059C.1.pep
VVLAYHWSSSNACYYYMSSGSLSRSPLPSAGRWSGTTLQSSSSPPELT

SEQ ID NO: 212124 - protein, 98 aa, Zea mays
  Clone ID: MRT4577_12505C.1.pep
SRAACLVAHLDAGRGLCSRWSRDRSSGRSSRTRWRRAAPPPPPAGPPRPARQSSCCAPFPLGGGDVVGSLVRLATTDGGFCYCECCCYAILGEPLTRG

SEQ ID NO: 212125 - protein, 335 aa, Zea mays
  Clone ID: MRT4577_125060C.1.pep
MPPKKASAIGATALQPLDPNQETLSLREARSQKRKATSPTPQEDELDQEIRNMEMLHQQVQRKKEKTARLADLQRQIDEATVEVRHLAQDEQERRPQHRELHQEGFFNEDEWYENFHHGNFAFDDASPLSVELQATPWPPSYKPPQLPMYDGHSDLKQFLMSYEATISSYGGNTAVMAKSFIMAVKNVAQTWYSSLRPGTITSWQKLKDMLITSFQGFQTKSAYVRRFLRLRAQAPTVPNEIVIEAMIKGLRPGPIAQYFARKPPQTLEKLLQKMDEYIRANNDFRQRREEAYRFSEMTKGFGGRIHPRHVRSIHSSQNDDRGSQQQRPQYSSQA

SEQ ID NO: 212126 - protein, 81 aa, Zea mays
  unsure (1)..(81): unsure at all Xaa locations
  Clone ID: MRT4577_125061C.1.pep
GFDPPFKIKGLWFFRGQDVPKFERXEVYNMGLFEGAKVDIFYKAQKEGVNPMIEAQEPFKGGALLYPKCLKEGGLPGKKTV

SEQ ID NO: 212127 - protein, 358 aa, Zea mays
  Clone ID: MRT4577_125062C.1.pep
MPPKKASAIGAAALQPLDPNQETLSLLEARSQKRKATSPTPQEDELDQEIRNMEMLHQQVQKKKEKMARLADLQRQIDEATEEVRHLAQDEQNRRPQHRELHQEGFFNEDEWYEDFHHGNFAFDDASPLSAELQATPWPPSYKPPQLPMYDGHSDPKQFLSILQATSASHVRRTLRSEATISSYGGNTAVMVKSFVMAVKNVVQTWYSSLRPGTITSWQKLKDMLITSFQGFQTKPVTAQALFQCTQDHEEYLQAYVRRFLRLRAQAPTVPNEIVIEAMIKGLRPEPTAQYFARKPPQTLEKLLQKMDEYIHADNDFRQTREEAYRFSEMIRGFGGRIHPRHVRSIHSTQNDDRGSQK

SEQ ID NO: 212128 - protein, 355 aa, Zea mays
  Clone ID: MRT4577_125063C.1.pep
MARLADLQRQIDDASEEVGHLTQDEQNRRPQHRELHQEGFFNEDDWYEDFHHGNFAFDDASPLSAELHSDPKQFLMSYEATISSYGGNTAVMAKSFVMAVKNVAQTWYSSLGPGTITSWQKLKDMLITSFQGFQTKPVTAQALFQCTQDHEEYLQAYVRRFLRLRAQAPTVSNEIIIEAMIKGLQPGPSTQGSQQQRPQYSSQASGQQQSYPRPPAPRGRGARCFRGRFGDQPRKIYCLFCGEDKGHTTRMCHVTIQKQKEIAEAAAQQSQPKQVMHTASYHSPYIPEYVGNHPVASVASASQPQASWQQPPPPPPMQRGQQPEGSQHTQHQRDFREESEARTVNSTVPESKHIY

SEQ ID NO: 212129 - protein, 58 aa, Zea mays
  Clone ID: MRT4577_125064C.1.pep
NQQETKTTTIAQTWFILVYNANSSSRLAYAMQRETKDTHASCSINQSTYVHPLRSERQ

SEQ ID NO: 212130 - protein, 49 aa, Zea mays
  Clone ID: MRT4577_125065C.1.pep
AYASATHQAQIQLYINTIHRHGKFAQYYQYYLYYNTSYFITYVLSYYIY

SEQ ID NO: 212131 - protein, 316 aa, Zea mays
  Clone ID: MRT4577_125066C.1.pep
MARLADLQRQIDEASEEVCHLAQDEQNRRPQHRELHQEGFFNEDDWYEDFHHGNFAFDDASPLSAELQATPWPPSYKPPQLPMYDGHSDPKQFLMSYEATISSYGGNTAVMAKSFVMAVKNVAQTWFQTKPVTAQALFQCTQDHEEYIQAYVQRFLRLRAQAPTVSNEIVIEPMIKGLRPGPTAQYFARKPPQTLEKLLQKMDEYIRADNDFRQRREEAYRFSEMTRGFGGRIHPRHVRSIHSTQNDDRGSQQQRPQYSSQASGQQQSYLRPPAPRGRGARGFGGRFGDQPRKIYCLFCGEDKGHTTRMCHVTIQK

SEQ ID NO: 212132 - protein, 97 aa, Zea mays
  unsure (1)..(97): unsure at all Xaa locations
  Clone ID: MRT4577_125067C.1.pep
FARKLVGIDRFGDSVGHAARHSLAYSVISFLSLSHVTPVSSVDCTNGLLFVAESCLHLVELVHGKRLNAQKFSIGGTPRTVLYHNESRXMLVLRTGL

SEQ ID NO: 212133 - protein, 66 aa, Zea mays
  unsure (1)..(66): unsure at all Xaa locations
  Clone ID: MRT4577_125068C.1.pep
VAIVVVGEAGGKEQRQEGEGQIQPREVHRRCAAGEAALTTRDREHQRAQLARXIHEGKTGQLGEIP

SEQ ID NO: 212134 - protein, 217 aa, Zea mays
  Clone ID: MRT4577_125069C.1.pep
MTFAYDTDVVMDDGTIIKTTVTNSGDATKLFLREVRQTRKPLIVGLDTEWRVIRRQGRRPRNRMAVLQLCVGHRCLVFQIVAADYVPAALKAFLASPQHRFVGVVVDVDVERLRCDCNIVVNNTVDLRYAAADVLGRPHLRTAGLKILAREVMGVEIEKPKHLTCSEWGRPLSQAQVRYAAIDAFVSYEVGRLVLTREHAQDAAFTGAMTILPSQLP

SEQ ID NO: 212135 - protein, 148 aa, Zea mays
  unsure (1)..(148): unsure at all Xaa locations
  Clone ID: MRT4577_12506C.1.pep
MLHRHLCYHTTPMARTKKTARKSTGGKAPRKQLTTKAARKSAPTTGGVKKPHRFRPSTVVLQEIRKYQKSTELIIRKLFFQRLVHEIEQDFKTDLCFQSSAVAVLQEAXEDYLVGLFEDTNLCVIHAKRVIMMPNDIQLARRIXEERA

SEQ ID NO: 212136 - protein, 102 aa, Zea mays
  Clone ID: MRT4577_125070C.1.pep
EPAAPAELHAKGHGAGGVLAAGLAEPHHGAAAAGRHAPHDGHPPMDVRRVRNSCRVLPGCCWGRSGSVVGRTGPQAAGGGSARPAVPPDGRTLGVVWTDAGR

SEQ ID NO: 212137 - protein, 63 aa, Zea mays
  Clone ID: MRT4577_125071C.1.pep
YYDLPPLSLINATDLFRKWCVLKKKKKNKIKKNRKLKKQKKRNIYKKKRKKPPTITRLYVRDG

SEQ ID NO: 212138 - protein, 94 aa, Zea mays
  unsure (1)..(94): unsure at all Xaa locations
  Clone ID: MRT4577_125072C.1.pep
MRSVTSRRVKPIEECCSEGRSEHTVADDLDGTLLIFRSAFLYYLLVALXPQLSFLRAFAXLLCSVVFCYYIFLISYYFFFFLFFIFLFFFFLFF

SEQ ID NO: 212139 - protein, 94 aa, Zea mays
  unsure (1)..(94): unsure at all Xaa locations
  Clone ID: MRT4577_125073C.1.pep
XPAPAPXXRRWRXXAGFPQPRPRPSSPANSWPHPRPATSSDFSKGPTIRPCNSGGGSGTACAHRARHRESVELGGVMPWDLDLELGEKERKGSR

SEQ ID NO: 212140 - protein, 48 aa, Zea mays
  Clone ID: MRT4577_125074C.1.pep
KFLKSKKHMLFLNAPTKRYIFFFFLPKQTAPLDFFFFYWHPFQALFFP

SEQ ID NO: 212141 - protein, 137 aa, Zea mays
  unsure (1)..(137): unsure at all Xaa locations
  Clone ID: MRT4577_125075C.1.pep
SPPAAGXEEGTPRAPSRAPXGPGXSTAESAQQASXKRGRAGAGRPGRTXSKRERRTTSHPRTAAAAAAGRRGRGRRSKRGRDAIGNETRVSTAAEAIRRGRSGVRVEREAAQGTSPDSAAAAAAARVEESVRASCRI

SEQ ID NO: 212142 - protein, 65 aa, Zea mays
  unsure (1)..(65): unsure at all Xaa locations
  Clone ID: MRT4577_125076C.1.pep
GILPLKEKVVFLFLYLAELLAERQKLAPFVQVLPFCTRLLNQEILRASSMAPNHNXXDPERNEHG

SEQ ID NO: 212143 - protein, 162 aa, Zea mays
  Clone ID: MRT4577_125077C.1.pep
SRGNMASGSLELSGNLHRSIKSRAPQKDSERAGSKTKQNSPRTTGRTIVTKEIKKNQEQHSPFSFRGRIPHRIEGMGGRMSRGLRVLQEGRRRNPFVHGPETANARNFTTRFCKVGGNPGKPKSPNKKRGKNGSCFQALVQRLILRPGKPRRRESSQRTESR

SEQ ID NO: 212144 - protein, 153 aa, Zea mays
  Clone ID: MRT4577_125078C.1.pep
SRGNMASGSLELSGNLHRSIKSRAPQKDSERAGSKTKQNSPRTTGRPIVTKEIKKNQEQHSPFSFRGRIPHRIEGMGGRMSRGLRVLQEGRRRNPFVHGPETANARNFTTRFCKVGGRYKKPKNPKIQEPRNEELKKEARTAAAFKLWSRGLS

SEQ ID NO: 212145 - protein, 160 aa, Zea mays
  unsure (1)..(160): unsure at all Xaa locations
  Clone ID: MRT4577_125079C.1.pep
KKKPDVHPPAVLEKNYVAHEKQKQCDVFSPEEYFYXGWQPVNIRGRSANVRKKSSCRKPVFMKLMVDGFENVHTGFVYRIGLQPRPKGEKNVFAIVPSQISFGSFLKTAKLNGGPSIVENKSLNGTVKPEQLSNPPGINGPPSIVSKFISYKNVAVFPPP

SEQ ID NO: 212146 - protein, 94 aa, Zea mays
  Clone ID: MRT4577_125080C.1.pep
ILTGGNSPLPCFENKPPKKKPCPMDNKGTFHHFFPGAKNPPQGLTHPVTIIEQHAPWGKARLHINNQTFLISSKPGFLSSSQIKGLPAKARMGA

SEQ ID NO: 212147 - protein, 79 aa, Zea mays
  unsure (1)..(79): unsure at all Xaa locations
  Clone ID: MRT4577_125081C.1.pep
RPQRGKAIQEATRNKSNXXXVETXXRMXDXXPLXRAXSKXIILXSPDLVXFLGEALVGNNAVVHLXNXNQNLADLSVPT

SEQ ID NO: 212148 - protein, 154 aa, Zea mays
  Clone ID: MRT4577_125082C.1.pep
MSRAAQTGGAGAGAGGGGAARFKASPRALFSCGIFSTCTHPALSPTATPNNNVVPGSGGGGSGTPCAEASTALPVAVESAAAASTPPPPQRQPHHQRAQRNVGPSSSSSSSSSSASQSFTQWRLPVHHPQQSQAPASSSGGGRAAGRGGEVRGG

SEQ ID NO: 212149 - protein, 352 aa, Zea mays
  unsure (1)..(352): unsure at all Xaa locations
  Clone ID: MRT4577_125083C.1.pep
MVVCCGAPTSFPQPPASDPSPPLSPFPAAPQLRLWSARQTAVVLSPRLAAQNFRYPWPTSKLPGRRSSLKLPCTAPLSLSGLHPSSPPAPWFSSPAPCLFPNLAGAPPSASTDDCPXSSMARSSRPSSSLPSSSPGLWPSSLRMAARPSPCSAXAASNCPVPARTTPAPRAWLARLRSTSSMAASRVSLSLXSDGARPSLSAPSSYFPWALSSRGSRSSSSGGRGAPPPKPNRAAETTXHGDTGRPSCAPXSTPLSSPHRPTVXSSEFPLSISSSSNSLASPSLSSARALLQSTACPARPVCAPSSXSSRLPASSSALAXRPPLSSLVRPLSSLATLASAPSSTHDFGALRE

SEQ ID NO: 212150 - protein, 48 aa, Zea mays
  Clone ID: MRT4577_125084C.1.pep
PSKAISNIPSQVHNIPDDDLTAGLADPIGFTSRIIRKQSTVQLRNQTL

SEQ ID NO: 212151 - protein, 39 aa, Zea mays
  Clone ID: MRT4577_125085C.1.pep
DQDPQLTTLSPRKVASGMKLKWEDDIGLVGSFIMHGRTR

SEQ ID NO: 212152 - protein, 58 aa, Zea mays
  Clone ID: MRT4577_125086C.1.pep
PIIPPPEKKKKIVSLIKLAVLFFKPFPKTTFDQNATPRAPCPLFLSGEKNWKTCLWVP

SEQ ID NO: 212153 - protein, 118 aa, Zea mays
  unsure (1)..(118): unsure at all Xaa locations
  Clone ID: MRT4577_125087C.1.pep
PGQQACTLIEQDTNLGSNVSCNSTVDEPSLGNAPRILALGLLALLCAAVRLAAAHNCXMAPKLXCIMLGYCGTTHAYYGDXGDNTARDKCAGGAETGDGLCWKGNKTANVANGGTDAI

SEQ ID NO: 212154 - protein, 97 aa, Zea mays
  Clone ID: MRT4577_125088C.1.pep
SSLVCGRPSFFFFFFFCFYLLLPLKFRLTFSRTEKLFFCRLALKLTPWGATRGIAYKSDAENLVLSTGYFNCRYTGPSTKIAGAQSKTPTRRPPPPC

SEQ ID NO: 212155 - protein, 88 aa, Zea mays
  unsure (1)..(88): unsure at all Xaa locations
  Clone ID: MRT4577_125089C.1.pep
LPPPPPPPTPPPPPSPPIPXPHPPMAPPPPXENPWEPSRPLCDPFPHPXTQPPSXPASLLPIFPPPHLHLSFPSTISPHSIHATPPHV

SEQ ID NO: 212156 - protein, 63 aa, Zea mays
  Clone ID: MRT4577_12508C.1.pep
KFLFTFLAPVAPPRKKIFFKKRKSCSPCGFLKKKKKKKKKKKKKKKKKKKKKKKKKKKKKPPN

SEQ ID NO: 212157 - protein, 36 aa, Zea mays
  Clone ID: MRT4577_125090C.1.pep
ISPLGIGDRDKCHKGSHFGQFIGLLKTFFKHLLPLI

SEQ ID NO: 212158 - protein, 150 aa, Zea mays
  unsure (1)..(150): unsure at all Xaa locations
  Clone ID: MRT4577_125091C.1.pep
MLKTIEQNMPQYIQVLLEVGIGGGMLRCLDYVDMEDLANKVIQLVVDRCSDPDKRTRKFACFAVGNAAYHNDMLYEELRRSIPXLTTLLLGPEEDKTKGNAAGALSNLVRNSDMLCEDIVSQGAIYALLKMVGSYSTVALSPRRRDCSNL

SEQ ID NO: 212159 - protein, 750 aa, Zea mays
  Clone ID: MRT4577_125092C.1.pep
MSIGAHHFSFPLANSWRQIHSMQEQSSKADSNSTNLINIFVKSFLASRPIQVAVYHCLHNGLESAIHACLQLISRACLQNVTFCAIMCRPWNSPSDVDVVEYGGDGTIVSDMFSLLSLCGSYLNKESRQNSNQKCKLSNPHALVVHCCLALATIAACLKSEGGSSASLVLTSSQKKQRSRLSVLAHLSSVDDTVKSCLQPHCASAMLALSSLVSLENGGQTRSSLCETALALFPRMATLHTLLKLWLSDGSEALCRYNAGLLNLFGLRDGSIGLLETRLKWGGPLAIEQACSVGIPQLLIRLLTDGFIKEVSDGKDGSTSRSGLSPLGVVWTLSALSQCLPGGVFREILYRREQLKLLTDLLSDTHLKALAAWTGLGGGKRGVRELINSVVDILAFPFVAVQSSPNMPSASASINSGFLLNVASPGGRIGTENKEMLKTIEQNMPQYIQVLLEVGIPGCMLRCLDYVDMEDLGRPLAIVAKMAGYRPLALQLHKEGLLDPSRVAALLEGPIAKETLLDFLMIISDLARMSKDFYVPIDKAGLVVLLKNFLSNGDPDIRAKACSAIGNMCRHSSYFYGPLAANKVIQLVVDRCSDPDKRTRKFACFAVGNAAYHNDMLYEELRRSIPQLTTLLLGPEEDKTKGNAAGALSNLVRNSDMLCEDIVSQGAIQALLKMVGSYSTVALSPSRRDALTESPLRIVLFALRKMCDHAICRNFLRSSELLPVIVHLRQSPDPTISEYASAIATRVSQA

SEQ ID NO: 212160 - protein, 257 aa, Zea mays
  unsure (1)..(257): unsure at all Xaa locations
  Clone ID: MRT4577_125093C.1.pep
MDRVQLVLLGLPILLFCSDVVILFAPLPPPGPGPDRGPHXFSPAPNXSAADASAHEVCTSTGPGWVVXPDLTVRADAVXCFASFYFSLHDPQVDGTGSGTTVDFKFCASCSYRGTAMTMKRMLETSFPGIHDVWENYPPPCRTRALSKAVPLLQDRAMATLMAGDWIFPGIGMRPPPWCYSRRANRFGTMASIWLFGNFAHSFLQSSGAFEVYCNGQLVFSKLSEQRFPSELELQELIGSRIPDSQIVENLEKXIWS

SEQ ID NO: 212161 - protein, 137 aa, Zea mays
  Clone ID: MRT4577_125094C.1.pep
PPQPPPPRPRPSTNTSLTITPGWPISNNTSTGNRTPPPPPPPAPVTTTSATTPNSSTRRGPPPPPPQDTSWTTSTGPRRRTNPPPPPPPSPRTTTTSGHSLLSKIYLDTSLLPPHTTEVGQCRQLSLLQDLLARAVP

SEQ ID NO: 212162 - protein, 59 aa, Zea mays
  Clone ID: MRT4577_125095C.1.pep
RGRMVGRLSGRLGGRVEAKRSEYQFTKETSCLKSCPNSWVQGLHVTSANNSFTQLYGQF

SEQ ID NO: 212163 - protein, 174 aa, Zea mays
  unsure (1)..(174): unsure at all Xaa locations
  Clone ID: MRT4577_125096C.1.pep
LEAGRDQDSQRACVRSCVVKRCITVGRSCAVRSAVRRLAKPVAIRGXPGSSIFPRRNVAGXETLARSIRKPRGVDGEDKYDDKXSTXFDLDHISDTTGXGNLYGSDPAAAYHPLQSMFFKTLWAPVTDTGLLVKCLLLXGVSLLGYVSAWVSPDLLAIKKGPQEPTQSVPRGKI

SEQ ID NO: 212164 - protein, 176 aa, Zea mays
  Clone ID: MRT4577_125097C.1.pep
FSSTSAASTTPTQDEYRSAPPDLLSRTTTNHQPQELCLTLQSANSHQAHQQQQQFFGHVSPNQHGMISGAAGVQGWAAEHGQRMPSWQHASENGAGAGNGGDSYMFGVPPRQGGLDHQGGQLFSQGEPLQSSGGWPSAARTWLDPLAAIHQQPSAMAGQVGWLQGQEEQGSETMRE

SEQ ID NO: 212165 - protein, 45 aa, Zea mays
  Clone ID: MRT4577_125098C.1.pep
VFLESYQSKSPMEMHITYLLPKPYMVRSTRTLWFCFKSLALKLLR

SEQ ID NO: 212166 - protein, 60 aa, Zea mays
  unsure (1)..(60): unsure at all Xaa locations
  Clone ID: MRT4577_125099C.1.pep
QLGGQLFSQGEPLQSSGGWPSXARTWLDPLAAIHQQPSAMAGQVGFNHLVGPGGGFQMRE

SEQ ID NO: 212167 - protein, 65 aa, Zea mays
  Clone ID: MRT4577_12509C.1.pep
FPFLSDDDVLYSCIIFGFNNMPLEVMDVYDLPSSELGRSFAELVRQRLLLAREYQYPCPLQSTLV

SEQ ID NO: 212168 - protein, 116 aa, Zea mays
  Clone ID: MRT4577_1250C.1.pep
QSSNSCTGGQYVCSKCRVLSLDRGIPQYRSCWSRHVRVRRRGVCSRKPFSIRCAQCRTPLMIILACTESSVAGLMACCALEGEGKCYRWQMSLLQPVAVMLSVSEVIMFLKFRTAK

SEQ ID NO: 212169 - protein, 70 aa, Zea mays
  Clone ID: MRT4577_125100C.1.pep
AQRYGEQLIMLAGPRDWCYKIYMLYLQKGDIPGCRCIYRVLNRLRGWSYILTIFPGGTEKKKLGRQNKTL

SEQ ID NO: 212170 - protein, 76 aa, Zea mays
  unsure (1)..(76): unsure at all Xaa locations
  Clone ID: MRT4577_125101C.1.pep
CGFFFFFFFFFYYHFWHMQVACLPASFHCGKKMGCIRERCFPLAXSVLEGGGGGXFPCFQEAPSLRFRWGGGPGAC

SEQ ID NO: 212171 - protein, 43 aa, Zea mays
  Clone ID: MRT4577_125102C.1.pep
TDMLHDGGANINRFGVWPFIFWCTGYIVLRNTKIPHRHAEKHR

SEQ ID NO: 212172 - protein, 101 aa, Zea mays
  Clone ID: MRT4577_125104C.1.pep
MGENQGIEQVLGKLVELLSAKRDEAPSSIKDNVAHIEPVQKIDLMPNEIKLEGVKNYLAWSRRALRLLKAKRLEGYVKGDVVEPKDKLSNEWHVYSDNPQP

SEQ ID NO: 212173 - protein, 91 aa, Zea mays
  Clone ID: MRT4577_125105C.1.pep
SPLLARLHCNQAPLWLRAIGAFSRAAWPGAAPLPVRPVFPLCYSQIHFLPCCNTFSWLAGTISPSWAPHSNLFSEDRLSLPKLGFIVVLAL

SEQ ID NO: 212174 - protein, 167 aa, Zea mays
  Clone ID: MRT4577_125106C.1.pep
MRVPAFSLCLLLALVAANVASLAVAGRAPELKHEPSLEPKPTPQPDPKPDPQTDPKLAPTPKPDPKLAPKPDPKPDPQPDPKPAPKPDPTPKPDPKPAPKPDPTPKPDPKPDPQPDPKPGPKPDPKPTPDPKPAPGPSPKPDPKPQPPEQSSSQPKQPPRSPSGYFN

SEQ ID NO: 212175 - protein, 37 aa, Zea mays
  Clone ID: MRT4577_125107C.1.pep
LECDHITKAQTLNQHVLLLLGPQSENSEATTNLRQWR

SEQ ID NO: 212176 - protein, 155 aa, Zea mays
  Clone ID: MRT4577_125108C.1.pep
CGQDAKLSHCLLAPRAVARTRDLACRVTVDLVVEFLPHLVVVVDPVRHLLEDFGSILVIVRQHDIIFSGVVVQHLSRRRVGSDTTSSQQSSSASVDSASHGALLRFEHLAVLSSRRERSTRRRAAVGDSRSMVVCLGCDRGAYGSNAIPAGLEDP

SEQ ID NO: 212177 - protein, 39 aa, Zea mays
  Clone ID: MRT4577_125109C.1.pep
TDRPRKRSRPRSQHWQHQPARRSAAGRLEAPFPTGGVLN

SEQ ID NO: 212178 - protein, 150 aa, Zea mays
  unsure (1)..(150): unsure at all Xaa locations
  Clone ID: MRT4577_12510C.1.pep
ARLLGHNYIGSEHLLLGLLREGEGVAARVLESLDADPNNITREVIVTTQESREAVGAGVGGGSSGQKMPTLEEYGTNLTKLAEEGKLDPVVGRQDQIERVTQILGRRTKNNPCLIGEPGVGKTAXIAEGLAQRISNGDVPETIRPPGSEQ

SEQ ID NO: 212179 - protein, 78 aa, Zea mays
  Clone ID: MRT4577_125110C.1.pep
IEGHVQSTALEAMFPFYDGTKAPFNVSQVAGVTFDRRSLWGPGSYRMVLFGFQEITPRGVDDLINIFRGPPSRKFKGA

SEQ ID NO: 212180 - protein, 108 aa, Zea mays
  Clone ID: MRT4577_125111C.1.pep
MEIESVKCECCGLKEDCTPHYIASVRSGFHGQWLCGLCCEAVRDEACRRKAHHGVEEAVRAHMAFCNMFKLNPAVRVADGMRQMLRRRSGDMSKPESAKKYESSVTLY

SEQ ID NO: 212181 - protein, 86 aa, Zea mays
  Clone ID: MRT4577_125112C.1.pep
VAALPLLSCSFNPCFRYNRTRAAAQQNIGSGTASNNTFISIKTHKALAILNCVLLYNYTLYKYVCVYMYMYIYISALEEVGRLTAG

SEQ ID NO: 212182 - protein, 79 aa, Zea mays
  Clone ID: MRT4577_125113C.1.pep
GLRKFREVLNQFVTCLKIINPSVHPIKIGFAILKHFLLKVRENIKGGLNKEPGSTHIFVSLLIQYSSLEKFIIPLFSTE

SEQ ID NO: 212183 - protein, 65 aa, Zea mays
  Clone ID: MRT4577_125114C.1.pep
DALHQMECKALCALIVATKFPVYEATVPQQDQWQITSFCQSSFAPHCITIQYTANQLAYVKLVKV

SEQ ID NO: 212184 - protein, 111 aa, Zea mays
  Clone ID: MRT4577_125115C.1.pep
NNQTGFCLIGHPRKNPKPLPEIVDKKSQIPVSGPQPGQKNPIFLDPFGPPPRFINNYPQKGFFFLPWGGPPFAFYQKPGHQVFGPLPYPHVGHQIWQHHPWPQIFYQNYPP

SEQ ID NO: 212185 - protein, 64 aa, Zea mays
  Clone ID: MRT4577_125116C.1.pep
LIHNSLFFSYILYPCMIPLPTSVCFDKDKLVAVVNIHYFKTKASLAAQKATDFPAFFLKESPHG

SEQ ID NO: 212186 - protein, 44 aa, Zea mays
  Clone ID: MRT4577_125117C.1.pep
FFNTWQERVMQWQTVDADCPQQPHSLGGSGNVEKRVIKRPPNHD

SEQ ID NO: 212187 - protein, 51 aa, Zea mays
  unsure (1)..(51): unsure at all Xaa locations
  Clone ID: MRT4577_125118C.1.pep
MFVQTLTGXAVTLEVXSSDTIEHVLAKMXDKECVHPVQQSLVCAGEQLADV

SEQ ID NO: 212188 - protein, 87 aa, Zea mays
  unsure (1)..(87): unsure at all Xaa locations
  Clone ID: MRT4577_125119C.1.pep
MATKGFAFLALLALFVSATNAFIIPQCSLVPSAIISQFLPPVTIMGLXHLAVHAIMLQQALALCFFHHPIFLLHQQXMSHLSLQVFI

SEQ ID NO: 212189 - protein, 168 aa, Zea mays
  unsure (1)..(168): unsure at all Xaa locations
  Clone ID: MRT4577_12511C.1.pep
MPMLAEPWKKYQPFKPLHLPDRTWPNKTIDKPPRWLSTDLRDGNQSLVDPMDGAQKWDYFQMLVKLGYKEIEVSFPSASQTDFDFTQRLIQTPGIVPDDVAIQVLSPCRKELIRRTVDSLKGARNAIXHLYLATSPCXQQIVFDMNNEQTIALAVECTKYARSITKDD

SEQ ID NO: 212190 - protein, 66 aa, Zea mays
  Clone ID: MRT4577_125120C.1.pep
GQSEYCLTVTSPFWLAVRPDNLVSSGVGVWSDYAQCVGRILACLFPHRMGVYSKPLSKLRQQTTIN

SEQ ID NO: 212191 - protein, 190 aa, Zea mays
  unsure (1)..(190): unsure at all Xaa locations
  Clone ID: MRT4577_125121C.1.pep
MALTPVLLLLLAYCLSGVSSSAGPPPRSFTSLFALGDSYIDAGNFVTMATPVAPVWVDKPPYGMTFFERPTGRFSDGRVIVDFVAAALGVPFLPASLANSSDDDVARRGGVNFAVGGATAVDVAFFERRRLVPFKLLNNSLDVQLXWFEELEPSLCNATAESSYGGGRCFSRSLFLVGEFGVNDYTFLWT

SEQ ID NO: 212192 - protein, 79 aa, Zea mays
  unsure (1)..(79): unsure at all Xaa locations
  Clone ID: MRT4577_125122C.1.pep
DVTIKELVELVKEGCGFHGNLEWYSSXPDGTPRKLMDSSKIQGMGWKPKIALKEGLVETYKWYVDECHLEHDVGPRHAS

SEQ ID NO: 212193 - protein, 87 aa, Zea mays
  Clone ID: MRT4577_125123C.1.pep
TPTWKIKERNPKKMGFNGTGGKDLQFCKGQTKLLVPKTGRCKAFSFVALLSSHQGAGAQRAWHPIFFFWALFVCVKLHPKFFPLGFI

SEQ ID NO: 212194 - protein, 322 aa, Zea mays
  Clone ID: MRT4577_125124C.1.pep
MPLCSFYASTSVPVVKPQQSVASSKPPTTAVASVATTVPMRSAATVTPAVATTTSLALSLHLPELPSQVKDKILSLELMGVDYGRALEQNPALRDAAPESIHAVVSFLQSRGLQFKDLGRVFGMCPSVLTASVRADLRPVFAFLSADLGVPESAHRRVVIKCPRVLACSVRDQLRPALIYLRRLGFRDSRALALQDPILLVSSVERTLAPKLEYLAGLGMSRDDAVAMVLRCPALFTFSIERNYRPKFEYLVDAMGGGVEDVKAFPQYFAFSLEKRIAPRHRAAEDAGVALPLPDMLKATDEEFREMLDKERELHEQAATTD

SEQ ID NO: 212195 - protein, 94 aa, Zea mays
  Clone ID: MRT4577_125125C.1.pep
FSGGLNPFLWGTLSFANLAGQKASSPWATMFNSFCLALKGSLNLKAARELPDSLATLNIKFNSTVKNGFTPLKALFYKTKPSKVTTIRTSPPFF

SEQ ID NO: 212196 - protein, 389 aa, Zea mays
  unsure (1)..(389): unsure at all Xaa locations
  Clone ID: MRT4577_125126C.1.pep
MARASSHTCPGVCAVRLLASSPCLPQLPTMGVDYGRALEQNPALRDAAPESIHAVVSFLQSRGLQFKDLGRVFGMCPSVLTASVRADLRPVFAFLSADLGVPESAHRRVEIKCPRVLACSVRDQLRPALIYLRRLGLKLPPRPFCSTTFSATAAVTDVSSADRLLAVLRGCVSAPHLPLGLQIHARAVVSGALSDHNHLALHTRLLGMYVLARRFRDAVAVFSALPRAAAASSLPWNWLIRGFTAAGQHHLAVLFYVKMWSHPAAPSPDAHTLPYVVKSCAALGAMSLGRLVHRTARAIGLANDVYVGSALVKMYADAGLLGNARDAFDGIPERDCVLWNVMMDGCIKAGDVDGAXVQNGLFVEAFGLFYDMQRSGARPDSITLEQERD

SEQ ID NO: 212197 - protein, 87 aa, Zea mays
  unsure (1)..(87): unsure at all Xaa locations
  Clone ID: MRT4577_125127C.1.pep
PVAQLRRAPSSRSPENTAVAAAASTMGGFVKTLXHAFSTFPVKFRRRAGLTTQGRIRLXNXDIXSPTHPIQICCAIYQQVHHCXNHF

SEQ ID NO: 212198 - protein, 853 aa, Zea mays
  Clone ID: MRT4577_125128C.1.pep
MRLARSGLKLPPRPFCSTTFSATAAVTDVSSADRLLAVLRGCVSAPHLPLGLQIHARAVVSGALSDHNHLALHTRLLGMYVLARRFRDAVAVFSALPRAAAASSLPWNWLIRGFTAAGQHHLAVLFYVKMWSHPAAPSPDAHTLPYVVKSCAALGAMSLGRLVHRTARAIGLANDVYVGSALVKMYADAGLLGNARDAFDGIPERDCVLWNVMMDGCIKAGDVDGAVRLFRNMRASGCEPNFATLACFLSVCATDADLLSGAQLHSLAVKCGLEPEVAVANTLLAMYAKCQCLDDAWRLFELMPQDDLVTWNGMISGCVQNGLFVEAFGLFYDMQRSGARPDSITLVSLLPALTDLNGLKQGKEVHGYIVRNCVNMDVFLVSALVDIYFKCRDVRMAQNLYDAARAIDVVIGSTMISGYVLNGMSEEALQMFRYLLEQCIKPNAVTIASVLPGCASMAALPLGQQIHGYVLRNAYERKCYVESALMDMYAKCGRLDLSHYIFLKMSQKDEVTWNSMISSFSQNGKPQEALDLFRQMCMEGIKYNNITISAALSACASLPAIYYGKEIHGVTIKGPIKADIFAESALIDMYAKCGNLELALRVFEFMPDKNEVSWNSIISAYGAHGLVKESVSLLHGMQEEGYKPDHVTFLALISACAHAGLVEEGVQLFQCMTKKYLIAPRMEHFACMVDLYSRSGKLDKAIQFIADMPFKPDAGIWGALLHACRVHRNVELADIASQELFKLDPANSGYYVLMSNINAVAGRWDGVSKVRRLMKDNKILKIPGYSWVDVNNSSHLFVASDKSHPESEDIYTSLKTLLQELREEGYVPRPDLCHPMHPDNNTQVEFKKYKEIV

SEQ ID NO: 212199 - protein, 618 aa, Zea mays
  Clone ID: MRT4577_125129C.1.pep
GFPVRVIIPGCIGGRMVKWLKRIIVTPAESDNYYHFKDNRVLPSHVDAELANAEAWWYKPEYIINELNINSVITTPCHDEILPINAFTTQRPYTLKGYAYSGGGKKVTRVEVTLDGGETWLVCTDHPEKPTKYGKYWCWCFWSLEVEVLDLLSAKEIAVRAWDESLNTQPEKLIWNVMGMMNNCWFRVKTNVCKPHKGEIGIVFDHPTLPGNESGGWMAKEKHLETAEAAAPGLKRSTSTPFMNTTDVGKEFTMSEVRKHASQESAWIVVHGHVYDCTKFLKDHPGGADSILINAGTDCTEEFDAIHSDKAKALLDTYRIGELITTGTGYSSDNSVHGGSVLSHLAPIRRAVRAPALSNPREKIHCRLVGKKELSRDVRLFRFSLPSPDQVLGLPIGKHIFVCASIEGKLCMRAYTPTSMVDEIGHFDLLVKVYFKNEHPKFPNGGLMTQYLDSLPVGGYIDVKGPLGHVEYTGRGSFVINGKQRHASRLAMICGGSGITPMYQIIQAVVRDQPEDHTEMHLVYANRTEDDILLRDELDRWAAEYPYRLKVWYVIDQVKEGWKYSVGFVTEAVLREHVPEGGDDTLALACGPPPMIQFAISPNLEKMKYDMANSFVVF

SEQ ID NO: 212200 - protein, 120 aa, Zea mays
  unsure (1)..(120): unsure at all Xaa locations
  Clone ID: MRT4577_12512C.1.pep
TADGLKLRPFFEHAEQPRRCHSVLAADAKDQYIQGAMALATPDQHVXSLCRHRLAPCQTASKSGTLTLQWAKGQPEIVETRVQRGADQKVWDPTSNQQPQVKSIVEAYLIIDQTADQLLV

SEQ ID NO: 212201 - protein, 84 aa, Zea mays
  Clone ID: MRT4577_125130C.1.pep
MSLALCIGAGNKNAVAALIARENNVINVDATNDLVMGDYNKTPELLNKNPLAKVPVLDTPDGAGFEKNAIARYVDRLKDDNPLF

SEQ ID NO: 212202 - protein, 910 aa, Zea mays
  Clone ID: MRT4577_125131C.1.pep
MAAVEPRQFGRLEPGSSPVRVATNGAKAYPPPASHLPRRADSPVRGCSFPPLVSPPRRLDDASDDEDEEQEDWRELYGSHLQLEVEPAVQDARDEGTADAWIERNPCLVRLTGKHPLNCEPPLARLMHHGFITPAPLHYVRNHGAVPRGDWATWTVEVTGLVRRPARLTMEELARDFPAVEIPVTLACAGNRRKEQNMVQQTVGFNWGAAGVSTSVWRGARLRDVLRRCGIVPRKGGALNVCFEGAEDLPGGGGSKYGTSVTREWALDPSRDIMLAYMQNGEPLLPDHGFPVRVIIPGCIGGRMVKWLKRIIVTPAESDNYYHFKDNRVLPSHVDAELANAEAWWYKPEYIINELNINSVITTPGHDEILPINSITTQRGYTMKGYAYSGGGKKVTRVEVTLDGGETWLVCHLDHPEKPNKYGKYWCWCFWSVEVEVLDLLGAKEIAVRAWDQSLNTQPEKLIWNLMGMMNNCWFKVKVNVCRPHKGEIGLVFEHPTQPGNQPGGWMARQKHLETAEAAAPGLKRSTSTPFMNTTDVGKQFTMSEVRKHASQESAWIVVHGHVYDCTKFLKDHPGGADSILINAGTDCTEEFDAIHSDKAKALLDTYRIGELITTGTGYSSDNSVHGGSVLSHLAPIREAVRAPALSNPRDKIHCRLVGKKELSRDVRLFRFSLPSPDQVLGLPIGKHIFVCASIEGKLCMRAYTPTSMVDEIGHFDLLVKVYFKNEHPKFPNGGLMTQYLDSLPVGSYIDVKGPLGHVEYTGRGSFVINGKQRHASRLAMICGGSGITPMYQIIQAVLRDQPEDHTEMHLVYANRTEDDILLRDELDRWAAEYPDRLKVWYVIDQVKRPEEGWKYSVGFVTEAVLREHVPEGGDDTLALACGPPPMIQFAISPNLEKMKYDMANSFVVF

SEQ ID NO: 212203 - protein, 53 aa, Zea mays
  Clone ID: MRT4577_125132C.1.pep
IKIKKIKKKEKGKNKWWRGLILTIITFAFVFPVCYSLASPGRRFITGYLRRFS

SEQ ID NO: 212204 - protein, 81 aa, Zea mays
  unsure (1)..(81): unsure at all Xaa locations
  Clone ID: MRT4577_125133C.1.pep
WKQSNPLFKFWRGLXLNKLLXVMVGSWIANFLLGFSSXTSELDEPSHLPLGGPSPHMAGPYNXPPLVGHTTLSEVEFHTQL

SEQ ID NO: 212205 - protein, 78 aa, Zea mays
  Clone ID: MRT4577_125134C.1.pep
ITINPGHCTSKKKKKKKKKKKKKKKKKKKKKKKKKKKKKKKKKKGGRFLKNQFNGQSPWQSPTFFFFAPQNLFKRPAF

SEQ ID NO: 212206 - protein, 124 aa, Zea mays
  unsure (1)..(124): unsure at all Xaa locations
  Clone ID: MRT4577_125135C.1.pep
MLYAEARFMVDATKATPNVRTHAMTIAHNILLTRMQTHLNVSAANTHLYGRGPIQGXPDLMHAXGHIGVRTTAQWFNXTVYSDGHNIPTANCTCYRYNSTSMRSASQHTASNLMAVHAHMPWFG

SEQ ID NO: 212207 - protein, 209 aa, Zea mays
  Clone ID: MRT4577_125136C.1.pep
MGQQSLIYAFVARGTVVLAEYTEFTGNFTTIAAQCLQKLPASNNKFTYNCDGHTFNYLVEDGFTYCVVAVESVGRQIPIAFLDRVKEDFTKKYGGGKAATAAANSLNREFGSKLKEHMQYCVDHPEEVSKLAKVKAQVSEVKGVMMENIEKVLDRGEKIELLVDKTENLRSQAQDFRQQGTRVRRRADLHHMPVGVPRLQVRQQVRRGA

SEQ ID NO: 212208 - protein, 139 aa, Zea mays
  unsure (1)..(139): unsure at all Xaa locations
  Clone ID: MRT4577_125137C.1.pep
MGQKSLIYAFGARGTVILAEYTELTGNLTTMASQGLMKLPEGKNKFGYNADGHTFSYHREFGSKLXEHMQYCVDHPXEVSKLAKVKAQVSEVKGVMMENIEKVLDRGEKIELLVDKTENLRSQAPARRRRLHVEFFLLL

SEQ ID NO: 212209 - protein, 222 aa, Zea mays
  Clone ID: MRT4577_125138C.1.pep
MGQQSLIYAFVARGTVVLAEYTEFTGNFTTIAAQCLQKLPASNNKFTYNCDGHTFNYLVEDGFTYCVVAVESVGRQIPIAFLDRVKEDFTKKYGGGKAATAAANSLNREFGSKLKEHMQYCVDHPEEVSKLAKVKAQVSEVKGVMMENIEKVLDRGEKIELLVDKTENLRSQAQDFRQQGTKVRRKMWLQNMKIKLIVLGIIIALILIIILSVCHGFKCGSK

SEQ ID NO: 212210 - protein, 160 aa, Zea mays
  unsure (1)..(160): unsure at all Xaa locations
  Clone ID: MRT4577_125139C.1.pep
MRQKIFFLKRFDSELLYVQGXIWKFFQRFSLTLSVSTNNSKYLDFFRTGPSQIAMIRSTXFPLHYFGNLRTRSYGYGKYRISGPSGKRRETDTQFKVSKQNSILDLIDPYRILWKAVFDESRMYGLEGDLSYLSRSTLQYGAKKKKKKKKKYSALLPLLP

SEQ ID NO: 212211 - protein, 245 aa, Zea mays
  Clone ID: MRT4577_12513C.1.pep
MLSPWHPLLSPVAPPAMELRSPLNSHNCSLTSSIRPPPPRSLARAPPTLSATAAAVSSLSATSAAISSPSCPKKKVLVPIAMGTEEMEAVIIAGVLRRASADVTLASVEDGLEVEASCGSRIIADTHIASCADQVFDLVALPGGMPGSVRLRDSDILQRITVRQAEEKRLYGAICAAPAVVLVSWGLHRRKKITCHPSFIGDLPAFRAVESNVQVSGELTTSRGPGTTFQFALSFVEQLFGASCS

SEQ ID NO: 212212 - protein, 94 aa, Zea mays
  Clone ID: MRT4577_125140C.1.pep
ASNSRGRVTIPPGKNFKIIGGGPNLQGQSPPFGGGVGGFPNPVVQPAPQGQDKVLPPFGKGAKDMFPMGSRNPLLAFQAFAIWLRRFAPKMAFE

SEQ ID NO: 212213 - protein, 222 aa, Zea mays; identical to SEQ ID NO: 212209
  Clone ID: MRT4577_125141C.1.pep

SEQ ID NO: 212214 - protein, 121 aa, Zea mays
  Clone ID: MRT4577_125142C.1.pep
MKLLFVEMGVGYDQHGQDITAAAVRACKDAITSNSIPAFRGGSIPGVNTDQMKLQIKLGVPRSTQHLLDAERVKAVFPYGKIISFEVVDGGMICSSGVCLEAMGDKNDDCYIVNAAVYVGY

SEQ ID NO: 212215 - protein, 219 aa, Zea mays
  Clone ID: MRT4577_125143C.1.pep
MGQQSLIYAFVARGTVVLAEYTEFTGNFTTIAAQCLQKLPASNNKFTYNCDGHTFNYLVEDGFTYCVVAVESVGRQIPIAFLDRVKEDFTKKYGGGKAATAAANSLNREFGSKLKEHMQYCVDHPEEVSKLAKVKAQVSEVKGVMMENIEKVLDRGEKIELLVDKTENLRSQAQDFRQQGTKVRRKMWLQNMKIKLIVLGIIIALILIIILMVLYGFRH

SEQ ID NO: 212216 - protein, 212 aa, Zea mays
  Clone ID: MRT4577_125144C.1.pep
MKKWKLEKDPSDSQRMRGKGIDTSFPSSLFPFPTRASTPPLPSSSSRPSHSRPHLRIRSPKPNNPTVAPASSRMEVAQPQASNAQGGAEPAMKLLFVEMGVGYDQHGQDITAAAVRACKDAITSNSIPAFRGGSIPGVNTDQMKLQIKLGVPRSTQHLLDAERVKAVFPYGKIISFEVVDGGMICSSGVCLEAMGDKNDDCYIVNAAVYVGY

SEQ ID NO: 212217 - protein, 292 aa, Zea mays
  Clone ID: MRT4577_125145C.1.pep
MGSAPPTPRPISLSFPSGSASSTTPTTPSASGELHPSTGCGEKRRGLTKSVGCGGGDPGAGAGAGAESRAMGQQSLIYAFVARGTVVLAEYTEFTGNFTTIAAQCLQKLPASNNKFTYNCDGHTFNYLVEDGFTYCVVAVESVGRQIPIAFLDRVKEDFTKKYGGGKAATAAANSLNREFGSKLKEHMQYCVDHPEEVSKLAKVKAQVSEVKGVMMENIEKVLDRGEKIELLVDKTENLRSQAQDFRQQGTKVRRKMWLQNMKIKLIVLGIIIALILIIILSVCHGFKCGSK

SEQ ID NO: 212218 - protein, 98 aa, Zea mays
  Clone ID: MRT4577_125146C.1.pep
RDSKDDLSVDFSTINPKKPNSALRKVARVRLTSGFEITAYIPGIGHNLQEHSVVLVRGGRVKDLPGVRYRIIRGTLDAVAVKNRQQGRSKYGAKKPKK

SEQ ID NO: 212219 - protein, 79 aa, Zea mays
  Clone ID: MRT4577_125147C.1.pep
QVPLFSAALLNFLEPCAILRAYISAALISQKLPYLDRSRCLRIASLEEEPLKNVYLDQMASRNVGMFSKKKNRQTLREL

SEQ ID NO: 212220 - protein, 222 aa, Zea mays; identical to SEQ ID NO: 212209
  Clone ID: MRT4577_125148C.1.pep

SEQ ID NO: 212221 - protein, 62 aa, Zea mays
  Clone ID: MRT4577_125149C.1.pep
SKCASLAKPRRRAPGNTICSCLCVHLHQGAGRGRDVRVTFYLSSCLLCLSILCVVEIIKMFL

SEQ ID NO: 212222 - protein, 83 aa, Zea mays
  unsure (1)..(83): unsure at all Xaa locations
  Clone ID: MRT4577_12514C.1.pep
MGGDHEGASXAADFRQKAWSMTADPYCRPVYCSRNTAIHMCSAFLICIPXIAMNSTELKKRRHHPVPPITYQLXCKNFAKNEY

SEQ ID NO: 212223 - protein, 73 aa, Zea mays
  Clone ID: MRT4577_125150C.1.pep
GKPPQISQGVWGINLHLAQQPQKRGLMAPPRGGQKVGENKSGGVKLGGVKKPPNSPTPGGNLTQPGANEPGFH

SEQ ID NO: 212224 - protein, 78 aa, Zea mays
  Clone ID: MRT4577_125151C.1.pep
MTMASLSSAAITAPSFTAAPARAVVNRRFFTVHDSLHKATVTAAVAVAARVLLAGGGAMADEVLLGAGYGGLVFQPIQ

SEQ ID NO: 212225 - protein, 76 aa, Zea mays
  Clone ID: MRT4577_125152C.1.pep
FYIRCLTAFLIREGGLPIPNPKPKPFTRRRQHHLHLRRPQALSHLNRHSSRTETISHHYYVSKENELDLSSNYVFT

SEQ ID NO: 212226 - protein, 91 aa, Zea mays
  unsure (1)..(91): unsure at all Xaa locations
  Clone ID: MRT4577_125153C.1.pep
RTHLLPRLKPLVLAAMQTSTANMVTARLKERLDHAYDVKDLNSIFDLKFRTHFGGGKFTGLXLIYDNLQADNKLEPEYRLYRNGLATKVEK

SEQ ID NO: 212227 - protein, 137 aa, Zea mays
  unsure (1)..(137): unsure at all Xaa locations
  Clone ID: MRT4577_125154C.1.pep
KLAGKLLKKNWNLKCTHSNSCMITVLCRWLPTLYSKLLEFKCNHSKLEYDNGMPMRILPHPLLCGTFPAACKILWAYLALLRVMPVSLEPWCHSCRRGQRXIAVNLSQFFRWGVILNWIQLSGHPFNKLSNVGVVIG

SEQ ID NO: 212228 - protein, 118 aa, Zea mays
  unsure (1)..(118): unsure at all Xaa locations
  Clone ID: MRT4577_125155C.1.pep
CVRRTTSRIVTSLRTAAPSSSSRYGRRKIRLRLIRNAPXELTPPPPCKRDVGPLTSXRREIERXRMVGHPXPTGIKGDDREARHKXQEKHKEQLPLHTEKNGRTXTGEVVDGYPHLAT

SEQ ID NO: 212229 - protein, 56 aa, Zea mays
  Clone ID: MRT4577_125156C.1.pep
SPKIGESHPWGLYFYADPKILANFWWCSIARLKLIRFTIYASGGSKFNLICGYFGA

SEQ ID NO: 212230 - protein, 97 aa, Zea mays
  Clone ID: MRT4577_125157C.1.pep
EKAQEGHILKQHPGFGAKPRKRKNNISLINPKQKNPMEYADRPPCWSFKNGGPRKKGDQTLFLQKLLGGFLRGLNLIKFRGQAFLFPSRLPLFNLEH

SEQ ID NO: 212231 - protein, 44 aa, Zea mays
  Clone ID: MRT4577_125158C.1.pep
RSGFRVDPASGTRLNERLRVILRKEIPGTMEGIQTVITSSNDDT

SEQ ID NO: 212232 - protein, 81 aa, Zea mays
  Clone ID: MRT4577_125159C.1.pep
GWFSTLATVKGRKSHGVFTFNMEAGSRWSVNTTHRVFVSMILRKVGIDWLKLLLLAKPLTDIVWVFLGFASSIELMFVKNF

SEQ ID NO: 212233 - protein, 67 aa, Zea mays
  Clone ID: MRT4577_12515C.1.pep
FVLFITRLLHSTPDKSEESALEEPYRNTEGDITKNETGIFPSRNTDKTRQRNFLLRTDHVTLTASAH

SEQ ID NO: 212234 - protein, 101 aa, Zea mays
  unsure (1)..(101): unsure at all Xaa locations
  Clone ID: MRT4577_125160C.1.pep
HYGDSCATSLGNLPNDASPTSDLEASISNDTFLMXSAREKNEHKDFIAXIENKMGDLYNIQXDIIRLTMSIDTRKTVDAETHYGICKISWSHNLIAHDYHI

SEQ ID NO: 212235 - protein, 204 aa, Zea mays
  unsure (1)..(204): unsure at all Xaa locations
  Clone ID: MRT4577_125161C.1.pep
MAVVHSYSATNVPLQQGGGLYEISRVTQTSAXLSMRRNATSDNFMSGVSFMTHALGTSGGSRXRAPTEAKLMVAINEFCRIWRNFLRCWHGRGDSSPLDVIAINDTGGDKQASHLLKYNSTLGIFDADDKSVGDNSISGDGKVIKVVADRYPRNLPCGXLGINLVIXGTGVFPXTRGGGEDIQAGAKKVLITATGKGDIPTYDV

SEQ ID NO: 212236 - protein, 97 aa, Zea mays
  Clone ID: MRT4577_125162C.1.pep
ALPNSEHPSTGEELLTTRPKPADVTTPAWSETPPSPLLSWTTVEMTALTQDSTTKTVECTCTQASLYRRRATTTVLRTLTPSSAIHAVLTKDSAPSL

SEQ ID NO: 212237 - protein, 90 aa, Zea mays
  Clone ID: MRT4577_125163C.1.pep
FIGRISTIGLAGGGSLGLGPNQNSGPKPKVHGWSKEERNYRRVTISRTYIFNPCRAKTPKWLPKKQREAPGTGPTKLGRAQRNELLFKLN

SEQ ID NO: 212238 - protein, 52 aa, Zea mays
  Clone ID: MRT4577_125164C.1.pep
HMTSSKIHSSDTNFTLFRRREPTLLINTLRLPLLIPTDIPIHHTHHDRVEQH

SEQ ID NO: 212239 - protein, 209 aa, Zea mays
  Clone ID: MRT4577_125165C.1.pep
MAEHLASIFGTEKDRVNCPFYFKIGACRHGDRCSRLHNKPSVSPTLLLCNMYQRPDMITPGVDAQGNPIDPVKIQGDFEDFYEDIFDELSKHGEVENLHVCDNLADHLIGNVYVQFREEDQAAKALQALQGRFYSGRPIIAEFSPVTDFREATCRQFEEHNCNRGGYCNFMHVKEIGRDLRKRLYGHLHRSRRSHSRSSRSPSPYRHHA

SEQ ID NO: 212240 - protein, 65 aa, Zea mays
  Clone ID: MRT4577_125166C.1.pep
RCLAIYDSAITLSWDLKTKKSLTHVFHDFSLQEHDTVVSGIRARLGCTCSGLLWLNQCSLCISYI

SEQ ID NO: 212241 - protein, 99 aa, Zea mays
  Clone ID: MRT4577_125167C.1.pep
CVWRSRPSSGQWVTLFPRGGAQWGVHAVLFGGIVRDGPFLALKPGPVGVGVPAERFFCMEIPSPYFWKVPHKAGCLQRLKKIRQFPENKKKKTKKKKKR

SEQ ID NO: 212242 - protein, 118 aa, Zea mays
  Clone ID: MRT4577_125168C.1.pep
RFFYLLVDDFSRYMWLILLSSKDRAAESIIRLLGGVETQSVRRLGTLRTDRGGEFTARSFADYCAAQGIARHLTASYCPQQNGVVERRNQTVMGTARSMMKAMRVPSWFWADAWADAW

SEQ ID NO: 212243 - protein, 80 aa, Zea mays
  Clone ID: MRT4577_125169C.1.pep
TFMPLPRGRHIQRRWLRAHLWLIQSPTGHLLLLGRQPLLMIMAAGHNRNIMAGNAHCLSLNSTRLGLTIRPKKQLCMRNS

SEQ ID NO: 212244 - protein, 65 aa, Zea mays
  Clone ID: MRT4577_12516C.1.pep
AAGAINPRVAGWAILTLSVPGSGFCFCLNINLACTGSQSMYPRVLNSSDHWVHRYGTRQGMREVQ

SEQ ID NO: 212245 - protein, 399 aa, Zea mays
  unsure (1)..(399): unsure at all Xaa locations
  Clone ID: MRT4577_125170C.1.pep
MSGGVEPDTPPGSSSSSSRSGGSTPVGGKPPRHHLTSIRHCASSARIAAASAEFXASSLPPKPSIPNTNLMSALLFSCXLESGTLSLISPTADIRPGFLPVFRSGSFADIGPKSFMEDEHVCVDNLVEHLGLRGPGIPAPGAFYGVFDGHGGSDAACSARKNILKFITEDCHFPNSIEKAIRSAFVKADHAIADSQSLDRNSGTTALTVLISGRTLLVANAGDCRAVLGKRGRAFELSRDHKPSCSVEKLRIENLGGTVFDGYLNGQLAVARAIGDWHMKGSKGSACPLTPEPEFREVRLTEEDEFLIIGCDGLWDVMSSQFAVSMVRKELMEHNDPQRCSRELVQEALRRDCCDNLTVVVVCFSDDPPPQIEVPRFRVRRSISMEGLHTLRGALDSNV

SEQ ID NO: 212246 - protein, 206 aa, Zea mays
  Clone ID: MRT4577_125171C.1.pep
MYYVLWHLKSMHSPTSLKWCRTLLVANAGDCRAVLGKRGRAFELSRDHKPSCSVEKLRIENLGGTVFDGYLNGQLAVARAIGDWHMKGSKGSACPLTPEPEFREVRLTEEDEFLIIGCDGLWDVMSSQFAVSMVRKELMEHNDPQRCSRELVQEALRRDCCDNLTVVVVCFSDDPPPQIEVPRFRVRRSISMEGLHTLRGALDSNV

SEQ ID NO: 212247 - protein, 56 aa, Zea mays
  Clone ID: MRT4577_125172C.1.pep
IHFIREKVALGEVRVLHVPSKYQFADIMTKGLPIQLFEDFRSSLCIRNPDASTAGG

SEQ ID NO: 212248 - protein, 184 aa, Zea mays
  Clone ID: MRT4577_125173C.1.pep
MSGGVEPDTPPGSSSSSSRSGGSTPVGGKPPRHHLTSIRHCASSARIAAASAEFGLESGTLSLISPTADIRPGFLPVFRSGSFADIGPKSFMEDEHVCVDNLVEHLGPRSPDPPAPSAFYGVNEGHGEAEAASFVRRTWLKSVPSAATSVVVGLLKFCPPPLVFCDSLGISFVELFWKENFVEV

SEQ ID NO: 212249 - protein, 132 aa, Zea mays
  Clone ID: MRT4577_125174C.1.pep
ALHRESLVRASPIRKESHLSCRGVGAGRRVMLLVDLHHPSMFCVWWLPTSFSSARLVTGLGTEERSWSLRPSAQSEPASVLCRAWSVSRINVVPRASDCGVVIYAVAKYLHQSAGIPGQYVSSQLEGPLCAR

SEQ ID NO: 212250 - protein, 146 aa, Zea mays
  unsure (1)..(146): unsure at all Xaa locations
  Clone ID: MRT4577_125175C.1.pep
QTPPAAGMFGRPADGHVHVAPPPHRQWQQQGRHAAPDXRRSTDRTITDRFDSIHDDEQQTAHACMLTTDRCFGPAPFFVRKHVLAAGRPXAAPERRAAEPADRQRWGRGARGPIASGTGINWAWAPPYATARAGTDDXDASSAAAA

SEQ ID NO: 212251 - protein, 124 aa, Zea mays
  Clone ID: MRT4577_125176C.1.pep
ILNQIIELKMSEKKEIIHEQKFITRIPNESTEQNVTIQSEFSGDESSSISQEEKSNQSEMKIEPIIMSPEQGMIQQQGMIPQQEGMLNQGGMTGQPIILPPEQGMIQQQGMIPQQGELTNTSNP

SEQ ID NO: 212252 - protein, 80 aa, Zea mays
  Clone ID: MRT4577_125177C.1.pep
SAYAQRSLKINVNCLTMRRVYLLNNVDWLFRNTWMVRNLPCIPDEKGTLTPADLLTLTLGHNMWDHVRTNLWDNVKTGPW

SEQ ID NO: 212253 - protein, 447 aa, Zea mays
  unsure (1)..(447): unsure at all Xaa locations
  Clone ID: MRT4577_125178C.1.pep
MAATIQSVKARQIFDSRGNPTVEVDVFCSDGTFARAAVPSGASTGVYEALELRDGGSDYLGKGVSKAVNNVNSVIGPALIGKDPTAQTEIDNFMVQQLDGTXNEWGWCKQKLGANAILAVSLAVCKAGASIKRIPLYQHIANLAGNKQLVLPVPAFNVINGGSHAGNKLAMQEFMILPTGAASFKEAMKMGVEVYHHLKSVIKKKYGQDATNVGDEGGFAPNIQENKEGLELLKTAIEKAGYTGKVVIGMDVAASEFYSDKDQTYDLNFKEENNDGSQKISGDSLKNVYKSFVSEYPIVSIEDPFDQDDWVHYAKMTEEIGEQVQIVGDDLLVTNXPTRVAKAIKEKSCNALLLKVNQIGSVTESIEAVKMSKRAGWGVMTSHRSGETEDTFIADLAVGLSTGQIKTGAPCRSERLAKYNQLLRIEEELGAIAVYAGAKFRAPVEPY

SEQ ID NO: 212254 - protein, 125 aa, Zea mays
  unsure (1)..(125): unsure at all Xaa locations
  Clone ID: MRT4577_125179C.1.pep
GALVARARMTRWMPPEXAGVLRSLEGWAARSLLPLLKPVEECWQPTDCLPDYSSEMFQHKVHELCARAWMLPDKNFIVLVAHMYTQEPLHTYQTMINTLDGAPNXTGANNCPWTDWTRSWTDEDN

SEQ ID NO: 212255 - protein, 75 aa, Zea mays
  unsure (1)..(75): unsure at all Xaa locations
  Clone ID: MRT4577_12517C.1.pep
PDPPHVQDPVEGFPPASHGWVLLVYPQNKCGCRPGHTETGHILRFCVPFLPSSVAEPPAKIGPSPKLKKKKKKKX

SEQ ID NO: 212256 - protein, 63 aa, Zea mays
  Clone ID: MRT4577_125180C.1.pep
WISLHLRSKFCNTDFWFIQYMFRALVTSKNASISFAVEYIVDERVYNISELDGCVTSVLFMSR

SEQ ID NO: 212257 - protein, 71 aa, Zea mays
  Clone ID: MRT4577_125181C.1.pep
MADQLTDDQIAEFKEAFSLFDKDGDGCITTKELVTVMRSLTQNHTEAELQNMINGGWAVFNRTMMLQATGA

SEQ ID NO: 212258 - protein, 142 aa, Zea mays
  unsure (1)..(142): unsure at all Xaa locations
  Clone ID: MRT4577_125182C.1.pep
AKALTTVTPLGVASPGEGVVLLSAVFHGRKPRPFRTDGGGVPDVTPFLKASLLLAGAEQRIKVLEVSLVKNRSCLEWGVSWLGPDAPADHFCESFCPFRTREGCRWPDAPCAQLGSQFVGLKXANFDAFDRLSIHDYYFGPE

SEQ ID NO: 212259 - protein, 90 aa, Zea mays
  Clone ID: MRT4577_125183C.1.pep
HNPPASLAQPASRSPRVRCRVWPVGPQRRSAAFLAVGPRVLFFARLLPFSIDHLPPLRARCNRAYDLLVPSFLPLSMRATPGVELASAGP

SEQ ID NO: 212260 - protein, 59 aa, Zea mays
  Clone ID: MRT4577_125184C.1.pep
SMEFMNEPRWLLCCVLRACTMVCSSFSCFLYTLAFLYIYKIKPSTCSFLLLHFTTVSMP

SEQ ID NO: 212261 - protein, 83 aa, Zea mays
  unsure (1)..(83): unsure at all Xaa locations
  Clone ID: MRT4577_125185C.1.pep
MPYSTSVRVRTFDCSIRARRSGGVLXHDAFMGTHTTVGETEAXYAATSMATRTRLETRLPMLPDRPEQRDCAIDMXTDTCMYG

SEQ ID NO: 212262 - protein, 230 aa, Zea mays
  unsure (1)..(230): unsure at all Xaa locations
  Clone ID: MRT4577_125186C.1.pep
GFCSEGTXELLVYEYVENESLDKYLFGERSAESLLGWSQRYKIALGTARGLAYLHHECLEWVVHCDVKPENILLTRDFDAKIADFGLAKLAKQGSTSLNFTHMRGTMGYMAPEWALNSPISAKVDVYSYGVVLLEIVTGIRASSGIVLDERQIDFRQFVQEAKHILSTGSVSDIVDDRLQGHFHADQAVAMVKIAFSCLEERRKRPTMDEIVKVLMSCGDDDDYHPAYSY

SEQ ID NO: 212263 - protein, 70 aa, Zea mays
  unsure (1)..(70): unsure at all Xaa locations
  Clone ID: MRT4577_125187C.1.pep
QIVLLHLNFNLKQIYIRYIXXNQHLHVPYVISNKANRGKQYTFIALFVSTIPTLTLLQSFIQTIFSHHLH

SEQ ID NO: 212264 - protein, 144 aa, Zea mays
  Clone ID: MRT4577_125188C.1.pep
SRYIGEGRAWIAARTSCGSCGAMDGRPPACMERGASAVADCGQPRRRGVVAPSLEGWKWNFPLLVRGELPQRSRKVGSNDGSRWLNGRWRGSRRSVYGRFWEGKEEFQARGHGGFQGVAWRNSGSGVDGRFWEGKALWAEPSRP

SEQ ID NO: 212265 - protein, 234 aa, Zea mays
  unsure (1)..(234): unsure at all Xaa locations
  Clone ID: MRT4577_125189C.1.pep
MAFVCAKAELLAAVMLASAAQLCMGARRRMELYRPDPANMLSYHNGAVLHGDISVSVLWYGDFKPAQKAVILDFLLSLTAEPQAASPSVAQWWSTIDQQYLSPASAKSNGASEKTRVLLADQLSDGECSMGKSLTLEQITALAATASPKKGGVAVVFTAQDVTVEGFGMGRCSLHGSDASSGTTHIWVGNPETQCPGACAWPFHQPAYGPQTXPLVAPNGDVGADAMVMNFASM

SEQ ID NO: 212266 - protein, 120 aa, Zea mays
  Clone ID: MRT4577_12518C.1.pep
YPFVNGGEWRTVHNVTALCIGNAKYFGGGMKITPTADPFSGNLEVVILQDFKWYDFILKLHRLYGGTHLSVNGVSSMRVQSIEVAEVVASGGVFVQSDGEHFGFLPTKFSVLPRAVDFFC

SEQ ID NO: 212267 - protein, 43 aa, Zea mays
  unsure (1)..(43): unsure at all Xaa locations
  Clone ID: MRT4577_125190C.1.pep
MXRXXXMNXYKVLAIPVPXLXPXRXIPCKVXLSLXLSXSIXSS

SEQ ID NO: 212268 - protein, 163 aa, Zea mays
  Clone ID: MRT4577_125191C.1.pep
VICWCRAQGRWSTAEVKVIRARADRPGALKDVCWILANGPEQPGDQSWWLTPGTPNRARTWWSGPYCRRGRGLAGHVSRTWRTRPRCDTHDGLVVWVSKPQALRMVGFAEFGPQNLGSGGSNGNWWRHVASQRRVRQGEVTSCGARGRRIENQGVGSFRPRWS

SEQ ID NO: 212269 - protein, 174 aa, Zea mays
  Clone ID: MRT4577_125192C.1.pep
MDPQVKLALEAQTRSFLAELDKKFAALDTKWESRIGDLERSAAAAADQFYDLKADIHTDVTAQLEFFVHSATERSDQIAAATASRVEVLESASASFDAWRPGIESSMADVKVGIESVREAVAKLARPWDPSPPVPAYLQPGILGEFRVSPRAPHCRMSDQRASRARHRLSTSGG

SEQ ID NO: 212270 - protein, 95 aa, Zea mays
  Clone ID: MRT4577_125193C.1.pep
WSTGCPPLIAHSASSRDKLGLHFSGPTWGGPQNPNRGSWALQGPKQNPRVKTRNCCPHGQPCLRRASGRPFKTIHGGFLPSPKVSHHPLARGVNF

SEQ ID NO: 212271 - protein, 121 aa, Zea mays
  unsure (1)..(121): unsure at all Xaa locations
  Clone ID: MRT4577_125194C.1.pep
MAAARRLSELLQEQQEPFLVEAARARRPRRXWRERGGGGGXGGGGGLGCCPTAACRRLLRLCSHGFKKRSAGALRSALTKVLCSRAMRRVLRWDGLGGGCPSGAGACGAGGVRPLAPLPGG

SEQ ID NO: 212272 - protein, 66 aa, Zea mays
  unsure (1)..(66): unsure at all Xaa locations
  Clone ID: MRT4577_125195C.1.pep
MASRTTLKSKPKGLGGKKATVDYKDATLVATTVRFMKVWTTLTMNXAIVVAHYGFIPLVIVIVLNF

SEQ ID NO: 212273 - protein, 75 aa, Zea mays
  Clone ID: MRT4577_125196C.1.pep
TNTVPSFYPNSRFFDNLHFGRGHQTTQAHWQFKRPMTYLPPRGPGPRGGGLSFWMLKSARGRPSSNFLPAKIKPF

SEQ ID NO: 212274 - protein, 451 aa, Zea mays
  Clone ID: MRT4577_125197C.1.pep
YCKTMKAHQQQGNASGTGAKTKSGCDKVQSLKAGAHINKSSGNVAAKRRKVSPFESHTKSKIASKTDSLMEAPASDAKLSARPPNHSGKIKLQLFPLYETIQEIMQQEKHNPYLELTLAPRKKMSSILQHLNTKWGSSQCAKGELMLFPNDTRLDTIGGSAKWTLKDSCTAADVHVAVGYPSTFRLRYGWFGPDLNQQSSEPSLASAYSADKIIGSRPPDLVFNEQKHMAGSDEFANHFVTPSIVDEINTSQMAENPSKVAQLSWLDSISNISFGALLSEAAPSQDTKQPPSQNSICLQQIPPTCDSFDAAIASLIARQQPSNQPKVLNPSLWEAEETCHAFPFQNQTPHASSSVPGNSFAAMTSSVLCAIPETGTDDQQCATDGRKEELNSQTSVEGDGINAKPEISMQESAGDPEREASCPRLLGGTDSIGLSSLLTDSLDAFQKFSVF

SEQ ID NO: 212275 - protein, 68 aa, Zea mays
  unsure (1)..(68): unsure at all Xaa locations
  Clone ID: MRT4577_125198C.1.pep
GSRGPLFFPVFGGDRGKSGYCFRGLSQKRYTRDADITRIGGTRMQKQLHKRTFILKLDKXEYVRGGGS

SEQ ID NO: 212276 - protein, 40 aa, Zea mays
  Clone ID: MRT4577_125199C.1.pep
SKTGKKKCYLTNHLKIVILGIQAARDLKNPPKHMGDIKNR

SEQ ID NO: 212277 - protein, 57 aa, Zea mays
  Clone ID: MRT4577_12519C.1.pep
VASIRGFSRYVTPFSVYMRESTKNLGDLNKKTPPQRCISTKRGKVFPSRSLTLTEWA

SEQ ID NO: 212278 - protein, 85 aa, Zea mays
  unsure (1)..(85): unsure at all Xaa locations
  Clone ID: MRT4577_1251C.1.pep
TLGACLNSGGYVIARDPFAVSKVFVYHYYQTFDTNRAGLDGLYHQTLMLTFEGQNFHGPYYIDGTLGSFHYQACEHHIXTVDCHP

SEQ ID NO: 212279 - protein, 46 aa, Zea mays
  Clone ID: MRT4577_125200C.1.pep
VHRVIVPLVLLVQSQGLEAYVEDQTEGLHERKLLRTRGSARLFKTV

SEQ ID NO: 212280 - protein, 72 aa, Zea mays
  Clone ID: MRT4577_125201C.1.pep
SLSKEALRFQFTAVIHNTPLGEPAASHLQATTTIAFTATPSLRHSICQIPAMQNKLLPSLLTTTTTYKIHVT

SEQ ID NO: 212281 - protein, 75 aa, Zea mays
  unsure (1)..(75): unsure at all Xaa locations
  Clone ID: MRT4577_125202C.1.pep
RAKQNKKGGRGNPDLIFLAETPRQGGGGTKEQDXHQHQARRDTAGXERRHDQPRKEERGLPQGEKGHERGEDLRT

SEQ ID NO: 212282 - protein, 60 aa, Zea mays
  Clone ID: MRT4577_125203C.1.pep
VLNILFLSFFFKVCFIKKRLQLVINFATFQIACSMPSKPNILPYSKHPIAVSHIFAAFDT

SEQ ID NO: 212283 - protein, 80 aa, Zea mays
  unsure (1)..(80): unsure at all Xaa locations
  Clone ID: MRT4577_125204C.1.pep
MLPSKVFTLEEVDKHNTNDDXWLVIAGKVYNVTTLLQDHPGGVYVLLSSNANDATDDFEXTGXHSTTVRPVMDEHLGSEI

SEQ ID NO: 212284 - protein, 61 aa, Zea mays
  Clone ID: MRT4577_125205C.1.pep
IGSPCCVNASREYAYTLHVTEKSDIYSFGVVILELVTGKKPLAAEIGEMDLVAWVTAKVEQ

SEQ ID NO: 212285 - protein, 109 aa, Zea mays
  Clone ID: MRT4577_125206C.1.pep
LIILCAYAPAEVDGAAYRWVAVACSAASVCYVLAKAVAVFGAAPVWRGNGQLVAVEAMFLMSLALAVAHLAMAYRASCRERRRLQLVYRIHVEAVRPLSLSHSLSPDAW

SEQ ID NO: 212286 - protein, 135 aa, Zea mays
  Clone ID: MRT4577_125207C.1.pep
SEEQKKFCIAAPEPLLTFALSCGMYSSPGVKIYTANNVREELQDAQRDFIRASVGVSRKGKLLAPKILHCFARGFVDDNSFPIWISHFLPQQQATFVDHCVSQRRQSLLGTRTFGVVPFDSRFRYLFLPDAGSLN

SEQ ID NO: 212287 - protein, 169 aa, Zea mays
  Clone ID: MRT4577_125208C.1.pep
HCHHTAVVFFVSKAAREKKNTDSDSNQNSFSTQLPLESSVLSGGSLKQSTLHKPIALIFSPILSKLFLGLSGCSGSRMLSKQSTLLLDLSLLSVLDLAFSLWPGLRLRLSVCSLLGLGFASWIGLFFDDSSLREIMRGGASEMLRRHAAFCSQLPVARARPRRLFHMAA

SEQ ID NO: 212288 - protein, 101 aa, Zea mays
  Clone ID: MRT4577_125209C.1.pep
SSPVSDVFILQHLPSTTELAADCSPPPPRLGLGATKLCPVMPGLAGNDNSPPAAAPDPRRLWSPVRRRAPSCPMPYGYTRGKPGELTIATDYSLDKRDLGP

SEQ ID NO: 212289 - protein, 325 aa, Zea mays
  Clone ID: MRT4577_12520C.1.pep
MAAPATPRQSLILPRASSHSHSQPSAGGLTSYRVTASHRRRGDFVFVVNPLGANGRTGKQWKQLLPLLRTRLADQCNICECITSGPSHAIDVTREAIKDGVDAVIAVGGDGTLHEVVNGFFWEGSPLIPLGTGSDFARTFGWTNDPHDAIDRIVRGVKSKLDVGVMEGPNREPHFFVNVADIHLSAKAGYFASMYKSFGNLCYVFGALRAFWGHNNQDMRIKVNGGEWRTVHNVTALCIGNAKYFGGGMKITPTADPFSGNLEVVILQDFKWYDFILKLHRLYGGTHLSVNGVSSMRLRKTLNPYSTYTKRHLAHVRTTTMGPGP

SEQ ID NO: 212290 - protein, 389 aa, Zea mays
  Clone ID: MRT4577_125210C.1.pep
MGQDLVEIHPRELQFTFEVKKQSSCVVCLTNKSNEYVAFKVKTTSPKRYCVRPNTGVILPRKTCEFTVTMQALRTAPPDMQLKDKFLVQTTVVPYGTSDEELVPAVFSKETGRYIEESKLRVVLVSSYQSLEEQPTNGIHDTEPAVEVPLLKEMPNLGSEVPDVAKEIPAPLVQGPAIVTGIPSPVKEVPGLREIPVPLNEAPTLLAEFPSPQKDPSAITVEHASNVTIEHAPAISIESPPLKQSVPVFKESPLKQSVAVFKESPPLKQSISVFKESPPLEETTPKEAVMLSDRGLFNVQNHQLSHVTEDVQNMKSKLNNLESKLEEAEKMIIRLREESRNTTQERDELQQEMVFLRKKGTARSQMGFPLLFVVYVALLGTCIGYLLRI

SEQ ID NO: 212291 - protein, 242 aa, Zea mays
  Clone ID: MRT4577_125211C.1.pep
MGQDLVEIHPRELQFTFEVKKQSSCVVCLTNKSNEYVAFKVKTTSPKRYCVRPNTGVILPRKTCEFTVTMQALRTAPPDMQLKDKFLVQTTVVPYGTSDEELVPAVFSKETGRYIEESKLRVVLVSSYQSLEEQPTNGIHDTEPAVEVPLLKEMPNLGSEVPDVAKEIPAPLVQGPAIVTGIPSPVKEVPGLREIPVPLDEAPTLLAEFPSPQKDPSAITVEHASKCYIEHAPAISIESPPL

SEQ ID NO: 212292 - protein, 194 aa, Zea mays
  Clone ID: MRT4577_125212C.1.pep
MAEPRRTRPSTFRCAAATVLALLVVVFVIVLLWLFLHPSKLYFSVDHAGTTGFNFTAAGGLAGAFDLTLRASNPNERASVSYRWVDVGVWYNGTYLAGAHAPGFFQRPGDETRLDVVARAAPDAWVLPRGVEEGMKKERTAGKLAVDVHVVAKVRFRYGVVRTRKYTVRASCPAVPAEFVPPTSFDRVNCHVHI

SEQ ID NO: 212293 - protein, 43 aa, Zea mays
  Clone ID: MRT4577_125213C.1.pep
DRSFSRRDRGYHWWDKFRSYRTDTRSEEFYSLPFNLNKFFPSV

SEQ ID NO: 212294 - protein, 72 aa, Zea mays
  unsure (1)..(72): unsure at all Xaa locations
  Clone ID: MRT4577_125214C.1.pep
MAIAFAVTPRVWGAHLVTLCLSLLCAVVGPDVVQNCCCQPNVCCSKVGYCGTTDEYCGDRCQXGPCRSVCGG

SEQ ID NO: 212295 - protein, 97 aa, Zea mays
  Clone ID: MRT4577_125215C.1.pep
WPSVLLSPGPPGIILVREAESVMSCRFRTLCTHFRNTLRLFRMHTPFAYRACSTGSSLGILVLQELLANGGLRWPVHLWVQIDLDGELAQHLDAQRI

SEQ ID NO: 212296 - protein, 465 aa, Zea mays
  unsure (1)..(465): unsure at all Xaa locations
  Clone ID: MRT4577_125216C.1.pep
MEVTIAEKKPRAAGDGGGLVERLPEALLVEVLARVDVDGACSAAASCRSLYAAANAVLPALTSIDLSAFAPSNAILSRILAGNGAVRSLTVNCSLLDDSAASVIARGSLRDLSLLKCSFSMSFFVALGGACHDLRSLKLEMAVCPYTLYPCLAPVYVGCVHLETLWVKFPLLDPLTTFRSYKAGSPLIPSKHQDLLLQPVSHSRAKTVFLKTTSLNKHITDNLESLSLVLDMVTDELVMLITSNVHKLSELCLEDEPDTQPNLPEDLTNVGLQALGLCHNLKHLSLTRRSYDFRRVNDFGILMLADGCKQLRTIRLGGFSKVSDAGYAALLHSGKDLKKFEVSNGWCLSDLACLDLDKAAPNITEVRLLNCALLTSDTAISLAPCTNLKVLDLSGCKSIADSGLVSISQLPNLTLLDLAGADITDVGLSALGNGEVXISSLCLRGCRRISSIGIASLVCGAGTIN

SEQ ID NO: 212297 - protein, 64 aa, Zea mays
  Clone ID: MRT4577_125217C.1.pep
RLPRRRKRRPVKFRRKLTLRQPLRGRKRKIKKLNLRQPPRGRIRKRRQSRLMNSQPFVGCQSKS

SEQ ID NO: 212298 - protein, 174 aa, Zea mays
  Clone ID: MRT4577_125218C.1.pep
MSKMADEKVISAPATGGGEDGLIAGDLSATEARVRPLETLLRAAPLGLCVAAMAVMLRDTQTNEYGTVSYSDLGGFKYLVYANGLCAAYSLVSAFYTAVPRPATLSRSWIVFLLDQVFTYLILAAGAASAELLYLAYNGDKEVTWSEACGVFGGFCRQARTSVVITFRSDFCYI

SEQ ID NO: 212299 - protein, 95 aa, Zea mays
  Clone ID: MRT4577_125219C.1.pep
MGSNHMLLVIQAYNTLLYHSPYPPSFMLTHLTFSYSFFLFHKSTNSLLVSSYPQLRLPLFWRITSYGCVAFFYDIDMLKGSCSKSLSPFPQSFFY

SEQ ID NO: 212300 - protein, 142 aa, Zea mays
  unsure (1)..(142): unsure at all Xaa locations
  Clone ID: MRT4577_12521C.1.pep
KKKKKKKKKKKLKKLFLLKIIFGGGGCTTNQKILPHAIGRPQLVYLRQTLLNYGCKLTKVAVLFYTESAIPLIDNPVEHKRTKHINILPHFLRDHQQKGDIQIAYINTKDQLADIFTKPLVXQTFTKLTLELNILLSRNFFC

SEQ ID NO: 212301 - protein, 74 aa, Zea mays
  Clone ID: MRT4577_125220C.1.pep
TGTTYSEASPRIAGGGIRLRLDIYCTNAPPCMYGRFKHEPWQAIQQYDGTLKPIRKSVWNQTTVRSLCCDATGS

SEQ ID NO: 212302 - protein, 132 aa, Zea mays
  unsure (1)..(132): unsure at all Xaa locations
  Clone ID: MRT4577_125221C.1.pep
RIVSFVAVILELLALTTLRCTHNAQRESITNNTDMLASCIKDVPMNKNKLQLQELARFGGYDHNQTANXALMGIEKLVNAKTQIGACTMYYLTIETKDGVGKKLYETNVWEKPXENFKQLQEFKPVDKGASA

SEQ ID NO: 212303 - protein, 72 aa, Zea mays
  Clone ID: MRT4577_125222C.1.pep
TGGGVTNQMTQSIYPVMPKILISNQCVLHYHKQLMTHIQAAKKNTRNSQPCWAQRSKTTTYKHYIPTGPQFC

SEQ ID NO: 212304 - protein, 51 aa, Zea mays
  Clone ID: MRT4577_125223C.1.pep
MRSRGLLARPYIHSMLAIAAVCVCVCVFMRALLRINSGKSFKWERLDYGTV

SEQ ID NO: 212305 - protein, 103 aa, Zea mays
  unsure (1)..(103): unsure at all Xaa locations
  Clone ID: MRT4577_125224C.1.pep
MSGRCAAVIGLLVLLILWASCARLPRRSSTTRGAALPRRGAPTTAAFALGSFWRSKAAFWCXHCVIRTYVDYASGSKSNPEYRILSDHAXCVKVEHDPRLIHY

SEQ ID NO: 212306 - protein, 89 aa, Zea mays
  Clone ID: MRT4577_125225C.1.pep
MSARLHKGLSSVLAKSPSDTVILSSVRTPICRSYKGQLKDAYPEELLASVLKATLKAHPEAPVDDVAVGVVLSELGGSKAARMALNHVG

SEQ ID NO: 212307 - protein, 111 aa, Zea mays
  unsure (1)..(111): unsure at all Xaa locations
  Clone ID: MRT4577_125226C.1.pep
PASPPVVVVHPVPSPALXPLPFTPTGKCPVNTLKLLAWVDALNGLVHPVIGAKANDPFWPLLFGVGDLDPAVCLCPPIKAKGVRVNLVVPVAISVVVNEFGKHVPSSFQGP

SEQ ID NO: 212308 - protein, 61 aa, Zea mays
  Clone ID: MRT4577_125227C.1.pep
MDDPVERLKDGFHRFKTEAFTVRNIAAMVPAYDKTKYTGIGSAIEYAVCALKVEALVRMGH

SEQ ID NO: 212309 - protein, 143 aa, Zea mays
  Clone ID: MRT4577_125228C.1.pep
MKAVYAGFAAALRDLKVWVMNVVPIDSPDTLPIIYERGLFGLYHDWCESFSTYPRTYDLVHANHLFSKVKKRCELLPVIVEVDRVLRPQGRLIVRDNIETTSEVENILKSLHWEVRMSYFQEKEGLLLVQKTTWRPNETEAKL

SEQ ID NO: 212310 - protein, 245 aa, Zea mays
  Clone ID: MRT4577_125229C.1.pep
SSWPAAERSHPRWILCNRTSQDEYGGHRRKGMDPTVERLKSGFQKFKTEVYDKKPELFEPLKSGQSPRYMVFACSDSRVCPSVTLGLQPGEAFTVRNIASMVPPYDKIKYAGTGSAIEYAVCALKVQVIVVIGHSCRGGIRALLSLKDGAPDNFHFVEDWVRIGSPAKNKVKKEHASVPFDDQCSILEKEAVNVSLQNLKSYPFVKEGLAGGTLKLVGAHYDFVKGQFVTWEPPQDAIERLTSGF

SEQ ID NO: 212311 - protein, 99 aa, Zea mays
  unsure (1)..(99): unsure at all Xaa locations
  Clone ID: MRT4577_12522C.1.pep
VLDKCAAPFLPWPWPAFPGALRSISLPQVPARAXSGSPAPSPAPLFPXTAAARPTFPRCAAPRRNAAVPAAPTPSLASSLLALRACHVFGDLSKWGVEQ

SEQ ID NO: 212312 - protein, 78 aa, Zea mays
  Clone ID: MRT4577_125230C.1.pep
FFQVYSISRGSYSSAASTRNTNINFYTDIHSACTSYVYCKLYKLHHLKSQPILHGASSSEILPTSCSKYNYSYNCRKP

SEQ ID NO: 212313 - protein, 107 aa, Zea mays
  unsure (1)..(107): unsure at all Xaa locations
  Clone ID: MRT4577_125231C.1.pep
XXAHFXIIFVGVXXHXFXYNTXXGLAGIXXRYTDYPXAYTTXNTVSSIGSFISLXTAVLVMIFMIXEAFASKREVLSISYSSTNLEXCHGCPPPYHTFQEPSYVKVK

SEQ ID NO: 212314 - protein, 85 aa, Zea mays
  Clone ID: MRT4577_125232C.1.pep
MDDPVERLKDGFHKFKTEVYDKKPELFEPLKAGQAPKEAVNLSLENLKTYPFVKDGLANGTLKLVGGHYNFVSGEFLTWDNKQPS

SEQ ID NO: 212315 - protein, 101 aa, Zea mays
  Clone ID: MRT4577_125233C.1.pep
MYTLPVRATTSSIVASLAPDTFHFVEDWVKIGFIAKMKVKKEHASVPFDDQCSILEKEAVNVSLENLKTYPFVKEGLANGTLKLIGGHYDFVSGEFLTWKK

SEQ ID NO: 212316 - protein, 281 aa, Zea mays
  Clone ID: MRT4577_125234C.1.pep
MRGPCPGGGVSASFAPSFNGSRAMIWPATVNCTRRIRISFIQTAKTGPFRAGDRATGGICYASQAVELLPTLYPEIVVRDARLEDCWEVADTHCSSFFPGYKFPLDLVLRIDRYIALLSGFSVPPGCMRTCLVAVNSNSVNSSFNIECGDATDANFEKYNLSRGSVAGILTLDTVADYLPRRGPLKQRRTGIAYIANVAVRKEERRKGIAKMLVQEAEARARSWGCRSMALHCDVNNVAALRLYRNQGFKCIRVPEGAKWPEPKIAKGAEYNFMMKLVPKA

SEQ ID NO: 212317 - protein, 68 aa, Zea mays
  Clone ID: MRT4577_125235C.1.pep
TITINERNVVYALPFRPLAIAGRRFSLLRFTGLRHSADTRHCELVSYHHGRSRLCRIEDHQGCWSTTR

SEQ ID NO: 212318 - protein, 260 aa, Zea mays
  unsure (1)..(260): unsure at all Xaa locations
  Clone ID: MRT4577_125236C.1.pep
MYTLPVRPTTSSIVASXHPRAVLLLRLRPPXGSSGTPXRLRRPXATVVGMDPTVERLKSGFQKFKTEVYDKKPELFEPLKSGQSPRYMVFACSDSRVCPSVTLGLQPGEAFTVRNIASMVPPYDKIKYAGTGSAIEYAVCALKVQVIVVIGHSCCGGIRALLSLKDGAPDNFHFVEDWVRIGSPAKNKVKKEHASVPFDDQCSILEKEGVNVSLQNLKSYPFVNEGLAGGTLKLVGAHYDFVKGQFVTWGXPPQDAIEAL

SEQ ID NO: 212319 - protein, 245 aa, Zea mays
  Clone ID: MRT4577_125237C.1.pep
MPAFPVRASASSSVVGSLTGTRRPRLIKNTTVIFATAPSTLVAMGDAVEHLKSGFQKFKTEVYDKKPELFEPLKAGQAPKYMVFACSDSRVCPSVTLGLQPGEAFTVRNIAAMVPAYDKTKYTGIGSAIEYAVCALKVEVLVVIGHSCCGGIRALLSLQDGAPDNFHFVENWVKIGFPAKVKVKKEHASVPFDDQCSILEKEAVNVSLENLKTYPFVQEGLAKGTLKLVGAHYDFVSGKFLVWET

SEQ ID NO: 212320 - protein, 71 aa, Zea mays
  Clone ID: MRT4577_125238C.1.pep
PRVRPRVRKKKKKKKKKKKKKKKKKKKKKKKKKKKKKKKKKKKKKKRGGPFKKNQILLTRVCNLIIFFKGN

SEQ ID NO: 212321 - protein, 202 aa, Zea mays
  unsure (1)..(202): unsure at all Xaa locations
  Clone ID: MRT4577_125239C.1.pep
MGDAVEHLKSGFQKFKTEVYDKKPELFEPLKAGQAPKYMVFACSDSRVCPSVTLGLQPGEAFTVRNIAAMVPAYDKTKYTGIGSAIEYAVCALKVEVLVVIGHSCCGGIRALLSLQDGAPDNFHFVENWVKIGFPAKVKVKKEHASVPFDDQCSILEKEAVNVSLENLKTYPFVQEGLAKGTLKLVGXHYDFVVGNFLVWET

SEQ ID NO: 212322 - protein, 354 aa, Zea mays
  Clone ID: MRT4577_12523C.1.pep
MAAPATPRPSLILPRASSHSHSQPSAGGLTSYRVTASHRRRGDFVFVVNPLGANGRTGKQWKQLLPLLRTRLADQCNICECITSGPSHAIDVTREAIKDGVDAVIAVGGDGTLHEVVNGFFWEGSPVCALDRGPDHSTALGLIPLGTGSDFARTFGWTNDPHDAIDRIVRGVKSKLDVGVMEGPNREPHFFVNVADIHLSAKAGYFASMYKSFGNLCYVFGALRAFWGHNNQDMRIKVNGGEWRTVHNVTALCIGNAKYFGGGMKITPTADPFSGNLEVVILQDFKWYDFILKLHRLYGGTHLSVNGVSSMRVQSIEVAEVAASGGVFVQSDGEHFGFLPTKFSVLPRAVDFFC

SEQ ID NO: 212323 - protein, 96 aa, Zea mays
  unsure (1)..(96): unsure at all Xaa locations
  Clone ID: MRT4577_125240C.1.pep
SILKELKDLQKDPPTSCTAAPAGEDMFHWQATIMGPPDSPYPAGGYVVXIKVPGDYPFKPPKVSFKTKGFHPNINRYGNICLDILKEQWSPALTIS

SEQ ID NO: 212324 - protein, 206 aa, Zea mays
  Clone ID: MRT4577_125241C.1.pep
MDDPVERLKDGFHKFKTEVYDKKPELFEPLKAGQAPKYMVFACSDSRVCPSVTLGLQPGEAFTVRNIAAMVPAYDKTKYTGIGSAIEYAVCALKVEVLVVIGHSCCGGIRALLSLQDGAPDTFHFVENWVKIGFPAKIKVKKDHASVPFDDQCSILEKEAVNLSLENLKTYPFVKDGLANGTLKLVGGHYNFVSGEFLTWDNKQPS

SEQ ID NO: 212325 - protein, 154 aa, Zea mays
  unsure (1)..(154): unsure at all Xaa locations
  Clone ID: MRT4577_125242C.1.pep
SLQACYRLLSRITNTFIIPQWSQGNSSIILQFLPPXVISIAFEQITVRAYRLQLANMESVFHHQSSQQHLLSLAHVAIVTISFQQQHQLKVALVLLIMVIAVASVIQLICASKPLVVSCIVENMRLHILQQFLITCIQLEMVIYDAVVNHQQWF

SEQ ID NO: 212326 - protein, 307 aa, Zea mays
  unsure (1)..(307): unsure at all Xaa locations
  Clone ID: MRT4577_125243C.1.pep
RVRGQRRSARKRDGGQLRSQTREXDRERKGGHPXPAGGDKRGGERGQRRGGGEEEEDEQLPLPSEKKGGASEGEAAHRYPHLVTPSEPEALXQPPPPPSKASSKSMDPTVERLKSGFQKFKTEVYDKKPELFEPLKSGQSPRYMVFACSDSRVCPSVTPGLQPGEAFTVRNIASMVPPYDKIKYAGTGSAIEYAVCALKVQVIVVIGHSCCGGIRALLSLQDGAPDTFHFVEDWVKIGFIAKMKVKKEHASVPFDDQCSILEKEAVNVSLENLKTYPFVKEGLANGTLKLIGGHYDFVSGEFLTWKK

SEQ ID NO: 212327 - protein, 542 aa, Zea mays
  unsure (1)..(542): unsure at all Xaa locations
  Clone ID: MRT4577_125244C.1.pep
NLYMQAGSEYVRQISKILKSQVTMLTSTSSTSLPEEMFTCTLELQSSCKGHKRDSISPQYLKPGTGESQLFXTEGVCIWTNLKSSXDEIIRWWPLYLDDQDCVGKVQLGMNLSMSSNNYGSEKMLQGGPAVDTIIYDMVLEAAMRAQNFNSKMLHINGPWIWLLDEFSDYYGISDAYRKLRYLSYIMNVAIPTKDCLELIYELIVPVTKAREDRTLTRQERSILIDCEDRIKSLRAALFENYKSLDEYSPTGLSDLFGPITDSAAPALAPAVQIFSVLHDILSKEAQDILRNYLQIAAAKRCRRHMIETDEFLSSNNDSLLTDPMTISAAYLKMKTLCINMSREIQADIKIHNQNILPSSIDLPNIAASLYSTELCKRLKGFLSSSPPSRPVQHVAELITATSEFERDLESWQVRPVHGGVISRQLFHDYIMVWIEDTRLQLLDNCKAEKISCPAVSTVSPFVEQMYEQIKESINEYGVVINRWPQYLMSLESAVADVEREIMKALEKQYMDILMPLRDGIPEKIEKQVQRLTRRQSIAPYV

SEQ ID NO: 212328 - protein, 116 aa, Zea mays
  Clone ID: MRT4577_125245C.1.pep
ILHLLYSFPTRLLFPFGIFFLSFFFFYSKHSFFIINLNQKRKSCVGLKKKKKKKKKKKKKKKKKKNGVINSNNVSCPGFNFCPYPILILYLFLILALAFPWAIFFSSHISTQNAFP

SEQ ID NO: 212329 - protein, 124 aa, Zea mays
  Clone ID: MRT4577_125246C.1.pep
RQSTTLFSPNLRSPRENQYFRKMAKERSGLVVGLNKGHKTTPIETKARISRTKGRLSRRTAFVRDIVKEVAGLAPYERRVVELLRNSQDKRARKLAKKRLGTIGRAKAKVDEMQKVIAEARRAG

SEQ ID NO: 212330 - protein, 63 aa, Zea mays
  Clone ID: MRT4577_125247C.1.pep
FPFPGLFSLPQSQDEAELFRNYLKQVREETSGRLLSVAYRANGTPNKWWLAFAKRKFMNVVVL

SEQ ID NO: 212331 - protein, 91 aa, Zea mays
  Clone ID: MRT4577_125248C.1.pep
PRSFRSRWRRPALHVPSQGVDRDRSPRVVVLRGALVVSASDLRLSPPAGVAQPTPCGLAGTAPCVVHVPAGPVPPGCPCLVLAIFSNEPMG

SEQ ID NO: 212332 - protein, 75 aa, Zea mays
  Clone ID: MRT4577_125249C.1.pep
RVNPPPKKNGELENLQKNMGGKQSLKSILAQKTGFRNKFFALFRPLNHGGGGWVPPQNLPKFFTFFRLFQTRKIF

SEQ ID NO: 212333 - protein, 91 aa, Zea mays
  unsure (1)..(91): unsure at all Xaa locations
  Clone ID: MRT4577_12524C.1.pep
VSSLVVSRFLCSVSALLPVFFVWLRWXGVLCAVPVAGCALVVGLFACRVFGLLGASLSLSFPPRFCLSXFLCKGLGGFFRXRGSPRASGSG

SEQ ID NO: 212334 - protein, 244 aa, Zea mays
  unsure (1)..(244): unsure at all Xaa locations
  Clone ID: MRT4577_125250C.1.pep
FPFPHLHPIPRPPPRAAARVPPATPPASSSSRCRPPPXPPQAPSAGDPLYDELWHACAGPLVTVPRVGDLVFYFPQGHIEQVEASMNQVAGNQMRLYDLPSKLLCRVINVELKAEADTDEVYAQVMLMPEPEQNEMAVDKSTSTTGATPPRPAVRSFCKTLTASDTSTHGGFSVLRRHADECLPPLDMTQSPPTQELVAKDLHGMDWRFRHIFRGQPRRHLLQSXWSVFVSSKRLVTGDAFIFL

SEQ ID NO: 212335 - protein, 104 aa, Zea mays
  unsure (1)..(104): unsure at all Xaa locations
  Clone ID: MRT4577_125251C.1.pep
ADRVILSSCHLHWPRAPMRLYRSSCRPCGGSAXXXTRPXXVQPHLFYSHIMRICRYMLDAEVQKPQLSELPITNGFRMNEETTWLCIKTFHKPRIAVRRVALAQ

SEQ ID NO: 212336 - protein, 459 aa, Zea mays
  unsure (1)..(459): unsure at all Xaa locations
  Clone ID: MRT4577_125252C.1.pep
MSLKCSVGSSNFSISMEEVFKMVEEKCLHSYKMLPSDLSIGKLLSEVCQSVVQLGTMHSEVNRDSGSLHNEVVAPFVKPISCEAAVGISDDVAGGSSVLESSEPCLQNSLVAWYPELAHCKQKTTHDTTDISKGEERVRIPLVNEFGSEXVXPSFYYVPRNLVFQNAYVNISIARIGDEDCCADCSGNCLSSLVPCGCARVTGGEFPYTPEGLLKTEFLDECTSVNHFPQEHHRFYCTVCPLERSKNKASPGPCKGHLMRKFIKECWSKCGCGMQCGNRVIQRGITCKLQVFFTREGKGWGVRTVEDLPKGSFVCEYVGEVLTSSELHERAIENARNGKHKHQVLLDAGWGSGVLRDEDALSLDGSFYGNVGRFINHRCYDANLVQIPVEVETPDHHYYHLAFFTNKKVEAFEELTWDYGIGFDDTEGPSKPFRCMCGSRYCRDPNNLRRMARAAAKRK

SEQ ID NO: 212337 - protein, 130 aa, Zea mays
  Clone ID: MRT4577_125253C.1.pep
KGKHKHQVLLDAGWGSGVLRDEDALSLDGSFYGNVGRFINHRCYDANLVQIPVEVETPDHHYYHLAFFTNKKVEAFEELTWDYGIGFDDTEGPSKPFRCMCGSRYCRDPNNLSMLPFSMHKSMKRGIMYV

SEQ ID NO: 212338 - protein, 56 aa, Zea mays; identical to SEQ ID NO: 206231
  Clone ID: MRT4577_125254C.1.pep

SEQ ID NO: 212339 - protein, 50 aa, Zea mays
  unsure (1)..(50): unsure at all Xaa locations
  Clone ID: MRT4577_125255C.1.pep
MDKYELFKDIGFGNLGVVWFMWNKDIKEFXVMKYIXRGVKIDENVVREII

SEQ ID NO: 212340 - protein, 164 aa, Zea mays
  Clone ID: MRT4577_125256C.1.pep
SRPAGPGQPGATPRSAIRFLRLRSTQTSNLAIPTRTAAPPHARLRCHLSRSSDSTPPSPPTTPDPDPDPDPDPESESESEDTLRFAFACGGAGAGGRVYSAIALADELHASLPSSRSLIIGAPAPSLESSAAAAASYPFDPVPLHCPPRGILAAGLQLRRFRPE

SEQ ID NO: 212341 - protein, 77 aa, Zea mays
  Clone ID: MRT4577_125257C.1.pep
ESPNKNCWFIKKTPGRKIRGDIAGVFGTWGGRPKVSLPPYAKLEKIEGGLLCLVKVLDPCTSGLFPQFFYWAPRAGQ

SEQ ID NO: 212342 - protein, 104 aa, Zea mays
  Clone ID: MRT4577_125258C.1.pep
AHYSCWPPFFFFFWAGFEDTWREYRPQFKPYHRTLEPYGRRSAVNEGVPWIVDLPLRVWRETPLPRVLSLRPSSAGPRVRYPAGHTVLSIPTTLADQNRQRLNG

SEQ ID NO: 212343 - protein, 62 aa, Zea mays
  unsure (1)..(62): unsure at all Xaa locations
  Clone ID: MRT4577_125259C.1.pep
MVYDNAVSALGKXCQFHPDGIDAPQAVPDWLSCLPIIDHTVEANVVHAQLGSMVQRSDAEIL

SEQ ID NO: 212344 - protein, 186 aa, Zea mays
  unsure (1)..(186): unsure at all Xaa locations
  Clone ID: MRT4577_12525C.1.pep
MDAPDSGGGGSADAGEPIWDWGNLLDFVVQDDDSLILPWDDAAGIAXPTPPRPPXLLPASPPLPQSVEEEPEPEPEXASASAAPSSGSGDRXRVRKRDPRLVCPNYLAGIVPCACPEVDEMVAAAEVEDVATEFLAGARKKTKTAGRRGKPEAAGTAGGTVRAAVAEMNCQVPACEADLRELERVP

SEQ ID NO: 212345 - protein, 110 aa, Zea mays
  unsure (1)..(110): unsure at all Xaa locations
  Clone ID: MRT4577_125260C.1.pep
KVDPKHSLENYAYNMRNTIKDEKIASKLPPHHKKKMEHPIDAAISWLHPTQLAKGHEFDHNMKELESLCNPIIPKMYQGAGPHMGGXGGMHEHAPXAGTGAPGPTIEEVD

SEQ ID NO: 212346 - protein, 57 aa, Zea mays
  Clone ID: MRT4577_125261C.1.pep
LSPASRLLRSYPDRFRPLLNQDRLRITCHLSTRPFTGLIRYQHINLLSICLNAIWAC

SEQ ID NO: 212347 - protein, 78 aa, Zea mays
  unsure (1)..(78): unsure at all Xaa locations
  Clone ID: MRT4577_125262C.1.pep
RSTPSILTLALPAQVKPDLRSILSATRTPTGKTHPRPGTPRSRQPRPXXRTHALPPPHNIESTLGTEKGSKATTXRFP

SEQ ID NO: 212348 - protein, 68 aa, Zea mays
  Clone ID: MRT4577_125263C.1.pep
HGFHVACVDTWLRSNSSCPSCRRPIVLDDPAPPKRCLKCEAVVLEAVLASSSSSSAAGGGRGGGGFLP

SEQ ID NO: 212349 - protein, 174 aa, Zea mays
  Clone ID: MRT4577_125264C.1.pep
ASVNQNALQITPDTGNNANSFLVDQAGRAFYATPFTLWAANASSSNSSAAGGRRVASFSTVFKANLYRQNTTVKGEGLAFVVASGNGGPPPGSYRGYLGLTNASTDGLAANGFVAVELDTVKQPYDPDDNHVGLDLNGVRSVSAVPLAPYGIQLAPNDTSSSGDQMVWVDYNGT

SEQ ID NO: 212350 - protein, 70 aa, Zea mays
  Clone ID: MRT4577_125265C.1.pep
HASAKLFHKFARIIFDSGPGRFNAYACTKSGQSDKSLNQSCLLFSMEAAMTHMPLQLYLQLLRQQRQSMT

SEQ ID NO: 212351 - protein, 119 aa, Zea mays
  Clone ID: MRT4577_125266C.1.pep
FHSWIGISRCRSPRTSATSPATASGIAAAAAAPSLATAPSRAECSVDLKLGRTTPPRRSRWLQPQRRPPARWVGVGHCRRSCRAFPRDGAEPGGVLRRPQARRARYVCSQVPENQRLLV

SEQ ID NO: 212352 - protein, 52 aa, Zea mays
  unsure (1)..(52): unsure at all Xaa locations
  Clone ID: MRT4577_125267C.1.pep
SEHHYHFSCQFTTDLIXVNHADFLGHGNKDTVGQYEXHMAFTMLVLYRVVSR

SEQ ID NO: 212353 - protein, 110 aa, Zea mays
  Clone ID: MRT4577_125268C.1.pep
FGTRHLPPPLVYPRWQRGASLSSFPPFAPLPPTNFPDPAPRNAAAADAAALLSRPAAATGSCGCGGRLRGWWRRRICSGADEHRAGGRRREAVGGPDARALVLGGGAGGR

SEQ ID NO: 212354 - protein, 86 aa, Zea mays
  Clone ID: MRT4577_125269C.1.pep
QSYDVMQRVRRLGIRLEEKFFPAFFARANAARARGDCNPGRGPGPTRTTGNASPMLSGTTAWTRSRHAWPPSECGKRRLTPTSLIS

SEQ ID NO: 212355 - protein, 141 aa, Zea mays
  Clone ID: MRT4577_12526C.1.pep
GPGDLVHVAHTNSLNDFWVTKNKNGLLEKKNPRYMTDFLPSYVIKKLKDHGTPLARNLTFRACNAGPFFIPTKTQSLGGFATQNLAGHHGGSFIPRFFKWRALFFATPIFSFFDLLAGPQREMVSWGKITEVCCPLFAKGG

SEQ ID NO: 212356 - protein, 53 aa, Zea mays
  unsure (1)..(53): unsure at all Xaa locations
  Clone ID: MRT4577_125270C.1.pep
MKYIMEDMPERAGGAGAWSMAVPVALVVVVLCAFSFYLGGFYSXXRRGGGCIH

SEQ ID NO: 212357 - protein, 53 aa, Zea mays
  Clone ID: MRT4577_125271C.1.pep
KGYGEKLAASDLRNYKSESLLTSYQQAQDVYDQLLMKRDRPPLITEVGTYQGL

SEQ ID NO: 212358 - protein, 95 aa, Zea mays
  unsure (1)..(95): unsure at all Xaa locations
  Clone ID: MRT4577_125272C.1.pep
PTRPAFRDRGVPKPTSECAGCPSPDGSSAWASAKGGEARWPEXEREASNADREHGAESDSEEERRRRKAKTFGKSRAPERSSFKGAAAFKKPKFR

SEQ ID NO: 212359 - protein, 190 aa, Zea mays
  unsure (1)..(190): unsure at all Xaa locations
  Clone ID: MRT4577_125273C.1.pep
QAEHDNHPNELHNIRGTVQLRSNISDGIPLPLICXNLSQCKRDICCTRNYMTSILSETXMSVNVDINETVMQTPIXDNAPAQKLLLNFVIDFMMLGGSPAVSKTAAAPIEREKLLIHNQDDMIKSGRLSEPYKVIVDCFKRXIKDEGFSSLWRANTANDIRYFPTHALNFAFKDYFKRLINFTKDSYEYW

SEQ ID NO: 212360 - protein, 59 aa, Zea mays
  Clone ID: MRT4577_125274C.1.pep
LKLGSRVMREELGACGEGADRRRVRVHQHRRRRGHRGRRLAAPRGRRPFPIVCPAVSWW

SEQ ID NO: 212361 - protein, 76 aa, Zea mays
  unsure (1)..(76): unsure at all Xaa locations
  Clone ID: MRT4577_125275C.1.pep
KKKKKKKEKGKKKKKKNKKKKKKIKKKKKKTKNKXKRKQEKKLMKERNKNNSNYNFTLPTISNQKILAGNRLPPEY

SEQ ID NO: 212362 - protein, 156 aa, Zea mays
  Clone ID: MRT4577_125276C.1.pep
KSWPLKTRSKFFPLTWGPPSRLPSSPPIFRQIHKKNLWPPLLAPPAGWPPPTYFRCAVFKPNLWGFGAFSPPFSPNFSKALGGDWAIRLACARIPPLVGKVLFPKSKGLFKLVTMGGFFLVWFKSLLSPAGFFLNGFVSPLFSLLLHFLLNITFSS

SEQ ID NO: 212363 - protein, 149 aa, Zea mays
  unsure (1)..(149): unsure at all Xaa locations
  Clone ID: MRT4577_125277C.1.pep
PRVRPRVRQHMRFTDQTDARLRRTLMRTGDGQVGRRAETIVLPVELLRXFKPAEFGDTEEYHQCAVPXIKLLEAGLILHLSLPLDRLHWGELRFREVMRATKIRAFDTSXNSDVMRALRIAVHALSWRSGTTVGPVKTCHWADRYPVNG

SEQ ID NO: 212364 - protein, 87 aa, Zea mays
  Clone ID: MRT4577_125278C.1.pep
QQRNQVPASVSPTVKSTDTMLEIPTIVILIMQIALVPGLCTSRVQVLMVGQALRCVVRNASLACSMLRVQADGCGLTPEFSGRDPAR

SEQ ID NO: 212365 - protein, 123 aa, Zea mays
  Clone ID: MRT4577_125279C.1.pep
YLTEIILLPTILPALLVLSTHAKTPNAMLTELNRWLRCGVRLLASGFESPHPSSRAFDATARKTMRVHGHDEPYYIHANDMNKLHIMIHHDLKGTLSVLLSVDTLVGVPVNAVIFQQNNTGSE

SEQ ID NO: 212366 - protein, 102 aa, Zea mays
  Clone ID: MRT4577_12527C.1.pep
SAHLGGVDVPGHLLNRERHRRALGEYGGVDLHLLLTPPRRRRQATGQRALRRADSDPDLRGATRAPPHSERRIFMAATPEMPRRRNSTFLRQQGPAPRASSR

SEQ ID NO: 212367 - protein, 146 aa, Zea mays
  unsure (1)..(146): unsure at all Xaa locations
  Clone ID: MRT4577_125280C.1.pep
GLGLGPVSGVPAGVWAGAFGGAALALGLLPLAVLLLVVVSAPWRAVSWRLSWAWRSGSLFPGGVVLGWRGSCCPPPAGVRXGLGWRSAAGPLLSLAVSRSGASWRSASCRPPLWPPPSVSVSRRPAPPPLRSGFVWPVGSWGGXWV

SEQ ID NO: 212368 - protein, 152 aa, Zea mays
  unsure (1)..(152): unsure at all Xaa locations
  Clone ID: MRT4577_125281C.1.pep
QRETXKGDGDMATSTSTLTTHHSRFHSTTPSSPYMAAQPRRRRARRAVPSQPGQRPRPEHDGGHFGGGRQQRRAEEAYLCSTRPKSRMAPRGTKHGPRYPCSATDAQGRRPLQRKGHCNRSTRGRRDRKTGQSQQRGQRPPDMAHRQRHRKP

SEQ ID NO: 212369 - protein, 95 aa, Zea mays
  unsure (1)..(95): unsure at all Xaa locations
  Clone ID: MRT4577_125282C.1.pep
HALKLGVCDNLLRGMIIXTLGTQHRTPCCTLIQGLAFLXLAVCLCTVLRTTVMGISLNVPINLSILVKYYVKRVPXGFQCFWLSSAHRSIDLESK

SEQ ID NO: 212370 - protein, 76 aa, Zea mays
  Clone ID: MRT4577_125283C.1.pep
KNSNGGPNAFSNFGARGQPWGSTLPLGKTAEPDGVGSSPPPLTLVSSPPRQTGQHSPFLSLPNPGYFPFNSPQITV

SEQ ID NO: 212371 - protein, 70 aa, Zea mays
  Clone ID: MRT4577_125284C.1.pep
SAVALRSVFMVATPSVVAPGPVPQPFPESGEEGDNSQSPEEYQLRLHICFPCPGNNEQQARMPNLKRTRG

SEQ ID NO: 212372 - protein, 99 aa, Zea mays
  Clone ID: MRT4577_125285C.1.pep
MKANMGTKARPLSVDADKGEIGEIDTRAPFESVKAAVSLFGEVKVSSDISAARKPKVPQAERVLAKETELHLAQKELNKYKEQLNNAETTKVQALSELE

SEQ ID NO: 212373 - protein, 81 aa, Zea mays
  Clone ID: MRT4577_125286C.1.pep
LHHHNYCSHSHRHSPRRDCSPHLNRVLPFNVVRCNNRRRNDSDIGCTNNCIHPYNLCLRFKHYCCNRPSIEQRDLNWGWPR

SEQ ID NO: 212374 - protein, 211 aa, Zea mays
  Clone ID: MRT4577_125287C.1.pep
MKANMGTKARPLSVDADKGEIGEIDTRAPFESVKAAVSLFGEVKVSSDISAARKPKVPQAERVLAKETELHLAQKELNKYKEQLNNAETTKVQALSELEKAKKTVEELTTKLDVVNKSKQLAIQATEDAKTRTKQLEGGSTNECLGTDGPLRQELESAREQHAIALAELDAAKQELRKLKKDFETSLDMRLCAAQQEDESLHTTESHQRKS

SEQ ID NO: 212375 - protein, 77 aa, Zea mays
  Clone ID: MRT4577_125288C.1.pep
IPHLRPKNKFLQFLRGGRRGRIKTLQNIHLRGKGGPPQTNVKGDIFISPKKLVTKGRGGGKKQPSSGGPLGLTFKGA

SEQ ID NO: 212376 - protein, 95 aa, Zea mays
  Clone ID: MRT4577_125289C.1.pep
WVPRGRPGNHYAAVRPAYLPPTPQIVPMAAAIRGSPTRAAAPTQPRAVLRVASSAAPASSSSARPHRGVLAEDTMHATKINDSDNASPDAALEMG

SEQ ID NO: 212377 - protein, 97 aa, Zea mays
  Clone ID: MRT4577_12528C.1.pep
QKLQLFFPLRSSLSLTTGTPRVGGQAGQEAQPSGLCCSDHRSFLNALCEPGGRSGELHSAGRGVWKGNSEAPSLSDLASALRLPFLAIPHPEAEWSR

SEQ ID NO: 212378 - protein, 97 aa, Zea mays
  Clone ID: MRT4577_125290C.1.pep
ATRANEVVSGGDPTYAALLTSGFAILPDGPSGRRNMQGHGGGGERSGGALLTEENQILADSVPTAKLSLGAGATGNRLIALTVERIKAADYGESVTH

SEQ ID NO: 212379 - protein, 62 aa, Zea mays
  Clone ID: MRT4577_125291C.1.pep
VATLLEVLPNRLTTDVLEQLRLNKQALVELGSPTCDLKQMLIYLLDDPHEIRRICIMGRNCT

SEQ ID NO: 212380 - protein, 186 aa, Zea mays
  Clone ID: MRT4577_125292C.1.pep
SLIAAGQDVPNELMDLAMKDVRFRAKRDSRKGLKKGGKGKGGVGGGAGRGRGVRGVDFGLGIGYNAESGSQVPAPRSAAINSLKTGVMQQFKSSFVSGSSNTPSSSAPSLVRPALRGFVSGGTIGGDTRPAQPAPTFVTASWPAQAAPSVPASRPAAGNNNENGNPNPKSSRDRPRERKRPSGWDR

SEQ ID NO: 212381 - protein, 79 aa, Zea mays
  Clone ID: MRT4577_125293C.1.pep
KGRLNFPFGKGRPRSPRETLLFGTPGLGFPPLIQGFPWDRIDALEINMTERGGVPKPRAVPLGAPSKPPETMGHVFHQL

SEQ ID NO: 212382 - protein, 380 aa, Zea mays
  Clone ID: MRT4577_125294C.1.pep
MHVIDLSIHASIEMYIYPGSRSHRDHRTRASSLLPMAMTRALAMVAMLATAALFFMSARAQQCGMQAGGALCPDCLCCSQWGYCGSTPDYCTGGCQSQCIGSGCGGGGGGTPATPPSGPVSEIISESLFNEMLLHRNDVACPATGFYTYDAFIAAANAFPGFGTTGGADTQKRELAAFLAQTSHETTGGWDTAPDGPYTWAYCFKEEVGGVWGPDYCQPSPQWPCADGQKYYGRGPIQLSWNYNYGPAGEAIGQDLLGNPGLVAADSTVSFETALWYWMTPQPPKPSCHDVITGQWAPSPDDVAAGRLPGYGVLTNIINGGLECGHGADARVASRIGFYKRYCDMFGLSYGDNLDCYDQSPFGNTILSTTNNTTSYHVDA

SEQ ID NO: 212383 - protein, 80 aa, Zea mays
  Clone ID: MRT4577_125295C.1.pep
QSFLFHSCGDSAEHLLENYFIIYSGFAPLLLGLFPHVLLKINMAMNSKKKKKGGRRLLASSPRDLFRDGYLKGYRFPLRW

SEQ ID NO: 212384 - protein, 139 aa, Zea mays
  unsure (1)..(139): unsure at all Xaa locations
  Clone ID: MRT4577_125296C.1.pep
MLVRSSARNSWPSTELRIWPPPSLSPSHSFTLVLPSSARRPEYDRATDLRRSRYAIWHVKTEGNVGHLPQCAEAGIKALLSLKDGAPDDXHFXVEDXVKVPTALTRNKVKKEHASVPFDDQCSILEKEAVNVSLQNLKS

SEQ ID NO: 212385 - protein, 131 aa, Zea mays
  Clone ID: MRT4577_125297C.1.pep
TTKHKLHIRPEYVDYRQGLYTECGRSPAAPYRRSPRSRALFQSAHLLVPDRGLKWCHHVLPQLRARVLCMKSTVRAAATASCSMHVHHGLLASYQLFRTLIPLIRIDVSVGHYICATIRVHYMQYMSTCTR

SEQ ID NO: 212386 - protein, 73 aa, Zea mays
  Clone ID: MRT4577_125298C.1.pep
YDLLIPLNYMAETHILTWQALHLLLDYGWNHVWPPLCECLVANHSTKHSDNVVAATPVRFEPGSNVIGERALP

SEQ ID NO: 212387 - protein, 79 aa, Zea mays
  Clone ID: MRT4577_125299C.1.pep
HDSVCPAVASRCPGMSDGVHQRAGSALSTHAPADESENDNDLDLLEIGLSRATRQLTSAALRTSLGLEKNQLVNHRVVL

SEQ ID NO: 212388 - protein, 52 aa, Zea mays
  unsure (1)..(52): unsure at all Xaa locations
  Clone ID: MRT4577_12529C.1.pep
FFFIFFFLQTAFWPYILFPSPLSMRSYQVHWLTLATHGRWXDTAVTHLPLNE

SEQ ID NO: 212389 - protein, 83 aa, Zea mays
  unsure (1)..(83): unsure at all Xaa locations
  Clone ID: MRT4577_1252C.1.pep
VASLEPLILAPFFMIFSMECFPLLPAAVLPXLPPPKDVPVGXPXSPFCSALCPCLVCXRRGLPWRAGLVPGAGAAGASTADGA

SEQ ID NO: 212390 - protein, 50 aa, Zea mays
  Clone ID: MRT4577_125300C.1.pep
ARLREIRSYLDLVIEGKLPLNHEILYHLQVSPSLAICQVLLSWNELCSKS

SEQ ID NO: 212391 - protein, 61 aa, Zea mays
  Clone ID: MRT4577_125301C.1.pep
PHVHPHVRPLFRKKTHSMGWSSFPPLLEHNTQQFYQQESSKLLNQIQILQNTNMHFVFDSI

SEQ ID NO: 212392 - protein, 99 aa, Zea mays
  unsure (1)..(99): unsure at all Xaa locations
  Clone ID: MRT4577_125302C.1.pep
MKLDISXLETNFANLTEYYCDDTYFSAQASDVPSMVLPICDYFNGLQTDTKDMEKNKKGTTTLAFIFNKGIIVTSDSKATMDGYISSQTVKKIIEINPY

SEQ ID NO: 212393 - protein, 93 aa, Zea mays
  Clone ID: MRT4577_125303C.1.pep
LQTIFSISISKHLFSFSKEENKGSKKCRKGVRSLLNLRVSDCSRPWTLSNFSQKVFLRKLSYFASFIDKACGSWSTEIFNNPVSQTLYLGGPN

SEQ ID NO: 212394 - protein, 79 aa, Zea mays
  unsure (1)..(79): unsure at all Xaa locations
  Clone ID: MRT4577_125304C.1.pep
KPHRTPVNPSGHSTDRVGQQRRVDRAQRQSSVNSRSSLSITSLGGIHLSLTRSLGSAAYLXAAAFVRIDGDCRRVDAHV

SEQ ID NO: 212395 - protein, 192 aa, Zea mays
  Clone ID: MRT4577_125305C.1.pep
MRGIRESLRTVQGSLLRLEAVVLLSALILAALVLYGSANRRSSDKLLRGAMWMAYSMSYVVVSYAVGIIQDGPFRGETFVLWAAALLLIQASAYSAPVHSRRDVDQRKKLLLQHVLQTGLVLWLIVNATGHNASYRAAIWAFWALNVLKTAAKIAEMIEVSRPDLSVRVVAEYMAEYMAADVQQQPAADPAT

SEQ ID NO: 212396 - protein, 90 aa, Zea mays
  unsure (1)..(90): unsure at all Xaa locations
  Clone ID: MRT4577_125306C.1.pep
MLQDIADIRYFKRRVNQAKQVTDFXFRHGRLLNAMREKTGGRDLLRLTVTRFATLFLTLQSLYKHKDALCQLLLCEDWTRSKLVATDAGK

SEQ ID NO: 212397 - protein, 91 aa, Zea mays
  unsure (1)..(91): unsure at all Xaa locations
  Clone ID: MRT4577_125307C.1.pep
AVFMHDDIAHNPXNPRPGVNINHPQGGDVHAGGPKDYTGREGNVDNFFADPSGNKTALQGGSGKVCGNGPHDHNIVFYSDHGVLASWNATY

SEQ ID NO: 212398 - protein, 79 aa, Zea mays
  unsure (1)..(79): unsure at all Xaa locations
  Clone ID: MRT4577_125308C.1.pep
MLLLAFFVAHARTTGGLTXEDSNARNMTMTKTRSLGDILVSQIDDGPCYIDYGLNEYVCIKTNKCYKIYMLFVASSQRS

SEQ ID NO: 212399 - protein, 63 aa, Zea mays
  Clone ID: MRT4577_125309C.1.pep
VADYYENWPPAGQYSVARVCSCLRSSNWSPSPLRMHDTHAVVSAILLYARGKERTRGSANLLL

SEQ ID NO: 212400 - protein, 91 aa, Zea mays
  Clone ID: MRT4577_12530C.1.pep
DLSFYFRSIYHRTVMHFDFLLVFFTLQIGISRLDEANQISDTMDNQSCGAKVAGFRTFNLKLDRCAKTRVIVNLTKNQEPHTHDYLPPRAE

SEQ ID NO: 212401 - protein, 1092 aa, Zea mays
  Clone ID: MRT4577_125310C.1.pep
MESPAKEEAGGELAMEIESSVTAEDWRRALSRVVPSVVVLRTTAPRAFDTEVAGASYATGFVVDKSRGIILTNRHVVKPGPVVAEAMFVNREEIPVYPLYRDPVHDFGFFRYDPGAIKFLKYDEIPLAPEAASVGLEIRVVGNDSGEKVSILAGTLARLDREAPYYKKDGYNDFNTFYMQAASGTKGGSSGSPVVDCQGRAVALNAGSKSSSASAFFLPLERVVRALDLIRDSWDAFGTKTESVYIPRGTLQATFQHKGFEETRRLGLRNETEQMVRVVSPEGETGMLVVDSVVPEGPAHKHLEPGDVLVRINEEVVTQFLRLETLLDDSVGKEIDLQIERGGVPLTVNLQVEDLHSITPNHFLEVSGAVIHPLSYQQARNFRFKCGLVYVAEAGYMLSRASVPRHAIIKKLAGEDIAHLDDLIAVLSKLSRGTRVPLEYVKYTDRHRNKSVLVTIDQHEWYASPQLYTRNDATGLWTGKPAIPPESPFLALAHHASHVDTNSNAVSSLSESSPMDLKCQYDSENLADGCIKMQTDDEIVVDGSHSNEDSVIEKKRRRVVEEIAADGTLPSYGDLEDVKGGSLRHPSNADGSELARTISSNASLAEQVIEPALVMFEVHVPPVCMLDGVHSQHFFGTGVIIYHSEHLGLVAVDRNTVAVSISDIMLSFAAYPIEIPGEVVFLHPVHNFVLVAYDPSALGAGASVVRAAKLLSEPALRRGDSVYLVGLSRSLQATSRKSIITNPCTAVNIGSADCPRYRAINMEVIELDTDFGSTFSGILTDEQGRVQALWASFSTQLKYGCSSSEDHQFVRGIPIYAISQVLEKIITGTEGPFRLINGIKRAMPFVRLLEVELYPTLLSKARSYGLSDNWVQALAKKDPVRRQVLRVKGCLAGSKAENLLEQGDMILAINKEPITCFLDIEKTCQELDQSIGSDGVLNMTIFRQGKEIDLVVGTDVRDGNGTTRMVNWCGCIIQDPHSAVRALGFLPEEGHGVYVARWCHGSPVHRYGLYALQWIIEINGQPTTDLETFIKVVKGLEDGEFVRVRTVHLNGKPRVLTLKQDLHYWPTWELSFEPETATWRRKIIKALQSARA

SEQ ID NO: 212402 - protein, 96 aa, Zea mays
  unsure (1)..(96): unsure at all Xaa locations
  Clone ID: MRT4577_125311C.1.pep
RPPPPRPYRSRSPVRSLLLWSLVASXRLLWRPRAPGLLCLVGLLPPEAHPRAGASPRSCRLQREFVATGSLCPRRAWSPPCASGPVVWQLEWXKVI

SEQ ID NO: 212403 - protein, 76 aa, Zea mays
  Clone ID: MRT4577_125312C.1.pep
VTSLHPISKNFFPLIGGGLKKEQKSPSPCFKPMGQIFFFVKFFFKQNPTRYWFLIFFPPFFIFGKVVVQNNKENFS

SEQ ID NO: 212404 - protein, 103 aa, Zea mays
  unsure (1)..(103): unsure at all Xaa locations
  Clone ID: MRT4577_125313C.1.pep
MYRSACVVMAWNVLRFCTALXRGLGSIMILLVLAIVGVTXYYAVVLCNYSAVLITGGGTTLVALAVMLCLHFLLAMLLWSYSSVAFTDPGSVPPDRNLDSDVE

SEQ ID NO: 212405 - protein, 75 aa, Zea mays
  Clone ID: MRT4577_125314C.1.pep
QFHLHIQPKGATRDARVKILGVILFPITRPGGEPNALIVQFLEDSRFLFAEGSAMEGARWAQRGLPWGLDRTGIY

SEQ ID NO: 212406 - protein, 67 aa, Zea mays
  Clone ID: MRT4577_125315C.1.pep
KGVGTLKKHTQKIIGRGGALTRNYFPPCLPLGGNQRGPNPVRTPQKKKRSPPLKINPRAPGTQKKPP

SEQ ID NO: 212407 - protein, 124 aa, Zea mays
  unsure (1)..(124): unsure at all Xaa locations
  Clone ID: MRT4577_125316C.1.pep
MGDRENVLYGPCLLRAVAXSWWESYLATHADPEAITXEEFRENFRQYHVLEGLMIVKKEEFLALKHRPMSISEYRDRFLXLSRYAPEDVNTDAKRQYRFLIGLVDPLHYQLMNHTPRTLRCYHC

SEQ ID NO: 212408 - protein, 44 aa, Zea mays
  Clone ID: MRT4577_125317C.1.pep
GSVDGDIRKRVYNKSVFHSKLLRSCIITEPARTTAAWASSADLC

SEQ ID NO: 212409 - protein, 284 aa, Zea mays
  unsure (1)..(284): unsure at all Xaa locations
  Clone ID: MRT4577_125318C.1.pep
MSFGGSSSLASGAKRPFEYGRTHVVRPKGTHKATIVWLHGLGDNGASWSQLLETLPLPNIKWICPTAPSRPVSVFGGFPSTAWFDVADLSEDAPDDIEGIDASAAHVANLLSTEPADIKLGVGGFSMGAATALYSATCFAHGKYGNGKPFPVNLSLAVGLSGWLPCARTLKNRIEASPECAQKASSIPLLLCHGKADDVVAYKHGERSAGALKANGFSNVLFKAYNRXISHLSNYASLELQIFYISFLMMIALLLXLGHYTVPEEMDEVCKWITATRGLGTKSS

SEQ ID NO: 212410 - protein, 178 aa, Zea mays
  unsure (1)..(178): unsure at all Xaa locations
  Clone ID: MRT4577_125319C.1.pep
MGSSTENRSRMGSIKPMGIQLIECVRGGPLSFRSSQALVLVLTFLSYASYHATRKTTSIVKSVLDPKTTNLGLLHWPSHMYLQELKGAANNTALESGWAPFNGEDGTQLLGEIDLAFXLGVYAIGMFFAXHLGDPVDLRILLTIGMVXXTGLVTXXFGXGYWAHXHSFYYXFLGRQMI

SEQ ID NO: 212411 - protein, 88 aa, Zea mays
  Clone ID: MRT4577_12531C.1.pep
SAAHVLFQYIWPNNAHVFMSHGSLFFLCHVLASSLALALNVCKSSRTWLSTVSASVSMLCPHPIQACPVCPKKKGRARRLRARAPGIT

SEQ ID NO: 212412 - protein, 255 aa, Zea mays
  Clone ID: MRT4577_125320C.1.pep
MSYGGSSSLAPGAKRPFEYGRTHVVRPKGTHKATIVWLHGLGDNGTSWSQLLETLPLPNIKWICPTAPSRPVSLFGGFPCTAWFDVADLSEDAPDDTEGMDASAAHVANLLSTEPADIKLGVGGFSMGAATALYSATCFAHGKYGNGNPYPVNLSLAVGLSGWLPCARTLKNRIEASPEAAQRASTIPLLLCHGKADDVVLYKHGQRSTDALKANGFSNVLFKSYNSLGHYTVPEEMDEVCKWLTANLGLGTSSS

SEQ ID NO: 212413 - protein, 257 aa, Zea mays
  unsure (1)..(257): unsure at all Xaa locations
  Clone ID: MRT4577_125321C.1.pep
MSFGGSSSLASGAKRPFEYGRTHVVRPKGTHKATIVWLHGLGDNGASWSQLLETLPLPNIKWICPTAPSRPVSVFGGXFPFTAWVDVADLSEDAPDDIEGIDASAAHVANLLSTEPADIKLGVGGFSMGAATALYSATCFAHGKYGNGKPFPVNLSLAVGLSGWLPCARTLKNRIEASPECSQKASSIPLLLCHGKADDVVAYKHGXXRSTDALKANGFSNVLFKSYNSLGHYTVPEEMDEVCKWITANLGLGTKSS

SEQ ID NO: 212414 - protein, 78 aa, Zea mays
  Clone ID: MRT4577_125322C.1.pep
LDLDELRLGPHENARHGTTRERRHLKVITTRRCDLTRASYSRTRILSVCRSSEIVATHCPRSKSRVLITKYNFMRNLN

SEQ ID NO: 212415 - protein, 111 aa, Zea mays
  Clone ID: MRT4577_125323C.1.pep
NFGYYFYYLYFFMGVFLMVFGDCPKKGEKKMGPPHRPNPSLPLPGQKKNKKKKQKRKPKKKKKEKGKGDTQGEKPQKNKKRKNHPRRTGPQTKRGSRAPGTKSTKGVERQG

SEQ ID NO: 212416 - protein, 155 aa, Zea mays
  Clone ID: MRT4577_125325C.1.pep
PSRVNRTITHIKYNREGDLLFSVSKDHVVNAWFSHNGERLGTYEGHIGAVWTVDVNSTTTLLVSGSADNTAKLWDVSNGKCLKSWEFNTAVRRVQFSEDDKMILLVTEPRMGFLATLQIFNVENGATETVSSEPLTVIHPERPKIIVAAWGALIK

SEQ ID NO: 212417 - protein, 86 aa, Zea mays
  Clone ID: MRT4577_125326C.1.pep
FTPPAAENHGSGYGAPPSLPIGSHDDGCPLFGGCRWSHDGPARHTLGPTQLLNGSNGGDDQTIGLSLDRVMGSGFRSKTSYLFARI

SEQ ID NO: 212418 - protein, 70 aa, Zea mays
  Clone ID: MRT4577_125328C.1.pep
FQLDGPPPPFFHRLLKSVLECVKGPLQTFFSASCSIVFFACYLSPLDKVFVSDLSRFFAPPARKLAAGKT

SEQ ID NO: 212419 - protein, 48 aa, Zea mays
  Clone ID: MRT4577_125329C.1.pep
KKKKKKKKKKKKKKKKKKKKKKKKTKNKKKRGSVLGEPNFLPPGLGPT

SEQ ID NO: 212420 - protein, 98 aa, Zea mays
  Clone ID: MRT4577_12532C.1.pep
KECDRRRWLLVFCLLWICLCLMALGGRMGRLVGLSVEWIPSQCVEEIPQMKQQQPHSKGLFVQEYRHRRRCGKEATRAQLSPRGIVRRKEGSLGRTRG

SEQ ID NO: 212421 - protein, 38 aa, Zea mays
  Clone ID: MRT4577_125330C.1.pep
IQGKKIESGYIPVHTCAEQKNYIYTPERSTAWSEMNQE

SEQ ID NO: 212422 - protein, 105 aa, Zea mays
  unsure (1)..(105): unsure at all Xaa locations
  Clone ID: MRT4577_125331C.1.pep
RNHTRGSKNSLRCCHKYVGRSYDNRLISGLSLSASALSAAAQSGEKVRMTIVGLGAGRLPMFLRGXLPIVDIEVDELDPLVDELADKYCCFSMDELMKVHWRDGI

SEQ ID NO: 212423 - protein, 93 aa, Zea mays
  Clone ID: MRT4577_125332C.1.pep
GCLVYSTVLLSIPGLCPLDIRSTPPVVTTKNISRPWQMLSVGVNCPQLRTTGLARPALSSTVATRYMWLNLDLSDLRFKAQFLSHISHSSVQT

SEQ ID NO: 212424 - protein, 105 aa, Zea mays
  unsure (1)..(105): unsure at all Xaa locations
  Clone ID: MRT4577_125333C.1.pep
QEPGNPTKSAKDMGRDLRVHLKNTRETVLALRKRSLTKAKRYLEEAIADKQAIXLRRYCGXGHGMTANGTGLHTNGQGRCAEKTTRTHTHTHRRLLQVTRDDTGL

SEQ ID NO: 212425 - protein, 213 aa, Zea mays
  Clone ID: MRT4577_125334C.1.pep
MYSDQISTGRKRSIHDRLDGDLPAGTGAGGRVRHTVSKRQRQIDEKWKHDLYREDDEPASKSTDPKDLRLKLQRRSFQQDFTSTRSSGVRDLREKLSGIMNPQPSNADPPKPKPKPVSEVVNISRRQIADEMHARQNKKPPKQTSSKKTSQPKAESPLDSFLSSLGLEKYSITFQAEEVDMAALRHMTDSDLKALGIPMGPRKKIILALESRA

SEQ ID NO: 212426 - protein, 64 aa, Zea mays
  unsure (1)..(64): unsure at all Xaa locations
  Clone ID: MRT4577_125335C.1.pep
RSSHADCXVYMEXRETLLGNAHPRFFLLLRTIGFETFHFMQQTGLLESFRKRMIPMMNKHLCGK

SEQ ID NO: 212427 - protein, 212 aa, Zea mays
  Clone ID: MRT4577_125336C.1.pep
MYSDQISTGRKRSIHDRLDGDLPAGTGAGGRVRHTVSKRQRQIDEKWKHDLYREDDEPASKSIDPKDLRLKLQRRSSQQSFTSTRRSGVRDLREKLSGIMHPQPSNADPKPKPKPVSEVVNISRRQTADEMPARQSKRAPKQTSLKKTSQPKAESPLGSFLSSLGLEKYSITFQAEEVDMAALRHMTESDLKALGIPMGPRKKIILALEPRA

SEQ ID NO: 212428 - protein, 87 aa, Zea mays
  Clone ID: MRT4577_125337C.1.pep
FFGNAELEFRVQFLSHVLGLEDRPTQKTIYYNSYMIISESLFIENVEYGIPQEHQSILLGLVDWPDGKTYDSNSHMLIPAFLAVENV

SEQ ID NO: 212429 - protein, 566 aa, Zea mays
  Clone ID: MRT4577_125338C.1.pep
MIDDLDKKAEFTCLSPNELESKSFANDRLANILREEEVRIFQRAKVNHLLEGDDNTKYFHLVANGKHRRQRIYSLEDVNGGCITDEEELKNHITSLNFGVITLIPKKDNVNKIQDFRPICLLNVSFKIITKVLTNRIGLVADKIVSPSQTAFMPGRNILEGVIILHESIHELQRKKLDGVILKLDFEKAYDKVKWEFLQQALRMKGFSPSWCAWIHSIVSGGHVRVKVNDGRGPFFSTFKGLRQGDPLSPILFNIVVDMLAILFARAKEVNLFKGIVPHLIPEGLSILQYADDTVVFLDHNLGHARNVKLLLTLFEQMSGLKINFHKSELFCYGLAKEYEVQYSHLFGCGIGAMPFKYLGIPMTHRRLRNSDWQGVIDRFERRLSTWKAKFLSSGGRLVLLNSVLSSLPIFMLSFFEIPAGILKKLDAIRSRFFWQGGVSKRKYRLAKWNVVCQPKAIGGLGVSNLAVKNISLLSKWLFKLFNEDGMWQQLLKNKHLRVKSLTQISKRPGDSHFWSGHFQRYLLVQILETSTEGGITSTNPRCLSSVGSGGDESLCKSWMALKCKN

SEQ ID NO: 212430 - protein, 254 aa, Zea mays
  unsure (1)..(254): unsure at all Xaa locations
  Clone ID: MRT4577_125339C.1.pep
MASVASEMAQSTSTTQGSTRQLTTTSGDFCTSNTPDVRKHLGTYGLHPPAVESFDTQAQRCLRLLAMKSTPIEKFQYLTHLKATNVHLFYRLLSQNIKELTPLIYTPTVGEACVRWHEIYTQPEGMYLSFSDRGNLRQILDNWPHEVEITVLTDGSRILGLGDLGVNGMGIPVGKLSLYTACAGIRPEATLPLTIDLXTNNKALREDPLYMGSRVPKVTAEXGEEFLDELMAALTDXWPSIVIQFEDFKTPFPP

SEQ ID NO: 212431 - protein, 41 aa, Zea mays
  Clone ID: MRT4577_12533C.1.pep
GPLCPGKSLRLGHTNLWPGFSLDQWVCSPPVPVNRLSSVSR

SEQ ID NO: 212432 - protein, 90 aa, Zea mays
  Clone ID: MRT4577_125340C.1.pep
KKAFKFGNFSSQTGASDSDRSHRFFPRKVRGRTGRMAFLLMEHAGDVWQHEAPLQQRFTAPLMPLVLLGSFSGRSLTYRGRRSTSQFFCP

SEQ ID NO: 212433 - protein, 110 aa, Zea mays
  unsure (1)..(110): unsure at all Xaa locations
  Clone ID: MRT4577_125342C.1.pep
MKMVMGVVVCLALSAASASAMQMPCPCAGLQGLYGAGACLTTMMGACGLYPYPEYLRQSQCTPLAAAPYYPVCGQTSAMYQAASGNKCCQQQMRDLDVQSXVCNSLQMMN

SEQ ID NO: 212434 - protein, 111 aa, Zea mays
  unsure (1)..(111): unsure at all Xaa locations
  Clone ID: MRT4577_125343C.1.pep
GLGPGLFWPPAGGIPFGTDKKKGFSQNGEYEGDPAHVSFGAIKADPRGLYRKKGVDFGVKDPKGAKARDFRKKTREKLEFIVQKRGVHGFCLTKKPPTHETIDLRXHVGHF

SEQ ID NO: 212435 - protein, 69 aa, Zea mays
  unsure (1)..(69): unsure at all Xaa locations
  Clone ID: MRT4577_125344C.1.pep
HGSVKIKFPTKNRLLDEFDSKIKELESLCNPIFAKMYQGAGPPMGGXAGMDKDPPAGNGGPGPKIEEVD

SEQ ID NO: 212436 - protein, 66 aa, Zea mays
  Clone ID: MRT4577_125345C.1.pep
RRRFYFKPQIFKNHRRWTIIMMHLSDITAITNYSKKYAPASDLSLCFRHRKKHTPCFFFISCSMIT

SEQ ID NO: 212437 - protein, 84 aa, Zea mays
  Clone ID: MRT4577_125346C.1.pep
PKKKKKRLAPPTPGCRSVYPPLHKMPPMFSSCHSPVARNHFDGRHRFPFAYTAAKLLRKNPIATPRAPPPPPRPLPKNFGPVGS

SEQ ID NO: 212438 - protein, 82 aa, Zea mays
  unsure (1)..(82): unsure at all Xaa locations
  Clone ID: MRT4577_125347C.1.pep
VLRXTFASKVTPXXLPXXSXKKNXHTNTHHQTYXSIHPXPPYXKSHXFSXXISSSSSXSTSFFIFKLXXISSIIXPFLPSPT

SEQ ID NO: 212439 - protein, 59 aa, Zea mays
  Clone ID: MRT4577_125348C.1.pep
FCKYYIKCLVTYQSDTMLFQAMADYGIWHSRIPAHYTTIVGNSPITWGKLTNHNRLHQC

SEQ ID NO: 212440 - protein, 85 aa, Zea mays
  unsure (1)..(85): unsure at all Xaa locations
  Clone ID: MRT4577_125349C.1.pep
LLLPPGGGVGCNCGSSCGCGSCCXCGXRYPGLGETSTAAQATGVXLAVSPXXKXXALWXGALFYSXKAAHGCGCGGNCECDPCNC

SEQ ID NO: 212441 - protein, 71 aa, Zea mays
  Clone ID: MRT4577_12534C.1.pep
MRFAGWYLKIAAVGASIGAAMELFMIHTGFYEKVTVLESEKRAWESSPEAQAMREALNPWHKHDEQEQQKK

SEQ ID NO: 212442 - protein, 99 aa, Zea mays
  Clone ID: MRT4577_125350C.1.pep
LWPPFFLRLAPLFSPLVVPLWPPRFYCWFAPSLAPAGFPLYALGLVCSVFLSASSFFPLAPFLALFPASCGPPPFGPGCSPCWSPSVLRGWPPASAQAS

SEQ ID NO: 212443 - protein, 84 aa, Zea mays
  Clone ID: MRT4577_125351C.1.pep
SGYIERAELADALADEAGHTDEAALDNVMQEVDTNKDGRISFEEFVAMMKAGTDWRKASRQYSRERFKTLSNSLIKDGSLRMAR

SEQ ID NO: 212444 - protein, 88 aa, Zea mays
  Clone ID: MRT4577_125352C.1.pep
TAELKKREKEKLTGFYEGHSTIIWSEMGWCSTPNNRWGINKATQDEFFKTRVYFYWRRCCCFFPNPKGKIFTGVSSLCALFPFFRTRG

SEQ ID NO: 212445 - protein, 65 aa, Zea mays
  Clone ID: MRT4577_125353C.1.pep
EQHPLSQQINLFTLINPSLYITFNKTMFNSKKKNYEFKKKIQQQLTRGKRLLKVTNTLINKKNYP

SEQ ID NO: 212446 - protein, 1213 aa, Zea mays
  Clone ID: MRT4577_125354C.1.pep
MGMAFSNQIVEQIRNCWVQIAEPGMRSYPTWMGHADEIVSAGHAGCRLQFRMRARADGNRVKKICQSAREGAYPYQREGRRRRVERVAPSRAEGRAVARGRGTCGSRCRPREKNVRPRAWVSFQRQLVGPQVVGPQSCLDAGRGTYLRQNQFSARGELDSMFNDHRASVYGGAYLMTDNVRGNFYRQMARIRCIARKSVIPFLPSRLAKRPLHRTVPGQSSHLERLHRHLHEEQERRRQEQDQQDSSPLPHQEVESGRQPWHASQPEMPPTPPQGIPAAGGDPDKDGNDDASGSSNHNAELSEDGVADGLDLKYYPHRSTGNVGGVIVSPIGEGNPRLNNMVNLVVVLNSELDHALDKLCKMSENRHRGARHAQPEQQAPQEEAAQEEQLPPPPLMTVQQMFMMQTQAVQAIGQTLAVAQQCNDCKKVLYGPHLLRGAAQSWWESYLATHADPEAIIWEEFRDNFHRYHVPEGQMIYRDKFLQLSRYALEDVNTDAKRQYRFLRGLVDPLHYQLMNHTFPTFQHLIDRAIMTERKCREMEDRKRKIGGSQVRSSSRPRYSGNPPQHFKQGRKSIPASEQPGSSPSCPSNQTAPAQGGGHACFHCREQGHWANHCPKKAAQQPSPNAPTRQNAAQQGGNNHGQAYNHGKVNHLEVEAIQDAQDVAVALVLFVEKKDGTKRMCIDYKSLNEFTVKNKYPLPRIEDLFDQLRGANISKTTFITKYGLYEFMVMSFGLTNAPAYFMYLMNNVFMDYLDQFVVVFIDDILVYYQNEQEHEEHFKKVLQRLRDCQLYTKLSKCEFWISEVLFLGHIINRDGLAVDPKKVVAILDWKAPKDVRGIKSFIGMAGYYRCVIEGFSKIARPMVDLLAKKVEFKWTPACQESFEKLKQKLTTAPILVLPDVHKSFSVYCDASYTRLGCVLMQEGKVVAYSSRQLKVHEKNYPTHDLELAAVVHALKTWRHYLYGQKCDIYTDHKSLKYIFTPLELNMRKSQVNMLVAHPMPFELAKEFNMLSLGFLNNTQGVTVELEPTLEQDIRKGQKDNEKINEIRQLIIDGKGQDFREDTEGVVWFKDRLYVPDIKSIQELILKEGHEIAYSIHPGSEKMYQDLKKRFWWYGMKREIAEYVARCDSCQRIKAEHQRPAVSPIRGTKRFGVRGKLAPRYIGPYQIQARRREVAHQLSLPENLSAVHDVFHVSQLKKCLRVPEEQLPTEDLEL

SEQ ID NO: 212447 - protein, 56 aa, Zea mays
  Clone ID: MRT4577_125355C.1.pep
TCTSPGECVRLGLIYFYITLISFIAQEKRKLHVCWTVGPTQQRFNYYYRYEAICSA

SEQ ID NO: 212448 - protein, 75 aa, Zea mays
  unsure (1)..(75): unsure at all Xaa locations
  Clone ID: MRT4577_125356C.1.pep
LRHGGPGEHKRNPSEGSRLRSSAPLPMRRNATCDDFMAADSFRTHAHSTSGTTRRARGEAKLXFFINKIGRNGRN

SEQ ID NO: 212449 - protein, 47 aa, Zea mays
  Clone ID: MRT4577_125357C.1.pep
SYQILFNIHPFKYGRNRMERLIEILRFVFGTWTRDQAYVYWFSRSVG

SEQ ID NO: 212450 - protein, 81 aa, Zea mays
  Clone ID: MRT4577_125358C.1.pep
DMEGINVLKGLPQNSIFMSILGGTIIFQFILVQFLGDFANTTPLTHLQWLVSILFGLLGMPIAAAIKLIPVEPREDDGRIP

SEQ ID NO: 212451 - protein, 84 aa, Zea mays
  Clone ID: MRT4577_125359C.1.pep
ARKNPDGRPQDPSQAGGKNRHSGPTPRSPGGHPQPPRQPGAARTAGTAARTNRGGRAGASQQPGKPRARPRERQDRPQTGRPAP

SEQ ID NO: 212452 - protein, 71 aa, Zea mays
  unsure (1)..(71): unsure at all Xaa locations
  Clone ID: MRT4577_12535C.1.pep
MRFAGWXYLKIAAVGASIGAAMELFMIHTGFYEKVTVLESEKRAWESSPEAQAMREALNPWRKHDEQDQQK

SEQ ID NO: 212453 - protein, 230 aa, Zea mays
  unsure (1)..(230): unsure at all Xaa locations
  Clone ID: MRT4577_125360C.1.pep
MVSMTMITHPPRTFSGKXGRLAAXVAFREDMATIVTXNDHCITTDYVSYMVEHDRPHAECEHSDXTXQDLKTSIPEDTTVIGVVXPEKITRREDAADEGEQLTVGYAEKDQVAVHLNARAKKGDISAPSRDARMFRRCFNEEKYTTSVNIVSSASXEQPCXGPVAKGICEHFXIVEAPNETCYEITGHKKTVEGPSPKDCRGGRAASFXNIIPSXTGAANAVXGKVLPDL

SEQ ID NO: 212454 - protein, 41 aa, Zea mays
  Clone ID: MRT4577_125361C.1.pep
DMNDVMPHAYQELVDNCRILASHSKEMHDIQSTDHESRLRM

SEQ ID NO: 212455 - protein, 359 aa, Zea mays
  unsure (1)..(359): unsure at all Xaa locations
  Clone ID: MRT4577_125362C.1.pep
RPPVAPAAHTGRFSSTCRPRQATGGFAERNLVGRGGFGAVYRGVLADGSVVAVKKMLDPDMEGGDEEFANEVEIISHLRHRNLVPLRGCCITDEDVEEGKQRFLVYDFMPNGALEDFIFRDREAATKLPPLAWAQRRSIIMDVARGLEYLHYGVKPAIYHRHXSRTNILLDSEMRARVADFGLARRSREGQSHLTTRVAGTHGYLAPEYALYGQLTEKSDVYSFGVLLLEIMSGRRVLDMTAPAGPVLITDWAWTLVKAGQAREVLDEALSTAESPRSGVMERFVLVGILCAHVMVALRPTIGDAVRMLEGDMDVPELPDRPLPYGHNAMFSEAGSTFSISPAFSGPLAPFIDNGDMLR

SEQ ID NO: 212456 - protein, 70 aa, Zea mays
  Clone ID: MRT4577_125363C.1.pep
PTRCPRRTSTSPTTPVRACRLTAAARSLLGEPPSFVSSCTRSYSVVIWFLVIGRIWEGERLDSLIDWRVT

SEQ ID NO: 212457 - protein, 33 aa, Zea mays
  Clone ID: MRT4577_125364C.1.pep
WAINICKLQTEYANNLIVQNLAYSVCNLHMSIA

SEQ ID NO: 212458 - protein, 84 aa, Zea mays
  Clone ID: MRT4577_125365C.1.pep
RKKRMPSQREQYGGTVHLFIGTGYNPYKITYMPFTFGDNSIAIYRGLNGLFIFKSVPFSANMPKLSCFTASALPTFVSFEVLPL

SEQ ID NO: 212459 - protein, 51 aa, Zea mays
  Clone ID: MRT4577_125366C.1.pep
ARGQSPGHGIRCRLASAPPAALRKNASWCHSSYTHATTIVATVCTCTGGRS

SEQ ID NO: 212460 - protein, 185 aa, Zea mays
  Clone ID: MRT4577_125367C.1.pep
KSSRAPRIFFLPASSAEAPSPSSLTVAPAPPVLPRIPALMDPYGALLAPCAAVPPLSSLHFSFTRPGSPWSFSRAAPSAPYSALVSARIPALMDASSGAPLMRALQSSPRARLCRSYGVRPALLLFSVACVPSVARMLPGPQHQLPVLLARVCAPLLPSSDPPRCALSSSLLSVRAPLVDLSAHV

SEQ ID NO: 212461 - protein, 158 aa, Zea mays
  Clone ID: MRT4577_125368C.1.pep
VVCISLRHFLPIRFSSTQVELALLCLPVLVGHIPGGRPRPCPSHSFPFGPAAASTQPLLWHTVLVQPLSTGVCVISLVLDEMTMRSFVLCAAPPATPSTPGEVLFSPCRFSARRQLLLCVLMRELTGKEARSVRRLPSVRWKVRTGNLAFLADLRVGL

SEQ ID NO: 212462 - protein, 112 aa, Zea mays
  unsure (1)..(112): unsure at all Xaa locations
  Clone ID: MRT4577_125369C.1.pep
MLSVFNGHMVEVPAELVAAGILTPSLNTKASQIVGRFLAASEPVVYEQLGDXGHLDYSHTNQALLLPRSVADKDEVFCLFEGVLDNLGRLSQQHGLSSKGANEVLLVIDGYK

SEQ ID NO: 212463 - protein, 58 aa, Zea mays
  Clone ID: MRT4577_12536C.1.pep
TSVNNKVDACSCRCSLLVKMAVPMLKYLRVVHSQQRIWLEWFIANVVVAKSRAALETA

SEQ ID NO: 212464 - protein, 77 aa, Zea mays
  Clone ID: MRT4577_125370C.1.pep
RSRHLGGAEPCPSWNLDLAPPPPVDKWPVAGLRRSPGAERKSPERSMGRRPVDRRWRHFQIMASGLACRREDEPPVW

SEQ ID NO: 212465 - protein, 153 aa, Zea mays
  unsure (1)..(153): unsure at all Xaa locations
  Clone ID: MRT4577_125371C.1.pep
PFVWWCAQQKQIMYTSLAPHGPLKLYHFIIMVAVVLAFLSQLPSFHSLRHINFVSLLLSLGYTVLVAAACVRAGLSKNSPAKDYSLSSSKSEQSFDAFLSISILASVFGNGILPEIQATLAPPAAGKMMKALVLCYSVIVFTFFLSSXTGYWA

SEQ ID NO: 212466 - protein, 108 aa, Zea mays
  Clone ID: MRT4577_125372C.1.pep
ADKAALVPSLLPSVDKATPVSQKSTMGNKATDAQPKCPAVDKATAHDSKSPADDNATPARYKSPAVDKATLVSTQSTPADRATSDSAQSAAVDTAPSARPNLQPLIKQ

SEQ ID NO: 212467 - protein, 126 aa, Zea mays
  unsure (1)..(126): unsure at all Xaa locations
  Clone ID: MRT4577_125373C.1.pep
MDHKRGGRAPVPAKKKTDKVTNPLFEKRPKQFGIGGALPAKKDLHRFGKWPKVVRIQRQRRILKQRHKVPPGLNQLTRTLDKNLDTNXLFKMLLKYPTENKAVKKERLPKRAQAVNEGKTVELKKP

SEQ ID NO: 212468 - protein, 68 aa, Zea mays
  Clone ID: MRT4577_125374C.1.pep
RRAPALSIHGAQQRWLPTQYVTIRTEAHDIQRSLALQDDNRNMEICPASPVWKDFIVYTYAVLRVDDD

SEQ ID NO: 212469 - protein, 81 aa, Zea mays
  Clone ID: MRT4577_125375C.1.pep
RLIGKGWCLSRACTSTCFRSRLIRSYSLLSSCLRFPNCEVTIKAPDYLVLNYPTGVVTYGVHYITMAITIIIDGSTKIAYR

SEQ ID NO: 212470 - protein, 75 aa, Zea mays
  Clone ID: MRT4577_125376C.1.pep
WAHRAIHVAQTSSCDGMTCDLLPFHALVQLVYMTVFSGCLQCLAMQNLDGAAPMQNGPRNGSRHCGCLQGVRCVC

SEQ ID NO: 212471 - protein, 229 aa, Zea mays
  Clone ID: MRT4577_125377C.1.pep
MGTKMKKGILKPFRYISTIMDGKEAEMQIGFPTDVKHVAHIGWDGPGSTNNNNNNSNNNSGGAPSWMKDYHSAPLDSSSFRSESGGTAAANPWASQEIVMDGASVGETSFRDTKSEAGVDVGGGDSPPSPATRRSRRHRSRGSGNSSMDATGGEGEEKTKEKSKKGTRKNRKKQDKSAGDDASGTCQDLPAVPKKSNRRKNKGSSEGSGSAAAKDTTAAAPTAPAVDDD

SEQ ID NO: 212472 - protein, 48 aa, Zea mays
  Clone ID: MRT4577_125378C.1.pep
KIISPNTDDAKYVINVKQIAKVEVGSGDNDSPTDIPEGLRFGYGILCF

SEQ ID NO: 212473 - protein, 116 aa, Zea mays
  Clone ID: MRT4577_125379C.1.pep
SGYICLCWHLQQRGIDVLYKRACNNKNVMCYMYMVGDRRGHLQCCMGWQVLVYLLTLGRGWYSALFFLFGLLGIVVSLFNVLGMVEVSCKILHNRRMATSRKVTLISILFVRSDAW

SEQ ID NO: 212474 - protein, 41 aa, Zea mays
  Clone ID: MRT4577_12537C.1.pep
GILCVQNMTPLDSSSISKIIWFTKYTMKNIISSKHHFSFVC

SEQ ID NO: 212475 - protein, 304 aa, Zea mays
  Clone ID: MRT4577_125380C.1.pep
MVSSDPDGNGGAPDVSELFCHYNSLYFRDSLGSCAVSWTEDPLPDCDVSTCDYYPGGGGCIILLSKSLCGSHNGSDLKNALLHEMIHAYICIKDNNSNHSDHGAKFQKLMNTINLSSVADPHRPVDGYSITLLHEIHKKYYHYKCQSCADFIKSTNMRGPSGDDCIERKGVDDPCHNSNCHWHRHKQQCSGNYCRVQESSPGGPELKCLEAVEAYNEGKVEEPACTSWHTTHTSNKSRRSNKTSGKMPLWSSFMLQIMQLSVQDWIPLQKTGPIRKSKFQRMLTLTLEGQKLFRKHQNAEEQLY

SEQ ID NO: 212476 - protein, 100 aa, Zea mays
  Clone ID: MRT4577_125381C.1.pep
VSFVFLRLLPLFLPFVPGSVSCAPSSFLSLCSVVLLSPLVFAGSGACGALFRPLLLGVLGVGFFSVLWPLFLPLGVVSGRSPVCAPPVSPPPAAWPLAWV

SEQ ID NO: 212477 - protein, 70 aa, Zea mays
  unsure (1)..(70): unsure at all Xaa locations
  Clone ID: MRT4577_125382C.1.pep
GRSFNSQLSTLVSGTSECPNLPRRCYFLPNPSPYQVWGMSFALNTGDNFVAVGPSMGXSVTAGALANFLK

SEQ ID NO: 212478 - protein, 60 aa, Zea mays
  Clone ID: MRT4577_125383C.1.pep
SKEQLHRVMKSQRGVQVAVLEERDACGGTVLHPRVVLEGHAVAAQARERPPLGVKSAQQV

SEQ ID NO: 212479 - protein, 143 aa, Zea mays
  unsure (1)..(143): unsure at all Xaa locations
  Clone ID: MRT4577_125384C.1.pep
GGKQRAPHFPTPKPWGGGEKQINMGGPAPKQGGGPRGGXKKKLTGGPPPSPPKKDNTPPAGXSPPPGGLGGGKIPGGFFGNWFPWPLARPRGKSPGGSGTPLGKTGGAWAPLRVAPGTPPPPPGEKKCGPPPRGPLKTGGRGG

SEQ ID NO: 212480 - protein, 67 aa, Zea mays
  Clone ID: MRT4577_125385C.1.pep
QQDPQKLTPRHAHSLPFMFNRGSYSERAFWAKKRSPITLCGKVFWVWTMLNQKIARLMQFTVRGLGK

SEQ ID NO: 212481 - protein, 91 aa, Zea mays
  Clone ID: MRT4577_125386C.1.pep
SQHTIGGVCLRNLIFLISWNDRLVRVIWLYSCVMFKRLVCVVHIGVHASEVLIAVIGVGVVEVDVSLMDAVSVREEVVSDAVFVTQRARRV

SEQ ID NO: 212482 - protein, 120 aa, Zea mays
  Clone ID: MRT4577_125387C.1.pep
LRGLKLPPGGPPIQKLVAQKKSPTVPAPPLLAPFFLGFKKRIYTPPKALYRFFFGPCENKPEEAFGSTFFLPRLVFKVSTVPTVMLLLSAPHFEYIRTCNKCGSSDVITIKFTHEKNICV

SEQ ID NO: 212483 - protein, 556 aa, Zea mays
  Clone ID: MRT4577_125388C.1.pep
MAMLVPDLSFSASISSVKLPRYGASKSETFFVKKPPTFRAEARPAESGKYGTNNGRATKMVPTTEFRRTSGGLVRSGTVNGSPNSAVNGSTKVLINGSANAIDNSSTKAVINGTPKVAVNGTSLVKSSKTSLVKTQKQVRPKDDPFQEELKVLPSDEGFSWAKDNYNSVQRSIDIWAFVLSLRVRVLFDNAKWAYPGGFSEEKQKVRRRKTASWLREQVLQLGPTFIKLGQLSSTRSDLFPREFVDELAKLQDRVPAFSPEKAKAFIEKEMGCSIDVVYKEFEERPIAAASLGQFMKFSAFDDIYVHFYEFYFHVIVFIFQVHRAMLHNGERVAVKVQRPGLKKLFDIDLRNLKLVAEYFQRSETFGGPSRDWIGIYEECSKILYEEIDYINEGKNADKFRRDFRNIKWVRVPLIMWDYTTEKVLTLEYAPGIKINNLDVEHLRIGYKLVAKRELNDPENALIGAFAGAITGAITTPLDVMKTRLMVQGQGNQYTGIVSCAQTILREEGPKAFLKGIEPRVLWIGIGGSIFFGMLEKTKSMLAERRNRELRAVKDE

SEQ ID NO: 212484 - protein, 63 aa, Zea mays
  Clone ID: MRT4577_125389C.1.pep
AASHCTERWSNVGSCLWAPSEHPTLCSGGVGTTSSYESWQGALAYICMITKLGSRGYEYEGQI

SEQ ID NO: 212485 - protein, 184 aa, Zea mays
  unsure (1)..(184): unsure at all Xaa locations
  Clone ID: MRT4577_12538C.1.pep
MPPASLERHVPTPSYEPCWIGVANATRTAPREVMSLQGSPKHPVDHTPAWLSENYAXPITCFFHALSTAAALCFYILFSIFAKSFTIIFTITTLXLSALDFXGEQRTSGMILPQMHSGNDIDDHGNRERKLEXLDGESLSRMNKKDTWMFWSTLHLTAAAXILPEKFPLILLEADYLHSAGDSL

SEQ ID NO: 212486 - protein, 341 aa, Zea mays
  Clone ID: MRT4577_125390C.1.pep
MVPTTEFRRTSGGLVRSGTVNGSPNSAVNGSTKVLINGSANAIDNSSSKAVINGTPKVAVNGTSLVKSSKTSLVKTQKQVRPKDDPFQEELKVLPSDEGFSWAKDNYNSVQRSIDIWSFVLSLRVRVLFDNAKWAYPGGFSEEKQKVRRRKTASWLREQVLQLGPTFIKLGQLSSTRSDLFPREFVDELAKLQDRVPAFSPEKAKAFIEKEMGCSIDVVYKEFEERPIAAASLGQVHRAMLHNGERVAVKVQRPGLKKLFDIDLRNLKLVAEYFQRSETFGGPSRDWIGIYEECSKILYEEIDYINEGKNADKFRRDFRNIKWVRVPVCFLDITMQFFGGV

SEQ ID NO: 212487 - protein, 74 aa, Zea mays
  Clone ID: MRT4577_125391C.1.pep
MLNSSKMVTTFAPSARVSSLLEHTLALFKRCFPEATLGTSKGTAVATISSDIATLVSVRMLAGAKANMNPTGQA

SEQ ID NO: 212488 - protein, 43 aa, Zea mays
  Clone ID: MRT4577_125392C.1.pep
FLSVRALDALIARTVQLIPSDSCACQSSSVRETQPSVGWLLDR

SEQ ID NO: 212489 - protein, 80 aa, Zea mays
  unsure (1)..(80): unsure at all Xaa locations
  Clone ID: MRT4577_125393C.1.pep
IQEKNGVYDATWKIGKEFFFFLXNEKLGGGGFFWWGPGXYVEGGGGGPHWGLSLSMCTGMVFGRKLSMNQVGLYILGWGL

SEQ ID NO: 212490 - protein, 170 aa, Zea mays
  Clone ID: MRT4577_125394C.1.pep
MTRTDDLNVESFVRTIPMMMTSDHEEYLQAYVRRFLRLRAQAPTVPNEMVIEAMIKGLRPGPTAQYFARKPPQTLEKLLQKMDEYIRADNDFRQRREEAYRFFEMTRGFGGRIHPRHVRSIHNSSQNDDRGSQFQRQQQSSQSSGQQQSSFRPPAPRGRGGRGFGGRYED

SEQ ID NO: 212491 - protein, 71 aa, Zea mays
  Clone ID: MRT4577_125395C.1.pep
HACEARGQTHEHAGSHTHASEDMTKEGDACCICTFWCSWDPSVHERSKNLSLCITTILNDARGYLNGIWVW

SEQ ID NO: 212492 - protein, 77 aa, Zea mays
  Clone ID: MRT4577_125396C.1.pep
SVQKQVVSEALKGTFWVHAPLFPSPGKAESFSSPPWVSLSSTIRRMSSRFLGAFLFTRTMCTGARPSRYFYRHQAHR

SEQ ID NO: 212493 - protein, 48 aa, Zea mays
  Clone ID: MRT4577_125397C.1.pep
IAYYSQSINKEFCMTYVAYQKYNFSIPDFYIIFSSKSYPILLLLIFGL

SEQ ID NO: 212494 - protein, 182 aa, Zea mays
  Clone ID: MRT4577_125398C.1.pep
MSPPTQPQLKDKAAHEVPRATAASAVASLTKWMRERAAEAPPNLLADERDDLVVLQLSLRRVPPKPTTKPHLLPLPHPVVAHSAASVCVISDDRAGSCSPAAAAILDAARSLKLPVSEVVPFSALRTDYRPYESRRRFAASYDLFLADRALLPMLPRLLGKSFYSTKKAPIAVDFTRAGWGA

SEQ ID NO: 212495 - protein, 83 aa, Zea mays
  unsure (1)..(83): unsure at all Xaa locations
  Clone ID: MRT4577_125399C.1.pep
KPNIPAAPRTTGTKGHGSPATSXRRTPTRRAVLSENRPRRASCRVGLDAPASAFVQVGSSESTGDPGLAVKRAEEQGMERSDG

SEQ ID NO: 212496 - protein, 80 aa, Zea mays
  Clone ID: MRT4577_12539C.1.pep
HVPPLVFSTPAAGGGGLSPHPTNGGGQSYYGLTWTPPYYKQGPLWPRISPHELAQHHKWQPHRGGGAALIQRTTRRYAEL

SEQ ID NO: 212497 - protein, 36 aa, Zea mays
  Clone ID: MRT4577_1253C.1.pep
AYQPSIQPYILSSMAPCGRFLALTGPTRNLIFCILC

SEQ ID NO: 212498 - protein, 88 aa, Zea mays
  unsure (1)..(88): unsure at all Xaa locations
  Clone ID: MRT4577_125400C.1.pep
MAVCGKLMNRIMQCVSHYLHTAACYVIWLVEKYNARLTNFGLANEATVGDNTHVSTXVLDAYGYSVPEYVMTGKVIEKFSGPYFLPSL

SEQ ID NO: 212499 - protein, 238 aa, Zea mays
  unsure (1)..(238): unsure at all Xaa locations
  Clone ID: MRT4577_125401C.1.pep
VVPEMTSSSSMPNLAIAKDGNTNVLPFEFRALEVCLESACRSLEDETSTLEQEAYPALDELTSKISTLNLERVRQIKSRLVAISGRVQKVRDELEHLLDDEMDMAEMYLTEKLTQQEISEASSRAEVDDPSQTEEDXLREYVDDTEDYINIMLDDKQNQLLQMGVMLSTATVVITAGVAVVGLFGMNIGISLYADPTTEEETRAANRKFWETTFGTVAGCVILYIIAMGWGKRSGLLQ

SEQ ID NO: 212500 - protein, 149 aa, Zea mays
  unsure (1)..(149): unsure at all Xaa locations
  Clone ID: MRT4577_125402C.1.pep
MLPPCCVKETMLTHYSDRLSMLRIRFPLIGETLTNAVFSFWTADDVDLSAXTPDTEKXLTPDEXRHFISHVFCFFTASYNIELENLASRXMTDVIAXHSXASYRFKIAIKXLYSETYSLLLXTYIHDHNHDERLLRASYAWSYSRRDVD

SEQ ID NO: 212501 - protein, 443 aa, Zea mays
  Clone ID: MRT4577_125403C.1.pep
MRPHAVGTGGGGVGRRKAGAAAAAASREWMVVPASGPARVEEAGKHAVMARTGLPARDLRVLDPLLSYPSTILGRERAIVVNLERVKALITATEVLLPNTKDPAFARFVRDLQTRVLASSSDQAAEFTDMEGESSNVASPFPLPSASKGHEMEMTKKTTAVVPEMTSSSSMPNLAIAKDGNTNVLPFEFRALEVCLESACRSLEDETSTLEQEAYPALDELTSKISTLNLERVRQIKSRLVAISGRVQKVRDELEHLLDDEMDMAEMYLTEKLTQQEISEASSRAEVDDPSQTEEDRDEDYRSEPDGSNDSFIGYKPNIEELEMLLEAYFVQIDGTLNKLSHLREYVDDTEDYINIMLDDKQNQLLQMGVMLSTATVVITAGVAVVGLFGMNIGISLYADPTTEEETRAANRKFWETTFGTVAGCVILYIIAMGWGKRSGLLQ

SEQ ID NO: 212502 - protein, 128 aa, Zea mays
  Clone ID: MRT4577_125404C.1.pep
LTDKSQHLGAQKNNLFLKLNLVETLEKAIPQFNPLTLQGGNSKKQMGSPGHVMPGVGTLTFKQHLFAVRFCHGQKGTPCRKDKPPSRKFRIASAWRWFWHPNHRLGLQMEPPEQKNFSPTCSCLWARK

SEQ ID NO: 212503 - protein, 409 aa, Zea mays
  unsure (1)..(409): unsure at all Xaa locations
  Clone ID: MRT4577_125405C.1.pep
MRPHAVGMGGGGVGRRKAGAAAAAASREWLVVPASGPARVEEAGKHAVMARTGLPARDLRVLDPLLSYPSTILGRERAIVVNLERVKALITAAEVLLPNTKDPAFARFVRDLQTRVLASSSDQAAELTDMEGESPIVASPFPVPSSSKGHEMEMTKKTAAVVPEMTSSSSMPNLAVAKDGNTKVLPFEFRALEVCLESACRSLEEEXCLHLELFVWLYVVYLAAIEFIPLTXTSTLELEAYPALDELTSKISTLNLERVRQIKSRLVAISGRVQKVRDELEHLLDDEMDMAEMYLTEKLTQQEISEASSRAEVDDASLTEDDRDEDYRSEPDGSNGSVIGYKPNIEELEMLLEAYFVQIDGTLNKLSHVISLALLLTWLSILFCLGGTIWYNNKCFLEVRYHFKHKSKV

SEQ ID NO: 212504 - protein, 163 aa, Zea mays
  unsure (1)..(163): unsure at all Xaa locations
  Clone ID: MRT4577_125406C.1.pep
ARAPRCPATRSPGAAGAPSCSRRPGALQEHVQHGPRLRPRRVQRRQDHRVAGPPHRRRRQDSLQSTPVLAVTYSPGRRRRAATEWRRRRTGPRAPRRRGGTARGTGARRPPGXQRLGRPPPHLRARAAVTLLLLLVTGGGARHGQRQRGHVRACARARGSQPG

SEQ ID NO: 212505 - protein, 68 aa, Zea mays
  unsure (1)..(68): unsure at all Xaa locations
  Clone ID: MRT4577_125407C.1.pep
AGTXSGIRQQAPQLRXLXGGAPVTXCMSTSRXWXGQPPLRPISPGASCMNSPRLTARSWEHIRPIXLA

SEQ ID NO: 212506 - protein, 125 aa, Zea mays
  Clone ID: MRT4577_125408C.1.pep
TSHARSVARADMHAYCTAEPPARKRERKTMYRGIRRRPWGKWAAEIRDPAKGARVWLGTFATAEAAERAYDRAARRIHGDKAKVNFPNEDPTAEYDYDYDGHSHAHAHAGGEQGMLAMYNSGGRD

SEQ ID NO: 212507 - protein, 65 aa, Zea mays
  Clone ID: MRT4577_125409C.1.pep
ASPSASLSPSFDALSPLGFEVATAGAVLAHEGQWHPPAASEEDAEPEMIRSSRRELQSATYPRGP

SEQ ID NO: 212508 - protein, 91 aa, Zea mays
  Clone ID: MRT4577_12540C.1.pep
GTSNPFFYTKTPRKKLNGTQRHYYGPEPLAHHAFKTTAVPYHTTIFKWPPDSPFLIFNSMRKGAQIQSHHREKRVWGRGNKKKKYWAFGTG

SEQ ID NO: 212509 - protein, 80 aa, Zea mays
  unsure (1)..(80): unsure at all Xaa locations
  Clone ID: MRT4577_125410C.1.pep
MGAMILDLLALLALXKNTANLTFISQSSQEYXLSTATAVGTQSPTMRISIVQEAMHAHIILAFTLTLXQPYALLPQALLE

SEQ ID NO: 212510 - protein, 140 aa, Zea mays
  Clone ID: MRT4577_125411C.1.pep
PGPIEIGDDNLPGPDAAHPVRHLPEKQGPRRAGRQGRGRRHDQQGLFAVWDWEEHPKRGCLSLSVEQIGVGFCGLLRLLLLSSPSLPGGYPKHVVASILVLGRCCTLQCSQAVSAKCVFFYSISLLLLFSPTALTCPRFL

SEQ ID NO: 212511 - protein, 334 aa, Zea mays
  Clone ID: MRT4577_125412C.1.pep
MPFLPLLHAYLMVFFLPRLISVRSVSPGNVIALFLFLSPVVTFWRVIRKRSTEDFSGVPYNMTLLNCLLSAWYGLPFVSPNNILVSTINGTGSVIEAIYVVIFLIFAVDRRARLSMLGLLGIVASIFTTVVLVSLLALHGNARKVFCGLAATIFSICMYASPLSIMRLVIKTKSVEFMPFLLSLAVFLCGTSWFIYGLLGRDPFIIHSTPGLGVGCPFDVPPKPNQAHMPAAAAADARAWAPVASSSVGVATHRQRTPIPNGCGSFLGLMQLILYAIYRKNKGPAAPAGKGEAAAAAAEVEDTKKVAAAVELADATTNKAADAVGGDGKVASQV

SEQ ID NO: 212512 - protein, 242 aa, Zea mays
  unsure (1)..(242): unsure at all Xaa locations
  Clone ID: MRT4577_125413C.1.pep
MEDVVKFVFGVSGNVIALFLFLSPVPTFWRIIRRKSTEDFSGVPYSMTLLNCLLSAWYGLPFVSPNNMLVSTINGAGAAIEAVYVVIFLAFASSQRTRLRMLGLASAVSAAFAAVALASMLALHGQGRKLMCGLAATVCSICMYASPLSIMRLVVKTXSVEYMPFLLSTCSPGLAILNGCGSFLGAVQLVLYAIYRDSNSGGKASGAGGKQQAVDDVEMAASDAKSSKKVADDVGGKEDRLV

SEQ ID NO: 212513 - protein, 88 aa, Zea mays
  Clone ID: MRT4577_125414C.1.pep
MGSPSTTSPTSPGAACAVCHNSAVSYHMADTADHSNPRNATVHAGNRMKSPHEREPRSMAAVPPASRTVLRPARMRRRPCGEPHTSAG

SEQ ID NO: 212514 - protein, 43 aa, Zea mays
  Clone ID: MRT4577_125415C.1.pep
LPFKISLSLSLYIYGLDTQPSFSSSDVLEAAYVRSYQQKNEFA

SEQ ID NO: 212515 - protein, 198 aa, Zea mays
  Clone ID: MRT4577_125416C.1.pep
MEDVVKFVFGVSGNVIALFLFLSPVPTFWRIIRRKSTEDFSGVPYNMTLLNCLLSAWYGLPFVSPNNILVSTINGTGSVIEAIYVVIFLIFAVDRRARLSMLGLLGIVASIFTTVVLVSLLALHGNARKVFCGLAATIFSICMYASPLSIMRLVIKTKSVEFMPFLLSLAVFLCGTSWFIYGLLGRDPFIIVRTRFSL

SEQ ID NO: 212516 - protein, 58 aa, Zea mays
  Clone ID: MRT4577_125417C.1.pep
CFGTLEFWLISTGNYFVMKFLRIYYCHSTHLSFLYDRCILFLSIGVSCTPVSCGSDVL

SEQ ID NO: 212517 - protein, 168 aa, Zea mays
  unsure (1)..(168): unsure at all Xaa locations
  Clone ID: MRT4577_125418C.1.pep
VYVVIFPAFASSQRTRLRMLGLASAVSAAFAXVALASMLALHGQGRKLMCGLAATVCSICMYASPLSIMRLVVKTKSVEYMPFLLSLAVFLCGTSWFVYGLLGRDPFVAIPNGCGSFLGAVQLVLYAIYRDSNSGGKQQAGDDVEMASDAKSSKKVADDVGGKEDRLV

SEQ ID NO: 212518 - protein, 267 aa, Zea mays
  Clone ID: MRT4577_125419C.1.pep
MEHIARFFFGVSGNVIALFLFLSPVVTFWRVIRKRSTEDFSGVPYNMTLLNCLLSAWYGLPFVSPNNILVSTINGTGSVIEAIYVVIFLIFAVDRRARLSMLGLLGIVASIFTTVVLVSLLALHGNARKVFCGLAATIFSICMYASPLSIMRLVIKTKSVEFMPFLLSLAVFLCGTSWFIYGLLGRDPFIIIPNGCGSFLGLMQLILYAIYRKNKGPAAPAGKGEAAAAAAEVEDTKKVAAAVELADATTNKAADAVGGDGKVASQV

SEQ ID NO: 212519 - protein, 62 aa, Zea mays
  Clone ID: MRT4577_12541C.1.pep
WFNLNFTFLCGGTPVDLGLIDGKRRLFFSPSARYYYYFFLGLFFPPLSYTSPLCARTYEAGA

SEQ ID NO: 212520 - protein, 178 aa, Zea mays
  unsure (1)..(178): unsure at all Xaa locations
  Clone ID: MRT4577_125420C.1.pep
RPSRIECSEPNEQPEPKDPGRVFHAERVAPRDATESVTEQLAHGGSGDDGVIDETYDTRIKIAEALEASARAIGDKHVEPSDAAAIRVAEASAAGRGAPAIPGGVSERAQAAVAANARAARDEDKVTMADVLTWEATVKLPTGKAVTGEVAAAGXAAEAETEAANDPRAKTNPRGVSA

SEQ ID NO: 212521 - protein, 153 aa, Zea mays
  unsure (1)..(153): unsure at all Xaa locations
  Clone ID: MRT4577_125421C.1.pep
MGASVTVENLNPKGLKCEYAVRGESGIHAHRLXQQLQTQPGALPFEEILYCDIGNPQSLGQQPVTFFRGGLALCEYPCLLGKEETKSLCSAEAISRAKQILATIAGRXTGAYRHRQGIKGLRDAIAAGICXREGFPANAXDIFITDGARAGGH

SEQ ID NO: 212522 - protein, 81 aa, Zea mays
  Clone ID: MRT4577_125422C.1.pep
MSAPMQTDAGHPARHKEPQPLPLIMLSLSEFVDLAVHPVFDKQGTPFKRLIKDHNYNNDLEEGINTIVLRSKLVPYELDEE

SEQ ID NO: 212523 - protein, 101 aa, Zea mays
  unsure (1)..(101): unsure at all Xaa locations
  Clone ID: MRT4577_125423C.1.pep
RSHMLHYTAKERTKCPTCDRARQQWYGEATRARARRGGVAGRGGGSLCACXGPRELVRWAEIVSXWGLAVGAKCLNSGRWPSAGVYARREGGTRSMIGRWA

SEQ ID NO: 212524 - protein, 86 aa, Zea mays
  Clone ID: MRT4577_125424C.1.pep
ILTTTRKLSQLIYLTVLFIHQRRRTAEHGKELKNDDGPAAVGKSLTRHGDELEGEERRPGRAPWNLRTDEKGPRARRRGCMMNGET

SEQ ID NO: 212525 - protein, 41 aa, Zea mays
  Clone ID: MRT4577_125425C.1.pep
HKQISPQSNRTEASASRWRSYVKTLSGTTIIRKGKINDSIA

SEQ ID NO: 212526 - protein, 91 aa, Zea mays
  Clone ID: MRT4577_125426C.1.pep
RAADLHPWTVVTQISKKKKFVSDGVFYAELNEMLTRELAEDGFSGGDVRFTPVRTEIIIRATRTQNVLGVKGRTIKELTFVLQKKVNFPEN

SEQ ID NO: 212527 - protein, 75 aa, Zea mays
  unsure (1)..(75): unsure at all Xaa locations
  Clone ID: MRT4577_125427C.1.pep
RPAGRKGPPPKHSTHPHPHSHGLPLKFATAICPFHALRMWVVRLIIYHXAPCAPXLAVCERHRCLFLVGSGPFGR

SEQ ID NO: 212528 - protein, 59 aa, Zea mays
  Clone ID: MRT4577_125428C.1.pep
LSVKKKKKKKKKKKKKKKKKKKKKKKKKKRKAKLKKAKKTKKTSHKNAAQAKKKKGGGF

SEQ ID NO: 212529 - protein, 112 aa, Zea mays
  Clone ID: MRT4577_125429C.1.pep
NSQVRPTHTDHSYTLLSILSIHSLPSSSRKILNIKALLPPFPISSNTLTFTQFSFSPTTLNPFFSPTYYFLKLLTLLYPIQLSTTHSPFLLFYHIPFPNLFTTPSLFSTLQF

SEQ ID NO: 212530 - protein, 243 aa, Zea mays
  Clone ID: MRT4577_12542C.1.pep
MQPTYQPPMNGQHAPQPQASGAPPPPLQQAPPPQQYYQAPPQYYQQGPPPAMWGHPQQHMPPQYAPPPQQYAPQPPQQYAPPPQHYAPPPPQYGAQMAGGPPPGGEDIRSLWIGDLQYWMDETYLYNAFAPVGPQQVTSVKIIRNKHTGQPEGYGFIEFQSRAAAEYALGTFNGQMMPNVEQVFKLNWASCSAGDKRGDDGSDHTIFVGDLAADVTDAMLEEIFKATYPSVKAANVVTDRATG

SEQ ID NO: 212531 - protein, 168 aa, Zea mays
  Clone ID: MRT4577_125430C.1.pep
MGKSGKKTKESHRQGRGRRGSQLGDDDLPSSAYDAPPRRQEDSDGDDSDEATAEGEHDGGAEEGDLQGQWQVGSMPSKFHLYQLSVQSPKGDISYLQKFFLMYVGGRVPLHLQEDFCGTALLSTEWLRTDTRRTAVGLDFDRESLEWCLENNLSKIGADGYSRLLLFN

SEQ ID NO: 212532 - protein, 66 aa, Zea mays
  Clone ID: MRT4577_125431C.1.pep
SVTTMTACASPRSASPTSSSVISSCWCWSWSSWHPAGRAAAVLLRQCFHPHGAVRRDGAGVAVCRR

SEQ ID NO: 212533 - protein, 82 aa, Zea mays
  Clone ID: MRT4577_125432C.1.pep
NKRPKISRGGAPKRSKNPREPQNPKKGTPKTPPPYFCCLFIFFYFFFLFFFFYLLSFIFFFPPFFFFFFFFFFFFFFIYFFF

SEQ ID NO: 212534 - protein, 211 aa, Zea mays
  Clone ID: MRT4577_125433C.1.pep
MRGKVDECWDECCYNWGEWKYCLLCLGIVVAIVLIVVFVAAFGFVRHIDVSVDDASLTRFELATSPVTSLSYNLSVTLVIRNPNWAMSLKNTKPLEAQYKFDDQMFDRFQLADKGDKHPAGKTRVYHIAPPGTTSSVMLGNAGEAEFRKENATGTFQVEVAVAGEVRYTARYTKCKIQASCPLKLQLAPPGTAAVVFQKVTCKLAKAEKNC

SEQ ID NO: 212535 - protein, 43 aa, Zea mays
  Clone ID: MRT4577_125434C.1.pep
NSILMLTINLTFLLPAVEIGLQLGALFYGNCLQRWITHTTHPL

SEQ ID NO: 212536 - protein, 71 aa, Zea mays
  unsure (1)..(71): unsure at all Xaa locations
  Clone ID: MRT4577_125435C.1.pep
MGMIKIXINWFARIDTLVATVALQTEDVELVGVNERFNTTDXMTYMFTYDTVHRHXKHCGIALNDSKMLLF

SEQ ID NO: 212537 - protein, 73 aa, Zea mays
  Clone ID: MRT4577_125436C.1.pep
ITKPMSLMTIGVRIDQSLRLWRHRRAPGVLKMGTDRHTTVMRGITKATECCQDWWRFGIFCPDVQVLLHGDPE

SEQ ID NO: 212538 - protein, 92 aa, Zea mays
  Clone ID: MRT4577_125437C.1.pep
PPPPSICFFPFSQIGPPVPSRHRVFWVFPVFRDWRGFSPLRGDSLALPPPSVPSPQPGGVSLLVWLARPHFVYPVLPSPNRYSFVFYLKLAR

SEQ ID NO: 212539 - protein, 61 aa, Zea mays
  Clone ID: MRT4577_125438C.1.pep
RLMMTLSSRHHLQRYAYGRIHRVMAKVIFRDNTYGILIITIAITHGLWHSMIVKIEYENCI

SEQ ID NO: 212540 - protein, 73 aa, Zea mays
  Clone ID: MRT4577_125439C.1.pep
PVQHKEASSSASILFGEVLYLSEKEKLKLYPLRPPSRKIDCIYCSWVHNERWVQSIILELRERYLAVTLDEVL

SEQ ID NO: 212541 - protein, 191 aa, Zea mays
  Clone ID: MRT4577_12543C.1.pep
GTSAIVAMDKSAAISSDSSFPSNTLRLSQSKTIGRSSERSLESVLSSSKEKVSAIESLLKGVSMSGQNFSAARSTSLDLGVDPPSSRDPPVPLAAPASNVLSLQNSALLDSSLPTIPPSSRNGGSRLLDTMTTHLPTKERSRSPYLSNMSSESISGLSLPYSRKSLDRLQEGGRMDESYDIRSTRQIPDSN

SEQ ID NO: 212542 - protein, 97 aa, Zea mays
  Clone ID: MRT4577_125440C.1.pep
LFQGPGFSSKKRGFLFVLKGGFPFWGSPRLKSCFSFVGVSLVGILVSTRVELEINLLFFFSFRFNYFFFLREFFFVKFFYLKNLYFLGGFKRNPFFG

SEQ ID NO: 212543 - protein, 63 aa, Zea mays
  Clone ID: MRT4577_125441C.1.pep
FLWFANFIGPVRKGRDFLFRGVRFLHAARWIFPPPPPRAILVGLDVLRPPPGMELYGQPPQMC

SEQ ID NO: 212544 - protein, 50 aa, Zea mays
  Clone ID: MRT4577_125442C.1.pep
GGSELGAITIALPTSCRTNSVYLNWLPATAEQEHNHQPTVNSGTMLLMLI

SEQ ID NO: 212545 - protein, 215 aa, Zea mays
  unsure (1)..(215): unsure at all Xaa locations
  Clone ID: MRT4577_125443C.1.pep
MEVEACYNYGFLPADRGRHQPPPPPHATLPHAAADFLCISEDAGELWEYFPCPFCYIEVEVPFICNHLQEEHCFDTRNAVCPICANNLGKDMAAHFRLQHTHLLKRRKPYRPSSCPAAATSPATYQVNSYYEEAEPQQHYSRPYKDPAPDPLLSQFICSVDAVPGDXTPRKXSEAEVEQQGSDSXSDDDASSKLGLEERLQRIDFLTEILMSTIL

SEQ ID NO: 212546 - protein, 247 aa, Zea mays
  Clone ID: MRT4577_125444C.1.pep
AINGGATSRWRCVEACYNYGFLPADRGRHQPPPPPHATLPHAAEDAGELWEYFPCPFCYIEVEVPFICNHLQEEHCFDTRNAVCPICANNLGKDMAAHSRLQHTHLLKRRKPYRPSSCPAAATSPATYQVNSYYEEAEPQQHYSRPYKDPAPDPLLSQFICSVDAVPGDDNAQKDDQEVIQIFFRALDVPVTVSLSSPSWVFVFFPIRLKLNKGATASDDDASSKLGLEERLQRIDFLTEILMSTIL

SEQ ID NO: 212547 - protein, 112 aa, Zea mays
  Clone ID: MRT4577_125445C.1.pep
PKGKIFFFLNSPPPQQKKKLRGLQKKSLFFYWIQKPPGRYTGGWFLFFTGGLYQSSTPLPAPQAQKTGWFYFLPPPKNIVPLVNTAPNKYIKTRGGGRGKKKKTGGRGGLLL

SEQ ID NO: 212548 - protein, 88 aa, Zea mays
  Clone ID: MRT4577_125446C.1.pep
GHRYFNLVLITNVAGAGDIVRASVKGSRTGWMSLSRNWGQNWQSNAVLVGQALSFRVTGSDRRTSTSWNMVPSNWQFGQTFVGKNFRV

SEQ ID NO: 212549 - protein, 109 aa, Zea mays
  Clone ID: MRT4577_125447C.1.pep
PSDQANKLQELYTPTDTFFVRDDAEKVAELKVQDPAALALIEPFAADQNKAAQVDGDDETPKEKNWILLLMKMRRMKIMHPMPRQKPHLQPMNPNVLLTAISHRGTYLP

SEQ ID NO: 212550 - protein, 76 aa, Zea mays
  Clone ID: MRT4577_125448C.1.pep
GEFRSGIGAPLAGNICSIHMLHAHAACVAYATILPEHSQATITGLYTRYLSSMTAINGENTMLKPYRLQQAVATSN

SEQ ID NO: 212551 - protein, 109 aa, Zea mays
  unsure (1)..(109): unsure at all Xaa locations
  Clone ID: MRT4577_125449C.1.pep
RAIKPPIGQPYRLQQALAGTVXQHPFPQLQQQSLAHLTIQTIAPQLEHHFVPPLTHLPPGNPVSYLKQKLFASNPNSLANPPLSQQHLQLQQFLPPFIQQPLGNPPKNL

SEQ ID NO: 212552 - protein, 90 aa, Zea mays
  Clone ID: MRT4577_12544C.1.pep
ISQERLFGPIPVRDSLCSVLRAVLRTGRRWATPVPVKSSLSWWPTKTPESWRKNAAPPPRPCDAMGRPGPSHFSNTVSSTTEKRRRKSLC

SEQ ID NO: 212553 - protein, 201 aa, Zea mays
  Clone ID: MRT4577_125450C.1.pep
TAAEAAKGLVPAATATALMGKSGSVLLLIMLFMAVTSAGSAELVAVSSLCTYDIYRTYINPDATGEQILRVSRATVLVFGCLMGVLAVILNLVGVSLGWLYLAMGVIIGSAVIPIALLLLWRKANALGAILGAVSGCVLGVTVWLSVAKVQYGRVDLDSTGRNAPMLAGNLVSILVGGAVHAACSLAWPQHYDWESSRQIT

SEQ ID NO: 212554 - protein, 47 aa, Zea mays
  Clone ID: MRT4577_125451C.1.pep
KRGGFFFRAPKKKKKKKKKKKKKKKKKKKKKKKKKKKKKKKKKKKKN

SEQ ID NO: 212555 - protein, 45 aa, Zea mays
  Clone ID: MRT4577_125452C.1.pep
FVIAVRHRWLVDLRAFRRKIMTWIVPKSSRSGYRSYPMVCSDVGV

SEQ ID NO: 212556 - protein, 247 aa, Zea mays
  unsure (1)..(247): unsure at all Xaa locations
  Clone ID: MRT4577_125453C.1.pep
YPKWYQRTTWMYISVPLALYVGERTLRAFRSKAYAVKILKVCLLPGNVLTVTMSKPYGFRYRSGQYIFLQCPTISPFERHPFSITSAPGDDCVSVHVQTRGDWTQELKRIFVENYFTPCVPRRAAFGDLGAVDHKTKSPXGLLVDGPYGAPAQDFRXYDVLLLVGLGIGATPFISILRDLLNNIKLADELMDLAMETGRAEDSASNLSASTASXAATRGGRXRTTCAHFYWVTREPGVVXWVKGGDE

SEQ ID NO: 212557 - protein, 342 aa, Zea mays
  unsure (1)..(342): unsure at all Xaa locations
  Clone ID: MRT4577_125454C.1.pep
GNVLTVTMSKPYGFRYRSGQYIFLQCPTISPFEWYXIRTHSWHSHAXSLDTSXVGGVCGRHPFSITSAPGDDCVSVHVQTRGDWTQELKRIFVENYFTPCVPRRAAFGDLAGAVDHKTKSPPRLLVDGPYGAPAQDFRNYDVLLLVGLGIGATPFISILRDLLNNIKLADELMDLAMETGRAEDSASNLSASTASXAATRGGRXRTTCAHFYWVTREPGSFEWFKGVMNEVAEMDKKGVIELHNYLTSVYEERDARTTLLSMVQALNHAKHGVDIVSGTRVRTHFARPNWKEVFTRIASKHPNSTVGVFYCGRPTLAKELKKLSLDMSHRTGTRFDFHKEYF

SEQ ID NO: 212558 - protein, 74 aa, Zea mays
  Clone ID: MRT4577_125455C.1.pep
RRVKAYIHLRIRMRSFISSSSFGTEVFSVSQVRSSNLHFTPLHIDIREDSSPTSRVSYVLSSKISSTQYTRILF

SEQ ID NO: 212559 - protein, 109 aa, Zea mays
  Clone ID: MRT4577_125456C.1.pep
SKASSGVWSLKGTDRFGQQGEGSVRPVLSSPPLLVSCVLACWAYPPASAGAARSWARVEWERTAEYLPARGGRQGARGVAVGARLAGSGGRAVDGMGGVGKTRQARVVP

SEQ ID NO: 212560 - protein, 176 aa, Zea mays
  unsure (1)..(176): unsure at all Xaa locations
  Clone ID: MRT4577_125457C.1.pep
MVAAGRNRAERWNLAGATALVTGGSKGIGHAIVEELAGFGARVHTCSRNAAELEECRRRWDEKGLQVTVSACDVSARADRERLVATVGATFGGRLDILVNNAGQSLFKRTAECTGEDYSRIMATNLESCFHLSQFVHPFLRLVSGRGGGSVVHVFSDAGFVGLPALXVYFMSQGAL

SEQ ID NO: 212561 - protein, 93 aa, Zea mays
  unsure (1)..(93): unsure at all Xaa locations
  Clone ID: MRT4577_125458C.1.pep
LPCVRLFEVRDDVKLPSYKGENINDKMFDEKNHILDPXGCFRXYAQSATTLNLLCVFSTGGYTDIQRVTQWKLDVTEHSKQGVMRNKIFHALS

SEQ ID NO: 212562 - protein, 120 aa, Zea mays
  Clone ID: MRT4577_125459C.1.pep
HLGSLTSASSLQQHQVPFIRLLFATPPHFFPLTPLGALTSLSFFQPHNLFPFTRLFGVTPATFFHPPQWFPFYHPVGPTPGALFQPPQLVPFCHPFFTNPTVFFQQPLLGGAPFFFSYKL

SEQ ID NO: 212563 - protein, 152 aa, Zea mays
  Clone ID: MRT4577_12545C.1.pep
WTVLKPQEPHASGGQPEGGGAPCARSSSRAPARTLTSCGTSSSTRTTRGRSSGGYSMMTGWGCRPRPRRCACHGVVRVPPPRGNWGCWLRTAEACRRRRARSVTLFRRDPRGPYWVLGPGGRQARCAPPFVLRCRVCRPPQGSARRARPCPW

SEQ ID NO: 212564 - protein, 78 aa, Zea mays
  unsure (1)..(78): unsure at all Xaa locations
  Clone ID: MRT4577_125460C.1.pep
GKHHRETRVVLLAVFAXRXRRRXXTQXWEGGXPYKTCLSPXRRGHEGSRSEGIRIGNCCCLRRXKAMRRMWWRTIFFL

SEQ ID NO: 212565 - protein, 84 aa, Zea mays
  Clone ID: MRT4577_125461C.1.pep
LEVGSDGEIGLQKVPPCHIFTGLMPCLPFQLLDLNRYCCCSLLLALSSNRAEFIAAASSSSCSSSSSPSSRLQPRHALYMQPPP

SEQ ID NO: 212566 - protein, 108 aa, Zea mays
  Clone ID: MRT4577_125462C.1.pep
FPPPMFIKGVLTPFMDGKTAFPNFFPQKEKKVFVPKYPGIFPGFLGFQEFPGVTKVFKKIKVFFKNQKPPPKFSRVLWKNPPPFLLSFRIKNGGGVYKSGAKKKLFYI

SEQ ID NO: 212567 - protein, 35 aa, Zea mays
  Clone ID: MRT4577_125463C.1.pep
IVEVLIPHQTHASLFSAYMVMGPSLMASMTINASS

SEQ ID NO: 212568 - protein, 48 aa, Zea mays
  Clone ID: MRT4577_125464C.1.pep
PLTRICSFVPTNDSRLVMQYQQRQAHKLNHISQSFISLVSLICTIGGL

SEQ ID NO: 212569 - protein, 123 aa, Zea mays
  unsure (1)..(123): unsure at all Xaa locations
  Clone ID: MRT4577_125465C.1.pep
MIFAPLGWRLPAPKAAAGGSFLLGASSVKSNPNPKPKPSRIRCAAATLNEVLGLRAGATGREIKAAYRRLVRERYPDVAPAPGAAAXDFARLHNAYATLSDPDSRARYYGGGPAPAATVARRP

SEQ ID NO: 212570 - protein, 66 aa, Zea mays
  Clone ID: MRT4577_125466C.1.pep
SWKGDCQWCSGLISRENPLPRGTNGGSFVHELFLVLLAVGPHDQCSTRRRLRRSLGGAVEEIGRQA

SEQ ID NO: 212571 - protein, 195 aa, Zea mays
  Clone ID: MRT4577_125467C.1.pep
MATVWSGCSTSCGSFGQELPPRGKRGGGEGTRFLSRSRGRIRGDARQTQALSAAMVTVGACVCRAAPCLLDSVVDGTEDVSVGFGGIDGEPLADGYDGGKRRGPRRRPTRPTVFQKEVGARTAPPAMASEPDSTSEHVVSRLHFLEERDEETLSRRLIKLSQNNKVSSATELFESMRASGLQPSAHACNSLVACY

SEQ ID NO: 212572 - protein, 198 aa, Zea mays
  Clone ID: MRT4577_125468C.1.pep
MAGSQSQAMLEKMELRQSYRNVWHTDLTNAVAADLPWCCLSLWCGPCVSYMLRRRALYNDMSRYVCCAGYMPCSGKCGESQCPEVCLATEVFCCFGNSVASTRFLLQDEFNIQTTQCDNCIIAFMFFLQQLACICSLVACIVGNSELSEAAHVISCMSNLVYWTVCSCMQTQHKVEMDKRDGTLNTMSAPPMQQMSRW

SEQ ID NO: 212573 - protein, 151 aa, Zea mays
  unsure (1)..(151): unsure at all Xaa locations
  Clone ID: MRT4577_125469C.1.pep
QLLAYNTLDLANVGACQQHQQLQQFIQMLSQLAMVNTAVYVEVSSSSPLQLGNALRYQQQQLVQQIVPALTQLAVANCCAYLQQVLPLNQVAXVTNWVGYPQQRQQLLNPLAVANPLVGTFMQQHQQFVPYTQFSLMNPALQQPXVGGAIF

SEQ ID NO: 212574 - protein, 563 aa, Zea mays
  Clone ID: MRT4577_12546C.1.pep
MYSATTYWEKFVDQETKKVVNEVKLTALLSSSQHRQSIVAPDKVSWVEKPWIRLLSVDAHPTEPWIITGHECGHLAIRNHDTQMLLCSFKVSRGGVFCVKFIAQKQWFICSSGEGFIHVFSYETQEIQNVNNFRAYDDNSRWLPISLAVHPSRPYVLSWCRYDSEIIMKLWDWDKGWECARTFRSGGINVDHIAFDPKETNRFVATDCLDGKVMIWSLDSPEPEYHLPKTDFKGIMFLEFFTRYGRQCLIIAHEDHKAHVWDFRLRKFVSEKRKLLSREASVFLRPNVSLLLTPSSKGTCRFWDAKKFSFYGVIDNSAGGDVLGIACLMGSKTRFVIGQYYALTILHLDNALYQKDPRQSIEPQLCAHTRQGDTSSEEKYGEEMVWHHGPNFDWQHEPFDAAIMRASGGENAHEQYTLFDIMIDSTEVRAQRMSSSFCSMSLSSHQPKEQELEVARLREELRQRDEHHKVQQDYMFSFIQQQHAIIQELSQQHGLDVVLPEFRPPLPPMLPQLSPFLSTISQATTDASGTEPTGMAFVESFAYPPPATDSNHNSNNPCSDFGA

SEQ ID NO: 212575 - protein, 48 aa, Zea mays
  Clone ID: MRT4577_125470C.1.pep
RLPPSRPLQKNILLIETHGWLCMLYHTRSIEAQKSRHRLWTVKSANTI

SEQ ID NO: 212576 - protein, 45 aa, Zea mays
  Clone ID: MRT4577_125471C.1.pep
YTIGDWADFILTAPVLNAYLICLRHSKRRCQLCSKGSGFRCFVSA

SEQ ID NO: 212577 - protein, 40 aa, Zea mays
  unsure (1)..(40): unsure at all Xaa locations
  Clone ID: MRT4577_125472C.1.pep
XTHTTLIYXIYQNSHYLRXFSKFYCPSKHLQPSLNSLKLS

SEQ ID NO: 212578 - protein, 136 aa, Zea mays
  Clone ID: MRT4577_125473C.1.pep
MTSASELFIARRAARGARLSDPDPDPDPHPVALRDQHGLGGRRQRRGCRPRRQLDAAGDVRQHLHTGAPPPRRRGSYTALDYHVAQRVKRQTSLVHYSSSDRAWHHVVLTALCDCSSSASENFVDDAGSDLILHRQ

SEQ ID NO: 212579 - protein, 84 aa, Zea mays
  Clone ID: MRT4577_125474C.1.pep
RSRVTSSWVRGFSSFIGAPKWGFLGRLFLTYRTREILGVTQLKTPCGTSLFCLVENYCLGPCRLPFQKFAHTCLANGTPLFGAF

SEQ ID NO: 212580 - protein, 51 aa, Zea mays
  Clone ID: MRT4577_125475C.1.pep
VPSSTRNLPTPSGFCVFPSPVPMYRSSCPVKWCVCLFVKIHLVPKGQQFLF

SEQ ID NO: 212581 - protein, 108 aa, Zea mays
  Clone ID: MRT4577_125476C.1.pep
MMASINRHPTSSAVEDLDMQPALGQIINIKLVQTGEKEKLMDLLRERLADCGWRDEMKALCTAYASHTGINTVTVDDLIQVITPNGTPSMPESLKAELLQLIGSILMS

SEQ ID NO: 212582 - protein, 75 aa, Zea mays
  unsure (1)..(75): unsure at all Xaa locations
  Clone ID: MRT4577_125477C.1.pep
MFGNIAKIPMIVDLRGSNKNXAHLKGNVVLVLKSVLSLAXTSICTSLLDGDGELFGRGCTCQXISSTGVKRNCGN

SEQ ID NO: 212583 - protein, 163 aa, Zea mays
  Clone ID: MRT4577_125478C.1.pep
AGRRPLLLRRPLLCSALLSSPQRQSATALLSPLLSQAASRCSLAPTAAQPAASQQTILVSTDFVQPYCPTVNQSFKLYLLNQVDEAIGASAHLRPTRPPRRAAGGCVRRNEDLEEEETNLANEDDEDEEYILDDLDVEDEIEGSNSGKMVMIKACGCSWSSYC

SEQ ID NO: 212584 - protein, 68 aa, Zea mays
  Clone ID: MRT4577_125479C.1.pep
THAYAWQHFFILTITWKLNRKREDIKGVIGHALQNCARGSYWPTMHIIDALRTHKEPKSGEHARLGCW

SEQ ID NO: 212585 - protein, 54 aa, Zea mays
  Clone ID: MRT4577_12547C.1.pep
PTRPPTRPEACCFTFFNVKSLTTMHCNYFFMMPFLDYSSTIIELSCSFIAFFWH

SEQ ID NO: 212586 - protein, 66 aa, Zea mays
  Clone ID: MRT4577_125480C.1.pep
MALGGHRSGGEETRTKDEPTARLRSRGEQLNRDASQTETKEEPAPREAKLKEEREDTRPKTGTGQR

SEQ ID NO: 212587 - protein, 120 aa, Zea mays
  Clone ID: MRT4577_125481C.1.pep
CSQRLVSSPTGPCSSEHRSSVIDAVRGRAGTRCHPRASAWCRHPGVMRRHSTHRTYNPSFTSTCAPSPSCLPPIYSTISQNFSMIHELDVFDYSCVGPRDTSSIDDSYVSILLVTHQVYL

SEQ ID NO: 212588 - protein, 52 aa, Zea mays
  Clone ID: MRT4577_125482C.1.pep
FARGSDGDDPERDCEQVLKGWLWHASVQLYPECDLRRCPLPIPAYVGLACPT

SEQ ID NO: 212589 - protein, 253 aa, Zea mays
  Clone ID: MRT4577_125483C.1.pep
MGCSCPPLADAACLALLLLALSLACRHHHGCAAATLSTASRWVVDESGSRVKLACVNWPSHLEPVLAEGLGKRPVGAIAADVAAMGFNCVRFTWPTFLVTDASYSDLTVAQSFQRLNLTESLAGIRVNNPGVVDLKLIDAFKAVVSSLGEHNLMVILDNHLSKPGWCCSNTDGSGFFGDTYFDPDVWVDGLTKMATMFAGVPNVVGMSLRNELRGPRQNVNDWYKYMQRGAEAVHAANPRVLVILSGLSFDND

SEQ ID NO: 212590 - protein, 154 aa, Zea mays
  Clone ID: MRT4577_125484C.1.pep
IFHEFYFHISIRVHVPCIIPSCCMRNLKIFQIHFYLRFLVTAFFDCKKISTVLVQEEQNKVPNLHAPRVLDSSKVSNKNEQRTMIRLMAQRDATKKAARTVPGMEIVTLFVPSHSVFAHRQPTPKRSRLRGGSRASACYGAESHDRGGSRASAC

SEQ ID NO: 212591 - protein, 36 aa, Zea mays
  Clone ID: MRT4577_125485C.1.pep
SPFQKPKDEHIQILGVFTKSMFFIYYHTYTVDKHAK

SEQ ID NO: 212592 - protein, 117 aa, Zea mays
  unsure (1)..(117): unsure at all Xaa locations
  Clone ID: MRT4577_125486C.1.pep
PRVRPRVRPRVRKEWYFFYQKDRKYPTGLRANRATEAGYWKATGKDKEVYXRGRSXVLVGMKKTLVFYRGRAPRGDKTNWVMHEYRLEGQRQAPRRPRVRNRLNRRQRRGGLESFCL

SEQ ID NO: 212593 - protein, 36 aa, Zea mays
  Clone ID: MRT4577_125487C.1.pep
DADDAGRHQHAQVQDEAPNAERVQGRAGVYKGMQIV

SEQ ID NO: 212594 - protein, 388 aa, Zea mays
  unsure (1)..(388): unsure at all Xaa locations
  Clone ID: MRT4577_125488C.1.pep
LTTVIPEIEQLGPAAQEESFVHLGAGGKRERESHGGGPAAAAAGGDERRCRRRPXLPPGFRFHPSDFEIVSFYLTNKVLNTRFTCTAITEADLNKIEPWDLPSKAKMGEKEWYFFYQKDRKYPTGLRANRATEAGYWKATGKDKEVYNAAEGVAVLVGMKKTLVFYRGRAPRGDKTNWVMHEYRLXAAAGSPPASRPQPAQPPPTPRRPXASAYKDEWVVCRVFHKTTGIKKTTTAAPAYQVAMAGAEMDQNQNNIPFPMPMQFSMLPDFSLDPVPPYYPYPNAGAGMPMLPMAAGIGGGAGGLHLNGAALFGNPMAAPQPMSFYHQMGTGTACAGGFDVSAPESRPSSMVSQKDDQANGAEISSMMSVAGPGPATTTTIEMDGVWKY

SEQ ID NO: 212595 - protein, 55 aa, Zea mays
  Clone ID: MRT4577_125489C.1.pep
RVLRTKPACATGTTCYGRRYINSPGRQLKARAVEKPWGARTHRLLMLSPSAPLGL

SEQ ID NO: 212596 - protein, 46 aa, Zea mays
  Clone ID: MRT4577_12548C.1.pep
FLFPLQDLPRTFPGHPALDEDGRNALRRLLTAYARHNPSVGYCQVN

SEQ ID NO: 212597 - protein, 71 aa, Zea mays
  Clone ID: MRT4577_125490C.1.pep
MADQLTEEQIAEFKDAFSLFDKDGDGTITTKELGTVMRSLGQNPTEAALQDMINEVDADGNGTIDFPEFLT

SEQ ID NO: 212598 - protein, 56 aa, Zea mays
  Clone ID: MRT4577_125491C.1.pep
VWTGGVGFVSKKIIQTHCPGPPPEIQVFQCGPPPMKKPRAGPLGALGYPKEIQFQF

SEQ ID NO: 212599 - protein, 60 aa, Zea mays
  Clone ID: MRT4577_125492C.1.pep
TSMSPTHLELPIMVCLPFPCCALARLLLLPVSSSPPLFLLHNPPFIMRKSTPSCSPPLLS

SEQ ID NO: 212600 - protein, 36 aa, Zea mays
  Clone ID: MRT4577_125493C.1.pep
ISIERGYHGVFLTSYAAKPTTSLWECQFTLMNTASQ

SEQ ID NO: 212601 - protein, 77 aa, Zea mays
  unsure (1)..(77): unsure at all Xaa locations
  Clone ID: MRT4577_125494C.1.pep
YGAGIXPGVYDIHSPRIPSTEEIADRVNKMLAVLDTNILWVNPDCGLKTRKYAEVKPALTNMVSAAKLIRTQLASAK

SEQ ID NO: 212602 - protein, 62 aa, Zea mays
  Clone ID: MRT4577_125495C.1.pep
LAPTQLFEFWPTPTQHIELLLPIHSQNYGLVDRTKKGSCSILHREDQLTRNLTVKKLINIPG

SEQ ID NO: 212603 - protein, 95 aa, Zea mays
  Clone ID: MRT4577_125496C.1.pep
TDGGRRSHQQSTEAAANWSPGGEDSLGEYLPYLSGNVPACRLPRDNPTLVGVAAHRQRCRLLISIMAVFDWWSRITPLVSAVPPINLVFFMAQQM

SEQ ID NO: 212604 - protein, 98 aa, Zea mays
  Clone ID: MRT4577_125497C.1.pep
SRRRPAAIGACPRVVRRGSPRRVRSSSQSRRQTRWTARSRRRRLCPGSISRRLLVSRGSGVLFRRSALIACPARRRHCRLALAGPLAFAGRPDAMAYA

SEQ ID NO: 212605 - protein, 372 aa, Zea mays
  Clone ID: MRT4577_125498C.1.pep
MSGKAGKTTKFVSLLEEMVSEGCVLNLIAYNTPRVPLGLNKMVDKAIFMLSKMIESDCRPNQFTYSIMLDVLSTGGQLHRLNEILDICSGCLNRPVYSYLIKALCKSGHASEAHSVFCRMWNSHEKGDRYAFVSMLEALCNAEKTTEAIDLLHMMPEKGITTDVGMYNMIFSALGKLKQVSFMSSLYDTMRANGVVPDVFTYNIMISSFGRVGLVDKASELFEEMEDGSCKPDVVTYNSMINCLGKNGDLDEAHMLFKDMQEKGYDPDVFTYSILIECFGKSNKVDMACSLFDEMIAQGCIPNIVTYNILLDCLERRGKTTEAHKFYETLKQQGLTPDSITYSILERLGSRSQRTVRIRKPSRNTGWVISPV

SEQ ID NO: 212606 - protein, 65 aa, Zea mays
  unsure (1)..(65): unsure at all Xaa locations
  Clone ID: MRT4577_125499C.1.pep
IQMKQDIFTTAVTLQISKDSDKTGEVIRFLYYFIFKKRMSPTSAWLVFPQIVVDPIYDHXXNTRA

SEQ ID NO: 212607 - protein, 112 aa, Zea mays
  Clone ID: MRT4577_12549C.1.pep
MGEKQSGTAQHRLRKTGAESHSHPMASSRRSSGLSSGAAALGIALLVLAASAGNAGASYYGEMRRQFLAQQNAARASLGLAPLAWDERVAAYARAYAESRRGDCALAHSAGP

SEQ ID NO: 212608 - protein, 137 aa, Zea mays
  unsure (1)..(137): unsure at all Xaa locations
  Clone ID: MRT4577_1254C.1.pep
DPKSTSRSIPVYQLVRSTIPTRASPRVPPLSIQARRCGGPARRGTRRRRRQTGGPAAARAPRCASQPPAPRRARPPRCRSRSPAPTRASGRPRRRRAPRRRRAPRAGRTARXNGSAQGRSPXCRRPRGRWQVLRRGR

SEQ ID NO: 212609 - protein, 57 aa, Zea mays
  Clone ID: MRT4577_125500C.1.pep
GFALGISLPAAAVDGQCTDDSTYCLLQSGLNKTRIPYKMLTLWLLKTDQGHPMLVVL

SEQ ID NO: 212610 - protein, 131 aa, Zea mays
  unsure (1)..(131): unsure at all Xaa locations
  Clone ID: MRT4577_125501C.1.pep
MRGEGGGGHDGRXEERLTHAEIPTRFXQSLRAXLRCRLVKTYHQLRENGCENCLSLEMDREHDNVLNCTTLNXTVIIFLIDPISSCAAHXVRIGSNIPVGYTLAVSEXELAQEYQGICEDNTPHIVPSNTV

SEQ ID NO: 212611 - protein, 58 aa, Zea mays
  Clone ID: MRT4577_125502C.1.pep
LSPNAIIPQVLPPHTQMGFEHLTMQAIMQQLALEDSILQNPIVQLQHNFLTHITIHAI

SEQ ID NO: 212612 - protein, 54 aa, Zea mays
  Clone ID: MRT4577_125503C.1.pep
SISRLISAYIIHKLDYIIPEGDETNRVNTFLRHCKSIKITNFKISQAYSGEQRQ

SEQ ID NO: 212613 - protein, 152 aa, Zea mays
  Clone ID: MRT4577_125504C.1.pep
MAPKVAVAKKGDAKAQAAKVAKAVKSGSIKKTAKKIRTSVTFHRPKTLSKARDPKYPRISTPGRNKLDQYQILKYPLTTESAMKKIEDNNTLVFIVDLKADKKKIKAAVKKMYDIQAKKVNTLIRPDGKKKAYVKLTPDYDALDVANKIGII

SEQ ID NO: 212614 - protein, 77 aa, Zea mays
  Clone ID: MRT4577_125505C.1.pep
CFYFIICSCCIFFFIIFFFFFFYQIAFIQTCSDKEASHRCWMEPSSERKDMTVTSIHAGRNPDVWEDASADCVARAG

SEQ ID NO: 212615 - protein, 85 aa, Zea mays
  Clone ID: MRT4577_125506C.1.pep
LVEDRESLQQVQEENRSSDYELTAKKKEQSAFLKKITLSEKSITKKKLELDKKQPELLKLKEQISRLKSKIKSCKKEIDKKKDDH

SEQ ID NO: 212616 - protein, 135 aa, Zea mays
  unsure (1)..(135): unsure at all Xaa locations
  Clone ID: MRT4577_125507C.1.pep
MGLMKKHPSIIPFMVYITNEEKHMERFAVRAKYMTLDPAKNRYIKYIRNIRAIQEYLCNRADKHLVPKINNTNVDQSVAAIHATVFSCLRRRAAGEQLYSXSTTATVFVLRSYSCSPAANTLGSTETFSMNPKKV

SEQ ID NO: 212617 - protein, 79 aa, Zea mays
  unsure (1)..(79): unsure at all Xaa locations
  Clone ID: MRT4577_125508C.1.pep
MAAAVAMMVFGGRTALVEAGLLCAEADIAAAQNEKNVQSTYHLYNQAQNAXYLDXRAYCSTYDAXKLLTGEXKHGWTAL

SEQ ID NO: 212618 - protein, 72 aa, Zea mays
  Clone ID: MRT4577_125509C.1.pep
TTHASAHETDTTTIGYIPTDCGTSGGFAVEYKDKKITEDEYISAIKEIISKDCQIQEELDIDVLCTWRAKET

SEQ ID NO: 212619 - protein, 51 aa, Zea mays
  Clone ID: MRT4577_12550C.1.pep
PVGFRVDPARDAGDRRPSPGLACHFSRRGMRNASRHERKELDGRNITVNEA

SEQ ID NO: 212620 - protein, 71 aa, Zea mays
  Clone ID: MRT4577_125510C.1.pep
PGISEYFVLYSVVLAIVVVVVDVVVVLRLVADAADVHITVGSGCVLVRNVSVVSFVFRDYANKLGCCNSLR

SEQ ID NO: 212621 - protein, 97 aa, Zea mays
  Clone ID: MRT4577_125511C.1.pep
HRYFPCNVFQGEHTHLYKCPNRPGSWCGLRRFTGLDLHEHNLAWWTSGPCWPSLLVVPCLDRRCGTVGWCRHGLFNFLENLIYSCEYICQLYPNKHV

SEQ ID NO: 212622 - protein, 224 aa, Zea mays
  unsure (1)..(224): unsure at all Xaa locations
  Clone ID: MRT4577_125512C.1.pep
LLLRGRALPRGAGTVLLTLHAQCRRLLRPSHSTTESLPLVAPLVAHSTNRRRRDGRILGSGWNQGDAKRLRSGTDRRGEQRRNAQEGRARQGRGRRVARKKKEAVRTAEPQERKPRTTRCAHNRNATQTQEGEGGEEAEQAGDRDEAPPFLLSLPLSLSLSLSLPRGWVSQMPGPAKLPPFLCDCLGDLGSPPTFFSLSVSRAGFLLSAXGGQVRVVTAWDEGG

SEQ ID NO: 212623 - protein, 326 aa, Zea mays
  Clone ID: MRT4577_125513C.1.pep
MFRRALLSSVSPLHGTVRIPSPSYSPIQALLAQWSRYASVVSSSAPPPPPPPPSPPQGPSRSSGGGPTSSSLNPAEVAKFASIAETWWDSSGPFKPLHVMNPTRLSFIRSTLCRHFRRDPNSSKPLEGLKVIDVGCGGGILSEPLARMGATVTAIDAVDKNIKIASIHAASDPTTASIEYCCATAEGLVKEKRLFDAVISLEVIEHVANPLEFCESLSALTIPNGATVISTINRSMRAYATAIVAAEYILRWLPRGTHEWSKLVTPEELVLMLQKASVSVEEMAGFVYNPLSGEWSLSDDISVNYIAFGVKKGEASSTNGRDASLS

SEQ ID NO: 212624 - protein, 68 aa, Zea mays
  Clone ID: MRT4577_125514C.1.pep
ACGALESGSRYSLTSPPRPSQVSYSAFSLDNEHPISAYAECSSSNCPCGCIAGYTCIAQPCVGWVPAT

SEQ ID NO: 212625 - protein, 43 aa, Zea mays
  unsure (1)..(43): unsure at all Xaa locations
  Clone ID: MRT4577_125515C.1.pep
GEKMDNTMLGAGFSIVLIAATVNPSFSLYDGLGCGSVGVEVXK

SEQ ID NO: 212626 - protein, 78 aa, Zea mays
  Clone ID: MRT4577_125516C.1.pep
CSLKFAVPLFIAGAKATGSAPAIDKVKLVPPALNFKMEGGNWASLSLPLSCYKKERKLGPALLKQEFCPLRPEMVSST

SEQ ID NO: 212627 - protein, 120 aa, Zea mays
  unsure (1)..(120): unsure at all Xaa locations
  Clone ID: MRT4577_125517C.1.pep
SDSFSHDDDDSRPRDKVQRRVAQNREAARKSRLRKKAYIRNLETSRVKLAQLEQELIMARRQXTHGAYGVGGGVAPPAAPVDPRVAAFELEYAHWVEEQSRQATELRAALQSHAPDVQLR

SEQ ID NO: 212628 - protein, 205 aa, Zea mays
  unsure (1)..(205): unsure at all Xaa locations
  Clone ID: MRT4577_125518C.1.pep
MQEAPPSSDSFSHDDDDARPRDKVQRRLAQNREVARKSLLRNQAYIRNLETSRVKLAQLEQELIMARRQQVRXTLGEGIDRHADGTIQAAPLAAAATADQGGCSXAYGVGGGVAPPAAPVDPRVAAFELEYAHWVEEQSRQATELRAALQSHAPDVQLRVLVDAALAHYGALFQAKARAARSDAFFVLSGVWRSPAERFFLWIAG

SEQ ID NO: 212629 - protein, 219 aa, Zea mays
  unsure (1)..(219): unsure at all Xaa locations
  Clone ID: MRT4577_125519C.1.pep
ACYYTPLKPPPKKIXERSGLCTYIVRVSPHLNISMDMSRMDLESWYRSFLPPRMDRSPRSTSPFIHTYKEAILGFAVDLTKDDAEYVKSKDGVLMVYKDILLPLLTTHTPDFLSLRPNGGAWSSLGMGEGSIIGLLDTGIDSAHSSFDDEGMSAPPSRWRGSCKFATSGGHCNKKLIGARSFIGGPNNPEXHWDDVGHGTHTASTAXAGRFVQGASVFG

SEQ ID NO: 212630 - protein, 134 aa, Zea mays
  unsure (1)..(134): unsure at all Xaa locations
  Clone ID: MRT4577_12551C.1.pep
MLVAMPTGYLDASLSSLAHFRSLDQSEKAWVSFHFGXAFTRWYAQSQMSVQYLVHVAGPASCRWGSPSAPVAPKAGAAPPPPKSRPGFIGIKRRERHVLESKGRIRAPAARNVAKALGQVWALHTVNVRAPATR

SEQ ID NO: 212631 - protein, 88 aa, Zea mays
  Clone ID: MRT4577_125520C.1.pep
WDPRGRPGDVSAPSLDAPSLCPKTLRACRGQPLLLTLETDKQCAAAAELETRGMPRPPSGNYQIYHGIAVQLLPQPLDQERNAEPQYG

SEQ ID NO: 212632 - protein, 163 aa, Zea mays
  Clone ID: MRT4577_125521C.1.pep
MPLYDCMLLLKTTVTREVLAELVTRVARRACQRNGVVTDVKSFGKVSLAYGIRKLDGRHFQGHLMQMTMMVPPSFPQELHYLNKEDRLLRWLVVKHRDTVYGLEFLNADGGRDELRSFSHGHTKGDYDIEIDSDDEDSDDSDDEEYAIEEEEEEEAANDEEKK

SEQ ID NO: 212633 - protein, 72 aa, Zea mays
  Clone ID: MRT4577_125522C.1.pep
SPPGKTLAGPPAECAIFLPKFSKGDPVGVKPAFGHGFHARCIKNWLSKGPPSFCPTFRAPAVKSNLHANKLL

SEQ ID NO: 212634 - protein, 68 aa, Zea mays
  Clone ID: MRT4577_125523C.1.pep
GAKGRALITHTASCCHQSDSYPGVPCFCKWHSDLCGHLSSISTLRIFADMCHDVAMTIVIKEDLLLFH

SEQ ID NO: 212635 - protein, 67 aa, Zea mays
  Clone ID: MRT4577_125524C.1.pep
IKHLFFPLGRFVFPLKTPPHRCVLVVPPPVEVTPPGFPNEGVTGFKNPEFGAYVPKKVKPSCCLVSL

SEQ ID NO: 212636 - protein, 151 aa, Zea mays
  unsure (1)..(151): unsure at all Xaa locations
  Clone ID: MRT4577_125525C.1.pep
AITAGVVPLSXLLLQQLEDLLHQXPSGHLWEHNISAHHLQQLVLGNLADYSEHQKRVGFDQLAAWNSXAAYAAQRLRCKQLAACLPXSKLLPFNQQAALNSVAYQQQQQLLPFMQLADVSNAAFXTQQQLLAFYLLAVPNAGTLLQLQQLL

SEQ ID NO: 212637 - protein, 63 aa, Zea mays
  Clone ID: MRT4577_125526C.1.pep
ASAALKLSSGLKARCMYMTPVLRRPRRWRARRWRARRRPKRRVHLSIMCVLDLTCSSHDIYKP

SEQ ID NO: 212638 - protein, 116 aa, Zea mays
  unsure (1)..(116): unsure at all Xaa locations
  Clone ID: MRT4577_125527C.1.pep
SHLPNPIREFSLLCRLALSVEKTSSGREYKVKDLSQADFGRLKIELAEDEMPGLMACRAEFXPWGGVDGFFFSGSFHMTIQTVVLIETLTALGANVRWRSCNIFSIHHHPFPATSR

SEQ ID NO: 212639 - protein, 72 aa, Zea mays
  Clone ID: MRT4577_125528C.1.pep
VRHLMLGSPFLKFQQAYRCTVALVVPFSHAGLAGGVPALRVLGGELGSSTRYVLARSPSSWWAWALFLSIAP

SEQ ID NO: 212640 - protein, 64 aa, Zea mays
  Clone ID: MRT4577_125529C.1.pep
PRDRVYIDWRARLSLRGRTDVPALSSGTLGSSSQYNRDDVIPVCLSSYRSIQRTYDTINCPKST

SEQ ID NO: 212641 - protein, 80 aa, Zea mays
  Clone ID: MRT4577_12552C.1.pep
PLILPIVPYPCPVVEQGVRGEEEGAVVVLWRRRWRARPGEVRLRAVVGPCRRRRCSAAGAELVSFQDSIGCRLGGNCLLS

SEQ ID NO: 212642 - protein, 81 aa, Zea mays
  Clone ID: MRT4577_125530C.1.pep
IILGGMPDKICMVISEVWFVGSVGPLDVYDGPKKKKKKKAKKKACASRFFFFFFFFEINLNQYIEISPGIHAGMRAPFWSA

SEQ ID NO: 212643 - protein, 118 aa, Zea mays
  Clone ID: MRT4577_125531C.1.pep
MKFYSHSCAYDVFCRWLVLDALHVSEAFSEHYSITERDTAEAAMQDTAQRALSQYCSLFSGVADGLAPKYYTHRSTGSAGGVIVSPVGEGNPRLNSIVNLVTMLNTELDHALDELGKF

SEQ ID NO: 212644 - protein, 62 aa, Zea mays
  Clone ID: MRT4577_125532C.1.pep
RPNRQDIRLPRTTLRLDVHSYTVPHEPDRNRGRDQPTKRTQIEQRDRCHTYRVTDDGLRTPR

SEQ ID NO: 212645 - protein, 137 aa, Zea mays
  unsure (1)..(137): unsure at all Xaa locations
  Clone ID: MRT4577_125533C.1.pep
QDKDINNADDIGIPVKAILTADEYTGTIGKRLSSTNGHKLHDNRRALRELLLCCPAVLPHIRAVILSNDTLNHKTNDGKXPFVDAPQEGGALPAIYADKAHIAIPPTANATTPPPPAPPRYRPPPPTPPPRTPPPPP

SEQ ID NO: 212646 - protein, 82 aa, Zea mays
  Clone ID: MRT4577_125534C.1.pep
HHHLVHLSFPCFPSLVWNVNIYSAGSSVLQSSSSYIILQLLMSSEPAYSMIYKRRRSGPLHGLRILLSKRTAYSYQEGTNNL

SEQ ID NO: 212647 - protein, 129 aa, Zea mays
  unsure (1)..(129): unsure at all Xaa locations
  Clone ID: MRT4577_125535C.1.pep
LDGVTPRRLAESRPFYLYKKPQILRNCAAXNAMLSXLRSIIVYAVRSNNKLTVLPVLRELACDSVLVSDNKLRLSPXGVMPSPGRSIFNGNEKTLEDLMLCADSAVFVNVDSEYXDLKNIVTAARATGM

SEQ ID NO: 212648 - protein, 120 aa, Zea mays
  unsure (1)..(120): unsure at all Xaa locations
  Clone ID: MRT4577_125536C.1.pep
WPWETCFRVCALYAAPVCRKDRLLRLAASCPNCCCLLSEWRAPRWTIYLSDGLLDRSEVPEYXTGQVPGDYGYDPFGLGNKPEDFAKYQAYELIHARWAMLGGAGAVIPKGCNKFGANCG

SEQ ID NO: 212649 - protein, 244 aa, Zea mays
  Clone ID: MRT4577_125537C.1.pep
MPHPTDPEAGSEQKAPAVPYLAAAAPAPVKKKRNLPGTPDPDAEVIALSPGTLLATNRFVCEVCGKGFQRDQNLQLHRLGHNLPWRLRQRGPGAPPPRRRVYVCPEPACVHHSPARALGDLTGIKKHFCRKHGEKRWVGPPSAPRYAPAPEPLRQQPPPAPHHAEPRNEPDTNATEAVQFAPPPPPPPPPPQLQLPVLSQASVSAAANVSASSSSSSVAGTSQSLLAGMSRALVDGVSAAVRGP

SEQ ID NO: 212650 - protein, 81 aa, Zea mays
  unsure (1)..(81): unsure at all Xaa locations
  Clone ID: MRT4577_125538C.1.pep
CCTSVELPTPTATPSPSPPXDFRPVCHLLCSEPMVRRPSPCLTAGSAAPCSCNILGSAVPCSLTEPLLLVSPMASTWGLAP

SEQ ID NO: 212651 - protein, 99 aa, Zea mays
  Clone ID: MRT4577_125539C.1.pep
GKVFWLTPPPWASPCHPKDCGLFRETPGPPLGSKGIDPPDMVGDRASNVPLKDFPCFKRARLGIFKPPPGWVFFKRGGKKKKKKKPQPKKKKKKKKKRE

SEQ ID NO: 212652 - protein, 176 aa, Zea mays
  unsure (1)..(176): unsure at all Xaa locations
  Clone ID: MRT4577_12553C.1.pep
ALLAVASGAAEPGPIRRLALMVACNVAACAEGRNALMDAGGVASVSGILLSPXTTPPTAAXGTADLEEWCLSAMYAMSRGSLRFRGLALASGADRALRRVXRRGRRRXREIARKTLRAMRSDLDEDGGEYNDLTGSSAECGDGEDCGGSIVSDGLMSFRRRQRELGVSSCGNTAEF

SEQ ID NO: 212653 - protein, 88 aa, Zea mays
  Clone ID: MRT4577_125540C.1.pep
ATAASSGCRCLSSDHNLCGLVWDGAPICGSWILAVVCDLNRVSEGLEQLFNTFQFVNCNEMEFGPDATSLLTTALTRDAMIGPKRSFF

SEQ ID NO: 212654 - protein, 73 aa, Zea mays
  unsure (1)..(73): unsure at all Xaa locations
  Clone ID: MRT4577_125541C.1.pep
PNPNNKNSQLEPKKHYLGGLTQKIVKAFANNPNFGFNPSGNRVKTGLTFNNPRCVPALGYDNGXHAPGKCPGC

SEQ ID NO: 212655 - protein, 64 aa, Zea mays
  Clone ID: MRT4577_125542C.1.pep
RRQSTVAPKMMPNMMTAPQCYSGSISHIMQQQQLPFMFRPHSHVDKHPFPYKLFLSKSVVHVRS

SEQ ID NO: 212656 - protein, 74 aa, Zea mays
  Clone ID: MRT4577_125543C.1.pep
LRSIRFIFRLRSRCMPSHSFFSHPPSQGSRVNRCSYGINYFLLGYIGPDSFVVFNNNNPVVEDWKVLIVKWLSL

SEQ ID NO: 212657 - protein, 97 aa, Zea mays
  Clone ID: MRT4577_125544C.1.pep
LFTPACPKVFYSAPHSDMGAPRVLCIPPAPGSRIISKLPLSKDPPVGGKKFYFFIFFSIFMHILFIFACCVFSFFVFLKKFFFLFVLIKKKIACTRR

SEQ ID NO: 212658 - protein, 334 aa, Zea mays
  unsure (1)..(334): unsure at all Xaa locations
  Clone ID: MRT4577_125545C.1.pep
XXSGSVFFLSQXDIVTTQXLRLPALQVLLRMLPNYYDHVRTYENTLITKFFGLHRVKPSSGQKFRFVVMGNMFCTELRIHRRFDLKGSSLGRSTDKIEIDENTTLKDLDLNYSFYLEPSWREALLKQIETDSDFLRTQRIMDYSLLLGVHYRAPQHLRTRASYHRSMAADRLTVVSEEDAQEEDALSHPEGLVLVQSSGENSVVVXPHIRGSRVRASAAGFGDVRLSLPHSVPLPIQIRWTKPVATELISVRKIKQXIRNFYEVVCSRCVVAIVQPSGYLEKIEHVVKSAEYDSGVAWAVSAPCHKERFVITMLTVGTEKKLKILLYLSEVAEN

SEQ ID NO: 212659 - protein, 96 aa, Zea mays
  Clone ID: MRT4577_125546C.1.pep
LKLEEDKNQLSKGLDPWSNPTAATSTLHYLLQEKERAQAQEQLQIYHQQGFSYLQHHGRQQQQQQQQQPPRAAGAGADGVSSGESTPVDALATAFV

SEQ ID NO: 212660 - protein, 103 aa, Zea mays
  Clone ID: MRT4577_125547C.1.pep
GTKLLGSFLGGKTGGSTRSWLCVRPTPFQGSVPKGFLRNCLKYLGPVCPVKGLAFKGFMFSPVSETEHLFSVPETSPVHPMNGDRPAKISFFFPQKKKKHFYE

SEQ ID NO: 212661 - protein, 65 aa, Zea mays
  Clone ID: MRT4577_125548C.1.pep
MSVSHSSRLNKGVREQYMKLPQGGMAQVTYVWIDGTGEGVRCKTRTLDQEPKTIDEIPEWNFDGS

SEQ ID NO: 212662 - protein, 66 aa, Zea mays
  Clone ID: MRT4577_125549C.1.pep
ALTSTYTNTNCIEYLSTRPNKCRPCTKPPSEAVDVLCTPYQWRCAIATYELMTMILFQRLHGNVMI

SEQ ID NO: 212663 - protein, 84 aa, Zea mays
  Clone ID: MRT4577_12554C.1.pep
SMVYNTSLGDLSSNINEALASSRCARWRTLEIELLEHHLVERSPAAVSHLPKTLLLDVRNMCKHNNLPTRCRCMRQTHRQSAVN

SEQ ID NO: 212664 - protein, 85 aa, Zea mays
  Clone ID: MRT4577_125550C.1.pep
TFYMALVIRHKLLSWRPSLYMIHGLRRSLTTPFNPCAQYTCSPANEHGVHACSALHTTTHLHDLTCALITGCSPKLRYARCAFLH

SEQ ID NO: 212665 - protein, 77 aa, Zea mays
  Clone ID: MRT4577_125551C.1.pep
DPRGRLNTPFDLNLILRQKNTTRGGFFRSGAHIHQLIQINNMGSNGKLLEDPVDNLNYSFEVVIHNRTPLNFMTLIL

SEQ ID NO: 212666 - protein, 122 aa, Zea mays
  Clone ID: MRT4577_125552C.1.pep
MKFSLAALAVAISSAAATITVIEPWSQTTWTAGSSGLVHWSYPEGAGQTCEIHLLTGQATNATVVANLTANGHTVPCDYTKATFLPLPSYTPGQYFVRVVPLGSAPESYGYSNYFNFVAASS

SEQ ID NO: 212667 - protein, 213 aa, Zea mays
  Clone ID: MRT4577_125553C.1.pep
MAVGKNKRLSKGKKGLKKKTDTFAKKDWYNVKAPGTFQVRDVGKTLVNRTSGLKNANDALKGRIFEVSLADLQKDEDHAFRKVKLRVDEVQGKNCLTNFHGLDFTSDKLRSLVRKWQSLIEANVVVKTTDDYLVRLFAIAFTKRRPNQIKKTTYAQSSQIRQIRKKMTEIMTREASSCSLAQLTQKLIPEVIGREIEKATQGIYPLQNIHVRK

SEQ ID NO: 212668 - protein, 78 aa, Zea mays
  Clone ID: MRT4577_125554C.1.pep
YIQLLKRFRPGSICAYCIWVNICNAPFKWKANRFFITIIIPSSTGVHIHFFCLLNSFFLHSIHFPYYSFVISLFESFY

SEQ ID NO: 212669 - protein, 353 aa, Zea mays
  unsure (1)..(353): unsure at all Xaa locations
  Clone ID: MRT4577_125555C.1.pep
MHTSSSHMDDEWRPVMXMLVFNLISAVMTALVKKALQQGLNALVLITLRQLVATLFLAPIAYFKERNTRPKLTLEIFVYHFFSAALGASLSQYSFFYGLKLTTATFAITFANMAPVLTFLIAIALRVESLNMKSKSGSAKMVGTLMSLGGVLLLSLYKGMAVTHHSSGTPPPSQVQLGNDGDRKVWMLGTVALLANCLVFSLWLLLQSRLTNKYPALYSSTAFMFFISTLQTGSLTVTVEWHHASVWIVTKKLEMVTILYSGIMASAAGFLIMTWCVHKRGPVFTAAFIPIVQIMVAIIDFFFLHEQLYLGRRRMQWRHALQVRPNMTKRPASTSSEIISSQHHRVVANTDMY

SEQ ID NO: 212670 - protein, 186 aa, Zea mays
  unsure (1)..(186): unsure at all Xaa locations
  Clone ID: MRT4577_125556C.1.pep
MDDEWRPVMAMLVFNLISAVMTALVKKALQQGLNALVLITLRQLVATLFLAPIAYFKERNTRPKLTLEIFVYHFFSAALGASLSQYSFFYGLKLTTATFAITFANMAPVLTFLIAIALRVXAKMVGTLMSLGGVLLLSLYKGMAVTHHSSGTPPFQVQLGNDGRKVWMLGTVALLANCLVFFLWLL

SEQ ID NO: 212671 - protein, 346 aa, Zea mays
  Clone ID: MRT4577_125557C.1.pep
MDDEWRPVMAMLVFNLISAVMTALVKKALQQGLNALVLITLRQLVATLFLAPIAYFKERNTRPKLTLEIFVYHFFSAALGASLSQYSFFYGLKLTTATFAITFANMAPVLTFLIAIALRVESLNMKSKSGSAKMVGTLMSLGGVLLLSLYKGMAVTHHSSGTPPPSQVQLGNDGDRKVWMLGTVALLANCLVFSLWLLLQSRLTNKYPALYSSTAFMFFISTLQTGSLTVTVEWHHASVWIVTKKLEMVTILYSGIMASAAGFLIMTWCVHKRGPVFTAAFIPIVQIMVAIIDFFFLHEQLYLGSVLGSALMIFGLYLLLWGKKKDAMAACSAGTTKHDEEASINK

SEQ ID NO: 212672 - protein, 49 aa, Zea mays
  Clone ID: MRT4577_125558C.1.pep
TPPPLHTGHVSDPGSPKLQTGAPNMVPESPIAPIFDTIKLEHVLENCLA

SEQ ID NO: 212673 - protein, 67 aa, Zea mays
  Clone ID: MRT4577_125559C.1.pep
KNLWEFALLKGPLIKKGHPVQTGSFFFTNSFPAFELSLFIISRGKLIIFLNCEGILLPGGEDYFLLK

SEQ ID NO: 212674 - protein, 68 aa, Zea mays
  Clone ID: MRT4577_12555C.1.pep
GTGWFSSKFCLRQTAPTPVQAVGNTGLYLWGPKLVASFLGSFDPMGFLVSITVLRAVFVAFRLTPSRV

SEQ ID NO: 212675 - protein, 142 aa, Zea mays
  unsure (1)..(142): unsure at all Xaa locations
  Clone ID: MRT4577_125560C.1.pep
CPVLVFSPCITLQSKSSLVNQREFYLIAICAISCGCILTVILDVGCHIRNYALQVLKILLLLVTVIWSSECTHNSSQQQQSDPNFQDIPTQSWYPTSVVGLSSSPATPTSSSSSPHQRASKYLQSSSRGQPSXAEAAEIIAH

SEQ ID NO: 212676 - protein, 88 aa, Zea mays
  Clone ID: MRT4577_125561C.1.pep
NKTTTKGLLMPECKPAILDQQEAWNWHTHHACDRTAILLPRASIACAGAMIRTEMSGDGPLGTRGQQRARGPFRQLRVDSLHKLHHLA

SEQ ID NO: 212677 - protein, 115 aa, Zea mays
  Clone ID: MRT4577_125562C.1.pep
PFGPGKVGAQKLPFCGGLGFKRFIGPPINALRPFLSNGLFFPGKKVSVLAPPPGPRLFSRHKKWATFLVQLPVRGSSKRLGFLRTKPHGGGDPFQFRGKNSARTEPTNFPLKGFE

SEQ ID NO: 212678 - protein, 166 aa, Zea mays
  Clone ID: MRT4577_125563C.1.pep
HAFAADECDGDEAGALVAAACTGTGTDTGSTRDAPAVRSPRAAWALFVEESRRLWAIGAPIALNIICLYGTNSTTQIFAGHIGNLELSAVAVGLSVVSNFSFGFLLGMGSALETLCGQAFGAGQVSMLGVYMQRSWIILAASAELLTPLYVYAAPLLRLLGQDPAM

SEQ ID NO: 212679 - protein, 86 aa, Zea mays
  unsure (1)..(86): unsure at all Xaa locations
  Clone ID: MRT4577_125564C.1.pep
RLFFLFFLLGAGHKGGGPNXQHGPQGKIHGGGGQKYRKGYRGGLGRLVFYLLQGDILMGTHRPLGKTRKDPQIQPNGGEHKKNRGD

SEQ ID NO: 212680 - protein, 72 aa, Zea mays
  Clone ID: MRT4577_125565C.1.pep
SPGLCLFKCLKKAYYVVGWGKKRALQEPREVESSKSCFVKDMFQFLGVQKKNKKKKQKKKQKKRGRPPTRKL

SEQ ID NO: 212681 - protein, 192 aa, Zea mays
  unsure (1)..(192): unsure at all Xaa locations
  Clone ID: MRT4577_125566C.1.pep
MRSDERHHLSPLRFKQWPHEGEKKMVTLASSDGEEVEEQEARAMHAHTIRHMIEDDCTDNAIPLPNAYSSILFEVIXDCIHCVHADAAAAAVSKDESDDEGVASYNMTDASGEDLXNSDAEFVMVNHTTLXDLIVSAHYMNMNALLDLICLTDADMITGRTPXETREIFLIQKGFCPEDEEEIRMKNHRVCE

SEQ ID NO: 212682 - protein, 51 aa, Zea mays
  Clone ID: MRT4577_125567C.1.pep
MAPPFFFLLRSNFLFSTLQYWILLSMFASCWCLCYSYFYSKLKICFFSHAS

SEQ ID NO: 212683 - protein, 110 aa, Zea mays
  unsure (1)..(110): unsure at all Xaa locations
  Clone ID: MRT4577_125568C.1.pep
SFIFLIPKPWGLVLGVLALMVLISMVLGTQNRRCSFGQQQXHEQQHHPQQHHPQKQQHQPPPQHHQQQQHQQQQVHMQPQKHQQQQEVHVQQQQQQPQHQQQQTQQQHQQ

SEQ ID NO: 212684 - protein, 73 aa, Zea mays
  Clone ID: MRT4577_125569C.1.pep
GRGGAKAPGETLPLGTISLGLGPLIQFFAWAQGAGPKIKRAGGGGLLLPRAVPLGAPCNLCEILPLFFLEFGI

SEQ ID NO: 212685 - protein, 63 aa, Zea mays
  Clone ID: MRT4577_12556C.1.pep
SLLRKISFQQSRSFLLFCTPGRDLCGQPAFFLWLGRYSAGRSSQCLLEEYLCAFRKNSHCLLI

SEQ ID NO: 212686 - protein, 296 aa, Zea mays
  unsure (1)..(296): unsure at all Xaa locations
  Clone ID: MRT4577_125570C.1.pep
HWVPRGRPGSLVTPLPPHTCFDTSMDNSKLRLREDRQHQTSASDQDRVSNWLRDASLQEHDDVSEIGDSAPREPATPPPGRSLLVQYCEEVSPTNTNFTSDWASVFDEPDTQCDAWIEDPFGNDVPDASPTHEELHNSQTKVMRSSARSDLTVLNTGRSVAASYDSTEVAETLGEEGANILAEAATAPIDPNKPRITQINSCTQCTVADLKCSRSVPSCSRCNRKGQGSLCLLQRARYRGELDSDLPCSSTVLLXLKDDDESIWQQKVNLSKELEDLWRAQEDRKDWVLASLDVPR

SEQ ID NO: 212687 - protein, 116 aa, Zea mays
  Clone ID: MRT4577_125571C.1.pep
ASALPLPPRGDELVFRPLEHLQPVKYSRPGLPLLGFGEEILDNALTKAEKNKINLHLVAAEEALALSIWTMATVCRSLSLESVLGLFTGVLLEKQIVVICPNLGVLSAILLSIIPM

SEQ ID NO: 212688 - protein, 84 aa, Zea mays
  Clone ID: MRT4577_125572C.1.pep
FTWGLRSSALAMFDQWWLLLHQEQGIMTGNRIVGGIWDGSIQTLSIKNGRLLPYNMNLERTQIKRYGGQYRSNKWTEISVMTDG

SEQ ID NO: 212689 - protein, 246 aa, Zea mays
  unsure (1)..(246): unsure at all Xaa locations
  Clone ID: MRT4577_125573C.1.pep
PPPPSLHKWPLPLALPPCRSRPRKSYPPAPAPAPXPAAAAPSPPPSPRXPLRRRSSPCSTSPGRCCCSCSPRPRSPPXPAPLPPPPRXAPPPPALAAPPPSSPPPTEEKNQQQQQEQAPEAACPPPPPPPPPEPEPERGAVFPELLEFASWAAKGRALEVIHEEFEAEWGLPEEMGLPWDSDSDSDPDADSGSDDGYVRGGDADDGMIEIELEEDSLIEIDISRCAVSVVTDWMDRVSSPPFFFPP

SEQ ID NO: 212690 - protein, 165 aa, Zea mays
  unsure (1)..(165): unsure at all Xaa locations
  Clone ID: MRT4577_125574C.1.pep
PPGGPFPPPPKAHGPPGVPXPPSPPAGPKGLLESHPAKKTGELPPAPTKDCPRKPDXMEPEPXGASPPPSXGDPRGXKPPKKGQCPKVVSXSVPGRPLHDSPPYCVVMYSMFPPPPPLLSESEFQLLVSPVNFALFKFPLPPVLPPPPPKKKKKTKKKKKKKTHP

SEQ ID NO: 212691 - protein, 59 aa, Zea mays
  Clone ID: MRT4577_125575C.1.pep
TGNLLGPGLNKAGKFPTLVTHQESLESKVNFLVSLLKKNWQNVRCLYVKSTMGKPYRVF

SEQ ID NO: 212692 - protein, 177 aa, Zea mays
  Clone ID: MRT4577_125576C.1.pep
MSKLQSESVKDAISQIVGDAKEKNRKFTETVELQIGLKNYDPQKDKRFSGSVKLPHIPRPKMKVCMLGDAQHVEEAEKMGLDYMDVEALKKMNKNKAGKFPTLVTHQESLESKVNETKATVKFQLKKVLCMGVAVGNLAMEEKQIQQNIQMSVNFLVSLLKKNWQNVRCLYVKSTMG

SEQ ID NO: 212693 - protein, 94 aa, Zea mays
  Clone ID: MRT4577_125577C.1.pep
ERDDKVNVQGPVLHQGIGGLPPFGFGKDGGCSHVGGEAAHSVWDSFSSHVWGSWATGSDSEKVRLADRLRQQIRSTPGCVRHVLLRLVHSGNSS

SEQ ID NO: 212694 - protein, 168 aa, Zea mays
  unsure (1)..(168): unsure at all Xaa locations
  Clone ID: MRT4577_125578C.1.pep
MSKLQSESVKDAISQIVGDAKEKNRKFTETVELQIGLKNYDPQKDKRFSGSVKLPHIPRPKMKVCMLGDAQHVEEAEKXDKAGKFPTLVTHQESLESKVNETKATVKFQLKKVLCMGVAVGNLAMEEKQIQQNIQMSVNFLVSLLKKNWQNVRCLYVKSTMGKPYRVF

SEQ ID NO: 212695 - protein, 135 aa, Zea mays
  Clone ID: MRT4577_125579C.1.pep
FNKTSVPEPSRLHKRAYLEHPVWLPHAFLASEAIIKQIPRLLGPGLNKAGKFPTLVTHQESLESKVNETKATVKFQLKKVLCMGVAVGNLAMEEKQIQQNIQMSVNFLVSLLKKNWQNVRCLYVKSTMGKPYRVF

SEQ ID NO: 212696 - protein, 43 aa, Zea mays
  Clone ID: MRT4577_12557C.1.pep
SLKMKAPPPPQGHSQEHTIRSFNVEMVRSACIGYVSFVAACRT

SEQ ID NO: 212697 - protein, 80 aa, Zea mays
  Clone ID: MRT4577_125580C.1.pep
WGGHWGRLFIIETARREIFSFCKKEKERSSPPKVFGLGPWFEEGTLGPGVEARVLPGFPLWSQFPGYWGGVRPINTGPMG

SEQ ID NO: 212698 - protein, 173 aa, Zea mays
  unsure (1)..(173): unsure at all Xaa locations
  Clone ID: MRT4577_125581C.1.pep
MSKLQSESVKDAIYQIVGDAKVEEXKFTVDCVNFRIGLXKNYXHHKDKRFSGSVKLPHIPRTKMKVCMLGDAQHVVGGREYGLDYMDVEALKKMNKNKKLVKRLAKKYHAFLASEAIIKQIPRLLCPGLNKAGKLPTXLVTHHEYLESNVNETKATVKFHLKKVLCMGVAVGN

SEQ ID NO: 212699 - protein, 72 aa, Zea mays
  Clone ID: MRT4577_125582C.1.pep
KKKKIALGQKMTGERTPSFAVYFFLYRAIQLNNPAYMMTIETTRPHLLPSFNFLKISKSYPFQSFTYYPLLV

SEQ ID NO: 212700 - protein, 202 aa, Zea mays
  unsure (1)..(202): unsure at all Xaa locations
  Clone ID: MRT4577_125583C.1.pep
MSKLEPESVKDAISQIVGDAKDKNRKFTETAELQXGLNNYDPQKDNRFYGSVKMSHIPHPKMNVCMLGDAQHAEEAENMGLDYMDAEALSIMSNNKKLVKRLAKKYHAFLASEAIIKHIPRLLGPVLNKAGKFPTLVTHHESLESKVNETNATVXLQLKKVLXLRVAVRHLAMEEKQIQQNIQMSVNFLVSLLKKSWHNVRC

SEQ ID NO: 212701 - protein, 45 aa, Zea mays
  unsure (1)..(45): unsure at all Xaa locations
  Clone ID: MRT4577_125584C.1.pep
KTHQEQFLYFRFHKVRLAWRSKLWSQIDSLAXRLHSPRTLRCYPC

SEQ ID NO: 212702 - protein, 116 aa, Zea mays
  unsure (1)..(116): unsure at all Xaa locations
  Clone ID: MRT4577_125585C.1.pep
QSASVKDAISHIVGDAKENNTKFTETVELQIGLKNYDPHNDKRFTGSVNLPHITRPKMKVCMLGDAQHVEEDVKMGLDYMDVXALKKMNINMILAKKLVKKYHAFLALEAIINQIS

SEQ ID NO: 212703 - protein, 216 aa, Zea mays
  Clone ID: MRT4577_125586C.1.pep
MSKLQSEVLKDAISQIVGDAKEKNRKFTETVELQIGLKNYDPQKDKRFSGSVKLPHIPRPKMKVCMLGDAQHVEEAEKMGLDYMDVESLKKMNKNKKLVKKLAKKYHAFLASEAIIKQIPRLLGPGLNKAGKFPTLVTHQESLESKVNETKATVKFQLKKVLCMGVAVGNLSMEEKQIQQNIQMSVNFLVSLLKKNWQNVRCLYVKSTMGKPYRVF

SEQ ID NO: 212704 - protein, 177 aa, Zea mays
  unsure (1)..(177): unsure at all Xaa locations
  Clone ID: MRT4577_125587C.1.pep
MSKLQSDSDKDDISQIVGDAKEKNTKFTXTVELHIGLNNYDPQKGXRVSGXSDYLPHIPRPKXMKVCMLDDAQHVRXELEKMELDYMDVEALKKMNKNNKLVKKVAKKHHGFLASEDIINEIPRVLGSGLNKGGKFPTLVTHQEILESRXNETKATVKFQLKKVLCMGGSHAHFGDV

SEQ ID NO: 212705 - protein, 46 aa, Zea mays
  Clone ID: MRT4577_125588C.1.pep
EHQWAGQNDQLSVRSTLHNAQQVRYLAMDRVKVASRIALQAPPFVL

SEQ ID NO: 212706 - protein, 55 aa, Zea mays
  Clone ID: MRT4577_125589C.1.pep
LQRSRRCRPLSSSLRPLHVGRCPTLARGLATRARPMMPCCGSSLFSRAGCCSAWR

SEQ ID NO: 212707 - protein, 40 aa, Zea mays
  Clone ID: MRT4577_12558C.1.pep
NTWCRLREICNFATLSFGFLLLCHHVSMTGGTICVYDWWT

SEQ ID NO: 212708 - protein, 158 aa, Zea mays
  unsure (1)..(158): unsure at all Xaa locations
  Clone ID: MRT4577_125590C.1.pep
MDASGANNEANKGAAGRKASSPRKKSVTRSLKARLQLLVRRIRNYLNKDRFAHGVGTYLPVYLDYLLDYLVDXVLDLARDTAKDNMMTRIMLLHMLLDIHIDKELGKLMIGLTIVHGNILSNIHSMLLPKKAANNAGNARNNEPKCAKNGTKSSKKAY

SEQ ID NO: 212709 - protein, 67 aa, Zea mays
  Clone ID: MRT4577_125591C.1.pep
LPNRCTLLTEHSVYLKGMRIRSHICSSGVSSHAVYVFPECECRANSNLYQMTDADARDHPIFAYPRR

SEQ ID NO: 212710 - protein, 364 aa, Zea mays
  unsure (1)..(364): unsure at all Xaa locations
  Clone ID: MRT4577_125592C.1.pep
MARAPLLLALLCACAAAAGSANAAGRKMVGVYELKAGDFSVGVTNWGATITSVVLPDSKGDFADVVLGYDTIGGYVSGKSYFGALVGRVANRIANARFVLDGKAYHLFKNDGNNTLHGGHRGFSQVVWTVKEFVGGGDSPYITLYYHSFDGEQGFPGDLDVYVTYQLAAPYVLRVHMNATAVNKATPVNLAQHTYWNLGGQGSGDVLRNTVQLFASRYTPVGGGLIPTGAVAPVAGTPYDFLAPAAVGXSRIRQVSGGKAGVYGYDTNYAVDGEPGALRKVAVVRDGASGRALELWANQPGVQFYTGNFLQDVKGKGGKVYQQYGALCLETQGFPDAVNHPNFPSQIVRPGQVYKHDMVFKFSF

SEQ ID NO: 212711 - protein, 56 aa, Zea mays
  Clone ID: MRT4577_125593C.1.pep
SVSKQRRDIAPSSSSCIGGPELLCDSESPATPLHRCKTALDDCYITTASARAVYSY

SEQ ID NO: 212712 - protein, 73 aa, Zea mays
  Clone ID: MRT4577_125594C.1.pep
MGFVLVVSLHFIFLSILLGFGCFFLGKHRGREEMRTGVGAQVYGTPLPPPGVVGVSSPPPEPIHAKKQGPEAV

SEQ ID NO: 212713 - protein, 77 aa, Zea mays
  Clone ID: MRT4577_125595C.1.pep
KLNSQTTPKHGFPTTNDPQQSTYFKKTVPPKKKWLTFKPTGLPQNPNHPSLLSLKAIRPQNNVKIILPPAKAKIPLF

SEQ ID NO: 212714 - protein, 107 aa, Zea mays
  Clone ID: MRT4577_125596C.1.pep
RGSPLISRTSKRPWCRCRRSGIWRKGLRWRKSGSLCSSLLRSPGPISKWRPFSLSSGGRAHHSCGTAAWRYSLRRHHTRMISMLLGQSSPHGTSEQWIGAKVGMSYL

SEQ ID NO: 212715 - protein, 98 aa, Zea mays
  unsure (1)..(98): unsure at all Xaa locations
  Clone ID: MRT4577_125597C.1.pep
RLIISAGVRGGFQHVLGRVLAPLASICSLSLTCELTVAVFVCSLCFVCRSTVACSVSFVLPVVVVSRVWRSCSPGVLCVCLYVAFLFLSXXXXFGVHN

SEQ ID NO: 212716 - protein, 79 aa, Zea mays
  Clone ID: MRT4577_125598C.1.pep
RLPWGVPAGCKRGRGLALSRGRTAGASASESALIPSVRLVRCLTGCRGGQAWLCKTYTVACDEKSIMVSGATLSCVKTS

SEQ ID NO: 212717 - protein, 77 aa, Zea mays
  Clone ID: MRT4577_125599C.1.pep
PHRLYNRIRWLLSLSLRMLAMRLRVNLCGLTRLDDRLANQVLHTGRCDRRMLLHTALGANLIRDELRQIDLHQLCTY

SEQ ID NO: 212718 - protein, 58 aa, Zea mays
  Clone ID: MRT4577_12559C.1.pep
SSHPRCVSAPRSPLPMEAAAGGDEEEGAAARVAGLGMHLRRGGGANVPTREGGEVRAP

SEQ ID NO: 212719 - protein, 92 aa, Zea mays
  unsure (1)..(92): unsure at all Xaa locations
  Clone ID: MRT4577_1255C.1.pep
FIKNYKRPPLTDTTRSHVDDGLVDHVAKISAXIDPMRDEIEHDMIGREIELSGLTERCSLSQSQCSASTRSTTRESARETLLSECELRRCKT

SEQ ID NO: 212720 - protein, 86 aa, Zea mays
  Clone ID: MRT4577_125600C.1.pep
SQHSTGSSRERYLEREINISFFFHHHHIQPSPPSSFPNQVFKIFCRANENFFLSVLDCSVLLSPFIPNDYHHLLYMFMRFITLFIY

SEQ ID NO: 212721 - protein, 90 aa, Zea mays
  Clone ID: MRT4577_125601C.1.pep
RIKSLGGVPLGPKCHCYHTQTQAYHARISDTWQFQHKQTQMRDAAATNELIRRGNFPPVPLTCLFRSKSLFQLLARGLSFMLQQGGMQKL

SEQ ID NO: 212722 - protein, 91 aa, Zea mays
  Clone ID: MRT4577_125602C.1.pep
MAKIKARDLRGKKKEELLKQLDDLKVELSQLRVAKVTGGAASKLSKIRVVRKSIARVLTVINQTQKENLRKFYKGKKYKPLDLRPKKTRAM

SEQ ID NO: 212723 - protein, 94 aa, Zea mays
  Clone ID: MRT4577_125603C.1.pep
DIVVILSGYDDRYGASFGYLEKVEGFRSIFTRRDIGSHAVHFLQKGDLGALSHQIPARKVPKGEGSALPPGDCWELDPASLPPELLCLCIEPPK

SEQ ID NO: 212724 - protein, 122 aa, Zea mays
  Clone ID: MRT4577_125604C.1.pep
ESAPPPHVAGFVYALLVFFQRVFSPLPFGARYMVFPPNCCGSGLSRCARAAGLFSPGRGRWLSALFPPFFRSKISPLSSRSVSGGAPLLFLGLRFFLLATDSPLPSSLPPFFLPFSFPTRLG

SEQ ID NO: 212725 - protein, 149 aa, Zea mays
  Clone ID: MRT4577_125605C.1.pep
ISWPSSPLLRHQRGLTLRRVCRSLLARPMATEMAYATPMKASDAGRRNRDDGLRTTAIRIRVSSKRDENLKEVCGDLDDRRQGQRAHGDGARVHAYRGAPDRLTQDRLPVKTGTNTRRSLLSSEAFAIGCYYPRKTAPHGGQESSSGHP

SEQ ID NO: 212726 - protein, 62 aa, Zea mays
  unsure (1)..(62): unsure at all Xaa locations
  Clone ID: MRT4577_125606C.1.pep
AWKNFKTWDVVAVDLSTSVFICPPSAREYKLKPIGDVAPVIKAGGMFAXARKTGMIGSKPPA

SEQ ID NO: 212727 - protein, 75 aa, Zea mays
  Clone ID: MRT4577_125607C.1.pep
HASGSRSRAAALFFFFCFFFFFFFFFFFLPFFGQLCLNRSIATSTPYANLSNENVISGITPDIMVKMWPKNMYCL

SEQ ID NO: 212728 - protein, 95 aa, Zea mays
  unsure (1)..(95): unsure at all Xaa locations
  Clone ID: MRT4577_125608C.1.pep
SELCGQLSQQTSVVCFCLKTGLSKQNFSCSVSLNLSLHVKSGLKAVANNSPGYPAARERFLQICYESVQFNAGNRVCSVQVVMHKIIVANFRRXL

SEQ ID NO: 212729 - protein, 123 aa, Zea mays
  Clone ID: MRT4577_125609C.1.pep
KKKIFSSQIQKKGFPNFFPLKEKVFLFPLRGGGNFHGSPPPFILRWATPSLKVKKRKKGLKKKKFFLKNGFPLFFFNPPSRFSFFFQNGPPKFVGFPKKKFSKGFRDFFFFPFFVRVCIFQNF

SEQ ID NO: 212730 - protein, 73 aa, Zea mays
  Clone ID: MRT4577_12560C.1.pep
DVRGQGRICTEQDEEQSHFFFPPPSLGKKSKQGSTPAKHSDRKQKNHSTRQNKRKKRCVCVQLLQLPAVKILS

SEQ ID NO: 212731 - protein, 168 aa, Zea mays
  Clone ID: MRT4577_125610C.1.pep
QACFPSLFVRRTITNHARRERWRAQRDSADGCHHATRRVSYHIQYYISALRVYRDLSPTSTTRNQPNAAVVAPRLCTHGATVRGEPCVGAPHFIRTWKCRNGNPWAASVDTDRFTRSSAATWIGSGSICSGRPSEQLPPWHLGSMRIPPVTVPRTPGSPPTLRCAGRC

SEQ ID NO: 212732 - protein, 96 aa, Zea mays
  unsure (1)..(96): unsure at all Xaa locations
  Clone ID: MRT4577_125611C.1.pep
MAPKAXKKPVAKKPAEEEPAVEKAPAGKKPKAEKRVPAGKSVXKGGGEGKKGREKGKNSVETYKIYILKVLKQVHPDHGISFKXMVIMNSLINDIF

SEQ ID NO: 212733 - protein, 114 aa, Zea mays
  Clone ID: MRT4577_125612C.1.pep
TDCTDSLHLTHATPMPRAHWSPLEECERERRKGRRALASEAWDPLPYVRLRDKHLSASGPGRRGRLPRRPRCTPHTRAAVTRDPGRAHDLAGHRHNGRPNLHRARTREDPDHHG

SEQ ID NO: 212734 - protein, 66 aa, Zea mays
  Clone ID: MRT4577_125613C.1.pep
YIDLNMMTSVLSVSEFLQHRSCILPVVKDGEGPIMCISLVSSGYDEEIWIQYLIFSFVLKYLLMVM

SEQ ID NO: 212735 - protein, 95 aa, Zea mays
  Clone ID: MRT4577_125614C.1.pep
VLGSRDCSSIGQVHWDDRLGSDVPEVPHATGHFGHIVLGVIRRLALPLGRRQRWLDGWSMILCCSIFDLSVGHFNFGPGRAAAGMEVGLGCRAES

SEQ ID NO: 212736 - protein, 51 aa, Zea mays
  Clone ID: MRT4577_125615C.1.pep
RLLILRYKDKNNNTLRACDLGKEEKCQICNSGSFAKNNLKLATLEEIMRLS

SEQ ID NO: 212737 - protein, 61 aa, Zea mays
  Clone ID: MRT4577_125616C.1.pep
MWPRALVGMRIFFFFFFLEQMIFYHTSEPVPSFALLGEQRVVVHVATGPCRHAHFFFFFFF

SEQ ID NO: 212738 - protein, 211 aa, Zea mays
  Clone ID: MRT4577_125617C.1.pep
KIICSSPKKKKKKRHTMVGKGTARAYMGRLHVPPPSVRPAKQMRELVQKYGKRSSVQAQKKKKKTTHHAANVTARAYMGRLHVPPPSVRPAEQMRELVQKYGKRSSVQAQKKKKKTTHHAANVTARAYMGRLHVPPPSARPAEQMRELVQKYGKRSSVQAQKKKKKTTHHAANVTARAYMGRLHVPPPSARPAEQMRELVQKYGKRSSVQA

SEQ ID NO: 212739 - protein, 331 aa, Zea mays
  Clone ID: MRT4577_125618C.1.pep
MAASSRRASQLLGSAASRLLLGRGFAAAAAAAPSPAVFVDKSTRVICQGITGKNGTFHTEQAIEYGTNMVGGVTPKKGGTEHLGLPVFNSVAEAKAETKANASVIYVPPPFAAAAIMEAMEAELDLVVCITEGIPQHDMVKVKAALNRQSKTRLIGPNCPGIIKPGECKIGIMPGYIHKPGRIGIVSRSGTLTYEAVFQTTAVGLGQSTCVGIGGDPFNGTNFVDCLEKFVNDPQTEGIVLIGEIGGTAEEDAATFIQESKTQKPVVAFIAGLTAPPGRRMGHAGAIVAGGKGTAQDKIKALREAGVTVVESPAKIGSTMFEIFKQRGMVE

SEQ ID NO: 212740 - protein, 364 aa, Zea mays
  unsure (1)..(364): unsure at all Xaa locations
  Clone ID: MRT4577_125619C.1.pep
RRWRAPARRRCRPRHARAPRAPRRAAARPPTRRFLLHRRSRTLGGSPDRPARRAVAVKSGRGSNGAATDLLVCFPSRAHLALMPPKAICSPSRPSASEPVKRRHSTSRPPSGLYKSAAGAARNPSRRGADVPVDDEPTSPKVTCVGQIKARQAKXGPRARRWRWRWQEDQEGHVXQALGIKKDALALLDALHGAFRFNVAGCFGSFPGAVGVGYTSGEDDEDEEHDAPRTEKETEHGAALARWFMVLEEGKKVSAKKLQGQKPEQSHQEEDREEDAAPPANALMLMRCRSAPAKGLARRLETEEERNDVKGAAKKTPDQEEKENEGLVLMTYSPDFFKVSLDIAKETWIVGGDDAVLRCRSWKR

SEQ ID NO: 212741 - protein, 53 aa, Zea mays
  Clone ID: MRT4577_12561C.1.pep
RSRCSFIVPQQGGVHRVVTTRDIITVFSPVCIDSRIVGATFLLDALEQGGCCV

SEQ ID NO: 212742 - protein, 134 aa, Zea mays
  unsure (1)..(134): unsure at all Xaa locations
  Clone ID: MRT4577_125620C.1.pep
FQTTAVXLGQSTCVGIGGDPFNGTNFVDCLEKFVDDPQTEGIVLIGEIGGTAEEDAATFIQESKTQKPVVAFIAGLTAPPGRRMGHAGAIVAGGKGTAQDKIKALREAGVTVVESPAKIGSTMFEIFKQRGMVE

SEQ ID NO: 212743 - protein, 164 aa, Zea mays
  Clone ID: MRT4577_125621C.1.pep
TLLHHGRRPRRPPPPGHFRNYLMPKMLAVPNINKFAILMREQSKLYRREVEVVVKEVSKEEDDARQAEEKLKQCQAAAKRLDNALLVFRRFISEGIELRSPVTKDEIVSEVARQLNVNIYPDNLHLVSPLSSLGEFEVPLRLPRDIPRPEGKLQWTLKVKIRRP

SEQ ID NO: 212744 - protein, 100 aa, Zea mays
  Clone ID: MRT4577_125622C.1.pep
RKQVTSVGNPMVKHWVKLRLCSAYRRSCRRLLLVGLGPILEASSLELKAIHYLLLLDGAKVPEALREFSGDTPHVRAGVTKKVSRTQSFRCTEAGAVMHM

SEQ ID NO: 212745 - protein, 102 aa, Zea mays
  Clone ID: MRT4577_125623C.1.pep
FYPTPHITRRGLIIGSASNNPPHHKQKKQGPTKWHPPDPTHRGNSSPLGPTLRDHDQPTELFRAGPIPKTKTEGPSTPGATQVETTPPTSWSGQFAPEPASP

SEQ ID NO: 212746 - protein, 112 aa, Zea mays
  Clone ID: MRT4577_125624C.1.pep
PTQFVDWCPPGFKCGINSHPPSVVPGGDLAKVQRPVCIFSNSPSVVEVFSRIAPKLALMYPKGAFVHWYVGKGMKKGKFFKAREDLPALEKDSKEVGAEFYKGEEGDDGYES

SEQ ID NO: 212747 - protein, 111 aa, Zea mays
  unsure (1)..(111): unsure at all Xaa locations
  Clone ID: MRT4577_125625C.1.pep
PYAHFIAEKAAAMKETLENDTNYITDLICTRXDLGYNXVVYLIPPRRGLMIIPQAHKLIAALNEIVAHDAVDEAAACKIKLAAXSRELLELLPKTIXEQLMLERDPHGNDQ

SEQ ID NO: 212748 - protein, 59 aa, Zea mays
  Clone ID: MRT4577_125626C.1.pep
DFAGEDRCVSDLHLLSAITPDQCSPCARTVVGGPFSSLLSTGLFFFLLRSPLLAAECTL

SEQ ID NO: 212749 - protein, 304 aa, Zea mays
  Clone ID: MRT4577_125627C.1.pep
MHATFVDADDEAAVRAAVVPGETRVVYVETMSNPTLAVADIPMLARVAHEAGAKLVVDNTFTPVVVSPARLGADVVVHSVSKFISGGADIIAGAICGPASLVNAMMDLQEGALMLLGPTMNAKVAFELSERLPHLPLRMQEHSRRALAFAERMQGLGLRVLYPGLPGHPHHARLAAMGNPGYGCGGMLCLDMGTEERANRLMHHLQNTTQFGLMAVSLGYYETLMSCSGSSTSSEMPPEDRARAGISPGLVRMSVGYNGTLEQRWAQFERALALMQTPTPTHHLKAAAADRDGPEAANNHHRKH

SEQ ID NO: 212750 - protein, 181 aa, Zea mays
  Clone ID: MRT4577_125628C.1.pep
GRDIVPIYCQETLHRTSLSKRLVERLELHPAESDKKPRDVPTLPPPIYNNPAYRISSCLFVFSIPSKVKKREDRSFIALYPTGDSIHLSTSNQNPPLRVSALHSSILSHSIHCQVTMCTKTSIEHRCGHVVLRGNTRCYREDCPGRKEDVTKVDDDCAQCENKPSRFRSSRWCSVGCCVCQ

SEQ ID NO: 212751 - protein, 144 aa, Zea mays
  unsure (1)..(144): unsure at all Xaa locations
  Clone ID: MRT4577_125629C.1.pep
MTLANPDSHNGYYSSNRRSVPLLRDIVLQQLQQLVLANLAAYFKPHKWLTGNQLGXWNYASYLQHQQLPYRQISAGYPQQFVSLNQLSRWNSTAYLQQQQLLPFKXVAGVSPATVLXQTQLLPLYHDAVPNAGTLLQLQQLVAF

SEQ ID NO: 212752 - protein, 56 aa, Zea mays
  Clone ID: MRT4577_12562C.1.pep
PTRPPTRPKKKKKKKFLKKKKKKKRKKKKKKKKKKKKKKKKKKKKKKGGALLKNQS

SEQ ID NO: 212753 - protein, 74 aa, Zea mays
  unsure (1)..(74): unsure at all Xaa locations
  Clone ID: MRT4577_125630C.1.pep
SRSPNXXXHXLXSLPSFEPLFPLVVHSSFLFQEYRYIHNSIPHIHDFIIINYFHCFSDFHSSQILFYLTQSFYP

SEQ ID NO: 212754 - protein, 187 aa, Zea mays
  unsure (1)..(187): unsure at all Xaa locations
  Clone ID: MRT4577_125631C.1.pep
MVVEAMGGAGGKRGRAKGAGAGAEPEPKLRAMAVAVPSPAASPWAQQHPASRICRVSRASCGKDRHSKVYTDKGIRDRLVTISTVATAIQFYDLHDRLGYDQPIKAIEWLIRAAAEAIDKLSSLDASVGFPAHLAFAKDHSXLSVTTTTTTTSSXLTRSGCSSTSETSKGYVLSLSRSESRVKARER

SEQ ID NO: 212755 - protein, 47 aa, Zea mays
  unsure (1)..(47): unsure at all Xaa locations
  Clone ID: MRT4577_125632C.1.pep
SGEILVCIIQGWHYREXRRLRSLRXIMGGVVEVFKWLGVMFKDSKLM

SEQ ID NO: 212756 - protein, 120 aa, Zea mays
  unsure (1)..(120): unsure at all Xaa locations
  Clone ID: MRT4577_125633C.1.pep
ALFMWNNDHMXSLIAQXRXQVIMSLVVPALEQNIQNHWNQAVLNLAVNVKKMFSEMDGDHFSSCLARYKEEEERLVSLEAKRKLTWEKLESAAAFQPVTGQTAVLVGHQPSANMIANLIF

SEQ ID NO: 212757 - protein, 127 aa, Zea mays
  Clone ID: MRT4577_125634C.1.pep
FECYGFSNLWDFSSSFYITISLASLGEHANAMMANGRLQKQALLPPRSPFPAGSSARSRGRGTRTTAATSARRPRASSLTSSRHGCTTCSTSPGRLRLMSSPTSLYQWRQDDERIHPSSHTSPDEDL

SEQ ID NO: 212758 - protein, 65 aa, Zea mays
  Clone ID: MRT4577_125635C.1.pep
STPSFMRESHLLHECVSICLCYRPGCRLLDRFMALWFARVLDPRAQCSQAPITSLLTQYISPAVS

SEQ ID NO: 212759 - protein, 37 aa, Zea mays
  Clone ID: MRT4577_125636C.1.pep
LFPSRPCANVGRQQVWGRAAPISASLFGHLISIGRVS

SEQ ID NO: 212760 - protein, 210 aa, Zea mays
  Clone ID: MRT4577_125637C.1.pep
APGSKYSRFLRQEFDLRVALPLGVLNGALNAGVAAGVIHPLERGSAGSVSPLVERFNLGGNRALVCRLGGPSSLLGFKTRGLRAATESRTHDPNTPGNGTSPSPELNGLGGEVAVTAFADLSFDLPLKPLRELGIHGHAFVCAGNLGRLTECDLRKFPVTEFLQTFRSCAGWGVVVPTRLFRVEMNYCYILKQLDHDGGKTGIQLNFSSS

SEQ ID NO: 212761 - protein, 112 aa, Zea mays
  unsure (1)..(112): unsure at all Xaa locations
  Clone ID: MRT4577_125638C.1.pep
SVPGAAXVCESPSFEXYRSQGEIXAGILASAPLFLQQXRHSTAVXPLVDLLLQIMTAQQLQQLVLASLAVYSEQQQXLPFNQLAALNSASYLQQQQLPFIQLSAAWPQQLLP

SEQ ID NO: 212762 - protein, 97 aa, Zea mays
  unsure (1)..(97): unsure at all Xaa locations
  Clone ID: MRT4577_125639C.1.pep
MNVVLNGGDPDXVALLPSGFAILPDGPSSGSSSMLQSDGGVGSGGSLLTVAFQILVDSVPTAKISLGSVATVNSLIACTVERIKAAVISGQSNPQQQ

SEQ ID NO: 212763 - protein, 92 aa, Zea mays
  Clone ID: MRT4577_12563C.1.pep
MAKPPKKAGIVGKYGPRYGARFRKQIKKMGVFHPPKNFCEFCGKFPVKKKTVGFWGSKDFGKVKAGGASPINPVSAVPFKNPIRGLREQTKA

SEQ ID NO: 212764 - protein, 91 aa, Zea mays
  Clone ID: MRT4577_125640C.1.pep
TCPRNSVEDVDEDDKEEQATATRDRQRPPHAKASAQVLAWPRRVDMKLMTGAPILVPRLRGLVACCCERWTPMHRVRPIRESGTAPSPSGQ

SEQ ID NO: 212765 - protein, 51 aa, Zea mays
  Clone ID: MRT4577_125641C.1.pep
LIYLFINFFIFNFLFSFNSVQFKGRSISHSLRAKFPSFSRTYISQLQFFLS

SEQ ID NO: 212766 - protein, 43 aa, Zea mays
  Clone ID: MRT4577_125642C.1.pep
GTRLMAYVCDVRRWADTYAYKVAHQILGPLFALHYKKDGLTTH

SEQ ID NO: 212767 - protein, 75 aa, Zea mays
  unsure (1)..(75): unsure at all Xaa locations
  Clone ID: MRT4577_125643C.1.pep
GPRPRAVPPGLPGRPLVCAGPARPRPRRFFFGAPPPLXWVSPSVLSSSLXXGGAFRXRSPCLLALCVLVLALSPL

SEQ ID NO: 212768 - protein, 117 aa, Zea mays
  Clone ID: MRT4577_125644C.1.pep
MASGAVTVPPGKYEFLVVVHDKPGMLEKRLEVRGQHFDNMKPNVESGNWKMGGAILNSVPKDDSPSSLDFAGSTLVCIADSAEQVRENLSKDIYATSGVWDMDKVQIYPFKAAFRFN

SEQ ID NO: 212769 - protein, 485 aa, Zea mays
  Clone ID: MRT4577_125645C.1.pep
MALRRNAGSLALRAAAYLRRHRPHPPPPLALAAPAPTPIRSPLAPPFRHFAAPPGTQTNRKRGKEEDDASAGPRMNNAIAAPFVRLVMDEGHNILPRHEALQLAIRMDMDLVEVDRKSDPPVCKIMDFHREKYKKETKEKERLKTKSAIVLRGGENKEVRFKGKTELKDLMVKADGITRLMERGYRVKCMAMPSGNEGEDLGTPLSRLLGLIQDVCIVESGPHLDSKHAYVIVRHVKFATKKGGKKASQAMEDAGKGTSSAVPESPIDGSNTEDMAVGHGLGKPDDRTISDRVKETATRLSRDSPAQKEGHDREFKREFNWPKSNPGAGGNRNNPGQRGPRDVQPGMEKRVQDQGPVETNRYAARRQPIRGDSSQGIPPQGDRRNENGGRYENQRPLEQQHNRPLPRFNQGGLSQQDPRNERRSSFPLNNNQRQPAGGGDPNRASKSFGIFSSTQKSGSSEQRKLDGNPGNTDSPKRFGIFSSGK

SEQ ID NO: 212770 - protein, 108 aa, Zea mays
  Clone ID: MRT4577_125646C.1.pep
FQVVVLLYGISDLTSSNALLDLHRRAPADVDGDSAITTSDSGEVCDFHSFNHLKACDAPCFCFFVGMETKYVHIRDTYVPAEATGRSVLIWRTLRTVIEQRYSAVLSF

SEQ ID NO: 212771 - protein, 90 aa, Zea mays
  Clone ID: MRT4577_125647C.1.pep
LGNKVLKSHLRARLVHPRMRPLGLFVPPTLFGLPKKHKRTRAPPSPFFAPLWPFFGPGCLTVFFIPPLGPFLMNSGVFDFLSILQHHLVF

SEQ ID NO: 212772 - protein, 154 aa, Zea mays
  Clone ID: MRT4577_125648C.1.pep
MADHGDEMTTNKKVVLRRYVTGYPTAEDMEVVVTSHVRLRVPEGSTAAVVVKNLYLSCDPWMRGRMSKHDDGDAVPAEDFVLGEALVNFTVGEVLDSTHPEFDAGDLVWGMSAWEEYTLITQTEGLFKINHPELPLSHYTGVLGLAGLTAYAGL

SEQ ID NO: 212773 - protein, 79 aa, Zea mays
  Clone ID: MRT4577_125649C.1.pep
SITPRLLQAGHVCLDWAASHHGGLTVIDDLTVDKFYAGDKAHTTYQPTAPMPNTCVCLLRQLTDINTRRANWTLCTREG

SEQ ID NO: 212774 - protein, 45 aa, Zea mays
  Clone ID: MRT4577_12564C.1.pep
MVPPVQVSPLIKFGRYSALILGMAYGAKRYSYLKPRAEEERRIAA

SEQ ID NO: 212775 - protein, 121 aa, Zea mays
  Clone ID: MRT4577_125650C.1.pep
PRRHDDTSSDLCSSPPSWRWRHKSRQWLDPHPSLAVSGCLPGRLIARAPHRDPLPSVTTTVVRCNDGRTTDPWRRATLAGVVTPCALTDLLRGHALVAPLHGGVRWLERFTSYSTPGIQIH

SEQ ID NO: 212776 - protein, 55 aa, Zea mays
  Clone ID: MRT4577_125651C.1.pep
KPLTSGIKGLLLSMGRTILFFDLFGKMLNRKNRLNFQICLRKRCLVLEITCHLIV

SEQ ID NO: 212777 - protein, 68 aa, Zea mays
  Clone ID: MRT4577_125652C.1.pep
MAAFAASSTAAFAAKPGFQRARLTGACSATGGDGNGSSSSSGWLASSVRTFSAALALSSGLLFSAATS

SEQ ID NO: 212778 - protein, 164 aa, Zea mays
  Clone ID: MRT4577_125653C.1.pep
SMYLNDRRGVACETLEPPDANVEWSRQRAPSRQIGEGAGCYHSGEGGSSPWICRPTIVAANNSRHHRRQWVTMWSTCDESSWKAMGRESPGTRRRLPLLLQVRQPETARLGCGSSHCLLLCRHLQLGGDEHRSRCRRGDEVRGKAGRWSGASQHRRRLGCGGRG

SEQ ID NO: 212779 - protein, 37 aa, Zea mays
  Clone ID: MRT4577_125654C.1.pep
LGGCVSNSYILTRGVLFSPWEALGINIVSSPGWSGNF

SEQ ID NO: 212780 - protein, 80 aa, Zea mays
  Clone ID: MRT4577_125655C.1.pep
LSHDYRIDRRDRCRWGSAHCLTLSPLGARVVLGYIILLRHVLHSACEFLIIAQTQRSSVILARYKHFNREMAQCIVLPLL

SEQ ID NO: 212781 - protein, 104 aa, Zea mays
  unsure (1)..(104): unsure at all Xaa locations
  Clone ID: MRT4577_125656C.1.pep
MGLMLFLARPKLGFAPRFXAPVGRHTRKPWFKFFNAHSPPLVFSWALYFLCQLLGFFPPGGVFALXSFTPPFFPPVGAPWNPRARGGPAKRGGPLFLFPSARVF

SEQ ID NO: 212782 - protein, 81 aa, Zea mays
  Clone ID: MRT4577_125657C.1.pep
LPHRYLCAGVVKGLPPSPAAPLHLCLSLLVSRNFFIPQSLSSLLCCVRVTNYIFFFASSPPCPVGSGGGRARRRSLVLSIA

SEQ ID NO: 212783 - protein, 429 aa, Zea mays
  Clone ID: MRT4577_125658C.1.pep
MMSLILLLLSFSPHSCEGPAKQQLLELIDELDKKAEFTCLSPIELNSKAFANDRLASILREEEVRLFQRAKVKHLLEGDDNTKYFHLVANGKHRRQRIFSLEDEDGACIADEEELKSHITSYYKNLFGKPDITSVDLDESFIQNISQVSDTENEILTANFTIDEVKKVVFSLEHNKAPGPDGFSVEFYQAFWEVIKDDLFALFVDFHQNSLSVHSLNFGVITLIPKKDNVFKIQDYRPICLLNVSFKIITKVLSNRIGLVADRIVCPSQTTFMRGRNILEGVIILHESIHELQSKKLDGIILKLDFEKAYDKVNWKFLQQAMRMKGFSPSWCAWIHTIVSGGHVRVKVNDDVGPFFSTFKGLRQGDPLSPILFNIVADMLAILFARAKEENQFNGIVPHLIPEGLSILQYADDTVVFLDHNLEHICSEH

SEQ ID NO: 212784 - protein, 51 aa, Zea mays
  Clone ID: MRT4577_125659C.1.pep
MAILNAKRLDLYNLYKEVVSRGGFYVGNGINWKGQVFSKMRNHTATNRMTV

SEQ ID NO: 212785 - protein, 186 aa, Zea mays
  Clone ID: MRT4577_12565C.1.pep
MASAGHRRHFADPHVLLKTQYNSSSRHVCDICRSKLAGLTGYRCSACDFDIHEACGDYFKETISFFAHPWHTLTLSRMPSSCDGWSCDLCLGEFPPGGLVYRCTDCLFDVHPLCTMLPHTIRSPLHPRHDLRLVPSIGTCMRGCEELSVWNYGHVWIAASLATLCLTFLPKVSSSIRTTNLRQSVA

SEQ ID NO: 212786 - protein, 32 aa, Zea mays
  Clone ID: MRT4577_125660C.1.pep
EFINTLGYITAKQFRGSKIGLGAYKEKGQYVD

SEQ ID NO: 212787 - protein, 468 aa, Zea mays
  Clone ID: MRT4577_125661C.1.pep
MDIVLNRIASSSRVSSSRRHLLPHEPIPLSPSPSPAVAVASAAPAHAQRRNDNMATIVNTTEEEPMLAVVRFTAELAWADAGPEVADPEVARLCLEAQEHILAGRWLDMASLMLASADLLLTSPSRVSDKDLECVLSVICSLVTKAGSEDQALQITELICAKLTQQHGDKPALRLKVLFSLYNLLPSPYGKAFVYKKALELATAGKAAEYIIPSFKNIDSFVSEWGIDNLEKRELYLAITTILKDHKGMAKEYFNFLNKYLATFKGSDDESATIGDAKEEAVAAIIEFVKSPNLFQCDLLNMPAVSQLEKDEKYQLVYELLKIFLTKKLDSYLEFQSANSDLLKDYGLVHDECVTKMRLMSLLDLSSRCSGEIPYSAITVELRINDDEVEQWIVKAIASKILDCKVDQLNQTVIVSRHTERIFGMEHWHALRTKLGAWRGNIARAINTIQANKVTEEGAQGMQGLAIH

SEQ ID NO: 212788 - protein, 196 aa, Zea mays
  Clone ID: MRT4577_125662C.1.pep
SGALLRGGQCLLLSGQYFSASRLLPRGGALEYGPADGVGCAGGHDRRSLLRSVLIATRVITFVSRSCSASRWSCGASWFGRGSRRSWHPPIPEGATKGSPRRGSDRAEIRYECHWRVSTKFLLIFIVFSIYIGTISRRSFVVESAGCPPAGEAPAARPASQSESGRVVSVAGLSTLDLEHGTQITGLEHNIKKTSL

SEQ ID NO: 212789 - protein, 44 aa, Zea mays
  Clone ID: MRT4577_125663C.1.pep
PYNYSIMFQCRASIKRLYALVNHHCLILVRSVSSLNHINLESSL

SEQ ID NO: 212790 - protein, 118 aa, Zea mays
  Clone ID: MRT4577_125664C.1.pep
PFWCLSPGKHGWPKNQFGDFPKGAKTPGNFYNPPNLFFYNPLGALGPQKAGKNGEPLFSGPKEKFKVVSLIAPSISLYPPEARSTPGIPPPVIPKSPGVGKNPKKLSPCEGAPLWEPN

SEQ ID NO: 212791 - protein, 48 aa, Zea mays
  Clone ID: MRT4577_125665C.1.pep
QTLDVQVQFKPNQAILLVNAKTRSEHVSDQLSYNEPGVGLACNQSCSI

SEQ ID NO: 212792 - protein, 263 aa, Zea mays
  Clone ID: MRT4577_125666C.1.pep
ASVEKNAWELKQYIEELYWGSGKQVLLLGHSKGGVDAAAALSLYWSELKGKVAGLALVQSPYGGTPVASDILREGQIADKETRRIMELIVCKLIKGDIRALEDLTYAKRKDFISQHKLPIDELPIISFHTEASTAPTALASLTRVAQAELLPWLPLPRFFLSASEFVESMLASLKVPVVAPVSAAMAVTALHLRLRYGERSDGLVTRRDAEVPGSVVVRPERRLDHAWMVYSTLKMGSAEADASEMCEALLAMLVEIGRKKFC

SEQ ID NO: 212793 - protein, 109 aa, Zea mays
  unsure (1)..(109): unsure at all Xaa locations
  Clone ID: MRT4577_125667C.1.pep
SDINASGIDNALDALSLTNKDDGKVDRHPERRYXAAYAKYEERRLDEMKKDGSGVGLRLDQRKTRIRKEFEKHPDNPFNQATASYNATRDDVATIRSQEKAKIEQRLGR

SEQ ID NO: 212794 - protein, 46 aa, Zea mays
  Clone ID: MRT4577_125668C.1.pep
SWSFKLDELISCWLESLFPGSNKNHWLLSLLSFGGRVRFSVKATAL

SEQ ID NO: 212795 - protein, 104 aa, Zea mays
  Clone ID: MRT4577_125669C.1.pep
GPFMLVSVPTLFFSVLSRFPVIPTVVFFGLFVHNVQGRSRLFLCRCRFFVRACFGSSGLGCLFSCSVMFWGFARRAFSVLSFTFTRLFVRTPFFSILLLVIPPL

SEQ ID NO: 212796 - protein, 182 aa, Zea mays
  unsure (1)..(182): unsure at all Xaa locations
  Clone ID: MRT4577_12566C.1.pep
MDGVCANELPTCDVPAEAAAPERDAYGDHALRDQLQLSAMIKDASESIFQHGKHLQMCYQDEGTGHQSCSDSPXVTQIITDLCPDATCAHEXPVHFYLNSTXHGHVEDXDQADMLRNDGRLQIQYTRVECNWNSLDIAFRVDAGSNANYLAMAIEYESGDGDLRAVELKQSGAAAWAPMQRS

SEQ ID NO: 212797 - protein, 64 aa, Zea mays
  Clone ID: MRT4577_125670C.1.pep
VSSVVVTCASSACFQIASTAVLATWYGRRSGSIRLPHPNMACGTPSLAMSHEDTPIFMPEPQRM

SEQ ID NO: 212798 - protein, 279 aa, Zea mays
  Clone ID: MRT4577_125671C.1.pep
MAGSNGTLLLALRIVLFCALASVATTLFPLVTRPCAYSLPRTILAASGLDPHLISCADDGSAKAQLSDGDGGHNKAGSGGRPIVTDLLSCGEPRLPSHALPPFRCCPPTPASDAAVANFTFPDPGEPLRTRRPAHGAAGADSVARYARAVALMKALPESDPRSFYQQANIHCAYCTAAYRQAGRPELHVQIHFSWLFFPFHRAYLYFFERVAARLLGDPGFAVPFWSWDVPEGMRVPPEFADAASPLYDPIRNPEHAPPRVVDLDFSKVDKNYTDEQQS

SEQ ID NO: 212799 - protein, 60 aa, Zea mays
  Clone ID: MRT4577_125672C.1.pep
KGIKTPWGTPKPREREKKKREEHIKKKERFQKAAGRFFFLEKNCTFILSQPPLWAPFTLF

SEQ ID NO: 212800 - protein, 66 aa, Zea mays
  Clone ID: MRT4577_125673C.1.pep
QHSIVSRISHPFFFFFFFFLGPIRKGGFHQRTRWRENNGRHRKLICYMVWPVKSVSPDLLQNGKEF

SEQ ID NO: 212801 - protein, 74 aa, Zea mays
  Clone ID: MRT4577_125674C.1.pep
SCLISITSCSNVFNIEYKLYICIYVFSKIKKYNRVGSGQHYGPRLRSKHVTTFLALANIRSFLRPHWHNGLHGV

SEQ ID NO: 212802 - protein, 88 aa, Zea mays
  Clone ID: MRT4577_125675C.1.pep
NRGDNNPDNFYNIFNNIADESENPRLSEDPINFKRFIDNFFNSNPFIKLLSYSGGLCYLHRDSFLGLAGMLVDRNDGCLATAAAVTSP

SEQ ID NO: 212803 - protein, 135 aa, Zea mays
  Clone ID: MRT4577_125676C.1.pep
MKHPRDAGAMPLSLALSLGAGVAPGHGSSKRPRRAAGGGDGELVCKTCSRAFVSFQALGGHRTSHLRAGRHGLALGMPAPAPAKEAPPPATTHLCHVCGLGFQMGQALGGHMRRHREEAAATTAQAPPVLLQLFV

SEQ ID NO: 212804 - protein, 90 aa, Zea mays
  Clone ID: MRT4577_125677C.1.pep
CHTSHIAVKFAELVTKIDRRSGKELEKEPKFLKNGDAGMVKMVPTKPMVVETFSQYPPFGRFAVRYMRQPVPVVVIQSVEKKDPTGAKLM

SEQ ID NO: 212805 - protein, 160 aa, Zea mays
  unsure (1)..(160): unsure at all Xaa locations
  Clone ID: MRT4577_125678C.1.pep
GTPGRPTRTKPDSQSSKPYQPLANSERDPKAPKAEKKPAAKKPAEEEPAAPAEKAPAGKKPKGESRXPGGKXGGLEGGVDKKGRKKAKKSVETHKIXILKALKQVHPDIGIPXKAMSRMNSFINDQLEKLAGEAAKLARNNKKPTXTSRESQNLDRLDLP

SEQ ID NO: 212806 - protein, 47 aa, Zea mays
  Clone ID: MRT4577_125679C.1.pep
SSPKLVDPIFHFKYATDNYSREIHSSNDTLIFNSCIQCKFPLFISFN

SEQ ID NO: 212807 - protein, 168 aa, Zea mays
  Clone ID: MRT4577_12567C.1.pep
IGCKKKKKKKKKKKKKKKKKKKKKKKKKKKKKRGTRKKKKKKKLYKDTKKKIQMALYFTHLKPEKNPGVPQFNPLEKHPLFPRWCNTEKAPSKLSFKKVYTLNGKCYPLFNAPLNAGEEGFTPRVTFTFARALAPALLTFSPFFFPTFPAFSPKFLKRGLFFGLPFRA

SEQ ID NO: 212808 - protein, 97 aa, Zea mays
  unsure (1)..(97): unsure at all Xaa locations
  Clone ID: MRT4577_125680C.1.pep
RRVGSRFPTSQHHIALYILRVSAHAQSENPVNLFNRWTFDYVQGNDLSLNDYXGLNCEXHATFQTHFDLTYCKMRILKAQRALCDRLTNSLMMHGLN

SEQ ID NO: 212809 - protein, 43 aa, Zea mays
  Clone ID: MRT4577_125681C.1.pep
CIQILKMQSSKRQHVLHSLSIVHKCGLDSTGHQQAREGLARRR

SEQ ID NO: 212810 - protein, 121 aa, Zea mays
  Clone ID: MRT4577_125682C.1.pep
IRLELAGAATVRLFLLRLPWAAAVGAGRSHPPVSLCAGLDSGLTSYRALHARGCNNYAMALRHHAVGRARRLPYQGGTTDAIAYGDGGRLPQGPWSRPRAGLLRAQSGLPLARHVMARPHV

SEQ ID NO: 212811 - protein, 228 aa, Zea mays
  unsure (1)..(228): unsure at all Xaa locations
  Clone ID: MRT4577_125683C.1.pep
LLLMPMEKCIGRKQNRXCGSCCQITSLKHQEENGIPFAPSSSLHAPEMEQSTSDQMRQHSVHQRHEDFNSMFNNSNDHCDMQNNMDFTDDNSLPSTASNDRIEIDKECGSTRSIQSKAEGFSFSPSRSVDIGSPKDILCERDKDCNVEPSSDGPLSPRSPTLEDKLVDPLCAQEKANDEDDQGTAYRSNLTCKGEYDANDEYDGGPLVQRSKPESXVNDKDTTEDESS

SEQ ID NO: 212812 - protein, 96 aa, Zea mays
  Clone ID: MRT4577_125684C.1.pep
LPAPGGEGGVNPLFDPPAKHNNFWLVPPLGKPGLGFRQWLDQGPCSLPVTRSPSRGNKCYLVARLFTQRGSRRFVPSSTKTKVLACGRFCISPWGM

SEQ ID NO: 212813 - protein, 102 aa, Zea mays
  Clone ID: MRT4577_125685C.1.pep
DSFSKSLILMSPYPVYIDKISLHSVEVFASFLQLYQLLESNVDPVQISPFIRRAYLSRIGFTISLPRAICWSMCTKDLGALFLASIQAGSSVSRHASADAWV

SEQ ID NO: 212814 - protein, 743 aa, Zea mays
  Clone ID: MRT4577_125686C.1.pep
MSISPHERTGGAYYPRPHNPSPSPQHGSDRRRHGRRSPPASVSPPGAAAEASDGGVGSSSNPVVPAIGESINAPEKVVGFIISGEENDTCTQEVGNVSECHSSEQGDSGLPVDNFGSVGSYPERPKMVGSLQADHLASGSTGLGNGTQIAARKNQTVNANHLLNFQYDPISRPQPRGPRTYLPRRQRKIKPYNKDLFIQANYKFVVLDTGNYQIDSMDPDKMLQWEDIICVRYYSPSEVQCPICLERPLCPQITSCGHIYCFPCILRYLMMGKDDYRGECWKKCPLCFMMISSKDLYTIQITQVQNVRAGDVVTFTLLSRSRNSLTPSIKSSSSESSTTDEEHYNVFSKFILTSDVELSVRDAKLDLSNWLHMADLGLVDDLEKLPFVSAALEQLEEKTKYWIDYRNYGGSPPSKDSFSPGSSFKSRNSFDVNTSQQMSEHKISLSDRDMVNGISELSMSPELSKTSGKGTISKVNEKCTTTIDSNEHDPYTFYQVSDGQHLILHPLNMRCLLNHFGGSDMLPPRITAKILELETVTQSEAIRKRYRFLSHFSLTTTFQFCEIDLSDVVSPNSLAPFLDEIKKREKQRKRAAKKEESERVKAEVAAAVQASAMRFEYTNSSQSHNDVMFSLDDFEALGNNAGPSTSPPASERKLFSDVTRLGFASAQDSPPLRLGTGDANGQSETSRDQGPLATPALSFASIISSSRAVTAADNSEMQKANGAGKKGKKATRVLLSTGGGRRY

SEQ ID NO: 212815 - protein, 101 aa, Zea mays
  unsure (1)..(101): unsure at all Xaa locations
  Clone ID: MRT4577_125687C.1.pep
KPYLVISAPAPTPSLLLTSPVHWTVYPKDRDLSNXFAITQHPGXHXLSFCIGNYSTIKGCYYPVMTMPMGEXARIQCTPDHAYGTAGLPHWEIHPNSKLEL

SEQ ID NO: 212816 - protein, 136 aa, Zea mays
  Clone ID: MRT4577_125688C.1.pep
MAVLYGGIYRTIVMLPCAAIPLVQRMGHRRLPGNDPIDCSMIFRYFLSSMTIRTNLQKLLDFAPPAPFPPVEPSWCSSTGPEQTSSPAGGALAASTKAGSRLASPRASLSASAAVAAPTSFPPCWCLLPGVGRMGG

SEQ ID NO: 212817 - protein, 46 aa, Zea mays
  Clone ID: MRT4577_125689C.1.pep
AVCDMSYKKSYPPGQFRFMCKVDSILTHLLIVPSGAARYVLFRNGD

SEQ ID NO: 212818 - protein, 58 aa, Zea mays
  unsure (1)..(58): unsure at all Xaa locations
  Clone ID: MRT4577_12568C.1.pep
GCLPILSPQPXRTLNPFYVLRXPXXSXSLISFTNSIILQLSNKHLILSFTYSINTFSS

SEQ ID NO: 212819 - protein, 98 aa, Zea mays
  unsure (1)..(98): unsure at all Xaa locations
  Clone ID: MRT4577_125690C.1.pep
QHRKHNPTQAAKIFCLLMLLGLSASAATATMFPKCSQAPIASLLPPYLSPAVSSVXENPIFTLRINSIQWIYLYPVSHIAIHSLGLCQHRTLNWRTVS

SEQ ID NO: 212820 - protein, 35 aa, Zea mays
  Clone ID: MRT4577_125691C.1.pep
GARSRWRWRPVSLVWAMCDRDTVIVSTADILQCDY

SEQ ID NO: 212821 - protein, 84 aa, Zea mays
  unsure (1)..(84): unsure at all Xaa locations
  Clone ID: MRT4577_125692C.1.pep
MADQEGGATEGGGDYGDLQRGGGMHGEAQQQKKQGAMMTVLKAATAVTXPGSMLVLSGLILDGTVIALTEGTAELVIFSPELVP

SEQ ID NO: 212822 - protein, 301 aa, Zea mays
  Clone ID: MRT4577_125693C.1.pep
MEGKEIYSDHEKQDVEISKGKQVQIMKDIELDQISTCPPYGARAALYPLGTGANAELDDDMLQLWEAAERSCKNQTAKSSSSEHDIQAVEDLKSEHPSSELARGRDLGINKLEASKGAAEPHEAWSKNVLERLTSDAQRLLSIQASIEELKQKMEGQSKGKSPMNSEYSSVSAQVHETEGHVLEQINLNNKLTRTAENYPTLSDNMSTEREGYSSRRKISEQVQKGSENVARLELELQKIQYVLLKLEEEHEYRRLKVSDKRTRVLLRDYLYGRKDRGGGQKKKKRVPFCGCVRPKSRTEP

SEQ ID NO: 212823 - protein, 86 aa, Zea mays
  Clone ID: MRT4577_125694C.1.pep
ELQQISHPQTICEGSLLSGRNNKPSLTTGIVIYPSKFIDISQPPRPNLDKTNTASSVILITRHFLTILFYKKSDQESLKTWNFCIP

SEQ ID NO: 212824 - protein, 57 aa, Zea mays
  Clone ID: MRT4577_125695C.1.pep
SMKQAMLLPQPAQAGNALHQILNALARNLPHSQDVFTQYEQKLLNWTEGHLGDLKPL

SEQ ID NO: 212825 - protein, 166 aa, Zea mays
  Clone ID: MRT4577_125696C.1.pep
MQLHHQTAGEKRSKIRRGKIAKPKSIPNPARNARPPPPSPAASHYKRGVRNLYCTTNPNSLDSDEPQFMACHLSPLFNLRLLLLLGAVLGNAVLVRAGGAEASDRAEPDPYSILTWHDYSPPSPPLSPLDPALSTVTCEADLPGRGDSFTLCRGFVGGLFPGHFFP

SEQ ID NO: 212826 - protein, 96 aa, Zea mays
  Clone ID: MRT4577_125697C.1.pep
VIESVEGHEGAFTLTSVTGPLPVAFGPSNPISIKNHSQINVSGLLIPSVQENRDSSSQSKLLDNDIHRSTLVPQKSFLANISRQIEAEKASNSRNS

SEQ ID NO: 212827 - protein, 59 aa, Zea mays
  Clone ID: MRT4577_125698C.1.pep
MPRPYVSIERISSLIEFPFVAQPSGNSVISTTANDLSDWSRLSSLCPLLYGPPPARSLR

SEQ ID NO: 212828 - protein, 52 aa, Zea mays
  Clone ID: MRT4577_125699C.1.pep
WLLGQIPARLWSVPVRCCTVETPPPPAGMSPHLEVRIRLSARVMRWWRRRRS

SEQ ID NO: 212829 - protein, 164 aa, Zea mays
  Clone ID: MRT4577_12569C.1.pep
SHTDPAAAAEADQPPPPAAEAEEAEAKGEAQAPAPAPPPPADPPAAGDRAEETAPADTSAPEEHKEAKPAETPAAVDATVVVRTVRDHPYGYGAGGHGHRMCSEANHPVDSFYSHHRPTSPYVAEYGAGGGYAGFPVQEGRGKEDAINITCMFSDENPNACSIA

SEQ ID NO: 212830 - protein, 73 aa, Zea mays
  Clone ID: MRT4577_1256C.1.pep
FFKSAPPSSSYFSALIFFLSFVLVNVNFFFIFCIFFFFFFLFFFFVFYFFFFGRRNTIISGLNLNPFRNTEHL

SEQ ID NO: 212831 - protein, 70 aa, Zea mays
  Clone ID: MRT4577_125700C.1.pep
RLQPLKFYMQVPVQYRTIFKAIITMIIACMYTFVSPSSHQVSLSLFLQLAYSKFFHDPPQNRVGVGSNFV

SEQ ID NO: 212832 - protein, 171 aa, Zea mays
  Clone ID: MRT4577_125701C.1.pep
RDLSPESFPPECYQRYLNGYIYASRDQLPDCAINCAVQCFTVAESQSRIVAPIVFDHSLWGLLIVHQCSSSRTWQTAEIQLMQSLGNQLAIAIQQSLLYERLQEELSERQRAEQKLLEVNQLQKGIFDVANYMIISTDRRGIISTFNRTAEEILGYTAAELIGQQTPLIFH

SEQ ID NO: 212833 - protein, 88 aa, Zea mays
  Clone ID: MRT4577_125702C.1.pep
FGISHIIDTTAISIGRRYARTDEIGVPFAVTVDSATNVTIRERDSKGQIRVDINEVASVVKQLTEGQSTWADVSAKYPAHVGPQGDQE

SEQ ID NO: 212834 - protein, 114 aa, Zea mays
  Clone ID: MRT4577_125703C.1.pep
SLTDDSLVDESLAILALLSGDHETVEEIGETGGVASMLHVIKEDQCKRNKENAVAVLFAVCVYDRTKLREVAEHEKLNGSLAWLVQNGTSRARRKAVGILDKMKRTLHQPHYSC

SEQ ID NO: 212835 - protein, 80 aa, Zea mays
  unsure (1)..(80): unsure at all Xaa locations
  Clone ID: MRT4577_125704C.1.pep
TSASCDGQIYRLVAGTFNSSLNDHVYTALLRLSLREPVFMVCCAKPRSISYPRWKSFSXWNSSLFGICLEILNQKKPVPR

SEQ ID NO: 212836 - protein, 228 aa, Zea mays
  unsure (1)..(228): unsure at all Xaa locations
  Clone ID: MRT4577_125705C.1.pep
MASRARLPGSPASIAVLILSFFQGSVCGITFTFTNRCGDTVWSGLLSGSGTPPLETTGFALALGQSRSLYAPQGWSGRFWAAPAAPSTPPARGPAPRATAAPARSTAASLRPVQEPGXVPLVKNQEFDATAKEIAKALTTAGISHIIDTTAISIGRRYARTDEIGVPFAVTVDSATNVTIRERDSKEQIRVDINEVASVVKQLTEGQSTWADVSAKYPAHVGPQGDQE

SEQ ID NO: 212837 - protein, 58 aa, Zea mays
  Clone ID: MRT4577_125706C.1.pep
FTYEQYVLLGFHLSARSCKLGVLAPVPCLHLALSRCAPLLSVLRYASLPKKKKKKSAA

SEQ ID NO: 212838 - protein, 105 aa, Zea mays
  Clone ID: MRT4577_125707C.1.pep
KKKWIKTAQKGPTDGTPQAQRGKTAQDKKGKEPHKETKGLPGKSQKNKTNPKGAPQKKPWRGNRALPNMGSPTSAPPNIFIYTPIFFFFFFFKKFFFFFFFFFFR

SEQ ID NO: 212839 - protein, 50 aa, Zea mays
  Clone ID: MRT4577_125708C.1.pep
EPNVGTWCYYGFTLPTPSAHKKTVQKRALEPTPLCSKNLELTTRPHVSCV

SEQ ID NO: 212840 - protein, 93 aa, Zea mays
  unsure (1)..(93): unsure at all Xaa locations
  Clone ID: MRT4577_125709C.1.pep
MISKPPATKPTTPKPTPSTYTPFSKPPTPNSTAATLTQCEKHVTPKPTPPTYTSSPKPTTHPTPKSTPASFTLTCTWIGLMXTPPTYTPFLKS

SEQ ID NO: 212841 - protein, 65 aa, Zea mays
  Clone ID: MRT4577_12570C.1.pep
GLMWFICQGHPQFGLYVCPCIFKNLSLPSGTIWGHPFILKTSNGRGSLYFPKKKIGQIFIMGGFP

SEQ ID NO: 212842 - protein, 40 aa, Zea mays
  Clone ID: MRT4577_125710C.1.pep
SKIDLIICTYLNNLINLSYGYEETILTHITLKKLNILLCI

SEQ ID NO: 212843 - protein, 57 aa, Zea mays
  Clone ID: MRT4577_125711C.1.pep
AHQFLHHKSLIHRLIITKVSQISSSSSNKRQYLIHRHNKRLKVQNTITWELTGADHH

SEQ ID NO: 212844 - protein, 111 aa, Zea mays
  Clone ID: MRT4577_125712C.1.pep
TSKNTTFPSLVAHSAPLVANPASLTPKVQDHFRARQMLPSTASPLPTPPPGSISRSFSIPSRGRTGSDGKEIEDQQDKGAARMSLSSLPSAQTLLEDRQPLSAAAGSVSKT

SEQ ID NO: 212845 - protein, 59 aa, Zea mays
  Clone ID: MRT4577_125713C.1.pep
FFCNGKSSSFRDAAAVAHSTNSATAMEATYSHHPVAVFVFIGHLVLITPPGLCGVVCLH

SEQ ID NO: 212846 - protein, 62 aa, Zea mays
  Clone ID: MRT4577_125714C.1.pep
ADLICRCIFQRMKGYSIYAGSKDNPLSAWIYAYCVDLAKLIIVHLWFLIIAILNACSIMNYL

SEQ ID NO: 212847 - protein, 71 aa, Zea mays
  Clone ID: MRT4577_125715C.1.pep
GRGKRSRSAAFTSCNCDWHEYLRCSTSACGPPCRSYLVTVLGTSCRTPALSRPLADLRDVSPRRKLSTTKT

SEQ ID NO: 212848 - protein, 39 aa, Zea mays
  Clone ID: MRT4577_125716C.1.pep
SSQYVPLAILDYRTTRSSWSINPSMDVSYVNFLHRVRVD

SEQ ID NO: 212849 - protein, 378 aa, Zea mays
  unsure (1)..(378): unsure at all Xaa locations
  Clone ID: MRT4577_125717C.1.pep
RPGRAIHPLYIGSTVSPHGRSETPLRRRHRHRHSCPRRPGAPDSPPPGLFPRPRRRWPPVLVVPDPGAEESGRGHVVVSGGAXTEHEADAWYAVPGLSLRDHRFAVPLDHSSPERGDTITVFAREVVAAGKEYISLPYLLYLQGGPGFESPRPTEAGGWLKKACEDHRVVLLDQRGTGLSTPLTPSSLSQIKSPANQVEYLKHFRADNIVKDAEFIRVRLVPDAKPWTVLGQSYGGFCAVTYLSFAPEGLKSVLLTGGLPPLGEPCTADTVYRACFKQVQRQNEKYYKRYPQDIQVVHEVIRHLSESEGGGVLLPSGGRLTPKMLQCLGLSGLGFGGGFERLHYLLERVWDPVLVAGAKKRISYYFLKEFEMWVDFDQ

SEQ ID NO: 212850 - protein, 40 aa, Zea mays
  Clone ID: MRT4577_125718C.1.pep
VAASTEKHAADVSSHAKEIPRNIQPAKVTDDHYKRSDGAL

SEQ ID NO: 212851 - protein, 70 aa, Zea mays
  Clone ID: MRT4577_125719C.1.pep
GWGFFFFFAFRSLGGVHNSRTRVLHFGHTNGAKFGCLDNLITGRKTHLSSFPREMAKKNQESARDSSFVS

SEQ ID NO: 212852 - protein, 104 aa, Zea mays
  Clone ID: MRT4577_12571C.1.pep
MSDLDVQVPTAFDPFAEANAEDSGAGAGSKNYVHVRVQQRNGRKSLTTVQGLKKDYSYNKILKDLKKEFCCNGTVVQDPELGQVIQLQGDQRKNVATFLVQAGL

SEQ ID NO: 212853 - protein, 219 aa, Zea mays
  unsure (1)..(219): unsure at all Xaa locations
  Clone ID: MRT4577_125720C.1.pep
MSKLQAESVKDDISQIAGDAKEXHTKFTETVELPIALXKNYDPQKDKRFTGSVKLPHIPRPKMKVCMLADAQHGEEGXKMTLDYMDVEALMKMTPNKKLANRLAKKHHAFLASEGIINEIPRLLGPGLNRGMXIPTLVTHQESLXESKVTDTKATVKSPLRKXLCMNDAFSNXCGCRRTKSRRYIQMSDSFLDSLLKKNWHNVRRLYVKSTMMKPYREF

SEQ ID NO: 212854 - protein, 38 aa, Zea mays
  Clone ID: MRT4577_125721C.1.pep
LQAGHAVVPKFGSWDAENIGYTVFFEKVRDNKAPPAAP

SEQ ID NO: 212855 - protein, 62 aa, Zea mays
  unsure (1)..(62): unsure at all Xaa locations
  Clone ID: MRT4577_125722C.1.pep
RQETPDINTFSWGVANPGASVGVGRETKQNAKGXFKDPRPGSNMDPYVVPSMFPEPPFFWKP

SEQ ID NO: 212856 - protein, 155 aa, Zea mays
  Clone ID: MRT4577_125723C.1.pep
MAAAAAAPWWASLCSDTTPLLDKQLVLELQHDGGVAHGDGDAVNEDDVTKFGVVPGDGHAGVQDVVKKLAGDAAHGDRDAGCQDGMMKVACGAAHGDGDVGCQDGETKVTCGAVHGDKDAICQDDSMKLAAEAMESDRNPSYLIPDVMVTRSVRD

SEQ ID NO: 212857 - protein, 87 aa, Zea mays
  unsure (1)..(87): unsure at all Xaa locations
  Clone ID: MRT4577_125724C.1.pep
STRCGVITLVTLSGSSSISSFIXMVXQQYLSPMTAVGFYYPHIQCYMYQQAIIMNILLTLQLTRIQQYXLLXQSCLMYLYLQIIRGQ

SEQ ID NO: 212858 - protein, 117 aa, Zea mays
  unsure (1)..(117): unsure at all Xaa locations
  Clone ID: MRT4577_125725C.1.pep
TPPAKALALRKPPPLAPPLLPLLIPPPPPRDLQHSAQQPRGHQVRLRPPSGAGLRQPLQMWGHPVRLPRSPGSAPGRPRTRPPXGPAPGQAARCSMPRGRPPARHATPEPSPSPPAP

SEQ ID NO: 212859 - protein, 56 aa, Zea mays
  Clone ID: MRT4577_125726C.1.pep
FQTTYILLAICCDFRCQKVTVSWNHIFCLPFVVIFGAKRLLFLEQVLASYYNYRKQ

SEQ ID NO: 212860 - protein, 131 aa, Zea mays
  Clone ID: MRT4577_125727C.1.pep
MSGQTYVNEHLMGKIEGHHLSSAAIVGHNGAVWAQSTAFPQFKPKEMTNIFKDFNKPGFLAPIGLFLGPTKNMVIQGEPGTVIRGKKGSGGITVKKTGQALGIGIYNKPMTPEQGNMGVERLGDYLVKQGL

SEQ ID NO: 212861 - protein, 117 aa, Zea mays
  unsure (1)..(117): unsure at all Xaa locations
  Clone ID: MRT4577_125728C.1.pep
MAPSRKFFVGGDWEKNGRKHSLGELIGTLNAVKVPADTDVERAQHTAYIDLVRQKLDPKNAEAAQNCYKVTNDAXTDEISPGMIKHCGATRAVLGHSERTHVFGESDELIGHKVRHA

SEQ ID NO: 212862 - protein, 97 aa, Zea mays
  Clone ID: MRT4577_125729C.1.pep
VRRRQRCNFLRSSRIRVHPTPATSTMPPKFDPNEIKVVYLRCTGGEVGATSALAPKIGPLGLSPKKVGDDIAKATGDWKGLRITVKLTIQNRQAQIE

SEQ ID NO: 212863 - protein, 97 aa, Zea mays
  unsure (1)..(97): unsure at all Xaa locations
  Clone ID: MRT4577_12572C.1.pep
MSMDPDAVAKACVEHYYRTFDTNRAALVELYHETYMLTFEGQKFQGPFDIAGKLGSVPLQACXPDRHRLLTSDVXPDGGMLVFFCGCIRTGHEVHAI

SEQ ID NO: 212864 - protein, 161 aa, Zea mays
  unsure (1)..(161): unsure at all Xaa locations
  Clone ID: MRT4577_125730C.1.pep
MSWQTYVDEHLMCEIEGHHLSSAAIVGHDGAVWAQSTAFPQVIPICMILVRSSSCMPIRSITRFPCAHMHXFKPEEMTNIIKDFDEPGFLAPIGLFLGPTKYMVIQGEPGAVIRGKKGSGGITVKKTGQALVIGIYDEPMTPGQCNMVVERLGDYLVEQGL

SEQ ID NO: 212865 - protein, 75 aa, Zea mays
  Clone ID: MRT4577_125731C.1.pep
RGFRLFGVWRHCLVRPSRPRRPWPQVRGGVVSGLLSVLSVLQLLAGPVSAESYLPLARCFRLQLYLCAWLAHLRE

SEQ ID NO: 212866 - protein, 77 aa, Zea mays
  Clone ID: MRT4577_125732C.1.pep
QLVIDSKVLQVSENSIVLKNIIVCDRRVIVDGGNVNTLVDLVQKNEVGQLNSPYWRPPPNVAAAQVTESCTRVRTRG

SEQ ID NO: 212867 - protein, 83 aa, Zea mays
  Clone ID: MRT4577_125733C.1.pep
TPPIEVPPIRPWMMISPHNSVNKTPPIEEIGVFFKHRDLFSKLYPWLWSEHHFVPNCQGSSQGINVRICHSHKGMGNPSLCCQ

SEQ ID NO: 212868 - protein, 64 aa, Zea mays
  Clone ID: MRT4577_125734C.1.pep
KKKGRRVVPNRAVHILKIGPTGRPLLLANSPPDKRGEWLLLINAQLKGGALSLETRHSPPRASG

SEQ ID NO: 212869 - protein, 163 aa, Zea mays
  Clone ID: MRT4577_125735C.1.pep
FLTNNKMTLMHYLCKVLAARSPQLLNFYVDLVSLDAASKIQLKMLAEEMQAVSKGLEKVHLEYDASERDGPVSEIFREKLKEFTDNAGADVQSLSSLFSEVGKKADALIKYFAHEENLKQAELEKKKAEKEAEAEKAKNAQLTGKNDSKPSNPRRQAKQTLER

SEQ ID NO: 212870 - protein, 80 aa, Zea mays
  unsure (1)..(80): unsure at all Xaa locations
  Clone ID: MRT4577_125736C.1.pep
PGGVGVSKXKGKPKGGFKTNHCRDSMGPQFPPRMGXVFPIGKGNNPGVNLPKGKGIKLSIIEKQRGRDFFAQGFAKEKVL

SEQ ID NO: 212871 - protein, 119 aa, Zea mays
  Clone ID: MRT4577_125737C.1.pep
SACEANERPHDAFLARGVSWTDAVASVGCSAIASKKLYMIPAADSHWRMPASFFIHIVHQGPVLTSDCCKERMRRHTQRSQFIRDLEEARKDEAAAVPCPPVLIHVAATDRLLSHRGTN

SEQ ID NO: 212872 - protein, 532 aa, Zea mays
  Clone ID: MRT4577_125738C.1.pep
DRQLGNAGRTGAPPPPPPPGAPPPPPPPGGGGRGPPPPPAPRGHLGGPPPPPPPSGRAPGVPPPPRAPGVPPPPGNNPSLGRGRGAVRPLGSAYGAAASRKSTLKPLHWVKVTRALQGSLWEELQRNDDSQSVSEFDISELESLFPAAVPKSDDSSKSERRKSLGSKPEKVHLIELRRANNTEIMLTKVKMPLSDLVSAALALDQSTLDVDQVENLIKFCPTKEEMELLKNYTGDKQNLGKCEQFFLELMKVPRMESKLRVFSFKIQFGSQVADLRRSLNIIDSSCNEIRTSLKLKEIMKKILLLGNTLNQGTARGAAVGFRLDSLLKLTDTRATNNKMTLMHYLCKVLAARSPQLLNFYVDLVSLDAASKIQLKMLAEEMQAVSKGLEKVHLEYDASERDGPVSEIFREKLKEFTDNAGADVQSLSSLFSEVGKKADALIKYFGEDPVRCPFEQVISTLLTFVTTFRKAHEENLKQAELEKKKAEKEAEAEKAKNAQLTGKNDSKPSNPRRQAKQTLERTRSASRRGRDVG

SEQ ID NO: 212873 - protein, 463 aa, Zea mays
  unsure (1)..(463): unsure at all Xaa locations
  Clone ID: MRT4577_125739C.1.pep
AAWADAWADAWGRGRGPVRPPGSAYGAAASRKSTLKPLHWVKVTRALQGSLWEELQRTXDSQSVSEFDISELESLFPAAVPKSDDSSKSERRESLGSKPEKVHLIELRRANNTEIMLTKVKMPLSDLVSAALALDQSTLDVDQVENLIKFCPTKEEMELLKNYTGDKQNLGKCEQFFLELMKVPRMESKLRVFSFKIQFGSQVADLRRSLNIIDSSCNEIRTSLKLKEIMKKILLLGNTLNQGTARGAAVGFRLDSLLKLTDTRATNNKMTLMHYLCKVLAARSPQLLNFYVDLVSLDAASKIQLKMLAEEMQAVSKGLEKVHLEYDASERDGPVSEIFREKLKEFTDNAGADVQSLSSLFSEVGKKADALIKYFGEDPVRCPFEQVISTLLTFVTTFRKAHEENLKQAELEKKKAEKEAEAEKAKNAQLTGKNHSKSSNPSRQAKQAIERTRSVSRRGRDAG

SEQ ID NO: 212874 - protein, 55 aa, Zea mays
  unsure (1)..(55): unsure at all Xaa locations
  Clone ID: MRT4577_12573C.1.pep
VYQGLCFDGKKFSFYPVTPFLFRGLFIQAKKWKFFSTPKKIKKNKKKKKKKKKKX

SEQ ID NO: 212875 - protein, 129 aa, Zea mays
  Clone ID: MRT4577_125740C.1.pep
MAPVVMMSMCVVVSLVAVQLQATSSDGATAATPSVVLPPVTVPRVRGRLEAGRKLQAVDAVGMGMDSVVRRTVVLTTMQTSNSPSLGYGSLRPNNAVCGSSCAGRPPGEPYLHQIRPCGEYYQCPSTPS

SEQ ID NO: 212876 - protein, 83 aa, Zea mays
  Clone ID: MRT4577_125741C.1.pep
KKKKKKKKKKKKKKKKKKKKKKKKKKKKKKKREKKKKKGGRPPPLWGGKPPLFWDPEKGCPGFKTPPPGVARNLGAPENWQGF

SEQ ID NO: 212877 - protein, 182 aa, Zea mays
  Clone ID: MRT4577_125742C.1.pep
MKARQLVNVVMRRYGMGSSLYAVSRIKPEEQLFYPSTKEAQASSTGEMETISISRMPAPSLRLELSVSKEDKRLDFLPFYERGSGGHSKILCVDAEGRTVLYDTDAGLLHSMPCLGTPKGPNPVSFSILDREPRDPGRADALYVMGRCCDYFDFEALMYCDPSSGRKGWRWHQLPPPPVPRA

SEQ ID NO: 212878 - protein, 66 aa, Zea mays
  Clone ID: MRT4577_125743C.1.pep
RGAPRRRHVTSIICISAPRSTPGEVEDPVQVPLLDLQMDWLLYLFLRSLKWMCCSKFHSRRWIAVK

SEQ ID NO: 212879 - protein, 62 aa, Zea mays
  Clone ID: MRT4577_125745C.1.pep
DKHKAQLRIHTLSIRKKNKRGAADLRDPGFLPPAIDDIPLIIMVSLRLQLHLARGKCNVKDR

SEQ ID NO: 212880 - protein, 223 aa, Zea mays
  Clone ID: MRT4577_125746C.1.pep
MTHPSSSSSSAPAAAPDDPTSLAPGFRFHPTDEELVSYYLKRKVLGRPLKVDAIAEVDLYKVEPWDLPARSRLRSRDSQWYFFSRLDRKHANRARTNRATAGGYWKTTGKDREVRHGARVVGMKKTLVFHAGRAPKGERTNWVMHEYRLEGDGAAGIPQDSFVVCRIFQKAGPGPQNGAQYGAPFVEEEWEADEDDDFGPMPVQRDVFGEHEAPGAMEKDIFR

SEQ ID NO: 212881 - protein, 462 aa, Zea mays
  Clone ID: MRT4577_125747C.1.pep
MASLGHPDRFQSEEALNLVLGLLGWSAPGLTGRIHAGAAPLGDLAAGEFVFFTSYISCGLALPILPFFLLLLEEFGLQLQHLTPHSVLQAAIFVHLCEMFIGITRENFVPESLILPQNIPALCNDPGLRTANLATLLTLDDSGVAVRQTGGWDPHRRIQISDAPVGGPQPAGVARSANPAVASSPLDKGKGTASGASAPGTPAAATAAAAAVAGAAIAALPGSLEGPGPQLTPPPPDTRPIDGSSSQQQESVEGGAGSTPPAAAKTAPAASHAPAKDPAAAVPASGGVSVAAVEEVPDGRFAPTPNTGVTQEARLAPTTRLLRRIWRWCSGDNSSRVPSKKLCQSPSLRTQLEERTKTASRQFISEQSQIERDRKEYKRDLQKVKGVERLQKWQQELEGKASDAALAEENLKAKEQSLDKREMDLARRETDLVFREEMLTWRGELLAEHELEAEEKERKLEE

SEQ ID NO: 212882 - protein, 49 aa, Zea mays
  Clone ID: MRT4577_125749C.1.pep
PISIVLKNTATGAIDLASTVFEQSARVIARHDSASDHGVVPLNGSLSPS

SEQ ID NO: 212883 - protein, 58 aa, Zea mays
  Clone ID: MRT4577_12574C.1.pep
AGRFHLILLIPWYLEDAHAALGTRPATSPLFPAYQQPGSLAGVSWLRKHLAAGVQLHP

SEQ ID NO: 212884 - protein, 68 aa, Zea mays
  Clone ID: MRT4577_125750C.1.pep
KQCSSSLVITILYSLSYCYVQPILYRKDLTRLDSTSTQNINIYCAIPHSHVILRLIRINTFMEHTHPT

SEQ ID NO: 212885 - protein, 59 aa, Zea mays
  Clone ID: MRT4577_125751C.1.pep
FYYLVNIPLHIVHYRLGSTFVISRSRILTCAVPLNVCPSALIVMCVWRILVDIVGRVSV

SEQ ID NO: 212886 - protein, 76 aa, Zea mays
  Clone ID: MRT4577_125752C.1.pep
CRWIVRLSRRSRRGVGRWWMGVSRWKKEEGAECYPSEDSRTLSFRMIVLCRHGCPVGVERRRRRRQRAEMSSDSDG

SEQ ID NO: 212887 - protein, 54 aa, Zea mays
  unsure (1)..(54): unsure at all Xaa locations
  Clone ID: MRT4577_125753C.1.pep
WXLAWPLPTAAQRHRXRXRRSSVPQXARAAFILVLSQLWQVVSWQVEHLSRKVP

SEQ ID NO: 212888 - protein, 89 aa, Zea mays
  unsure (1)..(89): unsure at all Xaa locations
  Clone ID: MRT4577_125754C.1.pep
GSMFVMVKLSLYLMPXIHDIFDLCSKLAKKQSVILCPGTVLSMEIWISFSLAIDSSSFLDALTKLISFCLRHREANLLCGLFLHPTSQL

SEQ ID NO: 212889 - protein, 74 aa, Zea mays
  unsure (1)..(74): unsure at all Xaa locations
  Clone ID: MRT4577_125755C.1.pep
DQVLLFETFYAARYVVSWAIGAALAIVCLLSCIVYGFMLRLFFSLGVGWSKPHLNCPSPFVXCLXNYNIICKFL

SEQ ID NO: 212890 - protein, 122 aa, Zea mays
  Clone ID: MRT4577_125756C.1.pep
IRHGVPSPSYRMLPVSRTCPSSTCRLPLRTAIPAKPYPSPALGSPRSAPYKFDARNFTRQGFRIRRTIGLQSMEIEELRLPHILRPVPCHEPRGTAQSNVDAAQPTLPTHATDLLPVLRALH

SEQ ID NO: 212891 - protein, 141 aa, Zea mays
  Clone ID: MRT4577_125757C.1.pep
AAAPLPFHDDDHDHSSTAPASPRPRPRRWPARPSSFTFPSDTGFFSWPRSPRRPPRARPEIGSPSRPGSGLKGAATASSVSRDRELSPRLQRSRSSAGGGSKASLSPEVLHTTAFCCHLPRYVTHEAERLWNGVKTDQGRR

SEQ ID NO: 212892 - protein, 98 aa, Zea mays
  Clone ID: MRT4577_125758C.1.pep
LPLVWLYSYVQNWYLTASRELKRMDSISRSPIYAQFGETLNGVSTIRAYAAGERFIATNNYKLDLNQAAYFATIAANRWLAVRLEAVGNAVVLFSVSS

SEQ ID NO: 212893 - protein, 87 aa, Zea mays
  Clone ID: MRT4577_125759C.1.pep
GNINIHFKLANLQYHKRNRTFFPFPSPNHSNQRRILANFKKPTGYHQSNYRTRGSTGMKLFLYIPEGRSLGTLALQVKVAQAGKSSQ

SEQ ID NO: 212894 - protein, 63 aa, Zea mays
  Clone ID: MRT4577_12575C.1.pep
KKSPNRDETHLQFYLAWYFYIYGCDIGKSGHIQVSSVLTGGGGEWPGISPSVFARVRFWGLLS

SEQ ID NO: 212895 - protein, 51 aa, Zea mays
  Clone ID: MRT4577_125760C.1.pep
MTYSLLQGDFFLTSRCVPPVGRTTTSPETDVYSCCDRRSLRFRKIYARWGH

SEQ ID NO: 212896 - protein, 67 aa, Zea mays
  unsure (1)..(67): unsure at all Xaa locations
  Clone ID: MRT4577_125761C.1.pep
MNSASVSGESSLSDMIQTVHFSSGNLRIGETLGVMHXFSVSAVWWCFSSSSSHLPAVLVSSMIKSTT

SEQ ID NO: 212897 - protein, 134 aa, Zea mays
  unsure (1)..(134): unsure at all Xaa locations
  Clone ID: MRT4577_125762C.1.pep
GRFLGKKVVFXKQLKSGLLLIFGPFRINGGPLPRVTQPYVFAPPPKVALSGVDVPKFYSKFFSREKNQKVKKPQGDLFXAKKXASKSLPAFKKDAPKALVFALIEAFXAVPELKTFFGARFSFRDGAKPPEMVF

SEQ ID NO: 212898 - protein, 196 aa, Zea mays
  unsure (1)..(196): unsure at all Xaa locations
  Clone ID: MRT4577_125763C.1.pep
PPFFPCFLDPYEFRNPPKIXVSSYAVVGSYILISPQPELVVGTYALXGGNKTWEKIHDENLPFVGQAVPLCGSLFAACPISNNSITASASVFHMSIKXPIHPCCGSEHSXSLSIQGFKVVASEYKIPWPLFCPRGKGSFCFIRLGSSCRRQSRKALKRLKSQGAKAKDLLVAVQVKEQSHTCKSKGLFGMAVVAAF

SEQ ID NO: 212899 - protein, 36 aa, Zea mays
  Clone ID: MRT4577_125764C.1.pep
LFFFFFFFFFFFFFFFFFFLPCNETFINILNRFSYY

SEQ ID NO: 212900 - protein, 433 aa, Zea mays
  unsure (1)..(433): unsure at all Xaa locations
  Clone ID: MRT4577_125765C.1.pep
MAPKRKTSGDGVVESPADEFAKPADDTKGSPAEFAKPVYLVAARDDDPAAYSVLEIDAAAGGDEPPRIXHRCRXTGFISEPGMSFVAAHSKHGSWIVGVGGGLRAGTIIFDPRTLKTFRGPRLRYPKREPVLISHGSEIYAISRRPLVVRPIDCEPWFEXLSFNKGVPSKDCGLCVHWSILPPPPFFPCFLNPYEFRNPPKITVSSYAVVGSYILISPQPELVVGTYAFHVVNKTWEKIHDENLPFVGQAVPLCGSLFAACPISNNSITASASVFHMSIKXPIHPCCGSEHSXSLSIQGFKVVASEYKIPWPLFCPRGKGSFCFIRLGSSCRRQSRKALKRLKVSLTALWIENIEAIMTHCQSQGAKAKDLLVAVQVKEQSHTCKSKGLFGMAVVAAFSMDTENVELGDETMDTNASCATNSTVFEAPVIRIG

SEQ ID NO: 212901 - protein, 125 aa, Zea mays
  unsure (1)..(125): unsure at all Xaa locations
  Clone ID: MRT4577_125766C.1.pep
HKNKSQKALSPPDKDDKLMNHITKHGQDXCSIIHKLSETDRCGKTCNMRYINYVMPYLKRGAXTNKTKKTYIELHTWLGNNGSQIAAQLPGRTDTDIKNLWNSCIKNXLKHKAIDPNTHKPLTED

SEQ ID NO: 212902 - protein, 152 aa, Zea mays
  Clone ID: MRT4577_125767C.1.pep
MISAKKIAHLAKKWQRMAAQGRKRLALGAAAKQADECCSYVASKGHCAVYTADGARFEVPLACLSTPVFGELLQMSQEEFGFTGGDGRITLPCDAAIMEYAMCLLRRGASAELEQAFLSTMAMSCHCASHMAPYVGRAHEPDSRLLFSFCSV

SEQ ID NO: 212903 - protein, 144 aa, Zea mays
  Clone ID: MRT4577_125768C.1.pep
MINAKKIAHLAKKWQRMAAQGRRRLTLGATSANGADECCSSVASKGHCAVYTADGARFEVPLACLSTPVFGELLQMSEEEFGFAGGDGRITLPCDAAVMEYAMCLLRRGASAELEQAFLSTMAMSCHCASHMAPYVGATHQIAV

SEQ ID NO: 212904 - protein, 102 aa, Zea mays
  Clone ID: MRT4577_125769C.1.pep
SPFRALAPHQRIYCVSHRYTFCVGVHLHLERSIVRSYSPADTLVLLGVRAVREHVLFSVVGEAPPVEDGVLVVTDACVRLISLARGAGGRQRGALGSRRPRR

SEQ ID NO: 212905 - protein, 77 aa, Zea mays
  Clone ID: MRT4577_12576C.1.pep
HEDKVAILAVLSSCRHGRLVQEGMKIFKNLKADYSIEADMEHYICVVDMLCKCGYLKEAEVVIRGMPFQPSTAICRT

SEQ ID NO: 212906 - protein, 141 aa, Zea mays
  unsure (1)..(141): unsure at all Xaa locations
  Clone ID: MRT4577_125770C.1.pep
MRAKPGRVDPPGDLLPLEGGLATQVXGNGTDLNGXLWIAXALSSSSDLISIAHMPYLXPGANIIITTTYLATIQXFERTRLVQMNSTDNLVTKXSVHIALVIPXMLLNEHXKKSTPIQHPILVARALGXSYGAYLADDSDY

SEQ ID NO: 212907 - protein, 99 aa, Zea mays
  unsure (1)..(99): unsure at all Xaa locations
  Clone ID: MRT4577_125771C.1.pep
HXYIKNTSPLTVSNTTKSLLLLLLLVTTSFASSSASSRSLRIASSRLTVASISTKIIKHRVPFHHHHVLLLPLPFSSRRGHLRSEAVVPRDRAAAAADP

SEQ ID NO: 212908 - protein, 90 aa, Zea mays
  Clone ID: MRT4577_125773C.1.pep
FPVEHASAHASATRSTTLTYDPSSLLQGRRALSLRPTMHGWLYLNHPRQHQKKQKLEKFVFDQLRTGLHLGVGSICSVCYYIIYWYIHII

SEQ ID NO: 212909 - protein, 114 aa, Zea mays
  unsure (1)..(114): unsure at all Xaa locations
  Clone ID: MRT4577_125774C.1.pep
CAVSLXXXXXXXXXAIIAVILRLXFPRHFPDWLELPGSIILLTAVAPSLFAHTFRDDLVGVFICLAIGCYLLQEHIRASDGLRNAFRKGNGVSNSIGILLLFIYPVWTGVLQIL

SEQ ID NO: 212910 - protein, 223 aa, Zea mays
  unsure (1)..(223): unsure at all Xaa locations
  Clone ID: MRT4577_125775C.1.pep
MGKGFASYLAMKTGPEGGDAAAAQQALIDADLRELGVAARKLANHAFVLGGGLGFGTSFLKWLAFLAAVYLILDRTXEANMLTXLLVPYIFFTLPNLLXQDLHVDVKYAVVVARFRGXYGKCYAIIAVILRLFFPRHFPDWLELPGSIILLTVVAPSLFADSFRGDLVGVFICLVIGCYLLQEHIKASGGFRNAFRKGNGVSNSIGILLLFIYPVWAGVLQVL

SEQ ID NO: 212911 - protein, 125 aa, Zea mays
  Clone ID: MRT4577_125776C.1.pep
MAPKAEKKPAAKKPAEEEPAAEKAPAGKKPKAEKRVPAGKSAGKEGGEGKRGRKKGKKSVETYKIYIFKVLKQVHPDIGISSKAMSIMNSFINDIFEKLAAEAAKLARYNKKPTITSLVCSRVLL

SEQ ID NO: 212912 - protein, 276 aa, Zea mays
  Clone ID: MRT4577_125777C.1.pep
MHIHTYRVTVTANQPHRISKTRKLKPRPACADEAQIHRSDSERARARARETERLSARHRLPAKTMGKGFASYLAMKTGPEGGDAAAAQQALIDADLRELGVAARKLANHAFVLGGGLGFGTSFLKWLAFLAAVYLLILDRTNWKTNMLTALLVPYIFFTLPNVLSSLIRGEVGKWIAIIAVILRLFFPRHFPDWLELPGSIILLTVVAPSLFADTFRGDLVGVFICLVIGCYLLQEHIKASGGFRNAFRKGNGVSNSIGILLLFIYPVWAGVLQVL

SEQ ID NO: 212913 - protein, 66 aa, Zea mays
  Clone ID: MRT4577_125778C.1.pep
FEHASCAYTFKLSPICSSISTLFVHPIHYVSFCLSYRPFPVLKDPRSYRNKGFAEPVAYKDQFSND

SEQ ID NO: 212914 - protein, 150 aa, Zea mays
  Clone ID: MRT4577_125779C.1.pep
MAPKAEKKPAAKKPAEEEPAAEKAPAGKKPKAEKRVPAGKSAGKEGGEGKRGRKKGKKSVETYKIYIFKVLKQVHPDIGISSKAMSIMNSFINDIFEKLAAEAAKLARYNKKPTITSREIQTSVRLVLPGELAKHAVSEGTKAVTKFTSS

SEQ ID NO: 212915 - protein, 80 aa, Zea mays
  Clone ID: MRT4577_12577C.1.pep
AKIQSLPVGKELGADRRAAGGGQAHPLQPALGARTLYRAAAQDLSKRARSLLTFWSQRRAGTEYRHTLSFTPLAFQPITV

SEQ ID NO: 212916 - protein, 104 aa, Zea mays
  Clone ID: MRT4577_125780C.1.pep
CRWFEGLCVASFVVGICHLVVVGRCRQFLVGACWLVWVLCSWPFVVPGGCCCGLMALVASVLCGLMFAFVAFSCRACCGAWAIVLAPPVVRLLLVKFTWCVFVC

SEQ ID NO: 212917 - protein, 150 aa, Zea mays
  Clone ID: MRT4577_125781C.1.pep
MAPKAEKKPAAKKPAEEEPAAEKTTAGKKPKAEKRVPAGKSAGKEGGEGKRGKKKGKKSVETYKIYIFKVLKQVHPDIGISSKAMSIMNSFINDIFEKLAGEAAKLARYNKKPTITSREIQTSVRLVLPGELAKHAVSEGTKAVTKFTSS

SEQ ID NO: 212918 - protein, 214 aa, Zea mays
  Clone ID: MRT4577_125782C.1.pep
MGKGFASYLAMKTGPEGGDGAAAAAQQALIDADLRNLGVAARKLANHAFVLGGGLGFGTSFLKWLAFLAAVYLLILDCTNWKTNMLTALLVPYIFFTLPNVLFSLIRGEVGKWIAIIAVILRLFFPRHFPDWLELPGSIILLTAVAPSLFAHTFRDDLVGVFICLAIGCYLLQEHIRASDGLRNAFRKGNGVSNSIGILLLFIYPVWTGVLQIL

SEQ ID NO: 212919 - protein, 35 aa, Zea mays
  Clone ID: MRT4577_125783C.1.pep
YSHTHLYPLMNTLFDFKTIYYKRRLISTCNSSIKI

SEQ ID NO: 212920 - protein, 72 aa, Zea mays
  Clone ID: MRT4577_125784C.1.pep
LLFFFQRGVFSLYWGPPRKLGRLLDLTVVAQIFPPPSNTLLLFPSLLPTAGRTAPFWRLTGMVLIPSAYAPL

SEQ ID NO: 212921 - protein, 150 aa, Zea mays; identical to SEQ ID NO: 212914
  Clone ID: MRT4577_125785C.1.pep

SEQ ID NO: 212922 - protein, 150 aa, Zea mays; identical to SEQ ID NO: 212917
  Clone ID: MRT4577_125786C.1.pep

SEQ ID NO: 212923 - protein, 107 aa, Zea mays
  Clone ID: MRT4577_125787C.1.pep
MPPKALGEIPGVCCSTGPYGGAVEAAGVQEIGDAAVRKGPPHLLRRVHLQLALAASPASPAARFRTIAGGWMGDAKSGHRQVLRGSMVGDGRVEVWVGGARRLEGFR

SEQ ID NO: 212924 - protein, 91 aa, Zea mays
  unsure (1)..(91): unsure at all Xaa locations
  Clone ID: MRT4577_125788C.1.pep
MAKGGAGNGLIWATAEDXGRRRPVVLSLYRQVLRALNSPALPLGHAARLAKKAECRAIFVFGAEERSLHNIRDLVAAARHTLGLLNRGRLP

SEQ ID NO: 212925 - protein, 131 aa, Zea mays
  Clone ID: MRT4577_125789C.1.pep
IVPRLCQLCSLASGLRTTDSQTGCRHGHSAASRAPHIFLRRTLRKNDTCPITTYVLSYLTLHHYHAIAHSFCEDATADDSYDPRTGKVCNGIERVLGVEVKEGAPGGIITHRIHAPRGDVQRALCTDRAPT

SEQ ID NO: 212926 - protein, 66 aa, Zea mays
  Clone ID: MRT4577_12578C.1.pep
ASMVLGQARHGMACCLHLLLVRRVSVWHLIATIILHVISPLVYVVVKHLHNWGAIFGALSSSAIQL

SEQ ID NO: 212927 - protein, 166 aa, Zea mays
  unsure (1)..(166): unsure at all Xaa locations
  Clone ID: MRT4577_125790C.1.pep
VAVLPVSLSLMRLVPALLRHALRRIPHPGLLAATTVAFGTGLAGGSWLRNIKNIAAPPSAALRLDGDGFRPPRPLPDPISATNLEMDAPDWPPPLLPFIPSTTAVQGCFGELNQPSRRFTFLPSSFHTQRQSSVLYLLRISAAVLSDDWTYLMLLPFSTXGASRWI

SEQ ID NO: 212928 - protein, 131 aa, Zea mays
  unsure (1)..(131): unsure at all Xaa locations
  Clone ID: MRT4577_125791C.1.pep
DERVHGLTPTHSRREWDAGMMRMLEKRILVALTEANARHAMLEELLSYTPGTMDITYEVLVEKTWGHSGYDIRLVCKEAXLLSLKQRMXVLNARYKRALRFXLTEVVLVTTEDIELCSRNTIPCAHVYAHR

SEQ ID NO: 212929 - protein, 71 aa, Zea mays
  Clone ID: MRT4577_125792C.1.pep
DRIVLDSNLAYVGHSLPPLGLFLQSGFVLLHLSQSHLFGHQQRYSKSKFERDPKTPPFFHKYEVSPNTIKL

SEQ ID NO: 212930 - protein, 379 aa, Zea mays
  Clone ID: MRT4577_125793C.1.pep
GRVGGPVYVVTDPSDRDPVNPSPGTLRHAAIQEGPLWIVFASDMAIRLNEELLVNSYKTIDGRGARVHVGGGGACITLQYVSNVIIHNVHVHDCVPAGNADVRSSPTHYGWRTRSDGDGISLFGARDVWVDHCALWRCADGLVDAIMGSTAITVSNSYFAHHDEVMLLGASDAYLPDSGMQVTIAFNRFGPGLVQRMPRCRRGYFHIVNNDYTSWEMYAIGGSAGPTINSQGNRYIAPADPNAKEVTKRVETAEGQWAGWNWRTEGDMMVNGAFFVPSGEGMEDIYGKASSTDPKSSALVDVLTQNAGVLGDPRNDAEETGYRGVNYAGGRTGGGGGYGYGYLGMVYAGGGDQRWRSHSALSLVSSAITVVALGCLHLL

SEQ ID NO: 212931 - protein, 71 aa, Zea mays
  unsure (1)..(71): unsure at all Xaa locations
  Clone ID: MRT4577_125794C.1.pep
LDPRGRPGRRRCCRVAEAVSRPMXXXXPAAARGPLSSLLRSXPASXHXXPPRPXPRAVPLHRPLARGPSPR

SEQ ID NO: 212932 - protein, 46 aa, Zea mays
  Clone ID: MRT4577_125795C.1.pep
GFILPLSPPTFLHFTGSYETRLAGQKVSLQHSLLKLRTHSLCHTHL

SEQ ID NO: 212933 - protein, 69 aa, Zea mays
  Clone ID: MRT4577_125796C.1.pep
MAPKPEKKPAPANRPAAEEKPAPEENPEKAPAAARETSNATETSSVPATKPRPSVRNSFINDIFEKVAE

SEQ ID NO: 212934 - protein, 52 aa, Zea mays
  Clone ID: MRT4577_125797C.1.pep
KKRQGIDFFGEVAGIPLSPDDESLFFGVWARVFSTLFQYRIIPGFDFFYSNV

SEQ ID NO: 212935 - protein, 137 aa, Zea mays
  Clone ID: MRT4577_125798C.1.pep
KILARRQCLLHELPVGMLTNPSSGIITISKKTTPPSGSGGHVLLPPIGHRAPKLNYCRSDQMQRRPVCILHSTICTGFQRPHLLVYVLLQDRRTLRPGNGSPLEKARNPAAGSCDGSSCYGGDTTTASTPSRLVQDM

SEQ ID NO: 212936 - protein, 81 aa, Zea mays
  unsure (1)..(81): unsure at all Xaa locations
  Clone ID: MRT4577_125799C.1.pep
PRVRENIKTLNXDQSERNGKALQEKMKLNKKAAQLCNRVDAFRGDAIIFMRVLNLLRGLLPILNTRIVYMDIIRTLAESTL

SEQ ID NO: 212937 - protein, 70 aa, Zea mays
  Clone ID: MRT4577_12579C.1.pep
VNQRSCSCSSMYGYHIPIQSYLQLELVLPSKAIYGLGVHAFAVWPLDKSLPLAVTKGLQEENSIMALAWA

SEQ ID NO: 212938 - protein, 185 aa, Zea mays
  Clone ID: MRT4577_1257C.1.pep
WCWFGSVTSGTHVVQKIYEGIVAQDLVHINQPWPPPAPLGIQLVFDGMPSRYITFFAHVYLVDMVGSYGSEDLHDAQRVFESVTKYVLVMPWSLLGDVSNKVPWPPPIQFRIHATQRRPIPWPSFIGITIWRHWLKTLSLVPHYAVNMRKSMFTHCSFSVICWKHCFEFLQNAWSGVDTATTLRL

SEQ ID NO: 212939 - protein, 102 aa, Zea mays
  unsure (1)..(102): unsure at all Xaa locations
  Clone ID: MRT4577_125800C.1.pep
MTGTVSKLAAPRTAAPPIRTASLRTADLAFAHCARRVRVYVAGRATRPIIAMAWVKERNGAPTNRTALHDLYQIQGLFPRYDKLCRPVTDLMPNMXSGEQGV

SEQ ID NO: 212940 - protein, 128 aa, Zea mays
  unsure (1)..(128): unsure at all Xaa locations
  Clone ID: MRT4577_125801C.1.pep
VKKPAAEAPATEKDIKAAAXGKRXRAYMRLSVGKYKEGGQGIDGTKRATKNLETYKIYILKVLKHVHPEHANXHKVQCIMYYVINDILXKMRDAFDKLSRYNKKPTITFREIQTXERLVLTDELGKHA

SEQ ID NO: 212941 - protein, 94 aa, Zea mays
  Clone ID: MRT4577_125802C.1.pep
LIGTRQPRASPRCTVPGNLRTYRNMRETIKLHLDRSRLQKCRWRDAHQSRRYTEGTVMSYNRLPRIGAGYTLRPRRTILILYDKVTMCAAPELT

SEQ ID NO: 212942 - protein, 61 aa, Zea mays
  Clone ID: MRT4577_125803C.1.pep
CNKIVYNILLVHFRDVSVRSYPHMTNKLIPTRRMELTSSYQHSIHFKYLVPDGLKPTELCS

SEQ ID NO: 212943 - protein, 56 aa, Zea mays
  Clone ID: MRT4577_125804C.1.pep
SFKCIKMCAWIRGNNIIAVSGRYVLCSFKNFTCLDKKKYKKKNKKKKSLYLPGRPL

SEQ ID NO: 212944 - protein, 150 aa, Zea mays
  unsure (1)..(150): unsure at all Xaa locations
  Clone ID: MRT4577_125805C.1.pep
MDSTATVRRGMRKCYLLLRSRRYHRTRHARCQLNCLDDAMPADAXMTCRKTITGRFDAXSTLLPGTGAGKHRPRAVVARRERSVLQEERTDYYPPLVYRDQLIRGNEEAGNQXAHAHYAIGXRYLDRCLDRNNNVDDFCTGLQGCLVFHD

SEQ ID NO: 212945 - protein, 71 aa, Zea mays
  Clone ID: MRT4577_125806C.1.pep
ELPRIESKEARRSSSRRQEIRQQQYVMWEMLRATDGLVPLAEKEAAAVAAAVGARKRKNAWRRFVYYCCAF

SEQ ID NO: 212946 - protein, 90 aa, Zea mays
  Clone ID: MRT4577_125807C.1.pep
LSRAQHDKSNCRTPNQDHFTWTSIRGTPHASLPDRPSRETIRMAAERNRVFADGTASLGWLEKLGQEVGAQSSRFLLALPSPQLIPLPVP

SEQ ID NO: 212947 - protein, 102 aa, Zea mays
  Clone ID: MRT4577_125808C.1.pep
AVVTTQSTFFFFFFFFFFGTLRSNFDQSFLYALQISLPMYTCCLAGTNDRLSISQSYPGTGQSRTLVSPDERRQPRPRAEDFLVTREFMNLATLDLSGAIAS

SEQ ID NO: 212948 - protein, 96 aa, Zea mays
  Clone ID: MRT4577_125809C.1.pep
MCNCMDRAAVPVKRVWLGIAARLGLRRKTGLGKLRKEVRTCEYRDVHVMWEMLRATDGLVPLAEKEAAAAAAVAAAVGARKRKNAWRRFVYYCCAF

SEQ ID NO: 212949 - protein, 223 aa, Zea mays
  Clone ID: MRT4577_12580C.1.pep
HRRAQVSGVFSIAFISLCAPPCRALPGGHVQLPLPSMSFLKPRYHQDWTSKKYAIPVLERYVLGSSRDGFSPGASTPPGSAPFLERICAGAPLVTLFSPGAGAPLSSLVRRHSGALLSLVAAVLLFLMLMITRPSQQCFSASSASPPVLPRSRKCFPATGYRSLRRSVSLPTSTMETPPGAMTSAPAVVIPDDNHGSFLVEQLPCCCAKPYTLFITTHCVRCV

SEQ ID NO: 212950 - protein, 311 aa, Zea mays
  Clone ID: MRT4577_125810C.1.pep
IISLSYQRQHQKRYIKGIAVAVISAAIDIYQAQQLGKFIFPKDAVAIFTVVLLNGILGYVQERGAEKALAALKDLSTSRVRVIREGKTTEVESTELVPGDLILLEAGVKVPADGRILEGANLQIREAALTGEAEAVMKQGDVLLPADSALGDRLNLVYSGTEVVQGRGTVIVTATGMKTELGKIASALQSVEPEPTPLQKRMTQLGNVLVSGSLILVAIVVVGGTLFKPDLFMQLVEVSLSMAVAVVPEGLPAVITVTLALGTQRMAKRNALIRQLSAVETLGSVTTICSDKTGTLTQNKMVVQSIISDHQ

SEQ ID NO: 212951 - protein, 81 aa, Zea mays
  Clone ID: MRT4577_125811C.1.pep
KSSSDRRGEDNKAQILYAPEPGGTPAAQKPQDVKILEVWTDNLETELAKIRNIANDYPNGTMDTKLTSVKRQPVGTYKPEN

SEQ ID NO: 212952 - protein, 76 aa, Zea mays
  Clone ID: MRT4577_125812C.1.pep
ETVQEWGHHQAGRRILSQNGTLTGTSATRRPTPRLHKKRAMPLHGANINTTNAGTGATTTRGSYWQQDTNRACTMT

SEQ ID NO: 212953 - protein, 83 aa, Zea mays
  Clone ID: MRT4577_125813C.1.pep
TGSWVINQLHRSIDGYYFFGPLFSLGWDVWVRSPPALFRKKKKFHKQVHGSQVPNGSGALLVMRKWRMADVAGFWGASLFTDF

SEQ ID NO: 212954 - protein, 109 aa, Zea mays
  Clone ID: MRT4577_125814C.1.pep
EKPAFVFGVPSCPTWGGGAPLVKEGRSVVFCCGRIKNGFVCRSPVGFVGPPSGVIWPALSAHRWGWAVKPPCRFKIWGLWAGPTSLCFEWVVSLFLFPPSFETFFFLAL

SEQ ID NO: 212955 - protein, 143 aa, Zea mays
  Clone ID: MRT4577_125815C.1.pep
VDKKSYLLVDNPKRIAARCISSWFIFDVCSTIPYQAFGLLFKKHANGLAYRILNMLRLWRLRRLSDLFARLEKDIRLDYYWIRCIKLISVTLFTVHCSGCFNYLIADRYPNPARTWIGAARPDYRSESLWVRYVTSIYWSITT

SEQ ID NO: 212956 - protein, 230 aa, Zea mays
  Clone ID: MRT4577_125816C.1.pep
MDLSPSSSAPSAPPVPCEWSGAGLGSAACGLACRVLCAVATCVFAAVGSLVGAVTGSMVGLATESGMLRGAGIGAISGAVFSIEVAESSRDLWHSGDSGVWTLLYMVDIISSLLSGRLVREKVGPAVQSAVQSQISAISSPFEETSDLFETGSVRGLPEAAVRRLPETVVAEDGAVDAAGQALCCSVCLQDFRVGDRARRLPGCRHLFHVPCIDCWLLRHGSCPLCRRDI

SEQ ID NO: 212957 - protein, 114 aa, Zea mays
  Clone ID: MRT4577_125817C.1.pep
TRLSQLESVAISFDGWHPCMEGSVVDIRLHVSKLTNLYERSAVEHPTVMTGVLVPAPSPAVRPSAAASTDAQPDRHRLNPSIRDDGCGVVTILDHHPAKEEPVDEESGVQQGSC

SEQ ID NO: 212958 - protein, 129 aa, Zea mays
  Clone ID: MRT4577_125818C.1.pep
VPATQERSSWSASACCKHVTDLFLPSVCRGRTQISAISSPFEETSDLFETGSVRGLPEAAVRRLPETVVAEDGAVDAAGQALCCSVCLQDFRVGDRARRLPGCRHLFHVPCIDCWLLRHGSCPLCRRDI

SEQ ID NO: 212959 - protein, 132 aa, Zea mays
  Clone ID: MRT4577_125819C.1.pep
GAEGAIAELVDANVKLLKKAEEFTSAGDGGGDVDLRSRSQRKILERVRKMSDKAGRLELELQRFQHALLRHEEERAARRAAKAAAASTTVQVQRRSRVQLVEYLYGRRRDSRRPKQKARGPSCCMRAKAIDD

SEQ ID NO: 212960 - protein, 41 aa, Zea mays
  Clone ID: MRT4577_12581C.1.pep
KRCIVYPKRKKRKKKRKKKKKKKKKKEKKKKEGKRDEDKKR

SEQ ID NO: 212961 - protein, 64 aa, Zea mays
  unsure (1)..(64): unsure at all Xaa locations
  Clone ID: MRT4577_125820C.1.pep
SGRGAGRGAPNILYGSPNKPNGIFIGLEDLHLFGRPPLHPLFVQQICYRMGRDSLRGGAXVIFL

SEQ ID NO: 212962 - protein, 84 aa, Zea mays
  Clone ID: MRT4577_125821C.1.pep
AIISVGERRGGQVMAAACQKGRGRGRARPLVVEKDARSGVGGDHRVHPAPSRFQQDQRGAENALAGCLLWPMHLLWEMLVVACH

SEQ ID NO: 212963 - protein, 1088 aa, Zea mays
  Clone ID: MRT4577_125822C.1.pep
TKQPISERSLSAATTEIEGLRDKKAALEESCKHLHSKVNGHQSERAMFVARIEGISHTMEKLSEKNVFLEKLLSDNNTELELLRRKLNDSEESTHTFRNQNSVLRSEKRTLMREVDSINSALLSLETQYAELEGRYLDLEQDKDKALNEVIKLRELLRLEKHKHKEATNSDMTKFSAIQKQIGLLLKEVHRREDQLQEEEHRIVEAQTEIFILQRCLGDMAEANADVLAQLQKQQVVCKDQEEKVDFLSQNNQQLTEGIGSVVEVLNLDEKYESLDLMKIDVVVQLLLHEIKCLLNTISDAQDVKQNQILEKSLVVTLLEHFGREVADLRSERSVLKQEWQAKSEELQQLQSEKHDLLKISCELRKEMEARNRKVDELKSEAKFLVRQLSELQESRQSLQAEIVKLIAENSSLSSKVYRSREKETSFDEDFSTLVDEAIRTDILGVIFRSLYEERTSQLQRLHEDFGSLHAAGNELYQEIKLMNKKLGDLQLENNYLEKELSRTLSICDGSGTEISSGRRRAMRRDTKLLKSGRKSQEGGQNMEQRKEVDNAGLEKSNEMLRVELQKLKNELQVLKSKEQPVIDVKSCDAEITKLLASMQLATANASLFKEKVLELIVTCESFEISDMVQKEVLKEEITRRNSYVDELKDKLNAIEIENRRLKVDLNGDFTLLGALQTEVDALEKQTLSLAKDCLPPSMLKKEENPLSPQLSKIAVRPSEDQNTTKVVKDMELQKLHGTIKALQKVVSDTGVVLEQERLDFNSNLQDARKQIEMLKLKEILDSDASDVNYERMMKDIQLDLVHTPSRRAAASSHGRHRKKNSVAATAQSDDNKMLALWSVDRVSSGSRRHDMDLRPPQSEAAENDKGKKRSSSEPVVTVKDLSVDKQEVLLRPIVGAVVVATGSTTEPHREWKKKVIDRLSSEAQRLRDLRSIVQELRAGVEASSDAELDGVKAQMADAEDAIAELADANAKLLKKAEEFTSAGDGCGDVDLRSRSQRKILERVRKMSEKAGRLELELQRFQHALLRHEEERAARRAAKAAASTAVQVQRRSRVHLVEYLYGRRRDNRRPKQKARGPSCCMRAKAIDD

SEQ ID NO: 212964 - protein, 77 aa, Zea mays
  unsure (1)..(77): unsure at all Xaa locations
  Clone ID: MRT4577_125824C.1.pep
MFNQICFETDSIESVMMSKLAXWGVIASHMIGETDYTIIADLTIGQSTGQIMTGAPCLAERLALYNQLLMIEEELCV

SEQ ID NO: 212965 - protein, 67 aa, Zea mays
  Clone ID: MRT4577_125825C.1.pep
MLKLFAILHTKRRNLAHCFVFCFQKWVRLPEDRKLIIWLTIKYGSVFFFKKKKKKKRKKKTKAGRPK

SEQ ID NO: 212966 - protein, 85 aa, Zea mays
  unsure (1)..(85): unsure at all Xaa locations
  Clone ID: MRT4577_125826C.1.pep
LGRVGWYKGPTLLEALDLINEPKRPSDKPLRFPLKDVSKXGGIGTVPVGPVETGVNKPGMGVTFGPTGLTXTEVKFVVIPLEAFS

SEQ ID NO: 212967 - protein, 134 aa, Zea mays
  unsure (1)..(134): unsure at all Xaa locations
  Clone ID: MRT4577_125827C.1.pep
YFQCQCXELPESYEXTRRQLYRIHSYAIQHATLYFLYIITYILXLSNKFXLILPVKLFRNLILPSYCITLFCQILQMTIFPHQSHFPTFVQSYMPMTISMLNIIKCPKSVPYIHPYLFIXNTITATIFNSMAFL

SEQ ID NO: 212968 - protein, 271 aa, Zea mays
  Clone ID: MRT4577_125828C.1.pep
MSPTKSSCLADAGAEPFRVFVGYDSREDVAYRVCRRSLLRRSSIPLEITPIVQQELREAGLYWRERGPTESTEFSFTRFLTPYLAGYRGWALFVDCDFLFVADVAGLVALARADPRRAVLCVHHDYTPTEATKMDGAVQTAYPRKNWSSMVLFNCGHPKNRAALTPEAVSTRSGAYLHRFMWLDDDEIGEVPFVWNFLVGHNRVDPADKAGTAPRAIHYTSGGPWFNRYKDCEFAGLWVQKRNAYEVDKNVDDGSMPIREAPAMVSVDARD

SEQ ID NO: 212969 - protein, 54 aa, Zea mays
  unsure (1)..(54): unsure at all Xaa locations
  Clone ID: MRT4577_125829C.1.pep
VGHPSANSVGECIRLLKAALRSQSVPPVSVEKTRDVTVLGLLLKIWPRPCGSXR

SEQ ID NO: 212970 - protein, 103 aa, Zea mays
  Clone ID: MRT4577_12582C.1.pep
IEGRADSDLVLNTIIFNCFVFPRVCNEVSSREMERVNVLRGILDNNVFAMVLGSTVVFQFVIVQCLGSFANTTPLSVAQWGACVAIGFVGMPVAVAVKMVPVE

SEQ ID NO: 212971 - protein, 52 aa, Zea mays
  Clone ID: MRT4577_125830C.1.pep
NDRFQCTQLTLIHLILCSRRHALVLACDSFSTSLRYALSSCTGSNCSVSSDT

SEQ ID NO: 212972 - protein, 67 aa, Zea mays
  unsure (1)..(67): unsure at all Xaa locations
  Clone ID: MRT4577_125831C.1.pep
QVISRYSSSLEKXLREEPCLRRSTIPPVSHRXXEEESEGASGVGDYEKKEKYHKHMAQDRRAQETST

SEQ ID NO: 212973 - protein, 90 aa, Zea mays
  Clone ID: MRT4577_125832C.1.pep
IPGAPLLEDGTVSGETALLSFRRATQETWTKAQVGQPRPRTTQQGKQQGWRPEGPQLPARRPRNVPPSRNGKCSLVNRGPKRLWSARSFP

SEQ ID NO: 212974 - protein, 135 aa, Zea mays
  Clone ID: MRT4577_125833C.1.pep
RRLEKVARLDKQTEQRRLALEAATLEAEEAEFDKLSAERELRQWRAEHEQRRAPGDTDSPRPGLAEISVLHDQGTGEGRGNPHIVSPRAGYMPRTELVMTGSAADADADADARQRKTFFPRIVMFFARKRTQSWK

SEQ ID NO: 212975 - protein, 64 aa, Zea mays
  Clone ID: MRT4577_125834C.1.pep
ACGLWVCTVTQDQSTPYSWQPYKVMPMIMIEDWEGKASPLQIFHNYTPKNNSSACAWKRRRVTS

SEQ ID NO: 212976 - protein, 117 aa, Zea mays
  unsure (1)..(117): unsure at all Xaa locations
  Clone ID: MRT4577_125835C.1.pep
CLPLRVLCVCFLGCALSSRGGPPSPLRCLLVLFFGXFLRACCPXVPSPVVPLLAFFSFAFARLSSSPXAAAACXRCCXXGXXLPSVXXPPLRGPAXXPRLXPFSALLXACLPRXALL

SEQ ID NO: 212977 - protein, 595 aa, Zea mays
  unsure (1)..(595): unsure at all Xaa locations
  Clone ID: MRT4577_125836C.1.pep
GLDAHAGKEVIYFVGWSXFHTIHLVRDGTQAPSLGDLLKMKSQEGVRVLLLVWDDPTSRSILGYKMDGFMGTRDEETRRFFKHSPVQVLLCPRSAGKRHSWVKQQETGTIFTHHQKTVIVDADAGNYRRKIVAFVGGLDLCGGRYDTPWHPLFRTLQNEHKEDYYNPNFNTVDARGPREPWHDLHSKIDGPAAYDVLQNFQERWLKAAKRHGIKKLAKSYDDALLTIERIPEIININDAIYFSDNDPETWHVQVFRSIDSNSAKGFPKDPRAATMKNLVCGKNVLIDMSIHTAYVHAIRSAQHYIYIENQYFIGSSFNWDSNKDLGANNLIPIEIALKIANKIKANERFSAYIVVPMWPEGNPTGAATQRILYWQNKTMQMMYETIYRTLKEEGLDDMYEPQDYLNFFCLGNREVADSTSTSNASNTANNPQEQARKNRRFMVYVHSKGMIVDDEYVIIGSANINQRSMEGIRDTEIAMGAYQPQYTWANKLSAPRGQIYGYRMSLWAEHIGSIEEDFNYPESLECMRRVRHLGEENWKQFVADEVTEMRGHLMKYPVSVDRKGKVKPLPGCTTFPDMGGNICGSFVAIQENLTI

SEQ ID NO: 212978 - protein, 40 aa, Zea mays
  Clone ID: MRT4577_125837C.1.pep
RAHNFKSATQEYNCNCPNKVGAKLPKLHINNAYDGLINAH

SEQ ID NO: 212979 - protein, 72 aa, Zea mays
  Clone ID: MRT4577_125838C.1.pep
KLLISIAISVKKQYKNSCSNAHALHNCISFNLKRDHYTGFPVSMHGSALPHSVVIEPLANPLIVSDPMISNL

SEQ ID NO: 212980 - protein, 72 aa, Zea mays
  Clone ID: MRT4577_125839C.1.pep
FVYISKKGGLIHITKVPHGITWHNIISPNYSSGERDHYNLTRNASNTEGNSWRNITNTIISYIPLPLLIIQP

SEQ ID NO: 212981 - protein, 124 aa, Zea mays
  unsure (1)..(124): unsure at all Xaa locations
  Clone ID: MRT4577_12583C.1.pep
MTNAYHRIEVVNDKLEKYMLYDHKSDNMVQHGRRALTLSMVLDKNYDETVTRKHERISXCTFLPPQKDEGIHILHYHNGDKYECYYDYFHDNNNHTLXSHRIATAMMHLSNAQKAEETIFPNAD

SEQ ID NO: 212982 - protein, 155 aa, Zea mays
  Clone ID: MRT4577_125840C.1.pep
INYQDYLKLRTRVEFLQTTQRNILGEDLGPLSMKELEQLEDQIEISLKHISSRKNQMLLDQLFDLKSKEQELLDLNKDLRKQLQETRPENALRVSWEEGGHSGASGNVLDPYQGLLQHLDNDPSLQFGYHHQAYMDQLNNEDLVDPNEHGRSGWI

SEQ ID NO: 212983 - protein, 114 aa, Zea mays
  Clone ID: MRT4577_125841C.1.pep
LRCQFRLVLINSFRILYSNSSFFSTFLVKMSNNKQSVLETGEGLSSSTNGMLRGATTGGGVIHQPMRLGFDSRKFSYDLNTARASTYVDFGVTKMDRLDPDRARVLFDNIRERY

SEQ ID NO: 212984 - protein, 225 aa, Zea mays
  Clone ID: MRT4577_125842C.1.pep
MGRGKVELKRIENKISRQVTFAKRRNGLLKKAYELSVLCDAEVALIIFSSRGRLFEFSTSSCIYKTLERYRSCSFASEASAPLEAELNNYQEYLKLKTRVEFLQTTQRNLLGEDLGPLSVKELEQLENQIEISLKQIRSSKNQQMLDQLFDLKRKEQQLQDANKDLRMKIEETSEENVLRLSSQDIGCSGSSGHGDEANQEHLQLALDPSLHIGYQAYMDHLNND

SEQ ID NO: 212985 - protein, 241 aa, Zea mays
  Clone ID: MRT4577_125843C.1.pep
MGRGKVELKRIENKISRQVTFAKRRNGLLKKAYELSLLCDAEVALIIFSGRGRLFEFSSSSCMYKTLERYRSSNYSQEVKTPLDTEINYQDYLKLRTRVEFLQTTQRNILGEDLGPLSMKELEQLEDQIEISLKHISSRKNQMLLDQLFDLKSKEQELLDLNKDLRKQLQETRPENALRVSWEEGGHSGASGNVLDPYQGLLQHLDNDPSLQFGYHHQAYMDQLNNEDLVDPNEHGRSGWI

SEQ ID NO: 212986 - protein, 79 aa, Zea mays
  Clone ID: MRT4577_125844C.1.pep
PNSSATTRALSVSAKASSTRPSRSTVVATMVLELPMVSAALVSLDRPLNGYVDPCRGRPQQKRGTREQGRNRRDTRTRG

SEQ ID NO: 212987 - protein, 71 aa, Zea mays
  unsure (1)..(71): unsure at all Xaa locations
  Clone ID: MRT4577_125845C.1.pep
WVEDPENGPSTATGGGFPHRLQEIKGFFEVYKKNGNKGVAVNAFLXAPGLRXAIRDPRDLXARYILQSLGR

SEQ ID NO: 212988 - protein, 103 aa, Zea mays
  unsure (1)..(103): unsure at all Xaa locations
  Clone ID: MRT4577_125846C.1.pep
GQVPGGGQRGNAPFSPIGKGPPSGWSVAPGQEVGAGPLSPERGGRSPSRGPPLCPGGPAPEIPKMGGGPSPLCVWGPPDAPRPFLRKNAPPNXALFGLPPRPL

SEQ ID NO: 212989 - protein, 116 aa, Zea mays
  unsure (1)..(116): unsure at all Xaa locations
  Clone ID: MRT4577_125847C.1.pep
FGSRSTGPLRGSVSTCHCMVPGGLYVCTQVCTDNIIQGYAEPDSGSLEAIRYRLKHMYESVSSTPEDSGVPTLIGHDKVSVRLDXDSHRTLQAICAGIHDMENESAVAWVWNIDWH

SEQ ID NO: 212990 - protein, 176 aa, Zea mays
  Clone ID: MRT4577_125848C.1.pep
MSIASKSATPAEIRSEDVLSAKTDLCLSNAIVTAGTGLAVGVVASAILFKRRPWPVFFGLGWGLGQGYQDCQRVFNPAAIPGYRIQGEHDNVASPFTLNRSTSSAPSAQEASKKFEQTKEQTKSKVSELVQQAKVKASEAAQKVEDKAVEVKDKVVQGEKKAEAKVDNLKDGKKWV

SEQ ID NO: 212991 - protein, 62 aa, Zea mays
  Clone ID: MRT4577_125849C.1.pep
LRIPRMFPLYHQGLWVLVVLCGLPPYQRTQILLTPGPKFVVSQMSWNQVEPFFVCRGPCYPH

SEQ ID NO: 212992 - protein, 72 aa, Zea mays
  Clone ID: MRT4577_12584C.1.pep
LLPPGNPNFEVGGEGPPFCWGGWKGFQEKSFFVKKKKKKKKKKKKKKKKKKKKPKKKKKKKKKACTCPGGRS

SEQ ID NO: 212993 - protein, 89 aa, Zea mays
  Clone ID: MRT4577_125850C.1.pep
LFFIYFIPLFYFFNRMIFFYLLLHIQTMTQKNHEYTRTTDTNTKKKSNNNSKTHSINRELTPRIKPNHPNYPLTFIGFNFFTLFIHIPA

SEQ ID NO: 212994 - protein, 45 aa, Zea mays
  Clone ID: MRT4577_125851C.1.pep
GHARSRRCPFSSGIPHRLSPMGTIARTSAHKKVLRFSKAVLLGIT

SEQ ID NO: 212995 - protein, 119 aa, Zea mays
  Clone ID: MRT4577_125852C.1.pep
SPPGTPSGSQGRTPHSPHRPKPREARTAPTGGPPPEARRRCQRRSRRAEPPCVVSRRAGRARDPPREEAPASGGPARGGPWRRGAVPGPLLGRRPGWGGARGALGPPGARAGLAPAPAR

SEQ ID NO: 212996 - protein, 551 aa, Zea mays
  unsure (1)..(551): unsure at all Xaa locations
  Clone ID: MRT4577_125853C.1.pep
MASQGDQATPPSAMKLVFPITGISSSKPANKKQKKEAQRRGLIVVHGIQEAARRAEENWIDSKAIHNIDEVEAHQQHKYIRDKAASADQPKSMLLFEDIAEQKVLFGSQLSKEQEKALLKFLFNNKDVFAWSANDLCGVNRDVIEHSLNVDPTIRPRKQKLQKMSHDKAEGARNEVKXRLLSARVIREVTYPEWLANIIXDLDKACPKDEFPLPRIDSLIDSAATSKLMSLLDYYSGNHQIWMKKEDEPKISFITPNGTYCYLMIPEGLKNDGGSFSRMTSKXKAGLKLNPXKCVFGVKGNFLGCLVSTKGIEANPSNIEAILWMEPLKSRKGAQRLTKRLASLNRFISRSAERNLPFFEILKSAEVFQWGPVHQKAFEDLKHYLIQLTTLTPHSSGASLLLYVVVSHAAVSAALVQEKQDEQSKKQVPVYFVSEVLSLSKRNYMELDKDIIRNREATGKLGKWAAELNEFAIDFVHRSLIQSQALADFVIDWTTRAHEEGHLTDTEAWTIFYDGSWGTFSAARLEFNCTNNIAEYEAVLLGXQKHRAMGI

SEQ ID NO: 212997 - protein, 63 aa, Zea mays
  Clone ID: MRT4577_125854C.1.pep
NPDIKTPPQTRFMYVMYQPGFFNGQTPPPSFFFGNMNLGFIFFPPLSPLRFPLFHHQSFPGGP

SEQ ID NO: 212998 - protein, 75 aa, Zea mays
  Clone ID: MRT4577_125855C.1.pep
ENSLCWRTNNYMNESRNYYIASRCIVDISEVSINAFFIFAQCFNHFRGEIQKVNKLINSRFSNMIYQMKVIYDWF

SEQ ID NO: 212999 - protein, 219 aa, Zea mays
  Clone ID: MRT4577_125856C.1.pep
MMATGPSLAGVYSARATRLVPLRAGARAPCAGAAAAEPAVEHVRRLVAEFDPAVPLDSAVTPPSGWYTDPDFLQLEIDSVFFRGWQAVGHIWQVKNPNDFFTGRLGNVEFVVCRDANGKLHAFHNVCRHHASLLACGSGHKTCFQCPYHGWTYGLDGTLLKATRISGIKNFNKNDFGLIPIKVATWGPFVLIRFDDESTEDNVYDTVGNEWLGSASDLL

SEQ ID NO: 213000 - protein, 461 aa, Zea mays
  unsure (1)..(461): unsure at all Xaa locations
  Clone ID: MRT4577_125857C.1.pep
MMATGRSLAGVYSARATRPMPLRAGARAPCAGAAAAEPAAEHVRRLVAEFDPAVPLDSAVTPPSGWYTDPDFLQLEIDSVFFRGWQAVGHIWQVKNPNDFFTGRXYVLFRCLXFQLVVILLRLSYIYKXLLPQNASKYGDXLETANLHSSNKMKQQAGXVEFVVCRDANGKLHAFHNVCRHHASLLACGSGHKTCFQCPYHGWTYGLDGTLLKATRISGIKNFNKNDFGLIPIKVATWGPFVLIRFDDESTEDNVYDTVGNEWLGSASDLLGTNGIDTSLPHICRREYIINCNWKVFCDNYLDGGYHVPYAHGDLASGLQLQSYETLTYERVSVQRCESAPAEPDDFDRLGTKALYAFVYPNFMINRYGPWMDTNLAVPLDSTRCKVVFDYFLDKSLLDDQCFIKKSLEDSEQVQIEDIALCEGVQRGLESPAYSVGRYAPSVEMAMHHFHRLMHANLSEY

SEQ ID NO: 213001 - protein, 85 aa, Zea mays
  Clone ID: MRT4577_125858C.1.pep
NVGPIKRGDPPHLLKNFPHPPQTLGAMGHKKRPRFLNPRPHGKKICGILWTRNNQAGPWNGCPPAPTLVCFHHRAGSSKYVKKRF

SEQ ID NO: 213002 - protein, 57 aa, Zea mays
  Clone ID: MRT4577_125859C.1.pep
RNDLLLIRDGGESFRIIDKTKRDDASTIIQKKEWAQSKPNLEKHFRKLRDFDYSNWF

SEQ ID NO: 213003 - protein, 167 aa, Zea mays
  unsure (1)..(167): unsure at all Xaa locations
  Clone ID: MRT4577_12585C.1.pep
MPPKLDPAQVVEVFXIRVTGGEVGAPSSLAPNIGPLGLSPTKIGEDIDKETVQDWKGLLVTVQLTVQNRQVMVSVVPSDGVLVIMALNEPNRLRLKVXNIKHSGNISLDLPIEIVRTLRHMSMAKELAGTVKEILRTCVSVRCTVACNDPKDLEQEIDDGEVEIPSV

SEQ ID NO: 213004 - protein, 50 aa, Zea mays
  Clone ID: MRT4577_125860C.1.pep
IVLLFTIAYGSIFMASLQTRWELTKDASIHYFAGHLYQTKQRARGFSITF

SEQ ID NO: 213005 - protein, 348 aa, Zea mays
  Clone ID: MRT4577_125861C.1.pep
MATTTTTTPLIVSFSRSCSCPYPHRHFPGKPKLPAPTSCSLSLRLLAAPLAVLPRRPRDVSAAYGDGDMDDDFGDFDPDDADGVGEDDDVDNEQDYDVDYDRLLAPVVKPPSPSGASASPGEEGDIAMVAADSFVSTRDSASDTVVDYAVDEDEFHKIRLLHCDFLIRKVPDPDDDVFDFREMYVTPPDTDIYSIPRVLAPMPQKYARCTKKNFGRYHVSEPPVEHLRDPLYKTEREIMKVFLTKHYRNRRADDPDFFLDFEEIYVIDSRTRSITRAKVVVSVPEGKKRDRRNDLLLIRDGGESFRIIDKTKRDDASTIIQREEWAKSRQDVEKHFRKLRDFDYSNWF

SEQ ID NO: 213006 - protein, 85 aa, Zea mays
  Clone ID: MRT4577_125862C.1.pep
VGWPGFFAGKGAVSDPHLMFVCWLIREPPLFSLCFLLVCFVEVFVNDYFPPAGPMSVINSPLVGTPVAFVKTASVLELTLPNERP

SEQ ID NO: 213007 - protein, 67 aa, Zea mays
  Clone ID: MRT4577_125863C.1.pep
GLMEILTLDLQGKAAVGRTSSANISLAAGKIKMHVVINRMATSCFVSINQTMLFIDISCRRLDLNYC

SEQ ID NO: 213008 - protein, 231 aa, Zea mays
  unsure (1)..(231): unsure at all Xaa locations
  Clone ID: MRT4577_125864C.1.pep
TQWQLLFSSSSSSSPPPPRSLLQAXTTIFPTEALPTKSGYLPIPAANASMYYAFYEATHPLTPPAATPLLVWLEGGPGLSSFASNFLQIGPYVFSSSPADSDTDSSDASSFAPPSLRLRPNPYAWNRRFGLLFLESPLGTGYSAAPSPSAIPTTQPAVAEHVLAALQSFLSSQPDDATFRARPLFLTGESYAGKTIPTVAALILATTTSTTTTNPALPEHLVTRMRINLRG

SEQ ID NO: 213009 - protein, 55 aa, Zea mays
  Clone ID: MRT4577_125865C.1.pep
HHCTLVLKALDELAWIYISSSHDAFTPALMQGLSAYHDWERAPFIRKKVRAGCFR

SEQ ID NO: 213010 - protein, 78 aa, Zea mays
  Clone ID: MRT4577_125866C.1.pep
GGENFHVQPGHNYILFYGRTSAMFLAKNFGTTNSHFKYWNLIPKLHFTQSFGKKKWLIQTPYSGDRLINFFKTTYPLT

SEQ ID NO: 213011 - protein, 77 aa, Zea mays
  Clone ID: MRT4577_125867C.1.pep
PRHISHYIHLYLLSDPSHGCIQFLCKITHGIVTVGRGTPPPHRVRSGNDRRNVYGWACSLLCLRLQSNELCQREKDW

SEQ ID NO: 213012 - protein, 54 aa, Zea mays
  Clone ID: MRT4577_125868C.1.pep
LIYVLVYVLKKKKKKHKPKKKKKNKKGMDKPTRVCATILLRDNTINSQRNPNPT

SEQ ID NO: 213013 - protein, 52 aa, Zea mays
  unsure (1)..(52): unsure at all Xaa locations
  Clone ID: MRT4577_125869C.1.pep
CIMVERKKKLMISNRVSARXSRMMKQKHLDDLMTQLTHVQKQYLEIITNLNF

SEQ ID NO: 213014 - protein, 107 aa, Zea mays
  Clone ID: MRT4577_12586C.1.pep
LTKSKNSCQNLKSRTFETQSSGWKAGSLPGTKGTALLLLNQCLEKKSGVYLCNGSHMHSEAGKEDTAPSLTSELASLQCNALAIGDRSCQFKSHFLSVLPELYVEMD

SEQ ID NO: 213015 - protein, 192 aa, Zea mays
  unsure (1)..(192): unsure at all Xaa locations
  Clone ID: MRT4577_125870C.1.pep
MSHYHSADFEEMEDEYDMNEPVDDMEGEDEYQELVIRDSDAEDEDDADQLHKLSDTSAADARSGKDIQGIPWETIEVTRETYRQARLEQYKNYENIPNSGVAAMMLRNLVWATSKHDVYLVLHYSVLHWSALNGVDTEIMDVHGHVAPSEKHPGSLLEGFLHTQISTMAVKDNLLVAGGFXQGELICKHLDR

SEQ ID NO: 213016 - protein, 95 aa, Zea mays
  unsure (1)..(95): unsure at all Xaa locations
  Clone ID: MRT4577_125871C.1.pep
MPINRIALGSHQEVYHPGALKAAFAEFISTLIFVFXXQGGGVXXXXXTXXXXTTLLKINLNVGNIGSHDRDFLRYVYGECKNWGVLRGHKNGFEF

SEQ ID NO: 213017 - protein, 448 aa, Zea mays
  Clone ID: MRT4577_125872C.1.pep
MSHYHSADFEEMEDEYDMNEPVDDMEGEDEYQELVIRDSDAEDEDDADQLHKLSDTSAADARSGKDIQGIPWETIEVTRETYRQARLEQYKNYENIPNSGVAAMMACKSTEKGRTYYEFRRNTRSVKSTISHFQLRNLVWATSKHDVYLLLHYSVLHWSALNGVDTEIMDVHGHVAPSEKHPGSLLEGFLHTQISTMAVKDNLLVAGGFQGELICKHLDREGISFCCRTTYDDNAITNALEIFNTSSGALHFIASNNDCGVREYDMERYQLFKHFRFDWPVNHTSLSPDGKLVIIVGDDTDALLIDANSGKTIHSMKGHLDFSFASAWSPDGLTFATGNQDKTCRIWDARNLTESVHVLRGNVGAIRSIRFTSDGHFLSMAEAADFVHIFDIKSDYNKRQELDFFGEVSGMSFSPDTDTLYVGISDRTYGSLLQFGRLYNYSYLDSLL

SEQ ID NO: 213018 - protein, 49 aa, Zea mays
  Clone ID: MRT4577_125873C.1.pep
YCRPHLARGIWFRGLYGLCVCSSELVVRYDAPRDSCGKHGPCVVNTQIS

SEQ ID NO: 213019 - protein, 120 aa, Zea mays
  unsure (1)..(120): unsure at all Xaa locations
  Clone ID: MRT4577_125874C.1.pep
KTRGEPRVRLLEILYSFQKTEFWYLKEKGQKNYGLATPXXPXSHPXQEKRWLPVPCVAKPGLTETARRDLHQKRDCSSQIHKAAMAINNALLAEIPIPHLYKETLPKCGRANIGDLIYLH

SEQ ID NO: 213020 - protein, 132 aa, Zea mays
  Clone ID: MRT4577_125875C.1.pep
MGVAAGRAAAMVAAAAAAAAVLLLLAGGAHADCYDDCFKDCMARFKSMRDYCSYACEKVCDPDATLQRPLAVVGPAAALADHHPLDKKHGAVWPAALPDHPFHETHGDVEPAGEPDPAGHVVRRPARVPVLP

SEQ ID NO: 213021 - protein, 202 aa, Zea mays
  unsure (1)..(202): unsure at all Xaa locations
  Clone ID: MRT4577_125876C.1.pep
MQHDQRKKGSVEAEFFTEYGDASRYKIQEVIGKGSYGVVCSAVDVHTGEKVAIKKIHDIFEHISDAARILREIKLLRLLRHPDIVEIKHIMLPPSRREFKDIYVVFELMESDLHQVIKANDDLTKEHYQFFLYQLIRALKYIHTANVYHRDLKPKNILANSXQTEIVILDXRVDGSNCKLKICDFGLARVAFNDTPTTIFWT

SEQ ID NO: 213022 - protein, 51 aa, Zea mays
  Clone ID: MRT4577_125877C.1.pep
LDLNAALFFFLKRFFYIFSWIQLPVMFPCSGPLPGGVCLISAAQRYMARPG

SEQ ID NO: 213023 - protein, 74 aa, Zea mays
  unsure (1)..(74): unsure at all Xaa locations
  Clone ID: MRT4577_125878C.1.pep
ENAERDERAKKSVSINKFLRPVDGXRYYSRRGRGRGRGDRGGFTVGYGGGYSRGLNSVVTSIEXHAQLRSLAGK

SEQ ID NO: 213024 - protein, 102 aa, Zea mays
  Clone ID: MRT4577_125879C.1.pep
LYLSLTLRRSLARLRGFCSSPHSHPRHSLISSGAMYLLFALSCSSVSALSHRSREFCRRSFAWSWRLRPAFSRGRAPFSWRSWPSASGRRGLGKKPARVEGL

SEQ ID NO: 213025 - protein, 111 aa, Zea mays
  Clone ID: MRT4577_12587C.1.pep
GMAIQCAGSSAIWGIVAVISSIGGSASSDSVRACMGQSCSKVWSQFDAVCLGSHTSEFVLGMCVVNASSRVSLLYSEPTSSYVCLRSWCSRLESSSSDLQPRVLHACVILI

SEQ ID NO: 213026 - protein, 54 aa, Zea mays
  Clone ID: MRT4577_125880C.1.pep
PSLARVSMLVVRLVSDFVAPYLRSVRACLGPSVQRQTHWDAHRLFKIASAWTSL

SEQ ID NO: 213027 - protein, 35 aa, Zea mays
  Clone ID: MRT4577_125881C.1.pep
WEALLASCKVHGNLGLGRIAAKKILEITPHDYSAY

SEQ ID NO: 213028 - protein, 103 aa, Zea mays
  unsure (1)..(103): unsure at all Xaa locations
  Clone ID: MRT4577_125882C.1.pep
RQAPXKXNKAXXXXXGTGTXGXXGXGXXXPXPPGXXRXXGQADSXAXHXGXXXAXXAXXQXXXAPXXGARADRXGRRPXRXXXXPGAXXDXAXXATTPXRGPA

SEQ ID NO: 213029 - protein, 375 aa, Zea mays
  unsure (1)..(375): unsure at all Xaa locations
  Clone ID: MRT4577_125883C.1.pep
MPSGCSVSSLAARFAFFPPEPATYAVRKDKATGRLVASGVPRDNAMDVLLVDTSRGNKVVAFYFRNPCARLTLLYSHGNAADLGQLYDLFVQLKVNLKINLMXGYDYSGYGASTGKPSEENTYADIEAVYQCLETEYGISQEDIILYGQSVGSGPTLHLASRLPRLRGVVLHSAILSGLRVVCHVNFTFCFDIYKNVKKIKKVNPLPVVIHGTDDDVVDWSHGKELWRLAREPHDPLWIKGGGHCNLELYPDFIRHLSRFVREMETVTTKARLRKIRPALHQXARRRRTGQARRRRRRRRPPAPPPSPPTAAAASASAXTCPSCGSFGCDCCWPLRSCLALRFPRCCRPPAACFTCGGCCWSCRCRSCFKCCCCC

SEQ ID NO: 213030 - protein, 117 aa, Zea mays
  Clone ID: MRT4577_125884C.1.pep
SPAIGRENECIAHARPVPCDRHAMQERWHVPCTNSSTLTMSRLPQNDIAADIATLEKNDASYPSQYEDLHNYGPQKKVKTTPREVPTDTRMTIGGSRGPRTTLPRWSVTCLIIQTVS

SEQ ID NO: 213031 - protein, 38 aa, Zea mays
  Clone ID: MRT4577_125885C.1.pep
SRGPGEGHNYSLIYCLLRMPSPWFEICKQFFYPQTSWY

SEQ ID NO: 213032 - protein, 75 aa, Zea mays
  Clone ID: MRT4577_125886C.1.pep
PGNNLGPPHSLTLFELMFSCPYMGDVDSMSGCKTSYFKVINLHLSERLKLPYPATQGTSSLFVHAQLSNQAHLEV

SEQ ID NO: 213033 - protein, 50 aa, Zea mays
  Clone ID: MRT4577_125887C.1.pep
SHLGLRGVSACLPQSVYRLEESLMRSRILASFDSMTWFSSSFVTELSIVA

SEQ ID NO: 213034 - protein, 100 aa, Zea mays
  Clone ID: MRT4577_125888C.1.pep
RQRVRAATAGSYGRAIAGSFEGRVLYGKGVSTRRAVHALAYDKNLEDHMRPAFVPDDVIGSARSPDKYWSPHPMTGLICPAVVDPKLLDGGTPDASTYAA

SEQ ID NO: 213035 - protein, 59 aa, Zea mays
  Clone ID: MRT4577_125889C.1.pep
GFSPVAFSEDVADDVRSLLRRYREGWSMRDTGLDDSAAGAGIFLAWKEQPLVWASAWRP

SEQ ID NO: 213036 - protein, 80 aa, Zea mays
  Clone ID: MRT4577_12588C.1.pep
PNSGEGLGTVYVCHAGPAPSVRSHLVCRARAAEAETTTTTTSKAVCNTDGPVSETCDLDGDVRTNGSALSVTFVPVSPSE

SEQ ID NO: 213037 - protein, 190 aa, Zea mays
  Clone ID: MRT4577_125890C.1.pep
MGKLLPRHPSPLLLLGVAICIFSSSLAAVRGAPVYRADYLVDGNQLVDMQGDMGPVVSGTPTNLYLIWYGRWEAAAQAVLRDFLASLSAPAPFPAVSDWWARTPRMYADQTGANVTGAFAVAGEHSDAGYSHGALLRRIDVQSVIRSAVYAYPDPLPLDPYSGAYLVLTYPDVQVDEFCRALCGFHYFTF

SEQ ID NO: 213038 - protein, 50 aa, Zea mays
  Clone ID: MRT4577_125891C.1.pep
ISCCLAPKPVGTEYSSTRFGLSNNQSVLSLTWRTGSLTVIFRSVVFALLS

SEQ ID NO: 213039 - protein, 66 aa, Zea mays
  Clone ID: MRT4577_125892C.1.pep
LTRWRTRGRTFYLYQWELNDGRDHIYPRTVSHGHYWGQRHDAVVYILRSHSGRRTHPPLTPGALLL

SEQ ID NO: 213040 - protein, 80 aa, Zea mays
  unsure (1)..(80): unsure at all Xaa locations
  Clone ID: MRT4577_125893C.1.pep
GDWNVEVERIGQKEMNFPSPLERSDIFLSEGHRELRSISPGLRWDGVGSRRTGCYTAXXLSFWXXDIKGKTXDSKFGXYS

SEQ ID NO: 213041 - protein, 64 aa, Zea mays
  unsure (1)..(64): unsure at all Xaa locations
  Clone ID: MRT4577_125894C.1.pep
MAIRSMAWISLLLALTVALSALAEEEPAAVAEGEAVLTLDVDSFDEAVAKHPFMXVVEFYVPWC

SEQ ID NO: 213042 - protein, 55 aa, Zea mays
  Clone ID: MRT4577_125895C.1.pep
SNSKEWKTSKRLNIHAIFGGIFFMRACFDIWTTKYTYHLLSYKFATSLEMHSLSP

SEQ ID NO: 213043 - protein, 147 aa, Zea mays
  Clone ID: MRT4577_125896C.1.pep
MKATHSVSIVAENVTNPRPGSRSSRRSSRDFEHNDNTYASLLLEDIQNYHQQSASAATATATPAPTLALPACVSNAFSILEAVANLKLLVARQQELRAGEVGQRQGIRRQREVRRQWCGGHHPRGGVGGRREGRPHGAEHAQVRLRA

SEQ ID NO: 213044 - protein, 60 aa, Zea mays
  Clone ID: MRT4577_125897C.1.pep
MASHGVAPDVKDCNRVLRVLRDAARWDDMSAVHAEMLQFGIEPSICTYNSLLDFFLKVGW

SEQ ID NO: 213045 - protein, 86 aa, Zea mays
  Clone ID: MRT4577_125898C.1.pep
LNPGEKASFFPQLTKIFKILNGLRPKNFKWVANPFFPFPPRGTGFYFPRGFSKKPTLSIFGSHKTIKVLTQGPGPFFEPGAPLINP

SEQ ID NO: 213046 - protein, 69 aa, Zea mays
  Clone ID: MRT4577_125899C.1.pep
ALHKPLYYPHERPQLQVALVVSSRSSLNSTLLPPLLSPVARGLGARISPRRRMSSCMTRCRTSYPRTYG

SEQ ID NO: 213047 - protein, 92 aa, Zea mays
  Clone ID: MRT4577_12589C.1.pep
MGRGKVQLKRIENKINRQVTFSKRRNGLLKKAHEISVLCDAEVAVIVFSPKGKLYEYASDSRMDKILERYERYSYAEKALISAESESECPRA

SEQ ID NO: 213048 - protein, 77 aa, Zea mays
  Clone ID: MRT4577_1258C.1.pep
AEQTVPPTAPTFFHTRDRHQNEERGGSFAARGVHPLSNRPRLPLTSTAGSKSIPERTMLPYSWRTKQQGEDLLLTSQ

SEQ ID NO: 213049 - protein, 196 aa, Zea mays
  Clone ID: MRT4577_125900C.1.pep
MEEKDTTTRISKAEHASSPLETMCGVTKSAEAPTTVPTVTRKKEVHGVQRTKERENMTTADSACEKDKGSSQRVQEENESERRLEKEREVEEKERRKLEKERELAEEKERRKFEKERELAEEKERRKMEKEKEHAEEKERSKLEKEKELAEEKERHKLKKERELAEEKERRRLEEAERERERKKDRLAVERATREA

SEQ ID NO: 213050 - protein, 102 aa, Zea mays
  Clone ID: MRT4577_125901C.1.pep
QNIYLKWLGVQHIRIILEGPVTTVLQAQGHRTNNFPRTGSINIVLYKKSKVCSHASLSPVGWPFASLHNFPSPVCLHYPFKAMPVYHAAHVAGGANTHMTSH

SEQ ID NO: 213051 - protein, 50 aa, Zea mays
  Clone ID: MRT4577_125902C.1.pep
PDNCIKKKKKKKKKKKKKKKKKKKKKKKKEEKKKKFFCPRPPLLAAWGGD

SEQ ID NO: 213052 - protein, 55 aa, Zea mays
  Clone ID: MRT4577_125904C.1.pep
ASATRDEWMTTLPPEKKARVPMHSSTSVNMNGKKRRGDTSVWTDTPLGRAQKAQQ

SEQ ID NO: 213053 - protein, 83 aa, Zea mays
  Clone ID: MRT4577_125905C.1.pep
LILHPYFSGAADIGDEGTTEKARKARADAFWRFLCPGTHSLDYPLSNPFSEAVCCSSARVADERVLFCVAEKDDLLDRGIWYY

SEQ ID NO: 213054 - protein, 119 aa, Zea mays
  Clone ID: MRT4577_125906C.1.pep
GHLFILGHDIFLHKHGAFSLNGWVLIAQYHLLYMTTSSSCLFWICFMSSRLPTLFGPSGVCAADEEEVAPAREGFELNICSQSCTSSSSKQYTCHFWGSTIKNMEIPMLPKSRAPGSKN

SEQ ID NO: 213055 - protein, 618 aa, Zea mays
  unsure (1)..(618): unsure at all Xaa locations
  Clone ID: MRT4577_125907C.1.pep
MDAGAGATAIRVPYRHLRDAEMELVSLNGGAPGGDTGPPPPPPKDQPRSRADRTKLVLACMVAAGVQFGWALQLSLLTPYIQTLGIDHAMASFIWLCGPITGFVVQPCVGVWSDKCRSKYGRRRPFILAGCIMICAAVTLIGFSADLGYILGDTTEHCRTYKGSRFRAAIVFILGFWMLDLANNTVQGPARALLADLSGPDQCNSANAIFCSWMAVGNILGFSAGASGEWHKWFPFLTTRACCEACGNLKAAFLVAVVFLLLCMSVTLYFAEESPLDPKDTQGLSDSAPLLNGSRDAAHASNEPNNERFPNGHVGLNNVSANNNTEEFTNVNSNTENGGVFNDGPGAVLVNILTRMRHLPPGMHSVLLVMALTWLSWFPFFLFDTDWMGREVYHGDPNGDLSERKAYDNGVREGAFGLLLNSVVLGVGSFLVDPLCRMIGARLVWAISNFTVFICMMATTILSWISSDLYSSKLHHIIGANKTVKITALVVFSLLGLPLSITYSVPFSVTAELTAGTGGGQGSCCAYTVLISSLANHSDWYCLCSISXLATGVLNLAIVVPQIVVSLGAGPWDALYGGGNTPAFVLASVFSLAAGVLAVLKLPKLSNSYQSAGFHGFG

SEQ ID NO: 213056 - protein, 183 aa, Zea mays
  Clone ID: MRT4577_125908C.1.pep
SVEFAEQVIETNYYGTKRMIDAMIPLMKRSAYGARIVNVSSRLGRANGRRNRIGDVSLRDRLLKDDCLSEQLIDEMITKFLEQAKQGTWSLNEWPQMYTDYSISKLAVNAYTRLMARRLSDRPEGQKIYINCFCPGWVKTAMTGWEGNVSAEEGADTGIWLALLPQETDTNGKFFAESCEISF

SEQ ID NO: 213057 - protein, 45 aa, Zea mays
  Clone ID: MRT4577_125909C.1.pep
AKSPMERIPRHVHGGLGGLGTTWDGALAIFGSTWRAPGRSDDSDY

SEQ ID NO: 213058 - protein, 94 aa, Zea mays
  unsure (1)..(94): unsure at all Xaa locations
  Clone ID: MRT4577_12590C.1.pep
MRIFRDALTGNTITLRGDRRXPVDXVKVEIMDEEGIPPDRXRIIFAGNGLXDVRTLADYNIQKDSTLHLVLRLRGGDALSLLKSPDRTRLYTPR

SEQ ID NO: 213059 - protein, 82 aa, Zea mays
  unsure (1)..(82): unsure at all Xaa locations
  Clone ID: MRT4577_125910C.1.pep
KIKXXXNPFLLIIHXQXTKHXXTLSQHHSHXXXXXXHHHLPQFSXHXXSXHXPXXHXXXNTXPTXLSXLIPXLXIXIXXHSL

SEQ ID NO: 213060 - protein, 69 aa, Zea mays
  Clone ID: MRT4577_125911C.1.pep
SPHRGDSKEIRVAGTAGIHRFYRGGLNKYLHDKSYRLTFNRRSGGTCHFAPIRTQPPGTKWNARKNLMG

SEQ ID NO: 213061 - protein, 63 aa, Zea mays
  Clone ID: MRT4577_125912C.1.pep
QLPAERGKVMVPGYQNGGSDRSDLKLIGVYPLIPLLPDTCGVKKGEGTAVVHVSSLLNMIIVT

SEQ ID NO: 213062 - protein, 43 aa, Zea mays
  unsure (1)..(43): unsure at all Xaa locations
  Clone ID: MRT4577_125913C.1.pep
LQLHTLSLLSSSGVLPGPPGIPTANPCTGQPRATERGYEGLLX

SEQ ID NO: 213063 - protein, 89 aa, Zea mays
  unsure (1)..(89): unsure at all Xaa locations
  Clone ID: MRT4577_125914C.1.pep
KRFKENFKKKQGRGTWGKNWPKDAGPPFHWLGKKFGFKGPAPCLGGALKGGPHPYFQKLGRDKFFSGVFFNTLGPGIWKXPRGKGAPFL

SEQ ID NO: 213064 - protein, 525 aa, Zea mays
  Clone ID: MRT4577_125915C.1.pep
PCGTGLHGQIPADFSSRLVGLKVLDLSRNNISGVVPDMSSLGLHLLDLSVNNLTGEIPVALVKKLTSMDRFNFSYNNLTVCASELSAEAFATAFAQSRNDCPIAVNPDSIVKSRGKHKGMKLVLAVVLSLFFSVLGLLCLAAACRRGRKRCDELPVVKQVSSFDEPAVSGPFSFQTDSTTWVADVKVATSVPVVIFEKPLLSLTFADLLAATSNFDRGTLLAEGRFGPVYRGFLPGGIQVAVKVLVHGSAIGDQDAARELERLGRIKHPNLVPLTGYCVAGVQRIAIYEYMESGNLHNLLHDLPLGVQATEDWSGDTWEDNTGGVATTEIVTPEGTATWIFRHKIALGAARALAFLHHGCIPQIVHRDVKASSIYFDCAMEPRLSDFGLSMVAGTRADLLHHSPGYAPPEFSGSENAAATAKSDVYSFGVVLFELVTGKKPLGDEYPGAQKEASLVSWARAMVKASLAPSIIDPKIRDTGPERQMEEALRIAYLCTAELPSKRPAMQQIVGLLKDIEPKVEEEGD

SEQ ID NO: 213065 - protein, 106 aa, Zea mays
  Clone ID: MRT4577_125916C.1.pep
CVWPPTLSVLGLCSVLEGIWATWSVVKRLLPYLVLLARVVCYWAPGPVFLCLLGGTSHRPLGPLAFASGGRSFNFCWGNAREKREKNKKKKKNPKKKEGRPPTSRL

SEQ ID NO: 213066 - protein, 72 aa, Zea mays
  unsure (1)..(72): unsure at all Xaa locations
  Clone ID: MRT4577_125917C.1.pep
GILRRGYQVFLRTKGLNLENMLNPRGPFNPWDLSGAPNKTAFLKVKEIKNGRLTLXFSMFAFLIQAYVTGKG

SEQ ID NO: 213067 - protein, 298 aa, Zea mays
  unsure (1)..(298): unsure at all Xaa locations
  Clone ID: MRT4577_125918C.1.pep
MALVVGPSIALPATNDDTSPRDDLTIPTNEASTTTTMRPTEETKRANLGFFDERKTSIISSSLTAKLEDTLVQFLQENQDVFAWQPVDMLGVPRELDEHKLKQVFNSLRRYCWKLNPEKCIFGVPAEKLLGFIVSHQGIEANLEKVEAILRMEPPRSQKKVQMLTGYMAALSRFISWLRERGMPLYKLLKKIGDILRNREEVGRTTKWVCELGAHDIEFRPGKVIKTQALVDFISEWXRATNPQKPRVSXEVWKMYFDGSLKLQGEGAGILFITPRGDQLKLMVYGDSLVVISLVNKD

SEQ ID NO: 213068 - protein, 64 aa, Zea mays
  Clone ID: MRT4577_125919C.1.pep
IRQNGAKRRKSELSYDLIEGEKRALLKGGSSVGTMCMDIFSILSFVVVLFLGFSFFFFFFFFFF

SEQ ID NO: 213069 - protein, 72 aa, Zea mays
  Clone ID: MRT4577_12591C.1.pep
LQHSLGPQRLHTQSGATLPGPASESHTNIWRNKACSMLQTQYLPRHRQEKQDHLGLAHQWLTLQTTHYFAQH

SEQ ID NO: 213070 - protein, 251 aa, Zea mays
  Clone ID: MRT4577_125920C.1.pep
HVVSSNRRRRLHVCTNASTPPRSCVEHGAATATASAAAATSATATAATAAGLGVPPESSFTSISLHPDLYRFRFDGDRLIYELEGNPAHNYTQPRSALDWLRTTTIRGPGVSLTVSRLDSWGHCHSLLIQRGIPPMHAEHDSISFRGPRAVAIPEPSSLHQDLRHRLVPEDVYNALFLYVRAVRTLRVTDPAGFVRTQCSKPEYAWVTSSAWDNLAHFALLTAPHRPRTSFYLFSSTLRRLEHWVRRHTFL

SEQ ID NO: 213071 - protein, 124 aa, Zea mays
  Clone ID: MRT4577_125921C.1.pep
SLSAKIVVKSSSLPVSLLLFAGHSLRFSQFFSPLPDCIWWEFIIGQHGSNVSDCFKDVLLVHLALTLSHNSSLCAHKRTSCSSNSVASLAPLAIRALAAERLLNQMCRPRGGRREGTVAAAWVV

SEQ ID NO: 213072 - protein, 43 aa, Zea mays
  Clone ID: MRT4577_125922C.1.pep
IQSGTGRRCAHCPIRASFNTCIFSGQTSASKCNFKTAVHFLAL

SEQ ID NO: 213073 - protein, 98 aa, Zea mays
  unsure (1)..(98): unsure at all Xaa locations
  Clone ID: MRT4577_125923C.1.pep
GVQGKTVFLQSLYHVVIFGSRVCATPAVHLNIFLRYAHLNFRSPWPHILVCGAYLIVSSRXIISVLVPVQYFIRYMLCRFGYVVTSIHISQWTYHWSN

SEQ ID NO: 213074 - protein, 123 aa, Zea mays
  Clone ID: MRT4577_125924C.1.pep
LQSVSRFPWVPSLCVRVGNGVPHWPWALLVGEPAPWRGCQAEHPPLAKKASFYCSGCSPGTCCMIDKFEAFCYGRFCVHMPGSRAPLSICVPFMVCCFWVFPSVLIHLKGFNMTICFFPHSDV

SEQ ID NO: 213075 - protein, 58 aa, Zea mays
  unsure (1)..(58): unsure at all Xaa locations
  Clone ID: MRT4577_125925C.1.pep
KHMEHLPNENEXHIIFFSSYXVNIPHXGNLCNSFGFHDAHQQSSGGDIVLSEFSLLTC

SEQ ID NO: 213076 - protein, 117 aa, Zea mays
  Clone ID: MRT4577_125926C.1.pep
VNESKQEGCLMRQGTSWQNHIEQTDASSTSTQILNQGTISYKVGSKQNTTPTDLRETKNTEQMEDAKHSQLLVVIDFQLLLAPGGRVRDVELHGGVAARARRERGARALGGEGGGGA

SEQ ID NO: 213077 - protein, 245 aa, Zea mays
  unsure (1)..(245): unsure at all Xaa locations
  Clone ID: MRT4577_125927C.1.pep
MAGHAPARDKTTTGFAATCSLLSQFLKEKKGGLQGLGGLAMAPAPAAGAGAFRPPTTMNLLSALDASAGEPACRPRPPSGSQKAMADAPAGXPREAAGEEAQQLTIFYGGKVVVFDRFPSAKVKDLLQIVSPPGADAVVDGAGAGAAVPTQNLPRPSHDSLSADLPIARRNSLHRFLEKRKDRITAKAPYQVNSSVGAEASXRRRNPGWVWARNRKEATVVKQERRCDRSVETRFVRARVVVASG

SEQ ID NO: 213078 - protein, 50 aa, Zea mays
  Clone ID: MRT4577_125928C.1.pep
LTRIATSTCSSSSATARGRFSGLVYIIYKGKSLLWLGTVLDTYGAVAAHA

SEQ ID NO: 213079 - protein, 220 aa, Zea mays
  Clone ID: MRT4577_125929C.1.pep
MAGHAPARDKTTTGFAATCSLLSQFLKEKKGGLQGLGGLAMAPAPAAGAGAFRPPTTMNLLSALDAAKATVGEPEGHGQRTGGNPREAAGEEAQQLTIFYGGKVVVFDRFPSAKVKDLLQIVSPPGADAVVDGAGAGAGAAVPTQNLPRPSHDSLSADLPIARRNSLHRFLEKRKDRITAKAPYQVNSSVGAEASKAEKPWLGLGQEQEGSDGRQAGEEM

SEQ ID NO: 213080 - protein, 103 aa, Zea mays
  Clone ID: MRT4577_12592C.1.pep
CHINLPPDYPNRSPQATFLTISLHANNYGHARICPQINTELSTPTNTHTYRTVHHLLDAGSHIILHSTTSASDLTHSYDTPLEAKITRDRTWKHNAQRYGHER

SEQ ID NO: 213081 - protein, 62 aa, Zea mays
  Clone ID: MRT4577_125930C.1.pep
AAGSAILRRDRLGPANDRTNKRTGKVREPTSLGTIRFRRLARLEKKTGSSNLDAWVTRNSEC

SEQ ID NO: 213082 - protein, 219 aa, Zea mays
  Clone ID: MRT4577_125931C.1.pep
MSLLRRLSAGAWGVSRAPRPWAGRAPHPVFLELKCIRPDTLILDTPSLSTLKLTIDKLGATARVDGLLRLSNLRIESLDFSSLFPAFMDNQAIRTLELELPESSSQYELLEAVNPDYLLRRLASFCEVKLGPRFSRELKLCLAQYKDIQFGSCLKKLLIHVPQSGSCFHLMPLFEICAPLCEVTVLFHAESADAVRRQDAMSICMQNFPEIRWQWGTWQ

SEQ ID NO: 213083 - protein, 68 aa, Zea mays
  Clone ID: MRT4577_125932C.1.pep
TRTYRWQRTALARPPTGRGFTFPLLISRRLKKRSTAKMKKNERMTTLTVSMLLERGRPAHPPDYDNTT

SEQ ID NO: 213084 - protein, 90 aa, Zea mays
  Clone ID: MRT4577_125933C.1.pep
PRVHPRVRQDICQNHEDSLGSISIRRVLMKKLDIQSIYLHLPNSYKELTIQKRTSFMCPSTDSNYIFFCSHRIIYPPFEDSFTVTQVSIS

SEQ ID NO: 213085 - protein, 72 aa, Zea mays
  Clone ID: MRT4577_125934C.1.pep
CTPRALRTPGNAGDAPRRLFVARAYRAPNRTDTVVIIGSSISWHSSGLDHFGSPRGNLSLLEPGKRITISCS

SEQ ID NO: 213086 - protein, 96 aa, Zea mays
  unsure (1)..(96): unsure at all Xaa locations
  Clone ID: MRT4577_125935C.1.pep
FNILRASAQQARPPSSPPPSPLPXGFPPKNPNPKPPPRGSPSPXEPQAPGPSTHPSHGPAPRPHPXPSIDPIPAPPSRVPAPVPDVVTFMAFTPTP

SEQ ID NO: 213087 - protein, 38 aa, Zea mays
  Clone ID: MRT4577_125936C.1.pep
WMVQALGKPYFPSPSCCNDLLVTTCNLIFKCLLPILLF

SEQ ID NO: 213088 - protein, 32 aa, Zea mays
  Clone ID: MRT4577_125937C.1.pep
MSWCGTGHVNRLECCICVQFCIVFCVACSIRD

SEQ ID NO: 213089 - protein, 269 aa, Zea mays
  unsure (1)..(269): unsure at all Xaa locations
  Clone ID: MRT4577_125938C.1.pep
MVCIGSLLRALVLSAAASAGRRRGPRILCGHEADVRVTPRHGHGWRRFRAVTGRMMLDSSDCASAAAAAETGQVQPQRRAVGAVPLAHDGGYASGGWEREDGKLSCGYSSFRGKRATMEDFYDVKLTEIDGQAVSLFGVFDGHGGSRAAEYLREHLFDNLLKHPDFLTDTKLAISETYQKTDTDFLESEASAFRDDGSTASTALLVGDHLYVANVGDSRAVISKAGKAMALSEDHKPNRIDERKRIENAGGIVIWAGXWRVGGVLAMSR

SEQ ID NO: 213090 - protein, 365 aa, Zea mays
  Clone ID: MRT4577_125939C.1.pep
MVCIGSLLRALVLRAASSAGRRRGPRILCGRATDVRVTPRHGHGWRGFRAVTGRMMLDSSESASSAAAAAAEAGAGAVAGQAQPQRRAVGAVPQAHDGGYASGGWEREDGKLSCGYSSFRGKRATMEDFYDVKLTEIDGQAISLFGVFDGHGGSRAAEYLREHLFENLLKHPDFLTDTKLAISETYQKTDTDFLESEASAFRDDGSTASTAILVGDRLYVANVGDSRAVISKAGKAMALSEDHKPNRIDERKRIENAGGIVIWAGTWRVGGVLAMSRAFGNRLLKPYVVAEPEIQEEQFSDELECLVLASDGLWDVVENEEAVSLGKSEDTPESAARKLTEIAYSRGSADNITCIVVQFHHDKTG

SEQ ID NO: 213091 - protein, 106 aa, Zea mays
  Clone ID: MRT4577_12593C.1.pep
MHKSCRMSHDTIVVVSLNRGNALGLGACRCGSTATPNQADIPPSKTARRNCHAVDGCSYALQELAELIAVDADWTNDECICEFRAYHHTENLICDIYHITSNNVDM

SEQ ID NO: 213092 - protein, 144 aa, Zea mays
  unsure (1)..(144): unsure at all Xaa locations
  Clone ID: MRT4577_125940C.1.pep
FDSCSLDGPQNYQLLRLHSLNFANQDKTRHKGIDSTXKKSQYYLVILDTNKLNFLNFRSTFFYFGLDSQKILEMSLCLSRVNSPLPKGRHSKFLQFFGRPRGAAVYEYLSSGKAACHNRMVRVWTLHEALAGQLRXNHTFLRGS

SEQ ID NO: 213093 - protein, 80 aa, Zea mays
  Clone ID: MRT4577_125941C.1.pep
QDSRGKKRQVGRLLSDPHRWLRHILYASCSFPSTVRLRTRVSPDPLPRPLDAAIPRTPRASHALAAHGLAPGAGLGGIRP

SEQ ID NO: 213094 - protein, 163 aa, Zea mays
  Clone ID: MRT4577_125942C.1.pep
GKLSCGYSSFRGKRATMEDFYDVKLTEIDGQAISLFGVFDGHGGSRAAEYLREHLFENLLKHPDFLTDTKLAISISSLQLYCRLPVAIIVGATTCLSAKLEFKTGETYQKTDTDFLESEASAFRDDGSTASTAILVGDRLYVANVGDSRAVISKAGKGIAYWK

SEQ ID NO: 213095 - protein, 207 aa, Zea mays
  unsure (1)..(207): unsure at all Xaa locations
  Clone ID: MRT4577_125943C.1.pep
DXFCEARNPSPASTLSVRRFAVSHTHFLHRHRALAQFHTHPRSRLCLVPALPPPPVMYPRGPDGGRDASSRPMLATPAGNDTREEDEITTAEAHVEKDAARMDAALLMRTTPKMDEFHTGGDLDSTGSGSGISGPSASKRQLQRRGSWRQRVSRSSIHAYPFPLCFYLICFFARASNREECGRGCNGSAGTPSTLIISFVFLFDLFF

SEQ ID NO: 213096 - protein, 152 aa, Zea mays
  Clone ID: MRT4577_125944C.1.pep
RPGRSRAPLLGALSQLRLWPPHCSFLSGICPRVVVSPRSAVVVLSRPLSGAPSPPRLRPPQGTTEALTTSTTTEGARACRRPDPLSWRAASVRRGRGGCSRMCQWPPMLTRCGGSARASLVVGRFCVCMKGGYGWSREACNGQHTLYWHNEC

SEQ ID NO: 213097 - protein, 95 aa, Zea mays
  Clone ID: MRT4577_125945C.1.pep
SLEGLSGILILRIRENKNRVGFIKLHKKISSTSLYHARKIKLMSIFLFRQQLSRFRSHKLLRLHSLNFADQDKTRHKGMNSTQKITVLFSHIGHE

SEQ ID NO: 213098 - protein, 58 aa, Zea mays
  Clone ID: MRT4577_125946C.1.pep
MEMKKIACAVLVAASAATVALAAEAPAPAPTYGYSADAPAVSAALGAAVVFFFAYYIQ

SEQ ID NO: 213099 - protein, 107 aa, Zea mays
  Clone ID: MRT4577_125947C.1.pep
PTFFCCPSAPRLPWISPPTGSAFFWTPSRRPPPSGEVLISKINYPAIPWGLFRPQKKDVCGLRSHKLLVKKKASPVCLNKMFPNVPPFPIGYIKIGYFKMCPRFLVS

SEQ ID NO: 213100 - protein, 261 aa, Zea mays
  Clone ID: MRT4577_125948C.1.pep
MASSSAALAVLMLSWAAALAAASSPVTFEAGYMPLFGGGNLVPSPGGRSVRLKLDRHTGSGFVSRSAYHHGFFSASIKLPDHHTAGVVVAFYLSNADVFPGNHDEVDFELLGNRRGHEWRVQTNIYGNGSTSRGREERYLLPFDPTLRSHAYAVAWTPTAILFYVDGTPIREVVRVPAMGGDFPSKPMSVYATIWDGSAWATEGGRYKVDYAFAPFAADFSSLVLTGCPVAGGGDDLAAAECQVATMTADCAVMTPAKRAA

SEQ ID NO: 213101 - protein, 133 aa, Zea mays
  unsure (1)..(133): unsure at all Xaa locations
  Clone ID: MRT4577_125949C.1.pep
PPPKGPKPPAQGVPKGVLRPHPGKAFGPHAEGPQRVGRQTPPPQHQVKNPPEKKKGGEENPEKKKTPSPFLPKSAPRPPFVVXFGGIDPPPCGRPFVPXPPSSFGEVGPPPPPRGAPPPPPPAFFKVKTGCCV

SEQ ID NO: 213102 - protein, 88 aa, Zea mays
  Clone ID: MRT4577_12594C.1.pep
GRVDVRHSLHPATSTVPAVHNMASVSELACIYSALILHDDEVTVTEDKINALIKAAGVNVEPFWPGLFAKAPGNVNIGKLICNVGAGG

SEQ ID NO: 213103 - protein, 54 aa, Zea mays
  Clone ID: MRT4577_125950C.1.pep
PISLRSFKMFTAMVFAYISAFWQSSVRVMVLSRPAGFALSLDKCSHRVVLMPPQ

SEQ ID NO: 213104 - protein, 47 aa, Zea mays
  Clone ID: MRT4577_125951C.1.pep
TCGWMAAVISYKALEFLSHVNKVNCSVSIRQGHVRLEAVCCIERKMD

SEQ ID NO: 213105 - protein, 141 aa, Zea mays
  unsure (1)..(141): unsure at all Xaa locations
  Clone ID: MRT4577_125952C.1.pep
GPSAEILAPPQTTVSPQAGRQEIGNRSYWIVSLPVQYYRXATADLAMXSRLQDGIXRHSFNTPLYRINGPDLRVRTLDFLLALRDDLVKSNVLSEGGLHKIRRHIPYPKRASSADSVALTERGATXDAXLTKVVWNEGKDP

SEQ ID NO: 213106 - protein, 88 aa, Zea mays
  Clone ID: MRT4577_125953C.1.pep
SQTVRLGSQHSMHLMNYSDSDAAKEAISATDGNETEGRDVPIIMTKDKPAVNRADCGYECGDYVRDGYIGVACYLIDSYTVVTHSYDA

SEQ ID NO: 213107 - protein, 91 aa, Zea mays
  Clone ID: MRT4577_125954C.1.pep
IRHEVIVSLPFLGCRIQATRKEGGEHHGKIHPDPLHPLPPIYRNPTRFPVSDFASRRCSTSTPSFLVVLLVICTCSYIKMQFPALLNDRTG

SEQ ID NO: 213108 - protein, 57 aa, Zea mays
  Clone ID: MRT4577_125955C.1.pep
HPQMPRKNKKKNAGGNNSKNKNYSWLVTMLGASMGSPAEFTFLPFLFFPPPFFFDFA

SEQ ID NO: 213109 - protein, 59 aa, Zea mays
  Clone ID: MRT4577_125956C.1.pep
TRFSLFRKAIPAMLWDTRPFNYVVRGRFRYLVESFFRGTVRTLACHPTLIVSSKRSPIS

SEQ ID NO: 213110 - protein, 104 aa, Zea mays
  Clone ID: MRT4577_125957C.1.pep
GGEGPGFRPLGFEKGIGQKSPPLFSPPKRETKMALKKKFKPPPGKKKGRANGQKKKRVTHSGKPGRKTIPGELKKTNPPERPYGLAKKGTKVLLGPNLIFPPPP

SEQ ID NO: 213111 - protein, 99 aa, Zea mays
  Clone ID: MRT4577_125958C.1.pep
MVKAVAVLRGDSNIKGSVTFEQADENSPTTISWNITGHDANAERGMHVHQFGDNTNGCTSAGPHFNPFGKTHGAPSRRERHVGDLGNFKTDAQGNAVGS

SEQ ID NO: 213112 - protein, 105 aa, Zea mays
  Clone ID: MRT4577_125959C.1.pep
DSRYQGDFLDPRDLTADQWSRRRRRCPRQHRNQRRCWYSVEQLCSSGRLSQHRRPQTPLPEGLAGAPTSRRGSTDAGSQSPMAAAHFPSLESLPTATRATVPTRP

SEQ ID NO: 213113 - protein, 208 aa, Zea mays
  unsure (1)..(208): unsure at all Xaa locations
  Clone ID: MRT4577_12595C.1.pep
MEAEQAAMASAAAPQLGSAHQHQHQHQQMQPRRQYRGVRMRKWGKWVAEIREPHKRTRIWLGSYATAVAAARAYDTAVFYLRGRSARLNFPDEIPSFGXGGWRGRGGARARPXAAAAGGGGGCTLSAASIRKKAIEVGSRVDALQTGMVVPPPHHRERXAPQPPAXLRVHAEEQQEEEEQKPQRPAWSGRVKNPDLNRAPSPESSDAE

SEQ ID NO: 213114 - protein, 189 aa, Zea mays
  unsure (1)..(189): unsure at all Xaa locations
  Clone ID: MRT4577_125960C.1.pep
PHSVPARSPPSHLLPPAQPPPTSPPXLPLPGTPXVVPPMPXLPPPAISSALPTPAPERHARGSLVPGDLPSPAPPSPIPXLSPPAPPSPNPPXPSPVPPXTIHLLPLPRXITELPLASIXRHGRPAVGHAALPQSTSSPTPSPSPPXPHPIPTGSSPLMQFMSPWIEIESCSNCGCLVVRWLGLPVTNT

SEQ ID NO: 213115 - protein, 463 aa, Zea mays
  Clone ID: MRT4577_125961C.1.pep
MARVAAMVVVMVLLQQLASSYSYTVAAHADAAGVLGRKAGVVVDETPVEKSPAGPGRYAVIFDAGSTGSRVYIFRFGRQMDLLRIGDEIEFFAKLKPGLSSYAGRPQEAAKSILPLLEKAKSIVPSWLMKRTPVKLGATAGLRLIGNQQADEILDAVRDLVHKKSKFQYKPNWINVLEGSQEASYLWVALNYLLDKLGGEYSQTVGVIDLGGGSVQMAYAVSANAAARAPAVPDGEDPYITKEYFKGKQYNVYVHSYLRYGSFASRAEILKSKNGPFSSCMLRGFSGKYTYNGQQFDATARPEGALYDKCRGEIAKAMNLKAPCKAKNCTFGGVWNGGGGAGQNDIYVASGFYYLASHVGFIDSKAPSAKAAPAAFRVAAKKACKFDVNRAKVAYPDVSDSDVPYLCMDLTYTYTLLVDGFGLQPMKKITFVSKVKHGEYYIEATWPLGTAIEAVSPTKQIGN

SEQ ID NO: 213116 - protein, 50 aa, Zea mays
  Clone ID: MRT4577_125962C.1.pep
ITQLQVIPKPQVSFIPSLWLIVIIHFCAPCPLRINNLTVGFSSYLNLSWV

SEQ ID NO: 213117 - protein, 133 aa, Zea mays
  unsure (1)..(133): unsure at all Xaa locations
  Clone ID: MRT4577_125963C.1.pep
IDNDISLILSTCVVCGXXXXXKKKKKKKKTLRSSPCDGGGAPCSRSRRGVPSSSHRGGELPLRGAGXRLLQGDGSLLDAGRGGIPSPLLNGLLGRTQEECCSGVLNTVRAMSPWPACLSSXSDTSYPIERLPV

SEQ ID NO: 213118 - protein, 55 aa, Zea mays
  unsure (1)..(55): unsure at all Xaa locations
  Clone ID: MRT4577_125964C.1.pep
FVGCCXXLAXXACCXLLACXXCPPQHFXVAGRRXCGXXALGAGAXCGFLLAFVAL

SEQ ID NO: 213119 - protein, 259 aa, Zea mays
  unsure (1)..(259): unsure at all Xaa locations
  Clone ID: MRT4577_125965C.1.pep
AKGRCLRPPTADAPSGRASPPQLPYFIGLRSILPLSPPRLTPCGLIGSPSFQLDMASAVTMTSVSAQAALVSRPRSHGITSYGGLKASSSSVNFELGSSFLGKTAPLRASVTTRVVPKAKSVAQILPEASYKVAVLGAAGGIGQPLGLLIKMSPLVSELRLYDIANVKGVAADLSHCNTPSQVMDFTGPAELANCLXGVXDVVVIPAGVPRKPGMTRDDLFNINAGIVKSLIEAVADNCPDAFIHIISNPVNSTVPIAA

SEQ ID NO: 213120 - protein, 51 aa, Zea mays
  unsure (1)..(51): unsure at all Xaa locations
  Clone ID: MRT4577_125966C.1.pep
XXIGGGGXXXNWGNKTQPCQVFLCFSGVVVTPDFKEKSRGLLILAPGCQLF

SEQ ID NO: 213121 - protein, 60 aa, Zea mays
  Clone ID: MRT4577_125967C.1.pep
FILASTNILTTRIAAGCFILALFIVLFVAENVSSVFLFIYFATCDFICIFPLVHTVIMII

SEQ ID NO: 213122 - protein, 125 aa, Zea mays
  Clone ID: MRT4577_125968C.1.pep
RPEGFSPAFVRQLGGSAPPPFFKDPPPPFFFCWGVFARPPAKKGGVLFLFGGLLGSPCSCSCFFFFLTISALSFGYSVPPPSPVIVLNISRLSPFFLPTFPPVGSVSISKPTAFSGQKRLPHKAC

SEQ ID NO: 213123 - protein, 53 aa, Zea mays
  Clone ID: MRT4577_125969C.1.pep
MLLFRGGECVFKKKTPPTPFFKKKKKKKKKKKKKKKKKKKKKKKKKKKKKKAA

SEQ ID NO: 213124 - protein, 142 aa, Zea mays
  unsure (1)..(142): unsure at all Xaa locations
  Clone ID: MRT4577_12596C.1.pep
AWAQRWAYLQPGHLWRAWWRAFTGCFIPQGWAGFRFSATPYRSHRSARATLARSRMTCHPVEPLCLSLLSPCMRSCVVCVXILCRIELKPYLLHYTSMASCDSSMYVASCCINKHTSFQSPFVSGYCKNFTNCLSLKNKGFI

SEQ ID NO: 213125 - protein, 58 aa, Zea mays
  Clone ID: MRT4577_125970C.1.pep
ESLRQLTKNCVVLPIFLPSFYQEPPPNVELMKVPSTRAKSLKLTLLKSCNDTPHTPYR

SEQ ID NO: 213126 - protein, 65 aa, Zea mays
  Clone ID: MRT4577_125971C.1.pep
FFPPGPNGEGPRCTTPPPPLNAGRAKFFFKKKKKKKKKKKKKKKKKKKKKKKKKKKKKKKKKKKN

SEQ ID NO: 213127 - protein, 118 aa, Zea mays
  unsure (1)..(118): unsure at all Xaa locations
  Clone ID: MRT4577_125972C.1.pep
MGPSESPHAGGVFWXNIPFPRGYPFKPPRVAFKTKVSHPKITSNGGICFDILKEQWGPALPVFKVPLPIWSLRGDPNPDDPLVPKIAHLYKTDRVKNESTARSWPQKKAMGCQAIGPR

SEQ ID NO: 213128 - protein, 119 aa, Zea mays
  unsure (1)..(119): unsure at all Xaa locations
  Clone ID: MRT4577_125973C.1.pep
MLLLHHWRGLVEIADGAVKDDXSSSMGLDRGALYAREHHELDETQXSWLLGXPXADKNDKYVDLGCDDNKRKLLXWRTLWSDATDIILMKLTMMIAKAIXSQQACPPPSDQFTEAHAQR

SEQ ID NO: 213129 - protein, 466 aa, Zea mays
  Clone ID: MRT4577_125974C.1.pep
MGNSLGCSASGERLVSAARDGDAIEARMLLELSPALARYSTFGGLNTPLHFAAAKGHLDIVTMLLEKGADVNARNYCGQVTRADYLSGRTALHFAAHDGFVRCIRLLVADFVPSVALEDIASSVVDGGDCQTNSGSSPNSSSGQKFNESARVRYINKPADGGVTALHMAALNGAGSTPLHYAAGGGKQECCELLISKGASRLTLNCNGWLPVDVARIFGRRSLEPLLSPNSHSNVPVFQLSSYLALPLMSILNIAREFGLQHTTPSIDDNDLCSVCLERSCSVTAEGCSHEFCIKCALYLCSTSNIRVEFTGPPGSIPCPLCRNGIMSFTKLPSTPTEGLKSGSALTFCNPCILNARSMDSPATFSRAEIRRNRVAAVSSELVCPITCSPFPSSALPTCRCSDDDPCGDTDVQDGPEFQSPRPSHSASMELDKRGEGDLDRASCSGMFWSRRSCHREQQCDAEINA

SEQ ID NO: 213130 - protein, 111 aa, Zea mays
  unsure (1)..(111): unsure at all Xaa locations
  Clone ID: MRT4577_125975C.1.pep
QHARLLHSWYNNTVPHVTIHAMATHHARQQLASLQPXSIEIPQRLLXQEQLLACNPLALTNVAAYQQQQQLQQCLPTLNGLAIENPADYVQQQQLLSCNPLAVGNAPTYLQ

SEQ ID NO: 213131 - protein, 556 aa, Zea mays
  unsure (1)..(556): unsure at all Xaa locations
  Clone ID: MRT4577_125976C.1.pep
MGNSLGCSASGERLVSAARDGDAIEARMLLELSPALARYSTFGGLNTPLHFAAAKGHLDIVTMLLEKGADVNARNYCGQTALMHACRHGHWEVVQMLLLFRCNVTRADYLSGRTALHFAAHDGFVRCIRLLVADFVPSVALEDIASSVVDGGDCQTNNGSSPNSSSGQKFNESARVRYINKPADGGVTALHMAALNGHLDCMQLLIDLGANVSAVSFPYGTTANLIGAGSTPLHYAAGGGKQECCEXVNVIKNHHLFDKNPASVVPIREIYLFWYVMMLFLQLLISKGSSRLTLNCNGWLPVDVARIFGRRSLEPLLSPNSHSNVPVFQPSSYLALPLMSILNIAREFGLQHTTPSIDDNDLCSVCLERSCSVAAEGCSHEFCIKCALYLCSTSNIRVEFTGPPGSIPCPLCRNGIMSFTKLPSTPTEGLKSGSALTFCNPCILNTRSMDSPATFSKAEIRRNRVAAVSSELVCPITCSPFPSSALPTCRCSDDDPCGDTDVQDGPEFQSPRPSHSASMELDKRGEGDLDRASCSGMFWSRRSCHREQQCDAEINA

SEQ ID NO: 213132 - protein, 60 aa, Zea mays
  Clone ID: MRT4577_125977C.1.pep
ATNFLVSTVRRMVALATRANTARDRHRRRRSRGAPGSRQASATPRPGPRGGIYHPGRPRG

SEQ ID NO: 213133 - protein, 520 aa, Zea mays
  Clone ID: MRT4577_125978C.1.pep
MGNSLGCSASGERLVSAARDGDAIEARMLLELSPALARYSTFGGLNTPLHFAAAKGHLDIVTMLLEKGADVNARNYCGQTALMHACRHGHWEVVQMLLLFRCNVTRADYLSGRTALHFAAHDGFVRCIRLLVADFVPSVALEDIASSVVDGGDCQTNSGSSPNSSSGQKFNESARVRYINKPADGGVTALHMAALNGHLDCMQLLIDLGANVSAVSFPYGTTANLIGAGSTPLHYAAGGGKQECCELLISKGASRLTLNCNGWLPVDVARIFGRRSLEPLLSPNSHSNVPVFQPSSYLALPLMSILNIAREFGLQHTTPSIDDNDLCSVCLERSCSVAAEGCSHEFCIKCALYLCSTSNIRVEFTGPPGSIPCPLCRNGIMSFTKLPSTPTEGLKSGSALTFCNPCILNTRSMDSPATFSKAEIRRNRVAAVSSELVCPITCSPFPSSALPTCRCSDDDPCGDTDVQDGPEFQSPRPSHSASMELDKRGEGDLDRASCSGMFWSRRSCHREQQCDAEINA

SEQ ID NO: 213134 - protein, 48 aa, Zea mays
  Clone ID: MRT4577_125979C.1.pep
DRIPQNLTLITSYLVLECFAIFRTETLTEFRKQLDLPVESHERTYFLW

SEQ ID NO: 213135 - protein, 43 aa, Zea mays
  Clone ID: MRT4577_12597C.1.pep
PQGPLTLMPPDSSPRVAARRSSASPPAPHPNPQWLPQGALTSS

SEQ ID NO: 213136 - protein, 65 aa, Zea mays
  Clone ID: MRT4577_125980C.1.pep
TRGFSMSSFYKNGPCILNRGPNRRNIYVALARSINRTSYSVPPIYLLFFFFFFFFFFFFFFFFKE

SEQ ID NO: 213137 - protein, 146 aa, Zea mays
  Clone ID: MRT4577_125981C.1.pep
TQTGSPALPPSSSSARARFRARTERASSSLRPGTIMEDVAPGAEPWEGYVDWRNRPATRSRHGGMAAASFVLVVEVLENLAFLANASNLVTYLMGFMHYSPPQSATVVTTFMGTDLLIALLGGFLSDDFFSTYTIYIASAFLEIME

SEQ ID NO: 213138 - protein, 65 aa, Zea mays
  Clone ID: MRT4577_125982C.1.pep
IFGIQTLYHSYHTSNNRAANFTNILSLHTLITLFLNTSNAYHYYTMLTCILPTIFHKLSHQLLSS

SEQ ID NO: 213139 - protein, 72 aa, Zea mays
  Clone ID: MRT4577_125983C.1.pep
LPRTVVHENRAAAMRETDLGYKKAWHTHIRAGTKYPWVSIPDWIIRKLRISAYRLWTLPTIQDSPPHVYFVV

SEQ ID NO: 213140 - protein, 73 aa, Zea mays
  Clone ID: MRT4577_125984C.1.pep
QGRKGKPEVLKPSERWARGYISKRAPALEHRSTQSAPPPPPPQPVAFGWLSPRCTSHSEAHSYSFCFVNILAL

SEQ ID NO: 213141 - protein, 63 aa, Zea mays
  Clone ID: MRT4577_125985C.1.pep
GDKTEGILLTRNQYNYSNLYYLPANYRQYLLGILPTVMHKEQEDHDVLGLFITSYRNSSARSK

SEQ ID NO: 213142 - protein, 52 aa, Zea mays
  Clone ID: MRT4577_125986C.1.pep
IGREGMLKVQHLVSLARPGIPNFRNIGEGNEQTSRFGHKKFFVKPKKTYTGP

SEQ ID NO: 213143 - protein, 89 aa, Zea mays
  unsure (1)..(89): unsure at all Xaa locations
  Clone ID: MRT4577_125987C.1.pep
KSGTTQHQKERKNTDSPPHXARKXRPKKHTKKRKKEKKRASRTTAXDTERMQQRPKAPRGKGAXRVKNIIPPPPREVRESDVVKQLSLY

SEQ ID NO: 213144 - protein, 209 aa, Zea mays
  unsure (1)..(209): unsure at all Xaa locations
  Clone ID: MRT4577_125988C.1.pep
MSASPPPEEREKADAEARAKEQAEQAALPYKWDQTIKDLDITITIDAKYKGKDLDINIGRNSIKAGIKGETPILHGDFPHPVRVDDSTWTLASTGSAKEISIHLDKVNQLEWWPHIVTTAPKIDTSKIQPENSKLGDLDGETRGMVEKMMYDQRQKEQGKPTSDEQKKANILKKFQEXHPEMDFSNAXNRLRGYTTMGTPAPVTRKAHG

SEQ ID NO: 213145 - protein, 50 aa, Zea mays
  Clone ID: MRT4577_125989C.1.pep
YTMVTLMQGSRIRSSALKHVIVTANLRSTCPSQIEFSLLSYMYFFLSYFF

SEQ ID NO: 213146 - protein, 31 aa, Zea mays
  Clone ID: MRT4577_12598C.1.pep
MSDIQVIDHSLYRLLSLIALSSMQILSSRCS

SEQ ID NO: 213147 - protein, 81 aa, Zea mays
  Clone ID: MRT4577_125990C.1.pep
ICGAEYDNNKFKTTVVNDNGLSPIWAPTQEKVTFEIYDPNLAFLRFVVYEEDMFSDPNFLAHATYPIKAVKSGFRSVPLKN

SEQ ID NO: 213148 - protein, 98 aa, Zea mays
  unsure (1)..(98): unsure at all Xaa locations
  Clone ID: MRT4577_125991C.1.pep
NXKENQSPAGTLDTVTAVQVIDRVVVLCNYPREHVSLFCHCDLMLQSLHMEKETSLGASTHIQTAVNSMRAPCRFFHGFSWSFSFVEVPMFWSSSISQ

SEQ ID NO: 213149 - protein, 41 aa, Zea mays
  Clone ID: MRT4577_125992C.1.pep
DLLTGTRKILKFGIYKQDCPTLLKNILPRGGLFFRWQWCFF

SEQ ID NO: 213150 - protein, 233 aa, Zea mays
  Clone ID: MRT4577_125993C.1.pep
MGRDNLIESGSGGGKFVAKDYTDPPPAPLIDAAELGSWSLYRAVIAEFIATLLFLYITVATVIGYKHQTDASASGANSACGGLGLLGIAWAFGGMIFVLVYCTAGISGGHINPAVTFGLFLARKVSLVRALLYIVAQCLGAICGVGLVKAFQSAYFDRYGGGANSLASGYSRGTGLGAEIIGTFVLVYTVFSATDPKRNARDSHVPVSTRPTPPPSPFFLFCFCLDPRSAATC

SEQ ID NO: 213151 - protein, 59 aa, Zea mays
  unsure (1)..(59): unsure at all Xaa locations
  Clone ID: MRT4577_125994C.1.pep
ATTISKDQIPSSTSPTRASDLTSLSGSTVYYVXSVPRSYSATDLDAQADTDSLPEYAEY

SEQ ID NO: 213152 - protein, 93 aa, Zea mays
  Clone ID: MRT4577_125995C.1.pep
GEKRDSLSPTSLLHSHKPSGVPIRALVVVHYPTVPRAKTDSQPAISSAWTGEPRGMDPEKLRYKLQNFVGHDAEGMCLSIGQKSRRVFITGGN

SEQ ID NO: 213153 - protein, 139 aa, Zea mays
  unsure (1)..(139): unsure at all Xaa locations
  Clone ID: MRT4577_125996C.1.pep
MAGVCGSPFCSREASAPAPASCGRWDELLNSSTCANNILATGAAALLAVVLALQLLVRVARNGLRHAPVVALSSPLQRAVVAVNACLGLAYLGLAAWMLGTDLTQRAXVYPPHRWLVSLAQGLCLVLAGFAFSVRAQLL

SEQ ID NO: 213154 - protein, 120 aa, Zea mays
  Clone ID: MRT4577_125997C.1.pep
SRQTPVDVLPCMPADYTSSLSCGRVDRQSHGGFVKSLGGMPWSIYLYIFVSLSMSFRARRRIVISRSSTSVVPHVLVRAVGLPAMKIITEDTADGHAGLIEAGGDEEHAHVRSFKCMSAA

SEQ ID NO: 213155 - protein, 118 aa, Zea mays
  unsure (1)..(118): unsure at all Xaa locations
  Clone ID: MRT4577_125998C.1.pep
LGFLTARTPSPTSPLLDLQQPPRPVHHHRHTPRMELLGLVPAEAIALRLYSLPAAAAAAGSLYAWLVAALAAAIGLWRXPXPSAFPTSTSVTQASAPSSTITRSHWCLFCRLGGLPLL

SEQ ID NO: 213156 - protein, 95 aa, Zea mays
  Clone ID: MRT4577_125999C.1.pep
RPGSDTSIPHQPHLIPADPSVSLISSATGLPIRADGYPTFSPRLILITSCLLNCRRRPLLTSRSYYSVIYCIALRYLQLETSGDPESSMPVLPTM

SEQ ID NO: 213157 - protein, 96 aa, Zea mays
  Clone ID: MRT4577_12599C.1.pep
GALGRVTAPWKSRANRNGLFDKPAEHELDIMRHPHKTPVGGGLGVQQDRDHPLERWALPPPTAGPVFGVYVLVDVAHAPHEQLHHAAGPLDPVTLG

SEQ ID NO: 213158 - protein, 127 aa, Zea mays
  unsure (1)..(127): unsure at all Xaa locations
  Clone ID: MRT4577_1259C.1.pep
LLLLFVPFAXXXXXXXCXLXXXAAXXXAFXXXXXWXAXAXXVRPXSXGXPXLXLAWAFLXLVVLCCLXXLSXXPXXCXCAPVXWLPLVVSGCAVCWSXXWSLXXXAXXXXLFFXXLXLSFSLXPPLV

SEQ ID NO: 213159 - protein, 40 aa, Zea mays
  Clone ID: MRT4577_125C.1.pep
FPHRISVETFLWYLNLIYNYMGSNDLVDQLAFHPWFASNI

SEQ ID NO: 213160 - protein, 104 aa, Zea mays
  Clone ID: MRT4577_126000C.1.pep
IDVSPVSSPFAHPSANVQEPRSKETLRASQSEGEERDSATPPGVNSWLRARSGKLRGSGSVIGVRWSRLRSNGGWRSAMSLGIPRWRPSPLQRRGQPCATYRAW

SEQ ID NO: 213161 - protein, 111 aa, Zea mays
  unsure (1)..(111): unsure at all Xaa locations
  Clone ID: MRT4577_126001C.1.pep
KQADTCPLFPRCKFYFAHELIKMGRAQPVQVGEDNKPDVFWEALCFKAVYRTSPRLKDKNMDAHPSCLFSCFNKIGRXFVIKYVSGELMHEDLSTDXDFMLLYTLIHFLFF

SEQ ID NO: 213162 - protein, 90 aa, Zea mays
  Clone ID: MRT4577_126002C.1.pep
VKKDLCRLRYGGVQGVGRVIRSVRKLFVLGALINDIEDIHVSITTTHGSSSGIGSEAFPGPVPSGAAAPDEAQDVTCFTDTPARETMSSR

SEQ ID NO: 213163 - protein, 85 aa, Zea mays
  Clone ID: MRT4577_126003C.1.pep
ILQSSGTGPIFPLMERMVGSTNFRKWRPNYTRMAVQLLWFKLKMKSVFLEMNRKLPSSPLFKLAREIFLGNEHYLFIQSEGGPLG

SEQ ID NO: 213164 - protein, 110 aa, Zea mays
  unsure (1)..(110): unsure at all Xaa locations
  Clone ID: MRT4577_126004C.1.pep
PSGLALFFGVFWWSLFFVASCLCVACVVLLAWFAVLLFCFCGMFFSFFWVCFLFCVSVCLFLLFVLSVRCFXYACFLLFFFPFPPLFFFFGVVKIFLWACRSCGSLLPSP

SEQ ID NO: 213165 - protein, 85 aa, Zea mays
  unsure (1)..(85): unsure at all Xaa locations
  Clone ID: MRT4577_126005C.1.pep
NXFXFLYKKKIFFVVFLGGFRGVYPFSVGETKNDLLIKGGQTPVTHLKNLPQTNRGPLQGGTCRGGSFFSKTPIGGGNPRALRSP

SEQ ID NO: 213166 - protein, 181 aa, Zea mays
  Clone ID: MRT4577_126006C.1.pep
LRLDIIDPSFPRYKNADIVIFNTGHWWTHDKTSLGKDYYQEGNRVYSELDVHDAFRRALNTWAKWVDSNVNPKKTTVFFRGYSASHFSGGQWNSGGSCDRETEPITDDQYLTPYPTKMSILEEVLRGMKTPVVYLNITRMTDYRKEAHPSVYRKQKLTEEERKSPELYQDCSHWCLPGVPD

SEQ ID NO: 213167 - protein, 159 aa, Zea mays
  Clone ID: MRT4577_126007C.1.pep
MALVTAGSRAWCQRSSQCPMCWQHISMKDPMSQELLEAVEQERNIRSNPSRNTAVFHHPMLGDFEVKKLHQEKQLGMMVDKGLVATRTGLSQYHLSHWPRMFEVIRMLEGDMLTERWEVSQNVDMPEFVSSELLLQKYMDFAADECSLGVEAMELSGLR

SEQ ID NO: 213168 - protein, 108 aa, Zea mays
  Clone ID: MRT4577_126008C.1.pep
CSLGVISVHRAPAALRSSLGRETPRQRLDVLFPSSCPHATARSSLHLSLHDGCGAGVKEARLLQLLEAGDRLLKGVVLDGLLRQRGRVVLSLYYYCITLDTLGKEKIP

SEQ ID NO: 213169 - protein, 85 aa, Zea mays
  Clone ID: MRT4577_126009C.1.pep
EVKEKARTGMGHEDGKSTSSFCRGVSRPRLDLSAAGARCTKITPRLHYRASLLIGCNVFNSLLRRFHTPSTVATRLQRRKWKLIS

SEQ ID NO: 213170 - protein, 93 aa, Zea mays
  Clone ID: MRT4577_12600C.1.pep
KGVGCLIQTLNTEHAPPWGGQDETQGPKMGFPTQGTITGHKETTWGSIQHKTLKPYRLIPSGDTGSMPGWVGHPYLWAFFGCQASVQQLDLFT

SEQ ID NO: 213171 - protein, 103 aa, Zea mays
  Clone ID: MRT4577_126010C.1.pep
MMRQTEKIMMKISNTQISSFTLKAEDSWAQEGGLPGCIIEHPFASYKNMLFLSFFLSSNERIQSLLIYLIGCNVFNSLLKRFHTPTISWRGIEQTLKTATTFM

SEQ ID NO: 213172 - protein, 116 aa, Zea mays
  unsure (1)..(116): unsure at all Xaa locations
  Clone ID: MRT4577_126011C.1.pep
GLRRTWKSLGTXKHXIIFDSGTTLTFLAEPAYTLAYAGLLSQTTNLTRVPGTDGYEVCFQTSSGAIFPSMVLHFDGGDMALKTENYFGAVNDSVSCWLVQKSPSEMSIVGNIMQMD

SEQ ID NO: 213173 - protein, 73 aa, Zea mays
  Clone ID: MRT4577_126012C.1.pep
KNKGVILRLNKGLVNHPLSIWLFKGFPDNPWWFFDQFRPSIIKMNQLRGPQGKVGKIPCNCFRPKTKGKPPSA

SEQ ID NO: 213174 - protein, 77 aa, Zea mays
  Clone ID: MRT4577_126013C.1.pep
SQRRPTRPGHASRLTASLLVYDVSLAVWWRHPSLVALYPGRTMGSGERSCGYATVILCLYGLVLISMIMGYVVECCL

SEQ ID NO: 213175 - protein, 57 aa, Zea mays
  Clone ID: MRT4577_126014C.1.pep
SCALLYGQVHLYLLSDDFNHIWDHAFDRFASSTCRVSCRLILMFVFASDISRNRVCE

SEQ ID NO: 213176 - protein, 74 aa, Zea mays
  unsure (1)..(74): unsure at all Xaa locations
  Clone ID: MRT4577_126015C.1.pep
TAPPPKTAVXAEESNKSXGAQDXQETTQXDKKPGTEEERASPKPHIXRSQFAFKRSGRVGGRWKDAGSTGSADR

SEQ ID NO: 213177 - protein, 50 aa, Zea mays
  Clone ID: MRT4577_126016C.1.pep
NKRAGLETFGNVTWVKNVSKKKVFRFHPGKNWPKFVKKDLGGPKVRPKRD

SEQ ID NO: 213178 - protein, 88 aa, Zea mays
  unsure (1)..(88): unsure at all Xaa locations
  Clone ID: MRT4577_126017C.1.pep
GRFFFFFFFFFFFFFFCSSLGGPIWPYSGPNYARLMTAVLQKPDWXNPXITXLNXLLSQPGGGGWRPTQKALTNRPSNQLPNVNGNWK

SEQ ID NO: 213179 - protein, 116 aa, Zea mays
  Clone ID: MRT4577_126018C.1.pep
AAVAAGTATSTWSGWSQPFKILNGGISALMAESTASIGGYMASGYRRVAGVQLYINHLKPACLDDRIEAKANPIRYLNPDAYLEKDQLLDAVHWIRQGVGLACDLLWGTAPLVGAF

SEQ ID NO: 213180 - protein, 121 aa, Zea mays
  unsure (1)..(121): unsure at all Xaa locations
  Clone ID: MRT4577_126019C.1.pep
MFSLQIPYCQPRLRVRGTLSRRGKGEKGLGKGGSKRRRQALRDDIQGVTKGAIRRLPRTDGEKRIXGLIYEETGELSKILLENVVRDPVSYGEHARRKTATRHVFRXALKRQGRTVYGFGG

SEQ ID NO: 213181 - protein, 120 aa, Zea mays
  unsure (1)..(120): unsure at all Xaa locations
  Clone ID: MRT4577_12601C.1.pep
MGVFAVTKVSEGPVRPSAATPSETLPLAWVDRYPTHRGLVESVHVYRDAMTGTGDAGAEEXEEAPGXVVRGALADALVHYYPFAGRIVEGEDTCRPAVLCSAEGVYFVEATANCTLADVN

SEQ ID NO: 213182 - protein, 101 aa, Zea mays
  Clone ID: MRT4577_126020C.1.pep
RYYVINALKSGRQDKVIEFFGEYGNYLMQKRGDWLAWFAIPYIKNPSLDPQFRLYFSKEWLDTLVLSFRNFLSGIFNDTRTPALMRISSEKEYHQIPQEMT

SEQ ID NO: 213183 - protein, 92 aa, Zea mays
  Clone ID: MRT4577_126021C.1.pep
HASEEIHAHVLRCGIEYEGYLPNALIDLYVKCGQTGYAWAQFCAHGAKDVVSWNIMIAGFVAHGHGDTALSFFNQMVKIGECPDEVTFVALL

SEQ ID NO: 213184 - protein, 124 aa, Zea mays
  unsure (1)..(124): unsure at all Xaa locations
  Clone ID: MRT4577_126022C.1.pep
GPDFPGPSTASPKEFLSQVFYLLGKQACAGKFVSEGGFDTHPVATANVLESSSPVVVGKQYFSITVLTRTTXGAEGGKHQLITAAVSAGKLYICKGQPGANRWFKGARKGVEKPSASFSVVCPP

SEQ ID NO: 213185 - protein, 65 aa, Zea mays
  Clone ID: MRT4577_126023C.1.pep
SVKSCIPTDACRGYNYLFFVIIEVRDEWARVLEALDQPLPHVQYPVNSVNRFRPRLPLHEYTIFS

SEQ ID NO: 213186 - protein, 167 aa, Zea mays
  Clone ID: MRT4577_126024C.1.pep
LTQPGCLPVFSEKKNMVASFIWKKAQRGKNLALAFAAIPPKKGSCLKRPPKHPGPGVTSAYRSTDIVHPLRGHGFFPPPGFWPSRVFECGGGPPHGDGLGDPQGLARACFGGTVHPCSLDAFVHEKTFYRGASRPPAEHRGGFPLTGAGCAPGLGGAGQLTCPWTVV

SEQ ID NO: 213187 - protein, 63 aa, Zea mays
  unsure (1)..(63): unsure at all Xaa locations
  Clone ID: MRT4577_126025C.1.pep
NKPCRWFLGGEGSFKILFTFPXKKQITTVGPQTAYYPFKTPGYKTLERSRCHKTRILNSWGGG

SEQ ID NO: 213188 - protein, 67 aa, Zea mays
  Clone ID: MRT4577_126026C.1.pep
PGKTVSLTIGYGKAGAPGVCWPIFDFRLALLALSPCLSPRIMRGPAKRSGNCLASAGRSLGVGSRVP

SEQ ID NO: 213189 - protein, 74 aa, Zea mays
  Clone ID: MRT4577_126027C.1.pep
VLIRASMRPVALIIKACMISSSGSNQTNRPTRANQLCTPPPLQAVFFQGQKISDSVFCGQDRCKMLILSGPDLW

SEQ ID NO: 213190 - protein, 552 aa, Zea mays
  Clone ID: MRT4577_126028C.1.pep
MSAAACLFAAAVSLSFPSASAPSSARRRRLRSPTTLLRCSPTRRRGPVRRTLDERLLEAAPAETEDVQTAVDVEDGGGIAEGDEVGTEEMEELEQRPPTRAFVKSRRQRQEEEEAAAGQDRFKLINGKEIFQEKAYLVGVECKRTGGNLFGIEESLKELEQLADTAGLLVVGSTYQKLSTPNPRTYIGSGKVSEIRTAIQALDVETVILDDELSPGQLRNLEKSFGGSVRVCDRTALILDIFNQRAATHEASLQVTLAQMEYQLPRLTKMWSHLERQAGGQVKGMGEKQIEVDKRILRTQISALRKELESVRKHRKLYRNRRQSVPIPVVSLVGYTNAGKSTLLNRLTGADVLAEDKLFATLDPTTRRVLMKNGTEFLLTDTVGFIQKLPTMLVAAFRATLEEISESSVIVHLVDISHPLAQQQIDAVERVLKELDVESIPKLVVWNKIDNTDEPLSVKEEAQKQGIICISAMNGDGLEDLSNAVQAKLKDSMVPIEAFVPYDKGDLLNDIHKVGMVEKMEYKESGTFVKAHVPLPLARLLTPLRQQVAATV

SEQ ID NO: 213191 - protein, 41 aa, Zea mays
  Clone ID: MRT4577_126029C.1.pep
QMVQASCQRRFYTGSRTQGPISAHKRNASYHMVGGGPIREI

SEQ ID NO: 213192 - protein, 170 aa, Zea mays
  Clone ID: MRT4577_12602C.1.pep
YNKNKELFSSWAPASSHLIGVISWQDFLQHLGGGGATISSYRGPFLPFRVGVLNSTGRLLKPWGLEKTLAFPNLILLQTFPFSKRAEIIKIPNPFPFSKGSEPSLEKGLPLYGPFNSAGCGGYTKRDPITGQFLFPPFFSFLPCLFPPLSCFSRATFKVGVPFWVPLKPL

SEQ ID NO: 213193 - protein, 164 aa, Zea mays
  unsure (1)..(164): unsure at all Xaa locations
  Clone ID: MRT4577_126030C.1.pep
MSPSTVIALGSSTPQCVPAPPLPRSSMSTQISNNKKCGSGGALYLELIEMLTRKLAXDRYSSAYGRVPPMRTYIISRSTLTQNLLHETVRWIMXLTSVLHKRFDFPENGVELYSYNVLDRVHCDIAQAEILRYKLLSGLAEQMGCYGVLRFGMNRVVLGLRGHC

SEQ ID NO: 213194 - protein, 60 aa, Zea mays
  Clone ID: MRT4577_126031C.1.pep
ILLAPALLFESRINNFAFARDAATACFVLTSTKSGSLLWKSTATHFNLKAAAPLESSSTT

SEQ ID NO: 213195 - protein, 123 aa, Zea mays
  Clone ID: MRT4577_126032C.1.pep
GYNFGERTARSLFAEQGLEIRGFPGYGSESMLRKPVVGYRRCTNFSSNFRVQMRGLCHSNRGGLPPSYYLGLARHGQSCSCHLLERSMNVVWVARPQCTGVLCGCPFVRFAGRVCHVICSHCP

SEQ ID NO: 213196 - protein, 54 aa, Zea mays
  Clone ID: MRT4577_126033C.1.pep
SKSIISSKSQSNYTVPLRLISPPVLLIDVHNSEKHRPATHIKAICDTPSKHPVF

SEQ ID NO: 213197 - protein, 155 aa, Zea mays
  unsure (1)..(155): unsure at all Xaa locations
  Clone ID: MRT4577_126034C.1.pep
KLTCFLSKDSFPWTKKNQSPPQGSGRNVQDRAGLGRATPKGGHPKKREPAPNTPQPGITQKKAPPKPPKKEXITATRGGEPPGGQKKEXRKRNKPEGYPYKQKRRPTPVKPXGHKNXPDPPGAPPGARKTRERPPLPDGGKPFVSQETPTPGGFQ

SEQ ID NO: 213198 - protein, 85 aa, Zea mays
  unsure (1)..(85): unsure at all Xaa locations
  Clone ID: MRT4577_126035C.1.pep
MELXFFKSDHSSSYHYXSISKPCCYLYMCTRSIPPQXSSXNITLNTCHSHCIICMFTLSHPLQCLCLDTNNFFYKPFKSIYDYKN

SEQ ID NO: 213199 - protein, 110 aa, Zea mays
  Clone ID: MRT4577_126036C.1.pep
IERSILIQAKGYARYDCHSRSGINGHQRFSHPAQQGTTAPMDGPPSTCSGALYKNSNRCYTLLSARRMERVTTYQKLDHVRRGPGRRAAPRRRLNHSEKSRAPKTRRLSA

SEQ ID NO: 213200 - protein, 59 aa, Zea mays
  Clone ID: MRT4577_126037C.1.pep
LPCAHEGFDVSSDHVVFLILVSFGIGLVEGDFFLFSVFNIVIFRSSFIRLSSTSFLFFF

SEQ ID NO: 213201 - protein, 167 aa, Zea mays
  unsure (1)..(167): unsure at all Xaa locations
  Clone ID: MRT4577_126038C.1.pep
PWLQLSAGDETAPFFGFLGAAAALVFSCMGAAYGTAKSGVGVASMGVMRPEXXVMKSIVPVVMAGVLGIYGLIIAVIISTGINPKAKSYYLFDGYAHLSSGLACGLAGLSAGMAIGIVGDAGVRANAQQPKLFVGMILILIFAEALALYGLIVGIILSSRAGQSRAE

SEQ ID NO: 213202 - protein, 82 aa, Zea mays
  Clone ID: MRT4577_126039C.1.pep
MAHEIIKKSEKDSHDAKEVMKAAEKTVELERRIAELLPSQGPEPTADPEAKREEEITKMTEAILDEAVSRLLNEAAEAVLEE

SEQ ID NO: 213203 - protein, 218 aa, Zea mays
  unsure (1)..(218): unsure at all Xaa locations
  Clone ID: MRT4577_12603C.1.pep
MASKVPAALLSCAFLLLLGAACQAAAGHYSPPSPASCGLKVGYYDHKCPPAEAIVKSVVRAAVRRNPGIGAGLIRMLFHDCFVEGCDASVLLDPTPANPQPEKLGPPNNPSLRGFEVIDAAKAAVERACPGVVSCADIVAFAARDASSFLGGRRVDFDMPAXRLDXRASNASRTLDFLPPPTSSLPELVQSFAAKGLSAEDMVALSGAHTSGXSHCSA

SEQ ID NO: 213204 - protein, 47 aa, Zea mays
  Clone ID: MRT4577_126040C.1.pep
KHNDNVYVVCYVEYQIYILIQCCRFIVLFEIMYIALVESQHVIFDLV

SEQ ID NO: 213205 - protein, 115 aa, Zea mays
  unsure (1)..(115): unsure at all Xaa locations
  Clone ID: MRT4577_126041C.1.pep
NMYRNMDMLYEXLTKAAPGDSPNTGGIHIGXSXGITITNTIIGIGDDCIYICLCTCKVNITVMTCGLSYGISIGILMRYMDQNDVTDINVNDCTLDKTMFNMMCHAAQLLDQLRH

SEQ ID NO: 213206 - protein, 82 aa, Zea mays
  Clone ID: MRT4577_126042C.1.pep
MAASSNEELKNKALSQIDHYLANGAWTAPVDDRGVEFKTCPHGSHEINVFLGTKTIATSIERLLAEFWDNVNESGVKAFDPD

SEQ ID NO: 213207 - protein, 50 aa, Zea mays
  Clone ID: MRT4577_126043C.1.pep
MSTLRPHVVFIPSAGMGHLIPFFRFIAGLAGQSVDSAAVSVLPAVSTSLW

SEQ ID NO: 213208 - protein, 537 aa, Zea mays
  Clone ID: MRT4577_126044C.1.pep
MGPTWLPPVIWSLGGILIPLVIPLAVRDVSGGLMCGPGRELGTRFKTKPSKLSVMAPPATNSPGEVDSGGRPHVMFIPSAGMGHLIPFFRFIAALAGQSVDISVVTVLPTVSAAEEDYFTSLFAALPRVRRVDLHLLPFDASKLPSNDRDPFVLRWEALRRSAHLLGPLIAGAAPRVSAVITDVTLTSHVIPIAKELGVQCHVLFPSSATMLSLLAYTPVHIDKKAEQGSDIGDVDIPGVCRIPQSCLPQVLLHLDKLFTKQFIANGREIINADGFLVNTFDALEPVALAALRDGKVVPGFPPVYAIGPLMSQQHSVDEGGKEEGSGSPVAWLDEQPARSVVYVAFGNRCAVSHDQIREIAAGLEASNCRFLWVLKTTTVDRDDSAVLTELLGEGFLERVQGRGLVTKAWVDQEALLKHPAMGLFLSHSGWNSVTEAAAASVPLLAWPRGGDHRVNAKVAVSGGVGVWMEHWSWDGEDWLVTGEEIAKKVKEVMSDEAVRARTTRTAEEAAKAVAEGGTSYRSMEEFISSVKATVAS

SEQ ID NO: 213209 - protein, 67 aa, Zea mays
  Clone ID: MRT4577_126045C.1.pep
NKYRDLTNCKEIFRSRSIPPLYTTNCKEIFRSRSIPPLYTCIIYTTKQLHTINYNLDYIIQIIIKII

SEQ ID NO: 213210 - protein, 57 aa, Zea mays
  Clone ID: MRT4577_126046C.1.pep
METFDPWPVFFRREWKRNWPFLTGFAITGFIITKMTSNFTEEDLKNSKFVQEHKKKH

SEQ ID NO: 213211 - protein, 72 aa, Zea mays
  Clone ID: MRT4577_126047C.1.pep
VHHLYTYNKWTDTTIAGTTAEFTGTFYLKQLCFKAYAWGHGCYDDYELWIIPLRTCEKPTCCRMSTWAPHYE

SEQ ID NO: 213212 - protein, 57 aa, Zea mays
  Clone ID: MRT4577_126048C.1.pep
MKTFDPWPVFFRREWKRNWPFLTGFAITGFIITKMTSNFTEEDLKNSKFVQEHKKKH

SEQ ID NO: 213213 - protein, 91 aa, Zea mays
  Clone ID: MRT4577_126049C.1.pep
SHHAPWVGLRKQIEGDLAAGLAALSVFTGCSIAGVGGPLRYRLRRPTPRASTQSLPYHAHTWCRRLPAVVPTDDMLLPTLTNGPNPNGPRH

SEQ ID NO: 213214 - protein, 43 aa, Zea mays
  Clone ID: MRT4577_12604C.1.pep
NKFAGQYNTVITSQARVRKLGSSRPAALLRKHKQNNLLEPMRL

SEQ ID NO: 213215 - protein, 57 aa, Zea mays
  Clone ID: MRT4577_126050C.1.pep
MKTFDPWPVFFRREWKRNWPFLTGFAITGFIITKMTANFTEEDLKNSKFVQEHKKKH

SEQ ID NO: 213216 - protein, 81 aa, Zea mays
  Clone ID: MRT4577_126051C.1.pep
NKRGPHYIPTKPQTFQNAPQGQQKGNHSPPLKQFSLSPLLFKPQNPFYFWEGPPFPPYKIIGIKIWGPPPLKKKLNPPPPP

SEQ ID NO: 213217 - protein, 57 aa, Zea mays; identical to SEQ ID NO: 213215
  Clone ID: MRT4577_126052C.1.pep

SEQ ID NO: 213218 - protein, 91 aa, Zea mays
  Clone ID: MRT4577_126053C.1.pep
NEVVHGALVSLLFTSHYLSACECVKYVIKTRVASPSRSLAPHSPYKSRRGLLLLHPQESSEPTRHHQAPPSFFTSLPLLQEASEGVDAAAN

SEQ ID NO: 213219 - protein, 108 aa, Zea mays
  Clone ID: MRT4577_126054C.1.pep
LLLFSPPPVGQAPTDPPPQLLPQNVPALTHPIVANPFASFQQLFPFNHPGVSKFVGDPQQRQQLLNPLAVANPMVATFLQKQQQMLPNNQFFFINPPLQQPNVGGPPF

SEQ ID NO: 213220 - protein, 63 aa, Zea mays
  Clone ID: MRT4577_126055C.1.pep
VPRGRPRLTWTGSTGYQEGPWPRSMVHIALGGCVGLLSPPSGRVDVIICGRGGTRLRGPYQFM

SEQ ID NO: 213221 - protein, 109 aa, Zea mays
  Clone ID: MRT4577_126056C.1.pep
PQFTVCPHEEVYIGRLQESVHFSLLVGWLIHHSLPTGRKTRTRREEGKQKPVMSCHAQGNGTKKNRQPPHEPGCGGFTGRDALLSPVPAPAARPISMSPPASSSSSSSS

SEQ ID NO: 213222 - protein, 34 aa, Zea mays
  Clone ID: MRT4577_126057C.1.pep
LSLTAVFSGTYNRRQSINDHEMAAPSMITGTNEY

SEQ ID NO: 213223 - protein, 99 aa, Zea mays
  Clone ID: MRT4577_126058C.1.pep
VPMGTLVTPEEVICEVASNPLQFVTCVLTVLGCHLMSIEATTSIIAKIRLENDAGGSVVGVGEVERGGAVRADSGKIRQCPSNPPAPPLLFPCITGAWE

SEQ ID NO: 213224 - protein, 44 aa, Zea mays
  Clone ID: MRT4577_126059C.1.pep
GNGENLPRWGQTEPTITESFLRSYLQPGAFFENIFNLIMGVKGK

SEQ ID NO: 213225 - protein, 92 aa, Zea mays
  Clone ID: MRT4577_12605C.1.pep
MTGRAFKAVIRGKHRTRYGASLRKQIKKMEVFHHSKYFCEFCGKFAVNRKVVGICGCKDCGKVKACGAYTMNTVSAVTVMSTIRPLREHTEA

SEQ ID NO: 213226 - protein, 112 aa, Zea mays
  Clone ID: MRT4577_126060C.1.pep
THAWSSPTSRIFRLYELQRRWGTSTSIHVRRLRRAMIRPMTLLLVSACCALAEPADEVDTDGIVQNGNFDDGPTKSALVNSTQVSDAHAMHECDDVRLHGVHRVRAQSVRHA

SEQ ID NO: 213227 - protein, 78 aa, Zea mays
  unsure (1)..(78): unsure at all Xaa locations
  Clone ID: MRT4577_126061C.1.pep
GEGGRLPKGRRRKKRTPSRSNKEKKKKPPPPPKKKKKKKKKKKKKKKKKKKKKKKKKKKKKKKKKIKKKKKKKXKKAC

SEQ ID NO: 213228 - protein, 129 aa, Zea mays
  unsure (1)..(129): unsure at all Xaa locations
  Clone ID: MRT4577_126062C.1.pep
FRKITPPPTKAPNTMAHISPPKNFSPGPPKXKKPNPRPLFFNPKRGPSGDPRCRGPXPGPFPXPTPTPPPPGXFAPPDPPPVELPPVSKKINTPTNCPVALGPPSGKKFFAPTTPPSLTPGGDPFARLC

SEQ ID NO: 213229 - protein, 113 aa, Zea mays
  unsure (1)..(113): unsure at all Xaa locations
  Clone ID: MRT4577_126063C.1.pep
TTEAKSVEMHHEALHADNAGDTVGLNIKNVAVNDLKRGSVASNYKADHVKDAVSFTYXGIIMNHPGQIGSGYAPVLYCHTSHIAVNFGGLITKLDRRCHQQLEKQPEFLKNRD

SEQ ID NO: 213230 - protein, 139 aa, Zea mays
  Clone ID: MRT4577_126064C.1.pep
VHPTLHPPAHAQPMPQLAAPATSQPQQSSFPSAATSSSAFSTFSTPASAPSSSSLFATPTTPAPSANLFGASGSAQLTTPFGTASTPTLASTPAPGFGTSTTSLGGTSLFSTPFGGGATASGSSFGGASKGRSKPRGRR

SEQ ID NO: 213231 - protein, 116 aa, Zea mays
  unsure (1)..(116): unsure at all Xaa locations
  Clone ID: MRT4577_126065C.1.pep
PGLGQCNQACRTTRESSQIVSPIGLHKRGTHSVRAQLRPRLQAQGISRFFPRPSGCLPPPSRIPRSAXVWSSPPNTRXAASKKKEKRAPRHPPRHDPPCEQSKAATKRLTLTTTTL

SEQ ID NO: 213232 - protein, 107 aa, Zea mays
  unsure (1)..(107): unsure at all Xaa locations
  Clone ID: MRT4577_126066C.1.pep
XLLSPYLNPSNGWSHQTHSVNLTPSPNAPYSTLALLPMHQPLVLLLLFFISSAKYAVSSRAYACASTYILYLNPSLKPFPYTTHLHWHHAHLDSLSLDPVRHLLYSY

SEQ ID NO: 213233 - protein, 115 aa, Zea mays
  unsure (1)..(115): unsure at all Xaa locations
  Clone ID: MRT4577_126067C.1.pep
GSGAQHPLKIGANGWSSLWHGNATTEQIGEPRSDLQYEHKVLINPSMXDDLFLSTVXALSMGKFMICARHPXMSVACHSPNCMTYKTSEESGARAKEALDREPQHVTPEQRHNLS

SEQ ID NO: 213234 - protein, 100 aa, Zea mays
  Clone ID: MRT4577_126068C.1.pep
PLGPTALHVRTPAGEIEAMPEATVHVGPVRVAALVLDQARVMREKRRIAPQSDGRFKQRGSARAQIPLVACRFPSSRVVRGHRLQAGANKGSVIRLLAYS

SEQ ID NO: 213235 - protein, 60 aa, Zea mays
  Clone ID: MRT4577_126069C.1.pep
LFVRNTLSVYMGHIDYPPGGQNPSHTHEIATNNIYNLMGNARGSIHNHRERALHQDRDQW

SEQ ID NO: 213236 - protein, 55 aa, Zea mays
  Clone ID: MRT4577_12606C.1.pep
VVENLSLYDPDEAFSVSAEEDRPLFSCFGVSIQGLDRFRAKTTLRIENQCIKGSI

SEQ ID NO: 213237 - protein, 99 aa, Zea mays
  Clone ID: MRT4577_126070C.1.pep
ISLIRQYSPSRRASISLRCGIGASNHYLILIVLTRVRTHDIWLMYHIKLYATTNSTQKLKLIGRGRQLTYITTQSPQTTCHQRYSNKVNTHALNRTRGR

SEQ ID NO: 213238 - protein, 68 aa, Zea mays
  Clone ID: MRT4577_126071C.1.pep
SPKSSFPDDGYVLVLCAVRHGRGLQNEDTFESAKTIASLTDGRMLDMGEDDQANTNALCVRTRESEHL

SEQ ID NO: 213239 - protein, 80 aa, Zea mays
  Clone ID: MRT4577_126072C.1.pep
DSADCDGVPHCNSPGSCVWGTPSLAARRQGEGGRDHLRTRAARGHAGTEYRDIEQRPSRLNMKGPWAIGFIRQKAPGRAS

SEQ ID NO: 213240 - protein, 60 aa, Zea mays
  Clone ID: MRT4577_126073C.1.pep
YSAQATIITTIHDSQHLKHILTTQPLLALQMALVTLTLTLELFHANEFHHLPLINLISRP

SEQ ID NO: 213241 - protein, 117 aa, Zea mays
  Clone ID: MRT4577_126074C.1.pep
IGYLEAGRDPIFSRRLPRLQTDTPTHSPLPALPWTMAAYLRTSEACVGFRRFRLRAHLFSSASPIAMNARPLTTQELPLHEHELRCTVRDGPVDHCTRLRHQVLATMMTPEPSSAMT

SEQ ID NO: 213242 - protein, 164 aa, Zea mays
  Clone ID: MRT4577_126075C.1.pep
MAFSKPLAALLLAVALAATAMSAAGQDPQNCKPSRKVTVQNLCGKDLYLGIEPLANSKLLYSPGYLLRHGTHVSYDVCSWTGRVKVQDAVVTEFHIGYDGGAWYQVSTDQSHMPIRVSITPHGHPLKDHCPTAGCNSGGHCFEHSVPGGKCHGVDEIKIVFYNP

SEQ ID NO: 213243 - protein, 92 aa, Zea mays
  Clone ID: MRT4577_126076C.1.pep
ARPFFFFFFDKATFTGFYKKTSLHKPCCMLQQTTFLLGHATSHSSIVTCILLTVNSNRPASAQQHLLNAQVTPTGEGMANFIKLGNAISGGA

SEQ ID NO: 213244 - protein, 115 aa, Zea mays
  unsure (1)..(115): unsure at all Xaa locations
  Clone ID: MRT4577_126077C.1.pep
MANPTESDDYMIQNGRGYVRPYYFEFIXSHVKNRWTGKTIXDLFTDECKGRXPADYYVHALKYGRLHVDGDMVHTDYIEKXSHKISHLLHRHEPPVLADDIATLRNEGALRTICK

SEQ ID NO: 213245 - protein, 58 aa, Zea mays
  Clone ID: MRT4577_126078C.1.pep
MAAAAEAAAAQHQRRRRKRFVGVQKQPSGRWVAEIKDTIHKIRAWISTFDTVEEAGRA

SEQ ID NO: 213246 - protein, 190 aa, Zea mays
  Clone ID: MRT4577_126079C.1.pep
NDSQRWEIICKLSIGIVKGLDHLHTASQKPIIHGNLKTNNIMLDADFQPRISDFGLYLLLNPAAAQEMLETSAMQGYKAPELIKIRDGTRESDIYSLGVIMLEMLAQKEAANDESPNARDIHLPVSFRDLVLERKISEAFSSELIIQSKNSGKEGNLNAYFELATACCNPSSSLRPDTKKILKRLEDIAR

SEQ ID NO: 213247 - protein, 92 aa, Zea mays
  Clone ID: MRT4577_12607C.1.pep
TTSSDPDTSRTSGWSTGSVYAGSPYHGRRNDMATSIRLALIEMNRATNCGTAYTTTTAAELVRSQSNYHVRSRYLKQSACTTHNWDRAVSSL

SEQ ID NO: 213248 - protein, 81 aa, Zea mays
  unsure (1)..(81): unsure at all Xaa locations
  Clone ID: MRT4577_126080C.1.pep
LPKSDMMVCWALAYYFECCHVAPVPFMLPCGKAEGLAYSVLWNFLAGPLVRSCHALFSHXCXINVLLAXISASFYSASCAT

SEQ ID NO: 213249 - protein, 53 aa, Zea mays
  Clone ID: MRT4577_126081C.1.pep
EIIKNGTKVWIKQKYRTTRNNIKCECLIYSLVFYFMILGGGTKTKYCWFVFVL

SEQ ID NO: 213250 - protein, 82 aa, Zea mays
  Clone ID: MRT4577_126082C.1.pep
ANWHEPRRNVTLAYEGAMAASYLVGTAFYLARVPERWRPGAFDLAGHSHQIFHALVIAGALAHYGAAIVFLRARDEMGCPAS

SEQ ID NO: 213251 - protein, 46 aa, Zea mays
  Clone ID: MRT4577_126083C.1.pep
FSMLYSIKVYYRIFKLKQYYLKVWQINFHLQTIYYEHRHEKKKRAA

SEQ ID NO: 213252 - protein, 129 aa, Zea mays
  Clone ID: MRT4577_126084C.1.pep
PPPSFFLGPAKDPPRAFFRGGTIPSPEFVFRNIFITPFLGARPPFFPIPAGVWTVNFAPPTKYFFFLEGPLFPPEIIFPGPGVPPRYLLWVGCFFLPCCLVARVIYVLPPVFFCPIMRGLFRAPLIGIC

SEQ ID NO: 213253 - protein, 67 aa, Zea mays
  Clone ID: MRT4577_126085C.1.pep
IHISIQIWGRRHFFMNAKQRLLHAGKNKHMREAKEASITPNRDTTRGKNLTGKPLLQFKRLTKNGHM

SEQ ID NO: 213254 - protein, 81 aa, Zea mays
  Clone ID: MRT4577_126086C.1.pep
IVFGSPIFSVFTICIIHKQLSQNPHPVSRALSLMFHNGYKRSQVTMYTLLPFTWQESISGINSIQGYRFCYKDSEQPSVRV

SEQ ID NO: 213255 - protein, 116 aa, Zea mays
  Clone ID: MRT4577_126087C.1.pep
VSILSFPFIHLIIFSILSPQTQFIVLRFPPSTLGNLLYSPLYSPCFPSPFFQLAFFPISPPPIALPTCFSSGIFFVTFLFMSLLAPLLLWLPPPPPISFPSLFSPLFSLFPFFSFF

SEQ ID NO: 213256 - protein, 140 aa, Zea mays
  unsure (1)..(140): unsure at all Xaa locations
  Clone ID: MRT4577_126088C.1.pep
MGSLRPVATHLSELLGAEHLMANDWIGXEVENLADNKPEGGVLLLANVRYYTETEKNKPDYANKVVYAADLYGKDACGTAQIDNASTERDTKCFKPAAAAFIMNKELDYLAXADANPTIPLADIVDSLQGLTNIGVVESL

SEQ ID NO: 213257 - protein, 85 aa, Zea mays
  Clone ID: MRT4577_126089C.1.pep
MSEAGKRFVNVAHAGLPARRSAVGGLRRWLGRAAAALGVAAMLAAPAAQAGQGAELVLLGVAGGPTWYGNDAPHGISSALDSDSL

SEQ ID NO: 213258 - protein, 107 aa, Zea mays
  Clone ID: MRT4577_12608C.1.pep
MCKRYAWSYSEVDIALDSESKGRGFISHYDQYVSVCFYFYYCFCFWSGLKVTFWHHLSSLALLLLLVKKMVPLPLGLLPSVRIVTECRTVAALTFYGPAVVSKYRLA

SEQ ID NO: 213259 - protein, 596 aa, Zea mays
  Clone ID: MRT4577_126090C.1.pep
MDEVPATAAVLDFRPGSSVPRVSAVPRRAVQCPPDTGGAEAATGGRPGIGNTAAVSAELTGSSSAGPDIQAEDCDTSGGLAGGDAGDVGVLCLENAAEPESVEPGVSDVRLGAPVEERHGRTLDSTGLGSGKAGETNEISLVEVSQSGATSSLDATASIGGGYSLVEGSLPEASGARRCKPEVHEVPTGTPATVGFPIEDGGYGFGIGPNDDVDGRNDPAGGEWEPPTDGNDAEDVTDMGGILCDERVERMETNSVEREASNGSTVSSEEGVDRMGTSLDDSEASDGSTTQDSDTDVETESSVSSIEEQEAGYGAHIPQPDPAVCKVSKENNTAGVKISDRMTSVSESTLVLASGASMLPHPAKVRTGGEDAYFIACDGWFGVADGVGQWSFEGINAGLYARELMDGCKKIVEETQGAPGMRTEEVLAKAADEARSPGSSTVLVAHFDGKVLHASNIGDSGFLVIRNGEVHKKSNPMTYGFNFPLQIEKGDDPLKLVQKYAICLQEGDVVVTASDGLFDNVYEEEVAGIVSKSLEADLKPTEIADLLVARAKEVGRCGFGRSPFSDSALAAGYLGYSGGKLDDVTVVVSIVRKSEV

SEQ ID NO: 213260 - protein, 374 aa, Zea mays
  Clone ID: MRT4577_126091C.1.pep
MKKASAASRYAAYDSPSPSPSPRRAAPSAAAATPGGAHGSSRALVVAGRSGRDLLGAKPQPQAHGNLGSVLRRLISMDKKPPKNQLPVPPAAASAAKNNGGGNTRPPTRPLFQKASSTAAAAPRKTKALTEVKNSGNNANTRTLAMVLRTERELLAQTKAQEDEIAALRLQLENKDREVERLKDLCLRQREEIRTLKDAVLFPDAEPEPDRRLRDEISTLTDQIQCLAQELTQVKAEKHSTRSCFDEDGYCSSPRTPGFNEETAFSLECSIGEAETPNYGSPDEMFSKDLNPCLTPCIAKSKSDVSAQFQSSSQFTKESSSSYRSSGKARADRSYSSFGRPMSKSYDHHKPASGTSNKRRVYKSNQDKINQNLF

SEQ ID NO: 213261 - protein, 122 aa, Zea mays
  Clone ID: MRT4577_126092C.1.pep
WFLKPKPSIRPPALSSQPSAPSWLLYAQLSMDEVPATAAVLDFRPGSSVPRVSAVPRRAVQCPPDTGGAEAATGGRPGIGNTAAVSAELTGSSSAGPDIQAEDCDTSGGLAGGDAGDVGVLG

SEQ ID NO: 213262 - protein, 276 aa, Zea mays
  Clone ID: MRT4577_126093C.1.pep
DPAVCKVSKENNTAGVKISDRMTSVSESTLVLASGASMLPHPSKVRTGGEDAYFIACDGWFGVADGVGQWSFEGINAGLYARELMDGCKKIVEETQGAPGMRTEEVLAKAADEARSPGSSTVLVAHFDGKVLHASNIGDSGFLVIRNGEVHKKSNPMTYGFNFPLQIEKGDDPLKLVQKYAICLQEGDVVVTASDGLFDNVYEEEVAGIVSKSLEADLKPTEIADLLVARAKEVGRCGFGKSPFSDSALAAGYLGYSGGKLDDVTVVVSIVRKSEV

SEQ ID NO: 213263 - protein, 72 aa, Zea mays
  Clone ID: MRT4577_126094C.1.pep
TRRLTFSESLDASRASFLTRQQLLPLYKQLAANPATVLQLQQCLHSAQLALTNPSVSYQQHIIGGALFYIEY

SEQ ID NO: 213264 - protein, 186 aa, Zea mays
  Clone ID: MRT4577_126095C.1.pep
ASLVDGSGREGWACASASGHHRRGAPDAGRARAAGRQSAGAQAPPEAGDSDLRVGGRRSPLLMPAKEPTAFGPSEAAISGSMGAKGSRAKAANLVGDANRLSGRLCSALWLLSAFGLASPADSSLPESSGAGERERRASATFGVVAEEDRRRGSRGDTVMRRGWRREQRGGWRLGRRPPREGGMSL

SEQ ID NO: 213265 - protein, 74 aa, Zea mays
  unsure (1)..(74): unsure at all Xaa locations
  Clone ID: MRT4577_126096C.1.pep
MLRVTIXLNDVLKSXMYNVXKRXKRHVMIRPLSKVIIKIXTVMQSHGYIGELEYLDDHIAEKIVVVMLNGRLNK

SEQ ID NO: 213266 - protein, 57 aa, Zea mays
  Clone ID: MRT4577_126097C.1.pep
YPGALFNVKAHCGCFFLPLNNTRFFMYLKWGPPDPECDPCSPLFLDSPLNKKKPYLF

SEQ ID NO: 213267 - protein, 114 aa, Zea mays
  unsure (1)..(114): unsure at all Xaa locations
  Clone ID: MRT4577_126098C.1.pep
MTMANAGARIVSPAGAATLALSLLCADDGPDDAQNYCCQPNVCXNKFGYCTTTDKYCNXRASTGPCKVVRQEQANTCRGANVASVDTASLLNSIKSHAGSVYXGKHLYNLNAFL

SEQ ID NO: 213268 - protein, 61 aa, Zea mays
  Clone ID: MRT4577_126099C.1.pep
FIKSKIYVCKKVLKKNKINKNKILELKNDSLSKGSKFNLTSFTMKTSFIWRPKLKSLSFIL

SEQ ID NO: 213269 - protein, 66 aa, Zea mays
  Clone ID: MRT4577_12609C.1.pep
VPLLIGDPSTGISPRLLISMDYPTSGRAMSRQDNVQNMHQENGVSICKHVHEVEVFLAFQDLLVVL

SEQ ID NO: 213270 - protein, 120 aa, Zea mays
  unsure (1)..(120): unsure at all Xaa locations
  Clone ID: MRT4577_1260C.1.pep
PPANQTARLTPLREAPLPLEIWLPFKSRSVSASRGASPTAPAPRDLFHRDHSCRGALASPQVASRIFFSEAPKAPLYPSAAAAAPSPPSAHAGAGIGAPRSLRLAAGEVVGXRRGRPGNV

SEQ ID NO: 213271 - protein, 104 aa, Zea mays
  unsure (1)..(104): unsure at all Xaa locations
  Clone ID: MRT4577_126101C.1.pep
ARRHPGAPGPVPGGPPTVERRXGQGGGSLSPGEKRFEFALVPLGKVKTPPKSPGWCSSPVKTPHEALAPVVSRRRRRRRPPGPPXSRRRRHRETTLITVKRSRP

SEQ ID NO: 213272 - protein, 90 aa, Zea mays
  Clone ID: MRT4577_126102C.1.pep
MSKEQSEWVKDAICDIDGDAKATNRKFNETAELQIVLKNYDPQKDQRLSGSGQLPHIPRPKMKVRMLGDAQHVEDADNMGLDYMDVQAVE

SEQ ID NO: 213273 - protein, 151 aa, Zea mays
  unsure (1)..(151): unsure at all Xaa locations
  Clone ID: MRT4577_126103C.1.pep
RRISVAAPPVANLLAELQDHLKLARYYALXGLYDTSSIFFDEALAHITKDLTTLCDALIRTHCMNCKRAIXNECELXKQLQAPLLSLTYAPETGRSSSPPIRANKSYVLHPLDDDPTSAPAPLDDPDVWAPPSDTPTRRPTRGPSSARKLS

SEQ ID NO: 213274 - protein, 141 aa, Zea mays
  Clone ID: MRT4577_126104C.1.pep
MAPIKHSPQPQTVNGATSPPPSDRSSTAEPRFSAAMAAPPRRSLLVLLAGILVFGSLTTLATAIYEDQVGLADWHQKYIGKVKQAVYHSQKSGRRRVVLLTEENVISSLDLRSGDIFWRRVLDKNDPLDQLSLSLGKCVLT

SEQ ID NO: 213275 - protein, 79 aa, Zea mays
  Clone ID: MRT4577_126105C.1.pep
KKARPVTTFLGHQYPWGKMDKRAPLFVLLNRGLMINKNQKKTFQGPKALFSAPPQSTFFSPTGGTFFTELILLGVSTSH

SEQ ID NO: 213276 - protein, 90 aa, Zea mays
  unsure (1)..(90): unsure at all Xaa locations
  Clone ID: MRT4577_126106C.1.pep
PDGHNLSVVIVLVEYLKLLXLQAYFMQVDGTLNKLTTLREYIDDTEDYINIQVMLRHIDAYCLLFFDHSVSKYILVFLLSQCSLITTVIS

SEQ ID NO: 213277 - protein, 84 aa, Zea mays
  Clone ID: MRT4577_126107C.1.pep
KGPAFFGVPCLLPLLFYALLFLLCRPILFNCPSFNTLLTGKSFSFPNLFLLPSFLFSRGAVFSYAPNPFAFSIICAAFLSIGTP

SEQ ID NO: 213278 - protein, 76 aa, Zea mays
  Clone ID: MRT4577_126108C.1.pep
VDWYPGVGWFWIHYHPSSEEAGGDLPYAQSAVCMICNSTNVAVVFYHIYHKFDLMFAKRALVHWFVREGIEEGEFF

SEQ ID NO: 213279 - protein, 72 aa, Zea mays
  Clone ID: MRT4577_126109C.1.pep
ARRARIFRLTTPAASKDGGGMGRAGGGARLITTGECRAQHGAGHTMRAQQPTWLADATDQQKLPRILPTKEL

SEQ ID NO: 213280 - protein, 122 aa, Zea mays
  unsure (1)..(122): unsure at all Xaa locations
  Clone ID: MRT4577_12610C.1.pep
MGPGELDPGARKTYTLXTPTRTRHIANEFPGFWTAXIMLTFHNASTLWSVPYNVRQRHYPRELRYISVIXTARSLREEYNMPDNALRCGKDVGLTLPSLLRPLALKTTKAPFSPCVLTIQLN

SEQ ID NO: 213281 - protein, 138 aa, Zea mays
  unsure (1)..(138): unsure at all Xaa locations
  Clone ID: MRT4577_126110C.1.pep
MVLLPSDRLDSLFSPRCVWVNGPIIIGAGPSGLAVGASLREQGVPYIILEREDCIASLWQKRTYDRLKLHLPKQFCQXPRMPFPADYPEYPTRRQFIDYLENYAAAFDVKPEFGSTVQSARYDETSGLWRVHSSSAAS

SEQ ID NO: 213282 - protein, 56 aa, Zea mays
  Clone ID: MRT4577_126111C.1.pep
AIRRLKCPHNMLLRLRKLYLSTFFPYTRLSHFSIVPWPISLICEANPNTTSLNWCL

SEQ ID NO: 213283 - protein, 139 aa, Zea mays
  Clone ID: MRT4577_126112C.1.pep
HYRELELGTLEEFRSHFHWLQDRPNKIAYNSNSYMNIFASLFLENVELEFHEEFRYHFLWLQDRHNKITDNSDSYMDIFASVYLENVELEFPEEFRSHFLWLQDRPNKKTDHSHSYMPIFASLFLENVELEFTEGITLE

SEQ ID NO: 213284 - protein, 637 aa, Zea mays
  Clone ID: MRT4577_126113C.1.pep
KNMQLGDTQAICEYLQRMKGENPSFFYAIQVDEDDMFTNVFWADAKSIMDYNYFGDVVCVDTRYCTSDYGRPLLLFTGVNHHNQLIIFGSALIYDDSAQSFRWLFETFKSAMSGKQPKTVLTDQSAALSDAVSSWPGTIHRFSLLHLYLNATKISRDTLQGLETFASDFSRWLYEYEEDNFYSSWEILSEKYNIKDNEWFCKLYEDRERWALPYGRDTFCADIATTLRRDNTNTILTDLIKPEIDLQNFFNNYDKFLEEKRLAEQQADYLGAQITQRVAPLHLLWQAANLYTPTLFEMFRMEYEQISKCVVYSCGEIGPISEYQVTVKDRPQGQFVRFDSTECMVVCSCKKFEFMGLLCCHVLKILDLRNIKELPRHYILKRWRKDAQSESPENYGFAAIDEDPKFSLSKRYNALYRNLYKIAAKASESVEAYAFLENQYEQLVEQVEVLLQAKLHDKSSLSTILKGNQPNMLNSEVNSSEHRRATGKKIKNVEVRRQQQSLDPNKKKKGRQVLLEPEIEIPLRVEPPTVSNDIQNHLRTTNQFLAPSHMMQAPYVAQQFGLGSLQGFPGMSPFGQIQEPTPLQQPHLQPPSFHSGPQITQAPPPDIQSLQFLSSNPQLGHQTTDQGQYTIPVWDFL

SEQ ID NO: 213285 - protein, 74 aa, Zea mays
  Clone ID: MRT4577_126114C.1.pep
STREQNSPRIMALFYPRNYTLHDQNNFLGGKEAPTIGLENISHNTNWGPRNCLFEHKPVQKGPPETGAFKEASP

SEQ ID NO: 213286 - protein, 186 aa, Zea mays
  Clone ID: MRT4577_126115C.1.pep
MAPTTTTTVPPPASSRPAPLAAAGHVRSASVPCHTHPLLAHVDDQLLALRSWTSRPGPKYPLSLAHVRALLCVLDELLLRLPPAHAHAADSLLDGFLVLADAFGTFLATLVALRQHAAELRAAVRRRDDAARLASAARAQRRAGRELHLLAATVARGAARCACASPASASTPGVARAVAEAVNGTA

SEQ ID NO: 213287 - protein, 95 aa, Zea mays
  Clone ID: MRT4577_126116C.1.pep
FRLPHPKPISIPAGGQISTQKFARKKGVRSGLKEKKPNCDQNLLRLEQTLLNQPGPKNQTFQKTEPSRPPYCRLFPKPTGPIPGKPNRGAGAYKA

SEQ ID NO: 213288 - protein, 637 aa, Zea mays
  Clone ID: MRT4577_126117C.1.pep
MSGDHAKKEMETGDKPTTSQGSTSSEESRTKRKEKKKSSSNKGKEKKPSSHHKEKKEKSSSHKPHQSGDKHKRMRKVVYYETDTSSTSTSGSDAPSVTSKRQERDEDYDEDEVAQIEHFNSQATTILLASLSKEEYNKVQGLKNAKEIWDLLKTAHEGDELTKITKRETIEGELGRFRLRQGEEPQDMYNRLKTLVNQVRNLGSKKWDDHEVVKVILRSLIFLNPTQVQLIRGNPRYTQMTPEEVIGNFVSFECMIKGSKKINELDEPSTSETQPVAFKATEEKKEESTPSRQPIDASKLDNEEMALIIKSFRQILKQRKGKDYKSRSKKVCYKCGKPGHFIAKCPLSSDSDRDNDKKGKRKEKKRYHKRRGGDAHVCREWDSDESSTDSSSDEDAANIAVTKGLLFPNVGHKCLMAKDGKRKKEKSQTQETLKGFLRRAQNEFGLRIKKIRSDNGTEFKNSQIEGFLEEEGIKHEFSSPYTPQQNGVVERKNRTLLDMARTMLDEYKTSDRFWAEAVNTACYAINRLYLHRILKKTSYELLTGTKWVFRNKQDEHGVVTRNKARLVAKGYSQVEGFQVKQLQEGTFISQTKYTQDILNKFGMKDAKPIKTPMGTNGHLDLDTGDFKPTLRKLTLRP

SEQ ID NO: 213289 - protein, 146 aa, Zea mays
  Clone ID: MRT4577_126118C.1.pep
MFAALRQPLARASAAKPLARAFSAYSPVQNAVAPTKSPKLEYLLTETRGRVGLVTLHRPKALNALCNGLFVELNQVLKELDDNKEIGAIVITGSERAFAAGADIKEMNDMNFIENYAEDFLGHWTQIIKIRKPIIAAVNGFALGGG

SEQ ID NO: 213290 - protein, 85 aa, Zea mays
  Clone ID: MRT4577_126119C.1.pep
PIHPTIDRHKRKRNTATRKNKSRRTRRSTTDTNTKLQMAHGNKSQDAASHKRPHTEDMSRQTNTILYAALLRSDPQSHNSTTKNT

SEQ ID NO: 213291 - protein, 325 aa, Zea mays
  unsure (1)..(325): unsure at all Xaa locations
  Clone ID: MRT4577_12611C.1.pep
MEGSKGSGGGGAGAGSEKPSAESNPSLNLPPPTAADVEATDDGGATAAAAAAAEAARRPFTALSQEEADLALARVLQEQERAYMLLRMNGGGGEGSDYGSSDEGSYEYDEEGEEDYEEELEHHLRVHHHEHPSGDGEGEXGEGEGAEGSDYDEEFEEDEEGEPEVDPAEFEDDEAYARALQDAEEREVAARLMALAGLSDWRTVEVEHEEDHANDPQEAWQEVDPDEYSYEELVALGEVVGTENRGLSADTLGSLPSVTYKLQHVQDGNTEQCVICRVELEEGESLIALPCKHLYHPECINQWLQINKVCPMCSAEVSTSGNKEP

SEQ ID NO: 213292 - protein, 231 aa, Zea mays
  Clone ID: MRT4577_126120C.1.pep
MKKVVYYETDSSSPSTSGSDTASVTSKRQERKKYSKIPLCYPCIPKHTPLLSVPLGKPPTFDGEYYSRWSDMMRYHLTSLHKSIWDVVEFGVQVPSVVNQVRNLGSKKWDDHEMVKVILRSLVFLNPTQVQLIRGDPRYTLMSPEEVIEKFVSFELMIKGSKKIIEQDGPSTPESQPVAFKATEEKKDESTSSRLPINASKLDNEEMALIISGSRFILTTIDLYILIGILI

SEQ ID NO: 213293 - protein, 44 aa, Zea mays
  Clone ID: MRT4577_126121C.1.pep
STDIAPYAAFSVQLDLTSIFIFKTLKQTTLHPPILSTSYHISLL

SEQ ID NO: 213294 - protein, 89 aa, Zea mays
  unsure (1)..(89): unsure at all Xaa locations
  Clone ID: MRT4577_126122C.1.pep
GRALSIHIGQAGIQNGNACWELYCLXEHVILDDGQMTGDKTIAGGDDAFNTFXIDIGAGKYVPRAVFVDLEPTVIHEVRTATYRQLFHP

SEQ ID NO: 213295 - protein, 1360 aa, Zea mays
  unsure (1)..(1360): unsure at all Xaa locations
  Clone ID: MRT4577_126123C.1.pep
MSGGSTKREIETGTSHGKAPSRESGAKRREESPPRVKSHWSGDKKKKMKKVVYYETNSLSPSTSSSDAPSITSKRHEHKKFKEYNKVQRLKSSKEIWDVLKTTHEGDEVTKITKRKTIEGELSRFFLNKGEEPQTMYNRLKTMVNQVRNLGSTKWDDHEMVKVILRSLVFRNPTQVQLIRGSKQIVNLEQGGTSTPEVQPIAFKATEEKKEESTSSRLPIDASKLDNEEMVLIIKSFRQILKQRRGKDYKPHSKRVCYKCGKASHFIAKCPMSSDSDRDNDKKGRKKEKKYYKKKGGDAHVCREWDSDMSSTESSSDEDATNIAVNKGLLFPNVGHKCFMAKDGKKKKVKSRASTKYTTSSDEGSSSEDEDNLLTFFVNLNMHQKEKLNELIGAIHEKDELLDSQDEXSLLRKIRSMLRARLPWLKITRVTFYILLVILSTRLGEFMLRNXHSVSHHAFMYKNEASSSRHPTHVKMPKKKTPTASNEPNVSFKTFDASYVLTNKSGKVVAKYVGGKHKGSKTCVWVPKVYASGGSSWIIDSGCTNHMTGEKRMFSSYEKNEDPQRAITFGDGNQGVTVFRRSDDSVAFKGVLEGQLYLVDFNRAELDTCLIAKTNXLALAPPTSPCWDEESSQAFKGRAHXGLTNVYFEKDREKSQTQETLKGFLKRAQNEFRLRIKKIRSDNWMEFKNSQIEGFLEEEGIKHEFSSPYTPQQNGVVERKNRTLLNMARTMLDEYKTPDRFWAEAINTACYSINRFYLHRILKKTSYELLTGKKPNVSYFRVFGSKCFILVKRGKKSKFAPKAVESFLLGYDSNTRAYRVFNKSTGLVEVSCDIVFDETNGSQVEQVDLDELHDEEAPCVLLRNMSIGDVCPKESEDXHTQDQPSSSNQASPPTQDEDRAQGNENEDQEYEPPQEXRTKWVFHNKQDEHGVVTRNKARLVAKGYSQVEGLDFGETYAPVARLESIRILLPYATYHGFKLYQMDVKSAFLNGPIKEEVYVEQPPGFEDSEYPNHVYKLSKALYGLKQAPRAWYECLRDFLITNGFKVGKVDPTLLTKTIAKDLFVCQIYVDDIIFGSTNKSTCEEFSRIMIQKFEMSMMGELKYFLIFQVKQLQEGTFISQTKYIQDILTKFGMKDAKPIKTPMGTNGHLDLDTGGKSVDQKVYWSMIGSLLYLCASRPDIMLSVCMCARFQADPKEVHLRAVKTIMRYLVYTPKFGLWYPKGSTFDLIGYSDADWAGCKIDRKSTSGTCQLLGRSLMSWASKKQNSVAFSTTEAEYIAVGHCCAQLLWMRQTLRDYGYKLSKVPLLCDNESATRMADNPVEHSRTKHIDIRYHFLRDHQQRGDLEIAYVSTKEQLADIFT

SEQ ID NO: 213296 - protein, 1247 aa, Zea mays
  Clone ID: MRT4577_126124C.1.pep
MSGDHAKKEMETGEKPTTSHGSTSSEESRTKRKEKKKDSSKGKEKKSSSHHKEKMEKSYSHKPHRSGDKKKRMRKVVYYETDSSSASTSGSDAASVTSKRQERKKYSKPPTFDGEDYARWSDLMRFHLTSLHKSIWDVVEFGAQAKDFDVCYVTISNLRSENDILHAKVVELKSCKPPTSIVEHVSICTRCRDVDINAIHDHMSLIKQQNNHIAKLDAKIAEHNLENEKFKFARSMLYNGRRPGIKDDIGFQQGGNVKLSAPPKKLSNFVKGKAPMPQDNEGYILYPAGYPEDKIRRIHSRKSHSGPNHAFMYKGETSSSRQPTRAKLPKKKTPSASNEHSFSFKTFDASYVLTNKSGKVYASGGSSWILDSGCTNHMTGEKKMFSSYEKNQDPQRAITFGDGNQGLVKGVTVFRRSDDSIAFKGVLEGQLYLVDFDRAELDTCLIAKTNMGWLWHRRLAHVGMKNLHKLLKGEHILGLTNVHFEKDREKSQTQETLKGFLRRAQNEFDLRIKKIRSDNGTDFKNSQIEGFLEEEGIKHEFSSPYTPQQNGVVERKNRTLLDMARTMLDEYKTSDRFWAEAVNTACYAINRLYLHRILKKTSYELLTSKKPNISYFRVFGSKCFILIKRGRKSKFAPKTVEGFLLGYDSNTRTYRVFNKSTGQVEVSCDVVFDETNNSQVEQVDLDEIGNEEAPCIALRNMSIGDVCPKESEEPPNAQDQPSSSTQASPPTQNEDEAQIDGVEDQANEPPQNADNDQGGDANDQDKEDEEQRPPHPRVHQAIQRDHPVDTILSDIHKGVTTRSRVAHFCEHYSFVSSIEPRRVEEALHDSDWVVAMQEDLNNFTRNEVWHLVPRPNQNVVGTKWVFRNKQDEHGVVTRNKARLVAKGYSQVEGLDFGETYAPVARLESIRVLLAYATHHGFKLYQMDVKSAFLNGPIKEEVYVEQPPDFEDSEYPNHVYKLSKALYGLKQAPRAWYECLRDFLITNGFKVGKADPTLFTKTLENDLFVCQIYVDDIIFGSTNESTCEEFSRIMTQKFEMSMMGELKYFLGFQVKQLHEGTFISQTKYTQDILNKFGMKDAKPIKTPMGTNGHLDLDTGGCKINRKSTSGTCQFLGRSLVSWASKKQNSVALSTAEAEYIAAGHCCAQLLWMRQTLRDYGYKLTKVPLLCDNESAIKMADNPVEHSRTKHIAIRYHFLRDHQQKGDIEISYINTKDQLADIFTKPLDEQTFNKLRHELNILDSRNFFC

SEQ ID NO: 213297 - protein, 1072 aa, Zea mays
  unsure (1)..(1072): unsure at all Xaa locations
  Clone ID: MRT4577_126125C.1.pep
MSGDHAKREIVTGGDKSASSGRTHSRESDHKHKEESASSIKSQRRGDKKKKMXKVVYYETDSSSPSTSGFESSSVTSKRHERKKYXVPKVRDKDYDSDEADQIRHFNSQATTILLASLCREEYNKVQGLKTAKEIWDVLKTTHEGDEVTKITKRETIEGELSRFILNQEEEPQSMYNRLMTLVNQVRNLGSTKWDDHEMVKVILRSLVFHNPTQVQLIRGDPRYKLMSPEEVIGKFVSFELMIKGSKHIVNLEQGGTSTPEVQPVTFKAAEEEKKESTPSRIPIDVSKLDNEEMTLIIKSFRQILKQRKGKDYKLRSKRVCYKCGKPSHFIANCLMSSDSDRGDDKRGKRKEKKKYYKKKGGDAHVCREWDSDESSTDSSSDEDATNIAVNKGLLFPNVGHKCLMEKDGKRKSDEGSSSEDEDNLLALFANLNMQQKEKLNELIGAIHEKDELLDSQEEFLIKENKKHVKVKNAYAQEVEKNKNLTKELSICHDTISNLRTENANLFAKVENLKTETKDLNGCNDSISCLRNENAILHAKIEELNACKPSTSNVDHVTICTRCRDINVDAIHDRLALIKQQNDHIAQLTSKINEHKIENEKFKFARSMLYNGRHPGIKDGIGFQQGRNVKLNAPKILSNFVKGKAPMAQDNEGYILYPVGYPEHKIRRIHARKSHSVSHHAFMYKNETSSSSHSTHVKMPKKKSSTASNDHNISFKTFDASYVLINKSDKVVAKYAGGKHKGSKTCVWVPKVYASGGSSWIIDSGCTNHMTGEKKMFSSYEINEDPKRTITFGDGNQGVTFFRRSNDSVAFKGVLEGQLYLVYFNRAELDTCLIAKTNMGWLWHRRLAHVGMQNLHKLLKGEHILGLTNVQFEKDRVCSACQAGKKVGSHHPHKNITTTDRPLELLHMDLFGSIAYISIGGSKYCLVIVDDYSRFTWVFFLQQKSQTQETLKGFLRRAQNEFGLRIKKIRSDNWTEFKNSQIEGFLEEEGIKHEFSSPYTPQQNGVVERKNRTLLDMARTMLDEYKTPDRFWEEAINTACYSINRLYLHQILFVGKISNPRDLKEILETGSK

SEQ ID NO: 213298 - protein, 1216 aa, Zea mays
  unsure (1)..(1216): unsure at all Xaa locations
  Clone ID: MRT4577_126126C.1.pep
MSGDHAKREIETGDKPASLGKAPSRESGNKAKEGSPPSIKLHRSGDKKKKMKKVVYYETDSSSPSTSSSEASIASKRHERKKYSKMPLCYPRISKRTPLLSVPLGKPPYFDGEDYCMWSDKMRHHLTSLHASIWDIVEFGAQEYNKVQELKSAKEIWDVLKTAHEGDEVTKITKHETIEGELGRFVLNKGEEPQAMYNRLKTLVNQVRNLGSTKWDDHEMVKVILRSLVFRNPTQVQLIRGDPRYMLMSLEEQRRGEDYKPRSKRVCYKCGKPGHFIAKCTNSSDSDRGDDKKGNKREKKRYYKKKGGDAHVCREWDSDESSTDSSSDEDDTNIVVNKGLLFSNVGHKCFMAKDDKKKEVEKCENLTKELNICNDSIISLRNENASLNAKIDELNVCNDTISSLRTENDNLISKIKELSVCKDSISCLRNDNAILHAKIEELNVCKPSTSTVEHVSICTRCRDINVEAIDDHLAIIKQQNDHIAKLTAKINEHELENEKFKFARSMLYNGRRHGIKDGIGFQQGSNVKLNAPKRLSNFVKGKAPMVQDNEGYILYPANYPEHKIRRIHARKPHNVSHHAFMYKNEASSSRHSTRVKMPKKKTPAVSNESNISFKTFDASYVFTNKSDKVVAKYVGGKHKGSKTCVWVPKEKPQTQETLKGFLRRAQNEFGLRIKKIRSDNGTEFKNSQIEGFLEEEGIKHEFSSPYTPQQNGVVERKNRTLLDMARTMLDEYKTLDRFWAEAINTACYSINRLYLHQILKKTSYELLTGRKSKFAPKAVEGFLLGYDSNTRAYRVFNKSTRLVEVSYDIVFDETNGSQVEQSPXQAQDQPSSSNQASPPTQDEEXAQDNKDEDQEDEPPQEEDNDQGGDEENEDKEDDQEXRXRPPHPRVHQAIQXDHPVNCILGDIHKGXVEDALRDSDWVLAMQEELNNFTRNEVWYSVPRLNPNVVGTKWVFRNKQDEHGVVTRNKAQLVAKARLELIRILLAYATYHGFKLYQMDVKSAFLNGPIKEEVYIEQPPRFEYGEYPNHVYKLSKALYGLKQAPRGWYECLRDFLITNGFKVGKADPILFTKIVAKDLFKIEMSMMGELKYFLGFQIKQLQEGTFICQTKYIQDILKKFGMKDGKPIKTPMGTNGHLDLDTGGKPVDQKVYRSMIGSLLYLCASQPDIMLSVCMCARFQANPKEVHLRAVKRIMRYLVYTPKFGLWYPKGSTFDLI

SEQ ID NO: 213299 - protein, 257 aa, Zea mays
  unsure (1)..(257): unsure at all Xaa locations
  Clone ID: MRT4577_126127C.1.pep
MSPTMEEPLVDKTGGPKESLVVTEVKKQLYLAGPLIAGCLLQNVVQMISVMFVGHLGELALSSASIATSFAGVTGFSLLVYMLCPFISCIFLILLNGQLTSTXYSFSYLFMIILXAGMASSLDTLCGQAFGAKQYYLLGIYKQRAILVLTLVSVVVAVVWAYTGQILLLFGQDPEIAMGAGSYIRWMIPALFVYGPLQCHVRFLQTQNIVLPVMASSGITALSHVLVCWLLVYKNGLGNKGAALANAISYLANVSIL

SEQ ID NO: 213300 - protein, 51 aa, Zea mays
  Clone ID: MRT4577_126128C.1.pep
PGHIQVRTAGNKIIQLPWLQKQDRVMHINTSFPLILQKTIHHKIKSQKSHA

SEQ ID NO: 213301 - protein, 1211 aa, Zea mays
  unsure (1)..(1211): unsure at all Xaa locations
  Clone ID: MRT4577_126129C.1.pep
MTRSHPSIDSEMVGVGFDGSKSALCRVTLLILYMNLQRHVLVDGKMSFPSLSQMRTTSCFRLHPISDEDAKSLGLLIDVALSIYLFTSLEIPMPFHIQALQVVKVVYYETDSSSSSTSGSESTSVTSKRHERKKYSKMPLRYPRISKHTPLLSVSLGKPPMFDGEDYSIWSDKMRHHLTSLHKSIWDIVEYGAQVPKKGDKDYNSEEVEQIQHFNSQATTILLASLSREEYNKVQGLKSAKEIWDVLKTTHEGDEVTKITKRETIEGELGRFMLHQGEEPQAMYNRLKALVNQVRNLGSTKWDDHEMVKVILRSLVFLNPTQVQLIRGDPRYKLMSPEEVIGKFVSFELMIKGSKKIIEQGTTSTPEVQPVAFNATEEKKEEYTSSRLPIDASKLDNEEMALIIKSFRQILKQRRGXDYKPRSKKVCYKCXKGKRREKKMYYKKKGGDAHVCWEWDSDESSTNSSSDEDAANIAVTKGLLFPNVGHRCLMAKDGKKKVKSRSSTKYATSSDENNSSDDEDNLLTLFANLNMQQKEKLNELISAIHEKDELLDSQEDFLIKENKKHVKVKNAYALEVEKSNVCDDSIVNLINDNSSLIAKIDKLNASLSSLKIENEKLITKAKDLNVCNTSISNLRDENAILHAKIVELNTCKHSTSTIEHVTICNRCRDINVDAIHDHLALIKQQNDHIAQLSAKINERDLENENFKFARSILYSGRRPXIKDGIGFQKRDNVKLNAPPKRLSNFVKGKAPIPQDNEGYILYPADYPKDKIRRIHAKKTHSTHHAFIYKNEASSSRHSTHVKMPKRKSPIASNEPNISFKXFDASYVLTNKLGKVVVKYIRGKHKGSKTCVWVPKVYASGGSSWIIDSGCTNHMTGEKKMFSSYEKNQDPQRAIIFGDGNQGVTVFRRSDDSIAFKGVLEGQLYLVDFNRAELDTCLIAKTNMGWLWHRRLAHVGMKNLHKLLKGEHILGLTNVHFEKDRICSACQAGKQVGVHHPHKNIMTTDRPLELLHMDLFGLIAYISIGGSKYCLVIVDDYSRFTWVFFSQEKSQTQETLKGFLRRAQNEFGLRIKKIRSDNGTEFKNSQIEGFLEEEGIKHGFSSPYMPQQNGVVERKNRTLLDMARTMLDEYKTSDRFWAEAVNTACYXIDRLYLHRILKKTSYELLTGKKPNVSYFRVFGSKCFILVKRGRKSKFAPKAVVGVSRQGGPQADE

SEQ ID NO: 213302 - protein, 120 aa, Zea mays
  unsure (1)..(120): unsure at all Xaa locations
  Clone ID: MRT4577_12612C.1.pep
MAYMLCHGVAGVILIKRILXKFPSCASFGEALLVSGGLVLYFGDMLAHTLSKMEFSMSSKAFIHTPQTRSDMTAIIQSSLKVWYCWTKERKQQTQTPEEHKRIRIDSAIFYISLAVVLIF

SEQ ID NO: 213303 - protein, 741 aa, Zea mays
  Clone ID: MRT4577_126130C.1.pep
MSVSEYCDKFIQLSRYAPAEVADDERKQEHFTEGLNGPLQYALVAHTFPPFQRLLDKALAIEHKRIQLGDLKRKAISQGQGSSSVRPRYVPPQGTPTRPGGGPCLAQYAPQGSPRTPPTRQATPTGTPTSQIGNYANACLVGNSGTSAQNKQQTPGKGYSIARVNQVSADATPDSADIALGMFYINAIPATILFDSGATHSFMSARYANTNEIPLQNMRKPMIVITPKGPVEANHMTHRLTLTIMGREFWATTVILEASSIDLILGMSWLRKAKSSILCGRGTVELNSSKGERFQVKIAVTTSSRRAMFFIAEEFVGNNIRVPYMMSVEELKELKKQLTELQEAGYIRLSSSPWGAPVLFVQKKDGSQQMCVDYRSLNDVTVKNKYLLPRIEDLFDQMRGARSESDHEEHLRLVLQKLRDNQLYAKYSKCEFWIDEVSFLGHIISNGGISVDPAKVKEIMAWSIPTIVTEIRSFLGLAGYYRGFIEGFSKIAKPMTSLLEKGREFKWDEKCQDSFDQEELPDEIVEDFRRLNLGIVALTERVTIELEPTLEQEIRKGDAKIQEIKDLITEGRGPEFTEDEQGTVWFKDEICVPEIDSIRETILKEAHDFDYSIHPGSTKMYQDLKQKYWWYGLKRDVAAHVAKCDVCQRVKAEHQRPAGLLHPLKIPEWKWEEIGMDFFVGLPHTPAGYDSIWVIVDRLIKVAHFIPMRTNYTGAKLAELYMTRIVCLHGVPKKIVSDRGS

SEQ ID NO: 213304 - protein, 106 aa, Zea mays
  unsure (1)..(106): unsure at all Xaa locations
  Clone ID: MRT4577_126131C.1.pep
SVKMQAXPREWSRRRAPDHAALDRGRPPMGAAPPNEASTRQPRPETQDPSLPRRRALLPNVAQCSGWLSPLSAPSPSSPLAYPVRLPAPVPWCPRLDWTEESSIIF

SEQ ID NO: 213305 - protein, 1313 aa, Zea mays
  Clone ID: MRT4577_126132C.1.pep
METGDKPTTSYGKASSEESRNMGKGKEKKSSSHTSHRSGDKKKKMRKVPSVGDEDYDEDEVAQIQNFNSQASTILLASLSREEYNKVQGLKNAKEIWDTLKTAHEGDEVTKITKRETIEGELGRFRFAKGRSHKTLRNLGSKKWDDHEMVKVILRSLVFLNPTQVQLIRGNPRYTLMTPEEVIGIFVSFELMIKGSKKINELDGPSTSEAQPVAFKATEEKKEESTPSRTPIDASKLDNEEMALVIKSFCQILKQRRGKDYKPRSKKGDDKKGRRNEKKRYYKKKGGDTHVCREWDSDESSTDSSSDEDAANIVVTKGLLFPNVGHNDDNADEEDNLRTFFANLNMQQKEKLNELISAIHEKDDLLDTQEDFLIKENKKHVKVKNAYALEVKKCEKLSSELSTCHETIDNLRNENANLLAKVESNVCDVSIPNLKNDNVDLLAKIEELNISLASLRNENEKLLAKAKELNVCNASISDLRSKNDILHAKVVELKSCKPSTSTVEHTSICTRCRDVDIDAIHDHMVLIKQQNDHIAQLDAKIAEHELENEKFKFARSMLYSGRRPGIKDVIGFQQGGNVKLNAPPKKLSNFVKSKAPMPQDNEGYILYPTGYPESKIRRIHSRKSHSGPNHAFMYKGETSSSRQPTRAKLPKKKTPSASNEHSISFKTFDASYVLTNKSGKVVAMYVGGKHKGSKTCVWVPKVLVSNAKGPKTIWVYASGGSSWIIDSGCTNHMTGEKKMFSSYEKNQDPQRAITFGDGNQGVTVFRRSNDSIAFKGVLEGQLYLEKSHTQETLKGFLRRAQNEFGLRIKKIRSDNGTEFKNSQIEGFLEEEGIKHEFSSPYTPQQNGVVERKNRTLLDMARTMLDEYKTSDRFWAEAVNTACYAINRLYLHQILKKTSYKLLTGKKPNISYFRVFSSKCFILVKRGRKSKFAPKTVEGFLLGCDSNTRAYRVFNKSSGQVEVSCDVVFDETNGSQVEQVDLDEIGNEEAPCIALRNMSIEDVCPKESEEPPSAQDQPSSSTQASPPTQNEDEAQVDEGEDQQDETPQDDGNNQGGDAKDQEKEDEEPRPPHPRVHQAIQRDHPVDTILGDIHKGVTTRSRVAHFCEHYSFVSSIEPHRVEEALQDSDWVVAMQEELNNFTRNEPESAWGRVMMAPTVDAVGPCHGLGDVEAPPRSRSSLSSEAEVESEPLGRARRGPSAEARAESEPWGRAKRSSSSSGAEPESEPWGRAKRSSSSSGAEPESEPWGRAERSSSSSGAEPESEPWGRAERSSSSSGAEPESEPWGWAERSSSSSGVEPESEPWVGRSGVSHGA

SEQ ID NO: 213306 - protein, 433 aa, Zea mays
  Clone ID: MRT4577_126133C.1.pep
MDALSRPAVVIDNGTGYTKMGFAGNVEPCFITPTVVAVNDSFSGSAQPAARGTPARGNWLAQHSAGVMADLDFYIGDEALARSRASSSHSLSYPIRNGQVENWDTMERFWQQCIFNYLRCDPEDHYFLLTESPLTAPETREYTGEIMFETFNVPGLYIAVQPVLALAAGYTTTKCEMTGVVVDVGDGATHIVPVADGYVIGSSIRSIPITGKDVTQFIHQLLKERGENIPAEESFDVARRIKEMYCYTSSDIVKEFNKHDKEPSKYIKHWTGTKPKTGAKYTCDIGYERFLGPEIFFNPEIYNNDFTTPLQVVIDKCIQSSPIDTRRALYKNIVLSGGSTMFKDFHRRLQRDLKKIVDARVRASNSRLISGDAKAQPIEVNVVSHPIQRYAVWFGGSVLASTAEFYEACHTKAEYEEYGASICRTNPVFKGMY

SEQ ID NO: 213307 - protein, 71 aa, Zea mays
  unsure (1)..(71): unsure at all Xaa locations
  Clone ID: MRT4577_126134C.1.pep
ITKYKYKNQXLWGAGGTXKXNLKSKHNFXFYLFFHFPKTIPXITXHPIXKILXPYHHXFLPSLPPSLLSXP

SEQ ID NO: 213308 - protein, 155 aa, Zea mays
  unsure (1)..(155): unsure at all Xaa locations
  Clone ID: MRT4577_126135C.1.pep
HYILIQPSYISVKSAQIFFNPEMYNNDFTTPLXSVIDKCIQSSPIDTRRALYKNIVLSGGSTMFKDFHRRLQRDLKKIVDARVRASNSRLLSGDAKAQPIEVNVVSHPIQRYAVWFGGSVLASTAEFYEACRTKAEYEEYGASICRSNPVFKGMY

SEQ ID NO: 213309 - protein, 38 aa, Zea mays
  Clone ID: MRT4577_126136C.1.pep
PTRPSTRPSTRPRTHGWTHFFSLDTINKFSDYCTVHKL

SEQ ID NO: 213310 - protein, 88 aa, Zea mays
  Clone ID: MRT4577_126137C.1.pep
GAIWCQRRCALGTRIVVAVEPAGRADGRQHITIFITPPPPGGGLGLFVREIREKDIGMRNVLLCREEKDKYGSPLIKVQDERKEKCAR

SEQ ID NO: 213311 - protein, 111 aa, Zea mays
  Clone ID: MRT4577_126138C.1.pep
NPPKSFFRQMAAIAAQVTDWSKVVVAYEPVWAIGTGKTATPDQAQEVHQQLREWFSKNVSPQVAESVRIIYGGSVTGANSQELARKPDIDGFLVGGASLKPEFVQIAKARD

SEQ ID NO: 213312 - protein, 46 aa, Zea mays
  Clone ID: MRT4577_126139C.1.pep
RITCTRRVPDYIEVSIYLVNPLVLEIWVYTVISSVVRTSDPVQSPW

SEQ ID NO: 213313 - protein, 72 aa, Zea mays
  Clone ID: MRT4577_12613C.1.pep
ACEQLVIKRQSVFLRNFHVRAYFLVGFRKLARVFCCVVEGARVSWSFGVGGAYREVIGASIGFLTLKLLPPH

SEQ ID NO: 213314 - protein, 63 aa, Zea mays
  Clone ID: MRT4577_126140C.1.pep
VNMLRSWFTCLFPQTWFRSWLKALTELCWVEIRLRQILCCFQVLLLLPTHTLFGYDFLQMHTL

SEQ ID NO: 213315 - protein, 83 aa, Zea mays
  Clone ID: MRT4577_126141C.1.pep
GSFFFFFLSNPRMLAPSLISIYITNHPAPPPALLINDISISKDIELVLLSLPLITKLDHAPPDDPSSRSYRSQLISPRTRSAR

SEQ ID NO: 213316 - protein, 80 aa, Zea mays
  Clone ID: MRT4577_126142C.1.pep
LPPPLQSDLQKLQPFSVCIISVIFSLFHLLLRLLILIILFFIFIIFFSFFFLFFFPPFFNDACHNFTPPDEWAYAWAYAW

SEQ ID NO: 213317 - protein, 121 aa, Zea mays
  unsure (1)..(121): unsure at all Xaa locations
  Clone ID: MRT4577_126143C.1.pep
YHRXYAHSTPPTPPPPPGAGYDYGQSKELREAAELRRRHFHALGADLSLDKPLADAGAAEKPLRRFFDEWPRERGDTRPSWAGAEDATQLSISIPAASPSSDHAASAAARCHNDGSDRCIS

SEQ ID NO: 213318 - protein, 63 aa, Zea mays
  Clone ID: MRT4577_126144C.1.pep
VGEDFVFWTGKNITASLKDGPQEGITWNPPTITRAKKIFARGGPTLLISMLRAHTRPTGYNSG

SEQ ID NO: 213319 - protein, 98 aa, Zea mays
  unsure (1)..(98): unsure at all Xaa locations
  Clone ID: MRT4577_126145C.1.pep
AGVFEIPLAXRXXPALXPRXQWWCXXTXREXXHRVISCDQRSRIGSIXGXYQHIGAHPXQSSPXYLPREXXGMSPVLKLSRVXFSYASHDFKAAXSGW

SEQ ID NO: 213320 - protein, 84 aa, Zea mays
  Clone ID: MRT4577_126146C.1.pep
GCPCFPVWLGWLPPAFCFYVRTLTINVCSCSPHSKSGGFFFSPPQAEKSWFFLLALWFLASACLHSSKCRLLFPNSKKQKIIPV

SEQ ID NO: 213321 - protein, 106 aa, Zea mays
  Clone ID: MRT4577_126147C.1.pep
PRGRPGRRICLCLCPPRLPPGLQAPATAMSALGTLSGGAAGVSGLLRLRHRFSPGVVAPAPAAGSELPRATPSTQPSSSTSSDRTSCPRRSKRTRHRHRPPQRRPS

SEQ ID NO: 213322 - protein, 59 aa, Zea mays
  Clone ID: MRT4577_126148C.1.pep
YYMKHNNLLPKLSLHHQLLHISLHFITYIQFHNKHTFALHIIHKIYISYYSSNILSSYT

SEQ ID NO: 213323 - protein, 69 aa, Zea mays
  Clone ID: MRT4577_126149C.1.pep
MTHRLLLLLLLLPLLAPPAASARQGAGQDLGQCPGLEYGLPPFAAALRASCPVSTEGYSPPEEVRVSEP

SEQ ID NO: 213324 - protein, 37 aa, Zea mays
  Clone ID: MRT4577_12614C.1.pep
ELHHLVRPAGGCWPPRRSRRRSSWLAAGSSRSQNSLV

SEQ ID NO: 213325 - protein, 411 aa, Zea mays
  Clone ID: MRT4577_126150C.1.pep
AHPLLIRVFQGWQPLHDPKFGLEVMKKWKDLLQGDQPYDFSDSAASMTPYVQLVSEVILPAVRISGTNSWEAREPEPMLHFLELWDNKKLLPPVLLQSLLEHVIMPKLSAAVDSWDPRRESIPIHVWVHPWLPMLRERIETLCHSIRYKLSTVLHVWQAHDASAYAVLSPWKDVFDSASWEDLIVRYIIPKLRLALQDFQINPANQKLDQFNWVMLWTSAIPVQLMVHMLEVDFFSKWQQVLYHWLCSPNPDFNEIMNWYKGWKGLFPPELLANERIRMLLTAGLDMMNQAAEGLEVVQPGARENVGYLRATEKRQFDAAQQAYHAVPGAAMADLSFKESIQAYAMEQGLLFMPRVGKFYNGMPVYEFGTVSICIDSVKRLLYAQLQEGIDRWSPVTLTQLMDMNRIGRPH

SEQ ID NO: 213326 - protein, 102 aa, Zea mays
  Clone ID: MRT4577_126151C.1.pep
RQQTRQMLIPADSSIVQSTKQQEAAELEEKQSIKRRILEYNEREEELNGASQMGNWGQGATSTSSIRSGGRGSWDGSARGGGRQRHHITGSGGFYHSYGRRR

SEQ ID NO: 213327 - protein, 88 aa, Zea mays
  Clone ID: MRT4577_126152C.1.pep
VGYGVNCLKFQCSKKHTKQKNKRYSLESLRCQITNLNHINRNALTARLTLRKPDSPINLTTRPTRRERQRAPGAPFFLLFKPATAGRA

SEQ ID NO: 213328 - protein, 222 aa, Zea mays
  Clone ID: MRT4577_126153C.1.pep
MALELSLASASPPAGGGLAQPPPLAPPGKEQQVAGVGILLQISMLVLSFVLGHVLRRHRFYYLPEASASLLIGLVVGGLANISNTETNTRTWFNFHEEFFFLFLLPPIIFQSGFSLSPKPFFANFGAIVTFAILGTFIASVVTGVLVYLGGLTFLMYKLPLVECLMFGALISATDPVTVLSIFQELGSDVNLYALVFWESVLNDDIAISLYRAMSGYMHYEL

SEQ ID NO: 213329 - protein, 110 aa, Zea mays
  unsure (1)..(110): unsure at all Xaa locations
  Clone ID: MRT4577_126154C.1.pep
DHDRRPQHRELRQEGSFNEDEXAELQAIPWPQSYKPPQLPMYNGHSDPKQFLMSYEATISSYGGNAAIMAKSFVMVVRNVAQRWYSSLRPGTITSWQKLKDMLVTSFQGF

SEQ ID NO: 213330 - protein, 536 aa, Zea mays
  Clone ID: MRT4577_126155C.1.pep
MALELSLASASPPAGGGLAQPPPLAPPGKEQQVAGVGILLQISMLVLSFVLGHVLRRHRFYYLPEASASLLIGLVVGGLANISNTETNTRTWFNFHEEFFFLFLLPPIIFQSGFSLSPKPFFANFGAIVTFAILGTFIASVVTGVLVYLGGLTFLMYKLPLVECLMFGALISATDPVTVLSIFQELGSDVNLYALVFGESVLNDAMAISLYRTMSSVRSHAAGGENFFMMILQFLETFVGSMSSGVGVGFISALLFKYAGLDVDNLQNLECCLFVLFPYFSYMLAEGLGLSGIVSILFTGMVMKHYTYSNLSDNSQRFVSAFFHLLSSLAETFVFIYMGFDIAMEEHSWSHVGFIFFSIIFIVVARAANVFSCAYLVNMSRPEHRRIPVKHQKALWFSGLRGAMAFALALQSVHELPEGHGKTIFTTTTAIVVLTVLLIGGSTGTMLESLDVVGDENTSRENYEDNNGYMPPSYEEGTSSGGGLRMKLKQFHKSTTSFTALDKNYLTPFFTSQTDDDNDDDFSQQPQNRRLAFYDQ

SEQ ID NO: 213331 - protein, 248 aa, Zea mays
  unsure (1)..(248): unsure at all Xaa locations
  Clone ID: MRT4577_126156C.1.pep
MARHSLLAVLLVGLVAASGFSQAAAAGRGLAEKLPEPEPKPTPYPEPKPQPKPEPMPKPEPMPKPEPKPLPKPEPMPKPEPKPMPKPEPMPKPEPKPEPKPEPMPKPEPKPEPKPYPMPKPEPKPEPKPEPMPKPEPKPEPKPEPMPKPEPKPEPKPEPMKPEPKPMPKPEPKPEPKPEPMPKPEPKPEPKPEPMPKPEPKPEPKPEPMKPEPKPMPKPEPKPEPKXPEPMPKPRAKPEXPSPEPMPK

SEQ ID NO: 213332 - protein, 57 aa, Zea mays
  Clone ID: MRT4577_126157C.1.pep
RNPGSIPRVRAGKRKKATTSGMSQAPALRPLGLYLGVKGAVSTPTPLHQEHYLMVPT

SEQ ID NO: 213333 - protein, 310 aa, Zea mays
  unsure (1)..(310): unsure at all Xaa locations
  Clone ID: MRT4577_126158C.1.pep
SGDMAYDCWSCDLLCAASSPDLYRINLEQGRFLASLSSESPAINAVTRSKIHGLVACGGEDGAVECFDMRKKTSVGRINIPAVSSEDYSQEVTSLQFDEDQGYFMAVGTSTGKISIYDLRMSSPLRVKDHMYGSPILNIKWHQTLNSTEPKLITADKHIVRIWDPNTGNNMTSIEPDGGAINDVCVFRNSGLVLLALDNSQIPAHFIPALGPAPKWCSHLDNLTEEMEEKPDTTLFDEYKFLTKEEMERLNLTQYIGSSAVRAYLHGFIVRYELYKKQRAAVAPVEYEIIKDEIKKNKLEXQRKSRITQV

SEQ ID NO: 213334 - protein, 130 aa, Zea mays
  unsure (1)..(130): unsure at all Xaa locations
  Clone ID: MRT4577_126159C.1.pep
FLFFFTDAPFYLKANMXSMTQIIVETLNTFRSATVDIQXVLYVYASGHTTGIVLESGDGVSHTGPIYKGYALHHAILRVDPACRDLTNYLTKILTDRAYYFTTTRERKIGSNMKEKIAYMALDYDQLMDT

SEQ ID NO: 213335 - protein, 179 aa, Zea mays
  unsure (1)..(179): unsure at all Xaa locations
  Clone ID: MRT4577_12615C.1.pep
MAYMLCHGVAAVILIKHILEKFPSCASFGEALLVSGGLVLYFGDMLAHTLSKMEFSMSSKAFIHTPQTRSDMTAIIQGILLVLFLLPLLYKSSLKVWYCWTKERKQQTXHLRNISEXIDSAIFYISLAVVLIFLLPSWTHLVQGLKGHPFVWIVNYMFTDSHERLVLCAYWICVIYVSV

SEQ ID NO: 213336 - protein, 108 aa, Zea mays
  Clone ID: MRT4577_126160C.1.pep
LIAIQSPDLGLSHLYMPASIYCPLPNSQFRKVPTISSCKQYMWSLYNRSLYVQHGFLLCDTHESFASGVVAHGVCFSSLSRCIGALAFHLGSFTFRVSLIGVADLSSV

SEQ ID NO: 213337 - protein, 48 aa, Zea mays
  Clone ID: MRT4577_126161C.1.pep
FYFIFSFDGHLWPLNWGVKMGATLPAFVCRWRCVSECKFRCSNLFKKL

SEQ ID NO: 213338 - protein, 89 aa, Zea mays
  unsure (1)..(89): unsure at all Xaa locations
  Clone ID: MRT4577_126162C.1.pep
AAVLPDGRQHLHALATKQSTFFFFIQAAGRPPPPXPQFGQXFKYLHSPLFLFSKNPXPFFXXXFSKXKXXXGGGRLQLLSISWEXYRSX

SEQ ID NO: 213339 - protein, 112 aa, Zea mays
  Clone ID: MRT4577_126163C.1.pep
VHRRSKTPARLRIVRPQIVRARRGILVRRPKRLGGAASGAWCFPRVRARESTRRPRLRLVGGKCRFFLYSDWWRERFWLGVSWVLLGLFTVTAASSPLAGRTGHLRVAVAPP

SEQ ID NO: 213340 - protein, 123 aa, Zea mays
  Clone ID: MRT4577_126164C.1.pep
RTANKAKAALIVVLTRGGTTAKLVAKYRPRVPILSVVVPVLTTDSFDWTISSEGPARHSLIYRGLIPLLAEGSAKATDSESTEVILEAALKSAVQKQLCKPGDAIVALHRIGVASVIKICIVK

SEQ ID NO: 213341 - protein, 84 aa, Zea mays
  Clone ID: MRT4577_126165C.1.pep
PDTTSPNQLHQFITTLTTARNQNLRMIRQQHGIHDTIHISKTSHTNQAHLRRIRMMPSLTLDRHSHLTNNRTQRLTRIILRPTQ

SEQ ID NO: 213342 - protein, 118 aa, Zea mays
  unsure (1)..(118): unsure at all Xaa locations
  Clone ID: MRT4577_126166C.1.pep
AKAALIVVLTRGGTTXKLVAKYRPRVPILSVVVPVLTTDSFDWTISSEGPARHSLIYRGLIPLLAEGSAKATDSESTEVILEAALKSAVQKQLCKPGDAIVALHRIGVASVIKICIVK

SEQ ID NO: 213343 - protein, 383 aa, Zea mays
  Clone ID: MRT4577_126167C.1.pep
LLSPRGGVKPGNVILCADGTISLAVLSCDPDAGTVRCRCENTAMLGERKNCNLPGIVVDLPTLTEKDKEDILGWGVPNDIDMIALSFVRKGSDLVTVRQVLGQHAKRIKLMSKVENQEGVVNFDEILRETDAFMVARGDLGMEIPVEKIFLAQKMMIYKCNIAGKPVVTATQMLESMIKSPRPTRAEATDVANAVLDGTDCVMLSGESAAGAYPEVAVKIMARICIEAESSLDHEAVFKAMIRSAPLPMSPLESLASSAVRTANKAKAALIVVLTRGGTTAKLVAKYRPRVPILSVVVPVLTTDSFDWTISSEGPARHSLIYRGLIPLLAEGSAKATDSESTEVILEAALKSAVQKQLCKPGDAIVALHRIGVASVIKICIVK

SEQ ID NO: 213344 - protein, 378 aa, Zea mays
  unsure (1)..(378): unsure at all Xaa locations
  Clone ID: MRT4577_126168C.1.pep
MANIDMAKILADLDRGASGGDARVPKTKLVCTLGPASRTVPMLEKLLRAGMNVARFNFSHGTHEYHQETLDNLRQAMHNTGILCAVMLDTKGPEIRTGFLKDGKPIKLTKGQEITVTTDYDIKGDENTIAMSYKKLPVDVKPGNVILCADGTISLAVLSCDPDAGTVRCRCENTAMLGERKNCNLPGIVVDLPTLTEKDKEDILGXWGVPNDIDMIALSFVRKGSDLVTVRQVLGQHAKRIKLMSKXLAKCNSVNLTLHFHLVENQEGVVNFDEILRETDAFMVARGDLGMEIPVEKIFLAQKMMIYKCNIAGKPVVTATQMLESMIKSPRPTRAEATDVANAVLDGTDCVMLSGESAAGAYPEVAVKIMARICIEAE

SEQ ID NO: 213345 - protein, 113 aa, Zea mays
  Clone ID: MRT4577_126169C.1.pep
KQAWIQRHNNLTFSCSTPTQDWRSIQPLGPRTEHPLIAGALPMTFLQRPALTHTDSTYIGPRLGDDYMLTRAKNHVSTDALAIPGIWTMRLHAFQIGLYGAASDFLQGKVLAP

SEQ ID NO: 213346 - protein, 161 aa, Zea mays
  unsure (1)..(161): unsure at all Xaa locations
  Clone ID: MRT4577_12616C.1.pep
MDDGGIQEEPPSTRFLTPTRSGGTRWVDGSEVDSSESTPSWSLEDERSAGAVSSNGGAVAASRVSSGAFRRRFGKRPRRVDSLDVESMNVRGAHXHSSKEISMLSTLAMAFQTLGVVYGDMGTCPLYVFSDVFSKVPIKSEVEILGSIFLVMYTIAFNPFG

SEQ ID NO: 213347 - protein, 514 aa, Zea mays
  unsure (1)..(514): unsure at all Xaa locations
  Clone ID: MRT4577_126170C.1.pep
MANIDMAKILADLDRGAGDARLPKTKLVCTLGPASRSVPMLEKLLRAGMNVARFNFSHGTHQYHQETLDSLRQAMHNTGILCAVMLDTKGPEIRTGFLKDGKPIKLTKGQEITVTTDYDIKGDENMIAMSYKKLPVDVKPGNVILCADGTISLAVLSCDPDAGTVRCRCENTAMLGERKNCNLPGIVVDLPTLTEKDKEDILGWGVPNDIDMIALSFVRKGSDLVTVRQVLGQHAKRIKLMSKVENQXEGVVNFDEILRETDAFMVARGDLGMEIPVEKIFLAQKMMIYKCNLAGKPVVTATQMLESMIKSPRPTRAEATDVANAVLDGTDCVMLTTRPAAGAYPEVAVKIMARICIEAESSLDHEAVFKAMIRSAPLPMSPLESLASSAVRTANKAKAALIVVLTRGGTTAKLVAKYRPRVPILSVVVPVLTTDSFDWTISSEGPARHSLIYRGLIPLLAEGSAKATDSESTEVILEAALKSAVQKQLCKPGDAIVALHRIGVASVIKICIVK

SEQ ID NO: 213348 - protein, 127 aa, Zea mays
  unsure (1)..(127): unsure at all Xaa locations
  Clone ID: MRT4577_126171C.1.pep
PPFFFFFGKPQQNPSYKNPPIFIYPPPLKLFXTSKSPKPSPKLSXPPNPNPPKKISPTGQKIPPPNPRLKFPGPQKCNFQHPPKYPPPLFPPENSHPPPXKPPFPIMKPIKPLPKKLQNLFPFKNFF

SEQ ID NO: 213349 - protein, 87 aa, Zea mays
  Clone ID: MRT4577_126172C.1.pep
SYSMAREQTPWRHCFSPYASWCPGGRCYLLYSPMVCGPPSSPPWDEREPSLATRSRPATVRRYFNPEIKETRGDNSSSTLKEGPTGS

SEQ ID NO: 213350 - protein, 142 aa, Zea mays
  unsure (1)..(142): unsure at all Xaa locations
  Clone ID: MRT4577_126173C.1.pep
GPTHASTNLPADLTKLPRIWPKQDLTIPYNRSEPAHVCVDRQRYRYMADNQEMIHPPAAAATTGSTTTHGDWWTTAVSWSPDQQLPAGFGGWASSAAATAGGNRSRSGNNAAASSEXPGSKSNHSLTTDQGVVSVPPHPPPA

SEQ ID NO: 213351 - protein, 113 aa, Zea mays
  Clone ID: MRT4577_126174C.1.pep
GFFQKPPDQLWFFCSFSQKMGQQLLGDPQLVEALLASRPLGFFKLLGDDIPAFGTGLKCPKFNCWKGRAGYPKTHPPQFLPGVFFPSNHPPVFGPGPCYDYIPFFCGPPVVAP

SEQ ID NO: 213352 - protein, 123 aa, Zea mays
  Clone ID: MRT4577_126175C.1.pep
PTGFIDAANPDLVCRLNHSLYDLKQAPRAWYSRFATYLASIGFVEAKSDTSLFIYRRGVDIVYLLYVADIVLTASTTDLLQRTIIALQREFAMKDMWPLHHFLIIIAERQSQGLFPHQRQYTI

SEQ ID NO: 213353 - protein, 76 aa, Zea mays
  Clone ID: MRT4577_126176C.1.pep
NISGGGRVFFLFLKHNPQKTPLIRLTHNHSIKRAHSFPPGDTPPGFFLITGGPSQILKTPQTINPGPDRTFFPRSS

SEQ ID NO: 213354 - protein, 66 aa, Zea mays
  unsure (1)..(66): unsure at all Xaa locations
  Clone ID: MRT4577_126177C.1.pep
FLIFFFSFVPYVGXFSRFSPKNQGAKALVLALGGNKIGFFNLYKGPINGGFCFPGDKIKTVRGLLG

SEQ ID NO: 213355 - protein, 94 aa, Zea mays
  Clone ID: MRT4577_126178C.1.pep
SLCCPPPRVFQETAPAPVLIKPFKWYTPRFCSGFKVQKKGPKIGFCFPSRPPGKKPAPPCGGSVVKKTPGGFFFDRPCPQGGEIFFWAKPFGLL

SEQ ID NO: 213356 - protein, 117 aa, Zea mays
  Clone ID: MRT4577_126179C.1.pep
MDVALLQAPKTIASLFLDSADPYHDFRASMQEMVAAHGMGDWDWLERMLAWYLGANGRDTHPAIVTAFVDLVVTMAAASASACACSSSSRVTSFTFASSSEPAESSSAGGHFSFGLR

SEQ ID NO: 213357 - protein, 81 aa, Zea mays
  Clone ID: MRT4577_12617C.1.pep
MVTSTTAAAVLSPPSVAGLRLAPSPRARVAFRAAPARRSVAARAELNPSLVINLSTGLSVFLGRFVFFNFQRENLAKPGPQ

SEQ ID NO: 213358 - protein, 153 aa, Zea mays
  Clone ID: MRT4577_126180C.1.pep
ALVSSLRARRAPGCRRGARSLVLISNYILMSPFICYTRASLALTSYFSFLPHLPVDRCPLQLADAARLGDARPPLRTVGRVALSPFLRPSQLRSMLSSSPARGFLPASRVSSASNSPTRNSLSSSLRAMITSRRRLLGFSSLHASCLSAELHP

SEQ ID NO: 213359 - protein, 45 aa, Zea mays
  unsure (1)..(45): unsure at all Xaa locations
  Clone ID: MRT4577_126181C.1.pep
FQVMDNYGKGRPSVMKTTGLLLDKDGWRGFYRGXRPSFLTCLFLV

SEQ ID NO: 213360 - protein, 53 aa, Zea mays
  Clone ID: MRT4577_126182C.1.pep
TYLVSYPDALLACICEGYVNLGQRYLFSMNKDSGITPRMEHYECMIELFSKHG

SEQ ID NO: 213361 - protein, 94 aa, Zea mays
  Clone ID: MRT4577_126183C.1.pep
LYWERPLEYNRKGEPSYALKQHSGAVSYYEGLGLATFWRTRVAHPINPLHIELGQSNAILGRRMLHTEYHLCIVDVACGDTLVCMLTAWGFIDW

SEQ ID NO: 213362 - protein, 68 aa, Zea mays
  Clone ID: MRT4577_126184C.1.pep
KAGGGNYRDCNLGRYKANQIFPCSQDFQACLVCSGLSTLNLYIECPVERNESLIRYFPPNKKKKNTKQ

SEQ ID NO: 213363 - protein, 73 aa, Zea mays
  Clone ID: MRT4577_126185C.1.pep
RRTGAFLAPNKKNKHPYQGDAQCPLKKRVCINPPIHQEKTQKQIRSYDRPKQKNPMKRLNRTRFPRIKNARPG

SEQ ID NO: 213364 - protein, 113 aa, Zea mays
  unsure (1)..(113): unsure at all Xaa locations
  Clone ID: MRT4577_126186C.1.pep
LRPGQVRRQVVSGQHXXIQTREAASDVAPGDSGARLRHEGGRQARRPGRSLSCCPDPSPREPTLPRRHTPPHRWRNPTLGRGDALHQVQQPLGPHQTTRPTLLEDRPLPKQHK

SEQ ID NO: 213365 - protein, 69 aa, Zea mays
  Clone ID: MRT4577_126187C.1.pep
DVIRLVTVRTMRSNISCGLHDGLVSLASALHKSVSSSSLVHTMLSSSSPGNSLPNSCCWCYTRYVGHSD

SEQ ID NO: 213366 - protein, 118 aa, Zea mays
  unsure (1)..(118): unsure at all Xaa locations
  Clone ID: MRT4577_126188C.1.pep
SPRTPPLKIKKKRGETALVCRTPPPWAEGAPPGRTPAPPGGGETPPFPSTPQTERAAPPPQXEKPRVPPVHKGVRAGPQGGVAKPPGPEKPGGLGSPKVGRVPAKPPQGPGPGGPVPP

SEQ ID NO: 213367 - protein, 222 aa, Zea mays
  Clone ID: MRT4577_126189C.1.pep
MPPPMALLPLSSASASAALPPFRSCPPAAMLLRLPSPAPSHFARPRAVSTGYAASFYGGSAMSAAGGADEEEEVGYESGFGPGLGLGGGGLGMSAAEAALALEEREMPPCPPGLRQYETMVVLRPDMSEEERLAFIQRYEELLVAGGAMYVEVFNRGVIPLAYSIRKRNSRTGLPSTYYDGIYLLITYFTKPESMDALQLKLNADDDVIRSTSFKVRQRKAV

SEQ ID NO: 213368 - protein, 90 aa, Zea mays
  unsure (1)..(90): unsure at all Xaa locations
  Clone ID: MRT4577_12618C.1.pep
XXSLTKLPHPRARTVARLSALVRSPPTFVPSLPPSRSLRLHPAPPAPDLLPGSWRRPPPTSPPPIRWSPCPHLLPHSRRRPTPNLPGSRP

SEQ ID NO: 213369 - protein, 92 aa, Zea mays
  unsure (1)..(92): unsure at all Xaa locations
  Clone ID: MRT4577_126190C.1.pep
KSPGFPGPVWAPXPQGFPVLRGHVAPSPVPGPGINPPRSLGPPVIXKKGNPWGAPWFFWGGPLGGGAIGAFYPQEIPGGGAIKALGSLRKKG

SEQ ID NO: 213370 - protein, 70 aa, Zea mays
  Clone ID: MRT4577_126191C.1.pep
IQDSCTSNTRYQSQWDIRWHILDTARIPLKPRSLQYSHTFKVGTCSSNVRPHWLVLFGILQQSGEMPCAF

SEQ ID NO: 213371 - protein, 98 aa, Zea mays
  Clone ID: MRT4577_126192C.1.pep
FSEKCAPQIFHRRRADCGYTHTHALAVVLSQAFPNPVCVTNRAPTCPFTHIPPTNCLQTRGATPSGGLLILRSQKSWQKKKKKKLSGAPRRDCRTITW

SEQ ID NO: 213372 - protein, 68 aa, Zea mays
  Clone ID: MRT4577_126193C.1.pep
KTHTHTHTKKRSAPYHRQRSHAHTQPVDPATFLYGGGFIKLSYKLVFINNVYTNITLDFSFHCVYREI

SEQ ID NO: 213373 - protein, 49 aa, Zea mays
  Clone ID: MRT4577_126194C.1.pep
KETEGVYFMLPYNRNDELTMPEFLFDRILAVEKKKKKNRILAVEKKKKK

SEQ ID NO: 213374 - protein, 110 aa, Zea mays
  Clone ID: MRT4577_126195C.1.pep
LRLGMGDSLVIRLACVDPIALSLLRVRWLPTLMGATLCMLAPAPHALGLAVTRLPAILAHSGSLPVFPFAHPLLSSTFCRAASSCFVLPYSRGPSCRLPAFYSSLVVSSV

SEQ ID NO: 213375 - protein, 52 aa, Zea mays
  Clone ID: MRT4577_126196C.1.pep
FPGKFFDHWVLIHDNPLGIVSKKKKKKKKKKKKKKKKKKKKKKKAGRSRSRT

SEQ ID NO: 213376 - protein, 90 aa, Zea mays
  Clone ID: MRT4577_126198C.1.pep
KWPQGFFQVHEQTKLPVPVFLTVYCMSPGFLEWLSNAMLGWHTVCPSFIPLINKGNKKVFFLVFSPHKLGGRKLKADLVFKKGHPVSWGF

SEQ ID NO: 213377 - protein, 48 aa, Zea mays
  Clone ID: MRT4577_126199C.1.pep
IIFVLLVLATLLLLILFIFFLLYNKILSYYFIIFYYLFIYYFYFYFYF

SEQ ID NO: 213378 - protein, 56 aa, Zea mays
  Clone ID: MRT4577_12619C.1.pep
TTQPAKSPFPTRLSKLAKLNHLASHTSELDGNSGTCIYRTPYQLQQIMGLFDPTIF

SEQ ID NO: 213379 - protein, 62 aa, Zea mays
  Clone ID: MRT4577_1261C.1.pep
LQRTLGTHLIPLYLSHCCMDYVTNVANRDKLYAIGSLVVMVSGTLSMKGSNRREAHRDYADT

SEQ ID NO: 213380 - protein, 192 aa, Zea mays
  Clone ID: MRT4577_126200C.1.pep
NSARGASAVPRALRMSHAQFIEHLRCSASVDRTPRTGEALHGWALMFGACSHAPVCNSLITFYCSLPRALLGAAYVVFADIPAALRDVASWNCLLNPLSRHHPVSALSHFRSMMYSPEAVLPWPHYFAAALTAVARVPSAFAGAVTHALACNLSSFCGSNNVFVSTALLNMYCKLAAVSDAKRVFVGMLHRN

SEQ ID NO: 213381 - protein, 114 aa, Zea mays
  Clone ID: MRT4577_126201C.1.pep
MKAGRKNLRRACDEGAAVTLAEGESIMQVLTLRGSNVIEVIDGEGIKSLALFPAKFQKSFWIKNGSFVVVDASGRDQALESGSKIACVVSQVLYHEQVRALEKSGNCYFQLNSE

SEQ ID NO: 213382 - protein, 170 aa, Zea mays
  Clone ID: MRT4577_126202C.1.pep
MKAGRKNLRRACDEGAAVTLAEGESIMQVLTLRGSNVIEVMDGVGVRSLALFPAKFQKSFWIKNGSFVVVDASGRDQALESGSKIACVVSRVLFHEQVRALQKSGNWPAIFNSAPTPNEASEAGAEAQAAQVDEEPDSDEEDDDLPPLEANTNRNRPYELYSDSDSGSDA

SEQ ID NO: 213383 - protein, 153 aa, Zea mays
  unsure (1)..(153): unsure at all Xaa locations
  Clone ID: MRT4577_126203C.1.pep
MKAGRKNLRRACDEGAAVTLAEGESIMQVLTLRGSNVIEVIDGEGIKSLALFPAKFQKSFWIKNXGRDQALESGSKIACVVSQVLYHEQVRALEKSGNWPAIFNSTPNEASEAGTQAQIAAKIDELPDSDEDDNLPPXEANTNRNRPYELYYD

SEQ ID NO: 213384 - protein, 90 aa, Zea mays
  Clone ID: MRT4577_126204C.1.pep
AKKNAASRFKKNPVYLRVLAQILSFLKRPLNSIHSPLFNNAFTEKTLSSPNLIPFPHITFSPSVLIIKTPPNIALPNNCPPLIPNGTPPP

SEQ ID NO: 213385 - protein, 87 aa, Zea mays
  unsure (1)..(87): unsure at all Xaa locations
  Clone ID: MRT4577_126205C.1.pep
RNETAAXEXEHRXNDGGHARATDDHXLHNAXSTNGEXPEGEGSXXRETQRXRGXGXDTPXTEEAKRNAXEGXNGKEXDGRNNTDNEA

SEQ ID NO: 213386 - protein, 52 aa, Zea mays
  Clone ID: MRT4577_126206C.1.pep
RRPWSSAQVWLNLRIPCCTSIDPPIHRARHFGHTCCLRHRHCPPNPSKGFLT

SEQ ID NO: 213387 - protein, 270 aa, Zea mays
  unsure (1)..(270): unsure at all Xaa locations
  Clone ID: MRT4577_126207C.1.pep
YRAIGFLEAGQTHLGLPVFKNVSEAVKATGATATGLFVPPPLAAAGIEEALEAEIPLVVCITEGIPQHDMVRITDMLKTQDKTRLVGPNCPGIIAPEQCKIGIMPGFIHKRGRIGIVSRSGTLTYEAVNQTTQAGLGQSLVVGIGGDPFSGTNFIDCLKVFTEDPNTDGIIMIGEIGGSAEEDAAEFLKQANTVNGGKPVVSFIAGISAPPGRRMGHAGAIVSGGKGGADTKIXALEDAGVIVERSPAGLGKLSTRVVPRDLLYFITILR

SEQ ID NO: 213388 - protein, 57 aa, Zea mays
  Clone ID: MRT4577_126208C.1.pep
QKPKLKKGLTTHIQMPLEAHQPEGLCVPTRTDSAKAKGLPQKQQCIKNRLAAKPHTH

SEQ ID NO: 213389 - protein, 101 aa, Zea mays
  unsure (1)..(101): unsure at all Xaa locations
  Clone ID: MRT4577_126209C.1.pep
CISIDIRQSADPGDRRSWKLHCLEDDIMGDEHMLGDKTLVKGEEALNTFLEENGXDNHEPRXIITTLTWLSTAERRMSPXRELILIDHVINGPVEAANNFI

SEQ ID NO: 213390 - protein, 77 aa, Zea mays
  Clone ID: MRT4577_12620C.1.pep
KKKAEEAPGAALSGGGAPPPPRGGGFEDKMKEVESPCNPLIPKRDQGGGENMGGPGGMDKDAPPGKGGPGPKIEGVG

SEQ ID NO: 213391 - protein, 99 aa, Zea mays
  unsure (1)..(99): unsure at all Xaa locations
  Clone ID: MRT4577_126210C.1.pep
RPTQIGSRTRGPSXPLIHQWFDFCLQSARSLPFCQDVISGASPHSXYLESPVPPEAPRDSNKRRTKLDTNLVRGVPPPEILERCEFLEPLSGKALEDYR

SEQ ID NO: 213392 - protein, 78 aa, Zea mays
  Clone ID: MRT4577_126211C.1.pep
ACLKRCVLVKCDRINRAWVSKIAPTALFFLEVCVLLLVIEASIVFVSPAACFKWQSQVVECDFPEHTTIVFVYSPPPC

SEQ ID NO: 213393 - protein, 110 aa, Zea mays
  Clone ID: MRT4577_126212C.1.pep
VLSLTEVVSNVLSGSSKFLHNAGLLPASKRSNTRTISTRMQELETQLDTERQEKNGFRDQMETLKAQSQASKATIANQSTEIADLKKSLSENNSLLRQILSINRGQMTPP

SEQ ID NO: 213394 - protein, 369 aa, Zea mays
  Clone ID: MRT4577_126213C.1.pep
MASSILSDCSSARLLPLRRSLLPPRAPRLRSCPALATPRRLLVAARPQLLPRPRHMDSVPAATASSADSATVSADAPAKLIDGKLVAKQVREEIAVQVTRMKDVIGIVPGLAVILVGSRKDSQTYVRNKKKACEAVGIKSYEVNLPEDSSEEEVIKHIASFNSDPSVHGILVQLPLPRHMNDENILNAVSIEKDVDGFHPLNIGRLAMQGRDPFFVPCTPKGCMELLHRHGVEIKGKRAVVIGRSNIVGTPAALLLQKANATVSIVHSQTKNPEQITRQADIVIAAVGVANLVRGDWIKPGATIIDVGINPVDDPESPRGYRLVGDVCYEEASKVAGAITPVPGGVGPMTIAMLLSNTLESARRIHGFK

SEQ ID NO: 213395 - protein, 84 aa, Zea mays
  Clone ID: MRT4577_126214C.1.pep
FKNPRTGIPPRLVKAPLKEPPRKRGVRSRVFGPFKKGVGGLFPGAIRVVGVSPEGPPGGSPPRVVFLSSNCPRGPVEIPSSNSP

SEQ ID NO: 213396 - protein, 98 aa, Zea mays
  unsure (1)..(98): unsure at all Xaa locations
  Clone ID: MRT4577_126215C.1.pep
REKHTSQTLWYTLDTXPRCACHEALFGYRLAVPTWLSLCCPSMSVLDYSHVDSSAIPRLFNLTNKGPNTTPMFKYAVKMSTHEESHCREICHSNGNTH

SEQ ID NO: 213397 - protein, 137 aa, Zea mays
  unsure (1)..(137): unsure at all Xaa locations
  Clone ID: MRT4577_126216C.1.pep
KRVGKRPXIGATCLRGDHLGYARSTSMDSTGPQLGGRCSSMWSXRSXKQGLRGSIXLSRESGDSILSSMRRSLQCGDQLLGDIDRSXLGQLIESGRGLSPXGDVXEDTVRISEHHKGGPVPXDAIKRTSEHFASAPI

SEQ ID NO: 213398 - protein, 40 aa, Zea mays
  Clone ID: MRT4577_126217C.1.pep
PIMPYWIVQDSSDNLCSLDPGYDHRLGHGNCGSFHHGKSA

SEQ ID NO: 213399 - protein, 147 aa, Zea mays
  unsure (1)..(147): unsure at all Xaa locations
  Clone ID: MRT4577_126218C.1.pep
PGSSTHSPRISRTLVVNRRERPTWSRTQSAVXVAVVGAELXLLTAVLTTSDDRITXLQLSSGIPPXLXYSRCTGXAPPTPXCSGFRNLKSTSRTAIERLAAYNLLNNELCGFRGXIKTATSKASNARCXGVSMQXTISTSTHCSSHN

SEQ ID NO: 213400 - protein, 92 aa, Zea mays
  unsure (1)..(92): unsure at all Xaa locations
  Clone ID: MRT4577_126219C.1.pep
TPPARLTIMYHHXRKVPGHIVISRHKSTAAGTTQKQTAQTKAAQMHHHLTRNKTTNNYRANSRGTTEMTNGKNPATSAAPKQHPNNTQAMTP

SEQ ID NO: 213401 - protein, 32 aa, Zea mays
  Clone ID: MRT4577_12621C.1.pep
KCLPSICSSSSVRGLPRFSSPCLIWGYSVSPP

SEQ ID NO: 213402 - protein, 68 aa, Zea mays
  Clone ID: MRT4577_126220C.1.pep
GTGAHFAGPANTLTNKTRHRKLSRKPPKKSLHYLKQDSICADTHTRLCIRAPPLYQADHPELTLTHWN

SEQ ID NO: 213403 - protein, 110 aa, Zea mays
  Clone ID: MRT4577_126221C.1.pep
SQPPGGGHLIKDRPFARGTPPGAVALFVGALFEHHHDYLGLFLLFVASRYLAICCDGGGLRGRGRILSLVWFHGVKSPEMRWLARVCMQRCCCRFQVGCALRRLRRPLCG

SEQ ID NO: 213404 - protein, 89 aa, Zea mays
  Clone ID: MRT4577_126222C.1.pep
TRCPSDLCSLDFAASAISIGMFLYHSPAAVHKIKIYLPAKSFTIVRASIHHIAMSDEKTIITPCWLLEEKNNTQVRDVKLSLLQLNEML

SEQ ID NO: 213405 - protein, 71 aa, Zea mays
  Clone ID: MRT4577_126223C.1.pep
EATTTDARRRDYRGPDAYIISDRGQDQGISPEGDGYVRAHAYLPNKLSAPGKHDQHYCRSRRLTGMKQYYT

SEQ ID NO: 213406 - protein, 83 aa, Zea mays
  Clone ID: MRT4577_126224C.1.pep
PTLISLFHDSLHPVNLSPSPKKTFQSNLPNAPIKIGHAPVVRKCWLDNYFLSGLYLKEKTMHTLVSIPLLYPKRFKRCLNATQ

SEQ ID NO: 213407 - protein, 111 aa, Zea mays
  Clone ID: MRT4577_126225C.1.pep
HASAHASVDCHPFLLPHAYTHSRGSHHPGARDQRQRHQEGDGPATQSSATPMADKISTIVLKVDLNARYATGRSEKSSARSKTRLSSRRSRSTRREDEHQDDLVRRVRAML

SEQ ID NO: 213408 - protein, 84 aa, Zea mays
  Clone ID: MRT4577_126226C.1.pep
FHNLFFNTVKKLMSVGVKKVLYLALEKRYNFSVDELNVVANGYTPFRSFFTAQNEPGVPSNRFGPGFVGKQIDPAKIPQYIKEY

SEQ ID NO: 213409 - protein, 53 aa, Zea mays
  Clone ID: MRT4577_126227C.1.pep
MRFPIEIPTDDHHCAHSPYRGLRSRSFSTPIILVPEPDMTIQSSAIDVLRDIT

SEQ ID NO: 213410 - protein, 141 aa, Zea mays
  Clone ID: MRT4577_126228C.1.pep
FILAMLTNCSGLGIHTSARAFITQNHGPNKHTAPRKPTGKKPLWLTYRFTDVKILPRRPRPTLVLVESACPTNQPTNHIQVLYKAQTGVHPPHSWGLDKLVLLVPPLERFCLLSDPWSVASAGIGSTESRRRFHRCCSGRI

SEQ ID NO: 213411 - protein, 76 aa, Zea mays
  Clone ID: MRT4577_126229C.1.pep
ISDFKPVTYSVTQVSNSELCTGRCIPDIIKGLRICLHSMMLPHTKERPHGVRICCYTKLLSHCTSGLSPITRSPNP

SEQ ID NO: 213412 - protein, 101 aa, Zea mays
  unsure (1)..(101): unsure at all Xaa locations
  Clone ID: MRT4577_12622C.1.pep
ARPTRAGAYVDTEGADDRCYVGTTNEGGARQDGAKKXDRHXDRRCIKGANKMMTKKADLKCKVVDKTNAWRTCKQIGDDIGTGQHRCHEVILDVKYHTFAD

SEQ ID NO: 213413 - protein, 99 aa, Zea mays
  Clone ID: MRT4577_126230C.1.pep
TPVSSMACSSESKRNDACPRAKTDLWRRTAPMSDYTGAVTSTVESVVAEASRRHDATPRCPTGARVPAVPLFDGSGPFSPMSTSVFWRLRLSSEGNPAG

SEQ ID NO: 213414 - protein, 52 aa, Zea mays
  Clone ID: MRT4577_126231C.1.pep
APQVAVRRSRLFLVVPVPVAEVLAPWSDLLDAPTDACPEVRRGHAGEAPGSA

SEQ ID NO: 213415 - protein, 41 aa, Zea mays
  Clone ID: MRT4577_126232C.1.pep
VKGAYMYVLCSVWGVTPRLVLHQINCLMINPSVLEQKTSLV

SEQ ID NO: 213416 - protein, 48 aa, Zea mays
  Clone ID: MRT4577_126233C.1.pep
LLMARSGLGSTAHIQTASMGPKTKGRRLTFLSFLSGKMENLTLAGASA

SEQ ID NO: 213417 - protein, 89 aa, Zea mays
  Clone ID: MRT4577_126234C.1.pep
SLSASFVARHAALGWIQGAVVRRPLLDRGRTPPPRTGLQLCKCSCAAAAPTLSAMQQAVTQSEGAPLRLSARTGRKREREMRISASVLT

SEQ ID NO: 213418 - protein, 840 aa, Zea mays
  Clone ID: MRT4577_126235C.1.pep
MARLTPTKSKSSRKPKPSSSSAMGAGAEPDAMSTRRPKRGKSVGGVSKKSKSGGFESMGLCEEVYRGVRHKGYRVPTPIQRKTMPLILAGVDVAAMARTGSGKTAAFLVPMLQRLRRRDPSAGVRALILSPTRDLAMQTLKFSNQLGKFTDLRTSIIVGGDSMESQFEDLSECPDIIIATPGRLMHHLNDVKDMTLRSVEYVVFDEADSLFSMGFAKHLHDILKKLNDTRQTLLFSATLPSALADFAKAGLRDPHIVRLDLDKKISPDLRMVFFTLRQEEKLAALLYLVRERISSEEQTIFFVSTKHHVEFLNVLFREEGLEPSLSYGAMDQEARMIHISKFRARKTMLLIVTDVAARGLDIPLLDNVVNWDFPAKPKLFVHRVGRVARQGRSGTAYTFVTSEDMPYLLDLHLFLSRPLRPAPTEEELLKDMDGITMKIDEAIANGESVYGRFPQTVLDLASDGLKEVITGCTELIALEKPCANAFRLYLKTRPMPSKESIKRVKDLPREGLNPIFRDVLRSDELSALAFSERLKSFRPKQTILEAEGEAAKARNSKGSNQWLDVMKKKREVHEGIINLVHQKSSEDPRPEVEEVVDISNWEKKEVCGKKRKLQSFRDEDYYISSVPQNHHLEAGLSVRDNEGFVENRLDAAVLDLVDDEASGMQAQKTRYHWMKNKFVKLNAGDRVTATGKIKTEGGAKIKASATGIYKRWQQKTHKSINIGGKSGNFADEGTSSSGGYQRGNKKHFTGHGRRSIPNANVPSEIRNHEQMQKGRQQKAMEITRLKNKSAKDGKFQNKFQKSRQQPDRHGKGRGSGKGTGKGFSKGAGGRGGKGKGKGGR

SEQ ID NO: 213419 - protein, 56 aa, Zea mays
  Clone ID: MRT4577_126236C.1.pep
IKTEGGAKIKASATGIYKTWQQKTHKSINIGGKSGNFAEERTPSSGNSLLNSDFML

SEQ ID NO: 213420 - protein, 69 aa, Zea mays
  Clone ID: MRT4577_126237C.1.pep
CSADTTFASRSFVYLLQWRDHSVSFLFATRLVFNYTRLDNLRALILWNLFFLFNRSTEVHDVYWCSCGL

SEQ ID NO: 213421 - protein, 138 aa, Zea mays
  Clone ID: MRT4577_126238C.1.pep
KATASSGTGSGDDNGNSSDSASAEENTETVSGDDEKGMGTGTTTEASYSIQQNSENSSVSAEAENSQGDSSSGVNGSSEETSNKGDGATETSNKGEQVDPKIETSTSTNAEHNESQGADGSSGSNGNGPEQTGKSESQ

SEQ ID NO: 213422 - protein, 95 aa, Zea mays
  Clone ID: MRT4577_126239C.1.pep
HLGSGAENMEIIYHTSACAALVTGVTYWGLRVPFFYRYKVGLRFVHLMDALLTWWFCTYRQPSDNLAFLCAQWISLFSGAAPIETFSGGLHAWGG

SEQ ID NO: 213423 - protein, 152 aa, Zea mays
  unsure (1)..(152): unsure at all Xaa locations
  Clone ID: MRT4577_12623C.1.pep
VSALLLFVDFGEGTSALLARHSDDISLXGRVATIAEDSLPSPIEXDAKSDLFVICDTVXESSFMYCASRYYLXSHDDAXLVYDMPDEDGFCNVKHRVNDIDGYASDSGNYLLVVNHSDLTANSGVTIDTADAIADDMSFPFMNANAADAINE

SEQ ID NO: 213424 - protein, 61 aa, Zea mays
  Clone ID: MRT4577_126240C.1.pep
QLIKLLKKGPPVQWWKKTLTGGVKLTFEEKGFNQPPLLKKKKIFFSPPRKGKKKKNGKGKN

SEQ ID NO: 213425 - protein, 634 aa, Zea mays
  unsure (1)..(634): unsure at all Xaa locations
  Clone ID: MRT4577_126241C.1.pep
GISGSIPPELGGIEMLVTLDLAGLALTGEIPGSLSQCRFLLELNLSGNKLQGAIPDTLNNITYLKVLDLHRNQLDGGIPVTLGQLTNLVLLDLSENQLTGAIPTQLGNLSNLTHFNMSFNNLSGMIPPESVLQKFDYTAYMGNPFLCGSPLPNNCGTGXVKHRKRLRVPVIIAIVAAALILVGICIVCALNIKAYTRKGTDGDGKEEEEVLVSESTPPAASPGSNAIIGKLVLFSKSLPSRYEDWETGTKALLDKDCLIGGGSIGTVYKATFENGLSIAVKKLETVGRVRGQDEFEHQMSQLGNLSHPNLVAFQGYYWSSSMQLLLSEFMANGSLYDHLHGYRPPPRALSESSSSSRGGGGELFWERRFNIALGAARALAYLHHDCWPQILHLNIKSSNIMLDGRYEARLSDYGLGKLLPILGSIELSRTHTAIGYIAPELASPTLGYSDMCLGNRGSTSHLERPVHLLPSPXCRPQILHLNIKSSNIMLDGKYEAKLSDYGLGKLLPILGSIELSRIHTAIGYIAPELSSPTLRYSDKSDVFSFGVVLLETVTGRKPVDSPGVATAVVLRDYVREVLEDGTASDCFDRSLRGIVEAELVQVLKLGLVCTSNTPSSRPSMAEVVQFLESVRISS

SEQ ID NO: 213426 - protein, 112 aa, Zea mays
  Clone ID: MRT4577_126242C.1.pep
SLLSPLVMGASPLLGAVYRGTPLGGGGGVVSGTVTLLLRGGAPSVVDTAGRCAARAGPWLLRPQSAHGRQGRPDLGAHRGRGVAPGAVAEGGSGGLSLGGGGPVPGLPRRGL

SEQ ID NO: 213427 - protein, 313 aa, Zea mays
  unsure (1)..(313): unsure at all Xaa locations
  Clone ID: MRT4577_126243C.1.pep
KSTGRSPIALPSMKKTRNMSSGPEINQPDKSTGDKLIENNCDSGNKRVLRERQHQNQTYLSSRSSNQSNQNAIKQTQDQSDDDEISSDTSYRRTRSGRRRGAXVLPXKQEDSSDSEDFVVVKKNRRKRKKSVHKQRAGSKLKHTSGPSKAGRLGRPPLIKSESSSLSLQPGKRERKVPEGTGTLREEKQKISDQIKAMLLDAGWTIDLRPRNGRNYMDSVYIPPSGKGSYWSVTKAYYAFRAGMESEQKESPKDQSLSTKSVGSPDKRQVSSSSGCTLTEDILSKLKRVVVNKRTTKLEIQRFSQKRFKKKKR

SEQ ID NO: 213428 - protein, 108 aa, Zea mays
  unsure (1)..(108): unsure at all Xaa locations
  Clone ID: MRT4577_126244C.1.pep
GMLXCVHSIFYYISNHGAHFILYTXIPRAILYKWHVQRNWGGGGEKKLHIAYFAIQKSKQKQTVYRGKEFLSSHFPCGSYGGAITMQGPXXKIICTGDLAGWNXSRKG

SEQ ID NO: 213429 - protein, 99 aa, Zea mays
  Clone ID: MRT4577_126245C.1.pep
EFFPFHLLRTFPGFAAGVTAFDWSPDSAFLLASCKDLTARLLPVKKGLGGKPFLFLGHRAAVVGAFFATDKKTRRVKGVYTVSKDGAIFTWDLVEEIGE

SEQ ID NO: 213430 - protein, 142 aa, Zea mays
  Clone ID: MRT4577_126246C.1.pep
MFGFSRRRVKLGRSKGDPSDPLNSSRSSVGPSKHLSLPNGNDATMTSVSGHADDLSYRCSSDTFDPQGRTFDISENWTVLSTEGDKPIPRFYHAAAIVSSKMVVFGGDSGNRLLDDTKIWYLSFLTCMFGCMNSALSGTMLL

SEQ ID NO: 213431 - protein, 228 aa, Zea mays
  Clone ID: MRT4577_126247C.1.pep
RRAVQSRAIRRLDRHRRGSKALTVPAPLVEIPAKHPALAPVEVKLAQPAAVQVAAPRAEPGGLHVPSPPKTLRQPSPVTGNSPDGAQQPQEPRDLVGSPPALEIDERDAHAAPDPHQRNPHALAPPPRASGNQRHHLQPELMPRESPETFQGGEAEREYRSESARRRTERIGGPGRCSVHESDSGVDELGESGGRLGNSAGKLWQECTATESAGVEDWRGKSSGRVGC

SEQ ID NO: 213432 - protein, 353 aa, Zea mays
  unsure (1)..(353): unsure at all Xaa locations
  Clone ID: MRT4577_126248C.1.pep
MDNCLVVPNILSSENVKTKHPQLLYESKLYRILQGGTGIPNVKWFGREAAGIAVRRLVYFCLYRKKLYLVHSVTNNIFYFCXFLMLPHQVHNYIMPMFDXFHVPLEIQISEKCSLSMXETAPRFKISEPSXCPCNCRENKNLTGTARYASVNTHLGIGRFNPIGGSXSRHAVSGFLKNFSYLSMTFHFYIIIDVFXEQSRRDDMESLGYVLMYFLRGXVYCNMIRRFTSHFLMSGLIHGLPTVSLPWQGLKAGNKKQKYEKISERKIATSTEALCRGYPTEFASYFHYCRSLRFEDAPDYQYLKRLFRDLFIREGFQFDYVFDWTILKYQQAXMTTAPPRAIVCTRNKLTLLP

SEQ ID NO: 213433 - protein, 108 aa, Zea mays
  Clone ID: MRT4577_126249C.1.pep
LVSGLPSSKLPCNSVGFLKESPAHVKCPAQFCCKFVSNLTELVVWPYQGRKHTRMCCACSFYDWLAIDTLNTVLYSEAVAAFMHLPCNGLYSCGCWFNKVSKFQQNQQ

SEQ ID NO: 213434 - protein, 127 aa, Zea mays
  unsure (1)..(127): unsure at all Xaa locations
  Clone ID: MRT4577_12624C.1.pep
TLTTYKQREIHYQQYNNIGAKIFFLLXRAALTACVANPTIHPQSSHAPIAYLLPPYLPSMIASVCENSALQPYMLQQAIPASNIPLSPLFQQSPALSLVHSLVQTIMAQQLQQLVLPEINQDALAHL

SEQ ID NO: 213435 - protein, 64 aa, Zea mays
  Clone ID: MRT4577_126250C.1.pep
RNCAGSSCARGSAWVKPLSCPPWFNKGSLCFPEGPSQKQNVIPPWQTIISLKIIANQAGDLPAN

SEQ ID NO: 213436 - protein, 97 aa, Zea mays
  Clone ID: MRT4577_126251C.1.pep
RTHLSYRFRTIPNGTYKTKGSIRTDTGAKQGSALKCLAWANSHAYVFVGDSESAGMDATLPFAAAIVDDVIYSDIPDVTKRVGKETLNDCALAAASA

SEQ ID NO: 213437 - protein, 78 aa, Zea mays
  unsure (1)..(78): unsure at all Xaa locations
  Clone ID: MRT4577_126252C.1.pep
IFLFNFFFFTIPKLPCMRIDRQKEREPTNTRHNKVEQGQAWGTVPLTPGPTTITTRRTLYLAHXTGCRHRTRSRESHC

SEQ ID NO: 213438 - protein, 71 aa, Zea mays
  Clone ID: MRT4577_126253C.1.pep
PPLQLGWYSHTQEPGAPQKKNFLPPFQWIASFFLKRHLLERFQWIASVYQTEKCHNVLSNQHAVMRRMLIK

SEQ ID NO: 213439 - protein, 100 aa, Zea mays
  Clone ID: MRT4577_126254C.1.pep
RHNQERQECRQRRFPRRRVGRPARVHHQENAPTGGGSNKTQYQARMQPPESIERTICRRAASGSSSDALRTPILLAVPIPEDATTGIVDKVNRVQGRREE

SEQ ID NO: 213440 - protein, 211 aa, Zea mays
  unsure (1)..(211): unsure at all Xaa locations
  Clone ID: MRT4577_126255C.1.pep
GTSRPAGRKIPSPPLPLRLHHRLPVALHQLLPPPPSXLSPSISCFLRHASPAPRXSDHSPYLRFPSXHIPTLPSSLRVVTQVYPVATGMTSXFVVVWVDAGXRFELAGTNGTAHFLEHMALKGTRRXPSAGAXVKVEVEDMSVRGTPLRKKPLLVATTLGTMKSTIPFPCIKKQHCVWEKELGLHNYNHQDPATPFSRFQWNGRLTYHHPV

SEQ ID NO: 213441 - protein, 151 aa, Zea mays
  unsure (1)..(151): unsure at all Xaa locations
  Clone ID: MRT4577_126256C.1.pep
APPRPAPPRRXGVPRSFGALAAGAGGARFAVRGAAPAPAGPGCCALVRPXRRAXAXXXXGXGPPRGRXGRWXFFVRPAVCRRRLXRRPSGSVPXXVPXWLPXXLXPGXXFXPXSSVGAPASXXXXASGAGGRAXRSRSLARSLAVXCLASA

SEQ ID NO: 213442 - protein, 90 aa, Zea mays
  Clone ID: MRT4577_126257C.1.pep
MAIHGLFGGAFCPRRALEVRKRIDHLGLLWKLIKLTTTRKHIAKKRLKRLWHNEAAIRDCGESESISAINVAFTNEKQQPPLTVCHSSLS

SEQ ID NO: 213443 - protein, 123 aa, Zea mays
  Clone ID: MRT4577_126258C.1.pep
PTQSTLTPRKEKKTPRKPVQVDQNRPEPKNPKRGPNKRPPPPPRQTGGPPDQKGPPQKKTGGAKYSRPTPLQISRKAGRPKNFQPTPLAGWEESDRTKSPTHTYLNGAKRETNPPPNQGKQKG

SEQ ID NO: 213444 - protein, 174 aa, Zea mays
  Clone ID: MRT4577_126259C.1.pep
FEHSTTAMFRSQVFRQVARAARAQAPRSAFRPAQPAISSLRHFTSSPSRFDKDPNNDEVDAATTSGEPGESGDHEGQYARTRDDIVVEYPEEKDLPPSNPVVGRGGEHFKRTLASFSMEGKVAVVTGGARGLGLVMAQALVTSGADVAIVDMNKEEGERSAKGLLDIFKKENPG

SEQ ID NO: 213445 - protein, 30 aa, Zea mays
  Clone ID: MRT4577_12625C.1.pep
LPASGCRRRLQRRISSRLIAARLADSRLAS

SEQ ID NO: 213446 - protein, 68 aa, Zea mays
  Clone ID: MRT4577_126260C.1.pep
NGEYNVYKRRNMDKDPDSPIAYEEAKEMASQSCTISDDHSLLLLSIISSEALLLNSTADMAAFQDLAH

SEQ ID NO: 213447 - protein, 106 aa, Zea mays
  Clone ID: MRT4577_126261C.1.pep
MDTSSPAALVNAKILNMFVGQRVRTVVQVQHNDGGMLVGQSPDGHQLSIKSAMDVPVSHFMEVYGIAENSQTIRAEVCTDFGPDFDPETFNQLCNLASNKFKHMFL

SEQ ID NO: 213448 - protein, 72 aa, Zea mays
  Clone ID: MRT4577_126262C.1.pep
MDKDPDSPIAYEEAKEMASQSCTISDDHSLLLLSIISSEALLLNSTADMAGTCPLSSQGIALEVGLCGSREI

SEQ ID NO: 213449 - protein, 76 aa, Zea mays
  Clone ID: MRT4577_126263C.1.pep
SEQQLKSGIVICPEQKGNFMLSTMCVDMMLVEMLGPIFNSWGASSSASYACTSPASPAGHRPRCCMVSVCQMCRNR

SEQ ID NO: 213450 - protein, 50 aa, Zea mays
  Clone ID: MRT4577_126264C.1.pep
LFARSMAASLLITSRPMTNSTLTTHDKPHMLGAFCAPDDNQQQLISEAAL

SEQ ID NO: 213451 - protein, 38 aa, Zea mays
  Clone ID: MRT4577_126265C.1.pep
PIPYRALWPPHSFGKVKLVSLFAVSSNPLGSPYQRSFV

SEQ ID NO: 213452 - protein, 79 aa, Zea mays
  Clone ID: MRT4577_126266C.1.pep
GGNRPPPSNKNSIGVKVSSLALLGHNKAQAPKGENRNPRGARKKRPGPAPLKKKGTLADPPLETMGNPRAGFITNPGGG

SEQ ID NO: 213453 - protein, 75 aa, Zea mays
  Clone ID: MRT4577_126267C.1.pep
LDPRVRCKKLDVYAMAVYKAEACRARDSEQHRRLMLHDNAVQSLTTGETYMCGLAIIVPRSLLMKLYPQHRLLVS

SEQ ID NO: 213454 - protein, 72 aa, Zea mays
  unsure (1)..(72): unsure at all Xaa locations
  Clone ID: MRT4577_126269C.1.pep
EVKLIHRYSSRICLLKRSLLLYEFVFLLYLLTSYCSIFKCPISLCFIIVVVLWWQGLSCNNRMIXCLQLCLL

SEQ ID NO: 213455 - protein, 63 aa, Zea mays
  Clone ID: MRT4577_12626C.1.pep
FFFQKTFGIRIKKKQNFFKKKKKKKKKKKKKKKKKKKKKKKKKKKKKKKKKGGRSRSRTSGRV

SEQ ID NO: 213456 - protein, 111 aa, Zea mays
  unsure (1)..(111): unsure at all Xaa locations
  Clone ID: MRT4577_126270C.1.pep
LLPATASXAKLEVWLEVESNNFNRNPWPLXVQLLGRALLGGAPDAAVVDKHAEQLAKVLDVYEAHLARNKYLAGDEFTLADANHACYLLYLSKRPKAGLVAARPHVKDWWE

SEQ ID NO: 213457 - protein, 50 aa, Zea mays
  Clone ID: MRT4577_126271C.1.pep
DRYRSWISDATGSRPRSVGRGHVPRLPRSPLIVHLISYGPSNTGAGGSHE

SEQ ID NO: 213458 - protein, 85 aa, Zea mays
  Clone ID: MRT4577_126273C.1.pep
TVCTPDESVVVVSLETGGWTVYLSELRSCVGATRRTAGVENEMTVEPTKTRILKSKSSVLVLVLSLPAPYQVGKPRLRDPPHFYF

SEQ ID NO: 213459 - protein, 109 aa, Zea mays
  unsure (1)..(109): unsure at all Xaa locations
  Clone ID: MRT4577_126274C.1.pep
GGGAGFFFFFFRGGKSAPPPAPPGTGGENPXGSPPPPEKPXQRPPPQPPGXAGCGGPPPXSPRAPRPGPRPRRGAPPPPRGGGSPHGPGRPAPPSGRVPTTNVDGTPRR

SEQ ID NO: 213460 - protein, 205 aa, Zea mays
  unsure (1)..(205): unsure at all Xaa locations
  Clone ID: MRT4577_126275C.1.pep
CSPTFSFRGERIEMEASDVVYRCFTVVLSWGTDDHSLHNDCSIYRVGASSDRIILDRDTHSARACGSSTLSTLVAMSTDISGMDDIELCGGYLTVKXAQGRGARVGMEDLYRGXRRQGTXYGGAAGHYCGAFYQDQQTLLGGQGVQIMMTMLVGDISAPPPLPLPVMMSMLQEEEVADPDASLSAVLMTTSSLRLTQLAVVKLQL

SEQ ID NO: 213461 - protein, 105 aa, Zea mays
  Clone ID: MRT4577_126276C.1.pep
GGWCAWLGGPLSPGFFSRRGGFPFARAPLTSRPWPSAGGLGSASLGGGPPPGFGFGGLFPTFYVVFRVREVPSMPFMEGPKKKKSLDINMDMNILLYPGFVVGTG

SEQ ID NO: 213462 - protein, 170 aa, Zea mays
  unsure (1)..(170): unsure at all Xaa locations
  Clone ID: MRT4577_126277C.1.pep
NGFNDFLGHCENIDGFLEGTFNKRQTSRMVRPVEKERYKENEGDSDPEKERYKESKNSERVLTFNSKEGAAHEASTFPSKEKYNLCKPISELDLSNCQRCTPSYRLLPKNYPVPSASNRTDTEASVLNDYXASATSGSGAFKHMRKNQYEEILFICEDDMFELDVLLESV

SEQ ID NO: 213463 - protein, 42 aa, Zea mays
  Clone ID: MRT4577_126278C.1.pep
KQLGNKAHIRGQKLAQSTPSSIKSGGLKKEGAAGPVLAVKPA

SEQ ID NO: 213464 - protein, 99 aa, Zea mays
  unsure (1)..(99): unsure at all Xaa locations
  Clone ID: MRT4577_126279C.1.pep
SDVEYRCFVGGLAWATDDHSLHNAFXESRAVNGMPYIDFKDHDSVSKALVLNVSHIGGDSEPYVDEAKPRGDGQRSGGRSARRSGGRLGDRSGGPRGGG

SEQ ID NO: 213465 - protein, 83 aa, Zea mays
  unsure (1)..(83): unsure at all Xaa locations
  Clone ID: MRT4577_12627C.1.pep
MMGGLALVLILVSELLVQIHASDSLMDQQVDEDSKGRWIVSTKDEYHRVWXHAKIDGHEDYVLLDKDKARNCAMIEELDEPPT

SEQ ID NO: 213466 - protein, 174 aa, Zea mays
  unsure (1)..(174): unsure at all Xaa locations
  Clone ID: MRT4577_126280C.1.pep
GHPPPLAPPPXPPPPRPSPHSVSDTSRPXPGPPXPPNPALTGLLPSIPFPFPPPXQSGPPSPPPPSACARPCAYHHPPXPPFPVASLPARIGPTAPRNRAXSGFASSRATAPPPSSGDEVPAXCTGTASQGTTTSARAPAPPCRPPCAPSAPSPRSAAATRAPAPTSTPSTCPT

SEQ ID NO: 213467 - protein, 204 aa, Zea mays
  Clone ID: MRT4577_126281C.1.pep
MERADEDACRVALLDAAAALCVHLLASWLLVSRLRFGLAGIALTLNFSWWATGAMLFAYVACGGCPDTWHGFSLEAFAGMWEFVKLSSASGVMLCLENWYYRILVLLTGNLKDAAIAVDALSICMSINGWQMMIPLAFFAGTGVRVANELGAGNGEGARFATIVSTVTSLVIGLFFWVLIMGLHDKYALIFTSSPVVLDAVDHL

SEQ ID NO: 213468 - protein, 71 aa, Zea mays
  Clone ID: MRT4577_126282C.1.pep
TLVRAAIVRSKYNSVIQHRYVINGRLDYGAEWYDVIKLELRNQHVRTRSKYACKFLAPDGHRFEVPGEWPE

SEQ ID NO: 213469 - protein, 118 aa, Zea mays
  Clone ID: MRT4577_126283C.1.pep
KIPPLPHTMSSNDCAPMTAKNNSDYSVQTYFILRLPRAPACAPGHWHLVQGHERRELLHATTCSRISPRWSPSSPATTKRPPSPPERLTTCDAPRPTRGARQVRLIQMEQCACRRNIL

SEQ ID NO: 213470 - protein, 486 aa, Zea mays
  Clone ID: MRT4577_126284C.1.pep
MERADEDACRVALLDADGGGGGEGGKKQQQQLAARVWEESRKLWDIVAPAIFSRVVTYSMNVITQAFAGHLGDLELAAISIANTVVVGFNFGLMLGMASALETLCGQAFGARKFHMMGVYMQRSWIVLFMCAVLLLPMYFFAEDVLLLTGQPPELAAMAGKVCVWFIPLHFSFAFLFPLQRFLQCQMRNSANAAAAAAALCVHLLASWLLVSRLRFGLAGIALTLNFSWWATGAMLFAYVACGGCPDTWHGFSLEAFAGMWEFVKLSSASGVMLCLENWYYRILVLLTGPLGYAAIAVDALSICMSINGWQMMIPLAFFAGTGVRVANELGAGNGEGARFATIVSTVTSLVIGLFFWVLIMGLHDKYALIFTSSPVVLDAVDHLSVLLAFTILLNSIQPILSGVAVGSGWQSMVAYVNIGCYYLIGIPMGILLGWLFNLGVLGIWAGMIGGTAVQTLVLAIMTVRCDWEKEALIASTRMGKLSEVR

SEQ ID NO: 213471 - protein, 58 aa, Zea mays
  Clone ID: MRT4577_126285C.1.pep
LIVQSHILDNFLKEKNLNIACINSLISRARWVHQKASVLNARASLSASDKMTAAFRFS

SEQ ID NO: 213472 - protein, 205 aa, Zea mays
  unsure (1)..(205): unsure at all Xaa locations
  Clone ID: MRT4577_126286C.1.pep
AXPGKKKKKKNLGPRLPARRALPPRYRLPRNPFHPWRRCCKCPRNQLHCPRDPAFPGCPSIHGASPGISVVNFYGENAASPRLLPHRVSARAKSGRPDSCTMPPLAQSSLPHSLSELEQASSLPRLRNSAPPPPRHPHPWWLGDFTGHKSHRRRFLACSSALLGFLQPSHXLYYTRHTRSMSPSPSSRPPGMTLHPRDVVPAGHP

SEQ ID NO: 213473 - protein, 267 aa, Zea mays
  unsure (1)..(267): unsure at all Xaa locations
  Clone ID: MRT4577_126287C.1.pep
MPSYLVTGASRGLGYAFVRHLAAIPGNTVIGMVRNKDVTLARLEKDGITNISIVQADITDRDALTTAYEEVKTLTKGSLDILINNAALIDENSAYKTLLDDDLEVXWNXLTSSFRANVVGVANTVNIFLPLIRAGNEKKIITISSGMADTELINRFGVPVAAPYSISKAATNALIAKYNAALGKSEGILFLALSPGLVDTSEGKPMSEQAIQGAQAMGALFQEYAPDFKGPISPEQSVEMCLKVIEDATVETSGSDFVSHFGNKQWL

SEQ ID NO: 213474 - protein, 529 aa, Zea mays
  unsure (1)..(529): unsure at all Xaa locations
  Clone ID: MRT4577_126288C.1.pep
MLNIAQCSDREKVLYASGRLTGPAADWWDSYVVAHDAADTITWAEFTTEFRNYHILAGLMKIKKKEFLSLKQGNMSVSVYKDKFIKLSRYAPDEVRLLDKALAIEHKRVQLGDLKRKAITQXGRGTPAHPGGGPRPAQYTPQGSPRTPPIRQAAPXHPVRPTGQKTGPTCFKCSQVGHYANACPVGNSGTPAQNKQQTPSKGYSIARVNQVSADATPDGADITLGTFYVNAIPATILFDSGATHSFMSARYANTIEIPLQHMRKPMIVITPIGPVEANHITHKLALTIMGREIWATAIVLEESSIDLILGMSWLRKANDIIQCARGTVELTNPKGERFQVQIAVTTSSRRAMFFIAEEFVGENIRVVRDFPYVFPEELPGMPPERSLNDVTIKNKYSLPRIDDLFDQMRGARVFSKIDPRSGYHQMKIRPSDIPNTVFSTRYGLYEFTVMSFGLTNAPAYFMNLMNKVFMEYLDKFVVVLIDDILIYSKNDSYYWRFIEGFSKISKHMTSLLEKGKEFKWTEKCQESFD

SEQ ID NO: 213475 - protein, 42 aa, Zea mays
  Clone ID: MRT4577_126289C.1.pep
KWGNYSDHGDNNKTLLWTKPVRENGTLYVLGTNWATYLLESH

SEQ ID NO: 213476 - protein, 266 aa, Zea mays
  unsure (1)..(266): unsure at all Xaa locations
  Clone ID: MRT4577_12628C.1.pep
MSHHLAATTAAASTSPSRRPSLTSFPSPLHRPSALFQQTSFAATRTERKPAPSVAAAAASPVSPLHRLEEMSDHEAIPERLAVVTGGNRGIGIEVCCQLALQGVTVILTARDEERGKAAVESLCRESNLSNIVFHQLDILDAGSRASLARHIETRYGKLDILVNNAGVGGVAVDQEGLRALNIDPKMWLSGKAAHLIESVIVQTYDEAVKCLNTNYYGLKWATEALLPLLKKSTSGARIINTSSLRSELQRMPNEXLRESLRDADS

SEQ ID NO: 213477 - protein, 518 aa, Zea mays
  unsure (1)..(518): unsure at all Xaa locations
  Clone ID: MRT4577_126290C.1.pep
PPMAAGGGAPWAERARVVGTQIRNRFRVAPVDHRSLWLRADGRVATEAVRRWSDRVRALLQRGRSADRNSTSTDTSPEAVAKPSSSVLRFYRKRVGKEVNGIEDSVIFRSLQALAVPLIGNACYVFMHGLNSVQVYGVEKLHQALHGRPKGKALLTVSNHVAAMDDPFVIASLLPPSVMLEAQKLRWTLCATDRCFTNPVLSTFFRSVKVLPVSRGDGIYQKXHLMKTSVWPKFFNVDEPIYPRDSYCESIMNNGGNTXKLNTRLHNILNREVATGGVLFFKQLADVDLRIILIELLGLTLTXKLDDKHNKVSGSXHYSESXYLYIGIPCCMGLQTSFCPLLRYTMLMPSCLEYHKSSFPIXREYDRLHLDYXEMHHQIHSSLVPFFVFFVQGMDMALSKLNSGGWVHIFPEGSRSRDGGKTIAPAKRGVGRLVMDADSLPVVIPFVHTGMQDIMPVGKRIPRAGKRVIVVVGDPINFDDLLIDNCGDTQDIPRGILYDKVTQRIGQRLQELKVEVAD

SEQ ID NO: 213478 - protein, 62 aa, Zea mays
  Clone ID: MRT4577_126291C.1.pep
VHVLGLPRVLLHSFFTCDNVGLVQHLASQFLFPSLLVSWVTYPVCVCPVPISSVSAPRCVSC

SEQ ID NO: 213479 - protein, 104 aa, Zea mays
  Clone ID: MRT4577_126292C.1.pep
FGTRPQSRTAHGSAVALPPPPSTLNPRFSRLPSSHPRTPPADQAAAVPSILELSSSILEPPQRLPSSNPGGSHPRIPPADQAAAVASILLPPSNPRLPRTEAAI

SEQ ID NO: 213480 - protein, 54 aa, Zea mays
  Clone ID: MRT4577_126293C.1.pep
PKRSGGGGYGGGRRDGGYGGRGGYGGRSESGSDSYRSRDRYRSRCEDGGGDYCG

SEQ ID NO: 213481 - protein, 53 aa, Zea mays
  Clone ID: MRT4577_126294C.1.pep
PIQTIQSRNTQLANSVVRLLYLGGDDAVAAADDSLRPAVTPRRPRCRRQRPRT

SEQ ID NO: 213482 - protein, 53 aa, Zea mays
  Clone ID: MRT4577_126295C.1.pep
SFHLLFNIFFLLELKSVDSFKKSFVRLPFSPHAYGQQPQDCNYVKLRRLGTTR

SEQ ID NO: 213483 - protein, 105 aa, Zea mays
  unsure (1)..(105): unsure at all Xaa locations
  Clone ID: MRT4577_126296C.1.pep
QEKEXXKSEERXALEGLIGRYLDVKTKQXXDEAAQSAKVKDVAQDNDFSIKRCISVLKTMDMTRDEKVKAAEVFNIPNYRETFICFNDDEPEVALLWLRGKMDKL

SEQ ID NO: 213484 - protein, 159 aa, Zea mays
  Clone ID: MRT4577_126297C.1.pep
MPLLAQSSLPWNPNQESDSALDELDGRKTRRPRGERGNKEEDEATQAAALQADPAMFTSDPEDAEDFAAWSKEALSQACLGAMIEEEIEGSVPSTTQYTGSRIGTKSSISSTKELIKDMEGNLHRLSESSIREKKTLQKELSYVKEDLSRSASKNNAEV

SEQ ID NO: 213485 - protein, 183 aa, Zea mays
  Clone ID: MRT4577_126298C.1.pep
MTAETATQAELLRAVLEEQKLAAQGDEPVVEDDDDEEDEDDDDQDDKDDDVEGVDASGRSKQSRSEKKSRKAMLKLGMKTITGVSRVTVKKSKNILFVISKPDVFKSPASDTYVIFGEAKIEDLSSQLQSQAAEQFKAPDLSSVISNPEASTAVQEDDEDCDETGVEPKDIELVMTQAGVPRP

SEQ ID NO: 213486 - protein, 58 aa, Zea mays
  Clone ID: MRT4577_126299C.1.pep
NKGHFTFQNSSFTREKEMYLLQVLIVPKGHNLLKGGEGGIFFLKYIHKHFKLQGLHMK

SEQ ID NO: 213487 - protein, 55 aa, Zea mays
  Clone ID: MRT4577_12629C.1.pep
QWTHASGTHGAAVSDMTPASSARPLADRIRDRRARCHTHGPGRPHGGSSGAADHR

SEQ ID NO: 213488 - protein, 118 aa, Zea mays
  Clone ID: MRT4577_1262C.1.pep
SSSLFWDVKIRMAFAVVFGPSMEPLTSSCFCTLSSARFSIIRFIGRVPPAGARAHLISCQRDQMPRSLRLHCASGLLPSRDLTQRRGSRLFVISGAAARKTKRNTSPMISIIKDTIIS

SEQ ID NO: 213489 - protein, 55 aa, Zea mays
  Clone ID: MRT4577_126300C.1.pep
PCPPVPFKIGCFLKFERKKRIPVLFFPKTQKSCVSVLRRKIRVVSHYQKYGPRKE

SEQ ID NO: 213490 - protein, 79 aa, Zea mays
  Clone ID: MRT4577_126301C.1.pep
SFFFFSWGGGFFLCRCKPGSLWPGSSRAFAFLEVVSLAFGLYLLAVLGTLVYFRPSLGDASLVFFFSLGSLLFLLRGVP

SEQ ID NO: 213491 - protein, 54 aa, Zea mays
  Clone ID: MRT4577_126302C.1.pep
SVDRCCQFQRKVKAWHHSAGYRPVGVPNISHCLHASSLVLVMCLSCLNGHCPPH

SEQ ID NO: 213492 - protein, 86 aa, Zea mays
  Clone ID: MRT4577_126303C.1.pep
LQSVWMMRNIIHFNTLANQAVERAANADGHKITYAVVKSRMGDLFYRLVSQKFEDPAEGEDVLIAKFQKLYDDLTTGFRNLEDEAR

SEQ ID NO: 213493 - protein, 36 aa, Zea mays
  unsure (1)..(36): unsure at all Xaa locations
  Clone ID: MRT4577_126304C.1.pep
TKLGRRXCWSGSASLASAATRKLQGLQLTPGIGPVL

SEQ ID NO: 213494 - protein, 50 aa, Zea mays
  Clone ID: MRT4577_126305C.1.pep
LARYRVIEQPPWRLQAFGKEGKLTCWKLMKKWTHSHLQLVLSGIIGCSHT

SEQ ID NO: 213495 - protein, 304 aa, Zea mays
  Clone ID: MRT4577_126306C.1.pep
YLNLVRLIGFCSEGRHRLLVYEFMKNGSLDAFLFGDAPPGGKMPWPTRFAVAVGTARGITYLHEECRDCIVHCDIKPENILLDEHFNAKVSDFGLAKLVNPKDHRHRTLTSVRGTRGYLAPEWLANLPITAKSDVYSYGMVLLETVSGRRNFDVSEETRGKKFSVWAYEEYERGNLAGIIDRRLPAEDLDMAQVERALQVSFWCIQEQPGQRPSMGKVVQMLDGVMELERPPPPKSSDSFFSTTTASGGNSSMVSTVASSAAPPVAPSTSPNLEQEMALGRSESARNRDRVTRQLLSPQPYMTM

SEQ ID NO: 213496 - protein, 86 aa, Zea mays
  unsure (1)..(86): unsure at all Xaa locations
  Clone ID: MRT4577_126307C.1.pep
SLLSSCLSHLHSRGLRDPFHPGVESISLLLXRSSLARQAYCLGNSRPRLQVTIRAQGSSLTCTLLCVVATNPLQPVLLLPSPRTLS

SEQ ID NO: 213497 - protein, 93 aa, Zea mays
  unsure (1)..(93): unsure at all Xaa locations
  Clone ID: MRT4577_126308C.1.pep
ERRPNRFFFLCSCLTGLLLTLCGWQQAMLMQTDESISVSCIDLGCLLIPTLGGGGGYIYXXPINXIIIXISINYXFNXNQXXNLFQITNLYFS

SEQ ID NO: 213498 - protein, 433 aa, Zea mays
  Clone ID: MRT4577_126309C.1.pep
MAAAFSSTVGAPASTPTRSSFLGKKLNKPQVSAAVTYHGKSSSSNSRFKAMAAKEVDETKQTDEDRWKGLAYDISDDQQDITRGKGLVDNLFQAPMGDGTHVAVLSSYDYISQGQKSYNFDNMMDGFYIAKGFMDKLVVHLSKNFMTLPNIKVPLILGIWGGKGQGKSFQCELVFAKMGITPIMMSAGELESGNAGEPAKLIRQRYREASDLIKKGKMSCLFINDLDAGAGRMGGTTQYTVNNQMVNATLMNIADNPTNVQLPGMYNKEDNPRVPIIVTGNDFSTLYAPLIRDGRMEKFYWAPTREDRIGVCKGIFRTDGVDEEHVVQLVDTFPGQSIDFFGALRARVYDDEVRRWVSETGVENIARKLVNSKEGPPTFEQPKITIEKLLEYGHMLVAEQENVKRVQLADKYLNEAALGEANEDAMKTGSFFK

SEQ ID NO: 213499 - protein, 94 aa, Zea mays
  Clone ID: MRT4577_12630C.1.pep
NLRCPEYVKHPSGSEKFQQSSIKECHLCLFHADNLAANFSRELADYIIYIIDVSGGDKIPRKGGPGITHADLLVINKTDLAPAGGADLSVMERD

SEQ ID NO: 213500 - protein, 165 aa, Zea mays
  Clone ID: MRT4577_126310C.1.pep
TGVDSKKTIAPGCRGRRSRGDRQREGSTFERQRSAGRHNKRVPTGRPSCIFDRPDVEEPRQGGRRQRTRQRRSWWPRPRQNRRDNGASGREGHDSDGSSQEDSDLAKGKADLARKVAAMMNPTGKGATVMDPTKAMKGRATGRVQSGRGLRRTWQGVMTPTTEEA

SEQ ID NO: 213501 - protein, 362 aa, Zea mays
  Clone ID: MRT4577_126311C.1.pep
MEPTSSASIARQTWELENNIPAAASDPDAMDAIYRYDDASQARAQQEKPWANDPHHFRRTKISALALLKMVVHARAGGTIEVMGLMQGKCEGDAIIVMDAFALPVEGTETRVNAQADAYEYMVDYSTINKQAGRLENVVGWYHSHPGYGCWLSGIDVSTQMLNQQFTEPFLAVVIDPTRTVSAGKVEIGAFRTYPKDYKPPDEPVSEYQTIPLNKIEDFGVHCKSYYALDITYFKSSLDSHLLDLLWNKYWVNTLSSSSLLGNRDYVAGQIFDLADKLEQAEGQLAHSRFGGMIMPSQRKKEQEESPLAKVTRDSSKITAEQVHGLMSQVIKDILFNSVHPSSKASTSAPPDSSGPEPMVEA

SEQ ID NO: 213502 - protein, 60 aa, Zea mays
  Clone ID: MRT4577_126312C.1.pep
LPRTSMGPDAAPACGIRQLLPVIAIEFEHSNLKRRTRNAAAAGRRRRPMTNPWPDAWVDA

SEQ ID NO: 213503 - protein, 129 aa, Zea mays
  unsure (1)..(129): unsure at all Xaa locations
  Clone ID: MRT4577_126313C.1.pep
KSSLDSHXLPDLLWNKYWVNTLSSSSLXGNRDYVAGQIFDLADKLEQAEGQLAHSRFGGMIMPSQRKKEQEESPLAKVTRDSSKITAEQVHGLMSQVIKDILFNSVHPSSKASTSAPPDSSGPEPMVEA

SEQ ID NO: 213504 - protein, 77 aa, Zea mays
  Clone ID: MRT4577_126314C.1.pep
DEEKLIIHLHSLLGNKWSAIATKLPGRTDNEIKNYWNTHLRKKLLAMGIDPVTHQRRTDLNLLAAGGFTNLLAAANL

SEQ ID NO: 213505 - protein, 101 aa, Zea mays
  Clone ID: MRT4577_126315C.1.pep
MHLTLEFGGGLELLLENSTKVHKVEVTTPKDGQGKVTMKFLLSWVKENLIKERPEMFVKADSVRPGVLVLINDCDWELCGGLDAELEEKDVVVFISTLHGG

SEQ ID NO: 213506 - protein, 34 aa, Zea mays
  Clone ID: MRT4577_126316C.1.pep
FPGDKDPGGVRTGTNMVFWKWGEGPTQRWKIVPW

SEQ ID NO: 213507 - protein, 100 aa, Zea mays
  Clone ID: MRT4577_126317C.1.pep
AQQLRLKPSPTQAPKAISYVTRNTAERHLIKVTVLLKHQASSNDLCPKISLGRAALGAAVGGTGPGVGYGRPSGAELQRRHADPGEGKVGGRPDGWGWGR

SEQ ID NO: 213508 - protein, 69 aa, Zea mays
  Clone ID: MRT4577_126318C.1.pep
EHTCSDQLSNMAFRNATVKSMTIDTLKMHYIIQSNPVSRRWVRFRLLSVHHYDADPSASYGMLCGISNT

SEQ ID NO: 213509 - protein, 407 aa, Zea mays
  Clone ID: MRT4577_126319C.1.pep
MAREAASEATASRESGAEAAGECWSEALKSFLDHIPVSSVPGALQPTASPAVEVKLHGSVLGALDAMYSSNAAGAVIIDVVHSSLGKYVDRDIGFVEFSSLVLWALEELGKVESEPTDSTSDFLSTLKQHHQIAETKIAWLAKLFLWEPFFPVRTHDTLFHAMLLFSKHHRLNVAPVVESMNSSVIGFVTQDAVMELLLQSSGLEWLDKIADKQLSEFRFANVRKPVLVYSDQTLADGLHILSKEKTGVAVIDRKTSRLIGSLQCSDLYLFLDDSTLFSKRTTTTLEELISLNNKTDRKCSTAENSCAPGRNILALRSRQSGMVGLPATNLESDTLKQAMEKLTTLRSSCSFIVDEHGRVQGVVTTRDIISVFSPLCMDSRIDGATFFSAALEQAGCRVENGQMFQN

SEQ ID NO: 213510 - protein, 41 aa, Zea mays
  Clone ID: MRT4577_12631C.1.pep
LFNLKKQKTSNNNLFLNKKKNQTTTFNKQGTLIYTPKKGFQ

SEQ ID NO: 213511 - protein, 56 aa, Zea mays
  Clone ID: MRT4577_126320C.1.pep
TPEHGMIRFFPCQEKDSATYFGRGNKKMQNAVSCTGELMALLLIPQKRSQTCLHGC

SEQ ID NO: 213512 - protein, 62 aa, Zea mays
  Clone ID: MRT4577_126321C.1.pep
ITNLLVAAIYHQRWHLSIPYLYQETRSTMFNSVVRDCLFFLNIGKLFFLLKIINKFHVSFQV

SEQ ID NO: 213513 - protein, 145 aa, Zea mays
  Clone ID: MRT4577_126322C.1.pep
APNAVVFRSMAVLGVDGFSSLPENCLTLCYVFFAAAIVINLIRDLVPKKVSRFIPIPMAMAIPFYIGAYFAVDMFVGTVILFVWQRLDRAKADTFAPAIASGMICGDGIWVLPQSVLALAKVKPPICMKFLSRAMNDKVDVFLGS

SEQ ID NO: 213514 - protein, 135 aa, Zea mays
  Clone ID: MRT4577_126323C.1.pep
IELKSILGAIKSTGRRHLDQIELLVMWLLLNHLFFSGKHAATSPSSIGGDLLFLRSDEEHSVVMGEEGNRQGSPRLAAPSDSSLERHPPIIYSTSSAPYPAPNGVPVTRWHRRLQLSSLSLRVCMTPARSQTRLR

SEQ ID NO: 213515 - protein, 77 aa, Zea mays
  Clone ID: MRT4577_126324C.1.pep
AIPPPGSKLVFSNNMAFFLSPQLGCQNAPRRHSGGSCCIMVMIIRHPAPMPKHAQVGPESNPFVAGLTFFFNVAKIR

SEQ ID NO: 213516 - protein, 76 aa, Zea mays
  Clone ID: MRT4577_126325C.1.pep
YSKLYALEYPNINTTLHLCKFIMKIQRHSLISPSLQLYGSCAVQITDLKQKWQCGFCSALGLSPVRGHRWFDYCVH

SEQ ID NO: 213517 - protein, 41 aa, Zea mays
  Clone ID: MRT4577_126326C.1.pep
LLPKARAYAHVLLGDDRAATVIVHLLMVSSIGAAWVDHLIP

SEQ ID NO: 213518 - protein, 164 aa, Zea mays
  Clone ID: MRT4577_126327C.1.pep
ETVAVLRIHSGIAESGVIDISSIGVVSSETVVWKEYIVGRVSCRGVQYTSPLGQCSCPVVADLRSMSTAVCHEASAIGLVLVDIYALHLEVGDHHISCAGMASHVCCRARPLCKVRFWFPHLSPWMRRISLMHGCRRGSSQRASRGTEYERHERKVLGRNPARP

SEQ ID NO: 213519 - protein, 84 aa, Zea mays
  unsure (1)..(84): unsure at all Xaa locations
  Clone ID: MRT4577_126328C.1.pep
AAQEAALIGTGKKKRHARPPLSGERARDFVLTALTGLAKERAEDPPMEAMCVRREGRGRDGGEAAGTKSRLSPGRXPQXKRGRV

SEQ ID NO: 213520 - protein, 111 aa, Zea mays
  Clone ID: MRT4577_126329C.1.pep
GPPGCFFCPGPGGGGLKIPPLSLAFAPGFYLAPPFNFLPPRFVFFFPVIKNGGVLGFVVPAPWFFPGKKNPPLFPGCFFEIPLFCWVFFSGGFPNRFFGFMFRENFNWVPW

SEQ ID NO: 213521 - protein, 102 aa, Zea mays
  unsure (1)..(102): unsure at all Xaa locations
  Clone ID: MRT4577_12632C.1.pep
VASNRSSSKENPWFYMGSPHNMIMVKNAILXMFAGLFGQAPWSTPKSMPGLNLXAHDSGLHRGDPKGFTLANMMAFGSVAHILGVGIVVGIKNPGALDQIIG

SEQ ID NO: 213522 - protein, 81 aa, Zea mays
  Clone ID: MRT4577_126330C.1.pep
LCLFGHNKCMARVCSRAPKRQIAWGTTIAKAGLFVASVTVHSDQRRPSLAQLSKSYTDVDGSRNVPGPARQRDHQANDSLS

SEQ ID NO: 213523 - protein, 36 aa, Zea mays
  Clone ID: MRT4577_126331C.1.pep
TQALAPLMRQPALTALQAFKSEKGGHAFAYTLTHAS

SEQ ID NO: 213524 - protein, 101 aa, Zea mays
  Clone ID: MRT4577_126332C.1.pep
MENDIAAAEIFGGVVGMENDIAAAEFSGMVGMEDTAATPVCHASACPVVCHSEEPGGSKDSQDKQLTSEPSKEIVWGALQFEDRWKEEGMQLIACEDSIYA

SEQ ID NO: 213525 - protein, 103 aa, Zea mays
  unsure (1)..(103): unsure at all Xaa locations
  Clone ID: MRT4577_126333C.1.pep
PLFPYLPPYYPDWYYIMAAWISRKSYLXQXILVDSFHKIYSGRQRNGYLPPHFCNSSGAVARNILHLLQIMGIIDVDPKGGRLITNHRKHDLDQVAGRVAAEA

SEQ ID NO: 213526 - protein, 35 aa, Zea mays
  Clone ID: MRT4577_126334C.1.pep
NLGVKPVLVIIRKTFRVPVGKMFLCFFQKNVLGKT

SEQ ID NO: 213527 - protein, 61 aa, Zea mays
  Clone ID: MRT4577_126335C.1.pep
SRDFEHAQTHQAKLPSIYLTTMATKGGPYLRLSPSLRAHHMRALFLIADWLLVLLYHTVSI

SEQ ID NO: 213528 - protein, 81 aa, Zea mays
  unsure (1)..(81): unsure at all Xaa locations
  Clone ID: MRT4577_126336C.1.pep
NPVLILAFVGAAVAVPSDDDDKIVGGYTCAENSRPYQVSLNSGSHFCGGSLIXEQWVVSAAHCYKTRIQVRLGEHNIKVLE

SEQ ID NO: 213529 - protein, 182 aa, Zea mays
  Clone ID: MRT4577_126337C.1.pep
GPALVLEVEHCVVRPDAPAEEAGRVRVVQTVALGREARLRGVKVFAEQWYGPFRDGEQLGGCAVGETPFAAGEKLDVAEVIGQWETTDAAAARFSGDLDPETGKFAVLSPDQPRKLVRDAEGVVTLPKQLWSAFKELGDGEFLCEVGCRPRAPAVGDHLTSGPIGHTRSTVITQQRTKRAAR

SEQ ID NO: 213530 - protein, 83 aa, Zea mays
  Clone ID: MRT4577_126338C.1.pep
PFTTWLSLTSFEPLTFKNTTRNPFPHPHNGFRHRLKPFRHRDALQQRATLHNRLFRAVVPQQPVLDPQQPQLPQRQRGRVPRL

SEQ ID NO: 213531 - protein, 380 aa, Zea mays
  Clone ID: MRT4577_126339C.1.pep
MPLLPTQLRLLPLSLPDARQRRGILPPAAAAAALLPSWSCSPPLSRLRSRGRQAKTRLRVVSPETSSTAATDAATTTAGAPPDNSKWAEFATRVSGEWDGFGADFTASGDPVELPEKVVPEAYREWGVQVVDWQTQCPTLADPGAPCALHYRLVRLLPTVGCEADAATVHTSHQRHASSAAAFAYAAAGSYVAAWPRGPALVLEVEHCVVRPDAPAEEAGRVRVVQTVALGREARLRGLKVFAEQWYGPFRDGEQLGGCAVGETPFAAGEKLDVAEVIGQWETTDAAAARFSGDLDPETGKFAELSPDQPRKLVRDAEGVVTLPKQLWSAFKELGDGEFLCEVGWALGGGGAVTSRCVLSKDGDVKEIAAAHERRVSETT

SEQ ID NO: 213532 - protein, 115 aa, Zea mays
  Clone ID: MRT4577_12633C.1.pep
IFFFFFFFFLGFFFFLGFFSFFFFFFFFFLGERGPVFNKFQGPEKPLGKPFPNPGAGFQSKKRPRGPSFGGGPPNPPPRGGSLTPWNPPGGPQKMFAGPNRGLGGPQLPKPTPPP

SEQ ID NO: 213533 - protein, 67 aa, Zea mays
  Clone ID: MRT4577_126340C.1.pep
GGYSYLKRFEKTLGHHTCCCKCQIVQGQFCGDSLYMRYGENVVEVKKNPNRICQGWRGIYNCRICRT

SEQ ID NO: 213534 - protein, 71 aa, Zea mays
  Clone ID: MRT4577_126341C.1.pep
SFHELHWFKLSLRHIYAYTCASQLAALPVAYSNCSSISPFTVGSRLCVCRDYPLLALSGSSTSPFSLLVLT

SEQ ID NO: 213535 - protein, 113 aa, Zea mays
  unsure (1)..(113): unsure at all Xaa locations
  Clone ID: MRT4577_126342C.1.pep
VLLAVFALPHLFASLGVHSRAGAAYSAGLHSHLYNGFVCAVSTPLVCTRFGGLGSKARFPIWLCGRPHLLEGGRGPAXAGLXPRGAVSCXGVRRPPPPPVWRARPAXXXWLLP

SEQ ID NO: 213536 - protein, 73 aa, Zea mays
  unsure (1)..(73): unsure at all Xaa locations
  Clone ID: MRT4577_126343C.1.pep
MSARGPVTTLAQRHPVGITSAAYHRDITGTLIRNMRKLGDIMEMMFGGRYVIMVMAVFSIYRGLIYNEFXSIP

SEQ ID NO: 213537 - protein, 106 aa, Zea mays
  Clone ID: MRT4577_126344C.1.pep
VPDDEAKKSSSVAPSAAAERSSNGLLRGHRGSEGAVPDPCMTPRPPPTSTASLLPSSRRSRRGSVEEENAGKESDDVSKASRGTSASEFVQLWKLGSSFLESPQKV

SEQ ID NO: 213538 - protein, 90 aa, Zea mays
  unsure (1)..(90): unsure at all Xaa locations
  Clone ID: MRT4577_126345C.1.pep
GIIKGGGGKNEMSNKSVVEPTLXFXIVQXPXRVGSVXGIXVXRXVTYGGGESSALHEPRILPXESLXRGXCMCQGERRTSINHFHEKLFK

SEQ ID NO: 213539 - protein, 87 aa, Zea mays
  Clone ID: MRT4577_126346C.1.pep
MITESPDGIQTNLNIGVLTRSQLLTYHPDRDIHPLLIQALIICYSFLHALHLEVYQGFCMVHDVIERLFLCVIEYDRMLYMVDGHGV

SEQ ID NO: 213540 - protein, 46 aa, Zea mays
  Clone ID: MRT4577_126347C.1.pep
PRPNPESPPPQRAPNQANTQSQHATGTVPNPNMTHSISIPAVSREP

SEQ ID NO: 213541 - protein, 91 aa, Zea mays
  Clone ID: MRT4577_126348C.1.pep
LCSSPRVLSLSLARGDDSASRLPPPPLPSFPALRLIPPPRRAPTTYPGASPPHVGSVSIREGPRDRDLVVAGGLAAFVLGVYYYTMRALGG

SEQ ID NO: 213542 - protein, 113 aa, Zea mays
  Clone ID: MRT4577_126349C.1.pep
GSVRVLLNLLKLVLRGFYALNRLTQPCFYKRGGRMFSFWPLPQLKGNGSQGFKAPKKGQPPFFFPGQKMGVGCPQIGKKTGAFKFLKPGDKTRAPWAPPPLRLFQINFTPLSF

SEQ ID NO: 213543 - protein, 448 aa, Zea mays
  Clone ID: MRT4577_12634C.1.pep
MRLAGVRRGDPRQGHHSQWSHRWGACALRFLRGGAADLVFFLLLLEGRNLVGVGAFLPSLDFKDVHHAARLQSPAGGDPSWWREASRAAAFPTLSFKDVHHHCWGGRRAESGPCPPHGLVTRFFLQHLEEKDVHQPCRGGEPRLRGAGWLQAVSCSVSGSLARMALVPPPTLPPPSSGAWLSVHRTGDGRTVRRRTGARTFLHALRRPPSPEDGGEDLFAMALRGFRKDSGRELPTRHHWCLVVYTCRVEMELGFRLKGTHHGVVECAGFWVRNQAKQPHRLRTTPWNGLPLFRAGPQAVGPFCFRREVINYKPGCSIQMSSCLMGLELFGWTDRPGLRGRTSPGLGPDPAFPSAFDEGALVFGCGHSCMNLSEVWTRGESRRVFRGRQVKRPNPLGLKCDTITSPKRLVNTFIQQMIPDLLKRDKPIKVAINFKSWSTTQDISSEWG

SEQ ID NO: 213544 - protein, 276 aa, Zea mays
  unsure (1)..(276): unsure at all Xaa locations
  Clone ID: MRT4577_126350C.1.pep
PFLFLNSSSTRRTTKRAAPIPHHLLGPEQQILEATGETFSRQLWGPWAQNGSHSGGGGGGGGGVNPSNGGTGAALRHDPGLAREWSTEEQTILDELLVKYASDLPVVRYAKVAMKLPEKTVRDVALRCRWMNKKESAKRKKEDHNSSKKSKDKKEKVSDSSSKPPVHMVGRPNVPPYPLPVLPMDDDEISSKAIGGPTGEILETNAHVLGQISSNLSNMQIQDNISLLCQTRDNILRVLKEINDAPDIMKQMPPLPVKINEELVNSLLPRXTVPMQ

SEQ ID NO: 213545 - protein, 241 aa, Zea mays
  Clone ID: MRT4577_126351C.1.pep
MGANGHPPASTVAQNGSHSGGGGGGGGGVNPSNGGTGAALRHDPGLAREWSTEEQTILDELLVKYASDLPVVRYAKVAMKLPEKTVRDVALRCRWMNKKESAKRKKEDHNSSKKSKDKKEKVSDSSSKPPVHMVGRPNVPPYPLPVLPMDDDEISSKAIGGPTGEILETNAHVLGQISSNLSNMQIQDNISLLCQTRDNILRVLKEINDAPDIMKQMPPLPVKINEELVNSLLPRPTVPMQ

SEQ ID NO: 213546 - protein, 288 aa, Zea mays
  Clone ID: MRT4577_126352C.1.pep
MAREKFINEGDENSRYFHLIAKGFYDGVLDIKRLNFGLVTLLPKVDNPIDMRNFRPICLLNVCYKIITKVLTNRLASCITKVISEYQYGFIKGRYIMDGVVSLNEILHEGFGDIWCDWVMKTIRGGKVAIKTNDLIGPYFSTHKGVRQGDPFSPLLFNLVADGLACIIQKAQERGKANEFVNLYADIFTCPVGCLPMKYLGVPIDNKKITSFWKNSWIGDGPLAVKFPVLFDLALDKDVSIKRIELIGVWVTKVLLLILCIRKIRLIRPTDSCGNLSYHKKSKSSFGL

SEQ ID NO: 213547 - protein, 286 aa, Zea mays
  Clone ID: MRT4577_126353C.1.pep
MEVGGQEVKPGATVSCKVGDGLVIHLSQAALGESKKASENAILSVNIDDKKLVLGTLSVEKHPQISCDLVFDKDFELPHNSKTRSVFFRGYKSPVPLFESNSGEDSSDEELKTDQIPLQNNEIKISAAKVPAKDDDDDVFIILAMMMMIYSSDDDDDDFTTSDSDNEMSEEDDSSDEDEMSEEDDSSDEDEMSGGADPSDDSSDESGSEHTSAPKKTDVVVGKKRAIKAEAPYGKKAKSEQSSQKTGDKASTSHPAKQSIKTPADKSRKTPTADKKSPKSGSHGCK

SEQ ID NO: 213548 - protein, 121 aa, Zea mays
  Clone ID: MRT4577_126354C.1.pep
PSSYKRWGAGSTSSVFIVNSFDELERPALDAMRATIPAVYTIGPLASDTEQVVPRGPLNAGSCSLWQEDQSCLAWLDARKPQPWSVVYVNFGSVTVMSGQELAEFSWGLASSGHNFLWVVR

SEQ ID NO: 213549 - protein, 68 aa, Zea mays
  Clone ID: MRT4577_126355C.1.pep
SDLGRRQRLCVIVSHLARPKREITLAGDLLSSSATGRPVLVKMPALHVLSWFLVISLCTVFIFSIYRH

SEQ ID NO: 213550 - protein, 72 aa, Zea mays
  Clone ID: MRT4577_126356C.1.pep
HLFPFFFFFSLFFFLQFPFLFLVFFFYILKLKKKKKIKKKKKKKKKKKKKKKKKLKKKKKKKKSLYLPGRPL

SEQ ID NO: 213551 - protein, 51 aa, Zea mays
  Clone ID: MRT4577_126357C.1.pep
PTRPVPLKLSVKQALYVAPVMSYVHGRAFIHIDLTSHNLLISADKAITIAD

SEQ ID NO: 213552 - protein, 104 aa, Zea mays
  unsure (1)..(104): unsure at all Xaa locations
  Clone ID: MRT4577_126358C.1.pep
MPPKLDPSQVVEVFVRVTGGEVXAASSLAPKIGPLGLSXRKTGEDIAKETHKDWKGLRDILMLIVQNGTPRGPECPQKRCAIDWRCTVHKRAYFFSTPPRQNAL

SEQ ID NO: 213553 - protein, 55 aa, Zea mays
  Clone ID: MRT4577_126359C.1.pep
VYFVRPVFVVAPLCFFCGPLCASCWCCFHPRPQKTLATTSMNLESMGYITPEGFN

SEQ ID NO: 213554 - protein, 94 aa, Zea mays
  unsure (1)..(94): unsure at all Xaa locations
  Clone ID: MRT4577_12635C.1.pep
AQNXGKAHCAGKADLGEPFVYKHIGSMASVGRYKALVDLRENKDAKGVSMAGFLSWLMWRSAYLTRVVSWRNRFYVAVNWGTTLVFGRDNTRIG

SEQ ID NO: 213555 - protein, 38 aa, Zea mays
  Clone ID: MRT4577_126360C.1.pep
LTTSVLLVNTRWRSSSYCNYWRSLHYFPSLLPPADQHF

SEQ ID NO: 213556 - protein, 559 aa, Zea mays
  Clone ID: MRT4577_126361C.1.pep
MAASTAAPCYDAPEGVDVRGRYDREFAGILTRDALDFVAGLQREFRAAVRYAMEQRREAQRRYDAGELPRFDPATTLVREGDWTCAPVPPAVADRTVEITGPAEPRKMVINALNSGAKVFMADFEDALSPTWENLMHGQVNLRDAVAGTISFRDAARGRTYELNDRTAKLFVRPRGWHLPEAHILIDGEPAIGCLVDFGLYFFHNHAAFRAGQGAGFGPFFYLPKMEHSREARIWNGVFQRAEKAAGIELGSIRATVLVETLPAVFQMNEILHELREHSAGLNCGRWDYIFSYVKTFRAHPDRLLPDRALVGMAQHFMRSYSHLLIHTCHRRGVHAMGGMAAQIPIKDDAAANEAALELVRKDKLREVRAGHDGTWAAHPGLIPAIREVFEGHLGGRPNQIGDAAGHEGASVKEEDLIQPPRGARTVDGLRLNVRVGVQYLAAWLAGSGSVPLYNLMEDAATAEISRVQNWQWLRHGAALDAGGVEVRATPELLARVVEEEMARVEAEVGPDRFRKGRYAEAGRIFSRQCTAPELDDFLTLDAYNLIVAHHPGASPCKL

SEQ ID NO: 213557 - protein, 281 aa, Zea mays
  Clone ID: MRT4577_126362C.1.pep
HPSGWDYIFSYVKTFRAHPDRLLPDRALVGMAQHFMRSYSHLLIHTCHRRGVHAMGGMAAQIPIKDDAAANEAALELVRKDKLREVRAGHDGTWAAHPGLIPAIREVFEGHLGGRPNQIGDAAGHEGASVKEEDLIQPPRGARTVDGLRLNVRVGVQYLAAWLAGSGSVPLYNLMEDAATAEISRVQNWQWLRHGAALDAGGVEVRATPELLARVVEEEMARVEAEVGPDRFRKGRYAEAGRIFSRQCTAPELDDFLTLDAYNLIVAHHPAIEIRTDDQQT

SEQ ID NO: 213558 - protein, 598 aa, Zea mays
  unsure (1)..(598): unsure at all Xaa locations
  Clone ID: MRT4577_126363C.1.pep
MAASTAAPCYDAPEGVDVRGRYDREFAGILTRDALDFVAGLQREFRGAVRYAMEQRREAQRRYDAGELPRFDPATTLVREGDWTCAPVPPAVADRTVEITGPAEPRKMVINALNSGAKVFMVSKRARKRGCRILSLSLSLSLSLSFSRSELRPREREKRXADFEDALSPTWENLMHGQVNLRDAVAGTISFRDAARGRTYELNDRTAKLFVRPRGWHLPEAHILIDGEPAIGCLVDFGLYFFHNHAAFRAGQGAGFGPFFYLPKMEHSREARIWNGVFQRAEKAAGIELGSIRATVLVETLPAVFQMNEILHELREHSAGLNCGRWDYIFSYVKTFRAHPDRLLPDRALVGMAQHFMRSYSHLLIHTCHRRGVHAMGGMAAQIPIKDDAAANEAALELVRKDKLREVRAGHDGTWAAHPGLIPAIREVFEGHLGGRPNQIGDAAGHEGASVKEEDLIQPPRGARTVDGLRLNVRVGVQYLAAWLAGSGSVPLYNLMEDAATAEISRVQNWQWLRHGAALDAGGVEVRATPELLARVVEEEMARVEAEVGPDRFRKGRYAEAGRIFSRQCTAPELDDFLTLDAYNLIVAHHPGASPCKL

SEQ ID NO: 213559 - protein, 63 aa, Zea mays
  Clone ID: MRT4577_126364C.1.pep
LVPVVLWFIALDSNVSCAHTRGFTCGEQHRPVQQHHYTQHHPPQQQHHPPPPHHQQQQQQQQQ

SEQ ID NO: 213560 - protein, 874 aa, Zea mays
  unsure (1)..(874): unsure at all Xaa locations
  Clone ID: MRT4577_126365C.1.pep
MGMAGAPASNHAEVACTGMAWATAAGGGGEWRQLRDWGRIFREEMEMRVKSMIKLIEINADTFAKKAELYFKNRPELANLVEETYRSYQALADRCDRISGELHKSNHTITTVFPEQVQLSLQNDNGDGFPRGITGINIIRGTSPASKRTQTHRRITSQMSKEKAQEEIERLQKEILVLQTEKEFFKCSYESSLDKYLDIERRATETQEEVWSLQETFNTNTVIEDNEARALMAARALISCEDTLINLQDQQNRSCQEATTEFQRVIDTKKKLKAFKSECGHSENQKELSDQQHIVTSSAHPSIENNGPILQDHRLHLQEICQKIKLQFNSCSEASVVHLAGMVDEFVDKVIALEIAATTQTAQINRMRAEADELQKCMNSLEEEKEGLVGDSNKLSERLRQVEEVLQTIQRIEKSVHIENGNIQRQLTEACNNLTDFVERLDVPLSEETIDSSEGSKGIASEEDADKPDTLSDPFQADSGTVGESMDGDSLYSFDISSEAHEEDVDDTLGWQQVVLNGLEGKDKILLKDYASILRNYKDTRKQLSEIEKKNQEYHLDSMSKTEELKSVNATKDDEIHSLRQILSSLQSKINTYRIQFVEKSEESSKENNDPCLEDKEIGEIEECMKNCQNEEPHASSLEKKFREEINKVLDESLDFWLRFSTSYHYIQKFQKTFDKAKPEVDRLTDAKVLEGLDTGCTGQFVRKQEPTILEKKLRDLSTDLQVWLEKNVLLQGELERRFLLICNIQEEISKVTTLNRTNEAHFTPHASAHASGEVSNMKQENNKVTKELQAGLEHVRGLQVEIGRTVLKLRDNIELSIGRSSRAHQNFRYLSGKAGVPQRTSLFGSRTKKTSLFSCMPPIXPKPISDMRSSLFR

SEQ ID NO: 213561 - protein, 76 aa, Zea mays
  unsure (1)..(76): unsure at all Xaa locations
  Clone ID: MRT4577_126366C.1.pep
RPWTRRSLSSGCISRLTSPRRAGYVVAAYLLAILAGNASPSVHYLTGILDSADXEDDNEXMELLLSQLTCKDITDL

SEQ ID NO: 213562 - protein, 45 aa, Zea mays
  unsure (1)..(45): unsure at all Xaa locations
  Clone ID: MRT4577_126367C.1.pep
PRLDVDIGERNRELKSTSKRGHCHIYIIPXDYVIAILMIFFGFHT

SEQ ID NO: 213563 - protein, 94 aa, Zea mays
  Clone ID: MRT4577_126368C.1.pep
GVPDLSRFYPGPQHWPDAVAGEPSAAPWALPAAEATTVKTTSRASSDGGACPVDHRALGARAACKRLIGHVGQLYICGRSTTLHHPAWERTWLW

SEQ ID NO: 213564 - protein, 171 aa, Zea mays
  Clone ID: MRT4577_126369C.1.pep
MASEWEMAMGVELGMGMGGTYHHNASSITTAPMMMSSHPHSHSGGAASYSTPHHHHYYGGMPPMGDAMRVDDLLDLSTPGAGAHEFFPTAAPATDKGHHSSGAMGEPSPTANSSDHRTSALSFADEFYIPTEEAAELEWLSKFVDDSYSDMPDYSSDPHAAFVKAAAAALS

SEQ ID NO: 213565 - protein, 62 aa, Zea mays
  Clone ID: MRT4577_12636C.1.pep
YYYKPINVSMYHLSQMLASIALQTCLYIYSIMLINRNISMISNGCVINSNHVCNMWANSKTL

SEQ ID NO: 213566 - protein, 76 aa, Zea mays
  Clone ID: MRT4577_126370C.1.pep
HQISIPYTEGILYTSTTHLDSRHLLLYKPTYSHTYSLGHIIHTKTPSLYTRLTLLLKTKLYTPQLTLIMSHPNSTV

SEQ ID NO: 213567 - protein, 72 aa, Zea mays
  Clone ID: MRT4577_126371C.1.pep
MLQAQMVRITGFLDERSACLTKFAKDADSEFYLIGQNAMKELDAVGDQVSVSCNQNSAYCYPLFAIKLRCLV

SEQ ID NO: 213568 - protein, 207 aa, Zea mays
  unsure (1)..(207): unsure at all Xaa locations
  Clone ID: MRT4577_126372C.1.pep
MCCLQDLGDDSRFIEFYNLVFMQYNKXNDGSLEPLKQMNIDTGMGLERMARILQKVPNNYETDLIFPIIEKAASMALVSYAKADDATKINLKIIGDHMRAVVYLISDGVIPSNIGRGYVVRRLIRRVVRMGRLIGIRGDGHGNSEGAFLPSLAEVVISLSTEIDSDVESRRRSILGELQREEMRFIQTLERGEKLLAELLDEALLNA

SEQ ID NO: 213569 - protein, 108 aa, Zea mays
  unsure (1)..(108): unsure at all Xaa locations
  Clone ID: MRT4577_126373C.1.pep
ARATVQVFNAMMGVYARSGRFDDARQLLDTMHDRGIDPDLVSFNTLINARSKSGXLAAGVALDLLFEVRQSGLRPXDVITYNTLISACSQSSNLEDAVTVFEEMIASE

SEQ ID NO: 213570 - protein, 168 aa, Zea mays
  Clone ID: MRT4577_126374C.1.pep
NLASNTKLSHAKLPTDILARLDAVKSDDELVKQVGVQIMDEIVEHIKARPDTCRRGFHFYTLNLEKAVSHILEDTKLIPSTLIDDDEVIVETTPAINLEPPPNGIMAHRRRSSAGNSGPRNRMIVSHGSAGPARNPSYEATGEEGGIPRGAINNPANTLTISEREGSP

SEQ ID NO: 213571 - protein, 55 aa, Zea mays
  Clone ID: MRT4577_126375C.1.pep
VMNSLVLFLGHLGLLIKDCVLLFAMSKVSQKQKVLGPFGSPELESLGIGPKYLHF

SEQ ID NO: 213572 - protein, 63 aa, Zea mays
  Clone ID: MRT4577_126376C.1.pep
IIGKFKLIGFMLIFVRIQRISLIFIHRKVDLALKKGLRALLVNSSNYFIDISVLYQIYCTLAI

SEQ ID NO: 213573 - protein, 57 aa, Zea mays
  unsure (1)..(57): unsure at all Xaa locations
  Clone ID: MRT4577_126377C.1.pep
PPACLPSPEDLDMHVDANLLASMANVRXNPSTXLLWXYVCSDFXXLNIFNLSMRXLP

SEQ ID NO: 213574 - protein, 70 aa, Zea mays
  unsure (1)..(70): unsure at all Xaa locations
  Clone ID: MRT4577_126378C.1.pep
XXGPRKENSKTWRVGPKKTSIPPNINRRPVEPARKSSAKASWIFTWQAKTNSAESHKQRNPFFFRLKGRG

SEQ ID NO: 213575 - protein, 84 aa, Zea mays
  Clone ID: MRT4577_126379C.1.pep
WISPTVNGKFMLFLITEFSWMILGPFSDENPLSAGATHGVINSHVAGLYLAEVVAILLDLAGQHLIHVHDGRFCRRARWLLDGV

SEQ ID NO: 213576 - protein, 119 aa, Zea mays
  unsure (1)..(119): unsure at all Xaa locations
  Clone ID: MRT4577_12637C.1.pep
MTPRAHGLLMLLGGSTPASTTXIFPQCSQAPIASLXITSFLSPTVSYIYENPIIHLYKTHLSITASIXNLXPFLLLQSSYLSQHLHYMHLLSHTFMTNLLQQLLLPHTAXYSQPLLLIS

SEQ ID NO: 213577 - protein, 39 aa, Zea mays
  Clone ID: MRT4577_126380C.1.pep
PTRSERGLTILVASPIVGFLSDSTAMDMDFTYALDVCAT

SEQ ID NO: 213578 - protein, 72 aa, Zea mays
  Clone ID: MRT4577_126381C.1.pep
SDTGDVIDSDSHLAKIALLAAAKKREKSHYLPAACAVDRHDVLEFRALRCILSCSWTQHNTVMICRIYHREV

SEQ ID NO: 213579 - protein, 213 aa, Zea mays
  Clone ID: MRT4577_126382C.1.pep
MESAAGGGLGSMRAVLAILQWWGFNVTVIIINKWIFQKLDFKFPLTVSCVHFICSSIGAYVAIHVLKAKPLIHVDPEDRWKRIFPMSFVFCMNIVLGNVSLRYIPVSFMQTIKSFTPATTVILQWLVWSKHFEWRIWASLVPIVGGILLTSMTELSFNVFGFCAAMIGCLATSTKTILAESLLHGYKFDSINTVYYMAPLCTMILALPAMLLE

SEQ ID NO: 213580 - protein, 51 aa, Zea mays
  Clone ID: MRT4577_126383C.1.pep
QTGNYIDSRHDVTLKMPFFPEILSDYSEHRPLWRKRIQIWFSEIEEFKERN

SEQ ID NO: 213581 - protein, 204 aa, Zea mays
  Clone ID: MRT4577_126384C.1.pep
MESAAGGGLGSMRAVLAILQWWGFNVTVIIINKWIFQKLDFKFPLTVSCVHFICSSIGAYVAIHVLKAKPLIQVEPEDRWKRIFPMSFVFCMNIVLGNVSLRYIPVSFMQTIKSFTPATTVILQWLVWSKHFEWRIWASLVPIDGGILLTSMTELSFNVFGFCAAMIGCLATSTKTILAESLLHGYKFDSINTVYYMAPFATMI

SEQ ID NO: 213582 - protein, 138 aa, Zea mays
  unsure (1)..(138): unsure at all Xaa locations
  Clone ID: MRT4577_126385C.1.pep
PRRTHKNIKGRVSAVTDHLIPLYNAENTRRRRXMITPASPWIIPFLTVMQRYGYIVNFPNMYDHSPSKIVLKLTGRLPKSTVVTPRFYVATQEIXRWTARLIPSPHVGYMLLTISCVIMDIQDDKRNNVGDKVRVFVY

SEQ ID NO: 213583 - protein, 144 aa, Zea mays
  Clone ID: MRT4577_126386C.1.pep
MGSRPADAAGGQQQQQAEEPSMADVYGGHELTPLQKHAAFFDRNRDGIIYPSETYQGLRAIGCGVVLSAAGTVFINVFLSSKTVPANVKPPAFKFPIYVKTIQQGKHGSDTDVYDTQGRFVPEKFEEIFKKHAHTRTDALTDKE

SEQ ID NO: 213584 - protein, 58 aa, Zea mays
  Clone ID: MRT4577_126387C.1.pep
KISPCLGLKHKNTGFAPFCACLNGTCPLLWSKRAYPFKRPLIFMLKTRCKISEDNYYQ

SEQ ID NO: 213585 - protein, 65 aa, Zea mays
  unsure (1)..(65): unsure at all Xaa locations
  Clone ID: MRT4577_126388C.1.pep
DTQNPSLTHAVDHIGSNAIHKGWPAHALAMDDGAAAPGWXGXXXXETFSQAXGSLAXPGPGETIL

SEQ ID NO: 213586 - protein, 175 aa, Zea mays
  unsure (1)..(175): unsure at all Xaa locations
  Clone ID: MRT4577_126389C.1.pep
MGARVVARVIXAIDKLEDIVRQSGQPSGLRAVQNTGDHTVADGITGGPTTGTFTNYFKTSLMVTLMVILTDHKTDHESVMENILGIILSIAFCDIDYAMLGVHMNITGKNKVRNMIXFLFRMVLKMMVTMMGTILCEDMGEVMVYLYLYKDPEEAEEPDEEADFAAESDYQSADQ

SEQ ID NO: 213587 - protein, 165 aa, Zea mays
  Clone ID: MRT4577_12638C.1.pep
SSQPLKLLLHLQMDHPLVRHHHLLVVVGTELREPRHCYLTPFSESHLFPWFAQHAMPPSPWLLHLCYPQPYCISIFLINLNTFYGGGSAGRRTFRARAGRRQPGHRGEKSAQEARDGRLPPPPSARLISAGRVRVRGRKGVTARVRLGPRTRAKKVLYDCDPTAN

SEQ ID NO: 213588 - protein, 60 aa, Zea mays
  Clone ID: MRT4577_126390C.1.pep
NPQRHSFIMSRRSDACMQICSLLVKCIARNKNQNLIWIVPNEPNNQQQANYTSKSMLTLR

SEQ ID NO: 213589 - protein, 214 aa, Zea mays
  Clone ID: MRT4577_126391C.1.pep
MAYDGIYRFYIQVQSLSTKYDERCKIVGDVASNLTMDEATFRDSQEHRLEIYYTIIRPQKIVYIFREVQQCTLLSKTECSEECSYALSHQDTTLDRTLKNDGSAKKGTIIVWECPTLCSIIDDDEKVLITFASYNGNYNNKSPVAVVAVASATTAYAVITTTDEKPRDIVVTDDFDIKRTQPTSNSKKIVAETDVLTGQNGKLATRLAEVLDEN

SEQ ID NO: 213590 - protein, 57 aa, Zea mays
  Clone ID: MRT4577_126392C.1.pep
GLVFWRNEFRRKLIRCFFLKLELGYIECVLFFSEMMFYVIMCEVIYCTSNKCIVEIY

SEQ ID NO: 213591 - protein, 539 aa, Zea mays
  Clone ID: MRT4577_126393C.1.pep
MGNCCVTPKAADDAGGGKKPKEPKQKKGKKPNPFSIEYNRSGQASAPKLVVLRDPTGRDIAARYELGAELGRGEFGVTYLCTDRASGEALACKSISKKKLRTAVDLEDVRREVEIMRHLPKHPNVVTLRDTYEDDNAVHLVMELCEGGELFDRIVARGHYTERAAALVLRTIVEVVQMCHKHGVMHRDLKPENFLFANKKESAALKAIDFGLSVFFTPGERFSEIVGSPYYMAPEVLKRNYGPEVDVWSAGVILYILLCGVPPFWAETEQGVAQAIIRSVIDFKRDPWPRVSDNAKDLVRGMLNPDPKRRLTAHQVLGHPWLQNIKKAPNVNLGETVKARLQQFSVMNKFKKHALRVIAEHLSVEEAADIKDMFEKMDLNKDQMLSFEELKLGLHKFGHQMPDADVQTLMEAADADGNGSLNYGEFVTLFVHLRKIGNDEHLHKAFAYFDRNQSGYIEIDELRESLADDLGQNREEIINAIIRDVDTDKDGKISYDEFATMMKAGTDWRKASRQYSRERFTSLSLKLQKDGSLQMTSTR

SEQ ID NO: 213592 - protein, 109 aa, Zea mays
  unsure (1)..(109): unsure at all Xaa locations
  Clone ID: MRT4577_126394C.1.pep
MFLTFFVFQCCNAETEQGVAQAIIRSVIDFKRDPWPRVSDNAKDLVRGMLNPDPKRRLTAHQVLXHPWLQNIKKAPNVNLGETVKARLQQFSVMNKFKKHALRVHFNLI

SEQ ID NO: 213593 - protein, 106 aa, Zea mays
  Clone ID: MRT4577_126395C.1.pep
DGGRMLLAPPLAINTDQLRRHRRLMHPRIPWCRTSATDWSMGLQHSVLFIWLRVIFGTGHMNRLASKNDGGTATDWDLPTNEIISLRKRIKNIEYIVSETNKSPLS

SEQ ID NO: 213594 - protein, 151 aa, Zea mays
  unsure (1)..(151): unsure at all Xaa locations
  Clone ID: MRT4577_126396C.1.pep
ELKLGLHKFGHQIPXADVQILMEAADADGNGSLDYGEFVTLSVHLRKIGNDEHLHKAFAYFDRNQSGYIEIDELRESLADDLGQNHEEVINAIIRDVDTDKDGKISYDEFAAMMKAGTDWRKASRQYSRERFTSLSLKLQKDGSLQMESTQ

SEQ ID NO: 213595 - protein, 182 aa, Zea mays
  unsure (1)..(182): unsure at all Xaa locations
  Clone ID: MRT4577_126397C.1.pep
SVSSEFGSRADADGNGSVDYGEFVTLSVHLRKIGNDEHLHKAFAYFDRNQSGYIEIDELRESLADDLGQNHEEVINAIIRDVDTDKXVLLDQSVFKWMLACFSLLVXSFGVMVTRLNFVVRTIXTVFVVLFXDGKISYDEFAAMMKAGTDWRKASRQYSRERFTSLSLKLQKDGFVQMESTQ

SEQ ID NO: 213596 - protein, 159 aa, Zea mays
  Clone ID: MRT4577_126398C.1.pep
TRARPPVGLAHAVETALEEGRFADVLDAAAGQWPLGEAQELAVLALRCSEMRRKDRPDLNGRVLPALERLKDVAAKAREGAFQGHAAAPPSHFICPILQEVMVDPYVASDGYTYDGKAIELWLSTNETSPMTNLRLPNKSLIPNHSLRSAIMDWRSRSK

SEQ ID NO: 213597 - protein, 51 aa, Zea mays
  Clone ID: MRT4577_126399C.1.pep
REDQCTSNCGDLSQRWYHVPRSWLKPSGNLLVVLEEYGGDLAGVSLATRTT

SEQ ID NO: 213598 - protein, 141 aa, Zea mays
  Clone ID: MRT4577_12639C.1.pep
MSTENAEVISQTPATETNVEELKTEAKKVLEQAAVNNKRSLEVADETSNPVGDETSDALAEETEPAKNGNKNKKQRVAKEDNEDSNDVDEEEDEEEDEEGSEADADYDEQLSNGAADADADDLNEEEDGPEGDEEDVGDDD

SEQ ID NO: 213599 - protein, 89 aa, Zea mays
  Clone ID: MRT4577_1263C.1.pep
GREQMLARTAGEGARWRHRRLASAHHARDWHAAQGRCRGRDRLLDGRSHVLCCQSTIRTSVQVISHLQTGRARRVCSLAACDGTGVART

SEQ ID NO: 213600 - protein, 157 aa, Zea mays
  unsure (1)..(157): unsure at all Xaa locations
  Clone ID: MRT4577_126400C.1.pep
RRWRNGAYLMMIKPDGGQRGLIGEIIXRCEKKGLYLKAXRLRNVQRXXAEQRDAAXGCQRFSQGLVSPIISGPVGAMASMDKSXCTTGRKIMGAPNPXLVSEPGTIRGDFVVDIGRNVINXETXVESANKEIALWFPEGXLFDWQXSSQPTWHLTRG

SEQ ID NO: 213601 - protein, 96 aa, Zea mays
  Clone ID: MRT4577_126401C.1.pep
SPSGRSPSIWSSTASRSYPYQSTTPTLGTAYIHQGTPCMSRKRESATSGDTWKKTPRLMKRITTPSTLKTQRPLGLSCSRHAERSDCRHTRLFTCS

SEQ ID NO: 213602 - protein, 96 aa, Zea mays
  unsure (1)..(96): unsure at all Xaa locations
  Clone ID: MRT4577_126402C.1.pep
LGRVCPFXXRXSLGAPRFLXCCLGCLLLVLGGLGXLXXXLPLXFXXXLXXXPPPLLRRXGVAAXXLAAAPGFRXXVXXSPXXGXRGGGAGVRXRWG

SEQ ID NO: 213603 - protein, 61 aa, Zea mays
  Clone ID: MRT4577_126403C.1.pep
YTGTPAVCSFFLERLYVTNRTVSMGGVVQTTLCMGLSIRNSNETTRMSPTVIKLMSTSSTY

SEQ ID NO: 213604 - protein, 207 aa, Zea mays
  unsure (1)..(207): unsure at all Xaa locations
  Clone ID: MRT4577_126404C.1.pep
RASMVLGGAAFLAGAAVGGASVNVYMVILGRVLLGVGLGFANQAVPLYLSEMAPARLRGAFSNGFQLSVGVGALAANVINFGTEKIGGGWGWRVSLALAAVPAGLLTLGALFLPETPSSLVQQGRDRRDVARLLQKVRGAGVDVGDELDDIVAAGESAAGAGGGGLRRLLVERRYRPQLVMAVAIPFFQQVXGINAIAFYAPVLLRT

SEQ ID NO: 213605 - protein, 170 aa, Zea mays
  unsure (1)..(170): unsure at all Xaa locations
  Clone ID: MRT4577_126405C.1.pep
MQPSTESRWKESKEASGRKDGRPSKKXVTKTVKDGLHFPARRMDRYLXKNGXYTQCVGRPASTYAGVLDDLPGQGLDLAGNAGXDSQKTHMHPRHLLLAIHTDQRLAKLVAGWTIHHARRFANINPPLLAKKTEEKXASTGASKASKPTKTASTSTKIDIGGRSNLCMHR

SEQ ID NO: 213606 - protein, 104 aa, Zea mays
  Clone ID: MRT4577_126406C.1.pep
PMAHPFFPAGWGLFSSPCFFGFSPFFGPRGFPPFFLGWFFLWASPAFPFLSGLRFLSGFVRGWPFPRGPCFGPAFGWFCPFLGAPGGGPQFDEIRPLKGRPGKV

SEQ ID NO: 213607 - protein, 424 aa, Zea mays
  Clone ID: MRT4577_126407C.1.pep
MKVRRSEPVLVHATGAATTQEYYFLSNLDRNVAVLMKTVHIFSVSCDDVATLLRDSLSRVLSQYYPFEGRLAVREDGRLAVRNDRRGVPFVDAVSDYELQVVCDATAPGSELLGDLVYVSMQHENALEAPMLTVQVTTFKCGGFVLGLAMNHCLADGQSAAEFICSWAETARGVAMSTPPYLDRTVQRARPIPTVDFAHDEFAEIEDVSGLAGTFGKEPCVYRSFTFDAGKLHRLKQAASEQGQGGTKSSVFVALTAFVWVSRTRALRMLPDQKSKLLFAVDARLRVDPPLPPGFWGNAIIFACCISTARDLLSKPLSAAARSIREAIVRTDDAFIRSAVDYIELNSGARPSLMATTLVTAWNRLRFRAADFGWGEAIYSGPAELPQKEVAMFLRGVSDSQSTVLVIGMPVSCMQAFQETVDLL

SEQ ID NO: 213608 - protein, 45 aa, Zea mays
  Clone ID: MRT4577_126408C.1.pep
GKGFCPRLKKGLRPQKKKKKKKKKKKKKKKKKKKKKKKKKKTRGR

SEQ ID NO: 213609 - protein, 90 aa, Zea mays
  Clone ID: MRT4577_126409C.1.pep
RPFVIGLKWDSYIRCLDSSLSSAGEDVGLLLFVLFPPFIFSFSDLQIQYVVCRIGALVWWVCFQICRVSIQVPIRWWLKLGFSMALRAAS

SEQ ID NO: 213610 - protein, 43 aa, Zea mays
  Clone ID: MRT4577_12640C.1.pep
GLSGTELLLVGRNPSATASKGPWLLSWSRILSWDPTRNNYYLG

SEQ ID NO: 213611 - protein, 442 aa, Zea mays
  unsure (1)..(442): unsure at all Xaa locations
  Clone ID: MRT4577_126410C.1.pep
MEDAMAADGKSVLQGRYELGRVLGHGNFGRVHAARDLRTGRSVAVKVVAKDKLERAGMAEQIKREIAVMKMVSHPNIVELHEVMATRSKIYLALELVRGGELFSRIARAGRVREDVARCYFRQLVAAVDFCHGRGVFHRDLKLENLLLDEVGNLKVADFGLSALAGHARSDGLLHTACGTPSYVAPEVLGGKGYDGAKADLWSCGVILYVLLVGSLPFHEDNLMVMYRKMQRGEFLCPPWVSADARKLIGELLDPDPSTRITVARLVETPWYRKPLPVLPPLNLKEPTPDARRATSDKEEPEVLNAFHLISFSEGFDLSPLFDQGXRRRREXSAGGIRFVTREAASSVVSRLESLVTGRGANMRVTKSGSRGVRLEAVSRGRSGARLAVAAEIFSVAPSVLLVDVKKDGGDTMEYRSFCSEELRPALKDIVWASSQDTPGAA

SEQ ID NO: 213612 - protein, 152 aa, Zea mays
  unsure (1)..(152): unsure at all Xaa locations
  Clone ID: MRT4577_126411C.1.pep
METTSCFLTSKASSASRSTAVLPPTAPGFAKPKPCLQLLGSSRRRACCGSISARGAPEDGAAPPPIGPDWRSIRAQLYFKEQLPAVQTGGDRWAHPLAEPDKGCLLIATDKLDGSHIFXRTVILLLAATTALRPVKERLNHPSLLSNPWANG

SEQ ID NO: 213613 - protein, 302 aa, Zea mays
  Clone ID: MRT4577_126412C.1.pep
MASVTYIDDSHAEVIDPPKNEEMLDATELVGDHIQNSPKPNVASYGNVRELLECPVCLSAMYPPIHQCSNGHTLCSGCKPRVHNRCPTCRHELGNIRCLALEKVAASLELPCKYQNFGCLGIYPYYCKLKHESQCQYRPYTCPYAGSECTVAGDIPYLVNHLKDDHKVDMHNGSTFNHRYVKSNPHEVENATWMLTVFSCFGQYFCLHFEAFQLGMAPVYIAFLRFMGDDAEAKNYSYSLEVGGSGRKMTWQGVPRSIRDSHRKVRDSYDGLIIQRNMALFFSGGDRKELKLRVTGRIWKEQ

SEQ ID NO: 213614 - protein, 116 aa, Zea mays
  unsure (1)..(116): unsure at all Xaa locations
  Clone ID: MRT4577_126413C.1.pep
EARKXQILGIQKXAAGIRKDGPINWAAXFFFRQNVFXGXXKVVLNQGYLNFKKGEFLIGPPGRGRKXXVXENEAPLVQLLSGSGHSPSPARNXESWWSGQGPKWKPEMESGLQTCV

SEQ ID NO: 213615 - protein, 65 aa, Zea mays
  Clone ID: MRT4577_126414C.1.pep
FGSSQNEILNIRPSSMFNGRFLSRQAWDQHGLNKRRRVSKRKNMSSSKRYQRNIWVGTGIQNNNH

SEQ ID NO: 213616 - protein, 46 aa, Zea mays
  Clone ID: MRT4577_126416C.1.pep
CHSEIVLCCQLVSALLSQSESHSECNLDISSHYYVDDQPCLSIRCD

SEQ ID NO: 213617 - protein, 175 aa, Zea mays
  Clone ID: MRT4577_126417C.1.pep
MEAARDSMATLLDAGIFDSAQTLGCFLVSSGGASNEASISMKAESLVLHGDALYGEKEFRRALNVYKQAMQCSKSIPRQATSTTRISVSSTGRSPSPNSSNVMPFNENEVKCKIAICHSALHEHREALQEMEGIPSKLRSLKMNLMLGKLYRISRNNRAAAICYKECLRQCPYVF

SEQ ID NO: 213618 - protein, 51 aa, Zea mays
  Clone ID: MRT4577_126418C.1.pep
DMRSAEVGTDSCMPYYPFVRLVGFQVDFINLLRILPCGGHCLSSSSWRLTS

SEQ ID NO: 213619 - protein, 227 aa, Zea mays
  Clone ID: MRT4577_126419C.1.pep
MDITPLSQVRPGVYHYIICVRISRIWEFHGKNDDDPIKHLDLVIIDQQGTAMYAEVPQEAISTLQPQLQESMILIMRKIYVDNAKLSYKPVHGKYMIRLHPKTLLEKVNEDPQDFPKYTFHLTPFPELPQLEGNNEYFIDVIGRVTALSDATPFQTSSGLVRMKRLIHLVDLRENKIEVSLWGPRAEEFPGQEVFASEMNHVIGYICWDISQIPIGSPPFSKWHSLH

SEQ ID NO: 213620 - protein, 120 aa, Zea mays
  Clone ID: MRT4577_12641C.1.pep
DCSVPGFPHSGGHSLRSFQLEQPSDNVLCLQQHRGTCAYCNQPCASLLFFSILCGNFRGVCVIHFPLPGNLNNLVGFSHLYTKHTWCDTIILYTSLVLVVFKKCVVFHRFYLVLLWSFFL

SEQ ID NO: 213621 - protein, 111 aa, Zea mays
  Clone ID: MRT4577_126420C.1.pep
LRNIVALFLEFTGIDADPAVSGLPLPGASTATSDASSSRQRLATPSKARSRTRRATTSSIATSSHNADRDQCPRILGQDGDQLESTNIRSRTGRLLHRPRESGGKIRNSWN

SEQ ID NO: 213622 - protein, 72 aa, Zea mays
  unsure (1)..(72): unsure at all Xaa locations
  Clone ID: MRT4577_126421C.1.pep
KSQGQTXLSNVGLYLKKKVFTHGQLYVAVSRVTEKKGLKILIENDDGSCGTMTENIVYREVIQSIESHGNIH

SEQ ID NO: 213623 - protein, 277 aa, Zea mays
  unsure (1)..(277): unsure at all Xaa locations
  Clone ID: MRT4577_126422C.1.pep
YPGPAGVGLDPALIDASGDPTRQHPEQHTVGAPAYLHSEGKATLQDAYLSEEDDFPTEEELATLPRVPARIPWKIFTIAFVELVERMSYYGTVAVXQLHRQAPHDSHWCCHQPRRCAGPAWCPXWXQVAFSLTTFNAFWVYVCPLLGAWIADTYLGRFKTILYSVLVAEVGHVILVASAAPSVLKNPDTALGVFILGLIVMGLGTGTFKPNIAPLIAEQIPQEKMRVETRGTTRVIVDPAVTTTRIYNWFYFFINIGALVGQISMVYAERYXVGFWL

SEQ ID NO: 213624 - protein, 148 aa, Zea mays
  unsure (1)..(148): unsure at all Xaa locations
  Clone ID: MRT4577_126423C.1.pep
ALSENGGGGGHQTQQVGGLVLPVINQXALANLSPYXSQQQHFLAFNLLFTLNXLIIWLXERGXPFXXLXSAYSGGRHLLPFNPLAXLSPAAYLRRXPPLPFMPLAXXGRASFSAHPPLLPFSSSFAAVPVPLLPLPPLVPFAPLAFAL

SEQ ID NO: 213625 - protein, 170 aa, Zea mays
  unsure (1)..(170): unsure at all Xaa locations
  Clone ID: MRT4577_126424C.1.pep
AVWRLPWWGGGRAPASASAPSTRRWEGCDREFYQFSDQLRLQTAAFSGLSLGDSVWGAGGRRITSNDVLFAASASPAGAAXSSAVVGLTLNDGGPGLIGSGKLAFGGAGSGGAAGRCFGGLLPSVCLTVCISLLLLLGRRRLRRGLPLQLRRAGGSPGGELRVRPRRRRR

SEQ ID NO: 213626 - protein, 69 aa, Zea mays
  Clone ID: MRT4577_126425C.1.pep
ALGRVPLPVGRTPRRFWFVPFPFFPRPSIEAKAGPSVLNVWVLEPGFQRVVCFFGPLSPPLCSLARVTT

SEQ ID NO: 213627 - protein, 185 aa, Zea mays
  unsure (1)..(185): unsure at all Xaa locations
  Clone ID: MRT4577_126426C.1.pep
MKLLRRAGSLSRFYSLKXAPKVKATAAPAGVPLHPQDLEFTKLPNGLVIASLENYAPASRIGLFIKAGSRYEDSNHLGTSHLLRLASSLTTKGASSFKITRGIEAVGGKLSVTSTRENMAYTVECLRDDVDILMEFLLNVTTSPEFRRWEVAALQSQLRIDKAVAFQNPQAHVLENLHAAAYRNA

SEQ ID NO: 213628 - protein, 137 aa, Zea mays
  Clone ID: MRT4577_126427C.1.pep
LCADKRRIPRKQRVGFDDVQGIDEAKEELVEIVSCLHGSLNYKTLGAKLPRGVLLVGPPGTGKTLLARADAGEAGIPLFSVSARECVELFAGRGAARVRDLSKEAKEAAPSIIFIDELDAEGGSRGRRFNDERDQTL

SEQ ID NO: 213629 - protein, 107 aa, Zea mays
  unsure (1)..(107): unsure at all Xaa locations
  Clone ID: MRT4577_126428C.1.pep
FVLTATGEQKLAQASRTHADAGALFCCSATQARRAAINEKMLNDGVLKESCHGLNLAFFFIXQQDCTPREIRLMIQFPSFLTYVIHCVMELRNNKRICGKRWLQLNK

SEQ ID NO: 213630 - protein, 74 aa, Zea mays
  Clone ID: MRT4577_126429C.1.pep
SMMGYYMETIGAFLCTAGIQVSALFRCFKFFLRHWLFTCFAMLFVRGCLHLARSVGGVYSKLLWGSEVVGSICF

SEQ ID NO: 213631 - protein, 112 aa, Zea mays
  unsure (1)..(112): unsure at all Xaa locations
  Clone ID: MRT4577_12642C.1.pep
GLGAFFFFFFTYXTTKTHPLYYTTPYYKHSHXFPHIHQKPINPTKILTKQTPTNTNIIFIPLSYPHSTPKNNSTTHSLLQHPNIPPSSSPHTNPHTSHPIFTYFQNPIPNHP

SEQ ID NO: 213632 - protein, 69 aa, Zea mays
  Clone ID: MRT4577_126430C.1.pep
IHMRLYHCFLFLEHNCFLFPAQPRVTDIPCQHLEGQNHSWATAETLVHPYTPPAFTTVGLITHVKTGHH

SEQ ID NO: 213633 - protein, 75 aa, Zea mays
  Clone ID: MRT4577_126431C.1.pep
KKTSSSLRVGTPTPSALLYKTPIRPLNSNKERPPCVRVFYIRTTAQMLMNVPGLWVCAHLMVNMPGLMQCPSVCQ

SEQ ID NO: 213634 - protein, 122 aa, Zea mays
  unsure (1)..(122): unsure at all Xaa locations
  Clone ID: MRT4577_126432C.1.pep
YLEGTDNTTVADAHELKVILEHIVERISCISDAARTDRPXQITDYSYIEDALAAKATHTLKHLGLTHISCLCASEIGHVEXSQNPVLFAHXNSSIYYEDDADIGDPSQEGADFLRYAHDLPW

SEQ ID NO: 213635 - protein, 86 aa, Zea mays
  Clone ID: MRT4577_126433C.1.pep
YRPPNGGRRNQYPRGQRCISSASSTERPLRRWAAHLLSSLAGAITGVRDRHHNSHQIILLYNRSPRACRRRERETSAASSACGEAP

SEQ ID NO: 213636 - protein, 64 aa, Zea mays
  unsure (1)..(64): unsure at all Xaa locations
  Clone ID: MRT4577_126434C.1.pep
MGFHSRFLKIYLELPPIVQPLQMEEDLEQLKVFENSYRMKVIKVEQNARGVDAPEXIEKIEALT

SEQ ID NO: 213637 - protein, 132 aa, Zea mays
  unsure (1)..(132): unsure at all Xaa locations
  Clone ID: MRT4577_126435C.1.pep
TTNPRLTESYAQPHXCPCQQXHPSPXCYLHGTCGAGSSLILGQCVELLMHQRRPTATPYCSAQCQSLQLQCCQQLRQVEPQHLDQAIFEVVLQDILQHETNSSQVAALLTDHIAHDLTAMCGLXQPTACHYA

SEQ ID NO: 213638 - protein, 64 aa, Zea mays
  Clone ID: MRT4577_126436C.1.pep
RNLSSKDKPNLTSLSNLFTLTLLAKLFHCQNYYISKLSHFNQLAYYPSCPNHYNFQTDSPSQSY

SEQ ID NO: 213639 - protein, 89 aa, Zea mays
  Clone ID: MRT4577_126437C.1.pep
MRPRLSQRGDVSLFCSPWEMPPRPSWPPYNFSLWDLLEGPFLFLGGLYVWGATKKKKKKKKKKKKKKKKKKKKKKKKKKKKVLCVVTTA

SEQ ID NO: 213640 - protein, 102 aa, Zea mays
  unsure (1)..(102): unsure at all Xaa locations
  Clone ID: MRT4577_126438C.1.pep
MASFAAVSXEPVAIKGLAGSSISGRKLAVARPSARSIRRPRADAXGATDGDKSAYCDRSDVGNRRGQRCRSGCCRSRALEREIAQDFKTDRRFQRSGARRAP

SEQ ID NO: 213641 - protein, 117 aa, Zea mays
  Clone ID: MRT4577_126439C.1.pep
AGRKSRGDPASERERERERKKGSEEPKARSRRGGEKRDPRAGRGGRQQGGPQPPHPKATSGPEQQEERREEDKGKKGQARRREGGRHAREAEGAAGRQGGQQAGEQSKARPTGEKRG

SEQ ID NO: 213642 - protein, 117 aa, Zea mays
  Clone ID: MRT4577_12643C.1.pep
QNRKRLWASLIQGANQKVGLRPKSCGGLPGQKLRFFWETHQGSPGQKRPLFPNSVGGYFWPKKISPPLLIFPQKWFGPPPTILLPRGVFFPKRWLPFRVKQRGPRSFFRGSIIMAIC

SEQ ID NO: 213643 - protein, 71 aa, Zea mays
  Clone ID: MRT4577_126440C.1.pep
YMLWWQNQGNTGYIFHHTSRTGERTVPLDCRTPGQIALLSGTAKEPCFLSSPKKEAEGLSYAFATYYCLYT

SEQ ID NO: 213644 - protein, 76 aa, Zea mays
  unsure (1)..(76): unsure at all Xaa locations
  Clone ID: MRT4577_126441C.1.pep
FVDNFSDNYKFHTPPLIKIPIYKYYFNYNHKKSVKHHATPCIFFPFLLSKTKFHNIGCPRTVPIXGSPQINHHHAH

SEQ ID NO: 213645 - protein, 52 aa, Zea mays
  Clone ID: MRT4577_126442C.1.pep
IQAQNWFHRTQKNFLCCKFTGLILKGKTATLQGGFLNHNHAFEIMEHSFGPL

SEQ ID NO: 213646 - protein, 215 aa, Zea mays
  unsure (1)..(215): unsure at all Xaa locations
  Clone ID: MRT4577_126443C.1.pep
ARKGDANPPTRAHLPPQISRPPPPPTRCSSSAAXLAALLAVARQPLASASESDHKYKISEPVKLWVNKVGPYNNPQETYNYYSLPFCQPAENPAHKWGGLGEVLGGNELIDSQIDIQFLKNVDKGPICTIELDAKKVQQFTDAIESSYWFELFIDXDLPLWGFXVGETDKNNENKHYLYTHRNIVVKYNGNRVIHVNLTQESPKLLEAGRKLDMT

SEQ ID NO: 213647 - protein, 68 aa, Zea mays
  Clone ID: MRT4577_126444C.1.pep
QSDKPCVGPGFKISSSQEKFCRRNTSMRRSKIRAFRRKRSRRVLLFYAVLRLPTLKMVYESSMSDKYF

SEQ ID NO: 213648 - protein, 58 aa, Zea mays
  Clone ID: MRT4577_126445C.1.pep
YIRKKDDWKLIKEKKIKKKKKKKKKKKKKKKKKKKKKKFLKKKKKKRKKSWNTCRGGL

SEQ ID NO: 213649 - protein, 340 aa, Zea mays
  unsure (1)..(340): unsure at all Xaa locations
  Clone ID: MRT4577_126446C.1.pep
MGSYIQGDGEVPVYESGAEVLEKVQEKWAAAAAASRPPPYPAMYSSVFGGIILDPAMMVLPIDDHMVHRGHGVFDTAMILDGALYELDAHLDRFLRSAAAARVGTAPFPREALRRILIQMTAASGCRMGSIRYWLSSGPGDFLLSSIGXVGPGRLRVRVGGRPRVRGRGPHGERGVXTPERELVLPAFDKILSGCPAKRMLALAPRLVDAGLLAGVTKGNIXEGPMVNVAFVTPERERLLPAADKRVGGCTAKRMLALAPRAVDAGLPAGVSTRDITAEDAKRSAEMAFVGSGLPVLPVVEWDGKPIGDGKVGKLMPALSDLLWEDMKSGPDRIPVPYKQ

SEQ ID NO: 213650 - protein, 196 aa, Zea mays
  unsure (1)..(196): unsure at all Xaa locations
  Clone ID: MRT4577_126447C.1.pep
KPPPPSPGPGGGSLTSTAPHWATXATXXRVACPRADTPRRPHRQXSLCXXAPLQELPFSLATFLXXXPASDRVADXSRXLFRXSAPLXTFASLRASXXTXXSSESQCXXRGGGVSQTRIRXGRXXRTPRXRAXXGXREPGTPSXXSTXXSXXSTTLTXTXXFXXWEMKGPSTPHKXXPLLQGRXXSXQHTXVTXVA

SEQ ID NO: 213651 - protein, 56 aa, Zea mays
  Clone ID: MRT4577_126448C.1.pep
LQCIQYGILQYQKIEGARKKTITFDPFLRNLYVVERIWNNWFVQLFARGLFLPPLV

SEQ ID NO: 213652 - protein, 340 aa, Zea mays
  unsure (1)..(340): unsure at all Xaa locations
  Clone ID: MRT4577_126449C.1.pep
MGSYVKGDDEVPVYESGAEVLEKVQEKWAAAAASRPPPYPAMYSSVFGGIILDPAMMVLPIDDHMVHRGHGVFDTAMILDGALYELDAHLDRFLRSAAAARVGTAPFPREALRRILIQMTAASGCRMGSIRYWLSSGPGDFLLSSRGCPSPAFYGVVIASEYEQCXGRHXGVRAVTATVPMKPPQFATVKNVNYLPNVLSIMDAEDRGAFASVWVDDQGYVAEGPMVNVAFVTPERELVLPAFDKILSGCTAKRMLALAPRLVDAGLLAGVSTRDITAEDAKRSAEMAFVGSGLPVLPVVEWDGKPIGDGKVGKLMPALSDLLWEDMKSGPDRIPVPYKQ

SEQ ID NO: 213653 - protein, 97 aa, Zea mays
  Clone ID: MRT4577_12644C.1.pep
RRDQHYPSFLIIATAHAFSGSRHTADPEVHRYMNTLVGSCPRRLLSPPLTASRPSNRSLHATRTHEPSSTERLSEYNAGVAGHGDLGRVFVGGKRCA

SEQ ID NO: 213654 - protein, 94 aa, Zea mays
  Clone ID: MRT4577_126450C.1.pep
KRIIKKSAKRVKNKRVTRAKKIKKPVKKKSAGAKGLSYFEKTLEGATPLGAEPGGSHFEFCKKMLEPPNGPKMLLKTPCFYLQGYSSKLDVVPP

SEQ ID NO: 213655 - protein, 56 aa, Zea mays
  Clone ID: MRT4577_126451C.1.pep
KQWAKHNDFIIQWKVIPPPIQYISRLTKPNNLLSIPPTLAYATNMLLRRIDPCLRS

SEQ ID NO: 213656 - protein, 104 aa, Zea mays
  Clone ID: MRT4577_126452C.1.pep
RGATPFFSGLPLEIMHIHIQMKINLRTLPLITTIHPEPFQPNNLDKLPAPMGELIFFFSYRPSPISINRNPSKRDIPIPSRSCATYRCLLRTWLPGNCRDKSPP

SEQ ID NO: 213657 - protein, 82 aa, Zea mays
  Clone ID: MRT4577_126453C.1.pep
SNANLVAVHTDNHVKLHVLMFTITFQHIDNLLFILKLDTLMSHTIQFEIYSEPNCPHALSHTSDPMNASLILTVLHVHHLST

SEQ ID NO: 213658 - protein, 38 aa, Zea mays
  Clone ID: MRT4577_126454C.1.pep
NESCIGAAELTQAHWSARISLPGRICAIIGSQASRRFN

SEQ ID NO: 213659 - protein, 66 aa, Zea mays
  Clone ID: MRT4577_126455C.1.pep
LYNKTEPTGNWLHPQQNKLKTWDNNMLVMYKHDQLMSISHGDTLPHSSSSVWSRSVSGDEQGKSGR

SEQ ID NO: 213660 - protein, 25 aa, Zea mays
  Clone ID: MRT4577_126456C.1.pep
ILVVFILDSLESFEKSEMCDCSFLS

SEQ ID NO: 213661 - protein, 80 aa, Zea mays
  Clone ID: MRT4577_126457C.1.pep
MQIRLSPSMRSITISTSHGLLDLMRLKVAARHFSYRTVFHTVLILAFLLPFVFILTAIMTLEGFNKCSSLEACEGFICDA

SEQ ID NO: 213662 - protein, 359 aa, Zea mays
  Clone ID: MRT4577_126458C.1.pep
LDILPECPVQGKQLPPPELVPSLSDNSYYHFVLASDNILAASVVVRSTVRSSLKPERIVFHVITDKKTYPAMHSWFALNSLSPAIVEVKGVHQFDWLTKENVPVLEAIETQRTARDRYHGSHRPRTSASDNPRVFAAKLQAGSPTYTNVLNHIRIYLPELFPSLNKVVFLDDDVVVQHDLSPLWDIDLAGKVNGAVETCIGGDSRVMSKRFRNYFNFSHPLIAKNFDPSECAWAYGMNIFDLNAWRKTTIKDQYHHWVKENLKSNFTLWRLGTLPPGLIAFKGHVHPIDPSWHLLGLGYQEKTDVSSVEQAAVIHYNGQSKPWLEIGFKHLQPFWTKYVNYSNEFIRNCHIMEPQFRLS

SEQ ID NO: 213663 - protein, 538 aa, Zea mays
  unsure (1)..(538): unsure at all Xaa locations
  Clone ID: MRT4577_126459C.1.pep
MQIRLSPSMRSITISTSHGLLDLMRLKVAARHFSYRTVFHTVLILAFLLPFVFILTAIMTLEGFNKCSSLXFSDCLGRRLGPRLLGRGNDGSMRLVRDLYVMLDKVNSEEAPLDLKVPETFDEFIWDMKNNDYDLRSFAFKLKATMESMDKELRSSRLSEQLNKHYAAIAIPKGLYCLSLRLTDEYSSNALARKQLPPPELVPCLSDNSYFHFVLASDNILAASVVVRSTIRSSLKPERIVFHVITDKKTYPAMHSWFALNSLSPAIVEVKGVHQFDWLTQENVPVLESIETQRAARDRYHGSRRPITSANDSPRVFAAKLQAGSPTYTNVLNHIRIYMPELFPSLNKVVFLDDDVVVQHDLSPLWDIDLSGKVNGAVETCRGGDSWVMSKRFRNYLNFSHPLIAKNFDPSECAWAYGMNIFDLNAWRKTTIKDKYHHWVKENLKSNFTLWRLGTLPPGLIAFKGHVHPIDPSWHLLGLGYQEKTDISSVEQAAVIHYNGQSKPWLEIGFKHLQPFWTKYVNYSNEFLRNCHIMEPQL

SEQ ID NO: 213664 - protein, 238 aa, Zea mays
  Clone ID: MRT4577_12645C.1.pep
MASSCQNVEIPGKPTETGTALLETATGTIQGFAPLSQIHQHLCAFHFYADDMGRQVEAHHFCAHLNEDVRQCLIFDGPGAGARLIGVEYIVSETVFLTLPDAEKPLWHTHEFEVKGGVLFMPGVPGVVERRDLEKVCKTYGKTIHFWQVDRGDALPLGLPQIMMVLTREGQLRQDLADCVEKKFGVSFQKERENRAYMSGPEHGIHPLANATGKGLRTEIREVDLPASTTAGAGRVFT

SEQ ID NO: 213665 - protein, 760 aa, Zea mays
  unsure (1)..(760): unsure at all Xaa locations
  Clone ID: MRT4577_126460C.1.pep
KSEMQKSDHHEQKLTSPRGLIHKILRRTNSRRSPTAADQQPSPVSPETSNSSIFSKQKDVDDAIKDSEKLSTHTIRIEDEKSDLLGSEIYSGKLTLDNKTKSSSNEQSGSGSSSNCFDARLSTEALIWGSNILKLEDIVSVSYNSGLRYFTVHACPLEKISSGLSCFMKPRRTQXDLKFVSSSPHGPFRWVNSFADQQCYVNLLPHPMASSKKHSSELIQFDAMFDPYVKCRSPPKILVILNPRSGHGRSSKVFHGKVEPIFKLAGFKMEVVKTTHAGHAKSLVSTIDFSTCPDGIVCVGGDGIVNEVLNGLLCRDDQNMSASVPIGIIPAGSDNSLIWTVLGVKDPISAALSIVRGGLTPIDVFSVEWIQSGTMHYGTTVSYFGFVSDVLELSEKYQKHFGPLRYFVAGFLKFLCLPKYSFELEYLPVSDVNGAEHKILVGQEKVDTSDLYDDVIRRSRAECLPRASSLSSIDSIMSTGIMSGAELEVCSPRANNEPSEVVRGLDPKSKRLSLGRASTFKEPEEVLHPHSHGTSTPSWRRSKSKSRTEKARPGLSATHDAKSSKVNAADKEDTSSTISDPGPVAVWDSGPKWDDEPKWDNQPNWEPETSIELHSPREDIELGLTKELVPSLDERWTVRKGRYLGVLVCNHSCKTVQSLSSQVVAPKAEYDDNCLDLLLVGGSGRLRLLRFLVLLQFGKHISLPNVEYVKVKSVRLKAGPNTHDGCGIDGELLHVKGQVRCSLLPQQCQLMGRPVKNPVQ

SEQ ID NO: 213666 - protein, 58 aa, Zea mays
  Clone ID: MRT4577_126461C.1.pep
ARPPSLRTVKFPYKRVVEIGRVVLANYGAEYGRLFYIVDLVDHNMPLVDAPDMVRFQM

SEQ ID NO: 213667 - protein, 64 aa, Zea mays
  unsure (1)..(64): unsure at all Xaa locations
  Clone ID: MRT4577_126462C.1.pep
CAHVQMPHGRLNDFCLISYSXLNHPIALELLRNQFGXRSPCGPSSRNPNYALYIEEDTTICCNQ

SEQ ID NO: 213668 - protein, 48 aa, Zea mays
  unsure (1)..(48): unsure at all Xaa locations
  Clone ID: MRT4577_126463C.1.pep
LICAHVLSLLPDGHLSSPLDRWHSVPTPSVLFDFSFRXAVTCHMASKC

SEQ ID NO: 213669 - protein, 113 aa, Zea mays
  unsure (1)..(113): unsure at all Xaa locations
  Clone ID: MRT4577_126464C.1.pep
VNFPVAEMGWDQREWDRPMEFVPERFLSGGDGEGVHVTGTREIKIMPFGPGRGICAGVGIPMFHLEYFVPNLVREFQWKKVAGDEVDLFXTREFPPVIKKPLRAQLVRKTTCV

SEQ ID NO: 213670 - protein, 46 aa, Zea mays
  Clone ID: MRT4577_126465C.1.pep
ALDEVEGRTPCIWREESLLSRTEESVRMPTRCRSFSAARRERERER

SEQ ID NO: 213671 - protein, 64 aa, Zea mays
  Clone ID: MRT4577_126466C.1.pep
KNLYNVYYTIIIHSKSTVQTQFFPILTVKIMHLYCGFLFFPFIRELTNRSTHFFSSLSTPSHLF

SEQ ID NO: 213672 - protein, 823 aa, Zea mays
  Clone ID: MRT4577_126467C.1.pep
MPYPHPYPWQSSRRRRRRRGRDGAPRQPQARRVVERAAAGPGHATTTQQPDNVSSAKVFQTSRVETESKLRNGRKPQDLEDEHQAEEAELQPLIDQVRAMLRSMNDGDTSASAYDTAWVAMVPKVGGDGGAQPQFPATVRWIVDHQLPDGSWGDSALFSAYDRMINTLACVVALTKWSLEPARCEAGLSFLHENMWRLAEEEAESMPIGFEIAFPSLIQTARDLGVVDFPYGHPALQSIYANREVKLKRIPNAFVHAFATSILHSLEGMPDLDWPRLLNLQSCDGSFLFSPSATAYALMQTGDKKCFEYIDRIVKKFNGGVPNVYPVDLFEHIWVVDRLERLGISRYFQREIEQCMDYVNRHWTEDGICWARKSNVKDVDDTAMAFRLLRLHGYNVSPSVFKNFEKDGEFFCFVGQSTQAVTGMYNLNRASQISFQGEDVLHRARVFSYEFLRQREEQGMIRDKWIVAKDLPGEVQYTLDFPWYASLPRVEARTYLDQYGGKDDVWIGKTLYRMPLVNNDTYLELAIRDFNHCQALHQLECNGLQTWYKDNCLDAFGVEPQDVLRSYFLAAACIFEPSRAAERLAWARTSMIANAISTHLRDISEDKKRLECFVHCLYEENDVSWLKRNPNDVILERALRRLINLLAQEALPIHEGQRFIHSLLSLAWTEWMLQKANKEENKYHKCSGIEPQYMVHDRQTYLLLVQVIEICAGRIGEAVSMINNKDNDWFIQLTCATCDSLNHRMLLSQDTMKNEARINWIEKEIELNMQELAQSLLLRCDEKTSNKKTKKTLWDVLRSLYYATHSPQHMIDRHVSRVIFEPV

SEQ ID NO: 213673 - protein, 178 aa, Zea mays
  unsure (1)..(178): unsure at all Xaa locations
  Clone ID: MRT4577_126468C.1.pep
STVVDEMRTGAYALIXRSDQFIGGKEKATNVFGXGHYAIGKEIVDMVVDRISKQPDNADASQXSLVFXPCGGGAVSGLGXLLLERLYVXYRLEVXIGFNCTGYPSHGLSHPCVDTHTSVLCFRSLLELQDVPVLMVNERMYVMXCRSXDSERATVYVLIRRVVDEVISSMTASVRLDG

SEQ ID NO: 213674 - protein, 86 aa, Zea mays
  Clone ID: MRT4577_126469C.1.pep
GEYHAPGLFKKTSKVPPTILIDQGEADKFLVKQQFFPPKFEEGGKPQGVVLPLGIQPGYAPSYYFIATLVEDPIGPQAQFFKRACL

SEQ ID NO: 213675 - protein, 91 aa, Zea mays
  Clone ID: MRT4577_12646C.1.pep
TSTSANHRRVYLSLLHSTTLPCHHIVREPGRARARERHGCLPSASVFGEARVTMRLTSGMALFSCFVREGGGRSRSFCVPGSSVRRAIVLP

SEQ ID NO: 213676 - protein, 101 aa, Zea mays
  Clone ID: MRT4577_126470C.1.pep
FSTLLVLATPKRNLFSPPTRGSPPPGSLRSLGPQNICFGPPPPHLFPGENLMRGGFKRPLRVAPGFFHGWPPCYLFPKPSFLFFGPEHCFAHGYFMSISPL

SEQ ID NO: 213677 - protein, 201 aa, Zea mays
  Clone ID: MRT4577_126471C.1.pep
MASPSRKVLLGVTFERRLRSRTRQLFWAADLPVATTSRSLAAAAATTLPSGGSPAALLFSLRTISSTRLSKLSAFSDAPGPSVVDHKSIMQEDEFHKLADETIHDLLETLEEYGDSIQMDGFDIDYGNQVLTLRLGDLGTYVVNKQSPNRQIWLSSPVSGPSRFDWDAATNGWIYKRTGSNLVQLLEKEIGELCGTPVQLS

SEQ ID NO: 213678 - protein, 82 aa, Zea mays
  Clone ID: MRT4577_126472C.1.pep
PTASSVHAAEAVTPATSSAEVWAESVAADAAAASSAGAEAVAATAATSAGAEAVAATAATAADAEAVAATAGTPAEAVAARA

SEQ ID NO: 213679 - protein, 129 aa, Zea mays
  unsure (1)..(129): unsure at all Xaa locations
  Clone ID: MRT4577_126473C.1.pep
FRSISFSLQVVPGTTTVDMSRGVAARSRLXLQAIYNVKIITPERELEMHATDNGYILDYGEEEGIELPYSCRAGPCSSXDGKDAAGSLDQPDQSFVDHRQVGDGWGLACDADPTSDVDIETHKEDELIS

SEQ ID NO: 213680 - protein, 89 aa, Zea mays
  Clone ID: MRT4577_126474C.1.pep
FQKRSHQSQPIFHKGCKIFYPSLFPHVMEHRQGKPSVAIFLIAFPPAWNCSFKKQKMMYSLNVRISVPVQLINNLPAETKKRHHNKNRS

SEQ ID NO: 213681 - protein, 323 aa, Zea mays
  unsure (1)..(323): unsure at all Xaa locations
  Clone ID: MRT4577_126475C.1.pep
GINSVEKAGGDLWAKHLVETDQGQNIWLDQEVPKEAERTSDKSNKSSGTKDVKSDLALDNVAKLEIHWEEFSIGEGIGLVEAGRVYRGEWHGTPVAVKKFLQQDISSDALEEFRAEVRIMKRLRHPNVVLFMGAITRVPNLSIVTEFLPRGSLFRLIHRPNNQLDERKRLRMALDVARGMNYLHNCSPVIVHRDLKSPNLLVDKNWVVKVCDFGLSRMKNNTFLSSRSTAGTAEWMAPEVLRNERSDEKCDVFSYGVILWELCTLLQPWEGMNAMQVVGAVGFQNRRLXIPDNIDPAVAEIIVQCWHTLVFLPTSFADIMAAL

SEQ ID NO: 213682 - protein, 68 aa, Zea mays
  unsure (1)..(68): unsure at all Xaa locations
  Clone ID: MRT4577_126476C.1.pep
SELLYARXNATXFPKKXESMXLTNPGARVTLYYFQYCRPYLLRLPTICSPEPSSAXEAPPKAVNQRRQ

SEQ ID NO: 213683 - protein, 260 aa, Zea mays
  Clone ID: MRT4577_126477C.1.pep
MSAGGGGGGTSTLGGGGPSGSGSGGPGGSGGGGPCGACKFLRRKCVSGCIFAPYFDSEQGAAHFAAVHKVFGASNVSKLLLQIPAHKRLDAVVTICYEAQARLRDPVYGCVAHIFALQQQVVNLQAELTYLQAHLATLELPAPPPLPAPPQMPMPGPFSISDLPSSTSVPTTVDLSALFDPPPPQWAAAQQPHHHHQQPPQHHQLRQPAPYGAGASVRPGGGPGMAESSGGDELQSLARELQDRHRSGGVKLEHPPPHSR

SEQ ID NO: 213684 - protein, 103 aa, Zea mays
  Clone ID: MRT4577_126478C.1.pep
TKLGIRLEAYDEVLSADGKQRGGVLTEREDSILQPLGTRDHDQRGRRRQATAVVPDQSTGKIGNAIKGLFIYCDAPMAHIIAYLNGVDAAARIGASCTCLTLP

SEQ ID NO: 213685 - protein, 243 aa, Zea mays
  Clone ID: MRT4577_126479C.1.pep
MTGFGSPCGACKFLRRKCVRGCVFAPYFCHEQGAAHFAAIHKVFGASNVSKLLAHLPLADRAEAAVTISYEAQARLRDPIYGCVAHIFALQQQVMTLQAQLASLKAQAAQGQQGVHEDAKGYVGSAAAEQLGYGYPWCSGNGGAAAAAGAVGAPAAQPGAYGNGAHESLTALLGSSDYMQQSLYHAFEQAGADDDDGRQGYGFEAAAESSSLGAEESGWRSSSGYQDCEDLQSVAYAYLNHRS

SEQ ID NO: 213686 - protein, 229 aa, Zea mays
  Clone ID: MRT4577_12647C.1.pep
SRSTSPPPARPLAVALLCIPPQPYSHASTRPRRDDLPAPTRPRRRCVSALSGRRGGASRRSPNWRRAAAPYRLVPGATYRRLLVVAPLSPPAAPPGPCQAPAAGSQEPPRRAFHCSTPPLGFRSTPASWAGPCPGEGEGEGVDTGAEKGLEIARLGTSPRIVEKLAARGITRLFPIQRAVLEPAMQGKDMIGRTRTGTGKTLAFGIPIMDKILSYNEKTGNGRNPLAII

SEQ ID NO: 213687 - protein, 162 aa, Zea mays
  unsure (1)..(162): unsure at all Xaa locations
  Clone ID: MRT4577_126480C.1.pep
RCTEAVEVAFGMRHARRAKYSRQHSFLVMGSQCIVELECFDIHSPGIRRRQRSPAVPCTGRADPDERTHFTDISLGELVTTGRGASTWSSLSSRLSLILSNCRSLCCSRPMEREHHLDLSALCPHDQQNRFDPSLCVCVCVSHASVCVFARSQCGNLKIXRP

SEQ ID NO: 213688 - protein, 495 aa, Zea mays
  unsure (1)..(495): unsure at all Xaa locations
  Clone ID: MRT4577_126481C.1.pep
MGNALGCAGLGERLAASARNGDAAEVRRLLEENPGLARCAAVGSSLNSPLHLAAAKGHHEVXTTTTIGNRLFESRVMRFRPCKAGLPPRLQWHAQLITWTVTXSTTTGFRHTYYFPGDFQRIAALLLENGAEVNARNLSGETALMQACRFGHWEVVQTLLVFGCNVSKVDSLSGQTALHLAAAGGHATCVRLLLAGAGAGRNKLVNRAASGGVTALHLAALHGHADCVHLLVDERADVAAPTLPCTAAPMAAIGAGSAPLHYAAAGGEVRCCQILVARGADRAAANCNGXDDMGSSFVFWSVDRSMSLRVLFCXRWIPVDVARTWGCQWLEHVLSPESHLRIPRFPPSAYLSSPLASALALARDCRLLLNTAQLDSGGADACAVCLERPCDVAAEVCGHELCAKCALDLCSVVKSYDVPGIAGTIPCPLCRSAIASFRMRAAADESEPDVNDAGGGRRGAGDRQAAASSPEKKRSTDSEQDVVLPFYCAPLAVPS

SEQ ID NO: 213689 - protein, 86 aa, Zea mays
  unsure (1)..(86): unsure at all Xaa locations
  Clone ID: MRT4577_126482C.1.pep
RVSVAWSPGIHMGLAFELIESCCLFVSVIETAFALRNGLFRYLKGIILLLSFIELXACFFVASLPSSNSDGFVLSVPNGTLRALAA

SEQ ID NO: 213690 - protein, 119 aa, Zea mays
  unsure (1)..(119): unsure at all Xaa locations
  Clone ID: MRT4577_126483C.1.pep
TDGCVREYGLTMDNLYSLIMNVFVGGVSTIDLVLEYVMAXLMNHRLVMKKLHAEVQTYRAXNKLDMIREDYLSSLSYLNSFMKYALLLHRSVNMLMPYYYTDDCLIDSENIPFITRVLV

SEQ ID NO: 213691 - protein, 133 aa, Zea mays
  Clone ID: MRT4577_126484C.1.pep
MNPFKTLPTLGFLFLTLFSLAHAATFDIRNNCPYTVWAAASPGGGKRLDQGQAWQITAASGTTQARIWARTKCNFDASGKGSCETGDCGGVLECKGYGKAPNTLAEYAIDQFEHQDFIDISNIDGFNVPMEFS

SEQ ID NO: 213692 - protein, 108 aa, Zea mays
  Clone ID: MRT4577_126485C.1.pep
LVYYGGGGACPIGGSLFKPVKPKSKFWWGHFCFGIKFLTRGKGEDFGKFFFLLGGVFPPIVLKLKRMVCFLKTKFGGGKFLWGSRFEKKKKKKKKQTKKKKKKKKKKK

SEQ ID NO: 213693 - protein, 72 aa, Zea mays
  unsure (1)..(72): unsure at all Xaa locations
  Clone ID: MRT4577_126486C.1.pep
HMEVIGADGXHVGTVDKVEGNRIKLTKADSGQGSHKGHHHFIDMSLVAEVEGQKVRLSANADVAVTMEQEKA

SEQ ID NO: 213694 - protein, 90 aa, Zea mays
  unsure (1)..(90): unsure at all Xaa locations
  Clone ID: MRT4577_126487C.1.pep
MELTQNIEDVLMWTFNSTGSYTTTSACGWPQNPCCPLCRRMSETAPHLIVECXFPRRIWEATGGWLSLEPLHPVSWKTSKSVRGWWFIPA

SEQ ID NO: 213695 - protein, 205 aa, Zea mays
  unsure (1)..(205): unsure at all Xaa locations
  Clone ID: MRT4577_126488C.1.pep
MAGGRRSGFAAAALLPLLALVFLSAGCGAAPEGAEVTGLPGYDGALPSKHYAGYVTVDEHHGRNLFYYAVESERDPAKDPVVLWLNGGPGCSSFDGFVYEHGPFNFESGRSVKSLPKLHLNPYSWSKVSTMIYLDSPAGVGLSYSNNVSDYETGDLKTAADSHTFLLKWVQLYPEFLSNPFYIAGESYAGVYVPTLSHEXVAKGI

SEQ ID NO: 213696 - protein, 126 aa, Zea mays
  unsure (1)..(126): unsure at all Xaa locations
  Clone ID: MRT4577_126489C.1.pep
MAPYAVKRPVSNRATXDDPIANTAPSAKNSNAAKPITACKSAFTDYGKGXRCRSKVKKSXVQTYNIYIFKALXQVHANINIFYNVMCIMNYLINDIFQKLAVEAVKLTRYNKKLTITSREIQIFLR

SEQ ID NO: 213697 - protein, 44 aa, Zea mays
  Clone ID: MRT4577_12648C.1.pep
AVGQFLSNYDYALCHGGFAGLSLTGLPVYWETHPLGAACLYRKA

SEQ ID NO: 213698 - protein, 121 aa, Zea mays
  unsure (1)..(121): unsure at all Xaa locations
  Clone ID: MRT4577_126490C.1.pep
FFCKIILARETLRFPVSGFGTFYTAEAMRDAILGMNATELDATNITVNEGQTSCLPRGVXRRHRGERVGVGYRXAXRPDRGGXYRCGGGYRGRRGFRVGGCXYCCGDPGGGYCNSDSNWRN

SEQ ID NO: 213699 - protein, 167 aa, Zea mays
  Clone ID: MRT4577_126491C.1.pep
MWLPKGIRRTLMDMVMSMLSYSNLPLGLWMEALKTTMHILNRVPSKSVAKTPCELLTGRKPTLNYFNIWGCPAEARIFNPGQEKLDERTTSCHFIGYPERSKGYRFYCPGRQTKFIETRHAIFLEDDMIKGSKVLREVDLQEKRTYVPIPMVEEPYFSIPAVVPPTV

SEQ ID NO: 213700 - protein, 147 aa, Zea mays
  Clone ID: MRT4577_126492C.1.pep
PRVRPALALRAACAPHAAARCPGQRPLPTGSRCPSAACSHGCQPAAAAVRYPARPALALARGRPASAAARPASTIVVMLVSSSLVRCVVHATCRRTSPRLAVVARYLIYVGNEGSSSTSTFTLIIALPRRSHDLIRNLLSKEVIFFC

SEQ ID NO: 213701 - protein, 136 aa, Zea mays
  Clone ID: MRT4577_126493C.1.pep
GRDFLSLPHDARSSQQRPALALRAACAPHAAARCPGQRPLRTASRCPSAACSHGCQPAAAAVRYPARPALALARGRPASAAARPASTIVVMLVSSSLVRCVVHATCRRTSPRLAVVARLRSGSKLRGIEDQALATK

SEQ ID NO: 213702 - protein, 124 aa, Zea mays
  unsure (1)..(124): unsure at all Xaa locations
  Clone ID: MRT4577_126494C.1.pep
RVPGRNIRVEPHARVLESDPARQVSQXYEKSLQHGKRWTRYKNRLAVRKVRRXLXRYGLRELELCTRSSPCPDTSGKATEVVPVHKDGGRMRGDPGDQKSEKMLIDRYLMKKCETSGSHLYYYD

SEQ ID NO: 213703 - protein, 94 aa, Zea mays
  unsure (1)..(94): unsure at all Xaa locations
  Clone ID: MRT4577_126495C.1.pep
DIHLQSRAXRHVGXPXXDXSAFSXIXAXEYISIFSLXXWIXNCTRLXLHRXSAGEXQXRXXAPVQRKSAPRSVEELXXXXRXSGRRAPSPPXHS

SEQ ID NO: 213704 - protein, 67 aa, Zea mays
  Clone ID: MRT4577_126496C.1.pep
VTATRLGGHLVIVQIKLGHQLLKMGFFPIDPHLGNMFRTPAGNYVEKLYQPPQILGKIKLGRNFYGV

SEQ ID NO: 213705 - protein, 146 aa, Zea mays
  unsure (1)..(146): unsure at all Xaa locations
  Clone ID: MRT4577_126497C.1.pep
KLPCCRGPRALIXTQFNEXIGAGGVWIQDCKTGVSEYATCHILXDFLLAXETQPTXICLRVGNCARFDGTHGVSGIIPSRLDEPAXGXNGGFNSEPISNGFYMVVLXIQNQLAQSKEQELILHYIKSLCERVPRPMADIGGDCGIV

SEQ ID NO: 213706 - protein, 56 aa, Zea mays
  Clone ID: MRT4577_126498C.1.pep
GAGELRAKSEINPAVNREPPNKKKTRQFKPHVKHVPNPLIAGWGLISIPLLNWVPR

SEQ ID NO: 213707 - protein, 83 aa, Zea mays
  unsure (1)..(83): unsure at all Xaa locations
  Clone ID: MRT4577_126499C.1.pep
MAPMAEKKPSANMPVEEEPATDNAAKAPAGKKPYADKRLPAVKSGTSLGKNGKKNXAKKSVFTFKIYIFKELKQLLPRHSAFF

SEQ ID NO: 213708 - protein, 88 aa, Zea mays
  Clone ID: MRT4577_12649C.1.pep
MAAAPSSLVSSHLSRLADLRRAAAPATPTVPQQLRVGFSRRRAQRVVAMAGSGKFFVGGNWKCVSACSASSALRGLEMLCTDDPGDAV

SEQ ID NO: 213709 - protein, 105 aa, Zea mays
  unsure (1)..(105): unsure at all Xaa locations
  Clone ID: MRT4577_1264C.1.pep
MSFRVPSMNVSVVPITVMIKKGASYEEIKPAIKHAYSGLLKGIMXYMDEDLVTGDLCGHICSSILIIKGGIALMHHFIKLVXWFVIEWGFSSSVVDMIHMMFKTQ

SEQ ID NO: 213710 - protein, 77 aa, Zea mays
  Clone ID: MRT4577_126500C.1.pep
GFVPVRVPTVSFYFSGGPILPPPARNFLIPLDDVGTSCFTHAPSSSGLSTTGNIQQEGLQISVDGANGFVDFGPNVC

SEQ ID NO: 213711 - protein, 69 aa, Zea mays
  Clone ID: MRT4577_126501C.1.pep
PSQRFLLLGPPKERVSKRLNPKFFGSGKGPPFKKEPGSWFFGRVSPLKKKGLLGEKNKKKRGVSAGNAL

SEQ ID NO: 213712 - protein, 922 aa, Zea mays
  unsure (1)..(922): unsure at all Xaa locations
  Clone ID: MRT4577_126502C.1.pep
DILLGIRGYLKDPQNYLHNXDESHSSCQFYGVTCDHNSGDVIGISLSNISLSGTIPSSFSLLGQLRTLELGANSISGTVPAALADCTNLQVLNLSMNSLTGELPDLSALVNLRVLDLSTNSFNGAFPTWVSKLPGLTELGLGENSFDEGDVPESIGDLKNLTWLFLGQCNLRGEIPASVFDLVSLGTLDFSRNQITGVFPKAISKLRNLWKIELYQNNLTGEIPQELGTLTLLSEFDVSRNQLTGMLPKEIGSLKKLRIFHIYHNNFFGELPEELGNLQFLESFSTYENQFSGKFPANLGRFSPLNTIDISENYFSGEFPRFLCQNSKLQFLLALTNNFSGEFPASYSSCKTLQRFRISQNQFSGSIPAGLWGLPNAVIIDVADNAFSGGIFSDIGFSVTLNQLYVQNNNFIGELPVELGRLTLLQKLVASNNRLSGQIPRQIGRLKQLTYLHLEHNALEGPIPPDIENSLTGDIPDTLVSLVSLNSLNISHNMISGGIPESLQSLKLSDIDFSHNELSGPVPPQLLMMAGHYAFSENAGLCVADTSEGWKQSITNLKPCQWSDNRDSLSRRRLLVLVTVVSLVVLLFGLACLSYENYRLEELNRKGDTESGSDTDLKWVLETFQPPELDPEEISNLDGESLIGCGGTGKVYRLELSKGRGTVAVKELWKRDDAKVLNAEINTLGKIRHRNILKLNAFLTGASNFLVYEYVVNGNLYDAIRREFKAGHPELDWDKRCRIAVGVAKAIMYLHHDCSPAIIHRDIKSTNILLDEKYEAKLADFGIAKMVEGSTLSCFAGTHDYMAPELAYSLNATEKSDVYNFGVVLLELLTGRSPTDQQFGGEKDIVSWVSFHLAEKDPADVLDPKVSNDASDHNHMMKALHIAILCTTQLPSERPTMREIVKMLTDIDPSSTARRAKNKTDK

SEQ ID NO: 213713 - protein, 95 aa, Zea mays
  Clone ID: MRT4577_126503C.1.pep
MAQSVKILCKDGFNLYVTIRGNKAVLAPEDPDDEMQEWFKDYSRVSSVTDDNGQRVFALVNKETQQAMVNRRDEQEVIINTGSSYMHGRCQDYFL

SEQ ID NO: 213714 - protein, 77 aa, Zea mays
  Clone ID: MRT4577_126504C.1.pep
IQDLTICNAVCWCCVWCGGNKFLYCLCYCSLQDHEQHVGTCTVYVVCSRALIELDVSRVCTMMVHPHQKKKQRAATD

SEQ ID NO: 213715 - protein, 170 aa, Zea mays
  Clone ID: MRT4577_126505C.1.pep
NSFSSRFCFFFFFFFFFFFFLFQQGVILTHAIYVTYTTTNHHCMYRQIVSMQIHRVIMLNYRPYYVPASPSSLASSLSLSLEKRKETRTHKKNILTRGSAGPVGTDTDTATATVPSEAWHPSFAKEQLQVQKNKVGSVLKNSKGGMDGVSLRLFITSQPSTFPVVQCKRR

SEQ ID NO: 213716 - protein, 58 aa, Zea mays
  Clone ID: MRT4577_126506C.1.pep
MQYFKGSLLCLFRNAFKHELTLLEKARHPNLVQFVGAVTQNVPMMIVSEYHQKVRNCN

SEQ ID NO: 213717 - protein, 52 aa, Zea mays
  Clone ID: MRT4577_126507C.1.pep
GTILSHLVGDALMTYSSSGKGKVRNTCSINTIISLHSYHATSGAWCAHNKVG

SEQ ID NO: 213718 - protein, 102 aa, Zea mays
  Clone ID: MRT4577_126508C.1.pep
IKRIYENPHFISCQTTSICALSFQSSTQALLNRIRQDCASSPHHGLLLTVTAFIAVLAAPPHGLYRRPDLVRQAVPLAPQMVDHGGGVGAADPAALAHTQLL

SEQ ID NO: 213719 - protein, 58 aa, Zea mays
  Clone ID: MRT4577_126509C.1.pep
RVQIYYSHLRNYGSRPSQAHFQEFIEDMNKIEEYAQPKNGPLFVLNLAKSHLTDCLKM

SEQ ID NO: 213720 - protein, 64 aa, Zea mays
  Clone ID: MRT4577_12650C.1.pep
VGKSILSSTNVNPQGDGSHHIIRVLAIMPNAWGKPCFTRHAESDPSLECMIILVVRVDKHCIFN

SEQ ID NO: 213721 - protein, 131 aa, Zea mays
  unsure (1)..(131): unsure at all Xaa locations
  Clone ID: MRT4577_126510C.1.pep
MLVNKNLQSGNKLLSNXFTKKKLKNGVLGKVKEKGVTQGPVDGKIGANQSAKGGKNKSVNNTVVKGVKIVKKFRQKEKPPFNKKXNLGXIKKNIKNLTAGLNPKKANELKKGVKGETKFLLRKLKDLQFFV

SEQ ID NO: 213722 - protein, 139 aa, Zea mays
  Clone ID: MRT4577_126511C.1.pep
PTTPPAESRPAVSAISTRVALQRGITTHTHTQRDREEEGDVAAVSAADGDSRGGVLRGRGQGADGAQDDALHPGGRAGGVRSPGMTSTATCGRTCSRPLHRRRRKHAGPTSRSRGAWLQYNSTNNFLMVLRSDVLYLRA

SEQ ID NO: 213723 - protein, 66 aa, Zea mays
  Clone ID: MRT4577_126512C.1.pep
MSPQSQQQTAIVGEEYCEGGDRELTVRAGFDAAFAMGIVLVLDRITGDDVDGDLREDLLEAATSPA

SEQ ID NO: 213724 - protein, 88 aa, Zea mays
  Clone ID: MRT4577_126513C.1.pep
WCPAEHYPLSGGRQQSLNARGVVPENLNKHPSRKQRQQPPRRHWPRSIFTNSVYRAGPFLWAMLTIWRRFLWPTPESPSGPADGPKTT

SEQ ID NO: 213725 - protein, 68 aa, Zea mays
  Clone ID: MRT4577_126514C.1.pep
QKADVSYQCSRESLDVPRWMLHYTDAAQKRSTSADRCYIAEKILQLYWKMYTTCHPQLLDQPLLYITI

SEQ ID NO: 213726 - protein, 246 aa, Zea mays
  unsure (1)..(246): unsure at all Xaa locations
  Clone ID: MRT4577_126515C.1.pep
MSPQSQQQTAIVGEEYCEGEDRELTVRKTTLFTPGDGLEAYDHRTGALAFRVETYGRGGACGGGAARGDLALLGAQGEPVLTVRRRRPSLHNRWDGFLGDGAAHGQKKPVFSARRSSILGAXRAAAAVLVDLLAPXPPGSSRVDGSFPRRCCRVVASARAWAAPVAKEEEGGGGRGRNVVVARVRRKVDEDAHVMMGRDVFVHWVRAGFDAAFAMGIVLVLDRITGDDVDGDLREDLLEAATSPPA

SEQ ID NO: 213727 - protein, 93 aa, Zea mays
  Clone ID: MRT4577_126516C.1.pep
RGEKKKKILAQIVGNWRGPGFNPFPDFGQYPNRFGYKGQTPNFSPPKNFKKLHFFPPLPFPKRAVVFSPPISLDRDFFFKKGGWGLPFFKPPK

SEQ ID NO: 213728 - protein, 183 aa, Zea mays
  unsure (1)..(183): unsure at all Xaa locations
  Clone ID: MRT4577_126517C.1.pep
MRGPALYTESGYKTRDLLYKDYHRDHKSLPHLPTSSNARHLVTXLTSTQRSTMTFXSEIHSQIKEENMIADDTSNXSESNIITTVTVNEIATXALKTILPFAVTXDTSAKEVRLQPFRPDYSMDVHAHRKLTATPVGKLSAAFGTKALPVQAHISSXRATVNSHIHHAALMFTRDXLISSLNM

SEQ ID NO: 213729 - protein, 52 aa, Zea mays
  Clone ID: MRT4577_126518C.1.pep
MVMFIMVALHDSIHGVVARVQGVVEVIPPGSLRENARPCKLGRRSSVCTGVR

SEQ ID NO: 213730 - protein, 70 aa, Zea mays
  Clone ID: MRT4577_126519C.1.pep
NRIKIPISILTVSANTNNSDLQTFISSPTYKCLIQTSQQHWAQIIFSLIFKIFHHCNCKIMFSTTIPTTL

SEQ ID NO: 213731 - protein, 105 aa, Zea mays
  unsure (1)..(105): unsure at all Xaa locations
  Clone ID: MRT4577_12651C.1.pep
RVRHNEASVPXARYNIPXIKSLFLYFNIQTVQQLXFTMLNPLHYYQINHXSNLHFPDXTSTDIFKSLITSLDTLCRYLLFNSIANQLRYSNRHTHYYSFITLSLF

SEQ ID NO: 213732 - protein, 58 aa, Zea mays
  Clone ID: MRT4577_126520C.1.pep
GSTQGNLACMIDLASVGALIIMAGELHQLSRGVLSGSSNTTFSYTRDGVIGLTYYWVK

SEQ ID NO: 213733 - protein, 172 aa, Zea mays
  Clone ID: MRT4577_126521C.1.pep
MTTAARPTWAPAKGGNEQGGTRIFGPSQKFSSRDLAAHTSLKPRYSLSLSPTSLCDLYLFVEPSRPRCMESLTSYLSRQLVHGRFLLCPYNHNQSFHRLAPGIFDLVPRSPIRAPAVGSMLPRDSRHGVAALYTGAQPWPSEFRACPPQLSSTGCLILPDSLSVPRVIYHYL

SEQ ID NO: 213734 - protein, 100 aa, Zea mays
  unsure (1)..(100): unsure at all Xaa locations
  Clone ID: MRT4577_126522C.1.pep
MHSPRSRIRVRDPHPNPHRPSGGGRXRRRMPPPXRSPPAPPSPRYRRRPQRHTPPPXAAAILTPTSTPXARHRILLEAGRFAAHYLVGQGVLPDHVLRDR

SEQ ID NO: 213735 - protein, 534 aa, Zea mays
  Clone ID: MRT4577_126523C.1.pep
SLGLRLVHVDANRAEEVADTVMALFLGLLRRTHLLSRHASSSSPTAGWLGSVQPLCRGMRRCRGLVLGIVGVNAAARCLATRSLAFRMSVLYFDPLYEVTGKVKRPSIVFPSAARRMDTLNDLLAASDLVSLHCALTNDTTHILNAERLQHIKPGAFIVNTGSCQLIDDCALKQLLIDGTIAGCALDGAEGPQWTEAWVREMPNVLILPRSADYSEEVWMEIREKAIAILQSFLYDGVVPNNVISDEDEEMSEMGCDDDQLDKQEKEHPLQICDGEQQTEESQLTAEYDKRRAISQPEEPQASAQFRRISSRSEGRRSRSGKKGKKRPARRRSQQKMDELSTVEGGSNYSSRRDDDNQVLSSSSRFASPEDSKNKQKSSVESPMEIISENKLPVGLGRRPPEKLKEGFVIALKTRDNSGFYVSRERVTGGGWYLDVIPNATKRDPAAQFLVTFRNKDTMGLRSFVAGGKLLQANNKMEFVFASHSFDVCESWMLEGCLSEYCKLVNRKNAMAVLGVYIEVLGAPSEDGVVRWLD

SEQ ID NO: 213736 - protein, 95 aa, Zea mays
  Clone ID: MRT4577_126524C.1.pep
TQGISIDDDALDRHSGAGRAASWSWGNAWLGRRAGVRSGQASWGKQGAGRWNLSRGELREPAMERSRRRGRRELDADPTAFNKEDSGDFLFFLRK

SEQ ID NO: 213737 - protein, 64 aa, Zea mays
  Clone ID: MRT4577_126525C.1.pep
KTFQGSPPPTLEQWPPIFAPIPVFFKPQKKKNFFEKALNKFKKKKKLGFFFPQWKRGFPSFKLA

SEQ ID NO: 213738 - protein, 277 aa, Zea mays
  Clone ID: MRT4577_126526C.1.pep
GLFLRALLSSPRRSAHRIFPPLQPIDPISLGFLPVALAIFIFPMHALVSDFYQLVFHLRSSYTRTRVVELGFELPFPMRRPSPRPRRAPLLPGSRAQLPLFRAPRCFSLAGASSSPCSPWLVEFFPSREAPSCACALCLSLSPPRHGALRTTVVLSCPSHGGSPGSLLCSAASLESKSGRRSSLLFSLFSSPVRPPASAMVLPGISPSRAPLLGYGHRHAQDFAAHAVSKFVFSSRRSSSSSPTSPSPPRCSAGRRLSLPSAMEHRLEHPLLHALFA

SEQ ID NO: 213739 - protein, 367 aa, Zea mays
  Clone ID: MRT4577_126527C.1.pep
MKALGRAMRDEPGRRKKDASWRIFSLKELQSATNNFNYDNKVGEGGFGSVYWGQLWDGSQVAVKRLKSWSNKAETEFAVEVEILARVRHKSLLSLRGYCAEGQERLIVYDYMPNLSIHAQLHGQHAAECNLSWERRMKIAVDSAEGIAYLHHHATPHIIHRDVKASNVLLDSNFQARVADFGFAKLVPDGATHVTTRVKGTLGYLAPEYAMLGKASESCDVFSLGVMLLELASGKKPVEKLNPTTKRTIAEWALPLARDRKFKEIADPKLNGSFVEDELKRMVLVGLACSQDKPEQRPVMSEVVELLRGESTERLSRLENGDLFKPDISFHGSSGPDSSDCVTEERSPKADATEEAVDSSETVPSAR

SEQ ID NO: 213740 - protein, 110 aa, Zea mays
  Clone ID: MRT4577_126528C.1.pep
MDKRQWLLARLAVAAASVPGNPMVAASARAPDQQQRCPPVSSASDGDARVWLLRLTATAVTEKGVRGRKWSASWSVSARASEEGAAMERGVGYKATRRRGVRIRRCRPGR

SEQ ID NO: 213741 - protein, 186 aa, Zea mays
  unsure (1)..(186): unsure at all Xaa locations
  Clone ID: MRT4577_126529C.1.pep
MKALGRAMRWASCCKLSDGDEPGRRKKDASWRIFSLKELQSATNNFNYDNKVGEGGFGSVYWGQLWDGSQVAVKRLKSWSNKAETEFAVEVEILARVRHKSLLSLRGYCAEGQERLIVYDYMPNLSIHAQLHGQHAAECNLSXERRMKIAVDSAEGIAYLHHHATPHIFHRDVRASNVLLDSIFQL

SEQ ID NO: 213742 - protein, 50 aa, Zea mays
  Clone ID: MRT4577_12652C.1.pep
FCVYNIGLVVFKTTKNFRSLYSLNIYIHIPLFTIKFFTIKASINSFFNPH

SEQ ID NO: 213743 - protein, 142 aa, Zea mays
  Clone ID: MRT4577_126530C.1.pep
MSWQTYVDEHLMCEVEGHHHLTSAAIIGHDGTVWAQSAAFPLFKPEEMANVMKDFDEPGFLAPTGLFLGPTKYMVIQGEPGAVIRGKKVFLLFTVNFQGSGGITVKKTGEALVVGIYDEPMTPGQCNMVVERLGDYLVEQGL

SEQ ID NO: 213744 - protein, 101 aa, Zea mays
  unsure (1)..(101): unsure at all Xaa locations
  Clone ID: MRT4577_126531C.1.pep
LIISKYLNLKNEGXTTGEDRFYICELLICLLISTFQYAPSYNLVLPYKVCRLLPNQIYISNKNYTLFLYVFITHHAIDCLINFTFTILSQKKQYNFFFTLL

SEQ ID NO: 213745 - protein, 103 aa, Zea mays
  Clone ID: MRT4577_126532C.1.pep
PPRAFCSCKKGAPPPRKKTPGLSFSFVFPPQNGLFVFHQGGSPLPFAPGKGYVPQLSFKAWVPNWRFPKGPAHLNRGPPLVPPPPPDITFFLLKNPLVSPPQG

SEQ ID NO: 213746 - protein, 165 aa, Zea mays
  unsure (1)..(165): unsure at all Xaa locations
  Clone ID: MRT4577_126533C.1.pep
MSWQTYVDEHLMCEIEGHHHLTSAAIIGHDGTVWAQSTAFPPFKPEEMANIMKDFDEPGFLAPTGLFLGPTKYMVIQGEPGAVIRGKKVPPPARRSRSYHISRRSLFLIIAGLPSFYGXFQGSGGITVKKTGEALVVGIYDEPMTPGQCNMVVERLGDYLVEQGL

SEQ ID NO: 213747 - protein, 108 aa, Zea mays
  Clone ID: MRT4577_126534C.1.pep
STWGGGLSTFRAAASGEARPVGASRKGASWLKGDVWEVDQLGNCQGFTSAHGAHPRPGQWGPWGDGANGAHQKRGRGNATVKKIKKERQKEKKKKKKKKACSSSCCFL

SEQ ID NO: 213748 - protein, 132 aa, Zea mays
  Clone ID: MRT4577_126535C.1.pep
MSWQTYVDEHLMCEIEGHHHLTSAAIIGHDGTVWAQSTAFPPFKPEEMANIMKDFDEPGFLAPTGLFLGPTKYMVIQGEPGAVIRGKKGSGGITVKKTGEALVVGIYDEPMTPGQCNMVVERLGDYLVEQGL

SEQ ID NO: 213749 - protein, 60 aa, Zea mays
  Clone ID: MRT4577_126536C.1.pep
HLRPAPGGFSSVRRSISSAFPQYCSYFLIVMSCSVIFFFVIFFFFNFFFFFFYSFFFFFF

SEQ ID NO: 213750 - protein, 90 aa, Zea mays
  Clone ID: MRT4577_126537C.1.pep
LEPLYHACMKWMRCNIGSSFWSLSCVDPGSSCVFSVVNRSVHLCTFDSVPILGIFQLWFKTVIRSVFLLHIDYFLVVVDSWILSPVHRLC

SEQ ID NO: 213751 - protein, 94 aa, Zea mays
  Clone ID: MRT4577_126538C.1.pep
TKNLGRNPPLFPGKKKFVYKSCPPLPQVPGFVEGFFFFVPGKFTPPKGNPFKIKGAPFPFYGPKKIFFCSPQKKMYVWFLGKSWEACKTLFGVM

SEQ ID NO: 213752 - protein, 96 aa, Zea mays
  Clone ID: MRT4577_126539C.1.pep
VLASMERAHVIRRDSPTCTDWSPRQEHPTKINLPSGKRGGDVKSHPITFHPDEPLVPLFVRVPELSEEKGRSQPTRKISYAGDRQPSGKKRVSFLE

SEQ ID NO: 213753 - protein, 72 aa, Zea mays
  Clone ID: MRT4577_12653C.1.pep
AVLRRCSRDGRRAGGADAVYPRRKFPISWPKPRVLVGQCFIPGELLSGSRRLSFVMYGSHALDRCDLLHIVW

SEQ ID NO: 213754 - protein, 192 aa, Zea mays
  unsure (1)..(192): unsure at all Xaa locations
  Clone ID: MRT4577_126540C.1.pep
MEIRGLGHCLLGGPAPTGVVAEDVCHPAAPRGGGGGKRLRNFSXVVSAQRRSKEKGHSDVLYLDPLHNKFVEEVSSCNIFMVKDNIISTPLLTGTILPGITRRSVIEISQNLGFQVEERLITIDELLGADEVFCTGTAVVLSPVGSITYRGRRVEYGKNQEAGVVSQQLYAALTAIQKGLTEDSMGWTLQLT

SEQ ID NO: 213755 - protein, 79 aa, Zea mays
  unsure (1)..(79): unsure at all Xaa locations
  Clone ID: MRT4577_126541C.1.pep
APSWCGALVVAAHGPGLLPVRVLLPLPRACFGSLGLCCFRPGRRVPWLARLAGGRPLRGLNCSPPRPXCAWWYGRSRGS

SEQ ID NO: 213756 - protein, 92 aa, Zea mays
  Clone ID: MRT4577_126542C.1.pep
PTRPRAAPLEGDEQQLRRRLEEAALLLRRIKGLVRWIVEEVAAGRSPSIVLHRACSYDIPVGTDVLSLLHKDYHTSRLNVLLRVLVVVQQLL

SEQ ID NO: 213757 - protein, 193 aa, Zea mays
  unsure (1)..(193): unsure at all Xaa locations
  Clone ID: MRT4577_126543C.1.pep
MAATSASAGASLSVTAAAXPQAPAAMRLRTWARDATASPPQAXRRSYAVAASSAAAMSPLSLWEGQGIRAELDAPGGVASGDVMGLLLRERIIFLGNEIEDFLADAVVSQLLLLDAMDSESDIRLFVNSPGGSLSATMAIFDVMQLVRADVSTIGMGIAGSTASIILGGGAKGKRFAMPNTRIMMHQPVGGAS

SEQ ID NO: 213758 - protein, 128 aa, Zea mays
  Clone ID: MRT4577_126544C.1.pep
TRKTLWIPPKQKFFWGTPPYFLNIFWPGQPELQSEKGRAGRRPPKKLFGWPFRGPKKKGLAYQTGVGHPNRSHGPPNHQPFQIKTRGNGMGAAILAPGFIGTRKGWAQGTIGSGEGNLGGHSTHDNPG

SEQ ID NO: 213759 - protein, 214 aa, Zea mays
  Clone ID: MRT4577_126545C.1.pep
MAGRDKRRRAAPLEGDEQQLRRRLEEAALLLRRIEGLVRWIVEEVAAGRSPSIVLHRYRNYCSSADSASPSPCACSYDVPVGTDVLSLLHKDYHTSRLNVLLRVLFVVQQLLQQNKHCSKRDIYYMYPSIFVEVAVVDRAINDICILFKCSRHNLNVVPVVKGLVMGWIRFMEGEKKVYCITSVNAAFSIPVDIEAIKDVVSVAHYILVVEKET

SEQ ID NO: 213760 - protein, 163 aa, Zea mays
  unsure (1)..(163): unsure at all Xaa locations
  Clone ID: MRT4577_126546C.1.pep
EGTGGLGGPNGSGFAFGSGESTATLQIEPNTGSXFDDXVAGVLXANHDLMEVVXYLEQSXRFTAVAAPLRXGVVFGGPLGTGESLLAKAIAGEAAVPLDSISRYEFVEMLAGVGACTLRELFMNAALNAHCIVLADETDAVCRHAGXGIGGWNDDXEQTLNQL

SEQ ID NO: 213761 - protein, 74 aa, Zea mays
  Clone ID: MRT4577_126547C.1.pep
MTLRPHSRRADARITANDPQRLLRQIAYAGSQLPAVSRRESPRTPRARTPHGCPSPMGKAGDIMTRIRKHVMMV

SEQ ID NO: 213762 - protein, 95 aa, Zea mays
  Clone ID: MRT4577_126548C.1.pep
NWHKVEFKFKLKLNLEIDKRKEKDKKKEGREATWTAHPHSGPFHFPSCTATSTTTLRTDRVGPACHSHYTVPLSRALTLTSGPRGTATLFTGIRW

SEQ ID NO: 213763 - protein, 69 aa, Zea mays
  Clone ID: MRT4577_126549C.1.pep
HVLRVNPSAVQGLEFPGLDLPDSLSEIIMGGLLFLQVQRILKNITCFLQAREQKGIFGGFPYLQYHLIA

SEQ ID NO: 213764 - protein, 67 aa, Zea mays
  Clone ID: MRT4577_12654C.1.pep
LTTAFRDGGLRNRTGTFFFKEHLNKIKVPVLALAGDEDLICPPEAVYGLATSSISPLFFCNKESSFL

SEQ ID NO: 213765 - protein, 66 aa, Zea mays
  Clone ID: MRT4577_126550C.1.pep
SMRYMLCFLHTLCFNESSGQQIQELVGKGYGRTCFTMDNNEEHSLIDLHHSLILKSAISGSLQTSG

SEQ ID NO: 213766 - protein, 158 aa, Zea mays
  Clone ID: MRT4577_126551C.1.pep
PPPRGGKGKIPRGNKPPGPCGCAEPNWKGAVKPRIRGRANPSGVPQPVSGLRPPKNFCTHLGPPFSTRRGQAQKAKFLKGQILLFPRPEVGGGKINRGNQKTTIGWLEKEAEGKLIGPGSPPPQLSPAPKKKKKKKKKKKKKKKKKKKKSKEKKKKGP

SEQ ID NO: 213767 - protein, 65 aa, Zea mays
  Clone ID: MRT4577_126552C.1.pep
MGVRLPVAWSAVLVLLVRAAVAREYSAIFNFGDSLVDSGNLLVDGISYYLATVLLPYGMTHFGYP

SEQ ID NO: 213768 - protein, 79 aa, Zea mays
  unsure (1)..(79): unsure at all Xaa locations
  Clone ID: MRT4577_126553C.1.pep
ACLSAVVLSVPVAPNVPGWLVFWSFDACAGWACVVLGCLVRALFXAPLFGGAPFRGAPFCPFAWVPXXVRXRVNXRVDN

SEQ ID NO: 213769 - protein, 64 aa, Zea mays
  Clone ID: MRT4577_126554C.1.pep
MLESNSMKVKCTENRKDNPYCLNRNMDCPADCPLFSYPDCTTCQPVCLCTPRCRAENPRLLGGD

SEQ ID NO: 213770 - protein, 118 aa, Zea mays
  Clone ID: MRT4577_126555C.1.pep
SGGLLFFKVKTQRWQPLNLQTGLTFCVNHPHEERPATLHKRNLCVYQKAWTQPLNVPCPSYVFPYAAERVNTLYVSSSEHQKHSSATGREIPLERVEDATEELLFVFAQCNEYAETRS

SEQ ID NO: 213771 - protein, 51 aa, Zea mays
  Clone ID: MRT4577_126556C.1.pep
HGIHPAIIMQRPEILRLVKYSAMTLYRVYDVIWMCTSTSILLSSRLESQAS

SEQ ID NO: 213772 - protein, 46 aa, Zea mays
  unsure (1)..(46): unsure at all Xaa locations
  Clone ID: MRT4577_126557C.1.pep
PFIVMDDXNAGQAVVFSRQTXFIKQGPMLLPRIATVQPQPLYQQVR

SEQ ID NO: 213773 - protein, 158 aa, Zea mays
  unsure (1)..(158): unsure at all Xaa locations
  Clone ID: MRT4577_126558C.1.pep
GRPHGDACLAKLCGVIAADERRHEAAYTRASDRAFEEDPDGMVRALAAVMRAKVTMPGELMADGRDDRLFDHFSAVAQRSGVYTAADYADMVEHFVRRWKVAELDAGLSGEGRRAQDYVCGLPRKIRRMEELAQDRAAQXGPVXVCFSWVFDRPVRIH

SEQ ID NO: 213774 - protein, 45 aa, Zea mays
  Clone ID: MRT4577_126559C.1.pep
QVETCNRNVIEKPGYVNFQSCTTLKKKQRLTNPSLGLFAQSYNLY

SEQ ID NO: 213775 - protein, 446 aa, Zea mays
  Clone ID: MRT4577_12655C.1.pep
MARRCPCRLLLAVAAAAVLVAAAAQAQETCSGTVPAPPRRGARVSVASFGGAGDGRTLNTAAFARAVASIERRAAPGGAELYVPPGVWLTGPFNLTSRMTLFLARGAVIRATQDTSSWPLIEPLPSYGRGRELPGGRYTSLIHGNGLQDVVITGENGTIDGQGSAWWDMWKNRTLLYTRPHLLELMSSSDIIVSNVVFQDSPFWNIHPVYCSNVVIRNVTILAPHDSPNTDGIDPDSSSNICIEDCYISTGDDSIAIKSGWDEYGIAYGRASSGITVRRITGSSPFAGFAVGSETSGGVENVLAEHLNFFNSGFGIHVKTNTGRGGFIRNITVSDVTLDNVRYGLRIVGDVGNHPDDSYNRSALPIVDALTVKNVQGQNVREAGLIKGIPNSAFSRICLSNVKFTGGAPVRPWKCEAVSGGALDVQPSPCTELTSTSGTSFCTNSL

SEQ ID NO: 213776 - protein, 108 aa, Zea mays
  Clone ID: MRT4577_126560C.1.pep
HVVQQYNFIFSVPTLHCLHFRRFFKSPIMCKGHIYSFHLSLKRHAVKLDLLIIALIGSLSSMLTANFKQALHGYMALGHQFVLWYLLNVHILINGAQVFFPTDLSTVL

SEQ ID NO: 213777 - protein, 31 aa, Zea mays
  Clone ID: MRT4577_126561C.1.pep
ACMPTTSVVLESRAFNLLSENNPSTVSYHRV

SEQ ID NO: 213778 - protein, 128 aa, Zea mays
  unsure (1)..(128): unsure at all Xaa locations
  Clone ID: MRT4577_126562C.1.pep
KGFKDSKIFNMLTMQELPRGFPEERGIPFGSLYPGGFPPPGVFREPIPLFRVLFPPFQKFVPKGFVLEGESGKRLGQVVNDPTLPKSGGFWSWNKDSGLFXNHLFQGATDPEKAKKLWGINEKLVGVA

SEQ ID NO: 213779 - protein, 67 aa, Zea mays
  unsure (1)..(67): unsure at all Xaa locations
  Clone ID: MRT4577_126563C.1.pep
MRVSVYELPILALSSSATSTHTNEAIQMTSTPXPGHIPPSVHLPPPVHLPPSVHLPPADHLTSPDHL

SEQ ID NO: 213780 - protein, 753 aa, Zea mays
  Clone ID: MRT4577_126564C.1.pep
MVQIIEHRDLSPEDFLMEEGAASFMPQGSNRPTPGAAAMHAAREVLRNPPTSTASLGAMRQWREDVNRLLGMAHPSSARSRPRSFQRQCEALTYVRSPSVRGAQTDDLRAELNRRRAGKDAPVSLERAHERWQNFEGCNIDQDFNARDARIQAGVPLVGVGCAALADHLRAVTWPPKLLSHLPKKYDCTSNPSKFLQVYVTTITTAGGNTAVMASYFHVALTGPGRTWLMNLTPGSVYPWEELYARFTANFGSAYQQHGVEAHLYAVRQEPGETLQAFISRFTKVRGSIPCISDASIITAFRQGVRDKKMLEKLVMHDVETITTLLTLADKCARAAEGRAWHSAPQTGVTQTGGSGATTQGGGKKKKKNHGHDKPQSGAPASKDGSPPRCRSGKEKVDEGDVAAGEWDLGYQAPEQVLKDILTGDSDSGDDNDRCKKLYIMYGGSWELTSHRNVKSLRCEVLSATPGVPKAAPHQRWRSTTISFGASDCPENMAGAGILPLITVPVIANMKLHHVLIDGGLGSTSSAMLRSSSCRSQDPDWDPLAHSLEWALNWPTLYRFMAIAHYGYLVLKMPSPARVLTVRGDRPAALAAVKKLHALVAETARPDDGGGTPRLPVPRHLPRCLRCNHLEQTTANADVFAWEPSQMPGIPREVIEHHLKIHPDAKPDFIREEVRKLLQAGFIEEVHHLVWLANPVIVPKANGKLRMCIDYTNLNKACPKDPYPLPRIDQIVDSTSGCDLLSFLDAYSGFHQI

SEQ ID NO: 213781 - protein, 123 aa, Zea mays
  unsure (1)..(123): unsure at all Xaa locations
  Clone ID: MRT4577_126565C.1.pep
GWXLLSVSVGCWSVSSXGLARVWLARRRALFGRLXLLASRLARVSSRLCGRALGRFSGSRRRRAXXSLVRLLVPLASSPGXLLWLAFSLRPSLCRSGSFLPSLSSLVCSVAWAGAWVVPXLPG

SEQ ID NO: 213782 - protein, 693 aa, Zea mays
  unsure (1)..(693): unsure at all Xaa locations
  Clone ID: MRT4577_126566C.1.pep
MEMMAALAQLSSGKEEEMAEAGVRNWGARGGPFIGARGGEGGERWHAPASSPRWRWWRTVVTTGWLGQTGRRDGSGRRKAPNRAGERDNGEAAGRVVADGDRVASPVTGARKEELCARFTANFASAYQHHGVEAHLHVVRQEPEETLWAFISRFTKRISERREQASKDGSPPRCRPSKEKVNEGDVAAGERDLGYQAPEQVVKDILTEDSDSGDDNNRRNKLYVMYGGSWELTSCWNVKSLHRELHHVLIDGGAGLNVISHAAFKQLQIPGSRLGPSRPFSGVGPQPVYPLRSITLPVTFGTEENFRTENVQFDVAEVNLPFNAIIGRPALYRFMAIAHYGYLVLKMPSPAGVLTVRGDHAAALAAVEKLHALTAETAHPXTEGGTPRLXTKAPTKVPKVQPSGADDVPVKPIQEIALVAFLQENADIFAWEPSQMPGIPREVIEHHLKIHPDAKPDFIREEVRKLLHAGFIEEVHHPVWLVNPVIVPKANRKLQMCIDYTNLNKAYPKDPYPLPRIDQIVDSTSGCDLLSFLDAYSGFHQIQMSRQDRKHIAFVTVDGLYCYVVMPYSLKNVLPTFIRAMSKTFGDLIRDRIEIYVDDIVVKTKRGSTLVEDLTLVFDKLRATHMKLNPEKCVFGVSAGKLLGFLVSHRGIEANPEKIKEIEAMRPLARIKDVQKLTGSLACDTLVSPRVLP

SEQ ID NO: 213783 - protein, 76 aa, Zea mays
  Clone ID: MRT4577_126567C.1.pep
GREHIICIHIILEFSPSQPKFFLNLLNTNFFSNREYFNFKTYFSKFFNVKSETNPITLTQSFKHQAFLKMVLCLQV

SEQ ID NO: 213784 - protein, 128 aa, Zea mays
  Clone ID: MRT4577_126569C.1.pep
RIGPGVVSATTGQLGVPLRRADHNGLGMGSPVHVGASCAADHIVRHERWAHLVLQVRVVHQGVHGPPRRDGRFGEDAAVSASSDRPPLGDSCCCHAKIVRSAAKGSGPERRKSPSHQWTVRLMKSDAW

SEQ ID NO: 213785 - protein, 200 aa, Zea mays
  Clone ID: MRT4577_12656C.1.pep
MLRAAIVAGLPARLATKRPQAVTVAARVALTSTEVRSPLLRCGRVPVPGRRVCLCSAAADDSGSEAESSAAEGEEAARGEEGEGENVSAIVPAVLRPEDCHTVIALPLLQRPLFPGFYMPVYVKDAKLLRTLDENSKKSTPYAGAFLVKNEEDNSIHELKGKELLNCLHDVGTLAQITRIQGDLVVLLGHHRIQISEIVS

SEQ ID NO: 213786 - protein, 231 aa, Zea mays
  Clone ID: MRT4577_126570C.1.pep
MAMRSAPFCAAAWASVLQFLTDSFRAVLNPEDSQTIFFRHEEKNEAKTKSQSRQNIPSARARCLGSLTYGGQHLSTDDSGHLRTNAASANDGRPSAHKEVLTPVLATGVGTGPSKNVDTAPATYNVLYDPPGAAGGARRAVGVANLRTTRPSPVRWTDSHTLTRQQVAVRLLCKAGERPSPPNAGGRSGSPAHAEGRTATRLALPPSRMMNILEAEGRGGHNPTRPSPPQG

SEQ ID NO: 213787 - protein, 72 aa, Zea mays
  unsure (1)..(72): unsure at all Xaa locations
  Clone ID: MRT4577_126571C.1.pep
LXISSTTHSFSXXKSXFSSXXSSIXXXSSKSFXFIKHXLXFNNXTSFSXXSXLLXTXXXXPFQRPILHISIT

SEQ ID NO: 213788 - protein, 72 aa, Zea mays
  Clone ID: MRT4577_126572C.1.pep
LGDQFRGHFCIFFCIIKVELKMQAPKRKRESGGGGGHMREELASEDDESPPRKQPTVQHRRKAVVFDDSDED

SEQ ID NO: 213789 - protein, 69 aa, Zea mays
  Clone ID: MRT4577_126573C.1.pep
RVRPRVLPLLLFNLLHCYTGRAQFRCALGGTGACTRITRSIIIRSRNSISLSMINYELACIWACPLFTV

SEQ ID NO: 213790 - protein, 638 aa, Zea mays
  Clone ID: MRT4577_126574C.1.pep
MAAVASSEEAVKAAKVLMVGAGGIGCELLKTLALSGFSDIHIIDLDTIEVSNLNRQFLFRQSHVGQSKAKVARDAVLKFRPNINITPYHANVKDSHFNVDFFKQFNVVLNGLDNLDARRHVNRLCLAAEVPLVESGTTGFLGQVTVHVKGKTECYECQPKPVPKSYPVCTITSTPSKFVHCIVWAKDLLFAKLFGDKKQDNDLNVHSKDDTSSKTDVFERSVDEDLEQYTQRIYDHVFGYNIEVALDNKETWKNRRKPNPIYIRDALPEDAVQQNGRSLDHVNEEHDPSAMVSLGLRNSQETWSLADNSRVFLEALKLFFEKREKEIGSLIFDKDDQLAVEFVTAAANIRASSFGIPLHSLFEAKGVAGNIVHAVATTNAIIAGLIVIEAIKVLKGDYQDYRMTYCLEHPSRKMLLMPVEPFEPSKSCYVCSETPLVLEVNTKTTKLREVIEKVIKSKLGMNLPLIMVGATLVFEDGEDLEEDEIANYALNLEKVLAELPAPVLNGTTLTVEDFHQELKCSINIKHRDEFDEEKEPDGMVLAGWSGPVDKQITSNGENRSVPSSSNTEDVDGTAEDISATSGMKRKLNEILETKENFDALENLSGVDSSSAQVVEDDNDDDLVMFDEDPRQSKKKRLQ

SEQ ID NO: 213791 - protein, 154 aa, Zea mays
  Clone ID: MRT4577_126575C.1.pep
MLCLVDPLLQVLAELPAPVLNGTMLTVEDLHQELKCSINIKHRDEFDEEKEPDRMVLVGWSGPVDKQTTNNGETKSVPSSSNTEDVDGTAEDISATSGMKRKLNEILETKENFDALENLSGVDSSSAQVVEDDNDDDLVMFDEDPRQSKKKRLQ

SEQ ID NO: 213792 - protein, 208 aa, Zea mays
  Clone ID: MRT4577_126576C.1.pep
MTGGGPAAASQAYGEAWYWDERYRKEAGPFDWYQKYPALAPLLRLYLAPHQRLLLVGCGNSVFDMKMDVKNMSDFESGSFDAVIDKGTLDSLMCGQNSQENATKMLEEVNRILKENGVYMLITYGDPSYRLRLLKDMEKWTVKLHVIERWEKSSNQNKWELTKPLPLEDHSTSLAALFGPKPDVPYIYVCVKGNGGASVDFKAGEAAN

SEQ ID NO: 213793 - protein, 65 aa, Zea mays
  Clone ID: MRT4577_126577C.1.pep
GCIRLKFLIQSSEQALFLFHKSLLVHFITLLNALIHYSGRVRGGRQAAGTGAMIGMLGCCGAAKV

SEQ ID NO: 213794 - protein, 244 aa, Zea mays
  Clone ID: MRT4577_126578C.1.pep
MTGGGPAAASQAYGEAWYWDERYRKEAGPFDWYQKYPALAPLLRLYLAPHQRLLLVGCGNSVFGENMIDDGYQDVVNIDISSVVIEQMKKKYHDKPQLKYMKMDVKNMSDFESGSFDAVIDKGTLDSLMCGQNSQENATKMLEEVNRILKENGVYMLITYGDPSYRLRLLKDMEKWTVKLHVIERWEKSSNQNKWELTKPLPLEDHSTSLAALLGPKPDVHYIYVCVKGNGGASVDSKAGEAAN

SEQ ID NO: 213795 - protein, 153 aa, Zea mays
  unsure (1)..(153): unsure at all Xaa locations
  Clone ID: MRT4577_126579C.1.pep
MSAAASSEEAVKAAKVLMVGAGGIGCELLKTLALSGFSDIHIIDLDTIEVSNLNRQFLFRQSHVGQSKANVARDAVLKFRPNININPYHANVKDSHFNVDFFKQFNVVLNGLDNLDARRHVNRLCLAADVPLVESGTTGFXLGQVTVHVKGKT

SEQ ID NO: 213796 - protein, 141 aa, Zea mays
  unsure (1)..(141): unsure at all Xaa locations
  Clone ID: MRT4577_12657C.1.pep
SRRTQGARDETDRGRTQXAXAXAXXAAXXXXAAAATTPEAANTXGQXSXAXAPGGGDARGTGAAPXAXRGSGXRNXKSAASTAADRRAAXNXXKNAARGXSGHNAGNAGSSPPKGGASNPDTSSTHTDRDRANKNRDHARR

SEQ ID NO: 213797 - protein, 86 aa, Zea mays
  unsure (1)..(86): unsure at all Xaa locations
  Clone ID: MRT4577_126580C.1.pep
HLSMSVPDLLVVSSSRRXFHPIXKNPDVXSLTDNESSKPASVDSLPERSPVGRSAGGLLMSADCCGXGGDEGGQLRSAPRWRGSLH

SEQ ID NO: 213798 - protein, 54 aa, Zea mays
  Clone ID: MRT4577_126581C.1.pep
HERSGLAQVSPPARAKERYNRMLGSGTRKPTTMFLRLLPPAMSIVGGCARLSSV

SEQ ID NO: 213799 - protein, 40 aa, Zea mays
  Clone ID: MRT4577_126582C.1.pep
NWGTRSLSLTTPNWKPGGGPPYLCTTKVPRGWLYPLIGDD

SEQ ID NO: 213800 - protein, 95 aa, Zea mays
  Clone ID: MRT4577_126583C.1.pep
APLGLFRFGQWGPRKPVPACFLKLGGFAWAVPGDFHWEALFGSLFRWEKGPRGSLSAGPVLLLLFKFPFFGAPFLGVGVRPSLRACFLFFFYCFF

SEQ ID NO: 213801 - protein, 198 aa, Zea mays
  unsure (1)..(198): unsure at all Xaa locations
  Clone ID: MRT4577_126584C.1.pep
PSVRHKKIPRLSEPVSRDELQSLNRGARGTTLGQLQVAEQKLSYGSLSVAATEYSFDVPGASISWAKNGVLTTVADDIXDVGESKEDLXENLEALXEKWLAHHAGRFLLPNTXELLDAAIDTTQTHLXSMASARQGRDLTNHLVXYRVELLRPMTVEAEWQRCHYVPTGAEYMTNAVASLALRPIALPAFHCVGQELL

SEQ ID NO: 213802 - protein, 73 aa, Zea mays
  Clone ID: MRT4577_126585C.1.pep
GIELAQVQCKPGVLDVWLFYTVFLSNQYQVFLYCTYDSRVCTWACTCVLFDISLHMHARKILMAAETMVATSG

SEQ ID NO: 213803 - protein, 57 aa, Zea mays
  Clone ID: MRT4577_126586C.1.pep
IFPGEIPPPYGRLLVFRSLVPKKKKKKKKKKKKKKKKKKKKKKKKKKKKKKKKKKKK

SEQ ID NO: 213804 - protein, 128 aa, Zea mays
  Clone ID: MRT4577_126587C.1.pep
ESYLRLTLALEKCKLLRSLSGFWDASPLCLPFIYPVCGQLTGLNLSYAPTLDSSDLTKMISHCVKLQRLWVLDCIADKGLQVVASSCKDLQELRVFPSDFYIAGYSPVTEEGLVAISLGCQKLSSLLY

SEQ ID NO: 213805 - protein, 106 aa, Zea mays
  unsure (1)..(106): unsure at all Xaa locations
  Clone ID: MRT4577_126588C.1.pep
PCXSFSHLAXKCNMVQFEGKVVNTRPLGSHTEKHMGSGHFTIEGFVRSAYFRNLQVVDWFTNLIPXANLKLLADTSMACXDIQGGTTRNWVSYLFYGVPGRNSECP

SEQ ID NO: 213806 - protein, 84 aa, Zea mays
  Clone ID: MRT4577_126589C.1.pep
HKNSCILGAVIWAPFAVERCVFFTTFVRVPLGVVMGPQIYGRRVWKICRFYHLGLLPPLYILESSFCFSPQQIRVKCFVIMKKN

SEQ ID NO: 213807 - protein, 65 aa, Zea mays
  unsure (1)..(65): unsure at all Xaa locations
  Clone ID: MRT4577_12658C.1.pep
QRRVRGDHFMSKKKKKKKKKKKKKKKKKKKKKKKKXQKKKKKKKKKDFGVLPLFKGEFQKNVGRF

SEQ ID NO: 213808 - protein, 48 aa, Zea mays
  Clone ID: MRT4577_126590C.1.pep
LGFFYFLLVLKSIYLYYLFKGPKLPNKKDPLEKTTSMNKFSWLRATEK

SEQ ID NO: 213809 - protein, 135 aa, Zea mays
  Clone ID: MRT4577_126591C.1.pep
TLKISTGLSHLCEQSAHQLALSLCFQHHALSEQPSRLSPRHSRLRRFPLRRLRGVARARTHEWSVRTFNFSMAWAVLREIEPSLANSAGPLLCSGSPSKEEGDSSGQLHCCLRLVAYWLSRFSFAFAVGFEKKPG

SEQ ID NO: 213810 - protein, 195 aa, Zea mays
  Clone ID: MRT4577_126592C.1.pep
MACLHDHECGDHNCAADWSLYNHIDIPKVVALNESVAGSVKSVFKSWDQRLETSVGFLESNEGDPELLVFIPFTSDVKIKSIAVVGGADGTSPSRMRAFINREGVDFSDAQNMQPVQEWELAENLQGVLEYQTRYSRFQGVANLTLHFPDNFGGDTTKIYYIGLRGEATQNKRDVVATIVYEVMPNPSDHKTKSE

SEQ ID NO: 213811 - protein, 196 aa, Zea mays
  unsure (1)..(196): unsure at all Xaa locations
  Clone ID: MRT4577_126593C.1.pep
MAVFSDLHTADPLKSLEAHLGENSYEYGDSNINDDIKVFAAPPSQAAPXLPNVARWYQTVSAAVSSKFPGKAAGVNLLAGSDPAQDAPADEAEDHDELDLFDDETEEDYNAADERAAAAKGSSHNKEMGQSSHLMDALHXEDHTDIKKLHQAGRSVQMDALTXASXSELAPXGYXIEKMTIMLTIANYLVTINSLI

SEQ ID NO: 213812 - protein, 89 aa, Zea mays
  unsure (1)..(89): unsure at all Xaa locations
  Clone ID: MRT4577_126594C.1.pep
MGNRKSSDKPRGGRRMDTLDTAFCWPFWNHCSNVHRTIDMKNLIGEASCRTRQENFTTTGTALTDPIDIYTEWIDEXERVNTVQGYDDA

SEQ ID NO: 213813 - protein, 120 aa, Zea mays
  unsure (1)..(120): unsure at all Xaa locations
  Clone ID: MRT4577_126595C.1.pep
MKGKADTSNNDEGSLPAVRTTRXRKTASASIKPKRQASDILGXMTELRLEYEALHSVTKNVTTVSMAVMDKRGAISKQKKQPYVDQAGHKKHDYEKTNRNFDKKESTLSKKAQTAVEDGS

SEQ ID NO: 213814 - protein, 52 aa, Zea mays
  Clone ID: MRT4577_126596C.1.pep
PPLSAALAFPSLRFQMSKRGRGGSAGNIAALVDYSTRVVRALSPRRCATRDV

SEQ ID NO: 213815 - protein, 98 aa, Zea mays
  Clone ID: MRT4577_126597C.1.pep
HASEDHGYIYGSVDGENLVCLNALGVYSHLIMLLGFGRLCILHPLIYLYALSGDHALYCLFSCFELSRYINMRCGFFYLCQVITTPKTRLPWLMIWLL

SEQ ID NO: 213816 - protein, 47 aa, Zea mays
  Clone ID: MRT4577_126598C.1.pep
MANKEKEDGDRWDRMMAKIDRLTEKVVGVEEVQQKLMMQSELAAAVA

SEQ ID NO: 213817 - protein, 250 aa, Zea mays
  unsure (1)..(250): unsure at all Xaa locations
  Clone ID: MRT4577_126599C.1.pep
MVNFKNLAVAATSLLGLANAAPTAKVNSDEVIPGKYIVTLKSDIAASKIESHLNWVGDVHKRGLNERAEKGVERTYNGKYGFHGYAGSFDKDTIKEIKENPDVALVEEDRVWTINWVDEPEKESLSKRAETTQSSATWGLGTVSHRSKGSTSYIYDTNAGSGTYAYIVDTGIITSHNEFEGRAQAVYTAFSGQNADTNGHGTHVADTIAGKXYGVAKKATIQAVKVFQGSSSSTSIILAGFNWAXNDIIS

SEQ ID NO: 213818 - protein, 215 aa, Zea mays
  Clone ID: MRT4577_12659C.1.pep
MAPKRQSAILPQPKKPRPAAAPKLEDKSASPGLPKGEKEQQEAIEHIDEVQNEIDRLNEQASEEILKVEQKYNKLRQPFFQKRSELIAKIPNFWVTTFVNHPQVSALLGEEDEEALHYLTRVEVTEFEDIKSGYRIDFYFDENPYFENKVLSKEFHLNESGDPSSKSTEIKWKSGKDLTKRSSQTQNKASRKRQHEEPESFFTWVTDHSDAGADE

SEQ ID NO: 213819 - protein, 94 aa, Zea mays
  Clone ID: MRT4577_1265C.1.pep
ARVRATAAFTAPRRKTMQVMMQTFTGTLTGMTVTSKVASNNAMDNIQDKVQVKEGIQPVQYPLMYVEEHLKDGHSIMDYDITLEFTLKLVLRII

SEQ ID NO: 213820 - protein, 76 aa, Zea mays
  Clone ID: MRT4577_126600C.1.pep
DFNLFIKTLDRLTYIYLLIVRKGLSKVFLWLSSIEANSCPASLSSWSNVDINTWIPIFQSSQIISHGSLVFGVVIT

SEQ ID NO: 213821 - protein, 41 aa, Zea mays
  Clone ID: MRT4577_126601C.1.pep
SCKTNCVNWPNDQNSITIGGHRGTCLNIAPDIPSGNQTFCL

SEQ ID NO: 213822 - protein, 95 aa, Zea mays
  Clone ID: MRT4577_126602C.1.pep
SSLVGGRGSRHRLPSRLLRAQRSNRPSALGTRWRRLRGHARLVMPEPVNAGSYDDEEGGRVRRDGGHGRSHACCLGAFGWNPQGVKLSGARNSSR

SEQ ID NO: 213823 - protein, 173 aa, Zea mays
  Clone ID: MRT4577_126603C.1.pep
FFFLRLALSRRRPCSNFWANNPFNNRSISPSVFSCRSSSGVLIFLCNQKKSGLGFILSATASFSLHLTFCRNPAMAALPGARPSRGLSMTGCCSLALDFSTRHPFSSTSTHRCLGLTPELYQGGSPSLHPLISSADRARTSLWPSPARPLVSRPPMARAVPSRSSFPAPHHGV

SEQ ID NO: 213824 - protein, 214 aa, Zea mays
  Clone ID: MRT4577_126604C.1.pep
MASTTAVPVPNIGVKTQPPSKKEKPNPLRSIIAGSSAGAVEIAITYPAEFAKTRTQLNSRLAAGQKIPFPPFGKQWYAGCTTLIIGNSIKAGVRFVAFDQYKRILGNEDGTISGPMTEVSGFLAGATESLLAVTPFESIKTQLIDDRKQANPRMKGFLHGSKLIAREQGIKGFFKGFVPTTARQAANSAVRFSAYTSLKQAAQSYVAPGEKLGT

SEQ ID NO: 213825 - protein, 65 aa, Zea mays
  Clone ID: MRT4577_126605C.1.pep
MERRLICLYTTNKNLHMNIHDKDYDVTFLCHEHQPREEILLQNCHQDATDAFHHVDHIDKTHEIL

SEQ ID NO: 213826 - protein, 460 aa, Zea mays
  unsure (1)..(460): unsure at all Xaa locations
  Clone ID: MRT4577_126606C.1.pep
MAAAPHRPCVMMLPFAAQGHVMPLMELSHRLVEHGFEVVFVNTDFNHARILAAMAGATPAGGGIQLVSFPDGMDPDGDRTDIGKVLDGLPAAMLGGLEETIRSRDIRWVVADVSMSFALELVHTVGVRVALFSTYSAATFALRMQLPRMLEDGILDETGNVRRNERVQLDSKMPAIDASKLPWTSLGKSPESRRAMIQSTLTTNPTLSLAETIVCNTFQEVESVALARLPVPAVAIGPLEAPKSVSSAAAAGHFWAQDXPASAGSTRRLPARSCTWRSGXLTVFDAERLQELADGLALTGRPFLWVVRPNFADGVGERWLDGFRRRVGEGRGLVVGWAPQQRVLAHPSVACFVTHCGWNSTMEGVRHGVPFLCWPYFADQFLNQSYICDLWGVGLKVCADADERGVVTKEEIRDKVARLLGDEAIKARTVALKSAACASVADGGSSHQDLLKLVNLLREK

SEQ ID NO: 213827 - protein, 48 aa, Zea mays
  Clone ID: MRT4577_126607C.1.pep
FKNPPTHGFFSLPIFKIVNIGSPPTRPPLYLKTKKILCKARKIFFHGP

SEQ ID NO: 213828 - protein, 33 aa, Zea mays
  Clone ID: MRT4577_126608C.1.pep
LRRVEDIVYVEVPVLYVNRSFLYFVFYWITISV

SEQ ID NO: 213829 - protein, 48 aa, Zea mays
  unsure (1)..(48): unsure at all Xaa locations
  Clone ID: MRT4577_126609C.1.pep
YLGINYISNKCISIKNQTGFQKAALSTRLRTGNASLWGISALXAARPX

SEQ ID NO: 213830 - protein, 88 aa, Zea mays
  Clone ID: MRT4577_12660C.1.pep
ARARRPAARRDRPALHLHTLSGNGGDYLRWGQSHAAGCDKSFIRMTTDNMLSVHGPSNMEITVTLLHDILLVCQKKALIYTIWGVVCS

SEQ ID NO: 213831 - protein, 65 aa, Zea mays
  Clone ID: MRT4577_126610C.1.pep
MDTLVKLAVVVKVMGRTGFRGQVTPVRVRGVGDQNRVIMRNVKGSVSEGDILILIKFERKVRRLI

SEQ ID NO: 213832 - protein, 108 aa, Zea mays
  Clone ID: MRT4577_126611C.1.pep
TLHRILLPCSILPGAAEWLQITRQRCQMTKVNLQEMFIFTQFGMRKLVCHYTKLTMYVSNSWKLHKQQDENHTCNIPKRTHEILCIFTYTCNIVFDWVKLYNLTNMIY

SEQ ID NO: 213833 - protein, 101 aa, Zea mays
  unsure (1)..(101): unsure at all Xaa locations
  Clone ID: MRT4577_126612C.1.pep
SYYAARSWDGHPMFGPLXKALLRDYSRDLRSAPKVPVDTTVARVKPGRVFGYCLSILVDSPLXPLQLEYAFNDRQSRIFHFAVVYPHMTSYCTHSDSILFF

SEQ ID NO: 213834 - protein, 70 aa, Zea mays
  Clone ID: MRT4577_126613C.1.pep
MGLILSRGQKNPIDTMRGLLAVVDLLRVATRGTCTHTNRRCGCQPPAAVHLPPTEDVTTTVHLAPTVHIP

SEQ ID NO: 213835 - protein, 171 aa, Zea mays
  Clone ID: MRT4577_126614C.1.pep
MMACALAVAWPAASLAPSGKRNLSGGRPPWLPSPRPSGSRRASLLLPRRRSQKTAFVVGGAASFCTASLKRSPRMRGHGEQVCATRRRRADIQSDTYVLMEPGMDEAFVSREELEERLKGWLKNWPRDTLPPDLARFGTVDEAVSYLVRSVCVLEIDGDVGSVEWYQVQLD

SEQ ID NO: 213836 - protein, 686 aa, Zea mays
  unsure (1)..(686): unsure at all Xaa locations
  Clone ID: MRT4577_126615C.1.pep
MSSYPVLNNRPIDQWRVTDLKDELRKRKLPVKGLKEELVRRLFDSIQSEIEADEADEADEDVGVNVDDQLPDANASEENTVTVTEVHQETVVHVTQQVEVPTTKAGQESTISPTRRAPSVDVEEASADEEEVPESVAEGNMSFEEVQVHTEITNEPVHEKTTDVDTNDTVVVNDAIDVNSDLAPAEVKFGATEASKIEEHDFPPAPVDALNSDAAGPMDTDVVTAATSDAGSMDTDVVTRAPVSDDEEKLELKVDLGNKVSMYDEEHNSSDTMNEDXQAHRIKTKQSVXKMVQPSSGITSLGGDLQPLDDDKELVKNQTSLEDIDSTANVDSYKKDSPEGGSPEKLNLDRSSGDESMEEDVVEIKQDEANMKSDDLGQKNELNSEDVKEVILPDSVVEASKEVTAEEKSAASTEKRKLEDEDIANTEPIKRQRRWTADVAKVPERQALSQTGPETPKDIFQPAFKRSFGRSDSTASVDSPKERIVPPAEKPATTSLRIDRFVRPFTLKAVQELLGKTGSVQDFWMDHIKTHCYVTFSSVDEXVATDAVYXLQWPPNNGNKLVAEFVDPQEVKLKVDPPPPPALLLAQLLPQXPPLQQTQSVPRQAATPKEELPPPPPPPLAKPPMADLTPLGRERLPPTPKKPEPPVVTLDDLFKKTQSSPRIYYLPLSEEEVAAKLAAQGKGKKG

SEQ ID NO: 213837 - protein, 436 aa, Zea mays
  unsure (1)..(436): unsure at all Xaa locations
  Clone ID: MRT4577_126616C.1.pep
GRVGSISTDNLSTNKKNNIEGNLNANNFDLELEIQPKMVEPSSGITPLGGDLQPLDDDKELVKNQTSLEDIDSTDNVDSYKKDSPEGXSPEKLNLDRSSGXDESMEEEYCGNXTRPDEANMKSDDLGQKNELNSEDVKEVILPDSVVEASKEVTAEEKSAASTEKRKLEDEDIANTEPIKRQRRWTADVAKVPERQALSQTGPESGSDSGMPVSNRSFQWSNEENRVAFPKDHIETVADVTATSXVPTTRCWSRIHNFXLEAPPVLMLKRPQQPTEKYHCYVTFSSVDEAVATRDAVYNLQWPPNNGNKLVAEFVDPQEVKLKVDPPPPPAAPVSPAAATRAPPVQHTQSVPRQAATPKEELPPPPPPPLAKPPMADPTAIGRERLPPTPNKPEPPVVTLDDLFRKTQSSPRIYYLPLSEEEVAAKLAAQGKGKKE

SEQ ID NO: 213838 - protein, 146 aa, Zea mays
  Clone ID: MRT4577_126617C.1.pep
DPIGAPGKAPPGNVAGTPPWVGAPQGPPDLGFTLGPPVHLGVPLEHLITRLVKENRVVAFFKGSRGAPQWGFSQRGVGFLEAPPPVFVPVDVLPEGPPPGLREPPKVYTSWPPFPRVFVGGGLVGGCETIWPRAEKGGLPPLLFQK

SEQ ID NO: 213839 - protein, 87 aa, Zea mays
  Clone ID: MRT4577_126618C.1.pep
PRGRPGATSKEQLPPPPPPPLAKPPMADPAAIARERLPPTPKKPEPPVVTLDDLFRKTQSSPRIYYLPLSEEEVAAKLAAQGKGKKE

SEQ ID NO: 213840 - protein, 564 aa, Zea mays
  unsure (1)..(564): unsure at all Xaa locations
  Clone ID: MRT4577_126619C.1.pep
MGASGPAAPPATHRRRCIQLLLLLALAVAPLGSRGXASVPRGRXTGGLSRDAFPKGFVFGTATSAYQVEGAATSGGRGPCIWDPFVHTPGKIAEDANADVTTDEYHRYKEDVDLMKSLNFDAYRFSISWSRIFPDGEGKINDEGVQYYNNLIDYMIKQGLTPYANLNHYDLPLALQKKYQGWLGPKIVDIFADYADFCFKTFGNRVKNWFTLNEPRIVAFLGYDKGLNPPNRCTQCTAGGNSSTEPYIVVHNILLSHATAVARYRNKYQATQKGKVGIVLDFNWYEPFTNSTEDQKAAQRARDFHIGWFLDPLINGQYPKIMQDIVKDRLPSFTPEQAKLVKGSSDYFGINQYTTYYIADQQTPPQGPPSYSSDWGVQYYFQRNGVQIGQMAHSIWLYIVPSGMYGVVNYLKEKYHNPIIIISENGMDQPGNLTREEYVHDAVRIDFYKNYLTELKRGIDGGANVIGYFAWSLLDNFEWLSGYTSKFGIVYVDFATLKRYPKDSAYWFRDMLSGTGSKAATPQTGSGGRPAGSASATSNGPALLVSLLVSLGVLLPSIFMVSSV

SEQ ID NO: 213841 - protein, 128 aa, Zea mays
  Clone ID: MRT4577_12661C.1.pep
DEAHALMGAKAIHRRVGAAPGGASQLLEDEEAEPRGRSGARGGHMTHPLTNLVILHFMTMTLPVSPAMALTLTYSAAYLAVNTQRRSRRGAGLPPSMARQTRPSRPPPLHSLLEHCPRHPPLLLDLLN

SEQ ID NO: 213842 - protein, 100 aa, Zea mays
  unsure (1)..(100): unsure at all Xaa locations
  Clone ID: MRT4577_126620C.1.pep
AACRSCRSHPMEIWSTVGVRFRSTSSSMGHFLGTTTGXAWTGXVMSIQDSVGNTRADGTGALLREGAPALLNSMTRAGFPYTTEQVRDAFAAAAAPGSDG

SEQ ID NO: 213843 - protein, 303 aa, Zea mays
  Clone ID: MRT4577_126621C.1.pep
MSSYPVLNNRPIDQWRVTDLKDELRKRKLPVKGLKEELVRRLFDSIQSEIEADEADEADEDVGVNVDDQLPDANSSEENTVTVTEVHQETVVHVTQQVEVPTTKAGQESTISPTRRVPSVDVEEASADEEEVPESVAEGNMSFEEVQVHTEITNEPVHEKTTDVDTNDTVVVNDAIDVNSDLAPAEVKFGATEASKIEEHDFPPAPVDALNSDAAGPMDTDVVTAATSDAGSMDTDFVTRAPVSDDEEKLELKVDLGNKVSMYDEEHNSSDTMNEDCKPIVSKPNNQVPARAAARAGTRGGAI

SEQ ID NO: 213844 - protein, 85 aa, Zea mays
  Clone ID: MRT4577_126622C.1.pep
ISGMDQPGNLTREEYVHDAVRIDFYKNYLTELKRGIDGGANVIGYFAWSLLDNFEWLSGYTSKFGIVYVDFATLKRYPKDSAYWV

SEQ ID NO: 213845 - protein, 77 aa, Zea mays
  Clone ID: MRT4577_126623C.1.pep
QSSMAVSHHASFLPIAEGTSGLTVMIYVTVQLAILCQATVGRSYLSSLHLLVFSPSRPECSDRVQLFWRHTSLYHRF

SEQ ID NO: 213846 - protein, 532 aa, Zea mays
  unsure (1)..(532): unsure at all Xaa locations
  Clone ID: MRT4577_126624C.1.pep
MSSYPVLNNRPIDQWRVTDLKDELRKRKLPVKGLKEELVKRLSDSIQSEREADEADEDVGVNVDDQLPDANAIEENTVTVTEVHQETVVDVTHQVEVPTTEVGQESIISPTRGPPSVDVEEASTTKGKVPESVARGNLTFEEVQVHTKSTNEPLHEKTTDVDTNDAVDVNSDLIPAEVKFGATEASKIEEQDFPPAPVDDLTSDSTGPLGTDVVTAATSAAPXSDEGEKLAPKDASGNKVSMHDEEQNNSDTMNEDCKPILSSANNQVPEVSPDLGSQIKCESISTDNLSSNKKNTIKDNLNANNFDLELEVQPKMVQPSSGITSLGGDLQPLDDDKELVKNQTSLEDIDSTANVDSYKKDSPEGGSPEKLNLDRSSGDESMEEDVVEIKQDEANMKSDDLGQKNELNSEDVKEVILPDSVVEASKEVTAEEKSAASTEKRKLEDEDIANTEPIKRQRRWTADVAKVPERQALSQTGPETPKDIFQPAFKRSFGRSDXTASVDSPKGXXVPPAEKPAXTSLRIDRFVRPFTL

SEQ ID NO: 213847 - protein, 69 aa, Zea mays
  Clone ID: MRT4577_126625C.1.pep
LFRWGGGNSGCLLTSLSSVSHERLSSFWKSCFISLGASSVPTGTTPESRGLVPASYPNTTTARAARAAR

SEQ ID NO: 213848 - protein, 194 aa, Zea mays
  Clone ID: MRT4577_126626C.1.pep
MDALTYYLCLFLAFLPLLLLKLKRRDNNDGLRLPPSPWSLPVIGSLHHLLVGSPLPHRAMAHISHRLKAPLIYLKLGEVPVVVASSPDAAREILKTHDANFATRPWSPTMKVMMADGEGLAFARYGALWRQLRKISILELLSARRVQSFRGVREEEVGRLVAAIAEYSPRGEAVNLSQRIAELMNDTAGRAMIG

SEQ ID NO: 213849 - protein, 45 aa, Zea mays
  Clone ID: MRT4577_126627C.1.pep
DAIAALKFKHIITFCKSCAVINLNDDAYVITFGNNTVCLGTFLGS

SEQ ID NO: 213850 - protein, 142 aa, Zea mays
  unsure (1)..(142): unsure at all Xaa locations
  Clone ID: MRT4577_126628C.1.pep
PCHLPVPSHPPTMAEEKLHINIASIGHVDSAXSTTTXHLIYKLAGIDKRVFETFEKEAAEMNKPSFEYTRMLHPLTAERERVISIDIALXRFVTTKYYCTGIDDPGHRDFLCNMITGTSMCDCXVLIIDSITDECEDGISED

SEQ ID NO: 213851 - protein, 68 aa, Zea mays
  Clone ID: MRT4577_126629C.1.pep
PTRAATRPQVWNELVTCEQDDDRHNQGTKRDGPDAGINYREDEEGLQTRADDAMTEIILPGLYLVLLV

SEQ ID NO: 213852 - protein, 80 aa, Zea mays
  Clone ID: MRT4577_12662C.1.pep
WVVKFKYYIVYTPGILAPSNPLRFSGFQTSHQSHHPIPLSQTSPKKIGYREKKSQLGLPSISMQKLKGSQPVVPVECSPL

SEQ ID NO: 213853 - protein, 45 aa, Zea mays
  Clone ID: MRT4577_126630C.1.pep
CLKGRWVRAYYIIALCGKMRMYYKGIKLGSVRVFQWTVLIRTCSE

SEQ ID NO: 213854 - protein, 120 aa, Zea mays
  unsure (1)..(120): unsure at all Xaa locations
  Clone ID: MRT4577_126631C.1.pep
DKETSEKALYAVFGNATSPRERGRPTTRRPPTAPRRPSARPPXTTSTSTTAERRARTTTAGSCTTTPTTTTGRRTTGTAAPRRPHTRAPRTTTGRGRAPRSRTTRRAWTGARTPRPPPRA

SEQ ID NO: 213855 - protein, 89 aa, Zea mays
  Clone ID: MRT4577_126632C.1.pep
LGQNKVVSTFHMLIGTWGLLLYVSTEPVNVITCFYTNFRCSHVRAFVLPGPRASYCCKFLRCLSYTYFCVALSSWPSVSSVCLMDFDCK

SEQ ID NO: 213856 - protein, 87 aa, Zea mays
  Clone ID: MRT4577_126633C.1.pep
GLVHRNLRQVNMLLDRNYLSKTSHLRLVRLVPASGGGSMTQYRLTATGGTLCYIGPEYQQTGKLGDKSGIYWLGVLLLKVETARTTM

SEQ ID NO: 213857 - protein, 79 aa, Zea mays
  Clone ID: MRT4577_126634C.1.pep
KPPIQTLFINLEKKSPSSLKRFFTPLRFGSRKPRVVPSPSPPNQNRLFSRPFKRAPTPTKTGQMSSLSGCFSQDLKHGS

SEQ ID NO: 213858 - protein, 56 aa, Zea mays
  Clone ID: MRT4577_126635C.1.pep
HLMQHCLKSSRSWLHGVLDRNKGYYNTFHGRPEGSGGYTYSSTGGNTKWRGDTQSF

SEQ ID NO: 213859 - protein, 44 aa, Zea mays
  Clone ID: MRT4577_126636C.1.pep
YLQYGPNSGRPRVRRRIVSRVQKFQFYCSLHNLFVMLQTANDFF

SEQ ID NO: 213860 - protein, 99 aa, Zea mays
  unsure (1)..(99): unsure at all Xaa locations
  Clone ID: MRT4577_126637C.1.pep
MNYSSIGDNAASGVMATLLVFLSVGLVGATDGTGFHLTGKVVNWXGMPFTIGIYGFFYSGHSVFPNIYQSXMSDHFKFPCGTILYGMSCLYSCFGLPCF

SEQ ID NO: 213861 - protein, 101 aa, Zea mays
  unsure (1)..(101): unsure at all Xaa locations
  Clone ID: MRT4577_126638C.1.pep
DFFFDFFSRRVARIIGESLSRLGLDYLDMLHAHDIEFXSLXQIVNETISSLQKVHGNGXARLIGITGLALKIYPYGLDRVEPSLVGGILSYWYYGIQDTFL

SEQ ID NO: 213862 - protein, 497 aa, Zea mays
  Clone ID: MRT4577_126639C.1.pep
MTGAAAVDPPVPRPRRLTVLPLIALIFYDVSGGPFGIEDSVRTGGGALLPILGFIVLPVLWSLPEALVTAELASAFPTNAGYVAWVSAAFGPAVAFLVGFSKWASGTLDNALYPVLFLDYLRSGGGLALPPPARSLAVLALTAALTYLNYRGLHIVGLSALALTAFSLSPFLALTVLAAPKIRPSRWLAIDARAVDLRGYFNSMFWNLNFWDKASTLAGEVEDPRKTFPKAVFGAVGLVVGAYLIPLLAGTGALPSETAAEWTDGFFSEVGQRIGGPWLRVWIQAAAAMSNMGLFEAEMSSDSFQLLGMAEMGMIPAIFARRSKYGTPTFSILCSATGVVILSFMSFQEIIEFLNFLYGLGMLAVFAAFVKLRVKNPDLARPYRVPVGTAGAAAMCAPPAVLIATVMCLASARTVLINAAVVVAGVALYYVVEQAKRRPWAEFLAPVPPADSSHGPATAPDDADAADLEDVRAGLLAGEPADEEGSKVEYSRLEIRA

SEQ ID NO: 213863 - protein, 36 aa, Zea mays
  Clone ID: MRT4577_12663C.1.pep
MLILLFIICMALHSYELMAPLDLYGNKYSHNRSLSI

SEQ ID NO: 213864 - protein, 77 aa, Zea mays
  Clone ID: MRT4577_126640C.1.pep
SVLSCVGRCIKASALTAFPSWKSVSDVHVDSCESSSSSRPASLCRRCFRRVCRSSQERSKNLSQETIMTMVTAMAQM

SEQ ID NO: 213865 - protein, 115 aa, Zea mays
  Clone ID: MRT4577_126641C.1.pep
SLTSPSLLSSPLPSRGALVFKKPSASSLAVSTARRGVRVVAEAAAVSSPASSVSAQRTQPSAAEVARTVVELAPSGTLSVVGADGWPLGVGARFVADAAGAPALCLATAAVTVPD

SEQ ID NO: 213866 - protein, 93 aa, Zea mays
  Clone ID: MRT4577_126642C.1.pep
SPSSTVKLPLSLTTMVSPSITMKSGPPTVPVCWSPPCVKSHTTPAIVITPSPPVKILPPPAPASSPHGPIALSSASPLAKWAPTQIKTPAPPT

SEQ ID NO: 213867 - protein, 108 aa, Zea mays
  Clone ID: MRT4577_126643C.1.pep
LSSLLALRPTPTRALTSRGLSKYLSHNKNQPNVRNKNKICWDDHQHGVTTTTKRSVQTTRQLLAENYNNEPETKRPKQDNPHILTSKHNESRAHHTLKLTTCKLGIQN

SEQ ID NO: 213868 - protein, 53 aa, Zea mays
  Clone ID: MRT4577_126644C.1.pep
RRRLYRSKLNHRRVRTSLRDPPRPLPKRAAVPQPGRRASTAGESNPVRPICAG

SEQ ID NO: 213869 - protein, 75 aa, Zea mays
  Clone ID: MRT4577_126645C.1.pep
SIFGSKKKKKKKKKKKKKKKKKKKKKKKKKKKKKKNQKQKKKKKKQKKGTQRNRGPPKPGAPPDGGTPPAGKNST

SEQ ID NO: 213870 - protein, 59 aa, Zea mays
  Clone ID: MRT4577_126646C.1.pep
SRFLKYLVSDLSDEKYLLLIMNVVASSLTFFVVCHNLVFLWDVVLVITLEMKRGDCASF

SEQ ID NO: 213871 - protein, 674 aa, Zea mays
  unsure (1)..(674): unsure at all Xaa locations
  Clone ID: MRT4577_126647C.1.pep
GISCPHFPLPASLCSPDPSSLSAPPRHLVAAPAHRLSSAVERASSGEAMEEEIRKEFQSNGFSIGGAGPEDAAQILSTLLTYCINYKMSPADLVSNWEVYYLNRQLDGLKLESSYLDGFLSHLQNEVKDRIIKEEANLHIYSSNDVDMLLSNSHVDEAAFHDTPGYEQEKXHLKDHLSLSXPRASDRPSSSRVAKTNADRITPFATRVNKFTQQYVLNADNAVSVPSKNAEITEDEIIRRVQPSQRCYLQVQRSQPEPGCRFMYDRMEDRFNYLEDRIRKSASLFSASGFCGQPADATLASEEKMFAVGTVACDGEGHLNEKSILLQGSVEHSRGQCVRLDLKDLDHFSLFPGQVVGIEGHNPSGHCFVASKLFDSIPVSVDAQLPSAKKQAIDNESNQNSDAGTLSRALSSIIAAGPYTTTDNMLFEPLQELLSYACRKPPQLLILMGPFIDSDHPDIKKGTIDQSFHDIFHFEVLRKIQDFTQYLGNTVRVILIPSVRDAHHDFVFPQPAFDLNLLEDTTHQITSLANPCLFGSNEINFGCCTVDILKQLSGQEISRKPPGGKPGDRIGRLASHILKQQSYYPLYPPAPGVPLDLSLAKEALEIPSAPDVLLLPSDLAPFVKVLSLGEGSDDDRRFICVNPGRLAKGIGGGTFVELYYNEGIDKTNASIIRI

SEQ ID NO: 213872 - protein, 415 aa, Zea mays
  unsure (1)..(415): unsure at all Xaa locations
  Clone ID: MRT4577_126648C.1.pep
MGAVTSTVAARFAFFPPSPPSYGFEQPAPLPAPATPEPPAPATSKPPPPAPATPKPPPAGEEKGGGAVVELTGVPRRVNVEARRLRTKRGTEVVAMHVRQAGAKLTLLYSHGNAADLGQMYELFVELSAHLNVNLMGYDYSGYGQSTGKPSEQNTYSDIEAVYRCLIETYGASEDNIILYGQSVGSGPTLDLASRLTRLRAVVLHSPILSGLRVMYPVKHTYWFDIYKNIDKIPLVRCPVLVIHGTADEVVDCSHGRSLWELAEVKYEPLWIKGGNHCNLELYPEYIKHLKKFVGAIEKSPPPXRSTSAWRAQARRIVPQQNXECTADSRKSTDCRDKARPSIDQRQSTDRRDKPRGSTDRRDKTRKSVDHPEKPRASVDQPDRPRKSIDRFGGMMKSVRLCNIDCFKVTATSGS

SEQ ID NO: 213873 - protein, 207 aa, Zea mays
  unsure (1)..(207): unsure at all Xaa locations
  Clone ID: MRT4577_126649C.1.pep
AFVSLQPVSYNLPVPSQVVLIAPRYVLSNESDAAIAVRQCFVEHGIDGLTVEAKQRAALQTWKPGXEKREVNYFDLFVKKHRNVFEDSHIFIQFCPKEPGYSWSGPICVSSIGRFFLKFRRLEGMLEDGFKRDPLNAGKLKLFASVDVAQETTSFVLHFTEPPKVTLPCRIENCLSELSILCFQKDSVVFGVLXPSKVEHFAWVDLI

SEQ ID NO: 213874 - protein, 120 aa, Zea mays
  unsure (1)..(120): unsure at all Xaa locations
  Clone ID: MRT4577_12664C.1.pep
MPRPGVELANVAQMGFVSFAREAILVADFLLSAYQEFNEFCADGGPKPKALPTKLNKGVKNVSAELGVGAPHIEVKIRLLLQLEIXGIGSLLFIXSNYLGAYLLLLYLDLITPIIHDFYN

SEQ ID NO: 213875 - protein, 112 aa, Zea mays
  Clone ID: MRT4577_126650C.1.pep
SAPRARARGWCCLGGMSVRAVLLGALPVAPVCAVPAMAPALCGCGGCLEQVYVARGSSGCLGRVWLMGVCAARLGLLMAWCLMSGGCVPRVEAGVAPLDLRPSCLWAGALWV

SEQ ID NO: 213876 - protein, 64 aa, Zea mays
  Clone ID: MRT4577_126651C.1.pep
NAHIVHDATELYSICSTICCQMSLQEGVMHLSHRLVSAPGPSRSWRQKACPLPLLELRRGEEGL

SEQ ID NO: 213877 - protein, 415 aa, Zea mays
  Clone ID: MRT4577_126652C.1.pep
METSTKKLSSLRITSLDDDDEETEIPHQPPQAGLSPAGADYEDDDDEEEEAEVTLGVLSKPKHPGFLLRHLFPSKAGGIPAWLDPVNLPSGKSSYCGFCGEPLQFVLQIYAPIEDNVAAFHRTLFMFMCPSMACLLRDQHEQWKHKYGNPCRSVKIFRCQLPRNNAFYSAQPPKHDGSDKPLCPGAPVCHWCGTWKGDKICSSCKKARYCSEKHQALHWRTGHKNDCLQIISSAASNSVLPAVGIVPASISWPEFEIKIDYEGTFDSDSGDENNSKSLVMQRHGKPDAMMQSWMDHFQADADNKCWASFQERVSRAPNQVLRYCREPNAKPLWALSFGCPSDADIPSCSYCRGPLCYEFQVMPQLLYFSWCWNQPDSLDWATIVVYTCQGSCDQTVSYKEEFAWVQLYPTTTTRQ

SEQ ID NO: 213878 - protein, 155 aa, Zea mays
  Clone ID: MRT4577_126653C.1.pep
YECTFDSESGDENNSKSLVMQRHGKLDAMMQSWMDHFEADADNKCWASFQERVSRAPNQVLRYCREPNAKPLWALSFGCPSDADIPSCSYCRGPLCYEFQVMPQLLYFFGVGNQPDSLDWATIVVYTCQGSCDQTVSYKEEFAWVQLYPTTTTRR

SEQ ID NO: 213879 - protein, 283 aa, Zea mays
  unsure (1)..(283): unsure at all Xaa locations
  Clone ID: MRT4577_126654C.1.pep
METSTKKLSSLRITSLDDDDEETEIPHQPPQAGLSPAGADYEDDDDEEEEAEVTLGVLSKPKHPGFLLRHLFPSKAGGIPAWLDPVNLPSGKSSYCGFCGEPLQFVLQIYAPIEDNVAAFHRTLFMFMCPSMACLLRDQHEQWKHXTGIHVEGDENLVSXWFLFRYLLILMVCSGLFSSVKIFRCQLPRNNAFYSAQPPKHDGSDKPLCPGAPVCHWCGTWKGDKICSSCKKARYCYEKHQALHWRTGHKNDCLQIISSVASNSVLPAVGIGICLASKWFCYP

SEQ ID NO: 213880 - protein, 170 aa, Zea mays
  Clone ID: MRT4577_126655C.1.pep
KLLLSIKSDVYSYGVLVLEIITGHKIYTFEGQNSEGLVEYVWQHWTEKRASDVVDCDLGMEGQEHGPWQALRCVHVALLCVQSDRSRRPTMGQVIAMLSSGDDGTEELPEPSRPAWVRRPSNDGVKFSAVLRVQVAPLDDVPPSTKWMGFLHGLDLIDYELNIFIFMILI

SEQ ID NO: 213881 - protein, 379 aa, Zea mays
  Clone ID: MRT4577_126656C.1.pep
MLLSGPPPVPTPPLLLPESSGEDGGHDSSSRAAAAVGSAPKRRAETWVREETLCLIALRREMDAHFNTSKSNKHLWEAISARMRDQGFDRSPTMCTDKWRNLLKEFKKARSHSRNSGGGSGSGGNGNAKMAYYKEIDDLLKRRGKATGSGTAGCVGSSAGKSPKSNCKIDSYLQFTTDNGFEDANIPFGPVEANGRTILSIDDRLEDDRHQLPLTAADAVATNGVNPWNWRDTSTDGGDNRGNFGGRVILVKWGDYTKRIGIDGTPEAIKEAIKSAFGLRTRRAFWLEDEDEVVRTLDRDMPVGTYTLNLDDGMTIKLCDASRMQTPEDKTFYTEEDFRDFLSRRGWTFLREYGGYRNVDSLDDLRPGVMYQGLRSLGD

SEQ ID NO: 213882 - protein, 162 aa, Zea mays
  unsure (1)..(162): unsure at all Xaa locations
  Clone ID: MRT4577_126657C.1.pep
LNRFRYEIPPKSIPSPPPSDPSPPPPPPPPPCRRRRRSRSSATSATSATAPSPSPPPPPATTRSSARSAPGGSSRSXDDEDPPNPSXNPPLLPPRQLPRPPXPAISPGSSVRHPPPRPVPAPPXPGRRDRLPPRAPRRASSRVSPPSRSTSRAPPSRGGLPS

SEQ ID NO: 213883 - protein, 61 aa, Zea mays
  Clone ID: MRT4577_126658C.1.pep
WANIDKRGGPYYNCKRKMHSVATHGHSTSNPDAQYRLHRLKVHPHVRNLLLHPIYISARHS

SEQ ID NO: 213884 - protein, 95 aa, Zea mays
  Clone ID: MRT4577_126659C.1.pep
MAGWLALQRIPIWWRWYSWACPVAWTLYGLVASQFGDTTHVRLEDDGETVKNFVNRFFGFEHENLGYVATAVVGFTVLFAFVFAFSIKVFNFQRR

SEQ ID NO: 213885 - protein, 268 aa, Zea mays
  unsure (1)..(268): unsure at all Xaa locations
  Clone ID: MRT4577_12665C.1.pep
MSTQNKRLKDVEVSFPIVYGTISFWLGKKASEYNSHKWTVYVRSANNEDLSVIVKRAVFQLHPSFQNPTRVVEQPPFELSESGWGEFEIAITLYFHSDVCDKRLDLFHQLKLYPEEEAGPQSTKKPVVVETYDEIVFPEPTEAFFLRVQNHPAANVPRLPPGITLPPPXCVCSLTYNLHALYFKIGNDKVALCDFSXLGPMEIVPYEKKRGDTKDHPLSQWFSNFSEADELLKLAAARQQVQVHIAKLRRQLTMIEGMPQQSKAFSGQ

SEQ ID NO: 213886 - protein, 237 aa, Zea mays
  unsure (1)..(237): unsure at all Xaa locations
  Clone ID: MRT4577_126660C.1.pep
MAAASEDALRRSLAERQAAVDAQAEAVRALKAGGGASKADVDAAVEALXRAQVEAGAAARRLQQAVGAGAGGAAREELRQAVVNTLERKLFYIPSFKIYRGVAGLYDYGPPGCRVKANVLSFWRQHFVLEENMLEVDCPCVTPEVVLKASGHVEKFTDLMVKDEKTGTCYRADHLLKDFCKEKLDKDLALPQEKADEFKRILAIXLDDLSAEELGAKIKEYGXLFAPDTKXNCFSDP

SEQ ID NO: 213887 - protein, 145 aa, Zea mays
  unsure (1)..(145): unsure at all Xaa locations
  Clone ID: MRT4577_126661C.1.pep
LGPSHASAGIVFGRREENKKEEPQTPRYRDRGKERRDXQNPDYEPTELDSIHAVVPPGSDLRWADAHRISIEKSIYLADAPTERNPRKTWHALSCWLYFHVFRTGSFSYRDNTRKQVLTSLWITYQTGVWARPQGNTWPLATKLT

SEQ ID NO: 213888 - protein, 190 aa, Zea mays
  Clone ID: MRT4577_126662C.1.pep
NSARGNGQKLPFAAAQIGQAFRNEISPRQGLLRVREFTLAEIEHFVDPEDKSHPKFVDVADLEFLMFPRELQLSGESVKLMKLGEAVAKGTVNNETLGYFIGRVYLFLTCLGIDKGRLRSRQHLPNEMAHYAADCWDAEIECSYGWIECVGIADRSAYDLKAHSEKSGVPLMKNSPNLGETCHSSLESGV

SEQ ID NO: 213889 - protein, 54 aa, Zea mays
  Clone ID: MRT4577_126663C.1.pep
HIIHKTQITPPTRTTAKLVFSNYHSHFNILHTQFLFFFLPTMLLNPAHIIFFFF

SEQ ID NO: 213890 - protein, 93 aa, Zea mays
  unsure (1)..(93): unsure at all Xaa locations
  Clone ID: MRT4577_126664C.1.pep
NHRHVLWTFTRNSXCFXHFTTPKTKARQLNNRLLLELLDLILFWFHLHHFWILPKGWEGLVISPRIPLGRSKNGALGILSLGFFLLLVVDEGE

SEQ ID NO: 213891 - protein, 697 aa, Zea mays
  unsure (1)..(697): unsure at all Xaa locations
  Clone ID: MRT4577_126665C.1.pep
MAAPSEDALRRALAARKAAVDAQAEAVRALKAGGGASKADVDAAVEALKALKVEAGAAARRLQQAVGAGAGGAAREELRQAVVNTLERKLFYIPSFKIYRGVAGLYDYGPPGCRVKANVXLRAAPCRVQAYVLSFWRQHFVLEENMLEVDCPCVTPXLRQFTDLMVKDEKTGTCYRADHLLKDFCKEKLEKDFALPQEKADEFKRILAILDDLSAEELGAKIKEYGIVAPDTKNPLSDPYPFNLMFQTSIGPTGLSVGYMRPETAQGIFVNFKDLYYYNGQKLPFAAAQIGQAFRNEISPRQGLLRVREFTLAEIEHFVDPEDKSHPKFVDVADLEFLMFPRELQLSGESANLMKLGEAVSKGTVNNETLGYFIGRVYLFLTSLGIDKGRLRFRQHLPNEMAHYAADCWDAEIECSYGWIECVGIADRSAYDLKAHTDKSGVPLVAHEKFSKPREVEKLVIVPSKKDLGLAFKGNQKMVLEALEAMSEKEAFEMKAELETKGETNFKVCTLGKDVVITKKMVSISMEKKLEHQRVFTPSVVEPSFGIGRIIYCLFEHSFYTRPSKSEEEQLNVFRFPPLVAPIKCTVFPLVKNQEFDDAAKVIAKALTTAGISHIIDTTAISIGRRYARTDEIGVPFAVTVDSATNVTIRERDSKEQVRVDIDEVAPVVKQLTEGQSTWTDVSAKYPAHVGPQSEQE

SEQ ID NO: 213892 - protein, 90 aa, Zea mays
  unsure (1)..(90): unsure at all Xaa locations
  Clone ID: MRT4577_126666C.1.pep
ATVMERERGQVFSINTQPVEMVIGSNVLREGTYGGLRMNTVEVFGQALVWRXKXNWVYWLGPFLXGLGLQGRAPEKLVILVARTPTCFQV

SEQ ID NO: 213893 - protein, 95 aa, Zea mays
  Clone ID: MRT4577_126667C.1.pep
FFHSVGYFFPPLSGLFSSLDCGLWALRFFSPASPSFVPPAFWFWAFGLFVVSPCVAVLPSLCPHLWPLFFPASPPAGVLVFSLPGVPRFALFLFL

SEQ ID NO: 213894 - protein, 74 aa, Zea mays
  Clone ID: MRT4577_126668C.1.pep
CEEYLLNLQSLFWRPMPKIFPYELHCDDFCDFIIFVILEGQTGTVMTNERCITESPRLGFEAVSPHLRERFVSV

SEQ ID NO: 213895 - protein, 117 aa, Zea mays
  unsure (1)..(117): unsure at all Xaa locations
  Clone ID: MRT4577_126669C.1.pep
YIYSNILYIHXYNPKKLEVXKHHNRVMWGAVSSFTMYMWTQPAYLNASCGPDHDEQAKDASRTEDIVSREEIPQCHQSSHLNESPTYLISRMGVHSESVSGSLLQFCLQNMDFIALY

SEQ ID NO: 213896 - protein, 41 aa, Zea mays
  Clone ID: MRT4577_12666C.1.pep
CQDQQGKPYLFKCELNIRSRKQELLLEYSAADTWSKEFDAI

SEQ ID NO: 213897 - protein, 231 aa, Zea mays
  unsure (1)..(231): unsure at all Xaa locations
  Clone ID: MRT4577_126670C.1.pep
MLSVPLHRMSDPAAGGAMVPAAGRGIAWANGGPRFGDMVWAKVKSHPWWPGHIYSVSLTDDEEVHRGHRDGLVLVAFFGDSSYGWFDPSELVPFEDHFTEKAAQGGSSRSSFAAAVAEAVDERRXNFFLVDVPAFDTDADYQLDQIRAARQRFVPRKALNYLLDAAVTQRDAAEKAARTVPGMEMAALFLAYRRAVFSPIDNTYAQAFGVDPELALAAEQKAAAERAQRGD

SEQ ID NO: 213898 - protein, 352 aa, Zea mays
  Clone ID: MRT4577_126671C.1.pep
MSLLPPIPGHPPPEPKPKPRPIDPASKSRFSVPLHRMSDPAAGGAMVPAAGRGIAWANGGPRFGDMVWAKVKSHPWWPGHIYSVSLTDDEEVHRGHRDGLVLVAFFGDSSYGWFDPSELVPFEDHFTEKAAQGGSSRSSFAAAVAEAVDEVARRSALALLCPCDIPDAFRPHPSDGNFFLVDVPAFDTDADYQLDQIRAARQRFVPRKALNYLLDAAVTQRDAAEKAARTVPGMEMAALFLAYRRAVFSPIDNTYAQAFGVDPELALAAEQKAAAERAQRGINNTHMLNSSCTVVLVTVYLKLMGKQCSYCFYRSSNNYFDVNNGVDLIQIVSISLLSNCWLHFFFINESDY

SEQ ID NO: 213899 - protein, 51 aa, Zea mays
  Clone ID: MRT4577_126672C.1.pep
TASSGTTECGTGVSTTDASSITVTTGASTDAVPMREHQKPADHTTVWLATS

SEQ ID NO: 213900 - protein, 105 aa, Zea mays
  unsure (1)..(105): unsure at all Xaa locations
  Clone ID: MRT4577_126673C.1.pep
IRTSYGPYCAQPVDRAISLRHRPQQSISILTIKTALPRLTTARPIPQRPPPTACXDPRPPPAARREHYSIFTDIITYQFTSNTHWQLPNGEEKGRNARTEEEIRT

SEQ ID NO: 213901 - protein, 97 aa, Zea mays
  unsure (1)..(97): unsure at all Xaa locations
  Clone ID: MRT4577_126674C.1.pep
EAPREEEHXRGAPKGGAXARPEGEQGGRRXRGGRPGQGRNXPAXRRTSRKGRGTXXREGTGXXQXRGGEPDXGQRRPRGKKGGRPXGXXRAHGTRGG

SEQ ID NO: 213902 - protein, 89 aa, Zea mays
  Clone ID: MRT4577_126675C.1.pep
DPPLLNCHHPVRPRGRASHRIRRLPVPLNCCHLVCLRCGEEDEGSCIGEAHVPRWGIVFIHNTSNANTSNARDSPPSLKPPSRARSDLR

SEQ ID NO: 213903 - protein, 43 aa, Zea mays
  Clone ID: MRT4577_126676C.1.pep
HGGCNNGMSPATGSAVSLIACYILLHKNRAELSWFPTFRVSRG

SEQ ID NO: 213904 - protein, 61 aa, Zea mays
  unsure (1)..(61): unsure at all Xaa locations
  Clone ID: MRT4577_126677C.1.pep
MDCTGTGARGXGKKGAVRRKVGWPKNKSVLRAVKARFQFPCWRIWRLFKKGPFAQRDRNCP

SEQ ID NO: 213905 - protein, 156 aa, Zea mays
  Clone ID: MRT4577_126678C.1.pep
MAARHHAPHLLAMLMLSAAGFFSVASAARDLDAANPLAVAVAAPAAGRNNDNNNPPEPNYYSYHGGYGAVPAGYGPAGVSGAGGWGAGSGGGGGYAHGGVEAPTVMCQDKGPCYGKKVACPKRCFWSYSRSGSGYGAGGGGGSCTVDCKDKCTATC

SEQ ID NO: 213906 - protein, 79 aa, Zea mays
  Clone ID: MRT4577_126679C.1.pep
ILIKLLVTKKKSNVAGIRQDNYQLLTKDEEIYKQFSKTLNPTLTSTPFRILSMFGFPRYISSTMHLDIVLSIITHQKGI

SEQ ID NO: 213907 - protein, 261 aa, Zea mays
  unsure (1)..(261): unsure at all Xaa locations
  Clone ID: MRT4577_12667C.1.pep
LGTSRPAGTSLSPKSTVPTQSDITLVPENLLKKRKSQEKAREERAIATREKRDKNKKKREVIFTRAEKYVKEYRDAERERIRLSREAKKSESLYVPEEPKLAFVVRIKGINKIDPKKRKTLQLLRLLQINNGVFIKLTKATMEMLKIVEPFVAYGYPNQKSVRELIYKRGYGKVDKQRIPLTDNEIIEENLGKYGMICMEDLIHEICTVGPNFKAASNFLWPFKLNSPTGGFRKRKFKHYIEGGDLGNXEEKINELIRQMN

SEQ ID NO: 213908 - protein, 63 aa, Zea mays
  Clone ID: MRT4577_126680C.1.pep
QFQGTQASEDKYILRQQHKQWFGNRLLLGSNTFRLTTHAFKASGCFVSHLNYYHEPNYALFMA

SEQ ID NO: 213909 - protein, 112 aa, Zea mays
  Clone ID: MRT4577_126681C.1.pep
STSPLCSKPPARTEGAPAQWSFSASRTLGFSSISPSPGWPGLGPGLGLCGLLFTESKFQQRPAISASIAGYHRSDNKHSLSTSRDRLRIRWWTSRSRVIRHTRTCLSAVNGV

SEQ ID NO: 213910 - protein, 370 aa, Zea mays
  Clone ID: MRT4577_126682C.1.pep
HVRVRGGIDEHTTLLSLLEKHLIPGPWKDQLTQYRNTKLHDLKLFIQKCAKQSESPYRLLNIEEPLRPQLRGILVVEYPTINVFLPSDNCDFEMEKMVNRLPKDGKGPGSMTDEPPVEGSKFHEEEIEEGELSPETEIIDLKDHGTSNACKISPADVTSESKIVNNVDSSVLSYPGCQAQALHGQPKGLNQYSKISPNGTSGPAETKSRMEVCPLDMEKTRESGLSSEGRVVDLKGYGISYPVSTAEAGGAATSKIVPSSTSIVVSDGVTGPQLEHSQQNKRTPSSTPEALKRKSCMKVYPLDIDEGLFPEVPDLAFEQEMLDTYPELFENMDVDDFLSCDFAMVNRDEPVDATSGLPRDDLEEGEIPTL

SEQ ID NO: 213911 - protein, 70 aa, Zea mays
  Clone ID: MRT4577_126683C.1.pep
EMFRREERTKIYAPQFIFRERTLSLACQKVQHFIGSRGHILHSVAIGPATEPAITWARKDPFALGKLGPN

SEQ ID NO: 213912 - protein, 102 aa, Zea mays
  Clone ID: MRT4577_126684C.1.pep
CMRSCMGMVMAMSCQPSSTEIQAQKQQLPRPCRSPKPKEETLASSAFITSTEIHGPWESQARHRQWMDQASAVLVEPNQIIMLRPPAKGRSRDQTDTNGSAD

SEQ ID NO: 213913 - protein, 48 aa, Zea mays
  unsure (1)..(48): unsure at all Xaa locations
  Clone ID: MRT4577_126685C.1.pep
MRPRAXKKPAAKKVAEEEPSEKAAPAEKAPAGKKPKAEKRLPAGKFAG

SEQ ID NO: 213914 - protein, 70 aa, Zea mays
  Clone ID: MRT4577_126686C.1.pep
DGRTLADRGFNIGLTSYIIGNTTNLVVHAATNTFKMRDMVRRVSMFGSVNRLPPELREQMMASAHSRFST

SEQ ID NO: 213915 - protein, 110 aa, Zea mays
  Clone ID: MRT4577_126687C.1.pep
GQAAAAMESLLLEFLGGSFPGRDQGRQPASPSLLLPWPSPLCCRPNSISGQQSWRPAQRSLAPVFPPCARRRLGSTSARSTSMAPAAAPLFMDASPCYPFDTLRTTSVLH

SEQ ID NO: 213916 - protein, 125 aa, Zea mays
  Clone ID: MRT4577_126688C.1.pep
KGVPIPLKAEPIFGKPKRMGPLSFFSNGRKWICIQQIYVGNPEVFPFLWFLTTGPFIEFGGPQKKSHSFFANHAEAYVMGSHKGAPLNCFVFFFSIFFIINFLCNFCFLKFFFLFLSFFFFGRVG

SEQ ID NO: 213917 - protein, 182 aa, Zea mays
  unsure (1)..(182): unsure at all Xaa locations
  Clone ID: MRT4577_126689C.1.pep
MADEIDTKADPEDSRSRTEHATEDDDREEGEIATDAPSPDLPAAHPLKASWTFXYDNPHGYNNMDDCWSSIQPIHTFXSTVNDFCGLYCNIHHPNTLIGEPDFHCFKNWIDPXXEDPICANGVNSTISCVRGQSDSLCLHTLLAMIVQQFHYGDDICAAMLLMHXHQRSIAIXTKXAANEAA

SEQ ID NO: 213918 - protein, 51 aa, Zea mays
  Clone ID: MRT4577_12668C.1.pep
KPMLPQGGRFPPTVTGMRTANTSTCGPVGSQRRTVLRWGASVRRLRSARRC

SEQ ID NO: 213919 - protein, 68 aa, Zea mays
  Clone ID: MRT4577_126690C.1.pep
VISKKWHLLTGSVLMFIHSLVTIFKMSHLHLHSTDAHIHSHDLTLDNSGQACAHSTRRHVKGAYSFHS

SEQ ID NO: 213920 - protein, 195 aa, Zea mays
  Clone ID: MRT4577_126691C.1.pep
IPNCCAAGSHLVEHTSTSRSCEMQSNLADVLPLLLLVAPAAPPHDTTAPIPTRVSSSSCSPVSVSRSHPSISLKISTGWGIDAALLFCGNAEAAPHTILSIAARSCINRRTALIPVDRYYPEYSRISVSSTLDSQVSFYAGFSRTVAQRQKPHLLLSQQEGRADQDLNCATDDDALKEPTNGRRIHSDRDKCYHS

SEQ ID NO: 213921 - protein, 161 aa, Zea mays
  Clone ID: MRT4577_126692C.1.pep
LAPSPTPCIAPHPILSWTPGKPPSVLFRFILGHRLHMPTTFGSRNQTRTNTHQFLQCFTPVTVELRVVGFGKEVVLKQWWRMRWRLRLAMLLRLEAPTSGRRPIRWCRAPIHPAPIPPRLSSASTVAPPQRLAQSGLCHVLELPQHHDGVGPSLQSKMLFS

SEQ ID NO: 213922 - protein, 42 aa, Zea mays
  Clone ID: MRT4577_126693C.1.pep
SQHLHGLPMCAASVLFQHTTPMSLSSHSMIDRVLLGGEKAPG

SEQ ID NO: 213923 - protein, 108 aa, Zea mays
  Clone ID: MRT4577_126694C.1.pep
SSGTTRTAFFFFFFFFFFFFFFFFLRFYQKKNILTGLSKSNIHLSIKQSILLHKRWGGGHMNNNSLNPPTPQPHLLSHTPHRVIKRPRRRYPRPAAAQMNPVVLPSSS

SEQ ID NO: 213924 - protein, 260 aa, Zea mays
  Clone ID: MRT4577_126695C.1.pep
IFQRKEERKAKLQQHFAQLARMVGPANSMIPTGYPQVYFAHPSTHIPQGPPRQGFVYPPMGLSHEWRPSMFPPAPNLQQIHSPVMPNSPRHYRSNRGRMGGNMMPLPHASHTMNYMTHPQPAKEFMSLPRQRFNHPKYFSNDVMANSLPIHQSDPVSTMNDSFSNYLASAPPAEQKNLLGNRLYPLVERHQPELASKITGMLLELDNSEVVTLLCSSEMLSVKVDECVQLLQATKPKAEDHEALHPGFMLEPRPPTVNAS

SEQ ID NO: 213925 - protein, 53 aa, Zea mays
  Clone ID: MRT4577_126696C.1.pep
TLKTTTTTTTTTTTTTTTTTTTTTTTTTTTTTTTQPGSQPCNCNEHAPRGAPI

SEQ ID NO: 213926 - protein, 81 aa, Zea mays
  Clone ID: MRT4577_126697C.1.pep
GFFPLGQGNWKNPPPLCLFFTKNVSCFYPPHLRFPSFAKRKLKPAPPPCHKKSHPQVFVLKKKKKKKKKKKKKTKKKKKKP

SEQ ID NO: 213927 - protein, 53 aa, Zea mays
  Clone ID: MRT4577_126698C.1.pep
VTWVRSVDRMLQVLAFDQSLAECWVGCSAAVLLYPTPRACCMMRSAVILINST

SEQ ID NO: 213928 - protein, 130 aa, Zea mays
  Clone ID: MRT4577_126699C.1.pep
MARGVVTGAKGCAAGGGGKKKGSVTFTIDCTKPVEDKIMEIATLEKFLQERIKVAGGKAGQLGEGVTVTRDKSKVTVTSDGPFSKRYLKYLTKKYLKKHNVRDWLRVVAASKDRSVYELRYFNIAENEEE

SEQ ID NO: 213929 - protein, 69 aa, Zea mays
  Clone ID: MRT4577_12669C.1.pep
VVLAQQASLHVLELEPGSEAVLVLVLEHEPVPWPLLGLGLNCAALGSDLIQLYASCTAFLFRSVRATFC

SEQ ID NO: 213930 - protein, 79 aa, Zea mays
  Clone ID: MRT4577_1266C.1.pep
PLFVIYLTPQSYGNWDEKHGIPSRRVRPIVPALHVHLYHVNNGAGAGAGAFFTKVPIPKGEGRLPAVAGGLGWGWAPNN

SEQ ID NO: 213931 - protein, 102 aa, Zea mays
  Clone ID: MRT4577_126701C.1.pep
QLSQYLAYANTGHTHTGQLCIHTLFHHMVLIALLRHTHHSTRPHFSTHTLDSYSHTLPSAAVVSCLLPPSVVRRGNAPSHAHVLTTPPPPVPTSGGLFSFLV

SEQ ID NO: 213932 - protein, 165 aa, Zea mays
  Clone ID: MRT4577_126702C.1.pep
MDMISSCPICNIQVLTVELEWHANSHFDDDQLQRDIELAHQIAVAESSTDTMNDPKHYSGSFTSDSNTIGASSSHSGYSHHYSELLDEQISCMVRAQIRSKVQEVEGGIMSLLRSCLESEAGSSKSMISGYIDHHQSLSSEDKGWGCGWRNIQMLSSHLLKQRQE

SEQ ID NO: 213933 - protein, 45 aa, Zea mays
  Clone ID: MRT4577_126703C.1.pep
SSCIVFFQEGMHYGLQYSVLLLRDQLDCPRLCPVNKEQYLKKDSQ

SEQ ID NO: 213934 - protein, 44 aa, Zea mays
  Clone ID: MRT4577_126704C.1.pep
NDLFCFQKSHSCAHFFSSLSIDQCIGWKWICISQLWTLGSVFSY

SEQ ID NO: 213935 - protein, 539 aa, Zea mays
  unsure (1)..(539): unsure at all Xaa locations
  Clone ID: MRT4577_126705C.1.pep
MADGTDVSPESEATAAAGKSGEIWGTLEELLLACAVTRHGTASWDSVAMEVQTRIPVAARPGLTPHSCRLRFRHLHRRFSTVGSGGVEEAEEDPDASAAEGWVDELRRLRVAELRRDVERCDLSIGTLQSKVKRLKAEREQRASGEAVSDHDRLSSEEPGCSCRESNSTDLKPPKHPSQLGDGSKEEKVAKQEASVESAVDSKDSSEVRSSASLCRRRRGSGNAEEEEAEAEASKSSPLTFLLDAVLAKVXGGGPRRRERXSEEAAGCRQRMGGHGDLETLRRRLXVGRLARRRGTXGSSGHELYRDLLLLCTNIVVFFPGGTPENSAAVEARALVTGHASAVLHKPKQENVAVAAPAPASADIVGSLIEKGKPLIVCRKRSSIAKAAASARKEENTMKGETAEETEDEKKSVAAATKDKTWGVRTKKSRGGKNSAGPGRNLADGADGPRKGAGAGTDGLAKKRNAVDFLKRLNQSPPRKRGSGSHLGTTRKRPAAMEEQTTKRKRGTGRKEGTGRGGSRRGGKAAGAKRGVGRLARRR

SEQ ID NO: 213936 - protein, 87 aa, Zea mays
  Clone ID: MRT4577_126706C.1.pep
FLWRIGTGGGVSVRNKKLRLDKVLISHVLVLHLGPLGHLHHRNLRCHLGHWYFSNNILIRGHCGSLLFSTTLSRNVHVQLSLLSSSE

SEQ ID NO: 213937 - protein, 85 aa, Zea mays
  unsure (1)..(85): unsure at all Xaa locations
  Clone ID: MRT4577_126707C.1.pep
LAYKEAKRRIRRRHRVCQIAFGSWFKCISTVXRALRSVKGSQHSNPXMHEIDRFPVDVPKVFKVSSECNALLALIMSCQLFGYKI

SEQ ID NO: 213938 - protein, 73 aa, Zea mays
  Clone ID: MRT4577_126708C.1.pep
NFRQLCPNQPRGVFHCLPPIRLGILIPLIQRGPMQMHPGGFAGKNTKNFLKRKPSFIFGLARGKLPLPWLVGP

SEQ ID NO: 213939 - protein, 83 aa, Zea mays
  Clone ID: MRT4577_126709C.1.pep
IQCIQNLGPMLISAPGFSQERRRHCESLPSPATGAGTTTDAHWNPAPLLRSSTMTVPSAPMRSTPRQCLTVLAHAEELAPLEP

SEQ ID NO: 213940 - protein, 446 aa, Zea mays
  unsure (1)..(446): unsure at all Xaa locations
  Clone ID: MRT4577_12670C.1.pep
GTSSRRVSSTIPLRREPGSPCGLVLSFNGLTGTIPAEIGYLTALQDLDLNNNRLEGELPETLSLLKDLYDLSLNSNNFTGGVPNFRSSKLTTVQLDGNNFSGGFPLSFCLLTSLEVLDLSSNQLSGQLPTCIWDLQDLVFMDLSSNTLSGDVLASSTNSSLSLESLHLSNNRFSGEFPPVIKNMKMLVVLDLGDNYFSGEIPSWVGSGSPLLRILRLRSNMFSGSSIPLELLQLSHLRFLDLASNNLQGPIPHGLASLTSMGVQPQTXSTSDRESXQILNLEADFSYADRVDVSWKTHTYEFQGAIALMTGIDLSGNSIGGEIPTEITNLQGLRFLNLSRNNLSGTIPANVGDLKLLESLDLSWNELSGLIPSGISELTSLSSLNLSNNMLSGEIPTGNQLQTLADPSIYSNNYGLCGFPLSISCPNSSGVQVLDRSNKEIEGVYV

SEQ ID NO: 213941 - protein, 137 aa, Zea mays
  unsure (1)..(137): unsure at all Xaa locations
  Clone ID: MRT4577_126710C.1.pep
AIDMIEADTDTRIPIAIALWNTQSIASHYCXVFDXPGHPDLVEKMISGIAQSDXATPIIDSTTGSLXVSISIDXRSSEHAFLGFCIEVKEMICCCKKMXATTPKYSNARYDETANEPYNYLNNAAYDPDKIASVTIS

SEQ ID NO: 213942 - protein, 38 aa, Zea mays
  Clone ID: MRT4577_126711C.1.pep
MFPWPIFWEKKKKKKKKKKKKKKKKKKKKKKKKKKKNS

SEQ ID NO: 213943 - protein, 45 aa, Zea mays
  Clone ID: MRT4577_126712C.1.pep
INILIIFRNHMPLLVHHYFVHLICNIKDGTTNNGLLPRHGRVYQK

SEQ ID NO: 213944 - protein, 177 aa, Zea mays
  Clone ID: MRT4577_126713C.1.pep
RCCRPSSPSRAGHHRCSPLRAPCSTRPQPWCTVSAPPSTLWQAPSPAPVAVCQDHVRAHSQDARRFSSSPARLPLLHGAPCFVQRPTSSPSLKPWCLVALLGRSTPQWLESDPPVPLKSELSWCFLALSYRNSRRRWRCLAHAGAQGRTSVSMAVAAPSCPCVGSVCVAATPSSIPH

SEQ ID NO: 213945 - protein, 135 aa, Zea mays
  Clone ID: MRT4577_126714C.1.pep
GVWALAVPVPLGVSPPPPGFFAPVRGGFPLPFRLGPCWVGRSVRAFLFFRPLGVGGCAARRFCWVPPGFFPSRRCFRPGRGLLFGGPFGLFRCLPGVVWGVSFFCPPLFPLFFFFFKFFKNFFFFFFFFFFFFGL

SEQ ID NO: 213946 - protein, 109 aa, Zea mays
  Clone ID: MRT4577_126715C.1.pep
GFVFFFFFFFFFFFFFFFFFFFFVITNATSCFISNATSCLFVATCLPRKLGGAYLLIIKSTRLPGGSATVSMTTDDHGRALSPAAAPLPAEQLARTCPWEPGSTLTCPI

SEQ ID NO: 213947 - protein, 58 aa, Zea mays
  Clone ID: MRT4577_126716C.1.pep
KRRVHRRMWQRVLLEVHVVSYTSLMQSSHYPGLDLSTTPILTTDCSALDFTTIGAHLF

SEQ ID NO: 213948 - protein, 67 aa, Zea mays
  unsure (1)..(67): unsure at all Xaa locations
  Clone ID: MRT4577_126717C.1.pep
YEMTSRPPARAKEAPIQIKPPAVCGSNTRLFGLDGNVGEPPENPESPPPGAVSRNMPSXLLGVQQPP

SEQ ID NO: 213949 - protein, 82 aa, Zea mays
  unsure (1)..(82): unsure at all Xaa locations
  Clone ID: MRT4577_126718C.1.pep
MLPGRITMRRSVTSIPPSIGDIPERTQQLGPYSYQTATNLTAQSLGQYAFXTSXLSRDPETLARNHELQLTQSRRRKLMPLI

SEQ ID NO: 213950 - protein, 40 aa, Zea mays
  Clone ID: MRT4577_126719C.1.pep
YTVNYGRIMIDTSNLQPATFLTMSIILTNGGVYFYHGSKI

SEQ ID NO: 213951 - protein, 44 aa, Zea mays
  Clone ID: MRT4577_12671C.1.pep
GICNAYLYVIYIAIAILYKDAVGSVSVDRSYRRTHARRNVYRRC

SEQ ID NO: 213952 - protein, 63 aa, Zea mays
  Clone ID: MRT4577_126720C.1.pep
MASLSSVAVTAPSFAAPAPARAVVRRRSFTVRASLRKDTDTDGAEMAANGLIDGEDMPPGGAA

SEQ ID NO: 213953 - protein, 83 aa, Zea mays
  Clone ID: MRT4577_126721C.1.pep
ASHTCYDSFLTIIYIFVIEDDFHFKIHNYHFVKKFNALYEQFYLMSSREDFILAQFVPRCKLCLTGICYTCRTFKHLTYIFSF

SEQ ID NO: 213954 - protein, 68 aa, Zea mays
  Clone ID: MRT4577_126722C.1.pep
VVPLEHTTVLIVPMHSIRSHAPPQLVQRLHPRYTASPQKLLLLWIVSLWSLLQDAHWTARVVVSSPLI

SEQ ID NO: 213955 - protein, 349 aa, Zea mays
  Clone ID: MRT4577_126723C.1.pep
DAWVGGQPEFVQVDTRNAGVLEEALQGQYHTSSHVVAVRGVAKPEAAATPARRSRPIPLASVAVWSLVATGAANAAELWDPLALHGSSGLVLADLGIGDWFGGLLFSAGQQANEAVQDQLSALSFSSLAVIFGAGLVTSLSPCTLSVLPLTLGYIGAFGSGKGRSEVVGNSIAFSLGLATTLAILGVAASFAGKAYGQVGQGLPVAASGLAIIMGLNLLEVLELQLPSFFSDFDPRAAAANLPSGVQAYLAGLTFALAASPCSTPVLATLLGYVATSRDPIIGGSLLLTYTTGYVAPLLIAASFAGALQSLLSFRRYSAWINPISGAFLLGGGVYTLLDRVFPATSMAM

SEQ ID NO: 213956 - protein, 56 aa, Zea mays
  Clone ID: MRT4577_126724C.1.pep
VSARSIRLEEDERRRSVASAAASVLAAEYHGWGGVGRRGRIFLSSIRWSGLDKKSD

SEQ ID NO: 213957 - protein, 50 aa, Zea mays
  Clone ID: MRT4577_126725C.1.pep
AIQASTELASDKFNLTSSIIVIAGYKLQSKKPSLFSCDLPPRVPALLPLL

SEQ ID NO: 213958 - protein, 58 aa, Zea mays
  Clone ID: MRT4577_126726C.1.pep
RSPGHRKLTVPLVCPNTCTYVCRDLSTRSTHATDCCQTPILILNDKTFRLPSTEVWDE

SEQ ID NO: 213959 - protein, 46 aa, Zea mays
  unsure (1)..(46): unsure at all Xaa locations
  Clone ID: MRT4577_126727C.1.pep
FFFFFFFINNYLSYLXWGEGKITNKGGFKTNYPGLYHSFQTTFGKI

SEQ ID NO: 213960 - protein, 55 aa, Zea mays
  Clone ID: MRT4577_126728C.1.pep
SFLDLVTNIFGRDLSMVRLVFKLYPTNNTAYNAHRFSATDSASMPSIGSDRFFPR

SEQ ID NO: 213961 - protein, 373 aa, Zea mays
  Clone ID: MRT4577_126729C.1.pep
MCCWWCCCRCLECIHNIVPPLSSLPFLRFSGPALPGGGGGGAAAAVVASPPVVSMASISVPSPAPSATEDAENIRKAVQGWGTDEKALIEILGHRTAAQRAEIAVAYEGLYNEPIIDRLHSELSGDFRSAMMLWTVDPAARDAKLAHKAMKKQGERYVWVLIEVACASAPDHLVAVRKAYREAYSASLEEDVAACPLYKDPLLKQFLVRLVSSYRYSGELVDDELARAEAAELHDAVVARKQPLHGDVVRVVSSRSKAQLKATFERYRLDHGKAVDEVLEERRSDQLAAVLKTAVWCLTSPEKHFAEVIRSSIVGLGTDEESLTRAIVSRAEIDMRKVKEEYKARYHTTLTSDVNGDTSGYYNGILLTLVGPE

SEQ ID NO: 213962 - protein, 97 aa, Zea mays
  unsure (1)..(97): unsure at all Xaa locations
  Clone ID: MRT4577_12672C.1.pep
METEGADFNMERLPKNGKPTIGDSEHKLITDDXTRPNXLLSSVDLSNEHSIVDLKNRGTSTRRSIRQKKMTHMDSKLSRGHNARHEKMGMFKGLSEN

SEQ ID NO: 213963 - protein, 36 aa, Zea mays
  Clone ID: MRT4577_126730C.1.pep
LPREEFYLDIEPKWGHLMDLHLAAESVLEGPALVLY

SEQ ID NO: 213964 - protein, 87 aa, Zea mays
  Clone ID: MRT4577_126731C.1.pep
HRRTYLGSPEPHRHQVVAGQGPRAPDPGCDCARLPYAEVAHALREDRYEKVALLLGSHPFIHESKMTSIIQMVYALQKFFHLSPFFM

SEQ ID NO: 213965 - protein, 82 aa, Zea mays
  Clone ID: MRT4577_126732C.1.pep
RPRTLLTPSSIQKACTSSSYWMPRSSPVPTLGGNKGGPQDPLYEMDAHDRPWRSHLLNAGDPQESTADLSTRLALSPDCVIC

SEQ ID NO: 213966 - protein, 78 aa, Zea mays
  unsure (1)..(78): unsure at all Xaa locations
  Clone ID: MRT4577_126733C.1.pep
AGYLARRAGHKERVRLLYRTALKDTLKWCAHRHLFYHDASYLRNKIXANRHVDNLYVLDRLIYHAKAAYRNLKNQDPY

SEQ ID NO: 213967 - protein, 90 aa, Zea mays
  Clone ID: MRT4577_126734C.1.pep
AGRAGSHRLGWIDDSIKERVFAILKQAKLPIAPPETMTVEKFKNIIAVDKKVADGLLRLILLKGPLGRCVFTGDYDRNALDETLHAFCNN

SEQ ID NO: 213968 - protein, 94 aa, Zea mays
  Clone ID: MRT4577_126735C.1.pep
MGKGTGSFGKRRNKTHTLCIRCGRRSFHLQKSTCSSCGYPAARIRKYNWSVKAIRRKTTGTGRMRYMRHVPRRFKSNFKEGTEAAPKKGVAAAN

SEQ ID NO: 213969 - protein, 65 aa, Zea mays
  Clone ID: MRT4577_126736C.1.pep
LTLLSTCSLTRGFARQLLISEATTANNPMALVRQCRQLLHLTLPLDLFSLRVLTVASVHRCVVHL

SEQ ID NO: 213970 - protein, 562 aa, Zea mays
  Clone ID: MRT4577_126737C.1.pep
TLNAYNVLAARCAAEYLEMSETVEKGNLVYKIDVFLSASIFRAWKDSIIVLQSTRPLQRWTDSLKVVNHCVDAIASRASTDPSEVDWSYTYSRRKLPSETDGDARGWNGVRKRQAVPRDWWVEDLCDLEVCLYRKVILAIKAKGRTGGAVVGEALRAYACRRLFGSLDHAVSDGLDCTKHRAALEAVADLLPAEKGSVSCGLLLKLLRASCLLESGQAYRGELIRRIGAQLERASVPDLLIPADSGDGDGDAMYNVGMVAAMLEEFLLHHKVNGAEAEKREDGEDDVDVAADDPVTSSKLAAVAKLVDGYLSEIAKDPCLPLETFVALAESMPPLSRPVHDALYRAIDVYLKEHPGMSKGEKKRLCALMDCRKLTADASEHAVQNERLPLRVVVQVLFFEQVRQSAAAAAASAAPARSLILPRDDGASYGSSRSATTTATEDEQWGGGAVVGAPVTTSTSGGAGDAGSLRSVSQLSANENGRSGGGGDRKKAKGGAVAPAPVKRVLGKLWSGKASSGSDDTSASPVGSLNLEPGGDQVNVITDHEAFCVIVTILLYMFSLFF

SEQ ID NO: 213971 - protein, 101 aa, Zea mays
  Clone ID: MRT4577_126738C.1.pep
MATVRDRPMVGPQSSARNHPVMRPALPKSTPVKDSPYPGDHPQPGRVHRTPVGAWNHGGYPFSLSSLGCSLSISFSRSSGSEFMETCGYPRPGLAFMLADG

SEQ ID NO: 213972 - protein, 98 aa, Zea mays
  Clone ID: MRT4577_126739C.1.pep
SCSLHQSSYGQTDVSLAQQGTRPHLNSYVMRKTARSHQYAITIQHTADRLIPILPELRMTKISSADPYPLLSELEPKSYQLWKKSTTITSSFRFLDPT

SEQ ID NO: 213973 - protein, 103 aa, Zea mays
  unsure (1)..(103): unsure at all Xaa locations
  Clone ID: MRT4577_12673C.1.pep
PPIHRRRRFTFQAGVDDEYHVTILIAVIREYITQXGLQSVDRLKVFYMGRTDYYGGDFSSLNINQIFTMFRVEHKPSLHLSASRDNTVDIGPKVIIANGTLIQ

SEQ ID NO: 213974 - protein, 44 aa, Zea mays
  Clone ID: MRT4577_126740C.1.pep
HLHRSFFPYTVILGPSTPSLGDVFWLPWRGSLPAYLASYWLHRK

SEQ ID NO: 213975 - protein, 52 aa, Zea mays
  Clone ID: MRT4577_126741C.1.pep
TETGPSNVPNLTSPGGPGDNYILGGPKLIYLPPVFHRRDGKTLAVPHLSAFE

SEQ ID NO: 213976 - protein, 64 aa, Zea mays
  Clone ID: MRT4577_126742C.1.pep
LPPPLCPPPVPHPLPPPQPMEIFVDDETKLTLHGLQQYYVKLKDNEKNRKLFDLLDVLEFNQVS

SEQ ID NO: 213977 - protein, 99 aa, Zea mays
  Clone ID: MRT4577_126743C.1.pep
VVCDCQARVGLGPVLPEAAAACARGADQVARQGRCRCLDPGQEPAVDGAGGCCCVAARPYLLRGALLRESWRCWGETPKVRNGSGKCCFLLKNEWRSSK

SEQ ID NO: 213978 - protein, 98 aa, Zea mays
  Clone ID: MRT4577_126744C.1.pep
MAAVGVGAADERWASLCNCVVNFLLEERYHLTALELLQELQEDGRSAHALRLRAFFSDPALFPPDLVARSSSAPPGADPQILLEEKIAAEEKLALTEY

SEQ ID NO: 213979 - protein, 94 aa, Zea mays
  Clone ID: MRT4577_126745C.1.pep
CSICIDMCRVAISQDRRGPIGNRDALNEVGGPTNPTCNSRRGVDAPARRVLAPRIRSLDKCVLVTIGYSGIITVLYSRCLFCVKKKKKLVRLNF

SEQ ID NO: 213980 - protein, 62 aa, Zea mays
  unsure (1)..(62): unsure at all Xaa locations
  Clone ID: MRT4577_126746C.1.pep
QRRVLFFFFFXFFFFFNNLMHWKLGQNPRWFNTFYTMFRSKILSMSVLEVGKKHSYISVPHS

SEQ ID NO: 213981 - protein, 115 aa, Zea mays
  Clone ID: MRT4577_126747C.1.pep
RGVWGGGGEGFTNRKGGYQQTIPMVGGTSRGLTERFTQINLGGRTQGYKLQGAPITRHLGSNLPWKRGTKQPFFGCHGRGGYGYANYPSETKTGHATLGRSFSLIQTHASGDPWG

SEQ ID NO: 213982 - protein, 51 aa, Zea mays
  Clone ID: MRT4577_126748C.1.pep
FVSSSNLKPFLITPANPYLLGGSFESPLENHPYYLTLFSFYSYGTHRPTLS

SEQ ID NO: 213983 - protein, 62 aa, Zea mays
  Clone ID: MRT4577_126749C.1.pep
MEKYDAGQKQCVFTVFSNQDLVKFWPFILEKLIFHERGRIFPTFCFGWKIRSPNTGNYPNRW

SEQ ID NO: 213984 - protein, 73 aa, Zea mays
  Clone ID: MRT4577_12674C.1.pep
PRVRAPLRRARRAINDGNRHHAGRLDEKQGQRLLHLLLSTEDAPRALTSRWTSRCSCTPWRSWITLATAASIG

SEQ ID NO: 213985 - protein, 45 aa, Zea mays
  Clone ID: MRT4577_126750C.1.pep
YGGVAYAVLVLPRRRLLPCPCREDGNGGRVLTYLFLITLNQLIYH

SEQ ID NO: 213986 - protein, 115 aa, Zea mays
  Clone ID: MRT4577_126751C.1.pep
SGQSFTPRRSRIDSGAHVRSGALAPPLDLSCDDDSSNRKDVRCPWHAPGQGRAQFRPASRERYGGKKRATASVMTEDRQNHQIASTSGTDTQDLSSSGMNDTETKLFFFLPPPPP

SEQ ID NO: 213987 - protein, 96 aa, Zea mays
  Clone ID: MRT4577_126752C.1.pep
VPSSRSSAHHALRPRARLLALHESLLLSALVSYRRATRHASPTRRTRPPRRPPLRALRSSVVASLHLIEPKLCKCNPVPRLMISTLLRAASSVVTH

SEQ ID NO: 213988 - protein, 398 aa, Zea mays
  Clone ID: MRT4577_126753C.1.pep
MAGDPGDAPEVGGGGIRSVLTTASLVAPSGDEVQFREIDGKIIGLYFAANWYPKCEAFTPVLAAAYEQLKERGAGFEVVLVSCDEDRPSFERFHGTMPWPAVPFGDLSCKKRLSERFQVEGIPRLVVLAPDGGAVVHPDAADLVHRYGERAFPFTAARVAELEADDQRKYASQTLEKLFSVSGKEYVMNSGNNEKVPVSSLVGKTVGLYFSANHCAPCIKFTTKLAAIYSSLRGKAEDFEIVYVPMDREEDGYLRSCGDMPWLALPYDGAPSRALARYFDVREIPTLVVVGPDGRTVTRDGRNLVNLYFDMAFPFTDAQIRLLQEAEDEAAKEYPRSLRHRGHRHELSIVSEKSGGGPYICCECEEQGLGWAYQCIACGYEIHLRCGQNAEGGSAGTA

SEQ ID NO: 213989 - protein, 104 aa, Zea mays
  Clone ID: MRT4577_126754C.1.pep
ILSIVRRDLCVSTVVKIPSTKTGTLFVAVEHSQHPVPAPIDLAGLRPDEVIVFLAWTSVPQGREQEIAIITIISSADSCPRIPKEYSYLACGRYCFTEISEPGR

SEQ ID NO: 213990 - protein, 89 aa, Zea mays
  Clone ID: MRT4577_126755C.1.pep
DMAFPFTDAQIRLLQEAEDEAAKEYPRSLRHRGHRHELSIVSEKSGGGPYICCECEEQGLGWAYQCIACGYEIHLRCGQNAEGGSAGTA

SEQ ID NO: 213991 - protein, 197 aa, Zea mays
  Clone ID: MRT4577_126756C.1.pep
MAGAGDAAKEYVAGSAAGVAQVVVGHPFDTVKVKLQAHNTTAHGKVYKNAFHCTSRILLDEGITGLYKGASSSFIGIAVESSLFFGTYSQAKQLLQGSYEVGRPHLQVIIPSAACSGALISCILTPTELTKCRMQVQGKDVIHGARYSSPLDCAVKTLESEGVKGIFRGGLATLFREAIGNAVFFCTYEYSRYWMHN

SEQ ID NO: 213992 - protein, 213 aa, Zea mays
  Clone ID: MRT4577_126757C.1.pep
MAGDPGDAPEVGGGGIRSVLTTASLVAPSGDEVQFREIDGKIIGLYFAANWYPKCEAFTPVLAAAYEQLKDRGAGFEVVLVSCDEDRPSFERFHGTMPWPAVPFGDLSCKKRLSERFQVEGIPRLVVLAPDGGAVVHPDAADLVHRYGERAFPFTAARVAELEADDQRKYASQTLEKLFSVSGKEYVMNSGNNEKVSEQRACWIGSDELCWPS

SEQ ID NO: 213993 - protein, 73 aa, Zea mays
  Clone ID: MRT4577_126758C.1.pep
ALDVADTGAQSSPPRQRPAATPQPPPPHVVSNDSSRPSPATDIERPSLLQEQTCRAAAPPLEAYPATWRNRVL

SEQ ID NO: 213994 - protein, 74 aa, Zea mays
  Clone ID: MRT4577_126759C.1.pep
DKPKKQCFLTKLKQENQHNNQSEELTILFTQSRVHTRASIVLILNVLHCLCITFASPLNAASKLSAEAGIARTS

SEQ ID NO: 213995 - protein, 75 aa, Zea mays
  unsure (1)..(75): unsure at all Xaa locations
  Clone ID: MRT4577_12675C.1.pep
RNLGDRFSRAFEIALAVETSGAVTAAFASPKMHRNQFQPSPEAHDAYGNHTSDLSNSGKGXVXRNCXVSAAVSAL

SEQ ID NO: 213996 - protein, 50 aa, Zea mays
  Clone ID: MRT4577_126760C.1.pep
SGGGGGKKKHILVPGSHCLWAQDKSQCHQSAKSCKIETFKLYTPNIVFLG

SEQ ID NO: 213997 - protein, 106 aa, Zea mays
  unsure (1)..(106): unsure at all Xaa locations
  Clone ID: MRT4577_126761C.1.pep
TYDTDASSHYKAPFSKTIYDXRTLLLRAMNKDYYLSNTPXKSVILKYTFSIKSTHFISQDTPNDIPXIQAEYKPLQTFKLKRLLHXITQPRLLLSPFNVLITLFHK

SEQ ID NO: 213998 - protein, 251 aa, Zea mays
  Clone ID: MRT4577_126762C.1.pep
RTISILQQAIRHLLPGVRPRLPWQAPLPCFLSMEHKSPSRAPPLWLASPRGALPPSPLSFLPGAPPSSLPCAAALWLIPMAFARPCPSPAAPALAHLRAPHPVLYARAAVKFHVSRAPPAARRALYFFLRCARARHPPLLAEAPSLRALRPAKVSPATAPLGVPTAPRLTHAPTLLFTGFAQRHLLAMDVVVLQSRGRVPLYPNIGSVPGLVFVDLFTPLPWSTNLADVALWLSPLGLTDDFPRPKPCPRA

SEQ ID NO: 213999 - protein, 113 aa, Zea mays
  Clone ID: MRT4577_126763C.1.pep
AVVTTQSTFFFFFFFFFYSMKCFGTNISVNNHTMPRVLSDHPQNRNNKFETLNMNVRRPIMTKCLFVVGVYHWNEQCCTIDFQMEPHPKTQQASFLTHLNDDNKLINFIRYEI

SEQ ID NO: 214000 - protein, 66 aa, Zea mays
  Clone ID: MRT4577_126764C.1.pep
RGLATLTPTSWKVLFRGTLWLRLWGQLQKSADSANLLKKACRHLETMAMPFFAYRGWRFFNRITVY

SEQ ID NO: 214001 - protein, 133 aa, Zea mays
  unsure (1)..(133): unsure at all Xaa locations
  Clone ID: MRT4577_126765C.1.pep
MNDELIDDLIQGLLEGPGGSTQGNEHETDAQIRSLCDTVNDHFIFQDILVELKTSINIRGHVHDQHSYLXRMLAXADYPPQAHDEYLGDYEHSIKQIIHTLCLILKYKIKYPHHMFLLKGDHDSRLYNRIYEC

SEQ ID NO: 214002 - protein, 92 aa, Zea mays
  Clone ID: MRT4577_126766C.1.pep
PSSRRPPLCSLLFFYHKEWKTKQRTPPRDNTSGRSARITCPGSLRKHLMTIEGTTMSRTLQPENARQGPNAISLNMMVLQKTVEIQDMGEDK

SEQ ID NO: 214003 - protein, 77 aa, Zea mays
  Clone ID: MRT4577_126767C.1.pep
SRLVVGLHQCVLFEQPRTPSTSCRSGACVNDAACSSELHHASLSSGCPHTWQHSISTSSYSAACTLLVLDSDGCAGL

SEQ ID NO: 214004 - protein, 49 aa, Zea mays
  Clone ID: MRT4577_126768C.1.pep
ITRSNPHLSNYLPWHITLFVIPLLFTRDYTLLFVQHRLFSDSQTRIFTK

SEQ ID NO: 214005 - protein, 308 aa, Zea mays
  Clone ID: MRT4577_126769C.1.pep
MYLRLSNLRVQGVEMKIRQGEKLPTLLFLRHPLSRSPMVTLVSAVIKLARMSLTHPQLMQHCPDESKEKRKTQKPPAQLSSIKRDEEQSNGESAKPRKVGSTPSYGFTFKCDERSEKRREFYSKLEEKIHARELEISNLQAKSKETEEAELKMLRKSLNFKATPMPSFYKEPTPAKVELKKIPPTRAKSPKLGRSKNKSISETEENTTTDQPARLSLDEKVSQNGVKKPTPSSSAKKPQRKSLPRLPSEETCPLDATSRQLKNNKLDEVNAQETGSATGQVQGSETETDSVQSATQAGANPDEQSVAQ

SEQ ID NO: 214006 - protein, 349 aa, Zea mays
  unsure (1)..(349): unsure at all Xaa locations
  Clone ID: MRT4577_12676C.1.pep
MLLPGLPVAGLAVGFYNEKCPQAEDLVLAEMRTLVDKDETIGPALLRFMFHDCLVRXYVAAAGLLIVCLLLDTSFLDVFFFLLLLLPRARAQGCDASIMLVSRNGTAERDAFPSYGLRGYAEIEHIKAKLEDACPLTVSCADIIVMAARDAVYLSNGPRYAVETGRRDGKVSAEYDADNDLPPPSSKIVDLKTYFSFKGLGWKDLVVLSGSHTIGRAQCTTFASDRLYNYSGHVGQDPSLNKAYAAQLREMCEPGLADDTTMVEMDPRSPYTFDLSYYRNVRANRGLFTSDQALLDDPWTSAYVERMADAASPDEFFADYAAAITNMGRIEVLTGDNGEIRSACAAYVD

SEQ ID NO: 214007 - protein, 90 aa, Zea mays
  unsure (1)..(90): unsure at all Xaa locations
  Clone ID: MRT4577_126770C.1.pep
MTLYISDYTISYTISFFIPGWIFYIIPMXPXKAHSFNEYNVLFQCKLYYQNVMVFQFFTYGKVLFLDLIIHVTERDEFSYQEIITHLPLC

SEQ ID NO: 214008 - protein, 48 aa, Zea mays
  Clone ID: MRT4577_126771C.1.pep
QLACLTAESQMSGEDDLGGADSTSPRSKSILIARVVGPGSTLALAHAS

SEQ ID NO: 214009 - protein, 80 aa, Zea mays
  Clone ID: MRT4577_126772C.1.pep
KRLTFLPFCICIVLTNYFLFIDAPTYFKGLAFTTAQYLLFWCIFYLNEFPTGNHRHQLWFTNILFMNMFSCVLCVSSSLV

SEQ ID NO: 214010 - protein, 221 aa, Zea mays
  unsure (1)..(221): unsure at all Xaa locations
  Clone ID: MRT4577_126773C.1.pep
MRAMRAEATESSALTAGAAHLLCFAGLAAAHTLAGRGALVSDPALALRLLVVCEAPIVIAVFSYLRRDAKSCSIFKAVARGLIXLALGAFLNAFGAIVLGAPVGIKYWIPTIYWSLLMSLFTFVPAACVFGASKIDWQNVLSHSIYFMPTDVENYMISAPCHGAVLGAWLGGWPMPLDWERPWQEWPICVSYGAVAGYLVGMAVSVVLVAVHNRRVRAKAD

SEQ ID NO: 214011 - protein, 68 aa, Zea mays
  Clone ID: MRT4577_126774C.1.pep
LSVYVKKNRLLKYTRISYLKDCPQSMLELGYPALVLALYGTRVCFFFSECLQTHSGTLKPIWGNFFGS

SEQ ID NO: 214012 - protein, 109 aa, Zea mays
  Clone ID: MRT4577_126776C.1.pep
AYLHHHSNPSIVHCDIKPSNILLDENMTAHVGDFGLARILNMDACEHNSGGSSSAGIRGTIGYLAPEHAMGLRVGVEAEVYSYGVLLMEILTKLRPTDHMSFDGATSLV

SEQ ID NO: 214013 - protein, 67 aa, Zea mays
  Clone ID: MRT4577_126777C.1.pep
VQWDQSWLRCSQLIWRWCWLVLPGWWLLQLSGGTESYNCPSFSLPYLDVCLKLAPDDLFFQPSRFNP

SEQ ID NO: 214014 - protein, 57 aa, Zea mays
  Clone ID: MRT4577_126778C.1.pep
NAMQILFWIHSILTSNIYVQMGPFCLVSLLSVLFSSDPQGTLLWCESTLQGTIFLKI

SEQ ID NO: 214015 - protein, 107 aa, Zea mays
  Clone ID: MRT4577_126779C.1.pep
AGAQQVFWRRRTAQSFSFRGTAVFIWSHCFRWTRSLYTQIWRFHGVVVVLTWPSHELDLILDHGRGRGKEEFFHYVEHGVWQRLRAARSQEVSRRRSIGMAPGRPRG

SEQ ID NO: 214016 - protein, 90 aa, Zea mays
  Clone ID: MRT4577_12677C.1.pep
AWKSLPDGNEFSKKLPGFVINNKKATVERFSTSKVFFKTQRKKANMDVLYLSPKKPPGIPLLKKVTTLVGVPGVKWAVQTPKKEKGPLFF

SEQ ID NO: 214017 - protein, 118 aa, Zea mays
  unsure (1)..(118): unsure at all Xaa locations
  Clone ID: MRT4577_126780C.1.pep
SLSLAGFFTPQTTGFLASLPPLCFXLLLCFFLIIAFFLVFFXGGCFFGWLSTSGFFLFWGGGVFSGECLSCCRGLRYLFFFGTSGGALELFSAGFLWGLFFALFFVCGPGASYFFFLA

SEQ ID NO: 214018 - protein, 91 aa, Zea mays
  Clone ID: MRT4577_126781C.1.pep
TPVLCTSSLHSVAANQSAMCEPVKHGPGLPNPYAKFTFMMLGLLGPALSSFVRCHVDANKIVLLLTCADPDISGVSLSSGGSQALIVVVLW

SEQ ID NO: 214019 - protein, 122 aa, Zea mays
  unsure (1)..(122): unsure at all Xaa locations
  Clone ID: MRT4577_126782C.1.pep
MLLDTVLASTPWAKHNIGITAHGRIGRLVXARVALQSXDVELDDGNDPXFITTDYMIYMLQYDTVHGTXKHSDITPQDCKTLLLGDKPDTSFGMMNADEDPWGEAGAEYGGESSGAVTGKDK

SEQ ID NO: 214020 - protein, 131 aa, Zea mays
  unsure (1)..(131): unsure at all Xaa locations
  Clone ID: MRT4577_126783C.1.pep
MTSSASPNPSPVPVPTPITTANGTTSSPKDQPPPPPPLPQQQQQQGGXGGGRGXDGGGAEAAEAGVLAGVAAEAMEVDGGSGAGDAEAGGSVGGGVGAGAGGGAQQASPATGFRXRLXQSPWSLRPRMAVP

SEQ ID NO: 214021 - protein, 81 aa, Zea mays
  Clone ID: MRT4577_126784C.1.pep
QLAAAENPEQSSKHQLGPTKQPAGANRRPPGYNARGGGAASTLRLAPTPSPKGNDGSHPTNVARTNPADSQPATQHWWCLL

SEQ ID NO: 214022 - protein, 83 aa, Zea mays
  Clone ID: MRT4577_126785C.1.pep
INKKNGTSPNKKNKRFNPGKVWGTGPIETGPHHFYHPRKIFFSPVFLKPERDTFTQKFLFFISGVLFKTPPPPPRGPPLTGGY

SEQ ID NO: 214023 - protein, 98 aa, Zea mays
  unsure (1)..(98): unsure at all Xaa locations
  Clone ID: MRT4577_126786C.1.pep
EGKKAETQQKGEKKRQTRRQRXKRSGEKKPRTAKKRHKRDKETNTTRRSQKTIRDQKQHHTDPAERNRSLQNSMGRYPSTNVTGDPNGPGGSERSPTT

SEQ ID NO: 214024 - protein, 89 aa, Zea mays
  Clone ID: MRT4577_126787C.1.pep
LAMAGAWALVHFTRGWRFGPGRAAGVCRRGSRGGGGDLHEDSVPRPVHQDGGEARQQVQGGGRGDGARDPPPPLKKPRLGVSKAHQGGG

SEQ ID NO: 214025 - protein, 375 aa, Zea mays
  unsure (1)..(375): unsure at all Xaa locations
  Clone ID: MRT4577_126788C.1.pep
SGHGPSAEAGEAWLGRGVGCRDKIYRKMGEGTFGQVLECWDRESKEMVAIKIVRSVKKYSDAAMIEIDVLQKLAKNDAAGKHCVQIRNWFDYRSHICIVCEKLGPSLYDFLQKTGFHPFPIDLIRRIGQQLLESVAFMHRLQLIHTDLKPENILLVSSDYVKLPDPKDGSFSRKLPKSSAIKLIDFGSAAYHHQDRSYIVSTRHYRAPEVILGMXSRCLIAHVLFITCGAQLLNICVAVVRXGWSYPCDIWSVGCILVELCSGETLFQTHENLEHLAMMDRVLGPLPRHMLERADQHAEKYVRKGGLNWPQAITTVESVRAVLKLPRLQNLVMQHVDHSAGDFIDLLKRLLAYEPSGRLTAQEALGHVFFTRYRQ

SEQ ID NO: 214026 - protein, 46 aa, Zea mays
  Clone ID: MRT4577_126789C.1.pep
KHLCGARAPFAPSALSSGQVRALRAAFTGFSSAHGISRRAPPPDEA

SEQ ID NO: 214027 - protein, 332 aa, Zea mays
  unsure (1)..(332): unsure at all Xaa locations
  Clone ID: MRT4577_12678C.1.pep
MLLPGLPVAGLAVGFYNEKCPQAEDLVLAEMRTLVDKDETIGPALLRFMFHDCLVRGCDASIMLVSRNGTAERDALPSYGLRGYAEIEHIKAKLEDACPLTVSCADIIVMAARDAVYLVNKIIISSLRHNLLLSDRTISTXYTLIELKKRLLLVXSNGPRYAVETGRRDGKVSAEYDADNDLPPTCSKIVDLKTYFSXKGLGWKDLVVLSGTIQPMSCPTTYVRTSCKQSSXRLIDRRRWYTRNNPXACSAGSHTIGRAQCTTFASDRLYNYSGHVGQDPSLNKAYAAQLREMCEPGLADDTTMVEMDPRSPYTFDLSYYRNVRANRGRTRG

SEQ ID NO: 214028 - protein, 422 aa, Zea mays
  Clone ID: MRT4577_126790C.1.pep
MATKYAAAAADLVTGRPRKRARLGWDVASAAEAQIGTFCGQEVGDVASLLLSANPSDHTCSSLLPKGVARNASPPWREDDKDGHYVFAVGENLASRYKIYRKMGEGTFGQVLECWDRESKEMVAIKIVRSVKKYSDAAMIEIDVLQKLAKNDAAGKHCVQIRNWFDYRSHICIVCEKLGPSLYDFLQKTGFHPFPIDLIRRIGQQLLESVAFMHRLQLIHTDLKPENILLVSSDYVKLPDPKDGSFSRKLPKSSAIKLIDFGSAAYHHQDRSYIVSTRHYRAPEVILGHGWSYPCDIWSVGCILVELCSGETLFQTHDNLEHLAMMDRVLGPLPRHMLERADQHAEKYVRKGGLNWPQAITTVESVRAVLKLPRLQNLVMQHVDHSAGDFIDLLKRLLAYEPSGRLTAQEALGHVFFTRYRQ

SEQ ID NO: 214029 - protein, 95 aa, Zea mays
  unsure (1)..(95): unsure at all Xaa locations
  Clone ID: MRT4577_126791C.1.pep
MDEDYLGSFQAIERYHVLELNRPXTYSSTYLDLHKDXRKMYLMKKIPLCKHNDKFHTTSYHEMSLMANLSNPYIVKYKDGWVYQGTIICIVTSYC

SEQ ID NO: 214030 - protein, 77 aa, Zea mays
  Clone ID: MRT4577_126792C.1.pep
SRGFFVQTFFHFFFSYIFFGGFRCQLYCPCNLFQKILCNNRLLKKNSLNQDQMALNRPTLNHPISLLPQEPGHLSDP

SEQ ID NO: 214031 - protein, 100 aa, Zea mays
  Clone ID: MRT4577_126793C.1.pep
ENPLARGCPPQGFTQTHSFKAENRQPETLGFKGKGWPGPRKPSLSPPFRTFFPGKASSRTWGWKNYRSCFGPPIGCFELSPRPWLVNWAFCLFFSLFQFC

SEQ ID NO: 214032 - protein, 89 aa, Zea mays
  Clone ID: MRT4577_126794C.1.pep
PINLLVLSAYGCVCVRISRMDRCSAVPALVPEFAPALGGVRLLLRCYLLPCEVIPLLLILLAPAYAVINERPVDLRDLTCVANYFLGVA

SEQ ID NO: 214033 - protein, 111 aa, Zea mays
  Clone ID: MRT4577_126795C.1.pep
PFSVNRVVEFFFFLGLFFKNCLYKTRPGRERPPSWSRPRKSPNLGPPSLAGRHRPLCNGPAGGWRAGRNPGAGGAQRGDFFNQAINSPPRGIEPRTWRCYSKALTITLEAC

SEQ ID NO: 214034 - protein, 81 aa, Zea mays
  Clone ID: MRT4577_126796C.1.pep
SQSPPACWRCCLPESGYYHSCQDVERDRSPLCRRRRCCRHRCRLRSTHLRLPQLTLPLGDDSRTEGERIHGPTGRGHGTWI

SEQ ID NO: 214035 - protein, 197 aa, Zea mays
  Clone ID: MRT4577_126797C.1.pep
MTTYRVCCFLRRFRAASNEPSEAVGDVFRAYADGGGGVLGEEALRRFLREVQRETDAGADAAAKEVVAFAAEHRLLSKGRGLTAEGFLRWLFSDANAALDPRRGVYQDMGLPLSHYFIYTGHNSYLTGNQLSSGCSERPIVKALHDGVRVIELDLWPNAAKDDVEVLHGKWVGSVAAGNKSPKQNSAQHAVYPAPRY

SEQ ID NO: 214036 - protein, 78 aa, Zea mays
  unsure (1)..(78): unsure at all Xaa locations
  Clone ID: MRT4577_126798C.1.pep
QEMLSVTIEDFVNKGNLKVNPEIQTSQSEVXMEYAFDPGSAFGFTVVIQLETPDSDDPEKKLGSNDDLQKESGSWQYK

SEQ ID NO: 214037 - protein, 61 aa, Zea mays
  unsure (1)..(61): unsure at all Xaa locations
  Clone ID: MRT4577_126799C.1.pep
AILRQCRILVLDEATACIDNAIDAIVQTTFRTAFTHCTVITVAHXRIRHVMECDMGLAISD

SEQ ID NO: 214038 - protein, 75 aa, Zea mays
  Clone ID: MRT4577_12679C.1.pep
SFLASSQDSPSPSRRDLPVDALSCPSAFCRTLSLWFPWLPGQVCCLAVMSELFPYATTFPLPLLLACVVPISSPQ

SEQ ID NO: 214039 - protein, 56 aa, Zea mays
  Clone ID: MRT4577_1267C.1.pep
KCCHDSVFPCTHCHLSTRSASSIGIEGPSLHQSRQLFLSMFSLISIVSASISSVDL

SEQ ID NO: 214040 - protein, 51 aa, Zea mays
  Clone ID: MRT4577_126800C.1.pep
MAASSAVEKLKVLWDSQVNDEEQWSAQKLSTPSTRHYFTQSLKLALALLTK

SEQ ID NO: 214041 - protein, 142 aa, Zea mays
  Clone ID: MRT4577_126801C.1.pep
RPGLTHQRRAMAPASVPALPTAMDTKDEGDGGSKNQNSVVVVKSEVVCTNGGPLVVGTELVKYEGGDTTECSSSFGDTCSGFEGEADNGEPEVNSSLSAHANGVGPSKPPRRKKVMAEWSNSVRPIQWRCHWLELRMRELSS

SEQ ID NO: 214042 - protein, 71 aa, Zea mays
  Clone ID: MRT4577_126802C.1.pep
WEDIKGSSASCQSFCVSDMISTCISSFEPFRLRIMLCLRIRAFMWCSSSSGPGPKLRPPYCLFSVISRQLW

SEQ ID NO: 214043 - protein, 106 aa, Zea mays
  Clone ID: MRT4577_126803C.1.pep
CVRPGCQGPYAPTRTPPEFPPIFLPEEDHAGGQMTFSKEIRRGRTESKERSRVVEDFARKKINSRVVRWRIGHQSGRIAMAVVCGNQDGGPGHDRSGLGSKASCRI

SEQ ID NO: 214044 - protein, 197 aa, Zea mays
  Clone ID: MRT4577_126804C.1.pep
GGTKAVFASVYHLRSNGVVDRANGKIFSAIKKRLLDDKKGKWPDELPEVIWALNTTESRATGFTPFRLMYGSEAMTSQELKHGSPRTSPIAIPDVDEPTSKDLIDGDRVLALEALNKYQAQTKAWRDNKVIPREFKEGDLVLTRTIRTESRGRLEPKWEGPYIVKTKTSPNAYRLTSSSDEDLEHSWNIDNMRKFFV

SEQ ID NO: 214045 - protein, 81 aa, Zea mays
  unsure (1)..(81): unsure at all Xaa locations
  Clone ID: MRT4577_126805C.1.pep
QKNVDEKVKEAGSSMRKRAKLISTVSKKDFISVLRGMDGSTNETASSRKKPKAKQTEVTSXEGPGWTILRDDFMMGASMKD

SEQ ID NO: 214046 - protein, 86 aa, Zea mays
  Clone ID: MRT4577_126806C.1.pep
SRCSGRAVGQRAQQGARSRTRPGELQAGARDALRLGNREELAGKGEERPGRRAEGRAELEAERHEPSGGRARQGTRLGEQGEAPSG

SEQ ID NO: 214047 - protein, 68 aa, Zea mays
  Clone ID: MRT4577_126807C.1.pep
WSSGQRQVLCTPMRTTPSSCCKKISEHQASARIMPKLLAMLSMGPWFVMLHVSCRGLLVNPVNERLGW

SEQ ID NO: 214048 - protein, 69 aa, Zea mays
  unsure (1)..(69): unsure at all Xaa locations
  Clone ID: MRT4577_126808C.1.pep
MGGVREPGVRRKRKKVVVDYLVKFRWVXGILVGLAIXAVVCLRMFLGGMWGAMKAEKKRRKQGGENGQK

SEQ ID NO: 214049 - protein, 117 aa, Zea mays
  Clone ID: MRT4577_126809C.1.pep
REVSPAEASLLMLSLSDTMYAQAGCLRAYDRFAPYKGCCTEARRPSGSGQRMMDVGPCFGRTVDARGTRGRGQATDEREGRDRRTSATSKTKAADNERVECESGLTPYRFARPDRPV

SEQ ID NO: 214050 - protein, 86 aa, Zea mays
  Clone ID: MRT4577_12680C.1.pep
PPLLDFAISLSYAVFWALPDFLLVKRENLERTRDGEHLRRLREGQGRRRISGRLAQVRALRQSRTRCALLCYPVRRRRVQSRVAVS

SEQ ID NO: 214051 - protein, 108 aa, Zea mays
  unsure (1)..(108): unsure at all Xaa locations
  Clone ID: MRT4577_126810C.1.pep
NFQLQSLHGKSRVRVYTVWRRPAAAVGYAIANWNVNDSIVYDWLXPXYTYSDNXCNFTTDSIINTVHVXAKECTEVVSMAEFATILGRHFTILYPDVSEATVTIAERP

SEQ ID NO: 214052 - protein, 57 aa, Zea mays
  Clone ID: MRT4577_126811C.1.pep
PDHLSSILTHLVDTHSYTLKKERESLPPPAHTTKTPLNYQSLHNPCMYSYTRITLRT

SEQ ID NO: 214053 - protein, 70 aa, Zea mays
  Clone ID: MRT4577_126812C.1.pep
RRCLLMNLKANTLCCPVKMYYMTVPTRIACRLDALNGSNKREMTALRLGMSKRPSQDTDRRVEVDLIMGY

SEQ ID NO: 214054 - protein, 281 aa, Zea mays
  Clone ID: MRT4577_126813C.1.pep
RATTAGFWKATGRDKAIFLGNASRRIGLRKTLVFYIGRAPHGKKTDWIMHEYRLDQENVEIQEDGWVVCRVFKKKSYHQRGLNPAEMAAALDDDELQPFPVPIPGSSLQPTEHKTNPTHLMQYDYPSFDPSMQLPQLMSDDQEQEQPVRPTLLPGHPGVAMASMSSLNIECSQNLTKLTSNGSDEMLHVGHGGGAGGGVVVDRFAGTTTDWSILDKLLASHQNLDRLFHGKVVTTASASPMAVPVYHQQLMELGGSSSSLQRLPLQYLGGETADLLRYHPK

SEQ ID NO: 214055 - protein, 438 aa, Zea mays
  Clone ID: MRT4577_126814C.1.pep
MCCNAKVSPLPVEMDTSASKVLTNDDLLHDILLRLGCPSCLVSAALTSKCWLRGASDQVFARDFCADHQPRLLGIYVSSGGISGSEFIPFRQPAGGSRPEVSTVLNHADFGLGDLPAPSVWDCRNGMVLFQFGGETFNPAGLAARSPLLYPNMHESVVLPPSPQPSYFPEYPHAMLLPTDKGDDALCYRVDVRIWESHNKAAALVWVLRSGSWHIRCIAAGVLAKSPAQILPTTVLDGGKIYMATQAGYILGLDLATARFFIVDLPRGVELDQYPGNLVHCRGDDSVLYLFHVDGDNRLNVWLRRMEDDQKGHGGPGAAGGSAGATKGWVLRDTISVRETCGHLVEQGWEKAGDDEDAAAVMIVGAGDNAEFVFLELGVTGVVAYMHVKTREVKQVYQRQPDDDHFISVRPFMLVKPPVFPVLEDAHEGEAAAALHQE

SEQ ID NO: 214056 - protein, 117 aa, Zea mays
  Clone ID: MRT4577_126815C.1.pep
IRQIFFLILIIVIFGGGRTLHFEIGSGSLLMDKNKETATHGIIFKQSGKPGDYYHRGQRAFRRSSPEFFSRPPLCPSVINPPSSPLNNDTNFEKIFQIWGHNFFFLSALILEVNHRS

SEQ ID NO: 214057 - protein, 35 aa, Zea mays
  Clone ID: MRT4577_126816C.1.pep
AFIYGAVHFNMERHNKSFPDLDHGLAVPGKCLSQL

SEQ ID NO: 214058 - protein, 62 aa, Zea mays
  Clone ID: MRT4577_126817C.1.pep
GVFKHTRRGHPANRSTSATQLTPRGARRSTNHLHEAPRLSTHHGHNRCSHYTRLHSIHACTR

SEQ ID NO: 214059 - protein, 51 aa, Zea mays
  Clone ID: MRT4577_126818C.1.pep
PQPPSFLGGSGQFRGWPKGLAASCHPRLVEPSFLILQNGGPNTFFGRVAST

SEQ ID NO: 214060 - protein, 62 aa, Zea mays
  Clone ID: MRT4577_126819C.1.pep
RSNLKTSLLKCFIHFQADADGNGLIDYDEFVTATVHMNKLDREEHLYTAFQYFDKDNSGPRV

SEQ ID NO: 214061 - protein, 95 aa, Zea mays
  Clone ID: MRT4577_12681C.1.pep
FGTGAPMPLKAWGLPKKSPGSQASTLLGQQNHPCESCFFFCSPMKPVKTPLNHSNDWEKNREETCKPPRAPPKELFCFKKFHVLSERNGNPVWLF

SEQ ID NO: 214062 - protein, 73 aa, Zea mays
  Clone ID: MRT4577_126820C.1.pep
PPLSFRGHGRRYLVALGVKRKNHLRCAPQQKEGISGGRLKHKKGEGKKKFVRVWSFGGPRAPSTLVVLSWSGG

SEQ ID NO: 214063 - protein, 69 aa, Zea mays
  Clone ID: MRT4577_126821C.1.pep
GRGGRLRTPDTDQQGGRGLGGYKNTGRRRISYHHTTDGPGTGVQIGKAFIYLPWFDGFHLGLVRGWAPI

SEQ ID NO: 214064 - protein, 241 aa, Zea mays
  Clone ID: MRT4577_126822C.1.pep
MASSQCCDNPPALNPACGEGKVVDSFGGLKAYVAGPEDSKAAVVLVADVFGFEAPILRNIADKVASSGYFVVVPDFFHGDPYVPENAEKLIPVWLKSHTPEKGFEEAKPVIAALKEKGVSAVGAAGYCWGAKVVVELAKANELLKAAVLLHPSFVTVYDIKEVKCSISILGAEMDVRSPPELVKQFEQALSVNSGVGHFVKVFPGVAHGWSVRYSLDDAAAVKSAEEAFADMLDWFNKNLK

SEQ ID NO: 214065 - protein, 79 aa, Zea mays
  Clone ID: MRT4577_126823C.1.pep
FRSGGKQLFGYGLLGPSQIAPWVLGCKKVSGFLFFKKYVKWEDLNCSFVPGWIVLFPTKITFCFMGEKKKKKTHKEKNK

SEQ ID NO: 214066 - protein, 241 aa, Zea mays
  Clone ID: MRT4577_126824C.1.pep
MASSQCCDNPPALNPACGKGKVVDSFGGLKAYVAGPEDSKAAVVLVADVFGFEAPILRNIADKVASSGYFVVVPDFFHGDPYVPENAEKLIPVWLKSHTPEKGFEEAKPVIAALKEKGVSAVGAAGYCWGAKVVVELAKANELLQAAVLLHPSFVTVDDIKEIKCSISILGAEIDKMSPPELIKQFEQVLSLNSGVGHFVKIFPGVAHGWSVRYNHDDAAAVKSAEEAFADMLDWFNKNLK

SEQ ID NO: 214067 - protein, 240 aa, Zea mays
  Clone ID: MRT4577_126825C.1.pep
MASSQCCDNPPALNPACGEGKVVDSFGGLKAYVAGPEDSKAAVVLVADVFGFEAPIMRKIADKVASSGYFVVVPDLFHGDPYAPENVEKPFPVWIKSHTPEKGFEETKQVIGALKEKGVSAVGAAGYCWGAKVVVELAKAHEIQAAVLLHPSFVTVDDIKEVKCAISILGAEIDKMSPPELIKQFEQVLSLNSGVGHFVKIFPGVAHGWSVRYNHDDAAAVKSAEEAFADMLDWFNKNLK

SEQ ID NO: 214068 - protein, 101 aa, Zea mays
  Clone ID: MRT4577_126826C.1.pep
RLPNSGILADQRVAGKGVPIGGIDRLSLKAGMFHVEYRPWQEEHYPLIYQLWAGLQQHLAEGELHMYVENLLAQQEQNVGIKEGAIKGQLFHLIFCVLRNP

SEQ ID NO: 214069 - protein, 237 aa, Zea mays
  Clone ID: MRT4577_126827C.1.pep
MASSQCCDNPPALNPACGKGKVVDSFGGLKAYVAGPEDSKAAVVLVADVFGFEAPILRNIADKVASSGYFVVVPDFFHGDPYVPENAEKLIPVWLKSHTPEKGFEEAKPVIAALKEKGVSAVGAAGYCWGAKVVVELAKANELLQAAVLFFFSNITPEVKCSISILGAEMDVRSPPELVKQFEQALSVNSGVGHFVKVFPGVAHGWSVRYSLDDAAAVKSAEEAFADMLDWFNKNLK

SEQ ID NO: 214070 - protein, 94 aa, Zea mays
  Clone ID: MRT4577_126828C.1.pep
TITAHHIHQLPLTVINQVALANLSPYSQQQQLLPFNQLSTLNRAAYFQQHLLPFMHLSISYSQQQQLLPFNQLVALNPAPYFLHLILIPFMQLT

SEQ ID NO: 214071 - protein, 94 aa, Zea mays
  Clone ID: MRT4577_126829C.1.pep
WIGNLAGFALGWSSCCICGCVVPPMTHGRRQSGLMSLGQAVATQAAHVQWAVWVMYDQEPPVSCLCFDQKKKKERALSRGLRACARAACRVIAL

SEQ ID NO: 214072 - protein, 64 aa, Zea mays
  Clone ID: MRT4577_12682C.1.pep
LSLGLYVVRVSQVGSLDTPVHSYKGYTGQYCLGRVVPRIGVCLAYVSGSPRPPQDCATRAFRIS

SEQ ID NO: 214073 - protein, 129 aa, Zea mays
  Clone ID: MRT4577_126830C.1.pep
MAMAAARRALLNHLRVPVARPAVAAAAGSVPVARLLSSTSEVEKGSFLDKGEVADRVVSVIKNFQKIEPSKVTPNAHFQKDLGLDSLDTVEIVMAFEEEFSFEIPDNEAEKIDSIKSAVDFIASHPQAK

SEQ ID NO: 214074 - protein, 84 aa, Zea mays
  Clone ID: MRT4577_126831C.1.pep
MFLLPPEKMTFNLPPGVASLPFFLFLQRGTILLLVVNPTLPPFFYSFSPFFLKNPLCLDKKFSGGVEVPPAFLFCEQRNQVRRG

SEQ ID NO: 214075 - protein, 105 aa, Zea mays
  Clone ID: MRT4577_126832C.1.pep
SKYSLASCLFFFFFFFFFVLKAVISIEGRCLEGTLFFPKKNKKFCIWYTPGLEETNPELQMDLVLANISTPKDSDEKNALETIQKTSHKLPIVPRSVLAIIHCEP

SEQ ID NO: 214076 - protein, 101 aa, Zea mays
  unsure (1)..(101): unsure at all Xaa locations
  Clone ID: MRT4577_126833C.1.pep
TMCHILESWVRIPWQLMTWLDERIEDRSWEAAGRDCCILERVWKLLADEEHLHQLIDPDXLLRLKNQIAVPSPXCDVSSXLCVPYTALLHVGSSTKDLRNR

SEQ ID NO: 214077 - protein, 68 aa, Zea mays
  unsure (1)..(68): unsure at all Xaa locations
  Clone ID: MRT4577_126834C.1.pep
NQIYTGLHKWLVMIIISXFPPNTYLHYILFKITXXEKKKNTNFQQKSNTSLPQTNTXPFXLTNTXTMQ

SEQ ID NO: 214078 - protein, 79 aa, Zea mays
  Clone ID: MRT4577_126835C.1.pep
TAYTIPDAWVATGDVNEASNWKMNVVTSVCDNTESAAAALPKQPTTHQPCSCWVFLLACCNSFTLLKKPMRLLWNYELR

SEQ ID NO: 214079 - protein, 35 aa, Zea mays
  Clone ID: MRT4577_126836C.1.pep
MAHRLLWDVQANGWERSNFTIVCESCLGDKPYVQM

SEQ ID NO: 214080 - protein, 47 aa, Zea mays
  Clone ID: MRT4577_126837C.1.pep
ILERPAVLSAINGIVDTPWHRPRLFGCGCGVFSRSSDNVAIKSTLRI

SEQ ID NO: 214081 - protein, 95 aa, Zea mays
  Clone ID: MRT4577_126838C.1.pep
EGRAHRHLTPSSAAQNFSPGRNTRLVFVRRRSHDDQPLFWYLLRLSIFRFVHQHHLVEKLTLGVDLARLPHRAINYRTMTKMIQLHADDNESEVK

SEQ ID NO: 214082 - protein, 547 aa, Zea mays
  Clone ID: MRT4577_126839C.1.pep
HASGGPSGPNTPNFVRAEVLPSGYLIRPCEGGGSMIHIVDHVDLDAWSVPEVLRPLYESPKILAQKTTIAALRHIRQIAHESSGEMPYGRGRQPAVLRTFSQRLSRGFNDAVNGFPDDGWSLMSSDGAEDVTIAINSSPNKLIGPHVNSSQLFTAIGGGILCAKASMLLQNVPPALLVRFLREHRSEWADPGVDAYSAAALRASPYAVPGLRASGFTGSQVILPLAHTLEHEEFLEVIRLEGHSLCHDEVVLSRDMYLLQLCSGVDENAAGACAQLVFAPIDESFADDAPLLPSGFRVIPLDAKTDPPSGTRTLDLASTLEVGSGGTTRTSSDASSTCNTRSVLTIAFQFSYENHLRESVAAMARQYVRTVVASVQRVAMAIAPSRIGGQLEMKQTPGSPEAHTLARWIGRSYRFHTGAELLRTDTQCTDASLKALWQHSDSIMCCSLKAAPVFTFANQAGLDMLETTLIALQDISLEKILDDDGKKALCTEYPKLMQQGFAYLPGGVCVSSMGRPVSYEQAVAWKVLSDDDTPHCLAFMFVNWSFV

SEQ ID NO: 214083 - protein, 105 aa, Zea mays
  Clone ID: MRT4577_12683C.1.pep
SYISVSLFFFFFCIWTQTGVHESRGAEDMMQNIYPCCSGIHGAPGPFTSIRPDDGYFNVPMAFGGMLLLGHATAIVIATTHWDTHRDGGKPARSRGTEQKARAME

SEQ ID NO: 214084 - protein, 507 aa, Zea mays
  Clone ID: MRT4577_126840C.1.pep
LARWRRRWWCSGAARTGRRLAAVGRRRWTRASTCATPPSRSRRSSESTASAPSPAVLRTFSQRLSRGFNDAVNGFPDDGWSLMSSDGAEDVTIAINSSPNKLIGPHVNSSQLFTAIGGGILCAKASMLLQNVPPALLVRFLREHRSEWADPGVDAYSAAALRASPYAVPGLRASGFTGSQVILPLAHTLEHEEFLEVIRLEGHSLCHDEVVLSRDMYLLQLCSGVDENAAGACAQLVFAPIDESFADDAPLLPSGFRVIPLDAKTDPPSGTRTLDLASALEVGSGGTTRASSDASSTCNTRSVLTIAFQFSYENHLRESVAAMARQYVRTVVASVQRVAMAIAPSRLGGQVEMKQTPGSPEAHTLARWIGRSYRFHTGAELLRTDTQCTDASLKALWQHSDSIMCCSLKAAPVFTFANQAGLDMLETTLIALQDISLEKILDDDGRKALCTEYPKLMQQGFAYLPGGVCVSSMGRPVSYEQAVAWKVLSDDDTPHCLAFMFVNWSFV

SEQ ID NO: 214085 - protein, 856 aa, Zea mays
  unsure (1)..(856): unsure at all Xaa locations
  Clone ID: MRT4577_126841C.1.pep
MASAMVVFGGGKDRPSPGGGGAPQVDAGKYVRYTPEQVEALERVYGECPKPSSLRRQQLIRDCPILSNIEPKQIKVWFQNRRCREKQRKEASRLQTVNRKLTAMNKLLMEENDRLQKQVSRLVYDNGYMKKQLHSPSAATTDTSCESVVTSGQHHQQQNPAAXSPQRDANNPAGLLAIAEETLAEFMSKATGTAVDWVQMVGMKPGPDSIGIIAVSHNCSGVAARACGLVSLEPTKVAEILKDRPSWYRDCRCVDILHVIPTGNGGTIELIYMQTYAPSTLAAPRDFWTLRYTSGLEDGSLVICERSLTQSTGGPSGPNTPNFVRAEVLPSGYLIRPCEGGGSMIHIVDHVDLDAWSVPEVLRPLYESPKILAQKTTIAALRHIRQIAHESSGEMPYGGGRQPAVLRTFSQRLSRGFNDAVNGFPDDGWSLMSSDGAEDVTIAINSSPNKLIGPHVNSSQLFTAIGGGILCAKASMLLQNVPPALLVRFLREHRSEWADPGVDAYSAAALRASPYAVPGLRASGFMGSQVILPLAHTLEHEEFLEVIRLEGHSLCHDEVVLSRDMYLLQLCSGVDENAAGACAQLVFAPIDESFADDAPLLPSGFRVIPLDAKTDPPSGTRTLDLASTLEVGSGGTTRASSDASSTCNTRSVLTIAFQFSYENHLRESVAAMARQYVRTVVASVQRVAMAIAPSRIGGQLEMKQTPGSPEAHTLARWIGRSYRFHTGAELLRTDTQCTDASLKALWQHSDSIMCCSLKAAPVFTFANQAGLDMLETTLIALQDISLEKILDDDGRKALCTEYPKIMQQGFAYLPGGVCVSSMGRPVSYEQAVAWKVLSDDDTPHCLAFMFVNWSFV

SEQ ID NO: 214086 - protein, 49 aa, Zea mays
  unsure (1)..(49): unsure at all Xaa locations
  Clone ID: MRT4577_126842C.1.pep
RGPKKAREGVGPFGKALGVPPTPPQPYVRSKGRKFXKARGRRNTRGFKV

SEQ ID NO: 214087 - protein, 62 aa, Zea mays
  Clone ID: MRT4577_126843C.1.pep
KRRIGGRVGCRRLQGFAYLPGGVCVSSMGRPVSYEQAVAWKVLSDDDTPHCLAFMFVNWSFV

SEQ ID NO: 214088 - protein, 40 aa, Zea mays
  Clone ID: MRT4577_126844C.1.pep
KFICYTLQPSWAHSKDLSSVLLSFYKYGYKHERSTEFLQP

SEQ ID NO: 214089 - protein, 908 aa, Zea mays
  unsure (1)..(908): unsure at all Xaa locations
  Clone ID: MRT4577_126845C.1.pep
MSTALAVVGGGKDRPSPGGGGAPQVDTGKYVRYTPEQVEALERVYSECPKPSSLRRQQLIRECPILSNIEPKQIKXVWFQPALPDECLLPVHSWFMPIKNYKGIPGIHCLLAVCFFRRXPLNRVSIVVGRCREKQRKESSRLQTVNRKLSAMNKLLMEENDRLQKQVSRLVFDNGYMKNRLHSPSVATTDTSCESVVTSGQHNQQQNPAVLHPPQRDANNPAGLLAIAEETLAEFMSKATGTAVNWVQMVGMKPGPDSVGIIAVSHNCSGVAARACGLVSLEPTKVAEILKDRASWYRDCRRVDILHVIPTGNGGTIELIYMQTYALTTLAEPRDFWTLRYTSGLDDGSLVICERSLTHSTGGPSGPKTPDFIRAEVLPSGYLIRPCDGGGSMIYIVDHVDLNACSVPEVLRPLYESPKILAQKMTAAALRHIRQIAHESSGETPYGAGRQPAVLRTFSQRLSRGFNDAVSGFPDDGWSSLLSSDGAEDISITINSSPNKLIGSDVSPSPFFSAMGGGIMCAKASMLLQNVPPALLVRFLREHRSEWADPGVDAYSAASLRANPYNVPGLRAGGFMGNQVILPLARTVEHEECLEVIRLQGHGFSHDEVLMSPDMFLLQLCSGIDEDAPGACAQLVFAPIDESFADDAPLLPSGFRVIPLDAKTDVPSATRTLDLASALEVGSGGGLCALSDSGSGTRSTRSVLTIAFQFSFENHLRESVAAMARQYVRAVMAIVQRVAMAISPSRLGPHVELKHPPGSPEALALASWIGRSYRAHTGTEIRWSDTEDAAGSPLTLFWKHSDAIICCSLKPAFTLKFANSAGFDILETTVANVQDLQLEAVLDDGGQKALVAQLPKIMLQGLAYLPGGVCRSSMGRQASYEQAVAWKVVGDDGAPQCLALMFVNWTFI

SEQ ID NO: 214090 - protein, 67 aa, Zea mays
  Clone ID: MRT4577_126846C.1.pep
KNNKKTNTRGRRSKLLCTGTPLHFSVLRSPTSNLTTTLFTTQLTKKTPPSPILNSFNNKNLFSAYFI

SEQ ID NO: 214091 - protein, 166 aa, Zea mays
  unsure (1)..(166): unsure at all Xaa locations
  Clone ID: MRT4577_126847C.1.pep
MSTALAVVGGGKDRPSPGGGGAPQVDTGKYVRYTPEQVEALERVYSECPKPSSLRRQQLIRECPILSNIEPKQIKVWFQNRRCREKQRKEASRLQTVNRKLTAMNKLLMEEDDRLQKQVSRLVYENGYMRQQLHNPSAATTDXXCESVVTSGQHHQQQNTAAPASS

SEQ ID NO: 214092 - protein, 110 aa, Zea mays
  unsure (1)..(110): unsure at all Xaa locations
  Clone ID: MRT4577_126848C.1.pep
GVDSVGRPFLGQCEEFXEHQCSPVGMPXGSPQXQAVQQQCCHQIRQVEVLHRYQCAYGVVLQSFLQQQPQGELAALMAAQVAQHLRPMCGLHMQQPGPCPCSASAGGVYL

SEQ ID NO: 214093 - protein, 102 aa, Zea mays
  Clone ID: MRT4577_126849C.1.pep
KKIKASFANVGAYSNEDNFIRGDPEGVIEWISGEAEAFEEILSDRGDVCVFSGARGVSAILEMAGCNHVKTLAQAEAALSVDDTKDPSAEASLMGGKFFTDI

SEQ ID NO: 214094 - protein, 60 aa, Zea mays
  Clone ID: MRT4577_12684C.1.pep
KKKKKKKKKKKKKKKKKKKKKKKKKKKKKRKKGWNVLKVSGLPSSVLGNFFSFFLGTPLI

SEQ ID NO: 214095 - protein, 49 aa, Zea mays
  Clone ID: MRT4577_126850C.1.pep
QFILVTVCSCTYERIGTHDSMHISAQRLYFITFQSLLYASSAVTRGTYV

SEQ ID NO: 214096 - protein, 78 aa, Zea mays
  Clone ID: MRT4577_126851C.1.pep
RAADSGQAGDAKKIQDDFCSTLRDAKKGTDLLVFNESCTLSQHFNLQLYGSIHRKVKCSEQKVITAPLMNVFHDEYYK

SEQ ID NO: 214097 - protein, 73 aa, Zea mays
  Clone ID: MRT4577_126852C.1.pep
SYFCYFSFFFFNSFHSFILPMTNFISSYFPQHWLDIAVMFKLKKWRTVGNSLGCVTSTPFWRWFLLMLPLQLF

SEQ ID NO: 214098 - protein, 210 aa, Zea mays
  Clone ID: MRT4577_126853C.1.pep
YSCSHPQRCALPPSSPPPRLLPASCPRKTAPSTPPSSAAPFPPTRSTRTTGSHGARPTKTPVLSFAAVAARLPATATSAILPLSSSLASAATVPMSAASWTSTSRLSPARCALSGTATVSLPLALTRLLNSSANRLATACAATRPSSRLPKPVTLALVPVPRPPRRALLPPAAARPPRLDLLPPAALPPAPLSLTLLPLVRHHCSRRWPL

SEQ ID NO: 214099 - protein, 103 aa, Zea mays
  Clone ID: MRT4577_126854C.1.pep
FVGGEKFFFVAFVKTKRGAVEKKGAQYYKGLIVKCGKWKTRFFIYSLLKGVLPTPILRVFFSDQGSLKKKKGSGKKNIGQWQVLSCCLKKKIWKDLNPWVAAW

SEQ ID NO: 214100 - protein, 63 aa, Zea mays
  unsure (1)..(63): unsure at all Xaa locations
  Clone ID: MRT4577_126855C.1.pep
KIKARINSHNKILYARHFDQKNETFQGVFXTGNDFXKNVKSMFLGANLLKHDYIQKTSGPRKM

SEQ ID NO: 214101 - protein, 53 aa, Zea mays
  Clone ID: MRT4577_126856C.1.pep
GESVVAGRRPSAAGCSWVHIYVRGHYRPSNWAAAAADPADLRAAHLAPTYARA

SEQ ID NO: 214102 - protein, 81 aa, Zea mays
  unsure (1)..(81): unsure at all Xaa locations
  Clone ID: MRT4577_126857C.1.pep
XFFFFFFNLFGLDRIHLLKTFSKSHHIGLPKLTARLKSSHLQIRTIKILLILAGASSTRKVISRVSEKYEVEIHQGPKAFV

SEQ ID NO: 214103 - protein, 47 aa, Zea mays
  unsure (1)..(47): unsure at all Xaa locations
  Clone ID: MRT4577_126858C.1.pep
VVSKVGFFKRRRNFLFFYFFIFLIFLFFILXLFLARVPRKGFWGGVC

SEQ ID NO: 214104 - protein, 68 aa, Zea mays
  Clone ID: MRT4577_126859C.1.pep
GRQKTIVHDFLCMKKFAVGVQPLWFTKNILFSLLLLLRLPALSWVAVIGTLHYWHHICDNLSSPDQNG

SEQ ID NO: 214105 - protein, 50 aa, Zea mays
  Clone ID: MRT4577_126860C.1.pep
RAVVSCMIGSKLHIRHSYLAMLLDRYNSDLLIATATERVGMYLPTCNRFN

SEQ ID NO: 214106 - protein, 84 aa, Zea mays
  Clone ID: MRT4577_126861C.1.pep
PPPKVEMKKVPPTRAKSPKFTSSRRRGCSDTPLTPGGEKTNATFTGPNCHSMGSPRAANRVQQCSPKRGVAPKTKFVKVELKAL

SEQ ID NO: 214107 - protein, 95 aa, Zea mays
  Clone ID: MRT4577_126862C.1.pep
GSKFSSPCLQRNIFFLVPLKLNLLAVFLKLRNWKNFEVTKFIGFEENSLFPSWVFTKKALTNHLFKHLQTLNGKWNPPFIGLLSLEVVVFPHIVT

SEQ ID NO: 214108 - protein, 95 aa, Zea mays
  Clone ID: MRT4577_126863C.1.pep
RETVEACGEYGAEATGGASRTGVVQKGKSCQGWFNYWGVLKYRGYNPICVGIPLCIPKHPNCPAYKPKEGATEHRHDLTRNKYGCAGYSMYCGQQ

SEQ ID NO: 214109 - protein, 78 aa, Zea mays
  Clone ID: MRT4577_126864C.1.pep
RAHQLVMEGYNWCHDRNVVTIFSAPNYCYRCGNQAAIMELDDTLKYSFLQFDPAPRRGEPHVTRRTPDYFLKFLPGKP

SEQ ID NO: 214110 - protein, 115 aa, Zea mays
  Clone ID: MRT4577_126865C.1.pep
FDAYKLRAPFDWYQHRSITKCVGNIQGSTTPKCVGLNPCEPPQDLLASLKPNQPRRMRGARTEPIGNRWARAPNDPMVCRWALTAHPAPVCRAWLGSPGAGPSQARRARVPFRGT

SEQ ID NO: 214111 - protein, 43 aa, Zea mays
  unsure (1)..(43): unsure at all Xaa locations
  Clone ID: MRT4577_126866C.1.pep
LPIPILTPCPNFCLERQFMILGVHPFLGVKETINTGFSKKXSA

SEQ ID NO: 214112 - protein, 98 aa, Zea mays
  unsure (1)..(98): unsure at all Xaa locations
  Clone ID: MRT4577_126867C.1.pep
CSLQWNGEECTAWYSDMVSPLRAGPFRRLGVYIDFPGGILSFYGVXYDTMTLVHKFACKFSEPVYAAFWLSKXENAIRIVDLGEDVENPVPSLGXTAP

SEQ ID NO: 214113 - protein, 37 aa, Zea mays
  Clone ID: MRT4577_126868C.1.pep
LLNGSHYLRANDSPYKYMPYPLPIVQYVPTLEDTRNA

SEQ ID NO: 214114 - protein, 41 aa, Zea mays
  Clone ID: MRT4577_126869C.1.pep
ITCAVTISCRNPVGQFARLRHNCRGQLVQPIMLCHRRRTRG

SEQ ID NO: 214115 - protein, 63 aa, Zea mays
  Clone ID: MRT4577_12686C.1.pep
LKSNPVHKKIPVLIHNGAPVCESMIIVQYIDEVFAGTGPSLLPADPYERAVARFWVPYVDDKV

SEQ ID NO: 214116 - protein, 75 aa, Zea mays
  Clone ID: MRT4577_126870C.1.pep
YYKGHLDMVFCIALCSGEQGYLSCGLDRTILLWDHPSEKPHFLLLAQRTPTVSYYAHCILFALSYGCRIHMYDIP

SEQ ID NO: 214117 - protein, 84 aa, Zea mays
  Clone ID: MRT4577_126871C.1.pep
GLPKPPKKFGGGEGTMFPQPIKKIAHWAHPILKGSLTTNGGKKCFFCRTPGKKNPCWWKKKKLPTGPLGAKKNQNFFFFLKGPS

SEQ ID NO: 214118 - protein, 124 aa, Zea mays
  Clone ID: MRT4577_126872C.1.pep
MERDLQVMPPWGREVAAPCGGGATESSPSSRSTSGCQSGWTVYLDHSNGMRYHPCDDPAAAAAQRWGVGAAGGGRRRRRRGGLHGLRRVLGLPAAPARPRRRADAARLRLGAAGPARIHPPAQP

SEQ ID NO: 214119 - protein, 106 aa, Zea mays
  unsure (1)..(106): unsure at all Xaa locations
  Clone ID: MRT4577_126873C.1.pep
RMPEVPRQHGKGVSPNFETYIMLLEALVKKNXFDPALEICKECLRNKWAPPFQAVKGLVQGLLKSRKAKHAREVFMAMRKAVKGDAKQEWIKVEAQFPMLLADKKA

SEQ ID NO: 214120 - protein, 58 aa, Zea mays
  Clone ID: MRT4577_126874C.1.pep
LTRGRHAQQGGILERKGAFTPTQAERTGNYEETPPQTAGLQRRTNKTPISSTERPSPS

SEQ ID NO: 214121 - protein, 86 aa, Zea mays
  unsure (1)..(86): unsure at all Xaa locations
  Clone ID: MRT4577_126875C.1.pep
KVCVYLVKVAKDKHLMVKLPVGIPTNVLHMTTRKSRSSLXTNTWDRYELRIHKTVIDLISYQDNFKQISSITIDPLEEQNVTVNYM

SEQ ID NO: 214122 - protein, 111 aa, Zea mays
  Clone ID: MRT4577_126876C.1.pep
AVQLYFEPPTFFPSNCVVLLNYHVSLWNMKFSTLFFTLSTLSLIAAYNPRHVEGLKRVEAFKRSSPLQSVNIQKRWNCARCFFTACPANHECCHCGYCAELSDACTNGTGN

SEQ ID NO: 214123 - protein, 157 aa, Zea mays
  unsure (1)..(157): unsure at all Xaa locations
  Clone ID: MRT4577_126877C.1.pep
MDTLKDEAXRKPILATIRXLEIPNDANSTAPPIGTVLGLYLLNXMAHYYDINVRIQKYNVETPMRGTLTXYQDSTXEHQAESPSVSWLLNKXQGIQTRHALIPSHENVSALTLRQVYEIAKLRHADPFXKDISLEELCKSXVISTGNSMGTAIVKDL

SEQ ID NO: 214124 - protein, 99 aa, Zea mays
  Clone ID: MRT4577_126878C.1.pep
HLVIFRHKPLVGKLVGCTVLTTILSDLIPTGDSGQPFMVCLRAFRSRWLFLTALHGLGLHPLRFSFHLGESNLWGFFVSVILMISVYQHPQNSSTTLCK

SEQ ID NO: 214125 - protein, 60 aa, Zea mays
  unsure (1)..(60): unsure at all Xaa locations
  Clone ID: MRT4577_126879C.1.pep
NKYLPXNEFTLIDLSDLQSSHYIVTTDKESKLFTIKKNVAKWSKKLSKRETCKQVANMQK

SEQ ID NO: 214126 - protein, 152 aa, Zea mays
  Clone ID: MRT4577_12687C.1.pep
FFFFFFFFFFFFFFFFFFFFFFFFGGPENLFYSISTGKGPPFKLSKKQQELVFWGGCLLETRGPDGETWKDPLVVPFGPPAMGELDKFLGDLAPPFFGEKIGAPVFDGPFVRGHGDPFFGGGGPLGEEGVQGPHPQPVGALPEPKLFFCGRP

SEQ ID NO: 214127 - protein, 43 aa, Zea mays
  Clone ID: MRT4577_126880C.1.pep
RPHMLTAPIASLLPPYLSPTVSSVCENPILQPYRIQRELVAGG

SEQ ID NO: 214128 - protein, 79 aa, Zea mays
  unsure (1)..(79): unsure at all Xaa locations
  Clone ID: MRT4577_126881C.1.pep
XXVPGASAPAPPFFHQSQSTKKLGPGGMPALVAGTLVLPNQPPGDAGLVPQELLEMARAILWLLDPHPGEIHRPTRSHV

SEQ ID NO: 214129 - protein, 90 aa, Zea mays
  Clone ID: MRT4577_126882C.1.pep
DGQCVVMLQTKFEKFFEKIDLTLLNRLLRLVLDHNIADYVTAKNNVVLSYKDMSHTNSYGLIRGLQFASFVVQYYGLVLDLLILGLTRAS

SEQ ID NO: 214130 - protein, 68 aa, Zea mays
  Clone ID: MRT4577_126883C.1.pep
NHTLSSTPYYHLKKTSACYLCTVTVPVYSTLYLTNLNVAFCNDLPISFAAPSGQTVWSYYKVMIPLGK

SEQ ID NO: 214131 - protein, 77 aa, Zea mays
  unsure (1)..(77): unsure at all Xaa locations
  Clone ID: MRT4577_126884C.1.pep
LCERPTLGGLSPYNNTCVLMSVXVTWGGSDHHWRSNSLLPLDLYTSSGGKPAQYSSNADPRVLGTIYGERTLSQASA

SEQ ID NO: 214132 - protein, 81 aa, Zea mays
  Clone ID: MRT4577_126885C.1.pep
TLTPTPTTQHDATRKLIPTHDTPTSRTNPASPRTTTRAIHHATTPSTTKSRPATITTHRRPTRTRTTPYPTTTTTPKTTTS

SEQ ID NO: 214133 - protein, 78 aa, Zea mays
  Clone ID: MRT4577_126886C.1.pep
GNPYNLGRPLCRLIVILSIYKYMAVPKKKKKKKGGRPFFFFFLSIFPFSYSCPEKGHCNNLLTKKINDPLMTGWKYLP

SEQ ID NO: 214134 - protein, 93 aa, Zea mays
  unsure (1)..(93): unsure at all Xaa locations
  Clone ID: MRT4577_126887C.1.pep
PSXRIQLHHQGFPQTFTQRSHLQGKHTLLNKKPRLDTPPSRPQAGHTPASSAPVPIIHTHTFTHTTSTAYATHLRLRSXQSPAASRSRRPIRR

SEQ ID NO: 214135 - protein, 70 aa, Zea mays
  Clone ID: MRT4577_126888C.1.pep
IFFFFFFLFFFFFFFFFFFFFFFFFFFWGQRVKIKILDRAPRLAANPAKNPGSKKFSSPHKGLGKGIKGG

SEQ ID NO: 214136 - protein, 66 aa, Zea mays
  Clone ID: MRT4577_126889C.1.pep
TYTSTEEARQGSTIRPFQSSTSLRKPATDSGRRKHRNTSSEKLYRQFDPRASLYSSSDASSLAPSG

SEQ ID NO: 214137 - protein, 158 aa, Zea mays
  Clone ID: MRT4577_12688C.1.pep
LLRCSSTTEAHVRAHRLSPHGANHTGKADGKNQKSAETSVPAASKSSPASKKSKDDDDSDEDETDDSNEDETDDSDEGEGLSPEEGDDDDSSDEDDTSDDEEEDTSTPKKHEAGKKRAAESFVLKTPLSDKKAKVATPSAQKTGVPLNGLTKLSSKIV

SEQ ID NO: 214138 - protein, 93 aa, Zea mays
  Clone ID: MRT4577_126891C.1.pep
GLVGTKYTLDSLGLIMDPKYVSLCIFVLLVLHGDTTLAETCREFAKWHPFCFSAMCKANCFIEGKSSDGSYAKGYRCDSHGFHSMCICLLCKS

SEQ ID NO: 214139 - protein, 79 aa, Zea mays
  Clone ID: MRT4577_126892C.1.pep
ANSTKQHTESPIPAQTLARGFRSSQRGLILAARHHAVHAPCIQRQCCDDPRAGIPQSIRPVTELPMDHNTTQQEKYTAS

SEQ ID NO: 214140 - protein, 86 aa, Zea mays
  unsure (1)..(86): unsure at all Xaa locations
  Clone ID: MRT4577_126893C.1.pep
YYNQXQXXQRWATSGTRPPTPEQHRSSPTTPKSLRYQLPTCKPSYHGAKDQAVFFFVVVAPALAEPFNHRAHHAEAGTSSRAPRRA

SEQ ID NO: 214141 - protein, 120 aa, Zea mays
  Clone ID: MRT4577_126894C.1.pep
MSQLRKMLPQATEPVQYLVSRWGSDPNSLGSYSCDLVGKPADLYERFCAPVGNLFFAGEAACIDHSGSVHGAYSSGIAAAEDCRRRLSTQLGISDLFQVAKVVMREEMNEVMVPFQISRL

SEQ ID NO: 214142 - protein, 170 aa, Zea mays
  unsure (1)..(170): unsure at all Xaa locations
  Clone ID: MRT4577_126895C.1.pep
PGNPPKGTPKERNKPKKAAGKAIARGGVTQGVGPKTPPPKGPPQGGATPPSKREXFGRANGWGPPGNPPTGKKKRGPXRKNKGNPKDFPPPQADKGPANPXCKKNPKKPQRAPPKEGPTAPREREIPKKPPQRGPPPNKNLHFFFFFFFFFFFFFFFFFFFFFLFFFFFL

SEQ ID NO: 214143 - protein, 70 aa, Zea mays
  Clone ID: MRT4577_126896C.1.pep
NWAPPYRTAGDNAAQRDSACKTNVDPWCRGTGHIYSHATHSENMVCRQRPLRTTHVRQAEIYLSTSLRCS

SEQ ID NO: 214144 - protein, 209 aa, Zea mays
  Clone ID: MRT4577_126897C.1.pep
MSKTAGVGRLGGAGAADAAQQQQLAAGDAAVARAARPIETLLRAAPLVLCVAAMTLMLRDQQSNEYGTVAYSDLGGFKYLVYANGLCAAYSLASAFYTAVPRPATVSRSWVVFLLDQVFTYLILAAGAAAAELLYLAYNGDKEVTWSEACGVFGSFCRQARTSVAITFGAVLCFILLSLLSSYRLFSAYEAPPPSALGSKGVEIAAYPR

SEQ ID NO: 214145 - protein, 206 aa, Zea mays
  Clone ID: MRT4577_126898C.1.pep
PVGGAEAAAVDGLGGAGAADAAPAGEAAAARVRPVETLLRAAPLGLCVAAMTVMLRDQQSNEYGTVAYSDLGGFKYLVYANGLCAAYSLVSAFYTAVPRPATVSRSWVVFLLDQVFTYLILAAGAAAAELLYLAYNGDKEVTWSEACGVFGSFCRQARTSVAITFGTVLCFILLSLISSYRLFSAYEAPPSSALGSKGVEIAAYPR

SEQ ID NO: 214146 - protein, 102 aa, Zea mays
  Clone ID: MRT4577_126899C.1.pep
KFQGEPCPFKKRGTNSPRFPCFVLFGLKKEGVAKLYKGIVFHPGGSYKWVTKKKRWNFLTEAYNPLGTKKKDPPRHIRAPSLICFPGYFVEAISGAPDGENF

SEQ ID NO: 214147 - protein, 139 aa, Zea mays
  Clone ID: MRT4577_12689C.1.pep
RTISATQDRTTSSSSTNPDLAEVLPLPELPRIVPLPLNTGYRAPDHAQNRQHHRATVRQERTLPSPLKLPSSPSSQAASALHLIFTGEPPEERRQPRPKPSLFSPASIARSVTSRIIRIVSTMIFIRLTDFIRRVSDTM

SEQ ID NO: 214148 - protein, 160 aa, Zea mays
  Clone ID: MRT4577_1268C.1.pep
MATPYTPKSILITGAAGFIASHVTNRIVRNYPDYKIVVLDKLDYCSNLKNLLPASSSPNFKFVKGDIASADLVNFLLVTENIDTIMHFAAQTHVDNSFGNSFEFTKNNIYGTHVLLEACKVTGQIRRFIHVSTDEVYGETDEDAVVGNHEASQLLPTNPY

SEQ ID NO: 214149 - protein, 67 aa, Zea mays
  Clone ID: MRT4577_126900C.1.pep
GGPLILCSFTIIPRSVSSYYCAPGEGSHDMRCLTFISYLNLLFLYNLRSFTLISLIVSIQLFFQFIL

SEQ ID NO: 214150 - protein, 60 aa, Zea mays
  Clone ID: MRT4577_126901C.1.pep
NKNPALHYPPGYAPKDCVPPLFKNGPPVTFQTLDGKTPIEVAKLTNQDDVLNLLEKPPFV

SEQ ID NO: 214151 - protein, 68 aa, Zea mays
  Clone ID: MRT4577_126902C.1.pep
VGNGQASANYRIVNIAPDIFTLASVTMFSTEHSRVPMLFLYIACDPVPVDLPNRDRPIGLASVQAGSV

SEQ ID NO: 214152 - protein, 74 aa, Zea mays
  unsure (1)..(74): unsure at all Xaa locations
  Clone ID: MRT4577_126903C.1.pep
PQKLDPFCSNRPVDKLFPFPAPYCWGYKLVEAGGGGFAFLLPKNPSCPKKFRRALXKSPPFNVKVSDWNVPIPR

SEQ ID NO: 214153 - protein, 41 aa, Zea mays
  Clone ID: MRT4577_126904C.1.pep
FSLRGPVDRRGADTPGSLASIQCYVSPTRFRCILGPLAMVR

SEQ ID NO: 214154 - protein, 135 aa, Zea mays
  Clone ID: MRT4577_126905C.1.pep
CMSSTHLYGCGFGAYRLPRSYPADRAAYNSTAPPEATMDSMPMMLLPCAGPNRHALDTNVADETTHGATSWNLRPDGHGVVLNGLAQQQSWWRSRVVLWHAVGEDDKNQATALCGRIADEQQHSTFTGRRAAAIF

SEQ ID NO: 214155 - protein, 130 aa, Zea mays
  unsure (1)..(130): unsure at all Xaa locations
  Clone ID: MRT4577_126906C.1.pep
REEIKEGNERGDTDNTQFNGATEKGQKSLSLKTTTGKGRVRKPGRNRPPPHHWCQFXQARHNKAISRDTGEHRRQLQRRPEPRARPQADRRRLPGQIVEPAEKSKDNEIAPGRRMKKRKARHQQVGANKT

SEQ ID NO: 214156 - protein, 107 aa, Zea mays
  Clone ID: MRT4577_126907C.1.pep
WSFFFSQGSFFGFFCQPPLLMACLVSNGSICLQWDPLSLFFPHAFIPRGCFLSQQILVYWVSPSQSLIAALPFTGWPFLLHIIVAAFLVPGKLSPNVMVQGNRNGTL

SEQ ID NO: 214157 - protein, 25 aa, Zea mays
  Clone ID: MRT4577_126908C.1.pep
MNCDLILRCRKELVRRVKATVAGRE

SEQ ID NO: 214158 - protein, 74 aa, Zea mays
  Clone ID: MRT4577_126909C.1.pep
DAVFRFVCMHQVLLYRSKGTLELRAKVLYYYLPPQYSIMEGEVHCTTILEGLLTGTVLCEPHVRANVMTPDITT

SEQ ID NO: 214159 - protein, 68 aa, Zea mays
  Clone ID: MRT4577_12690C.1.pep
IPHFLHWGSHIIYRAPMPGMNMAAPLVCIIGTTPGIVLLSVLSSTVPCPLKILPLEKKLAFCLKIVLR

SEQ ID NO: 214160 - protein, 160 aa, Zea mays
  Clone ID: MRT4577_126910C.1.pep
MARLYVGNLDARVTAGELEDEFRVFGVLRSVWVARKPPGFAFIDFDDKRDAEDALRDLDGKNGWRVELSRNDRGDRGGRGGGAGGGGGGRDRGGSDMKCYECGESGHFARECRLRIGSGGLGSGRRRSRSRSRSRSPRYRRSPSYGRRSYSPRDRSPRRR

SEQ ID NO: 214161 - protein, 119 aa, Zea mays
  unsure (1)..(119): unsure at all Xaa locations
  Clone ID: MRT4577_126911C.1.pep
FSQXPVAPPTQFFPFTPLAALTSPAYSTQHPLXPFSQLAGVTPATFFTPPQLLRFSQHXAXHAGPLXHXXQLPPMNXHPLDPPSSVXPHPLIGGPSFRFLMSYSSIIKFFVVMFVAPQK

SEQ ID NO: 214162 - protein, 339 aa, Zea mays
  Clone ID: MRT4577_126912C.1.pep
MAPPDAGAAAACGASGGGGNKGLALGQFVSLLITATGFASSELARRGINAPTSQSLLNYVLLAVAYGGVLLYRRQPLTIKWYYYLILGIIDVEANYIVVKSYQYTSLTSVMLLDCWSIPCVILLTWVFLKTKYGARKFLGVGVCVLGLILVVFSDVHASDRAKGPNPLKGDLFVILGSMLYACSNVTEEFVIKKSNRVELMAMLGLFGALISAIQISVLEREELHSITWTSGAVLPFLGFAVAMFLFYSAVPVILKLCGATMLNLSLLTSDMWAVLIRIFAYHEKVDWIYFVAFAATAGGIVLYSYKGSNEVEETAQVAGASDEHGKGRDEEAGTRNPA

SEQ ID NO: 214163 - protein, 154 aa, Zea mays
  Clone ID: MRT4577_126913C.1.pep
DQASRVSHTTSDPRTPRTARIRPNVCTSDRDWADVQAVCRQIGIPARRLDFSRQYWNQVFEVMLHEYERGRTPNPDVTCNREIKFGELIEWCNRNGGLGKDRFSDADGRRHQHDRLLPEDGMNDTSSSEQEKDTPLGWDYLATGHYARVERDPE

SEQ ID NO: 214164 - protein, 105 aa, Zea mays
  Clone ID: MRT4577_126914C.1.pep
GPLSRFPFPGGWAIFFCQFPDGFSLSFRARSCLPFCLSLVPFLAPPVFPFFVSDCFFFGLLPGYLFSPGVWFCLYSPHLWLPPRSSWFRPPVFLILPFDWPPGRV

SEQ ID NO: 214165 - protein, 146 aa, Zea mays
  unsure (1)..(146): unsure at all Xaa locations
  Clone ID: MRT4577_126915C.1.pep
WVPSEPAGSLVLSQATAAETPRSNKAAPNPICAALRKARRAHTTQVQLARAGGAGLSGNYAALAACTTAQASADGGNKGLRAHTGRGGDACRRSPGGSPGGGRGSREGTNGAAGRGCGSSVRRAGGEAGHAGLALGQFVSLLIPXT

SEQ ID NO: 214166 - protein, 60 aa, Zea mays
  unsure (1)..(60): unsure at all Xaa locations
  Clone ID: MRT4577_126916C.1.pep
MCCTFHTHVGDAASHIQRGVSALQNTKNLQRNSRKXMCYAIVILLVIVVVIVVAVIQPWK

SEQ ID NO: 214167 - protein, 74 aa, Zea mays
  Clone ID: MRT4577_126917C.1.pep
PNGRCPHAHLPVRNVWEDAGFRESNAEAARVVRSVPCLCCSFSCAWPLLPLSTGYTGGRSIACTCCSEEEGLDT

SEQ ID NO: 214168 - protein, 42 aa, Zea mays
  unsure (1)..(42): unsure at all Xaa locations
  Clone ID: MRT4577_126918C.1.pep
RFKKKKKKKKKKKKKKKKKKKKKKFRKKKKKKXKIKGGGGLF

SEQ ID NO: 214169 - protein, 69 aa, Zea mays
  unsure (1)..(69): unsure at all Xaa locations
  Clone ID: MRT4577_126919C.1.pep
XNKSRRVCGQSKHAGTYYYTTSITAQAHIITTSQTSHTSNYINSKVLINRAGERDSWGLNIWLKDIIYI

SEQ ID NO: 214170 - protein, 338 aa, Zea mays
  Clone ID: MRT4577_12691C.1.pep
MVRGSAAAAALLLLPWLLLLLLLHAAAAGNGSCARSCGGLTVQYPFGFSPGCEIRLGCDPADGTAWLGKTRELGLLVSNVTARALFLTLRPNCSRRLNASVEALFTKAYAPGSQNGLVVSSCSSASQADHISNCSVPPSAYLDNSSQCGRAAADSIRCPVLTRPTSVPDRFPHRTRMQALAAECTGLVSAVSYLDAPAPALLLATMELEWWMLGPCRCSSHANCTQVTTPVAGQEAFRCDCPKGSEGDGFAEGVGCREGPKCNPSKYLQGDCGKTIQIVLLVAGIMFGAMVTGVTCLAYQLLKRRSASIRMKRSTKQFLSEAFCTVPLYSYREIERAT

SEQ ID NO: 214171 - protein, 112 aa, Zea mays
  unsure (1)..(112): unsure at all Xaa locations
  Clone ID: MRT4577_126920C.1.pep
RVHIDLRSNSHFAPKRADIYFLLVEGFTNFSKTARELVHRMQKIDSDIIPSGFKWIXNSMKGFLDPKTSSKIHVLGSNYQSMLLEVIDSSELPEFLGGSCTCSDKGGPLGSC

SEQ ID NO: 214172 - protein, 103 aa, Zea mays
  Clone ID: MRT4577_126921C.1.pep
MASGGGAAARMDPEVATELVRKGATLLLLDVPQRTLFGIDTQMFSVGPKFKGMKMVPPGAHFVYYCSPNRHGNEFAPTVGFFLTTHQSEVIVRKWDVQEERLI

SEQ ID NO: 214173 - protein, 102 aa, Zea mays
  unsure (1)..(102): unsure at all Xaa locations
  Clone ID: MRT4577_126922C.1.pep
GAATRPSPRSYYPXSPGEAHLVGGRDSDHSGXTSGILFFLGKCPIMWQSVKQHAVAMSSCEAEYIAASTAITQALWLASLLGDLLVRAVETMELRLDSQSGL

SEQ ID NO: 214174 - protein, 86 aa, Zea mays
  Clone ID: MRT4577_126923C.1.pep
HSITNRGGSCFKTVEQIAKFIWAQQRLVQWRPCEWWLSGPPVQGQASLFWGGIWILDLEVLMINACPPCAAPSRRNGYIRINYYDV

SEQ ID NO: 214175 - protein, 178 aa, Zea mays
  Clone ID: MRT4577_126924C.1.pep
YGFPAVYSYLTRSRESFVGAFDDPGPHGRGRYRAGLGPEVTAGQFRKGAQWFELDRDLAVGVVADGRYYPKFRDHCRPPCYVDEHYLPTVLSIEAPARIANRSVTWVDWSRGGAHPATFGEEDVHEAFLRRLTAPGKDQGNCTYNGQPAEVCFLFARKFAPSTLRPLLSLAPKLLGYG

SEQ ID NO: 214176 - protein, 82 aa, Zea mays
  Clone ID: MRT4577_126926C.1.pep
GQEDRDTGDPSLKTLKQNSFKGGGGMEQTKNPMLGAGNFPVNYAGNHPSGLAPLLWKPGGFNETSNSNRGSCRVEQTTHYKR

SEQ ID NO: 214177 - protein, 38 aa, Zea mays
  Clone ID: MRT4577_126927C.1.pep
TCVTCHSPPLSLDSRGISTRSIHGKYDSRTNCLIVGCC

SEQ ID NO: 214178 - protein, 45 aa, Zea mays
  Clone ID: MRT4577_126928C.1.pep
LVHPQLNDHQDVALLARRLALKSSPARERRPCPAANQSHCLLCTR

SEQ ID NO: 214179 - protein, 127 aa, Zea mays
  unsure (1)..(127): unsure at all Xaa locations
  Clone ID: MRT4577_126929C.1.pep
RNPNLLIXXKPSGIHVFFEHKPTPILPXHDSHLHNTPITEAVPPSFSPLSYKTLLLICPSSLPLTSTTPFHPYTLINYPFIHLTFISIHSIHPSYANNILRSTSPFISFYSSLHNPKKNLYLPPLYF

SEQ ID NO: 214180 - protein, 97 aa, Zea mays
  unsure (1)..(97): unsure at all Xaa locations
  Clone ID: MRT4577_12692C.1.pep
ALLYSAFMALNTTTXITSPQLQKTQAHRTGLRNMTTDIQRKQGVRLQIFPCPSHVLIYLRSPTQKDLSSAYTITYMTNRPLRHNLVQSYCKSCTLHN

SEQ ID NO: 214181 - protein, 70 aa, Zea mays
  Clone ID: MRT4577_126930C.1.pep
YMRTCMQLSRKERMLLLNCLIKWISIFSNGPLLHETKWMYQTHIAYMTRLQVHEMFRRQRNGHPRVVGQA

SEQ ID NO: 214182 - protein, 85 aa, Zea mays
  Clone ID: MRT4577_126931C.1.pep
RVHPNQFPGVTGLGHSRGVLPRLVTLVIIRHDDVFILGFLSSSQPPLAVSIAGYVVCLPAPSRSLGYTVTLSWNPANPSVGSLRK

SEQ ID NO: 214183 - protein, 78 aa, Zea mays
  Clone ID: MRT4577_126932C.1.pep
TTPVPPFPSARAAASRQPTTEPTSQPTGHSERVKRPMVAMAAGQQQQQQQRRYARRTQPAPVLPVPPDGRGAGGSLAL

SEQ ID NO: 214184 - protein, 64 aa, Zea mays
  unsure (1)..(64): unsure at all Xaa locations
  Clone ID: MRT4577_126933C.1.pep
HIHHPLRTSSSLTQIGSSHHLTYPNCFFDQQRIGHVRXXRRSRDLAHSLMRCQKERTGRRGMSV

SEQ ID NO: 214185 - protein, 40 aa, Zea mays
  Clone ID: MRT4577_126934C.1.pep
VVRDHEVAQFSTRAPESVGSPLLLPSSVPVLDQHSHSTVR

SEQ ID NO: 214186 - protein, 57 aa, Zea mays
  Clone ID: MRT4577_126935C.1.pep
GGFLFFWRGTKFSKKPNQGSLGLGALDGGGGPLEGPAGGQRCFSRNFWGVILGYLKL

SEQ ID NO: 214187 - protein, 165 aa, Zea mays
  Clone ID: MRT4577_126936C.1.pep
MTEGESGVRRWLVDISRWRPSPAQFDAAAALLPRHERPAISRFVKEDDRKRALVSRLLQYSLVHHLLRIPFHLINIRRTTEGKPYLQNNSSGFPNFNFSTSHHGDYVGIASEPLCLVGLDIVSVSEPHGETAAEFVSNFSSCLTDHEWSCIVRAGTRDVLTEYRY

SEQ ID NO: 214188 - protein, 327 aa, Zea mays
  unsure (1)..(327): unsure at all Xaa locations
  Clone ID: MRT4577_126937C.1.pep
KRKLDKFLXXHFQXYIISKGPLPLDIEFDIQDLFGELRPTMSRYSSIEELVAALVEFEENERSAPVEKVENERHSDNESQKRHSRDAGPSVNGESAANGTEENGKAHEVADSESYSDTGSIDGREEEEDILSEDKSNDGSDNEGDDEDDGIPVVSDEDENVEVRQKVMNVDPKEQEDFDRELKALLQESLESRKSEARSRLPLNMMVPMNVLEGSKDSRATESESGEETVDEEGGNAGGSSKVRVKVLMKKGHKQQTRQMLIPADSSIVQSTKQQEAAELEEKQSIKRRILEYNEREEELNGASQMGNWGQGATSTSSSFSRHCYLP

SEQ ID NO: 214189 - protein, 48 aa, Zea mays
  Clone ID: MRT4577_126938C.1.pep
SPVIQSHDTLSATLNGVWLHTSMMVKDYTRASIACVPTSIFFVAPVKQ

SEQ ID NO: 214190 - protein, 69 aa, Zea mays
  Clone ID: MRT4577_12693C.1.pep
EHLPSCRLTSSTIISPPAHRVLEARKLLHISCAQDEEYETLWFFNCGEMQYSLSLWGTPFNSARYSQDS

SEQ ID NO: 214191 - protein, 59 aa, Zea mays
  Clone ID: MRT4577_126940C.1.pep
QLQHHEQDCPRARHDPTGAFCIIPDHDQLHLILDALRLPLCFSREKLQSSQVDKSLSRN

SEQ ID NO: 214192 - protein, 49 aa, Zea mays
  unsure (1)..(49): unsure at all Xaa locations
  Clone ID: MRT4577_126941C.1.pep
MVDSTSTACTCIKSICSLQHIYHGNMLRXRKKPCICTILKFQNGFLSNK

SEQ ID NO: 214193 - protein, 49 aa, Zea mays
  Clone ID: MRT4577_126942C.1.pep
GTPASSLPEFPCRPTHPLTIDHQPPAFFNNQSGPLIPTSSPPQFLNKQP

SEQ ID NO: 214194 - protein, 41 aa, Zea mays
  Clone ID: MRT4577_126943C.1.pep
TRSVCALHKFLYCCFSMNEFLILNYPFSMLFTCKKKKKKAA

SEQ ID NO: 214195 - protein, 508 aa, Zea mays
  Clone ID: MRT4577_126944C.1.pep
MDPKGKGMVINDKEKESLFNEPRDDKPTDSGSSHKKRDGKKKRRIKKIIYYDSDASSSSPRDDDDDSSSKKKTYMGIVENGMHFDNTDNPVFINEQIHKNAKATTILLASLCRDEYNKVSGLDNAKQIWDTLKISHEGNDATMITKRELVEGELGRFVMIRGEEPTQTYNRLKTLVNKIRSYRSTRWTDHDVVRLMPRSFTVIDPHLVNLIRENPRYTKMTPEEILGKFMSGRMMVNEARYVDDALNSPLPIYEPPPIALKATSSKEALPSKVAQVEAAGLNEEEMALITKRFKTALKGCKEYPNKNKTKGKRSCFKCPDNDNDQGQEKSGKMEKKKNYRKAKGEAHLGKEWDSDCSSSDSDDEGLAASTFDKSSLFPNERHTCLMAKEKKVHIRDSPKYSSSSDEESSDDEVDYTDLFKGLDRIKVGKINELIDALNEKDRLLEKQEDILYECKENGPQAFWLIEFWCLMINTTCGLICLLVFIIIVHRMQRELDQGNKDATPQKKT

SEQ ID NO: 214196 - protein, 89 aa, Zea mays
  Clone ID: MRT4577_126945C.1.pep
PHGHYFFYTDLGSLTISLSLMRPLFGKNNNIRNPQPLLCIPELENPQKMCFSPPSCWKSCFFHQRRAPELKTGGVISKVICWTIGLNLV

SEQ ID NO: 214197 - protein, 58 aa, Zea mays
  Clone ID: MRT4577_126946C.1.pep
AESLLGYLHHLTYPHSNIQNPFCGKSNNILDNYMGELLNTVLVWIKLDQEYFSLKQTK

SEQ ID NO: 214198 - protein, 77 aa, Zea mays
  Clone ID: MRT4577_126947C.1.pep
PCLLFTVAIKGKQFPNFFLKSPTPPSFQIEKKPFCPPPGWNSQDVKLNPPPLGAPGAPKKIKTSPSFSTLFSFLWAN

SEQ ID NO: 214199 - protein, 505 aa, Zea mays
  Clone ID: MRT4577_126948C.1.pep
GKGLAAEAIAEELFRLYQLGEELGGGGFCVTRRCTDTSTGEVLACKSISKRKLRSSVDIEDVRREVAIMRSLPEHPNVVRLREAFEHEDTVHLVMEVCEGGELFDRIVSRGHYTERAAAGVMRTIMEVVLHCHKHGVMHRDLKPENFLYANTSENSALKVIDFGLSVCFKPGDRFSEIVGSPYYMAPEVLKRNYGKEIDIWSAGVILYILLCGVPPFWAETDEGIAQAIIRSNIDFRREPWSKVSENAKDLVRKMLDPSPYSRLTAQQVLEHPWIQNASAAPNIPLGEAVRSRLKQFTVMNKFKKKALLVVAEYLPAEELEAIRELFQLLDTNKDGHLTIEELRKGMRLIGHNVHDTDVDMLMEAADIDGNGTLDCKEFVTVSIHLKKIRSEDHLPKVFSYFDKNGSGYIEIEELKEALSPRGDQKAIDDIILDVDKDKDGKISYEEFELMMKAGMDWRNTSRQYSRAVYNTLSRKMFKDVSLKLDANNGPLAAAAVVVKEQAVD

SEQ ID NO: 214200 - protein, 216 aa, Zea mays
  Clone ID: MRT4577_126949C.1.pep
MSQGTSPLPKDKPTAEPGKAIGIKRLQTDTPSGLAYHNVYVRRKVESEHSKVNPSQELKGNGRDKSKDLEACQDVQHEEANKPQVASPFAESVELVSSKSSQEPNAETVAEKTEPPVASSTGIQEEVKRSSIEYWNERFNRLQTYLENCDHSTQEGYLRKLRSLSAAGRNMHAIELEKRAIHLLMEEGKELQRMKALNVLGKVSPNASSKLTPSQR

SEQ ID NO: 214201 - protein, 82 aa, Zea mays
  unsure (1)..(82): unsure at all Xaa locations
  Clone ID: MRT4577_12694C.1.pep
RTGGQLATKTSNAPXGAKXXAXXAXXXXXASXXTXXXXPQGXQQXXXPATAXGXQXPXXQXXXXQEAXQASXXRXXAXTXQQ

SEQ ID NO: 214202 - protein, 43 aa, Zea mays
  Clone ID: MRT4577_126950C.1.pep
AGPRFSNPHRTVSSLPAFGAYVTSECMSHVTASPTSASRTPWC

SEQ ID NO: 214203 - protein, 128 aa, Zea mays
  Clone ID: MRT4577_126951C.1.pep
VPRGRPGSCLRCSSPSPCLSSLAFSATPPVSHAAASLGGHPPPPSGTHSRQRVSPFPPAYLRTDVLGLADPPRALPPSIKLTAAARPSPSPPISGRSGAAVRVVSLSHHASLHLQRKVEEPGHLVTSK

SEQ ID NO: 214204 - protein, 142 aa, Zea mays
  Clone ID: MRT4577_126952C.1.pep
RQFRTSVGFSCLGCSSPSPCLASLAFSATPPVSHAAASLGGHPPPPSGTHSRQRVSPFPPAYLRTDVLGLADPPRALPPSIKLTAAARPSPSPPISGRSGAAVRVVSLSHHASLHLQRKGFIMINKLCINVVEEPGHLVTSK

SEQ ID NO: 214205 - protein, 78 aa, Zea mays
  Clone ID: MRT4577_126953C.1.pep
YSSCLMCSFHGNCVCNPNHGCITDLTEKGQCCAFRMQLALFLILKLVWFSSGGLRSSTETWLVCLLVRSEWKFVTETT

SEQ ID NO: 214206 - protein, 161 aa, Zea mays
  Clone ID: MRT4577_126954C.1.pep
METNFALETDFSSLLAELAACEKRLTASIEGAPAKCSVECSNTFGIFTATAAPVPTPTDDKAVFDMWPIFGEERVFDGEPIFDKEPNDHIIDDVDVFSPCKGKKIQIPKSALDSLVGALARHDETIIGTALELLEYLRIERMEFIVEQTDMACDSWENSWS

SEQ ID NO: 214207 - protein, 65 aa, Zea mays
  Clone ID: MRT4577_126955C.1.pep
PVSKDPPRFLPGGLGPCLLLPLFLFLDGMVPRVTPSFSRFPLVFPRNPFIFRVLVFWSNGQVFPG

SEQ ID NO: 214208 - protein, 146 aa, Zea mays
  unsure (1)..(146): unsure at all Xaa locations
  Clone ID: MRT4577_126956C.1.pep
LVPWCKKRGLIVPLCPXLXVLAHGATGCFVTLCGWVPTVESPPRGVPMVAIPHVEGQPGTAEYVERGSWFGVRMRKGFLVRKEVERCLREGMDGARXACARQEAPSLKXRSKKAMQEVATSYLPIAVFAAVVFPKVGFPVMLLFGS

SEQ ID NO: 214209 - protein, 205 aa, Zea mays
  unsure (1)..(205): unsure at all Xaa locations
  Clone ID: MRT4577_126957C.1.pep
MNSFINHIFSQAWPARPPSLAPXNKKPTITSRRDPKPPXPPTPFPRRSSTKHAPLPTQPXPPTQVPPTKPKLASRASPPLPVTKRSFCFAYLFPPPPPXPNPPPPPSPSXXPPHTPPPPPRRGTPLXFPYLALPPPPPNPPPPPPPXPPSTPPTPPKTPPPXPHPPPPLPITTLPPPTPPPLPSPPLPPPPPXPAPXPPPPPPPP

SEQ ID NO: 214210 - protein, 40 aa, Zea mays
  Clone ID: MRT4577_126958C.1.pep
ATNTTQARTYNSISDDSLTTDVIIHYNNPPSREARQCTRG

SEQ ID NO: 214211 - protein, 105 aa, Zea mays
  unsure (1)..(105): unsure at all Xaa locations
  Clone ID: MRT4577_12695C.1.pep
SPQRRPTAEKPTPAAKEQGHRRKGKDGEAKHRGRPEEEXHPXEEEXXPXEXPHTXGGXHQEGEXHXGGGPHXGGGXHQGRETHQGGXTHQGGGXHXXGGGPPQGG

SEQ ID NO: 214212 - protein, 97 aa, Zea mays
  Clone ID: MRT4577_126960C.1.pep
RQKVYTLSRAKMSVCVFCTGHAYDERILIVYSMPHPTQAAGTSHTRTYYEYRQPLIGQDFENYHSIHDGHVTICQRHGTSRCRSSRTYQHLLDDLIH

SEQ ID NO: 214213 - protein, 249 aa, Zea mays
  Clone ID: MRT4577_126961C.1.pep
TRPISAPGRPHLVLLPPRLTSPPAVTSTKRLPFLALRPRGRPAPTSRRALVLVQVVSSQAPNSLRSASSVFTSASPPLVPVPTAGVVFQPPAFNPKSPSTSARTSPSLLASFPNVAGEGPPPTAPAASCARRASSSIPTTPSTSSPVKAASLPVPRRLTHIRPFQHQPAGVTSASRRCLARSRRRAVTRSPSRCRLCFGAPSPPVYSRVLLCRYRYPPTSVVRRYFSSTEEVFDLSAQETVKEHFTSHV

SEQ ID NO: 214214 - protein, 107 aa, Zea mays
  Clone ID: MRT4577_126962C.1.pep
KTQCSLTDQVKITKKSCLYLLLLQGTRTVEKGLCLHAGCKSQTQLFQPNRSQCLEDEVLPDDGVYVIVVPQQCEHSHGLGGECTSRLSLMVEQCCRCHAQSVLVIDR

SEQ ID NO: 214215 - protein, 145 aa, Zea mays
  Clone ID: MRT4577_126963C.1.pep
LTCAMWFTCKCMQLKCITNVPRGQGGNLLIDLFRHCDNHLGEKQKTPSGMPQLLLLSTILISLFPNCCGACTVFFKTNSELVIAVRTHLSAIFSYAPFFSLAVMLKDQIQVNLPFKLQFNYFISGFCKTLQKKYNSMWSLCYLLA

SEQ ID NO: 214216 - protein, 104 aa, Zea mays
  unsure (1)..(104): unsure at all Xaa locations
  Clone ID: MRT4577_126964C.1.pep
NNRPASSPSILGSASRCPHSVSSRCRSFSSSSSQSRSRSAPLAKRXGLRDAEGLYLASDSDKRLLIYFPFMQVKLHSVLFKGPKDDAMAMTIYQWTSWSYLPII

SEQ ID NO: 214217 - protein, 111 aa, Zea mays
  unsure (1)..(111): unsure at all Xaa locations
  Clone ID: MRT4577_126965C.1.pep
ICSVTVTIIWXEKQVNNPFFHKTPSGMPQLLLLSTILISLFPNCCGACTVFFKTNSELVIAVRTHLSAIFSYAPFFSLAVMLKDQIQVNLPFKLQFNYFISGFCKTXSKKI

SEQ ID NO: 214218 - protein, 92 aa, Zea mays
  Clone ID: MRT4577_126966C.1.pep
RGTHVLALNRYLAEMHIYVINVSNGNDYLPMDIVELSSDHLIENKPLLLKDVKFQKVHGLTSAYRPLFVRDTTFANGEQARGKSPYRYVSSL

SEQ ID NO: 214219 - protein, 63 aa, Zea mays
  Clone ID: MRT4577_126967C.1.pep
RESLPGCRHQDHRMIRLQQALVQAPLSRGCTTIPSEGGWSNRTTHMSSCIVHLSLCNNRRVLD

SEQ ID NO: 214220 - protein, 96 aa, Zea mays
  Clone ID: MRT4577_126968C.1.pep
PAARSCPRAVRPPLPVSPATALSLFLLPVELSHTVLGGRMSCSICPAIRVFNVPDECQSQTTATLFLSSGVGWRIRWIEDAQEIGKCSGRRTSAIF

SEQ ID NO: 214221 - protein, 54 aa, Zea mays
  Clone ID: MRT4577_126969C.1.pep
TFLPDHRPAGTIFSPHTDPNAVNTHRVSGTHCHLPVNLFSSAMWTAEAGNELHA

SEQ ID NO: 214222 - protein, 83 aa, Zea mays
  Clone ID: MRT4577_12696C.1.pep
KTSLSLNSLHTASYICATGGCSTETRCLNLFNCEIHNCINSHRPLIHSPTVNHTIVLQYTILIRVLNLDLSIICILLLLAYSF

SEQ ID NO: 214223 - protein, 138 aa, Zea mays
  Clone ID: MRT4577_126970C.1.pep
VFGSRAPHPGGLNPPWFMGQPLLFFLFVGPGALFPKFPTPVASWGSPFPSHPGGYGVPWPGYRALPPGQAKLWGAQLGPNGVFRVFFGHGCHNPRWFLLFSCLCWWPSFVWSRRLPLGFFSLARGPGFRGHQSLFFFF

SEQ ID NO: 214224 - protein, 33 aa, Zea mays
  Clone ID: MRT4577_126971C.1.pep
LAFILYENNGPKGGNPLGSTVFPRTVILTGNIS

SEQ ID NO: 214225 - protein, 157 aa, Zea mays
  unsure (1)..(157): unsure at all Xaa locations
  Clone ID: MRT4577_126972C.1.pep
METLPGAEELLLLDSEGKGGRATDYRDACPTLSREGAFEKSRLHQKPQSTHAGTACRTLYXDAEIVRYQCIRHLHFFVLPGQEXDELILPSGLQEFADGGERLLQNMVDQRTALHNCAPEPIVXDQIGDGGSVLXTEGRQIPREVYGHGCGCRLSSC

SEQ ID NO: 214226 - protein, 81 aa, Zea mays
  unsure (1)..(81): unsure at all Xaa locations
  Clone ID: MRT4577_126973C.1.pep
RSVPTGGNTIVALXFIADANGCXLTLTMAAYISLGRRIIXKGFAAEFDLTDPLHENDXGCHRKSEDILANIPNSYILQQLE

SEQ ID NO: 214227 - protein, 144 aa, Zea mays
  Clone ID: MRT4577_126974C.1.pep
WHRCRMWCPNNPRVAGVGDDHEVPLFDDGQSDAAALDRVQAVAALKLAVHSSANGHVGLLLDVELAVVKLLLVVDERHQHECLITTQRSRSFLGSLGVRLLNLNNHLQSRRTSIIGSFGGSTSNEGGFACNDDPCTPGCSQQIA

SEQ ID NO: 214228 - protein, 82 aa, Zea mays
  Clone ID: MRT4577_126975C.1.pep
EEVRACRDLGLELPSDCTVEIQCYGLSGGAGSPGSGPDSPCDGADSCPDAAGGGADPMDVKARLKVWAQAVALASTTTHLAS

SEQ ID NO: 214229 - protein, 240 aa, Zea mays
  unsure (1)..(240): unsure at all Xaa locations
  Clone ID: MRT4577_126976C.1.pep
MELRRPAPSPLVDNYVVTGDVVLDLSEMNNQTIKLGAGLRQECDTIEATSAGKLRQLKPNKYCIENSQKRYKPSVEDTVLGIVVDTKPDNFLVDIKGPNLAFLPVLSFEGGTRRNIPKFEIGTLIYARVVKANSIMNPELSCMDATGKAAEFGQLKDGYMFDTXSNLLSRMLLSSPTCPVLEVLGKKLSFEIAVGLNGRVWVNAPAASTVILVSNAIMRSESLSGIKQRAMVENLLERLS

SEQ ID NO: 214230 - protein, 308 aa, Zea mays
  Clone ID: MRT4577_126977C.1.pep
DSIGRLGSYEPAGSESIRPYGYKNSTGIGSLSKLEEMAWFCVEPNTAAELGKLTEMRVLRVVVGNQTVYQAFLQSLSNLSNLLHLSMAGFNPFALDDLTDPRRAPARLRFFRGTQTTTFQQMPRWFSWLSELSSLTITVNKLTQDDLEMLGALPVLCRLQLEVPEMGTIAQERLSIGSDQPFQSLEGFKFKHYARCWLVLSIGAMAKLEKLELSFRVSKRDDGAIDVGLENLTSLKHVIIEVDCFGANFEQVEDVETKLRDAFDAHPKNPTLEMSRTHDSEFRFQLVPAGCESDRSYNDSDNDSDASI

SEQ ID NO: 214231 - protein, 51 aa, Zea mays
  Clone ID: MRT4577_126978C.1.pep
PDPRIGSWARRPSLSRPYRTPRGVRPASWATGYRLRWSLSTPNHWSRARSY

SEQ ID NO: 214232 - protein, 59 aa, Zea mays
  unsure (1)..(59): unsure at all Xaa locations
  Clone ID: MRT4577_126979C.1.pep
ASSVGCHLPLFLLGRSESKDPYTYAVLMAPFHQAAFLAFPSFLXIPPRFDYTPPXVWLE

SEQ ID NO: 214233 - protein, 45 aa, Zea mays
  Clone ID: MRT4577_12697C.1.pep
DVSRSHALSGRSCLSYEMLCCAMLVAHLQSLYTAAAAAFLSLYIG

SEQ ID NO: 214234 - protein, 71 aa, Zea mays
  Clone ID: MRT4577_126980C.1.pep
PHTLLLKHRLQITYVACSPPTIPEPTCHLLYPRPLLPICHHPFMDLCSKITRREPYTTLLNRTDIKPIPTH

SEQ ID NO: 214235 - protein, 84 aa, Zea mays
  unsure (1)..(84): unsure at all Xaa locations
  Clone ID: MRT4577_126981C.1.pep
RESVGALLQPSSWHRTGVSXLLRPYSPRARLHERLWAARVAHTVRVQTHRVAMELINEDLDQGDGACAGRGFEGVDWHPIGTSA

SEQ ID NO: 214236 - protein, 68 aa, Zea mays
  Clone ID: MRT4577_126982C.1.pep
TRSRSKAIDLDNKTYLKRTGANVCARLALACNPLVKVQIIAPEFAAPWWAWVGWSHHQGVGTLGLYSQ

SEQ ID NO: 214237 - protein, 124 aa, Zea mays
  unsure (1)..(124): unsure at all Xaa locations
  Clone ID: MRT4577_126983C.1.pep
RGGDRKAIDSRADEKATDSSSKSDLRVPRXRIASLLKGRKYXQRVQAGAPVYLPAVLQYLAAEGLELCGNGTLDNKKTRXIVPTSYFLYLRTKXHNKISHLMSTVSIAIVDAMPNIHNLFCPEE

SEQ ID NO: 214238 - protein, 83 aa, Zea mays
  Clone ID: MRT4577_126984C.1.pep
GVTGSWLGSPAPGQDAEGNWHAGAIAAAADDVCAAAIMSVEGVIKVSVHYDISYFTPAKLHVRTHDTALLSSFSHKSASLTLE

SEQ ID NO: 214239 - protein, 66 aa, Zea mays
  Clone ID: MRT4577_126985C.1.pep
MLAVFSGQVVEVPAELVAAGIRTPSAKTKASQLVGRFLAASEPGVFVQLGDHGHLCFFHTNHALLR

SEQ ID NO: 214240 - protein, 57 aa, Zea mays
  Clone ID: MRT4577_126986C.1.pep
ICNRPKLNRRIASSVQVLNLGISSLGCCRRRAEGQRGAEERLFFLRRQGAEEPSLVP

SEQ ID NO: 214241 - protein, 118 aa, Zea mays
  unsure (1)..(118): unsure at all Xaa locations
  Clone ID: MRT4577_126987C.1.pep
RXXEKLYXAYQEKFHKTAVGHYWTAIAELIPREVPNIEKRGKKDAEKKPSVFVVQGPKPGKPTDLSRMRHILVKLKHSPPPHMIPPPPAPAKDTKDGKDAKDGKDSKNVDKAASNGTA

SEQ ID NO: 214242 - protein, 154 aa, Zea mays
  Clone ID: MRT4577_126988C.1.pep
MRQQAQTVPAPAVVDAEPRPRPTQLDIWCGERATASPQQHIISFHEAAARGAALAKECNLELTLATGRASSSSSCDAERRQGIIKRLKAPSNSDSGATAVSSTSTDSELAPFREVVEDVATPVRFRGEVSGRRRMDEVGQGPWLYQQCLSLRTA

SEQ ID NO: 214243 - protein, 201 aa, Zea mays
  unsure (1)..(201): unsure at all Xaa locations
  Clone ID: MRT4577_126989C.1.pep
PRHGQGADEDGHPEPRTDLQTTGTRAAPAVPRPEAADDAAGADGSCSGGRRRRAETETAAAGYLVRREGDSKSSAAHHQLPRGRSTCGCLAKECNLELTLATGRASSSSSSXXXXDAERRQGIIKRLKAPSNSDSGATAVSSTSTDSELAPFREVVEDVATPVRFRGEVSXXXXXXXXGQGPWLYQPQPEYGVMTMLYSTS

SEQ ID NO: 214244 - protein, 110 aa, Zea mays
  unsure (1)..(110): unsure at all Xaa locations
  Clone ID: MRT4577_12698C.1.pep
TVGIGERYEQRGYKXLAAIKLVTASKEHPXTHYEDLVGEPFFPGLGAYKASGPICDMAWEGPDFVKTGRVLLGATNPLVSXPGTIRGDNDIHLGRNVGHGFYSVXSAQKE

SEQ ID NO: 214245 - protein, 268 aa, Zea mays
  unsure (1)..(268): unsure at all Xaa locations
  Clone ID: MRT4577_126990C.1.pep
SPSWTALEPLYYSLSPXRVAAAAAACPAGRQCQLKVAFLGQRRCCGLVEADDVLLRTCCRPLAAPDIQLRRSRSGLGVDDRRGRNRLRLLHHQLLLGVVQPVQLVYLLSEDPFLVQDGHPHLLPVHVLDSRSSVKVQADFFPPLLARNNRGGVCLFSGSPARHSPAVRGSESAISRTRTAKQRRPRRRSSGLCWEASRPAWPVISIYLASERSSGGGRKRKEIPQPCCHELACFSSHSPPMCGVLSSHLSLHSCRHANRNKLPAGLEG

SEQ ID NO: 214246 - protein, 173 aa, Zea mays
  unsure (1)..(173): unsure at all Xaa locations
  Clone ID: MRT4577_126991C.1.pep
PGSAVPEILKRDCAREGGKHRLEPSPTTGTNRGMDREQMRMAILNQERIFRQQVLLTEATFHIRGLCIATKNALNNLSASSLASAARLPTTVTPQFLLTVLSVCLRSYRSNRPGTRAAPAVPRPEAADDAAGADGSCSGGRRRRAETETXAAGYLVRREGDSKSSAAHHQLSR

SEQ ID NO: 214247 - protein, 117 aa, Zea mays
  Clone ID: MRT4577_126992C.1.pep
MGEAAGEEESSAAPAEVSRQAELDEQRCLAEALQAINSLVSASLSATLFPLKWQLIRDRLNRLHAGLADITVSAGDENRCDALANLLRDVAAAAREAMELVPRSQGRHYGGGKLRLR

SEQ ID NO: 214248 - protein, 260 aa, Zea mays
  Clone ID: MRT4577_126993C.1.pep
ARVGGREGELAVSDTSAAPEILKRESLQMRTTGTIMNLHRDMDGREQMRTTIQNQEQVFCQQALSDHRRPHVAVPLMPGRQTHTTHHGCAREVRDRDREQMRMAILNQERIFRQQVLLTEATFHIRGLCIATKNALNNLSASSRLCCEVTYYRSTVPVSSHRTLPVYVPTDRIDQVHELHRLYHAQKQLMTQQLQTVPAPAVVDAEPRPRPQLDIWCGERATASPQQHIISFHEAAAPALAKECNLELTLATGRASSISS

SEQ ID NO: 214249 - protein, 76 aa, Zea mays
  Clone ID: MRT4577_126994C.1.pep
TGALPKFLGRPVVPPCDGERVSILLSVRMSAHMSLHSMPVLGGPLLPITPSLRCPPPPFSVCILSTSLSIIYSTTF

SEQ ID NO: 214250 - protein, 60 aa, Zea mays
  unsure (1)..(60): unsure at all Xaa locations
  Clone ID: MRT4577_126995C.1.pep
NTHGTGCTLASCIAAELAKGAXMLHAVQVASXFVESALYHSKDLVIGHGXLQGPFDHHFE

SEQ ID NO: 214251 - protein, 102 aa, Zea mays
  Clone ID: MRT4577_126996C.1.pep
GKSEEKENDRVPSAASDLAQKLTVAEPIKEENAEKEEAPASRDKKDDKKLRLKANKGQKEALPINLFPRFSFPANFPWVFSQKKGCVRGNQSRQLFSIAFFG

SEQ ID NO: 214252 - protein, 68 aa, Zea mays
  Clone ID: MRT4577_126997C.1.pep
RTRGRTRGRTRGFTNHRSTAIKLTKNCLPLWVFISKHTKVVHTEYGKLEQTKAIYVGKGPIDKQAPNI

SEQ ID NO: 214253 - protein, 49 aa, Zea mays
  Clone ID: MRT4577_126998C.1.pep
LLHFCHSFESSKLTPSCQLRRFISRGSKVSSCLPLFTQLAGGESNPAVA

SEQ ID NO: 214254 - protein, 117 aa, Zea mays
  unsure (1)..(117): unsure at all Xaa locations
  Clone ID: MRT4577_126999C.1.pep
MNITSLFNVKGKVGLVTGGGRGIGFMIVQGFVENGATVIISSRNAKECNKIAEELNNKGLGTCYAISADLSKMEECERLAXRNRERXESYLYILVNNSGAGWREEYETYPECAFDKL

SEQ ID NO: 214255 - protein, 33 aa, Zea mays
  Clone ID: MRT4577_12699C.1.pep
PKMSFKYMSTEITVARDLLHHCIEPIPSLVRWS

SEQ ID NO: 214256 - protein, 280 aa, Zea mays
  Clone ID: MRT4577_1269C.1.pep
MDAPAPAVEIREVWASNLEEEFEVIRDVVDAYPYVGMDTEFPGFVVQPIAEYRFTCDRIYAGLEGNVNVLKLIQLGLTFSNEAGTLPPCGTGGQCCIWQFNFRGFNPHTDPYSPDSIDLLRRSGIDFDLFAVEGVDSTRFAELMMSSGIVLNDDVQWVTFHGSHDFGYLLRLLTGREMPNTLDEFLKLTKIFFPVMYDVKHLMKFCGPGLYGGLSRLGKLLKVERVGTGHQAGSDCLLTLQCFMKLKQLYLKESVKLYDGLLFGLIPGEVEIKTAPPPIG

SEQ ID NO: 214257 - protein, 88 aa, Zea mays
  Clone ID: MRT4577_126C.1.pep
PRVRAHGKGFCKYASGACYIGTWDRGLKDGHGMFYQPGSKMPCNLEVSECVTDHDVSSSSSSGNENINSSLLFLFQKLCNTWRLHSIF

SEQ ID NO: 214258 - protein, 69 aa, Zea mays
  Clone ID: MRT4577_127000C.1.pep
MDAVDSVVDPFREFAKDSIRLVKRCHKPDRREFTKVAARTGIGFVVMGFVGFFVKLILILINNIIVGSG

SEQ ID NO: 214259 - protein, 139 aa, Zea mays
  Clone ID: MRT4577_127001C.1.pep
MKEARNHYHTRGSSRGGGGTTAERDLVLQWGNRKRLRCVKVQRRDVEAAATVAAEKAAISQRRAAATAAQHHPDGHTHHRVFRNTEEFAIMKSPARQQQNSRIDAVASPDRECPGRGNNNNNGGPQTCPDDKKGSSSGE

SEQ ID NO: 214260 - protein, 130 aa, Zea mays
  unsure (1)..(130): unsure at all Xaa locations
  Clone ID: MRT4577_127002C.1.pep
RAADSRSIGGGDYYNQCGDTTAGRESEHAIFNSSLRGQVDCTSHPXPPIEASAKDRARRRLTTDPTKRSXAYHVHNHPRSKEDXEKPRDTPXDNAAMNRLTQSTATNQVKKAALRAIAGCQTHEEDRPLN

SEQ ID NO: 214261 - protein, 147 aa, Zea mays
  Clone ID: MRT4577_127003C.1.pep
ADDDRGCHHFNIGVTGSAVSLAKWCGSPVRGWLPQNPLHRCFQIGDGGRRWRTLMASGIGDPRFEAGHGREHDYFRCDSAATNREREDGTMNVDGESAATNRRRGADYVSWDYAASAEGIGAATADGFPWWALMALDWILRHLRKGL

SEQ ID NO: 214262 - protein, 110 aa, Zea mays
  Clone ID: MRT4577_127004C.1.pep
MEMENGHAKYRVAVIGSGNWGSVASRLIASNTAKLPSFYDEVRMWVFEEILPTGRKLSESINEQNENCKYLPGIKLGTNVIADPDLESAGNQLIAVSPSYSDGLEGRCYS

SEQ ID NO: 214263 - protein, 363 aa, Zea mays
  unsure (1)..(363): unsure at all Xaa locations
  Clone ID: MRT4577_127005C.1.pep
MEMENGHAKYRVAVIGSGNWGSVASRLIASNTAKLPSFYDEVRMWVFEEILPTGRKLSESINEQNENCKYLPGIKLGTNVIADPDLESAVKDANMLVFVTPHQFVEGICKKLVGKLTPGAEAISLIKGMEVKMEGPCMISKLIADTLGINCCVLMGANIANEIAVEEFSEATIGYRKDKEVANRWAKLFTTPYFLVSVAEDIEGVELCGTLXNIVAIAAGLVDGLDMGNNTKAAIMRIGLREMRAFSKLLFPSVRDNTFFESCGVADLITTCLGGRNRRVAEAFARNGGKRSFDELEAEMLRGQKLQGVSTAREVYEVLTYRGWQELFPLLSTVHEICIGQLPPTSIVEYSEHTPNLSIIGGH

SEQ ID NO: 214264 - protein, 450 aa, Zea mays
  unsure (1)..(450): unsure at all Xaa locations
  Clone ID: MRT4577_127006C.1.pep
MEMENGHAKYRVAVIGSGNWGSVASRLIASNTAKLPSFYDEVRMWVFEEILPTGRKLSESINEQNENCKYLPGIKLGTNVIADPDLESAVKDANMLVFVTPHQFVEGICKKLVGKLTPGAEAISLIKGMEVKMEGPCMISKLIADTLGINCCVLMGANIANEIAVEEFSEATIGYRKDKEVANRWAKLFTTPYFLVAVPEDIEGVELCGTLKNIVANAPGVXGANIGNKIERLQLXRGFRVKTRFAKGKSLEQKLDIGLVRSCVADLITTCLAGRNRRVAEAFARNGGKXLLMNWRQRCSVAKNSRECPQQGNTKAAIMRIGLREMRAFSKLLFPSVRDNTFFESCGVADLITTCLGGRNRRVAEAFARNGGKRSFDELEAEMLRGQKLQGVSTAREVYEVLTYRGWQELFPLLSTVHEICIGQLPPTSIVEYSEHTPNLSIIGGHTPFY

SEQ ID NO: 214265 - protein, 73 aa, Zea mays
  unsure (1)..(73): unsure at all Xaa locations
  Clone ID: MRT4577_127007C.1.pep
PRSRSRAVSFMGVSGSSSSPEAVSLLCTAMVPCTGVTMVDVIVEFSGTIGWSMAICSYAXGSSKGCLKELACF

SEQ ID NO: 214266 - protein, 91 aa, Zea mays
  unsure (1)..(91): unsure at all Xaa locations
  Clone ID: MRT4577_127008C.1.pep
HASAAPRSASFSSVARGLPSLRLAPPRRRRGDLARPRAAAEAAAESYASALSEVADENGTLXQTVSDLEKLEKIFSDEAVPXFFNNPTVPY

SEQ ID NO: 214267 - protein, 311 aa, Zea mays
  Clone ID: MRT4577_12700C.1.pep
MSIPTSHIPIHIHPPSLGRPPTVFLIFTFLTQFTHPLTISPIDHRCHIPNPLPVVFGVFPAAAVAAVVHHTVPLVVISMRERNSSIDQEHQRGSSSRSTMPFAASRTSQQQHSRVATNGRAVAVCAGHAGVPDEVARHHEHAVAAGQCCAAMVQSIAAPVDAVWSLVRRFDQPQRYKRFIRSCHLVDGDGAEVGSVRELLVVSGLPAESSRERLEIRDDERRVISFRVLGGDHRLANYRSVTTVHEAAPSQDGRPLTMVVESYVVDVPPGNTVEETRIFVDTIVRCNLQSLEGTVIRQLEIAAMPHDDNQN

SEQ ID NO: 214268 - protein, 178 aa, Zea mays
  Clone ID: MRT4577_127010C.1.pep
MATAPWLLLSTSCAPGHFPKWPSALLHRAQPSLLPELLPCRTGAPSMAPERPALGFLLASRALVFSPVLISLLVFFNRRALSLTRSPMLRCPSSDSARPDLPCAAPLLLPVPARCPEPQRRSPVYSSPWHASSFTLRARSSQLAQSARRGFSPHGAPPCPCSDFPSVLQPLSSLPQPR

SEQ ID NO: 214269 - protein, 42 aa, Zea mays
  Clone ID: MRT4577_127011C.1.pep
LDRRCRLLRLWEVPHERRGQFLRAHASSIRSVVIGGSSGFCG

SEQ ID NO: 214270 - protein, 73 aa, Zea mays
  Clone ID: MRT4577_127012C.1.pep
NEWTVSMPRCTSERRANNKFARPQIHLLSLQTTPVPRLINYMAHSSCLRDISYLPFLCFYYRCVNILVNPHRA

SEQ ID NO: 214271 - protein, 101 aa, Zea mays
  Clone ID: MRT4577_127013C.1.pep
PTRQQFPSPDRPVPHSCNDGGRNPRIMRLPRDRRTPCASCTLTPPRTPTLTMSVSAPSHSCSAGSKIRWTHCSTSKEHGTSSIFATLSLSTSSISRINHLF

SEQ ID NO: 214272 - protein, 112 aa, Zea mays
  unsure (1)..(112): unsure at all Xaa locations
  Clone ID: MRT4577_127014C.1.pep
PRGAALCVVALRGGRDHLTSLLGPALLPPXSMGFVLDRAVRAGGQVMAAARLLRSGLPLLRAHLACCECAAAAHVPRGFASLAAGPPGGWSRFQGLGLAGPASLPVHCFLQQ

SEQ ID NO: 214273 - protein, 79 aa, Zea mays
  unsure (1)..(79): unsure at all Xaa locations
  Clone ID: MRT4577_127015C.1.pep
MAGMSLQHPWAFAFGLLXPTFYRIYKSKSTEGYQSVPYVVALFSAMLWIFYALIKSNETFLITINAAGCVIETIYVVMY

SEQ ID NO: 214274 - protein, 246 aa, Zea mays
  Clone ID: MRT4577_127016C.1.pep
MAGLSLLHPMAFAFGLLGNIISFMTYLAPLPTFYRIYKNKSTEGFQSVPYVVALFSAMLWIYYALLKSNELLLITINSAGCVIETLYIAMYLLYAPKKAKLFTAKILLLLNVGVFGLILLLTLLLSAGQRRVVVLGWVCVAFSVSVFVAPLSIIRQVVRTRSVEFMPFSLSLSLTVSAVVWFLYGLLIKDKYVALPNVIGFSFGVVQMGLYALYRNATPRVPFKDVADDGKDQAPGEHVGTIAKLT

SEQ ID NO: 214275 - protein, 71 aa, Zea mays
  Clone ID: MRT4577_127017C.1.pep
GQLVIHWGIQPHHKPLLHTGARDNSLKRHPRSALELTTQPKRLTQTHIPIPDHVSDPFYLQLPPSASLWAR

SEQ ID NO: 214276 - protein, 302 aa, Zea mays
  Clone ID: MRT4577_127018C.1.pep
MAGMSLQHPWAFAFGLLGNVISFMTFLAPIPTFYRIYKSKSTEGFQSVPYVVALFSAMLWIFYALIKSNETFLITINAAGCVIETIYVVMYFVYAPKKAKLFTAKIMALLNGGVFGVILLLTLLLFKGSKRVVLLGWICVGFSVSVFVAPLSIMRRVIQTKSVEYMPFSLSLSLTLSAVVWFLYGLLIKDKYVALPNVLGFIFGVVQMVLYVFYMNKTPVAATAVGKDAGKLPSAADEHVLVNIAKLNPALPERTSGMHPVTQMAAVPARSCAAEAIAPAMLPNRDVVDVFVSRHSPAVHVV

SEQ ID NO: 214277 - protein, 85 aa, Zea mays
  Clone ID: MRT4577_127019C.1.pep
LGKPKFKIAQALRLTIWPPAMTTSFYLYIPPGLSRDELLDSPELLHSCLNFFTEDTTGAIQAHRFYWKQDGDLNSVHSQQDDSQA

SEQ ID NO: 214278 - protein, 212 aa, Zea mays
  unsure (1)..(212): unsure at all Xaa locations
  Clone ID: MRT4577_12701C.1.pep
MPYAATRTSPQQHSRVASNGRXGGVRRPXGVPDEVARHHEHAVAAGQCCSVMVQSIAAPADAVWSLVRRFDQPQGYKRFIRSCHLVDGDGVEVGSVRELLVVSGLPAENSRERLEIRDDXXRVISFRILGGDHRLANYRSVTTVHEAASEGGPLTMVVESYVVDVPPGNTVEETRIFVDTIVRCNLQSLEDTVIRQQAMAAPAAPHNDHNHS

SEQ ID NO: 214279 - protein, 295 aa, Zea mays
  Clone ID: MRT4577_127020C.1.pep
MAGLSLQHPWAFTFGLLGNVISFMTFLAPIPTFYRIYKSKSTEGFQSVPYVVALFSAMLWIFYALIKSNETFLITINAAGCVIETVYVVMYFVYATKKGRMFTAKIMLLLNVGAFGSILLLTLLLFKGDKRVVMLGWICVGFSVSVFVAPLSIMRRVIQTKSVEYMPFSLSLSLTLSAVVWFLYGLLIKDKYVALPNILGFTFGVVQMVLYVVYMNKTPLPVADGKAAGKLPSAADEHVVVNVTKLSPGRLPPVTQMAAVPTKSCATEAAAPATLPSRDVVDVLVNRHSPAVHVT

SEQ ID NO: 214280 - protein, 328 aa, Zea mays
  unsure (1)..(328): unsure at all Xaa locations
  Clone ID: MRT4577_127021C.1.pep
MDRPSGTSYQRFPRVRIRELKDDYAKFELRDTDASMANALRRVMIAEVPTVAIDLVEIEVNSSVLNDEFIAHRLGLIPLTSAAAMQMRFSRDCDACDGDGSCEYCSVEFHLSVHATDSDQTLEVTSNDLRSXDPKVCPVDQARAYQHALGGTDPFGANASNENRGILIVKLRRGQELRLRAIARKGIGKDHAKWSPAATVTFMYEPDIRINEELMETLTVEERISLIESSPTKVFELDSANQVVVKNAEAYTYDDEVIKHAEAIGKPGLVEITAKEDSFVFTVETTGAITAYELIMNAITVLRQKLDAVRLQDDDGDLGELGAHLGGP

SEQ ID NO: 214281 - protein, 86 aa, Zea mays
  Clone ID: MRT4577_127022C.1.pep
LAPNERGNRRNPVAEPSSGQTRRRHVPARDEYKRTTEGPETEGEEEPVPHMRRQGCALRCPWVPRKKKDSLLTGATAGGKNGSSRR

SEQ ID NO: 214282 - protein, 149 aa, Zea mays
  Clone ID: MRT4577_127023C.1.pep
RVIQTKSVEYMPFSLSLSLTLSAVVWFLYGLLIKDKYVALPNILGFTFGVVQMVLYVLYMNKTPVAVAEGKDAGGKLPSAADEHVLVNIAKLSPALPERSSGVHPVVAQMAAVPNRSCAAEAAAPPAMLPNRDVVDVFVSRHSPAVHVV

SEQ ID NO: 214283 - protein, 295 aa, Zea mays
  unsure (1)..(295): unsure at all Xaa locations
  Clone ID: MRT4577_127024C.1.pep
KKHSEYMKAEREILTKVDHPFIVQLRYSFQTKYRLYLVLDFINGGHLFFQLYKQGLFREELARIYTAEIVSAVAHLHANGIMHRDLKPENILLDADGHAMLTDFGLAKEFCENTRSNSMCGTLEYMAPEIVLGRGHDKAADWWSVGILLFEMLTXPPFVGNREKVQQKIIKDKLKLPSFLSSEAHSLLRGLLHKEPNKRLGSCPGGSNEIKNHKWFKPINWRKLEARQIQPSFRPNVAGLTCIANFDECWTKTPVLDSPVSTPAGGGHSNFAGFTYVRPAPILEEVNASGSRLKD

SEQ ID NO: 214284 - protein, 302 aa, Zea mays
  Clone ID: MRT4577_127025C.1.pep
MAGMSLQHPWAFAFGLLGNVISFMTFLAPIPTFYRIYKSKSTEGFQSVPYVVALFSAMLWIFYALIKSNETFLITINAAGCVIETIYVVMYFVYAPKKAKLFTAKIMVLLNGGVFGVILLLTLLLFKGSKRVVLLGWICVGFSVSVFVAPLSIMRRVIQTKSVEYMPFSLSLSLTLSAVVWFLYGLLIKDKYVALPNILGFTFGVVQMVLYVLYMNKTPVAATAEGKDAGKLSSAADEHVLVNIAKLSPALPERSSGVHPVTQMAGVPVRSCAAEATAPAMLPNRDVVDVFVSRHSPAVHVA

SEQ ID NO: 214285 - protein, 832 aa, Zea mays
  unsure (1)..(832): unsure at all Xaa locations
  Clone ID: MRT4577_127026C.1.pep
MVSSQPSSLTAILAQGPNHCPVKILLPMGPPDVVSSDNVEYDFSDVFGSTPVQTPTNLCGFGPESPAPTVESNEEFYSDPVVIINRSHSLVGPTSLVSRSLRLSKLSLGKNEGSSELVKCLSEEKEGDQGQLSDEDLGNAMTGDGGIGLDDLEILKLVGQGAFGKVFQVRKKNTSEIYAMKVMRKDRILEKNHSEYMKAEREILTKVDHPFIVQLRYSFQTKYRLYLVLDFINGGHLFFQLYKQGLFRXLARIYTAEIVSAVAHLHANGIMHRDLKPENILLDADGHAMLTDFGLAKEFCENTRSNSMCGTLEYMAPEIVLGRGHDKAADWWSVGILLFEMLTGKPPFVGNREKVQQKIIKDKLKLPSFLSSEAHSLLRGLLHKEPNKRLGSCPGGSNEIKNHKWFKPINWRKLEARQIQPSFRPNVAGLTCIANFDECWTKTPVLDSPVSTPAGGGHSNFAGFTYVRPAPVLEPRAGCVHLLKDPTPNPRPSSPAAAGARAREMDRPSGTSYQRFPRVRIRELKDDYAKFELRDTDASMANALRRVMIAEVPTVAIDLVEIEVNSSVLNDEFIAHRLGLIPLTSAAAMQMRFSRDCDACDGDGSCEYCSVEFHLSVHATDSDQTLEVTSNDLRSMDPKVCPVDQARAYQHALGGTDPFGANASNENRGILIVKLRRGQELRLRAIARKGIGKDHAKWSPAATVTFMYEPDIRINEELMETLTVEERISLIESSPTKVFELDSANQVVVKNAEAYTYDDEVIKHAEAIGKPGLVEITAKEDSFVFTVETTGAITAYELIMNAITVLRQKLDAVRLQDDDGDLGELGAHLGGP

SEQ ID NO: 214286 - protein, 273 aa, Zea mays
  Clone ID: MRT4577_127027C.1.pep
MAGLSLEHPWAFAFGLLGNVISFMTFLAPIPTFYRIYKSKSTEGFQSVPYVVALFSAMLWIFYALIKSNETFLITINAAGCVIETIYIVMYFVYAPKKAKLFTAKIMALLNGGVFGVILLLTLLLFKGSKRVVLLGWICVGFSVSVFVAPLSIMRRVIQTKSVEYMPFSLSLSLTLSAVVWFLYGLLIKDKYVALPNVLGFIFGVVQMVLYVFYMNKTPVAAAVGKDAGKLPSAADEHVLVNIAKLNPALPERTSGNAPSHPDGGRSCQELRC

SEQ ID NO: 214287 - protein, 487 aa, Zea mays
  unsure (1)..(487): unsure at all Xaa locations
  Clone ID: MRT4577_127028C.1.pep
MVSSQPSSLTAILAQGPNHCPVKILLPMGPPDVVSSDNVEYDFSDVFGSTPVQTPTNLCGFGPESPAPTVESNEEFYSDPVVIINRSHSLVGPTSLVSRSLRLSKLSLGKNEGSSELVKCLSEEKERGPRAXLSDEDLGNAMTGDGGIGLDDLEILKLVGQGAFGKVFQVRKKNTSEIYAMKVMRKDRILEKNHSEYMKAEREILTKVDHPFIVQLRYSFQTKYRLYLVLDFINGGHLFFQLYKQGLFREELARIYTAEIVSAVAHLHANGIMHRDLKPENILLDADGHAMLTDFGLAKEFCENTRSNSMCGTLEYMAPEIVLGRGHDKAADWWSVGILLFEMLTGKPPFVGNREKVQQKIIKDKLKLPSFLSSEAHSLLRGLLHKEPNKRLGSCPGGSNEIKNHKWFKPINWRKLEARQIQPSFRPNVAGLTCIANFDECWTKTPVLDSPVSTPAGGGHSNFAGFTYVRPAPILEEVNASGSRLKD

SEQ ID NO: 214288 - protein, 335 aa, Zea mays
  unsure (1)..(335): unsure at all Xaa locations
  Clone ID: MRT4577_127029C.1.pep
MDRPSGTSYQRFPRVRIRELKDDYAKFELRDTDASMANALRRVMIAEVPTVAIDLVEIEVNSSVLNDEFIAHRLGLIPLTSAAAMQMRFSRDCDACDGDGSCEYCSVEFHLSVHATDSDQTLEVTSNDLRSMDPKVCPVDXHAPTSTRSEAPTPLEPMPSNENRGILIVKLRRGQELRLRAIARKGIGKDHAKWSPAATVTFIYEPXDMXVSMXLLEKLTQEESGRWXRISLIESSPTKVFELDXCATQVVVKNAEAYTYDDEVIKHAEAIGKPGLVEITAKEDSFVFTVETTGAITAYELIMNAITVLRQKLDAVRLQDDDGDLGELGAHLGGP

SEQ ID NO: 214289 - protein, 141 aa, Zea mays
  Clone ID: MRT4577_12702C.1.pep
AAVETEAEAVLLQQEHDGQERAKRKRSRRRRDRDGLQPKEATTQEEYLALCLVMLATGRRDADAAAPPQDHACSVCGKAFPSYQALGGHKASHRAKPSPSPSPAAAAALAPEPGAGHGDRHDEKKPAPSFSLSAGSRPAVA

SEQ ID NO: 214290 - protein, 53 aa, Zea mays
  Clone ID: MRT4577_127030C.1.pep
MSHRKFEQPRYVSLGFLPRKRSSRHRGKAQSFPRDDPNNPCHLTAFLGYTAGM

SEQ ID NO: 214291 - protein, 102 aa, Zea mays
  Clone ID: MRT4577_127031C.1.pep
ITQARPRTRGKHARAQTVRNGARRRHHRRLPASWPSPHGDGGHAVPSRLGLGIRSIRVIRFGLFGFVKFRVLKNENRNFQKYFRNRTRIDSHFSVRSIRSTE

SEQ ID NO: 214292 - protein, 107 aa, Zea mays
  Clone ID: MRT4577_127032C.1.pep
TCCSRRLPTGGASARGTGAHCCHFCRRPTACYGHCSPLKRSHGWTQLRAFLTSSLTGTRCAFYLMSRHVHRCALERNMQSFCAWNECNDVQGAQSLHFFWSMPQQQQ

SEQ ID NO: 214293 - protein, 106 aa, Zea mays
  Clone ID: MRT4577_127033C.1.pep
RSLGLVIIGHPGRCPCRLMGPGRGCPRLLFPPGECDGAPPVGPMIGSVCQNSWLCLLLRYPPFFFLGGSPVYVGLSIGFGPLGLGGLVPASVGETLLVTWYGISGI

SEQ ID NO: 214294 - protein, 29 aa, Zea mays
  Clone ID: MRT4577_127034C.1.pep
EFGHVICMEFWGFDLNHTLYCEFHLDVLY

SEQ ID NO: 214295 - protein, 58 aa, Zea mays
  unsure (1)..(58): unsure at all Xaa locations
  Clone ID: MRT4577_127035C.1.pep
FHCSFXXKKKKKKKKKKKKKKKKKKKKKKKKKKKKKKKKKKKKKKKKNFRGGVPEKQK

SEQ ID NO: 214296 - protein, 59 aa, Zea mays
  unsure (1)..(59): unsure at all Xaa locations
  Clone ID: MRT4577_127036C.1.pep
XGDLMAVNNCGLQAGLPPYSTVDKSCSHCWKYLSVQGXLFRGSSLLFRRVSSGSCFALE

SEQ ID NO: 214297 - protein, 57 aa, Zea mays
  Clone ID: MRT4577_127037C.1.pep
FVSIMQQGSPIDFAFLCSGVYLHMVLTRHRCVSAYRRPFLTWRLATFHHLCVIMCEN

SEQ ID NO: 214298 - protein, 71 aa, Zea mays
  Clone ID: MRT4577_127038C.1.pep
DGHMVFIFFLTCASSSTDVLEVSCREKDPGSMTVNFKLASSTPKHHLACIVYHPFQIFLVRQTIHIYPMFC

SEQ ID NO: 214299 - protein, 1065 aa, Zea mays
  Clone ID: MRT4577_127039C.1.pep
MGSGDDERSTSKHHHRDKDKDRDRSSSRHHRDKDRDRERSSRHHRDDGDRDRDRHHRDKDRDREERKEREREERKAREREERKAREREEREERDREKEKEKEKERARRREERDREERESSRRRGDADGEEDDDRDRKRRRRSSHHHHRDPEPEPEPASREEEEVDAEEAERRRQRKKEEDMEAEQQRLDDEMERRRRRVKEWQEKRREQQQQDGSVASGASAAVAAEADGAKAGKKWTLDGEESDEEEDKEDGKKAEGNGGAGDMDVGLPSGNGDANGGAEMEEDEIDPLDAFMNSMVLPEVAKLESAAVAMDTAPAAGADGKNGKSSKDVISNGDKKGSRKATGRIMQGDDSDSDYDDADDDGAGEDDEDDEEFIKRVKKTKAEKLAIVDHSKIDYQPFRKNFYIEVKDITKMTSEEVVDYRKHLELKVHGKDVPKPIKTWVQSGLTSKLLDTIKKLGFEKPMPIQTQALPIIMSGRDCIGIAKTGSGKTLAFVLPMLRHVKDQPPVVPGDGPIGLIMAPTRELVVQIHSDIKKFSKVLGINCVAIYGGSGVAQQISELKRGAEIVVCTPGRMIDILCTSSGKITNLRRVTFLVMDEADRMFDMGFEPQITRIVQNTRPDRQTVLFSATFPRQVEILARKVLTKPVEIQVGGRSVVNKDITQLVEVRPDTERFFRLLELLGEWYVKGKILVFVHSQDKCDSLLKDLFQHGYPCLSLHGGKDQTDRESTIADFKSNVCSLLIATSVAARGLDVKELELVVNYDVPNHYEDYVHRVGRTGRAGRKGFAVTFISDEDERYATDLVKALELSEQAVPQDLKALADRFMAKVKQGTEQAHGTGYGGSGFKFNEEEDEARKTAKKAQAREYGYEEDKSDSDSDDEGGVRKAGGDLAAQAIANAHAAAALVANKAANNANQQIPGSATAPLIPLLTASNQQNDEATARALQAAMNLQQNLARIQAHAVPEHYEAELEINDFPQNARWRITHKETLAPIQDWTGAAITTRGTYIPQGKIVGANERKLYLFIEGPTESSVKKAKAELKRVLEDCANQALNLPGSAQTGKYSVI

SEQ ID NO: 214300 - protein, 50 aa, Zea mays
  Clone ID: MRT4577_12703C.1.pep
KRKMSRGWNKKLKGHVGDENAGRVGGIKLLIELHAVDGLKTQDVEELGIG

SEQ ID NO: 214301 - protein, 78 aa, Zea mays
  Clone ID: MRT4577_127040C.1.pep
LENVDHVIHRGARHSLSGADGTGYPVAGRAHASGARTHLPRAWLALPPIASALGQPATRRPAHLALRETQFKAWYEPL

SEQ ID NO: 214302 - protein, 100 aa, Zea mays
  unsure (1)..(100): unsure at all Xaa locations
  Clone ID: MRT4577_127041C.1.pep
QRGESPPRLTLGHYPFRQALSQDPTARRSPSGSTLQSSAYTAWTSYATSIPSSSSPSINIIKQMQISLQGYSADYHERKXQYLLETPYYNRAIHEAVRYT

SEQ ID NO: 214303 - protein, 198 aa, Zea mays
  Clone ID: MRT4577_127042C.1.pep
MSAPKGKSYDETSRNKDNIRRGIKEPSPIGTACFVGSRALDPFLQYGILAKGFGGNAIENLGGKVLPQGPALITNTPLDSLLGLSPYRCIIFGMSVGSMLKQNIHCTTIMQEQMPPQFGLAVGAFNSVFNSLNSLFFVCAQTSASCNGEHFPQTPLIVGSSLYVVGMTLEFVSEIQRHAFKKDKKNKGQVYEGGVGSA

SEQ ID NO: 214304 - protein, 133 aa, Zea mays
  unsure (1)..(133): unsure at all Xaa locations
  Clone ID: MRT4577_127043C.1.pep
FGSSCTSAAFLYLQGGPHNHQSAQIHGELHQTILRWLQRXAKHVKANPAVMXTYLKSKGYKMATDATENHLAIRDLRPIGWTGNRXEMLCXLRHITLNKNALLRDGSALVPRGVPIQTXPTKTSTGPLKKAPQ

SEQ ID NO: 214305 - protein, 75 aa, Zea mays
  unsure (1)..(75): unsure at all Xaa locations
  Clone ID: MRT4577_127044C.1.pep
QNRLLDYVYPLNDNLTSHGCYINGQRESTTDLTLSPKLFHLHIAMDVYXGCNIPNNLSNAHVYTKVLFSRESIDR

SEQ ID NO: 214306 - protein, 54 aa, Zea mays
  Clone ID: MRT4577_127045C.1.pep
GAFNFLLQGGKGGFSEWDFVGEGHGFFPFRFLKAGQRGLFCNAIRVGWAFFLKV

SEQ ID NO: 214307 - protein, 45 aa, Zea mays
  Clone ID: MRT4577_127046C.1.pep
QTPPWFCLQKKKKKKKKKKKKKKKKKKKKKKKKKKKKKKKKNTPP

SEQ ID NO: 214308 - protein, 536 aa, Zea mays
  Clone ID: MRT4577_127047C.1.pep
MAVAAPAAVSTGAGQGKEYPGGLTLYVLLTCAVAATGGLVCGYDIGISGGVTSMDAFLHKFFPSVYRKEQTARGGGSQYCKFDSQLLTAFTSSLYLAALAASFFVASVARSLGRKWCMFGGGVSFLAGAALNAAAQDVAMLIVGRILLGIGVGFAGLSIPIYLSEMAPHHLRGTLNIGFQLMITVGIFSANLVNYGVDKIRGGWGWRLSLGLAAVPAAVITVGSLFLPDTPNSLIRRGYHEQARQVLARIRGADVDVADEYGDLVSASEASAAVRRPWLDVLGRRYRPQLTMAVLVPFFQQLTGINVIMFYAPVLFKTIGLGGDASLMSAVITGLVNIVATFVSIATVDRLGRRSLFLQGGCQMLVCQIVIGTLIGVQFGASGDGAAIPKASAATVVAFICIYVAGFAWSWGPLGVLVPSEIFPLEIRPAGQGINVAVNMMCTFAVAQAFLPMLCHLRFGLFYFFGGWVLVMTLFVAAFLPETKGVPVEKMGTVWRTHWFWGRFVADAGMDGRAGNRDSAFHKGKDIAIESRSRPV

SEQ ID NO: 214309 - protein, 492 aa, Zea mays
  unsure (1)..(492): unsure at all Xaa locations
  Clone ID: MRT4577_127048C.1.pep
RVLNKALHQEMDSLLAEAESQSDDGLTHKLRYAHLHKLKPLEAQILDLKKKHXNQIQILKEKQKSDEAAKKLHEEIHFIKAXKVQLQHKIKQEAEQFRQWKATREKELLQLRKEGRRNEYERHKLQALNQRQKLVLQRKSEEAASATKRLKEILEARKSSARDSSAGSNGTSPGYNMGERSLQKWFDQELEVMVHVHEVRNEYEKQSQLRAALGEELAILKQEDIRAGGSSPQRGKNGNSRTNTLSPNARQARIASLESMVTISSNTLVAMASQLSEAEERERAFSGRSRWNQLRSMGEAKSLLQYVFNVAADARCQVKEKEVEIKEMKEQMTELVGILRHSESRRREMEKQLKQREQTTPMATTPPKSGNGTTKHSADDPNTPLSPVAVPAQKQLKYSAGIVNSPSKGVAAIKKEQLKMVPIAQLSAGKRVSIAGHSGKLWRWKRSHHQWLMQFKWKWQKPWKLSEVIRHSDETITRIRPRPPLLPHKPHN

SEQ ID NO: 214310 - protein, 56 aa, Zea mays
  Clone ID: MRT4577_127049C.1.pep
HLGKLWRWKRSHHQWLMQFKWKWQKPWKLSEVIRHSDETITRIRPRPPLLPHKPHN

SEQ ID NO: 214311 - protein, 123 aa, Zea mays
  unsure (1)..(123): unsure at all Xaa locations
  Clone ID: MRT4577_12704C.1.pep
MATKRLSLLVLLALYESATNAFIIPQCSLATSSIITQYLPPITSMGLEHPDMHAYRLQQAIAASVXQQPISQEQQQYLAHITIQSISSHQHLQFLPALSHLAMVNPVGYLQQLMLASNPLAMA

SEQ ID NO: 214312 - protein, 76 aa, Zea mays
  Clone ID: MRT4577_127050C.1.pep
LVVIWGGVAVPSHATLLTQQQLLSFYQLVEGNPAAFLQLQQIVAISPTCFDKPIVQLPTIDEHWCRLLDCLSVVIQ

SEQ ID NO: 214313 - protein, 79 aa, Zea mays
  Clone ID: MRT4577_127051C.1.pep
MRHDAISRLGCSPLIASASSPTLSPRTTMTWDPCAASSCYPATPERKNQSSPRVRVGGFHGEPPLSPFLASVDGRNPWN

SEQ ID NO: 214314 - protein, 134 aa, Zea mays
  unsure (1)..(134): unsure at all Xaa locations
  Clone ID: MRT4577_127052C.1.pep
LWFMHWLPPLTAHGYHWHRAVRVLELPEHLWDPKSIMRAGYLRHGGGHTALCMIQGTNTPTLEDLQPIXQQNTNLFWFAEXFKTSYRTAMCHIMAIGISMXHTVMVNWHGIHEMQHTVRQELTAMLRMKGALHC

SEQ ID NO: 214315 - protein, 73 aa, Zea mays
  Clone ID: MRT4577_127053C.1.pep
WRWKKKRKLLHIFVNSGIKCHNPLFSRPDVVGNIFGADGAGNRDVLMEMEKKEITVHICKFWNQMSQSPFLVT

SEQ ID NO: 214316 - protein, 157 aa, Zea mays
  Clone ID: MRT4577_127054C.1.pep
GRDDRSIALENGTPGVRHCRDAPRCHLPPRVLASYRIRVLPHPVAADNDDVGPLRGLFVLSRDPGAQESVVAPGACWGVPWGATAVAVPRLCRRPESMELMRSFDWTRGSYPDRQFDERPVGTRAMAHRRSGVRRGPRSIVGVRLRARIRAVRSRVT

SEQ ID NO: 214317 - protein, 134 aa, Zea mays
  Clone ID: MRT4577_127055C.1.pep
QRPCFNPPPRAAAPRTIVLATAARLPVKHAAQPVYPYAAAQPRTESPRSRSPVTVPARLLRRRVPAHPVVVRRSPTASPLVVPVPRHQRSPCCRRGGAPSRFCDRASKPRLARCHRLEAHHWHADHPSPLCAAV

SEQ ID NO: 214318 - protein, 190 aa, Zea mays
  Clone ID: MRT4577_127056C.1.pep
EHGEASVPDLVVAAHEALDSEHRRSAVDLEHPATRRAGRRRCTQLARGRDRLRRASSMPSPPGGDAAPTSGHVVAPSAHGLLSAPARARVRAQHHRAAAPEHAAPHSRLGRRQRLPPLGSLWRAARDGAPPRLLGRVALAEPGRRVLARAPGAEKAGELAVVEALGRGRHRKRPFVRTGSSSVLGCVASY

SEQ ID NO: 214319 - protein, 66 aa, Zea mays
  Clone ID: MRT4577_127057C.1.pep
GGGSPDSAAVGWQVEQPQQVVLASTHVIFYCFIFCLQEPELTMVAWLGTKCNFLGHDSSEKNEELN

SEQ ID NO: 214320 - protein, 85 aa, Zea mays
  Clone ID: MRT4577_127058C.1.pep
HASEQVRFFPLTLFGDSGGGAAGGGPQGLVPTGARTFIGCLAPSPPRHQELPLPGGASRVHAPHWWMDIINLVFFFHIPQVGGRA

SEQ ID NO: 214321 - protein, 35 aa, Zea mays
  Clone ID: MRT4577_127059C.1.pep
TCFLYNSQFELDPHSLRIKFIIGWRACFLVHNRNR

SEQ ID NO: 214322 - protein, 61 aa, Zea mays
  Clone ID: MRT4577_12705C.1.pep
INFLHYKLQSNQRGLLTLFYLFKPFRSHFISTQNSCNLDMYDALGTKIRYAVKHKNQNILQ

SEQ ID NO: 214323 - protein, 87 aa, Zea mays
  Clone ID: MRT4577_127060C.1.pep
SLQCALKLLSAKGVQYMCAFPISSHGHWSKDRRLGTCRFTNQMKRTITILVRWYIPYITLLFIDETLSLYGRPMSRCSSCQLCADGS

SEQ ID NO: 214324 - protein, 77 aa, Zea mays
  Clone ID: MRT4577_127061C.1.pep
NFPREPASPVFSPPLKPPPFGETCTPSAHRPGINPGAQGPLIGGRPFFFPPFFWDKKVKPIPFTECYSYHFIILKQL

SEQ ID NO: 214325 - protein, 325 aa, Zea mays
  Clone ID: MRT4577_127062C.1.pep
MATTVTPASPFRDYLHRRRVRLHAKPHPHSQRRLSRTARLRYAPDGGGAEVSGPPASAAVEEQTPQERPEDFMLLAANRSEFNEIIMVIDSPVARYLVLDHNKNIHSILPKTTVWTNSYWDEFVSLPAIVPRGPVALLGLGAGTSAHLMLKFWPWLQLIGWEIDPMIIELSRDYFGMSDLEKATESGGSLLVRIGDALSPSATVEGGFAGIVVDLFCDGKVIPQLQEAKTWLQIAKRLMPDGRIMVNCGGSDTEESLSSPWVQNPTVKALCSAFPGQVSWKRLSEKESVNYVALTGPLPDLDGWSASVPSELSTKVKQWMPCELA

SEQ ID NO: 214326 - protein, 100 aa, Zea mays
  Clone ID: MRT4577_127063C.1.pep
PRGRPGRDFQEPIIERQRRISDHEGSQERSARCGGAHTAGSASHGNSTDGHDRPLDARSRAGCLPRHDDQGDDAVGHAALHGGDMQIHWLPHSCLLLKLY

SEQ ID NO: 214327 - protein, 74 aa, Zea mays
  Clone ID: MRT4577_127064C.1.pep
PRVRAKPTEVSAVEIVQQILLSYLQEAGSQDDGNLFTRWFYLCIWNKDDQHSQEKIIYYLARLKSKEILRDSGN

SEQ ID NO: 214328 - protein, 75 aa, Zea mays
  Clone ID: MRT4577_127065C.1.pep
GANIYPAPFFLSLSSLGGSHATASSRSWSTQPRITFSMWGHDEGPVMWVRPAPLEHHAGVGGQAREGRPPVTPSS

SEQ ID NO: 214329 - protein, 67 aa, Zea mays
  Clone ID: MRT4577_127066C.1.pep
KLVVDNYALSQIYDRDGLTLHEFVKGDMYIRDLKNTKGHISELTGGEWNPKSKETILTSSEDGSIRL

SEQ ID NO: 214330 - protein, 64 aa, Zea mays
  Clone ID: MRT4577_127067C.1.pep
TFSCLKGIKYFTNFNMVQNPSNLVLQETNFSRCALEITPKFNTMEVAGHLFKLAHLIVISPLKF

SEQ ID NO: 214331 - protein, 44 aa, Zea mays
  Clone ID: MRT4577_127068C.1.pep
LIFTHLNCDGCRSLLMNIGTGNSHKYRLRLFNNDSTHENTCCLD

SEQ ID NO: 214332 - protein, 63 aa, Zea mays
  Clone ID: MRT4577_127069C.1.pep
KMSRLLRSKYEVPCPISQTKAVRLEIPTPLHSVEASYSVTFACAPSFKIDPVRMNTVYTHCML

SEQ ID NO: 214333 - protein, 89 aa, Zea mays
  Clone ID: MRT4577_12706C.1.pep
PYVHMLHYRISVLWERLDAHEIDAWRRGLLLIYSTHIGYNHNTVSTEVLLARLLLLFTIRSFTFALHPRFSYLHARRGQHKLWPGRSLP

SEQ ID NO: 214334 - protein, 31 aa, Zea mays
  Clone ID: MRT4577_127070C.1.pep
YAFIFYVIYSKRLILVMLICNQLIRIGIFIY

SEQ ID NO: 214335 - protein, 99 aa, Zea mays
  Clone ID: MRT4577_127071C.1.pep
ILSMTLTEPLLSFQEELLSFKYYPTKLNKSLSISLGQSPFQIGQDKDTYISLIYHMKQYVIPEKHGLRIKGDLNCSFATGSHYLFRQFPQFLWMQIPHL

SEQ ID NO: 214336 - protein, 98 aa, Zea mays
  unsure (1)..(98): unsure at all Xaa locations
  Clone ID: MRT4577_127072C.1.pep
IFIKAFFFPFFGEWGVKSQIATIGLGADGNPFGVVLGGIIGQALCTSCSVFGGKSPASQISQKMVXLSKGGLFLLFGIRSLLSGPGELESRLEPFSVG

SEQ ID NO: 214337 - protein, 403 aa, Zea mays
  Clone ID: MRT4577_127073C.1.pep
MFTGAAGGIGNLPRPRRPRLGGIGHGGVMVSPQGQVALGAHPHLAAPPCTDYDVAYFKAYSHIGVHEEMLKDHVRTSTYRNAIMHHKDLISGKVVLDVGCGTGVLSIFCAFAGATRVYAVDASDIAFQAMEIVRENELSDKVVVLHGRIEDVDIEEKVDVIISEWMGYMLLYESMLGSVIFARDKWLKPGGLILPSHASLYMAPVTNSQRYHDSIYFWRDVYGIKMSSMMPLAKLCAFMEPSVETISGENVLTWPAVVAQVDCYTIQAQKLETITAAFKFTSMLQAPLHGFAFWFDVEFNGPVRQKSKKQPSQSLDENTQNASPSNRKRKPDVSIVLSTAPEDAPTHWQQTLLYLFEPIELNKDQIIEGSVTISQSQQHARFLNICLKYFTGDQWYVKESVMR

SEQ ID NO: 214338 - protein, 41 aa, Zea mays
  Clone ID: MRT4577_127075C.1.pep
KSPNRLVVDEATNDDNSVVALHPDTMERLQLFRGDTVLLKV

SEQ ID NO: 214339 - protein, 104 aa, Zea mays
  Clone ID: MRT4577_127076C.1.pep
SVHSFLNARAGQRVTSHARRPFKNRAADTNLLPSIPRLPPVRPRIPTILYEAGGAAAHYCGTRCKSEDTTYTGRGGGGLPGEDRLRAERDNSENGDGAAHTLNA

SEQ ID NO: 214340 - protein, 34 aa, Zea mays
  Clone ID: MRT4577_127077C.1.pep
THRSQEPYLLGGISLIYQLSQVRFRHTWGALAEA

SEQ ID NO: 214341 - protein, 140 aa, Zea mays
  Clone ID: MRT4577_127078C.1.pep
LLRRRSQQRSWQGRQGFSEKKPRWEAQNTSGRDGQAGKGDANNSWSKNRSSPSSAWGAPSGGAGGRGSWGKSNEDGWNSAGGSAKEKPAWGGGSEASTKKEDKGGEGNGSQGGGGVSSWDKGADDAWNGNTGSDIGSGGW

SEQ ID NO: 214342 - protein, 68 aa, Zea mays
  Clone ID: MRT4577_127079C.1.pep
GFVMFSLPVGLGFMRQSNYRTALYETTKHFDSLVNEEHVYKMHNVGFNINLGDHFRHISGPMELYLTR

SEQ ID NO: 214343 - protein, 50 aa, Zea mays
  Clone ID: MRT4577_12707C.1.pep
HKILFSSPRMRGPIFMEDIVFTHQMWMWFSICMAGAVSDQKIMASPKIMA

SEQ ID NO: 214344 - protein, 148 aa, Zea mays
  Clone ID: MRT4577_127080C.1.pep
NPNKENGEGNQAFSKSKPSWKAQNTSGRDGQAGKGDANNSWSKNRSSPSILCQPSGDANKSSAWGAPSGGAGGRGSWGKSNEDGWNSAGGSAKEKPAWGGGSEAPTKKEDKGGEGNGSQGGGGVSSWDKGADDAWNGNTGSDIGSGGW

SEQ ID NO: 214345 - protein, 94 aa, Zea mays
  Clone ID: MRT4577_127081C.1.pep
LYLADESYTGHYSPHLDHAILRHHCSAGGIPLQTINLRGIMICNAAINYYTDTNGMYHLLWTHALIYYATGDAICRHCNYSAADGGFDGSIDKC

SEQ ID NO: 214346 - protein, 138 aa, Zea mays
  unsure (1)..(138): unsure at all Xaa locations
  Clone ID: MRT4577_127082C.1.pep
MTSCGAEDTRGGWDSKVKGSSCNDGGISINHMKEVDSHAPVKQKLQLFPINEATLKPFEKVDLLDSPIARLDIETTTLGATYVASLDAGVWTKEQVFAGXHKENATIFRPKLDEVHKKRADSWYKTVSRSFDLADLSL

SEQ ID NO: 214347 - protein, 220 aa, Zea mays
  unsure (1)..(220): unsure at all Xaa locations
  Clone ID: MRT4577_127083C.1.pep
APQPPPGPSVACGRPVPVDRARTQAPAHRWVARPGAVAGRXGLLPRPXARRAQAPGSPQPRPRPGARDPQPRLAGSPXGGSDPGSSGMGRRGFPRLAASPGGHGLPRRXGRRGGPGVHSRGXSHGGAGTQPRLPGGHPWRSTGAQPGGXLLGGAAALRGRASTARRGPGRRPSSSVRQPLARXPAQSGLGQXARGGLDGADTRHGLGTGSGHGEGGRRLV

SEQ ID NO: 214348 - protein, 64 aa, Zea mays
  Clone ID: MRT4577_127084C.1.pep
MGGDLFSSCLAQVKGEKKKRVSLKTKGRLTWEKLESTAAFQPVAGHTTVLVGPRPSANLIAPLI

SEQ ID NO: 214349 - protein, 81 aa, Zea mays
  unsure (1)..(81): unsure at all Xaa locations
  Clone ID: MRT4577_127085C.1.pep
PFLRVSGXVVLRLCAPXFLCLLXGGCGGWXXXXGRCLXVASXCSPSLRXXGXLXRGXXXXXLRFXXASXACXXXXVSRRXV

SEQ ID NO: 214350 - protein, 87 aa, Zea mays
  Clone ID: MRT4577_127086C.1.pep
LAVNANVGYAAVQELARNCPELHHLDLTGCLRVGSDGVRTLAEYCPVLRSLRVRHCHHVAESSLSRLRKRGVDIDVEPPLLKALVLL

SEQ ID NO: 214351 - protein, 63 aa, Zea mays
  Clone ID: MRT4577_127087C.1.pep
TGPDSVYRVLFFLPSFPSSHRAMNVQPYLGSPIGSAATPSMLTPLDRLVAPILPSDVRSSHWV

SEQ ID NO: 214352 - protein, 63 aa, Zea mays
  Clone ID: MRT4577_127088C.1.pep
VDLKKAGPHELQELHKYLRTYSFRRNGYVRDELREHLNRFFFRVTYMLVPRWSGKQCLQPDRA

SEQ ID NO: 214353 - protein, 57 aa, Zea mays
  unsure (1)..(57): unsure at all Xaa locations
  Clone ID: MRT4577_127089C.1.pep
GLVGAGGEVVTEPTGPLGVLKGFKDLPPGMPSVLFVTALTXLLWVPVILLHNDWIGP

SEQ ID NO: 214354 - protein, 43 aa, Zea mays
  Clone ID: MRT4577_12708C.1.pep
TRAGVYSVDAPCFWWDSSSNLGLSYFFYLLKKKKKGRRSRSRT

SEQ ID NO: 214355 - protein, 64 aa, Zea mays
  Clone ID: MRT4577_127090C.1.pep
APACNWNPSIAFQGKQMAHFWMAMAFIQIFTVAECVRCALSGVYANVPFICHAALIHSDLNLFR

SEQ ID NO: 214356 - protein, 104 aa, Zea mays
  unsure (1)..(104): unsure at all Xaa locations
  Clone ID: MRT4577_127091C.1.pep
MQNGDSTEAQATREDQQNIKRFGRHNNRLHEHEDENKLAKETNENRDEAGNEAKPADEEARRXQNGEEQANKPRDDSQTRQEQKKKDAVKKLERLEEEKENSLP

SEQ ID NO: 214357 - protein, 100 aa, Zea mays
  Clone ID: MRT4577_127092C.1.pep
KCTWPRSVLLRALVPPGAGLFFCRSAPVPKNSALLCTSRFFNRPFFFCCALPFSDIRFFFLGSLPPCFTLVGKFGDCFLRFFFPGGAFPLLFKKKARFGP

SEQ ID NO: 214358 - protein, 57 aa, Zea mays
  Clone ID: MRT4577_127093C.1.pep
SAREQNGPCSLRHRSDLLLAGYYDALRPALAQSPPGRHMLTTPAQGYDILNSRANQD

SEQ ID NO: 214359 - protein, 40 aa, Zea mays
  Clone ID: MRT4577_127094C.1.pep
LALFPYEVPALGFPTTSSELLLPCSLLVETAADISDGNQL

SEQ ID NO: 214360 - protein, 105 aa, Zea mays
  unsure (1)..(105): unsure at all Xaa locations
  Clone ID: MRT4577_127095C.1.pep
GLGGLXXKRAKEPYAXRRDAXPRQAAARHRAPRGRRPPPRGGGHLHSASLRVPRVLVTCAGERGGTADDPARLPPGSGCAEDWLPPPGRTRGSTREFRTGSCRRT

SEQ ID NO: 214361 - protein, 68 aa, Zea mays
  Clone ID: MRT4577_127096C.1.pep
MADETDTWPASAVSRGRPAPEDDDREEGEITDLACAPSPPATHPLEHSWTLWLDSPQSKHKQAAWGSS

SEQ ID NO: 214362 - protein, 126 aa, Zea mays
  Clone ID: MRT4577_127097C.1.pep
KICCDWGNSHKQLAQRIGKQASTFIQDELSMDHVYDYMLHLLTEYAKLLKFKPTKPPDAIEVCSESLACQAEGLEKKFLMESMVKFPRDACDLPPPFNPHELKLLKQKKENSIKQIHMWEQKDLGA

SEQ ID NO: 214363 - protein, 136 aa, Zea mays
  unsure (1)..(136): unsure at all Xaa locations
  Clone ID: MRT4577_127098C.1.pep
XXSYSTXIIIPTXDLXVSKVXIIXSLLSLIPILSXXXSHITCFPAQSLSHSYXLSXPXXASSXPPQRILXFSFFPSXXXSTLLYISFIFSVLTYFXAFLLISXFVXXXTSQLLDLLFLSFSFLSSLXALHSIXSXL

SEQ ID NO: 214364 - protein, 103 aa, Zea mays
  Clone ID: MRT4577_127099C.1.pep
AHTSFIQEVMSKSGRFRGGSHGNPPSKTGFFLIGRLSSIIAPAEAFRFFCKPKFSGGFGFFLQIKFCGPPPPKKKNKKKKKKKKKKKKKKKKKKKKKKKDEPP

SEQ ID NO: 214365 - protein, 92 aa, Zea mays
  Clone ID: MRT4577_12709C.1.pep
KKTKFRLKPQTLAVNFLRDGKNGSHLVSQNCNSNDIYFHFLAFGVLWRSLVLFDDPLVVYIDTVQKLWDFLFFNMGFFVDKGGGTRFQLYFF

SEQ ID NO: 214366 - protein, 239 aa, Zea mays
  Clone ID: MRT4577_1270C.1.pep
RPAGRGREGRSIYIYEWSYVKQCSFDCTNTSIKDSRRGARVNWHKIGDHPLPSRPEQSTDCEVLRIGGLELLVLKAWPFGLKAIRDREGSKGHGPLGDTIEAPLFFFFFSTTMHTLLIISHCLCCKKDTGYMILHLYCDSPRAARAPWAYTYIHTHSITIFSPTEDDGDLPKMYSCPTWPIERLQAARAPRALSSTGHAPPSELAPDVVFTVVAAAAGEAEGGALGYMAAASGQCWGPG

SEQ ID NO: 214367 - protein, 44 aa, Zea mays
  Clone ID: MRT4577_127100C.1.pep
RLPNKIESGSKIKYYQDEGPPLPPNSGPRSSCLHGLLHCIVFGV

SEQ ID NO: 214368 - protein, 53 aa, Zea mays
  unsure (1)..(53): unsure at all Xaa locations
  Clone ID: MRT4577_127101C.1.pep
RPTHAYDLHQLVSQISYIPHQQWQPKDVVSLCSLAXXIXLLRRPFYHNAFKXL

SEQ ID NO: 214369 - protein, 75 aa, Zea mays
  Clone ID: MRT4577_127102C.1.pep
STLVQGTRLSDITFCVRHDQNPKGSRESMYDDFRIPPFTQVPEHPPPLRLEHMNQIFSPQSKMGMVMCCPWWFAM

SEQ ID NO: 214370 - protein, 109 aa, Zea mays
  unsure (1)..(109): unsure at all Xaa locations
  Clone ID: MRT4577_127103C.1.pep
GLLSPSSTRGGDAFTSLFGMNGKELDGRNITGNEAHSHGGRGGGSRSGYCGGRTSGGYGGGGRPDGRGDYGCGGGYRGGGGGYCGGGGGYCGGNRGGGYCNSXDRNWRN

SEQ ID NO: 214371 - protein, 105 aa, Zea mays
  Clone ID: MRT4577_127104C.1.pep
RCCRLALGPAVAPREAHPSLPGAASLLPAAALPPCSSPSQRPREWRLLRRSNSSPWRGAPTPLRPPPPLPRLRPPPPRHAAAARPPQTVAGHGGGRGRRAHDHRA

SEQ ID NO: 214372 - protein, 118 aa, Zea mays
  unsure (1)..(118): unsure at all Xaa locations
  Clone ID: MRT4577_127105C.1.pep
ANRDNRATLATDIQYLHTLRALSACVANATXFRQCSQARIAMLDAAYLXSMIASECEYPSLXPYRLQPAITASYIPLSPLCKQSPGESVVQSLVQTIKAHQLQXLLLPGINQAGLANL

SEQ ID NO: 214373 - protein, 52 aa, Zea mays
  Clone ID: MRT4577_127106C.1.pep
WRSGNGVSLSPGRCGGTSWTPPDDEDEVYPYLGARGEEEDTVTLWCLTSAEE

SEQ ID NO: 214374 - protein, 161 aa, Zea mays
  unsure (1)..(161): unsure at all Xaa locations
  Clone ID: MRT4577_127107C.1.pep
MAMRARARRSAGHLYHLRLPRVLFLLPFALLLIGGXGGVPXLLXRANAHGRQCMPXPPPTAPSPSLTPSRTPXLSLAIVTLADEDAGGPGARRSFRGVLAASARDKRAYAAAHGDSARALPASAVDPSRPPRWSKGLALRAHLRHHHWVFWNDAXTLGTNP

SEQ ID NO: 214375 - protein, 177 aa, Zea mays
  unsure (1)..(177): unsure at all Xaa locations
  Clone ID: MRT4577_127108C.1.pep
MRSRPRRSAGHLYHLRLRRLLFLLPFALLLILLARLPALLRRANAHGRQCMPXPPPTASSPSLTPSRTPXLSLAIVTLADEDAGGPGARRSFRGVLAASARNKRAYAAAHGYSLVALPASAVDPSRPPSWSKVLALRTHLRYHHWLFWNDADTLVSNPEIPLERILFSVTGPSAFGA

SEQ ID NO: 214376 - protein, 87 aa, Zea mays
  Clone ID: MRT4577_127109C.1.pep
SRSFILSPLDMVISASLVFMSDNWRSSTTWGCPRSSSPRCHRPSYLGRSSGVLVAGEWAGDDLDTWRSAAAAVVATRGRGGEMGAAR

SEQ ID NO: 214377 - protein, 83 aa, Zea mays
  unsure (1)..(83): unsure at all Xaa locations
  Clone ID: MRT4577_12710C.1.pep
AFSPRLLXGPRLRPCPCLGSSGLFACGLFWPAXPRLGRSLLARGLCLLGRLGPVSCPCPACVVSRLCLNGGFPRARAXFRASS

SEQ ID NO: 214378 - protein, 296 aa, Zea mays
  unsure (1)..(296): unsure at all Xaa locations
  Clone ID: MRT4577_127110C.1.pep
MPPHKIETGHQDVVHDITMDYYGKRLATASSDNTIKIIGVSGNSHQQLATLSGHQGPVWQVAWAHPKFGSMLASCSYDGRVIIWKEGSKPDEWALAHTFAEHKSSANSIAWAPHELGLCLACGSSDGNISVFAARSDGGWDTTRIDQAHPVGVTSVSWAPAMAPGALISAGSSGQFEYVQKLASGGCDNTVKVWKLXNGSWRMDCFPALQMHKDWVRDVAWAQXFGSRDGTVVIWTAAKEGEQWDGRVLYDFRTPVWRLSWSLTGNILAVSDGNNNVTLWKEAVDGEWQQVTTVEP

SEQ ID NO: 214379 - protein, 156 aa, Zea mays
  unsure (1)..(156): unsure at all Xaa locations
  Clone ID: MRT4577_127111C.1.pep
MDPDATWGLTPLAGADPEIYDLLEREKGRQRRGIQIIASENFTSXAXMEVIGSVLTNKDSEGMAGARYYCEDDLVDEIENLWRLRALAALHLDCACXGVYMKTYXSPPTNYAXYTGLLNTCDRIMAIDLPXSRGRLTHGYYTDTXKKISATCNVLL

SEQ ID NO: 214380 - protein, 138 aa, Zea mays
  unsure (1)..(138): unsure at all Xaa locations
  Clone ID: MRT4577_127112C.1.pep
MERGSSWRLTVVAGTLVCASLFSPPAAALNVGVQYAGDDAXPPFLRYGKYCGIMYSGCPGEPPCDALDACCMHHDNCVQAKMDYLSTACNEALLDCLAKLREGTSTFEGNRCMIDQVIDVISLVIEAAVVAGRVLHKP

SEQ ID NO: 214381 - protein, 73 aa, Zea mays
  Clone ID: MRT4577_127113C.1.pep
LAGILLSLLSGGYRHGVGDKPSLSIATNGTRSVLLIKCMDECDYIYPYIRALECKTWAKQRCHYWRIHCPQAC

SEQ ID NO: 214382 - protein, 182 aa, Zea mays
  Clone ID: MRT4577_127115C.1.pep
CRSTCRTAGTAASCSGPTRTCGCTPAACSRRDGTARPAVPGEERLSRGGELVSLNCSCGAGLRQWLARPGGGQKWGSWRMDCFPALQMHKDWVRDVAWAPNLGLPKSTIASASQDGTVVIWTAAKEGEQWDGRVLYDFRTPVWRLSWSLTGNILAVSDGNNNVTLWKEAVDGEWQQVTTVEP

SEQ ID NO: 214383 - protein, 285 aa, Zea mays
  Clone ID: MRT4577_127116C.1.pep
MPPHKIETGHQDVVHDIAMDYYGKRLATASPDNTIKIIGVSGTSHQQLATLSGHQGPVWQVAWAHPKFGSMLASCSYDGRVIIWKEGSKPDEWALAHTFAEHKSSVNSIAWAPHELGLCLACGSSDGNISVFAARSDGGWDTTRIDQAHPVGVTSVSWAPAMAPGALISAGSSGQFEYVQKLASGGCDNTVKVWKLNNGSWRMDCFPALQMHKDWVRDVAWAPNLGLPKSTIASASQDGTVVIWTAAKEGEQWDGRVLYDFRTPVWRLSWSLTGNILAVSDGNNN

SEQ ID NO: 214384 - protein, 305 aa, Zea mays
  Clone ID: MRT4577_127117C.1.pep
MPPHKIETGHQDVVHDIAMDYYGKRLATASSDNTIKIIGVSGTSHQQLATLSGHQGPVWQVAWAHPKFGSMLASCSYDGRVIIWKEGSKPDEWALAHTFAEHKSSVNSIAWAPHELGLCLACGSSDGNISVFAARSDGGWDTTRIDQAHPVGVTSVSWAPAMAPGALISAGSSGQFEYVQKLASGGCDNTVKVWKLNNGSWRMDCFPALQMHKDWVRDVAWAPNLGLPKSTIASASQDGTVVIWTAAKEGEQWDGRVLYDFRTPVWRLSWSLTGNILAVSDGNNNVTLWKEAVDGEWQQVTTVEP

SEQ ID NO: 214385 - protein, 103 aa, Zea mays
  unsure (1)..(103): unsure at all Xaa locations
  Clone ID: MRT4577_127118C.1.pep
RPFPGRPVLAFVPCRRWRRVWADSPAPVQLRGAYLAGVGVVVLLAAFFLPVAVSACARLNSLVRDICQVXESGYGIEGMPHITGAGALTLGLKAVXVWLSGGK

SEQ ID NO: 214386 - protein, 305 aa, Zea mays; identical to SEQ ID NO: 214384
  Clone ID: MRT4577_127119C.1.pep

SEQ ID NO: 214387 - protein, 76 aa, Zea mays
  Clone ID: MRT4577_12711C.1.pep
MALTNFIVTVAVVGAGVLLFTTDIRRSGALFRRNARQLRQWLEEDTASAASKSAKEAAQKKLDSTVPKEKPKEDSH

SEQ ID NO: 214388 - protein, 32 aa, Zea mays
  Clone ID: MRT4577_127120C.1.pep
VFMSHKTFYNALLGRLNVCGVQTDFIVGVARG

SEQ ID NO: 214389 - protein, 103 aa, Zea mays
  Clone ID: MRT4577_127121C.1.pep
SGCARTRWRGYGCGKKKDRRSTSGTWGWRSVARGWSANDRRQPTSTKRGIPASGRGGPSCRRSGTSRSTPPRSSASGAGPRPRYRSAGSRRPGCLEMTARWQG

SEQ ID NO: 214390 - protein, 76 aa, Zea mays
  unsure (1)..(76): unsure at all Xaa locations
  Clone ID: MRT4577_127122C.1.pep
PAKVLERVQATVNIANMWPXVPYTLPTYPYVDGAYAKKAPPGFVVSAPQPMINASAPEVKYMSMFSANNVNACPVM

SEQ ID NO: 214391 - protein, 101 aa, Zea mays
  Clone ID: MRT4577_127123C.1.pep
TVLNYNLLNVNNLKCFISIFDASSEVFGMEKNTLLNLQCHLRWFLWGNNAVIRSLVFSWKEICAGDSWSVISHYIFQMAFKYVAREMLIPNGKFQGNDIIV

SEQ ID NO: 214392 - protein, 27 aa, Zea mays
  Clone ID: MRT4577_127124C.1.pep
DHIGRAPDLDSLTVETSERHYEIKRGA

SEQ ID NO: 214393 - protein, 49 aa, Zea mays
  Clone ID: MRT4577_127125C.1.pep
HAGAEYLAGNMSLKASYTCHVISHGALCACFLPLKKLAAFSGNIGSGLS

SEQ ID NO: 214394 - protein, 42 aa, Zea mays
  Clone ID: MRT4577_127126C.1.pep
GEVNFEPLKRVAFFFFFFIFYLLIFVVICIFLFFFFFFFFFF

SEQ ID NO: 214395 - protein, 73 aa, Zea mays
  Clone ID: MRT4577_127127C.1.pep
PSQENLSKQLGNDKSLSTPKQNKKTEGVRGSGLLHRWLLRSRHLLRLGRHQYQPIIYMGKVIQQRMESLCQGF

SEQ ID NO: 214396 - protein, 93 aa, Zea mays
  Clone ID: MRT4577_127128C.1.pep
HERYSGTKKHLILSLSHTPHNNNVGQPAGHLELLFNHHDNLDRDIIISRVVGASNQQLQGAHSHLLRQRKAWGASPDSTSASTRQGTSFLSRA

SEQ ID NO: 214397 - protein, 92 aa, Zea mays
  Clone ID: MRT4577_127129C.1.pep
VSLQGIVLIRPPRTTGRVGGCTGKGRKSVSAWRPWDGGGKAGAGLFFYYYFDFRGVWVRVLRFPWARILSENYILRCSDHFADDIPAGLEGP

SEQ ID NO: 214398 - protein, 64 aa, Zea mays
  Clone ID: MRT4577_12712C.1.pep
MAKIKIGINGFGRIGRLMARVALQSDNVNLVSENYPCMITDSMTYMSKSNTVALQGLEGAVAVM

SEQ ID NO: 214399 - protein, 70 aa, Zea mays
  Clone ID: MRT4577_127130C.1.pep
SRPALHLLRAPPRRTPRIAYPYTNRTMTSASRTKILWLHALRHGVEGQRTQPRPSITIPRDPREKSPSRR

SEQ ID NO: 214400 - protein, 397 aa, Zea mays
  Clone ID: MRT4577_127131C.1.pep
MELKNDCSTLQNGNTFRGYLNELQKYYRGRSRSYRLYERQITAVQEFKEPYPTPASTETLSIAYMELMNMHAYPQIQGGAKFTLQLRLKTDDDIANITITTAIRLTYADGAVMLEAKAIYYDLYQVDILNRLTISSLALSIFRRKYINDSEKNRIYILNDNEEQFIRSGYYGGHTDVYLPTGEHLKYYDVNSLYPYSMLSEMPAGKPRWKNNLGLKKTKIELKDMFGFIKAFIICPADMHKPFLPYKQSDGTLIFPTGRFIGVYFSEELKYAVSIGYKVYPICGYLFDRMESPFKDFVNDIYRRRLEAKARGEKALDFIHKTTMNSLYGRFGINPESTTTLILNKEEALKFPMEHEGFMHSEELCADRFLITYKNKRSSAHPTIIRVRKLNPRHESG

SEQ ID NO: 214401 - protein, 152 aa, Zea mays
  unsure (1)..(152): unsure at all Xaa locations
  Clone ID: MRT4577_127132C.1.pep
YLISAGKDSNVYIWNFANSKDARSVHSCELFFSKAVTTAVPWPGVYQDGHTKPSYLTEKSCSMPILRHLGECQSAEPWSFVDGSKGLATWPEEKLPSTAKPGSSPQLGDCLSMISAAWSTVIVTASRDGVIRSFHNYGLPVXLWALPVAWSA

SEQ ID NO: 214402 - protein, 98 aa, Zea mays
  Clone ID: MRT4577_127133C.1.pep
KGPPNNQLPEGGVFTFLDGKTKREGVGFPKQWGFPPPYNSPSGAGPRGRSGPILPCGKKKNRPFGRGFGKSKLKSPPLGGLCLSRKKTTKKKKKTHTD

SEQ ID NO: 214403 - protein, 62 aa, Zea mays
  Clone ID: MRT4577_127134C.1.pep
PVYSWAGVRLFGFQIGWGLRASIVFPPPHCAAYVGLGCLGLGNTNNAFLTWFLLVWVVWNDQ

SEQ ID NO: 214404 - protein, 135 aa, Zea mays
  unsure (1)..(135): unsure at all Xaa locations
  Clone ID: MRT4577_127135C.1.pep
PRPPRVRARAFETRAVASTPAPTAXGSQXPLRQGQPAPTRAPLQQPPPAXGDAPTPAETDYPARQFRCLFPXEQQERHHQGLCYKCDEPYVWGHVCQRLFYLESTDFIDDDIPTNISATTGPRNHNVVAGTAPGG

SEQ ID NO: 214405 - protein, 260 aa, Zea mays
  Clone ID: MRT4577_127136C.1.pep
MSPLVAPATPRTPGAPASDASPLPTITLTAPPSNKRRRRGGAARSSLRAIRAVRALFRSLPILAPACRFPGVIPRHGGGGGGPRGHGGHIGGACRTTGTLFGHRRARVTLAVQETPGSVPVLLLELAMQTGRFMQEMGAEHLRVALECEKKPPPGAGRTRLLHEPLWTAYVNGRKIGYAVRREPTEDDLTVLQLLRTVSAGAGVLPADAVGAPEGQDAGDLAYMRAHFDRVVGSRDSESFYMLNPDGNHGPELSIFFIRI

SEQ ID NO: 214406 - protein, 111 aa, Zea mays
  Clone ID: MRT4577_127138C.1.pep
RVQNLPPDLSSGSSTTLSLAVPALQSPGADAEGRWLSTCLRAAMPRGLPRRPLGGGHPIGSLRGPCGRRRPPRVVLMQDAGGARGLRGIVGAADAYCGGRRQVYYSCEHIV

SEQ ID NO: 214407 - protein, 77 aa, Zea mays
  unsure (1)..(77): unsure at all Xaa locations
  Clone ID: MRT4577_127139C.1.pep
MQENRARKDVYNSEYYHFRAPXVQLRWMSPEAILEGDFSXTRSDVWAFGVLMWEVYTHGEMPHGGQADDEVLADLQA

SEQ ID NO: 214408 - protein, 263 aa, Zea mays
  unsure (1)..(263): unsure at all Xaa locations
  Clone ID: MRT4577_12713C.1.pep
MLSSTSRLRLQGVLADTLRGYGVHHHQQQHLDRLAAVRYMPRFLASMRVMRAPRMLWTSSLHAXFVHTGELLGXHEWATPKSELELMDVKDLTLAHVKSHLQMYRTVKSTDKSATTSSGGPPVDGGGDDDDLPSARRAQSSSSSPAGRRDGSSPQAFTRHRSAASSEGAASLAGGDDVECSSSADDSDCGRARSASSSRDQLLPPSAGSAGTLPSVGVSSSTTEDMEPAYRSVGLQQAPNHEMSCPPSLEFRLGRPIWNGAEH

SEQ ID NO: 214409 - protein, 71 aa, Zea mays
  Clone ID: MRT4577_127140C.1.pep
CQKKIVSCYIVRHMRSCKTWFFIRSYFHDEFCFISGSNLELRCNEVVGDGVGTIFDNNGHSKGEVERDYGV

SEQ ID NO: 214410 - protein, 125 aa, Zea mays
  Clone ID: MRT4577_127141C.1.pep
SQSGYRVRWHRPEKPDCGAYSLPAGPRASSFITRNYCSINNAWRIWTFRAISSQQQQRFLSPLRHLAVVIPVVCMPLQLLALVPLGLAKVVASQQLSSAATRLCLRSSHLAYGVPLPSACTGFLL

SEQ ID NO: 214411 - protein, 288 aa, Zea mays
  Clone ID: MRT4577_127142C.1.pep
MNRGRETGGNLRESGLFSGCDGDGGAGMDRKRIKDVLEKHLERSSPSTSRGVVSKERERLAAGKLPASLGKAEKVSDGEEFETDSEDEDSDISGSESEGTSWISWFCTLRGNEFFCEIDDDYIQDDFNLCGLSMQVPYYDYALDLILDIESSDDTYTEERKEFIELSAEILYGLIHARYILTSKGLAAMLEKFKNRDFGGCPRVYCCGQPCLPAGQSDVPRSSTVKIYCPKCEELNYPISMYQGSIDGSYFGTTFPHLFLMTYPHLKPQKPPQQYTPRVFGFKHHKPS

SEQ ID NO: 214412 - protein, 59 aa, Zea mays
  Clone ID: MRT4577_127143C.1.pep
LLGRRVHSPAAALSLGVFFWGVRGNAPQDERMTSQFFHPTQSVTRAQMLHKNKKKKSRT

SEQ ID NO: 214413 - protein, 306 aa, Zea mays
  unsure (1)..(306): unsure at all Xaa locations
  Clone ID: MRT4577_127144C.1.pep
MNRGRETGGNLRESGLFSGCDGDGGAGMDRKRIKDVLEKHLERSSPSTSRGVVSKERERLAAGKLPASLGKAEKVSDGEEFETDSEDEDSDISGSESEGTSWISWFCTLRGNEFFCEIDDDYIQDDFNLCGLSMQVPYYDYALDLILDIESSDXRLLFLKEVDAYWFAFEXDTYTEERKEFIELSAEILYGLIHARYILTSKGLAAMLEKFKNRDFGGCPRVYCCGQPCLPAGQSDVPRSSTVKIYCPKYEELNYPISMYQGSIDGSYFGTTFPHLFLMTYPHLKPQKPPQQYTPRVFGFKHHKPS

SEQ ID NO: 214414 - protein, 85 aa, Zea mays
  Clone ID: MRT4577_127145C.1.pep
KSWEICFRGKKGKKKKKKKKKKKKKKKKKKKKKKKKKKKKKKKKKKKKKKGRPPTRDLVTPEINPGPYPAGLQFSPIGSLIKPGR

SEQ ID NO: 214415 - protein, 87 aa, Zea mays
  Clone ID: MRT4577_127146C.1.pep
QPGFLEGDHGLNPKIFLHGTLPTTETGRTKSQIKPTEALRSTFNQGILTRKPLPPIRRGKGRHPPRRKTGCPPEPRTFHTGESGFPS

SEQ ID NO: 214416 - protein, 80 aa, Zea mays
  Clone ID: MRT4577_127147C.1.pep
CPCILLGFCYLTSMATRAIFFSAALFLAPAVILCPAGFSSSRSILSSARWRRAGAALCSGVLSSSSLPPARGHSGGGVGD

SEQ ID NO: 214417 - protein, 376 aa, Zea mays
  Clone ID: MRT4577_127148C.1.pep
MVQLLPALVALALLLVRPVADAAMAKYTFTVGSMQISQLCSSTSIIAVNGQLPGPSIEVNEGDDVAVKVVNNSPYNVTIHWHGVLQLMTPWADGPSMVTQCPIQPSSSYTYRFSVPGQEGTLWWHAHSSFLRATVYGAFIIRPRRGNAYPFPAPDKEVPIVLGEWWNRNVVDVESDAILAGQLPAQSDAFTVNGKTGLLYQCANETFTAVVEPSTRVLLRVVNAGLNSHLFFKLAGHNFTVVAVDAGYTSNLNTDTLVLAPGQTVDALVTTAAAPGSYYMAVLAHDTMSPLAFAASDTTTATAILQYNGTSSTNPPAMPAMPSSSDSGTANAFYFGLRGLGAPAVPAPVDVSMTIELGLGQLPCDPSQTRCNGTAA

SEQ ID NO: 214418 - protein, 83 aa, Zea mays
  Clone ID: MRT4577_127149C.1.pep
GRGGKRHQLFNPWAGVNPWVAPFRKKKQQLLPKNQFFLMNPALQQPMVGGPFFRLHMRCTRQWGPQTDMCFLEIINILIEIYP

SEQ ID NO: 214419 - protein, 203 aa, Zea mays
  unsure (1)..(203): unsure at all Xaa locations
  Clone ID: MRT4577_12714C.1.pep
MTGKKTTASSSRGTPKKAKIEDEEEAGLENEEEVTVTLSVEKDALECDICCLPFQSEVFMYKNGHSGCAKCCIRRDGKCWTCSERIGDMRCRPLEKLLAAATTSCVFKSNGCYDAVSYLERATHEETCQRAPXKCPIDGCAYSGLRLGHHVAQDHGRRDGLASIVFISGXGVGRPYARDEPFRVXLLQRTTDRVFLLLTVTIC

SEQ ID NO: 214420 - protein, 94 aa, Zea mays
  unsure (1)..(94): unsure at all Xaa locations
  Clone ID: MRT4577_127150C.1.pep
GEDPTAEAAMRRKDTQLTASSADLSGGDXKMVEDRQPPGDLHDGNGGQGVAHQLQGAARIRGRRRTIXAHKLALGVGQQHGLKRSPPTAPAGQE

SEQ ID NO: 214421 - protein, 87 aa, Zea mays
  unsure (1)..(87): unsure at all Xaa locations
  Clone ID: MRT4577_127151C.1.pep
MKNHHHEVSMENPCTDCQMMLVILDDQELPALYDRRISHEASGEALGEEFKGYVXKEPGGWDKQGVPMKHGGLTSXVLRLYLNRGDE

SEQ ID NO: 214422 - protein, 51 aa, Zea mays
  Clone ID: MRT4577_127152C.1.pep
PHIDGSSAVAGTAVAEDIVILNNACLSCTVCGDLLRMFGELVNINKGRSDS

SEQ ID NO: 214423 - protein, 192 aa, Zea mays
  unsure (1)..(192): unsure at all Xaa locations
  Clone ID: MRT4577_127153C.1.pep
MAPAPVAAPVASVSRAAAALAPAGAVRSARVASLHPXPLFQSARQRRRLAARSSTSESSTDDSQSPKQEKAPFGYTRKDVLLIGLGVTAFGVGLKYGLELLGVDPLQAGNVVQLLVVLGMTVGWISTYMFRVANKDMTYAHQLRDYEKQVMEKRLESLSEAELQALLEQVEEEKQRVPQVPEEPNAITFRKK

SEQ ID NO: 214424 - protein, 73 aa, Zea mays
  Clone ID: MRT4577_127154C.1.pep
SIDKGQTLNLLACVLIELPSYSLSEERERTVQIMGFRSLGGGGEQMNNEKSNNPNEKKTGGVLTHPTQLGEGK

SEQ ID NO: 214425 - protein, 214 aa, Zea mays
  unsure (1)..(214): unsure at all Xaa locations
  Clone ID: MRT4577_127155C.1.pep
MAPAPVAAPVASVSRPAAALAPAGAVRSARVASLHPLHSSTKIVLLPPRTGLLRSARQRRRLAARSSTSESSTDDSQSPKQEKAPFGYTRKDVLLIGLGVTAFGVGLKYGLELVXAGKRYAQLLGVDPLQAGNVVQLLVVLGMTVGWISTYMFRVANKDMTYAHQLRDYEKQVMEKRLESLSGAELQALLEQVXEDKQRAASGPGEANAITFRK

SEQ ID NO: 214426 - protein, 205 aa, Zea mays
  Clone ID: MRT4577_127156C.1.pep
MAPAPVAAPVASVSRPAAALAPAGAVRSARVASLHPLHSSTKIVLLPPRTGLLRSARQRRRLAARSSTSESSTDDSQSPKQEKAPFGYTRKDVLLIGLGVTAFGVGLKYGLELLGVDPLQAGNVVQLLVVLGMTVGWISTYMFRVANKDMTYAHQLRDYEKQVMEKRLESLSEAELQALLEQVEEEKQRVPQVPEEPNAITFRKK

SEQ ID NO: 214427 - protein, 166 aa, Zea mays
  unsure (1)..(166): unsure at all Xaa locations
  Clone ID: MRT4577_127157C.1.pep
AKIVLLPPRTGLLRSARQRRRLAARSSTSESSTDDSQSPKQEKAPFGYTRKDVLLIGLGVTAFGVGLKYGLELLGVDPLQAGNVVQLLVVLGXMTVGWISTYMFRVANKDMTYAHQLRDYEKQVMEKRLESLSEAELQALLEQVEEEKQRMPPVPEEPNAITFKKK

SEQ ID NO: 214428 - protein, 52 aa, Zea mays
  unsure (1)..(52): unsure at all Xaa locations
  Clone ID: MRT4577_127158C.1.pep
PQPRPQAPSGVVLQPFLQQQPESELAALMAPQXNQQLAAMCGLQLQQPGPCP

SEQ ID NO: 214429 - protein, 110 aa, Zea mays
  Clone ID: MRT4577_127159C.1.pep
AKIVLLPPRTGLLRSARQRRRLAARSSTSESSTDDSQSPKQEKAPFGYTRKDVLLIGLGVTAFGVGLKYGLEVRCRCRRRVCPCSLQKFRSFFICSWFTRRETLRAAPGS

SEQ ID NO: 214430 - protein, 147 aa, Zea mays
  unsure (1)..(147): unsure at all Xaa locations
  Clone ID: MRT4577_12715C.1.pep
PRIRKSIWFLPFDQSLESNDATDRAKIFFHGWIMRPLTEGVYSDIMREDVGDRLPDFTETYAALVHGSYYLLGLXYYVTHYAHXNHTIVPSDVYTALMDSRITLTSNYVSGHSPGPPFIAPSYXFPKSIYYVMDYFRITYGDPLIYV

SEQ ID NO: 214431 - protein, 88 aa, Zea mays
  Clone ID: MRT4577_127160C.1.pep
LGRGRPLSSQSSLIMDAWIRVHFHRIFHLELLAIGAFEGYHLILALDGASIRSDDGRQSALTPPRSSREAQRAVALSYNHGSSSLIDA

SEQ ID NO: 214432 - protein, 220 aa, Zea mays
  unsure (1)..(220): unsure at all Xaa locations
  Clone ID: MRT4577_127161C.1.pep
MAPAPVAAPVASVSRPAAALAPAGAVRSARVASLHPLHSSTKIVLLPPRTGLLRSARQRRRLAARSSTSESSTDDSQSPKQEKAPFGYTRKDVLLIGLGVTAFGVGLKYGLEXGAGAAAVSVHVHCKSFARFSSAAGLLAGKRYAQLLGVDPLEAGNVVQLLVVLGXRGGWISTYMLRVANNDMTYAHQLRDYQKQVMEKRLESLSDAELQALLEQVEDE

SEQ ID NO: 214433 - protein, 112 aa, Zea mays
  Clone ID: MRT4577_127162C.1.pep
MVFALLVIPESPRWLVMQGRADEARAVLLRVTDTEDEAKERLAEIEAAAVVATTGAAGKHGDRNRTVWQELSRPSPEIARMLVTGVGIQCFQQITGIDALVYYSPTIFRDAG

SEQ ID NO: 214434 - protein, 95 aa, Zea mays
  Clone ID: MRT4577_127163C.1.pep
SRRWRFTSGTRTSVSRLWTSCIMGCITVYHTSVSHRHSVQAVAAHGVSELLHPGVPLAPAPRSGIDDMARSNGALTIAVMKVMSYLVGRTARRDG

SEQ ID NO: 214435 - protein, 62 aa, Zea mays
  Clone ID: MRT4577_127164C.1.pep
TYPKMRGIYLFINFIWCCIIFFSFLFFLFSFQFQDLRIQTPILNFKFPNIKIPTNVNMYSIV

SEQ ID NO: 214436 - protein, 91 aa, Zea mays
  Clone ID: MRT4577_127165C.1.pep
RSTGHNMSRPRDPTTTTTNGGTLNQGITRGGKNHFFIMGPPDDPHLARTFLLQQQLHAVDGHPAIQTSYLHYGSIEQLILGHPTGGLMGPP

SEQ ID NO: 214437 - protein, 61 aa, Zea mays
  Clone ID: MRT4577_127166C.1.pep
EKEMISNHMLLLVHMENSGRANMLVDDQFKDSGRMYSLFRRVPDRLSTIRDAMTCYLWATS

SEQ ID NO: 214438 - protein, 200 aa, Zea mays
  unsure (1)..(200): unsure at all Xaa locations
  Clone ID: MRT4577_127167C.1.pep
MNPPHPEPGLPRRHHHMVHLHLDPRHHHHVHIHLRCCHHHHHGTHLLAPAPAXPPPRQPAAAPGSRTLPLHPXPNPSAAPGQPEPPRAAVREDVEDLDPEPGLLHAEEEEEEDEEPVFVLTDEWAEFFAKSEAKRRLGNRSPLAGHASLSGAMLLFFLSLRTYKLKRVDFLASQWNRVERQLNSRRRRAGSDLMGLGHHQ

SEQ ID NO: 214439 - protein, 145 aa, Zea mays
  unsure (1)..(145): unsure at all Xaa locations
  Clone ID: MRT4577_127168C.1.pep
MNPPHPEPGLPRRHHHMVHLHLDPRHHHHVHIHLRCCHHHHHGTHLLAPAPXPAXRQPAAXHRLPYSSPTPXNPSAAPGQPEPPRAAVREDVEDLDPEPGLLHAEEEEEEDEEPVFVLTDEWAEFFAKSEAKRRLAKQQKKKSRK

SEQ ID NO: 214440 - protein, 91 aa, Zea mays
  Clone ID: MRT4577_127169C.1.pep
PRVRKGARLCSRLKQDHVSNQFTSDQPDVHKCISRVSTDTLLVSCIASNLFQACRFTIAHIVEPGAILSMVLNHPHVSYVNGISFFLNRFP

SEQ ID NO: 214441 - protein, 107 aa, Zea mays
  unsure (1)..(107): unsure at all Xaa locations
  Clone ID: MRT4577_12716C.1.pep
VEVFMKRKPNPRGANYFFFDPRALKSKKGGQFKGPFKKTIGFKIGGGKTLEYRSFMDLAKIFHPLFFKHFIKGATXIFPGGGFFNQLSKLGQKKGLGLGGGNTPPPP

SEQ ID NO: 214442 - protein, 89 aa, Zea mays
  unsure (1)..(89): unsure at all Xaa locations
  Clone ID: MRT4577_127170C.1.pep
TAGTKAATVPVSISKHAFLQPFSXIVAAIRASFLTQHQLLPFYXQQFTANPATLLQVQQLLPFDQRALTXPAASTPHHIFDGALFYIAY

SEQ ID NO: 214443 - protein, 54 aa, Zea mays
  unsure (1)..(54): unsure at all Xaa locations
  Clone ID: MRT4577_127171C.1.pep
SSNSLDHCHSFIYVNHALSPYRFCRGQQXXXPFILISYIIKQGCTLTSNCYSHL

SEQ ID NO: 214444 - protein, 106 aa, Zea mays
  Clone ID: MRT4577_127172C.1.pep
YRLTFSMNTRMSRDARSYSPPPDRCRMATAKRSIRHESPSHHKSQGRRNSTKYTIRRFNSVTMTTTNSMTSSDTRPVRLEINVICDISRIMDQLNAARYNCLRRIF

SEQ ID NO: 214445 - protein, 120 aa, Zea mays
  Clone ID: MRT4577_127173C.1.pep
MTAASRHKTMPEVVKNEFAIKVRDNQNDELNKKVTKVKAKAVYKDLLNSKTRTKAKPDVASDELIAKVIDHHRRGELRLLTVSDLKCFLGAKKAKVGGTKEVLIQRVTELLLDKCIAISN

SEQ ID NO: 214446 - protein, 94 aa, Zea mays
  Clone ID: MRT4577_127174C.1.pep
SREPMALIPGLIATSQEEQRNRDQSSGSRVSVRTCCVLGNKIVQCWLHFAIHGLLTLFLGSGRPVHVTHPLWAQSWYERFCRPCHGWVGLECKK

SEQ ID NO: 214447 - protein, 93 aa, Zea mays
  Clone ID: MRT4577_127175C.1.pep
GKKRHHEENDEQYDLKRANTRDQRVHLEKSSGSGRLDSLIERARPDRSCSPSKIHSRSSPSTSSYHDKDQNGNGSKVVNHGKREMPYDERNSR

SEQ ID NO: 214448 - protein, 47 aa, Zea mays
  Clone ID: MRT4577_127176C.1.pep
SVYRRRVSSRSRSVAQSVTFCPKLIACQSWRPFNLHTEPLLVRSPKR

SEQ ID NO: 214449 - protein, 162 aa, Zea mays
  Clone ID: MRT4577_127177C.1.pep
RHTFFAAVAVIPILGDTTSRYQIKDSDLRIERFRSGGPGGQHANTTESAIRIVHIPTGISATSQNERSQHMNKASAMAVLQSRLDQLEIARQAQMNAEHTQSLNEISWGNQIRSYVLHPYRMVKDLRTNYEVSDPDSVLEGDLDDFILNYLSSSLDEADVST

SEQ ID NO: 214450 - protein, 123 aa, Zea mays
  unsure (1)..(123): unsure at all Xaa locations
  Clone ID: MRT4577_127178C.1.pep
KWYPFQQFSTNDHQGAGLILPALSQSIANATLFPLCSQAPISSILPPYLTSMIASLXENPIIKPYRLQQAIVTSNIPLSPLNQQVPTLSFVHTLVQTIKAHQLLQLVLPVINQITLVNLSTYS

SEQ ID NO: 214451 - protein, 49 aa, Zea mays
  unsure (1)..(49): unsure at all Xaa locations
  Clone ID: MRT4577_127179C.1.pep
RENIIYKKKKKKKKKKKKKKKKKKKKKKKKKKKKKKKKKKKKKKKKKXK

SEQ ID NO: 214452 - protein, 48 aa, Zea mays
  Clone ID: MRT4577_12717C.1.pep
PACGHFPIGLPPYLQQTTISDHTNQTILSMNTCLVKSFLKIEQKPCSP

SEQ ID NO: 214453 - protein, 138 aa, Zea mays
  unsure (1)..(138): unsure at all Xaa locations
  Clone ID: MRT4577_127180C.1.pep
YFEHSKTHQAKRSIINLTTEGTKILCLLALLALFGSATNADIIPQCSLAHSSIITQILPPDTSLVLEHPDGQAYKIQQAIEASVLQQPIDXLQQQCLTHVTLQTMLTQQKQQLLPXLIQLAXVNPVNYLQQQMVAYNR

SEQ ID NO: 214454 - protein, 123 aa, Zea mays
  unsure (1)..(123): unsure at all Xaa locations
  Clone ID: MRT4577_127181C.1.pep
LPFFPHTSYQGRVEWEKTRWVTLQRPTGNKTGVLPLSRLVLQQXVEGMAKNTFGTLGAATHDRRTQAATGAKVPGLRHTETARASIVTAGGECLTFEQLALRAPLGENTVLLRGLKNAREVAR

SEQ ID NO: 214455 - protein, 432 aa, Zea mays
  unsure (1)..(432): unsure at all Xaa locations
  Clone ID: MRT4577_127182C.1.pep
MDPRRAPPRGGGANGLSYSTLFNLEPLLNFRVPVPEDLARYENSSSNGSPSSEGQGSLLDQYNGVNDASHGLHRKRKRHLDGASDDDEADAYSNKITEEQYRAMLSEHVQKYRRSKFKEGAFSSDPPRVATPQLKHKNGGKKNMKRISDFSDDVALDGIEASHEYNGIECIKTHGGFNKLVATLDSTYLDMGDSXRYLVPEGYDKLASSLNLPVSSDIRVEEHFLKGMLDLRTLAAMLGTDQRFEASNRGGISEPLPQFESLKERVKVQEFSLQVTKDPFAIPEGSAGRIRRYIISEAGDLQVHYVRVMEKGDTYEIIERSLPKKQIVKKEPSVIMKEESEKTYKLWQSLATKSIPKHHKNFTALIKKRQVDAKRFSDSCQREVKLKVSRSLKLMRCAAVRTRKFVKDMQMFWKRVDKEQYELRKKKKKKAA

SEQ ID NO: 214456 - protein, 175 aa, Zea mays
  unsure (1)..(175): unsure at all Xaa locations
  Clone ID: MRT4577_127183C.1.pep
PXTFLHHQQPPPQPKKLKLGAGPPQQPIVVMDDDLLTARPNKTSSPPAHWELLSWLQHQHHHQQQHLSATTLTTMYLLFSTTTTTTTSSSTSPTAGCWKTWCRCWSGGPAPPPPPPPPVARRRTFPPRPLSHGTPPRLTSTWPFSPTFSSACMHASVFNYHAHAPIVMFVLCADI

SEQ ID NO: 214457 - protein, 87 aa, Zea mays
  Clone ID: MRT4577_127184C.1.pep
RTRGRTFLCIFTPWKIQNRKSPTEQLKSVELTRLVPCLLAAWQILEVSCRSSGKVRRLAEVTTVRYALYAMNRKLGPGAPPALHVEG

SEQ ID NO: 214458 - protein, 70 aa, Zea mays
  Clone ID: MRT4577_127185C.1.pep
IRHKGGDLFIFYALTMIQRGQPTMQYQSPLKAHDSAETRVSSQHPMKKERDQLTEHIKQHLCITKAPTIT

SEQ ID NO: 214459 - protein, 172 aa, Zea mays
  Clone ID: MRT4577_127186C.1.pep
MEKALTKLGSFTISRKAKQELSAIGDDISRFSSTVEEKAKWVFEKLKGHKKSLSDLLREHNLPPGLFPHNIICYEYDESTSKLMVHLSKPCEVSFKDSSAIRYAPRVKATLSRGKLSGVEGMKTKVVVWVKVASVSIDSYKSDKICFLAGVKKLRQKDAYEVPREAVSVDEF

SEQ ID NO: 214460 - protein, 40 aa, Zea mays
  Clone ID: MRT4577_127187C.1.pep
LLQHLVQEIIRLLAHRWYSNSLRPLGYSAARLRGAPPLPH

SEQ ID NO: 214461 - protein, 172 aa, Zea mays
  Clone ID: MRT4577_127188C.1.pep
MEKALTKLGSFTISRKAKQELSAIGDDISRFSSTVEEKAKWVFEKLKGHKKSLPDLLREHNLPPGLFPRNIICYEYDESTSKLVVHLSKPCEVSFKDSSTVRYAPRVKATLSRGKLSGVEGMKTKVVVWVKVASVSIESYKSDKICFIAGVKKLRPKDAYEVPREAISVEEF

SEQ ID NO: 214462 - protein, 387 aa, Zea mays
  Clone ID: MRT4577_127189C.1.pep
MGGAAAAVLAVAAARRKSGPFVSLFSRAARRLHDAVETAAAEEDMAGTRSPRRRRRSSSSLLLGPEFPDTWDPSSRDTTPQSPPRCAQADYDRTASIIDGKSIAEDMRLHIAEEVCQMKCSVGHVPGLAVVLVGDRRDSESYVRYKTKGCEEVGIKSLLAKLPGNCSEDEVMDSVSRFNEDPSVHGILVQLPLPEFMDEEKILSIISLNKDVDGFHPLNVGNLALRSRNPLFVPCAAKACIELLLQSGIELMGKHVSVIGRSKVVGLPTSLLLQRHHATVSVIHAFTTNPEAITRESDIVISAAGVANLVRGSWLKQGAVVIDVGTNPIEDPTSDYGYRLTGDVCFEEAVNVASAITPVPGGVGPVTIAMLLGNTLDSAKRVYGLSD

SEQ ID NO: 214463 - protein, 96 aa, Zea mays
  Clone ID: MRT4577_12718C.1.pep
SRASSRPQRARGAPGQPFPGNGGAIMASRPRSPEPLVFVLLINYLSLLGAVGLISARHRGCRRRARANLRWPQVLRWLLHFTRECWKGRNASQPGR

SEQ ID NO: 214464 - protein, 186 aa, Zea mays
  Clone ID: MRT4577_127190C.1.pep
MASFGSIAVALVVCAMLLQTCVATRRLQALVQEQPITMKYHKGALLSGRIAINLVWYGNFSAPQRAIVTDFVSSLASASASPAPQPEPSVATWFKTAQKYYASSKARFPALALGSHVFDRSYSLGRRLRERDLVRLAARGGPSRAINVVLTADDVAVDGFCMSRCGSHGASPRSRAGRADVGGGHP

SEQ ID NO: 214465 - protein, 107 aa, Zea mays
  unsure (1)..(107): unsure at all Xaa locations
  Clone ID: MRT4577_127191C.1.pep
WLNGFSRPPFGWRPFLQFPRFFSQPWAPKNGPSFFPALGHSIIFRIGLAPPLVLVFFPGTCCQFQSPFFPPSILFFVCNFPPNFWVAFLLTEKKTKKKPNKKXXXXG

SEQ ID NO: 214466 - protein, 82 aa, Zea mays
  Clone ID: MRT4577_127192C.1.pep
GPVSWLQKNINIFIYVFAGPPPCAILIIFALAPRPSWAALPRRDSSVNLHPATAGRTGLCSPLFPNWLVLLARWGPPVAPPV

SEQ ID NO: 214467 - protein, 130 aa, Zea mays
  Clone ID: MRT4577_127193C.1.pep
MPSSRRTTGRGGAGGGSAGAGDAGGGDGDRVPPFMGNNRDHNPWELRSWARRTGFHPSAFFSGESNSSFASSAAPQAPPSPPSPPVSSRRPPPAREREPEPDTEDDLVPAPPLELERGGPAPVRGRGGRP

SEQ ID NO: 214468 - protein, 100 aa, Zea mays
  Clone ID: MRT4577_127194C.1.pep
LRPPSPRTRSSNVLLSSEELGCLAGRAALHLWCACPEAPSHKAAAPLSRRRRTHGPSSHGSPKGESQDSPMLGGRDPLAPFLVAYLKRAARLRCGEQLHA

SEQ ID NO: 214469 - protein, 346 aa, Zea mays
  Clone ID: MRT4577_127195C.1.pep
VKVLPFLKPIIERNSLKSVIQGFLPGIILKIFLILLPTILMAMSKIEGHTSLSGLDRKTATKYYIFLFVNVFLGSVITGTAFQQLDNFIHQSANKIPEVVGESIPMKAAFFMTYIMVDGWSGIAAEVLRLKALVIFHIKNAFLVRTEHDREQAMDPGSLDFYNCEPRLQLYFLLGLVYAVVTPMLLPFIIVFFSLAYLVFRHQIIKVYTQHYESGAQFWPDVHMRLIIALIVSQILLLGLLSTQEAEKSTVALLPLPVLSIWFHYVCKGRFEPAFVKFPLQDAMVKDTLERAHDPTLNLREYLKGAYVHPVFQKNDIYKVIAVDEEEKNPMVVTKRQSRMNAPAGS

SEQ ID NO: 214470 - protein, 64 aa, Zea mays
  Clone ID: MRT4577_127196C.1.pep
YVVLPPVLICCPAWAFHTMFALSDEVLYGKSESISLGLKKKKKKKKTKKKKKKKKKSTLRCYHC

SEQ ID NO: 214471 - protein, 102 aa, Zea mays
  Clone ID: MRT4577_127197C.1.pep
MRGPPLAVFPVILRRRLLLSSPLASSSRARRIFSRAMDSSTTAAAAQHAGGAAAGEYEEVLGRLSSLITQKVRAHTGNRANHLRPSGSLPPDSAAGRPHRAD

SEQ ID NO: 214472 - protein, 66 aa, Zea mays
  Clone ID: MRT4577_127198C.1.pep
YLGSILSQPIIVIPSDLSSNDCSTLFSLIQQDLISTIGESAALGAAGMVVWGDMNLTSSAENCTKV

SEQ ID NO: 214473 - protein, 170 aa, Zea mays
  Clone ID: MRT4577_127199C.1.pep
MDAADVWGRSSSSSSSSAAAARRLQARYDLYMGIDDADAGLDEVTEPRGGAESYNCPFCGEDFDFVGLCCHIDDEHAVEAKSGACPICATRVGMDLIGHLTMQHGSYFKMQRRRRVRKVSSGSHSLLSLLRKDLRNGSLQSFLGGSSYVSNPPAAAPDPFVSSNLITASQ

SEQ ID NO: 214474 - protein, 72 aa, Zea mays
  Clone ID: MRT4577_12719C.1.pep
MAQCKTIVAAVLVVALVVSTIPASADTNLEPAGGSTEGSARTSGMQKEETRGNKKPATLAGSLGSGKNAIYG

SEQ ID NO: 214475 - protein, 233 aa, Zea mays
  unsure (1)..(233): unsure at all Xaa locations
  Clone ID: MRT4577_1271C.1.pep
ARHRWRPRCSSSAAPTARCSSLRRGTIVRPPPKPSRWRCGCPRAPSRGCSSTGPSTAWPRPPVSPGSPSPAGTPTSSAVSTKTASSRRPPXSRPRTPPPRRPPWRASPSPXGTGASGVAAPATATRADXPSVPGXPTRSPPQGCRPRXEPSPAPTAPXLSMPPILPSPHALGLPPPCRPLLVLNPLVSGAPSVPVDARWLKTRSPLATTASSRLPRLPSLALRSACLPLLLRP

SEQ ID NO: 214476 - protein, 152 aa, Zea mays
  Clone ID: MRT4577_127200C.1.pep
MDAADVWGRSSSSSSSSAAAARRLQARYDLYMGIDDADAGLDEVTEPRGGAESYNCPFCGEDFDFVGLCCHIDDEHAVEAKSGACPICATRVGMDLIGHLTMQHGSYFKMQRRRRVRKVSSGSHSLLSLLRKDLRNGSLQSFLGGSSYMKSL

SEQ ID NO: 214477 - protein, 32 aa, Zea mays
  Clone ID: MRT4577_127201C.1.pep
GRVGCSWDHSIPASGCSGLCSSLCVVNSKIFD

SEQ ID NO: 214478 - protein, 233 aa, Zea mays
  Clone ID: MRT4577_127202C.1.pep
MDAADVWGRSSSSSSSSAAAARRLQARYDLYMGIDDADAGLDEVTEPRGGAESYNCPFCGEDFDFVGLCCHIDDEHAVEAKSGACPICATRVGMDLIGHLTMQHGSYFKMQRRRRVRKVSSGSHSLLSLLRKDLRNGSLQSFLGGSSYVSNPPAAAPDPFVSSLICTLPVAEPSKDLHSDSSDNNFLLNKFPDEKPVERAEPSLSEKDQKERVQRSKFVRGLVLSTIFDDDNL

SEQ ID NO: 214479 - protein, 597 aa, Zea mays
  Clone ID: MRT4577_127203C.1.pep
MRTVRPWSWTVRVSSIIPFAQLVTFGLFGSAPTGRGQGKKRKTAASATTVVPKGKKVKVLTRQPRYIEPTVVPKFDEGASSTAEARQAVPIVQSVEEPAVVLKVPIVGPAEAKNDKAEGPHVEKIEKMPEILSPPTEAKLPKVQKTPATTPKRRRMTNVLDAVLETTKALSPGPTKKNTEAAKIQEEAEVGPSAPVETKTVVPEDKVDQQTADIGMAARQDTAKKAKPSVPEDLVEDIDYIFRHASGKKLSEEEIMEVRHYAQKLKYSKGALVFNDSNEDDFLYCLLDNKEISIYREIAKSMRFPKLEEGCSVLSKDDLADSLAYNSIKGLILRNALRAQKSAEDEGCTIALNNLRSEVIELRNEGIEKDKVLISLVNKIKEDEAQYKAQAETQKAEVEDLRRQLAEANERCALAHANQEISEYWKNKLEKNVEELRESKERCFKNSLDCVKKLKTSFAKVGAYSAEENFIRGDPEGVVEWISGEVEAFEEILSDREDICAFSGARGISAILEKAGCDHVKAIAQAEAAFSIDDTKDPSAEATLMGGKFYNDVWVNGGQELAHEIIKKSEKDTHDARAEAKRAEEAAERERRIGIVF

SEQ ID NO: 214480 - protein, 765 aa, Zea mays
  Clone ID: MRT4577_127204C.1.pep
MDQTSFMSGASAKREIGTGEKPATSHGKAPSGESANKVKGSPSHNKSRRSGDKKKKMKKVVYYETDSSSPSTSGSDTPSVTSKRHERKKFSEDPQAMYNRLKTLVNQVRNLGSAKWDDHEMVKVILRSLVFLNPTQVQLIRGDPRYTLMSPEEVIGKFVSFELMIKGSKKIIEQGDSSTPEAQTVAFKATEEKKEDSTPSRIPIDASKLDNEEMALIIKSFRQILKQRKGKDYKPRSKKVCYKCGKLGHFIAKCPLSSDSDRGDDKKGKRREKKRYYKKKGGDAHVCREWDSDESSIDSSSDEDAANIAVTKGLLFPNVGHKCLMAKDGKRKKVKSKSSTKYASSSDEDNSSDEEDNLRTLFANLNMQQKEKLNELISAIHEKDELLDSQEDFLIKENKKHVKVKNAYALEVEKCEKLSSELSTCHDIIANLRNENAKLIAKVDSNVKDDSNSNLRDDNVSLLAKIEELNVSLASLKNENEKLIAKANDLDVCNVTISNLRSENDILHAKIVELKSCKPSTSTVEHVSICTRCRDINVDAIHVHLALIKKQNDHIAQLNAKINEHDLENEKFKFARSMLYNGRHPGIKDGIGFQKGDNVKLNAPPKRLSNFVKVKAPMPQDNEGYILYPVGYPEHKIRRIHSRKSHSGPNHAFMYKGETSSSRQSTRAKLPKKKTPIASNDSNISFKTFDASYVLTNKSGKVYASGGSSWIIDSGCTNHMTGEKKMFSSYEKNQDPQRAITFRDGNQDIGFTVFRRSDDSIAFKG

SEQ ID NO: 214481 - protein, 96 aa, Zea mays
  Clone ID: MRT4577_127205C.1.pep
MTTPKKKPEAAQPAPPKKKHEANRDRDKMLKLNAMQQPALAFAAAAAAAAAATSVPLPTPSSREEKKPVVKQEAQGSAPPPRDDQDRPPLFGTLQS

SEQ ID NO: 214482 - protein, 1539 aa, Zea mays
  Clone ID: MRT4577_127206C.1.pep
MSGEHAKREMEIGNKPIGDKPTTSHEKASSEESRKKGKGKEKKASSHKSHQSGNKKKKMRKVVYYETDTSSPSTSGSDAPSVISKRHERKKFSKIPLRYPRIPKHTPLLSVPLGKPLTFDGEDYARWSDLMRFHLTSLHKSIWDVVEFGVQVPSVGDEDYDEDEVAQIEHFNSQATTILLASLSREEYNKVQGLKSAKEVWDVLKTAHEGDELTKITKRETIKGELVRNLGSKKWDDHEMVKVILRSLIFLNPTQVQLIRGNPRYTLMTPEEVIGNFVSFEYMIKGSKKINELDDPSTSEAQPVAFKATKEKKEESTPSRQPIDASKLDNEEMAFVIKSFRQILKQRRRKDYKPRSKKVCYKCGKPSHFIAKCPISSDSDRGDDKKGRRKEKKKYYKKKGGDAHVCREWDSDESSSDSSSDEDAANIAINKGLLFPNVGHKCLMAKDGKKKKVKSKSSTRYESSSDDNASDEEDNLRTLFANLNMQQKEKLNGLISAIHEKDDLLDSQEDFLIKENKKHVKVKNAYALEVEKCEKLSSELSICHKTIDNLRNENANLLAKVDSNVCDVSIPNPRSDNDDLLAKIEELNISLASLRDENEKLLAKAKDFDVCNATISDLRSKNDILHAKVVELKSCKPSTSTVEHTSICTRCRDVDINAIHDHMDLIKQQNDHIAKLDAKIAEHELENENFKFARSMLYSGRRPGIKDGIGFQQGGNVKLNAPPKKLSNFVKGKAPMPQDNEGYILYPVGYPESKIRRIHSRKSHSGPNHAFMYKGETSSSRQPTRAKLPKKKTPSASNDHDISFKTFDASYVLTNKFGKVYASGGSSWIIDSGCTNHMTGEKKMFSSYEKNQDPQRAITFGDGNQGVTVFRRSDDSIAFKGVLEGQLYLVDFDRAELDTCLIAKTNMGWLWHHRLAHVGMKNLHKLLKGEHILGLTNVHFEKDRICSACQAGKQVGAHHPHKNIMTTDRPLELLHMDLFGPIAYISIGGSKYCLVIVDDYSRFTWVFFLQEKSHTQETLKGFLRRAQNEFGLRIKKIRSDNETEFKNSQIEGFLEEEGIKHEFSSPYTPQQNGVVERKNRTLLDMERTMLDEYKTSDQFWAEAVNTACYAINRVFGSKCFILIKRGRKSKFAPKTVEGFLLGYDSNTRAYRVFNKSSGQVEVSCDVVFDETNDSQVEQVDLDEIGEEEAPCIALRNMSIGDVCPKEPEEPPSAQDQPSSSTQASPPTQNEDEAQSDEGENQANEPPQDDDNDQGGDANDQDKEDEEPRPPHPRVHQAIQRDHPVDTILGDIHKGVTTRSRVAHFCEHYSFVSSIEPRRIEEALQDSDWVVAMQEELNNFTRNEVWHLVPRPNQNVVGTKWVFRNKQDEHGVVTRNKARLVAKGYSQVEGLDFSETYAPVARLESIRILLAYATYHGFKLYQMDVKSAFLNGPIKEEVYVEQPPGFEDSEYPNHVYKLSKALYGLKQAPRAWYECLRDFLITNGFKVGKADPTLFTKTLENDLFVCQIYVDDIIFGSTNESTCEEFSRIMTQKFEMSMMG

SEQ ID NO: 214483 - protein, 1346 aa, Zea mays
  unsure (1)..(1346): unsure at all Xaa locations
  Clone ID: MRT4577_127207C.1.pep
MSGASAKKEIGTGDKSASSGRTHSRESAHKHKEESSSSIKSQWKGDKKKKMKKVVYYETDSSSPSTSGKPLMLDGEDYSMWSDKMRHHLTSLHKSIWDIFEYGAQVQKEGDKDYDSEEVEQIQHFNSQATTILLASLSREEYNKVQGLKSAKEIWDVLKTTHEGDEVTKITKRETIEGELGRFMLHQGEEPQAMYNRLKTLMNQVHNLGSTKWDDHEMIKVILRSLVFLNPTQVQLIRGDPRYKLMSPEEVIGKFVSFELMIKGSKKIIEQGATSTPEVQPVAFKATEEEKKDSTPSRIPIDASKLDNEEMTLIIKSFRQILKQRRGKDYKPSSKKVCYKCGKPGHFIAKCPLSSDCDRGDDKKGKRREKKRYYKKKGGDTHVCREWDSDESSIDFSSDEDATNIAVTKGLLFPNVGHNQEDFLIKENKKHVKVKNAYALEVEKCEKLTSELSTCHDTNSNLRIENANLIAKVEKSNICDDSIVNLRNDNASSIAKIEKLNASLASLRNENEKLIAKAKDLDVCNVSISNLRDENTILHAKIVELKTCKPSTSTIEHVTICTRCRDINVDAIHDHLALIKKQNDHIAQLSAKINEHDLENEKIKFARSMLIVGDALALRMALAFNRETMSSLMPLLKDCLILLRARLPCLRITRVTFYTLPVIPSTKLGEFTLESLTLALIMLLCIREKSQTQETLKEFLRQAQNEFGLRIKKIRSDNGTEFKNSQIEGFLEEEGIKHEFSSPYTPQQNGVVERKNRTLLDMERTMLDEYKTSDRFWAEAVNTACYAINRVFGSKCFILVKRGRKTKFAPKVVEGFLLGYDSNTRAYRVFNKSTGLVEVSCDIVFDETNGSQVEQVDLDELDDEEAPCVALRNMSIGDVCPKESEEPPHAQDQPSSSMQASPPTQDEDGSQDDEGEDQEDEPPQEDDNDQXGDANDQDKEDEQDPRPPHPRVHQAIQQDHPXVEEALQDLDWVLAMQEDLNNFTRNEVWHLVPRPNQNVIETKWVFHNKQDEHGVVTRNKARLVAKGYSQVEGLDFGETYAPIARLESICILLAYATYHGFKLYQMDVKSAFLNGPIKEEVYVGQPPGFEDSEYPNHVYKLSKVLYGLKQAPRAWYECLRDFLITNSFKVGKADPTLFTKTIENDLFVCQIYVDDIIFGSTNKSICEEFSRIMTQKFEMSMMGELKYFLGFQVKQLQEGTFISQTKYIQDILTKFGMKDAKPIKTPMGTNGHLDLDTGACKIDRKSTSGTCQLLGRSLVSWASKKQNSVALSTAEAEYIAAGHCCAQLLWIRQTHRDYGYKLTKVPLLCDNESAIRMADNPVEHSRTKHIVIRYHFLRDHQQRGIS

SEQ ID NO: 214484 - protein, 596 aa, Zea mays
  unsure (1)..(596): unsure at all Xaa locations
  Clone ID: MRT4577_127208C.1.pep
MARTMLDEYKTADQFWVEAINTACYSINRLYLHRILKKTSYEFLTGKKPNVSYFRVFGSKYFILIKRGRSSKFAPKAVEGFLLGYDTNTRAYRVFNKSTGLVEVSCDIVFDETNGSQVEQVDLDELDDEEAPCITLRNMSIGDAQDDEDEYQEDEPPQERDIDQGGDEDNEDKEDDQEIRDQRPPHPRVHQAIQRDHPVNSILGDIHKXGTKWVFRNKQDEHGVVSRNKARLVAKGYSQVXKIYQMDVKSAFLNGPIKEEVYVEQPPGFEDSEYPNHVYKLSKALYGLKQVPRAWYECLRDFLITNGFKVGKADPTLFTKTVAKDLFLCQIYVDDIIFGSTNKSTCEEFSRIMIQKFEMSMMGELNQTKYIQDILKKIGMKNGKPIKTPMGTNGHLDLDTGGKSVDQKVYRSMIGSLLYLCASRPNIMVSVCMCARFETNPKEVHLRAVKRIMRYLVYTPKFGLWCPKASTFDLIGYSDTDYAGCKIDRKSTSGTCQVLGRSLVSWASKKQNFVSLSTAEAEYIAAGHCCAQLLWMRQTLRDYGYKLSKVPLLCDNESAIRMADNPVKHSRTKHLDIRYHFLRDHQQKXDIKIAYV

SEQ ID NO: 214485 - protein, 437 aa, Zea mays
  Clone ID: MRT4577_127209C.1.pep
MSGDHAKKEMETDDKPTTSHGSTSSEESRTKRKEKRKDSSKGKKSSSHSKGKEKKSSSHHKEKKEKSSSHKPHRSGDKKKRMRKVVYYETDSSSTSTSGSDAASVTSKRQERKKYRDEDYDEDEVAQIEHFNSQATTILLASLSKEEYNKVQGLKNAKEIWDLLKTAHEGDELTKITKRETIEGELGRFRLRQGEEPQDMYNRLKTLVNQVRNLGSKKWDDHEVVKVILRSLIFLNPTQVQLIRGNPRYTLMTPEEVIGNFVSFECMIKGSKKINELDDPSTSEAQPVAFKATEEKKEESAPSRQPIDASKLDNEKMALIIKSFRQIHKQRKGKDYKSRSKKVCYKCGKPGHFIAKCPLSSDSDRDNDKKGKRREKKRYHKKRGGDAHVCREWDSDESSTESSSDEDAANIAVTKGLLFPNVGHKCLMANDGKKKKP

SEQ ID NO: 214486 - protein, 233 aa, Zea mays
  Clone ID: MRT4577_127210C.1.pep
MSGDHAKKEMETGDKPTTSHRKASSEESRNKGKKKEKKSSSHKSHQSGDKIKKMRKVVYYETDTSSPSTSGSDAPSVTSKRHERKKFSKIPLRYPRIPKHTPLLSVPLGKPPTFDGEDYARWSDMMRYHLTSLHKSIWDVVEFGVQVPSVGDEDYDEDEVAQIQHFNSQATTILLASLSREEYNKVQGLKSAKEIWDVLKIAHEGDEVTKITKRETIEGELGRFLRAPRGGGG

SEQ ID NO: 214487 - protein, 193 aa, Zea mays
  unsure (1)..(193): unsure at all Xaa locations
  Clone ID: MRT4577_127211C.1.pep
MSGAHAKKEMVTGEKPATSHGKAPSGESGNKKREESPPRVKSHRSGDKKKKMKKVVYYKTDSSSPSTSGSDTPSITFKRHERKKFSKIPLRYPRISKCTPLLFVPLGKPPVFDGEDYCMWSDKMRHHLTSLHASIWDIGEFGAQEPFVGDEGYDSDEVAQNPHFNSQATTILLTSLSREXEYNXCKGLKSGQE

SEQ ID NO: 214488 - protein, 140 aa, Zea mays
  unsure (1)..(140): unsure at all Xaa locations
  Clone ID: MRT4577_127212C.1.pep
WPNLPQXLPERTSKHMEDSRAQDYNLQXALDGERKYRQPHVQRKKQTLAHINQQTIAAQQQQQQSDGXLSQLAEVNRATYLQHXLVATDPLAVANATAYHQQQQLQQSMPRLRELAMAKPDDNLQILSSIQLRAGNAPTY

SEQ ID NO: 214489 - protein, 1414 aa, Zea mays
  Clone ID: MRT4577_127213C.1.pep
MSGEHAKKEMETGDKPTTSHGKATSQESRNKGKGKEKKASSHKSHRSGDKKKKMRKVVYYETDTSSPSTSGSDAPSITSKRHERKKFRDEDYDEDEVAQIEHFNSQATTILLASLSREEYNKVQGLKSAKEVWDVLKTAHEGDELTKITKRETIEGELGRFRLRKGEEPQDMYNWLKTLVNQVRNLGSKKWDDHEMVKEVIENFVSFEYMIKGLKKINELDDPSTSEAQSIAFKATEEKKEESTSSRQPIDASKLDNEEMALVIKSFRQILKQRRGKDYKPRSKKVCYKCGKPGHFIAKCPISSDSDRGDDKKGRRKEKKKYYKKKGGDAHVCREWDSDKSSTDSSSDEDAANIAITKGLLFPNVGHKCLMVKDGKKKKVKSKSSTRYESSSDDNASDEEDNLRTLFANLNMQQKEKLNELISAIHEKDDLLDTQEDFLIKENKKHVKVKNAYALEVEKCEKLSSELSTCHETIDNLRSENADLLAKVDSNVCNVSIPNLGNDNDDLLAKIEELNISLASLRIENEKLIAKAKELDVCNVTNSDLRDKNDILHAKIVELNSCKPSTSIIEHTTICTRCRDVNIDAIHDHMALIKQQNDHIAKLDAKIAEHDLENEKFKFARSMLYRGRRPGIKDGIGFQQGGNVKLNAPPKKLSNFVKGKAPMPQDNEGYILYPAGYPEDKIRRIHSRKSHSGPNHAFIYKGETSSSRQPTRAKLPEKKTPSASNDHDISFKTFDASYVLTNKSGKVYASGGSSWVIESGCTNHMTGEKKMFSSYEKNQDPQRAITFGDGNQGLTNVHFEKDRICSACQAGKQVGTHHPHKNIMTTDRPLELLHMDLFGPIAYISIGGKKSHTQETLKGFLRRAQNEFGLRIKKIRSDNGTEFKNSQIEGFLEEEGIKHEFSSPYTPQQNGVVERKNRTLLDMARTMLDEYKTLDRFWAEAVNTACYAINRVFGSKCFILVKRGRKSKFAPKTIEGFLLVYDSNTRAYRVFNKSSGQVEVSCDVVFDETNGSHVEQVDLDEIGVEEAPCIALRNMSIGDVCPKESEEPPNAQDQPSSSTQASPPTQNEDEAQVDEGQDQEDEPPQDDGNDQGGDANDQDKEDEEPRPPHPRVHQAIQRDHPVDTILGDIHKGVTTRSRVAHFCEHYSFVSSIEPHRVEEALQDSDWVVAMQEELNNFTRNEVWHLVPRLNQNVVGTKWVCRNKQDEHGVVTRNKARLVAKGYYQVEGLDFGETYAPVARLESIRILLAYATYHGFKLYQMDVKSAFLNGPIKEEVYVEQPLGFEDKFSRIMTQKFEMSMMGELKYFLGFQVKQLQEGTFISQTKYTQNILNKFGMKDAKPIKTPMGTNGHLDLDTGGKSVDQKKEHIGDLPVLGKILGVLGFKEAIFRSSFNHRSRVYCRRPLLRAIALDEANP

SEQ ID NO: 214490 - protein, 37 aa, Zea mays
  Clone ID: MRT4577_127214C.1.pep
FLTNDDLVYLRHQWMQSLLKHGGGIFGIHHWLGLLRA

SEQ ID NO: 214491 - protein, 1575 aa, Zea mays
  unsure (1)..(1575): unsure at all Xaa locations
  Clone ID: MRT4577_127215C.1.pep
MSGDHAKKEMGTGEKPITSHGEAPSGESYNKGKGKEKESPSHKSRRSGDKKKKKMRKVVYYETDSSSPSTSGSDTPSVTSKRHERKKFSKIPLRYPRIPKHTPLLSVPLGKPPMFDGEDYARWSDMMRYHLTSLHKRDEDYDEDEVAQIMHFNSQATTILLASLSREEYNKVQGLNSAKEIWDVLKTAHEGDEVTKITKRETIEGELDRFRLRQGEEPQDMYNRLKTLVNQVRNLGSKKWDDHEMVKVILRSLVFLNPTQVQLIRGSKKINELDGPSTSEAQPVAFKATEEKKEKSTSSRTPIDASKLDNEEMTLIIKSFSQILTQRRGKDYKPRSKKVCYKCGKPGHFISKCPLSSDSDRGDDKKGRRKEKKRYYKKKGGDAHVCREWDSDESSTDSSSDEDAANIAVTKGLLFPNVGHNSIHEKDELLDTQEDFLIKENKKHVKVKNAYALEVEKCEKLTSELGTSHDLIANLRNENARLITKVDSNACDVSIPNLRNDNVDLLAKIEELNISLASLRIENEKLLAKAKELDVCNASISDLRDNNDILCAKIVELNSCKPSTSTTEHVTICTRCRDINIDAIHDHMALIKQQNDHIAKLDAKIAEHDLENEKFKFARSMLYSGRRPGIKDDIGFQKGDNIKLNAPPKRLSNFVKGKAPMPQDNEGYIFYPAGYPESKIRRIHSRKSHSGPNHAFMYKGETSSSRQSTHAKLPKKKTPSASNDHNISFKTFDASYVLTNKSGNVVAKYVGGKHKGSKTCVWVYASGGSSWIIDSGCTNHMTGEKKMFSSYEKNQDPQRAITFEDGNQDVGVTVFRRSDDSIAFKGVLEGQLYLVDFDRAELDTCLIAKTNMGWLWHRRLAHVGMKNVHKLLKGEHILGLTNVHFEKDRICSACQAGKQVGVHHPHKNIMTTDRPLELLHMDLFGPIAYISIGGXEKSHTQETXNGFLRRAQNEFGLRIKKIRSDNGTEFKNSQIEGFLEEEGIKHEFSSPYTPQQNGVVERKNRTLLDMARTMLDEYKTSDRFWAEAVNTACYAINRLYLHRILKKTSYELLIGKKPNISYFRVFGSKCFILVKRGRKSKFAPKTVEGFLLGYDSNTRAYRVFNKSSGQVEVSCDVVFDETNGSQVEQVDLDEIGDEEAPCVALRNMSIGDVCPKESKEPPNAQDQPSSSTQASPPTQNEDEAQVDEGEDQKDEPPQDDSNDQGGDANDQDKEDAEPRPPHPRVHQAIQRDHPVDTILGDIHKGVTTRSRVAHFCEHYSFVSSIEPHKVEEALQDSDWVVAMQEELNNFTRNEVWHLVPRPNQNVVGTKWVFRNKQDEHGVVTRNKARLVAKGYSQVEGLDFGETYAPIARLESIRILLAYATYHGFKLYQMDVKSAFLNGSIKEEVYVEQPPGFEDSEYPNYVYKLSKALYGLKQAPRAWYECLRDFLITNGFKVGKADPTLFTKTFDNDLFVCQIYVDDIIFGSTNESTCEEFSRIMTQKFEMSMMGELKYFLGFQVKQLQEGTFISQTKYIQDILNKFGMKDAKPIKTPMGTNGHLDLNTGGKFVDQKVYRSMIGSLLYLCASRPDIIEST

SEQ ID NO: 214492 - protein, 133 aa, Zea mays
  unsure (1)..(133): unsure at all Xaa locations
  Clone ID: MRT4577_127216C.1.pep
PRPPTRPPPPPPTTTNHPCRGASPRRPAFLALAAAAPAALAQAPGPAATPRGPTNVTAILQKAGQYIMFMRLMKETHHRTHLHTQLNSSYASSAGGHPAXPPTDNALPNLKSGPLHSLTHQHHEPLAHAHIPP

SEQ ID NO: 214493 - protein, 235 aa, Zea mays
  unsure (1)..(235): unsure at all Xaa locations
  Clone ID: MRT4577_127217C.1.pep
LVFEFAEXGALSDWIHGGGGSTLRWRQRVQVAFDVADGLNYLHHYTNPPCVHKNLKSSNVLLDADLRAKVSSFGLARTVAASDGGAQLTRHVAGTQGYLAPEYLEDGLITPKLDVFAFGVVLLELLSGKEAAFADAGTGEETLLWEAAEEALVADGGEDVDRAKVRAFMDPRLHGDFPIDLALAMAALALRCVATEPRARPAMDEVFVSLTAVHNSTLDWDPSDYGTSGSSMVGR

SEQ ID NO: 214494 - protein, 824 aa, Zea mays
  Clone ID: MRT4577_127218C.1.pep
MSGDHAKKMVIGGEKTATSHGKALSRESANKKKDGSPSRIQSHKSGEKKKKMKKLVYYEADSSSPSTSGSDTASVTSKRQERKKYSKIPLRYPRIAKHAPLLSVPLGKPPTFDGEDYSRWSDIMRYHITSLHKSIWDVVEFGVQVPSVWDEDYDEDEVAQIVHFNSQATTILLTSLSREEYNKVQGLKSAKEIWDVLKTAHEGDEVTKITKRETIEGELGRFRLRQGEEPQEMYNWLKTLVNQVRNLGSKKWDDHEMVTEVIGKFVSFELMIKGSRKIIEQDGPSTPEAQPIAFKATEEKKEESTSSRLPIDAYKLDNEEMALIIKSFRQILKQRRGEDYKFRSKKVCYKCGKPGHFIAKCPLSSDSDRGDDKKGKRREKKRYYKKGGDAHVCREWNSDESSSDSSSDEDAANIAVTKGLLFPNVSHKCLMAKDGKRKKVKSKSSTKYATSSDEDNSSDEEDNLRTLFANLNMQQKEKLNELISAIHEKDELLDTQEDFLIKENKKHVKIDSNVCDVSIPNLRDDNVSLLAKIEELNVSLASLRNENEKLIAKAKDLDVCNITISILRSENDILHAKIVELKSCKPSTSTVEHVSICTRCRDINVDAIHDHLALIKQQNDHIAQLDAKISEHDLENENFKFARSMLYSGRRPGIKGGIGFQQGGNVKLNAPPKRLSNFVKGKAPMPQDNEGYILHPAGYPERKIRRTHSRKSHSGPNHAFMYKGETSSSRQPTRAKLPKKKTPSASNDPDISFKTFDASYVLTNKSGKVVAKYVGGKHKGSKTCVWVPKVLVSNAKGPKTVWVPKIFMHPGAQVGSSIADAQTT

SEQ ID NO: 214495 - protein, 67 aa, Zea mays
  Clone ID: MRT4577_127219C.1.pep
RRCLPKKPIRFHVCSLLFLMTLHYLSLLNERQIRDLTPIESDAPSWIKHTERGLPTSGHGKFIAHAS

SEQ ID NO: 214496 - protein, 67 aa, Zea mays
  Clone ID: MRT4577_12721C.1.pep
GRVGGRVGGRVCREPGGRPLPGGIRPRGSLQDGHHGLDDAAFSQAHLPRRDYRRREALRHRPRRGEA

SEQ ID NO: 214497 - protein, 63 aa, Zea mays
  Clone ID: MRT4577_127220C.1.pep
SAYRLAAVRLHLFHIYRYREVKGNLAINHARPLGIMELQVSKKKKKGDKTVIVPGRGICARNK

SEQ ID NO: 214498 - protein, 106 aa, Zea mays
  unsure (1)..(106): unsure at all Xaa locations
  Clone ID: MRT4577_127221C.1.pep
FLGFLFGSGMFPQQEIDXIVEIGYFNGLFVVARSIGLVGDTFGQKRVKQPLFRSPWGGVLFPQLESPFFPGINKFFFCLKVPVAWALSLIGAFPKKKPKREGGGPP

SEQ ID NO: 214499 - protein, 198 aa, Zea mays
  Clone ID: MRT4577_127222C.1.pep
MATVGGNRALYAVVALPLLATLLHGPMRLSHAFPYRSLLQTCQPSGSIQGRSGNCNTENGSECCKNGRRYTTYGCSPPVTGSTRAVLTLNSFAEGGDGGGAAACTGKFYDDSKKVVALSTGWYNGGSRCRKHIMIHAGNGNSVSALVVDECDSTVGCDKDHNFEPPCRNNIVDGSPAVWDALGLNKDDGQAQITWSDE

SEQ ID NO: 214500 - protein, 66 aa, Zea mays
  Clone ID: MRT4577_127223C.1.pep
SRYAVGMKAARWGSSTTQLWCSSSYPSICTIMYISARLVPRSQTGTVMESGDRARLPEGGGLFWLP

SEQ ID NO: 214501 - protein, 1077 aa, Zea mays
  Clone ID: MRT4577_127224C.1.pep
SSEFGSRKFRESAKVDARHWEQINERRYNLDLVRDVMSTELRAIRQDKYGWILHGESEWQSQLQELVHERGIFPMRQPSTEPEWQLCGVEGPYRMRKKLEHSKFKIDTIQNVLTSNLGSNGGKIINKEDGELLLTSGSDTMSGLNLLTYDTEQRDLDAVEFSSFKDDDDIFKGGSTISGPIGWTDDKSSVNEQSLHSATEFGAKSSSLSFHMTESHQGKSELSSPRRAPSVKGTDARTSEDKSEKELLDNGEYLIRPYLEPYEKIRHKYNCERVAGLDKHDGIFLIGELCLYIIENFYIDDSNCICEKGSEDELSVIDQALGVNKDIMGGSESQLKSPTTWGGTAKVLLGGRSWAYNGGAWGKEKLCNSSNLPHPWHMWKLDSVHELLKRDYQLRPVAIEIFSMDGCNELLVFHKKEREEVFKNLIAMNLPRNSMLDTTISASSKQESGEGSRLFKVMAKSFSKRWQSGEITNFQYLMHLNTLAGRGYSDLTQYPVFPWVLADYESDVLDLRNPQTFRRLDKPMGCQTEESEEEFCKRYDSWDDPDVPKFHYGSHYSSAGIVLFYLLRLPPFSTENQKLQGGQFDHADRLFNSVKDTWVSAAGKSNTSDVKELIPEFYYLPEFLENRFNLDLGEKQSGEKVGDVVLPPWAKGSAREFIRKHREALESDYVSENLHHWIDLIFGYKQRGKAAEDAVNVFYHYTYEGNVDIDAVSDPTMKASILAQINHFGQTPKQLFQKPHPQRRTDRKVPPHPLRYCAYLTQQEIRKTASSVSQIVSYNDKILIAAVNCLLKPLTYNEYISWGFPDRSLRILTYDQDRLLSTHENLHGGSQIQCTGVSHDGNILITGGDDGVVAVWRFVKDGIRRLLRMEKALCAHTGKITCVSVSQPYSLIVSGSDDCSVILWDLTSLVFVKQLPRFPASVSALHVNSLTGEILTGAGVLFAVWSINGDCLAVVNTSQLPSDLILSVTSATHSDWQDTNWYVTGHQSGAVKVWKMLHCSSDEAVNSKSKSPAVSSGGLSLNGQAPEYRLLLQKVLKSHKHPVTALCIPPDLKQLLSGDGSGHLLSWSLKDDSFKGS

SEQ ID NO: 214502 - protein, 96 aa, Zea mays
  unsure (1)..(96): unsure at all Xaa locations
  Clone ID: MRT4577_127225C.1.pep
VPXXXXRGARGASDGCSRSVHPGGFGRAKAPSELQDAGQAVGLRCQAGLFPTRALRILHCLTITPSILAFIITFLAYMGGGAILSRYIPTSGFKLA

SEQ ID NO: 214503 - protein, 126 aa, Zea mays
  unsure (1)..(126): unsure at all Xaa locations
  Clone ID: MRT4577_127226C.1.pep
RVPPRIHWHLCGPRSFGDPERLSGRIQIHGDRCHGEGRRSMEEGTLEIGMEYRTXCGVAGPLIIXKVGGPKDQEIENILLGNSTTRRAPGLGVAGEKAVAQNIEGTAGKDKKDTALAGTGGGHRNG

SEQ ID NO: 214504 - protein, 224 aa, Zea mays
  unsure (1)..(224): unsure at all Xaa locations
  Clone ID: MRT4577_127227C.1.pep
NSARGRFPRIIFXLIIMYLCKAGLENASKCVQQFISLLPNIISEDDQCKNRLHFLIWSLLRVRSQYGQLDDGARFHVMSHLILETVIYGKSMLTTNIVGRDDSTEANNSKEAGFILNLVQKDRVLTAATDEAKYMKDAIADRMKLVQELHSKLDERSIQDVEQLQSFEDDVQFAKTAAIAADDSRKAAFQLAFDEDQQIVADKWIHILRALSDERXPWSAAPFP

SEQ ID NO: 214505 - protein, 68 aa, Zea mays
  Clone ID: MRT4577_127228C.1.pep
LKIIHLLYISGHIECIHVQGFTGTMPSSHCGNHITQWHLLSLGTLTSIGKSFGMDRTGKRDGQGLSNY

SEQ ID NO: 214506 - protein, 59 aa, Zea mays
  Clone ID: MRT4577_127229C.1.pep
AAQYIVFVVTAAYWHGVFFVAHYFNVRRFQSIHFCTGSRGTTACKVLCMVDTNNNTRTV

SEQ ID NO: 214507 - protein, 65 aa, Zea mays
  Clone ID: MRT4577_12722C.1.pep
ETIRGMRSPPGWPLLSALASLRGPGPGRFIARRAAPRGAPPLVHVRLAWGSQPTASSQEGHLRAA

SEQ ID NO: 214508 - protein, 69 aa, Zea mays
  Clone ID: MRT4577_127231C.1.pep
GNLLGGFIISPPHYFLWVFFLGKCRCQACPLMWWAPFGFELENLKRFGCGLILGLTRCFFFLMDPKWRI

SEQ ID NO: 214509 - protein, 58 aa, Zea mays
  Clone ID: MRT4577_127232C.1.pep
QSIYLYIMSAVTKDLESIRMLQKDIKLLLILNVTTNEAHTGRERDTNTVRILAACISS

SEQ ID NO: 214510 - protein, 891 aa, Zea mays
  Clone ID: MRT4577_127233C.1.pep
MAASALWQPQEQGLREICAHLEAHISPNSDQARIWQQLQQYSQFPDFNNYLLFILARGEGKSIEVRQAAGLLLKNNLRTTYISMQSSSQHYVKSELLPCIGATNRAIRSTVGTVISVLFQIVRVAGWIELFQALHKCLESNDLDHMEGAMDAIYKICEDVPEELDVDVPGLSERPINVFMPRILQFFQSPHASLRKLSLGIINQYIVVMPSALYMSMDQYIQGLFNLAKDSSADVRKLVCSAWVQLIEVRPSILEPHLKNVTELILQANKDSDDEVALEACEFWSAYCDVSMPPEGLQEFLPHLIPTLLSNMVYADGDESLDDAEEDESFPDRDQDLKPRFHDSRLHGSETGDDDDDADAVNVWNLRKCSAAGLDVLSNVFGDSILPTLMPLIEQNLARTDDDSWKERETAVLCLGAIAEGCISGLYPHLPQIVAFLIPLLDDKFPLIRSITCWTLSRYSKFIVQSLDHPNGRGQFDKILMGVLRRILDTNKRVQEAACSAFAILEEEASEELVPHLEVILQHLMCAYRKYQRRNLRILYDALGTLADAVGAELNQAKYLDIFMPPLITKWQQLSNYDKDLFPLLECFTSIAQALGPGFAQFAEPVFQRCINLIHSQQLSKIDPTAAGAVYDREFIVCSLDLLSGLAEGLGAGIESLVAQSNLRDLLLQCCMDEAADVRQSALALLGDLSRVCPIHLHPRLQEFLTVAAKQLNPQSVKDAVSVANNACWAIGELAIKIGKEIAPVVITVVSCLVPILKSPEGSNKSLVENSAITLGRLSWVCPDIVAPHMEHFMQAWCKALCMIRDDFEKEDSFHGLCAMVAANPTGGAGSLAYICQACASWTEIKSEGLHNEVCQILNGYKQLLGNNGGWEQCMAALKPDVVQKLARYGV

SEQ ID NO: 214511 - protein, 231 aa, Zea mays
  Clone ID: MRT4577_127234C.1.pep
MRPRRRALFPLHSAGAGACGDPWADCQTPPPVPSTPDSGPGPSPSLPPYGDLPCPPVLSPSPSPSPAPAHNGRRNQGGTQGYGPPPGAGDHDRRHLVKYALIAAGVFAFVCLILLGVSVAVRRRQVRRRRQALLAPPIPFPEGAANVGGGGGHDHGWDGAAGVVHHVWNIRTVGLDEASISSIAATRYRAGAGLLGAADCSVCLGEFQDGELVRLLPKCAHAFHVPCIDTW

SEQ ID NO: 214512 - protein, 43 aa, Zea mays
  unsure (1)..(43): unsure at all Xaa locations
  Clone ID: MRT4577_127235C.1.pep
RFXHRKTARKGNEMNLREVTHKGHQGGQNKIPEGLGFKNLRGC

SEQ ID NO: 214513 - protein, 82 aa, Zea mays
  unsure (1)..(82): unsure at all Xaa locations
  Clone ID: MRT4577_127236C.1.pep
RTCGHSGIHHQEPXKAVXVXPHWCRNXTXXQGARAGLRREDAEAAATGVRAVQVDLPCRGAAEGAAHGLPPPGVRLVRGQQG

SEQ ID NO: 214514 - protein, 36 aa, Zea mays
  Clone ID: MRT4577_127237C.1.pep
IDHPVCCSELLPAAWFDSRRERAEDGVTGAVVGGPA

SEQ ID NO: 214515 - protein, 67 aa, Zea mays
  Clone ID: MRT4577_127238C.1.pep
KKDKKIQEKLANIHRRIEHTHANTYQPHDTPPPQPTKRLQDFPFSNQGQKGSTCSWLLQKTTSTSHL

SEQ ID NO: 214516 - protein, 98 aa, Zea mays
  unsure (1)..(98): unsure at all Xaa locations
  Clone ID: MRT4577_127239C.1.pep
HDAQVIILGXQHTTHPNPCVQTYSMSEYVLELSTPEGHHLHXTHEGDMNLPNDIDEEPHPHMDIPDADVLISHRAQRDIPRLQTLFGHKVTIRVQDPT

SEQ ID NO: 214517 - protein, 100 aa, Zea mays
  unsure (1)..(100): unsure at all Xaa locations
  Clone ID: MRT4577_12723C.1.pep
SGWHPTAQIQQSQSTXQEKWQFSPHKPQTQXKLSTPPSSDCELQXQHTHPAKSPTVNAFIVQIGSPPLVPVRFFRNTLLDWFRIPPAPRVDPGIPGTGHL

SEQ ID NO: 214518 - protein, 1927 aa, Zea mays
  Clone ID: MRT4577_127240C.1.pep
MSGDHAKKEMETGEKPTTSHGSTSSEESRTKRREKKKSSSNKGKEKKSSSHHKEKKEKSSSHKPHRSGDKQKRMRKVVYYETDTSSTSTFDSDAPSVTSKRQERKKFSKIPLHYSRISKHAPLLSVPLGKPPTFDGEDYARWSDLMRFHLTSLHKSIWDVVEFGAQVPSVGDKDYDEDEVAQIENFNSQATTILLASLSREEYNKVQGLKSAKEVWDVLKTAHEGDELTKITKRETIEGELGRFRLRKGEEPQHMYNRLKTLVNQVRNLGSTKWDDHEMVKVILRSLIFLNPTQVQLIRGNPRYTKMTAEEVIGNFVSFECMIEGSRKINELDDPSTSEAQPVAFKATEEKKEEATPSRQPIDASKLDNEEMALVIKSFRQILKQRRGKDYKSRSKKVCYKCGKPGHFIAKCPISSDSDRGDDKKGRRKEKKRYYKKKGGDAHVCREWDSDESSSDSSDDEDAAHIAVTKGLLFPNVGHKCLMAKDDKKKVKSKSSTKYESSSDDNASDEEDNLRTLFANLNMQQKEKLNELISAIHEKDDLLDTQEDFLIKENKKHVKVKNAYALEMEKCEKLSSELSTCHETIDNLRNENANLLAKVDSHVCDASIPNLRNDNDDLLAKIKEMNDSLASLRNENEKLLAKAKDFDVCNATISDLRSKNEILHAKVVELKSCKPSTSTVEHTSICTRCRDVNIDAIHDHMTLIKQQNDHIAKLDAKIAEHNLENEKFKFARSMLYNGRRPGIKDGIGFQRGDNVKLSAPPKRLSNFVKGKAPMPQDNEGYILYPAGYPEDKIRKIHSKKSHSGSNHAFMYKSETSSSRQPTRAKLPKKKIPNASNEHSISFKTFDASYVLTNKSGKVVAKYVGGKHKGSKTCVWVPKILVSNAKGPKTIWVYASGGSSWILDSGCTNHMTGEKKMFSSYEKNKDPQRAITFGDGNQGLVKGVTVFRRSDDSIAFKGVLEGQLYLVDFDRAELDTCLIAKTNMGWLWHRRLAHVGMKNLHKLLKGEHILGLTNVHFEKDRTCSACQAGKQVGAHHPHKNIMTTDRPLELLHMDLFGPIAYISIGGSKYCLVIVDDYSRFTWVFFLQEKSQTQETLKGFLRRAQNEFGLRIKKIRSDNGTEFKNSQIEGFLEEEGIKHEFSSPYTPQQNGVVERKNRTLLDMARTMLDEYKTSDRFWAEAVNTACYAINRLYLHRILKKTSYELLTGKKPNISYFRVFGSKCFILVKRGRKSKFAPKTVEGFLLGYDSNTRAYRIFNKSTGLVEVSCDVVFDETNGSQVEQVDLDEIGIEEVPCIALRNMSIGDVCPKESEEPPKAQDQPSSSMQASPPTQNEEEAQVDEEEDQSNEPPQDDGIDQGGDANDQDKEDEEQRPPHPRVHQAIQRDHPVDTILGDIHKGVTTRSRVAHFCEHYSFVSSIEPHRVEEALQDSDWVVAMQEELNNFTRNEVWHLVPRPNQNVVGTKWVFRNKQDEHGVVTRNKARLVAKGYSQVEGLDFGETYAPVARLESIRILLAYATYHGFKLYQMDVKSVFLNGPIKEEVYVEQPPGFEDSEYPNHVYKLSKALYGLKQAPRAWYECLRDFLIANGFKVGKADPTLFTKTLENDLFVCQIYVDDIIFGSTNESTCEEFSRIMTQKFEMSMMGELKYFLGFQVKQLQEGTFISQTKYTQDILNKFGMKDAKPIKTPMGTNGHLDLDTGGKSVDQKVYRSMIGSLLYLCASRPDIMLSVCMCARFQSDPKESHLTAVKRILRYLAYTPKFGLWYPRGSTFDLIGYSDADWAGCKINRKSTSGTCQFLGRSLVSWASKKQNSVALSTAEAEYIAAGHCCAQLLWMRQTLRDYGYKLTKVPLLCDNESAIKMADNPVEHSRTKHIAIQYHFLRDHQQKGDIEISYINTKDQLADIFTKPLDEQTFTKLRHELNILDSRNFFC

SEQ ID NO: 214519 - protein, 1601 aa, Zea mays
  Clone ID: MRT4577_127241C.1.pep
MREIGTGNKSASSGRTYSRESAHKHKEESSSSIKSQRKGDKKKKMKKVVYYETDSSSPSTSVSESASTTSKRHERKKYSKMPLRYPRISKRTPLLSVPLVKPPMFEGEDYSMWSDKMRHHLTSLHKSIWDIVEYGAQVPKKGDKDYDLEEVEQIQHFNSQATTILLASLSREEYNKVQGLKSAKEIWDVLKSAHEGDETLVNQVRNLGSTKWDDHEMVKVILRSLVFLNPTQVQLIRGDPRYKLMSPEEAIRKFVSFELMIKGSKQIIEQGATSTPEVQPVVFKATEEKKEESTPSRLPIDASKLDNEEMALIIKSFRQIFKQRKGRDYKPRSKKVCYKCGKPGHFIAKCPLSSDSDRDDDKKGKRREKKRYYKNKGGDAHVCREWDSEESSTDSSSDEDAANIAVTKGLLFPNVVHKCLMAKDGKKKVKSRSSTKYATSSDEASSSDDEDDLLTLFANLNMQQKEKLNELISAIHDKDELLDSQEDFLIKENKKHVKVKNAYALEVEKCEKITSELSTCHDVISNLRNENAKLIAKVENLNVCDDSLVNLRNDNPSLITKIDKLNASLYSLKIENEKLIAKDKDLNVCNVSISNLRDENAILHAKIVELNTCKPSTSTVEHVTICTRCRDINVDAIHDHLALIKKQNDHIAQLSAKNNEHDLENEKFKFARSMLHSGRRPGIKDGIGFQQGDNVKLNAPKKLPNFVKGKAPMVYASGGSSWIIDSGCTNHMTGEKRMFSSYEKNHDPQRAITFGDGNQGVTVFRRSDDSVAFKGVLEGQLYLVDFDRAELDTCLIAKTNMGWLWHRRLAHVGMKNLHKLLKGEHILGLTNVHFEKDRVCSACQAGKQVGVHHPHKNIMTTDRSLELLHMDLFGPIAYISIDGSKYCLVIVEDYSRFTWVFFFQEKSQTQETIKGFLRRAQNEFGLRIKKIRSDNGTEFKNSQIEGFLEDEGIKHEFSSPYTPQQNGVVERKNRTLLDMARTMLDEYKTSDRFWVEAINTACYAINRLYLHQIVKKTSYELLTGRKSKFAPKAVEGFLLGYDSNTRAYRVFNKSTGLVEVSCDIVFDETSGSQVEQVDLDELDDEEAPCVALRNMSIGDVCPKEFEEPPQAQDQPSSSMQASPPTQDEDQAQEDENEDQEDEPPQEGDNDLGGDAHDQDKEDDDGLRPPHPRVHQAIQRDHPVNTILDDIQKGITNRSRVAHFCEHYSFVSSIEPYKIEDALRDSDWVLAMQEELNNFTRNEWVFRNKQDEHGVVIRNKARLVAKGYSQVEGLDFGETYAPVARLESIRILLAHATYHGFKLYQMDVKSAFLNGPIKEEVYVEQPPGFEDSEYPNHVYKLSKALYGLKQAPRACRIMIQKFKMSMMGELKYFLGFQVKQLQEGTFISQMKYIQDILTKFGMKDAKPIKTPMGTNGLRAVKRILRYLVYTHKFGLWYPKGSTFDLIGYSDADWAGCKIDRKSTSGTCQFLGRSLVSWTSKKQNSVALSTAEAEYIAAGHCCAQLIWMRQTLRNYGYKLTKVPLLCDNESAIRMVDNPVEHSHTKHIAIRYHFLRDHQQWGDIEIAYINTKEQLADIFTKPLDEKTFTKLRHELNILDSRNFD

SEQ ID NO: 214520 - protein, 79 aa, Zea mays
  Clone ID: MRT4577_127242C.1.pep
AASRPTMRDSHVLLAEEAPEHIRKGEAHLLPREIIDCGEPLPLSPGAPSSPPDLGDLRSRIGEDSRGCGATTRGCGRGR

SEQ ID NO: 214521 - protein, 535 aa, Zea mays
  unsure (1)..(535): unsure at all Xaa locations
  Clone ID: MRT4577_127243C.1.pep
MGIWWLRAINIPQPPQLQASKFSEVLIQYKNHAKREIVTGDKLASSGRTLSRESDNKHKEESSSSIKSHQRGDKKKEMKKVVYYKSTKYSKMPLRYPCISKRAPLLSVPLGKPPYFDGEDYSMWSDKMRHHLTSLHESIWNIVEFGAQVPMVGNEGYDSDEVAQIRHFNSQATTILLASLCRDEYNKVQGLKSVKEIWDVLKTAHEGDEVTKITKRKTIKGELGRFILNKGEEPQAMYNRLKTLVNQVRNLGSTKWDGHEMVKVILRTLVFRNPTQVQLIRGDPRYKQMSPDXSFRQILKQRXGKDYKPRSKRVCYKCGKPSHFIAKCPNSSDSDRGDDKKRKKKEKKRYYKKKGGDAHVCREWDFDESSTDPSADEDAANIAVNKGLLFPNVDHKCFMAKDGKKKKHGTKGKKLNELIEAIHEKDDLLESQEDFLIKENKKHVKLKNAYAQEVEKCENLTKELSVCHNSITSLRNENANLNAKIDELNICNESISSLRTENASLVSKVKELNVCNDSISCLRNENTILHAKIED

SEQ ID NO: 214522 - protein, 1713 aa, Zea mays
  Clone ID: MRT4577_127245C.1.pep
MSGDHAKKEMETGEKPTTSYGSTSSEESRTKRREKKKSSSNKGKEKKSSSHHKEKKEKSSSHKPHRKGDKHKRMRKVVYYETDTSSTSTSDSDAPSVTSKRQERKKYSKIPLRYPRISKHTPLLSVPLGKPPTFDGEDYARWSDLMRFHLTSLHKSIWDVVEFGAQVPSVGDEDYDEDEVAQIEHFNSQATTILLASLSKEEYNKVQGLKNAKEIWDVLKTAHEGDELTKITKRETIEGELGRFRLLKGEEPQHMYNRLKTLVNQVRNLGSKKWDDHEVEVIGHFVSFECMIEGSRKINELGDSSEAQPVAFKATEEKKEEATPSRQPIDASKLDNEEMALVIKSFRQILKQRRGKDYKSRSKKVCYKCGKPGHFIAKCPISSDSDRGDDKKGRRKEKKKYYKKKGGDAHVCREWDSDKSSSDSSDDEDAANIAVTKGLLFPNVGHKCLMAKDGKKKKVKSNSSTKYESSSDDNASDEEDSLRSLFANLNIAQKEKLNELVSAIHEKDDLLDSQEDCLIKENKKHVKVKKAYALEVEKCEKLSSELSTCREMIDNLRNENASLNAKVDSHVCNVSIPNSRDNNDELLARIEELNISLASLRLENENLIAKAKDFDVCKVTIADLRDKNDILHAKIVELNSCKPSTSTIEHVTICTRCRDINVDAIHDHMILIKQQNDHIAKLDAKIAEHNLENEKFKFARSMLYNGRRPGIKDGIGYQRGDNVKLSAPPKRLSNFVKGKAPMPQDNEGYILYPAGYPEDKIRKIHSRKSHSGPNHAFMYKGETSRSRQPTHAKLPRKKTTNASNDHAISFKTFDASYVLTSKSGKVYASGGSSWILDSGCTNHMTGEKRMFSSYEKNQDPQRAITFGDGNQGVTVFRRSDDSIAFKGVLEGQLYLVDFDRAELDTCLIAKTNMGWLWHRRLAHVGMKNLHKLLKGEHILGLTNVHFEKDRICSACQAGKQVGVHHPRKNIMTTDRPLELLHMDLFGPIAYISIGGSKYCLEKSQTQETLKGFLRRAQNEFGLRIKKIRSDNGKEFKNSQIEGFLEEEGIKHEFSSPYTPQQNGVVERKNRTLLDMARTMLDEYKTPDRFWAEAVNTACYAINRLYLHRILKKTSYELLTGKKPNISYFRVFGSKCFILIKRGRKSKFAPKTVEGFLLGYDSNTRAYRVFNKSTGLVEVSCDVAFDETNGSQVEQMDLDEIGEEQAPCIALRNMSIGDVCPKESEEPPSTQDQPSSPMQASPPTQNEDEAQNDEEQNQEDEPPQDDSNDQGGDTNDQEKEDEEEPRPPHPRVHQAIQRDHPVDTILGDIYKGVTTRSRVAHFCEHYSFVSSIEPHRVEEALQDSDWVVAMQEELNNFTRNEVWHLVPRPNQNVVGTKWVFRNKQDEHGVVTRNKARLVAKGYSQVEGLDFGETYAPVARLESIRILLAYATYHGFKLYQMDVKSAFLNGPIKEEVYVEQPPGFEDSEYPNHVYRLSKALYGLKQAPRAWYECLRDFLIANGFKVGKADPTLFTKTLEKDLFVCQIYVDDIIFGSTNESTCEEFSRIMTQKFEMSMMGELKYFLGFQVKQLQEGTFISQAKYTQDILAKFGMKDAKPIKTPMGTNGHLDLDTGGKSVDQKIIPDRRSFLEKQAKRGPSGLLRRTVRDIGIPLGQNQCKNTSFHYRLSGGKAKTVRALARTVRPQARTVRSPLIYRGGPSAPGGRTVRAQQKRSNG

SEQ ID NO: 214523 - protein, 40 aa, Zea mays
  Clone ID: MRT4577_127246C.1.pep
IAARGAALLRTKPRPRSTIVYEWFSAQVPPRNVRCVTGEG

SEQ ID NO: 214524 - protein, 794 aa, Zea mays
  Clone ID: MRT4577_127247C.1.pep
MSGASAKREIGTSGDKSASSGRTHSRESAHKHKEESASSIKSQRRGDKKKKMKKVVYYESDSSSPSTSDSESTSATSKCHERKKYSKPPVFYGEDYSMWSDKMRHHLTSLHKSIWDIVEYGAQEYNKVQGLKSAKEIWDVLKTAHEGDEVTKITKRETIEGELSRFMLNQGEEPHAMYNRLKTLVNQVRNLGSTKWDDHEMVKVQPVAFKATEEKKEESTSSRLPIDASKLDNEEMALIIWSFHQILKQRRGKDYKPRSKKVCYKCGKPDHFIAKCPLSSDSDRGDDKKGKRREKKRYYKKKGGDAQVCREWDSDESSTDSSSDEDAANIAVTKGLVFPNVGHKCLMAKDDKKKKVKSRASTKYATSSDEASSSDDEDDLLTLFANLNMQQKEKLNELISAIHEKDGLKDRQDDFLIKENKKHVKVKNAYAHEIEKCEKLTSELNICHDTISNLRNENVKLIAKVEKLNVCDDSLVKLKNDNASLIAKIDKLNESLSSLRIENDKLISKAKDLNRCRDINVDAIHDHLALSKQQNDHIAQLSVKIIEREIENEKFKFARSLLYNGRRPGIKDGIGFQQGDNVKLNTPKRLSIFVKGKAPMAQDNKGYILYHVGYLEHKIRRIHARKPHNVTHHAFMYKNEASSSRQSTHVKLPKKKSPIASNETNVSFKTFDASYVLTNKSGKVIAKYVGGKHKGSKACVWEPKVYASGGSSWIIDSGCTNHMTGEKKMFSSYEKNHDPQRAITFGDENQSLVKGLGKIAISPDHSISNVFLEDSLDYNLLSVSQLCKMGYNCL

SEQ ID NO: 214525 - protein, 359 aa, Zea mays
  unsure (1)..(359): unsure at all Xaa locations
  Clone ID: MRT4577_127248C.1.pep
VVQQWRSYLQHGEFVILTDHKSLTQLNEQRLHTPXKHKVFTKLLGLNYKIHYRHGYDNRAVDALSRNGTVECCVVSMLVPQWLQSIXDSYQXDFEAASLLFKLAIDXRSAPLHXLCDGLLCFKNRIWVGNDAQLQHHIVAALHSSLVEGHLGVSVTYSRVKKLFAXPWLKSFVHKFVRECQVCLXAKLDRAAYPGLLQSLPVPSSAWDTISMDFVEGLPRSQHADCILVIVDKFSKYGHFLPLSHPYTAHSVAHSFLFNVYKIHGLSSVIISDRDLVFTSQFWQQPFRLAGIELKPSSSYHPQTDGQTEQVNQCLETYLRCFANVCPTKWKEWLPVGEYWYNTSLHSALXRAPFEVFMA

SEQ ID NO: 214526 - protein, 1533 aa, Zea mays
  Clone ID: MRT4577_127249C.1.pep
MSGASAKREIGTGEKPATSHGKAPSRKSANKKKDGSPSRIRSHKSGEKKKKMKKVVYYETDSSSPSRSGSDAASVTSKRQERKKYSKIPLRYPRIPKHTPLLSVPLGKPPTFDGEDYSRWSDMMRYHLTSLHKSIWDVVEFGVQVPSVGDEDYDEDEVAQIVHFNSQATTILLTSLSREEYNKVQGLKSAKEIWDVLKTAHEGDEVTKITKRETIEGELDRFRLRQGEEPQEMYNWLKTLVNHVRNLGSKKWDDHEMVKVILRSLVFLNPTQVQLIRGDPRYTLMSPEEVIGKFVSFELMIKGSKKIIEQDVPSMPEAQPVAFKVMEEKKEESTSNRLPIDASKLDNEEMTLIIKSFRQILKQRRGKDYKPCSKKVCYKCGKARDSDRDNDKKGKRREKKRYHKKRGGDAHVCREWNSDESSSDSSSDEDVANIAVTKGLLFPNVGHKCLMAKDGKRKKVKSKSSTKYETSSDEEDNLRTLFASLNMQQKEILNELISAIHEKDELLDSQKDFLIKENKKHVKVKNAYALEVEKCEKISSELSTCHDIIANLRNENAKLIAKVDSNVSDVSIPNLRDDNVSLLAKVKELNVSLASLRNENEKLIAKAKDLDVCNVNIFNLRRENDILHAKIVELKSCKPSTSTVEHVSICTRCRDINVDAIHDHLALIKKQNDHIAQLNAKINEHDLENEKFKFARSMLYSGRRPGIKDGIGFQKGDNVKLNAPPKRLSNFVKGKAPMPQDNEGYILYPVGYPEHKIRKIHSRKSHSGPNHAFMYKGETSRSRQSNRAKLPKKKTPIASNDSNISFKTFDASYVLNNKSGKVYASGGSSWIIDSGCTNHMTREKKMFSSYEKNQDPQRAITIGDGNQGVTVFRRSYDSIAFKGVLEGQLYLVDFDRAELDTCLIAKTNMGWLWHHRLAHVGMKNLHKLLKGEHILGLTNVHFEKDRVCSVCQAGKQVGVHHPHKNIMTTDKPLELLHMDLFGTIAYISISGSKYCVVIVDDYSRFTCVFFLLEKSHTQETLNGFLRRAQNEFGLRIKKIRSDNRTEFKNSQIEGFLEEEGIKHEFSSPYTPQRNGVVERKNRNLLDMARTMLDEYKTSDRFWAEAVNTACYAINRLYLHGILKKTSYELLTGKKPNVSYFRVFGSKCFILVKRGRKSKFAPKAVEGFLLGYNSNTRAYRVFNMSSGLIEVSCDIVFDETNGSQVEQVDLDELDDEEAPCVALRNMSIGDVCPKESEEPPNAQDQPSSSMQASPPTQDEDKAQNDEGEDQEIEPPQEESNDQGRDAHNQDKEDEQLYQMDVKSAFLNGPIKEEVYVEQPPGFEDSEYPNHVYKLSKALYGLKQAPRAWYECLRDFLITNGFKVGKADPTLFTKTLNNDLFVCQIYVDDIIFGSTNESTCEEFSRIMTQKFKMSMMGELKYFLGFQVKQLQEGTFISQTKYIQDILTKFGMKDAKPIKTPMGTNGHLDLDTGGCKINRKSTSGTCQFLGRSLVSWASKKQNSVALSTVEAEYIVAGHCCAQLLWMRQTLRDCGYN

SEQ ID NO: 214527 - protein, 117 aa, Zea mays
  Clone ID: MRT4577_12724C.1.pep
FRYLLQLLVQSSKASQPLLDQSHLLLHLDRPGAWCPPPLPFEWRISDQSPLPRLLKRKKRLNHDLAIPLLTLDLVAYVCRVRGGFLRAQPAPLPSAPPRLLKLKPSSSSAHWPPSQR

SEQ ID NO: 214528 - protein, 818 aa, Zea mays
  Clone ID: MRT4577_127250C.1.pep
LCKMGYNFLFTDVGVPVFRTSDYSIAFKGVLEAQLYLVDFDKAELDTCLIANTNMGWLWHPRLAHVVMKNLHKLLKGEHILGLTNVHFEKDRVCSACQAGKQVGAHHPHKNIMTTDRPLELLHMDLFGPIAYISIGGSKYCLVIVDDYSRFTWVFFLQEKSQTQETLKGFLRRAQNEFGLRIKKIRSDNGTEFKNSQIEGFLEEEGIKHEFSSPYTPQQNGVVERKNQTLLDMARTMLDEYKTSDRFWAEAVNTACYAINRLYLHRILKKTSYELLTGKKPNISYFRVFGSKCFILVKRGRKSKFAPKTVEGFLLGYDSNTRAYRVFNKSTGLVEISCDVVFDETNGSQVEQVDLDEIGIEEAPCIALRNMSIGDVCPKESEELPNAQDQPSSSMQASPPTQNEEEAQVDKEEDQSNEPPQDDDNDQGGDANEEDKEDEEPRPPHPRVHQAIQRDHPVDTILGDIHKGVTTRSHVAHFCEHYSFVSSIEPHRVEEALQDSDWVVAMQEELNNFTRNEVWHLVSRPNQNVVGTKWVFRNKQDEHGVVTRNKARLVAKGYSQVEGLDFGETYAPVARLESIRILLAYATYHGFKLYQMDVKSAFLNGPIKEEVYVEQPPGFEDSEYPNHVYKLSKALYGLKQAPRAWYECLRDFLIANGFKVGKADPTLFTKTLENDLFVCQIYVDDIIFGSTNESTCEEFSRIMTQKFEMSMMGELKYFLGFQVKQLQEGTFLSQTKYTQDILSKFGMKDVKPIKTPMGTNGHLDLDTGGKSVDQKSISNQVIGVLKGNWSLRRRQRLPLRNSSFAVTPSNSPFLGEKP

SEQ ID NO: 214529 - protein, 83 aa, Zea mays
  Clone ID: MRT4577_127251C.1.pep
AYLSWYRTSIRGRQCCALVHFVVRTSYSVFVWYQCSSTSSCAQVPSSHGHTPQAYTQSPLATGIFFLDPRHQNCHVQASIDRE

SEQ ID NO: 214530 - protein, 1071 aa, Zea mays
  Clone ID: MRT4577_127252C.1.pep
MVTGDKPTTSHGKASSEESHNKGKGKEKKSSSHKSHRSGDKKKKMMKVVYYETDTSSPSTSGSNAPSVTSKRHERKKFSKIPLRYPRIPKHTPLLSVPLGKPPTFDGEDYARWSDLMRFHLTSLHKSIWDVVEFGVQVPSVGYEDYDEDEEAQIEHFNSQATTILLGSLSREEYNKVQGLKSAKEVWDVLKTAHEGDELTKITKRETIEGELGRFRLRQGEEPQDMYNRLKTLVNQVRNLGSKKWDDHEMVKVILRSLVFLNPTQVQLICGNPRYTLMTPEEVIGNFATEEKKEESTSSRTPIDASKLDNEEMTLIIKSFRQILKQRRGKDYKPRSKKVCYKCGKPGHFIAKCPISSDRGDDKKGRRKEKKKYYTKKGDDAHVCREWDSDESSTDSSSDEDAANIAVTKGLLFPNVSHKCLMAKDGKRKKVKSRSSTKYETSSDEDNASNEEDNLRILFANLNMQQKEKLNELISAIHEKDDLLDTQEDFLIKENKKHVKVKNAYALEVEKCEKLSSELSTCHETIDNLRNENASLIAKVDSNACNVSIPNLRDDNVDLLAKIEELNISLASFRIENEKLLAKAKELDVCNASISDLRSKNDILHAKVVELKSCKPSTSIVEHTSICTRCRDINVDAIHDHMALIKQQNDHIAQLNAKINEHDLENEKFKFARSMLYNGRRSGIKDDIGFQKGDNVKLNAPPKKLSNFVKGKAPMPQDNEGYILYPVGYLESKIRRIHSRKSHSGPNHAFMYKGETSSSRQSTHAKLPKKKTPSASNNHNISFKTFDASYVLTNKSGKVYASGGSSWVIDSGCTNHMTWEKEMFSSYEKNQDPQRAITFGDGNQGVTVFRRSDDSIAFKGVLEGQLYLVDFDRAELDTCLIAKTNMGWLWHLRLAHVGMKNLHKLLKGEHILGLTNVHFEKDRICSACQAGKQVGAHHPHKNIMTTDRPLELLHMDLFGAIAYISIGRSKYCLVIVDDYSRFTWVFFLQEKSYTQETLKGFLRQAQNEFDLRIKKIRSDNGTEFKSSQIEGFLEEEGIKHEFSSPYTPQQNGVVERKNRALIPIESLLEGG

SEQ ID NO: 214531 - protein, 617 aa, Zea mays
  Clone ID: MRT4577_127253C.1.pep
MTTDRPLELLHIDLFGLIAYISIGGSKYCLVIVDDYSRFTWVFFLQEKSHTQETLKGFLRRAQNEFGLRIKKIRSDNGMEFKNSQIEGFLEEEGIKHEFSSPYTPQQNGVVERKNRTLLDMARTMLDEYKTSDRFWAEAVNTACYAINRLYLHRILKKTSYELLTKRVDLDEIGVEEAPCIALRNMSIGDVCPKESEEPPNAQDQPSSSKQASPPTQNEDEAQVDEGEDQANEPPQDDGNDQGGDENDQDKEDEEPRPPHPRVHQAIQRDHPVDTILGDIHKGVTTRSRVAHFCEHYSFVSSIKPHMVEEALQDSDWVVAMQEELNNFTRNEVWHLVPRPNQNVVGTKWVFRNKQDEHGVVTRNKARLVAKGYSQVKGLDFGETYAPVARLESIRILLAYATYHGFKLYQMDVKSAFLNGPIKEEVYVEQPPGFEDSEYPNHVYKLSKALYGLKQAPRGWYECLRDFLITNGFKVEKADPTLFTKTLENDLFVCQIYVDDIIFWSTNESTCEEFSRIMTQKFEMSMMGELKYFLEFQVKQLQEGTFLSQTKYTQDILSKFGMKDAKPIKTPMGTNGHLDLDEGGAKGSHLANKKTKKWVQQKEQGTTSGGTARIIPT

SEQ ID NO: 214532 - protein, 1522 aa, Zea mays
  Clone ID: MRT4577_127254C.1.pep
MSGDHAKKEMVTGEKPATSHGKTPSGEFGNKMKGSPSHNKSHWSGEKKKKMKKVVYYETDSSSPSTSGSNTPSITSKRHERKKFSKIPLRYPRIPKHTPLLSVPLGKPPVFEGEDYSMWSARMKGHLTSLHKSIWDVVEYGAQVPQVGDKDYDSDEADQIRHFNSQATTILLVSLSREEYNKVHGFETTKDIWDVLKTVHEGDEESQAMYNRLKTLVNQVRNLGSTKWDDHEMVKVILRSLVFLNPTQVQLIRGDPRYKLMSPEEVIRKFVSFELMIKGSKQIIERGATSTPEVQPVAFKATEEKKEESTSSRLPIDASKLDNEEMTLIIKSFCQILKQRRGKDYKPRSKKVCYKCGMPGHFIAKCPLSSDSDRGDDKKGRRKEKKKYYKKKGGDAHVCWEWDSDESSTDSSDEDAANITVNKGLLFHNVGHKCLMAKDGKKKVKSRASTKYATSSDEENSSDDEDNLLALFANPNMQQKEKLNELIGVIHEKDELLDSQEDFLFKENKKHVKVKNAYAQEVEKCEKLTSELSTCHDTIFNLRNENAKLIAKVENLNVCDDSLVKLKNDNANLIAKIDKLNESIASLKIENNKLITKAKNLNVCNDIVSNLRNENVMLHAKIDELNVCKPSTSTIEHVTICTRCRDINVDAIHDHLALIKQQNDHIAQLSAKINEHDLENENFKFARSMLYNGRRPGIKDDIGFQQGDNVKLNAPKKLSNFVKGKAPMVQDNEGYILYPAGYPEHKIRRIHSRKSHSGSHHAFMYKSEASSFRQSTHAKFPKKKTPTASNDHNISFKTFDASYVLTNKSGKVVAKYVGAKHKGSKTCVWVPKVYASGGSSWIIDSGCTNHMTGEKRMFSSYEKNHDPQRAITFGDGNQDIGVTVFTRSDDSVAFKGVLEGQLYLVDFNRAELDTCLIAKTNMGWLWHRRLAHVGMKNLHKLLKGEHILGLTNVHFEKDREKSQTQETLKGFLRWAQNEFGLRIKKIRSDNGTEFKNSQIEGFLEDEGIKHEFSSPYTPQQNGVVERKNRTLLDLARTMLDEYKTSDRFWAEAINTACYAINRLYLHRILKKTSYELLTGKKPNVSYFRVFGSKCFILVKRGRKSKFAPKDVEDFLLGYDSNTRAYRVFNKSTGLVEVSCDIVFDETNGSQVEQVDLDELDDEEAPCVALRNMSIGDVCPKESEEPPQAQDQPSSSIQASPPTQDEDQAQDDENEDQEKLPQEEDNDQGGDANDQNKEDDEGPRPPHPRVHQEIQQDHLVNSLLGDIYKGVTTRSRVAHFCEYYSFVSSIDPYRVKDALRDSDWLLAMQEELNNFTRNEVWHLVPHANQNVVGTKWVFHNKQDEHGVVTRNKARLVAKGYSQVEGLDFGETYAPIARLESIRILLAYAIYHGFKLYQMDVKSAFLNEPIKEEVYVEQPPGFKDSEYPNHVYKLSKVLYGLKQAPRAWYECLRDFLITNGFKVGKADPTLFTKTIANDLFVCQIYVDDIIFGSTNKSTCEEFSRIMIQKFEMSMMGELKYFLGF

SEQ ID NO: 214533 - protein, 78 aa, Zea mays
  Clone ID: MRT4577_127255C.1.pep
TGLVETKGPPTLPPGVGGFLKIRGEPRGSRDQTLSQEKAGGEKIKLSPPRNPRHRVYPRPPISLHSEKTPHALGGGGG

SEQ ID NO: 214534 - protein, 830 aa, Zea mays
  Clone ID: MRT4577_127256C.1.pep
MSGDHSKKEMETGDKPTTSHEKASSEESRNKGKGKEKKASSHKSHRSGDKKKKMRKVVYYETDTSSPSTSSSDAPSITSKRHERKKFSKIPLRYPRIPRHTPLLSVPLGKPPTFDGEDYARWSDLMKFHLTSLHKSIWNVVEFGAQVPSVGDEDYDEDEVAQIEHFNSQATTILLASLSREEYNKVQGLKSAKEVWDMLKTAHEGDELTKITKRETIEGELGRFRLRQGEEPQDMYNRLKTLVNQVRNLGSKKWDDHEMVKVILRSLIFLNPTQVQLIRGNPRYTLMTPEEVIGNFVSFEFMIKGLKKINELDVPSTSEAQPVAFKATEEKKESTSSRTPIDASKLDNEEMALVIKSFRQILKQRRGKDYKPRSKKVCYKCGKPGHFIAKCPISSDSDRGDGKKGRRKEKKKYYKKKGGDAHVCREWDSNESSTDSSSDEDAANISVTKGLLFPNVGHKCLMAKDGKKKKVKSKSSTRYESSSDDNASDEEDNLRTLFANLNMQQKEKLNKLISAIHEKDDLLDTQEDFLIKENKKHVKVKNAYALEVEKCKKLSSELSTCHETIDNLRNENGNLLAKVDSNVCDVSIPNLRNDNVDLLAKIEELNISLASLRNENEKLLAKAKDIDVCNASISDLRDKNDILRAKIVELNSCKPSTSTTEHVTICTRCRDINIDAIHDHMALIKQQNDHIAKLDAKIAEHDLENEKFKFARSMLYRGRRPGIKDDIGFQQGGNVKLNAPPKKLSNFVKGKAPMPQDNEGYILYPAGYHESKIRRIHSRKSHSGPNHAFMYKGEASSSRQSTHAKLPKKKTPSASNEHSISFKTFDASMF

SEQ ID NO: 214535 - protein, 74 aa, Zea mays
  Clone ID: MRT4577_127257C.1.pep
THPALSHTPKSQLPPPPPAVQISLPSRSRQVALPVHRGGRSVSRTTKHAVQAERRVTPRLPRFPPRHQRRRGQR

SEQ ID NO: 214536 - protein, 66 aa, Zea mays
  Clone ID: MRT4577_127258C.1.pep
VEPEQADLMSLVLTLLVGVLVQQNKCVMHTMSDDAVLKYRATSEGHRDLEPRPGAPLAKENWKRKQ

SEQ ID NO: 214537 - protein, 67 aa, Zea mays
  Clone ID: MRT4577_127259C.1.pep
VLLTPAYPHSEFQPAPVMLSEPPQAALTSKPATPPTAVANFKLSRAELVRLRSQVPVRVGVPCFITY

SEQ ID NO: 214538 - protein, 99 aa, Zea mays
  Clone ID: MRT4577_12725C.1.pep
GSLEAGRDHIPGGGGEKERIRKSAIKEEEKRLTFGRVASVPRKKRVLVLVGEEGQRAVGRVERGGSLRAHGTRMRRDPKLKGHAVPPSNFINFYSKRTL

SEQ ID NO: 214539 - protein, 216 aa, Zea mays
  Clone ID: MRT4577_127260C.1.pep
MAHRVNNEYDYLFKIVLIGDSGVGKSNILSRFTRNEFCLESKSTIGVEFATRNLQIDGKTVKAQIWDTAGQERYRAITSAYYRGAVGALLVYDITKKQSFDSVQRWLRELRGHADANIVVMMVGNKSDLNHLRSVPEEDGRAFSEKEGLSFLETSALEAINVEKAFHTILSEIHQTVSKKALAAQASASTNGRSMQGTTINVAESSTVTKGSCCSS

SEQ ID NO: 214540 - protein, 91 aa, Zea mays
  Clone ID: MRT4577_127261C.1.pep
NMSATFVDVTGESEQFADLFSYLATLKPELKADADEKNIEKAVEQNKQSELLKKLLSSQQLVLEQGAEKDVEGFFGLQTTLILKHGASNTK

SEQ ID NO: 214541 - protein, 32 aa, Zea mays
  Clone ID: MRT4577_127262C.1.pep
KISTNARFTLFMYKLQPHTERSTSSHRNYRNK

SEQ ID NO: 214542 - protein, 231 aa, Zea mays
  unsure (1)..(231): unsure at all Xaa locations
  Clone ID: MRT4577_127263C.1.pep
MASSFMLCTVVFAACLAAAAAADWSQGTATFYGGVDASGTMGGACGYDNLYNAGYGVNTAALSPTLFNDGASCGQCYLITCDGTRPGGQYCKPGNSITVSATNLCPANYALPNGGWCGPGRPHFDMSQPAWEHIGIFGGGIIPVLYQQVKCSRTGGVRFGLAGSQYFLLVNIQNLGGSGSVGAAWVKGDRTNWXIQMSRNXGANWQALAXLVXQGLSFAVSTTGXQYIQFW

SEQ ID NO: 214543 - protein, 157 aa, Zea mays
  unsure (1)..(157): unsure at all Xaa locations
  Clone ID: MRT4577_127264C.1.pep
MHAFNYEHYLCTYVYMYVLIKELQYIYMWYMHVCLTMIHTIDDTHTGGACGYDNLYNAGYGVNTAALSPTLFNGGASCGQCYLITCDGTRPGGQYCKPGNSITVSATNLCPANYALPNGGWCGPGRPHFDMSQXPAWEHIGIFGGGIIPVLYQQVKC

SEQ ID NO: 214544 - protein, 194 aa, Zea mays
  Clone ID: MRT4577_127265C.1.pep
MVEGKSVQVDVEKGLNQMPNDSNSTSPATMQKMKPDMDDSGRRTESPTPEKPESGREEIVVSSLATNLLSERYKDRLAEKLLGNEDETDDEDDNEFALPDGSQSPVSNELLEKHKNLLTLFNRMESSIRLLRLRKKMTTFTNIATQVEVLTKRKFLYSHLAQMKHLFPEAIQINRILLHDQKSLCMYADMEIHF

SEQ ID NO: 214545 - protein, 51 aa, Zea mays
  Clone ID: MRT4577_127266C.1.pep
STFTSGSPMIHILVGKQFVHPKEHETKDLMGAARGFSSYEPIQTPPLERAP

SEQ ID NO: 214546 - protein, 51 aa, Zea mays
  Clone ID: MRT4577_127267C.1.pep
ICRRLSTIPVIIRRLGRVPVRRDYDSDGQCAATRPSVVPCCPAASVACGVS

SEQ ID NO: 214547 - protein, 42 aa, Zea mays
  unsure (1)..(42): unsure at all Xaa locations
  Clone ID: MRT4577_127268C.1.pep
PKSLFKGVGANIFRAIAGAGXLSGYDQLQILFFGKKYGPGGA

SEQ ID NO: 214548 - protein, 101 aa, Zea mays
  Clone ID: MRT4577_127269C.1.pep
NNIVNFQKIWRSEQEYRHRCALFPKQVVDDSTICSIWRPICPDGYVSVGDVAHVGVHSPHVAAIYRDSDENFALPVGYDLVWRNCVDDYATPLTVWLPRAP

SEQ ID NO: 214549 - protein, 118 aa, Zea mays
  unsure (1)..(118): unsure at all Xaa locations
  Clone ID: MRT4577_12726C.1.pep
MHLSLWKPLSHCAALLLDKXKTTRRGRXGGGGGGRGVRRRAAXLQESKLREALEEASEDGSLAKSRDAALLDGGDGAXRRPWGRSRSLARLHAQRDFLRATAMAAERAFQSPDALPDA

SEQ ID NO: 214550 - protein, 1233 aa, Zea mays
  unsure (1)..(1233): unsure at all Xaa locations
  Clone ID: MRT4577_127270C.1.pep
MSGGSAKREMETGEKAISHGKALSRESGAKGKEESPPRVKSLRSGDKKKKMKKVVYYKTDSLSPSTSGSDAVSVTSKRHERKKYXTAHEGXEVTKITKRETIEGELGRFVLNQGEEPQAMYNRLKTLVNQVRNLESTKWDDHEMVKVILRSLVFRNPTQVQLIHGDPRYKLMSLEEVIGKFVSFELMIKGSKHIVDLEQGDSSTPEAQPVAFKATEEKKEDSTPSRIPIDASKLDNEEMALIIKSFRQILKQRRGKDYKPRSKKVCYKCGKPGHFIAKCPLSSDSDRGDDKKGRRKEKKRYYKKKGGDAHVCREWDSDESSTDSSSYEDAANIAVTKGLLFPNVGHKCLMAKDGKKKKVKSKSSTKYATSSDEANSSDDEDNLRTLFANLNMQQKEKLNELISAIHEKDELLDSQEDFLIKENKKHVKVKNAYALEVEKCEKLSSELSTCHDIIANLRNENARLIAKVDSNVCDDSIPNLRDDNVSLLAKIEELNVSLASLRNEYEKLIAKAKDLDVCNVTVSNLRSENDILHAKIVELKSCKPSTSTVEHVSICTRCRDINVDAIHDHLALIKKQNNHIAQLNAKINEHDLENENFKFARSMLYSGRHPGIKDGIGFQKGDNVKLNAPPKRLSNFVKGKAPMPQDNEGYILYPAGYPEHKIRRIHSRKSHSGPNHAFMYKGETSSSRQSTRAKLPKKKTPIASNDFNISFKTFDASYVLTNKSGKVVAKYVGGKHKGSKTCVWVPKVLVSNVKGPKIVWVYASGGSSWIIDSGCTNHMTGEKKMFSSYEKNQDPQQAITFRDGNQDSLDYNLLSVSQLCKMGYNYLFTDIGVTVFRRSDDSIAFKGVLEGQLYLVDFDRAELDTCLIAKTNIGWLWHRRLAHVGMKNLHKLLKGEHILGLTNVHFEKDRVCSACQAGKQVGVHHPHKNIMTTDRPLELLXGSINRPDSLHKHRRRXEIRSATGPRFKNSQIEGFLEEEGIKHEFSSPYTPQQNGVVERKNRTLLDMARTMLDEYKTSNWFWAKAVNTACYAINRLYLHRILKKTSYELLTGKKPNVSYFRVFGSKCFILVKRGRKSKFAPKAVEGFLLGYDSNTRAYRVFNKSSGLVEVSCDIVFDETNGSQVEQVDLNELDDEEALCVALRNMSIGDVCPKESEEPPQAQDQPSSSMQAAPPTNDEDEAQNDEGEDQGVKPPQEESNDQXGDAHDQDKEDEQVPKPPHPRVHQAIQRDHPV

SEQ ID NO: 214551 - protein, 184 aa, Zea mays
  unsure (1)..(184): unsure at all Xaa locations
  Clone ID: MRT4577_127271C.1.pep
EHVSICTRCRDVDVNAIHDHIALLNXQNDHIXKLDAKIAEHNLRNEKFKFARSMLYNERRPAXKDGIGFQRGDNVKISAPPKRLSNFVKGKAPMPQDNEGYILYPAGYPESKIRRIHSRKSHSGPNHAFMYKGETSSSRQPTHAKLPRKKTPSASXDHNISXFKLLSASXVLTNKSGKVASCRI

SEQ ID NO: 214552 - protein, 46 aa, Zea mays
  Clone ID: MRT4577_127272C.1.pep
ARSTNVRPLYWTNSLLHDVLSYVDRFIDRYLADDHGSPLLWRHYRG

SEQ ID NO: 214553 - protein, 104 aa, Zea mays
  Clone ID: MRT4577_127273C.1.pep
RSFLFFYIKHEQPGILDLRKSAEPRSHGIAAHSHARVVRATLYTKSKKRASASYARHTYRIGQYNQKSRTKSDRRHDLYRHLYTVYLSSSIRWASSSSTWRSLT

SEQ ID NO: 214554 - protein, 1472 aa, Zea mays
  unsure (1)..(1472): unsure at all Xaa locations
  Clone ID: MRT4577_127274C.1.pep
MSGDHAKKMVIGGEKSATSHGKAPSRESANNKKDGSPSRIRSHKSGEKKKMKKVVYYETDSSSPSTSGSDAASVTSKRQERKKYNKIPLRYPCIPKHTPLLSVPLGKPPTFDGEDYSRWSDMMRYHLTSLHKSIWDVVEFGVQVPSVGDEDYDEDEVAQIVHFNSQATTILLTSLSREEYNKVQGLKSAKEIWDVLKTTHEGDEVTKITKRETIEGELSRFRLRQGEKPQEMYNRLKTLVNQVRNLGSKKWDDHEMVKVILRSLVFLNPTQVQLIRGDPRYTLMSPEEVIGKFVSFELMIKGSKKIIEQDGPSTPEAQPVAFKVTKEKKEESTSSRLPIDASKLDNEEMALIIKSFRQILKQRWRKDYKSRSNKVCYKCGKPGHFIAKCPLSSDSDRGDDKKGRRREKKRFHKKKGGDAHVCRKWDSDESSTDSSSNEDAANIAVXVTKGLLFPNVGHKCLMAKDGKRKXSDEDNSSDEEDNLRTLFANLNMQQKEKLNELISAIHEKDELLDTQEDFLIKENKKHVKVKNAYALEVDKCEKLSNELSMCHDIIANLRNENDKLIAKVDSNVCDDLIPNHRDDNVSLLAKIEELNVSLASLKIENEKLIAKARDLDVCNITISNLRSENDILHAKIVELKSCKPSTSTVEHVSICTRCRDINVDAIHDHLALIKKQNDHIAQLNAKINEHDLENEKFKFARSMLYSGRRPGIKDGIGFQKGDNVKLNAPPKRLSNFVKGKALMPQDNEGYILYPAGYPEHKIRRIHSRKSHSGPNHAFMYKGETSSSRQSTRAKLHKKKTPIASNDSNISFKAFDASYVLTNKSGKVVAKYVGSKHKGSKTCVWVYASGGSSWIIDSGCTNHMTGEKKMFSSYEKNQDPQRAITFGDGNQGVTVFRRSDDSVAFKGVLEGQLYLEKSHTQETLKGFLRRTQNEFGLRIKKIRSDNRTEFKNSQIEGFLEEEGIRHEFSSPYTPQQNGVVERKNRTLLDMARTMLDEYKTSDRFWAEAVNTACYAINRLYLHRIFKKTSYELLTGKKTNVSYFRVFGSKCFILVKRGRKSKFVPKAVEGFLLGYDSNTRAYRVFNKSSGLVEVSCDIVFDETNGSQVEQVDLDELDDEEAPCVALRNISIRDVCPKESEEPPQAQDQPSSSMQASPPTQDEDEAQNDEGEDQEEEPPQEESNDQGGARLESIRILLAYATYHGFKLYQMDVKSVFLNGPIKEEVYVEQPPGFEDSEYPNYVYKLSKALYGLKQALRAWIMTQKIEMSMMGELKYFLGFQVKQLQEGTFISQTKYIQDILNKFGMKDAKPIKTPMGTNGHLDLDTGGCKINRKSTSGTCQFLGRSLVSWASKKQNSVALSTAEAEYIAVGHCCAQLLWMRQTLRDYGYKLTKVPLLCDNESAIRMADNPVEHSHTKHIAIRYHFLRDRQQKGDIEIAYINTKEQLADIFTKPLDEQTFNKLRHELNILDSRNFF

SEQ ID NO: 214555 - protein, 64 aa, Zea mays
  Clone ID: MRT4577_127275C.1.pep
TNVKGSIFYCCTNVILCSLHTAPLMTNFFRICFLTAHQHGRTYPSNHKRPTPLSKFMDMKTDSH

SEQ ID NO: 214556 - protein, 328 aa, Zea mays
  unsure (1)..(328): unsure at all Xaa locations
  Clone ID: MRT4577_127276C.1.pep
DSRIEKCEKLSSELSTCREMIDNLRNENASLNAKVDSHVCNVSIPNPRDNSDDLLARIEELNISLARLRVENENLTAKAKELDVCNATISNLRDKNDILHAKIVELNSCKPSTSTIEHVTICTRCRDVDVNAIHDHMALIXQQNDHIAKLDAKXIAEHNLENEKFKFARSMLYNGRRPGIKDGIGFQRGDNVKISAPPKRLSNFVKGKAPMPQDNEGYILYPAGYPEDKIRKIHSRKSHSGPNHAFMYKGETSSSRQPTRAKLPKKKIPNASNEHSISFKTFDASYVLTNKSGKVVAKFVGGKHKGSKTCVWVPKVLVSNAKGPKTVW

SEQ ID NO: 214557 - protein, 100 aa, Zea mays
  Clone ID: MRT4577_127277C.1.pep
CKEGDLHTAYNLYLEMIEKGLVPNLFICSSLVSCFYRKGKFDEANLVLQNLVGTDMIPDISAPRLEIGKVANFIDTVAGGNHHSAKIMWNIVIFGLCKLG

SEQ ID NO: 214558 - protein, 1731 aa, Zea mays
  Clone ID: MRT4577_127278C.1.pep
MSGDHAKKEMDTGDKPATSLEKASSGESRNKGKGKEKKPSSHKLHRSGDKKKKMRKVVYYETDTSSPSTSGSGAPSITSKRHERKKFSKIPLHYPRTSRHTPLLSVPLGKPLTFDGEDYARWSDLMKFHLTSLHKSIWNVVEFGAQVPSIGDEDYDEDEVAQIEHFNSQATTILLASLSREEYNKVQGLKSAKEVWDVLKTAHEGDELTKITKRETIEGELGRFRLRKGEEPQDMYNRLKTLVNQVCNLGSKKWDDHEMIKVILRSLIFLNPTQVQLIRGNPRYTLMTLEEVIRNFVSFEYMIKGSKKINELDDPSTSEAQPVAFKATEEKKEESTLSRQPIDASKLDNEEMALVIKSFRQILKQRRGKDYKPRSKKVCYKCGKPGHFIAKCPISSDSDRGDDKKGRRKEKKKYYKKKGGDAHVCREWDSDESSSDSSDDEDAANIAVTKGLLFPNVGHKCLMAKDGKNKKVKSKSSTRYESSSDDNASDEEDNLLTLFANLNMQQKEKLNELISAIHEKDDLLDTQEDFLIKENKKHVKVKNAYALEVEKCEKLSSELSTCHETIDNLRNENDNLYDNLLAKVDLNGCDASIPNLRNDNDNLLTKIEELNITLGSLRNENKNLLAKAKELDVCNASISDLRSKNDILHAKVVELKSCKPSTSTVQHTTICTRCRDVDINAIHDHMTLIKQQNDHIAKLDAKIAEHDLENEKFKFARSMLYRGRRSGIKDGIGFQQGGNVKLNAPPKKLSNFVKGKAPMPQDNEGYILYPVGYPESKIRRIHSRKSHSGPNHAFMYKGETSSSRQPTRAKFPKKKTPSASNDHDISFKTFDASYVLTSKSGKVVAKYVGGKHKGPKTCVWVYASGGSSWIIDSGCTNHMTGEKKMFSSYEKNQDPQRAITFGDGNQGVTVFRRSDDSVAFKGVLEGQLYLVDFDRAKLDTCLIAKTNMGWLWHRRLAHVGMKNLHKILKGEHILGLTNVHFEKDRICSACQAGKQVGAHHPHKNIMTTDRPLELLHMDLFGPIAYISIGGSKYYLVIVDDYSRFTWVFFLQEKSHTQETLKGFLRRAQNEFGLRIKKIRSDNGTEFKNSQIEGFLEEEGIKHEFSSPYTPQQNGVVERKNRTLLDMARTMLDEYKTSDRFWAEAVNTACYAINRLVFGSKCFILVKRGRKSKFAPKTVEGFLLGYGSNTRAYRVFNKSSGQVQVSCDIVFDEANGSQVEQVDLDEIGDEEAPCIALRNMSIGDVCPKEFEEPPNAQDQPSSSTQASPPTQNEDEAQVDEGQDQEDEPPQDDGNDQGGDANDQDKEDEEPRLPHPRVHQAIQRDHPVDTILGDIHKGVTTISRVAHFCEHYYFVSSIEPHRVEEALQDSDWVVAMQEELNNFTRNEQDEHGVVTRNKARLVAKGYSQVEGLDFGETYAPVARLESIRILLAYATYHGFKLYQMDVKSAFLNGPIKEEVYVEQPPGFEDSEYPNHVYKLSKALYGLKQAPRAWYECLRDFLVDNGFKVGKADPTLFTKTLENDLFMSMMGELKYFLGFQVKQLQEGTFLSQTKYTQDILSKFGMKDAKPIKTPMGTNGHLDLDTEGCKINRKSTSGTYQFLGRSLVSWASKKQNSIALSTAEAEYIAAGHGCVQLLWMRQTLRDYGYKLTKVPLLCDNESAIRMADNPVEHSRTKHIAIRYHFLRDHQQKGDIEIAYINTKDQLADIFTKPLDEQTFNKLRHELNILDSRNFF

SEQ ID NO: 214559 - protein, 66 aa, Zea mays
  unsure (1)..(66): unsure at all Xaa locations
  Clone ID: MRT4577_127279C.1.pep
LPSCLLCWSLWASFSPSCLFSLVSSPDLVPAHGGGGMVGFXIGFLLYSRLSSLASCSWALVSLSPS

SEQ ID NO: 214560 - protein, 69 aa, Zea mays
  unsure (1)..(69): unsure at all Xaa locations
  Clone ID: MRT4577_12727C.1.pep
SPPNLARSGFFLSLKGNLFDRGWYSKEIKPGEKWWKSLGFKASGPGSCWLKRTRVLPGRPPKKIKKKXL

SEQ ID NO: 214561 - protein, 224 aa, Zea mays
  unsure (1)..(224): unsure at all Xaa locations
  Clone ID: MRT4577_127280C.1.pep
NGYGGFPGHEHSFSPHRPYLTLYVGLRPRAQDLPNEAKFKAPYRSFTYXASTRSFGLWYPRGSTYSLIXVSPADCAECKINRKSTSWTCQFLGGSLVSNASKSPNSRPLSTTEAEYIAAGHCCAQLLWMRQTLRDYGYKLTKVPLLCDNESAICMVDNPVEHSHTKHIAIRYHFLWHHQQRGDIEIAYINTKEQLADIFTKPLDDKTFTKLRHELNILDSRNFD

SEQ ID NO: 214562 - protein, 814 aa, Zea mays
  Clone ID: MRT4577_127281C.1.pep
MATQNQKYSSKKAVVSSSPAATVVEDEPQVQERVTEEIMNPIPSSLPSIPTDDVSPQPTPVYDINRLPHDPGERMPIQSYPINDQDAIRRLYILKGPFQPYAHEFPKRKIGKRYRQFNFVWFHKHHWLEYSIKKDSVFCFICYLFKDNKCKSKGADAFVIDGWRNWNIGEKALLKHVGSSAHNAAQERYSGFVNPKATIDYHIDKWSKEDLRLYKIRLTYSLRCLKFLLRQGLAFRGHDESEESNNRGNFLELLKFLASNSEEVKKYVLENAPGNCTLTSPKIQKQIIHCCAIETRKKIIEDLGEEPYAILADESSDISHKEQLALCLRYVDKLGRPCERLIGVIPVDDTSSLSLKEAIEALLVSHGLSMAQIRGQGYDGASNMKGEIKGLKTLIMKESPSAYYIHCFAHQLQLVLIAVAKGNTDCVTFFDQITLLLNIVGVSCKRHGMLRNARLENIRKALDCGELETGTGLNQEMGLPRPGETRWGSHYKTVCSIISMYPTIRDVLITLGADISHKGDWTKIHFVLGAFESFEFVFFAQLMFVILGYTNELSECLQRREQDIINAISLVNVAKSRMQELRSNGWDQFLQRVTLFCNQYGIQVPAMEDNYVPYGKSARYTRNQTNDDHFRREIYIGVIDQISQELDNRFDEVNMELLSCMSALDPSDSFASFDAQKIRRLAEFYPNDIFGNDLLKLELQLNNYIDAMRQDDNFKGLHCLVDLSVKLVEKKRHIVFDMVFLLLKLILLLPVATASVERAFSAMSLVKTKLRNKMGDSLLDDCLVTFIERDLFFKVDEDDIIETFMAFRKRRPNK

SEQ ID NO: 214563 - protein, 92 aa, Zea mays
  unsure (1)..(92): unsure at all Xaa locations
  Clone ID: MRT4577_127282C.1.pep
NGSFFLQGRRNPSAAASDPXAYVWQRPKSSRARTDGLWLCHDLVVNSDGRKIHAVLLWPVRAGAYNHNDERFLCFHQKTSEVQLKLMIHTSI

SEQ ID NO: 214564 - protein, 244 aa, Zea mays
  Clone ID: MRT4577_127283C.1.pep
RPGRVDAQSAFTYVTSPNVASWTSLINGLAQNGHWLEALSQFGRMLKHHVKPNEITFLGLLMASARAGLVNKGMKIFYSMENFGLVPTVQHCTCVVDLLGRTGRTREAEKFIYEMPLPADGVIWGALLTACWYSMDLEMGEKVAQRLFFMGTKHRSAYVAMSNIYAKLGKWEDVVKVRTWLRSLNAEKEPGCSWIEIKGIVHVFLVDDQNHPERETMYSMLEALVSHISLHSKPDDMVIQSLNS

SEQ ID NO: 214565 - protein, 89 aa, Zea mays
  Clone ID: MRT4577_127284C.1.pep
PSAAALLVMTVAAETVMSSKAIKLGTVRVVTVTVLYTAVHSSEVTSPIEEVSARTLGSRMLVPVKPPPSAAGGTYVWAQPGFPLVFSCY

SEQ ID NO: 214566 - protein, 193 aa, Zea mays
  Clone ID: MRT4577_127285C.1.pep
MGLVKEGADMEEGTLEIGIEYRTVSGVAGPLVILDKVKGPKYQEIVNIRLGDGTTRRGQVLEVDGEKAVVQVFEGTSGIDNKYTTVQFTGEVLKTPVSLDMLGRIFNGSGKPIDNGPPILPEAYLDISGSSINPSERTYPEEMIQTGISTIDVMNSIARGQKIPLFSAAGLPHNEIAAQICRQAGLVKRLEKG

SEQ ID NO: 214567 - protein, 224 aa, Zea mays
  unsure (1)..(224): unsure at all Xaa locations
  Clone ID: MRT4577_127286C.1.pep
TLEVEKCEKLSSELSTCHETIDNLRNENVNLLAKVDSNVCDISIPNLKNNNDDLLAKIEELNISLXASLRIENEKLLAKAKDFDVCNATISDIKTKNDILHAKVVKLKSCKPSTSTVEHTSICTRCRDIDVNAIHDHMALIKQQNDHIAXLDAKIAEHDLVNEKNXFARSMLYRGRRPGIKDGIGFQQGGNVKINAPHKKLSNFVKGKALLPQDKEGNILYPAG

SEQ ID NO: 214568 - protein, 43 aa, Zea mays
  Clone ID: MRT4577_127287C.1.pep
AEYTVLSALATIAYTAMSLEMYPGARIPRYSVAFKCYMSHFMT

SEQ ID NO: 214569 - protein, 408 aa, Zea mays
  Clone ID: MRT4577_127288C.1.pep
MARTMLDEYKTPDRFWAEAINTACYSINRLYLHRILKKTSYELLTEASCIALRNMSIGDVCPKESEEPPQTQDQPSSSMQASPPTQGEDEAQEEEDEDQDNEPPQEEDIDQGGNDNEDKEDEQEIRDQRPPHPRVHQAIQRDHPINSILGDIHKGITTRSRVAHFCEHYSYVSSIEPYRIEDAQRDLDWVVAMQEELNNFTRNEVCHLVLCPNQNVVGTKWVFRNKQDEHGVLTRNKAQLVAKGYSQVEGLDFDETYAPIARLESIRILLAYATYHGFKLYQMDVKSAFLNGPIKEEVYVEQPPGFEDSEYHNHVYKLSKALYGLKQAPRAWYECLRDFLITNGFKVGKADPTLFTKTVAKDLFICQIYVDDIIFGSTNKSTCEEFSRIMIQKFKMSIEASRSFGTQM

SEQ ID NO: 214570 - protein, 479 aa, Zea mays
  Clone ID: MRT4577_127289C.1.pep
MEDALGSAVGPHFSGLRLDSRRLSLSPSSSPSRSASGNGTLVAAPGLAFPKAEDGTRKPFVIGVCGGTASGKTTVCDAIIQQLHDHRVALVNQDSFYHGLTEEQSEHVQDYNFDHPDAFDTDRLLECMGKLTSGQSVNIPIYDFKNHRRCSEKFRKVNESDVIILEGILVFHDQRVRDLMDMKIFVDADADTRLARRVRRDTVERGRDVTSVLEQYVRFVKPAFDAFVLPSKKYADVIIPRGGDNLVAIDLIVQHINTKLGQHNLCKAYPNVFVVHTTFQIRGMHTLIRDKNITTPDFVFYSDRLIRLVVEHGLGHLPFTEKQVVTPTGSLYMGVDFCKKLCGVSIIRSGESMENALRACCKGIKIGKILFHRIGDNGQQLIYHKLPVDIAERHVLLLDPVLGTGNSANQAIELLMSKGVPEDRIIFLTLVSAPEGIHCVCKRFPHLKIVTSEIDSGLNDEYRVIPGLGEYGDRYFGTD

SEQ ID NO: 214571 - protein, 84 aa, Zea mays
  Clone ID: MRT4577_12728C.1.pep
HEVGPPTTFSRSTLPYRLLPSNLLLFLNPTFLPVPRRPPSQHPYVEYGWFAGGSRTTGEVPPKLKAECENAPRTVTPAATEVFM

SEQ ID NO: 214572 - protein, 1682 aa, Zea mays
  unsure (1)..(1682): unsure at all Xaa locations
  Clone ID: MRT4577_127290C.1.pep
MSRELAKKEMKTDDKPATSHGKASSEESRNKKKGKEKKASSHKSHRSGDKKKKMRKVVYYETDTSSPSTSGSDAPSITSKRHERKKFSKIPLHYPRTSRHTQLLSVPLGKLPTFDGEDYARWSDLMKFHLTSLHKSIWNVVEFGAQVPSVGDEDYDEDEVAQIEHFNSQATTILLASLSREEYNKVQGLKSAKEVWDVLKTAHEGDELTKITKREMIEGELGRFRLLQGEEPQDMYNRLKTLVNQVRNLGSKKWDDHEMVKVILRSLIFLNPTQVQLIRGNPRYTLMTPEEVIVNFVSFEFMIKGSRKINELDGPSTSEAQPVAFKATEEKKEESTPSRQPIDASKLDNEEMALVIKSSRQILKQRRGKDYKPRSKKVCYKCGKPGHFIAKCPISSDRGDDKKGRRKEKRYYKKKGGGAHVCREWDSDESSSDSSDDEDAANIAVTKGLLFPNVGHKCLMAKDDKKKKVKSKSSTRYESSSDDYASDEEDNLRTLFANLNMQQKEKLNELISAIHEKDDLLDTQEDFLIKENKKHVKVKNAYALEVEKCEKLSSELSTCHETIDNLRNENANLLAKVESNVCNVSIPNDNIELLSKIEELNISLASLRIENKKLIARAKDFDVCNVTISDLRDKNDILCAKIVELNSCKPSTSTVEHTSICTRCRDVDIDAIHDHMVLIKQQNDHIAKLDAKIAEHEIENEKFKFARSMLYSGRRPGIKNGIGFQQGGNVKLNAPPKKLSNFVKGKAPMPQDNEGYILYPAGYPESKIRRIHSRKSHSGPNHAFMYKGETSSSRQPTRAKLPKRKTPSASNDHDISFKTFDASYVLTNKSGKVYASGGSSWVIDSGCTNHMTGEKKMFSSYEKNQDSQRAITFGDGNQGVTVFRRSDDSIAFKGVLEGQLYLVNFDRVELDTCLIAKTNMSWLWHRRLAHVGMKNLHKLLKGEHILGLTNVHFEKDRICSACQAGKQVGAHHPHKNIMTTDRPLELLHMDLFSPIAYISISGSKCYLVIVDDYSRFTWVFFLQEKSHTQETLKGFLRRAQNEFGLRIKKIRSDNGTEFKNSQIEGFLEEEGIKHEFSSPYTPQQNGAVERKNRTLLDMARTMLDEYKTSDRFWAEAVNTACYAINRLYLHRILKKTSYELFTGKKPNISYFRVFGSKCFILLKRGRKSKFAPKTVEGFLLGYDSNTRAYRVFNKSSGQVEVSCDVVFDETNGSQVEQVDLDEXRNMSVGDXVCPKESEEPPNAQDQPSSSTQASPPTQNEDEAQVDEGEDQANEPPQDDDNDQGGDANYLDKEDEEARPPHPRVHQAIQRDHPVDTILGDIHKGVTTRSRVAHFCEHYSFVSSIEPHRIEEALQDLDWVVAMQEELNNFTRNEVWHLVPRPNQNVVGTKWVFRNKQDEHGVVTRNKARLVAKGYSQVEGLDFGETYAPVARLESIRILLAYATYHGFKLYQMDVKSAFLNGPIKEEVYVEQPPGFEDSEYPNHVYKLSKALYGLKQAPRAWYECLRDFLITNGFKVGKADPTLFTKTLENDLFVCQIYVDDIIFGSTNESTCEEFSRIMTQKFEMSMMGELKYFLGFQVKQLQEGTFLSQTKYTQDILSKFGIKDAKPIKTPMGTNGHLDLDEGGKPVDQKKEHIGDLPVLRKILGVLGFKEAKFRSSFNRRSRVYCRRILLRAIALDEANP

SEQ ID NO: 214573 - protein, 153 aa, Zea mays
  unsure (1)..(153): unsure at all Xaa locations
  Clone ID: MRT4577_127291C.1.pep
MFCFWTLCLVQVSIAIHNPIFFIVSSFRMFVAIAKQCQLAIDGSFHLVSPGNSANQAIELFMSKGVPEDRIIFLTLVSVKFPLLSYRWLFLHLCVPFGXSLSLXKQAPEGIHCVCKRFPHLKIVTSEIDSGLNDEYRVIPGLGEYGDRYFGTD

SEQ ID NO: 214574 - protein, 111 aa, Zea mays
  Clone ID: MRT4577_127292C.1.pep
SHHHLNWTHLDVGMPQTTHFSQAFILAPAHVIFWAASGCWAGQIGARKSAALILRDWLGRPNFGGAPKKKLDSSQVHYGSAQIGGGHEPNSGLAWAGFLTKKARNVISSPL

SEQ ID NO: 214575 - protein, 98 aa, Zea mays
  unsure (1)..(98): unsure at all Xaa locations
  Clone ID: MRT4577_127293C.1.pep
NIYIPQNKFHSFNKISHSIPYLYNHISLLSFHSISKPYYLYYIKKISYIXLTLFLSYFIHQIYKLSSFNLFSNISNQILSILFIIPPKPYILILSINT

SEQ ID NO: 214576 - protein, 77 aa, Zea mays
  Clone ID: MRT4577_127294C.1.pep
GPPEFHFKKKIPPGPQKQKSQPPKKNYNFFLGGSNDPHRGIGLPLKIPKFWPHWEGFGLAIPGTFPWKNRGKKTLVK

SEQ ID NO: 214577 - protein, 54 aa, Zea mays
  unsure (1)..(54): unsure at all Xaa locations
  Clone ID: MRT4577_127295C.1.pep
HKPIPQRMPVPETPPVCSPAQSKLLDXILGQISKARRRKQLVXVTFDQPDXQXE

SEQ ID NO: 214578 - protein, 211 aa, Zea mays
  Clone ID: MRT4577_127296C.1.pep
MLSISPRLHIRHPSPTTAEFTVTTLRPLPPALHTVVLISRAVLSIFTPLLLHARLTLHPLLAYAAPSLLKIIPPSYLRAPTSIASVAQDIPLSVLVPASIAVLWLSSRRGYVSESILVMRGLGVQTSESPGSYLAGTATRFIPTEKIQDILLNEAFLGFEVRYYLIVIVEGEDDVVVVFPGLLPRRKIVEEVWRGVRRCLYEQRGEDKVQA

SEQ ID NO: 214579 - protein, 447 aa, Zea mays
  unsure (1)..(447): unsure at all Xaa locations
  Clone ID: MRT4577_127297C.1.pep
LAQAIRDSVSATVDRTPLNPRARCCLLSQISFAAKDSEFSDWDGDILAVAVTDKDVQVQPHVSGSEFENAVLRRLDVQLGGLLRAAAAEEEFAGRPGQSVVLRVRGQRFKRVALVGFAXATATATPGAXHGLGESVASVARAARATSAAILVADPAVVRPESRLNAAAAIASGTVLGLYEDNRYKSEWEKVHLKQVDLIGLGSGPELDQKLRHANRLSSGVMLARDLVNSPANVLTPGALAEAAAKIASTYSDVFTATILDAAKCRELKMGSYLAVAAASETNPPYFIHLCYKPRGGDVRRKLALVGKGITFDSGGYNIKAVPVATIELMKKDMGGAAAVFGAAEVLGQIKPPGVEVHFISAASENMISGSGMRPGDIVTASNGKTIEVDNTDAEGRLTLADALVYACNQGVDKIIDLATLTGAIRVALGPSIAGILTPSDELAEEF

SEQ ID NO: 214580 - protein, 78 aa, Zea mays
  Clone ID: MRT4577_127298C.1.pep
HHVQDTMKNEARINWIEKEIELNMQELAQSLLLRCDEKTSNKKTKKTLWDVLRSLYYATHSPQHMIDRHVSRVIFEPV

SEQ ID NO: 214581 - protein, 57 aa, Zea mays
  Clone ID: MRT4577_127299C.1.pep
TIPYLCTPPHHLHIITHPILPPDPHHHISTISSMNIIQSPIITYPLRSHTSLLPHTL

SEQ ID NO: 214582 - protein, 123 aa, Zea mays
  Clone ID: MRT4577_12729C.1.pep
ANTLFSFSFVPSIMYRIQCLLLSAKLKIQLGPRMQQFNITAMKILEALTTKECQEKFSMESLETLGDSFIKYVTGQNLFNKYKHREDMLTSMREEKVSNPALCQLACKSEIVGYIRGELFNPQ

SEQ ID NO: 214583 - protein, 104 aa, Zea mays
  Clone ID: MRT4577_1272C.1.pep
AFDRPCRATIHLWQVSNSPSSSVGEKMVMECVCMYVYAQGARARLWASHSRDAISCIQYLSYNTNSEKLLVKCALWCGHCSMSVATGHGPLPFGASRSRHALQP

SEQ ID NO: 214584 - protein, 51 aa, Zea mays
  unsure (1)..(51): unsure at all Xaa locations
  Clone ID: MRT4577_127300C.1.pep
QSKVMGDDKVKVVAWQEKEXEPSQGVVDVAHLVQVNWPGAARHGRPYLVQE

SEQ ID NO: 214585 - protein, 70 aa, Zea mays
  Clone ID: MRT4577_127301C.1.pep
RFSAQIQPEANRKIIWPCHFPKEALQLPRRGGKKKDGCFLGVHRGSVKYVQGSDVQQCSKYVHIHSYLGY

SEQ ID NO: 214586 - protein, 59 aa, Zea mays
  Clone ID: MRT4577_127302C.1.pep
ATGPASTSSTFKTDNKPFSPPPRSWGQGRRCRKEESWSKSPDTAHVFTRALGYIRKING

SEQ ID NO: 214587 - protein, 70 aa, Zea mays
  unsure (1)..(70): unsure at all Xaa locations
  Clone ID: MRT4577_127303C.1.pep
MVAFRLHQYQVEGRALPTPGDXHPKIYTMKLWATNESRAKSKLWCFLRKXKKVKNSNGQDLHIIEIFERN

SEQ ID NO: 214588 - protein, 31 aa, Zea mays
  Clone ID: MRT4577_127304C.1.pep
TKLHTSEIIVIVIISTFSLIISIFVLLLLVV

SEQ ID NO: 214589 - protein, 65 aa, Zea mays
  unsure (1)..(65): unsure at all Xaa locations
  Clone ID: MRT4577_127305C.1.pep
CIHLLAILLQGPWTQSGVPRSALFLATGSHVWFYLPDYVCISYNVLAYTVGGRPTPKRQXMYPMF

SEQ ID NO: 214590 - protein, 933 aa, Zea mays
  unsure (1)..(933): unsure at all Xaa locations
  Clone ID: MRT4577_127306C.1.pep
MKKVVYYEIDSSSPSTFGSDAPSVTSKRHERKKFSKIPLRYPRISKRTPLLSISLGKPPIFYGEDYCMWSDKLRHHLTSLHASIWDIVEFGAQVPPIGDEDYDSNEIAQIWHFDSQATTILLASLCREEYNKVQWLKSAKKIWDVLKTAHEGDEVTKTTKRETIEGELGRFVLNQGEEPQAMYNRLKTLVNQIILRSLIFRNPTQVQLIRGDPRYKLMSPEEVIGKFVSFELMIKGSKQIVNLEQGDTSTPEVQPIAFKATEDKKEESTSSRLPIDASKLDNEEMTLIIRSFRQILKQRRGKDYKPRSKRVCYKCGKPRHFIAKCPMSSDSDRDNDKKGMKKEKNKYYKKKGDDAHVCWEWDSSSDEDAANIIVNKGLLFPNVGHKCYMAKDGKKKRVQARTTXKYTTSSDEXGKAPKAQDNEGYILYPAGYPEHKIRRSHARKSHSVSHHAFMYKNEASSSRHSTYVKMSKKITPTASNEPNVSFKTFDASYALTNKSGKIVAKYVGGKHKGSKTRVWVPKVYASWSSSWIIDSRCTNHMTWEKRMFSSYEKNDDPQRVITFGDGNQDLGVTVFRRSDDSIAFKGVLEGQLYLVDFNRAELDTCLIAKTNMGWLWHRRLAHVGMKNLXKLLKGEHILGLTNVHFEKDRVCSTCQAGKQVGAHHXKNIMTTDIPLELLHMDLFGPIAYISISGSKYCLVIVDDYSRFTWVFFLQEKSHTQETLKGFLRRAXNEFGLRSKXIRSDNGTEFKNSQIEGFLEEEGIKHEFSSPYTPQQNGVVERKNXTLFDMARTMLDEYKTSDRFWAEAVNTACXQSTGYIYTXLKKTSYELLTGKKPNISYFRVFGSKCFILVKRGRKSKFAPKTVEGFLLGYDSNTRAYRVFNKSSGQVEVSCDVVFDETNGSQVEQVDLDEIGDEEAPXIALRNIPLGRGPP

SEQ ID NO: 214591 - protein, 1283 aa, Zea mays
  Clone ID: MRT4577_127307C.1.pep
MSGDHAKREIVTGDKPASSGRTLLRESGNKHKEESSSSIKSHRRGDKKKKMKKVVYYETDSSSTTSKRHKRKKYKEYNKVQGLKSAKEIWDVLKTTHEGDEVTKISKRETIEGELGRFVLNKGEEPQAMYNRLKTMVNQVRNLGSTKWDDYEMVKVILRSLVFCNPNQVQLICGDPRYKLMSPDEVIGKFLSFELMIKDCKHIVNLEQDTTSTPEVQPVAFKATEKEKRESTPSRLPIDASKLDNEEMALIIKSFRQILKQRRGKDHKPRPRGPISSDSERGEDKKEKKKEKKRYYKKKGGDAHVCREWDSDESSTDSSSDEDAANIAVNKGLLFPNIGHKYLMAKDSKKKKEVEKCENLTKELSICRDSISNLRTENASLIFKVEKLNVCNDSISSLRNENGSLNAKIDELNVCNDSISCLRNENVILHAKIEELNVCKPSTSTVENITICTRCKDVNIEAINNHLALIKQQNGHIAQLTAKINEHEIENEKFKFARSMLYNGRRPGIKDGIGFQQGGNVKLNAPKRLFNFVKGKAPMVQDNKGYILYPANYSEHKIRKIHASKPHTVSHHAFMYKNEASSSRHTSHVKMPRKKIPTVSNEHNISFKTFYASYILTNKSSKIVVKYVGGKHKSPQTCVWVPKVYASGGSSWIIDIGYTNHMTGEKRMSSSYEKNKDPQRAITFGDGNQGLVKDVGVTVFRRSDDSMTFQGVLEGQLYLVDFNDNKAELDTCLIAKTNMGWLWHRRLAHVGMKNLHKLLKGEHIFGLTNVHFEKDRVCSACQAGKQVGTYHPHKNIMTTDRPLELLHMDLFGLIAYISIGGSTLKGFLRRAQNEFGLRIKKIKSDNGTKFKNSQIEGFLEEEGIKHEFFSPYTPQQNGVVERKNRTLLDMARTMLDEYKTPDRFWAEAINTACYSINRLYLHRILKKTSYELLTGKKPNVSYFRVFGSKCFILINRGRKSKFASKAVEGFLLGYDSNTRAYRVFNKSTRLVVVSCDIMFDETNGSQVEQAPCIALRNMSIRDVYPKESEEPPQTQGQSSSSNQASPPTQDEDQAQDDEDEDQEVEPPQEETYRVEDALRDPDWVLAMQEELNNFTRNGVWHLVPRPNQNIVGTKWVFRNKQDEHGVVTRNKAQLVAKGYSQVEGLDFDETYAPIARLESIRILLAYATYHGFKLYQMDEKSAFLNGPIKEEVYVEQPPGFEDSEYPNYVYKLLKALYGLKQAPRAWYECLRYFLITNGFKVGKVDPTLFTKTVAKDLFVCQIYVDDIIFGSTNKSKSRLEGGG

SEQ ID NO: 214592 - protein, 711 aa, Zea mays
  unsure (1)..(711): unsure at all Xaa locations
  Clone ID: MRT4577_127308C.1.pep
MSGDHAKKEMETGEKPTTSHGSTSSEESRTKRKEKKDSSKGKEKKSSSHKEKKEKSSSHKPRRSGDKKKRMRKVVYYETDSSSASTSGSDAASVTSKRQERKKYSKIPLRYPRISKHTPLLSVPLGKPPTFDGEDYARWSDLMRFHLTSLHKSIWDVVEFGAQVPSVGDEDYDEDEVAQIEHFNSQATTILLASLSREEYNKVQGLKSAKEVWDVLKTAHEGDELTKITKRETIEGELGRFRLRKGEEPQNMYNRLKTLVNQVRNLGSKKWDDHEMVKVILRSLIFLNPTQVQLIRGNPRYTLMTPEEVIGNFVSFECMIEGSRKINELDDPSTSEAQPVAFKVTEEKKEESTSSRTPIDASKLDNEEMALVIKSFRQILKQRRGKDYKSRSKKVCYKCGKPGHFIAKCPLSSDSDRGDDKKGRRKEKKRYYKKKGGDAHVCREWDSDESSSDSSDDEDAANIAVTKGLLFPNVGHKCFMAKDDKKKKDDLLDTQEDFLIKENKKHVKVKNAYALEIEKCEKLSSELSTCHETLDNLRNENANLLAKVDSHVCTSNPRDVNDDLLARIEELNISLDSLRIENEKLLAKAKDFDVCNVXISNLRSENDILHAXRCRDVDINAIHDHMSLIKQQNDHIAKLDAKIAKHNLENEKFKFARSMLYNGRRPGIKDGIGFQRGDNVKLSVPPKRLSNLVKGKALMPQDNEGYILYPA

SEQ ID NO: 214593 - protein, 293 aa, Zea mays
  Clone ID: MRT4577_127309C.1.pep
MKKEVYYETDSSLPSTSGSDAPTVTSERHERKKYCKIPLRYPRISKRTPLLSVPLGKPPVFDGEDYCMWSDKMRHHLTSLHASIWDIVEFGAQVPSVGDEGYDSDEVAQIRHFNSQATTILLASLSREEYNKVQGLKSAKEIWDVLKTAHEGDEVTKITKRETIEGELGRFILNQGEEPQAMYNRLKTLVNQVRNLGSTKWDDHEMVKVILRSLIFHNPTQVQLIRGDPRYKLMSPEEVMGKFVSFELMIKGSKQIVEQGGTLKRPDPLGLKCDTITSPRRLVITFLTKHSRR

SEQ ID NO: 214594 - protein, 108 aa, Zea mays
  Clone ID: MRT4577_12730C.1.pep
GDSSQSIFDSKPEIDLVDHFISSSLGQQRVGVQHPSGQRDPPHVQDPVERYISASLSWVVPKWPLVTAPSLVLVYVKNQCDRCPCTLDPCWFWFTLSYVMFNLCATVL

SEQ ID NO: 214595 - protein, 1171 aa, Zea mays
  Clone ID: MRT4577_127310C.1.pep
MTPEKVIGNFVSFELMIKGSKKINELDGPSMSEAQPIVFKATEEKKEESTPSRTPIDASKLDNEEMALIIKSFRQILKQRRGKDYKPRSKKVCYKCGKLGHFIAKCPLSSDSDRGDDKKGRRKEKKRYYKKKGGDAHVCREWDSDESSTDSSDEDAANIAVTKGLLFPNVGHKCLMAKDGKKKKVKSRSSTKYETSSDEDDASNEEDNLRILFANLNMQQKEKLNELISAIHEKDDLLDTQEDFLIKENNKHVKVKNAYALEVEKCEKLSSELSTCHDTIANLRNENAQLISKAKDFDGCNVTIFNLRSENDILHAKVIELKSCKPSTSTVEHVSICTRCRDVDIDAIHDHMVLIKQQNDHIAKLDAKIAEHELENEKFKFARSMLYSGRRPGIKDGIGFQKGDNVKLNAPPKKLSNFVKGKSPMPQDNEGYILYPTGYPESKIRRVHSRKSHSGPNHAFMYKGETSSSRQSTHAKLPKKKTPNASNDHSISFKTFDASYVLTNKSGKVYASGGSSWIIDSGCTNHMTGEKKMFSSYKKNQDPQRAITFGDGNQGLVKGVTVFRRSDDSIAFKGVLEGQLYLVDFDKAELDTCLIAKTNMGWLWHRRLAHVGIKNLHKLLKGEHILGLTNVHFEKDRICSACQARKQVGVHHPHKNIMTTDRSLELLHMDLFGPIAYISIGGSKYCLVIVDDYSRFTWVFFLQEKSHTQETLKGFLRWAQNEFGLRIKKIRSDNGTEFKNSQIEGFLEEEGIKHELSSPYTPQQNGVVERKNKTLLDMARTMLDEYKTSDRFWVEAVNTACYAINRLYLHRILKKTSYELLTGKKPNISYFRVFGSKYFILVKRGRKTKFAPKTVEGFLLGYDSNTRAYRVFNKSFGQVEVSCDVVFDETNGSQVEQVDLDEIGDEEAPCIALRNMSIGDVCPKESGEPPSAQDQPSSSTQPSPPTQNEDEAQVDEEEDQRDEPPQDDGNDQGGDANDQDKEDEEPRPPHPRVHQAIQRDHPVDTILGDIYKGVTTRSRVAHFCEHYSFVSSIEPHKECQNVVGTKWVFRNKQDEHGVVTRNKARLVAKGYSQVEGLDFGETYAPVARLESIRILLAYATYHGFKLYQMDMKSAFLNGPIKEEVYVEQPPGFEDSEYPNHVYRLSKALYGLKQAPRAWYECLRDFLIANGF

SEQ ID NO: 214596 - protein, 53 aa, Zea mays
  Clone ID: MRT4577_127311C.1.pep
VSCLKEKLFICISSSESFVAAILNDNLIPLASLSCIILCYSSLVIIGFCFICS

SEQ ID NO: 214597 - protein, 226 aa, Zea mays
  unsure (1)..(226): unsure at all Xaa locations
  Clone ID: MRT4577_127312C.1.pep
RLLEIEKCEKLSSELSTCHETIDNLRNENAKLLAKVDSHVCNVSTSNPRNVNDDLLARIEELNISLASLRNENEKLLAKAKDFDVCDATISDLRSKNEILHAKVVELKSCKPSTSTVEHTSICTRCRDVNIDAIHDHMALIKQQNDHIAKLDAKIAEHNLENETFKFARSMLYNSRRPGIKDDIGFQRGGNVKLNAPXKTLSNFVKGKAPEPQDNEGYIINPDGYP

SEQ ID NO: 214598 - protein, 532 aa, Zea mays
  Clone ID: MRT4577_127313C.1.pep
MSGASAKREIGTGEKPATSNGKAPSGESANKVKGSSSHNKSRQSGDKKKKMKKVVYYDTDSSSPSTSGSNTPSVTSKRHERKKFSKIPLRYPRISIRTPLLSVPLGKPPMFDGEDYNMWSDKMRHHLTSLHTSIWDVVEIGVQVPSPGDEDYDSDEVAQIRHFNSQATTILLASLSREEYNKVQGLKSAKEIWDVLKTAHEGDGGSKMIIEQGDSSTPEAQLVAFKATEEKKEDSTPSRIPIDASKLDNKEMALIIKSFRQILKQRKGKDYKPRSRKVCYKCGKPGHFIAKCPLSTDSDKGDDKKGKRGEKKRYYKKKGGDAHVCREWDSDESSTDSSSDEDAANIAVTKGLLFPNVGHKCLMAKDGKRKKVKSKSSTKYETSSDEDNSGVEEDNLRTLFANLNMQQKEKLNELISAIHEKDELLDSQEDFLIKENKKHVKVKNAYALEVEKCEKLSSELSTCHDVISNLRNENAKVIVKVDSNVCDVSIPNLIDDNVSLLAKIEELNVSLASLKIENEKLIAKAKDLDVCN

SEQ ID NO: 214599 - protein, 214 aa, Zea mays
  unsure (1)..(214): unsure at all Xaa locations
  Clone ID: MRT4577_127314C.1.pep
MASRILLPLLVLLLLFLGPHCSTGAAARRQLQQARRARDPNSQVKFDFSPFLIQYKSGRVKRLMGTDVVAASTDARTGVTSRDVTIDPSTGVAARLYLPSLRARAPVLVYFHGGAFVVESAFTPVYHAYLNTLAARAGAVAVSVNYRLAPEHPLPAAYDDSWAALRWVLASAASDPWLSRYGDLSXRLFLAGDSAGGNIAHNLALRAGEEGLDN

SEQ ID NO: 214600 - protein, 53 aa, Zea mays
  Clone ID: MRT4577_127315C.1.pep
MDVGPSSLRHLGLKLLLLLLLLPLRGQANTGCYGIPGMPGLPGAPGNDGYDGL

SEQ ID NO: 214601 - protein, 102 aa, Zea mays
  unsure (1)..(102): unsure at all Xaa locations
  Clone ID: MRT4577_127316C.1.pep
IKMVRGSLLITTTTTRGEFNKWFLIPQNXQDAIDTVTPYQLNTKEQHHQQPIHCSNKKEKERKGSQACVPKGDSHQQLYDICFLNKLYSVPQQLTTSKIEPK

SEQ ID NO: 214602 - protein, 1921 aa, Zea mays
  Clone ID: MRT4577_127317C.1.pep
MSGDHAKKEMETGEKPTTSQGSTSSEESRTKRKEKKKISSNKGKEKKSSSHHKEKKEKSSSHKPHRSGDKHKRMRKVVYYETDTSSPSTSGSDAASVTSKRQERKKYSKIPLRYPRISKHTPLLSVPLGKPPTFDGEDYARWSDLMRFHLTSLHKGIWDVVEFGAQVPSVGDQDYDEDEVAQIEHFNSQATTILLASLSREEYNKVQGLKNAKEVWDVLKTAHEGDELTKITKRETIEGELGRFRLHKGEEPQHMYNRLKTLVNQVRNLGSKKWDDHEVVNVILRSLIFLNPTQVQLIRGNPRYTKMTPEEVIGHFVSFECMIEGSRKINELGDPSEAQPVAFKATEEKKEESTPSRQPIDASKLDNEEMALVIKSFRQILKQRRGKDYKSRSKKVCYKCGKPGHFIAKCPISSDSDRGDDKKGRRKEKKRYYKKKGGDAHVCREWDSDESSSDSSDDEDAANIAVTKGLLFPNVGHKCLMAKDGKKKVKSKSSTKYESSSDDNASDEEDNLRSLFANLNIAQKEKLNELVSAIHEKDDLLDSQEDCLIKENKKHVKVKKAYALEIEKCEKLSSELSTCREMIDNLRNENAILNAKVDSHVCNVSIPNLRDDNVDLLAKIDELNVSLASLRLENENLIAKAKDFDVCKVTISNLKDKNDILHAKIVELDSCKPSTSTIEHVTICARCRDIDVNAIHDHIILIKQQNDHIAKLDAKIAEHNLENEKFKFARSMLYNGRRPGIKDGIGFQRGDNVKISAPPKRLSNFVKGKAPMPQDNEGYILYPAGYPEDKIRKIHSRKSHSGPNHAFMYKGETSSSRQPTRAKLPRKKTPNASNDHAISFKTFDASYVLTNKSGKVVAKFVGGKHKGSKTCVWVPKVLVSNAKGPKTVWVYASGGSSWILDSGCTNHMTGEKRMFSSYEKNQDPQRAITFGDGNQGVTVFRRSDDSIAFKGVLEGQLYLVDFDRAELDTCLIAKTNMGWLWHRRLAHVGMKNLHKLLKGEHILGLTNVHFEKDRICSACQAGKQVGTHHPHKNIMTTDRPLELLHMDLFGPIAYISISGSKYCLVIVDDYSRFTWVFFLQEKSQTQETLKGFLRRAQNEFGLRIKKIRSDNGTEFKNSQIESFLEEEGIKHEFSSPYTPQQNGVVERKNRTLLDMARTMLDEYKTSDRFWAEAVNTACYAINRLYLHRILKKTSYELLTSKKPNISYFRVFGSKCFILVKRGRKSKFAPKTVEGFLLGYDSNTRAYRVFNKSTGLVEVSCDVVFDETNGSQVEQVDLDEIGEEQAPCIALRNMSIGDVCPKESEEPPKAQDQPSSSTQASPPTQNEDETQVDEVEDQANEPPQDIGNDQGGDANEEDKEEEEQRPPHPRVHQAIQRDHPVDTILGDIHKGVTTRSRVAHFCEHYSFVSSIEPHRVEEALQDSDWVVAMQEELNNFTRNEVWHLVPRPNQNVVGTKWVFRNKQDEHGVVTRNKARLVVKGYSQVEGLDFGETYAPVARLESIRILLAYATYHGFKLYQMDVKSAFLNGPIKEEVYVEQPPGFEDSKYPNHVYKLSKALYGLKQAPRAWYECLRDFLIANGFKVGKADPTLFTKTLENDLFVCQIYVDDIIFGSTNESTCEEFSRIMTQKFEMSMMGELKYFLGFQVKQLQEGTFISQTKYTQDILNKFGMKDAKPIKTPMGTNGHLDLDTGGKSVDQKVYRSMIGSLLYLCASRPDIMLSVCMCARFQADPKEAHLTVVKRILRYLAYTPKFGLWYPKGSTFNLIGYSDADWAGCKINRKSTSGTCQFLGRSLVSWASKKQNSVALSTAEAEYIVAGHCCAQLLWMRQTLRDYGYKLTKVPLLCDNESAIKMADNPVEHSRTKHIAIRYHFLRDHQQKGDIEISYINTKDQLADIFTKPLDEQSFNKLRHELNILDSRNFFC

SEQ ID NO: 214603 - protein, 85 aa, Zea mays
  unsure (1)..(85): unsure at all Xaa locations
  Clone ID: MRT4577_127318C.1.pep
GWAPIGSLIRTLSRVRMLTRPNGNINCAWLALFVSSEDVMAYFIAAHKNILSLXRDTNYTKXSDDLRNTSVQGTGRPQRALFMPQ

SEQ ID NO: 214604 - protein, 592 aa, Zea mays
  Clone ID: MRT4577_127319C.1.pep
MSGDHSKKEMVTGEKPATSHGKAPSGESGNKMKGFPSHNKSHWSGEKKKKMKKVVYYETDSLSPSTSGSDAPSVTSKHHERKKFRDEYNDADEVAQIRHFNSQATTILLTSLSREEYNKVQGLKSAKEIWDVLKTTHEGDEVTKITKRETIKGELGRFMLNQGEEPQAMYNRLKILVNQVRNLGSTKWDDLEMVKEVIGKFVSFELMIKGSKQIIEQGTTSTPEVQPVAFKATEEKKEESTSSRLPIDASKLDNEEMTLIIKSFRQILKQRKGKDYKPRSKKVCYKCGKPGHFIAKCPISSDSDRGDDKKGKRREKKRYYKKKGGDAHVCRECDSNERSTDSSSDEDAANLAINKGLLFPNVGHKCLMAKDGKKKKVKSRASTKYATSSDEASSSDDEDDLLTLFANLNMQEKEKLNEWISDIHEKDELLDSQEDFVIKENKKHVKVKNAYVQEVEKCEKLTSELSICHDTISNLRNENAKLIAKVAKLNVCDDSLVNLKNDNASLISKIDKLNKSLSSLKIENDNLIVKAKDLNVCNDSITNLRNENAMLHAKIDELNACKPSTSNVSHVSICTRCRDINVDAIVTPGFGR

SEQ ID NO: 214605 - protein, 46 aa, Zea mays
  Clone ID: MRT4577_12731C.1.pep
VRLLPYRILFKNLSPSDILPNGCTPNRSIAETQQRLTSGPLSFCST

SEQ ID NO: 214606 - protein, 38 aa, Zea mays
  Clone ID: MRT4577_127320C.1.pep
VARHLSRMKTFMLRSKHHLQVLRRGNRLAWPKLARLSL

SEQ ID NO: 214607 - protein, 933 aa, Zea mays
  Clone ID: MRT4577_127321C.1.pep
MKKVVYYETDSSSPSTSGSDAPSVTSKRRERKKFSKIPLRYPRISKRTPLLSVPLGKPPVFDGEDYCMWSDKMRHHLTSLHASIWDIIEFGTQEYNKVQGLKSAKEIWNVLKTAHEGDQVTKITKRETIEGKLGRFILNQGEEPEAMYKRLKTLVNQVRNLRSTKWDDHEMVKVILRSLVFCNPTQVQLIRGDPRYKLMSPEEVIGKFVSFELMIKGSKQIIEQGGTSTPEVQPVAFKATEEKKEESTSSRLPIDASKLNNEEMALIIKSFRQILKQRTGKDYKPRSKKVCYKCGKPGHFIAKCPISSDSDRDNNKRGKKKEKKRYYKKKGGDAHVCREWDSDESSTDSSSDEDATKITVNKGLLFPNVGHRCLMTKDNKKKKVKSRASSKYTTSSDEGNSSEDEDDLLNVFANLNMQQKEKLNELIGAIHEKDELLDSQEEFLIKENKKHVKVKNAYAQEVEKNENLTKELSICHDKISNLRNENGNLFAKVEKSNVCHDSIVNLKNDNASLIAKIGKLNESISSLKIENASLISKAKDLNVCNASISNLRNENAILHAKIDELNVSKPSTSIVDHVSICMRCRDINVDAIHDHLALIKQQNDHIAQLTSKINEHEIENEKNKFARSMLYNRRRPGIKDGIGFQQGDNVKLNAPKRLSNFVKGKAPMAQDNEGYILYPVGYPEHKIRRIHAKKSHSISHHAFMYKNEASRTFDASYVLTNKSGKVVAKYVGGKHKGSKSCVWVPKVYESGGSSWIIDSGCTNHMTGEKRMFSSYEKTMIPKELSHSGMEIKEKSQIQETLKGFLRRTQNEFGLRIKKIRNDNGTEFKNSQIEGFLEDEGIKHEFSSPYTPQQNGVVERKNRTLLDMARTMLDDYKTPDRFWAEAINAACYSINRLYLHRILKKTSYELLTGKKSNVSYFRVFGSESRLEGGE

SEQ ID NO: 214608 - protein, 52 aa, Zea mays
  Clone ID: MRT4577_127322C.1.pep
TEIVFTSLDFLSNLILQINSLILTFSDLNFSHAIKYVRHPTHHLIIPQGLDH

SEQ ID NO: 214609 - protein, 69 aa, Zea mays
  unsure (1)..(69): unsure at all Xaa locations
  Clone ID: MRT4577_127323C.1.pep
FXXPYLXLIIXXVCENGAVKXYRXXQAXXASNIXLLXLLFKQXXALXLVQXLVQTXRXQQDVVTCAICD

SEQ ID NO: 214610 - protein, 190 aa, Zea mays
  Clone ID: MRT4577_127324C.1.pep
MASSSCVRLHHLPSTSRRSSAPGAPTNLQFRAASCRWRRRVLVPGAASPPLRLCATGSPQPPLGSDSNAPLSRGTREEGEEVEEQRQPPPPPRLKIAVVGFGNFGQFLARTLVAQGHTVLAHSRSDHSAAAAAMGARFFPDAHDLCECHPDVVILSTSILSAESVVRSLPLHRLRRDTLFVDVLSVKEFP

SEQ ID NO: 214611 - protein, 37 aa, Zea mays
  Clone ID: MRT4577_127325C.1.pep
LLLWGKITLFIGVNCLVHMALGNGPNTKGTKWPGYFY

SEQ ID NO: 214612 - protein, 125 aa, Zea mays
  Clone ID: MRT4577_127326C.1.pep
RPGSFVRAAVLHTPRERTEGRESLVVESHGGFAGGLGSPCVASPRRWIPRAWSHQQLRSPRRRHGSKSLLLFGARARPGELHHDTKFLLRFSADKTVQGRATNCSSDLQGRVSPWAGNPTAPISQ

SEQ ID NO: 214613 - protein, 39 aa, Zea mays
  Clone ID: MRT4577_127327C.1.pep
ITVPANDSHQSREAPIQEEVQLKEYDHGVRRALQFQRET

SEQ ID NO: 214614 - protein, 65 aa, Zea mays
  unsure (1)..(65): unsure at all Xaa locations
  Clone ID: MRT4577_127328C.1.pep
MFALQSEDVKLVAVNYPFITTDYMTYMFKYDTVHCQFKHIDITLKDSKTLLFXEXPVTVFGIMNP

SEQ ID NO: 214615 - protein, 150 aa, Zea mays
  Clone ID: MRT4577_127329C.1.pep
GRGRNRLCPRRCWACSSCAGLLIWLARCCCRLVIVDEIDYLITRDRAVLHDLFMLTTCPFSRCILIGIANAIDLADRFLPKLESLNCKPLVVTFRAYSKDQISDIVKHRLKVLEYDVFEPLALEFCARKVAAASGDMRKALCVCRSAVEV

SEQ ID NO: 214616 - protein, 58 aa, Zea mays
  Clone ID: MRT4577_12732C.1.pep
RQRLAARVLRQLPPHEESLAEHACSSSSSFMYVGLVGPKLQEGPLIFFLFFLAPRPIN

SEQ ID NO: 214617 - protein, 79 aa, Zea mays
  Clone ID: MRT4577_127330C.1.pep
VPGPPPGFFFFFFFFFFFYITNHLFYLFKLVTTETSGYSCKHTAQKSNPGYKTVTVAHNPKQILFFEGPYSKNPGQDII

SEQ ID NO: 214618 - protein, 98 aa, Zea mays
  Clone ID: MRT4577_127331C.1.pep
PREGFPNEIVQEDDGKNISLVLSSPSTQCAPPLIDPCCAGGGGEIYREEVAVKSGLPMQERQASPRAKKRARPASLPSDTTQTSNNTSFIFRCNTNLK

SEQ ID NO: 214619 - protein, 61 aa, Zea mays
  unsure (1)..(61): unsure at all Xaa locations
  Clone ID: MRT4577_127332C.1.pep
FPNNCTEHETITTSPPSCGISPFHQPRGQVKKKKKKKTXKKKNKKKNKKKTKKKKKKKKLV

SEQ ID NO: 214620 - protein, 101 aa, Zea mays
  Clone ID: MRT4577_127333C.1.pep
RHLLALLWPRLYLVTPGLSLALPLLIPSPFLPFSTLTNSQSVPLPTFAQPSCFLVGPLFAPFNGLSIPGFILVSPFMCASLSRPLSPFLPGVFPPFLPAFP

SEQ ID NO: 214621 - protein, 62 aa, Zea mays
  Clone ID: MRT4577_127334C.1.pep
TRPHSLLISISQSFIHTKVPTIHARVLLNGVGGCTTSQIALQINFLTIILLGTIVYHKQIYS

SEQ ID NO: 214622 - protein, 168 aa, Zea mays
  unsure (1)..(168): unsure at all Xaa locations
  Clone ID: MRT4577_127335C.1.pep
RNQHAGLPNLQATEACXNNPNPXADHDECRHXRYSPXDPSKSTYGILXVLSGGRLIYASXLRILVLKFALTMSTSKDGLGITSVEVDLSSIDPPTTATSKWPAKASFIRTPTKDDIKLANRVDVASIRHPNQDTEPVRNKKWIVSIXVCTHLRXSSLPNAADFRWWFC

SEQ ID NO: 214623 - protein, 90 aa, Zea mays
  Clone ID: MRT4577_127336C.1.pep
ICGNLYIRLVLVQIIYSTTAHPFLKEYLHSRQAHYNISRKLYYNTGMSKVVIRRYFIHASWVSGYSPKIHFSKRAQIPLGYPQRFPLILP

SEQ ID NO: 214624 - protein, 52 aa, Zea mays
  Clone ID: MRT4577_127337C.1.pep
RLLLNTTTYKCGNGLSSYMGRPYWLFHVCQGSVIRFIVVLVRKILVASFAYP

SEQ ID NO: 214625 - protein, 115 aa, Zea mays
  unsure (1)..(115): unsure at all Xaa locations
  Clone ID: MRT4577_127338C.1.pep
QMGSIFGTRLVQKFLGGSPASTPVGFKGAPDALFPLGPPLFLGVWAPVPHWEVQGSSFCIVLXNGPLVNFVXIPGGCQGLQYFFGGRGVIRGGLEMVSMPGEVPPQRGMLFLSPA

SEQ ID NO: 214626 - protein, 48 aa, Zea mays
  Clone ID: MRT4577_127339C.1.pep
GLQPRPPSLDTCPRVFLYGSSKSSYLVKTEVMPPGSSSLGALSHPVQQ

SEQ ID NO: 214627 - protein, 95 aa, Zea mays
  unsure (1)..(95): unsure at all Xaa locations
  Clone ID: MRT4577_12733C.1.pep
CGWKAAIGIGGISMLAKPTASMGKAFRCPVFEGXLESINIREAIXLRATGLCIISSSXKGIPGCCRFSFALDKEEFKRMIGCIDRFKELVWEAFK

SEQ ID NO: 214628 - protein, 887 aa, Zea mays
  Clone ID: MRT4577_127340C.1.pep
MTTDRPLELLHMDLFGPIAYISIGGSKYCLVIVDDYSRFTWVFFLQEKSQTQETLKGFLRRAQNEFGLRIKKIRSDNGTEFKNSQIQGFLEEEGIKHEFSSPYTPQQNGVVERKNRTLLDMARTMLDEYKTSDRFWAEAVNTACYAINRLYLHRILKKTSYELLTGKKPNISYFRVFGSKCFILVKRGRKSKFAPKTVEGFLLGYDSNTRAYRVFNKSTRQVEVSCDVVLDETNGSQVEQVDLDEIGIEEAPCITLRNMSIGDVCPKESKEPPKAQDQPSSSTQASPPTQNEDEAQVDEEEDQSNEPPQDDGINQGGDANDQDKEDEEPRPPHPRVHQAIQRDHPVDTILGDIHKGVTTRSRVAHFCEHYSFVSSIEPHRVEEALQDSDWVVAMQEELNNFTRNEVWHLVPRPNQNVVGTKWVFRNKQDEHGVVTRNKARLVAKGYSQVEGLDFGETYAPVARLESIRILLAYATYHGFKLYQMDVKSTFLNGPIKEEVYVEQPPGFEDSEYPNNVYKLSKALYGLKQAPRAWYECLRDFLIANGFKVGKADPTLFTKTLENDLFVCQIYVDDIIFGSTNESTCEEFSRIMTQKFEMSMMGELKYFLGFQVKQLQEGTFLSQTKYTQDILSKFGMKDAKPIKTPMGTNGHLDLDTGGKSVDQKVYRSMIGSLLYLCASRPDIMLSVCMCARFQSDPKESHLTAVKRILRYLAYTPKFGLWYPRGSTFDLIGYSDADWAGCKINRKSTSGTCQFLGRSLVSWASKKQNSVALSTAEAEYIAAGHCCAQLLWMRQTLRDYGYKLTKVPLLCDNESAIKMADNPVEHSRTKHIAIRYHFLRDHQQKGDIEISYINTKDQLADTFTKPLDEQTFTKLWHELNILDSRNFFC

SEQ ID NO: 214629 - protein, 113 aa, Zea mays
  Clone ID: MRT4577_127341C.1.pep
MSLRSIKVSSREKHKEQKEESIGSSKTHNTKNDKKRMKKKVPQVGDDDYDSYEVAQIQHFNSQATTILLVSLCREEYNKVEGLKSTKEIWDVLKPTQEGDRITVGYLFSNATS

SEQ ID NO: 214630 - protein, 550 aa, Zea mays
  Clone ID: MRT4577_127342C.1.pep
MSGASAKREIRTGEKPATSHGKAPSGESANKVKGSPSHDKSRRSGDKKKKMKKVVYYETDSSSPSTSGSDTPSVTSKRHERKKFSKIPLRYPRISKRTPLLSVPLGKPPMFDGEDYNMWSDKMRHHLTSLHTSIWDVVEIGVQVPSPGDEDYDSDEVAQIRHFNSQATTILLASLSREEYNKVQGLKSAKEIWDVLKTAHEGDEVTKITKRETIEGKLGRFRLNQGEDPQAMYNRLKTLVNQVRYLGSTKWDDHEMVKVILRSLVFLNPTQVQLIRGDPRYTLMSPEEVIGKFVSFELMIKGSKKIIEQGDSSMPEAQPVAFKATKEKKQDSNPSRIPIDASKLNNKEMALIIKSFRQILKQRKGKYYKPRSKKVCYKCGKPGHFIAKCPLSSDSDRGDDKKEKRREKKRYYKKKGGDAHVCREWNSDESSSDSSSDEDTANIAVTKGLCHTRILGVQNPGANIITRGCASLPTSHVTHLPRDRDFPYTSTEEARQGNTTRPLQSSTSFRKPATVIGSSNAGFLPDRHRSKINQGPPYTDHSPTALAPFG

SEQ ID NO: 214631 - protein, 214 aa, Zea mays
  Clone ID: MRT4577_127343C.1.pep
MGISRDSRHKRSASGAKRAYYRKKRAFEKGRQPANTRIGTKRIHLVRTRGGNRKFRALRLESGNFSWGSEGIAKKTRVIGVVYHPSNNELVRTNTLTRSAIVQIDAAPFRQWYEAHYGSSLGRRRQAKAGEKEEDKKKSNSVTKKQAERLKTSGKIENAVEKQFEAGRLYAAVSSRPGQSGRCDGYVLEGEELAFYSVSSGSKGDIWGFFGASV

SEQ ID NO: 214632 - protein, 126 aa, Zea mays
  unsure (1)..(126): unsure at all Xaa locations
  Clone ID: MRT4577_127344C.1.pep
PAPGTGRGPGPPPRPPLPSPPPPAAWAPFPPSVXPCFSSCPPPSPPXRPPSPPPGFCSPPPRLRFPLFGPPIWPPPPVLASWAGPLCPSRSGPSPPFSPVGWGGGGPFCSPPPLVLFPGAVFLCLF

SEQ ID NO: 214633 - protein, 1707 aa, Zea mays
  unsure (1)..(1707): unsure at all Xaa locations
  Clone ID: MRT4577_127345C.1.pep
MSGDHAKKEMETGEKPTTSRGSTSSEESRTKRKDKKKDSSKRKEKKSSSSHHQEKKEKSSSHKPHRKGDKHKRMRKVVYYETDTSSTSTSDSDAPSVTSKRQERKKYSKIPLRYPRISKHTPLLSVPLGKPPTFDGEDYARWSDLMRFHLTSLHKSIWNVVEFGAQVPSVGDEDYDEDEVAQIEHFNSQATTILLASLSKEEYNKVQGLKSAKEIWDLLKTAHEGDELTKITKRETIEGELGRFRLRKGEEPQHMYNRLKTLVNQARNLGSVKWDDHEVVKVILRSLIFLNPTQVQLIRGNPRYTKMTPEEVIGNFVSFECMIEGSRKINELDDATTSEAQPVAFKATEEKKEESTPSRQPIDASKLDNEEMALVIKSFRQILKQRRGKDHKSRSKKVCYKCGKPGHFIAKCPISSDSDRGDDKKGRRKEKKRYYKKKGGDAHVCREWDSDESSSDFSDDEDAANIAVTKGLLFPNVGHKCLMAKDGKKKVKSKSSTKYESSSDDNASDEEDNLCSLFANLNIAQKEKLNELVSAIHEKDDLLDSQEDCLIKENKKHVKVKKAYALEIEKCEKLSSELSTCREMIDNLRNENAILNAKVDSHVCNVSIPNLRDDNVDLLAKIDELNVSLTSLRIENEKLLAKAKDFDVCNTTISDLRTKNDILHAKVVELKSCKPSTSIVEHVSICTRCRDVDVNAIHDHMALIKQQNDHIAKLDAKIAEHNLENEKFKFARSMLYNGRRSGIKDGIGYQRGDNVKLNAPPKNLSNFVKGKAPMPQDNEGYILYPAGYPESKIRRIHSRKSHSGPNHAFMYKGETSSSRQPTRAKLPKKTPIASNKHNISFKTFDASYVLTNKSGKIVAKYVGGKHKGSKTCVWVPKVLVSNAKGPKTIWVYASGGSSWILDSGCTNHMTGEKRMFSSYEKNQDPQRAITFGDGNQGVTVFRRSDDSIAFKGVLEGQLYLVDFDRAELDTCLIAKTNLGWLWHRRLAHVGMKNLHKLLKGEHILGLTNVHFEKDRICSACQAGKQVGAHHPHKNIMTTDRPLELLHMDLFGPIAYISIGGSKYCLEKSQTQETLKGFLRRAQHEFGLRIKKIRSDNGTEFKNSQIEGFLEEEGIKHEFSSPYTPQQNGVVERKHRTLLDMARTMLDEYKTPDRFWAEAVNTACYAINRLYLHRILKKTSYELLTGKKPNISYFKVFGSKCFILVKRGRKSKFAPKTVEGFLLGYDSNTRAYRVFNKSTGLVEVSCDVVFDETNGSQVEQVDLDEIGNEEAPCIALRNMSIGDVCPKESEEPPNAQDQPSSSMQASPPTQNEDEAQVDEGQNQEDEPPQDNGNDQGGDENNQEKEDEEEPRPPHPRVHQAIQRDHPVDTILGDIHKGVTTRSRVAHFCEHYSFVSSIEPHRVEEALQDSDWVVAMQEELNNFTRNEVWHLVPRPNQNVVGTKWVFRNKQDEHGVVTRNKARLVAKGYSQVEGLDFGETYAPVARLESIRILLAYATYHGFKLYQMDVKSAFLNGPIKEEVYVEQPPGFEDSEYPNHVYRLSKALYGLKQAPRAWYECLRDFLITNGFKVGKADPTLFTKTLDNDLFVCQIYVDDIIFGSTNESTCEEFSRIMTKKFEMSMMGELKYFLGFQVKQLQEGTFISQTKYTQDILSKFGMNDAKPIKTPMGTNGHLDLDTGGKSVDQKXFKPSHRYIERELESSAKTKASTP

SEQ ID NO: 214634 - protein, 108 aa, Zea mays
  unsure (1)..(108): unsure at all Xaa locations
  Clone ID: MRT4577_127346C.1.pep
RSELERLFGLEGQLEXDPVRSGWQLVFVDRENDILLVGDDPWQEFVNSVWCIKILSPQDVQQMVRGGGDLLSTTGVRTLQGSVCDDYSAGHDMQNLTGSIAPVVPLDY

SEQ ID NO: 214635 - protein, 142 aa, Zea mays
  Clone ID: MRT4577_127347C.1.pep
NKWPDFYQFLIEALKLYMLKTMSISGRGIRARGCGPRTPPRISPAAPRCCTLPEPQYPPTTLPLPPTPHSQPEIDSNVSFAKVIGQARIKILAEHFVWATVVRGLNFPNAALQKESGIHVQEQDDVFERPDLLPVSQAQVLE

SEQ ID NO: 214636 - protein, 1484 aa, Zea mays
  unsure (1)..(1484): unsure at all Xaa locations
  Clone ID: MRT4577_127348C.1.pep
MKKVVYYETDSLSPSTSGSKSASASSKRHERKKYSKMPLRYPRISKRTPLLSVALGKPPMLEGEDYSMWSDKMRHHLTSLHKSIWDIVEYGAQVPKKGEKDYDSEEVEQIQHFNSQATTILLASLSREEYNKVQGLKNAKEIWDVLKTVHEGDEVTKITKRETIEGELGRFMLYQGEEPQVMYNRLKTLVNQVRNLGSTKWDDHEMVKVILRSLVFLNPMQVQLIHGDPRYTLMSPEEVIGKFVSFELIIKGSKKIIEQGASSTPDVQPVAFKATEEKKEDSTPSRVPIDASKLDNEEMTLIIKSFRQILKQRRGKDYKSRSKKVCYKCGKPSHFIAKCPLSSDSDRDNDKRGKKKEKKRYYKKKGGDAHVCREWDSDESSIDSSSDEDAANIAITKGLLFPNVGHKCLMAKDDKRKKVKSKSSTKYETSRDEDNSSDDEDNLLILFANLNMQQKEKLNELISAIHEKDELLDSQEDFLIRKCEKLSSELSTCHDVISNLRNENAKLIAKVEKSNICDDSIVNLRNDNASSIAKIEKLNASLASLRNENEKLIAKAKELNVCNVSISNLRDENAILHAKIVELNSCKPSTSTIEHVTICTKCRDVNIDAIHDHIAMIKQQNDHIAKLDAKIAEHELENENFKFARSMLYSGRCPGIKDGIGFQQGGNVKLNAPPKRLSNFVKGKAPMPQNNEGYILYPAGYPEHKIRRIHYRKSHSGPNHDFMYKSEASSSRQSTHAKLPKKKTPIASNDHNISFKTFDASYVLTNKSGKVVAKYAGGKHNGSKTCVWVPKVYASGGSSWIIDSECTNHMTGENMFSSYEKNQDPQRAITFGDGNQGVTVFRRSDDSVAFKGVLEGQLYLVDFDRAELDTCLIAKTNMGWLWHRRLAHMGMKNLHKLIKGEHILGLTNVHFEKDRVCSACQAGKQEKSQTQETLKGFLRRAQNEFGLSIKKIRSDNGTQFKNSQIEGFLEEEGIKHEFSSLYTPQQNGVVERKNRTLLDMARTMLDEYKTSDRFWAEAVNTACYAINRLYLHRILKKTSYELLTGKKPNVSYFRVFGSKCFILVKRGRKSKFAPKAVEGFLLGFDSNTRAYRVFNKSTGLVEVSCDIVFDETNSSQVKQVDLDELDDEEAPCVTLRNMSIGDVCPKESEEPPQAQDQPSSPMQASPPTQDESEAQNDEGEDQEDEPPQEEGNDQXGDVNNQDKEDDDXPHRVEEALQDSDWVLAMQEELNNFTRNKLYQMDVKSAFLNGPIKEEVYVEQPPGFEDKFSRIMTQKIEMSMMGELKYFLGFQVKQLQEGTFISQTKYIQDILTKFGMKDAKPIKTPMGTNGHLDLDTGGCKINRKSTSGTCQFLGRSLVSWASKKQNSVALYTAEAEYIAAGHCCAQLLWMRQTLRDYGYKLTKVPLLCDNESAIRIADNPVEHSRTKHIAIRYHFLRDHQQKGDIKIAYVNTKEQLADIFTKPLDEQTFTKLRHELNILDSRNFD

SEQ ID NO: 214637 - protein, 451 aa, Zea mays
  Clone ID: MRT4577_127349C.1.pep
EKSQTQETLKGFLRRAQNEFGLRIKKIRSDNGTEFKNSQIEGFLEDEGIKHELSSHYTPQQSGVVERKNRTLLDMARTMLDEYKTPNRFWAEAINTACYSINRLYLHRILKKTSYELLTGCRRFLLGYDSNTRAYRVFNKSTGLVEVSCDNVFDETNGSQVEQVDLDELDDEEALCVALRNMSIGDVCPKESEEPPQAQDQSSSSMQASPPTQDEEQVQDDEDQEDEPPQEEDNDQGGDEDKEDDQEVQGQIPPHPRVHQAIQRDHPVNSILSAIHKGVTTRSRVAHFCEHYSFVSSIEPYRVEDALRDPDWVLAMQEELNNFTRNKVWHLVPCPNQNVVDTKWVFRNKQDEHGVVTRNKARLVAKGYSQVEGLDFDETYAPVARLESIRILLAYVTYHVFKLYQMIVKSVFLNGPIKEEVYVEQPPSFEDSEYPNCRRGNLRSSGEMHPP

SEQ ID NO: 214638 - protein, 116 aa, Zea mays
  unsure (1)..(116): unsure at all Xaa locations
  Clone ID: MRT4577_12734C.1.pep
KMNHRSPQGTXDGQETICMRAPYQKHDLGTSVCAARSHPPSCRCAHFFMFFFSSDXRVRFILFHPIAFFSASSWWLTEQLLPNGPDSPPFSFFSSIKNYLKISPCGPSDEYLIVRI

SEQ ID NO: 214639 - protein, 1460 aa, Zea mays
  unsure (1)..(1460): unsure at all Xaa locations
  Clone ID: MRT4577_127350C.1.pep
MLGASAKREIGTGEKPATSHGKAPSGESANKVKGSLSHDKSRRSGDKKKKMKKVVYYETNSLSPSTSGFDAPSITSKRHERKKFSKIPLRYPHISKHTPLLSVPLGKPPVFNGDEDYNMWSDKMRHHLTSLHTSIWDVVEIGVQEYNKVQGLKSAKDIWDVLKTAHEGDEVTKITKRETIEGELGRFRLNQGEDPQAMYNRLKTLVNQVRNLGSTKWDDHEMVKVILRSLVFLNPTQVQLIRGDPRYTLMSHEEVIGKFVSFELMIKGSKKIIEQGDSSTPEAQPVAFKATEEKKEDSTPSRIPIDASKLDNEEMSLIIKSFRQILKQRRGXDYKPRSKKVCYKCXKGRRKEKKRYYKKKGGDAHVCQEWDSDESSTDSSSDEDVANIAVTKGLLFPNVGHKCLMAKDGKKKKVKSKSSTKYATSSNEANYSDDEDDLLTLFANLNMQQKEKLNELISTIHDKDELLDSQEEFLIKENKKHVKVKNAYALEVEKCEKLTSELSTCHDLIANLRNENARLNAKVDSNNCDDSIVNLRNDNANLNAKIDKLNASLFSLKIENEKLIVKAKELDVCNASISNLRDENDILHAKIVELNTCKPSTSSIEHVTICTRCRDINVDAIHDHLALIKQQNDHIAQLNAKINEHDLENEKFKFARSMLYSGRRSGIKDDIGFQQGDNVKLNAPPKRLSDFVKGKASMVQDNEGYILYPVVYPKHKIRRIHSRKSHSGPNHAFMYKGEISSFRQSTCAKLPKKKIPIASNGSNISFKTFDASYVLTNKSGKVVAKYVGGKHKGSKTCVWVPKVLVSNVEGPKTVWVYASGGSSWIIDSGCTNHMTGEKKMFSSYEKNQDPQRAITFGDGNQGVTVFRRSDDSVAFKGVLEGQLYLEKSHTQETLKGFLRRAQNEFGLRIKKIRSDNGTEFKNSQIEGFLEEEGIKHEFSSPYTPQQNGVVERKNRTLLDMARTMLDEYKTSDRFWAEAVNTACYAINRLYLHQILKKTSYELLTDKKPNVSYFRVFGSKCFILVKRGRKSKFAPKAVESFLLGYDSNTRAYRVFNKSFGLVEVSCDIVFDETNGSQVEQVDLDELDDEEAPCVALRNMSIGDVCPKESEEPPQAQDQPSSSMQASPPTQDEDEAQDDEGEDQEDEPPQEESNDQGGDAHDQDEEEEQPHKVEEALQDSDWVVAMQEELNNFTRNEVWHLVPHPNQNVVGTKWVFRNKQDEHGVVTRNKARLVAKGYSQVEGLDFGETYASVARLESIRILLAYATYHGFKLYQMDVKSAFLNGPIKEEVYVEKPPGFEDSEYPNHVYKLSKALYGLKQAPRAWYACLIDFLIANGFKVGKADPTLFTKTLANDLFVCQIYVDDIIFGSTNESTCEEFSRIMTQKFEMSMMGELKYFLGFQVKQLQEGTFISQTKYIQDILTKFGMKDAKPIKTPMGTNGHLDLDTGGKCALGPFLSILVI

SEQ ID NO: 214640 - protein, 114 aa, Zea mays
  unsure (1)..(114): unsure at all Xaa locations
  Clone ID: MRT4577_127351C.1.pep
IVNHSTTAATVPTFAIDDAVLVERNNGRWLHSASGRTXQSQFAPPQSPGVDDVNGQPLSHRRDDTADVLNSRLEAFHRRSEPVSEXYSKNGLLVNLXVDTXPNDVTADVEKALS

SEQ ID NO: 214641 - protein, 140 aa, Zea mays
  Clone ID: MRT4577_127352C.1.pep
MQLSHTAPRMQEPGRRPVPPFAGVDLRRPRGYPAPAAKEAEEEPAPAPAPGGDPCPRCGSRDTKFCYYNNYNTSQPRHFCKSCRRYWTKGGSLRNVPVGGGTRKSGSSSSATATPTSTGAAPKSPRSSKNSKRRRVGPAP

SEQ ID NO: 214642 - protein, 1825 aa, Zea mays
  Clone ID: MRT4577_127353C.1.pep
MSGDHAKKEMETGEKPTTSHGSTSSEESRTKRKEKKKDSSKRKGKKSSSSHHKEKKEKSSSHKPHRKGDKHKRMRKVVYYETDTSSTSTSDSDVPSVTSKRQERKKYSKIPLHYPRISKHTPLLSVPLGKPPTFDGEDYARWSDLMRFHLISLHKSIWDVVEFGAQVPSVGDENYDEDEVAQIEHFNSQATTILLASLSREEYNKVQGLKSAKEIWDVLKTAHEGDELTKITKRETIEGELGRFRLRKGEEPQHMYNRLKTLVNQVRNLGSKKWDDHEVVNVILRSLIFLNPTQVQLIRGNPRYTKMTPEEVIGHFVSFECMIEGSRKINELGDPSEAQPVAFKATEEKKEESTPSRQPIDASKLDNEEMALVIKSFRQILKQRRGKDYKSRSKKVCYKCGKPGHFIAKCPISSDSDRGDDKKGRRKEKKRYYKKKGGDAHVCREWDSDESSSDSSDDEDAANIAVTKGLLFPNVGHKCLMAKDGKKKKVKSNSSTKYESSSDDNASDEEDNLRSLFANLNIAQKEKLNELVSAIHEKDDLLDAQEDCLIKENKKHVNVKNAYALEVEKCQKLSSELSTCREMIDNLRNENAILNAKVDSHVCNVSIPNLRDDNVDLLAKIDELNVSLASLRLENEDLIAKAKDFDVCKVTISDLRDKNDILHAKIVELNSCKPSTSIVEHVSICTRCRNIDINAIHDHMALIKQQNDHIAKLDAKIAEHNLENEKFKFARSMLYNGRRPGIKDGIGFQRGDNVKISAPPKRLSNFVKGKAPMPQDNEGYILYPAGYPENKIRKIHSRKSHSGPNHAFIYKGETSSSRQPTRAKLPRKKTPNASNDHAISFKTFDASYMLTNKSGKVVAKFVGGKHKGSKTCVWVPKVLVSNAKGPKTVWVYASGGSSWILDSECTNHLTGEKRMFSSYEKNQDPQRAITFGDGNQGVTVFRRSDDSIAFKGVLEGQLYLVDFDRAELDTCLIAKTNMGWLWHRRLAHVGMKNLHKLLKGEHILGLTNVHFEKDRVCSACQAGKQVGAHHPHKNIMTTDRPLELLHMDLFGPIAYISIGGKKSQTQETLKGFLRRAQNEFGLRIKKIRSDNGTEFKNSQIEGFLEEEGIKHEFSSPYTPQQNGVVERKNRTLLDMARTMLDEYKTSDRFWAEAVNTACYSINRLYLHRILKKTSYELLTGKKPNISYFRVFGSKCFILVKRGRKSKFAPKTVEGFLLGYDSNTRAYRVFNKSSGLVEVSCDVVFDETNGSQVEQVDLDEIGEEQAPCIALRNMSIGDVCPKESEEPPIAQDQPSSSMQASPPTENEDEAQVDEVEDQANEPPQDDSNDQGGDTNEEDKEDEEQRPPHPRVHQAIQRDHPVNTILGDIHKGVTTRSRVAHFCEHYSFVSSIEPHRVEEALQDSDWVVAMQEELNNFTRNEVWHLVPRPNQNVVGTKWVFRNKQDEHGVVTRNKARLVAKGYSQVEGLDFGETYAPVARLESIRILLAYATYHGFKLYQMDVKSAFLNGPIKEEVYVEQPPGFEDSEYPNHVYKLSKALYGLKQAPRAWYECLRDFLIANGFKVGKADPTLFTKTLNNDLFVCQIYVDDIIFGSTNESTCEEFSRIMTQKFEMSMMGELKYFLGFQVKQLQEGTFISQTKYTQDILTKFGMKDAKPIKTPMGTNGHLDLDTGGKSVDQKIIPDRRSFLEKQAKRGPSGLLRRTVRDMGIPLGQNQCKNSSFHYRLSGGKAKTVRALARTVRPQARTVRSPLIYRGGPSGPGSRTVRAQQNGPTARKWLVAINTTPTTSIHFIQAFQPSTFNTRASNPFQDTFKASISPSFTIEKRDH

SEQ ID NO: 214643 - protein, 231 aa, Zea mays
  Clone ID: MRT4577_127354C.1.pep
MSGGSAKREMKTATSHGKAPSRESDAKGREESPPRVKSHRSDDKKKKMKKVVYYETDSSSPSTSGSDAPSVTSKRHERKKFSKIPLRYPRISKHTPLLSVPLGKPPVFDGEDYCMWSDKMRHHLTSLHASIWDIVEFGVQVPSVGDEGYDSDEVAQIRHFNSQATTIVLASLCREEYNKVQGLKSTKEIWDVLKTTHERDEVTKITKRETIEGELGRFILNQGEEPQAMYN

SEQ ID NO: 214644 - protein, 168 aa, Zea mays
  Clone ID: MRT4577_127355C.1.pep
MVTGEKPATSHGKAPSGEFGNKREESPPRVKSHRSGDKKKKMKKVVYYKTDSSSPSTSGSDAPSITSKRHERKKFSKIPLRYPRISKRTPLLSVPLGKPPVFNGEDYCMWSDKMRHHLTSLHASIWDIVEFGAQEPSVGDEGYDSNEVAQIRHFNSQATTILLTSLSR

SEQ ID NO: 214645 - protein, 1583 aa, Zea mays
  Clone ID: MRT4577_127356C.1.pep
MSGDHAKKEMETGDKPTTSHGKASSEESRNKGKGKEKKSSSHKSHRSGDKKKKMRKVVYYETDTSSPSTSGSDAPSITSKRHERKKFSKIPLRYPRIPKHTPLLSVPLGKPPTFDGEDYARWSDLMRFHPTSLHKSIWDVVEFGVQSREYNKVQGLKGAKEIWDTLKTAHEGDEVTKITKRETIKGELGRFRLRQGEEPQDMYNRLKTLVNQVRNLGSKKWDDHEMVKVILRSLVFLNPTQVQLIRGNPRYTLMTPEEVIGNFVSFEMMIKGSKKINELDGPSTSEAQPVAFKATEEKKEESTPSRTPIDASKLDNEEMAIIIKSFRQILKQRKGKDYKPCSKKVCYKCGKPDHFIAKCPISSDSDRGDDKKGRRKEMKKYYKKKGGDAHVCREWDSDESSTDSSSDEDAANIAVTKGLLFPNIGHKCLMAKDGKRKKVKSRSSTKYETSSDEDNASNEEDNLRILFANLNMQQKEKLNELISAIHEKDDLLDTQEDFLIKENKKHVKVKNAYALEVEKCEKLSSELSTCHETIDNLRNENANLLAKVDSNVCDVSIPNLRNDNDDLLAKIEELNMSLTSLRNENEKLIAKAKDFDVCNASISDLRSKNDILHAKVVELKSCKPYTSTVEHTAICTKCRDINVDAIHDHLALIKKQNDHIAQLNAKINEHDLENEKFKFARSMLYSGRRLGIKDGIGFQKGDNVKLNAPPKRLSNFVKGKAPMPQDNEGYILYPAGYPESKIRRIHSRKSYSGPNHAFMYKGEASSSRQPTHAKLPKKKTPSASNEHSISFKTFDASYVLTNKSVKVYASGGSSWIIDSGCTNHMTGEKKMFSSYEKNQDPQRAITFGDGNQGVTVFRRSDDSIAFKGVLEGQLYLVDFDRAEPDTCLIAKTNMGWLWHRRLAHVGMKNLHKLLKGEHILGLTNVHFEKDRICSACQAGKQVGAHHPHKNIMTTDRPLELLHMDLFGPIAYRSIGGSKYCLVIVDDYSRFTWVFFLQEKSHTQETLKGFLRRAQNEFGLRIKKIRSDNGTEFKNSQVEGFLEEEGIKHEFSSPYTPQQNGVVERKNRTLLDMARTMLDEYKTSDRFWAEAVNTACYTINRLYLHRILKKTSYELLTGKKPNISYFRVFGSKCFILVKRGRKSKFAPKIVEGFLLGYDSNTRAYRVFNKFSGQVEVSCDVVFDETNGSQVEQVDLDEIGNEEAPCIALRNMSIGDVCPKESEEPPNAQDQPSSSTQASPPTQNEDEAQVDEGEDQRVEPPQDDGNDQGGDVNDQDKEDEEPRPPHPRVHQAIQRDHPVDTILGDIHKGVTTRSHVAHFCEHYSFVSSIEPHRVEEALQDSDWVVAMQEELNNFTRNEVWHLVPRPNQNVVGTKWVFRNKQDEHGVVTRNKARLVAKGYSQVEGLNFGETYAPVARLESIRILLAYATYHGFKLYQMDVKSAFLNGPIKEEVYVEQPPGFEDSEYPNHELSKALYGLKQAPRAWYECLRDFLIANGFKVGKADPTLFTKTLDNDLFVCQIYVDDIIFGSTNESTCEEFSRIMTQKFEMSMMGELKYFLGFQVKQLQEGTFISQTKYIQDILKKFG

SEQ ID NO: 214646 - protein, 124 aa, Zea mays
  unsure (1)..(124): unsure at all Xaa locations
  Clone ID: MRT4577_127357C.1.pep
GLVCSFLVLCCITINTSAFSPSGWTNAHATFYGRSDAXGTMGGACGYGNLYSTGYGTDTAALSTAIFNDGASCDECYKIICDYQTDPRWCLKGASVTITATNYCPPNFAIPNNNXXWCNPPVKH

SEQ ID NO: 214647 - protein, 99 aa, Zea mays
  Clone ID: MRT4577_127358C.1.pep
FPLPFGPILGFLWARGFGGFSKKILAPFCDGPPPGFFGGENRGFFKGVGGPFPGKGAPILRGFFFPGKKKKKKKKKKKKKKKKKKKKKKKKKKKKKKKK

SEQ ID NO: 214648 - protein, 58 aa, Zea mays
  Clone ID: MRT4577_127359C.1.pep
YRFSFLVEVKNSMRTFQVRPSCHLLLVRIIGVRFRKVCSVFSARHERKNIVFAAPRAE

SEQ ID NO: 214649 - protein, 61 aa, Zea mays
  Clone ID: MRT4577_12735C.1.pep
PQRLNGLCVHIDSDDFYQNDSHRVWEFSCQKPIPRWPESNSKPKQTPRHRPESENILTNII

SEQ ID NO: 214650 - protein, 128 aa, Zea mays
  Clone ID: MRT4577_127360C.1.pep
GANNGAVAVADQQKVEGPRTMTCSSYTFHMPLRYPRYKKRYYDSMPEWRVSMHALVVRPPRRRRTSQQAKVRHGRLPLARPVLKETVARAEVAEPDLPRNVATSVTRSYQDMMRRCYCLRRPELHPLT

SEQ ID NO: 214651 - protein, 171 aa, Zea mays
  Clone ID: MRT4577_127361C.1.pep
MEKGSGGGNRAPPPIHMEDFHLEGKKPVKNPFVPIVALRSGLAGVNPKCRHRRCCSGRSCLSFSSCFSSTPATRMEKGSGGSNPPPPPLHMEDFQLEGKKPVKNPFVPIGALVTAGVLTAGLISFRYGNSQLGQKLMRARVVAQGATVALMIGSAYYYGDQIKLFKKGSSP

SEQ ID NO: 214652 - protein, 49 aa, Zea mays
  Clone ID: MRT4577_127362C.1.pep
RVVLFQVQRPGDIKGCLARSNGATGIGNRCRLHPCGPPRSFGHHITYVI

SEQ ID NO: 214653 - protein, 72 aa, Zea mays
  Clone ID: MRT4577_127363C.1.pep
FPTFRSCNHVHVPPGSRPTSPDGTLPLSTTCSTAPVRAAPMAPLAGSPWTRAPEPGRPNCKSVLSTSIYLKR

SEQ ID NO: 214654 - protein, 69 aa, Zea mays
  Clone ID: MRT4577_127364C.1.pep
VEEKVRHQDLFKQKPLVVQQTHNQPILAQFRGIPNHYGITRGDITTDPLHKGKAPSVALISAGGLGPEP

SEQ ID NO: 214655 - protein, 77 aa, Zea mays
  Clone ID: MRT4577_127365C.1.pep
KKIQLKLIGALKQNKSGPGTLDMNWNQRCARHCYWAHKALVWGLIKQGGGLSKHGPFSYPIARTERKFFLNFGEGNS

SEQ ID NO: 214656 - protein, 62 aa, Zea mays
  unsure (1)..(62): unsure at all Xaa locations
  Clone ID: MRT4577_127366C.1.pep
FHPSDLXYXDRPTGENTKTVKLXNXKEKMEMKVSKXTKLKXVVVLHNKIALLSSSRSRTNAW

SEQ ID NO: 214657 - protein, 1404 aa, Zea mays
  Clone ID: MRT4577_127367C.1.pep
MSGDHAKKEMETGDKPTTSHGKASSEESRNKGKGKEKKSSSHKSHRSGDKKKKMRKVVYYETDTSSPSTSGSDAPSITSKRHERKKFSKIPLRYPRIHKHTPLLSVPLGKPPTFDGEDYARWSDLMRFHLTSLHKSICDVVEFGVQVPTVGDEDYDEDEVAQIQHFNSQASTILLASLSREEYNKVQGLKGAKEIWDTLKTAHEGDEVTKITKRETIEGELGRFRLRQGEEPQDMYNRLKTLVNQVRNLGSKKWDDHEMVKVILRSLVFLNPTQVQLIRGNLRYTLMTPEEVIGNFVSFELMIKGSKKINELDDPSTSEAQPVAFKATEEKKEGDDKKGRRKEKKRYYKKKGGDAHVCREWDSDESSTDSSSDEDATNIAVTKGLLFPNVGHKCLMAKDGKTKKVKSKSSTKYEFSSDDNASDEEDNLRTLFANLNMQQKEKLNELISAIHEKDDLLDTQEDFLIKENKKHVKVKNAYALEVEKCERLTSELSTCHDVINNLRNENASLIAKVDSNACNVSIPNLKDDNVDLLAKIEEVNISLASLRNENEKLLAKAKELDVCNVTISDLRDKNDILRAKIVELNSCKPSTSTTEHVTICTRCRDVDVNVIHDHLSMIKQQNDHIAKLDAKIAEHELENEKFKFARSMLYNGRRPGIKDGISFQQGGNGKAPMPQDNEGYILYPAGYPESKIRRIHSRKSHSGPNLAFMYKGEASSSRQPTRAKLPKKKTPSASNDHNISFKTFDASYVLTNKSGKVYASGGSSWIIDSGCTNHMTGERKMFSSYEKNQDPQRVITFRDGNQGLVKGLGVTVFRRSDDSIAFKGVLEGQLYLEKSHTQETLKGFLRRAQNEFGLRIKKIRSDNGTEFKNSQIEGFLEEEDINHEFSSPYTPQQNGVVERKNRTLLDMARTMLDEYKTLDRFWAEAVNTACYAINRLYLHRILKKTSYELLTGKKPNISYFRVFGSKCFILVKKSRKSKFAPKTVEGFLLGYDSNTRAYRVFNKSTGQVEVSCDVVFDETNGSQVEQVDLDEIGDEEAPCIALRNMSIGDVCPKEYEEPPNAQDQPSSSMQASPPTQNEDEAQIDEGEDQQDEPPQDDGNDQGGDANDQDKEDEEPKPPHPRVHQAIQRDHPVDTILGDIHKGELNNFTRNEVWHLVPCPNQNVVGTKWVFRNKQDEHGVVTRNKARLVAKGYSQVEGLDFGETYAPVARLESIRILLAYATYHGFKLYQMDVKSAFLNGPIKEEVYVEQPPGFEDSEYPNHVYKLSKALYGLKQAPRAWYECLRDFLITNGFKVGKADPTLFTKTLENDLFFSRIMTQKFEMSMMGELKYFLGFQVKQLQEGTFISQTKYTQDILSKFGMKDAKPIKTPMGTNGHLDLDTEGGESSTFKNWYLKTLLNTKRRIY

SEQ ID NO: 214658 - protein, 676 aa, Zea mays
  Clone ID: MRT4577_127368C.1.pep
MTTDRPLELLHMDLFGPIAYISIGGSKYCLVIVDDYSRFTWVFFLKEKSQTQETLKGFLRRAQNEFALRIKKIRSDNGTEFKNSQIEGFLEEEGIKHEFSSPYPPQQNGVVERKNRTLLDMARTMLDEYKTSDRFWAEAINTACYAINRDRKSKFAPKTVEGFLLGYDSNTRAYRVFNKSSGQVEVSCDVVFDETNGSQVEQVDLDELGDEEAPCIALRNMSIGDVCPKESEEPPNAQDQPSSSTQASPPTQNEDEAQIDEEEDHANEPPQDDGNDQGGDASDQDKEDEEQRPPHPRVHQAIQRDHPVDTILGDIHKGVTTRSRVAHFCEHYSFVSSIEPHRVEEALQDSDWVVAMQEELNNFTRNEVWHLVPRPNQNVVGTKWVFRNKQDEHGVVTRNKARLVAKGYSQVEGLDFGETYAPVARLESIQILLAYATYHGFKLYQMDVKSAFLNGPIKEEVYVEQPPGFEDSEYPNHVYKLSKALYGLKQAPRAWYECLRDFLITNGFKVGKADPTLFTKTLENDLFVCQIYVDDIIFGSTNESTCEEFSRIMTQKFEMSMMGELKYFLGFQVKQLQEGTFLSQTKYTQDILSKFGMKDAKPIKTPMGTNGHLDLDEGGKSVDQKKEHIGDLPVLGKILGVLGFKEAKFRSSFYRRSRVHCRRTLLRATTLDEANP

SEQ ID NO: 214659 - protein, 78 aa, Zea mays
  Clone ID: MRT4577_127369C.1.pep
ILSMMNIGVLALLGLVVFYIGFWSVLSKKSDLSKDDIGGSGNLDRVCGKEKLVGFVTLKCSGRCTSYPHSEAWSINTR

SEQ ID NO: 214660 - protein, 108 aa, Zea mays
  unsure (1)..(108): unsure at all Xaa locations
  Clone ID: MRT4577_12736C.1.pep
RNLVHAHSMLAIWACQVVLMGXAEGYRVRRCSLDXGLDQVYTGRALEPLCRDCDPDTGGELKVKELKNGRHVMXFMIGMFTHAIESYKDHIENLSEHVAYPVSYNAWA

SEQ ID NO: 214661 - protein, 834 aa, Zea mays
  unsure (1)..(834): unsure at all Xaa locations
  Clone ID: MRT4577_127370C.1.pep
MRIKKIRSDNGTEFKNSQIEGFLEEEGIKHEFSSPYTPQQNCGVERKNRNLLDMARTMLDEYKTHDRFWAEAINTACYSINRLYLHRILKKTSYELITGKNPNVSYFIVFGSKCFILIKRGRSSKFAPKVVEGFLLGYDSNTRAYRVFNKSIGLVEVSCDIVFDETNGSQVEQVDLNELDDEEAPCIALRNMSIGDVCPKESEEPTQAQDQPPSSIQASPPTQDEDQAQEEEEDEDQDDEPPQEEDIDQGGDEDDQEIRDQRPPHPRVHQAIQRDHPVNSILGDIHKGVTTRSQAEHFCEHYSFVSSIEPYRVEDALRDTDWVVAMQEEINNFTRNELYQMDVNCAFLNGPIKEEVYVEQPPGFEDSEYPNHVYKLSKALYGLNQAPRACQTKYNRDILKKFGMKNVKPIKTPMGTNGHLDLDTRGKSVDQKVPGKSXGSSXRAVKRIMRYLVYTPKFGPWYPKGSTFDIIGYSDADYTRCKIDRKSTSETWADRLDQGRRPSAVGIKGATTRKWLQEIAQEEDDEDDEPPQEKDIDQGGDEDNQDKEDDQEIQDQRPPHPRVHQEIQRDHLINSILGTKWVFRNKQDEHGVVTRNKARLVANGYSQVEGLNFDETYTLVARLESIRILLAYATYHGFKLYQMDVKSAFLNGPIKGEVYVEQPSGFEDKFEMSMMGDLKYFLGFQINQLQEGIFICQTKYNRDILKKFGMKNVKPIKTPMGTNGHLDLDTRGKSVDQKMRQTLRDYGYKLSNVPLLCDNESAIHMADNPVEHSRTKHIDIRHHFLRDHQQKGDIEIAYVSTHNQIADILTKLLGEKTFSKLRNELNILDSRNFD

SEQ ID NO: 214662 - protein, 104 aa, Zea mays
  Clone ID: MRT4577_127371C.1.pep
GRDHRNFDYIDIPNTESVVTEVERVLANPNMPEIEKARKLLKDQEQSLLDAIARLDEASDSDSGNCGQLPPGRDQQAASTCACARCLAKQNLHDCTRHRNKLML

SEQ ID NO: 214663 - protein, 956 aa, Zea mays
  Clone ID: MRT4577_127372C.1.pep
MSGDHAKKEMETGEKPTTSQGSTSSEESRTKRKEKKKISSNKGKEKKSSSHHKEKKEKSSSHKPRRSGDKQKRMRKVVYYETDTSSTSTSGSDAPSVTSKRQERKKFSKIPLHYSRISKHAPLLSVPLGKPPTFDGEDYARWSDLMRFHLTSLHKSIWDVVEFGAQVPSVGDKDYDEDEVAQIEHFNSQATTILLASLSREEYNKVQGLKNAKEVWDVLKTAHEGDELTKITKRETIEGELGRFRLRKGEEPQHMYNRLKTLVNQVRNLGSVKWDDHEMVKVILRSLIFLNPTQVQLIRGNPRYTKMTPEEVIGNFVSFECMIEGSRKINELDEPTTSEAQPVALKATEEKKEEATPSRQPIDASKLDNEEMVLVIKSFRQILKQRRGKDYKSRSKKVCYKCGKPGHFIAKCPISSDSDRGDDKKGRRREKKRYYKKKGDDAHVCREWDSDESSSDSSDDEDAANIAVTKGLLFPNVGHKCLMAKDDKRKKVKSNSSTKYESSSDDNASDEEDNLRSLFANLNIAQKEKLNELVSAIHEKDDLLDSQEDLLIKENKKHVKVKKAYALEIEKCEKLSSELSTCREMIDNLKHENASLNAKVDLHVCNVSIPNPRDNNDDLLARIEELNISLASLRVENESLIAKAKELDVCNTTISDLRDKNDILHAKIVELNSCKPSTSIVEHVSICTRCRDIDVNAIHDHMSLIKQQNDHIAKLDAKIAEHNLEDEKFKFARSMLYNGRRPGIKDGIGFQRGDIVKLSAPPKRLSNFVKGKAPMPQDTEGYILYPAGYPESKIRRIHSRKSHSGPNHAFMYKGETSSSRQPTRAKLPKKTPNASNDHNISFKTFDASYVLTNKSGKVVAKYVGGKHKGSKTCVWVPKVLVSNAKGPKTIWVYASGGSSWILDSGCTNHMTGEKRMFSSYEKNQDPQRAITFGDGNQGLVKGVTVFRRSDDSIAFK

SEQ ID NO: 214664 - protein, 1239 aa, Zea mays
  unsure (1)..(1239): unsure at all Xaa locations
  Clone ID: MRT4577_127373C.1.pep
MSGGSAKREMETGEKATSHGKAPSRESGTKAKEGSPLHIKSHRSSDKKKKMKKVVYYETDSSTPSTSGSDVASATSKRHEHKKYSKMPLRYPRIYKRAPLLSVPLGKPPYFDGEDYCMWSDKMRHHLTSLHASIWDIVEFGAQAPTVGDEDYDSDEEYNKVQGLKSTKEIWDILKTAHEGDEVTKITKRETIEGELDRFVLNQGEEPQAMYNWLKTLVNQVCNLRSTKARRHXSTPEVQPVAFKAMEEXEESTSSRLPIDTSKLDNEEMALIIKSFRQILKQRREKDYKPCSKRVWYKCGKPGHFIAKCPMSSDSDRGDDKRVKKKEKKRYYKKKGGDAHVCREWDSNEDAANIAVNKGLFFPNVGHKCFMAKDDKKKKEVEKNENLTKELSICHDSITNLRNENASLNAKIDKLNESIFSLKTENASLISMVKDLNVCNDSISCLRDENAILHAKIDELNVCKPSTSTVDHVTICTRCRDVNIDVINDHLALIKQQNDHIAQLTAKINEHEIENEKFKFARSMLYSGRRRGIKDGIGLQQESNVKLNAPKKLSNFVKGKAPIVHDNEDYILYPANYPEHKIRRIHAKKSHSVSHHAFMYKNKASSSRQSTHVKLPKKKTPTASNDHNISFKTFDASYVLTNKSGKLVAKYVYASGGSSFVIDSGCTNHMTGEKRMFSSYEKNEDPQRAITFGDGNQDISVTVFRRSDDSVAFKGVLEGQLYLVDFNKAKLDACLIAKTNMGWLWHRRLAHVGMKNLNQLLKGEHILGLTNVHFEKDSVCSACQAGKQVGAHXITQEHNDNGQATGTTPHGSIRPDSLHKHRXGSKYCLNGVVKRKNRTLLDMARTMLDEYKTPDWFWAEAINTTCYSINRLYLHRILKKTSYELLTDKKPNTNGSQVEQVDLDELDDEEAPCVALRNMSIGDVCPKESEEPTHAQDQPSSSNQASPPTQDEDHAPDNEDEDQEDEPPQEEDKDQGGDEVDQDKEDDQETQGQRPPHPRVHQAIQRDHPVNSILGTIWVFRNKQDEHGVVTRNKARLVAKGYSQVEGLDFGETYAPVARLESIRILLAYATYHGFKLYQMDVKSAFLNGPIKEEVYVEQLPGFEDSQYPNHVYKLSKICVDDIIFGSTNKSSCEEFSRIMIQKFEMSMMGELKYFLGFQVKQLQDGTFISQTKYIQDILNKFGMKDAKPIKTPMGTNGHLDLDTGGKSVDQKIKTNYKCTFGLKEREYKRDAKMNVKSA

SEQ ID NO: 214665 - protein, 127 aa, Zea mays
  unsure (1)..(127): unsure at all Xaa locations
  Clone ID: MRT4577_127374C.1.pep
MAPSSARDSPVPVGRGSRILTRFLLHYLRAATRRPPTLEREGTALAGLADTAVHGMALVEGTTFSCRGLFXVLRIVSAVVLXRECRHKLERLMELMLVQATLDDLLVSSDDGGDVYIVNLVMRLVRV

SEQ ID NO: 214666 - protein, 78 aa, Zea mays
  Clone ID: MRT4577_127375C.1.pep
LAPAAIGIDSATTYLLLVLEVRPFRQVTTLTCMLRARTTTLPLVSFCSNDACIKASMDALHICVLLNRVREPDIRGCY

SEQ ID NO: 214667 - protein, 244 aa, Zea mays
  Clone ID: MRT4577_127376C.1.pep
MSGDHAKKEMETGEKPTTSHAKKEMETGEESRTKRKEKKKDSSKGKEKKSSSHHKEKKEKSSSHKSHQSEDKKKRMRKVVYYETDSSSASTSGSDAASVTSKRQERKKYSKIPLRYPHISKHTPLLSVPLGKPPTFDGEDYARWSDLMRFHLTSLHKSIWDVVEFGAQVSAVGDEDYDADEVAQIEHFNSQVTTILLASLSREEYNKVQGLKNAKEIWDLLKTAHEGDCNAPNFELNFYFYIAR

SEQ ID NO: 214668 - protein, 54 aa, Zea mays
  Clone ID: MRT4577_127377C.1.pep
LWIYLSIRPQFTYVSRQVQRSRPRILIIHPFSSHTIPLRLCLQRPHSPGVVVSF

SEQ ID NO: 214669 - protein, 1692 aa, Zea mays
  Clone ID: MRT4577_127378C.1.pep
MSGEHAKREMETGDKPIGDKPTTSHEKASSEESHNKKKGKEKKASSHKSHQSGDKKKKMRKVVYYETDTSSPSTSGSDASSVTSKCHERKKFSKIPLRYPRIPKHTPLLSVPLGKPPTFDGEDYARWSDMIRYHLTSLHKSIWDIVEFGVQVPSVGDEDYDEDEVAQIQHFNSQATTILLTSLSREEYNKVQGLKSAKEIWDVLKTAHEGDEVTKITKRETIEGELGRFRLRQGEEPQDMYNRLKTLVNQVRNLGSKKWDDHEVVKVILRSLVFLNPTQVQLICGNPRYTLMTPEEVIGNFVSFELMIKGSKKINELDGPSTPEAQPVAFKATEEKKEESTSSRQPIDASKLDNEEMALIIKSFRQILKQRKGKDYKSRSKKVCYKCGKPGHFIAKCPLSSDSDRDNDKKGRRKEKKRYYKKKGGDAHVCREWDSDESSTDSSSDEDAANIAVTKGLLFPNVGHKCLMAKDGKKKKVKSKSSTKYESSSDDNASDEEDNLRTLFANLNMQQKEKLNELISAIHEKDDLLDTQEDFLIKENKKHVKVKNAYALEVEKCEKLSSELSTCHETIDNLRKENPNLLAKVDSNVCDVSIPNLRNDNNDLLAKIEELNTSIASLRIENEKLLAKAKELDVCNVTISDLRDKNDILRAKIIELNSCKPSTSTTEHVTICTRCRDVDIDAIHDHMVLIKQQNDHIEKLDAKIAEHELENEKFKFARSMLYSGRRPGIKDDIGFQKGDNVKLNASPKKLSNFVKGKAPMPQDNEGYILYPAGYPESKIRRIHSRKSHSGPNHAFMYKGETSSSRQPTRAKLPKKKTPSASNDHSISFKTFDASYVLTNKSGKVVAKYVGGKHKVYASGGSSWIIDSGCTNHMTGEKKMFSSYEKNQDPQRAITFGDGNQGLVKGVIVFRRSDDSIAFKGVLEGQLYLVDFDRAELDTCLIAKTNIGWLWHHRLAHVGMKNLHKLLKGEHILGLTNVHFEKDREKSHTQETLKGFLRRAQNEFGLRVKKIRSDNGTEFKNSQIEGFLEEEGIKHEFSSPYTPQQNGVVERKNRTLLDMARTMLDEYKTSDRLGGGGRKTKFAPKTIEGFLLGYDSNTRAYRVFNKSSGLVEVSCDVVFDETNGSQVEQVDLDEIGDEEALCIALRNMTIGDVCPKESEEPPNAQDQPSSSTQASPPTQNEDEAQVDEGEDQRDEPPQDDGNDQGGDAKDQNKEDEEPRPPHPRVHQAIQRDHPVDTILGDIHKGVTTRSCVAHFCEHYSFVSSIEPHRVEEALQDSDWVVAMQEELNNFTRNEVWHLVPRPNQNVVGTKWVFRNKQDEHGVVTRNKARLVDKGYSQVEGLDFGETYAPVARLESIRILLAYATYHGFKLYQMDVKSAFLNGPIKEEVYVEQSPGFEDSEYPNHVYKLSKALYGLKQAPRSWYECLRDFLITNGFKVGKVDPTLFTKTLDNDLFVCQIYVDDIIFGSTNESTCEEFSRIMTQKFEMSMMGELKYFLGFQVKQLQEGTFISQTKYTQDILNKFGMKDAKPIKTPMGTNGHLDLDTEGCKINRKSTSGTCQFLGRSLVSWASKKQNSVALSTAEAEYIVAGHCCAQLLWMRQTLRDYGYKLTKVPLLCDNESAIRMADNRVEHSRTKHIVIRYHFLRDHQQKGDIDIAYINTKDQLADIFTKPLDEQTFNKLRHELNILDSRNFF

SEQ ID NO: 214670 - protein, 123 aa, Zea mays
  Clone ID: MRT4577_127379C.1.pep
FGTRPHRPAHTRRKAEHGGLRPEQSGAPPANPLPAQAAAAAGPMALSLSGTSARFALASLVPRARAYAAAGEAKEAGRAAAAAAEGSWVPDPVTGHYRPANWAAAVDPADLRAAHLARTYARA

SEQ ID NO: 214671 - protein, 71 aa, Zea mays
  Clone ID: MRT4577_12737C.1.pep
GNRSGGPLICHLKGRTLNMGLLPQQHRCLKKEPLAWQILLVQTEGPDQGVGLCQWIKLLLTLVWVRPKVSH

SEQ ID NO: 214672 - protein, 841 aa, Zea mays
  Clone ID: MRT4577_127380C.1.pep
EKSQTQETLKGFLRRAQNEFGIRIKKIRSDNGIEFKNSQIEGFFKEEGIKHEFSSPYTPQQNGVVERKNRTLLDMARTMLDEYKTSDRFWAEAVNTACYAINRLYLHRILKKTSYELLTGKKPNVSYFRVFGSKCFILVKRGRKSKFAPKAVEGFLLGYDSNTRAYRVFNKSFGLVEVSCDIVFDEINGSQVEQVDLDELDDEEAPCVALRNMSIGDVCPKESEEPPQAQDQPSSSMQASPPTQDDDQAQEDENDDQEDEPHQEDGNDQGGDAHDQDKEDDDGPRPPHPRVHQAIQRDHPMNTILDDIHKGVTTRSRVAHFCEHYSFVSSIEPHRVEEALQDSDWVLAMQEELNNFTGNEVWHLVPRPNQNVVGTKWVFRNKQDEHGVVTRNKARLVAKGYSQVEGLDFGETYAPVARLESIRILLAYATYHGFKLYQMDVKSAFLNGPIKEEVYVEQPPGFEDSEYPKHVYKLSKALYGLKQAPRAWYECLRDFLIANGFKVGKADPTLFTKTLANDLFVCQIYVDDIIFGSTNKSTCEEFSRIMTQIFEMSMMGELKYFLGFQVKQFQEGTFISQTKYIQDILTKFGMKDAKPIKTPMGTNGHLDLDTGGKSVDQKVYQSIIGSLLYLCASRLDIMLSVCMCARFQADPKEVHLRAIKRILRYLVYTPKFGLWYPRGSTFDLIGYSDADWAGCKINRKSTSGTCQFLGRYLMSWASKKQNSVALSTAEAKYIAAGHCCAQLLWMRQTLRDYGYKLTKVPLLCDNESAICMADNPVEHSRTKHIAIRYHFLRDHQQKGDIEIAYVNTKEQLADIFTKPLDEQTFTKLRHELNILDSRNFD

SEQ ID NO: 214673 - protein, 95 aa, Zea mays
  Clone ID: MRT4577_127381C.1.pep
MALSLSGTSARFALASLVPRARAYAASAASGAMRRAAEGAAAGEAKEAGRAAAAAAEGSWVPDPVTGHYRPANWAAAVDPADLRAAHLARTYARA

SEQ ID NO: 214674 - protein, 116 aa, Zea mays
  unsure (1)..(116): unsure at all Xaa locations
  Clone ID: MRT4577_127382C.1.pep
RTDRILMHKYYHLVSVLIFYPAGILQTSFLDLAFGASFTVLLILSMIRISXIYSLGHVVHQFMNYFTDHRVTKTLIVNHYSLLLCXALPNCTSSRLHDXALVPLARIFNLAIGHTI

SEQ ID NO: 214675 - protein, 1844 aa, Zea mays
  Clone ID: MRT4577_127383C.1.pep
MSGDHAKKEMETGDKPTTSHGKTSSEESRNKGKGKEKKSSSHKSHRSGDKKKKMRKVVYYETDTSSPSTSGSNASSITSKRHERKKFSKIPLRYPRISKRTPLLSVPLGKPPLFDGEDYNMWSDKMRHHLTSLHTSIWNVVEFGVQVPSVGDEDYDSDEVAQIHHFNSQATTILLASLTREEYNKVQGLKSAKEIWDVLKTAHEGDEVTKITKREMIEGELGRFMLHQGEDPQAMYNRLKTLVNQVHNLGSEKWDDHEMVKVILRSLVFLNPTQVQLIRGDPRYKLMSPEEVIGKFVSFELTIKGSKKIIEQGTSSTLEAQPVAFKATEEKKEESTSSRQPIDASKLDNEEMTLIIKSFRQILKQRRGKDYKPCSKKVCYKCGKPGHFIAKCLISSDSDRGDDKKGRRKEKKRNHKKKGGDAHVCHEWDSDESSTDSSSDEDAANIAVNKGLLFPNVGHKCLMAKDGKKKKVKSKSSTKYESSSDDNASDEEDNLRTLFANLNMQQKEKLNELISAIHEKDELLDTQEDFLIKENKKHVKVKNAYALEVEKCEKLSTLGLKMKKMLTKAKNLDVCNASISDLRSENDILHAKIVELKTCKPSTSTVEHVSICTRCRDVDIDAIHDHMVLIKQQNDHIAKLDAKIAEHELENENFKFARSMLYSGRRPGIKDGIGFQRGDNVKLNAPPKRLSNFVKGKAPIPQDNEGYILYPVGYPESKIRRIHSRKSHSGPNHAFMYKGETSSSRQSTHAKLPRKKTPTASNDSKISFKTFDASYVLTNKSGKVYASGDSSWIIDSGCTNHMTGEKKMFSSYEKNQDPQRAITFGDGNQGLVKGVTVFRRSDDSIAFKGVLEGQLYLVDFDRAELDTCLIAKTNMGWLWHRRLAHVGMKNLHKLLKGEHILGLTNVHFEKDRICSACQAGKQVGVHHPHKNIMTTDRPLELLHMDLFGPIAYISIGGSKYCLVIVDDYSRFTWVFFLQEKSQTQETLKGFLRRAQNEFGLRIKKIRSDNGTEFKNSQIEGFLEEEGIKHEFSSPYTPQQNGVVERKNRTLLDMARTMLDEYKTSDRFWAEAVNTACYAINRLYLHRILKKTSYELLTGKKPNISYFRVFGSKCFILVKRGRKSKFAPKTVEGFLLGYDSNTRAYRVFNKSSGQVEVSCDVVFDETNGSQVEQVDLDEIGDEEAPCIALRNMSIGDVCPKESEEPPNAQDQPSSSTQASPPTQNEDEAQVDEGGDQRDEPPQDDGNDQGGDANDQGKEDEEPRPPHPRAHQAIQRDHPVDTILGDIHKGVTTRSRVAHFCEHYSFVSPIESHRVEEALQDSDWVVAMQEELNNFTRNEVWHLVPCPNQNVVGTKWVFRNKQDEHGVVTRNKARLVAKGYSQVEGLDFGETYAPIARLESIRILLAYATYHGFKLYQMDVKSAFLNGPIKEEVYVEQLPVFEDSEYPNHVYKLSKALYGLKQAPRAWYECLRNFLITNGFKVGKADPTLFTKTLENDLFVCQIYVDDIIFGSTNESTCEEFSRIMTQKFEMSMMGELKYFLGFQVKQLQEGTFISQTKYTQDILSKFGMKDAKPIKTPMGTNGHLDLDTEGKSVDQKVYRSMIGSLLYLCASRPDIMLSVCMCARFQADPKEAHLTVVKRILRYLAYTPKFGLWYPRGSTFDLIGYSDADWAGCKIDIKSTSGPCQFLGRSLVSWASKKQNSVALSSAEAEYIAAGHCCAQLLWMRQTLRDYGYKLTKVPLLCDNESAIRMADNPVEHSRTKHIAIQYHFLRDHQQRGDIEIAYINTKEQLANIFTKPLDEKTFTKLRHELNILDSRNLYRYFAHIAQLYTFDHLFHITMTNVFFK

SEQ ID NO: 214676 - protein, 1926 aa, Zea mays
  Clone ID: MRT4577_127384C.1.pep
MSGDHAKKEMETGEKPTTSHGSTSSEESRTKRREKKKSSSNKGKEKKSSSHHKEKKEKSSSHKPHRKGDKHKRMRKVVYYETDTSSTSTSDSDAPSVTSKRQERKKYSKIPLRYPRISKHTPLLSVPLGKPPTLDGEDYARWSDLMRFHLTSLHKSIWDVVEFGAQVPSVGDEDYDEDEVAQIEHFNSQATTILLASLSKEEYNKVQGLKSAKEIWDVLKTAHEGDELTKITKRETIEGELGRFRLHKGEEPQHMYNRLKTLVNQVRNLGSKKWDDHEVVNVILRSLIFLNPTQVQLIRGNPRYTKMTPEEVIGHFVSFECMIEGSRKINELGDSSEAQPVAFKATEEKKEEATPSRQPIDTSKLDNEEMALVIKSFRQILKQRRGKDYKSRSKKVCYKCGKPGHFIAKCPISSDSDRGDDKKGRRKEKKRYYKKKGGDAHVCREWDSDESSSDSSDDEDAANIAVTKGLLFPNVDHKCLMAKDGKKKVKSKSSTKYESSSDDNASDEEDNLRSLFANLNIAQKEKLNELVSAIHEKDDLLDSQEDCLIKENKKHVKVKKAYALEIEKCEKLSSELSTCREMIDNLRNENAILNAKVDSHVCNVSIPNLRNDNVDLLAKIDELNVSLASLRNENEKLLAKAKDFDVCNTTISDLRDKNDILHAKIVELNSCKPSTSIVEHVSICTRCRDVDINAIHDHMALIKQQNDHIAKLDAKIAEHNLENEKFKFARSMLYNGRRPGIKDGIGFQRGDNVKISAPPKRLSNFVKGKAPMPQDNEGYILYPAGYPESKIRKIHSRKSHSGPNHAFMYKGETSSSRQPTRAKLPRKKTPNASNDHDISFKTFDASYVLTNKSGKVVAKYVGGKHKGSKTCVWVPKVLVSNAKGPKTIWVYASGGSSWILDSGCTNHMTGEKRMFSSYEKNQDPQRAITFGDGNQGLVKGVTVFRRSDDSIAFKGVLEGQLYLVDFDRAELDTCLIAKTNMGWLWHRRLAHVGMKNLHKLLKGEHILGLTNVHFEKDRICSACQAGKQVGSHHPHKNIMTTDRPLELLHMDLFGPIAYISIGGSKYCLVIVDDYSRFTWVFFLQEKSQTQETLKGFLRRAQNEFDLRIKKIRSDNGTEFKNSQIEGFLEEEGIKHEFSSPYTPQQNGVVERKNRTLLDMARTMLDEYKTSDRFWAEAVNTACYAINRLYLHRILKKTSYELLTGKKPNISYFRVFGSKCFILVKRGRKSKFAPKTVEGFLLGYDSNTRAYRVFNKSTGLVEVSCDVVFDEANGSQVEQVDLDEIGEEEAPCIALRNMSIGDVCPKESEEPPNAQDQPSSSMQASPPTQDQEEAQVDEEKDQSNEPPQDDGNDQGGDTNDQDKEDEEEPRPPHPRVHQAIQRDHPVDTILGDIHKGVTTRSRVAHFCEHYSFVSSIEPNRVEEALQDSDWVVAMQEELNNFTRNEVWHLVPRPNQNVVGTKWVFRNKQDEHGVVTRNKARLVAKGYSQVEGLDFGETYAPVARLESIRILLAYATYHGFKLYQMDVKSAFLNGPIKEEVYVEQPPGFEDSEYPNHVYRLSKALYGLKQAPRAWYECLRDFLIANGFKVGKADPTLFTKTLENDLFVCQIYVDDIIFGSTNESTCEEFSRIMTQKFEMSMMGELKYFLGFQVKQLQEGTFISQTKYTQDILSKFGMKDAKPIKTPMGTNGHLDLDTGGKSVDQKVYRSMIGSLLYLCASRPDIMLSVCMCARFQSDPKESHLTAVKRILRYLTYTPKFGLWYPRGSTFDLIGYSDADWAGCKINRKSTSGTCQFLGRSLVSWASKKQNSVALSTAEAEYIAAGHCCAQLLWMRQTLRDYGYKLTKVHLLCDNESAIKMADNPVEHSRTKHIAIRYHFLRDHQQKGDIEISYINTKDQLADIFTKPLDEQTFTRLRHELNILDSRNFFC

SEQ ID NO: 214677 - protein, 196 aa, Zea mays
  Clone ID: MRT4577_127385C.1.pep
FWGAVYPTYFALPYLKASRGNIVVTASVAGRVPTARMSFYNASKGAVIRFYETLRAELGSHVHVTILTPGYVVSNLTKGKGLQKDGHVGIDEEARDINVGPMPVGKTESLAEVVVASVRRRDYYVTWPGWYWPFHMVMCAAPELVDWFSRTFYVSKSGDQDGGGGALSKKILEAVGGKKFLYPQTIRSQTAMAPNN

SEQ ID NO: 214678 - protein, 75 aa, Zea mays
  Clone ID: MRT4577_127386C.1.pep
LGRPCLFFFFVFFCLLSWGDRALPCIKLCKESFLKNTEVLSNALCGAPTKRKAFLNKGSTFQTPLGGFFFLKNME

SEQ ID NO: 214679 - protein, 112 aa, Zea mays
  Clone ID: MRT4577_127387C.1.pep
GCHATRLVPQSADGRLHFYCVPVSVLDPVMRNERRWVVKIGRKRGAEECRVARARRERVAGVEGGKRSPSRDGGGWWWRWREREREREREREGWSGWWPGAAVGGVGREGER

SEQ ID NO: 214680 - protein, 177 aa, Zea mays
  unsure (1)..(177): unsure at all Xaa locations
  Clone ID: MRT4577_127388C.1.pep
AGRVPEASKGAVIRFYETLRAELGSHVHVTILTPGYVVSNLTKGKGLQKDGHVGIDEEARDXATATKWHACARARLQINVGPMPVGKTESLAEVVVASVRRRDYYVTWPGWYWPFHMVMCAAPELVDWFSRTFYVSKSGDQDGGGGALSKKILEAVGGKKFLYPQTIRSQTAMAPNN

SEQ ID NO: 214681 - protein, 160 aa, Zea mays
  unsure (1)..(160): unsure at all Xaa locations
  Clone ID: MRT4577_127389C.1.pep
MPLNRSIAPRAQRQARRPWGDQLTDEXQCAEVKEDFNLFNKEVDDRITNKELVTDVRSLSQNPTXADLQDMINEVHGDGNVTIDCREVLNLMVRTMKDTDSKEELKEVLREVDKDXNGFVSAAELRHEMTNLXRSVTDXEDDEMIRDDDVEDDAQISYEE

SEQ ID NO: 214682 - protein, 226 aa, Zea mays
  Clone ID: MRT4577_12738C.1.pep
MASSSSLFLLAALLALASWQATAYDPSPLQDFCIADMKAPVRVNGFACKDPMAATPEDFFNAAMLDQPRDTKASKVRSNVTNINVINFPGLNTLGISLARIDYGPLGVNTPHIHPRATELLTVLEGTLYLGFVTSNPNRLFSKIVKKGDVFVFPKAMIHFQMNLAHDKPAAALSSLSSQNPGVISIANAVFGSKPPISDDVLATAFQVEKDLIHWLQSQFWGNTNY

SEQ ID NO: 214683 - protein, 98 aa, Zea mays
  Clone ID: MRT4577_127390C.1.pep
GELIYFEMDMTGQLMEVEKQDMSGDVACLAIAPVPEGRQRSRFLAVGSYDNTIRILSLDPDDCLQPLSVQSVSSAPESLLFLEVQASVGGEDGADYPA

SEQ ID NO: 214684 - protein, 78 aa, Zea mays
  Clone ID: MRT4577_127391C.1.pep
TPSSTTFLKALPVPAAGPSTRMPPYLPGIQTSAACLPGSCQARRLEGPGRHQFTFFSPFRSFVVVVSKQACDWPLLRV

SEQ ID NO: 214685 - protein, 54 aa, Zea mays
  Clone ID: MRT4577_127392C.1.pep
AKSHVAVVCDTSTICNNAFLARLLLHIRQHGQVRHVDPSSLDGGFHLQALPSLG

SEQ ID NO: 214686 - protein, 83 aa, Zea mays
  unsure (1)..(83): unsure at all Xaa locations
  Clone ID: MRT4577_127393C.1.pep
QLVPVLTSTPAPTPGHPLTTCNNCCHSXNLLSQTHHPSPTTPSFLVPSFSFLIRYTSIIKFFVXCLWLPTNKPVPPPPPQGEF

SEQ ID NO: 214687 - protein, 121 aa, Zea mays
  Clone ID: MRT4577_127394C.1.pep
VPLSLPRPAGSRRCCSRPPLASESLARRRGGRYLAFDQKKQDGLKADGTGKTPQNELTCSVCLEQVMVGDLLRSLPCLHQFHVNCIDPWLRQQGTCPICKHQVSDGWHATGNGEEDASYMV

SEQ ID NO: 214688 - protein, 70 aa, Zea mays
  unsure (1)..(70): unsure at all Xaa locations
  Clone ID: MRT4577_127395C.1.pep
LLGKEIEIAFEPPVSIAGFKXRVXKKKGFLPVQQGFFFVGKQLFFAKPPKGSTIEGGFVPPFVLALGGGF

SEQ ID NO: 214689 - protein, 145 aa, Zea mays
  Clone ID: MRT4577_127396C.1.pep
RANRWPDAAAGGISLSIRILVGASFSGAYLISIYRCLGFTAKFAAAWGFGDWSQFYHCSCVEKKQDGLKADGTGKTPQNELTCSVCLEQVMVGDLLRSLPCLHQFHVNCIDPWLRQQGTCPICKHQVSDGWHATGNGEEDASYMV

SEQ ID NO: 214690 - protein, 67 aa, Zea mays
  Clone ID: MRT4577_127397C.1.pep
MAGFRSLAPKTRNLVVAGGLSAFVLGVYYYTMRAVGGTDELQVAIDKFEETKKQDAARNSSSSAGGS

SEQ ID NO: 214691 - protein, 237 aa, Zea mays
  Clone ID: MRT4577_127398C.1.pep
MVMVASMRAPLRRGPRPHPPTGGDNEAIKAKESEARRQVALTVSLAEATTSAVGSLTSGGDHLSTDDSGHLRTSGLPAMAVASARVKRSSLPSPHGSEDKTIQERGCHPPRHTTSCTTPRMAAEQCGQRRGRSRGCGRPAHGATVARAVDRQTCPDQAAGGSAGGSTKAIQAEEPDTRQLTVPTAGRPRVAEVRLLRKAGECPSPPNAGGRSGSPAHAEGRTLTRLAFHPSEDDEHP

SEQ ID NO: 214692 - protein, 115 aa, Zea mays
  unsure (1)..(115): unsure at all Xaa locations
  Clone ID: MRT4577_127399C.1.pep
HSLTASAIEVVYSRYAKAKAAPCMYVISSSDASTEGNASYESFMHVVQPYGDMXCAWEAHSLITDALVAWHGSSALTDGGLGASIIRVSSRVDIVHRHTSSSEGLRERSASTRLL

SEQ ID NO: 214693 - protein, 49 aa, Zea mays
  Clone ID: MRT4577_12739C.1.pep
LAIIGCCYRRATTRVIELGSQSTVPLDNPHLLMVRFGEQLRFLHQGRRT

SEQ ID NO: 214694 - protein, 96 aa, Zea mays
  unsure (1)..(96): unsure at all Xaa locations
  Clone ID: MRT4577_1273C.1.pep
KAPSVIXSRGNSYIARPSLASRQVIKRHDTPXSVWXHWVWHSEXDLFMEGASFTVTGGQINRQFYKKDLIKPRIGSSVTRLTRYAGSLACSPGKPC

SEQ ID NO: 214695 - protein, 61 aa, Zea mays
  Clone ID: MRT4577_127400C.1.pep
HAPTGQLNVWFDRWRDRRRRLRKPLRHSPTSSSACTHEGSNHGFSRGRYGSKCVKLSDEVR

SEQ ID NO: 214696 - protein, 55 aa, Zea mays
  unsure (1)..(55): unsure at all Xaa locations
  Clone ID: MRT4577_127401C.1.pep
PGAKPRXSVHXXSSEPGSLRRWDGPFLCQSCQEKKEAMEGKRRSRGSSXNSGSSE

SEQ ID NO: 214697 - protein, 146 aa, Zea mays
  unsure (1)..(146): unsure at all Xaa locations
  Clone ID: MRT4577_127402C.1.pep
GPSSGDVSRHHLXRSSPQSSKRKGMLIFNTRSARVMNQYEVLMXGSLXIALREWLASDFTYQSRTSSSXQIGCAWNENVTGECMWDHFCLDDAERILDCSKSHIAASAHHMYKSDGALVYEMGLNSYWFTISXARVLSDVTXEGGI

SEQ ID NO: 214698 - protein, 94 aa, Zea mays
  Clone ID: MRT4577_127403C.1.pep
TRLNKKRDTDEMVDILIAVAFSALRDKYSIEGHEEWITELDSSTEEKFSRHLIIRIPKIAFKDNSHVGAFVCEVCSQIAAQRTTNHGLDKLLYY

SEQ ID NO: 214699 - protein, 438 aa, Zea mays
  unsure (1)..(438): unsure at all Xaa locations
  Clone ID: MRT4577_127404C.1.pep
MKSLQEERAALVPSPWPQQQRKDGGEHDPEQLMDEDDGDDEEDLQDEQHTRTIRTSTKTAEASSSAERRVPAWWRLRRAQKLVPTRGVGLVIAGLLVLVLLLVVGGGGNTSRRRWIHLDYASSFLRGGGLRQHQWPPHHVPSPAADLVPIPFSCGGNGSACPRRQTATSPPSPSPSSSSPPAATKSSSSKNKQPPPQCPDYFRFIHSDLSPWRETGITREAVERGRHRAAFRLVVVDGRAYVETYHRVFQTRDTFTQWGIAQLLARYPGRVPDLDLMFNCEDMPEVKVSRXAEESSAPPLFRYCKDDSTADIAHPDWSFWGWPEVNIRPWAPLLEEMAAEMGRLPWADREPYAYWKGNPTVSAERADLRRCNDSSSSGGTRVFWQDWGAAIRDGFRDSNLAKQCRYRYKIYVRGRSXSVSLKYIIACDSPVLLIATPF

SEQ ID NO: 214700 - protein, 54 aa, Zea mays
  Clone ID: MRT4577_127405C.1.pep
VRSGGPLRSAHRRREDARARHLRHGHVKIPDRARERCRAQRITSRVGSGRDPRV

SEQ ID NO: 214701 - protein, 124 aa, Zea mays
  unsure (1)..(124): unsure at all Xaa locations
  Clone ID: MRT4577_127406C.1.pep
VHNHLSQGCLSNSTSSEFHTHNFALPGAYHKREVHLPHRSYPXETHIREYQKNFQDYLPKPTHNSYGLCERKSPNYLLHILQYIAHPILLDRDRSTPPLWKALQPVLHPMVTQDPLPIHHPTHL

SEQ ID NO: 214702 - protein, 87 aa, Zea mays
  Clone ID: MRT4577_127407C.1.pep
YVSPKPPPQYVGALVSPPDFSKGGCLGAIKGNIFCFVPRFCQKSGHFFWRKLVFAPLKKKKKKKKKKKKKKKKKKKKKKKLERGAGT

SEQ ID NO: 214703 - protein, 517 aa, Zea mays
  unsure (1)..(517): unsure at all Xaa locations
  Clone ID: MRT4577_127408C.1.pep
MSGASAKRDLETGDKSACSGRTHSRESAHKHKEESSSSIKSHRMGDKKKKMKKVVYYETDSSSPSTSGSESASTTSKRHERKKYSKPPMFEGEDYSMWSDKMRHHLTSLHKSIWDIVEYGVQEVEQIHHFNSQATTILLASLSREEYNKVQGLKSAKEIWDVLKTAHEGDEVTKITKRESIEGELGRFRLRQGEEPQDMYNRLKTLVNQVSNLGSKKWDDHEMVKVILRSLVFLNPTQVQLIRGNPRYTLMSPEEVIGNFVSFELMIKGSKKIIEHDGPSTPEAQPVAFKATEEKEEESTSSRLPIDASKLDNEEMALIIKSFRQILKQRRGKDYKSRSKKVCYKCGKPGHFIAKCPLSSDSDRGDDKKGKKREKKRYYKKKGGDAHVCREWDSDESSSDSSSDEDAANIAVTKGLLFPNVGHKCLMAKYGKRKKDELLDSQEDFLIKENKKHVKVKNAHALEVEKCEKLSSELSTCNDIIVNLRNENAKLIAKVDSNVXCFNSXLRDDNVSLLAKI

SEQ ID NO: 214704 - protein, 1802 aa, Zea mays
  Clone ID: MRT4577_127409C.1.pep
MSGDHAKKEMETGEKPTTSHESTSSEESRTKRREKKKSSSNKGKEKKSSSHHKEKKEKSSSHKPHRKGDKHKRMRKVVYYETDTSSTSTSDSDAPSVTSKRQERKKYSKIPLRYPRISKHTPLLSVPLGKPPTFDGEDYARWSDLMQFHLISLHKGIWDVVEFGVQVPSIGDENYDEDEVAQIEHFNSQATTILLASLSKEEYNKVQGLKNAKEIWDVLKTAHEGDELTKITKRETIEGELGRFRLHKGEEPQHMYNRLKTLVNQVRNLGSKKWDDHEVVNVILRSLIFLNPTQVQLIRGNPRYTKMTPEEVIGHFVSFECMIEGSRKINELGEPSEAQPVAFKATEEKKEESTPSRQPIDASKLDNEEMALVIKSFRQILKQRRGKDYKSRSKKVCYKCGKPGHFIAKCPMSSDSDRGDDKKGRRKEKKRYYRKKGGDAHVCREWDSDESSSDSSDDEDAANIAVTKGLLFPNVGHKCLMAKDGKKKKVKSISSTKYESSSDDNASDEEDNLRILFANLNMEQKEKLNELISAIHEKDDLLDSQEDCLIKENKKHVKVKKAYALEVEKCEKLSSELSTCREMIDNLRNENAILNAKVDSHVCNVSIPNLRDDNIDLLAKIDELNVSLASLRLENENLIAKAKDFDVCKVTIADLRDKNDILHAKIVELNSCKPSTSTIEHVTICARCRDIDINAIHDHMSLIKQQNDHIAKLDAKIAEHNLENEKFKFARSMLYNGRRPGIKDGIGFQRGDNVKLNAPPKNLSNFVKGKAPMPQDNEGYILYPAGYPESKIRKIHSRKSHSGPNYAYMYKGETSSSRQPTHAKLPKKKIPNASNEHSISFKTFDASYVLTNKSGKVVAKFVGNKHKGSKTCVWVPKVLVSNAKGPKTVWVYASGGSSWILDSGCTNHMTGEKRMFSSYEKNQDPQRAITFGDGNQGVTVFRRSDDSIAFKGVLEGQLYLEKSQTQETLKGFLRWAQNEFGLRIKKIRSDNGTEFKNSQIEGFLEEEGIKHEFSSPYTPQQNGVVERKNRTLLDMARTMLDEYKTPDRFWAEAVNTACYAINRLYLHRILKKTSYELLIGKKPNISYFRVFGSKCFILVKRGRKSKFAPKTVEGFLLGYDSNTRAYRVFNKSTGLVEVSCDVVFDETNGSQVEQVDLDEIGNEEAPRIALRNMSIGDVCPKESEEPPNAQDQPSSSMQASPPTQNEDEAQVDEGQNQEDEPPQDDSNDQGGDEIDQEKEDEEEPRPPHPRVHQAIQRDHPVDTILGDIHKGVTTRSRVAHFCEHYSFVSSIEPHRIEEALKDSDWVVAMQEELNNFTRNEVWHLVPRPNQNVVGTKWVFRNKQDEHGVVTRNKARLVAKGYSQVEGLDFGETYAPVARLESIRILLAYATYHGFKLYQMDVKSAFLNGPIKEEVYVEQPPGFEDSEYPNHVYRLSKALYGLKQAPRAWYECLRDFLIANGFKVGKADPTFFTKTLENDLFVCQIYVDDIIFGSTNESTCEEFSRIMTQKFEMSMMGELKYFLGFQVKQLQEGTFISQTKYTQDILAKFGMKDAKPIKTPMGTNGHLDLDTGGKSVDQKVYRSMIGSLLYLCASRPDIMLSVCMCARFQSDPKESHLTAVKRILRYLAYTPKFGLWYPRGSTFDLIGYSDADWAGCKINRKSTSGTCQFLGRSLVSWASKKQNSVALSTAEAEYIAAGHCCAQLLWMRQTLRDYGYKLTKVPLLCDNESAIKMADNPVEHSRTKHIAIRYHFLRDHQQKGDIEISYINTKDQLADIFTKPLDEQSFTRLRHELNILDSRNFFC

SEQ ID NO: 214705 - protein, 287 aa, Zea mays
  Clone ID: MRT4577_12740C.1.pep
MYPSPPPHLFYGVSAGRQHSPRSSIHFSNPLAKRAMAKFALGHHREASDAGCVRAVLAELILTFLFVFAGVGSAMATGKLAGGGGDTVVGLTAVALAHTLVVAVMVSAGLHVSGGHINPAVTLGLAATGRITLFRSALYVAAQLLGSTLACLLLAFLAVADSGVPVHALGAGVGALRGVLMEAVLTFSLLFAVYATVVDPRRAVGGMGPLLVGLVVGANVLAGGPFSGASMNPARSFGPALVAGVWADHWVYWVGPLIGGPLAGLVYDGLFMAQGGHEPLPRDDTDF

SEQ ID NO: 214706 - protein, 148 aa, Zea mays
  unsure (1)..(148): unsure at all Xaa locations
  Clone ID: MRT4577_127410C.1.pep
VACAPAGCGSGSLACPGRXAAPPAXLAGFXLAPAGGPPFFAVRLVAGSRLPVVVXPPVGCGGGGGAAXXXXCXXAGCAGXLPPLLPLVFXXXGXXKMRNRFKPTGWVXFXKKSKYACPGPCRPPAXSPLFGSACPXXXGCPFFFFLPP

SEQ ID NO: 214707 - protein, 361 aa, Zea mays
  unsure (1)..(361): unsure at all Xaa locations
  Clone ID: MRT4577_127411C.1.pep
MSIGDVCPKESEEPPQTQDQPSSSMQASPPTQDEDEAQNDEREDQEVEPPLEESNDQGGDAHDQDEEDEQVPRQPHPRVHQAIQRDHPVNTILGDIQKGVTTRSRVAHFCEHYSFVSSIEPHRIEEALQDSDWVVAMQEELNNFTRNEVWHLVPRPNQNVVGTKWVFHNKQDEHGMVTRNKARLVAKGYSQVKVGKVDPTLFTKTLENDLFVCQIYVDDIIFGSTNESTGEEFNRIMTQKFEMSMMGELKYFLGFQVKQLHEGTFISQTMYIQDILTKFGRKDAKQFKTPIGTNGHLDLDTGGKSVDQXRKSTSGTCQFLGRSLVSWASKKQNSVALSTAEVEYIAVGHYCVXLLWMRQTL

SEQ ID NO: 214708 - protein, 1358 aa, Zea mays
  Clone ID: MRT4577_127412C.1.pep
MSGDHAKKDMVTGRKPATSHGKAPSGESYNKGKGKEKESPSHKSCRSGDKKKKMRKVVYYETDTSSPSTFGSDTPSITSKRHERKKFREEPQDMYNRLKTLVNQVRNLGSKKWDDHEMVKVILRSPVFLNPTQVQLIRGNPRYTLMSPEEVIGHFVSFELMIKGSKKINELDGPSTFEAQPVAFKATEEKKEESTSSRTPIDASKLDNEEMALVIKSFRQILKLRRGKNYKPRSKKVCYKCGKPGHFIAKCPLSSDSDRGDDKKGRRKEKKRYYKKGGDAHVCREWDSDESSTDSSSDEDAANMAVTKGLLFPNVGHKCLMAKDGKRKKVKSRFSTKYETSSDEENASNEEDNLCILFANLNMQQKEKLNELISAIHEKDDLLDTQEDFLIKENKKHVKIKNAYALEVEKCEKLSSELSTFHETIDNLRNENASLIAKVDSNACNVSISNLRDDNVDLLAKIEELNVTLASLRIENEKLIAKAKELDVCNVTISDLRDKNDILRAKIVELNSCKPSTSITEHVTICTRCRDVDVSAIHDHLSMIKQQNDHIAKLDAKIAEHELENEKFKFARSMLYNGRRPGIKDGIGFQQGGNVKLNAPPKKLSNFVKGKAPMPQDNEGYILYPAGYLEDKIRRIHSRKSHSGPNHAFMYKGETSSSRQPTRAKLPKKKTPSASNDHSILFKTFDASYVLTNKSGKVYASGGSSWIIDSGCTNHMTGEKKMFSSYEKNQDPQRAITFGDGNQGVTVFRRSDDSIAFKGVLEGQLYLVDFDRAELDTCLIAKTNMGWLWHRRLAHVGMKNLHKLLKGEHILGLTNEKSHTQETLKGFLRRAQNEFGLRIKKIRSDNGTEFKNSQIEGFLEEEGIKHEFFSLYTPQQNGVVERKNRNLLDMARTMLDEYKTSDRFWAEAVNTACYAINRLYLHRILKKTSYELLTEQVDLDEIGDEEASCITLRNMSIGDVCPKESEEPPNAQDQPSSSPQASPPTQNENEAQFDEGENQEDEPPQDDGNNQGGDANDQDKEDEEPRPPHPRVHQAIQRDHPVDTILDDIHKGVTTRSRVAHFCQHYSFVSSIEPHRVEEALQDSDWVVAMQEELNNFTRNEVWHLVPRPNQNVVGTKWVFHNKQDEHGVVTRNKARLVAKGYSQVEGLNFGETYAPVARLESIRILLAYATYHGFKLYQMDVKSAFLNGPIKEEVYVEQPPGFEDSEYPNHVYKLSKALYGLKQAPRAWYKCFRDFLITNGFKVGKVDPTLFTKTLENDLFVCQIYVDDIIFGSTNESTCEEFSRIMTQKFEMSMMGELKYFLGFQVKQLQEGTFISQTKYIQDILNKFGMKDAKPIKTPMGTNGHLDLDTEGDPHLI

SEQ ID NO: 214709 - protein, 1307 aa, Zea mays
  Clone ID: MRT4577_127413C.1.pep
MSGDHAKKEMETGEKPTTSQGSTSSEESRTKRKEKKKISSNKGKEKKSSSHHKEKKEKSSSHKPHRSKDKQKRMRKVVYYETDTSSTSTSGSDAPSVTSKRQERKKFSKIPLHYPRISKHAPLLSVPLGKPPTFDGEDYARWSDLMRFHLTSLHKSIWDVVEFGAQVPSVGDKDYDEDEVAQIEHFNSQATTILLAFLSREEYNKVQGLKSAKEVWDVLKTAHEGDELTKITKRETIEGELGRFRLRKGEEPQHMYNRLKTLVNQVRNLGSVKWDDHEVVKVILRSLIFLNPTQVQLIRGNPRYTKMTPEEVIGNFVSFECMIEGSRKINELDDPSTSEAQPVAFKATEEKKEEATPTRQPIDASKLDNEEMALVIKSFRQILKQRRGKDYKSRSKKVCYKCGKPGHFIAKCPITSDSDRGDDKKGRRKEKKRYYKKKGGDAHVCREWDSGESSSDSSDDEDAANIAVTKGLLFPNVGHKCLMAKDGKRKKVKSNSSTKYESSSDDNASDEEDNLRSLFANLNIAQKEKLNELVSAIHEKDDLLDSQEDCLIKENKKHVKVKRAYALEIEKCEKLSSELSTCREMIDNLRNENASLNAKVDSHVCNISTSNPRDDNVDLHARIDELNASLASLRIENEKLLAKAKDFDVCKTTISDLRDKNDILHAKIVELNSCKPSTSIVEHVSICTRCRDVDVNAIHDHMALIKQQNDHIAKLDAKIAEHNLENEKFKFARSMLYNGRRPGIKEGIGFQKGDNVKINAPPKKLSNFVKGKAPMPQDNEGYILYPAGYPESKIRRIHSRKSHSGPNHAFMYKGETSSSRQPTHAKLPRKKTPSASNDHNISFKTFDASYVLTNKSGKVYASGGSSWILDSGCTNHMTGEKKMFSSYEKNQDPQRAITFGDGNQGLVKGVTVFRRSDDSIAFKGVLEGQLYLVDFDRAELDTCLIAKTNMGWLWHHRLAHVGMKNLHKLLKGEHILGLTNVHFEKDRICSACQAGKQVGTHHPHKNIMTTDRPLELLHMDLFGPIAYISIGGSKYCLVIVDDYSRFTWVFFLQEKSQTQETLKGFLRRAQNEFALRIKKIRSDNGTEFKNSQIEGFLEEEGIKHEFSSPYTPQQNGVVERKNRTLLDMARTMLDEYKTSDRFWAEAVNTACYAINRLYLHRILKKTSYELLTGKKPNISYFRVFGSKCFILVKRGRKSKFAPKTVEGFLLGYDSNTRAYRVFNKSSGQVEVSCDVVFDETNGSQVEQVDLDEIGDEEAPCIALRNMSIGDVCPKESEEPPNAQDQPSSSMQASPPTQNEDEAQIDEE

SEQ ID NO: 214710 - protein, 701 aa, Zea mays
  Clone ID: MRT4577_127414C.1.pep
MSGAPAKREIGTGGDKSASSGRTHSRESGHKHKEESSSCIKTQRRCDKKKKMKKVVYYETDSLSPSTSGSESASATSKHHERKKYSKMPLCYPRISKRTPLLSVPLGKPPVPKEGDKDYDSEEVEQIRHFNSQATTILLASLSREEYNKVQGLKSAKEIWDVLKTAHGGDEVTKITKRETIKGELGRFMLNQGEEPQAMYNRLKTLVNQVRNLESTKWDDHEMVKVILGSLVFLNPTQVQLIRGDPRYKLMSPEEVIGKFVQPIAFKATEEKKEESTSSRLPIDTSKLDNEEMALIIKSFRQILKQRKGRDYKPRSKKVCYKCGKLGHFIAKCPISSDSDRGDDKRGKKKEKKRYYKKKGGDAHVCREWDSDESSTDSSSDEDATNIAVNKGLLFPNVGHKCLMAKDGKKKPRGLIKENKKHVKVKDAYAQEVEKCEKLTSELSTCHDTISNLRNENAKLIAKVEKLNVCDDSLVKLKNDNASLIAKIDKLNESLSSLKIENDKLISKAKDLNVCNVSISNLRNENDMLHAKIDELNACKPTTSTVEHVSICMRCRDINVDAIHDHLALIKQENDHIAQLSAKINEHDLENEKFKFARSMLYSGRRPDIKDVIGFQQGDNVKLNSLKKLSNFVKGKAPMVQDNEGYILYPIGYPEHKIRRIHSRKSHSGSHHAFMYKSEASSSRQSTHVKLPKKKSPIASM

SEQ ID NO: 214711 - protein, 52 aa, Zea mays
  Clone ID: MRT4577_127415C.1.pep
SYNHKRVQRMVPCTKHNRFKRGVPLARLKIQSLVFGTYDAVIVSGWITACLA

SEQ ID NO: 214712 - protein, 1412 aa, Zea mays
  Clone ID: MRT4577_127416C.1.pep
MYNRPKTLVNQVHNLRSKKWDDHEVVKVILRSLVFLNPTQVQLIRGNPRYTLMTPEEVIGNFVSFELMIKGSKKINELDGPSMSEAQPVAFKATKEKKEESTSSRTPIDASKLDNEEMTLIIKSFRQILKQRKGKDYKPRSKKVCYKCGKPGHFIAKCPLSSDSDRGDDKKGRRKEKKRYYKKKGGDAHVCREWDSDESSTDSSSDEDAANIAVTKGLLFPNVGHKCLMAKDDKRKKVKSRSSTKYETSSDEDNASNEEDNLRILFANLNMQQKEKLNELISAIHEKDDLLDTQEDFLIKENKKHVKVKNAYTLEVENCEKLSSELSTCHDVITNLRNENANLIAKVDSNVCDVSIPNLRNDNVDLLAKIEELNISLASLRIENEKLLAKAKELDVCNASISDLRSKNDILHGKVVELKSCKPSTSTVEHTSICTRCRDINVDAIRDHLALIKKQNDHIAQLNAKIAEHDLENEKFKFARSMLYSGRRPGIKDDIGFQKGDNVKLNDPPKRLSNFVKGKAPMPQYNKGYILYPAGYPESKIGRIHSRKSHSGPNHAFMYKGETSSSRQSTCAKLPKKKTPSASNDHNISFKTFDASYVLTNKSDKIVAKYVGGKHKGSKTCVWVYASGGSSWIIDSGCTNHMTGEKKMFSSYEKNQDPQRAITFGDGNQDVGVTVFRRSDDSIAFKGVLEGQLYLVDFDRAELDTCLIAKTNMGWLWHRRLAHVGMKNLHKLLKGEHILGLTNVHFEKDRVCSACQAGKQVGVHHPHKNIMTTDTPLELLHMDVFGPIAYISIGGSKYCLVIVDDYYRFTWVLFLLEKSHTQETLKGFLRRAQNEFGLRIKKIRSDNGTKFKNSQIEGFLEEEGIKHEFSSPYPPQQNGVVERKNRTLLDMARTMLDEYKISDRFWAEAVNTACYAINRLYLHRILKKTSYELLTGKKLNVSYFRVFGSKCFILVKRGRKSKFAPKAVEGFLLGYDSNTRAYRVFNKSSGQVEVSCDIVFDETNGSQVEQVDLDEIGDEEAPCIALRNMSIGDVCPKESEEPPNAQDQPSSSTQASPPTQNEDEAQVDEGEDQTDEPPQDDDNNQGGDANDQDKEDEEPRPPHPRVHQAIQRDHPVDTILGDIHKGVTTRSRVAHFCEHYSFVSSIEPHRVEEALQDSDWVVAMQEELNNFTRNEVCHLVPRPNQNVVGTKWVFRNKQDEQPPGFEDSEYPNHVYKLSKALYGLKQAPRAWYECLRDFLITNGFKVGKADPTLFTKTLDNDLFVCQIYVDDIIFGSTNESACEEFSRIMTQKFKISMMGELKYFLGFQVKQLQEGTFISQTKYIQDILNKFGMKDAKPIKTPMGTNGHLDLDTGGKTVDPKKEHIGDLPVLGKILGVLGFKEAKFRSSFYRRSRVYCRGPLLRAITLDEANP

SEQ ID NO: 214713 - protein, 55 aa, Zea mays
  Clone ID: MRT4577_127417C.1.pep
IWHKAGQGAPAPQNKGLTQRHKSLCLIPRFSTETVTARNMLCRVKGTRHTVWVCT

SEQ ID NO: 214714 - protein, 252 aa, Zea mays
  Clone ID: MRT4577_127418C.1.pep
MSGGSAKREMEMDTSRGKAPSKESDAKGREDSPPRVKSHRSGDKKKKMKKVVYYEADSSSPSTSGSDAPSVTSKRHERKKFSKIPLRYPRISKHTPLLSVPLGKPPVFDGEDYCMWSDKMRHHLTSLHASIWDIVEFGAQVPSVGDEGYDSDEVAQIRHFDSQATTILLASLCREEFNKVQGLKSAKEIWDVLKTAHEGDEVTKITKRETIEGELGRFILNHGEEPQAMYNRLKTLVKGKCALGPFLSVLVI

SEQ ID NO: 214715 - protein, 158 aa, Zea mays
  unsure (1)..(158): unsure at all Xaa locations
  Clone ID: MRT4577_127419C.1.pep
CQQVDSRASTKYATSSDEASSSDDEDDLLTXFANLNMQQKEKLNELISAIHEKDELLDSQEDFLIKENKKHVKVKNAYAQEVEKCEKLTSELSTCHDTISNLRFENDKLIAKVEKLNVSDDSLVNLKKDNASLIAKIDKLNESIASPKIENDKLIAEA

SEQ ID NO: 214716 - protein, 273 aa, Zea mays
  unsure (1)..(273): unsure at all Xaa locations
  Clone ID: MRT4577_12741C.1.pep
MAKFALGHHREASDAGCVRAVLAELILTFLFVFAGVGSAMATGXPYSIIYNTCTVAIMHARTXKLAGGGGDTVVGLTAVALAHTLVVAVMVSAGLHVSGGHINPAVTLGLAATGRITLFRSALYVAAQLLGSTLACLLLAFLAVADSGXVPVHALGTGVGALRGVLMEAVLTFSLLFAVYATVVDPRRAVGGMGPLLVGLVVGANVLAGGPFSGASMNPARSFGPALVAGVWADHWVYWVGPLIGGPLAGLVYDGLFMAQGGHEPLPRDDTDF

SEQ ID NO: 214717 - protein, 1359 aa, Zea mays
  Clone ID: MRT4577_127420C.1.pep
MSGDHAKKEMETGEKPTTSHGSTSSEESRTKRKERKKSSSNKGKEKKSSSHHKEKKRYYKKKGGDAHVCREWDSDESSSDSSDDEDAANIAVTKGLLFPNVGHKCLMAKDGKRKKVKSNSSTKYESSSDDNASGEEDNLRILFANLNMEQKEKLNELISAIHEKDDLLDSQEDFLIKENKKHVKVKNAYALEVEKCEKLSSKLSTCHETIDNLRNENARLNAKVDSHVCDVLIPNPRDNNDDLLARIEELNISLASLKVENENLIAKAKNFDVTISDLRDNNDILRAKIIELNSCKPSTSSVEHVSICTRCRDVDINAIHDHMILIKQQNDHIAKLDAKIAEHNLENEKFKFARSMLYNGRRPGIKDGIGYQRGDNVKLNAPPKNLSNFVKSKAPMPQDNEGYILYPAGYPESKIRRTHSRKSHSGPNHAFMYKGETSSSRQPTRAKLPRKKTPNASNDHAISFKTFDASYVLTSKSGKDKSHTQETLKGFLRRAQNEFGLRIKKIRSDNGTEFKNSQIESFLEEEGIKHEFSSPYTPQQNGVVERKNRTLLDMARTMLDEYKTPDRFWAEAVNTACYAINRLYLHRILKKTSYELLTGKKPNVSYFRVFGSKCFILVKRGRKSKFAPKTVEGFLLGYDSNTRAYRVFNKSSGLVEVSCDVVFDETNGSQVEQVDLDEIGEEQAPCIALRNMSIGDVCPKESEEPPHAQDQPSSSMQASPPTQIEDEAQDVEQEDQEDESPQNDGNNQGGDANDEDKEDEQPRPPHPRVHQAIQRDHPVDTILGDIHKGVTTRSRVAHFCEHYSFVSSIEPHRVEEALQDADWVMAMQEELNNFTRNEVWHLVPRPNQNVVGTKWVFRNKQDEHGVVTRNKARLVAKGYSQVEGLDFGETYAPVARLESIRILLAYATYHGFKLYQMDVKSAFLNGPIKEEVYVEQPPGFEDSEYPNHVYKLSKALYGLKQAPRAWYECLRDFLITNGFKVGKADPTLFTKTLENDLFVCQIYVDDIIFGSTNESTCEEFSRIMTQKFEMSMMGELKYFLGFQVKQLQEGTFICQTKYTQDILSKFGMKDAKPIKTPMGTNGHLDLDTGGKSVDQKSRSDRRHSTAPLTGLTEGQRRLRHSDCGATRQSESDRQSGLAKGATANSAPPDPRARTRAKTRKTANSIPPDPRARTRAKTRKTANSAPPDPRARTQAKTRKTANSAPPDPRARTRAKTRKTANSAPPDPRARTRAKTRKTANSAPPDPRARTRAKTRKTTKLRLARPQGSDSALASAERLPPRPTPWLGLGLGNRGQTQPRLRRSPHVTLPRAQTRHVNRKRHHQPTPSRLGTRRTRPASHLASSAGWAMMAPPKLCDDGGS

SEQ ID NO: 214718 - protein, 162 aa, Zea mays
  unsure (1)..(162): unsure at all Xaa locations
  Clone ID: MRT4577_127421C.1.pep
HLVVATYPGRVHVNAMMNLCRLLASRDGVTITIIETDERLRLLGVPTALPYLELRVRFEAIPNGIPSEHGRCNDMHGFMEGVPHQDGGDVTSRLLDRIAVXRPTDIVGDMIASWNIRVPKRRLEPVCIMGPIMATMFTLQYNLHLLPPAATGIAWRTDITVS

SEQ ID NO: 214719 - protein, 60 aa, Zea mays
  Clone ID: MRT4577_127422C.1.pep
SARAGCFCPGRLLKEKKKYKKKKKKKKKKKKKKKKKKKKKKKKKKKKRGGPQLVSSSTRK

SEQ ID NO: 214720 - protein, 189 aa, Zea mays
  unsure (1)..(189): unsure at all Xaa locations
  Clone ID: MRT4577_127423C.1.pep
EYRCFVGGLAWATAAPSLNNAFKXSGEVLESKLLLXRETXXXSRGFGLRPXSPPAXARLXXRPSXGPXXXXVSPAAXLXRSTGXPSRGGRGAXRVRXSGGGRRAGGXSXGGXXGSGXXRGXSXXGGGGSGGGXRGGGSXPPAGPWGPWAVGSAAAWFLFASAPVFPVRGFLFVCGLVSVCFVSCSLLLL

SEQ ID NO: 214721 - protein, 48 aa, Zea mays
  Clone ID: MRT4577_127424C.1.pep
PIQMIYFQHKQKLTMRYLTKKQAPPTKPRQLLRSSIYFRIILVNMRIT

SEQ ID NO: 214722 - protein, 44 aa, Zea mays
  Clone ID: MRT4577_127425C.1.pep
QRRAHNELCHQYTILTLQFPAEVWYSRSRISKGQITLLLICRRY

SEQ ID NO: 214723 - protein, 63 aa, Zea mays
  unsure (1)..(63): unsure at all Xaa locations
  Clone ID: MRT4577_127426C.1.pep
IXFYNNLPDLXDATKNQGCYEQEETKGASKQCVTKGEGERDPKLNQRGAVCSCHHEHARWTAS

SEQ ID NO: 214724 - protein, 74 aa, Zea mays
  Clone ID: MRT4577_127427C.1.pep
FYITFLPLYFSKLTYPHGRVIKYLSPHKKPTHSPSLYNINTGKTQPPPTLHLSPPMHLPPSVELSNTSTPIPLP

SEQ ID NO: 214725 - protein, 58 aa, Zea mays
  Clone ID: MRT4577_127428C.1.pep
EFSALMANGSFRAKKGGGLALPRVMEAPGEGAPIQQGLTNQAVNRFRFPGNWNFFFAS

SEQ ID NO: 214726 - protein, 93 aa, Zea mays
  Clone ID: MRT4577_127429C.1.pep
MSVWRHSVERDARQIEFHYDLSDDFYALWLDPRRVYSCAYYREPGMNLAQAQEAKLDHICRKLRLRPGERFLDVGAGWGGLLLWAAEHYGVDP

SEQ ID NO: 214727 - protein, 142 aa, Zea mays
  Clone ID: MRT4577_12742C.1.pep
RVFEGPMGPVFSSSLYGEDEGNDSELADIHVLAREGATEDIVKFLAAGVEVNMRDTEGRTPLHWAVDRGHLSAVEVLAKANADLNAKDNEGQTALHYAAVCEREDIAELLVKHHADLQIKDEDGNTAQDLCPPSWSFMNRAN

SEQ ID NO: 214728 - protein, 50 aa, Zea mays
  Clone ID: MRT4577_127430C.1.pep
SSTDDPLPDRRTSAGPPVVGFTPSARDAAKRPPGRTTTGRKARPPAARVR

SEQ ID NO: 214729 - protein, 100 aa, Zea mays
  Clone ID: MRT4577_127431C.1.pep
GGFQWGIDLPPDTFIFGRNRLFFIGRGGSQDPLRPNCSPLLAAPQQGLGIRAPQPCPIGAAPPVALILAGPPPIFGKTNRGGVRFLPTLFVMSSPPPCAG

SEQ ID NO: 214730 - protein, 67 aa, Zea mays
  Clone ID: MRT4577_127432C.1.pep
GPKGTYSLGQVAAQGRCDIIVHKRAVGAAEGTSSVELARAVVSLFGYTRKVSRNGTGRSQRSPDAWV

SEQ ID NO: 214731 - protein, 114 aa, Zea mays
  Clone ID: MRT4577_127433C.1.pep
HGRSTKDPPCSYVPASKASSSKKSPLGSPMSILSPDDTPEPVKMRLNQWAQVVALSILNPPPPPRAPAAATKKNKSREKNPFEMPPPAEGRNPRRSPQPKKKKKKKKKKKNPTP

SEQ ID NO: 214732 - protein, 540 aa, Zea mays
  unsure (1)..(540): unsure at all Xaa locations
  Clone ID: MRT4577_127434C.1.pep
NNPITYWRKLVEDHFAHPARERWCVSSYEKRANASVSTAQTAQDVWRCNICKTHGAKGYESTYEELPRLWQIRFDHGVIDEYLFLDMAQPNEFQLPNGLMVLEHTKVVQKSVYEHLHVIHEGHLRIIFTPELKIMSWEFCSRRHEEYITRRVLAPKVNNLLQVAQKFQTAATENGPAGVSNNDAQTICNMFVAASRQLAKNLEHHTLNEHGLSKRYVRCLQISEVVNNMKDLIEFTNKNNLGPIEGLKSYPKPNVSELPGQNPRETKQISAAGGLPNDQNNTEAMGTKQEISAGADNGASVAGAVGNSAPQNAAALNSYQNLPRSSSANQSQLQQEASSAFEGPAATRNAMQMEASRSFCGPNXXVQLARFQHPGSFQHPMPQXNNLQGLGLQNNHRGLGVSPQXQXHALNQLIQEVKNAKRHTLPQQPPLDIPNISSGITSGGANTNSAGTGDQGQRMAVNGAATIYTGPTSVINNSTARSNNFKSVSSNLAVAAAPAGGNAATLKAKPFHEFDDLEHLIANELVGSGLLNGNELAWNS

SEQ ID NO: 214733 - protein, 263 aa, Zea mays
  Clone ID: MRT4577_127435C.1.pep
HEWQRSLIADYGVPLMVILWTALAYSLPSRIPSGVPRRLFTPLPWEPKSLQHWTVAKDLFSVPTVHIFLAIVPATMVAGLYFFDHRVASQMSQQKEFNLKNPSAYHYDILVLSLTTLIWGLLGIPPSNGVLPQSPMHTRSLAVLKRQLLRKKMVQTAKEGMMNNATSSEVYVKMQYVFIKMDHGGDTISAHKELKDLKDAIIPEGNGSGTVPEVFDPEKHVDAYLPVRVNEQRVSNLLQSLLIAGCIGVTPLIQKIPTSVLWG

SEQ ID NO: 214734 - protein, 168 aa, Zea mays
  Clone ID: MRT4577_127436C.1.pep
FSVQQMSSVYPNGLLLGVPVFPSSSPRWEQWAFIIQLSEPIVSYKRCCQPSCFIAIYHLHRHSSPRLWYTITCLLRHTTHTYSSICYSPDLCHAMSPCFLATTVARLTTSFLAIVAPNHPHPPLVQSFSAFSKLTMGNIISHLQHAPLALYIRPLRFDLCSSKQATTN

SEQ ID NO: 214735 - protein, 179 aa, Zea mays
  Clone ID: MRT4577_127437C.1.pep
GPNQVQLARFQHPGSFQHPMPQHNNLQGLGLQNNHRGLGVSPQYQQHALNQLIQEVKNAKRHTLPQQPPLDIPNVSSGITSGGANTNSAGTGDQGQRMNNSAVNGAATIYTGPTNVINNSTASVVPSRSNSFKSVSSNLGNAATLKAKPFHEFDDLEHLIANELVGSGPLNGNELAWNS

SEQ ID NO: 214736 - protein, 374 aa, Zea mays
  unsure (1)..(374): unsure at all Xaa locations
  Clone ID: MRT4577_127438C.1.pep
MKKVVYYETDSSSPSTSGSDAASVTSKRHERKKFSKMPLRYPRISKRTPLLFVPLGKPPYFDGEDLWMWSDKMRHHLTSLHTSIWDIVEFGAQVPTVGDEGYDSDEVAQIRHFNSQATTILLTSLCREEYNKVQGLKSAKEIWDVLKTVHEGDEVTKITKRETIEGELGRFVLNKGEEPQAMYNRLKTLVNQVRNLGNTKWDDHEMVKVILRSLVFRNPTQVQLIRGDPRYKQMSPEEVIGKFVSFELMIKDAKHIVNLEQGATSTPEVQHVAFKTTEEKKEESTSSRLPIDAFKLDNEEMALIIKSFRQILKQRRGKXYKPRSKRVFYKCXDKKGNKKEKKRYYKKKGVTPQYHLGFLLRANSKPLSHVNQIE

SEQ ID NO: 214737 - protein, 361 aa, Zea mays
  unsure (1)..(361): unsure at all Xaa locations
  Clone ID: MRT4577_127439C.1.pep
MAAAEASRTSEARRDAVFGRWVVFSPARSRRPTDLKSHNPTNPSPGPGADAPPKPSCPFCAGRESECAPQIFRVPPDGSLPWRIRVIQNLYPALRRDVDPXRAATWTRRLCQRQRGMSPRTSXERAVPGFGFHDVVIETPRHDVRLWDLDAEGVRDVLLAYAERVRQLGEHPAVQYVQVFKNHGASAGASMAHSHSQMLGTPFVPPSVTTRLNCMKEIFDRSGNCSLCEIRPKDILISETPNFSAIVPFAASYPFEIWIIPRQHISYFHEIDQDKALDLGSLLKTMLQKLSKQLNDPPFNFMVHSAPFKISSSCLPYTHWFLQIVPQLSVVGGFELGSGCYINPVFPEDAAKILRELDCSV

SEQ ID NO: 214738 - protein, 67 aa, Zea mays
  unsure (1)..(67): unsure at all Xaa locations
  Clone ID: MRT4577_12743C.1.pep
RPLPCARFLWWSLIQGSFLPPMCLCGRVPVLFGGGHSTCCSCPVSGGCGHAFPKKALPGXVFXGKIS

SEQ ID NO: 214739 - protein, 61 aa, Zea mays
  Clone ID: MRT4577_127440C.1.pep
RPPCLERKHKTWFVTRQKRDLGFVETFLGSTAQMGGLRGQKNRCPWTSCGNVCPPGFSPFC

SEQ ID NO: 214740 - protein, 945 aa, Zea mays
  unsure (1)..(945): unsure at all Xaa locations
  Clone ID: MRT4577_127441C.1.pep
MTRRNMRMIARMSLHHHKTGDVEEEEIRRFYTHLNKEDKVFLVKLLRRNKEQGETLLRLEETLIKTNNSLEKMTKEHEELKCSHDNLVQQYESVLFEQRNNHDVLSDVAQLKTEISMLKSQVEMINLEKKIALSEKYDMLSYSHNELVDDHIMLDVAHEVVIANLNSCEPHSCTRAHLDNISPCANLCCSKESQFLNEHQAAGSKEKLLINKERNKKAKQLRRRRIAQPPQDIHGRVVKKLETGETAASVHKKDVPKAINEEINMNKEKGKNSITHVVCIDHLSMSSKSKKGRGKRRCFKCKELGHFIASCPHKDKDEGMRRCFGCNDKDHMFTSCPLMKNQRCAPSKMTLTKKKDKQQVSCQVERCFCYMCGEHGHLPKVKGKETTDQANDGGKKSFKVPSAREKVKETRNPKPGVKKKTCKVKVDQVKKSYGTNVSQIQKSKGSPAERPVEYLLRVHRPIVSSHDIVVTDINIVEGSICHTDISEQTEEGVEIDSKPRRHPDPVPGHRELSSSPYTPQQNGVVERKNRTLLDMARTMLDEYKTPDRVFGSKCFILVKRGRKSKFAPKAIEGFLFGYDSNTRAYRVFNKSTRLVEVSCDIVFDETNGSQVEQVDLDELDDEEAPCVALRNMSIGDVCPKESEEPTHAQDQPSSSNQASPPTQDEDQAQNNEDEDQEDEPPQEEDNNQGGDEVDQDKEDDQEIQGQRPPHPRVHQAIQRDHPVNSILCDIHKGVTTPSRVAHFCEYYSFVFSIEPYRVEDALRDSDWVLAMQEELNNFTRNEWVFRNKQVEHGVVTRNKARLVAKGYSQVEGLDFGETYAPIARLESIRILLAYATHHGFKLYQMDVKSAFLNGPIKEEVYVEQPPGFEDKFSRIMIQKFEMSMMGELKYFLGFQVKQLQEGTFISQTKYIQDILNKFGMKDVKPIKTPXGTNGHLDLDTGGKSV

SEQ ID NO: 214741 - protein, 218 aa, Zea mays
  unsure (1)..(218): unsure at all Xaa locations
  Clone ID: MRT4577_127442C.1.pep
MASKPGPLSRWPWQDLGNYKYALVAPWAVRSTYRFVRSGSGERDLLAFAVLPVLLLRLLYSQLWITVSRHQTARSRHRIVNKSLDFEQVDRERNWXTRRRARRKAAAVYCFACVXYIVYGNERQQIMCRDDQILLTALLFYAVNVAVPVAQSVPWWDSRGLLVAALLHVGPVEFLYYWLHRALHHHYLYARYHSHHHASIVTEPITSVIHPFAEELVY

SEQ ID NO: 214742 - protein, 79 aa, Zea mays
  Clone ID: MRT4577_127443C.1.pep
DDTTTVDPSYTISLIRQLLPQGSNVEKEFSVKQCAPDEKDANSGNGESAQPDYKDPWEECGCILWDLAASKPQAELMMN

SEQ ID NO: 214743 - protein, 641 aa, Zea mays
  unsure (1)..(641): unsure at all Xaa locations
  Clone ID: MRT4577_127444C.1.pep
MASKPGPLSRWPCAXLGNYKYALVAPWAVRSTYRFVRSGSGERDLLAFAVLPVLLLRLLYSQLWITVSRHQTARSRHRIVNKSLDFEQVDRERNWDDQILLTALLFYAVNAAVPVAQSVPWWDSRGLLVAALLHVGPVEFLYYWLHRALHHHYLYARYHSHHHASIVTEPITSVIHPFAEELVYFTLFAIPLLTMVGTGTASVAVANGYLAYIDFMNYLGHCNFELVPRLLFDVFPPLKYLMYTPSFHSLHHTQFRSNYSLFMPLYDHLYGTADKSSDDLYERALQGRAGEDAPDVVHLTHLTTPASLLRLRLGFASLAAAPAPPASRYGAGSSSSSSSSLAAVACPLAALLGWTRTAFRSEANRLHKLKLETWVVPRYTSQYLSKQGLYAVGRVVEKAVADAEASGARVLTLGLLNQANELNKNGELYVIRKPSMRTKIVDGTSLAAAAVLHMIPEGTDEVLLLGDAGGNKMAGVLASALCEREIQVHVVDKDLYESVKQQLRPETHEHLLHLAEWWSHSAKTTKVWLVGDRLTGEEQRRAQGGAHFVPYSQFPPGAVVRADCVYHSTPALVVPDAFEDLHACENWLPRRVMSAWRAAGIVHALEGWDAHECGARVTGVDKAWRAALAHGFRPYDRYGAN

SEQ ID NO: 214744 - protein, 1639 aa, Zea mays
  Clone ID: MRT4577_127445C.1.pep
MSGEHAKKEMETGDKPATSHGKASSEESRKKGKGKEKKASSHKLHRSGDKKKKMRKVVYYETDTSSPSTSDSDAPSITSKRHERKKFSKIPLHYPRTSRHTPLLSVPLGKPPTFDGEDYARWSDLMKFHLTSLHKSIWNVVEFGAQVPSVGDVDYDEDEVAQIEHFNSQATTILLAFLSREEYNKVQGLKSAKEVWDVLKTAHEGDELTKITKRETIEGELGRFRLRQGEEPQDMYNQLKTLVNQVRNLGSKKWDDHEVVKVILRSLIFLNPTQVQLIRGNPRYTLMTPEEVIGNFVSFEFMIKGSRKINELDGPSTSEAQPVAFKATEEKKEESTPSRTPIDASKLDNEEMALVIKSFRQILKQRRGKDYKPRSKKVCYKCGKPGHFIAKCPISSDSDRGDDKKGRRKEKRYYKKKGGDAHVCREWDSDESSSDSSDDEDATNIAVTKGLLFPNVGHKCLMAKDGKKKKVKSKSSTRYESSSDDNASDEEDNLRTLFANLNMQQKEKLNELISAIHEKDDLLDSQEDFLIKENKKHVKVKNAYALEVEKYEKISSELSTCHETIDNLRNENSNLLAKVDSIACNVSIPNLRNDNDDLLAKIEELNMSLASLRIENEKLLAKAKELDVCNATISDLRSRNDILHAKVVELKSCKPSTSTVEHTTICTRCRDVDIDAIHDHMVLIKQQNDHIAKLDAKIAEHELENEKFKFARSMLYSGRRPGIKDGIGFQKGDNVKLNAPPKKLSNFVKGKAPMSQDNEGYILYPAGYPESKIRRIHSRKSHSGPNHAFMYKGKTSSSRQPTRAKLPKKKTPSASNDHDISFKTFDASYVLTNKSGKVYASGGSSWIIDSGCTNHMTGEKKMFSSYEKNQDPQRAITFEDGNQGVTVFRRSDDSIAFKGVLEGQLYLVDFDRAELDTCLIAKTNMGWLWHRRLAHIGMKNLHKLLKGEHILGLTNVHFEKDRISSACQAGKQVGAHHPHKNIMTTDRPLELLHMDLFGPIAYISIGGSKYCLVIVDDYSCFTWVFFLQEKSHTQETLKGFLRRAQNEFGLRIKKIRSDNGTEFKNSQIEGFLEEEGIKHEFSSPYTPQQNGVVERKNRTLLDMARTMLDEYKTSDRFWAEAVNTACYAINWLYLHRILKKTSYKLLIGKKPNISYFRVFGSKCFILVKRGRKSKFAPKTVEGFLLGYDSNTRAYRVFNKSTGQVEVSCDVVFDETNGSQVEQVDLDEIGDEEAPYIALRNMSIRDVCPKESEEPPNAQDQPSSSTQASPPTQNEDEAQVDEGQDQEDEPPQDDGNDQGGDANDQDKEDEEQRPPHPRVHQAIQRDHPVDTILGDIHKGVTTRSRTKWVFRNKQDEHGVVIRNKARLVATGYSQVKGLDFGETYAPVARLESIRILLAYATYHGFKLYQMDVKSAFINGPIKEEVYVEQPPDFEDSEYPNHVYKLSKALYGLKQAPRAWYECLRDFLITNGFKVGKADPTLFTKTLENDLFVCQIYVDDIIFGSTNESTCEEFSRIMTQKFEMSMMGELKYFLGFQVKQLQEGTFLSQTKYTQDILSKFGMKDAKPIKTPMGTNGHLDLDEGGKSVDQKKEHIGDLPVLGKILGVLGFKEAKFRSSFYRRSRVHCRRPLLRATTLDEANP

SEQ ID NO: 214745 - protein, 79 aa, Zea mays
  Clone ID: MRT4577_127446C.1.pep
KLYTFPMALSINPDTRRASTAYSFPVFFMCCFPSHSGSHCLFVFRIFPSFSLFFPCYFTKQGHKKKKNQKKKKKKKKNN

SEQ ID NO: 214746 - protein, 309 aa, Zea mays
  unsure (1)..(309): unsure at all Xaa locations
  Clone ID: MRT4577_127447C.1.pep
TKRVFRNKNXEHGVVIRNKARLVAKGYSQVEGLDFDETYAPVARLESLRILLAYATYHGFKLDQMDVKSAFLNGPIKEEVYVEQPPGFEDTPRAWYECLRDFLITNGFKVGKVDPTLFTKTVANDLFVCQIYVDDIIFGSTNKSTCEEFSRIMVQKFEMSMMGELRYFLGFQIKQLQEGTFISQTKYIQDILNKFGMKDAKPIKTPMGTNGHLDLDMGGKSVDQKVYWSMIGSLIYLYASRPDIMLFVCMCARFQVDPKEVHLRVVKRIMRYLVYTPKFGLWYPKGSTFDLIGYSDVDWAGCKIDRKST

SEQ ID NO: 214747 - protein, 108 aa, Zea mays
  Clone ID: MRT4577_127448C.1.pep
VPPLHGVRSFISQVQEDVPSVQLAWSHVSSPHDICAQEPRMSVGPAGDRLDLAAQDDGADAPMHLRSFFFYLFRERRDGPYRSGMRLIVHLRDIVIYLNLSNFLMASW

SEQ ID NO: 214748 - protein, 1690 aa, Zea mays
  Clone ID: MRT4577_127449C.1.pep
MSGDYAKKEMETGEKPTTSYKSTSSEESRTKRREKKKSSSNKGKEKKSSSHHKEKKEKSSSHKPHRKGDKHKRMRKVVYYETDTSSTSTSDSDAPSVTSKRQERKKYSKIPLRYPRISKHTPLLSVPLGKPPTFDGEDYARWSDLMRFHLISLHKSIWDVVEFGAQVPSVGDENYDEDEVAQIEHFNSQATTILLASLSREEYNKVQGLKSAKEIWDVLKTAHEGDELTKITKRETIEGELGRFRLHKGEEPQHMYNRLKTLVNQVRNLGSKKWDDHEVVNVILRSLIFLNPTQVQLIRGNPRYTKMTPEEVIGHFVSFECMIEGSRKINELGDSSEAQPVAFKATEEKKEESTPSRQPIDASKLDNEEMALVIKSFHQILKQRRGKDYKSRSKMVCYKCGKPGHFIAKCPISSDSDRGDDKKGRRKEKKRYYKNKGGDAHVCREWDSDESSSDSSDDEDAANIAVTKGLLFPNVGHKCLMAKDGKRKKVKSNSSTKYESSSDDNASDEENNLRSLFANLNIAQKEKLNELVSAIHEKDDLLDSQEDCLIKENKKHVKVKKAYALEVEKCEKLSSELSTCREIIDNLRSENASLNAKVDSHVCNVSIPNPRDNNDDLLARIKELNISLASLRVENEKLITKAKELDVCNVAISDLRTKNDMLHAKVVELKSCKPSTSIVEHVSICTRCRDIDVNAIHDHMALIKQQNDHIAKLDAKIAEHNLENEKFKFARSMLYNGRRPGIKDGIGFQRGDNVKISAPPKRLSNFVKGKAPMPQDNEGYILYPAGYPESKIRRIPSRKSHSGPNHAFMYKGETSSSRQPTHAKLPRKKTPNASNEHNISFKTFDASYVLTNKSGKVVAKFVGGKHKGSKTCVWVPKVLVSNAKGPKTVWVYASGGSSWILDSGCTNHMTGEKRMFSSYEKNQDPQRAITFGDGNQGVTVFRRSDDSIAFKGVLEGQLYLVDFDRAELDTCLIAKTNMGWLWHRRLAHVGMKNLHKLLKGEHILGLTNVHFEKDRICSACQAGKQVGVHHPHKNIMTTDRPLELLHMDLFGPIAYISIGGSKYCLVIVDDYSRFTWVFFLQEKSQTQETLKGFLRRAQNEFGLRIKKIRSDNGTEFKNSQIEGFLEEEGIKHEFSSPYTPQQNGIVERKNRTLLDMARTMLDEYKTPDRFWAEAVNTACYAINRLYLHRILKKTSYELLTGKKPNISYFRVFGSKCFILVKRGRKSKFAPKTVEGFLLGYDSNTRAYRVFNKSTGLVEVSCDVVFDETNGSQVEQVDLDEISEEQAPCIALRNMSIGDVCPKESEEPPTTQDQPSSSTLASPPTQNEDEAQVDEVEDQANEPPQDDGNDQGGDANDQEKEDEEEPRPPHPRVHQAIQRDHPVDTILGDIHKGVTTRSRVAHFCEHYSFVSSIEPHRIEEALQDSDWVVAMQEELNNFTRNEVWHLVSRPNQNVVGTKWVFRNKQDEHGVVTRNKARLVAKGYSQVEGLDFGETYAPVARLESIRILLAYATYHGFKLYQMDVKSAFLNGPIKEEVYVEQPPGFEDSEYPNHVYRLSKALYGLKQAQEHVGKADPTLFTKTLENDLFVCQIYVDDIIFGSTNESTCEEFSRIMTQKFEMSMMGELKYFLGFQVKQLQEGTFICQTKYTQDILTKFGMKDAKPIKTPMGTNGHLDLDTGDSKPTLRKLTLRP

SEQ ID NO: 214749 - protein, 93 aa, Zea mays
  Clone ID: MRT4577_12744C.1.pep
LELEAAGLFFFFLFFFFFFFLLALKQKEGKKPRGIASASFVGVEHYGRGTRSPSSDTRFFPPPPGGGAFRMFRRRPLPTCRLPPLSLLGFSPG

SEQ ID NO: 214750 - protein, 78 aa, Zea mays
  Clone ID: MRT4577_127450C.1.pep
FSSFLFLLLLSAALIRSPSLYFCLFVFFFWIVAEKEMCTQKKYIGIPRHTYAAAALARPSIDRPLFRDVWRALQDAPV

SEQ ID NO: 214751 - protein, 1437 aa, Zea mays
  unsure (1)..(1437): unsure at all Xaa locations
  Clone ID: MRT4577_127451C.1.pep
MSGDHTKKEMVTGNKPTTSHGKASSEESHNKGKGKEKKSSSHKSHRSGDKKKKMRKVVYYETDTSSPSTSGSDAPSITSKCHERKKFSKPPTFDGEDYARWSDLMRFHLTSLHKSIWDVVEFGVQEYNKVQGLKNAKEIWDILKTAHEGDEVTKITKRETIEGELGRFRLRPGEEPQDMYNRLKTLVNQVRNLGSKKWDDHEMVKVILRSLVFLNPTQVQLIRGNPRYTLMTREEVIGNFVSFELMIKGSKKINELDGPSTSEAQPVAFKAMEEKEESTPSRTPIDASKLDNEEMTLIIKSFRQILKQRRGEDYKPRSKKVCYKCGKPGHFIAKYPIYSDSDRGDDKKGRRKEKKKYYKKKGGDAHVCREWDSEESSTDSSSDEDAVNIAVTKGLLFPNVGHKCLMATDGKRKKVKSRSSTKYETSSDEENASNEEDNLRILFANLNMQQKEKLNELISAIHEKDDLLDTQEDFLIKENKKHVKVKNAYALEVEKCEKLSSELSTCHETIDNLRNKNANLLAKVDSNVCDVSIPNLRNDNVDLLAKIEELNISLASLRNENEKLLAKAKELDVCNASISDLRSKNDILHAKVVELKSCKPSTSTVEHTTICTRCRDVNIDAIHDHMALIKQQNDHIAKLDAKIAEHDLENEKFKFARSMLYRGRRPGIKDGIGFQQGGNVKLNAPPKKLSNFVKGKAPMPQDNEGYILYPVGYPESKIRRIHSRKSHSGPNHAFMYKGEASSSRQPTRAKLPKKKTPNASNEHSISFKTFDATYVLTNKSGKVYASGGSSWIIDSGCTNHMTGEKKMFSSYEKNQDPQRAITFGDGNQDSLDYNLLSVSQLCQMGYNCLFTNEKSHTQETLKGFLRRAQNEFGLRIKKIRSDNGTEFKNCQIEGFLEEEGIKHEFFSPYTPQQNGVVERKNRTLLDMARTMLDEYKTSDRFWAEAVNTACYTINRLYLHRILKKTSYELLTGKKPNISYFRVFGSKCFILVKRGRKSKFAPKTVEGFLLGYDSNTRAYRVFNKSSGQVEVSCDVVFDETNDSQVEQVDLDEIGDEEAPCIALRNMSIGDVCPKESEEPPNAQDQPSSSTQASPPTQNEDEAQVDEVEDQRDEPPQDDDNDQXGDANDQDKEDEEQRPPHPRVHQAIQRDHPVDTILGDIHKGXVEEALQDSDWVVAMQEELNNFTRNELYQMDVKSAFLNGPIKEEVYVEQPPDFEDKFSRIMTQKFEMSMMGELKYFLGFQVKQLQEGTFLSQTKYTQDILSKFGMKDAKPIKTPMGTNGHLDLDTEGCKINRKSTSGTCQFLGRSLVSWASKKQNSVALSTAEAEYIASGHCCAQLLWMRQTLRDYGYKLTKVPLLCDNESAIRMADNPVEYSRTKHIAIRYHFLRDHQQKGDIEIAYINTKDQLADIFTKPLDEQTFNKLRHELNILDSRNFFC

SEQ ID NO: 214752 - protein, 602 aa, Zea mays
  Clone ID: MRT4577_127452C.1.pep
MTEFKNSQIEGFLEEEGIKHEFFSPYTPQQNGVVERKNRTLLDMARTMLDEYKTPDQFWANAINTACYSINWLYLHRILKKRSYELLTGKKPNVSYFRVFGSKCFILVKRGKKSKFTPKVVEGFLLGYDSNTMAYKVFNKSTGLVEVSCDIVFDETNGSQVEQVDLDELDDEEAPCVALRNMSIGDVRPKESEEPTQVQDQPSSSNHASPPAQDEDENQDDEPPQEEDNDQGGDDHDKEDEQEIQGQRPPHPRVHQAIQRDHPVNSILGDIHKGPYRVEDALRDSDWVLAMQEELNNFTRNEFSRIMIQKFKMFMMGELKYFLGFQVNQLQDDTFISQTKYIQDILTKFGMKDAMPIKTPMGTNGHLDLDTGGKSVDQKVYRSMIGSLLYLCASRPDIMLSICMCARFQADPKEVHLRAMKRIMRYLVYTPKFGLWYPKGSTFDLIRYSDADWAGCKIDRKSTLGTCQFLGRSLVSWASKKQNSVALSTAEAEYIAAGHCCAQLLLMRQTLRDYGYKLSKVPLLYDNESTICMSDNPVEHIRTKHIDIWYHFLRDHQQRGDIEVAYVSSKEQLADIFTKPLDEKTFTELRNELNILDSRNFD

SEQ ID NO: 214753 - protein, 1601 aa, Zea mays
  unsure (1)..(1601): unsure at all Xaa locations
  Clone ID: MRT4577_127453C.1.pep
MSGDHAKKEMETGEKPTTSHGSTSSEESRTKRKEKKKISSNKGKEKKSSSHHKDKKEKSSSHKPHRSGDKKKRMRKVVYYETDSSSASTSGSDAASVTSKRQERKKYSKIPLRYPRISKHTPLLSVPLGKPPTFDGEDYARWSDLMRFHLTSLHKSIWDVVEFGAQVPSVGDKDYDEDEVTQIEHFNSQATTILLASLSREEYNKVQGLKSAKEVWDVLKTAHEGDELTKITKRKTIEGELGRFRLRKGEEPQHMYNRLKTLVNQVRNLGSVKWDDHEVVXRYTQMTPEEVIGNFVSFELMIKGSKKINELDDPSTSEAQPVAFKATEEKKEESTPSRTPIDASKLDNEEMTLIIKSFRQILKQRRGKDYKPRSKKVCYKCGKPGHFIAKCPLSSDSDRGDDKKGRRKEKKKHYKKRGGDAHVCREWDSEESSTDSSSDEDATNIAVTKGLLFPNVGHKCLMAKDGKKKKVKSRSSTKYETSSDEDNASNEEDNLRILFANLNMQQKEKLNELISAIHEKDDLLDSQEDFLIKENKKHVKVKNAYALEVEKCEKLSCELSTCQETIDNLRNENANLLAKVDSHVCDVSTPNPRDDNVDLLAKTDELNVSLASLRIENEKLLAKAKDFDVTISNLRSENDVLHAKVVELKSCKPSTSTVKHVSICTRCRDIDVDAIHDQMTLIKQQNDHIAILDAKIVEHNLENEKFKFARSMLYNGRCPGIKDGIGFQRGDNVKLNAPPKRLSNFVKGKALMPQDNEGYILYPAGYPESKIRRIHSRKSHSGPNHTFMYKGETSSSRQPTRAKLPKKKTPNASNDHNISFKTFDASYVPTNKSGKVYASGGSSWIIDSGCTNHMTGEKKMFSSYEKNQDPQRAITFGDGNQGLVKGVTVFRRSDDSIAFKGVLEGXTLSMEYSASLTRLKKRLSRVCWLXWXKQASEKDFKNIXKVANAPGLAFVNRLRMEGDVPDDGWASSVIGRFGEHQGHMRTLEQGTEGRELTGIELXHLLPYGDCGTLNLXPIDGGVQFRKVVLAAGDGEGLWRHGFVSTAVAGSPASEKSQTQETLKGFLRRAQNEFGLRIKKIRSDNGTEFKNSQIEGFLEEEGIKHEFSSPYTPQQNGVVERKNRTLLDMTRTMLDEYKTPDRFWAEAVNTACYAINRLYLHRILKKTSYELLTGKKPNISYFRVFGSKCFILVKRGRKSKFAPKTVEGFLLGYNSNTRAYRVFNKSSGLVEVSCDVVFDETNGSQVEQVDLDEIGEEEAPCIALRNMSIGDVCPKESEEPPNEQDQPSSSTQASPPTQIEDEAQPPQDDGNDQGGDTNDQDKEDEEPRPPHPRVHQAIQRDHPVDTILDDIHKGVSTKSRVAHFCEHYSFVSSIKPHRVEEALQDSDWVMAMQEELNNFTRNEVWHLVPRPNQNVVGTKWVFRNKQDEHGVVTRNKARLVANGYSQVEGLDFGETYAPVARLESIRILLAYATYHGFKLYQMDVKSAFLNGPIKEEVYVEQPPGFEDSEYPNHVYRLSKALYGLKQAPRAWYECLRDFLIANGFKVGKADPTLFTKTLDNDLFVCQIYVDDIIFGSTNESTCEEFSRIMTQKFEMSMMGELK

SEQ ID NO: 214754 - protein, 1551 aa, Zea mays
  unsure (1)..(1551): unsure at all Xaa locations
  Clone ID: MRT4577_127454C.1.pep
MSGASAKREFGTGEKPATSHGKAPSEESTNKVKGSPSHNKSGWSGDKKKMRKVVYYETDSLSPSTSGSDTPSVTSKLHERKKFSKIPLRYPRISKCTPLLSVPLGKPPMFDGEDYNMWSDKMRHHLTSLHTSIWDVVEIGVQREEYNKVQGLKSAKEIWDVLKTAHEGDEVTKITKQETIEEELGLFRLNQGEDPQAMYNRLKTLVNQVRNLGSTKWDDHEMVKVILRSLVFLNPTQVQLILGNPRYTLMSPEEVIGNFVSFELMIKGSKKIIELDGPSTSKAQPVAFKATEEKKEESTSSRQPIDASKLDNEEMALIIKSFRQILKQRRGKDYKPRSKKVCYKCGKPGHFIAKCLLSSDSDRGEDKKGKRREKKRYHKKRGGDAHVCRKWDSDESSSDSSSDEDAANIAVTKGLLFPNVGHKCLMAKNGKRKKVKSKSSTKYETSSDEDNCCDEEDNLRTLFANLNMQQKEKLNELISAIHEKDDLLDSQEDFLIKENKKHVKVKNAYALEVEKCEKLSSELSTCIDIIANLRNENAKLIAKVDSNVSYVSIPNLRDDNVNLLAKIEELNVSLASLRNENENLIAKAKDLDVCNASISDLRDKNDILRAKIVELNSCKPSTSTIEHVSICTRCRDINVDATHDHLALIKKQNDHIAQLNAKINEHDLENENFKFARSMLYNGRRPGIKDGIGFQKGDNVKLNAPPKRLSNFVKGKAPMPQDNEGYILYPAGYPESKIRRIHSRKSHSGPNHAFMYKGETSSSRQSTRAKLPRKKTPIASNDHNISFKTFDASYVLTNKSGKVYASGGSSWIIDSGCTNHMTREKKMFSSYEKNQDPQRAITFGDGNQGVTVFRRSDDSIAFKGVLEGXKSHTQETLKGFLRXAQNEFGLRIKKIRSDNGTEFKNSQIEGFLEEEGIKHEFSSPYTPQQNGVVERKNRTLLDMARTMLDEYKTSDRFWAEAVNTTCYAINRLYLHRIIKKTSYELLTGKKPSVSYFRVFGSKCFILVKRGRKSKFAPKAVEAFLLGYDSNTRAYRVFNKSTGLVEVSCDIVFDETYGSQVEQVDLDELDDEEAPCVVLRNMSIGYVCPKESKEPTQAQDQASSSMQASPPTQDEDQAQDDENEDQEDEPPQEEDNDQXGDDNDQEKEDEQEVXPYRVEDALRDSNRVLAMQEELNNFIRNEWVFRNKQDEHVVVTRNKARLVAKGYSQVEGLDFGETYAPIARLESIHILLAYATYHGFKLYQMDVKSAFLNGPIKEEVYVEQPPGFEDSEYPNHVYKLSKALYGLKQAPRAWYECLRDFLITNGFKVRKANPTLFTKTIANDLFVCQIYVDDIIFGSTNKSTCEEFSRIMIQKFEMSMMGELKYFLGFQVRQLQEGTFISQTKYIQDILTKFGMKDAKPIKTPMGTNGHLDLDTRGCKIDRKSTSGTCQFLGRSLVSWASKKQNSVAISTAEAEYIVAGHYCAQLLWMRQTLRDYGYKLSKVPPLYDNESAIRMADNLVEHSRTKHIAIRYHFLRDHQQRGDIEIAYVSTKEQLADIFTKSLDEKNLYQT

SEQ ID NO: 214755 - protein, 77 aa, Zea mays
  Clone ID: MRT4577_127455C.1.pep
EKSYFFAAQLKTKVKTNSSTKSRLLHRNRHAFPMVLLIKRKETSTLKCYAPIPTESRCQQSSSRFLTTRFLSTNLPP

SEQ ID NO: 214756 - protein, 418 aa, Zea mays
  unsure (1)..(418): unsure at all Xaa locations
  Clone ID: MRT4577_127456C.1.pep
MGEPPPDRRRLYQVWKGSNKFLFGGRLXFGPDAGSLFLSTVLIASPLAGLCFQCVTKLSSSGGSSPLGLPVLLATILLGLSDLAFLFLTSSRDPGIVPRNARPPEQQERGGVDDPVVADDDDIVSASTEWVAMSAANNPHLRLPRNRDVVVAGGHVVRVKYCDTCLLYRPPRASHCSICNNCVRKFDHHCPWVGQCIGLRNYRFFFLFISTSTFLCLYVFVLSWLNIAAQRASHGGSLLRSVTGEPLSLVLIVYSFVVAWFVGGLTVFHIYLMSTNQTTYENFRYRYEEKENPYNRGVLANMSEVFCTGMPPSMNNFRAWMELPAPAPEAFDAGPPLASRDKIDLEMGHKGGVQHHTGVPPILQGLHYAQMEKNYSASVHIKDRRSAEAPDPFMIPEAPRHAAAGEAWPPAVFHDDGV

SEQ ID NO: 214757 - protein, 98 aa, Zea mays
  Clone ID: MRT4577_127457C.1.pep
SDREGRPFFFFFFFFFFFGWIFFFFFFFFFFLFFLKGTLITFFHIKHIHWKKDCNTSVSTANKGYSLVKRFTIPKGNAPNGATSILANEHLLTTLWLK

SEQ ID NO: 214758 - protein, 81 aa, Zea mays
  Clone ID: MRT4577_127458C.1.pep
VSYRSTIISLWLFVCTWLAMDGLKPQRLLLKKYKFSEFVVSETCWHEKCHCPLAATDTQGVLSSNYKSIMPIDLTQAIPYM

SEQ ID NO: 214759 - protein, 39 aa, Zea mays
  Clone ID: MRT4577_127459C.1.pep
YMPAVCVLGGGFDFWHRALYSTQPGNNLLPLSTPGVGVD

SEQ ID NO: 214760 - protein, 48 aa, Zea mays
  Clone ID: MRT4577_12745C.1.pep
CLRFRQSSKACTILCNMLTESNQVGAVSYYLHCFQSTFFHGLRPSCRI

SEQ ID NO: 214761 - protein, 141 aa, Zea mays
  unsure (1)..(141): unsure at all Xaa locations
  Clone ID: MRT4577_127460C.1.pep
QLPLPRAAHLLPHLSSDTAAQNHLPQAVCVLLEPTGVEEARTANYRQLFHPEQLIRGDHHAPNQFDRAHYTIVHENVHVRLDHIMKLVDNCTGLQGXFLAINTVXGGTGXSGLXSLLLXERLSXVHYRKNPNVEFTVYPSP

SEQ ID NO: 214762 - protein, 105 aa, Zea mays
  Clone ID: MRT4577_127461C.1.pep
GSVNSVISSSSMSCPVIPELRGETRVSMCDRWAKSVTGYGPVELAPQPLHLPVSWPPALPPARYAMAAVGTPPSVSYERVSPAPGSGEGACPGARVGGRKSWATR

SEQ ID NO: 214763 - protein, 50 aa, Zea mays
  Clone ID: MRT4577_127462C.1.pep
KFHLKFANMSRARGYGSNTRVDELNSEPAIPEVLPAPEEIMDYCRSKMIT

SEQ ID NO: 214764 - protein, 70 aa, Zea mays
  unsure (1)..(70): unsure at all Xaa locations
  Clone ID: MRT4577_127463C.1.pep
ECMLFAAIATSLVTYLTNVLHDSKLDAAENISAWSVVWFLTPLXGLCVADRYLGRYWSIVXFRAVYIVGV

SEQ ID NO: 214765 - protein, 80 aa, Zea mays
  unsure (1)..(80): unsure at all Xaa locations
  Clone ID: MRT4577_127464C.1.pep
TSKLKTNFLGNPVEIHPLGRTGVTLKKSCVEFDFVPPLTEVDRXLYVHTWVDFPGEMVTTNXTTVDKVVLXYFQSCCWFG

SEQ ID NO: 214766 - protein, 183 aa, Zea mays
  Clone ID: MRT4577_127465C.1.pep
ASQVDSRTLEKCEKLTSELSTCHDLIANLRNENARLIAKVDSNVCDDLYANLRNDHAISIAKIEKLNASLASLKSENEKLIAKAKDLDVCNASISDLRSENDILHAKIVELKTCKPSTSTVEHVSICTRCRDVDIDAIHDHMILIKQQNDHIAKLDAKIAEHELENENFKFACSMLYNGRRPD

SEQ ID NO: 214767 - protein, 90 aa, Zea mays
  Clone ID: MRT4577_127466C.1.pep
QIFNVQLQRVGQSPNRLVIGCEGRFLCWLTSLIQRLKCVCPASLLMWVTCRVFHRRIGVRVVHSNPPLGDPIKNIGGCMSRASKSDSSYS

SEQ ID NO: 214768 - protein, 920 aa, Zea mays
  Clone ID: MRT4577_127467C.1.pep
MSGDHAKKEMETGEKPTTSHGSTSSEESRTKRKEKKNSSKGKEKKSSSHQKEKKEKSSSHKTRRSGDKKKRMRKVVYYETDSSSTSGSDAASVTSKRQERKKYSKIPLRYPRISKHTPLLSVPLGKPPTFDGEDYARWSDLMRFHLTSLHKSIWDVVEFGAQVPFVGDEDYDEDEVAQIEHFNSQATTILLASLSREEYNKVQGWKSAKEVWDVLKTAHEGDELTKITKRETIEGELGRFRLRKGEEPQNMYNRLKTLVNQVRNLGSKKWDDHEVVKVILRSLIFLNPTQVQLICGNPRYTLMTPEEVIGNFVSFECMIEGSRKINELDEPSTSEAQPVAFKATEEKKEESTPSRQPIDASKLDNEEMALIIKSFRQILKQRKGKDYKSRSKKVCYKCGKPGHFIAKCPLSSDSDRDNDKKGKRREKKRYYKKKGGDAHVCREWDSDESSTDSSSDEDAANIVVTKGLLFPNVGHKCLMAKDGKKKKVKSKSSTRYESSSDNNASDEEDNLRTLFANLNMEQKEKLNELISAIHEKDDLLDSQEDFLIKENKKHVKVKNAYALEIEKCEKLSSELSTCHETIDNLRNENANLLAKVDSHVCNVSIANSRNNDDDLLARIEELNISLASLRIENEKLLAKAKDFDVCNATISDLITKNDMLHAKVVELKSCKPATSIVEHVSICTRCRDVDINAIHDHMSLIKQQNDHIAKLDAKIAEHNLENENFKFARSMLYSGRRPGIKDDIGFQKGDNVKLNTPPKRLFNFVKGKAPMPQDNEGYILYPAGYPEDKIRRIHSRKSHSGPNHAFMYKGETSSSRQPTRAKLPKKKTPSASNEHSVSFKTFDASYVLTNKSGKVVAKYVGGKHKGSKTCVWVPKVLVSNAKGPKTIWVYASGGSSWIIDSGCTNHMTGEKKMFSSYEKN
